United States Patent Application Publication US 2006/0046253 A1 - sequence listing, part 5

SEQ ID NO: 23508 - DNA, 25 bp, Saccharomyces pastorianus
ttatttccccatacagagtcgatag

SEQ ID NO: 23509 - DNA, 25 bp, Saccharomyces pastorianus
gctgattcgtgtgctgtatccatca

SEQ ID NO: 23510 - DNA, 25 bp, Saccharomyces pastorianus
tccaaaggccccagagttgcattta

SEQ ID NO: 23511 - DNA, 25 bp, Saccharomyces pastorianus
gtgcactggaacaattactgcttca

SEQ ID NO: 23512 - DNA, 25 bp, Saccharomyces pastorianus
gactgttgaagaatgtgctgctatc

SEQ ID NO: 23513 - DNA, 25 bp, Saccharomyces pastorianus
gtatccatcacttcatttatttccc

SEQ ID NO: 23514 - DNA, 25 bp, Saccharomyces pastorianus
gtatccaagctattcgctgattcgt

SEQ ID NO: 23515 - DNA, 25 bp, Saccharomyces pastorianus
gccatccagtaaagctccagctatg

SEQ ID NO: 23516 - DNA, 25 bp, Saccharomyces pastorianus
gccaagttactgttgatcctaagac

SEQ ID NO: 23517 - DNA, 25 bp, Saccharomyces pastorianus
acagcccatcctgatcttttgaagg

SEQ ID NO: 23518 - DNA, 25 bp, Saccharomyces pastorianus
agaaactggctgctttagaatcacc

SEQ ID NO: 23519 - DNA, 25 bp, Saccharomyces pastorianus
attcttaaaagacgctactctccct

SEQ ID NO: 23520 - DNA, 25 bp, Saccharomyces pastorianus
gctactctccctacaaatgactttg

SEQ ID NO: 23521 - DNA, 25 bp, Saccharomyces pastorianus
gctgttaatcagcagttatttttct

SEQ ID NO: 23522 - DNA, 25 bp, Saccharomyces pastorianus
gaactatcgctgacattattccaaa

SEQ ID NO: 23523 - DNA, 25 bp, Saccharomyces pastorianus
gaagcgatctctaatcaatttgttc

SEQ ID NO: 23524 - DNA, 25 bp, Saccharomyces pastorianus
aaaattgcatcctcgccaagttact

SEQ ID NO: 23525 - DNA, 25 bp, Saccharomyces pastorianus
aggccacgggccaaatgactgaaag

SEQ ID NO: 23526 - DNA, 25 bp, Saccharomyces pastorianus
tttagatgccactcgtgagaccgta

SEQ ID NO: 23527 - DNA, 25 bp, Saccharomyces pastorianus
taaggcatatctaaccaccatgtat

SEQ ID NO: 23528 - DNA, 25 bp, Saccharomyces pastorianus
aaagcagttattgctgtccaacaga

SEQ ID NO: 23529 - DNA, 25 bp, Saccharomyces pastorianus
gatgctgcctcatcgagcgataatg

SEQ ID NO: 23530 - DNA, 25 bp, Saccharomyces pastorianus
aaccaccatgtatataggccttgat

SEQ ID NO: 23531 - DNA, 25 bp, Saccharomyces pastorianus
agatctaagtctgatgctgcctcat

SEQ ID NO: 23532 - DNA, 25 bp, Saccharomyces pastorianus
acatttgaaatggagcggccttgtt

SEQ ID NO: 23533 - DNA, 25 bp, Saccharomyces pastorianus
aatcaaaattgcacatcccttcact

SEQ ID NO: 23534 - DNA, 25 bp, Saccharomyces pastorianus
gtttttaacctagctctacgctttg

SEQ ID NO: 23535 - DNA, 25 bp, Saccharomyces pastorianus
acatcccttcactaagccatttgaa

SEQ ID NO: 23536 - DNA, 25 bp, Saccharomyces pastorianus
ggtagccataaaactgagccagcat

SEQ ID NO: 23537 - DNA, 25 bp, Saccharomyces pastorianus
ggatgcaaagcaatcacgctcttca

SEQ ID NO: 23538 - DNA, 25 bp, Saccharomyces pastorianus
gtgaccacactgtcgcaactgaaga

SEQ ID NO: 23539 - DNA, 25 bp, Saccharomyces pastorianus
ggaattccatccaaagctatttaga

SEQ ID NO: 23540 - DNA, 25 bp, Saccharomyces pastorianus
gaatctcctttgagaccgaaggtcc

SEQ ID NO: 23541 - DNA, 25 bp, Saccharomyces pastorianus
aaggtccgtccattgaatgagcaag

SEQ ID NO: 23542 - DNA, 25 bp, Saccharomyces pastorianus
aaaagtcttcctcgacacacataag

SEQ ID NO: 23543 - DNA, 25 bp, Saccharomyces pastorianus
gtacatctctgggacttacgatgca

SEQ ID NO: 23544 - DNA, 25 bp, Saccharomyces pastorianus
gcaaggcgagtacgaatccaggaaa

SEQ ID NO: 23545 - DNA, 25 bp, Saccharomyces pastorianus
gatgcattggctgttcgtgaccaca

SEQ ID NO: 23546 - DNA, 25 bp, Saccharomyces pastorianus
aaacctggcgaggaccttcattatt

SEQ ID NO: 23547 - DNA, 25 bp, Saccharomyces pastorianus
ttttaccaggtcaacacttcactga

SEQ ID NO: 23548 - DNA, 25 bp, Saccharomyces pastorianus
gacggagctcttttgtttaactcga

SEQ ID NO: 23549 - DNA, 25 bp, Saccharomyces pastorianus
atattcaactcttctggatctcagc

SEQ ID NO: 23550 - DNA, 25 bp, Saccharomyces pastorianus
caactacccgatgctgatactttta

SEQ ID NO: 23551 - DNA, 25 bp, Saccharomyces pastorianus
ccccatatctgtgtcttttggaaat

SEQ ID NO: 23552 - DNA, 25 bp, Saccharomyces pastorianus
aactcgattattttgctttcagcat

SEQ ID NO: 23553 - DNA, 25 bp, Saccharomyces pastorianus
atctcagcacttttccaactattac

SEQ ID NO: 23554 - DNA, 25 bp, Saccharomyces pastorianus
gacctaaattttcaactacccgatg

SEQ ID NO: 23555 - DNA, 25 bp, Saccharomyces pastorianus
ctgttcatcatggagtactttagca

SEQ ID NO: 23556 - DNA, 25 bp, Saccharomyces pastorianus
tgagaaaacatataccgccgattgg

SEQ ID NO: 23557 - DNA, 25 bp, Saccharomyces pastorianus
atccagttgtgcctaaacagtttac

SEQ ID NO: 23558 - DNA, 25 bp, Saccharomyces pastorianus
attactgctggaacactgctagatg

SEQ ID NO: 23559 - DNA, 25 bp, Saccharomyces pastorianus
gggcaaggtcacttccgagaatgaa

SEQ ID NO: 23560 - DNA, 25 bp, Saccharomyces pastorianus
atcggttaacgatcctgcacttatt

SEQ ID NO: 23561 - DNA, 25 bp, Saccharomyces pastorianus
atccactttccgacaattatgcttc

SEQ ID NO: 23562 - DNA, 25 bp, Saccharomyces pastorianus
ggccaagttcgaattcaccaagttt

SEQ ID NO: 23563 - DNA, 25 bp, Saccharomyces pastorianus
gaacgtccagtttccggatttagtg

SEQ ID NO: 23564 - DNA, 25 bp, Saccharomyces pastorianus
tatgcttcgccaaacgtttatgtcg

SEQ ID NO: 23565 - DNA, 25 bp, Saccharomyces pastorianus
gtcgttaacgatatcactcccaaag

SEQ ID NO: 23566 - DNA, 25 bp, Saccharomyces pastorianus
agaagctgagcctaatgccatccat

SEQ ID NO: 23567 - DNA, 25 bp, Saccharomyces pastorianus
tagggctggagcgtcttccaagaac

SEQ ID NO: 23568 - DNA, 25 bp, Saccharomyces pastorianus
gttaaagcatgccatttctgctgcc

SEQ ID NO: 23569 - DNA, 25 bp, Saccharomyces pastorianus
attggtgacggtcccagacggtata

SEQ ID NO: 23570 - DNA, 25 bp, Saccharomyces pastorianus
aacagcaggcaggttacggcacaca

SEQ ID NO: 23571 - DNA, 25 bp, Saccharomyces pastorianus
acagcggaatcgttattcagggaac

SEQ ID NO: 23572 - DNA, 25 bp, Saccharomyces pastorianus
ggaagacgacgccagtggacaatca

SEQ ID NO: 23573 - DNA, 25 bp, Saccharomyces pastorianus
gcgccgctccgaagtcgaatacatt

SEQ ID NO: 23574 - DNA, 25 bp, Saccharomyces pastorianus
gccaacgatgaatacgatgccgagc

SEQ ID NO: 23575 - DNA, 25 bp, Saccharomyces pastorianus
agaacgaggccctgctgagggaaca

SEQ ID NO: 23576 - DNA, 25 bp, Saccharomyces pastorianus
gagattttcagccagtcgcaagtag

SEQ ID NO: 23577 - DNA, 25 bp, Saccharomyces pastorianus
gagccgatctacagacgcagccagt

SEQ ID NO: 23578 - DNA, 25 bp, Saccharomyces pastorianus
ggacaatcagcgtcctcgagccgat

SEQ ID NO: 23579 - DNA, 25 bp, Saccharomyces pastorianus
acattcactgtacttacatctccgg

SEQ ID NO: 23580 - DNA, 25 bp, Saccharomyces pastorianus
cttacatctccggatttggccaaaa

SEQ ID NO: 23581 - DNA, 25 bp, Saccharomyces pastorianus
gcatactatggaacgtaagccttat

SEQ ID NO: 23582 - DNA, 25 bp, Saccharomyces pastorianus
aagcaattactttcggagcagcata

SEQ ID NO: 23583 - DNA, 25 bp, Saccharomyces pastorianus
gaaatttttgatgttcgcttatcag

SEQ ID NO: 23584 - DNA, 25 bp, Saccharomyces pastorianus
acctttgccaggttcaagaccatcg

SEQ ID NO: 23585 - DNA, 25 bp, Saccharomyces pastorianus
taaggagcctgttagatcaagaaat

SEQ ID NO: 23586 - DNA, 25 bp, Saccharomyces pastorianus
ttttttaaccttgcaatcccatttg

SEQ ID NO: 23587 - DNA, 25 bp, Saccharomyces pastorianus
caatcccatttgagcctatcatcaa

SEQ ID NO: 23588 - DNA, 25 bp, Saccharomyces pastorianus
ggttcaagaccatcgtgcaatcaga

SEQ ID NO: 23589 - DNA, 25 bp, Saccharomyces pastorianus
tttttccttcattctacaacccatg

SEQ ID NO: 23590 - DNA, 25 bp, Saccharomyces pastorianus
tctacaacccatgcaaactttttta

SEQ ID NO: 23591 - DNA, 25 bp, Saccharomyces pastorianus
agcttaacacaacctcagcaacaag

SEQ ID NO: 23592 - DNA, 25 bp, Saccharomyces pastorianus
agaggtgcacatgtatccccaaaaa

SEQ ID NO: 23593 - DNA, 25 bp, Saccharomyces pastorianus
ggcaccaatcctacatggtctttgt

SEQ ID NO: 23594 - DNA, 25 bp, Saccharomyces pastorianus
aatatttcaagctttgcgccccaag

SEQ ID NO: 23595 - DNA, 25 bp, Saccharomyces pastorianus
ggcagtaaagtttccggcaccaatc

SEQ ID NO: 23596 - DNA, 25 bp, Saccharomyces pastorianus
agagcaaggtttgccattcaaccat

SEQ ID NO: 23597 - DNA, 25 bp, Saccharomyces pastorianus
ttgacccagcattagccaaggcagt

SEQ ID NO: 23598 - DNA, 25 bp, Saccharomyces pastorianus
tgttgttgtcttggataacgctgcc

SEQ ID NO: 23599 - DNA, 25 bp, Saccharomyces pastorianus
caagcggcactgtataggttatctg

SEQ ID NO: 23600 - DNA, 25 bp, Saccharomyces pastorianus
ttgaatccgttacacattgacccag

SEQ ID NO: 23601 - DNA, 25 bp, Saccharomyces pastorianus
gggacattcttcatcagaggtgcac

SEQ ID NO: 23602 - DNA, 25 bp, Saccharomyces pastorianus
agcagctgtagtagtcggtggtttc

SEQ ID NO: 23603 - DNA, 25 bp, Saccharomyces pastorianus
ggcccctacagactacgtatacaag

SEQ ID NO: 23604 - DNA, 25 bp, Saccharomyces pastorianus
agacctcgtaagttccagattgtag

SEQ ID NO: 23605 - DNA, 25 bp, Saccharomyces pastorianus
tcttccttgagtaccgacgacgaca

SEQ ID NO: 23606 - DNA, 25 bp, Saccharomyces pastorianus
gagggattaccacgactcgctgaaa

SEQ ID NO: 23607 - DNA, 25 bp, Saccharomyces pastorianus
aagaacgtggtctccatggctatcc

SEQ ID NO: 23608 - DNA, 25 bp, Saccharomyces pastorianus
gaccaattctggtctcaattcgaca

SEQ ID NO: 23609 - DNA, 25 bp, Saccharomyces pastorianus
tctttaaatatcaacggcccttcca

SEQ ID NO: 23610 - DNA, 25 bp, Saccharomyces pastorianus
tttctccaataaattctctatcccc

SEQ ID NO: 23611 - DNA, 25 bp, Saccharomyces pastorianus
ccacctcaatggaaagcggctcaag

SEQ ID NO: 23612 - DNA, 25 bp, Saccharomyces pastorianus
gaccggttcaacatggaccttttca

SEQ ID NO: 23613 - DNA, 25 bp, Saccharomyces pastorianus
aaggaccttgcatccaagccaagta

SEQ ID NO: 23614 - DNA, 25 bp, Saccharomyces pastorianus
gcccaggatgatgtgacttcgtctt

SEQ ID NO: 23615 - DNA, 25 bp, Saccharomyces pastorianus
taggctatggcacaaccgcttctgt

SEQ ID NO: 23616 - DNA, 25 bp, Saccharomyces pastorianus
aaggacacaggctcgttgacttggt

SEQ ID NO: 23617 - DNA, 25 bp, Saccharomyces pastorianus
gacttcccaagtcggttgcggtttg

SEQ ID NO: 23618 - DNA, 25 bp, Saccharomyces pastorianus
gattacgtcatttgctcttaccaga

SEQ ID NO: 23619 - DNA, 25 bp, Saccharomyces pastorianus
ttccggcggcgcttatggtgaaaat

SEQ ID NO: 23620 - DNA, 25 bp, Saccharomyces pastorianus
tcaggaaacttggtccattccggcg

SEQ ID NO: 23621 - DNA, 25 bp, Saccharomyces pastorianus
gaaccctggtaattacattggcgaa

SEQ ID NO: 23622 - DNA, 25 bp, Saccharomyces pastorianus
ttaaatcggtacaagccacccagca

SEQ ID NO: 23623 - DNA, 25 bp, Saccharomyces pastorianus
gacaccttggctacatatgcgcaaa

SEQ ID NO: 23624 - DNA, 25 bp, Saccharomyces pastorianus
gcttctgtcgatgcttggtacaacg

SEQ ID NO: 23625 - DNA, 25 bp, Saccharomyces pastorianus
cgaacagcattgaagtggtcgtttg

SEQ ID NO: 23626 - DNA, 25 bp, Saccharomyces pastorianus
aacggtgggtacaaaagttcatgca

SEQ ID NO: 23627 - DNA, 25 bp, Saccharomyces pastorianus
aaagaataggcatttcgtggatcga

SEQ ID NO: 23628 - DNA, 25 bp, Saccharomyces pastorianus
ttggcaaatgcagtagagtttctat

SEQ ID NO: 23629 - DNA, 25 bp, Saccharomyces pastorianus
ttcggatgcatctcaaaacttaact

SEQ ID NO: 23630 - DNA, 25 bp, Saccharomyces pastorianus
tcgtggatcgatggacagtttttgt

SEQ ID NO: 23631 - DNA, 25 bp, Saccharomyces pastorianus
gaatttcttccaatgtacgatgtac

SEQ ID NO: 23632 - DNA, 25 bp, Saccharomyces pastorianus
atgagcatgaggtttcagccaaatt

SEQ ID NO: 23633 - DNA, 25 bp, Saccharomyces pastorianus
ggtcgtttgctgtggcattttattc

SEQ ID NO: 23634 - DNA, 25 bp, Saccharomyces pastorianus
gtaaccacatgatttgctcgagctg

SEQ ID NO: 23635 - DNA, 25 bp, Saccharomyces pastorianus
tggatttgtgaaggcccatgggccc

SEQ ID NO: 23636 - DNA, 25 bp, Saccharomyces pastorianus
gagcccaaggctatgcagatgacta

SEQ ID NO: 23637 - DNA, 25 bp, Saccharomyces pastorianus
tcagttcggtcgacttgttgggcaa

SEQ ID NO: 23638 - DNA, 25 bp, Saccharomyces pastorianus
aacggagtacaagaaccctgcgatt

SEQ ID NO: 23639 - DNA, 25 bp, Saccharomyces pastorianus
gagcttattttcagttcggtcgact

SEQ ID NO: 23640 - DNA, 25 bp, Saccharomyces pastorianus
cattgctacttcaccagtgcatgaa

SEQ ID NO: 23641 - DNA, 25 bp, Saccharomyces pastorianus
aatcgcatacttctataacggttac

SEQ ID NO: 23642 - DNA, 25 bp, Saccharomyces pastorianus
agaccgaagatccatgggcttaccc

SEQ ID NO: 23643 - DNA, 25 bp, Saccharomyces pastorianus
aaggaccttttggtgtcactgacat

SEQ ID NO: 23644 - DNA, 25 bp, Saccharomyces pastorianus
tgcgattgacgccttggactcagac

SEQ ID NO: 23645 - DNA, 25 bp, Saccharomyces pastorianus
gtggacaatccactggacgccattg

SEQ ID NO: 23646 - DNA, 25 bp, Saccharomyces pastorianus
accgccctttatgaacgtgctttat

SEQ ID NO: 23647 - DNA, 25 bp, Saccharomyces pastorianus
gtgagcaatagacaccgccatctag

SEQ ID NO: 23648 - DNA, 25 bp, Saccharomyces pastorianus
aatgaactctctaccggaagacggg

SEQ ID NO: 23649 - DNA, 25 bp, Saccharomyces pastorianus
tagaaaactgcccaacgttgtcgag

SEQ ID NO: 23650 - DNA, 25 bp, Saccharomyces pastorianus
gtaagcacactcaaggcaatggcca

SEQ ID NO: 23651 - DNA, 25 bp, Saccharomyces pastorianus
ggacgatcccactgtaatgaactct

SEQ ID NO: 23652 - DNA, 25 bp, Saccharomyces pastorianus
aaacaacacatcataggcccattca

SEQ ID NO: 23653 - DNA, 25 bp, Saccharomyces pastorianus
taggcccattcatcgcactaggaaa

SEQ ID NO: 23654 - DNA, 25 bp, Saccharomyces pastorianus
agatttgttaagctggtggcccgtc

SEQ ID NO: 23655 - DNA, 25 bp, Saccharomyces pastorianus
gatcctgaacattatcgtccacgat

SEQ ID NO: 23656 - DNA, 25 bp, Saccharomyces pastorianus
tagatatgcatcaaccacggtggta

SEQ ID NO: 23657 - DNA, 25 bp, Saccharomyces pastorianus
aagcgctccaatgttcccagtagtt

SEQ ID NO: 23658 - DNA, 25 bp, Saccharomyces pastorianus
gaagtccctgaggattaacaactta

SEQ ID NO: 23659 - DNA, 25 bp, Saccharomyces pastorianus
aacagatcagccacaagaagtccct

SEQ ID NO: 23660 - DNA, 25 bp, Saccharomyces pastorianus
actcccgggatgagcacggtacaga

SEQ ID NO: 23661 - DNA, 25 bp, Saccharomyces pastorianus
agggtaaacaagacgcgagcacaga

SEQ ID NO: 23662 - DNA, 25 bp, Saccharomyces pastorianus
gaagctgcccttcaagagtcttgtc

SEQ ID NO: 23663 - DNA, 25 bp, Saccharomyces pastorianus
aaatgctgacgagctggtgcagaat

SEQ ID NO: 23664 - DNA, 25 bp, Saccharomyces pastorianus
aagagattactgacgccaacaaaga

SEQ ID NO: 23665 - DNA, 25 bp, Saccharomyces pastorianus
agagtcttgtccagatccacaacaa

SEQ ID NO: 23666 - DNA, 25 bp, Saccharomyces pastorianus
gagggtgatactagcggacgccact

SEQ ID NO: 23667 - DNA, 25 bp, Saccharomyces pastorianus
gatccacaacaagcttctgggcaag

SEQ ID NO: 23668 - DNA, 25 bp, Saccharomyces pastorianus
gagtagctgttgaggaccgaaacga

SEQ ID NO: 23669 - DNA, 25 bp, Saccharomyces pastorianus
ggagaattcgcatttgcagtctaaa

SEQ ID NO: 23670 - DNA, 25 bp, Saccharomyces pastorianus
aaacgtggttgcagattcagatgat

SEQ ID NO: 23671 - DNA, 25 bp, Saccharomyces pastorianus
aatccagagttgttagctgcacaag

SEQ ID NO: 23672 - DNA, 25 bp, Saccharomyces pastorianus
atgacagaggttcccaaggacacaa

SEQ ID NO: 23673 - DNA, 25 bp, Saccharomyces pastorianus
tttccaggacacttccgcagagaga

SEQ ID NO: 23674 - DNA, 25 bp, Saccharomyces pastorianus
ggatagactgttacatttccaggac

SEQ ID NO: 23675 - DNA, 25 bp, Saccharomyces pastorianus
cgacctgaaacacatacacgctttg

SEQ ID NO: 23676 - DNA, 25 bp, Saccharomyces pastorianus
gaagcaattcgataggcctacgtat

SEQ ID NO: 23677 - DNA, 25 bp, Saccharomyces pastorianus
gttgtcagcatgaacataggcccca

SEQ ID NO: 23678 - DNA, 25 bp, Saccharomyces pastorianus
gataatttcagtggtctaagcgacg

SEQ ID NO: 23679 - DNA, 25 bp, Saccharomyces pastorianus
ataggcctacgtatgtgagcagaaa

SEQ ID NO: 23680 - DNA, 25 bp, Saccharomyces pastorianus
tctgttattgaattggaccctccgt

SEQ ID NO: 23681 - DNA, 25 bp, Saccharomyces pastorianus
ttttgcatctgggtcatttggctaa

SEQ ID NO: 23682 - DNA, 25 bp, Saccharomyces pastorianus
agaactattgactccggctttcaaa

SEQ ID NO: 23683 - DNA, 25 bp, Saccharomyces pastorianus
tttggctaagagttttgggctgcgt

SEQ ID NO: 23684 - DNA, 25 bp, Saccharomyces pastorianus
gaataaaatgttccgcatggctcgt

SEQ ID NO: 23685 - DNA, 25 bp, Saccharomyces pastorianus
gagcttacgctacacatatatcgca

SEQ ID NO: 23686 - DNA, 25 bp, Saccharomyces pastorianus
attcaaccataccatcccatgggtt

SEQ ID NO: 23687 - DNA, 25 bp, Saccharomyces pastorianus
atttgcatagagtgggtcgtaccgc

SEQ ID NO: 23688 - DNA, 25 bp, Saccharomyces pastorianus
ccgtttgctgttgaggaccatttgc

SEQ ID NO: 23689 - DNA, 25 bp, Saccharomyces pastorianus
tgggacactaatgccaccacatggc

SEQ ID NO: 23690 - DNA, 25 bp, Saccharomyces pastorianus
ggctgcgtgaaagacctaaggctat

SEQ ID NO: 23691 - DNA, 25 bp, Saccharomyces pastorianus
ttagacttcacacgtcgtacagacg

SEQ ID NO: 23692 - DNA, 25 bp, Saccharomyces pastorianus
atacctgtgaccctgattgtcgata

SEQ ID NO: 23693 - DNA, 25 bp, Saccharomyces pastorianus
aaaatgcattgcgtggacccaccat

SEQ ID NO: 23694 - DNA, 25 bp, Saccharomyces pastorianus
ttttacgtggtcaccgaaagtcaca

SEQ ID NO: 23695 - DNA, 25 bp, Saccharomyces pastorianus
aaatctcgtgggtacttactctgta

SEQ ID NO: 23696 - DNA, 25 bp, Saccharomyces pastorianus
actacaccgctcaagaatacatcac

SEQ ID NO: 23697 - DNA, 25 bp, Saccharomyces pastorianus
gtatgtttccgttgtcctctgatga

SEQ ID NO: 23698 - DNA, 25 bp, Saccharomyces pastorianus
tttcattgttgaaccacgcagccaa

SEQ ID NO: 23699 - DNA, 25 bp, Saccharomyces pastorianus
gaacggtcaacttttcgtgtccaga

SEQ ID NO: 23700 - DNA, 25 bp, Saccharomyces pastorianus
ggaaccagctatactctttgcttga

SEQ ID NO: 23701 - DNA, 25 bp, Saccharomyces pastorianus
gtgtccagagccaagaagtcccgta

SEQ ID NO: 23702 - DNA, 25 bp, Saccharomyces pastorianus
gttccagatatttgctcttcaggta

SEQ ID NO: 23703 - DNA, 25 bp, Saccharomyces pastorianus
gaatgggaattacttggcctgactt

SEQ ID NO: 23704 - DNA, 25 bp, Saccharomyces pastorianus
gattacatgctcgaatgcctttcag

SEQ ID NO: 23705 - DNA, 25 bp, Saccharomyces pastorianus
tatcagttgccaccagctcttaagt

SEQ ID NO: 23706 - DNA, 25 bp, Saccharomyces pastorianus
attttggcgaggttcgaccctatca

SEQ ID NO: 23707 - DNA, 25 bp, Saccharomyces pastorianus
gactcttcggatgaactttccacag

SEQ ID NO: 23708 - DNA, 25 bp, Saccharomyces pastorianus
gacctactcgtgaaactgatctcct

SEQ ID NO: 23709 - DNA, 25 bp, Saccharomyces pastorianus
actgatctccttccgtatacgattt

SEQ ID NO: 23710 - DNA, 25 bp, Saccharomyces pastorianus
gttgacattgttttggacctactcg

SEQ ID NO: 23711 - DNA, 25 bp, Saccharomyces pastorianus
tgcagtggcatgtctacgaaccagt

SEQ ID NO: 23712 - DNA, 25 bp, Saccharomyces pastorianus
agacttagcttctgaacgtccacac

SEQ ID NO: 23713 - DNA, 25 bp, Saccharomyces pastorianus
aaaccgcgattgaaagagctccgat

SEQ ID NO: 23714 - DNA, 25 bp, Saccharomyces pastorianus
aaggaacctatgacagacgcttcaa

SEQ ID NO: 23715 - DNA, 25 bp, Saccharomyces pastorianus
tactcttcgaatgtcaatacccctg

SEQ ID NO: 23716 - DNA, 25 bp, Saccharomyces pastorianus
taggcacgaactatcaccagagagt

SEQ ID NO: 23717 - DNA, 25 bp, Saccharomyces pastorianus
ggatttctcgtcatcacagttacat

SEQ ID NO: 23718 - DNA, 25 bp, Saccharomyces pastorianus
acgcttcaatgagttctaggcacga

SEQ ID NO: 23719 - DNA, 25 bp, Saccharomyces pastorianus
gaagcccttccctatcaagtttcaa

SEQ ID NO: 23720 - DNA, 25 bp, Saccharomyces pastorianus
gtttgtaatattgcgaagcccttta

SEQ ID NO: 23721 - DNA, 25 bp, Saccharomyces pastorianus
atcaatctactctcacgatactctt

SEQ ID NO: 23722 - DNA, 25 bp, Saccharomyces pastorianus
tataaggcatttggcggatttctcg

SEQ ID NO: 23723 - DNA, 25 bp, Saccharomyces pastorianus
gaacatcacgttgccaaggaaccta

SEQ ID NO: 23724 - DNA, 25 bp, Saccharomyces pastorianus
gggcaagagatgatccttctttctt

SEQ ID NO: 23725 - DNA, 25 bp, Saccharomyces pastorianus
gggttttttggcattataggtcatt

SEQ ID NO: 23726 - DNA, 25 bp, Saccharomyces pastorianus
gaattctctgtattgtttcgccatt

SEQ ID NO: 23727 - DNA, 25 bp, Saccharomyces pastorianus
ttttatgggtataaccagctccctt

SEQ ID NO: 23728 - DNA, 25 bp, Saccharomyces pastorianus
agttctgatttccataagctccgtc

SEQ ID NO: 23729 - DNA, 25 bp, Saccharomyces pastorianus
tttcttcatctttcagatagttctg

SEQ ID NO: 23730 - DNA, 25 bp, Saccharomyces pastorianus
tctctgctcattgggaattctctgt

SEQ ID NO: 23731 - DNA, 25 bp, Saccharomyces pastorianus
taagctccgtcatttggtcgattta

SEQ ID NO: 23732 - DNA, 25 bp, Saccharomyces pastorianus
atttgggttcgttatggcaactatt

SEQ ID NO: 23733 - DNA, 25 bp, Saccharomyces pastorianus
gcaaaattggatctctctgctcatt

SEQ ID NO: 23734 - DNA, 25 bp, Saccharomyces pastorianus
gatcatcttactatgcttgtatttc

SEQ ID NO: 23735 - DNA, 25 bp, Saccharomyces pastorianus
tatacgcgtccaatgctataaggaa

SEQ ID NO: 23736 - DNA, 25 bp, Saccharomyces pastorianus
gaacagcagttcgaagacctggata

SEQ ID NO: 23737 - DNA, 25 bp, Saccharomyces pastorianus
atgggcgtcaattcggatgctatgc

SEQ ID NO: 23738 - DNA, 25 bp, Saccharomyces pastorianus
acagctactgaaactggcatccaga

SEQ ID NO: 23739 - DNA, 25 bp, Saccharomyces pastorianus
gagtggattctgtcgcatcaagagt

SEQ ID NO: 23740 - DNA, 25 bp, Saccharomyces pastorianus
aatgagacaggtgtccgcatccatg

SEQ ID NO: 23741 - DNA, 25 bp, Saccharomyces pastorianus
gtgcaaaccgccgtcacaatgagac

SEQ ID NO: 23742 - DNA, 25 bp, Saccharomyces pastorianus
aggagatctcccgtatatacgcgtc

SEQ ID NO: 23743 - DNA, 25 bp, Saccharomyces pastorianus
taattccgccgcaggcttggagaat

SEQ ID NO: 23744 - DNA, 25 bp, Saccharomyces pastorianus
aaaacgagcggttacagctactgaa

SEQ ID NO: 23745 - DNA, 25 bp, Saccharomyces pastorianus
ggagaatacgcttttccaactaaag

SEQ ID NO: 23746 - DNA, 25 bp, Saccharomyces pastorianus
attgcccaattttacgtcgccttgt

SEQ ID NO: 23747 - DNA, 25 bp, Saccharomyces pastorianus
aagagctatcattcaaatcccctac

SEQ ID NO: 23748 - DNA, 25 bp, Saccharomyces pastorianus
agtgggcggttctccaagtgccgaa

SEQ ID NO: 23749 - DNA, 25 bp, Saccharomyces pastorianus
gaggcttatttgtcattcccacttg

SEQ ID NO: 23750 - DNA, 25 bp, Saccharomyces pastorianus
gggtcttatcgcatttgtggccgct

SEQ ID NO: 23751 - DNA, 25 bp, Saccharomyces pastorianus
gggttatcatcacttttcacatggg

SEQ ID NO: 23752 - DNA, 25 bp, Saccharomyces pastorianus
gttttcgctatgtacatcggtcaca

SEQ ID NO: 23753 - DNA, 25 bp, Saccharomyces pastorianus
ggtcgggatcattatcacttccata

SEQ ID NO: 23754 - DNA, 25 bp, Saccharomyces pastorianus
gaagttactcatcccagccgaagaa

SEQ ID NO: 23755 - DNA, 25 bp, Saccharomyces pastorianus
caagtgtttgcctacgtggatcgta

SEQ ID NO: 23756 - DNA, 25 bp, Saccharomyces pastorianus
ttactggccttgtctgggttatcat

SEQ ID NO: 23757 - DNA, 25 bp, Saccharomyces pastorianus
agggaatgctaacccgcgagatcat

SEQ ID NO: 23758 - DNA, 25 bp, Saccharomyces pastorianus
atatcatggtctttgctcatggcca

SEQ ID NO: 23759 - DNA, 25 bp, Saccharomyces pastorianus
tacgtgccaggcaaaccgtggactt

SEQ ID NO: 23760 - DNA, 25 bp, Saccharomyces pastorianus
gatcggtgtgttgtcgtacgcgcat

SEQ ID NO: 23761 - DNA, 25 bp, Saccharomyces pastorianus
gtgccatcggcagaatccagaactt

SEQ ID NO: 23762 - DNA, 25 bp, Saccharomyces pastorianus
gtacgcgcatcacaacattgacgag

SEQ ID NO: 23763 - DNA, 25 bp, Saccharomyces pastorianus
gagaccacccagcagatcgggttga

SEQ ID NO: 23764 - DNA, 25 bp, Saccharomyces pastorianus
agctggactcttacagacacttggt

SEQ ID NO: 23765 - DNA, 25 bp, Saccharomyces pastorianus
gagacagtcccatacgttaagctgg

SEQ ID NO: 23766 - DNA, 25 bp, Saccharomyces pastorianus
gacacttggtcgacaatccgtgctt

SEQ ID NO: 23767 - DNA, 25 bp, Saccharomyces pastorianus
tgcattggaactagcgggcccattt

SEQ ID NO: 23768 - DNA, 25 bp, Saccharomyces pastorianus
gaggtcctagacatggaacccgata

SEQ ID NO: 23769 - DNA, 25 bp, Saccharomyces pastorianus
gacgtgtctacaagcgagttccatt

SEQ ID NO: 23770 - DNA, 25 bp, Saccharomyces pastorianus
gctgcggtgcattgaatggccaatt

SEQ ID NO: 23771 - DNA, 25 bp, Saccharomyces pastorianus
agcgcgatcctggttgtctggcatt

SEQ ID NO: 23772 - DNA, 25 bp, Saccharomyces pastorianus
gaagatcgacatccagtatgccaaa

SEQ ID NO: 23773 - DNA, 25 bp, Saccharomyces pastorianus
gttctcattcgaggctgttcagcgc

SEQ ID NO: 23774 - DNA, 25 bp, Saccharomyces pastorianus
tgtctggcattacagcgaactcctg

SEQ ID NO: 23775 - DNA, 25 bp, Saccharomyces pastorianus
acaaagatacatcggctgcggtgca

SEQ ID NO: 23776 - DNA, 25 bp, Saccharomyces pastorianus
tcatcggcatataccttgtttctgt

SEQ ID NO: 23777 - DNA, 25 bp, Saccharomyces pastorianus
gatcgagaccgtggaacttctggac

SEQ ID NO: 23778 - DNA, 25 bp, Saccharomyces pastorianus
gaactcctgctcttgatcatcggca

SEQ ID NO: 23779 - DNA, 25 bp, Saccharomyces pastorianus
agatcggctctaccggagacgacaa

SEQ ID NO: 23780 - DNA, 25 bp, Saccharomyces pastorianus
caccgacaagttgcagtccgtgtac

SEQ ID NO: 23781 - DNA, 25 bp, Saccharomyces pastorianus
aaagccatcgtgtccaccggattgg

SEQ ID NO: 23782 - DNA, 25 bp, Saccharomyces pastorianus
tgagcaagtccgaaagcgtccccaa

SEQ ID NO: 23783 - DNA, 25 bp, Saccharomyces pastorianus
agggagttccttatcaagcctctgc

SEQ ID NO: 23784 - DNA, 25 bp, Saccharomyces pastorianus
gacaacaaggtcagcgactcttcgt

SEQ ID NO: 23785 - DNA, 25 bp, Saccharomyces pastorianus
caagctggacgagttggtcaacctt

SEQ ID NO: 23786 - DNA, 25 bp, Saccharomyces pastorianus
ggacctgggcaatgctactatcgag

SEQ ID NO: 23787 - DNA, 25 bp, Saccharomyces pastorianus
ggtgttgatggcttgctgtacgatt

SEQ ID NO: 23788 - DNA, 25 bp, Saccharomyces pastorianus
gattggaagtcgcattctggcaccc

SEQ ID NO: 23789 - DNA, 25 bp, Saccharomyces pastorianus
aacatctctaacacgctgttgaggg

SEQ ID NO: 23790 - DNA, 25 bp, Saccharomyces pastorianus
caaccacgcaccatttcgttgttta

SEQ ID NO: 23791 - DNA, 25 bp, Saccharomyces pastorianus
tatcgcaccggttcgacgtcgagat

SEQ ID NO: 23792 - DNA, 25 bp, Saccharomyces pastorianus
attgcagaggcagatccccaagctt

SEQ ID NO: 23793 - DNA, 25 bp, Saccharomyces pastorianus
tgaagagcgacgtatcgcaccggtt

SEQ ID NO: 23794 - DNA, 25 bp, Saccharomyces pastorianus
ccagaagggtctgtggaatccgcag

SEQ ID NO: 23795 - DNA, 25 bp, Saccharomyces pastorianus
agtacatgaagacgtcgtgcccgca

SEQ ID NO: 23796 - DNA, 25 bp, Saccharomyces pastorianus
atctcaagtcgcagaagtgcctcca

SEQ ID NO: 23797 - DNA, 25 bp, Saccharomyces pastorianus
agcttgccgcagtgctcaagtacaa

SEQ ID NO: 23798 - DNA, 25 bp, Saccharomyces pastorianus
cagggcacgacgtcattgcagaggc

SEQ ID NO: 23799 - DNA, 25 bp, Saccharomyces pastorianus
cgtgggaccaactgcagtacatgaa

SEQ ID NO: 23800 - DNA, 25 bp, Saccharomyces pastorianus
aagtgcctccagtcgctgaagagcg

SEQ ID NO: 23801 - DNA, 25 bp, Saccharomyces pastorianus
tgcagtagctttcccctggacaaaa

SEQ ID NO: 23802 - DNA, 25 bp, Saccharomyces pastorianus
taagaattttgatcctgaagccatg

SEQ ID NO: 23803 - DNA, 25 bp, Saccharomyces pastorianus
tgatgatccaaactacccagtcgtt

SEQ ID NO: 23804 - DNA, 25 bp, Saccharomyces pastorianus
atccaggttcttgttgttaccggca

SEQ ID NO: 23805 - DNA, 25 bp, Saccharomyces pastorianus
ggatgaaattcctatacgcactaag

SEQ ID NO: 23806 - DNA, 25 bp, Saccharomyces pastorianus
aatggtcccatttgccatcttgcat

SEQ ID NO: 23807 - DNA, 25 bp, Saccharomyces pastorianus
gcttctgtgcattgaaatggtccca

SEQ ID NO: 23808 - DNA, 25 bp, Saccharomyces pastorianus
gattgccttggttgtggtgatctga

SEQ ID NO: 23809 - DNA, 25 bp, Saccharomyces pastorianus
gataattttcgcctcttactggcaa

SEQ ID NO: 23810 - DNA, 25 bp, Saccharomyces pastorianus
tggccagagatctttccctgatgat

SEQ ID NO: 23811 - DNA, 25 bp, Saccharomyces pastorianus
caaacattgtttgctggtcctttat

SEQ ID NO: 23812 - DNA, 25 bp, Saccharomyces pastorianus
attaaccacgcctttggactgtata

SEQ ID NO: 23813 - DNA, 25 bp, Saccharomyces pastorianus
gtagcgagactgtttctatcggaat

SEQ ID NO: 23814 - DNA, 25 bp, Saccharomyces pastorianus
gtctgctagcaagtacttcaaccca

SEQ ID NO: 23815 - DNA, 25 bp, Saccharomyces pastorianus
gaaggacgccaatactttcggcaga

SEQ ID NO: 23816 - DNA, 25 bp, Saccharomyces pastorianus
acgaattctgcaaagctcgcttgat

SEQ ID NO: 23817 - DNA, 25 bp, Saccharomyces pastorianus
ggtactgttgctactattgctgctg

SEQ ID NO: 23818 - DNA, 25 bp, Saccharomyces pastorianus
agtggtgccacttgtgccgcattaa

SEQ ID NO: 23819 - DNA, 25 bp, Saccharomyces pastorianus
gatatgcagacacatcagccaatga

SEQ ID NO: 23820 - DNA, 25 bp, Saccharomyces pastorianus
gcggcgttttattattcctatccaa

SEQ ID NO: 23821 - DNA, 25 bp, Saccharomyces pastorianus
tgaacatcccatttgctgctttcaa

SEQ ID NO: 23822 - DNA, 25 bp, Saccharomyces pastorianus
gcttcgagagctatactggaggttc

SEQ ID NO: 23823 - DNA, 25 bp, Saccharomyces pastorianus
cgcctatcatgctgattggcctgaa

SEQ ID NO: 23824 - DNA, 25 bp, Saccharomyces pastorianus
gactttcccgacagattatatccca

SEQ ID NO: 23825 - DNA, 25 bp, Saccharomyces pastorianus
tagtagactcagaccgctctcatac

SEQ ID NO: 23826 - DNA, 25 bp, Saccharomyces pastorianus
gacctatacgaagctgatgacctct

SEQ ID NO: 23827 - DNA, 25 bp, Saccharomyces pastorianus
tgacctctcagatttggtggatcct

SEQ ID NO: 23828 - DNA, 25 bp, Saccharomyces pastorianus
aaacgccgatgtcctaatgatttgt

SEQ ID NO: 23829 - DNA, 25 bp, Saccharomyces pastorianus
atagaactagcgctgtgggacactg

SEQ ID NO: 23830 - DNA, 25 bp, Saccharomyces pastorianus
gattccctgtattctaaggagcctt

SEQ ID NO: 23831 - DNA, 25 bp, Saccharomyces pastorianus
atgtccaatgctcagctcggttgaa

SEQ ID NO: 23832 - DNA, 25 bp, Saccharomyces pastorianus
gaagatctttggtttccggaggtca

SEQ ID NO: 23833 - DNA, 25 bp, Saccharomyces pastorianus
acacacattgctatttgattccctg

SEQ ID NO: 23834 - DNA, 25 bp, Saccharomyces pastorianus
gacgacaaattcactgtttccgcca

SEQ ID NO: 23835 - DNA, 25 bp, Saccharomyces pastorianus
gttggtgctatgagagaaatcgaaa

SEQ ID NO: 23836 - DNA, 25 bp, Saccharomyces pastorianus
tgctaccaccaactactcaagttgt

SEQ ID NO: 23837 - DNA, 25 bp, Saccharomyces pastorianus
gatttgccatccaacaaggaaaact

SEQ ID NO: 23838 - DNA, 25 bp, Saccharomyces pastorianus
actacgatttgccatccaacaagga

SEQ ID NO: 23839 - DNA, 25 bp, Saccharomyces pastorianus
caccaagttgagagacgacaaattc

SEQ ID NO: 23840 - DNA, 25 bp, Saccharomyces pastorianus
atcaactacgatttgccatccaaca

SEQ ID NO: 23841 - DNA, 25 bp, Saccharomyces pastorianus
aatgtttgaccgatttgtacgattc

SEQ ID NO: 23842 - DNA, 25 bp, Saccharomyces pastorianus
cactgtttccgccatctactctgat

SEQ ID NO: 23843 - DNA, 25 bp, Saccharomyces pastorianus
gacttcaagtatgaatgtttgaccg

SEQ ID NO: 23844 - DNA, 25 bp, Saccharomyces pastorianus
aaattcactgtttccgccatctact

SEQ ID NO: 23845 - DNA, 25 bp, Saccharomyces pastorianus
gtgctcggcaacagattttatcatg

SEQ ID NO: 23846 - DNA, 25 bp, Saccharomyces pastorianus
atggccgagaaatgcgacccaattt

SEQ ID NO: 23847 - DNA, 25 bp, Saccharomyces pastorianus
taagtgtcagagtcgggcacatcca

SEQ ID NO: 23848 - DNA, 25 bp, Saccharomyces pastorianus
gtttacctatataccgattctcaga

SEQ ID NO: 23849 - DNA, 25 bp, Saccharomyces pastorianus
gacccaatttatgtgagagcgcaac

SEQ ID NO: 23850 - DNA, 25 bp, Saccharomyces pastorianus
gacgtggtgaatttcctgactgaca

SEQ ID NO: 23851 - DNA, 25 bp, Saccharomyces pastorianus
cgggcacatccaaaagcatactcta

SEQ ID NO: 23852 - DNA, 25 bp, Saccharomyces pastorianus
atttacttcctgatgtgctcggcaa

SEQ ID NO: 23853 - DNA, 25 bp, Saccharomyces pastorianus
gatccatccaccctgtatagagaaa

SEQ ID NO: 23854 - DNA, 25 bp, Saccharomyces pastorianus
tatagagtccaccatttacttcctg

SEQ ID NO: 23855 - DNA, 25 bp, Saccharomyces pastorianus
gactagcaacagtaccagtttacct

SEQ ID NO: 23856 - DNA, 25 bp, Saccharomyces pastorianus
gtgatttcccttacgatccatttaa

SEQ ID NO: 23857 - DNA, 25 bp, Saccharomyces pastorianus
ttgtctccaatttcgattttttcgg

SEQ ID NO: 23858 - DNA, 25 bp, Saccharomyces pastorianus
acatatgccttttggtacatgcccg

SEQ ID NO: 23859 - DNA, 25 bp, Saccharomyces pastorianus
gaaactccaagaaagatgcctctgt

SEQ ID NO: 23860 - DNA, 25 bp, Saccharomyces pastorianus
tgcccgtctgcatactacatgaaac

SEQ ID NO: 23861 - DNA, 25 bp, Saccharomyces pastorianus
attccgagtttatgggacgctgtcg

SEQ ID NO: 23862 - DNA, 25 bp, Saccharomyces pastorianus
gacgcaccagtgcattcgattgccg

SEQ ID NO: 23863 - DNA, 25 bp, Saccharomyces pastorianus
cgacctcaacgtcattagctgtttg

SEQ ID NO: 23864 - DNA, 25 bp, Saccharomyces pastorianus
tgcctctgtgatagcaatcatcctg

SEQ ID NO: 23865 - DNA, 25 bp, Saccharomyces pastorianus
atggctttgctattactatgtatga

SEQ ID NO: 23866 - DNA, 25 bp, Saccharomyces pastorianus
tcgattgccgtgtcactcttattaa

SEQ ID NO: 23867 - DNA, 25 bp, Saccharomyces pastorianus
gatctttcaagtatctttccaccta

SEQ ID NO: 23868 - DNA, 25 bp, Saccharomyces pastorianus
tgccacaatttgcagaattaccgag

SEQ ID NO: 23869 - DNA, 25 bp, Saccharomyces pastorianus
ggtaagcctgtgttggtcaatgagt

SEQ ID NO: 23870 - DNA, 25 bp, Saccharomyces pastorianus
gatgaagtcatcaattcgttggagg

SEQ ID NO: 23871 - DNA, 25 bp, Saccharomyces pastorianus
gttcattccccatcagaattactca

SEQ ID NO: 23872 - DNA, 25 bp, Saccharomyces pastorianus
aagcctgctagtgttgatccggcaa

SEQ ID NO: 23873 - DNA, 25 bp, Saccharomyces pastorianus
ggatttaaaggacggctggccacaa

SEQ ID NO: 23874 - DNA, 25 bp, Saccharomyces pastorianus
tttggtacaatagcggcggtaactt

SEQ ID NO: 23875 - DNA, 25 bp, Saccharomyces pastorianus
gtatctttccacctatgatgttcat

SEQ ID NO: 23876 - DNA, 25 bp, Saccharomyces pastorianus
aagagtcacgattcatccaagttat

SEQ ID NO: 23877 - DNA, 25 bp, Saccharomyces pastorianus
gggagaatgtccagctgccacaatt

SEQ ID NO: 23878 - DNA, 25 bp, Saccharomyces pastorianus
gtcccgctttgaagactgttaccaa

SEQ ID NO: 23879 - DNA, 25 bp, Saccharomyces pastorianus
gacaatttgacagcacggtggaggt

SEQ ID NO: 23880 - DNA, 25 bp, Saccharomyces pastorianus
taatactgtatctttgccggtccat

SEQ ID NO: 23881 - DNA, 25 bp, Saccharomyces pastorianus
aggcgatttggcatctttaaagcag

SEQ ID NO: 23882 - DNA, 25 bp, Saccharomyces pastorianus
agacagcttatcgtcaaggtttaac

SEQ ID NO: 23883 - DNA, 25 bp, Saccharomyces pastorianus
ggacgtcataataggcaatcttaat

SEQ ID NO: 23884 - DNA, 25 bp, Saccharomyces pastorianus
ggaagttaatcgaatgggttgccaa

SEQ ID NO: 23885 - DNA, 25 bp, Saccharomyces pastorianus
aaaagtttacgatctcatccccagg

SEQ ID NO: 23886 - DNA, 25 bp, Saccharomyces pastorianus
aacacgagggtgagacggctacatc

SEQ ID NO: 23887 - DNA, 25 bp, Saccharomyces pastorianus
agaaggagtctagtcccgctttgaa

SEQ ID NO: 23888 - DNA, 25 bp, Saccharomyces pastorianus
tatctttgccggtccatgctaacta

SEQ ID NO: 23889 - DNA, 25 bp, Saccharomyces pastorianus
gctttgaatactatcgctgttttaa

SEQ ID NO: 23890 - DNA, 25 bp, Saccharomyces pastorianus
aaacggaccgcacaccaaaacattg

SEQ ID NO: 23891 - DNA, 25 bp, Saccharomyces pastorianus
gaagaaacgttgtcaggccctgtca

SEQ ID NO: 23892 - DNA, 25 bp, Saccharomyces pastorianus
accgctatacccgtcaatgatcttg

SEQ ID NO: 23893 - DNA, 25 bp, Saccharomyces pastorianus
ggaatctcgtccgtatactttaacg

SEQ ID NO: 23894 - DNA, 25 bp, Saccharomyces pastorianus
gaccactttcaagtttcatcttcga

SEQ ID NO: 23895 - DNA, 25 bp, Saccharomyces pastorianus
tcaccccataggcagatacgacgat

SEQ ID NO: 23896 - DNA, 25 bp, Saccharomyces pastorianus
tacaacgggtatggatcggatatct

SEQ ID NO: 23897 - DNA, 25 bp, Saccharomyces pastorianus
gatgtttgtccagtcatgtcgcaat

SEQ ID NO: 23898 - DNA, 25 bp, Saccharomyces pastorianus
ggaataatgagtttcaccccatagg

SEQ ID NO: 23899 - DNA, 25 bp, Saccharomyces pastorianus
attttctcatccttttacgaccatg

SEQ ID NO: 23900 - DNA, 25 bp, Saccharomyces pastorianus
gaaaccgtttactgccgtcacgttg

SEQ ID NO: 23901 - DNA, 25 bp, Saccharomyces pastorianus
aatagggtcgatgcatcgtctcaaa

SEQ ID NO: 23902 - DNA, 25 bp, Saccharomyces pastorianus
aaactccactggcttgacatggtct

SEQ ID NO: 23903 - DNA, 25 bp, Saccharomyces pastorianus
atcagctccattagattgtcctcac

SEQ ID NO: 23904 - DNA, 25 bp, Saccharomyces pastorianus
ctgttccagactactacggcgagaa

SEQ ID NO: 23905 - DNA, 25 bp, Saccharomyces pastorianus
gattgtcctcacaaagactcttggt

SEQ ID NO: 23906 - DNA, 25 bp, Saccharomyces pastorianus
ggagaatcaacgtgggctcttcgct

SEQ ID NO: 23907 - DNA, 25 bp, Saccharomyces pastorianus
aacggcactacccttaagatcatat

SEQ ID NO: 23908 - DNA, 25 bp, Saccharomyces pastorianus
ttgggccctatagttggttcgcaaa

SEQ ID NO: 23909 - DNA, 25 bp, Saccharomyces pastorianus
gacatggtctgacttcttcaagttg

SEQ ID NO: 23910 - DNA, 25 bp, Saccharomyces pastorianus
gtaatatttcgtgggcttacctctc

SEQ ID NO: 23911 - DNA, 25 bp, Saccharomyces pastorianus
tacgtcaggacgttcttccagagat

SEQ ID NO: 23912 - DNA, 25 bp, Saccharomyces pastorianus
gcagaacggcttcaacttcctggag

SEQ ID NO: 23913 - DNA, 25 bp, Saccharomyces pastorianus
gttcttcaaggacttctctaaggtt

SEQ ID NO: 23914 - DNA, 25 bp, Saccharomyces pastorianus
gggcgcacgctctgggaaagactca

SEQ ID NO: 23915 - DNA, 25 bp, Saccharomyces pastorianus
cggtattgatttccccaaggacgca

SEQ ID NO: 23916 - DNA, 25 bp, Saccharomyces pastorianus
acttgttcagtctgggcggtgtcac

SEQ ID NO: 23917 - DNA, 25 bp, Saccharomyces pastorianus
agttcccatggatctcgtcaggtga

SEQ ID NO: 23918 - DNA, 25 bp, Saccharomyces pastorianus
gagcccatccataaggagttcccat

SEQ ID NO: 23919 - DNA, 25 bp, Saccharomyces pastorianus
ggtcgacagcccagagaataccact

SEQ ID NO: 23920 - DNA, 25 bp, Saccharomyces pastorianus
tgaccagggcgctgactacgtcagg

SEQ ID NO: 23921 - DNA, 25 bp, Saccharomyces pastorianus
aagactcacctgaagaactccgggt

SEQ ID NO: 23922 - DNA, 25 bp, Saccharomyces pastorianus
ggacgagaatcccttggcagacttt

SEQ ID NO: 23923 - DNA, 25 bp, Saccharomyces pastorianus
gatgaagtcactctggtattccaat

SEQ ID NO: 23924 - DNA, 25 bp, Saccharomyces pastorianus
atttttctaaacatcacgcccagta

SEQ ID NO: 23925 - DNA, 25 bp, Saccharomyces pastorianus
ggactcattttcgttgatcttggac

SEQ ID NO: 23926 - DNA, 25 bp, Saccharomyces pastorianus
atggcgtctaccacacaatcgaggt

SEQ ID NO: 23927 - DNA, 25 bp, Saccharomyces pastorianus
tttagctaggacagcgttgccacgt

SEQ ID NO: 23928 - DNA, 25 bp, Saccharomyces pastorianus
ataacattgggtgcaggctcattga

SEQ ID NO: 23929 - DNA, 25 bp, Saccharomyces pastorianus
ccaatatcttgtgcggtgttctgaa

SEQ ID NO: 23930 - DNA, 25 bp, Saccharomyces pastorianus
tggctccatagtggcgcaattgtgt

SEQ ID NO: 23931 - DNA, 25 bp, Saccharomyces pastorianus
cgttgccacgttgcgaaactctaat

SEQ ID NO: 23932 - DNA, 25 bp, Saccharomyces pastorianus
gagttgcccatggacgcgatgaagt

SEQ ID NO: 23933 - DNA, 25 bp, Saccharomyces pastorianus
aaatcaggatttactatgggccaat

SEQ ID NO: 23934 - DNA, 25 bp, Saccharomyces pastorianus
tgaccctcatgattgggcagctgat

SEQ ID NO: 23935 - DNA, 25 bp, Saccharomyces pastorianus
attaggcaccaagccttcagtttct

SEQ ID NO: 23936 - DNA, 25 bp, Saccharomyces pastorianus
gcaagatttcactttgggtaaacct

SEQ ID NO: 23937 - DNA, 25 bp, Saccharomyces pastorianus
tcaaggtgccttccgtttgttggtt

SEQ ID NO: 23938 - DNA, 25 bp, Saccharomyces pastorianus
tcggtgataaccctgcaagtgatat

SEQ ID NO: 23939 - DNA, 25 bp, Saccharomyces pastorianus
gattttgcgcatcatgtccttattg

SEQ ID NO: 23940 - DNA, 25 bp, Saccharomyces pastorianus
cactcagtgttcatggtcggtgata

SEQ ID NO: 23941 - DNA, 25 bp, Saccharomyces pastorianus
ttcagtttctccatttcactcagtg

SEQ ID NO: 23942 - DNA, 25 bp, Saccharomyces pastorianus
gccgtgttagtgtttaatgaccctc

SEQ ID NO: 23943 - DNA, 25 bp, Saccharomyces pastorianus
gagagattccggatttgactactaa

SEQ ID NO: 23944 - DNA, 25 bp, Saccharomyces pastorianus
atctagtgactcttctaaagctcaa

SEQ ID NO: 23945 - DNA, 25 bp, Saccharomyces pastorianus
aagtgccctttttcaaaatagctga

SEQ ID NO: 23946 - DNA, 25 bp, Saccharomyces pastorianus
tgtggctcttgctctctaggcgacg

SEQ ID NO: 23947 - DNA, 25 bp, Saccharomyces pastorianus
atgcagcgggtgtccttatttaggt

SEQ ID NO: 23948 - DNA, 25 bp, Saccharomyces pastorianus
ttatttaggtctgcctgctttcaag

SEQ ID NO: 23949 - DNA, 25 bp, Saccharomyces pastorianus
gataccaagctacccgcattcaaga

SEQ ID NO: 23950 - DNA, 25 bp, Saccharomyces pastorianus
taggcgacgcctttagatgcagcgg

SEQ ID NO: 23951 - DNA, 25 bp, Saccharomyces pastorianus
tgagttgactgagatcgatttcact

SEQ ID NO: 23952 - DNA, 25 bp, Saccharomyces pastorianus
ggatgactctagcaaacccatgatt

SEQ ID NO: 23953 - DNA, 25 bp, Saccharomyces pastorianus
tacatgcggcaaatccaagactaaa

SEQ ID NO: 23954 - DNA, 25 bp, Saccharomyces pastorianus
agcagacgacgctaaagtgcccttt

SEQ ID NO: 23955 - DNA, 25 bp, Saccharomyces pastorianus
gaaaccgagctgtcattgttcaaca

SEQ ID NO: 23956 - DNA, 25 bp, Saccharomyces pastorianus
gtaatgttgcatatgacactctaaa

SEQ ID NO: 23957 - DNA, 25 bp, Saccharomyces pastorianus
atgccaggccgctaaagaattctgt

SEQ ID NO: 23958 - DNA, 25 bp, Saccharomyces pastorianus
tcatgcacacggttccaagacggtt

SEQ ID NO: 23959 - DNA, 25 bp, Saccharomyces pastorianus
aaccgcgagggatctgttcaatgat

SEQ ID NO: 23960 - DNA, 25 bp, Saccharomyces pastorianus
gttattaacttcgaccacgacgacg

SEQ ID NO: 23961 - DNA, 25 bp, Saccharomyces pastorianus
taagacccttccgtaatgttgcata

SEQ ID NO: 23962 - DNA, 25 bp, Saccharomyces pastorianus
aaagactacgacatggaggagccat

SEQ ID NO: 23963 - DNA, 25 bp, Saccharomyces pastorianus
tacgatcttgcagagaaaaccgcga

SEQ ID NO: 23964 - DNA, 25 bp, Saccharomyces pastorianus
atatactcatgcacacggttccaag

SEQ ID NO: 23965 - DNA, 25 bp, Saccharomyces pastorianus
gacgacgactggattttagacttgg

SEQ ID NO: 23966 - DNA, 25 bp, Saccharomyces pastorianus
cgtgctgtatggtccggatttgact

SEQ ID NO: 23967 - DNA, 25 bp, Saccharomyces pastorianus
cccgctctctatcaactggaacaag

SEQ ID NO: 23968 - DNA, 25 bp, Saccharomyces pastorianus
atatctcatgcgcatcatctgtgga

SEQ ID NO: 23969 - DNA, 25 bp, Saccharomyces pastorianus
caattcacgagtcccttgtcaatat

SEQ ID NO: 23970 - DNA, 25 bp, Saccharomyces pastorianus
caactattcattcggcgccatggaa

SEQ ID NO: 23971 - DNA, 25 bp, Saccharomyces pastorianus
aatgtggcctacacagcaaccgagt

SEQ ID NO: 23972 - DNA, 25 bp, Saccharomyces pastorianus
aaacgatgtacaacgtcctcgtcat

SEQ ID NO: 23973 - DNA, 25 bp, Saccharomyces pastorianus
ggaaaccgacgtaaccgtgctgtat

SEQ ID NO: 23974 - DNA, 25 bp, Saccharomyces pastorianus
tggactctcacacatcatctatttt

SEQ ID NO: 23975 - DNA, 25 bp, Saccharomyces pastorianus
agaacgcctccctaggaaattgaag

SEQ ID NO: 23976 - DNA, 25 bp, Saccharomyces pastorianus
attctacatgtactaaggcctcttc

SEQ ID NO: 23977 - DNA, 25 bp, Saccharomyces pastorianus
aatatcttcgccgtgggagaccaat

SEQ ID NO: 23978 - DNA, 25 bp, Saccharomyces pastorianus
tcgatgcgtttaattcctgggtcta

SEQ ID NO: 23979 - DNA, 25 bp, Saccharomyces pastorianus
tgtcctgtgggacctggagactcaa

SEQ ID NO: 23980 - DNA, 25 bp, Saccharomyces pastorianus
gttcctgaacatctcaaacccgaaa

SEQ ID NO: 23981 - DNA, 25 bp, Saccharomyces pastorianus
gattcgaccctgtttatgttcagca

SEQ ID NO: 23982 - DNA, 25 bp, Saccharomyces pastorianus
catccggatattgaactctagtgcg

SEQ ID NO: 23983 - DNA, 25 bp, Saccharomyces pastorianus
ggtacactacggatttcgatcatat

SEQ ID NO: 23984 - DNA, 25 bp, Saccharomyces pastorianus
aagaaggtggatcttgttcctgaac

SEQ ID NO: 23985 - DNA, 25 bp, Saccharomyces pastorianus
cagagatggatacccgttcactcat

SEQ ID NO: 23986 - DNA, 25 bp, Saccharomyces pastorianus
gccgacatcaggctgtatactacta

SEQ ID NO: 23987 - DNA, 25 bp, Saccharomyces pastorianus
tatcaagctgcattatacgcgttcc

SEQ ID NO: 23988 - DNA, 25 bp, Saccharomyces pastorianus
aggacaaccaacttcgaatctacga

SEQ ID NO: 23989 - DNA, 25 bp, Saccharomyces pastorianus
aagattgatagaccctcttcccata

SEQ ID NO: 23990 - DNA, 25 bp, Saccharomyces pastorianus
gccaattgcttttcagtttaccact

SEQ ID NO: 23991 - DNA, 25 bp, Saccharomyces pastorianus
aataccaatctcttgatgtcgccac

SEQ ID NO: 23992 - DNA, 25 bp, Saccharomyces pastorianus
gaagtaatccctcaggactcgaact

SEQ ID NO: 23993 - DNA, 25 bp, Saccharomyces pastorianus
ggactcgaactacccagatagatct

SEQ ID NO: 23994 - DNA, 25 bp, Saccharomyces pastorianus
acttcaatcctcaccaagacaattt

SEQ ID NO: 23995 - DNA, 25 bp, Saccharomyces pastorianus
tgagaagaccttcactaccgcacat

SEQ ID NO: 23996 - DNA, 25 bp, Saccharomyces pastorianus
aaaacttcacatctcctaatgcagc

SEQ ID NO: 23997 - DNA, 25 bp, Saccharomyces pastorianus
aaatctagctctccaagaactccaa

SEQ ID NO: 23998 - DNA, 25 bp, Saccharomyces pastorianus
atacaactttctctcaagcgtcgat

SEQ ID NO: 23999 - DNA, 25 bp, Saccharomyces pastorianus
tgaggccattggtgtttctaacgaa

SEQ ID NO: 24000 - DNA, 25 bp, Saccharomyces pastorianus
aaagatatcccaagttgccccaact

SEQ ID NO: 24001 - DNA, 25 bp, Saccharomyces pastorianus
attgattcacgaagccacactagaa

SEQ ID NO: 24002 - DNA, 25 bp, Saccharomyces pastorianus
ggacacaaattcttcgtacagggat

SEQ ID NO: 24003 - DNA, 25 bp, Saccharomyces pastorianus
gaacagcagaccgtttttccgttgt

SEQ ID NO: 24004 - DNA, 25 bp, Saccharomyces pastorianus
gggatatcaacctaattaaccaaat

SEQ ID NO: 24005 - DNA, 25 bp, Saccharomyces pastorianus
gaattttgttttgcctttgatagta

SEQ ID NO: 24006 - DNA, 25 bp, Saccharomyces pastorianus
agttgattttgacgcatttttccca

SEQ ID NO: 24007 - DNA, 25 bp, Saccharomyces pastorianus
catatttccagacatgcagagcaat

SEQ ID NO: 24008 - DNA, 25 bp, Saccharomyces pastorianus
ggaattttcttctgcaattggttat

SEQ ID NO: 24009 - DNA, 25 bp, Saccharomyces pastorianus
ttgcgattgggcatattcgaattca

SEQ ID NO: 24010 - DNA, 25 bp, Saccharomyces pastorianus
acgatggtgccacagtgtactcggt

SEQ ID NO: 24011 - DNA, 25 bp, Saccharomyces pastorianus
aaaggaatgcgctcttgacgccgac

SEQ ID NO: 24012 - DNA, 25 bp, Saccharomyces pastorianus
gtactcggtggacgtcaacaacatt

SEQ ID NO: 24013 - DNA, 25 bp, Saccharomyces pastorianus
aagatggcgccgtatgcatcaactt

SEQ ID NO: 24014 - DNA, 25 bp, Saccharomyces pastorianus
attggcggctcttttggctaacgat

SEQ ID NO: 24015 - DNA, 25 bp, Saccharomyces pastorianus
gacgccgacgttgtcatcacaggtg

SEQ ID NO: 24016 - DNA, 25 bp, Saccharomyces pastorianus
aattgtcggcagaccattggcggct

SEQ ID NO: 24017 - DNA, 25 bp, Saccharomyces pastorianus
gtcaccatcgctatgttgctgagaa

SEQ ID NO: 24018 - DNA, 25 bp, Saccharomyces pastorianus
acaggtgtccctagcgagaactaca

SEQ ID NO: 24019 - DNA, 25 bp, Saccharomyces pastorianus
accccactagccattgtcaagatat

SEQ ID NO: 24020 - DNA, 25 bp, Saccharomyces pastorianus
aaaccgcttaaaatccattctgcct

SEQ ID NO: 24021 - DNA, 25 bp, Saccharomyces pastorianus
gaggcgaaactactgacttgcaaga

SEQ ID NO: 24022 - DNA, 25 bp, Saccharomyces pastorianus
gattggacctcgtttggacttcaaa

SEQ ID NO: 24023 - DNA, 25 bp, Saccharomyces pastorianus
gtgacaagctgggtagaatccacat

SEQ ID NO: 24024 - DNA, 25 bp, Saccharomyces pastorianus
cggtgagccattaccaaacgttcta

SEQ ID NO: 24025 - DNA, 25 bp, Saccharomyces pastorianus
cgtcgtattccgaggagggacaaga

SEQ ID NO: 24026 - DNA, 25 bp, Saccharomyces pastorianus
aagacatggtcattgaagctcacaa

SEQ ID NO: 24027 - DNA, 25 bp, Saccharomyces pastorianus
ttaaaacccaaattcgatcaaagcg

SEQ ID NO: 24028 - DNA, 25 bp, Saccharomyces pastorianus
gaatccatactccaactcaagacat

SEQ ID NO: 24029 - DNA, 25 bp, Saccharomyces pastorianus
gatacacatcccgtttataagcagg

SEQ ID NO: 24030 - DNA, 25 bp, Saccharomyces pastorianus
aaaagcagaagaacgcgacggcgac

SEQ ID NO: 24031 - DNA, 25 bp, Saccharomyces pastorianus
acttgcaagatgttgcgggtttaca

SEQ ID NO: 24032 - DNA, 25 bp, Saccharomyces pastorianus
gactactttctgtcgacggagactt

SEQ ID NO: 24033 - DNA, 25 bp, Saccharomyces pastorianus
gttaatctagactccatacgcgaag

SEQ ID NO: 24034 - DNA, 25 bp, Saccharomyces pastorianus
aactcactggagatcaaactacgct

SEQ ID NO: 24035 - DNA, 25 bp, Saccharomyces pastorianus
gttgaattcggataactcactggag

SEQ ID NO: 24036 - DNA, 25 bp, Saccharomyces pastorianus
gataaatcgttagtgaccccagagt

SEQ ID NO: 24037 - DNA, 25 bp, Saccharomyces pastorianus
aactacgctcaactattgggtctgt

SEQ ID NO: 24038 - DNA, 25 bp, Saccharomyces pastorianus
aacctagatgcaattgatgccgaaa

SEQ ID NO: 24039 - DNA, 25 bp, Saccharomyces pastorianus
aactgcttcagcacatagtcatgcg

SEQ ID NO: 24040 - DNA, 25 bp, Saccharomyces pastorianus
tagcgttttcaatgacgttttcaac

SEQ ID NO: 24041 - DNA, 25 bp, Saccharomyces pastorianus
aaaggcaatgaattccccttgccca

SEQ ID NO: 24042 - DNA, 25 bp, Saccharomyces pastorianus
gtggatctcctgtgcgataaatcgt

SEQ ID NO: 24043 - DNA, 25 bp, Saccharomyces pastorianus
aaatgggtacaaatgcggaagcagt

SEQ ID NO: 24044 - DNA, 25 bp, Saccharomyces pastorianus
gttgcagaagataacgagcctgacc

SEQ ID NO: 24045 - DNA, 25 bp, Saccharomyces pastorianus
gaagcagttgcgcagttgatgaaca

SEQ ID NO: 24046 - DNA, 25 bp, Saccharomyces pastorianus
atcacaggctagtttgggcttgcta

SEQ ID NO: 24047 - DNA, 25 bp, Saccharomyces pastorianus
tttgggcttgctacaatacgcggaa

SEQ ID NO: 24048 - DNA, 25 bp, Saccharomyces pastorianus
ctgaaacttcaactagtcaagctga

SEQ ID NO: 24049 - DNA, 25 bp, Saccharomyces pastorianus
tgacgaagaggaagatctggtaccc

SEQ ID NO: 24050 - DNA, 25 bp, Saccharomyces pastorianus
agcgaaaagaactgcagtcgttgca

SEQ ID NO: 24051 - DNA, 25 bp, Saccharomyces pastorianus
gagcctgaccgatggactgaaactt

SEQ ID NO: 24052 - DNA, 25 bp, Saccharomyces pastorianus
aagaaacgtgagtctgaacagcaaa

SEQ ID NO: 24053 - DNA, 25 bp, Saccharomyces pastorianus
aagatctaggatcccacgagaaaaa

SEQ ID NO: 24054 - DNA, 25 bp, Saccharomyces pastorianus
gatggattcctctactaactgttag

SEQ ID NO: 24055 - DNA, 25 bp, Saccharomyces pastorianus
gtccattcggcacaagttttcatct

SEQ ID NO: 24056 - DNA, 25 bp, Saccharomyces pastorianus
tgggttcaaaacaaagggctctggt

SEQ ID NO: 24057 - DNA, 25 bp, Saccharomyces pastorianus
aagtaggttctcaacagggacaatc

SEQ ID NO: 24058 - DNA, 25 bp, Saccharomyces pastorianus
gagattacgcaaagcttacccagaa

SEQ ID NO: 24059 - DNA, 25 bp, Saccharomyces pastorianus
catttattcttttcattggcgtcaa

SEQ ID NO: 24060 - DNA, 25 bp, Saccharomyces pastorianus
gctcaattcagcctggtgaatcttt

SEQ ID NO: 24061 - DNA, 25 bp, Saccharomyces pastorianus
aagacggcgacttggctgcatcagt

SEQ ID NO: 24062 - DNA, 25 bp, Saccharomyces pastorianus
atatccgtcggagcaaagttgcatc

SEQ ID NO: 24063 - DNA, 25 bp, Saccharomyces pastorianus
gaatagacccttgctaccaggaaca

SEQ ID NO: 24064 - DNA, 25 bp, Saccharomyces pastorianus
gattatttatctgtccattcggcac

SEQ ID NO: 24065 - DNA, 25 bp, Saccharomyces pastorianus
atggcaactaatgaccctcggaagg

SEQ ID NO: 24066 - DNA, 25 bp, Saccharomyces pastorianus
gcgtatcgccgttatttgtatcatt

SEQ ID NO: 24067 - DNA, 25 bp, Saccharomyces pastorianus
aacagtttgggtttccgcagacaca

SEQ ID NO: 24068 - DNA, 25 bp, Saccharomyces pastorianus
cacacgtaaggttttggccgccaag

SEQ ID NO: 24069 - DNA, 25 bp, Saccharomyces pastorianus
gaatgcattatcagccatcagaatc

SEQ ID NO: 24070 - DNA, 25 bp, Saccharomyces pastorianus
gagaaccctcagaagtacacacgta

SEQ ID NO: 24071 - DNA, 25 bp, Saccharomyces pastorianus
atcgccacgggttccatcaatagtg

SEQ ID NO: 24072 - DNA, 25 bp, Saccharomyces pastorianus
ttcctcgtagcttcatggcaactaa

SEQ ID NO: 24073 - DNA, 25 bp, Saccharomyces pastorianus
aatagtgaaaccgttcctcgtagct

SEQ ID NO: 24074 - DNA, 25 bp, Saccharomyces pastorianus
aggagttcgatatgcctgctcaggt

SEQ ID NO: 24075 - DNA, 25 bp, Saccharomyces pastorianus
gtgtgccgcagatcatttagtacca

SEQ ID NO: 24076 - DNA, 25 bp, Saccharomyces pastorianus
ttggtgttcaactgcatcccactag

SEQ ID NO: 24077 - DNA, 25 bp, Saccharomyces pastorianus
tgttcatttgaagactggcgttggt

SEQ ID NO: 24078 - DNA, 25 bp, Saccharomyces pastorianus
aatcacttgtcagagcacgggacat

SEQ ID NO: 24079 - DNA, 25 bp, Saccharomyces pastorianus
ggaatacggcgggttgctctacgac

SEQ ID NO: 24080 - DNA, 25 bp, Saccharomyces pastorianus
attcccgtagtctcttctggtaaag

SEQ ID NO: 24081 - DNA, 25 bp, Saccharomyces pastorianus
acgggacatccgagaccaactatta

SEQ ID NO: 24082 - DNA, 25 bp, Saccharomyces pastorianus
atcccactagcgcattgcatggatt

SEQ ID NO: 24083 - DNA, 25 bp, Saccharomyces pastorianus
tcctggtatctcaaaacattcccgt

SEQ ID NO: 24084 - DNA, 25 bp, Saccharomyces pastorianus
ggttgctctacgacattaagcgcgt

SEQ ID NO: 24085 - DNA, 25 bp, Saccharomyces pastorianus
tgatttgccaccctacgttatatat

SEQ ID NO: 24086 - DNA, 25 bp, Saccharomyces pastorianus
agctctaagggatggcgtggtacaa

SEQ ID NO: 24087 - DNA, 25 bp, Saccharomyces pastorianus
ctccattgtctccttcatagtattt

SEQ ID NO: 24088 - DNA, 25 bp, Saccharomyces pastorianus
ttactgtccactactactgggctga

SEQ ID NO: 24089 - DNA, 25 bp, Saccharomyces pastorianus
ttactccttaactaacggcgccatt

SEQ ID NO: 24090 - DNA, 25 bp, Saccharomyces pastorianus
taacgttagctttcgggtctgtgac

SEQ ID NO: 24091 - DNA, 25 bp, Saccharomyces pastorianus
gaatccgagtctactgggtccagag

SEQ ID NO: 24092 - DNA, 25 bp, Saccharomyces pastorianus
tactgagattatgcccattccctta

SEQ ID NO: 24093 - DNA, 25 bp, Saccharomyces pastorianus
ttgcaaaaccaagagcgccacgtat

SEQ ID NO: 24094 - DNA, 25 bp, Saccharomyces pastorianus
atgatcggatactccttactgtcca

SEQ ID NO: 24095 - DNA, 25 bp, Saccharomyces pastorianus
aacggcgccattgctggtgtttacg

SEQ ID NO: 24096 - DNA, 25 bp, Saccharomyces pastorianus
gatagtgctgctattctttgtcgca

SEQ ID NO: 24097 - DNA, 25 bp, Saccharomyces pastorianus
gcatggctactgtacttcaaaacta

SEQ ID NO: 24098 - DNA, 25 bp, Saccharomyces pastorianus
taaagagctcgccatttcgctcaag

SEQ ID NO: 24099 - DNA, 25 bp, Saccharomyces pastorianus
agttgcctctccaacatcgagaata

SEQ ID NO: 24100 - DNA, 25 bp, Saccharomyces pastorianus
ccctgtggacgtcaaagcctatggt

SEQ ID NO: 24101 - DNA, 25 bp, Saccharomyces pastorianus
tgcttcgttgaatccgcatcatcaa

SEQ ID NO: 24102 - DNA, 25 bp, Saccharomyces pastorianus
aggtattccataacatctgcttcgt

SEQ ID NO: 24103 - DNA, 25 bp, Saccharomyces pastorianus
ttgtcccacattctgctagtattga

SEQ ID NO: 24104 - DNA, 25 bp, Saccharomyces pastorianus
tggccgattgatgttccctgtggac

SEQ ID NO: 24105 - DNA, 25 bp, Saccharomyces pastorianus
gaaactgcattttggccggaagaat

SEQ ID NO: 24106 - DNA, 25 bp, Saccharomyces pastorianus
gaacgcattgtacgcagatccagag

SEQ ID NO: 24107 - DNA, 25 bp, Saccharomyces pastorianus
aatctttctcattttcagttgcctc

SEQ ID NO: 24108 - DNA, 25 bp, Saccharomyces pastorianus
aaaaaggcatcctctggccgattga

SEQ ID NO: 24109 - DNA, 25 bp, Saccharomyces pastorianus
gatcaacttcgaggcttgggaatta

SEQ ID NO: 24110 - DNA, 25 bp, Saccharomyces pastorianus
atttttccagagtagagagggccaa

SEQ ID NO: 24111 - DNA, 25 bp, Saccharomyces pastorianus
acttccgtttcatccgatgctagta

SEQ ID NO: 24112 - DNA, 25 bp, Saccharomyces pastorianus
gacggcgaaagaaagcatttttcca

SEQ ID NO: 24113 - DNA, 25 bp, Saccharomyces pastorianus
ggttcttatagaggtggttccatca

SEQ ID NO: 24114 - DNA, 25 bp, Saccharomyces pastorianus
cctataaaggtgctgctggtacatg

SEQ ID NO: 24115 - DNA, 25 bp, Saccharomyces pastorianus
tctaatgaatctactccatccactt

SEQ ID NO: 24116 - DNA, 25 bp, Saccharomyces pastorianus
agggccaagatcaacttcgaggctt

SEQ ID NO: 24117 - DNA, 25 bp, Saccharomyces pastorianus
gaaacccctgcttcttctaatgaat

SEQ ID NO: 24118 - DNA, 25 bp, Saccharomyces pastorianus
gggaattaacagacaacacctataa

SEQ ID NO: 24119 - DNA, 25 bp, Saccharomyces pastorianus
ttgaatattccagccggaaccgatg

SEQ ID NO: 24120 - DNA, 25 bp, Saccharomyces pastorianus
gaaatttttgcctccatcactggtt

SEQ ID NO: 24121 - DNA, 25 bp, Saccharomyces pastorianus
tcgcttgtttcatttctggttgttt

SEQ ID NO: 24122 - DNA, 25 bp, Saccharomyces pastorianus
aaggccggtccatggtatagtgcgc

SEQ ID NO: 24123 - DNA, 25 bp, Saccharomyces pastorianus
gtatgtcttgatttccttttcggaa

SEQ ID NO: 24124 - DNA, 25 bp, Saccharomyces pastorianus
ttgggttcatgttcgggtctcttgc

SEQ ID NO: 24125 - DNA, 25 bp, Saccharomyces pastorianus
aatgcctttggttccgccattggtt

SEQ ID NO: 24126 - DNA, 25 bp, Saccharomyces pastorianus
cattgccttaatcattttcatcccg

SEQ ID NO: 24127 - DNA, 25 bp, Saccharomyces pastorianus
attggttgtgccttgtctccagtca

SEQ ID NO: 24128 - DNA, 25 bp, Saccharomyces pastorianus
atggttattcactgggttggccgtc

SEQ ID NO: 24129 - DNA, 25 bp, Saccharomyces pastorianus
gcagattcctgcgtatgtcttgatt

SEQ ID NO: 24130 - DNA, 25 bp, Saccharomyces pastorianus
atgtcgattttcctgttgaccaatg

SEQ ID NO: 24131 - DNA, 25 bp, Saccharomyces pastorianus
aacggcagtaacaattcggagacta

SEQ ID NO: 24132 - DNA, 25 bp, Saccharomyces pastorianus
gtcagatgaccaggaaatcgacttg

SEQ ID NO: 24133 - DNA, 25 bp, Saccharomyces pastorianus
gtttacgggtaatgtcgcaacgcat

SEQ ID NO: 24134 - DNA, 25 bp, Saccharomyces pastorianus
gaggcactcagcacgtatattcaag

SEQ ID NO: 24135 - DNA, 25 bp, Saccharomyces pastorianus
ggagaacgcaaaccaaccgcacgct

SEQ ID NO: 24136 - DNA, 25 bp, Saccharomyces pastorianus
cgcttccacttatcgtttcaattat

SEQ ID NO: 24137 - DNA, 25 bp, Saccharomyces pastorianus
gcgacatcatggttgaggcactcag

SEQ ID NO: 24138 - DNA, 25 bp, Saccharomyces pastorianus
ggctattgaaatttgctatctgctt

SEQ ID NO: 24139 - DNA, 25 bp, Saccharomyces pastorianus
gtcgcaacgcatatcgaggagaact

SEQ ID NO: 24140 - DNA, 25 bp, Saccharomyces pastorianus
acatacttcgtctttgatgcgacat

SEQ ID NO: 24141 - DNA, 25 bp, Saccharomyces pastorianus
agcgaggacctgttcttgaagtgtt

SEQ ID NO: 24142 - DNA, 25 bp, Saccharomyces pastorianus
ggactgtcccaagtgtagaactact

SEQ ID NO: 24143 - DNA, 25 bp, Saccharomyces pastorianus
aaaccattccggaaatcttgtcaat

SEQ ID NO: 24144 - DNA, 25 bp, Saccharomyces pastorianus
gtacgcaatagtaaaccattccgga

SEQ ID NO: 24145 - DNA, 25 bp, Saccharomyces pastorianus
ggatttcattgttttgcctccaata

SEQ ID NO: 24146 - DNA, 25 bp, Saccharomyces pastorianus
tattcaatttgcactccagatcaag

SEQ ID NO: 24147 - DNA, 25 bp, Saccharomyces pastorianus
ggtgacaatgcttgggactgtccca

SEQ ID NO: 24148 - DNA, 25 bp, Saccharomyces pastorianus
gatgatgcgacagataactccaaaa

SEQ ID NO: 24149 - DNA, 25 bp, Saccharomyces pastorianus
tgcggtcgttcggtataagctgtac

SEQ ID NO: 24150 - DNA, 25 bp, Saccharomyces pastorianus
acagatttgggtcacgtttgatgat

SEQ ID NO: 24151 - DNA, 25 bp, Saccharomyces pastorianus
gtcaatggacattacacttctgtag

SEQ ID NO: 24152 - DNA, 25 bp, Saccharomyces pastorianus
gcctccaatactagtcatccattta

SEQ ID NO: 24153 - DNA, 25 bp, Saccharomyces pastorianus
ttaaccgtattgatcagtccgagat

SEQ ID NO: 24154 - DNA, 25 bp, Saccharomyces pastorianus
ggtaacgaaaccacatcccatgtag

SEQ ID NO: 24155 - DNA, 25 bp, Saccharomyces pastorianus
aagcggtttaggttccaacagtgag

SEQ ID NO: 24156 - DNA, 25 bp, Saccharomyces pastorianus
gatacgacctcatttgggctcatca

SEQ ID NO: 24157 - DNA, 25 bp, Saccharomyces pastorianus
tcaagatccgatactccgttaagag

SEQ ID NO: 24158 - DNA, 25 bp, Saccharomyces pastorianus
gagatctttagccactacgaaccca

SEQ ID NO: 24159 - DNA, 25 bp, Saccharomyces pastorianus
ttgatatgacgtctggtggctctac

SEQ ID NO: 24160 - DNA, 25 bp, Saccharomyces pastorianus
acagcctccagttgagaagcctact

SEQ ID NO: 24161 - DNA, 25 bp, Saccharomyces pastorianus
ttcctctctgacgaccaacaaattt

SEQ ID NO: 24162 - DNA, 25 bp, Saccharomyces pastorianus
ttatttacctccaacgatacgacct

SEQ ID NO: 24163 - DNA, 25 bp, Saccharomyces pastorianus
gtacaccagggcatcgtagcacata

SEQ ID NO: 24164 - DNA, 25 bp, Saccharomyces pastorianus
gttttacctgacatgccactattag

SEQ ID NO: 24165 - DNA, 25 bp, Saccharomyces pastorianus
gaggacgttatctcaaaacccttct

SEQ ID NO: 24166 - DNA, 25 bp, Saccharomyces pastorianus
aacggttcctaatttccatgagcta

SEQ ID NO: 24167 - DNA, 25 bp, Saccharomyces pastorianus
agcccagctggacaatttcaacaag

SEQ ID NO: 24168 - DNA, 25 bp, Saccharomyces pastorianus
attgcagcctacgtaaaatgtcttg

SEQ ID NO: 24169 - DNA, 25 bp, Saccharomyces pastorianus
gaattcatagataacggtgcgcgca

SEQ ID NO: 24170 - DNA, 25 bp, Saccharomyces pastorianus
cacgataatggtttgctgcgagatg

SEQ ID NO: 24171 - DNA, 25 bp, Saccharomyces pastorianus
gtattagtttcaaccagtctgcata

SEQ ID NO: 24172 - DNA, 25 bp, Saccharomyces pastorianus
cttctacgtcgggttatcagtgcac

SEQ ID NO: 24173 - DNA, 25 bp, Saccharomyces pastorianus
aaatctctgcatcaggttttacctg

SEQ ID NO: 24174 - DNA, 25 bp, Saccharomyces pastorianus
ggcccacacccagaagatattgatt

SEQ ID NO: 24175 - DNA, 25 bp, Saccharomyces pastorianus
agatatcgaccttgacagcggacat

SEQ ID NO: 24176 - DNA, 25 bp, Saccharomyces pastorianus
atgatcgctgtctacatcggacaca

SEQ ID NO: 24177 - DNA, 25 bp, Saccharomyces pastorianus
ggttctgtatctgcttttgtcaaat

SEQ ID NO: 24178 - DNA, 25 bp, Saccharomyces pastorianus
ggacacaggatttaccgcaaagatt

SEQ ID NO: 24179 - DNA, 25 bp, Saccharomyces pastorianus
agctctgccgctaatttctttgaat

SEQ ID NO: 24180 - DNA, 25 bp, Saccharomyces pastorianus
ttctaggctcattcaaggtcttgct

SEQ ID NO: 24181 - DNA, 25 bp, Saccharomyces pastorianus
aaggtcttgctacagcaggccagct

SEQ ID NO: 24182 - DNA, 25 bp, Saccharomyces pastorianus
tgcgttgtgttctatttcctttttt

SEQ ID NO: 24183 - DNA, 25 bp, Saccharomyces pastorianus
aaatatacgtatcagctgcgccggt

SEQ ID NO: 24184 - DNA, 25 bp, Saccharomyces pastorianus
ggccagcttccaaagatttgcggct

SEQ ID NO: 24185 - DNA, 25 bp, Saccharomyces pastorianus
gtggtgcttttggacttttaggctt

SEQ ID NO: 24186 - DNA, 25 bp, Saccharomyces pastorianus
aggttaccagtgacgcatatccatc

SEQ ID NO: 24187 - DNA, 25 bp, Saccharomyces pastorianus
caacagattgtccaaaccctttcaa

SEQ ID NO: 24188 - DNA, 25 bp, Saccharomyces pastorianus
ggatacgctgtttgcggataccatt

SEQ ID NO: 24189 - DNA, 25 bp, Saccharomyces pastorianus
accgattcacagacatgccttcaga

SEQ ID NO: 24190 - DNA, 25 bp, Saccharomyces pastorianus
tatccatccactagttagggtccac

SEQ ID NO: 24191 - DNA, 25 bp, Saccharomyces pastorianus
gagtccaacattccgctgtgattga

SEQ ID NO: 24192 - DNA, 25 bp, Saccharomyces pastorianus
ggaaccccgcacagttgtagtttgg

SEQ ID NO: 24193 - DNA, 25 bp, Saccharomyces pastorianus
ggacgtttcttacgagctacagccg

SEQ ID NO: 24194 - DNA, 25 bp, Saccharomyces pastorianus
tcatgtcatccacagctcgaaggag

SEQ ID NO: 24195 - DNA, 25 bp, Saccharomyces pastorianus
cgccttcgtatacttttttcactgt

SEQ ID NO: 24196 - DNA, 25 bp, Saccharomyces pastorianus
tagggtccaccctgttttgaagaag

SEQ ID NO: 24197 - DNA, 25 bp, Saccharomyces pastorianus
gaagttcggtgtgtctatttgcaat

SEQ ID NO: 24198 - DNA, 25 bp, Saccharomyces pastorianus
ggtttcgcagtggtttgtgccctta

SEQ ID NO: 24199 - DNA, 25 bp, Saccharomyces pastorianus
agccattctgttgttaatccacttc

SEQ ID NO: 24200 - DNA, 25 bp, Saccharomyces pastorianus
gcaagctcaagtgcctctggatata

SEQ ID NO: 24201 - DNA, 25 bp, Saccharomyces pastorianus
agtatcggtcgctggagcaggtttc

SEQ ID NO: 24202 - DNA, 25 bp, Saccharomyces pastorianus
ggattcccttcattatagctcttag

SEQ ID NO: 24203 - DNA, 25 bp, Saccharomyces pastorianus
cgctgccttaccatgggacaacaaa

SEQ ID NO: 24204 - DNA, 25 bp, Saccharomyces pastorianus
aagcgatacttcttcttctaacgaa

SEQ ID NO: 24205 - DNA, 25 bp, Saccharomyces pastorianus
gcaacttggcagtgttcgacctgac

SEQ ID NO: 24206 - DNA, 25 bp, Saccharomyces pastorianus
gcccttattgcttctttgacgttaa

SEQ ID NO: 24207 - DNA, 25 bp, Saccharomyces pastorianus
attggtaggatccattgctgccgct

SEQ ID NO: 24208 - DNA, 25 bp, Saccharomyces pastorianus
agtgtgttatagtgattaaaccgaa

SEQ ID NO: 24209 - DNA, 25 bp, Saccharomyces pastorianus
gggtcatatataaccagatcttgaa

SEQ ID NO: 24210 - DNA, 25 bp, Saccharomyces pastorianus
agatcttgaaatcgctgaacggtaa

SEQ ID NO: 24211 - DNA, 25 bp, Saccharomyces pastorianus
atcgctgaacggtaagctacagctc

SEQ ID NO: 24212 - DNA, 25 bp, Saccharomyces pastorianus
cgaaagacgggcttaccagggtcat

SEQ ID NO: 24213 - DNA, 25 bp, Saccharomyces pastorianus
gggcttaccagggtcatatataacc

SEQ ID NO: 24214 - DNA, 25 bp, Saccharomyces pastorianus
gaaatcgctgaacggtaagctacag

SEQ ID NO: 24215 - DNA, 25 bp, Saccharomyces pastorianus
taccagggtcatatataaccagatc

SEQ ID NO: 24216 - DNA, 25 bp, Saccharomyces pastorianus
aaagacgggcttaccagggtcatat

SEQ ID NO: 24217 - DNA, 25 bp, Saccharomyces pastorianus
gacgggcttaccagggtcatatata

SEQ ID NO: 24218 - DNA, 25 bp, Saccharomyces pastorianus
ttatagtgattaaaccgaaagacgg

SEQ ID NO: 24219 - DNA, 25 bp, Saccharomyces pastorianus
gaggctacagcttccattgattata

SEQ ID NO: 24220 - DNA, 25 bp, Saccharomyces pastorianus
gatgtgtcttgcgagatctttgcta

SEQ ID NO: 24221 - DNA, 25 bp, Saccharomyces pastorianus
gatcatccatattcgttattgctaa

SEQ ID NO: 24222 - DNA, 25 bp, Saccharomyces pastorianus
acctcatcagccgactcagaaaatg

SEQ ID NO: 24223 - DNA, 25 bp, Saccharomyces pastorianus
aaacgtgttaatctagtcagcgaag

SEQ ID NO: 24224 - DNA, 25 bp, Saccharomyces pastorianus
tctttgaggctctaaaacgtgttaa

SEQ ID NO: 24225 - DNA, 25 bp, Saccharomyces pastorianus
ggtgaccaatgatacctcatcagcc

SEQ ID NO: 24226 - DNA, 25 bp, Saccharomyces pastorianus
gatcttggttatggacgctggtgaa

SEQ ID NO: 24227 - DNA, 25 bp, Saccharomyces pastorianus
gatccaactttgttttcagggacaa

SEQ ID NO: 24228 - DNA, 25 bp, Saccharomyces pastorianus
ggaagcacaatattaactatcgcac

SEQ ID NO: 24229 - DNA, 25 bp, Saccharomyces pastorianus
gaaggtgggtccaacttgtcacaag

SEQ ID NO: 24230 - DNA, 25 bp, Saccharomyces pastorianus
gggtgttccatacgctatcgtaaag

SEQ ID NO: 24231 - DNA, 25 bp, Saccharomyces pastorianus
tacgctatcgtaaagggtaaggcca

SEQ ID NO: 24232 - DNA, 25 bp, Saccharomyces pastorianus
gctgccgccattgctgaaggtaaat

SEQ ID NO: 24233 - DNA, 25 bp, Saccharomyces pastorianus
tgctgaaggtaaatccaagcaagac

SEQ ID NO: 24234 - DNA, 25 bp, Saccharomyces pastorianus
taaccaaaagacctccgccgtcgct

SEQ ID NO: 24235 - DNA, 25 bp, Saccharomyces pastorianus
atcgtaaagggtaaggccagattag

SEQ ID NO: 24236 - DNA, 25 bp, Saccharomyces pastorianus
aagccattcgccatcaagtacggtt

SEQ ID NO: 24237 - DNA, 25 bp, Saccharomyces pastorianus
attcgccatcaagtacggtttgaac

SEQ ID NO: 24238 - DNA, 25 bp, Saccharomyces pastorianus
cgccgtcgctgctttgactgaagtc

SEQ ID NO: 24239 - DNA, 25 bp, Saccharomyces pastorianus
ttctccaaagccattcgccatcaag

SEQ ID NO: 24240 - DNA, 25 bp, Saccharomyces pastorianus
gccgccattgctgaaggtaaatcca

SEQ ID NO: 24241 - DNA, 25 bp, Saccharomyces pastorianus
gaaacagcttcactaggtgcgacta

SEQ ID NO: 24242 - DNA, 25 bp, Saccharomyces pastorianus
gtccaatttaagtctgttcagcgtg

SEQ ID NO: 24243 - DNA, 25 bp, Saccharomyces pastorianus
ttttgtcataaatgcctccatggcc

SEQ ID NO: 24244 - DNA, 25 bp, Saccharomyces pastorianus
gagtgatttctcctacaacaacgat

SEQ ID NO: 24245 - DNA, 25 bp, Saccharomyces pastorianus
gaatttggctcgtgacttaggccca

SEQ ID NO: 24246 - DNA, 25 bp, Saccharomyces pastorianus
gtgcgactaccacagattccatggg

SEQ ID NO: 24247 - DNA, 25 bp, Saccharomyces pastorianus
atggcctatcaaacgggtacagcaa

SEQ ID NO: 24248 - DNA, 25 bp, Saccharomyces pastorianus
gaacgttcggaggtataccaaccat

SEQ ID NO: 24249 - DNA, 25 bp, Saccharomyces pastorianus
gatacaccaccatcatttcttttgg

SEQ ID NO: 24250 - DNA, 25 bp, Saccharomyces pastorianus
cgccttgtacgctgttggatttgac

SEQ ID NO: 24251 - DNA, 25 bp, Saccharomyces pastorianus
gtaggtccatttcttggtgcattaa

SEQ ID NO: 24252 - DNA, 25 bp, Saccharomyces pastorianus
gaacaagatgctaccctaaccttta

SEQ ID NO: 24253 - DNA, 25 bp, Saccharomyces pastorianus
aatctattcagccttacttgcagag

SEQ ID NO: 24254 - DNA, 25 bp, Saccharomyces pastorianus
ggaaagccatgctgaacaactccat

SEQ ID NO: 24255 - DNA, 25 bp, Saccharomyces pastorianus
ggatttggtgcctgatttgactaat

SEQ ID NO: 24256 - DNA, 25 bp, Saccharomyces pastorianus
cctatggtattggatgcgttgctga

SEQ ID NO: 24257 - DNA, 25 bp, Saccharomyces pastorianus
tttgtgtgcatgttgttctacttca

SEQ ID NO: 24258 - DNA, 25 bp, Saccharomyces pastorianus
aaagatttaccccttgcctcatatg

SEQ ID NO: 24259 - DNA, 25 bp, Saccharomyces pastorianus
gcttatcgttggctcattgactcga

SEQ ID NO: 24260 - DNA, 25 bp, Saccharomyces pastorianus
cgccgttctaatgcaagcttatcgt

SEQ ID NO: 24261 - DNA, 25 bp, Saccharomyces pastorianus
gaacaactccatgtctttatacaga

SEQ ID NO: 24262 - DNA, 25 bp, Saccharomyces pastorianus
aagtgctgcagagtattccggaccg

SEQ ID NO: 24263 - DNA, 25 bp, Saccharomyces pastorianus
tgaatacctgtcacacgtcatcttg

SEQ ID NO: 24264 - DNA, 25 bp, Saccharomyces pastorianus
cagcagagtgcgtttaccaaggtac

SEQ ID NO: 24265 - DNA, 25 bp, Saccharomyces pastorianus
actttggaaagatccggcctccaga

SEQ ID NO: 24266 - DNA, 25 bp, Saccharomyces pastorianus
tatcagtgaccctatggaacgccgg

SEQ ID NO: 24267 - DNA, 25 bp, Saccharomyces pastorianus
ggtatgatcggactgccaactaaga

SEQ ID NO: 24268 - DNA, 25 bp, Saccharomyces pastorianus
ggaacgccggtctctgtacagaaat

SEQ ID NO: 24269 - DNA, 25 bp, Saccharomyces pastorianus
gggctattcgtccatccagggaatt

SEQ ID NO: 24270 - DNA, 25 bp, Saccharomyces pastorianus
cgaatacttcatccctatcagtgac

SEQ ID NO: 24271 - DNA, 25 bp, Saccharomyces pastorianus
tggattcctggatctcacaagtaat

SEQ ID NO: 24272 - DNA, 25 bp, Saccharomyces pastorianus
aaatattgctattgccgtcagagag

SEQ ID NO: 24273 - DNA, 25 bp, Saccharomyces pastorianus
gctcagtcatttgctagtaccctag

SEQ ID NO: 24274 - DNA, 25 bp, Saccharomyces pastorianus
cgacacgatcgacaatgtaaagagt

SEQ ID NO: 24275 - DNA, 25 bp, Saccharomyces pastorianus
cagaactttgtcggactataacatt

SEQ ID NO: 24276 - DNA, 25 bp, Saccharomyces pastorianus
gagggcattcctccggaccaacaga

SEQ ID NO: 24277 - DNA, 25 bp, Saccharomyces pastorianus
taaagagggcattcctccggaccaa

SEQ ID NO: 24278 - DNA, 25 bp, Saccharomyces pastorianus
aagagggcattcctccggaccaaca

SEQ ID NO: 24279 - DNA, 25 bp, Saccharomyces pastorianus
cggaccaacagaggttgatttttgc

SEQ ID NO: 24280 - DNA, 25 bp, Saccharomyces pastorianus
acacgatcgacaatgtaaagagtaa

SEQ ID NO: 24281 - DNA, 25 bp, Saccharomyces pastorianus
gataaagagggcattcctccggacc

SEQ ID NO: 24282 - DNA, 25 bp, Saccharomyces pastorianus
gtaagatacaggataaagagggcat

SEQ ID NO: 24283 - DNA, 25 bp, Saccharomyces pastorianus
ctccggaccaacagaggttgatttt

SEQ ID NO: 24284 - DNA, 25 bp, Saccharomyces pastorianus
ataaagagggcattcctccggacca

SEQ ID NO: 24285 - DNA, 25 bp, Saccharomyces pastorianus
accattactttggaggtcgagtcct

SEQ ID NO: 24286 - DNA, 25 bp, Saccharomyces pastorianus
gagtcctccgacacgatcgacaatg

SEQ ID NO: 24287 - DNA, 25 bp, Saccharomyces pastorianus
gagtcttctgacaccatcgacaacg

SEQ ID NO: 24288 - DNA, 25 bp, Saccharomyces pastorianus
atcgacaacgtcaagtccaagattc

SEQ ID NO: 24289 - DNA, 25 bp, Saccharomyces pastorianus
aaccttagaggtcgagtcttctgac

SEQ ID NO: 24290 - DNA, 25 bp, Saccharomyces pastorianus
gactggtaagaccataaccttagag

SEQ ID NO: 24291 - DNA, 25 bp, Saccharomyces pastorianus
gaactttgtcggactataacattca

SEQ ID NO: 24292 - DNA, 25 bp, Saccharomyces pastorianus
ctccggaccaacagaggttgatttt

SEQ ID NO: 24293 - DNA, 25 bp, Saccharomyces pastorianus
ggtatgcaaatcttcgtcaagacac

SEQ ID NO: 24294 - DNA, 25 bp, Saccharomyces pastorianus
atcttcgtcaagacactgactggta

SEQ ID NO: 24295 - DNA, 25 bp, Saccharomyces pastorianus
ataaagagggcattcctccggacca

SEQ ID NO: 24296 - DNA, 25 bp, Saccharomyces pastorianus
tggcggcacaagcagactatcgttt

SEQ ID NO: 24297 - DNA, 25 bp, Saccharomyces pastorianus
gatcatccagatcatccgaaagcgg

SEQ ID NO: 24298 - DNA, 25 bp, Saccharomyces pastorianus
ggaggaactcacaccgcagctgtat

SEQ ID NO: 24299 - DNA, 25 bp, Saccharomyces pastorianus
tggacttccagagacaacgcactaa

SEQ ID NO: 24300 - DNA, 25 bp, Saccharomyces pastorianus
gactttcaggtccaggatacccggg

SEQ ID NO: 24301 - DNA, 25 bp, Saccharomyces pastorianus
agtgaagactctcctagtgcagctg

SEQ ID NO: 24302 - DNA, 25 bp, Saccharomyces pastorianus
actgacgctggtgtcgtacttgatg

SEQ ID NO: 24303 - DNA, 25 bp, Saccharomyces pastorianus
acgctcgattttcattagtgcctct

SEQ ID NO: 24304 - DNA, 25 bp, Saccharomyces pastorianus
cgaaagcggctgttacttgggcaga

SEQ ID NO: 24305 - DNA, 25 bp, Saccharomyces pastorianus
aaggacgtgatccaattccggtcga

SEQ ID NO: 24306 - DNA, 25 bp, Saccharomyces pastorianus
tttgacgtacagtcccaagacggta

SEQ ID NO: 24307 - DNA, 25 bp, Saccharomyces pastorianus
catccggtttcccatggaattccaa

SEQ ID NO: 24308 - DNA, 25 bp, Saccharomyces pastorianus
cgcttttgaaatcggctcctttaca

SEQ ID NO: 24309 - DNA, 25 bp, Saccharomyces pastorianus
ttacgattttgctccgcttttgaaa

SEQ ID NO: 24310 - DNA, 25 bp, Saccharomyces pastorianus
aattagattacgattttgctccgct

SEQ ID NO: 24311 - DNA, 25 bp, Saccharomyces pastorianus
ggctcctttacagatttcatacggt

SEQ ID NO: 24312 - DNA, 25 bp, Saccharomyces pastorianus
acgtggtatccaaggcatccggttt

SEQ ID NO: 24313 - DNA, 25 bp, Saccharomyces pastorianus
gcttcacctgctaggttccatgcat

SEQ ID NO: 24314 - DNA, 25 bp, Saccharomyces pastorianus
ccatgcatcacaactacgaactttc

SEQ ID NO: 24315 - DNA, 25 bp, Saccharomyces pastorianus
atttaaatcacgcttcacctgctag

SEQ ID NO: 24316 - DNA, 25 bp, Saccharomyces pastorianus
aaggcatccggtttcccatggaatt

SEQ ID NO: 24317 - DNA, 25 bp, Saccharomyces pastorianus
tacggtggagataaacgtggtatcc

SEQ ID NO: 24318 - DNA, 25 bp, Saccharomyces pastorianus
tgatcgttgttccttttctgcaaac

SEQ ID NO: 24319 - DNA, 25 bp, Saccharomyces pastorianus
agataaacctatagatgctcgcaag

SEQ ID NO: 24320 - DNA, 25 bp, Saccharomyces pastorianus
ttacaacggacttggttacggctat

SEQ ID NO: 24321 - DNA, 25 bp, Saccharomyces pastorianus
aaatgccaggcgtgacaccagcaga

SEQ ID NO: 24322 - DNA, 25 bp, Saccharomyces pastorianus
acgtcaaacaaacagcctcaactac

SEQ ID NO: 24323 - DNA, 25 bp, Saccharomyces pastorianus
aatgctaaccacaatgctactaatg

SEQ ID NO: 24324 - DNA, 25 bp, Saccharomyces pastorianus
aagaccttatcactttcactattga

SEQ ID NO: 24325 - DNA, 25 bp, Saccharomyces pastorianus
gagctcgggccatcaagggatacat

SEQ ID NO: 24326 - DNA, 25 bp, Saccharomyces pastorianus
gaatggcgcgtttggtcatgaatac

SEQ ID NO: 24327 - DNA, 25 bp, Saccharomyces pastorianus
caaccgaattgctatctgattacat

SEQ ID NO: 24328 - DNA, 25 bp, Saccharomyces pastorianus
tttgggaagtccaccacaacgtcaa

SEQ ID NO: 24329 - DNA, 25 bp, Saccharomyces pastorianus
atagccatcatcctgaacacttttg

SEQ ID NO: 24330 - DNA, 25 bp, Saccharomyces pastorianus
ctggctcaattatcatacttcctca

SEQ ID NO: 24331 - DNA, 25 bp, Saccharomyces pastorianus
caagatttatcttcgctgctttgag

SEQ ID NO: 24332 - DNA, 25 bp, Saccharomyces pastorianus
tagggctcttatcataccaacactt

SEQ ID NO: 24333 - DNA, 25 bp, Saccharomyces pastorianus
aattggtccaattgccttagggctc

SEQ ID NO: 24334 - DNA, 25 bp, Saccharomyces pastorianus
ggacctcaaattctcgtttctttat

SEQ ID NO: 24335 - DNA, 25 bp, Saccharomyces pastorianus
gtcacagcctccagatgtcttaaag

SEQ ID NO: 24336 - DNA, 25 bp, Saccharomyces pastorianus
gttcggagtttttcctcttagtcat

SEQ ID NO: 24337 - DNA, 25 bp, Saccharomyces pastorianus
gtcactcaactggtggtcacattcg

SEQ ID NO: 24338 - DNA, 25 bp, Saccharomyces pastorianus
atttatctgggttactcacttccgt

SEQ ID NO: 24339 - DNA, 25 bp, Saccharomyces pastorianus
attcggcaccattgcatttgctagt

SEQ ID NO: 24340 - DNA, 25 bp, Saccharomyces pastorianus
gagagattggtgttccctgaagaca

SEQ ID NO: 24341 - DNA, 25 bp, Saccharomyces pastorianus
gccagacagtttctatggtcgcgtg

SEQ ID NO: 24342 - DNA, 25 bp, Saccharomyces pastorianus
atcataagcaacgagcccgggtact

SEQ ID NO: 24343 - DNA, 25 bp, Saccharomyces pastorianus
agaacggtggtgcatttcctgcaac

SEQ ID NO: 24344 - DNA, 25 bp, Saccharomyces pastorianus
ggatcttttctgaacgtccacgaag

SEQ ID NO: 24345 - DNA, 25 bp, Saccharomyces pastorianus
ggaaactgatcaacaccaagctact

SEQ ID NO: 24346 - DNA, 25 bp, Saccharomyces pastorianus
agtatcgacgccattgccagacagt

SEQ ID NO: 24347 - DNA, 25 bp, Saccharomyces pastorianus
tccggttcgcagttcctggaaggaa

SEQ ID NO: 24348 - DNA, 25 bp, Saccharomyces pastorianus
gtcgcgtgggctggactacaagcac

SEQ ID NO: 24349 - DNA, 25 bp, Saccharomyces pastorianus
tttcctgcaacctcaaagtatctca

SEQ ID NO: 24350 - DNA, 25 bp, Saccharomyces pastorianus
gatggacaactacacgctggttctc

SEQ ID NO: 24351 - DNA, 25 bp, Saccharomyces pastorianus
atcatcgagtcgtacttgcctttgg

SEQ ID NO: 24352 - DNA, 25 bp, Saccharomyces pastorianus
tgaattgccgtatatcgccttgatt

SEQ ID NO: 24353 - DNA, 25 bp, Saccharomyces pastorianus
gattgtactccatgatcgttgcagg

SEQ ID NO: 24354 - DNA, 25 bp, Saccharomyces pastorianus
acagtaggcggttccttcattgggt

SEQ ID NO: 24355 - DNA, 25 bp, Saccharomyces pastorianus
gtgtgtgctgcttttatctggtaca

SEQ ID NO: 24356 - DNA, 25 bp, Saccharomyces pastorianus
agaagcctaccctcttgtgtttgtg

SEQ ID NO: 24357 - DNA, 25 bp, Saccharomyces pastorianus
acggtatcctgtatctactgctaga

SEQ ID NO: 24358 - DNA, 25 bp, Saccharomyces pastorianus
ccgtgcctctgctgtttttgaaata

SEQ ID NO: 24359 - DNA, 25 bp, Saccharomyces pastorianus
gagatccggatttggtgcgtgcttc

SEQ ID NO: 24360 - DNA, 25 bp, Saccharomyces pastorianus
caggtactattttccccattggtat

SEQ ID NO: 24361 - DNA, 25 bp, Saccharomyces pastorianus
ttactaggtctattttccgctgcca

SEQ ID NO: 24362 - DNA, 25 bp, Saccharomyces pastorianus
atgacctctaatctaggtgccgaat

SEQ ID NO: 24363 - DNA, 25 bp, Saccharomyces pastorianus
gtcttaccaaaccacaaggctacta

SEQ ID NO: 24364 - DNA, 25 bp, Saccharomyces pastorianus
aagaaaggccatccataagatcgtg

SEQ ID NO: 24365 - DNA, 25 bp, Saccharomyces pastorianus
ggtgccgaattcatcaattcccaac

SEQ ID NO: 24366 - DNA, 25 bp, Saccharomyces pastorianus
gtgggtgctgttaagcaacacttca

SEQ ID NO: 24367 - DNA, 25 bp, Saccharomyces pastorianus
ctaaaaatttggtcgtgggtgctgt

SEQ ID NO: 24368 - DNA, 25 bp, Saccharomyces pastorianus
gggtgcacgtccattaaacagatta

SEQ ID NO: 24369 - DNA, 25 bp, Saccharomyces pastorianus
aaggctactacaagtgctgacacat

SEQ ID NO: 24370 - DNA, 25 bp, Saccharomyces pastorianus
aaaacccgtgatgaaaatgtctctg

SEQ ID NO: 24371 - DNA, 25 bp, Saccharomyces pastorianus
gaagccaaggatttcctagccagat

SEQ ID NO: 24372 - DNA, 25 bp, Saccharomyces pastorianus
gagccaagatccaagattcgactaa

SEQ ID NO: 24373 - DNA, 25 bp, Saccharomyces pastorianus
agagagcctacaacgcggtcaagat

SEQ ID NO: 24374 - DNA, 25 bp, Saccharomyces pastorianus
gatgtgttgtacctgattctggccg

SEQ ID NO: 24375 - DNA, 25 bp, Saccharomyces pastorianus
agtcgcgcatttccggcttgttaaa

SEQ ID NO: 24376 - DNA, 25 bp, Saccharomyces pastorianus
agatcctggatcatgctggcagtgt

SEQ ID NO: 24377 - DNA, 25 bp, Saccharomyces pastorianus
aaaagtgttccatctgtccagcaag

SEQ ID NO: 24378 - DNA, 25 bp, Saccharomyces pastorianus
tcaagatgagtctggtccgcgtgtc

SEQ ID NO: 24379 - DNA, 25 bp, Saccharomyces pastorianus
gccattttatgcttccagagatcct

SEQ ID NO: 24380 - DNA, 25 bp, Saccharomyces pastorianus
gattttcatcttgatcctgttcaga

SEQ ID NO: 24381 - DNA, 25 bp, Saccharomyces pastorianus
cagtttgatcccatttttcgcattt

SEQ ID NO: 24382 - DNA, 25 bp, Saccharomyces pastorianus
aaggcctcggtgaagtcgcgcattt

SEQ ID NO: 24383 - DNA, 25 bp, Saccharomyces pastorianus
gtggcatcctcaggttcatcgacaa

SEQ ID NO: 24384 - DNA, 25 bp, Saccharomyces pastorianus
gatttgcccaagagatcgagctggt

SEQ ID NO: 24385 - DNA, 25 bp, Saccharomyces pastorianus
agcgagttgtttgtgttcatcttca

SEQ ID NO: 24386 - DNA, 25 bp, Saccharomyces pastorianus
gaagtcttggacactttgagcgagt

SEQ ID NO: 24387 - DNA, 25 bp, Saccharomyces pastorianus
attcctgggcaagttggtgcgcgac

SEQ ID NO: 24388 - DNA, 25 bp, Saccharomyces pastorianus
ctaaaggactactgcgacgggttca

SEQ ID NO: 24389 - DNA, 25 bp, Saccharomyces pastorianus
aaaatggtccgtcttacatacaagg

SEQ ID NO: 24390 - DNA, 25 bp, Saccharomyces pastorianus
gaggagatcttgtccggtgcgcaac

SEQ ID NO: 24391 - DNA, 25 bp, Saccharomyces pastorianus
atactccaactcttacgatttcttc

SEQ ID NO: 24392 - DNA, 25 bp, Saccharomyces pastorianus
gaaagtgcacggcttatccaccgaa

SEQ ID NO: 24393 - DNA, 25 bp, Saccharomyces pastorianus
caccgacttctacatcttggacaaa

SEQ ID NO: 24394 - DNA, 25 bp, Saccharomyces pastorianus
cttggacaaattccccttggagatc

SEQ ID NO: 24395 - DNA, 25 bp, Saccharomyces pastorianus
gttcaggatagttgcgcactagtcc

SEQ ID NO: 24396 - DNA, 25 bp, Saccharomyces pastorianus
gagctccaatgaagaggtctttagt

SEQ ID NO: 24397 - DNA, 25 bp, Saccharomyces pastorianus
ttttcgaatcatttatcagagagtt

SEQ ID NO: 24398 - DNA, 25 bp, Saccharomyces pastorianus
gtggtcgataataaaaagcgtctac

SEQ ID NO: 24399 - DNA, 25 bp, Saccharomyces pastorianus
tcaatgggttcctttggttcctagc

SEQ ID NO: 24400 - DNA, 25 bp, Saccharomyces pastorianus
tcagagagttaactgggttcgtcat

SEQ ID NO: 24401 - DNA, 25 bp, Saccharomyces pastorianus
aagcgtctactattcgttcaggata

SEQ ID NO: 24402 - DNA, 25 bp, Saccharomyces pastorianus
gaatctgtcaatgggttcctttggt

SEQ ID NO: 24403 - DNA, 25 bp, Saccharomyces pastorianus
tacaaccagggaaattctaccaaag

SEQ ID NO: 24404 - DNA, 25 bp, Saccharomyces pastorianus
gcagggtttttgcagattgaatctg

SEQ ID NO: 24405 - DNA, 25 bp, Saccharomyces pastorianus
tcctagccctgtacaacttgatcaa

SEQ ID NO: 24406 - DNA, 25 bp, Saccharomyces pastorianus
cagattattcagagaggcttgctat

SEQ ID NO: 24407 - DNA, 25 bp, Saccharomyces pastorianus
ggtctttactgcaagtgtctcgagg

SEQ ID NO: 24408 - DNA, 25 bp, Saccharomyces pastorianus
tttgcgatctgctgatttcgtccta

SEQ ID NO: 24409 - DNA, 25 bp, Saccharomyces pastorianus
aacaagaccagtaccatgcaccggg

SEQ ID NO: 24410 - DNA, 25 bp, Saccharomyces pastorianus
atcaatctaacgctcttgcaacaag

SEQ ID NO: 24411 - DNA, 25 bp, Saccharomyces pastorianus
ttcgtcctacccgtggagatagatg

SEQ ID NO: 24412 - DNA, 25 bp, Saccharomyces pastorianus
gaccgttatcggagatcatcatcct

SEQ ID NO: 24413 - DNA, 25 bp, Saccharomyces pastorianus
gtgacccgctactcgatatactaga

SEQ ID NO: 24414 - DNA, 25 bp, Saccharomyces pastorianus
attcgaagtcgtggtctttactgca

SEQ ID NO: 24415 - DNA, 25 bp, Saccharomyces pastorianus
gactctagtacattcgtctttcaaa

SEQ ID NO: 24416 - DNA, 25 bp, Saccharomyces pastorianus
gtgtctcgaggtacggtgacccgct

SEQ ID NO: 24417 - DNA, 25 bp, Saccharomyces pastorianus
agaacaagaaaaccacgcggagtgc

SEQ ID NO: 24418 - DNA, 25 bp, Saccharomyces pastorianus
agccatgttgcgtctgtaagccaga

SEQ ID NO: 24419 - DNA, 25 bp, Saccharomyces pastorianus
aaacctaagccatgttgcgtctgta

SEQ ID NO: 24420 - DNA, 25 bp, Saccharomyces pastorianus
gtgcgaggacaaacctaagccatgt

SEQ ID NO: 24421 - DNA, 25 bp, Saccharomyces pastorianus
cttattcaatggacaagactctgaa

SEQ ID NO: 24422 - DNA, 25 bp, Saccharomyces pastorianus
aaaccacgcggagtgcgaggacaaa

SEQ ID NO: 24423 - DNA, 25 bp, Saccharomyces pastorianus
gttgcgtctgtaagccagaaaagga

SEQ ID NO: 24424 - DNA, 25 bp, Saccharomyces pastorianus
gcgggatacatgcatcttattcaat

SEQ ID NO: 24425 - DNA, 25 bp, Saccharomyces pastorianus
ggaggagcgggatacatgcatctta

SEQ ID NO: 24426 - DNA, 25 bp, Saccharomyces pastorianus
acatgcatcttattcaatggacaag

SEQ ID NO: 24427 - DNA, 25 bp, Saccharomyces pastorianus
agactctgaaaaatgcaaggaattc

SEQ ID NO: 24428 - DNA, 25 bp, Saccharomyces pastorianus
gatgataatggttcacgttcctata

SEQ ID NO: 24429 - DNA, 25 bp, Saccharomyces pastorianus
gaatgatcgtgtcacagaccaagaa

SEQ ID NO: 24430 - DNA, 25 bp, Saccharomyces pastorianus
gcattgttcgtgctgctatcaagag

SEQ ID NO: 24431 - DNA, 25 bp, Saccharomyces pastorianus
atcgtctcatgatcgtagcattgtt

SEQ ID NO: 24432 - DNA, 25 bp, Saccharomyces pastorianus
aagcgtgaagaagccatcgctgatg

SEQ ID NO: 24433 - DNA, 25 bp, Saccharomyces pastorianus
gtggaatcaatgagcgataccgttg

SEQ ID NO: 24434 - DNA, 25 bp, Saccharomyces pastorianus
ggatatccccaaaatcgaagtcgtt

SEQ ID NO: 24435 - DNA, 25 bp, Saccharomyces pastorianus
gctcttggtagaaacgtggactgga

SEQ ID NO: 24436 - DNA, 25 bp, Saccharomyces pastorianus
cgttgtcaattacgatatgcccaag

SEQ ID NO: 24437 - DNA, 25 bp, Saccharomyces pastorianus
tagggaaggtcgttctgtcacactt

SEQ ID NO: 24438 - DNA, 25 bp, Saccharomyces pastorianus
cacacttgtgggtgaatcgtctcat

SEQ ID NO: 24439 - DNA, 25 bp, Saccharomyces pastorianus
aacggatgatttgccttatttattt

SEQ ID NO: 24440 - DNA, 25 bp, Saccharomyces pastorianus
aatgtatacaccgaagttgagctaa

SEQ ID NO: 24441 - DNA, 25 bp, Saccharomyces pastorianus
gaagacccattaaacacggaagccg

SEQ ID NO: 24442 - DNA, 25 bp, Saccharomyces pastorianus
gaaacttatatcaccatcccatcat

SEQ ID NO: 24443 - DNA, 25 bp, Saccharomyces pastorianus
accgagccgtcgaactggtagtaat

SEQ ID NO: 24444 - DNA, 25 bp, Saccharomyces pastorianus
agagaacttacaacaccgagccgtc

SEQ ID NO: 24445 - DNA, 25 bp, Saccharomyces pastorianus
tcacgaggaggattcgatagcgcct

SEQ ID NO: 24446 - DNA, 25 bp, Saccharomyces pastorianus
agacacactgtttgacttgaggaaa

SEQ ID NO: 24447 - DNA, 25 bp, Saccharomyces pastorianus
ttgagctaaaagaccgcaacgacag

SEQ ID NO: 24448 - DNA, 25 bp, Saccharomyces pastorianus
cgcctccacccaaatcgaatgatga

SEQ ID NO: 24449 - DNA, 25 bp, Saccharomyces pastorianus
ataatcatgcgagtcttttagccag

SEQ ID NO: 24450 - DNA, 25 bp, Saccharomyces pastorianus
ttgggaacaagtgctgccttcgctc

SEQ ID NO: 24451 - DNA, 25 bp, Saccharomyces pastorianus
gtgggccagttgtttaagctttatc

SEQ ID NO: 24452 - DNA, 25 bp, Saccharomyces pastorianus
caatcgatttttccctcctacaaat

SEQ ID NO: 24453 - DNA, 25 bp, Saccharomyces pastorianus
ggaacgacttcattttgagcctatt

SEQ ID NO: 24454 - DNA, 25 bp, Saccharomyces pastorianus
aatttgttgctcaatttctcgaaga

SEQ ID NO: 24455 - DNA, 25 bp, Saccharomyces pastorianus
agtggactactcacccaatcgattt

SEQ ID NO: 24456 - DNA, 25 bp, Saccharomyces pastorianus
attcgtatcttgatcgttggcctgc

SEQ ID NO: 24457 - DNA, 25 bp, Saccharomyces pastorianus
gccttcgctcgatggagacaccgat

SEQ ID NO: 24458 - DNA, 25 bp, Saccharomyces pastorianus
gttggcctgcatgcaaagagcacaa

SEQ ID NO: 24459 - DNA, 25 bp, Saccharomyces pastorianus
ggagaagccccagatgcgtttgaaa

SEQ ID NO: 24460 - DNA, 25 bp, Saccharomyces pastorianus
cactgcgttcagagagactttgcca

SEQ ID NO: 24461 - DNA, 25 bp, Saccharomyces pastorianus
atccatctcctcaaatgcagaccaa

SEQ ID NO: 24462 - DNA, 25 bp, Saccharomyces pastorianus
aagagctattagttgaggaccagac

SEQ ID NO: 24463 - DNA, 25 bp, Saccharomyces pastorianus
gcggaaccgggaattgttatcaaag

SEQ ID NO: 24464 - DNA, 25 bp, Saccharomyces pastorianus
agcagttatgtgcttactcgtaaat

SEQ ID NO: 24465 - DNA, 25 bp, Saccharomyces pastorianus
taaatttctgtaaggattccgttca

SEQ ID NO: 24466 - DNA, 25 bp, Saccharomyces pastorianus
gacgaccttggaaacgctgaaccgc

SEQ ID NO: 24467 - DNA, 25 bp, Saccharomyces pastorianus
agggccaaccagtgtttgatgcatc

SEQ ID NO: 24468 - DNA, 25 bp, Saccharomyces pastorianus
ggattccgttcaaaataggctagtg

SEQ ID NO: 24469 - DNA, 25 bp, Saccharomyces pastorianus
accagcaacactaatggcactccat

SEQ ID NO: 24470 - DNA, 25 bp, Saccharomyces pastorianus
aagaatccctatttgaagagctatt

SEQ ID NO: 24471 - DNA, 25 bp, Saccharomyces pastorianus
gaggaccagactttggctcaagata

SEQ ID NO: 24472 - DNA, 25 bp, Saccharomyces pastorianus
ggccgatcctctcagtaacgaaaca

SEQ ID NO: 24473 - DNA, 25 bp, Saccharomyces pastorianus
ggaaagggctacagcattcaccaaa

SEQ ID NO: 24474 - DNA, 25 bp, Saccharomyces pastorianus
agaccatatattcttccgttccaaa

SEQ ID NO: 24475 - DNA, 25 bp, Saccharomyces pastorianus
gaattcgacaacctttcttctgacg

SEQ ID NO: 24476 - DNA, 25 bp, Saccharomyces pastorianus
taaatccctaaggttggccgatcct

SEQ ID NO: 24477 - DNA, 25 bp, Saccharomyces pastorianus
acatgtgcattggtcatactccaga

SEQ ID NO: 24478 - DNA, 25 bp, Saccharomyces pastorianus
agtatcgcgattctcaaattcattg

SEQ ID NO: 24479 - DNA, 25 bp, Saccharomyces pastorianus
aaatctcgggtctttactcatctga

SEQ ID NO: 24480 - DNA, 25 bp, Saccharomyces pastorianus
cactatgggataacgctcttcttga

SEQ ID NO: 24481 - DNA, 25 bp, Saccharomyces pastorianus
taacgtttccactaaagcagagctt

SEQ ID NO: 24482 - DNA, 25 bp, Saccharomyces pastorianus
ttgtggatgggctttacacgctatt

SEQ ID NO: 24483 - DNA, 25 bp, Saccharomyces pastorianus
ttgatacgtgaaaagaaccccgact

SEQ ID NO: 24484 - DNA, 25 bp, Saccharomyces pastorianus
gcaaaagttttctgtggcaccaaaa

SEQ ID NO: 24485 - DNA, 25 bp, Saccharomyces pastorianus
aacgtttacttggtgatagctcgaa

SEQ ID NO: 24486 - DNA, 25 bp, Saccharomyces pastorianus
gaaccccgacttgagtgctttggaa

SEQ ID NO: 24487 - DNA, 25 bp, Saccharomyces pastorianus
agaatgcagtcgttctctgtcaggt

SEQ ID NO: 24488 - DNA, 25 bp, Saccharomyces pastorianus
aatcgattcctacaagttcacctga

SEQ ID NO: 24489 - DNA, 25 bp, Saccharomyces pastorianus
aaggatttcctctctacagaaaaat

SEQ ID NO: 24490 - DNA, 25 bp, Saccharomyces pastorianus
gaaggacgatatagccactgtggaa

SEQ ID NO: 24491 - DNA, 25 bp, Saccharomyces pastorianus
attagagtagctgacgtttatcgta

SEQ ID NO: 24492 - DNA, 25 bp, Saccharomyces pastorianus
aaagatcgtcttttcaatgtccaat

SEQ ID NO: 24493 - DNA, 25 bp, Saccharomyces pastorianus
gattctttttatttcattgccacgc

SEQ ID NO: 24494 - DNA, 25 bp, Saccharomyces pastorianus
gggttcccgacacgaatatttgaag

SEQ ID NO: 24495 - DNA, 25 bp, Saccharomyces pastorianus
gtgatttgatgctgatcctctctac

SEQ ID NO: 24496 - DNA, 25 bp, Saccharomyces pastorianus
gaactacggtgacgaatctttctat

SEQ ID NO: 24497 - DNA, 25 bp, Saccharomyces pastorianus
tttagccagatcataccaccattta

SEQ ID NO: 24498 - DNA, 25 bp, Saccharomyces pastorianus
ttactcgacgagacccatttgaagg

SEQ ID NO: 24499 - DNA, 25 bp, Saccharomyces pastorianus
tcatgccactccaaactggtttatg

SEQ ID NO: 24500 - DNA, 25 bp, Saccharomyces pastorianus
tactccaactttttgctcatgccac

SEQ ID NO: 24501 - DNA, 25 bp, Saccharomyces pastorianus
cagtgtgtccatgctgtgatttgat

SEQ ID NO: 24502 - DNA, 25 bp, Saccharomyces pastorianus
gtttcagttgccaatctagattccc

SEQ ID NO: 24503 - DNA, 25 bp, Saccharomyces pastorianus
ggctattactccattacctgttaac

SEQ ID NO: 24504 - DNA, 25 bp, Saccharomyces pastorianus
aagttctcgttaccgctgcgaagat

SEQ ID NO: 24505 - DNA, 25 bp, Saccharomyces pastorianus
cattggagacctcagtcgtcgtgaa

SEQ ID NO: 24506 - DNA, 25 bp, Saccharomyces pastorianus
gaccaagttagccactcggtttaat

SEQ ID NO: 24507 - DNA, 25 bp, Saccharomyces pastorianus
agatttgttgctccgattgtgtgaa

SEQ ID NO: 24508 - DNA, 25 bp, Saccharomyces pastorianus
tgtctatgttaacttggcgtccacg

SEQ ID NO: 24509 - DNA, 25 bp, Saccharomyces pastorianus
ggaactccaatctgccgaaatgggt

SEQ ID NO: 24510 - DNA, 25 bp, Saccharomyces pastorianus
aagctcggcattgatcttcgctgca

SEQ ID NO: 24511 - DNA, 25 bp, Saccharomyces pastorianus
aaggcgttagatgcggccacgaatc

SEQ ID NO: 24512 - DNA, 25 bp, Saccharomyces pastorianus
ggagagaacagcctaccccaaattt

SEQ ID NO: 24513 - DNA, 25 bp, Saccharomyces pastorianus
aactgtattctcatggcagccacgg

SEQ ID NO: 24514 - DNA, 25 bp, Saccharomyces pastorianus
gtccacggatctcttacagtttcaa

SEQ ID NO: 24515 - DNA, 25 bp, Saccharomyces pastorianus
ttaaatcctgtactttcactgtggg

SEQ ID NO: 24516 - DNA, 25 bp, Saccharomyces pastorianus
ggccatggccagaatcgaagaaatc

SEQ ID NO: 24517 - DNA, 25 bp, Saccharomyces pastorianus
gagaagtccaaatcgccaagaattt

SEQ ID NO: 24518 - DNA, 25 bp, Saccharomyces pastorianus
ccaaggaacaagaaagagccgaatt

SEQ ID NO: 24519 - DNA, 25 bp, Saccharomyces pastorianus
gaatcagagaagtccaaatcgccaa

SEQ ID NO: 24520 - DNA, 25 bp, Saccharomyces pastorianus
taaccctgaactattgagaatcaga

SEQ ID NO: 24521 - DNA, 25 bp, Saccharomyces pastorianus
gattctgtcgttcgaaatgtcacaa

SEQ ID NO: 24522 - DNA, 25 bp, Saccharomyces pastorianus
tgttcctgttagatacaacagagaa

SEQ ID NO: 24523 - DNA, 25 bp, Saccharomyces pastorianus
gagccgaattagaaaaccaacaaga

SEQ ID NO: 24524 - DNA, 25 bp, Saccharomyces pastorianus
aacagagaactagttgccacaactt

SEQ ID NO: 24525 - DNA, 25 bp, Saccharomyces pastorianus
atcgccaagaatttggccaaggaac

SEQ ID NO: 24526 - DNA, 25 bp, Saccharomyces pastorianus
aagaattcagattctgtcgttcgaa

SEQ ID NO: 24527 - DNA, 25 bp, Saccharomyces pastorianus
actgacggccttttctgtaagatgg

SEQ ID NO: 24528 - DNA, 25 bp, Saccharomyces pastorianus
ggaacgtaccaaagcccgccaatct

SEQ ID NO: 24529 - DNA, 25 bp, Saccharomyces pastorianus
gcgagcgattgttttcggctcataa

SEQ ID NO: 24530 - DNA, 25 bp, Saccharomyces pastorianus
tgagtctatatatgagcgagcgatt

SEQ ID NO: 24531 - DNA, 25 bp, Saccharomyces pastorianus
atggtcgttcagttagtagacttct

SEQ ID NO: 24532 - DNA, 25 bp, Saccharomyces pastorianus
ggctcataaagacgatcccatgtta

SEQ ID NO: 24533 - DNA, 25 bp, Saccharomyces pastorianus
ggacagatccttgacattcgaattg

SEQ ID NO: 24534 - DNA, 25 bp, Saccharomyces pastorianus
gtagacttcttgttctgtgagcgta

SEQ ID NO: 24535 - DNA, 25 bp, Saccharomyces pastorianus
aggaacctttgctgttctggtgtaa

SEQ ID NO: 24536 - DNA, 25 bp, Saccharomyces pastorianus
taaagaacgcactgacggccttttc

SEQ ID NO: 24537 - DNA, 25 bp, Saccharomyces pastorianus
aagcacaaccgtattcaatcatcta

SEQ ID NO: 24538 - DNA, 25 bp, Saccharomyces pastorianus
tcctccaacggtacctgtttgaaca

SEQ ID NO: 24539 - DNA, 25 bp, Saccharomyces pastorianus
ggtgatgtcctgacactttcagaat

SEQ ID NO: 24540 - DNA, 25 bp, Saccharomyces pastorianus
gtggaaccacaggatgctatctctc

SEQ ID NO: 24541 - DNA, 25 bp, Saccharomyces pastorianus
atgtcatggatttggactcctccaa

SEQ ID NO: 24542 - DNA, 25 bp, Saccharomyces pastorianus
gcgttatccagtttaggagcgtcca

SEQ ID NO: 24543 - DNA, 25 bp, Saccharomyces pastorianus
ggatgctatctctcccgataaatat

SEQ ID NO: 24544 - DNA, 25 bp, Saccharomyces pastorianus
gaggcccttggataggaggtaccat

SEQ ID NO: 24545 - DNA, 25 bp, Saccharomyces pastorianus
atagccttaaagcacgtggaaccac

SEQ ID NO: 24546 - DNA, 25 bp, Saccharomyces pastorianus
aacaacgttgtagtgcctagggcca

SEQ ID NO: 24547 - DNA, 25 bp, Saccharomyces pastorianus
tgatttcagaccttcagggctgcta

SEQ ID NO: 24548 - DNA, 25 bp, Saccharomyces pastorianus
taagctggacttagatccgcgagat

SEQ ID NO: 24549 - DNA, 25 bp, Saccharomyces pastorianus
tagcccgtgagtgtgaactgcctta

SEQ ID NO: 24550 - DNA, 25 bp, Saccharomyces pastorianus
tttccacgcgtgctgagtccaagat

SEQ ID NO: 24551 - DNA, 25 bp, Saccharomyces pastorianus
aacatgagtgttatccctgaagcaa

SEQ ID NO: 24552 - DNA, 25 bp, Saccharomyces pastorianus
ggcctccaagatcattgtgtccatg

SEQ ID NO: 24553 - DNA, 25 bp, Saccharomyces pastorianus
aacgggcgtaatgcgaacctcttgg

SEQ ID NO: 24554 - DNA, 25 bp, Saccharomyces pastorianus
gggcataagacactcatcgtacctc

SEQ ID NO: 24555 - DNA, 25 bp, Saccharomyces pastorianus
ggattcggacaaccattttctgaga

SEQ ID NO: 24556 - DNA, 25 bp, Saccharomyces pastorianus
gaccgtagtctgcatggaaggccca

SEQ ID NO: 24557 - DNA, 25 bp, Saccharomyces pastorianus
ataccagagttcatgcacagcggcg

SEQ ID NO: 24558 - DNA, 25 bp, Saccharomyces pastorianus
agcccagggattttgttttgccgca

SEQ ID NO: 24559 - DNA, 25 bp, Saccharomyces pastorianus
aggcagagcctgtcaccgtggaaac

SEQ ID NO: 24560 - DNA, 25 bp, Saccharomyces pastorianus
tgaagcaggccaacaccgtgtacta

SEQ ID NO: 24561 - DNA, 25 bp, Saccharomyces pastorianus
tgtgccagctagtgatctctctgaa

SEQ ID NO: 24562 - DNA, 25 bp, Saccharomyces pastorianus
ggaacttgtcgactacgtgtgccag

SEQ ID NO: 24563 - DNA, 25 bp, Saccharomyces pastorianus
ggaagcttttgtccaccgtcaaaat

SEQ ID NO: 24564 - DNA, 25 bp, Saccharomyces pastorianus
gaacattctattctccttgtggaag

SEQ ID NO: 24565 - DNA, 25 bp, Saccharomyces pastorianus
aaaatcgccgatttgagcctgacca

SEQ ID NO: 24566 - DNA, 25 bp, Saccharomyces pastorianus
gtactactcgacgttcagttggttg

SEQ ID NO: 24567 - DNA, 25 bp, Saccharomyces pastorianus
aattttgcaacaggttgtcccggct

SEQ ID NO: 24568 - DNA, 25 bp, Saccharomyces pastorianus
aaagctcctgggtgtggatacgccg

SEQ ID NO: 24569 - DNA, 25 bp, Saccharomyces pastorianus
aagcaacgtttttggcagtctacaa

SEQ ID NO: 24570 - DNA, 25 bp, Saccharomyces pastorianus
gctaccagcggcactctattgagaa

SEQ ID NO: 24571 - DNA, 25 bp, Saccharomyces pastorianus
gaacctatcacagatcggcagaccg

SEQ ID NO: 24572 - DNA, 25 bp, Saccharomyces pastorianus
atccaccaccggctttttagagagg

SEQ ID NO: 24573 - DNA, 25 bp, Saccharomyces pastorianus
taacgagttgctggacatcatcccc

SEQ ID NO: 24574 - DNA, 25 bp, Saccharomyces pastorianus
gaagtgcctgatcttggaccttgac

SEQ ID NO: 24575 - DNA, 25 bp, Saccharomyces pastorianus
cttggttttcagacactcacgataa

SEQ ID NO: 24576 - DNA, 25 bp, Saccharomyces pastorianus
tacgaggttgtcgtcttcactgcta

SEQ ID NO: 24577 - DNA, 25 bp, Saccharomyces pastorianus
ggactttccagatttgatgcacttg

SEQ ID NO: 24578 - DNA, 25 bp, Saccharomyces pastorianus
attattctagacaactcaccggctt

SEQ ID NO: 24579 - DNA, 25 bp, Saccharomyces pastorianus
gttttgcccgtggagatcgatgacc

SEQ ID NO: 24580 - DNA, 25 bp, Saccharomyces pastorianus
acttgacgccaaccctagaggagga

SEQ ID NO: 24581 - DNA, 25 bp, Saccharomyces pastorianus
tagagaggcctgctacaactacgaa

SEQ ID NO: 24582 - DNA, 25 bp, Saccharomyces pastorianus
gcagcgacccaaaagtacctgtggt

SEQ ID NO: 24583 - DNA, 25 bp, Saccharomyces pastorianus
ggctaaacccgcttcttgatattga

SEQ ID NO: 24584 - DNA, 25 bp, Saccharomyces pastorianus
gtgcatcacccgacggcaatgaatt

SEQ ID NO: 24585 - DNA, 25 bp, Saccharomyces pastorianus
gataccagaagtgaacggcgcaatg

SEQ ID NO: 24586 - DNA, 25 bp, Saccharomyces pastorianus
gatattgatccagtgccattagcag

SEQ ID NO: 24587 - DNA, 25 bp, Saccharomyces pastorianus
acggcgcaatggttcaaggcaacat

SEQ ID NO: 24588 - DNA, 25 bp, Saccharomyces pastorianus
tattctttcaagtgcatcacccgac

SEQ ID NO: 24589 - DNA, 25 bp, Saccharomyces pastorianus
gtggtatgcatacaaatcgctgaat

SEQ ID NO: 24590 - DNA, 25 bp, Saccharomyces pastorianus
gaagcttaggaaacactggcgacaa

SEQ ID NO: 24591 - DNA, 25 bp, Saccharomyces pastorianus
ggattccacttatgaggtgtcctta

SEQ ID NO: 24592 - DNA, 25 bp, Saccharomyces pastorianus
acgaatttaagaccagcataccgaa

SEQ ID NO: 24593 - DNA, 25 bp, Saccharomyces pastorianus
gataatcccgatcgtaagagccaag

SEQ ID NO: 24594 - DNA, 25 bp, Saccharomyces pastorianus
attcagccctgtaatcaacaagcct

SEQ ID NO: 24595 - DNA, 25 bp, Saccharomyces pastorianus
agagacttaatgaccctgtgtgata

SEQ ID NO: 24596 - DNA, 25 bp, Saccharomyces pastorianus
ttttgggactacgaacattgatgat

SEQ ID NO: 24597 - DNA, 25 bp, Saccharomyces pastorianus
gagccgtcgaagcaacctgaactta

SEQ ID NO: 24598 - DNA, 25 bp, Saccharomyces pastorianus
gaagtgcttcaaatacaccaagttt

SEQ ID NO: 24599 - DNA, 25 bp, Saccharomyces pastorianus
ggaatcgaatccatggacgtgtata

SEQ ID NO: 24600 - DNA, 25 bp, Saccharomyces pastorianus
agagccaacagatccggaatcgaat

SEQ ID NO: 24601 - DNA, 25 bp, Saccharomyces pastorianus
ttccaagggtttggttgccaacaag

SEQ ID NO: 24602 - DNA, 25 bp, Saccharomyces pastorianus
gtgtataggtcttattgatcctgtc

SEQ ID NO: 24603 - DNA, 25 bp, Saccharomyces pastorianus
aaagtggccataggcgagccgtcga

SEQ ID NO: 24604 - DNA, 25 bp, Saccharomyces pastorianus
acagagtgaagcctccctaaaggaa

SEQ ID NO: 24605 - DNA, 25 bp, Saccharomyces pastorianus
taagcgatgctatatctagaccatt

SEQ ID NO: 24606 - DNA, 25 bp, Saccharomyces pastorianus
ggtaatggccaagaactcgctgaag

SEQ ID NO: 24607 - DNA, 25 bp, Saccharomyces pastorianus
gaataaggtctcgttgcccaatgtt

SEQ ID NO: 24608 - DNA, 25 bp, Saccharomyces pastorianus
atgcggcaccggcagcagagaataa

SEQ ID NO: 24609 - DNA, 25 bp, Saccharomyces pastorianus
atctgcatacccaaatcacaaacca

SEQ ID NO: 24610 - DNA, 25 bp, Saccharomyces pastorianus
ataataacgtcaatgcggcaccggc

SEQ ID NO: 24611 - DNA, 25 bp, Saccharomyces pastorianus
aacgatggaatctctggaacagcag

SEQ ID NO: 24612 - DNA, 25 bp, Saccharomyces pastorianus
gagagcgccaacttaaacctggaga

SEQ ID NO: 24613 - DNA, 25 bp, Saccharomyces pastorianus
tgagggccatgcaacagggtgctaa

SEQ ID NO: 24614 - DNA, 25 bp, Saccharomyces pastorianus
ggaacagcagctattctccatagag

SEQ ID NO: 24615 - DNA, 25 bp, Saccharomyces pastorianus
gaatcgatgctaacgtagacgacat

SEQ ID NO: 24616 - DNA, 25 bp, Saccharomyces pastorianus
acagatggcaaaagctctccaccga

SEQ ID NO: 24617 - DNA, 25 bp, Saccharomyces pastorianus
tggatatgaccacctacaacaactc

SEQ ID NO: 24618 - DNA, 25 bp, Saccharomyces pastorianus
aacccgttcatgacttcgttactcg

SEQ ID NO: 24619 - DNA, 25 bp, Saccharomyces pastorianus
gggaaccttttccagcaactggcct

SEQ ID NO: 24620 - DNA, 25 bp, Saccharomyces pastorianus
aacagggtgaggtcatccagagaat

SEQ ID NO: 24621 - DNA, 25 bp, Saccharomyces pastorianus
caactatccaacaacgtctacttac

SEQ ID NO: 24622 - DNA, 25 bp, Saccharomyces pastorianus
ttcgttactcgatgagtccgcagag

SEQ ID NO: 24623 - DNA, 25 bp, Saccharomyces pastorianus
ttgacttgaacatcagcggtgctca

SEQ ID NO: 24624 - DNA, 25 bp, Saccharomyces pastorianus
acggaacacgcccaaacagaagatc

SEQ ID NO: 24625 - DNA, 25 bp, Saccharomyces pastorianus
agccgcgaaggttttctttgtcatc

SEQ ID NO: 24626 - DNA, 25 bp, Saccharomyces pastorianus
ggcgtgaagttcattgctgccccat

SEQ ID NO: 24627 - DNA, 25 bp, Saccharomyces pastorianus
agtcgaattccgtttgctatgccaa

SEQ ID NO: 24628 - DNA, 25 bp, Saccharomyces pastorianus
acgcgatcgatctctttgttacagg

SEQ ID NO: 24629 - DNA, 25 bp, Saccharomyces pastorianus
atagagccgtgcagtccggcgtgaa

SEQ ID NO: 24630 - DNA, 25 bp, Saccharomyces pastorianus
gcggcggattcattcgatgttgtct

SEQ ID NO: 24631 - DNA, 25 bp, Saccharomyces pastorianus
gcaggccgtaatcgatttaaccgtt

SEQ ID NO: 24632 - DNA, 25 bp, Saccharomyces pastorianus
tcgaagagatccctgaacctttcac

SEQ ID NO: 24633 - DNA, 25 bp, Saccharomyces pastorianus
gacaagacggacaactggtggctaa

SEQ ID NO: 24634 - DNA, 25 bp, Saccharomyces pastorianus
gggagctggccaacaatcgcgcata

SEQ ID NO: 24635 - DNA, 25 bp, Saccharomyces pastorianus
gggcaaactaaccaacgtgtcgcta

SEQ ID NO: 24636 - DNA, 25 bp, Saccharomyces pastorianus
ggcagacaagtccaacgcgatcgat

SEQ ID NO: 24637 - DNA, 25 bp, Saccharomyces pastorianus
gaagttatcttggtcgaccctcaac

SEQ ID NO: 24638 - DNA, 25 bp, Saccharomyces pastorianus
tacttcgaagttatcttggtcgacc

SEQ ID NO: 24639 - DNA, 25 bp, Saccharomyces pastorianus
aagttatcttggtcgaccctcaaca

SEQ ID NO: 24640 - DNA, 25 bp, Saccharomyces pastorianus
gttatcttggtcgaccctcaacaca

SEQ ID NO: 24641 - DNA, 25 bp, Saccharomyces pastorianus
agttatcttggtcgaccctcaacac

SEQ ID NO: 24642 - DNA, 25 bp, Saccharomyces pastorianus
ttatcttggtcgaccctcaacacaa

SEQ ID NO: 24643 - DNA, 25 bp, Saccharomyces pastorianus
gtacttcgaagttatcttggtcgac

SEQ ID NO: 24644 - DNA, 25 bp, Saccharomyces pastorianus
tcgaagttatcttggtcgaccctca

SEQ ID NO: 24645 - DNA, 25 bp, Saccharomyces pastorianus
tatcttggtcgaccctcaacacaag

SEQ ID NO: 24646 - DNA, 25 bp, Saccharomyces pastorianus
cgaagttatcttggtcgaccctcaa

SEQ ID NO: 24647 - DNA, 25 bp, Saccharomyces pastorianus
ttcgaagttatcttggtcgaccctc

SEQ ID NO: 24648 - DNA, 25 bp, Saccharomyces pastorianus
tacaaatttgatggccgtctttctt

SEQ ID NO: 24649 - DNA, 25 bp, Saccharomyces pastorianus
ggagatggaacttactcacgctttc

SEQ ID NO: 24650 - DNA, 25 bp, Saccharomyces pastorianus
atgggagtcgtttactggccttgag

SEQ ID NO: 24651 - DNA, 25 bp, Saccharomyces pastorianus
agtcaagtaagatcactgccctaat

SEQ ID NO: 24652 - DNA, 25 bp, Saccharomyces pastorianus
gaccaagctatagatcggctccata

SEQ ID NO: 24653 - DNA, 25 bp, Saccharomyces pastorianus
gaatttgacttgtgcatctcatgcc

SEQ ID NO: 24654 - DNA, 25 bp, Saccharomyces pastorianus
atatacctctgcatcgaagtcaagt

SEQ ID NO: 24655 - DNA, 25 bp, Saccharomyces pastorianus
ctacctacttggacatcctggagat

SEQ ID NO: 24656 - DNA, 25 bp, Saccharomyces pastorianus
tgacgtcgccaagatctacaaattt

SEQ ID NO: 24657 - DNA, 25 bp, Saccharomyces pastorianus
tatattttcccaattctctacctac

SEQ ID NO: 24658 - DNA, 25 bp, Saccharomyces pastorianus
attgctactgtcactgaaagccggt

SEQ ID NO: 24659 - DNA, 25 bp, Saccharomyces pastorianus
aagcccaccaccgaggagagagaag

SEQ ID NO: 24660 - DNA, 25 bp, Saccharomyces pastorianus
gaaaacggtacagttgtggactcaa

SEQ ID NO: 24661 - DNA, 25 bp, Saccharomyces pastorianus
tgtggactcaacaacaagagggctt

SEQ ID NO: 24662 - DNA, 25 bp, Saccharomyces pastorianus
gataagttagtttcagagtcccttt

SEQ ID NO: 24663 - DNA, 25 bp, Saccharomyces pastorianus
taaatagagtttccaagcccaccac

SEQ ID NO: 24664 - DNA, 25 bp, Saccharomyces pastorianus
aagcttccaaaatggtacgccagat

SEQ ID NO: 24665 - DNA, 25 bp, Saccharomyces pastorianus
tacaatggcagtatacccgtagtaa

SEQ ID NO: 24666 - DNA, 25 bp, Saccharomyces pastorianus
gggcattcccagtcttacaaacaaa

SEQ ID NO: 24667 - DNA, 25 bp, Saccharomyces pastorianus
aattggacaccatcgaatcatattg

SEQ ID NO: 24668 - DNA, 25 bp, Saccharomyces pastorianus
aataaacagtgtaagggcattccca

SEQ ID NO: 24669 - DNA, 25 bp, Saccharomyces pastorianus
gataatgtaagtaccacctctaaga

SEQ ID NO: 24670 - DNA, 25 bp, Saccharomyces pastorianus
cctccattttcgtgtgggctttaat

SEQ ID NO: 24671 - DNA, 25 bp, Saccharomyces pastorianus
caggtttgatctttgcgttagccat

SEQ ID NO: 24672 - DNA, 25 bp, Saccharomyces pastorianus
gctactttcgttaattccgctattt

SEQ ID NO: 24673 - DNA, 25 bp, Saccharomyces pastorianus
gccatgctatgctcaggacagtctg

SEQ ID NO: 24674 - DNA, 25 bp, Saccharomyces pastorianus
gtgagggctcccaacgatgctaaca

SEQ ID NO: 24675 - DNA, 25 bp, Saccharomyces pastorianus
gattaatcgccattgtaccatgtgt

SEQ ID NO: 24676 - DNA, 25 bp, Saccharomyces pastorianus
gattttaccaatcgtttcagcgcct

SEQ ID NO: 24677 - DNA, 25 bp, Saccharomyces pastorianus
tgcaggtgccactttatctggtcaa

SEQ ID NO: 24678 - DNA, 25 bp, Saccharomyces pastorianus
gcgcctttgatttactttaccgcaa

SEQ ID NO: 24679 - DNA, 25 bp, Saccharomyces pastorianus
agtcgcttattaacctatacctcca

SEQ ID NO: 24680 - DNA, 25 bp, Saccharomyces pastorianus
gggtttctgcaatggtctttaccac

SEQ ID NO: 24681 - DNA, 25 bp, Saccharomyces pastorianus
tgctggcagtcatatgtggattacc

SEQ ID NO: 24682 - DNA, 25 bp, Saccharomyces pastorianus
caaaccaaacattgctggcagtcat

SEQ ID NO: 24683 - DNA, 25 bp, Saccharomyces pastorianus
gaaaacaccccattacacacagttg

SEQ ID NO: 24684 - DNA, 25 bp, Saccharomyces pastorianus
gtggattaccacaaatgtatcaata

SEQ ID NO: 24685 - DNA, 25 bp, Saccharomyces pastorianus
atttcgctccatgtaaggtgttctg

SEQ ID NO: 24686 - DNA, 25 bp, Saccharomyces pastorianus
ggtgttctggaagacctacaatgct

SEQ ID NO: 24687 - DNA, 25 bp, Saccharomyces pastorianus
ctacaatgctttatgtcccctagac

SEQ ID NO: 24688 - DNA, 25 bp, Saccharomyces pastorianus
acaccccattacacacagttggttt

SEQ ID NO: 24689 - DNA, 25 bp, Saccharomyces pastorianus
gccagattccctcaacaaaaccaaa

SEQ ID NO: 24690 - DNA, 25 bp, Saccharomyces pastorianus
gaagggtgaagatttcgctccatgt

SEQ ID NO: 24691 - DNA, 25 bp, Saccharomyces pastorianus
agttggtttcgatgccagattccct

SEQ ID NO: 24692 - DNA, 25 bp, Saccharomyces pastorianus
gctgttgctgactattactaccata

SEQ ID NO: 24693 - DNA, 25 bp, Saccharomyces pastorianus
aaggcttcggctacgactatatatc

SEQ ID NO: 24694 - DNA, 25 bp, Saccharomyces pastorianus
gcctcaacggctaatctggaatctg

SEQ ID NO: 24695 - DNA, 25 bp, Saccharomyces pastorianus
gctgcagatgctgatatgccgttct

SEQ ID NO: 24696 - DNA, 25 bp, Saccharomyces pastorianus
aagcacgagtcagcccatattttca

SEQ ID NO: 24697 - DNA, 25 bp, Saccharomyces pastorianus
aaagtcttcatcaatctcgtcaacc

SEQ ID NO: 24698 - DNA, 25 bp, Saccharomyces pastorianus
aaatagcttgtatttccccatggcg

SEQ ID NO: 24699 - DNA, 25 bp, Saccharomyces pastorianus
atattgctgacttagcctcaacggc

SEQ ID NO: 24700 - DNA, 25 bp, Saccharomyces pastorianus
aaaccgcatttccacagtatacttc

SEQ ID NO: 24701 - DNA, 25 bp, Saccharomyces pastorianus
tgccgttcttcctggtatttttgga

SEQ ID NO: 24702 - DNA, 25 bp, Saccharomyces pastorianus
gagtttcccgttcacgcaattcaaa

SEQ ID NO: 24703 - DNA, 25 bp, Saccharomyces pastorianus
acgccttcgtccagtgttataacta

SEQ ID NO: 24704 - DNA, 25 bp, Saccharomyces pastorianus
gggagttccaacgatcaattgcttc

SEQ ID NO: 24705 - DNA, 25 bp, Saccharomyces pastorianus
aatggctaatttcaccggatcttcc

SEQ ID NO: 24706 - DNA, 25 bp, Saccharomyces pastorianus
ggtgccgcaggttcaatcaagccat

SEQ ID NO: 24707 - DNA, 25 bp, Saccharomyces pastorianus
actataaccactcagcttacaacgt

SEQ ID NO: 24708 - DNA, 25 bp, Saccharomyces pastorianus
attactagtcgttcaagcgcaactt

SEQ ID NO: 24709 - DNA, 25 bp, Saccharomyces pastorianus
agtagtgacttccagcgtcatctca

SEQ ID NO: 24710 - DNA, 25 bp, Saccharomyces pastorianus
tacacctttcttgacgctgggagtt

SEQ ID NO: 24711 - DNA, 25 bp, Saccharomyces pastorianus
catcttcgtcagcaaactacacaac

SEQ ID NO: 24712 - DNA, 25 bp, Saccharomyces pastorianus
agtgctctagcttttattccaattg

SEQ ID NO: 24713 - DNA, 25 bp, Saccharomyces pastorianus
taccaatccgcaaactctactataa

SEQ ID NO: 24714 - DNA, 25 bp, Saccharomyces pastorianus
gccgccttttacaaattggacgttg

SEQ ID NO: 24715 - DNA, 25 bp, Saccharomyces pastorianus
cacaggccgccttttacaaattgga

SEQ ID NO: 24716 - DNA, 25 bp, Saccharomyces pastorianus
agaacgaagtctctgctatgccaac

SEQ ID NO: 24717 - DNA, 25 bp, Saccharomyces pastorianus
tgctatgccaactttggttcttttc

SEQ ID NO: 24718 - DNA, 25 bp, Saccharomyces pastorianus
gaagtcgctaaggttgttggtgcta

SEQ ID NO: 24719 - DNA, 25 bp, Saccharomyces pastorianus
aagtctctgctatgccaactttggt

SEQ ID NO: 24720 - DNA, 25 bp, Saccharomyces pastorianus
actagtcgtcgttgatttctacgcc

SEQ ID NO: 24721 - DNA, 25 bp, Saccharomyces pastorianus
ttttctgaacaatacccacaggccg

SEQ ID NO: 24722 - DNA, 25 bp, Saccharomyces pastorianus
gttgcccaaaagaacgaagtctctg

SEQ ID NO: 24723 - DNA, 25 bp, Saccharomyces pastorianus
cgctaaggttgttggtgctaaccca

SEQ ID NO: 24724 - DNA, 25 bp, Saccharomyces pastorianus
gacgaattaggtgaagttgcccaaa

SEQ ID NO: 24725 - DNA, 25 bp, Saccharomyces pastorianus
gggcttgaagccatacttgttcgtc

SEQ ID NO: 24726 - DNA, 25 bp, Saccharomyces pastorianus
cacagagttgctaccaccggtgaat

SEQ ID NO: 24727 - DNA, 25 bp, Saccharomyces pastorianus
gttgattcacggtccaaaggctcaa

SEQ ID NO: 24728 - DNA, 25 bp, Saccharomyces pastorianus
gttcgtcttgaacaacgatggttac

SEQ ID NO: 24729 - DNA, 25 bp, Saccharomyces pastorianus
gtatcaaccaagttgctttcccaaa

SEQ ID NO: 24730 - DNA, 25 bp, Saccharomyces pastorianus
ggtccaaaggctcaatacaacgaaa

SEQ ID NO: 24731 - DNA, 25 bp, Saccharomyces pastorianus
gatcgaaatcatgttgcctgtcttc

SEQ ID NO: 24732 - DNA, 25 bp, Saccharomyces pastorianus
gacaagtctttcaacgaaaactcca

SEQ ID NO: 24733 - DNA, 25 bp, Saccharomyces pastorianus
aaactgggaccacttatccttgttg

SEQ ID NO: 24734 - DNA, 25 bp, Saccharomyces pastorianus
accacttatccttgttgccaacttt

SEQ ID NO: 24735 - DNA, 25 bp, Saccharomyces pastorianus
cttacggtatttcccaagtcttatg

SEQ ID NO: 24736 - DNA, 25 bp, Saccharomyces pastorianus
ggacgtcgtgagcaacagttttacc

SEQ ID NO: 24737 - DNA, 25 bp, Saccharomyces pastorianus
taacggttttcatcgattcatcggt

SEQ ID NO: 24738 - DNA, 25 bp, Saccharomyces pastorianus
agtgtgtatcatcgtcatcttccag

SEQ ID NO: 24739 - DNA, 25 bp, Saccharomyces pastorianus
agaagtgccaactggcctccgtata

SEQ ID NO: 24740 - DNA, 25 bp, Saccharomyces pastorianus
ttttcggctatttcgttgacaaact

SEQ ID NO: 24741 - DNA, 25 bp, Saccharomyces pastorianus
caacacgattttttgctgtcagaga

SEQ ID NO: 24742 - DNA, 25 bp, Saccharomyces pastorianus
gctatactggtttgttcttcttgaa

SEQ ID NO: 24743 - DNA, 25 bp, Saccharomyces pastorianus
aacaagctactaacctggctgcgga

SEQ ID NO: 24744 - DNA, 25 bp, Saccharomyces pastorianus
ttgaactggttttgcaactgcccct

SEQ ID NO: 24745 - DNA, 25 bp, Saccharomyces pastorianus
gatctatggttggaacgcctcgcta

SEQ ID NO: 24746 - DNA, 25 bp, Saccharomyces pastorianus
gcctcgctaactacgctagtgtgta

SEQ ID NO: 24747 - DNA, 25 bp, Saccharomyces pastorianus
aagccggatgacaacatgcgccgtg

SEQ ID NO: 24748 - DNA, 25 bp, Saccharomyces pastorianus
tgattaagcatagagccgccctgga

SEQ ID NO: 24749 - DNA, 25 bp, Saccharomyces pastorianus
caagaagcagcgttgggaggtccca

SEQ ID NO: 24750 - DNA, 25 bp, Saccharomyces pastorianus
gtttgccattggtactatagtcgaa

SEQ ID NO: 24751 - DNA, 25 bp, Saccharomyces pastorianus
gaaagtccaccatcctagaaacgct

SEQ ID NO: 24752 - DNA, 25 bp, Saccharomyces pastorianus
ggcaagttgcccagtatcgagatag

SEQ ID NO: 24753 - DNA, 25 bp, Saccharomyces pastorianus
gaaaacggattcgatgccctagcca

SEQ ID NO: 24754 - DNA, 25 bp, Saccharomyces pastorianus
gacgatacctccaacaagtacttca

SEQ ID NO: 24755 - DNA, 25 bp, Saccharomyces pastorianus
ggatgacagcgactggttcgcctta

SEQ ID NO: 24756 - DNA, 25 bp, Saccharomyces pastorianus
atgcgccgtgaagtccagcgagatt

SEQ ID NO: 24757 - DNA, 25 bp, Saccharomyces pastorianus
aaacgctcatgggtgacgatacctc

SEQ ID NO: 24758 - DNA, 25 bp, Saccharomyces pastorianus
gaatgaccagtttctacaagctgtc

SEQ ID NO: 24759 - DNA, 25 bp, Saccharomyces pastorianus
tctaccttttctggtcacaccaata

SEQ ID NO: 24760 - DNA, 25 bp, Saccharomyces pastorianus
ggataacctctacactatgaatgac

SEQ ID NO: 24761 - DNA, 25 bp, Saccharomyces pastorianus
tcacaccaatagctcgactttcaaa

SEQ ID NO: 24762 - DNA, 25 bp, Saccharomyces pastorianus
gatccaagaaaacctactcgacgag

SEQ ID NO: 24763 - DNA, 25 bp, Saccharomyces pastorianus
gaaccaacaaagttcatcgaccccg

SEQ ID NO: 24764 - DNA, 25 bp, Saccharomyces pastorianus
gtggccatcccaaccaatgttaatg

SEQ ID NO: 24765 - DNA, 25 bp, Saccharomyces pastorianus
atcgatatactgtccaagatccaag

SEQ ID NO: 24766 - DNA, 25 bp, Saccharomyces pastorianus
agacacattgtagccgtggacgata

SEQ ID NO: 24767 - DNA, 25 bp, Saccharomyces pastorianus
aatgctaattccctggcgttcaata

SEQ ID NO: 24768 - DNA, 25 bp, Saccharomyces pastorianus
gaaggaaggcaaaccacccaatcgc

SEQ ID NO: 24769 - DNA, 25 bp, Saccharomyces pastorianus
tgacctgaaaatgccctcgaaacca

SEQ ID NO: 24770 - DNA, 25 bp, Saccharomyces pastorianus
ttgaaattgccgtccatttcgggtc

SEQ ID NO: 24771 - DNA, 25 bp, Saccharomyces pastorianus
gttcctggtcatcacggtggcatta

SEQ ID NO: 24772 - DNA, 25 bp, Saccharomyces pastorianus
aatcggtgttcatgacttccggatt

SEQ ID NO: 24773 - DNA, 25 bp, Saccharomyces pastorianus
taaagtaccgttcctcatcgttcct

SEQ ID NO: 24774 - DNA, 25 bp, Saccharomyces pastorianus
agtcgcccgcattgaacctggaaag

SEQ ID NO: 24775 - DNA, 25 bp, Saccharomyces pastorianus
acgcttgcgtggaacagtttgacct

SEQ ID NO: 24776 - DNA, 25 bp, Saccharomyces pastorianus
ggatgtcgcagtggcagcttcaaat

SEQ ID NO: 24777 - DNA, 25 bp, Saccharomyces pastorianus
tacatatttgggatcgacgcacgac

SEQ ID NO: 24778 - DNA, 25 bp, Saccharomyces pastorianus
tctcctgtgtgaaagccatgcccaa

SEQ ID NO: 24779 - DNA, 25 bp, Saccharomyces pastorianus
gaaagaggcccaaacattccaccat

SEQ ID NO: 24780 - DNA, 25 bp, Saccharomyces pastorianus
acttgtcaaacaaccctgctgtgaa

SEQ ID NO: 24781 - DNA, 25 bp, Saccharomyces pastorianus
actttcgtcaacttctggactgtca

SEQ ID NO: 24782 - DNA, 25 bp, Saccharomyces pastorianus
tcgtcatcgaatacttcaccttcat

SEQ ID NO: 24783 - DNA, 25 bp, Saccharomyces pastorianus
ggtcaatttaccactctctgggata

SEQ ID NO: 24784 - DNA, 25 bp, Saccharomyces pastorianus
tacttggcccacagatggttgcact

SEQ ID NO: 24785 - DNA, 25 bp, Saccharomyces pastorianus
gactgggtggttcataccgtagacc

SEQ ID NO: 24786 - DNA, 25 bp, Saccharomyces pastorianus
acgggttcttacaatccatctctta

SEQ ID NO: 24787 - DNA, 25 bp, Saccharomyces pastorianus
gtttgaccctactttgagagactcc

SEQ ID NO: 24788 - DNA, 25 bp, Saccharomyces pastorianus
gtgaacggtacagcgtgccacacag

SEQ ID NO: 24789 - DNA, 25 bp, Saccharomyces pastorianus
gaaatgaacggccactccaagcttt

SEQ ID NO: 24790 - DNA, 25 bp, Saccharomyces pastorianus
catgatccatgacggccaatacttg

SEQ ID NO: 24791 - DNA, 25 bp, Saccharomyces pastorianus
ggaaaaacaaagtctgccactgcag

SEQ ID NO: 24792 - DNA, 25 bp, Saccharomyces pastorianus
aatcgtttgaaatcctgctgagaga

SEQ ID NO: 24793 - DNA, 25 bp, Saccharomyces pastorianus
gaagcatgggcagacaatcgtttga

SEQ ID NO: 24794 - DNA, 25 bp, Saccharomyces pastorianus
acaaatggacaaaccatccggactg

SEQ ID NO: 24795 - DNA, 25 bp, Saccharomyces pastorianus
aaagcattaaataccacacccttgg

SEQ ID NO: 24796 - DNA, 25 bp, Saccharomyces pastorianus
ttggcaaagacatcaaaccgcatat

SEQ ID NO: 24797 - DNA, 25 bp, Saccharomyces pastorianus
gccactgcagcgaatgatgacgaaa

SEQ ID NO: 24798 - DNA, 25 bp, Saccharomyces pastorianus
ttggaaccacggtacaaatggagat

SEQ ID NO: 24799 - DNA, 25 bp, Saccharomyces pastorianus
gcgtagagtttacacatttggcaaa

SEQ ID NO: 24800 - DNA, 25 bp, Saccharomyces pastorianus
tggccattgtgggtcaacaaagtgg

SEQ ID NO: 24801 - DNA, 25 bp, Saccharomyces pastorianus
atatgagatccttgaaaatgaccag

SEQ ID NO: 24802 - DNA, 25 bp, Saccharomyces pastorianus
taacaaggctgtcgaattcgcccgc

SEQ ID NO: 24803 - DNA, 25 bp, Saccharomyces pastorianus
gaactccattccaggtgacaaatcc

SEQ ID NO: 24804 - DNA, 25 bp, Saccharomyces pastorianus
gtattggtgctccagctatgaccac

SEQ ID NO: 24805 - DNA, 25 bp, Saccharomyces pastorianus
attcgcccgcgaagttcaacaaagc

SEQ ID NO: 24806 - DNA, 25 bp, Saccharomyces pastorianus
aatcataccattgctgctttggcca

SEQ ID NO: 24807 - DNA, 25 bp, Saccharomyces pastorianus
actcccatatggttctagtatcctt

SEQ ID NO: 24808 - DNA, 25 bp, Saccharomyces pastorianus
tttggccactgccttgaagcaagct

SEQ ID NO: 24809 - DNA, 25 bp, Saccharomyces pastorianus
gtttctaacggtacagactcccata

SEQ ID NO: 24810 - DNA, 25 bp, Saccharomyces pastorianus
gacggtgcccgtgttgaatatatct

SEQ ID NO: 24811 - DNA, 25 bp, Saccharomyces pastorianus
gcaagctgctactccagaattcgta

SEQ ID NO: 24812 - DNA, 25 bp, Saccharomyces pastorianus
tgacaaatccgctttggtcccaggt

SEQ ID NO: 24813 - DNA, 25 bp, Saccharomyces pastorianus
agtgttgtccactatggtcctgagg

SEQ ID NO: 24814 - DNA, 25 bp, Saccharomyces pastorianus
agcaaccagagtcagcgtcttcgtc

SEQ ID NO: 24815 - DNA, 25 bp, Saccharomyces pastorianus
gagacagagtcccacgagtcaactg

SEQ ID NO: 24816 - DNA, 25 bp, Saccharomyces pastorianus
atctgctgcattatcaccgatggtc

SEQ ID NO: 24817 - DNA, 25 bp, Saccharomyces pastorianus
ttttggccggcaacagtgtgcacat

SEQ ID NO: 24818 - DNA, 25 bp, Saccharomyces pastorianus
cgatggtcatttaacgcccgtgcag

SEQ ID NO: 24819 - DNA, 25 bp, Saccharomyces pastorianus
agaacatcggtgttttggccggcaa

SEQ ID NO: 24820 - DNA, 25 bp, Saccharomyces pastorianus
gaaatgaccggcctggaccacgtga

SEQ ID NO: 24821 - DNA, 25 bp, Saccharomyces pastorianus
atcgaccatcttttctaccgaattg

SEQ ID NO: 24822 - DNA, 25 bp, Saccharomyces pastorianus
gaccggatcatcgaaatctgctgca

SEQ ID NO: 24823 - DNA, 25 bp, Saccharomyces pastorianus
gtgtgcacatggaccgtctgttcat

SEQ ID NO: 24824 - DNA, 25 bp, Saccharomyces pastorianus
gatcatgcagactttcagaacagaa

SEQ ID NO: 24825 - DNA, 25 bp, Saccharomyces pastorianus
gtgagaaccaccctattaccaggta

SEQ ID NO: 24826 - DNA, 25 bp, Saccharomyces pastorianus
ttcagaattgcatcatcccaagcct

SEQ ID NO: 24827 - DNA, 25 bp, Saccharomyces pastorianus
gaggagccattgttatgttcagatc

SEQ ID NO: 24828 - DNA, 25 bp, Saccharomyces pastorianus
gctggaagttttgccattgacctta

SEQ ID NO: 24829 - DNA, 25 bp, Saccharomyces pastorianus
gacctagcagtcaaattggccaatc

SEQ ID NO: 24830 - DNA, 25 bp, Saccharomyces pastorianus
tgtcaagacctacttccctggaaga

SEQ ID NO: 24831 - DNA, 25 bp, Saccharomyces pastorianus
aatgaacgtcattgggctgcgattt

SEQ ID NO: 24832 - DNA, 25 bp, Saccharomyces pastorianus
atacagatcggccacctgggtgtct

SEQ ID NO: 24833 - DNA, 25 bp, Saccharomyces pastorianus
ctggcgcatccggtagaggttactg

SEQ ID NO: 24834 - DNA, 25 bp, Saccharomyces pastorianus
gaagcagcctgacaacaatgaccta

SEQ ID NO: 24835 - DNA, 25 bp, Saccharomyces pastorianus
attatttgcggattgcgcgtgggcc

SEQ ID NO: 24836 - DNA, 25 bp, Saccharomyces pastorianus
acagatggcccaagtcttcgaaatt

SEQ ID NO: 24837 - DNA, 25 bp, Saccharomyces pastorianus
atcttccacttcctaaattacttca

SEQ ID NO: 24838 - DNA, 25 bp, Saccharomyces pastorianus
gtcctgttattttttctatcttcca

SEQ ID NO: 24839 - DNA, 25 bp, Saccharomyces pastorianus
gacgtacctgtggttcttcaagtta

SEQ ID NO: 24840 - DNA, 25 bp, Saccharomyces pastorianus
gaagttcaatatcacgcttttgcga

SEQ ID NO: 24841 - DNA, 25 bp, Saccharomyces pastorianus
catacttttcccttttctggagtgg

SEQ ID NO: 24842 - DNA, 25 bp, Saccharomyces pastorianus
actaccatttctaccattgttacca

SEQ ID NO: 24843 - DNA, 25 bp, Saccharomyces pastorianus
tatgctatcgtgctttaccagttct

SEQ ID NO: 24844 - DNA, 25 bp, Saccharomyces pastorianus
tatttggtacgatcctagccggttt

SEQ ID NO: 24845 - DNA, 25 bp, Saccharomyces pastorianus
gattggatgcctacatcagccgtac

SEQ ID NO: 24846 - DNA, 25 bp, Saccharomyces pastorianus
ggtggtgtttattactgtgtccaat

SEQ ID NO: 24847 - DNA, 25 bp, Saccharomyces pastorianus
ttttcctgtttttagggatggccat

SEQ ID NO: 24848 - DNA, 25 bp, Saccharomyces pastorianus
caggctataagctatacgggctcaa

SEQ ID NO: 24849 - DNA, 25 bp, Saccharomyces pastorianus
aaatgatggcccagatgccggcgat

SEQ ID NO: 24850 - DNA, 25 bp, Saccharomyces pastorianus
gtgatatccggttcacccaagtatg

SEQ ID NO: 24851 - DNA, 25 bp, Saccharomyces pastorianus
aacgaacctcgtttggacaatggat

SEQ ID NO: 24852 - DNA, 25 bp, Saccharomyces pastorianus
ggatggccattgtacgtcttttaat

SEQ ID NO: 24853 - DNA, 25 bp, Saccharomyces pastorianus
gccggcgatggcaagtcaaagtcta

SEQ ID NO: 24854 - DNA, 25 bp, Saccharomyces pastorianus
aaaatatgattatgcctggcgctca

SEQ ID NO: 24855 - DNA, 25 bp, Saccharomyces pastorianus
tgtgtccaatttacgcaggctataa

SEQ ID NO: 24856 - DNA, 25 bp, Saccharomyces pastorianus
gtaacgttggtataatagccttcag

SEQ ID NO: 24857 - DNA, 25 bp, Saccharomyces pastorianus
cgttctccctacctagtgatattga

SEQ ID NO: 24858 - DNA, 25 bp, Saccharomyces pastorianus
gttgtgtttatcatggcatcttcct

SEQ ID NO: 24859 - DNA, 25 bp, Saccharomyces pastorianus
aagtagatacttcggctcacaaaga

SEQ ID NO: 24860 - DNA, 25 bp, Saccharomyces pastorianus
ggtatttgtctatttgactgccgaa

SEQ ID NO: 24861 - DNA, 25 bp, Saccharomyces pastorianus
gccagtgaagtcactttttgggata

SEQ ID NO: 24862 - DNA, 25 bp, Saccharomyces pastorianus
aatgtatcgaatcatgccttttcat

SEQ ID NO: 24863 - DNA, 25 bp, Saccharomyces pastorianus
gcatcttcctactaccagttaatca

SEQ ID NO: 24864 - DNA, 25 bp, Saccharomyces pastorianus
cattggaacattcaaccatgggttg

SEQ ID NO: 24865 - DNA, 25 bp, Saccharomyces pastorianus
gacctaaatacagatttgactcccc

SEQ ID NO: 24866 - DNA, 25 bp, Saccharomyces pastorianus
ccatgggttggcttgttaacttacg

SEQ ID NO: 24867 - DNA, 25 bp, Saccharomyces pastorianus
taatcaataacagcgcgttctccct

SEQ ID NO: 24868 - DNA, 25 bp, Saccharomyces pastorianus
tggaaacccggatacgtgattttat

SEQ ID NO: 24869 - DNA, 25 bp, Saccharomyces pastorianus
gtctgttcagtggacttttcccata

SEQ ID NO: 24870 - DNA, 25 bp, Saccharomyces pastorianus
attgatgaattaccactgctgtgga

SEQ ID NO: 24871 - DNA, 25 bp, Saccharomyces pastorianus
tatcccaagatacggcacactcaag

SEQ ID NO: 24872 - DNA, 25 bp, Saccharomyces pastorianus
ggaatagcacagtagacgcactttt

SEQ ID NO: 24873 - DNA, 25 bp, Saccharomyces pastorianus
gaaatgagacattcctcgtacttta

SEQ ID NO: 24874 - DNA, 25 bp, Saccharomyces pastorianus
aaagattcaaggaccatttcatatg

SEQ ID NO: 24875 - DNA, 25 bp, Saccharomyces pastorianus
gagagtttaccatcgtctacaacac

SEQ ID NO: 24876 - DNA, 25 bp, Saccharomyces pastorianus
ttcatggacatgacttgattcacaa

SEQ ID NO: 24877 - DNA, 25 bp, Saccharomyces pastorianus
gatccgtataagttccaacccaagt

SEQ ID NO: 24878 - DNA, 25 bp, Saccharomyces pastorianus
gatacggcacactcaagtcataaat

SEQ ID NO: 24879 - DNA, 25 bp, Saccharomyces pastorianus
tcctaagatcgaggaccttttggat

SEQ ID NO: 24880 - DNA, 25 bp, Saccharomyces pastorianus
gaacaaggtcgggtcaacctctgat

SEQ ID NO: 24881 - DNA, 25 bp, Saccharomyces pastorianus
gaaccggtgtgaaagactctgttag

SEQ ID NO: 24882 - DNA, 25 bp, Saccharomyces pastorianus
gaacgaatcagagtatccaaggaaa

SEQ ID NO: 24883 - DNA, 25 bp, Saccharomyces pastorianus
gggtacagctaagcagagtcagaat

SEQ ID NO: 24884 - DNA, 25 bp, Saccharomyces pastorianus
ggaaggaatatctcaaagctctaaa

SEQ ID NO: 24885 - DNA, 25 bp, Saccharomyces pastorianus
gtatcacgaagaagaccagacttag

SEQ ID NO: 24886 - DNA, 25 bp, Saccharomyces pastorianus
gagaaggaacctagaaccggtgtga

SEQ ID NO: 24887 - DNA, 25 bp, Saccharomyces pastorianus
gaaagatcaaggaagccagggctac

SEQ ID NO: 24888 - DNA, 25 bp, Saccharomyces pastorianus
aacctctgatgggtcctaagatcga

SEQ ID NO: 24889 - DNA, 25 bp, Saccharomyces pastorianus
aagctctaaaggatgaagggtatac

SEQ ID NO: 24890 - DNA, 25 bp, Saccharomyces pastorianus
tggtgctcagccttgcatcagaaca

SEQ ID NO: 24891 - DNA, 25 bp, Saccharomyces pastorianus
gaaccattgtcggtggcagtccacg

SEQ ID NO: 24892 - DNA, 25 bp, Saccharomyces pastorianus
agggagactacagcgactctatcga

SEQ ID NO: 24893 - DNA, 25 bp, Saccharomyces pastorianus
gagatttggcgctcgatgcgtcgta

SEQ ID NO: 24894 - DNA, 25 bp, Saccharomyces pastorianus
ggcccgtaggtctgttgactggtaa

SEQ ID NO: 24895 - DNA, 25 bp, Saccharomyces pastorianus
gtttggtgcgacacatacggtcaac

SEQ ID NO: 24896 - DNA, 25 bp, Saccharomyces pastorianus
aaggctccttcaggtactgtcaggg

SEQ ID NO: 24897 - DNA, 25 bp, Saccharomyces pastorianus
gtagtcttcgtggacctgtcagaaa

SEQ ID NO: 24898 - DNA, 25 bp, Saccharomyces pastorianus
gattacacatcgctaccagtttaag

SEQ ID NO: 24899 - DNA, 25 bp, Saccharomyces pastorianus
tacggtcaactcaggcgacttgcca

SEQ ID NO: 24900 - DNA, 25 bp, Saccharomyces pastorianus
gttagtctcgactgggaagctctcg

SEQ ID NO: 24901 - DNA, 25 bp, Saccharomyces pastorianus
gcaatggtgttgcttgtgaccccag

SEQ ID NO: 24902 - DNA, 25 bp, Saccharomyces pastorianus
aaccgttttgcataatggtcgtgac

SEQ ID NO: 24903 - DNA, 25 bp, Saccharomyces pastorianus
gagactagggactgcagaaactgtt

SEQ ID NO: 24904 - DNA, 25 bp, Saccharomyces pastorianus
agatccagttccacattcattttgc

SEQ ID NO: 24905 - DNA, 25 bp, Saccharomyces pastorianus
gtgaccccagcgagatagagcctat

SEQ ID NO: 24906 - DNA, 25 bp, Saccharomyces pastorianus
cagtgcaattatcaccttcgaaccc

SEQ ID NO: 24907 - DNA, 25 bp, Saccharomyces pastorianus
agaaactgttaagccaacccttgca

SEQ ID NO: 24908 - DNA, 25 bp, Saccharomyces pastorianus
aaaattccgtactggtggaagccag

SEQ ID NO: 24909 - DNA, 25 bp, Saccharomyces pastorianus
gcacgccatccgtttaggcaatggt

SEQ ID NO: 24910 - DNA, 25 bp, Saccharomyces pastorianus
ggaagccagtactcgaccatggtga

SEQ ID NO: 24911 - DNA, 25 bp, Saccharomyces pastorianus
gaccatggtgaacattggattgcat

SEQ ID NO: 24912 - DNA, 25 bp, Saccharomyces pastorianus
agtaagctgttggtccaggacgcta

SEQ ID NO: 24913 - DNA, 25 bp, Saccharomyces pastorianus
ccgtccataccgctgaggatatatt

SEQ ID NO: 24914 - DNA, 25 bp, Saccharomyces pastorianus
agtcgctgccgaaggagtcgttcaa

SEQ ID NO: 24915 - DNA, 25 bp, Saccharomyces pastorianus
gatggacccgtcgtctatttataaa

SEQ ID NO: 24916 - DNA, 25 bp, Saccharomyces pastorianus
accggtgatctgtcgctggcgttta

SEQ ID NO: 24917 - DNA, 25 bp, Saccharomyces pastorianus
cagtgtgcgttccagaccggtgatc

SEQ ID NO: 24918 - DNA, 25 bp, Saccharomyces pastorianus
taaaacttgaggtacccgcggtctg

SEQ ID NO: 24919 - DNA, 25 bp, Saccharomyces pastorianus
caagctgcagacttcattggccaat

SEQ ID NO: 24920 - DNA, 25 bp, Saccharomyces pastorianus
tgtctaagcaccctgaattgtccat

SEQ ID NO: 24921 - DNA, 25 bp, Saccharomyces pastorianus
gattcaaccagtcaatctccttctt

SEQ ID NO: 24922 - DNA, 25 bp, Saccharomyces pastorianus
ggtacccgcggtctgcaaaataatt

SEQ ID NO: 24923 - DNA, 25 bp, Saccharomyces pastorianus
ggctcaagccggtgaagtcaaggat

SEQ ID NO: 24924 - DNA, 25 bp, Saccharomyces pastorianus
gaagaaggccactgtcgatgaattt

SEQ ID NO: 24925 - DNA, 25 bp, Saccharomyces pastorianus
gtcaacaaaagatcatcatgtccaa

SEQ ID NO: 24926 - DNA, 25 bp, Saccharomyces pastorianus
aagatcatcatgtccaagaagtggg

SEQ ID NO: 24927 - DNA, 25 bp, Saccharomyces pastorianus
acttgaagaaggctcaagccggtga

SEQ ID NO: 24928 - DNA, 25 bp, Saccharomyces pastorianus
gccactgtcgatgaatttccattgt

SEQ ID NO: 24929 - DNA, 25 bp, Saccharomyces pastorianus
atcagaatttacgatctaggtaaga

SEQ ID NO: 24930 - DNA, 25 bp, Saccharomyces pastorianus
gaccagactacttgaagaaggctca

SEQ ID NO: 24931 - DNA, 25 bp, Saccharomyces pastorianus
aaggccactgtcgatgaatttccat

SEQ ID NO: 24932 - DNA, 25 bp, Saccharomyces pastorianus
cggtgaagtcaaggatgacggttct

SEQ ID NO: 24933 - DNA, 25 bp, Saccharomyces pastorianus
aggtaagaagaaggccactgtcgat

SEQ ID NO: 24934 - DNA, 25 bp, Saccharomyces pastorianus
gggtcttaccatacgctagcattgg

SEQ ID NO: 24935 - DNA, 25 bp, Saccharomyces pastorianus
atattccagacgtcttgaagcccgg

SEQ ID NO: 24936 - DNA, 25 bp, Saccharomyces pastorianus
ggagctttacgcctttggttggaat

SEQ ID NO: 24937 - DNA, 25 bp, Saccharomyces pastorianus
attcactgtgatgacgaaacctcgt

SEQ ID NO: 24938 - DNA, 25 bp, Saccharomyces pastorianus
aggccgggtgtaattccagatcatt

SEQ ID NO: 24939 - DNA, 25 bp, Saccharomyces pastorianus
ataagattgcgtgcgggtcttacca

SEQ ID NO: 24940 - DNA, 25 bp, Saccharomyces pastorianus
tgaagcccggacaggataccacaga

SEQ ID NO: 24941 - DNA, 25 bp, Saccharomyces pastorianus
ggagttgcggttcacatgctgtctt

SEQ ID NO: 24942 - DNA, 25 bp, Saccharomyces pastorianus
aatatgtttcattccccagatcagt

SEQ ID NO: 24943 - DNA, 25 bp, Saccharomyces pastorianus
ttgttaacattcgtaggccgggtgt

SEQ ID NO: 24944 - DNA, 25 bp, Saccharomyces pastorianus
gctttgcccatctcgtacaatttag

SEQ ID NO: 24945 - DNA, 25 bp, Saccharomyces pastorianus
aagggctgctgtttgattcccagaa

SEQ ID NO: 24946 - DNA, 25 bp, Saccharomyces pastorianus
atcctgctcctcaacggtaatttta

SEQ ID NO: 24947 - DNA, 25 bp, Saccharomyces pastorianus
aacagtttctgttctcggtattgca

SEQ ID NO: 24948 - DNA, 25 bp, Saccharomyces pastorianus
gaactggacaccttactttacgtca

SEQ ID NO: 24949 - DNA, 25 bp, Saccharomyces pastorianus
atcttcatcggccagtagtgagtcg

SEQ ID NO: 24950 - DNA, 25 bp, Saccharomyces pastorianus
gatcaacacaaacgcagactcctat

SEQ ID NO: 24951 - DNA, 25 bp, Saccharomyces pastorianus
aacatggccgtgacaagtcctcaat

SEQ ID NO: 24952 - DNA, 25 bp, Saccharomyces pastorianus
gattacgagcccattaaaccacgaa

SEQ ID NO: 24953 - DNA, 25 bp, Saccharomyces pastorianus
gtgtcagccgaattcaactctcaaa

SEQ ID NO: 24954 - DNA, 25 bp, Saccharomyces pastorianus
gacacctcgttgcttatctacaggg

SEQ ID NO: 24955 - DNA, 25 bp, Saccharomyces pastorianus
agctctgttagctctgtgacaacga

SEQ ID NO: 24956 - DNA, 25 bp, Saccharomyces pastorianus
tcaaccttcctaatttttcgcagcg

SEQ ID NO: 24957 - DNA, 25 bp, Saccharomyces pastorianus
gactgcacacttttcggctgggaag

SEQ ID NO: 24958 - DNA, 25 bp, Saccharomyces pastorianus
gagagtctgtccatgctgccggaaa

SEQ ID NO: 24959 - DNA, 25 bp, Saccharomyces pastorianus
gaaatagtacgacccctcatgatag

SEQ ID NO: 24960 - DNA, 25 bp, Saccharomyces pastorianus
aagtgtctctttgtaagcccggtct

SEQ ID NO: 24961 - DNA, 25 bp, Saccharomyces pastorianus
gaggcaactgcctacagactggact

SEQ ID NO: 24962 - DNA, 25 bp, Saccharomyces pastorianus
atattacgagcacggtcctgactgg

SEQ ID NO: 24963 - DNA, 25 bp, Saccharomyces pastorianus
cgcagtttacagagaccgagtccta

SEQ ID NO: 24964 - DNA, 25 bp, Saccharomyces pastorianus
ggacttgccatgtgtcagtgccaga

SEQ ID NO: 24965 - DNA, 25 bp, Saccharomyces pastorianus
caattccagagacgtttttccatcc

SEQ ID NO: 24966 - DNA, 25 bp, Saccharomyces pastorianus
ggaatacgtactgcctgattttcaa

SEQ ID NO: 24967 - DNA, 25 bp, Saccharomyces pastorianus
tcgacaaggctgtctgcggagactt

SEQ ID NO: 24968 - DNA, 25 bp, Saccharomyces pastorianus
gtggatatcgaattccctccagata

SEQ ID NO: 24969 - DNA, 25 bp, Saccharomyces pastorianus
caatgcggcgatctgtacgttttcg

SEQ ID NO: 24970 - DNA, 25 bp, Saccharomyces pastorianus
taccgggagcgacaacagtccgatt

SEQ ID NO: 24971 - DNA, 25 bp, Saccharomyces pastorianus
gacttgatctttcatctcgttgaga

SEQ ID NO: 24972 - DNA, 25 bp, Saccharomyces pastorianus
gttcggcgacgaaaacctgcaagat

SEQ ID NO: 24973 - DNA, 25 bp, Saccharomyces pastorianus
atgaaggcgttcaatcccaaaccgc

SEQ ID NO: 24974 - DNA, 25 bp, Saccharomyces pastorianus
ctccaacatcactgcaaataccggg

SEQ ID NO: 24975 - DNA, 25 bp, Saccharomyces pastorianus
gtatcgaacttccagatcatccaca

SEQ ID NO: 24976 - DNA, 25 bp, Saccharomyces pastorianus
aagtcataagacctggcgatatcat

SEQ ID NO: 24977 - DNA, 25 bp, Saccharomyces pastorianus
aaatcaccagcgaaggttggcccat

SEQ ID NO: 24978 - DNA, 25 bp, Saccharomyces pastorianus
gaaaatgctgccaacaacccaactg

SEQ ID NO: 24979 - DNA, 25 bp, Saccharomyces pastorianus
gtgtcctcgtttacaggctatccga

SEQ ID NO: 24980 - DNA, 25 bp, Saccharomyces pastorianus
caaacagatgccactgctcttcagt

SEQ ID NO: 24981 - DNA, 25 bp, Saccharomyces pastorianus
gaaacggatatcgagcctgccgaaa

SEQ ID NO: 24982 - DNA, 25 bp, Saccharomyces pastorianus
tgtttggatttctcgcaagtggcgc

SEQ ID NO: 24983 - DNA, 25 bp, Saccharomyces pastorianus
aacccaactgatgctgaccgagatg

SEQ ID NO: 24984 - DNA, 25 bp, Saccharomyces pastorianus
atcacgtcgcaagagtacctcaaaa

SEQ ID NO: 24985 - DNA, 25 bp, Saccharomyces pastorianus
ggctatccgatagttacacgtatat

SEQ ID NO: 24986 - DNA, 25 bp, Saccharomyces pastorianus
atagcgtttacactgtttcaggtac

SEQ ID NO: 24987 - DNA, 25 bp, Saccharomyces pastorianus
ccatttcgttggtatcatttcatca

SEQ ID NO: 24988 - DNA, 25 bp, Saccharomyces pastorianus
gctcttcagtcactggttgacctaa

SEQ ID NO: 24989 - DNA, 25 bp, Saccharomyces pastorianus
aagccttggttcaacaatcgcggta

SEQ ID NO: 24990 - DNA, 25 bp, Saccharomyces pastorianus
cgacctgcttctaccgaacaaaaga

SEQ ID NO: 24991 - DNA, 25 bp, Saccharomyces pastorianus
aaagagctctttggttcgcgtgcac

SEQ ID NO: 24992 - DNA, 25 bp, Saccharomyces pastorianus
ggtacaatgctcaaaccatgcggga

SEQ ID NO: 24993 - DNA, 25 bp, Saccharomyces pastorianus
aagactactgcacccacaagagata

SEQ ID NO: 24994 - DNA, 25 bp, Saccharomyces pastorianus
aaaattgccctcatcaccagaaaaa

SEQ ID NO: 24995 - DNA, 25 bp, Saccharomyces pastorianus
gtgcactcggacgtcaagccttggt

SEQ ID NO: 24996 - DNA, 25 bp, Saccharomyces pastorianus
caaggtctccacacgggacatcaaa

SEQ ID NO: 24997 - DNA, 25 bp, Saccharomyces pastorianus
ggtggacgaccatctgctgaagcaa

SEQ ID NO: 24998 - DNA, 25 bp, Saccharomyces pastorianus
gaacgatctctttggcgattccacg

SEQ ID NO: 24999 - DNA, 25 bp, Saccharomyces pastorianus
aactcacatactccgatatctggtc

SEQ ID NO: 25000 - DNA, 25 bp, Saccharomyces pastorianus
aattttgacttcaccttactgaatg

SEQ ID NO: 25001 - DNA, 25 bp, Saccharomyces pastorianus
attgaaaactccgaagacactttgc

SEQ ID NO: 25002 - DNA, 25 bp, Saccharomyces pastorianus
gatgaattgtactacctcttgaaag

SEQ ID NO: 25003 - DNA, 25 bp, Saccharomyces pastorianus
gtcccaacgaaactttacttcagag

SEQ ID NO: 25004 - DNA, 25 bp, Saccharomyces pastorianus
aagggatttaccaattgaactgcaa

SEQ ID NO: 25005 - DNA, 25 bp, Saccharomyces pastorianus
atttattgggtaccttatctcacgg

SEQ ID NO: 25006 - DNA, 25 bp, Saccharomyces pastorianus
gtacttatctaaattcaacctcgaa

SEQ ID NO: 25007 - DNA, 25 bp, Saccharomyces pastorianus
caatcccaccattgcttatgtttgg

SEQ ID NO: 25008 - DNA, 25 bp, Saccharomyces pastorianus
cattgaactatgaactcgccagaaa

SEQ ID NO: 25009 - DNA, 25 bp, Saccharomyces pastorianus
tgaacttcttagacgcacctacatt

SEQ ID NO: 25010 - DNA, 25 bp, Saccharomyces pastorianus
ggaatgtctgatttcaatcccacca

SEQ ID NO: 25011 - DNA, 25 bp, Saccharomyces pastorianus
gcaggctacctgactactgagtcga

SEQ ID NO: 25012 - DNA, 25 bp, Saccharomyces pastorianus
aacgtcggtcttttgaatccagcaa

SEQ ID NO: 25013 - DNA, 25 bp, Saccharomyces pastorianus
atggaggttcctgatgctggtcaca

SEQ ID NO: 25014 - DNA, 25 bp, Saccharomyces pastorianus
aaatccatcgacaaactgtgcctca

SEQ ID NO: 25015 - DNA, 25 bp, Saccharomyces pastorianus
aggaacctgattgcgcgagatccaa

SEQ ID NO: 25016 - DNA, 25 bp, Saccharomyces pastorianus
gaaagctgaacgttcctcggttcat

SEQ ID NO: 25017 - DNA, 25 bp, Saccharomyces pastorianus
gctggtcacaacctatttctggaca

SEQ ID NO: 25018 - DNA, 25 bp, Saccharomyces pastorianus
tcatgtacggcgaacacgactggat

SEQ ID NO: 25019 - DNA, 25 bp, Saccharomyces pastorianus
aggtgcccgaccaactgtacaaaga

SEQ ID NO: 25020 - DNA, 25 bp, Saccharomyces pastorianus
aagctgtgctcgagttacatctcca

SEQ ID NO: 25021 - DNA, 25 bp, Saccharomyces pastorianus
aagactacctcttgcactcatttgt

SEQ ID NO: 25022 - DNA, 25 bp, Saccharomyces pastorianus
gcaaggccttggcacgatcagcagc

SEQ ID NO: 25023 - DNA, 25 bp, Saccharomyces pastorianus
ggacacatcggttgtcctgcaaggc

SEQ ID NO: 25024 - DNA, 25 bp, Saccharomyces pastorianus
catcgctgagcaacgagctggcgga

SEQ ID NO: 25025 - DNA, 25 bp, Saccharomyces pastorianus
aacgagctggcggatgcgcaacgcc

SEQ ID NO: 25026 - DNA, 25 bp, Saccharomyces pastorianus
acgccagtgggaggagtcgctgcaa

SEQ ID NO: 25027 - DNA, 25 bp, Saccharomyces pastorianus
cgatcagcagcctagagggtctgga

SEQ ID NO: 25028 - DNA, 25 bp, Saccharomyces pastorianus
tcggttgtcctgcaaggccttggca

SEQ ID NO: 25029 - DNA, 25 bp, Saccharomyces pastorianus
gcacgatcagcagcctagagggtct

SEQ ID NO: 25030 - DNA, 25 bp, Saccharomyces pastorianus
aggacgatgggtacctcagcgacga

SEQ ID NO: 25031 - DNA, 25 bp, Saccharomyces pastorianus
gggcaggaggatggccaagacgctt

SEQ ID NO: 25032 - DNA, 25 bp, Saccharomyces pastorianus
gacgaggacacatcgctgagcaacg

SEQ ID NO: 25033 - DNA, 25 bp, Saccharomyces pastorianus
accagtacgtggttcagcccggtat

SEQ ID NO: 25034 - DNA, 25 bp, Saccharomyces pastorianus
tattttggcatgttgctcctgttct

SEQ ID NO: 25035 - DNA, 25 bp, Saccharomyces pastorianus
gtcagacgttttcgcttatctacag

SEQ ID NO: 25036 - DNA, 25 bp, Saccharomyces pastorianus
aggacatcaagtacggttctgccac

SEQ ID NO: 25037 - DNA, 25 bp, Saccharomyces pastorianus
ttcacaagtcagtccttttccaagt

SEQ ID NO: 25038 - DNA, 25 bp, Saccharomyces pastorianus
aatgcacccgtgtacgtgactaggt

SEQ ID NO: 25039 - DNA, 25 bp, Saccharomyces pastorianus
ttgggtgtccagtatcatgtccgat

SEQ ID NO: 25040 - DNA, 25 bp, Saccharomyces pastorianus
ggccaaccccaatttcgaaaagcag

SEQ ID NO: 25041 - DNA, 25 bp, Saccharomyces pastorianus
gttctgccacttcatgggacggtat

SEQ ID NO: 25042 - DNA, 25 bp, Saccharomyces pastorianus
ttagttgacctgctgcatttggcca

SEQ ID NO: 25043 - DNA, 25 bp, Saccharomyces pastorianus
gatgggccggatctccatggcataa

SEQ ID NO: 25044 - DNA, 25 bp, Saccharomyces pastorianus
aagcccgatgcgcatgagaacgaca

SEQ ID NO: 25045 - DNA, 25 bp, Saccharomyces pastorianus
agtttgtgacaagttcgaggccgaa

SEQ ID NO: 25046 - DNA, 25 bp, Saccharomyces pastorianus
ggatctggtcagttctttgcaaagt

SEQ ID NO: 25047 - DNA, 25 bp, Saccharomyces pastorianus
gtattccacaaacagggccatcttg

SEQ ID NO: 25048 - DNA, 25 bp, Saccharomyces pastorianus
attacgcaccattttgcggccgtaa

SEQ ID NO: 25049 - DNA, 25 bp, Saccharomyces pastorianus
ggtacagacacctatcgaccagata

SEQ ID NO: 25050 - DNA, 25 bp, Saccharomyces pastorianus
agaacgacaacccagacgacagtgc

SEQ ID NO: 25051 - DNA, 25 bp, Saccharomyces pastorianus
gatgacctcgatagtttgacccata

SEQ ID NO: 25052 - DNA, 25 bp, Saccharomyces pastorianus
aatcgataattttttgcgggctgaa

SEQ ID NO: 25053 - DNA, 25 bp, Saccharomyces pastorianus
acgacagtgctgcaatgctgctgga

SEQ ID NO: 25054 - DNA, 25 bp, Saccharomyces pastorianus
atccaatgtcatgagagggttccca

SEQ ID NO: 25055 - DNA, 25 bp, Saccharomyces pastorianus
aacaccggtgttgccatactagaga

SEQ ID NO: 25056 - DNA, 25 bp, Saccharomyces pastorianus
attacccatggtgcttgccagtatg

SEQ ID NO: 25057 - DNA, 25 bp, Saccharomyces pastorianus
gaagacaagcaattattacccatgg

SEQ ID NO: 25058 - DNA, 25 bp, Saccharomyces pastorianus
ggaccagatctggacttgtacagaa

SEQ ID NO: 25059 - DNA, 25 bp, Saccharomyces pastorianus
attcgtcgagaggatctgtcgccat

SEQ ID NO: 25060 - DNA, 25 bp, Saccharomyces pastorianus
aggtatccccgtgggctggacacga

SEQ ID NO: 25061 - DNA, 25 bp, Saccharomyces pastorianus
aatgttgcgctgaatctgaagacaa

SEQ ID NO: 25062 - DNA, 25 bp, Saccharomyces pastorianus
gggtattcgattggcacaagattta

SEQ ID NO: 25063 - DNA, 25 bp, Saccharomyces pastorianus
aatgggtctcgaatttctggttaag

SEQ ID NO: 25064 - DNA, 25 bp, Saccharomyces pastorianus
attggctcatagaatgttgcgctga

SEQ ID NO: 25065 - DNA, 25 bp, Saccharomyces pastorianus
gtgtcttgcaagatggaccagatct

SEQ ID NO: 25066 - DNA, 25 bp, Saccharomyces pastorianus
gcagaattctgtgtcatgggccttg

SEQ ID NO: 25067 - DNA, 25 bp, Saccharomyces pastorianus
gcacagcctcaagacgtttacgaat

SEQ ID NO: 25068 - DNA, 25 bp, Saccharomyces pastorianus
ggccttgtttttaacctttgcactg

SEQ ID NO: 25069 - DNA, 25 bp, Saccharomyces pastorianus
atacattctttcgttcgatcctacg

SEQ ID NO: 25070 - DNA, 25 bp, Saccharomyces pastorianus
ctttgcactgcctgttctagaaata

SEQ ID NO: 25071 - DNA, 25 bp, Saccharomyces pastorianus
tagaaatatctcctgctaacctggc

SEQ ID NO: 25072 - DNA, 25 bp, Saccharomyces pastorianus
catggctggtgcgtacgatctggaa

SEQ ID NO: 25073 - DNA, 25 bp, Saccharomyces pastorianus
gctacgtagaaaggctcatcccaga

SEQ ID NO: 25074 - DNA, 25 bp, Saccharomyces pastorianus
gaatcattagaactcatgccggtgg

SEQ ID NO: 25075 - DNA, 25 bp, Saccharomyces pastorianus
ggtattccagtatagcacgtgttgt

SEQ ID NO: 25076 - DNA, 25 bp, Saccharomyces pastorianus
gaagacttttgtactctgctacgta

SEQ ID NO: 25077 - DNA, 25 bp, Saccharomyces pastorianus
gaatttgaactgtacacacggtttg

SEQ ID NO: 25078 - DNA, 25 bp, Saccharomyces pastorianus
gaaattccgtcaccgcaaatgaaat

SEQ ID NO: 25079 - DNA, 25 bp, Saccharomyces pastorianus
atccaaagaggctgcggaactattt

SEQ ID NO: 25080 - DNA, 25 bp, Saccharomyces pastorianus
gtctccatctgtgatttggcggtta

SEQ ID NO: 25081 - DNA, 25 bp, Saccharomyces pastorianus
gagtcacatctgataatccccgcat

SEQ ID NO: 25082 - DNA, 25 bp, Saccharomyces pastorianus
atgtcctgttgaaaactcccagcgg

SEQ ID NO: 25083 - DNA, 25 bp, Saccharomyces pastorianus
cacggtttgaagctacatttatcca

SEQ ID NO: 25084 - DNA, 25 bp, Saccharomyces pastorianus
gaaaatgatgactccgagccaccaa

SEQ ID NO: 25085 - DNA, 25 bp, Saccharomyces pastorianus
agcggtagaatcgatctgtccgaat

SEQ ID NO: 25086 - DNA, 25 bp, Saccharomyces pastorianus
ggccttatatcgacacggtttcata

SEQ ID NO: 25087 - DNA, 25 bp, Saccharomyces pastorianus
acggtacgaaatgcgccaatatctt

SEQ ID NO: 25088 - DNA, 25 bp, Saccharomyces pastorianus
gccacatcccaggttacattaacta

SEQ ID NO: 25089 - DNA, 25 bp, Saccharomyces pastorianus
tagatgggccatcgttgtcgaaaac

SEQ ID NO: 25090 - DNA, 25 bp, Saccharomyces pastorianus
ggacactacacacatcaagttcgct

SEQ ID NO: 25091 - DNA, 25 bp, Saccharomyces pastorianus
aggttgtgctttcaccaagtccatt

SEQ ID NO: 25092 - DNA, 25 bp, Saccharomyces pastorianus
agaaggtcatcatcactggtgctcc

SEQ ID NO: 25093 - DNA, 25 bp, Saccharomyces pastorianus
aagtccattggtttcgaattggctg

SEQ ID NO: 25094 - DNA, 25 bp, Saccharomyces pastorianus
accaagtcattgtcgtcaccgttga

SEQ ID NO: 25095 - DNA, 25 bp, Saccharomyces pastorianus
gccgccaaggaatctaacccaggtt

SEQ ID NO: 25096 - DNA, 25 bp, Saccharomyces pastorianus
gcctgggccaagagcttaggtgtca

SEQ ID NO: 25097 - DNA, 25 bp, Saccharomyces pastorianus
gttaacaaacaattcccatccggtg

SEQ ID NO: 25098 - DNA, 25 bp, Saccharomyces pastorianus
gtcgaaaacggtgtcgtcacctacg

SEQ ID NO: 25099 - DNA, 25 bp, Saccharomyces pastorianus
gattcttcagcaactgcttcgtaca

SEQ ID NO: 25100 - DNA, 25 bp, Saccharomyces pastorianus
gtgcatctatcgttactggcggtaa

SEQ ID NO: 25101 - DNA, 25 bp, Saccharomyces pastorianus
taccactttaacctatttgcccgag

SEQ ID NO: 25102 - DNA, 25 bp, Saccharomyces pastorianus
cgacatcatttcaacttctgttcca

SEQ ID NO: 25103 - DNA, 25 bp, Saccharomyces pastorianus
tagaagtttccatggcacaggccaa

SEQ ID NO: 25104 - DNA, 25 bp, Saccharomyces pastorianus
aggcgccaggctacacaaatacttg

SEQ ID NO: 25105 - DNA, 25 bp, Saccharomyces pastorianus
aatgccgcgctgtctagttttatct

SEQ ID NO: 25106 - DNA, 25 bp, Saccharomyces pastorianus
ttggtggctttcacatcaatgccgc

SEQ ID NO: 25107 - DNA, 25 bp, Saccharomyces pastorianus
taccaccaaaataccggccttgttg

SEQ ID NO: 25108 - DNA, 25 bp, Saccharomyces pastorianus
tggtgatcgtactgtgccatctcta

SEQ ID NO: 25109 - DNA, 25 bp, Saccharomyces pastorianus
tgggtattcttccaacaggtgatag

SEQ ID NO: 25110 - DNA, 25 bp, Saccharomyces pastorianus
caggagtttgttttggccatcaggt

SEQ ID NO: 25111 - DNA, 25 bp, Saccharomyces pastorianus
aacatccacccgtagcaggagtttg

SEQ ID NO: 25112 - DNA, 25 bp, Saccharomyces pastorianus
gaagtcccgagacaaggtgaacctt

SEQ ID NO: 25113 - DNA, 25 bp, Saccharomyces pastorianus
aatctttccgaggtgcatagcgact

SEQ ID NO: 25114 - DNA, 25 bp, Saccharomyces pastorianus
aagtgctaacgtttcaaggacatcc

SEQ ID NO: 25115 - DNA, 25 bp, Saccharomyces pastorianus
agcgactgtgttttcgatgtcccag

SEQ ID NO: 25116 - DNA, 25 bp, Saccharomyces pastorianus
taactagcgactttgaacatccacc

SEQ ID NO: 25117 - DNA, 25 bp, Saccharomyces pastorianus
catcaggtaattgcggctgccctag

SEQ ID NO: 25118 - DNA, 25 bp, Saccharomyces pastorianus
tgaaggaggcgttgtaccgcttaaa

SEQ ID NO: 25119 - DNA, 25 bp, Saccharomyces pastorianus
gaatacgaggtctttcatgtccaga

SEQ ID NO: 25120 - DNA, 25 bp, Saccharomyces pastorianus
taggcagttcagtgggtcggaaccc

SEQ ID NO: 25121 - DNA, 25 bp, Saccharomyces pastorianus
gactgcttgatctcttaaacttttg

SEQ ID NO: 25122 - DNA, 25 bp, Saccharomyces pastorianus
agagggaatgctagccaacttgggt

SEQ ID NO: 25123 - DNA, 25 bp, Saccharomyces pastorianus
gtccgaatctctgaatattgcacca

SEQ ID NO: 25124 - DNA, 25 bp, Saccharomyces pastorianus
gatgaaccagtctacttgtcattag

SEQ ID NO: 25125 - DNA, 25 bp, Saccharomyces pastorianus
aagaggtgtcctttctgaagagaat

SEQ ID NO: 25126 - DNA, 25 bp, Saccharomyces pastorianus
ggatatcaccggattactcctttac

SEQ ID NO: 25127 - DNA, 25 bp, Saccharomyces pastorianus
ttgtcattagagcagttgtccgaat

SEQ ID NO: 25128 - DNA, 25 bp, Saccharomyces pastorianus
gccaacttgggtgctatgaaactta

SEQ ID NO: 25129 - DNA, 25 bp, Saccharomyces pastorianus
agtgctggatgtatctttggaacaa

SEQ ID NO: 25130 - DNA, 25 bp, Saccharomyces pastorianus
gaagtatctaaacgttctagcggat

SEQ ID NO: 25131 - DNA, 25 bp, Saccharomyces pastorianus
atagccacactgattttaaccaaac

SEQ ID NO: 25132 - DNA, 25 bp, Saccharomyces pastorianus
gcataactacgaatttgccgatgaa

SEQ ID NO: 25133 - DNA, 25 bp, Saccharomyces pastorianus
tttgttgcataatcacctaccttta

SEQ ID NO: 25134 - DNA, 25 bp, Saccharomyces pastorianus
atgcccttctcgtacgtcttaaaat

SEQ ID NO: 25135 - DNA, 25 bp, Saccharomyces pastorianus
attgctgtaaaaaagacgcctgaac

SEQ ID NO: 25136 - DNA, 25 bp, Saccharomyces pastorianus
gggcgtcccagctagaagacgcgtt

SEQ ID NO: 25137 - DNA, 25 bp, Saccharomyces pastorianus
aactctggagtcattaaaagctggt

SEQ ID NO: 25138 - DNA, 25 bp, Saccharomyces pastorianus
ggtaattctgtcttgattgctgtaa

SEQ ID NO: 25139 - DNA, 25 bp, Saccharomyces pastorianus
attatcgaggataagggcgtcccag

SEQ ID NO: 25140 - DNA, 25 bp, Saccharomyces pastorianus
gaagcactagatttaggtatcgctg

SEQ ID NO: 25141 - DNA, 25 bp, Saccharomyces pastorianus
tgagatttactgatgccgtcatgaa

SEQ ID NO: 25142 - DNA, 25 bp, Saccharomyces pastorianus
agacgcgttgatggtgatgcccttc

SEQ ID NO: 25143 - DNA, 25 bp, Saccharomyces pastorianus
ggtcgctgagacaaactggcctgac

SEQ ID NO: 25144 - DNA, 25 bp, Saccharomyces pastorianus
actcttggatccctggttctagaag

SEQ ID NO: 25145 - DNA, 25 bp, Saccharomyces pastorianus
ctaatgggactagccttcactctga

SEQ ID NO: 25146 - DNA, 25 bp, Saccharomyces pastorianus
atgctggcagttttcatccttgaat

SEQ ID NO: 25147 - DNA, 25 bp, Saccharomyces pastorianus
tgacaaatttcgcatctgtaccggg

SEQ ID NO: 25148 - DNA, 25 bp, Saccharomyces pastorianus
acgtcacccatagcagtcgcaatag

SEQ ID NO: 25149 - DNA, 25 bp, Saccharomyces pastorianus
gccaacggtattttcgattcgatat

SEQ ID NO: 25150 - DNA, 25 bp, Saccharomyces pastorianus
cttagcgcctatttcatcatgtgtt

SEQ ID NO: 25151 - DNA, 25 bp, Saccharomyces pastorianus
gatcatcaagatgcttcccagttgg

SEQ ID NO: 25152 - DNA, 25 bp, Saccharomyces pastorianus
tgaaatagttccatcgagctcgcgt

SEQ ID NO: 25153 - DNA, 25 bp, Saccharomyces pastorianus
tgaattcggtatcatcttccactct

SEQ ID NO: 25154 - DNA, 25 bp, Saccharomyces pastorianus
agtcctaaacttcttgtactcttat

SEQ ID NO: 25155 - DNA, 25 bp, Saccharomyces pastorianus
ccgcacaactgccattctgataaat

SEQ ID NO: 25156 - DNA, 25 bp, Saccharomyces pastorianus
gtactcttatgtctcccatttaagg

SEQ ID NO: 25157 - DNA, 25 bp, Saccharomyces pastorianus
gatctagcaaatcatctctctgagt

SEQ ID NO: 25158 - DNA, 25 bp, Saccharomyces pastorianus
aagacggatcccagccctgtggaag

SEQ ID NO: 25159 - DNA, 25 bp, Saccharomyces pastorianus
ggccatcctacaaagcggtgagttg

SEQ ID NO: 25160 - DNA, 25 bp, Saccharomyces pastorianus
ataatgcagaggctccgcacaactg

SEQ ID NO: 25161 - DNA, 25 bp, Saccharomyces pastorianus
gagacccacggtccaattgttttgg

SEQ ID NO: 25162 - DNA, 25 bp, Saccharomyces pastorianus
aggctggtgtcagcatcgacacgtt

SEQ ID NO: 25163 - DNA, 25 bp, Saccharomyces pastorianus
gctctacaactcaatcctgcaatgg

SEQ ID NO: 25164 - DNA, 25 bp, Saccharomyces pastorianus
gacctcattggtctgggcataatca

SEQ ID NO: 25165 - DNA, 25 bp, Saccharomyces pastorianus
ggaaccaattgtccaacttcttaca

SEQ ID NO: 25166 - DNA, 25 bp, Saccharomyces pastorianus
taacaaagcccttccagctagtact

SEQ ID NO: 25167 - DNA, 25 bp, Saccharomyces pastorianus
aatgaagttcaaccttgggaccact

SEQ ID NO: 25168 - DNA, 25 bp, Saccharomyces pastorianus
accatggccgctgaagaacttgatc

SEQ ID NO: 25169 - DNA, 25 bp, Saccharomyces pastorianus
gaaacccacagagtcgttacaaccg

SEQ ID NO: 25170 - DNA, 25 bp, Saccharomyces pastorianus
tcacggtcctcacgctgaatataat

SEQ ID NO: 25171 - DNA, 25 bp, Saccharomyces pastorianus
accactttcccaacagacgtttatg

SEQ ID NO: 25172 - DNA, 25 bp, Saccharomyces pastorianus
gggaccacttggctttgttgccaac

SEQ ID NO: 25173 - DNA, 25 bp, Saccharomyces pastorianus
gtcggtgctcttttgggtgctacca

SEQ ID NO: 25174 - DNA, 25 bp, Saccharomyces pastorianus
ggtttgaagccatacattttcgtct

SEQ ID NO: 25175 - DNA, 25 bp, Saccharomyces pastorianus
ttccattggtttcactgtcggtgct

SEQ ID NO: 25176 - DNA, 25 bp, Saccharomyces pastorianus
aatgccaattcgcacatgggttgaa

SEQ ID NO: 25177 - DNA, 25 bp, Saccharomyces pastorianus
ttacgtccccaaatcttcacaattg

SEQ ID NO: 25178 - DNA, 25 bp, Saccharomyces pastorianus
gcaggagaccccaaagcagctatac

SEQ ID NO: 25179 - DNA, 25 bp, Saccharomyces pastorianus
gacttctgtacgacccacaattgat

SEQ ID NO: 25180 - DNA, 25 bp, Saccharomyces pastorianus
ggaggtacagatcaacccagattac

SEQ ID NO: 25181 - DNA, 25 bp, Saccharomyces pastorianus
aaactaggatactgcccctacggca

SEQ ID NO: 25182 - DNA, 25 bp, Saccharomyces pastorianus
atgctccatcttctccacaaaagat

SEQ ID NO: 25183 - DNA, 25 bp, Saccharomyces pastorianus
gtacttattgtaaccgcagtgccaa

SEQ ID NO: 25184 - DNA, 25 bp, Saccharomyces pastorianus
aaatttgcagcagttgtcccagcaa

SEQ ID NO: 25185 - DNA, 25 bp, Saccharomyces pastorianus
agagaagcaccagtcgcggcgatga

SEQ ID NO: 25186 - DNA, 25 bp, Saccharomyces pastorianus
tagtctggacactagcacactgacc

SEQ ID NO: 25187 - DNA, 25 bp, Saccharomyces pastorianus
gatggtggcaccagcggaccaagat

SEQ ID NO: 25188 - DNA, 25 bp, Saccharomyces pastorianus
cctgggtgacagttacgacgtggat

SEQ ID NO: 25189 - DNA, 25 bp, Saccharomyces pastorianus
aaagagtgctgctgttaagtccgct

SEQ ID NO: 25190 - DNA, 25 bp, Saccharomyces pastorianus
gatgatgaagagttgccaccattac

SEQ ID NO: 25191 - DNA, 25 bp, Saccharomyces pastorianus
accattacctgtggaagcacacgga

SEQ ID NO: 25192 - DNA, 25 bp, Saccharomyces pastorianus
gaaaagaacattgacacccgcaccg

SEQ ID NO: 25193 - DNA, 25 bp, Saccharomyces pastorianus
tcaagagcactaactgccgtaggtt

SEQ ID NO: 25194 - DNA, 25 bp, Saccharomyces pastorianus
ggcgtgccgccgtcattaaatgaag

SEQ ID NO: 25195 - DNA, 25 bp, Saccharomyces pastorianus
agataaatccgcacacgactcgtta

SEQ ID NO: 25196 - DNA, 25 bp, Saccharomyces pastorianus
ggagtccaagcatcactaactttag

SEQ ID NO: 25197 - DNA, 25 bp, Saccharomyces pastorianus
cccgcaccggtaggaggagtccaag

SEQ ID NO: 25198 - DNA, 25 bp, Saccharomyces pastorianus
gatcgcagtgccgaatagccaagca

SEQ ID NO: 25199 - DNA, 25 bp, Saccharomyces pastorianus
tattctgatatcaaccgcggctttg

SEQ ID NO: 25200 - DNA, 25 bp, Saccharomyces pastorianus
gatttgctgcccaattttgaccaga

SEQ ID NO: 25201 - DNA, 25 bp, Saccharomyces pastorianus
ctcaccactcctttgtacagttgaa

SEQ ID NO: 25202 - DNA, 25 bp, Saccharomyces pastorianus
gccggcagtgcccaggataaataca

SEQ ID NO: 25203 - DNA, 25 bp, Saccharomyces pastorianus
gaatttctcgtaaagtcccactgga

SEQ ID NO: 25204 - DNA, 25 bp, Saccharomyces pastorianus
agttgaattttactcctatgccgcc

SEQ ID NO: 25205 - DNA, 25 bp, Saccharomyces pastorianus
ccacccggacgcttggttaagtgat

SEQ ID NO: 25206 - DNA, 25 bp, Saccharomyces pastorianus
aatgagacctctcctgaaactgcag

SEQ ID NO: 25207 - DNA, 25 bp, Saccharomyces pastorianus
atcacatccgactacatccaagatt

SEQ ID NO: 25208 - DNA, 25 bp, Saccharomyces pastorianus
ggttcatacaggcagttggacttca

SEQ ID NO: 25209 - DNA, 25 bp, Saccharomyces pastorianus
tacctagaggtgctgttgccgaatg

SEQ ID NO: 25210 - DNA, 25 bp, Saccharomyces pastorianus
cctgggtgctttactgctgtcaaat

SEQ ID NO: 25211 - DNA, 25 bp, Saccharomyces pastorianus
ttacacaccatcacagtcaattcgc

SEQ ID NO: 25212 - DNA, 25 bp, Saccharomyces pastorianus
gatgacgttcctttttaccaacacg

SEQ ID NO: 25213 - DNA, 25 bp, Saccharomyces pastorianus
acaatgcttgcgaagcctgggtgct

SEQ ID NO: 25214 - DNA, 25 bp, Saccharomyces pastorianus
aatcggctcaagtaactctctatta

SEQ ID NO: 25215 - DNA, 25 bp, Saccharomyces pastorianus
agtcaattcgcctggatctcataaa

SEQ ID NO: 25216 - DNA, 25 bp, Saccharomyces pastorianus
ggaaacggacaacatctcacccaag

SEQ ID NO: 25217 - DNA, 25 bp, Saccharomyces pastorianus
ggattctctccatcaaacagttctg

SEQ ID NO: 25218 - DNA, 25 bp, Saccharomyces pastorianus
aagatttcggacttacctagaggtg

SEQ ID NO: 25219 - DNA, 25 bp, Saccharomyces pastorianus
acagttctggctttacaacattttg

SEQ ID NO: 25220 - DNA, 25 bp, Saccharomyces pastorianus
aagaggtggtactgggatttcaata

SEQ ID NO: 25221 - DNA, 25 bp, Saccharomyces pastorianus
gagccttagaacaagagtaccggtt

SEQ ID NO: 25222 - DNA, 25 bp, Saccharomyces pastorianus
agtaccggttgatattgctgctgaa

SEQ ID NO: 25223 - DNA, 25 bp, Saccharomyces pastorianus
gggcaatttgtaacgctaggctgtg

SEQ ID NO: 25224 - DNA, 25 bp, Saccharomyces pastorianus
aatacaggttgttgagccagagact

SEQ ID NO: 25225 - DNA, 25 bp, Saccharomyces pastorianus
tactagcaaacgtgagagccttata

SEQ ID NO: 25226 - DNA, 25 bp, Saccharomyces pastorianus
tacagagggcgttgtttcggcagtt

SEQ ID NO: 25227 - DNA, 25 bp, Saccharomyces pastorianus
ttgcacagactattacagagggcgt

SEQ ID NO: 25228 - DNA, 25 bp, Saccharomyces pastorianus
taggctgtgtactagtcgcattact

SEQ ID NO: 25229 - DNA, 25 bp, Saccharomyces pastorianus
ggtatggatcattcaacgagctaaa

SEQ ID NO: 25230 - DNA, 25 bp, Saccharomyces pastorianus
gaagatatccgcaacgttgtcagag

SEQ ID NO: 25231 - DNA, 25 bp, Saccharomyces pastorianus
atggcgcttttgacgatgagaggtt

SEQ ID NO: 25232 - DNA, 25 bp, Saccharomyces pastorianus
aagatcgctttctggacgggagcaa

SEQ ID NO: 25233 - DNA, 25 bp, Saccharomyces pastorianus
gctacataatgctctaaaccctgat

SEQ ID NO: 25234 - DNA, 25 bp, Saccharomyces pastorianus
ctgacggtccggctgaagctttttt

SEQ ID NO: 25235 - DNA, 25 bp, Saccharomyces pastorianus
gaagttcctgcccacgttgagtaat

SEQ ID NO: 25236 - DNA, 25 bp, Saccharomyces pastorianus
actgatagttcagaccctgacggtc

SEQ ID NO: 25237 - DNA, 25 bp, Saccharomyces pastorianus
gttaattgccccacaaagatcgctt

SEQ ID NO: 25238 - DNA, 25 bp, Saccharomyces pastorianus
ggttccaacgtatacctctggtcaa

SEQ ID NO: 25239 - DNA, 25 bp, Saccharomyces pastorianus
ggtggagatcgattcttcagttatt

SEQ ID NO: 25240 - DNA, 25 bp, Saccharomyces pastorianus
gacagtataccgttaattgccccac

SEQ ID NO: 25241 - DNA, 25 bp, Saccharomyces pastorianus
attgagctatctcggaagttcctgc

SEQ ID NO: 25242 - DNA, 25 bp, Saccharomyces pastorianus
gaaccaggcaaatcttgtgatgaat

SEQ ID NO: 25243 - DNA, 25 bp, Saccharomyces pastorianus
ccctgtggtcattgtttccattgga

SEQ ID NO: 25244 - DNA, 25 bp, Saccharomyces pastorianus
aacaagatcgatcagccagtgcgca

SEQ ID NO: 25245 - DNA, 25 bp, Saccharomyces pastorianus
gatcgatcagccagtgcgcattgat

SEQ ID NO: 25246 - DNA, 25 bp, Saccharomyces pastorianus
agttcatagtttttccctgtggtca

SEQ ID NO: 25247 - DNA, 25 bp, Saccharomyces pastorianus
gaacgagatctcagaagacatcata

SEQ ID NO: 25248 - DNA, 25 bp, Saccharomyces pastorianus
gaatgtgggaagttcttacagataa

SEQ ID NO: 25249 - DNA, 25 bp, Saccharomyces pastorianus
gatttacagaattttagaaccaggc

SEQ ID NO: 25250 - DNA, 25 bp, Saccharomyces pastorianus
aaagatctcttaccatttttcaacg

SEQ ID NO: 25251 - DNA, 25 bp, Saccharomyces pastorianus
ggaactgtttgatcaggttgatatt

SEQ ID NO: 25252 - DNA, 25 bp, Saccharomyces pastorianus
ggattatgcagtgatattaacgtaa

SEQ ID NO: 25253 - DNA, 25 bp, Saccharomyces pastorianus
gattcgactgcaacttcatcgtcaa

SEQ ID NO: 25254 - DNA, 25 bp, Saccharomyces pastorianus
caacataccgtgtttcttcggacta

SEQ ID NO: 25255 - DNA, 25 bp, Saccharomyces pastorianus
gattgaccctttgattctttctcac

SEQ ID NO: 25256 - DNA, 25 bp, Saccharomyces pastorianus
agggtgtctacatcgggtccaatta

SEQ ID NO: 25257 - DNA, 25 bp, Saccharomyces pastorianus
ggccacgtaaatttgagcgcgcata

SEQ ID NO: 25258 - DNA, 25 bp, Saccharomyces pastorianus
agcgcgcatactactgattcgactg

SEQ ID NO: 25259 - DNA, 25 bp, Saccharomyces pastorianus
gtaacccatcaaacgagacttctca

SEQ ID NO: 25260 - DNA, 25 bp, Saccharomyces pastorianus
tgaaagtttcctaagaccgccttca

SEQ ID NO: 25261 - DNA, 25 bp, Saccharomyces pastorianus
tcatcgtcaaattctgcatcccaaa

SEQ ID NO: 25262 - DNA, 25 bp, Saccharomyces pastorianus
actgactcttctaatggccacgtaa

SEQ ID NO: 25263 - DNA, 25 bp, Saccharomyces pastorianus
aactcctgacttaccgtcggatgat

SEQ ID NO: 25264 - DNA, 25 bp, Saccharomyces pastorianus
accgtcgtggtggtagaaccgccag

SEQ ID NO: 25265 - DNA, 25 bp, Saccharomyces pastorianus
aagggcaatgacagcactgccacca

SEQ ID NO: 25266 - DNA, 25 bp, Saccharomyces pastorianus
gatgccacttttgctgaagccaact

SEQ ID NO: 25267 - DNA, 25 bp, Saccharomyces pastorianus
gaccactcaattgtctctacaagac

SEQ ID NO: 25268 - DNA, 25 bp, Saccharomyces pastorianus
gatgtcactgactctgccgagacca

SEQ ID NO: 25269 - DNA, 25 bp, Saccharomyces pastorianus
aacaccatcaacagaggcaacttca

SEQ ID NO: 25270 - DNA, 25 bp, Saccharomyces pastorianus
actagaaaggccactgaccgtcact

SEQ ID NO: 25271 - DNA, 25 bp, Saccharomyces pastorianus
gaaccaacaagccagcaaccaattt

SEQ ID NO: 25272 - DNA, 25 bp, Saccharomyces pastorianus
gctaactctgctaactctgttcaaa

SEQ ID NO: 25273 - DNA, 25 bp, Saccharomyces pastorianus
gaatacttggacttcgatgccactt

SEQ ID NO: 25274 - DNA, 25 bp, Saccharomyces pastorianus
tgccgagaccaagaagcctaacact

SEQ ID NO: 25275 - DNA, 25 bp, Saccharomyces pastorianus
gacatggtcaatgcctagtgccact

SEQ ID NO: 25276 - DNA, 25 bp, Saccharomyces pastorianus
ataaagcacctgacggagagcccgt

SEQ ID NO: 25277 - DNA, 25 bp, Saccharomyces pastorianus
atacgcctgcgtgtggagagcatat

SEQ ID NO: 25278 - DNA, 25 bp, Saccharomyces pastorianus
aaagcaatatatccgcgttcataga

SEQ ID NO: 25279 - DNA, 25 bp, Saccharomyces pastorianus
tacagtacgcagttcttttcatcac

SEQ ID NO: 25280 - DNA, 25 bp, Saccharomyces pastorianus
tcctattatcggtgttctttgggta

SEQ ID NO: 25281 - DNA, 25 bp, Saccharomyces pastorianus
tatttcacggccttttatacgcctg

SEQ ID NO: 25282 - DNA, 25 bp, Saccharomyces pastorianus
gaaatgcgtgtgttccattaggact

SEQ ID NO: 25283 - DNA, 25 bp, Saccharomyces pastorianus
gagaccagcatctctgggagccata

SEQ ID NO: 25284 - DNA, 25 bp, Saccharomyces pastorianus
agtgccactgcccaggtttatttca

SEQ ID NO: 25285 - DNA, 25 bp, Saccharomyces pastorianus
tatgcgccctaattccctgggtgaa

SEQ ID NO: 25286 - DNA, 25 bp, Saccharomyces pastorianus
agtgccgctctaagcaatggcgcta

SEQ ID NO: 25287 - DNA, 25 bp, Saccharomyces pastorianus
gagagggcaccgaccgtaacgaatt

SEQ ID NO: 25288 - DNA, 25 bp, Saccharomyces pastorianus
aaagataccgggagtctagacgcgt

SEQ ID NO: 25289 - DNA, 25 bp, Saccharomyces pastorianus
gacgacaccatatacttccgtggga

SEQ ID NO: 25290 - DNA, 25 bp, Saccharomyces pastorianus
aaagactacaaattcgacgacacca

SEQ ID NO: 25291 - DNA, 25 bp, Saccharomyces pastorianus
caaggtccaaccacagagttcaaag

SEQ ID NO: 25292 - DNA, 25 bp, Saccharomyces pastorianus
gtctagacgcgtacacagtgaactt

SEQ ID NO: 25293 - DNA, 25 bp, Saccharomyces pastorianus
aatggcgctatcttgtcgggaaata

SEQ ID NO: 25294 - DNA, 25 bp, Saccharomyces pastorianus
gagctgcaaaaggagaagcccgcct

SEQ ID NO: 25295 - DNA, 25 bp, Saccharomyces pastorianus
gaacttcatgccttgttacacagaa

SEQ ID NO: 25296 - DNA, 25 bp, Saccharomyces pastorianus
actgctacacacgatacctcgagtg

SEQ ID NO: 25297 - DNA, 25 bp, Saccharomyces pastorianus
aacaagcctgtttcaatggttgctc

SEQ ID NO: 25298 - DNA, 25 bp, Saccharomyces pastorianus
ggttgctcttggaaatacatctact

SEQ ID NO: 25299 - DNA, 25 bp, Saccharomyces pastorianus
tagaaggtgtttcgtggtccgctcc

SEQ ID NO: 25300 - DNA, 25 bp, Saccharomyces pastorianus
ggacctttggccaattcgtatatgt

SEQ ID NO: 25301 - DNA, 25 bp, Saccharomyces pastorianus
ggcagctttgcttctatcgttagac

SEQ ID NO: 25302 - DNA, 25 bp, Saccharomyces pastorianus
agacggttcaacagccattgtcgaa

SEQ ID NO: 25303 - DNA, 25 bp, Saccharomyces pastorianus
ttgaggaaaagacgctgcccaccac

SEQ ID NO: 25304 - DNA, 25 bp, Saccharomyces pastorianus
gttgctttggctacgcaagctattg

SEQ ID NO: 25305 - DNA, 25 bp, Saccharomyces pastorianus
ggtccgctcctgattattttgttgc

SEQ ID NO: 25306 - DNA, 25 bp, Saccharomyces pastorianus
acacatgtcgccattgcactagaag

SEQ ID NO: 25307 - DNA, 25 bp, Saccharomyces pastorianus
gtcgttttccacatcatacgcagat

SEQ ID NO: 25308 - DNA, 25 bp, Saccharomyces pastorianus
tggtgtctttttggctaaccacaaa

SEQ ID NO: 25309 - DNA, 25 bp, Saccharomyces pastorianus
aagatcagacacaagcacaagaaag

SEQ ID NO: 25310 - DNA, 25 bp, Saccharomyces pastorianus
agtccactttacacttggttttgag

SEQ ID NO: 25311 - DNA, 25 bp, Saccharomyces pastorianus
gagtccactttacacttggttttga

SEQ ID NO: 25312 - DNA, 25 bp, Saccharomyces pastorianus
agatcagacacaagcacaagaaagt

SEQ ID NO: 25313 - DNA, 25 bp, Saccharomyces pastorianus
ggagtccactttacacttggttttg

SEQ ID NO: 25314 - DNA, 25 bp, Saccharomyces pastorianus
ctttttggctaaccacaaagacaga

SEQ ID NO: 25315 - DNA, 25 bp, Saccharomyces pastorianus
agacacaagcacaagaaagtcaagt

SEQ ID NO: 25316 - DNA, 25 bp, Saccharomyces pastorianus
gtccactttacacttggttttgaga

SEQ ID NO: 25317 - DNA, 25 bp, Saccharomyces pastorianus
tctttttggctaaccacaaagacag

SEQ ID NO: 25318 - DNA, 25 bp, Saccharomyces pastorianus
gtgtctttttggctaaccacaaaga

SEQ ID NO: 25319 - DNA, 25 bp, Saccharomyces pastorianus
agagaatgtagcaacccaacctgtg

SEQ ID NO: 25320 - DNA, 25 bp, Saccharomyces pastorianus
tggtgtctttttggctaaccacaaa

SEQ ID NO: 25321 - DNA, 25 bp, Saccharomyces pastorianus
aagatcagacacaagcacaagaaag

SEQ ID NO: 25322 - DNA, 25 bp, Saccharomyces pastorianus
gagtccactttacacttggttttga

SEQ ID NO: 25323 - DNA, 25 bp, Saccharomyces pastorianus
ggagtccactttacacttggttttg

SEQ ID NO: 25324 - DNA, 25 bp, Saccharomyces pastorianus
ctttttggctaaccacaaagacaga

SEQ ID NO: 25325 - DNA, 25 bp, Saccharomyces pastorianus
agacacaagcacaagaaagtcaagt

SEQ ID NO: 25326 - DNA, 25 bp, Saccharomyces pastorianus
gtccactttacacttggttttgaga

SEQ ID NO: 25327 - DNA, 25 bp, Saccharomyces pastorianus
aagttggctgtcttgtcgtactaca

SEQ ID NO: 25328 - DNA, 25 bp, Saccharomyces pastorianus
cccaacctgtggtgctggtgtcttt

SEQ ID NO: 25329 - DNA, 25 bp, Saccharomyces pastorianus
gtgtctttttggctaaccacaaaga

SEQ ID NO: 25330 - DNA, 25 bp, Saccharomyces pastorianus
tatccgcagggacgcttttcaaagg

SEQ ID NO: 25331 - DNA, 25 bp, Saccharomyces pastorianus
ggcggtagaaccattttgcagcaaa

SEQ ID NO: 25332 - DNA, 25 bp, Saccharomyces pastorianus
gataaggtcttggttacagaacgtt

SEQ ID NO: 25333 - DNA, 25 bp, Saccharomyces pastorianus
aacacttttccagcaagaggcccag

SEQ ID NO: 25334 - DNA, 25 bp, Saccharomyces pastorianus
gaagattggtccgtgcaaagatttt

SEQ ID NO: 25335 - DNA, 25 bp, Saccharomyces pastorianus
gaagacgtcaaaatatccgcaggga

SEQ ID NO: 25336 - DNA, 25 bp, Saccharomyces pastorianus
gaggcccagattactgcatacggat

SEQ ID NO: 25337 - DNA, 25 bp, Saccharomyces pastorianus
cgcacccagatgactctgctaataa

SEQ ID NO: 25338 - DNA, 25 bp, Saccharomyces pastorianus
tacacacgtcatcgctgtggatgtt

SEQ ID NO: 25339 - DNA, 25 bp, Saccharomyces pastorianus
agctgcaacttgacgatgtgtaatt

SEQ ID NO: 25340 - DNA, 25 bp, Saccharomyces pastorianus
cttaaccatgagaagctgcaacttg

SEQ ID NO: 25341 - DNA, 25 bp, Saccharomyces pastorianus
atctgacacctacgattctagcaag

SEQ ID NO: 25342 - DNA, 25 bp, Saccharomyces pastorianus
gatgtcgacaacgaactgttgactt

SEQ ID NO: 25343 - DNA, 25 bp, Saccharomyces pastorianus
gaaatggtatactgcaatgtctgct

SEQ ID NO: 25344 - DNA, 25 bp, Saccharomyces pastorianus
ggacacttatttcggcaacgtttgc

SEQ ID NO: 25345 - DNA, 25 bp, Saccharomyces pastorianus
atgtgcaacatcatcgaatacagcg

SEQ ID NO: 25346 - DNA, 25 bp, Saccharomyces pastorianus
ggaagtcatccatcgatttgtggaa

SEQ ID NO: 25347 - DNA, 25 bp, Saccharomyces pastorianus
aggtgctgcaccatgtgactgtgat

SEQ ID NO: 25348 - DNA, 25 bp, Saccharomyces pastorianus
ggtatataagcgatacgccagtctt

SEQ ID NO: 25349 - DNA, 25 bp, Saccharomyces pastorianus
cttcattgtgggagtgacgccggat

SEQ ID NO: 25350 - DNA, 25 bp, Saccharomyces pastorianus
caatgtctgctagtgaaaaggccaa

SEQ ID NO: 25351 - DNA, 25 bp, Saccharomyces pastorianus
atacgccagtcttttcttcattgtg

SEQ ID NO: 25352 - DNA, 25 bp, Saccharomyces pastorianus
tcgctggtcatcctgggtagacaat

SEQ ID NO: 25353 - DNA, 25 bp, Saccharomyces pastorianus
tgaacgctgtaggtgcatgtggctt

SEQ ID NO: 25354 - DNA, 25 bp, Saccharomyces pastorianus
tggtgaaccattacactcgctggtc

SEQ ID NO: 25355 - DNA, 25 bp, Saccharomyces pastorianus
aatacttgctagaattcgccgatga

SEQ ID NO: 25356 - DNA, 25 bp, Saccharomyces pastorianus
ggcatatacttcagacactcctgtc

SEQ ID NO: 25357 - DNA, 25 bp, Saccharomyces pastorianus
tcaaagcttcaagtctggcaccata

SEQ ID NO: 25358 - DNA, 25 bp, Saccharomyces pastorianus
actcctgtcgttgccatcagtagat

SEQ ID NO: 25359 - DNA, 25 bp, Saccharomyces pastorianus
aaaaatcgggcttcacactttggtg

SEQ ID NO: 25360 - DNA, 25 bp, Saccharomyces pastorianus
acatgtccatttctcaatgctgcga

SEQ ID NO: 25361 - DNA, 25 bp, Saccharomyces pastorianus
tggcttgcagctatacacttttggc

SEQ ID NO: 25362 - DNA, 25 bp, Saccharomyces pastorianus
tgtatctatggttttcttcactgag

SEQ ID NO: 25363 - DNA, 25 bp, Saccharomyces pastorianus
gattccgctgttaacgctgtatgtt

SEQ ID NO: 25364 - DNA, 25 bp, Saccharomyces pastorianus
gctattgccgttgcaattgctcaaa

SEQ ID NO: 25365 - DNA, 25 bp, Saccharomyces pastorianus
caccaagggtgaagctattgccgtt

SEQ ID NO: 25366 - DNA, 25 bp, Saccharomyces pastorianus
ggaatacgttccattagacaaggct

SEQ ID NO: 25367 - DNA, 25 bp, Saccharomyces pastorianus
attaatgattcctggtttattgcgt

SEQ ID NO: 25368 - DNA, 25 bp, Saccharomyces pastorianus
accatggtgttgttgccagtgtcaa

SEQ ID NO: 25369 - DNA, 25 bp, Saccharomyces pastorianus
aaggctgaacaatcatcctctgtta

SEQ ID NO: 25370 - DNA, 25 bp, Saccharomyces pastorianus
gaaatcgttttgatcaccaccaagg

SEQ ID NO: 25371 - DNA, 25 bp, Saccharomyces pastorianus
agaagctaagcctttgatcaaggaa

SEQ ID NO: 25372 - DNA, 25 bp, Saccharomyces pastorianus
tgcaattgctcaaatgtcaaccgtt

SEQ ID NO: 25373 - DNA, 25 bp, Saccharomyces pastorianus
tcatcctctgttactccagaagcta

SEQ ID NO: 25374 - DNA, 25 bp, Saccharomyces pastorianus
gtaaagaccctgatcgacacgacca

SEQ ID NO: 25375 - DNA, 25 bp, Saccharomyces pastorianus
caatggtaaacctgttcctcgcgaa

SEQ ID NO: 25376 - DNA, 25 bp, Saccharomyces pastorianus
acaataacaactcaagcggcggatt

SEQ ID NO: 25377 - DNA, 25 bp, Saccharomyces pastorianus
agatgagttgaaggcgctccacatt

SEQ ID NO: 25378 - DNA, 25 bp, Saccharomyces pastorianus
acaggttttgagatttgcgaccccg

SEQ ID NO: 25379 - DNA, 25 bp, Saccharomyces pastorianus
gaactggacccgaaactgtacgaca

SEQ ID NO: 25380 - DNA, 25 bp, Saccharomyces pastorianus
cgctccacattgctcagttgaaact

SEQ ID NO: 25381 - DNA, 25 bp, Saccharomyces pastorianus
aaacgcggagttccaattcgatagg

SEQ ID NO: 25382 - DNA, 25 bp, Saccharomyces pastorianus
tgaaccgcttgaaactagacgattt

SEQ ID NO: 25383 - DNA, 25 bp, Saccharomyces pastorianus
ttgtcgtggcgcctgaattgaaccg

SEQ ID NO: 25384 - DNA, 25 bp, Saccharomyces pastorianus
atttcgattcccttatcacgagcaa

SEQ ID NO: 25385 - DNA, 25 bp, Saccharomyces pastorianus
tgatagaatacatgggtcctgcccc

SEQ ID NO: 25386 - DNA, 25 bp, Saccharomyces pastorianus
tactggccatcgagtacacgtctaa

SEQ ID NO: 25387 - DNA, 25 bp, Saccharomyces pastorianus
tggactcgtccaagttctccaagat

SEQ ID NO: 25388 - DNA, 25 bp, Saccharomyces pastorianus
aaatggtccgagttttgccacctgg

SEQ ID NO: 25389 - DNA, 25 bp, Saccharomyces pastorianus
ggaagacgtcatccacgacacaagt

SEQ ID NO: 25390 - DNA, 25 bp, Saccharomyces pastorianus
gttttcctcttgtttaagcagccca

SEQ ID NO: 25391 - DNA, 25 bp, Saccharomyces pastorianus
gtggccatgggcaatacgctgtcta

SEQ ID NO: 25392 - DNA, 25 bp, Saccharomyces pastorianus
gatgacgacttgttcactatggtaa

SEQ ID NO: 25393 - DNA, 25 bp, Saccharomyces pastorianus
tttgcatccgaattcaactccgcag

SEQ ID NO: 25394 - DNA, 25 bp, Saccharomyces pastorianus
gaagccccaatttcagttcactttc

SEQ ID NO: 25395 - DNA, 25 bp, Saccharomyces pastorianus
gtcagcatcgactctttcaagaagc

SEQ ID NO: 25396 - DNA, 25 bp, Saccharomyces pastorianus
agagcaatctgcacttgatcggcgc

SEQ ID NO: 25397 - DNA, 25 bp, Saccharomyces pastorianus
aaggacctggagttcaagctgctag

SEQ ID NO: 25398 - DNA, 25 bp, Saccharomyces pastorianus
gggcgcgtacgactacatcaagcag

SEQ ID NO: 25399 - DNA, 25 bp, Saccharomyces pastorianus
gccatctctggcaagggtatcgtga

SEQ ID NO: 25400 - DNA, 25 bp, Saccharomyces pastorianus
cagaggtcaattggccgtcggcgat

SEQ ID NO: 25401 - DNA, 25 bp, Saccharomyces pastorianus
aggagagctgtctgtttcgtacgcc

SEQ ID NO: 25402 - DNA, 25 bp, Saccharomyces pastorianus
gtacgccgctacaaacgatgtccaa

SEQ ID NO: 25403 - DNA, 25 bp, Saccharomyces pastorianus
tgagaagcaactacatcgggcccgg

SEQ ID NO: 25404 - DNA, 25 bp, Saccharomyces pastorianus
aaggtcgacaacatcgtctcgtggg

SEQ ID NO: 25405 - DNA, 25 bp, Saccharomyces pastorianus
ataagctggcgctgctgatgaccga

SEQ ID NO: 25406 - DNA, 25 bp, Saccharomyces pastorianus
accggtacgtgttcttgttgtgcaa

SEQ ID NO: 25407 - DNA, 25 bp, Saccharomyces pastorianus
gagtacaaggacgaccacggcagat

SEQ ID NO: 25408 - DNA, 25 bp, Saccharomyces pastorianus
tacgccatcggtattgccgagccat

SEQ ID NO: 25409 - DNA, 25 bp, Saccharomyces pastorianus
gagcccaattgaagtccgaggtcat

SEQ ID NO: 25410 - DNA, 25 bp, Saccharomyces pastorianus
gcttgccgccggtctgtgtaagaga

SEQ ID NO: 25411 - DNA, 25 bp, Saccharomyces pastorianus
ggaaatcatcgccatcatcaagaag

SEQ ID NO: 25412 - DNA, 25 bp, Saccharomyces pastorianus
tcttacggtcatttcaccaaccaag

SEQ ID NO: 25413 - DNA, 25 bp, Saccharomyces pastorianus
agagttcaagtccaattctcctacg

SEQ ID NO: 25414 - DNA, 25 bp, Saccharomyces pastorianus
gggtcccacaaagaatcgacaccgt

SEQ ID NO: 25415 - DNA, 25 bp, Saccharomyces pastorianus
gacatctccaccgaggacctaagag

SEQ ID NO: 25416 - DNA, 25 bp, Saccharomyces pastorianus
gccttttctggtaaggactactcca

SEQ ID NO: 25417 - DNA, 25 bp, Saccharomyces pastorianus
tagatgggtcgccaagtctctgctt

SEQ ID NO: 25418 - DNA, 25 bp, Saccharomyces pastorianus
aggcggaagaactggtttaagatct

SEQ ID NO: 25419 - DNA, 25 bp, Saccharomyces pastorianus
gagactttggatgagttatccggga

SEQ ID NO: 25420 - DNA, 25 bp, Saccharomyces pastorianus
taagagcgttttatcttcaaaaccg

SEQ ID NO: 25421 - DNA, 25 bp, Saccharomyces pastorianus
caacaaacatacagccggtgatgat

SEQ ID NO: 25422 - DNA, 25 bp, Saccharomyces pastorianus
aaatcatcttcgatttcctctgtct

SEQ ID NO: 25423 - DNA, 25 bp, Saccharomyces pastorianus
aacttggtgagttcgttgaaaggcg

SEQ ID NO: 25424 - DNA, 25 bp, Saccharomyces pastorianus
tttaagatcttgtagaaggacgcat

SEQ ID NO: 25425 - DNA, 25 bp, Saccharomyces pastorianus
attaccatatgaaaaaatccctgtg

SEQ ID NO: 25426 - DNA, 25 bp, Saccharomyces pastorianus
gtttttaaacaggattcattaccat

SEQ ID NO: 25427 - DNA, 25 bp, Saccharomyces pastorianus
cggtgatgattctggtgtcgctgaa

SEQ ID NO: 25428 - DNA, 25 bp, Saccharomyces pastorianus
cctctgtctcttctgctgaaaacaa

SEQ ID NO: 25429 - DNA, 25 bp, Saccharomyces pastorianus
tggtgttagctatggcctctctcga

SEQ ID NO: 25430 - DNA, 25 bp, Saccharomyces pastorianus
gttctgttgaattgtgacgaccacc

SEQ ID NO: 25431 - DNA, 25 bp, Saccharomyces pastorianus
tctacatccagacaagccgaggcat

SEQ ID NO: 25432 - DNA, 25 bp, Saccharomyces pastorianus
cccgtcattcgtgtccaagattaca

SEQ ID NO: 25433 - DNA, 25 bp, Saccharomyces pastorianus
gacgaccaccaaggcctgttgaaaa

SEQ ID NO: 25434 - DNA, 25 bp, Saccharomyces pastorianus
gaccatttaccttccaaatgccgta

SEQ ID NO: 25435 - DNA, 25 bp, Saccharomyces pastorianus
aaatatcttctaatgggcctggtgg

SEQ ID NO: 25436 - DNA, 25 bp, Saccharomyces pastorianus
aaagtcggtctgtccaactacccat

SEQ ID NO: 25437 - DNA, 25 bp, Saccharomyces pastorianus
aactacccattgtccgcttcagttg

SEQ ID NO: 25438 - DNA, 25 bp, Saccharomyces pastorianus
tcatcaaaaaccctattaccgacca

SEQ ID NO: 25439 - DNA, 25 bp, Saccharomyces pastorianus
ggcattctcgttgaagttaacccta

SEQ ID NO: 25440 - DNA, 25 bp, Saccharomyces pastorianus
agtttacatcgggtttggctcgatt

SEQ ID NO: 25441 - DNA, 25 bp, Saccharomyces pastorianus
ttgcgtgctggtttacccactataa

SEQ ID NO: 25442 - DNA, 25 bp, Saccharomyces pastorianus
atagtggatccaaccaaactgccct

SEQ ID NO: 25443 - DNA, 25 bp, Saccharomyces pastorianus
acaggttgacgctgcagttcatcat

SEQ ID NO: 25444 - DNA, 25 bp, Saccharomyces pastorianus
tgattggttattcccacaggttgac

SEQ ID NO: 25445 - DNA, 25 bp, Saccharomyces pastorianus
gcagttcatcatggtggctcgggca

SEQ ID NO: 25446 - DNA, 25 bp, Saccharomyces pastorianus
aagctcttgtcgacgcagttgtaga

SEQ ID NO: 25447 - DNA, 25 bp, Saccharomyces pastorianus
gaggctctaaaggttgttacgacta

SEQ ID NO: 25448 - DNA, 25 bp, Saccharomyces pastorianus
atgcgagaagcgttaccttatcaaa

SEQ ID NO: 25449 - DNA, 25 bp, Saccharomyces pastorianus
gaggccgatgtttactgtattctaa

SEQ ID NO: 25450 - DNA, 25 bp, Saccharomyces pastorianus
ggctcgattgttgtatctaatgcca

SEQ ID NO: 25451 - DNA, 25 bp, Saccharomyces pastorianus
aggtggataccgttatgttcgaaga

SEQ ID NO: 25452 - DNA, 25 bp, Saccharomyces pastorianus
aatgcacattccatcgatgatcaat

SEQ ID NO: 25453 - DNA, 25 bp, Saccharomyces pastorianus
acaaggatcccgtgtccaaagacaa

SEQ ID NO: 25454 - DNA, 25 bp, Saccharomyces pastorianus
gtcgtcgggaatctcatccgaggaa

SEQ ID NO: 25455 - DNA, 25 bp, Saccharomyces pastorianus
attgactgagtctcccacagtagtg

SEQ ID NO: 25456 - DNA, 25 bp, Saccharomyces pastorianus
tatgaaagaccccagcgtacaagca

SEQ ID NO: 25457 - DNA, 25 bp, Saccharomyces pastorianus
accttcatcaacaacctctatgcag

SEQ ID NO: 25458 - DNA, 25 bp, Saccharomyces pastorianus
agaattaacgtctgcaccttcatca

SEQ ID NO: 25459 - DNA, 25 bp, Saccharomyces pastorianus
agaacaaccagactcgtcgtcggga

SEQ ID NO: 25460 - DNA, 25 bp, Saccharomyces pastorianus
aaagctagttcattccatgacgacg

SEQ ID NO: 25461 - DNA, 25 bp, Saccharomyces pastorianus
gatcaatacggacgaggcaaccagt

SEQ ID NO: 25462 - DNA, 25 bp, Saccharomyces pastorianus
gaagaccagcttttaccagggatac

SEQ ID NO: 25463 - DNA, 25 bp, Saccharomyces pastorianus
agaaaggccttatctaccgctattg

SEQ ID NO: 25464 - DNA, 25 bp, Saccharomyces pastorianus
gtaccgctactggtggtgcaggtaa

SEQ ID NO: 25465 - DNA, 25 bp, Saccharomyces pastorianus
gaatcctccgtcgataaagtcctat

SEQ ID NO: 25466 - DNA, 25 bp, Saccharomyces pastorianus
agatttcgatatgggtgccaccgat

SEQ ID NO: 25467 - DNA, 25 bp, Saccharomyces pastorianus
gaataacgctgctgacttgtttgct

SEQ ID NO: 25468 - DNA, 25 bp, Saccharomyces pastorianus
gcatccactgtttaccgctgaaaca

SEQ ID NO: 25469 - DNA, 25 bp, Saccharomyces pastorianus
agagagacaagctcgtttggcccgt

SEQ ID NO: 25470 - DNA, 25 bp, Saccharomyces pastorianus
tacacctattgaaacgcatccactg

SEQ ID NO: 25471 - DNA, 25 bp, Saccharomyces pastorianus
taggcgtcgctgaagaacacccaag

SEQ ID NO: 25472 - DNA, 25 bp, Saccharomyces pastorianus
acttgtttgctggtttaggcgtcgc

SEQ ID NO: 25473 - DNA, 25 bp, Saccharomyces pastorianus
agaagtcgggcaagctaccaacctg

SEQ ID NO: 25474 - DNA, 25 bp, Saccharomyces pastorianus
aatttgcgcacgacgaggctgctaa

SEQ ID NO: 25475 - DNA, 25 bp, Saccharomyces pastorianus
gaggtttccgtagtggatcccgcta

SEQ ID NO: 25476 - DNA, 25 bp, Saccharomyces pastorianus
cgctaactccaccatgaagacgtat

SEQ ID NO: 25477 - DNA, 25 bp, Saccharomyces pastorianus
accagttcgacagtgctacaagcag

SEQ ID NO: 25478 - DNA, 25 bp, Saccharomyces pastorianus
gaagtacgcacatattccctactga

SEQ ID NO: 25479 - DNA, 25 bp, Saccharomyces pastorianus
ggccaagcccttcttgagaggcata

SEQ ID NO: 25480 - DNA, 25 bp, Saccharomyces pastorianus
aagagtacacgacctaccagttcga

SEQ ID NO: 25481 - DNA, 25 bp, Saccharomyces pastorianus
tggtcgcgcaccaaattcgatgaaa

SEQ ID NO: 25482 - DNA, 25 bp, Saccharomyces pastorianus
gacgtatacccgaaacctggaccat

SEQ ID NO: 25483 - DNA, 25 bp, Saccharomyces pastorianus
gggcatggcttttgtcatccagaga

SEQ ID NO: 25484 - DNA, 25 bp, Saccharomyces pastorianus
aagcatcgttgcctttggagaaaca

SEQ ID NO: 25485 - DNA, 25 bp, Saccharomyces pastorianus
gatttcttttcgttctactcattgc

SEQ ID NO: 25486 - DNA, 25 bp, Saccharomyces pastorianus
tatgctactgatgcggatttccaat

SEQ ID NO: 25487 - DNA, 25 bp, Saccharomyces pastorianus
atgatttgaaattcgggcctggtga

SEQ ID NO: 25488 - DNA, 25 bp, Saccharomyces pastorianus
agacaggttcgatccaaaagctacg

SEQ ID NO: 25489 - DNA, 25 bp, Saccharomyces pastorianus
atgacgcatgcatcttggccaagaa

SEQ ID NO: 25490 - DNA, 25 bp, Saccharomyces pastorianus
ttcgtacgtggttgagcagccggat

SEQ ID NO: 25491 - DNA, 25 bp, Saccharomyces pastorianus
tgacttcgcaagataatccactttt

SEQ ID NO: 25492 - DNA, 25 bp, Saccharomyces pastorianus
gaaacaagtggtcttttcgtacgtg

SEQ ID NO: 25493 - DNA, 25 bp, Saccharomyces pastorianus
gagcaagtctttgacctgttcaaca

SEQ ID NO: 25494 - DNA, 25 bp, Saccharomyces pastorianus
atcgagattcgacttgatccaaatt

SEQ ID NO: 25495 - DNA, 25 bp, Saccharomyces pastorianus
gccggtatctccactatatgttcaa

SEQ ID NO: 25496 - DNA, 25 bp, Saccharomyces pastorianus
ggtaacgtatactcctttgatatca

SEQ ID NO: 25497 - DNA, 25 bp, Saccharomyces pastorianus
gtcttgagttcatcatttgcgccag

SEQ ID NO: 25498 - DNA, 25 bp, Saccharomyces pastorianus
atggaagttccccttggatgaaact

SEQ ID NO: 25499 - DNA, 25 bp, Saccharomyces pastorianus
gcagcatggttatcggtggtgtcaa

SEQ ID NO: 25500 - DNA, 25 bp, Saccharomyces pastorianus
gacactgttatgaccattgacgatc

SEQ ID NO: 25501 - DNA, 25 bp, Saccharomyces pastorianus
gatccgtacgtaaaagcttcaatag

SEQ ID NO: 25502 - DNA, 25 bp, Saccharomyces pastorianus
gagtaaacactggtccgtcatgtca

SEQ ID NO: 25503 - DNA, 25 bp, Saccharomyces pastorianus
gggacgttttcaccaacagatccgt

SEQ ID NO: 25504 - DNA, 25 bp, Saccharomyces pastorianus
ttgtcccgtgactttgatgtcggta

SEQ ID NO: 25505 - DNA, 25 bp, Saccharomyces pastorianus
gtccaagtatggttttgtcccgtga

SEQ ID NO: 25506 - DNA, 25 bp, Saccharomyces pastorianus
ttcggttccgtacttaagaagcaag

SEQ ID NO: 25507 - DNA, 25 bp, Saccharomyces pastorianus
aaacaagctgcttcaacagttcaaa

SEQ ID NO: 25508 - DNA, 25 bp, Saccharomyces pastorianus
gacaactattccgatgaaccatcta

SEQ ID NO: 25509 - DNA, 25 bp, Saccharomyces pastorianus
gaacgaattagccatccaagaagct

SEQ ID NO: 25510 - DNA, 25 bp, Saccharomyces pastorianus
tatggcttccagaattgacaactat

SEQ ID NO: 25511 - DNA, 25 bp, Saccharomyces pastorianus
aaaataagggtcgtatctctagata

SEQ ID NO: 25512 - DNA, 25 bp, Saccharomyces pastorianus
aatttctcacgctggttctctaacc

SEQ ID NO: 25513 - DNA, 25 bp, Saccharomyces pastorianus
actgtcgctccaaacttatctgaat

SEQ ID NO: 25514 - DNA, 25 bp, Saccharomyces pastorianus
gatgaaccatctaacgttttcggtt

SEQ ID NO: 25515 - DNA, 25 bp, Saccharomyces pastorianus
gaaaagatgcacactgtcgctccaa

SEQ ID NO: 25516 - DNA, 25 bp, Saccharomyces pastorianus
ttctaaggcctctgctaaaaataag

SEQ ID NO: 25517 - DNA, 25 bp, Saccharomyces pastorianus
atgggctcgttgattgatgtctgta

SEQ ID NO: 25518 - DNA, 25 bp, Saccharomyces pastorianus
caatggttcggacttgatcattcaa

SEQ ID NO: 25519 - DNA, 25 bp, Saccharomyces pastorianus
gaagacgaatgtacactccaaccac

SEQ ID NO: 25520 - DNA, 25 bp, Saccharomyces pastorianus
actctacaatttctcttttcccatt

SEQ ID NO: 25521 - DNA, 25 bp, Saccharomyces pastorianus
gttcaaatgtcttgtcgtgcctagc

SEQ ID NO: 25522 - DNA, 25 bp, Saccharomyces pastorianus
gtgcctagcgaaggtcctaacggtt

SEQ ID NO: 25523 - DNA, 25 bp, Saccharomyces pastorianus
aattctcattgtccgatatgggctc

SEQ ID NO: 25524 - DNA, 25 bp, Saccharomyces pastorianus
tcacacaattgataaccggccctaa

SEQ ID NO: 25525 - DNA, 25 bp, Saccharomyces pastorianus
ctaaaacctcccctgacataataat

SEQ ID NO: 25526 - DNA, 25 bp, Saccharomyces pastorianus
tcaatctacagatacccactcatgg

SEQ ID NO: 25527 - DNA, 25 bp, Saccharomyces pastorianus
gatttataggaagtgccctcacaca

SEQ ID NO: 25528 - DNA, 25 bp, Saccharomyces pastorianus
caattgaaagaagacacacccgtgt

SEQ ID NO: 25529 - DNA, 25 bp, Saccharomyces pastorianus
gtcagagctgggtacgaaatatcaa

SEQ ID NO: 25530 - DNA, 25 bp, Saccharomyces pastorianus
gggtacgaaatatcaacatttgcag

SEQ ID NO: 25531 - DNA, 25 bp, Saccharomyces pastorianus
tgtataagctaaccggcaacgttct

SEQ ID NO: 25532 - DNA, 25 bp, Saccharomyces pastorianus
acgtggcaatgtggagaagagacta

SEQ ID NO: 25533 - DNA, 25 bp, Saccharomyces pastorianus
aacaaagtgaagcacgtggcaatgt

SEQ ID NO: 25534 - DNA, 25 bp, Saccharomyces pastorianus
gacacacccgtgtataagctaaccg

SEQ ID NO: 25535 - DNA, 25 bp, Saccharomyces pastorianus
gaacaggtaagaaacgaactggtca

SEQ ID NO: 25536 - DNA, 25 bp, Saccharomyces pastorianus
atcaacatttgcagagtgaattaga

SEQ ID NO: 25537 - DNA, 25 bp, Saccharomyces pastorianus
tttaccggtggaacaaagtgaagca

SEQ ID NO: 25538 - DNA, 25 bp, Saccharomyces pastorianus
aagagactagaattcattgaaacag

SEQ ID NO: 25539 - DNA, 25 bp, Saccharomyces pastorianus
gatctgtactggctactacgaggaa

SEQ ID NO: 25540 - DNA, 25 bp, Saccharomyces pastorianus
ggaatatgtcaaatccgccacaccg

SEQ ID NO: 25541 - DNA, 25 bp, Saccharomyces pastorianus
ggatatcctgatggacccagtcaag

SEQ ID NO: 25542 - DNA, 25 bp, Saccharomyces pastorianus
gaattttcattctgggtgcccgtgc

SEQ ID NO: 25543 - DNA, 25 bp, Saccharomyces pastorianus
tgaagttcattcaccacaccgattt

SEQ ID NO: 25544 - DNA, 25 bp, Saccharomyces pastorianus
ggaactgaacgacatggaccctcaa

SEQ ID NO: 25545 - DNA, 25 bp, Saccharomyces pastorianus
aacatgtacattgccggtttcagag

SEQ ID NO: 25546 - DNA, 25 bp, Saccharomyces pastorianus
gatttcttccaagttttccacgaag

SEQ ID NO: 25547 - DNA, 25 bp, Saccharomyces pastorianus
taagtgcgccatctttactaccggt

SEQ ID NO: 25548 - DNA, 25 bp, Saccharomyces pastorianus
tccagtttctcttcccagaacaaaa

SEQ ID NO: 25549 - DNA, 25 bp, Saccharomyces pastorianus
gaaatccacttcatcgggcctgaat

SEQ ID NO: 25550 - DNA, 25 bp, Saccharomyces pastorianus
ggatattcctcctaagcattctaat

SEQ ID NO: 25551 - DNA, 25 bp, Saccharomyces pastorianus
ggcttccaaattatgtgtgctcaaa

SEQ ID NO: 25552 - DNA, 25 bp, Saccharomyces pastorianus
aagtagaagacctcatcaccatggg

SEQ ID NO: 25553 - DNA, 25 bp, Saccharomyces pastorianus
aaatgggaacccacagcagcagcag

SEQ ID NO: 25554 - DNA, 25 bp, Saccharomyces pastorianus
gaaccgtcgtacaaaatggcgccac

SEQ ID NO: 25555 - DNA, 25 bp, Saccharomyces pastorianus
gctaagcgctattacgatcaggtgt

SEQ ID NO: 25556 - DNA, 25 bp, Saccharomyces pastorianus
agggatttccatctggctaagcgct

SEQ ID NO: 25557 - DNA, 25 bp, Saccharomyces pastorianus
cagcctccaaagacttcgtggtaca

SEQ ID NO: 25558 - DNA, 25 bp, Saccharomyces pastorianus
aaagtgaactactgggcacccacta

SEQ ID NO: 25559 - DNA, 25 bp, Saccharomyces pastorianus
gaacctgggctatatgcacgagcac

SEQ ID NO: 25560 - DNA, 25 bp, Saccharomyces pastorianus
gaaacttctgagatcctgggattcc

SEQ ID NO: 25561 - DNA, 25 bp, Saccharomyces pastorianus
gatgctcacgcgatcggtgtcaact

SEQ ID NO: 25562 - DNA, 25 bp, Saccharomyces pastorianus
tagtagtcgcttcttccgatggtaa

SEQ ID NO: 25563 - DNA, 25 bp, Saccharomyces pastorianus
atggtggtgccaaggaatcccgcaa

SEQ ID NO: 25564 - DNA, 25 bp, Saccharomyces pastorianus
gcttccgtcaattccgttcaatggg

SEQ ID NO: 25565 - DNA, 25 bp, Saccharomyces pastorianus
aagaccgcacctgtatcatctggac

SEQ ID NO: 25566 - DNA, 25 bp, Saccharomyces pastorianus
cagttggtctttgtccggtaacata

SEQ ID NO: 25567 - DNA, 25 bp, Saccharomyces pastorianus
cggtaacatactagccctttctggg

SEQ ID NO: 25568 - DNA, 25 bp, Saccharomyces pastorianus
aggaatcccgcaagtttgtgactgg

SEQ ID NO: 25569 - DNA, 25 bp, Saccharomyces pastorianus
tgggccccagctacagtcgaagaag

SEQ ID NO: 25570 - DNA, 25 bp, Saccharomyces pastorianus
gttcatacttggctagtgtctcaca

SEQ ID NO: 25571 - DNA, 25 bp, Saccharomyces pastorianus
gagagacgtggcttggtcgccaacc

SEQ ID NO: 25572 - DNA, 25 bp, Saccharomyces pastorianus
aaagatccaaagaccgctacacgaa

SEQ ID NO: 25573 - DNA, 25 bp, Saccharomyces pastorianus
gacctcgtttcttggctttaagcga

SEQ ID NO: 25574 - DNA, 25 bp, Saccharomyces pastorianus
gtctctggtcctacatttgaaacaa

SEQ ID NO: 25575 - DNA, 25 bp, Saccharomyces pastorianus
ctgctcgagactacgtttccaataa

SEQ ID NO: 25576 - DNA, 25 bp, Saccharomyces pastorianus
gggccacgtccataacttaattgtc

SEQ ID NO: 25577 - DNA, 25 bp, Saccharomyces pastorianus
ggatgaatctcctgtgcctttagaa

SEQ ID NO: 25578 - DNA, 25 bp, Saccharomyces pastorianus
gatagtcctgccagtgcattggatg

SEQ ID NO: 25579 - DNA, 25 bp, Saccharomyces pastorianus
aacacttgtgtcgtggatagtcctg

SEQ ID NO: 25580 - DNA, 25 bp, Saccharomyces pastorianus
actgttcccgaggtcatagtggcaa

SEQ ID NO: 25581 - DNA, 25 bp, Saccharomyces pastorianus
aggtacttataccttcgtctctggt

SEQ ID NO: 25582 - DNA, 25 bp, Saccharomyces pastorianus
gaatattcctggcttggctgggcaa

SEQ ID NO: 25583 - DNA, 25 bp, Saccharomyces pastorianus
agtccgttctgagattgcgctgtca

SEQ ID NO: 25584 - DNA, 25 bp, Saccharomyces pastorianus
gtcgttcaaggaatacacccttctt

SEQ ID NO: 25585 - DNA, 25 bp, Saccharomyces pastorianus
atttcgtagaatgcttgcgcttgcc

SEQ ID NO: 25586 - DNA, 25 bp, Saccharomyces pastorianus
gagggtccttatggtgtaacgatac

SEQ ID NO: 25587 - DNA, 25 bp, Saccharomyces pastorianus
gatgatttcaggcacgcagtcgttc

SEQ ID NO: 25588 - DNA, 25 bp, Saccharomyces pastorianus
aatcacggtcaaatgccttaacaaa

SEQ ID NO: 25589 - DNA, 25 bp, Saccharomyces pastorianus
gtatctgtcatattcaccggttcca

SEQ ID NO: 25590 - DNA, 25 bp, Saccharomyces pastorianus
ggctgcagtttatccacatttcgta

SEQ ID NO: 25591 - DNA, 25 bp, Saccharomyces pastorianus
tgcgcttgccaactactgatcaatt

SEQ ID NO: 25592 - DNA, 25 bp, Saccharomyces pastorianus
catcaccttttattcgtgtggacca

SEQ ID NO: 25593 - DNA, 25 bp, Saccharomyces pastorianus
gtgtggaccatcgacgttcaatgat

SEQ ID NO: 25594 - DNA, 25 bp, Saccharomyces pastorianus
gaaaacgctaccgatccgacaacag

SEQ ID NO: 25595 - DNA, 25 bp, Saccharomyces pastorianus
gacaacaagttcaaccaccgatggt

SEQ ID NO: 25596 - DNA, 25 bp, Saccharomyces pastorianus
tcatcaacaacaaaccgagtccgct

SEQ ID NO: 25597 - DNA, 25 bp, Saccharomyces pastorianus
gaacgaaatgtccatcgctgaacca

SEQ ID NO: 25598 - DNA, 25 bp, Saccharomyces pastorianus
gttgtctcccaaccaacaatagtca

SEQ ID NO: 25599 - DNA, 25 bp, Saccharomyces pastorianus
gaagaaagcttccaggctgcctcac

SEQ ID NO: 25600 - DNA, 25 bp, Saccharomyces pastorianus
tagcgtctgccaccacgagaacaaa

SEQ ID NO: 25601 - DNA, 25 bp, Saccharomyces pastorianus
ggtaaggtgctccagttttcacaag

SEQ ID NO: 25602 - DNA, 25 bp, Saccharomyces pastorianus
taagacggtacaagctcaagcccct

SEQ ID NO: 25603 - DNA, 25 bp, Saccharomyces pastorianus
gctctttcgtcctcaaatgggctaa

SEQ ID NO: 25604 - DNA, 25 bp, Saccharomyces pastorianus
gccgccggatcctattcaaataacg

SEQ ID NO: 25605 - DNA, 25 bp, Saccharomyces pastorianus
atctcgggtgctatttctatgggtc

SEQ ID NO: 25606 - DNA, 25 bp, Saccharomyces pastorianus
ggtggacttcattatcagatacgga

SEQ ID NO: 25607 - DNA, 25 bp, Saccharomyces pastorianus
atcactggtgggtttgccgagttga

SEQ ID NO: 25608 - DNA, 25 bp, Saccharomyces pastorianus
acgttattctgctttggttatctga

SEQ ID NO: 25609 - DNA, 25 bp, Saccharomyces pastorianus
ttgccctgactgctggtttatcttc

SEQ ID NO: 25610 - DNA, 25 bp, Saccharomyces pastorianus
gtaccactactaccatatttctttg

SEQ ID NO: 25611 - DNA, 25 bp, Saccharomyces pastorianus
ggtagtagtagttcgacatccaaga

SEQ ID NO: 25612 - DNA, 25 bp, Saccharomyces pastorianus
gagaacttatcagtgccgtcacgat

SEQ ID NO: 25613 - DNA, 25 bp, Saccharomyces pastorianus
gaaatcgaagacatcctactggaaa

SEQ ID NO: 25614 - DNA, 25 bp, Saccharomyces pastorianus
gtttatcttcccttggtgatgcaaa

SEQ ID NO: 25615 - DNA, 25 bp, Saccharomyces pastorianus
gtaggcacgggtctgatttactcaa

SEQ ID NO: 25616 - DNA, 25 bp, Saccharomyces pastorianus
gccgatggtattttccaattctgga

SEQ ID NO: 25617 - DNA, 25 bp, Saccharomyces pastorianus
gggcacaacaacagattatgggctt

SEQ ID NO: 25618 - DNA, 25 bp, Saccharomyces pastorianus
gaatacgaatgctaggacccatgct

SEQ ID NO: 25619 - DNA, 25 bp, Saccharomyces pastorianus
tctaaagactttggatgggcacaac

SEQ ID NO: 25620 - DNA, 25 bp, Saccharomyces pastorianus
gttgatgccatagttccatacacac

SEQ ID NO: 25621 - DNA, 25 bp, Saccharomyces pastorianus
ggacaaatgcatttctgttggcaat

SEQ ID NO: 25622 - DNA, 25 bp, Saccharomyces pastorianus
atatgatcgtgagtgccgacgccga

SEQ ID NO: 25623 - DNA, 25 bp, Saccharomyces pastorianus
atttctactttaagcgacgagcagt

SEQ ID NO: 25624 - DNA, 25 bp, Saccharomyces pastorianus
gagttagaccatgcaatttctactt

SEQ ID NO: 25625 - DNA, 25 bp, Saccharomyces pastorianus
gttggcaatgtctttggatcaccca

SEQ ID NO: 25626 - DNA, 25 bp, Saccharomyces pastorianus
ggatcacccaatgaggctgttcaac

SEQ ID NO: 25627 - DNA, 25 bp, Saccharomyces pastorianus
gaaaaacgcgcatgttgccagatac

SEQ ID NO: 25628 - DNA, 25 bp, Saccharomyces pastorianus
taacgagtgctctttgtcatatgag

SEQ ID NO: 25629 - DNA, 25 bp, Saccharomyces pastorianus
gggtttagcgtgtttacaatctgac

SEQ ID NO: 25630 - DNA, 25 bp, Saccharomyces pastorianus
aacgagctgatcacatcggagggaa

SEQ ID NO: 25631 - DNA, 25 bp, Saccharomyces pastorianus
gaacctttgtatacaagcatccgga

SEQ ID NO: 25632 - DNA, 25 bp, Saccharomyces pastorianus
gagggtacgggtacaacgcatcttc

SEQ ID NO: 25633 - DNA, 25 bp, Saccharomyces pastorianus
gggcatctgcctagactatacaacg

SEQ ID NO: 25634 - DNA, 25 bp, Saccharomyces pastorianus
atcgtggctagtgcaggttacatca

SEQ ID NO: 25635 - DNA, 25 bp, Saccharomyces pastorianus
acgcatcttcccctggagttgagaa

SEQ ID NO: 25636 - DNA, 25 bp, Saccharomyces pastorianus
aaaccgtggttgctctttagaattg

SEQ ID NO: 25637 - DNA, 25 bp, Saccharomyces pastorianus
aagccggcgcaatttctcttataag

SEQ ID NO: 25638 - DNA, 25 bp, Saccharomyces pastorianus
gctaatacctaacaaggcggccagt

SEQ ID NO: 25639 - DNA, 25 bp, Saccharomyces pastorianus
ggatttggctaaacgaggctcttct

SEQ ID NO: 25640 - DNA, 25 bp, Saccharomyces pastorianus
aggctcttctgcgacttctaaaagg

SEQ ID NO: 25641 - DNA, 25 bp, Saccharomyces pastorianus
gtgaactacccgctatcatcaaatc

SEQ ID NO: 25642 - DNA, 25 bp, Saccharomyces pastorianus
acgatcatgctgtaaagttcccaac

SEQ ID NO: 25643 - DNA, 25 bp, Saccharomyces pastorianus
aacggtcagccggtacatctaaatt

SEQ ID NO: 25644 - DNA, 25 bp, Saccharomyces pastorianus
ttccctcgcgggtttgaagaagcaa

SEQ ID NO: 25645 - DNA, 25 bp, Saccharomyces pastorianus
aagttcccaaccacacaagaggatg

SEQ ID NO: 25646 - DNA, 25 bp, Saccharomyces pastorianus
cctttcatctaccagttctgtcaaa

SEQ ID NO: 25647 - DNA, 25 bp, Saccharomyces pastorianus
gttggaaataccctacatccgtcac

SEQ ID NO: 25648 - DNA, 25 bp, Saccharomyces pastorianus
aactatatgggctgtgagcgacaag

SEQ ID NO: 25649 - DNA, 25 bp, Saccharomyces pastorianus
gaaacttcatggtgcaagctgtcac

SEQ ID NO: 25650 - DNA, 25 bp, Saccharomyces pastorianus
ccagcctgtttctttgttatgcgac

SEQ ID NO: 25651 - DNA, 25 bp, Saccharomyces pastorianus
tatctctcatatattgcggtctgga

SEQ ID NO: 25652 - DNA, 25 bp, Saccharomyces pastorianus
cacattcattgcgttatctctcata

SEQ ID NO: 25653 - DNA, 25 bp, Saccharomyces pastorianus
cttcgccaacatctttacggactat

SEQ ID NO: 25654 - DNA, 25 bp, Saccharomyces pastorianus
agagatcacaacctgccggatactt

SEQ ID NO: 25655 - DNA, 25 bp, Saccharomyces pastorianus
aagtgacgtctgctaacttcgccaa

SEQ ID NO: 25656 - DNA, 25 bp, Saccharomyces pastorianus
gctttgaaactttcggatcccttca

SEQ ID NO: 25657 - DNA, 25 bp, Saccharomyces pastorianus
gttatgcgacggttacacattcatt

SEQ ID NO: 25658 - DNA, 25 bp, Saccharomyces pastorianus
aattgatcagatccggcgaagtaaa

SEQ ID NO: 25659 - DNA, 25 bp, Saccharomyces pastorianus
gattccctattgaagtgacgtctgc

SEQ ID NO: 25660 - DNA, 25 bp, Saccharomyces pastorianus
gtacccttccactgatgtctttttg

SEQ ID NO: 25661 - DNA, 25 bp, Saccharomyces pastorianus
tctaaaatgtgttgtcgtcggtgat

SEQ ID NO: 25662 - DNA, 25 bp, Saccharomyces pastorianus
ggtgccgttggtaaaacatgtctat

SEQ ID NO: 25663 - DNA, 25 bp, Saccharomyces pastorianus
aggtttgttcgatactgccggtcag

SEQ ID NO: 25664 - DNA, 25 bp, Saccharomyces pastorianus
ccatgcctagtcgttggtacgcaaa

SEQ ID NO: 25665 - DNA, 25 bp, Saccharomyces pastorianus
gattgagacctttgtcgtacccttc

SEQ ID NO: 25666 - DNA, 25 bp, Saccharomyces pastorianus
atgaggctatcgtggctgcgttaga

SEQ ID NO: 25667 - DNA, 25 bp, Saccharomyces pastorianus
attgtcctggtgtgccatgcctagt

SEQ ID NO: 25668 - DNA, 25 bp, Saccharomyces pastorianus
gatcggtgatgagccgtacacgcta

SEQ ID NO: 25669 - DNA, 25 bp, Saccharomyces pastorianus
actgccggtcaggaggattacgatc

SEQ ID NO: 25670 - DNA, 25 bp, Saccharomyces pastorianus
agccgtacacgctaggtttgttcga

SEQ ID NO: 25671 - DNA, 25 bp, Saccharomyces pastorianus
gactttgcttgttggtgttcgtata

SEQ ID NO: 25672 - DNA, 25 bp, Saccharomyces pastorianus
atacttaaattctggacccggcgct

SEQ ID NO: 25673 - DNA, 25 bp, Saccharomyces pastorianus
aatgtgatcaggttggcacccgcac

SEQ ID NO: 25674 - DNA, 25 bp, Saccharomyces pastorianus
gagggcatcatgtctaaggtattcc

SEQ ID NO: 25675 - DNA, 25 bp, Saccharomyces pastorianus
gcacccgcacctttgtataatacat

SEQ ID NO: 25676 - DNA, 25 bp, Saccharomyces pastorianus
ttacattactaactccaacggccaa

SEQ ID NO: 25677 - DNA, 25 bp, Saccharomyces pastorianus
gttcattcgaagcacactacacctg

SEQ ID NO: 25678 - DNA, 25 bp, Saccharomyces pastorianus
agcgtcattgatacggtcgcattga

SEQ ID NO: 25679 - DNA, 25 bp, Saccharomyces pastorianus
catggtgcccaattatctctttact

SEQ ID NO: 25680 - DNA, 25 bp, Saccharomyces pastorianus
ggtattccagtatttgcacgatcat

SEQ ID NO: 25681 - DNA, 25 bp, Saccharomyces pastorianus
gatttagacaatccaacccgagcgt

SEQ ID NO: 25682 - DNA, 25 bp, Saccharomyces pastorianus
ggacgccaacggcatcggcacagat

SEQ ID NO: 25683 - DNA, 25 bp, Saccharomyces pastorianus
cgcctccagggcagaagtcgtatct

SEQ ID NO: 25684 - DNA, 25 bp, Saccharomyces pastorianus
catgggcacgctgggaaaccaccaa

SEQ ID NO: 25685 - DNA, 25 bp, Saccharomyces pastorianus
aaaaatctgcgatgggcacgcctcc

SEQ ID NO: 25686 - DNA, 25 bp, Saccharomyces pastorianus
cttccagcgccgtgagatggagcaa

SEQ ID NO: 25687 - DNA, 25 bp, Saccharomyces pastorianus
acccaagcccatgaccgaaagtgag

SEQ ID NO: 25688 - DNA, 25 bp, Saccharomyces pastorianus
gagaggaacttcctcgacgtctacc

SEQ ID NO: 25689 - DNA, 25 bp, Saccharomyces pastorianus
tggctgtaagaataccctgctgcaa

SEQ ID NO: 25690 - DNA, 25 bp, Saccharomyces pastorianus
tacgtaactacgtccgcagcgagaa

SEQ ID NO: 25691 - DNA, 25 bp, Saccharomyces pastorianus
atgtcgcaagacacttcctggcatg

SEQ ID NO: 25692 - DNA, 25 bp, Saccharomyces pastorianus
aagtgagctcatcatcctcatggac

SEQ ID NO: 25693 - DNA, 25 bp, Saccharomyces pastorianus
agcaactgaaatctcgttttccaaa

SEQ ID NO: 25694 - DNA, 25 bp, Saccharomyces pastorianus
aaaagtgttccaggcgtgaatccca

SEQ ID NO: 25695 - DNA, 25 bp, Saccharomyces pastorianus
acaattctaagctacagtccatgga

SEQ ID NO: 25696 - DNA, 25 bp, Saccharomyces pastorianus
tgttctccaagaaatcattcgaagt

SEQ ID NO: 25697 - DNA, 25 bp, Saccharomyces pastorianus
aagtgatcacttgacgttattgaca

SEQ ID NO: 25698 - DNA, 25 bp, Saccharomyces pastorianus
gaacaatttccattgggatcatagc

SEQ ID NO: 25699 - DNA, 25 bp, Saccharomyces pastorianus
ggtacaagcagcacgttatccaacg

SEQ ID NO: 25700 - DNA, 25 bp, Saccharomyces pastorianus
aggcgtgaatcccaacgatgttggt

SEQ ID NO: 25701 - DNA, 25 bp, Saccharomyces pastorianus
tagttatacaactcacctggaatac

SEQ ID NO: 25702 - DNA, 25 bp, Saccharomyces pastorianus
gaccaggttagaagtcgaacgatat

SEQ ID NO: 25703 - DNA, 25 bp, Saccharomyces pastorianus
caagaacccttaactgcatccaaga

SEQ ID NO: 25704 - DNA, 25 bp, Saccharomyces pastorianus
ttactcggcgcttcatactaaaaaa

SEQ ID NO: 25705 - DNA, 25 bp, Saccharomyces pastorianus
gggactcgaccataatgcgtaacac

SEQ ID NO: 25706 - DNA, 25 bp, Saccharomyces pastorianus
tacagtacctttacttcgcaagtta

SEQ ID NO: 25707 - DNA, 25 bp, Saccharomyces pastorianus
tggccttatgataccctcatttcaa

SEQ ID NO: 25708 - DNA, 25 bp, Saccharomyces pastorianus
taactgtttcgttcgtacggtactg

SEQ ID NO: 25709 - DNA, 25 bp, Saccharomyces pastorianus
tggagcccatcattacagtaccttt

SEQ ID NO: 25710 - DNA, 25 bp, Saccharomyces pastorianus
gtggccaaattcaacttttccatta

SEQ ID NO: 25711 - DNA, 25 bp, Saccharomyces pastorianus
gggccagaactttgcttattcgaag

SEQ ID NO: 25712 - DNA, 25 bp, Saccharomyces pastorianus
ggacatcatatcctatacgatcctg

SEQ ID NO: 25713 - DNA, 25 bp, Saccharomyces pastorianus
attgttactaaactctcctactgga

SEQ ID NO: 25714 - DNA, 25 bp, Saccharomyces pastorianus
ggtggccaacttttacatcatcgaa

SEQ ID NO: 25715 - DNA, 25 bp, Saccharomyces pastorianus
tacgctaagaacagaacacccggtg

SEQ ID NO: 25716 - DNA, 25 bp, Saccharomyces pastorianus
gttgaaatcctaactgccagaaaca

SEQ ID NO: 25717 - DNA, 25 bp, Saccharomyces pastorianus
acgaaacctattatgttggcgacaa

SEQ ID NO: 25718 - DNA, 25 bp, Saccharomyces pastorianus
ttacccatctccattgaactactac

SEQ ID NO: 25719 - DNA, 25 bp, Saccharomyces pastorianus
gaacatactctgttagtcaccgaac

SEQ ID NO: 25720 - DNA, 25 bp, Saccharomyces pastorianus
tggacgtttctctatactatcaagg

SEQ ID NO: 25721 - DNA, 25 bp, Saccharomyces pastorianus
tgagaacttactgtgggcatggtgt

SEQ ID NO: 25722 - DNA, 25 bp, Saccharomyces pastorianus
gccaggcaccactttccaagaattg

SEQ ID NO: 25723 - DNA, 25 bp, Saccharomyces pastorianus
ggttatcatgccgacttgaacgaaa

SEQ ID NO: 25724 - DNA, 25 bp, Saccharomyces pastorianus
tgtgcccgacaaaactgtattgaaa

SEQ ID NO: 25725 - DNA, 25 bp, Saccharomyces pastorianus
taatgaagttatctgccacggtgtg

SEQ ID NO: 25726 - DNA, 25 bp, Saccharomyces pastorianus
aagagactcttccatactgttttcg

SEQ ID NO: 25727 - DNA, 25 bp, Saccharomyces pastorianus
ttggacgatccatggttgaactcat

SEQ ID NO: 25728 - DNA, 25 bp, Saccharomyces pastorianus
tagagctcgagccatccaggagata

SEQ ID NO: 25729 - DNA, 25 bp, Saccharomyces pastorianus
actttgaacacctcgactattctac

SEQ ID NO: 25730 - DNA, 25 bp, Saccharomyces pastorianus
cagtgggcaaactactagagctcga

SEQ ID NO: 25731 - DNA, 25 bp, Saccharomyces pastorianus
ggatgacaactacaacgccggtctg

SEQ ID NO: 25732 - DNA, 25 bp, Saccharomyces pastorianus
aaatcagtcccggtgccaagaacgc

SEQ ID NO: 25733 - DNA, 25 bp, Saccharomyces pastorianus
aggtacttctgagagacgccatcca

SEQ ID NO: 25734 - DNA, 25 bp, Saccharomyces pastorianus
ggagatacgacatcgaccagttctt

SEQ ID NO: 25735 - DNA, 25 bp, Saccharomyces pastorianus
gaactcatggagtattaggctcgct

SEQ ID NO: 25736 - DNA, 25 bp, Saccharomyces pastorianus
gcgcgacgcctttgatatcggtaac

SEQ ID NO: 25737 - DNA, 25 bp, Saccharomyces pastorianus
gacctcatttaatcgtcttagatga

SEQ ID NO: 25738 - DNA, 25 bp, Saccharomyces pastorianus
gactctttaggtgctttgtctcaag

SEQ ID NO: 25739 - DNA, 25 bp, Saccharomyces pastorianus
atggcaaagacctcatttaatcgtc

SEQ ID NO: 25740 - DNA, 25 bp, Saccharomyces pastorianus
ttaggtgctttgtctcaagctttga

SEQ ID NO: 25741 - DNA, 25 bp, Saccharomyces pastorianus
ggcaaagacctcatttaatcgtctt

SEQ ID NO: 25742 - DNA, 25 bp, Saccharomyces pastorianus
ctctttaggtgctttgtctcaagct

SEQ ID NO: 25743 - DNA, 25 bp, Saccharomyces pastorianus
tcatttaatcgtcttagatgaacct

SEQ ID NO: 25744 - DNA, 25 bp, Saccharomyces pastorianus
cgaatctcactccaagatggtcgct

SEQ ID NO: 25745 - DNA, 25 bp, Saccharomyces pastorianus
tgctttgtctcaagctttgaaggat

SEQ ID NO: 25746 - DNA, 25 bp, Saccharomyces pastorianus
ggtcgaatctcactccaagatggtc

SEQ ID NO: 25747 - DNA, 25 bp, Saccharomyces pastorianus
ctttaggtgctttgtctcaagcttt

SEQ ID NO: 25748 - DNA, 25 bp, Saccharomyces pastorianus
gctgccggtacatggcaaagacctc

SEQ ID NO: 25749 - DNA, 25 bp, Saccharomyces pastorianus
atgggtaacaagattgccggtggta

SEQ ID NO: 25750 - DNA, 25 bp, Saccharomyces pastorianus
gacggtagaatgactccatctggtc

SEQ ID NO: 25751 - DNA, 25 bp, Saccharomyces pastorianus
gttattatcattactcactctgctg

SEQ ID NO: 25752 - DNA, 25 bp, Saccharomyces pastorianus
agtggtcaaggtgctggtccaagaa

SEQ ID NO: 25753 - DNA, 25 bp, Saccharomyces pastorianus
gtttggacccagaaattgtttctca

SEQ ID NO: 25754 - DNA, 25 bp, Saccharomyces pastorianus
ttgtttctcactccagaattagagg

SEQ ID NO: 25755 - DNA, 25 bp, Saccharomyces pastorianus
tactcactctgctgaattcacaaag

SEQ ID NO: 25756 - DNA, 25 bp, Saccharomyces pastorianus
taagttggtcttagctgccggtaca

SEQ ID NO: 25757 - DNA, 25 bp, Saccharomyces pastorianus
gaattagaggtttgtctggtggtca

SEQ ID NO: 25758 - DNA, 25 bp, Saccharomyces pastorianus
ggtcaattccgtccattaaccagaa

SEQ ID NO: 25759 - DNA, 25 bp, Saccharomyces pastorianus
agcgtgtcgttaactttatcatgaa

SEQ ID NO: 25760 - DNA, 25 bp, Saccharomyces pastorianus
gaggcgcctctagagctacagtgat

SEQ ID NO: 25761 - DNA, 25 bp, Saccharomyces pastorianus
aaaagccacctgaaggactatcgtg

SEQ ID NO: 25762 - DNA, 25 bp, Saccharomyces pastorianus
ccggaaactttctttgcactacatg

SEQ ID NO: 25763 - DNA, 25 bp, Saccharomyces pastorianus
gtgtaggacaccattccggttttga

SEQ ID NO: 25764 - DNA, 25 bp, Saccharomyces pastorianus
agatccggacgtcaaggtcgttcac

SEQ ID NO: 25765 - DNA, 25 bp, Saccharomyces pastorianus
aatgctatggccaagcgtgtcgtta

SEQ ID NO: 25766 - DNA, 25 bp, Saccharomyces pastorianus
tgaaagtgatattctgtctctctac

SEQ ID NO: 25767 - DNA, 25 bp, Saccharomyces pastorianus
gaacacgagttacttcatcacgaac

SEQ ID NO: 25768 - DNA, 25 bp, Saccharomyces pastorianus
tggtatgggccagcatgatgaatct

SEQ ID NO: 25769 - DNA, 25 bp, Saccharomyces pastorianus
ttgaaggactacacgccggaaactt

SEQ ID NO: 25770 - DNA, 25 bp, Saccharomyces pastorianus
gtttggccagttttccaagcaatca

SEQ ID NO: 25771 - DNA, 25 bp, Saccharomyces pastorianus
cacacttttgaccaactgggcagtt

SEQ ID NO: 25772 - DNA, 25 bp, Saccharomyces pastorianus
ctggtctaatatggtcttgcgagtt

SEQ ID NO: 25773 - DNA, 25 bp, Saccharomyces pastorianus
aagggagcaatggtggcccacactt

SEQ ID NO: 25774 - DNA, 25 bp, Saccharomyces pastorianus
gggctgccattctattttacatgca

SEQ ID NO: 25775 - DNA, 25 bp, Saccharomyces pastorianus
tttgttccccagttccaagatagac

SEQ ID NO: 25776 - DNA, 25 bp, Saccharomyces pastorianus
ccgtcgtctatggttctttgatttt

SEQ ID NO: 25777 - DNA, 25 bp, Saccharomyces pastorianus
aaaggacagctagagccgtcgtcta

SEQ ID NO: 25778 - DNA, 25 bp, Saccharomyces pastorianus
gaaggcccaagacgactaacgcgat

SEQ ID NO: 25779 - DNA, 25 bp, Saccharomyces pastorianus
agtggaccaattagcgtttgcgccc

SEQ ID NO: 25780 - DNA, 25 bp, Saccharomyces pastorianus
gattattggccgttaaccttgttgc

SEQ ID NO: 25781 - DNA, 25 bp, Saccharomyces pastorianus
gcagtattgcgccaagacggtttat

SEQ ID NO: 25782 - DNA, 25 bp, Saccharomyces pastorianus
gtatgctaagttctggctatcgcta

SEQ ID NO: 25783 - DNA, 25 bp, Saccharomyces pastorianus
gacgcagcactgaactatgacattt

SEQ ID NO: 25784 - DNA, 25 bp, Saccharomyces pastorianus
gatcacggactgtataggtacccta

SEQ ID NO: 25785 - DNA, 25 bp, Saccharomyces pastorianus
attttatccagaatccccagcgtgg

SEQ ID NO: 25786 - DNA, 25 bp, Saccharomyces pastorianus
atgccaagggatttgccaacatcac

SEQ ID NO: 25787 - DNA, 25 bp, Saccharomyces pastorianus
acagatgagcagttcccactcttgg

SEQ ID NO: 25788 - DNA, 25 bp, Saccharomyces pastorianus
taggtaccctagcaccaggacaagg

SEQ ID NO: 25789 - DNA, 25 bp, Saccharomyces pastorianus
cgagaggcgtatcaaccagttgtat

SEQ ID NO: 25790 - DNA, 25 bp, Saccharomyces pastorianus
gacctgaccagacatcttgacgagt

SEQ ID NO: 25791 - DNA, 25 bp, Saccharomyces pastorianus
gacgagtgtttgcaaaacccgctgg

SEQ ID NO: 25792 - DNA, 25 bp, Saccharomyces pastorianus
aatttggacttggaaactgcgatac

SEQ ID NO: 25793 - DNA, 25 bp, Saccharomyces pastorianus
aacgccgtcatgaaccactgtaaca

SEQ ID NO: 25794 - DNA, 25 bp, Saccharomyces pastorianus
cctgctccacgctgtatttacaaaa

SEQ ID NO: 25795 - DNA, 25 bp, Saccharomyces pastorianus
aatgagattgagactgccaccaggg

SEQ ID NO: 25796 - DNA, 25 bp, Saccharomyces pastorianus
ggagctcttggaaagccacacgcaa

SEQ ID NO: 25797 - DNA, 25 bp, Saccharomyces pastorianus
ttctcctggaacacgagttgctcga

SEQ ID NO: 25798 - DNA, 25 bp, Saccharomyces pastorianus
ctgtaacatcccgaatacccagata

SEQ ID NO: 25799 - DNA, 25 bp, Saccharomyces pastorianus
gcaccgccggcgaggccaaaagaaa

SEQ ID NO: 25800 - DNA, 25 bp, Saccharomyces pastorianus
aagacaccattaaagtctccaccac

SEQ ID NO: 25801 - DNA, 25 bp, Saccharomyces pastorianus
agttgctcgacaccaaggacgcttt

SEQ ID NO: 25802 - DNA, 25 bp, Saccharomyces pastorianus
ataatatcctcactggagagccagc

SEQ ID NO: 25803 - DNA, 25 bp, Saccharomyces pastorianus
gatcggtatagacttcctttccaag

SEQ ID NO: 25804 - DNA, 25 bp, Saccharomyces pastorianus
gattgctaaatctctccctgaattt

SEQ ID NO: 25805 - DNA, 25 bp, Saccharomyces pastorianus
aacagcgaatcaacgcccttggatg

SEQ ID NO: 25806 - DNA, 25 bp, Saccharomyces pastorianus
tcattatcaggccacgatcggtata

SEQ ID NO: 25807 - DNA, 25 bp, Saccharomyces pastorianus
tagatcgttaataccttcatacatt

SEQ ID NO: 25808 - DNA, 25 bp, Saccharomyces pastorianus
aaaccaggcgttattgatatttcca

SEQ ID NO: 25809 - DNA, 25 bp, Saccharomyces pastorianus
tattgtttacgacatcaccaagaga

SEQ ID NO: 25810 - DNA, 25 bp, Saccharomyces pastorianus
taaaatcttcatggagacctctaca

SEQ ID NO: 25811 - DNA, 25 bp, Saccharomyces pastorianus
gagacaaatctccaccgaagaagga

SEQ ID NO: 25812 - DNA, 25 bp, Saccharomyces pastorianus
ctctacaaaggcaggttacaacgtt

SEQ ID NO: 25813 - DNA, 25 bp, Saccharomyces pastorianus
aacatctctgattactaggttcatg

SEQ ID NO: 25814 - DNA, 25 bp, Saccharomyces pastorianus
gaagcaacaacaggatatggatcct

SEQ ID NO: 25815 - DNA, 25 bp, Saccharomyces pastorianus
ctaatatgaagagcggtaagccttt

SEQ ID NO: 25816 - DNA, 25 bp, Saccharomyces pastorianus
atcctgaagaagttgctttcaaaga

SEQ ID NO: 25817 - DNA, 25 bp, Saccharomyces pastorianus
ggccgacgctgctgctaagaaagct

SEQ ID NO: 25818 - DNA, 25 bp, Saccharomyces pastorianus
tggatcctgaagaagttgctttcaa

SEQ ID NO: 25819 - DNA, 25 bp, Saccharomyces pastorianus
tatgaagagcggtaagcctttagtc

SEQ ID NO: 25820 - DNA, 25 bp, Saccharomyces pastorianus
tgtctggtcgtcaaggtggtaagat

SEQ ID NO: 25821 - DNA, 25 bp, Saccharomyces pastorianus
ctgaagaagttgctttcaaagaaaa

SEQ ID NO: 25822 - DNA, 25 bp, Saccharomyces pastorianus
tatggatcctgaagaagttgctttc

SEQ ID NO: 25823 - DNA, 25 bp, Saccharomyces pastorianus
gatatggatcctgaagaagttgctt

SEQ ID NO: 25824 - DNA, 25 bp, Saccharomyces pastorianus
aaaaggccgacgctgctgctaagaa

SEQ ID NO: 25825 - DNA, 25 bp, Saccharomyces pastorianus
ccgtaccatcgtcagaaacgttaag

SEQ ID NO: 25826 - DNA, 25 bp, Saccharomyces pastorianus
gttactcaagttcgtgttgaattct

SEQ ID NO: 25827 - DNA, 25 bp, Saccharomyces pastorianus
tcatcaaagttctaggccgtaccgg

SEQ ID NO: 25828 - DNA, 25 bp, Saccharomyces pastorianus
caagaccccagtcaccttagctaaa

SEQ ID NO: 25829 - DNA, 25 bp, Saccharomyces pastorianus
tacccgtaccatcgtcagaaacgtt

SEQ ID NO: 25830 - DNA, 25 bp, Saccharomyces pastorianus
taccatcgtcagaaacgttaagggc

SEQ ID NO: 25831 - DNA, 25 bp, Saccharomyces pastorianus
actacccgtaccatcgtcagaaacg

SEQ ID NO: 25832 - DNA, 25 bp, Saccharomyces pastorianus
ttctcgtggtggtgttactcaagtt

SEQ ID NO: 25833 - DNA, 25 bp, Saccharomyces pastorianus
gtaccatcgtcagaaacgttaaggg

SEQ ID NO: 25834 - DNA, 25 bp, Saccharomyces pastorianus
ttctaggccgtaccggttctcgtgg

SEQ ID NO: 25835 - DNA, 25 bp, Saccharomyces pastorianus
catcgtcagaaacgttaagggccca

SEQ ID NO: 25836 - DNA, 25 bp, Saccharomyces pastorianus
aagatcgtggtctccagaatgacac

SEQ ID NO: 25837 - DNA, 25 bp, Saccharomyces pastorianus
gacatagcccaggagttcgaacact

SEQ ID NO: 25838 - DNA, 25 bp, Saccharomyces pastorianus
gatccctcactgtctgaacaaaagc

SEQ ID NO: 25839 - DNA, 25 bp, Saccharomyces pastorianus
gtcatatgtgagtccggatacccaa

SEQ ID NO: 25840 - DNA, 25 bp, Saccharomyces pastorianus
cattgtcatagtcgccttcttcttt

SEQ ID NO: 25841 - DNA, 25 bp, Saccharomyces pastorianus
aaatccatggtcttctattttgtca

SEQ ID NO: 25842 - DNA, 25 bp, Saccharomyces pastorianus
tttatagacaagacgggctgcctct

SEQ ID NO: 25843 - DNA, 25 bp, Saccharomyces pastorianus
aatgagcgacatgagttcctccctg

SEQ ID NO: 25844 - DNA, 25 bp, Saccharomyces pastorianus
gtcaacttcgacaacttcctacaaa

SEQ ID NO: 25845 - DNA, 25 bp, Saccharomyces pastorianus
ggctcttttgaaatccactacttga

SEQ ID NO: 25846 - DNA, 25 bp, Saccharomyces pastorianus
cgccaccgaggccactttagaaagt

SEQ ID NO: 25847 - DNA, 25 bp, Saccharomyces pastorianus
gatggattcctaattttgcctgata

SEQ ID NO: 25848 - DNA, 25 bp, Saccharomyces pastorianus
aacagcattgctgccggcaaagcta

SEQ ID NO: 25849 - DNA, 25 bp, Saccharomyces pastorianus
aagagaatcgtccagccttacatcg

SEQ ID NO: 25850 - DNA, 25 bp, Saccharomyces pastorianus
tgttcctggttgttataactacgca

SEQ ID NO: 25851 - DNA, 25 bp, Saccharomyces pastorianus
ggttgccatcgtttatagaactgac

SEQ ID NO: 25852 - DNA, 25 bp, Saccharomyces pastorianus
ggactctttgtacttggttgccatc

SEQ ID NO: 25853 - DNA, 25 bp, Saccharomyces pastorianus
gggacggtatgaacctggactcttt

SEQ ID NO: 25854 - DNA, 25 bp, Saccharomyces pastorianus
taactacgcagtccatcctgatgag

SEQ ID NO: 25855 - DNA, 25 bp, Saccharomyces pastorianus
cattctttatgaaggtgccgaggca

SEQ ID NO: 25856 - DNA, 25 bp, Saccharomyces pastorianus
gcatccaggtctaggtaacagcatt

SEQ ID NO: 25857 - DNA, 25 bp, Saccharomyces pastorianus
aatattgattcactaccaaccctct

SEQ ID NO: 25858 - DNA, 25 bp, Saccharomyces pastorianus
ggccaaatgtttagacaacccagat

SEQ ID NO: 25859 - DNA, 25 bp, Saccharomyces pastorianus
gcttgtcttcgcagtattgtgaaaa

SEQ ID NO: 25860 - DNA, 25 bp, Saccharomyces pastorianus
aaggacatgtttaatgaccgttaca

SEQ ID NO: 25861 - DNA, 25 bp, Saccharomyces pastorianus
ggattatttgtaccgtcgtttacat

SEQ ID NO: 25862 - DNA, 25 bp, Saccharomyces pastorianus
aaaaggctaccgctattaattactg

SEQ ID NO: 25863 - DNA, 25 bp, Saccharomyces pastorianus
atttttcaccgaattagcttctaag

SEQ ID NO: 25864 - DNA, 25 bp, Saccharomyces pastorianus
aacgccatctataacgggttcattg

SEQ ID NO: 25865 - DNA, 25 bp, Saccharomyces pastorianus
gaaactgtcactgcagtattggagg

SEQ ID NO: 25866 - DNA, 25 bp, Saccharomyces pastorianus
gtatgcttcaacaatctggtagatg

SEQ ID NO: 25867 - DNA, 25 bp, Saccharomyces pastorianus
gggatgacattgcattcgtgttaaa

SEQ ID NO: 25868 - DNA, 25 bp, Saccharomyces pastorianus
tagcttctaaggacaacgccatcta

SEQ ID NO: 25869 - DNA, 25 bp, Saccharomyces pastorianus
ggccgctgaaaaactatcttcgaat

SEQ ID NO: 25870 - DNA, 25 bp, Saccharomyces pastorianus
tgcctctcaggatccaatcggtggt

SEQ ID NO: 25871 - DNA, 25 bp, Saccharomyces pastorianus
gataaagccttgtatgcgttggaga

SEQ ID NO: 25872 - DNA, 25 bp, Saccharomyces pastorianus
tgtcgacacacatagattttctcaa

SEQ ID NO: 25873 - DNA, 25 bp, Saccharomyces pastorianus
atttcaggcatctacaatggacgct

SEQ ID NO: 25874 - DNA, 25 bp, Saccharomyces pastorianus
atggcacgtcattatcagagatccg

SEQ ID NO: 25875 - DNA, 25 bp, Saccharomyces pastorianus
aaagatcgtctatccctattaccat

SEQ ID NO: 25876 - DNA, 25 bp, Saccharomyces pastorianus
atcagagatccgtcgttttgaacaa

SEQ ID NO: 25877 - DNA, 25 bp, Saccharomyces pastorianus
atttctatcgccaatcacgttatta

SEQ ID NO: 25878 - DNA, 25 bp, Saccharomyces pastorianus
tggttggtctacttcttaccaaact

SEQ ID NO: 25879 - DNA, 25 bp, Saccharomyces pastorianus
ctagaactaagtccaatcgcacagg

SEQ ID NO: 25880 - DNA, 25 bp, Saccharomyces pastorianus
cagcaatttcatttgtggtcccatt

SEQ ID NO: 25881 - DNA, 25 bp, Saccharomyces pastorianus
gatttgccaacaacagccaagtcgt

SEQ ID NO: 25882 - DNA, 25 bp, Saccharomyces pastorianus
atccaaagaagcgtcatccacatag

SEQ ID NO: 25883 - DNA, 25 bp, Saccharomyces pastorianus
gaattgcaaccttacacatttgacc

SEQ ID NO: 25884 - DNA, 25 bp, Saccharomyces pastorianus
taagcataagccgtcaatgttgcaa

SEQ ID NO: 25885 - DNA, 25 bp, Saccharomyces pastorianus
actcaagtcgccatcagggaagcca

SEQ ID NO: 25886 - DNA, 25 bp, Saccharomyces pastorianus
ggtaaaaccggtacagcaatttcat

SEQ ID NO: 25887 - DNA, 25 bp, Saccharomyces pastorianus
aacagccaagtcgtatgtgcataga

SEQ ID NO: 25888 - DNA, 25 bp, Saccharomyces pastorianus
ggtttccgtgccgtgactcaagtcg

SEQ ID NO: 25889 - DNA, 25 bp, Saccharomyces pastorianus
agattctttcgcgtatcatcaagca

SEQ ID NO: 25890 - DNA, 25 bp, Saccharomyces pastorianus
gtttgttccgttccacaatccaaag

SEQ ID NO: 25891 - DNA, 25 bp, Saccharomyces pastorianus
tgttgtcgacactatagctacttta

SEQ ID NO: 25892 - DNA, 25 bp, Saccharomyces pastorianus
tatgaacgtagattctgctccggct

SEQ ID NO: 25893 - DNA, 25 bp, Saccharomyces pastorianus
attctgctccggctagtgtgaagtt

SEQ ID NO: 25894 - DNA, 25 bp, Saccharomyces pastorianus
atgactgacaccgtagctgattctg

SEQ ID NO: 25895 - DNA, 25 bp, Saccharomyces pastorianus
gctgattctgtcattgcaatactta

SEQ ID NO: 25896 - DNA, 25 bp, Saccharomyces pastorianus
ggtgacggtacaaccaaatctggta

SEQ ID NO: 25897 - DNA, 25 bp, Saccharomyces pastorianus
gtcactatcggtaagaacactgcta

SEQ ID NO: 25898 - DNA, 25 bp, Saccharomyces pastorianus
gtcgctcttgtgacgatcatgaaca

SEQ ID NO: 25899 - DNA, 25 bp, Saccharomyces pastorianus
gtgaggctgatgttcttcaagacga

SEQ ID NO: 25900 - DNA, 25 bp, Saccharomyces pastorianus
gtgtgaagttatccagtcgctcttg

SEQ ID NO: 25901 - DNA, 25 bp, Saccharomyces pastorianus
atgacggcgaggtgcaatcttttgc

SEQ ID NO: 25902 - DNA, 25 bp, Saccharomyces pastorianus
gattatactccattattggccaaca

SEQ ID NO: 25903 - DNA, 25 bp, Saccharomyces pastorianus
aattgggtgctgcagcagctctacc

SEQ ID NO: 25904 - DNA, 25 bp, Saccharomyces pastorianus
agctctaccttctgtcatttgtgct

SEQ ID NO: 25905 - DNA, 25 bp, Saccharomyces pastorianus
tactgattatcctgatcctgatcta

SEQ ID NO: 25906 - DNA, 25 bp, Saccharomyces pastorianus
ggaatttttccaattggctaacgat

SEQ ID NO: 25907 - DNA, 25 bp, Saccharomyces pastorianus
aacagtcgaaatcagatctcgcgtt

SEQ ID NO: 25908 - DNA, 25 bp, Saccharomyces pastorianus
ggcgttagtagtgttttcaccacat

SEQ ID NO: 25909 - DNA, 25 bp, Saccharomyces pastorianus
atcgaaccatttggatgctcatcca

SEQ ID NO: 25910 - DNA, 25 bp, Saccharomyces pastorianus
catttgtgctttgaacggtgctaaa

SEQ ID NO: 25911 - DNA, 25 bp, Saccharomyces pastorianus
taacgatgagttcagtttggttcct

SEQ ID NO: 25912 - DNA, 25 bp, Saccharomyces pastorianus
gaaggactcggcaacatcagtgcag

SEQ ID NO: 25913 - DNA, 25 bp, Saccharomyces pastorianus
ttcaacaacttctacctctcaaaaa

SEQ ID NO: 25914 - DNA, 25 bp, Saccharomyces pastorianus
atgacagagactacttccacgacca

SEQ ID NO: 25915 - DNA, 25 bp, Saccharomyces pastorianus
caaagagtcctttcactactgctac

SEQ ID NO: 25916 - DNA, 25 bp, Saccharomyces pastorianus
gagatcgcatgctctgctgatggag

SEQ ID NO: 25917 - DNA, 25 bp, Saccharomyces pastorianus
ggagagtacgctgtttgtgaccaca

SEQ ID NO: 25918 - DNA, 25 bp, Saccharomyces pastorianus
taaaaactactctgtctactccaac

SEQ ID NO: 25919 - DNA, 25 bp, Saccharomyces pastorianus
atatgccgccggtcaattgaatggt

SEQ ID NO: 25920 - DNA, 25 bp, Saccharomyces pastorianus
tacgtcaaagaatactcccgctatc

SEQ ID NO: 25921 - DNA, 25 bp, Saccharomyces pastorianus
tgaccacagcgcctgggtttatatg

SEQ ID NO: 25922 - DNA, 25 bp, Saccharomyces pastorianus
caagtacactttctccaactacaag

SEQ ID NO: 25923 - DNA, 25 bp, Saccharomyces pastorianus
gaactacgtgttatgcttttgactc

SEQ ID NO: 25924 - DNA, 25 bp, Saccharomyces pastorianus
atgctcgttatgatgaagacctgtt

SEQ ID NO: 25925 - DNA, 25 bp, Saccharomyces pastorianus
tgacaaaccgatgtcttcgctatat

SEQ ID NO: 25926 - DNA, 25 bp, Saccharomyces pastorianus
actcatgaagtaattatccgctgca

SEQ ID NO: 25927 - DNA, 25 bp, Saccharomyces pastorianus
agagagtagttctgccaatccttcc

SEQ ID NO: 25928 - DNA, 25 bp, Saccharomyces pastorianus
cattgttcgctggaccgtggtagtt

SEQ ID NO: 25929 - DNA, 25 bp, Saccharomyces pastorianus
tatggacatccatcctgagcatgaa

SEQ ID NO: 25930 - DNA, 25 bp, Saccharomyces pastorianus
gcgttcgaggaagttgttttggcaa

SEQ ID NO: 25931 - DNA, 25 bp, Saccharomyces pastorianus
atcttgtgtattccattgttcgctg

SEQ ID NO: 25932 - DNA, 25 bp, Saccharomyces pastorianus
tgttccaaactatacgcagcgttcg

SEQ ID NO: 25933 - DNA, 25 bp, Saccharomyces pastorianus
gccaatccttcccaaaatcataata

SEQ ID NO: 25934 - DNA, 25 bp, Saccharomyces pastorianus
gaacaagaatctcttcccatgattg

SEQ ID NO: 25935 - DNA, 25 bp, Saccharomyces pastorianus
aatgggaatgctatcgacgccttat

SEQ ID NO: 25936 - DNA, 25 bp, Saccharomyces pastorianus
atgcttctgatctctctcgtagaaa

SEQ ID NO: 25937 - DNA, 25 bp, Saccharomyces pastorianus
gacgccttatccagggtattgcaca

SEQ ID NO: 25938 - DNA, 25 bp, Saccharomyces pastorianus
aatctgtctccagagggtttgcttc

SEQ ID NO: 25939 - DNA, 25 bp, Saccharomyces pastorianus
atgttatacgtttatgcgacagcaa

SEQ ID NO: 25940 - DNA, 25 bp, Saccharomyces pastorianus
cgttgcagcttatcacgaaccattt

SEQ ID NO: 25941 - DNA, 25 bp, Saccharomyces pastorianus
aagttacatgcttctgatctctctc

SEQ ID NO: 25942 - DNA, 25 bp, Saccharomyces pastorianus
aggtcgttatccaagctagggctaa

SEQ ID NO: 25943 - DNA, 25 bp, Saccharomyces pastorianus
gagggtttgcttctttggattatga

SEQ ID NO: 25944 - DNA, 25 bp, Saccharomyces pastorianus
gattgatatcacttaccttaacact

SEQ ID NO: 25945 - DNA, 25 bp, Saccharomyces pastorianus
tattaccttccgttatcacatttgg

SEQ ID NO: 25946 - DNA, 25 bp, Saccharomyces pastorianus
aaagaggcttggcatttgttcccga

SEQ ID NO: 25947 - DNA, 25 bp, Saccharomyces pastorianus
tgtcacacaatccaccgaaaccaat

SEQ ID NO: 25948 - DNA, 25 bp, Saccharomyces pastorianus
aagcggactgtctgttgaaattagg

SEQ ID NO: 25949 - DNA, 25 bp, Saccharomyces pastorianus
ccaaatcttactccacaaccaaatg

SEQ ID NO: 25950 - DNA, 25 bp, Saccharomyces pastorianus
gttgcacttcatgcttcgtagcaaa

SEQ ID NO: 25951 - DNA, 25 bp, Saccharomyces pastorianus
tcatccaaccagacgtctttgtgag

SEQ ID NO: 25952 - DNA, 25 bp, Saccharomyces pastorianus
attcagctaccagagttgcacttca

SEQ ID NO: 25953 - DNA, 25 bp, Saccharomyces pastorianus
atagatttgtctttggtgcttggaa

SEQ ID NO: 25954 - DNA, 25 bp, Saccharomyces pastorianus
gaggcattgcaagatctagactttt

SEQ ID NO: 25955 - DNA, 25 bp, Saccharomyces pastorianus
ataagtgcaagtggcgccgatgtca

SEQ ID NO: 25956 - DNA, 25 bp, Saccharomyces pastorianus
gatctagactttttactcggtacgg

SEQ ID NO: 25957 - DNA, 25 bp, Saccharomyces pastorianus
gacgtctgggacactgctggccaag

SEQ ID NO: 25958 - DNA, 25 bp, Saccharomyces pastorianus
ttgcaatactacgacatttccgcca

SEQ ID NO: 25959 - DNA, 25 bp, Saccharomyces pastorianus
gacatttccgccaaatctaactaca

SEQ ID NO: 25960 - DNA, 25 bp, Saccharomyces pastorianus
taaactagtccttgtcggtgatggt

SEQ ID NO: 25961 - DNA, 25 bp, Saccharomyces pastorianus
tttgtccttctacaccaatttcggt

SEQ ID NO: 25962 - DNA, 25 bp, Saccharomyces pastorianus
gaatgttcctaactggcacagagat

SEQ ID NO: 25963 - DNA, 25 bp, Saccharomyces pastorianus
ttagagtttgttgcttctccagctt

SEQ ID NO: 25964 - DNA, 25 bp, Saccharomyces pastorianus
cggtgttgaagtgcatcctttgtcc

SEQ ID NO: 25965 - DNA, 25 bp, Saccharomyces pastorianus
gaagtacattgccaccatcggtgtt

SEQ ID NO: 25966 - DNA, 25 bp, Saccharomyces pastorianus
gagatttggtccgtgtctgtgaaaa

SEQ ID NO: 25967 - DNA, 25 bp, Saccharomyces pastorianus
agacggttactacatcaatgctcaa

SEQ ID NO: 25968 - DNA, 25 bp, Saccharomyces pastorianus
aaagaagccaaccttaccagaattg

SEQ ID NO: 25969 - DNA, 25 bp, Saccharomyces pastorianus
tgacgaccacaagagtatcctacaa

SEQ ID NO: 25970 - DNA, 25 bp, Saccharomyces pastorianus
gtcaagccttggagcccaccaaaga

SEQ ID NO: 25971 - DNA, 25 bp, Saccharomyces pastorianus
tagaaaccgccaacgacaccaagag

SEQ ID NO: 25972 - DNA, 25 bp, Saccharomyces pastorianus
tacaggacttgtacttgagggaact

SEQ ID NO: 25973 - DNA, 25 bp, Saccharomyces pastorianus
acccagctctttgcaagatgccgag

SEQ ID NO: 25974 - DNA, 25 bp, Saccharomyces pastorianus
agacgccctaaaggcatacgccgat

SEQ ID NO: 25975 - DNA, 25 bp, Saccharomyces pastorianus
gatgccgagggtaacgtcaagcctt

SEQ ID NO: 25976 - DNA, 25 bp, Saccharomyces pastorianus
gtgctcaatgcttcgagattaccat

SEQ ID NO: 25977 - DNA, 25 bp, Saccharomyces pastorianus
gagggcgaagccgaaccaattgaag

SEQ ID NO: 25978 - DNA, 25 bp, Saccharomyces pastorianus
gaaggaaactaagctggcacccagc

SEQ ID NO: 25979 - DNA, 25 bp, Saccharomyces pastorianus
gacgccaaccgctttgatataggag

SEQ ID NO: 25980 - DNA, 25 bp, Saccharomyces pastorianus
gaaagatctgcgcaacacaccgtca

SEQ ID NO: 25981 - DNA, 25 bp, Saccharomyces pastorianus
aatcatcttcgagtaacagcggact

SEQ ID NO: 25982 - DNA, 25 bp, Saccharomyces pastorianus
tcgatcaacacactgcagtcgttat

SEQ ID NO: 25983 - DNA, 25 bp, Saccharomyces pastorianus
gatggcctacggaaaccggcgagtt

SEQ ID NO: 25984 - DNA, 25 bp, Saccharomyces pastorianus
aaggtgttcatagacgccaaccgct

SEQ ID NO: 25985 - DNA, 25 bp, Saccharomyces pastorianus
taaaggttacgtgcttgcccaataa

SEQ ID NO: 25986 - DNA, 25 bp, Saccharomyces pastorianus
atgcgagagcaatccgttccctaga

SEQ ID NO: 25987 - DNA, 25 bp, Saccharomyces pastorianus
gagcctccgaagatattgtcacagt

SEQ ID NO: 25988 - DNA, 25 bp, Saccharomyces pastorianus
gtacggacatcctacaaaccacgat

SEQ ID NO: 25989 - DNA, 25 bp, Saccharomyces pastorianus
taggagatttagtcaaggccagcaa

SEQ ID NO: 25990 - DNA, 25 bp, Saccharomyces pastorianus
ttatcattcatgacgcattccaaca

SEQ ID NO: 25991 - DNA, 25 bp, Saccharomyces pastorianus
gacgatattacttcgtggtccgatg

SEQ ID NO: 25992 - DNA, 25 bp, Saccharomyces pastorianus
actattgggatgactttatgactgc

SEQ ID NO: 25993 - DNA, 25 bp, Saccharomyces pastorianus
gaagcccactggaccgtttgcggtg

SEQ ID NO: 25994 - DNA, 25 bp, Saccharomyces pastorianus
gaattcgccgctgctatgacagatt

SEQ ID NO: 25995 - DNA, 25 bp, Saccharomyces pastorianus
gtagaagctcaattagacgcctttg

SEQ ID NO: 25996 - DNA, 25 bp, Saccharomyces pastorianus
actggtgtgttggacgaagcccact

SEQ ID NO: 25997 - DNA, 25 bp, Saccharomyces pastorianus
atcttcctacattggttcttgtgcc

SEQ ID NO: 25998 - DNA, 25 bp, Saccharomyces pastorianus
ttcggtgccagatacgatggttctt

SEQ ID NO: 25999 - DNA, 25 bp, Saccharomyces pastorianus
gaccaccaccattatcaagttttcg

SEQ ID NO: 26000 - DNA, 25 bp, Saccharomyces pastorianus
ggttcttgtgccaacaacgacgata

SEQ ID NO: 26001 - DNA, 25 bp, Saccharomyces pastorianus
tagtcattgctccatactttaccac

SEQ ID NO: 26002 - DNA, 25 bp, Saccharomyces pastorianus
gaaaagttcccacaattctctcaac

SEQ ID NO: 26003 - DNA, 25 bp, Saccharomyces pastorianus
tgaagcttgcttccaacttggccaa

SEQ ID NO: 26004 - DNA, 25 bp, Saccharomyces pastorianus
ggtatcctaccctggtttagcatct

SEQ ID NO: 26005 - DNA, 25 bp, Saccharomyces pastorianus
gtggtgtcttatccttcggtgttaa

SEQ ID NO: 26006 - DNA, 25 bp, Saccharomyces pastorianus
gcctctttcctactactacaaggtg

SEQ ID NO: 26007 - DNA, 25 bp, Saccharomyces pastorianus
gaaaagttggcttctggtgtcacca

SEQ ID NO: 26008 - DNA, 25 bp, Saccharomyces pastorianus
ttaaggacttgccaaacgctgacaa

SEQ ID NO: 26009 - DNA, 25 bp, Saccharomyces pastorianus
ggtgcccaagttgttgacggtttga

SEQ ID NO: 26010 - DNA, 25 bp, Saccharomyces pastorianus
agtctccttacgtatcctgggtatc

SEQ ID NO: 26011 - DNA, 25 bp, Saccharomyces pastorianus
ggccgaaggctaccacggtactata

SEQ ID NO: 26012 - DNA, 25 bp, Saccharomyces pastorianus
gtggaagccatcatcgagtgcgtta

SEQ ID NO: 26013 - DNA, 25 bp, Saccharomyces pastorianus
tatgtacgacgatcaaggccactgt

SEQ ID NO: 26014 - DNA, 25 bp, Saccharomyces pastorianus
tgagagcatcttcaccaagggttac

SEQ ID NO: 26015 - DNA, 25 bp, Saccharomyces pastorianus
ggcatcaagttcgaggcagtcccat

SEQ ID NO: 26016 - DNA, 25 bp, Saccharomyces pastorianus
atctttgatattgtcccgggtggca

SEQ ID NO: 26017 - DNA, 25 bp, Saccharomyces pastorianus
aggccactgtctacacattgatttc

SEQ ID NO: 26018 - DNA, 25 bp, Saccharomyces pastorianus
taatcgacgtgctacccaattcagt

SEQ ID NO: 26019 - DNA, 25 bp, Saccharomyces pastorianus
accggcctacttagacttcgaagag

SEQ ID NO: 26020 - DNA, 25 bp, Saccharomyces pastorianus
gtgcgttaaccccatgctaggaagc

SEQ ID NO: 26021 - DNA, 25 bp, Saccharomyces pastorianus
ttaaagcatatctggcggcacgtcc

SEQ ID NO: 26022 - DNA, 25 bp, Saccharomyces pastorianus
gtcttccatgcttcaagggtcacaa

SEQ ID NO: 26023 - DNA, 25 bp, Saccharomyces pastorianus
gtagcccaaatcgagtggtcaattt

SEQ ID NO: 26024 - DNA, 25 bp, Saccharomyces pastorianus
ggtacacatacttggtcacatgcat

SEQ ID NO: 26025 - DNA, 25 bp, Saccharomyces pastorianus
ggttaactgtggtcttatgggatca

SEQ ID NO: 26026 - DNA, 25 bp, Saccharomyces pastorianus
aagctttctcaaacattcgacgatg

SEQ ID NO: 26027 - DNA, 25 bp, Saccharomyces pastorianus
gagacacaggaccacttttttcgtt

SEQ ID NO: 26028 - DNA, 25 bp, Saccharomyces pastorianus
cacatgcatttttaccaagcctatc

SEQ ID NO: 26029 - DNA, 25 bp, Saccharomyces pastorianus
gttacttcgtgtttcaagctttctc

SEQ ID NO: 26030 - DNA, 25 bp, Saccharomyces pastorianus
gaaggactgtcgatcttgcgattaa

SEQ ID NO: 26031 - DNA, 25 bp, Saccharomyces pastorianus
gaatgctaccggtaaacactttcct

SEQ ID NO: 26032 - DNA, 25 bp, Saccharomyces pastorianus
gagaggtcatttagtcggtacacat

SEQ ID NO: 26033 - DNA, 25 bp, Saccharomyces pastorianus
acactgttagtttccctcatatata

SEQ ID NO: 26034 - DNA, 25 bp, Saccharomyces pastorianus
cggatattcttcagtttctaaaact

SEQ ID NO: 26035 - DNA, 25 bp, Saccharomyces pastorianus
aaaactgtccatgataagcccattg

SEQ ID NO: 26036 - DNA, 25 bp, Saccharomyces pastorianus
tttaccccaaagagctcacctacat

SEQ ID NO: 26037 - DNA, 25 bp, Saccharomyces pastorianus
ctacatcaacaaccatcccagttat

SEQ ID NO: 26038 - DNA, 25 bp, Saccharomyces pastorianus
acagcaaaatgctttaccccaaaga

SEQ ID NO: 26039 - DNA, 25 bp, Saccharomyces pastorianus
tcccagttataaaagatgctagtgc

SEQ ID NO: 26040 - DNA, 25 bp, Saccharomyces pastorianus
gatgctagtgctactcattatcgta

SEQ ID NO: 26041 - DNA, 25 bp, Saccharomyces pastorianus
caagcttaaacggatattcttcagt

SEQ ID NO: 26042 - DNA, 25 bp, Saccharomyces pastorianus
gtgctactcattatcgtagaatgtc

SEQ ID NO: 26043 - DNA, 25 bp, Saccharomyces pastorianus
taagcccattgttatctgcacagat

SEQ ID NO: 26044 - DNA, 25 bp, Saccharomyces pastorianus
gtagaatgtctaccataaacaactt

SEQ ID NO: 26045 - DNA, 25 bp, Saccharomyces pastorianus
tctgctctatattcttctccaattt

SEQ ID NO: 26046 - DNA, 25 bp, Saccharomyces pastorianus
atgtcccgcacatcgagaagcagta

SEQ ID NO: 26047 - DNA, 25 bp, Saccharomyces pastorianus
tgttgggaacgcagactttctccat

SEQ ID NO: 26048 - DNA, 25 bp, Saccharomyces pastorianus
actaaaggtaactcacactctgcta

SEQ ID NO: 26049 - DNA, 25 bp, Saccharomyces pastorianus
gactgtcatagaagcctctttggaa

SEQ ID NO: 26050 - DNA, 25 bp, Saccharomyces pastorianus
gcagactttctccataattcgacga

SEQ ID NO: 26051 - DNA, 25 bp, Saccharomyces pastorianus
cactctgctaccactagtgggacga

SEQ ID NO: 26052 - DNA, 25 bp, Saccharomyces pastorianus
atgaccgctatcgtttctgctctat

SEQ ID NO: 26053 - DNA, 25 bp, Saccharomyces pastorianus
gacagacatcgcatgtgtcccgttt

SEQ ID NO: 26054 - DNA, 25 bp, Saccharomyces pastorianus
gaagcagtatcaactctcattgcaa

SEQ ID NO: 26055 - DNA, 25 bp, Saccharomyces pastorianus
tcggtgtgtacctatctgatttgac

SEQ ID NO: 26056 - DNA, 25 bp, Saccharomyces pastorianus
ggcagccaagtaagaggccgttctt

SEQ ID NO: 26057 - DNA, 25 bp, Saccharomyces pastorianus
gttcgacccgatatccaaacaacaa

SEQ ID NO: 26058 - DNA, 25 bp, Saccharomyces pastorianus
gattattcacaaacttaccttatgc

SEQ ID NO: 26059 - DNA, 25 bp, Saccharomyces pastorianus
actgttttccaacaaaaggtgtctg

SEQ ID NO: 26060 - DNA, 25 bp, Saccharomyces pastorianus
gaaactgagctatttgcaagacata

SEQ ID NO: 26061 - DNA, 25 bp, Saccharomyces pastorianus
taccttatgctgtcgttgggtccaa

SEQ ID NO: 26062 - DNA, 25 bp, Saccharomyces pastorianus
gtggataatgacagccattccgatt

SEQ ID NO: 26063 - DNA, 25 bp, Saccharomyces pastorianus
ggtatcaagcaagacaactcagttt

SEQ ID NO: 26064 - DNA, 25 bp, Saccharomyces pastorianus
cagccattccgatttcaaccttttg

SEQ ID NO: 26065 - DNA, 25 bp, Saccharomyces pastorianus
ttctccaaacgttaatcattcccct

SEQ ID NO: 26066 - DNA, 25 bp, Saccharomyces pastorianus
aactacagatcatccaaattggcca

SEQ ID NO: 26067 - DNA, 25 bp, Saccharomyces pastorianus
atttgacttgcaatctacaggacag

SEQ ID NO: 26068 - DNA, 25 bp, Saccharomyces pastorianus
tacaacgatgactccataactccgg

SEQ ID NO: 26069 - DNA, 25 bp, Saccharomyces pastorianus
gacctctgctactttgcaaactcaa

SEQ ID NO: 26070 - DNA, 25 bp, Saccharomyces pastorianus
ggaagaatttgcctccatatattgt

SEQ ID NO: 26071 - DNA, 25 bp, Saccharomyces pastorianus
gataaatcgctaaccccagaaacct

SEQ ID NO: 26072 - DNA, 25 bp, Saccharomyces pastorianus
gactgggtcgatggccatttaatcc

SEQ ID NO: 26073 - DNA, 25 bp, Saccharomyces pastorianus
gatcttgatatgacctctgctactt

SEQ ID NO: 26074 - DNA, 25 bp, Saccharomyces pastorianus
ctttgccgcttccattgtacaggac

SEQ ID NO: 26075 - DNA, 25 bp, Saccharomyces pastorianus
gagttcattcccttagtatctcaat

SEQ ID NO: 26076 - DNA, 25 bp, Saccharomyces pastorianus
aatccaggaccatgtaccaaacgat

SEQ ID NO: 26077 - DNA, 25 bp, Saccharomyces pastorianus
gccgcattcggttatctatctggta

SEQ ID NO: 26078 - DNA, 25 bp, Saccharomyces pastorianus
attacttgcgcttttaccggtgata

SEQ ID NO: 26079 - DNA, 25 bp, Saccharomyces pastorianus
aggcagtgttttcgcatggttgcat

SEQ ID NO: 26080 - DNA, 25 bp, Saccharomyces pastorianus
atactaataccaacggaccagcagt

SEQ ID NO: 26081 - DNA, 25 bp, Saccharomyces pastorianus
gaaacattgttcttgatctactcat

SEQ ID NO: 26082 - DNA, 25 bp, Saccharomyces pastorianus
gtccgttataggatgggcgccatta

SEQ ID NO: 26083 - DNA, 25 bp, Saccharomyces pastorianus
atgctgttgctggacgtccgttata

SEQ ID NO: 26084 - DNA, 25 bp, Saccharomyces pastorianus
accagggacccattctatgaaacga

SEQ ID NO: 26085 - DNA, 25 bp, Saccharomyces pastorianus
gatctactcatcagtttggtgccgg

SEQ ID NO: 26086 - DNA, 25 bp, Saccharomyces pastorianus
gaaacgcagccattgtctataattt

SEQ ID NO: 26087 - DNA, 25 bp, Saccharomyces pastorianus
atcgtctcaggcttccatattattg

SEQ ID NO: 26088 - DNA, 25 bp, Saccharomyces pastorianus
ggcaaagcttacaacaggccaccgg

SEQ ID NO: 26089 - DNA, 25 bp, Saccharomyces pastorianus
gtctaacccaaaatacttttctcat

SEQ ID NO: 26090 - DNA, 25 bp, Saccharomyces pastorianus
ggcaaggcaggcgacgaaatcaacg

SEQ ID NO: 26091 - DNA, 25 bp, Saccharomyces pastorianus
gaagctaagtctaacccaaaatact

SEQ ID NO: 26092 - DNA, 25 bp, Saccharomyces pastorianus
gactctggcgagatcaagaccgttt

SEQ ID NO: 26093 - DNA, 25 bp, Saccharomyces pastorianus
atcaacgacttgatcgactctggcg

SEQ ID NO: 26094 - DNA, 25 bp, Saccharomyces pastorianus
taacgggaactttggcgaatctcca

SEQ ID NO: 26095 - DNA, 25 bp, Saccharomyces pastorianus
tggcgagatcaagaccgttttcaac

SEQ ID NO: 26096 - DNA, 25 bp, Saccharomyces pastorianus
tacttttctcataacgggaactttg

SEQ ID NO: 26097 - DNA, 25 bp, Saccharomyces pastorianus
acgacttgatcgactctggcgagat

SEQ ID NO: 26098 - DNA, 25 bp, Saccharomyces pastorianus
tggcgaatctccaaaccacatcaag

SEQ ID NO: 26099 - DNA, 25 bp, Saccharomyces pastorianus
gaagaggttctaattctcaaagcaa

SEQ ID NO: 26100 - DNA, 25 bp, Saccharomyces pastorianus
cgatatcatacgctctaaccaattc

SEQ ID NO: 26101 - DNA, 25 bp, Saccharomyces pastorianus
gggtatcccgaaatctactatatct

SEQ ID NO: 26102 - DNA, 25 bp, Saccharomyces pastorianus
ggaaaattgcatcactctcagttta

SEQ ID NO: 26103 - DNA, 25 bp, Saccharomyces pastorianus
atttctcttctttgatagtgtccca

SEQ ID NO: 26104 - DNA, 25 bp, Saccharomyces pastorianus
actatatctccgaattgtccacaac

SEQ ID NO: 26105 - DNA, 25 bp, Saccharomyces pastorianus
ggcctagagaacttcattcgcatgt

SEQ ID NO: 26106 - DNA, 25 bp, Saccharomyces pastorianus
tatggttttttctacgaccgcaaga

SEQ ID NO: 26107 - DNA, 25 bp, Saccharomyces pastorianus
aaccaattcttctgcattgcttcca

SEQ ID NO: 26108 - DNA, 25 bp, Saccharomyces pastorianus
aagcacgttcttagacaggcctaga

SEQ ID NO: 26109 - DNA, 25 bp, Saccharomyces pastorianus
ggaccagattattcctcacctaaac

SEQ ID NO: 26110 - DNA, 25 bp, Saccharomyces pastorianus
agccagaactgcttacacggttgaa

SEQ ID NO: 26111 - DNA, 25 bp, Saccharomyces pastorianus
gacacggtcgcaaatccagataatg

SEQ ID NO: 26112 - DNA, 25 bp, Saccharomyces pastorianus
agccatccaatgaaggtgccccaga

SEQ ID NO: 26113 - DNA, 25 bp, Saccharomyces pastorianus
ttccgccctctgagcaatctaaaaa

SEQ ID NO: 26114 - DNA, 25 bp, Saccharomyces pastorianus
gaaaccacagaacatgccccagaag

SEQ ID NO: 26115 - DNA, 25 bp, Saccharomyces pastorianus
aatgtaaccgccgatgatgttccgc

SEQ ID NO: 26116 - DNA, 25 bp, Saccharomyces pastorianus
aaatcgcacttgagaccgtaacgga

SEQ ID NO: 26117 - DNA, 25 bp, Saccharomyces pastorianus
gaatgtcaacagtgctaccgaacca

SEQ ID NO: 26118 - DNA, 25 bp, Saccharomyces pastorianus
caactgttagtgatcgtgttaccaa

SEQ ID NO: 26119 - DNA, 25 bp, Saccharomyces pastorianus
gaagtaaacagctccgcacaagaag

SEQ ID NO: 26120 - DNA, 25 bp, Saccharomyces pastorianus
gccatcaatgaaagtactgccccac

SEQ ID NO: 26121 - DNA, 25 bp, Saccharomyces pastorianus
ggaaaccgatgtagccgccaatgta

SEQ ID NO: 26122 - DNA, 25 bp, Saccharomyces pastorianus
cagcaccatcaccagtatcattaat

SEQ ID NO: 26123 - DNA, 25 bp, Saccharomyces pastorianus
gacagcgacagcataccacgtacta

SEQ ID NO: 26124 - DNA, 25 bp, Saccharomyces pastorianus
taaaacgatcctttctaaccactat

SEQ ID NO: 26125 - DNA, 25 bp, Saccharomyces pastorianus
ccgcaggtggtttggatctcgacga

SEQ ID NO: 26126 - DNA, 25 bp, Saccharomyces pastorianus
ggatcaaagttctctcttcgatatg

SEQ ID NO: 26127 - DNA, 25 bp, Saccharomyces pastorianus
ttaggtggtagcacatcttccgcag

SEQ ID NO: 26128 - DNA, 25 bp, Saccharomyces pastorianus
tataccactgttacgtattccccat

SEQ ID NO: 26129 - DNA, 25 bp, Saccharomyces pastorianus
gtcagcgacgagtaccaatctaatt

SEQ ID NO: 26130 - DNA, 25 bp, Saccharomyces pastorianus
gaaaagtcgttacagcctacagagc

SEQ ID NO: 26131 - DNA, 25 bp, Saccharomyces pastorianus
agcgactgccgatcctaataacaaa

SEQ ID NO: 26132 - DNA, 25 bp, Saccharomyces pastorianus
gtttcttccgatagtcgcggcagca

SEQ ID NO: 26133 - DNA, 25 bp, Saccharomyces pastorianus
agatacgtctctgtctccgttttag

SEQ ID NO: 26134 - DNA, 25 bp, Saccharomyces pastorianus
agtcccaacctacagatacgtctct

SEQ ID NO: 26135 - DNA, 25 bp, Saccharomyces pastorianus
aagatcggtggttctttagctagaa

SEQ ID NO: 26136 - DNA, 25 bp, Saccharomyces pastorianus
gtctctgtctccgttttagttgata

SEQ ID NO: 26137 - DNA, 25 bp, Saccharomyces pastorianus
aggtatcatcaagccaatctccaaa

SEQ ID NO: 26138 - DNA, 25 bp, Saccharomyces pastorianus
acatgctgtcatcttagaccaagaa

SEQ ID NO: 26139 - DNA, 25 bp, Saccharomyces pastorianus
ctctgtctccgttttagttgataga

SEQ ID NO: 26140 - DNA, 25 bp, Saccharomyces pastorianus
ggaagtcccaacctacagatacgtc

SEQ ID NO: 26141 - DNA, 25 bp, Saccharomyces pastorianus
ttttgaaggaagtcccaacctacag

SEQ ID NO: 26142 - DNA, 25 bp, Saccharomyces pastorianus
gccaatctccaaacactccaagcag

SEQ ID NO: 26143 - DNA, 25 bp, Saccharomyces pastorianus
gtctccgttttagttgatagattaa

SEQ ID NO: 26144 - DNA, 25 bp, Saccharomyces pastorianus
tgcttcttaccactacccagaaatc

SEQ ID NO: 26145 - DNA, 25 bp, Saccharomyces pastorianus
tgctgttagcaccattgcttccgtc

SEQ ID NO: 26146 - DNA, 25 bp, Saccharomyces pastorianus
aagcctctttgttgaacttgttgga

SEQ ID NO: 26147 - DNA, 25 bp, Saccharomyces pastorianus
tatgacaacggccaagttttcccat

SEQ ID NO: 26148 - DNA, 25 bp, Saccharomyces pastorianus
atgttaaggttgttgatgccggtaa

SEQ ID NO: 26149 - DNA, 25 bp, Saccharomyces pastorianus
ggaaatttctccattcacttatggt

SEQ ID NO: 26150 - DNA, 25 bp, Saccharomyces pastorianus
gaagatatctgggtcactgctgtta

SEQ ID NO: 26151 - DNA, 25 bp, Saccharomyces pastorianus
gatgccggtaacagagtcggtccat

SEQ ID NO: 26152 - DNA, 25 bp, Saccharomyces pastorianus
agtcggtccatctgaagcctctttg

SEQ ID NO: 26153 - DNA, 25 bp, Saccharomyces pastorianus
aaatccagacaagtacgcttccgct

SEQ ID NO: 26154 - DNA, 25 bp, Saccharomyces pastorianus
gtcactgctgttaacaccggtatgg

SEQ ID NO: 26155 - DNA, 25 bp, Saccharomyces pastorianus
gttcgggtcgatatgttagcagcaa

SEQ ID NO: 26156 - DNA, 25 bp, Saccharomyces pastorianus
aatgaaggaactgcttacgggaagt

SEQ ID NO: 26157 - DNA, 25 bp, Saccharomyces pastorianus
aatcagttggcaacggctctatcgc

SEQ ID NO: 26158 - DNA, 25 bp, Saccharomyces pastorianus
tgaattcaacgaccacatttacggg

SEQ ID NO: 26159 - DNA, 25 bp, Saccharomyces pastorianus
gcagcaagccagatagaattaccag

SEQ ID NO: 26160 - DNA, 25 bp, Saccharomyces pastorianus
tatatcaacggtgtgggttcgggtc

SEQ ID NO: 26161 - DNA, 25 bp, Saccharomyces pastorianus
ggctctatcgctctagtttcgaaaa

SEQ ID NO: 26162 - DNA, 25 bp, Saccharomyces pastorianus
gatatgatcttctcaaagctgcgca

SEQ ID NO: 26163 - DNA, 25 bp, Saccharomyces pastorianus
gatggcatgcccatggaaatatatc

SEQ ID NO: 26164 - DNA, 25 bp, Saccharomyces pastorianus
tcaaagctgcgcatgagacagaaat

SEQ ID NO: 26165 - DNA, 25 bp, Saccharomyces pastorianus
acatttacgggttggatggcatgcc

SEQ ID NO: 26166 - DNA, 25 bp, Saccharomyces pastorianus
ctgtgtcaactactgctgtgggttt

SEQ ID NO: 26167 - DNA, 25 bp, Saccharomyces pastorianus
gccgtcttgagtgtctttggtgata

SEQ ID NO: 26168 - DNA, 25 bp, Saccharomyces pastorianus
ggataccacctcaagagctgcagtt

SEQ ID NO: 26169 - DNA, 25 bp, Saccharomyces pastorianus
gtatagtcgcaggtctccatgataa

SEQ ID NO: 26170 - DNA, 25 bp, Saccharomyces pastorianus
atatagctgctatgttcccagacgg

SEQ ID NO: 26171 - DNA, 25 bp, Saccharomyces pastorianus
atggcattatgcgttgctgcacaga

SEQ ID NO: 26172 - DNA, 25 bp, Saccharomyces pastorianus
gcccaagtcgcagaagatcctcagt

SEQ ID NO: 26173 - DNA, 25 bp, Saccharomyces pastorianus
ctgtgggttttattgcggatatctc

SEQ ID NO: 26174 - DNA, 25 bp, Saccharomyces pastorianus
gtcggtaccatcttccaattcattg

SEQ ID NO: 26175 - DNA, 25 bp, Saccharomyces pastorianus
taggtgctgatttcatcccatactt

SEQ ID NO: 26176 - DNA, 25 bp, Saccharomyces pastorianus
taagccggaggctttgttcccatac

SEQ ID NO: 26177 - DNA, 25 bp, Saccharomyces pastorianus
gacccagaagtcattgcggcgttta

SEQ ID NO: 26178 - DNA, 25 bp, Saccharomyces pastorianus
gattatctatgctgagttggaccca

SEQ ID NO: 26179 - DNA, 25 bp, Saccharomyces pastorianus
tatacgtaatgctatgttccccggc

SEQ ID NO: 26180 - DNA, 25 bp, Saccharomyces pastorianus
gaactggccatgctgagtgcacgta

SEQ ID NO: 26181 - DNA, 25 bp, Saccharomyces pastorianus
tatgcagagctcgtaccatgcgtat

SEQ ID NO: 26182 - DNA, 25 bp, Saccharomyces pastorianus
gagaagtccaccacgattgacacga

SEQ ID NO: 26183 - DNA, 25 bp, Saccharomyces pastorianus
ggccaacatcggaaagtgcaccttt

SEQ ID NO: 26184 - DNA, 25 bp, Saccharomyces pastorianus
gaccccaagggcaatatcgtatctg

SEQ ID NO: 26185 - DNA, 25 bp, Saccharomyces pastorianus
gggcctttgctatggtctatccgag

SEQ ID NO: 26186 - DNA, 25 bp, Saccharomyces pastorianus
cacgggtccattgcattggcattta

SEQ ID NO: 26187 - DNA, 25 bp, Saccharomyces pastorianus
gatgtggacattcccaacggcatat

SEQ ID NO: 26188 - DNA, 25 bp, Saccharomyces pastorianus
cttcttccggttcatttttgtcatt

SEQ ID NO: 26189 - DNA, 25 bp, Saccharomyces pastorianus
aagcgatccttggactactcaaaga

SEQ ID NO: 26190 - DNA, 25 bp, Saccharomyces pastorianus
gaatatttgcatgatccggacttag

SEQ ID NO: 26191 - DNA, 25 bp, Saccharomyces pastorianus
tgacccgattgctggtagtgcttcc

SEQ ID NO: 26192 - DNA, 25 bp, Saccharomyces pastorianus
gcttccgcggcagctcaaattagag

SEQ ID NO: 26193 - DNA, 25 bp, Saccharomyces pastorianus
acttcgcacaccctgatgagttcat

SEQ ID NO: 26194 - DNA, 25 bp, Saccharomyces pastorianus
tgaaagttcacggtcacgttccgga

SEQ ID NO: 26195 - DNA, 25 bp, Saccharomyces pastorianus
agttcatctatgacccaagcgatcc

SEQ ID NO: 26196 - DNA, 25 bp, Saccharomyces pastorianus
aaggtctcaactgcgtctgtttgaa

SEQ ID NO: 26197 - DNA, 25 bp, Saccharomyces pastorianus
gcaacaatggtcctgttcgtcctga

SEQ ID NO: 26198 - DNA, 25 bp, Saccharomyces pastorianus
agaagaactccgctgctgagcagac

SEQ ID NO: 26199 - DNA, 25 bp, Saccharomyces pastorianus
aataccaggccgaagtgtacgacga

SEQ ID NO: 26200 - DNA, 25 bp, Saccharomyces pastorianus
aggagcctcggaacacgaacatttt

SEQ ID NO: 26201 - DNA, 25 bp, Saccharomyces pastorianus
ttgggagcatcgttatggtcatcat

SEQ ID NO: 26202 - DNA, 25 bp, Saccharomyces pastorianus
gacaccgcatctatacattcttttg

SEQ ID NO: 26203 - DNA, 25 bp, Saccharomyces pastorianus
tgaaccgttttcaccgtatggagga

SEQ ID NO: 26204 - DNA, 25 bp, Saccharomyces pastorianus
ttcattattggatgtggccccagaa

SEQ ID NO: 26205 - DNA, 25 bp, Saccharomyces pastorianus
tcatatgttgcatcgtggtaccgcc

SEQ ID NO: 26206 - DNA, 25 bp, Saccharomyces pastorianus
gtaccgcccttgtttttcattattg

SEQ ID NO: 26207 - DNA, 25 bp, Saccharomyces pastorianus
ggaacaccgagtggcgttgctacaa

SEQ ID NO: 26208 - DNA, 25 bp, Saccharomyces pastorianus
taagacgccatcaccattaagcaaa

SEQ ID NO: 26209 - DNA, 25 bp, Saccharomyces pastorianus
atggttccgaacactatgcctaatc

SEQ ID NO: 26210 - DNA, 25 bp, Saccharomyces pastorianus
aagttactttgatctctccattcgt

SEQ ID NO: 26211 - DNA, 25 bp, Saccharomyces pastorianus
gaaagttctctgctgatattgtcac

SEQ ID NO: 26212 - DNA, 25 bp, Saccharomyces pastorianus
tatctaacaatctctcctcaactat

SEQ ID NO: 26213 - DNA, 25 bp, Saccharomyces pastorianus
gtccttatcaagatcgcttctactt

SEQ ID NO: 26214 - DNA, 25 bp, Saccharomyces pastorianus
gtcgtttccgtcaagagtatttaca

SEQ ID NO: 26215 - DNA, 25 bp, Saccharomyces pastorianus
gaagccggcgacaaaatctcgtaca

SEQ ID NO: 26216 - DNA, 25 bp, Saccharomyces pastorianus
tattattctcctttggccaagccgt

SEQ ID NO: 26217 - DNA, 25 bp, Saccharomyces pastorianus
gatctctccattcgtcggtagaatt

SEQ ID NO: 26218 - DNA, 25 bp, Saccharomyces pastorianus
tacagggccagcaccggtaaggaat

SEQ ID NO: 26219 - DNA, 25 bp, Saccharomyces pastorianus
gaacgaagacgccatggccaccgaa

SEQ ID NO: 26220 - DNA, 25 bp, Saccharomyces pastorianus
agacggaatccactgtaacttgact

SEQ ID NO: 26221 - DNA, 25 bp, Saccharomyces pastorianus
tattgctatccttggcttcgtacaa

SEQ ID NO: 26222 - DNA, 25 bp, Saccharomyces pastorianus
atcacaaagggtgtcgcggtttcgt

SEQ ID NO: 26223 - DNA, 25 bp, Saccharomyces pastorianus
agtcgtggctacagctattgctatc

SEQ ID NO: 26224 - DNA, 25 bp, Saccharomyces pastorianus
tgagacacccttacttgttgtacgg

SEQ ID NO: 26225 - DNA, 25 bp, Saccharomyces pastorianus
tactctgggatcttggcttctgcta

SEQ ID NO: 26226 - DNA, 25 bp, Saccharomyces pastorianus
aatttgaggaatgcggccacctgct

SEQ ID NO: 26227 - DNA, 25 bp, Saccharomyces pastorianus
gtccttggttgtgcgtcttattaca

SEQ ID NO: 26228 - DNA, 25 bp, Saccharomyces pastorianus
ttatcacccgttctatccaatttga

SEQ ID NO: 26229 - DNA, 25 bp, Saccharomyces pastorianus
gcggtttcgtcaataggtctctact

SEQ ID NO: 26230 - DNA, 25 bp, Saccharomyces pastorianus
aagcctgtcgtttccgaactaagcg

SEQ ID NO: 26231 - DNA, 25 bp, Saccharomyces pastorianus
gttgtacggtatgcttgctgctcca

SEQ ID NO: 26232 - DNA, 25 bp, Saccharomyces pastorianus
gaaaaaatcgcaagcctcgcgctac

SEQ ID NO: 26233 - DNA, 25 bp, Saccharomyces pastorianus
aggcaaccaccttactgttcagggt

SEQ ID NO: 26234 - DNA, 25 bp, Saccharomyces pastorianus
agaccttctgcaaagttcactgcgc

SEQ ID NO: 26235 - DNA, 25 bp, Saccharomyces pastorianus
gtgacccacgtttagaacagtcgtt

SEQ ID NO: 26236 - DNA, 25 bp, Saccharomyces pastorianus
gttggttctccaggtgcaggcaacc

SEQ ID NO: 26237 - DNA, 25 bp, Saccharomyces pastorianus
aatggtcgatgctgcttcatcattc

SEQ ID NO: 26238 - DNA, 25 bp, Saccharomyces pastorianus
attcgtccttgggttgagaccttct

SEQ ID NO: 26239 - DNA, 25 bp, Saccharomyces pastorianus
agagacaatttaccaggcccattcg

SEQ ID NO: 26240 - DNA, 25 bp, Saccharomyces pastorianus
gtcgttgaacagatggtccggcacc

SEQ ID NO: 26241 - DNA, 25 bp, Saccharomyces pastorianus
tacagcgtactgatccacatagtca

SEQ ID NO: 26242 - DNA, 25 bp, Saccharomyces pastorianus
atcattcgtcttacctatttccata

SEQ ID NO: 26243 - DNA, 25 bp, Saccharomyces pastorianus
gataaatttttccaacccatctggg

SEQ ID NO: 26244 - DNA, 25 bp, Saccharomyces pastorianus
actggaaccatctactttcgttgga

SEQ ID NO: 26245 - DNA, 25 bp, Saccharomyces pastorianus
agatgttaccaacgccttgaaacct

SEQ ID NO: 26246 - DNA, 25 bp, Saccharomyces pastorianus
aaattggttcctctgctatggccta

SEQ ID NO: 26247 - DNA, 25 bp, Saccharomyces pastorianus
atttcatctggtttagtcgtgtatc

SEQ ID NO: 26248 - DNA, 25 bp, Saccharomyces pastorianus
tactttcgttggaagagctccacaa

SEQ ID NO: 26249 - DNA, 25 bp, Saccharomyces pastorianus
gctagacatctaggttctttattca

SEQ ID NO: 26250 - DNA, 25 bp, Saccharomyces pastorianus
attagagtgctttcccatcaagcag

SEQ ID NO: 26251 - DNA, 25 bp, Saccharomyces pastorianus
gagtttgctctttagctagacatct

SEQ ID NO: 26252 - DNA, 25 bp, Saccharomyces pastorianus
aatgcgttgcgaaagagtttgctct

SEQ ID NO: 26253 - DNA, 25 bp, Saccharomyces pastorianus
ttcccatcaagcagctgcagtggta

SEQ ID NO: 26254 - DNA, 25 bp, Saccharomyces pastorianus
gcaccatacaccattccaaaacaga

SEQ ID NO: 26255 - DNA, 25 bp, Saccharomyces pastorianus
agaggtcttctagctcggacaacat

SEQ ID NO: 26256 - DNA, 25 bp, Saccharomyces pastorianus
aacagagatatccttggtttcacaa

SEQ ID NO: 26257 - DNA, 25 bp, Saccharomyces pastorianus
acttcctctaccttacaagttgatg

SEQ ID NO: 26258 - DNA, 25 bp, Saccharomyces pastorianus
gaagtacttccgtaattgagagtca

SEQ ID NO: 26259 - DNA, 25 bp, Saccharomyces pastorianus
gccaactgggttattatcttttatt

SEQ ID NO: 26260 - DNA, 25 bp, Saccharomyces pastorianus
gaaatccattgctgcactacaaact

SEQ ID NO: 26261 - DNA, 25 bp, Saccharomyces pastorianus
gttacatacgctttgagaggtcttc

SEQ ID NO: 26262 - DNA, 25 bp, Saccharomyces pastorianus
atttctccatttgacggcaactcaa

SEQ ID NO: 26263 - DNA, 25 bp, Saccharomyces pastorianus
gagtcagtatcctctttactttact

SEQ ID NO: 26264 - DNA, 25 bp, Saccharomyces pastorianus
gagcaatgcattactttaacgccga

SEQ ID NO: 26265 - DNA, 25 bp, Saccharomyces pastorianus
gtcggtaattacgttcatcaggttt

SEQ ID NO: 26266 - DNA, 25 bp, Saccharomyces pastorianus
gccctcgtgggtacttataaagaag

SEQ ID NO: 26267 - DNA, 25 bp, Saccharomyces pastorianus
atggcgtttttccacattccattac

SEQ ID NO: 26268 - DNA, 25 bp, Saccharomyces pastorianus
gatgtcgtcagttgtgggcatgatc

SEQ ID NO: 26269 - DNA, 25 bp, Saccharomyces pastorianus
gaaggcgtcactgcacctaaatata

SEQ ID NO: 26270 - DNA, 25 bp, Saccharomyces pastorianus
tggtagccccaaagaaattttcgat

SEQ ID NO: 26271 - DNA, 25 bp, Saccharomyces pastorianus
gacgattccacaccaagtcaaattt

SEQ ID NO: 26272 - DNA, 25 bp, Saccharomyces pastorianus
atattcaatcgagtacacaccccgg

SEQ ID NO: 26273 - DNA, 25 bp, Saccharomyces pastorianus
aactctgaagggatggctactttgc

SEQ ID NO: 26274 - DNA, 25 bp, Saccharomyces pastorianus
tattgcctacaagacgattccacac

SEQ ID NO: 26275 - DNA, 25 bp, Saccharomyces pastorianus
ggtgagtacgctttattttttggat

SEQ ID NO: 26276 - DNA, 25 bp, Saccharomyces pastorianus
tacaacagagttggagcggagtttg

SEQ ID NO: 26277 - DNA, 25 bp, Saccharomyces pastorianus
gcaggagatgctggtggcctattaa

SEQ ID NO: 26278 - DNA, 25 bp, Saccharomyces pastorianus
cttgaacaactacgcaagccccatt

SEQ ID NO: 26279 - DNA, 25 bp, Saccharomyces pastorianus
aagtgatagtgataacagtcatact

SEQ ID NO: 26280 - DNA, 25 bp, Saccharomyces pastorianus
acaaagctgatgaaccttgaacaac

SEQ ID NO: 26281 - DNA, 25 bp, Saccharomyces pastorianus
acagacctggattaagtgaagaaga

SEQ ID NO: 26282 - DNA, 25 bp, Saccharomyces pastorianus
tgggcgataatccaaagatcgtttt

SEQ ID NO: 26283 - DNA, 25 bp, Saccharomyces pastorianus
gaagcggcggtcacagacctggatt

SEQ ID NO: 26284 - DNA, 25 bp, Saccharomyces pastorianus
ggcctattaagaagcggcggtcaca

SEQ ID NO: 26285 - DNA, 25 bp, Saccharomyces pastorianus
aagccccattgcataaaacccaatc

SEQ ID NO: 26286 - DNA, 25 bp, Saccharomyces pastorianus
aacccaatccaagagtttcagcagg

SEQ ID NO: 26287 - DNA, 25 bp, Saccharomyces pastorianus
gttgatgtggattcgatcttatcta

SEQ ID NO: 26288 - DNA, 25 bp, Saccharomyces pastorianus
ggttgcattggtttctaataagcga

SEQ ID NO: 26289 - DNA, 25 bp, Saccharomyces pastorianus
gactgcacggagacggtaactttga

SEQ ID NO: 26290 - DNA, 25 bp, Saccharomyces pastorianus
tggctgtacaatgcaacattccctc

SEQ ID NO: 26291 - DNA, 25 bp, Saccharomyces pastorianus
gacgtaagagttttgcggctcgcga

SEQ ID NO: 26292 - DNA, 25 bp, Saccharomyces pastorianus
acattccctcttgttcaattgttga

SEQ ID NO: 26293 - DNA, 25 bp, Saccharomyces pastorianus
ttggattttcttcaacagagacgta

SEQ ID NO: 26294 - DNA, 25 bp, Saccharomyces pastorianus
ggtaaatattgcgaagctgcctaaa

SEQ ID NO: 26295 - DNA, 25 bp, Saccharomyces pastorianus
aaaaggtggtgttctgactgcacgg

SEQ ID NO: 26296 - DNA, 25 bp, Saccharomyces pastorianus
gacgatcctagctttactaacttga

SEQ ID NO: 26297 - DNA, 25 bp, Saccharomyces pastorianus
gcggctcgcgaatccttgaagttca

SEQ ID NO: 26298 - DNA, 25 bp, Saccharomyces pastorianus
atgtccgcttttgttactaaggctg

SEQ ID NO: 26299 - DNA, 25 bp, Saccharomyces pastorianus
aaagctcacccatacttccaattat

SEQ ID NO: 26300 - DNA, 25 bp, Saccharomyces pastorianus
gtagaaacttaccaaccattgttgt

SEQ ID NO: 26301 - DNA, 25 bp, Saccharomyces pastorianus
gcatttcaaaaagttgtcggtagta

SEQ ID NO: 26302 - DNA, 25 bp, Saccharomyces pastorianus
aattatccgcaagctggtgtcctga

SEQ ID NO: 26303 - DNA, 25 bp, Saccharomyces pastorianus
gaaccgagagccaattgcacagatt

SEQ ID NO: 26304 - DNA, 25 bp, Saccharomyces pastorianus
ctgcgtatacgcaaactctgtttgg

SEQ ID NO: 26305 - DNA, 25 bp, Saccharomyces pastorianus
tggtgtcctgactgcgtatacgcaa

SEQ ID NO: 26306 - DNA, 25 bp, Saccharomyces pastorianus
ggacgaagtgtttgtttttgacatc

SEQ ID NO: 26307 - DNA, 25 bp, Saccharomyces pastorianus
tttgacatcggttctctgccaagaa

SEQ ID NO: 26308 - DNA, 25 bp, Saccharomyces pastorianus
aactctgtttgggacaggttcaacg

SEQ ID NO: 26309 - DNA, 25 bp, Saccharomyces pastorianus
gaaatcaaatctcctgccgacagag

SEQ ID NO: 26310 - DNA, 25 bp, Saccharomyces pastorianus
agtgctcatctatggaatcctcttc

SEQ ID NO: 26311 - DNA, 25 bp, Saccharomyces pastorianus
acaactccccatagtgaggctgtga

SEQ ID NO: 26312 - DNA, 25 bp, Saccharomyces pastorianus
agttcagaggaccagcataccctac

SEQ ID NO: 26313 - DNA, 25 bp, Saccharomyces pastorianus
attgacgagtgtttggacctgttcc

SEQ ID NO: 26314 - DNA, 25 bp, Saccharomyces pastorianus
gcgctaactccttcttcaagaattt

SEQ ID NO: 26315 - DNA, 25 bp, Saccharomyces pastorianus
ttagataacttcaccctacctggta

SEQ ID NO: 26316 - DNA, 25 bp, Saccharomyces pastorianus
aggtgttgactaacgtggccttaga

SEQ ID NO: 26317 - DNA, 25 bp, Saccharomyces pastorianus
aacagttccgtcaagagttgtcagt

SEQ ID NO: 26318 - DNA, 25 bp, Saccharomyces pastorianus
taaagacctacatccaacagttccg

SEQ ID NO: 26319 - DNA, 25 bp, Saccharomyces pastorianus
tggtacacccggttttcctctgaat

SEQ ID NO: 26320 - DNA, 25 bp, Saccharomyces pastorianus
gaatccttattagatcccgccgata

SEQ ID NO: 26321 - DNA, 25 bp, Saccharomyces pastorianus
acagaattcgcctttttcgtcaata

SEQ ID NO: 26322 - DNA, 25 bp, Saccharomyces pastorianus
gaaaccaatggcaatttaccgtgta

SEQ ID NO: 26323 - DNA, 25 bp, Saccharomyces pastorianus
cgcagaatgctcacgaatccttatt

SEQ ID NO: 26324 - DNA, 25 bp, Saccharomyces pastorianus
ttaccgaggtcacttttgattccga

SEQ ID NO: 26325 - DNA, 25 bp, Saccharomyces pastorianus
cagaaattcgccatttggtacccgt

SEQ ID NO: 26326 - DNA, 25 bp, Saccharomyces pastorianus
gccgatacatccttagagtttgcgc

SEQ ID NO: 26327 - DNA, 25 bp, Saccharomyces pastorianus
gccagtctccatctcatttttgaag

SEQ ID NO: 26328 - DNA, 25 bp, Saccharomyces pastorianus
aatcgtgactgcacacagttcgtca

SEQ ID NO: 26329 - DNA, 25 bp, Saccharomyces pastorianus
tccgttgtgtccttgccgataaaat

SEQ ID NO: 26330 - DNA, 25 bp, Saccharomyces pastorianus
cgtacattctcgctttcgatagtaa

SEQ ID NO: 26331 - DNA, 25 bp, Saccharomyces pastorianus
gtacatcctgatttgactcaagaaa

SEQ ID NO: 26332 - DNA, 25 bp, Saccharomyces pastorianus
gactccaccatctcgagcgaaatag

SEQ ID NO: 26333 - DNA, 25 bp, Saccharomyces pastorianus
gatgatgcaatgtcagtcttcttca

SEQ ID NO: 26334 - DNA, 25 bp, Saccharomyces pastorianus
atactcatcaactatcagactccac

SEQ ID NO: 26335 - DNA, 25 bp, Saccharomyces pastorianus
gacttcgttccaagagtacatcctg

SEQ ID NO: 26336 - DNA, 25 bp, Saccharomyces pastorianus
tagtggacgaagcttagcctcaccc

SEQ ID NO: 26337 - DNA, 25 bp, Saccharomyces pastorianus
acgttcccgtatgtagtgcattttg

SEQ ID NO: 26338 - DNA, 25 bp, Saccharomyces pastorianus
tcagtcttcttcatccatcagggaa

SEQ ID NO: 26339 - DNA, 25 bp, Saccharomyces pastorianus
caatttttggataacgatgctggac

SEQ ID NO: 26340 - DNA, 25 bp, Saccharomyces pastorianus
taacatgccattcaattccctcaat

SEQ ID NO: 26341 - DNA, 25 bp, Saccharomyces pastorianus
gttactagacatacacgttcccgta

SEQ ID NO: 26342 - DNA, 25 bp, Saccharomyces pastorianus
gaggtcaaatcggtacctacccaat

SEQ ID NO: 26343 - DNA, 25 bp, Saccharomyces pastorianus
aagacctggatcgagatctccggta

SEQ ID NO: 26344 - DNA, 25 bp, Saccharomyces pastorianus
ggttcgtgtgcagtcttctccaaga

SEQ ID NO: 26345 - DNA, 25 bp, Saccharomyces pastorianus
agaccgttgtctacatcacttttgt

SEQ ID NO: 26346 - DNA, 25 bp, Saccharomyces pastorianus
tctcgcaaatcctcttccaaaagta

SEQ ID NO: 26347 - DNA, 25 bp, Saccharomyces pastorianus
cttgacctccaacattttcttgatc

SEQ ID NO: 26348 - DNA, 25 bp, Saccharomyces pastorianus
gttggcatactacatccagccattg

SEQ ID NO: 26349 - DNA, 25 bp, Saccharomyces pastorianus
caatcaagctgttctacacttccaa

SEQ ID NO: 26350 - DNA, 25 bp, Saccharomyces pastorianus
aacgcgttcattcgtctgatcggtg

SEQ ID NO: 26351 - DNA, 25 bp, Saccharomyces pastorianus
agccattgatgtccgtatccgatgc

SEQ ID NO: 26352 - DNA, 25 bp, Saccharomyces pastorianus
atcatgttgcaaagcgccttgacct

SEQ ID NO: 26353 - DNA, 25 bp, Saccharomyces pastorianus
aagggacgacctggttcagcagttc

SEQ ID NO: 26354 - DNA, 25 bp, Saccharomyces pastorianus
agtcaagttcctgatcacgtgcttc

SEQ ID NO: 26355 - DNA, 25 bp, Saccharomyces pastorianus
atggatcgaacatcagcccgtggac

SEQ ID NO: 26356 - DNA, 25 bp, Saccharomyces pastorianus
ggaggccaccactcaatggatcgaa

SEQ ID NO: 26357 - DNA, 25 bp, Saccharomyces pastorianus
aactctctgctgcactctgtaagaa

SEQ ID NO: 26358 - DNA, 25 bp, Saccharomyces pastorianus
atcgagcagtccaagctgttcttta

SEQ ID NO: 26359 - DNA, 25 bp, Saccharomyces pastorianus
gaggctcactatccagagtcgctgg

SEQ ID NO: 26360 - DNA, 25 bp, Saccharomyces pastorianus
tcgcgtccaaaatcgtgttcaccaa

SEQ ID NO: 26361 - DNA, 25 bp, Saccharomyces pastorianus
aggataccgagacccgcgctaagat

SEQ ID NO: 26362 - DNA, 25 bp, Saccharomyces pastorianus
attggacccgtacatcagatcgaga

SEQ ID NO: 26363 - DNA, 25 bp, Saccharomyces pastorianus
agaagttttctctgttggtcatcga

SEQ ID NO: 26364 - DNA, 25 bp, Saccharomyces pastorianus
gatgtacaacgttacttgaagtcaa

SEQ ID NO: 26365 - DNA, 25 bp, Saccharomyces pastorianus
agtggccagcagttgagcgcgctac

SEQ ID NO: 26366 - DNA, 25 bp, Saccharomyces pastorianus
gcaaaaggttcttgctttgactaaa

SEQ ID NO: 26367 - DNA, 25 bp, Saccharomyces pastorianus
aacgatgcggaggtaaaacttcaca

SEQ ID NO: 26368 - DNA, 25 bp, Saccharomyces pastorianus
ggacgaatccaagattgtcggtatt

SEQ ID NO: 26369 - DNA, 25 bp, Saccharomyces pastorianus
tggttaacagcatctaccctgtggt

SEQ ID NO: 26370 - DNA, 25 bp, Saccharomyces pastorianus
agagtacaagacaccaacagatctg

SEQ ID NO: 26371 - DNA, 25 bp, Saccharomyces pastorianus
gcgcgctactgaatcccaatttaag

SEQ ID NO: 26372 - DNA, 25 bp, Saccharomyces pastorianus
tgtggtcccatcaatttcagaagag

SEQ ID NO: 26373 - DNA, 25 bp, Saccharomyces pastorianus
atggaaccaataccagtggccagca

SEQ ID NO: 26374 - DNA, 25 bp, Saccharomyces pastorianus
tgtcggtattgaacgttggttgcaa

SEQ ID NO: 26375 - DNA, 25 bp, Saccharomyces pastorianus
gattggtaccactctaatagtcaaa

SEQ ID NO: 26376 - DNA, 25 bp, Saccharomyces pastorianus
tgctgatatcgacagttccggtgtt

SEQ ID NO: 26377 - DNA, 25 bp, Saccharomyces pastorianus
gaaaagtccttttcccaaatggcat

SEQ ID NO: 26378 - DNA, 25 bp, Saccharomyces pastorianus
aagggaacatgctttgacgcagaca

SEQ ID NO: 26379 - DNA, 25 bp, Saccharomyces pastorianus
ggctacatggaaacctatgcgttct

SEQ ID NO: 26380 - DNA, 25 bp, Saccharomyces pastorianus
gacgaggcactaaacaggttgcata

SEQ ID NO: 26381 - DNA, 25 bp, Saccharomyces pastorianus
gaaaagcttagggttgtcacaggaa

SEQ ID NO: 26382 - DNA, 25 bp, Saccharomyces pastorianus
aattctctgggaacctttctttcat

SEQ ID NO: 26383 - DNA, 25 bp, Saccharomyces pastorianus
ttccgtgcatccttgaaagttcgaa

SEQ ID NO: 26384 - DNA, 25 bp, Saccharomyces pastorianus
gacgcagacatggatttccgtgcat

SEQ ID NO: 26385 - DNA, 25 bp, Saccharomyces pastorianus
aattccctaaaagctcgtgaccaga

SEQ ID NO: 26386 - DNA, 25 bp, Saccharomyces pastorianus
atctcccaatgatagtagttcggta

SEQ ID NO: 26387 - DNA, 25 bp, Saccharomyces pastorianus
gccttttcggtatactgatgatcat

SEQ ID NO: 26388 - DNA, 25 bp, Saccharomyces pastorianus
caatgtcccctatgaatgaggcaat

SEQ ID NO: 26389 - DNA, 25 bp, Saccharomyces pastorianus
aagaaatagtctctccaatgtcccc

SEQ ID NO: 26390 - DNA, 25 bp, Saccharomyces pastorianus
aagagtacccttctgatatgataaa

SEQ ID NO: 26391 - DNA, 25 bp, Saccharomyces pastorianus
gataacactaacttctgcgattcta

SEQ ID NO: 26392 - DNA, 25 bp, Saccharomyces pastorianus
gttgttcgaatcaccagttttcaca

SEQ ID NO: 26393 - DNA, 25 bp, Saccharomyces pastorianus
agatatctcacaaaggtccgtaagc

SEQ ID NO: 26394 - DNA, 25 bp, Saccharomyces pastorianus
gggctaataacaaatcacttctact

SEQ ID NO: 26395 - DNA, 25 bp, Saccharomyces pastorianus
gatcataccgcaatcgaaggcattt

SEQ ID NO: 26396 - DNA, 25 bp, Saccharomyces pastorianus
gatcatttcaaagccacttctgatg

SEQ ID NO: 26397 - DNA, 25 bp, Saccharomyces pastorianus
attatactactgtttccattgacga

SEQ ID NO: 26398 - DNA, 25 bp, Saccharomyces pastorianus
aaatacgcagatccgccgtgatatc

SEQ ID NO: 26399 - DNA, 25 bp, Saccharomyces pastorianus
agcagaagaactgttaccgccgccg

SEQ ID NO: 26400 - DNA, 25 bp, Saccharomyces pastorianus
ataccagagccttctacggatcatg

SEQ ID NO: 26401 - DNA, 25 bp, Saccharomyces pastorianus
gcacatgagttctaagcgccattgt

SEQ ID NO: 26402 - DNA, 25 bp, Saccharomyces pastorianus
gaggagcgtcaattgttcgccccat

SEQ ID NO: 26403 - DNA, 25 bp, Saccharomyces pastorianus
tatgttgtaactttcacggctctgg

SEQ ID NO: 26404 - DNA, 25 bp, Saccharomyces pastorianus
agcgccattgtaggctaccgtacga

SEQ ID NO: 26405 - DNA, 25 bp, Saccharomyces pastorianus
gggcgcaagactaggtcaccgtgca

SEQ ID NO: 26406 - DNA, 25 bp, Saccharomyces pastorianus
gactcagtgcggtacagcaggcata

SEQ ID NO: 26407 - DNA, 25 bp, Saccharomyces pastorianus
accgccgccgacaggaggatgatta

SEQ ID NO: 26408 - DNA, 25 bp, Saccharomyces pastorianus
ctgttcttcccacattggtttaatc

SEQ ID NO: 26409 - DNA, 25 bp, Saccharomyces pastorianus
tctgttcttcccacattggtttaat

SEQ ID NO: 26410 - DNA, 25 bp, Saccharomyces pastorianus
tcccacattggtttaatcagaaagt

SEQ ID NO: 26411 - DNA, 25 bp, Saccharomyces pastorianus
gtgtctgttcttcccacattggttt

SEQ ID NO: 26412 - DNA, 25 bp, Saccharomyces pastorianus
gtcgtgtctgttcttcccacattgg

SEQ ID NO: 26413 - DNA, 25 bp, Saccharomyces pastorianus
ccacattggtttaatcagaaagtac

SEQ ID NO: 26414 - DNA, 25 bp, Saccharomyces pastorianus
tcgtgtctgttcttcccacattggt

SEQ ID NO: 26415 - DNA, 25 bp, Saccharomyces pastorianus
attggtttaatcagaaagtacgact

SEQ ID NO: 26416 - DNA, 25 bp, Saccharomyces pastorianus
gttcttcccacattggtttaatcag

SEQ ID NO: 26417 - DNA, 25 bp, Saccharomyces pastorianus
gtctgttcttcccacattggtttaa

SEQ ID NO: 26418 - DNA, 25 bp, Saccharomyces pastorianus
tcttcccacattggtttaatcagaa

SEQ ID NO: 26419 - DNA, 25 bp, Saccharomyces pastorianus
agcaaagcttcatcctctagcaagg

SEQ ID NO: 26420 - DNA, 25 bp, Saccharomyces pastorianus
gaaaactccgccatcaagaagtgtt

SEQ ID NO: 26421 - DNA, 25 bp, Saccharomyces pastorianus
actgctttctcatcttattccattg

SEQ ID NO: 26422 - DNA, 25 bp, Saccharomyces pastorianus
aacaacgatgccgatgctgcttaca

SEQ ID NO: 26423 - DNA, 25 bp, Saccharomyces pastorianus
ttctccgaaggttctggtaacgtct

SEQ ID NO: 26424 - DNA, 25 bp, Saccharomyces pastorianus
acgaagttttagcaactcctccagc

SEQ ID NO: 26425 - DNA, 25 bp, Saccharomyces pastorianus
caagcctcttctaccgaacaagttt

SEQ ID NO: 26426 - DNA, 25 bp, Saccharomyces pastorianus
ctgtttgttggcttgtgttgctcaa

SEQ ID NO: 26427 - DNA, 25 bp, Saccharomyces pastorianus
tttggatgactctagcagcagtgct

SEQ ID NO: 26428 - DNA, 25 bp, Saccharomyces pastorianus
attccattgtgtctaaggtcccagt

SEQ ID NO: 26429 - DNA, 25 bp, Saccharomyces pastorianus
tacaccgctttcaagagctcttgtt

SEQ ID NO: 26430 - DNA, 25 bp, Saccharomyces pastorianus
gaatgctgtgaaaagcgcccttgta

SEQ ID NO: 26431 - DNA, 25 bp, Saccharomyces pastorianus
ggctttatattttcctcatctagtt

SEQ ID NO: 26432 - DNA, 25 bp, Saccharomyces pastorianus
atgctgatgctcgtttgggtctaaa

SEQ ID NO: 26433 - DNA, 25 bp, Saccharomyces pastorianus
tggctacgtctttttggtggaccaa

SEQ ID NO: 26434 - DNA, 25 bp, Saccharomyces pastorianus
tggcgtcagccgttttatttcgagt

SEQ ID NO: 26435 - DNA, 25 bp, Saccharomyces pastorianus
aacacttgctcgttggactaatcgt

SEQ ID NO: 26436 - DNA, 25 bp, Saccharomyces pastorianus
gcaagtccgggctttacgaagtaca

SEQ ID NO: 26437 - DNA, 25 bp, Saccharomyces pastorianus
gagctcaatggccatttcacatcag

SEQ ID NO: 26438 - DNA, 25 bp, Saccharomyces pastorianus
gactaatcgtattccaaactggcgt

SEQ ID NO: 26439 - DNA, 25 bp, Saccharomyces pastorianus
tcatctagttggtacttccgtggat

SEQ ID NO: 26440 - DNA, 25 bp, Saccharomyces pastorianus
gaaaatgttcttggcccctatttca

SEQ ID NO: 26441 - DNA, 25 bp, Saccharomyces pastorianus
gatttgctatcccatttattgcctg

SEQ ID NO: 26442 - DNA, 25 bp, Saccharomyces pastorianus
acaaatgatcagaaccacagccaag

SEQ ID NO: 26443 - DNA, 25 bp, Saccharomyces pastorianus
aaagacaccttacgctctttctcat

SEQ ID NO: 26444 - DNA, 25 bp, Saccharomyces pastorianus
tgactagacccattatcatgaaaag

SEQ ID NO: 26445 - DNA, 25 bp, Saccharomyces pastorianus
tagcaatattatgactagacccatt

SEQ ID NO: 26446 - DNA, 25 bp, Saccharomyces pastorianus
agatcagtacatttcaaggacggtg

SEQ ID NO: 26447 - DNA, 25 bp, Saccharomyces pastorianus
cttacgctctttctcattttggatt

SEQ ID NO: 26448 - DNA, 25 bp, Saccharomyces pastorianus
gacggtgtctatgagaacattccat

SEQ ID NO: 26449 - DNA, 25 bp, Saccharomyces pastorianus
ctcattttggatttttcgctgttgg

SEQ ID NO: 26450 - DNA, 25 bp, Saccharomyces pastorianus
ttcgctgttggatttgctatcccat

SEQ ID NO: 26451 - DNA, 25 bp, Saccharomyces pastorianus
cacagccaagagaactagcaatatt

SEQ ID NO: 26452 - DNA, 25 bp, Saccharomyces pastorianus
ttaggattcttcaccagcaaaactg

SEQ ID NO: 26453 - DNA, 25 bp, Saccharomyces pastorianus
agagcccaaaatttctcagacggaa

SEQ ID NO: 26454 - DNA, 25 bp, Saccharomyces pastorianus
aagcagatttgcataccgctccaag

SEQ ID NO: 26455 - DNA, 25 bp, Saccharomyces pastorianus
gatattgcgcttgtagtgttcctag

SEQ ID NO: 26456 - DNA, 25 bp, Saccharomyces pastorianus
ggctcaatacggtgcctttggaaga

SEQ ID NO: 26457 - DNA, 25 bp, Saccharomyces pastorianus
atagacagctttaagggaacctctc

SEQ ID NO: 26458 - DNA, 25 bp, Saccharomyces pastorianus
gttcctaggcggtgtaacaatgggt

SEQ ID NO: 26459 - DNA, 25 bp, Saccharomyces pastorianus
gaagctacctttgcttatagtggtg

SEQ ID NO: 26460 - DNA, 25 bp, Saccharomyces pastorianus
cttctcaacaacctttcattctatc

SEQ ID NO: 26461 - DNA, 25 bp, Saccharomyces pastorianus
ggaacctctcgtgccgctgaagata

SEQ ID NO: 26462 - DNA, 25 bp, Saccharomyces pastorianus
taagtggatccctgaaaccgtttct

SEQ ID NO: 26463 - DNA, 25 bp, Saccharomyces pastorianus
gaaattgatgccttgtctcctgata

SEQ ID NO: 26464 - DNA, 25 bp, Saccharomyces pastorianus
aagggtgttgtcattgttgcggcaa

SEQ ID NO: 26465 - DNA, 25 bp, Saccharomyces pastorianus
atctgcaagagctggcatgtcgcac

SEQ ID NO: 26466 - DNA, 25 bp, Saccharomyces pastorianus
atctggactgtctgctatcatggaa

SEQ ID NO: 26467 - DNA, 25 bp, Saccharomyces pastorianus
cgctctgcagcacctagtattattt

SEQ ID NO: 26468 - DNA, 25 bp, Saccharomyces pastorianus
agacggagggtctacatctgcggct

SEQ ID NO: 26469 - DNA, 25 bp, Saccharomyces pastorianus
gaagtcgtattgctctgccaagaat

SEQ ID NO: 26470 - DNA, 25 bp, Saccharomyces pastorianus
ccaccggacgtaaatgctcgtttag

SEQ ID NO: 26471 - DNA, 25 bp, Saccharomyces pastorianus
gacacatttatgttggcccaccgga

SEQ ID NO: 26472 - DNA, 25 bp, Saccharomyces pastorianus
agattctgctcttttaagacctggc

SEQ ID NO: 26473 - DNA, 25 bp, Saccharomyces pastorianus
acatctgcggctagtcaagtcttga

SEQ ID NO: 26474 - DNA, 25 bp, Saccharomyces pastorianus
atgaaagttcgtccaacacgtccaa

SEQ ID NO: 26475 - DNA, 25 bp, Saccharomyces pastorianus
aagttggctattctcgacagtgctt

SEQ ID NO: 26476 - DNA, 25 bp, Saccharomyces pastorianus
atacttcatctttatcgcctactag

SEQ ID NO: 26477 - DNA, 25 bp, Saccharomyces pastorianus
tttaacgctatacaactccttcttt

SEQ ID NO: 26478 - DNA, 25 bp, Saccharomyces pastorianus
aagtctatgcccaatatctctgaag

SEQ ID NO: 26479 - DNA, 25 bp, Saccharomyces pastorianus
ggtgcctctggtataacccgagata

SEQ ID NO: 26480 - DNA, 25 bp, Saccharomyces pastorianus
aatgacctaccgacttctaaactgg

SEQ ID NO: 26481 - DNA, 25 bp, Saccharomyces pastorianus
aaggcggctggcacgcggatctaaa

SEQ ID NO: 26482 - DNA, 25 bp, Saccharomyces pastorianus
gacagtgcttctcctttgagtcaaa

SEQ ID NO: 26483 - DNA, 25 bp, Saccharomyces pastorianus
gaatgggttttcttcatcgtcggat

SEQ ID NO: 26484 - DNA, 25 bp, Saccharomyces pastorianus
caggttcaaagagcggttcctccaa

SEQ ID NO: 26485 - DNA, 25 bp, Saccharomyces pastorianus
cccggtccagttttgaggagtccag

SEQ ID NO: 26486 - DNA, 25 bp, Saccharomyces pastorianus
atgcatgctatttttcctaacagga

SEQ ID NO: 26487 - DNA, 25 bp, Saccharomyces pastorianus
atgtcatcggcatttctgttttcca

SEQ ID NO: 26488 - DNA, 25 bp, Saccharomyces pastorianus
cactgatctgcctcaaacaacggat

SEQ ID NO: 26489 - DNA, 25 bp, Saccharomyces pastorianus
aaccaatccctatgcgtgacaatat

SEQ ID NO: 26490 - DNA, 25 bp, Saccharomyces pastorianus
gaaattgaacagctgggcccatctc

SEQ ID NO: 26491 - DNA, 25 bp, Saccharomyces pastorianus
ggatgcactgcgtttgtatttgttc

SEQ ID NO: 26492 - DNA, 25 bp, Saccharomyces pastorianus
gtagacgattcattgtcaccccaag

SEQ ID NO: 26493 - DNA, 25 bp, Saccharomyces pastorianus
gagtggagccactttcagaatgaat

SEQ ID NO: 26494 - DNA, 25 bp, Saccharomyces pastorianus
aagatatttcatacctctaggccta

SEQ ID NO: 26495 - DNA, 25 bp, Saccharomyces pastorianus
ctaggcctatagtctgtctcacagt

SEQ ID NO: 26496 - DNA, 25 bp, Saccharomyces pastorianus
gttgacaagtctaaacctcctgctt

SEQ ID NO: 26497 - DNA, 25 bp, Saccharomyces pastorianus
caccagcttgtgttgcttatttcac

SEQ ID NO: 26498 - DNA, 25 bp, Saccharomyces pastorianus
gcgttaccggagcttgactatttat

SEQ ID NO: 26499 - DNA, 25 bp, Saccharomyces pastorianus
atgtctccaggatgtcatacccaag

SEQ ID NO: 26500 - DNA, 25 bp, Saccharomyces pastorianus
tatgccttcgaagtttacacccgta

SEQ ID NO: 26501 - DNA, 25 bp, Saccharomyces pastorianus
agtttaccagagtcattatgccttc

SEQ ID NO: 26502 - DNA, 25 bp, Saccharomyces pastorianus
gacgcttctggccaaaaatcgcact

SEQ ID NO: 26503 - DNA, 25 bp, Saccharomyces pastorianus
aagatcctttggatgtccagctgga

SEQ ID NO: 26504 - DNA, 25 bp, Saccharomyces pastorianus
gaattgccagaaacgcgttaccgga

SEQ ID NO: 26505 - DNA, 25 bp, Saccharomyces pastorianus
agctgtattccgaagatctccttaa

SEQ ID NO: 26506 - DNA, 25 bp, Saccharomyces pastorianus
ttatcccagatcacttttgagcttt

SEQ ID NO: 26507 - DNA, 25 bp, Saccharomyces pastorianus
tggtggtcgtcgcacaatggcttac

SEQ ID NO: 26508 - DNA, 25 bp, Saccharomyces pastorianus
ttcttgtatcggttgttttgccctg

SEQ ID NO: 26509 - DNA, 25 bp, Saccharomyces pastorianus
ggaaaacaaccttgatcgctctaca

SEQ ID NO: 26510 - DNA, 25 bp, Saccharomyces pastorianus
agagtaaccattttcgtcctacaat

SEQ ID NO: 26511 - DNA, 25 bp, Saccharomyces pastorianus
atattctgctacgaacctcttggtt

SEQ ID NO: 26512 - DNA, 25 bp, Saccharomyces pastorianus
gtaccccagctttttggatcatatg

SEQ ID NO: 26513 - DNA, 25 bp, Saccharomyces pastorianus
gaatcggctcaaagcactgttagtt

SEQ ID NO: 26514 - DNA, 25 bp, Saccharomyces pastorianus
taactcccgtagaattgtaccccag

SEQ ID NO: 26515 - DNA, 25 bp, Saccharomyces pastorianus
catgttgttctttagtaactcccgt

SEQ ID NO: 26516 - DNA, 25 bp, Saccharomyces pastorianus
agcatttggcaaactactcaccaga

SEQ ID NO: 26517 - DNA, 25 bp, Saccharomyces pastorianus
gagctgcaagggttccataacgaag

SEQ ID NO: 26518 - DNA, 25 bp, Saccharomyces pastorianus
gaaaaatatcctcgcttgggcaagc

SEQ ID NO: 26519 - DNA, 25 bp, Saccharomyces pastorianus
gagtgcccacacttatggctagcaa

SEQ ID NO: 26520 - DNA, 25 bp, Saccharomyces pastorianus
gaacaaccttggatcaactccttct

SEQ ID NO: 26521 - DNA, 25 bp, Saccharomyces pastorianus
cggagtttacatcttgccgaatact

SEQ ID NO: 26522 - DNA, 25 bp, Saccharomyces pastorianus
ctatgagtctattgccacggagttt

SEQ ID NO: 26523 - DNA, 25 bp, Saccharomyces pastorianus
gttgtttccttatatgacccggtat

SEQ ID NO: 26524 - DNA, 25 bp, Saccharomyces pastorianus
aaacaactcttccaagctcaaggtc

SEQ ID NO: 26525 - DNA, 25 bp, Saccharomyces pastorianus
gcttgggcaagctcgtacattactt

SEQ ID NO: 26526 - DNA, 25 bp, Saccharomyces pastorianus
aatatactatcgtcggagtgcccac

SEQ ID NO: 26527 - DNA, 25 bp, Saccharomyces pastorianus
ccatgctcctttagatttgactgaa

SEQ ID NO: 26528 - DNA, 25 bp, Saccharomyces pastorianus
tatgggtccgtgttatatttccttc

SEQ ID NO: 26529 - DNA, 25 bp, Saccharomyces pastorianus
ttggtgttcagtatcctgcgttgga

SEQ ID NO: 26530 - DNA, 25 bp, Saccharomyces pastorianus
ttggcgttcgctgcgctaattatca

SEQ ID NO: 26531 - DNA, 25 bp, Saccharomyces pastorianus
gcataggttcgtgtctgggtactta

SEQ ID NO: 26532 - DNA, 25 bp, Saccharomyces pastorianus
ggtcaaatgcatgttcatcaccatc

SEQ ID NO: 26533 - DNA, 25 bp, Saccharomyces pastorianus
ttggatcatccatattaggccgctg

SEQ ID NO: 26534 - DNA, 25 bp, Saccharomyces pastorianus
gggcttgccctcgtatataaatatt

SEQ ID NO: 26535 - DNA, 25 bp, Saccharomyces pastorianus
gcggttgttggagctctactgaatt

SEQ ID NO: 26536 - DNA, 25 bp, Saccharomyces pastorianus
agactccatagctgacgtagttctc

SEQ ID NO: 26537 - DNA, 25 bp, Saccharomyces pastorianus
tattggtctgtggtcatactgtttg

SEQ ID NO: 26538 - DNA, 25 bp, Saccharomyces pastorianus
atactgtttggaggactcttcccac

SEQ ID NO: 26539 - DNA, 25 bp, Saccharomyces pastorianus
taggcattgtcctgagctttgtcaa

SEQ ID NO: 26540 - DNA, 25 bp, Saccharomyces pastorianus
gtcaacaagctctggtgctatcgaa

SEQ ID NO: 26541 - DNA, 25 bp, Saccharomyces pastorianus
taagagatttgaccccaaccactac

SEQ ID NO: 26542 - DNA, 25 bp, Saccharomyces pastorianus
atatccattcgtcttgtttaccaca

SEQ ID NO: 26543 - DNA, 25 bp, Saccharomyces pastorianus
ggaagacgctaaactgctttctgaa

SEQ ID NO: 26544 - DNA, 25 bp, Saccharomyces pastorianus
gagcattcattcatccaagttctgt

SEQ ID NO: 26545 - DNA, 25 bp, Saccharomyces pastorianus
gaaggtccaatttccaagcagtcaa

SEQ ID NO: 26546 - DNA, 25 bp, Saccharomyces pastorianus
tttggaaaatttacccctgcctgca

SEQ ID NO: 26547 - DNA, 25 bp, Saccharomyces pastorianus
aagaaactagagagccccgattatg

SEQ ID NO: 26548 - DNA, 25 bp, Saccharomyces pastorianus
tttaccacatcccaagtcactaata

SEQ ID NO: 26549 - DNA, 25 bp, Saccharomyces pastorianus
gcggaagtattcattcaccagggat

SEQ ID NO: 26550 - DNA, 25 bp, Saccharomyces pastorianus
attggctcccaatcagaacctggtg

SEQ ID NO: 26551 - DNA, 25 bp, Saccharomyces pastorianus
aagctatggtaatttgatttctgaa

SEQ ID NO: 26552 - DNA, 25 bp, Saccharomyces pastorianus
taaaattgacgatttctcttcctta

SEQ ID NO: 26553 - DNA, 25 bp, Saccharomyces pastorianus
gataatgggaattaccttccagaga

SEQ ID NO: 26554 - DNA, 25 bp, Saccharomyces pastorianus
gaactctctgacacaacattttgac

SEQ ID NO: 26555 - DNA, 25 bp, Saccharomyces pastorianus
gaacatgccgacttgtttaaagtgg

SEQ ID NO: 26556 - DNA, 25 bp, Saccharomyces pastorianus
agaaatacatactgaggtctctgaa

SEQ ID NO: 26557 - DNA, 25 bp, Saccharomyces pastorianus
gataccttcaagaattcctgtacag

SEQ ID NO: 26558 - DNA, 25 bp, Saccharomyces pastorianus
ccttccagagacaatatggcccggt

SEQ ID NO: 26559 - DNA, 25 bp, Saccharomyces pastorianus
ggacttaaatgctcaagaccagaaa

SEQ ID NO: 26560 - DNA, 25 bp, Saccharomyces pastorianus
gaaattttgaactctctgacacaac

SEQ ID NO: 26561 - DNA, 25 bp, Saccharomyces pastorianus
attgcgagatacagttacaggactt

SEQ ID NO: 26562 - DNA, 25 bp, Saccharomyces pastorianus
ggtatactcaattgccatatggccg

SEQ ID NO: 26563 - DNA, 25 bp, Saccharomyces pastorianus
gaacacgaacctacttatactatac

SEQ ID NO: 26564 - DNA, 25 bp, Saccharomyces pastorianus
ggcttaattggctaatcaacgtgat

SEQ ID NO: 26565 - DNA, 25 bp, Saccharomyces pastorianus
tatgaactgctgatacgaggaactt

SEQ ID NO: 26566 - DNA, 25 bp, Saccharomyces pastorianus
ggatcaagatagtgtggtccctttg

SEQ ID NO: 26567 - DNA, 25 bp, Saccharomyces pastorianus
gaccgtttaccgacagaagtagagc

SEQ ID NO: 26568 - DNA, 25 bp, Saccharomyces pastorianus
cttacacaggtccaaatggtggctt

SEQ ID NO: 26569 - DNA, 25 bp, Saccharomyces pastorianus
gtctctagttcattcaaggacgtag

SEQ ID NO: 26570 - DNA, 25 bp, Saccharomyces pastorianus
tgtggtccctttgtttgaaattcga

SEQ ID NO: 26571 - DNA, 25 bp, Saccharomyces pastorianus
agtcatgtctgacagctttcatgtt

SEQ ID NO: 26572 - DNA, 25 bp, Saccharomyces pastorianus
gaacattccgcttacaaaagtctct

SEQ ID NO: 26573 - DNA, 25 bp, Saccharomyces pastorianus
aaaacctgggcgaactagctcctat

SEQ ID NO: 26574 - DNA, 25 bp, Saccharomyces pastorianus
taacgggatagttttgccatctttt

SEQ ID NO: 26575 - DNA, 25 bp, Saccharomyces pastorianus
atctcgcaatccaaatttttcctgt

SEQ ID NO: 26576 - DNA, 25 bp, Saccharomyces pastorianus
gcactggcgcaagttttcatgagaa

SEQ ID NO: 26577 - DNA, 25 bp, Saccharomyces pastorianus
acaatccttgtcttgagtcatccaa

SEQ ID NO: 26578 - DNA, 25 bp, Saccharomyces pastorianus
aaggcatccccacctgaataatcta

SEQ ID NO: 26579 - DNA, 25 bp, Saccharomyces pastorianus
atggactcgaagaaacgcacatcta

SEQ ID NO: 26580 - DNA, 25 bp, Saccharomyces pastorianus
ggagatgatggcacacttaaggcat

SEQ ID NO: 26581 - DNA, 25 bp, Saccharomyces pastorianus
gttggatttttgttgcactggcgca

SEQ ID NO: 26582 - DNA, 25 bp, Saccharomyces pastorianus
tttcctgttggtatacgacgaagct

SEQ ID NO: 26583 - DNA, 25 bp, Saccharomyces pastorianus
gtgaattttttccaaatctcgcaat

SEQ ID NO: 26584 - DNA, 25 bp, Saccharomyces pastorianus
ttcaagacatgttactgcagcggat

SEQ ID NO: 26585 - DNA, 25 bp, Saccharomyces pastorianus
tatgaattcaccaatccccttaaat

SEQ ID NO: 26586 - DNA, 25 bp, Saccharomyces pastorianus
ggcgtaaaatacagttcatccctag

SEQ ID NO: 26587 - DNA, 25 bp, Saccharomyces pastorianus
caagaagacgttccggatgccacag

SEQ ID NO: 26588 - DNA, 25 bp, Saccharomyces pastorianus
ccgctacaagtacattggccatctt

SEQ ID NO: 26589 - DNA, 25 bp, Saccharomyces pastorianus
attctccacccactagtaatggcag

SEQ ID NO: 26590 - DNA, 25 bp, Saccharomyces pastorianus
ggctaccaattacgattccattatg

SEQ ID NO: 26591 - DNA, 25 bp, Saccharomyces pastorianus
ggatgccacagattctaccgattct

SEQ ID NO: 26592 - DNA, 25 bp, Saccharomyces pastorianus
gttactgaacagttgattcgccgct

SEQ ID NO: 26593 - DNA, 25 bp, Saccharomyces pastorianus
gctcttgtagatttggactggcgta

SEQ ID NO: 26594 - DNA, 25 bp, Saccharomyces pastorianus
ggccatcttccaataggtactgaga

SEQ ID NO: 26595 - DNA, 25 bp, Saccharomyces pastorianus
gtcaatcgcgcagaagatccatcca

SEQ ID NO: 26596 - DNA, 25 bp, Saccharomyces pastorianus
taccacggccagtaccaaggaatct

SEQ ID NO: 26597 - DNA, 25 bp, Saccharomyces pastorianus
gatccatccagagatacttccgggt

SEQ ID NO: 26598 - DNA, 25 bp, Saccharomyces pastorianus
ttcccctacgattaaccatgtgttg

SEQ ID NO: 26599 - DNA, 25 bp, Saccharomyces pastorianus
aggaatcttcttcagcagctaaggc

SEQ ID NO: 26600 - DNA, 25 bp, Saccharomyces pastorianus
aaagttgtccacattggttctgcaa

SEQ ID NO: 26601 - DNA, 25 bp, Saccharomyces pastorianus
atcgaaactgttattaccccaactg

SEQ ID NO: 26602 - DNA, 25 bp, Saccharomyces pastorianus
ggatacgtcgattaacaagctgcta

SEQ ID NO: 26603 - DNA, 25 bp, Saccharomyces pastorianus
agcaccggtatcaattgccacagat

SEQ ID NO: 26604 - DNA, 25 bp, Saccharomyces pastorianus
gagaatgaaaactctccggctcctt

SEQ ID NO: 26605 - DNA, 25 bp, Saccharomyces pastorianus
ggcttctaccaagtcgttaggctta

SEQ ID NO: 26606 - DNA, 25 bp, Saccharomyces pastorianus
tgagtttccctactggtccagaaaa

SEQ ID NO: 26607 - DNA, 25 bp, Saccharomyces pastorianus
ggatctcttgggtcattgtctgcac

SEQ ID NO: 26608 - DNA, 25 bp, Saccharomyces pastorianus
gtgcctccgattatggcgagcctga

SEQ ID NO: 26609 - DNA, 25 bp, Saccharomyces pastorianus
gtgcctgcaggtgtacgcaacagtt

SEQ ID NO: 26610 - DNA, 25 bp, Saccharomyces pastorianus
aatggttcctggtagtgtgcctgca

SEQ ID NO: 26611 - DNA, 25 bp, Saccharomyces pastorianus
gaaccaatatccaacaacacctgtg

SEQ ID NO: 26612 - DNA, 25 bp, Saccharomyces pastorianus
tgattatacaccttccatttccagt

SEQ ID NO: 26613 - DNA, 25 bp, Saccharomyces pastorianus
gaccggatcgaacgcatcacatagt

SEQ ID NO: 26614 - DNA, 25 bp, Saccharomyces pastorianus
ttgtctgcacatccgcaagtgagtt

SEQ ID NO: 26615 - DNA, 25 bp, Saccharomyces pastorianus
caacacctgtgggatctcatggatc

SEQ ID NO: 26616 - DNA, 25 bp, Saccharomyces pastorianus
tatagattcttatccgcaacctcag

SEQ ID NO: 26617 - DNA, 25 bp, Saccharomyces pastorianus
tcaagacattggctctaaatctttg

SEQ ID NO: 26618 - DNA, 25 bp, Saccharomyces pastorianus
ttgtcaagacattggctctaaatct

SEQ ID NO: 26619 - DNA, 25 bp, Saccharomyces pastorianus
ggctctggctcttggatcttctact

SEQ ID NO: 26620 - DNA, 25 bp, Saccharomyces pastorianus
gtgttcaaaacatcggtcacatcac

SEQ ID NO: 26621 - DNA, 25 bp, Saccharomyces pastorianus
aatgcatccacttctcgttactttt

SEQ ID NO: 26622 - DNA, 25 bp, Saccharomyces pastorianus
ttctgaatcagacagtgtgttggtt

SEQ ID NO: 26623 - DNA, 25 bp, Saccharomyces pastorianus
gaccggtaataagggtaatgcatcc

SEQ ID NO: 26624 - DNA, 25 bp, Saccharomyces pastorianus
tcaattagaaggtggtgtcaataat

SEQ ID NO: 26625 - DNA, 25 bp, Saccharomyces pastorianus
aaggctctggctcttggatcttcta

SEQ ID NO: 26626 - DNA, 25 bp, Saccharomyces pastorianus
atcggtcacatcaccaaggctctgg

SEQ ID NO: 26627 - DNA, 25 bp, Saccharomyces pastorianus
taagggtaatgcatccacttctcgt

SEQ ID NO: 26628 - DNA, 25 bp, Saccharomyces pastorianus
atcttcgtcctctattgctttagag

SEQ ID NO: 26629 - DNA, 25 bp, Saccharomyces pastorianus
aacacaactcaaaaccatttccatc

SEQ ID NO: 26630 - DNA, 25 bp, Saccharomyces pastorianus
gcacaccaaacaccgctgataactt

SEQ ID NO: 26631 - DNA, 25 bp, Saccharomyces pastorianus
gagctccaacaactcctttgaatag

SEQ ID NO: 26632 - DNA, 25 bp, Saccharomyces pastorianus
ggtggattctccttcttcaaatgga

SEQ ID NO: 26633 - DNA, 25 bp, Saccharomyces pastorianus
ggccaaataattctcaacatgctgt

SEQ ID NO: 26634 - DNA, 25 bp, Saccharomyces pastorianus
tgattcaagcagtggtcaagcaaat

SEQ ID NO: 26635 - DNA, 25 bp, Saccharomyces pastorianus
gactctttagggttggagacttcaa

SEQ ID NO: 26636 - DNA, 25 bp, Saccharomyces pastorianus
gggttggaactgatatccgactctt

SEQ ID NO: 26637 - DNA, 25 bp, Saccharomyces pastorianus
aaatcagcgcgggtgtagtgaataa

SEQ ID NO: 26638 - DNA, 25 bp, Saccharomyces pastorianus
actatttctaacagttccgtgacaa

SEQ ID NO: 26639 - DNA, 25 bp, Saccharomyces pastorianus
cgcaactggagtgggctagcagcct

SEQ ID NO: 26640 - DNA, 25 bp, Saccharomyces pastorianus
gatcaaccagagaaccatgtccacc

SEQ ID NO: 26641 - DNA, 25 bp, Saccharomyces pastorianus
aaggaccaactgatgaccgtaggca

SEQ ID NO: 26642 - DNA, 25 bp, Saccharomyces pastorianus
aacaacaaccagcaagaccttcaga

SEQ ID NO: 26643 - DNA, 25 bp, Saccharomyces pastorianus
gcatgcggatcagacagcgcgtcga

SEQ ID NO: 26644 - DNA, 25 bp, Saccharomyces pastorianus
actactccagtgttattgttccgca

SEQ ID NO: 26645 - DNA, 25 bp, Saccharomyces pastorianus
aaaagacagttccaacagcagcagc

SEQ ID NO: 26646 - DNA, 25 bp, Saccharomyces pastorianus
gcggtcatcagggactactccagtg

SEQ ID NO: 26647 - DNA, 25 bp, Saccharomyces pastorianus
ggctagcagccttgttccgaaaaga

SEQ ID NO: 26648 - DNA, 25 bp, Saccharomyces pastorianus
tgttccgcagtttaccaggtcgccg

SEQ ID NO: 26649 - DNA, 25 bp, Saccharomyces pastorianus
agcgcgtcgaccagggctatgcctc

SEQ ID NO: 26650 - DNA, 25 bp, Saccharomyces pastorianus
gaacctcgacgagcgggtgtacatc

SEQ ID NO: 26651 - DNA, 25 bp, Saccharomyces pastorianus
gatataccaactgaacaacgacgaa

SEQ ID NO: 26652 - DNA, 25 bp, Saccharomyces pastorianus
gggacacggtgaccttgatcagcac

SEQ ID NO: 26653 - DNA, 25 bp, Saccharomyces pastorianus
ggtgaccttgatcagcacgcccaac

SEQ ID NO: 26654 - DNA, 25 bp, Saccharomyces pastorianus
actgagcgagtctgaaagacggtgc

SEQ ID NO: 26655 - DNA, 25 bp, Saccharomyces pastorianus
ggagacgcccttggacctattgaaa

SEQ ID NO: 26656 - DNA, 25 bp, Saccharomyces pastorianus
acgctgcaggcgttcgactcgcact

SEQ ID NO: 26657 - DNA, 25 bp, Saccharomyces pastorianus
ggacctattgaaactgaacctcgac

SEQ ID NO: 26658 - DNA, 25 bp, Saccharomyces pastorianus
gaacaacgacgaactgagcgagtct

SEQ ID NO: 26659 - DNA, 25 bp, Saccharomyces pastorianus
gctgagcgacgcagtagagacgata

SEQ ID NO: 26660 - DNA, 25 bp, Saccharomyces pastorianus
gacgcagtagagacgatataccaac

SEQ ID NO: 26661 - DNA, 25 bp, Saccharomyces pastorianus
gcagtccatcagaaccactatgtgg

SEQ ID NO: 26662 - DNA, 25 bp, Saccharomyces pastorianus
gccgtgttcgggatctcagagacca

SEQ ID NO: 26663 - DNA, 25 bp, Saccharomyces pastorianus
agcagaacgtgcttgcccgcgagaa

SEQ ID NO: 26664 - DNA, 25 bp, Saccharomyces pastorianus
atgtggcagatcagacacgtcctca

SEQ ID NO: 26665 - DNA, 25 bp, Saccharomyces pastorianus
aactgcgccggttcaaggactcgga

SEQ ID NO: 26666 - DNA, 25 bp, Saccharomyces pastorianus
agcatgtgtcgccatcaaggacctg

SEQ ID NO: 26667 - DNA, 25 bp, Saccharomyces pastorianus
gaatcaagtttctcgcgaacctcaa

SEQ ID NO: 26668 - DNA, 25 bp, Saccharomyces pastorianus
gcgagaaccacctcttgaagaacgt

SEQ ID NO: 26669 - DNA, 25 bp, Saccharomyces pastorianus
agcgtgctgtccacgaagcatgtgt

SEQ ID NO: 26670 - DNA, 25 bp, Saccharomyces pastorianus
tgatatcggagctgtctcaggaccc

SEQ ID NO: 26671 - DNA, 25 bp, Saccharomyces pastorianus
ctaaccaacgaccactttctgaata

SEQ ID NO: 26672 - DNA, 25 bp, Saccharomyces pastorianus
gagtataaagattgtcccctggaca

SEQ ID NO: 26673 - DNA, 25 bp, Saccharomyces pastorianus
gactatgcgcttgtcaatctggatt

SEQ ID NO: 26674 - DNA, 25 bp, Saccharomyces pastorianus
tggacaacgagatccccacggagat

SEQ ID NO: 26675 - DNA, 25 bp, Saccharomyces pastorianus
gtataaggatctgcccaccacgaga

SEQ ID NO: 26676 - DNA, 25 bp, Saccharomyces pastorianus
tattggaattgaaccctcgcctgta

SEQ ID NO: 26677 - DNA, 25 bp, Saccharomyces pastorianus
tgctggagatttgccctctggagga

SEQ ID NO: 26678 - DNA, 25 bp, Saccharomyces pastorianus
ttccgggatctacgacagtttgtct

SEQ ID NO: 26679 - DNA, 25 bp, Saccharomyces pastorianus
agctagagttgagcgcacgtgactt

SEQ ID NO: 26680 - DNA, 25 bp, Saccharomyces pastorianus
accacgagaggcttgctttccggga

SEQ ID NO: 26681 - DNA, 25 bp, Saccharomyces pastorianus
gagcactggttgacgctgtaccaaa

SEQ ID NO: 26682 - DNA, 25 bp, Saccharomyces pastorianus
aactgtgtcgtgaacgtgggcaaca

SEQ ID NO: 26683 - DNA, 25 bp, Saccharomyces pastorianus
tctgaaattttgaccaaggaagttc

SEQ ID NO: 26684 - DNA, 25 bp, Saccharomyces pastorianus
tgctaccaaggaaattttccctcta

SEQ ID NO: 26685 - DNA, 25 bp, Saccharomyces pastorianus
attttccctctacaaaacattcacg

SEQ ID NO: 26686 - DNA, 25 bp, Saccharomyces pastorianus
atttctgaaattttgaccaaggaag

SEQ ID NO: 26687 - DNA, 25 bp, Saccharomyces pastorianus
tttgaccaaggaagttcaaggttct

SEQ ID NO: 26688 - DNA, 25 bp, Saccharomyces pastorianus
tttccctctacaaaacattcacgtt

SEQ ID NO: 26689 - DNA, 25 bp, Saccharomyces pastorianus
agtgcttccgatgccttaaaaggta

SEQ ID NO: 26690 - DNA, 25 bp, Saccharomyces pastorianus
atgctaccaaggaaattttccctct

SEQ ID NO: 26691 - DNA, 25 bp, Saccharomyces pastorianus
gagtgcttccgatgccttaaaaggt

SEQ ID NO: 26692 - DNA, 25 bp, Saccharomyces pastorianus
aagagtgcttccgatgccttaaaag

SEQ ID NO: 26693 - DNA, 25 bp, Saccharomyces pastorianus
agagtgcttccgatgccttaaaagg

SEQ ID NO: 26694 - DNA, 25 bp, Saccharomyces pastorianus
attttccctctacaaaacattcacg

SEQ ID NO: 26695 - DNA, 25 bp, Saccharomyces pastorianus
atttctgaaattttgaccaaggaag

SEQ ID NO: 26696 - DNA, 25 bp, Saccharomyces pastorianus
tttgaccaaggaagttcaaggttct

SEQ ID NO: 26697 - DNA, 25 bp, Saccharomyces pastorianus
tttccctctacaaaacattcacgtt

SEQ ID NO: 26698 - DNA, 25 bp, Saccharomyces pastorianus
agtgcttccgatgccttaaaaggta

SEQ ID NO: 26699 - DNA, 25 bp, Saccharomyces pastorianus
atgctaccaaggaaattttccctct

SEQ ID NO: 26700 - DNA, 25 bp, Saccharomyces pastorianus
gagtgcttccgatgccttaaaaggt

SEQ ID NO: 26701 - DNA, 25 bp, Saccharomyces pastorianus
cacggtatggatttcaccactgata

SEQ ID NO: 26702 - DNA, 25 bp, Saccharomyces pastorianus
aagagtgcttccgatgccttaaaag

SEQ ID NO: 26703 - DNA, 25 bp, Saccharomyces pastorianus
agagtgcttccgatgccttaaaagg

SEQ ID NO: 26704 - DNA, 25 bp, Saccharomyces pastorianus
gaccaaggaagttcaaggttctact

SEQ ID NO: 26705 - DNA, 25 bp, Saccharomyces pastorianus
gatcgcggaatgtattgctcaaaac

SEQ ID NO: 26706 - DNA, 25 bp, Saccharomyces pastorianus
agtcctactaggtttcgaagccgat

SEQ ID NO: 26707 - DNA, 25 bp, Saccharomyces pastorianus
tagagctgctttgggtaacgtttac

SEQ ID NO: 26708 - DNA, 25 bp, Saccharomyces pastorianus
gaaaccgtgttggtggatactccat

SEQ ID NO: 26709 - DNA, 25 bp, Saccharomyces pastorianus
attcactcaacagtttgccatcagc

SEQ ID NO: 26710 - DNA, 25 bp, Saccharomyces pastorianus
atactccattagctccttatttcaa

SEQ ID NO: 26711 - DNA, 25 bp, Saccharomyces pastorianus
gtaaactataccctcttgctacatt

SEQ ID NO: 26712 - DNA, 25 bp, Saccharomyces pastorianus
gaaaagatcccagagcctgctaaag

SEQ ID NO: 26713 - DNA, 25 bp, Saccharomyces pastorianus
cccactttgagtgttgcaaccgatc

SEQ ID NO: 26714 - DNA, 25 bp, Saccharomyces pastorianus
gaagcgtgacttattgcctaacatt

SEQ ID NO: 26715 - DNA, 25 bp, Saccharomyces pastorianus
agaaacatcacttggatcgcggaat

SEQ ID NO: 26716 - DNA, 25 bp, Saccharomyces pastorianus
ggcatcccagctaactctgaactaa

SEQ ID NO: 26717 - DNA, 25 bp, Saccharomyces pastorianus
agccgcatatgcctatggtacacaa

SEQ ID NO: 26718 - DNA, 25 bp, Saccharomyces pastorianus
tatcggtgtcgctggtatggctgtc

SEQ ID NO: 26719 - DNA, 25 bp, Saccharomyces pastorianus
gccgaatccaagaaagagcctgaag

SEQ ID NO: 26720 - DNA, 25 bp, Saccharomyces pastorianus
tggtacacaagctttgccaggcatc

SEQ ID NO: 26721 - DNA, 25 bp, Saccharomyces pastorianus
agaattgtcattccagccgcatatg

SEQ ID NO: 26722 - DNA, 25 bp, Saccharomyces pastorianus
tatcatcgaagaccgtgtcacaggt

SEQ ID NO: 26723 - DNA, 25 bp, Saccharomyces pastorianus
aaattgggtcatggcgaagtcatca

SEQ ID NO: 26724 - DNA, 25 bp, Saccharomyces pastorianus
taagggtccacatgccaagaaaagt

SEQ ID NO: 26725 - DNA, 25 bp, Saccharomyces pastorianus
gaagaatctgctaaacctgttgaaa

SEQ ID NO: 26726 - DNA, 25 bp, Saccharomyces pastorianus
ccgtgtcacaggtaagggtccacat

SEQ ID NO: 26727 - DNA, 25 bp, Saccharomyces pastorianus
agacgaaccctgtttcaagtggaga

SEQ ID NO: 26728 - DNA, 25 bp, Saccharomyces pastorianus
gaacatttaccaatagcgaccgctg

SEQ ID NO: 26729 - DNA, 25 bp, Saccharomyces pastorianus
atagcgaccgctgttggacacttag

SEQ ID NO: 26730 - DNA, 25 bp, Saccharomyces pastorianus
gattccggtgctatcacagatatga

SEQ ID NO: 26731 - DNA, 25 bp, Saccharomyces pastorianus
tggatccgaacccaatcaatgcagg

SEQ ID NO: 26732 - DNA, 25 bp, Saccharomyces pastorianus
gaagctccttaacaactccaaatag

SEQ ID NO: 26733 - DNA, 25 bp, Saccharomyces pastorianus
aatgttcaacagatggcgcagacca

SEQ ID NO: 26734 - DNA, 25 bp, Saccharomyces pastorianus
gaaacgcatgctgtgactcagacga

SEQ ID NO: 26735 - DNA, 25 bp, Saccharomyces pastorianus
gaatcccctaattccattatggcga

SEQ ID NO: 26736 - DNA, 25 bp, Saccharomyces pastorianus
gttctactagtagcggaagctcctt

SEQ ID NO: 26737 - DNA, 25 bp, Saccharomyces pastorianus
attgaaaccattccgttggatccga

SEQ ID NO: 26738 - DNA, 25 bp, Saccharomyces pastorianus
ggtcacacgttacaagaactgcctg

SEQ ID NO: 26739 - DNA, 25 bp, Saccharomyces pastorianus
gatcgggtcgccatatcaattgaac

SEQ ID NO: 26740 - DNA, 25 bp, Saccharomyces pastorianus
ttgaacatccaccataacttgcgtc

SEQ ID NO: 26741 - DNA, 25 bp, Saccharomyces pastorianus
tggcctatcatatttactcgtcata

SEQ ID NO: 26742 - DNA, 25 bp, Saccharomyces pastorianus
gaatctaactcttcttcagtcggtt

SEQ ID NO: 26743 - DNA, 25 bp, Saccharomyces pastorianus
agtcggttccacagatggtcacacg

SEQ ID NO: 26744 - DNA, 25 bp, Saccharomyces pastorianus
gttaatgaacaacgactccttccaa

SEQ ID NO: 26745 - DNA, 25 bp, Saccharomyces pastorianus
gaacgttttcctactagcttggatg

SEQ ID NO: 26746 - DNA, 25 bp, Saccharomyces pastorianus
ttcattgcttgaatccaccgaatct

SEQ ID NO: 26747 - DNA, 25 bp, Saccharomyces pastorianus
accggccccattaaatctagcagat

SEQ ID NO: 26748 - DNA, 25 bp, Saccharomyces pastorianus
actgacattatgttgcatccccaat

SEQ ID NO: 26749 - DNA, 25 bp, Saccharomyces pastorianus
aaggctccagaattgttgctggcga

SEQ ID NO: 26750 - DNA, 25 bp, Saccharomyces pastorianus
gttgctggcgaagatccttttatag

SEQ ID NO: 26751 - DNA, 25 bp, Saccharomyces pastorianus
agaaaacttccatatctcccagaaa

SEQ ID NO: 26752 - DNA, 25 bp, Saccharomyces pastorianus
caagccaggtgccagcgacaagaag

SEQ ID NO: 26753 - DNA, 25 bp, Saccharomyces pastorianus
ttgagatttcactactatttcgccg

SEQ ID NO: 26754 - DNA, 25 bp, Saccharomyces pastorianus
gaccatttttcgatttagaggcact

SEQ ID NO: 26755 - DNA, 25 bp, Saccharomyces pastorianus
tagaggaatttcaccccagttgtaa

SEQ ID NO: 26756 - DNA, 25 bp, Saccharomyces pastorianus
gagagaaacgcctccgtctgcggga

SEQ ID NO: 26757 - DNA, 25 bp, Saccharomyces pastorianus
gacctgggctgacctaatcacggaa

SEQ ID NO: 26758 - DNA, 25 bp, Saccharomyces pastorianus
agagattttgttgacctgggctgac

SEQ ID NO: 26759 - DNA, 25 bp, Saccharomyces pastorianus
tactatttcgccgtaggattcaaag

SEQ ID NO: 26760 - DNA, 25 bp, Saccharomyces pastorianus
taaagattgacctttcaccgtctcc

SEQ ID NO: 26761 - DNA, 25 bp, Saccharomyces pastorianus
gataccagaaatgcaaccactacat

SEQ ID NO: 26762 - DNA, 25 bp, Saccharomyces pastorianus
gctattcacttcaagccccatgaaa

SEQ ID NO: 26763 - DNA, 25 bp, Saccharomyces pastorianus
accacctcatcgctcaagagaaact

SEQ ID NO: 26764 - DNA, 25 bp, Saccharomyces pastorianus
aggacggccttcgtatttggatact

SEQ ID NO: 26765 - DNA, 25 bp, Saccharomyces pastorianus
aatgcttttacaacggcaaatcaag

SEQ ID NO: 26766 - DNA, 25 bp, Saccharomyces pastorianus
gaacgaattcgctattcacttcaag

SEQ ID NO: 26767 - DNA, 25 bp, Saccharomyces pastorianus
agaagggccatttcgaatctagtaa

SEQ ID NO: 26768 - DNA, 25 bp, Saccharomyces pastorianus
acatgaaagcatatcccctgattcc

SEQ ID NO: 26769 - DNA, 25 bp, Saccharomyces pastorianus
gatgcgaatcaatcactctatttag

SEQ ID NO: 26770 - DNA, 25 bp, Saccharomyces pastorianus
gaagaagccttctcaaggacggcct

SEQ ID NO: 26771 - DNA, 25 bp, Saccharomyces pastorianus
gtgttcaatatcttcatagcagctt

SEQ ID NO: 26772 - DNA, 25 bp, Saccharomyces pastorianus
ggctttagcgtctatcttggttgat

SEQ ID NO: 26773 - DNA, 25 bp, Saccharomyces pastorianus
aaagaatgttctccgtcatcgtttc

SEQ ID NO: 26774 - DNA, 25 bp, Saccharomyces pastorianus
taagccatatccatcccttggtgat

SEQ ID NO: 26775 - DNA, 25 bp, Saccharomyces pastorianus
atagcagctttcataacaccattta

SEQ ID NO: 26776 - DNA, 25 bp, Saccharomyces pastorianus
gcattattgtttctacacgctattg

SEQ ID NO: 26777 - DNA, 25 bp, Saccharomyces pastorianus
tgacactttcataccgtttttcaaa

SEQ ID NO: 26778 - DNA, 25 bp, Saccharomyces pastorianus
tagctccaattttctatcacctatg

SEQ ID NO: 26779 - DNA, 25 bp, Saccharomyces pastorianus
ggtacccaatcatatcagcattatt

SEQ ID NO: 26780 - DNA, 25 bp, Saccharomyces pastorianus
aacaccatttactttacgctaccat

SEQ ID NO: 26781 - DNA, 25 bp, Saccharomyces pastorianus
tccgtcatcgtttccatattatctt

SEQ ID NO: 26782 - DNA, 25 bp, Saccharomyces pastorianus
caaacattcggcagactatcagagt

SEQ ID NO: 26783 - DNA, 25 bp, Saccharomyces pastorianus
gaagttatttggatttgcccagaaa

SEQ ID NO: 26784 - DNA, 25 bp, Saccharomyces pastorianus
gaataactttttcagcatcttgaag

SEQ ID NO: 26785 - DNA, 25 bp, Saccharomyces pastorianus
gaaagctggcaaatccattcgttat

SEQ ID NO: 26786 - DNA, 25 bp, Saccharomyces pastorianus
acgctactgcccttaagattttgtt

SEQ ID NO: 26787 - DNA, 25 bp, Saccharomyces pastorianus
gaattgattgccctattacaaacat

SEQ ID NO: 26788 - DNA, 25 bp, Saccharomyces pastorianus
gcagccgccggcgtaggaagtaaat

SEQ ID NO: 26789 - DNA, 25 bp, Saccharomyces pastorianus
tccaaactactggttacgctactgc

SEQ ID NO: 26790 - DNA, 25 bp, Saccharomyces pastorianus
catttgacgatttgaggatgcccaa

SEQ ID NO: 26791 - DNA, 25 bp, Saccharomyces pastorianus
aacagactaacttctttcttccaga

SEQ ID NO: 26792 - DNA, 25 bp, Saccharomyces pastorianus
aaagtgtgccaaaagcagccgccgg

SEQ ID NO: 26793 - DNA, 25 bp, Saccharomyces pastorianus
aacttggtcaacgacaccttcttgg

SEQ ID NO: 26794 - DNA, 25 bp, Saccharomyces pastorianus
gaaatcttttggtgttcccgtcaag

SEQ ID NO: 26795 - DNA, 25 bp, Saccharomyces pastorianus
agatgtttctagatgctcgcggtat

SEQ ID NO: 26796 - DNA, 25 bp, Saccharomyces pastorianus
accttcttggtggacatcgactcat

SEQ ID NO: 26797 - DNA, 25 bp, Saccharomyces pastorianus
atgctgtccaccgaaaaccaattga

SEQ ID NO: 26798 - DNA, 25 bp, Saccharomyces pastorianus
ctatctttcgaacctctattccaag

SEQ ID NO: 26799 - DNA, 25 bp, Saccharomyces pastorianus
agcctactccacaatcatgcaagat

SEQ ID NO: 26800 - DNA, 25 bp, Saccharomyces pastorianus
gactcctccaaaaactatctttcga

SEQ ID NO: 26801 - DNA, 25 bp, Saccharomyces pastorianus
ctcgcggtatcaagcactcaatgct

SEQ ID NO: 26802 - DNA, 25 bp, Saccharomyces pastorianus
ggtcaaacacattccagagctggtc

SEQ ID NO: 26803 - DNA, 25 bp, Saccharomyces pastorianus
gtaactggtccttgaacgacatcaa

SEQ ID NO: 26804 - DNA, 25 bp, Saccharomyces pastorianus
tatcactttggaggtcgtacgaatc

SEQ ID NO: 26805 - DNA, 25 bp, Saccharomyces pastorianus
tgaacgagccactgaggtctaccac

SEQ ID NO: 26806 - DNA, 25 bp, Saccharomyces pastorianus
acagacgatggtgtcggttccacat

SEQ ID NO: 26807 - DNA, 25 bp, Saccharomyces pastorianus
aagaatcgcaagtacccatttcggc

SEQ ID NO: 26808 - DNA, 25 bp, Saccharomyces pastorianus
tactgcctgccgtggaatttatcaa

SEQ ID NO: 26809 - DNA, 25 bp, Saccharomyces pastorianus
gtacattcttgtgtcttctgtccaa

SEQ ID NO: 26810 - DNA, 25 bp, Saccharomyces pastorianus
tgatcgctgacccaatgaccggtaa

SEQ ID NO: 26811 - DNA, 25 bp, Saccharomyces pastorianus
ggagccgcccaatctgtcagacgaa

SEQ ID NO: 26812 - DNA, 25 bp, Saccharomyces pastorianus
gtcggttccacattttgtcaacgca

SEQ ID NO: 26813 - DNA, 25 bp, Saccharomyces pastorianus
ccatttcggcgcttaagtccaaatt

SEQ ID NO: 26814 - DNA, 25 bp, Saccharomyces pastorianus
aaatttggccaacctgtgcgtgaat

SEQ ID NO: 26815 - DNA, 25 bp, Saccharomyces pastorianus
agtactggcgataccgtggacttca

SEQ ID NO: 26816 - DNA, 25 bp, Saccharomyces pastorianus
gtgcgtgtccccatcgatggtaaag

SEQ ID NO: 26817 - DNA, 25 bp, Saccharomyces pastorianus
gctcttgtacgccaatgagaccgaa

SEQ ID NO: 26818 - DNA, 25 bp, Saccharomyces pastorianus
accccagtcctacagatcttaaatg

SEQ ID NO: 26819 - DNA, 25 bp, Saccharomyces pastorianus
aattgtggctggtggctcaggtatc

SEQ ID NO: 26820 - DNA, 25 bp, Saccharomyces pastorianus
gaactacgaaccaaattcctccaga

SEQ ID NO: 26821 - DNA, 25 bp, Saccharomyces pastorianus
atgagcgagtacttgccggaatatt

SEQ ID NO: 26822 - DNA, 25 bp, Saccharomyces pastorianus
tttgaccaaagtctcgctcttgtac

SEQ ID NO: 26823 - DNA, 25 bp, Saccharomyces pastorianus
acgggcacttggacttggtggtcaa

SEQ ID NO: 26824 - DNA, 25 bp, Saccharomyces pastorianus
taaatgaagtcgtcaccgttccgga

SEQ ID NO: 26825 - DNA, 25 bp, Saccharomyces pastorianus
aatattcggatgacaacaggctctt

SEQ ID NO: 26826 - DNA, 25 bp, Saccharomyces pastorianus
tgctggaccccaagagattcgaaaa

SEQ ID NO: 26827 - DNA, 25 bp, Saccharomyces pastorianus
ggacgactttccttgtgatttgttc

SEQ ID NO: 26828 - DNA, 25 bp, Saccharomyces pastorianus
taggctttccgacctcgatttggga

SEQ ID NO: 26829 - DNA, 25 bp, Saccharomyces pastorianus
agattgtgtgttcgctgatacctaa

SEQ ID NO: 26830 - DNA, 25 bp, Saccharomyces pastorianus
gagacatcgtcggagttcggcttcc

SEQ ID NO: 26831 - DNA, 25 bp, Saccharomyces pastorianus
agagtctgtacaaggcgtggtcgca

SEQ ID NO: 26832 - DNA, 25 bp, Saccharomyces pastorianus
cgccaagattttcgtgctactgcac

SEQ ID NO: 26833 - DNA, 25 bp, Saccharomyces pastorianus
agctgtcctccaatatggtctgttt

SEQ ID NO: 26834 - DNA, 25 bp, Saccharomyces pastorianus
acaatatctacgtcagcgagctgtc

SEQ ID NO: 26835 - DNA, 25 bp, Saccharomyces pastorianus
gaacaacggtactgtgctgctggac

SEQ ID NO: 26836 - DNA, 25 bp, Saccharomyces pastorianus
tgaggaagtactcgccggacgccaa

SEQ ID NO: 26837 - DNA, 25 bp, Saccharomyces pastorianus
tagcaataacattttcgccatcggt

SEQ ID NO: 26838 - DNA, 25 bp, Saccharomyces pastorianus
agtacaacgatttgggtgccctggc

SEQ ID NO: 26839 - DNA, 25 bp, Saccharomyces pastorianus
acttgtcgatgattttgtctgctag

SEQ ID NO: 26840 - DNA, 25 bp, Saccharomyces pastorianus
aatccccgaacagaactcttcaaag

SEQ ID NO: 26841 - DNA, 25 bp, Saccharomyces pastorianus
tcaaggtgtttttcgactggatcaa

SEQ ID NO: 26842 - DNA, 25 bp, Saccharomyces pastorianus
aaccgctcaagtggcgcatcaagag

SEQ ID NO: 26843 - DNA, 25 bp, Saccharomyces pastorianus
ggccgagtacctagctaagagtttc

SEQ ID NO: 26844 - DNA, 25 bp, Saccharomyces pastorianus
gccctggcatatcttggttctgaaa

SEQ ID NO: 26845 - DNA, 25 bp, Saccharomyces pastorianus
ggtgataacgcctttgccggattgc

SEQ ID NO: 26846 - DNA, 25 bp, Saccharomyces pastorianus
ttctgaaagggccatcgctaccatc

SEQ ID NO: 26847 - DNA, 25 bp, Saccharomyces pastorianus
agagactatcccatacggtacttta

SEQ ID NO: 26848 - DNA, 25 bp, Saccharomyces pastorianus
gccgtcacgcctgggttgatgaatt

SEQ ID NO: 26849 - DNA, 25 bp, Saccharomyces pastorianus
aagaagtctattttgcccaggtgcg

SEQ ID NO: 26850 - DNA, 25 bp, Saccharomyces pastorianus
agaaacaattgtagcgccgtcacgc

SEQ ID NO: 26851 - DNA, 25 bp, Saccharomyces pastorianus
gaatcctccgaatatcaataccaag

SEQ ID NO: 26852 - DNA, 25 bp, Saccharomyces pastorianus
ggtatttcaccaggccaatagatct

SEQ ID NO: 26853 - DNA, 25 bp, Saccharomyces pastorianus
gcagagagctattgctaccaccaac

SEQ ID NO: 26854 - DNA, 25 bp, Saccharomyces pastorianus
aaagctatcattttttgcagccgat

SEQ ID NO: 26855 - DNA, 25 bp, Saccharomyces pastorianus
gacgaggattcctttcagcagagaa

SEQ ID NO: 26856 - DNA, 25 bp, Saccharomyces pastorianus
gatgaattccccaacgaagtcaaag

SEQ ID NO: 26857 - DNA, 25 bp, Saccharomyces pastorianus
ggtggactcatttagcatcgccatc

SEQ ID NO: 26858 - DNA, 25 bp, Saccharomyces pastorianus
agccgattcagctgtctactaataa

SEQ ID NO: 26859 - DNA, 25 bp, Saccharomyces pastorianus
aagtgccgattcaagacgctggaaa

SEQ ID NO: 26860 - DNA, 25 bp, Saccharomyces pastorianus
caacgttgtcctataatcattcgaa

SEQ ID NO: 26861 - DNA, 25 bp, Saccharomyces pastorianus
ggatcggatgttatggcccaatacc

SEQ ID NO: 26862 - DNA, 25 bp, Saccharomyces pastorianus
cactcgacgtttatgtatgcagcta

SEQ ID NO: 26863 - DNA, 25 bp, Saccharomyces pastorianus
ctccgagtgatcctgaatatgcctt

SEQ ID NO: 26864 - DNA, 25 bp, Saccharomyces pastorianus
aggtcataatgcattctccgagtga

SEQ ID NO: 26865 - DNA, 25 bp, Saccharomyces pastorianus
aagaggctctttcccaaggcataga

SEQ ID NO: 26866 - DNA, 25 bp, Saccharomyces pastorianus
atcgctaaagcaagctccaccaagg

SEQ ID NO: 26867 - DNA, 25 bp, Saccharomyces pastorianus
aatacctcgcacaagttcaacactc

SEQ ID NO: 26868 - DNA, 25 bp, Saccharomyces pastorianus
gtcatcaagatcttccgattcgtcg

SEQ ID NO: 26869 - DNA, 25 bp, Saccharomyces pastorianus
attcgtcgtcggacatagaggtcat

SEQ ID NO: 26870 - DNA, 25 bp, Saccharomyces pastorianus
ggattacagccagcagtcattgatg

SEQ ID NO: 26871 - DNA, 25 bp, Saccharomyces pastorianus
taatgggaccctacaactacttgca

SEQ ID NO: 26872 - DNA, 25 bp, Saccharomyces pastorianus
gatgcgtcccaacaggatcaggaat

SEQ ID NO: 26873 - DNA, 25 bp, Saccharomyces pastorianus
aacctgccggccaaatgaattcaaa

SEQ ID NO: 26874 - DNA, 25 bp, Saccharomyces pastorianus
tgttgtcttcaacagggcaacctgc

SEQ ID NO: 26875 - DNA, 25 bp, Saccharomyces pastorianus
agactccctgtcttcttttctaatg

SEQ ID NO: 26876 - DNA, 25 bp, Saccharomyces pastorianus
gaaaccataccttgatctgtctgca

SEQ ID NO: 26877 - DNA, 25 bp, Saccharomyces pastorianus
aggatcaggaatcgcgtcccatcag

SEQ ID NO: 26878 - DNA, 25 bp, Saccharomyces pastorianus
taagccgttcatcactcacaagatc

SEQ ID NO: 26879 - DNA, 25 bp, Saccharomyces pastorianus
gcaagcaacccacatcacaaagagt

SEQ ID NO: 26880 - DNA, 25 bp, Saccharomyces pastorianus
acttgcaacggccattcattgtgaa

SEQ ID NO: 26881 - DNA, 25 bp, Saccharomyces pastorianus
gaaacgttgtggtcgcattttgaaa

SEQ ID NO: 26882 - DNA, 25 bp, Saccharomyces pastorianus
aggagctattcctcgacttgtcaag

SEQ ID NO: 26883 - DNA, 25 bp, Saccharomyces pastorianus
aaaagctggctttcttccaacagtt

SEQ ID NO: 26884 - DNA, 25 bp, Saccharomyces pastorianus
tgctatcaccatcaacccagaatta

SEQ ID NO: 26885 - DNA, 25 bp, Saccharomyces pastorianus
atctggtttttgagctgtgcctgcc

SEQ ID NO: 26886 - DNA, 25 bp, Saccharomyces pastorianus
tccaacagtttgatgccgatgctat

SEQ ID NO: 26887 - DNA, 25 bp, Saccharomyces pastorianus
aggctaatcaagttcgacaccacca

SEQ ID NO: 26888 - DNA, 25 bp, Saccharomyces pastorianus
aacgacatcctagacgaaaccgagt

SEQ ID NO: 26889 - DNA, 25 bp, Saccharomyces pastorianus
cattttgaaactgctgatcccgggt

SEQ ID NO: 26890 - DNA, 25 bp, Saccharomyces pastorianus
atcgtgtccacgtcatcagaggcca

SEQ ID NO: 26891 - DNA, 25 bp, Saccharomyces pastorianus
attgaaaggcctaccaacgacatcc

SEQ ID NO: 26892 - DNA, 25 bp, Saccharomyces pastorianus
gttaatgaacgagaataggctaaat

SEQ ID NO: 26893 - DNA, 25 bp, Saccharomyces pastorianus
aagacaaaattctcggcactccaga

SEQ ID NO: 26894 - DNA, 25 bp, Saccharomyces pastorianus
gtttagctggcttaaaagttaatgt

SEQ ID NO: 26895 - DNA, 25 bp, Saccharomyces pastorianus
gttaatgttattgatctgcatgaca

SEQ ID NO: 26896 - DNA, 25 bp, Saccharomyces pastorianus
tctcggcactccagaaaaaagttca

SEQ ID NO: 26897 - DNA, 25 bp, Saccharomyces pastorianus
attgatctgcatgacattttcaaga

SEQ ID NO: 26898 - DNA, 25 bp, Saccharomyces pastorianus
gagaattattattcacgaactttgt

SEQ ID NO: 26899 - DNA, 25 bp, Saccharomyces pastorianus
cgaactttgtatctgaccaattaaa

SEQ ID NO: 26900 - DNA, 25 bp, Saccharomyces pastorianus
ttttcaagaagcagattcacacttt

SEQ ID NO: 26901 - DNA, 25 bp, Saccharomyces pastorianus
gagatcagattattccaagagaatt

SEQ ID NO: 26902 - DNA, 25 bp, Saccharomyces pastorianus
caatgtgaagctaaatgaactttac

SEQ ID NO: 26903 - DNA, 25 bp, Saccharomyces pastorianus
caatttcttacaggcgacattcagt

SEQ ID NO: 26904 - DNA, 25 bp, Saccharomyces pastorianus
aaagggaggcagcaattcttcttta

SEQ ID NO: 26905 - DNA, 25 bp, Saccharomyces pastorianus
aaccatttaggttccatgaaagtag

SEQ ID NO: 26906 - DNA, 25 bp, Saccharomyces pastorianus
gcgcatccacggctactaaatttac

SEQ ID NO: 26907 - DNA, 25 bp, Saccharomyces pastorianus
gacattcagtaacggcgcatccacg

SEQ ID NO: 26908 - DNA, 25 bp, Saccharomyces pastorianus
aaaagttaagcctctacagtacaag

SEQ ID NO: 26909 - DNA, 25 bp, Saccharomyces pastorianus
aatttacccagcagattgtgcatac

SEQ ID NO: 26910 - DNA, 25 bp, Saccharomyces pastorianus
gaagttaaatcccaacatcaaagaa

SEQ ID NO: 26911 - DNA, 25 bp, Saccharomyces pastorianus
gcaattcttctttagcaacatccaa

SEQ ID NO: 26912 - DNA, 25 bp, Saccharomyces pastorianus
agcaacatccaacaacaatttctta

SEQ ID NO: 26913 - DNA, 25 bp, Saccharomyces pastorianus
gtaggttttattgcatccgtgtgaa

SEQ ID NO: 26914 - DNA, 25 bp, Saccharomyces pastorianus
atccgttaatggacttggcttatca

SEQ ID NO: 26915 - DNA, 25 bp, Saccharomyces pastorianus
ctaccacacccttgaacttcattga

SEQ ID NO: 26916 - DNA, 25 bp, Saccharomyces pastorianus
aaagtcttgcctgtcatgggatcca

SEQ ID NO: 26917 - DNA, 25 bp, Saccharomyces pastorianus
tggtttccaacggtgaagttctcga

SEQ ID NO: 26918 - DNA, 25 bp, Saccharomyces pastorianus
gattacgactcttatcagtacttag

SEQ ID NO: 26919 - DNA, 25 bp, Saccharomyces pastorianus
gggacaccgaatctacaatggatat

SEQ ID NO: 26920 - DNA, 25 bp, Saccharomyces pastorianus
acttcattgacgtggctggtggttc

SEQ ID NO: 26921 - DNA, 25 bp, Saccharomyces pastorianus
cttggcttatcaacaatgggctaaa

SEQ ID NO: 26922 - DNA, 25 bp, Saccharomyces pastorianus
aggcggtatcttttattgtttggag

SEQ ID NO: 26923 - DNA, 25 bp, Saccharomyces pastorianus
tggtggttccggtgatattgccttc

SEQ ID NO: 26924 - DNA, 25 bp, Saccharomyces pastorianus
gacatctacactgtttcctttggta

SEQ ID NO: 26925 - DNA, 25 bp, Saccharomyces pastorianus
aattcacagatagcgcctttggttt

SEQ ID NO: 26926 - DNA, 25 bp, Saccharomyces pastorianus
gtagaaagcccagctgattccatca

SEQ ID NO: 26927 - DNA, 25 bp, Saccharomyces pastorianus
gattccatcattttttctggcggta

SEQ ID NO: 26928 - DNA, 25 bp, Saccharomyces pastorianus
cacagttctgaatcggtcgtggaaa

SEQ ID NO: 26929 - DNA, 25 bp, Saccharomyces pastorianus
gattcgttcgatatcagtggcggcg

SEQ ID NO: 26930 - DNA, 25 bp, Saccharomyces pastorianus
ggtattcaatggtgattccgcgctg

SEQ ID NO: 26931 - DNA, 25 bp, Saccharomyces pastorianus
acaccagaatatccaaacgcaccga

SEQ ID NO: 26932 - DNA, 25 bp, Saccharomyces pastorianus
tgattccgcgctggcaatgacagat

SEQ ID NO: 26933 - DNA, 25 bp, Saccharomyces pastorianus
ggaggaagttatcgtcccaactctc

SEQ ID NO: 26934 - DNA, 25 bp, Saccharomyces pastorianus
gatctacagactcagccacttgaaa

SEQ ID NO: 26935 - DNA, 25 bp, Saccharomyces pastorianus
tggtttcccactgccaatgataaca

SEQ ID NO: 26936 - DNA, 25 bp, Saccharomyces pastorianus
aacgtcgtctcggtacagcaaactg

SEQ ID NO: 26937 - DNA, 25 bp, Saccharomyces pastorianus
gtcaagtgaaggtcggccatgccat

SEQ ID NO: 26938 - DNA, 25 bp, Saccharomyces pastorianus
cacggtgtcgctaaaccacattgat

SEQ ID NO: 26939 - DNA, 25 bp, Saccharomyces pastorianus
taacgacgtggccaagatcctgaag

SEQ ID NO: 26940 - DNA, 25 bp, Saccharomyces pastorianus
agattgcccggttcatactataaga

SEQ ID NO: 26941 - DNA, 25 bp, Saccharomyces pastorianus
gttgccagcgtcattggtgaagcca

SEQ ID NO: 26942 - DNA, 25 bp, Saccharomyces pastorianus
attttgcatgtgtatccggttcgtc

SEQ ID NO: 26943 - DNA, 25 bp, Saccharomyces pastorianus
gggtatccacgcttatgtttacaaa

SEQ ID NO: 26944 - DNA, 25 bp, Saccharomyces pastorianus
agaggaccaagaccgtgttgccagc

SEQ ID NO: 26945 - DNA, 25 bp, Saccharomyces pastorianus
acagcaaactggtctttccttgtct

SEQ ID NO: 26946 - DNA, 25 bp, Saccharomyces pastorianus
ctagacacaagttcgggccagatca

SEQ ID NO: 26947 - DNA, 25 bp, Saccharomyces pastorianus
atttggcaagggtttatggcaggtt

SEQ ID NO: 26948 - DNA, 25 bp, Saccharomyces pastorianus
gtaccgatgaagacaggcagcaaga

SEQ ID NO: 26949 - DNA, 25 bp, Saccharomyces pastorianus
caggcgacaattggtactctattta

SEQ ID NO: 26950 - DNA, 25 bp, Saccharomyces pastorianus
ggcaggttgcgcttgtaccgatgaa

SEQ ID NO: 26951 - DNA, 25 bp, Saccharomyces pastorianus
gaaggacgacgaaccaggcgacaat

SEQ ID NO: 26952 - DNA, 25 bp, Saccharomyces pastorianus
gctattttcagattgtgtacggata

SEQ ID NO: 26953 - DNA, 25 bp, Saccharomyces pastorianus
atcggtacggattctctttatggtt

SEQ ID NO: 26954 - DNA, 25 bp, Saccharomyces pastorianus
aagatcgttccccttatttggcaag

SEQ ID NO: 26955 - DNA, 25 bp, Saccharomyces pastorianus
agttttatgaagatacccctgaggg

SEQ ID NO: 26956 - DNA, 25 bp, Saccharomyces pastorianus
ggatcacctaaacgccatggaagag

SEQ ID NO: 26957 - DNA, 25 bp, Saccharomyces pastorianus
ggaagcaataaaccaccatacaatg

SEQ ID NO: 26958 - DNA, 25 bp, Saccharomyces pastorianus
ggcactttactaaagcccttggatg

SEQ ID NO: 26959 - DNA, 25 bp, Saccharomyces pastorianus
atctggtctccaatgtgaactacat

SEQ ID NO: 26960 - DNA, 25 bp, Saccharomyces pastorianus
gtgccgatagctttatacccgtatt

SEQ ID NO: 26961 - DNA, 25 bp, Saccharomyces pastorianus
ggaaggacacactaatgactttaca

SEQ ID NO: 26962 - DNA, 25 bp, Saccharomyces pastorianus
gactttacagaacatgtttcccgat

SEQ ID NO: 26963 - DNA, 25 bp, Saccharomyces pastorianus
ggaagtttctctcctaatccagaag

SEQ ID NO: 26964 - DNA, 25 bp, Saccharomyces pastorianus
catgtttcccgatatggatccaagc

SEQ ID NO: 26965 - DNA, 25 bp, Saccharomyces pastorianus
agtggattattctcacctaccgaag

SEQ ID NO: 26966 - DNA, 25 bp, Saccharomyces pastorianus
gggcaagtgcgatatctggtctcca

SEQ ID NO: 26967 - DNA, 25 bp, Saccharomyces pastorianus
gccttcaagctgcagtaaactttgt

SEQ ID NO: 26968 - DNA, 25 bp, Saccharomyces pastorianus
taaccgaatcttctttaaccattga

SEQ ID NO: 26969 - DNA, 25 bp, Saccharomyces pastorianus
aaccctgaggacactttgaatgaca

SEQ ID NO: 26970 - DNA, 25 bp, Saccharomyces pastorianus
atagtagacgacaacaaccctgagg

SEQ ID NO: 26971 - DNA, 25 bp, Saccharomyces pastorianus
atttctaggcggatgcagcccttat

SEQ ID NO: 26972 - DNA, 25 bp, Saccharomyces pastorianus
gcatgttcaatggattcactttact

SEQ ID NO: 26973 - DNA, 25 bp, Saccharomyces pastorianus
gatgtcaatcgaaaaaggcccttta

SEQ ID NO: 26974 - DNA, 25 bp, Saccharomyces pastorianus
gaatgggccgattcagaaactacaa

SEQ ID NO: 26975 - DNA, 25 bp, Saccharomyces pastorianus
tactacgattatatggtgcgcggaa

SEQ ID NO: 26976 - DNA, 25 bp, Saccharomyces pastorianus
aggccctttaagagtgctggtccgg

SEQ ID NO: 26977 - DNA, 25 bp, Saccharomyces pastorianus
ggataaagagaccataccgccttct

SEQ ID NO: 26978 - DNA, 25 bp, Saccharomyces pastorianus
acaaccgcaagagtccagatctatt

SEQ ID NO: 26979 - DNA, 25 bp, Saccharomyces pastorianus
gatacagggtctcagtcgcaggata

SEQ ID NO: 26980 - DNA, 25 bp, Saccharomyces pastorianus
ctcggatggcgaacaaggtggcaat

SEQ ID NO: 26981 - DNA, 25 bp, Saccharomyces pastorianus
ggaggtcattgctgaagcgtttgct

SEQ ID NO: 26982 - DNA, 25 bp, Saccharomyces pastorianus
gagatccttacgtatgccgattggc

SEQ ID NO: 26983 - DNA, 25 bp, Saccharomyces pastorianus
tatcaatcatctgcagtaccattcc

SEQ ID NO: 26984 - DNA, 25 bp, Saccharomyces pastorianus
gaagtggataccacgttgccgggct

SEQ ID NO: 26985 - DNA, 25 bp, Saccharomyces pastorianus
gaagatcttttgctaacagcagacg

SEQ ID NO: 26986 - DNA, 25 bp, Saccharomyces pastorianus
gaaaggtggtaaatcgaacggcgat

SEQ ID NO: 26987 - DNA, 25 bp, Saccharomyces pastorianus
tagtggatccatatggtggctcgga

SEQ ID NO: 26988 - DNA, 25 bp, Saccharomyces pastorianus
gccgattggccaagaatggacatct

SEQ ID NO: 26989 - DNA, 25 bp, Saccharomyces pastorianus
acagcagacgattccacaagattaa

SEQ ID NO: 26990 - DNA, 25 bp, Saccharomyces pastorianus
gaatgggctggtgtaggctctaaac

SEQ ID NO: 26991 - DNA, 25 bp, Saccharomyces pastorianus
gaggacgacattcttttgaaatcac

SEQ ID NO: 26992 - DNA, 25 bp, Saccharomyces pastorianus
atcgcaggagggtctggtatcactc

SEQ ID NO: 26993 - DNA, 25 bp, Saccharomyces pastorianus
tgtggttcataagccgaacggccta

SEQ ID NO: 26994 - DNA, 25 bp, Saccharomyces pastorianus
gggcctttaggtgaactcgaatatg

SEQ ID NO: 26995 - DNA, 25 bp, Saccharomyces pastorianus
tgggctggagtaacggatttcacaa

SEQ ID NO: 26996 - DNA, 25 bp, Saccharomyces pastorianus
aacaagcagaggatcaccgtttatt

SEQ ID NO: 26997 - DNA, 25 bp, Saccharomyces pastorianus
ggtatcactcccgtattacaagttt

SEQ ID NO: 26998 - DNA, 25 bp, Saccharomyces pastorianus
caaacacggtgtcgtttccaaatat

SEQ ID NO: 26999 - DNA, 25 bp, Saccharomyces pastorianus
gaaattattccatcgccagaagatc

SEQ ID NO: 27000 - DNA, 25 bp, Saccharomyces pastorianus
tacaccccagtaaatgtccctaata

SEQ ID NO: 27001 - DNA, 25 bp, Saccharomyces pastorianus
atatcgggtacgtgactttggaaga

SEQ ID NO: 27002 - DNA, 25 bp, Saccharomyces pastorianus
gttcgttgctcaaataccacgctac

SEQ ID NO: 27003 - DNA, 25 bp, Saccharomyces pastorianus
tatcgcccaagctgccattagcaaa

SEQ ID NO: 27004 - DNA, 25 bp, Saccharomyces pastorianus
gtccccatggaagttcgttgctcaa

SEQ ID NO: 27005 - DNA, 25 bp, Saccharomyces pastorianus
ttataggccttttggctgcaacacc

SEQ ID NO: 27006 - DNA, 25 bp, Saccharomyces pastorianus
gttcacccttttcgaaaacactatg

SEQ ID NO: 27007 - DNA, 25 bp, Saccharomyces pastorianus
gtactacgttcattggaccattcta

SEQ ID NO: 27008 - DNA, 25 bp, Saccharomyces pastorianus
aatgtttgccgtccattcttagaca

SEQ ID NO: 27009 - DNA, 25 bp, Saccharomyces pastorianus
gtcctggtgcagtctacggtaatgt

SEQ ID NO: 27010 - DNA, 25 bp, Saccharomyces pastorianus
gacaacactccatctcattgtagat

SEQ ID NO: 27011 - DNA, 25 bp, Saccharomyces pastorianus
gagttttatgttcatgtccccatgg

SEQ ID NO: 27012 - DNA, 25 bp, Saccharomyces pastorianus
aaggatgctgactacgacgatttcg

SEQ ID NO: 27013 - DNA, 25 bp, Saccharomyces pastorianus
ccaggaccatccgtatcaactataa

SEQ ID NO: 27014 - DNA, 25 bp, Saccharomyces pastorianus
gctaggcacaaatttcaccctggta

SEQ ID NO: 27015 - DNA, 25 bp, Saccharomyces pastorianus
ggtacggcggcttattttcattgac

SEQ ID NO: 27016 - DNA, 25 bp, Saccharomyces pastorianus
gttccatgacgaagaccacgctgag

SEQ ID NO: 27017 - DNA, 25 bp, Saccharomyces pastorianus
ctggtattcccctatactcttatga

SEQ ID NO: 27018 - DNA, 25 bp, Saccharomyces pastorianus
gaagacgccatctatctggagagaa

SEQ ID NO: 27019 - DNA, 25 bp, Saccharomyces pastorianus
tgaggccttctacgacaacttgcaa

SEQ ID NO: 27020 - DNA, 25 bp, Saccharomyces pastorianus
aaactccagggatttcatcgccagg

SEQ ID NO: 27021 - DNA, 25 bp, Saccharomyces pastorianus
atcgtgtgcagttccttgaccaaga

SEQ ID NO: 27022 - DNA, 25 bp, Saccharomyces pastorianus
aagccgggtgtacgactttgccact

SEQ ID NO: 27023 - DNA, 25 bp, Saccharomyces pastorianus
tgcaactaaataagggcccctcgct

SEQ ID NO: 27024 - DNA, 25 bp, Saccharomyces pastorianus
aaagctgctgatctctcttctaaca

SEQ ID NO: 27025 - DNA, 25 bp, Saccharomyces pastorianus
ccacccctgtccttaaagtgtattg

SEQ ID NO: 27026 - DNA, 25 bp, Saccharomyces pastorianus
gagtaaagctgctgatctctcttct

SEQ ID NO: 27027 - DNA, 25 bp, Saccharomyces pastorianus
gccgccgtctattacggtatgagta

SEQ ID NO: 27028 - DNA, 25 bp, Saccharomyces pastorianus
gtccttaaagtgtattggcccttct

SEQ ID NO: 27029 - DNA, 25 bp, Saccharomyces pastorianus
ttaaagtgtattggcccttcttcgt

SEQ ID NO: 27030 - DNA, 25 bp, Saccharomyces pastorianus
ggtgccgccgtctattacggtatga

SEQ ID NO: 27031 - DNA, 25 bp, Saccharomyces pastorianus
tattggcccttcttcgtggctggtg

SEQ ID NO: 27032 - DNA, 25 bp, Saccharomyces pastorianus
tgctgatctctcttctaacacgaag

SEQ ID NO: 27033 - DNA, 25 bp, Saccharomyces pastorianus
ttatcaacgatccaagaaacccaag

SEQ ID NO: 27034 - DNA, 25 bp, Saccharomyces pastorianus
ttcttcgtggctggtgccgccgtct

SEQ ID NO: 27035 - DNA, 25 bp, Saccharomyces pastorianus
attgccaagaatccaaagcctcgaa

SEQ ID NO: 27036 - DNA, 25 bp, Saccharomyces pastorianus
ggacaaggttttcccacgtgtggat

SEQ ID NO: 27037 - DNA, 25 bp, Saccharomyces pastorianus
gttcgtacagaaccgtgccatactg

SEQ ID NO: 27038 - DNA, 25 bp, Saccharomyces pastorianus
gaagatatctcacgctgtatggaaa

SEQ ID NO: 27039 - DNA, 25 bp, Saccharomyces pastorianus
aagattctaagacctctcttaccgc

SEQ ID NO: 27040 - DNA, 25 bp, Saccharomyces pastorianus
agatctgatcttgcaaccatgaatg

SEQ ID NO: 27041 - DNA, 25 bp, Saccharomyces pastorianus
gtaaagctgatgtaccgctagaatc

SEQ ID NO: 27042 - DNA, 25 bp, Saccharomyces pastorianus
aactatcggcgagatgcaggcttgg

SEQ ID NO: 27043 - DNA, 25 bp, Saccharomyces pastorianus
catgaatgcaaaggccacctgggaa

SEQ ID NO: 27044 - DNA, 25 bp, Saccharomyces pastorianus
gttttcaacgtagaccacactcagg

SEQ ID NO: 27045 - DNA, 25 bp, Saccharomyces pastorianus
gcaccacacggatatcagatctgat

SEQ ID NO: 27046 - DNA, 25 bp, Saccharomyces pastorianus
tattgaatcctacggtactgcttct

SEQ ID NO: 27047 - DNA, 25 bp, Saccharomyces pastorianus
aaggtgttcttcgatccagctgtca

SEQ ID NO: 27048 - DNA, 25 bp, Saccharomyces pastorianus
tggcaaacgctggtccaaacacgaa

SEQ ID NO: 27049 - DNA, 25 bp, Saccharomyces pastorianus
attatcccagatttcatgctccaag

SEQ ID NO: 27050 - DNA, 25 bp, Saccharomyces pastorianus
gttacaaaggtgttcctttccacag

SEQ ID NO: 27051 - DNA, 25 bp, Saccharomyces pastorianus
tacggttccaagtttgctgacgaga

SEQ ID NO: 27052 - DNA, 25 bp, Saccharomyces pastorianus
aactctgcttccagattgggcaaga

SEQ ID NO: 27053 - DNA, 25 bp, Saccharomyces pastorianus
actactgttccttgttcatggttgg

SEQ ID NO: 27054 - DNA, 25 bp, Saccharomyces pastorianus
ggtcccagttcttcattactactgt

SEQ ID NO: 27055 - DNA, 25 bp, Saccharomyces pastorianus
ttcagtcattcaacaatctcgccta

SEQ ID NO: 27056 - DNA, 25 bp, Saccharomyces pastorianus
caaggcaggcttgctatcaatggca

SEQ ID NO: 27057 - DNA, 25 bp, Saccharomyces pastorianus
aaaactatccaagggctctgtcaag

SEQ ID NO: 27058 - DNA, 25 bp, Saccharomyces pastorianus
gcagcagtcttatacacaggtcttg

SEQ ID NO: 27059 - DNA, 25 bp, Saccharomyces pastorianus
gttatcgccatatgattttgctgaa

SEQ ID NO: 27060 - DNA, 25 bp, Saccharomyces pastorianus
gtgagcaacaacctgttatcgccat

SEQ ID NO: 27061 - DNA, 25 bp, Saccharomyces pastorianus
attatccgatttcaagcagcagtct

SEQ ID NO: 27062 - DNA, 25 bp, Saccharomyces pastorianus
gactatggtttgtattattatccga

SEQ ID NO: 27063 - DNA, 25 bp, Saccharomyces pastorianus
tcggcatgatattctcgttacgctc

SEQ ID NO: 27064 - DNA, 25 bp, Saccharomyces pastorianus
gagttcacacatattgtacagcttc

SEQ ID NO: 27065 - DNA, 25 bp, Saccharomyces pastorianus
tggacactggcatccaatagtgcaa

SEQ ID NO: 27066 - DNA, 25 bp, Saccharomyces pastorianus
gcaaaactactattcggcatgatat

SEQ ID NO: 27067 - DNA, 25 bp, Saccharomyces pastorianus
attctcgttacgctctattacacaa

SEQ ID NO: 27068 - DNA, 25 bp, Saccharomyces pastorianus
gctcatgctgcagttcgtcgataag

SEQ ID NO: 27069 - DNA, 25 bp, Saccharomyces pastorianus
aacaagtctgtttaccaccgagcag

SEQ ID NO: 27070 - DNA, 25 bp, Saccharomyces pastorianus
gtctgcaactagtgtactgttcatt

SEQ ID NO: 27071 - DNA, 25 bp, Saccharomyces pastorianus
taagcgactcagtttgtctgcaact

SEQ ID NO: 27072 - DNA, 25 bp, Saccharomyces pastorianus
gtgatttggaaattccgttcccaat

SEQ ID NO: 27073 - DNA, 25 bp, Saccharomyces pastorianus
taaacgatctcactcgcggatcaag

SEQ ID NO: 27074 - DNA, 25 bp, Saccharomyces pastorianus
gcggatcaagcgacgtcaaactaag

SEQ ID NO: 27075 - DNA, 25 bp, Saccharomyces pastorianus
gctccagatgagtccagcgcgaata

SEQ ID NO: 27076 - DNA, 25 bp, Saccharomyces pastorianus
gcgcgaataccccatcatttagaaa

SEQ ID NO: 27077 - DNA, 25 bp, Saccharomyces pastorianus
actcggaacttctgcattacaacca

SEQ ID NO: 27078 - DNA, 25 bp, Saccharomyces pastorianus
gagcagctcgcccaagcgatcgata

SEQ ID NO: 27079 - DNA, 25 bp, Saccharomyces pastorianus
ggttccacaacttttgccaacatta

SEQ ID NO: 27080 - DNA, 25 bp, Saccharomyces pastorianus
tcttcttcctaaccaaaccaacatt

SEQ ID NO: 27081 - DNA, 25 bp, Saccharomyces pastorianus
tacaaaccgccttgggttcagacag

SEQ ID NO: 27082 - DNA, 25 bp, Saccharomyces pastorianus
ggatccgctggtgaagacgacgaat

SEQ ID NO: 27083 - DNA, 25 bp, Saccharomyces pastorianus
gatgaagatttccaagccagctccg

SEQ ID NO: 27084 - DNA, 25 bp, Saccharomyces pastorianus
gagttcgattcagatgcagcattaa

SEQ ID NO: 27085 - DNA, 25 bp, Saccharomyces pastorianus
atacccattggataacgcgttcttc

SEQ ID NO: 27086 - DNA, 25 bp, Saccharomyces pastorianus
ttggaagtagtattgcgctcgaaca

SEQ ID NO: 27087 - DNA, 25 bp, Saccharomyces pastorianus
gtgctgtttcatgttcctttaaggc

SEQ ID NO: 27088 - DNA, 25 bp, Saccharomyces pastorianus
gagcaggacaaacctctacatcgtc

SEQ ID NO: 27089 - DNA, 25 bp, Saccharomyces pastorianus
actgaccgtagggttatcgttcctg

SEQ ID NO: 27090 - DNA, 25 bp, Saccharomyces pastorianus
aaccaggcagctacaaaactttcaa

SEQ ID NO: 27091 - DNA, 25 bp, Saccharomyces pastorianus
gctcgaacttacaaaggtgccctaa

SEQ ID NO: 27092 - DNA, 25 bp, Saccharomyces pastorianus
ttgattccagcttcctttttaagaa

SEQ ID NO: 27093 - DNA, 25 bp, Saccharomyces pastorianus
aactttcaaagcattgtccgtacgc

SEQ ID NO: 27094 - DNA, 25 bp, Saccharomyces pastorianus
gagagactttttcataaccaggcag

SEQ ID NO: 27095 - DNA, 25 bp, Saccharomyces pastorianus
gattttcaggttgttacggacgatt

SEQ ID NO: 27096 - DNA, 25 bp, Saccharomyces pastorianus
gtacgcttgcgttacatgccgaagg

SEQ ID NO: 27097 - DNA, 25 bp, Saccharomyces pastorianus
tggagacttgctttatcccgatgac

SEQ ID NO: 27098 - DNA, 25 bp, Saccharomyces pastorianus
gatgacccctacgaacatttcagag

SEQ ID NO: 27099 - DNA, 25 bp, Saccharomyces pastorianus
ggaccttgacgatactatggttcag

SEQ ID NO: 27100 - DNA, 25 bp, Saccharomyces pastorianus
gccgaaggtgtgaccaatggtgcat

SEQ ID NO: 27101 - DNA, 25 bp, Saccharomyces pastorianus
tggtgttaacgtaccggttggcact

SEQ ID NO: 27102 - DNA, 25 bp, Saccharomyces pastorianus
ttggaggtgctctcagcgttggaaa

SEQ ID NO: 27103 - DNA, 25 bp, Saccharomyces pastorianus
gtgggtactactgctacttgcattt

SEQ ID NO: 27104 - DNA, 25 bp, Saccharomyces pastorianus
atcgcttgtttcctatccttttgaa

SEQ ID NO: 27105 - DNA, 25 bp, Saccharomyces pastorianus
atattagtaactctctctaccctga

SEQ ID NO: 27106 - DNA, 25 bp, Saccharomyces pastorianus
tggctcacctgatcctaatgcaaag

SEQ ID NO: 27107 - DNA, 25 bp, Saccharomyces pastorianus
gggaacgctctgtcaaaggccttga

SEQ ID NO: 27108 - DNA, 25 bp, Saccharomyces pastorianus
ttaacggcatggtgttctaccttgc

SEQ ID NO: 27109 - DNA, 25 bp, Saccharomyces pastorianus
ggaacccgatgacgtatccgtggta

SEQ ID NO: 27110 - DNA, 25 bp, Saccharomyces pastorianus
gggcttgccagatacgctattcagt

SEQ ID NO: 27111 - DNA, 25 bp, Saccharomyces pastorianus
ggttggcactgacatctattcgaga

SEQ ID NO: 27112 - DNA, 25 bp, Saccharomyces pastorianus
acaagagctgggtgacattgtcgat

SEQ ID NO: 27113 - DNA, 25 bp, Saccharomyces pastorianus
gacattgaactctcatgcgattaca

SEQ ID NO: 27114 - DNA, 25 bp, Saccharomyces pastorianus
aaatggatcccaagaacaagagctg

SEQ ID NO: 27115 - DNA, 25 bp, Saccharomyces pastorianus
aagacgaagatcttgtcgcaaacga

SEQ ID NO: 27116 - DNA, 25 bp, Saccharomyces pastorianus
aacgcacgtcatgaaagctttgaac

SEQ ID NO: 27117 - DNA, 25 bp, Saccharomyces pastorianus
aagactctcattcacggcaaagcta

SEQ ID NO: 27118 - DNA, 25 bp, Saccharomyces pastorianus
gacagttcacataacgcacgtcatg

SEQ ID NO: 27119 - DNA, 25 bp, Saccharomyces pastorianus
gacgcaggcatcttgttcaaacaaa

SEQ ID NO: 27120 - DNA, 25 bp, Saccharomyces pastorianus
atcaactgcttgacgcaggcatctt

SEQ ID NO: 27121 - DNA, 25 bp, Saccharomyces pastorianus
gggatttcattctcaatcaactgct

SEQ ID NO: 27122 - DNA, 25 bp, Saccharomyces pastorianus
ataacaaaaacgctgttccaacagg

SEQ ID NO: 27123 - DNA, 25 bp, Saccharomyces pastorianus
acatgagaaactcctcttcttcatc

SEQ ID NO: 27124 - DNA, 25 bp, Saccharomyces pastorianus
tcttgtttgatttgacgcgtccgga

SEQ ID NO: 27125 - DNA, 25 bp, Saccharomyces pastorianus
tcctctgtgatcatcttcttgtttg

SEQ ID NO: 27126 - DNA, 25 bp, Saccharomyces pastorianus
acgcagacgctaggtgtgaactttc

SEQ ID NO: 27127 - DNA, 25 bp, Saccharomyces pastorianus
gttagcatacgctcaaccgatatta

SEQ ID NO: 27128 - DNA, 25 bp, Saccharomyces pastorianus
ggtgttttgttctacagccaagtct

SEQ ID NO: 27129 - DNA, 25 bp, Saccharomyces pastorianus
taatctgacgttgaccatcccggaa

SEQ ID NO: 27130 - DNA, 25 bp, Saccharomyces pastorianus
gtagccagcaacgtcgacatcatag

SEQ ID NO: 27131 - DNA, 25 bp, Saccharomyces pastorianus
gagggagttcattaacatgcttcca

SEQ ID NO: 27132 - DNA, 25 bp, Saccharomyces pastorianus
aggtcatgaatgcaccgctggtgtt

SEQ ID NO: 27133 - DNA, 25 bp, Saccharomyces pastorianus
tatgggctgaatgactcggcaatcc

SEQ ID NO: 27134 - DNA, 25 bp, Saccharomyces pastorianus
agagacactcttacgctcaatcttc

SEQ ID NO: 27135 - DNA, 25 bp, Saccharomyces pastorianus
accagaaagcaagctaaccaagtta

SEQ ID NO: 27136 - DNA, 25 bp, Saccharomyces pastorianus
agttaagagacactcttacgctcaa

SEQ ID NO: 27137 - DNA, 25 bp, Saccharomyces pastorianus
gcaagctaaccaagttaagagacac

SEQ ID NO: 27138 - DNA, 25 bp, Saccharomyces pastorianus
gccttcaccagaaagcaagctaacc

SEQ ID NO: 27139 - DNA, 25 bp, Saccharomyces pastorianus
gattacgttttgagaatctttgcta

SEQ ID NO: 27140 - DNA, 25 bp, Saccharomyces pastorianus
ttcaccagaaagcaagctaaccaag

SEQ ID NO: 27141 - DNA, 25 bp, Saccharomyces pastorianus
attacgttttgagaatctttgctat

SEQ ID NO: 27142 - DNA, 25 bp, Saccharomyces pastorianus
gaaagcaagctaaccaagttaagag

SEQ ID NO: 27143 - DNA, 25 bp, Saccharomyces pastorianus
ttccagaagttatcaacaaggaaat

SEQ ID NO: 27144 - DNA, 25 bp, Saccharomyces pastorianus
aagttaagagacactcttacgctca

SEQ ID NO: 27145 - DNA, 25 bp, Saccharomyces pastorianus
ttcaccaccgacaaattgagatcca

SEQ ID NO: 27146 - DNA, 25 bp, Saccharomyces pastorianus
caagttgagagttgatgaagttcaa

SEQ ID NO: 27147 - DNA, 25 bp, Saccharomyces pastorianus
taccaaggacatctttccactacaa

SEQ ID NO: 27148 - DNA, 25 bp, Saccharomyces pastorianus
gtcatttctgaaatcttgaccagag

SEQ ID NO: 27149 - DNA, 25 bp, Saccharomyces pastorianus
cactttggcccaattgacttccaag

SEQ ID NO: 27150 - DNA, 25 bp, Saccharomyces pastorianus
gaatgcttccgatgccttgaagggt

SEQ ID NO: 27151 - DNA, 25 bp, Saccharomyces pastorianus
tgtttggctgacttgcaaggttctg

SEQ ID NO: 27152 - DNA, 25 bp, Saccharomyces pastorianus
aatcgaaaacgctaccaaggacatc

SEQ ID NO: 27153 - DNA, 25 bp, Saccharomyces pastorianus
ctctttcagaaaggtcaagttgaga

SEQ ID NO: 27154 - DNA, 25 bp, Saccharomyces pastorianus
ccaaaactccactttggcccaattg

SEQ ID NO: 27155 - DNA, 25 bp, Saccharomyces pastorianus
gtccaaaactccactttggcccaat

SEQ ID NO: 27156 - DNA, 25 bp, Saccharomyces pastorianus
gtacaatgttttaccaattacgaga

SEQ ID NO: 27157 - DNA, 25 bp, Saccharomyces pastorianus
gggcacaaggtgtcttgttttccaa

SEQ ID NO: 27158 - DNA, 25 bp, Saccharomyces pastorianus
gcaactgagactggcctacgtgatt

SEQ ID NO: 27159 - DNA, 25 bp, Saccharomyces pastorianus
ggtattgtacctgttgacgtccatg

SEQ ID NO: 27160 - DNA, 25 bp, Saccharomyces pastorianus
tgccgattgcgtttgcctaatgggc

SEQ ID NO: 27161 - DNA, 25 bp, Saccharomyces pastorianus
gacgtccatgtaagtagaatcgcta

SEQ ID NO: 27162 - DNA, 25 bp, Saccharomyces pastorianus
gagctagctacaagggcaactgaga

SEQ ID NO: 27163 - DNA, 25 bp, Saccharomyces pastorianus
cctacgtgatttgggctttggatat

SEQ ID NO: 27164 - DNA, 25 bp, Saccharomyces pastorianus
atcgcatgctggttgggcacaaggt

SEQ ID NO: 27165 - DNA, 25 bp, Saccharomyces pastorianus
aaagtcgactctggtattgcaagcg

SEQ ID NO: 27166 - DNA, 25 bp, Saccharomyces pastorianus
aatgggccttcacatggatggtatt

SEQ ID NO: 27167 - DNA, 25 bp, Saccharomyces pastorianus
agctccatcgaccatgacatgaaca

SEQ ID NO: 27168 - DNA, 25 bp, Saccharomyces pastorianus
gcaccgtgaccatggcagaattcag

SEQ ID NO: 27169 - DNA, 25 bp, Saccharomyces pastorianus
gctccggtgagctgaaatccatgtt

SEQ ID NO: 27170 - DNA, 25 bp, Saccharomyces pastorianus
ttctgcctcgtcactggaaatgtgg

SEQ ID NO: 27171 - DNA, 25 bp, Saccharomyces pastorianus
caacaacaaatttggctccggtgag

SEQ ID NO: 27172 - DNA, 25 bp, Saccharomyces pastorianus
aacagcagggacaagctccttccac

SEQ ID NO: 27173 - DNA, 25 bp, Saccharomyces pastorianus
aggcgcccatgctgtcttcccagaa

SEQ ID NO: 27174 - DNA, 25 bp, Saccharomyces pastorianus
attcagaagagtgcctttgccaccc

SEQ ID NO: 27175 - DNA, 25 bp, Saccharomyces pastorianus
ggaggagagactcagctccatcgac

SEQ ID NO: 27176 - DNA, 25 bp, Saccharomyces pastorianus
aacgcagcaactcacaacagcaggg

SEQ ID NO: 27177 - DNA, 25 bp, Saccharomyces pastorianus
aattctcaagactacttctacgccc

SEQ ID NO: 27178 - DNA, 25 bp, Saccharomyces pastorianus
aaggtgcctcaagagcgttgtccaa

SEQ ID NO: 27179 - DNA, 25 bp, Saccharomyces pastorianus
gttcaacgcaccgaagatgtcatta

SEQ ID NO: 27180 - DNA, 25 bp, Saccharomyces pastorianus
gtgagtggtgtggtgctatccaacc

SEQ ID NO: 27181 - DNA, 25 bp, Saccharomyces pastorianus
ggcagtgcccaacgatgtcttatat

SEQ ID NO: 27182 - DNA, 25 bp, Saccharomyces pastorianus
gaaggcgctctgtctgggcgctaaa

SEQ ID NO: 27183 - DNA, 25 bp, Saccharomyces pastorianus
attcctttacgccaactcatgctat

SEQ ID NO: 27184 - DNA, 25 bp, Saccharomyces pastorianus
tggcttgggtagaccattcctttac

SEQ ID NO: 27185 - DNA, 25 bp, Saccharomyces pastorianus
acaaacctacccattgtcatcaagg

SEQ ID NO: 27186 - DNA, 25 bp, Saccharomyces pastorianus
gtgttcgccgtggtacagatatttt

SEQ ID NO: 27187 - DNA, 25 bp, Saccharomyces pastorianus
tgagactcctaggtgttgccagtat

SEQ ID NO: 27188 - DNA, 25 bp, Saccharomyces pastorianus
aagcctgagctgttagacctgtcga

SEQ ID NO: 27189 - DNA, 25 bp, Saccharomyces pastorianus
aaacaattgcagttccggcaacaat

SEQ ID NO: 27190 - DNA, 25 bp, Saccharomyces pastorianus
ggcgcggcttccagcggaaatacta

SEQ ID NO: 27191 - DNA, 25 bp, Saccharomyces pastorianus
atgccgccgccacatataatggcaa

SEQ ID NO: 27192 - DNA, 25 bp, Saccharomyces pastorianus
tatcgaaataacacccttgacgccc

SEQ ID NO: 27193 - DNA, 25 bp, Saccharomyces pastorianus
atacatggtccacggttatttcggt

SEQ ID NO: 27194 - DNA, 25 bp, Saccharomyces pastorianus
aacgaccacttcgagtttgacacac

SEQ ID NO: 27195 - DNA, 25 bp, Saccharomyces pastorianus
tgccgcggctgtccataacaataat

SEQ ID NO: 27196 - DNA, 25 bp, Saccharomyces pastorianus
gcctctctactcaacgagtctgaat

SEQ ID NO: 27197 - DNA, 25 bp, Saccharomyces pastorianus
atcctgcccgctcaacatataattg

SEQ ID NO: 27198 - DNA, 25 bp, Saccharomyces pastorianus
ggaaatactagctccacacaacacc

SEQ ID NO: 27199 - DNA, 25 bp, Saccharomyces pastorianus
agtcatggaataacaggcgcggctt

SEQ ID NO: 27200 - DNA, 25 bp, Saccharomyces pastorianus
acgtcaacgttcctcatcagtttat

SEQ ID NO: 27201 - DNA, 25 bp, Saccharomyces pastorianus
atggaaccccttccgcagagaaaag

SEQ ID NO: 27202 - DNA, 25 bp, Saccharomyces pastorianus
tatcgtggagtttgtctcgcttgcc

SEQ ID NO: 27203 - DNA, 25 bp, Saccharomyces pastorianus
ggtgctccaagatgctatcgaacat

SEQ ID NO: 27204 - DNA, 25 bp, Saccharomyces pastorianus
aataccaatgcggtcactgcgactg

SEQ ID NO: 27205 - DNA, 25 bp, Saccharomyces pastorianus
tcgcttgccgttttctttgtcaaat

SEQ ID NO: 27206 - DNA, 25 bp, Saccharomyces pastorianus
aagctgggtgcctccatgatgggta

SEQ ID NO: 27207 - DNA, 25 bp, Saccharomyces pastorianus
gaaaagagacgccttctactacctg

SEQ ID NO: 27208 - DNA, 25 bp, Saccharomyces pastorianus
tatcgaacatggtcgtcgtcctcat

SEQ ID NO: 27209 - DNA, 25 bp, Saccharomyces pastorianus
tttacattctgacttggtgctccaa

SEQ ID NO: 27210 - DNA, 25 bp, Saccharomyces pastorianus
gtgtctttcgtcctttacattctga

SEQ ID NO: 27211 - DNA, 25 bp, Saccharomyces pastorianus
ggccagcaagctccaataaatccgg

SEQ ID NO: 27212 - DNA, 25 bp, Saccharomyces pastorianus
aatgtacctgtatcgtgtagtttca

SEQ ID NO: 27213 - DNA, 25 bp, Saccharomyces pastorianus
gacattcatggtaccaagggcgact

SEQ ID NO: 27214 - DNA, 25 bp, Saccharomyces pastorianus
gtaccaatctatctctgatttccat

SEQ ID NO: 27215 - DNA, 25 bp, Saccharomyces pastorianus
gttcccgactttaatggatgccctg

SEQ ID NO: 27216 - DNA, 25 bp, Saccharomyces pastorianus
gcactgccctcacagtttgtaatgc

SEQ ID NO: 27217 - DNA, 25 bp, Saccharomyces pastorianus
gtacccgatcacctattatttcaag

SEQ ID NO: 27218 - DNA, 25 bp, Saccharomyces pastorianus
taaatccgggctacgattccggcaa

SEQ ID NO: 27219 - DNA, 25 bp, Saccharomyces pastorianus
atgccctgatactacaccggttaat

SEQ ID NO: 27220 - DNA, 25 bp, Saccharomyces pastorianus
accgattaggtcagcgagttccgaa

SEQ ID NO: 27221 - DNA, 25 bp, Saccharomyces pastorianus
gagttccgaagaccgtacccgatca

SEQ ID NO: 27222 - DNA, 25 bp, Saccharomyces pastorianus
tttaccgacaacgataatgaacgat

SEQ ID NO: 27223 - DNA, 25 bp, Saccharomyces pastorianus
gtaaagccgaatgccgaatggtata

SEQ ID NO: 27224 - DNA, 25 bp, Saccharomyces pastorianus
gaaagaccacagatatcgaacagta

SEQ ID NO: 27225 - DNA, 25 bp, Saccharomyces pastorianus
gactcagtgccgttttggttaactt

SEQ ID NO: 27226 - DNA, 25 bp, Saccharomyces pastorianus
gatttcgatcctattttatatcctg

SEQ ID NO: 27227 - DNA, 25 bp, Saccharomyces pastorianus
aaagaagctggtcacgtcgggataa

SEQ ID NO: 27228 - DNA, 25 bp, Saccharomyces pastorianus
caatacgaaccagtcgcgggagtaa

SEQ ID NO: 27229 - DNA, 25 bp, Saccharomyces pastorianus
aaatttatcaaggagctgggcgtag

SEQ ID NO: 27230 - DNA, 25 bp, Saccharomyces pastorianus
aattctctcatcaaggactcagtgc

SEQ ID NO: 27231 - DNA, 25 bp, Saccharomyces pastorianus
gaaacttcaactttggattcaaacg

SEQ ID NO: 27232 - DNA, 25 bp, Saccharomyces pastorianus
gaaatgaaaatctcgaatccacaat

SEQ ID NO: 27233 - DNA, 25 bp, Saccharomyces pastorianus
gtttattttatctatgcatcttgcc

SEQ ID NO: 27234 - DNA, 25 bp, Saccharomyces pastorianus
ttgccattacctacttatggtcctc

SEQ ID NO: 27235 - DNA, 25 bp, Saccharomyces pastorianus
ggtaacacggacaacagttcagcgg

SEQ ID NO: 27236 - DNA, 25 bp, Saccharomyces pastorianus
atggtcctctttaattaattgtcaa

SEQ ID NO: 27237 - DNA, 25 bp, Saccharomyces pastorianus
gcatcttgccatttactaaaagccg

SEQ ID NO: 27238 - DNA, 25 bp, Saccharomyces pastorianus
gacgccgaggtttattttatctatg

SEQ ID NO: 27239 - DNA, 25 bp, Saccharomyces pastorianus
gatccctccatttatggaagacgcc

SEQ ID NO: 27240 - DNA, 25 bp, Saccharomyces pastorianus
gaaacagcgacctagttgggctgaa

SEQ ID NO: 27241 - DNA, 25 bp, Saccharomyces pastorianus
ggcggatttacaatcccaagtagat

SEQ ID NO: 27242 - DNA, 25 bp, Saccharomyces pastorianus
cagttcagcggataattcattcggg

SEQ ID NO: 27243 - DNA, 25 bp, Saccharomyces pastorianus
aaagccgatattttatccaggcaat

SEQ ID NO: 27244 - DNA, 25 bp, Saccharomyces pastorianus
acttcgatggttatggctggtctca

SEQ ID NO: 27245 - DNA, 25 bp, Saccharomyces pastorianus
gaacggaaatatctctgacgctgaa

SEQ ID NO: 27246 - DNA, 25 bp, Saccharomyces pastorianus
gcatacatgcttaacaacgactggt

SEQ ID NO: 27247 - DNA, 25 bp, Saccharomyces pastorianus
ttgatctccacatcgcagctatcat

SEQ ID NO: 27248 - DNA, 25 bp, Saccharomyces pastorianus
cattattatttatcccaagctgcag

SEQ ID NO: 27249 - DNA, 25 bp, Saccharomyces pastorianus
tgctgccaaggaacattctcactat

SEQ ID NO: 27250 - DNA, 25 bp, Saccharomyces pastorianus
tcaggctttgagacgtgctgccaag

SEQ ID NO: 27251 - DNA, 25 bp, Saccharomyces pastorianus
gaatcacggtatgtcacctgatgca

SEQ ID NO: 27252 - DNA, 25 bp, Saccharomyces pastorianus
cacctatgaggctgcgtctacaaga

SEQ ID NO: 27253 - DNA, 25 bp, Saccharomyces pastorianus
ggtagatctgtatcaactgcttctt

SEQ ID NO: 27254 - DNA, 25 bp, Saccharomyces pastorianus
acgggtttgggttagcatacatgct

SEQ ID NO: 27255 - DNA, 25 bp, Saccharomyces pastorianus
tccgcattggttggtggtgcatctt

SEQ ID NO: 27256 - DNA, 25 bp, Saccharomyces pastorianus
ggattcagcccttctaaacatgatg

SEQ ID NO: 27257 - DNA, 25 bp, Saccharomyces pastorianus
gagtgatctgaccagcgtaccacga

SEQ ID NO: 27258 - DNA, 25 bp, Saccharomyces pastorianus
gattaccacatgctctatatgcgga

SEQ ID NO: 27259 - DNA, 25 bp, Saccharomyces pastorianus
caggagcttctccagtcgaacagga

SEQ ID NO: 27260 - DNA, 25 bp, Saccharomyces pastorianus
gaaagatatacaccgcaggagcttc

SEQ ID NO: 27261 - DNA, 25 bp, Saccharomyces pastorianus
ggtatttcaaagtcttgcccctgat

SEQ ID NO: 27262 - DNA, 25 bp, Saccharomyces pastorianus
tttgcattcgtttctggattcagcc

SEQ ID NO: 27263 - DNA, 25 bp, Saccharomyces pastorianus
agaacctgtcagatttgcccaatgt

SEQ ID NO: 27264 - DNA, 25 bp, Saccharomyces pastorianus
tgcccaatgtgccaactttattgag

SEQ ID NO: 27265 - DNA, 25 bp, Saccharomyces pastorianus
gttgggtactgaagccggagacttt

SEQ ID NO: 27266 - DNA, 25 bp, Saccharomyces pastorianus
gattttgccaggctttgcagtcttt

SEQ ID NO: 27267 - DNA, 25 bp, Saccharomyces pastorianus
gactgtatctattgctggtatcgta

SEQ ID NO: 27268 - DNA, 25 bp, Saccharomyces pastorianus
gtgcaccttattctattactgttga

SEQ ID NO: 27269 - DNA, 25 bp, Saccharomyces pastorianus
gaacaaacacccgtattgactgtat

SEQ ID NO: 27270 - DNA, 25 bp, Saccharomyces pastorianus
gggcttcaaaccttcgaacacttag

SEQ ID NO: 27271 - DNA, 25 bp, Saccharomyces pastorianus
ttgtgtccatcgcaaagggctttgt

SEQ ID NO: 27272 - DNA, 25 bp, Saccharomyces pastorianus
aactctgttacttacatccttactc

SEQ ID NO: 27273 - DNA, 25 bp, Saccharomyces pastorianus
acacccaatccatacgatataccag

SEQ ID NO: 27274 - DNA, 25 bp, Saccharomyces pastorianus
acatccttactcgtggaaagaccat

SEQ ID NO: 27275 - DNA, 25 bp, Saccharomyces pastorianus
tcctggcatatttcattctagctta

SEQ ID NO: 27276 - DNA, 25 bp, Saccharomyces pastorianus
taccagttggctccgataatggcaa

SEQ ID NO: 27277 - DNA, 25 bp, Saccharomyces pastorianus
agacacaccatcgatcagactacgt

SEQ ID NO: 27278 - DNA, 25 bp, Saccharomyces pastorianus
ctaaggcggcaacctctgttcagaa

SEQ ID NO: 27279 - DNA, 25 bp, Saccharomyces pastorianus
aatgtattaccaaccgacgcagatc

SEQ ID NO: 27280 - DNA, 25 bp, Saccharomyces pastorianus
caaaggtagtacatcccaacgggag

SEQ ID NO: 27281 - DNA, 25 bp, Saccharomyces pastorianus
aatatcaggctcagtccatcagaca

SEQ ID NO: 27282 - DNA, 25 bp, Saccharomyces pastorianus
aaatcaaatactgtcaccgctgcgc

SEQ ID NO: 27283 - DNA, 25 bp, Saccharomyces pastorianus
ttacatttgtcactgctaaggcggc

SEQ ID NO: 27284 - DNA, 25 bp, Saccharomyces pastorianus
ggatgactctcttatgttcagtgat

SEQ ID NO: 27285 - DNA, 25 bp, Saccharomyces pastorianus
gcagatccgctgttggctaagcaaa

SEQ ID NO: 27286 - DNA, 25 bp, Saccharomyces pastorianus
gatgatttccaagacgacgatctga

SEQ ID NO: 27287 - DNA, 25 bp, Saccharomyces pastorianus
aagctccaatccaaactctaattca

SEQ ID NO: 27288 - DNA, 25 bp, Saccharomyces pastorianus
ggttcgttcatctatgggacttcta

SEQ ID NO: 27289 - DNA, 25 bp, Saccharomyces pastorianus
ggtacccattggatgtctactgacg

SEQ ID NO: 27290 - DNA, 25 bp, Saccharomyces pastorianus
tctactgacgactggtgcggtcatt

SEQ ID NO: 27291 - DNA, 25 bp, Saccharomyces pastorianus
tgtgggtctacaagcagctacattg

SEQ ID NO: 27292 - DNA, 25 bp, Saccharomyces pastorianus
gtgcggtcattctagcagcccaaaa

SEQ ID NO: 27293 - DNA, 25 bp, Saccharomyces pastorianus
agcagctacattggtcgcgctagtt

SEQ ID NO: 27294 - DNA, 25 bp, Saccharomyces pastorianus
gaaggcccagtattacttccgctgg

SEQ ID NO: 27295 - DNA, 25 bp, Saccharomyces pastorianus
gcagcccaaaatgtccgtcttggta

SEQ ID NO: 27296 - DNA, 25 bp, Saccharomyces pastorianus
gctagttgcgggttcgttcatctat

SEQ ID NO: 27297 - DNA, 25 bp, Saccharomyces pastorianus
tagtttcgacttcacccaaagggat

SEQ ID NO: 27298 - DNA, 25 bp, Saccharomyces pastorianus
gcgtataccttctagtttcgacttc

SEQ ID NO: 27299 - DNA, 25 bp, Saccharomyces pastorianus
ggaattgtcaatccttcaggctgaa

SEQ ID NO: 27300 - DNA, 25 bp, Saccharomyces pastorianus
attggctgaccgttgccatatgact

SEQ ID NO: 27301 - DNA, 25 bp, Saccharomyces pastorianus
ctccatccaaaatcaaacgctacgt

SEQ ID NO: 27302 - DNA, 25 bp, Saccharomyces pastorianus
taatacagacaatatcgccgccatc

SEQ ID NO: 27303 - DNA, 25 bp, Saccharomyces pastorianus
gaccccgtcattctttaaataggcg

SEQ ID NO: 27304 - DNA, 25 bp, Saccharomyces pastorianus
cgtcatgttcttcgccattggaaag

SEQ ID NO: 27305 - DNA, 25 bp, Saccharomyces pastorianus
gatgtccatgccacaccattggtat

SEQ ID NO: 27306 - DNA, 25 bp, Saccharomyces pastorianus
tgaagagtcgtcgtcgtcatgttct

SEQ ID NO: 27307 - DNA, 25 bp, Saccharomyces pastorianus
atagtgtagaccattctccatccaa

SEQ ID NO: 27308 - DNA, 25 bp, Saccharomyces pastorianus
ttgagaaatgtccagccccaacaaa

SEQ ID NO: 27309 - DNA, 25 bp, Saccharomyces pastorianus
gccaggctttaactttccacttgaa

SEQ ID NO: 27310 - DNA, 25 bp, Saccharomyces pastorianus
gtgtgcccaggcctcgtacgaaaag

SEQ ID NO: 27311 - DNA, 25 bp, Saccharomyces pastorianus
ctatcttcagaaatccaggcctttt

SEQ ID NO: 27312 - DNA, 25 bp, Saccharomyces pastorianus
aagctagccctacatcaatatccaa

SEQ ID NO: 27313 - DNA, 25 bp, Saccharomyces pastorianus
catagcaagttacgcccaagagtta

SEQ ID NO: 27314 - DNA, 25 bp, Saccharomyces pastorianus
acatcattggtctggaatcccgtgg

SEQ ID NO: 27315 - DNA, 25 bp, Saccharomyces pastorianus
gggttcttgtttggcccaactctag

SEQ ID NO: 27316 - DNA, 25 bp, Saccharomyces pastorianus
gtaaactgcctggtgagtgtgccca

SEQ ID NO: 27317 - DNA, 25 bp, Saccharomyces pastorianus
ggttccaacgttgttatcgtcgatg

SEQ ID NO: 27318 - DNA, 25 bp, Saccharomyces pastorianus
tgaatgccccagtgttcactctatt

SEQ ID NO: 27319 - DNA, 25 bp, Saccharomyces pastorianus
tagccatggctttaggtgtcggttt

SEQ ID NO: 27320 - DNA, 25 bp, Saccharomyces pastorianus
tgtcggtttcgttccagttagaaag

SEQ ID NO: 27321 - DNA, 25 bp, Saccharomyces pastorianus
gatttgtcagaaatatctcccgttg

SEQ ID NO: 27322 - DNA, 25 bp, Saccharomyces pastorianus
attaatgatcaactggtacccctgt

SEQ ID NO: 27323 - DNA, 25 bp, Saccharomyces pastorianus
ggtacccctgtattcatccatatgt

SEQ ID NO: 27324 - DNA, 25 bp, Saccharomyces pastorianus
atgtcttttcgcgaatcatcctaat

SEQ ID NO: 27325 - DNA, 25 bp, Saccharomyces pastorianus
ggtcattccaccatttataacgaga

SEQ ID NO: 27326 - DNA, 25 bp, Saccharomyces pastorianus
aaggttcacagacaccagcattcat

SEQ ID NO: 27327 - DNA, 25 bp, Saccharomyces pastorianus
aaataagcggatctctggcgggcac

SEQ ID NO: 27328 - DNA, 25 bp, Saccharomyces pastorianus
tctcccgttgaatactcaccatata

SEQ ID NO: 27329 - DNA, 25 bp, Saccharomyces pastorianus
gatagccggttctttattggacttg

SEQ ID NO: 27330 - DNA, 25 bp, Saccharomyces pastorianus
atccgtatcgattgccatggtgtat

SEQ ID NO: 27331 - DNA, 25 bp, Saccharomyces pastorianus
accagcattcatcactcggatagtt

SEQ ID NO: 27332 - DNA, 25 bp, Saccharomyces pastorianus
tttatcagtacgctttggttccaga

SEQ ID NO: 27333 - DNA, 25 bp, Saccharomyces pastorianus
ggaattcgtctattattttgtcgca

SEQ ID NO: 27334 - DNA, 25 bp, Saccharomyces pastorianus
atcgtgatgtcctcattatgtgtac

SEQ ID NO: 27335 - DNA, 25 bp, Saccharomyces pastorianus
tatcattcggtttgctttttccaag

SEQ ID NO: 27336 - DNA, 25 bp, Saccharomyces pastorianus
agaacgttcctcaccttgtggtata

SEQ ID NO: 27337 - DNA, 25 bp, Saccharomyces pastorianus
gccattcttagcctgtgttttgttc

SEQ ID NO: 27338 - DNA, 25 bp, Saccharomyces pastorianus
ctgcccatgacttcacgtataagcg

SEQ ID NO: 27339 - DNA, 25 bp, Saccharomyces pastorianus
atgtgtactgttaatttgcctgccc

SEQ ID NO: 27340 - DNA, 25 bp, Saccharomyces pastorianus
tagaattccctttattgcgcgtgat

SEQ ID NO: 27341 - DNA, 25 bp, Saccharomyces pastorianus
tgttcaccaagacttcaacgtccag

SEQ ID NO: 27342 - DNA, 25 bp, Saccharomyces pastorianus
gaaatcttttctgtatcgtcaatgt

SEQ ID NO: 27343 - DNA, 25 bp, Saccharomyces pastorianus
gagctgcccaaagaccctaaagtta

SEQ ID NO: 27344 - DNA, 25 bp, Saccharomyces pastorianus
gaagattttctttggctttgtcggc

SEQ ID NO: 27345 - DNA, 25 bp, Saccharomyces pastorianus
gaaatcagactctcgtcatcgctac

SEQ ID NO: 27346 - DNA, 25 bp, Saccharomyces pastorianus
gacgagtctcgtgtcaacatgaaga

SEQ ID NO: 27347 - DNA, 25 bp, Saccharomyces pastorianus
tttaacctgctctttctatggccat

SEQ ID NO: 27348 - DNA, 25 bp, Saccharomyces pastorianus
gggtctttcatttcatttatcggta

SEQ ID NO: 27349 - DNA, 25 bp, Saccharomyces pastorianus
cctcattctgggttcatttttcatc

SEQ ID NO: 27350 - DNA, 25 bp, Saccharomyces pastorianus
tacggcttttactgggcaacttgtt

SEQ ID NO: 27351 - DNA, 25 bp, Saccharomyces pastorianus
ggcaaaggctatgctgctgaccagt

SEQ ID NO: 27352 - DNA, 25 bp, Saccharomyces pastorianus
tatggccatcacttatcgtgctgga

SEQ ID NO: 27353 - DNA, 25 bp, Saccharomyces pastorianus
aatcatccttgtcaactgtctcatc

SEQ ID NO: 27354 - DNA, 25 bp, Saccharomyces pastorianus
aagcgtggaggctgtaccgtctaca

SEQ ID NO: 27355 - DNA, 25 bp, Saccharomyces pastorianus
gaaaacattcgtgtcctcttgcaag

SEQ ID NO: 27356 - DNA, 25 bp, Saccharomyces pastorianus
agacgagcccgatgtttactttgac

SEQ ID NO: 27357 - DNA, 25 bp, Saccharomyces pastorianus
caacaagctcgttattcagttcaat

SEQ ID NO: 27358 - DNA, 25 bp, Saccharomyces pastorianus
gggtaactcgttgttgcagtccaaa

SEQ ID NO: 27359 - DNA, 25 bp, Saccharomyces pastorianus
ttgcagtccaaatccctacagcagt

SEQ ID NO: 27360 - DNA, 25 bp, Saccharomyces pastorianus
tggccggcacagttactaaccaaac

SEQ ID NO: 27361 - DNA, 25 bp, Saccharomyces pastorianus
aatcgcttcgaggttttccatagaa

SEQ ID NO: 27362 - DNA, 25 bp, Saccharomyces pastorianus
actctgcccaatgcctactggagga

SEQ ID NO: 27363 - DNA, 25 bp, Saccharomyces pastorianus
taccaatccgatagtgtgcccgaag

SEQ ID NO: 27364 - DNA, 25 bp, Saccharomyces pastorianus
gtaccgtctacagtctgacactctg

SEQ ID NO: 27365 - DNA, 25 bp, Saccharomyces pastorianus
gaagggcttggcgacatcatcagta

SEQ ID NO: 27366 - DNA, 25 bp, Saccharomyces pastorianus
ttgacgaactccagcctttagatac

SEQ ID NO: 27367 - DNA, 25 bp, Saccharomyces pastorianus
gcccaacggcagtcttctagttgaa

SEQ ID NO: 27368 - DNA, 25 bp, Saccharomyces pastorianus
gttcgttaagaagtttccctccatg

SEQ ID NO: 27369 - DNA, 25 bp, Saccharomyces pastorianus
aagcaccgcagctaccattgaaggg

SEQ ID NO: 27370 - DNA, 25 bp, Saccharomyces pastorianus
atcatcagtaacgagcttgcttcct

SEQ ID NO: 27371 - DNA, 25 bp, Saccharomyces pastorianus
ggctgaaggcctgcattgacgaact

SEQ ID NO: 27372 - DNA, 25 bp, Saccharomyces pastorianus
ttgcttccttcgatcttgaacaggg

SEQ ID NO: 27373 - DNA, 25 bp, Saccharomyces pastorianus
gggcaaactccaattcgacttcgaa

SEQ ID NO: 27374 - DNA, 25 bp, Saccharomyces pastorianus
cgaagtgtactctagtgaccccgca

SEQ ID NO: 27375 - DNA, 25 bp, Saccharomyces pastorianus
agttcagaacctccagcggcaaaag

SEQ ID NO: 27376 - DNA, 25 bp, Saccharomyces pastorianus
aataccgtggccgttctttgagcag

SEQ ID NO: 27377 - DNA, 25 bp, Saccharomyces pastorianus
ggttatcattgtcttggcatcgcta

SEQ ID NO: 27378 - DNA, 25 bp, Saccharomyces pastorianus
gacatccactccgatggttctgttg

SEQ ID NO: 27379 - DNA, 25 bp, Saccharomyces pastorianus
aaccttttcgttcgtgattctgttg

SEQ ID NO: 27380 - DNA, 25 bp, Saccharomyces pastorianus
ggccgtacagggtttgcatttcgac

SEQ ID NO: 27381 - DNA, 25 bp, Saccharomyces pastorianus
ttcgctggtgaagtccgtgttgcct

SEQ ID NO: 27382 - DNA, 25 bp, Saccharomyces pastorianus
gtgatttcgtcaccgaaggccaatt

SEQ ID NO: 27383 - DNA, 25 bp, Saccharomyces pastorianus
catcgctaggtgcttggcaactcaa

SEQ ID NO: 27384 - DNA, 25 bp, Saccharomyces pastorianus
tcgttgacgaattggcctacttgaa

SEQ ID NO: 27385 - DNA, 25 bp, Saccharomyces pastorianus
tggtctccttggtggtggccgtaca

SEQ ID NO: 27386 - DNA, 25 bp, Saccharomyces pastorianus
gcccagagttggtttgtattcgtga

SEQ ID NO: 27387 - DNA, 25 bp, Saccharomyces pastorianus
gcggaatctagtttggatcacgata

SEQ ID NO: 27388 - DNA, 25 bp, Saccharomyces pastorianus
gatacgatgtacatgccaattactg

SEQ ID NO: 27389 - DNA, 25 bp, Saccharomyces pastorianus
gatgatatgtggtcgatgctaatta

SEQ ID NO: 27390 - DNA, 25 bp, Saccharomyces pastorianus
gaactaccgatatttttccaggact

SEQ ID NO: 27391 - DNA, 25 bp, Saccharomyces pastorianus
gcaagtccagtagtgttagctataa

SEQ ID NO: 27392 - DNA, 25 bp, Saccharomyces pastorianus
ggacttacaactggaacccacaatt

SEQ ID NO: 27393 - DNA, 25 bp, Saccharomyces pastorianus
gaaatgattagctctgcgactgacg

SEQ ID NO: 27394 - DNA, 25 bp, Saccharomyces pastorianus
gcgactgacgggaagaggcttttca

SEQ ID NO: 27395 - DNA, 25 bp, Saccharomyces pastorianus
gaaaatttccaatctcatcgggact

SEQ ID NO: 27396 - DNA, 25 bp, Saccharomyces pastorianus
gacgtatttagactttgcttgtgta

SEQ ID NO: 27397 - DNA, 25 bp, Saccharomyces pastorianus
actgaccagagcgaagggaccattg

SEQ ID NO: 27398 - DNA, 25 bp, Saccharomyces pastorianus
tacgctccattcttatcgtcttacg

SEQ ID NO: 27399 - DNA, 25 bp, Saccharomyces pastorianus
acgctccattcttatcgtcttacga

SEQ ID NO: 27400 - DNA, 25 bp, Saccharomyces pastorianus
ggtgaagaatctccatctcttgctt

SEQ ID NO: 27401 - DNA, 25 bp, Saccharomyces pastorianus
atgcgaagactggtgaagaatctcc

SEQ ID NO: 27402 - DNA, 25 bp, Saccharomyces pastorianus
cgttttatgcgaagactggtgaaga

SEQ ID NO: 27403 - DNA, 25 bp, Saccharomyces pastorianus
actggtgaagaatctccatctcttg

SEQ ID NO: 27404 - DNA, 25 bp, Saccharomyces pastorianus
ccattcttatcgtcttacgaagcat

SEQ ID NO: 27405 - DNA, 25 bp, Saccharomyces pastorianus
tggtgaagaatctccatctcttgct

SEQ ID NO: 27406 - DNA, 25 bp, Saccharomyces pastorianus
gctccattcttatcgtcttacgaag

SEQ ID NO: 27407 - DNA, 25 bp, Saccharomyces pastorianus
gactggtgaagaatctccatctctt

SEQ ID NO: 27408 - DNA, 25 bp, Saccharomyces pastorianus
gaagactggtgaagaatctccatct

SEQ ID NO: 27409 - DNA, 25 bp, Saccharomyces pastorianus
tggtgaagccgtgaatgcatcggat

SEQ ID NO: 27410 - DNA, 25 bp, Saccharomyces pastorianus
gacgtggacggtttatgttctgaac

SEQ ID NO: 27411 - DNA, 25 bp, Saccharomyces pastorianus
gacatgttcttcagggattcttcaa

SEQ ID NO: 27412 - DNA, 25 bp, Saccharomyces pastorianus
ataacccaagtctccagcaaagtac

SEQ ID NO: 27413 - DNA, 25 bp, Saccharomyces pastorianus
gaaaacgatagcgatgttgttccat

SEQ ID NO: 27414 - DNA, 25 bp, Saccharomyces pastorianus
cagcctttgtcacaatcacaacatc

SEQ ID NO: 27415 - DNA, 25 bp, Saccharomyces pastorianus
gacgacataccttttatcaacacaa

SEQ ID NO: 27416 - DNA, 25 bp, Saccharomyces pastorianus
atactctgatattgacgtggacggt

SEQ ID NO: 27417 - DNA, 25 bp, Saccharomyces pastorianus
gcaaaatcaatgtcccctatcaaca

SEQ ID NO: 27418 - DNA, 25 bp, Saccharomyces pastorianus
tgttctgaactgatggcaaaggcaa

SEQ ID NO: 27419 - DNA, 25 bp, Saccharomyces pastorianus
taacgaagaaccacaactgcaaaat

SEQ ID NO: 27420 - DNA, 25 bp, Saccharomyces pastorianus
gacccaattgtcaaactctaacaca

SEQ ID NO: 27421 - DNA, 25 bp, Saccharomyces pastorianus
tcgatgacgactatgacgaatacat

SEQ ID NO: 27422 - DNA, 25 bp, Saccharomyces pastorianus
gacgatagtggtgacgatgcttcat

SEQ ID NO: 27423 - DNA, 25 bp, Saccharomyces pastorianus
cattgtcagaacagtcaggtccaca

SEQ ID NO: 27424 - DNA, 25 bp, Saccharomyces pastorianus
tatttcccaactacattcgatgacg

SEQ ID NO: 27425 - DNA, 25 bp, Saccharomyces pastorianus
gtgggcgttcaatagacacaattct

SEQ ID NO: 27426 - DNA, 25 bp, Saccharomyces pastorianus
ttcagcggttgatccatatccaatg

SEQ ID NO: 27427 - DNA, 25 bp, Saccharomyces pastorianus
agtatcggagagtgggcgttcaata

SEQ ID NO: 27428 - DNA, 25 bp, Saccharomyces pastorianus
aatggcatctaacgtcactacagcc

SEQ ID NO: 27429 - DNA, 25 bp, Saccharomyces pastorianus
cactacagcccatcgttctataaga

SEQ ID NO: 27430 - DNA, 25 bp, Saccharomyces pastorianus
ggtccacaaatgtatttgccaacta

SEQ ID NO: 27431 - DNA, 25 bp, Saccharomyces pastorianus
gatattcctttgttcttgaccagtg

SEQ ID NO: 27432 - DNA, 25 bp, Saccharomyces pastorianus
gcgccctacaacaaaatcaagctga

SEQ ID NO: 27433 - DNA, 25 bp, Saccharomyces pastorianus
gcatgccaatgtaaattcaccagaa

SEQ ID NO: 27434 - DNA, 25 bp, Saccharomyces pastorianus
gtgaccaatgccagctcgtttgaaa

SEQ ID NO: 27435 - DNA, 25 bp, Saccharomyces pastorianus
cgggaagacctccttaatgcatcgt

SEQ ID NO: 27436 - DNA, 25 bp, Saccharomyces pastorianus
gaaattgcaagaagcgccctacaac

SEQ ID NO: 27437 - DNA, 25 bp, Saccharomyces pastorianus
attaacgtggataccgcctttgaag

SEQ ID NO: 27438 - DNA, 25 bp, Saccharomyces pastorianus
gttcttgaccagtgccaaaaacgcc

SEQ ID NO: 27439 - DNA, 25 bp, Saccharomyces pastorianus
ggatgaatttttagtgcatgccaat

SEQ ID NO: 27440 - DNA, 25 bp, Saccharomyces pastorianus
gaaaagtctgctcaagaacttgcca

SEQ ID NO: 27441 - DNA, 25 bp, Saccharomyces pastorianus
gatcatcttaggtgactctggcgtc

SEQ ID NO: 27442 - DNA, 25 bp, Saccharomyces pastorianus
ggtagcaagccactatttactgagt

SEQ ID NO: 27443 - DNA, 25 bp, Saccharomyces pastorianus
tacgacagtcctccgattggcagat

SEQ ID NO: 27444 - DNA, 25 bp, Saccharomyces pastorianus
agtcgtgtttccacttttggtagag

SEQ ID NO: 27445 - DNA, 25 bp, Saccharomyces pastorianus
gaaattccaggatatcccgaaagta

SEQ ID NO: 27446 - DNA, 25 bp, Saccharomyces pastorianus
acacggtttttcttatcagttatca

SEQ ID NO: 27447 - DNA, 25 bp, Saccharomyces pastorianus
gaaattagtcacctacatctctcca

SEQ ID NO: 27448 - DNA, 25 bp, Saccharomyces pastorianus
acaaggtacaaaccgttcgtcatgt

SEQ ID NO: 27449 - DNA, 25 bp, Saccharomyces pastorianus
acggaggatattggcgtcttattca

SEQ ID NO: 27450 - DNA, 25 bp, Saccharomyces pastorianus
gaagtagtcgatttctttgccaaat

SEQ ID NO: 27451 - DNA, 25 bp, Saccharomyces pastorianus
acatctctccatctcatgagagcac

SEQ ID NO: 27452 - DNA, 25 bp, Saccharomyces pastorianus
gagagcactacatatcctttggttg

SEQ ID NO: 27453 - DNA, 25 bp, Saccharomyces pastorianus
gtcagacccagatggaccaacagat

SEQ ID NO: 27454 - DNA, 25 bp, Saccharomyces pastorianus
aaacatgagcaacgcctcaggtcag

SEQ ID NO: 27455 - DNA, 25 bp, Saccharomyces pastorianus
gtttgcgcaaatggcctctactgcc

SEQ ID NO: 27456 - DNA, 25 bp, Saccharomyces pastorianus
agaccaagacaaacccaaaccagat

SEQ ID NO: 27457 - DNA, 25 bp, Saccharomyces pastorianus
gatccggatccgaaaccgctcctgt

SEQ ID NO: 27458 - DNA, 25 bp, Saccharomyces pastorianus
aaatttgtgatttttacttgcagca

SEQ ID NO: 27459 - DNA, 25 bp, Saccharomyces pastorianus
agtaccatcggccacactctaggtg

SEQ ID NO: 27460 - DNA, 25 bp, Saccharomyces pastorianus
ttgccgttggtagtaccatcggcca

SEQ ID NO: 27461 - DNA, 25 bp, Saccharomyces pastorianus
ctcctgctacgagttcgcagacaaa

SEQ ID NO: 27462 - DNA, 25 bp, Saccharomyces pastorianus
atgggaagaacctgcgagttagacg

SEQ ID NO: 27463 - DNA, 25 bp, Saccharomyces pastorianus
cacactctaggtgccggtattacgg

SEQ ID NO: 27464 - DNA, 25 bp, Saccharomyces pastorianus
atgattcccgttcacatatgagaag

SEQ ID NO: 27465 - DNA, 25 bp, Saccharomyces pastorianus
tttgttatggtatcgtgtctttggt

SEQ ID NO: 27466 - DNA, 25 bp, Saccharomyces pastorianus
aagtatctaatgtccagtctccttg

SEQ ID NO: 27467 - DNA, 25 bp, Saccharomyces pastorianus
gggctaggacggttcgtatctttgc

SEQ ID NO: 27468 - DNA, 25 bp, Saccharomyces pastorianus
ttatctggtcgcaagtccgatctat

SEQ ID NO: 27469 - DNA, 25 bp, Saccharomyces pastorianus
tatctttgccgtatacttcattgct

SEQ ID NO: 27470 - DNA, 25 bp, Saccharomyces pastorianus
gaaatcaccaggcagaccgacgctg

SEQ ID NO: 27471 - DNA, 25 bp, Saccharomyces pastorianus
agtctccttgcgaagttcatcaaca

SEQ ID NO: 27472 - DNA, 25 bp, Saccharomyces pastorianus
acttcattgcttaaacggcccgatg

SEQ ID NO: 27473 - DNA, 25 bp, Saccharomyces pastorianus
gatgctcccagtttatatgcacata

SEQ ID NO: 27474 - DNA, 25 bp, Saccharomyces pastorianus
atgtcgttgtctttgttcagcaagt

SEQ ID NO: 27475 - DNA, 25 bp, Saccharomyces pastorianus
ggatgttgtcccctaaattcagaat

SEQ ID NO: 27476 - DNA, 25 bp, Saccharomyces pastorianus
gaatctttactgacatcttactttc

SEQ ID NO: 27477 - DNA, 25 bp, Saccharomyces pastorianus
gaaactacgagcgacatctgcaaac

SEQ ID NO: 27478 - DNA, 25 bp, Saccharomyces pastorianus
acgtgccttccaagactgggcgaaa

SEQ ID NO: 27479 - DNA, 25 bp, Saccharomyces pastorianus
gaaagccagatcttagcggagcaga

SEQ ID NO: 27480 - DNA, 25 bp, Saccharomyces pastorianus
gaagtaactccaaagctgtatccag

SEQ ID NO: 27481 - DNA, 25 bp, Saccharomyces pastorianus
gcaatctaatagagcctggctgatt

SEQ ID NO: 27482 - DNA, 25 bp, Saccharomyces pastorianus
attgaattctaactatgccggtctt

SEQ ID NO: 27483 - DNA, 25 bp, Saccharomyces pastorianus
tcaattcttgataacacgtgccttc

SEQ ID NO: 27484 - DNA, 25 bp, Saccharomyces pastorianus
tatgccggtcttaaactcaatgagt

SEQ ID NO: 27485 - DNA, 25 bp, Saccharomyces pastorianus
tccagtgcagcaaaacagtaccata

SEQ ID NO: 27486 - DNA, 25 bp, Saccharomyces pastorianus
ggatttactatttgctctggaaaac

SEQ ID NO: 27487 - DNA, 25 bp, Saccharomyces pastorianus
gtgaggtttctatggctctgagagc

SEQ ID NO: 27488 - DNA, 25 bp, Saccharomyces pastorianus
atatggatggctaacttcgtcagtg

SEQ ID NO: 27489 - DNA, 25 bp, Saccharomyces pastorianus
gagagcagttgcactaatccaaaag

SEQ ID NO: 27490 - DNA, 25 bp, Saccharomyces pastorianus
gcgtcaaatgtcacagccgggctaa

SEQ ID NO: 27491 - DNA, 25 bp, Saccharomyces pastorianus
gaataaaccgacatctctaggagcg

SEQ ID NO: 27492 - DNA, 25 bp, Saccharomyces pastorianus
ttcctaaacacttaccatttctcca

SEQ ID NO: 27493 - DNA, 25 bp, Saccharomyces pastorianus
gaaatcatcgggtaaagtggcctct

SEQ ID NO: 27494 - DNA, 25 bp, Saccharomyces pastorianus
gaacatgatgtcaagcgcgtgcgaa

SEQ ID NO: 27495 - DNA, 25 bp, Saccharomyces pastorianus
aagaattgcgttgggccttgaaaag

SEQ ID NO: 27496 - DNA, 25 bp, Saccharomyces pastorianus
aagtggcctctgatattgctgctag

SEQ ID NO: 27497 - DNA, 25 bp, Saccharomyces pastorianus
tattgtgcaaccgaagccgacgtga

SEQ ID NO: 27498 - DNA, 25 bp, Saccharomyces pastorianus
gagatttactaattcttccgccggg

SEQ ID NO: 27499 - DNA, 25 bp, Saccharomyces pastorianus
gtcgatattcaccaaggctctttca

SEQ ID NO: 27500 - DNA, 25 bp, Saccharomyces pastorianus
aattaggtactgtctggaaggcact

SEQ ID NO: 27501 - DNA, 25 bp, Saccharomyces pastorianus
ggcacggagttttccctagatgagc

SEQ ID NO: 27502 - DNA, 25 bp, Saccharomyces pastorianus
gaaggcactgggtattttgacgtca

SEQ ID NO: 27503 - DNA, 25 bp, Saccharomyces pastorianus
gagcggcatcgattaccgcgaatct

SEQ ID NO: 27504 - DNA, 25 bp, Saccharomyces pastorianus
gaatctcacaattccggcacggagt

SEQ ID NO: 27505 - DNA, 25 bp, Saccharomyces pastorianus
ggcaggcgattaacaggtctaccca

SEQ ID NO: 27506 - DNA, 25 bp, Saccharomyces pastorianus
taccaccgtttcacgttgacgagta

SEQ ID NO: 27507 - DNA, 25 bp, Saccharomyces pastorianus
gagatgcttccacacctgaaaactg

SEQ ID NO: 27508 - DNA, 25 bp, Saccharomyces pastorianus
gaaagtccgtataacgctgctgtta

SEQ ID NO: 27509 - DNA, 25 bp, Saccharomyces pastorianus
aaggatttccatcgtgctctagaac

SEQ ID NO: 27510 - DNA, 25 bp, Saccharomyces pastorianus
catcatccagctccaacaagtattt

SEQ ID NO: 27511 - DNA, 25 bp, Saccharomyces pastorianus
aaacctgaactagccgacaagtctg

SEQ ID NO: 27512 - DNA, 25 bp, Saccharomyces pastorianus
ggttatactgaatcacgcctgggaa

SEQ ID NO: 27513 - DNA, 25 bp, Saccharomyces pastorianus
agctggaccaaagcctgctaacaca

SEQ ID NO: 27514 - DNA, 25 bp, Saccharomyces pastorianus
gcgactcttctaactctgcaaataa

SEQ ID NO: 27515 - DNA, 25 bp, Saccharomyces pastorianus
gcctgggaaatttgtttgctgcgtt

SEQ ID NO: 27516 - DNA, 25 bp, Saccharomyces pastorianus
acaggaccaaacgtcagcagctgga

SEQ ID NO: 27517 - DNA, 25 bp, Saccharomyces pastorianus
attacccaagattcatcatccagct

SEQ ID NO: 27518 - DNA, 25 bp, Saccharomyces pastorianus
acaactagctctgggtgttcaagat

SEQ ID NO: 27519 - DNA, 25 bp, Saccharomyces pastorianus
acctttgttggtgaatgactcgccc

SEQ ID NO: 27520 - DNA, 25 bp, Saccharomyces pastorianus
gggaactcttgcgttcaccataaca

SEQ ID NO: 27521 - DNA, 25 bp, Saccharomyces pastorianus
gtttgccgatgccagagaccatagt

SEQ ID NO: 27522 - DNA, 25 bp, Saccharomyces pastorianus
gcaaccgtgttcagtcatttaaccg

SEQ ID NO: 27523 - DNA, 25 bp, Saccharomyces pastorianus
accgcctctaggatctctaattgaa

SEQ ID NO: 27524 - DNA, 25 bp, Saccharomyces pastorianus
gaattggcgattctctggcatctat

SEQ ID NO: 27525 - DNA, 25 bp, Saccharomyces pastorianus
atagtgggcccctgatcatatccta

SEQ ID NO: 27526 - DNA, 25 bp, Saccharomyces pastorianus
gtcaaattcgttggcgaggtaccca

SEQ ID NO: 27527 - DNA, 25 bp, Saccharomyces pastorianus
atacctcccgaaaagtgtggcactt

SEQ ID NO: 27528 - DNA, 25 bp, Saccharomyces pastorianus
ctcgcccatgggattaataggtttg

SEQ ID NO: 27529 - DNA, 25 bp, Saccharomyces pastorianus
gtgtggcacttcattatattcttac

SEQ ID NO: 27530 - DNA, 25 bp, Saccharomyces pastorianus
acttgcctgaactgatggctggtta

SEQ ID NO: 27531 - DNA, 25 bp, Saccharomyces pastorianus
aaacgtgaagctcaagcggaactat

SEQ ID NO: 27532 - DNA, 25 bp, Saccharomyces pastorianus
gaagagcatccttcttgggttgcta

SEQ ID NO: 27533 - DNA, 25 bp, Saccharomyces pastorianus
ggccaaggtacataacttgcctgaa

SEQ ID NO: 27534 - DNA, 25 bp, Saccharomyces pastorianus
aatacggctctgaggctaagcatgt

SEQ ID NO: 27535 - DNA, 25 bp, Saccharomyces pastorianus
agcggaactatacgcttctagggaa

SEQ ID NO: 27536 - DNA, 25 bp, Saccharomyces pastorianus
gaacctagtggagaatcatccgatg

SEQ ID NO: 27537 - DNA, 25 bp, Saccharomyces pastorianus
gtgggcgtactgaagtgacctacaa

SEQ ID NO: 27538 - DNA, 25 bp, Saccharomyces pastorianus
agaaaaagaaccaactgccactggg

SEQ ID NO: 27539 - DNA, 25 bp, Saccharomyces pastorianus
aacatccgatgatcgtacggctaga

SEQ ID NO: 27540 - DNA, 25 bp, Saccharomyces pastorianus
cgaagctagagtcgctaaacgtgaa

SEQ ID NO: 27541 - DNA, 25 bp, Saccharomyces pastorianus
ttatgtcatgatcactttcgctgcc

SEQ ID NO: 27542 - DNA, 25 bp, Saccharomyces pastorianus
atgttgattccaaccttgtaccctg

SEQ ID NO: 27543 - DNA, 25 bp, Saccharomyces pastorianus
gtaccctgctttacatgaccctgaa

SEQ ID NO: 27544 - DNA, 25 bp, Saccharomyces pastorianus
attacactgcaccaaaaggcgctat

SEQ ID NO: 27545 - DNA, 25 bp, Saccharomyces pastorianus
tagctgatcgtccagatgttttaga

SEQ ID NO: 27546 - DNA, 25 bp, Saccharomyces pastorianus
ggttcacacgtttgtttaggtcaga

SEQ ID NO: 27547 - DNA, 25 bp, Saccharomyces pastorianus
gggtaaatttgctctatccaccgat

SEQ ID NO: 27548 - DNA, 25 bp, Saccharomyces pastorianus
aaaagatcaaggttttcgccaccat

SEQ ID NO: 27549 - DNA, 25 bp, Saccharomyces pastorianus
tcgccaccattttccctaaagatga

SEQ ID NO: 27550 - DNA, 25 bp, Saccharomyces pastorianus
atccaccgatttccatcacaaagta

SEQ ID NO: 27551 - DNA, 25 bp, Saccharomyces pastorianus
tttcccagtttcttccaattacact

SEQ ID NO: 27552 - DNA, 25 bp, Saccharomyces pastorianus
cgaaagctgtccatgtgtcaactgc

SEQ ID NO: 27553 - DNA, 25 bp, Saccharomyces pastorianus
aattactcgatattcacgcgtggtt

SEQ ID NO: 27554 - DNA, 25 bp, Saccharomyces pastorianus
ggtgggatttcctaaaactgcaagt

SEQ ID NO: 27555 - DNA, 25 bp, Saccharomyces pastorianus
tccgcggagcacaacaactgtatct

SEQ ID NO: 27556 - DNA, 25 bp, Saccharomyces pastorianus
taccactactggtgcgtcacatgat

SEQ ID NO: 27557 - DNA, 25 bp, Saccharomyces pastorianus
gggcgtcttcttaagtacacaatgt

SEQ ID NO: 27558 - DNA, 25 bp, Saccharomyces pastorianus
gttctgactcataagggcgtcttct

SEQ ID NO: 27559 - DNA, 25 bp, Saccharomyces pastorianus
tgcccacgctgcaagtattattccg

SEQ ID NO: 27560 - DNA, 25 bp, Saccharomyces pastorianus
acaattgcacttgcgatggctgctt

SEQ ID NO: 27561 - DNA, 25 bp, Saccharomyces pastorianus
aacagagcggtgttcctttgaccaa

SEQ ID NO: 27562 - DNA, 25 bp, Saccharomyces pastorianus
gtgtcaactgcctcatccatagaag

SEQ ID NO: 27563 - DNA, 25 bp, Saccharomyces pastorianus
atcgacgcttgcattctttggagag

SEQ ID NO: 27564 - DNA, 25 bp, Saccharomyces pastorianus
taacgttcacgccaagcattctaca

SEQ ID NO: 27565 - DNA, 25 bp, Saccharomyces pastorianus
tacccaaacggtgaagtgtgcatat

SEQ ID NO: 27566 - DNA, 25 bp, Saccharomyces pastorianus
ttgggattgtctcattcaagggccc

SEQ ID NO: 27567 - DNA, 25 bp, Saccharomyces pastorianus
aacagcccagaaacgtctgctcaag

SEQ ID NO: 27568 - DNA, 25 bp, Saccharomyces pastorianus
gatggtctcctgtacagagcgtgga

SEQ ID NO: 27569 - DNA, 25 bp, Saccharomyces pastorianus
gagagacaatagacccgaattcgag

SEQ ID NO: 27570 - DNA, 25 bp, Saccharomyces pastorianus
ggtgatgaccccaacatgtatgaac

SEQ ID NO: 27571 - DNA, 25 bp, Saccharomyces pastorianus
tggaattccccaaggactatccttt

SEQ ID NO: 27572 - DNA, 25 bp, Saccharomyces pastorianus
aaagattccccaccgggcatagtgg

SEQ ID NO: 27573 - DNA, 25 bp, Saccharomyces pastorianus
aacatcttcgtttgggattgtctca

SEQ ID NO: 27574 - DNA, 25 bp, Saccharomyces pastorianus
ggagctgtttcgttgttgcagtact

SEQ ID NO: 27575 - DNA, 25 bp, Saccharomyces pastorianus
tttcaccagcactatctagcttcaa

SEQ ID NO: 27576 - DNA, 25 bp, Saccharomyces pastorianus
ctgagttatgccctgtctgtgaaaa

SEQ ID NO: 27577 - DNA, 25 bp, Saccharomyces pastorianus
aaattatcggtcatactccggattt

SEQ ID NO: 27578 - DNA, 25 bp, Saccharomyces pastorianus
aacaaacatgtcgtcagccgtggca

SEQ ID NO: 27579 - DNA, 25 bp, Saccharomyces pastorianus
aagaaactctttgcgctatccaatt

SEQ ID NO: 27580 - DNA, 25 bp, Saccharomyces pastorianus
ttacccatgcgccatgagctatttg

SEQ ID NO: 27581 - DNA, 25 bp, Saccharomyces pastorianus
gattttatctttcacgggttcgcaa

SEQ ID NO: 27582 - DNA, 25 bp, Saccharomyces pastorianus
acctgtctcgtcaagtggtgaccaa

SEQ ID NO: 27583 - DNA, 25 bp, Saccharomyces pastorianus
gtcagccgtggcacttttacaaaat

SEQ ID NO: 27584 - DNA, 25 bp, Saccharomyces pastorianus
ggtggaccacgcaggacatgactac

SEQ ID NO: 27585 - DNA, 25 bp, Saccharomyces pastorianus
agacggtagagttcttcaaggtggc

SEQ ID NO: 27586 - DNA, 25 bp, Saccharomyces pastorianus
gcaccacgtcaaactgagtcaccag

SEQ ID NO: 27587 - DNA, 25 bp, Saccharomyces pastorianus
cgggcttcaccgacaaactggagac

SEQ ID NO: 27588 - DNA, 25 bp, Saccharomyces pastorianus
actggagaccataaacaagcctttg

SEQ ID NO: 27589 - DNA, 25 bp, Saccharomyces pastorianus
gtaaggctacaccaatttagtctga

SEQ ID NO: 27590 - DNA, 25 bp, Saccharomyces pastorianus
caatttcctcaaaaacgcaccacgt

SEQ ID NO: 27591 - DNA, 25 bp, Saccharomyces pastorianus
ggtacgggcagtatggacccacaat

SEQ ID NO: 27592 - DNA, 25 bp, Saccharomyces pastorianus
gagtcaccagggattcaagagcaga

SEQ ID NO: 27593 - DNA, 25 bp, Saccharomyces pastorianus
gaacttcacgcttgttgacaagaga

SEQ ID NO: 27594 - DNA, 25 bp, Saccharomyces pastorianus
atcgtaatgattctacgggcttcac

SEQ ID NO: 27595 - DNA, 25 bp, Saccharomyces pastorianus
gtgaagtgctatccaatttcctcaa

SEQ ID NO: 27596 - DNA, 25 bp, Saccharomyces pastorianus
gacggtgacggagacactactaata

SEQ ID NO: 27597 - DNA, 25 bp, Saccharomyces pastorianus
attgccaatgcagatcgacctgaac

SEQ ID NO: 27598 - DNA, 25 bp, Saccharomyces pastorianus
acaatttcgaaggtgtactgctaca

SEQ ID NO: 27599 - DNA, 25 bp, Saccharomyces pastorianus
aaaattggctccagcctcaacattg

SEQ ID NO: 27600 - DNA, 25 bp, Saccharomyces pastorianus
cgacagcataatcaccatatcctat

SEQ ID NO: 27601 - DNA, 25 bp, Saccharomyces pastorianus
aaacctggaaccgttgattgatgaa

SEQ ID NO: 27602 - DNA, 25 bp, Saccharomyces pastorianus
aaatctttaatcttgctgtcttcga

SEQ ID NO: 27603 - DNA, 25 bp, Saccharomyces pastorianus
atagacgctattggcgacgtcccaa

SEQ ID NO: 27604 - DNA, 25 bp, Saccharomyces pastorianus
gtgagttctactccggtgctaatta

SEQ ID NO: 27605 - DNA, 25 bp, Saccharomyces pastorianus
gctgtcttcgaatccatatcaactg

SEQ ID NO: 27606 - DNA, 25 bp, Saccharomyces pastorianus
cattgttggtttactcttttgatca

SEQ ID NO: 27607 - DNA, 25 bp, Saccharomyces pastorianus
gaacattccgttctctgtattagat

SEQ ID NO: 27608 - DNA, 25 bp, Saccharomyces pastorianus
aaacttcactcagctttttgaccat

SEQ ID NO: 27609 - DNA, 25 bp, Saccharomyces pastorianus
taaaacagactcaagcgtgcacgaa

SEQ ID NO: 27610 - DNA, 25 bp, Saccharomyces pastorianus
gaacagcgacggaaccactaacggt

SEQ ID NO: 27611 - DNA, 25 bp, Saccharomyces pastorianus
taacatcccggaacttcagtcgaaa

SEQ ID NO: 27612 - DNA, 25 bp, Saccharomyces pastorianus
gccaattttatgaccccaacacgaa

SEQ ID NO: 27613 - DNA, 25 bp, Saccharomyces pastorianus
tgaatgatctactcgctgaacctga

SEQ ID NO: 27614 - DNA, 25 bp, Saccharomyces pastorianus
attacaacagactctctaccagacg

SEQ ID NO: 27615 - DNA, 25 bp, Saccharomyces pastorianus
tgaccataattctccactattccaa

SEQ ID NO: 27616 - DNA, 25 bp, Saccharomyces pastorianus
gaatcccaactactaccaagagcaa

SEQ ID NO: 27617 - DNA, 25 bp, Saccharomyces pastorianus
attacccaccagtgcgagattggct

SEQ ID NO: 27618 - DNA, 25 bp, Saccharomyces pastorianus
ggctactaagaagacctccacttta

SEQ ID NO: 27619 - DNA, 25 bp, Saccharomyces pastorianus
attgcagccggttctgaggctcaaa

SEQ ID NO: 27620 - DNA, 25 bp, Saccharomyces pastorianus
gtgggttttcacaaggttcgtcgat

SEQ ID NO: 27621 - DNA, 25 bp, Saccharomyces pastorianus
gaaatccgcggaagttggccgtgat

SEQ ID NO: 27622 - DNA, 25 bp, Saccharomyces pastorianus
gaaattttgccaacccaacttgaag

SEQ ID NO: 27623 - DNA, 25 bp, Saccharomyces pastorianus
aagcttaactgctgacgaaggccca

SEQ ID NO: 27624 - DNA, 25 bp, Saccharomyces pastorianus
gaggctatgaaagacgtcgcttctg

SEQ ID NO: 27625 - DNA, 25 bp, Saccharomyces pastorianus
gtcgcttctgcacgcggtgatgata

SEQ ID NO: 27626 - DNA, 25 bp, Saccharomyces pastorianus
attgtcaaccaaagaggctcgcttg

SEQ ID NO: 27627 - DNA, 25 bp, Saccharomyces pastorianus
tagccaacgatggtcaagcagccaa

SEQ ID NO: 27628 - DNA, 25 bp, Saccharomyces pastorianus
aagaatatcgcagagccatctattg

SEQ ID NO: 27629 - DNA, 25 bp, Saccharomyces pastorianus
gaatccggctagtctatcaagagat

SEQ ID NO: 27630 - DNA, 25 bp, Saccharomyces pastorianus
cgactgattgggtactgctttggaa

SEQ ID NO: 27631 - DNA, 25 bp, Saccharomyces pastorianus
gataccatcgacacaaagttcccat

SEQ ID NO: 27632 - DNA, 25 bp, Saccharomyces pastorianus
aagggcttgccttttgataccatcg

SEQ ID NO: 27633 - DNA, 25 bp, Saccharomyces pastorianus
gcacctcaatgcaacctacgttaaa

SEQ ID NO: 27634 - DNA, 25 bp, Saccharomyces pastorianus
aaagttcccatatcctaagtcacaa

SEQ ID NO: 27635 - DNA, 25 bp, Saccharomyces pastorianus
aagtcacaagtgaacctgccaaggg

SEQ ID NO: 27636 - DNA, 25 bp, Saccharomyces pastorianus
atagctttgtcatgggtacctgtat

SEQ ID NO: 27637 - DNA, 25 bp, Saccharomyces pastorianus
tgacgttattcttttcaaggccccg

SEQ ID NO: 27638 - DNA, 25 bp, Saccharomyces pastorianus
tggtagcgattgtctggccaccgtc

SEQ ID NO: 27639 - DNA, 25 bp, Saccharomyces pastorianus
gcaacacattcggttccatttcaag

SEQ ID NO: 27640 - DNA, 25 bp, Saccharomyces pastorianus
acttctatcatcattttccacaaca

SEQ ID NO: 27641 - DNA, 25 bp, Saccharomyces pastorianus
agtgccgcttaccaaccaacaaaat

SEQ ID NO: 27642 - DNA, 25 bp, Saccharomyces pastorianus
tgaacgtccatttgcatgccacata

SEQ ID NO: 27643 - DNA, 25 bp, Saccharomyces pastorianus
ttccacaacaaaaccaccattctat

SEQ ID NO: 27644 - DNA, 25 bp, Saccharomyces pastorianus
aaatgaatatgaccccgtcatcgcc

SEQ ID NO: 27645 - DNA, 25 bp, Saccharomyces pastorianus
tgaagagaaaccgttccattgtcac

SEQ ID NO: 27646 - DNA, 25 bp, Saccharomyces pastorianus
atcaatgacgccatccaggagatca

SEQ ID NO: 27647 - DNA, 25 bp, Saccharomyces pastorianus
atggcaatgataccccaaactttga

SEQ ID NO: 27648 - DNA, 25 bp, Saccharomyces pastorianus
gataatgcatctgtcattgccaaag

SEQ ID NO: 27649 - DNA, 25 bp, Saccharomyces pastorianus
agacgaaaatctgcggtgccgttaa

SEQ ID NO: 27650 - DNA, 25 bp, Saccharomyces pastorianus
aagtggcaaccacaggcttgggtaa

SEQ ID NO: 27651 - DNA, 25 bp, Saccharomyces pastorianus
gagaggcctggcaagaatcgtccaa

SEQ ID NO: 27652 - DNA, 25 bp, Saccharomyces pastorianus
gagtccactgggaaagtctggcaca

SEQ ID NO: 27653 - DNA, 25 bp, Saccharomyces pastorianus
gtgttcccgaagcaggccagtatca

SEQ ID NO: 27654 - DNA, 25 bp, Saccharomyces pastorianus
tcggtcgcagctttgttatctctaa

SEQ ID NO: 27655 - DNA, 25 bp, Saccharomyces pastorianus
aaactcgtccgctgtggccattttg

SEQ ID NO: 27656 - DNA, 25 bp, Saccharomyces pastorianus
caacatggcagctcatcggtcgcag

SEQ ID NO: 27657 - DNA, 25 bp, Saccharomyces pastorianus
cgccaatgactactcgtttctagga

SEQ ID NO: 27658 - DNA, 25 bp, Saccharomyces pastorianus
cctgtacagcgggaagaccttcttg

SEQ ID NO: 27659 - DNA, 25 bp, Saccharomyces pastorianus
agcgatctgggcaagaacctgtaca

SEQ ID NO: 27660 - DNA, 25 bp, Saccharomyces pastorianus
gaggtgccgggaagccaaactcgtc

SEQ ID NO: 27661 - DNA, 25 bp, Saccharomyces pastorianus
gttcgacgagcccatcaagtgtttc

SEQ ID NO: 27662 - DNA, 25 bp, Saccharomyces pastorianus
acgagagtatgcctaagcctgcgcc

SEQ ID NO: 27663 - DNA, 25 bp, Saccharomyces pastorianus
aaagatgcaaactccagcgatgaag

SEQ ID NO: 27664 - DNA, 25 bp, Saccharomyces pastorianus
gcgatgaagaatttgcccagagctt

SEQ ID NO: 27665 - DNA, 25 bp, Saccharomyces pastorianus
gccaatgctaccttgattattccag

SEQ ID NO: 27666 - DNA, 25 bp, Saccharomyces pastorianus
ccagagcttggaggcggaaatgaac

SEQ ID NO: 27667 - DNA, 25 bp, Saccharomyces pastorianus
aagacgctgcctccaatatagacga

SEQ ID NO: 27668 - DNA, 25 bp, Saccharomyces pastorianus
ccactctgttgccacacgaagaaaa

SEQ ID NO: 27669 - DNA, 25 bp, Saccharomyces pastorianus
gttaggctattatccgatgacgagt

SEQ ID NO: 27670 - DNA, 25 bp, Saccharomyces pastorianus
gaaacgataagaacagtcccagaaa

SEQ ID NO: 27671 - DNA, 25 bp, Saccharomyces pastorianus
attcacgattcagaaccacgttcta

SEQ ID NO: 27672 - DNA, 25 bp, Saccharomyces pastorianus
aatgcaaaggcaacggccgtagcaa

SEQ ID NO: 27673 - DNA, 25 bp, Saccharomyces pastorianus
aagcgaatagtttaggccacatgaa

SEQ ID NO: 27674 - DNA, 25 bp, Saccharomyces pastorianus
tgatatgcagcgtcagcagcaccag

SEQ ID NO: 27675 - DNA, 25 bp, Saccharomyces pastorianus
tgaatcaagatcaggtgccaccagg

SEQ ID NO: 27676 - DNA, 25 bp, Saccharomyces pastorianus
gagcctatagtcacccaacaagaag

SEQ ID NO: 27677 - DNA, 25 bp, Saccharomyces pastorianus
aggaatctcatccaagcctgtctaa

SEQ ID NO: 27678 - DNA, 25 bp, Saccharomyces pastorianus
tgccaccaggcgcactgaaacagga

SEQ ID NO: 27679 - DNA, 25 bp, Saccharomyces pastorianus
aacaccatgctcagaatcctcaaac

SEQ ID NO: 27680 - DNA, 25 bp, Saccharomyces pastorianus
atgctaatcagaccccgataatcca

SEQ ID NO: 27681 - DNA, 25 bp, Saccharomyces pastorianus
gtaaaatctcaattgctaggtgcca

SEQ ID NO: 27682 - DNA, 25 bp, Saccharomyces pastorianus
gtacgccaaagttcgagcctatagt

SEQ ID NO: 27683 - DNA, 25 bp, Saccharomyces pastorianus
aagcctgtctaaatgcccctgatga

SEQ ID NO: 27684 - DNA, 25 bp, Saccharomyces pastorianus
gatgaattgcaaattgccctcaata

SEQ ID NO: 27685 - DNA, 25 bp, Saccharomyces pastorianus
gaattcataacaatcttccaatcag

SEQ ID NO: 27686 - DNA, 25 bp, Saccharomyces pastorianus
accacctaaggcgatcaagtaccat

SEQ ID NO: 27687 - DNA, 25 bp, Saccharomyces pastorianus
agctgttatgcgatgtcttatgttc

SEQ ID NO: 27688 - DNA, 25 bp, Saccharomyces pastorianus
gaatttacgcctgatacgactgatt

SEQ ID NO: 27689 - DNA, 25 bp, Saccharomyces pastorianus
ttccaatcagacaattccttactat

SEQ ID NO: 27690 - DNA, 25 bp, Saccharomyces pastorianus
gacattaaccaagtcgtttccatca

SEQ ID NO: 27691 - DNA, 25 bp, Saccharomyces pastorianus
cgtttccatcaaagacgacttcgaa

SEQ ID NO: 27692 - DNA, 25 bp, Saccharomyces pastorianus
gactgggtccacaagatttgtccat

SEQ ID NO: 27693 - DNA, 25 bp, Saccharomyces pastorianus
gaatttatgggatcgtttccaagaa

SEQ ID NO: 27694 - DNA, 25 bp, Saccharomyces pastorianus
attggagcatagttggactgggtcc

SEQ ID NO: 27695 - DNA, 25 bp, Saccharomyces pastorianus
taacaacagaatgccggtccaacag

SEQ ID NO: 27696 - DNA, 25 bp, Saccharomyces pastorianus
ggcaagaaactgaccggatagaatt

SEQ ID NO: 27697 - DNA, 25 bp, Saccharomyces pastorianus
tccagacactatactcgctttcaaa

SEQ ID NO: 27698 - DNA, 25 bp, Saccharomyces pastorianus
gaaactcaaacggtatcgactccca

SEQ ID NO: 27699 - DNA, 25 bp, Saccharomyces pastorianus
ccagcgaatcacaactgctcattta

SEQ ID NO: 27700 - DNA, 25 bp, Saccharomyces pastorianus
ttattaaaacgccttgccaaacaat

SEQ ID NO: 27701 - DNA, 25 bp, Saccharomyces pastorianus
gagtatcttcttcaattgactaaaa

SEQ ID NO: 27702 - DNA, 25 bp, Saccharomyces pastorianus
gattgggagtctatacccacagact

SEQ ID NO: 27703 - DNA, 25 bp, Saccharomyces pastorianus
cataccgttattgagcagttcgaaa

SEQ ID NO: 27704 - DNA, 25 bp, Saccharomyces pastorianus
tgtggccgtatttgcatcagataaa

SEQ ID NO: 27705 - DNA, 25 bp, Saccharomyces pastorianus
atagcgcaggcaacgatagttttga

SEQ ID NO: 27706 - DNA, 25 bp, Saccharomyces pastorianus
ctgcatcgcagttggctcaatcaaa

SEQ ID NO: 27707 - DNA, 25 bp, Saccharomyces pastorianus
gcctgatgggaatcgtatccgttca

SEQ ID NO: 27708 - DNA, 25 bp, Saccharomyces pastorianus
aactgttgtattttcctatgtggta

SEQ ID NO: 27709 - DNA, 25 bp, Saccharomyces pastorianus
gaatctatggtacttccttccgata

SEQ ID NO: 27710 - DNA, 25 bp, Saccharomyces pastorianus
aatagcaacactgaccgactaccag

SEQ ID NO: 27711 - DNA, 25 bp, Saccharomyces pastorianus
ggtataataccccattgcaactaag

SEQ ID NO: 27712 - DNA, 25 bp, Saccharomyces pastorianus
gtaaagcactggagtctgcatcgca

SEQ ID NO: 27713 - DNA, 25 bp, Saccharomyces pastorianus
ttccgatattcttttccatgccaat

SEQ ID NO: 27714 - DNA, 25 bp, Saccharomyces pastorianus
ccatgccaatatttacgtccaacta

SEQ ID NO: 27715 - DNA, 25 bp, Saccharomyces pastorianus
cgactaccagcttttcttaaacaca

SEQ ID NO: 27716 - DNA, 25 bp, Saccharomyces pastorianus
ataggctctataactctcgaggacg

SEQ ID NO: 27717 - DNA, 25 bp, Saccharomyces pastorianus
tatcggtcgacttgggcactggtaa

SEQ ID NO: 27718 - DNA, 25 bp, Saccharomyces pastorianus
ggttcgacaaagttcgtcaccgtga

SEQ ID NO: 27719 - DNA, 25 bp, Saccharomyces pastorianus
aaatgctaacttttgctaccacccg

SEQ ID NO: 27720 - DNA, 25 bp, Saccharomyces pastorianus
acgataccatttgcatgctcgctaa

SEQ ID NO: 27721 - DNA, 25 bp, Saccharomyces pastorianus
caacgttagttttatcgccactgat

SEQ ID NO: 27722 - DNA, 25 bp, Saccharomyces pastorianus
aaacgcactgcatttcgaagacgct

SEQ ID NO: 27723 - DNA, 25 bp, Saccharomyces pastorianus
gtttccaatggtgttccgcaactaa

SEQ ID NO: 27724 - DNA, 25 bp, Saccharomyces pastorianus
aggtcactgaatttgcccaacgttt

SEQ ID NO: 27725 - DNA, 25 bp, Saccharomyces pastorianus
gagcctctgagatcttggctctgaa

SEQ ID NO: 27726 - DNA, 25 bp, Saccharomyces pastorianus
tttggcccagttagttgttcgtgat

SEQ ID NO: 27727 - DNA, 25 bp, Saccharomyces pastorianus
ggagaatcctatgcgccattgggta

SEQ ID NO: 27728 - DNA, 25 bp, Saccharomyces pastorianus
atgtcttttatgcttcttggtggat

SEQ ID NO: 27729 - DNA, 25 bp, Saccharomyces pastorianus
acagcacggatgtcgattcttcggg

SEQ ID NO: 27730 - DNA, 25 bp, Saccharomyces pastorianus
tttcgctgccgacatttatgctatg

SEQ ID NO: 27731 - DNA, 25 bp, Saccharomyces pastorianus
caagcacgctgctggtactaacagt

SEQ ID NO: 27732 - DNA, 25 bp, Saccharomyces pastorianus
tatttccaagttagactggcccggg

SEQ ID NO: 27733 - DNA, 25 bp, Saccharomyces pastorianus
gcacgccgatgcatacagatatcct

SEQ ID NO: 27734 - DNA, 25 bp, Saccharomyces pastorianus
gattcgcctgagatgctgttgttca

SEQ ID NO: 27735 - DNA, 25 bp, Saccharomyces pastorianus
acccgatatcggacatttgctacag

SEQ ID NO: 27736 - DNA, 25 bp, Saccharomyces pastorianus
catctgtcgttatcatccttcaaaa

SEQ ID NO: 27737 - DNA, 25 bp, Saccharomyces pastorianus
gatctcactggcattcacaagcacg

SEQ ID NO: 27738 - DNA, 25 bp, Saccharomyces pastorianus
tgctgttccatgctctgggtgatga

SEQ ID NO: 27739 - DNA, 25 bp, Saccharomyces pastorianus
ctggaggacttggagttcggttcta

SEQ ID NO: 27740 - DNA, 25 bp, Saccharomyces pastorianus
cataaaccttccgtattcttgcctt

SEQ ID NO: 27741 - DNA, 25 bp, Saccharomyces pastorianus
ataccgtttatgacatcgtttcaca

SEQ ID NO: 27742 - DNA, 25 bp, Saccharomyces pastorianus
gagtcactctgataatgttccaaag

SEQ ID NO: 27743 - DNA, 25 bp, Saccharomyces pastorianus
ttcttgccttcaaacgaaccgctaa

SEQ ID NO: 27744 - DNA, 25 bp, Saccharomyces pastorianus
agagaacaagcagcccacggtctat

SEQ ID NO: 27745 - DNA, 25 bp, Saccharomyces pastorianus
aaaacaagtctgtcaccgagtgcct

SEQ ID NO: 27746 - DNA, 25 bp, Saccharomyces pastorianus
aaactgattcaacttccactggtcc

SEQ ID NO: 27747 - DNA, 25 bp, Saccharomyces pastorianus
taggtggtcctatcctaacgaaaag

SEQ ID NO: 27748 - DNA, 25 bp, Saccharomyces pastorianus
gtttcacaatccttgctcgatgaca

SEQ ID NO: 27749 - DNA, 25 bp, Saccharomyces pastorianus
aaacccttagccaacgatgatcaga

SEQ ID NO: 27750 - DNA, 25 bp, Saccharomyces pastorianus
atatcctcgatcagctatgcggtgg

SEQ ID NO: 27751 - DNA, 25 bp, Saccharomyces pastorianus
ataattctatgtattgcgctcggca

SEQ ID NO: 27752 - DNA, 25 bp, Saccharomyces pastorianus
agcgaatctattccatgtgagcggg

SEQ ID NO: 27753 - DNA, 25 bp, Saccharomyces pastorianus
tgcggtggcatataccaagcatcaa

SEQ ID NO: 27754 - DNA, 25 bp, Saccharomyces pastorianus
ggaggtgtattttctatctagcgat

SEQ ID NO: 27755 - DNA, 25 bp, Saccharomyces pastorianus
ggcgatcatccaatacgtgtcgatt

SEQ ID NO: 27756 - DNA, 25 bp, Saccharomyces pastorianus
gatagcgttcgggatcatcagtata

SEQ ID NO: 27757 - DNA, 25 bp, Saccharomyces pastorianus
gacagttcattaacgtgggcggtat

SEQ ID NO: 27758 - DNA, 25 bp, Saccharomyces pastorianus
atacgaatatcctcaagaaccccac

SEQ ID NO: 27759 - DNA, 25 bp, Saccharomyces pastorianus
gggctcgtgattcttttcattgaaa

SEQ ID NO: 27760 - DNA, 25 bp, Saccharomyces pastorianus
tcgattgcggtgatggccacgagtt

SEQ ID NO: 27761 - DNA, 25 bp, Saccharomyces pastorianus
ggcaccgtgatagcgatgacttgat

SEQ ID NO: 27762 - DNA, 25 bp, Saccharomyces pastorianus
gggcgcaactactactccagaagat

SEQ ID NO: 27763 - DNA, 25 bp, Saccharomyces pastorianus
gcgaggaaaccccttgtgaggacta

SEQ ID NO: 27764 - DNA, 25 bp, Saccharomyces pastorianus
ttcagggcttactcgatgatcccat

SEQ ID NO: 27765 - DNA, 25 bp, Saccharomyces pastorianus
gatggcaccgatccgaaactaaaca

SEQ ID NO: 27766 - DNA, 25 bp, Saccharomyces pastorianus
gatatttccggctatttgaagttcc

SEQ ID NO: 27767 - DNA, 25 bp, Saccharomyces pastorianus
ggttctcagtacctcaacggataaa

SEQ ID NO: 27768 - DNA, 25 bp, Saccharomyces pastorianus
aagtttccaccgtctcagttgaggg

SEQ ID NO: 27769 - DNA, 25 bp, Saccharomyces pastorianus
cattccaagttcatttcgctacagc

SEQ ID NO: 27770 - DNA, 25 bp, Saccharomyces pastorianus
agtgccctggactggcattcactga

SEQ ID NO: 27771 - DNA, 25 bp, Saccharomyces pastorianus
accgctacatatgcccgtatcaaga

SEQ ID NO: 27772 - DNA, 25 bp, Saccharomyces pastorianus
gaagcagccaatttgccgtcaacag

SEQ ID NO: 27773 - DNA, 25 bp, Saccharomyces pastorianus
gagcacctgttgcaacaagcttcag

SEQ ID NO: 27774 - DNA, 25 bp, Saccharomyces pastorianus
gaattcattatcaagagcacctgtt

SEQ ID NO: 27775 - DNA, 25 bp, Saccharomyces pastorianus
taatggacgatgtgcaggaccaaat

SEQ ID NO: 27776 - DNA, 25 bp, Saccharomyces pastorianus
gttgccatcgcggtctaaagaagaa

SEQ ID NO: 27777 - DNA, 25 bp, Saccharomyces pastorianus
gaaggacagacagcttgatacaagt

SEQ ID NO: 27778 - DNA, 25 bp, Saccharomyces pastorianus
gagttgatacgagctcatcctaaaa

SEQ ID NO: 27779 - DNA, 25 bp, Saccharomyces pastorianus
gaaacacagtttatcaatgggctga

SEQ ID NO: 27780 - DNA, 25 bp, Saccharomyces pastorianus
gcaacaagcttcagatcagctcatt

SEQ ID NO: 27781 - DNA, 25 bp, Saccharomyces pastorianus
aacagaagggttgccatcgcggtct

SEQ ID NO: 27782 - DNA, 25 bp, Saccharomyces pastorianus
gaatattaaggtgcggttcctattg

SEQ ID NO: 27783 - DNA, 25 bp, Saccharomyces pastorianus
gaatcaccattgatggccagcttta

SEQ ID NO: 27784 - DNA, 25 bp, Saccharomyces pastorianus
aaaaatgctggctcaggtaaacctg

SEQ ID NO: 27785 - DNA, 25 bp, Saccharomyces pastorianus
tcctccagtacaatcgacttcttta

SEQ ID NO: 27786 - DNA, 25 bp, Saccharomyces pastorianus
ttagtccaggtgatgaaaagctttc

SEQ ID NO: 27787 - DNA, 25 bp, Saccharomyces pastorianus
attgcagtcgcaggaaattcatact

SEQ ID NO: 27788 - DNA, 25 bp, Saccharomyces pastorianus
gaaactctctggtatttcaaatact

SEQ ID NO: 27789 - DNA, 25 bp, Saccharomyces pastorianus
aaagttgtgttgctagatccaaaac

SEQ ID NO: 27790 - DNA, 25 bp, Saccharomyces pastorianus
gatccgcctatcgacaaagttgtgt

SEQ ID NO: 27791 - DNA, 25 bp, Saccharomyces pastorianus
aggtggtttggcaatcgatccgcct

SEQ ID NO: 27792 - DNA, 25 bp, Saccharomyces pastorianus
ataatttgaatttcctcctggccaa

SEQ ID NO: 27793 - DNA, 25 bp, Saccharomyces pastorianus
ggattctatgatctcttctaactta

SEQ ID NO: 27794 - DNA, 25 bp, Saccharomyces pastorianus
tttctgtttcggaagccgccatctc

SEQ ID NO: 27795 - DNA, 25 bp, Saccharomyces pastorianus
agtggccccaatactatgtgccggt

SEQ ID NO: 27796 - DNA, 25 bp, Saccharomyces pastorianus
gttggtttgccagccaatgcctacg

SEQ ID NO: 27797 - DNA, 25 bp, Saccharomyces pastorianus
taaaagccggtgaatgggttgccat

SEQ ID NO: 27798 - DNA, 25 bp, Saccharomyces pastorianus
aatgcctacgtcaagtccgaggtct

SEQ ID NO: 27799 - DNA, 25 bp, Saccharomyces pastorianus
acgtgagaccaaccggtactgtcgt

SEQ ID NO: 27800 - DNA, 25 bp, Saccharomyces pastorianus
atggtctccgacatccaagaagcta

SEQ ID NO: 27801 - DNA, 25 bp, Saccharomyces pastorianus
gtccgaggtcttttctcatgttatc

SEQ ID NO: 27802 - DNA, 25 bp, Saccharomyces pastorianus
ttaggttctctagccgttcaatatg

SEQ ID NO: 27803 - DNA, 25 bp, Saccharomyces pastorianus
actgacttagctgaagtggccccaa

SEQ ID NO: 27804 - DNA, 25 bp, Saccharomyces pastorianus
catctctttatccacgcaatacgtg

SEQ ID NO: 27805 - DNA, 25 bp, Saccharomyces pastorianus
atcgcaaagagatcagctgaccgtg

SEQ ID NO: 27806 - DNA, 25 bp, Saccharomyces pastorianus
acaaggtgggtgtcgatgcaatctt

SEQ ID NO: 27807 - DNA, 25 bp, Saccharomyces pastorianus
tacactatcttgcaaccaggttcac

SEQ ID NO: 27808 - DNA, 25 bp, Saccharomyces pastorianus
tagcagtttctcaacacctttagcc

SEQ ID NO: 27809 - DNA, 25 bp, Saccharomyces pastorianus
tgggaaagactataccgttggcgaa

SEQ ID NO: 27810 - DNA, 25 bp, Saccharomyces pastorianus
aggcttgttgcaacccttggacaaa

SEQ ID NO: 27811 - DNA, 25 bp, Saccharomyces pastorianus
tgttgtttcggctcttaaggcagaa

SEQ ID NO: 27812 - DNA, 25 bp, Saccharomyces pastorianus
aggcctctgctttttactctattaa

SEQ ID NO: 27813 - DNA, 25 bp, Saccharomyces pastorianus
ggaggtctaaactggattacactat

SEQ ID NO: 27814 - DNA, 25 bp, Saccharomyces pastorianus
gaagggtctgcgtgcgtactacatc

SEQ ID NO: 27815 - DNA, 25 bp, Saccharomyces pastorianus
aatgcctccgtcaatgagattgctg

SEQ ID NO: 27816 - DNA, 25 bp, Saccharomyces pastorianus
ggtctttagtgcaggcgcaggttac

SEQ ID NO: 27817 - DNA, 25 bp, Saccharomyces pastorianus
tagtgagattgctgccgccatcaag

SEQ ID NO: 27818 - DNA, 25 bp, Saccharomyces pastorianus
tggcttctttcatcacacaaacttt

SEQ ID NO: 27819 - DNA, 25 bp, Saccharomyces pastorianus
acagtagcagtttcgcaacaccatt

SEQ ID NO: 27820 - DNA, 25 bp, Saccharomyces pastorianus
atcttgcaaccaggcacgctggagt

SEQ ID NO: 27821 - DNA, 25 bp, Saccharomyces pastorianus
aaaggcctctggtctttactctatc

SEQ ID NO: 27822 - DNA, 25 bp, Saccharomyces pastorianus
gaagactatacctttggtcaacggt

SEQ ID NO: 27823 - DNA, 25 bp, Saccharomyces pastorianus
ctggagtcaaacgagggcaccggtt

SEQ ID NO: 27824 - DNA, 25 bp, Saccharomyces pastorianus
gatatagaaacttcctccgctagtg

SEQ ID NO: 27825 - DNA, 25 bp, Saccharomyces pastorianus
gaagctccaagttagattacaccat

SEQ ID NO: 27826 - DNA, 25 bp, Saccharomyces pastorianus
ggagggtttgcgtgagtactacatc

SEQ ID NO: 27827 - DNA, 25 bp, Saccharomyces pastorianus
ggttctgcagttagcttgagtcaaa

SEQ ID NO: 27828 - DNA, 25 bp, Saccharomyces pastorianus
aatcatgttgcggttggtctggaag

SEQ ID NO: 27829 - DNA, 25 bp, Saccharomyces pastorianus
gtcgagatgggctttccataccagt

SEQ ID NO: 27830 - DNA, 25 bp, Saccharomyces pastorianus
atattttcatctactctgtcaagag

SEQ ID NO: 27831 - DNA, 25 bp, Saccharomyces pastorianus
aaagccttcctacgtatcgatttca

SEQ ID NO: 27832 - DNA, 25 bp, Saccharomyces pastorianus
ggctccctagataccaatattttca

SEQ ID NO: 27833 - DNA, 25 bp, Saccharomyces pastorianus
gaggaagaccttgttgccactggct

SEQ ID NO: 27834 - DNA, 25 bp, Saccharomyces pastorianus
gaattaaaaactcctctccgtgcaa

SEQ ID NO: 27835 - DNA, 25 bp, Saccharomyces pastorianus
aatttcatggagacctgccgctaac

SEQ ID NO: 27836 - DNA, 25 bp, Saccharomyces pastorianus
gtattgaattcgttcaccggagaga

SEQ ID NO: 27837 - DNA, 25 bp, Saccharomyces pastorianus
ggttgaagtcaccaggttctgcagt

SEQ ID NO: 27838 - DNA, 25 bp, Saccharomyces pastorianus
ttgaccaaatgacttttttccgttg

SEQ ID NO: 27839 - DNA, 25 bp, Saccharomyces pastorianus
caagatttttgagtcgtaaccagat

SEQ ID NO: 27840 - DNA, 25 bp, Saccharomyces pastorianus
aacggatcggatttccaggacagga

SEQ ID NO: 27841 - DNA, 25 bp, Saccharomyces pastorianus
gatacagttatcacgaacggatcgg

SEQ ID NO: 27842 - DNA, 25 bp, Saccharomyces pastorianus
gatcgtctttcccaagaatcttaag

SEQ ID NO: 27843 - DNA, 25 bp, Saccharomyces pastorianus
atttccacgggttcagagataatcc

SEQ ID NO: 27844 - DNA, 25 bp, Saccharomyces pastorianus
gacttttttccgttgtcaagcatta

SEQ ID NO: 27845 - DNA, 25 bp, Saccharomyces pastorianus
gtaacgttattgtaccaagagcatt

SEQ ID NO: 27846 - DNA, 25 bp, Saccharomyces pastorianus
gggctttaaaccacattagactaga

SEQ ID NO: 27847 - DNA, 25 bp, Saccharomyces pastorianus
tcaagcattagtttggcagtccgtt

SEQ ID NO: 27848 - DNA, 25 bp, Saccharomyces pastorianus
gaatcttaagtccttgacgatgaag

SEQ ID NO: 27849 - DNA, 25 bp, Saccharomyces pastorianus
aatttcgcagctggcggtgtagcta

SEQ ID NO: 27850 - DNA, 25 bp, Saccharomyces pastorianus
gagggtgccagtttccttgttgaaa

SEQ ID NO: 27851 - DNA, 25 bp, Saccharomyces pastorianus
actggtgatgtctctgaagcggtca

SEQ ID NO: 27852 - DNA, 25 bp, Saccharomyces pastorianus
gtatttgtcggttcaggaatcttca

SEQ ID NO: 27853 - DNA, 25 bp, Saccharomyces pastorianus
aattgccggtggtgaatttcgcagc

SEQ ID NO: 27854 - DNA, 25 bp, Saccharomyces pastorianus
ttgaagctaccacccatttcgataa

SEQ ID NO: 27855 - DNA, 25 bp, Saccharomyces pastorianus
gggcggtgtatctatcgaatccatt

SEQ ID NO: 27856 - DNA, 25 bp, Saccharomyces pastorianus
aaagttggccactgccgtggttgaa

SEQ ID NO: 27857 - DNA, 25 bp, Saccharomyces pastorianus
gcagctaggctgtgacggtgtattt

SEQ ID NO: 27858 - DNA, 25 bp, Saccharomyces pastorianus
gataatcccgccaaattactggaag

SEQ ID NO: 27859 - DNA, 25 bp, Saccharomyces pastorianus
ggaatcttcaaatcatctaaccctg

SEQ ID NO: 27860 - DNA, 25 bp, Saccharomyces pastorianus
caggcagactatcttctatatctaa

SEQ ID NO: 27861 - DNA, 25 bp, Saccharomyces pastorianus
aaaggaactctatcccggaagcaat

SEQ ID NO: 27862 - DNA, 25 bp, Saccharomyces pastorianus
tagcttcgaggacggccgaatccaa

SEQ ID NO: 27863 - DNA, 25 bp, Saccharomyces pastorianus
ttatcttatagacaccccaggtatc

SEQ ID NO: 27864 - DNA, 25 bp, Saccharomyces pastorianus
aggtatcatattcgaccctgaggca

SEQ ID NO: 27865 - DNA, 25 bp, Saccharomyces pastorianus
ggcgagctctcatacgaagggttat

SEQ ID NO: 27866 - DNA, 25 bp, Saccharomyces pastorianus
atagacccgatattccaggcagact

SEQ ID NO: 27867 - DNA, 25 bp, Saccharomyces pastorianus
cctgaggcactgttgggtaacgatg

SEQ ID NO: 27868 - DNA, 25 bp, Saccharomyces pastorianus
gaagcaatgattcacctacgaacga

SEQ ID NO: 27869 - DNA, 25 bp, Saccharomyces pastorianus
aagagcgatctttcacgagcatgat

SEQ ID NO: 27870 - DNA, 25 bp, Saccharomyces pastorianus
gttcctggccgagtttcagatcata

SEQ ID NO: 27871 - DNA, 25 bp, Saccharomyces pastorianus
ccggtggtcactttccatcaagaaa

SEQ ID NO: 27872 - DNA, 25 bp, Saccharomyces pastorianus
cgtgccattcaaatcgtcgacaagg

SEQ ID NO: 27873 - DNA, 25 bp, Saccharomyces pastorianus
gaacgatggtctccaacttggctgg

SEQ ID NO: 27874 - DNA, 25 bp, Saccharomyces pastorianus
ggagaacacttccacttccaaggaa

SEQ ID NO: 27875 - DNA, 25 bp, Saccharomyces pastorianus
ataatttgcctgatactgttgtttg

SEQ ID NO: 27876 - DNA, 25 bp, Saccharomyces pastorianus
gaaatcgccaatccggagttgacca

SEQ ID NO: 27877 - DNA, 25 bp, Saccharomyces pastorianus
catcactttggctcctggtaagaaa

SEQ ID NO: 27878 - DNA, 25 bp, Saccharomyces pastorianus
ggaacgctcatcaattgctttgcaa

SEQ ID NO: 27879 - DNA, 25 bp, Saccharomyces pastorianus
taagagtgacccaccaacggttcaa

SEQ ID NO: 27880 - DNA, 25 bp, Saccharomyces pastorianus
gaatgtcagtcctgaacgtgccatt

SEQ ID NO: 27881 - DNA, 25 bp, Saccharomyces pastorianus
ggtcacgttcatgatttcatcactt

SEQ ID NO: 27882 - DNA, 25 bp, Saccharomyces pastorianus
gaatgagatcttaggcgtacgccaa

SEQ ID NO: 27883 - DNA, 25 bp, Saccharomyces pastorianus
gtacgccaatgtgccaatttctcat

SEQ ID NO: 27884 - DNA, 25 bp, Saccharomyces pastorianus
atttctaccaccgtgcctgatgaaa

SEQ ID NO: 27885 - DNA, 25 bp, Saccharomyces pastorianus
agcactttcgctccgaatatttcta

SEQ ID NO: 27886 - DNA, 25 bp, Saccharomyces pastorianus
aatttgccaagtgccgtcgatgtaa

SEQ ID NO: 27887 - DNA, 25 bp, Saccharomyces pastorianus
acgacggcagctgacgtttcaaatt

SEQ ID NO: 27888 - DNA, 25 bp, Saccharomyces pastorianus
atactccaaatgaaccgggctcctt

SEQ ID NO: 27889 - DNA, 25 bp, Saccharomyces pastorianus
tattcgaacgttatcgtgtgcccaa

SEQ ID NO: 27890 - DNA, 25 bp, Saccharomyces pastorianus
ttaagatccactaacactaccacag

SEQ ID NO: 27891 - DNA, 25 bp, Saccharomyces pastorianus
gtttcaaattctaccagcactttcg

SEQ ID NO: 27892 - DNA, 25 bp, Saccharomyces pastorianus
tcgtgtgcccaaacccaatgataat

SEQ ID NO: 27893 - DNA, 25 bp, Saccharomyces pastorianus
cttttggtacgggttctaatcatgt

SEQ ID NO: 27894 - DNA, 25 bp, Saccharomyces pastorianus
gttgaccaactggaagcttttgtct

SEQ ID NO: 27895 - DNA, 25 bp, Saccharomyces pastorianus
gcttttgtctccaaatctggtgtga

SEQ ID NO: 27896 - DNA, 25 bp, Saccharomyces pastorianus
ttacaacaagcaccacccagaaaag

SEQ ID NO: 27897 - DNA, 25 bp, Saccharomyces pastorianus
gttcttcgggcgctacgattagatt

SEQ ID NO: 27898 - DNA, 25 bp, Saccharomyces pastorianus
aaaagatggtgtttgggccgtcatg

SEQ ID NO: 27899 - DNA, 25 bp, Saccharomyces pastorianus
attgtctggtacaggttcttcgggc

SEQ ID NO: 27900 - DNA, 25 bp, Saccharomyces pastorianus
taaatacggtcgtactttcttcact

SEQ ID NO: 27901 - DNA, 25 bp, Saccharomyces pastorianus
aaaagttatccatctgcggtgaaga

SEQ ID NO: 27902 - DNA, 25 bp, Saccharomyces pastorianus
gaatccgtgaatgttaccgactgtg

SEQ ID NO: 27903 - DNA, 25 bp, Saccharomyces pastorianus
ttctgtgtccgaccatcaaggtttg

SEQ ID NO: 27904 - DNA, 25 bp, Saccharomyces pastorianus
atatctaacatgtctcaaggcgagt

SEQ ID NO: 27905 - DNA, 25 bp, Saccharomyces pastorianus
acagctccgatgtggaggccgtcaa

SEQ ID NO: 27906 - DNA, 25 bp, Saccharomyces pastorianus
aagacacaagttatgttctcacaag

SEQ ID NO: 27907 - DNA, 25 bp, Saccharomyces pastorianus
ggagggcagattacccgcagacata

SEQ ID NO: 27908 - DNA, 25 bp, Saccharomyces pastorianus
tatcgggcacccaagacggagcagc

SEQ ID NO: 27909 - DNA, 25 bp, Saccharomyces pastorianus
ttctcacaagaatatcgggcaccca

SEQ ID NO: 27910 - DNA, 25 bp, Saccharomyces pastorianus
caaggcgagtttctgaggctttata

SEQ ID NO: 27911 - DNA, 25 bp, Saccharomyces pastorianus
tatgtcttcggtggacagctccgat

SEQ ID NO: 27912 - DNA, 25 bp, Saccharomyces pastorianus
ggagcagcctatgccggagaacatg

SEQ ID NO: 27913 - DNA, 25 bp, Saccharomyces pastorianus
atgagacggtcttctatgtcttcgg

SEQ ID NO: 27914 - DNA, 25 bp, Saccharomyces pastorianus
gtgatccaagtttgtacggcgggaa

SEQ ID NO: 27915 - DNA, 25 bp, Saccharomyces pastorianus
aactagccgacgctatgggtctaaa

SEQ ID NO: 27916 - DNA, 25 bp, Saccharomyces pastorianus
gttccagcaggcaagggtctagatg

SEQ ID NO: 27917 - DNA, 25 bp, Saccharomyces pastorianus
tgttttgccaatggttccagcaggc

SEQ ID NO: 27918 - DNA, 25 bp, Saccharomyces pastorianus
tacaatgggttacggtcttccagcc

SEQ ID NO: 27919 - DNA, 25 bp, Saccharomyces pastorianus
cgctcaagtcgctaaaccagattct

SEQ ID NO: 27920 - DNA, 25 bp, Saccharomyces pastorianus
caaagggccctgtcttgcttgaagt

SEQ ID NO: 27921 - DNA, 25 bp, Saccharomyces pastorianus
gagttcatatactttgatccagagg

SEQ ID NO: 27922 - DNA, 25 bp, Saccharomyces pastorianus
ggtgatgcatctttcaacatgacct

SEQ ID NO: 27923 - DNA, 25 bp, Saccharomyces pastorianus
gaatttgtttccacaaagggccctg

SEQ ID NO: 27924 - DNA, 25 bp, Saccharomyces pastorianus
gaatcgttattctcacacacatcag

SEQ ID NO: 27925 - DNA, 25 bp, Saccharomyces pastorianus
gttatagtcacaaccggtgtcgggc

SEQ ID NO: 27926 - DNA, 25 bp, Saccharomyces pastorianus
ccatagttacagcaggaggacccga

SEQ ID NO: 27927 - DNA, 25 bp, Saccharomyces pastorianus
gggaagactagcaacaccggagaac

SEQ ID NO: 27928 - DNA, 25 bp, Saccharomyces pastorianus
gaagatctgtatacatttaccatag

SEQ ID NO: 27929 - DNA, 25 bp, Saccharomyces pastorianus
gagcacgagagaacaattccagcag

SEQ ID NO: 27930 - DNA, 25 bp, Saccharomyces pastorianus
tgaaagaatgccctgcgttctggaa

SEQ ID NO: 27931 - DNA, 25 bp, Saccharomyces pastorianus
gaaacaagtataggcgatcgagtaa

SEQ ID NO: 27932 - DNA, 25 bp, Saccharomyces pastorianus
gcgttctggaacctggcaccaagag

SEQ ID NO: 27933 - DNA, 25 bp, Saccharomyces pastorianus
tattgaagccggagtacgatgaatc

SEQ ID NO: 27934 - DNA, 25 bp, Saccharomyces pastorianus
atgcttggatggatgtgactaagac

SEQ ID NO: 27935 - DNA, 25 bp, Saccharomyces pastorianus
gacccgaagagttagaatggctgca

SEQ ID NO: 27936 - DNA, 25 bp, Saccharomyces pastorianus
cctggcaccaagagttgggatgctt

SEQ ID NO: 27937 - DNA, 25 bp, Saccharomyces pastorianus
tccgccacgatcttgatgtcataag

SEQ ID NO: 27938 - DNA, 25 bp, Saccharomyces pastorianus
agaagagctggttagtctacttaag

SEQ ID NO: 27939 - DNA, 25 bp, Saccharomyces pastorianus
tgtatctacggcagacggttccgaa

SEQ ID NO: 27940 - DNA, 25 bp, Saccharomyces pastorianus
tctacttaaggatttggacgggcta

SEQ ID NO: 27941 - DNA, 25 bp, Saccharomyces pastorianus
gatcaaaataccatcactccagagg

SEQ ID NO: 27942 - DNA, 25 bp, Saccharomyces pastorianus
aaagatgatcgaatccgagctggaa

SEQ ID NO: 27943 - DNA, 25 bp, Saccharomyces pastorianus
atagacgttttacccttggatgaca

SEQ ID NO: 27944 - DNA, 25 bp, Saccharomyces pastorianus
gaaatatcgtttctcttcgtagtga

SEQ ID NO: 27945 - DNA, 25 bp, Saccharomyces pastorianus
aaaacatgctcgagagtcctgccga

SEQ ID NO: 27946 - DNA, 25 bp, Saccharomyces pastorianus
ctttaaagtatctgagtcgggcaaa

SEQ ID NO: 27947 - DNA, 25 bp, Saccharomyces pastorianus
gagagtcctgccgaatttctgaaag

SEQ ID NO: 27948 - DNA, 25 bp, Saccharomyces pastorianus
ataaaccgagtctacttgtgccaaa

SEQ ID NO: 27949 - DNA, 25 bp, Saccharomyces pastorianus
gatgcagacatcctttcaagaccta

SEQ ID NO: 27950 - DNA, 25 bp, Saccharomyces pastorianus
gaaatgagttggtacctctcttcct

SEQ ID NO: 27951 - DNA, 25 bp, Saccharomyces pastorianus
tcggattttacgctttcaccattac

SEQ ID NO: 27952 - DNA, 25 bp, Saccharomyces pastorianus
ttgcatcgtatatccggtgtcttat

SEQ ID NO: 27953 - DNA, 25 bp, Saccharomyces pastorianus
tagaccttcggttgggcaatcgtga

SEQ ID NO: 27954 - DNA, 25 bp, Saccharomyces pastorianus
ggtgtcttattagctctcggatttt

SEQ ID NO: 27955 - DNA, 25 bp, Saccharomyces pastorianus
gatctgtcgttttagctggtacgct

SEQ ID NO: 27956 - DNA, 25 bp, Saccharomyces pastorianus
catctgaccatttacgagcctgaaa

SEQ ID NO: 27957 - DNA, 25 bp, Saccharomyces pastorianus
gcaggatacttgtttgcgttccact

SEQ ID NO: 27958 - DNA, 25 bp, Saccharomyces pastorianus
aatttcttctccattctttttgcac

SEQ ID NO: 27959 - DNA, 25 bp, Saccharomyces pastorianus
ccctgttggatttgttttctcctga

SEQ ID NO: 27960 - DNA, 25 bp, Saccharomyces pastorianus
aagagacacatgacgccctgttgga

SEQ ID NO: 27961 - DNA, 25 bp, Saccharomyces pastorianus
aaattgacagcagcgaccacggcga

SEQ ID NO: 27962 - DNA, 25 bp, Saccharomyces pastorianus
acctctctggagattacgaaccttc

SEQ ID NO: 27963 - DNA, 25 bp, Saccharomyces pastorianus
attcctctcaggttccacactaaat

SEQ ID NO: 27964 - DNA, 25 bp, Saccharomyces pastorianus
tgctttgccctgtgcgaagattgta

SEQ ID NO: 27965 - DNA, 25 bp, Saccharomyces pastorianus
ttgagtcactctgggattccgatga

SEQ ID NO: 27966 - DNA, 25 bp, Saccharomyces pastorianus
ctttgatctatcttgtgctgtgtgc

SEQ ID NO: 27967 - DNA, 25 bp, Saccharomyces pastorianus
gatcgtttcaactagtcatatcctt

SEQ ID NO: 27968 - DNA, 25 bp, Saccharomyces pastorianus
gaaccgtccggtgaagactgtgact

SEQ ID NO: 27969 - DNA, 25 bp, Saccharomyces pastorianus
atactatggccttgtcgatgctttg

SEQ ID NO: 27970 - DNA, 25 bp, Saccharomyces pastorianus
ctatcttcagatgcgtttttcccat

SEQ ID NO: 27971 - DNA, 25 bp, Saccharomyces pastorianus
atacattgctgctccatctggctca

SEQ ID NO: 27972 - DNA, 25 bp, Saccharomyces pastorianus
aatccaactcagtatgttacgcaag

SEQ ID NO: 27973 - DNA, 25 bp, Saccharomyces pastorianus
ttaaccaatgtatcgctatcttcag

SEQ ID NO: 27974 - DNA, 25 bp, Saccharomyces pastorianus
ccgagcaggcggtaattgacttgac

SEQ ID NO: 27975 - DNA, 25 bp, Saccharomyces pastorianus
tggtcaacaatccagaatccactgt

SEQ ID NO: 27976 - DNA, 25 bp, Saccharomyces pastorianus
acaaagtcgtcttttcagctgccga

SEQ ID NO: 27977 - DNA, 25 bp, Saccharomyces pastorianus
ttcccattccctgataacgtttaca

SEQ ID NO: 27978 - DNA, 25 bp, Saccharomyces pastorianus
ttcgtaactggtcagattccaactg

SEQ ID NO: 27979 - DNA, 25 bp, Saccharomyces pastorianus
gagccgtcaaatctggtgtcaaata

SEQ ID NO: 27980 - DNA, 25 bp, Saccharomyces pastorianus
tgacagttgctaccatcgctttgaa

SEQ ID NO: 27981 - DNA, 25 bp, Saccharomyces pastorianus
ttgggttacaaagctaagcaaggtt

SEQ ID NO: 27982 - DNA, 25 bp, Saccharomyces pastorianus
tagaagattgggttacaaagctaag

SEQ ID NO: 27983 - DNA, 25 bp, Saccharomyces pastorianus
attgggttacaaagctaagcaaggt

SEQ ID NO: 27984 - DNA, 25 bp, Saccharomyces pastorianus
aagattgggttacaaagctaagcaa

SEQ ID NO: 27985 - DNA, 25 bp, Saccharomyces pastorianus
tgggttacaaagctaagcaaggttt

SEQ ID NO: 27986 - DNA, 25 bp, Saccharomyces pastorianus
agaagattgggttacaaagctaagc

SEQ ID NO: 27987 - DNA, 25 bp, Saccharomyces pastorianus
ctagaagattgggttacaaagctaa

SEQ ID NO: 27988 - DNA, 25 bp, Saccharomyces pastorianus
gattgggttacaaagctaagcaagg

SEQ ID NO: 27989 - DNA, 25 bp, Saccharomyces pastorianus
gaagattgggttacaaagctaagca

SEQ ID NO: 27990 - DNA, 25 bp, Saccharomyces pastorianus
agattgggttacaaagctaagcaag

SEQ ID NO: 27991 - DNA, 25 bp, Saccharomyces pastorianus
atggccagctcttcatccgtttcct

SEQ ID NO: 27992 - DNA, 25 bp, Saccharomyces pastorianus
aacaacagtgccgtagctgcctctt

SEQ ID NO: 27993 - DNA, 25 bp, Saccharomyces pastorianus
tgtccagaccaacagtgctctagtc

SEQ ID NO: 27994 - DNA, 25 bp, Saccharomyces pastorianus
tcttctgtctctgccagtgctagtg

SEQ ID NO: 27995 - DNA, 25 bp, Saccharomyces pastorianus
gtgctctagtcaacaacagtgccgt

SEQ ID NO: 27996 - DNA, 25 bp, Saccharomyces pastorianus
agtctcctggaagtacggtgccgtc

SEQ ID NO: 27997 - DNA, 25 bp, Saccharomyces pastorianus
agtacggtgccgtcatggctgccat

SEQ ID NO: 27998 - DNA, 25 bp, Saccharomyces pastorianus
agaacgccgccccaggtatggttgc

SEQ ID NO: 27999 - DNA, 25 bp, Saccharomyces pastorianus
agtgctagtgccagcgccaactcct

SEQ ID NO: 28000 - DNA, 25 bp, Saccharomyces pastorianus
tatggttgccaacccagtctcctgg

SEQ ID NO: 28001 - DNA, 25 bp, Saccharomyces pastorianus
gtaacagcactacctcttccaagaa

SEQ ID NO: 28002 - DNA, 25 bp, Saccharomyces pastorianus
gaaattgcttctaccgcgttaaacg

SEQ ID NO: 28003 - DNA, 25 bp, Saccharomyces pastorianus
gaaagcggttctcagtccaagatga

SEQ ID NO: 28004 - DNA, 25 bp, Saccharomyces pastorianus
ggcatcaagcccagttctatagaat

SEQ ID NO: 28005 - DNA, 25 bp, Saccharomyces pastorianus
cagctttgataatactctggctaag

SEQ ID NO: 28006 - DNA, 25 bp, Saccharomyces pastorianus
gcccaatatggacggttcaccttta

SEQ ID NO: 28007 - DNA, 25 bp, Saccharomyces pastorianus
gaagcattgctccaattgccaaaat

SEQ ID NO: 28008 - DNA, 25 bp, Saccharomyces pastorianus
gactcttgtctccacagaattagct

SEQ ID NO: 28009 - DNA, 25 bp, Saccharomyces pastorianus
ctggctaagtcgtatgaaccatctt

SEQ ID NO: 28010 - DNA, 25 bp, Saccharomyces pastorianus
acaccgaacttcgatgacacttcat

SEQ ID NO: 28011 - DNA, 25 bp, Saccharomyces pastorianus
atgagcgaactgactcttgtctcca

SEQ ID NO: 28012 - DNA, 25 bp, Saccharomyces pastorianus
acacttcatgcgtatccttttctga

SEQ ID NO: 28013 - DNA, 25 bp, Saccharomyces pastorianus
gaagagcatcctttagaagacgatt

SEQ ID NO: 28014 - DNA, 25 bp, Saccharomyces pastorianus
gatacgtcatttgcaaatttccaga

SEQ ID NO: 28015 - DNA, 25 bp, Saccharomyces pastorianus
atactgtttgttgagctgtgtcttt

SEQ ID NO: 28016 - DNA, 25 bp, Saccharomyces pastorianus
gtgtcactaacaagggatacgtcat

SEQ ID NO: 28017 - DNA, 25 bp, Saccharomyces pastorianus
gaaactggaggacacttttgctgat

SEQ ID NO: 28018 - DNA, 25 bp, Saccharomyces pastorianus
gattttcaggcaaagatgtcacaag

SEQ ID NO: 28019 - DNA, 25 bp, Saccharomyces pastorianus
gacgattctgattgtaatgggctta

SEQ ID NO: 28020 - DNA, 25 bp, Saccharomyces pastorianus
agtggcacggcatatttcatctggt

SEQ ID NO: 28021 - DNA, 25 bp, Saccharomyces pastorianus
gatgtggtgaattctcagtttgtta

SEQ ID NO: 28022 - DNA, 25 bp, Saccharomyces pastorianus
atgggcttaatgacaaacttgcaga

SEQ ID NO: 28023 - DNA, 25 bp, Saccharomyces pastorianus
ggtggagatttacctaattctgaag

SEQ ID NO: 28024 - DNA, 25 bp, Saccharomyces pastorianus
agaagtgccgttatcgcccttcgga

SEQ ID NO: 28025 - DNA, 25 bp, Saccharomyces pastorianus
catgcatattaacactgccaccata

SEQ ID NO: 28026 - DNA, 25 bp, Saccharomyces pastorianus
caagagtcccgaatacacaatcaga

SEQ ID NO: 28027 - DNA, 25 bp, Saccharomyces pastorianus
aggagatctcgcacattttgataaa

SEQ ID NO: 28028 - DNA, 25 bp, Saccharomyces pastorianus
gagccaaaggcaactggtttaagct

SEQ ID NO: 28029 - DNA, 25 bp, Saccharomyces pastorianus
gaagatctttctattgtgactggaa

SEQ ID NO: 28030 - DNA, 25 bp, Saccharomyces pastorianus
taaggatttggtttcgtatcaacaa

SEQ ID NO: 28031 - DNA, 25 bp, Saccharomyces pastorianus
gaatactctattggcatctcattga

SEQ ID NO: 28032 - DNA, 25 bp, Saccharomyces pastorianus
cttgcaatccttgaatacttggttc

SEQ ID NO: 28033 - DNA, 25 bp, Saccharomyces pastorianus
agacgtggattaggctcattactta

SEQ ID NO: 28034 - DNA, 25 bp, Saccharomyces pastorianus
ccttcggattgattgggtacctgaa

SEQ ID NO: 28035 - DNA, 25 bp, Saccharomyces pastorianus
gtttttgcaccaatcgaaattcccg

SEQ ID NO: 28036 - DNA, 25 bp, Saccharomyces pastorianus
atccagatttgatcagtttcttgaa

SEQ ID NO: 28037 - DNA, 25 bp, Saccharomyces pastorianus
aaggtgccggttggactggaattct

SEQ ID NO: 28038 - DNA, 25 bp, Saccharomyces pastorianus
agcactgtttccacatcggagatga

SEQ ID NO: 28039 - DNA, 25 bp, Saccharomyces pastorianus
gatttgctgaaggtgtactctaagg

SEQ ID NO: 28040 - DNA, 25 bp, Saccharomyces pastorianus
ggatatctatcggagtcacttgaca

SEQ ID NO: 28041 - DNA, 25 bp, Saccharomyces pastorianus
agataagcgtcctgatttgctgaag

SEQ ID NO: 28042 - DNA, 25 bp, Saccharomyces pastorianus
gaaatttgccagcactgtttccaca

SEQ ID NO: 28043 - DNA, 25 bp, Saccharomyces pastorianus
aatattgctgcggtttgagggtttt

SEQ ID NO: 28044 - DNA, 25 bp, Saccharomyces pastorianus
tgagcttgacctggcaaaacctgat

SEQ ID NO: 28045 - DNA, 25 bp, Saccharomyces pastorianus
gggttgtatgaaacattcgccgata

SEQ ID NO: 28046 - DNA, 25 bp, Saccharomyces pastorianus
gaaacataagccagccatctctgtc

SEQ ID NO: 28047 - DNA, 25 bp, Saccharomyces pastorianus
gataacaccgtaaccttgtgggatt

SEQ ID NO: 28048 - DNA, 25 bp, Saccharomyces pastorianus
aaccagtcgctcagtatgacttcca

SEQ ID NO: 28049 - DNA, 25 bp, Saccharomyces pastorianus
tcccaccccagttattatttgttca

SEQ ID NO: 28050 - DNA, 25 bp, Saccharomyces pastorianus
aaaattggctatttgcttgcaagcg

SEQ ID NO: 28051 - DNA, 25 bp, Saccharomyces pastorianus
gacattcagtggtctcggacagaat

SEQ ID NO: 28052 - DNA, 25 bp, Saccharomyces pastorianus
gggtgccattacttctattgcattt

SEQ ID NO: 28053 - DNA, 25 bp, Saccharomyces pastorianus
gacagtttacaccaagcaatgccga

SEQ ID NO: 28054 - DNA, 25 bp, Saccharomyces pastorianus
atctctgtcaaagcctctaataccg

SEQ ID NO: 28055 - DNA, 25 bp, Saccharomyces pastorianus
gcgacagctgcttgtgacggatata

SEQ ID NO: 28056 - DNA, 25 bp, Saccharomyces pastorianus
gacacacttccagatgggtgactga

SEQ ID NO: 28057 - DNA, 25 bp, Saccharomyces pastorianus
aatggtagtcggtacgcttgcattt

SEQ ID NO: 28058 - DNA, 25 bp, Saccharomyces pastorianus
tgtccactccattgaaattccatgt

SEQ ID NO: 28059 - DNA, 25 bp, Saccharomyces pastorianus
aagcttcacaggatgctagtcagtg

SEQ ID NO: 28060 - DNA, 25 bp, Saccharomyces pastorianus
attgaagagtttgaggaccgcgata

SEQ ID NO: 28061 - DNA, 25 bp, Saccharomyces pastorianus
aaagaaattttgtccactccattga

SEQ ID NO: 28062 - DNA, 25 bp, Saccharomyces pastorianus
aatacatccgaggaactagagcgcg

SEQ ID NO: 28063 - DNA, 25 bp, Saccharomyces pastorianus
gaaatataccgtgatctgattaggg

SEQ ID NO: 28064 - DNA, 25 bp, Saccharomyces pastorianus
aattccatgtggagttttcaccaga

SEQ ID NO: 28065 - DNA, 25 bp, Saccharomyces pastorianus
atttggaactagtctgcatgtgtta

SEQ ID NO: 28066 - DNA, 25 bp, Saccharomyces pastorianus
ataagcggtagaatcactctttttt

SEQ ID NO: 28067 - DNA, 25 bp, Saccharomyces pastorianus
gaagcctgtgtttgtttcagagcta

SEQ ID NO: 28068 - DNA, 25 bp, Saccharomyces pastorianus
gccagcgctgcttcgaacacaaaga

SEQ ID NO: 28069 - DNA, 25 bp, Saccharomyces pastorianus
gattccgtcgatagcagcagcatca

SEQ ID NO: 28070 - DNA, 25 bp, Saccharomyces pastorianus
gaaactgtggtcctggtgcgaaaac

SEQ ID NO: 28071 - DNA, 25 bp, Saccharomyces pastorianus
ataaattacatctcttccaaccaac

SEQ ID NO: 28072 - DNA, 25 bp, Saccharomyces pastorianus
aagcgtccgaattgttaaccgccag

SEQ ID NO: 28073 - DNA, 25 bp, Saccharomyces pastorianus
actccccaagtcgttacagaatctg

SEQ ID NO: 28074 - DNA, 25 bp, Saccharomyces pastorianus
tcaacaactactcctcttctgaatt

SEQ ID NO: 28075 - DNA, 25 bp, Saccharomyces pastorianus
acaacaactcgaagtttcccgatct

SEQ ID NO: 28076 - DNA, 25 bp, Saccharomyces pastorianus
aagcgcgaccaccttcaagaatttg

SEQ ID NO: 28077 - DNA, 25 bp, Saccharomyces pastorianus
tctgtactcgataaccttaagggcc

SEQ ID NO: 28078 - DNA, 25 bp, Saccharomyces pastorianus
aaactgctcaaattcattcacccga

SEQ ID NO: 28079 - DNA, 25 bp, Saccharomyces pastorianus
atgcgtgcgggctattttacagaaa

SEQ ID NO: 28080 - DNA, 25 bp, Saccharomyces pastorianus
atttcataaacaactccggcactgc

SEQ ID NO: 28081 - DNA, 25 bp, Saccharomyces pastorianus
aaaagtaacttatcatcgtctccct

SEQ ID NO: 28082 - DNA, 25 bp, Saccharomyces pastorianus
gagccattgattcagccaacgatcg

SEQ ID NO: 28083 - DNA, 25 bp, Saccharomyces pastorianus
tacctacataccgagtactaccttg

SEQ ID NO: 28084 - DNA, 25 bp, Saccharomyces pastorianus
tcactacctctactcatttcataaa

SEQ ID NO: 28085 - DNA, 25 bp, Saccharomyces pastorianus
gaagctacaggttccaagactggac

SEQ ID NO: 28086 - DNA, 25 bp, Saccharomyces pastorianus
gtccatacggtacaagaaccctttg

SEQ ID NO: 28087 - DNA, 25 bp, Saccharomyces pastorianus
gatttcatcaccattccaaacagat

SEQ ID NO: 28088 - DNA, 25 bp, Saccharomyces pastorianus
cgtctcccttcaatttgattaccta

SEQ ID NO: 28089 - DNA, 25 bp, Saccharomyces pastorianus
atcgaattctgtttccactgtggag

SEQ ID NO: 28090 - DNA, 25 bp, Saccharomyces pastorianus
gttccaagtcttcaatgtgccgtat

SEQ ID NO: 28091 - DNA, 25 bp, Saccharomyces pastorianus
cgtcgatgacgtggttgggtttata

SEQ ID NO: 28092 - DNA, 25 bp, Saccharomyces pastorianus
gtccgagatgatacctactgtgaac

SEQ ID NO: 28093 - DNA, 25 bp, Saccharomyces pastorianus
acttggtacccattagagtgctgaa

SEQ ID NO: 28094 - DNA, 25 bp, Saccharomyces pastorianus
gccgtattccgagcacagtagtttt

SEQ ID NO: 28095 - DNA, 25 bp, Saccharomyces pastorianus
ctggcgacatgagcgaatcgtttgt

SEQ ID NO: 28096 - DNA, 25 bp, Saccharomyces pastorianus
aatcgtttgttcacttggtacccat

SEQ ID NO: 28097 - DNA, 25 bp, Saccharomyces pastorianus
tggatgccaactgcttaaaggacgt

SEQ ID NO: 28098 - DNA, 25 bp, Saccharomyces pastorianus
atttgtgatgccaagctcggttaaa

SEQ ID NO: 28099 - DNA, 25 bp, Saccharomyces pastorianus
acgaaaatttactcactggcgacat

SEQ ID NO: 28100 - DNA, 25 bp, Saccharomyces pastorianus
gatggagtcataactttggcctaaa

SEQ ID NO: 28101 - DNA, 25 bp, Saccharomyces pastorianus
tttttggcgccaccaactataccaa

SEQ ID NO: 28102 - DNA, 25 bp, Saccharomyces pastorianus
ggcggaattgttgctaggccaacca

SEQ ID NO: 28103 - DNA, 25 bp, Saccharomyces pastorianus
gcaccggaactaatttttggcgcca

SEQ ID NO: 28104 - DNA, 25 bp, Saccharomyces pastorianus
gatccttcggaaagattcaatgctt

SEQ ID NO: 28105 - DNA, 25 bp, Saccharomyces pastorianus
gaaatatgctctatgaacccaaact

SEQ ID NO: 28106 - DNA, 25 bp, Saccharomyces pastorianus
gaactaggtcatttatcgcctgatg

SEQ ID NO: 28107 - DNA, 25 bp, Saccharomyces pastorianus
atatatggtcttctgggtgcgtgat

SEQ ID NO: 28108 - DNA, 25 bp, Saccharomyces pastorianus
gctttgcaatgtttatgtagcccat

SEQ ID NO: 28109 - DNA, 25 bp, Saccharomyces pastorianus
aaatcttaggcaccccatcaaagca

SEQ ID NO: 28110 - DNA, 25 bp, Saccharomyces pastorianus
gaaacctggtctttaaaactgtgtg

SEQ ID NO: 28111 - DNA, 25 bp, Saccharomyces pastorianus
atctgttagtagaccctgaaacctg

SEQ ID NO: 28112 - DNA, 25 bp, Saccharomyces pastorianus
acttacgtgtatatggcctccaata

SEQ ID NO: 28113 - DNA, 25 bp, Saccharomyces pastorianus
ttgtccttattgtgcaactgccgat

SEQ ID NO: 28114 - DNA, 25 bp, Saccharomyces pastorianus
tggtaagaaggtccgccaacgctac

SEQ ID NO: 28115 - DNA, 25 bp, Saccharomyces pastorianus
ggtatatcccctgatacttacgtgt

SEQ ID NO: 28116 - DNA, 25 bp, Saccharomyces pastorianus
gatcacttcagatactattcgtcca

SEQ ID NO: 28117 - DNA, 25 bp, Saccharomyces pastorianus
aactggactcggtggtatatcccct

SEQ ID NO: 28118 - DNA, 25 bp, Saccharomyces pastorianus
taatcttctaacttccgaaccagca

SEQ ID NO: 28119 - DNA, 25 bp, Saccharomyces pastorianus
gggtcctagtggaacgcctattcaa

SEQ ID NO: 28120 - DNA, 25 bp, Saccharomyces pastorianus
tatcagcctcccacaaatcgtaaaa

SEQ ID NO: 28121 - DNA, 25 bp, Saccharomyces pastorianus
aaccagttgccttcttcggtgatca

SEQ ID NO: 28122 - DNA, 25 bp, Saccharomyces pastorianus
tgaacctcatttccctcatgatgaa

SEQ ID NO: 28123 - DNA, 25 bp, Saccharomyces pastorianus
ggtgctcaagactctattttcgcca

SEQ ID NO: 28124 - DNA, 25 bp, Saccharomyces pastorianus
tgccttggcctacattggttcagat

SEQ ID NO: 28125 - DNA, 25 bp, Saccharomyces pastorianus
acagattggctggttcattcacttt

SEQ ID NO: 28126 - DNA, 25 bp, Saccharomyces pastorianus
aaaactacatctattgggtgctcaa

SEQ ID NO: 28127 - DNA, 25 bp, Saccharomyces pastorianus
gtcgctacgaacctaatgtccaaac

SEQ ID NO: 28128 - DNA, 25 bp, Saccharomyces pastorianus
ggtttatttcctactgctcaagtcg

SEQ ID NO: 28129 - DNA, 25 bp, Saccharomyces pastorianus
ttcgccatcggtgattgtacattcc

SEQ ID NO: 28130 - DNA, 25 bp, Saccharomyces pastorianus
aagtcgatgctaccactataaccgc

SEQ ID NO: 28131 - DNA, 25 bp, Saccharomyces pastorianus
taacgacgattcagaagccgctaga

SEQ ID NO: 28132 - DNA, 25 bp, Saccharomyces pastorianus
ggttcattcactttcttattctgga

SEQ ID NO: 28133 - DNA, 25 bp, Saccharomyces pastorianus
atgctccaagagaagtcgctacgaa

SEQ ID NO: 28134 - DNA, 25 bp, Saccharomyces pastorianus
gatcggcagagtgcaaggccatttc

SEQ ID NO: 28135 - DNA, 25 bp, Saccharomyces pastorianus
gatggtccactgagggcaagtacat

SEQ ID NO: 28136 - DNA, 25 bp, Saccharomyces pastorianus
tttcatcacatcatccagagacacc

SEQ ID NO: 28137 - DNA, 25 bp, Saccharomyces pastorianus
gagacaccagctcgttcttggtcga

SEQ ID NO: 28138 - DNA, 25 bp, Saccharomyces pastorianus
gtccaccctacaagtcctgaagaaa

SEQ ID NO: 28139 - DNA, 25 bp, Saccharomyces pastorianus
gcagtcagtccacaaggcacaagtt

SEQ ID NO: 28140 - DNA, 25 bp, Saccharomyces pastorianus
ggattgtccattaaacaccgctgtc

SEQ ID NO: 28141 - DNA, 25 bp, Saccharomyces pastorianus
gttcgaagccagattctaccacaag

SEQ ID NO: 28142 - DNA, 25 bp, Saccharomyces pastorianus
agatcaccacccatgaaggcttgga

SEQ ID NO: 28143 - DNA, 25 bp, Saccharomyces pastorianus
caagtacatcattgcgggtcacaaa

SEQ ID NO: 28144 - DNA, 25 bp, Saccharomyces pastorianus
gaatttatcattctcggcggtggtc

SEQ ID NO: 28145 - DNA, 25 bp, Saccharomyces pastorianus
tggtttccgtcgctacatttttctt

SEQ ID NO: 28146 - DNA, 25 bp, Saccharomyces pastorianus
attgttcataattcccttactaggc

SEQ ID NO: 28147 - DNA, 25 bp, Saccharomyces pastorianus
gatgtcatctttgaacccgttagcg

SEQ ID NO: 28148 - DNA, 25 bp, Saccharomyces pastorianus
gtccctcaaagttcgtcactgaaga

SEQ ID NO: 28149 - DNA, 25 bp, Saccharomyces pastorianus
tggcgcaacttgtatacattcgagc

SEQ ID NO: 28150 - DNA, 25 bp, Saccharomyces pastorianus
tatcggtgtggtatcgtttggcttc

SEQ ID NO: 28151 - DNA, 25 bp, Saccharomyces pastorianus
aggccagtaagcaatccaacgattc

SEQ ID NO: 28152 - DNA, 25 bp, Saccharomyces pastorianus
gagctaccagcaacactaaggccag

SEQ ID NO: 28153 - DNA, 25 bp, Saccharomyces pastorianus
gccattgctcgttctttagagacca

SEQ ID NO: 28154 - DNA, 25 bp, Saccharomyces pastorianus
gtagtgatcgggtttttctcctcat

SEQ ID NO: 28155 - DNA, 25 bp, Saccharomyces pastorianus
acattcgagcagatgccttcttgaa

SEQ ID NO: 28156 - DNA, 25 bp, Saccharomyces pastorianus
gctggcaagttcgacattcaacctg

SEQ ID NO: 28157 - DNA, 25 bp, Saccharomyces pastorianus
ttcactattttgtcgttgctcgtca

SEQ ID NO: 28158 - DNA, 25 bp, Saccharomyces pastorianus
gagttgccaagccaatagcccgaat

SEQ ID NO: 28159 - DNA, 25 bp, Saccharomyces pastorianus
tcgtcgcgactatcattgggtttga

SEQ ID NO: 28160 - DNA, 25 bp, Saccharomyces pastorianus
tgtatttcttaggtttcgtcgcgac

SEQ ID NO: 28161 - DNA, 25 bp, Saccharomyces pastorianus
aaactctctattggttggcctacct

SEQ ID NO: 28162 - DNA, 25 bp, Saccharomyces pastorianus
acctgggtgaattcttgcgctgctg

SEQ ID NO: 28163 - DNA, 25 bp, Saccharomyces pastorianus
gatcattctgatctatctctcgctg

SEQ ID NO: 28164 - DNA, 25 bp, Saccharomyces pastorianus
tcaacctgaaattcgtcacgtcttc

SEQ ID NO: 28165 - DNA, 25 bp, Saccharomyces pastorianus
agccacgttagattctgccttgtta

SEQ ID NO: 28166 - DNA, 25 bp, Saccharomyces pastorianus
ggcaactttgatcttagcatcctct

SEQ ID NO: 28167 - DNA, 25 bp, Saccharomyces pastorianus
agccattctgggattcaagacgcaa

SEQ ID NO: 28168 - DNA, 25 bp, Saccharomyces pastorianus
tgtagtggcgttgaagcccaccgac

SEQ ID NO: 28169 - DNA, 25 bp, Saccharomyces pastorianus
aacgtacaacgcattacccatgggt

SEQ ID NO: 28170 - DNA, 25 bp, Saccharomyces pastorianus
taaagtacccgagggccatgtttgg

SEQ ID NO: 28171 - DNA, 25 bp, Saccharomyces pastorianus
gggagagtctatgctgccaacgcta

SEQ ID NO: 28172 - DNA, 25 bp, Saccharomyces pastorianus
gccaacgctatcagccacgaatgat

SEQ ID NO: 28173 - DNA, 25 bp, Saccharomyces pastorianus
gtgcatgtcctgaagcatttccaaa

SEQ ID NO: 28174 - DNA, 25 bp, Saccharomyces pastorianus
tgcctactgcatataattcacacgt

SEQ ID NO: 28175 - DNA, 25 bp, Saccharomyces pastorianus
gcctggtgacatggtgctcgtcgac

SEQ ID NO: 28176 - DNA, 25 bp, Saccharomyces pastorianus
aggattaccggcatgcctggtgaca

SEQ ID NO: 28177 - DNA, 25 bp, Saccharomyces pastorianus
ttggtgcactgcctatttggtcaaa

SEQ ID NO: 28178 - DNA, 25 bp, Saccharomyces pastorianus
atccgtgtcatatgctttcgtccat

SEQ ID NO: 28179 - DNA, 25 bp, Saccharomyces pastorianus
accacctattgattctgtttacgag

SEQ ID NO: 28180 - DNA, 25 bp, Saccharomyces pastorianus
actttaatatcggtactgtagctgg

SEQ ID NO: 28181 - DNA, 25 bp, Saccharomyces pastorianus
taaggcggatgattccttttacgtt

SEQ ID NO: 28182 - DNA, 25 bp, Saccharomyces pastorianus
ttcaactggcgttttgcttcgccaa

SEQ ID NO: 28183 - DNA, 25 bp, Saccharomyces pastorianus
ttcaaaggtcttggtcatcggcgcc

SEQ ID NO: 28184 - DNA, 25 bp, Saccharomyces pastorianus
ttaggttatgactacttggtgccat

SEQ ID NO: 28185 - DNA, 25 bp, Saccharomyces pastorianus
gggaagcatatcagcagcccttaat

SEQ ID NO: 28186 - DNA, 25 bp, Saccharomyces pastorianus
aagttttatctccttgggaagcata

SEQ ID NO: 28187 - DNA, 25 bp, Saccharomyces pastorianus
agcagcccttaatccgttcaaaagt

SEQ ID NO: 28188 - DNA, 25 bp, Saccharomyces pastorianus
aatggagccctgattcaaaggtctt

SEQ ID NO: 28189 - DNA, 25 bp, Saccharomyces pastorianus
aagtttctaaaaatcgcgccctgca

SEQ ID NO: 28190 - DNA, 25 bp, Saccharomyces pastorianus
ttttgctaactttggcgagatctta

SEQ ID NO: 28191 - DNA, 25 bp, Saccharomyces pastorianus
gtttcatatagtcgagctgctctca

SEQ ID NO: 28192 - DNA, 25 bp, Saccharomyces pastorianus
aaaatcgcgccctgcaagagaatgg

SEQ ID NO: 28193 - DNA, 25 bp, Saccharomyces pastorianus
cgtcccatatacactggcgatggtt

SEQ ID NO: 28194 - DNA, 25 bp, Saccharomyces pastorianus
gctacttctagagctcgtaattcag

SEQ ID NO: 28195 - DNA, 25 bp, Saccharomyces pastorianus
gaagattcatagtggcgtgttaagc

SEQ ID NO: 28196 - DNA, 25 bp, Saccharomyces pastorianus
cggtacattgatcggctgtgtttca

SEQ ID NO: 28197 - DNA, 25 bp, Saccharomyces pastorianus
acaccgcacaaaaacgtcccatata

SEQ ID NO: 28198 - DNA, 25 bp, Saccharomyces pastorianus
gtgttaagctctatcgaatccgact

SEQ ID NO: 28199 - DNA, 25 bp, Saccharomyces pastorianus
aagccatctagtcaaacacacaccg

SEQ ID NO: 28200 - DNA, 25 bp, Saccharomyces pastorianus
ctgcaaggccggtgataaactgatt

SEQ ID NO: 28201 - DNA, 25 bp, Saccharomyces pastorianus
gtagttaccacaattcttgttccaa

SEQ ID NO: 28202 - DNA, 25 bp, Saccharomyces pastorianus
aaatcttccttgttgctatcatcgg

SEQ ID NO: 28203 - DNA, 25 bp, Saccharomyces pastorianus
ttgtagatccagtcagtgtcgtcga

SEQ ID NO: 28204 - DNA, 25 bp, Saccharomyces pastorianus
ttgtcaagacagtgcagtccctaga

SEQ ID NO: 28205 - DNA, 25 bp, Saccharomyces pastorianus
agctaaaatagatgcccctgggttc

SEQ ID NO: 28206 - DNA, 25 bp, Saccharomyces pastorianus
tatgttgacaatctaccggcaggta

SEQ ID NO: 28207 - DNA, 25 bp, Saccharomyces pastorianus
gtgtcgtcgactactttagaacttt

SEQ ID NO: 28208 - DNA, 25 bp, Saccharomyces pastorianus
ggctattttcccacaaggtgacgtt

SEQ ID NO: 28209 - DNA, 25 bp, Saccharomyces pastorianus
ccggcaggtatgctagtcatgcttt

SEQ ID NO: 28210 - DNA, 25 bp, Saccharomyces pastorianus
atatgggccggatacgtatgttgac

SEQ ID NO: 28211 - DNA, 25 bp, Saccharomyces pastorianus
aactgattcttgttcgcgctgagaa

SEQ ID NO: 28212 - DNA, 25 bp, Saccharomyces pastorianus
attgctcgaaagtcagagtggcttt

SEQ ID NO: 28213 - DNA, 25 bp, Saccharomyces pastorianus
aaacccgtgcttagtaactgtcgct

SEQ ID NO: 28214 - DNA, 25 bp, Saccharomyces pastorianus
agcttgcaaacacatgtgcccatct

SEQ ID NO: 28215 - DNA, 25 bp, Saccharomyces pastorianus
aaacatcaaacctttgcagccaggg

SEQ ID NO: 28216 - DNA, 25 bp, Saccharomyces pastorianus
gtgcccatctacagaattgctcgaa

SEQ ID NO: 28217 - DNA, 25 bp, Saccharomyces pastorianus
gatcccatacacgaaattacagtta

SEQ ID NO: 28218 - DNA, 25 bp, Saccharomyces pastorianus
cagagtggctttaacatcgatccca

SEQ ID NO: 28219 - DNA, 25 bp, Saccharomyces pastorianus
acgatgggcccagacaaagaatatg

SEQ ID NO: 28220 - DNA, 25 bp, Saccharomyces pastorianus
atacagagacaacaaacccgtgctt

SEQ ID NO: 28221 - DNA, 25 bp, Saccharomyces pastorianus
gtaactgtcgcttgatttctaaacc

SEQ ID NO: 28222 - DNA, 25 bp, Saccharomyces pastorianus
taagctgatcaagcggccatcccta

SEQ ID NO: 28223 - DNA, 25 bp, Saccharomyces pastorianus
ggcgctattgcctatcactatggat

SEQ ID NO: 28224 - DNA, 25 bp, Saccharomyces pastorianus
gccatccctaaaaccacagactagt

SEQ ID NO: 28225 - DNA, 25 bp, Saccharomyces pastorianus
tggcgcgctacacggataaggttct

SEQ ID NO: 28226 - DNA, 25 bp, Saccharomyces pastorianus
tacgcttactaaaggcattaacccg

SEQ ID NO: 28227 - DNA, 25 bp, Saccharomyces pastorianus
gagattggaattaggcgcttacagt

SEQ ID NO: 28228 - DNA, 25 bp, Saccharomyces pastorianus
ctgtgcactcccaattctgaacaaa

SEQ ID NO: 28229 - DNA, 25 bp, Saccharomyces pastorianus
ttaacccgatggagaatgtcagtat

SEQ ID NO: 28230 - DNA, 25 bp, Saccharomyces pastorianus
gttcaaagtcatgatgtggccatct

SEQ ID NO: 28231 - DNA, 25 bp, Saccharomyces pastorianus
taaagatcctagcactttggcgcgc

SEQ ID NO: 28232 - DNA, 25 bp, Saccharomyces pastorianus
agtattgcccagtggtaagctgatc

SEQ ID NO: 28233 - DNA, 25 bp, Saccharomyces pastorianus
atatccaaccatggttttcatctgg

SEQ ID NO: 28234 - DNA, 25 bp, Saccharomyces pastorianus
gaaatacccgatcttccattgaaac

SEQ ID NO: 28235 - DNA, 25 bp, Saccharomyces pastorianus
atagccttctggaaagcctcgaaca

SEQ ID NO: 28236 - DNA, 25 bp, Saccharomyces pastorianus
aaagtcgtcttagagagcgggtctc

SEQ ID NO: 28237 - DNA, 25 bp, Saccharomyces pastorianus
gaactgcaaaatctttcgagctatt

SEQ ID NO: 28238 - DNA, 25 bp, Saccharomyces pastorianus
agcgggtctctcagtaagtacaaat

SEQ ID NO: 28239 - DNA, 25 bp, Saccharomyces pastorianus
gaggacagacttcaaacaactctct

SEQ ID NO: 28240 - DNA, 25 bp, Saccharomyces pastorianus
gattacgcttccgacgagagatctt

SEQ ID NO: 28241 - DNA, 25 bp, Saccharomyces pastorianus
tttcatctggatatcttcaaaggga

SEQ ID NO: 28242 - DNA, 25 bp, Saccharomyces pastorianus
gtagatttaaaccacccagtagact

SEQ ID NO: 28243 - DNA, 25 bp, Saccharomyces pastorianus
gtttcatcttcttctttatcggtac

SEQ ID NO: 28244 - DNA, 25 bp, Saccharomyces pastorianus
gattcctaaagtagatgcgtctgat

SEQ ID NO: 28245 - DNA, 25 bp, Saccharomyces pastorianus
tacgggtccgtgtgctatgaactat

SEQ ID NO: 28246 - DNA, 25 bp, Saccharomyces pastorianus
acattccgtctatggcgaaactacc

SEQ ID NO: 28247 - DNA, 25 bp, Saccharomyces pastorianus
gcttttgaaaggctacattccgtct

SEQ ID NO: 28248 - DNA, 25 bp, Saccharomyces pastorianus
aagaaggtttttggcgcctaggcat

SEQ ID NO: 28249 - DNA, 25 bp, Saccharomyces pastorianus
ggaacacttatcttcactattagag

SEQ ID NO: 28250 - DNA, 25 bp, Saccharomyces pastorianus
gagcatatactctttccttgtatca

SEQ ID NO: 28251 - DNA, 25 bp, Saccharomyces pastorianus
cagtccagatggtagttttgaagct

SEQ ID NO: 28252 - DNA, 25 bp, Saccharomyces pastorianus
aaatctatatgaccttctatcggaa

SEQ ID NO: 28253 - DNA, 25 bp, Saccharomyces pastorianus
ggcgcctaggcatattctcaaggac

SEQ ID NO: 28254 - DNA, 25 bp, Saccharomyces pastorianus
ggacgttgtcgaaatagcaaacctt

SEQ ID NO: 28255 - DNA, 25 bp, Saccharomyces pastorianus
acgactatcagattcaggtgactca

SEQ ID NO: 28256 - DNA, 25 bp, Saccharomyces pastorianus
aggtgactcatttcatcatcccgta

SEQ ID NO: 28257 - DNA, 25 bp, Saccharomyces pastorianus
gaatctctgctggaggaagacgacg

SEQ ID NO: 28258 - DNA, 25 bp, Saccharomyces pastorianus
gccactttccaaatatctactgtct

SEQ ID NO: 28259 - DNA, 25 bp, Saccharomyces pastorianus
gtggactttactgaacttattgcaa

SEQ ID NO: 28260 - DNA, 25 bp, Saccharomyces pastorianus
gagtggtatcctttatgtcgtttta

SEQ ID NO: 28261 - DNA, 25 bp, Saccharomyces pastorianus
aacagtgaaatgtcttctctcataa

SEQ ID NO: 28262 - DNA, 25 bp, Saccharomyces pastorianus
gtctttggtcccactgaacaggttt

SEQ ID NO: 28263 - DNA, 25 bp, Saccharomyces pastorianus
aatttgcctctgatattcggcctaa

SEQ ID NO: 28264 - DNA, 25 bp, Saccharomyces pastorianus
actcctcagattcgctaccaaaaat

SEQ ID NO: 28265 - DNA, 25 bp, Saccharomyces pastorianus
tggtgttgccaaccgtcacaagagt

SEQ ID NO: 28266 - DNA, 25 bp, Saccharomyces pastorianus
ggtgtcgacaactaccttcaaacga

SEQ ID NO: 28267 - DNA, 25 bp, Saccharomyces pastorianus
gaatcaggcgaaagcggtgtcgaca

SEQ ID NO: 28268 - DNA, 25 bp, Saccharomyces pastorianus
gtttgggtcaactcatccaacgacg

SEQ ID NO: 28269 - DNA, 25 bp, Saccharomyces pastorianus
tttactgatgttccacaatcatcga

SEQ ID NO: 28270 - DNA, 25 bp, Saccharomyces pastorianus
tcatccaacgacgaagaggttaagg

SEQ ID NO: 28271 - DNA, 25 bp, Saccharomyces pastorianus
agaatgaaatcttcggaccggtcgt

SEQ ID NO: 28272 - DNA, 25 bp, Saccharomyces pastorianus
aaagcggtgtcgacaactaccttca

SEQ ID NO: 28273 - DNA, 25 bp, Saccharomyces pastorianus
gggtcaactcatccaacgacgaaga

SEQ ID NO: 28274 - DNA, 25 bp, Saccharomyces pastorianus
tccacaatcatcgaagctattgaag

SEQ ID NO: 28275 - DNA, 25 bp, Saccharomyces pastorianus
aactgtttgggtcaactcatccaac

SEQ ID NO: 28276 - DNA, 25 bp, Saccharomyces pastorianus
cgacaactaccttcaaacgaaatct

SEQ ID NO: 28277 - DNA, 25 bp, Saccharomyces pastorianus
tgcaaaggtggtaagcgatgctttt

SEQ ID NO: 28278 - DNA, 25 bp, Saccharomyces pastorianus
aatggcgacagcagtcacaaacccg

SEQ ID NO: 28279 - DNA, 25 bp, Saccharomyces pastorianus
taaggacaaaaacagcgacagcaat

SEQ ID NO: 28280 - DNA, 25 bp, Saccharomyces pastorianus
ccgattaccaggagcaatacaataa

SEQ ID NO: 28281 - DNA, 25 bp, Saccharomyces pastorianus
gcgatgcttttaaagagatggctaa

SEQ ID NO: 28282 - DNA, 25 bp, Saccharomyces pastorianus
gcgacagcagtcacaaacccgatta

SEQ ID NO: 28283 - DNA, 25 bp, Saccharomyces pastorianus
cacaaacccgattaccaggagcaat

SEQ ID NO: 28284 - DNA, 25 bp, Saccharomyces pastorianus
taaagagatggctaataaggacaaa

SEQ ID NO: 28285 - DNA, 25 bp, Saccharomyces pastorianus
aaacccgattaccaggagcaataca

SEQ ID NO: 28286 - DNA, 25 bp, Saccharomyces pastorianus
agcagtcacaaacccgattaccagg

SEQ ID NO: 28287 - DNA, 25 bp, Saccharomyces pastorianus
aacagcgacagcaatggcgacagca

SEQ ID NO: 28288 - DNA, 25 bp, Saccharomyces pastorianus
ggccaggatcaatctgaaggaaaaa

SEQ ID NO: 28289 - DNA, 25 bp, Saccharomyces pastorianus
gaagaccagatcttccaataaggaa

SEQ ID NO: 28290 - DNA, 25 bp, Saccharomyces pastorianus
ttcaaggtaaagacgattcccagca

SEQ ID NO: 28291 - DNA, 25 bp, Saccharomyces pastorianus
gaacatgaacatgggccaggatcaa

SEQ ID NO: 28292 - DNA, 25 bp, Saccharomyces pastorianus
gaaaatgggtcaagatcaatctgaa

SEQ ID NO: 28293 - DNA, 25 bp, Saccharomyces pastorianus
tgccagaaacatgaagaccagatct

SEQ ID NO: 28294 - DNA, 25 bp, Saccharomyces pastorianus
gacgattcccagcagaaggataaaa

SEQ ID NO: 28295 - DNA, 25 bp, Saccharomyces pastorianus
taaattcgcagaaaaacttcaaggt

SEQ ID NO: 28296 - DNA, 25 bp, Saccharomyces pastorianus
aaatgaatgccggtagaggaattgc

SEQ ID NO: 28297 - DNA, 25 bp, Saccharomyces pastorianus
gaacatgggccaggatcaatctgaa

SEQ ID NO: 28298 - DNA, 25 bp, Saccharomyces pastorianus
ggtaaagacgattcccagcagaagg

SEQ ID NO: 28299 - DNA, 25 bp, Saccharomyces pastorianus
ctgtttgatgtttttgcgttggcct

SEQ ID NO: 28300 - DNA, 25 bp, Saccharomyces pastorianus
ttgtctgtccaatatgcatgccatc

SEQ ID NO: 28301 - DNA, 25 bp, Saccharomyces pastorianus
aagtgggttctacctgacgatccaa

SEQ ID NO: 28302 - DNA, 25 bp, Saccharomyces pastorianus
gcatgccatctaacgtttctatcaa

SEQ ID NO: 28303 - DNA, 25 bp, Saccharomyces pastorianus
gctgcctttggcttacaaatgctta

SEQ ID NO: 28304 - DNA, 25 bp, Saccharomyces pastorianus
aggtccgttgagacgatactgtcaa

SEQ ID NO: 28305 - DNA, 25 bp, Saccharomyces pastorianus
gggtgtggctttactgacttgacag

SEQ ID NO: 28306 - DNA, 25 bp, Saccharomyces pastorianus
aaggcagtgccatggtcgaatgtga

SEQ ID NO: 28307 - DNA, 25 bp, Saccharomyces pastorianus
ttcctctggaggattgtgctagact

SEQ ID NO: 28308 - DNA, 25 bp, Saccharomyces pastorianus
aagttagtacctacgcacaagatca

SEQ ID NO: 28309 - DNA, 25 bp, Saccharomyces pastorianus
aaacttgttgaactgctgcctttgg

SEQ ID NO: 28310 - DNA, 25 bp, Saccharomyces pastorianus
ttcagttataactccgccagcaata

SEQ ID NO: 28311 - DNA, 25 bp, Saccharomyces pastorianus
attcttcctctgtgcccaacagtaa

SEQ ID NO: 28312 - DNA, 25 bp, Saccharomyces pastorianus
ggaacaagccttattgacccaatta

SEQ ID NO: 28313 - DNA, 25 bp, Saccharomyces pastorianus
gaacacaagcctctatctcacggag

SEQ ID NO: 28314 - DNA, 25 bp, Saccharomyces pastorianus
gctctaacgatgagtttgccaacca

SEQ ID NO: 28315 - DNA, 25 bp, Saccharomyces pastorianus
ttattcctcttccactccgaaggag

SEQ ID NO: 28316 - DNA, 25 bp, Saccharomyces pastorianus
gagagcaaccaacatcaacacgagt

SEQ ID NO: 28317 - DNA, 25 bp, Saccharomyces pastorianus
ttacaaatccctccaacttattcct

SEQ ID NO: 28318 - DNA, 25 bp, Saccharomyces pastorianus
gcaatagcggtgtgtgctctaacga

SEQ ID NO: 28319 - DNA, 25 bp, Saccharomyces pastorianus
aacacgagttccaacttgtcagccc

SEQ ID NO: 28320 - DNA, 25 bp, Saccharomyces pastorianus
gaagcttgctaactccagaagaaca

SEQ ID NO: 28321 - DNA, 25 bp, Saccharomyces pastorianus
atgctacatcatctgcttcgtgatc

SEQ ID NO: 28322 - DNA, 25 bp, Saccharomyces pastorianus
gacaatacacaatcattcagccgga

SEQ ID NO: 28323 - DNA, 25 bp, Saccharomyces pastorianus
agaatgttgaagacgcccagcagga

SEQ ID NO: 28324 - DNA, 25 bp, Saccharomyces pastorianus
attcagccggaagccacagacgaag

SEQ ID NO: 28325 - DNA, 25 bp, Saccharomyces pastorianus
gccaccgacttgcagtaccaattga

SEQ ID NO: 28326 - DNA, 25 bp, Saccharomyces pastorianus
aaatcttttctcaagctctgctaaa

SEQ ID NO: 28327 - DNA, 25 bp, Saccharomyces pastorianus
actgcgttggccgaagtgcaagcta

SEQ ID NO: 28328 - DNA, 25 bp, Saccharomyces pastorianus
gtcaacggccaacaaatcttttctc

SEQ ID NO: 28329 - DNA, 25 bp, Saccharomyces pastorianus
aaagactctaacaagcaggcccaag

SEQ ID NO: 28330 - DNA, 25 bp, Saccharomyces pastorianus
atggcagaactgacccaattattca

SEQ ID NO: 28331 - DNA, 25 bp, Saccharomyces pastorianus
gatctttgccgttgtcgtggtggtc

SEQ ID NO: 28332 - DNA, 25 bp, Saccharomyces pastorianus
gctgctactgagactgctactgatg

SEQ ID NO: 28333 - DNA, 25 bp, Saccharomyces pastorianus
gtggacgccccagctgccattagaa

SEQ ID NO: 28334 - DNA, 25 bp, Saccharomyces pastorianus
caacttctttcgcttcaagaatcaa

SEQ ID NO: 28335 - DNA, 25 bp, Saccharomyces pastorianus
gctgccattagaaccggccaattcg

SEQ ID NO: 28336 - DNA, 25 bp, Saccharomyces pastorianus
ctgctactgatgctccagtcgaaga

SEQ ID NO: 28337 - DNA, 25 bp, Saccharomyces pastorianus
aaggttgttgtctcttataaactag

SEQ ID NO: 28338 - DNA, 25 bp, Saccharomyces pastorianus
ccggccaattcggttggtctgctaa

SEQ ID NO: 28339 - DNA, 25 bp, Saccharomyces pastorianus
gactgaagctgctactgagactgct

SEQ ID NO: 28340 - DNA, 25 bp, Saccharomyces pastorianus
atctctccaagatctccaatcatta

SEQ ID NO: 28341 - DNA, 25 bp, Saccharomyces pastorianus
tataaactagtggacgccccagctg

SEQ ID NO: 28342 - DNA, 25 bp, Saccharomyces pastorianus
gaaatcttgggcgaacaagtcgaaa

SEQ ID NO: 28343 - DNA, 25 bp, Saccharomyces pastorianus
ggatttcatgctccaacgttagctt

SEQ ID NO: 28344 - DNA, 25 bp, Saccharomyces pastorianus
aagccaaaggtgtcgaagccattga

SEQ ID NO: 28345 - DNA, 25 bp, Saccharomyces pastorianus
ttgccaatctcttatgcctacatca

SEQ ID NO: 28346 - DNA, 25 bp, Saccharomyces pastorianus
attgtgctcatgaatttatcgtcga

SEQ ID NO: 28347 - DNA, 25 bp, Saccharomyces pastorianus
ggtaacgctttagtgttgccaatct

SEQ ID NO: 28348 - DNA, 25 bp, Saccharomyces pastorianus
acaagttctggccaactgttgctag

SEQ ID NO: 28349 - DNA, 25 bp, Saccharomyces pastorianus
ttgccattttctagtgtcatttcca

SEQ ID NO: 28350 - DNA, 25 bp, Saccharomyces pastorianus
aagaatgcccctcattgtttggaag

SEQ ID NO: 28351 - DNA, 25 bp, Saccharomyces pastorianus
ggcttatccattgcctttcttgaag

SEQ ID NO: 28352 - DNA, 25 bp, Saccharomyces pastorianus
gatgcattagtgtctggccaaccaa

SEQ ID NO: 28353 - DNA, 25 bp, Saccharomyces pastorianus
ccctgttcctgggactttgatggta

SEQ ID NO: 28354 - DNA, 25 bp, Saccharomyces pastorianus
tacggtgaatccaatatctttaaac

SEQ ID NO: 28355 - DNA, 25 bp, Saccharomyces pastorianus
taaagaactaggacccacaggatgg

SEQ ID NO: 28356 - DNA, 25 bp, Saccharomyces pastorianus
cccacaggatggaagttgcgttata

SEQ ID NO: 28357 - DNA, 25 bp, Saccharomyces pastorianus
gtatcaagatgactgccaaagtgct

SEQ ID NO: 28358 - DNA, 25 bp, Saccharomyces pastorianus
gatgcccctattttagaaacggccg

SEQ ID NO: 28359 - DNA, 25 bp, Saccharomyces pastorianus
ggagctgtttgctaacgttccagtt

SEQ ID NO: 28360 - DNA, 25 bp, Saccharomyces pastorianus
aactggaacacaagtctatcgggaa

SEQ ID NO: 28361 - DNA, 25 bp, Saccharomyces pastorianus
tgttggcctttttatatcccttgga

SEQ ID NO: 28362 - DNA, 25 bp, Saccharomyces pastorianus
gaactatccacataaggatgcccct

SEQ ID NO: 28363 - DNA, 25 bp, Saccharomyces pastorianus
cggcacgccaagaaagatatcagtt

SEQ ID NO: 28364 - DNA, 25 bp, Saccharomyces pastorianus
gatgaagtaattaacggcacgccaa

SEQ ID NO: 28365 - DNA, 25 bp, Saccharomyces pastorianus
caagcgttggctaatgtccaggact

SEQ ID NO: 28366 - DNA, 25 bp, Saccharomyces pastorianus
atttgccaaccaccaattgagcgag

SEQ ID NO: 28367 - DNA, 25 bp, Saccharomyces pastorianus
accaggtctgctcagtcttgtgata

SEQ ID NO: 28368 - DNA, 25 bp, Saccharomyces pastorianus
atgtctttgaactataccactcctc

SEQ ID NO: 28369 - DNA, 25 bp, Saccharomyces pastorianus
taaactgaccgatctttacgccaac

SEQ ID NO: 28370 - DNA, 25 bp, Saccharomyces pastorianus
ataccactcctcttgacgatgaggt

SEQ ID NO: 28371 - DNA, 25 bp, Saccharomyces pastorianus
gagcacgtgtcgatgagccaggatt

SEQ ID NO: 28372 - DNA, 25 bp, Saccharomyces pastorianus
gacgaaacgctattctcattagaga

SEQ ID NO: 28373 - DNA, 25 bp, Saccharomyces pastorianus
gatgagccaggattactcactccgt

SEQ ID NO: 28374 - DNA, 25 bp, Saccharomyces pastorianus
aggtcttcccgttgtcatttgccaa

SEQ ID NO: 28375 - DNA, 25 bp, Saccharomyces pastorianus
ataaatacggccgactcttgcgcag

SEQ ID NO: 28376 - DNA, 25 bp, Saccharomyces pastorianus
aggttgcctcgtactccaagatcat

SEQ ID NO: 28377 - DNA, 25 bp, Saccharomyces pastorianus
tgcgtccacggaaagctctgaacaa

SEQ ID NO: 28378 - DNA, 25 bp, Saccharomyces pastorianus
cgagcgtgccgttcattatggtgat

SEQ ID NO: 28379 - DNA, 25 bp, Saccharomyces pastorianus
aagcgccatcacagaataggaggaa

SEQ ID NO: 28380 - DNA, 25 bp, Saccharomyces pastorianus
ttatccactgatccatatttcaagg

SEQ ID NO: 28381 - DNA, 25 bp, Saccharomyces pastorianus
aagatcatctgtagccaccactgcg

SEQ ID NO: 28382 - DNA, 25 bp, Saccharomyces pastorianus
aggaagaggccttggtgcttctcac

SEQ ID NO: 28383 - DNA, 25 bp, Saccharomyces pastorianus
aatatcctgtgtgaggttgcctcgt

SEQ ID NO: 28384 - DNA, 25 bp, Saccharomyces pastorianus
aggaacccattctggattgacgcca

SEQ ID NO: 28385 - DNA, 25 bp, Saccharomyces pastorianus
gaatacttcgatggtgactcaggaa

SEQ ID NO: 28386 - DNA, 25 bp, Saccharomyces pastorianus
gacgccacaaagtagtatttcaagt

SEQ ID NO: 28387 - DNA, 25 bp, Saccharomyces pastorianus
agaggaattccactttgaagcaggt

SEQ ID NO: 28388 - DNA, 25 bp, Saccharomyces pastorianus
caaatcatgatggacctgaggtcac

SEQ ID NO: 28389 - DNA, 25 bp, Saccharomyces pastorianus
tcagaagcgccctcgcagcagatat

SEQ ID NO: 28390 - DNA, 25 bp, Saccharomyces pastorianus
agactcttcggagaccttaatacat

SEQ ID NO: 28391 - DNA, 25 bp, Saccharomyces pastorianus
attgatatcaagaggccactgcagt

SEQ ID NO: 28392 - DNA, 25 bp, Saccharomyces pastorianus
gcaaggcataccctgtttcaagcag

SEQ ID NO: 28393 - DNA, 25 bp, Saccharomyces pastorianus
gaactattcgacttgttagatcaga

SEQ ID NO: 28394 - DNA, 25 bp, Saccharomyces pastorianus
actgcagtctcttgtggactcaggt

SEQ ID NO: 28395 - DNA, 25 bp, Saccharomyces pastorianus
agttatgccattattgctgtgctaa

SEQ ID NO: 28396 - DNA, 25 bp, Saccharomyces pastorianus
gtttcaagcagattcatacgtcgat

SEQ ID NO: 28397 - DNA, 25 bp, Saccharomyces pastorianus
acagctgttaagcaaccatgcgatt

SEQ ID NO: 28398 - DNA, 25 bp, Saccharomyces pastorianus
gaaatgcccgatgagttccatatca

SEQ ID NO: 28399 - DNA, 25 bp, Saccharomyces pastorianus
aatgcatgtgcgtcctaagtttaga

SEQ ID NO: 28400 - DNA, 25 bp, Saccharomyces pastorianus
tgcagcacctattaagattaccttt

SEQ ID NO: 28401 - DNA, 25 bp, Saccharomyces pastorianus
ttgcagtatcgttgtcgtatcccag

SEQ ID NO: 28402 - DNA, 25 bp, Saccharomyces pastorianus
aaatatgaccgctttgcaactgagt

SEQ ID NO: 28403 - DNA, 25 bp, Saccharomyces pastorianus
cggttattcaatgagtgtgccccat

SEQ ID NO: 28404 - DNA, 25 bp, Saccharomyces pastorianus
gtggccacaaacgtgtacaagtgtt

SEQ ID NO: 28405 - DNA, 25 bp, Saccharomyces pastorianus
gaactgtgcgtttcgacgggaacac

SEQ ID NO: 28406 - DNA, 25 bp, Saccharomyces pastorianus
aacatcgagaagacgctagccctag

SEQ ID NO: 28407 - DNA, 25 bp, Saccharomyces pastorianus
cagcgttttcacaggtgctcactaa

SEQ ID NO: 28408 - DNA, 25 bp, Saccharomyces pastorianus
gaacagctattcaaacagtacggcg

SEQ ID NO: 28409 - DNA, 25 bp, Saccharomyces pastorianus
aatgcaaccgttatacttggcctac

SEQ ID NO: 28410 - DNA, 25 bp, Saccharomyces pastorianus
tgacgacacttcagcatcttctaag

SEQ ID NO: 28411 - DNA, 25 bp, Saccharomyces pastorianus
gatagagccttcattacctggtatt

SEQ ID NO: 28412 - DNA, 25 bp, Saccharomyces pastorianus
gcctcgttgattttccagcatggta

SEQ ID NO: 28413 - DNA, 25 bp, Saccharomyces pastorianus
gagaccttgaatcctacagacaccg

SEQ ID NO: 28414 - DNA, 25 bp, Saccharomyces pastorianus
agttgacggcagacagctgttcagc

SEQ ID NO: 28415 - DNA, 25 bp, Saccharomyces pastorianus
gctgttcagcgatccatgcaaagat

SEQ ID NO: 28416 - DNA, 25 bp, Saccharomyces pastorianus
gtcagtggaaatcctcgtgacccaa

SEQ ID NO: 28417 - DNA, 25 bp, Saccharomyces pastorianus
caacgcatcatttttaacctcgaat

SEQ ID NO: 28418 - DNA, 25 bp, Saccharomyces pastorianus
gtattagttactcattcaccgaaga

SEQ ID NO: 28419 - DNA, 25 bp, Saccharomyces pastorianus
taccggccaccaatgatgttaccaa

SEQ ID NO: 28420 - DNA, 25 bp, Saccharomyces pastorianus
ggtatgacccaccacttgcaaaagg

SEQ ID NO: 28421 - DNA, 25 bp, Saccharomyces pastorianus
aacgactacttcaccatcttacatg

SEQ ID NO: 28422 - DNA, 25 bp, Saccharomyces pastorianus
acagaaggtcattccggtgtccact

SEQ ID NO: 28423 - DNA, 25 bp, Saccharomyces pastorianus
tgtaacacggtcatcgccaaacatg

SEQ ID NO: 28424 - DNA, 25 bp, Saccharomyces pastorianus
agcaatacagtatgcctggcggctc

SEQ ID NO: 28425 - DNA, 25 bp, Saccharomyces pastorianus
gtacttgatcttatttggcacggct

SEQ ID NO: 28426 - DNA, 25 bp, Saccharomyces pastorianus
atcttacatggtacccaaactgccg

SEQ ID NO: 28427 - DNA, 25 bp, Saccharomyces pastorianus
ccactgccgaagacttttctactga

SEQ ID NO: 28428 - DNA, 25 bp, Saccharomyces pastorianus
gatgccgaaatttacactcccggta

SEQ ID NO: 28429 - DNA, 25 bp, Saccharomyces pastorianus
ttgccatatgccaccgatgccgaaa

SEQ ID NO: 28430 - DNA, 25 bp, Saccharomyces pastorianus
tcatcctgcatgcatctatctcaga

SEQ ID NO: 28431 - DNA, 25 bp, Saccharomyces pastorianus
ggcatccagccaactgtcgaaggat

SEQ ID NO: 28432 - DNA, 25 bp, Saccharomyces pastorianus
taccaagattggctgtggcttacaa

SEQ ID NO: 28433 - DNA, 25 bp, Saccharomyces pastorianus
cgaaggatctactaccattggtgcc

SEQ ID NO: 28434 - DNA, 25 bp, Saccharomyces pastorianus
attacaagcaggcatggtcccaatt

SEQ ID NO: 28435 - DNA, 25 bp, Saccharomyces pastorianus
aatgggaactccaatcggcatccag

SEQ ID NO: 28436 - DNA, 25 bp, Saccharomyces pastorianus
ggcttacaattcgaaaccgctggta

SEQ ID NO: 28437 - DNA, 25 bp, Saccharomyces pastorianus
agtcttgccaactttgtctgttttg

SEQ ID NO: 28438 - DNA, 25 bp, Saccharomyces pastorianus
aaggtcgcaccaaacgtcgaagcag

SEQ ID NO: 28439 - DNA, 25 bp, Saccharomyces pastorianus
aagccaatggtgctctgatcgcatc

SEQ ID NO: 28440 - DNA, 25 bp, Saccharomyces pastorianus
tgctccaggtgatgcaggtgtctca

SEQ ID NO: 28441 - DNA, 25 bp, Saccharomyces pastorianus
gattggatcttgtctggtcaactac

SEQ ID NO: 28442 - DNA, 25 bp, Saccharomyces pastorianus
gagcgataagtttgcgacctcgtct

SEQ ID NO: 28443 - DNA, 25 bp, Saccharomyces pastorianus
gttctaccgataccatgtcaagttc

SEQ ID NO: 28444 - DNA, 25 bp, Saccharomyces pastorianus
acaaagctcgactatcccaacggtt

SEQ ID NO: 28445 - DNA, 25 bp, Saccharomyces pastorianus
ttttgttaattcttccgtacctctg

SEQ ID NO: 28446 - DNA, 25 bp, Saccharomyces pastorianus
gacctcgtctacatcgattgttaag

SEQ ID NO: 28447 - DNA, 25 bp, Saccharomyces pastorianus
gaagaaccgcgcctatattgaatac

SEQ ID NO: 28448 - DNA, 25 bp, Saccharomyces pastorianus
atccggtgccattcgatagttattc

SEQ ID NO: 28449 - DNA, 25 bp, Saccharomyces pastorianus
gataatcagactcgatcagacttgg

SEQ ID NO: 28450 - DNA, 25 bp, Saccharomyces pastorianus
tattgaatactccagtggcttcgag

SEQ ID NO: 28451 - DNA, 25 bp, Saccharomyces pastorianus
aaagagcgtatatccggtgccattc

SEQ ID NO: 28452 - DNA, 25 bp, Saccharomyces pastorianus
agtggcttcgagtatgcatttgcag

SEQ ID NO: 28453 - DNA, 25 bp, Saccharomyces pastorianus
taaaccagcttacccaggtcatgtc

SEQ ID NO: 28454 - DNA, 25 bp, Saccharomyces pastorianus
tcaagggttctcacgtcgtttacaa

SEQ ID NO: 28455 - DNA, 25 bp, Saccharomyces pastorianus
agaggcagagcttttgtcgtcgact

SEQ ID NO: 28456 - DNA, 25 bp, Saccharomyces pastorianus
gtagattcgacgctaaaccagctta

SEQ ID NO: 28457 - DNA, 25 bp, Saccharomyces pastorianus
caaattggctgacgttatcactgct

SEQ ID NO: 28458 - DNA, 25 bp, Saccharomyces pastorianus
ctgctgttgtctgtgtcaagggttc

SEQ ID NO: 28459 - DNA, 25 bp, Saccharomyces pastorianus
gttacttggcaacttacgcttcttt

SEQ ID NO: 28460 - DNA, 25 bp, Saccharomyces pastorianus
gacaaggtcatttccgacactgctg

SEQ ID NO: 28461 - DNA, 25 bp, Saccharomyces pastorianus
gtgggtgctcaagtctcctatgttc

SEQ ID NO: 28462 - DNA, 25 bp, Saccharomyces pastorianus
tattgctcaagctcgtgctgctgaa

SEQ ID NO: 28463 - DNA, 25 bp, Saccharomyces pastorianus
tgtcgtcgactgtcaaggtggtaac

SEQ ID NO: 28464 - DNA, 25 bp, Saccharomyces pastorianus
gttccctgaagtaatgaaaccgctc

SEQ ID NO: 28465 - DNA, 25 bp, Saccharomyces pastorianus
tgctatgggcgaatgtgctctacaa

SEQ ID NO: 28466 - DNA, 25 bp, Saccharomyces pastorianus
gaaaccgctcttggatgctatgggc

SEQ ID NO: 28467 - DNA, 25 bp, Saccharomyces pastorianus
aaatcacgggttgcttgtttctatt

SEQ ID NO: 28468 - DNA, 25 bp, Saccharomyces pastorianus
aacaacatcctatatgagcagctgt

SEQ ID NO: 28469 - DNA, 25 bp, Saccharomyces pastorianus
ttctattggcgtttctcatcctgga

SEQ ID NO: 28470 - DNA, 25 bp, Saccharomyces pastorianus
gtaccggttgctgtttactgagggc

SEQ ID NO: 28471 - DNA, 25 bp, Saccharomyces pastorianus
gatctagtgactaacgtacgtgtac

SEQ ID NO: 28472 - DNA, 25 bp, Saccharomyces pastorianus
caagggctggatatcatgactcaat

SEQ ID NO: 28473 - DNA, 25 bp, Saccharomyces pastorianus
gtacaggctctgatgaagatgcttc

SEQ ID NO: 28474 - DNA, 25 bp, Saccharomyces pastorianus
gaggcggttgttctttgactttact

SEQ ID NO: 28475 - DNA, 25 bp, Saccharomyces pastorianus
aatgccaggtattctccaacagctt

SEQ ID NO: 28476 - DNA, 25 bp, Saccharomyces pastorianus
tctgttcccgaatagtgccgtttaa

SEQ ID NO: 28477 - DNA, 25 bp, Saccharomyces pastorianus
taacgattattctttctgttcccga

SEQ ID NO: 28478 - DNA, 25 bp, Saccharomyces pastorianus
gattctgatctttattttccgttat

SEQ ID NO: 28479 - DNA, 25 bp, Saccharomyces pastorianus
ttatatgctcctactgggctaacca

SEQ ID NO: 28480 - DNA, 25 bp, Saccharomyces pastorianus
gagtctgctcctcgaagtaaacgga

SEQ ID NO: 28481 - DNA, 25 bp, Saccharomyces pastorianus
ggattatattactacggccgtcacc

SEQ ID NO: 28482 - DNA, 25 bp, Saccharomyces pastorianus
ttccgtgaacgcaacaatttcccag

SEQ ID NO: 28483 - DNA, 25 bp, Saccharomyces pastorianus
atttcccttctgatacaataccgac

SEQ ID NO: 28484 - DNA, 25 bp, Saccharomyces pastorianus
ggccgtcaccttaggagattcgtca

SEQ ID NO: 28485 - DNA, 25 bp, Saccharomyces pastorianus
atcaactctctgattacgctacagc

SEQ ID NO: 28486 - DNA, 25 bp, Saccharomyces pastorianus
tgtgcctaatgtcgtcttaccaaac

SEQ ID NO: 28487 - DNA, 25 bp, Saccharomyces pastorianus
gttcgtactacatctccagattaca

SEQ ID NO: 28488 - DNA, 25 bp, Saccharomyces pastorianus
aagagatggatctgttcgctgttct

SEQ ID NO: 28489 - DNA, 25 bp, Saccharomyces pastorianus
tgtggctagatctaattccctgcga

SEQ ID NO: 28490 - DNA, 25 bp, Saccharomyces pastorianus
accaaacggtaattcaatgcccaat

SEQ ID NO: 28491 - DNA, 25 bp, Saccharomyces pastorianus
atcggtgaaatctcgcgttactaat

SEQ ID NO: 28492 - DNA, 25 bp, Saccharomyces pastorianus
agacgcctgtcgttgaggatcaaga

SEQ ID NO: 28493 - DNA, 25 bp, Saccharomyces pastorianus
ggtccttgatacaaaagacgcctgt

SEQ ID NO: 28494 - DNA, 25 bp, Saccharomyces pastorianus
tgttcgctgttctcaatcggtgaaa

SEQ ID NO: 28495 - DNA, 25 bp, Saccharomyces pastorianus
aaacaatgagagtcactgcgccaaa

SEQ ID NO: 28496 - DNA, 25 bp, Saccharomyces pastorianus
aatatcgagtgtttccgatcggagt

SEQ ID NO: 28497 - DNA, 25 bp, Saccharomyces pastorianus
atttactctggattcgggaccgaca

SEQ ID NO: 28498 - DNA, 25 bp, Saccharomyces pastorianus
aaagaatcgtccaccgttcaatctt

SEQ ID NO: 28499 - DNA, 25 bp, Saccharomyces pastorianus
gtgcggccaacatcaacatttcagt

SEQ ID NO: 28500 - DNA, 25 bp, Saccharomyces pastorianus
gttgccttctcaaccggcagaggtt

SEQ ID NO: 28501 - DNA, 25 bp, Saccharomyces pastorianus
cgttcctgccactatttactatgat

SEQ ID NO: 28502 - DNA, 25 bp, Saccharomyces pastorianus
gaccgacaactttacgttgccttct

SEQ ID NO: 28503 - DNA, 25 bp, Saccharomyces pastorianus
aactcggtgacagtggctctttaac

SEQ ID NO: 28504 - DNA, 25 bp, Saccharomyces pastorianus
aatcatcttcttattctacagctac

SEQ ID NO: 28505 - DNA, 25 bp, Saccharomyces pastorianus
ttgaccgactatgctgttccaacaa

SEQ ID NO: 28506 - DNA, 25 bp, Saccharomyces pastorianus
aaaatgcgctttcttcagactccat

SEQ ID NO: 28507 - DNA, 25 bp, Saccharomyces pastorianus
agtagccgttaggtctgtgtccaca

SEQ ID NO: 28508 - DNA, 25 bp, Saccharomyces pastorianus
gaaggccattcttacaccaaagatg

SEQ ID NO: 28509 - DNA, 25 bp, Saccharomyces pastorianus
gtccactgcgtgcttgatttttgaa

SEQ ID NO: 28510 - DNA, 25 bp, Saccharomyces pastorianus
agagttgtatggaagcggctccgac

SEQ ID NO: 28511 - DNA, 25 bp, Saccharomyces pastorianus
gagttaccgtcatatctgctgagga

SEQ ID NO: 28512 - DNA, 25 bp, Saccharomyces pastorianus
cagactttttgtcacctatgttaca

SEQ ID NO: 28513 - DNA, 25 bp, Saccharomyces pastorianus
tacaggtcaccggaagtgcttttgg

SEQ ID NO: 28514 - DNA, 25 bp, Saccharomyces pastorianus
ttgtggcgcagatatctggtccact

SEQ ID NO: 28515 - DNA, 25 bp, Saccharomyces pastorianus
aagatgacgaccacattgcacaaat

SEQ ID NO: 28516 - DNA, 25 bp, Saccharomyces pastorianus
gacgcaggcggcttggttaatcatc

SEQ ID NO: 28517 - DNA, 25 bp, Saccharomyces pastorianus
cggctccgacattcctggatggttt

SEQ ID NO: 28518 - DNA, 25 bp, Saccharomyces pastorianus
tttcgaacccgatgaaggccattct

SEQ ID NO: 28519 - DNA, 25 bp, Saccharomyces pastorianus
accactgatttcatgaccgctgatt

SEQ ID NO: 28520 - DNA, 25 bp, Saccharomyces pastorianus
ggtactttgtatccagatgtcattg

SEQ ID NO: 28521 - DNA, 25 bp, Saccharomyces pastorianus
aggtgaattgttgggaatccctcac

SEQ ID NO: 28522 - DNA, 25 bp, Saccharomyces pastorianus
agtttcttgaaaaaggtcgctgcga

SEQ ID NO: 28523 - DNA, 25 bp, Saccharomyces pastorianus
tgcttgtttattgcccgttaaatct

SEQ ID NO: 28524 - DNA, 25 bp, Saccharomyces pastorianus
tgacggtgttgcgagagttacttac

SEQ ID NO: 28525 - DNA, 25 bp, Saccharomyces pastorianus
ggtcgctgcgagaatcgttaacgaa

SEQ ID NO: 28526 - DNA, 25 bp, Saccharomyces pastorianus
gaattcctgttgcaaggtactttgt

SEQ ID NO: 28527 - DNA, 25 bp, Saccharomyces pastorianus
aagcaggctgggttatacaaccaaa

SEQ ID NO: 28528 - DNA, 25 bp, Saccharomyces pastorianus
tggtttccttttgaacacagtttct

SEQ ID NO: 28529 - DNA, 25 bp, Saccharomyces pastorianus
aatccctcacgatttggtctggaga

SEQ ID NO: 28530 - DNA, 25 bp, Saccharomyces pastorianus
aataccatggttactctaggctgtc

SEQ ID NO: 28531 - DNA, 25 bp, Saccharomyces pastorianus
gttccacccgatacaaaccgagaat

SEQ ID NO: 28532 - DNA, 25 bp, Saccharomyces pastorianus
tctaggctgtccaattcaatatgtg

SEQ ID NO: 28533 - DNA, 25 bp, Saccharomyces pastorianus
tgaggaatctggtaccgaagcaatt

SEQ ID NO: 28534 - DNA, 25 bp, Saccharomyces pastorianus
ccgaagcaattaactgtccctgtac

SEQ ID NO: 28535 - DNA, 25 bp, Saccharomyces pastorianus
atgatggcgggtatattcttgaaat

SEQ ID NO: 28536 - DNA, 25 bp, Saccharomyces pastorianus
tccatgggaaaaaacgaggcgcgat

SEQ ID NO: 28537 - DNA, 25 bp, Saccharomyces pastorianus
gttttgaccaattctttcgcgtacg

SEQ ID NO: 28538 - DNA, 25 bp, Saccharomyces pastorianus
aagaccgttctcgacaaaatgttgc

SEQ ID NO: 28539 - DNA, 25 bp, Saccharomyces pastorianus
ggttatctaagttttccgcacgttg

SEQ ID NO: 28540 - DNA, 25 bp, Saccharomyces pastorianus
gagaataccacatcggacaatacca

SEQ ID NO: 28541 - DNA, 25 bp, Saccharomyces pastorianus
tcccttcatggatctttctctagat

SEQ ID NO: 28542 - DNA, 25 bp, Saccharomyces pastorianus
acatactgtttttgaaggttcgctg

SEQ ID NO: 28543 - DNA, 25 bp, Saccharomyces pastorianus
aaactctacgagtgtcttgacagtt

SEQ ID NO: 28544 - DNA, 25 bp, Saccharomyces pastorianus
taagacgaccattgatcccttcatg

SEQ ID NO: 28545 - DNA, 25 bp, Saccharomyces pastorianus
attgcgattgcatagtacatactgt

SEQ ID NO: 28546 - DNA, 25 bp, Saccharomyces pastorianus
gggtatacacaagttgccatccgtt

SEQ ID NO: 28547 - DNA, 25 bp, Saccharomyces pastorianus
ctctatagtgtgtccaagctgtcaa

SEQ ID NO: 28548 - DNA, 25 bp, Saccharomyces pastorianus
tggtctcctcaatttctcaagaaga

SEQ ID NO: 28549 - DNA, 25 bp, Saccharomyces pastorianus
agttgccatccgttttagttttgca

SEQ ID NO: 28550 - DNA, 25 bp, Saccharomyces pastorianus
aggttcgctggagagctctatagtg

SEQ ID NO: 28551 - DNA, 25 bp, Saccharomyces pastorianus
atgattctatggtctcctcaatttc

SEQ ID NO: 28552 - DNA, 25 bp, Saccharomyces pastorianus
acgaggccagtctttcacttgataa

SEQ ID NO: 28553 - DNA, 25 bp, Saccharomyces pastorianus
aaagaaagagccgttcgcctgcagg

SEQ ID NO: 28554 - DNA, 25 bp, Saccharomyces pastorianus
gctccttcagactcgattgttatat

SEQ ID NO: 28555 - DNA, 25 bp, Saccharomyces pastorianus
aaaaaactgctgctccttcagactc

SEQ ID NO: 28556 - DNA, 25 bp, Saccharomyces pastorianus
aattacgccgggacaagccttcaag

SEQ ID NO: 28557 - DNA, 25 bp, Saccharomyces pastorianus
tgcaggtacgaaggcttcctccacg

SEQ ID NO: 28558 - DNA, 25 bp, Saccharomyces pastorianus
aggccagccactcccatggaaaatg

SEQ ID NO: 28559 - DNA, 25 bp, Saccharomyces pastorianus
accgactgagttcttttcaacccag

SEQ ID NO: 28560 - DNA, 25 bp, Saccharomyces pastorianus
atgataatgatgctcgagtcgatga

SEQ ID NO: 28561 - DNA, 25 bp, Saccharomyces pastorianus
gtgctaattctgttaggccagccac

SEQ ID NO: 28562 - DNA, 25 bp, Saccharomyces pastorianus
caagtactgctcaatctcatgttag

SEQ ID NO: 28563 - DNA, 25 bp, Saccharomyces pastorianus
acatcgtgaacttgggctcggtggc

SEQ ID NO: 28564 - DNA, 25 bp, Saccharomyces pastorianus
gttgccaattttccaagccaagaac

SEQ ID NO: 28565 - DNA, 25 bp, Saccharomyces pastorianus
gtcggtgcgttcactgacagtttga

SEQ ID NO: 28566 - DNA, 25 bp, Saccharomyces pastorianus
aaaacaccgtggttgccgacagctt

SEQ ID NO: 28567 - DNA, 25 bp, Saccharomyces pastorianus
acgtcaccgcgttgattaacatcac

SEQ ID NO: 28568 - DNA, 25 bp, Saccharomyces pastorianus
aggagtttcccaatgcaaaggtcca

SEQ ID NO: 28569 - DNA, 25 bp, Saccharomyces pastorianus
gcaaggctctgggttccgaacgtgt

SEQ ID NO: 28570 - DNA, 25 bp, Saccharomyces pastorianus
ggtcgagaccgaattctcactggtt

SEQ ID NO: 28571 - DNA, 25 bp, Saccharomyces pastorianus
ggccgatgacgtggctgacttaatc

SEQ ID NO: 28572 - DNA, 25 bp, Saccharomyces pastorianus
gggtcaactggacatcacacaggct

SEQ ID NO: 28573 - DNA, 25 bp, Saccharomyces pastorianus
ggacattcaggacgtgttcgacacc

SEQ ID NO: 28574 - DNA, 25 bp, Saccharomyces pastorianus
aaagcaggtttatcgacagcatcaa

SEQ ID NO: 28575 - DNA, 25 bp, Saccharomyces pastorianus
tgccggtgaggctccagcagaagaa

SEQ ID NO: 28576 - DNA, 25 bp, Saccharomyces pastorianus
gtcttcccagaagcagcatcaacaa

SEQ ID NO: 28577 - DNA, 25 bp, Saccharomyces pastorianus
gcaagagggcaagattaccggcgat

SEQ ID NO: 28578 - DNA, 25 bp, Saccharomyces pastorianus
caaggccacgaatcctctcttgaaa

SEQ ID NO: 28579 - DNA, 25 bp, Saccharomyces pastorianus
gaaacacacgagcttgaccaaaatg

SEQ ID NO: 28580 - DNA, 25 bp, Saccharomyces pastorianus
ttgaccaaaatgacctcgacatgat

SEQ ID NO: 28581 - DNA, 25 bp, Saccharomyces pastorianus
acagaagtcccacacaacgaagaag

SEQ ID NO: 28582 - DNA, 25 bp, Saccharomyces pastorianus
aagacacaagctgggcaaggccacg

SEQ ID NO: 28583 - DNA, 25 bp, Saccharomyces pastorianus
gacagcacacggaacttcttgttga

SEQ ID NO: 28584 - DNA, 25 bp, Saccharomyces pastorianus
tcaacaacctcctgacacagaagtc

SEQ ID NO: 28585 - DNA, 25 bp, Saccharomyces pastorianus
aacttttcacagagtggcctttcaa

SEQ ID NO: 28586 - DNA, 25 bp, Saccharomyces pastorianus
ggatgccaagtaccactgccagaaa

SEQ ID NO: 28587 - DNA, 25 bp, Saccharomyces pastorianus
gggatcccattgtgtttagtgccgc

SEQ ID NO: 28588 - DNA, 25 bp, Saccharomyces pastorianus
gacatggagggcagctatacttcaa

SEQ ID NO: 28589 - DNA, 25 bp, Saccharomyces pastorianus
tctaaccgtggctaacgtaacaggt

SEQ ID NO: 28590 - DNA, 25 bp, Saccharomyces pastorianus
gaaagcttctggcaagaccaagcat

SEQ ID NO: 28591 - DNA, 25 bp, Saccharomyces pastorianus
gaccaagcatgcgttccagatcgaa

SEQ ID NO: 28592 - DNA, 25 bp, Saccharomyces pastorianus
aagaacgccactaaacattgtcatg

SEQ ID NO: 28593 - DNA, 25 bp, Saccharomyces pastorianus
ctgctgaaaaagtgccccattgatt

SEQ ID NO: 28594 - DNA, 25 bp, Saccharomyces pastorianus
ccgcggacatctggcctacaaaagg

SEQ ID NO: 28595 - DNA, 25 bp, Saccharomyces pastorianus
ggccttattatgcagtggctgtcat

SEQ ID NO: 28596 - DNA, 25 bp, Saccharomyces pastorianus
gcagagttattcaaagctacggcca

SEQ ID NO: 28597 - DNA, 25 bp, Saccharomyces pastorianus
gagcttgtcaatatatggactctta

SEQ ID NO: 28598 - DNA, 25 bp, Saccharomyces pastorianus
ggcccgtacgattttgggtagcgct

SEQ ID NO: 28599 - DNA, 25 bp, Saccharomyces pastorianus
gaagacgtcttcaaaagagcttgtc

SEQ ID NO: 28600 - DNA, 25 bp, Saccharomyces pastorianus
ttgaagttgtccgtaagtttgctca

SEQ ID NO: 28601 - DNA, 25 bp, Saccharomyces pastorianus
cccagaaagaggtcgttcattattt

SEQ ID NO: 28602 - DNA, 25 bp, Saccharomyces pastorianus
gtagcgctttgaaggctctaccaaa

SEQ ID NO: 28603 - DNA, 25 bp, Saccharomyces pastorianus
ggctctaccaaaacgtagtcacatt

SEQ ID NO: 28604 - DNA, 25 bp, Saccharomyces pastorianus
ggactcttatgccattcatacaaaa

SEQ ID NO: 28605 - DNA, 25 bp, Saccharomyces pastorianus
gaaaagatttccatctgggtatcat

SEQ ID NO: 28606 - DNA, 25 bp, Saccharomyces pastorianus
gatttgtggaatgtttacgtggacc

SEQ ID NO: 28607 - DNA, 25 bp, Saccharomyces pastorianus
gagttgcctaattcagatctagtca

SEQ ID NO: 28608 - DNA, 25 bp, Saccharomyces pastorianus
taagcattccaactctgtcagatat

SEQ ID NO: 28609 - DNA, 25 bp, Saccharomyces pastorianus
cagatctagtcattcctttagtgga

SEQ ID NO: 28610 - DNA, 25 bp, Saccharomyces pastorianus
gagcgcctgaggacaacatttctga

SEQ ID NO: 28611 - DNA, 25 bp, Saccharomyces pastorianus
tggtgcatactttgagggagcgcct

SEQ ID NO: 28612 - DNA, 25 bp, Saccharomyces pastorianus
gtaatggtacctcatcatcaagggc

SEQ ID NO: 28613 - DNA, 25 bp, Saccharomyces pastorianus
atggttcaagtctcggtaatggtac

SEQ ID NO: 28614 - DNA, 25 bp, Saccharomyces pastorianus
gacacgccggtgaaccaggtaacga

SEQ ID NO: 28615 - DNA, 25 bp, Saccharomyces pastorianus
accgattcagaatacgtggccaaac

SEQ ID NO: 28616 - DNA, 25 bp, Saccharomyces pastorianus
tctgaacccttaatttcgggagctc

SEQ ID NO: 28617 - DNA, 25 bp, Saccharomyces pastorianus
aatgggtcaaaggacacgccggtga

SEQ ID NO: 28618 - DNA, 25 bp, Saccharomyces pastorianus
gaaatggttcaaagcacccttgaaa

SEQ ID NO: 28619 - DNA, 25 bp, Saccharomyces pastorianus
gactgtctcttaaagactgctggtt

SEQ ID NO: 28620 - DNA, 25 bp, Saccharomyces pastorianus
gctcgaggcacaagtggatgacctt

SEQ ID NO: 28621 - DNA, 25 bp, Saccharomyces pastorianus
aacactttcactaagcatgcttctt

SEQ ID NO: 28622 - DNA, 25 bp, Saccharomyces pastorianus
cagggcctggaaatcctggatttac

SEQ ID NO: 28623 - DNA, 25 bp, Saccharomyces pastorianus
gaaagtcgtcaagctataccaaaac

SEQ ID NO: 28624 - DNA, 25 bp, Saccharomyces pastorianus
tagctaaggctttgcctacttggaa

SEQ ID NO: 28625 - DNA, 25 bp, Saccharomyces pastorianus
ttgaaacatcctttttacctgccat

SEQ ID NO: 28626 - DNA, 25 bp, Saccharomyces pastorianus
tatcagacctaagggcgtggccact

SEQ ID NO: 28627 - DNA, 25 bp, Saccharomyces pastorianus
ccactttaattcactacgggctaca

SEQ ID NO: 28628 - DNA, 25 bp, Saccharomyces pastorianus
gctacaacacttacagggcctggaa

SEQ ID NO: 28629 - DNA, 25 bp, Saccharomyces pastorianus
tcgcagttcaagacatgggtatcac

SEQ ID NO: 28630 - DNA, 25 bp, Saccharomyces pastorianus
gaagcttctaagatgaggtccaaga

SEQ ID NO: 28631 - DNA, 25 bp, Saccharomyces pastorianus
agccgcaaaggctttccaagttgga

SEQ ID NO: 28632 - DNA, 25 bp, Saccharomyces pastorianus
agttattcgggctttgtgccaaaag

SEQ ID NO: 28633 - DNA, 25 bp, Saccharomyces pastorianus
atcgacgaagtagatgttcatggta

SEQ ID NO: 28634 - DNA, 25 bp, Saccharomyces pastorianus
gtctgcgcaaagaatctactggagt

SEQ ID NO: 28635 - DNA, 25 bp, Saccharomyces pastorianus
gattcagttttggtaaattccgaat

SEQ ID NO: 28636 - DNA, 25 bp, Saccharomyces pastorianus
tggataaccttttcatgctcctata

SEQ ID NO: 28637 - DNA, 25 bp, Saccharomyces pastorianus
aattccgaattgacctcttctcaaa

SEQ ID NO: 28638 - DNA, 25 bp, Saccharomyces pastorianus
ataccgattggcaatccgagcagtt

SEQ ID NO: 28639 - DNA, 25 bp, Saccharomyces pastorianus
gttggattgtctcaaagattttctc

SEQ ID NO: 28640 - DNA, 25 bp, Saccharomyces pastorianus
acagattctgaatggtgcggcgtca

SEQ ID NO: 28641 - DNA, 25 bp, Saccharomyces pastorianus
gaagccgctgccaaatcatgtgatg

SEQ ID NO: 28642 - DNA, 25 bp, Saccharomyces pastorianus
attcgtctacaaccagtgtgcttca

SEQ ID NO: 28643 - DNA, 25 bp, Saccharomyces pastorianus
cagaccagccccatacaaggaagat

SEQ ID NO: 28644 - DNA, 25 bp, Saccharomyces pastorianus
ggccttacaagtgttatggctcctt

SEQ ID NO: 28645 - DNA, 25 bp, Saccharomyces pastorianus
ggacctataaccacggtattgttct

SEQ ID NO: 28646 - DNA, 25 bp, Saccharomyces pastorianus
gtgcggcgtcatatttcttcaaaga

SEQ ID NO: 28647 - DNA, 25 bp, Saccharomyces pastorianus
attgttcttggtggtatggcgtata

SEQ ID NO: 28648 - DNA, 25 bp, Saccharomyces pastorianus
gcaaatgctggtatgaattcgtcta

SEQ ID NO: 28649 - DNA, 25 bp, Saccharomyces pastorianus
atcgtgcaggtgctgctattatcac

SEQ ID NO: 28650 - DNA, 25 bp, Saccharomyces pastorianus
atggctcctttcactagtgacacta

SEQ ID NO: 28651 - DNA, 25 bp, Saccharomyces pastorianus
aattgcaggtatcagggccgcagaa

SEQ ID NO: 28652 - DNA, 25 bp, Saccharomyces pastorianus
aaaagccaactgcaattgacccgaa

SEQ ID NO: 28653 - DNA, 25 bp, Saccharomyces pastorianus
gccactcatagtcaagttgccttgg

SEQ ID NO: 28654 - DNA, 25 bp, Saccharomyces pastorianus
ggtcatcgaggaggccactcatagt

SEQ ID NO: 28655 - DNA, 25 bp, Saccharomyces pastorianus
tgtagagttggcgacggtaccgttc

SEQ ID NO: 28656 - DNA, 25 bp, Saccharomyces pastorianus
aattgacccgaattccatagtagaa

SEQ ID NO: 28657 - DNA, 25 bp, Saccharomyces pastorianus
ttgaagcctatattggtggcctgat

SEQ ID NO: 28658 - DNA, 25 bp, Saccharomyces pastorianus
aagagccgcaattcctagaagtgaa

SEQ ID NO: 28659 - DNA, 25 bp, Saccharomyces pastorianus
cgcagaaagtgctcttcgtgacaag

SEQ ID NO: 28660 - DNA, 25 bp, Saccharomyces pastorianus
gaatctgtgctgaaggatccctcaa

SEQ ID NO: 28661 - DNA, 25 bp, Saccharomyces pastorianus
aagactggccaaaccggtcatcgag

SEQ ID NO: 28662 - DNA, 25 bp, Saccharomyces pastorianus
cgcgagattatgaacctgcccgaag

SEQ ID NO: 28663 - DNA, 25 bp, Saccharomyces pastorianus
ccgaagggcagttaccaccatggtg

SEQ ID NO: 28664 - DNA, 25 bp, Saccharomyces pastorianus
aatgggcactctagacttggattac

SEQ ID NO: 28665 - DNA, 25 bp, Saccharomyces pastorianus
acttgctacctttcggtgatgttta

SEQ ID NO: 28666 - DNA, 25 bp, Saccharomyces pastorianus
aattattccccatggtcagtcaagg

SEQ ID NO: 28667 - DNA, 25 bp, Saccharomyces pastorianus
gttggattgcctatagggtacccta

SEQ ID NO: 28668 - DNA, 25 bp, Saccharomyces pastorianus
aacgggagcgaactggaaacctgat

SEQ ID NO: 28669 - DNA, 25 bp, Saccharomyces pastorianus
aaatcgcaggcttgaattgggacat

SEQ ID NO: 28670 - DNA, 25 bp, Saccharomyces pastorianus
gaaactcctgaatttgaaaccacaa

SEQ ID NO: 28671 - DNA, 25 bp, Saccharomyces pastorianus
gaatcagtcaagaacttcgcgagat

SEQ ID NO: 28672 - DNA, 25 bp, Saccharomyces pastorianus
tggaaacctgatcacttgctacctt

SEQ ID NO: 28673 - DNA, 25 bp, Saccharomyces pastorianus
gtgtagttgccgtccatgatttcca

SEQ ID NO: 28674 - DNA, 25 bp, Saccharomyces pastorianus
gaattttactacaagccacgccatc

SEQ ID NO: 28675 - DNA, 25 bp, Saccharomyces pastorianus
gaagattttccatcatagccggcgg

SEQ ID NO: 28676 - DNA, 25 bp, Saccharomyces pastorianus
atgttcaaatcgactgcacacctga

SEQ ID NO: 28677 - DNA, 25 bp, Saccharomyces pastorianus
cttgggtgacgctttgggtaacatc

SEQ ID NO: 28678 - DNA, 25 bp, Saccharomyces pastorianus
gatccgattgtctctttgcttatca

SEQ ID NO: 28679 - DNA, 25 bp, Saccharomyces pastorianus
aacatggtatccattctgccacggt

SEQ ID NO: 28680 - DNA, 25 bp, Saccharomyces pastorianus
gataaattcattagctccgccaaat

SEQ ID NO: 28681 - DNA, 25 bp, Saccharomyces pastorianus
gccatctacaatttctgccgatcaa

SEQ ID NO: 28682 - DNA, 25 bp, Saccharomyces pastorianus
gaccgagtccatatacattgcatcc

SEQ ID NO: 28683 - DNA, 25 bp, Saccharomyces pastorianus
acatcggtgtcattacagcagcttt

SEQ ID NO: 28684 - DNA, 25 bp, Saccharomyces pastorianus
aacgccggagcgcaagagttctttt

SEQ ID NO: 28685 - DNA, 25 bp, Saccharomyces pastorianus
gagcgttttctttcgaactgttgaa

SEQ ID NO: 28686 - DNA, 25 bp, Saccharomyces pastorianus
aatgttgttggcgttggcgtctccg

SEQ ID NO: 28687 - DNA, 25 bp, Saccharomyces pastorianus
tgaattctagtaaacttcccggttg

SEQ ID NO: 28688 - DNA, 25 bp, Saccharomyces pastorianus
cgaaggctacagacggctccgataa

SEQ ID NO: 28689 - DNA, 25 bp, Saccharomyces pastorianus
ataccgaattatccattaccgaagg

SEQ ID NO: 28690 - DNA, 25 bp, Saccharomyces pastorianus
ggtggctttcaagttatcccaagaa

SEQ ID NO: 28691 - DNA, 25 bp, Saccharomyces pastorianus
ggaagtcccacaggcaattctttct

SEQ ID NO: 28692 - DNA, 25 bp, Saccharomyces pastorianus
tagacgctgtcgctgaacaaacgcc

SEQ ID NO: 28693 - DNA, 25 bp, Saccharomyces pastorianus
gtgagtactgggatcgcccacaagt

SEQ ID NO: 28694 - DNA, 25 bp, Saccharomyces pastorianus
ggtttgccaacacatagacgctgtc

SEQ ID NO: 28695 - DNA, 25 bp, Saccharomyces pastorianus
tatctcaagttgtcatttccgccgt

SEQ ID NO: 28696 - DNA, 25 bp, Saccharomyces pastorianus
gttatctcaagttgtcatttccgcc

SEQ ID NO: 28697 - DNA, 25 bp, Saccharomyces pastorianus
aactcctcaagctccaagaacgctg

SEQ ID NO: 28698 - DNA, 25 bp, Saccharomyces pastorianus
acgctgctcaaccaattgctggttt

SEQ ID NO: 28699 - DNA, 25 bp, Saccharomyces pastorianus
cttcaccggtttagttagtgctgcc

SEQ ID NO: 28700 - DNA, 25 bp, Saccharomyces pastorianus
aagaacgctgctcaaccaattgctg

SEQ ID NO: 28701 - DNA, 25 bp, Saccharomyces pastorianus
ttagttagtgctgccaacagctcca

SEQ ID NO: 28702 - DNA, 25 bp, Saccharomyces pastorianus
ttagtgctgccaacagctccaactc

SEQ ID NO: 28703 - DNA, 25 bp, Saccharomyces pastorianus
accggtttagttagtgctgccaaca

SEQ ID NO: 28704 - DNA, 25 bp, Saccharomyces pastorianus
caacggtaaggttgccggtgccgct

SEQ ID NO: 28705 - DNA, 25 bp, Saccharomyces pastorianus
aagttgtcatttccgccgtcgcctt

SEQ ID NO: 28706 - DNA, 25 bp, Saccharomyces pastorianus
cgtgttcggcattttttacaacgat

SEQ ID NO: 28707 - DNA, 25 bp, Saccharomyces pastorianus
atggatgagcacaacgattcgccgt

SEQ ID NO: 28708 - DNA, 25 bp, Saccharomyces pastorianus
gacaaagaggcgtactttccgtata

SEQ ID NO: 28709 - DNA, 25 bp, Saccharomyces pastorianus
caagctccaagaccaacgtatcgtt

SEQ ID NO: 28710 - DNA, 25 bp, Saccharomyces pastorianus
gaatcgggtttaagccattaagcac

SEQ ID NO: 28711 - DNA, 25 bp, Saccharomyces pastorianus
tgaagggactgatcatcggcatgga

SEQ ID NO: 28712 - DNA, 25 bp, Saccharomyces pastorianus
ggtggtagtcttatccccatgaaat

SEQ ID NO: 28713 - DNA, 25 bp, Saccharomyces pastorianus
ttcgtcgcacggcttcgacaaagag

SEQ ID NO: 28714 - DNA, 25 bp, Saccharomyces pastorianus
atcgggtaatagattcagccatcct

SEQ ID NO: 28715 - DNA, 25 bp, Saccharomyces pastorianus
attaagcacgatatacgcgcccgct

SEQ ID NO: 28716 - DNA, 25 bp, Saccharomyces pastorianus
agaattcatccagcggttcgtcaag

SEQ ID NO: 28717 - DNA, 25 bp, Saccharomyces pastorianus
ggatttattttccagctcctgctga

SEQ ID NO: 28718 - DNA, 25 bp, Saccharomyces pastorianus
aagactcattgccactttggtcggg

SEQ ID NO: 28719 - DNA, 25 bp, Saccharomyces pastorianus
ggtgataaggatccggtcagccaat

SEQ ID NO: 28720 - DNA, 25 bp, Saccharomyces pastorianus
gctgtgtctacatcattatccgtta

SEQ ID NO: 28721 - DNA, 25 bp, Saccharomyces pastorianus
aggatcgcttatggcatacacccag

SEQ ID NO: 28722 - DNA, 25 bp, Saccharomyces pastorianus
gttgatcgtgagaccatcgttctta

SEQ ID NO: 28723 - DNA, 25 bp, Saccharomyces pastorianus
atacacccagctgatttatgccgtg

SEQ ID NO: 28724 - DNA, 25 bp, Saccharomyces pastorianus
atcgttcttatttggagtgcccgaa

SEQ ID NO: 28725 - DNA, 25 bp, Saccharomyces pastorianus
gataattatcatcaccgctacgtta

SEQ ID NO: 28726 - DNA, 25 bp, Saccharomyces pastorianus
gctcctgctgactctgggaattcaa

SEQ ID NO: 28727 - DNA, 25 bp, Saccharomyces pastorianus
ttatgccgtgttctgggatgtcgca

SEQ ID NO: 28728 - DNA, 25 bp, Saccharomyces pastorianus
cacctgtttcgcctagcaagaataa

SEQ ID NO: 28729 - DNA, 25 bp, Saccharomyces pastorianus
gggcaagacttccactacaaacgaa

SEQ ID NO: 28730 - DNA, 25 bp, Saccharomyces pastorianus
aagactagtcatgaggagcaacaac

SEQ ID NO: 28731 - DNA, 25 bp, Saccharomyces pastorianus
gtttcgcctagcaagaataagcctg

SEQ ID NO: 28732 - DNA, 25 bp, Saccharomyces pastorianus
ataagcctgctaaaacgaagtccaa

SEQ ID NO: 28733 - DNA, 25 bp, Saccharomyces pastorianus
ccagacagaagaatccgcctcgtaa

SEQ ID NO: 28734 - DNA, 25 bp, Saccharomyces pastorianus
ttcccaaaagacaaccgaggtgcct

SEQ ID NO: 28735 - DNA, 25 bp, Saccharomyces pastorianus
gaagtccaaactggatgccgcttca

SEQ ID NO: 28736 - DNA, 25 bp, Saccharomyces pastorianus
actggatgccgcttcaaagatgaaa

SEQ ID NO: 28737 - DNA, 25 bp, Saccharomyces pastorianus
gtaaccagggcaagacttccactac

SEQ ID NO: 28738 - DNA, 25 bp, Saccharomyces pastorianus
aatccgcctcgtaaccagggcaaga

SEQ ID NO: 28739 - DNA, 25 bp, Saccharomyces pastorianus
cagaaagtgttccaatcgtccggta

SEQ ID NO: 28740 - DNA, 25 bp, Saccharomyces pastorianus
gtggagacatccaagatccgcatta

SEQ ID NO: 28741 - DNA, 25 bp, Saccharomyces pastorianus
tcgctgttgtcacaccactattata

SEQ ID NO: 28742 - DNA, 25 bp, Saccharomyces pastorianus
gagacatccaagatccgcattatat

SEQ ID NO: 28743 - DNA, 25 bp, Saccharomyces pastorianus
tgttccaatcgtccggtaaacctct

SEQ ID NO: 28744 - DNA, 25 bp, Saccharomyces pastorianus
tgtcacaccactattatacattcca

SEQ ID NO: 28745 - DNA, 25 bp, Saccharomyces pastorianus
aatcgtccggtaaacctctatggtg

SEQ ID NO: 28746 - DNA, 25 bp, Saccharomyces pastorianus
gatccgcattatatctatatccatt

SEQ ID NO: 28747 - DNA, 25 bp, Saccharomyces pastorianus
atctatatccattttatgccatttt

SEQ ID NO: 28748 - DNA, 25 bp, Saccharomyces pastorianus
tatgccatttttgcagtcgctgttg

SEQ ID NO: 28749 - DNA, 25 bp, Saccharomyces pastorianus
ttttgcagtcgctgttgtcacacca

SEQ ID NO: 28750 - DNA, 25 bp, Saccharomyces pastorianus
aaagcgtgagctttattacaaagaa

SEQ ID NO: 28751 - DNA, 25 bp, Saccharomyces pastorianus
ggtgaacttcctgagaacgctaaga

SEQ ID NO: 28752 - DNA, 25 bp, Saccharomyces pastorianus
gacggtaacaaaagaatggctcata

SEQ ID NO: 28753 - DNA, 25 bp, Saccharomyces pastorianus
tttgagagatttccaagacgaccaa

SEQ ID NO: 28754 - DNA, 25 bp, Saccharomyces pastorianus
cggtccaaagcgtgagctttattac

SEQ ID NO: 28755 - DNA, 25 bp, Saccharomyces pastorianus
agctagaacactgaagacccaaggt

SEQ ID NO: 28756 - DNA, 25 bp, Saccharomyces pastorianus
ttacaaagaagaaggccaggaatat

SEQ ID NO: 28757 - DNA, 25 bp, Saccharomyces pastorianus
gaagccagttgttttgacggtaaca

SEQ ID NO: 28758 - DNA, 25 bp, Saccharomyces pastorianus
ataacttcggtttcgaatctgacga

SEQ ID NO: 28759 - DNA, 25 bp, Saccharomyces pastorianus
gaacgctaagattaatgaaaccgat

SEQ ID NO: 28760 - DNA, 25 bp, Saccharomyces pastorianus
gatgaagctagaacactgaagaccc

SEQ ID NO: 28761 - DNA, 25 bp, Saccharomyces pastorianus
ccatcctttatggtagctccagatc

SEQ ID NO: 28762 - DNA, 25 bp, Saccharomyces pastorianus
taaaattcggctacaccatccttta

SEQ ID NO: 28763 - DNA, 25 bp, Saccharomyces pastorianus
taaggatatccacgcttatgtgcat

SEQ ID NO: 28764 - DNA, 25 bp, Saccharomyces pastorianus
tacctggctcctattacaagattgc

SEQ ID NO: 28765 - DNA, 25 bp, Saccharomyces pastorianus
agctccagatctacatatgccaaag

SEQ ID NO: 28766 - DNA, 25 bp, Saccharomyces pastorianus
gggttagccttagccgctgctgaat

SEQ ID NO: 28767 - DNA, 25 bp, Saccharomyces pastorianus
tggcgtcaataccaccgacaatagc

SEQ ID NO: 28768 - DNA, 25 bp, Saccharomyces pastorianus
agaagagctcgactggatgcaagaa

SEQ ID NO: 28769 - DNA, 25 bp, Saccharomyces pastorianus
gagccattgttcaagttggtcaagc

SEQ ID NO: 28770 - DNA, 25 bp, Saccharomyces pastorianus
gtatttctggttcaacatcacctat

SEQ ID NO: 28771 - DNA, 25 bp, Saccharomyces pastorianus
agaagatcaagaccgtgtcccaacc

SEQ ID NO: 28772 - DNA, 25 bp, Saccharomyces pastorianus
aactcgtggcgtaaactcatatcag

SEQ ID NO: 28773 - DNA, 25 bp, Saccharomyces pastorianus
gccaagtacgacaacctgccaaata

SEQ ID NO: 28774 - DNA, 25 bp, Saccharomyces pastorianus
agtgtaaacgatcccttatatccta

SEQ ID NO: 28775 - DNA, 25 bp, Saccharomyces pastorianus
atatcaggatcactacaggccaagt

SEQ ID NO: 28776 - DNA, 25 bp, Saccharomyces pastorianus
tttcctgggattttggatgctacca

SEQ ID NO: 28777 - DNA, 25 bp, Saccharomyces pastorianus
gctgcgaaattggttcagacgtttt

SEQ ID NO: 28778 - DNA, 25 bp, Saccharomyces pastorianus
gaataaatttgccttccgtgaacaa

SEQ ID NO: 28779 - DNA, 25 bp, Saccharomyces pastorianus
tatggtgccattccacaaacgtggg

SEQ ID NO: 28780 - DNA, 25 bp, Saccharomyces pastorianus
agatagtagtaagcctccttctgaa

SEQ ID NO: 28781 - DNA, 25 bp, Saccharomyces pastorianus
tatggactccgacaacgccatcaaa

SEQ ID NO: 28782 - DNA, 25 bp, Saccharomyces pastorianus
aaacggcgacttggctttgagaggt

SEQ ID NO: 28783 - DNA, 25 bp, Saccharomyces pastorianus
aaacacgatgccgagaagaccaact

SEQ ID NO: 28784 - DNA, 25 bp, Saccharomyces pastorianus
gaaaaagtacatctcgtcagtgact

SEQ ID NO: 28785 - DNA, 25 bp, Saccharomyces pastorianus
aagacttctcactttacgtaatagt

SEQ ID NO: 28786 - DNA, 25 bp, Saccharomyces pastorianus
aaactatgctgcacgacagggagat

SEQ ID NO: 28787 - DNA, 25 bp, Saccharomyces pastorianus
cgtcagtgactttaatggcgccatt

SEQ ID NO: 28788 - DNA, 25 bp, Saccharomyces pastorianus
atttctgtcggcttggcggataaga

SEQ ID NO: 28789 - DNA, 25 bp, Saccharomyces pastorianus
attgctgcgcatttataacttttga

SEQ ID NO: 28790 - DNA, 25 bp, Saccharomyces pastorianus
gatgcccatgatacttaacaattct

SEQ ID NO: 28791 - DNA, 25 bp, Saccharomyces pastorianus
gataaggtttcatcgagccaaatcg

SEQ ID NO: 28792 - DNA, 25 bp, Saccharomyces pastorianus
gaatggtacgatcaggcactatcaa

SEQ ID NO: 28793 - DNA, 25 bp, Saccharomyces pastorianus
gtgtttgtttccagtttccgataag

SEQ ID NO: 28794 - DNA, 25 bp, Saccharomyces pastorianus
taaaggtattccactggctgctatt

SEQ ID NO: 28795 - DNA, 25 bp, Saccharomyces pastorianus
ggactggaatgccaagccttgagat

SEQ ID NO: 28796 - DNA, 25 bp, Saccharomyces pastorianus
atcgatgatgtcatgaccgcgggaa

SEQ ID NO: 28797 - DNA, 25 bp, Saccharomyces pastorianus
ggttcaacgttcctgtattaagtat

SEQ ID NO: 28798 - DNA, 25 bp, Saccharomyces pastorianus
taagtatcgtttcactggctcacgt

SEQ ID NO: 28799 - DNA, 25 bp, Saccharomyces pastorianus
aatcgtgggagcatgtcttgaagac

SEQ ID NO: 28800 - DNA, 25 bp, Saccharomyces pastorianus
aattcgatgttatcttcggtccagc

SEQ ID NO: 28801 - DNA, 25 bp, Saccharomyces pastorianus
gtttaactctggtaagctgctagca

SEQ ID NO: 28802 - DNA, 25 bp, Saccharomyces pastorianus
ggttgttggttgtatcattgcccta

SEQ ID NO: 28803 - DNA, 25 bp, Saccharomyces pastorianus
ggctgctattgtgtgtgtcaaactc

SEQ ID NO: 28804 - DNA, 25 bp, Saccharomyces pastorianus
ctaaattcaggtaggcaatcgccat

SEQ ID NO: 28805 - DNA, 25 bp, Saccharomyces pastorianus
atgaactcgctatttgcttgcttcc

SEQ ID NO: 28806 - DNA, 25 bp, Saccharomyces pastorianus
agttttcgctttattgccactgtac

SEQ ID NO: 28807 - DNA, 25 bp, Saccharomyces pastorianus
tatttgtcattctgtgtgctccatt

SEQ ID NO: 28808 - DNA, 25 bp, Saccharomyces pastorianus
ggatctgctccattgttcggtaatt

SEQ ID NO: 28809 - DNA, 25 bp, Saccharomyces pastorianus
tgatgcctcccactttatttgtcat

SEQ ID NO: 28810 - DNA, 25 bp, Saccharomyces pastorianus
gtctgcatcgtttcttgtttcattt

SEQ ID NO: 28811 - DNA, 25 bp, Saccharomyces pastorianus
tatcagttgggctttggtgtcacct

SEQ ID NO: 28812 - DNA, 25 bp, Saccharomyces pastorianus
cacctcttggttctgggacgatgta

SEQ ID NO: 28813 - DNA, 25 bp, Saccharomyces pastorianus
tcattttgatgattggctgcccgaa

SEQ ID NO: 28814 - DNA, 25 bp, Saccharomyces pastorianus
ccaaattgccttcctttatgcgtaa

SEQ ID NO: 28815 - DNA, 25 bp, Saccharomyces pastorianus
atttggtacctacttgggtcctgat

SEQ ID NO: 28816 - DNA, 25 bp, Saccharomyces pastorianus
aatcctgtacacaacactctttggt

SEQ ID NO: 28817 - DNA, 25 bp, Saccharomyces pastorianus
aataccacattcacagctaagccat

SEQ ID NO: 28818 - DNA, 25 bp, Saccharomyces pastorianus
aaacagggttcacttccaagctggt

SEQ ID NO: 28819 - DNA, 25 bp, Saccharomyces pastorianus
tattttactgaccacatgcttccaa

SEQ ID NO: 28820 - DNA, 25 bp, Saccharomyces pastorianus
atgcaatctcatgggattcccgggc

SEQ ID NO: 28821 - DNA, 25 bp, Saccharomyces pastorianus
aaacctgtggtgctgtattgcccta

SEQ ID NO: 28822 - DNA, 25 bp, Saccharomyces pastorianus
atcactgttttttggactcgcacac

SEQ ID NO: 28823 - DNA, 25 bp, Saccharomyces pastorianus
aatgctacttcggtctgttgcttat

SEQ ID NO: 28824 - DNA, 25 bp, Saccharomyces pastorianus
tggtcccgtgctggattttgtacta

SEQ ID NO: 28825 - DNA, 25 bp, Saccharomyces pastorianus
ggaaggttccatgacaactctatct

SEQ ID NO: 28826 - DNA, 25 bp, Saccharomyces pastorianus
ggtcactttatattgtggtcccgtg

SEQ ID NO: 28827 - DNA, 25 bp, Saccharomyces pastorianus
tgcgttactagcgtccatgttccaa

SEQ ID NO: 28828 - DNA, 25 bp, Saccharomyces pastorianus
aatgatggaccctaacgctggcact

SEQ ID NO: 28829 - DNA, 25 bp, Saccharomyces pastorianus
attgaatcctttcgccaacgcaggc

SEQ ID NO: 28830 - DNA, 25 bp, Saccharomyces pastorianus
tatgttcaggcagatgctcaccaac

SEQ ID NO: 28831 - DNA, 25 bp, Saccharomyces pastorianus
aacccgcagatgctggacttcatga

SEQ ID NO: 28832 - DNA, 25 bp, Saccharomyces pastorianus
aatccgatcttccagtcgcagatga

SEQ ID NO: 28833 - DNA, 25 bp, Saccharomyces pastorianus
agatgctgcagagccctatgttcag

SEQ ID NO: 28834 - DNA, 25 bp, Saccharomyces pastorianus
aagcgccccagccagaggatacaag

SEQ ID NO: 28835 - DNA, 25 bp, Saccharomyces pastorianus
acttcatgattcagtccaatccgca

SEQ ID NO: 28836 - DNA, 25 bp, Saccharomyces pastorianus
aagaccaccagaggagcgctacgag

SEQ ID NO: 28837 - DNA, 25 bp, Saccharomyces pastorianus
agcgctacgagcaccaattgagaca

SEQ ID NO: 28838 - DNA, 25 bp, Saccharomyces pastorianus
gtatcatatcctccatttatcggtg

SEQ ID NO: 28839 - DNA, 25 bp, Saccharomyces pastorianus
attagcgctgctgttgttcttttac

SEQ ID NO: 28840 - DNA, 25 bp, Saccharomyces pastorianus
aagtctacatcgaagcctgtgcgaa

SEQ ID NO: 28841 - DNA, 25 bp, Saccharomyces pastorianus
atatcaatctgatactcccgaccat

SEQ ID NO: 28842 - DNA, 25 bp, Saccharomyces pastorianus
aagagggcttcttacttggcgaaat

SEQ ID NO: 28843 - DNA, 25 bp, Saccharomyces pastorianus
atgagtacattcgtctcactcttcg

SEQ ID NO: 28844 - DNA, 25 bp, Saccharomyces pastorianus
gaccataaacctgttctgccagtgg

SEQ ID NO: 28845 - DNA, 25 bp, Saccharomyces pastorianus
cactcttcgtgggtcagggacggaa

SEQ ID NO: 28846 - DNA, 25 bp, Saccharomyces pastorianus
tattatgttccgtttggtttcgaag

SEQ ID NO: 28847 - DNA, 25 bp, Saccharomyces pastorianus
tattatactgttccaagcccacttg

SEQ ID NO: 28848 - DNA, 25 bp, Saccharomyces pastorianus
tctgccagtggatccaacatctcaa

SEQ ID NO: 28849 - DNA, 25 bp, Saccharomyces pastorianus
atctattgttagatgctggcacttg

SEQ ID NO: 28850 - DNA, 25 bp, Saccharomyces pastorianus
gaggcttgagtattctagattcttt

SEQ ID NO: 28851 - DNA, 25 bp, Saccharomyces pastorianus
ggtatctttccacttgaatgacaac

SEQ ID NO: 28852 - DNA, 25 bp, Saccharomyces pastorianus
ttttgcatggaagccagcacacgac

SEQ ID NO: 28853 - DNA, 25 bp, Saccharomyces pastorianus
gttgagcccttctgttgattatgag

SEQ ID NO: 28854 - DNA, 25 bp, Saccharomyces pastorianus
ctggcacttgatgaagcattggcat

SEQ ID NO: 28855 - DNA, 25 bp, Saccharomyces pastorianus
gaggcaattgtatgacctggcgaaa

SEQ ID NO: 28856 - DNA, 25 bp, Saccharomyces pastorianus
gaggtaaaccctcagcagcgagaga

SEQ ID NO: 28857 - DNA, 25 bp, Saccharomyces pastorianus
gcagcgagagaattcatcaacgatt

SEQ ID NO: 28858 - DNA, 25 bp, Saccharomyces pastorianus
attcgcttgctattgatgttttaca

SEQ ID NO: 28859 - DNA, 25 bp, Saccharomyces pastorianus
gacaacgatcttcatagaggcttga

SEQ ID NO: 28860 - DNA, 25 bp, Saccharomyces pastorianus
atctgacttcaaaaacccatcattg

SEQ ID NO: 28861 - DNA, 25 bp, Saccharomyces pastorianus
acacgaagatgattccttgcggaaa

SEQ ID NO: 28862 - DNA, 25 bp, Saccharomyces pastorianus
gaagacccggccattcaaaggctaa

SEQ ID NO: 28863 - DNA, 25 bp, Saccharomyces pastorianus
ggaaaaatctgaagacccggccatt

SEQ ID NO: 28864 - DNA, 25 bp, Saccharomyces pastorianus
acatccttcactgtttgtactatcc

SEQ ID NO: 28865 - DNA, 25 bp, Saccharomyces pastorianus
atgggatactttaacctcagagatg

SEQ ID NO: 28866 - DNA, 25 bp, Saccharomyces pastorianus
gtttgctatcctatgattctggtga

SEQ ID NO: 28867 - DNA, 25 bp, Saccharomyces pastorianus
aaaattcccgagtttgctatcctat

SEQ ID NO: 28868 - DNA, 25 bp, Saccharomyces pastorianus
aaggacgttgacttctttattcaag

SEQ ID NO: 28869 - DNA, 25 bp, Saccharomyces pastorianus
aactcaaatccaattcacatccttc

SEQ ID NO: 28870 - DNA, 25 bp, Saccharomyces pastorianus
tttggaacacatcctacagcaagtt

SEQ ID NO: 28871 - DNA, 25 bp, Saccharomyces pastorianus
gtagcaaagtcgtatggtttcccag

SEQ ID NO: 28872 - DNA, 25 bp, Saccharomyces pastorianus
actatatcgatttgcctgttcttga

SEQ ID NO: 28873 - DNA, 25 bp, Saccharomyces pastorianus
tatggtttcccagttcctccaaaag

SEQ ID NO: 28874 - DNA, 25 bp, Saccharomyces pastorianus
aatctttaatgttcttgactcctaa

SEQ ID NO: 28875 - DNA, 25 bp, Saccharomyces pastorianus
tgcagccagaggtctagatatccct

SEQ ID NO: 28876 - DNA, 25 bp, Saccharomyces pastorianus
aagcatacgcttcacattctctgaa

SEQ ID NO: 28877 - DNA, 25 bp, Saccharomyces pastorianus
ggcaccaagggtaagggcaaatctt

SEQ ID NO: 28878 - DNA, 25 bp, Saccharomyces pastorianus
atcgtccaatttgatcctcctgatg

SEQ ID NO: 28879 - DNA, 25 bp, Saccharomyces pastorianus
gtgtaactctgtgaagtactacgct

SEQ ID NO: 28880 - DNA, 25 bp, Saccharomyces pastorianus
tgagtacgaattccccacaaataaa

SEQ ID NO: 28881 - DNA, 25 bp, Saccharomyces pastorianus
taatctgtacagatgttgcagccag

SEQ ID NO: 28882 - DNA, 25 bp, Saccharomyces pastorianus
agaaggtcacgttctgtgcgacgtc

SEQ ID NO: 28883 - DNA, 25 bp, Saccharomyces pastorianus
tcccacctatgggttccgtgtaaga

SEQ ID NO: 28884 - DNA, 25 bp, Saccharomyces pastorianus
ggctgatatatcgaacccaactaga

SEQ ID NO: 28885 - DNA, 25 bp, Saccharomyces pastorianus
tgggtgcttcttccaaccaaatgta

SEQ ID NO: 28886 - DNA, 25 bp, Saccharomyces pastorianus
aagctcagccttttgaacaagccgc

SEQ ID NO: 28887 - DNA, 25 bp, Saccharomyces pastorianus
atctgctgtggcctatgacgcgaac

SEQ ID NO: 28888 - DNA, 25 bp, Saccharomyces pastorianus
cttccgtagctgatcctatcttgga

SEQ ID NO: 28889 - DNA, 25 bp, Saccharomyces pastorianus
gtatgcctcaacagatgggtgcttc

SEQ ID NO: 28890 - DNA, 25 bp, Saccharomyces pastorianus
gtgcgacgtcttcggtcaaacaatc

SEQ ID NO: 28891 - DNA, 25 bp, Saccharomyces pastorianus
ttaaagatgcgtaccgcttccgtag

SEQ ID NO: 28892 - DNA, 25 bp, Saccharomyces pastorianus
gtgtaagacctgactttcccatgtt

SEQ ID NO: 28893 - DNA, 25 bp, Saccharomyces pastorianus
ttctgttcactacccaatccatgaa

SEQ ID NO: 28894 - DNA, 25 bp, Saccharomyces pastorianus
attacgaacccaacgatgagcatct

SEQ ID NO: 28895 - DNA, 25 bp, Saccharomyces pastorianus
aaggaacctcaatctggctccgtga

SEQ ID NO: 28896 - DNA, 25 bp, Saccharomyces pastorianus
atggttccactgtactccaatcaag

SEQ ID NO: 28897 - DNA, 25 bp, Saccharomyces pastorianus
atcgaaaacggcaacgtcccttctg

SEQ ID NO: 28898 - DNA, 25 bp, Saccharomyces pastorianus
atttcattgctcttaatcgctgctg

SEQ ID NO: 28899 - DNA, 25 bp, Saccharomyces pastorianus
aatcgctgctgtggaatacttcaaa

SEQ ID NO: 28900 - DNA, 25 bp, Saccharomyces pastorianus
tgtctgaatctgctcccattataac

SEQ ID NO: 28901 - DNA, 25 bp, Saccharomyces pastorianus
tatgttggctacgatacggactctg

SEQ ID NO: 28902 - DNA, 25 bp, Saccharomyces pastorianus
tggctccgtgatcaaactttgggct

SEQ ID NO: 28903 - DNA, 25 bp, Saccharomyces pastorianus
gcatctatccttctgtatcatcgaa

SEQ ID NO: 28904 - DNA, 25 bp, Saccharomyces pastorianus
gaaaccgtacagagaaggcttcgtt

SEQ ID NO: 28905 - DNA, 25 bp, Saccharomyces pastorianus
gatgattccatcgttagaggtacta

SEQ ID NO: 28906 - DNA, 25 bp, Saccharomyces pastorianus
gaacatttatcatgcctaaccaaag

SEQ ID NO: 28907 - DNA, 25 bp, Saccharomyces pastorianus
tagaggtactacttccagggaaatt

SEQ ID NO: 28908 - DNA, 25 bp, Saccharomyces pastorianus
gctcaaccctatggaatctgaattc

SEQ ID NO: 28909 - DNA, 25 bp, Saccharomyces pastorianus
attgcctataacagaaccaacgatg

SEQ ID NO: 28910 - DNA, 25 bp, Saccharomyces pastorianus
gaatcgatcgcaaacaactcttcag

SEQ ID NO: 28911 - DNA, 25 bp, Saccharomyces pastorianus
gaatctggtgcagcaaaggtcttct

SEQ ID NO: 28912 - DNA, 25 bp, Saccharomyces pastorianus
gataccaagaacttaattgcctata

SEQ ID NO: 28913 - DNA, 25 bp, Saccharomyces pastorianus
aaaggtcttctttgcatcagctgcg

SEQ ID NO: 28914 - DNA, 25 bp, Saccharomyces pastorianus
ctgcgccagctattcgttataatca

SEQ ID NO: 28915 - DNA, 25 bp, Saccharomyces pastorianus
taggatcctcataaatgggcgtgat

SEQ ID NO: 28916 - DNA, 25 bp, Saccharomyces pastorianus
gcatcttgaactattggctacaccc

SEQ ID NO: 28917 - DNA, 25 bp, Saccharomyces pastorianus
gtaccgggagttgtggaccattcag

SEQ ID NO: 28918 - DNA, 25 bp, Saccharomyces pastorianus
ttccctctggctcgagaacaagcgt

SEQ ID NO: 28919 - DNA, 25 bp, Saccharomyces pastorianus
gaccattcaggaggatctgcaccat

SEQ ID NO: 28920 - DNA, 25 bp, Saccharomyces pastorianus
ggctttgataccattgtcggagaaa

SEQ ID NO: 28921 - DNA, 25 bp, Saccharomyces pastorianus
tattagaagcaactttccctctggc

SEQ ID NO: 28922 - DNA, 25 bp, Saccharomyces pastorianus
gatacaccactttttaacgacacca

SEQ ID NO: 28923 - DNA, 25 bp, Saccharomyces pastorianus
catgtttttcgatgaggccacaagt

SEQ ID NO: 28924 - DNA, 25 bp, Saccharomyces pastorianus
aagcgtgtacattgcacatagactg

SEQ ID NO: 28925 - DNA, 25 bp, Saccharomyces pastorianus
ggctcaattagcaccactgatcaag

SEQ ID NO: 28926 - DNA, 25 bp, Saccharomyces pastorianus
taagctaagcgtcagaccttcgaat

SEQ ID NO: 28927 - DNA, 25 bp, Saccharomyces pastorianus
gtatcaaccctcagctgtggtatta

SEQ ID NO: 28928 - DNA, 25 bp, Saccharomyces pastorianus
tatgcgccgagtgttcaattgaatc

SEQ ID NO: 28929 - DNA, 25 bp, Saccharomyces pastorianus
gatgatgctacctatagagccgtgt

SEQ ID NO: 28930 - DNA, 25 bp, Saccharomyces pastorianus
gtcaatgttcctttacgagacggta

SEQ ID NO: 28931 - DNA, 25 bp, Saccharomyces pastorianus
ggtgctttgaaactggcctactgaa

SEQ ID NO: 28932 - DNA, 25 bp, Saccharomyces pastorianus
ggtgattccttgtctggtgatcgtc

SEQ ID NO: 28933 - DNA, 25 bp, Saccharomyces pastorianus
gaggattctgctgaggccaaagaca

SEQ ID NO: 28934 - DNA, 25 bp, Saccharomyces pastorianus
gagccgtgttcgaacctgtggtaaa

SEQ ID NO: 28935 - DNA, 25 bp, Saccharomyces pastorianus
gaaggtcatgctaactgtgtcaact

SEQ ID NO: 28936 - DNA, 25 bp, Saccharomyces pastorianus
ttgcttcaacctttccatggaaggt

SEQ ID NO: 28937 - DNA, 25 bp, Saccharomyces pastorianus
gtcgataattatacacccgttgatg

SEQ ID NO: 28938 - DNA, 25 bp, Saccharomyces pastorianus
tgaaaagagcgagattccaccaatg

SEQ ID NO: 28939 - DNA, 25 bp, Saccharomyces pastorianus
gaagcattgcttatagctcctgatg

SEQ ID NO: 28940 - DNA, 25 bp, Saccharomyces pastorianus
attcgtgatctttttgcatacaaca

SEQ ID NO: 28941 - DNA, 25 bp, Saccharomyces pastorianus
gagttgtacgagcattatctgcata

SEQ ID NO: 28942 - DNA, 25 bp, Saccharomyces pastorianus
atcggtgacttggattcgtgatctt

SEQ ID NO: 28943 - DNA, 25 bp, Saccharomyces pastorianus
acaaagccatgtctccatttacttc

SEQ ID NO: 28944 - DNA, 25 bp, Saccharomyces pastorianus
gatgatttcaccgaagcgtacaatg

SEQ ID NO: 28945 - DNA, 25 bp, Saccharomyces pastorianus
aaattctacgaaaaggtcctggatg

SEQ ID NO: 28946 - DNA, 25 bp, Saccharomyces pastorianus
agctcctgatgatgttctagtcgat

SEQ ID NO: 28947 - DNA, 25 bp, Saccharomyces pastorianus
gaagcgccagctgatattacggatg

SEQ ID NO: 28948 - DNA, 25 bp, Saccharomyces pastorianus
gtgcctatgccttacaagtttgtct

SEQ ID NO: 28949 - DNA, 25 bp, Saccharomyces pastorianus
agatccaacctcgagtgctgctgaa

SEQ ID NO: 28950 - DNA, 25 bp, Saccharomyces pastorianus
ggtcaaggaccagatctacctgtat

SEQ ID NO: 28951 - DNA, 25 bp, Saccharomyces pastorianus
tacaatttttgccttagtccccaat

SEQ ID NO: 28952 - DNA, 25 bp, Saccharomyces pastorianus
aatcgcagagatcctggtgtcttgt

SEQ ID NO: 28953 - DNA, 25 bp, Saccharomyces pastorianus
gaacgcagatgtttcctctagtctt

SEQ ID NO: 28954 - DNA, 25 bp, Saccharomyces pastorianus
catctcattcgctattcacggtaac

SEQ ID NO: 28955 - DNA, 25 bp, Saccharomyces pastorianus
gtggactctgtcctagaagacttcc

SEQ ID NO: 28956 - DNA, 25 bp, Saccharomyces pastorianus
aacgtggccctctcgatggaaattg

SEQ ID NO: 28957 - DNA, 25 bp, Saccharomyces pastorianus
tgtatactactgatgtccaccttgc

SEQ ID NO: 28958 - DNA, 25 bp, Saccharomyces pastorianus
aaatccctgctttggtcatctattc

SEQ ID NO: 28959 - DNA, 25 bp, Saccharomyces pastorianus
aaatctggaattcggagggcctcat

SEQ ID NO: 28960 - DNA, 25 bp, Saccharomyces pastorianus
aagtaccttattgatcctctgtccg

SEQ ID NO: 28961 - DNA, 25 bp, Saccharomyces pastorianus
gatcctctgtccgaatgctggtaat

SEQ ID NO: 28962 - DNA, 25 bp, Saccharomyces pastorianus
aggatgagattgtaccaccctttca

SEQ ID NO: 28963 - DNA, 25 bp, Saccharomyces pastorianus
gagacatgtcctagtgccaacaaga

SEQ ID NO: 28964 - DNA, 25 bp, Saccharomyces pastorianus
gtcgacggatccattccatactaag

SEQ ID NO: 28965 - DNA, 25 bp, Saccharomyces pastorianus
gtgtcatgtcacatctgtcgacgga

SEQ ID NO: 28966 - DNA, 25 bp, Saccharomyces pastorianus
tgccctttacattgcttccaaattc

SEQ ID NO: 28967 - DNA, 25 bp, Saccharomyces pastorianus
tcgagtttccgcttggttcacataa

SEQ ID NO: 28968 - DNA, 25 bp, Saccharomyces pastorianus
gtaattcggaaggttcgccaggcga

SEQ ID NO: 28969 - DNA, 25 bp, Saccharomyces pastorianus
aacaccatttttgttcctcagtggg

SEQ ID NO: 28970 - DNA, 25 bp, Saccharomyces pastorianus
gagcactttcaatggcgatttgcac

SEQ ID NO: 28971 - DNA, 25 bp, Saccharomyces pastorianus
agttacatttgtgctggtttctgaa

SEQ ID NO: 28972 - DNA, 25 bp, Saccharomyces pastorianus
tcaaagatccctatatcacctcaat

SEQ ID NO: 28973 - DNA, 25 bp, Saccharomyces pastorianus
aatggcctttcaacaattatctgga

SEQ ID NO: 28974 - DNA, 25 bp, Saccharomyces pastorianus
acctcaatgattctttccagtgtca

SEQ ID NO: 28975 - DNA, 25 bp, Saccharomyces pastorianus
gggacgcaagacctgtctgttgtat

SEQ ID NO: 28976 - DNA, 25 bp, Saccharomyces pastorianus
taattgtgacctgttgctttatttt

SEQ ID NO: 28977 - DNA, 25 bp, Saccharomyces pastorianus
cagtgtcaactttctctctacaata

SEQ ID NO: 28978 - DNA, 25 bp, Saccharomyces pastorianus
atttcccttgaggaccagagcactt

SEQ ID NO: 28979 - DNA, 25 bp, Saccharomyces pastorianus
gtgctggtttctgaactatttccct

SEQ ID NO: 28980 - DNA, 25 bp, Saccharomyces pastorianus
atttgccacttgtctgttagcgtta

SEQ ID NO: 28981 - DNA, 25 bp, Saccharomyces pastorianus
aaagacgagatttcaacctaccaag

SEQ ID NO: 28982 - DNA, 25 bp, Saccharomyces pastorianus
aatacgcatggtttcattacttcaa

SEQ ID NO: 28983 - DNA, 25 bp, Saccharomyces pastorianus
gtgggccatatatttgctactgcag

SEQ ID NO: 28984 - DNA, 25 bp, Saccharomyces pastorianus
gagcctattttgactataccgtatg

SEQ ID NO: 28985 - DNA, 25 bp, Saccharomyces pastorianus
attacttcaaagacacctcgccaag

SEQ ID NO: 28986 - DNA, 25 bp, Saccharomyces pastorianus
acttgaagcacatgcgctaccaaat

SEQ ID NO: 28987 - DNA, 25 bp, Saccharomyces pastorianus
gagtctatgttcactttggcatgct

SEQ ID NO: 28988 - DNA, 25 bp, Saccharomyces pastorianus
ttatcatataatccggtgggccata

SEQ ID NO: 28989 - DNA, 25 bp, Saccharomyces pastorianus
gaaattcccggtatcgattcatcaa

SEQ ID NO: 28990 - DNA, 25 bp, Saccharomyces pastorianus
acgcttacgatgacccgacgtacaa

SEQ ID NO: 28991 - DNA, 25 bp, Saccharomyces pastorianus
aagagtgaatttggtgctgcgccac

SEQ ID NO: 28992 - DNA, 25 bp, Saccharomyces pastorianus
tagactcctttttagacgtgaccaa

SEQ ID NO: 28993 - DNA, 25 bp, Saccharomyces pastorianus
caagaacaaccccatgtttgtcctt

SEQ ID NO: 28994 - DNA, 25 bp, Saccharomyces pastorianus
aggagtttgcaagaccgcacactac

SEQ ID NO: 28995 - DNA, 25 bp, Saccharomyces pastorianus
tggcagtttgttgggcctcagacaa

SEQ ID NO: 28996 - DNA, 25 bp, Saccharomyces pastorianus
gatgacctccctggcagaatacaag

SEQ ID NO: 28997 - DNA, 25 bp, Saccharomyces pastorianus
aacgcgttatgtgctgtaattcctg

SEQ ID NO: 28998 - DNA, 25 bp, Saccharomyces pastorianus
gatcccaatgctcctaaagttccat

SEQ ID NO: 28999 - DNA, 25 bp, Saccharomyces pastorianus
acactacctttcagtttcattcgga

SEQ ID NO: 29000 - DNA, 25 bp, Saccharomyces pastorianus
actacctaggcaatctctgtctgaa

SEQ ID NO: 29001 - DNA, 25 bp, Saccharomyces pastorianus
aaaggctctcctcaattcagtgttg

SEQ ID NO: 29002 - DNA, 25 bp, Saccharomyces pastorianus
tgtaattcctgtcgccatttatgat

SEQ ID NO: 29003 - DNA, 25 bp, Saccharomyces pastorianus
attttcactttctcagctcaagctg

SEQ ID NO: 29004 - DNA, 25 bp, Saccharomyces pastorianus
taaaggtcattcagggcccgatccg

SEQ ID NO: 29005 - DNA, 25 bp, Saccharomyces pastorianus
tgaacactcgggatcacaaccacta

SEQ ID NO: 29006 - DNA, 25 bp, Saccharomyces pastorianus
actacccctggattcgataaccatt

SEQ ID NO: 29007 - DNA, 25 bp, Saccharomyces pastorianus
gttcaatgagacagtgctgcctcca

SEQ ID NO: 29008 - DNA, 25 bp, Saccharomyces pastorianus
ggcaggcgtggtctgattctaacat

SEQ ID NO: 29009 - DNA, 25 bp, Saccharomyces pastorianus
tagactatctccataacgaacttga

SEQ ID NO: 29010 - DNA, 25 bp, Saccharomyces pastorianus
acacaatccctattagcctgtctaa

SEQ ID NO: 29011 - DNA, 25 bp, Saccharomyces pastorianus
tcgtcgactgaaggagctctatggt

SEQ ID NO: 29012 - DNA, 25 bp, Saccharomyces pastorianus
gcagatcgggcacaattttcacttt

SEQ ID NO: 29013 - DNA, 25 bp, Saccharomyces pastorianus
gggcacttttagatgagacaccaga

SEQ ID NO: 29014 - DNA, 25 bp, Saccharomyces pastorianus
ggctctattgacttacctattattg

SEQ ID NO: 29015 - DNA, 25 bp, Saccharomyces pastorianus
gaatctctcggtgaaatgcaaggta

SEQ ID NO: 29016 - DNA, 25 bp, Saccharomyces pastorianus
gcttgtgaagacttggtcgctgcat

SEQ ID NO: 29017 - DNA, 25 bp, Saccharomyces pastorianus
gtcgctgcatatgaatctctcggtg

SEQ ID NO: 29018 - DNA, 25 bp, Saccharomyces pastorianus
gagagctgttgcatctgacgcacaa

SEQ ID NO: 29019 - DNA, 25 bp, Saccharomyces pastorianus
agccatttcacataatcccgatttg

SEQ ID NO: 29020 - DNA, 25 bp, Saccharomyces pastorianus
gaagatgtcctagtggcatgcaaac

SEQ ID NO: 29021 - DNA, 25 bp, Saccharomyces pastorianus
atgggcccgacagtttggtgtgcaa

SEQ ID NO: 29022 - DNA, 25 bp, Saccharomyces pastorianus
gagagcttacagagccatttcacat

SEQ ID NO: 29023 - DNA, 25 bp, Saccharomyces pastorianus
aaatctggcgaaggctctattgact

SEQ ID NO: 29024 - DNA, 25 bp, Saccharomyces pastorianus
tcatatgtgtcactttacctcaagt

SEQ ID NO: 29025 - DNA, 25 bp, Saccharomyces pastorianus
gcacctagtgcggacgatggttagt

SEQ ID NO: 29026 - DNA, 25 bp, Saccharomyces pastorianus
taatgtctacccatcatctccatta

SEQ ID NO: 29027 - DNA, 25 bp, Saccharomyces pastorianus
tactaaagccagttttgcgtgtgaa

SEQ ID NO: 29028 - DNA, 25 bp, Saccharomyces pastorianus
tccattatccttttgggagcaccta

SEQ ID NO: 29029 - DNA, 25 bp, Saccharomyces pastorianus
aagtgctgttcctaacttggcaaca

SEQ ID NO: 29030 - DNA, 25 bp, Saccharomyces pastorianus
gcatttttcatcatgtacgcctaga

SEQ ID NO: 29031 - DNA, 25 bp, Saccharomyces pastorianus
aatgctaacgatgctgatgaccaag

SEQ ID NO: 29032 - DNA, 25 bp, Saccharomyces pastorianus
tgcgtgtgaacgtccctattgaagt

SEQ ID NO: 29033 - DNA, 25 bp, Saccharomyces pastorianus
aatatcccgttcactaatgtctacc

SEQ ID NO: 29034 - DNA, 25 bp, Saccharomyces pastorianus
atactcatcactcttactattggaa

SEQ ID NO: 29035 - DNA, 25 bp, Saccharomyces pastorianus
gatacgactgggagctattactaaa

SEQ ID NO: 29036 - DNA, 25 bp, Saccharomyces pastorianus
gtactacttgaacctgcctgaaaaa

SEQ ID NO: 29037 - DNA, 25 bp, Saccharomyces pastorianus
taacgacacgatgctgtactacttg

SEQ ID NO: 29038 - DNA, 25 bp, Saccharomyces pastorianus
agatctcgaacatctcgtatccttc

SEQ ID NO: 29039 - DNA, 25 bp, Saccharomyces pastorianus
tccaccggctgtctaggattcagaa

SEQ ID NO: 29040 - DNA, 25 bp, Saccharomyces pastorianus
aggtagtcaaggtcagcgacgccac

SEQ ID NO: 29041 - DNA, 25 bp, Saccharomyces pastorianus
aggatttcgatatccaccggctgtc

SEQ ID NO: 29042 - DNA, 25 bp, Saccharomyces pastorianus
gaagctgctttccagaccagcagta

SEQ ID NO: 29043 - DNA, 25 bp, Saccharomyces pastorianus
taatggacgatttcggcaagggccg

SEQ ID NO: 29044 - DNA, 25 bp, Saccharomyces pastorianus
agatggaactcgaccgggacgaacg

SEQ ID NO: 29045 - DNA, 25 bp, Saccharomyces pastorianus
aggctccacaattaccacgggcggt

SEQ ID NO: 29046 - DNA, 25 bp, Saccharomyces pastorianus
acacatttgacgttttctagcgtga

SEQ ID NO: 29047 - DNA, 25 bp, Saccharomyces pastorianus
gacattgtgaacctgttcctgtcca

SEQ ID NO: 29048 - DNA, 25 bp, Saccharomyces pastorianus
atcatgatcgggatgggcctcacgg

SEQ ID NO: 29049 - DNA, 25 bp, Saccharomyces pastorianus
atctggctagcggtaagtcctcgtc

SEQ ID NO: 29050 - DNA, 25 bp, Saccharomyces pastorianus
tccgctacgtctatatactactggc

SEQ ID NO: 29051 - DNA, 25 bp, Saccharomyces pastorianus
actgctgtcaatttttacgctctct

SEQ ID NO: 29052 - DNA, 25 bp, Saccharomyces pastorianus
atgtgctatgatgctttacttggac

SEQ ID NO: 29053 - DNA, 25 bp, Saccharomyces pastorianus
tggtggtgtcatttgtctcctgcat

SEQ ID NO: 29054 - DNA, 25 bp, Saccharomyces pastorianus
gctggtcgctctggcatatgacaag

SEQ ID NO: 29055 - DNA, 25 bp, Saccharomyces pastorianus
agttcaacctactttacggctggct

SEQ ID NO: 29056 - DNA, 25 bp, Saccharomyces pastorianus
taggtgccattcttttcactgcgta

SEQ ID NO: 29057 - DNA, 25 bp, Saccharomyces pastorianus
tgcgtacctgtttatcgacactcaa

SEQ ID NO: 29058 - DNA, 25 bp, Saccharomyces pastorianus
ttatctacacaacctgtcagcagtc

SEQ ID NO: 29059 - DNA, 25 bp, Saccharomyces pastorianus
gtaaagactacttctaccccataca

SEQ ID NO: 29060 - DNA, 25 bp, Saccharomyces pastorianus
gtcacctacgttgatgttaccacta

SEQ ID NO: 29061 - DNA, 25 bp, Saccharomyces pastorianus
taccccacaaagtaccacatcaatg

SEQ ID NO: 29062 - DNA, 25 bp, Saccharomyces pastorianus
gctgccaaaggttccgttgtcggac

SEQ ID NO: 29063 - DNA, 25 bp, Saccharomyces pastorianus
acatcaatggtctccaccgtaaaga

SEQ ID NO: 29064 - DNA, 25 bp, Saccharomyces pastorianus
tgccattgcttctgctgatgttact

SEQ ID NO: 29065 - DNA, 25 bp, Saccharomyces pastorianus
gtcagaataacaccactacaccagg

SEQ ID NO: 29066 - DNA, 25 bp, Saccharomyces pastorianus
acatttgttggtgccgctgccaaag

SEQ ID NO: 29067 - DNA, 25 bp, Saccharomyces pastorianus
tgatgttacttcagacggcgtcacc

SEQ ID NO: 29068 - DNA, 25 bp, Saccharomyces pastorianus
tacaccaggtatcagcacatttgtt

SEQ ID NO: 29069 - DNA, 25 bp, Saccharomyces pastorianus
ggcgctctatttaattgcaaccaat

SEQ ID NO: 29070 - DNA, 25 bp, Saccharomyces pastorianus
gttagatacagagcttccaccgaag

SEQ ID NO: 29071 - DNA, 25 bp, Saccharomyces pastorianus
agccactatggttggtacgccatat

SEQ ID NO: 29072 - DNA, 25 bp, Saccharomyces pastorianus
atccttggagattaagcgtttctta

SEQ ID NO: 29073 - DNA, 25 bp, Saccharomyces pastorianus
aggtgaaccaccatacttgaatgag

SEQ ID NO: 29074 - DNA, 25 bp, Saccharomyces pastorianus
acagattttggattctgcgctaaat

SEQ ID NO: 29075 - DNA, 25 bp, Saccharomyces pastorianus
aaatctgacaacgtcctgttggata

SEQ ID NO: 29076 - DNA, 25 bp, Saccharomyces pastorianus
gaggatcctttaaaggcgctctatt

SEQ ID NO: 29077 - DNA, 25 bp, Saccharomyces pastorianus
atacttcacgctcaccattaacaga

SEQ ID NO: 29078 - DNA, 25 bp, Saccharomyces pastorianus
gtttcttaagcgtttgtctttgcgt

SEQ ID NO: 29079 - DNA, 25 bp, Saccharomyces pastorianus
gaaaacagtcctgccaacgatactt

SEQ ID NO: 29080 - DNA, 25 bp, Saccharomyces pastorianus
gggaggcattgccattgactaatga

SEQ ID NO: 29081 - DNA, 25 bp, Saccharomyces pastorianus
aaggcccacgacagaagaagcggtt

SEQ ID NO: 29082 - DNA, 25 bp, Saccharomyces pastorianus
caagcatgggctgaagtctgaggtc

SEQ ID NO: 29083 - DNA, 25 bp, Saccharomyces pastorianus
aaggctatgaggagctcgtgctaca

SEQ ID NO: 29084 - DNA, 25 bp, Saccharomyces pastorianus
tacagagctccaaagttgcacttca

SEQ ID NO: 29085 - DNA, 25 bp, Saccharomyces pastorianus
gatctttagtgagcgatatcggtaa

SEQ ID NO: 29086 - DNA, 25 bp, Saccharomyces pastorianus
gaagaagcggttgacactgtgaaaa

SEQ ID NO: 29087 - DNA, 25 bp, Saccharomyces pastorianus
atgtctttcaattggcagatttcac

SEQ ID NO: 29088 - DNA, 25 bp, Saccharomyces pastorianus
tgactattctttcttaaggcccacg

SEQ ID NO: 29089 - DNA, 25 bp, Saccharomyces pastorianus
caaagcaaatgtatcttctgggaca

SEQ ID NO: 29090 - DNA, 25 bp, Saccharomyces pastorianus
acgtggcgcctgatactcaattaga

SEQ ID NO: 29091 - DNA, 25 bp, Saccharomyces pastorianus
aactgccccagtgatttcgggtttg

SEQ ID NO: 29092 - DNA, 25 bp, Saccharomyces pastorianus
gtatgtgcagtgtcaattccaagat

SEQ ID NO: 29093 - DNA, 25 bp, Saccharomyces pastorianus
tacgttagtacgaaactgccccagt

SEQ ID NO: 29094 - DNA, 25 bp, Saccharomyces pastorianus
ggtttgcctgccctaatgataaatc

SEQ ID NO: 29095 - DNA, 25 bp, Saccharomyces pastorianus
gatattcgccgatcatggcttgtga

SEQ ID NO: 29096 - DNA, 25 bp, Saccharomyces pastorianus
gatgtagcacgttatattccaagta

SEQ ID NO: 29097 - DNA, 25 bp, Saccharomyces pastorianus
atgtcggtggcgtgctattttcaca

SEQ ID NO: 29098 - DNA, 25 bp, Saccharomyces pastorianus
agtgacgttgcttattctgtaccca

SEQ ID NO: 29099 - DNA, 25 bp, Saccharomyces pastorianus
gaataagactctcatggcgcaaact

SEQ ID NO: 29100 - DNA, 25 bp, Saccharomyces pastorianus
tgtacccacatcatcattttcggtg

SEQ ID NO: 29101 - DNA, 25 bp, Saccharomyces pastorianus
ttacagttagtatcttgcgacgcag

SEQ ID NO: 29102 - DNA, 25 bp, Saccharomyces pastorianus
taagttctgccacgcttgttgacag

SEQ ID NO: 29103 - DNA, 25 bp, Saccharomyces pastorianus
tgggccaagtacacagacggtcttt

SEQ ID NO: 29104 - DNA, 25 bp, Saccharomyces pastorianus
cactgccgtgtgctatctgaacaag

SEQ ID NO: 29105 - DNA, 25 bp, Saccharomyces pastorianus
gacactgaagacttgatcctggatc

SEQ ID NO: 29106 - DNA, 25 bp, Saccharomyces pastorianus
gatactgagtgccaagttccacaac

SEQ ID NO: 29107 - DNA, 25 bp, Saccharomyces pastorianus
gacggtcttttcacgctagacgata

SEQ ID NO: 29108 - DNA, 25 bp, Saccharomyces pastorianus
tggatctacagcctctactggagcc

SEQ ID NO: 29109 - DNA, 25 bp, Saccharomyces pastorianus
agtgcaggcacaagtcctatcgctt

SEQ ID NO: 29110 - DNA, 25 bp, Saccharomyces pastorianus
tactggagcccatcaagcaggactt

SEQ ID NO: 29111 - DNA, 25 bp, Saccharomyces pastorianus
aaacgtgtctattgcatcggaccta

SEQ ID NO: 29112 - DNA, 25 bp, Saccharomyces pastorianus
aatataccgaacagcacgcgtacca

SEQ ID NO: 29113 - DNA, 25 bp, Saccharomyces pastorianus
gattctacgcggtcactaatgtgtt

SEQ ID NO: 29114 - DNA, 25 bp, Saccharomyces pastorianus
gtattgcccgccaagttgagagaca

SEQ ID NO: 29115 - DNA, 25 bp, Saccharomyces pastorianus
gtacgccaccgggaagactactgaa

SEQ ID NO: 29116 - DNA, 25 bp, Saccharomyces pastorianus
cgttggttcttttacagtgcgttgc

SEQ ID NO: 29117 - DNA, 25 bp, Saccharomyces pastorianus
taatcgtgtctgcaacgcgttggtt

SEQ ID NO: 29118 - DNA, 25 bp, Saccharomyces pastorianus
gttgctgaaagtcgtattgcccgcc

SEQ ID NO: 29119 - DNA, 25 bp, Saccharomyces pastorianus
gagctctctaaaacagtggcgattt

SEQ ID NO: 29120 - DNA, 25 bp, Saccharomyces pastorianus
taacgtttttgctcaggaccgacat

SEQ ID NO: 29121 - DNA, 25 bp, Saccharomyces pastorianus
acatcgtaccgctatgcctaaggat

SEQ ID NO: 29122 - DNA, 25 bp, Saccharomyces pastorianus
atacgacttcgaggcagaggacatt

SEQ ID NO: 29123 - DNA, 25 bp, Saccharomyces pastorianus
gagcatttgaccgtgagtacgccac

SEQ ID NO: 29124 - DNA, 25 bp, Saccharomyces pastorianus
aaagaagccatgtaccatctgtggt

SEQ ID NO: 29125 - DNA, 25 bp, Saccharomyces pastorianus
attcctttggtgacgccgatgctaa

SEQ ID NO: 29126 - DNA, 25 bp, Saccharomyces pastorianus
agttatcttggcagcattggtcata

SEQ ID NO: 29127 - DNA, 25 bp, Saccharomyces pastorianus
gttgtccaagaataccgcacccggt

SEQ ID NO: 29128 - DNA, 25 bp, Saccharomyces pastorianus
aaagattcagtgctacctcattgcc

SEQ ID NO: 29129 - DNA, 25 bp, Saccharomyces pastorianus
ggagactaaacattaccagccgtat

SEQ ID NO: 29130 - DNA, 25 bp, Saccharomyces pastorianus
gagagcaacgcttccaatggtgacg

SEQ ID NO: 29131 - DNA, 25 bp, Saccharomyces pastorianus
agacttcccagcaggtagacttaga

SEQ ID NO: 29132 - DNA, 25 bp, Saccharomyces pastorianus
ggtttcgccaattatgacctgccga

SEQ ID NO: 29133 - DNA, 25 bp, Saccharomyces pastorianus
ctcctctactagtacatctctggat

SEQ ID NO: 29134 - DNA, 25 bp, Saccharomyces pastorianus
ggatgggaagtcaagcacctcaaag

SEQ ID NO: 29135 - DNA, 25 bp, Saccharomyces pastorianus
gaccttcagttatcgatgagcgtca

SEQ ID NO: 29136 - DNA, 25 bp, Saccharomyces pastorianus
tatccactgtctgctcagatgggaa

SEQ ID NO: 29137 - DNA, 25 bp, Saccharomyces pastorianus
acttgcggacggaaaactggagatt

SEQ ID NO: 29138 - DNA, 25 bp, Saccharomyces pastorianus
tgacgaatctgatttccctatcctg

SEQ ID NO: 29139 - DNA, 25 bp, Saccharomyces pastorianus
ggtgactccaatgtttctcaaagaa

SEQ ID NO: 29140 - DNA, 25 bp, Saccharomyces pastorianus
ggagattccagagttcatgcatgac

SEQ ID NO: 29141 - DNA, 25 bp, Saccharomyces pastorianus
aattgacgagtctatccactgtctg

SEQ ID NO: 29142 - DNA, 25 bp, Saccharomyces pastorianus
gatctgctacttcgaccttcagtta

SEQ ID NO: 29143 - DNA, 25 bp, Saccharomyces pastorianus
ctgtcgcaaggttttgacgcgtttg

SEQ ID NO: 29144 - DNA, 25 bp, Saccharomyces pastorianus
gactcaagtcagtagcatcaccggt

SEQ ID NO: 29145 - DNA, 25 bp, Saccharomyces pastorianus
ggagacgctactaatgtaccaagac

SEQ ID NO: 29146 - DNA, 25 bp, Saccharomyces pastorianus
ttgggatactacatcttccactcgg

SEQ ID NO: 29147 - DNA, 25 bp, Saccharomyces pastorianus
aagcatccagactaagcgcggtacg

SEQ ID NO: 29148 - DNA, 25 bp, Saccharomyces pastorianus
agcccgttatttgagtgtttcacca

SEQ ID NO: 29149 - DNA, 25 bp, Saccharomyces pastorianus
ttacatactctttgcaagcccgtta

SEQ ID NO: 29150 - DNA, 25 bp, Saccharomyces pastorianus
ccttgactttctactactcgttgta

SEQ ID NO: 29151 - DNA, 25 bp, Saccharomyces pastorianus
cggtttcatgttagcgttcggagat

SEQ ID NO: 29152 - DNA, 25 bp, Saccharomyces pastorianus
actcgttgtatttcgcgacactgtt

SEQ ID NO: 29153 - DNA, 25 bp, Saccharomyces pastorianus
gggctaaatcgcaacatatcaacta

SEQ ID NO: 29154 - DNA, 25 bp, Saccharomyces pastorianus
gcaaggtcgtgggtattttgtcaat

SEQ ID NO: 29155 - DNA, 25 bp, Saccharomyces pastorianus
aactacggatggattcggtttcatg

SEQ ID NO: 29156 - DNA, 25 bp, Saccharomyces pastorianus
caacgatgcgttggttttagtcaat

SEQ ID NO: 29157 - DNA, 25 bp, Saccharomyces pastorianus
attgctggcatctcaggacagaagc

SEQ ID NO: 29158 - DNA, 25 bp, Saccharomyces pastorianus
caagcctgctcaaacatatttctct

SEQ ID NO: 29159 - DNA, 25 bp, Saccharomyces pastorianus
caaagcgtggtctctactacatcgt

SEQ ID NO: 29160 - DNA, 25 bp, Saccharomyces pastorianus
agacatcacgaaggtactttccgcc

SEQ ID NO: 29161 - DNA, 25 bp, Saccharomyces pastorianus
ggccacgatgcctttttgttggaat

SEQ ID NO: 29162 - DNA, 25 bp, Saccharomyces pastorianus
gttacattgccattacgcgtaagct

SEQ ID NO: 29163 - DNA, 25 bp, Saccharomyces pastorianus
atatttctctgcacaaagctacttg

SEQ ID NO: 29164 - DNA, 25 bp, Saccharomyces pastorianus
agcagccttcgctgatcatcggtat

SEQ ID NO: 29165 - DNA, 25 bp, Saccharomyces pastorianus
actacatcgtcttcggactcattaa

SEQ ID NO: 29166 - DNA, 25 bp, Saccharomyces pastorianus
tgatgggcttttcacatactccgaa

SEQ ID NO: 29167 - DNA, 25 bp, Saccharomyces pastorianus
gtaagctccgtcaccggtgaagtga

SEQ ID NO: 29168 - DNA, 25 bp, Saccharomyces pastorianus
ttgttgttaatactgcccgtggtgc

SEQ ID NO: 29169 - DNA, 25 bp, Saccharomyces pastorianus
gagttggtcgctcataacgctaaga

SEQ ID NO: 29170 - DNA, 25 bp, Saccharomyces pastorianus
ggatatcgtgtctgtaaacgtccca

SEQ ID NO: 29171 - DNA, 25 bp, Saccharomyces pastorianus
gcccgtggtgcagtcatagatgaac

SEQ ID NO: 29172 - DNA, 25 bp, Saccharomyces pastorianus
gttttgagcttacctcacatgggta

SEQ ID NO: 29173 - DNA, 25 bp, Saccharomyces pastorianus
acatgggtactcactgtgtggaaac

SEQ ID NO: 29174 - DNA, 25 bp, Saccharomyces pastorianus
gtgtgcttctccctttggttacgac

SEQ ID NO: 29175 - DNA, 25 bp, Saccharomyces pastorianus
gtttttgaagcgctcggatatcgtg

SEQ ID NO: 29176 - DNA, 25 bp, Saccharomyces pastorianus
tagtggcacccaccatctaatcgat

SEQ ID NO: 29177 - DNA, 25 bp, Saccharomyces pastorianus
aatgaccgatgctctacgcagtgga

SEQ ID NO: 29178 - DNA, 25 bp, Saccharomyces pastorianus
caaagaacttttatccatgcctcaa

SEQ ID NO: 29179 - DNA, 25 bp, Saccharomyces pastorianus
gaggagtgacactttcgacttcgaa

SEQ ID NO: 29180 - DNA, 25 bp, Saccharomyces pastorianus
gagaggattgcatgcatcttcaagc

SEQ ID NO: 29181 - DNA, 25 bp, Saccharomyces pastorianus
gaagacacagagaacgcaaccacag

SEQ ID NO: 29182 - DNA, 25 bp, Saccharomyces pastorianus
gaaagtgccactaccaacgataaaa

SEQ ID NO: 29183 - DNA, 25 bp, Saccharomyces pastorianus
aaagctcaagttgtatctccagaca

SEQ ID NO: 29184 - DNA, 25 bp, Saccharomyces pastorianus
atacctttgtcgtcatctagtacag

SEQ ID NO: 29185 - DNA, 25 bp, Saccharomyces pastorianus
gagtggaaactcgtcggcagcagaa

SEQ ID NO: 29186 - DNA, 25 bp, Saccharomyces pastorianus
tcagctgcgactactacgagtggaa

SEQ ID NO: 29187 - DNA, 25 bp, Saccharomyces pastorianus
acagatgaatcacccgccggtgtat

SEQ ID NO: 29188 - DNA, 25 bp, Saccharomyces pastorianus
ggaaagcttctcagcgtaagattca

SEQ ID NO: 29189 - DNA, 25 bp, Saccharomyces pastorianus
tgtccaggacgaactcaaaagctct

SEQ ID NO: 29190 - DNA, 25 bp, Saccharomyces pastorianus
cagcctgtagattttgtagccgcat

SEQ ID NO: 29191 - DNA, 25 bp, Saccharomyces pastorianus
tgatcaccataatctctgcgggcaa

SEQ ID NO: 29192 - DNA, 25 bp, Saccharomyces pastorianus
ggatcacattccagctttggttcaa

SEQ ID NO: 29193 - DNA, 25 bp, Saccharomyces pastorianus
gttctcgcacatccgttttatgcaa

SEQ ID NO: 29194 - DNA, 25 bp, Saccharomyces pastorianus
atgatgccgtacctagcttactatg

SEQ ID NO: 29195 - DNA, 25 bp, Saccharomyces pastorianus
tgcgggcaactccaacgtgtatatc

SEQ ID NO: 29196 - DNA, 25 bp, Saccharomyces pastorianus
atcgccctgatagttctgatccaag

SEQ ID NO: 29197 - DNA, 25 bp, Saccharomyces pastorianus
gtatatcggctcaagggtcctgtac

SEQ ID NO: 29198 - DNA, 25 bp, Saccharomyces pastorianus
ggattcctggctttcttagagactt

SEQ ID NO: 29199 - DNA, 25 bp, Saccharomyces pastorianus
atatcggtcttcctgtttgtggcaa

SEQ ID NO: 29200 - DNA, 25 bp, Saccharomyces pastorianus
aagtttctgtcgatcgttaccacgg

SEQ ID NO: 29201 - DNA, 25 bp, Saccharomyces pastorianus
ggtttcaagcattctgtccattcaa

SEQ ID NO: 29202 - DNA, 25 bp, Saccharomyces pastorianus
taaattcatgccctacggtgcctac

SEQ ID NO: 29203 - DNA, 25 bp, Saccharomyces pastorianus
gtcaccgtcatcattttcattcaag

SEQ ID NO: 29204 - DNA, 25 bp, Saccharomyces pastorianus
ttttggccttcttggttgtcaacaa

SEQ ID NO: 29205 - DNA, 25 bp, Saccharomyces pastorianus
gtgttttgtactctttggcccagac

SEQ ID NO: 29206 - DNA, 25 bp, Saccharomyces pastorianus
tggccgaattctttacgtcctacat

SEQ ID NO: 29207 - DNA, 25 bp, Saccharomyces pastorianus
tatggcgtgttgtctacagctgcat

SEQ ID NO: 29208 - DNA, 25 bp, Saccharomyces pastorianus
agtcttgatcactgttatctctgcc

SEQ ID NO: 29209 - DNA, 25 bp, Saccharomyces pastorianus
ttctttaattcttttggccgtcgtg

SEQ ID NO: 29210 - DNA, 25 bp, Saccharomyces pastorianus
tctgccgctaactcaaacgtttacg

SEQ ID NO: 29211 - DNA, 25 bp, Saccharomyces pastorianus
gaaacagcgtggtatctctcgtgat

SEQ ID NO: 29212 - DNA, 25 bp, Saccharomyces pastorianus
gttcattggctgcatattctgtcat

SEQ ID NO: 29213 - DNA, 25 bp, Saccharomyces pastorianus
acagctacgacaaaggtttcaatta

SEQ ID NO: 29214 - DNA, 25 bp, Saccharomyces pastorianus
taatatgcaaccttgttttgatgct

SEQ ID NO: 29215 - DNA, 25 bp, Saccharomyces pastorianus
attctcccggttcagtgggattcga

SEQ ID NO: 29216 - DNA, 25 bp, Saccharomyces pastorianus
agagagctcaagacaatttcgcctg

SEQ ID NO: 29217 - DNA, 25 bp, Saccharomyces pastorianus
gacaatttcgcctgttcattggctg

SEQ ID NO: 29218 - DNA, 25 bp, Saccharomyces pastorianus
taagggtggtattgcatcattgaat

SEQ ID NO: 29219 - DNA, 25 bp, Saccharomyces pastorianus
atgaaggtcatgtaagccacattga

SEQ ID NO: 29220 - DNA, 25 bp, Saccharomyces pastorianus
gggattcgaagctgcaccatttaaa

SEQ ID NO: 29221 - DNA, 25 bp, Saccharomyces pastorianus
ggtttatgctatcgaattctcccgg

SEQ ID NO: 29222 - DNA, 25 bp, Saccharomyces pastorianus
gccacattgattttgggtttatgct

SEQ ID NO: 29223 - DNA, 25 bp, Saccharomyces pastorianus
aagtttaatcttctaggccgctccg

SEQ ID NO: 29224 - DNA, 25 bp, Saccharomyces pastorianus
gtgaccatgccattcaacttgacta

SEQ ID NO: 29225 - DNA, 25 bp, Saccharomyces pastorianus
gcaacggatcatggactctggcaat

SEQ ID NO: 29226 - DNA, 25 bp, Saccharomyces pastorianus
aactatttcttgttcgtctacggct

SEQ ID NO: 29227 - DNA, 25 bp, Saccharomyces pastorianus
ttgaaactcatcttggtgcccttta

SEQ ID NO: 29228 - DNA, 25 bp, Saccharomyces pastorianus
ggctggtcacctacattcttatttg

SEQ ID NO: 29229 - DNA, 25 bp, Saccharomyces pastorianus
gtgccctttatcaacggtaccaaga

SEQ ID NO: 29230 - DNA, 25 bp, Saccharomyces pastorianus
gttctacttattcatagccttcggc

SEQ ID NO: 29231 - DNA, 25 bp, Saccharomyces pastorianus
gaactgttgtgttacgtcggttaca

SEQ ID NO: 29232 - DNA, 25 bp, Saccharomyces pastorianus
ggtgagcacccgttatgtgttcaat

SEQ ID NO: 29233 - DNA, 25 bp, Saccharomyces pastorianus
ctccggtgctggtgaagacgacata

SEQ ID NO: 29234 - DNA, 25 bp, Saccharomyces pastorianus
gaacatatttgaaccgctgactctt

SEQ ID NO: 29235 - DNA, 25 bp, Saccharomyces pastorianus
atcggctcttcgtgaggaaccttta

SEQ ID NO: 29236 - DNA, 25 bp, Saccharomyces pastorianus
gtcaacccaagatatttgcaacctt

SEQ ID NO: 29237 - DNA, 25 bp, Saccharomyces pastorianus
gattgctggctatttttcaagctat

SEQ ID NO: 29238 - DNA, 25 bp, Saccharomyces pastorianus
catttgttcgtatttggagcctaga

SEQ ID NO: 29239 - DNA, 25 bp, Saccharomyces pastorianus
tgaggtgttccaaaatctgtcagaa

SEQ ID NO: 29240 - DNA, 25 bp, Saccharomyces pastorianus
caaccttctttgtttgccattgaaa

SEQ ID NO: 29241 - DNA, 25 bp, Saccharomyces pastorianus
taagagcagccaaacgtacgaacta

SEQ ID NO: 29242 - DNA, 25 bp, Saccharomyces pastorianus
gctaatagcttcgtacatttgttcg

SEQ ID NO: 29243 - DNA, 25 bp, Saccharomyces pastorianus
aaactatttgttggcactgatgatg

SEQ ID NO: 29244 - DNA, 25 bp, Saccharomyces pastorianus
caaaagtggttctctatcggctctt

SEQ ID NO: 29245 - DNA, 25 bp, Saccharomyces pastorianus
agacgtgtacactacgctttcttac

SEQ ID NO: 29246 - DNA, 25 bp, Saccharomyces pastorianus
ggttttgacaagactagagccagac

SEQ ID NO: 29247 - DNA, 25 bp, Saccharomyces pastorianus
agcgcagttaataaggttttgacaa

SEQ ID NO: 29248 - DNA, 25 bp, Saccharomyces pastorianus
gtcatgacctgttcgggttgttcta

SEQ ID NO: 29249 - DNA, 25 bp, Saccharomyces pastorianus
gagccagacgtttctaagataaata

SEQ ID NO: 29250 - DNA, 25 bp, Saccharomyces pastorianus
acactacgctttcttacgactttat

SEQ ID NO: 29251 - DNA, 25 bp, Saccharomyces pastorianus
aatatatcacttgagcagcaatcag

SEQ ID NO: 29252 - DNA, 25 bp, Saccharomyces pastorianus
ttcgggttgttctagcgcagttaat

SEQ ID NO: 29253 - DNA, 25 bp, Saccharomyces pastorianus
gcagcaatcagtagacgtgtacact

SEQ ID NO: 29254 - DNA, 25 bp, Saccharomyces pastorianus
gactagagccagacgtttctaagat

SEQ ID NO: 29255 - DNA, 25 bp, Saccharomyces pastorianus
caaatcattaccaattcaatgtcgt

SEQ ID NO: 29256 - DNA, 25 bp, Saccharomyces pastorianus
gaaccggtcacatctccagagagtg

SEQ ID NO: 29257 - DNA, 25 bp, Saccharomyces pastorianus
gtggtggtccaaaccatatggctaa

SEQ ID NO: 29258 - DNA, 25 bp, Saccharomyces pastorianus
gtcaagccggccatatgtctagaga

SEQ ID NO: 29259 - DNA, 25 bp, Saccharomyces pastorianus
gaaggctagcggtagattctccaag

SEQ ID NO: 29260 - DNA, 25 bp, Saccharomyces pastorianus
tgtaacaagccaggtcacgtccaaa

SEQ ID NO: 29261 - DNA, 25 bp, Saccharomyces pastorianus
gattctccaaggtttcatgctataa

SEQ ID NO: 29262 - DNA, 25 bp, Saccharomyces pastorianus
gtaccgttcaacgttgtttcaactg

SEQ ID NO: 29263 - DNA, 25 bp, Saccharomyces pastorianus
ggccatttagccgaagattgtgatt

SEQ ID NO: 29264 - DNA, 25 bp, Saccharomyces pastorianus
agactgtactatgccaagaactgtt

SEQ ID NO: 29265 - DNA, 25 bp, Saccharomyces pastorianus
gaaaccggtcacgtcagaagcgaat

SEQ ID NO: 29266 - DNA, 25 bp, Saccharomyces pastorianus
agagactgccaaaacgacaagcttt

SEQ ID NO: 29267 - DNA, 25 bp, Saccharomyces pastorianus
gagctgttatatttggagcctaaag

SEQ ID NO: 29268 - DNA, 25 bp, Saccharomyces pastorianus
gagcctaaagtcactatgttgcgag

SEQ ID NO: 29269 - DNA, 25 bp, Saccharomyces pastorianus
tctgccgtagtagcactagacgtgt

SEQ ID NO: 29270 - DNA, 25 bp, Saccharomyces pastorianus
atggaagtcacatttttgttggctt

SEQ ID NO: 29271 - DNA, 25 bp, Saccharomyces pastorianus
tagccaaccacaaatctgacctagt

SEQ ID NO: 29272 - DNA, 25 bp, Saccharomyces pastorianus
atcatggtacattttgtcaggcaag

SEQ ID NO: 29273 - DNA, 25 bp, Saccharomyces pastorianus
ggtgtatttttacgatctcaacgaa

SEQ ID NO: 29274 - DNA, 25 bp, Saccharomyces pastorianus
gaagatactttgtcactggtagcag

SEQ ID NO: 29275 - DNA, 25 bp, Saccharomyces pastorianus
gcacatactagttccattactggta

SEQ ID NO: 29276 - DNA, 25 bp, Saccharomyces pastorianus
gaatccaaatctttagccaaccaca

SEQ ID NO: 29277 - DNA, 25 bp, Saccharomyces pastorianus
attcaagatttagactctgccgtag

SEQ ID NO: 29278 - DNA, 25 bp, Saccharomyces pastorianus
aggacgaccagaatagctcagcaga

SEQ ID NO: 29279 - DNA, 25 bp, Saccharomyces pastorianus
ggaagttaatctgcctagtagcaat

SEQ ID NO: 29280 - DNA, 25 bp, Saccharomyces pastorianus
ggtataccggacatcaagcatggca

SEQ ID NO: 29281 - DNA, 25 bp, Saccharomyces pastorianus
ttcccaaactttgacttatctgacg

SEQ ID NO: 29282 - DNA, 25 bp, Saccharomyces pastorianus
taggcggtgatcagatacacacttg

SEQ ID NO: 29283 - DNA, 25 bp, Saccharomyces pastorianus
ggaagttcgatttgacagccgacaa

SEQ ID NO: 29284 - DNA, 25 bp, Saccharomyces pastorianus
aaagcccttacacatcaacgcggag

SEQ ID NO: 29285 - DNA, 25 bp, Saccharomyces pastorianus
gatgttaacagacccgtcattccaa

SEQ ID NO: 29286 - DNA, 25 bp, Saccharomyces pastorianus
gacagccgacaagaatgacacattt

SEQ ID NO: 29287 - DNA, 25 bp, Saccharomyces pastorianus
aaatctcacattttggcagggaagt

SEQ ID NO: 29288 - DNA, 25 bp, Saccharomyces pastorianus
ttatctgacgactcaaagcccttac

SEQ ID NO: 29289 - DNA, 25 bp, Saccharomyces pastorianus
aatctctcaaaagatgcccaccgat

SEQ ID NO: 29290 - DNA, 25 bp, Saccharomyces pastorianus
aagatggtgctttgccgttaagaac

SEQ ID NO: 29291 - DNA, 25 bp, Saccharomyces pastorianus
agcatatcttcattatctcctgtac

SEQ ID NO: 29292 - DNA, 25 bp, Saccharomyces pastorianus
atttgatcccactgctcagctgaat

SEQ ID NO: 29293 - DNA, 25 bp, Saccharomyces pastorianus
gaagctgagaacgtcttgcaacatt

SEQ ID NO: 29294 - DNA, 25 bp, Saccharomyces pastorianus
atcatcgtgggcgaaggtgtctctt

SEQ ID NO: 29295 - DNA, 25 bp, Saccharomyces pastorianus
ttatctcctgtaccttacggcaatg

SEQ ID NO: 29296 - DNA, 25 bp, Saccharomyces pastorianus
gattccggcagaaacggtcctcgtt

SEQ ID NO: 29297 - DNA, 25 bp, Saccharomyces pastorianus
taccagcacggttacagcatcattc

SEQ ID NO: 29298 - DNA, 25 bp, Saccharomyces pastorianus
gttccccagcaacagcaatttgatc

SEQ ID NO: 29299 - DNA, 25 bp, Saccharomyces pastorianus
tccggtcaacctctagttactggta

SEQ ID NO: 29300 - DNA, 25 bp, Saccharomyces pastorianus
aagtactgctgcctcttataagatt

SEQ ID NO: 29301 - DNA, 25 bp, Saccharomyces pastorianus
gttgaaatcactccattagcacatg

SEQ ID NO: 29302 - DNA, 25 bp, Saccharomyces pastorianus
gcttgtttagagtactcggtgccgt

SEQ ID NO: 29303 - DNA, 25 bp, Saccharomyces pastorianus
tcggtgccgttgtcaaaggtgctac

SEQ ID NO: 29304 - DNA, 25 bp, Saccharomyces pastorianus
ggacggcatcttgagcagattcact

SEQ ID NO: 29305 - DNA, 25 bp, Saccharomyces pastorianus
tggcccaagcagaagcctttagtat

SEQ ID NO: 29306 - DNA, 25 bp, Saccharomyces pastorianus
ttatactacttatccctgttattgg

SEQ ID NO: 29307 - DNA, 25 bp, Saccharomyces pastorianus
acagccttcacaaatggccaagttg

SEQ ID NO: 29308 - DNA, 25 bp, Saccharomyces pastorianus
tttgcacttggacaacttcatcgtt

SEQ ID NO: 29309 - DNA, 25 bp, Saccharomyces pastorianus
attgcaatttatccgtgtttcacca

SEQ ID NO: 29310 - DNA, 25 bp, Saccharomyces pastorianus
accttctaaggtcgtcagcttgttt

SEQ ID NO: 29311 - DNA, 25 bp, Saccharomyces pastorianus
agccggatgctctcaagactgattt

SEQ ID NO: 29312 - DNA, 25 bp, Saccharomyces pastorianus
aaagctaccgaaagggctgccgctg

SEQ ID NO: 29313 - DNA, 25 bp, Saccharomyces pastorianus
agagacgacccaatgagcaagttca

SEQ ID NO: 29314 - DNA, 25 bp, Saccharomyces pastorianus
gaatgagctgctacacgcatcgaac

SEQ ID NO: 29315 - DNA, 25 bp, Saccharomyces pastorianus
atcgaacaaggaccagccggatgct

SEQ ID NO: 29316 - DNA, 25 bp, Saccharomyces pastorianus
aaggctcaacgctgcacagagacga

SEQ ID NO: 29317 - DNA, 25 bp, Saccharomyces pastorianus
caatgcagtaaaggcggcaccgctt

SEQ ID NO: 29318 - DNA, 25 bp, Saccharomyces pastorianus
agcaggacctggttaacgagcagca

SEQ ID NO: 29319 - DNA, 25 bp, Saccharomyces pastorianus
gcagcagaagctaaacacccggttg

SEQ ID NO: 29320 - DNA, 25 bp, Saccharomyces pastorianus
tcatctatactaaagcagcctgcgg

SEQ ID NO: 29321 - DNA, 25 bp, Saccharomyces pastorianus
gccgcacccaagaattcacacagga

SEQ ID NO: 29322 - DNA, 25 bp, Saccharomyces pastorianus
catgatcgcccagctcgggttgcaa

SEQ ID NO: 29323 - DNA, 25 bp, Saccharomyces pastorianus
gaaagactttaactacagtgcaggg

SEQ ID NO: 29324 - DNA, 25 bp, Saccharomyces pastorianus
gactttgcgtgtaacggtaacatcg

SEQ ID NO: 29325 - DNA, 25 bp, Saccharomyces pastorianus
ggtaacatcgtcaaggaccctgaaa

SEQ ID NO: 29326 - DNA, 25 bp, Saccharomyces pastorianus
aaggtgcttaagaaagactttgcgt

SEQ ID NO: 29327 - DNA, 25 bp, Saccharomyces pastorianus
agattatccagctgcagggtgacca

SEQ ID NO: 29328 - DNA, 25 bp, Saccharomyces pastorianus
taactacagtgcagggtgtgcccgc

SEQ ID NO: 29329 - DNA, 25 bp, Saccharomyces pastorianus
aaatgggtgagattatccagctgca

SEQ ID NO: 29330 - DNA, 25 bp, Saccharomyces pastorianus
aagtgtgcgagttcatgatcgccca

SEQ ID NO: 29331 - DNA, 25 bp, Saccharomyces pastorianus
gtgtgcccgcagagtacgacctgaa

SEQ ID NO: 29332 - DNA, 25 bp, Saccharomyces pastorianus
cagggtgaccagagagcaaaagtgt

SEQ ID NO: 29333 - DNA, 25 bp, Saccharomyces pastorianus
gttccgctaaaccagttctacttga

SEQ ID NO: 29334 - DNA, 25 bp, Saccharomyces pastorianus
gaaatcgccaccacaacaagtgttc

SEQ ID NO: 29335 - DNA, 25 bp, Saccharomyces pastorianus
aacactgttccaaggacgtcacgga

SEQ ID NO: 29336 - DNA, 25 bp, Saccharomyces pastorianus
ggcagcctctacaatccaattggta

SEQ ID NO: 29337 - DNA, 25 bp, Saccharomyces pastorianus
aatgttttgatctctactgcaagca

SEQ ID NO: 29338 - DNA, 25 bp, Saccharomyces pastorianus
gcaagggcttgggtaaccatgtcat

SEQ ID NO: 29339 - DNA, 25 bp, Saccharomyces pastorianus
gcaacctttggaattctcgtccgaa

SEQ ID NO: 29340 - DNA, 25 bp, Saccharomyces pastorianus
gtggccaacgctaccaatgttttga

SEQ ID NO: 29341 - DNA, 25 bp, Saccharomyces pastorianus
aaacctttgttatcgttggcactat

SEQ ID NO: 29342 - DNA, 25 bp, Saccharomyces pastorianus
ttccatccattccaaagctcaagac

SEQ ID NO: 29343 - DNA, 25 bp, Saccharomyces pastorianus
caacatttacgtgttgacgtcccca

SEQ ID NO: 29344 - DNA, 25 bp, Saccharomyces pastorianus
ggagtgtccatgattaccagcatac

SEQ ID NO: 29345 - DNA, 25 bp, Saccharomyces pastorianus
gattacatgcctggagttctaccta

SEQ ID NO: 29346 - DNA, 25 bp, Saccharomyces pastorianus
gggctggcggtatacttggaatttt

SEQ ID NO: 29347 - DNA, 25 bp, Saccharomyces pastorianus
gttaacaccttcaccgaacatagat

SEQ ID NO: 29348 - DNA, 25 bp, Saccharomyces pastorianus
ggagttctacctatatctggtcgaa

SEQ ID NO: 29349 - DNA, 25 bp, Saccharomyces pastorianus
tcttcactggatgggcaatgtctca

SEQ ID NO: 29350 - DNA, 25 bp, Saccharomyces pastorianus
caggtcttttatttatgggcgcgaa

SEQ ID NO: 29351 - DNA, 25 bp, Saccharomyces pastorianus
aatgtctcagcatgctcagcacttg

SEQ ID NO: 29352 - DNA, 25 bp, Saccharomyces pastorianus
ggacagcaaggcttccttccaaaat

SEQ ID NO: 29353 - DNA, 25 bp, Saccharomyces pastorianus
ccataatatgtttggcctgctttta

SEQ ID NO: 29354 - DNA, 25 bp, Saccharomyces pastorianus
attcgtttcaatatcttgctcccct

SEQ ID NO: 29355 - DNA, 25 bp, Saccharomyces pastorianus
ggatcatcatcaatctcaccgaagg

SEQ ID NO: 29356 - DNA, 25 bp, Saccharomyces pastorianus
ttaccggttgccaagcttacaacgc

SEQ ID NO: 29357 - DNA, 25 bp, Saccharomyces pastorianus
gggtcaactttactcttacatggcg

SEQ ID NO: 29358 - DNA, 25 bp, Saccharomyces pastorianus
gggttccgaaagcacgaagcctaga

SEQ ID NO: 29359 - DNA, 25 bp, Saccharomyces pastorianus
aagagctgcgctccaggtcaagatg

SEQ ID NO: 29360 - DNA, 25 bp, Saccharomyces pastorianus
aagtccttaattctgctgtcgacaa

SEQ ID NO: 29361 - DNA, 25 bp, Saccharomyces pastorianus
gtcatagaaacacttccaaccgcag

SEQ ID NO: 29362 - DNA, 25 bp, Saccharomyces pastorianus
agcggcattctagaattctcggtat

SEQ ID NO: 29363 - DNA, 25 bp, Saccharomyces pastorianus
gattcggatcttttttcacattaga

SEQ ID NO: 29364 - DNA, 25 bp, Saccharomyces pastorianus
aacgagctgcatttggtcaagacta

SEQ ID NO: 29365 - DNA, 25 bp, Saccharomyces pastorianus
agcagtgtcgtggagagcagcatca

SEQ ID NO: 29366 - DNA, 25 bp, Saccharomyces pastorianus
agcagtcctgctacgtttgatacaa

SEQ ID NO: 29367 - DNA, 25 bp, Saccharomyces pastorianus
gaggttacgcccagaatcaatgcat

SEQ ID NO: 29368 - DNA, 25 bp, Saccharomyces pastorianus
tggaaagcctacattactggacaat

SEQ ID NO: 29369 - DNA, 25 bp, Saccharomyces pastorianus
gacaagagaaccacagccacatatt

SEQ ID NO: 29370 - DNA, 25 bp, Saccharomyces pastorianus
atgataggcacccagaggtttccac

SEQ ID NO: 29371 - DNA, 25 bp, Saccharomyces pastorianus
atcatacggacgcacctgtagaggt

SEQ ID NO: 29372 - DNA, 25 bp, Saccharomyces pastorianus
tgacacctaattcacctgcgaaatc

SEQ ID NO: 29373 - DNA, 25 bp, Saccharomyces pastorianus
caactaactccgcaattggctcaaa

SEQ ID NO: 29374 - DNA, 25 bp, Saccharomyces pastorianus
caagagcctactcgcgtgacaagag

SEQ ID NO: 29375 - DNA, 25 bp, Saccharomyces pastorianus
gaccagtcagccatctatcaacaag

SEQ ID NO: 29376 - DNA, 25 bp, Saccharomyces pastorianus
taggcccgtttctatgtctttcaaa

SEQ ID NO: 29377 - DNA, 25 bp, Saccharomyces pastorianus
ggacagccatcgtctccaaagaagg

SEQ ID NO: 29378 - DNA, 25 bp, Saccharomyces pastorianus
gaagaaagacgctctagttcccgcc

SEQ ID NO: 29379 - DNA, 25 bp, Saccharomyces pastorianus
gaaatcgggcatcttcgtacaaaat

SEQ ID NO: 29380 - DNA, 25 bp, Saccharomyces pastorianus
agaccatactgtttacttccaaaga

SEQ ID NO: 29381 - DNA, 25 bp, Saccharomyces pastorianus
cgctccagcatcgattaccaatgat

SEQ ID NO: 29382 - DNA, 25 bp, Saccharomyces pastorianus
ggatgcaacgttgtccaggccggaa

SEQ ID NO: 29383 - DNA, 25 bp, Saccharomyces pastorianus
acaaaatgccggtcctgccggaaat

SEQ ID NO: 29384 - DNA, 25 bp, Saccharomyces pastorianus
cccactcgcaactgtacatgaaatc

SEQ ID NO: 29385 - DNA, 25 bp, Saccharomyces pastorianus
tggcgaccaagatcaacactgcact

SEQ ID NO: 29386 - DNA, 25 bp, Saccharomyces pastorianus
gcatgcacagcgtgtagcgtttggc

SEQ ID NO: 29387 - DNA, 25 bp, Saccharomyces pastorianus
gaattaccgtcgatctttctcaacc

SEQ ID NO: 29388 - DNA, 25 bp, Saccharomyces pastorianus
tgactacacgtaggattgacaccat

SEQ ID NO: 29389 - DNA, 25 bp, Saccharomyces pastorianus
gtatattactgtccaactttgccca

SEQ ID NO: 29390 - DNA, 25 bp, Saccharomyces pastorianus
gattgattcagcatgtctaacagac

SEQ ID NO: 29391 - DNA, 25 bp, Saccharomyces pastorianus
aaagtttacggatcaggcatactat

SEQ ID NO: 29392 - DNA, 25 bp, Saccharomyces pastorianus
gaatgtaatcttcttatgatcgaac

SEQ ID NO: 29393 - DNA, 25 bp, Saccharomyces pastorianus
aatcgtacttgctattggaattccc

SEQ ID NO: 29394 - DNA, 25 bp, Saccharomyces pastorianus
gagaaaaatccccttattagcaatt

SEQ ID NO: 29395 - DNA, 25 bp, Saccharomyces pastorianus
gcccaacgccttcatagacagatat

SEQ ID NO: 29396 - DNA, 25 bp, Saccharomyces pastorianus
gaactgacccatttaaagtcacgtt

SEQ ID NO: 29397 - DNA, 25 bp, Saccharomyces pastorianus
tggaattccctactccaaattacgg

SEQ ID NO: 29398 - DNA, 25 bp, Saccharomyces pastorianus
aggattgacaccatagatcaccatt

SEQ ID NO: 29399 - DNA, 25 bp, Saccharomyces pastorianus
ccaccccaagtcataaccttattga

SEQ ID NO: 29400 - DNA, 25 bp, Saccharomyces pastorianus
aatcacacatctgtagtggtcgaaa

SEQ ID NO: 29401 - DNA, 25 bp, Saccharomyces pastorianus
gagagggtctcggtattcaaggtaa

SEQ ID NO: 29402 - DNA, 25 bp, Saccharomyces pastorianus
gaaacaaagacaggctcacctttcc

SEQ ID NO: 29403 - DNA, 25 bp, Saccharomyces pastorianus
gattgttgggaaagacgccccagaa

SEQ ID NO: 29404 - DNA, 25 bp, Saccharomyces pastorianus
tgaccaattgttaaggcagagacca

SEQ ID NO: 29405 - DNA, 25 bp, Saccharomyces pastorianus
gatgatctgttcaagaaatacccat

SEQ ID NO: 29406 - DNA, 25 bp, Saccharomyces pastorianus
acccatacggtttccatgttcagaa

SEQ ID NO: 29407 - DNA, 25 bp, Saccharomyces pastorianus
gaaacttgccaaacactataacatg

SEQ ID NO: 29408 - DNA, 25 bp, Saccharomyces pastorianus
ttgggaaagctaatcacacatctgt

SEQ ID NO: 29409 - DNA, 25 bp, Saccharomyces pastorianus
gtattagcgagcctatctttgccaa

SEQ ID NO: 29410 - DNA, 25 bp, Saccharomyces pastorianus
gctagaccgtaatagaaggctcaaa

SEQ ID NO: 29411 - DNA, 25 bp, Saccharomyces pastorianus
ggtttattacaaatgctagaccgta

SEQ ID NO: 29412 - DNA, 25 bp, Saccharomyces pastorianus
aaccgagtggcaaagcggacatccc

SEQ ID NO: 29413 - DNA, 25 bp, Saccharomyces pastorianus
atcacaatctgcagaccgttataaa

SEQ ID NO: 29414 - DNA, 25 bp, Saccharomyces pastorianus
gataaacccaacgtgtactcatttg

SEQ ID NO: 29415 - DNA, 25 bp, Saccharomyces pastorianus
tagaaggctcaaaaaggccccagaa

SEQ ID NO: 29416 - DNA, 25 bp, Saccharomyces pastorianus
gtctttgattttgtttttacttgcg

SEQ ID NO: 29417 - DNA, 25 bp, Saccharomyces pastorianus
gagttagctgacatgttcaatgaca

SEQ ID NO: 29418 - DNA, 25 bp, Saccharomyces pastorianus
atgtctaatcatcgcaatccaaact

SEQ ID NO: 29419 - DNA, 25 bp, Saccharomyces pastorianus
aaagccatactggagttagctgaca

SEQ ID NO: 29420 - DNA, 25 bp, Saccharomyces pastorianus
gcctggtctgtcgatagataaaccc

SEQ ID NO: 29421 - DNA, 25 bp, Saccharomyces pastorianus
ggctgagggagtctatcgttccaat

SEQ ID NO: 29422 - DNA, 25 bp, Saccharomyces pastorianus
acgatctagagattccgctaccaga

SEQ ID NO: 29423 - DNA, 25 bp, Saccharomyces pastorianus
agcggcacgtaccatttgaactctg

SEQ ID NO: 29424 - DNA, 25 bp, Saccharomyces pastorianus
attagatctatcaatccagccgcgt

SEQ ID NO: 29425 - DNA, 25 bp, Saccharomyces pastorianus
tggaacgaggccatcccaaggacaa

SEQ ID NO: 29426 - DNA, 25 bp, Saccharomyces pastorianus
gattcatagaccaccattctgccat

SEQ ID NO: 29427 - DNA, 25 bp, Saccharomyces pastorianus
acagctgaaccattgccagtcgagg

SEQ ID NO: 29428 - DNA, 25 bp, Saccharomyces pastorianus
agccgcgttgtacgattgccatatc

SEQ ID NO: 29429 - DNA, 25 bp, Saccharomyces pastorianus
acaattaactccaacacttcttcat

SEQ ID NO: 29430 - DNA, 25 bp, Saccharomyces pastorianus
cagtctgctcgatatgttctcatta

SEQ ID NO: 29431 - DNA, 25 bp, Saccharomyces pastorianus
attggatttatcaccagcggcacgt

SEQ ID NO: 29432 - DNA, 25 bp, Saccharomyces pastorianus
gtcttttgcctggtgatttcccaga

SEQ ID NO: 29433 - DNA, 25 bp, Saccharomyces pastorianus
caaattccttccttttgccagataa

SEQ ID NO: 29434 - DNA, 25 bp, Saccharomyces pastorianus
tcttccctcaatcaaggtggcgtaa

SEQ ID NO: 29435 - DNA, 25 bp, Saccharomyces pastorianus
taattatacagctcccttagccgtt

SEQ ID NO: 29436 - DNA, 25 bp, Saccharomyces pastorianus
gaatggcctcttgctaaatgtgatt

SEQ ID NO: 29437 - DNA, 25 bp, Saccharomyces pastorianus
gttttcaacccattacatcttacag

SEQ ID NO: 29438 - DNA, 25 bp, Saccharomyces pastorianus
tagccgtttatgaacagctctcttc

SEQ ID NO: 29439 - DNA, 25 bp, Saccharomyces pastorianus
aatcaagtctatggtgttcgttaca

SEQ ID NO: 29440 - DNA, 25 bp, Saccharomyces pastorianus
gtgaacgtatgtactggccgtgaat

SEQ ID NO: 29441 - DNA, 25 bp, Saccharomyces pastorianus
aatctgggttcgatggtcttttgcc

SEQ ID NO: 29442 - DNA, 25 bp, Saccharomyces pastorianus
tgtcacgtattgtcgccttggttaa

SEQ ID NO: 29443 - DNA, 25 bp, Saccharomyces pastorianus
gggattgaacctacgcgagcagacc

SEQ ID NO: 29444 - DNA, 25 bp, Saccharomyces pastorianus
ggcacgacgcttccatgggattgaa

SEQ ID NO: 29445 - DNA, 25 bp, Saccharomyces pastorianus
taaaggaccacttgctttcatccat

SEQ ID NO: 29446 - DNA, 25 bp, Saccharomyces pastorianus
atggagaccatttcagcaacgctaa

SEQ ID NO: 29447 - DNA, 25 bp, Saccharomyces pastorianus
aacactgctcagtggctttcgaact

SEQ ID NO: 29448 - DNA, 25 bp, Saccharomyces pastorianus
aactggacttaggacttactggcga

SEQ ID NO: 29449 - DNA, 25 bp, Saccharomyces pastorianus
ggagccccaaatttatgacaccatt

SEQ ID NO: 29450 - DNA, 25 bp, Saccharomyces pastorianus
acgcagggatgctaccgggagactt

SEQ ID NO: 29451 - DNA, 25 bp, Saccharomyces pastorianus
gacaccattaacgttcagtaccgag

SEQ ID NO: 29452 - DNA, 25 bp, Saccharomyces pastorianus
tgggctctctctcgaacatgaagtt

SEQ ID NO: 29453 - DNA, 25 bp, Saccharomyces pastorianus
ggcctcgacactgcctgtataaagg

SEQ ID NO: 29454 - DNA, 25 bp, Saccharomyces pastorianus
ataagcttcccacccaaaatcgcaa

SEQ ID NO: 29455 - DNA, 25 bp, Saccharomyces pastorianus
agcttcacgatgttatctcaggaga

SEQ ID NO: 29456 - DNA, 25 bp, Saccharomyces pastorianus
gtatccacatgaaattgcagaggca

SEQ ID NO: 29457 - DNA, 25 bp, Saccharomyces pastorianus
gagacttgatggtctttccccgtta

SEQ ID NO: 29458 - DNA, 25 bp, Saccharomyces pastorianus
ttgacttgtttatccggagacttga

SEQ ID NO: 29459 - DNA, 25 bp, Saccharomyces pastorianus
tcgatcccgatacaataagcttccc

SEQ ID NO: 29460 - DNA, 25 bp, Saccharomyces pastorianus
gacagttcatggacaagcttcacga

SEQ ID NO: 29461 - DNA, 25 bp, Saccharomyces pastorianus
gagattatgaaccttcgcaagctga

SEQ ID NO: 29462 - DNA, 25 bp, Saccharomyces pastorianus
tcatgtcccgggtatttggacgcat

SEQ ID NO: 29463 - DNA, 25 bp, Saccharomyces pastorianus
aacatttcaaacagtctgccctttg

SEQ ID NO: 29464 - DNA, 25 bp, Saccharomyces pastorianus
agataacgtcaatccgccgcctcat

SEQ ID NO: 29465 - DNA, 25 bp, Saccharomyces pastorianus
attacaatcaaagtggcaacgagcc

SEQ ID NO: 29466 - DNA, 25 bp, Saccharomyces pastorianus
tgctcgtaaacggaagaacctgagt

SEQ ID NO: 29467 - DNA, 25 bp, Saccharomyces pastorianus
acaagacatgggatctggagactat

SEQ ID NO: 29468 - DNA, 25 bp, Saccharomyces pastorianus
tagaagtcatctgccgaacgaggat

SEQ ID NO: 29469 - DNA, 25 bp, Saccharomyces pastorianus
cgaaatggagtctgttatgaacggt

SEQ ID NO: 29470 - DNA, 25 bp, Saccharomyces pastorianus
ggaaagcacaacagactctactagg

SEQ ID NO: 29471 - DNA, 25 bp, Saccharomyces pastorianus
tttattggaggatggtggctctaaa

SEQ ID NO: 29472 - DNA, 25 bp, Saccharomyces pastorianus
aagggccggtaaatctagaagtcat

SEQ ID NO: 29473 - DNA, 25 bp, Saccharomyces pastorianus
tcaagttttgtaaagccgcgtaggc

SEQ ID NO: 29474 - DNA, 25 bp, Saccharomyces pastorianus
gtaggccttataatagcgacggtat

SEQ ID NO: 29475 - DNA, 25 bp, Saccharomyces pastorianus
agttgaggcgaccaaggaaagcaca

SEQ ID NO: 29476 - DNA, 25 bp, Saccharomyces pastorianus
gcgagatggcgctaaggagatacct

SEQ ID NO: 29477 - DNA, 25 bp, Saccharomyces pastorianus
aaaatgagggcgctgactttccatc

SEQ ID NO: 29478 - DNA, 25 bp, Saccharomyces pastorianus
ctgcggctcactgctcaatgagaat

SEQ ID NO: 29479 - DNA, 25 bp, Saccharomyces pastorianus
agatttctcctgaagccgttagaag

SEQ ID NO: 29480 - DNA, 25 bp, Saccharomyces pastorianus
gagcggttcaagatttctcctgaag

SEQ ID NO: 29481 - DNA, 25 bp, Saccharomyces pastorianus
gttagttccaatccaaacgcatctg

SEQ ID NO: 29482 - DNA, 25 bp, Saccharomyces pastorianus
tttccatcccaccagatcataagtg

SEQ ID NO: 29483 - DNA, 25 bp, Saccharomyces pastorianus
caaactttcccgagatgacagcatc

SEQ ID NO: 29484 - DNA, 25 bp, Saccharomyces pastorianus
aaatggaggctttgaggctattgaa

SEQ ID NO: 29485 - DNA, 25 bp, Saccharomyces pastorianus
gggaacatcattcaaggcaattgtc

SEQ ID NO: 29486 - DNA, 25 bp, Saccharomyces pastorianus
gcatctgattttgcggagcggttca

SEQ ID NO: 29487 - DNA, 25 bp, Saccharomyces pastorianus
tcaaacagccgagcaagggtgtctt

SEQ ID NO: 29488 - DNA, 25 bp, Saccharomyces pastorianus
gcgacttgcgagagttctttgcttt

SEQ ID NO: 29489 - DNA, 25 bp, Saccharomyces pastorianus
gagcaaagaccgctataccttcact

SEQ ID NO: 29490 - DNA, 25 bp, Saccharomyces pastorianus
cggcgacgtcgttgctgataatttc

SEQ ID NO: 29491 - DNA, 25 bp, Saccharomyces pastorianus
ggttatatcgccatcggctcagaaa

SEQ ID NO: 29492 - DNA, 25 bp, Saccharomyces pastorianus
gacaggcccatatgcaatttcttgg

SEQ ID NO: 29493 - DNA, 25 bp, Saccharomyces pastorianus
taccttcactcagccaagcggttaa

SEQ ID NO: 29494 - DNA, 25 bp, Saccharomyces pastorianus
cattagctttacgaaggcttccttt

SEQ ID NO: 29495 - DNA, 25 bp, Saccharomyces pastorianus
ggattcttgaagtcattccctgcaa

SEQ ID NO: 29496 - DNA, 25 bp, Saccharomyces pastorianus
gaccggaacattcagcatccatatt

SEQ ID NO: 29497 - DNA, 25 bp, Saccharomyces pastorianus
aacgattgttacctcgacaggccca

SEQ ID NO: 29498 - DNA, 25 bp, Saccharomyces pastorianus
gaggaacgctgcttataactcagat

SEQ ID NO: 29499 - DNA, 25 bp, Saccharomyces pastorianus
tggttattgatttcccacaatgtgt

SEQ ID NO: 29500 - DNA, 25 bp, Saccharomyces pastorianus
gtgggctcattcattgtgatttcaa

SEQ ID NO: 29501 - DNA, 25 bp, Saccharomyces pastorianus
atgagttagttcaggcttccggatt

SEQ ID NO: 29502 - DNA, 25 bp, Saccharomyces pastorianus
gagacgttgattgtattcgccgttt

SEQ ID NO: 29503 - DNA, 25 bp, Saccharomyces pastorianus
cgctttctagcggtgttggaaacct

SEQ ID NO: 29504 - DNA, 25 bp, Saccharomyces pastorianus
aaaccagactcatcaatgctcgata

SEQ ID NO: 29505 - DNA, 25 bp, Saccharomyces pastorianus
cagacggtttcggagatggttacaa

SEQ ID NO: 29506 - DNA, 25 bp, Saccharomyces pastorianus
agacgccgactactattttcaaaga

SEQ ID NO: 29507 - DNA, 25 bp, Saccharomyces pastorianus
attccgaatctggtgatgacagttc

SEQ ID NO: 29508 - DNA, 25 bp, Saccharomyces pastorianus
atggttacaaatacgcctatcccga

SEQ ID NO: 29509 - DNA, 25 bp, Saccharomyces pastorianus
gattgacattcaacgccactttagt

SEQ ID NO: 29510 - DNA, 25 bp, Saccharomyces pastorianus
ggtagtggccaagaattctcagatg

SEQ ID NO: 29511 - DNA, 25 bp, Saccharomyces pastorianus
gcactgcgtctcacactgataataa

SEQ ID NO: 29512 - DNA, 25 bp, Saccharomyces pastorianus
aaccatgaggacgacaacggcaacg

SEQ ID NO: 29513 - DNA, 25 bp, Saccharomyces pastorianus
gaaaccttagagctcgaggacattc

SEQ ID NO: 29514 - DNA, 25 bp, Saccharomyces pastorianus
actgatggtgaaaccgaccagccat

SEQ ID NO: 29515 - DNA, 25 bp, Saccharomyces pastorianus
gaggacattcccatcgaaattgaca

SEQ ID NO: 29516 - DNA, 25 bp, Saccharomyces pastorianus
acagaaattttctccgatgacgatg

SEQ ID NO: 29517 - DNA, 25 bp, Saccharomyces pastorianus
gaccagccatctatcttacaagaag

SEQ ID NO: 29518 - DNA, 25 bp, Saccharomyces pastorianus
gtgatctttccgatggtagtggcca

SEQ ID NO: 29519 - DNA, 25 bp, Saccharomyces pastorianus
agaagccactcgtcaaatgcaagat

SEQ ID NO: 29520 - DNA, 25 bp, Saccharomyces pastorianus
gaagcacacagctcattacgtggga

SEQ ID NO: 29521 - DNA, 25 bp, Saccharomyces pastorianus
ttcaaggtccctgtattgtcacaag

SEQ ID NO: 29522 - DNA, 25 bp, Saccharomyces pastorianus
gtggacgcaatctttggctttagtt

SEQ ID NO: 29523 - DNA, 25 bp, Saccharomyces pastorianus
aagaccttgtgtattgtggacgcaa

SEQ ID NO: 29524 - DNA, 25 bp, Saccharomyces pastorianus
gtattcgttattgctggacctggta

SEQ ID NO: 29525 - DNA, 25 bp, Saccharomyces pastorianus
ggataagggtccaatctcacagcct

SEQ ID NO: 29526 - DNA, 25 bp, Saccharomyces pastorianus
ttgtatctctaactgttcccaaacc

SEQ ID NO: 29527 - DNA, 25 bp, Saccharomyces pastorianus
acaagaccgtattcccattgtttct

SEQ ID NO: 29528 - DNA, 25 bp, Saccharomyces pastorianus
cattgtttctgtagatgtccccaca

SEQ ID NO: 29529 - DNA, 25 bp, Saccharomyces pastorianus
aaaccctgcggttcttgtatctcta

SEQ ID NO: 29530 - DNA, 25 bp, Saccharomyces pastorianus
tatgccgccaatttcctttgaagga

SEQ ID NO: 29531 - DNA, 25 bp, Saccharomyces pastorianus
tataccgctcgcaaaggctgtggaa

SEQ ID NO: 29532 - DNA, 25 bp, Saccharomyces pastorianus
gttccagttttgtagagacctcacc

SEQ ID NO: 29533 - DNA, 25 bp, Saccharomyces pastorianus
gattttggtaacgtcgctcttagga

SEQ ID NO: 29534 - DNA, 25 bp, Saccharomyces pastorianus
gaagtgcatgtggatccatctttat

SEQ ID NO: 29535 - DNA, 25 bp, Saccharomyces pastorianus
agggcttatgggttctataccgctc

SEQ ID NO: 29536 - DNA, 25 bp, Saccharomyces pastorianus
gaagctccacgctggcagaaagcaa

SEQ ID NO: 29537 - DNA, 25 bp, Saccharomyces pastorianus
gcatccttacatttcagctgtggtt

SEQ ID NO: 29538 - DNA, 25 bp, Saccharomyces pastorianus
atattgttgcatcccattatcgacg

SEQ ID NO: 29539 - DNA, 25 bp, Saccharomyces pastorianus
ggatctaccgtcattgtttccagat

SEQ ID NO: 29540 - DNA, 25 bp, Saccharomyces pastorianus
tacagattccgagtgtgcatttgca

SEQ ID NO: 29541 - DNA, 25 bp, Saccharomyces pastorianus
agactgacgaggcagcatccttaca

SEQ ID NO: 29542 - DNA, 25 bp, Saccharomyces pastorianus
gtgaataacgctgccgctggtccat

SEQ ID NO: 29543 - DNA, 25 bp, Saccharomyces pastorianus
gcgtgaacgataaggctgccgtgaa

SEQ ID NO: 29544 - DNA, 25 bp, Saccharomyces pastorianus
ctgactttgtcccaggatggtactt

SEQ ID NO: 29545 - DNA, 25 bp, Saccharomyces pastorianus
gttgccactgttgccatagctaaga

SEQ ID NO: 29546 - DNA, 25 bp, Saccharomyces pastorianus
ccacttctactcatactactcataa

SEQ ID NO: 29547 - DNA, 25 bp, Saccharomyces pastorianus
tattcggtgttaccgctggtagcgc

SEQ ID NO: 29548 - DNA, 25 bp, Saccharomyces pastorianus
aagttttcctcagttaccgctattg

SEQ ID NO: 29549 - DNA, 25 bp, Saccharomyces pastorianus
tgattttactactaccctgactttg

SEQ ID NO: 29550 - DNA, 25 bp, Saccharomyces pastorianus
tattgctctagctactgttgccact

SEQ ID NO: 29551 - DNA, 25 bp, Saccharomyces pastorianus
aggatggtactttgctcaccaccac

SEQ ID NO: 29552 - DNA, 25 bp, Saccharomyces pastorianus
atcaccacaccacttatggcgtgaa

SEQ ID NO: 29553 - DNA, 25 bp, Saccharomyces pastorianus
gatttaacggtacttcgtcatccaa

SEQ ID NO: 29554 - DNA, 25 bp, Saccharomyces pastorianus
gtggtcgtccatgaaggtcgttctc

SEQ ID NO: 29555 - DNA, 25 bp, Saccharomyces pastorianus
gagcaccagagactttacttgtaca

SEQ ID NO: 29556 - DNA, 25 bp, Saccharomyces pastorianus
aaggtgatttcgttgccactagcaa

SEQ ID NO: 29557 - DNA, 25 bp, Saccharomyces pastorianus
caagccgtttcatatccgatgtttt

SEQ ID NO: 29558 - DNA, 25 bp, Saccharomyces pastorianus
gggtacttgggctacttacgatgat

SEQ ID NO: 29559 - DNA, 25 bp, Saccharomyces pastorianus
tacgaggctaactcccaaggtgatt

SEQ ID NO: 29560 - DNA, 25 bp, Saccharomyces pastorianus
aaacgctgtcaagcacaactcgatc

SEQ ID NO: 29561 - DNA, 25 bp, Saccharomyces pastorianus
tccggtcattatattgcccactgta

SEQ ID NO: 29562 - DNA, 25 bp, Saccharomyces pastorianus
gcctaacgcctattatctcttgtat

SEQ ID NO: 29563 - DNA, 25 bp, Saccharomyces pastorianus
atgacggccgacaatattacttcgt

SEQ ID NO: 29564 - DNA, 25 bp, Saccharomyces pastorianus
gaccacctcgtattttgggagaact

SEQ ID NO: 29565 - DNA, 25 bp, Saccharomyces pastorianus
gtgccagttcccgtactaattacga

SEQ ID NO: 29566 - DNA, 25 bp, Saccharomyces pastorianus
gtgctcccgttaagggaccacctcg

SEQ ID NO: 29567 - DNA, 25 bp, Saccharomyces pastorianus
gcacggacaacctaacgtaagtacg

SEQ ID NO: 29568 - DNA, 25 bp, Saccharomyces pastorianus
gaattcaatgcaagatcggcaaatt

SEQ ID NO: 29569 - DNA, 25 bp, Saccharomyces pastorianus
aaattatcaaccaggcgtgccagtt

SEQ ID NO: 29570 - DNA, 25 bp, Saccharomyces pastorianus
aatgcatagcctgttggagatggaa

SEQ ID NO: 29571 - DNA, 25 bp, Saccharomyces pastorianus
taagtacgacattaaccggtgctcc

SEQ ID NO: 29572 - DNA, 25 bp, Saccharomyces pastorianus
accagataggacgttcacatttgaa

SEQ ID NO: 29573 - DNA, 25 bp, Saccharomyces pastorianus
gtatcgttaagtcaataatcggtgt

SEQ ID NO: 29574 - DNA, 25 bp, Saccharomyces pastorianus
agcgattgacttctgtaaggaattc

SEQ ID NO: 29575 - DNA, 25 bp, Saccharomyces pastorianus
tggtgcaaccaggaacaatgagatc

SEQ ID NO: 29576 - DNA, 25 bp, Saccharomyces pastorianus
agaattatccttgcgacatgctggt

SEQ ID NO: 29577 - DNA, 25 bp, Saccharomyces pastorianus
ggccaagtacatttcagactgctca

SEQ ID NO: 29578 - DNA, 25 bp, Saccharomyces pastorianus
tgcgacatgctggttgcaagttgtt

SEQ ID NO: 29579 - DNA, 25 bp, Saccharomyces pastorianus
gctcaattgtaaaattcgctcggaa

SEQ ID NO: 29580 - DNA, 25 bp, Saccharomyces pastorianus
taatgtggaagaccccttatggcaa

SEQ ID NO: 29581 - DNA, 25 bp, Saccharomyces pastorianus
gttatttaccaagagcggtcgtcgt

SEQ ID NO: 29582 - DNA, 25 bp, Saccharomyces pastorianus
gtatgcattaatgaccccagaactg

SEQ ID NO: 29583 - DNA, 25 bp, Saccharomyces pastorianus
tttactataccctatattgtggtta

SEQ ID NO: 29584 - DNA, 25 bp, Saccharomyces pastorianus
aaaatgttacaatcaccatggtgca

SEQ ID NO: 29585 - DNA, 25 bp, Saccharomyces pastorianus
gatccaatagtttacgtcgtgtcat

SEQ ID NO: 29586 - DNA, 25 bp, Saccharomyces pastorianus
gtacagatagcacactttccaagga

SEQ ID NO: 29587 - DNA, 25 bp, Saccharomyces pastorianus
taacgaccgccacaactaataacaa

SEQ ID NO: 29588 - DNA, 25 bp, Saccharomyces pastorianus
agatatgccatttacgagccggaat

SEQ ID NO: 29589 - DNA, 25 bp, Saccharomyces pastorianus
tcaagctggtgtccgagaggttttt

SEQ ID NO: 29590 - DNA, 25 bp, Saccharomyces pastorianus
atgttctgctgctactcaagctggt

SEQ ID NO: 29591 - DNA, 25 bp, Saccharomyces pastorianus
ttgaaaacctttctctcttcaccaa

SEQ ID NO: 29592 - DNA, 25 bp, Saccharomyces pastorianus
agtaggtaccaaggctgatctcaga

SEQ ID NO: 29593 - DNA, 25 bp, Saccharomyces pastorianus
ccacatccacatcccaataatagta

SEQ ID NO: 29594 - DNA, 25 bp, Saccharomyces pastorianus
aaagagaccaccaccgatgaactaa

SEQ ID NO: 29595 - DNA, 25 bp, Saccharomyces pastorianus
gagccggaatccaatctgcagaaat

SEQ ID NO: 29596 - DNA, 25 bp, Saccharomyces pastorianus
accaagatggccacaaagacgcatt

SEQ ID NO: 29597 - DNA, 25 bp, Saccharomyces pastorianus
agatatgtctttctaccagcactgg

SEQ ID NO: 29598 - DNA, 25 bp, Saccharomyces pastorianus
gctactgcagtaccaccatcaagaa

SEQ ID NO: 29599 - DNA, 25 bp, Saccharomyces pastorianus
tttacgtattcatctctcggttcat

SEQ ID NO: 29600 - DNA, 25 bp, Saccharomyces pastorianus
ccagcactggctgaacggtggttta

SEQ ID NO: 29601 - DNA, 25 bp, Saccharomyces pastorianus
gttcatctactcagggcggtttttc

SEQ ID NO: 29602 - DNA, 25 bp, Saccharomyces pastorianus
atttcccacgactgctcaagcaagg

SEQ ID NO: 29603 - DNA, 25 bp, Saccharomyces pastorianus
gtggtattcttgtatgcgcggtgat

SEQ ID NO: 29604 - DNA, 25 bp, Saccharomyces pastorianus
attcgataaatctcgggcctggctt

SEQ ID NO: 29605 - DNA, 25 bp, Saccharomyces pastorianus
ggagacatcagttcatgcccaggac

SEQ ID NO: 29606 - DNA, 25 bp, Saccharomyces pastorianus
ttaaggccaggtgtgctactgcagt

SEQ ID NO: 29607 - DNA, 25 bp, Saccharomyces pastorianus
cggtttttctgctttatcttcaaat

SEQ ID NO: 29608 - DNA, 25 bp, Saccharomyces pastorianus
agaaggctccactaatgcgttgaag

SEQ ID NO: 29609 - DNA, 25 bp, Saccharomyces pastorianus
tagtgtggcattggctaccgctcaa

SEQ ID NO: 29610 - DNA, 25 bp, Saccharomyces pastorianus
tgatgtcaccgatgatttgctaaga

SEQ ID NO: 29611 - DNA, 25 bp, Saccharomyces pastorianus
gttcgtttgacatctccaacaacag

SEQ ID NO: 29612 - DNA, 25 bp, Saccharomyces pastorianus
agggttcgcgtttatcgatttcaag

SEQ ID NO: 29613 - DNA, 25 bp, Saccharomyces pastorianus
ggaagatttcgtcgccatgtccaaa

SEQ ID NO: 29614 - DNA, 25 bp, Saccharomyces pastorianus
aaggactctgagaacttttcgggca

SEQ ID NO: 29615 - DNA, 25 bp, Saccharomyces pastorianus
cgtggattccaataaccgtactaag

SEQ ID NO: 29616 - DNA, 25 bp, Saccharomyces pastorianus
aacccaccctcaagaattctattcg

SEQ ID NO: 29617 - DNA, 25 bp, Saccharomyces pastorianus
gctaataggcgtccacccgtggatt

SEQ ID NO: 29618 - DNA, 25 bp, Saccharomyces pastorianus
gaagatccgtatggcaacattcgag

SEQ ID NO: 29619 - DNA, 25 bp, Saccharomyces pastorianus
gaactgccaaacctggtggcgcgaa

SEQ ID NO: 29620 - DNA, 25 bp, Saccharomyces pastorianus
gaacccacaagaggcaattccagta

SEQ ID NO: 29621 - DNA, 25 bp, Saccharomyces pastorianus
tagactatatgagctgtccgcagaa

SEQ ID NO: 29622 - DNA, 25 bp, Saccharomyces pastorianus
aaccgctacggatcacctgggtaag

SEQ ID NO: 29623 - DNA, 25 bp, Saccharomyces pastorianus
gcaacagtcgtcaaggaggcgcctg

SEQ ID NO: 29624 - DNA, 25 bp, Saccharomyces pastorianus
gggtaagacacaatcttccgattct

SEQ ID NO: 29625 - DNA, 25 bp, Saccharomyces pastorianus
gatggcctgagtggcactacaacca

SEQ ID NO: 29626 - DNA, 25 bp, Saccharomyces pastorianus
aagcaccccaatattggcctggtta

SEQ ID NO: 29627 - DNA, 25 bp, Saccharomyces pastorianus
gaaaagcccttgaatgaaaccacta

SEQ ID NO: 29628 - DNA, 25 bp, Saccharomyces pastorianus
tagaaccgctggtacgggcacggaa

SEQ ID NO: 29629 - DNA, 25 bp, Saccharomyces pastorianus
gaaaccactatagctgagaacccac

SEQ ID NO: 29630 - DNA, 25 bp, Saccharomyces pastorianus
atgcttcgaggcaccaactgaattc

SEQ ID NO: 29631 - DNA, 25 bp, Saccharomyces pastorianus
gagctacttctctaacggattttcg

SEQ ID NO: 29632 - DNA, 25 bp, Saccharomyces pastorianus
actccccaattgactgggtctgtaa

SEQ ID NO: 29633 - DNA, 25 bp, Saccharomyces pastorianus
agtaccgtcgttctatgcttcgagg

SEQ ID NO: 29634 - DNA, 25 bp, Saccharomyces pastorianus
attttctgtagcaccttacttccaa

SEQ ID NO: 29635 - DNA, 25 bp, Saccharomyces pastorianus
gggtctgtaaagttcgccgtcattt

SEQ ID NO: 29636 - DNA, 25 bp, Saccharomyces pastorianus
agttgctctattgggtggttggaaa

SEQ ID NO: 29637 - DNA, 25 bp, Saccharomyces pastorianus
aagccaactttctctgagctacttc

SEQ ID NO: 29638 - DNA, 25 bp, Saccharomyces pastorianus
gtatgacgcctgttggtgctacaaa

SEQ ID NO: 29639 - DNA, 25 bp, Saccharomyces pastorianus
gggcttcgaattgggcagtaccgtc

SEQ ID NO: 29640 - DNA, 25 bp, Saccharomyces pastorianus
gattttcgtgctcagaacctcatga

SEQ ID NO: 29641 - DNA, 25 bp, Saccharomyces pastorianus
cgacaagctcgtggacatggatttc

SEQ ID NO: 29642 - DNA, 25 bp, Saccharomyces pastorianus
atgaagacgggtccaatccagggcc

SEQ ID NO: 29643 - DNA, 25 bp, Saccharomyces pastorianus
gcccatattcatcccacgaggagta

SEQ ID NO: 29644 - DNA, 25 bp, Saccharomyces pastorianus
tttcatgccaatatccgctctaatc

SEQ ID NO: 29645 - DNA, 25 bp, Saccharomyces pastorianus
gaggctttcaacctacaaatccaac

SEQ ID NO: 29646 - DNA, 25 bp, Saccharomyces pastorianus
atctatcagtggtgtggctctagca

SEQ ID NO: 29647 - DNA, 25 bp, Saccharomyces pastorianus
acctggcgaccgtgttcattgtgaa

SEQ ID NO: 29648 - DNA, 25 bp, Saccharomyces pastorianus
agacggcgggactggtctcatgcta

SEQ ID NO: 29649 - DNA, 25 bp, Saccharomyces pastorianus
tattgtattaactggcacacctgcc

SEQ ID NO: 29650 - DNA, 25 bp, Saccharomyces pastorianus
gagaccgacggattcaagtttcaat

SEQ ID NO: 29651 - DNA, 25 bp, Saccharomyces pastorianus
aaacacttgtccaacgtcgctgaga

SEQ ID NO: 29652 - DNA, 25 bp, Saccharomyces pastorianus
gcaaaccctgatactcatgatgcta

SEQ ID NO: 29653 - DNA, 25 bp, Saccharomyces pastorianus
acccgctgaactctgtaccaaatat

SEQ ID NO: 29654 - DNA, 25 bp, Saccharomyces pastorianus
caatgcgggacagactacacagact

SEQ ID NO: 29655 - DNA, 25 bp, Saccharomyces pastorianus
tcatcgccaacatctacatctttat

SEQ ID NO: 29656 - DNA, 25 bp, Saccharomyces pastorianus
tagtatgaatatgtccaccccatcg

SEQ ID NO: 29657 - DNA, 25 bp, Saccharomyces pastorianus
atatgatgatctcacccatgctgtt

SEQ ID NO: 29658 - DNA, 25 bp, Saccharomyces pastorianus
aagtgcttcaagttctcaatttagt

SEQ ID NO: 29659 - DNA, 25 bp, Saccharomyces pastorianus
gaaatgacttttcaagtgccatgtc

SEQ ID NO: 29660 - DNA, 25 bp, Saccharomyces pastorianus
tgcgggatagtaccttcaagtgctt

SEQ ID NO: 29661 - DNA, 25 bp, Saccharomyces pastorianus
gaaaacgcaggatatccctccatta

SEQ ID NO: 29662 - DNA, 25 bp, Saccharomyces pastorianus
ccctccattaactcaagaccgataa

SEQ ID NO: 29663 - DNA, 25 bp, Saccharomyces pastorianus
gaacaagtacgatactcctgcttcg

SEQ ID NO: 29664 - DNA, 25 bp, Saccharomyces pastorianus
gataccgatgcaaatgactccgatt

SEQ ID NO: 29665 - DNA, 25 bp, Saccharomyces pastorianus
gaatgctcagggttcactgtctatg

SEQ ID NO: 29666 - DNA, 25 bp, Saccharomyces pastorianus
atgggagccgtaaatcttcactgaa

SEQ ID NO: 29667 - DNA, 25 bp, Saccharomyces pastorianus
aaacgaccgacacctcagaggactt

SEQ ID NO: 29668 - DNA, 25 bp, Saccharomyces pastorianus
aagtagcaattctggttcgagggat

SEQ ID NO: 29669 - DNA, 25 bp, Saccharomyces pastorianus
tcacttcagcatccgagttgggtaa

SEQ ID NO: 29670 - DNA, 25 bp, Saccharomyces pastorianus
gcatttagctgaccaaacgaccgac

SEQ ID NO: 29671 - DNA, 25 bp, Saccharomyces pastorianus
gaaacgacgcctgacaaatccattt

SEQ ID NO: 29672 - DNA, 25 bp, Saccharomyces pastorianus
agaagcactccgcttgattctcaat

SEQ ID NO: 29673 - DNA, 25 bp, Saccharomyces pastorianus
ctccgattcagctagtcgagaacta

SEQ ID NO: 29674 - DNA, 25 bp, Saccharomyces pastorianus
agaccattgggctatctcccagtat

SEQ ID NO: 29675 - DNA, 25 bp, Saccharomyces pastorianus
aagagatcgttgagggtggctaccc

SEQ ID NO: 29676 - DNA, 25 bp, Saccharomyces pastorianus
atgggacaactagtttggcctcacc

SEQ ID NO: 29677 - DNA, 25 bp, Saccharomyces pastorianus
gtggctaccctttacatgcaggaga

SEQ ID NO: 29678 - DNA, 25 bp, Saccharomyces pastorianus
agcctgacgttcatattcccatgat

SEQ ID NO: 29679 - DNA, 25 bp, Saccharomyces pastorianus
aaggataaacgtcacactgcatggg

SEQ ID NO: 29680 - DNA, 25 bp, Saccharomyces pastorianus
ttgattcttattgtcgttcacgccc

SEQ ID NO: 29681 - DNA, 25 bp, Saccharomyces pastorianus
ttctcgacgataccatggcatctta

SEQ ID NO: 29682 - DNA, 25 bp, Saccharomyces pastorianus
tcaccgttcgggtcaaacagcatca

SEQ ID NO: 29683 - DNA, 25 bp, Saccharomyces pastorianus
gttcatggactgaatctccgttggt

SEQ ID NO: 29684 - DNA, 25 bp, Saccharomyces pastorianus
gcatcaatctgcttgttctcgacga

SEQ ID NO: 29685 - DNA, 25 bp, Saccharomyces pastorianus
ctcaagtgttttgcccagactgtaa

SEQ ID NO: 29686 - DNA, 25 bp, Saccharomyces pastorianus
gtgctcgaaaacttaacgtacgtag

SEQ ID NO: 29687 - DNA, 25 bp, Saccharomyces pastorianus
gcccagactgtaatgagagacttca

SEQ ID NO: 29688 - DNA, 25 bp, Saccharomyces pastorianus
tgactctcaagtgttttgcccagac

SEQ ID NO: 29689 - DNA, 25 bp, Saccharomyces pastorianus
gataacgacgttttgagagttgcaa

SEQ ID NO: 29690 - DNA, 25 bp, Saccharomyces pastorianus
ccatttaaccaaagggaagtgctcg

SEQ ID NO: 29691 - DNA, 25 bp, Saccharomyces pastorianus
aatacagcaaaattacgccatcatc

SEQ ID NO: 29692 - DNA, 25 bp, Saccharomyces pastorianus
tctgacaagcctgactctcaagtgt

SEQ ID NO: 29693 - DNA, 25 bp, Saccharomyces pastorianus
attacgccatcatcatatgccccag

SEQ ID NO: 29694 - DNA, 25 bp, Saccharomyces pastorianus
aagcctgactctcaagtgttttgcc

SEQ ID NO: 29695 - DNA, 25 bp, Saccharomyces pastorianus
cctgtggctacccatttaaccaaag

SEQ ID NO: 29696 - DNA, 25 bp, Saccharomyces pastorianus
atttgccgttcattggttacactta

SEQ ID NO: 29697 - DNA, 25 bp, Saccharomyces pastorianus
attctgttctgaaaccccacaagag

SEQ ID NO: 29698 - DNA, 25 bp, Saccharomyces pastorianus
gtacgccagattatatcgcgcctga

SEQ ID NO: 29699 - DNA, 25 bp, Saccharomyces pastorianus
tcatccgtttttccgtggtgtcgat

SEQ ID NO: 29700 - DNA, 25 bp, Saccharomyces pastorianus
gccgacttttaacgcatgctgatca

SEQ ID NO: 29701 - DNA, 25 bp, Saccharomyces pastorianus
aaatcacgccgtttgatggcttact

SEQ ID NO: 29702 - DNA, 25 bp, Saccharomyces pastorianus
ggaagatcttatccgccgactttta

SEQ ID NO: 29703 - DNA, 25 bp, Saccharomyces pastorianus
agaacgtacctgattctccagctat

SEQ ID NO: 29704 - DNA, 25 bp, Saccharomyces pastorianus
gttgagctccattacggataccagg

SEQ ID NO: 29705 - DNA, 25 bp, Saccharomyces pastorianus
taccaggttcttcccaacagacgag

SEQ ID NO: 29706 - DNA, 25 bp, Saccharomyces pastorianus
ggcttactctacagtgggtacgcca

SEQ ID NO: 29707 - DNA, 25 bp, Saccharomyces pastorianus
gtattgtccgttacctctgataagt

SEQ ID NO: 29708 - DNA, 25 bp, Saccharomyces pastorianus
gatgcttccagaccaactttgattt

SEQ ID NO: 29709 - DNA, 25 bp, Saccharomyces pastorianus
gcttctaccttttcttatggtgctg

SEQ ID NO: 29710 - DNA, 25 bp, Saccharomyces pastorianus
gtatactccggtgttttcactccag

SEQ ID NO: 29711 - DNA, 25 bp, Saccharomyces pastorianus
aattctacttcttcatccattgcaa

SEQ ID NO: 29712 - DNA, 25 bp, Saccharomyces pastorianus
gatttcttctagctctgttatcaga

SEQ ID NO: 29713 - DNA, 25 bp, Saccharomyces pastorianus
cagagaacgctgtcggtgccggtta

SEQ ID NO: 29714 - DNA, 25 bp, Saccharomyces pastorianus
aattgtctacgatggcggttactcc

SEQ ID NO: 29715 - DNA, 25 bp, Saccharomyces pastorianus
tcgttgtttcttcaggttccagcaa

SEQ ID NO: 29716 - DNA, 25 bp, Saccharomyces pastorianus
gtattttcgaaaacggcgcaccaat

SEQ ID NO: 29717 - DNA, 25 bp, Saccharomyces pastorianus
gtcactgaagactctgcttacgcta

SEQ ID NO: 29718 - DNA, 25 bp, Saccharomyces pastorianus
tattggactaatactattcccgttt

SEQ ID NO: 29719 - DNA, 25 bp, Saccharomyces pastorianus
aatctatggcgtgagcggtactata

SEQ ID NO: 29720 - DNA, 25 bp, Saccharomyces pastorianus
tattcccgttttccgtgtataacat

SEQ ID NO: 29721 - DNA, 25 bp, Saccharomyces pastorianus
gattcgccgtttttagcaagacagc

SEQ ID NO: 29722 - DNA, 25 bp, Saccharomyces pastorianus
ggcaaattgggactacttggcaaat

SEQ ID NO: 29723 - DNA, 25 bp, Saccharomyces pastorianus
gcacgacacttattgcctataaaga

SEQ ID NO: 29724 - DNA, 25 bp, Saccharomyces pastorianus
cgtattttattcttccccgatgata

SEQ ID NO: 29725 - DNA, 25 bp, Saccharomyces pastorianus
actgtgtctcttgtttactgttatc

SEQ ID NO: 29726 - DNA, 25 bp, Saccharomyces pastorianus
ttcgtgaaattctctaccatcttaa

SEQ ID NO: 29727 - DNA, 25 bp, Saccharomyces pastorianus
aaacgcaaacgcagtcgattcgccg

SEQ ID NO: 29728 - DNA, 25 bp, Saccharomyces pastorianus
agacagcaaagtcctcttagaactt

SEQ ID NO: 29729 - DNA, 25 bp, Saccharomyces pastorianus
gcgattggaggcagtacgagttcaa

SEQ ID NO: 29730 - DNA, 25 bp, Saccharomyces pastorianus
ttgaccaaccctagcaagctacgag

SEQ ID NO: 29731 - DNA, 25 bp, Saccharomyces pastorianus
gatgagggcgaagctatcgacacaa

SEQ ID NO: 29732 - DNA, 25 bp, Saccharomyces pastorianus
gggtagtagacaacgcaactttgat

SEQ ID NO: 29733 - DNA, 25 bp, Saccharomyces pastorianus
gtaagaataatctgcccttgaccaa

SEQ ID NO: 29734 - DNA, 25 bp, Saccharomyces pastorianus
aactggcaatcacggatcttcacct

SEQ ID NO: 29735 - DNA, 25 bp, Saccharomyces pastorianus
tacgagttcaactccaactggcaat

SEQ ID NO: 29736 - DNA, 25 bp, Saccharomyces pastorianus
tatcgacacaagcaaattctctccc

SEQ ID NO: 29737 - DNA, 25 bp, Saccharomyces pastorianus
accatcgtctaacaacggtgcgatt

SEQ ID NO: 29738 - DNA, 25 bp, Saccharomyces pastorianus
gaaggataagcacctgtccatcgac

SEQ ID NO: 29739 - DNA, 25 bp, Saccharomyces pastorianus
tccatcgactgcgtctactgctggg

SEQ ID NO: 29740 - DNA, 25 bp, Saccharomyces pastorianus
aactcttctctacaagctgcaggtg

SEQ ID NO: 29741 - DNA, 25 bp, Saccharomyces pastorianus
taccggactggttgggttacgccat

SEQ ID NO: 29742 - DNA, 25 bp, Saccharomyces pastorianus
tactgagttgcatctgtatcgggat

SEQ ID NO: 29743 - DNA, 25 bp, Saccharomyces pastorianus
ttgttaagagctcagtaccccacga

SEQ ID NO: 29744 - DNA, 25 bp, Saccharomyces pastorianus
gcatcaacgccatgttaggtgtcac

SEQ ID NO: 29745 - DNA, 25 bp, Saccharomyces pastorianus
acgacagcttgctttctgtgattag

SEQ ID NO: 29746 - DNA, 25 bp, Saccharomyces pastorianus
gaatttcgttcattacttgcaagcc

SEQ ID NO: 29747 - DNA, 25 bp, Saccharomyces pastorianus
ccagaattcgcatcaagacctctta

SEQ ID NO: 29748 - DNA, 25 bp, Saccharomyces pastorianus
gacctcttattctcggcgttaaaat

SEQ ID NO: 29749 - DNA, 25 bp, Saccharomyces pastorianus
ttatctgcttcatccattcaccaaa

SEQ ID NO: 29750 - DNA, 25 bp, Saccharomyces pastorianus
gatggttccatatctatgctactga

SEQ ID NO: 29751 - DNA, 25 bp, Saccharomyces pastorianus
gcaactgcaacaagctcaggcccaa

SEQ ID NO: 29752 - DNA, 25 bp, Saccharomyces pastorianus
ttggatgaaactgaacggcggtcgt

SEQ ID NO: 29753 - DNA, 25 bp, Saccharomyces pastorianus
gtcatccaaatccacctaacgagaa

SEQ ID NO: 29754 - DNA, 25 bp, Saccharomyces pastorianus
acaacacggtgattcgcattacgat

SEQ ID NO: 29755 - DNA, 25 bp, Saccharomyces pastorianus
aagccaatcgctaccagttacaaca

SEQ ID NO: 29756 - DNA, 25 bp, Saccharomyces pastorianus
tcaatactcatcacctgacaatcac

SEQ ID NO: 29757 - DNA, 25 bp, Saccharomyces pastorianus
cgccaacaacgcaactcaagacatg

SEQ ID NO: 29758 - DNA, 25 bp, Saccharomyces pastorianus
aagcttctaagctcgatccaacttc

SEQ ID NO: 29759 - DNA, 25 bp, Saccharomyces pastorianus
gacaatcaccatcagtatactcagc

SEQ ID NO: 29760 - DNA, 25 bp, Saccharomyces pastorianus
tttcctgatactaatgctaacggtc

SEQ ID NO: 29761 - DNA, 25 bp, Saccharomyces pastorianus
gcggtcgtggctgggatttatcaat

SEQ ID NO: 29762 - DNA, 25 bp, Saccharomyces pastorianus
gaattgttgccccagggacaaagga

SEQ ID NO: 29763 - DNA, 25 bp, Saccharomyces pastorianus
gacaagatccagaccctgcaggata

SEQ ID NO: 29764 - DNA, 25 bp, Saccharomyces pastorianus
gcaaggtgagattgacggccgtctt

SEQ ID NO: 29765 - DNA, 25 bp, Saccharomyces pastorianus
gtcttgatgctctgaaggcttccct

SEQ ID NO: 29766 - DNA, 25 bp, Saccharomyces pastorianus
gtacctcgatgatgtttccctggag

SEQ ID NO: 29767 - DNA, 25 bp, Saccharomyces pastorianus
aggatgcacagcttctcgaggacaa

SEQ ID NO: 29768 - DNA, 25 bp, Saccharomyces pastorianus
aagtggccgcacagctcgaagagga

SEQ ID NO: 29769 - DNA, 25 bp, Saccharomyces pastorianus
gagttctcaaagctgatcatgcgca

SEQ ID NO: 29770 - DNA, 25 bp, Saccharomyces pastorianus
ctgtgcagtacaaggtcggcgacct

SEQ ID NO: 29771 - DNA, 25 bp, Saccharomyces pastorianus
tgtttccctggagatcgaactgatc

SEQ ID NO: 29772 - DNA, 25 bp, Saccharomyces pastorianus
gataccgttgcgcaggaattgactt

SEQ ID NO: 29773 - DNA, 25 bp, Saccharomyces pastorianus
attgataaactagacggaccttccg

SEQ ID NO: 29774 - DNA, 25 bp, Saccharomyces pastorianus
ggccgctcaagtggaacatgacaaa

SEQ ID NO: 29775 - DNA, 25 bp, Saccharomyces pastorianus
gcaattggccgctcaagtggaacat

SEQ ID NO: 29776 - DNA, 25 bp, Saccharomyces pastorianus
attggctaagaagcaattggccgct

SEQ ID NO: 29777 - DNA, 25 bp, Saccharomyces pastorianus
aaaggctctggaagaggccaaacaa

SEQ ID NO: 29778 - DNA, 25 bp, Saccharomyces pastorianus
ggaccttccgtagcagaaacgactt

SEQ ID NO: 29779 - DNA, 25 bp, Saccharomyces pastorianus
aggtctgaggagctgattgataaac

SEQ ID NO: 29780 - DNA, 25 bp, Saccharomyces pastorianus
ccgtagcagaaacgacttctttcgg

SEQ ID NO: 29781 - DNA, 25 bp, Saccharomyces pastorianus
tgatcgtaggcggttatatgttggt

SEQ ID NO: 29782 - DNA, 25 bp, Saccharomyces pastorianus
tagagaccctcttaaccagaataat

SEQ ID NO: 29783 - DNA, 25 bp, Saccharomyces pastorianus
gcggcaacttggatagagaccctct

SEQ ID NO: 29784 - DNA, 25 bp, Saccharomyces pastorianus
tagagcccagcgacatggacttggt

SEQ ID NO: 29785 - DNA, 25 bp, Saccharomyces pastorianus
ggtcacgaaccaactggccgagcag

SEQ ID NO: 29786 - DNA, 25 bp, Saccharomyces pastorianus
tgtggtggccacagacactaacgca

SEQ ID NO: 29787 - DNA, 25 bp, Saccharomyces pastorianus
ggtggagattctggccgaaaacgaa

SEQ ID NO: 29788 - DNA, 25 bp, Saccharomyces pastorianus
aatcagacgcggattgcgactttct

SEQ ID NO: 29789 - DNA, 25 bp, Saccharomyces pastorianus
aggtttgatgttgcccagcagagcc

SEQ ID NO: 29790 - DNA, 25 bp, Saccharomyces pastorianus
aaagagaccagtccgttttgcgatg

SEQ ID NO: 29791 - DNA, 25 bp, Saccharomyces pastorianus
gatggacctacaccagctcagggaa

SEQ ID NO: 29792 - DNA, 25 bp, Saccharomyces pastorianus
gttacaagacgaggcgtacgcccgc

SEQ ID NO: 29793 - DNA, 25 bp, Saccharomyces pastorianus
cgcgagcatctaacggcggctatcg

SEQ ID NO: 29794 - DNA, 25 bp, Saccharomyces pastorianus
agagccaacgtgctgcacagacgtt

SEQ ID NO: 29795 - DNA, 25 bp, Saccharomyces pastorianus
acggcattccaaaaactactctcag

SEQ ID NO: 29796 - DNA, 25 bp, Saccharomyces pastorianus
taacactaaacataccacctctcat

SEQ ID NO: 29797 - DNA, 25 bp, Saccharomyces pastorianus
gagtagccatatttctggttttctg

SEQ ID NO: 29798 - DNA, 25 bp, Saccharomyces pastorianus
aaactcagcatatttcaggacggca

SEQ ID NO: 29799 - DNA, 25 bp, Saccharomyces pastorianus
ggccctgccagtagcgtaaaaccat

SEQ ID NO: 29800 - DNA, 25 bp, Saccharomyces pastorianus
gcgtaaaaccattgcctatcttttc

SEQ ID NO: 29801 - DNA, 25 bp, Saccharomyces pastorianus
cttgtgctcttcttcataataatag

SEQ ID NO: 29802 - DNA, 25 bp, Saccharomyces pastorianus
ggatcattaaccttgtgctcttctt

SEQ ID NO: 29803 - DNA, 25 bp, Saccharomyces pastorianus
aaaaacaatcatcagggccctgcca

SEQ ID NO: 29804 - DNA, 25 bp, Saccharomyces pastorianus
aaaacttgatagatttcgacgacgt

SEQ ID NO: 29805 - DNA, 25 bp, Saccharomyces pastorianus
cgacgttaacgtggtagacaagaca

SEQ ID NO: 29806 - DNA, 25 bp, Saccharomyces pastorianus
gcccaagcttctcaaaaggacaagt

SEQ ID NO: 29807 - DNA, 25 bp, Saccharomyces pastorianus
tctgcccaagcttctcaaaaggaca

SEQ ID NO: 29808 - DNA, 25 bp, Saccharomyces pastorianus
caagcttctcaaaaggacaagtctt

SEQ ID NO: 29809 - DNA, 25 bp, Saccharomyces pastorianus
ttctcaaaaggacaagtcttccgag

SEQ ID NO: 29810 - DNA, 25 bp, Saccharomyces pastorianus
gtcttccgagaagaaagacaactat

SEQ ID NO: 29811 - DNA, 25 bp, Saccharomyces pastorianus
aaggacaagtcttccgagaagaaag

SEQ ID NO: 29812 - DNA, 25 bp, Saccharomyces pastorianus
gcttctcaaaaggacaagtcttccg

SEQ ID NO: 29813 - DNA, 25 bp, Saccharomyces pastorianus
caaaaggacaagtcttccgagaaga

SEQ ID NO: 29814 - DNA, 25 bp, Saccharomyces pastorianus
tgcccaagcttctcaaaaggacaag

SEQ ID NO: 29815 - DNA, 25 bp, Saccharomyces pastorianus
atctctgcccaagcttctcaaaagg

SEQ ID NO: 29816 - DNA, 25 bp, Saccharomyces pastorianus
tctctgcccaagcttctcaaaagga

SEQ ID NO: 29817 - DNA, 25 bp, Saccharomyces pastorianus
gatgatccagcttattttggcggtt

SEQ ID NO: 29818 - DNA, 25 bp, Saccharomyces pastorianus
gcgatcaaatcttgctaaccgtctg

SEQ ID NO: 29819 - DNA, 25 bp, Saccharomyces pastorianus
tgccttttgagacacatcgaacctg

SEQ ID NO: 29820 - DNA, 25 bp, Saccharomyces pastorianus
gtttagattctgctgaagcgccatt

SEQ ID NO: 29821 - DNA, 25 bp, Saccharomyces pastorianus
aagcgccatttccaccaaatttatt

SEQ ID NO: 29822 - DNA, 25 bp, Saccharomyces pastorianus
agttcgtctcagatgctctagattt

SEQ ID NO: 29823 - DNA, 25 bp, Saccharomyces pastorianus
aagaaggttctgctcagttcgtctc

SEQ ID NO: 29824 - DNA, 25 bp, Saccharomyces pastorianus
agatctgagattgactgcacacgca

SEQ ID NO: 29825 - DNA, 25 bp, Saccharomyces pastorianus
aatctgtttctgagttgccattgca

SEQ ID NO: 29826 - DNA, 25 bp, Saccharomyces pastorianus
aggatggtaccatttctgccttagg

SEQ ID NO: 29827 - DNA, 25 bp, Saccharomyces pastorianus
cgaagaagccactccgtttatcaag

SEQ ID NO: 29828 - DNA, 25 bp, Saccharomyces pastorianus
gtggaatttccaatccctgaacaaa

SEQ ID NO: 29829 - DNA, 25 bp, Saccharomyces pastorianus
acttcttgttcaactgccatcaatg

SEQ ID NO: 29830 - DNA, 25 bp, Saccharomyces pastorianus
aaactgaatcatgcagcgtggttct

SEQ ID NO: 29831 - DNA, 25 bp, Saccharomyces pastorianus
aaggtaaggtcaacgctatctcatt

SEQ ID NO: 29832 - DNA, 25 bp, Saccharomyces pastorianus
aacgacaccgagtctctagttattg

SEQ ID NO: 29833 - DNA, 25 bp, Saccharomyces pastorianus
ccattcggtacctcaaatttctatc

SEQ ID NO: 29834 - DNA, 25 bp, Saccharomyces pastorianus
tccactgtttcctccgcggaaggta

SEQ ID NO: 29835 - DNA, 25 bp, Saccharomyces pastorianus
aactcacaagaaccctgaactgcgt

SEQ ID NO: 29836 - DNA, 25 bp, Saccharomyces pastorianus
gcagcgtggttcttgattccagtat

SEQ ID NO: 29837 - DNA, 25 bp, Saccharomyces pastorianus
gaagcataacttcgccgatggcaaa

SEQ ID NO: 29838 - DNA, 25 bp, Saccharomyces pastorianus
tgaactgcgtcaatcttccactgtt

SEQ ID NO: 29839 - DNA, 25 bp, Saccharomyces pastorianus
gtcatctgcagggaacaccagcaat

SEQ ID NO: 29840 - DNA, 25 bp, Saccharomyces pastorianus
caaagcctgattctgaacgtgacac

SEQ ID NO: 29841 - DNA, 25 bp, Saccharomyces pastorianus
gtaaagccgcagctcctataaggaa

SEQ ID NO: 29842 - DNA, 25 bp, Saccharomyces pastorianus
gaagctgacgaaacactcgaatctg

SEQ ID NO: 29843 - DNA, 25 bp, Saccharomyces pastorianus
gtctagctcttctgaaaccacgaat

SEQ ID NO: 29844 - DNA, 25 bp, Saccharomyces pastorianus
aggatgaaccattagcgagaagaac

SEQ ID NO: 29845 - DNA, 25 bp, Saccharomyces pastorianus
gcaaaaataggactccggccactag

SEQ ID NO: 29846 - DNA, 25 bp, Saccharomyces pastorianus
aaggacctaggtgcaaagcctgatt

SEQ ID NO: 29847 - DNA, 25 bp, Saccharomyces pastorianus
gaggcattcgtcatctgcagggaac

SEQ ID NO: 29848 - DNA, 25 bp, Saccharomyces pastorianus
gaaaggcaggttcccgcaaaaatag

SEQ ID NO: 29849 - DNA, 25 bp, Saccharomyces pastorianus
gaacgcgaaaagtctagctcttctg

SEQ ID NO: 29850 - DNA, 25 bp, Saccharomyces pastorianus
aaaggctagattgaccatcccaggc

SEQ ID NO: 29851 - DNA, 25 bp, Saccharomyces pastorianus
tatccccaggtgacggagccacctt

SEQ ID NO: 29852 - DNA, 25 bp, Saccharomyces pastorianus
aagactggtgatttggttactatcc

SEQ ID NO: 29853 - DNA, 25 bp, Saccharomyces pastorianus
tgacagaggttctccattccaatgc

SEQ ID NO: 29854 - DNA, 25 bp, Saccharomyces pastorianus
agattatccccaggtgacggagcca

SEQ ID NO: 29855 - DNA, 25 bp, Saccharomyces pastorianus
ctatccactacaccggtactttaga

SEQ ID NO: 29856 - DNA, 25 bp, Saccharomyces pastorianus
atttggttactatccactacaccgg

SEQ ID NO: 29857 - DNA, 25 bp, Saccharomyces pastorianus
ggttctccattccaatgcaacattg

SEQ ID NO: 29858 - DNA, 25 bp, Saccharomyces pastorianus
tagattgaccatcccaggcccatac

SEQ ID NO: 29859 - DNA, 25 bp, Saccharomyces pastorianus
atcgacagattatccccaggtgacg

SEQ ID NO: 29860 - DNA, 25 bp, Saccharomyces pastorianus
ggtaacgtcaaaatcgacagattat

SEQ ID NO: 29861 - DNA, 25 bp, Saccharomyces pastorianus
ggctccgaagccgttcaagctatga

SEQ ID NO: 29862 - DNA, 25 bp, Saccharomyces pastorianus
tgtctagcgtacaaagtgccatttt

SEQ ID NO: 29863 - DNA, 25 bp, Saccharomyces pastorianus
aatgtcacaatatttccgtcaactg

SEQ ID NO: 29864 - DNA, 25 bp, Saccharomyces pastorianus
gaccgagtctcaaaagtccttagag

SEQ ID NO: 29865 - DNA, 25 bp, Saccharomyces pastorianus
gtcaactgttgagccaagctatcga

SEQ ID NO: 29866 - DNA, 25 bp, Saccharomyces pastorianus
gatatgatacctatgcttgcgcttc

SEQ ID NO: 29867 - DNA, 25 bp, Saccharomyces pastorianus
agctgccaaagccaaaggtgttgtt

SEQ ID NO: 29868 - DNA, 25 bp, Saccharomyces pastorianus
tggccattgggctgcaacgtaaaaa

SEQ ID NO: 29869 - DNA, 25 bp, Saccharomyces pastorianus
tgatttagaggaagccggctccgaa

SEQ ID NO: 29870 - DNA, 25 bp, Saccharomyces pastorianus
ggaattgaacttacctgccaatcag

SEQ ID NO: 29871 - DNA, 25 bp, Saccharomyces pastorianus
gcttgcgcttctatattttggtggt

SEQ ID NO: 29872 - DNA, 25 bp, Saccharomyces pastorianus
ttgaaagatatcgtacctccaggta

SEQ ID NO: 29873 - DNA, 25 bp, Saccharomyces pastorianus
tttttagttttacgagctctcttgt

SEQ ID NO: 29874 - DNA, 25 bp, Saccharomyces pastorianus
tgtcccattgtcattgtccatacta

SEQ ID NO: 29875 - DNA, 25 bp, Saccharomyces pastorianus
gactttgactaccactgcgttgttg

SEQ ID NO: 29876 - DNA, 25 bp, Saccharomyces pastorianus
cagatccggaaaccttgcctggact

SEQ ID NO: 29877 - DNA, 25 bp, Saccharomyces pastorianus
taaagaacgctttctccagatccgg

SEQ ID NO: 29878 - DNA, 25 bp, Saccharomyces pastorianus
gtagaagaaccacaattcggcggaa

SEQ ID NO: 29879 - DNA, 25 bp, Saccharomyces pastorianus
gactgccgcacaaaacgacgatgtt

SEQ ID NO: 29880 - DNA, 25 bp, Saccharomyces pastorianus
actgcgttgttgctaggtgtcccat

SEQ ID NO: 29881 - DNA, 25 bp, Saccharomyces pastorianus
gacgatgtcgtccaagtagaagaac

SEQ ID NO: 29882 - DNA, 25 bp, Saccharomyces pastorianus
ggaaaccaagccattatcgaagaaa

SEQ ID NO: 29883 - DNA, 25 bp, Saccharomyces pastorianus
gaaggtcctccagaaagggatatca

SEQ ID NO: 29884 - DNA, 25 bp, Saccharomyces pastorianus
gggactcaccagaagctttggattt

SEQ ID NO: 29885 - DNA, 25 bp, Saccharomyces pastorianus
caagtttggaacgagctaggagcta

SEQ ID NO: 29886 - DNA, 25 bp, Saccharomyces pastorianus
agccacgcccaattgtttgttaatg

SEQ ID NO: 29887 - DNA, 25 bp, Saccharomyces pastorianus
gaggccacattgatccatgaagatg

SEQ ID NO: 29888 - DNA, 25 bp, Saccharomyces pastorianus
agtcttatcgagaaagccacgccca

SEQ ID NO: 29889 - DNA, 25 bp, Saccharomyces pastorianus
ttagattccttctgggtggatccac

SEQ ID NO: 29890 - DNA, 25 bp, Saccharomyces pastorianus
taacattcaaaactgggactcacca

SEQ ID NO: 29891 - DNA, 25 bp, Saccharomyces pastorianus
tgaaagccctttaaaatcggtgtgc

SEQ ID NO: 29892 - DNA, 25 bp, Saccharomyces pastorianus
ggatttcaaactatttggcgcagag

SEQ ID NO: 29893 - DNA, 25 bp, Saccharomyces pastorianus
gacaacacaccgattgaaagccctt

SEQ ID NO: 29894 - DNA, 25 bp, Saccharomyces pastorianus
ttgagcgatgcttgcggacaggaaa

SEQ ID NO: 29895 - DNA, 25 bp, Saccharomyces pastorianus
ggaactgcccttatccattggaatt

SEQ ID NO: 29896 - DNA, 25 bp, Saccharomyces pastorianus
gcttccatcttttgcatatctttta

SEQ ID NO: 29897 - DNA, 25 bp, Saccharomyces pastorianus
gatatccggtgtttatctttacgaa

SEQ ID NO: 29898 - DNA, 25 bp, Saccharomyces pastorianus
gctcagagccttacttcagttttac

SEQ ID NO: 29899 - DNA, 25 bp, Saccharomyces pastorianus
aacacagaggtgcttccatcttttg

SEQ ID NO: 29900 - DNA, 25 bp, Saccharomyces pastorianus
gctactatcgacttttcaaccttga

SEQ ID NO: 29901 - DNA, 25 bp, Saccharomyces pastorianus
ggacaggaaattgcgctcagagcct

SEQ ID NO: 29902 - DNA, 25 bp, Saccharomyces pastorianus
gtaacaattctagtcaggatctctt

SEQ ID NO: 29903 - DNA, 25 bp, Saccharomyces pastorianus
gaagatcttggatatggacaccgta

SEQ ID NO: 29904 - DNA, 25 bp, Saccharomyces pastorianus
tgacatgtaccatccgatattgaag

SEQ ID NO: 29905 - DNA, 25 bp, Saccharomyces pastorianus
acataccttccttcaactgattttc

SEQ ID NO: 29906 - DNA, 25 bp, Saccharomyces pastorianus
gctcctttcctgttggtttgtgaag

SEQ ID NO: 29907 - DNA, 25 bp, Saccharomyces pastorianus
ctaattttgatttccatccttcgtg

SEQ ID NO: 29908 - DNA, 25 bp, Saccharomyces pastorianus
aaaccagatgagtttctacccgcct

SEQ ID NO: 29909 - DNA, 25 bp, Saccharomyces pastorianus
ggttgttgtttcattgctgcactaa

SEQ ID NO: 29910 - DNA, 25 bp, Saccharomyces pastorianus
gtagagctaacgtaaccatcatttt

SEQ ID NO: 29911 - DNA, 25 bp, Saccharomyces pastorianus
tacatgttcgcgttttggattcctg

SEQ ID NO: 29912 - DNA, 25 bp, Saccharomyces pastorianus
acctataatgggtcttgccggcgac

SEQ ID NO: 29913 - DNA, 25 bp, Saccharomyces pastorianus
ttcgtcaactattgcggtgctcctt

SEQ ID NO: 29914 - DNA, 25 bp, Saccharomyces pastorianus
gaacacggtcttgattgctgatatg

SEQ ID NO: 29915 - DNA, 25 bp, Saccharomyces pastorianus
gtgtcggtgtcgctaacgtcatgaa

SEQ ID NO: 29916 - DNA, 25 bp, Saccharomyces pastorianus
caatggctgatgtcccaaagggtgt

SEQ ID NO: 29917 - DNA, 25 bp, Saccharomyces pastorianus
gaatttcaaagtggttcgtgacggt

SEQ ID NO: 29918 - DNA, 25 bp, Saccharomyces pastorianus
ttaccattacttcccaaccgcagaa

SEQ ID NO: 29919 - DNA, 25 bp, Saccharomyces pastorianus
gcaattcaatatggtatctccgcaa

SEQ ID NO: 29920 - DNA, 25 bp, Saccharomyces pastorianus
gggagaatcatcaccagcaattcaa

SEQ ID NO: 29921 - DNA, 25 bp, Saccharomyces pastorianus
aaaccacaccatgctgttttacaag

SEQ ID NO: 29922 - DNA, 25 bp, Saccharomyces pastorianus
aatgtaccatttgctatttcactga

SEQ ID NO: 29923 - DNA, 25 bp, Saccharomyces pastorianus
gtatctccgcaacgaactttatcac

SEQ ID NO: 29924 - DNA, 25 bp, Saccharomyces pastorianus
gactacaattcatcactgtttctag

SEQ ID NO: 29925 - DNA, 25 bp, Saccharomyces pastorianus
ggtgatgtcattttatccgttgatg

SEQ ID NO: 29926 - DNA, 25 bp, Saccharomyces pastorianus
gatcattttgtaatatttgccggta

SEQ ID NO: 29927 - DNA, 25 bp, Saccharomyces pastorianus
gcaggtaaagacttcgacaaggcta

SEQ ID NO: 29928 - DNA, 25 bp, Saccharomyces pastorianus
gatccgatccagtattggctgccaa

SEQ ID NO: 29929 - DNA, 25 bp, Saccharomyces pastorianus
ggtcggtaaggctactttattgaca

SEQ ID NO: 29930 - DNA, 25 bp, Saccharomyces pastorianus
agatatcgacgaggctattgcatta

SEQ ID NO: 29931 - DNA, 25 bp, Saccharomyces pastorianus
gaaaccctgttcagtgaagctaaga

SEQ ID NO: 29932 - DNA, 25 bp, Saccharomyces pastorianus
aagagtctgctgatcttgccagaac

SEQ ID NO: 29933 - DNA, 25 bp, Saccharomyces pastorianus
aactagcatgtttagcataccgtga

SEQ ID NO: 29934 - DNA, 25 bp, Saccharomyces pastorianus
gttggtatcgcaccattggtcggta

SEQ ID NO: 29935 - DNA, 25 bp, Saccharomyces pastorianus
ggctattgcattattcgaagagtct

SEQ ID NO: 29936 - DNA, 25 bp, Saccharomyces pastorianus
aacatcttcccttacattcaactag

SEQ ID NO: 29937 - DNA, 25 bp, Saccharomyces pastorianus
gaaggtatttacgttggtatcgcac

SEQ ID NO: 29938 - DNA, 25 bp, Saccharomyces pastorianus
aagcgaagacaactcccacgaatta

SEQ ID NO: 29939 - DNA, 25 bp, Saccharomyces pastorianus
atagtatatacaccacgccaacagc

SEQ ID NO: 29940 - DNA, 25 bp, Saccharomyces pastorianus
gttacttgaatcctaattcactcga

SEQ ID NO: 29941 - DNA, 25 bp, Saccharomyces pastorianus
aacctggtagtattgacgcgaacat

SEQ ID NO: 29942 - DNA, 25 bp, Saccharomyces pastorianus
ttctaaggccgctgcaaccggattc

SEQ ID NO: 29943 - DNA, 25 bp, Saccharomyces pastorianus
gaagaatctccatcaaaattgccaa

SEQ ID NO: 29944 - DNA, 25 bp, Saccharomyces pastorianus
cccctaatgtctgctagtcaaggaa

SEQ ID NO: 29945 - DNA, 25 bp, Saccharomyces pastorianus
agaaattccgtgtctgaacatcaaa

SEQ ID NO: 29946 - DNA, 25 bp, Saccharomyces pastorianus
taccgataccccatcaaatgaattg

SEQ ID NO: 29947 - DNA, 25 bp, Saccharomyces pastorianus
cgtttgacatacgttccaatgggaa

SEQ ID NO: 29948 - DNA, 25 bp, Saccharomyces pastorianus
aaaggacgctgcatctccaaaacaa

SEQ ID NO: 29949 - DNA, 25 bp, Saccharomyces pastorianus
gtgtctcgttgccaattgtaccagt

SEQ ID NO: 29950 - DNA, 25 bp, Saccharomyces pastorianus
gttcctgaaaatgtcgtcacggctt

SEQ ID NO: 29951 - DNA, 25 bp, Saccharomyces pastorianus
aatggcaaggttaccaccgacggca

SEQ ID NO: 29952 - DNA, 25 bp, Saccharomyces pastorianus
atgggtcttgggttgcacatccggc

SEQ ID NO: 29953 - DNA, 25 bp, Saccharomyces pastorianus
gaatcaaatctacttcgttcctgaa

SEQ ID NO: 29954 - DNA, 25 bp, Saccharomyces pastorianus
gtcacggcttcaaacctcttggaga

SEQ ID NO: 29955 - DNA, 25 bp, Saccharomyces pastorianus
taagaggctcaggttgtgtgcccat

SEQ ID NO: 29956 - DNA, 25 bp, Saccharomyces pastorianus
tatccaaggcaagtccactaggcga

SEQ ID NO: 29957 - DNA, 25 bp, Saccharomyces pastorianus
ttgtacgacgagattgtgaccacca

SEQ ID NO: 29958 - DNA, 25 bp, Saccharomyces pastorianus
gcactggctccgatctgtaatgaag

SEQ ID NO: 29959 - DNA, 25 bp, Saccharomyces pastorianus
aaagacgatcccgtggccaatgaaa

SEQ ID NO: 29960 - DNA, 25 bp, Saccharomyces pastorianus
tgggactttcttgaaccaccaaaga

SEQ ID NO: 29961 - DNA, 25 bp, Saccharomyces pastorianus
aaagaagctttgcaacggttacaga

SEQ ID NO: 29962 - DNA, 25 bp, Saccharomyces pastorianus
ccgcaattcatatgtcccaactgta

SEQ ID NO: 29963 - DNA, 25 bp, Saccharomyces pastorianus
agaaggctagtcatgctctcatacc

SEQ ID NO: 29964 - DNA, 25 bp, Saccharomyces pastorianus
gaagattgctcgatttgtttgtgta

SEQ ID NO: 29965 - DNA, 25 bp, Saccharomyces pastorianus
ggtcgtatcaagaacacatggctgt

SEQ ID NO: 29966 - DNA, 25 bp, Saccharomyces pastorianus
atgtgaaatcttcgagtgggacttt

SEQ ID NO: 29967 - DNA, 25 bp, Saccharomyces pastorianus
atgtcaggctattttcatatctcca

SEQ ID NO: 29968 - DNA, 25 bp, Saccharomyces pastorianus
aaagcgaaggcgatcaactggttga

SEQ ID NO: 29969 - DNA, 25 bp, Saccharomyces pastorianus
tgcgatttggaagcttctttcgaaa

SEQ ID NO: 29970 - DNA, 25 bp, Saccharomyces pastorianus
ccccgcttcatcgttgtcaaaggat

SEQ ID NO: 29971 - DNA, 25 bp, Saccharomyces pastorianus
gaaagtgtcactagctccattttaa

SEQ ID NO: 29972 - DNA, 25 bp, Saccharomyces pastorianus
gggtggagattacaaacctcttggt

SEQ ID NO: 29973 - DNA, 25 bp, Saccharomyces pastorianus
gataaccgtgatggtcgcaatcatg

SEQ ID NO: 29974 - DNA, 25 bp, Saccharomyces pastorianus
tagagagtccttacaaaacgtcaaa

SEQ ID NO: 29975 - DNA, 25 bp, Saccharomyces pastorianus
aaacctcttggttgttggctcatca

SEQ ID NO: 29976 - DNA, 25 bp, Saccharomyces pastorianus
aacttggttgccttccgagattgaa

SEQ ID NO: 29977 - DNA, 25 bp, Saccharomyces pastorianus
tagagggtggccatgaagtatacaa

SEQ ID NO: 29978 - DNA, 25 bp, Saccharomyces pastorianus
gatagcatgatgctcgttgaatcat

SEQ ID NO: 29979 - DNA, 25 bp, Saccharomyces pastorianus
ttgaatcatggcacgaggaactgct

SEQ ID NO: 29980 - DNA, 25 bp, Saccharomyces pastorianus
aactatgttcagagactattacccc

SEQ ID NO: 29981 - DNA, 25 bp, Saccharomyces pastorianus
cagggacgtttcttgcgttctaaat

SEQ ID NO: 29982 - DNA, 25 bp, Saccharomyces pastorianus
acttgatggatctgtgcgacgtcgt

SEQ ID NO: 29983 - DNA, 25 bp, Saccharomyces pastorianus
gtctgaagacggaaccagcgcctct

SEQ ID NO: 29984 - DNA, 25 bp, Saccharomyces pastorianus
agcgcctctttccagattgttgaag

SEQ ID NO: 29985 - DNA, 25 bp, Saccharomyces pastorianus
gttctgcggttattcgatacctcat

SEQ ID NO: 29986 - DNA, 25 bp, Saccharomyces pastorianus
agaagaccacacactgggcaacgct

SEQ ID NO: 29987 - DNA, 25 bp, Saccharomyces pastorianus
acgtcagaattcagacctacggtga

SEQ ID NO: 29988 - DNA, 25 bp, Saccharomyces pastorianus
tcaagcttttaacacaggccacgtc

SEQ ID NO: 29989 - DNA, 25 bp, Saccharomyces pastorianus
gaacccagacgtagagttctgcggt

SEQ ID NO: 29990 - DNA, 25 bp, Saccharomyces pastorianus
aacgctctgcgttacatcataatga

SEQ ID NO: 29991 - DNA, 25 bp, Saccharomyces pastorianus
aaacaagaagactgccctagaggaa

SEQ ID NO: 29992 - DNA, 25 bp, Saccharomyces pastorianus
tgaaactaccgctgtggaggcctta

SEQ ID NO: 29993 - DNA, 25 bp, Saccharomyces pastorianus
ccagtgagcctgttgttgtaaagaa

SEQ ID NO: 29994 - DNA, 25 bp, Saccharomyces pastorianus
gaaggctgttacctctgaaagtcaa

SEQ ID NO: 29995 - DNA, 25 bp, Saccharomyces pastorianus
aagtcaaagtcaaggtagcgctaca

SEQ ID NO: 29996 - DNA, 25 bp, Saccharomyces pastorianus
agaagtcgccgaacacaacggtcca

SEQ ID NO: 29997 - DNA, 25 bp, Saccharomyces pastorianus
tgacgtcgacaaaaccagtgagcct

SEQ ID NO: 29998 - DNA, 25 bp, Saccharomyces pastorianus
ggtagcgctacattggtcatgattt

SEQ ID NO: 29999 - DNA, 25 bp, Saccharomyces pastorianus
gtggtcaggacgctacagatagttt

SEQ ID NO: 30000 - DNA, 25 bp, Saccharomyces pastorianus
gaagctttgaaactactgaaaactt

SEQ ID NO: 30001 - DNA, 25 bp, Saccharomyces pastorianus
gaacacaacggtccagaaaactgct

SEQ ID NO: 30002 - DNA, 25 bp, Saccharomyces pastorianus
gaaaactgctggatcatcatcgatg

SEQ ID NO: 30003 - DNA, 25 bp, Saccharomyces pastorianus
tggtcatgattttggccgttgtaat

SEQ ID NO: 30004 - DNA, 25 bp, Saccharomyces pastorianus
gaaactcgacgaatattctgccatt

SEQ ID NO: 30005 - DNA, 25 bp, Saccharomyces pastorianus
ggttgcccaagaatccatgaacaat

SEQ ID NO: 30006 - DNA, 25 bp, Saccharomyces pastorianus
aattacttgttaatgggccatctat

SEQ ID NO: 30007 - DNA, 25 bp, Saccharomyces pastorianus
tcaggaaactctagacattatgggt

SEQ ID NO: 30008 - DNA, 25 bp, Saccharomyces pastorianus
tagcagattaccacatgggttccac

SEQ ID NO: 30009 - DNA, 25 bp, Saccharomyces pastorianus
gagaagggtgttaccaagccagtga

SEQ ID NO: 30010 - DNA, 25 bp, Saccharomyces pastorianus
tgaaggtttggctgtttctgatgat

SEQ ID NO: 30011 - DNA, 25 bp, Saccharomyces pastorianus
aagaggacgcactggttgcccaaga

SEQ ID NO: 30012 - DNA, 25 bp, Saccharomyces pastorianus
agaatcatcatctaccagttcagat

SEQ ID NO: 30013 - DNA, 25 bp, Saccharomyces pastorianus
gggccatctattacaagtacgtcta

SEQ ID NO: 30014 - DNA, 25 bp, Saccharomyces pastorianus
gtacgtctattaccaaacggagcca

SEQ ID NO: 30015 - DNA, 25 bp, Saccharomyces pastorianus
ttatcccagaaccagcaactcatga

SEQ ID NO: 30016 - DNA, 25 bp, Saccharomyces pastorianus
gagtaaatttttcccagctatgata

SEQ ID NO: 30017 - DNA, 25 bp, Saccharomyces pastorianus
aaagatgtcataagttctggcccat

SEQ ID NO: 30018 - DNA, 25 bp, Saccharomyces pastorianus
ggatctgacgccgacattaaggcaa

SEQ ID NO: 30019 - DNA, 25 bp, Saccharomyces pastorianus
tctccgttttatcgttgcctggaaa

SEQ ID NO: 30020 - DNA, 25 bp, Saccharomyces pastorianus
gaatgcctttgaagccggatctgac

SEQ ID NO: 30021 - DNA, 25 bp, Saccharomyces pastorianus
gttctggcccattttcatcgaaagg

SEQ ID NO: 30022 - DNA, 25 bp, Saccharomyces pastorianus
gtagacccacagttgagtctcttaa

SEQ ID NO: 30023 - DNA, 25 bp, Saccharomyces pastorianus
tgattgttacacatgcagccactaa

SEQ ID NO: 30024 - DNA, 25 bp, Saccharomyces pastorianus
gtaatacatcttttctaactaacgg

SEQ ID NO: 30025 - DNA, 25 bp, Saccharomyces pastorianus
gaaacggaagttgcgctattgacaa

SEQ ID NO: 30026 - DNA, 25 bp, Saccharomyces pastorianus
gaagtctacacctaaagtacctgca

SEQ ID NO: 30027 - DNA, 25 bp, Saccharomyces pastorianus
gaagcctgcttatctaagcgctgct

SEQ ID NO: 30028 - DNA, 25 bp, Saccharomyces pastorianus
aaacgcagatgcttctccaaaggcc

SEQ ID NO: 30029 - DNA, 25 bp, Saccharomyces pastorianus
agcgctgctgctactaaggttaaca

SEQ ID NO: 30030 - DNA, 25 bp, Saccharomyces pastorianus
tataaccggagtgtcgtcgcataaa

SEQ ID NO: 30031 - DNA, 25 bp, Saccharomyces pastorianus
tgaaagtgccatttccaccgatagc

SEQ ID NO: 30032 - DNA, 25 bp, Saccharomyces pastorianus
aagtaagcccaatgtttctccaccg

SEQ ID NO: 30033 - DNA, 25 bp, Saccharomyces pastorianus
gaaacttcgcttaggccggtaatat

SEQ ID NO: 30034 - DNA, 25 bp, Saccharomyces pastorianus
aaaggcccctacacaatctgagaaa

SEQ ID NO: 30035 - DNA, 25 bp, Saccharomyces pastorianus
gaaggtactcttactgccttagagg

SEQ ID NO: 30036 - DNA, 25 bp, Saccharomyces pastorianus
ctcacgcctatcttcaaggtcaaat

SEQ ID NO: 30037 - DNA, 25 bp, Saccharomyces pastorianus
actgccacagtacttttcatttcca

SEQ ID NO: 30038 - DNA, 25 bp, Saccharomyces pastorianus
agtagaattacgtcccaactctggg

SEQ ID NO: 30039 - DNA, 25 bp, Saccharomyces pastorianus
atcatgctgtctacacctttacaat

SEQ ID NO: 30040 - DNA, 25 bp, Saccharomyces pastorianus
gtctctcgcctgtattccattggta

SEQ ID NO: 30041 - DNA, 25 bp, Saccharomyces pastorianus
cgattgcttactttggctctgacaa

SEQ ID NO: 30042 - DNA, 25 bp, Saccharomyces pastorianus
attccattgcgatcatgctgtctac

SEQ ID NO: 30043 - DNA, 25 bp, Saccharomyces pastorianus
gatccatcattgtcatcatcgttgt

SEQ ID NO: 30044 - DNA, 25 bp, Saccharomyces pastorianus
tagcttatggctcggatgtcaaaac

SEQ ID NO: 30045 - DNA, 25 bp, Saccharomyces pastorianus
aattccctctagtacttggattggt

SEQ ID NO: 30046 - DNA, 25 bp, Saccharomyces pastorianus
attcgtttcagtcatagggtctctc

SEQ ID NO: 30047 - DNA, 25 bp, Saccharomyces pastorianus
ggattggttattctcactgccacag

SEQ ID NO: 30048 - DNA, 25 bp, Saccharomyces pastorianus
ggctcactaatagcactgggtgcct

SEQ ID NO: 30049 - DNA, 25 bp, Saccharomyces pastorianus
acagaatctagttagtgccacggaa

SEQ ID NO: 30050 - DNA, 25 bp, Saccharomyces pastorianus
aactgtgtacatcattaccatcgag

SEQ ID NO: 30051 - DNA, 25 bp, Saccharomyces pastorianus
gcctttttcgctggcagtttagcag

SEQ ID NO: 30052 - DNA, 25 bp, Saccharomyces pastorianus
tgctgatcaacttgaccgctacgaa

SEQ ID NO: 30053 - DNA, 25 bp, Saccharomyces pastorianus
gcagaactgcgtttgctgatcaact

SEQ ID NO: 30054 - DNA, 25 bp, Saccharomyces pastorianus
aaaatgatctactaccacgcgactt

SEQ ID NO: 30055 - DNA, 25 bp, Saccharomyces pastorianus
cgagaatgttgctgccttgggtatt

SEQ ID NO: 30056 - DNA, 25 bp, Saccharomyces pastorianus
gaaatgccatattgatcagactcta

SEQ ID NO: 30057 - DNA, 25 bp, Saccharomyces pastorianus
tgggcacctcaaacatcacagaatc

SEQ ID NO: 30058 - DNA, 25 bp, Saccharomyces pastorianus
ataagcatactgtggtcccaggctc

SEQ ID NO: 30059 - DNA, 25 bp, Saccharomyces pastorianus
tagagcgtattgttcctcctttgaa

SEQ ID NO: 30060 - DNA, 25 bp, Saccharomyces pastorianus
gaatttagctagtgtgtccgaagaa

SEQ ID NO: 30061 - DNA, 25 bp, Saccharomyces pastorianus
gttgcttatagaggcctttgacact

SEQ ID NO: 30062 - DNA, 25 bp, Saccharomyces pastorianus
tatcccttgctagtctgttgcggta

SEQ ID NO: 30063 - DNA, 25 bp, Saccharomyces pastorianus
aatttgcggccataaacccggatgc

SEQ ID NO: 30064 - DNA, 25 bp, Saccharomyces pastorianus
tgagcactccatcatcaacgtactg

SEQ ID NO: 30065 - DNA, 25 bp, Saccharomyces pastorianus
tcctcctttgaatttttgtcctgtg

SEQ ID NO: 30066 - DNA, 25 bp, Saccharomyces pastorianus
cgtactgcaaaccatcgttactcaa

SEQ ID NO: 30067 - DNA, 25 bp, Saccharomyces pastorianus
gaacctcaggatacccttttagagt

SEQ ID NO: 30068 - DNA, 25 bp, Saccharomyces pastorianus
aaaaagtcttagtctcgcatgctcc

SEQ ID NO: 30069 - DNA, 25 bp, Saccharomyces pastorianus
atacctttataggtcaggccagccc

SEQ ID NO: 30070 - DNA, 25 bp, Saccharomyces pastorianus
tgactacgtgcccattgtggtggta

SEQ ID NO: 30071 - DNA, 25 bp, Saccharomyces pastorianus
gaggcttccaagcaggactctcaaa

SEQ ID NO: 30072 - DNA, 25 bp, Saccharomyces pastorianus
aactccgccggtaacgctgatggtg

SEQ ID NO: 30073 - DNA, 25 bp, Saccharomyces pastorianus
gcattgtctgagaacgaggcttcca

SEQ ID NO: 30074 - DNA, 25 bp, Saccharomyces pastorianus
atcaatagctccacgactgctgtaa

SEQ ID NO: 30075 - DNA, 25 bp, Saccharomyces pastorianus
ggtgcctatgctagaactgccaata

SEQ ID NO: 30076 - DNA, 25 bp, Saccharomyces pastorianus
aggtcagggttctgctgccaaacaa

SEQ ID NO: 30077 - DNA, 25 bp, Saccharomyces pastorianus
gtcgttgccaattcgttgccaagaa

SEQ ID NO: 30078 - DNA, 25 bp, Saccharomyces pastorianus
aacagcaagctacatccagtggcac

SEQ ID NO: 30079 - DNA, 25 bp, Saccharomyces pastorianus
aaacaatgtcgccagtgccaacaac

SEQ ID NO: 30080 - DNA, 25 bp, Saccharomyces pastorianus
gaagaggccttctacacattagcgc

SEQ ID NO: 30081 - DNA, 25 bp, Saccharomyces pastorianus
aagaatgatctcagctacgcagccg

SEQ ID NO: 30082 - DNA, 25 bp, Saccharomyces pastorianus
ctacgcagccggcagacaggatagc

SEQ ID NO: 30083 - DNA, 25 bp, Saccharomyces pastorianus
aagagaggccatggccgccaacaga

SEQ ID NO: 30084 - DNA, 25 bp, Saccharomyces pastorianus
acagggtgaacatttcccaccaact

SEQ ID NO: 30085 - DNA, 25 bp, Saccharomyces pastorianus
gaactggagtggttccacttgccgt

SEQ ID NO: 30086 - DNA, 25 bp, Saccharomyces pastorianus
ggccaggttggcagtagcacaagtt

SEQ ID NO: 30087 - DNA, 25 bp, Saccharomyces pastorianus
aacaccacaaatcccaatatcagcg

SEQ ID NO: 30088 - DNA, 25 bp, Saccharomyces pastorianus
tccggcaatgcatctacaccatgaa

SEQ ID NO: 30089 - DNA, 25 bp, Saccharomyces pastorianus
tcaaggccgaagaccaacgactacg

SEQ ID NO: 30090 - DNA, 25 bp, Saccharomyces pastorianus
tgggcgtggacaatcatccggcaat

SEQ ID NO: 30091 - DNA, 25 bp, Saccharomyces pastorianus
accgctctactgctattgcaatcag

SEQ ID NO: 30092 - DNA, 25 bp, Saccharomyces pastorianus
aaaatcggcaggctctatccaggat

SEQ ID NO: 30093 - DNA, 25 bp, Saccharomyces pastorianus
atggctgtcattctcgcactgatta

SEQ ID NO: 30094 - DNA, 25 bp, Saccharomyces pastorianus
ttattgcgtttatcccatggctcaa

SEQ ID NO: 30095 - DNA, 25 bp, Saccharomyces pastorianus
aactcccttgctagtatttttcttg

SEQ ID NO: 30096 - DNA, 25 bp, Saccharomyces pastorianus
aaatggagtgtgtgtccttcttctt

SEQ ID NO: 30097 - DNA, 25 bp, Saccharomyces pastorianus
ggctcaaggctctatttgtcactac

SEQ ID NO: 30098 - DNA, 25 bp, Saccharomyces pastorianus
gtcccattcgggttaatcttgttag

SEQ ID NO: 30099 - DNA, 25 bp, Saccharomyces pastorianus
tcatatactttaccgccagctatac

SEQ ID NO: 30100 - DNA, 25 bp, Saccharomyces pastorianus
acgcacctgcattaagcttttttat

SEQ ID NO: 30101 - DNA, 25 bp, Saccharomyces pastorianus
ttgagaccgtgttccatggctgtca

SEQ ID NO: 30102 - DNA, 25 bp, Saccharomyces pastorianus
aaagccgccgtggtacttgtcattt

SEQ ID NO: 30103 - DNA, 25 bp, Saccharomyces pastorianus
acggtatgtatggtgcttttatgga

SEQ ID NO: 30104 - DNA, 25 bp, Saccharomyces pastorianus
ttccagtcggaagccatcgctaaca

SEQ ID NO: 30105 - DNA, 25 bp, Saccharomyces pastorianus
ggcagacgattactgtttaccatct

SEQ ID NO: 30106 - DNA, 25 bp, Saccharomyces pastorianus
gaaaataccaccaacaaggctatac

SEQ ID NO: 30107 - DNA, 25 bp, Saccharomyces pastorianus
gaactttacctaacgtagaggcaga

SEQ ID NO: 30108 - DNA, 25 bp, Saccharomyces pastorianus
gagttgcatcaagaacctatccaaa

SEQ ID NO: 30109 - DNA, 25 bp, Saccharomyces pastorianus
aattcaatgagtgattccccgttgc

SEQ ID NO: 30110 - DNA, 25 bp, Saccharomyces pastorianus
gtgattccccgttgcatgaacaaga

SEQ ID NO: 30111 - DNA, 25 bp, Saccharomyces pastorianus
gactgcgttgcaatttccaaaccag

SEQ ID NO: 30112 - DNA, 25 bp, Saccharomyces pastorianus
ttagaagcttacaccacgactgcgt

SEQ ID NO: 30113 - DNA, 25 bp, Saccharomyces pastorianus
caaacaccgaaatcttctctgcaca

SEQ ID NO: 30114 - DNA, 25 bp, Saccharomyces pastorianus
agtaaggaacctaccattggtgccg

SEQ ID NO: 30115 - DNA, 25 bp, Saccharomyces pastorianus
ttttgtcaacgtgagaacctgtcat

SEQ ID NO: 30116 - DNA, 25 bp, Saccharomyces pastorianus
acaagctgctttggtcgtcttcgat

SEQ ID NO: 30117 - DNA, 25 bp, Saccharomyces pastorianus
cattggtgccgcctttttgacaaag

SEQ ID NO: 30118 - DNA, 25 bp, Saccharomyces pastorianus
aatcgacctcgaatcaacaactgtg

SEQ ID NO: 30119 - DNA, 25 bp, Saccharomyces pastorianus
tgcggtcggcaaatcatcaatagtc

SEQ ID NO: 30120 - DNA, 25 bp, Saccharomyces pastorianus
ggccaagagagattcgcccctttgg

SEQ ID NO: 30121 - DNA, 25 bp, Saccharomyces pastorianus
ttacttggagaatctgcggtcggca

SEQ ID NO: 30122 - DNA, 25 bp, Saccharomyces pastorianus
gatcacgacctgaccattactgatg

SEQ ID NO: 30123 - DNA, 25 bp, Saccharomyces pastorianus
ggatctaccggaacgatgaggccat

SEQ ID NO: 30124 - DNA, 25 bp, Saccharomyces pastorianus
tgaaatctgggatacggccggccaa

SEQ ID NO: 30125 - DNA, 25 bp, Saccharomyces pastorianus
taatggcatgaacgaccgcaccaat

SEQ ID NO: 30126 - DNA, 25 bp, Saccharomyces pastorianus
acagccctgcgttcatgacatcgaa

SEQ ID NO: 30127 - DNA, 25 bp, Saccharomyces pastorianus
tttattaggcagagccccgtgagtc

SEQ ID NO: 30128 - DNA, 25 bp, Saccharomyces pastorianus
ttgtctatctcttcccaggacagtt

SEQ ID NO: 30129 - DNA, 25 bp, Saccharomyces pastorianus
taacaaccactatagctcaccatat

SEQ ID NO: 30130 - DNA, 25 bp, Saccharomyces pastorianus
tgggaacggaaccattactcatgtt

SEQ ID NO: 30131 - DNA, 25 bp, Saccharomyces pastorianus
aaacccgacgtcactgatcgcagta

SEQ ID NO: 30132 - DNA, 25 bp, Saccharomyces pastorianus
agtatcgcaagtgccgctcgagaca

SEQ ID NO: 30133 - DNA, 25 bp, Saccharomyces pastorianus
gatggcaaatgttgaaccgctccca

SEQ ID NO: 30134 - DNA, 25 bp, Saccharomyces pastorianus
gaacttctatttgggacagcagtcc

SEQ ID NO: 30135 - DNA, 25 bp, Saccharomyces pastorianus
agtccttcttctctgctaaacaaac

SEQ ID NO: 30136 - DNA, 25 bp, Saccharomyces pastorianus
aataccacccgacagtgtttgagaa

SEQ ID NO: 30137 - DNA, 25 bp, Saccharomyces pastorianus
gaggcgttacgatattgccccgacg

SEQ ID NO: 30138 - DNA, 25 bp, Saccharomyces pastorianus
atttgaggcaggaggcccatatcaa

SEQ ID NO: 30139 - DNA, 25 bp, Saccharomyces pastorianus
atggttcccgccgaagatgcaaaac

SEQ ID NO: 30140 - DNA, 25 bp, Saccharomyces pastorianus
cgccgatcgttcttgtgggtttgaa

SEQ ID NO: 30141 - DNA, 25 bp, Saccharomyces pastorianus
tgagaattatgttaccgactgcagg

SEQ ID NO: 30142 - DNA, 25 bp, Saccharomyces pastorianus
gtgcctgtgggaaaacgtctttact

SEQ ID NO: 30143 - DNA, 25 bp, Saccharomyces pastorianus
gaacgtcttcgtccattttcatact

SEQ ID NO: 30144 - DNA, 25 bp, Saccharomyces pastorianus
ttgggtttgccgtggataactctga

SEQ ID NO: 30145 - DNA, 25 bp, Saccharomyces pastorianus
gctgtagacgaaatggttcccgccg

SEQ ID NO: 30146 - DNA, 25 bp, Saccharomyces pastorianus
ataactctgagtccctaatcaacgc

SEQ ID NO: 30147 - DNA, 25 bp, Saccharomyces pastorianus
gataagatgggttccgcttctgcaa

SEQ ID NO: 30148 - DNA, 25 bp, Saccharomyces pastorianus
taccgcaacgcccaagaagacaaag

SEQ ID NO: 30149 - DNA, 25 bp, Saccharomyces pastorianus
aactccttctctgttaaaggctcca

SEQ ID NO: 30150 - DNA, 25 bp, Saccharomyces pastorianus
agacgaggatgacgctgtaccgcaa

SEQ ID NO: 30151 - DNA, 25 bp, Saccharomyces pastorianus
aaagcgctccttcttcaacaggttc

SEQ ID NO: 30152 - DNA, 25 bp, Saccharomyces pastorianus
ccgctgtcaaagaggctgtcgcaaa

SEQ ID NO: 30153 - DNA, 25 bp, Saccharomyces pastorianus
caacaggttcgtcttctattttcga

SEQ ID NO: 30154 - DNA, 25 bp, Saccharomyces pastorianus
gaggaaattgttacggctaccgcaa

SEQ ID NO: 30155 - DNA, 25 bp, Saccharomyces pastorianus
aaaggtcagcaagagccgcatccgc

SEQ ID NO: 30156 - DNA, 25 bp, Saccharomyces pastorianus
tccgcttctgcaacatccaatgaaa

SEQ ID NO: 30157 - DNA, 25 bp, Saccharomyces pastorianus
gcatccgcccctaagaaatcttact

SEQ ID NO: 30158 - DNA, 25 bp, Saccharomyces pastorianus
gaatacatcggctgttttcaaaact

SEQ ID NO: 30159 - DNA, 25 bp, Saccharomyces pastorianus
tcggaattacctcagtctgacctaa

SEQ ID NO: 30160 - DNA, 25 bp, Saccharomyces pastorianus
gaagacactgaatccctcttggaat

SEQ ID NO: 30161 - DNA, 25 bp, Saccharomyces pastorianus
aagcactgggtttggaaccatcgat

SEQ ID NO: 30162 - DNA, 25 bp, Saccharomyces pastorianus
gaagattaccgctaagaatgctgaa

SEQ ID NO: 30163 - DNA, 25 bp, Saccharomyces pastorianus
tgtattggtaaagcggtcgttccct

SEQ ID NO: 30164 - DNA, 25 bp, Saccharomyces pastorianus
ggtcgttcccttatctactatcgaa

SEQ ID NO: 30165 - DNA, 25 bp, Saccharomyces pastorianus
taaatttgagttcgaaccccactat

SEQ ID NO: 30166 - DNA, 25 bp, Saccharomyces pastorianus
gctaagttcgggaattttgctacaa

SEQ ID NO: 30167 - DNA, 25 bp, Saccharomyces pastorianus
tcgaaccccactatactagcaatgt

SEQ ID NO: 30168 - DNA, 25 bp, Saccharomyces pastorianus
gaatgctgaaaacttgaccggtatc

SEQ ID NO: 30169 - DNA, 25 bp, Saccharomyces pastorianus
taatctcttcattaacctcaggtga

SEQ ID NO: 30170 - DNA, 25 bp, Saccharomyces pastorianus
gaaggtcgttagacgcttaccattt

SEQ ID NO: 30171 - DNA, 25 bp, Saccharomyces pastorianus
gctccttcagcgttgtctcaagcaa

SEQ ID NO: 30172 - DNA, 25 bp, Saccharomyces pastorianus
actattcgaagctgtgttaatctct

SEQ ID NO: 30173 - DNA, 25 bp, Saccharomyces pastorianus
tcgacgaagaagttcagccacccgc

SEQ ID NO: 30174 - DNA, 25 bp, Saccharomyces pastorianus
catcgaactaccatggtcctattga

SEQ ID NO: 30175 - DNA, 25 bp, Saccharomyces pastorianus
aactcttcgttcataccctgaggag

SEQ ID NO: 30176 - DNA, 25 bp, Saccharomyces pastorianus
catgatgtgggaattcttcttgcaa

SEQ ID NO: 30177 - DNA, 25 bp, Saccharomyces pastorianus
atgcgacgttttgaagctcgacgaa

SEQ ID NO: 30178 - DNA, 25 bp, Saccharomyces pastorianus
ttataaatccacacctaaccttgac

SEQ ID NO: 30179 - DNA, 25 bp, Saccharomyces pastorianus
gatgccttatctttagttgcgacag

SEQ ID NO: 30180 - DNA, 25 bp, Saccharomyces pastorianus
gagactcaaggaggttcaaaccgtt

SEQ ID NO: 30181 - DNA, 25 bp, Saccharomyces pastorianus
caatgcctttacagatgacaacagt

SEQ ID NO: 30182 - DNA, 25 bp, Saccharomyces pastorianus
ggtgaattataatctagagctctct

SEQ ID NO: 30183 - DNA, 25 bp, Saccharomyces pastorianus
catcagttgatagagatcccacatt

SEQ ID NO: 30184 - DNA, 25 bp, Saccharomyces pastorianus
tggtaccataacattcaacgagcta

SEQ ID NO: 30185 - DNA, 25 bp, Saccharomyces pastorianus
gctactctaacagacgagcaagttg

SEQ ID NO: 30186 - DNA, 25 bp, Saccharomyces pastorianus
gagctatccacaaagctttcgacta

SEQ ID NO: 30187 - DNA, 25 bp, Saccharomyces pastorianus
atcccacattctacttcattcattg

SEQ ID NO: 30188 - DNA, 25 bp, Saccharomyces pastorianus
agagctctctcaaccaagtgcgaag

SEQ ID NO: 30189 - DNA, 25 bp, Saccharomyces pastorianus
taacgtggtcgactcaaatgctgat

SEQ ID NO: 30190 - DNA, 25 bp, Saccharomyces pastorianus
aagcttaccaaactcgctagccgaa

SEQ ID NO: 30191 - DNA, 25 bp, Saccharomyces pastorianus
cgaaattagggttttatccatggat

SEQ ID NO: 30192 - DNA, 25 bp, Saccharomyces pastorianus
ttgtccacaatgaccatcgaaggtg

SEQ ID NO: 30193 - DNA, 25 bp, Saccharomyces pastorianus
gaatgcaccaactatcggaacctca

SEQ ID NO: 30194 - DNA, 25 bp, Saccharomyces pastorianus
gaggtcatccaaatagcgctggctt

SEQ ID NO: 30195 - DNA, 25 bp, Saccharomyces pastorianus
gagacatgctttacatttgcccgtt

SEQ ID NO: 30196 - DNA, 25 bp, Saccharomyces pastorianus
gaaggtgacgccagagcgatcgtaa

SEQ ID NO: 30197 - DNA, 25 bp, Saccharomyces pastorianus
ggtttcatactgtctctcaagcgga

SEQ ID NO: 30198 - DNA, 25 bp, Saccharomyces pastorianus
taagatcgatagacgcgggtttcat

SEQ ID NO: 30199 - DNA, 25 bp, Saccharomyces pastorianus
acggcggaaaaagtgtgctcgaaat

SEQ ID NO: 30200 - DNA, 25 bp, Saccharomyces pastorianus
gcgctggcttccaagttttatggta

SEQ ID NO: 30201 - DNA, 25 bp, Saccharomyces pastorianus
agcatagcaagcgaattgtccacaa

SEQ ID NO: 30202 - DNA, 25 bp, Saccharomyces pastorianus
aacttgaaattggaggccgagtcat

SEQ ID NO: 30203 - DNA, 25 bp, Saccharomyces pastorianus
tggaagctggcctctctgagacgaa

SEQ ID NO: 30204 - DNA, 25 bp, Saccharomyces pastorianus
ggccgagtctaagcaattgtccgag

SEQ ID NO: 30205 - DNA, 25 bp, Saccharomyces pastorianus
aaggacttcgagcaggaaaccgtcg

SEQ ID NO: 30206 - DNA, 25 bp, Saccharomyces pastorianus
gtcattggcggtgaagaactctcag

SEQ ID NO: 30207 - DNA, 25 bp, Saccharomyces pastorianus
aagagtcgccgctttagaagagcaa

SEQ ID NO: 30208 - DNA, 25 bp, Saccharomyces pastorianus
gacaccaagctgaaggagactaccg

SEQ ID NO: 30209 - DNA, 25 bp, Saccharomyces pastorianus
ggaactgaccgccaagtacgaagag

SEQ ID NO: 30210 - DNA, 25 bp, Saccharomyces pastorianus
agcagaccgagcaggacaacgtcga

SEQ ID NO: 30211 - DNA, 25 bp, Saccharomyces pastorianus
gaatccgacttgaaggcggaccaat

SEQ ID NO: 30212 - DNA, 25 bp, Saccharomyces pastorianus
agaaccagctcaagtctttgaccgt

SEQ ID NO: 30213 - DNA, 25 bp, Saccharomyces pastorianus
tgataactttaccaccgatttagga

SEQ ID NO: 30214 - DNA, 25 bp, Saccharomyces pastorianus
tacccgtctgtcacaatttgccaaa

SEQ ID NO: 30215 - DNA, 25 bp, Saccharomyces pastorianus
attgttacaacatcccgtgatccaa

SEQ ID NO: 30216 - DNA, 25 bp, Saccharomyces pastorianus
atgccaaaccttgtggacgcttgta

SEQ ID NO: 30217 - DNA, 25 bp, Saccharomyces pastorianus
gacgcttgtaagaagtccggtacca

SEQ ID NO: 30218 - DNA, 25 bp, Saccharomyces pastorianus
ctttgactatatcgcatttcccaca

SEQ ID NO: 30219 - DNA, 25 bp, Saccharomyces pastorianus
gaagttaacccacatctgatatttg

SEQ ID NO: 30220 - DNA, 25 bp, Saccharomyces pastorianus
gaggtgtcccaacatctttgactat

SEQ ID NO: 30221 - DNA, 25 bp, Saccharomyces pastorianus
acggacccactgcacaatttagttt

SEQ ID NO: 30222 - DNA, 25 bp, Saccharomyces pastorianus
tgcatgagcatagaggtgtcccaac

SEQ ID NO: 30223 - DNA, 25 bp, Saccharomyces pastorianus
aactcttgtttccaaatgccgttag

SEQ ID NO: 30224 - DNA, 25 bp, Saccharomyces pastorianus
cacaggtggctttggtctcggtata

SEQ ID NO: 30225 - DNA, 25 bp, Saccharomyces pastorianus
gaactcgatatcaacagccctaagg

SEQ ID NO: 30226 - DNA, 25 bp, Saccharomyces pastorianus
gaggatctagagcagctttcttcac

SEQ ID NO: 30227 - DNA, 25 bp, Saccharomyces pastorianus
atataccaccaacctacaattctat

SEQ ID NO: 30228 - DNA, 25 bp, Saccharomyces pastorianus
aatcgagactttatcaccggtcata

SEQ ID NO: 30229 - DNA, 25 bp, Saccharomyces pastorianus
gtcaaagacgaatacttctcctccg

SEQ ID NO: 30230 - DNA, 25 bp, Saccharomyces pastorianus
tagataggctttgcatgctcttctg

SEQ ID NO: 30231 - DNA, 25 bp, Saccharomyces pastorianus
tggccaagacagactcacgcaatga

SEQ ID NO: 30232 - DNA, 25 bp, Saccharomyces pastorianus
aaaagagtcgaagaggtcctgccct

SEQ ID NO: 30233 - DNA, 25 bp, Saccharomyces pastorianus
gaactcggtattgacttaatggccc

SEQ ID NO: 30234 - DNA, 25 bp, Saccharomyces pastorianus
ggtcgagtttctaccaacgctaaag

SEQ ID NO: 30235 - DNA, 25 bp, Saccharomyces pastorianus
agacatcaagttcacggtcgccaag

SEQ ID NO: 30236 - DNA, 25 bp, Saccharomyces pastorianus
gagacatacttgtcgaatccctcaa

SEQ ID NO: 30237 - DNA, 25 bp, Saccharomyces pastorianus
tcacgccgctagacatctcgagagg

SEQ ID NO: 30238 - DNA, 25 bp, Saccharomyces pastorianus
acgtgtacgtggacactgtcggacc

SEQ ID NO: 30239 - DNA, 25 bp, Saccharomyces pastorianus
gcgcacgacgtgacaatggctctga

SEQ ID NO: 30240 - DNA, 25 bp, Saccharomyces pastorianus
agagatcccgatgaggtcctgggct

SEQ ID NO: 30241 - DNA, 25 bp, Saccharomyces pastorianus
acatggtgaggttttcgtggcagac

SEQ ID NO: 30242 - DNA, 25 bp, Saccharomyces pastorianus
aagaccaggcagctgcagttgcaaa

SEQ ID NO: 30243 - DNA, 25 bp, Saccharomyces pastorianus
cagaccctcttggacgacgttagta

SEQ ID NO: 30244 - DNA, 25 bp, Saccharomyces pastorianus
gacccaaagaccgtagcctggctga

SEQ ID NO: 30245 - DNA, 25 bp, Saccharomyces pastorianus
cagtgtggccagtgtggtcgccaaa

SEQ ID NO: 30246 - DNA, 25 bp, Saccharomyces pastorianus
gcagaaaacgggttctcctttgaca

SEQ ID NO: 30247 - DNA, 25 bp, Saccharomyces pastorianus
gttaacatgttcacctcgatcatca

SEQ ID NO: 30248 - DNA, 25 bp, Saccharomyces pastorianus
tagaattaacaagctggccccagag

SEQ ID NO: 30249 - DNA, 25 bp, Saccharomyces pastorianus
gatcctggcaatcgctacggtcgaa

SEQ ID NO: 30250 - DNA, 25 bp, Saccharomyces pastorianus
tcgtccaagatatccgtctctaaac

SEQ ID NO: 30251 - DNA, 25 bp, Saccharomyces pastorianus
gaccatagaaccattgacggcgcta

SEQ ID NO: 30252 - DNA, 25 bp, Saccharomyces pastorianus
gacgctaatgcttactggttaccta

SEQ ID NO: 30253 - DNA, 25 bp, Saccharomyces pastorianus
acggcgctagaggtgctgagttcat

SEQ ID NO: 30254 - DNA, 25 bp, Saccharomyces pastorianus
gaggaattccaaggcggcaccatct

SEQ ID NO: 30255 - DNA, 25 bp, Saccharomyces pastorianus
aagaacgtcgatgtctctgtcgcag

SEQ ID NO: 30256 - DNA, 25 bp, Saccharomyces pastorianus
gacaatccttgaatgccacggcaaa

SEQ ID NO: 30257 - DNA, 25 bp, Saccharomyces pastorianus
ctttcattctaagcgatgaatccaa

SEQ ID NO: 30258 - DNA, 25 bp, Saccharomyces pastorianus
tatatttgggttgggctcacacacc

SEQ ID NO: 30259 - DNA, 25 bp, Saccharomyces pastorianus
tctaccatctttcattctaagcgat

SEQ ID NO: 30260 - DNA, 25 bp, Saccharomyces pastorianus
cacacccaacagaccaaacttcctt

SEQ ID NO: 30261 - DNA, 25 bp, Saccharomyces pastorianus
gattccatttgttttatatttgggt

SEQ ID NO: 30262 - DNA, 25 bp, Saccharomyces pastorianus
tttgggttgggctcacacacccaac

SEQ ID NO: 30263 - DNA, 25 bp, Saccharomyces pastorianus
attctaagcgatgaatccaaagaac

SEQ ID NO: 30264 - DNA, 25 bp, Saccharomyces pastorianus
gggttgggctcacacacccaacaga

SEQ ID NO: 30265 - DNA, 25 bp, Saccharomyces pastorianus
ttttatatttgggttgggctcacac

SEQ ID NO: 30266 - DNA, 25 bp, Saccharomyces pastorianus
accatctttcattctaagcgatgaa

SEQ ID NO: 30267 - DNA, 25 bp, Saccharomyces pastorianus
ttatatttgggttgggctcacacac

SEQ ID NO: 30268 - DNA, 25 bp, Saccharomyces pastorianus
tatatttgggttgggctcacacacc

SEQ ID NO: 30269 - DNA, 25 bp, Saccharomyces pastorianus
tctaccatctttcattctaagcgat

SEQ ID NO: 30270 - DNA, 25 bp, Saccharomyces pastorianus
cacacccaacagaccaaacttcctt

SEQ ID NO: 30271 - DNA, 25 bp, Saccharomyces pastorianus
tcattctaagcgatgaatccaaaga

SEQ ID NO: 30272 - DNA, 25 bp, Saccharomyces pastorianus
gattccatttgttttatatttgggt

SEQ ID NO: 30273 - DNA, 25 bp, Saccharomyces pastorianus
gtagcacattatggctggattccat

SEQ ID NO: 30274 - DNA, 25 bp, Saccharomyces pastorianus
gggttgggctcacacacccaacaga

SEQ ID NO: 30275 - DNA, 25 bp, Saccharomyces pastorianus
aattttctaccatctttcattctaa

SEQ ID NO: 30276 - DNA, 25 bp, Saccharomyces pastorianus
ttttatatttgggttgggctcacac

SEQ ID NO: 30277 - DNA, 25 bp, Saccharomyces pastorianus
accatctttcattctaagcgatgaa

SEQ ID NO: 30278 - DNA, 25 bp, Saccharomyces pastorianus
ttatatttgggttgggctcacacac

SEQ ID NO: 30279 - DNA, 25 bp, Saccharomyces pastorianus
tgtgaacaacacacccgctactaat

SEQ ID NO: 30280 - DNA, 25 bp, Saccharomyces pastorianus
caaacactcaggctccatattggat

SEQ ID NO: 30281 - DNA, 25 bp, Saccharomyces pastorianus
gaatctcttgcaatttagctctgtg

SEQ ID NO: 30282 - DNA, 25 bp, Saccharomyces pastorianus
aagggacttcccacaaatcaagata

SEQ ID NO: 30283 - DNA, 25 bp, Saccharomyces pastorianus
gcataaaaagttcccctggtgtttg

SEQ ID NO: 30284 - DNA, 25 bp, Saccharomyces pastorianus
gaggtgccgcgaatgccaaggaact

SEQ ID NO: 30285 - DNA, 25 bp, Saccharomyces pastorianus
atagacggcttactccatctacaaa

SEQ ID NO: 30286 - DNA, 25 bp, Saccharomyces pastorianus
aggagaacgctccttctgaaaagga

SEQ ID NO: 30287 - DNA, 25 bp, Saccharomyces pastorianus
aagatgttaactcttcgcctttgaa

SEQ ID NO: 30288 - DNA, 25 bp, Saccharomyces pastorianus
ttcccaaccttatgacacactacta

SEQ ID NO: 30289 - DNA, 25 bp, Saccharomyces pastorianus
cccctggtgtttggaatctcttgca

SEQ ID NO: 30290 - DNA, 25 bp, Saccharomyces pastorianus
cacattgatgttactttcaacagaa

SEQ ID NO: 30291 - DNA, 25 bp, Saccharomyces pastorianus
ttccagtcagagatggtgttgccat

SEQ ID NO: 30292 - DNA, 25 bp, Saccharomyces pastorianus
atggtgttgccatcgaattctccac

SEQ ID NO: 30293 - DNA, 25 bp, Saccharomyces pastorianus
gagttatcagagttaccggcccaag

SEQ ID NO: 30294 - DNA, 25 bp, Saccharomyces pastorianus
aaaacgccgccgatttgcaacaaat

SEQ ID NO: 30295 - DNA, 25 bp, Saccharomyces pastorianus
cgaaatcagaaacttcttgggtgac

SEQ ID NO: 30296 - DNA, 25 bp, Saccharomyces pastorianus
gaagatgtttcccaaaacgccgccg

SEQ ID NO: 30297 - DNA, 25 bp, Saccharomyces pastorianus
gaaggtgctaagttcatcgaaatca

SEQ ID NO: 30298 - DNA, 25 bp, Saccharomyces pastorianus
catcgaattctccaccaacgtcaaa

SEQ ID NO: 30299 - DNA, 25 bp, Saccharomyces pastorianus
tcaattgattaaggttgctgtccac

SEQ ID NO: 30300 - DNA, 25 bp, Saccharomyces pastorianus
aaggtgtcactgtcaacattaaatc

SEQ ID NO: 30301 - DNA, 25 bp, Saccharomyces pastorianus
agggtgaagcagaccaagctccaga

SEQ ID NO: 30302 - DNA, 25 bp, Saccharomyces pastorianus
acatgtttctggtgactggttgaaa

SEQ ID NO: 30303 - DNA, 25 bp, Saccharomyces pastorianus
caacaggacacgtgcttctagaggt

SEQ ID NO: 30304 - DNA, 25 bp, Saccharomyces pastorianus
gaaagtggccattgtcccaggtgaa

SEQ ID NO: 30305 - DNA, 25 bp, Saccharomyces pastorianus
agccactccaactattccaaagaag

SEQ ID NO: 30306 - DNA, 25 bp, Saccharomyces pastorianus
gttaagttcaccatcaagttcccag

SEQ ID NO: 30307 - DNA, 25 bp, Saccharomyces pastorianus
tctccgagagaccacacaagcattt

SEQ ID NO: 30308 - DNA, 25 bp, Saccharomyces pastorianus
ggaagttcatgttgagccaggtatg

SEQ ID NO: 30309 - DNA, 25 bp, Saccharomyces pastorianus
tgatgttgtcttcctagtctccgag

SEQ ID NO: 30310 - DNA, 25 bp, Saccharomyces pastorianus
tggccaaaaaatcgtcttcaagggt

SEQ ID NO: 30311 - DNA, 25 bp, Saccharomyces pastorianus
ccagttccaaaatacggcggttatg

SEQ ID NO: 30312 - DNA, 25 bp, Saccharomyces pastorianus
agggtacccaatgtcgctgaactat

SEQ ID NO: 30313 - DNA, 25 bp, Saccharomyces pastorianus
tactggacgttaggaactaccccat

SEQ ID NO: 30314 - DNA, 25 bp, Saccharomyces pastorianus
ccattaaatttgtcaccagtggtaa

SEQ ID NO: 30315 - DNA, 25 bp, Saccharomyces pastorianus
ggaaactactacaaggctggaccac

SEQ ID NO: 30316 - DNA, 25 bp, Saccharomyces pastorianus
gaactaccccattttagtgcattcc

SEQ ID NO: 30317 - DNA, 25 bp, Saccharomyces pastorianus
aagaaacgccgctggaggagtatca

SEQ ID NO: 30318 - DNA, 25 bp, Saccharomyces pastorianus
ggagtatcagagtttcttggaccta

SEQ ID NO: 30319 - DNA, 25 bp, Saccharomyces pastorianus
gacattattcctgggtttgctagaa

SEQ ID NO: 30320 - DNA, 25 bp, Saccharomyces pastorianus
gtttcatcaaggaccaactacattt

SEQ ID NO: 30321 - DNA, 25 bp, Saccharomyces pastorianus
aaggctggaccactgcaggcatata

SEQ ID NO: 30322 - DNA, 25 bp, Saccharomyces pastorianus
atcgttataccgatcagggtaccca

SEQ ID NO: 30323 - DNA, 25 bp, Saccharomyces pastorianus
gacatcactgtaagcgctttcaatc

SEQ ID NO: 30324 - DNA, 25 bp, Saccharomyces pastorianus
tggcgatgacaacaacggcagcgat

SEQ ID NO: 30325 - DNA, 25 bp, Saccharomyces pastorianus
cagcataagtgtttcgcaagtcgat

SEQ ID NO: 30326 - DNA, 25 bp, Saccharomyces pastorianus
ggatcctctgaagccaagcatgaca

SEQ ID NO: 30327 - DNA, 25 bp, Saccharomyces pastorianus
agtacgaggtgcctttcttcaacac

SEQ ID NO: 30328 - DNA, 25 bp, Saccharomyces pastorianus
acgcagaaatccacggctatccaaa

SEQ ID NO: 30329 - DNA, 25 bp, Saccharomyces pastorianus
gaacccctcgcatgtagacgagagt

SEQ ID NO: 30330 - DNA, 25 bp, Saccharomyces pastorianus
gagcatcaagcttctagaccctgga

SEQ ID NO: 30331 - DNA, 25 bp, Saccharomyces pastorianus
tcaatcccgggtttttcagcataag

SEQ ID NO: 30332 - DNA, 25 bp, Saccharomyces pastorianus
ggacatattcgccaagagctcgttt

SEQ ID NO: 30333 - DNA, 25 bp, Saccharomyces pastorianus
aactactcatcaagcacgactacga

SEQ ID NO: 30334 - DNA, 25 bp, Saccharomyces pastorianus
atcgctaagggtgttgctgctggtc

SEQ ID NO: 30335 - DNA, 25 bp, Saccharomyces pastorianus
ttatcacgcgtcacatccgtcagat

SEQ ID NO: 30336 - DNA, 25 bp, Saccharomyces pastorianus
agggtgactcaggtttcatcgctaa

SEQ ID NO: 30337 - DNA, 25 bp, Saccharomyces pastorianus
tactaaggctggtcgtttatcacgc

SEQ ID NO: 30338 - DNA, 25 bp, Saccharomyces pastorianus
gcatgccctttccaatgctgctgta

SEQ ID NO: 30339 - DNA, 25 bp, Saccharomyces pastorianus
gctgctggtctactattgtctgtgg

SEQ ID NO: 30340 - DNA, 25 bp, Saccharomyces pastorianus
gggcttttcgctgccatcagaatgg

SEQ ID NO: 30341 - DNA, 25 bp, Saccharomyces pastorianus
agacatcgtcaccaagttgactgaa

SEQ ID NO: 30342 - DNA, 25 bp, Saccharomyces pastorianus
gtgaagactccaagactatgaccaa

SEQ ID NO: 30343 - DNA, 25 bp, Saccharomyces pastorianus
aagcaagccgtgtggtacatctcct

SEQ ID NO: 30344 - DNA, 25 bp, Saccharomyces pastorianus
aattgccatgggttcagcttaccga

SEQ ID NO: 30345 - DNA, 25 bp, Saccharomyces pastorianus
ttacctgatcctatcaatgctaccg

SEQ ID NO: 30346 - DNA, 25 bp, Saccharomyces pastorianus
tatactctctacacgatatgcctga

SEQ ID NO: 30347 - DNA, 25 bp, Saccharomyces pastorianus
ctaccgcatccctctttgaaagata

SEQ ID NO: 30348 - DNA, 25 bp, Saccharomyces pastorianus
tgactaccgtgccagttcactgaat

SEQ ID NO: 30349 - DNA, 25 bp, Saccharomyces pastorianus
cagagccgcttcactacttaataaa

SEQ ID NO: 30350 - DNA, 25 bp, Saccharomyces pastorianus
agggatggtcccaagtgactaccgt

SEQ ID NO: 30351 - DNA, 25 bp, Saccharomyces pastorianus
agctgcctgttttgatagattcccc

SEQ ID NO: 30352 - DNA, 25 bp, Saccharomyces pastorianus
ggaccatctatcaatgaacccgcta

SEQ ID NO: 30353 - DNA, 25 bp, Saccharomyces pastorianus
acatctctggcgttcccgttggaaa

SEQ ID NO: 30354 - DNA, 25 bp, Saccharomyces pastorianus
gggacgctgttcctgaattactgaa

SEQ ID NO: 30355 - DNA, 25 bp, Saccharomyces pastorianus
gaacccgctaatctaactgcagaga

SEQ ID NO: 30356 - DNA, 25 bp, Saccharomyces pastorianus
ttcttattcgaaaacacgggcctag

SEQ ID NO: 30357 - DNA, 25 bp, Saccharomyces pastorianus
actggatttctcataaactggacga

SEQ ID NO: 30358 - DNA, 25 bp, Saccharomyces pastorianus
gattatgatatgtacctgcctttga

SEQ ID NO: 30359 - DNA, 25 bp, Saccharomyces pastorianus
agtattggtccacttgtacccgaat

SEQ ID NO: 30360 - DNA, 25 bp, Saccharomyces pastorianus
acacgggcctagatctttataacaa

SEQ ID NO: 30361 - DNA, 25 bp, Saccharomyces pastorianus
gaaactatcgctcttctataatgtt

SEQ ID NO: 30362 - DNA, 25 bp, Saccharomyces pastorianus
gagcatcattgttgaccgtcgaaat

SEQ ID NO: 30363 - DNA, 25 bp, Saccharomyces pastorianus
tatccaaattaacctcaccgacaat

SEQ ID NO: 30364 - DNA, 25 bp, Saccharomyces pastorianus
gtaaatatgattttccccgtggact

SEQ ID NO: 30365 - DNA, 25 bp, Saccharomyces pastorianus
gtatttgcctcaagcattgaccgat

SEQ ID NO: 30366 - DNA, 25 bp, Saccharomyces pastorianus
gacaatagccgatcacatttgcgat

SEQ ID NO: 30367 - DNA, 25 bp, Saccharomyces pastorianus
gtctcgtccatcatcgttgacaacg

SEQ ID NO: 30368 - DNA, 25 bp, Saccharomyces pastorianus
agacagagtaccctgacatcgacgt

SEQ ID NO: 30369 - DNA, 25 bp, Saccharomyces pastorianus
accactagagatatcggcggttctt

SEQ ID NO: 30370 - DNA, 25 bp, Saccharomyces pastorianus
ccggtgctaacttcggcagagacta

SEQ ID NO: 30371 - DNA, 25 bp, Saccharomyces pastorianus
agagactacgccgttttcgaaccag

SEQ ID NO: 30372 - DNA, 25 bp, Saccharomyces pastorianus
tccccggtgtggtagagtccttgaa

SEQ ID NO: 30373 - DNA, 25 bp, Saccharomyces pastorianus
gaaaggctgttaccgctgtgcataa

SEQ ID NO: 30374 - DNA, 25 bp, Saccharomyces pastorianus
agattcgcctttgatttcgccaaaa

SEQ ID NO: 30375 - DNA, 25 bp, Saccharomyces pastorianus
atcggtgccgccttaattggtggtg

SEQ ID NO: 30376 - DNA, 25 bp, Saccharomyces pastorianus
aaggccgttcacgaaactattgcag

SEQ ID NO: 30377 - DNA, 25 bp, Saccharomyces pastorianus
acgttggtctggacatcaagggcca

SEQ ID NO: 30378 - DNA, 25 bp, Saccharomyces pastorianus
gttcgctgtctcgtcgtggccatgg

SEQ ID NO: 30379 - DNA, 25 bp, Saccharomyces pastorianus
agatggacatcacccagaagctagt

SEQ ID NO: 30380 - DNA, 25 bp, Saccharomyces pastorianus
tggaacgcatggtgagactcgactt

SEQ ID NO: 30381 - DNA, 25 bp, Saccharomyces pastorianus
tgaagatcacctcgtgcacactgaa

SEQ ID NO: 30382 - DNA, 25 bp, Saccharomyces pastorianus
gtgcacactgaacttcatcgtcttg

SEQ ID NO: 30383 - DNA, 25 bp, Saccharomyces pastorianus
acaagctgaccaatgatgccgatat

SEQ ID NO: 30384 - DNA, 25 bp, Saccharomyces pastorianus
gagaattcgatggtgccgttccacg

SEQ ID NO: 30385 - DNA, 25 bp, Saccharomyces pastorianus
atcgtcttgctactcacggcgtggg

SEQ ID NO: 30386 - DNA, 25 bp, Saccharomyces pastorianus
ccagaagctagtgtatcccttcggg

SEQ ID NO: 30387 - DNA, 25 bp, Saccharomyces pastorianus
gggagtcggcaaggcttttacaaag

SEQ ID NO: 30388 - DNA, 25 bp, Saccharomyces pastorianus
gaagtacctacaagactacaagctg

SEQ ID NO: 30389 - DNA, 25 bp, Saccharomyces pastorianus
aatcgtcactgaccacaacaggcgt

SEQ ID NO: 30390 - DNA, 25 bp, Saccharomyces pastorianus
aggagccgtttgtcaacataccgtc

SEQ ID NO: 30391 - DNA, 25 bp, Saccharomyces pastorianus
gagtataggcgttttgcgttcccga

SEQ ID NO: 30392 - DNA, 25 bp, Saccharomyces pastorianus
ggagatatatcgcagcagtttcccc

SEQ ID NO: 30393 - DNA, 25 bp, Saccharomyces pastorianus
agttgacatccatcttggtgctcat

SEQ ID NO: 30394 - DNA, 25 bp, Saccharomyces pastorianus
gaaatcgtgcttgatccggcaaacc

SEQ ID NO: 30395 - DNA, 25 bp, Saccharomyces pastorianus
cataccgtccgacttgttaaccaag

SEQ ID NO: 30396 - DNA, 25 bp, Saccharomyces pastorianus
gcccgaaaacttcagccatgtcgtg

SEQ ID NO: 30397 - DNA, 25 bp, Saccharomyces pastorianus
gttcccgaaggccagagcgcttgac

SEQ ID NO: 30398 - DNA, 25 bp, Saccharomyces pastorianus
gactttacaggccatgaacacgttg

SEQ ID NO: 30399 - DNA, 25 bp, Saccharomyces pastorianus
agcgcttgaccagcagttcattgag

SEQ ID NO: 30400 - DNA, 25 bp, Saccharomyces pastorianus
tgaagacactaacttggctgccatc

SEQ ID NO: 30401 - DNA, 25 bp, Saccharomyces pastorianus
gaagacactaacttggctgccatcc

SEQ ID NO: 30402 - DNA, 25 bp, Saccharomyces pastorianus
aagacactaacttggctgccatcca

SEQ ID NO: 30403 - DNA, 25 bp, Saccharomyces pastorianus
ctgatttgagattccaatcttctgc

SEQ ID NO: 30404 - DNA, 25 bp, Saccharomyces pastorianus
aggtaccgtcgccttgagagaaatc

SEQ ID NO: 30405 - DNA, 25 bp, Saccharomyces pastorianus
gatttcaagactgatttgagattcc

SEQ ID NO: 30406 - DNA, 25 bp, Saccharomyces pastorianus
gtaccgtcgccttgagagaaatcag

SEQ ID NO: 30407 - DNA, 25 bp, Saccharomyces pastorianus
agactgatttgagattccaatcttc

SEQ ID NO: 30408 - DNA, 25 bp, Saccharomyces pastorianus
taccgtcgccttgagagaaatcaga

SEQ ID NO: 30409 - DNA, 25 bp, Saccharomyces pastorianus
tcaagactgatttgagattccaatc

SEQ ID NO: 30410 - DNA, 25 bp, Saccharomyces pastorianus
ggtaccgtcgccttgagagaaatca

SEQ ID NO: 30411 - DNA, 25 bp, Saccharomyces pastorianus
atctccggtttaatctacgaagaag

SEQ ID NO: 30412 - DNA, 25 bp, Saccharomyces pastorianus
tggtgtcaagcgtatctccggttta

SEQ ID NO: 30413 - DNA, 25 bp, Saccharomyces pastorianus
agcgtatctccggtttaatctacga

SEQ ID NO: 30414 - DNA, 25 bp, Saccharomyces pastorianus
tcaagcgtatctccggtttaatcta

SEQ ID NO: 30415 - DNA, 25 bp, Saccharomyces pastorianus
gtgtcaagcgtatctccggtttaat

SEQ ID NO: 30416 - DNA, 25 bp, Saccharomyces pastorianus
gcgtatctccggtttaatctacgaa

SEQ ID NO: 30417 - DNA, 25 bp, Saccharomyces pastorianus
gtcaagcgtatctccggtttaatct

SEQ ID NO: 30418 - DNA, 25 bp, Saccharomyces pastorianus
tgtcaagcgtatctccggtttaatc

SEQ ID NO: 30419 - DNA, 25 bp, Saccharomyces pastorianus
tctccggtttaatctacgaagaagt

SEQ ID NO: 30420 - DNA, 25 bp, Saccharomyces pastorianus
gtatctccggtttaatctacgaaga

SEQ ID NO: 30421 - DNA, 25 bp, Saccharomyces pastorianus
ggtgtcaagcgtatctccggtttaa

SEQ ID NO: 30422 - DNA, 25 bp, Saccharomyces pastorianus
gacgtgcattacttcagggacatcg

SEQ ID NO: 30423 - DNA, 25 bp, Saccharomyces pastorianus
accttagacttggacgacgtgcatt

SEQ ID NO: 30424 - DNA, 25 bp, Saccharomyces pastorianus
gtgccccatgaacaaactcgatatt

SEQ ID NO: 30425 - DNA, 25 bp, Saccharomyces pastorianus
cagacattcttccatacagcattgc

SEQ ID NO: 30426 - DNA, 25 bp, Saccharomyces pastorianus
gatattgaggactccactgggttct

SEQ ID NO: 30427 - DNA, 25 bp, Saccharomyces pastorianus
cgatccgaggttccagcgcaagaag

SEQ ID NO: 30428 - DNA, 25 bp, Saccharomyces pastorianus
cactgggttctgtctcaatgtttgg

SEQ ID NO: 30429 - DNA, 25 bp, Saccharomyces pastorianus
gaatttagtcaacagggctcgctcc

SEQ ID NO: 30430 - DNA, 25 bp, Saccharomyces pastorianus
aggagtttccctacgtgacgagcga

SEQ ID NO: 30431 - DNA, 25 bp, Saccharomyces pastorianus
gcggttgcagatgtaagtgccccat

SEQ ID NO: 30432 - DNA, 25 bp, Saccharomyces pastorianus
acaacctgtgtcatttctggagtaa

SEQ ID NO: 30433 - DNA, 25 bp, Saccharomyces pastorianus
gaagatgtattactcccctgtacga

SEQ ID NO: 30434 - DNA, 25 bp, Saccharomyces pastorianus
ttaccaacccatcacgcagaagtta

SEQ ID NO: 30435 - DNA, 25 bp, Saccharomyces pastorianus
ggaaagaagttcacaagaccgtata

SEQ ID NO: 30436 - DNA, 25 bp, Saccharomyces pastorianus
gtgatgccctcggtaggcatttcaa

SEQ ID NO: 30437 - DNA, 25 bp, Saccharomyces pastorianus
taacaatttcggtgtgcttctaaac

SEQ ID NO: 30438 - DNA, 25 bp, Saccharomyces pastorianus
agatgacttggaccagtttgaacca

SEQ ID NO: 30439 - DNA, 25 bp, Saccharomyces pastorianus
cgataatagtgcattctcttcgaag

SEQ ID NO: 30440 - DNA, 25 bp, Saccharomyces pastorianus
aattttgcttgtgacgtttgtggaa

SEQ ID NO: 30441 - DNA, 25 bp, Saccharomyces pastorianus
cagcgctaccatcagtgttcataat

SEQ ID NO: 30442 - DNA, 25 bp, Saccharomyces pastorianus
tattactcccctgtacgaggaagct

SEQ ID NO: 30443 - DNA, 25 bp, Saccharomyces pastorianus
acgaaaggccattcatatgttctat

SEQ ID NO: 30444 - DNA, 25 bp, Saccharomyces pastorianus
ttgccgcccacgaaaacgatttaat

SEQ ID NO: 30445 - DNA, 25 bp, Saccharomyces pastorianus
acctctacaggtatcggacttgtgc

SEQ ID NO: 30446 - DNA, 25 bp, Saccharomyces pastorianus
ggacttgtgctaaggcatcccatgg

SEQ ID NO: 30447 - DNA, 25 bp, Saccharomyces pastorianus
actaaacttcagcttacctattgcc

SEQ ID NO: 30448 - DNA, 25 bp, Saccharomyces pastorianus
atttcattactttctctaccacttt

SEQ ID NO: 30449 - DNA, 25 bp, Saccharomyces pastorianus
ggcatcccatggctagatttgaact

SEQ ID NO: 30450 - DNA, 25 bp, Saccharomyces pastorianus
taaggaacattctacctctacaggt

SEQ ID NO: 30451 - DNA, 25 bp, Saccharomyces pastorianus
ataggtggcgatgcttttgtttcat

SEQ ID NO: 30452 - DNA, 25 bp, Saccharomyces pastorianus
gcatcggtcagctttctaaggaaca

SEQ ID NO: 30453 - DNA, 25 bp, Saccharomyces pastorianus
ggaatcattttatgtgtcctacaaa

SEQ ID NO: 30454 - DNA, 25 bp, Saccharomyces pastorianus
atgtctctaagcaactgcatcggtc

SEQ ID NO: 30455 - DNA, 25 bp, Saccharomyces pastorianus
atcattagcgtctatggcttccgaa

SEQ ID NO: 30456 - DNA, 25 bp, Saccharomyces pastorianus
aaactgctggtctttgatcaacgat

SEQ ID NO: 30457 - DNA, 25 bp, Saccharomyces pastorianus
gaagcaaatcgtccaggtcttgaaa

SEQ ID NO: 30458 - DNA, 25 bp, Saccharomyces pastorianus
accgttttatggctgaatctctcgt

SEQ ID NO: 30459 - DNA, 25 bp, Saccharomyces pastorianus
tgtccatcatccttatcaatccttg

SEQ ID NO: 30460 - DNA, 25 bp, Saccharomyces pastorianus
gtggcatgtctgttcattaccattt

SEQ ID NO: 30461 - DNA, 25 bp, Saccharomyces pastorianus
agaggttctgaatcttctggttcgc

SEQ ID NO: 30462 - DNA, 25 bp, Saccharomyces pastorianus
gttcgcctgctcaattagctttcaa

SEQ ID NO: 30463 - DNA, 25 bp, Saccharomyces pastorianus
tgtacccacctcatattattgctgt

SEQ ID NO: 30464 - DNA, 25 bp, Saccharomyces pastorianus
gcttccgaagccatcagaggttctg

SEQ ID NO: 30465 - DNA, 25 bp, Saccharomyces pastorianus
aatgatgttcatttactgtacccac

SEQ ID NO: 30466 - DNA, 25 bp, Saccharomyces pastorianus
tgaaggttttggtgctttctggaaa

SEQ ID NO: 30467 - DNA, 25 bp, Saccharomyces pastorianus
cgttctcttttgcaagtgatattac

SEQ ID NO: 30468 - DNA, 25 bp, Saccharomyces pastorianus
attactactaatttgctcatgcact

SEQ ID NO: 30469 - DNA, 25 bp, Saccharomyces pastorianus
ggccatctctgttagatcgctacaa

SEQ ID NO: 30470 - DNA, 25 bp, Saccharomyces pastorianus
tgtttaattttcgttctcttttgca

SEQ ID NO: 30471 - DNA, 25 bp, Saccharomyces pastorianus
cagtccgtatgtaagtttggcatgt

SEQ ID NO: 30472 - DNA, 25 bp, Saccharomyces pastorianus
tgcacttatgttcatggacagtggc

SEQ ID NO: 30473 - DNA, 25 bp, Saccharomyces pastorianus
gatcgctacaaaaaccatgaaggtt

SEQ ID NO: 30474 - DNA, 25 bp, Saccharomyces pastorianus
aatttgctcatgcacttatgttcat

SEQ ID NO: 30475 - DNA, 25 bp, Saccharomyces pastorianus
ggacagtggccatctctgttagatc

SEQ ID NO: 30476 - DNA, 25 bp, Saccharomyces pastorianus
tgagagggccagtccgtatgtaagt

SEQ ID NO: 30477 - DNA, 25 bp, Saccharomyces pastorianus
acggtaatcaattttctgggagaca

SEQ ID NO: 30478 - DNA, 25 bp, Saccharomyces pastorianus
tattgtacatctcctgggccacaga

SEQ ID NO: 30479 - DNA, 25 bp, Saccharomyces pastorianus
ccgctggttcctttggtcgatgaaa

SEQ ID NO: 30480 - DNA, 25 bp, Saccharomyces pastorianus
gtactttgctagttgtcgttcatga

SEQ ID NO: 30481 - DNA, 25 bp, Saccharomyces pastorianus
gatacttccgatgtttgggccaaga

SEQ ID NO: 30482 - DNA, 25 bp, Saccharomyces pastorianus
agaggcaacggatttcatactagat

SEQ ID NO: 30483 - DNA, 25 bp, Saccharomyces pastorianus
atctggtacaattgacctgtcctcg

SEQ ID NO: 30484 - DNA, 25 bp, Saccharomyces pastorianus
atcaagtactttccagccattgcta

SEQ ID NO: 30485 - DNA, 25 bp, Saccharomyces pastorianus
tacggacggactaagcaatactgtt

SEQ ID NO: 30486 - DNA, 25 bp, Saccharomyces pastorianus
atacccctaactttgttcgaagctg

SEQ ID NO: 30487 - DNA, 25 bp, Saccharomyces pastorianus
tgtcctcgtcagttgtcatcgataa

SEQ ID NO: 30488 - DNA, 25 bp, Saccharomyces pastorianus
agcgtatgatcaacctgctcagttc

SEQ ID NO: 30489 - DNA, 25 bp, Saccharomyces pastorianus
atagcatctcttacctcatcaagta

SEQ ID NO: 30490 - DNA, 25 bp, Saccharomyces pastorianus
gagggtccaggcaagctaatagcat

SEQ ID NO: 30491 - DNA, 25 bp, Saccharomyces pastorianus
aaagatagtcttccgagtgattcaa

SEQ ID NO: 30492 - DNA, 25 bp, Saccharomyces pastorianus
ggcattcgttggtatcgttgacagt

SEQ ID NO: 30493 - DNA, 25 bp, Saccharomyces pastorianus
agacgatgattcttcgtcctcttca

SEQ ID NO: 30494 - DNA, 25 bp, Saccharomyces pastorianus
aagcggtcccataaacgtatccctg

SEQ ID NO: 30495 - DNA, 25 bp, Saccharomyces pastorianus
ttattccacccacgaaaacgctaag

SEQ ID NO: 30496 - DNA, 25 bp, Saccharomyces pastorianus
gcatcgatatcaagagccccagttt

SEQ ID NO: 30497 - DNA, 25 bp, Saccharomyces pastorianus
aagtctacctgaatcggcattcgtt

SEQ ID NO: 30498 - DNA, 25 bp, Saccharomyces pastorianus
aagtactccaggaagtagctccgct

SEQ ID NO: 30499 - DNA, 25 bp, Saccharomyces pastorianus
gacaaacaactttatcgttactcta

SEQ ID NO: 30500 - DNA, 25 bp, Saccharomyces pastorianus
agggtacaccatcaagcttccagat

SEQ ID NO: 30501 - DNA, 25 bp, Saccharomyces pastorianus
ggcggttctatcgaacacgagttcg

SEQ ID NO: 30502 - DNA, 25 bp, Saccharomyces pastorianus
gaagaacaccccagacgtggaaact

SEQ ID NO: 30503 - DNA, 25 bp, Saccharomyces pastorianus
gaacacgagttcgatattatcaaag

SEQ ID NO: 30504 - DNA, 25 bp, Saccharomyces pastorianus
aagttcttggattccgttcatcgtg

SEQ ID NO: 30505 - DNA, 25 bp, Saccharomyces pastorianus
aagcttccagatgttctcaaattga

SEQ ID NO: 30506 - DNA, 25 bp, Saccharomyces pastorianus
tcgatattatcaaagggtacaccat

SEQ ID NO: 30507 - DNA, 25 bp, Saccharomyces pastorianus
gattccgttcatcgtgtaggcggtt

SEQ ID NO: 30508 - DNA, 25 bp, Saccharomyces pastorianus
atcgtgtaggcggttctatcgaaca

SEQ ID NO: 30509 - DNA, 25 bp, Saccharomyces pastorianus
gaacagcatagcgatgtcatccaga

SEQ ID NO: 30510 - DNA, 25 bp, Saccharomyces pastorianus
atgccaccaaattgcttcttctgat

SEQ ID NO: 30511 - DNA, 25 bp, Saccharomyces pastorianus
tacctgccccggtaaacagaattct

SEQ ID NO: 30512 - DNA, 25 bp, Saccharomyces pastorianus
aggtatccggtctagatggttcaca

SEQ ID NO: 30513 - DNA, 25 bp, Saccharomyces pastorianus
aaatcccagagctatttctaaagtg

SEQ ID NO: 30514 - DNA, 25 bp, Saccharomyces pastorianus
ctactgccaatcctcattcttggta

SEQ ID NO: 30515 - DNA, 25 bp, Saccharomyces pastorianus
aagaactcgcagttacatttcgata

SEQ ID NO: 30516 - DNA, 25 bp, Saccharomyces pastorianus
tcttggtaatcttgccgaggtaatc

SEQ ID NO: 30517 - DNA, 25 bp, Saccharomyces pastorianus
tacgaactttgagtggcaagacttt

SEQ ID NO: 30518 - DNA, 25 bp, Saccharomyces pastorianus
aatgacaagtctactgccaatcctc

SEQ ID NO: 30519 - DNA, 25 bp, Saccharomyces pastorianus
catcgattccatgaccagagcaata

SEQ ID NO: 30520 - DNA, 25 bp, Saccharomyces pastorianus
gaagagtatgccaacccaatctata

SEQ ID NO: 30521 - DNA, 25 bp, Saccharomyces pastorianus
gacaaaacgttccattccacgaatt

SEQ ID NO: 30522 - DNA, 25 bp, Saccharomyces pastorianus
aatgtgacctgctattcgctaagag

SEQ ID NO: 30523 - DNA, 25 bp, Saccharomyces pastorianus
atgagagtccttttggccacgacaa

SEQ ID NO: 30524 - DNA, 25 bp, Saccharomyces pastorianus
gacggtaccaaatcctttagacaag

SEQ ID NO: 30525 - DNA, 25 bp, Saccharomyces pastorianus
gaaattcgaatctgctttgaagcca

SEQ ID NO: 30526 - DNA, 25 bp, Saccharomyces pastorianus
gtcgttgttgtttccagtggcatga

SEQ ID NO: 30527 - DNA, 25 bp, Saccharomyces pastorianus
gaagacatcttagccagcatgaagc

SEQ ID NO: 30528 - DNA, 25 bp, Saccharomyces pastorianus
aagacctggtcacttactgtaaaag

SEQ ID NO: 30529 - DNA, 25 bp, Saccharomyces pastorianus
ggcatgaagcccatcatcaaggttt

SEQ ID NO: 30530 - DNA, 25 bp, Saccharomyces pastorianus
acggtgtttccgacttaagtgctgc

SEQ ID NO: 30531 - DNA, 25 bp, Saccharomyces pastorianus
aagaaaatgatgtccctgtcgttgt

SEQ ID NO: 30532 - DNA, 25 bp, Saccharomyces pastorianus
gactgacagatcatcgtacgtaact

SEQ ID NO: 30533 - DNA, 25 bp, Saccharomyces pastorianus
gatgtccagtccgatattgtagccc

SEQ ID NO: 30534 - DNA, 25 bp, Saccharomyces pastorianus
attactccggatggccaaacatttg

SEQ ID NO: 30535 - DNA, 25 bp, Saccharomyces pastorianus
aaagacctggctttgatgctaggaa

SEQ ID NO: 30536 - DNA, 25 bp, Saccharomyces pastorianus
caaacatttgaaagtgaggctgccc

SEQ ID NO: 30537 - DNA, 25 bp, Saccharomyces pastorianus
tcaattttaattactccggatggcc

SEQ ID NO: 30538 - DNA, 25 bp, Saccharomyces pastorianus
aagacgtcgacaaattcaattgcat

SEQ ID NO: 30539 - DNA, 25 bp, Saccharomyces pastorianus
gtacggtgacaagacatttcagaca

SEQ ID NO: 30540 - DNA, 25 bp, Saccharomyces pastorianus
tattgtagcccagggatttggctcc

SEQ ID NO: 30541 - DNA, 25 bp, Saccharomyces pastorianus
atttggctcccttggtttaatgaca

SEQ ID NO: 30542 - DNA, 25 bp, Saccharomyces pastorianus
acagatgttaaagtccaagggcggg

SEQ ID NO: 30543 - DNA, 25 bp, Saccharomyces pastorianus
agctctccctcatatccggaagaag

SEQ ID NO: 30544 - DNA, 25 bp, Saccharomyces pastorianus
aggcatgcccggtggtttcagatca

SEQ ID NO: 30545 - DNA, 25 bp, Saccharomyces pastorianus
ttctacgtaccctggccaaggtatg

SEQ ID NO: 30546 - DNA, 25 bp, Saccharomyces pastorianus
agtccaagtcaatctgccagttagt

SEQ ID NO: 30547 - DNA, 25 bp, Saccharomyces pastorianus
gatattcaattaaaacccggctgga

SEQ ID NO: 30548 - DNA, 25 bp, Saccharomyces pastorianus
gaaagggtccacacggagcatccga

SEQ ID NO: 30549 - DNA, 25 bp, Saccharomyces pastorianus
gtagaaccttaccattgtcaagagt

SEQ ID NO: 30550 - DNA, 25 bp, Saccharomyces pastorianus
gtggactacccaatatcgttaaatg

SEQ ID NO: 30551 - DNA, 25 bp, Saccharomyces pastorianus
ttgtcaagagtgcaacccgttcaac

SEQ ID NO: 30552 - DNA, 25 bp, Saccharomyces pastorianus
gacttgatttacactttgccactat

SEQ ID NO: 30553 - DNA, 25 bp, Saccharomyces pastorianus
ggtttcagatcagcatcgagctctc

SEQ ID NO: 30554 - DNA, 25 bp, Saccharomyces pastorianus
aagtgatgggtctatgctggccgca

SEQ ID NO: 30555 - DNA, 25 bp, Saccharomyces pastorianus
atgctctgcggatcatacggctcgt

SEQ ID NO: 30556 - DNA, 25 bp, Saccharomyces pastorianus
acacctctctacagtctttatcaat

SEQ ID NO: 30557 - DNA, 25 bp, Saccharomyces pastorianus
acttagtaactgcatcatctgatca

SEQ ID NO: 30558 - DNA, 25 bp, Saccharomyces pastorianus
gagcacattctacttatataaccag

SEQ ID NO: 30559 - DNA, 25 bp, Saccharomyces pastorianus
aaaggcaattgctacgtgtgggaaa

SEQ ID NO: 30560 - DNA, 25 bp, Saccharomyces pastorianus
tgggattgtgcatttagcgctgaca

SEQ ID NO: 30561 - DNA, 25 bp, Saccharomyces pastorianus
tacggctcgtgtgtggtctattgaa

SEQ ID NO: 30562 - DNA, 25 bp, Saccharomyces pastorianus
agcgctgacagtgcgtacttagtaa

SEQ ID NO: 30563 - DNA, 25 bp, Saccharomyces pastorianus
gggaaatgcctaatcataccgatgc

SEQ ID NO: 30564 - DNA, 25 bp, Saccharomyces pastorianus
aaacatttggcgacatgctctgcgg

SEQ ID NO: 30565 - DNA, 25 bp, Saccharomyces pastorianus
aaaggacatcggcttggcaacatca

SEQ ID NO: 30566 - DNA, 25 bp, Saccharomyces pastorianus
atttgaagcctgtctttccagaaac

SEQ ID NO: 30567 - DNA, 25 bp, Saccharomyces pastorianus
aactcgcgtaagagcttccctgaag

SEQ ID NO: 30568 - DNA, 25 bp, Saccharomyces pastorianus
gtgtagcgaccttttgaactcatct

SEQ ID NO: 30569 - DNA, 25 bp, Saccharomyces pastorianus
gaactcatctacttctttcaataat

SEQ ID NO: 30570 - DNA, 25 bp, Saccharomyces pastorianus
ttccctgaagaatgggttctccgtt

SEQ ID NO: 30571 - DNA, 25 bp, Saccharomyces pastorianus
gagaaaatcccaagcctacaaacca

SEQ ID NO: 30572 - DNA, 25 bp, Saccharomyces pastorianus
ttaatcgggtacatttctgaacaag

SEQ ID NO: 30573 - DNA, 25 bp, Saccharomyces pastorianus
gtttctaggcgttttgactatatca

SEQ ID NO: 30574 - DNA, 25 bp, Saccharomyces pastorianus
ggcaacatcatatttaactcgcgta

SEQ ID NO: 30575 - DNA, 25 bp, Saccharomyces pastorianus
gaatgccaccaaagctcttttcaaa

SEQ ID NO: 30576 - DNA, 25 bp, Saccharomyces pastorianus
cgtgtccttctatgaccctaaagat

SEQ ID NO: 30577 - DNA, 25 bp, Saccharomyces pastorianus
atgacctttttgagaccattggaaa

SEQ ID NO: 30578 - DNA, 25 bp, Saccharomyces pastorianus
gagtgatctttatgacctttttgag

SEQ ID NO: 30579 - DNA, 25 bp, Saccharomyces pastorianus
aacttacctacttccatcaattggc

SEQ ID NO: 30580 - DNA, 25 bp, Saccharomyces pastorianus
gaaatgttgcacacgccgatgtaga

SEQ ID NO: 30581 - DNA, 25 bp, Saccharomyces pastorianus
tcccaatggaagattctccggtaaa

SEQ ID NO: 30582 - DNA, 25 bp, Saccharomyces pastorianus
tacaggatctggtaccgtgtccttc

SEQ ID NO: 30583 - DNA, 25 bp, Saccharomyces pastorianus
ggtacgactcgaaaggagcgccaac

SEQ ID NO: 30584 - DNA, 25 bp, Saccharomyces pastorianus
gagcgccaaccggaatatctgtagt

SEQ ID NO: 30585 - DNA, 25 bp, Saccharomyces pastorianus
actgcagtaatttgccattttctac

SEQ ID NO: 30586 - DNA, 25 bp, Saccharomyces pastorianus
tgaaaaggcctctacaggatctggt

SEQ ID NO: 30587 - DNA, 25 bp, Saccharomyces pastorianus
gaatggtttggctggcccactgcat

SEQ ID NO: 30588 - DNA, 25 bp, Saccharomyces pastorianus
gaagcctcattctataccgtattgt

SEQ ID NO: 30589 - DNA, 25 bp, Saccharomyces pastorianus
aatgtagattcccattccggtgttc

SEQ ID NO: 30590 - DNA, 25 bp, Saccharomyces pastorianus
tttagtgggttctgcattgtcttct

SEQ ID NO: 30591 - DNA, 25 bp, Saccharomyces pastorianus
ggttatggtcatgccgtcttaagaa

SEQ ID NO: 30592 - DNA, 25 bp, Saccharomyces pastorianus
gaactattcaagttggtgtccacca

SEQ ID NO: 30593 - DNA, 25 bp, Saccharomyces pastorianus
gagccattggtgtattgcctcaact

SEQ ID NO: 30594 - DNA, 25 bp, Saccharomyces pastorianus
catatctatctttagccgctggttt

SEQ ID NO: 30595 - DNA, 25 bp, Saccharomyces pastorianus
actgcatggtcgtgccaaccaagaa

SEQ ID NO: 30596 - DNA, 25 bp, Saccharomyces pastorianus
tactatgggttgactgaagcctcat

SEQ ID NO: 30597 - DNA, 25 bp, Saccharomyces pastorianus
gtagcgccaggtgttttaactaagc

SEQ ID NO: 30598 - DNA, 25 bp, Saccharomyces pastorianus
atgggcactattcacttttggtctc

SEQ ID NO: 30599 - DNA, 25 bp, Saccharomyces pastorianus
ggttcggtattctggacgcctacaa

SEQ ID NO: 30600 - DNA, 25 bp, Saccharomyces pastorianus
ggtccataagttcgctaatcctgct

SEQ ID NO: 30601 - DNA, 25 bp, Saccharomyces pastorianus
ttgttctttctcttagctgtcacgt

SEQ ID NO: 30602 - DNA, 25 bp, Saccharomyces pastorianus
acggtggcctggtgcaactgattgc

SEQ ID NO: 30603 - DNA, 25 bp, Saccharomyces pastorianus
aatgcttacgcaggtatcgccaata

SEQ ID NO: 30604 - DNA, 25 bp, Saccharomyces pastorianus
gctgtcacgttcttactattgtcaa

SEQ ID NO: 30605 - DNA, 25 bp, Saccharomyces pastorianus
gtactttctctgtgcaacgctaggg

SEQ ID NO: 30606 - DNA, 25 bp, Saccharomyces pastorianus
aatacttttggtggaactgccctgt

SEQ ID NO: 30607 - DNA, 25 bp, Saccharomyces pastorianus
taaggagtctgacctcgggaacgcc

SEQ ID NO: 30608 - DNA, 25 bp, Saccharomyces pastorianus
aacgtcgtcgtagggtgtgccatgt

SEQ ID NO: 30609 - DNA, 25 bp, Saccharomyces pastorianus
aagagcgtcaaatttcccacaagaa

SEQ ID NO: 30610 - DNA, 25 bp, Saccharomyces pastorianus
gtaaagaactattccaccacccagg

SEQ ID NO: 30611 - DNA, 25 bp, Saccharomyces pastorianus
gtttattacagcagcccaagtggcc

SEQ ID NO: 30612 - DNA, 25 bp, Saccharomyces pastorianus
tgtacagtttgcaaccgtcggtgga

SEQ ID NO: 30613 - DNA, 25 bp, Saccharomyces pastorianus
ttgaccccgtcaaatatcagatccc

SEQ ID NO: 30614 - DNA, 25 bp, Saccharomyces pastorianus
gcacgactgttacaaggtgacccta

SEQ ID NO: 30615 - DNA, 25 bp, Saccharomyces pastorianus
ccagcacgtggttctcaaatgttta

SEQ ID NO: 30616 - DNA, 25 bp, Saccharomyces pastorianus
gatccctctgcgaagttctggtgta

SEQ ID NO: 30617 - DNA, 25 bp, Saccharomyces pastorianus
gtggccaacgtggagttgaccccgt

SEQ ID NO: 30618 - DNA, 25 bp, Saccharomyces pastorianus
caccacccaggagatcttggagttt

SEQ ID NO: 30619 - DNA, 25 bp, Saccharomyces pastorianus
agaacttcgaaaatgggcccaacag

SEQ ID NO: 30620 - DNA, 25 bp, Saccharomyces pastorianus
taaccgacttgaatagaatcccgaa

SEQ ID NO: 30621 - DNA, 25 bp, Saccharomyces pastorianus
gaatcccgaaggagtactctccact

SEQ ID NO: 30622 - DNA, 25 bp, Saccharomyces pastorianus
aaaggtgtcgatcctgaaattacaa

SEQ ID NO: 30623 - DNA, 25 bp, Saccharomyces pastorianus
caaagcccttgaaatttgtcgttct

SEQ ID NO: 30624 - DNA, 25 bp, Saccharomyces pastorianus
gtggctccactttagaaagtttact

SEQ ID NO: 30625 - DNA, 25 bp, Saccharomyces pastorianus
gggcagactggagttcgatgaatat

SEQ ID NO: 30626 - DNA, 25 bp, Saccharomyces pastorianus
ttgaggacctgaatgtgggcagact

SEQ ID NO: 30627 - DNA, 25 bp, Saccharomyces pastorianus
gctgatttatacagtggctccactt

SEQ ID NO: 30628 - DNA, 25 bp, Saccharomyces pastorianus
ggtaaacctataactaatccactag

SEQ ID NO: 30629 - DNA, 25 bp, Saccharomyces pastorianus
ccccaccggctgataacattattaa

SEQ ID NO: 30630 - DNA, 25 bp, Saccharomyces pastorianus
gagaatttgaaatccaaagcccttg

SEQ ID NO: 30631 - DNA, 25 bp, Saccharomyces pastorianus
tattcagcaaccatcctaccagtat

SEQ ID NO: 30632 - DNA, 25 bp, Saccharomyces pastorianus
aaagtcgtcgaaccagagctggcca

SEQ ID NO: 30633 - DNA, 25 bp, Saccharomyces pastorianus
gaaagcttccacacaagagtcacat

SEQ ID NO: 30634 - DNA, 25 bp, Saccharomyces pastorianus
aattgctacaagctcctctgagact

SEQ ID NO: 30635 - DNA, 25 bp, Saccharomyces pastorianus
gtggacccaccttcaactactaatt

SEQ ID NO: 30636 - DNA, 25 bp, Saccharomyces pastorianus
attacacgctatgatttcccgactg

SEQ ID NO: 30637 - DNA, 25 bp, Saccharomyces pastorianus
ttatcacaacaatacactcttccac

SEQ ID NO: 30638 - DNA, 25 bp, Saccharomyces pastorianus
agaggtttcacatcaacgaccagaa

SEQ ID NO: 30639 - DNA, 25 bp, Saccharomyces pastorianus
aagttatcaactacctcctattcag

SEQ ID NO: 30640 - DNA, 25 bp, Saccharomyces pastorianus
tgttcccgcacgtaaagtcgtcgaa

SEQ ID NO: 30641 - DNA, 25 bp, Saccharomyces pastorianus
acaagttccctctgatccttataat

SEQ ID NO: 30642 - DNA, 25 bp, Saccharomyces pastorianus
ttcaccactaacacccgagcaaatg

SEQ ID NO: 30643 - DNA, 25 bp, Saccharomyces pastorianus
ggtactatctgtttctattcatcca

SEQ ID NO: 30644 - DNA, 25 bp, Saccharomyces pastorianus
tactcgacctcttatagggttccca

SEQ ID NO: 30645 - DNA, 25 bp, Saccharomyces pastorianus
ataggtgctagaaccgaacacgtaa

SEQ ID NO: 30646 - DNA, 25 bp, Saccharomyces pastorianus
gtttaatgccgatggttcaccacta

SEQ ID NO: 30647 - DNA, 25 bp, Saccharomyces pastorianus
tagggttcccaagatgtacatagta

SEQ ID NO: 30648 - DNA, 25 bp, Saccharomyces pastorianus
gattcgttacgtgtggaccaatatt

SEQ ID NO: 30649 - DNA, 25 bp, Saccharomyces pastorianus
gggcataatgctgcgaaccccttag

SEQ ID NO: 30650 - DNA, 25 bp, Saccharomyces pastorianus
ggagaactgaggctgcacacattga

SEQ ID NO: 30651 - DNA, 25 bp, Saccharomyces pastorianus
tattgctcaggaaaggtactacgac

SEQ ID NO: 30652 - DNA, 25 bp, Saccharomyces pastorianus
ggctgcacacattgacgatatcgat

SEQ ID NO: 30653 - DNA, 25 bp, Saccharomyces pastorianus
tgggcccaaggagtttcgccgtaca

SEQ ID NO: 30654 - DNA, 25 bp, Saccharomyces pastorianus
ttgaccatggcaatttcgcccgaat

SEQ ID NO: 30655 - DNA, 25 bp, Saccharomyces pastorianus
gtaagcagccagtatacttcacgga

SEQ ID NO: 30656 - DNA, 25 bp, Saccharomyces pastorianus
aacgagctgcaccacaggtactggt

SEQ ID NO: 30657 - DNA, 25 bp, Saccharomyces pastorianus
cagacaggttcgacatccgtggtgg

SEQ ID NO: 30658 - DNA, 25 bp, Saccharomyces pastorianus
ctcaacctgactatcgactacgaaa

SEQ ID NO: 30659 - DNA, 25 bp, Saccharomyces pastorianus
agcggccacggtgatctcattgagc

SEQ ID NO: 30660 - DNA, 25 bp, Saccharomyces pastorianus
cgagcacgtagacatcctaggcagt

SEQ ID NO: 30661 - DNA, 25 bp, Saccharomyces pastorianus
ctgggatcaacgtcaccgtggtgga

SEQ ID NO: 30662 - DNA, 25 bp, Saccharomyces pastorianus
gttgaacgactacatcctgaagatc

SEQ ID NO: 30663 - DNA, 25 bp, Saccharomyces pastorianus
ggacgctcctcacatgaagatctac

SEQ ID NO: 30664 - DNA, 25 bp, Saccharomyces pastorianus
taaagagtctgcctgttcccttgat

SEQ ID NO: 30665 - DNA, 25 bp, Saccharomyces pastorianus
aggtatgccgtgtcccgggaagcaa

SEQ ID NO: 30666 - DNA, 25 bp, Saccharomyces pastorianus
tcttttacatgctcccatggtggga

SEQ ID NO: 30667 - DNA, 25 bp, Saccharomyces pastorianus
gaaccacagcatgacaaggccctat

SEQ ID NO: 30668 - DNA, 25 bp, Saccharomyces pastorianus
acaacgcctatacgcaacatcataa

SEQ ID NO: 30669 - DNA, 25 bp, Saccharomyces pastorianus
gaaattggtgctgtctcagggccat

SEQ ID NO: 30670 - DNA, 25 bp, Saccharomyces pastorianus
ctctatctacagctcttacggcaat

SEQ ID NO: 30671 - DNA, 25 bp, Saccharomyces pastorianus
cagattcgtttacagtttgcctact

SEQ ID NO: 30672 - DNA, 25 bp, Saccharomyces pastorianus
atagtcataattgcgccttgtacca

SEQ ID NO: 30673 - DNA, 25 bp, Saccharomyces pastorianus
gggagcgaacccttgagttctaccg

SEQ ID NO: 30674 - DNA, 25 bp, Saccharomyces pastorianus
ttacggcaatgcatcttcttttaca

SEQ ID NO: 30675 - DNA, 25 bp, Saccharomyces pastorianus
accagtcccaatatcgatgagtcca

SEQ ID NO: 30676 - DNA, 25 bp, Saccharomyces pastorianus
gatccaaacaacctctcgaatcagt

SEQ ID NO: 30677 - DNA, 25 bp, Saccharomyces pastorianus
gtagatggcaaagaccactccgcta

SEQ ID NO: 30678 - DNA, 25 bp, Saccharomyces pastorianus
caacaggttctatcagacatcgttt

SEQ ID NO: 30679 - DNA, 25 bp, Saccharomyces pastorianus
ggaagatttcatccagcaacgcgaa

SEQ ID NO: 30680 - DNA, 25 bp, Saccharomyces pastorianus
gcaaatctttgatatccgaacatga

SEQ ID NO: 30681 - DNA, 25 bp, Saccharomyces pastorianus
agatacagcaggtgctgctacccac

SEQ ID NO: 30682 - DNA, 25 bp, Saccharomyces pastorianus
agcaggccacaaatctgagtactcc

SEQ ID NO: 30683 - DNA, 25 bp, Saccharomyces pastorianus
tttactgagcaaaagcccatccgag

SEQ ID NO: 30684 - DNA, 25 bp, Saccharomyces pastorianus
gaattcataccgcatattttctatt

SEQ ID NO: 30685 - DNA, 25 bp, Saccharomyces pastorianus
gatgagtccaatgctgacattacaa

SEQ ID NO: 30686 - DNA, 25 bp, Saccharomyces pastorianus
gggcacttgatgatattccggtaac

SEQ ID NO: 30687 - DNA, 25 bp, Saccharomyces pastorianus
agtttgatcaagtcactgccgtgaa

SEQ ID NO: 30688 - DNA, 25 bp, Saccharomyces pastorianus
gcgcagactttgttttttatttcga

SEQ ID NO: 30689 - DNA, 25 bp, Saccharomyces pastorianus
taacgcctggtgaacattccatgga

SEQ ID NO: 30690 - DNA, 25 bp, Saccharomyces pastorianus
acattattgctctcatgggcacttg

SEQ ID NO: 30691 - DNA, 25 bp, Saccharomyces pastorianus
agggtcaaatcatcagtggtgctgc

SEQ ID NO: 30692 - DNA, 25 bp, Saccharomyces pastorianus
gcgtagtggtttacttagcgaccga

SEQ ID NO: 30693 - DNA, 25 bp, Saccharomyces pastorianus
aagtcatttcattgcataccatgct

SEQ ID NO: 30694 - DNA, 25 bp, Saccharomyces pastorianus
tccaggtacttttagaccacggtat

SEQ ID NO: 30695 - DNA, 25 bp, Saccharomyces pastorianus
catttttgctgggatgattgtcacc

SEQ ID NO: 30696 - DNA, 25 bp, Saccharomyces pastorianus
gaaggttttcctcatggagggtcaa

SEQ ID NO: 30697 - DNA, 25 bp, Saccharomyces pastorianus
gaaagaaaccctgcagtcttcgacc

SEQ ID NO: 30698 - DNA, 25 bp, Saccharomyces pastorianus
atttccatgagctgcaatccaacca

SEQ ID NO: 30699 - DNA, 25 bp, Saccharomyces pastorianus
gcgatctacgggatatgccagtcaa

SEQ ID NO: 30700 - DNA, 25 bp, Saccharomyces pastorianus
actgaccgatcccttggaatacttg

SEQ ID NO: 30701 - DNA, 25 bp, Saccharomyces pastorianus
gtgctggagcaactcaccgacgatg

SEQ ID NO: 30702 - DNA, 25 bp, Saccharomyces pastorianus
gcagaaccctggagaaggcctcgaa

SEQ ID NO: 30703 - DNA, 25 bp, Saccharomyces pastorianus
tgctaagcagaatcgtccctgggaa

SEQ ID NO: 30704 - DNA, 25 bp, Saccharomyces pastorianus
ttgcccgttgtaagaccccagaaga

SEQ ID NO: 30705 - DNA, 25 bp, Saccharomyces pastorianus
gggcaaccaagttcgacaaccatat

SEQ ID NO: 30706 - DNA, 25 bp, Saccharomyces pastorianus
tgtcgcgagttcctgcaatgggcaa

SEQ ID NO: 30707 - DNA, 25 bp, Saccharomyces pastorianus
agacgaaagatgtccttccctgggt

SEQ ID NO: 30708 - DNA, 25 bp, Saccharomyces pastorianus
ggcaagcccaaggagctgtcgctga

SEQ ID NO: 30709 - DNA, 25 bp, Saccharomyces pastorianus
tggcgctgagctacaacatcgtcaa

SEQ ID NO: 30710 - DNA, 25 bp, Saccharomyces pastorianus
tgttcaagtcttccaagggcctgaa

SEQ ID NO: 30711 - DNA, 25 bp, Saccharomyces pastorianus
acaagggcgtggagtacctggacct

SEQ ID NO: 30712 - DNA, 25 bp, Saccharomyces pastorianus
agagtctgggcttcgagccgaacat

SEQ ID NO: 30713 - DNA, 25 bp, Saccharomyces pastorianus
tgggcaacaacgcaggcatcctggc

SEQ ID NO: 30714 - DNA, 25 bp, Saccharomyces pastorianus
tgaacacggtgctgaaccacatcac

SEQ ID NO: 30715 - DNA, 25 bp, Saccharomyces pastorianus
caacaacataatagcgggtcccggg

SEQ ID NO: 30716 - DNA, 25 bp, Saccharomyces pastorianus
agttgtcttcgctggagggctccca

SEQ ID NO: 30717 - DNA, 25 bp, Saccharomyces pastorianus
agggtctgaagaacatcccgcccaa

SEQ ID NO: 30718 - DNA, 25 bp, Saccharomyces pastorianus
agcccggccaagctgcagttgaaca

SEQ ID NO: 30719 - DNA, 25 bp, Saccharomyces pastorianus
gacggtatccgaagttcaagccctc

SEQ ID NO: 30720 - DNA, 25 bp, Saccharomyces pastorianus
gaacaccgcagatggagggccttga

SEQ ID NO: 30721 - DNA, 25 bp, Saccharomyces pastorianus
gaaaatgccctgaaggttgccgaag

SEQ ID NO: 30722 - DNA, 25 bp, Saccharomyces pastorianus
gaccaaatcatgaccagggcccaga

SEQ ID NO: 30723 - DNA, 25 bp, Saccharomyces pastorianus
gtcgagggcctgtctaacaacaagt

SEQ ID NO: 30724 - DNA, 25 bp, Saccharomyces pastorianus
ggcctctgtcgggttgagcatgtac

SEQ ID NO: 30725 - DNA, 25 bp, Saccharomyces pastorianus
cgtgatctttaaagtccttcccaga

SEQ ID NO: 30726 - DNA, 25 bp, Saccharomyces pastorianus
agcttcgatgccaccatgtacgggt

SEQ ID NO: 30727 - DNA, 25 bp, Saccharomyces pastorianus
cgggtcgtgggtactcgtcaacaag

SEQ ID NO: 30728 - DNA, 25 bp, Saccharomyces pastorianus
taggactgggttcgtttccaacgag

SEQ ID NO: 30729 - DNA, 25 bp, Saccharomyces pastorianus
agggcccagaagatcgtccaggcaa

SEQ ID NO: 30730 - DNA, 25 bp, Saccharomyces pastorianus
gatgctcagatcttgatgcaccctg

SEQ ID NO: 30731 - DNA, 25 bp, Saccharomyces pastorianus
gagattctacttgttcttctttcaa

SEQ ID NO: 30732 - DNA, 25 bp, Saccharomyces pastorianus
ttgtccccgggttcatcgtgatgta

SEQ ID NO: 30733 - DNA, 25 bp, Saccharomyces pastorianus
tagccgtacgcaattccgaatggac

SEQ ID NO: 30734 - DNA, 25 bp, Saccharomyces pastorianus
aagtaccattggtggccttgaccaa

SEQ ID NO: 30735 - DNA, 25 bp, Saccharomyces pastorianus
ggcgacaggtacttctacggtgatt

SEQ ID NO: 30736 - DNA, 25 bp, Saccharomyces pastorianus
cgagttggccatgtacgttatcttc

SEQ ID NO: 30737 - DNA, 25 bp, Saccharomyces pastorianus
acacgtttaccacagctctatgagt

SEQ ID NO: 30738 - DNA, 25 bp, Saccharomyces pastorianus
gtaacgttattttctggctgggcat

SEQ ID NO: 30739 - DNA, 25 bp, Saccharomyces pastorianus
gacatttttcttaagctccgtcgtc

SEQ ID NO: 30740 - DNA, 25 bp, Saccharomyces pastorianus
aaatgggctggattgctcgtagaca

SEQ ID NO: 30741 - DNA, 25 bp, Saccharomyces pastorianus
ccaacggctctccaaacaacaagaa

SEQ ID NO: 30742 - DNA, 25 bp, Saccharomyces pastorianus
cagagacaagctgtgtttggtcaaa

SEQ ID NO: 30743 - DNA, 25 bp, Saccharomyces pastorianus
aaattgcaccaagcgcatgagttga

SEQ ID NO: 30744 - DNA, 25 bp, Saccharomyces pastorianus
tccaggtgttaagggacttcccacg

SEQ ID NO: 30745 - DNA, 25 bp, Saccharomyces pastorianus
atggaggaagaacgccaacggctct

SEQ ID NO: 30746 - DNA, 25 bp, Saccharomyces pastorianus
gaactacttgcataatttcaacggg

SEQ ID NO: 30747 - DNA, 25 bp, Saccharomyces pastorianus
ggacttcccacgatttcaactattt

SEQ ID NO: 30748 - DNA, 25 bp, Saccharomyces pastorianus
agtgctcctaagtgctctgacaaag

SEQ ID NO: 30749 - DNA, 25 bp, Saccharomyces pastorianus
ccatctttgatgaggaactacttgc

SEQ ID NO: 30750 - DNA, 25 bp, Saccharomyces pastorianus
ggtcttttggattccgggatcacta

SEQ ID NO: 30751 - DNA, 25 bp, Saccharomyces pastorianus
ctcacagagtgaaggtccaggtgtt

SEQ ID NO: 30752 - DNA, 25 bp, Saccharomyces pastorianus
aagtgcccgataccgatgctctaaa

SEQ ID NO: 30753 - DNA, 25 bp, Saccharomyces pastorianus
tacccagtggcatgaaagaatcttc

SEQ ID NO: 30754 - DNA, 25 bp, Saccharomyces pastorianus
gctattgactctattacccagtggc

SEQ ID NO: 30755 - DNA, 25 bp, Saccharomyces pastorianus
ataccctgaaggtgttatccggtga

SEQ ID NO: 30756 - DNA, 25 bp, Saccharomyces pastorianus
aatgattgcatttcttctacttcca

SEQ ID NO: 30757 - DNA, 25 bp, Saccharomyces pastorianus
gcacatttacttccattagagccta

SEQ ID NO: 30758 - DNA, 25 bp, Saccharomyces pastorianus
aacactaataggtcactcgatgcaa

SEQ ID NO: 30759 - DNA, 25 bp, Saccharomyces pastorianus
gaaaacgaagccatgttgcgtgaaa

SEQ ID NO: 30760 - DNA, 25 bp, Saccharomyces pastorianus
ttgattcttgatatcgaagtgcccg

SEQ ID NO: 30761 - DNA, 25 bp, Saccharomyces pastorianus
tttcttctacttccaataccctgaa

SEQ ID NO: 30762 - DNA, 25 bp, Saccharomyces pastorianus
ttagcgaggacccagttaagacgtt

SEQ ID NO: 30763 - DNA, 25 bp, Saccharomyces pastorianus
gaacgtggttgatcgggtcccgcat

SEQ ID NO: 30764 - DNA, 25 bp, Saccharomyces pastorianus
tgttggatccggtactgggcgataa

SEQ ID NO: 30765 - DNA, 25 bp, Saccharomyces pastorianus
aatccgcacgttggacgatgccaag

SEQ ID NO: 30766 - DNA, 25 bp, Saccharomyces pastorianus
attttgaagcggaacctggtgccct

SEQ ID NO: 30767 - DNA, 25 bp, Saccharomyces pastorianus
actagccttgaactgtctgactttt

SEQ ID NO: 30768 - DNA, 25 bp, Saccharomyces pastorianus
aggatttgattcatcgcttagcgac

SEQ ID NO: 30769 - DNA, 25 bp, Saccharomyces pastorianus
gatcaacgcaaccttcagtgggagc

SEQ ID NO: 30770 - DNA, 25 bp, Saccharomyces pastorianus
cgcggcttcgagcagtttcacgaaa

SEQ ID NO: 30771 - DNA, 25 bp, Saccharomyces pastorianus
aggtctaagatcttcttggccacac

SEQ ID NO: 30772 - DNA, 25 bp, Saccharomyces pastorianus
actgagcacgtctttgggccaagta

SEQ ID NO: 30773 - DNA, 25 bp, Saccharomyces pastorianus
agtttcctagagtgacgcgagtcgt

SEQ ID NO: 30774 - DNA, 25 bp, Saccharomyces pastorianus
taatagcttgctatgctgtggccaa

SEQ ID NO: 30775 - DNA, 25 bp, Saccharomyces pastorianus
gtcactctaaaaacgtacctctact

SEQ ID NO: 30776 - DNA, 25 bp, Saccharomyces pastorianus
acccgtgggaccgtgatttagacag

SEQ ID NO: 30777 - DNA, 25 bp, Saccharomyces pastorianus
tagggtttccatggccagcgatgac

SEQ ID NO: 30778 - DNA, 25 bp, Saccharomyces pastorianus
gaatcatgcttggtatttcagcctt

SEQ ID NO: 30779 - DNA, 25 bp, Saccharomyces pastorianus
ttgccagatccgaagagagcccatg

SEQ ID NO: 30780 - DNA, 25 bp, Saccharomyces pastorianus
acgtacctctactatgacaaccaaa

SEQ ID NO: 30781 - DNA, 25 bp, Saccharomyces pastorianus
gtttgactcacgatagaccaggtag

SEQ ID NO: 30782 - DNA, 25 bp, Saccharomyces pastorianus
ggattttaccgactggagccataga

SEQ ID NO: 30783 - DNA, 25 bp, Saccharomyces pastorianus
atccgatatggcttctctgtttcaa

SEQ ID NO: 30784 - DNA, 25 bp, Saccharomyces pastorianus
tcccctgctgaagaaacatccgata

SEQ ID NO: 30785 - DNA, 25 bp, Saccharomyces pastorianus
tgattactcatgaaccaacggccgc

SEQ ID NO: 30786 - DNA, 25 bp, Saccharomyces pastorianus
agacatttggccttcgtttgattat

SEQ ID NO: 30787 - DNA, 25 bp, Saccharomyces pastorianus
taactgtccatatgagcgtacctcc

SEQ ID NO: 30788 - DNA, 25 bp, Saccharomyces pastorianus
atccatcctatatcaccaactttgt

SEQ ID NO: 30789 - DNA, 25 bp, Saccharomyces pastorianus
tgtttaccggattcgatccatccta

SEQ ID NO: 30790 - DNA, 25 bp, Saccharomyces pastorianus
caatggcgtttttgtatgtctcaag

SEQ ID NO: 30791 - DNA, 25 bp, Saccharomyces pastorianus
acatcattgggaactcgtcagctca

SEQ ID NO: 30792 - DNA, 25 bp, Saccharomyces pastorianus
gactatattgcccttgtccatattg

SEQ ID NO: 30793 - DNA, 25 bp, Saccharomyces pastorianus
gactgagaacgctactatattggaa

SEQ ID NO: 30794 - DNA, 25 bp, Saccharomyces pastorianus
gagcgtacctccatgtatgacaggt

SEQ ID NO: 30795 - DNA, 25 bp, Saccharomyces pastorianus
caggtgttaccttatttggcgaatt

SEQ ID NO: 30796 - DNA, 25 bp, Saccharomyces pastorianus
gagaaattccgcacgacggtgccat

SEQ ID NO: 30797 - DNA, 25 bp, Saccharomyces pastorianus
taaggcctcgattctggagctatat

SEQ ID NO: 30798 - DNA, 25 bp, Saccharomyces pastorianus
accgacggttctgcagatcctgaaa

SEQ ID NO: 30799 - DNA, 25 bp, Saccharomyces pastorianus
gaacagaatctacagggcacaccaa

SEQ ID NO: 30800 - DNA, 25 bp, Saccharomyces pastorianus
aaatccacgttggaccatccagata

SEQ ID NO: 30801 - DNA, 25 bp, Saccharomyces pastorianus
gttttcagacgtataccaagccaga

SEQ ID NO: 30802 - DNA, 25 bp, Saccharomyces pastorianus
accgtgtggtcagcaccgaattact

SEQ ID NO: 30803 - DNA, 25 bp, Saccharomyces pastorianus
ggattatcgcccaacgttcaaacta

SEQ ID NO: 30804 - DNA, 25 bp, Saccharomyces pastorianus
agcatttccaagtatcgcctcgtgg

SEQ ID NO: 30805 - DNA, 25 bp, Saccharomyces pastorianus
tactttgatgggttggtcaccaccg

SEQ ID NO: 30806 - DNA, 25 bp, Saccharomyces pastorianus
gtaaggaccagttctacttcaatgt

SEQ ID NO: 30807 - DNA, 25 bp, Saccharomyces pastorianus
ggtgatttcaagaaagtgttgtctt

SEQ ID NO: 30808 - DNA, 25 bp, Saccharomyces pastorianus
ggaccacatctctttggaagactac

SEQ ID NO: 30809 - DNA, 25 bp, Saccharomyces pastorianus
gggagcgtactgaaggaccacatct

SEQ ID NO: 30810 - DNA, 25 bp, Saccharomyces pastorianus
aggcactcagccaaacaagattgtt

SEQ ID NO: 30811 - DNA, 25 bp, Saccharomyces pastorianus
atgccttggtgaagacaccgtgggt

SEQ ID NO: 30812 - DNA, 25 bp, Saccharomyces pastorianus
gttgtctttacaaataggcactcag

SEQ ID NO: 30813 - DNA, 25 bp, Saccharomyces pastorianus
attgaagtggtcgttaatgaccgat

SEQ ID NO: 30814 - DNA, 25 bp, Saccharomyces pastorianus
cgtactgaaggaccacatctctttg

SEQ ID NO: 30815 - DNA, 25 bp, Saccharomyces pastorianus
tcgttaatgaccgattgggcaaaaa

SEQ ID NO: 30816 - DNA, 25 bp, Saccharomyces pastorianus
ggtgaagacaccgtgggtgatttca

SEQ ID NO: 30817 - DNA, 25 bp, Saccharomyces pastorianus
ctctttggaagactacgaagtgcat

SEQ ID NO: 30818 - DNA, 25 bp, Saccharomyces pastorianus
tatgaacttgttcctgacgtccgtg

SEQ ID NO: 30819 - DNA, 25 bp, Saccharomyces pastorianus
acaacggcggagctagctggcaatt

SEQ ID NO: 30820 - DNA, 25 bp, Saccharomyces pastorianus
gatccatgacgggtgcgcctaagaa

SEQ ID NO: 30821 - DNA, 25 bp, Saccharomyces pastorianus
gggaccgcagatggacctaactaag

SEQ ID NO: 30822 - DNA, 25 bp, Saccharomyces pastorianus
aatggacatcctcaagcattcgctg

SEQ ID NO: 30823 - DNA, 25 bp, Saccharomyces pastorianus
ggaggaatacgccactgtctaccaa

SEQ ID NO: 30824 - DNA, 25 bp, Saccharomyces pastorianus
ggacttgatccgaaatgacctttat

SEQ ID NO: 30825 - DNA, 25 bp, Saccharomyces pastorianus
atcaggtgcatgtactcctacaacg

SEQ ID NO: 30826 - DNA, 25 bp, Saccharomyces pastorianus
gggtcacaggctactggtccgtgaa

SEQ ID NO: 30827 - DNA, 25 bp, Saccharomyces pastorianus
tctgagcacactggacggcgaacta

SEQ ID NO: 30828 - DNA, 25 bp, Saccharomyces pastorianus
gactggtccgtcaacatcaggtgca

SEQ ID NO: 30829 - DNA, 25 bp, Saccharomyces pastorianus
gaaggcgcccgttatcaaaactata

SEQ ID NO: 30830 - DNA, 25 bp, Saccharomyces pastorianus
aaagtgggacatttatttcgcagat

SEQ ID NO: 30831 - DNA, 25 bp, Saccharomyces pastorianus
taatgaaggcgctgctggtcgtgtt

SEQ ID NO: 30832 - DNA, 25 bp, Saccharomyces pastorianus
gaaggtgctacgaaggcgcccgtta

SEQ ID NO: 30833 - DNA, 25 bp, Saccharomyces pastorianus
gtcattgttccccaatttccaagaa

SEQ ID NO: 30834 - DNA, 25 bp, Saccharomyces pastorianus
tccggtgatttgtcattctcacaga

SEQ ID NO: 30835 - DNA, 25 bp, Saccharomyces pastorianus
attcttactagggtgtgctcctgat

SEQ ID NO: 30836 - DNA, 25 bp, Saccharomyces pastorianus
atgaaagattggtgcccttcagctc

SEQ ID NO: 30837 - DNA, 25 bp, Saccharomyces pastorianus
tgctttgatagacgtctttgtgacc

SEQ ID NO: 30838 - DNA, 25 bp, Saccharomyces pastorianus
gatggccatattgcgtcattgttcc

SEQ ID NO: 30839 - DNA, 25 bp, Saccharomyces pastorianus
aatatcgctgactattccggtgatt

SEQ ID NO: 30840 - DNA, 25 bp, Saccharomyces pastorianus
ccacttgttggatacatctggtgta

SEQ ID NO: 30841 - DNA, 25 bp, Saccharomyces pastorianus
tctggtgtagcaaaggccattgaca

SEQ ID NO: 30842 - DNA, 25 bp, Saccharomyces pastorianus
gaagtctaccgctctaatttctgaa

SEQ ID NO: 30843 - DNA, 25 bp, Saccharomyces pastorianus
tcgccaatcgccgaagtggtgaaga

SEQ ID NO: 30844 - DNA, 25 bp, Saccharomyces pastorianus
atgcattcaagaaggccggccattt

SEQ ID NO: 30845 - DNA, 25 bp, Saccharomyces pastorianus
ggctattctgtttatgaagacgctg

SEQ ID NO: 30846 - DNA, 25 bp, Saccharomyces pastorianus
tttgacgaacacttccacttgttgg

SEQ ID NO: 30847 - DNA, 25 bp, Saccharomyces pastorianus
aggccattgacaattcgccaatcgc

SEQ ID NO: 30848 - DNA, 25 bp, Saccharomyces pastorianus
ggccatttcatcgtttatttcactc

SEQ ID NO: 30849 - DNA, 25 bp, Saccharomyces pastorianus
gacgctgaatacattggtcatgcat

SEQ ID NO: 30850 - DNA, 25 bp, Saccharomyces pastorianus
gccgaactaggtaggttaggctatt

SEQ ID NO: 30851 - DNA, 25 bp, Saccharomyces pastorianus
gagttgaagaaatcctaccagccac

SEQ ID NO: 30852 - DNA, 25 bp, Saccharomyces pastorianus
gctccacaagttctatattcgcacg

SEQ ID NO: 30853 - DNA, 25 bp, Saccharomyces pastorianus
gaatcaagtgcggatgccagacaac

SEQ ID NO: 30854 - DNA, 25 bp, Saccharomyces pastorianus
tcttcatcaagccttctaacgacag

SEQ ID NO: 30855 - DNA, 25 bp, Saccharomyces pastorianus
gaattgagccagcagcaaccaacgc

SEQ ID NO: 30856 - DNA, 25 bp, Saccharomyces pastorianus
ttccaaggcttacatgcactccaga

SEQ ID NO: 30857 - DNA, 25 bp, Saccharomyces pastorianus
aaccaacgcccatcgaggcagagat

SEQ ID NO: 30858 - DNA, 25 bp, Saccharomyces pastorianus
tacttccactaccacatcaaatgtt

SEQ ID NO: 30859 - DNA, 25 bp, Saccharomyces pastorianus
gttctgttcccacgtcattttcaaa

SEQ ID NO: 30860 - DNA, 25 bp, Saccharomyces pastorianus
aagagaaaccgccagatccagtccg

SEQ ID NO: 30861 - DNA, 25 bp, Saccharomyces pastorianus
attcgcacgagcctccattggagtt

SEQ ID NO: 30862 - DNA, 25 bp, Saccharomyces pastorianus
tgcctgtggaggtgtccgaagacat

SEQ ID NO: 30863 - DNA, 25 bp, Saccharomyces pastorianus
agacgcaatggctaagggcaccccg

SEQ ID NO: 30864 - DNA, 25 bp, Saccharomyces pastorianus
acaacggtaaggagtacgtgcctgt

SEQ ID NO: 30865 - DNA, 25 bp, Saccharomyces pastorianus
gaagggccccaacattgtgccgctc

SEQ ID NO: 30866 - DNA, 25 bp, Saccharomyces pastorianus
tagactgttatcacggtcggtgtgg

SEQ ID NO: 30867 - DNA, 25 bp, Saccharomyces pastorianus
aagctgggtgagttcgcgcccacta

SEQ ID NO: 30868 - DNA, 25 bp, Saccharomyces pastorianus
aagttccagatccacaacggtaagg

SEQ ID NO: 30869 - DNA, 25 bp, Saccharomyces pastorianus
gtgtccgaagacatggtgggccaca

SEQ ID NO: 30870 - DNA, 25 bp, Saccharomyces pastorianus
atcctaccccaatttgttgggctca

SEQ ID NO: 30871 - DNA, 25 bp, Saccharomyces pastorianus
gttgggctcaagttccagatccaca

SEQ ID NO: 30872 - DNA, 25 bp, Saccharomyces pastorianus
atcccgcggctagactgttatcacg

SEQ ID NO: 30873 - DNA, 25 bp, Saccharomyces pastorianus
aagtccaatgaatcctccatcagat

SEQ ID NO: 30874 - DNA, 25 bp, Saccharomyces pastorianus
agagccaacgagatcgggtctgcct

SEQ ID NO: 30875 - DNA, 25 bp, Saccharomyces pastorianus
gctcgcaatccagcattctaacaaa

SEQ ID NO: 30876 - DNA, 25 bp, Saccharomyces pastorianus
gggtctgcctataacctactagttg

SEQ ID NO: 30877 - DNA, 25 bp, Saccharomyces pastorianus
gaattggacttcaccttattggaat

SEQ ID NO: 30878 - DNA, 25 bp, Saccharomyces pastorianus
aaatcaattcatggcgcactcttcc

SEQ ID NO: 30879 - DNA, 25 bp, Saccharomyces pastorianus
attgcagatttctcacacgagtcga

SEQ ID NO: 30880 - DNA, 25 bp, Saccharomyces pastorianus
aacgcctccaagatcttagtgtttg

SEQ ID NO: 30881 - DNA, 25 bp, Saccharomyces pastorianus
gggaagtctgtcgagccatttgaat

SEQ ID NO: 30882 - DNA, 25 bp, Saccharomyces pastorianus
gaaagaacattcttcgacgacctaa

SEQ ID NO: 30883 - DNA, 25 bp, Saccharomyces pastorianus
taacaaacctccgtgacctggaaat

SEQ ID NO: 30884 - DNA, 25 bp, Saccharomyces pastorianus
ggaatcctatagcttccactgaaaa

SEQ ID NO: 30885 - DNA, 25 bp, Saccharomyces pastorianus
tacggccaaggtcgatgagctcatt

SEQ ID NO: 30886 - DNA, 25 bp, Saccharomyces pastorianus
atatctgattacttggccactttgg

SEQ ID NO: 30887 - DNA, 25 bp, Saccharomyces pastorianus
accgatgctggagctgagtctaaat

SEQ ID NO: 30888 - DNA, 25 bp, Saccharomyces pastorianus
gtatctgttcatttatcccttatta

SEQ ID NO: 30889 - DNA, 25 bp, Saccharomyces pastorianus
gattttatggcatgggcttactata

SEQ ID NO: 30890 - DNA, 25 bp, Saccharomyces pastorianus
gatggacctctacagttttgttgat

SEQ ID NO: 30891 - DNA, 25 bp, Saccharomyces pastorianus
gctcattacccatagctacgataaa

SEQ ID NO: 30892 - DNA, 25 bp, Saccharomyces pastorianus
aagaaagacccaccatacggccaag

SEQ ID NO: 30893 - DNA, 25 bp, Saccharomyces pastorianus
gggttttcaactacatcgttatcta

SEQ ID NO: 30894 - DNA, 25 bp, Saccharomyces pastorianus
aacgctgatgcaacaaccgatgctg

SEQ ID NO: 30895 - DNA, 25 bp, Saccharomyces pastorianus
cgcgctaggattcttgggtgctcaa

SEQ ID NO: 30896 - DNA, 25 bp, Saccharomyces pastorianus
aggaatcaagtcgaccgcgctggct

SEQ ID NO: 30897 - DNA, 25 bp, Saccharomyces pastorianus
tagtgttcacctaccctttgttcaa

SEQ ID NO: 30898 - DNA, 25 bp, Saccharomyces pastorianus
agggatcttcacctacaggctatta

SEQ ID NO: 30899 - DNA, 25 bp, Saccharomyces pastorianus
attgtacttcacatacgcgttggcg

SEQ ID NO: 30900 - DNA, 25 bp, Saccharomyces pastorianus
gtactatccacaggctgcattgagt

SEQ ID NO: 30901 - DNA, 25 bp, Saccharomyces pastorianus
ctcaaaccctggtcgggatgggcat

SEQ ID NO: 30902 - DNA, 25 bp, Saccharomyces pastorianus
ctggccgttgcaggcttaaacagtg

SEQ ID NO: 30903 - DNA, 25 bp, Saccharomyces pastorianus
gttcaagcggttcacgtactatcca

SEQ ID NO: 30904 - DNA, 25 bp, Saccharomyces pastorianus
tgagttggcccacgatgataccctt

SEQ ID NO: 30905 - DNA, 25 bp, Saccharomyces pastorianus
atgaaggtcatgtctgcgtctcaga

SEQ ID NO: 30906 - DNA, 25 bp, Saccharomyces pastorianus
aattgtcgcctatactttcgatgca

SEQ ID NO: 30907 - DNA, 25 bp, Saccharomyces pastorianus
gaaagcctgtgttcttgtcgtcagc

SEQ ID NO: 30908 - DNA, 25 bp, Saccharomyces pastorianus
gatggattccaactcgtttcacgcc

SEQ ID NO: 30909 - DNA, 25 bp, Saccharomyces pastorianus
atctacaaactgttcggctctgttc

SEQ ID NO: 30910 - DNA, 25 bp, Saccharomyces pastorianus
tttcgatgcaggtccaaacgccgtg

SEQ ID NO: 30911 - DNA, 25 bp, Saccharomyces pastorianus
ggtgccactccattaaccagtatta

SEQ ID NO: 30912 - DNA, 25 bp, Saccharomyces pastorianus
gtggcgacctccgaattgttcaaag

SEQ ID NO: 30913 - DNA, 25 bp, Saccharomyces pastorianus
gttgctagagtgatcttgacccaag

SEQ ID NO: 30914 - DNA, 25 bp, Saccharomyces pastorianus
acatgtcgtgcccaacaggtttgaa

SEQ ID NO: 30915 - DNA, 25 bp, Saccharomyces pastorianus
gttcactgcccgtgaattggatctt

SEQ ID NO: 30916 - DNA, 25 bp, Saccharomyces pastorianus
aatcaacaattcgactccgccaagt

SEQ ID NO: 30917 - DNA, 25 bp, Saccharomyces pastorianus
gggtgccagcgtcagaatccttctg

SEQ ID NO: 30918 - DNA, 25 bp, Saccharomyces pastorianus
aaattcatatgcaccgaactccaca

SEQ ID NO: 30919 - DNA, 25 bp, Saccharomyces pastorianus
aacagagacatccttgcactgctga

SEQ ID NO: 30920 - DNA, 25 bp, Saccharomyces pastorianus
gaactgcttcctacagcatgacaag

SEQ ID NO: 30921 - DNA, 25 bp, Saccharomyces pastorianus
gttctttcccaacatttacgctcag

SEQ ID NO: 30922 - DNA, 25 bp, Saccharomyces pastorianus
ctatgacactttgatcagcgactcc

SEQ ID NO: 30923 - DNA, 25 bp, Saccharomyces pastorianus
ataacgaacggacccagctgttctt

SEQ ID NO: 30924 - DNA, 25 bp, Saccharomyces pastorianus
ggtacatcaccctgcaggaaaccaa

SEQ ID NO: 30925 - DNA, 25 bp, Saccharomyces pastorianus
cttttccctcgcaacatttacgata

SEQ ID NO: 30926 - DNA, 25 bp, Saccharomyces pastorianus
cacgcggctgctgagagggtacatc

SEQ ID NO: 30927 - DNA, 25 bp, Saccharomyces pastorianus
atatctctggaaacctacacgcggc

SEQ ID NO: 30928 - DNA, 25 bp, Saccharomyces pastorianus
aactttctgaaatgccccgtcaagg

SEQ ID NO: 30929 - DNA, 25 bp, Saccharomyces pastorianus
actgctcaaggttgctggcgaactg

SEQ ID NO: 30930 - DNA, 25 bp, Saccharomyces pastorianus
aacccggagtttatgctgaatatca

SEQ ID NO: 30931 - DNA, 25 bp, Saccharomyces pastorianus
gcggccacatctactacatcaagaa

SEQ ID NO: 30932 - DNA, 25 bp, Saccharomyces pastorianus
taaacgatctgcacgtcatgctgct

SEQ ID NO: 30933 - DNA, 25 bp, Saccharomyces pastorianus
gagtccatcgagttcaacccggagt

SEQ ID NO: 30934 - DNA, 25 bp, Saccharomyces pastorianus
tgcaaacgtccatcaccgagggtga

SEQ ID NO: 30935 - DNA, 25 bp, Saccharomyces pastorianus
gccaactggtgcaggacgagtccat

SEQ ID NO: 30936 - DNA, 25 bp, Saccharomyces pastorianus
atatcatcgaccgtgtggactgggc

SEQ ID NO: 30937 - DNA, 25 bp, Saccharomyces pastorianus
agttcgacggcggtaagtgccaact

SEQ ID NO: 30938 - DNA, 25 bp, Saccharomyces pastorianus
accgaagtcggcatggcagttctaa

SEQ ID NO: 30939 - DNA, 25 bp, Saccharomyces pastorianus
gatatccataagcatctcgatgaac

SEQ ID NO: 30940 - DNA, 25 bp, Saccharomyces pastorianus
gcaatggccatactgccgcagtgga

SEQ ID NO: 30941 - DNA, 25 bp, Saccharomyces pastorianus
gaggatgacccgttccacgatttta

SEQ ID NO: 30942 - DNA, 25 bp, Saccharomyces pastorianus
tgaaatgctattcggcttcactcca

SEQ ID NO: 30943 - DNA, 25 bp, Saccharomyces pastorianus
gaagacggttatgactttgccaaac

SEQ ID NO: 30944 - DNA, 25 bp, Saccharomyces pastorianus
atcccagtgctatccgaagacggtt

SEQ ID NO: 30945 - DNA, 25 bp, Saccharomyces pastorianus
ggcttcactccatttaagggcgata

SEQ ID NO: 30946 - DNA, 25 bp, Saccharomyces pastorianus
gactttgccaaactgtcatctaaca

SEQ ID NO: 30947 - DNA, 25 bp, Saccharomyces pastorianus
tgtaaaatgggtgcagccgacgtga

SEQ ID NO: 30948 - DNA, 25 bp, Saccharomyces pastorianus
gaaagtacagtggtctctattgaga

SEQ ID NO: 30949 - DNA, 25 bp, Saccharomyces pastorianus
gagaaatcaagagccacctctcatc

SEQ ID NO: 30950 - DNA, 25 bp, Saccharomyces pastorianus
attccccgacggctatacggatgag

SEQ ID NO: 30951 - DNA, 25 bp, Saccharomyces pastorianus
acaaagtcctttgtactgaccacta

SEQ ID NO: 30952 - DNA, 25 bp, Saccharomyces pastorianus
aatggcactccagattacctactta

SEQ ID NO: 30953 - DNA, 25 bp, Saccharomyces pastorianus
ctttttgccattctgttcctgataa

SEQ ID NO: 30954 - DNA, 25 bp, Saccharomyces pastorianus
gagaactgctgcattacctaacttt

SEQ ID NO: 30955 - DNA, 25 bp, Saccharomyces pastorianus
aatgcatctgatgttgtaccgcctc

SEQ ID NO: 30956 - DNA, 25 bp, Saccharomyces pastorianus
tgggattgccactctttttgccatt

SEQ ID NO: 30957 - DNA, 25 bp, Saccharomyces pastorianus
tgtaccgcctccaaattgggctaaa

SEQ ID NO: 30958 - DNA, 25 bp, Saccharomyces pastorianus
tactgaccactaacagcatcatcgg

SEQ ID NO: 30959 - DNA, 25 bp, Saccharomyces pastorianus
tttccctgcggactaatagccaatt

SEQ ID NO: 30960 - DNA, 25 bp, Saccharomyces pastorianus
taagccaagacctatgcacgatcat

SEQ ID NO: 30961 - DNA, 25 bp, Saccharomyces pastorianus
gtttccaaatggagtgcgtcctcat

SEQ ID NO: 30962 - DNA, 25 bp, Saccharomyces pastorianus
gagccccattgttccgaaactaaag

SEQ ID NO: 30963 - DNA, 25 bp, Saccharomyces pastorianus
caaaaatgacctgggcctcaaaatt

SEQ ID NO: 30964 - DNA, 25 bp, Saccharomyces pastorianus
actttgctgttgttgatttcgagac

SEQ ID NO: 30965 - DNA, 25 bp, Saccharomyces pastorianus
aggcaaaccaatagagccccattgt

SEQ ID NO: 30966 - DNA, 25 bp, Saccharomyces pastorianus
gagtcagaccgatgctctagagaag

SEQ ID NO: 30967 - DNA, 25 bp, Saccharomyces pastorianus
atcagacctgaaactctaacgaaga

SEQ ID NO: 30968 - DNA, 25 bp, Saccharomyces pastorianus
gagaattccgacaggatcagcaaga

SEQ ID NO: 30969 - DNA, 25 bp, Saccharomyces pastorianus
gaatccaacggtagtgttccagcac

SEQ ID NO: 30970 - DNA, 25 bp, Saccharomyces pastorianus
aactcacctagcgtgtttccaaatg

SEQ ID NO: 30971 - DNA, 25 bp, Saccharomyces pastorianus
cagaacctgttgcaaacccaccaaa

SEQ ID NO: 30972 - DNA, 25 bp, Saccharomyces pastorianus
attgaccacgcttgctgacgaactg

SEQ ID NO: 30973 - DNA, 25 bp, Saccharomyces pastorianus
aacagcagcagtactcattgaccac

SEQ ID NO: 30974 - DNA, 25 bp, Saccharomyces pastorianus
gggtccatcagtacatgccgaactt

SEQ ID NO: 30975 - DNA, 25 bp, Saccharomyces pastorianus
gcagcatacgatctgggcttcctga

SEQ ID NO: 30976 - DNA, 25 bp, Saccharomyces pastorianus
ggcttcctgatcaacatcctgatga

SEQ ID NO: 30977 - DNA, 25 bp, Saccharomyces pastorianus
ggacgattccgtcacttggattaca

SEQ ID NO: 30978 - DNA, 25 bp, Saccharomyces pastorianus
ctttccctaagtgacgccaatggta

SEQ ID NO: 30979 - DNA, 25 bp, Saccharomyces pastorianus
cgcaactacttatggattctggctt

SEQ ID NO: 30980 - DNA, 25 bp, Saccharomyces pastorianus
actgtccatgcataagttcccgaac

SEQ ID NO: 30981 - DNA, 25 bp, Saccharomyces pastorianus
tgccaagattttccattttcaccac

SEQ ID NO: 30982 - DNA, 25 bp, Saccharomyces pastorianus
gtggccaaagtctcttgatgcttct

SEQ ID NO: 30983 - DNA, 25 bp, Saccharomyces pastorianus
gacatcaagcagcagccgtcgaaat

SEQ ID NO: 30984 - DNA, 25 bp, Saccharomyces pastorianus
caccttacatgaagcctgccaagat

SEQ ID NO: 30985 - DNA, 25 bp, Saccharomyces pastorianus
tcaaatgggctgacttgaccgaaca

SEQ ID NO: 30986 - DNA, 25 bp, Saccharomyces pastorianus
agaggtcccagcacaaaaccggtgt

SEQ ID NO: 30987 - DNA, 25 bp, Saccharomyces pastorianus
gaccgaacagattgcccgtgaaaat

SEQ ID NO: 30988 - DNA, 25 bp, Saccharomyces pastorianus
acgccaagctgtgtgcggagacgct

SEQ ID NO: 30989 - DNA, 25 bp, Saccharomyces pastorianus
aagcagcgtcgcgtggaaactaacc

SEQ ID NO: 30990 - DNA, 25 bp, Saccharomyces pastorianus
aaccggtgtggtgtatttctccagt

SEQ ID NO: 30991 - DNA, 25 bp, Saccharomyces pastorianus
gccaacaagctgaatgccgacttta

SEQ ID NO: 30992 - DNA, 25 bp, Saccharomyces pastorianus
gtaccttttaccacgatgatatcct

SEQ ID NO: 30993 - DNA, 25 bp, Saccharomyces pastorianus
gaaactaaccgtgctaatgccccta

SEQ ID NO: 30994 - DNA, 25 bp, Saccharomyces pastorianus
ggatggcccgtcacaacaagggtat

SEQ ID NO: 30995 - DNA, 25 bp, Saccharomyces pastorianus
atatcctgcatatttaccttcacct

SEQ ID NO: 30996 - DNA, 25 bp, Saccharomyces pastorianus
ggcgttgcaattatgaatgtcccca

SEQ ID NO: 30997 - DNA, 25 bp, Saccharomyces pastorianus
aactgtgatcattgggcctgccggt

SEQ ID NO: 30998 - DNA, 25 bp, Saccharomyces pastorianus
tttcgccttgccaatgtaccattat

SEQ ID NO: 30999 - DNA, 25 bp, Saccharomyces pastorianus
ttaatggattgttaccccggaatgg

SEQ ID NO: 31000 - DNA, 25 bp, Saccharomyces pastorianus
taactttggtatcactgctttcgcc

SEQ ID NO: 31001 - DNA, 25 bp, Saccharomyces pastorianus
actattttgtcctttggatggcccg

SEQ ID NO: 31002 - DNA, 25 bp, Saccharomyces pastorianus
atctggtaccgagaacacctacatc

SEQ ID NO: 31003 - DNA, 25 bp, Saccharomyces pastorianus
ttcacctgttccgattggttagctg

SEQ ID NO: 31004 - DNA, 25 bp, Saccharomyces pastorianus
acctacatcgcattggccgttatta

SEQ ID NO: 31005 - DNA, 25 bp, Saccharomyces pastorianus
ggtattttcatgcatggtccaactt

SEQ ID NO: 31006 - DNA, 25 bp, Saccharomyces pastorianus
aagtagttcctgacatcgtgtgcgt

SEQ ID NO: 31007 - DNA, 25 bp, Saccharomyces pastorianus
gccgtcggtattgtggagctgtaca

SEQ ID NO: 31008 - DNA, 25 bp, Saccharomyces pastorianus
gggaatcagccctactaaacaagtt

SEQ ID NO: 31009 - DNA, 25 bp, Saccharomyces pastorianus
ggtccaactttcatgggtaatgctt

SEQ ID NO: 31010 - DNA, 25 bp, Saccharomyces pastorianus
gatggatatcctgctacgtggtgaa

SEQ ID NO: 31011 - DNA, 25 bp, Saccharomyces pastorianus
atgagcgcggtagtgaccaacgaaa

SEQ ID NO: 31012 - DNA, 25 bp, Saccharomyces pastorianus
gggcgttcatatcagacctttcaac

SEQ ID NO: 31013 - DNA, 25 bp, Saccharomyces pastorianus
cgaaaaggtcgcttccagaattgcc

SEQ ID NO: 31014 - DNA, 25 bp, Saccharomyces pastorianus
gggaacccttgtcaaacgtgtgtcg

SEQ ID NO: 31015 - DNA, 25 bp, Saccharomyces pastorianus
gacagacccgaagtggttccaaaag

SEQ ID NO: 31016 - DNA, 25 bp, Saccharomyces pastorianus
atgtgttcgatccaactatcccata

SEQ ID NO: 31017 - DNA, 25 bp, Saccharomyces pastorianus
gacatggccatggatgccgtagaaa

SEQ ID NO: 31018 - DNA, 25 bp, Saccharomyces pastorianus
gaagttaacaagtctccctggtcac

SEQ ID NO: 31019 - DNA, 25 bp, Saccharomyces pastorianus
tgatagcgcccagatgtgttcgatc

SEQ ID NO: 31020 - DNA, 25 bp, Saccharomyces pastorianus
ggatttgagcacacctgatagcgcc

SEQ ID NO: 31021 - DNA, 25 bp, Saccharomyces pastorianus
aaagcactatcgatcacccgtgaaa

SEQ ID NO: 31022 - DNA, 25 bp, Saccharomyces pastorianus
caagaatacttctacggcgacaaag

SEQ ID NO: 31023 - DNA, 25 bp, Saccharomyces pastorianus
tagaggcctcaaacgtgggagcatt

SEQ ID NO: 31024 - DNA, 25 bp, Saccharomyces pastorianus
ctgcagttctcacccattcaagaat

SEQ ID NO: 31025 - DNA, 25 bp, Saccharomyces pastorianus
tcacttttcatccagtagaggcctc

SEQ ID NO: 31026 - DNA, 25 bp, Saccharomyces pastorianus
atggctaaatggtggtctatctgtt

SEQ ID NO: 31027 - DNA, 25 bp, Saccharomyces pastorianus
aatcaagcactgtttgacccagtcg

SEQ ID NO: 31028 - DNA, 25 bp, Saccharomyces pastorianus
gattcggactttgattcagccacat

SEQ ID NO: 31029 - DNA, 25 bp, Saccharomyces pastorianus
aatgggcattcttgggcagctggac

SEQ ID NO: 31030 - DNA, 25 bp, Saccharomyces pastorianus
aatatcgccaattatcgcatcgcta

SEQ ID NO: 31031 - DNA, 25 bp, Saccharomyces pastorianus
gacccagtcgattcttatacatttt

SEQ ID NO: 31032 - DNA, 25 bp, Saccharomyces pastorianus
gcggctgggcaggtatactaagatt

SEQ ID NO: 31033 - DNA, 25 bp, Saccharomyces pastorianus
gaccaatactttgcacagtcgagaa

SEQ ID NO: 31034 - DNA, 25 bp, Saccharomyces pastorianus
tatacatttttcagcgattcggact

SEQ ID NO: 31035 - DNA, 25 bp, Saccharomyces pastorianus
atccatatgttaccaatcacaccag

SEQ ID NO: 31036 - DNA, 25 bp, Saccharomyces pastorianus
gaacgattacttctattaccaagat

SEQ ID NO: 31037 - DNA, 25 bp, Saccharomyces pastorianus
attcgttcagaatcctttgtcagtg

SEQ ID NO: 31038 - DNA, 25 bp, Saccharomyces pastorianus
gacttctccgattttgtcttcgtaa

SEQ ID NO: 31039 - DNA, 25 bp, Saccharomyces pastorianus
gaaacatggtcacgatgtcaatgag

SEQ ID NO: 31040 - DNA, 25 bp, Saccharomyces pastorianus
gaaaaagacttctccgattttgtct

SEQ ID NO: 31041 - DNA, 25 bp, Saccharomyces pastorianus
cttctccgattttgtcttcgtaaag

SEQ ID NO: 31042 - DNA, 25 bp, Saccharomyces pastorianus
taagaaacatggtcacgatgtcaat

SEQ ID NO: 31043 - DNA, 25 bp, Saccharomyces pastorianus
agacttctccgattttgtcttcgta

SEQ ID NO: 31044 - DNA, 25 bp, Saccharomyces pastorianus
gaacactagaaaacaagagattgct

SEQ ID NO: 31045 - DNA, 25 bp, Saccharomyces pastorianus
gaatttaagaaacatggtcacgatg

SEQ ID NO: 31046 - DNA, 25 bp, Saccharomyces pastorianus
tctccgattttgtcttcgtaaagtt

SEQ ID NO: 31047 - DNA, 25 bp, Saccharomyces pastorianus
aaagacttctccgattttgtcttcg

SEQ ID NO: 31048 - DNA, 25 bp, Saccharomyces pastorianus
gtgaaaaagacttctccgattttgt

SEQ ID NO: 31049 - DNA, 25 bp, Saccharomyces pastorianus
tcaatgagcttgttggcgacggtat

SEQ ID NO: 31050 - DNA, 25 bp, Saccharomyces pastorianus
gaaacatggtcacgatgtcaatgag

SEQ ID NO: 31051 - DNA, 25 bp, Saccharomyces pastorianus
gacttctccgattttgtcttcgtaa

SEQ ID NO: 31052 - DNA, 25 bp, Saccharomyces pastorianus
cttctccgattttgtcttcgtaaag

SEQ ID NO: 31053 - DNA, 25 bp, Saccharomyces pastorianus
agacttctccgattttgtcttcgta

SEQ ID NO: 31054 - DNA, 25 bp, Saccharomyces pastorianus
tgcgaactcgatttatcagggcagt

SEQ ID NO: 31055 - DNA, 25 bp, Saccharomyces pastorianus
gaacactagaaaacaagagattgct

SEQ ID NO: 31056 - DNA, 25 bp, Saccharomyces pastorianus
gaatttaagaaacatggtcacgatg

SEQ ID NO: 31057 - DNA, 25 bp, Saccharomyces pastorianus
tctccgattttgtcttcgtaaagtt

SEQ ID NO: 31058 - DNA, 25 bp, Saccharomyces pastorianus
aaagacttctccgattttgtcttcg

SEQ ID NO: 31059 - DNA, 25 bp, Saccharomyces pastorianus
gtgaaaaagacttctccgattttgt

SEQ ID NO: 31060 - DNA, 25 bp, Saccharomyces pastorianus
ttttgcgtggcttcaccgtaaacaa

SEQ ID NO: 31061 - DNA, 25 bp, Saccharomyces pastorianus
gtgggtgcttctattgccggtgcaa

SEQ ID NO: 31062 - DNA, 25 bp, Saccharomyces pastorianus
gttcgtgctcagatggtggaatcct

SEQ ID NO: 31063 - DNA, 25 bp, Saccharomyces pastorianus
cggtgcaatatggactcagcgcctg

SEQ ID NO: 31064 - DNA, 25 bp, Saccharomyces pastorianus
accctattggatctgaagttcgtgc

SEQ ID NO: 31065 - DNA, 25 bp, Saccharomyces pastorianus
gggtattatactgcatttctatcct

SEQ ID NO: 31066 - DNA, 25 bp, Saccharomyces pastorianus
tatcctcatcctaaactatttgtgg

SEQ ID NO: 31067 - DNA, 25 bp, Saccharomyces pastorianus
gatcgcttctcggtgttcttggaat

SEQ ID NO: 31068 - DNA, 25 bp, Saccharomyces pastorianus
gtgtcaatttcatttgcagctttca

SEQ ID NO: 31069 - DNA, 25 bp, Saccharomyces pastorianus
ctatttgtggttgctggatcgcttc

SEQ ID NO: 31070 - DNA, 25 bp, Saccharomyces pastorianus
agcgactcggctacaacttaggtat

SEQ ID NO: 31071 - DNA, 25 bp, Saccharomyces pastorianus
acttgtattaccttgctgacgttta

SEQ ID NO: 31072 - DNA, 25 bp, Saccharomyces pastorianus
agccgctttcaactatctgctttga

SEQ ID NO: 31073 - DNA, 25 bp, Saccharomyces pastorianus
ggcccaaaacattacgccggtattg

SEQ ID NO: 31074 - DNA, 25 bp, Saccharomyces pastorianus
tggtagcattttcactgtcatgggt

SEQ ID NO: 31075 - DNA, 25 bp, Saccharomyces pastorianus
ggagtcatgcaacatttccagccat

SEQ ID NO: 31076 - DNA, 25 bp, Saccharomyces pastorianus
ggatactgctgaagttactgcttat

SEQ ID NO: 31077 - DNA, 25 bp, Saccharomyces pastorianus
ctacttgcaccttctaaccatgaat

SEQ ID NO: 31078 - DNA, 25 bp, Saccharomyces pastorianus
gcggatggtttgtgcgcagctaatc

SEQ ID NO: 31079 - DNA, 25 bp, Saccharomyces pastorianus
ggactattgttgatgttggcccaaa

SEQ ID NO: 31080 - DNA, 25 bp, Saccharomyces pastorianus
gatatgctacatcgctacttgcacc

SEQ ID NO: 31081 - DNA, 25 bp, Saccharomyces pastorianus
atccaaattattacgccggtcacca

SEQ ID NO: 31082 - DNA, 25 bp, Saccharomyces pastorianus
gagccattggacgttgttatcccta

SEQ ID NO: 31083 - DNA, 25 bp, Saccharomyces pastorianus
tcagattctacgactcatgcattaa

SEQ ID NO: 31084 - DNA, 25 bp, Saccharomyces pastorianus
acgcccggtggaacagtgtcattat

SEQ ID NO: 31085 - DNA, 25 bp, Saccharomyces pastorianus
ttagagttgggatcatccacgcccg

SEQ ID NO: 31086 - DNA, 25 bp, Saccharomyces pastorianus
gacaagccaagctaggtgagccatt

SEQ ID NO: 31087 - DNA, 25 bp, Saccharomyces pastorianus
tatgaccgaagaacaagctctggcc

SEQ ID NO: 31088 - DNA, 25 bp, Saccharomyces pastorianus
tatccctatcggtgtgcttattaaa

SEQ ID NO: 31089 - DNA, 25 bp, Saccharomyces pastorianus
cattgaaagaatggcctccctgggt

SEQ ID NO: 31090 - DNA, 25 bp, Saccharomyces pastorianus
tagtggagacagttcccgggtccta

SEQ ID NO: 31091 - DNA, 25 bp, Saccharomyces pastorianus
ttttcggccttttgacttgtatgac

SEQ ID NO: 31092 - DNA, 25 bp, Saccharomyces pastorianus
tggcctccctgggtgtcaatgagaa

SEQ ID NO: 31093 - DNA, 25 bp, Saccharomyces pastorianus
tccagcaaaagatacgttccctcgg

SEQ ID NO: 31094 - DNA, 25 bp, Saccharomyces pastorianus
ttgctacaaaacttctcctctagtg

SEQ ID NO: 31095 - DNA, 25 bp, Saccharomyces pastorianus
tggcacgttctcagacagttataaa

SEQ ID NO: 31096 - DNA, 25 bp, Saccharomyces pastorianus
acaggtatcttgcatgtttctacga

SEQ ID NO: 31097 - DNA, 25 bp, Saccharomyces pastorianus
aatgcgtggattcagctaccggtcg

SEQ ID NO: 31098 - DNA, 25 bp, Saccharomyces pastorianus
taatcggcacgatcactggcacgtt

SEQ ID NO: 31099 - DNA, 25 bp, Saccharomyces pastorianus
tcgcgatgctgggttcgggttatta

SEQ ID NO: 31100 - DNA, 25 bp, Saccharomyces pastorianus
ctcctctagtgtctcgttatcatat

SEQ ID NO: 31101 - DNA, 25 bp, Saccharomyces pastorianus
tggctttccctaatgcctcgaagaa

SEQ ID NO: 31102 - DNA, 25 bp, Saccharomyces pastorianus
agccgctcacaccaagttcgaaatt

SEQ ID NO: 31103 - DNA, 25 bp, Saccharomyces pastorianus
gtgcgcaggctgtatatgtagacta

SEQ ID NO: 31104 - DNA, 25 bp, Saccharomyces pastorianus
ggaggctcatccagatatcttcaca

SEQ ID NO: 31105 - DNA, 25 bp, Saccharomyces pastorianus
aatgggtttccgattgctgctacta

SEQ ID NO: 31106 - DNA, 25 bp, Saccharomyces pastorianus
ggtcttttgattatcaccgctggta

SEQ ID NO: 31107 - DNA, 25 bp, Saccharomyces pastorianus
gttcctgctctaaccattgaagatg

SEQ ID NO: 31108 - DNA, 25 bp, Saccharomyces pastorianus
aacccgttggcttgctctgtaagta

SEQ ID NO: 31109 - DNA, 25 bp, Saccharomyces pastorianus
atccagtgtggattgggccgttcag

SEQ ID NO: 31110 - DNA, 25 bp, Saccharomyces pastorianus
agaatttgttgagccacctaccgag

SEQ ID NO: 31111 - DNA, 25 bp, Saccharomyces pastorianus
tgggctcatgcctatttaccaaagg

SEQ ID NO: 31112 - DNA, 25 bp, Saccharomyces pastorianus
tatcttcacatctgccaaagctttg

SEQ ID NO: 31113 - DNA, 25 bp, Saccharomyces pastorianus
tgagggcggtgttttcccagtagaa

SEQ ID NO: 31114 - DNA, 25 bp, Saccharomyces pastorianus
agtacggttagattcgttcctgctc

SEQ ID NO: 31115 - DNA, 25 bp, Saccharomyces pastorianus
aaagccagctgttgataaatccgaa

SEQ ID NO: 31116 - DNA, 25 bp, Saccharomyces pastorianus
gacgaattatggctcagaaccttac

SEQ ID NO: 31117 - DNA, 25 bp, Saccharomyces pastorianus
ctgtgacttcattccaaaccgttga

SEQ ID NO: 31118 - DNA, 25 bp, Saccharomyces pastorianus
aaccgtttcagtagatgatgccaca

SEQ ID NO: 31119 - DNA, 25 bp, Saccharomyces pastorianus
gatctattgcgtcctgtgacttcat

SEQ ID NO: 31120 - DNA, 25 bp, Saccharomyces pastorianus
taccaaatggacgttgtggtacaca

SEQ ID NO: 31121 - DNA, 25 bp, Saccharomyces pastorianus
gataaatccgaatcctggtctgatc

SEQ ID NO: 31122 - DNA, 25 bp, Saccharomyces pastorianus
cgttgaagaattctgggctatcatc

SEQ ID NO: 31123 - DNA, 25 bp, Saccharomyces pastorianus
ggctatcatccaaaatattcccgaa

SEQ ID NO: 31124 - DNA, 25 bp, Saccharomyces pastorianus
gaatcctggtctgatctattgcgtc

SEQ ID NO: 31125 - DNA, 25 bp, Saccharomyces pastorianus
gaattcttcccacattctagtgcta

SEQ ID NO: 31126 - DNA, 25 bp, Saccharomyces pastorianus
gggcctttgtttcccaatgcaagta

SEQ ID NO: 31127 - DNA, 25 bp, Saccharomyces pastorianus
cgttatttgtgcttgtcgggttaat

SEQ ID NO: 31128 - DNA, 25 bp, Saccharomyces pastorianus
agtatttgccactgctatgctggat

SEQ ID NO: 31129 - DNA, 25 bp, Saccharomyces pastorianus
tattgttgctttgcaggtgctaccc

SEQ ID NO: 31130 - DNA, 25 bp, Saccharomyces pastorianus
ggttcgtggttcttcacttatttgc

SEQ ID NO: 31131 - DNA, 25 bp, Saccharomyces pastorianus
aattgattccaactccgtgttctat

SEQ ID NO: 31132 - DNA, 25 bp, Saccharomyces pastorianus
tacggttgtctaactctcttttcat

SEQ ID NO: 31133 - DNA, 25 bp, Saccharomyces pastorianus
tagttgttttctcctgtggtacgtt

SEQ ID NO: 31134 - DNA, 25 bp, Saccharomyces pastorianus
ttgtggtggtgcagctttcccatac

SEQ ID NO: 31135 - DNA, 25 bp, Saccharomyces pastorianus
ggtgctacccaagagatcacatgta

SEQ ID NO: 31136 - DNA, 25 bp, Saccharomyces pastorianus
aattgttgcgttgttcacactagaa

SEQ ID NO: 31137 - DNA, 25 bp, Saccharomyces pastorianus
cgagagatgcatgcccgttggacaa

SEQ ID NO: 31138 - DNA, 25 bp, Saccharomyces pastorianus
gaatgagcaacaaaatacaccggta

SEQ ID NO: 31139 - DNA, 25 bp, Saccharomyces pastorianus
aaaaaatggacagcggtggcgttct

SEQ ID NO: 31140 - DNA, 25 bp, Saccharomyces pastorianus
aatcgcaagtttccacgcagaatga

SEQ ID NO: 31141 - DNA, 25 bp, Saccharomyces pastorianus
caactgtgccatttgcagaaaccac

SEQ ID NO: 31142 - DNA, 25 bp, Saccharomyces pastorianus
cattatggaaccatgcatcgaatgc

SEQ ID NO: 31143 - DNA, 25 bp, Saccharomyces pastorianus
acagataacgaatgtgtggcagcat

SEQ ID NO: 31144 - DNA, 25 bp, Saccharomyces pastorianus
ccgaaggctatgaccgacacagata

SEQ ID NO: 31145 - DNA, 25 bp, Saccharomyces pastorianus
cgttctggtcgtgggatatagccgt

SEQ ID NO: 31146 - DNA, 25 bp, Saccharomyces pastorianus
gctttccacttgcactgcatcaata

SEQ ID NO: 31147 - DNA, 25 bp, Saccharomyces pastorianus
gcatcgaatgccagccgaaggctat

SEQ ID NO: 31148 - DNA, 25 bp, Saccharomyces pastorianus
aatcttggacagcaaggcacccgac

SEQ ID NO: 31149 - DNA, 25 bp, Saccharomyces pastorianus
aaagtcatcaaacggatccctccgg

SEQ ID NO: 31150 - DNA, 25 bp, Saccharomyces pastorianus
gaaaacttgccgttgattcgagagt

SEQ ID NO: 31151 - DNA, 25 bp, Saccharomyces pastorianus
agggtcttgcaacgagctgaacttg

SEQ ID NO: 31152 - DNA, 25 bp, Saccharomyces pastorianus
ttttccatccggattatctgtctga

SEQ ID NO: 31153 - DNA, 25 bp, Saccharomyces pastorianus
agtttaagtgcttggattctcctcc

SEQ ID NO: 31154 - DNA, 25 bp, Saccharomyces pastorianus
tggaacttgagatttaacctgggca

SEQ ID NO: 31155 - DNA, 25 bp, Saccharomyces pastorianus
gatgttcaatacagggtcttgcaac

SEQ ID NO: 31156 - DNA, 25 bp, Saccharomyces pastorianus
gggaccgttttccatgaaagacgag

SEQ ID NO: 31157 - DNA, 25 bp, Saccharomyces pastorianus
gttccgccaagctcatcacaagaag

SEQ ID NO: 31158 - DNA, 25 bp, Saccharomyces pastorianus
gctgaacttgcacattcgatttgga

SEQ ID NO: 31159 - DNA, 25 bp, Saccharomyces pastorianus
gataatgttaatcgctccaatgata

SEQ ID NO: 31160 - DNA, 25 bp, Saccharomyces pastorianus
gggatattgggtgttctactttcat

SEQ ID NO: 31161 - DNA, 25 bp, Saccharomyces pastorianus
gttctactttcattggctgttgcag

SEQ ID NO: 31162 - DNA, 25 bp, Saccharomyces pastorianus
atactaaaactattgcgtggtggtt

SEQ ID NO: 31163 - DNA, 25 bp, Saccharomyces pastorianus
aaacagctacgtgcctacaacttca

SEQ ID NO: 31164 - DNA, 25 bp, Saccharomyces pastorianus
gatcacatacaaactacttgtccca

SEQ ID NO: 31165 - DNA, 25 bp, Saccharomyces pastorianus
aatagatcctccgtccacactaaat

SEQ ID NO: 31166 - DNA, 25 bp, Saccharomyces pastorianus
ctgttgcaggttggttcttagcgaa

SEQ ID NO: 31167 - DNA, 25 bp, Saccharomyces pastorianus
gggctaagtcagtcatatccagctt

SEQ ID NO: 31168 - DNA, 25 bp, Saccharomyces pastorianus
aactttaccaaacagctacgtgcct

SEQ ID NO: 31169 - DNA, 25 bp, Saccharomyces pastorianus
gaaaagttacgatgctgggtacaat

SEQ ID NO: 31170 - DNA, 25 bp, Saccharomyces pastorianus
atgcttcggacgttcatgtgacatt

SEQ ID NO: 31171 - DNA, 25 bp, Saccharomyces pastorianus
gatcatgccggattgtttcggttcc

SEQ ID NO: 31172 - DNA, 25 bp, Saccharomyces pastorianus
ggctttgccttattagctggtggat

SEQ ID NO: 31173 - DNA, 25 bp, Saccharomyces pastorianus
tatcaggtgccctttatgctctagg

SEQ ID NO: 31174 - DNA, 25 bp, Saccharomyces pastorianus
gattccatttctttgcagtacgcta

SEQ ID NO: 31175 - DNA, 25 bp, Saccharomyces pastorianus
tttctaggttctccaatgcttcgga

SEQ ID NO: 31176 - DNA, 25 bp, Saccharomyces pastorianus
ggtgatttggactcgagcatggcat

SEQ ID NO: 31177 - DNA, 25 bp, Saccharomyces pastorianus
gatgcggtacttttttctaggttct

SEQ ID NO: 31178 - DNA, 25 bp, Saccharomyces pastorianus
ggcatggcaagctcgtactatttta

SEQ ID NO: 31179 - DNA, 25 bp, Saccharomyces pastorianus
tatgctctagggttttgggtctttt

SEQ ID NO: 31180 - DNA, 25 bp, Saccharomyces pastorianus
gttgtgtcgttctatggattgctca

SEQ ID NO: 31181 - DNA, 25 bp, Saccharomyces pastorianus
gtttgtgattttggctcagcccaac

SEQ ID NO: 31182 - DNA, 25 bp, Saccharomyces pastorianus
tatgcattggttcccgtatatcgag

SEQ ID NO: 31183 - DNA, 25 bp, Saccharomyces pastorianus
atacttcttcaagcgtatctcaaga

SEQ ID NO: 31184 - DNA, 25 bp, Saccharomyces pastorianus
tagcaattctattaggccggctccc

SEQ ID NO: 31185 - DNA, 25 bp, Saccharomyces pastorianus
gacatacttctgttcgaggttttat

SEQ ID NO: 31186 - DNA, 25 bp, Saccharomyces pastorianus
atatgccatggtgatctcaagccga

SEQ ID NO: 31187 - DNA, 25 bp, Saccharomyces pastorianus
tcgagtttttcgacgttgacttctt

SEQ ID NO: 31188 - DNA, 25 bp, Saccharomyces pastorianus
catactgattatacccagcagcggt

SEQ ID NO: 31189 - DNA, 25 bp, Saccharomyces pastorianus
tatgccagtgcatctaccagaatta

SEQ ID NO: 31190 - DNA, 25 bp, Saccharomyces pastorianus
ggctccctgaacctaatacttcttc

SEQ ID NO: 31191 - DNA, 25 bp, Saccharomyces pastorianus
tctcaagccgagcaacatactgatt

SEQ ID NO: 31192 - DNA, 25 bp, Saccharomyces pastorianus
gcgtcgctacggacctaactttgag

SEQ ID NO: 31193 - DNA, 25 bp, Saccharomyces pastorianus
aaatctgtacttgggctacttgcgg

SEQ ID NO: 31194 - DNA, 25 bp, Saccharomyces pastorianus
ggttatatcacgtcacttcttgaaa

SEQ ID NO: 31195 - DNA, 25 bp, Saccharomyces pastorianus
agggctaagatcgacatccgggatt

SEQ ID NO: 31196 - DNA, 25 bp, Saccharomyces pastorianus
atacgtagcctctgatgtatccctt

SEQ ID NO: 31197 - DNA, 25 bp, Saccharomyces pastorianus
aaaggctattaagtgtccgagtatc

SEQ ID NO: 31198 - DNA, 25 bp, Saccharomyces pastorianus
gggcgatttgcattgccatgtgctg

SEQ ID NO: 31199 - DNA, 25 bp, Saccharomyces pastorianus
aagctttttctgcatgctgaccaaa

SEQ ID NO: 31200 - DNA, 25 bp, Saccharomyces pastorianus
agagccgatacgtctgcgtttctaa

SEQ ID NO: 31201 - DNA, 25 bp, Saccharomyces pastorianus
tctaagcacctttgtggcgtcgcta

SEQ ID NO: 31202 - DNA, 25 bp, Saccharomyces pastorianus
tcaattttaacttcaacgccaacgg

SEQ ID NO: 31203 - DNA, 25 bp, Saccharomyces pastorianus
gctaaccatggacttcacgcataat

SEQ ID NO: 31204 - DNA, 25 bp, Saccharomyces pastorianus
tgatgaaagctctcaattcctcgac

SEQ ID NO: 31205 - DNA, 25 bp, Saccharomyces pastorianus
aagccttatgctcttgattcattgt

SEQ ID NO: 31206 - DNA, 25 bp, Saccharomyces pastorianus
gtgaccctccttacggtattagaga

SEQ ID NO: 31207 - DNA, 25 bp, Saccharomyces pastorianus
cgccgcgattacattccaacaaaaa

SEQ ID NO: 31208 - DNA, 25 bp, Saccharomyces pastorianus
tactcttcggaaagattgcccattg

SEQ ID NO: 31209 - DNA, 25 bp, Saccharomyces pastorianus
ttgacgggagattggccttctggat

SEQ ID NO: 31210 - DNA, 25 bp, Saccharomyces pastorianus
tacgatattgtgtgaccctccttac

SEQ ID NO: 31211 - DNA, 25 bp, Saccharomyces pastorianus
aaaggcatttttgcgccgcgattac

SEQ ID NO: 31212 - DNA, 25 bp, Saccharomyces pastorianus
cgctttagtcgttggctcggatatt

SEQ ID NO: 31213 - DNA, 25 bp, Saccharomyces pastorianus
gcaggtggacacttcggcgctttag

SEQ ID NO: 31214 - DNA, 25 bp, Saccharomyces pastorianus
accgtggtgaccgtgattacaatca

SEQ ID NO: 31215 - DNA, 25 bp, Saccharomyces pastorianus
tctccacctttgaatctacctaacg

SEQ ID NO: 31216 - DNA, 25 bp, Saccharomyces pastorianus
agcggcaacatgaaccgtcgtggcg

SEQ ID NO: 31217 - DNA, 25 bp, Saccharomyces pastorianus
aacagcggcaacagcggcaacatga

SEQ ID NO: 31218 - DNA, 25 bp, Saccharomyces pastorianus
gatgatcacaacaacggctatggct

SEQ ID NO: 31219 - DNA, 25 bp, Saccharomyces pastorianus
caaactggtatggactactctcaaa

SEQ ID NO: 31220 - DNA, 25 bp, Saccharomyces pastorianus
agattcaggcaacgctcaaggttcc

SEQ ID NO: 31221 - DNA, 25 bp, Saccharomyces pastorianus
cccaacgccttcagattctgacaat

SEQ ID NO: 31222 - DNA, 25 bp, Saccharomyces pastorianus
agggcccatcctcacaatataatga

SEQ ID NO: 31223 - DNA, 25 bp, Saccharomyces pastorianus
ggctatggctacaaccgcgatcgcg

SEQ ID NO: 31224 - DNA, 25 bp, Saccharomyces pastorianus
atcaaatacagactcaggctctcca

SEQ ID NO: 31225 - DNA, 25 bp, Saccharomyces pastorianus
gatgcatttctatagtcccatgttt

SEQ ID NO: 31226 - DNA, 25 bp, Saccharomyces pastorianus
ggtacgattttcatgttggcactat

SEQ ID NO: 31227 - DNA, 25 bp, Saccharomyces pastorianus
ggatctttttatcgttcctgaacat

SEQ ID NO: 31228 - DNA, 25 bp, Saccharomyces pastorianus
gtcagtctgcaggtgtggtttgtac

SEQ ID NO: 31229 - DNA, 25 bp, Saccharomyces pastorianus
gctgatggcgcagacttattcacca

SEQ ID NO: 31230 - DNA, 25 bp, Saccharomyces pastorianus
tttggcaccagcagcaggtacgatt

SEQ ID NO: 31231 - DNA, 25 bp, Saccharomyces pastorianus
ttgccatttttggtcgcacctttaa

SEQ ID NO: 31232 - DNA, 25 bp, Saccharomyces pastorianus
ttatcacagtgatcgccgttatcgt

SEQ ID NO: 31233 - DNA, 25 bp, Saccharomyces pastorianus
agaaatcactgtcgaccatgccgaa

SEQ ID NO: 31234 - DNA, 25 bp, Saccharomyces pastorianus
ggtattatctatcgtgttgccattt

SEQ ID NO: 31235 - DNA, 25 bp, Saccharomyces pastorianus
gcacctttaattttcttcacctgta

SEQ ID NO: 31236 - DNA, 25 bp, Saccharomyces pastorianus
tgcttcaaatgctgtcggtatcctt

SEQ ID NO: 31237 - DNA, 25 bp, Saccharomyces pastorianus
ttaccattcctgttttacccattgg

SEQ ID NO: 31238 - DNA, 25 bp, Saccharomyces pastorianus
atatccaaaaccaccgatttcggca

SEQ ID NO: 31239 - DNA, 25 bp, Saccharomyces pastorianus
tatatcccagggtatttcgcagaca

SEQ ID NO: 31240 - DNA, 25 bp, Saccharomyces pastorianus
atattcaactcagcgctaatggcag

SEQ ID NO: 31241 - DNA, 25 bp, Saccharomyces pastorianus
aataggtgcctcctttgcagagagc

SEQ ID NO: 31242 - DNA, 25 bp, Saccharomyces pastorianus
gcaggcgccgcatgctatataatat

SEQ ID NO: 31243 - DNA, 25 bp, Saccharomyces pastorianus
caggttctatcctatcattgacgcc

SEQ ID NO: 31244 - DNA, 25 bp, Saccharomyces pastorianus
cattgacgcctgtgtgcattggaca

SEQ ID NO: 31245 - DNA, 25 bp, Saccharomyces pastorianus
acagtgtacctgttgcaatccttgg

SEQ ID NO: 31246 - DNA, 25 bp, Saccharomyces pastorianus
tttagcatcttactctatggccaga

SEQ ID NO: 31247 - DNA, 25 bp, Saccharomyces pastorianus
tacataagcagtacgtcttcccagt

SEQ ID NO: 31248 - DNA, 25 bp, Saccharomyces pastorianus
aattcatcaagtcaccacattcagt

SEQ ID NO: 31249 - DNA, 25 bp, Saccharomyces pastorianus
atggaagccctgtaccaaacggcat

SEQ ID NO: 31250 - DNA, 25 bp, Saccharomyces pastorianus
ttggaaagccattcagacaggtctt

SEQ ID NO: 31251 - DNA, 25 bp, Saccharomyces pastorianus
gacaggtcttaaccgtgggtattct

SEQ ID NO: 31252 - DNA, 25 bp, Saccharomyces pastorianus
agacgggatcctgcagtgaataaaa

SEQ ID NO: 31253 - DNA, 25 bp, Saccharomyces pastorianus
atatctcccgaacatgaaagtgcag

SEQ ID NO: 31254 - DNA, 25 bp, Saccharomyces pastorianus
ggagggcgtaccgacatttgaagaa

SEQ ID NO: 31255 - DNA, 25 bp, Saccharomyces pastorianus
tccttcagtggatggtcggtttaac

SEQ ID NO: 31256 - DNA, 25 bp, Saccharomyces pastorianus
gtttgcacaagaccattcgaattca

SEQ ID NO: 31257 - DNA, 25 bp, Saccharomyces pastorianus
ggaagattatacaacgaacccgcct

SEQ ID NO: 31258 - DNA, 25 bp, Saccharomyces pastorianus
ggctactgccagcaccacagaagac

SEQ ID NO: 31259 - DNA, 25 bp, Saccharomyces pastorianus
tattaccatttcaagtggcgatgat

SEQ ID NO: 31260 - DNA, 25 bp, Saccharomyces pastorianus
tggtgcttttgatctattaacgaat

SEQ ID NO: 31261 - DNA, 25 bp, Saccharomyces pastorianus
tatccggtatacttcccaaaatcta

SEQ ID NO: 31262 - DNA, 25 bp, Saccharomyces pastorianus
gggtcatcagatggttatccggtat

SEQ ID NO: 31263 - DNA, 25 bp, Saccharomyces pastorianus
agatacagtaacttccacggctact

SEQ ID NO: 31264 - DNA, 25 bp, Saccharomyces pastorianus
gcttggtgctgaacaaggctatcat

SEQ ID NO: 31265 - DNA, 25 bp, Saccharomyces pastorianus
ttatgacataatagaaccgcccact

SEQ ID NO: 31266 - DNA, 25 bp, Saccharomyces pastorianus
gttaagacacaaccatccgaatcag

SEQ ID NO: 31267 - DNA, 25 bp, Saccharomyces pastorianus
gaggcaaacaacatcagtcgaggaa

SEQ ID NO: 31268 - DNA, 25 bp, Saccharomyces pastorianus
aaaatccatttgcactagccattca

SEQ ID NO: 31269 - DNA, 25 bp, Saccharomyces pastorianus
ctacgtttgcactcatacgcacggg

SEQ ID NO: 31270 - DNA, 25 bp, Saccharomyces pastorianus
gtcaaatttttcttggattcctcag

SEQ ID NO: 31271 - DNA, 25 bp, Saccharomyces pastorianus
gcacgttaacacttcatggcttgtc

SEQ ID NO: 31272 - DNA, 25 bp, Saccharomyces pastorianus
aacaaacctgtcagttccctaatga

SEQ ID NO: 31273 - DNA, 25 bp, Saccharomyces pastorianus
atgacattcctatcgagactgcaga

SEQ ID NO: 31274 - DNA, 25 bp, Saccharomyces pastorianus
ggagctcgatgtttctcgtgcaaaa

SEQ ID NO: 31275 - DNA, 25 bp, Saccharomyces pastorianus
tagcggcaggtttcggtactatacc

SEQ ID NO: 31276 - DNA, 25 bp, Saccharomyces pastorianus
atagacttgttaggtgctcctctac

SEQ ID NO: 31277 - DNA, 25 bp, Saccharomyces pastorianus
acaatttgtcttgcgctacgatcga

SEQ ID NO: 31278 - DNA, 25 bp, Saccharomyces pastorianus
gcactgtagggagccactatgcatt

SEQ ID NO: 31279 - DNA, 25 bp, Saccharomyces pastorianus
atcgagccagtggtccaggaggaca

SEQ ID NO: 31280 - DNA, 25 bp, Saccharomyces pastorianus
gctagtaacaaatcgtcgccgctaa

SEQ ID NO: 31281 - DNA, 25 bp, Saccharomyces pastorianus
taacggacatattggatcccaccgc

SEQ ID NO: 31282 - DNA, 25 bp, Saccharomyces pastorianus
tcccaccgcggatatcaatgctagt

SEQ ID NO: 31283 - DNA, 25 bp, Saccharomyces pastorianus
agaagcaaacgtgccaccatggtgg

SEQ ID NO: 31284 - DNA, 25 bp, Saccharomyces pastorianus
gccaaggtctgaagtttttacacga

SEQ ID NO: 31285 - DNA, 25 bp, Saccharomyces pastorianus
gctaataatgggtcgcccgtattgc

SEQ ID NO: 31286 - DNA, 25 bp, Saccharomyces pastorianus
attgcgtcgtgctgaattggtgtct

SEQ ID NO: 31287 - DNA, 25 bp, Saccharomyces pastorianus
attcttcttaattcccagggcttag

SEQ ID NO: 31288 - DNA, 25 bp, Saccharomyces pastorianus
agacaatttttggatgcgtgcttac

SEQ ID NO: 31289 - DNA, 25 bp, Saccharomyces pastorianus
gatggcacccgaaatcgtgaatcag

SEQ ID NO: 31290 - DNA, 25 bp, Saccharomyces pastorianus
tagacggcgagcctccatatctaaa

SEQ ID NO: 31291 - DNA, 25 bp, Saccharomyces pastorianus
gataagcctgtgtctgcaccttctt

SEQ ID NO: 31292 - DNA, 25 bp, Saccharomyces pastorianus
ttgccaatttgggtgttccgttgcc

SEQ ID NO: 31293 - DNA, 25 bp, Saccharomyces pastorianus
aaaagcctcccacgtaagcgagatt

SEQ ID NO: 31294 - DNA, 25 bp, Saccharomyces pastorianus
agaacgataaacctgcggccaaaca

SEQ ID NO: 31295 - DNA, 25 bp, Saccharomyces pastorianus
cttgggacgccattgaggctttact

SEQ ID NO: 31296 - DNA, 25 bp, Saccharomyces pastorianus
cgaacttgaaactcgactcggccaa

SEQ ID NO: 31297 - DNA, 25 bp, Saccharomyces pastorianus
gaaaacgagaccgtccgctggacat

SEQ ID NO: 31298 - DNA, 25 bp, Saccharomyces pastorianus
attgagcatgatttcggcccatccg

SEQ ID NO: 31299 - DNA, 25 bp, Saccharomyces pastorianus
gttccgttgcccacgttgaaataca

SEQ ID NO: 31300 - DNA, 25 bp, Saccharomyces pastorianus
agtccttcacgaaaacctgttcttg

SEQ ID NO: 31301 - DNA, 25 bp, Saccharomyces pastorianus
tatccgacccgaagctgccaaaaag

SEQ ID NO: 31302 - DNA, 25 bp, Saccharomyces pastorianus
ttgaagaaggaagccaccccagagg

SEQ ID NO: 31303 - DNA, 25 bp, Saccharomyces pastorianus
gtcaccaccaaggtcgatgatacca

SEQ ID NO: 31304 - DNA, 25 bp, Saccharomyces pastorianus
agaagaccgaagtcaccaccaaggt

SEQ ID NO: 31305 - DNA, 25 bp, Saccharomyces pastorianus
aaggaacaagcccaaacgtccatcg

SEQ ID NO: 31306 - DNA, 25 bp, Saccharomyces pastorianus
gatgataccaagaaacaagccactg

SEQ ID NO: 31307 - DNA, 25 bp, Saccharomyces pastorianus
cactgctgctgtcaccgagaagaag

SEQ ID NO: 31308 - DNA, 25 bp, Saccharomyces pastorianus
acgtccatcgacaacttgaagaagg

SEQ ID NO: 31309 - DNA, 25 bp, Saccharomyces pastorianus
aaagctgaagctgccgctcaagacg

SEQ ID NO: 31310 - DNA, 25 bp, Saccharomyces pastorianus
cgctcaagacgtccaacaaaagctg

SEQ ID NO: 31311 - DNA, 25 bp, Saccharomyces pastorianus
gaacaagtcatcgtcgacggtgccg

SEQ ID NO: 31312 - DNA, 25 bp, Saccharomyces pastorianus
tcatcgtcgacggtgccgagcaaaa

SEQ ID NO: 31313 - DNA, 25 bp, Saccharomyces pastorianus
gtggtaccggacttgcaaccgcaag

SEQ ID NO: 31314 - DNA, 25 bp, Saccharomyces pastorianus
gtataaatcacgtatcctcagagaa

SEQ ID NO: 31315 - DNA, 25 bp, Saccharomyces pastorianus
aaccgcaagagagccgatcagaact

SEQ ID NO: 31316 - DNA, 25 bp, Saccharomyces pastorianus
caaagaggtcaagagcgaactggct

SEQ ID NO: 31317 - DNA, 25 bp, Saccharomyces pastorianus
gagtctaagctatttgagctggcta

SEQ ID NO: 31318 - DNA, 25 bp, Saccharomyces pastorianus
gagacatgtccaatgtggtaccgaa

SEQ ID NO: 31319 - DNA, 25 bp, Saccharomyces pastorianus
ttgacgagctagtggccgtggtacc

SEQ ID NO: 31320 - DNA, 25 bp, Saccharomyces pastorianus
tgcccggtggcagtaacagcataga

SEQ ID NO: 31321 - DNA, 25 bp, Saccharomyces pastorianus
aagcacggagcaatgcccggtggca

SEQ ID NO: 31322 - DNA, 25 bp, Saccharomyces pastorianus
ggaaacaaatcatagcgaagcacgg

SEQ ID NO: 31323 - DNA, 25 bp, Saccharomyces pastorianus
acgaaaatatcgactttgaaggtgg

SEQ ID NO: 31324 - DNA, 25 bp, Saccharomyces pastorianus
aaactactgcccatttttgttatgt

SEQ ID NO: 31325 - DNA, 25 bp, Saccharomyces pastorianus
atggtttcatcatttcgctcaactt

SEQ ID NO: 31326 - DNA, 25 bp, Saccharomyces pastorianus
tgatctgatcaagccacttctaagg

SEQ ID NO: 31327 - DNA, 25 bp, Saccharomyces pastorianus
cgctcaacttttttccatctggatt

SEQ ID NO: 31328 - DNA, 25 bp, Saccharomyces pastorianus
gatcgtcacgttaaccttgttgata

SEQ ID NO: 31329 - DNA, 25 bp, Saccharomyces pastorianus
aacctcaagactcctcattttttgg

SEQ ID NO: 31330 - DNA, 25 bp, Saccharomyces pastorianus
gattcttccaaaagcttgtgccatt

SEQ ID NO: 31331 - DNA, 25 bp, Saccharomyces pastorianus
ttgggttccccatcatttataggca

SEQ ID NO: 31332 - DNA, 25 bp, Saccharomyces pastorianus
gcttgtgccattgaattgtccatct

SEQ ID NO: 31333 - DNA, 25 bp, Saccharomyces pastorianus
tgatgcatccgataccttccaattg

SEQ ID NO: 31334 - DNA, 25 bp, Saccharomyces pastorianus
aggccgatcttcgattctatttacg

SEQ ID NO: 31335 - DNA, 25 bp, Saccharomyces pastorianus
aaccgctttgaaactgttctgacaa

SEQ ID NO: 31336 - DNA, 25 bp, Saccharomyces pastorianus
gctccttcgacaagcgcaattctaa

SEQ ID NO: 31337 - DNA, 25 bp, Saccharomyces pastorianus
gttaggccagcacacgttttagtac

SEQ ID NO: 31338 - DNA, 25 bp, Saccharomyces pastorianus
attcaccgagttagttttccgcgat

SEQ ID NO: 31339 - DNA, 25 bp, Saccharomyces pastorianus
ggttcaactgaacatcccatttctg

SEQ ID NO: 31340 - DNA, 25 bp, Saccharomyces pastorianus
tgttctgacaaaatttcgaccccaa

SEQ ID NO: 31341 - DNA, 25 bp, Saccharomyces pastorianus
gtcttggaatatttgaaccgctttg

SEQ ID NO: 31342 - DNA, 25 bp, Saccharomyces pastorianus
taatggcatcgttcgtatgtcagat

SEQ ID NO: 31343 - DNA, 25 bp, Saccharomyces pastorianus
tataagtctcttagaccttccccaa

SEQ ID NO: 31344 - DNA, 25 bp, Saccharomyces pastorianus
ggcagaagcactttaccttccagag

SEQ ID NO: 31345 - DNA, 25 bp, Saccharomyces pastorianus
aaatttgtaacgcagctttggcaga

SEQ ID NO: 31346 - DNA, 25 bp, Saccharomyces pastorianus
cgcacagccaatcatcatctatatc

SEQ ID NO: 31347 - DNA, 25 bp, Saccharomyces pastorianus
gagtgttacctatagactcgccgtc

SEQ ID NO: 31348 - DNA, 25 bp, Saccharomyces pastorianus
ttggacgttgtctggtatttgcaaa

SEQ ID NO: 31349 - DNA, 25 bp, Saccharomyces pastorianus
acaccttacaaatcgtttctactga

SEQ ID NO: 31350 - DNA, 25 bp, Saccharomyces pastorianus
attcaaagaaacacgccactatccc

SEQ ID NO: 31351 - DNA, 25 bp, Saccharomyces pastorianus
taaagaactagtcatccccttagaa

SEQ ID NO: 31352 - DNA, 25 bp, Saccharomyces pastorianus
ttgccttgggattgggtcttaacac

SEQ ID NO: 31353 - DNA, 25 bp, Saccharomyces pastorianus
ggttgcccaaaacgcatgttgcctt

SEQ ID NO: 31354 - DNA, 25 bp, Saccharomyces pastorianus
gaaagcaacctagccctgttaccaa

SEQ ID NO: 31355 - DNA, 25 bp, Saccharomyces pastorianus
atcaacttacgtcagcagggaacca

SEQ ID NO: 31356 - DNA, 25 bp, Saccharomyces pastorianus
gaagaacgtcatcatctgggagagt

SEQ ID NO: 31357 - DNA, 25 bp, Saccharomyces pastorianus
acgccatggtttctttagcttctga

SEQ ID NO: 31358 - DNA, 25 bp, Saccharomyces pastorianus
tgatcctgaatacgccatggtttct

SEQ ID NO: 31359 - DNA, 25 bp, Saccharomyces pastorianus
ttggaatccgttcaagagttccttg

SEQ ID NO: 31360 - DNA, 25 bp, Saccharomyces pastorianus
gctgggttagcttatggcgccaata

SEQ ID NO: 31361 - DNA, 25 bp, Saccharomyces pastorianus
ttgtccaagattatgcttccggcgc

SEQ ID NO: 31362 - DNA, 25 bp, Saccharomyces pastorianus
tgaacagctgattcaaggagccatt

SEQ ID NO: 31363 - DNA, 25 bp, Saccharomyces pastorianus
acttacagtgcgttgaaggtccatt

SEQ ID NO: 31364 - DNA, 25 bp, Saccharomyces pastorianus
tgcttccggcgccttggaatttgat

SEQ ID NO: 31365 - DNA, 25 bp, Saccharomyces pastorianus
ttgcatttgtaagctgtcatccagg

SEQ ID NO: 31366 - DNA, 25 bp, Saccharomyces pastorianus
gattcaacatctatcgtggtgctga

SEQ ID NO: 31367 - DNA, 25 bp, Saccharomyces pastorianus
gtttgaccccaaaaagagtgttgca

SEQ ID NO: 31368 - DNA, 25 bp, Saccharomyces pastorianus
gagtttcccatagtgtttctgacga

SEQ ID NO: 31369 - DNA, 25 bp, Saccharomyces pastorianus
ggacacgaattctctttacgtcggt

SEQ ID NO: 31370 - DNA, 25 bp, Saccharomyces pastorianus
accccactttactctagatctataa

SEQ ID NO: 31371 - DNA, 25 bp, Saccharomyces pastorianus
gagcgactaccaatcatcactagag

SEQ ID NO: 31372 - DNA, 25 bp, Saccharomyces pastorianus
tcaggaacttccttcgtcaaatggt

SEQ ID NO: 31373 - DNA, 25 bp, Saccharomyces pastorianus
gtgtcacaatccaacaaaccttcag

SEQ ID NO: 31374 - DNA, 25 bp, Saccharomyces pastorianus
acagatctctgcatggcgttacgat

SEQ ID NO: 31375 - DNA, 25 bp, Saccharomyces pastorianus
aatggttttccatcaggccaaacag

SEQ ID NO: 31376 - DNA, 25 bp, Saccharomyces pastorianus
ctacttccaatctgtgagcgactac

SEQ ID NO: 31377 - DNA, 25 bp, Saccharomyces pastorianus
aaaactgtctacgattcattccgcc

SEQ ID NO: 31378 - DNA, 25 bp, Saccharomyces pastorianus
ttacgatggcgcatgactacaacat

SEQ ID NO: 31379 - DNA, 25 bp, Saccharomyces pastorianus
gaacaattccctgtcgaatcacgta

SEQ ID NO: 31380 - DNA, 25 bp, Saccharomyces pastorianus
ggttcttactaccaagcgaaactat

SEQ ID NO: 31381 - DNA, 25 bp, Saccharomyces pastorianus
gcaggcaaaacgaaccgaaacccag

SEQ ID NO: 31382 - DNA, 25 bp, Saccharomyces pastorianus
ctgttaatcgaatgccacggctcat

SEQ ID NO: 31383 - DNA, 25 bp, Saccharomyces pastorianus
acggctcatactccttacttttagt

SEQ ID NO: 31384 - DNA, 25 bp, Saccharomyces pastorianus
aactgagttgaacacctccacaaag

SEQ ID NO: 31385 - DNA, 25 bp, Saccharomyces pastorianus
aaaactctaccacgccgtacaagca

SEQ ID NO: 31386 - DNA, 25 bp, Saccharomyces pastorianus
ttgctgaacatgaacaattccctgt

SEQ ID NO: 31387 - DNA, 25 bp, Saccharomyces pastorianus
catcttaacatcttaccggttctta

SEQ ID NO: 31388 - DNA, 25 bp, Saccharomyces pastorianus
agtctcctgccgagttctcaaaaag

SEQ ID NO: 31389 - DNA, 25 bp, Saccharomyces pastorianus
tgtcgaatcacgtatgctcctccga

SEQ ID NO: 31390 - DNA, 25 bp, Saccharomyces pastorianus
atttggattagcttgggccattgcc

SEQ ID NO: 31391 - DNA, 25 bp, Saccharomyces pastorianus
gatgttttgcattgtttgcgaccca

SEQ ID NO: 31392 - DNA, 25 bp, Saccharomyces pastorianus
gaactgggacgtggtacaagtacct

SEQ ID NO: 31393 - DNA, 25 bp, Saccharomyces pastorianus
gtaacatacgcttgaagaccctact

SEQ ID NO: 31394 - DNA, 25 bp, Saccharomyces pastorianus
gtgctatagccagtgaaccggaata

SEQ ID NO: 31395 - DNA, 25 bp, Saccharomyces pastorianus
aagtacctacgatggatttggatta

SEQ ID NO: 31396 - DNA, 25 bp, Saccharomyces pastorianus
atgcgagccaaaattccttgattat

SEQ ID NO: 31397 - DNA, 25 bp, Saccharomyces pastorianus
gagctctctgaaaaattgcctaatg

SEQ ID NO: 31398 - DNA, 25 bp, Saccharomyces pastorianus
gttggatgatccaggcaaaatctct

SEQ ID NO: 31399 - DNA, 25 bp, Saccharomyces pastorianus
ggccattgccgaacatatcgcaggt

SEQ ID NO: 31400 - DNA, 25 bp, Saccharomyces pastorianus
gtttgcgacccattttcatgaatta

SEQ ID NO: 31401 - DNA, 25 bp, Saccharomyces pastorianus
attgcagatttatcgcctcttatga

SEQ ID NO: 31402 - DNA, 25 bp, Saccharomyces pastorianus
atgagattggcgtctccatagccga

SEQ ID NO: 31403 - DNA, 25 bp, Saccharomyces pastorianus
gaaatcacattctccaatctcacat

SEQ ID NO: 31404 - DNA, 25 bp, Saccharomyces pastorianus
caatccatagctccgatgtatctga

SEQ ID NO: 31405 - DNA, 25 bp, Saccharomyces pastorianus
aggattagcggatgactcttccctc

SEQ ID NO: 31406 - DNA, 25 bp, Saccharomyces pastorianus
tccatagccgagtttgatcccaaac

SEQ ID NO: 31407 - DNA, 25 bp, Saccharomyces pastorianus
ggaccaagcctctggtaacgatgat

SEQ ID NO: 31408 - DNA, 25 bp, Saccharomyces pastorianus
atatgttctgcagcgctatcatgag

SEQ ID NO: 31409 - DNA, 25 bp, Saccharomyces pastorianus
gatccgactcaaacagtcctgttta

SEQ ID NO: 31410 - DNA, 25 bp, Saccharomyces pastorianus
gggatacattttctacagacgcaga

SEQ ID NO: 31411 - DNA, 25 bp, Saccharomyces pastorianus
gtatggatccttgcattctttacaa

SEQ ID NO: 31412 - DNA, 25 bp, Saccharomyces pastorianus
aatactattcggcaaccctatctga

SEQ ID NO: 31413 - DNA, 25 bp, Saccharomyces pastorianus
gatgacccaggcgaagacaccaaag

SEQ ID NO: 31414 - DNA, 25 bp, Saccharomyces pastorianus
ttgggccaacattatgcactgactt

SEQ ID NO: 31415 - DNA, 25 bp, Saccharomyces pastorianus
gaagtggttccacgatcccaaatgg

SEQ ID NO: 31416 - DNA, 25 bp, Saccharomyces pastorianus
aagctaaaaaccatccgcctgcaat

SEQ ID NO: 31417 - DNA, 25 bp, Saccharomyces pastorianus
tacgttctcaacagtcactatgcaa

SEQ ID NO: 31418 - DNA, 25 bp, Saccharomyces pastorianus
cttgcctggattccctatcattgaa

SEQ ID NO: 31419 - DNA, 25 bp, Saccharomyces pastorianus
taaaccttcctcagattgaccagtc

SEQ ID NO: 31420 - DNA, 25 bp, Saccharomyces pastorianus
aattgaacctcttgtcacacacaga

SEQ ID NO: 31421 - DNA, 25 bp, Saccharomyces pastorianus
attgcggcgatgaattacgttctca

SEQ ID NO: 31422 - DNA, 25 bp, Saccharomyces pastorianus
actggatccatctagggttgttcga

SEQ ID NO: 31423 - DNA, 25 bp, Saccharomyces pastorianus
atgacatgacgctaagcaccgttag

SEQ ID NO: 31424 - DNA, 25 bp, Saccharomyces pastorianus
tatacgttgctgataggttcgagac

SEQ ID NO: 31425 - DNA, 25 bp, Saccharomyces pastorianus
aaaagtacatagttcgccattggta

SEQ ID NO: 31426 - DNA, 25 bp, Saccharomyces pastorianus
ggttcgagacgaagacccctgaaat

SEQ ID NO: 31427 - DNA, 25 bp, Saccharomyces pastorianus
actggttgcgcctgggatgatcaga

SEQ ID NO: 31428 - DNA, 25 bp, Saccharomyces pastorianus
atggtctgccgttggtgcaagcgaa

SEQ ID NO: 31429 - DNA, 25 bp, Saccharomyces pastorianus
gttagatctattatgcaagggccaa

SEQ ID NO: 31430 - DNA, 25 bp, Saccharomyces pastorianus
tttctccttcaacacagcaacaatt

SEQ ID NO: 31431 - DNA, 25 bp, Saccharomyces pastorianus
ttaccttactggttcgcgaaggctt

SEQ ID NO: 31432 - DNA, 25 bp, Saccharomyces pastorianus
gagcaagaactaaatcccacggatt

SEQ ID NO: 31433 - DNA, 25 bp, Saccharomyces pastorianus
agaatcttccaccaatgacagcagc

SEQ ID NO: 31434 - DNA, 25 bp, Saccharomyces pastorianus
gacccattaggtgtttccaagcaac

SEQ ID NO: 31435 - DNA, 25 bp, Saccharomyces pastorianus
aggatcctattgtgtggtgttgcaa

SEQ ID NO: 31436 - DNA, 25 bp, Saccharomyces pastorianus
ggctctaagaaacaaccgtccatat

SEQ ID NO: 31437 - DNA, 25 bp, Saccharomyces pastorianus
aagtcgtatccgtttgacgaggtca

SEQ ID NO: 31438 - DNA, 25 bp, Saccharomyces pastorianus
cgcatacaccgatccttgtgttaga

SEQ ID NO: 31439 - DNA, 25 bp, Saccharomyces pastorianus
gggctgtgccagtcaatgcagatgc

SEQ ID NO: 31440 - DNA, 25 bp, Saccharomyces pastorianus
atgagtcgacttttgttccagaaga

SEQ ID NO: 31441 - DNA, 25 bp, Saccharomyces pastorianus
agtcaaacactatttcttcttccac

SEQ ID NO: 31442 - DNA, 25 bp, Saccharomyces pastorianus
gaacgagactcccacatgttttcaa

SEQ ID NO: 31443 - DNA, 25 bp, Saccharomyces pastorianus
gcgggtgttatttacggcaacgcag

SEQ ID NO: 31444 - DNA, 25 bp, Saccharomyces pastorianus
aggcattcccaccagatgtcttgga

SEQ ID NO: 31445 - DNA, 25 bp, Saccharomyces pastorianus
ggagcactcttctgttgaggatgca

SEQ ID NO: 31446 - DNA, 25 bp, Saccharomyces pastorianus
acacctcccattcagacaagtctat

SEQ ID NO: 31447 - DNA, 25 bp, Saccharomyces pastorianus
ggatgcaagggccaccatgctatta

SEQ ID NO: 31448 - DNA, 25 bp, Saccharomyces pastorianus
atcctagtaggacacgctttgaagc

SEQ ID NO: 31449 - DNA, 25 bp, Saccharomyces pastorianus
tatttgaattcaacccttccaagga

SEQ ID NO: 31450 - DNA, 25 bp, Saccharomyces pastorianus
agcactcgtgctggtaacaacaaga

SEQ ID NO: 31451 - DNA, 25 bp, Saccharomyces pastorianus
ttcggacatgttgttctcgatgagt

SEQ ID NO: 31452 - DNA, 25 bp, Saccharomyces pastorianus
gaagctttgatgctatcccatccaa

SEQ ID NO: 31453 - DNA, 25 bp, Saccharomyces pastorianus
gcaagaccccaagcctgaaaaaatt

SEQ ID NO: 31454 - DNA, 25 bp, Saccharomyces pastorianus
tggtgtctcagaaagcactcgtgct

SEQ ID NO: 31455 - DNA, 25 bp, Saccharomyces pastorianus
ggcccgaaggtgaagaatctgcttt

SEQ ID NO: 31456 - DNA, 25 bp, Saccharomyces pastorianus
aaggctatccctccacatcaattag

SEQ ID NO: 31457 - DNA, 25 bp, Saccharomyces pastorianus
aggcctgctaagtttattggttgtc

SEQ ID NO: 31458 - DNA, 25 bp, Saccharomyces pastorianus
cctgctaagtttattggttgtccca

SEQ ID NO: 31459 - DNA, 25 bp, Saccharomyces pastorianus
atgggtgctgcttatcatgtcatgg

SEQ ID NO: 31460 - DNA, 25 bp, Saccharomyces pastorianus
gggtgctgcttatcatgtcatggga

SEQ ID NO: 31461 - DNA, 25 bp, Saccharomyces pastorianus
tgtcatgggaaaggctatccctcca

SEQ ID NO: 31462 - DNA, 25 bp, Saccharomyces pastorianus
gttgtcccaaatcctttcaaaagtg

SEQ ID NO: 31463 - DNA, 25 bp, Saccharomyces pastorianus
tccctccacatcaattagccattgg

SEQ ID NO: 31464 - DNA, 25 bp, Saccharomyces pastorianus
aacagtcgacattaaaactggcaac

SEQ ID NO: 31465 - DNA, 25 bp, Saccharomyces pastorianus
gccattggaacattaggcctgctaa

SEQ ID NO: 31466 - DNA, 25 bp, Saccharomyces pastorianus
gtgcaaaaccgaaaacagtcgacat

SEQ ID NO: 31467 - DNA, 25 bp, Saccharomyces pastorianus
gtgtgccaccaactgccagaaagtg

SEQ ID NO: 31468 - DNA, 25 bp, Saccharomyces pastorianus
tttgatcaccgtttcgaatcttctc

SEQ ID NO: 31469 - DNA, 25 bp, Saccharomyces pastorianus
cggtcccaccattaaattctacatt

SEQ ID NO: 31470 - DNA, 25 bp, Saccharomyces pastorianus
aagagagaacgtccttgcagcagat

SEQ ID NO: 31471 - DNA, 25 bp, Saccharomyces pastorianus
acaacgttctattcttcgaggctag

SEQ ID NO: 31472 - DNA, 25 bp, Saccharomyces pastorianus
aatgcataactttggtgtgccacca

SEQ ID NO: 31473 - DNA, 25 bp, Saccharomyces pastorianus
gaatcttctccacactatcaattga

SEQ ID NO: 31474 - DNA, 25 bp, Saccharomyces pastorianus
atacgtctcaccaaacttcgttaga

SEQ ID NO: 31475 - DNA, 25 bp, Saccharomyces pastorianus
cgtaatgtctttcagtatcgtggat

SEQ ID NO: 31476 - DNA, 25 bp, Saccharomyces pastorianus
gttctcgcccagtattatcttttga

SEQ ID NO: 31477 - DNA, 25 bp, Saccharomyces pastorianus
cagaaagtgcaagcccttcatcgac

SEQ ID NO: 31478 - DNA, 25 bp, Saccharomyces pastorianus
agagctgcatactttgatttcgaag

SEQ ID NO: 31479 - DNA, 25 bp, Saccharomyces pastorianus
gaagtcgaatcggtatcattccaaa

SEQ ID NO: 31480 - DNA, 25 bp, Saccharomyces pastorianus
gaaaaccttaatgagctgttggcta

SEQ ID NO: 31481 - DNA, 25 bp, Saccharomyces pastorianus
gaagctctgccaagcggtgagaaaa

SEQ ID NO: 31482 - DNA, 25 bp, Saccharomyces pastorianus
gaagattcctctaaatgcaaaacaa

SEQ ID NO: 31483 - DNA, 25 bp, Saccharomyces pastorianus
ggatgctgtgatactctttttaagg

SEQ ID NO: 31484 - DNA, 25 bp, Saccharomyces pastorianus
tagagatttgtccatactagataaa

SEQ ID NO: 31485 - DNA, 25 bp, Saccharomyces pastorianus
gaacttatcatcgaagctctgccaa

SEQ ID NO: 31486 - DNA, 25 bp, Saccharomyces pastorianus
gcaataagcctagcattcgaagaac

SEQ ID NO: 31487 - DNA, 25 bp, Saccharomyces pastorianus
gatatctcatatttacctcaccaaa

SEQ ID NO: 31488 - DNA, 25 bp, Saccharomyces pastorianus
agctgttggctaataatttcaccga

SEQ ID NO: 31489 - DNA, 25 bp, Saccharomyces pastorianus
ctaccactatccttattagcttcgg

SEQ ID NO: 31490 - DNA, 25 bp, Saccharomyces pastorianus
cacttgcggtgaagctttgggtata

SEQ ID NO: 31491 - DNA, 25 bp, Saccharomyces pastorianus
tacttgtgaatttggtaccgggcat

SEQ ID NO: 31492 - DNA, 25 bp, Saccharomyces pastorianus
ttcttttgttgttaccacttgcggt

SEQ ID NO: 31493 - DNA, 25 bp, Saccharomyces pastorianus
tataccgtcttattgcgtttttcat

SEQ ID NO: 31494 - DNA, 25 bp, Saccharomyces pastorianus
ccgggcatgatgtattggtttctta

SEQ ID NO: 31495 - DNA, 25 bp, Saccharomyces pastorianus
cagtgctagcatgtggattaccaag

SEQ ID NO: 31496 - DNA, 25 bp, Saccharomyces pastorianus
ttagcttcggttttatatgcagtgt

SEQ ID NO: 31497 - DNA, 25 bp, Saccharomyces pastorianus
aaaccctgtaggatatacctctatg

SEQ ID NO: 31498 - DNA, 25 bp, Saccharomyces pastorianus
gaggaacttgaagctaacttgcgaa

SEQ ID NO: 31499 - DNA, 25 bp, Saccharomyces pastorianus
ataaactatgcatttccgaggaact

SEQ ID NO: 31500 - DNA, 25 bp, Saccharomyces pastorianus
taagactactgggtcctcgtggagg

SEQ ID NO: 31501 - DNA, 25 bp, Saccharomyces pastorianus
aacacaaatggcactggtcctgtaa

SEQ ID NO: 31502 - DNA, 25 bp, Saccharomyces pastorianus
ttgcccatcgtattgagcctagtgc

SEQ ID NO: 31503 - DNA, 25 bp, Saccharomyces pastorianus
gacttgtccttttgctactactgaa

SEQ ID NO: 31504 - DNA, 25 bp, Saccharomyces pastorianus
cacggatacttccaacgctggtgat

SEQ ID NO: 31505 - DNA, 25 bp, Saccharomyces pastorianus
atggctgccaatgcggctacgagta

SEQ ID NO: 31506 - DNA, 25 bp, Saccharomyces pastorianus
gatgctgccattgccatcgcaggaa

SEQ ID NO: 31507 - DNA, 25 bp, Saccharomyces pastorianus
ggtcctgtaagtatgccactacgtg

SEQ ID NO: 31508 - DNA, 25 bp, Saccharomyces pastorianus
ggattgcttccaggactagaccatt

SEQ ID NO: 31509 - DNA, 25 bp, Saccharomyces pastorianus
gccactacgtggttcaagcgcaact

SEQ ID NO: 31510 - DNA, 25 bp, Saccharomyces pastorianus
gagtaccgtttgtatcccactggat

SEQ ID NO: 31511 - DNA, 25 bp, Saccharomyces pastorianus
gagtattctttgttatctggtcata

SEQ ID NO: 31512 - DNA, 25 bp, Saccharomyces pastorianus
gatttccaatacagacaccaaagag

SEQ ID NO: 31513 - DNA, 25 bp, Saccharomyces pastorianus
agaccttgaacgatttgactgtgca

SEQ ID NO: 31514 - DNA, 25 bp, Saccharomyces pastorianus
agcgagctttatgacgtgctgagaa

SEQ ID NO: 31515 - DNA, 25 bp, Saccharomyces pastorianus
agagcttgcaggacacagtggcgac

SEQ ID NO: 31516 - DNA, 25 bp, Saccharomyces pastorianus
caagagcaactggatttacaactaa

SEQ ID NO: 31517 - DNA, 25 bp, Saccharomyces pastorianus
gaacgtgttggagactgggatctta

SEQ ID NO: 31518 - DNA, 25 bp, Saccharomyces pastorianus
tcgcgattgaacgattccaagttaa

SEQ ID NO: 31519 - DNA, 25 bp, Saccharomyces pastorianus
ggacacagtggcgacgttcgaaacc

SEQ ID NO: 31520 - DNA, 25 bp, Saccharomyces pastorianus
ttcgaaaccataatcagcgagcttt

SEQ ID NO: 31521 - DNA, 25 bp, Saccharomyces pastorianus
aggatactgaagacgaatcgcgatt

SEQ ID NO: 31522 - DNA, 25 bp, Saccharomyces pastorianus
ggaaactccggcagcaacgatacgc

SEQ ID NO: 31523 - DNA, 25 bp, Saccharomyces pastorianus
ttactaagcatcataccgagggact

SEQ ID NO: 31524 - DNA, 25 bp, Saccharomyces pastorianus
agatcctcacacagacggtggagta

SEQ ID NO: 31525 - DNA, 25 bp, Saccharomyces pastorianus
atgaaggtttcgcagctggccaagc

SEQ ID NO: 31526 - DNA, 25 bp, Saccharomyces pastorianus
gggctcttggactatccagtaagac

SEQ ID NO: 31527 - DNA, 25 bp, Saccharomyces pastorianus
tggagtacatctcgcacctgcagag

SEQ ID NO: 31528 - DNA, 25 bp, Saccharomyces pastorianus
gatcaacgaccgcatccaagagtta

SEQ ID NO: 31529 - DNA, 25 bp, Saccharomyces pastorianus
ggatcgtgcggtgccaatttcaaga

SEQ ID NO: 31530 - DNA, 25 bp, Saccharomyces pastorianus
gagggacttcttcagggactactac

SEQ ID NO: 31531 - DNA, 25 bp, Saccharomyces pastorianus
ttcgaacgacgactcagcaaagccc

SEQ ID NO: 31532 - DNA, 25 bp, Saccharomyces pastorianus
atcgtcaacgacattaacctggaga

SEQ ID NO: 31533 - DNA, 25 bp, Saccharomyces pastorianus
tgcgacaacattgaggcgcctattg

SEQ ID NO: 31534 - DNA, 25 bp, Saccharomyces pastorianus
agaatcccatcatggtgcgaccgaa

SEQ ID NO: 31535 - DNA, 25 bp, Saccharomyces pastorianus
aaacgtatgcgacacctaggttaga

SEQ ID NO: 31536 - DNA, 25 bp, Saccharomyces pastorianus
ttctgtaccaagatccaatgctctg

SEQ ID NO: 31537 - DNA, 25 bp, Saccharomyces pastorianus
gataaagttcccaccgactttcaag

SEQ ID NO: 31538 - DNA, 25 bp, Saccharomyces pastorianus
atcagcctgtcaatcttacggtgaa

SEQ ID NO: 31539 - DNA, 25 bp, Saccharomyces pastorianus
gtgcgattccgcaattgttaagagt

SEQ ID NO: 31540 - DNA, 25 bp, Saccharomyces pastorianus
aagagtgaccacttcttcttcttag

SEQ ID NO: 31541 - DNA, 25 bp, Saccharomyces pastorianus
actgattactcttctgcgacaacat

SEQ ID NO: 31542 - DNA, 25 bp, Saccharomyces pastorianus
gatattcagcgatcatcagcctgtc

SEQ ID NO: 31543 - DNA, 25 bp, Saccharomyces pastorianus
agaaccttcattgttacccatcgaa

SEQ ID NO: 31544 - DNA, 25 bp, Saccharomyces pastorianus
agtactgtttattagccttgggctt

SEQ ID NO: 31545 - DNA, 25 bp, Saccharomyces pastorianus
aaatctgggaccatgctgcaggcaa

SEQ ID NO: 31546 - DNA, 25 bp, Saccharomyces pastorianus
agaggtttaggtgccttctactctc

SEQ ID NO: 31547 - DNA, 25 bp, Saccharomyces pastorianus
gagtcatttggttacatcttccgtg

SEQ ID NO: 31548 - DNA, 25 bp, Saccharomyces pastorianus
acggtgttgttcagcttggttgtat

SEQ ID NO: 31549 - DNA, 25 bp, Saccharomyces pastorianus
ttcccctggacttcggtaatggtag

SEQ ID NO: 31550 - DNA, 25 bp, Saccharomyces pastorianus
gttgcacgacttggttgtatctaca

SEQ ID NO: 31551 - DNA, 25 bp, Saccharomyces pastorianus
ttgggcttggctgacgtatacttgc

SEQ ID NO: 31552 - DNA, 25 bp, Saccharomyces pastorianus
gtttgcccatcaagctttcttatca

SEQ ID NO: 31553 - DNA, 25 bp, Saccharomyces pastorianus
ggattcgcaagccaagtactgttta

SEQ ID NO: 31554 - DNA, 25 bp, Saccharomyces pastorianus
aaacatttcccagtctttgcatttg

SEQ ID NO: 31555 - DNA, 25 bp, Saccharomyces pastorianus
gagcctgcaacaatggacgagacct

SEQ ID NO: 31556 - DNA, 25 bp, Saccharomyces pastorianus
gagtgcggttactgtatctacaagt

SEQ ID NO: 31557 - DNA, 25 bp, Saccharomyces pastorianus
taaccttgaaatcactattcccggg

SEQ ID NO: 31558 - DNA, 25 bp, Saccharomyces pastorianus
gattacacccattgtagcgcattct

SEQ ID NO: 31559 - DNA, 25 bp, Saccharomyces pastorianus
tgccaccaagcaccgtagattgtaa

SEQ ID NO: 31560 - DNA, 25 bp, Saccharomyces pastorianus
acgctattttactatctcttccaga

SEQ ID NO: 31561 - DNA, 25 bp, Saccharomyces pastorianus
ggaaactctccgctaaggatgtgat

SEQ ID NO: 31562 - DNA, 25 bp, Saccharomyces pastorianus
aattgttttcctaaggctgctgcag

SEQ ID NO: 31563 - DNA, 25 bp, Saccharomyces pastorianus
aattcagggctggtcgtacgctatt

SEQ ID NO: 31564 - DNA, 25 bp, Saccharomyces pastorianus
tgatattacatatccctgtgccacc

SEQ ID NO: 31565 - DNA, 25 bp, Saccharomyces pastorianus
gacgagacctccaatgtctttggat

SEQ ID NO: 31566 - DNA, 25 bp, Saccharomyces pastorianus
acctgccgttcaaggttacacctat

SEQ ID NO: 31567 - DNA, 25 bp, Saccharomyces pastorianus
gtttcacgaatgtgtctcacttgac

SEQ ID NO: 31568 - DNA, 25 bp, Saccharomyces pastorianus
taattctggcttagtcgtacgatac

SEQ ID NO: 31569 - DNA, 25 bp, Saccharomyces pastorianus
gtggtactacatatacccgttccac

SEQ ID NO: 31570 - DNA, 25 bp, Saccharomyces pastorianus
tcatatcattgaattcgtcccacca

SEQ ID NO: 31571 - DNA, 25 bp, Saccharomyces pastorianus
aagctgctgccggtagtgttttgtt

SEQ ID NO: 31572 - DNA, 25 bp, Saccharomyces pastorianus
aagaacttcattcccaaagctgctg

SEQ ID NO: 31573 - DNA, 25 bp, Saccharomyces pastorianus
gtacgatactttaccatttctggaa

SEQ ID NO: 31574 - DNA, 25 bp, Saccharomyces pastorianus
aagacctccaatatccctggaattc

SEQ ID NO: 31575 - DNA, 25 bp, Saccharomyces pastorianus
gtctctaatggccactgtaagtttg

SEQ ID NO: 31576 - DNA, 25 bp, Saccharomyces pastorianus
aagtgcagttactgtgtccacaagt

SEQ ID NO: 31577 - DNA, 25 bp, Saccharomyces pastorianus
gttaccagtatctccaaggccatta

SEQ ID NO: 31578 - DNA, 25 bp, Saccharomyces pastorianus
agatgcgacgttaacctctggtggt

SEQ ID NO: 31579 - DNA, 25 bp, Saccharomyces pastorianus
ttgtccttcgccctaattcataaag

SEQ ID NO: 31580 - DNA, 25 bp, Saccharomyces pastorianus
tctcagttattgaagggccctccag

SEQ ID NO: 31581 - DNA, 25 bp, Saccharomyces pastorianus
gttcgttcaaactaccatgcttgtt

SEQ ID NO: 31582 - DNA, 25 bp, Saccharomyces pastorianus
acggctattgcagacgccttggaat

SEQ ID NO: 31583 - DNA, 25 bp, Saccharomyces pastorianus
gtcgacgacttggtggatacttcat

SEQ ID NO: 31584 - DNA, 25 bp, Saccharomyces pastorianus
gtcgcaatcttctaattcgtccaag

SEQ ID NO: 31585 - DNA, 25 bp, Saccharomyces pastorianus
tgatgtctcctgcataatcggtgaa

SEQ ID NO: 31586 - DNA, 25 bp, Saccharomyces pastorianus
gatcatttctaacacggttcctcaa

SEQ ID NO: 31587 - DNA, 25 bp, Saccharomyces pastorianus
tgttttttccggtgatgcgctagaa

SEQ ID NO: 31588 - DNA, 25 bp, Saccharomyces pastorianus
gaattcgggtgcagaccatctcaac

SEQ ID NO: 31589 - DNA, 25 bp, Saccharomyces pastorianus
gataagtcactctccaccgaagaaa

SEQ ID NO: 31590 - DNA, 25 bp, Saccharomyces pastorianus
gtcccgatagcataacaattccgaa

SEQ ID NO: 31591 - DNA, 25 bp, Saccharomyces pastorianus
taacgatctcgtcctcttaccaaaa

SEQ ID NO: 31592 - DNA, 25 bp, Saccharomyces pastorianus
aagctatcctccatactcaaaagtc

SEQ ID NO: 31593 - DNA, 25 bp, Saccharomyces pastorianus
agccttccaatgttccgaccattat

SEQ ID NO: 31594 - DNA, 25 bp, Saccharomyces pastorianus
gaagacaatcattggtcccgctaag

SEQ ID NO: 31595 - DNA, 25 bp, Saccharomyces pastorianus
aagtcaggcgaaccaaccagagtca

SEQ ID NO: 31596 - DNA, 25 bp, Saccharomyces pastorianus
tatcaataaatccttcgtcaccatc

SEQ ID NO: 31597 - DNA, 25 bp, Saccharomyces pastorianus
caacgaccgttccaattacgtgagt

SEQ ID NO: 31598 - DNA, 25 bp, Saccharomyces pastorianus
gaacatgccgaactatctcgtcaag

SEQ ID NO: 31599 - DNA, 25 bp, Saccharomyces pastorianus
gggtctgggcgagatcatcaagttc

SEQ ID NO: 31600 - DNA, 25 bp, Saccharomyces pastorianus
gagtccgctggtgtggctgatctaa

SEQ ID NO: 31601 - DNA, 25 bp, Saccharomyces pastorianus
ggagaatgttcttcccggaatccaa

SEQ ID NO: 31602 - DNA, 25 bp, Saccharomyces pastorianus
agttgacccaagaatacccactgtt

SEQ ID NO: 31603 - DNA, 25 bp, Saccharomyces pastorianus
gcaagtccgccctggaagcagaaaa

SEQ ID NO: 31604 - DNA, 25 bp, Saccharomyces pastorianus
ggtatctccattgcaggtgctttga

SEQ ID NO: 31605 - DNA, 25 bp, Saccharomyces pastorianus
aaggtcgctacgtacatggccaaga

SEQ ID NO: 31606 - DNA, 25 bp, Saccharomyces pastorianus
atcaccacatgttcaggcggcagaa

SEQ ID NO: 31607 - DNA, 25 bp, Saccharomyces pastorianus
aaggtcgagacctactaccaggagt

SEQ ID NO: 31608 - DNA, 25 bp, Saccharomyces pastorianus
atacccactgttcgaggcggtgtac

SEQ ID NO: 31609 - DNA, 25 bp, Saccharomyces pastorianus
gaaaaacgtcgtagcactggcctgc

SEQ ID NO: 31610 - DNA, 25 bp, Saccharomyces pastorianus
gaaacctctgtgaccaagcctttgg

SEQ ID NO: 31611 - DNA, 25 bp, Saccharomyces pastorianus
aattgaccgggttcttgcctactga

SEQ ID NO: 31612 - DNA, 25 bp, Saccharomyces pastorianus
gaggttgttacgaacaggccccatt

SEQ ID NO: 31613 - DNA, 25 bp, Saccharomyces pastorianus
tgatccaaccttcccaaaatagtgt

SEQ ID NO: 31614 - DNA, 25 bp, Saccharomyces pastorianus
ggtagcgtcagcatcttgggtagat

SEQ ID NO: 31615 - DNA, 25 bp, Saccharomyces pastorianus
aagcctttggacgtcttcttggcag

SEQ ID NO: 31616 - DNA, 25 bp, Saccharomyces pastorianus
aggccccattgaccgttttgagaag

SEQ ID NO: 31617 - DNA, 25 bp, Saccharomyces pastorianus
gatatacaacggttcctacttcacc

SEQ ID NO: 31618 - DNA, 25 bp, Saccharomyces pastorianus
ttcatcgccattcaagccatcagaa

SEQ ID NO: 31619 - DNA, 25 bp, Saccharomyces pastorianus
attgagagactccttcgttacacca

SEQ ID NO: 31620 - DNA, 25 bp, Saccharomyces pastorianus
gactatcgacttcgagcgtggtcta

SEQ ID NO: 31621 - DNA, 25 bp, Saccharomyces pastorianus
agtgtcgtgctgaagtaatcgccat

SEQ ID NO: 31622 - DNA, 25 bp, Saccharomyces pastorianus
gaatacgaagaaactccgcgaggca

SEQ ID NO: 31623 - DNA, 25 bp, Saccharomyces pastorianus
aaaactctcatcaagactgccgggc

SEQ ID NO: 31624 - DNA, 25 bp, Saccharomyces pastorianus
agactgccgggcttgagtgtgtaaa

SEQ ID NO: 31625 - DNA, 25 bp, Saccharomyces pastorianus
atgtttacaaatgctcaggtgacgt

SEQ ID NO: 31626 - DNA, 25 bp, Saccharomyces pastorianus
acaaatggcccgtgcaggtctattg

SEQ ID NO: 31627 - DNA, 25 bp, Saccharomyces pastorianus
gacaccagatttggcctctttgaga

SEQ ID NO: 31628 - DNA, 25 bp, Saccharomyces pastorianus
aaggactacttacaacgtttacatg

SEQ ID NO: 31629 - DNA, 25 bp, Saccharomyces pastorianus
attggcgctagaatattggaaccct

SEQ ID NO: 31630 - DNA, 25 bp, Saccharomyces pastorianus
ggatgacttcaccatcaagttggat

SEQ ID NO: 31631 - DNA, 25 bp, Saccharomyces pastorianus
ttagcgggtccctttgaagagtgtc

SEQ ID NO: 31632 - DNA, 25 bp, Saccharomyces pastorianus
taccctccagaggaccttgatattt

SEQ ID NO: 31633 - DNA, 25 bp, Saccharomyces pastorianus
gttgactacgctagagttcactgta

SEQ ID NO: 31634 - DNA, 25 bp, Saccharomyces pastorianus
gaaacttacagttctccatggtact

SEQ ID NO: 31635 - DNA, 25 bp, Saccharomyces pastorianus
gcctactctcgttacttcaatgatg

SEQ ID NO: 31636 - DNA, 25 bp, Saccharomyces pastorianus
gaactacttctaaatcacatcttgg

SEQ ID NO: 31637 - DNA, 25 bp, Saccharomyces pastorianus
ttggtgtcccagaccaagcatactt

SEQ ID NO: 31638 - DNA, 25 bp, Saccharomyces pastorianus
gaccagcattaaaggcctactctcg

SEQ ID NO: 31639 - DNA, 25 bp, Saccharomyces pastorianus
cgccttgactccttgtttaatgggt

SEQ ID NO: 31640 - DNA, 25 bp, Saccharomyces pastorianus
taaagtcactgcagctgagggttct

SEQ ID NO: 31641 - DNA, 25 bp, Saccharomyces pastorianus
gcaagagttagttgccgccttgact

SEQ ID NO: 31642 - DNA, 25 bp, Saccharomyces pastorianus
gctgagggttctgcttactacaagt

SEQ ID NO: 31643 - DNA, 25 bp, Saccharomyces pastorianus
gcgatgagcctatgcgggaacacat

SEQ ID NO: 31644 - DNA, 25 bp, Saccharomyces pastorianus
agagaactggtattgtccgcgctca

SEQ ID NO: 31645 - DNA, 25 bp, Saccharomyces pastorianus
atctacagatccctttgccaatgga

SEQ ID NO: 31646 - DNA, 25 bp, Saccharomyces pastorianus
gatgaacgcgacaccgaagaactgg

SEQ ID NO: 31647 - DNA, 25 bp, Saccharomyces pastorianus
aggccgctgggctaggtcacacaat

SEQ ID NO: 31648 - DNA, 25 bp, Saccharomyces pastorianus
gcgacagtcttgatgaaggccagaa

SEQ ID NO: 31649 - DNA, 25 bp, Saccharomyces pastorianus
tgaagatcgttccatttcttaccct

SEQ ID NO: 31650 - DNA, 25 bp, Saccharomyces pastorianus
gaagatgcccaagagcaagctcctg

SEQ ID NO: 31651 - DNA, 25 bp, Saccharomyces pastorianus
acacaatcgtagcatcgcggtggat

SEQ ID NO: 31652 - DNA, 25 bp, Saccharomyces pastorianus
aaagccgcagacatggattcgaatt

SEQ ID NO: 31653 - DNA, 25 bp, Saccharomyces pastorianus
gtccgcgctcaataacaggcaagtg

SEQ ID NO: 31654 - DNA, 25 bp, Saccharomyces pastorianus
gagtaacgctgctcctgctttgcac

SEQ ID NO: 31655 - DNA, 25 bp, Saccharomyces pastorianus
tagcgtaaatgctcaaaacgcatcc

SEQ ID NO: 31656 - DNA, 25 bp, Saccharomyces pastorianus
tgctttgcacgctcaaaatggtcaa

SEQ ID NO: 31657 - DNA, 25 bp, Saccharomyces pastorianus
aacaccacgagtaacgctgctcctg

SEQ ID NO: 31658 - DNA, 25 bp, Saccharomyces pastorianus
aatggtcaactactaaacgccggag

SEQ ID NO: 31659 - DNA, 25 bp, Saccharomyces pastorianus
tcctgctttgcacgctcaaaatggt

SEQ ID NO: 31660 - DNA, 25 bp, Saccharomyces pastorianus
tgcacgctcaaaatggtcaactact

SEQ ID NO: 31661 - DNA, 25 bp, Saccharomyces pastorianus
ggtcaactactaaacgccggagtcg

SEQ ID NO: 31662 - DNA, 25 bp, Saccharomyces pastorianus
tactaaacgccggagtcgtcggtgc

SEQ ID NO: 31663 - DNA, 25 bp, Saccharomyces pastorianus
gcatccaacaccacgagtaacgctg

SEQ ID NO: 31664 - DNA, 25 bp, Saccharomyces pastorianus
aaaacgcatccaacaccacgagtaa

SEQ ID NO: 31665 - DNA, 25 bp, Saccharomyces pastorianus
aggacgctattctcaactcgattga

SEQ ID NO: 31666 - DNA, 25 bp, Saccharomyces pastorianus
ttaccaaacctatctgcaaccttaa

SEQ ID NO: 31667 - DNA, 25 bp, Saccharomyces pastorianus
aagagcccttgctacacgatgatgc

SEQ ID NO: 31668 - DNA, 25 bp, Saccharomyces pastorianus
aaatacaccatttccaagagccctt

SEQ ID NO: 31669 - DNA, 25 bp, Saccharomyces pastorianus
atggcatcaccattctagttggctc

SEQ ID NO: 31670 - DNA, 25 bp, Saccharomyces pastorianus
ggcttgttgtttttgctatgcgtca

SEQ ID NO: 31671 - DNA, 25 bp, Saccharomyces pastorianus
aaacgggcttttgcttggaggcttg

SEQ ID NO: 31672 - DNA, 25 bp, Saccharomyces pastorianus
cataagaaactctccccgaatttgt

SEQ ID NO: 31673 - DNA, 25 bp, Saccharomyces pastorianus
atgaaacaattcctcgtaagcccca

SEQ ID NO: 31674 - DNA, 25 bp, Saccharomyces pastorianus
gcaatctttagacacgttccgacgg

SEQ ID NO: 31675 - DNA, 25 bp, Saccharomyces pastorianus
gtactgggccctttgtaagacatta

SEQ ID NO: 31676 - DNA, 25 bp, Saccharomyces pastorianus
atgcgttgatgtgcacgttcataga

SEQ ID NO: 31677 - DNA, 25 bp, Saccharomyces pastorianus
ttatgtctggcgaacgacgtttgta

SEQ ID NO: 31678 - DNA, 25 bp, Saccharomyces pastorianus
ggaactacaggcttggttacctcat

SEQ ID NO: 31679 - DNA, 25 bp, Saccharomyces pastorianus
attgggtggatcctatcaagtgcaa

SEQ ID NO: 31680 - DNA, 25 bp, Saccharomyces pastorianus
atcacggagtactgcttggacactt

SEQ ID NO: 31681 - DNA, 25 bp, Saccharomyces pastorianus
atcgtgtattcgcactggttggata

SEQ ID NO: 31682 - DNA, 25 bp, Saccharomyces pastorianus
ttttggctctgatataccgttcgat

SEQ ID NO: 31683 - DNA, 25 bp, Saccharomyces pastorianus
caagatgggctatttgacactgcaa

SEQ ID NO: 31684 - DNA, 25 bp, Saccharomyces pastorianus
ggttacctcattcgctatggtacga

SEQ ID NO: 31685 - DNA, 25 bp, Saccharomyces pastorianus
ggaattctatcattacctggcgttg

SEQ ID NO: 31686 - DNA, 25 bp, Saccharomyces pastorianus
gaaggtcttactctagatgggttac

SEQ ID NO: 31687 - DNA, 25 bp, Saccharomyces pastorianus
aacaacttcttccaggtgatgcaga

SEQ ID NO: 31688 - DNA, 25 bp, Saccharomyces pastorianus
ggtatcacgactcagacttcttatt

SEQ ID NO: 31689 - DNA, 25 bp, Saccharomyces pastorianus
gttgttaattttttgcagggccaga

SEQ ID NO: 31690 - DNA, 25 bp, Saccharomyces pastorianus
gcatcaagtcaattaggtctaccca

SEQ ID NO: 31691 - DNA, 25 bp, Saccharomyces pastorianus
gactatttcgtgcatacgtgctatt

SEQ ID NO: 31692 - DNA, 25 bp, Saccharomyces pastorianus
ggtatgcttattcgtgtccttgaaa

SEQ ID NO: 31693 - DNA, 25 bp, Saccharomyces pastorianus
gagaccgtatttggaccgttgtgtt

SEQ ID NO: 31694 - DNA, 25 bp, Saccharomyces pastorianus
aggtgactttaacagacggcgcttc

SEQ ID NO: 31695 - DNA, 25 bp, Saccharomyces pastorianus
agacggcgcttctaatgttattggc

SEQ ID NO: 31696 - DNA, 25 bp, Saccharomyces pastorianus
gaccgttgtgtttatgacgacatac

SEQ ID NO: 31697 - DNA, 25 bp, Saccharomyces pastorianus
tgacgacataccaagtgactatttc

SEQ ID NO: 31698 - DNA, 25 bp, Saccharomyces pastorianus
attgagagctgctaagttggctgct

SEQ ID NO: 31699 - DNA, 25 bp, Saccharomyces pastorianus
accccagttagaactcacatgagaa

SEQ ID NO: 31700 - DNA, 25 bp, Saccharomyces pastorianus
taagttggctgctccagaaagtgaa

SEQ ID NO: 31701 - DNA, 25 bp, Saccharomyces pastorianus
cagaaagtgaaaagccaaccccagt

SEQ ID NO: 31702 - DNA, 25 bp, Saccharomyces pastorianus
tcaagctgctaacgtcaagaagaga

SEQ ID NO: 31703 - DNA, 25 bp, Saccharomyces pastorianus
atgtctcaagctgctaacgtcaaga

SEQ ID NO: 31704 - DNA, 25 bp, Saccharomyces pastorianus
ctgctaagttggctgctccagaaag

SEQ ID NO: 31705 - DNA, 25 bp, Saccharomyces pastorianus
gctgctaacgtcaagaagagagttt

SEQ ID NO: 31706 - DNA, 25 bp, Saccharomyces pastorianus
gtctcaagctgctaacgtcaagaag

SEQ ID NO: 31707 - DNA, 25 bp, Saccharomyces pastorianus
cgtcaagaagagagttttcaagacc

SEQ ID NO: 31708 - DNA, 25 bp, Saccharomyces pastorianus
agccaaccccagttagaactcacat

SEQ ID NO: 31709 - DNA, 25 bp, Saccharomyces pastorianus
agctgctggcccagcctctgctggt

SEQ ID NO: 31710 - DNA, 25 bp, Saccharomyces pastorianus
agacgaaaaggtctcctccgtcttg

SEQ ID NO: 31711 - DNA, 25 bp, Saccharomyces pastorianus
gccaccaagatcaaggccgttttgg

SEQ ID NO: 31712 - DNA, 25 bp, Saccharomyces pastorianus
gatcaaggccgttttggaatccgtc

SEQ ID NO: 31713 - DNA, 25 bp, Saccharomyces pastorianus
gaaaaggtctcctccgtcttgtccg

SEQ ID NO: 31714 - DNA, 25 bp, Saccharomyces pastorianus
agcctctgctggtggcgctgctgct

SEQ ID NO: 31715 - DNA, 25 bp, Saccharomyces pastorianus
caccaagatcaaggccgttttggaa

SEQ ID NO: 31716 - DNA, 25 bp, Saccharomyces pastorianus
aggtctcctccgtcttgtccgcttt

SEQ ID NO: 31717 - DNA, 25 bp, Saccharomyces pastorianus
gaagacgaaaaggtctcctccgtct

SEQ ID NO: 31718 - DNA, 25 bp, Saccharomyces pastorianus
atcaaggccgttttggaatccgtcg

SEQ ID NO: 31719 - DNA, 25 bp, Saccharomyces pastorianus
gacgaaaaggtctcctccgtcttgt

SEQ ID NO: 31720 - DNA, 25 bp, Saccharomyces pastorianus
agctgctggcccagcctctgctggt

SEQ ID NO: 31721 - DNA, 25 bp, Saccharomyces pastorianus
gatcaaggccgttttggaatccgtc

SEQ ID NO: 31722 - DNA, 25 bp, Saccharomyces pastorianus
gccaccaagatcaaggccgttttgg

SEQ ID NO: 31723 - DNA, 25 bp, Saccharomyces pastorianus
gaaaaggtctcctccgtcttgtccg

SEQ ID NO: 31724 - DNA, 25 bp, Saccharomyces pastorianus
agcctctgctggtggcgctgctgct

SEQ ID NO: 31725 - DNA, 25 bp, Saccharomyces pastorianus
tacctattattgaacgctgctggca

SEQ ID NO: 31726 - DNA, 25 bp, Saccharomyces pastorianus
aggtctcctccgtcttgtccgcttt

SEQ ID NO: 31727 - DNA, 25 bp, Saccharomyces pastorianus
aaaagttggctgctgttccagctgc

SEQ ID NO: 31728 - DNA, 25 bp, Saccharomyces pastorianus
gaagacgaaaaggtctcctccgtct

SEQ ID NO: 31729 - DNA, 25 bp, Saccharomyces pastorianus
atcaaggccgttttggaatccgtcg

SEQ ID NO: 31730 - DNA, 25 bp, Saccharomyces pastorianus
gacgaaaaggtctcctccgtcttgt

SEQ ID NO: 31731 - DNA, 25 bp, Saccharomyces pastorianus
gtggaggcccagagtcatagactta

SEQ ID NO: 31732 - DNA, 25 bp, Saccharomyces pastorianus
gagtacgtcacccagatcgagcaag

SEQ ID NO: 31733 - DNA, 25 bp, Saccharomyces pastorianus
gaccagactcagaaatcgttgcctt

SEQ ID NO: 31734 - DNA, 25 bp, Saccharomyces pastorianus
tgtcgttttcgggtctaaatgcaga

SEQ ID NO: 31735 - DNA, 25 bp, Saccharomyces pastorianus
taatcgccggtttcgactcaagaga

SEQ ID NO: 31736 - DNA, 25 bp, Saccharomyces pastorianus
aagatcgactcgcatgtggttttgt

SEQ ID NO: 31737 - DNA, 25 bp, Saccharomyces pastorianus
gaagtcgtccagacaggtgccaaga

SEQ ID NO: 31738 - DNA, 25 bp, Saccharomyces pastorianus
agagtgtgtcaagcttaccgtaaga

SEQ ID NO: 31739 - DNA, 25 bp, Saccharomyces pastorianus
tatatactcctcgtggtctgcgcag

SEQ ID NO: 31740 - DNA, 25 bp, Saccharomyces pastorianus
agaccattcggtgtgtccacgctaa

SEQ ID NO: 31741 - DNA, 25 bp, Saccharomyces pastorianus
gcagcagagatacacgcagtccggt

SEQ ID NO: 31742 - DNA, 25 bp, Saccharomyces pastorianus
agcagatattattcccacactacac

SEQ ID NO: 31743 - DNA, 25 bp, Saccharomyces pastorianus
aaagaagttcgcgtcttgtgcgtgg

SEQ ID NO: 31744 - DNA, 25 bp, Saccharomyces pastorianus
ttgtcccctatatccactgtaagaa

SEQ ID NO: 31745 - DNA, 25 bp, Saccharomyces pastorianus
tctttacaaacgcagtccactatca

SEQ ID NO: 31746 - DNA, 25 bp, Saccharomyces pastorianus
tagtcccggtgttttctgtcacaga

SEQ ID NO: 31747 - DNA, 25 bp, Saccharomyces pastorianus
atcctacccaaggtcatcagcagat

SEQ ID NO: 31748 - DNA, 25 bp, Saccharomyces pastorianus
aggaggaaccacagcatcttctttg

SEQ ID NO: 31749 - DNA, 25 bp, Saccharomyces pastorianus
tggtcaaccgaacatcaacatccta

SEQ ID NO: 31750 - DNA, 25 bp, Saccharomyces pastorianus
tacgtggacatcttgagtcagcaac

SEQ ID NO: 31751 - DNA, 25 bp, Saccharomyces pastorianus
gaagtagtccgataacgccaagccc

SEQ ID NO: 31752 - DNA, 25 bp, Saccharomyces pastorianus
cacatcaaccgttcgtctttacaaa

SEQ ID NO: 31753 - DNA, 25 bp, Saccharomyces pastorianus
gaactcgtcgatgggatcatgcctt

SEQ ID NO: 31754 - DNA, 25 bp, Saccharomyces pastorianus
acggtgttacaaaattcctcagcaa

SEQ ID NO: 31755 - DNA, 25 bp, Saccharomyces pastorianus
aaacgatacgatttgctcttgcagg

SEQ ID NO: 31756 - DNA, 25 bp, Saccharomyces pastorianus
gatcatgccttcgttagagtccaaa

SEQ ID NO: 31757 - DNA, 25 bp, Saccharomyces pastorianus
gcacgagtgcttttcgatggattat

SEQ ID NO: 31758 - DNA, 25 bp, Saccharomyces pastorianus
gaatgaaactcaccatgttgttgaa

SEQ ID NO: 31759 - DNA, 25 bp, Saccharomyces pastorianus
taatgcatctacgttaaatcgcgag

SEQ ID NO: 31760 - DNA, 25 bp, Saccharomyces pastorianus
ggatcaacgacttttgtgacgagtt

SEQ ID NO: 31761 - DNA, 25 bp, Saccharomyces pastorianus
gtgaacacggcttctctaaaaacgt

SEQ ID NO: 31762 - DNA, 25 bp, Saccharomyces pastorianus
tgcaggatgccattccggcgccaaa

SEQ ID NO: 31763 - DNA, 25 bp, Saccharomyces pastorianus
atctatgatcgacacgatgtgccgt

SEQ ID NO: 31764 - DNA, 25 bp, Saccharomyces pastorianus
aaagtgcaaataccgagctccaaga

SEQ ID NO: 31765 - DNA, 25 bp, Saccharomyces pastorianus
cgggcttccttgatagtcagggcaa

SEQ ID NO: 31766 - DNA, 25 bp, Saccharomyces pastorianus
gaattggccgcgaagattgtacaac

SEQ ID NO: 31767 - DNA, 25 bp, Saccharomyces pastorianus
acaggattttgtagccacggtttat

SEQ ID NO: 31768 - DNA, 25 bp, Saccharomyces pastorianus
atacttcctaatgtgacctttccac

SEQ ID NO: 31769 - DNA, 25 bp, Saccharomyces pastorianus
gaaatattaccacagcgggacaatt

SEQ ID NO: 31770 - DNA, 25 bp, Saccharomyces pastorianus
gtgtacccctctttgacacaagaat

SEQ ID NO: 31771 - DNA, 25 bp, Saccharomyces pastorianus
tgcatataactatctctcgggcttc

SEQ ID NO: 31772 - DNA, 25 bp, Saccharomyces pastorianus
aacaattcattggttctgtcgagac

SEQ ID NO: 31773 - DNA, 25 bp, Saccharomyces pastorianus
tggttcgggagctaatgacatgtca

SEQ ID NO: 31774 - DNA, 25 bp, Saccharomyces pastorianus
ggacaattagcacaggtgtacccct

SEQ ID NO: 31775 - DNA, 25 bp, Saccharomyces pastorianus
gatttcctgaattggttagcacaac

SEQ ID NO: 31776 - DNA, 25 bp, Saccharomyces pastorianus
gagctacccataacgtcccgggatt

SEQ ID NO: 31777 - DNA, 25 bp, Saccharomyces pastorianus
ggcacttgctttttggaaatcctat

SEQ ID NO: 31778 - DNA, 25 bp, Saccharomyces pastorianus
gacgaagtcacgaatctagcattgt

SEQ ID NO: 31779 - DNA, 25 bp, Saccharomyces pastorianus
ggattttcccctatattctacaaca

SEQ ID NO: 31780 - DNA, 25 bp, Saccharomyces pastorianus
gagctgcacacgagaactttctttg

SEQ ID NO: 31781 - DNA, 25 bp, Saccharomyces pastorianus
acaaggacatagacgagctgcacac

SEQ ID NO: 31782 - DNA, 25 bp, Saccharomyces pastorianus
gacgttgaacaagactcattcgata

SEQ ID NO: 31783 - DNA, 25 bp, Saccharomyces pastorianus
aagccaaataatggccactttgtca

SEQ ID NO: 31784 - DNA, 25 bp, Saccharomyces pastorianus
atccattttaaacgagctacccata

SEQ ID NO: 31785 - DNA, 25 bp, Saccharomyces pastorianus
aaactcatcgacagcaggcacttgc

SEQ ID NO: 31786 - DNA, 25 bp, Saccharomyces pastorianus
aagacagtgacgatagctcctcttc

SEQ ID NO: 31787 - DNA, 25 bp, Saccharomyces pastorianus
gtacttctaacaactactctggctg

SEQ ID NO: 31788 - DNA, 25 bp, Saccharomyces pastorianus
gggaagctaacaataccttgcccgc

SEQ ID NO: 31789 - DNA, 25 bp, Saccharomyces pastorianus
ggcctccactagtgatgcaagcgtg

SEQ ID NO: 31790 - DNA, 25 bp, Saccharomyces pastorianus
gagtcatcgtcgtctacttcagaag

SEQ ID NO: 31791 - DNA, 25 bp, Saccharomyces pastorianus
atcctctagccaatcttctacaaaa

SEQ ID NO: 31792 - DNA, 25 bp, Saccharomyces pastorianus
ttctgtgttctctggtgggttagta

SEQ ID NO: 31793 - DNA, 25 bp, Saccharomyces pastorianus
actctggctgtcctgactacgaaaa

SEQ ID NO: 31794 - DNA, 25 bp, Saccharomyces pastorianus
tgagattccattaattttccgtgct

SEQ ID NO: 31795 - DNA, 25 bp, Saccharomyces pastorianus
aagtgctgcttctgcctatttcaag

SEQ ID NO: 31796 - DNA, 25 bp, Saccharomyces pastorianus
aaagtctctgatccccaaggtgatg

SEQ ID NO: 31797 - DNA, 25 bp, Saccharomyces pastorianus
aaggacgctacattagtcaccacca

SEQ ID NO: 31798 - DNA, 25 bp, Saccharomyces pastorianus
gagagaacacgtccctgatgatatc

SEQ ID NO: 31799 - DNA, 25 bp, Saccharomyces pastorianus
gaaacaactatgactgaggcccaag

SEQ ID NO: 31800 - DNA, 25 bp, Saccharomyces pastorianus
gtactacgacggtatcttgcaggta

SEQ ID NO: 31801 - DNA, 25 bp, Saccharomyces pastorianus
agtcttcctccgctgaaactgaagc

SEQ ID NO: 31802 - DNA, 25 bp, Saccharomyces pastorianus
gcagtcgctcctaagctagtcaaaa

SEQ ID NO: 31803 - DNA, 25 bp, Saccharomyces pastorianus
gattccgctgaaaccgccgagacga

SEQ ID NO: 31804 - DNA, 25 bp, Saccharomyces pastorianus
cccagatcccgtttataatgttgcc

SEQ ID NO: 31805 - DNA, 25 bp, Saccharomyces pastorianus
ttgcaggtactaagctccatcccag

SEQ ID NO: 31806 - DNA, 25 bp, Saccharomyces pastorianus
agaagacctctgacgacaatgaatt

SEQ ID NO: 31807 - DNA, 25 bp, Saccharomyces pastorianus
acgtatctgaatccaagtcttcctc

SEQ ID NO: 31808 - DNA, 25 bp, Saccharomyces pastorianus
gatacagagaatgccggactccgac

SEQ ID NO: 31809 - DNA, 25 bp, Saccharomyces pastorianus
ttttatgggctcttgctctatcaac

SEQ ID NO: 31810 - DNA, 25 bp, Saccharomyces pastorianus
atgatgctcgggttcggcgaactgt

SEQ ID NO: 31811 - DNA, 25 bp, Saccharomyces pastorianus
gaactgtttgcccatgagctgtgct

SEQ ID NO: 31812 - DNA, 25 bp, Saccharomyces pastorianus
acaaagcctggtgtcttttatgggc

SEQ ID NO: 31813 - DNA, 25 bp, Saccharomyces pastorianus
aaggtgtacccggaatcgcgcaagg

SEQ ID NO: 31814 - DNA, 25 bp, Saccharomyces pastorianus
gtaactgcacttgacgagccttcaa

SEQ ID NO: 31815 - DNA, 25 bp, Saccharomyces pastorianus
acgagggccggctggtacaaagcct

SEQ ID NO: 31816 - DNA, 25 bp, Saccharomyces pastorianus
ggttcaactggttcaatcgcagaaa

SEQ ID NO: 31817 - DNA, 25 bp, Saccharomyces pastorianus
agctgtgctggaggttcaactggtt

SEQ ID NO: 31818 - DNA, 25 bp, Saccharomyces pastorianus
aagcttctgggaaagcagctcggat

SEQ ID NO: 31819 - DNA, 25 bp, Saccharomyces pastorianus
ctgggtctgctgaggcagtctcaga

SEQ ID NO: 31820 - DNA, 25 bp, Saccharomyces pastorianus
acccggtgataaaattctggcttat

SEQ ID NO: 31821 - DNA, 25 bp, Saccharomyces pastorianus
gtatacctgctgaaagcgacttgaa

SEQ ID NO: 31822 - DNA, 25 bp, Saccharomyces pastorianus
cacatttgagaacgcttttgaaggt

SEQ ID NO: 31823 - DNA, 25 bp, Saccharomyces pastorianus
gtaatcaacaatagggctggcatca

SEQ ID NO: 31824 - DNA, 25 bp, Saccharomyces pastorianus
gtcattttcgatggaacgctctcaa

SEQ ID NO: 31825 - DNA, 25 bp, Saccharomyces pastorianus
ggaacgctctcaactctaaaacata

SEQ ID NO: 31826 - DNA, 25 bp, Saccharomyces pastorianus
acaatcctgtgcttcaatttgggta

SEQ ID NO: 31827 - DNA, 25 bp, Saccharomyces pastorianus
aacgtcatatcttcttctgtcggta

SEQ ID NO: 31828 - DNA, 25 bp, Saccharomyces pastorianus
ttcttctgtcggtatacctgctgaa

SEQ ID NO: 31829 - DNA, 25 bp, Saccharomyces pastorianus
tcaagtgtgatgtctctgggtctgc

SEQ ID NO: 31830 - DNA, 25 bp, Saccharomyces pastorianus
gtgggagaccattactatatgctga

SEQ ID NO: 31831 - DNA, 25 bp, Saccharomyces pastorianus
tgcaagtttcttgacgatgacgtat

SEQ ID NO: 31832 - DNA, 25 bp, Saccharomyces pastorianus
aaaggcttctgcaaaggctgccaga

SEQ ID NO: 31833 - DNA, 25 bp, Saccharomyces pastorianus
tcaagaggtggtcggttacaaccca

SEQ ID NO: 31834 - DNA, 25 bp, Saccharomyces pastorianus
aagacccgatcaagttggacccaag

SEQ ID NO: 31835 - DNA, 25 bp, Saccharomyces pastorianus
aagacctggttacaacccatcaagc

SEQ ID NO: 31836 - DNA, 25 bp, Saccharomyces pastorianus
tgaacacggtgttggctatgtagaa

SEQ ID NO: 31837 - DNA, 25 bp, Saccharomyces pastorianus
ggctgccagaaaactgcacgattca

SEQ ID NO: 31838 - DNA, 25 bp, Saccharomyces pastorianus
ttttatcaacgctgccaagacctgg

SEQ ID NO: 31839 - DNA, 25 bp, Saccharomyces pastorianus
gccagcacatttgcaactacctaag

SEQ ID NO: 31840 - DNA, 25 bp, Saccharomyces pastorianus
gcaccatccttgtttttaccgatgt

SEQ ID NO: 31841 - DNA, 25 bp, Saccharomyces pastorianus
ttcgggttactagcctttctggtca

SEQ ID NO: 31842 - DNA, 25 bp, Saccharomyces pastorianus
attgctggtctagccacgtgtatag

SEQ ID NO: 31843 - DNA, 25 bp, Saccharomyces pastorianus
atggcaaactcgctgttcgggttac

SEQ ID NO: 31844 - DNA, 25 bp, Saccharomyces pastorianus
cggcagaccgctagttggcattatg

SEQ ID NO: 31845 - DNA, 25 bp, Saccharomyces pastorianus
ctacctctgcgctttaatcatgtta

SEQ ID NO: 31846 - DNA, 25 bp, Saccharomyces pastorianus
gttttactgttctttatggcccatt

SEQ ID NO: 31847 - DNA, 25 bp, Saccharomyces pastorianus
gatattcttccaaaactacctctgc

SEQ ID NO: 31848 - DNA, 25 bp, Saccharomyces pastorianus
caggttccatggcagacatcttcaa

SEQ ID NO: 31849 - DNA, 25 bp, Saccharomyces pastorianus
gttattcatattcgtcacccacaag

SEQ ID NO: 31850 - DNA, 25 bp, Saccharomyces pastorianus
gacatcttcaattggctcatggcca

SEQ ID NO: 31851 - DNA, 25 bp, Saccharomyces pastorianus
gtactccgcattaatcaactgcctg

SEQ ID NO: 31852 - DNA, 25 bp, Saccharomyces pastorianus
gacacttccgcagaggcgtatttga

SEQ ID NO: 31853 - DNA, 25 bp, Saccharomyces pastorianus
atcctactgttaacattatgcgtga

SEQ ID NO: 31854 - DNA, 25 bp, Saccharomyces pastorianus
aaaagcgggagggtcttgatattga

SEQ ID NO: 31855 - DNA, 25 bp, Saccharomyces pastorianus
acaatctagagaacacagtcgtgga

SEQ ID NO: 31856 - DNA, 25 bp, Saccharomyces pastorianus
attgccaagcacaattgaggtgaca

SEQ ID NO: 31857 - DNA, 25 bp, Saccharomyces pastorianus
gcgtgattacattgtttttcttcgt

SEQ ID NO: 31858 - DNA, 25 bp, Saccharomyces pastorianus
gaactgaataaagctacacattacc

SEQ ID NO: 31859 - DNA, 25 bp, Saccharomyces pastorianus
atgttgaaaccacatagtagcggtg

SEQ ID NO: 31860 - DNA, 25 bp, Saccharomyces pastorianus
aacagcaactgcatgacacttccgc

SEQ ID NO: 31861 - DNA, 25 bp, Saccharomyces pastorianus
ggacgttacaaaggcaacagcaact

SEQ ID NO: 31862 - DNA, 25 bp, Saccharomyces pastorianus
cattgtttttcttcgttatgttgaa

SEQ ID NO: 31863 - DNA, 25 bp, Saccharomyces pastorianus
gggcaaactggatcagctccaatcc

SEQ ID NO: 31864 - DNA, 25 bp, Saccharomyces pastorianus
tcttgctatcataacttggacgctg

SEQ ID NO: 31865 - DNA, 25 bp, Saccharomyces pastorianus
agcataacatttccctgagtacttg

SEQ ID NO: 31866 - DNA, 25 bp, Saccharomyces pastorianus
ttgccccagttttaaagacgtctcg

SEQ ID NO: 31867 - DNA, 25 bp, Saccharomyces pastorianus
tagcgccttccaaacgtattaaatc

SEQ ID NO: 31868 - DNA, 25 bp, Saccharomyces pastorianus
tgatctccctctttcagtaatcgaa

SEQ ID NO: 31869 - DNA, 25 bp, Saccharomyces pastorianus
agcttctccaaattatacgcctgat

SEQ ID NO: 31870 - DNA, 25 bp, Saccharomyces pastorianus
taatcgaaccgctaaatccttctgc

SEQ ID NO: 31871 - DNA, 25 bp, Saccharomyces pastorianus
aagacgtctcggaaatagcgccttc

SEQ ID NO: 31872 - DNA, 25 bp, Saccharomyces pastorianus
tcctgacccctacagaaaagcttca

SEQ ID NO: 31873 - DNA, 25 bp, Saccharomyces pastorianus
tgagtacttgtggacgctttcgaaa

SEQ ID NO: 31874 - DNA, 25 bp, Saccharomyces pastorianus
ggcgaatcaaaatgttccacctatg

SEQ ID NO: 31875 - DNA, 25 bp, Saccharomyces pastorianus
gttcccactgcaacaaaccgataat

SEQ ID NO: 31876 - DNA, 25 bp, Saccharomyces pastorianus
aaccgataatacttccggcgaatca

SEQ ID NO: 31877 - DNA, 25 bp, Saccharomyces pastorianus
atgaactaattcattccccgaacca

SEQ ID NO: 31878 - DNA, 25 bp, Saccharomyces pastorianus
acgttctcaaacctgtcctatatgt

SEQ ID NO: 31879 - DNA, 25 bp, Saccharomyces pastorianus
gagacagagttaattcctaccagga

SEQ ID NO: 31880 - DNA, 25 bp, Saccharomyces pastorianus
cagcgtcatccaacacgtggtatac

SEQ ID NO: 31881 - DNA, 25 bp, Saccharomyces pastorianus
atatactccacttgtcatgcttaaa

SEQ ID NO: 31882 - DNA, 25 bp, Saccharomyces pastorianus
gaaagccacgaaccaaactctgagc

SEQ ID NO: 31883 - DNA, 25 bp, Saccharomyces pastorianus
atgtcagcatcaatgccagcgtcat

SEQ ID NO: 31884 - DNA, 25 bp, Saccharomyces pastorianus
tcctaccaggacaatttctcatgat

SEQ ID NO: 31885 - DNA, 25 bp, Saccharomyces pastorianus
ttgattagagccactatcgcttccg

SEQ ID NO: 31886 - DNA, 25 bp, Saccharomyces pastorianus
cggccagagctggtttgcagttccc

SEQ ID NO: 31887 - DNA, 25 bp, Saccharomyces pastorianus
tatcgcttccggtggtgttttgcct

SEQ ID NO: 31888 - DNA, 25 bp, Saccharomyces pastorianus
gctggtaatgctgccaaggatttga

SEQ ID NO: 31889 - DNA, 25 bp, Saccharomyces pastorianus
gttacctgaagagacacgccacggg

SEQ ID NO: 31890 - DNA, 25 bp, Saccharomyces pastorianus
tggcgctaaagatggcggttcgtta

SEQ ID NO: 31891 - DNA, 25 bp, Saccharomyces pastorianus
ggcggttcgttaagatcccaatctt

SEQ ID NO: 31892 - DNA, 25 bp, Saccharomyces pastorianus
gaggtaaaggtaagtctggcgctaa

SEQ ID NO: 31893 - DNA, 25 bp, Saccharomyces pastorianus
cacgccacgggcaaaacaagggtag

SEQ ID NO: 31894 - DNA, 25 bp, Saccharomyces pastorianus
aactgcggaagtgctggaactggct

SEQ ID NO: 31895 - DNA, 25 bp, Saccharomyces pastorianus
tgcagttccccgttggtagaattaa

SEQ ID NO: 31896 - DNA, 25 bp, Saccharomyces pastorianus
ggcctgaagcttctaaatcatcctc

SEQ ID NO: 31897 - DNA, 25 bp, Saccharomyces pastorianus
gaaataactttaccgacgatcctga

SEQ ID NO: 31898 - DNA, 25 bp, Saccharomyces pastorianus
agcgttaaatatcactctgcctcca

SEQ ID NO: 31899 - DNA, 25 bp, Saccharomyces pastorianus
ggcaactgcaaattctggatcacat

SEQ ID NO: 31900 - DNA, 25 bp, Saccharomyces pastorianus
gtcagctacggcaacccttgagaaa

SEQ ID NO: 31901 - DNA, 25 bp, Saccharomyces pastorianus
tgatcttcaatacatcccacctttg

SEQ ID NO: 31902 - DNA, 25 bp, Saccharomyces pastorianus
accttttttggctgcgacgctaata

SEQ ID NO: 31903 - DNA, 25 bp, Saccharomyces pastorianus
atgtgaaacctgcttctcgaactac

SEQ ID NO: 31904 - DNA, 25 bp, Saccharomyces pastorianus
gaagatcatctcattgggcctgaag

SEQ ID NO: 31905 - DNA, 25 bp, Saccharomyces pastorianus
tggtcgtctatctacctaatgcaga

SEQ ID NO: 31906 - DNA, 25 bp, Saccharomyces pastorianus
actgctggaatggtactctggacac

SEQ ID NO: 31907 - DNA, 25 bp, Saccharomyces pastorianus
tggtgatgcaggctctatacccgaa

SEQ ID NO: 31908 - DNA, 25 bp, Saccharomyces pastorianus
gggtataactttggtggctgaatcc

SEQ ID NO: 31909 - DNA, 25 bp, Saccharomyces pastorianus
gtaagtccgtcactcgtaaatagaa

SEQ ID NO: 31910 - DNA, 25 bp, Saccharomyces pastorianus
ctggttgttgactctttgattgctc

SEQ ID NO: 31911 - DNA, 25 bp, Saccharomyces pastorianus
aaagcgctgctgtcggtagaagtca

SEQ ID NO: 31912 - DNA, 25 bp, Saccharomyces pastorianus
aaagttggagctatttcgccgaaga

SEQ ID NO: 31913 - DNA, 25 bp, Saccharomyces pastorianus
ttgctcaaccaatcacgatgcatga

SEQ ID NO: 31914 - DNA, 25 bp, Saccharomyces pastorianus
atcaccggagtagcgtactctacaa

SEQ ID NO: 31915 - DNA, 25 bp, Saccharomyces pastorianus
gacccataatttcttcaatcaccgg

SEQ ID NO: 31916 - DNA, 25 bp, Saccharomyces pastorianus
gaagtcaacttccactagcaatcgt

SEQ ID NO: 31917 - DNA, 25 bp, Saccharomyces pastorianus
agcaatcgtatacatggtcatcgga

SEQ ID NO: 31918 - DNA, 25 bp, Saccharomyces pastorianus
gaaacctcttctcattctggtgaga

SEQ ID NO: 31919 - DNA, 25 bp, Saccharomyces pastorianus
aggtgctattctattgtcgctaaca

SEQ ID NO: 31920 - DNA, 25 bp, Saccharomyces pastorianus
taaggaacgtactgctgcccagata

SEQ ID NO: 31921 - DNA, 25 bp, Saccharomyces pastorianus
aggatcctcatctgttctgaaccta

SEQ ID NO: 31922 - DNA, 25 bp, Saccharomyces pastorianus
tctggagacaactctacgccgaagt

SEQ ID NO: 31923 - DNA, 25 bp, Saccharomyces pastorianus
acgccgaagtccaacgctagtcaag

SEQ ID NO: 31924 - DNA, 25 bp, Saccharomyces pastorianus
tgagattctgcagcgcgatgccaat

SEQ ID NO: 31925 - DNA, 25 bp, Saccharomyces pastorianus
ggacaagtcgtctcgtatgagtcta

SEQ ID NO: 31926 - DNA, 25 bp, Saccharomyces pastorianus
gatgtttgagtccttatccagcact

SEQ ID NO: 31927 - DNA, 25 bp, Saccharomyces pastorianus
aatttaggccctgattctggagaca

SEQ ID NO: 31928 - DNA, 25 bp, Saccharomyces pastorianus
aggtcttctatgtttatctctccaa

SEQ ID NO: 31929 - DNA, 25 bp, Saccharomyces pastorianus
gctgacgcaacataggatccgtttt

SEQ ID NO: 31930 - DNA, 25 bp, Saccharomyces pastorianus
gacgttcaatgaaggtggcgagcaa

SEQ ID NO: 31931 - DNA, 25 bp, Saccharomyces pastorianus
ggctagaatcgctattcgactctca

SEQ ID NO: 31932 - DNA, 25 bp, Saccharomyces pastorianus
tgaggcgaaatcaccccaacttgaa

SEQ ID NO: 31933 - DNA, 25 bp, Saccharomyces pastorianus
aactcctatgaatttctttgttctt

SEQ ID NO: 31934 - DNA, 25 bp, Saccharomyces pastorianus
gaagatattatgctctcgcttccct

SEQ ID NO: 31935 - DNA, 25 bp, Saccharomyces pastorianus
atctcaaattgaatcctgggacatg

SEQ ID NO: 31936 - DNA, 25 bp, Saccharomyces pastorianus
tgcccaaagtggtagatctgctatt

SEQ ID NO: 31937 - DNA, 25 bp, Saccharomyces pastorianus
atggccatttggtgctcctacagga

SEQ ID NO: 31938 - DNA, 25 bp, Saccharomyces pastorianus
aataatatatcttggtcccctccat

SEQ ID NO: 31939 - DNA, 25 bp, Saccharomyces pastorianus
ttggaagatccatcctgaggcgaaa

SEQ ID NO: 31940 - DNA, 25 bp, Saccharomyces pastorianus
ttacactaaattctttgaccgccca

SEQ ID NO: 31941 - DNA, 25 bp, Saccharomyces pastorianus
cacctgagtctcactattcacaaaa

SEQ ID NO: 31942 - DNA, 25 bp, Saccharomyces pastorianus
gatttactacagaccgcgtatccag

SEQ ID NO: 31943 - DNA, 25 bp, Saccharomyces pastorianus
tatgttctcccgtccaattttaatg

SEQ ID NO: 31944 - DNA, 25 bp, Saccharomyces pastorianus
gaccgcgtatccagattttacacta

SEQ ID NO: 31945 - DNA, 25 bp, Saccharomyces pastorianus
aggttcttttaatgcttcaccagat

SEQ ID NO: 31946 - DNA, 25 bp, Saccharomyces pastorianus
aaaggcttgtgcgattcattctcta

SEQ ID NO: 31947 - DNA, 25 bp, Saccharomyces pastorianus
aaagtggtactcgacttcagcaacc

SEQ ID NO: 31948 - DNA, 25 bp, Saccharomyces pastorianus
gactgactaaattctcttctctgga

SEQ ID NO: 31949 - DNA, 25 bp, Saccharomyces pastorianus
ggtttttattgacagctactacggt

SEQ ID NO: 31950 - DNA, 25 bp, Saccharomyces pastorianus
agcaacccaaagcatcacctgagtc

SEQ ID NO: 31951 - DNA, 25 bp, Saccharomyces pastorianus
aagcatcttcttccatatgtactaa

SEQ ID NO: 31952 - DNA, 25 bp, Saccharomyces pastorianus
tacgttgtgtcttttctactaacca

SEQ ID NO: 31953 - DNA, 25 bp, Saccharomyces pastorianus
gtatatcgccatgggcttatatcat

SEQ ID NO: 31954 - DNA, 25 bp, Saccharomyces pastorianus
taactcctggtccatccattagtag

SEQ ID NO: 31955 - DNA, 25 bp, Saccharomyces pastorianus
atgttctatgtcgttctttctcttc

SEQ ID NO: 31956 - DNA, 25 bp, Saccharomyces pastorianus
tagatctatttgtagcgcctccaac

SEQ ID NO: 31957 - DNA, 25 bp, Saccharomyces pastorianus
gttgctttgttcactttatggcctt

SEQ ID NO: 31958 - DNA, 25 bp, Saccharomyces pastorianus
ctttctcttcagttttcaggttcac

SEQ ID NO: 31959 - DNA, 25 bp, Saccharomyces pastorianus
gaagaagtctgttgccctataatgt

SEQ ID NO: 31960 - DNA, 25 bp, Saccharomyces pastorianus
tatccggacttgtgggtgctgttaa

SEQ ID NO: 31961 - DNA, 25 bp, Saccharomyces pastorianus
tagttgccacagttctcggtttttt

SEQ ID NO: 31962 - DNA, 25 bp, Saccharomyces pastorianus
atggctgcacctcacgttgctggta

SEQ ID NO: 31963 - DNA, 25 bp, Saccharomyces pastorianus
tttatctacctatattggctcgaga

SEQ ID NO: 31964 - DNA, 25 bp, Saccharomyces pastorianus
aagtggtgttcatttcgctatcgca

SEQ ID NO: 31965 - DNA, 25 bp, Saccharomyces pastorianus
ctttctttcattacaacctagctca

SEQ ID NO: 31966 - DNA, 25 bp, Saccharomyces pastorianus
tctactgctaacctatccttgggaa

SEQ ID NO: 31967 - DNA, 25 bp, Saccharomyces pastorianus
tttatcaggcacctcaatggctgca

SEQ ID NO: 31968 - DNA, 25 bp, Saccharomyces pastorianus
aggaggccccaagttcaaaggatct

SEQ ID NO: 31969 - DNA, 25 bp, Saccharomyces pastorianus
gttcaggaccacatagattcatcaa

SEQ ID NO: 31970 - DNA, 25 bp, Saccharomyces pastorianus
gattttttcgatggcactgtttcac

SEQ ID NO: 31971 - DNA, 25 bp, Saccharomyces pastorianus
ggcactgtttcacctcaacaattga

SEQ ID NO: 31972 - DNA, 25 bp, Saccharomyces pastorianus
gaagatgcctgtttgagctcaccag

SEQ ID NO: 31973 - DNA, 25 bp, Saccharomyces pastorianus
aagaaccctgcccttagaaacatgg

SEQ ID NO: 31974 - DNA, 25 bp, Saccharomyces pastorianus
aacatggcgggcagtctatttggtg

SEQ ID NO: 31975 - DNA, 25 bp, Saccharomyces pastorianus
aggctctttactaggtggtggtctt

SEQ ID NO: 31976 - DNA, 25 bp, Saccharomyces pastorianus
ctatttggtggagcggatgccccat

SEQ ID NO: 31977 - DNA, 25 bp, Saccharomyces pastorianus
gctttacttctggtggaggaactcc

SEQ ID NO: 31978 - DNA, 25 bp, Saccharomyces pastorianus
gcagcagcccattcatctttgaaag

SEQ ID NO: 31979 - DNA, 25 bp, Saccharomyces pastorianus
acaaccaagggatgctggcgccaat

SEQ ID NO: 31980 - DNA, 25 bp, Saccharomyces pastorianus
gcggattaccagatctaggctcttt

SEQ ID NO: 31981 - DNA, 25 bp, Saccharomyces pastorianus
atctattacgccaacagagcagcag

SEQ ID NO: 31982 - DNA, 25 bp, Saccharomyces pastorianus
caatgctggccaaggtgctggtgca

SEQ ID NO: 31983 - DNA, 25 bp, Saccharomyces pastorianus
gatgagcaatcctggtgctatgcaa

SEQ ID NO: 31984 - DNA, 25 bp, Saccharomyces pastorianus
gtctcctctttgttgaccatgttgc

SEQ ID NO: 31985 - DNA, 25 bp, Saccharomyces pastorianus
aaggcgtctactactgcttccggtt

SEQ ID NO: 31986 - DNA, 25 bp, Saccharomyces pastorianus
tctactcaagctaagacctcttctg

SEQ ID NO: 31987 - DNA, 25 bp, Saccharomyces pastorianus
ggtttctctttgtccagtttgccat

SEQ ID NO: 31988 - DNA, 25 bp, Saccharomyces pastorianus
tctgctgttgcttcttcgtctgctg

SEQ ID NO: 31989 - DNA, 25 bp, Saccharomyces pastorianus
tatttcccaaatctctgacggtcaa

SEQ ID NO: 31990 - DNA, 25 bp, Saccharomyces pastorianus
ttaggaacttctacctctgctgctg

SEQ ID NO: 31991 - DNA, 25 bp, Saccharomyces pastorianus
tggacgttggtatggctctggcttc

SEQ ID NO: 31992 - DNA, 25 bp, Saccharomyces pastorianus
tctgaaattgacttcggtgccgtct

SEQ ID NO: 31993 - DNA, 25 bp, Saccharomyces pastorianus
ggaaccagctttggaatccttgtta

SEQ ID NO: 31994 - DNA, 25 bp, Saccharomyces pastorianus
aagctactaataccgtttctcaaca

SEQ ID NO: 31995 - DNA, 25 bp, Saccharomyces pastorianus
taaaggttgaagtcccactgtttgt

SEQ ID NO: 31996 - DNA, 25 bp, Saccharomyces pastorianus
atgcaatggcattcaaagctctaaa

SEQ ID NO: 31997 - DNA, 25 bp, Saccharomyces pastorianus
gtcccactgtttgttcaattggcta

SEQ ID NO: 31998 - DNA, 25 bp, Saccharomyces pastorianus
gaaaaggaccagtatgcagccaatg

SEQ ID NO: 31999 - DNA, 25 bp, Saccharomyces pastorianus
tgaagtaatcgaaccattggaattt

SEQ ID NO: 32000 - DNA, 25 bp, Saccharomyces pastorianus
gtgcgaaagaaactcaacaacgtaa

SEQ ID NO: 32001 - DNA, 25 bp, Saccharomyces pastorianus
gcagccaatgagagaatgaatccag

SEQ ID NO: 32002 - DNA, 25 bp, Saccharomyces pastorianus
agatccttatatgcttgttgaacag

SEQ ID NO: 32003 - DNA, 25 bp, Saccharomyces pastorianus
caggctattaattcaggctcgtgga

SEQ ID NO: 32004 - DNA, 25 bp, Saccharomyces pastorianus
tctgcccataatatttcctgcatta

SEQ ID NO: 32005 - DNA, 25 bp, Saccharomyces pastorianus
aaatgccgaagttattctgcccata

SEQ ID NO: 32006 - DNA, 25 bp, Saccharomyces pastorianus
tgaaaccaaggaagtccctcacctg

SEQ ID NO: 32007 - DNA, 25 bp, Saccharomyces pastorianus
ggctgctgtgacatcttactttaca

SEQ ID NO: 32008 - DNA, 25 bp, Saccharomyces pastorianus
acattcgttgctacggctgctgtga

SEQ ID NO: 32009 - DNA, 25 bp, Saccharomyces pastorianus
gacatcttactttacaatgaagcca

SEQ ID NO: 32010 - DNA, 25 bp, Saccharomyces pastorianus
tggccatatctacattcgttgctac

SEQ ID NO: 32011 - DNA, 25 bp, Saccharomyces pastorianus
gagaaaccgtcaacagcgaatgctg

SEQ ID NO: 32012 - DNA, 25 bp, Saccharomyces pastorianus
ggcagaactgttcaacctcatgtat

SEQ ID NO: 32013 - DNA, 25 bp, Saccharomyces pastorianus
tgttcaacctcatgtattggccata

SEQ ID NO: 32014 - DNA, 25 bp, Saccharomyces pastorianus
gaatggtgagaaaccgtcaacagcg

SEQ ID NO: 32015 - DNA, 25 bp, Saccharomyces pastorianus
tccctcacctgaaccaacagaatgg

SEQ ID NO: 32016 - DNA, 25 bp, Saccharomyces pastorianus
cagcgaatgctgatgggaaagatga

SEQ ID NO: 32017 - DNA, 25 bp, Saccharomyces pastorianus
gtagaccaatcctaccagagggtat

SEQ ID NO: 32018 - DNA, 25 bp, Saccharomyces pastorianus
gtcgttaccaaagaacaccactgaa

SEQ ID NO: 32019 - DNA, 25 bp, Saccharomyces pastorianus
acatatcctaatctgctggtgggta

SEQ ID NO: 32020 - DNA, 25 bp, Saccharomyces pastorianus
gtatattaggtgaccatcctccaag

SEQ ID NO: 32021 - DNA, 25 bp, Saccharomyces pastorianus
ggagatgccgtttagatatgttctt

SEQ ID NO: 32022 - DNA, 25 bp, Saccharomyces pastorianus
aagacgctgcagaattcgattattt

SEQ ID NO: 32023 - DNA, 25 bp, Saccharomyces pastorianus
tatcgcttggtttgagatggacaac

SEQ ID NO: 32024 - DNA, 25 bp, Saccharomyces pastorianus
ttgatttacaacctgaagacgctgc

SEQ ID NO: 32025 - DNA, 25 bp, Saccharomyces pastorianus
gacatacctgaaaagctattatcgc

SEQ ID NO: 32026 - DNA, 25 bp, Saccharomyces pastorianus
ggcgacaagcaaatgaccacagata

SEQ ID NO: 32027 - DNA, 25 bp, Saccharomyces pastorianus
ttattggacccaagagctgcgattg

SEQ ID NO: 32028 - DNA, 25 bp, Saccharomyces pastorianus
taacgaagcttcgtacgtgccatcg

SEQ ID NO: 32029 - DNA, 25 bp, Saccharomyces pastorianus
gagatcgccataccgaaaccgcaat

SEQ ID NO: 32030 - DNA, 25 bp, Saccharomyces pastorianus
gaggatgactcttctagaactgata

SEQ ID NO: 32031 - DNA, 25 bp, Saccharomyces pastorianus
gacatcccgcacctggaaaaactat

SEQ ID NO: 32032 - DNA, 25 bp, Saccharomyces pastorianus
atcctgtccagcttcaaggagttgg

SEQ ID NO: 32033 - DNA, 25 bp, Saccharomyces pastorianus
gaaaggccactcttttgatgaacaa

SEQ ID NO: 32034 - DNA, 25 bp, Saccharomyces pastorianus
gagaccaagccccaccgataagaag

SEQ ID NO: 32035 - DNA, 25 bp, Saccharomyces pastorianus
ctagcagtgcgggaaggccttcgtc

SEQ ID NO: 32036 - DNA, 25 bp, Saccharomyces pastorianus
ggtattgtcctcttcgttgcaaaga

SEQ ID NO: 32037 - DNA, 25 bp, Saccharomyces pastorianus
ggatactgccactactactggagat

SEQ ID NO: 32038 - DNA, 25 bp, Saccharomyces pastorianus
gcggacccacaagtctgtcaaggac

SEQ ID NO: 32039 - DNA, 25 bp, Saccharomyces pastorianus
aagatcttcgccatggatgccaact

SEQ ID NO: 32040 - DNA, 25 bp, Saccharomyces pastorianus
gcgtaccctgtaaattccatcgagt

SEQ ID NO: 32041 - DNA, 25 bp, Saccharomyces pastorianus
gagataacatcctatgtctggccac

SEQ ID NO: 32042 - DNA, 25 bp, Saccharomyces pastorianus
tgaaccccatcggtgcggaggtaaa

SEQ ID NO: 32043 - DNA, 25 bp, Saccharomyces pastorianus
ggctctgatggtattgtttcgtgct

SEQ ID NO: 32044 - DNA, 25 bp, Saccharomyces pastorianus
gaccaagacggttatgcatgcagca

SEQ ID NO: 32045 - DNA, 25 bp, Saccharomyces pastorianus
taccttcaagactaacgcagccatt

SEQ ID NO: 32046 - DNA, 25 bp, Saccharomyces pastorianus
cttcccgtttgatccttggtatgaa

SEQ ID NO: 32047 - DNA, 25 bp, Saccharomyces pastorianus
aggttcttatacacagctggctctg

SEQ ID NO: 32048 - DNA, 25 bp, Saccharomyces pastorianus
gagatatcgctctcttacctcaaga

SEQ ID NO: 32049 - DNA, 25 bp, Saccharomyces pastorianus
gcagccattgatcatgccatcgaac

SEQ ID NO: 32050 - DNA, 25 bp, Saccharomyces pastorianus
attcgctggcgccttggaaacgtta

SEQ ID NO: 32051 - DNA, 25 bp, Saccharomyces pastorianus
ccccgaggctattgctgactgtaat

SEQ ID NO: 32052 - DNA, 25 bp, Saccharomyces pastorianus
gatcgctgttcaagaattcgctggc

SEQ ID NO: 32053 - DNA, 25 bp, Saccharomyces pastorianus
caaagagtgactggcccaatgctgt

SEQ ID NO: 32054 - DNA, 25 bp, Saccharomyces pastorianus
gaagccgaagcatacattaatcctg

SEQ ID NO: 32055 - DNA, 25 bp, Saccharomyces pastorianus
aaaggctaccgcacagatcgctgtt

SEQ ID NO: 32056 - DNA, 25 bp, Saccharomyces pastorianus
taatagagccgctgccttagctaag

SEQ ID NO: 32057 - DNA, 25 bp, Saccharomyces pastorianus
acaaaaccctgctgctttacaagaa

SEQ ID NO: 32058 - DNA, 25 bp, Saccharomyces pastorianus
caaagattccagtccaacaccggta

SEQ ID NO: 32059 - DNA, 25 bp, Saccharomyces pastorianus
taagctaatgtcattccccgaggct

SEQ ID NO: 32060 - DNA, 25 bp, Saccharomyces pastorianus
gggaaatcgaccaactatactacaa

SEQ ID NO: 32061 - DNA, 25 bp, Saccharomyces pastorianus
gctaagacgagaagtgctgcccatt

SEQ ID NO: 32062 - DNA, 25 bp, Saccharomyces pastorianus
accatgctacgtgccttagtgatga

SEQ ID NO: 32063 - DNA, 25 bp, Saccharomyces pastorianus
agcaacgctctctaaataccgaaag

SEQ ID NO: 32064 - DNA, 25 bp, Saccharomyces pastorianus
ggttcatcgagcttagtggtttccc

SEQ ID NO: 32065 - DNA, 25 bp, Saccharomyces pastorianus
gttccatgacattagaccgggacct

SEQ ID NO: 32066 - DNA, 25 bp, Saccharomyces pastorianus
gaggttcaattcaccatgctacgtg

SEQ ID NO: 32067 - DNA, 25 bp, Saccharomyces pastorianus
gtgctgcccattctagaggttcaat

SEQ ID NO: 32068 - DNA, 25 bp, Saccharomyces pastorianus
aagatacctcacacggttcatcgag

SEQ ID NO: 32069 - DNA, 25 bp, Saccharomyces pastorianus
taggcaagcgcataagttccatgac

SEQ ID NO: 32070 - DNA, 25 bp, Saccharomyces pastorianus
gttttttgctaatccaacggtcaat

SEQ ID NO: 32071 - DNA, 25 bp, Saccharomyces pastorianus
agtaaacccagtttcagtgctgcca

SEQ ID NO: 32072 - DNA, 25 bp, Saccharomyces pastorianus
attatgaggctttgttggctttaac

SEQ ID NO: 32073 - DNA, 25 bp, Saccharomyces pastorianus
agcatattgtgtctacaccggccta

SEQ ID NO: 32074 - DNA, 25 bp, Saccharomyces pastorianus
accggcctattggtcgacaatcgag

SEQ ID NO: 32075 - DNA, 25 bp, Saccharomyces pastorianus
aatctagcctcgtcagagacttctg

SEQ ID NO: 32076 - DNA, 25 bp, Saccharomyces pastorianus
gtcgttgctatctttgccaatatcg

SEQ ID NO: 32077 - DNA, 25 bp, Saccharomyces pastorianus
atatcgcaactactatcccgctgat

SEQ ID NO: 32078 - DNA, 25 bp, Saccharomyces pastorianus
gagcaagtcggcgatatcgagctaa

SEQ ID NO: 32079 - DNA, 25 bp, Saccharomyces pastorianus
aaatgattccggacaccagctctaa

SEQ ID NO: 32080 - DNA, 25 bp, Saccharomyces pastorianus
gttccattgcaacggtcaacactgg

SEQ ID NO: 32081 - DNA, 25 bp, Saccharomyces pastorianus
aactgtctgacatcgagtcccaacg

SEQ ID NO: 32082 - DNA, 25 bp, Saccharomyces pastorianus
aaacgccgttgaagtcttcgcggag

SEQ ID NO: 32083 - DNA, 25 bp, Saccharomyces pastorianus
attcgcctaccagcaaaatcttatc

SEQ ID NO: 32084 - DNA, 25 bp, Saccharomyces pastorianus
gtatatctgttggttgttcttctcg

SEQ ID NO: 32085 - DNA, 25 bp, Saccharomyces pastorianus
aaggaaggctatgcgataccagaaa

SEQ ID NO: 32086 - DNA, 25 bp, Saccharomyces pastorianus
gatctgggaagcgtcatccaacagc

SEQ ID NO: 32087 - DNA, 25 bp, Saccharomyces pastorianus
taacgaggaattcgcctaccagcaa

SEQ ID NO: 32088 - DNA, 25 bp, Saccharomyces pastorianus
gagagagtctcttgaagcaaccgaa

SEQ ID NO: 32089 - DNA, 25 bp, Saccharomyces pastorianus
aggcgagctaatcaagaaggtcaac

SEQ ID NO: 32090 - DNA, 25 bp, Saccharomyces pastorianus
caagggcagaaccaccaaatgagta

SEQ ID NO: 32091 - DNA, 25 bp, Saccharomyces pastorianus
ggcaaacaacacagctctaatggat

SEQ ID NO: 32092 - DNA, 25 bp, Saccharomyces pastorianus
acatctgataacacccaaatggctt

SEQ ID NO: 32093 - DNA, 25 bp, Saccharomyces pastorianus
caagcaaccaaatagtcatcgagag

SEQ ID NO: 32094 - DNA, 25 bp, Saccharomyces pastorianus
taaattatattgtccatcctgtgag

SEQ ID NO: 32095 - DNA, 25 bp, Saccharomyces pastorianus
ctactgcaacctacagccgttattg

SEQ ID NO: 32096 - DNA, 25 bp, Saccharomyces pastorianus
tacttctgcgacgtagatcctgaat

SEQ ID NO: 32097 - DNA, 25 bp, Saccharomyces pastorianus
tatggcctcattcatgcacgttaca

SEQ ID NO: 32098 - DNA, 25 bp, Saccharomyces pastorianus
gttattgcccgttggtttgcatgat

SEQ ID NO: 32099 - DNA, 25 bp, Saccharomyces pastorianus
taccaaagtcttcgaggcatagctc

SEQ ID NO: 32100 - DNA, 25 bp, Saccharomyces pastorianus
acatgactcatgtccgtttagagca

SEQ ID NO: 32101 - DNA, 25 bp, Saccharomyces pastorianus
gtaggtgtcctcgtgtctactgcaa

SEQ ID NO: 32102 - DNA, 25 bp, Saccharomyces pastorianus
cgaggtggcaggaactacagcgact

SEQ ID NO: 32103 - DNA, 25 bp, Saccharomyces pastorianus
tttccagacatggtgcccaaacatc

SEQ ID NO: 32104 - DNA, 25 bp, Saccharomyces pastorianus
gattctcgtaagctgtatggcctca

SEQ ID NO: 32105 - DNA, 25 bp, Saccharomyces pastorianus
gataacgttcgttctcattcctcat

SEQ ID NO: 32106 - DNA, 25 bp, Saccharomyces pastorianus
taacagtaccctttccacggctaga

SEQ ID NO: 32107 - DNA, 25 bp, Saccharomyces pastorianus
cgctaagctgctactcttttggaga

SEQ ID NO: 32108 - DNA, 25 bp, Saccharomyces pastorianus
tggtattgccaacgaacgcggaccc

SEQ ID NO: 32109 - DNA, 25 bp, Saccharomyces pastorianus
attgcccaaattgtacgacctcgta

SEQ ID NO: 32110 - DNA, 25 bp, Saccharomyces pastorianus
gggaagccgagcataaaccctttca

SEQ ID NO: 32111 - DNA, 25 bp, Saccharomyces pastorianus
ttaccttctgctggacgcgataaga

SEQ ID NO: 32112 - DNA, 25 bp, Saccharomyces pastorianus
tactaccagtggaggttccttacct

SEQ ID NO: 32113 - DNA, 25 bp, Saccharomyces pastorianus
aaataagatcactgtacccgtccga

SEQ ID NO: 32114 - DNA, 25 bp, Saccharomyces pastorianus
gttcattatctctttgccggttggc

SEQ ID NO: 32115 - DNA, 25 bp, Saccharomyces pastorianus
caatcaaacgtctcagtcaactctt

SEQ ID NO: 32116 - DNA, 25 bp, Saccharomyces pastorianus
aaatcgttctgctactcgttataca

SEQ ID NO: 32117 - DNA, 25 bp, Saccharomyces pastorianus
tacagtcccttcagtacatttgtcg

SEQ ID NO: 32118 - DNA, 25 bp, Saccharomyces pastorianus
atcggacagcgctatatctatcaca

SEQ ID NO: 32119 - DNA, 25 bp, Saccharomyces pastorianus
attgataccatttttgggcctgtat

SEQ ID NO: 32120 - DNA, 25 bp, Saccharomyces pastorianus
gaaatcgaccatcaattccagcttt

SEQ ID NO: 32121 - DNA, 25 bp, Saccharomyces pastorianus
agagatttttctccgcaaggtttca

SEQ ID NO: 32122 - DNA, 25 bp, Saccharomyces pastorianus
atttcttcttatacctctatcggac

SEQ ID NO: 32123 - DNA, 25 bp, Saccharomyces pastorianus
ggcctgtatacgtttgatttcttct

SEQ ID NO: 32124 - DNA, 25 bp, Saccharomyces pastorianus
gttgtccgtaattcacagcaatgca

SEQ ID NO: 32125 - DNA, 25 bp, Saccharomyces pastorianus
acaacatcagacacatccggtttca

SEQ ID NO: 32126 - DNA, 25 bp, Saccharomyces pastorianus
atccggtttcacaaatctgcattta

SEQ ID NO: 32127 - DNA, 25 bp, Saccharomyces pastorianus
ttccaagctttcaaagaatcgccat

SEQ ID NO: 32128 - DNA, 25 bp, Saccharomyces pastorianus
accttcttcattgctggagtggcat

SEQ ID NO: 32129 - DNA, 25 bp, Saccharomyces pastorianus
tgctggagtggcattcattcagtct

SEQ ID NO: 32130 - DNA, 25 bp, Saccharomyces pastorianus
ggcaccttcttcattgctggagtgg

SEQ ID NO: 32131 - DNA, 25 bp, Saccharomyces pastorianus
aaacggcaccttcttcattgctgga

SEQ ID NO: 32132 - DNA, 25 bp, Saccharomyces pastorianus
tcgccattatatacaattgcactaa

SEQ ID NO: 32133 - DNA, 25 bp, Saccharomyces pastorianus
tcttcattgctggagtggcattcat

SEQ ID NO: 32134 - DNA, 25 bp, Saccharomyces pastorianus
tatgccaggtgcaggtgccggtcca

SEQ ID NO: 32135 - DNA, 25 bp, Saccharomyces pastorianus
gtttgctatgccaggtgcaggtgcc

SEQ ID NO: 32136 - DNA, 25 bp, Saccharomyces pastorianus
gaatcgccattatatacaattgcac

SEQ ID NO: 32137 - DNA, 25 bp, Saccharomyces pastorianus
gcactaaacggcaccttcttcattg

SEQ ID NO: 32138 - DNA, 25 bp, Saccharomyces pastorianus
ccgtggtattgatatccctacagtt

SEQ ID NO: 32139 - DNA, 25 bp, Saccharomyces pastorianus
taatcactaccaatgttcttgcccg

SEQ ID NO: 32140 - DNA, 25 bp, Saccharomyces pastorianus
gcatggtgacttgcaaactcaagaa

SEQ ID NO: 32141 - DNA, 25 bp, Saccharomyces pastorianus
acgctattaagcaactgtacatgga

SEQ ID NO: 32142 - DNA, 25 bp, Saccharomyces pastorianus
ttcgctgatgcggttaggcaatatg

SEQ ID NO: 32143 - DNA, 25 bp, Saccharomyces pastorianus
gatatccctacagtttcaatggttg

SEQ ID NO: 32144 - DNA, 25 bp, Saccharomyces pastorianus
gatccggccacttatattcacagaa

SEQ ID NO: 32145 - DNA, 25 bp, Saccharomyces pastorianus
aaaacggcaaatgtcctatatggta

SEQ ID NO: 32146 - DNA, 25 bp, Saccharomyces pastorianus
agttctgactgagctttatggttta

SEQ ID NO: 32147 - DNA, 25 bp, Saccharomyces pastorianus
ttttgttgctaccaagaaaacggca

SEQ ID NO: 32148 - DNA, 25 bp, Saccharomyces pastorianus
tgacacgtgtcccaacagatgattg

SEQ ID NO: 32149 - DNA, 25 bp, Saccharomyces pastorianus
ttgaaaaggcccgatatgccgcctc

SEQ ID NO: 32150 - DNA, 25 bp, Saccharomyces pastorianus
ctctgctccagcgacgagtttataa

SEQ ID NO: 32151 - DNA, 25 bp, Saccharomyces pastorianus
gttgccgttgaagcgcaatgcagat

SEQ ID NO: 32152 - DNA, 25 bp, Saccharomyces pastorianus
gaggcgaacttggatcgcgatttca

SEQ ID NO: 32153 - DNA, 25 bp, Saccharomyces pastorianus
gacattggttaactcggacttgtat

SEQ ID NO: 32154 - DNA, 25 bp, Saccharomyces pastorianus
cccggtttccatgctcatgaacata

SEQ ID NO: 32155 - DNA, 25 bp, Saccharomyces pastorianus
aatcatgcacttgtctaagcccgaa

SEQ ID NO: 32156 - DNA, 25 bp, Saccharomyces pastorianus
cgcgatttcaagttaacgagtgcaa

SEQ ID NO: 32157 - DNA, 25 bp, Saccharomyces pastorianus
attcaggttacagttgcttcctctc

SEQ ID NO: 32158 - DNA, 25 bp, Saccharomyces pastorianus
gaacatatttcctcaggtagtcttt

SEQ ID NO: 32159 - DNA, 25 bp, Saccharomyces pastorianus
actacttactgaacgttgccgttga

SEQ ID NO: 32160 - DNA, 25 bp, Saccharomyces pastorianus
ctgggtggcataccgttgcattcaa

SEQ ID NO: 32161 - DNA, 25 bp, Saccharomyces pastorianus
gataagagcatctaccacgcaaaga

SEQ ID NO: 32162 - DNA, 25 bp, Saccharomyces pastorianus
gaaaaccacgcttgtgacggcttaa

SEQ ID NO: 32163 - DNA, 25 bp, Saccharomyces pastorianus
gaaacgctgacaagctagaggcaga

SEQ ID NO: 32164 - DNA, 25 bp, Saccharomyces pastorianus
ttcgataagtgttcaagtgcagcat

SEQ ID NO: 32165 - DNA, 25 bp, Saccharomyces pastorianus
aaggtcttctagtaattccagcata

SEQ ID NO: 32166 - DNA, 25 bp, Saccharomyces pastorianus
gcaaaggccatttttgttcgaaaca

SEQ ID NO: 32167 - DNA, 25 bp, Saccharomyces pastorianus
aagaacgcttgctatttcgataagt

SEQ ID NO: 32168 - DNA, 25 bp, Saccharomyces pastorianus
aagctgcaaggaacaactacatcaa

SEQ ID NO: 32169 - DNA, 25 bp, Saccharomyces pastorianus
gacaagtcactccaaaggatccagt

SEQ ID NO: 32170 - DNA, 25 bp, Saccharomyces pastorianus
cataacatctacaggccaaagcagt

SEQ ID NO: 32171 - DNA, 25 bp, Saccharomyces pastorianus
ttaccggcctgaagcaacataacgt

SEQ ID NO: 32172 - DNA, 25 bp, Saccharomyces pastorianus
tgtttcaagatgttccccttaccaa

SEQ ID NO: 32173 - DNA, 25 bp, Saccharomyces pastorianus
accgcacttgaaggccaatttccaa

SEQ ID NO: 32174 - DNA, 25 bp, Saccharomyces pastorianus
gaggatcgccatgttgctttgaacc

SEQ ID NO: 32175 - DNA, 25 bp, Saccharomyces pastorianus
aaaccgaagcatttctgtgcctcgt

SEQ ID NO: 32176 - DNA, 25 bp, Saccharomyces pastorianus
gtggcggctctgcagacaactacat

SEQ ID NO: 32177 - DNA, 25 bp, Saccharomyces pastorianus
ggtaacagatactccgtagccagcc

SEQ ID NO: 32178 - DNA, 25 bp, Saccharomyces pastorianus
tagccaccggtgattttgctgttca

SEQ ID NO: 32179 - DNA, 25 bp, Saccharomyces pastorianus
aaataactggatcggtggcggctct

SEQ ID NO: 32180 - DNA, 25 bp, Saccharomyces pastorianus
acaggcatgattacaccgcacttga

SEQ ID NO: 32181 - DNA, 25 bp, Saccharomyces pastorianus
aagatgtgcggtttctgtggactcg

SEQ ID NO: 32182 - DNA, 25 bp, Saccharomyces pastorianus
ggtagatttacaaccactctcatta

SEQ ID NO: 32183 - DNA, 25 bp, Saccharomyces pastorianus
gccaaccttcccgagtctaaagata

SEQ ID NO: 32184 - DNA, 25 bp, Saccharomyces pastorianus
gcaacggcacttcattaagcacaga

SEQ ID NO: 32185 - DNA, 25 bp, Saccharomyces pastorianus
gagtttggactcttcagcattgact

SEQ ID NO: 32186 - DNA, 25 bp, Saccharomyces pastorianus
tactatatccttattcactgccaac

SEQ ID NO: 32187 - DNA, 25 bp, Saccharomyces pastorianus
gaattttcaagagctcccaagataa

SEQ ID NO: 32188 - DNA, 25 bp, Saccharomyces pastorianus
atactttcttatccatcgtcttcta

SEQ ID NO: 32189 - DNA, 25 bp, Saccharomyces pastorianus
gactggtctaaactcgatatcgatg

SEQ ID NO: 32190 - DNA, 25 bp, Saccharomyces pastorianus
atctcctgatgcctttttccaaaag

SEQ ID NO: 32191 - DNA, 25 bp, Saccharomyces pastorianus
actgcatcggcagaaacactctcga

SEQ ID NO: 32192 - DNA, 25 bp, Saccharomyces pastorianus
tttacgccggagctgatccagacac

SEQ ID NO: 32193 - DNA, 25 bp, Saccharomyces pastorianus
gaaagctgccattgtggatccgctc

SEQ ID NO: 32194 - DNA, 25 bp, Saccharomyces pastorianus
gaactaagttgctttcgggtggact

SEQ ID NO: 32195 - DNA, 25 bp, Saccharomyces pastorianus
agcttatattaggtggcctccggct

SEQ ID NO: 32196 - DNA, 25 bp, Saccharomyces pastorianus
taccgctgagttcgcgcacagagat

SEQ ID NO: 32197 - DNA, 25 bp, Saccharomyces pastorianus
gtgtaccgcaacgtccaaattaatg

SEQ ID NO: 32198 - DNA, 25 bp, Saccharomyces pastorianus
aagacaactttcgataccgctgagt

SEQ ID NO: 32199 - DNA, 25 bp, Saccharomyces pastorianus
aaacaagggcttctgtctcgaaaga

SEQ ID NO: 32200 - DNA, 25 bp, Saccharomyces pastorianus
aaacgcatctctatgggatctggcg

SEQ ID NO: 32201 - DNA, 25 bp, Saccharomyces pastorianus
gataagcgcctccagttcaatgaaa

SEQ ID NO: 32202 - DNA, 25 bp, Saccharomyces pastorianus
aaacgcgagtcgaggcattgtcata

SEQ ID NO: 32203 - DNA, 25 bp, Saccharomyces pastorianus
gatgttacagcactagcgcaaccac

SEQ ID NO: 32204 - DNA, 25 bp, Saccharomyces pastorianus
acggcttacatctaccatctgaata

SEQ ID NO: 32205 - DNA, 25 bp, Saccharomyces pastorianus
gctagcggagttttaccacccaggt

SEQ ID NO: 32206 - DNA, 25 bp, Saccharomyces pastorianus
acttgggcaagtacggcttacatct

SEQ ID NO: 32207 - DNA, 25 bp, Saccharomyces pastorianus
atggactcatttcatcactcctgaa

SEQ ID NO: 32208 - DNA, 25 bp, Saccharomyces pastorianus
ttccaatcccgaccaactggtaaag

SEQ ID NO: 32209 - DNA, 25 bp, Saccharomyces pastorianus
attgattgcgttagattactgccat

SEQ ID NO: 32210 - DNA, 25 bp, Saccharomyces pastorianus
actactccttggacttgtggtcagt

SEQ ID NO: 32211 - DNA, 25 bp, Saccharomyces pastorianus
agtaggctgtatgttggctgcgatt

SEQ ID NO: 32212 - DNA, 25 bp, Saccharomyces pastorianus
acttgaaccagtacgactactcctt

SEQ ID NO: 32213 - DNA, 25 bp, Saccharomyces pastorianus
gactacaatgttcgtgtcgcttcac

SEQ ID NO: 32214 - DNA, 25 bp, Saccharomyces pastorianus
gagccatttttcaaagggtcttcca

SEQ ID NO: 32215 - DNA, 25 bp, Saccharomyces pastorianus
aagattactctattgtttgggacga

SEQ ID NO: 32216 - DNA, 25 bp, Saccharomyces pastorianus
tacggcccggacttggctgaagtaa

SEQ ID NO: 32217 - DNA, 25 bp, Saccharomyces pastorianus
gataatgaaattccccggaacgcgt

SEQ ID NO: 32218 - DNA, 25 bp, Saccharomyces pastorianus
ggagacgttggtccatacaccagtt

SEQ ID NO: 32219 - DNA, 25 bp, Saccharomyces pastorianus
tcagcggacaatatcgttcgacgac

SEQ ID NO: 32220 - DNA, 25 bp, Saccharomyces pastorianus
gagaacaagcttcttcaccaagtgt

SEQ ID NO: 32221 - DNA, 25 bp, Saccharomyces pastorianus
gctcgtcctcatcatttcaaacaaa

SEQ ID NO: 32222 - DNA, 25 bp, Saccharomyces pastorianus
tatatggctaggctgcatcattgca

SEQ ID NO: 32223 - DNA, 25 bp, Saccharomyces pastorianus
attacaatcatatccgttccaccga

SEQ ID NO: 32224 - DNA, 25 bp, Saccharomyces pastorianus
tacccagttgttcctctgaaaacga

SEQ ID NO: 32225 - DNA, 25 bp, Saccharomyces pastorianus
ggaacgcgtctttcgataacacaat

SEQ ID NO: 32226 - DNA, 25 bp, Saccharomyces pastorianus
caacgatttcgtcatggttaagggt

SEQ ID NO: 32227 - DNA, 25 bp, Saccharomyces pastorianus
tcgtcatggttaagggttgtatccc

SEQ ID NO: 32228 - DNA, 25 bp, Saccharomyces pastorianus
gatggggtaccaagaaacttccaag

SEQ ID NO: 32229 - DNA, 25 bp, Saccharomyces pastorianus
ccactacggtgaaatcaacaacgat

SEQ ID NO: 32230 - DNA, 25 bp, Saccharomyces pastorianus
aaatcaacaacgatttcgtcatggt

SEQ ID NO: 32231 - DNA, 25 bp, Saccharomyces pastorianus
gatttcgtcatggttaagggttgta

SEQ ID NO: 32232 - DNA, 25 bp, Saccharomyces pastorianus
cagaacttctattaaccacaaggtt

SEQ ID NO: 32233 - DNA, 25 bp, Saccharomyces pastorianus
cttctattaaccacaaggtttacag

SEQ ID NO: 32234 - DNA, 25 bp, Saccharomyces pastorianus
agaggttaccactccagaacttcta

SEQ ID NO: 32235 - DNA, 25 bp, Saccharomyces pastorianus
ggttaccactccagaacttctatta

SEQ ID NO: 32236 - DNA, 25 bp, Saccharomyces pastorianus
ggccttggaagaagtcaacttgaaa

SEQ ID NO: 32237 - DNA, 25 bp, Saccharomyces pastorianus
gatcatctgccgtgcgagcttataa

SEQ ID NO: 32238 - DNA, 25 bp, Saccharomyces pastorianus
agcttcctgagcactttggatcatc

SEQ ID NO: 32239 - DNA, 25 bp, Saccharomyces pastorianus
gtagaaacgcatcgtacgggcccat

SEQ ID NO: 32240 - DNA, 25 bp, Saccharomyces pastorianus
gatccgcttcttgacacagcatagg

SEQ ID NO: 32241 - DNA, 25 bp, Saccharomyces pastorianus
ttctgactgcccctttgagtggttc

SEQ ID NO: 32242 - DNA, 25 bp, Saccharomyces pastorianus
gagtggttccactacggttgcgtaa

SEQ ID NO: 32243 - DNA, 25 bp, Saccharomyces pastorianus
gggctgcagctaataccactgatca

SEQ ID NO: 32244 - DNA, 25 bp, Saccharomyces pastorianus
gattaccccgagaagggctgcagct

SEQ ID NO: 32245 - DNA, 25 bp, Saccharomyces pastorianus
ttagttgatgaccagatccgcttct

SEQ ID NO: 32246 - DNA, 25 bp, Saccharomyces pastorianus
gatgcagaccatcgatctgtctaaa

SEQ ID NO: 32247 - DNA, 25 bp, Saccharomyces pastorianus
atggtggcatgcgatcgttctgact

SEQ ID NO: 32248 - DNA, 25 bp, Saccharomyces pastorianus
gacatggtgcttgcgattacatctt

SEQ ID NO: 32249 - DNA, 25 bp, Saccharomyces pastorianus
tatcccgggtccatatccaaacgaa

SEQ ID NO: 32250 - DNA, 25 bp, Saccharomyces pastorianus
atttcccaggtggttctattgccat

SEQ ID NO: 32251 - DNA, 25 bp, Saccharomyces pastorianus
taaactatctgactatatcccgggt

SEQ ID NO: 32252 - DNA, 25 bp, Saccharomyces pastorianus
ataatcttatcctctttgtacttcc

SEQ ID NO: 32253 - DNA, 25 bp, Saccharomyces pastorianus
gtcattccctagacagagtggcctg

SEQ ID NO: 32254 - DNA, 25 bp, Saccharomyces pastorianus
aggatgttaccactttcttgaattg

SEQ ID NO: 32255 - DNA, 25 bp, Saccharomyces pastorianus
attacatcttctctctgttgactgg

SEQ ID NO: 32256 - DNA, 25 bp, Saccharomyces pastorianus
tgttgactggttatcctgacgatcc

SEQ ID NO: 32257 - DNA, 25 bp, Saccharomyces pastorianus
gtacttcctatctatctgggttaag

SEQ ID NO: 32258 - DNA, 25 bp, Saccharomyces pastorianus
gaagatggtactcctgcaacaacct

SEQ ID NO: 32259 - DNA, 25 bp, Saccharomyces pastorianus
atgaaaactctacttcgcgacgttc

SEQ ID NO: 32260 - DNA, 25 bp, Saccharomyces pastorianus
tacgttgccttcattaagggccaag

SEQ ID NO: 32261 - DNA, 25 bp, Saccharomyces pastorianus
aagcatcgcccttacttgatattac

SEQ ID NO: 32262 - DNA, 25 bp, Saccharomyces pastorianus
gagatcatcccgcttactaatatta

SEQ ID NO: 32263 - DNA, 25 bp, Saccharomyces pastorianus
aattgtcaacaatctatccgatgaa

SEQ ID NO: 32264 - DNA, 25 bp, Saccharomyces pastorianus
ttgcgatcctaatgccaatagtgct

SEQ ID NO: 32265 - DNA, 25 bp, Saccharomyces pastorianus
cgcgacgttcgaagttgccaaatgg

SEQ ID NO: 32266 - DNA, 25 bp, Saccharomyces pastorianus
tgatattaccaacagatccgagaat

SEQ ID NO: 32267 - DNA, 25 bp, Saccharomyces pastorianus
gctgtagattatacgttgccttcat

SEQ ID NO: 32268 - DNA, 25 bp, Saccharomyces pastorianus
agatgccactactatgattgatata

SEQ ID NO: 32269 - DNA, 25 bp, Saccharomyces pastorianus
taacaggaagagtctctctcccaat

SEQ ID NO: 32270 - DNA, 25 bp, Saccharomyces pastorianus
gaatcatcatgagcgcttggaaccc

SEQ ID NO: 32271 - DNA, 25 bp, Saccharomyces pastorianus
ttgctgtaccaacgttcctgtgata

SEQ ID NO: 32272 - DNA, 25 bp, Saccharomyces pastorianus
gacctgcgacgatgactataccgga

SEQ ID NO: 32273 - DNA, 25 bp, Saccharomyces pastorianus
ggtgtgccatttaatatcgcctcat

SEQ ID NO: 32274 - DNA, 25 bp, Saccharomyces pastorianus
gcttggaaccctgcagattttgaca

SEQ ID NO: 32275 - DNA, 25 bp, Saccharomyces pastorianus
gaagtggtaaacctcgcctttcgtg

SEQ ID NO: 32276 - DNA, 25 bp, Saccharomyces pastorianus
gcctcatatgcgctactgactagaa

SEQ ID NO: 32277 - DNA, 25 bp, Saccharomyces pastorianus
gtgccaaatacaagacctgcgacga

SEQ ID NO: 32278 - DNA, 25 bp, Saccharomyces pastorianus
accggacaaggtatcgatcagctga

SEQ ID NO: 32279 - DNA, 25 bp, Saccharomyces pastorianus
atctgggtcctgtttatgggttcca

SEQ ID NO: 32280 - DNA, 25 bp, Saccharomyces pastorianus
tgacaagatggccttaccgccatgc

SEQ ID NO: 32281 - DNA, 25 bp, Saccharomyces pastorianus
agacatcaccttagagccggtgcga

SEQ ID NO: 32282 - DNA, 25 bp, Saccharomyces pastorianus
ttgctcatcagggtgcattcatcct

SEQ ID NO: 32283 - DNA, 25 bp, Saccharomyces pastorianus
gtcacctgggtcgagctggaaaagt

SEQ ID NO: 32284 - DNA, 25 bp, Saccharomyces pastorianus
atcacataataaatcgccctcacac

SEQ ID NO: 32285 - DNA, 25 bp, Saccharomyces pastorianus
tctgagaatgttgaaggccccttgc

SEQ ID NO: 32286 - DNA, 25 bp, Saccharomyces pastorianus
gacaggttgatcgtgccaagcgaca

SEQ ID NO: 32287 - DNA, 25 bp, Saccharomyces pastorianus
atgagtatgtccaggaccgcgacca

SEQ ID NO: 32288 - DNA, 25 bp, Saccharomyces pastorianus
caagaaacggtagccgccgagcttt

SEQ ID NO: 32289 - DNA, 25 bp, Saccharomyces pastorianus
ctctctattgccaccttcagaggaa

SEQ ID NO: 32290 - DNA, 25 bp, Saccharomyces pastorianus
tttgacgcagtttgttcgtcacctg

SEQ ID NO: 32291 - DNA, 25 bp, Saccharomyces pastorianus
agaagggttttctgcagttgctgaa

SEQ ID NO: 32292 - DNA, 25 bp, Saccharomyces pastorianus
gtttgcatcatccacaccaattgga

SEQ ID NO: 32293 - DNA, 25 bp, Saccharomyces pastorianus
atcgtgattcataaggtccctgcag

SEQ ID NO: 32294 - DNA, 25 bp, Saccharomyces pastorianus
gacggaattgcgctcggtaccacaa

SEQ ID NO: 32295 - DNA, 25 bp, Saccharomyces pastorianus
gtccctgcagttctttcgttaacta

SEQ ID NO: 32296 - DNA, 25 bp, Saccharomyces pastorianus
attcattcatggattgaccgacgga

SEQ ID NO: 32297 - DNA, 25 bp, Saccharomyces pastorianus
gtggttttgattgccatcgtgattc

SEQ ID NO: 32298 - DNA, 25 bp, Saccharomyces pastorianus
tgtggtattcgcattattcattcat

SEQ ID NO: 32299 - DNA, 25 bp, Saccharomyces pastorianus
gattcgttacttattgtggttttga

SEQ ID NO: 32300 - DNA, 25 bp, Saccharomyces pastorianus
gagtcaatcctcaacaatggatcgg

SEQ ID NO: 32301 - DNA, 25 bp, Saccharomyces pastorianus
atgttttcttgtttgcatcatccac

SEQ ID NO: 32302 - DNA, 25 bp, Saccharomyces pastorianus
attatcgacaggttggtgacgttat

SEQ ID NO: 32303 - DNA, 25 bp, Saccharomyces pastorianus
acatcattatcgctttggtcggtaa

SEQ ID NO: 32304 - DNA, 25 bp, Saccharomyces pastorianus
ggtgctgcattccttactcaaagag

SEQ ID NO: 32305 - DNA, 25 bp, Saccharomyces pastorianus
aatcttttatcaaggcacgccattg

SEQ ID NO: 32306 - DNA, 25 bp, Saccharomyces pastorianus
gaacaagcatcgaaggacatcatta

SEQ ID NO: 32307 - DNA, 25 bp, Saccharomyces pastorianus
gctcttgtagtatacgacgtgacga

SEQ ID NO: 32308 - DNA, 25 bp, Saccharomyces pastorianus
acgccattgggttaaggaactgcat

SEQ ID NO: 32309 - DNA, 25 bp, Saccharomyces pastorianus
gatttcgctgaaaacaaggagccca

SEQ ID NO: 32310 - DNA, 25 bp, Saccharomyces pastorianus
gagatttgcatcgttagcacccatg

SEQ ID NO: 32311 - DNA, 25 bp, Saccharomyces pastorianus
gacgtgacgaaaccacaatctttta

SEQ ID NO: 32312 - DNA, 25 bp, Saccharomyces pastorianus
aaggagcccactatcggtgctgcat

SEQ ID NO: 32313 - DNA, 25 bp, Saccharomyces pastorianus
gaaatgcacaggctgctcttgtagt

SEQ ID NO: 32314 - DNA, 25 bp, Saccharomyces pastorianus
gatgggaaacccttatcggatttgc

SEQ ID NO: 32315 - DNA, 25 bp, Saccharomyces pastorianus
tcgagttcaaacacggagtatcttt

SEQ ID NO: 32316 - DNA, 25 bp, Saccharomyces pastorianus
atgagtttgccaacaccgtttaagg

SEQ ID NO: 32317 - DNA, 25 bp, Saccharomyces pastorianus
gggattctggaacaccttctaacgt

SEQ ID NO: 32318 - DNA, 25 bp, Saccharomyces pastorianus
aaacgttgctactcatttaatcagg

SEQ ID NO: 32319 - DNA, 25 bp, Saccharomyces pastorianus
gttagcattccatcaccaatgagta

SEQ ID NO: 32320 - DNA, 25 bp, Saccharomyces pastorianus
cgaacgccacttccattgtgatgaa

SEQ ID NO: 32321 - DNA, 25 bp, Saccharomyces pastorianus
atacgtctcggcactagttagcatt

SEQ ID NO: 32322 - DNA, 25 bp, Saccharomyces pastorianus
gacgcctccatacgtgactgcagaa

SEQ ID NO: 32323 - DNA, 25 bp, Saccharomyces pastorianus
ggatttgcccgaagtcgctaaactt

SEQ ID NO: 32324 - DNA, 25 bp, Saccharomyces pastorianus
gacttgacggttacagtggcgtttt

SEQ ID NO: 32325 - DNA, 25 bp, Saccharomyces pastorianus
aaggccggtaagacgacgatactgt

SEQ ID NO: 32326 - DNA, 25 bp, Saccharomyces pastorianus
gcaatgaagccccaagaggtttcta

SEQ ID NO: 32327 - DNA, 25 bp, Saccharomyces pastorianus
gtggtactacttgtatgggcaaaca

SEQ ID NO: 32328 - DNA, 25 bp, Saccharomyces pastorianus
atcggtagtaatgctttgtccggac

SEQ ID NO: 32329 - DNA, 25 bp, Saccharomyces pastorianus
tggactctagcactgaaggccgtat

SEQ ID NO: 32330 - DNA, 25 bp, Saccharomyces pastorianus
gctctaggcaaattattcggctcaa

SEQ ID NO: 32331 - DNA, 25 bp, Saccharomyces pastorianus
ggattcaatgtcgaaaccgttactt

SEQ ID NO: 32332 - DNA, 25 bp, Saccharomyces pastorianus
ttccctgccactactgcattgatat

SEQ ID NO: 32333 - DNA, 25 bp, Saccharomyces pastorianus
taggcgggcaacaacgactaagacc

SEQ ID NO: 32334 - DNA, 25 bp, Saccharomyces pastorianus
aatcaaccctggtgcgtaatcggta

SEQ ID NO: 32335 - DNA, 25 bp, Saccharomyces pastorianus
taagacccctctggagacactattt

SEQ ID NO: 32336 - DNA, 25 bp, Saccharomyces pastorianus
acaaggtgtacccatcgaaatcgta

SEQ ID NO: 32337 - DNA, 25 bp, Saccharomyces pastorianus
gaatattccgaactggtgtctaaat

SEQ ID NO: 32338 - DNA, 25 bp, Saccharomyces pastorianus
gtggcggagcctgtttattccaaga

SEQ ID NO: 32339 - DNA, 25 bp, Saccharomyces pastorianus
gcaccagtgccaaaacgttcattat

SEQ ID NO: 32340 - DNA, 25 bp, Saccharomyces pastorianus
tgacatagcttttgacggtgccgat

SEQ ID NO: 32341 - DNA, 25 bp, Saccharomyces pastorianus
ggcagtatttgcacgattctgaata

SEQ ID NO: 32342 - DNA, 25 bp, Saccharomyces pastorianus
aaacgggtttgttcatcgacaatgc

SEQ ID NO: 32343 - DNA, 25 bp, Saccharomyces pastorianus
tatcgatgcggactttggcgaaatc

SEQ ID NO: 32344 - DNA, 25 bp, Saccharomyces pastorianus
gtggtctacgttgccgagagaatcg

SEQ ID NO: 32345 - DNA, 25 bp, Saccharomyces pastorianus
tattccaacaggcttccaatcaagg

SEQ ID NO: 32346 - DNA, 25 bp, Saccharomyces pastorianus
gaaatcgtaccttctgcgtatgtta

SEQ ID NO: 32347 - DNA, 25 bp, Saccharomyces pastorianus
accttcattgtcgttgctgattcaa

SEQ ID NO: 32348 - DNA, 25 bp, Saccharomyces pastorianus
ggtttattcatcgacaacgcttcaa

SEQ ID NO: 32349 - DNA, 25 bp, Saccharomyces pastorianus
ggctccattgaacagtatcctcgca

SEQ ID NO: 32350 - DNA, 25 bp, Saccharomyces pastorianus
gtagcgtctaaattcatttgcattc

SEQ ID NO: 32351 - DNA, 25 bp, Saccharomyces pastorianus
aaattgtaccttcctcatacgtgag

SEQ ID NO: 32352 - DNA, 25 bp, Saccharomyces pastorianus
taacttcattatcgatgcggatttc

SEQ ID NO: 32353 - DNA, 25 bp, Saccharomyces pastorianus
gcttcaaaagcctacttcggtaatt

SEQ ID NO: 32354 - DNA, 25 bp, Saccharomyces pastorianus
gtactagtgctaaaaccttcattgt

SEQ ID NO: 32355 - DNA, 25 bp, Saccharomyces pastorianus
aaggtggtggtgcttgtctatttca

SEQ ID NO: 32356 - DNA, 25 bp, Saccharomyces pastorianus
gtatcctcgcattgatatagcgttt

SEQ ID NO: 32357 - DNA, 25 bp, Saccharomyces pastorianus
ggaggcaaggtgttcccattgaaat

SEQ ID NO: 32358 - DNA, 25 bp, Saccharomyces pastorianus
attgacggtggtacaagggctctta

SEQ ID NO: 32359 - DNA, 25 bp, Saccharomyces pastorianus
aaaaccctcctaaggatgcatcgag

SEQ ID NO: 32360 - DNA, 25 bp, Saccharomyces pastorianus
ggcattgtacttgattttccatcgt

SEQ ID NO: 32361 - DNA, 25 bp, Saccharomyces pastorianus
gattccttatattggcagtggtaca

SEQ ID NO: 32362 - DNA, 25 bp, Saccharomyces pastorianus
ggtatccgtaatcaaatttctcctt

SEQ ID NO: 32363 - DNA, 25 bp, Saccharomyces pastorianus
gcattgtctttattactggtgtggt

SEQ ID NO: 32364 - DNA, 25 bp, Saccharomyces pastorianus
tccatcgtttttagtgggttgcatg

SEQ ID NO: 32365 - DNA, 25 bp, Saccharomyces pastorianus
gagagcagctttatctaactcgaat

SEQ ID NO: 32366 - DNA, 25 bp, Saccharomyces pastorianus
ataggtgggccaaacggcattgtac

SEQ ID NO: 32367 - DNA, 25 bp, Saccharomyces pastorianus
ggatcctttaacaacgattccttat

SEQ ID NO: 32368 - DNA, 25 bp, Saccharomyces pastorianus
ttgggccacttttacaaaaactcat

SEQ ID NO: 32369 - DNA, 25 bp, Saccharomyces pastorianus
taacttcagatcagccctcttttaa

SEQ ID NO: 32370 - DNA, 25 bp, Saccharomyces pastorianus
agtgccacgggtgctttgaagccaa

SEQ ID NO: 32371 - DNA, 25 bp, Saccharomyces pastorianus
taacccatcatctgttttcggaggc

SEQ ID NO: 32372 - DNA, 25 bp, Saccharomyces pastorianus
agatggagcaccttcctttggacag

SEQ ID NO: 32373 - DNA, 25 bp, Saccharomyces pastorianus
gatgggcatgaaccttgctggcaat

SEQ ID NO: 32374 - DNA, 25 bp, Saccharomyces pastorianus
ggtgctactaccatgtttggcggat

SEQ ID NO: 32375 - DNA, 25 bp, Saccharomyces pastorianus
aattcattcacaccgtcaacagttc

SEQ ID NO: 32376 - DNA, 25 bp, Saccharomyces pastorianus
tgggaattctgcatctggttctaat

SEQ ID NO: 32377 - DNA, 25 bp, Saccharomyces pastorianus
aataatcccgcgtcaggttctgtat

SEQ ID NO: 32378 - DNA, 25 bp, Saccharomyces pastorianus
taatgcgccttccagtttcaacttt

SEQ ID NO: 32379 - DNA, 25 bp, Saccharomyces pastorianus
gtagcaatagtacggcaggccctaa

SEQ ID NO: 32380 - DNA, 25 bp, Saccharomyces pastorianus
gatcggtctgaaatccaccattttg

SEQ ID NO: 32381 - DNA, 25 bp, Saccharomyces pastorianus
gtcagcgacgatgagggtctttctt

SEQ ID NO: 32382 - DNA, 25 bp, Saccharomyces pastorianus
gagatcgcctcattggatttatgga

SEQ ID NO: 32383 - DNA, 25 bp, Saccharomyces pastorianus
gaggtcaccagaatattccgcatac

SEQ ID NO: 32384 - DNA, 25 bp, Saccharomyces pastorianus
gacaccggtatcaggttggccaaca

SEQ ID NO: 32385 - DNA, 25 bp, Saccharomyces pastorianus
aaatccagggcttctacatgaaaac

SEQ ID NO: 32386 - DNA, 25 bp, Saccharomyces pastorianus
ggtgcttcattgttcttagatcggt

SEQ ID NO: 32387 - DNA, 25 bp, Saccharomyces pastorianus
tgccattctactcttgtccaattga

SEQ ID NO: 32388 - DNA, 25 bp, Saccharomyces pastorianus
cagtgcattctatcggtgcttcatt

SEQ ID NO: 32389 - DNA, 25 bp, Saccharomyces pastorianus
caagaagtacgcctttgccatttcc

SEQ ID NO: 32390 - DNA, 25 bp, Saccharomyces pastorianus
gttattaccatgtgccattctactc

SEQ ID NO: 32391 - DNA, 25 bp, Saccharomyces pastorianus
ggtttaggccctgcattattgagat

SEQ ID NO: 32392 - DNA, 25 bp, Saccharomyces pastorianus
gaaattgcaggcctcttccacgaag

SEQ ID NO: 32393 - DNA, 25 bp, Saccharomyces pastorianus
taatgcggctacgtttttgggtgta

SEQ ID NO: 32394 - DNA, 25 bp, Saccharomyces pastorianus
agggcggcatttcttctttgttcaa

SEQ ID NO: 32395 - DNA, 25 bp, Saccharomyces pastorianus
tattgagatctttccctgctaatgc

SEQ ID NO: 32396 - DNA, 25 bp, Saccharomyces pastorianus
gctcggcactatactttgcatctta

SEQ ID NO: 32397 - DNA, 25 bp, Saccharomyces pastorianus
aaagttgtcttgcaaacctcttcca

SEQ ID NO: 32398 - DNA, 25 bp, Saccharomyces pastorianus
aaagggtctttcattcaagctgcaa

SEQ ID NO: 32399 - DNA, 25 bp, Saccharomyces pastorianus
gttggctgttttcccgatagatacc

SEQ ID NO: 32400 - DNA, 25 bp, Saccharomyces pastorianus
gtacgggcaccggtgagttgaccat

SEQ ID NO: 32401 - DNA, 25 bp, Saccharomyces pastorianus
aaggttcattggctaccctagcaag

SEQ ID NO: 32402 - DNA, 25 bp, Saccharomyces pastorianus
atgaccaaccggatagttctgctaa

SEQ ID NO: 32403 - DNA, 25 bp, Saccharomyces pastorianus
gatgggttacgcttggctaaacaat

SEQ ID NO: 32404 - DNA, 25 bp, Saccharomyces pastorianus
ttctacggtctcattcgtttggtga

SEQ ID NO: 32405 - DNA, 25 bp, Saccharomyces pastorianus
aacaattgaacgcacctttccttga

SEQ ID NO: 32406 - DNA, 25 bp, Saccharomyces pastorianus
cacctttccttgaaacttctgctaa

SEQ ID NO: 32407 - DNA, 25 bp, Saccharomyces pastorianus
atggccctggtagtgtattgacaaa

SEQ ID NO: 32408 - DNA, 25 bp, Saccharomyces pastorianus
agacgaggcattctacggtctcatt

SEQ ID NO: 32409 - DNA, 25 bp, Saccharomyces pastorianus
gcgagaaaccctaatgctacttcat

SEQ ID NO: 32410 - DNA, 25 bp, Saccharomyces pastorianus
tcccgtggtcgtggttggtaacaag

SEQ ID NO: 32411 - DNA, 25 bp, Saccharomyces pastorianus
gctacttcatctcaaacccagaatg

SEQ ID NO: 32412 - DNA, 25 bp, Saccharomyces pastorianus
ggtgacaccaactctagtcctaatt

SEQ ID NO: 32413 - DNA, 25 bp, Saccharomyces pastorianus
gatgcgaaacccgacacattttatg

SEQ ID NO: 32414 - DNA, 25 bp, Saccharomyces pastorianus
tacagttatctaccaacccattcaa

SEQ ID NO: 32415 - DNA, 25 bp, Saccharomyces pastorianus
gtggcgcctctagtttacgatgaag

SEQ ID NO: 32416 - DNA, 25 bp, Saccharomyces pastorianus
aaagtcaccaaccataccaaggcta

SEQ ID NO: 32417 - DNA, 25 bp, Saccharomyces pastorianus
atgcacacatcccagatcacaggag

SEQ ID NO: 32418 - DNA, 25 bp, Saccharomyces pastorianus
acaggagtccgtacccgactgaaag

SEQ ID NO: 32419 - DNA, 25 bp, Saccharomyces pastorianus
atgatattcctcagcctcaatacga

SEQ ID NO: 32420 - DNA, 25 bp, Saccharomyces pastorianus
aatatgggtgcggtacctccttcta

SEQ ID NO: 32421 - DNA, 25 bp, Saccharomyces pastorianus
aaagccctagtagagtggcgcctct

SEQ ID NO: 32422 - DNA, 25 bp, Saccharomyces pastorianus
gtgctgtcattgttctggtaaccaa

SEQ ID NO: 32423 - DNA, 25 bp, Saccharomyces pastorianus
ccagttcgtttgttggtgctgtcat

SEQ ID NO: 32424 - DNA, 25 bp, Saccharomyces pastorianus
gtagaaactacgcatccgacgcaag

SEQ ID NO: 32425 - DNA, 25 bp, Saccharomyces pastorianus
gaagcctctttactggatattgacc

SEQ ID NO: 32426 - DNA, 25 bp, Saccharomyces pastorianus
agccccaatatcatctccaggaaat

SEQ ID NO: 32427 - DNA, 25 bp, Saccharomyces pastorianus
ggaaaagcaataccaccacaggcct

SEQ ID NO: 32428 - DNA, 25 bp, Saccharomyces pastorianus
cctcacctgcgtcatctaaaattga

SEQ ID NO: 32429 - DNA, 25 bp, Saccharomyces pastorianus
gcgaataatcagtccaagggcttac

SEQ ID NO: 32430 - DNA, 25 bp, Saccharomyces pastorianus
gtacgagtaatttggcctcacctgc

SEQ ID NO: 32431 - DNA, 25 bp, Saccharomyces pastorianus
accacctgcttctgcaacagtagag

SEQ ID NO: 32432 - DNA, 25 bp, Saccharomyces pastorianus
aactgactcctacatcatcattttc

SEQ ID NO: 32433 - DNA, 25 bp, Saccharomyces pastorianus
ccgcctcctggatttagccaaaata

SEQ ID NO: 32434 - DNA, 25 bp, Saccharomyces pastorianus
gtttctttaacatcagcttcgctac

SEQ ID NO: 32435 - DNA, 25 bp, Saccharomyces pastorianus
gatgctacagtaccgaattcaacta

SEQ ID NO: 32436 - DNA, 25 bp, Saccharomyces pastorianus
agcttactggcatctactgaaggca

SEQ ID NO: 32437 - DNA, 25 bp, Saccharomyces pastorianus
ttgtcgtacattccgtttagtgata

SEQ ID NO: 32438 - DNA, 25 bp, Saccharomyces pastorianus
agaggctggatctgatgctgatatc

SEQ ID NO: 32439 - DNA, 25 bp, Saccharomyces pastorianus
tgatgctccactgttcaggattgga

SEQ ID NO: 32440 - DNA, 25 bp, Saccharomyces pastorianus
acgagttcaccggtaccagaaatgg

SEQ ID NO: 32441 - DNA, 25 bp, Saccharomyces pastorianus
gactggttggcactgaacttgcgtt

SEQ ID NO: 32442 - DNA, 25 bp, Saccharomyces pastorianus
gcgttgatatacctagcgacagcta

SEQ ID NO: 32443 - DNA, 25 bp, Saccharomyces pastorianus
tccggtttagacactgatgctccac

SEQ ID NO: 32444 - DNA, 25 bp, Saccharomyces pastorianus
ggaaactgtctacatcagcgttgat

SEQ ID NO: 32445 - DNA, 25 bp, Saccharomyces pastorianus
tgaacttgcgttcccaaatgctgca

SEQ ID NO: 32446 - DNA, 25 bp, Saccharomyces pastorianus
gataccagctggtgcaaagcgcaaa

SEQ ID NO: 32447 - DNA, 25 bp, Saccharomyces pastorianus
gtcttaacgttggtggcggattcaa

SEQ ID NO: 32448 - DNA, 25 bp, Saccharomyces pastorianus
gtcacagctgtgaccttgataaaat

SEQ ID NO: 32449 - DNA, 25 bp, Saccharomyces pastorianus
gacgaacctgttaacgttgtcacag

SEQ ID NO: 32450 - DNA, 25 bp, Saccharomyces pastorianus
atactctatagacccaattggatat

SEQ ID NO: 32451 - DNA, 25 bp, Saccharomyces pastorianus
aattttgactgactacgagaacgag

SEQ ID NO: 32452 - DNA, 25 bp, Saccharomyces pastorianus
atgggcaaacccaagctcattgtat

SEQ ID NO: 32453 - DNA, 25 bp, Saccharomyces pastorianus
atatgttcgggataccagctggtgc

SEQ ID NO: 32454 - DNA, 25 bp, Saccharomyces pastorianus
ttgggctgccccttaacaagacatt

SEQ ID NO: 32455 - DNA, 25 bp, Saccharomyces pastorianus
gctagctcttctccccgaagatatg

SEQ ID NO: 32456 - DNA, 25 bp, Saccharomyces pastorianus
attataacgtagttgggctgcccct

SEQ ID NO: 32457 - DNA, 25 bp, Saccharomyces pastorianus
gacgctcagaagcatctttatgact

SEQ ID NO: 32458 - DNA, 25 bp, Saccharomyces pastorianus
aatggtcagtctcatgacgctcaga

SEQ ID NO: 32459 - DNA, 25 bp, Saccharomyces pastorianus
gtcggatcctgatacaaatgcatta

SEQ ID NO: 32460 - DNA, 25 bp, Saccharomyces pastorianus
gaagccgcaccatcacatctatgaa

SEQ ID NO: 32461 - DNA, 25 bp, Saccharomyces pastorianus
tagagattcctataccagcgatgag

SEQ ID NO: 32462 - DNA, 25 bp, Saccharomyces pastorianus
acctcggaaacggttggtcgcgatg

SEQ ID NO: 32463 - DNA, 25 bp, Saccharomyces pastorianus
gaagtttgactctcactggagcgct

SEQ ID NO: 32464 - DNA, 25 bp, Saccharomyces pastorianus
agcatacttcttaacgtcggatcct

SEQ ID NO: 32465 - DNA, 25 bp, Saccharomyces pastorianus
atgcatcattttgccagtctatgaa

SEQ ID NO: 32466 - DNA, 25 bp, Saccharomyces pastorianus
cactggagcgctttgaaacctaata

SEQ ID NO: 32467 - DNA, 25 bp, Saccharomyces pastorianus
aagggtcactcgaaaccatctaccg

SEQ ID NO: 32468 - DNA, 25 bp, Saccharomyces pastorianus
atctccttgactatgactatcgacc

SEQ ID NO: 32469 - DNA, 25 bp, Saccharomyces pastorianus
gcatcttttatcgataggcctacag

SEQ ID NO: 32470 - DNA, 25 bp, Saccharomyces pastorianus
gaactttctatctccttgactatga

SEQ ID NO: 32471 - DNA, 25 bp, Saccharomyces pastorianus
gcaatgtggcttcggaaaacggtaa

SEQ ID NO: 32472 - DNA, 25 bp, Saccharomyces pastorianus
gacatcatgtcttcacacaatttga

SEQ ID NO: 32473 - DNA, 25 bp, Saccharomyces pastorianus
cgacctatccaatcattctctttaa

SEQ ID NO: 32474 - DNA, 25 bp, Saccharomyces pastorianus
ggcctacagagcgacctaaaacaac

SEQ ID NO: 32475 - DNA, 25 bp, Saccharomyces pastorianus
tcattgggttattcctctgaagagg

SEQ ID NO: 32476 - DNA, 25 bp, Saccharomyces pastorianus
gaggtcatctgtttggcatctttta

SEQ ID NO: 32477 - DNA, 25 bp, Saccharomyces pastorianus
gatgatcgaaccctttttagaaata

SEQ ID NO: 32478 - DNA, 25 bp, Saccharomyces pastorianus
gaggcgtgttatcttcattgggtta

SEQ ID NO: 32479 - DNA, 25 bp, Saccharomyces pastorianus
cgtgctctacctgatgttgttgtga

SEQ ID NO: 32480 - DNA, 25 bp, Saccharomyces pastorianus
aagacttgatgccaaagccatgttt

SEQ ID NO: 32481 - DNA, 25 bp, Saccharomyces pastorianus
gacccacgtcacattcaattgctgg

SEQ ID NO: 32482 - DNA, 25 bp, Saccharomyces pastorianus
aacagatcatttattcgacgccgcc

SEQ ID NO: 32483 - DNA, 25 bp, Saccharomyces pastorianus
gactgcgagatgtcatgtgcacaga

SEQ ID NO: 32484 - DNA, 25 bp, Saccharomyces pastorianus
ttttccgtccttggtattgaagctg

SEQ ID NO: 32485 - DNA, 25 bp, Saccharomyces pastorianus
atcggtaccggttcattcaaagtca

SEQ ID NO: 32486 - DNA, 25 bp, Saccharomyces pastorianus
ctgttttacagttagcctcctttga

SEQ ID NO: 32487 - DNA, 25 bp, Saccharomyces pastorianus
gcacagacggtgttattggttctaa

SEQ ID NO: 32488 - DNA, 25 bp, Saccharomyces pastorianus
aggtttagctgacatatcccgtgcg

SEQ ID NO: 32489 - DNA, 25 bp, Saccharomyces pastorianus
aatgcaacagctacgtcgtgctcta

SEQ ID NO: 32490 - DNA, 25 bp, Saccharomyces pastorianus
ggacggtttcagttctgacgatcgt

SEQ ID NO: 32491 - DNA, 25 bp, Saccharomyces pastorianus
gtgcagcacaaaccaatgccacatt

SEQ ID NO: 32492 - DNA, 25 bp, Saccharomyces pastorianus
atagagtcgatgttctagaccccgc

SEQ ID NO: 32493 - DNA, 25 bp, Saccharomyces pastorianus
tggctgccaccaatagagtcgatgt

SEQ ID NO: 32494 - DNA, 25 bp, Saccharomyces pastorianus
gatgcattcgcattagccaaggaaa

SEQ ID NO: 32495 - DNA, 25 bp, Saccharomyces pastorianus
gcaagaactcgctagatcgactgat

SEQ ID NO: 32496 - DNA, 25 bp, Saccharomyces pastorianus
cagcccctcaactagtgcaaatgta

SEQ ID NO: 32497 - DNA, 25 bp, Saccharomyces pastorianus
gaaaaatcgagttcccattgccatc

SEQ ID NO: 32498 - DNA, 25 bp, Saccharomyces pastorianus
catttctaaaattggcagcccctca

SEQ ID NO: 32499 - DNA, 25 bp, Saccharomyces pastorianus
gtaaaactttattggcgcgtgcgtg

SEQ ID NO: 32500 - DNA, 25 bp, Saccharomyces pastorianus
tagaccccgctctgttgagatcggg

SEQ ID NO: 32501 - DNA, 25 bp, Saccharomyces pastorianus
gaagaccacttttgccgtatatata

SEQ ID NO: 32502 - DNA, 25 bp, Saccharomyces pastorianus
ggcacactggctacggaggatcatt

SEQ ID NO: 32503 - DNA, 25 bp, Saccharomyces pastorianus
gcaccttagagttcgctgtttttag

SEQ ID NO: 32504 - DNA, 25 bp, Saccharomyces pastorianus
gttcgctgtttttaggcacactggc

SEQ ID NO: 32505 - DNA, 25 bp, Saccharomyces pastorianus
aaatccaaggtatcgtcattttctt

SEQ ID NO: 32506 - DNA, 25 bp, Saccharomyces pastorianus
attaactttcgatagcaccttagag

SEQ ID NO: 32507 - DNA, 25 bp, Saccharomyces pastorianus
gcaaccattaataaagcccgcatct

SEQ ID NO: 32508 - DNA, 25 bp, Saccharomyces pastorianus
gatttgtaccaggaaacgtgtcatt

SEQ ID NO: 32509 - DNA, 25 bp, Saccharomyces pastorianus
ataatccaaatatcgccagtgcaag

SEQ ID NO: 32510 - DNA, 25 bp, Saccharomyces pastorianus
gagcctggatctttatcggtagaaa

SEQ ID NO: 32511 - DNA, 25 bp, Saccharomyces pastorianus
agaggactcattttttgaattacac

SEQ ID NO: 32512 - DNA, 25 bp, Saccharomyces pastorianus
gtgacagtgatgatcgcgagtatta

SEQ ID NO: 32513 - DNA, 25 bp, Saccharomyces pastorianus
atgacgacgatgagccaaaaatact

SEQ ID NO: 32514 - DNA, 25 bp, Saccharomyces pastorianus
ttcgctgcctctgaacagtttgatt

SEQ ID NO: 32515 - DNA, 25 bp, Saccharomyces pastorianus
acaatgatcacggaagtacttcaga

SEQ ID NO: 32516 - DNA, 25 bp, Saccharomyces pastorianus
gtttaattgcccatgacaatgaacg

SEQ ID NO: 32517 - DNA, 25 bp, Saccharomyces pastorianus
cagacggtaagttcgatttgttgaa

SEQ ID NO: 32518 - DNA, 25 bp, Saccharomyces pastorianus
cttggttaggtcattaggtggctta

SEQ ID NO: 32519 - DNA, 25 bp, Saccharomyces pastorianus
aggtccctgcacttggttaggtcat

SEQ ID NO: 32520 - DNA, 25 bp, Saccharomyces pastorianus
aagatgagatattcaggtccctgca

SEQ ID NO: 32521 - DNA, 25 bp, Saccharomyces pastorianus
atgaacgaaatttcgctgcctctga

SEQ ID NO: 32522 - DNA, 25 bp, Saccharomyces pastorianus
tgggtcttaatatttttcctgaaag

SEQ ID NO: 32523 - DNA, 25 bp, Saccharomyces pastorianus
gtaacgtcttgagtgtaccaactaa

SEQ ID NO: 32524 - DNA, 25 bp, Saccharomyces pastorianus
gttgaagcttattccccattgggta

SEQ ID NO: 32525 - DNA, 25 bp, Saccharomyces pastorianus
agtggagctacacccattattgcct

SEQ ID NO: 32526 - DNA, 25 bp, Saccharomyces pastorianus
ctgacgaggactttgaggccataaa

SEQ ID NO: 32527 - DNA, 25 bp, Saccharomyces pastorianus
taaagcagatggctctcgtccagta

SEQ ID NO: 32528 - DNA, 25 bp, Saccharomyces pastorianus
tgaaggcggttggtgtctctaactt

SEQ ID NO: 32529 - DNA, 25 bp, Saccharomyces pastorianus
aagtgttcactttatctgacgagga

SEQ ID NO: 32530 - DNA, 25 bp, Saccharomyces pastorianus
ccacgtggtcattagctggcatgca

SEQ ID NO: 32531 - DNA, 25 bp, Saccharomyces pastorianus
tgatgcattggcctgtccgcttaga

SEQ ID NO: 32532 - DNA, 25 bp, Saccharomyces pastorianus
gggtagcactaatgctccactattg

SEQ ID NO: 32533 - DNA, 25 bp, Saccharomyces pastorianus
gttgtattgcccaaatccgtcaatc

SEQ ID NO: 32534 - DNA, 25 bp, Saccharomyces pastorianus
acagctctcggatatgtgcgtacca

SEQ ID NO: 32535 - DNA, 25 bp, Saccharomyces pastorianus
atgaaagctcatcacgttcttccta

SEQ ID NO: 32536 - DNA, 25 bp, Saccharomyces pastorianus
gatgcatgcttagctggccctcaat

SEQ ID NO: 32537 - DNA, 25 bp, Saccharomyces pastorianus
ctcaatgtgtgcctctcttagaatt

SEQ ID NO: 32538 - DNA, 25 bp, Saccharomyces pastorianus
taacggatggactacacttctctgg

SEQ ID NO: 32539 - DNA, 25 bp, Saccharomyces pastorianus
aatgagcccaacattgccatggcca

SEQ ID NO: 32540 - DNA, 25 bp, Saccharomyces pastorianus
ggtgatgcctggaagagcctactaa

SEQ ID NO: 32541 - DNA, 25 bp, Saccharomyces pastorianus
caagtgggcactgaaggttcttcct

SEQ ID NO: 32542 - DNA, 25 bp, Saccharomyces pastorianus
acagtctattctgatgcgttagcaa

SEQ ID NO: 32543 - DNA, 25 bp, Saccharomyces pastorianus
gttagcaaagctggccgacgacgaa

SEQ ID NO: 32544 - DNA, 25 bp, Saccharomyces pastorianus
atctttttcggtgccaacgatgcat

SEQ ID NO: 32545 - DNA, 25 bp, Saccharomyces pastorianus
aaagggttcctgtctagacggtgtg

SEQ ID NO: 32546 - DNA, 25 bp, Saccharomyces pastorianus
tgaagtcactatagtctctgcccat

SEQ ID NO: 32547 - DNA, 25 bp, Saccharomyces pastorianus
gaaagactttgacgttccatttgaa

SEQ ID NO: 32548 - DNA, 25 bp, Saccharomyces pastorianus
gacggtgtggattcgttacattcaa

SEQ ID NO: 32549 - DNA, 25 bp, Saccharomyces pastorianus
ttaccagtaatgtctgctgcctgtg

SEQ ID NO: 32550 - DNA, 25 bp, Saccharomyces pastorianus
gtggtgcagctcatttgccaggtat

SEQ ID NO: 32551 - DNA, 25 bp, Saccharomyces pastorianus
tatgccatctctgctagtaagcgtg

SEQ ID NO: 32552 - DNA, 25 bp, Saccharomyces pastorianus
gctgcctgtgcggttttgaaagact

SEQ ID NO: 32553 - DNA, 25 bp, Saccharomyces pastorianus
caagacaataatcgccggtgccggt

SEQ ID NO: 32554 - DNA, 25 bp, Saccharomyces pastorianus
gccatcagactgcttggtgcttatg

SEQ ID NO: 32555 - DNA, 25 bp, Saccharomyces pastorianus
acaaatgccgcattgttggccatca

SEQ ID NO: 32556 - DNA, 25 bp, Saccharomyces pastorianus
gcctggtttgcgacctatgaactaa

SEQ ID NO: 32557 - DNA, 25 bp, Saccharomyces pastorianus
gaagcacacaaacgtttctccgtta

SEQ ID NO: 32558 - DNA, 25 bp, Saccharomyces pastorianus
gacaggcatactcttgatgacccga

SEQ ID NO: 32559 - DNA, 25 bp, Saccharomyces pastorianus
gttgccaacttacagagtacctcta

SEQ ID NO: 32560 - DNA, 25 bp, Saccharomyces pastorianus
ttccctgcagatacggtgaagtcaa

SEQ ID NO: 32561 - DNA, 25 bp, Saccharomyces pastorianus
gcaagcctggtactgacacctgtag

SEQ ID NO: 32562 - DNA, 25 bp, Saccharomyces pastorianus
gtgctggtttggcattcaacgctag

SEQ ID NO: 32563 - DNA, 25 bp, Saccharomyces pastorianus
ggacaatcagggacttttattcgag

SEQ ID NO: 32564 - DNA, 25 bp, Saccharomyces pastorianus
agagtcttggaggtatcgcctggtt

SEQ ID NO: 32565 - DNA, 25 bp, Saccharomyces pastorianus
acactctttagagctgtgccagcca

SEQ ID NO: 32566 - DNA, 25 bp, Saccharomyces pastorianus
tcaacgctagtattttccctgcaga

SEQ ID NO: 32567 - DNA, 25 bp, Saccharomyces pastorianus
taacgttactggaacgagtccgctc

SEQ ID NO: 32568 - DNA, 25 bp, Saccharomyces pastorianus
tgggacgccaggctgtttctgccaa

SEQ ID NO: 32569 - DNA, 25 bp, Saccharomyces pastorianus
gagtccgctccgatatcaggaaggc

SEQ ID NO: 32570 - DNA, 25 bp, Saccharomyces pastorianus
gaagcactacgccagttgaaaacag

SEQ ID NO: 32571 - DNA, 25 bp, Saccharomyces pastorianus
aagactctgacactacatcgctgaa

SEQ ID NO: 32572 - DNA, 25 bp, Saccharomyces pastorianus
gtggtttatcacgtctgggacgcca

SEQ ID NO: 32573 - DNA, 25 bp, Saccharomyces pastorianus
caagctcgcagattcaggtccagaa

SEQ ID NO: 32574 - DNA, 25 bp, Saccharomyces pastorianus
aagacgatggatgtgcctcccaaga

SEQ ID NO: 32575 - DNA, 25 bp, Saccharomyces pastorianus
gcggattacatccaacatgcttatt

SEQ ID NO: 32576 - DNA, 25 bp, Saccharomyces pastorianus
caccgatacttctcagactgtcaag

SEQ ID NO: 32577 - DNA, 25 bp, Saccharomyces pastorianus
ggaagcaatggctcgcctggtacga

SEQ ID NO: 32578 - DNA, 25 bp, Saccharomyces pastorianus
gatatcctatctgacttgaactctg

SEQ ID NO: 32579 - DNA, 25 bp, Saccharomyces pastorianus
gaatgcagttttgtctaccatcgca

SEQ ID NO: 32580 - DNA, 25 bp, Saccharomyces pastorianus
tgaagctgttcatggttctgctcca

SEQ ID NO: 32581 - DNA, 25 bp, Saccharomyces pastorianus
gcgctacttttgtcctcagttatga

SEQ ID NO: 32582 - DNA, 25 bp, Saccharomyces pastorianus
gaaccggcgatttggctggtactgc

SEQ ID NO: 32583 - DNA, 25 bp, Saccharomyces pastorianus
tttgccccggtgttgttcaatccat

SEQ ID NO: 32584 - DNA, 25 bp, Saccharomyces pastorianus
tgggtttaactccttctgcgaatat

SEQ ID NO: 32585 - DNA, 25 bp, Saccharomyces pastorianus
tgtctctgtctgtccaaatctttac

SEQ ID NO: 32586 - DNA, 25 bp, Saccharomyces pastorianus
gaggcctccgagagagtcatcagat

SEQ ID NO: 32587 - DNA, 25 bp, Saccharomyces pastorianus
tggtcttttcgttagtgttgccaaa

SEQ ID NO: 32588 - DNA, 25 bp, Saccharomyces pastorianus
gttctgctccagatattgccggaaa

SEQ ID NO: 32589 - DNA, 25 bp, Saccharomyces pastorianus
gaagggtccggtactgatgcagaat

SEQ ID NO: 32590 - DNA, 25 bp, Saccharomyces pastorianus
attgccggagctgttgctggtcaaa

SEQ ID NO: 32591 - DNA, 25 bp, Saccharomyces pastorianus
gagttgctgttgtcgaatctccagg

SEQ ID NO: 32592 - DNA, 25 bp, Saccharomyces pastorianus
atgggtggtgatgcattccctggta

SEQ ID NO: 32593 - DNA, 25 bp, Saccharomyces pastorianus
gaatcggtattcagcctccaaaaat

SEQ ID NO: 32594 - DNA, 25 bp, Saccharomyces pastorianus
ttggccaatctctagtcatcggtat

SEQ ID NO: 32595 - DNA, 25 bp, Saccharomyces pastorianus
gggtcattctggtgccattgtggaa

SEQ ID NO: 32596 - DNA, 25 bp, Saccharomyces pastorianus
cattccctggtactgatttcatcga

SEQ ID NO: 32597 - DNA, 25 bp, Saccharomyces pastorianus
atagaagccgctcaattcctgaaag

SEQ ID NO: 32598 - DNA, 25 bp, Saccharomyces pastorianus
tatgaggctgtccaacaaaccacaa

SEQ ID NO: 32599 - DNA, 25 bp, Saccharomyces pastorianus
agagtaagccaatgcccgtggcatc

SEQ ID NO: 32600 - DNA, 25 bp, Saccharomyces pastorianus
gggaatttataacgtcgatactcta

SEQ ID NO: 32601 - DNA, 25 bp, Saccharomyces pastorianus
tcgccaaaagtgatgccaacgccaa

SEQ ID NO: 32602 - DNA, 25 bp, Saccharomyces pastorianus
cacaaggacttgatctaccagctat

SEQ ID NO: 32603 - DNA, 25 bp, Saccharomyces pastorianus
aatcaggagttgtcaccaaagcttg

SEQ ID NO: 32604 - DNA, 25 bp, Saccharomyces pastorianus
ttctagcctctagggtaccgaaata

SEQ ID NO: 32605 - DNA, 25 bp, Saccharomyces pastorianus
gtgtcatagcggcaacgtatcagaa

SEQ ID NO: 32606 - DNA, 25 bp, Saccharomyces pastorianus
gagcagaaatcaatccctacgtttt

SEQ ID NO: 32607 - DNA, 25 bp, Saccharomyces pastorianus
atttctgacatcctagaccaattca

SEQ ID NO: 32608 - DNA, 25 bp, Saccharomyces pastorianus
gtttcatatgttaagcagcactacc

SEQ ID NO: 32609 - DNA, 25 bp, Saccharomyces pastorianus
gcttgacgacgagttgcttattaat

SEQ ID NO: 32610 - DNA, 25 bp, Saccharomyces pastorianus
ggaagcccactttcattacaatcag

SEQ ID NO: 32611 - DNA, 25 bp, Saccharomyces pastorianus
ggaagcctcgtttcacttcagctac

SEQ ID NO: 32612 - DNA, 25 bp, Saccharomyces pastorianus
ctttgctttagggtttgatctcgat

SEQ ID NO: 32613 - DNA, 25 bp, Saccharomyces pastorianus
gaccccggtgccttgcaaaaaggtg

SEQ ID NO: 32614 - DNA, 25 bp, Saccharomyces pastorianus
tcctccattggtagaacacttgaag

SEQ ID NO: 32615 - DNA, 25 bp, Saccharomyces pastorianus
cgatttcatcaaggcctttgcttta

SEQ ID NO: 32616 - DNA, 25 bp, Saccharomyces pastorianus
gatgattccattgcgctactaagac

SEQ ID NO: 32617 - DNA, 25 bp, Saccharomyces pastorianus
tggaccaagatttatcctccattgg

SEQ ID NO: 32618 - DNA, 25 bp, Saccharomyces pastorianus
aagaattgtcttggccgactccaaa

SEQ ID NO: 32619 - DNA, 25 bp, Saccharomyces pastorianus
aaattatggtcccaccacacagact

SEQ ID NO: 32620 - DNA, 25 bp, Saccharomyces pastorianus
aggagaccatctgtcgagggccatt

SEQ ID NO: 32621 - DNA, 25 bp, Saccharomyces pastorianus
gtcgagggccattggtcgtattgct

SEQ ID NO: 32622 - DNA, 25 bp, Saccharomyces pastorianus
ttcatatctgtggtatctgcgggtt

SEQ ID NO: 32623 - DNA, 25 bp, Saccharomyces pastorianus
tgattgtatgatcgctcacggtgct

SEQ ID NO: 32624 - DNA, 25 bp, Saccharomyces pastorianus
atgactgtggcgcatttaatcgaat

SEQ ID NO: 32625 - DNA, 25 bp, Saccharomyces pastorianus
tgcgggttgatgacagttattgcca

SEQ ID NO: 32626 - DNA, 25 bp, Saccharomyces pastorianus
ctcacggtgctgcttcatttttaaa

SEQ ID NO: 32627 - DNA, 25 bp, Saccharomyces pastorianus
gacatctaccaaatccatattccat

SEQ ID NO: 32628 - DNA, 25 bp, Saccharomyces pastorianus
tgaaggtgacgcttctccattcaca

SEQ ID NO: 32629 - DNA, 25 bp, Saccharomyces pastorianus
gtcctacatattaccaacgtttaag

SEQ ID NO: 32630 - DNA, 25 bp, Saccharomyces pastorianus
taaggtggctgcattatctggtaat

SEQ ID NO: 32631 - DNA, 25 bp, Saccharomyces pastorianus
atccgacgccttcagagttcatatc

SEQ ID NO: 32632 - DNA, 25 bp, Saccharomyces pastorianus
gatgacaagatccacgccagagccc

SEQ ID NO: 32633 - DNA, 25 bp, Saccharomyces pastorianus
ttcactagtaccgaatttcccaatg

SEQ ID NO: 32634 - DNA, 25 bp, Saccharomyces pastorianus
tttccaagaacctactacctgtcaa

SEQ ID NO: 32635 - DNA, 25 bp, Saccharomyces pastorianus
gaggctgaggccctttgttacagaa

SEQ ID NO: 32636 - DNA, 25 bp, Saccharomyces pastorianus
ggctattttcctcggtttacaatat

SEQ ID NO: 32637 - DNA, 25 bp, Saccharomyces pastorianus
aacggtaaccgtgattcttcagata

SEQ ID NO: 32638 - DNA, 25 bp, Saccharomyces pastorianus
ttcacaacaatcatcctcttcttat

SEQ ID NO: 32639 - DNA, 25 bp, Saccharomyces pastorianus
tactccgatcgatgcctttttgaat

SEQ ID NO: 32640 - DNA, 25 bp, Saccharomyces pastorianus
gaatctcaaggcaagctcaccgggt

SEQ ID NO: 32641 - DNA, 25 bp, Saccharomyces pastorianus
ggtttgcagaagacgccaacgacaa

SEQ ID NO: 32642 - DNA, 25 bp, Saccharomyces pastorianus
gattcttcagatagtggtacccagt

SEQ ID NO: 32643 - DNA, 25 bp, Saccharomyces pastorianus
tgtcaaaggcttccgatttccttca

SEQ ID NO: 32644 - DNA, 25 bp, Saccharomyces pastorianus
gaaagcgctactgacacttgtaagt

SEQ ID NO: 32645 - DNA, 25 bp, Saccharomyces pastorianus
atcgcaggtgtctttttgtattggc

SEQ ID NO: 32646 - DNA, 25 bp, Saccharomyces pastorianus
aagcccttttgtctgttggtgtcgc

SEQ ID NO: 32647 - DNA, 25 bp, Saccharomyces pastorianus
aatgggtttgctcgttatatctttc

SEQ ID NO: 32648 - DNA, 25 bp, Saccharomyces pastorianus
gctgaaagtgctgctaacctcggtt

SEQ ID NO: 32649 - DNA, 25 bp, Saccharomyces pastorianus
acctcggttctctgttgtttactat

SEQ ID NO: 32650 - DNA, 25 bp, Saccharomyces pastorianus
tacccaatcggcttttacgcaaatg

SEQ ID NO: 32651 - DNA, 25 bp, Saccharomyces pastorianus
acttagccagcgtcaattcatatta

SEQ ID NO: 32652 - DNA, 25 bp, Saccharomyces pastorianus
tgacttacttcattcaagccctttt

SEQ ID NO: 32653 - DNA, 25 bp, Saccharomyces pastorianus
gtgctttgttttggctattctccat

SEQ ID NO: 32654 - DNA, 25 bp, Saccharomyces pastorianus
aggccggcactggttatttgactga

SEQ ID NO: 32655 - DNA, 25 bp, Saccharomyces pastorianus
tctttgctttcgttgggctaatatc

SEQ ID NO: 32656 - DNA, 25 bp, Saccharomyces pastorianus
agctggtttattatcgtgcacttcc

SEQ ID NO: 32657 - DNA, 25 bp, Saccharomyces pastorianus
aatcgccatgtgttgcatctggaaa

SEQ ID NO: 32658 - DNA, 25 bp, Saccharomyces pastorianus
aaatggtatcgtcctcatcttctgt

SEQ ID NO: 32659 - DNA, 25 bp, Saccharomyces pastorianus
gtgatcccagaagagtccattttta

SEQ ID NO: 32660 - DNA, 25 bp, Saccharomyces pastorianus
aattcggtcatcttgtcacagtctt

SEQ ID NO: 32661 - DNA, 25 bp, Saccharomyces pastorianus
accatgacgcgcaacttagatctac

SEQ ID NO: 32662 - DNA, 25 bp, Saccharomyces pastorianus
agagcaaattgctatctcggtcatt

SEQ ID NO: 32663 - DNA, 25 bp, Saccharomyces pastorianus
aattgtgtacgcttcattctttgct

SEQ ID NO: 32664 - DNA, 25 bp, Saccharomyces pastorianus
agcttgcccctttgaaattcgatga

SEQ ID NO: 32665 - DNA, 25 bp, Saccharomyces pastorianus
atcttctgtagttcctgtgatccca

SEQ ID NO: 32666 - DNA, 25 bp, Saccharomyces pastorianus
ggaagccccaattaaaccctctgag

SEQ ID NO: 32667 - DNA, 25 bp, Saccharomyces pastorianus
atgttggtgaccagtttgccccagt

SEQ ID NO: 32668 - DNA, 25 bp, Saccharomyces pastorianus
gcctctaaaaggcaggtcccagtta

SEQ ID NO: 32669 - DNA, 25 bp, Saccharomyces pastorianus
gccggatgtacactttggatagctt

SEQ ID NO: 32670 - DNA, 25 bp, Saccharomyces pastorianus
gatagcttcccctcaagaaactgta

SEQ ID NO: 32671 - DNA, 25 bp, Saccharomyces pastorianus
tgccccagtcggatcagcaaatgat

SEQ ID NO: 32672 - DNA, 25 bp, Saccharomyces pastorianus
cattggactttgctgagagaacttt

SEQ ID NO: 32673 - DNA, 25 bp, Saccharomyces pastorianus
gccgtaggcatcgttccaggtgaaa

SEQ ID NO: 32674 - DNA, 25 bp, Saccharomyces pastorianus
aaaccctctgagaccttgcatgttg

SEQ ID NO: 32675 - DNA, 25 bp, Saccharomyces pastorianus
aggttggtctcttgatgatgtggaa

SEQ ID NO: 32676 - DNA, 25 bp, Saccharomyces pastorianus
aatactttagagtcctttgcgcctt

SEQ ID NO: 32677 - DNA, 25 bp, Saccharomyces pastorianus
tgactctaacgcaacaacccaagat

SEQ ID NO: 32678 - DNA, 25 bp, Saccharomyces pastorianus
agcactaccggccatggtgatgatg

SEQ ID NO: 32679 - DNA, 25 bp, Saccharomyces pastorianus
aattcctttgttacagctacgaacg

SEQ ID NO: 32680 - DNA, 25 bp, Saccharomyces pastorianus
caatttgttgggtatatccggcggt

SEQ ID NO: 32681 - DNA, 25 bp, Saccharomyces pastorianus
gaatgtcaagatcctttccaaatga

SEQ ID NO: 32682 - DNA, 25 bp, Saccharomyces pastorianus
gaaaggttcccctactgtagatcaa

SEQ ID NO: 32683 - DNA, 25 bp, Saccharomyces pastorianus
gagaccgcaagcaaatcgcaccgta

SEQ ID NO: 32684 - DNA, 25 bp, Saccharomyces pastorianus
cattcatacctgtgagcactaccgg

SEQ ID NO: 32685 - DNA, 25 bp, Saccharomyces pastorianus
gtatgccaccctaatgaagcggaga

SEQ ID NO: 32686 - DNA, 25 bp, Saccharomyces pastorianus
ggagtagcgccaagagccacatcag

SEQ ID NO: 32687 - DNA, 25 bp, Saccharomyces pastorianus
aaggaatctccataaccccaattat

SEQ ID NO: 32688 - DNA, 25 bp, Saccharomyces pastorianus
gatcgggtccaacattgaactgcat

SEQ ID NO: 32689 - DNA, 25 bp, Saccharomyces pastorianus
cacgggagctcacttgttttcaatt

SEQ ID NO: 32690 - DNA, 25 bp, Saccharomyces pastorianus
tggtgtccgctttgcagatgcttaa

SEQ ID NO: 32691 - DNA, 25 bp, Saccharomyces pastorianus
gctatggccgtgttggaatctcact

SEQ ID NO: 32692 - DNA, 25 bp, Saccharomyces pastorianus
tgttttcaattcacgcacacggatc

SEQ ID NO: 32693 - DNA, 25 bp, Saccharomyces pastorianus
ttgattgtcgctggtgtagacccca

SEQ ID NO: 32694 - DNA, 25 bp, Saccharomyces pastorianus
atctgttcaagtaccagggccacat

SEQ ID NO: 32695 - DNA, 25 bp, Saccharomyces pastorianus
agggccacattggtgcctatttgat

SEQ ID NO: 32696 - DNA, 25 bp, Saccharomyces pastorianus
ataaattccctagaggcaccactgc

SEQ ID NO: 32697 - DNA, 25 bp, Saccharomyces pastorianus
aaattggcctccgatgcgatccagg

SEQ ID NO: 32698 - DNA, 25 bp, Saccharomyces pastorianus
tatacacttcgagagagccacgggt

SEQ ID NO: 32699 - DNA, 25 bp, Saccharomyces pastorianus
caacaacagacattagtaacgatat

SEQ ID NO: 32700 - DNA, 25 bp, Saccharomyces pastorianus
acgatatggttatttgagcaagttg

SEQ ID NO: 32701 - DNA, 25 bp, Saccharomyces pastorianus
gagatacctgttaatagtgcaaacg

SEQ ID NO: 32702 - DNA, 25 bp, Saccharomyces pastorianus
aatcagaggcaaaatagcagggttt

SEQ ID NO: 32703 - DNA, 25 bp, Saccharomyces pastorianus
tattcaactatttacaacaacagac

SEQ ID NO: 32704 - DNA, 25 bp, Saccharomyces pastorianus
tcgatgacgctatagagatacctgt

SEQ ID NO: 32705 - DNA, 25 bp, Saccharomyces pastorianus
agatgtagaaaagggcacgccgctc

SEQ ID NO: 32706 - DNA, 25 bp, Saccharomyces pastorianus
tggtgccaccaatcaactgtatatt

SEQ ID NO: 32707 - DNA, 25 bp, Saccharomyces pastorianus
cacgccgctcgggaaaatactgtta

SEQ ID NO: 32708 - DNA, 25 bp, Saccharomyces pastorianus
gaagcaaggcgatggtgccaccaat

SEQ ID NO: 32709 - DNA, 25 bp, Saccharomyces pastorianus
gagcaagttggcataagaatcagag

SEQ ID NO: 32710 - DNA, 25 bp, Saccharomyces pastorianus
ccttgatggctttctcgtttatgat

SEQ ID NO: 32711 - DNA, 25 bp, Saccharomyces pastorianus
atgcctactcatttgtctcacttta

SEQ ID NO: 32712 - DNA, 25 bp, Saccharomyces pastorianus
ttactggccgccttaatggatcttt

SEQ ID NO: 32713 - DNA, 25 bp, Saccharomyces pastorianus
gtggccgagtactttaaccgttatg

SEQ ID NO: 32714 - DNA, 25 bp, Saccharomyces pastorianus
aacgatccagaggtcttccaacagt

SEQ ID NO: 32715 - DNA, 25 bp, Saccharomyces pastorianus
agttacaccacctgtttgtttgctt

SEQ ID NO: 32716 - DNA, 25 bp, Saccharomyces pastorianus
attgtgttctcggtgctggactgga

SEQ ID NO: 32717 - DNA, 25 bp, Saccharomyces pastorianus
atgactcgctcgtttggttccattt

SEQ ID NO: 32718 - DNA, 25 bp, Saccharomyces pastorianus
gttccatttgcttcgggtctttact

SEQ ID NO: 32719 - DNA, 25 bp, Saccharomyces pastorianus
gtagtagcaggtttgttctccagat

SEQ ID NO: 32720 - DNA, 25 bp, Saccharomyces pastorianus
gccttattttccatgttcaccagtt

SEQ ID NO: 32721 - DNA, 25 bp, Saccharomyces pastorianus
accggtatgaataactggtctatca

SEQ ID NO: 32722 - DNA, 25 bp, Saccharomyces pastorianus
atcactatttggatttctctcaagt

SEQ ID NO: 32723 - DNA, 25 bp, Saccharomyces pastorianus
ttggagacccatacttacataatgt

SEQ ID NO: 32724 - DNA, 25 bp, Saccharomyces pastorianus
aaggtggcttcgtttatgaggctga

SEQ ID NO: 32725 - DNA, 25 bp, Saccharomyces pastorianus
gttattgctaattacatgtcagacc

SEQ ID NO: 32726 - DNA, 25 bp, Saccharomyces pastorianus
gttgggcacacacgattcaatggtt

SEQ ID NO: 32727 - DNA, 25 bp, Saccharomyces pastorianus
gagttagatcctagcgaacctaatt

SEQ ID NO: 32728 - DNA, 25 bp, Saccharomyces pastorianus
gcacagtggcagaatacttcagcag

SEQ ID NO: 32729 - DNA, 25 bp, Saccharomyces pastorianus
gaaagatactttatgttgggcacac

SEQ ID NO: 32730 - DNA, 25 bp, Saccharomyces pastorianus
atttgagagatgtcattaccggtat

SEQ ID NO: 32731 - DNA, 25 bp, Saccharomyces pastorianus
aatattgttgctcccaagcagtcca

SEQ ID NO: 32732 - DNA, 25 bp, Saccharomyces pastorianus
agcaatcgcttcacattacattcat

SEQ ID NO: 32733 - DNA, 25 bp, Saccharomyces pastorianus
atcagttgagattcggtagttcacc

SEQ ID NO: 32734 - DNA, 25 bp, Saccharomyces pastorianus
atggatgcgaatctaattgcttcaa

SEQ ID NO: 32735 - DNA, 25 bp, Saccharomyces pastorianus
ggacacaattttcttcgccattgac

SEQ ID NO: 32736 - DNA, 25 bp, Saccharomyces pastorianus
tcgctgttacacaccacgatataat

SEQ ID NO: 32737 - DNA, 25 bp, Saccharomyces pastorianus
tcgccattgaccacgctttgagaaa

SEQ ID NO: 32738 - DNA, 25 bp, Saccharomyces pastorianus
acgttttgggtatctgtcttttcag

SEQ ID NO: 32739 - DNA, 25 bp, Saccharomyces pastorianus
gaaactacctctttgccattagatg

SEQ ID NO: 32740 - DNA, 25 bp, Saccharomyces pastorianus
cgaaaccaacgaacctgaatgactt

SEQ ID NO: 32741 - DNA, 25 bp, Saccharomyces pastorianus
ttacattctcatacgcctaatccag

SEQ ID NO: 32742 - DNA, 25 bp, Saccharomyces pastorianus
agttcacctattcctatcgctgtta

SEQ ID NO: 32743 - DNA, 25 bp, Saccharomyces pastorianus
caaaaccccagtcactttagccaag

SEQ ID NO: 32744 - DNA, 25 bp, Saccharomyces pastorianus
cccagtcactttagccaaggtcatc

SEQ ID NO: 32745 - DNA, 25 bp, Saccharomyces pastorianus
tggtgtcacccaagtccgtgtcgaa

SEQ ID NO: 32746 - DNA, 25 bp, Saccharomyces pastorianus
ccccagtcactttagccaaggtcat

SEQ ID NO: 32747 - DNA, 25 bp, Saccharomyces pastorianus
gtggtgtcacccaagtccgtgtcga

SEQ ID NO: 32748 - DNA, 25 bp, Saccharomyces pastorianus
ggtgtcacccaagtccgtgtcgaat

SEQ ID NO: 32749 - DNA, 25 bp, Saccharomyces pastorianus
gataacaaaaccccagtcactttag

SEQ ID NO: 32750 - DNA, 25 bp, Saccharomyces pastorianus
accccagtcactttagccaaggtca

SEQ ID NO: 32751 - DNA, 25 bp, Saccharomyces pastorianus
gtgtcacccaagtccgtgtcgaatt

SEQ ID NO: 32752 - DNA, 25 bp, Saccharomyces pastorianus
gaaagatcagacttctcagaaaatg

SEQ ID NO: 32753 - DNA, 25 bp, Saccharomyces pastorianus
aatgggttccagtctcttctaagta

SEQ ID NO: 32754 - DNA, 25 bp, Saccharomyces pastorianus
attcggcgagagaactgtaccattt

SEQ ID NO: 32755 - DNA, 25 bp, Saccharomyces pastorianus
aagagtccacgttaactatgataat

SEQ ID NO: 32756 - DNA, 25 bp, Saccharomyces pastorianus
tctcacacagtttccttcaaaagct

SEQ ID NO: 32757 - DNA, 25 bp, Saccharomyces pastorianus
ggtttgatcaaagtttctcacacag

SEQ ID NO: 32758 - DNA, 25 bp, Saccharomyces pastorianus
tatggaacacaactttggccacgtt

SEQ ID NO: 32759 - DNA, 25 bp, Saccharomyces pastorianus
atcgtctcatcctcaaggtttctta

SEQ ID NO: 32760 - DNA, 25 bp, Saccharomyces pastorianus
gtacagctgataaggtcgttttgaa

SEQ ID NO: 32761 - DNA, 25 bp, Saccharomyces pastorianus
ggccacgttgtcaaaaacagtccat

SEQ ID NO: 32762 - DNA, 25 bp, Saccharomyces pastorianus
ctcttctaagtacaactctccgtta

SEQ ID NO: 32763 - DNA, 25 bp, Saccharomyces pastorianus
gactcttcactcgattctttatcta

SEQ ID NO: 32764 - DNA, 25 bp, Saccharomyces pastorianus
agtggattctgagctaaccgataat

SEQ ID NO: 32765 - DNA, 25 bp, Saccharomyces pastorianus
tgactgaaccagtgcccgatgattg

SEQ ID NO: 32766 - DNA, 25 bp, Saccharomyces pastorianus
gaaatgatgagctctcaccgacttt

SEQ ID NO: 32767 - DNA, 25 bp, Saccharomyces pastorianus
tttacaggtcgaaattatgcccatg

SEQ ID NO: 32768 - DNA, 25 bp, Saccharomyces pastorianus
tcagtcgatggcgaacggtttccgt

SEQ ID NO: 32769 - DNA, 25 bp, Saccharomyces pastorianus
gataccaaattttttcctgcagctt

SEQ ID NO: 32770 - DNA, 25 bp, Saccharomyces pastorianus
ggtactatcgacttaatcatgacag

SEQ ID NO: 32771 - DNA, 25 bp, Saccharomyces pastorianus
caagtctggtttgttttcagtcgat

SEQ ID NO: 32772 - DNA, 25 bp, Saccharomyces pastorianus
cttcgaaccaaacactgatccagac

SEQ ID NO: 32773 - DNA, 25 bp, Saccharomyces pastorianus
taagggctctcacgtgttggaacca

SEQ ID NO: 32774 - DNA, 25 bp, Saccharomyces pastorianus
tatggcctgcagaagacgcactacg

SEQ ID NO: 32775 - DNA, 25 bp, Saccharomyces pastorianus
cactctctctcaaaatggacgccag

SEQ ID NO: 32776 - DNA, 25 bp, Saccharomyces pastorianus
atttaccggtgaaggactcatttat

SEQ ID NO: 32777 - DNA, 25 bp, Saccharomyces pastorianus
agaagtgccgaatgacactctctct

SEQ ID NO: 32778 - DNA, 25 bp, Saccharomyces pastorianus
taacaatgaagatgccctagacctt

SEQ ID NO: 32779 - DNA, 25 bp, Saccharomyces pastorianus
cggtgggtcccaataattttatatg

SEQ ID NO: 32780 - DNA, 25 bp, Saccharomyces pastorianus
cactacggagaggtatgcttgctat

SEQ ID NO: 32781 - DNA, 25 bp, Saccharomyces pastorianus
tactgcactattggattacgctaca

SEQ ID NO: 32782 - DNA, 25 bp, Saccharomyces pastorianus
caaactgctcgctgactatgataag

SEQ ID NO: 32783 - DNA, 25 bp, Saccharomyces pastorianus
gaattgagtgcactaccgatgctag

SEQ ID NO: 32784 - DNA, 25 bp, Saccharomyces pastorianus
gatccaaaatcaactctactgcact

SEQ ID NO: 32785 - DNA, 25 bp, Saccharomyces pastorianus
gatctcatcggcatatacgcgatca

SEQ ID NO: 32786 - DNA, 25 bp, Saccharomyces pastorianus
tcattctttttgttcaagggacctt

SEQ ID NO: 32787 - DNA, 25 bp, Saccharomyces pastorianus
atatcgtcgttgctttttcattctt

SEQ ID NO: 32788 - DNA, 25 bp, Saccharomyces pastorianus
gttctcctaacttgggcgatatatt

SEQ ID NO: 32789 - DNA, 25 bp, Saccharomyces pastorianus
gatatcagcgcaagttctcctaact

SEQ ID NO: 32790 - DNA, 25 bp, Saccharomyces pastorianus
ggaagatggtgttacgcctctaccc

SEQ ID NO: 32791 - DNA, 25 bp, Saccharomyces pastorianus
ggtacaaccattcatcatacttgat

SEQ ID NO: 32792 - DNA, 25 bp, Saccharomyces pastorianus
gcctctaccctccaaaataatttat

SEQ ID NO: 32793 - DNA, 25 bp, Saccharomyces pastorianus
aggtcactgcattttgtagatccaa

SEQ ID NO: 32794 - DNA, 25 bp, Saccharomyces pastorianus
ggtattccgcctatagaattgggca

SEQ ID NO: 32795 - DNA, 25 bp, Saccharomyces pastorianus
gactgggacgatttctgtaatgatt

SEQ ID NO: 32796 - DNA, 25 bp, Saccharomyces pastorianus
acttggtaagtctagcgatcctgta

SEQ ID NO: 32797 - DNA, 25 bp, Saccharomyces pastorianus
gacctaaaccatggctgggtgctca

SEQ ID NO: 32798 - DNA, 25 bp, Saccharomyces pastorianus
gatcaaggcgttctccgaaaacatt

SEQ ID NO: 32799 - DNA, 25 bp, Saccharomyces pastorianus
gacattgctgaatttctgggcccaa

SEQ ID NO: 32800 - DNA, 25 bp, Saccharomyces pastorianus
tacaggttagtctggcagtcccaag

SEQ ID NO: 32801 - DNA, 25 bp, Saccharomyces pastorianus
aagtggcagccactgtctacagcat

SEQ ID NO: 32802 - DNA, 25 bp, Saccharomyces pastorianus
ttatcgatcgctggcctacgaatga

SEQ ID NO: 32803 - DNA, 25 bp, Saccharomyces pastorianus
gagatctatttcttggtccattatc

SEQ ID NO: 32804 - DNA, 25 bp, Saccharomyces pastorianus
ttgacggactggttttcatccctat

SEQ ID NO: 32805 - DNA, 25 bp, Saccharomyces pastorianus
ttaacactggtgatgcataccccgc

SEQ ID NO: 32806 - DNA, 25 bp, Saccharomyces pastorianus
ttctgggcccaaaggttgacggact

SEQ ID NO: 32807 - DNA, 25 bp, Saccharomyces pastorianus
tttcagctcaccgattctattcaag

SEQ ID NO: 32808 - DNA, 25 bp, Saccharomyces pastorianus
attcagtaatctcggctttgttgca

SEQ ID NO: 32809 - DNA, 25 bp, Saccharomyces pastorianus
atatgctgcttaaacggacctgccg

SEQ ID NO: 32810 - DNA, 25 bp, Saccharomyces pastorianus
ggaacttcagttacgttgactcaga

SEQ ID NO: 32811 - DNA, 25 bp, Saccharomyces pastorianus
aattgaccgacactgatgccttcaa

SEQ ID NO: 32812 - DNA, 25 bp, Saccharomyces pastorianus
gttggccttagtgcttctctggtgg

SEQ ID NO: 32813 - DNA, 25 bp, Saccharomyces pastorianus
ctgccatttgttcccctaatatatt

SEQ ID NO: 32814 - DNA, 25 bp, Saccharomyces pastorianus
aaagtttctaagctggtgtctgcca

SEQ ID NO: 32815 - DNA, 25 bp, Saccharomyces pastorianus
agcatctgattttcagctcaccgat

SEQ ID NO: 32816 - DNA, 25 bp, Saccharomyces pastorianus
ctggtggccctttgtgatattgtat

SEQ ID NO: 32817 - DNA, 25 bp, Saccharomyces pastorianus
tattccttcttttcccattcagtaa

SEQ ID NO: 32818 - DNA, 25 bp, Saccharomyces pastorianus
agctgcaagtaatggcggctcgtcc

SEQ ID NO: 32819 - DNA, 25 bp, Saccharomyces pastorianus
gcattcctcggacaatcacagacat

SEQ ID NO: 32820 - DNA, 25 bp, Saccharomyces pastorianus
gtccggaggcggatcattcactgaa

SEQ ID NO: 32821 - DNA, 25 bp, Saccharomyces pastorianus
agcgttccttggacagtcgcagacg

SEQ ID NO: 32822 - DNA, 25 bp, Saccharomyces pastorianus
cgcaacttgataaaccttcggtctt

SEQ ID NO: 32823 - DNA, 25 bp, Saccharomyces pastorianus
gggaccacaggcatctttagccgat

SEQ ID NO: 32824 - DNA, 25 bp, Saccharomyces pastorianus
aatgccagcagcaggaacgtccgga

SEQ ID NO: 32825 - DNA, 25 bp, Saccharomyces pastorianus
attggcttcaatcagaggcgcaggt

SEQ ID NO: 32826 - DNA, 25 bp, Saccharomyces pastorianus
ggacgcgatgctttattggcttcaa

SEQ ID NO: 32827 - DNA, 25 bp, Saccharomyces pastorianus
aatcgatgacgaatgctgcaccacc

SEQ ID NO: 32828 - DNA, 25 bp, Saccharomyces pastorianus
agaagtacgcggagaacctgccaca

SEQ ID NO: 32829 - DNA, 25 bp, Saccharomyces pastorianus
aatcgttgctgatttatccagtgat

SEQ ID NO: 32830 - DNA, 25 bp, Saccharomyces pastorianus
gcagcagctcggaaattgacaggtt

SEQ ID NO: 32831 - DNA, 25 bp, Saccharomyces pastorianus
gcgggcttaactctatacatcatca

SEQ ID NO: 32832 - DNA, 25 bp, Saccharomyces pastorianus
ggcgcttccgaagaaaccttacatg

SEQ ID NO: 32833 - DNA, 25 bp, Saccharomyces pastorianus
tggagtaccaatcacaccaattgca

SEQ ID NO: 32834 - DNA, 25 bp, Saccharomyces pastorianus
gattcaaacccaagcttttacaatg

SEQ ID NO: 32835 - DNA, 25 bp, Saccharomyces pastorianus
agagcttccatctataacgccttat

SEQ ID NO: 32836 - DNA, 25 bp, Saccharomyces pastorianus
aacgccttatcagtacaagccgtgc

SEQ ID NO: 32837 - DNA, 25 bp, Saccharomyces pastorianus
tatggtgttattatggcaggtgccc

SEQ ID NO: 32838 - DNA, 25 bp, Saccharomyces pastorianus
tcatcgttcggttggtgggtttaga

SEQ ID NO: 32839 - DNA, 25 bp, Saccharomyces pastorianus
aactccgcttataacacaattccaa

SEQ ID NO: 32840 - DNA, 25 bp, Saccharomyces pastorianus
gtgccattatcatgttcgatgtgac

SEQ ID NO: 32841 - DNA, 25 bp, Saccharomyces pastorianus
gaaatacatcgccactatcggtgtt

SEQ ID NO: 32842 - DNA, 25 bp, Saccharomyces pastorianus
gtccgtgtgtgcgaaaatatcccga

SEQ ID NO: 32843 - DNA, 25 bp, Saccharomyces pastorianus
attggagtttgttgcctcgcctgct

SEQ ID NO: 32844 - DNA, 25 bp, Saccharomyces pastorianus
tggctccaccggaagtccaagtcga

SEQ ID NO: 32845 - DNA, 25 bp, Saccharomyces pastorianus
tcgatgtgacttctaggattaccta

SEQ ID NO: 32846 - DNA, 25 bp, Saccharomyces pastorianus
gaatgttcccaactggcatagagac

SEQ ID NO: 32847 - DNA, 25 bp, Saccharomyces pastorianus
atcggtgttgaggtccatcctttat

SEQ ID NO: 32848 - DNA, 25 bp, Saccharomyces pastorianus
ggctggctagaaaactggctggtaa

SEQ ID NO: 32849 - DNA, 25 bp, Saccharomyces pastorianus
gaaaccgttcttatggctggctaga

SEQ ID NO: 32850 - DNA, 25 bp, Saccharomyces pastorianus
aatatcccgatagtgttatgtggta

SEQ ID NO: 32851 - DNA, 25 bp, Saccharomyces pastorianus
ttgtgatgagattccccaacgaagt

SEQ ID NO: 32852 - DNA, 25 bp, Saccharomyces pastorianus
atgtgatttgattcacccaacccca

SEQ ID NO: 32853 - DNA, 25 bp, Saccharomyces pastorianus
aacaccactcccttgaaggctattg

SEQ ID NO: 32854 - DNA, 25 bp, Saccharomyces pastorianus
agtgatgccaggtgacaacgtcgaa

SEQ ID NO: 32855 - DNA, 25 bp, Saccharomyces pastorianus
gaaggctattgttaccggtattgaa

SEQ ID NO: 32856 - DNA, 25 bp, Saccharomyces pastorianus
tatggtcttggccaaaccgggtact

SEQ ID NO: 32857 - DNA, 25 bp, Saccharomyces pastorianus
actacaggccgcaaatgtttatcag

SEQ ID NO: 32858 - DNA, 25 bp, Saccharomyces pastorianus
aagcttttggatgccgtggacgagt

SEQ ID NO: 32859 - DNA, 25 bp, Saccharomyces pastorianus
ggaattagactctgccatggcgggt

SEQ ID NO: 32860 - DNA, 25 bp, Saccharomyces pastorianus
tgttaaggcccataccaagattcta

SEQ ID NO: 32861 - DNA, 25 bp, Saccharomyces pastorianus
aagaccattcgatgcaagtgatgcc

SEQ ID NO: 32862 - DNA, 25 bp, Saccharomyces pastorianus
atagtaaacctgtgcttccttggga

SEQ ID NO: 32863 - DNA, 25 bp, Saccharomyces pastorianus
atgtcgcaagaaagcagcgctttat

SEQ ID NO: 32864 - DNA, 25 bp, Saccharomyces pastorianus
ggaacgtcaaaagcaaccagtatca

SEQ ID NO: 32865 - DNA, 25 bp, Saccharomyces pastorianus
gaatctcaggaacagcttgacaaca

SEQ ID NO: 32866 - DNA, 25 bp, Saccharomyces pastorianus
acctgtgcttccttgggatcatgaa

SEQ ID NO: 32867 - DNA, 25 bp, Saccharomyces pastorianus
ggaacagcttgacaacaactctaaa

SEQ ID NO: 32868 - DNA, 25 bp, Saccharomyces pastorianus
tccaatagccccagagacaatagta

SEQ ID NO: 32869 - DNA, 25 bp, Saccharomyces pastorianus
tagagaacggagaggcagcctccaa

SEQ ID NO: 32870 - DNA, 25 bp, Saccharomyces pastorianus
taaagtagagttgaccggctggata

SEQ ID NO: 32871 - DNA, 25 bp, Saccharomyces pastorianus
gcagcgctttatctgaatctcagga

SEQ ID NO: 32872 - DNA, 25 bp, Saccharomyces pastorianus
aagcaaccagtatcagagtcagaat

SEQ ID NO: 32873 - DNA, 25 bp, Saccharomyces pastorianus
cgattctgccatggatccaggtaaa

SEQ ID NO: 32874 - DNA, 25 bp, Saccharomyces pastorianus
tgttgacccattttggaatccctac

SEQ ID NO: 32875 - DNA, 25 bp, Saccharomyces pastorianus
gaatccctacgtcgaagagcaggct

SEQ ID NO: 32876 - DNA, 25 bp, Saccharomyces pastorianus
ggaggatttacatgccgagtactta

SEQ ID NO: 32877 - DNA, 25 bp, Saccharomyces pastorianus
gttcaggttcataagcttttcatca

SEQ ID NO: 32878 - DNA, 25 bp, Saccharomyces pastorianus
gagcaggctcaagatcgttgttata

SEQ ID NO: 32879 - DNA, 25 bp, Saccharomyces pastorianus
gagttttcgatgagtcgccaactga

SEQ ID NO: 32880 - DNA, 25 bp, Saccharomyces pastorianus
gaacgtatatgtgccagatttcgag

SEQ ID NO: 32881 - DNA, 25 bp, Saccharomyces pastorianus
agggctcacgttgacatgcgcgaac

SEQ ID NO: 32882 - DNA, 25 bp, Saccharomyces pastorianus
aagagggtacttctcatttcaatga

SEQ ID NO: 32883 - DNA, 25 bp, Saccharomyces pastorianus
aaagctggtaattcagggctcacgt

SEQ ID NO: 32884 - DNA, 25 bp, Saccharomyces pastorianus
ttgattctacccaatgccaatgcca

SEQ ID NO: 32885 - DNA, 25 bp, Saccharomyces pastorianus
gacgactatctaatttctgagggcg

SEQ ID NO: 32886 - DNA, 25 bp, Saccharomyces pastorianus
gatacaactacagctagcgggccga

SEQ ID NO: 32887 - DNA, 25 bp, Saccharomyces pastorianus
atacggatgaggtgggttctgaatt

SEQ ID NO: 32888 - DNA, 25 bp, Saccharomyces pastorianus
aataaccatcgaaaacgcccatata

SEQ ID NO: 32889 - DNA, 25 bp, Saccharomyces pastorianus
gcaagtaacgacacaggtgcccgta

SEQ ID NO: 32890 - DNA, 25 bp, Saccharomyces pastorianus
cactggagggactaatactggtaat

SEQ ID NO: 32891 - DNA, 25 bp, Saccharomyces pastorianus
ctagcgggccgaacattgaagtaaa

SEQ ID NO: 32892 - DNA, 25 bp, Saccharomyces pastorianus
gaacttaatgctctgtttatacgat

SEQ ID NO: 32893 - DNA, 25 bp, Saccharomyces pastorianus
aacagcatgtctcacactggaggga

SEQ ID NO: 32894 - DNA, 25 bp, Saccharomyces pastorianus
acaggtgcccgtacagacatgagta

SEQ ID NO: 32895 - DNA, 25 bp, Saccharomyces pastorianus
gatgatttagtcttggtcaccccaa

SEQ ID NO: 32896 - DNA, 25 bp, Saccharomyces pastorianus
gttcactttggaaccaaccttgatt

SEQ ID NO: 32897 - DNA, 25 bp, Saccharomyces pastorianus
aaaattgactcacgccaagatcgct

SEQ ID NO: 32898 - DNA, 25 bp, Saccharomyces pastorianus
agctgaattggatgttactgtccca

SEQ ID NO: 32899 - DNA, 25 bp, Saccharomyces pastorianus
aaatattttggctgacttgaacgaa

SEQ ID NO: 32900 - DNA, 25 bp, Saccharomyces pastorianus
atcgctgctttcacctacgaaattg

SEQ ID NO: 32901 - DNA, 25 bp, Saccharomyces pastorianus
actgttttggaaaccaagcctgcca

SEQ ID NO: 32902 - DNA, 25 bp, Saccharomyces pastorianus
cttggacccaacctatgtgaaacct

SEQ ID NO: 32903 - DNA, 25 bp, Saccharomyces pastorianus
aaccttgattgctactctagctgaa

SEQ ID NO: 32904 - DNA, 25 bp, Saccharomyces pastorianus
gaattccttacttgtcttggaccca

SEQ ID NO: 32905 - DNA, 25 bp, Saccharomyces pastorianus
gagctatcgagaattccttacttgt

SEQ ID NO: 32906 - DNA, 25 bp, Saccharomyces pastorianus
tgcccattttctacgttgacaagcc

SEQ ID NO: 32907 - DNA, 25 bp, Saccharomyces pastorianus
gtacacgacagggaaggcgctcagc

SEQ ID NO: 32908 - DNA, 25 bp, Saccharomyces pastorianus
gatctaaccatccacgagtcgggct

SEQ ID NO: 32909 - DNA, 25 bp, Saccharomyces pastorianus
acttggctgacgctaccgcagaaaa

SEQ ID NO: 32910 - DNA, 25 bp, Saccharomyces pastorianus
aggcgctcagcgtacatgacctgaa

SEQ ID NO: 32911 - DNA, 25 bp, Saccharomyces pastorianus
gtttgccctacagcacacgggagga

SEQ ID NO: 32912 - DNA, 25 bp, Saccharomyces pastorianus
cgcattgtagactcgctcaacgtga

SEQ ID NO: 32913 - DNA, 25 bp, Saccharomyces pastorianus
ttgacaagccgctggagttcttcac

SEQ ID NO: 32914 - DNA, 25 bp, Saccharomyces pastorianus
aagaagtcgtgcacagtttgcccta

SEQ ID NO: 32915 - DNA, 25 bp, Saccharomyces pastorianus
tgacctgaacggcatgtgcaccaag

SEQ ID NO: 32916 - DNA, 25 bp, Saccharomyces pastorianus
aaatgggaggctggacgttcgtcac

SEQ ID NO: 32917 - DNA, 25 bp, Saccharomyces pastorianus
agaatcaccctgcacgtggactgtc

SEQ ID NO: 32918 - DNA, 25 bp, Saccharomyces pastorianus
ggtgacctctcctgcgagatgatct

SEQ ID NO: 32919 - DNA, 25 bp, Saccharomyces pastorianus
agatgatctcgcactttctcgaaag

SEQ ID NO: 32920 - DNA, 25 bp, Saccharomyces pastorianus
agaacgatcaccaccgcagcgagag

SEQ ID NO: 32921 - DNA, 25 bp, Saccharomyces pastorianus
tcaacgtccagacaggcatcgggtt

SEQ ID NO: 32922 - DNA, 25 bp, Saccharomyces pastorianus
aaaatccagattgcgatcgccctga

SEQ ID NO: 32923 - DNA, 25 bp, Saccharomyces pastorianus
aagcttcgcagaggccagcagaatc

SEQ ID NO: 32924 - DNA, 25 bp, Saccharomyces pastorianus
agttgcagagcaggccacgcagtcg

SEQ ID NO: 32925 - DNA, 25 bp, Saccharomyces pastorianus
gatcgcgttgggacaagccttcaaa

SEQ ID NO: 32926 - DNA, 25 bp, Saccharomyces pastorianus
tggtcgctgatcgtcgagtgcatcg

SEQ ID NO: 32927 - DNA, 25 bp, Saccharomyces pastorianus
gcagtcgcaggtgatcaacgtccag

SEQ ID NO: 32928 - DNA, 25 bp, Saccharomyces pastorianus
aaacttcagagctactgccattcac

SEQ ID NO: 32929 - DNA, 25 bp, Saccharomyces pastorianus
gcgaaaacgccaaccttgtcaaagg

SEQ ID NO: 32930 - DNA, 25 bp, Saccharomyces pastorianus
ggtgaccgtactcaatccgaaagag

SEQ ID NO: 32931 - DNA, 25 bp, Saccharomyces pastorianus
tggccgaccaattgacagatttctt

SEQ ID NO: 32932 - DNA, 25 bp, Saccharomyces pastorianus
ctccttcagaggtggcagcggcagt

SEQ ID NO: 32933 - DNA, 25 bp, Saccharomyces pastorianus
gtgccgccagtctattggttgccac

SEQ ID NO: 32934 - DNA, 25 bp, Saccharomyces pastorianus
ggtttcggtcgcagcagtggtaaca

SEQ ID NO: 32935 - DNA, 25 bp, Saccharomyces pastorianus
gttatcaactacgacttgccaagcg

SEQ ID NO: 32936 - DNA, 25 bp, Saccharomyces pastorianus
gaaattcctccatttttgaaagacg

SEQ ID NO: 32937 - DNA, 25 bp, Saccharomyces pastorianus
ttgccaccgctgttgctgctagagg

SEQ ID NO: 32938 - DNA, 25 bp, Saccharomyces pastorianus
gggtagcgacaacaaatcatctggc

SEQ ID NO: 32939 - DNA, 25 bp, Saccharomyces pastorianus
gagacaggccgatcattagttccct

SEQ ID NO: 32940 - DNA, 25 bp, Saccharomyces pastorianus
agtttttagctcgtgtgtttcgtcg

SEQ ID NO: 32941 - DNA, 25 bp, Saccharomyces pastorianus
catgttataccgtcggaggcctttt

SEQ ID NO: 32942 - DNA, 25 bp, Saccharomyces pastorianus
tccaggcccatcgactaaattcaaa

SEQ ID NO: 32943 - DNA, 25 bp, Saccharomyces pastorianus
ttagttccctgtacgaggtggccaa

SEQ ID NO: 32944 - DNA, 25 bp, Saccharomyces pastorianus
gtatattttactgcgaaccacggga

SEQ ID NO: 32945 - DNA, 25 bp, Saccharomyces pastorianus
ttcgtcgtcgggaacgcatgcatta

SEQ ID NO: 32946 - DNA, 25 bp, Saccharomyces pastorianus
atgcgcgatatgcaattccaccttt

SEQ ID NO: 32947 - DNA, 25 bp, Saccharomyces pastorianus
atcgtgaagtacattccaggcccat

SEQ ID NO: 32948 - DNA, 25 bp, Saccharomyces pastorianus
aagaatcgagttgccctagagacag

SEQ ID NO: 32949 - DNA, 25 bp, Saccharomyces pastorianus
ttatctgccaggagatttgctgacg

SEQ ID NO: 32950 - DNA, 25 bp, Saccharomyces pastorianus
cagttagatgtttctcctgtggtaa

SEQ ID NO: 32951 - DNA, 25 bp, Saccharomyces pastorianus
atgattgtcccagttagatgtttct

SEQ ID NO: 32952 - DNA, 25 bp, Saccharomyces pastorianus
gattgtcccagttagatgtttctcc

SEQ ID NO: 32953 - DNA, 25 bp, Saccharomyces pastorianus
gataagtgggaaagttacttgaact

SEQ ID NO: 32954 - DNA, 25 bp, Saccharomyces pastorianus
ccgcattgtcaagattgggcttgaa

SEQ ID NO: 32955 - DNA, 25 bp, Saccharomyces pastorianus
gtcccagttagatgtttctcctgtg

SEQ ID NO: 32956 - DNA, 25 bp, Saccharomyces pastorianus
tagatgtttctcctgtggtaaagtt

SEQ ID NO: 32957 - DNA, 25 bp, Saccharomyces pastorianus
gtaccgcattgtcaagattgggctt

SEQ ID NO: 32958 - DNA, 25 bp, Saccharomyces pastorianus
gggcttgaaaagatactgttgcaga

SEQ ID NO: 32959 - DNA, 25 bp, Saccharomyces pastorianus
aggtaccgcattgtcaagattgggc

SEQ ID NO: 32960 - DNA, 25 bp, Saccharomyces pastorianus
tgcagaagaatgattttgacccacg

SEQ ID NO: 32961 - DNA, 25 bp, Saccharomyces pastorianus
atcaattagaccactagcttcaact

SEQ ID NO: 32962 - DNA, 25 bp, Saccharomyces pastorianus
ttaagacgtcgccaactaccataaa

SEQ ID NO: 32963 - DNA, 25 bp, Saccharomyces pastorianus
actagaataacctttgttcgctaca

SEQ ID NO: 32964 - DNA, 25 bp, Saccharomyces pastorianus
gtgaagaacctgttagacgccctta

SEQ ID NO: 32965 - DNA, 25 bp, Saccharomyces pastorianus
actggaaatctctgccaacggaatt

SEQ ID NO: 32966 - DNA, 25 bp, Saccharomyces pastorianus
gagcagcgacgagtactctttatac

SEQ ID NO: 32967 - DNA, 25 bp, Saccharomyces pastorianus
tttgttcgctacaacagctctccag

SEQ ID NO: 32968 - DNA, 25 bp, Saccharomyces pastorianus
gcaatcagaagcatgctatcggcta

SEQ ID NO: 32969 - DNA, 25 bp, Saccharomyces pastorianus
gtttcatctgaacttgataccgatc

SEQ ID NO: 32970 - DNA, 25 bp, Saccharomyces pastorianus
tatgtactccaagttgatttctcaa

SEQ ID NO: 32971 - DNA, 25 bp, Saccharomyces pastorianus
gcatgctatcggctatcaagaacaa

SEQ ID NO: 32972 - DNA, 25 bp, Saccharomyces pastorianus
ctcggtgaacgatctggaactaaaa

SEQ ID NO: 32973 - DNA, 25 bp, Saccharomyces pastorianus
gtgcaagcgccgtatcacgaacaga

SEQ ID NO: 32974 - DNA, 25 bp, Saccharomyces pastorianus
acagcaggccggtttaatttcgaat

SEQ ID NO: 32975 - DNA, 25 bp, Saccharomyces pastorianus
ttgttgtccaatttcttgaactggg

SEQ ID NO: 32976 - DNA, 25 bp, Saccharomyces pastorianus
gctgcgccatgaagctatcatacta

SEQ ID NO: 32977 - DNA, 25 bp, Saccharomyces pastorianus
gtcaagcgactcagaatccgtggat

SEQ ID NO: 32978 - DNA, 25 bp, Saccharomyces pastorianus
ttgttgatctcttttgtggccatac

SEQ ID NO: 32979 - DNA, 25 bp, Saccharomyces pastorianus
tttacagatcggcaagctgcgccat

SEQ ID NO: 32980 - DNA, 25 bp, Saccharomyces pastorianus
agaaagttttgtatcgctatggacc

SEQ ID NO: 32981 - DNA, 25 bp, Saccharomyces pastorianus
aacagcattgcaaaactcggtgaac

SEQ ID NO: 32982 - DNA, 25 bp, Saccharomyces pastorianus
accaatccagaagtgcaagcgccgt

SEQ ID NO: 32983 - DNA, 25 bp, Saccharomyces pastorianus
gagacagcagttccgagccacttat

SEQ ID NO: 32984 - DNA, 25 bp, Saccharomyces pastorianus
gaactggcgcattattttggtgctg

SEQ ID NO: 32985 - DNA, 25 bp, Saccharomyces pastorianus
aggacctgttactgggcatatgtgt

SEQ ID NO: 32986 - DNA, 25 bp, Saccharomyces pastorianus
gtataattggcacggaggatctcac

SEQ ID NO: 32987 - DNA, 25 bp, Saccharomyces pastorianus
aacgaggacaggttcaactccgtgc

SEQ ID NO: 32988 - DNA, 25 bp, Saccharomyces pastorianus
ggaagcagcaactccgacactggca

SEQ ID NO: 32989 - DNA, 25 bp, Saccharomyces pastorianus
taatgagtccatgaccacacaggcc

SEQ ID NO: 32990 - DNA, 25 bp, Saccharomyces pastorianus
gctcgctaccgaggacctgaaggat

SEQ ID NO: 32991 - DNA, 25 bp, Saccharomyces pastorianus
ggagagactcgtccaaagtagtaac

SEQ ID NO: 32992 - DNA, 25 bp, Saccharomyces pastorianus
tgtgtagggtttttctttggtgtct

SEQ ID NO: 32993 - DNA, 25 bp, Saccharomyces pastorianus
gaaggatgatgcgaccccgtctaat

SEQ ID NO: 32994 - DNA, 25 bp, Saccharomyces pastorianus
cgttcggcggtctgctgatgagatt

SEQ ID NO: 32995 - DNA, 25 bp, Saccharomyces pastorianus
gcacggtaccgcttacaaattcgag

SEQ ID NO: 32996 - DNA, 25 bp, Saccharomyces pastorianus
gacctaattgcggtttactactcgt

SEQ ID NO: 32997 - DNA, 25 bp, Saccharomyces pastorianus
gatataaacgttgaactgttccccg

SEQ ID NO: 32998 - DNA, 25 bp, Saccharomyces pastorianus
aagtcgatcctggtcgttacaacaa

SEQ ID NO: 32999 - DNA, 25 bp, Saccharomyces pastorianus
tacgactatgtcatgcacggtaccg

SEQ ID NO: 33000 - DNA, 25 bp, Saccharomyces pastorianus
tgaaccttgaagacaccccagcgaa

SEQ ID NO: 33001 - DNA, 25 bp, Saccharomyces pastorianus
tcgcgccacaagattcgttgactgt

SEQ ID NO: 33002 - DNA, 25 bp, Saccharomyces pastorianus
gtgacagatcattggccgacgacta

SEQ ID NO: 33003 - DNA, 25 bp, Saccharomyces pastorianus
agcaccctatttgacgatatcttcc

SEQ ID NO: 33004 - DNA, 25 bp, Saccharomyces pastorianus
gttgactgtcactattgcatcctct

SEQ ID NO: 33005 - DNA, 25 bp, Saccharomyces pastorianus
ctcttcctacatgaccgaactgata

SEQ ID NO: 33006 - DNA, 25 bp, Saccharomyces pastorianus
agaaacgtcggatccatggacaagt

SEQ ID NO: 33007 - DNA, 25 bp, Saccharomyces pastorianus
atggacaagtcccaggccaacgtcg

SEQ ID NO: 33008 - DNA, 25 bp, Saccharomyces pastorianus
gctgcaaagagactataccatccca

SEQ ID NO: 33009 - DNA, 25 bp, Saccharomyces pastorianus
gacgaggccgtcaagatcaagaaca

SEQ ID NO: 33010 - DNA, 25 bp, Saccharomyces pastorianus
aagacctttggctgtgggtcggcca

SEQ ID NO: 33011 - DNA, 25 bp, Saccharomyces pastorianus
gatcgccaaggaattgagcctgccc

SEQ ID NO: 33012 - DNA, 25 bp, Saccharomyces pastorianus
ggtgaagctgcattgctccatgctc

SEQ ID NO: 33013 - DNA, 25 bp, Saccharomyces pastorianus
cctcatgggctccagcataacaaaa

SEQ ID NO: 33014 - DNA, 25 bp, Saccharomyces pastorianus
aagtcgggcatcattgagaacgtca

SEQ ID NO: 33015 - DNA, 25 bp, Saccharomyces pastorianus
actgatacgtggtatgtcgctggac

SEQ ID NO: 33016 - DNA, 25 bp, Saccharomyces pastorianus
aaacgattcatcgatcagaccgcat

SEQ ID NO: 33017 - DNA, 25 bp, Saccharomyces pastorianus
gctgaagtatcgagttctaggccaa

SEQ ID NO: 33018 - DNA, 25 bp, Saccharomyces pastorianus
gatggccactgattcaggacgtatt

SEQ ID NO: 33019 - DNA, 25 bp, Saccharomyces pastorianus
gatcagaccgcatttgatggccact

SEQ ID NO: 33020 - DNA, 25 bp, Saccharomyces pastorianus
agctcctcgcgaattagcggtacat

SEQ ID NO: 33021 - DNA, 25 bp, Saccharomyces pastorianus
gacgcgattatcaaagccaagggta

SEQ ID NO: 33022 - DNA, 25 bp, Saccharomyces pastorianus
taatgatgcttctgttcccgaaaac

SEQ ID NO: 33023 - DNA, 25 bp, Saccharomyces pastorianus
gctcatcgaacacttcattggctgg

SEQ ID NO: 33024 - DNA, 25 bp, Saccharomyces pastorianus
gtaaccaccggtaaagctcttctat

SEQ ID NO: 33025 - DNA, 25 bp, Saccharomyces pastorianus
agtgcatttgcaaaggccacccatt

SEQ ID NO: 33026 - DNA, 25 bp, Saccharomyces pastorianus
ggacgtattatcgatgtaaccaccg

SEQ ID NO: 33027 - DNA, 25 bp, Saccharomyces pastorianus
gactcagatagtctcgttacagctt

SEQ ID NO: 33028 - DNA, 25 bp, Saccharomyces pastorianus
gtggacatcttgttctctcaaactt

SEQ ID NO: 33029 - DNA, 25 bp, Saccharomyces pastorianus
agatgacgtgcaagtggctgcccca

SEQ ID NO: 33030 - DNA, 25 bp, Saccharomyces pastorianus
agggccaatgtctgaagtttttcca

SEQ ID NO: 33031 - DNA, 25 bp, Saccharomyces pastorianus
gagaacttgttcgtcacaggcttca

SEQ ID NO: 33032 - DNA, 25 bp, Saccharomyces pastorianus
agacaagccgctttggattctgagc

SEQ ID NO: 33033 - DNA, 25 bp, Saccharomyces pastorianus
ggacatggagtattccttctcgaga

SEQ ID NO: 33034 - DNA, 25 bp, Saccharomyces pastorianus
gagatagccaagctgttccattccg

SEQ ID NO: 33035 - DNA, 25 bp, Saccharomyces pastorianus
ttgcacccggtaattaacgatttcg

SEQ ID NO: 33036 - DNA, 25 bp, Saccharomyces pastorianus
atttcgtcggtaccgtggactcaga

SEQ ID NO: 33037 - DNA, 25 bp, Saccharomyces pastorianus
gttacagcttacaaaccattcctcg

SEQ ID NO: 33038 - DNA, 25 bp, Saccharomyces pastorianus
atcctaacattcactcccgaattga

SEQ ID NO: 33039 - DNA, 25 bp, Saccharomyces pastorianus
ggaagtttccttgctcttcagagaa

SEQ ID NO: 33040 - DNA, 25 bp, Saccharomyces pastorianus
gaagctttgtgatttcggagtcagc

SEQ ID NO: 33041 - DNA, 25 bp, Saccharomyces pastorianus
gacgattccgaatccggtattatat

SEQ ID NO: 33042 - DNA, 25 bp, Saccharomyces pastorianus
aatggcagcgaatatagctccgttt

SEQ ID NO: 33043 - DNA, 25 bp, Saccharomyces pastorianus
ggttcttgggaaaatcgccgaagca

SEQ ID NO: 33044 - DNA, 25 bp, Saccharomyces pastorianus
atacatgggcggcagatcattggat

SEQ ID NO: 33045 - DNA, 25 bp, Saccharomyces pastorianus
gattcaaggccaaccatatagtgtt

SEQ ID NO: 33046 - DNA, 25 bp, Saccharomyces pastorianus
agatgataagtcacccctggataaa

SEQ ID NO: 33047 - DNA, 25 bp, Saccharomyces pastorianus
gaagccgtaaactcactagctacaa

SEQ ID NO: 33048 - DNA, 25 bp, Saccharomyces pastorianus
gggacttccttttatatggctccag

SEQ ID NO: 33049 - DNA, 25 bp, Saccharomyces pastorianus
tccgtagataactttggccatgctt

SEQ ID NO: 33050 - DNA, 25 bp, Saccharomyces pastorianus
tagtgacttgtacactggtgtcaga

SEQ ID NO: 33051 - DNA, 25 bp, Saccharomyces pastorianus
gagagcgactccacttacaacgatg

SEQ ID NO: 33052 - DNA, 25 bp, Saccharomyces pastorianus
tggccatgctttaaatgctttcaaa

SEQ ID NO: 33053 - DNA, 25 bp, Saccharomyces pastorianus
gatccgtcgctgacttcagaaactt

SEQ ID NO: 33054 - DNA, 25 bp, Saccharomyces pastorianus
gaacttccttgatgacttctacgtt

SEQ ID NO: 33055 - DNA, 25 bp, Saccharomyces pastorianus
aacgatgagatactattccgaggaa

SEQ ID NO: 33056 - DNA, 25 bp, Saccharomyces pastorianus
aattggagagtcagctgggtgtcaa

SEQ ID NO: 33057 - DNA, 25 bp, Saccharomyces pastorianus
agattgttgagatccgtcgctgact

SEQ ID NO: 33058 - DNA, 25 bp, Saccharomyces pastorianus
gaagcgacatttgagctgccacaac

SEQ ID NO: 33059 - DNA, 25 bp, Saccharomyces pastorianus
caggtactgtttttcacgtacaaca

SEQ ID NO: 33060 - DNA, 25 bp, Saccharomyces pastorianus
aatagagaacgttgcgccgcttgaa

SEQ ID NO: 33061 - DNA, 25 bp, Saccharomyces pastorianus
agggcacaacgttgaggctcagact

SEQ ID NO: 33062 - DNA, 25 bp, Saccharomyces pastorianus
atcctagtaggcctatgcgagcttc

SEQ ID NO: 33063 - DNA, 25 bp, Saccharomyces pastorianus
aaattcggccaggtaatgttgtcaa

SEQ ID NO: 33064 - DNA, 25 bp, Saccharomyces pastorianus
taacggtgtgccgactataccaacg

SEQ ID NO: 33065 - DNA, 25 bp, Saccharomyces pastorianus
atccactgtggaatctcgtcaatca

SEQ ID NO: 33066 - DNA, 25 bp, Saccharomyces pastorianus
aaccgcgtactcttgtcgataacgg

SEQ ID NO: 33067 - DNA, 25 bp, Saccharomyces pastorianus
atatgcctcctgtgtcgtctagaaa

SEQ ID NO: 33068 - DNA, 25 bp, Saccharomyces pastorianus
atgcgagcttctgttatgatttcaa

SEQ ID NO: 33069 - DNA, 25 bp, Saccharomyces pastorianus
tataccaacgcctgctaacaacatt

SEQ ID NO: 33070 - DNA, 25 bp, Saccharomyces pastorianus
gaatcggtggtctcaactgctaaag

SEQ ID NO: 33071 - DNA, 25 bp, Saccharomyces pastorianus
aaacgcgttgaaccatctagaggac

SEQ ID NO: 33072 - DNA, 25 bp, Saccharomyces pastorianus
agaccactggctcatcacaaagata

SEQ ID NO: 33073 - DNA, 25 bp, Saccharomyces pastorianus
taccttccatggatacgttcctgga

SEQ ID NO: 33074 - DNA, 25 bp, Saccharomyces pastorianus
gtcacttcgtcgaccaaggattcaa

SEQ ID NO: 33075 - DNA, 25 bp, Saccharomyces pastorianus
attgaaagaatttctccccactgcg

SEQ ID NO: 33076 - DNA, 25 bp, Saccharomyces pastorianus
agattcctattgtcggcatcgtggc

SEQ ID NO: 33077 - DNA, 25 bp, Saccharomyces pastorianus
tggcttcgcccacgatacggaggaa

SEQ ID NO: 33078 - DNA, 25 bp, Saccharomyces pastorianus
ggcggtggcgaagtctacaatcaaa

SEQ ID NO: 33079 - DNA, 25 bp, Saccharomyces pastorianus
atcaaatgttcccacttacagacca

SEQ ID NO: 33080 - DNA, 25 bp, Saccharomyces pastorianus
gggaatccataccacctaaatttcg

SEQ ID NO: 33081 - DNA, 25 bp, Saccharomyces pastorianus
ccactgcggtcgaattgcccaaaaa

SEQ ID NO: 33082 - DNA, 25 bp, Saccharomyces pastorianus
atcgacacttcagctctctgagaaa

SEQ ID NO: 33083 - DNA, 25 bp, Saccharomyces pastorianus
ggcagaagcaattagatcgggcaat

SEQ ID NO: 33084 - DNA, 25 bp, Saccharomyces pastorianus
aaaaagactcgcaggttccacacca

SEQ ID NO: 33085 - DNA, 25 bp, Saccharomyces pastorianus
gacacccgccgagcatttaatagtt

SEQ ID NO: 33086 - DNA, 25 bp, Saccharomyces pastorianus
gttccacaccagttctatgattcgt

SEQ ID NO: 33087 - DNA, 25 bp, Saccharomyces pastorianus
caagtggaacgttaatcggcgctaa

SEQ ID NO: 33088 - DNA, 25 bp, Saccharomyces pastorianus
agaggatgctctgtacttgatttca

SEQ ID NO: 33089 - DNA, 25 bp, Saccharomyces pastorianus
tatgattcgtcaaagacacccgccg

SEQ ID NO: 33090 - DNA, 25 bp, Saccharomyces pastorianus
gaaagttggcatcgacacttcagct

SEQ ID NO: 33091 - DNA, 25 bp, Saccharomyces pastorianus
aaaggacgtctcaaccgcattgcat

SEQ ID NO: 33092 - DNA, 25 bp, Saccharomyces pastorianus
atcgagcagcagaatcctttggaga

SEQ ID NO: 33093 - DNA, 25 bp, Saccharomyces pastorianus
tagttaccaaaccaagtcaagacaa

SEQ ID NO: 33094 - DNA, 25 bp, Saccharomyces pastorianus
gttgacctatttttcctaaactatg

SEQ ID NO: 33095 - DNA, 25 bp, Saccharomyces pastorianus
ggattttccttgaaagcacatttga

SEQ ID NO: 33096 - DNA, 25 bp, Saccharomyces pastorianus
caggaattggtagcgttttgtctca

SEQ ID NO: 33097 - DNA, 25 bp, Saccharomyces pastorianus
gggctcagtcatttatgaagtatgc

SEQ ID NO: 33098 - DNA, 25 bp, Saccharomyces pastorianus
taagaccggagtggattttccttga

SEQ ID NO: 33099 - DNA, 25 bp, Saccharomyces pastorianus
aaacgatattccacgtggcacagga

SEQ ID NO: 33100 - DNA, 25 bp, Saccharomyces pastorianus
ttttgtctcaagtgcgtggcggatc

SEQ ID NO: 33101 - DNA, 25 bp, Saccharomyces pastorianus
gaagtatgcgacgacgaatattttt

SEQ ID NO: 33102 - DNA, 25 bp, Saccharomyces pastorianus
gtcaacgggactcatttaagaccgg

SEQ ID NO: 33103 - DNA, 25 bp, Saccharomyces pastorianus
caggtatgatactccggaacgctct

SEQ ID NO: 33104 - DNA, 25 bp, Saccharomyces pastorianus
gtgatttttcactagctggctctta

SEQ ID NO: 33105 - DNA, 25 bp, Saccharomyces pastorianus
aactggttgtcggtgaccttgtcat

SEQ ID NO: 33106 - DNA, 25 bp, Saccharomyces pastorianus
ctaccatggcactgcgtgagctaat

SEQ ID NO: 33107 - DNA, 25 bp, Saccharomyces pastorianus
gttgtattaccatcaccagggtttg

SEQ ID NO: 33108 - DNA, 25 bp, Saccharomyces pastorianus
agggacatcttcttatgctaccatg

SEQ ID NO: 33109 - DNA, 25 bp, Saccharomyces pastorianus
gaagctcgagacttctcgccgcggt

SEQ ID NO: 33110 - DNA, 25 bp, Saccharomyces pastorianus
aacatggacccatttgatatgagga

SEQ ID NO: 33111 - DNA, 25 bp, Saccharomyces pastorianus
gttcgtgcaaaagctgtgactcaag

SEQ ID NO: 33112 - DNA, 25 bp, Saccharomyces pastorianus
actgaaaaacctgtgtctgagacca

SEQ ID NO: 33113 - DNA, 25 bp, Saccharomyces pastorianus
ggtttgacgtgctttatccttctaa

SEQ ID NO: 33114 - DNA, 25 bp, Saccharomyces pastorianus
cgtgaagctcggtttgttcgtgcaa

SEQ ID NO: 33115 - DNA, 25 bp, Saccharomyces pastorianus
ggacgtggtgtcgtaatctctgttt

SEQ ID NO: 33116 - DNA, 25 bp, Saccharomyces pastorianus
ggaatccgcagatgcttacaatgtg

SEQ ID NO: 33117 - DNA, 25 bp, Saccharomyces pastorianus
ttcgccggaaaaacccttatctgat

SEQ ID NO: 33118 - DNA, 25 bp, Saccharomyces pastorianus
ggacaggctcatttggaaaccaccg

SEQ ID NO: 33119 - DNA, 25 bp, Saccharomyces pastorianus
actgttcttggatcacaaaacgttg

SEQ ID NO: 33120 - DNA, 25 bp, Saccharomyces pastorianus
atgaacttggccatcacctggtggg

SEQ ID NO: 33121 - DNA, 25 bp, Saccharomyces pastorianus
acagagcctattggtcagacacttt

SEQ ID NO: 33122 - DNA, 25 bp, Saccharomyces pastorianus
ggtcagacactttgataactctact

SEQ ID NO: 33123 - DNA, 25 bp, Saccharomyces pastorianus
agttcgatgacctcaatgactacaa

SEQ ID NO: 33124 - DNA, 25 bp, Saccharomyces pastorianus
gggacagcatatcattttcttaaat

SEQ ID NO: 33125 - DNA, 25 bp, Saccharomyces pastorianus
gactacaacggacatactgcacact

SEQ ID NO: 33126 - DNA, 25 bp, Saccharomyces pastorianus
tagtccccgtgtttgcattcggaga

SEQ ID NO: 33127 - DNA, 25 bp, Saccharomyces pastorianus
gggagacccatttatgttgaacaac

SEQ ID NO: 33128 - DNA, 25 bp, Saccharomyces pastorianus
gaatggtacacagctgatcttgaac

SEQ ID NO: 33129 - DNA, 25 bp, Saccharomyces pastorianus
agagcaccaatcaatgttgtcgtag

SEQ ID NO: 33130 - DNA, 25 bp, Saccharomyces pastorianus
ggttactcaatttcatatccctttt

SEQ ID NO: 33131 - DNA, 25 bp, Saccharomyces pastorianus
gttgatcatttccacgacttgtata

SEQ ID NO: 33132 - DNA, 25 bp, Saccharomyces pastorianus
tcaaggaaaacttcggctttaccat

SEQ ID NO: 33133 - DNA, 25 bp, Saccharomyces pastorianus
aatcctccagatgacgtcgttgatc

SEQ ID NO: 33134 - DNA, 25 bp, Saccharomyces pastorianus
aggtattcctatttccttaatgaca

SEQ ID NO: 33135 - DNA, 25 bp, Saccharomyces pastorianus
ggcattaggtatatcttctgtgtca

SEQ ID NO: 33136 - DNA, 25 bp, Saccharomyces pastorianus
gaagcggactcgacattgggtaaga

SEQ ID NO: 33137 - DNA, 25 bp, Saccharomyces pastorianus
gacgcagcttcgacctggatctgga

SEQ ID NO: 33138 - DNA, 25 bp, Saccharomyces pastorianus
tgttggccattaagtacccggacgt

SEQ ID NO: 33139 - DNA, 25 bp, Saccharomyces pastorianus
gctactggacaagactgcccattgt

SEQ ID NO: 33140 - DNA, 25 bp, Saccharomyces pastorianus
ttcgtcactgtcacggtagagtcat

SEQ ID NO: 33141 - DNA, 25 bp, Saccharomyces pastorianus
gctggccactctaaaatgcgcattg

SEQ ID NO: 33142 - DNA, 25 bp, Saccharomyces pastorianus
tggctcctgtttcaagtcgtcgggt

SEQ ID NO: 33143 - DNA, 25 bp, Saccharomyces pastorianus
attgtgggcattttcttctggctcc

SEQ ID NO: 33144 - DNA, 25 bp, Saccharomyces pastorianus
gtgatgtactggactctatgcaaga

SEQ ID NO: 33145 - DNA, 25 bp, Saccharomyces pastorianus
ctaagtcgagctacgtttccaacaa

SEQ ID NO: 33146 - DNA, 25 bp, Saccharomyces pastorianus
gacggcgctgatccaatgcacgaag

SEQ ID NO: 33147 - DNA, 25 bp, Saccharomyces pastorianus
taacatgctttttacctggtttcgg

SEQ ID NO: 33148 - DNA, 25 bp, Saccharomyces pastorianus
ggcctattagaattcccacttgtga

SEQ ID NO: 33149 - DNA, 25 bp, Saccharomyces pastorianus
gtatgcaatcgatcaaccagtacat

SEQ ID NO: 33150 - DNA, 25 bp, Saccharomyces pastorianus
ataggaaatcctttacggtgcatga

SEQ ID NO: 33151 - DNA, 25 bp, Saccharomyces pastorianus
gactgtaacttgttcggcctattag

SEQ ID NO: 33152 - DNA, 25 bp, Saccharomyces pastorianus
gctatggctccatatcggatgtgta

SEQ ID NO: 33153 - DNA, 25 bp, Saccharomyces pastorianus
tgtgagattctcatccaagtaggga

SEQ ID NO: 33154 - DNA, 25 bp, Saccharomyces pastorianus
ggtgattacgaccaaagtatgcaat

SEQ ID NO: 33155 - DNA, 25 bp, Saccharomyces pastorianus
ccaaatctttggtcgactgtaactt

SEQ ID NO: 33156 - DNA, 25 bp, Saccharomyces pastorianus
ttcttcttcatctttgaggaatcat

SEQ ID NO: 33157 - DNA, 25 bp, Saccharomyces pastorianus
aagtgtcgaagttttgcttttgaat

SEQ ID NO: 33158 - DNA, 25 bp, Saccharomyces pastorianus
aaagaactgggctatggctccatat

SEQ ID NO: 33159 - DNA, 25 bp, Saccharomyces pastorianus
agctgtgatcaagtcgcctgtttta

SEQ ID NO: 33160 - DNA, 25 bp, Saccharomyces pastorianus
aaggtgcagctgttccctgtaacaa

SEQ ID NO: 33161 - DNA, 25 bp, Saccharomyces pastorianus
gtgtctcttccgttgatgatgtata

SEQ ID NO: 33162 - DNA, 25 bp, Saccharomyces pastorianus
gaatacagctctaagcccttatgca

SEQ ID NO: 33163 - DNA, 25 bp, Saccharomyces pastorianus
gaagacgtcacgatctggaaaccta

SEQ ID NO: 33164 - DNA, 25 bp, Saccharomyces pastorianus
agtcgtagctataacattcgcggaa

SEQ ID NO: 33165 - DNA, 25 bp, Saccharomyces pastorianus
ataacatctttttcattcccagctt

SEQ ID NO: 33166 - DNA, 25 bp, Saccharomyces pastorianus
acattttggtagcactatgcccgga

SEQ ID NO: 33167 - DNA, 25 bp, Saccharomyces pastorianus
aagcaatctacagcacgcagtcgta

SEQ ID NO: 33168 - DNA, 25 bp, Saccharomyces pastorianus
ggaaaccgatcctctatgggagaaa

SEQ ID NO: 33169 - DNA, 25 bp, Saccharomyces pastorianus
gtacttttacggctcgctgaataca

SEQ ID NO: 33170 - DNA, 25 bp, Saccharomyces pastorianus
aattgcagtgtactctggacccaac

SEQ ID NO: 33171 - DNA, 25 bp, Saccharomyces pastorianus
ttcgatgcgagatccttaggcagat

SEQ ID NO: 33172 - DNA, 25 bp, Saccharomyces pastorianus
atttcagtgctccaagatgtgcttg

SEQ ID NO: 33173 - DNA, 25 bp, Saccharomyces pastorianus
tagactctactaaggttaccgcgtt

SEQ ID NO: 33174 - DNA, 25 bp, Saccharomyces pastorianus
gcagattcgaaggtacggcaccgga

SEQ ID NO: 33175 - DNA, 25 bp, Saccharomyces pastorianus
atttgctcttgtgggaccggtgtga

SEQ ID NO: 33176 - DNA, 25 bp, Saccharomyces pastorianus
ggacatattccaggtgctcagccat

SEQ ID NO: 33177 - DNA, 25 bp, Saccharomyces pastorianus
gccattaccttatactgaactgcta

SEQ ID NO: 33178 - DNA, 25 bp, Saccharomyces pastorianus
tgggacatcctcaagtgtacttgtt

SEQ ID NO: 33179 - DNA, 25 bp, Saccharomyces pastorianus
tccttacccaaagagccgctatgaa

SEQ ID NO: 33180 - DNA, 25 bp, Saccharomyces pastorianus
tgaactgctagacccggagaccaaa

SEQ ID NO: 33181 - DNA, 25 bp, Saccharomyces pastorianus
cgaggatgcatttttcactgagtta

SEQ ID NO: 33182 - DNA, 25 bp, Saccharomyces pastorianus
gtgctcggaatgtcatcaacacaat

SEQ ID NO: 33183 - DNA, 25 bp, Saccharomyces pastorianus
aaaacgtgtaaatggcggcgagcaa

SEQ ID NO: 33184 - DNA, 25 bp, Saccharomyces pastorianus
aagacgtacgtttcacacagctggc

SEQ ID NO: 33185 - DNA, 25 bp, Saccharomyces pastorianus
atggcccgtgatatatgtaccttgg

SEQ ID NO: 33186 - DNA, 25 bp, Saccharomyces pastorianus
gtgttcgtttatataccggcactaa

SEQ ID NO: 33187 - DNA, 25 bp, Saccharomyces pastorianus
acagtgaaatcccagttggtggtct

SEQ ID NO: 33188 - DNA, 25 bp, Saccharomyces pastorianus
gattcgaacaacatggcgacgtttt

SEQ ID NO: 33189 - DNA, 25 bp, Saccharomyces pastorianus
ggtctggtggctaagctagttccta

SEQ ID NO: 33190 - DNA, 25 bp, Saccharomyces pastorianus
gccaaggaatggttcatagctcatg

SEQ ID NO: 33191 - DNA, 25 bp, Saccharomyces pastorianus
atgccaacaatctgggtatgctgat

SEQ ID NO: 33192 - DNA, 25 bp, Saccharomyces pastorianus
ttgctccaaacaccaatcattgtcg

SEQ ID NO: 33193 - DNA, 25 bp, Saccharomyces pastorianus
ggttcgtgatttaccagctgtggaa

SEQ ID NO: 33194 - DNA, 25 bp, Saccharomyces pastorianus
taagattccattaggtcaacccgca

SEQ ID NO: 33195 - DNA, 25 bp, Saccharomyces pastorianus
gaagacgatgactactctagtgatg

SEQ ID NO: 33196 - DNA, 25 bp, Saccharomyces pastorianus
gagtcattgttaagtctacggatta

SEQ ID NO: 33197 - DNA, 25 bp, Saccharomyces pastorianus
agtactagttcgttctgcaaagcaa

SEQ ID NO: 33198 - DNA, 25 bp, Saccharomyces pastorianus
atcccaaagagatccgtttgctatt

SEQ ID NO: 33199 - DNA, 25 bp, Saccharomyces pastorianus
tggttccattttcatttgcgcctct

SEQ ID NO: 33200 - DNA, 25 bp, Saccharomyces pastorianus
aagtgctgctagtgattataccgat

SEQ ID NO: 33201 - DNA, 25 bp, Saccharomyces pastorianus
tacggattattttaccacggatttg

SEQ ID NO: 33202 - DNA, 25 bp, Saccharomyces pastorianus
tcttttccccacaaagagacgttgt

SEQ ID NO: 33203 - DNA, 25 bp, Saccharomyces pastorianus
attgaagagagatcccctggatgaa

SEQ ID NO: 33204 - DNA, 25 bp, Saccharomyces pastorianus
gttccaattattcgacgacgaccat

SEQ ID NO: 33205 - DNA, 25 bp, Saccharomyces pastorianus
cagtccgggccattgaacagtgagt

SEQ ID NO: 33206 - DNA, 25 bp, Saccharomyces pastorianus
atcaaaaatttgaggcgcgtggcta

SEQ ID NO: 33207 - DNA, 25 bp, Saccharomyces pastorianus
tttgaggcgcgtggctaaagaactg

SEQ ID NO: 33208 - DNA, 25 bp, Saccharomyces pastorianus
agcgaaggacgccatctgatgaaat

SEQ ID NO: 33209 - DNA, 25 bp, Saccharomyces pastorianus
ggctttcttgactatcatgagttga

SEQ ID NO: 33210 - DNA, 25 bp, Saccharomyces pastorianus
taaagagggcgttccaattattcga

SEQ ID NO: 33211 - DNA, 25 bp, Saccharomyces pastorianus
agttcgatctcgatggcgatggcga

SEQ ID NO: 33212 - DNA, 25 bp, Saccharomyces pastorianus
aatagatcgtcactacagtccgggc

SEQ ID NO: 33213 - DNA, 25 bp, Saccharomyces pastorianus
gaataatgatggctttcttgactat

SEQ ID NO: 33214 - DNA, 25 bp, Saccharomyces pastorianus
ccccaccaatataatcgactctaag

SEQ ID NO: 33215 - DNA, 25 bp, Saccharomyces pastorianus
gcttacgttaccaatcctgaaacag

SEQ ID NO: 33216 - DNA, 25 bp, Saccharomyces pastorianus
gttaagtagaggtcaccccaccaat

SEQ ID NO: 33217 - DNA, 25 bp, Saccharomyces pastorianus
gccctcgatggccaatttacacata

SEQ ID NO: 33218 - DNA, 25 bp, Saccharomyces pastorianus
gtttgagccatacatagattctgca

SEQ ID NO: 33219 - DNA, 25 bp, Saccharomyces pastorianus
tggtgcgatgatttactttgatgac

SEQ ID NO: 33220 - DNA, 25 bp, Saccharomyces pastorianus
catgatctggtttgttgctactgtc

SEQ ID NO: 33221 - DNA, 25 bp, Saccharomyces pastorianus
atatccagggatttcaattcgttaa

SEQ ID NO: 33222 - DNA, 25 bp, Saccharomyces pastorianus
tcatttgctaaatcggagtgccatt

SEQ ID NO: 33223 - DNA, 25 bp, Saccharomyces pastorianus
gtattaccacgatctacacagttaa

SEQ ID NO: 33224 - DNA, 25 bp, Saccharomyces pastorianus
tacagatagggatacactccgtgcc

SEQ ID NO: 33225 - DNA, 25 bp, Saccharomyces pastorianus
tgaagccgggttctttgccataaga

SEQ ID NO: 33226 - DNA, 25 bp, Saccharomyces pastorianus
gctattgactcagatggacgggttt

SEQ ID NO: 33227 - DNA, 25 bp, Saccharomyces pastorianus
tgccattggtggtcgtagattcagc

SEQ ID NO: 33228 - DNA, 25 bp, Saccharomyces pastorianus
atactttggatcctgctcttttgag

SEQ ID NO: 33229 - DNA, 25 bp, Saccharomyces pastorianus
ggctacgaacagaccggatactttg

SEQ ID NO: 33230 - DNA, 25 bp, Saccharomyces pastorianus
taacctgggccaaactaagatcatc

SEQ ID NO: 33231 - DNA, 25 bp, Saccharomyces pastorianus
tagattcagcgaaggtacctccgcc

SEQ ID NO: 33232 - DNA, 25 bp, Saccharomyces pastorianus
tccgccgatcgtgaaatccaacgta

SEQ ID NO: 33233 - DNA, 25 bp, Saccharomyces pastorianus
accattggcgctaacttcatctttt

SEQ ID NO: 33234 - DNA, 25 bp, Saccharomyces pastorianus
gtaactgtgccactgaagccgggtt

SEQ ID NO: 33235 - DNA, 25 bp, Saccharomyces pastorianus
gagtttgatttcgaggctgctgtga

SEQ ID NO: 33236 - DNA, 25 bp, Saccharomyces pastorianus
atatttggtgcatctgaagtgggcg

SEQ ID NO: 33237 - DNA, 25 bp, Saccharomyces pastorianus
ctggtttcctttgaagttttggctg

SEQ ID NO: 33238 - DNA, 25 bp, Saccharomyces pastorianus
acatgcctcatatcaacgtcttttc

SEQ ID NO: 33239 - DNA, 25 bp, Saccharomyces pastorianus
gtttctgatttcaacctggtttcct

SEQ ID NO: 33240 - DNA, 25 bp, Saccharomyces pastorianus
ctatgctaatgatggacatgcctca

SEQ ID NO: 33241 - DNA, 25 bp, Saccharomyces pastorianus
gaaaaagaaggttccggtgctctgg

SEQ ID NO: 33242 - DNA, 25 bp, Saccharomyces pastorianus
agagaaggtgcattgctcgcaagct

SEQ ID NO: 33243 - DNA, 25 bp, Saccharomyces pastorianus
gctcgcaagctatgacattcaagat

SEQ ID NO: 33244 - DNA, 25 bp, Saccharomyces pastorianus
catctccttcacaatatgtctctat

SEQ ID NO: 33245 - DNA, 25 bp, Saccharomyces pastorianus
cagtgagctggtttctgatttcaac

SEQ ID NO: 33246 - DNA, 25 bp, Saccharomyces pastorianus
tatgtctctattttgctactagcat

SEQ ID NO: 33247 - DNA, 25 bp, Saccharomyces pastorianus
ggaagaagttcttgatgataccaaa

SEQ ID NO: 33248 - DNA, 25 bp, Saccharomyces pastorianus
tgttagtgaagcaaagactgtcatt

SEQ ID NO: 33249 - DNA, 25 bp, Saccharomyces pastorianus
aagaagctcatgtggcgaaactcaa

SEQ ID NO: 33250 - DNA, 25 bp, Saccharomyces pastorianus
tcaaagaagagggttactaccaaca

SEQ ID NO: 33251 - DNA, 25 bp, Saccharomyces pastorianus
attcctagaatcgtaccaaggtact

SEQ ID NO: 33252 - DNA, 25 bp, Saccharomyces pastorianus
caaagtcaaggctttaaagaggcta

SEQ ID NO: 33253 - DNA, 25 bp, Saccharomyces pastorianus
aagcgttgattcatacgatttgaaa

SEQ ID NO: 33254 - DNA, 25 bp, Saccharomyces pastorianus
gataccaaaagactactgcccactt

SEQ ID NO: 33255 - DNA, 25 bp, Saccharomyces pastorianus
tcatgtggcgaaactcaaagaggat

SEQ ID NO: 33256 - DNA, 25 bp, Saccharomyces pastorianus
gactactgcccactttgtatgagaa

SEQ ID NO: 33257 - DNA, 25 bp, Saccharomyces pastorianus
gaagatttggcacaattcctagaat

SEQ ID NO: 33258 - DNA, 25 bp, Saccharomyces pastorianus
gatgattggtttgcctctattgccg

SEQ ID NO: 33259 - DNA, 25 bp, Saccharomyces pastorianus
gtctcgtattctgcaagtggatcca

SEQ ID NO: 33260 - DNA, 25 bp, Saccharomyces pastorianus
ggaaagtacgccagctaacgacaaa

SEQ ID NO: 33261 - DNA, 25 bp, Saccharomyces pastorianus
tggtacacaagctccagtagacgcc

SEQ ID NO: 33262 - DNA, 25 bp, Saccharomyces pastorianus
ctattagagcacttggtcaccatca

SEQ ID NO: 33263 - DNA, 25 bp, Saccharomyces pastorianus
gacgccatagtaattctccggacaa

SEQ ID NO: 33264 - DNA, 25 bp, Saccharomyces pastorianus
gacgccgacgttaacgccaatgtga

SEQ ID NO: 33265 - DNA, 25 bp, Saccharomyces pastorianus
attgccgcttgtacgacggattcta

SEQ ID NO: 33266 - DNA, 25 bp, Saccharomyces pastorianus
atgcagataaagctcctcatggaca

SEQ ID NO: 33267 - DNA, 25 bp, Saccharomyces pastorianus
gtttgttacgtctattgccacatgc

SEQ ID NO: 33268 - DNA, 25 bp, Saccharomyces pastorianus
gaatcggattcaaagccggctcaaa

SEQ ID NO: 33269 - DNA, 25 bp, Saccharomyces pastorianus
aactggagcccgaattacatgacaa

SEQ ID NO: 33270 - DNA, 25 bp, Saccharomyces pastorianus
tggttagactgcaacgcggtgtttt

SEQ ID NO: 33271 - DNA, 25 bp, Saccharomyces pastorianus
aaactttggctaacctggcgttgat

SEQ ID NO: 33272 - DNA, 25 bp, Saccharomyces pastorianus
gaacgttgccgttaattctgcgaac

SEQ ID NO: 33273 - DNA, 25 bp, Saccharomyces pastorianus
tgggcgaaccagtcgttgaacgttg

SEQ ID NO: 33274 - DNA, 25 bp, Saccharomyces pastorianus
aaagggtatctctgtgttcgacgca

SEQ ID NO: 33275 - DNA, 25 bp, Saccharomyces pastorianus
aagttgaaaaacatctccccacatt

SEQ ID NO: 33276 - DNA, 25 bp, Saccharomyces pastorianus
ggttgaacaacctggtgcccaagtt

SEQ ID NO: 33277 - DNA, 25 bp, Saccharomyces pastorianus
ttgatctcagtcaccatgttttccg

SEQ ID NO: 33278 - DNA, 25 bp, Saccharomyces pastorianus
aatggtcattccacctttgttgttg

SEQ ID NO: 33279 - DNA, 25 bp, Saccharomyces pastorianus
attcgagattgatcatgggccgtct

SEQ ID NO: 33280 - DNA, 25 bp, Saccharomyces pastorianus
gacgtgctccactatctctattaga

SEQ ID NO: 33281 - DNA, 25 bp, Saccharomyces pastorianus
atgtcagatccacttctccaatgta

SEQ ID NO: 33282 - DNA, 25 bp, Saccharomyces pastorianus
tcacattgcatgatcctcgtttagg

SEQ ID NO: 33283 - DNA, 25 bp, Saccharomyces pastorianus
acaattgccctccttgaacttgttg

SEQ ID NO: 33284 - DNA, 25 bp, Saccharomyces pastorianus
gtcccgagaacgagtacatcctgtg

SEQ ID NO: 33285 - DNA, 25 bp, Saccharomyces pastorianus
actttgtctcttcattggacacctg

SEQ ID NO: 33286 - DNA, 25 bp, Saccharomyces pastorianus
taacaccgtcggttattccgtatca

SEQ ID NO: 33287 - DNA, 25 bp, Saccharomyces pastorianus
aagagccacatcgtactcgttactt

SEQ ID NO: 33288 - DNA, 25 bp, Saccharomyces pastorianus
ggtaccatcagaagacgtgctccac

SEQ ID NO: 33289 - DNA, 25 bp, Saccharomyces pastorianus
ctgtgctcaggttcccatgatggga

SEQ ID NO: 33290 - DNA, 25 bp, Saccharomyces pastorianus
atcttccaaggtcacgcagcaacaa

SEQ ID NO: 33291 - DNA, 25 bp, Saccharomyces pastorianus
ggcgccctacaagaaatcgagcaat

SEQ ID NO: 33292 - DNA, 25 bp, Saccharomyces pastorianus
taatgcttgaaagaggcgccctaca

SEQ ID NO: 33293 - DNA, 25 bp, Saccharomyces pastorianus
aatttcactccggaacagtgcgaaa

SEQ ID NO: 33294 - DNA, 25 bp, Saccharomyces pastorianus
tggacccatttcacttgcaacatat

SEQ ID NO: 33295 - DNA, 25 bp, Saccharomyces pastorianus
tggaatatacatttgcgcagcagaa

SEQ ID NO: 33296 - DNA, 25 bp, Saccharomyces pastorianus
gagaacctaatgataccactgtgaa

SEQ ID NO: 33297 - DNA, 25 bp, Saccharomyces pastorianus
tgatatttacctgctggatgccacc

SEQ ID NO: 33298 - DNA, 25 bp, Saccharomyces pastorianus
aagaggcgcacgtaacgccgacttt

SEQ ID NO: 33299 - DNA, 25 bp, Saccharomyces pastorianus
aaaacttggtagctatcggtgagaa

SEQ ID NO: 33300 - DNA, 25 bp, Saccharomyces pastorianus
gaagttggacgattggacccatttc

SEQ ID NO: 33301 - DNA, 25 bp, Saccharomyces pastorianus
aagggcaatcgccatttccgatgac

SEQ ID NO: 33302 - DNA, 25 bp, Saccharomyces pastorianus
tgccgggaccaccttttatgaaaat

SEQ ID NO: 33303 - DNA, 25 bp, Saccharomyces pastorianus
gaacccattttcatagaacatttga

SEQ ID NO: 33304 - DNA, 25 bp, Saccharomyces pastorianus
caaagctttgataacatcggagatc

SEQ ID NO: 33305 - DNA, 25 bp, Saccharomyces pastorianus
aaacgaatgtgctgtttcagaccat

SEQ ID NO: 33306 - DNA, 25 bp, Saccharomyces pastorianus
gataatctaaatgccgggaccacct

SEQ ID NO: 33307 - DNA, 25 bp, Saccharomyces pastorianus
gacgaagcgtaggtcttctgaatat

SEQ ID NO: 33308 - DNA, 25 bp, Saccharomyces pastorianus
gaaatattctctacggttgctcgaa

SEQ ID NO: 33309 - DNA, 25 bp, Saccharomyces pastorianus
gtttcagaccattgacaaagctttg

SEQ ID NO: 33310 - DNA, 25 bp, Saccharomyces pastorianus
ggcacaacagactttgaacccattt

SEQ ID NO: 33311 - DNA, 25 bp, Saccharomyces pastorianus
gtcatacaggagagaagcgagcata

SEQ ID NO: 33312 - DNA, 25 bp, Saccharomyces pastorianus
gagatcaaattaccggtatccaacg

SEQ ID NO: 33313 - DNA, 25 bp, Saccharomyces pastorianus
gacctctacgaaagtctggtaccta

SEQ ID NO: 33314 - DNA, 25 bp, Saccharomyces pastorianus
agtgtatcaataccattgccctcga

SEQ ID NO: 33315 - DNA, 25 bp, Saccharomyces pastorianus
atctaggttcgaaggtggcgtcgca

SEQ ID NO: 33316 - DNA, 25 bp, Saccharomyces pastorianus
tacggctgacaataatcccagtggt

SEQ ID NO: 33317 - DNA, 25 bp, Saccharomyces pastorianus
ggtacctaaaattctggagccacgt

SEQ ID NO: 33318 - DNA, 25 bp, Saccharomyces pastorianus
aaaggcgttctgagtctaggcccga

SEQ ID NO: 33319 - DNA, 25 bp, Saccharomyces pastorianus
gtctaggcccgattcagacgtagat

SEQ ID NO: 33320 - DNA, 25 bp, Saccharomyces pastorianus
tagcgaattgccatttcctgttcca

SEQ ID NO: 33321 - DNA, 25 bp, Saccharomyces pastorianus
gtgaaaacacttctgctacggctga

SEQ ID NO: 33322 - DNA, 25 bp, Saccharomyces pastorianus
attgccctcgatacgtgaagccagg

SEQ ID NO: 33323 - DNA, 25 bp, Saccharomyces pastorianus
acgcaccaggtcacaagttacacaa

SEQ ID NO: 33324 - DNA, 25 bp, Saccharomyces pastorianus
aatcagcagcatccaaattcaaaga

SEQ ID NO: 33325 - DNA, 25 bp, Saccharomyces pastorianus
ggttacattggctagtcagggaaaa

SEQ ID NO: 33326 - DNA, 25 bp, Saccharomyces pastorianus
gaaatacctgccaacagagcaatcg

SEQ ID NO: 33327 - DNA, 25 bp, Saccharomyces pastorianus
tacccagaatccaattgtccgactt

SEQ ID NO: 33328 - DNA, 25 bp, Saccharomyces pastorianus
gtccgactttgattgtgtattaccg

SEQ ID NO: 33329 - DNA, 25 bp, Saccharomyces pastorianus
agagcaatcgaaaactacccagaat

SEQ ID NO: 33330 - DNA, 25 bp, Saccharomyces pastorianus
gtgttcgttcatctatcattgcaaa

SEQ ID NO: 33331 - DNA, 25 bp, Saccharomyces pastorianus
tttcccaccttttacaatcagcagc

SEQ ID NO: 33332 - DNA, 25 bp, Saccharomyces pastorianus
aatagcggtgtctacgtgttcgttc

SEQ ID NO: 33333 - DNA, 25 bp, Saccharomyces pastorianus
tacagagtagaatcctttcccacct

SEQ ID NO: 33334 - DNA, 25 bp, Saccharomyces pastorianus
ttatggtaaaggtcggtgccgtatc

SEQ ID NO: 33335 - DNA, 25 bp, Saccharomyces pastorianus
agatacctcgattaacccgactggg

SEQ ID NO: 33336 - DNA, 25 bp, Saccharomyces pastorianus
gaacaagccactaaactaggacatt

SEQ ID NO: 33337 - DNA, 25 bp, Saccharomyces pastorianus
gatgatgtgcctacatcctacactt

SEQ ID NO: 33338 - DNA, 25 bp, Saccharomyces pastorianus
gcaggttgccaaagcgtcggatgaa

SEQ ID NO: 33339 - DNA, 25 bp, Saccharomyces pastorianus
gcctacatcctacacttcaggttta

SEQ ID NO: 33340 - DNA, 25 bp, Saccharomyces pastorianus
aagaacctagcgttagtgagtcatg

SEQ ID NO: 33341 - DNA, 25 bp, Saccharomyces pastorianus
tgagtcatggtggtgctattaggat

SEQ ID NO: 33342 - DNA, 25 bp, Saccharomyces pastorianus
gataagcatggtgagggttccttta

SEQ ID NO: 33343 - DNA, 25 bp, Saccharomyces pastorianus
tcgtcatcagacgtgttggtaacac

SEQ ID NO: 33344 - DNA, 25 bp, Saccharomyces pastorianus
gtaggcaaacgacatctttagtttt

SEQ ID NO: 33345 - DNA, 25 bp, Saccharomyces pastorianus
aacacctccgtcactatagttgact

SEQ ID NO: 33346 - DNA, 25 bp, Saccharomyces pastorianus
aatggactgtgtttctgtatgacgt

SEQ ID NO: 33347 - DNA, 25 bp, Saccharomyces pastorianus
ggatccgcatcagattgaaccaagt

SEQ ID NO: 33348 - DNA, 25 bp, Saccharomyces pastorianus
gaagtccagatgcaacaccttttag

SEQ ID NO: 33349 - DNA, 25 bp, Saccharomyces pastorianus
atgtaccattgcctcaacgggccaa

SEQ ID NO: 33350 - DNA, 25 bp, Saccharomyces pastorianus
caacgcgcttacaccaggtattgaa

SEQ ID NO: 33351 - DNA, 25 bp, Saccharomyces pastorianus
agctctgctggcacataagccggat

SEQ ID NO: 33352 - DNA, 25 bp, Saccharomyces pastorianus
gagcaatgggcaattcttcgatgaa

SEQ ID NO: 33353 - DNA, 25 bp, Saccharomyces pastorianus
tactgctactcgcaatgtaccattg

SEQ ID NO: 33354 - DNA, 25 bp, Saccharomyces pastorianus
aattatgctcatcagcccagacaag

SEQ ID NO: 33355 - DNA, 25 bp, Saccharomyces pastorianus
ggatgtgccgaacctggaaaccagt

SEQ ID NO: 33356 - DNA, 25 bp, Saccharomyces pastorianus
gaaccaagtcttattgctttgcaga

SEQ ID NO: 33357 - DNA, 25 bp, Saccharomyces pastorianus
tgagtactctgtggttcgtattcct

SEQ ID NO: 33358 - DNA, 25 bp, Saccharomyces pastorianus
aaagttgcccacaccaatggttatt

SEQ ID NO: 33359 - DNA, 25 bp, Saccharomyces pastorianus
tgtattgaatgcttggaacggaacc

SEQ ID NO: 33360 - DNA, 25 bp, Saccharomyces pastorianus
ttattcgaacacttcactttaccct

SEQ ID NO: 33361 - DNA, 25 bp, Saccharomyces pastorianus
aatcaaagtgatgtcgtttcgggca

SEQ ID NO: 33362 - DNA, 25 bp, Saccharomyces pastorianus
cgtattcctggctctattaacgtgc

SEQ ID NO: 33363 - DNA, 25 bp, Saccharomyces pastorianus
gtttcgggcattacctcttataaat

SEQ ID NO: 33364 - DNA, 25 bp, Saccharomyces pastorianus
tgatgcgtttgccttggactcgctc

SEQ ID NO: 33365 - DNA, 25 bp, Saccharomyces pastorianus
gaacaaaccggcattccaaaacctg

SEQ ID NO: 33366 - DNA, 25 bp, Saccharomyces pastorianus
ggactcgctcgaattcaaggaacaa

SEQ ID NO: 33367 - DNA, 25 bp, Saccharomyces pastorianus
gattttctattgtgcatctggtaaa

SEQ ID NO: 33368 - DNA, 25 bp, Saccharomyces pastorianus
ttaagaatctggtggaacatcctaa

SEQ ID NO: 33369 - DNA, 25 bp, Saccharomyces pastorianus
aaacagtgcccctggtgctcttgga

SEQ ID NO: 33370 - DNA, 25 bp, Saccharomyces pastorianus
gacacagtacaggtatactctcgag

SEQ ID NO: 33371 - DNA, 25 bp, Saccharomyces pastorianus
aaggactttcacaagatctttcaat

SEQ ID NO: 33372 - DNA, 25 bp, Saccharomyces pastorianus
ggttccatcactgactggttagcta

SEQ ID NO: 33373 - DNA, 25 bp, Saccharomyces pastorianus
gatacaaagctactcgttgacgtga

SEQ ID NO: 33374 - DNA, 25 bp, Saccharomyces pastorianus
aactcgccttcgctaatcttgagga

SEQ ID NO: 33375 - DNA, 25 bp, Saccharomyces pastorianus
tactcgttgacgtgagggaacccaa

SEQ ID NO: 33376 - DNA, 25 bp, Saccharomyces pastorianus
aaatattccagtaaacagtgcccct

SEQ ID NO: 33377 - DNA, 25 bp, Saccharomyces pastorianus
accggtatttatcctggttccatca

SEQ ID NO: 33378 - DNA, 25 bp, Saccharomyces pastorianus
aattggctaggtcttatgggtacga

SEQ ID NO: 33379 - DNA, 25 bp, Saccharomyces pastorianus
gaaaaacttggatctctgctcgaaa

SEQ ID NO: 33380 - DNA, 25 bp, Saccharomyces pastorianus
atatttcgccaaacgaaggcccgct

SEQ ID NO: 33381 - DNA, 25 bp, Saccharomyces pastorianus
aatttttccacgacacttttgatat

SEQ ID NO: 33382 - DNA, 25 bp, Saccharomyces pastorianus
tatcgtcgacttttctctttcaaga

SEQ ID NO: 33383 - DNA, 25 bp, Saccharomyces pastorianus
gcccgctcagtaaacgcttcgaata

SEQ ID NO: 33384 - DNA, 25 bp, Saccharomyces pastorianus
aagtattgctcttgattggttgggc

SEQ ID NO: 33385 - DNA, 25 bp, Saccharomyces pastorianus
aagtagctggtgtgagtccacctta

SEQ ID NO: 33386 - DNA, 25 bp, Saccharomyces pastorianus
tggtcgttttcgatgctgccaaaga

SEQ ID NO: 33387 - DNA, 25 bp, Saccharomyces pastorianus
atatacaggcgcaaggaccatcgcg

SEQ ID NO: 33388 - DNA, 25 bp, Saccharomyces pastorianus
ctgctcgaaaaatctcccaaacttt

SEQ ID NO: 33389 - DNA, 25 bp, Saccharomyces pastorianus
ggatctatccaagccaatgactgat

SEQ ID NO: 33390 - DNA, 25 bp, Saccharomyces pastorianus
atgacgactctttggaactggaaaa

SEQ ID NO: 33391 - DNA, 25 bp, Saccharomyces pastorianus
cgatattttcttggctaaaccctct

SEQ ID NO: 33392 - DNA, 25 bp, Saccharomyces pastorianus
agttgccaaacaagcccaagcgttg

SEQ ID NO: 33393 - DNA, 25 bp, Saccharomyces pastorianus
agggctcagtggtatatgacgactc

SEQ ID NO: 33394 - DNA, 25 bp, Saccharomyces pastorianus
atggccttgattatgttcgcacacc

SEQ ID NO: 33395 - DNA, 25 bp, Saccharomyces pastorianus
gggtgatgacacaccaatcagtttt

SEQ ID NO: 33396 - DNA, 25 bp, Saccharomyces pastorianus
agagacccttcaagattttcatttg

SEQ ID NO: 33397 - DNA, 25 bp, Saccharomyces pastorianus
tcaagtaccctattgcctttgataa

SEQ ID NO: 33398 - DNA, 25 bp, Saccharomyces pastorianus
agcgttgtacgactttgctcttaac

SEQ ID NO: 33399 - DNA, 25 bp, Saccharomyces pastorianus
tggtgccactactcctattgatata

SEQ ID NO: 33400 - DNA, 25 bp, Saccharomyces pastorianus
taagtctgccagaacctcagcgagg

SEQ ID NO: 33401 - DNA, 25 bp, Saccharomyces pastorianus
ctggtacattaagcccgttgtcgga

SEQ ID NO: 33402 - DNA, 25 bp, Saccharomyces pastorianus
taatttctccgaagatcctcgttcc

SEQ ID NO: 33403 - DNA, 25 bp, Saccharomyces pastorianus
gggtgatttccagtttttgtacatt

SEQ ID NO: 33404 - DNA, 25 bp, Saccharomyces pastorianus
aacactgttttgttctttgtctcaa

SEQ ID NO: 33405 - DNA, 25 bp, Saccharomyces pastorianus
gaatccggaatcgtactttggtaag

SEQ ID NO: 33406 - DNA, 25 bp, Saccharomyces pastorianus
attttgaccgctgtcatcttatccg

SEQ ID NO: 33407 - DNA, 25 bp, Saccharomyces pastorianus
gaccctcagctaacttaatttctcc

SEQ ID NO: 33408 - DNA, 25 bp, Saccharomyces pastorianus
atcttatccgttggtccaccatata

SEQ ID NO: 33409 - DNA, 25 bp, Saccharomyces pastorianus
gatattgtagcctctatttgcgtga

SEQ ID NO: 33410 - DNA, 25 bp, Saccharomyces pastorianus
cctcgttcctcttttgatcagtata

SEQ ID NO: 33411 - DNA, 25 bp, Saccharomyces pastorianus
gacgatgctgtagagtcctcagata

SEQ ID NO: 33412 - DNA, 25 bp, Saccharomyces pastorianus
gtttagctcctctgttggtgtagta

SEQ ID NO: 33413 - DNA, 25 bp, Saccharomyces pastorianus
aaagagttctttccgaccagctgct

SEQ ID NO: 33414 - DNA, 25 bp, Saccharomyces pastorianus
cctggtatggccgttggtacaattt

SEQ ID NO: 33415 - DNA, 25 bp, Saccharomyces pastorianus
gactatcctgaagttgctacatcgc

SEQ ID NO: 33416 - DNA, 25 bp, Saccharomyces pastorianus
gtaccgtgtagatcctataccgcag

SEQ ID NO: 33417 - DNA, 25 bp, Saccharomyces pastorianus
tatagcttgcttttactcgtaccgt

SEQ ID NO: 33418 - DNA, 25 bp, Saccharomyces pastorianus
tgctttattcgccagtatctcttta

SEQ ID NO: 33419 - DNA, 25 bp, Saccharomyces pastorianus
gtacatttcgacacttggttgcaat

SEQ ID NO: 33420 - DNA, 25 bp, Saccharomyces pastorianus
tccatcttcaacgattttacctctg

SEQ ID NO: 33421 - DNA, 25 bp, Saccharomyces pastorianus
aatgacacctttctccatgttcaag

SEQ ID NO: 33422 - DNA, 25 bp, Saccharomyces pastorianus
ggtcatgcccagagactttcaagct

SEQ ID NO: 33423 - DNA, 25 bp, Saccharomyces pastorianus
aaagcctatcccagttgtgtacgac

SEQ ID NO: 33424 - DNA, 25 bp, Saccharomyces pastorianus
aagacaacgaccgaatctgcaggcg

SEQ ID NO: 33425 - DNA, 25 bp, Saccharomyces pastorianus
gggtaacttggcagctttcgacagc

SEQ ID NO: 33426 - DNA, 25 bp, Saccharomyces pastorianus
taagaacttgccagttaccgttgaa

SEQ ID NO: 33427 - DNA, 25 bp, Saccharomyces pastorianus
ttgccaccactgagctaccaagaga

SEQ ID NO: 33428 - DNA, 25 bp, Saccharomyces pastorianus
gaagcttctggtgaatgggctccaa

SEQ ID NO: 33429 - DNA, 25 bp, Saccharomyces pastorianus
gtgatgactttactacaacttcctg

SEQ ID NO: 33430 - DNA, 25 bp, Saccharomyces pastorianus
atcaaccagctattatctctgccta

SEQ ID NO: 33431 - DNA, 25 bp, Saccharomyces pastorianus
tcacccgtgacaatgttcagctact

SEQ ID NO: 33432 - DNA, 25 bp, Saccharomyces pastorianus
gctttcgacagcaacgttttggata

SEQ ID NO: 33433 - DNA, 25 bp, Saccharomyces pastorianus
gtaccagcggccaaagttctgtgat

SEQ ID NO: 33434 - DNA, 25 bp, Saccharomyces pastorianus
gaagagtctcattcgacgcagatgt

SEQ ID NO: 33435 - DNA, 25 bp, Saccharomyces pastorianus
gtacccgctattggatgcatcctta

SEQ ID NO: 33436 - DNA, 25 bp, Saccharomyces pastorianus
tgcatccttatcatctgttttcttg

SEQ ID NO: 33437 - DNA, 25 bp, Saccharomyces pastorianus
tgctaatctgtcgtggttggaaacc

SEQ ID NO: 33438 - DNA, 25 bp, Saccharomyces pastorianus
tgtacctttttatgcatccttgacc

SEQ ID NO: 33439 - DNA, 25 bp, Saccharomyces pastorianus
atacgagctgttcttccaggagcaa

SEQ ID NO: 33440 - DNA, 25 bp, Saccharomyces pastorianus
gaccggtggagttatgtacccgcta

SEQ ID NO: 33441 - DNA, 25 bp, Saccharomyces pastorianus
gacgcagatgttcaaacctccggag

SEQ ID NO: 33442 - DNA, 25 bp, Saccharomyces pastorianus
actactcaacgcttcttctattata

SEQ ID NO: 33443 - DNA, 25 bp, Saccharomyces pastorianus
gacctctcagtatgaaggctcttac

SEQ ID NO: 33444 - DNA, 25 bp, Saccharomyces pastorianus
ttcagtacggtttcacgagctgtat

SEQ ID NO: 33445 - DNA, 25 bp, Saccharomyces pastorianus
ttagagcaaatctccccgacaattt

SEQ ID NO: 33446 - DNA, 25 bp, Saccharomyces pastorianus
caccaaattcaacaactactcgcat

SEQ ID NO: 33447 - DNA, 25 bp, Saccharomyces pastorianus
gcaagccaagggaaacctaagccgg

SEQ ID NO: 33448 - DNA, 25 bp, Saccharomyces pastorianus
cctaagccggtactgatcaatccat

SEQ ID NO: 33449 - DNA, 25 bp, Saccharomyces pastorianus
gaggcaaggcttttgtttcatagag

SEQ ID NO: 33450 - DNA, 25 bp, Saccharomyces pastorianus
tactcgcatacaacgatgtgagctt

SEQ ID NO: 33451 - DNA, 25 bp, Saccharomyces pastorianus
aataatgccgcccatgatcgttgac

SEQ ID NO: 33452 - DNA, 25 bp, Saccharomyces pastorianus
aatgagtgcattttcgtcaattaaa

SEQ ID NO: 33453 - DNA, 25 bp, Saccharomyces pastorianus
tacactgacagtggacatgatcata

SEQ ID NO: 33454 - DNA, 25 bp, Saccharomyces pastorianus
ctccccgacaattttcgagatgatt

SEQ ID NO: 33455 - DNA, 25 bp, Saccharomyces pastorianus
gatcgttgaccactcttatttattc

SEQ ID NO: 33456 - DNA, 25 bp, Saccharomyces pastorianus
tggcttatcgcagaggttttcatca

SEQ ID NO: 33457 - DNA, 25 bp, Saccharomyces pastorianus
acagcatcattgacctttgcgtgaa

SEQ ID NO: 33458 - DNA, 25 bp, Saccharomyces pastorianus
gaagccgccaaagcattccagaatg

SEQ ID NO: 33459 - DNA, 25 bp, Saccharomyces pastorianus
tggtacaccgagttctccataagtc

SEQ ID NO: 33460 - DNA, 25 bp, Saccharomyces pastorianus
ggagaccgttttcaagctggctcaa

SEQ ID NO: 33461 - DNA, 25 bp, Saccharomyces pastorianus
aaactcacacgacatggctccggag

SEQ ID NO: 33462 - DNA, 25 bp, Saccharomyces pastorianus
tccggaggtgattagctcgcgcata

SEQ ID NO: 33463 - DNA, 25 bp, Saccharomyces pastorianus
gtctactggactcgttaagcgtggt

SEQ ID NO: 33464 - DNA, 25 bp, Saccharomyces pastorianus
aattttatcaactcgccaaactcac

SEQ ID NO: 33465 - DNA, 25 bp, Saccharomyces pastorianus
atgttgctggaaccaccgctggtac

SEQ ID NO: 33466 - DNA, 25 bp, Saccharomyces pastorianus
gatgtacaccttgtggcaaaccgaa

SEQ ID NO: 33467 - DNA, 25 bp, Saccharomyces pastorianus
tctcaatacacctgccaagactaca

SEQ ID NO: 33468 - DNA, 25 bp, Saccharomyces pastorianus
tcaatacacctgccaagactacata

SEQ ID NO: 33469 - DNA, 25 bp, Saccharomyces pastorianus
aactctcaatacacctgccaagact

SEQ ID NO: 33470 - DNA, 25 bp, Saccharomyces pastorianus
aatacacctgccaagactacatatc

SEQ ID NO: 33471 - DNA, 25 bp, Saccharomyces pastorianus
atacacctgccaagactacatatct

SEQ ID NO: 33472 - DNA, 25 bp, Saccharomyces pastorianus
ctcaatacacctgccaagactacat

SEQ ID NO: 33473 - DNA, 25 bp, Saccharomyces pastorianus
actctcaatacacctgccaagacta

SEQ ID NO: 33474 - DNA, 25 bp, Saccharomyces pastorianus
caatacacctgccaagactacatat

SEQ ID NO: 33475 - DNA, 25 bp, Saccharomyces pastorianus
gttgtcactgtatttgacctcgcaa

SEQ ID NO: 33476 - DNA, 25 bp, Saccharomyces pastorianus
actgtatttgacctcgcaagtgaaa

SEQ ID NO: 33477 - DNA, 25 bp, Saccharomyces pastorianus
aatcattgaaggacgtacaaaggca

SEQ ID NO: 33478 - DNA, 25 bp, Saccharomyces pastorianus
cgagttttcacgaagtatacaggca

SEQ ID NO: 33479 - DNA, 25 bp, Saccharomyces pastorianus
ggccaatacttctgagactaattta

SEQ ID NO: 33480 - DNA, 25 bp, Saccharomyces pastorianus
ggaagactccgagaatgttgtcact

SEQ ID NO: 33481 - DNA, 25 bp, Saccharomyces pastorianus
agctcctttggccaatacttctgag

SEQ ID NO: 33482 - DNA, 25 bp, Saccharomyces pastorianus
aactggaaacttctgaagagccaca

SEQ ID NO: 33483 - DNA, 25 bp, Saccharomyces pastorianus
aagagccacaagctcctttggccaa

SEQ ID NO: 33484 - DNA, 25 bp, Saccharomyces pastorianus
atttgacctcgcaagtgaaatagaa

SEQ ID NO: 33485 - DNA, 25 bp, Saccharomyces pastorianus
actccgagaatgttgtcactgtatt

SEQ ID NO: 33486 - DNA, 25 bp, Saccharomyces pastorianus
taacgtcgccattgcaactttgctt

SEQ ID NO: 33487 - DNA, 25 bp, Saccharomyces pastorianus
ataaacgtgtgtggtatccctggga

SEQ ID NO: 33488 - DNA, 25 bp, Saccharomyces pastorianus
tcgctttcggtacactggttggtat

SEQ ID NO: 33489 - DNA, 25 bp, Saccharomyces pastorianus
gcaaatgatgcctacacgttgatta

SEQ ID NO: 33490 - DNA, 25 bp, Saccharomyces pastorianus
acatgtacgttatcagtgccttata

SEQ ID NO: 33491 - DNA, 25 bp, Saccharomyces pastorianus
ttacttcctgtctgctgtggacaaa

SEQ ID NO: 33492 - DNA, 25 bp, Saccharomyces pastorianus
gatgcgaaagccttccttgacatga

SEQ ID NO: 33493 - DNA, 25 bp, Saccharomyces pastorianus
gttggtattccaatcacaggcgcta

SEQ ID NO: 33494 - DNA, 25 bp, Saccharomyces pastorianus
tacgctaccagccatgggatttcag

SEQ ID NO: 33495 - DNA, 25 bp, Saccharomyces pastorianus
ggtttagcaacctttgtcagcgctg

SEQ ID NO: 33496 - DNA, 25 bp, Saccharomyces pastorianus
caggcgctatcatctctaacaaaac

SEQ ID NO: 33497 - DNA, 25 bp, Saccharomyces pastorianus
gttttcggcgtcatgataacttgct

SEQ ID NO: 33498 - DNA, 25 bp, Saccharomyces pastorianus
gtcgtcatatccgtcgcaatatttt

SEQ ID NO: 33499 - DNA, 25 bp, Saccharomyces pastorianus
gctagcacctttcttgacgaacgaa

SEQ ID NO: 33500 - DNA, 25 bp, Saccharomyces pastorianus
gataacttgctggtcgacacacgga

SEQ ID NO: 33501 - DNA, 25 bp, Saccharomyces pastorianus
gttcatggtggttctgtcatcaacg

SEQ ID NO: 33502 - DNA, 25 bp, Saccharomyces pastorianus
atccatggcgatatttgtgtcacag

SEQ ID NO: 33503 - DNA, 25 bp, Saccharomyces pastorianus
attttactgctcatgcacagggttt

SEQ ID NO: 33504 - DNA, 25 bp, Saccharomyces pastorianus
acagggtttttgttgacgctagcac

SEQ ID NO: 33505 - DNA, 25 bp, Saccharomyces pastorianus
ggtcactttcttccgtcaattattc

SEQ ID NO: 33506 - DNA, 25 bp, Saccharomyces pastorianus
gtgatccatggtatagcgcattttt

SEQ ID NO: 33507 - DNA, 25 bp, Saccharomyces pastorianus
atcttcttcgactgatgatctcaca

SEQ ID NO: 33508 - DNA, 25 bp, Saccharomyces pastorianus
gaagatgctcagtacgtgatacaaa

SEQ ID NO: 33509 - DNA, 25 bp, Saccharomyces pastorianus
ggccaatagcaggatcacggttgat

SEQ ID NO: 33510 - DNA, 25 bp, Saccharomyces pastorianus
gttcgtaaagaacctcgcagattcg

SEQ ID NO: 33511 - DNA, 25 bp, Saccharomyces pastorianus
gagaccaactttatgaactttttat

SEQ ID NO: 33512 - DNA, 25 bp, Saccharomyces pastorianus
gtaaccagctctttaggtgctgcta

SEQ ID NO: 33513 - DNA, 25 bp, Saccharomyces pastorianus
aaggctacgcttttattgaatttca

SEQ ID NO: 33514 - DNA, 25 bp, Saccharomyces pastorianus
gttttgcaaacgtaccaaggctacg

SEQ ID NO: 33515 - DNA, 25 bp, Saccharomyces pastorianus
gtgctgctaattcttcctcgaataa

SEQ ID NO: 33516 - DNA, 25 bp, Saccharomyces pastorianus
agggcatatctttacctattgctaa

SEQ ID NO: 33517 - DNA, 25 bp, Saccharomyces pastorianus
gtatgaccggctgataaaagttcgt

SEQ ID NO: 33518 - DNA, 25 bp, Saccharomyces pastorianus
gaagtttttcatctatcaactggaa

SEQ ID NO: 33519 - DNA, 25 bp, Saccharomyces pastorianus
tagaaccccaggcttgtagtgtttg

SEQ ID NO: 33520 - DNA, 25 bp, Saccharomyces pastorianus
gagaggccttgaattagaaccccag

SEQ ID NO: 33521 - DNA, 25 bp, Saccharomyces pastorianus
gaaatttgcttctaacttgatggtc

SEQ ID NO: 33522 - DNA, 25 bp, Saccharomyces pastorianus
tgacgctgtcacatactccaagtat

SEQ ID NO: 33523 - DNA, 25 bp, Saccharomyces pastorianus
tcttcatcaccattgttctatttcc

SEQ ID NO: 33524 - DNA, 25 bp, Saccharomyces pastorianus
atatacatttttcggactatccaat

SEQ ID NO: 33525 - DNA, 25 bp, Saccharomyces pastorianus
aagcactattctatgatttccaatg

SEQ ID NO: 33526 - DNA, 25 bp, Saccharomyces pastorianus
gtaagccctgggtttatcaatcagt

SEQ ID NO: 33527 - DNA, 25 bp, Saccharomyces pastorianus
aagacattataagctccacctcatc

SEQ ID NO: 33528 - DNA, 25 bp, Saccharomyces pastorianus
gaaattgtagaggacacgctgccta

SEQ ID NO: 33529 - DNA, 25 bp, Saccharomyces pastorianus
agatatggcctattgacgggttcac

SEQ ID NO: 33530 - DNA, 25 bp, Saccharomyces pastorianus
atattcaacaatgagcaccccgatc

SEQ ID NO: 33531 - DNA, 25 bp, Saccharomyces pastorianus
tcgagggacagagaccggttctaat

SEQ ID NO: 33532 - DNA, 25 bp, Saccharomyces pastorianus
taacacgagggatgtccggctccaa

SEQ ID NO: 33533 - DNA, 25 bp, Saccharomyces pastorianus
ggcaacaggcggttctaactctaat

SEQ ID NO: 33534 - DNA, 25 bp, Saccharomyces pastorianus
gatcccgaaggtataactcctgtaa

SEQ ID NO: 33535 - DNA, 25 bp, Saccharomyces pastorianus
gatctcttactgcagtacagtcgcc

SEQ ID NO: 33536 - DNA, 25 bp, Saccharomyces pastorianus
tacagtcgccgcctttggaaagtgt

SEQ ID NO: 33537 - DNA, 25 bp, Saccharomyces pastorianus
ggacgaagaagttccgcctatctac

SEQ ID NO: 33538 - DNA, 25 bp, Saccharomyces pastorianus
aaggtacgatccgttgatcccgaag

SEQ ID NO: 33539 - DNA, 25 bp, Saccharomyces pastorianus
gcgggcaagtgttaacaccccataa

SEQ ID NO: 33540 - DNA, 25 bp, Saccharomyces pastorianus
catgctacgagcgttctgcgaacaa

SEQ ID NO: 33541 - DNA, 25 bp, Saccharomyces pastorianus
gtgttccacgctgtagtgacaactt

SEQ ID NO: 33542 - DNA, 25 bp, Saccharomyces pastorianus
gtggacgccatatgtttcaacgaat

SEQ ID NO: 33543 - DNA, 25 bp, Saccharomyces pastorianus
gggtggtaccgagtgcttgcaacat

SEQ ID NO: 33544 - DNA, 25 bp, Saccharomyces pastorianus
tgcaacatctaatccaaaccgctaa

SEQ ID NO: 33545 - DNA, 25 bp, Saccharomyces pastorianus
actttgttgaactacgtggacgcca

SEQ ID NO: 33546 - DNA, 25 bp, Saccharomyces pastorianus
ttgacgcctgcgcagttacagaaat

SEQ ID NO: 33547 - DNA, 25 bp, Saccharomyces pastorianus
gactacgagtctccaataccacaag

SEQ ID NO: 33548 - DNA, 25 bp, Saccharomyces pastorianus
gaaatcctgaaatacgtggctgaca

SEQ ID NO: 33549 - DNA, 25 bp, Saccharomyces pastorianus
ataccagcatggttatcactgcccg

SEQ ID NO: 33550 - DNA, 25 bp, Saccharomyces pastorianus
gaggaatctgctactctttgacgcc

SEQ ID NO: 33551 - DNA, 25 bp, Saccharomyces pastorianus
gaaatcgttccacatcgaaactgaa

SEQ ID NO: 33552 - DNA, 25 bp, Saccharomyces pastorianus
aaagccgacaacttggctgtctctg

SEQ ID NO: 33553 - DNA, 25 bp, Saccharomyces pastorianus
ggctgtctctgcacaaggtttcaag

SEQ ID NO: 33554 - DNA, 25 bp, Saccharomyces pastorianus
ggtcgttgtcattttgttggtggtc

SEQ ID NO: 33555 - DNA, 25 bp, Saccharomyces pastorianus
atgtgtttatttttggtcgttgtca

SEQ ID NO: 33556 - DNA, 25 bp, Saccharomyces pastorianus
gctcgcacccgaactctcagaataa

SEQ ID NO: 33557 - DNA, 25 bp, Saccharomyces pastorianus
aaacggccgctctgagacaggagat

SEQ ID NO: 33558 - DNA, 25 bp, Saccharomyces pastorianus
gaggagactaactcgagctcgcacc

SEQ ID NO: 33559 - DNA, 25 bp, Saccharomyces pastorianus
gagatcgacgacacggtgggcataa

SEQ ID NO: 33560 - DNA, 25 bp, Saccharomyces pastorianus
gaacggttgacctccatcgaggata

SEQ ID NO: 33561 - DNA, 25 bp, Saccharomyces pastorianus
gacaacatcaacaaggtggccgaac

SEQ ID NO: 33562 - DNA, 25 bp, Saccharomyces pastorianus
atccatatgtaccttcagaggagac

SEQ ID NO: 33563 - DNA, 25 bp, Saccharomyces pastorianus
acaacagcatcaagggcaatcccag

SEQ ID NO: 33564 - DNA, 25 bp, Saccharomyces pastorianus
ttatttctccccaacattcatacct

SEQ ID NO: 33565 - DNA, 25 bp, Saccharomyces pastorianus
ggtaatttacaatctttgcagcagc

SEQ ID NO: 33566 - DNA, 25 bp, Saccharomyces pastorianus
tcctcactcacaacaaccaatatat

SEQ ID NO: 33567 - DNA, 25 bp, Saccharomyces pastorianus
gccaaataacatgttgtccactcaa

SEQ ID NO: 33568 - DNA, 25 bp, Saccharomyces pastorianus
aattacttccagtctttgctttcca

SEQ ID NO: 33569 - DNA, 25 bp, Saccharomyces pastorianus
attcataccttgacatgccgaagcc

SEQ ID NO: 33570 - DNA, 25 bp, Saccharomyces pastorianus
gtacattctccaaacttcttgtcac

SEQ ID NO: 33571 - DNA, 25 bp, Saccharomyces pastorianus
taacttgagttctttccagcctaat

SEQ ID NO: 33572 - DNA, 25 bp, Saccharomyces pastorianus
cactaactgcctccaatcttaatgg

SEQ ID NO: 33573 - DNA, 25 bp, Saccharomyces pastorianus
gtcaccccagaatgctgccaataat

SEQ ID NO: 33574 - DNA, 25 bp, Saccharomyces pastorianus
gaagttgttggagcccaaggccatt

SEQ ID NO: 33575 - DNA, 25 bp, Saccharomyces pastorianus
aagatgcgtttgaaggtcctttccg

SEQ ID NO: 33576 - DNA, 25 bp, Saccharomyces pastorianus
ggaaattgtcttgtccacggactat

SEQ ID NO: 33577 - DNA, 25 bp, Saccharomyces pastorianus
gtccacggactatttgaacccagaa

SEQ ID NO: 33578 - DNA, 25 bp, Saccharomyces pastorianus
aaggccattgtcaggtctcttgaga

SEQ ID NO: 33579 - DNA, 25 bp, Saccharomyces pastorianus
ggacgacatcatgcgcgagtatggt

SEQ ID NO: 33580 - DNA, 25 bp, Saccharomyces pastorianus
tgaagaaggccacgctatcgcagca

SEQ ID NO: 33581 - DNA, 25 bp, Saccharomyces pastorianus
aacgtgccccattgcaggaaattgt

SEQ ID NO: 33582 - DNA, 25 bp, Saccharomyces pastorianus
tttccgcccgtgaacaatcactgga

SEQ ID NO: 33583 - DNA, 25 bp, Saccharomyces pastorianus
gtatccaacgcctctgacaagattg

SEQ ID NO: 33584 - DNA, 25 bp, Saccharomyces pastorianus
ccgtttctggtggtgtcattgtatc

SEQ ID NO: 33585 - DNA, 25 bp, Saccharomyces pastorianus
gctgctatcaagaatgccgtcgacg

SEQ ID NO: 33586 - DNA, 25 bp, Saccharomyces pastorianus
ctgatttggacgcagcagacaagct

SEQ ID NO: 33587 - DNA, 25 bp, Saccharomyces pastorianus
ttatttgccggtaatgatccagaag

SEQ ID NO: 33588 - DNA, 25 bp, Saccharomyces pastorianus
attaccgaagccatcaactacatga

SEQ ID NO: 33589 - DNA, 25 bp, Saccharomyces pastorianus
gacatctctccaaatgccaaagcta

SEQ ID NO: 33590 - DNA, 25 bp, Saccharomyces pastorianus
ggttgttatatctccaatgccgcat

SEQ ID NO: 33591 - DNA, 25 bp, Saccharomyces pastorianus
tatgggtgataagccagctgctatc

SEQ ID NO: 33592 - DNA, 25 bp, Saccharomyces pastorianus
ggttaaattcatcgacatctctcca

SEQ ID NO: 33593 - DNA, 25 bp, Saccharomyces pastorianus
ttgctgttaccggtactgaagcctt

SEQ ID NO: 33594 - DNA, 25 bp, Saccharomyces pastorianus
aacttggtcaactgtcgatttccgt

SEQ ID NO: 33595 - DNA, 25 bp, Saccharomyces pastorianus
tgccgttctctccagtcaaggaaaa

SEQ ID NO: 33596 - DNA, 25 bp, Saccharomyces pastorianus
gctcaagcgggcaccattaggatta

SEQ ID NO: 33597 - DNA, 25 bp, Saccharomyces pastorianus
gatctgttccaatttcaagggctca

SEQ ID NO: 33598 - DNA, 25 bp, Saccharomyces pastorianus
tgaaaccccgtttgatccatttgat

SEQ ID NO: 33599 - DNA, 25 bp, Saccharomyces pastorianus
caacgtgtatcgtctgatgccagat

SEQ ID NO: 33600 - DNA, 25 bp, Saccharomyces pastorianus
ttaggtttctcaaggcgtcctataa

SEQ ID NO: 33601 - DNA, 25 bp, Saccharomyces pastorianus
gaattttactctactgagccaggct

SEQ ID NO: 33602 - DNA, 25 bp, Saccharomyces pastorianus
tttagatgtcattttccctcagaac

SEQ ID NO: 33603 - DNA, 25 bp, Saccharomyces pastorianus
tgagccaggctttcttgtaaacttg

SEQ ID NO: 33604 - DNA, 25 bp, Saccharomyces pastorianus
atgccttcgtatcttcttctagtga

SEQ ID NO: 33605 - DNA, 25 bp, Saccharomyces pastorianus
ttccctcagaacatttcccaagtat

SEQ ID NO: 33606 - DNA, 25 bp, Saccharomyces pastorianus
ggttgaggccgcaaagattctcttc

SEQ ID NO: 33607 - DNA, 25 bp, Saccharomyces pastorianus
tcgctctcccatgagatcgatgatc

SEQ ID NO: 33608 - DNA, 25 bp, Saccharomyces pastorianus
atacgaactgccgaagcgactacaa

SEQ ID NO: 33609 - DNA, 25 bp, Saccharomyces pastorianus
tgaccctactatatcgtacttctgg

SEQ ID NO: 33610 - DNA, 25 bp, Saccharomyces pastorianus
accagacgttgaaccaagtcggcaa

SEQ ID NO: 33611 - DNA, 25 bp, Saccharomyces pastorianus
ggagacaatccctaccagagttttt

SEQ ID NO: 33612 - DNA, 25 bp, Saccharomyces pastorianus
agactctgttagacaatttcgggaa

SEQ ID NO: 33613 - DNA, 25 bp, Saccharomyces pastorianus
atcttttatacacaactgtccccgt

SEQ ID NO: 33614 - DNA, 25 bp, Saccharomyces pastorianus
aagccgtttatagaagactcccatg

SEQ ID NO: 33615 - DNA, 25 bp, Saccharomyces pastorianus
gaagctgaaggaaacgcgctccagt

SEQ ID NO: 33616 - DNA, 25 bp, Saccharomyces pastorianus
cgtggaatgcacaactagacttttt

SEQ ID NO: 33617 - DNA, 25 bp, Saccharomyces pastorianus
taacctctaccaaatatacgcctgc

SEQ ID NO: 33618 - DNA, 25 bp, Saccharomyces pastorianus
aacggcggaaacaatagtctgggca

SEQ ID NO: 33619 - DNA, 25 bp, Saccharomyces pastorianus
atatcggtcttttgattcacgacgc

SEQ ID NO: 33620 - DNA, 25 bp, Saccharomyces pastorianus
cagattggacttttgttcataacga

SEQ ID NO: 33621 - DNA, 25 bp, Saccharomyces pastorianus
attcaatccgcttcacatatcggtc

SEQ ID NO: 33622 - DNA, 25 bp, Saccharomyces pastorianus
caacagttctcgttcccaagctgaa

SEQ ID NO: 33623 - DNA, 25 bp, Saccharomyces pastorianus
agtctgggcaagttttcttttgcta

SEQ ID NO: 33624 - DNA, 25 bp, Saccharomyces pastorianus
ctaacaggtctttaggccactgggt

SEQ ID NO: 33625 - DNA, 25 bp, Saccharomyces pastorianus
gattcacgacgcattcaacgctagt

SEQ ID NO: 33626 - DNA, 25 bp, Saccharomyces pastorianus
cgacgacgaagtttctatcgagaat

SEQ ID NO: 33627 - DNA, 25 bp, Saccharomyces pastorianus
gaaggcaacggctacaacagttctc

SEQ ID NO: 33628 - DNA, 25 bp, Saccharomyces pastorianus
gagaaacgtttacactacaggtaga

SEQ ID NO: 33629 - DNA, 25 bp, Saccharomyces pastorianus
gaagcagccagaaataccgttgtga

SEQ ID NO: 33630 - DNA, 25 bp, Saccharomyces pastorianus
aattcctgaccaaggccgtcttaga

SEQ ID NO: 33631 - DNA, 25 bp, Saccharomyces pastorianus
aatgtcctacgaaaccacatgtcaa

SEQ ID NO: 33632 - DNA, 25 bp, Saccharomyces pastorianus
gcattgatcgttgcgttcatccaga

SEQ ID NO: 33633 - DNA, 25 bp, Saccharomyces pastorianus
ggaaacatctacctcatcgttaatg

SEQ ID NO: 33634 - DNA, 25 bp, Saccharomyces pastorianus
acggaaagcgtgttcttgttactga

SEQ ID NO: 33635 - DNA, 25 bp, Saccharomyces pastorianus
agacagtccttctgctagaatcgtc

SEQ ID NO: 33636 - DNA, 25 bp, Saccharomyces pastorianus
gtgggaccaagaagcgtttatcgat

SEQ ID NO: 33637 - DNA, 25 bp, Saccharomyces pastorianus
tccgtcatttggatctaattgctga

SEQ ID NO: 33638 - DNA, 25 bp, Saccharomyces pastorianus
ttcacgttatgctatctctgtttct

SEQ ID NO: 33639 - DNA, 25 bp, Saccharomyces pastorianus
taatgtcggtacaggttcattcgat

SEQ ID NO: 33640 - DNA, 25 bp, Saccharomyces pastorianus
ttaaatccaccactgtaatccctga

SEQ ID NO: 33641 - DNA, 25 bp, Saccharomyces pastorianus
gaagacgcgacgactcaagtattgt

SEQ ID NO: 33642 - DNA, 25 bp, Saccharomyces pastorianus
ggctctaatgattccgtatcggcac

SEQ ID NO: 33643 - DNA, 25 bp, Saccharomyces pastorianus
cagaagggtctcaaacctacgtcct

SEQ ID NO: 33644 - DNA, 25 bp, Saccharomyces pastorianus
aatgctcaatcgctcaaaacgggaa

SEQ ID NO: 33645 - DNA, 25 bp, Saccharomyces pastorianus
tgatgtctaccgtcttgaaggcaaa

SEQ ID NO: 33646 - DNA, 25 bp, Saccharomyces pastorianus
aacgtctaccaagctttacaattcg

SEQ ID NO: 33647 - DNA, 25 bp, Saccharomyces pastorianus
gacgaaaagattctatgggccccgg

SEQ ID NO: 33648 - DNA, 25 bp, Saccharomyces pastorianus
atattttccgagtagccaacgaagc

SEQ ID NO: 33649 - DNA, 25 bp, Saccharomyces pastorianus
cactggataatttgctgtacggtaa

SEQ ID NO: 33650 - DNA, 25 bp, Saccharomyces pastorianus
tacgttcaattcgatcatggctcta

SEQ ID NO: 33651 - DNA, 25 bp, Saccharomyces pastorianus
gaattctcccgacgctaacaacagc

SEQ ID NO: 33652 - DNA, 25 bp, Saccharomyces pastorianus
cgccgctaccagtacgaaactaaat

SEQ ID NO: 33653 - DNA, 25 bp, Saccharomyces pastorianus
gacaacggcgatgataactcactta

SEQ ID NO: 33654 - DNA, 25 bp, Saccharomyces pastorianus
tattagcggactttgaaccggcctc

SEQ ID NO: 33655 - DNA, 25 bp, Saccharomyces pastorianus
atgcctaacatgatggacggtgaca

SEQ ID NO: 33656 - DNA, 25 bp, Saccharomyces pastorianus
gacgagtttttcagtaatacttcct

SEQ ID NO: 33657 - DNA, 25 bp, Saccharomyces pastorianus
aatacttcctcttactcgaattctc

SEQ ID NO: 33658 - DNA, 25 bp, Saccharomyces pastorianus
gacggtaacgaaactgccgccgcta

SEQ ID NO: 33659 - DNA, 25 bp, Saccharomyces pastorianus
tatcttcagaacaacgagcgactat

SEQ ID NO: 33660 - DNA, 25 bp, Saccharomyces pastorianus
gaagacgctcttttattagcggact

SEQ ID NO: 33661 - DNA, 25 bp, Saccharomyces pastorianus
tgaaccggcctctttacaatatatg

SEQ ID NO: 33662 - DNA, 25 bp, Saccharomyces pastorianus
gtacctaagattccgcaaggccatc

SEQ ID NO: 33663 - DNA, 25 bp, Saccharomyces pastorianus
aacgcctttatgtttgcaagcacta

SEQ ID NO: 33664 - DNA, 25 bp, Saccharomyces pastorianus
ggacgtgttcaactggttctccaac

SEQ ID NO: 33665 - DNA, 25 bp, Saccharomyces pastorianus
taccacgggcctggtcgaaatcgaa

SEQ ID NO: 33666 - DNA, 25 bp, Saccharomyces pastorianus
ggtgtccgagatcgacgttaccacg

SEQ ID NO: 33667 - DNA, 25 bp, Saccharomyces pastorianus
gaaagactgcccttcaagacctggg

SEQ ID NO: 33668 - DNA, 25 bp, Saccharomyces pastorianus
ggaaagtggccgactttatcgccgc

SEQ ID NO: 33669 - DNA, 25 bp, Saccharomyces pastorianus
gcaaggccatcttctacaacaacat

SEQ ID NO: 33670 - DNA, 25 bp, Saccharomyces pastorianus
gtatttgaacgtgtcttcgtccact

SEQ ID NO: 33671 - DNA, 25 bp, Saccharomyces pastorianus
catcttcatccccaagtactggaaa

SEQ ID NO: 33672 - DNA, 25 bp, Saccharomyces pastorianus
cgcccaagtgcctcggtaaaatcaa

SEQ ID NO: 33673 - DNA, 25 bp, Saccharomyces pastorianus
tttggcgatctcttatcaccacaca

SEQ ID NO: 33674 - DNA, 25 bp, Saccharomyces pastorianus
aacgggcggcatgcgatttgatacc

SEQ ID NO: 33675 - DNA, 25 bp, Saccharomyces pastorianus
tagattcttcccctttttggcgatc

SEQ ID NO: 33676 - DNA, 25 bp, Saccharomyces pastorianus
ttaggtctttaaccgcttctcaaca

SEQ ID NO: 33677 - DNA, 25 bp, Saccharomyces pastorianus
aggcgtcttcgctaaattatataat

SEQ ID NO: 33678 - DNA, 25 bp, Saccharomyces pastorianus
aattttgccgactctcagttgactt

SEQ ID NO: 33679 - DNA, 25 bp, Saccharomyces pastorianus
ataccgtaaagttcgccatcaattg

SEQ ID NO: 33680 - DNA, 25 bp, Saccharomyces pastorianus
aaggctcttggttattgtgaagcgt

SEQ ID NO: 33681 - DNA, 25 bp, Saccharomyces pastorianus
ggatttcaattttcaaggcgtcttc

SEQ ID NO: 33682 - DNA, 25 bp, Saccharomyces pastorianus
actgctaaacaagtgggcgagtcca

SEQ ID NO: 33683 - DNA, 25 bp, Saccharomyces pastorianus
gttgacttcatctatcgattcattt

SEQ ID NO: 33684 - DNA, 25 bp, Saccharomyces pastorianus
ataacaccaactcgatggtctccaa

SEQ ID NO: 33685 - DNA, 25 bp, Saccharomyces pastorianus
gatggtctccaattccaatctaaca

SEQ ID NO: 33686 - DNA, 25 bp, Saccharomyces pastorianus
gtgacggactcgttggcacctaaaa

SEQ ID NO: 33687 - DNA, 25 bp, Saccharomyces pastorianus
tagacctaacttggccaatttggca

SEQ ID NO: 33688 - DNA, 25 bp, Saccharomyces pastorianus
agtaatgaactcctccatcatcaac

SEQ ID NO: 33689 - DNA, 25 bp, Saccharomyces pastorianus
gacgtccctaatttgaatgaactta

SEQ ID NO: 33690 - DNA, 25 bp, Saccharomyces pastorianus
aagtcgtgatgagcgacgtccctaa

SEQ ID NO: 33691 - DNA, 25 bp, Saccharomyces pastorianus
gattacacacgaacctaaaccgcat

SEQ ID NO: 33692 - DNA, 25 bp, Saccharomyces pastorianus
gacatccaactataccagacacttt

SEQ ID NO: 33693 - DNA, 25 bp, Saccharomyces pastorianus
aacgctgccggcaacagtagcacta

SEQ ID NO: 33694 - DNA, 25 bp, Saccharomyces pastorianus
gaaaagcatttgacccctctagaga

SEQ ID NO: 33695 - DNA, 25 bp, Saccharomyces pastorianus
gtgacccacaatgcatcatcaagta

SEQ ID NO: 33696 - DNA, 25 bp, Saccharomyces pastorianus
aggttcttccactgaatcgttgtca

SEQ ID NO: 33697 - DNA, 25 bp, Saccharomyces pastorianus
gaaaaactcgcgcagttccttagaa

SEQ ID NO: 33698 - DNA, 25 bp, Saccharomyces pastorianus
aatctcagtcatcgtcagctttatc

SEQ ID NO: 33699 - DNA, 25 bp, Saccharomyces pastorianus
ttagtattaccaccgcaggttcttc

SEQ ID NO: 33700 - DNA, 25 bp, Saccharomyces pastorianus
aaaggtatcatcctctacatcactg

SEQ ID NO: 33701 - DNA, 25 bp, Saccharomyces pastorianus
agtagtagcaactcaccgcttagta

SEQ ID NO: 33702 - DNA, 25 bp, Saccharomyces pastorianus
aagtacttatgtcactgctgctgct

SEQ ID NO: 33703 - DNA, 25 bp, Saccharomyces pastorianus
aatcgttgtcagacttcagctccag

SEQ ID NO: 33704 - DNA, 25 bp, Saccharomyces pastorianus
tctacatcactgtctgcttttgcag

SEQ ID NO: 33705 - DNA, 25 bp, Saccharomyces pastorianus
ttgcagctgccaagaacatttcgcc

SEQ ID NO: 33706 - DNA, 25 bp, Saccharomyces pastorianus
ggatgaaaagtctcccgtgggtacg

SEQ ID NO: 33707 - DNA, 25 bp, Saccharomyces pastorianus
gagagattctggaacctgccgccaa

SEQ ID NO: 33708 - DNA, 25 bp, Saccharomyces pastorianus
agtgcgtaatatcaggccatccttc

SEQ ID NO: 33709 - DNA, 25 bp, Saccharomyces pastorianus
gcagaaatgttcaccaaagagccaa

SEQ ID NO: 33710 - DNA, 25 bp, Saccharomyces pastorianus
attgtatccattgtaagacttgcga

SEQ ID NO: 33711 - DNA, 25 bp, Saccharomyces pastorianus
tgccccgcaggagtttacgagtttg

SEQ ID NO: 33712 - DNA, 25 bp, Saccharomyces pastorianus
gtacgaggctccaaattaactccca

SEQ ID NO: 33713 - DNA, 25 bp, Saccharomyces pastorianus
aggccatccttcagtggtcgatttg

SEQ ID NO: 33714 - DNA, 25 bp, Saccharomyces pastorianus
aagcccatcgaatatcctaaaccag

SEQ ID NO: 33715 - DNA, 25 bp, Saccharomyces pastorianus
gtcgaatcaagattttgccccgcag

SEQ ID NO: 33716 - DNA, 25 bp, Saccharomyces pastorianus
tgatattctgacatctgtctccaga

SEQ ID NO: 33717 - DNA, 25 bp, Saccharomyces pastorianus
gattagtgcggaggcccctatcatc

SEQ ID NO: 33718 - DNA, 25 bp, Saccharomyces pastorianus
ggccatccaagcaggtcatgaccaa

SEQ ID NO: 33719 - DNA, 25 bp, Saccharomyces pastorianus
ggtacaggaactgcaggccatccaa

SEQ ID NO: 33720 - DNA, 25 bp, Saccharomyces pastorianus
gctgcccgtttctgaggaggaattc

SEQ ID NO: 33721 - DNA, 25 bp, Saccharomyces pastorianus
aaaaggcagacatcgcagaggcgct

SEQ ID NO: 33722 - DNA, 25 bp, Saccharomyces pastorianus
gctgccctttgcaaggattcggaaa

SEQ ID NO: 33723 - DNA, 25 bp, Saccharomyces pastorianus
cggtcgagggcctcttgagagcaat

SEQ ID NO: 33724 - DNA, 25 bp, Saccharomyces pastorianus
aagacgacttcaaatcgcactcgct

SEQ ID NO: 33725 - DNA, 25 bp, Saccharomyces pastorianus
tgtttcgaaacgttggccaagggct

SEQ ID NO: 33726 - DNA, 25 bp, Saccharomyces pastorianus
gaaatcgagtccaccaacgagcctg

SEQ ID NO: 33727 - DNA, 25 bp, Saccharomyces pastorianus
catctttgccaaagcgtgcgagata

SEQ ID NO: 33728 - DNA, 25 bp, Saccharomyces pastorianus
ggataactccgcttacgttgcacac

SEQ ID NO: 33729 - DNA, 25 bp, Saccharomyces pastorianus
aacgaccacctcaatgttggtactg

SEQ ID NO: 33730 - DNA, 25 bp, Saccharomyces pastorianus
tgtgtttaacactaccaacgaccac

SEQ ID NO: 33731 - DNA, 25 bp, Saccharomyces pastorianus
gggaccccatggagtgaactgattt

SEQ ID NO: 33732 - DNA, 25 bp, Saccharomyces pastorianus
ttcaacttcccattcttactttcaa

SEQ ID NO: 33733 - DNA, 25 bp, Saccharomyces pastorianus
tggcgaatgagtacaactcccacca

SEQ ID NO: 33734 - DNA, 25 bp, Saccharomyces pastorianus
tcagatgccttaagtgggaccccat

SEQ ID NO: 33735 - DNA, 25 bp, Saccharomyces pastorianus
aacttcatacttttctagcagtcca

SEQ ID NO: 33736 - DNA, 25 bp, Saccharomyces pastorianus
aacggaaacacaccactatcgagta

SEQ ID NO: 33737 - DNA, 25 bp, Saccharomyces pastorianus
tggttgaaatcgttgaggctacaca

SEQ ID NO: 33738 - DNA, 25 bp, Saccharomyces pastorianus
tccaaatctcattccacttcaaaag

SEQ ID NO: 33739 - DNA, 25 bp, Saccharomyces pastorianus
gaatcatttatttggcacacgaaga

SEQ ID NO: 33740 - DNA, 25 bp, Saccharomyces pastorianus
aagtaagttggtgttcgctatcgga

SEQ ID NO: 33741 - DNA, 25 bp, Saccharomyces pastorianus
tgcctttgctgatcgtttgggtcaa

SEQ ID NO: 33742 - DNA, 25 bp, Saccharomyces pastorianus
atgaaaacgcgccagcagctacgag

SEQ ID NO: 33743 - DNA, 25 bp, Saccharomyces pastorianus
gtgcaagcgcacactttatacaata

SEQ ID NO: 33744 - DNA, 25 bp, Saccharomyces pastorianus
gtagataaagatggcgcccaccttt

SEQ ID NO: 33745 - DNA, 25 bp, Saccharomyces pastorianus
gttagtcgatcaacacaccgaggcc

SEQ ID NO: 33746 - DNA, 25 bp, Saccharomyces pastorianus
aacggtctccacaagtttgtcaagg

SEQ ID NO: 33747 - DNA, 25 bp, Saccharomyces pastorianus
cccacctttacatgttggagccaag

SEQ ID NO: 33748 - DNA, 25 bp, Saccharomyces pastorianus
gaagctgtacaaaacgcccattcca

SEQ ID NO: 33749 - DNA, 25 bp, Saccharomyces pastorianus
tttgggtcaatacgtgcaagcgcac

SEQ ID NO: 33750 - DNA, 25 bp, Saccharomyces pastorianus
atgataccgccgttagtgacaacac

SEQ ID NO: 33751 - DNA, 25 bp, Saccharomyces pastorianus
gtgacaacaccaagtcttctagcaa

SEQ ID NO: 33752 - DNA, 25 bp, Saccharomyces pastorianus
cctatgccttctttggatggattaa

SEQ ID NO: 33753 - DNA, 25 bp, Saccharomyces pastorianus
ctactgatccacacaattctcttaa

SEQ ID NO: 33754 - DNA, 25 bp, Saccharomyces pastorianus
tagcaatttcaagaggcgcaacgac

SEQ ID NO: 33755 - DNA, 25 bp, Saccharomyces pastorianus
gactataattccaacgatgccaatg

SEQ ID NO: 33756 - DNA, 25 bp, Saccharomyces pastorianus
aatgcaccatcttcaagttactcaa

SEQ ID NO: 33757 - DNA, 25 bp, Saccharomyces pastorianus
gtgtgccggcgcataatagcggtaa

SEQ ID NO: 33758 - DNA, 25 bp, Saccharomyces pastorianus
gctgtgatgcacctaacctaaattt

SEQ ID NO: 33759 - DNA, 25 bp, Saccharomyces pastorianus
gttactcaaaagaagccgctaccct

SEQ ID NO: 33760 - DNA, 25 bp, Saccharomyces pastorianus
atgtcccagacatctttggcagtct

SEQ ID NO: 33761 - DNA, 25 bp, Saccharomyces pastorianus
tatactacaagcaccctgacacgag

SEQ ID NO: 33762 - DNA, 25 bp, Saccharomyces pastorianus
tactcttcggcaactctgaatttct

SEQ ID NO: 33763 - DNA, 25 bp, Saccharomyces pastorianus
ttcagtaatttgttccagcagctta

SEQ ID NO: 33764 - DNA, 25 bp, Saccharomyces pastorianus
aaactcacggaaagtcccagtctgc

SEQ ID NO: 33765 - DNA, 25 bp, Saccharomyces pastorianus
gtctgcgggtatcttcttaactgaa

SEQ ID NO: 33766 - DNA, 25 bp, Saccharomyces pastorianus
caagtttggcttcctttattctcaa

SEQ ID NO: 33767 - DNA, 25 bp, Saccharomyces pastorianus
gatgaccaaagacgatccttcctaa

SEQ ID NO: 33768 - DNA, 25 bp, Saccharomyces pastorianus
ttgtttgccatctatctttccgttt

SEQ ID NO: 33769 - DNA, 25 bp, Saccharomyces pastorianus
gttgggcgcgaccttatatggacaa

SEQ ID NO: 33770 - DNA, 25 bp, Saccharomyces pastorianus
ctttccgttttcattctggtgggat

SEQ ID NO: 33771 - DNA, 25 bp, Saccharomyces pastorianus
ggctgtttcctcctttatgggaata

SEQ ID NO: 33772 - DNA, 25 bp, Saccharomyces pastorianus
gggttctttgattttacttcatttg

SEQ ID NO: 33773 - DNA, 25 bp, Saccharomyces pastorianus
cgtattagacgggtccgctgtaatt

SEQ ID NO: 33774 - DNA, 25 bp, Saccharomyces pastorianus
gaccgtcaaacagtcgattggttac

SEQ ID NO: 33775 - DNA, 25 bp, Saccharomyces pastorianus
gattggttactggtgtcggccaact

SEQ ID NO: 33776 - DNA, 25 bp, Saccharomyces pastorianus
atggcgattccacaaccgtattaga

SEQ ID NO: 33777 - DNA, 25 bp, Saccharomyces pastorianus
atatccaaatcacagctaggctttt

SEQ ID NO: 33778 - DNA, 25 bp, Saccharomyces pastorianus
ggctccgatgagaacttactgcaac

SEQ ID NO: 33779 - DNA, 25 bp, Saccharomyces pastorianus
tagcgcagacggaaatagagcttct

SEQ ID NO: 33780 - DNA, 25 bp, Saccharomyces pastorianus
attatcacagataccgcaagaccgt

SEQ ID NO: 33781 - DNA, 25 bp, Saccharomyces pastorianus
gtcggccaactgcaattgccaaagg

SEQ ID NO: 33782 - DNA, 25 bp, Saccharomyces pastorianus
ccaaataagaggtatgctgctgcat

SEQ ID NO: 33783 - DNA, 25 bp, Saccharomyces pastorianus
gaaaccgttgttgaacaaaccgctg

SEQ ID NO: 33784 - DNA, 25 bp, Saccharomyces pastorianus
ttcacgatggtttggccagaggttt

SEQ ID NO: 33785 - DNA, 25 bp, Saccharomyces pastorianus
gccggtttaggtaagattgaccgtg

SEQ ID NO: 33786 - DNA, 25 bp, Saccharomyces pastorianus
ctgaagttaccattgaagatgcttt

SEQ ID NO: 33787 - DNA, 25 bp, Saccharomyces pastorianus
cttggttcacgatggtttggccaga

SEQ ID NO: 33788 - DNA, 25 bp, Saccharomyces pastorianus
tgaatgggccggtttaggtaagatt

SEQ ID NO: 33789 - DNA, 25 bp, Saccharomyces pastorianus
aggaccgccttggttcacgatggtt

SEQ ID NO: 33790 - DNA, 25 bp, Saccharomyces pastorianus
accgctgaagttaccattgaagatg

SEQ ID NO: 33791 - DNA, 25 bp, Saccharomyces pastorianus
gaacaaaccgctgaagttaccattg

SEQ ID NO: 33792 - DNA, 25 bp, Saccharomyces pastorianus
accgccttggttcacgatggtttgg

SEQ ID NO: 33793 - DNA, 25 bp, Saccharomyces pastorianus
gattgaccgtgaaggtaatgctaga

SEQ ID NO: 33794 - DNA, 25 bp, Saccharomyces pastorianus
gtgtcatatacactaccatgccttc

SEQ ID NO: 33795 - DNA, 25 bp, Saccharomyces pastorianus
aatacatccccggtgcaagtgataa

SEQ ID NO: 33796 - DNA, 25 bp, Saccharomyces pastorianus
gttgtaactgcagccaaagtcctat

SEQ ID NO: 33797 - DNA, 25 bp, Saccharomyces pastorianus
aaactgggccaatctttcaaagaat

SEQ ID NO: 33798 - DNA, 25 bp, Saccharomyces pastorianus
aacagaacaaggtccacgtgcagaa

SEQ ID NO: 33799 - DNA, 25 bp, Saccharomyces pastorianus
gacgaaattgttcaactgacgggca

SEQ ID NO: 33800 - DNA, 25 bp, Saccharomyces pastorianus
gtccctagggagagattacagtttt

SEQ ID NO: 33801 - DNA, 25 bp, Saccharomyces pastorianus
ttatactcagtacacatccacacca

SEQ ID NO: 33802 - DNA, 25 bp, Saccharomyces pastorianus
aatggacattgattccgccttggaa

SEQ ID NO: 33803 - DNA, 25 bp, Saccharomyces pastorianus
aaagcgccattgacgacgacgacga

SEQ ID NO: 33804 - DNA, 25 bp, Saccharomyces pastorianus
ttcattcttggtgccggtagtgaga

SEQ ID NO: 33805 - DNA, 25 bp, Saccharomyces pastorianus
taaggtggtgcttatcggcggtcta

SEQ ID NO: 33806 - DNA, 25 bp, Saccharomyces pastorianus
aagtatcaggtattccgctcggtag

SEQ ID NO: 33807 - DNA, 25 bp, Saccharomyces pastorianus
gggcgaagatagacctctttgctaa

SEQ ID NO: 33808 - DNA, 25 bp, Saccharomyces pastorianus
tggtagccggtcgtcaaaacatctc

SEQ ID NO: 33809 - DNA, 25 bp, Saccharomyces pastorianus
gaaccccatcaagtattggccgtag

SEQ ID NO: 33810 - DNA, 25 bp, Saccharomyces pastorianus
gccaccactgaacatgccgaagaga

SEQ ID NO: 33811 - DNA, 25 bp, Saccharomyces pastorianus
gccgtagcaggctcagtagcacaat

SEQ ID NO: 33812 - DNA, 25 bp, Saccharomyces pastorianus
gtttggtacccataagcctctgtat

SEQ ID NO: 33813 - DNA, 25 bp, Saccharomyces pastorianus
ggatacacaatgtcttcagggctgt

SEQ ID NO: 33814 - DNA, 25 bp, Saccharomyces pastorianus
tatggttgggcactctatgacgaca

SEQ ID NO: 33815 - DNA, 25 bp, Saccharomyces pastorianus
attatggactttcacctcggcgaac

SEQ ID NO: 33816 - DNA, 25 bp, Saccharomyces pastorianus
ggtcctttaggagcgatactgtcac

SEQ ID NO: 33817 - DNA, 25 bp, Saccharomyces pastorianus
ttgactagactacccttatctccaa

SEQ ID NO: 33818 - DNA, 25 bp, Saccharomyces pastorianus
tttacataattcaaccgcaagggcc

SEQ ID NO: 33819 - DNA, 25 bp, Saccharomyces pastorianus
ttagcctccagatcggataccatat

SEQ ID NO: 33820 - DNA, 25 bp, Saccharomyces pastorianus
ccaatcctagcccaagttcaaatac

SEQ ID NO: 33821 - DNA, 25 bp, Saccharomyces pastorianus
tcggactccaaatctaaatcgcaag

SEQ ID NO: 33822 - DNA, 25 bp, Saccharomyces pastorianus
tcttcgcctacaactattcaactaa

SEQ ID NO: 33823 - DNA, 25 bp, Saccharomyces pastorianus
ttggataaccccagaattcccctat

SEQ ID NO: 33824 - DNA, 25 bp, Saccharomyces pastorianus
aaccagatttgtatggctcttcgcc

SEQ ID NO: 33825 - DNA, 25 bp, Saccharomyces pastorianus
ggccaccgcattacaaattcctgaa

SEQ ID NO: 33826 - DNA, 25 bp, Saccharomyces pastorianus
atcacaatctttactttcggactcc

SEQ ID NO: 33827 - DNA, 25 bp, Saccharomyces pastorianus
tttgctgcgcaggttcaagagtgta

SEQ ID NO: 33828 - DNA, 25 bp, Saccharomyces pastorianus
cagaatatgggttggccgcaggtat

SEQ ID NO: 33829 - DNA, 25 bp, Saccharomyces pastorianus
gatgaagccacattccaaggtgctc

SEQ ID NO: 33830 - DNA, 25 bp, Saccharomyces pastorianus
gtgggtgacccattcgatgaagcca

SEQ ID NO: 33831 - DNA, 25 bp, Saccharomyces pastorianus
aataccgctttgaaagtggccgata

SEQ ID NO: 33832 - DNA, 25 bp, Saccharomyces pastorianus
aagaccgcctccgaatctattaagg

SEQ ID NO: 33833 - DNA, 25 bp, Saccharomyces pastorianus
ggtatctactacaactccggtgaag

SEQ ID NO: 33834 - DNA, 25 bp, Saccharomyces pastorianus
tcaagccaactgtcttcggtgatgt

SEQ ID NO: 33835 - DNA, 25 bp, Saccharomyces pastorianus
gttgtcaccgtcaccaaattcaagt

SEQ ID NO: 33836 - DNA, 25 bp, Saccharomyces pastorianus
agggtgcaaccctgattaccggtgg

SEQ ID NO: 33837 - DNA, 25 bp, Saccharomyces pastorianus
gttcaacgcatctggtttgggtaga

SEQ ID NO: 33838 - DNA, 25 bp, Saccharomyces pastorianus
cttgccatgtgccactcaaaacgaa

SEQ ID NO: 33839 - DNA, 25 bp, Saccharomyces pastorianus
tttttgaaactgctcgtgccacagc

SEQ ID NO: 33840 - DNA, 25 bp, Saccharomyces pastorianus
tgattccgccaaaaagtacactaag

SEQ ID NO: 33841 - DNA, 25 bp, Saccharomyces pastorianus
ggtatcacttccgagcaaattgctg

SEQ ID NO: 33842 - DNA, 25 bp, Saccharomyces pastorianus
taacgctttgccatccttagtcaag

SEQ ID NO: 33843 - DNA, 25 bp, Saccharomyces pastorianus
aaggaatctgtctggtacggtccac

SEQ ID NO: 33844 - DNA, 25 bp, Saccharomyces pastorianus
atcatctctgagaccggtatcactt

SEQ ID NO: 33845 - DNA, 25 bp, Saccharomyces pastorianus
caaagtccaatacatttccggtgcc

SEQ ID NO: 33846 - DNA, 25 bp, Saccharomyces pastorianus
aatcatggtcaactgtttcaacgaa

SEQ ID NO: 33847 - DNA, 25 bp, Saccharomyces pastorianus
tgctgatatctctagtgccaaggtc

SEQ ID NO: 33848 - DNA, 25 bp, Saccharomyces pastorianus
gtcgcccaaggcgtcaagtttgttg

SEQ ID NO: 33849 - DNA, 25 bp, Saccharomyces pastorianus
aaggccttgcagcatctttggtcaa

SEQ ID NO: 33850 - DNA, 25 bp, Saccharomyces pastorianus
gaatcatattgatctccacagctcc

SEQ ID NO: 33851 - DNA, 25 bp, Saccharomyces pastorianus
gcaggatggtctagtttcggcattt

SEQ ID NO: 33852 - DNA, 25 bp, Saccharomyces pastorianus
cgggcttgggatttatgtcgctgca

SEQ ID NO: 33853 - DNA, 25 bp, Saccharomyces pastorianus
gcagccatcacgacaggatttcttt

SEQ ID NO: 33854 - DNA, 25 bp, Saccharomyces pastorianus
gtcaaccagacttattgggcccaga

SEQ ID NO: 33855 - DNA, 25 bp, Saccharomyces pastorianus
cagacctttgtctcaatcatcgtta

SEQ ID NO: 33856 - DNA, 25 bp, Saccharomyces pastorianus
gctgccttcgtgcttggatgtatag

SEQ ID NO: 33857 - DNA, 25 bp, Saccharomyces pastorianus
atcagcggattttgcgcagccatca

SEQ ID NO: 33858 - DNA, 25 bp, Saccharomyces pastorianus
ggatttcttttaagccacacgcctg

SEQ ID NO: 33859 - DNA, 25 bp, Saccharomyces pastorianus
ggaatggatatgtctttccccgctg

SEQ ID NO: 33860 - DNA, 25 bp, Saccharomyces pastorianus
tttcccacgttgctgctgcgatgag

SEQ ID NO: 33861 - DNA, 25 bp, Saccharomyces pastorianus
gactcatcagagatcagctcccgaa

SEQ ID NO: 33862 - DNA, 25 bp, Saccharomyces pastorianus
aaaagcgtcgtttcacaaatcatcg

SEQ ID NO: 33863 - DNA, 25 bp, Saccharomyces pastorianus
gaaactacccatttgcttgatattg

SEQ ID NO: 33864 - DNA, 25 bp, Saccharomyces pastorianus
gtggcacaattacttcaagccttgg

SEQ ID NO: 33865 - DNA, 25 bp, Saccharomyces pastorianus
tgcttctcgcgatagacactccaga

SEQ ID NO: 33866 - DNA, 25 bp, Saccharomyces pastorianus
caagccttggcagcagttcacgaat

SEQ ID NO: 33867 - DNA, 25 bp, Saccharomyces pastorianus
gctctatttggtggcgttggcgcaa

SEQ ID NO: 33868 - DNA, 25 bp, Saccharomyces pastorianus
agttcacgaatcaccggatgcgcac

SEQ ID NO: 33869 - DNA, 25 bp, Saccharomyces pastorianus
cacccatttctatctttgaccaagg

SEQ ID NO: 33870 - DNA, 25 bp, Saccharomyces pastorianus
tagcggcagcatttgcccttgtaaa

SEQ ID NO: 33871 - DNA, 25 bp, Saccharomyces pastorianus
aggtccagacaccacttctgaaaag

SEQ ID NO: 33872 - DNA, 25 bp, Saccharomyces pastorianus
ttcaggatcatcaaccaatctttat

SEQ ID NO: 33873 - DNA, 25 bp, Saccharomyces pastorianus
agcaatagtgctggtgtttacacca

SEQ ID NO: 33874 - DNA, 25 bp, Saccharomyces pastorianus
cgtcttggcggctgatgtgtcaagt

SEQ ID NO: 33875 - DNA, 25 bp, Saccharomyces pastorianus
tttcggagctgctacaattgcgact

SEQ ID NO: 33876 - DNA, 25 bp, Saccharomyces pastorianus
gaccaccaagactattactgtcact

SEQ ID NO: 33877 - DNA, 25 bp, Saccharomyces pastorianus
agctgctttccagggtgcaagcgtt

SEQ ID NO: 33878 - DNA, 25 bp, Saccharomyces pastorianus
gttgttaccgaaggtccagacacca

SEQ ID NO: 33879 - DNA, 25 bp, Saccharomyces pastorianus
gaaccgtcgttgtcagcaatagtgc

SEQ ID NO: 33880 - DNA, 25 bp, Saccharomyces pastorianus
tacaattgcgactgccgtcttggcg

SEQ ID NO: 33881 - DNA, 25 bp, Saccharomyces pastorianus
tactaagactgttacccaaggaatt

SEQ ID NO: 33882 - DNA, 25 bp, Saccharomyces pastorianus
aagacttcagctaccactgttgcaa

SEQ ID NO: 33883 - DNA, 25 bp, Saccharomyces pastorianus
ggaggtgaaggttctgctgccactt

SEQ ID NO: 33884 - DNA, 25 bp, Saccharomyces pastorianus
gaaggcagcaacacttgggcaccaa

SEQ ID NO: 33885 - DNA, 25 bp, Saccharomyces pastorianus
taaatcatccactactgctcaaatc

SEQ ID NO: 33886 - DNA, 25 bp, Saccharomyces pastorianus
gttgctgtcacttctgctgttgcaa

SEQ ID NO: 33887 - DNA, 25 bp, Saccharomyces pastorianus
tattactactgtcatcactgctacc

SEQ ID NO: 33888 - DNA, 25 bp, Saccharomyces pastorianus
cgatgctatcactgctggtactggt

SEQ ID NO: 33889 - DNA, 25 bp, Saccharomyces pastorianus
gaagctacatcttctgcctcaaaga

SEQ ID NO: 33890 - DNA, 25 bp, Saccharomyces pastorianus
tgctgctgcaacttctgctgacgaa

SEQ ID NO: 33891 - DNA, 25 bp, Saccharomyces pastorianus
tgttgcaacttcagcttccgctaaa

SEQ ID NO: 33892 - DNA, 25 bp, Saccharomyces pastorianus
agtatcactactgtcatcactgcta

SEQ ID NO: 33893 - DNA, 25 bp, Saccharomyces pastorianus
gggccatacggacagagcactcgaa

SEQ ID NO: 33894 - DNA, 25 bp, Saccharomyces pastorianus
aatgctgagcttttggaagtgtaca

SEQ ID NO: 33895 - DNA, 25 bp, Saccharomyces pastorianus
atctttgttagttgtttgctgcggc

SEQ ID NO: 33896 - DNA, 25 bp, Saccharomyces pastorianus
gaacgcacttatttgaaagcctatt

SEQ ID NO: 33897 - DNA, 25 bp, Saccharomyces pastorianus
gacagagcactcgaacgcacttatt

SEQ ID NO: 33898 - DNA, 25 bp, Saccharomyces pastorianus
aggacctctgtctatggcgataaag

SEQ ID NO: 33899 - DNA, 25 bp, Saccharomyces pastorianus
gtggaagatgataccgccgccaata

SEQ ID NO: 33900 - DNA, 25 bp, Saccharomyces pastorianus
ggagtatgctgaaatgcgagttcta

SEQ ID NO: 33901 - DNA, 25 bp, Saccharomyces pastorianus
tcgaaggtagactgttgacgggttc

SEQ ID NO: 33902 - DNA, 25 bp, Saccharomyces pastorianus
ctgcggctcagaagggtttgtagac

SEQ ID NO: 33903 - DNA, 25 bp, Saccharomyces pastorianus
ttagttgtttgctgcggctcagaag

SEQ ID NO: 33904 - DNA, 25 bp, Saccharomyces pastorianus
tccagtacgggaattgatgctcagc

SEQ ID NO: 33905 - DNA, 25 bp, Saccharomyces pastorianus
gtgtatcggcaatacgggcatccct

SEQ ID NO: 33906 - DNA, 25 bp, Saccharomyces pastorianus
gaacgttggttcaggaagcacttga

SEQ ID NO: 33907 - DNA, 25 bp, Saccharomyces pastorianus
aatcaagcttcccaagtgtccaatg

SEQ ID NO: 33908 - DNA, 25 bp, Saccharomyces pastorianus
aagattacccagatccgttagtgga

SEQ ID NO: 33909 - DNA, 25 bp, Saccharomyces pastorianus
gtgcaattggccatacacatctatg

SEQ ID NO: 33910 - DNA, 25 bp, Saccharomyces pastorianus
aattgtccaattctgaaggtcatca

SEQ ID NO: 33911 - DNA, 25 bp, Saccharomyces pastorianus
aaggacaactcttctatccagaatt

SEQ ID NO: 33912 - DNA, 25 bp, Saccharomyces pastorianus
ttatcatcaaatatcggcggctggg

SEQ ID NO: 33913 - DNA, 25 bp, Saccharomyces pastorianus
gatgctcagccatactttcgagtat

SEQ ID NO: 33914 - DNA, 25 bp, Saccharomyces pastorianus
ggaaatcccatatcgacttgatact

SEQ ID NO: 33915 - DNA, 25 bp, Saccharomyces pastorianus
tagcgccagcatccaacaagaggtc

SEQ ID NO: 33916 - DNA, 25 bp, Saccharomyces pastorianus
tgtcacttcaatcaaaaccggtttc

SEQ ID NO: 33917 - DNA, 25 bp, Saccharomyces pastorianus
aaagaagccactccagctgctagcg

SEQ ID NO: 33918 - DNA, 25 bp, Saccharomyces pastorianus
actaaggacagtagcgtagacgcgt

SEQ ID NO: 33919 - DNA, 25 bp, Saccharomyces pastorianus
tatttgcagaattaggtacatccgg

SEQ ID NO: 33920 - DNA, 25 bp, Saccharomyces pastorianus
gacaacgtcgatactgaaagcaaag

SEQ ID NO: 33921 - DNA, 25 bp, Saccharomyces pastorianus
gacgcgttcgaaaaggaattagcca

SEQ ID NO: 33922 - DNA, 25 bp, Saccharomyces pastorianus
ggtcggtctaccttatccagaatta

SEQ ID NO: 33923 - DNA, 25 bp, Saccharomyces pastorianus
aagagccaataacccagaacttgct

SEQ ID NO: 33924 - DNA, 25 bp, Saccharomyces pastorianus
tagccaaggctggtctagacaacgt

SEQ ID NO: 33925 - DNA, 25 bp, Saccharomyces pastorianus
ggttctaccagatctgtcacttcaa

SEQ ID NO: 33926 - DNA, 25 bp, Saccharomyces pastorianus
ggatatgctttcttctagtttaggt

SEQ ID NO: 33927 - DNA, 25 bp, Saccharomyces pastorianus
aaatgcattcaagtggaccccgtac

SEQ ID NO: 33928 - DNA, 25 bp, Saccharomyces pastorianus
gcttcaattgcatacgcacatcgcg

SEQ ID NO: 33929 - DNA, 25 bp, Saccharomyces pastorianus
atggcgcttctataacctatgctat

SEQ ID NO: 33930 - DNA, 25 bp, Saccharomyces pastorianus
cgatatcacaccttccaatattcta

SEQ ID NO: 33931 - DNA, 25 bp, Saccharomyces pastorianus
tgctttgtttacacgatccggcatc

SEQ ID NO: 33932 - DNA, 25 bp, Saccharomyces pastorianus
atggtctctgggttgtacgttttat

SEQ ID NO: 33933 - DNA, 25 bp, Saccharomyces pastorianus
tacacggcaccggaacttttggatt

SEQ ID NO: 33934 - DNA, 25 bp, Saccharomyces pastorianus
aatgtttggcatttctccttttgag

SEQ ID NO: 33935 - DNA, 25 bp, Saccharomyces pastorianus
gacaactgcacattaccatacacgg

SEQ ID NO: 33936 - DNA, 25 bp, Saccharomyces pastorianus
tttcgtcagacggattgccggtcat

SEQ ID NO: 33937 - DNA, 25 bp, Saccharomyces pastorianus
gacggatgccttggatctgttgacc

SEQ ID NO: 33938 - DNA, 25 bp, Saccharomyces pastorianus
gccccaattgtcatgatggctacga

SEQ ID NO: 33939 - DNA, 25 bp, Saccharomyces pastorianus
ggcaaggttcaaatctcgagtgtta

SEQ ID NO: 33940 - DNA, 25 bp, Saccharomyces pastorianus
aacgatcttatccataagggctcaa

SEQ ID NO: 33941 - DNA, 25 bp, Saccharomyces pastorianus
ggttaccgcttgatcttttggacag

SEQ ID NO: 33942 - DNA, 25 bp, Saccharomyces pastorianus
acatcgacgatcaaggcaaggttca

SEQ ID NO: 33943 - DNA, 25 bp, Saccharomyces pastorianus
tcagttgctcaacaaattgccatga

SEQ ID NO: 33944 - DNA, 25 bp, Saccharomyces pastorianus
gtgctagatccgtcaagtatgttca

SEQ ID NO: 33945 - DNA, 25 bp, Saccharomyces pastorianus
ttgtcccaggtgtattattcatcga

SEQ ID NO: 33946 - DNA, 25 bp, Saccharomyces pastorianus
ggacagatcgattatcatcacaact

SEQ ID NO: 33947 - DNA, 25 bp, Saccharomyces pastorianus
ggacattgagtgtttttcgttcata

SEQ ID NO: 33948 - DNA, 25 bp, Saccharomyces pastorianus
taacatatacgctccattctacgct

SEQ ID NO: 33949 - DNA, 25 bp, Saccharomyces pastorianus
atcggcacagccaagtcaggtattg

SEQ ID NO: 33950 - DNA, 25 bp, Saccharomyces pastorianus
caaccaaggcttttcgtcggtattg

SEQ ID NO: 33951 - DNA, 25 bp, Saccharomyces pastorianus
ggtattgctggtatcggtactttca

SEQ ID NO: 33952 - DNA, 25 bp, Saccharomyces pastorianus
ttcaacgggttcatgcacttaagct

SEQ ID NO: 33953 - DNA, 25 bp, Saccharomyces pastorianus
cggtactttcaagcccgaattgatc

SEQ ID NO: 33954 - DNA, 25 bp, Saccharomyces pastorianus
ttcctgtttaggtgctgccatcggc

SEQ ID NO: 33955 - DNA, 25 bp, Saccharomyces pastorianus
gatccccgtggtcatgagtggtatt

SEQ ID NO: 33956 - DNA, 25 bp, Saccharomyces pastorianus
gatcatgaagtctctgatccccgtg

SEQ ID NO: 33957 - DNA, 25 bp, Saccharomyces pastorianus
ctttgtgtagggtttgcctgcttga

SEQ ID NO: 33958 - DNA, 25 bp, Saccharomyces pastorianus
ctttttcgggtttgcaggttgtgct

SEQ ID NO: 33959 - DNA, 25 bp, Saccharomyces pastorianus
tggtaaacgccgacactcagggcaa

SEQ ID NO: 33960 - DNA, 25 bp, Saccharomyces pastorianus
gaaacagtcaaggtggcccagttaa

SEQ ID NO: 33961 - DNA, 25 bp, Saccharomyces pastorianus
aagaatcggcgttctggaagccaga

SEQ ID NO: 33962 - DNA, 25 bp, Saccharomyces pastorianus
gacgatggcctccaaatctttagaa

SEQ ID NO: 33963 - DNA, 25 bp, Saccharomyces pastorianus
gagaaaactgacctgcatttgccaa

SEQ ID NO: 33964 - DNA, 25 bp, Saccharomyces pastorianus
gcgatgatcaagctgccgagactaa

SEQ ID NO: 33965 - DNA, 25 bp, Saccharomyces pastorianus
gaatgacagaccagcaagccgcgga

SEQ ID NO: 33966 - DNA, 25 bp, Saccharomyces pastorianus
gagcccttcgatctggagctgaatg

SEQ ID NO: 33967 - DNA, 25 bp, Saccharomyces pastorianus
caccagttccatgatatcctcgagg

SEQ ID NO: 33968 - DNA, 25 bp, Saccharomyces pastorianus
tgcctcaggtgcgatacaacgtgga

SEQ ID NO: 33969 - DNA, 25 bp, Saccharomyces pastorianus
gggcccgccaagatcaacgaggtat

SEQ ID NO: 33970 - DNA, 25 bp, Saccharomyces pastorianus
attcttgaagctgatccaggactat

SEQ ID NO: 33971 - DNA, 25 bp, Saccharomyces pastorianus
tcgccatcatcattgttgtcgtcat

SEQ ID NO: 33972 - DNA, 25 bp, Saccharomyces pastorianus
aagactgctcttgcagaggtccagg

SEQ ID NO: 33973 - DNA, 25 bp, Saccharomyces pastorianus
aggtccaggcaagacaccaggagtt

SEQ ID NO: 33974 - DNA, 25 bp, Saccharomyces pastorianus
gactatagaatcgtggactccaact

SEQ ID NO: 33975 - DNA, 25 bp, Saccharomyces pastorianus
acatgatcattcagccagaggccac

SEQ ID NO: 33976 - DNA, 25 bp, Saccharomyces pastorianus
gggaggccagcagatattttcacaa

SEQ ID NO: 33977 - DNA, 25 bp, Saccharomyces pastorianus
gctggttgattgttttcgccatcat

SEQ ID NO: 33978 - DNA, 25 bp, Saccharomyces pastorianus
agagcaaggtgtcggccacacagac

SEQ ID NO: 33979 - DNA, 25 bp, Saccharomyces pastorianus
cgcccaactggacgtagagcaaggt

SEQ ID NO: 33980 - DNA, 25 bp, Saccharomyces pastorianus
aagacgaagtcgaagccgctataag

SEQ ID NO: 33981 - DNA, 25 bp, Saccharomyces pastorianus
tcaagtactgtaccgcgcaaccaag

SEQ ID NO: 33982 - DNA, 25 bp, Saccharomyces pastorianus
attagcccgtgtctccaaggacaag

SEQ ID NO: 33983 - DNA, 25 bp, Saccharomyces pastorianus
aaggacagctacatgaccaccagtg

SEQ ID NO: 33984 - DNA, 25 bp, Saccharomyces pastorianus
taaggaagccgtcttcaagtccctg

SEQ ID NO: 33985 - DNA, 25 bp, Saccharomyces pastorianus
aaacgacactttcatcgagcgcaac

SEQ ID NO: 33986 - DNA, 25 bp, Saccharomyces pastorianus
aggagcacgctccttacactgatga

SEQ ID NO: 33987 - DNA, 25 bp, Saccharomyces pastorianus
gtttgactttcaacgccaagggcat

SEQ ID NO: 33988 - DNA, 25 bp, Saccharomyces pastorianus
acatcgagatcgttcgtgtcaacaa

SEQ ID NO: 33989 - DNA, 25 bp, Saccharomyces pastorianus
gtgtcaacaagaacgggcctgccgt

SEQ ID NO: 33990 - DNA, 25 bp, Saccharomyces pastorianus
agtacttccacaacggtatgatcca

SEQ ID NO: 33991 - DNA, 25 bp, Saccharomyces pastorianus
ggagaatgtctacttggacccatta

SEQ ID NO: 33992 - DNA, 25 bp, Saccharomyces pastorianus
tttgtttcttgcaggcgccaacgca

SEQ ID NO: 33993 - DNA, 25 bp, Saccharomyces pastorianus
ggacatagatcactcctccataata

SEQ ID NO: 33994 - DNA, 25 bp, Saccharomyces pastorianus
atttcgcgagcagcaatactttcaa

SEQ ID NO: 33995 - DNA, 25 bp, Saccharomyces pastorianus
cgcaagctcgaatcccaacaagaat

SEQ ID NO: 33996 - DNA, 25 bp, Saccharomyces pastorianus
agatacgatcagtttcccgaatttc

SEQ ID NO: 33997 - DNA, 25 bp, Saccharomyces pastorianus
aacttctgcgtcgtctatattcaac

SEQ ID NO: 33998 - DNA, 25 bp, Saccharomyces pastorianus
actttagcgggtcatcccagcatta

SEQ ID NO: 33999 - DNA, 25 bp, Saccharomyces pastorianus
gcattacgctgtcccggacatagat

SEQ ID NO: 34000 - DNA, 25 bp, Saccharomyces pastorianus
gaatgtcagcactaataacgtccct

SEQ ID NO: 34001 - DNA, 25 bp, Saccharomyces pastorianus
caaagacgatttgtttttctgccca

SEQ ID NO: 34002 - DNA, 25 bp, Saccharomyces pastorianus
gcccaagatcactgctgtctgtaga

SEQ ID NO: 34003 - DNA, 25 bp, Saccharomyces pastorianus
ggtatatagagtcggattatccaca

SEQ ID NO: 34004 - DNA, 25 bp, Saccharomyces pastorianus
aagtatatccgtggtatcagtgaag

SEQ ID NO: 34005 - DNA, 25 bp, Saccharomyces pastorianus
gcccgcattgttgaacgcttttgac

SEQ ID NO: 34006 - DNA, 25 bp, Saccharomyces pastorianus
gaattggaaatcaacacgcccgcat

SEQ ID NO: 34007 - DNA, 25 bp, Saccharomyces pastorianus
ggcccaactgttattatattcccca

SEQ ID NO: 34008 - DNA, 25 bp, Saccharomyces pastorianus
tacctgtacctgaaaatgacccacc

SEQ ID NO: 34009 - DNA, 25 bp, Saccharomyces pastorianus
gcatctctcatcaggacgtttctaa

SEQ ID NO: 34010 - DNA, 25 bp, Saccharomyces pastorianus
gagaaacgacatgtggcccaactgt

SEQ ID NO: 34011 - DNA, 25 bp, Saccharomyces pastorianus
gacagtcggaaactactcacgaagt

SEQ ID NO: 34012 - DNA, 25 bp, Saccharomyces pastorianus
gaccgtataagttacatccacaatg

SEQ ID NO: 34013 - DNA, 25 bp, Saccharomyces pastorianus
tgaacttagaactacctgtacctga

SEQ ID NO: 34014 - DNA, 25 bp, Saccharomyces pastorianus
aacttatgaaacttccggcacaaat

SEQ ID NO: 34015 - DNA, 25 bp, Saccharomyces pastorianus
ttcgcagatgctgacggtgctagta

SEQ ID NO: 34016 - DNA, 25 bp, Saccharomyces pastorianus
tggttccagggcacatatggttaac

SEQ ID NO: 34017 - DNA, 25 bp, Saccharomyces pastorianus
gatgtatggtttccacactctggta

SEQ ID NO: 34018 - DNA, 25 bp, Saccharomyces pastorianus
tggctctaaaatggctttggctgtc

SEQ ID NO: 34019 - DNA, 25 bp, Saccharomyces pastorianus
ggctttggctgtcgatagcatcaaa

SEQ ID NO: 34020 - DNA, 25 bp, Saccharomyces pastorianus
tgctgtgagacagggtttcctacat

SEQ ID NO: 34021 - DNA, 25 bp, Saccharomyces pastorianus
gtaaatacggtctcttcgcagatgc

SEQ ID NO: 34022 - DNA, 25 bp, Saccharomyces pastorianus
aaactgtttaataggcctgccatat

SEQ ID NO: 34023 - DNA, 25 bp, Saccharomyces pastorianus
gattttcccatatttgcataccgag

SEQ ID NO: 34024 - DNA, 25 bp, Saccharomyces pastorianus
aagcctgttgtagccattggttcca

SEQ ID NO: 34025 - DNA, 25 bp, Saccharomyces pastorianus
gactctcccgctaatatcaaggtta

SEQ ID NO: 34026 - DNA, 25 bp, Saccharomyces pastorianus
aggctccttatctggtggtcaacta

SEQ ID NO: 34027 - DNA, 25 bp, Saccharomyces pastorianus
gccaacctaaaaccatctgtcgatg

SEQ ID NO: 34028 - DNA, 25 bp, Saccharomyces pastorianus
aatgccgatgccgttggcgtgaaag

SEQ ID NO: 34029 - DNA, 25 bp, Saccharomyces pastorianus
tgaaattgctaaccacacaccacta

SEQ ID NO: 34030 - DNA, 25 bp, Saccharomyces pastorianus
ggtaccggacaaatcgatcaatcta

SEQ ID NO: 34031 - DNA, 25 bp, Saccharomyces pastorianus
gttggtgccttgtgtccagaacaat

SEQ ID NO: 34032 - DNA, 25 bp, Saccharomyces pastorianus
ccgtcaattgattccttcggttatt

SEQ ID NO: 34033 - DNA, 25 bp, Saccharomyces pastorianus
gaatggttgtcgtctccaaagggaa

SEQ ID NO: 34034 - DNA, 25 bp, Saccharomyces pastorianus
cgtcgtcgtttacgttacatcgaat

SEQ ID NO: 34035 - DNA, 25 bp, Saccharomyces pastorianus
atctgtcgatgacgatgactctccc

SEQ ID NO: 34036 - DNA, 25 bp, Saccharomyces pastorianus
attgagaacagactcctcagccgag

SEQ ID NO: 34037 - DNA, 25 bp, Saccharomyces pastorianus
aaaagcaattcgctgttgtcgccgt

SEQ ID NO: 34038 - DNA, 25 bp, Saccharomyces pastorianus
gtacggtcaatatacgacctgtttt

SEQ ID NO: 34039 - DNA, 25 bp, Saccharomyces pastorianus
gactcctcagccgagtacggtcaat

SEQ ID NO: 34040 - DNA, 25 bp, Saccharomyces pastorianus
aagcgttccaggttccaaattgcgt

SEQ ID NO: 34041 - DNA, 25 bp, Saccharomyces pastorianus
aattttacgcctttgaaatcgcaag

SEQ ID NO: 34042 - DNA, 25 bp, Saccharomyces pastorianus
gctgagaccgctgataacttagaag

SEQ ID NO: 34043 - DNA, 25 bp, Saccharomyces pastorianus
tcaagttttaatgctgagaccgctg

SEQ ID NO: 34044 - DNA, 25 bp, Saccharomyces pastorianus
attgcgtttgaccaagttcgatgac

SEQ ID NO: 34045 - DNA, 25 bp, Saccharomyces pastorianus
cgacctgttttgttgtgaggctaca

SEQ ID NO: 34046 - DNA, 25 bp, Saccharomyces pastorianus
aacttcatcgaaagattcccggaat

SEQ ID NO: 34047 - DNA, 25 bp, Saccharomyces pastorianus
tctttactcttggatcactacgaat

SEQ ID NO: 34048 - DNA, 25 bp, Saccharomyces pastorianus
ggcggccctatcaagctaaaggcta

SEQ ID NO: 34049 - DNA, 25 bp, Saccharomyces pastorianus
gaaattaccagatctatcggacgat

SEQ ID NO: 34050 - DNA, 25 bp, Saccharomyces pastorianus
gaagctttatcgagattccgtgaga

SEQ ID NO: 34051 - DNA, 25 bp, Saccharomyces pastorianus
atgtttggcgccatagtctacctcg

SEQ ID NO: 34052 - DNA, 25 bp, Saccharomyces pastorianus
aacgcaaacactttagccatttcct

SEQ ID NO: 34053 - DNA, 25 bp, Saccharomyces pastorianus
cggtgccacctatttacttcaatta

SEQ ID NO: 34054 - DNA, 25 bp, Saccharomyces pastorianus
aaaacccaccttcattatcattcaa

SEQ ID NO: 34055 - DNA, 25 bp, Saccharomyces pastorianus
taggatcatcatagccacaatacgt

SEQ ID NO: 34056 - DNA, 25 bp, Saccharomyces pastorianus
tgactagagacgacctaggcggccc

SEQ ID NO: 34057 - DNA, 25 bp, Saccharomyces pastorianus
gatttaattttgcagctgtccaaga

SEQ ID NO: 34058 - DNA, 25 bp, Saccharomyces pastorianus
gatcttggtaccctgttcatgttaa

SEQ ID NO: 34059 - DNA, 25 bp, Saccharomyces pastorianus
aggtgttgacgatctcaagagccaa

SEQ ID NO: 34060 - DNA, 25 bp, Saccharomyces pastorianus
gtctaaaggttccaagggctgttca

SEQ ID NO: 34061 - DNA, 25 bp, Saccharomyces pastorianus
aacccagttacttctctgttattga

SEQ ID NO: 34062 - DNA, 25 bp, Saccharomyces pastorianus
ggccactttagagcctcctttgaag

SEQ ID NO: 34063 - DNA, 25 bp, Saccharomyces pastorianus
gtgcataccaaaagatccaacgtgt

SEQ ID NO: 34064 - DNA, 25 bp, Saccharomyces pastorianus
agagccgctatgagtttggaaacac

SEQ ID NO: 34065 - DNA, 25 bp, Saccharomyces pastorianus
gggctgttcaaaaggacttaccatt

SEQ ID NO: 34066 - DNA, 25 bp, Saccharomyces pastorianus
gagctttgtcaaaacccgaaggcca

SEQ ID NO: 34067 - DNA, 25 bp, Saccharomyces pastorianus
taagcgattctataacccagttact

SEQ ID NO: 34068 - DNA, 25 bp, Saccharomyces pastorianus
tatatggccaaaagagctgtcgttt

SEQ ID NO: 34069 - DNA, 25 bp, Saccharomyces pastorianus
tacacacattgctgttggctcggaa

SEQ ID NO: 34070 - DNA, 25 bp, Saccharomyces pastorianus
gagcgcccaagacactgaaaacttt

SEQ ID NO: 34071 - DNA, 25 bp, Saccharomyces pastorianus
agaatccatgccatctagcctgaaa

SEQ ID NO: 34072 - DNA, 25 bp, Saccharomyces pastorianus
aacttcagtttttacgcagagcgcc

SEQ ID NO: 34073 - DNA, 25 bp, Saccharomyces pastorianus
ggcagaagccacctcgttggaagaa

SEQ ID NO: 34074 - DNA, 25 bp, Saccharomyces pastorianus
aagccaacacacatcctggatttga

SEQ ID NO: 34075 - DNA, 25 bp, Saccharomyces pastorianus
gatggtcgactgttgccaatgaact

SEQ ID NO: 34076 - DNA, 25 bp, Saccharomyces pastorianus
actccgattagtaccgcatctagaa

SEQ ID NO: 34077 - DNA, 25 bp, Saccharomyces pastorianus
gaacttgcaaaacctcacgttgtca

SEQ ID NO: 34078 - DNA, 25 bp, Saccharomyces pastorianus
gaacttctcacaattccggatctat

SEQ ID NO: 34079 - DNA, 25 bp, Saccharomyces pastorianus
gaaaccaagtttgccatttggccaa

SEQ ID NO: 34080 - DNA, 25 bp, Saccharomyces pastorianus
ccggtgttatcgtttttggcatgaa

SEQ ID NO: 34081 - DNA, 25 bp, Saccharomyces pastorianus
gttgttttcgaaaagctggctggct

SEQ ID NO: 34082 - DNA, 25 bp, Saccharomyces pastorianus
agatccaacttgatgtctctaggta

SEQ ID NO: 34083 - DNA, 25 bp, Saccharomyces pastorianus
gacagtactagccaagcatgccaag

SEQ ID NO: 34084 - DNA, 25 bp, Saccharomyces pastorianus
agctggctggctatatcggtagaaa

SEQ ID NO: 34085 - DNA, 25 bp, Saccharomyces pastorianus
agattgcacattacttccttgacag

SEQ ID NO: 34086 - DNA, 25 bp, Saccharomyces pastorianus
gggaaatgccattcctatacggcaa

SEQ ID NO: 34087 - DNA, 25 bp, Saccharomyces pastorianus
ggttcggtgtcagttcaaagagtac

SEQ ID NO: 34088 - DNA, 25 bp, Saccharomyces pastorianus
gctgccattgttgctttcagacaag

SEQ ID NO: 34089 - DNA, 25 bp, Saccharomyces pastorianus
gtgcccgaccatgtttccaaattgg

SEQ ID NO: 34090 - DNA, 25 bp, Saccharomyces pastorianus
agaaacatgcaacctgctgccattg

SEQ ID NO: 34091 - DNA, 25 bp, Saccharomyces pastorianus
gaagaacgaccctgcttttacagaa

SEQ ID NO: 34092 - DNA, 25 bp, Saccharomyces pastorianus
tcggatgactccaaggctttccatg

SEQ ID NO: 34093 - DNA, 25 bp, Saccharomyces pastorianus
gaaggctaggtgtcagtcattccct

SEQ ID NO: 34094 - DNA, 25 bp, Saccharomyces pastorianus
tgagctcccttcactgtttagtaat

SEQ ID NO: 34095 - DNA, 25 bp, Saccharomyces pastorianus
ggagctacaccaattgattcatcaa

SEQ ID NO: 34096 - DNA, 25 bp, Saccharomyces pastorianus
gttctgggaacaccgcatatatctc

SEQ ID NO: 34097 - DNA, 25 bp, Saccharomyces pastorianus
aattcgtaggtgctaactccttcac

SEQ ID NO: 34098 - DNA, 25 bp, Saccharomyces pastorianus
gtggaccacgcaatccaattcgtag

SEQ ID NO: 34099 - DNA, 25 bp, Saccharomyces pastorianus
gagcccgtttcgaaggtatacaaat

SEQ ID NO: 34100 - DNA, 25 bp, Saccharomyces pastorianus
aaccttgcatgatctgagagcccgt

SEQ ID NO: 34101 - DNA, 25 bp, Saccharomyces pastorianus
atccacctacgatttgttggtcctg

SEQ ID NO: 34102 - DNA, 25 bp, Saccharomyces pastorianus
ttggtccattgcttacgtgattttc

SEQ ID NO: 34103 - DNA, 25 bp, Saccharomyces pastorianus
tgctatcactgatgacccggtcaag

SEQ ID NO: 34104 - DNA, 25 bp, Saccharomyces pastorianus
atgatcaagacgttcgctgccatgc

SEQ ID NO: 34105 - DNA, 25 bp, Saccharomyces pastorianus
ttgtgaagcgttccctgtcgttgaa

SEQ ID NO: 34106 - DNA, 25 bp, Saccharomyces pastorianus
gtcaacaaacccgtcgatttcaagt

SEQ ID NO: 34107 - DNA, 25 bp, Saccharomyces pastorianus
agctgctaccgaccctgatggaaaa

SEQ ID NO: 34108 - DNA, 25 bp, Saccharomyces pastorianus
ggtctacaccattctttgtacactt

SEQ ID NO: 34109 - DNA, 25 bp, Saccharomyces pastorianus
gacaaagccgtcctgtactgggaag

SEQ ID NO: 34110 - DNA, 25 bp, Saccharomyces pastorianus
gattccatgtctttgtcaaggtcta

SEQ ID NO: 34111 - DNA, 25 bp, Saccharomyces pastorianus
ttcggcatcagcgttcattttgtct

SEQ ID NO: 34112 - DNA, 25 bp, Saccharomyces pastorianus
gatcctcattacaagcttttcggca

SEQ ID NO: 34113 - DNA, 25 bp, Saccharomyces pastorianus
tcctgaaccattactgcagcagcag

SEQ ID NO: 34114 - DNA, 25 bp, Saccharomyces pastorianus
aataataacgcagcttcctctttac

SEQ ID NO: 34115 - DNA, 25 bp, Saccharomyces pastorianus
tcaagcatctgcacaacctcaaatg

SEQ ID NO: 34116 - DNA, 25 bp, Saccharomyces pastorianus
atggctgccaccagggtcactcagt

SEQ ID NO: 34117 - DNA, 25 bp, Saccharomyces pastorianus
tgaagaagttccctactcatttcca

SEQ ID NO: 34118 - DNA, 25 bp, Saccharomyces pastorianus
agggcgactcagacgtaaataacaa

SEQ ID NO: 34119 - DNA, 25 bp, Saccharomyces pastorianus
gacttgctcatcgaaaagggcgact

SEQ ID NO: 34120 - DNA, 25 bp, Saccharomyces pastorianus
aagcagcgccgacaacaagtctgaa

SEQ ID NO: 34121 - DNA, 25 bp, Saccharomyces pastorianus
agggccaaagttcacaaccacagca

SEQ ID NO: 34122 - DNA, 25 bp, Saccharomyces pastorianus
gtatcctccgcaagtaagcgccaat

SEQ ID NO: 34123 - DNA, 25 bp, Saccharomyces pastorianus
atgagatctaattcgcagcaaccac

SEQ ID NO: 34124 - DNA, 25 bp, Saccharomyces pastorianus
gccatatttccatcctgatgtcgtg

SEQ ID NO: 34125 - DNA, 25 bp, Saccharomyces pastorianus
tttgcaaagcggttccaaggacatt

SEQ ID NO: 34126 - DNA, 25 bp, Saccharomyces pastorianus
gcagaagtcatattggcactggaat

SEQ ID NO: 34127 - DNA, 25 bp, Saccharomyces pastorianus
acaccgttttatgatactacgccaa

SEQ ID NO: 34128 - DNA, 25 bp, Saccharomyces pastorianus
aaggacattaaagcccacccatggt

SEQ ID NO: 34129 - DNA, 25 bp, Saccharomyces pastorianus
gactctttgtgggactccggattat

SEQ ID NO: 34130 - DNA, 25 bp, Saccharomyces pastorianus
gcactggaatacttgcatggccata

SEQ ID NO: 34131 - DNA, 25 bp, Saccharomyces pastorianus
ttggccaaggacatcgaaactccat

SEQ ID NO: 34132 - DNA, 25 bp, Saccharomyces pastorianus
ggtgacacctctttgtttgatcagt

SEQ ID NO: 34133 - DNA, 25 bp, Saccharomyces pastorianus
ggtgcaaacggtcacatggactctt

SEQ ID NO: 34134 - DNA, 25 bp, Saccharomyces pastorianus
ggaaaagtcatatatccgccatatt

SEQ ID NO: 34135 - DNA, 25 bp, Saccharomyces pastorianus
actgtgataatgtcttggagcctac

SEQ ID NO: 34136 - DNA, 25 bp, Saccharomyces pastorianus
taccgacgatcctagctctattgaa

SEQ ID NO: 34137 - DNA, 25 bp, Saccharomyces pastorianus
gaaatttgtccgatcttctacaaga

SEQ ID NO: 34138 - DNA, 25 bp, Saccharomyces pastorianus
ggacggcgctctcggtatacaaata

SEQ ID NO: 34139 - DNA, 25 bp, Saccharomyces pastorianus
aggtaattgcccctccataaatagc

SEQ ID NO: 34140 - DNA, 25 bp, Saccharomyces pastorianus
aatagcccaattgtggccatcctta

SEQ ID NO: 34141 - DNA, 25 bp, Saccharomyces pastorianus
gagcagcatctttacgggacggcgc

SEQ ID NO: 34142 - DNA, 25 bp, Saccharomyces pastorianus
gacatctttcgaacggtggttgttt

SEQ ID NO: 34143 - DNA, 25 bp, Saccharomyces pastorianus
gagatatctctcgattccagtacca

SEQ ID NO: 34144 - DNA, 25 bp, Saccharomyces pastorianus
tggagcctactggttctgcaaacaa

SEQ ID NO: 34145 - DNA, 25 bp, Saccharomyces pastorianus
gaccatgtcctggttgaatcgaact

SEQ ID NO: 34146 - DNA, 25 bp, Saccharomyces pastorianus
aaacagcagttgtggttgctgcata

SEQ ID NO: 34147 - DNA, 25 bp, Saccharomyces pastorianus
aaatgatcggttttttggagagcca

SEQ ID NO: 34148 - DNA, 25 bp, Saccharomyces pastorianus
gtagctacctggtgacttgcaaaag

SEQ ID NO: 34149 - DNA, 25 bp, Saccharomyces pastorianus
ggtggcgccaagcttatacatggtt

SEQ ID NO: 34150 - DNA, 25 bp, Saccharomyces pastorianus
tccattccccgtatatctttacgat

SEQ ID NO: 34151 - DNA, 25 bp, Saccharomyces pastorianus
tatattcacgtaccaaactcgccat

SEQ ID NO: 34152 - DNA, 25 bp, Saccharomyces pastorianus
gccatcgcggagttggactcgttga

SEQ ID NO: 34153 - DNA, 25 bp, Saccharomyces pastorianus
ttctgaagaatagaccgcgggtttc

SEQ ID NO: 34154 - DNA, 25 bp, Saccharomyces pastorianus
atacatggttcgtagctacctggtg

SEQ ID NO: 34155 - DNA, 25 bp, Saccharomyces pastorianus
cgggcaaaacttccagcgtctgata

SEQ ID NO: 34156 - DNA, 25 bp, Saccharomyces pastorianus
ggagagccagttgtcatgcataaaa

SEQ ID NO: 34157 - DNA, 25 bp, Saccharomyces pastorianus
agtcttgagcaacacgggtcttcac

SEQ ID NO: 34158 - DNA, 25 bp, Saccharomyces pastorianus
gtcttcactgcactctctatatagt

SEQ ID NO: 34159 - DNA, 25 bp, Saccharomyces pastorianus
aaacaagctccttactcctgaaatg

SEQ ID NO: 34160 - DNA, 25 bp, Saccharomyces pastorianus
gaacgggatctttggagcttatagc

SEQ ID NO: 34161 - DNA, 25 bp, Saccharomyces pastorianus
tgcaccttaccatcagtgacgctga

SEQ ID NO: 34162 - DNA, 25 bp, Saccharomyces pastorianus
tgaagcatttcatcccaacgaacac

SEQ ID NO: 34163 - DNA, 25 bp, Saccharomyces pastorianus
acgctgaatggctattttccctcaa

SEQ ID NO: 34164 - DNA, 25 bp, Saccharomyces pastorianus
atgggctcctccacggtgtatcgaa

SEQ ID NO: 34165 - DNA, 25 bp, Saccharomyces pastorianus
gccattatggccttttgtgcgatga

SEQ ID NO: 34166 - DNA, 25 bp, Saccharomyces pastorianus
gtatcgaacccttgtctaacgtatg

SEQ ID NO: 34167 - DNA, 25 bp, Saccharomyces pastorianus
gagattttcgggttatccgttcacg

SEQ ID NO: 34168 - DNA, 25 bp, Saccharomyces pastorianus
ggtttcgtccaacgaggtcaacaag

SEQ ID NO: 34169 - DNA, 25 bp, Saccharomyces pastorianus
ttcccaagagtcaaccgtcgcaaaa

SEQ ID NO: 34170 - DNA, 25 bp, Saccharomyces pastorianus
ctgttcgagcaggacattttggtta

SEQ ID NO: 34171 - DNA, 25 bp, Saccharomyces pastorianus
agagctgataccacagtgacttggg

SEQ ID NO: 34172 - DNA, 25 bp, Saccharomyces pastorianus
aaaaacatcatctcttgtcccaggt

SEQ ID NO: 34173 - DNA, 25 bp, Saccharomyces pastorianus
aacattaccaacttcggatgacggg

SEQ ID NO: 34174 - DNA, 25 bp, Saccharomyces pastorianus
actagcactcggaagagtcctctaa

SEQ ID NO: 34175 - DNA, 25 bp, Saccharomyces pastorianus
tacagggactgatgcattctagaaa

SEQ ID NO: 34176 - DNA, 25 bp, Saccharomyces pastorianus
atggagccgaagatgcttcccaaga

SEQ ID NO: 34177 - DNA, 25 bp, Saccharomyces pastorianus
tagagaaacccagtcaacttccgtc

SEQ ID NO: 34178 - DNA, 25 bp, Saccharomyces pastorianus
gaagcttaccagtctaatgcgttga

SEQ ID NO: 34179 - DNA, 25 bp, Saccharomyces pastorianus
gaaatcttggacgatgctatgcata

SEQ ID NO: 34180 - DNA, 25 bp, Saccharomyces pastorianus
aacgaccatttctctacattgtaca

SEQ ID NO: 34181 - DNA, 25 bp, Saccharomyces pastorianus
gtcctgcaaaggtgaaccggtccga

SEQ ID NO: 34182 - DNA, 25 bp, Saccharomyces pastorianus
aggtgatgccttttttgctggtgat

SEQ ID NO: 34183 - DNA, 25 bp, Saccharomyces pastorianus
gcaattaacagacatcgggctacga

SEQ ID NO: 34184 - DNA, 25 bp, Saccharomyces pastorianus
agcgaaggaactgccactctagaaa

SEQ ID NO: 34185 - DNA, 25 bp, Saccharomyces pastorianus
aatcggtcaatcaaagaggctcatc

SEQ ID NO: 34186 - DNA, 25 bp, Saccharomyces pastorianus
aattggctagacgtttacagcagca

SEQ ID NO: 34187 - DNA, 25 bp, Saccharomyces pastorianus
ttgtacaggcatcgtgtggcagtct

SEQ ID NO: 34188 - DNA, 25 bp, Saccharomyces pastorianus
ggtgatttcagtagcgcaaagtcaa

SEQ ID NO: 34189 - DNA, 25 bp, Saccharomyces pastorianus
gtggcagtctctaggttctgtagat

SEQ ID NO: 34190 - DNA, 25 bp, Saccharomyces pastorianus
atccgtggccatcggttctatactg

SEQ ID NO: 34191 - DNA, 25 bp, Saccharomyces pastorianus
agctgactcacgagcaggaggttaa

SEQ ID NO: 34192 - DNA, 25 bp, Saccharomyces pastorianus
tgattcgccggctgtggaacaacac

SEQ ID NO: 34193 - DNA, 25 bp, Saccharomyces pastorianus
ccagcgcattccgttgaatctgatt

SEQ ID NO: 34194 - DNA, 25 bp, Saccharomyces pastorianus
ggctgtggaacaacacaagcttcag

SEQ ID NO: 34195 - DNA, 25 bp, Saccharomyces pastorianus
aagcttcagctgactcacgagcagg

SEQ ID NO: 34196 - DNA, 25 bp, Saccharomyces pastorianus
ttgaatctgattcgccggctgtgga

SEQ ID NO: 34197 - DNA, 25 bp, Saccharomyces pastorianus
ttccttattgcattcgcatccgtgg

SEQ ID NO: 34198 - DNA, 25 bp, Saccharomyces pastorianus
ttttccacgttccttattgcattcg

SEQ ID NO: 34199 - DNA, 25 bp, Saccharomyces pastorianus
ctgtacttttccacgttccttattg

SEQ ID NO: 34200 - DNA, 25 bp, Saccharomyces pastorianus
atcggttctatactgccgtgcccag

SEQ ID NO: 34201 - DNA, 25 bp, Saccharomyces pastorianus
caagcttattcattgccgtccaaat

SEQ ID NO: 34202 - DNA, 25 bp, Saccharomyces pastorianus
ggaggctctttagactatgggctat

SEQ ID NO: 34203 - DNA, 25 bp, Saccharomyces pastorianus
atatatgtcccgtttggtggttcca

SEQ ID NO: 34204 - DNA, 25 bp, Saccharomyces pastorianus
actgtctttttgttgctggctgaga

SEQ ID NO: 34205 - DNA, 25 bp, Saccharomyces pastorianus
attgatggtattgacgcgccggaaa

SEQ ID NO: 34206 - DNA, 25 bp, Saccharomyces pastorianus
gacacacctttacaactagccatga

SEQ ID NO: 34207 - DNA, 25 bp, Saccharomyces pastorianus
gagttctctcttatgggtgcagcaa

SEQ ID NO: 34208 - DNA, 25 bp, Saccharomyces pastorianus
ttttttgtggtgctggtgccgtaat

SEQ ID NO: 34209 - DNA, 25 bp, Saccharomyces pastorianus
aagctttgccgtgttttcattcgta

SEQ ID NO: 34210 - DNA, 25 bp, Saccharomyces pastorianus
gccatgatcggactgtttaacttga

SEQ ID NO: 34211 - DNA, 25 bp, Saccharomyces pastorianus
ggcgcagatggtacgaaactcctat

SEQ ID NO: 34212 - DNA, 25 bp, Saccharomyces pastorianus
tgttttgtttacagcttcttccgtt

SEQ ID NO: 34213 - DNA, 25 bp, Saccharomyces pastorianus
agctcaaattcctgccgaagctatc

SEQ ID NO: 34214 - DNA, 25 bp, Saccharomyces pastorianus
ccagttaataccactaccgaaaatg

SEQ ID NO: 34215 - DNA, 25 bp, Saccharomyces pastorianus
ttgtttacagcttcttccgttttag

SEQ ID NO: 34216 - DNA, 25 bp, Saccharomyces pastorianus
acagctcaaattcctgccgaagcta

SEQ ID NO: 34217 - DNA, 25 bp, Saccharomyces pastorianus
gaaacagctcaaattcctgccgaag

SEQ ID NO: 34218 - DNA, 25 bp, Saccharomyces pastorianus
caattgttacagctgttttgtttac

SEQ ID NO: 34219 - DNA, 25 bp, Saccharomyces pastorianus
gaaactctcaacaattgttacagct

SEQ ID NO: 34220 - DNA, 25 bp, Saccharomyces pastorianus
ttacagcttcttccgttttagccgc

SEQ ID NO: 34221 - DNA, 25 bp, Saccharomyces pastorianus
tttagccgccccagttaataccact

SEQ ID NO: 34222 - DNA, 25 bp, Saccharomyces pastorianus
accactaccgaaaatgaaacagctc

SEQ ID NO: 34223 - DNA, 25 bp, Saccharomyces pastorianus
atttcaaaccttgctgccaaggaag

SEQ ID NO: 34224 - DNA, 25 bp, Saccharomyces pastorianus
attctgacgttgctgttttgccatt

SEQ ID NO: 34225 - DNA, 25 bp, Saccharomyces pastorianus
ctgccgaagctatcattggctactt

SEQ ID NO: 34226 - DNA, 25 bp, Saccharomyces pastorianus
gaagctatcattggctacttggatt

SEQ ID NO: 34227 - DNA, 25 bp, Saccharomyces pastorianus
aagcaagagagaagccgatgctgaa

SEQ ID NO: 34228 - DNA, 25 bp, Saccharomyces pastorianus
agaaggtgtttcattaagcaagaga

SEQ ID NO: 34229 - DNA, 25 bp, Saccharomyces pastorianus
tgacgttgctgttttgccatttgca

SEQ ID NO: 34230 - DNA, 25 bp, Saccharomyces pastorianus
actactatttcaaaccttgctgcca

SEQ ID NO: 34231 - DNA, 25 bp, Saccharomyces pastorianus
gagggtgattctgacgttgctgttt

SEQ ID NO: 34232 - DNA, 25 bp, Saccharomyces pastorianus
ggtttactgttcataaatactacta

SEQ ID NO: 34233 - DNA, 25 bp, Saccharomyces pastorianus
gcaccaacactggtttactgttcat

SEQ ID NO: 34234 - DNA, 25 bp, Saccharomyces pastorianus
aacagccggcacttacagcagctaa

SEQ ID NO: 34235 - DNA, 25 bp, Saccharomyces pastorianus
ttgtcggcaggtcctcaacagccgg

SEQ ID NO: 34236 - DNA, 25 bp, Saccharomyces pastorianus
gaaaaggacgagtgtacatctactg

SEQ ID NO: 34237 - DNA, 25 bp, Saccharomyces pastorianus
aatatgccaagggtgctatcgcact

SEQ ID NO: 34238 - DNA, 25 bp, Saccharomyces pastorianus
ggtgctatcgcacttgaaactgtct

SEQ ID NO: 34239 - DNA, 25 bp, Saccharomyces pastorianus
agacgctccgccttaatatgccaag

SEQ ID NO: 34240 - DNA, 25 bp, Saccharomyces pastorianus
gtagcgactgctacctggtaagaag

SEQ ID NO: 34241 - DNA, 25 bp, Saccharomyces pastorianus
gggctttaaagtcagaacctctatc

SEQ ID NO: 34242 - DNA, 25 bp, Saccharomyces pastorianus
gcagctaacaggtcgttggtgttca

SEQ ID NO: 34243 - DNA, 25 bp, Saccharomyces pastorianus
ttgaaactgtctcccgcaacggtaa

SEQ ID NO: 34244 - DNA, 25 bp, Saccharomyces pastorianus
caacggtaacgagggcgtacactct

SEQ ID NO: 34245 - DNA, 25 bp, Saccharomyces pastorianus
gttacttctggtgatttggcggaca

SEQ ID NO: 34246 - DNA, 25 bp, Saccharomyces pastorianus
gaatacgtaccgtttaccattgatg

SEQ ID NO: 34247 - DNA, 25 bp, Saccharomyces pastorianus
gtgctgcatattcaacgtcgcgttg

SEQ ID NO: 34248 - DNA, 25 bp, Saccharomyces pastorianus
acgtcgcgttggttgcactgaagaa

SEQ ID NO: 34249 - DNA, 25 bp, Saccharomyces pastorianus
gaagaagctatcaccacgtctgttg

SEQ ID NO: 34250 - DNA, 25 bp, Saccharomyces pastorianus
tctgttgaccaaatcgtacgcgctt

SEQ ID NO: 34251 - DNA, 25 bp, Saccharomyces pastorianus
atcagcttttcgttgtcatttcacc

SEQ ID NO: 34252 - DNA, 25 bp, Saccharomyces pastorianus
gatactgttgtttcgggtcttccca

SEQ ID NO: 34253 - DNA, 25 bp, Saccharomyces pastorianus
tcgattcagctgcatcttcaacaat

SEQ ID NO: 34254 - DNA, 25 bp, Saccharomyces pastorianus
gttgcaagtgcatcagtcgggtatc

SEQ ID NO: 34255 - DNA, 25 bp, Saccharomyces pastorianus
ggcggacacaggttcattggacatc

SEQ ID NO: 34256 - DNA, 25 bp, Saccharomyces pastorianus
taccccatcaagatatctgctgcgt

SEQ ID NO: 34257 - DNA, 25 bp, Saccharomyces pastorianus
ttgtcccgatgaagcactgaatgcg

SEQ ID NO: 34258 - DNA, 25 bp, Saccharomyces pastorianus
gtcggtgtacccaattctagattcg

SEQ ID NO: 34259 - DNA, 25 bp, Saccharomyces pastorianus
aacaaaacgtcttgataccccatca

SEQ ID NO: 34260 - DNA, 25 bp, Saccharomyces pastorianus
gagtcgatgaaatcttccaccattt

SEQ ID NO: 34261 - DNA, 25 bp, Saccharomyces pastorianus
tagcaattctcaatcaaccaccaat

SEQ ID NO: 34262 - DNA, 25 bp, Saccharomyces pastorianus
aaggtttgattttgatgcctccaga

SEQ ID NO: 34263 - DNA, 25 bp, Saccharomyces pastorianus
gatcgtttcaagttcacaccatgcg

SEQ ID NO: 34264 - DNA, 25 bp, Saccharomyces pastorianus
tgcagagcgtgtcggtgtacccaat

SEQ ID NO: 34265 - DNA, 25 bp, Saccharomyces pastorianus
gggtttgccattccgtttgcagagc

SEQ ID NO: 34266 - DNA, 25 bp, Saccharomyces pastorianus
atgcctccagaggtgggtttgccat

SEQ ID NO: 34267 - DNA, 25 bp, Saccharomyces pastorianus
atcacaacacattgtctgctgccaa

SEQ ID NO: 34268 - DNA, 25 bp, Saccharomyces pastorianus
gataacgcgaacaataccccaatgg

SEQ ID NO: 34269 - DNA, 25 bp, Saccharomyces pastorianus
aactcaattcccagtgataacgcga

SEQ ID NO: 34270 - DNA, 25 bp, Saccharomyces pastorianus
gcgcaaaacgcctcgatatatcaca

SEQ ID NO: 34271 - DNA, 25 bp, Saccharomyces pastorianus
ttgtccaagagattcgctcatgccc

SEQ ID NO: 34272 - DNA, 25 bp, Saccharomyces pastorianus
gggctcaccaaaattcaactgtcca

SEQ ID NO: 34273 - DNA, 25 bp, Saccharomyces pastorianus
ggagcccgaacacgtcttggagaat

SEQ ID NO: 34274 - DNA, 25 bp, Saccharomyces pastorianus
cgaactgctctaccgattatgaatt

SEQ ID NO: 34275 - DNA, 25 bp, Saccharomyces pastorianus
tacctcgcaattcctacctgagagt

SEQ ID NO: 34276 - DNA, 25 bp, Saccharomyces pastorianus
aagccttgctataagtcagctccaa

SEQ ID NO: 34277 - DNA, 25 bp, Saccharomyces pastorianus
gacaaagaggccgattccagagttt

SEQ ID NO: 34278 - DNA, 25 bp, Saccharomyces pastorianus
aaagagtgtcccgataccgtgaact

SEQ ID NO: 34279 - DNA, 25 bp, Saccharomyces pastorianus
tacaagaacgttatcctcggtccca

SEQ ID NO: 34280 - DNA, 25 bp, Saccharomyces pastorianus
gccatcaaagactgggtttccgtac

SEQ ID NO: 34281 - DNA, 25 bp, Saccharomyces pastorianus
gaactacttactgtcccggattggt

SEQ ID NO: 34282 - DNA, 25 bp, Saccharomyces pastorianus
cttcgctcatggacttttcctgaaa

SEQ ID NO: 34283 - DNA, 25 bp, Saccharomyces pastorianus
gtattttcaggtacggcgctatgga

SEQ ID NO: 34284 - DNA, 25 bp, Saccharomyces pastorianus
gtagcagcacttctatagagcccac

SEQ ID NO: 34285 - DNA, 25 bp, Saccharomyces pastorianus
acacagctcgttatttccttgggaa

SEQ ID NO: 34286 - DNA, 25 bp, Saccharomyces pastorianus
attggtatcacccagtgcttggaga

SEQ ID NO: 34287 - DNA, 25 bp, Saccharomyces pastorianus
tagagcccaccatcatagccattaa

SEQ ID NO: 34288 - DNA, 25 bp, Saccharomyces pastorianus
aacgccttaggcacgatgttgcaga

SEQ ID NO: 34289 - DNA, 25 bp, Saccharomyces pastorianus
cagatttggttattccatggcctaa

SEQ ID NO: 34290 - DNA, 25 bp, Saccharomyces pastorianus
ccgttcccaagcagttttggctaga

SEQ ID NO: 34291 - DNA, 25 bp, Saccharomyces pastorianus
aagggtgccattctgagtattcgta

SEQ ID NO: 34292 - DNA, 25 bp, Saccharomyces pastorianus
tggaccaaccaagacagttcccgtt

SEQ ID NO: 34293 - DNA, 25 bp, Saccharomyces pastorianus
gattagttgctgatttcgacgatga

SEQ ID NO: 34294 - DNA, 25 bp, Saccharomyces pastorianus
taaaccggatccactcgatgtgaaa

SEQ ID NO: 34295 - DNA, 25 bp, Saccharomyces pastorianus
gtgaaaacggatctggccaccgatc

SEQ ID NO: 34296 - DNA, 25 bp, Saccharomyces pastorianus
aaaccttctgggtagattccatagt

SEQ ID NO: 34297 - DNA, 25 bp, Saccharomyces pastorianus
atatagctaaactggtggcacctca

SEQ ID NO: 34298 - DNA, 25 bp, Saccharomyces pastorianus
gtattcgtaatcctcactccaaata

SEQ ID NO: 34299 - DNA, 25 bp, Saccharomyces pastorianus
tcccacatgattacagtcccagtat

SEQ ID NO: 34300 - DNA, 25 bp, Saccharomyces pastorianus
ttcttcccaaggacgttgtccaagt

SEQ ID NO: 34301 - DNA, 25 bp, Saccharomyces pastorianus
aaacgattccagcaaacccagcgag

SEQ ID NO: 34302 - DNA, 25 bp, Saccharomyces pastorianus
tgaaaacgagcgaggacccaacggg

SEQ ID NO: 34303 - DNA, 25 bp, Saccharomyces pastorianus
atattatcaacgactgggaccagcc

SEQ ID NO: 34304 - DNA, 25 bp, Saccharomyces pastorianus
tggtggccggtaacttcttcccaag

SEQ ID NO: 34305 - DNA, 25 bp, Saccharomyces pastorianus
cagcggaccatacacgaactttgca

SEQ ID NO: 34306 - DNA, 25 bp, Saccharomyces pastorianus
gttgtccaagttcaatggtcacgat

SEQ ID NO: 34307 - DNA, 25 bp, Saccharomyces pastorianus
gggtccgcagggtctaacacaaacg

SEQ ID NO: 34308 - DNA, 25 bp, Saccharomyces pastorianus
cgtggaaggcagttctacgggccca

SEQ ID NO: 34309 - DNA, 25 bp, Saccharomyces pastorianus
tgacggacctgaccacggagcagat

SEQ ID NO: 34310 - DNA, 25 bp, Saccharomyces pastorianus
gagtggcaggagcatttcgaaaaca

SEQ ID NO: 34311 - DNA, 25 bp, Saccharomyces pastorianus
tgggaacgcattcggcatatggcaa

SEQ ID NO: 34312 - DNA, 25 bp, Saccharomyces pastorianus
gtgtttcaaacactctacattctgt

SEQ ID NO: 34313 - DNA, 25 bp, Saccharomyces pastorianus
cattcttgcaatcccaatgtgacta

SEQ ID NO: 34314 - DNA, 25 bp, Saccharomyces pastorianus
tttgaaacacatggaccctcagtct

SEQ ID NO: 34315 - DNA, 25 bp, Saccharomyces pastorianus
atactgggtattcccagaggcctct

SEQ ID NO: 34316 - DNA, 25 bp, Saccharomyces pastorianus
gatttcctgtcttgttacatttcca

SEQ ID NO: 34317 - DNA, 25 bp, Saccharomyces pastorianus
cgaactttcaatatgctgcaatcca

SEQ ID NO: 34318 - DNA, 25 bp, Saccharomyces pastorianus
tattccggagtgttggccgtaccaa

SEQ ID NO: 34319 - DNA, 25 bp, Saccharomyces pastorianus
gaccctcagtctataacgcaacgaa

SEQ ID NO: 34320 - DNA, 25 bp, Saccharomyces pastorianus
gcgtcggaagtttttggctgaaagc

SEQ ID NO: 34321 - DNA, 25 bp, Saccharomyces pastorianus
aggcctcttacttcaatcattcttg

SEQ ID NO: 34322 - DNA, 25 bp, Saccharomyces pastorianus
aatgcagccactcagtatgttacaa

SEQ ID NO: 34323 - DNA, 25 bp, Saccharomyces pastorianus
tacatctgaatataccaccacctat

SEQ ID NO: 34324 - DNA, 25 bp, Saccharomyces pastorianus
ttttaccattactctgtcctcggag

SEQ ID NO: 34325 - DNA, 25 bp, Saccharomyces pastorianus
cagcctctgatatcggtgctttaga

SEQ ID NO: 34326 - DNA, 25 bp, Saccharomyces pastorianus
atacagcgatgagacgaccaccttc

SEQ ID NO: 34327 - DNA, 25 bp, Saccharomyces pastorianus
actaactcgggtagcacgtacactt

SEQ ID NO: 34328 - DNA, 25 bp, Saccharomyces pastorianus
gaatccgttttcactagcgtcacag

SEQ ID NO: 34329 - DNA, 25 bp, Saccharomyces pastorianus
tatttcgacacagacaccacttaca

SEQ ID NO: 34330 - DNA, 25 bp, Saccharomyces pastorianus
gaaattgcgtctaccatcactaact

SEQ ID NO: 34331 - DNA, 25 bp, Saccharomyces pastorianus
tagtcactactactgcagaacctgt

SEQ ID NO: 34332 - DNA, 25 bp, Saccharomyces pastorianus
tacacatctactataacttccgctt

SEQ ID NO: 34333 - DNA, 25 bp, Saccharomyces pastorianus
aacagctggtcattttcattctcgg

SEQ ID NO: 34334 - DNA, 25 bp, Saccharomyces pastorianus
cgcgatgacgaatttcccgatctat

SEQ ID NO: 34335 - DNA, 25 bp, Saccharomyces pastorianus
gaacgcctttattttctgcatttgt

SEQ ID NO: 34336 - DNA, 25 bp, Saccharomyces pastorianus
ccaatgcgactggtatttcctgaat

SEQ ID NO: 34337 - DNA, 25 bp, Saccharomyces pastorianus
ggcctattggtttgcggatctgatc

SEQ ID NO: 34338 - DNA, 25 bp, Saccharomyces pastorianus
atttttactggccaccggtagtgat

SEQ ID NO: 34339 - DNA, 25 bp, Saccharomyces pastorianus
ttttggtgatgtttgtcttccccat

SEQ ID NO: 34340 - DNA, 25 bp, Saccharomyces pastorianus
atttgctcttagataccactctcgg

SEQ ID NO: 34341 - DNA, 25 bp, Saccharomyces pastorianus
gatccccattctttggttatcctta

SEQ ID NO: 34342 - DNA, 25 bp, Saccharomyces pastorianus
aagaatcaccctagaacgcctttat

SEQ ID NO: 34343 - DNA, 25 bp, Saccharomyces pastorianus
ttccccattttgctgaattgctttc

SEQ ID NO: 34344 - DNA, 25 bp, Saccharomyces pastorianus
atagataagggagttctggcctctt

SEQ ID NO: 34345 - DNA, 25 bp, Saccharomyces pastorianus
gttgaaaaggctgctcaagctttga

SEQ ID NO: 34346 - DNA, 25 bp, Saccharomyces pastorianus
attgacaccgttaaagctgctgcta

SEQ ID NO: 34347 - DNA, 25 bp, Saccharomyces pastorianus
gagctatgccatttatttctttgtt

SEQ ID NO: 34348 - DNA, 25 bp, Saccharomyces pastorianus
aagatcagagagtacgtcgaaccca

SEQ ID NO: 34349 - DNA, 25 bp, Saccharomyces pastorianus
catatggcgctaagaccggtaagga

SEQ ID NO: 34350 - DNA, 25 bp, Saccharomyces pastorianus
gaaagcccagaacatgtctttgaaa

SEQ ID NO: 34351 - DNA, 25 bp, Saccharomyces pastorianus
gcaacgtttagttagtgaaagccca

SEQ ID NO: 34352 - DNA, 25 bp, Saccharomyces pastorianus
aaatttccacgtgcttccaagccaa

SEQ ID NO: 34353 - DNA, 25 bp, Saccharomyces pastorianus
gaatctttcccagaatggcaatcac

SEQ ID NO: 34354 - DNA, 25 bp, Saccharomyces pastorianus
gaagttgatgcatccaggccagtta

SEQ ID NO: 34355 - DNA, 25 bp, Saccharomyces pastorianus
gtttgccatgaagctagacgattta

SEQ ID NO: 34356 - DNA, 25 bp, Saccharomyces pastorianus
ttctggatacagacccatatttatt

SEQ ID NO: 34357 - DNA, 25 bp, Saccharomyces pastorianus
aatgaacctctgtccccatggatat

SEQ ID NO: 34358 - DNA, 25 bp, Saccharomyces pastorianus
aagtacattgtacgagtttgccatg

SEQ ID NO: 34359 - DNA, 25 bp, Saccharomyces pastorianus
atccacctcacacctaaagcatagt

SEQ ID NO: 34360 - DNA, 25 bp, Saccharomyces pastorianus
gaacatacctagtgagctgctgaaa

SEQ ID NO: 34361 - DNA, 25 bp, Saccharomyces pastorianus
gaactaacgagtgtagctgctaaag

SEQ ID NO: 34362 - DNA, 25 bp, Saccharomyces pastorianus
gagcacgaatgcaatacaccactta

SEQ ID NO: 34363 - DNA, 25 bp, Saccharomyces pastorianus
aaaaggcggcgtatcatcgccaatc

SEQ ID NO: 34364 - DNA, 25 bp, Saccharomyces pastorianus
agattctaccaatataagggcttca

SEQ ID NO: 34365 - DNA, 25 bp, Saccharomyces pastorianus
aatttgaaacctttccatccacctg

SEQ ID NO: 34366 - DNA, 25 bp, Saccharomyces pastorianus
tttgccaagcaattcccttatgttt

SEQ ID NO: 34367 - DNA, 25 bp, Saccharomyces pastorianus
gattgtgtatttggatcgccgccct

SEQ ID NO: 34368 - DNA, 25 bp, Saccharomyces pastorianus
gtttttgccaaggaattcagactta

SEQ ID NO: 34369 - DNA, 25 bp, Saccharomyces pastorianus
aaatcctgggcccatttgccaagtg

SEQ ID NO: 34370 - DNA, 25 bp, Saccharomyces pastorianus
gggaggcccagagtacttaagaagt

SEQ ID NO: 34371 - DNA, 25 bp, Saccharomyces pastorianus
ggagtgcttctttaattacgaacct

SEQ ID NO: 34372 - DNA, 25 bp, Saccharomyces pastorianus
catcgaacacatatattgcactgcg

SEQ ID NO: 34373 - DNA, 25 bp, Saccharomyces pastorianus
tagagcttcatttgaaacccatggg

SEQ ID NO: 34374 - DNA, 25 bp, Saccharomyces pastorianus
gacttaggacagctttctcgagcca

SEQ ID NO: 34375 - DNA, 25 bp, Saccharomyces pastorianus
agtgacgtttatgatctagagcttc

SEQ ID NO: 34376 - DNA, 25 bp, Saccharomyces pastorianus
caacggagtagagctgtgttctgaa

SEQ ID NO: 34377 - DNA, 25 bp, Saccharomyces pastorianus
atttcacctgaattggctattgtcg

SEQ ID NO: 34378 - DNA, 25 bp, Saccharomyces pastorianus
cactcgccctacttgtttttgaatg

SEQ ID NO: 34379 - DNA, 25 bp, Saccharomyces pastorianus
gaaattcgaccccaaagtgagcttt

SEQ ID NO: 34380 - DNA, 25 bp, Saccharomyces pastorianus
tcagttttaaagtccgaagcccgcg

SEQ ID NO: 34381 - DNA, 25 bp, Saccharomyces pastorianus
catagaccccagtacttccttggaa

SEQ ID NO: 34382 - DNA, 25 bp, Saccharomyces pastorianus
tgacatcataaatacctcgccagct

SEQ ID NO: 34383 - DNA, 25 bp, Saccharomyces pastorianus
gccagctgtgctatttattatgtca

SEQ ID NO: 34384 - DNA, 25 bp, Saccharomyces pastorianus
gaagtcgaggtcgatatcccggcat

SEQ ID NO: 34385 - DNA, 25 bp, Saccharomyces pastorianus
tacaacatcgtctttatccacagca

SEQ ID NO: 34386 - DNA, 25 bp, Saccharomyces pastorianus
catcctcatcctctattatcttgaa

SEQ ID NO: 34387 - DNA, 25 bp, Saccharomyces pastorianus
ggcatccgcatttgagtctacaaca

SEQ ID NO: 34388 - DNA, 25 bp, Saccharomyces pastorianus
atctccgtcgataaagttgttccac

SEQ ID NO: 34389 - DNA, 25 bp, Saccharomyces pastorianus
aggtttaggctacgacactatctcc

SEQ ID NO: 34390 - DNA, 25 bp, Saccharomyces pastorianus
atggtgctgccattgacactggtac

SEQ ID NO: 34391 - DNA, 25 bp, Saccharomyces pastorianus
gatttcccagaaccagtcggtccat

SEQ ID NO: 34392 - DNA, 25 bp, Saccharomyces pastorianus
aagggcgacgtcacttggttgccag

SEQ ID NO: 34393 - DNA, 25 bp, Saccharomyces pastorianus
ttgccagttcgtcgtaaggcctact

SEQ ID NO: 34394 - DNA, 25 bp, Saccharomyces pastorianus
cggtccattggccatcattggtgat

SEQ ID NO: 34395 - DNA, 25 bp, Saccharomyces pastorianus
tggccaatacgctcttgactgtaac

SEQ ID NO: 34396 - DNA, 25 bp, Saccharomyces pastorianus
cttcttgcgcaaatactactccatt

SEQ ID NO: 34397 - DNA, 25 bp, Saccharomyces pastorianus
gacggcttacctgatttgactttca

SEQ ID NO: 34398 - DNA, 25 bp, Saccharomyces pastorianus
gttcgctttttacttgggtgacact

SEQ ID NO: 34399 - DNA, 25 bp, Saccharomyces pastorianus
gaggctaacccaaatgatggctgct

SEQ ID NO: 34400 - DNA, 25 bp, Saccharomyces pastorianus
aaagtatgcatgaatctccggccca

SEQ ID NO: 34401 - DNA, 25 bp, Saccharomyces pastorianus
tccggcccaaggtttggacgacatt

SEQ ID NO: 34402 - DNA, 25 bp, Saccharomyces pastorianus
gacatttggtactgtcacacgggta

SEQ ID NO: 34403 - DNA, 25 bp, Saccharomyces pastorianus
acactcggtaagtttgtcgcagtca

SEQ ID NO: 34404 - DNA, 25 bp, Saccharomyces pastorianus
gatactacaggtctattcaacgatg

SEQ ID NO: 34405 - DNA, 25 bp, Saccharomyces pastorianus
taagtcacaaattggcgtcgtagcc

SEQ ID NO: 34406 - DNA, 25 bp, Saccharomyces pastorianus
gcttcttcaccaatggcggctaata

SEQ ID NO: 34407 - DNA, 25 bp, Saccharomyces pastorianus
gatggctgctcaacgtgcaaatcaa

SEQ ID NO: 34408 - DNA, 25 bp, Saccharomyces pastorianus
gcaacaactcagtcttaagcgattt

SEQ ID NO: 34409 - DNA, 25 bp, Saccharomyces pastorianus
gacaacaggctatctcgtgtgcatt

SEQ ID NO: 34410 - DNA, 25 bp, Saccharomyces pastorianus
ttattcggcgccttccaattgacca

SEQ ID NO: 34411 - DNA, 25 bp, Saccharomyces pastorianus
gtacgaagccgaagtcctcagcaaa

SEQ ID NO: 34412 - DNA, 25 bp, Saccharomyces pastorianus
attgaccacccataagcacctaaaa

SEQ ID NO: 34413 - DNA, 25 bp, Saccharomyces pastorianus
tttttaccctgtcctgaaggcgtat

SEQ ID NO: 34414 - DNA, 25 bp, Saccharomyces pastorianus
aagtcaagtcatctgcctctttgag

SEQ ID NO: 34415 - DNA, 25 bp, Saccharomyces pastorianus
aagtactggttggaacccgcaggct

SEQ ID NO: 34416 - DNA, 25 bp, Saccharomyces pastorianus
aggcgtatctctaccaagaggccat

SEQ ID NO: 34417 - DNA, 25 bp, Saccharomyces pastorianus
gatgattatcacttcttaccgtttt

SEQ ID NO: 34418 - DNA, 25 bp, Saccharomyces pastorianus
attgaaggtcatgcccatagtactt

SEQ ID NO: 34419 - DNA, 25 bp, Saccharomyces pastorianus
gtatctgtattttggttgcatcgca

SEQ ID NO: 34420 - DNA, 25 bp, Saccharomyces pastorianus
atcatgcagcatttctatttcagta

SEQ ID NO: 34421 - DNA, 25 bp, Saccharomyces pastorianus
agggtacctgtcataacgctcgtgg

SEQ ID NO: 34422 - DNA, 25 bp, Saccharomyces pastorianus
agttttcaatggcatcggcgtgcac

SEQ ID NO: 34423 - DNA, 25 bp, Saccharomyces pastorianus
ggtggaatgtgctccagtggaccct

SEQ ID NO: 34424 - DNA, 25 bp, Saccharomyces pastorianus
agacgatgtcttatttgctggtgga

SEQ ID NO: 34425 - DNA, 25 bp, Saccharomyces pastorianus
gtggaccctcaaatagtaagctcat

SEQ ID NO: 34426 - DNA, 25 bp, Saccharomyces pastorianus
tcatcaactgatgctacggtgagat

SEQ ID NO: 34427 - DNA, 25 bp, Saccharomyces pastorianus
gttttatgactacaaatctgggcac

SEQ ID NO: 34428 - DNA, 25 bp, Saccharomyces pastorianus
aggcgttctgtgcagtactttcgat

SEQ ID NO: 34429 - DNA, 25 bp, Saccharomyces pastorianus
cggcgtgcaccgatgatattaggtc

SEQ ID NO: 34430 - DNA, 25 bp, Saccharomyces pastorianus
tgggcacaagtaccaatctttggct

SEQ ID NO: 34431 - DNA, 25 bp, Saccharomyces pastorianus
gagagctatcgcgttacatccaaag

SEQ ID NO: 34432 - DNA, 25 bp, Saccharomyces pastorianus
gacgaattcttcgatagagggttca

SEQ ID NO: 34433 - DNA, 25 bp, Saccharomyces pastorianus
tgttccacaagccattatacgtagt

SEQ ID NO: 34434 - DNA, 25 bp, Saccharomyces pastorianus
aataacatattctgcattcctcaaa

SEQ ID NO: 34435 - DNA, 25 bp, Saccharomyces pastorianus
ttatctatccaatgtcttcggacga

SEQ ID NO: 34436 - DNA, 25 bp, Saccharomyces pastorianus
cagaggccgacgttgatcaaatatc

SEQ ID NO: 34437 - DNA, 25 bp, Saccharomyces pastorianus
ggcacagacgaagcaattctatcaa

SEQ ID NO: 34438 - DNA, 25 bp, Saccharomyces pastorianus
tttatttccatctcacagaggccga

SEQ ID NO: 34439 - DNA, 25 bp, Saccharomyces pastorianus
gactatttgtttaaccttctgaaga

SEQ ID NO: 34440 - DNA, 25 bp, Saccharomyces pastorianus
gcagaggtgagactagactatcttt

SEQ ID NO: 34441 - DNA, 25 bp, Saccharomyces pastorianus
gggcggcaccttgagggaccaaatt

SEQ ID NO: 34442 - DNA, 25 bp, Saccharomyces pastorianus
tctactatccatcccttcagaaaat

SEQ ID NO: 34443 - DNA, 25 bp, Saccharomyces pastorianus
ggaaacttgctatacgataccgtta

SEQ ID NO: 34444 - DNA, 25 bp, Saccharomyces pastorianus
gattgaatcaagagtaccggttaag

SEQ ID NO: 34445 - DNA, 25 bp, Saccharomyces pastorianus
aactgttattgattctgaggagacc

SEQ ID NO: 34446 - DNA, 25 bp, Saccharomyces pastorianus
aattctctgatgaactatctgattc

SEQ ID NO: 34447 - DNA, 25 bp, Saccharomyces pastorianus
ggaaaacttctgtcgtagagcctaa

SEQ ID NO: 34448 - DNA, 25 bp, Saccharomyces pastorianus
agaggaggaatcttcctctgacgaa

SEQ ID NO: 34449 - DNA, 25 bp, Saccharomyces pastorianus
gagcctaaaaatgccaacaaggtta

SEQ ID NO: 34450 - DNA, 25 bp, Saccharomyces pastorianus
cgagcaaagcggtagttctgatgat

SEQ ID NO: 34451 - DNA, 25 bp, Saccharomyces pastorianus
gagacctgaaggaaacttgctatac

SEQ ID NO: 34452 - DNA, 25 bp, Saccharomyces pastorianus
aattaggcaccaagtattctgttat

SEQ ID NO: 34453 - DNA, 25 bp, Saccharomyces pastorianus
gacagagtcgccttagaattgtata

SEQ ID NO: 34454 - DNA, 25 bp, Saccharomyces pastorianus
gtacgatgtggctggtgctatcaaa

SEQ ID NO: 34455 - DNA, 25 bp, Saccharomyces pastorianus
gcttgcttctgctttgaatttatca

SEQ ID NO: 34456 - DNA, 25 bp, Saccharomyces pastorianus
ggaagatatctcgtccattcattgg

SEQ ID NO: 34457 - DNA, 25 bp, Saccharomyces pastorianus
gaggaaggtgcattcgtacctgaaa

SEQ ID NO: 34458 - DNA, 25 bp, Saccharomyces pastorianus
gatgctgctagaattcctgctgaac

SEQ ID NO: 34459 - DNA, 25 bp, Saccharomyces pastorianus
tgaagaccagcatcctctagaaagt

SEQ ID NO: 34460 - DNA, 25 bp, Saccharomyces pastorianus
gtctggctcttcgaagatcaccaag

SEQ ID NO: 34461 - DNA, 25 bp, Saccharomyces pastorianus
caagtggtactttagttggcgacaa

SEQ ID NO: 34462 - DNA, 25 bp, Saccharomyces pastorianus
atgacactttctctaagcttgcttc

SEQ ID NO: 34463 - DNA, 25 bp, Saccharomyces pastorianus
ggcgttgtacacgatatctgggcaa

SEQ ID NO: 34464 - DNA, 25 bp, Saccharomyces pastorianus
gatttcgactactctgtaacacctg

SEQ ID NO: 34465 - DNA, 25 bp, Saccharomyces pastorianus
attcggtcaagctgattttatcaac

SEQ ID NO: 34466 - DNA, 25 bp, Saccharomyces pastorianus
gaatatttgtggctattactctaca

SEQ ID NO: 34467 - DNA, 25 bp, Saccharomyces pastorianus
ggacgaggaaagcactacaatccgt

SEQ ID NO: 34468 - DNA, 25 bp, Saccharomyces pastorianus
agagaaaacgctcccattattcaaa

SEQ ID NO: 34469 - DNA, 25 bp, Saccharomyces pastorianus
gacaccttgcgctgtagaagaattt

SEQ ID NO: 34470 - DNA, 25 bp, Saccharomyces pastorianus
acaggcattcagactgggtgtctac

SEQ ID NO: 34471 - DNA, 25 bp, Saccharomyces pastorianus
ggttacagcatctcatacaggcaag

SEQ ID NO: 34472 - DNA, 25 bp, Saccharomyces pastorianus
agacgatgacatcgcggccaatatg

SEQ ID NO: 34473 - DNA, 25 bp, Saccharomyces pastorianus
caacgtgtacactgaaattcgcaag

SEQ ID NO: 34474 - DNA, 25 bp, Saccharomyces pastorianus
tacatatgaacagacaccttgcgct

SEQ ID NO: 34475 - DNA, 25 bp, Saccharomyces pastorianus
aacgatcttcgggaacttcaagaga

SEQ ID NO: 34476 - DNA, 25 bp, Saccharomyces pastorianus
ggatgaccctggacgacgctgcgaa

SEQ ID NO: 34477 - DNA, 25 bp, Saccharomyces pastorianus
aagacatttggttgtggctccgcca

SEQ ID NO: 34478 - DNA, 25 bp, Saccharomyces pastorianus
gtcctcttcttacatgactgagctc

SEQ ID NO: 34479 - DNA, 25 bp, Saccharomyces pastorianus
cgtgatggctgcgagacccgtgaac

SEQ ID NO: 34480 - DNA, 25 bp, Saccharomyces pastorianus
aattgcccaatgtcggcacaggctt

SEQ ID NO: 34481 - DNA, 25 bp, Saccharomyces pastorianus
ccgggttgttaagggcgtccagcat

SEQ ID NO: 34482 - DNA, 25 bp, Saccharomyces pastorianus
aagtgaacgactccacgggtgttat

SEQ ID NO: 34483 - DNA, 25 bp, Saccharomyces pastorianus
ctgagctcgttcaagggatgaccct

SEQ ID NO: 34484 - DNA, 25 bp, Saccharomyces pastorianus
taaccagactagcaaggcctgccgt

SEQ ID NO: 34485 - DNA, 25 bp, Saccharomyces pastorianus
aagactgtaccatcccaaggtcatt

SEQ ID NO: 34486 - DNA, 25 bp, Saccharomyces pastorianus
gttgcactgctccatgttggcggaa

SEQ ID NO: 34487 - DNA, 25 bp, Saccharomyces pastorianus
tttgatctgcagtctcatcacgtcg

SEQ ID NO: 34488 - DNA, 25 bp, Saccharomyces pastorianus
ataacacccgtggagtcgttcactt

SEQ ID NO: 34489 - DNA, 25 bp, Saccharomyces pastorianus
agtcgttcactttgatctgcagtct

SEQ ID NO: 34490 - DNA, 25 bp, Saccharomyces pastorianus
tgtgccgacattgggcaatttcttg

SEQ ID NO: 34491 - DNA, 25 bp, Saccharomyces pastorianus
tcttgaacttgacgtcctcaataac

SEQ ID NO: 34492 - DNA, 25 bp, Saccharomyces pastorianus
gcggagccacaaccaaatgtcttga

SEQ ID NO: 34493 - DNA, 25 bp, Saccharomyces pastorianus
acccactaagcctgtgccgacattg

SEQ ID NO: 34494 - DNA, 25 bp, Saccharomyces pastorianus
tgacgtcctcaataacacccgtgga

SEQ ID NO: 34495 - DNA, 25 bp, Saccharomyces pastorianus
gccacaaccaaatgtcttgaacttg

SEQ ID NO: 34496 - DNA, 25 bp, Saccharomyces pastorianus
taagcctgtgccgacattgggcaat

SEQ ID NO: 34497 - DNA, 25 bp, Saccharomyces pastorianus
gttcactttgatctgcagtctcatc

SEQ ID NO: 34498 - DNA, 25 bp, Saccharomyces pastorianus
ttaacagccgcagatccatctacag

SEQ ID NO: 34499 - DNA, 25 bp, Saccharomyces pastorianus
gagtatgcccgcttgtctgtgcaga

SEQ ID NO: 34500 - DNA, 25 bp, Saccharomyces pastorianus
ggatccgtaaacgaccatgctgttt

SEQ ID NO: 34501 - DNA, 25 bp, Saccharomyces pastorianus
ggaccattgcgcgttcgttaaagga

SEQ ID NO: 34502 - DNA, 25 bp, Saccharomyces pastorianus
ggccgtcctgacaagttgtagtcta

SEQ ID NO: 34503 - DNA, 25 bp, Saccharomyces pastorianus
atcagaccagcgttcaggaccattg

SEQ ID NO: 34504 - DNA, 25 bp, Saccharomyces pastorianus
aaagagtttgcctccttggtcgatt

SEQ ID NO: 34505 - DNA, 25 bp, Saccharomyces pastorianus
tgctgtttcagcttcaccatcagaa

SEQ ID NO: 34506 - DNA, 25 bp, Saccharomyces pastorianus
ttgtacggtggacgatctacgcgat

SEQ ID NO: 34507 - DNA, 25 bp, Saccharomyces pastorianus
aagcaacggattctgaaacccctgt

SEQ ID NO: 34508 - DNA, 25 bp, Saccharomyces pastorianus
atatgggtccattgcgttcgataag

SEQ ID NO: 34509 - DNA, 25 bp, Saccharomyces pastorianus
tagaatctttggtgctctaaagggt

SEQ ID NO: 34510 - DNA, 25 bp, Saccharomyces pastorianus
caaaccaagttgtccagagaagaaa

SEQ ID NO: 34511 - DNA, 25 bp, Saccharomyces pastorianus
ggaacaatacgctgccgaatctaag

SEQ ID NO: 34512 - DNA, 25 bp, Saccharomyces pastorianus
agaagaaagagttgctcgtgttgct

SEQ ID NO: 34513 - DNA, 25 bp, Saccharomyces pastorianus
ctcatggtttgactaactgggctgc

SEQ ID NO: 34514 - DNA, 25 bp, Saccharomyces pastorianus
ggctgacgacattgatgccgactct

SEQ ID NO: 34515 - DNA, 25 bp, Saccharomyces pastorianus
atacgctgccgaatctaagaagtac

SEQ ID NO: 34516 - DNA, 25 bp, Saccharomyces pastorianus
attcaccaaggaacaatacgctgcc

SEQ ID NO: 34517 - DNA, 25 bp, Saccharomyces pastorianus
caagggttacttggctgacgacatt

SEQ ID NO: 34518 - DNA, 25 bp, Saccharomyces pastorianus
aaagaaccaccaccggtgctagaat

SEQ ID NO: 34519 - DNA, 25 bp, Saccharomyces pastorianus
ccggtgctagaatctttggtgctct

SEQ ID NO: 34520 - DNA, 25 bp, Saccharomyces pastorianus
gtcatctactactattggtcctttt

SEQ ID NO: 34521 - DNA, 25 bp, Saccharomyces pastorianus
tacgataacgggagctccttcttga

SEQ ID NO: 34522 - DNA, 25 bp, Saccharomyces pastorianus
gggtggtgactcagttgtgtacttt

SEQ ID NO: 34523 - DNA, 25 bp, Saccharomyces pastorianus
gcttctattactccgcattcgaatg

SEQ ID NO: 34524 - DNA, 25 bp, Saccharomyces pastorianus
aaccacggtggagtcatctactact

SEQ ID NO: 34525 - DNA, 25 bp, Saccharomyces pastorianus
tggtccttttaaaacgtctcactct

SEQ ID NO: 34526 - DNA, 25 bp, Saccharomyces pastorianus
aacaggctttggaacagttggcaac

SEQ ID NO: 34527 - DNA, 25 bp, Saccharomyces pastorianus
tactgatttgcctgaaacccttgag

SEQ ID NO: 34528 - DNA, 25 bp, Saccharomyces pastorianus
tgaaggcgaaatccgacatgctatt

SEQ ID NO: 34529 - DNA, 25 bp, Saccharomyces pastorianus
atattacgaactcaaccacggtgga

SEQ ID NO: 34530 - DNA, 25 bp, Saccharomyces pastorianus
gtactttgatgaggacccggttgtg

SEQ ID NO: 34531 - DNA, 25 bp, Saccharomyces pastorianus
actcaatgacggcaagggctccagc

SEQ ID NO: 34532 - DNA, 25 bp, Saccharomyces pastorianus
agagcatgcctcaactcaatgacgg

SEQ ID NO: 34533 - DNA, 25 bp, Saccharomyces pastorianus
ttccccttcttcattgagctacaaa

SEQ ID NO: 34534 - DNA, 25 bp, Saccharomyces pastorianus
tccagccgtatcgtcctgaagaagt

SEQ ID NO: 34535 - DNA, 25 bp, Saccharomyces pastorianus
taaagaagaagtcgtcgcctaccgc

SEQ ID NO: 34536 - DNA, 25 bp, Saccharomyces pastorianus
gaaaccagtccaaagcccaaacaat

SEQ ID NO: 34537 - DNA, 25 bp, Saccharomyces pastorianus
gttgggtccacgagcaattttgact

SEQ ID NO: 34538 - DNA, 25 bp, Saccharomyces pastorianus
gagaactacccgatcgttgggtcca

SEQ ID NO: 34539 - DNA, 25 bp, Saccharomyces pastorianus
ggccccgccggagctttgaaattgg

SEQ ID NO: 34540 - DNA, 25 bp, Saccharomyces pastorianus
gaaaccggtgactttgagcagccca

SEQ ID NO: 34541 - DNA, 25 bp, Saccharomyces pastorianus
tgactacctcttcaatagcgctatc

SEQ ID NO: 34542 - DNA, 25 bp, Saccharomyces pastorianus
tcgtcggaaccactgttaacactca

SEQ ID NO: 34543 - DNA, 25 bp, Saccharomyces pastorianus
aatctgcattaggtgtcgtcggaac

SEQ ID NO: 34544 - DNA, 25 bp, Saccharomyces pastorianus
gttaacactcagttatccgatgaag

SEQ ID NO: 34545 - DNA, 25 bp, Saccharomyces pastorianus
aatagctttgacctgtatccatttg

SEQ ID NO: 34546 - DNA, 25 bp, Saccharomyces pastorianus
gtgaacaatactaccgcgactttag

SEQ ID NO: 34547 - DNA, 25 bp, Saccharomyces pastorianus
taacctcgaaggtgtaccaaccaca

SEQ ID NO: 34548 - DNA, 25 bp, Saccharomyces pastorianus
gggtaattttacacaccacgaatat

SEQ ID NO: 34549 - DNA, 25 bp, Saccharomyces pastorianus
gtatccatttgttaacggcgtttat

SEQ ID NO: 34550 - DNA, 25 bp, Saccharomyces pastorianus
gcgactttagcttccaacaatgatg

SEQ ID NO: 34551 - DNA, 25 bp, Saccharomyces pastorianus
gaatcaattgtcatccagaggtaaa

SEQ ID NO: 34552 - DNA, 25 bp, Saccharomyces pastorianus
tagcttcacaagcatgtttgacaat

SEQ ID NO: 34553 - DNA, 25 bp, Saccharomyces pastorianus
tcctccatcgttctccagttatgga

SEQ ID NO: 34554 - DNA, 25 bp, Saccharomyces pastorianus
atctggagcgtattgtacatgatca

SEQ ID NO: 34555 - DNA, 25 bp, Saccharomyces pastorianus
gaagaagaaccagctcacccgtgag

SEQ ID NO: 34556 - DNA, 25 bp, Saccharomyces pastorianus
gtagactgtctcctgtgaataaccc

SEQ ID NO: 34557 - DNA, 25 bp, Saccharomyces pastorianus
agaatgagcccacctttacgtagac

SEQ ID NO: 34558 - DNA, 25 bp, Saccharomyces pastorianus
gagttaatcgatcttcaccaatcca

SEQ ID NO: 34559 - DNA, 25 bp, Saccharomyces pastorianus
atggagcgccttcaaacaacggttc

SEQ ID NO: 34560 - DNA, 25 bp, Saccharomyces pastorianus
aatccgttatgttgaattctgcttc

SEQ ID NO: 34561 - DNA, 25 bp, Saccharomyces pastorianus
gaggagcgagcggttcacagcacaa

SEQ ID NO: 34562 - DNA, 25 bp, Saccharomyces pastorianus
gaacattctaactcattttccgggt

SEQ ID NO: 34563 - DNA, 25 bp, Saccharomyces pastorianus
tgatcaaggctcagtcatcgatgac

SEQ ID NO: 34564 - DNA, 25 bp, Saccharomyces pastorianus
ggctctttgtactccgattttgaaa

SEQ ID NO: 34565 - DNA, 25 bp, Saccharomyces pastorianus
ttctccgttacaaattgccgttttg

SEQ ID NO: 34566 - DNA, 25 bp, Saccharomyces pastorianus
aaactagagctagacgccaactgta

SEQ ID NO: 34567 - DNA, 25 bp, Saccharomyces pastorianus
aagagccattacaaatcctacctcc

SEQ ID NO: 34568 - DNA, 25 bp, Saccharomyces pastorianus
gcaacaatggtaagcctacaggaga

SEQ ID NO: 34569 - DNA, 25 bp, Saccharomyces pastorianus
tagacgccaactgtaaagagccatt

SEQ ID NO: 34570 - DNA, 25 bp, Saccharomyces pastorianus
acctccaacggtagtagatcaaatc

SEQ ID NO: 34571 - DNA, 25 bp, Saccharomyces pastorianus
gacatacgatggctctttgtactcc

SEQ ID NO: 34572 - DNA, 25 bp, Saccharomyces pastorianus
tagaaacacatgctcatcctcaaat

SEQ ID NO: 34573 - DNA, 25 bp, Saccharomyces pastorianus
ttagaagagcactgaccaacggtat

SEQ ID NO: 34574 - DNA, 25 bp, Saccharomyces pastorianus
accaacggtatcactgcggaacaaa

SEQ ID NO: 34575 - DNA, 25 bp, Saccharomyces pastorianus
taacgtggccaatatattagtcgca

SEQ ID NO: 34576 - DNA, 25 bp, Saccharomyces pastorianus
ccggtgttgctacttcattctttaa

SEQ ID NO: 34577 - DNA, 25 bp, Saccharomyces pastorianus
agttgaacgtgagcgcgcattatct

SEQ ID NO: 34578 - DNA, 25 bp, Saccharomyces pastorianus
tattcacggtgatcgtacacaagtt

SEQ ID NO: 34579 - DNA, 25 bp, Saccharomyces pastorianus
tttaacgttgatttttgtcgagaca

SEQ ID NO: 34580 - DNA, 25 bp, Saccharomyces pastorianus
cgcattatctgccttcaaatctaac

SEQ ID NO: 34581 - DNA, 25 bp, Saccharomyces pastorianus
agatattccgaatgtcacccacgtc

SEQ ID NO: 34582 - DNA, 25 bp, Saccharomyces pastorianus
tatgacttgccttctgatattgatg

SEQ ID NO: 34583 - DNA, 25 bp, Saccharomyces pastorianus
gaggcggcggaggtttcttcaataa

SEQ ID NO: 34584 - DNA, 25 bp, Saccharomyces pastorianus
attagtcgcaactgccgtagcggca

SEQ ID NO: 34585 - DNA, 25 bp, Saccharomyces pastorianus
ttcagagccacagctattcacggtg

SEQ ID NO: 34586 - DNA, 25 bp, Saccharomyces pastorianus
taactccgagattataggtacaggc

SEQ ID NO: 34587 - DNA, 25 bp, Saccharomyces pastorianus
tcgcccgcagccatggaaaagcgtt

SEQ ID NO: 34588 - DNA, 25 bp, Saccharomyces pastorianus
ggttctgtttctatgcatgctagac

SEQ ID NO: 34589 - DNA, 25 bp, Saccharomyces pastorianus
tagactactagagccacagaatgac

SEQ ID NO: 34590 - DNA, 25 bp, Saccharomyces pastorianus
gaactgtagtacctggcagagtctt

SEQ ID NO: 34591 - DNA, 25 bp, Saccharomyces pastorianus
aattccttcaattcaatgggcgact

SEQ ID NO: 34592 - DNA, 25 bp, Saccharomyces pastorianus
gaagactttcttgttcgagattttg

SEQ ID NO: 34593 - DNA, 25 bp, Saccharomyces pastorianus
ccattggtgggttcgttgctgatgt

SEQ ID NO: 34594 - DNA, 25 bp, Saccharomyces pastorianus
gtacaggcggtttgtcatacagttt

SEQ ID NO: 34595 - DNA, 25 bp, Saccharomyces pastorianus
tcgccaaatggcgtcattcaaagaa

SEQ ID NO: 34596 - DNA, 25 bp, Saccharomyces pastorianus
gatgtagtctttttccaatctccac

SEQ ID NO: 34597 - DNA, 25 bp, Saccharomyces pastorianus
taatgctatcggtgccggtactaaa

SEQ ID NO: 34598 - DNA, 25 bp, Saccharomyces pastorianus
attagatgatctttctgaagtcgag

SEQ ID NO: 34599 - DNA, 25 bp, Saccharomyces pastorianus
aagggtctattacatcgcgcatttt

SEQ ID NO: 34600 - DNA, 25 bp, Saccharomyces pastorianus
ttgggtatcccagaagacgaaacta

SEQ ID NO: 34601 - DNA, 25 bp, Saccharomyces pastorianus
gttcaatgacccaagttccaaattt

SEQ ID NO: 34602 - DNA, 25 bp, Saccharomyces pastorianus
aaatcacctttcctgatctttggac

SEQ ID NO: 34603 - DNA, 25 bp, Saccharomyces pastorianus
aagagccactgagaaaatcaccttt

SEQ ID NO: 34604 - DNA, 25 bp, Saccharomyces pastorianus
gcgcattttctgttttcattttcaa

SEQ ID NO: 34605 - DNA, 25 bp, Saccharomyces pastorianus
gccggtactaaaaaggtgtgccatt

SEQ ID NO: 34606 - DNA, 25 bp, Saccharomyces pastorianus
gaaatccatgttcaatgacccaagt

SEQ ID NO: 34607 - DNA, 25 bp, Saccharomyces pastorianus
aaaggtgcaatcactgcagcagtaa

SEQ ID NO: 34608 - DNA, 25 bp, Saccharomyces pastorianus
agaagcagcgcttctccagagaaag

SEQ ID NO: 34609 - DNA, 25 bp, Saccharomyces pastorianus
gagctgctgaaactaaagttccgtt

SEQ ID NO: 34610 - DNA, 25 bp, Saccharomyces pastorianus
tcatcgcatgagacaaacccaaaat

SEQ ID NO: 34611 - DNA, 25 bp, Saccharomyces pastorianus
ggtcaaagttggtcaaccttcatca

SEQ ID NO: 34612 - DNA, 25 bp, Saccharomyces pastorianus
gaaaagctcccatcaacgtcgttta

SEQ ID NO: 34613 - DNA, 25 bp, Saccharomyces pastorianus
gtagagccagtaatgacgtcaacaa

SEQ ID NO: 34614 - DNA, 25 bp, Saccharomyces pastorianus
tctaataccaaacctcatcgcatga

SEQ ID NO: 34615 - DNA, 25 bp, Saccharomyces pastorianus
aaacgttcaatcgtacagtggaaga

SEQ ID NO: 34616 - DNA, 25 bp, Saccharomyces pastorianus
tgacgtcaacaattgcccaaagaat

SEQ ID NO: 34617 - DNA, 25 bp, Saccharomyces pastorianus
aaacagcttcacctgattctttacc

SEQ ID NO: 34618 - DNA, 25 bp, Saccharomyces pastorianus
gattctttacccactaacattgtag

SEQ ID NO: 34619 - DNA, 25 bp, Saccharomyces pastorianus
gctccaaccttttattactgatttt

SEQ ID NO: 34620 - DNA, 25 bp, Saccharomyces pastorianus
tatgcattgtattctctccaacctt

SEQ ID NO: 34621 - DNA, 25 bp, Saccharomyces pastorianus
tattccaattactatgctccaacct

SEQ ID NO: 34622 - DNA, 25 bp, Saccharomyces pastorianus
aatttgcctcatttattgtttggtg

SEQ ID NO: 34623 - DNA, 25 bp, Saccharomyces pastorianus
gaacgtctccaagtttatacatcag

SEQ ID NO: 34624 - DNA, 25 bp, Saccharomyces pastorianus
gccaagtgttgtttatcgttgctta

SEQ ID NO: 34625 - DNA, 25 bp, Saccharomyces pastorianus
tgatgtatgcccttttcgaactatt

SEQ ID NO: 34626 - DNA, 25 bp, Saccharomyces pastorianus
gtcaggtgtagtaccacacgctaat

SEQ ID NO: 34627 - DNA, 25 bp, Saccharomyces pastorianus
catgatgtcgatttatgccgttaca

SEQ ID NO: 34628 - DNA, 25 bp, Saccharomyces pastorianus
gtggactactgaaactttacctgag

SEQ ID NO: 34629 - DNA, 25 bp, Saccharomyces pastorianus
taagcggatcgagcactgtcatcaa

SEQ ID NO: 34630 - DNA, 25 bp, Saccharomyces pastorianus
atgtaccactctgatctcgatgatc

SEQ ID NO: 34631 - DNA, 25 bp, Saccharomyces pastorianus
agatgggatgtcacggcactaccac

SEQ ID NO: 34632 - DNA, 25 bp, Saccharomyces pastorianus
ctaggctttggctctattggtcaaa

SEQ ID NO: 34633 - DNA, 25 bp, Saccharomyces pastorianus
agttgtgggctggacgtcttcaaaa

SEQ ID NO: 34634 - DNA, 25 bp, Saccharomyces pastorianus
agacaactttgatcctaggctttgg

SEQ ID NO: 34635 - DNA, 25 bp, Saccharomyces pastorianus
gcacggtagccgacatgatcttgaa

SEQ ID NO: 34636 - DNA, 25 bp, Saccharomyces pastorianus
tgattgttttgtccctaccaggaac

SEQ ID NO: 34637 - DNA, 25 bp, Saccharomyces pastorianus
gatctacttctttacgatgccatgt

SEQ ID NO: 34638 - DNA, 25 bp, Saccharomyces pastorianus
ggacccgtccagaaagatctacttc

SEQ ID NO: 34639 - DNA, 25 bp, Saccharomyces pastorianus
aaccggcgtcaagcaggaattacta

SEQ ID NO: 34640 - DNA, 25 bp, Saccharomyces pastorianus
gatgaagattccctcttagacgctc

SEQ ID NO: 34641 - DNA, 25 bp, Saccharomyces pastorianus
aattatgcacaaggcccgtgacgat

SEQ ID NO: 34642 - DNA, 25 bp, Saccharomyces pastorianus
gggacgtacgcagttttgtctctag

SEQ ID NO: 34643 - DNA, 25 bp, Saccharomyces pastorianus
tgatgaactagacctcctgtacaag

SEQ ID NO: 34644 - DNA, 25 bp, Saccharomyces pastorianus
aagactctctttcgactgtatggcc

SEQ ID NO: 34645 - DNA, 25 bp, Saccharomyces pastorianus
atgcctcccaatcgccaattagaaa

SEQ ID NO: 34646 - DNA, 25 bp, Saccharomyces pastorianus
gtatggccaatacgtctgacattct

SEQ ID NO: 34647 - DNA, 25 bp, Saccharomyces pastorianus
ttgtctctagggtccggcttaactg

SEQ ID NO: 34648 - DNA, 25 bp, Saccharomyces pastorianus
aagagtcgctctcatggcagtacga

SEQ ID NO: 34649 - DNA, 25 bp, Saccharomyces pastorianus
agtacgatatcctgctcagcttgaa

SEQ ID NO: 34650 - DNA, 25 bp, Saccharomyces pastorianus
gaaatgcaacttccaagtcgaccaa

SEQ ID NO: 34651 - DNA, 25 bp, Saccharomyces pastorianus
aagcaactgttgagcgacctaaacg

SEQ ID NO: 34652 - DNA, 25 bp, Saccharomyces pastorianus
caggctgtcccgagtcattgaaatg

SEQ ID NO: 34653 - DNA, 25 bp, Saccharomyces pastorianus
atggatcgacgcacacgcggatatt

SEQ ID NO: 34654 - DNA, 25 bp, Saccharomyces pastorianus
acagactcgggtaacttgcacggtt

SEQ ID NO: 34655 - DNA, 25 bp, Saccharomyces pastorianus
tggccatacacgatatccatgtctc

SEQ ID NO: 34656 - DNA, 25 bp, Saccharomyces pastorianus
acttggttgctctagacgttgtcga

SEQ ID NO: 34657 - DNA, 25 bp, Saccharomyces pastorianus
ggttgtcccgtttcattcttaatgg

SEQ ID NO: 34658 - DNA, 25 bp, Saccharomyces pastorianus
ggtactgtatcagccgtcttggaca

SEQ ID NO: 34659 - DNA, 25 bp, Saccharomyces pastorianus
tgaagccggcgtgctatggatcgac

SEQ ID NO: 34660 - DNA, 25 bp, Saccharomyces pastorianus
cgaaggccccataatgtgctcttat

SEQ ID NO: 34661 - DNA, 25 bp, Saccharomyces pastorianus
tgaaccaagatatcccaggctgtcc

SEQ ID NO: 34662 - DNA, 25 bp, Saccharomyces pastorianus
aacgctgtcgttgagatggccatga

SEQ ID NO: 34663 - DNA, 25 bp, Saccharomyces pastorianus
gtatgcgttacctacggtgttgaca

SEQ ID NO: 34664 - DNA, 25 bp, Saccharomyces pastorianus
caatattgttcttaaccgagggcgg

SEQ ID NO: 34665 - DNA, 25 bp, Saccharomyces pastorianus
tgaaccactgggtagacaccgtgct

SEQ ID NO: 34666 - DNA, 25 bp, Saccharomyces pastorianus
aacgtcggcttcaacatcgaatgca

SEQ ID NO: 34667 - DNA, 25 bp, Saccharomyces pastorianus
atgcaaattccccatgcttgacgaa

SEQ ID NO: 34668 - DNA, 25 bp, Saccharomyces pastorianus
gatagcgtcatcttttgttaccttg

SEQ ID NO: 34669 - DNA, 25 bp, Saccharomyces pastorianus
caatgatcccgagaacgcaagtatt

SEQ ID NO: 34670 - DNA, 25 bp, Saccharomyces pastorianus
ccagatatctgcgtcatgttgtcat

SEQ ID NO: 34671 - DNA, 25 bp, Saccharomyces pastorianus
gacataatcttttcgtcattccacc

SEQ ID NO: 34672 - DNA, 25 bp, Saccharomyces pastorianus
ggatttgagagcgtcatcgttgcaa

SEQ ID NO: 34673 - DNA, 25 bp, Saccharomyces pastorianus
ggttatcgttgacagcgtgctagca

SEQ ID NO: 34674 - DNA, 25 bp, Saccharomyces pastorianus
gctatcagagatatgttccccaaga

SEQ ID NO: 34675 - DNA, 25 bp, Saccharomyces pastorianus
gattggaatccacctttaggcttgt

SEQ ID NO: 34676 - DNA, 25 bp, Saccharomyces pastorianus
gacaaccaacaaacagcccagctag

SEQ ID NO: 34677 - DNA, 25 bp, Saccharomyces pastorianus
cactgtctttggaggtcgtctgaaa

SEQ ID NO: 34678 - DNA, 25 bp, Saccharomyces pastorianus
gaagaaaggatgtccactgtctttg

SEQ ID NO: 34679 - DNA, 25 bp, Saccharomyces pastorianus
gaaaatagctggtgtccctgtacct

SEQ ID NO: 34680 - DNA, 25 bp, Saccharomyces pastorianus
gaaaggcgagccaccaagatctaca

SEQ ID NO: 34681 - DNA, 25 bp, Saccharomyces pastorianus
ggatattcctgtttacgttaaagca

SEQ ID NO: 34682 - DNA, 25 bp, Saccharomyces pastorianus
gatcaacctcctgatttatcggcta

SEQ ID NO: 34683 - DNA, 25 bp, Saccharomyces pastorianus
gggcctctgcctaagagtgtcttag

SEQ ID NO: 34684 - DNA, 25 bp, Saccharomyces pastorianus
cgcaggaacctgataactgttgcat

SEQ ID NO: 34685 - DNA, 25 bp, Saccharomyces pastorianus
tttggtcacctattggatgcttttg

SEQ ID NO: 34686 - DNA, 25 bp, Saccharomyces pastorianus
ttgttgatttcccattgttttcgcc

SEQ ID NO: 34687 - DNA, 25 bp, Saccharomyces pastorianus
ggataagctatgctctacgcaccat

SEQ ID NO: 34688 - DNA, 25 bp, Saccharomyces pastorianus
gagaatcccactcctttgggaaggt

SEQ ID NO: 34689 - DNA, 25 bp, Saccharomyces pastorianus
gatatgggaacaccacctcatgctg

SEQ ID NO: 34690 - DNA, 25 bp, Saccharomyces pastorianus
aaagtttgcttatccggaatacgag

SEQ ID NO: 34691 - DNA, 25 bp, Saccharomyces pastorianus
gtgtgatacccgaaagcgtcttaaa

SEQ ID NO: 34692 - DNA, 25 bp, Saccharomyces pastorianus
gctggtttcgcaattggctttgata

SEQ ID NO: 34693 - DNA, 25 bp, Saccharomyces pastorianus
agaattgggcggtggctctacaaga

SEQ ID NO: 34694 - DNA, 25 bp, Saccharomyces pastorianus
gaatgtgcgccatgatctgtggtac

SEQ ID NO: 34695 - DNA, 25 bp, Saccharomyces pastorianus
gttttcgccggttaccatcgaagag

SEQ ID NO: 34696 - DNA, 25 bp, Saccharomyces pastorianus
gtgctccttcttattgacccataat

SEQ ID NO: 34697 - DNA, 25 bp, Saccharomyces pastorianus
gacccataatggcactcctatactt

SEQ ID NO: 34698 - DNA, 25 bp, Saccharomyces pastorianus
gcattggtctggaagatcactccta

SEQ ID NO: 34699 - DNA, 25 bp, Saccharomyces pastorianus
atataccacatatcagctacgccag

SEQ ID NO: 34700 - DNA, 25 bp, Saccharomyces pastorianus
agctacgccagctatgcattggtct

SEQ ID NO: 34701 - DNA, 25 bp, Saccharomyces pastorianus
gattctcctttatgggtggtaccca

SEQ ID NO: 34702 - DNA, 25 bp, Saccharomyces pastorianus
aaataaatcgctgtggtgctccttc

SEQ ID NO: 34703 - DNA, 25 bp, Saccharomyces pastorianus
gcatcaaaggcctcgacacattaac

SEQ ID NO: 34704 - DNA, 25 bp, Saccharomyces pastorianus
gctcaaaacgtcctgggagtccatt

SEQ ID NO: 34705 - DNA, 25 bp, Saccharomyces pastorianus
gtctcccataatcatcctgatcata

SEQ ID NO: 34706 - DNA, 25 bp, Saccharomyces pastorianus
ctcctatacttttccatgctggtga

SEQ ID NO: 34707 - DNA, 25 bp, Saccharomyces pastorianus
tgataagaattgtcatcccctcctt

SEQ ID NO: 34708 - DNA, 25 bp, Saccharomyces pastorianus
gaaggttcttcaaatccagaccaac

SEQ ID NO: 34709 - DNA, 25 bp, Saccharomyces pastorianus
tagaacgtgtctacaagtcccaacc

SEQ ID NO: 34710 - DNA, 25 bp, Saccharomyces pastorianus
gttgtactatttgcctcgatatcca

SEQ ID NO: 34711 - DNA, 25 bp, Saccharomyces pastorianus
gattctgttattgacttggagccct

SEQ ID NO: 34712 - DNA, 25 bp, Saccharomyces pastorianus
ggtatacctgtggacgacgctgaag

SEQ ID NO: 34713 - DNA, 25 bp, Saccharomyces pastorianus
acagatatcattacgcctccattat

SEQ ID NO: 34714 - DNA, 25 bp, Saccharomyces pastorianus
ttgaaattgcccgtcttcacagatc

SEQ ID NO: 34715 - DNA, 25 bp, Saccharomyces pastorianus
gcctaaaatgtttgcgtcatccgaa

SEQ ID NO: 34716 - DNA, 25 bp, Saccharomyces pastorianus
tatctccaccatcctgggtcaaatg

SEQ ID NO: 34717 - DNA, 25 bp, Saccharomyces pastorianus
gattcagcatggtcttgtccacatt

SEQ ID NO: 34718 - DNA, 25 bp, Saccharomyces pastorianus
tttgccgttacctactaccacaaga

SEQ ID NO: 34719 - DNA, 25 bp, Saccharomyces pastorianus
gatgagctcctctgtatacttatta

SEQ ID NO: 34720 - DNA, 25 bp, Saccharomyces pastorianus
gagagctactacaacaccgcaaaat

SEQ ID NO: 34721 - DNA, 25 bp, Saccharomyces pastorianus
gatggcgttgatcctgaactaatac

SEQ ID NO: 34722 - DNA, 25 bp, Saccharomyces pastorianus
gaagtagaagccttggagtcccaac

SEQ ID NO: 34723 - DNA, 25 bp, Saccharomyces pastorianus
agaaattcgtcaggcctctttggat

SEQ ID NO: 34724 - DNA, 25 bp, Saccharomyces pastorianus
aaattatcatctaggtttgccgtta

SEQ ID NO: 34725 - DNA, 25 bp, Saccharomyces pastorianus
ttattacttcatctcacgtggtgga

SEQ ID NO: 34726 - DNA, 25 bp, Saccharomyces pastorianus
gaaaacagtccacgaaagcccaatg

SEQ ID NO: 34727 - DNA, 25 bp, Saccharomyces pastorianus
agaagttcccggatgcttactgctg

SEQ ID NO: 34728 - DNA, 25 bp, Saccharomyces pastorianus
aagactcccttaagccaacaacaga

SEQ ID NO: 34729 - DNA, 25 bp, Saccharomyces pastorianus
gcacaacagcaaccttcaaattggg

SEQ ID NO: 34730 - DNA, 25 bp, Saccharomyces pastorianus
gtaaatacatcgctggctcagccgg

SEQ ID NO: 34731 - DNA, 25 bp, Saccharomyces pastorianus
gcccagatggtgttgttagaacgct

SEQ ID NO: 34732 - DNA, 25 bp, Saccharomyces pastorianus
atgatgggtaccaccgtcggcgttt

SEQ ID NO: 34733 - DNA, 25 bp, Saccharomyces pastorianus
gtactgggattctatttggtggatt

SEQ ID NO: 34734 - DNA, 25 bp, Saccharomyces pastorianus
agcgcccaatcctaacttgaatcta

SEQ ID NO: 34735 - DNA, 25 bp, Saccharomyces pastorianus
acctatgccacaaagttatgcacaa

SEQ ID NO: 34736 - DNA, 25 bp, Saccharomyces pastorianus
tactcaaggtgcaggcccagatggt

SEQ ID NO: 34737 - DNA, 25 bp, Saccharomyces pastorianus
tttgccatcgctactcaaggtgcag

SEQ ID NO: 34738 - DNA, 25 bp, Saccharomyces pastorianus
cgtcggcgtttgtactgggattcta

SEQ ID NO: 34739 - DNA, 25 bp, Saccharomyces pastorianus
tgatggtgacttaagctcagcgccc

SEQ ID NO: 34740 - DNA, 25 bp, Saccharomyces pastorianus
gtgtattgtcgctatgccctgcaac

SEQ ID NO: 34741 - DNA, 25 bp, Saccharomyces pastorianus
ggttgcgcaataatgaatcgttact

SEQ ID NO: 34742 - DNA, 25 bp, Saccharomyces pastorianus
ctattggtgtgtattgtcgctatgc

SEQ ID NO: 34743 - DNA, 25 bp, Saccharomyces pastorianus
ttttgggccttacttactccgtgct

SEQ ID NO: 34744 - DNA, 25 bp, Saccharomyces pastorianus
tggctatgggcacttatatcctggt

SEQ ID NO: 34745 - DNA, 25 bp, Saccharomyces pastorianus
tatgccctgcaacgctctggctatg

SEQ ID NO: 34746 - DNA, 25 bp, Saccharomyces pastorianus
gtgcttctcaccagtttttctatat

SEQ ID NO: 34747 - DNA, 25 bp, Saccharomyces pastorianus
ttttctatattttattggttgcgca

SEQ ID NO: 34748 - DNA, 25 bp, Saccharomyces pastorianus
tgaatcgttactacactattggtgt

SEQ ID NO: 34749 - DNA, 25 bp, Saccharomyces pastorianus
tgggcacttatatcctggtgcgata

SEQ ID NO: 34750 - DNA, 25 bp, Saccharomyces pastorianus
aacgctctggctatgggcacttata

SEQ ID NO: 34751 - DNA, 25 bp, Saccharomyces pastorianus
gagatagaaacagacacgccaaaca

SEQ ID NO: 34752 - DNA, 25 bp, Saccharomyces pastorianus
ttgacagcttccaccgacaatggta

SEQ ID NO: 34753 - DNA, 25 bp, Saccharomyces pastorianus
ctggacggtgttgctgatggttcca

SEQ ID NO: 34754 - DNA, 25 bp, Saccharomyces pastorianus
gggttctacaactcggacgatgaag

SEQ ID NO: 34755 - DNA, 25 bp, Saccharomyces pastorianus
aatcctgtttccttatcgaagcatc

SEQ ID NO: 34756 - DNA, 25 bp, Saccharomyces pastorianus
tgccacgttccaaactaaccaaatc

SEQ ID NO: 34757 - DNA, 25 bp, Saccharomyces pastorianus
agaggttccgatgttgtctttggtg

SEQ ID NO: 34758 - DNA, 25 bp, Saccharomyces pastorianus
aacaaggccattatgccacgttcca

SEQ ID NO: 34759 - DNA, 25 bp, Saccharomyces pastorianus
gaacgtttacgatttcttggatcct

SEQ ID NO: 34760 - DNA, 25 bp, Saccharomyces pastorianus
ggatcctgaaatcgctgccaaattg

SEQ ID NO: 34761 - DNA, 25 bp, Saccharomyces pastorianus
cttatcgaagcatctgttcagtggt

SEQ ID NO: 34762 - DNA, 25 bp, Saccharomyces pastorianus
aaaggtggtcggtttgcatattgtt

SEQ ID NO: 34763 - DNA, 25 bp, Saccharomyces pastorianus
gtatcaagctgaattctcatgacca

SEQ ID NO: 34764 - DNA, 25 bp, Saccharomyces pastorianus
taagattgtctgtgctggaccagat

SEQ ID NO: 34765 - DNA, 25 bp, Saccharomyces pastorianus
taatcttctcccatccggaagcagg

SEQ ID NO: 34766 - DNA, 25 bp, Saccharomyces pastorianus
ttcactgctatgtactatgccatgt

SEQ ID NO: 34767 - DNA, 25 bp, Saccharomyces pastorianus
attctttaggtgatgttgtcggcaa

SEQ ID NO: 34768 - DNA, 25 bp, Saccharomyces pastorianus
attggacgtaaatcccatctgggta

SEQ ID NO: 34769 - DNA, 25 bp, Saccharomyces pastorianus
tatcgcagcaggcagaacgctatct

SEQ ID NO: 34770 - DNA, 25 bp, Saccharomyces pastorianus
gaaaacgtccctagcgtaatcttct

SEQ ID NO: 34771 - DNA, 25 bp, Saccharomyces pastorianus
gaattgacgccagttgctatcgcag

SEQ ID NO: 34772 - DNA, 25 bp, Saccharomyces pastorianus
aagctgacttcgacaattgcattgc

SEQ ID NO: 34773 - DNA, 25 bp, Saccharomyces pastorianus
gtaatcatcccaactcaaacacata

SEQ ID NO: 34774 - DNA, 25 bp, Saccharomyces pastorianus
gcccataaattctgtacccggtaat

SEQ ID NO: 34775 - DNA, 25 bp, Saccharomyces pastorianus
aacaatatcaacaactccctttcaa

SEQ ID NO: 34776 - DNA, 25 bp, Saccharomyces pastorianus
tttcaacaaaacacgtcctctttct

SEQ ID NO: 34777 - DNA, 25 bp, Saccharomyces pastorianus
gaggcccctgtaaatggacctgctg

SEQ ID NO: 34778 - DNA, 25 bp, Saccharomyces pastorianus
gaaataccgggctaactccatatat

SEQ ID NO: 34779 - DNA, 25 bp, Saccharomyces pastorianus
acacatatgatgttgctgcctcctc

SEQ ID NO: 34780 - DNA, 25 bp, Saccharomyces pastorianus
gtcctctttcttggctcaaagacaa

SEQ ID NO: 34781 - DNA, 25 bp, Saccharomyces pastorianus
gagcaattctccaaacgtttcatca

SEQ ID NO: 34782 - DNA, 25 bp, Saccharomyces pastorianus
tacgaatagcgctggttcattccct

SEQ ID NO: 34783 - DNA, 25 bp, Saccharomyces pastorianus
tgctgcgcctgatcattctagtgac

SEQ ID NO: 34784 - DNA, 25 bp, Saccharomyces pastorianus
gaaagggtttgccaatcggcacctc

SEQ ID NO: 34785 - DNA, 25 bp, Saccharomyces pastorianus
ttttggaactacatgcctggtggca

SEQ ID NO: 34786 - DNA, 25 bp, Saccharomyces pastorianus
attgactttcaaccacgtccatgac

SEQ ID NO: 34787 - DNA, 25 bp, Saccharomyces pastorianus
actcgaccgagtatatgggaccaat

SEQ ID NO: 34788 - DNA, 25 bp, Saccharomyces pastorianus
gaccgttttggtggtgattctttct

SEQ ID NO: 34789 - DNA, 25 bp, Saccharomyces pastorianus
acctgcgattttccaagttctttat

SEQ ID NO: 34790 - DNA, 25 bp, Saccharomyces pastorianus
gaagaacgtatttggccttgccact

SEQ ID NO: 34791 - DNA, 25 bp, Saccharomyces pastorianus
gacttggctgtacgttgtcgttcaa

SEQ ID NO: 34792 - DNA, 25 bp, Saccharomyces pastorianus
tatgggtatggtgccgtttgtcatt

SEQ ID NO: 34793 - DNA, 25 bp, Saccharomyces pastorianus
gaccggtacaggtgtctacatcttt

SEQ ID NO: 34794 - DNA, 25 bp, Saccharomyces pastorianus
cttgccactgggtgtctttttggaa

SEQ ID NO: 34795 - DNA, 25 bp, Saccharomyces pastorianus
cccttagtcacctctggtgttgata

SEQ ID NO: 34796 - DNA, 25 bp, Saccharomyces pastorianus
aagagatatcccaatgcccttagtc

SEQ ID NO: 34797 - DNA, 25 bp, Saccharomyces pastorianus
cagcgccaacgctttggtagatttg

SEQ ID NO: 34798 - DNA, 25 bp, Saccharomyces pastorianus
ggttccactacattcaagggatccg

SEQ ID NO: 34799 - DNA, 25 bp, Saccharomyces pastorianus
aagggatccgcgtaagttccagcat

SEQ ID NO: 34800 - DNA, 25 bp, Saccharomyces pastorianus
aagagactactacgcgaatggtggt

SEQ ID NO: 34801 - DNA, 25 bp, Saccharomyces pastorianus
gggtaccacctgtagagacgttcgt

SEQ ID NO: 34802 - DNA, 25 bp, Saccharomyces pastorianus
aatttacctcgcaaagaacttctat

SEQ ID NO: 34803 - DNA, 25 bp, Saccharomyces pastorianus
taaagttcagccagaccaagtagag

SEQ ID NO: 34804 - DNA, 25 bp, Saccharomyces pastorianus
gcgtaagttccagcatcaaggtttt

SEQ ID NO: 34805 - DNA, 25 bp, Saccharomyces pastorianus
ttgctagaattctggcattagtgcc

SEQ ID NO: 34806 - DNA, 25 bp, Saccharomyces pastorianus
ttcagggcacctgttgtaggagatc

SEQ ID NO: 34807 - DNA, 25 bp, Saccharomyces pastorianus
aatagcgcagcgtctcaatctcaac

SEQ ID NO: 34808 - DNA, 25 bp, Saccharomyces pastorianus
gaagcacgttttcgaaatctcaaag

SEQ ID NO: 34809 - DNA, 25 bp, Saccharomyces pastorianus
tatgcagcaattcctaacacgacag

SEQ ID NO: 34810 - DNA, 25 bp, Saccharomyces pastorianus
ggtgtttttgcgtctgatttgccaa

SEQ ID NO: 34811 - DNA, 25 bp, Saccharomyces pastorianus
aaacagcatgagacccttacgacaa

SEQ ID NO: 34812 - DNA, 25 bp, Saccharomyces pastorianus
acatctttttacaacaggccttctg

SEQ ID NO: 34813 - DNA, 25 bp, Saccharomyces pastorianus
aggagatcgtccattattgccccaa

SEQ ID NO: 34814 - DNA, 25 bp, Saccharomyces pastorianus
tgaatcttcaccatatgcagcaatt

SEQ ID NO: 34815 - DNA, 25 bp, Saccharomyces pastorianus
gttccagcaatgacttactccaagg

SEQ ID NO: 34816 - DNA, 25 bp, Saccharomyces pastorianus
ttattgccccaaaatagcgcagcgt

SEQ ID NO: 34817 - DNA, 25 bp, Saccharomyces pastorianus
ggctcacgaagcaaaatccgtcttg

SEQ ID NO: 34818 - DNA, 25 bp, Saccharomyces pastorianus
atccgtcttggattcatgggttaga

SEQ ID NO: 34819 - DNA, 25 bp, Saccharomyces pastorianus
gtttggttgcaaagtatctggcccc

SEQ ID NO: 34820 - DNA, 25 bp, Saccharomyces pastorianus
ggttttagggacttcggctgctgcc

SEQ ID NO: 34821 - DNA, 25 bp, Saccharomyces pastorianus
gtattcttttgctaactttcttggg

SEQ ID NO: 34822 - DNA, 25 bp, Saccharomyces pastorianus
atctggccccagcatacaaggattt

SEQ ID NO: 34823 - DNA, 25 bp, Saccharomyces pastorianus
gaattggatctgtctctgaattaca

SEQ ID NO: 34824 - DNA, 25 bp, Saccharomyces pastorianus
gacaaaggccaattctatcattaat

SEQ ID NO: 34825 - DNA, 25 bp, Saccharomyces pastorianus
atacgaatcttccttacgccaattg

SEQ ID NO: 34826 - DNA, 25 bp, Saccharomyces pastorianus
gtcattgctaaagtcgagtccgaac

SEQ ID NO: 34827 - DNA, 25 bp, Saccharomyces pastorianus
tgccgtcatttatgccatctccaat

SEQ ID NO: 34828 - DNA, 25 bp, Saccharomyces pastorianus
gccgttggcggcaatactgttcata

SEQ ID NO: 34829 - DNA, 25 bp, Saccharomyces pastorianus
caacggcaacggcagtggtaacatg

SEQ ID NO: 34830 - DNA, 25 bp, Saccharomyces pastorianus
agaccggatgtcactagatcaaatt

SEQ ID NO: 34831 - DNA, 25 bp, Saccharomyces pastorianus
aattagatcgtatacgccaccacac

SEQ ID NO: 34832 - DNA, 25 bp, Saccharomyces pastorianus
tgtaacccctactattcaaagaccg

SEQ ID NO: 34833 - DNA, 25 bp, Saccharomyces pastorianus
gcaatcttcggcgtctttagaacgt

SEQ ID NO: 34834 - DNA, 25 bp, Saccharomyces pastorianus
taacggcgtgatgcataaaaccaac

SEQ ID NO: 34835 - DNA, 25 bp, Saccharomyces pastorianus
agaaatttccagagacgtgtcaacg

SEQ ID NO: 34836 - DNA, 25 bp, Saccharomyces pastorianus
ggttcagaactgtctttgactcatc

SEQ ID NO: 34837 - DNA, 25 bp, Saccharomyces pastorianus
taagtagtaaagtcgcattgccatc

SEQ ID NO: 34838 - DNA, 25 bp, Saccharomyces pastorianus
aagttcgtcccagttgtccatagaa

SEQ ID NO: 34839 - DNA, 25 bp, Saccharomyces pastorianus
aagtacttgcccgatttgacccagc

SEQ ID NO: 34840 - DNA, 25 bp, Saccharomyces pastorianus
tcgctggttccgttcataaatcttt

SEQ ID NO: 34841 - DNA, 25 bp, Saccharomyces pastorianus
ggcttcgccgaagacattactgagg

SEQ ID NO: 34842 - DNA, 25 bp, Saccharomyces pastorianus
gagatcatacccacccaagaaatgt

SEQ ID NO: 34843 - DNA, 25 bp, Saccharomyces pastorianus
ccagcattctgatacttctaccaat

SEQ ID NO: 34844 - DNA, 25 bp, Saccharomyces pastorianus
ggagagatttcctgcctgagatcat

SEQ ID NO: 34845 - DNA, 25 bp, Saccharomyces pastorianus
catcatccatgctctaaatttcacc

SEQ ID NO: 34846 - DNA, 25 bp, Saccharomyces pastorianus
aacgtcagactgagcaacacgatga

SEQ ID NO: 34847 - DNA, 25 bp, Saccharomyces pastorianus
aacgggtggtcttttcagattgact

SEQ ID NO: 34848 - DNA, 25 bp, Saccharomyces pastorianus
aatctgcatagaggccaaggtttgg

SEQ ID NO: 34849 - DNA, 25 bp, Saccharomyces pastorianus
ttgaggctcatggaaaccctgtctc

SEQ ID NO: 34850 - DNA, 25 bp, Saccharomyces pastorianus
tactggttcgaaggcattctctcaa

SEQ ID NO: 34851 - DNA, 25 bp, Saccharomyces pastorianus
gaaatgtacaacagcaccagccacg

SEQ ID NO: 34852 - DNA, 25 bp, Saccharomyces pastorianus
atagacctgctgaacctggaaatgt

SEQ ID NO: 34853 - DNA, 25 bp, Saccharomyces pastorianus
gaaatagcgaacctgcattccataa

SEQ ID NO: 34854 - DNA, 25 bp, Saccharomyces pastorianus
aaacatcgtaaacctgctgcagtcg

SEQ ID NO: 34855 - DNA, 25 bp, Saccharomyces pastorianus
actacagcgaattccatgacggtta

SEQ ID NO: 34856 - DNA, 25 bp, Saccharomyces pastorianus
aaagagcagcaacccgaagccaagg

SEQ ID NO: 34857 - DNA, 25 bp, Saccharomyces pastorianus
ttccataaacctcatagacctgctg

SEQ ID NO: 34858 - DNA, 25 bp, Saccharomyces pastorianus
gaggctacctaacgacttgcaactt

SEQ ID NO: 34859 - DNA, 25 bp, Saccharomyces pastorianus
tctcaagcgcactcgaataacctga

SEQ ID NO: 34860 - DNA, 25 bp, Saccharomyces pastorianus
aacaacggtttgatgtggcctcaca

SEQ ID NO: 34861 - DNA, 25 bp, Saccharomyces pastorianus
aactcgcccgcctgaaacgaagtag

SEQ ID NO: 34862 - DNA, 25 bp, Saccharomyces pastorianus
agaggttgaccagcggcttggacat

SEQ ID NO: 34863 - DNA, 25 bp, Saccharomyces pastorianus
gtgcaccttgttctgtggtccaaga

SEQ ID NO: 34864 - DNA, 25 bp, Saccharomyces pastorianus
acgccgttgagagggccttcagtga

SEQ ID NO: 34865 - DNA, 25 bp, Saccharomyces pastorianus
gatggtcatcagacaagccgcagtc

SEQ ID NO: 34866 - DNA, 25 bp, Saccharomyces pastorianus
aggagcgcatcactgtcgacgagat

SEQ ID NO: 34867 - DNA, 25 bp, Saccharomyces pastorianus
gaaccagtacatgttgcagcaatta

SEQ ID NO: 34868 - DNA, 25 bp, Saccharomyces pastorianus
gagacgaccgagaagtaccacgaac

SEQ ID NO: 34869 - DNA, 25 bp, Saccharomyces pastorianus
gtttgtcaattacccggctctgcag

SEQ ID NO: 34870 - DNA, 25 bp, Saccharomyces pastorianus
gatcaagggcatcatcgagtccgga

SEQ ID NO: 34871 - DNA, 25 bp, Saccharomyces pastorianus
tgagcgggcgctgtatgttctacgc

SEQ ID NO: 34872 - DNA, 25 bp, Saccharomyces pastorianus
taatttactatttcaacgacgccga

SEQ ID NO: 34873 - DNA, 25 bp, Saccharomyces pastorianus
gcgaactgtttagaatacccctctt

SEQ ID NO: 34874 - DNA, 25 bp, Saccharomyces pastorianus
aattcgatgcatttccagttcaaca

SEQ ID NO: 34875 - DNA, 25 bp, Saccharomyces pastorianus
aaaaggacattagccgcatagaccc

SEQ ID NO: 34876 - DNA, 25 bp, Saccharomyces pastorianus
caaggtttcgaatctcctgactcaa

SEQ ID NO: 34877 - DNA, 25 bp, Saccharomyces pastorianus
aatgtttctcactctctgtcaataa

SEQ ID NO: 34878 - DNA, 25 bp, Saccharomyces pastorianus
aaaaccaatccgaattctcatccac

SEQ ID NO: 34879 - DNA, 25 bp, Saccharomyces pastorianus
ataagcacaataggccagcatttca

SEQ ID NO: 34880 - DNA, 25 bp, Saccharomyces pastorianus
tcatccacccaaacttcaaacgttt

SEQ ID NO: 34881 - DNA, 25 bp, Saccharomyces pastorianus
atatcgcaggaaaggcaaaccgcca

SEQ ID NO: 34882 - DNA, 25 bp, Saccharomyces pastorianus
ctcctgactcaagttgtcctgaaac

SEQ ID NO: 34883 - DNA, 25 bp, Saccharomyces pastorianus
attggcgataccctgaacgaaactc

SEQ ID NO: 34884 - DNA, 25 bp, Saccharomyces pastorianus
gatccatcgaatcgttctcagacaa

SEQ ID NO: 34885 - DNA, 25 bp, Saccharomyces pastorianus
atcactgctgcgtctggcggtaatg

SEQ ID NO: 34886 - DNA, 25 bp, Saccharomyces pastorianus
ttgcaccccttattagcagaactat

SEQ ID NO: 34887 - DNA, 25 bp, Saccharomyces pastorianus
cgtaatggatgccttgaaactcaac

SEQ ID NO: 34888 - DNA, 25 bp, Saccharomyces pastorianus
aatgagcaggcttcttctagcgata

SEQ ID NO: 34889 - DNA, 25 bp, Saccharomyces pastorianus
ttaatcagcataaaccgtgtcacca

SEQ ID NO: 34890 - DNA, 25 bp, Saccharomyces pastorianus
atgccaaggatcaattgcacccctt

SEQ ID NO: 34891 - DNA, 25 bp, Saccharomyces pastorianus
aacagcagaacatgccatctctacc

SEQ ID NO: 34892 - DNA, 25 bp, Saccharomyces pastorianus
accggtaacttcatcaccgtaatgg

SEQ ID NO: 34893 - DNA, 25 bp, Saccharomyces pastorianus
atacgtcgctgaagccaccggtaac

SEQ ID NO: 34894 - DNA, 25 bp, Saccharomyces pastorianus
agagctgcatgatcaagccgaccca

SEQ ID NO: 34895 - DNA, 25 bp, Saccharomyces pastorianus
gaatggttcttcctgcatggatcaa

SEQ ID NO: 34896 - DNA, 25 bp, Saccharomyces pastorianus
aagcgttcaacctaagcccgacgtg

SEQ ID NO: 34897 - DNA, 25 bp, Saccharomyces pastorianus
gacccaccaactaaagacccagagg

SEQ ID NO: 34898 - DNA, 25 bp, Saccharomyces pastorianus
gacactgaaccggtagagctgcatg

SEQ ID NO: 34899 - DNA, 25 bp, Saccharomyces pastorianus
gtcggtaaatctatctacgctttca

SEQ ID NO: 34900 - DNA, 25 bp, Saccharomyces pastorianus
gacgtctttgagaataagccaacca

SEQ ID NO: 34901 - DNA, 25 bp, Saccharomyces pastorianus
ggtgagatcgaaaccaccactcaaa

SEQ ID NO: 34902 - DNA, 25 bp, Saccharomyces pastorianus
gacgtgtccgtagatcagccacaac

SEQ ID NO: 34903 - DNA, 25 bp, Saccharomyces pastorianus
gtacaggcagattccaaacatgtct

SEQ ID NO: 34904 - DNA, 25 bp, Saccharomyces pastorianus
aagcaatttatgtaccctgcagttt

SEQ ID NO: 34905 - DNA, 25 bp, Saccharomyces pastorianus
ggtgtcaccaacgacatgggcggca

SEQ ID NO: 34906 - DNA, 25 bp, Saccharomyces pastorianus
gaatatctagccacgcagcaaacca

SEQ ID NO: 34907 - DNA, 25 bp, Saccharomyces pastorianus
tgccctcacccgaagagcaaatgaa

SEQ ID NO: 34908 - DNA, 25 bp, Saccharomyces pastorianus
gttagaccgatcttggacagtttcc

SEQ ID NO: 34909 - DNA, 25 bp, Saccharomyces pastorianus
ggtgtgcacatcaaggatctttcga

SEQ ID NO: 34910 - DNA, 25 bp, Saccharomyces pastorianus
tgggccttaaaagcgcttggtgtca

SEQ ID NO: 34911 - DNA, 25 bp, Saccharomyces pastorianus
gaagaaccttgctaccgaatttgac

SEQ ID NO: 34912 - DNA, 25 bp, Saccharomyces pastorianus
gcggccagacgttcaccttaaagga

SEQ ID NO: 34913 - DNA, 25 bp, Saccharomyces pastorianus
cacggagacggctctaatggcaatt

SEQ ID NO: 34914 - DNA, 25 bp, Saccharomyces pastorianus
gctcgacctaatccacgaagagggt

SEQ ID NO: 34915 - DNA, 25 bp, Saccharomyces pastorianus
tacgtggaaggtaacctgccctcac

SEQ ID NO: 34916 - DNA, 25 bp, Saccharomyces pastorianus
agaccaactgtcttctacgacgttg

SEQ ID NO: 34917 - DNA, 25 bp, Saccharomyces pastorianus
ggctccggtatcgaaactgaatctc

SEQ ID NO: 34918 - DNA, 25 bp, Saccharomyces pastorianus
tggcaatggcaaacagctccgaatt

SEQ ID NO: 34919 - DNA, 25 bp, Saccharomyces pastorianus
acgatgaacttttggccgctttcaa

SEQ ID NO: 34920 - DNA, 25 bp, Saccharomyces pastorianus
taaaggctggtaccgtgtggatcaa

SEQ ID NO: 34921 - DNA, 25 bp, Saccharomyces pastorianus
ttgttcctccggttcaagaatctac

SEQ ID NO: 34922 - DNA, 25 bp, Saccharomyces pastorianus
gtatcttcaagaacgccggtcaaat

SEQ ID NO: 34923 - DNA, 25 bp, Saccharomyces pastorianus
gacaaggctaacttccaaggtgcta

SEQ ID NO: 34924 - DNA, 25 bp, Saccharomyces pastorianus
gtgctatcactaaccgtcaacaatt

SEQ ID NO: 34925 - DNA, 25 bp, Saccharomyces pastorianus
ctgtcgttaccgtggcaaagttcaa

SEQ ID NO: 34926 - DNA, 25 bp, Saccharomyces pastorianus
actgaatctctaagcactggtttga

SEQ ID NO: 34927 - DNA, 25 bp, Saccharomyces pastorianus
gcattgaacatacagctgacccagg

SEQ ID NO: 34928 - DNA, 25 bp, Saccharomyces pastorianus
acatggaagactcgccgttcctgta

SEQ ID NO: 34929 - DNA, 25 bp, Saccharomyces pastorianus
aacgagctggagttgcggcttctaa

SEQ ID NO: 34930 - DNA, 25 bp, Saccharomyces pastorianus
ttcctgtacctgacggatttcgaca

SEQ ID NO: 34931 - DNA, 25 bp, Saccharomyces pastorianus
tcggtatcctccgtgggaaacagta

SEQ ID NO: 34932 - DNA, 25 bp, Saccharomyces pastorianus
ttcagcagcctgtaagcagcagcag

SEQ ID NO: 34933 - DNA, 25 bp, Saccharomyces pastorianus
gaggcagattatccgcttcagcagc

SEQ ID NO: 34934 - DNA, 25 bp, Saccharomyces pastorianus
tagaagcaatagctcctccggaggc

SEQ ID NO: 34935 - DNA, 25 bp, Saccharomyces pastorianus
gtgacgtaatcgataccactctaca

SEQ ID NO: 34936 - DNA, 25 bp, Saccharomyces pastorianus
gcggcttctaaacaaccagtgcaac

SEQ ID NO: 34937 - DNA, 25 bp, Saccharomyces pastorianus
tatagcaactaccaccatcgcgaga

SEQ ID NO: 34938 - DNA, 25 bp, Saccharomyces pastorianus
gttcaacgactctacagtcaattgt

SEQ ID NO: 34939 - DNA, 25 bp, Saccharomyces pastorianus
acgaagaggttgaaggtgtgcccat

SEQ ID NO: 34940 - DNA, 25 bp, Saccharomyces pastorianus
gtgtgcccatattgatgctggctaa

SEQ ID NO: 34941 - DNA, 25 bp, Saccharomyces pastorianus
aatgtggccacgatacccgttgata

SEQ ID NO: 34942 - DNA, 25 bp, Saccharomyces pastorianus
ggacagttcagatagagagcgactc

SEQ ID NO: 34943 - DNA, 25 bp, Saccharomyces pastorianus
gggttttaccaatcagtgcgttgac

SEQ ID NO: 34944 - DNA, 25 bp, Saccharomyces pastorianus
tgaatggatgattgtcaggctggac

SEQ ID NO: 34945 - DNA, 25 bp, Saccharomyces pastorianus
gtaagacgacgttcctggagacatt

SEQ ID NO: 34946 - DNA, 25 bp, Saccharomyces pastorianus
gagcgactcgacgaatgttcaacga

SEQ ID NO: 34947 - DNA, 25 bp, Saccharomyces pastorianus
atacagcctacagtgggacagaatg

SEQ ID NO: 34948 - DNA, 25 bp, Saccharomyces pastorianus
gaaggtgtcaaagatgctcttgaat

SEQ ID NO: 34949 - DNA, 25 bp, Saccharomyces pastorianus
gactcaacacaacaaagccgtcttg

SEQ ID NO: 34950 - DNA, 25 bp, Saccharomyces pastorianus
ggagagacgtgcagctatggcttta

SEQ ID NO: 34951 - DNA, 25 bp, Saccharomyces pastorianus
acacttcgtgggttttatggctaga

SEQ ID NO: 34952 - DNA, 25 bp, Saccharomyces pastorianus
tattttccactataggccctcacac

SEQ ID NO: 34953 - DNA, 25 bp, Saccharomyces pastorianus
gtcttggctgccaatatctaccaaa

SEQ ID NO: 34954 - DNA, 25 bp, Saccharomyces pastorianus
gaaacaagcatcgattagaccatac

SEQ ID NO: 34955 - DNA, 25 bp, Saccharomyces pastorianus
acgatgtattcggtttgccaaatta

SEQ ID NO: 34956 - DNA, 25 bp, Saccharomyces pastorianus
tagagacggtgctatgttccccaat

SEQ ID NO: 34957 - DNA, 25 bp, Saccharomyces pastorianus
ctatggctttagctcgtaacgaatt

SEQ ID NO: 34958 - DNA, 25 bp, Saccharomyces pastorianus
cttacagaccactaatggcccattt

SEQ ID NO: 34959 - DNA, 25 bp, Saccharomyces pastorianus
tgacgccaacgggttacaaaatgaa

SEQ ID NO: 34960 - DNA, 25 bp, Saccharomyces pastorianus
ccaccttcgccttggatgaatggaa

SEQ ID NO: 34961 - DNA, 25 bp, Saccharomyces pastorianus
gggacaagccagtctctgtcaatgg

SEQ ID NO: 34962 - DNA, 25 bp, Saccharomyces pastorianus
gattgggagtcctacgatttcgcca

SEQ ID NO: 34963 - DNA, 25 bp, Saccharomyces pastorianus
ccaagtatttgttcggctgtctcat

SEQ ID NO: 34964 - DNA, 25 bp, Saccharomyces pastorianus
acaccctttggagctgttgggcaag

SEQ ID NO: 34965 - DNA, 25 bp, Saccharomyces pastorianus
gctgtctcatcatctacggcgaaaa

SEQ ID NO: 34966 - DNA, 25 bp, Saccharomyces pastorianus
gttctggcagaactacaacccggag

SEQ ID NO: 34967 - DNA, 25 bp, Saccharomyces pastorianus
gagtactccctctggaaggttacct

SEQ ID NO: 34968 - DNA, 25 bp, Saccharomyces pastorianus
aagaactgaccttgaccttcatgtc

SEQ ID NO: 34969 - DNA, 25 bp, Saccharomyces pastorianus
ttcttgaacaggttggtcggctcca

SEQ ID NO: 34970 - DNA, 25 bp, Saccharomyces pastorianus
tttccttcaccgataaaccattgtc

SEQ ID NO: 34971 - DNA, 25 bp, Saccharomyces pastorianus
acagctgctgaagacgaggtatcca

SEQ ID NO: 34972 - DNA, 25 bp, Saccharomyces pastorianus
gcaaacaacaagagtcgtcccaata

SEQ ID NO: 34973 - DNA, 25 bp, Saccharomyces pastorianus
atcggcaaatagactggcggctcat

SEQ ID NO: 34974 - DNA, 25 bp, Saccharomyces pastorianus
gaggtatccagaccttcgcagctac

SEQ ID NO: 34975 - DNA, 25 bp, Saccharomyces pastorianus
tgggatacttaataacctgttgact

SEQ ID NO: 34976 - DNA, 25 bp, Saccharomyces pastorianus
atctcttgatattaacggactacgc

SEQ ID NO: 34977 - DNA, 25 bp, Saccharomyces pastorianus
tgttgactacgctcatccaggacat

SEQ ID NO: 34978 - DNA, 25 bp, Saccharomyces pastorianus
gtcgtcccaatatattcactgtgaa

SEQ ID NO: 34979 - DNA, 25 bp, Saccharomyces pastorianus
acgacccaaacggatctcttgatat

SEQ ID NO: 34980 - DNA, 25 bp, Saccharomyces pastorianus
tcgtggcgcaggaaaccactcaaca

SEQ ID NO: 34981 - DNA, 25 bp, Saccharomyces pastorianus
tcatccaggacatcgtggcgcagga

SEQ ID NO: 34982 - DNA, 25 bp, Saccharomyces pastorianus
cgatctgcagccatggtttcaccaa

SEQ ID NO: 34983 - DNA, 25 bp, Saccharomyces pastorianus
aaaggcaggatagaactcaaggagt

SEQ ID NO: 34984 - DNA, 25 bp, Saccharomyces pastorianus
caaggagtttgattcgcacattcta

SEQ ID NO: 34985 - DNA, 25 bp, Saccharomyces pastorianus
tggtttcaccaaccttaaaggctat

SEQ ID NO: 34986 - DNA, 25 bp, Saccharomyces pastorianus
gctattattgagggctccttcaagg

SEQ ID NO: 34987 - DNA, 25 bp, Saccharomyces pastorianus
gattcgcacattctagaaaaagttg

SEQ ID NO: 34988 - DNA, 25 bp, Saccharomyces pastorianus
gttatccttgcctcaaacgataata

SEQ ID NO: 34989 - DNA, 25 bp, Saccharomyces pastorianus
gtacgaaataccacgatctgcagcc

SEQ ID NO: 34990 - DNA, 25 bp, Saccharomyces pastorianus
caaatacagcggtgttgagggagat

SEQ ID NO: 34991 - DNA, 25 bp, Saccharomyces pastorianus
atgtctcaagatccagttatccttg

SEQ ID NO: 34992 - DNA, 25 bp, Saccharomyces pastorianus
aagatccagttatccttgcctcaaa

SEQ ID NO: 34993 - DNA, 25 bp, Saccharomyces pastorianus
aattggctacatgcccttttataga

SEQ ID NO: 34994 - DNA, 25 bp, Saccharomyces pastorianus
ttcgaccaactgatgcaatttgctc

SEQ ID NO: 34995 - DNA, 25 bp, Saccharomyces pastorianus
acaatgtaattcaactggcgggcaa

SEQ ID NO: 34996 - DNA, 25 bp, Saccharomyces pastorianus
gatacctggtctttcttaccaagaa

SEQ ID NO: 34997 - DNA, 25 bp, Saccharomyces pastorianus
aaatggctagcgatgtcaccgggct

SEQ ID NO: 34998 - DNA, 25 bp, Saccharomyces pastorianus
tcaccgggctgcttctaagacaaga

SEQ ID NO: 34999 - DNA, 25 bp, Saccharomyces pastorianus
atgacattggatcaaacgctttcaa

SEQ ID NO: 35000 - DNA, 25 bp, Saccharomyces pastorianus
gggtgtaccaggagtctctaggcaa

SEQ ID NO: 35001 - DNA, 25 bp, Saccharomyces pastorianus
tcggtatttcattcgctgatatgac

SEQ ID NO: 35002 - DNA, 25 bp, Saccharomyces pastorianus
attataccggccaatgaaccagaac

SEQ ID NO: 35003 - DNA, 25 bp, Saccharomyces pastorianus
gaagcggcttcttatgtcaatatga

SEQ ID NO: 35004 - DNA, 25 bp, Saccharomyces pastorianus
aagtataagttcatgggcccagacg

SEQ ID NO: 35005 - DNA, 25 bp, Saccharomyces pastorianus
ggtatcgtaaagcaagccaaggtta

SEQ ID NO: 35006 - DNA, 25 bp, Saccharomyces pastorianus
gaattgtcatgctgttactaccgaa

SEQ ID NO: 35007 - DNA, 25 bp, Saccharomyces pastorianus
aagaacgctttaatgggtctaagat

SEQ ID NO: 35008 - DNA, 25 bp, Saccharomyces pastorianus
gagatgtttatgtgttgaatttgcc

SEQ ID NO: 35009 - DNA, 25 bp, Saccharomyces pastorianus
aagatgccagcgagtccaacaagaa

SEQ ID NO: 35010 - DNA, 25 bp, Saccharomyces pastorianus
agcattggctcgtaaagctgtggta

SEQ ID NO: 35011 - DNA, 25 bp, Saccharomyces pastorianus
aacagttgaaacaggcaaggaccaa

SEQ ID NO: 35012 - DNA, 25 bp, Saccharomyces pastorianus
atgggcccagacgagattgaatctc

SEQ ID NO: 35013 - DNA, 25 bp, Saccharomyces pastorianus
ggtaggatttgccacagaagtaaag

SEQ ID NO: 35014 - DNA, 25 bp, Saccharomyces pastorianus
agatgatgaagctgccgaagatgcc

SEQ ID NO: 35015 - DNA, 25 bp, Saccharomyces pastorianus
atctatggtctgtcggttgtatctt

SEQ ID NO: 35016 - DNA, 25 bp, Saccharomyces pastorianus
gaaagtgatatacccgtcagtgaga

SEQ ID NO: 35017 - DNA, 25 bp, Saccharomyces pastorianus
aatcttcagggatcactgcaggcgc

SEQ ID NO: 35018 - DNA, 25 bp, Saccharomyces pastorianus
tgcaggcgccgcagcaaatgcttta

SEQ ID NO: 35019 - DNA, 25 bp, Saccharomyces pastorianus
cggccgctgcggtttcaggaaataa

SEQ ID NO: 35020 - DNA, 25 bp, Saccharomyces pastorianus
gattgatgcctttaacgctttagaa

SEQ ID NO: 35021 - DNA, 25 bp, Saccharomyces pastorianus
gataggcttacaacccatattcaaa

SEQ ID NO: 35022 - DNA, 25 bp, Saccharomyces pastorianus
gcattgagtcttctttaccacttgt

SEQ ID NO: 35023 - DNA, 25 bp, Saccharomyces pastorianus
aacgacatcatgaatctcggatcaa

SEQ ID NO: 35024 - DNA, 25 bp, Saccharomyces pastorianus
tgaagttcttggtaccccggatcaa

SEQ ID NO: 35025 - DNA, 25 bp, Saccharomyces pastorianus
ttggctacctggtatcattctgcag

SEQ ID NO: 35026 - DNA, 25 bp, Saccharomyces pastorianus
ttttaggcccactcaattacacatg

SEQ ID NO: 35027 - DNA, 25 bp, Saccharomyces pastorianus
ggtacggtcccaacaataacgtcat

SEQ ID NO: 35028 - DNA, 25 bp, Saccharomyces pastorianus
aacaatgacgctttttaggcccact

SEQ ID NO: 35029 - DNA, 25 bp, Saccharomyces pastorianus
aacaaactgatcttgtctggcacaa

SEQ ID NO: 35030 - DNA, 25 bp, Saccharomyces pastorianus
ttcaatagacctttcgaactcgtat

SEQ ID NO: 35031 - DNA, 25 bp, Saccharomyces pastorianus
aattctctcattactttgaccggat

SEQ ID NO: 35032 - DNA, 25 bp, Saccharomyces pastorianus
gtctggcacaatagcttacgttaca

SEQ ID NO: 35033 - DNA, 25 bp, Saccharomyces pastorianus
tatccggtgcgcatttgttttagta

SEQ ID NO: 35034 - DNA, 25 bp, Saccharomyces pastorianus
caagctgcccaacttcttaaacggg

SEQ ID NO: 35035 - DNA, 25 bp, Saccharomyces pastorianus
tatctctgatgatctcaagctgccc

SEQ ID NO: 35036 - DNA, 25 bp, Saccharomyces pastorianus
aatactaccgctttttctactatgg

SEQ ID NO: 35037 - DNA, 25 bp, Saccharomyces pastorianus
gaattcctatttttccagaggcact

SEQ ID NO: 35038 - DNA, 25 bp, Saccharomyces pastorianus
ggcatactacgttcatagcagctat

SEQ ID NO: 35039 - DNA, 25 bp, Saccharomyces pastorianus
aattgccgttctatcgtgagacctg

SEQ ID NO: 35040 - DNA, 25 bp, Saccharomyces pastorianus
gacaccggaacgtatcggcatacta

SEQ ID NO: 35041 - DNA, 25 bp, Saccharomyces pastorianus
atcgtgagacctgtgcttattcggc

SEQ ID NO: 35042 - DNA, 25 bp, Saccharomyces pastorianus
gctgcctttatattgagcgtgccaa

SEQ ID NO: 35043 - DNA, 25 bp, Saccharomyces pastorianus
gactcgcagtgatcagaattcctat

SEQ ID NO: 35044 - DNA, 25 bp, Saccharomyces pastorianus
aggacagccaatgacgcgcttttac

SEQ ID NO: 35045 - DNA, 25 bp, Saccharomyces pastorianus
ggcacttttatgaaccctcattctc

SEQ ID NO: 35046 - DNA, 25 bp, Saccharomyces pastorianus
ggaatgcgatattgagcccacacag

SEQ ID NO: 35047 - DNA, 25 bp, Saccharomyces pastorianus
attcacttcaagaccattccgatgg

SEQ ID NO: 35048 - DNA, 25 bp, Saccharomyces pastorianus
tattacagaggatccgacggtccag

SEQ ID NO: 35049 - DNA, 25 bp, Saccharomyces pastorianus
taagagacccagaagcgcagacaaa

SEQ ID NO: 35050 - DNA, 25 bp, Saccharomyces pastorianus
tactgccgcatatctgctcaaattg

SEQ ID NO: 35051 - DNA, 25 bp, Saccharomyces pastorianus
gggttcgccagaaaagatgctctaa

SEQ ID NO: 35052 - DNA, 25 bp, Saccharomyces pastorianus
gaaggctcagatgtcgatgtcgatg

SEQ ID NO: 35053 - DNA, 25 bp, Saccharomyces pastorianus
atagtggtaacctcatcgagctcca

SEQ ID NO: 35054 - DNA, 25 bp, Saccharomyces pastorianus
ggcattccaatacattgacctgtca

SEQ ID NO: 35055 - DNA, 25 bp, Saccharomyces pastorianus
tgaagtgttcctcaaacaagcggca

SEQ ID NO: 35056 - DNA, 25 bp, Saccharomyces pastorianus
cagttcggaccccataatacaggaa

SEQ ID NO: 35057 - DNA, 25 bp, Saccharomyces pastorianus
aaagtgcattcgctggtactgccgc

SEQ ID NO: 35058 - DNA, 25 bp, Saccharomyces pastorianus
agcccactgaattctgtcatacaag

SEQ ID NO: 35059 - DNA, 25 bp, Saccharomyces pastorianus
agacttgttcccaggcattatctcc

SEQ ID NO: 35060 - DNA, 25 bp, Saccharomyces pastorianus
gaagactaactcttctgctggtgcc

SEQ ID NO: 35061 - DNA, 25 bp, Saccharomyces pastorianus
ggccaagttgcacgccgtcactatt

SEQ ID NO: 35062 - DNA, 25 bp, Saccharomyces pastorianus
gatcaagaaaaactagccaagctac

SEQ ID NO: 35063 - DNA, 25 bp, Saccharomyces pastorianus
gttgtccgctaacaataaagtcggt

SEQ ID NO: 35064 - DNA, 25 bp, Saccharomyces pastorianus
aagttgcaaagtcaactggccaagt

SEQ ID NO: 35065 - DNA, 25 bp, Saccharomyces pastorianus
aagtcaactggccaagttgcacgcc

SEQ ID NO: 35066 - DNA, 25 bp, Saccharomyces pastorianus
atccaggccttgtcccaattggcag

SEQ ID NO: 35067 - DNA, 25 bp, Saccharomyces pastorianus
aagaaaagaacttgcaagacttgtt

SEQ ID NO: 35068 - DNA, 25 bp, Saccharomyces pastorianus
ggacgaagctattcctgaattagtc

SEQ ID NO: 35069 - DNA, 25 bp, Saccharomyces pastorianus
ggccttgtcccaattggcagcccaa

SEQ ID NO: 35070 - DNA, 25 bp, Saccharomyces pastorianus
gctcattgccaacccatagtattgt

SEQ ID NO: 35071 - DNA, 25 bp, Saccharomyces pastorianus
aagacaattcagttcgagcaccatg

SEQ ID NO: 35072 - DNA, 25 bp, Saccharomyces pastorianus
atttaaacaaccacgtcactactca

SEQ ID NO: 35073 - DNA, 25 bp, Saccharomyces pastorianus
agtactccaactttatcttcatcaa

SEQ ID NO: 35074 - DNA, 25 bp, Saccharomyces pastorianus
catgggtaattttggcaggccacca

SEQ ID NO: 35075 - DNA, 25 bp, Saccharomyces pastorianus
aaactcgtttgagctcattgccaac

SEQ ID NO: 35076 - DNA, 25 bp, Saccharomyces pastorianus
tagcaatatagtggctcctcctaca

SEQ ID NO: 35077 - DNA, 25 bp, Saccharomyces pastorianus
attggtaatccctcctgtatagtaa

SEQ ID NO: 35078 - DNA, 25 bp, Saccharomyces pastorianus
gtgtttaatcaacctcctgtttcta

SEQ ID NO: 35079 - DNA, 25 bp, Saccharomyces pastorianus
gctgatgtaagctctcctagtactg

SEQ ID NO: 35080 - DNA, 25 bp, Saccharomyces pastorianus
acgctgccaagccaaacaatgtgtt

SEQ ID NO: 35081 - DNA, 25 bp, Saccharomyces pastorianus
ataccctctattcttttgagacctc

SEQ ID NO: 35082 - DNA, 25 bp, Saccharomyces pastorianus
ttgctggattccattactgggccat

SEQ ID NO: 35083 - DNA, 25 bp, Saccharomyces pastorianus
gttgaatatatctcctctcgcgtag

SEQ ID NO: 35084 - DNA, 25 bp, Saccharomyces pastorianus
ttctcaggtcaaagggtgcgtttca

SEQ ID NO: 35085 - DNA, 25 bp, Saccharomyces pastorianus
gggccatccgtatatggtcatacct

SEQ ID NO: 35086 - DNA, 25 bp, Saccharomyces pastorianus
ggtcataccttgttgttctcacaat

SEQ ID NO: 35087 - DNA, 25 bp, Saccharomyces pastorianus
ggtaaccactctgacgaattgactt

SEQ ID NO: 35088 - DNA, 25 bp, Saccharomyces pastorianus
atttttcccggtcaaagtcacacat

SEQ ID NO: 35089 - DNA, 25 bp, Saccharomyces pastorianus
acaggtcaacactgctgagttccca

SEQ ID NO: 35090 - DNA, 25 bp, Saccharomyces pastorianus
tgagttcccatcagacacttttatt

SEQ ID NO: 35091 - DNA, 25 bp, Saccharomyces pastorianus
tgaagaacttcccaacgcaagcggt

SEQ ID NO: 35092 - DNA, 25 bp, Saccharomyces pastorianus
ggtcgttactctactatctattcta

SEQ ID NO: 35093 - DNA, 25 bp, Saccharomyces pastorianus
aaaatggtaccgtcactgctgccaa

SEQ ID NO: 35094 - DNA, 25 bp, Saccharomyces pastorianus
tgaattcaacgaggctttctccgtc

SEQ ID NO: 35095 - DNA, 25 bp, Saccharomyces pastorianus
ggtgctgcagctatcattttagtct

SEQ ID NO: 35096 - DNA, 25 bp, Saccharomyces pastorianus
agcagatttcacatgggccccatct

SEQ ID NO: 35097 - DNA, 25 bp, Saccharomyces pastorianus
atctcttgcagttccaaaggctttg

SEQ ID NO: 35098 - DNA, 25 bp, Saccharomyces pastorianus
atgtatacggtggtgcagtcgcttt

SEQ ID NO: 35099 - DNA, 25 bp, Saccharomyces pastorianus
taaaacccttggctatcgtcaaagg

SEQ ID NO: 35100 - DNA, 25 bp, Saccharomyces pastorianus
atccattgggatgttcgggtgccag

SEQ ID NO: 35101 - DNA, 25 bp, Saccharomyces pastorianus
aggctttgaaacatgctggtatcga

SEQ ID NO: 35102 - DNA, 25 bp, Saccharomyces pastorianus
gaagcagcccatttaccagcagatt

SEQ ID NO: 35103 - DNA, 25 bp, Saccharomyces pastorianus
aagttccagccctatcggacgaagt

SEQ ID NO: 35104 - DNA, 25 bp, Saccharomyces pastorianus
atatcggacgatttgttttcagtgt

SEQ ID NO: 35105 - DNA, 25 bp, Saccharomyces pastorianus
aacccatggttgaaggctcaccaaa

SEQ ID NO: 35106 - DNA, 25 bp, Saccharomyces pastorianus
aagttcgtcgatggacagtacacct

SEQ ID NO: 35107 - DNA, 25 bp, Saccharomyces pastorianus
gaaataccacatcttgccgttgacc

SEQ ID NO: 35108 - DNA, 25 bp, Saccharomyces pastorianus
ttttgcgaacaataaccacgtctta

SEQ ID NO: 35109 - DNA, 25 bp, Saccharomyces pastorianus
caaagagggccctttgtctcaagtt

SEQ ID NO: 35110 - DNA, 25 bp, Saccharomyces pastorianus
gaaaattcttcctatatcggacgat

SEQ ID NO: 35111 - DNA, 25 bp, Saccharomyces pastorianus
tttcttctttgacttcgttcaccaa

SEQ ID NO: 35112 - DNA, 25 bp, Saccharomyces pastorianus
gttttgcaactgaacccatatacaa

SEQ ID NO: 35113 - DNA, 25 bp, Saccharomyces pastorianus
gaacaagaccaacaacagccgcaag

SEQ ID NO: 35114 - DNA, 25 bp, Saccharomyces pastorianus
atctgttttcaagttgacgctgcaa

SEQ ID NO: 35115 - DNA, 25 bp, Saccharomyces pastorianus
ggaactcctgtatgttgggctcgaa

SEQ ID NO: 35116 - DNA, 25 bp, Saccharomyces pastorianus
gcaagtgcacgacgccaagaagtac

SEQ ID NO: 35117 - DNA, 25 bp, Saccharomyces pastorianus
ggcgttttcgtaatgaaggactctc

SEQ ID NO: 35118 - DNA, 25 bp, Saccharomyces pastorianus
caacgacggcgccaactacaaaaat

SEQ ID NO: 35119 - DNA, 25 bp, Saccharomyces pastorianus
ggaacttttgttccaggtgctgatg

SEQ ID NO: 35120 - DNA, 25 bp, Saccharomyces pastorianus
atagcccagaatcttatcttggacg

SEQ ID NO: 35121 - DNA, 25 bp, Saccharomyces pastorianus
aaatcgtcatattgccaggaactgt

SEQ ID NO: 35122 - DNA, 25 bp, Saccharomyces pastorianus
gagaacatctccaagtcgaagctaa

SEQ ID NO: 35123 - DNA, 25 bp, Saccharomyces pastorianus
tagacagactacgatcgggcgcgca

SEQ ID NO: 35124 - DNA, 25 bp, Saccharomyces pastorianus
aagtcgggtgacatcttcttcgcag

SEQ ID NO: 35125 - DNA, 25 bp, Saccharomyces pastorianus
attcttcctaatggtcagccgaaag

SEQ ID NO: 35126 - DNA, 25 bp, Saccharomyces pastorianus
aagaatgtgccacgtgcggtgacac

SEQ ID NO: 35127 - DNA, 25 bp, Saccharomyces pastorianus
agatggtcctattcattgcagcctc

SEQ ID NO: 35128 - DNA, 25 bp, Saccharomyces pastorianus
ggatactgctgtcaggccaaactta

SEQ ID NO: 35129 - DNA, 25 bp, Saccharomyces pastorianus
ggaaaggacctttctgcagcacaga

SEQ ID NO: 35130 - DNA, 25 bp, Saccharomyces pastorianus
agatcctcttggtgagcctgtacat

SEQ ID NO: 35131 - DNA, 25 bp, Saccharomyces pastorianus
gaatcgccgtacgaagcaccatttc

SEQ ID NO: 35132 - DNA, 25 bp, Saccharomyces pastorianus
ttgcagcctctcctgaatattgcag

SEQ ID NO: 35133 - DNA, 25 bp, Saccharomyces pastorianus
ggaccggatgggaacgttgaactat

SEQ ID NO: 35134 - DNA, 25 bp, Saccharomyces pastorianus
ctaaatatcgctctgggcccaaaat

SEQ ID NO: 35135 - DNA, 25 bp, Saccharomyces pastorianus
gcaccatttcgaccggtttgtacag

SEQ ID NO: 35136 - DNA, 25 bp, Saccharomyces pastorianus
tgcggacgctccattagactttaat

SEQ ID NO: 35137 - DNA, 25 bp, Saccharomyces pastorianus
gaaaaatcgaatgctgacacagtag

SEQ ID NO: 35138 - DNA, 25 bp, Saccharomyces pastorianus
aagaggataccaaggcgttcgcagg

SEQ ID NO: 35139 - DNA, 25 bp, Saccharomyces pastorianus
taccttatatgggagtgcggacgct

SEQ ID NO: 35140 - DNA, 25 bp, Saccharomyces pastorianus
gattgtccacaacaaccaaatggtt

SEQ ID NO: 35141 - DNA, 25 bp, Saccharomyces pastorianus
gtcgattcattatcaaatgggccca

SEQ ID NO: 35142 - DNA, 25 bp, Saccharomyces pastorianus
atgcgatgagttttgctatcttaac

SEQ ID NO: 35143 - DNA, 25 bp, Saccharomyces pastorianus
aaaccagtcacattgggcattaggg

SEQ ID NO: 35144 - DNA, 25 bp, Saccharomyces pastorianus
aaatgggcccaatgcgatgagtttt

SEQ ID NO: 35145 - DNA, 25 bp, Saccharomyces pastorianus
gtgattttaagactttagcgcccaa

SEQ ID NO: 35146 - DNA, 25 bp, Saccharomyces pastorianus
aaaaccataggctacgtcgattcat

SEQ ID NO: 35147 - DNA, 25 bp, Saccharomyces pastorianus
tgcagttgtactgatcgtcactctg

SEQ ID NO: 35148 - DNA, 25 bp, Saccharomyces pastorianus
gatgatacggatactgcttctgcct

SEQ ID NO: 35149 - DNA, 25 bp, Saccharomyces pastorianus
aagattggccctcattaaagataga

SEQ ID NO: 35150 - DNA, 25 bp, Saccharomyces pastorianus
aattcaactgatccttactctgatg

SEQ ID NO: 35151 - DNA, 25 bp, Saccharomyces pastorianus
aacgctggtcccgtcaaagtggaag

SEQ ID NO: 35152 - DNA, 25 bp, Saccharomyces pastorianus
gaattcccgcgattggctgatttgt

SEQ ID NO: 35153 - DNA, 25 bp, Saccharomyces pastorianus
gatggttaagcgttaccactttgtt

SEQ ID NO: 35154 - DNA, 25 bp, Saccharomyces pastorianus
gtgtgttgacattctccattcataa

SEQ ID NO: 35155 - DNA, 25 bp, Saccharomyces pastorianus
gatcgtcactctggttgttaacttt

SEQ ID NO: 35156 - DNA, 25 bp, Saccharomyces pastorianus
gcagcctttttgaaaattcttgccg

SEQ ID NO: 35157 - DNA, 25 bp, Saccharomyces pastorianus
atgtttcttcacaatctccattgcc

SEQ ID NO: 35158 - DNA, 25 bp, Saccharomyces pastorianus
ttggagactccaccttgcagaaatg

SEQ ID NO: 35159 - DNA, 25 bp, Saccharomyces pastorianus
gcatcttcaggtctctgtcaaatct

SEQ ID NO: 35160 - DNA, 25 bp, Saccharomyces pastorianus
aacttggatgagatctgtcacggat

SEQ ID NO: 35161 - DNA, 25 bp, Saccharomyces pastorianus
attgttggcaacacgcaacttccag

SEQ ID NO: 35162 - DNA, 25 bp, Saccharomyces pastorianus
aatttcatcatcgtcatgcccagtg

SEQ ID NO: 35163 - DNA, 25 bp, Saccharomyces pastorianus
gcgcatctccacaaacatcaagttg

SEQ ID NO: 35164 - DNA, 25 bp, Saccharomyces pastorianus
gaactgcctactaagtctttacgaa

SEQ ID NO: 35165 - DNA, 25 bp, Saccharomyces pastorianus
gggcaaacctccgaattgtttcctg

SEQ ID NO: 35166 - DNA, 25 bp, Saccharomyces pastorianus
aatgggaaatcttgcgcatctccac

SEQ ID NO: 35167 - DNA, 25 bp, Saccharomyces pastorianus
gttatctagcgaacaacggagactc

SEQ ID NO: 35168 - DNA, 25 bp, Saccharomyces pastorianus
gaattgtttcctgcccatgagtaaa

SEQ ID NO: 35169 - DNA, 25 bp, Saccharomyces pastorianus
gttttcggttataccattccagcaa

SEQ ID NO: 35170 - DNA, 25 bp, Saccharomyces pastorianus
gtgttacttctatccaacgaagcat

SEQ ID NO: 35171 - DNA, 25 bp, Saccharomyces pastorianus
gtcgattaacatatcctgcattcag

SEQ ID NO: 35172 - DNA, 25 bp, Saccharomyces pastorianus
gttaatcgatcaactttccccagta

SEQ ID NO: 35173 - DNA, 25 bp, Saccharomyces pastorianus
aactaccgttttagtcatagtgcaa

SEQ ID NO: 35174 - DNA, 25 bp, Saccharomyces pastorianus
accattccagcaattgttatcacaa

SEQ ID NO: 35175 - DNA, 25 bp, Saccharomyces pastorianus
acaatagtagtaatgccaccgtcaa

SEQ ID NO: 35176 - DNA, 25 bp, Saccharomyces pastorianus
gtaatgccaccgtcaaaaattcttt

SEQ ID NO: 35177 - DNA, 25 bp, Saccharomyces pastorianus
aaagatgcttctgccgtcgattaac

SEQ ID NO: 35178 - DNA, 25 bp, Saccharomyces pastorianus
aacattgggtctgggttattgaaat

SEQ ID NO: 35179 - DNA, 25 bp, Saccharomyces pastorianus
gttatcacaaccatcagacgcaaat

SEQ ID NO: 35180 - DNA, 25 bp, Saccharomyces pastorianus
ggctcatcccagtacatatcagaac

SEQ ID NO: 35181 - DNA, 25 bp, Saccharomyces pastorianus
tgaaatgctaagagtaccctcccca

SEQ ID NO: 35182 - DNA, 25 bp, Saccharomyces pastorianus
aaccgttattggctcgcacaaactc

SEQ ID NO: 35183 - DNA, 25 bp, Saccharomyces pastorianus
acgcagatatcgctgatcctattcc

SEQ ID NO: 35184 - DNA, 25 bp, Saccharomyces pastorianus
atatcagaacttcagccgcaaccgt

SEQ ID NO: 35185 - DNA, 25 bp, Saccharomyces pastorianus
ctatattgcctaccgattcactaag

SEQ ID NO: 35186 - DNA, 25 bp, Saccharomyces pastorianus
gttaaactggtattcctcgcaaagg

SEQ ID NO: 35187 - DNA, 25 bp, Saccharomyces pastorianus
tacagcagtctgaggtccagcaatt

SEQ ID NO: 35188 - DNA, 25 bp, Saccharomyces pastorianus
gatcctattccgctatcgaacataa

SEQ ID NO: 35189 - DNA, 25 bp, Saccharomyces pastorianus
cgaccacagattctccattcaattt

SEQ ID NO: 35190 - DNA, 25 bp, Saccharomyces pastorianus
gtaatattatatcgtctcccttggc

SEQ ID NO: 35191 - DNA, 25 bp, Saccharomyces pastorianus
aagccggtatattagatagcgcctg

SEQ ID NO: 35192 - DNA, 25 bp, Saccharomyces pastorianus
ggcaagagatgctaaaccgatcgaa

SEQ ID NO: 35193 - DNA, 25 bp, Saccharomyces pastorianus
gatagcgcctggattaatggcaaga

SEQ ID NO: 35194 - DNA, 25 bp, Saccharomyces pastorianus
ggctaattcacgtaaggcaagagat

SEQ ID NO: 35195 - DNA, 25 bp, Saccharomyces pastorianus
taaggctagctagattcgggaggaa

SEQ ID NO: 35196 - DNA, 25 bp, Saccharomyces pastorianus
taaaccgatcgaaatactgggaact

SEQ ID NO: 35197 - DNA, 25 bp, Saccharomyces pastorianus
ggtgcgcaacctagtgagacagtaa

SEQ ID NO: 35198 - DNA, 25 bp, Saccharomyces pastorianus
cgggaggaagaatagtccggtctat

SEQ ID NO: 35199 - DNA, 25 bp, Saccharomyces pastorianus
tgtacctatacctaatccattgacc

SEQ ID NO: 35200 - DNA, 25 bp, Saccharomyces pastorianus
ggagttgtacccgtgaaagacatca

SEQ ID NO: 35201 - DNA, 25 bp, Saccharomyces pastorianus
actgggaacttatgtacctatacct

SEQ ID NO: 35202 - DNA, 25 bp, Saccharomyces pastorianus
gcgcagtcacaagcggtatcaatgc

SEQ ID NO: 35203 - DNA, 25 bp, Saccharomyces pastorianus
gacgaagctgtttatggatctgaca

SEQ ID NO: 35204 - DNA, 25 bp, Saccharomyces pastorianus
gaagagattctgacgagttcggtga

SEQ ID NO: 35205 - DNA, 25 bp, Saccharomyces pastorianus
gtatcaatgcgtacctagaagccgt

SEQ ID NO: 35206 - DNA, 25 bp, Saccharomyces pastorianus
agcacatatttcatctactagacca

SEQ ID NO: 35207 - DNA, 25 bp, Saccharomyces pastorianus
gctaaaccctctacgaatgctgatg

SEQ ID NO: 35208 - DNA, 25 bp, Saccharomyces pastorianus
gatgacaccttcaatttcgactcag

SEQ ID NO: 35209 - DNA, 25 bp, Saccharomyces pastorianus
aagatgaggaggttgctcccgcaac

SEQ ID NO: 35210 - DNA, 25 bp, Saccharomyces pastorianus
aagagcggtccagtaagaggtcaaa

SEQ ID NO: 35211 - DNA, 25 bp, Saccharomyces pastorianus
gctgatgatccactaagcgcagtca

SEQ ID NO: 35212 - DNA, 25 bp, Saccharomyces pastorianus
gaagctaacgctggaaacaccacaa

SEQ ID NO: 35213 - DNA, 25 bp, Saccharomyces pastorianus
gaagaccgtctggtcctttacaaag

SEQ ID NO: 35214 - DNA, 25 bp, Saccharomyces pastorianus
agactcaaacaccattgcatccaga

SEQ ID NO: 35215 - DNA, 25 bp, Saccharomyces pastorianus
acatcaattgctctttcattccgta

SEQ ID NO: 35216 - DNA, 25 bp, Saccharomyces pastorianus
aacccacaagcaggattcggaaatt

SEQ ID NO: 35217 - DNA, 25 bp, Saccharomyces pastorianus
gataacggcgttatcctggaaacag

SEQ ID NO: 35218 - DNA, 25 bp, Saccharomyces pastorianus
aactacgacatggttttactagcca

SEQ ID NO: 35219 - DNA, 25 bp, Saccharomyces pastorianus
ttactagccattgacgaaaccattg

SEQ ID NO: 35220 - DNA, 25 bp, Saccharomyces pastorianus
tgcagcaagggttttcagcgatcaa

SEQ ID NO: 35221 - DNA, 25 bp, Saccharomyces pastorianus
ttttgatcttcgaagaccgtctggt

SEQ ID NO: 35222 - DNA, 25 bp, Saccharomyces pastorianus
taaaccacccacaaatgaacctcaa

SEQ ID NO: 35223 - DNA, 25 bp, Saccharomyces pastorianus
ttgacgtcacgatctatttagttgc

SEQ ID NO: 35224 - DNA, 25 bp, Saccharomyces pastorianus
gattcgttctgcgtacaacttattg

SEQ ID NO: 35225 - DNA, 25 bp, Saccharomyces pastorianus
tacgccccacaagtatggtgcagtg

SEQ ID NO: 35226 - DNA, 25 bp, Saccharomyces pastorianus
tcttccccaggtggattttcatgga

SEQ ID NO: 35227 - DNA, 25 bp, Saccharomyces pastorianus
tttaggttgtatccccacaactcta

SEQ ID NO: 35228 - DNA, 25 bp, Saccharomyces pastorianus
aaattgctgggcagtctagtctctt

SEQ ID NO: 35229 - DNA, 25 bp, Saccharomyces pastorianus
aaggctgctgaaggattcgttctgc

SEQ ID NO: 35230 - DNA, 25 bp, Saccharomyces pastorianus
tgacttggcgtttctctgttataat

SEQ ID NO: 35231 - DNA, 25 bp, Saccharomyces pastorianus
ttatgcgcatattcgccaataaggg

SEQ ID NO: 35232 - DNA, 25 bp, Saccharomyces pastorianus
tcaagattagtagcgctacgcctcc

SEQ ID NO: 35233 - DNA, 25 bp, Saccharomyces pastorianus
gcctccgtcagaaagttcactcgaa

SEQ ID NO: 35234 - DNA, 25 bp, Saccharomyces pastorianus
gtgccacaataagcccttgggttta

SEQ ID NO: 35235 - DNA, 25 bp, Saccharomyces pastorianus
gaagcatctcgtcaaatcatcatgg

SEQ ID NO: 35236 - DNA, 25 bp, Saccharomyces pastorianus
tgctggatacgggaaggctctacta

SEQ ID NO: 35237 - DNA, 25 bp, Saccharomyces pastorianus
taagccaactctatcgttccatcaa

SEQ ID NO: 35238 - DNA, 25 bp, Saccharomyces pastorianus
acaaggatcctcagtcaaccaaaat

SEQ ID NO: 35239 - DNA, 25 bp, Saccharomyces pastorianus
gaccactgaagtccctgccgaaaat

SEQ ID NO: 35240 - DNA, 25 bp, Saccharomyces pastorianus
gactctttgagagaactgtctgaaa

SEQ ID NO: 35241 - DNA, 25 bp, Saccharomyces pastorianus
gattctccggtcacaccaggtgaag

SEQ ID NO: 35242 - DNA, 25 bp, Saccharomyces pastorianus
agcagctttagaatcttggacccta

SEQ ID NO: 35243 - DNA, 25 bp, Saccharomyces pastorianus
aaaatggtgctcttcctgggcaagt

SEQ ID NO: 35244 - DNA, 25 bp, Saccharomyces pastorianus
tagaccagcttatgacggctacgaa

SEQ ID NO: 35245 - DNA, 25 bp, Saccharomyces pastorianus
gaattgctagacgattctccggtca

SEQ ID NO: 35246 - DNA, 25 bp, Saccharomyces pastorianus
tacttcgcattctcttttaagcgca

SEQ ID NO: 35247 - DNA, 25 bp, Saccharomyces pastorianus
accactacgttcctactgatgattt

SEQ ID NO: 35248 - DNA, 25 bp, Saccharomyces pastorianus
agacgacttgctccgaactgtggaa

SEQ ID NO: 35249 - DNA, 25 bp, Saccharomyces pastorianus
gctctcaagacggttctccaaagga

SEQ ID NO: 35250 - DNA, 25 bp, Saccharomyces pastorianus
aagcgcattattgacggtacagttc

SEQ ID NO: 35251 - DNA, 25 bp, Saccharomyces pastorianus
agcgctctcccggatatggaatcta

SEQ ID NO: 35252 - DNA, 25 bp, Saccharomyces pastorianus
gatcaagatagtactaccgccgaaa

SEQ ID NO: 35253 - DNA, 25 bp, Saccharomyces pastorianus
ttaagctcataacacaccactacgt

SEQ ID NO: 35254 - DNA, 25 bp, Saccharomyces pastorianus
gaaagatgtcctaaacgcgttttgc

SEQ ID NO: 35255 - DNA, 25 bp, Saccharomyces pastorianus
ggtgcagtagcccaagaagccatta

SEQ ID NO: 35256 - DNA, 25 bp, Saccharomyces pastorianus
gacaagtcccgcatacagcaaagtt

SEQ ID NO: 35257 - DNA, 25 bp, Saccharomyces pastorianus
ggagatctgctctattttaggttac

SEQ ID NO: 35258 - DNA, 25 bp, Saccharomyces pastorianus
agatggtcgccaacggtttactgtg

SEQ ID NO: 35259 - DNA, 25 bp, Saccharomyces pastorianus
ggagaagtctatcgatatgctgaaa

SEQ ID NO: 35260 - DNA, 25 bp, Saccharomyces pastorianus
ggttactcgagtatttccttgttga

SEQ ID NO: 35261 - DNA, 25 bp, Saccharomyces pastorianus
acgtcttccaagaacggctcgtaga

SEQ ID NO: 35262 - DNA, 25 bp, Saccharomyces pastorianus
gaaatttttgcgtagcgttccaaat

SEQ ID NO: 35263 - DNA, 25 bp, Saccharomyces pastorianus
ggaattgacccattatctttgtttg

SEQ ID NO: 35264 - DNA, 25 bp, Saccharomyces pastorianus
gtctccagaatttcgctcaaagttt

SEQ ID NO: 35265 - DNA, 25 bp, Saccharomyces pastorianus
gttccaaatgagcttacgtctgatc

SEQ ID NO: 35266 - DNA, 25 bp, Saccharomyces pastorianus
taatgagctccaagcgtctccagaa

SEQ ID NO: 35267 - DNA, 25 bp, Saccharomyces pastorianus
gaatggaggcgtcatttcctatgaa

SEQ ID NO: 35268 - DNA, 25 bp, Saccharomyces pastorianus
agagtcatattctccttacttcgac

SEQ ID NO: 35269 - DNA, 25 bp, Saccharomyces pastorianus
gagcctttgacttttaccaacagcg

SEQ ID NO: 35270 - DNA, 25 bp, Saccharomyces pastorianus
tatgttatttttgacctaggcggaa

SEQ ID NO: 35271 - DNA, 25 bp, Saccharomyces pastorianus
aatgacttcaatagactcctcagcc

SEQ ID NO: 35272 - DNA, 25 bp, Saccharomyces pastorianus
ggttcatctaaaatacaccctggaa

SEQ ID NO: 35273 - DNA, 25 bp, Saccharomyces pastorianus
tcagccgcccaggtactagatgaaa

SEQ ID NO: 35274 - DNA, 25 bp, Saccharomyces pastorianus
gtgacgttttcatttaccttgctaa

SEQ ID NO: 35275 - DNA, 25 bp, Saccharomyces pastorianus
gattgttagaattccagagcctttg

SEQ ID NO: 35276 - DNA, 25 bp, Saccharomyces pastorianus
aatcatttcctgttacaagaggcgt

SEQ ID NO: 35277 - DNA, 25 bp, Saccharomyces pastorianus
gatacggacgcgattgttgaaagca

SEQ ID NO: 35278 - DNA, 25 bp, Saccharomyces pastorianus
gtcatttcgatcgaaggactccata

SEQ ID NO: 35279 - DNA, 25 bp, Saccharomyces pastorianus
gatctagtggtttcaacgacgacat

SEQ ID NO: 35280 - DNA, 25 bp, Saccharomyces pastorianus
gaacaacacattcgaatccaccatt

SEQ ID NO: 35281 - DNA, 25 bp, Saccharomyces pastorianus
tgaacttacctccttcgagttttgg

SEQ ID NO: 35282 - DNA, 25 bp, Saccharomyces pastorianus
gacatagttggtgcacttaggcgaa

SEQ ID NO: 35283 - DNA, 25 bp, Saccharomyces pastorianus
gacagcactcagcagaatccacatc

SEQ ID NO: 35284 - DNA, 25 bp, Saccharomyces pastorianus
ctatccttgctgaacctagctacaa

SEQ ID NO: 35285 - DNA, 25 bp, Saccharomyces pastorianus
tccggcttcggaaacggctgttgaa

SEQ ID NO: 35286 - DNA, 25 bp, Saccharomyces pastorianus
aggtcggttgccatcggtagaacaa

SEQ ID NO: 35287 - DNA, 25 bp, Saccharomyces pastorianus
gcgaagaattgtaccctctgagcag

SEQ ID NO: 35288 - DNA, 25 bp, Saccharomyces pastorianus
agcgacaaatatcactccgacagca

SEQ ID NO: 35289 - DNA, 25 bp, Saccharomyces pastorianus
aacccggatccaactctgataattc

SEQ ID NO: 35290 - DNA, 25 bp, Saccharomyces pastorianus
atagcattatttctacgccttctgc

SEQ ID NO: 35291 - DNA, 25 bp, Saccharomyces pastorianus
aacagagttccgttcattcaatccc

SEQ ID NO: 35292 - DNA, 25 bp, Saccharomyces pastorianus
tagcaacctctcctagtgcgttaaa

SEQ ID NO: 35293 - DNA, 25 bp, Saccharomyces pastorianus
atgtaaaccataggtacccacccat

SEQ ID NO: 35294 - DNA, 25 bp, Saccharomyces pastorianus
tgatagatccttcaaacctggtcga

SEQ ID NO: 35295 - DNA, 25 bp, Saccharomyces pastorianus
acctaggtcgtccagcattgatgta

SEQ ID NO: 35296 - DNA, 25 bp, Saccharomyces pastorianus
gggacctgtgaacatagcaacctct

SEQ ID NO: 35297 - DNA, 25 bp, Saccharomyces pastorianus
agtctaacctctcttaattcgcagc

SEQ ID NO: 35298 - DNA, 25 bp, Saccharomyces pastorianus
ttccggatacttccccaatgagtag

SEQ ID NO: 35299 - DNA, 25 bp, Saccharomyces pastorianus
tatcactgatatgccttttactcga

SEQ ID NO: 35300 - DNA, 25 bp, Saccharomyces pastorianus
gaatcaaatgttttctcctccactg

SEQ ID NO: 35301 - DNA, 25 bp, Saccharomyces pastorianus
agccctgtacttcttgcagcaggaa

SEQ ID NO: 35302 - DNA, 25 bp, Saccharomyces pastorianus
gaccttatatcatcaatctcttcaa

SEQ ID NO: 35303 - DNA, 25 bp, Saccharomyces pastorianus
caagcttcccaaacttggttgctta

SEQ ID NO: 35304 - DNA, 25 bp, Saccharomyces pastorianus
gaaacgaccgattcagctgctattt

SEQ ID NO: 35305 - DNA, 25 bp, Saccharomyces pastorianus
tgtacaaaactatttcttccggtga

SEQ ID NO: 35306 - DNA, 25 bp, Saccharomyces pastorianus
ttcaagcttgcattacactctttcc

SEQ ID NO: 35307 - DNA, 25 bp, Saccharomyces pastorianus
gacggtccaagttgcgattcatgta

SEQ ID NO: 35308 - DNA, 25 bp, Saccharomyces pastorianus
gatagtgcttttcaagccctgtact

SEQ ID NO: 35309 - DNA, 25 bp, Saccharomyces pastorianus
cggttcaatacttcgatcacagttt

SEQ ID NO: 35310 - DNA, 25 bp, Saccharomyces pastorianus
caaagttcggttccagtttcatcgg

SEQ ID NO: 35311 - DNA, 25 bp, Saccharomyces pastorianus
atatctttgagatgactgtcgctga

SEQ ID NO: 35312 - DNA, 25 bp, Saccharomyces pastorianus
gtagccacttatccgttggacttga

SEQ ID NO: 35313 - DNA, 25 bp, Saccharomyces pastorianus
ggagttgttccatatgtggccttaa

SEQ ID NO: 35314 - DNA, 25 bp, Saccharomyces pastorianus
gacttacccttttgatctgctgaga

SEQ ID NO: 35315 - DNA, 25 bp, Saccharomyces pastorianus
tcttttcaaagttgtcccttccact

SEQ ID NO: 35316 - DNA, 25 bp, Saccharomyces pastorianus
ttaagtactctgaaccggtcgaagg

SEQ ID NO: 35317 - DNA, 25 bp, Saccharomyces pastorianus
tcagtggttactacaagggtcttac

SEQ ID NO: 35318 - DNA, 25 bp, Saccharomyces pastorianus
gaacatagcaaagcctccagggatt

SEQ ID NO: 35319 - DNA, 25 bp, Saccharomyces pastorianus
gggtgtctggccaacaagtcttgga

SEQ ID NO: 35320 - DNA, 25 bp, Saccharomyces pastorianus
cttccactgctgtaagttggctagt

SEQ ID NO: 35321 - DNA, 25 bp, Saccharomyces pastorianus
gtaagtggcggtgttgcgcaaacaa

SEQ ID NO: 35322 - DNA, 25 bp, Saccharomyces pastorianus
agggtcttactgcaaatcttttcaa

SEQ ID NO: 35323 - DNA, 25 bp, Saccharomyces pastorianus
ataaccaaccggctcatataacgtc

SEQ ID NO: 35324 - DNA, 25 bp, Saccharomyces pastorianus
aaattcttcagcagcattctccgat

SEQ ID NO: 35325 - DNA, 25 bp, Saccharomyces pastorianus
ctcgaggccctcaacgttaaagaca

SEQ ID NO: 35326 - DNA, 25 bp, Saccharomyces pastorianus
agcgaacctggtacttcttcaaatt

SEQ ID NO: 35327 - DNA, 25 bp, Saccharomyces pastorianus
acgaggtttacacgccgatttctat

SEQ ID NO: 35328 - DNA, 25 bp, Saccharomyces pastorianus
gcattatcaatggttgctccctcga

SEQ ID NO: 35329 - DNA, 25 bp, Saccharomyces pastorianus
gctccctcgaataccactatagatg

SEQ ID NO: 35330 - DNA, 25 bp, Saccharomyces pastorianus
tctctataagccgatgggaccatat

SEQ ID NO: 35331 - DNA, 25 bp, Saccharomyces pastorianus
atcagtcccgcctaaatacagcata

SEQ ID NO: 35332 - DNA, 25 bp, Saccharomyces pastorianus
ggatacccctttcaagtgcacttgg

SEQ ID NO: 35333 - DNA, 25 bp, Saccharomyces pastorianus
agtcatcgtaccaactctctataag

SEQ ID NO: 35334 - DNA, 25 bp, Saccharomyces pastorianus
attttctcgccagttgtagcatcac

SEQ ID NO: 35335 - DNA, 25 bp, Saccharomyces pastorianus
tttattcaacagcaacacctccata

SEQ ID NO: 35336 - DNA, 25 bp, Saccharomyces pastorianus
gcaaaatcctgggacactgctatcc

SEQ ID NO: 35337 - DNA, 25 bp, Saccharomyces pastorianus
aattacgtgccgtggtgaagctacg

SEQ ID NO: 35338 - DNA, 25 bp, Saccharomyces pastorianus
attgaacgccaatcttactgctctg

SEQ ID NO: 35339 - DNA, 25 bp, Saccharomyces pastorianus
gagatacacccttcaaatgcacttg

SEQ ID NO: 35340 - DNA, 25 bp, Saccharomyces pastorianus
aaagaggatgtgcatcttcctccct

SEQ ID NO: 35341 - DNA, 25 bp, Saccharomyces pastorianus
atgcgcgcctcaattacttctgaag

SEQ ID NO: 35342 - DNA, 25 bp, Saccharomyces pastorianus
gatggacaatactctctcacgaatg

SEQ ID NO: 35343 - DNA, 25 bp, Saccharomyces pastorianus
agatcgggttccaactctgttattt

SEQ ID NO: 35344 - DNA, 25 bp, Saccharomyces pastorianus
tttgttcaaggccttcgacgttaag

SEQ ID NO: 35345 - DNA, 25 bp, Saccharomyces pastorianus
ggagacgctattcctatcgttcaca

SEQ ID NO: 35346 - DNA, 25 bp, Saccharomyces pastorianus
cggtgccggtatggtcgtcaacgac

SEQ ID NO: 35347 - DNA, 25 bp, Saccharomyces pastorianus
gttgccttagtacatccagacatcg

SEQ ID NO: 35348 - DNA, 25 bp, Saccharomyces pastorianus
gtcgtcaacgactatttggccgtca

SEQ ID NO: 35349 - DNA, 25 bp, Saccharomyces pastorianus
tagaggtttgctggttcccacacaa

SEQ ID NO: 35350 - DNA, 25 bp, Saccharomyces pastorianus
tatttggccgtcacaggtctagata

SEQ ID NO: 35351 - DNA, 25 bp, Saccharomyces pastorianus
gtcctctttactacaagtgcctttg

SEQ ID NO: 35352 - DNA, 25 bp, Saccharomyces pastorianus
ggtaacattctagtcgggtcatatt

SEQ ID NO: 35353 - DNA, 25 bp, Saccharomyces pastorianus
gttaaccgcggtagtgctgttgtcg

SEQ ID NO: 35354 - DNA, 25 bp, Saccharomyces pastorianus
gttgcaatgactacgttgccttagt

SEQ ID NO: 35355 - DNA, 25 bp, Saccharomyces pastorianus
agtatcttccgtttgcaagatgctc

SEQ ID NO: 35356 - DNA, 25 bp, Saccharomyces pastorianus
gcgcagactgtgacaagggccctat

SEQ ID NO: 35357 - DNA, 25 bp, Saccharomyces pastorianus
ggcgtatctagagacattccctctt

SEQ ID NO: 35358 - DNA, 25 bp, Saccharomyces pastorianus
caattttttggttgtccctgatgta

SEQ ID NO: 35359 - DNA, 25 bp, Saccharomyces pastorianus
tgggacttcgacaacattggcgtat

SEQ ID NO: 35360 - DNA, 25 bp, Saccharomyces pastorianus
gggcgtatagtcaatttaagctgct

SEQ ID NO: 35361 - DNA, 25 bp, Saccharomyces pastorianus
tcacagcgccgtcatcgtgattgat

SEQ ID NO: 35362 - DNA, 25 bp, Saccharomyces pastorianus
ggacgagttcacctttgattacgga

SEQ ID NO: 35363 - DNA, 25 bp, Saccharomyces pastorianus
tttgtttgacggctgtcacagcgcc

SEQ ID NO: 35364 - DNA, 25 bp, Saccharomyces pastorianus
gagcagggccacgtgtttgtttgac

SEQ ID NO: 35365 - DNA, 25 bp, Saccharomyces pastorianus
gggccctattggtcttatatgccag

SEQ ID NO: 35366 - DNA, 25 bp, Saccharomyces pastorianus
gcgcccactagcgacaacaattttt

SEQ ID NO: 35367 - DNA, 25 bp, Saccharomyces pastorianus
agggttgactcttctgatatccaag

SEQ ID NO: 35368 - DNA, 25 bp, Saccharomyces pastorianus
ggagcacataaacccagtgatcacc

SEQ ID NO: 35369 - DNA, 25 bp, Saccharomyces pastorianus
gagcactcgcaagatagggttgact

SEQ ID NO: 35370 - DNA, 25 bp, Saccharomyces pastorianus
gataaacccgaacatgtgtctcaag

SEQ ID NO: 35371 - DNA, 25 bp, Saccharomyces pastorianus
gccaaaacagagcttgttcgagcat

SEQ ID NO: 35372 - DNA, 25 bp, Saccharomyces pastorianus
agaggccttgtcgaggttgcaacaa

SEQ ID NO: 35373 - DNA, 25 bp, Saccharomyces pastorianus
agtgatcaccgaagccgccaaaaca

SEQ ID NO: 35374 - DNA, 25 bp, Saccharomyces pastorianus
aatgggtgatgactcgagatctgat

SEQ ID NO: 35375 - DNA, 25 bp, Saccharomyces pastorianus
gtatgattcgtttagctgaagcaca

SEQ ID NO: 35376 - DNA, 25 bp, Saccharomyces pastorianus
gtctcaagatgatgtcctaccagtt

SEQ ID NO: 35377 - DNA, 25 bp, Saccharomyces pastorianus
gataaggttattgttcttggcgaag

SEQ ID NO: 35378 - DNA, 25 bp, Saccharomyces pastorianus
ccaactgcggcccaattcaaatcag

SEQ ID NO: 35379 - DNA, 25 bp, Saccharomyces pastorianus
gcggcccaattcaaatcagtatatc

SEQ ID NO: 35380 - DNA, 25 bp, Saccharomyces pastorianus
gtgcatacggtgttcaaatagtggg

SEQ ID NO: 35381 - DNA, 25 bp, Saccharomyces pastorianus
aatatggtgcatacggtgttcaaat

SEQ ID NO: 35382 - DNA, 25 bp, Saccharomyces pastorianus
tgtaaaggaaggtctccaaccacca

SEQ ID NO: 35383 - DNA, 25 bp, Saccharomyces pastorianus
gagccttaactttgtgttgaagcct

SEQ ID NO: 35384 - DNA, 25 bp, Saccharomyces pastorianus
aatcttttatcaacaaaggctttgt

SEQ ID NO: 35385 - DNA, 25 bp, Saccharomyces pastorianus
tgttgaagcctacggaagttttatc

SEQ ID NO: 35386 - DNA, 25 bp, Saccharomyces pastorianus
tacacaagtggattagtttctaaag

SEQ ID NO: 35387 - DNA, 25 bp, Saccharomyces pastorianus
gaaggtctccaaccaccaactgcgg

SEQ ID NO: 35388 - DNA, 25 bp, Saccharomyces pastorianus
aaatctctacaaacagagccttaac

SEQ ID NO: 35389 - DNA, 25 bp, Saccharomyces pastorianus
gaatgtatccgattctgtacgtaga

SEQ ID NO: 35390 - DNA, 25 bp, Saccharomyces pastorianus
tctaatactcatcatttgtgcggga

SEQ ID NO: 35391 - DNA, 25 bp, Saccharomyces pastorianus
acttgacttagttagcttccagaat

SEQ ID NO: 35392 - DNA, 25 bp, Saccharomyces pastorianus
ataatggtggtgtagccgtcgttta

SEQ ID NO: 35393 - DNA, 25 bp, Saccharomyces pastorianus
atggaataatgttgacgcctcgaaa

SEQ ID NO: 35394 - DNA, 25 bp, Saccharomyces pastorianus
cgtcgcttttgatctggtcttgtaa

SEQ ID NO: 35395 - DNA, 25 bp, Saccharomyces pastorianus
atgctattgcattgacgtcgctttt

SEQ ID NO: 35396 - DNA, 25 bp, Saccharomyces pastorianus
gtgaatgtactactagccccgaggg

SEQ ID NO: 35397 - DNA, 25 bp, Saccharomyces pastorianus
gtacgtagatggttcacttgactta

SEQ ID NO: 35398 - DNA, 25 bp, Saccharomyces pastorianus
gactacgcggtgaattctgatccta

SEQ ID NO: 35399 - DNA, 25 bp, Saccharomyces pastorianus
aataatcgtctaaccgttgtggaag

SEQ ID NO: 35400 - DNA, 25 bp, Saccharomyces pastorianus
accacgaggctggtcatgcgattat

SEQ ID NO: 35401 - DNA, 25 bp, Saccharomyces pastorianus
gcgcaaccggtacagcaagagctat

SEQ ID NO: 35402 - DNA, 25 bp, Saccharomyces pastorianus
gaatgttgagctccacagacttgct

SEQ ID NO: 35403 - DNA, 25 bp, Saccharomyces pastorianus
agagctatggtgacgcagtatggta

SEQ ID NO: 35404 - DNA, 25 bp, Saccharomyces pastorianus
ggcagagcattaggtattacttttc

SEQ ID NO: 35405 - DNA, 25 bp, Saccharomyces pastorianus
cgatatcgccgacaatgaggtgatt

SEQ ID NO: 35406 - DNA, 25 bp, Saccharomyces pastorianus
aagagagtgtcatgcccggttggat

SEQ ID NO: 35407 - DNA, 25 bp, Saccharomyces pastorianus
gtacgagacacttgatgcgcatgaa

SEQ ID NO: 35408 - DNA, 25 bp, Saccharomyces pastorianus
gatgtgggccctgtaaatttgtcag

SEQ ID NO: 35409 - DNA, 25 bp, Saccharomyces pastorianus
tctgatctacagagcgcaaccggta

SEQ ID NO: 35410 - DNA, 25 bp, Saccharomyces pastorianus
tacaaggctactattttacccaggg

SEQ ID NO: 35411 - DNA, 25 bp, Saccharomyces pastorianus
ttaccagtgactgccgattcaaacg

SEQ ID NO: 35412 - DNA, 25 bp, Saccharomyces pastorianus
gctatctgatctgcaaactttctgt

SEQ ID NO: 35413 - DNA, 25 bp, Saccharomyces pastorianus
gaacccgctgatttactatctgatt

SEQ ID NO: 35414 - DNA, 25 bp, Saccharomyces pastorianus
gattcaaacgtcacactaccttcaa

SEQ ID NO: 35415 - DNA, 25 bp, Saccharomyces pastorianus
gtatacgctactttactctcagcaa

SEQ ID NO: 35416 - DNA, 25 bp, Saccharomyces pastorianus
gtcaattgaccaaccgttaccagtg

SEQ ID NO: 35417 - DNA, 25 bp, Saccharomyces pastorianus
aatcttgtatctaacgaacccgctg

SEQ ID NO: 35418 - DNA, 25 bp, Saccharomyces pastorianus
ggttttcatttagatggttccccat

SEQ ID NO: 35419 - DNA, 25 bp, Saccharomyces pastorianus
taggtcaattacatccgtcttcaac

SEQ ID NO: 35420 - DNA, 25 bp, Saccharomyces pastorianus
aaaacggatgccatagctgccacag

SEQ ID NO: 35421 - DNA, 25 bp, Saccharomyces pastorianus
taagggccaaccaaatctgcaaaca

SEQ ID NO: 35422 - DNA, 25 bp, Saccharomyces pastorianus
tgagaaatgtttcccgtgttgttga

SEQ ID NO: 35423 - DNA, 25 bp, Saccharomyces pastorianus
acggccatgtcaaagttttttcagt

SEQ ID NO: 35424 - DNA, 25 bp, Saccharomyces pastorianus
gttcgaatcccgtataggccacaag

SEQ ID NO: 35425 - DNA, 25 bp, Saccharomyces pastorianus
gaggtaccgtgtattgcacacctgc

SEQ ID NO: 35426 - DNA, 25 bp, Saccharomyces pastorianus
ggaacagagtacagcaccaccagca

SEQ ID NO: 35427 - DNA, 25 bp, Saccharomyces pastorianus
tgctcaaggaactttttcggaacgt

SEQ ID NO: 35428 - DNA, 25 bp, Saccharomyces pastorianus
agcatcgttattttctaccgtcaag

SEQ ID NO: 35429 - DNA, 25 bp, Saccharomyces pastorianus
gcacacctgcccaattgaatgagtt

SEQ ID NO: 35430 - DNA, 25 bp, Saccharomyces pastorianus
ataacagaatcttccgtcctaagga

SEQ ID NO: 35431 - DNA, 25 bp, Saccharomyces pastorianus
cgattatgctactgccgtgggcgaa

SEQ ID NO: 35432 - DNA, 25 bp, Saccharomyces pastorianus
gcacaagtttccgacgtactgtata

SEQ ID NO: 35433 - DNA, 25 bp, Saccharomyces pastorianus
agccggtggccgttatgataactta

SEQ ID NO: 35434 - DNA, 25 bp, Saccharomyces pastorianus
gactggactggttacttgcctgaaa

SEQ ID NO: 35435 - DNA, 25 bp, Saccharomyces pastorianus
atgttggtgttggttctattgcagc

SEQ ID NO: 35436 - DNA, 25 bp, Saccharomyces pastorianus
tgggacgccggtattgaagcagaat

SEQ ID NO: 35437 - DNA, 25 bp, Saccharomyces pastorianus
gatatcgtcgccattgtccaagaaa

SEQ ID NO: 35438 - DNA, 25 bp, Saccharomyces pastorianus
gttaatgcagccgatatcgtcgcca

SEQ ID NO: 35439 - DNA, 25 bp, Saccharomyces pastorianus
gctggttgtcatatcgctgtgattc

SEQ ID NO: 35440 - DNA, 25 bp, Saccharomyces pastorianus
acaagtctttgtcatggcctttggt

SEQ ID NO: 35441 - DNA, 25 bp, Saccharomyces pastorianus
tccgctccaccaaaaaatgcttcag

SEQ ID NO: 35442 - DNA, 25 bp, Saccharomyces pastorianus
acatgtttgctgaagcctctggtaa

SEQ ID NO: 35443 - DNA, 25 bp, Saccharomyces pastorianus
aaatcccatgcgttggtatttcctt

SEQ ID NO: 35444 - DNA, 25 bp, Saccharomyces pastorianus
ttaagatttccttccatccaaagcc

SEQ ID NO: 35445 - DNA, 25 bp, Saccharomyces pastorianus
gaccggtagacatgaaactgcttcc

SEQ ID NO: 35446 - DNA, 25 bp, Saccharomyces pastorianus
aaccgtttgcggtgccattgacagc

SEQ ID NO: 35447 - DNA, 25 bp, Saccharomyces pastorianus
gggaattccaagttggcccatgcac

SEQ ID NO: 35448 - DNA, 25 bp, Saccharomyces pastorianus
ttggcccatgcaccggtattgaatt

SEQ ID NO: 35449 - DNA, 25 bp, Saccharomyces pastorianus
gacccatacttagtcaccggtatca

SEQ ID NO: 35450 - DNA, 25 bp, Saccharomyces pastorianus
gatggcgagatacctcttgcacaga

SEQ ID NO: 35451 - DNA, 25 bp, Saccharomyces pastorianus
gaactttccggtatcaacgccgaag

SEQ ID NO: 35452 - DNA, 25 bp, Saccharomyces pastorianus
gaggtagttccatcagaattccaag

SEQ ID NO: 35453 - DNA, 25 bp, Saccharomyces pastorianus
gagatcttatcgaagcccactacag

SEQ ID NO: 35454 - DNA, 25 bp, Saccharomyces pastorianus
agcctgtctgtatgccggtttggaa

SEQ ID NO: 35455 - DNA, 25 bp, Saccharomyces pastorianus
gtaaataccacgacgtactggccaa

SEQ ID NO: 35456 - DNA, 25 bp, Saccharomyces pastorianus
ggacaatgaccaaacgctaccactt

SEQ ID NO: 35457 - DNA, 25 bp, Saccharomyces pastorianus
gtgagcgcagattcccttaacatta

SEQ ID NO: 35458 - DNA, 25 bp, Saccharomyces pastorianus
aaggccgccctgagagatagcaact

SEQ ID NO: 35459 - DNA, 25 bp, Saccharomyces pastorianus
gacgagctcgcagacaacggtatat

SEQ ID NO: 35460 - DNA, 25 bp, Saccharomyces pastorianus
agcataggctgtcccaatcgcatga

SEQ ID NO: 35461 - DNA, 25 bp, Saccharomyces pastorianus
gcgcagcggttttccaacgatgtga

SEQ ID NO: 35462 - DNA, 25 bp, Saccharomyces pastorianus
agggtcatgaacgaacgcctgctgc

SEQ ID NO: 35463 - DNA, 25 bp, Saccharomyces pastorianus
gattctcttcgaagacgagctcgca

SEQ ID NO: 35464 - DNA, 25 bp, Saccharomyces pastorianus
tgcgggtctacgacacgaggctata

SEQ ID NO: 35465 - DNA, 25 bp, Saccharomyces pastorianus
agccgtgcacgacaaaatcctattc

SEQ ID NO: 35466 - DNA, 25 bp, Saccharomyces pastorianus
gttccattctcctaggcgtgcaaga

SEQ ID NO: 35467 - DNA, 25 bp, Saccharomyces pastorianus
gtctttaccgataatcaacctacca

SEQ ID NO: 35468 - DNA, 25 bp, Saccharomyces pastorianus
aagcaatcctccaaaagtcaccgta

SEQ ID NO: 35469 - DNA, 25 bp, Saccharomyces pastorianus
gaatcctttaagtcgctcagtgagc

SEQ ID NO: 35470 - DNA, 25 bp, Saccharomyces pastorianus
gactcactcgcaatcgctaatggaa

SEQ ID NO: 35471 - DNA, 25 bp, Saccharomyces pastorianus
tgctagtccagctccaattttgaac

SEQ ID NO: 35472 - DNA, 25 bp, Saccharomyces pastorianus
ggacttaacaccacactttgactca

SEQ ID NO: 35473 - DNA, 25 bp, Saccharomyces pastorianus
taacccggttccgatgagtgaaata

SEQ ID NO: 35474 - DNA, 25 bp, Saccharomyces pastorianus
acaacattctcaagggttccattct

SEQ ID NO: 35475 - DNA, 25 bp, Saccharomyces pastorianus
ataccaatcaatgctgctagtccag

SEQ ID NO: 35476 - DNA, 25 bp, Saccharomyces pastorianus
agaggagtctcggtttccagcgtga

SEQ ID NO: 35477 - DNA, 25 bp, Saccharomyces pastorianus
gaatcatggcgttgtttgaaaactc

SEQ ID NO: 35478 - DNA, 25 bp, Saccharomyces pastorianus
gaacggagaccttggcgaattcaac

SEQ ID NO: 35479 - DNA, 25 bp, Saccharomyces pastorianus
aatttttgaccgtgatttgcaagag

SEQ ID NO: 35480 - DNA, 25 bp, Saccharomyces pastorianus
gattatccagcgatttctcagttga

SEQ ID NO: 35481 - DNA, 25 bp, Saccharomyces pastorianus
gaattgccctggagaacggagacct

SEQ ID NO: 35482 - DNA, 25 bp, Saccharomyces pastorianus
gaaaagttatacgaagctgcacaaa

SEQ ID NO: 35483 - DNA, 25 bp, Saccharomyces pastorianus
acgataacgcgtcggaaatcttggg

SEQ ID NO: 35484 - DNA, 25 bp, Saccharomyces pastorianus
gagtttagtttcaccagtatagatg

SEQ ID NO: 35485 - DNA, 25 bp, Saccharomyces pastorianus
gtttaccaaacgcacgcacgaattg

SEQ ID NO: 35486 - DNA, 25 bp, Saccharomyces pastorianus
ggcgaattcaaccaatgccagaata

SEQ ID NO: 35487 - DNA, 25 bp, Saccharomyces pastorianus
gagcaaaacttgatcgacttcatag

SEQ ID NO: 35488 - DNA, 25 bp, Saccharomyces pastorianus
gagcaatggcaaaggatccagcatt

SEQ ID NO: 35489 - DNA, 25 bp, Saccharomyces pastorianus
tctggacaacgagctcttgcaatca

SEQ ID NO: 35490 - DNA, 25 bp, Saccharomyces pastorianus
gggtacccaatcttcattcaacaaa

SEQ ID NO: 35491 - DNA, 25 bp, Saccharomyces pastorianus
aactccagccagaaacgtctcttgg

SEQ ID NO: 35492 - DNA, 25 bp, Saccharomyces pastorianus
agaggtatcctcgaggtttccaaat

SEQ ID NO: 35493 - DNA, 25 bp, Saccharomyces pastorianus
atcttgaaaaaaccggccttctcat

SEQ ID NO: 35494 - DNA, 25 bp, Saccharomyces pastorianus
caaatgaaactttacgtgcagacga

SEQ ID NO: 35495 - DNA, 25 bp, Saccharomyces pastorianus
gcagtagtattgaactccagccaga

SEQ ID NO: 35496 - DNA, 25 bp, Saccharomyces pastorianus
gctcttgcaatcattgggtacccaa

SEQ ID NO: 35497 - DNA, 25 bp, Saccharomyces pastorianus
gaaattgccgaaaaccaggttgagt

SEQ ID NO: 35498 - DNA, 25 bp, Saccharomyces pastorianus
actgcgttagataaactgtacctga

SEQ ID NO: 35499 - DNA, 25 bp, Saccharomyces pastorianus
aattattcttgttggaccaggtgtt

SEQ ID NO: 35500 - DNA, 25 bp, Saccharomyces pastorianus
ctcaccaggtgtcaagtatgttcag

SEQ ID NO: 35501 - DNA, 25 bp, Saccharomyces pastorianus
gagactatttttcggctgtaggtat

SEQ ID NO: 35502 - DNA, 25 bp, Saccharomyces pastorianus
accaggtgttggtttagccccattg

SEQ ID NO: 35503 - DNA, 25 bp, Saccharomyces pastorianus
gtactaattacattgcgctcttgca

SEQ ID NO: 35504 - DNA, 25 bp, Saccharomyces pastorianus
gatttctttgtctacatccttttct

SEQ ID NO: 35505 - DNA, 25 bp, Saccharomyces pastorianus
gccccattgctatccgtgattaaag

SEQ ID NO: 35506 - DNA, 25 bp, Saccharomyces pastorianus
gctattttctttttatgtggctcat

SEQ ID NO: 35507 - DNA, 25 bp, Saccharomyces pastorianus
gtatccgacaacatgagactatttt

SEQ ID NO: 35508 - DNA, 25 bp, Saccharomyces pastorianus
gatacattggaagattggtcccgta

SEQ ID NO: 35509 - DNA, 25 bp, Saccharomyces pastorianus
gtggtcctagagatccaaacatcga

SEQ ID NO: 35510 - DNA, 25 bp, Saccharomyces pastorianus
tacacagcaatattgtctcccaagg

SEQ ID NO: 35511 - DNA, 25 bp, Saccharomyces pastorianus
gctccgattacccaagggtgccgtt

SEQ ID NO: 35512 - DNA, 25 bp, Saccharomyces pastorianus
agatgccatgtctatacaatcctcc

SEQ ID NO: 35513 - DNA, 25 bp, Saccharomyces pastorianus
agctcatcattttcgtccgttgact

SEQ ID NO: 35514 - DNA, 25 bp, Saccharomyces pastorianus
aacaccgccacctttagatgccatg

SEQ ID NO: 35515 - DNA, 25 bp, Saccharomyces pastorianus
gtctcccaaggaaatactgctagca

SEQ ID NO: 35516 - DNA, 25 bp, Saccharomyces pastorianus
ttttgtagcggatagctcctctaat

SEQ ID NO: 35517 - DNA, 25 bp, Saccharomyces pastorianus
gttaactccgttgggtctatgtcat

SEQ ID NO: 35518 - DNA, 25 bp, Saccharomyces pastorianus
gtctatgtcatcgtcgacttcatcg

SEQ ID NO: 35519 - DNA, 25 bp, Saccharomyces pastorianus
gacttcatcgctcagctcatcattt

SEQ ID NO: 35520 - DNA, 25 bp, Saccharomyces pastorianus
aagcaaatgagaccttgggctgcat

SEQ ID NO: 35521 - DNA, 25 bp, Saccharomyces pastorianus
ttgaccccagaggaaaagcaacctt

SEQ ID NO: 35522 - DNA, 25 bp, Saccharomyces pastorianus
tggaaggccttgaccccagaggaaa

SEQ ID NO: 35523 - DNA, 25 bp, Saccharomyces pastorianus
ttatgaggccaaggcgcaggccgac

SEQ ID NO: 35524 - DNA, 25 bp, Saccharomyces pastorianus
gaccccagaggaaaagcaaccttat

SEQ ID NO: 35525 - DNA, 25 bp, Saccharomyces pastorianus
ggccttgaccccagaggaaaagcaa

SEQ ID NO: 35526 - DNA, 25 bp, Saccharomyces pastorianus
gcaaccttatgaggccaaggcgcag

SEQ ID NO: 35527 - DNA, 25 bp, Saccharomyces pastorianus
gtggaaggccttgaccccagaggaa

SEQ ID NO: 35528 - DNA, 25 bp, Saccharomyces pastorianus
aggccttgaccccagaggaaaagca

SEQ ID NO: 35529 - DNA, 25 bp, Saccharomyces pastorianus
aaagcaaccttatgaggccaaggcg

SEQ ID NO: 35530 - DNA, 25 bp, Saccharomyces pastorianus
ggcgcaggccgacaagaagagatac

SEQ ID NO: 35531 - DNA, 25 bp, Saccharomyces pastorianus
agtggaaggccttgaccccagagga

SEQ ID NO: 35532 - DNA, 25 bp, Saccharomyces pastorianus
ctgtcaatcataccgcctgggaata

SEQ ID NO: 35533 - DNA, 25 bp, Saccharomyces pastorianus
gactctgaattcgacgagcacgtaa

SEQ ID NO: 35534 - DNA, 25 bp, Saccharomyces pastorianus
ggaagagtcgttgccattgggttta

SEQ ID NO: 35535 - DNA, 25 bp, Saccharomyces pastorianus
ggatttcagaacttcgtgctactta

SEQ ID NO: 35536 - DNA, 25 bp, Saccharomyces pastorianus
gggtttatctgttcggtatgcttat

SEQ ID NO: 35537 - DNA, 25 bp, Saccharomyces pastorianus
gagcacattagctggtgccatgtca

SEQ ID NO: 35538 - DNA, 25 bp, Saccharomyces pastorianus
aaattctacgcagggcttgattcaa

SEQ ID NO: 35539 - DNA, 25 bp, Saccharomyces pastorianus
gctaatggtccttacatgcggtagt

SEQ ID NO: 35540 - DNA, 25 bp, Saccharomyces pastorianus
tgaactgtatcttctctgcaacgaa

SEQ ID NO: 35541 - DNA, 25 bp, Saccharomyces pastorianus
gtatgcttatgtgttctgtcaatca

SEQ ID NO: 35542 - DNA, 25 bp, Saccharomyces pastorianus
aaatgtcctgcatgcgactctgaat

SEQ ID NO: 35543 - DNA, 25 bp, Saccharomyces pastorianus
ttttggtgcattatccggtaccgcc

SEQ ID NO: 35544 - DNA, 25 bp, Saccharomyces pastorianus
gaagctcacggatgtggtacatatt

SEQ ID NO: 35545 - DNA, 25 bp, Saccharomyces pastorianus
taagcaataatcatggcctggaaag

SEQ ID NO: 35546 - DNA, 25 bp, Saccharomyces pastorianus
atccggtaccgccttatggttgatg

SEQ ID NO: 35547 - DNA, 25 bp, Saccharomyces pastorianus
gttgatgcgtggtttgtcacctaca

SEQ ID NO: 35548 - DNA, 25 bp, Saccharomyces pastorianus
gcttctcccattgagcatgtcagaa

SEQ ID NO: 35549 - DNA, 25 bp, Saccharomyces pastorianus
tgccccagcgaatggtgccactttt

SEQ ID NO: 35550 - DNA, 25 bp, Saccharomyces pastorianus
taccatgttaagagctgccccagcg

SEQ ID NO: 35551 - DNA, 25 bp, Saccharomyces pastorianus
gtgaactcatttttggcttctccca

SEQ ID NO: 35552 - DNA, 25 bp, Saccharomyces pastorianus
acaggtggcctagtgaactcatttt

SEQ ID NO: 35553 - DNA, 25 bp, Saccharomyces pastorianus
aactggttcaggcagcaacgtagaa

SEQ ID NO: 35554 - DNA, 25 bp, Saccharomyces pastorianus
gaaatcgttattcccattacaaaag

SEQ ID NO: 35555 - DNA, 25 bp, Saccharomyces pastorianus
gaattgggtccttttgaatcttgaa

SEQ ID NO: 35556 - DNA, 25 bp, Saccharomyces pastorianus
tagcgacatcgagtgccttcaaagt

SEQ ID NO: 35557 - DNA, 25 bp, Saccharomyces pastorianus
gaaggctccttcttgaattgggtcc

SEQ ID NO: 35558 - DNA, 25 bp, Saccharomyces pastorianus
taccaagcgttaattacccacaaat

SEQ ID NO: 35559 - DNA, 25 bp, Saccharomyces pastorianus
ggacattcccctatacacgaaatta

SEQ ID NO: 35560 - DNA, 25 bp, Saccharomyces pastorianus
atttgttgccgaagccaagtttcaa

SEQ ID NO: 35561 - DNA, 25 bp, Saccharomyces pastorianus
agccaagtttcaatcggacattccc

SEQ ID NO: 35562 - DNA, 25 bp, Saccharomyces pastorianus
taataattttggttccgtcgccact

SEQ ID NO: 35563 - DNA, 25 bp, Saccharomyces pastorianus
ggcaccttatgctccagaagtcaat

SEQ ID NO: 35564 - DNA, 25 bp, Saccharomyces pastorianus
tgaagtttacggtgtggaccccact

SEQ ID NO: 35565 - DNA, 25 bp, Saccharomyces pastorianus
acaaggctggagcaccccattttcg

SEQ ID NO: 35566 - DNA, 25 bp, Saccharomyces pastorianus
cattttcgtcatctaccaacgtcaa

SEQ ID NO: 35567 - DNA, 25 bp, Saccharomyces pastorianus
tatgtatcgaaggtaccgcgctgtt

SEQ ID NO: 35568 - DNA, 25 bp, Saccharomyces pastorianus
ctgcggcctggctatatgtatcgaa

SEQ ID NO: 35569 - DNA, 25 bp, Saccharomyces pastorianus
ggagtccctaagcaaggctgagttt

SEQ ID NO: 35570 - DNA, 25 bp, Saccharomyces pastorianus
taccgcgctgttgaccaaaatccag

SEQ ID NO: 35571 - DNA, 25 bp, Saccharomyces pastorianus
ctatgcaggctcttatgggtaccac

SEQ ID NO: 35572 - DNA, 25 bp, Saccharomyces pastorianus
ataaagtttccgattgtagcagcaa

SEQ ID NO: 35573 - DNA, 25 bp, Saccharomyces pastorianus
gtatgatatccttcgcgacccgaag

SEQ ID NO: 35574 - DNA, 25 bp, Saccharomyces pastorianus
tggaccctaattgccatagtctgcg

SEQ ID NO: 35575 - DNA, 25 bp, Saccharomyces pastorianus
taaagtgatctctcaggcgtatgat

SEQ ID NO: 35576 - DNA, 25 bp, Saccharomyces pastorianus
agaaacaatctactgtccacggccg

SEQ ID NO: 35577 - DNA, 25 bp, Saccharomyces pastorianus
atccacgtacgactctactacgaga

SEQ ID NO: 35578 - DNA, 25 bp, Saccharomyces pastorianus
gactcctcaactgcctttgatatca

SEQ ID NO: 35579 - DNA, 25 bp, Saccharomyces pastorianus
aaatatcctcacaactgcatcctat

SEQ ID NO: 35580 - DNA, 25 bp, Saccharomyces pastorianus
aactcccctgctggtaactacatgg

SEQ ID NO: 35581 - DNA, 25 bp, Saccharomyces pastorianus
ttgtcaagccattatctcataccag

SEQ ID NO: 35582 - DNA, 25 bp, Saccharomyces pastorianus
tctcctaactcttctgtttccgaaa

SEQ ID NO: 35583 - DNA, 25 bp, Saccharomyces pastorianus
gctgccctctttacaggactttcaa

SEQ ID NO: 35584 - DNA, 25 bp, Saccharomyces pastorianus
gcgacatcttcacctggtaagttca

SEQ ID NO: 35585 - DNA, 25 bp, Saccharomyces pastorianus
gagaaaccacttcctcaacattgct

SEQ ID NO: 35586 - DNA, 25 bp, Saccharomyces pastorianus
aactacatggtttccaggccttcaa

SEQ ID NO: 35587 - DNA, 25 bp, Saccharomyces pastorianus
agttatttgaacttggtcgcatcca

SEQ ID NO: 35588 - DNA, 25 bp, Saccharomyces pastorianus
taacgatacgaggtctttctcagac

SEQ ID NO: 35589 - DNA, 25 bp, Saccharomyces pastorianus
agcgcacatgtttctacttggagga

SEQ ID NO: 35590 - DNA, 25 bp, Saccharomyces pastorianus
gtaggttctacacgtacttgacttg

SEQ ID NO: 35591 - DNA, 25 bp, Saccharomyces pastorianus
atgaaatcgtatccgcaagcgcaca

SEQ ID NO: 35592 - DNA, 25 bp, Saccharomyces pastorianus
ggtcgcatccaaaatcatacatcct

SEQ ID NO: 35593 - DNA, 25 bp, Saccharomyces pastorianus
ttttcctggaactggctctttgaat

SEQ ID NO: 35594 - DNA, 25 bp, Saccharomyces pastorianus
ttctgtacatctttacgagcctgga

SEQ ID NO: 35595 - DNA, 25 bp, Saccharomyces pastorianus
gataatccattcactactcgttatg

SEQ ID NO: 35596 - DNA, 25 bp, Saccharomyces pastorianus
agcatggttgcgatgacagttattt

SEQ ID NO: 35597 - DNA, 25 bp, Saccharomyces pastorianus
ggtgcgttaccaaggaattttccat

SEQ ID NO: 35598 - DNA, 25 bp, Saccharomyces pastorianus
caactggtactattggcttcatggt

SEQ ID NO: 35599 - DNA, 25 bp, Saccharomyces pastorianus
gagaattcatgaagcttccttcgtt

SEQ ID NO: 35600 - DNA, 25 bp, Saccharomyces pastorianus
ggtgtgattaccactcaagctgaga

SEQ ID NO: 35601 - DNA, 25 bp, Saccharomyces pastorianus
gatgtaatcatcaccgattcctctg

SEQ ID NO: 35602 - DNA, 25 bp, Saccharomyces pastorianus
gattcctctgatccagaaggtccag

SEQ ID NO: 35603 - DNA, 25 bp, Saccharomyces pastorianus
ggcttcatggtttgttccaaggaca

SEQ ID NO: 35604 - DNA, 25 bp, Saccharomyces pastorianus
gaagttgtcaagcacgaatctgtcg

SEQ ID NO: 35605 - DNA, 25 bp, Saccharomyces pastorianus
gaatctgtcgaggaagcttggttgt

SEQ ID NO: 35606 - DNA, 25 bp, Saccharomyces pastorianus
gcttcttactctcacccaaaagtta

SEQ ID NO: 35607 - DNA, 25 bp, Saccharomyces pastorianus
atgtggatccacctgccaattatta

SEQ ID NO: 35608 - DNA, 25 bp, Saccharomyces pastorianus
aggtccagctgaaagtttgttccaa

SEQ ID NO: 35609 - DNA, 25 bp, Saccharomyces pastorianus
aggacgttagcgataatgccaatga

SEQ ID NO: 35610 - DNA, 25 bp, Saccharomyces pastorianus
ggaaagccaaagtgtaccaccagat

SEQ ID NO: 35611 - DNA, 25 bp, Saccharomyces pastorianus
gaaattttatctgagcccgttattg

SEQ ID NO: 35612 - DNA, 25 bp, Saccharomyces pastorianus
tttgaaccggaccaaacagcttcat

SEQ ID NO: 35613 - DNA, 25 bp, Saccharomyces pastorianus
aatcgcaccatttctaatcaagcaa

SEQ ID NO: 35614 - DNA, 25 bp, Saccharomyces pastorianus
gggcaagcgtcctagcataaccgag

SEQ ID NO: 35615 - DNA, 25 bp, Saccharomyces pastorianus
taaattccttgacgagtaacgccga

SEQ ID NO: 35616 - DNA, 25 bp, Saccharomyces pastorianus
gacctcggatttaatcgcaccattt

SEQ ID NO: 35617 - DNA, 25 bp, Saccharomyces pastorianus
agaaggaggcgttcttcggcgaaca

SEQ ID NO: 35618 - DNA, 25 bp, Saccharomyces pastorianus
aggtaattctggacactatttctga

SEQ ID NO: 35619 - DNA, 25 bp, Saccharomyces pastorianus
aacagcttcattccccaaattaact

SEQ ID NO: 35620 - DNA, 25 bp, Saccharomyces pastorianus
atttttccccagtgagccaatccga

SEQ ID NO: 35621 - DNA, 25 bp, Saccharomyces pastorianus
tatccctatgatgtgcccttaaatt

SEQ ID NO: 35622 - DNA, 25 bp, Saccharomyces pastorianus
cagagtcgaccgttgttggtactat

SEQ ID NO: 35623 - DNA, 25 bp, Saccharomyces pastorianus
tggtatcacaactagaatcctctct

SEQ ID NO: 35624 - DNA, 25 bp, Saccharomyces pastorianus
tgctgattcgccatgtctttataca

SEQ ID NO: 35625 - DNA, 25 bp, Saccharomyces pastorianus
gaaattcgaccttgatactttgttt

SEQ ID NO: 35626 - DNA, 25 bp, Saccharomyces pastorianus
aaagtacctgatgcaacctcttcaa

SEQ ID NO: 35627 - DNA, 25 bp, Saccharomyces pastorianus
tatgaacaatttttagccgctagag

SEQ ID NO: 35628 - DNA, 25 bp, Saccharomyces pastorianus
caatccgatttgtctatccctatga

SEQ ID NO: 35629 - DNA, 25 bp, Saccharomyces pastorianus
ttatctttacctcatccaacgtcaa

SEQ ID NO: 35630 - DNA, 25 bp, Saccharomyces pastorianus
gaatcctctcttttaaattgtcctg

SEQ ID NO: 35631 - DNA, 25 bp, Saccharomyces pastorianus
gggacattcaagatttcgaacacaa

SEQ ID NO: 35632 - DNA, 25 bp, Saccharomyces pastorianus
caggagaaacccctgatcatcgtac

SEQ ID NO: 35633 - DNA, 25 bp, Saccharomyces pastorianus
gataagatcgattccttcggcactt

SEQ ID NO: 35634 - DNA, 25 bp, Saccharomyces pastorianus
aacactaatgatggtaccgttcaaa

SEQ ID NO: 35635 - DNA, 25 bp, Saccharomyces pastorianus
ttcagttgcgttcatatgtttgggt

SEQ ID NO: 35636 - DNA, 25 bp, Saccharomyces pastorianus
ggcacttctaattaccacgcaggag

SEQ ID NO: 35637 - DNA, 25 bp, Saccharomyces pastorianus
gtctcttcggtgactggaacactaa

SEQ ID NO: 35638 - DNA, 25 bp, Saccharomyces pastorianus
aagctaaaatatgtctcttcggtga

SEQ ID NO: 35639 - DNA, 25 bp, Saccharomyces pastorianus
gccaatggctgaagctattttcaaa

SEQ ID NO: 35640 - DNA, 25 bp, Saccharomyces pastorianus
aacttttgtagatcgccaatggctg

SEQ ID NO: 35641 - DNA, 25 bp, Saccharomyces pastorianus
gatggtaccgttcaaactattatag

SEQ ID NO: 35642 - DNA, 25 bp, Saccharomyces pastorianus
tagtaacgtcaaggcccgtgttgtc

SEQ ID NO: 35643 - DNA, 25 bp, Saccharomyces pastorianus
aactttggccgctagtaacgtcaag

SEQ ID NO: 35644 - DNA, 25 bp, Saccharomyces pastorianus
tgaagtcctagctaccacatgttgg

SEQ ID NO: 35645 - DNA, 25 bp, Saccharomyces pastorianus
gacttcttcactttcgacaaacaat

SEQ ID NO: 35646 - DNA, 25 bp, Saccharomyces pastorianus
agatattattttggtcgccaccggt

SEQ ID NO: 35647 - DNA, 25 bp, Saccharomyces pastorianus
gtagttccatcgaaaaggccgccaa

SEQ ID NO: 35648 - DNA, 25 bp, Saccharomyces pastorianus
cggtattgatagattcggtgcttcc

SEQ ID NO: 35649 - DNA, 25 bp, Saccharomyces pastorianus
accggttccgaagtctcattgagtg

SEQ ID NO: 35650 - DNA, 25 bp, Saccharomyces pastorianus
aatcatgtccgttgaagtcctagct

SEQ ID NO: 35651 - DNA, 25 bp, Saccharomyces pastorianus
tagattcggtgcttccggtaaggca

SEQ ID NO: 35652 - DNA, 25 bp, Saccharomyces pastorianus
cgctcaccaatctttcggtattgat

SEQ ID NO: 35653 - DNA, 25 bp, Saccharomyces pastorianus
gtcaagtccgttgaaatgcatcacg

SEQ ID NO: 35654 - DNA, 25 bp, Saccharomyces pastorianus
ttaccactgaagtcaagtccgttga

SEQ ID NO: 35655 - DNA, 25 bp, Saccharomyces pastorianus
tccaggtgacaacgttggtttcaac

SEQ ID NO: 35656 - DNA, 25 bp, Saccharomyces pastorianus
gcatcacgaacaattggaacaaggt

SEQ ID NO: 35657 - DNA, 25 bp, Saccharomyces pastorianus
aatcagaagaggtaacgtctgtggt

SEQ ID NO: 35658 - DNA, 25 bp, Saccharomyces pastorianus
ctgtgccagtcggtagagttgaaac

SEQ ID NO: 35659 - DNA, 25 bp, Saccharomyces pastorianus
gtccgttgaaatgcatcacgaacaa

SEQ ID NO: 35660 - DNA, 25 bp, Saccharomyces pastorianus
tcaagccaggtatggttgttacttt

SEQ ID NO: 35661 - DNA, 25 bp, Saccharomyces pastorianus
gacaacgttggtttcaacgtcaaga

SEQ ID NO: 35662 - DNA, 25 bp, Saccharomyces pastorianus
ggtgttaccactgaagtcaagtccg

SEQ ID NO: 35663 - DNA, 25 bp, Saccharomyces pastorianus
aggtgttccaggtgacaacgttggt

SEQ ID NO: 35664 - DNA, 25 bp, Saccharomyces pastorianus
gtgacattgacaaagtcccggactt

SEQ ID NO: 35665 - DNA, 25 bp, Saccharomyces pastorianus
tcgtggtcatccgttttggtaggaa

SEQ ID NO: 35666 - DNA, 25 bp, Saccharomyces pastorianus
agaatgaacggctcgtggtcatccg

SEQ ID NO: 35667 - DNA, 25 bp, Saccharomyces pastorianus
gtagaccaggctattgtcacggaga

SEQ ID NO: 35668 - DNA, 25 bp, Saccharomyces pastorianus
tactgccccaattgcgtacaggatg

SEQ ID NO: 35669 - DNA, 25 bp, Saccharomyces pastorianus
gagtgaggaacttcgcagccatcta

SEQ ID NO: 35670 - DNA, 25 bp, Saccharomyces pastorianus
agatgtacgatctcacagaccccat

SEQ ID NO: 35671 - DNA, 25 bp, Saccharomyces pastorianus
agaccccatgactgtaatgtttttt

SEQ ID NO: 35672 - DNA, 25 bp, Saccharomyces pastorianus
gaactattatcttcgatcgctgaaa

SEQ ID NO: 35673 - DNA, 25 bp, Saccharomyces pastorianus
gcagccatctacttatgtgacattg

SEQ ID NO: 35674 - DNA, 25 bp, Saccharomyces pastorianus
atggcttctgtgttactgccccaat

SEQ ID NO: 35675 - DNA, 25 bp, Saccharomyces pastorianus
agaagactatcttcgtctacctcag

SEQ ID NO: 35676 - DNA, 25 bp, Saccharomyces pastorianus
aatggcgcaaaacctatcccgacaa

SEQ ID NO: 35677 - DNA, 25 bp, Saccharomyces pastorianus
gttaacgcatgatctgacaccaatt

SEQ ID NO: 35678 - DNA, 25 bp, Saccharomyces pastorianus
tacagaaacaacttcccaccttatt

SEQ ID NO: 35679 - DNA, 25 bp, Saccharomyces pastorianus
gcggccccacaacaagagcttataa

SEQ ID NO: 35680 - DNA, 25 bp, Saccharomyces pastorianus
aatggctaaaccaaccgcgatctgg

SEQ ID NO: 35681 - DNA, 25 bp, Saccharomyces pastorianus
gtggtatgtcttcgagtatctcctc

SEQ ID NO: 35682 - DNA, 25 bp, Saccharomyces pastorianus
ttaaatacgctttacggcatcggcg

SEQ ID NO: 35683 - DNA, 25 bp, Saccharomyces pastorianus
cggagtactcgatcgtctggatgaa

SEQ ID NO: 35684 - DNA, 25 bp, Saccharomyces pastorianus
gacaaaccatatcggattccacagt

SEQ ID NO: 35685 - DNA, 25 bp, Saccharomyces pastorianus
gatgacctatctaacggagtactcg

SEQ ID NO: 35686 - DNA, 25 bp, Saccharomyces pastorianus
tttaaattcaacctacaaccctcat

SEQ ID NO: 35687 - DNA, 25 bp, Saccharomyces pastorianus
aatccattgaactagacccttcgtc

SEQ ID NO: 35688 - DNA, 25 bp, Saccharomyces pastorianus
ttgatgtggccattagtctgctcat

SEQ ID NO: 35689 - DNA, 25 bp, Saccharomyces pastorianus
gtctgctcatcaaggaactatcgga

SEQ ID NO: 35690 - DNA, 25 bp, Saccharomyces pastorianus
gagacagctggcaccgaaatggaag

SEQ ID NO: 35691 - DNA, 25 bp, Saccharomyces pastorianus
gaaactactaatcgcaaaccctgct

SEQ ID NO: 35692 - DNA, 25 bp, Saccharomyces pastorianus
gttaatcatgagttggcgagtccaa

SEQ ID NO: 35693 - DNA, 25 bp, Saccharomyces pastorianus
agacgacatatattcattggtttac

SEQ ID NO: 35694 - DNA, 25 bp, Saccharomyces pastorianus
aaaccctgctggaagtggcagctgt

SEQ ID NO: 35695 - DNA, 25 bp, Saccharomyces pastorianus
attcaccgccaccatgtataattgt

SEQ ID NO: 35696 - DNA, 25 bp, Saccharomyces pastorianus
attgtttgctctcatgttaatcatg

SEQ ID NO: 35697 - DNA, 25 bp, Saccharomyces pastorianus
aggatccctatcactgcagcaaaag

SEQ ID NO: 35698 - DNA, 25 bp, Saccharomyces pastorianus
ggtttaccaatgcaagtcaccacct

SEQ ID NO: 35699 - DNA, 25 bp, Saccharomyces pastorianus
tatcgccaacggtgttgtgtccttg

SEQ ID NO: 35700 - DNA, 25 bp, Saccharomyces pastorianus
ttgtggacccacaacttatcgccaa

SEQ ID NO: 35701 - DNA, 25 bp, Saccharomyces pastorianus
gtgcgcaaaatcttacttacatccc

SEQ ID NO: 35702 - DNA, 25 bp, Saccharomyces pastorianus
agagtgttatggctgcgtccatatt

SEQ ID NO: 35703 - DNA, 25 bp, Saccharomyces pastorianus
aaatctcccattactattgctgttg

SEQ ID NO: 35704 - DNA, 25 bp, Saccharomyces pastorianus
acatccctagattttgttcccattt

SEQ ID NO: 35705 - DNA, 25 bp, Saccharomyces pastorianus
aaagttggccagaccttgcaggtta

SEQ ID NO: 35706 - DNA, 25 bp, Saccharomyces pastorianus
ccacctctgctgaatacactgcaaa

SEQ ID NO: 35707 - DNA, 25 bp, Saccharomyces pastorianus
aacgtcctgctatttaggatcccta

SEQ ID NO: 35708 - DNA, 25 bp, Saccharomyces pastorianus
aatgtttatcgaagagcctaccaga

SEQ ID NO: 35709 - DNA, 25 bp, Saccharomyces pastorianus
gccaaatatgccaggtatgccaggt

SEQ ID NO: 35710 - DNA, 25 bp, Saccharomyces pastorianus
gggtccattatcaaacatagcacaa

SEQ ID NO: 35711 - DNA, 25 bp, Saccharomyces pastorianus
ccaggatgcctggaatgccaaatat

SEQ ID NO: 35712 - DNA, 25 bp, Saccharomyces pastorianus
tgcacccggagccaatgccaggatg

SEQ ID NO: 35713 - DNA, 25 bp, Saccharomyces pastorianus
ctaccagaatggttcgtgtggccaa

SEQ ID NO: 35714 - DNA, 25 bp, Saccharomyces pastorianus
actgaaacaaaatcccggtctaatg

SEQ ID NO: 35715 - DNA, 25 bp, Saccharomyces pastorianus
ggccaaaggttcaggtacatccgta

SEQ ID NO: 35716 - DNA, 25 bp, Saccharomyces pastorianus
tggtttacgttttggattccatgac

SEQ ID NO: 35717 - DNA, 25 bp, Saccharomyces pastorianus
agagtccgacggtagaatgtttatc

SEQ ID NO: 35718 - DNA, 25 bp, Saccharomyces pastorianus
aggtatgccaaaagtatcgccacaa

SEQ ID NO: 35719 - DNA, 25 bp, Saccharomyces pastorianus
tttcatctggaaatgtgccaacaag

SEQ ID NO: 35720 - DNA, 25 bp, Saccharomyces pastorianus
ggaaaatcactgtttcacaacgatt

SEQ ID NO: 35721 - DNA, 25 bp, Saccharomyces pastorianus
gtggctctggcgaggatgacttttc

SEQ ID NO: 35722 - DNA, 25 bp, Saccharomyces pastorianus
ttatatctacacacatgtcatcgaa

SEQ ID NO: 35723 - DNA, 25 bp, Saccharomyces pastorianus
gagacaactggattgattccattaa

SEQ ID NO: 35724 - DNA, 25 bp, Saccharomyces pastorianus
ggatgacttttcgattcttcaggat

SEQ ID NO: 35725 - DNA, 25 bp, Saccharomyces pastorianus
aatgttataaggcagctggctgtca

SEQ ID NO: 35726 - DNA, 25 bp, Saccharomyces pastorianus
gatggcgattgcctattatatctac

SEQ ID NO: 35727 - DNA, 25 bp, Saccharomyces pastorianus
gacaaaagctttctgttcaacgaag

SEQ ID NO: 35728 - DNA, 25 bp, Saccharomyces pastorianus
agcctacgacggatgctacgtggaa

SEQ ID NO: 35729 - DNA, 25 bp, Saccharomyces pastorianus
taatttgttttcagcctacgacgga

SEQ ID NO: 35730 - DNA, 25 bp, Saccharomyces pastorianus
gacacacacgattatgattttctgc

SEQ ID NO: 35731 - DNA, 25 bp, Saccharomyces pastorianus
aagttctggatcatttggactcggg

SEQ ID NO: 35732 - DNA, 25 bp, Saccharomyces pastorianus
ttgggacgatattaactcattagta

SEQ ID NO: 35733 - DNA, 25 bp, Saccharomyces pastorianus
tgagatcacaagttttcgcacaaaa

SEQ ID NO: 35734 - DNA, 25 bp, Saccharomyces pastorianus
gatgtgtatttaaacgattcggaag

SEQ ID NO: 35735 - DNA, 25 bp, Saccharomyces pastorianus
gaaggaatccataacttagtgacta

SEQ ID NO: 35736 - DNA, 25 bp, Saccharomyces pastorianus
ggcagcctggtgaaagaatcgatct

SEQ ID NO: 35737 - DNA, 25 bp, Saccharomyces pastorianus
ggttgacttggatcttgacacacac

SEQ ID NO: 35738 - DNA, 25 bp, Saccharomyces pastorianus
aaagagcaaatttgggcagcctggt

SEQ ID NO: 35739 - DNA, 25 bp, Saccharomyces pastorianus
gtaatgccatcaagttctggatcat

SEQ ID NO: 35740 - DNA, 25 bp, Saccharomyces pastorianus
gtgactaaacatcaagacgcctttt

SEQ ID NO: 35741 - DNA, 25 bp, Saccharomyces pastorianus
aaacgtgtgcggcatgcttgcatac

SEQ ID NO: 35742 - DNA, 25 bp, Saccharomyces pastorianus
attgctctaactgctgcgccattaa

SEQ ID NO: 35743 - DNA, 25 bp, Saccharomyces pastorianus
tctgtactacgcaaagaattcggca

SEQ ID NO: 35744 - DNA, 25 bp, Saccharomyces pastorianus
ttaaccttttaaacgtgtgcggcat

SEQ ID NO: 35745 - DNA, 25 bp, Saccharomyces pastorianus
gaagcaaaggactctgtactacgca

SEQ ID NO: 35746 - DNA, 25 bp, Saccharomyces pastorianus
gcgccattaacctctttggtggtgg

SEQ ID NO: 35747 - DNA, 25 bp, Saccharomyces pastorianus
gaattcggcaaatctcacgggttga

SEQ ID NO: 35748 - DNA, 25 bp, Saccharomyces pastorianus
gtggtggcttctgttagtggattaa

SEQ ID NO: 35749 - DNA, 25 bp, Saccharomyces pastorianus
ttaccctggacccatagagtcaagg

SEQ ID NO: 35750 - DNA, 25 bp, Saccharomyces pastorianus
catgcttgcatacggtgtctgtttg

SEQ ID NO: 35751 - DNA, 25 bp, Saccharomyces pastorianus
aatctattctggctattaccctgga

SEQ ID NO: 35752 - DNA, 25 bp, Saccharomyces pastorianus
gacacccgctactgagggcggagta

SEQ ID NO: 35753 - DNA, 25 bp, Saccharomyces pastorianus
aaagtctggacacccgctactgagg

SEQ ID NO: 35754 - DNA, 25 bp, Saccharomyces pastorianus
tgctcgaaattccataggacgtaac

SEQ ID NO: 35755 - DNA, 25 bp, Saccharomyces pastorianus
aaaggttactttgcagtactgcaac

SEQ ID NO: 35756 - DNA, 25 bp, Saccharomyces pastorianus
tagtgtaagaggtatatggtcccct

SEQ ID NO: 35757 - DNA, 25 bp, Saccharomyces pastorianus
tgacttcaaagaggctagacaaatg

SEQ ID NO: 35758 - DNA, 25 bp, Saccharomyces pastorianus
cagtggagacattctgcgtagaaga

SEQ ID NO: 35759 - DNA, 25 bp, Saccharomyces pastorianus
tgtgtttccatgcaaaaaggttact

SEQ ID NO: 35760 - DNA, 25 bp, Saccharomyces pastorianus
gttgagaaagtctggacacccgcta

SEQ ID NO: 35761 - DNA, 25 bp, Saccharomyces pastorianus
gtgaggaacttgaacattgataatc

SEQ ID NO: 35762 - DNA, 25 bp, Saccharomyces pastorianus
actattgaaagattccagtggagac

SEQ ID NO: 35763 - DNA, 25 bp, Saccharomyces pastorianus
atggacttctatgttgtcatcaaca

SEQ ID NO: 35764 - DNA, 25 bp, Saccharomyces pastorianus
gtattaagtacgatccatccattgg

SEQ ID NO: 35765 - DNA, 25 bp, Saccharomyces pastorianus
cggtattgacgaacatatcgatttg

SEQ ID NO: 35766 - DNA, 25 bp, Saccharomyces pastorianus
cggtatggacttctatgttgtcatc

SEQ ID NO: 35767 - DNA, 25 bp, Saccharomyces pastorianus
gggtattaagtacgatccatccatt

SEQ ID NO: 35768 - DNA, 25 bp, Saccharomyces pastorianus
ggacttctatgttgtcatcaacaga

SEQ ID NO: 35769 - DNA, 25 bp, Saccharomyces pastorianus
gtatggacttctatgttgtcatcaa

SEQ ID NO: 35770 - DNA, 25 bp, Saccharomyces pastorianus
cttctatgttgtcatcaacagacca

SEQ ID NO: 35771 - DNA, 25 bp, Saccharomyces pastorianus
acgaacatatcgatttgggtattaa

SEQ ID NO: 35772 - DNA, 25 bp, Saccharomyces pastorianus
aagtacgatccatccattggtattt

SEQ ID NO: 35773 - DNA, 25 bp, Saccharomyces pastorianus
ttaagtacgatccatccattggtat

SEQ ID NO: 35774 - DNA, 25 bp, Saccharomyces pastorianus
acttctatgttgtcatcaacagacc

SEQ ID NO: 35775 - DNA, 25 bp, Saccharomyces pastorianus
atggacttctatgttgtcatcaaca

SEQ ID NO: 35776 - DNA, 25 bp, Saccharomyces pastorianus
cggtattgacgaacatatcgatttg

SEQ ID NO: 35777 - DNA, 25 bp, Saccharomyces pastorianus
gtctgctaaagctcaaaacactatg

SEQ ID NO: 35778 - DNA, 25 bp, Saccharomyces pastorianus
aaaccactaaggaagacactgtctc

SEQ ID NO: 35779 - DNA, 25 bp, Saccharomyces pastorianus
gaaaagatcgccgttcacgtcaccg

SEQ ID NO: 35780 - DNA, 25 bp, Saccharomyces pastorianus
tcaacagaccaggtgccagagtcgc

SEQ ID NO: 35781 - DNA, 25 bp, Saccharomyces pastorianus
cggtatggacttctatgttgtcatc

SEQ ID NO: 35782 - DNA, 25 bp, Saccharomyces pastorianus
gggtattaagtacgatccatccatt

SEQ ID NO: 35783 - DNA, 25 bp, Saccharomyces pastorianus
acgaacatatcgatttgggtattaa

SEQ ID NO: 35784 - DNA, 25 bp, Saccharomyces pastorianus
aagtacgatccatccattggtattt

SEQ ID NO: 35785 - DNA, 25 bp, Saccharomyces pastorianus
tagattctcgtgctaccgctgggaa

SEQ ID NO: 35786 - DNA, 25 bp, Saccharomyces pastorianus
aaggcgctggtttatccatgggtac

SEQ ID NO: 35787 - DNA, 25 bp, Saccharomyces pastorianus
acattcgcatatggtgtcctggact

SEQ ID NO: 35788 - DNA, 25 bp, Saccharomyces pastorianus
tagctgctgctcatagagatgcctt

SEQ ID NO: 35789 - DNA, 25 bp, Saccharomyces pastorianus
ctagcattcagatttcaagccggta

SEQ ID NO: 35790 - DNA, 25 bp, Saccharomyces pastorianus
gtatatccgttgctgctgcatccaa

SEQ ID NO: 35791 - DNA, 25 bp, Saccharomyces pastorianus
tattgagattaacccattcctattg

SEQ ID NO: 35792 - DNA, 25 bp, Saccharomyces pastorianus
gtcggttcaggtcagacattcgcat

SEQ ID NO: 35793 - DNA, 25 bp, Saccharomyces pastorianus
gtacgatggtttgcggttacactaa

SEQ ID NO: 35794 - DNA, 25 bp, Saccharomyces pastorianus
gttaggttctcaatgtaggctacac

SEQ ID NO: 35795 - DNA, 25 bp, Saccharomyces pastorianus
agagatgccttttctggtggttcca

SEQ ID NO: 35796 - DNA, 25 bp, Saccharomyces pastorianus
acaagctcagcaaatgggccgtcaa

SEQ ID NO: 35797 - DNA, 25 bp, Saccharomyces pastorianus
gaaccaattaattactccttacaga

SEQ ID NO: 35798 - DNA, 25 bp, Saccharomyces pastorianus
ttaatccatccaattcttcgacatc

SEQ ID NO: 35799 - DNA, 25 bp, Saccharomyces pastorianus
gatttcgatggtacttttgattggg

SEQ ID NO: 35800 - DNA, 25 bp, Saccharomyces pastorianus
ttagccgcagtttttgttaacatta

SEQ ID NO: 35801 - DNA, 25 bp, Saccharomyces pastorianus
tgggccgtcaaatacctgtttcaaa

SEQ ID NO: 35802 - DNA, 25 bp, Saccharomyces pastorianus
gagaactaagcctgtttattggtaa

SEQ ID NO: 35803 - DNA, 25 bp, Saccharomyces pastorianus
ctgtggtctccactacaatctaaga

SEQ ID NO: 35804 - DNA, 25 bp, Saccharomyces pastorianus
aaggtccgaaatttattagccgcag

SEQ ID NO: 35805 - DNA, 25 bp, Saccharomyces pastorianus
atgtctcgtgataactctgcaggcg

SEQ ID NO: 35806 - DNA, 25 bp, Saccharomyces pastorianus
gcagattgtgttacttctcggctta

SEQ ID NO: 35807 - DNA, 25 bp, Saccharomyces pastorianus
cttattgatagctctttcgaccacg

SEQ ID NO: 35808 - DNA, 25 bp, Saccharomyces pastorianus
gacggacttgtatgctgtgggactt

SEQ ID NO: 35809 - DNA, 25 bp, Saccharomyces pastorianus
ttgtcttctgtcattcatctcccaa

SEQ ID NO: 35810 - DNA, 25 bp, Saccharomyces pastorianus
ttcgaccacgtttcaacttttgaga

SEQ ID NO: 35811 - DNA, 25 bp, Saccharomyces pastorianus
aatcattagtgtcgcacggatcctc

SEQ ID NO: 35812 - DNA, 25 bp, Saccharomyces pastorianus
tggtattggcagctcatccatacag

SEQ ID NO: 35813 - DNA, 25 bp, Saccharomyces pastorianus
gtgtcagacaaactatctcccatag

SEQ ID NO: 35814 - DNA, 25 bp, Saccharomyces pastorianus
gtagagtactgtgctccagagctta

SEQ ID NO: 35815 - DNA, 25 bp, Saccharomyces pastorianus
gagttagcactcctgtccaaaattt

SEQ ID NO: 35816 - DNA, 25 bp, Saccharomyces pastorianus
ttggcagatttcacttcagcattcc

SEQ ID NO: 35817 - DNA, 25 bp, Saccharomyces pastorianus
gatttcaattcaacggtgtcagaca

SEQ ID NO: 35818 - DNA, 25 bp, Saccharomyces pastorianus
taacaatctcactttatgcttccga

SEQ ID NO: 35819 - DNA, 25 bp, Saccharomyces pastorianus
gagctacttcccatatcttttggag

SEQ ID NO: 35820 - DNA, 25 bp, Saccharomyces pastorianus
gacttacgcgaatgttttgatccca

SEQ ID NO: 35821 - DNA, 25 bp, Saccharomyces pastorianus
gtgcatttggtgtttctgttggatt

SEQ ID NO: 35822 - DNA, 25 bp, Saccharomyces pastorianus
atgcttccgattatgcgagctactt

SEQ ID NO: 35823 - DNA, 25 bp, Saccharomyces pastorianus
gtcgattctttagccacttttacat

SEQ ID NO: 35824 - DNA, 25 bp, Saccharomyces pastorianus
gctcttcaatctatctcgtcattaa

SEQ ID NO: 35825 - DNA, 25 bp, Saccharomyces pastorianus
atgcgtccgtcactggtttgtttac

SEQ ID NO: 35826 - DNA, 25 bp, Saccharomyces pastorianus
tttagtgtctacaactgctgctctt

SEQ ID NO: 35827 - DNA, 25 bp, Saccharomyces pastorianus
gatctcggtaagttcattcccaaca

SEQ ID NO: 35828 - DNA, 25 bp, Saccharomyces pastorianus
agagcattgctacgtatgcgtccgt

SEQ ID NO: 35829 - DNA, 25 bp, Saccharomyces pastorianus
agaaggcctcgtactgaagatggac

SEQ ID NO: 35830 - DNA, 25 bp, Saccharomyces pastorianus
aagaagaagctcaccaccatttatt

SEQ ID NO: 35831 - DNA, 25 bp, Saccharomyces pastorianus
tgctaattcgatggttggttcgcct

SEQ ID NO: 35832 - DNA, 25 bp, Saccharomyces pastorianus
ttggtcgctaggatgcatgcttttt

SEQ ID NO: 35833 - DNA, 25 bp, Saccharomyces pastorianus
gatggacgggcagcattctctgata

SEQ ID NO: 35834 - DNA, 25 bp, Saccharomyces pastorianus
gcaaaatgccgtacttcactgagat

SEQ ID NO: 35835 - DNA, 25 bp, Saccharomyces pastorianus
acttcacagtggactattggtcgct

SEQ ID NO: 35836 - DNA, 25 bp, Saccharomyces pastorianus
gaacttggaacttggtcacgagact

SEQ ID NO: 35837 - DNA, 25 bp, Saccharomyces pastorianus
ttccatgatcgataactcttctgtg

SEQ ID NO: 35838 - DNA, 25 bp, Saccharomyces pastorianus
acggatgcaggctattttgacgatt

SEQ ID NO: 35839 - DNA, 25 bp, Saccharomyces pastorianus
acaccatttagtggttcttccacca

SEQ ID NO: 35840 - DNA, 25 bp, Saccharomyces pastorianus
ggcgagggcgagtccaaactgctac

SEQ ID NO: 35841 - DNA, 25 bp, Saccharomyces pastorianus
aaaagggccgctttgattctagccg

SEQ ID NO: 35842 - DNA, 25 bp, Saccharomyces pastorianus
agcccttgcttttttcgtcatgaag

SEQ ID NO: 35843 - DNA, 25 bp, Saccharomyces pastorianus
tttcctatgtgtgcaataccctcaa

SEQ ID NO: 35844 - DNA, 25 bp, Saccharomyces pastorianus
agagcatgttctgtggtacatcccc

SEQ ID NO: 35845 - DNA, 25 bp, Saccharomyces pastorianus
actgctggtctgatgtgtttcctat

SEQ ID NO: 35846 - DNA, 25 bp, Saccharomyces pastorianus
ttacatggctgtacactacgtcgtg

SEQ ID NO: 35847 - DNA, 25 bp, Saccharomyces pastorianus
aagtgctggtaaggcttcccacaaa

SEQ ID NO: 35848 - DNA, 25 bp, Saccharomyces pastorianus
gatcggctatgttcgcattatcact

SEQ ID NO: 35849 - DNA, 25 bp, Saccharomyces pastorianus
tgggcttggacatcaccagtcatta

SEQ ID NO: 35850 - DNA, 25 bp, Saccharomyces pastorianus
tctaataagtttccccggctatgtt

SEQ ID NO: 35851 - DNA, 25 bp, Saccharomyces pastorianus
gaacccggatttgctgtcttcgaca

SEQ ID NO: 35852 - DNA, 25 bp, Saccharomyces pastorianus
gctcctgtgtttttgatgttcgaat

SEQ ID NO: 35853 - DNA, 25 bp, Saccharomyces pastorianus
ttgggacatttacatctccaccatg

SEQ ID NO: 35854 - DNA, 25 bp, Saccharomyces pastorianus
ggtctctgtagctgcaaaggtcttt

SEQ ID NO: 35855 - DNA, 25 bp, Saccharomyces pastorianus
taaattctgctccttaatgctgctg

SEQ ID NO: 35856 - DNA, 25 bp, Saccharomyces pastorianus
gtacatccagtactatgctcctgtg

SEQ ID NO: 35857 - DNA, 25 bp, Saccharomyces pastorianus
cattggttacttcgtttgggacatt

SEQ ID NO: 35858 - DNA, 25 bp, Saccharomyces pastorianus
gctgctgaacaatatggccctcatg

SEQ ID NO: 35859 - DNA, 25 bp, Saccharomyces pastorianus
gaatcatctccacagtcgtgttctg

SEQ ID NO: 35860 - DNA, 25 bp, Saccharomyces pastorianus
atggtcatcttcttcgtggccagaa

SEQ ID NO: 35861 - DNA, 25 bp, Saccharomyces pastorianus
gtaatctggttctctaccatggtct

SEQ ID NO: 35862 - DNA, 25 bp, Saccharomyces pastorianus
gatagttcacgacgaattccataga

SEQ ID NO: 35863 - DNA, 25 bp, Saccharomyces pastorianus
gccgctgctgcaatgtttatgtcaa

SEQ ID NO: 35864 - DNA, 25 bp, Saccharomyces pastorianus
ttgccccagtatgccacatgataat

SEQ ID NO: 35865 - DNA, 25 bp, Saccharomyces pastorianus
ataccaaagaggaacttgccccagt

SEQ ID NO: 35866 - DNA, 25 bp, Saccharomyces pastorianus
tacttggtcagtccgatagttcacg

SEQ ID NO: 35867 - DNA, 25 bp, Saccharomyces pastorianus
aacgctcgccaagttcttactagag

SEQ ID NO: 35868 - DNA, 25 bp, Saccharomyces pastorianus
tctgatacattatagcggcggatat

SEQ ID NO: 35869 - DNA, 25 bp, Saccharomyces pastorianus
gatatacagtctcgaacgctcgcca

SEQ ID NO: 35870 - DNA, 25 bp, Saccharomyces pastorianus
atgtctgttcatcgcctcgaaatac

SEQ ID NO: 35871 - DNA, 25 bp, Saccharomyces pastorianus
caactggtgggtacgtcatgtctgt

SEQ ID NO: 35872 - DNA, 25 bp, Saccharomyces pastorianus
aatattaccttcattatgcgccgct

SEQ ID NO: 35873 - DNA, 25 bp, Saccharomyces pastorianus
aaaggtagtcctgttcttcttctca

SEQ ID NO: 35874 - DNA, 25 bp, Saccharomyces pastorianus
agacgtacggctctgtactaggctt

SEQ ID NO: 35875 - DNA, 25 bp, Saccharomyces pastorianus
ggccaatgttcaaaacggcgacaat

SEQ ID NO: 35876 - DNA, 25 bp, Saccharomyces pastorianus
agatgtagaaccgattgttcctctt

SEQ ID NO: 35877 - DNA, 25 bp, Saccharomyces pastorianus
catcgccattaatttcaagcagacg

SEQ ID NO: 35878 - DNA, 25 bp, Saccharomyces pastorianus
ttcttctcaagaacctcttcacttt

SEQ ID NO: 35879 - DNA, 25 bp, Saccharomyces pastorianus
gtactaggcttttcttctcaagaca

SEQ ID NO: 35880 - DNA, 25 bp, Saccharomyces pastorianus
gaaacgactccatttccaagaggat

SEQ ID NO: 35881 - DNA, 25 bp, Saccharomyces pastorianus
ggagatatcgaagatcatcgccatt

SEQ ID NO: 35882 - DNA, 25 bp, Saccharomyces pastorianus
ataatgattacgagcccaatggcag

SEQ ID NO: 35883 - DNA, 25 bp, Saccharomyces pastorianus
aatggttgacatcctattcttgcaa

SEQ ID NO: 35884 - DNA, 25 bp, Saccharomyces pastorianus
cgatgtcctcatcggtattccagat

SEQ ID NO: 35885 - DNA, 25 bp, Saccharomyces pastorianus
attgctgatcatggctactgcttac

SEQ ID NO: 35886 - DNA, 25 bp, Saccharomyces pastorianus
ggagtccttgtacgattcattatgc

SEQ ID NO: 35887 - DNA, 25 bp, Saccharomyces pastorianus
aagatgcggaacaactttccctgcc

SEQ ID NO: 35888 - DNA, 25 bp, Saccharomyces pastorianus
acgagctgagcttagacgaccaaga

SEQ ID NO: 35889 - DNA, 25 bp, Saccharomyces pastorianus
gtcacaaggccttacctaattgcat

SEQ ID NO: 35890 - DNA, 25 bp, Saccharomyces pastorianus
gcccgaattgaaaaccgcatgcgct

SEQ ID NO: 35891 - DNA, 25 bp, Saccharomyces pastorianus
gaagcgtccgccaagcagaaattga

SEQ ID NO: 35892 - DNA, 25 bp, Saccharomyces pastorianus
tccagatgagctataccacgaagtt

SEQ ID NO: 35893 - DNA, 25 bp, Saccharomyces pastorianus
aggacaagatcccagcaacattgct

SEQ ID NO: 35894 - DNA, 25 bp, Saccharomyces pastorianus
atgaacttgcaaccgtttggcacag

SEQ ID NO: 35895 - DNA, 25 bp, Saccharomyces pastorianus
atgttgacacattcgggcaagcttc

SEQ ID NO: 35896 - DNA, 25 bp, Saccharomyces pastorianus
ggacgaatccgatgaggcgttctat

SEQ ID NO: 35897 - DNA, 25 bp, Saccharomyces pastorianus
cagaggtggctatcaaaactatcaa

SEQ ID NO: 35898 - DNA, 25 bp, Saccharomyces pastorianus
tgtttatacaccatcttccacagag

SEQ ID NO: 35899 - DNA, 25 bp, Saccharomyces pastorianus
tcaactcaagaggtcgtggtcgtgg

SEQ ID NO: 35900 - DNA, 25 bp, Saccharomyces pastorianus
tgattctcaagataggtcctccaac

SEQ ID NO: 35901 - DNA, 25 bp, Saccharomyces pastorianus
aatcgaaccgcagccacaaggtcga

SEQ ID NO: 35902 - DNA, 25 bp, Saccharomyces pastorianus
gccgtggcggcaattacagaggtaa

SEQ ID NO: 35903 - DNA, 25 bp, Saccharomyces pastorianus
tgccagaccaagattcaactcaaga

SEQ ID NO: 35904 - DNA, 25 bp, Saccharomyces pastorianus
cacagaggccactactgccaggaaa

SEQ ID NO: 35905 - DNA, 25 bp, Saccharomyces pastorianus
ttttgacactatttcaacctccacg

SEQ ID NO: 35906 - DNA, 25 bp, Saccharomyces pastorianus
atgacggatgttatgccccacgaag

SEQ ID NO: 35907 - DNA, 25 bp, Saccharomyces pastorianus
gatgggtatccagacacattgaaaa

SEQ ID NO: 35908 - DNA, 25 bp, Saccharomyces pastorianus
gtaagacaacggaatggcacactca

SEQ ID NO: 35909 - DNA, 25 bp, Saccharomyces pastorianus
agccttttgagcctgttgacttgtt

SEQ ID NO: 35910 - DNA, 25 bp, Saccharomyces pastorianus
aaattatgcaccactctagagacca

SEQ ID NO: 35911 - DNA, 25 bp, Saccharomyces pastorianus
ataaccgcagtgacggtcgctccaa

SEQ ID NO: 35912 - DNA, 25 bp, Saccharomyces pastorianus
gtcgctccaaggttccgtcgaatat

SEQ ID NO: 35913 - DNA, 25 bp, Saccharomyces pastorianus
tactatggccagatctctttttcaa

SEQ ID NO: 35914 - DNA, 25 bp, Saccharomyces pastorianus
acaaggacgcctttgatatgagaaa

SEQ ID NO: 35915 - DNA, 25 bp, Saccharomyces pastorianus
gtcgaatatcgctggcttcaaaatt

SEQ ID NO: 35916 - DNA, 25 bp, Saccharomyces pastorianus
aggctaataatgtcaacctcgatat

SEQ ID NO: 35917 - DNA, 25 bp, Saccharomyces pastorianus
aggctgcttacgtggctgtgttcct

SEQ ID NO: 35918 - DNA, 25 bp, Saccharomyces pastorianus
tgttcctctgggtttccccaatggt

SEQ ID NO: 35919 - DNA, 25 bp, Saccharomyces pastorianus
tgcttacgtggctgtgttcctctgg

SEQ ID NO: 35920 - DNA, 25 bp, Saccharomyces pastorianus
acctcagcaagaagtctccgaagaa

SEQ ID NO: 35921 - DNA, 25 bp, Saccharomyces pastorianus
acgtggctgtgttcctctgggtttc

SEQ ID NO: 35922 - DNA, 25 bp, Saccharomyces pastorianus
gtggctgtgttcctctgggtttccc

SEQ ID NO: 35923 - DNA, 25 bp, Saccharomyces pastorianus
aagcaggctgcttacgtggctgtgt

SEQ ID NO: 35924 - DNA, 25 bp, Saccharomyces pastorianus
ctcagcaagaagtctccgaagaaga

SEQ ID NO: 35925 - DNA, 25 bp, Saccharomyces pastorianus
aaccgagaaaacattgaagcaggct

SEQ ID NO: 35926 - DNA, 25 bp, Saccharomyces pastorianus
gagaaaacattgaagcaggctgctt

SEQ ID NO: 35927 - DNA, 25 bp, Saccharomyces pastorianus
ttacgtggctgtgttcctctgggtt

SEQ ID NO: 35928 - DNA, 25 bp, Saccharomyces pastorianus
ttcgaacgtatttgtctcagggtct

SEQ ID NO: 35929 - DNA, 25 bp, Saccharomyces pastorianus
gaagcacctttgttcttctgtgaag

SEQ ID NO: 35930 - DNA, 25 bp, Saccharomyces pastorianus
gaagttgctgcaaccattttgggtt

SEQ ID NO: 35931 - DNA, 25 bp, Saccharomyces pastorianus
taacaggctctgacaacggtagtat

SEQ ID NO: 35932 - DNA, 25 bp, Saccharomyces pastorianus
gaaccctctctaaatgacatctctg

SEQ ID NO: 35933 - DNA, 25 bp, Saccharomyces pastorianus
gttactgggtgacctatctggttgt

SEQ ID NO: 35934 - DNA, 25 bp, Saccharomyces pastorianus
tctcagggtcttggaacggaacttt

SEQ ID NO: 35935 - DNA, 25 bp, Saccharomyces pastorianus
gttacatctctgtacgctataccat

SEQ ID NO: 35936 - DNA, 25 bp, Saccharomyces pastorianus
gacatctctggtgaaactgacgaag

SEQ ID NO: 35937 - DNA, 25 bp, Saccharomyces pastorianus
acggtagtatatgcctatggtctct

SEQ ID NO: 35938 - DNA, 25 bp, Saccharomyces pastorianus
gatgactctcattttttaacaggct

SEQ ID NO: 35939 - DNA, 25 bp, Saccharomyces pastorianus
gacgattccctggatttactggcag

SEQ ID NO: 35940 - DNA, 25 bp, Saccharomyces pastorianus
agctgaagctttgggtttggacgaa

SEQ ID NO: 35941 - DNA, 25 bp, Saccharomyces pastorianus
tgctgtggccggatattgtactgtt

SEQ ID NO: 35942 - DNA, 25 bp, Saccharomyces pastorianus
gcgtttatctgctttgtgttaggta

SEQ ID NO: 35943 - DNA, 25 bp, Saccharomyces pastorianus
gtgggtctgattttcaatgcgctat

SEQ ID NO: 35944 - DNA, 25 bp, Saccharomyces pastorianus
tcaaggtatagtggccggcgttgtc

SEQ ID NO: 35945 - DNA, 25 bp, Saccharomyces pastorianus
gacagccaaaactcttcactatctt

SEQ ID NO: 35946 - DNA, 25 bp, Saccharomyces pastorianus
gcgttgtctgtaatttcgccacgaa

SEQ ID NO: 35947 - DNA, 25 bp, Saccharomyces pastorianus
tgtatcactctctatggctccttaa

SEQ ID NO: 35948 - DNA, 25 bp, Saccharomyces pastorianus
aaagctgcgcctgagacaaattcta

SEQ ID NO: 35949 - DNA, 25 bp, Saccharomyces pastorianus
aaatcgcatacatcgctgctgtggc

SEQ ID NO: 35950 - DNA, 25 bp, Saccharomyces pastorianus
tacccagaaggatttgttttgcaat

SEQ ID NO: 35951 - DNA, 25 bp, Saccharomyces pastorianus
agaagcaacgaaaccacccattgtg

SEQ ID NO: 35952 - DNA, 25 bp, Saccharomyces pastorianus
gaatttcggaactgaactgaacgta

SEQ ID NO: 35953 - DNA, 25 bp, Saccharomyces pastorianus
ggtcgaaaagcattacgatcccaaa

SEQ ID NO: 35954 - DNA, 25 bp, Saccharomyces pastorianus
acccattgtggtacctatattcgca

SEQ ID NO: 35955 - DNA, 25 bp, Saccharomyces pastorianus
gatgacgatttgattgaccgatata

SEQ ID NO: 35956 - DNA, 25 bp, Saccharomyces pastorianus
gtaatcggtgaaaactgggccataa

SEQ ID NO: 35957 - DNA, 25 bp, Saccharomyces pastorianus
aatgctaaagcaaatcctgccgagg

SEQ ID NO: 35958 - DNA, 25 bp, Saccharomyces pastorianus
agccgctgagctaagatgccatgtt

SEQ ID NO: 35959 - DNA, 25 bp, Saccharomyces pastorianus
tcgcaaattgccacgtgaagaccca

SEQ ID NO: 35960 - DNA, 25 bp, Saccharomyces pastorianus
aagattcaaatctccttcatggtgg

SEQ ID NO: 35961 - DNA, 25 bp, Saccharomyces pastorianus
aatgccattctagccactcaagtaa

SEQ ID NO: 35962 - DNA, 25 bp, Saccharomyces pastorianus
actgccgtcaatgctattctgtcat

SEQ ID NO: 35963 - DNA, 25 bp, Saccharomyces pastorianus
attctgtcatcgcacttgaaggcat

SEQ ID NO: 35964 - DNA, 25 bp, Saccharomyces pastorianus
agatgacaatgaggacggcgctgaa

SEQ ID NO: 35965 - DNA, 25 bp, Saccharomyces pastorianus
gatattattcccattacggcgggag

SEQ ID NO: 35966 - DNA, 25 bp, Saccharomyces pastorianus
tgcccagaagggtgccgtgaaatta

SEQ ID NO: 35967 - DNA, 25 bp, Saccharomyces pastorianus
tgctgacttctctactgccgtcaat

SEQ ID NO: 35968 - DNA, 25 bp, Saccharomyces pastorianus
aaggaccctatcatggccagaaata

SEQ ID NO: 35969 - DNA, 25 bp, Saccharomyces pastorianus
atgacgatggttctgctgacttctc

SEQ ID NO: 35970 - DNA, 25 bp, Saccharomyces pastorianus
ggcatatgacagaaaggaccctatc

SEQ ID NO: 35971 - DNA, 25 bp, Saccharomyces pastorianus
acaacgcttagaaagattgcccaga

SEQ ID NO: 35972 - DNA, 25 bp, Saccharomyces pastorianus
gtgcatgaacatcgacccaagtgag

SEQ ID NO: 35973 - DNA, 25 bp, Saccharomyces pastorianus
gaagtttgacggcttgtttcctcaa

SEQ ID NO: 35974 - DNA, 25 bp, Saccharomyces pastorianus
aaaagactgtcgctgacaccgtcat

SEQ ID NO: 35975 - DNA, 25 bp, Saccharomyces pastorianus
acacttggctgattgtttgagagct

SEQ ID NO: 35976 - DNA, 25 bp, Saccharomyces pastorianus
gttcgccaatcctaaggctgaatgg

SEQ ID NO: 35977 - DNA, 25 bp, Saccharomyces pastorianus
ggttactcctggattgacagtctaa

SEQ ID NO: 35978 - DNA, 25 bp, Saccharomyces pastorianus
tgccgcggaattccataccgaatct

SEQ ID NO: 35979 - DNA, 25 bp, Saccharomyces pastorianus
gaaactaagccatacttgccagaag

SEQ ID NO: 35980 - DNA, 25 bp, Saccharomyces pastorianus
ccgtgttccattcttggacagagaa

SEQ ID NO: 35981 - DNA, 25 bp, Saccharomyces pastorianus
ataccgaatctgtgcagcgtgttaa

SEQ ID NO: 35982 - DNA, 25 bp, Saccharomyces pastorianus
atttccgatgaaatgttcgccaatc

SEQ ID NO: 35983 - DNA, 25 bp, Saccharomyces pastorianus
gtcggtttaattactccaactgtga

SEQ ID NO: 35984 - DNA, 25 bp, Saccharomyces pastorianus
cgagctgtactgtccacgagattat

SEQ ID NO: 35985 - DNA, 25 bp, Saccharomyces pastorianus
ctcggactggcctctcaggaaatga

SEQ ID NO: 35986 - DNA, 25 bp, Saccharomyces pastorianus
gccttggctcatgttttatcactta

SEQ ID NO: 35987 - DNA, 25 bp, Saccharomyces pastorianus
tattcttgactcacaggcagttcgt

SEQ ID NO: 35988 - DNA, 25 bp, Saccharomyces pastorianus
gatacctcattctttcgtggtgaaa

SEQ ID NO: 35989 - DNA, 25 bp, Saccharomyces pastorianus
aaagtttgtctctctaacgagttgg

SEQ ID NO: 35990 - DNA, 25 bp, Saccharomyces pastorianus
gatggatattcatgcctcagagatg

SEQ ID NO: 35991 - DNA, 25 bp, Saccharomyces pastorianus
gttcagcactaaagaccattgggtt

SEQ ID NO: 35992 - DNA, 25 bp, Saccharomyces pastorianus
taacgagttggtcggttctgtaaca

SEQ ID NO: 35993 - DNA, 25 bp, Saccharomyces pastorianus
ggttgtggaaccaccgattcccgag

SEQ ID NO: 35994 - DNA, 25 bp, Saccharomyces pastorianus
agtatcactcaaggttctgctaaca

SEQ ID NO: 35995 - DNA, 25 bp, Saccharomyces pastorianus
gccccagtcgataacattctgcgta

SEQ ID NO: 35996 - DNA, 25 bp, Saccharomyces pastorianus
tgtagagagtctcaagccgctgttg

SEQ ID NO: 35997 - DNA, 25 bp, Saccharomyces pastorianus
gaaaccagtcgtacctattaagcaa

SEQ ID NO: 35998 - DNA, 25 bp, Saccharomyces pastorianus
gatcagttcgttgctgaacaccgag

SEQ ID NO: 35999 - DNA, 25 bp, Saccharomyces pastorianus
gttgcatatgctatagtcaccgatt

SEQ ID NO: 36000 - DNA, 25 bp, Saccharomyces pastorianus
tcgtgtgccatcttcttggccaaga

SEQ ID NO: 36001 - DNA, 25 bp, Saccharomyces pastorianus
ggcatggccgctaattttgttttca

SEQ ID NO: 36002 - DNA, 25 bp, Saccharomyces pastorianus
gagctcactcctgtagaaaccagtc

SEQ ID NO: 36003 - DNA, 25 bp, Saccharomyces pastorianus
tggtcatttccattgctctgatcag

SEQ ID NO: 36004 - DNA, 25 bp, Saccharomyces pastorianus
aactattgtatgtttgccgttgcat

SEQ ID NO: 36005 - DNA, 25 bp, Saccharomyces pastorianus
gtcaatcgttctctaaccaacatca

SEQ ID NO: 36006 - DNA, 25 bp, Saccharomyces pastorianus
gcaagttgggtaacgctgccatctt

SEQ ID NO: 36007 - DNA, 25 bp, Saccharomyces pastorianus
tgtaatggtcgcaccggtatttttc

SEQ ID NO: 36008 - DNA, 25 bp, Saccharomyces pastorianus
ttttctctgattccgatgcgcaaca

SEQ ID NO: 36009 - DNA, 25 bp, Saccharomyces pastorianus
actacgtcaagccagttttctctga

SEQ ID NO: 36010 - DNA, 25 bp, Saccharomyces pastorianus
tagaagccctttaccagtttgatcc

SEQ ID NO: 36011 - DNA, 25 bp, Saccharomyces pastorianus
attgaaatgggatccctccagtgcc

SEQ ID NO: 36012 - DNA, 25 bp, Saccharomyces pastorianus
gtggttctaattcggcttctctgga

SEQ ID NO: 36013 - DNA, 25 bp, Saccharomyces pastorianus
gtcatcctatcaacaacaaccattc

SEQ ID NO: 36014 - DNA, 25 bp, Saccharomyces pastorianus
ggtgacaaggtccagctcttggaaa

SEQ ID NO: 36015 - DNA, 25 bp, Saccharomyces pastorianus
attacaacaaatcccaacccagaat

SEQ ID NO: 36016 - DNA, 25 bp, Saccharomyces pastorianus
tatgaatcacaattgcaccatccaa

SEQ ID NO: 36017 - DNA, 25 bp, Saccharomyces pastorianus
attatccccagctctagtaatactg

SEQ ID NO: 36018 - DNA, 25 bp, Saccharomyces pastorianus
tcccgatcaaaccatagaccctatt

SEQ ID NO: 36019 - DNA, 25 bp, Saccharomyces pastorianus
agccacaggtggtctagtaagatca

SEQ ID NO: 36020 - DNA, 25 bp, Saccharomyces pastorianus
ggattttgaattactctgaccaagg

SEQ ID NO: 36021 - DNA, 25 bp, Saccharomyces pastorianus
gataatagtaactcggctcccgatc

SEQ ID NO: 36022 - DNA, 25 bp, Saccharomyces pastorianus
ggatactgaccttgactccaaagct

SEQ ID NO: 36023 - DNA, 25 bp, Saccharomyces pastorianus
aagctcaccttaatgtcgttgacag

SEQ ID NO: 36024 - DNA, 25 bp, Saccharomyces pastorianus
tagaccctattctgttaagcagcaa

SEQ ID NO: 36025 - DNA, 25 bp, Saccharomyces pastorianus
gaagttacttaattccacattcaag

SEQ ID NO: 36026 - DNA, 25 bp, Saccharomyces pastorianus
ttggagtcgtagcattatccccagc

SEQ ID NO: 36027 - DNA, 25 bp, Saccharomyces pastorianus
aagatcttgtggtggtgctgccttc

SEQ ID NO: 36028 - DNA, 25 bp, Saccharomyces pastorianus
tatatcattgattgttacgtccaat

SEQ ID NO: 36029 - DNA, 25 bp, Saccharomyces pastorianus
aatatgcatccagtgctttggccac

SEQ ID NO: 36030 - DNA, 25 bp, Saccharomyces pastorianus
cattgattgttacgtccaatatgca

SEQ ID NO: 36031 - DNA, 25 bp, Saccharomyces pastorianus
gtgctttggccacaaaggtcttctt

SEQ ID NO: 36032 - DNA, 25 bp, Saccharomyces pastorianus
ttggccacaaaggtcttcttaagat

SEQ ID NO: 36033 - DNA, 25 bp, Saccharomyces pastorianus
tcttaagatcttgtggtggtgctgc

SEQ ID NO: 36034 - DNA, 25 bp, Saccharomyces pastorianus
tatgcatccagtgctttggccacaa

SEQ ID NO: 36035 - DNA, 25 bp, Saccharomyces pastorianus
tgcatccagtgctttggccacaaag

SEQ ID NO: 36036 - DNA, 25 bp, Saccharomyces pastorianus
ggtcttcttaagatcttgtggtggt

SEQ ID NO: 36037 - DNA, 25 bp, Saccharomyces pastorianus
atccagtgctttggccacaaaggtc

SEQ ID NO: 36038 - DNA, 25 bp, Saccharomyces pastorianus
ctgagggcttagacgctgaaacgac

SEQ ID NO: 36039 - DNA, 25 bp, Saccharomyces pastorianus
gtaataagcaactaccctcgaagga

SEQ ID NO: 36040 - DNA, 25 bp, Saccharomyces pastorianus
cgggtgccctgctaggagattgatt

SEQ ID NO: 36041 - DNA, 25 bp, Saccharomyces pastorianus
gccattgtgggatccgtctttgaac

SEQ ID NO: 36042 - DNA, 25 bp, Saccharomyces pastorianus
gaccgcggtggctaagaggcattct

SEQ ID NO: 36043 - DNA, 25 bp, Saccharomyces pastorianus
agaggcactcatgccaattacgctt

SEQ ID NO: 36044 - DNA, 25 bp, Saccharomyces pastorianus
gacaattttgacgaggacaccatac

SEQ ID NO: 36045 - DNA, 25 bp, Saccharomyces pastorianus
tcatgcccttgagcgattttaccga

SEQ ID NO: 36046 - DNA, 25 bp, Saccharomyces pastorianus
gattttaccgatcgcgggccattgt

SEQ ID NO: 36047 - DNA, 25 bp, Saccharomyces pastorianus
accatactccaaagaccgctgattt

SEQ ID NO: 36048 - DNA, 25 bp, Saccharomyces pastorianus
aattacgcttccgtcggacagcatg

SEQ ID NO: 36049 - DNA, 25 bp, Saccharomyces pastorianus
gaatatgccggttatttccaaaagt

SEQ ID NO: 36050 - DNA, 25 bp, Saccharomyces pastorianus
gttggtgtagcctctcaatctttac

SEQ ID NO: 36051 - DNA, 25 bp, Saccharomyces pastorianus
ctgccttacaccctactggtaatat

SEQ ID NO: 36052 - DNA, 25 bp, Saccharomyces pastorianus
gtctgctgtttccaccttaaatgta

SEQ ID NO: 36053 - DNA, 25 bp, Saccharomyces pastorianus
gtgataacccaaccttcaccattta

SEQ ID NO: 36054 - DNA, 25 bp, Saccharomyces pastorianus
ttccaacaagctgtgtctgctgttt

SEQ ID NO: 36055 - DNA, 25 bp, Saccharomyces pastorianus
gtgtgatccagatgatttcccaaca

SEQ ID NO: 36056 - DNA, 25 bp, Saccharomyces pastorianus
atgggaagctgctggctacacgttc

SEQ ID NO: 36057 - DNA, 25 bp, Saccharomyces pastorianus
aatgaatacgtatgctggtggtccc

SEQ ID NO: 36058 - DNA, 25 bp, Saccharomyces pastorianus
cagtggtgctgaacttgggtatctc

SEQ ID NO: 36059 - DNA, 25 bp, Saccharomyces pastorianus
gatgccaagtccatcacgtgtgatc

SEQ ID NO: 36060 - DNA, 25 bp, Saccharomyces pastorianus
ttggccacccaagagttagtcgacc

SEQ ID NO: 36061 - DNA, 25 bp, Saccharomyces pastorianus
gagtgtcctgagtgttgcaaacgtt

SEQ ID NO: 36062 - DNA, 25 bp, Saccharomyces pastorianus
tggtcaactctgtcgctgaaattgt

SEQ ID NO: 36063 - DNA, 25 bp, Saccharomyces pastorianus
gagttagtcgaccaggagttccaca

SEQ ID NO: 36064 - DNA, 25 bp, Saccharomyces pastorianus
atttgccatcgagcttggaatccgt

SEQ ID NO: 36065 - DNA, 25 bp, Saccharomyces pastorianus
ggaatccgtcctatcttacattgag

SEQ ID NO: 36066 - DNA, 25 bp, Saccharomyces pastorianus
agataacgtcttcctatttggtaat

SEQ ID NO: 36067 - DNA, 25 bp, Saccharomyces pastorianus
accgtcgacggtgccaatgtggaaa

SEQ ID NO: 36068 - DNA, 25 bp, Saccharomyces pastorianus
agtgacgactttgaatcctacttgg

SEQ ID NO: 36069 - DNA, 25 bp, Saccharomyces pastorianus
agagtggtcaattctccccagagaa

SEQ ID NO: 36070 - DNA, 25 bp, Saccharomyces pastorianus
gtttcttcagtagtgaccgttgcat

SEQ ID NO: 36071 - DNA, 25 bp, Saccharomyces pastorianus
cagacacagtttccagtatcatcct

SEQ ID NO: 36072 - DNA, 25 bp, Saccharomyces pastorianus
agataccagggcacctcaacagatt

SEQ ID NO: 36073 - DNA, 25 bp, Saccharomyces pastorianus
actgccactgggaccacaatcaaga

SEQ ID NO: 36074 - DNA, 25 bp, Saccharomyces pastorianus
gatattcgaaaaccgtggcaccacc

SEQ ID NO: 36075 - DNA, 25 bp, Saccharomyces pastorianus
agtcgccaagaaccccatgtaataa

SEQ ID NO: 36076 - DNA, 25 bp, Saccharomyces pastorianus
atcagcatcaaaatcctaggtcgta

SEQ ID NO: 36077 - DNA, 25 bp, Saccharomyces pastorianus
gagaaacaatcgcttcgacggcagc

SEQ ID NO: 36078 - DNA, 25 bp, Saccharomyces pastorianus
aaagctcggcaaacgactctagata

SEQ ID NO: 36079 - DNA, 25 bp, Saccharomyces pastorianus
gtatcatcctcgcagaaccaaaatc

SEQ ID NO: 36080 - DNA, 25 bp, Saccharomyces pastorianus
aacgccggtttcaatcatcatcaag

SEQ ID NO: 36081 - DNA, 25 bp, Saccharomyces pastorianus
gacggcagccatgcaggtccaaata

SEQ ID NO: 36082 - DNA, 25 bp, Saccharomyces pastorianus
gtactatgatcccatttgacctgag

SEQ ID NO: 36083 - DNA, 25 bp, Saccharomyces pastorianus
ggatcctttaatttcaacttggcgt

SEQ ID NO: 36084 - DNA, 25 bp, Saccharomyces pastorianus
gaattaagaagagccatccccagat

SEQ ID NO: 36085 - DNA, 25 bp, Saccharomyces pastorianus
gaaactttggtgcaactggactttt

SEQ ID NO: 36086 - DNA, 25 bp, Saccharomyces pastorianus
tatcaattccaggatcccgactgtg

SEQ ID NO: 36087 - DNA, 25 bp, Saccharomyces pastorianus
aactttcagggcatttccagtctta

SEQ ID NO: 36088 - DNA, 25 bp, Saccharomyces pastorianus
catgcgcctttcttgaactttacaa

SEQ ID NO: 36089 - DNA, 25 bp, Saccharomyces pastorianus
tcccaaaacttcgattcactctgta

SEQ ID NO: 36090 - DNA, 25 bp, Saccharomyces pastorianus
atttcagctgctagggttgccttac

SEQ ID NO: 36091 - DNA, 25 bp, Saccharomyces pastorianus
gttgccttacgagccaaagacggat

SEQ ID NO: 36092 - DNA, 25 bp, Saccharomyces pastorianus
gtagtgccataaagtcatgcgcctt

SEQ ID NO: 36093 - DNA, 25 bp, Saccharomyces pastorianus
atgaagatgaagacgttgccgaaaa

SEQ ID NO: 36094 - DNA, 25 bp, Saccharomyces pastorianus
gcaagactcagcaggccaagagctc

SEQ ID NO: 36095 - DNA, 25 bp, Saccharomyces pastorianus
ttcaaggcctccaagaagagagaga

SEQ ID NO: 36096 - DNA, 25 bp, Saccharomyces pastorianus
gcatccaacaagaagcctaccgaag

SEQ ID NO: 36097 - DNA, 25 bp, Saccharomyces pastorianus
agagaagaaccttctttggactggg

SEQ ID NO: 36098 - DNA, 25 bp, Saccharomyces pastorianus
accagatatcgactggagtgctgct

SEQ ID NO: 36099 - DNA, 25 bp, Saccharomyces pastorianus
accgatgctggagttgaagatttac

SEQ ID NO: 36100 - DNA, 25 bp, Saccharomyces pastorianus
gaggttctcagtttggcaagactca

SEQ ID NO: 36101 - DNA, 25 bp, Saccharomyces pastorianus
agacatcgactggagtgctgctaga

SEQ ID NO: 36102 - DNA, 25 bp, Saccharomyces pastorianus
aggccaagagctcccacaaggataa

SEQ ID NO: 36103 - DNA, 25 bp, Saccharomyces pastorianus
aaaatctgcctatgatgttttacgt

SEQ ID NO: 36104 - DNA, 25 bp, Saccharomyces pastorianus
gtggaactcgggttatttcgtctca

SEQ ID NO: 36105 - DNA, 25 bp, Saccharomyces pastorianus
gatagccctagataagcccattcaa

SEQ ID NO: 36106 - DNA, 25 bp, Saccharomyces pastorianus
gttttggcgtaaacatcgcgcaaca

SEQ ID NO: 36107 - DNA, 25 bp, Saccharomyces pastorianus
tttcgtctcaaaaaggtcgctaatc

SEQ ID NO: 36108 - DNA, 25 bp, Saccharomyces pastorianus
atgaaacaggcgctctaccagatga

SEQ ID NO: 36109 - DNA, 25 bp, Saccharomyces pastorianus
ttatacgtgttgatggcggaccaaa

SEQ ID NO: 36110 - DNA, 25 bp, Saccharomyces pastorianus
ctatcggctcagactttatacgtgt

SEQ ID NO: 36111 - DNA, 25 bp, Saccharomyces pastorianus
tcaagcccgacctcatctgtgaagt

SEQ ID NO: 36112 - DNA, 25 bp, Saccharomyces pastorianus
aattccgatagtgtcatagggccag

SEQ ID NO: 36113 - DNA, 25 bp, Saccharomyces pastorianus
gatatgagttacgacctatcggctc

SEQ ID NO: 36114 - DNA, 25 bp, Saccharomyces pastorianus
gcaaggataggctgccccatcaaga

SEQ ID NO: 36115 - DNA, 25 bp, Saccharomyces pastorianus
gggtcaacaaccagttacatcgcaa

SEQ ID NO: 36116 - DNA, 25 bp, Saccharomyces pastorianus
ttggtgctaccggatactatgaatg

SEQ ID NO: 36117 - DNA, 25 bp, Saccharomyces pastorianus
aacagtcttcgagaattacgtagca

SEQ ID NO: 36118 - DNA, 25 bp, Saccharomyces pastorianus
gttacatcgcaagaaggccaatctg

SEQ ID NO: 36119 - DNA, 25 bp, Saccharomyces pastorianus
tatcgatctaccagactccttggag

SEQ ID NO: 36120 - DNA, 25 bp, Saccharomyces pastorianus
gaatgttccgctaagactggctacg

SEQ ID NO: 36121 - DNA, 25 bp, Saccharomyces pastorianus
ctaagactggctacggtgtgagaga

SEQ ID NO: 36122 - DNA, 25 bp, Saccharomyces pastorianus
aatcattcttgtcggttgtaaagtc

SEQ ID NO: 36123 - DNA, 25 bp, Saccharomyces pastorianus
agtttacgtaccaacagtcttcgag

SEQ ID NO: 36124 - DNA, 25 bp, Saccharomyces pastorianus
atctgtagcagaccaaattggtgct

SEQ ID NO: 36125 - DNA, 25 bp, Saccharomyces pastorianus
ttacgtagcagatgtcgaagtcgac

SEQ ID NO: 36126 - DNA, 25 bp, Saccharomyces pastorianus
caaggtttgtgctgagtgattttag

SEQ ID NO: 36127 - DNA, 25 bp, Saccharomyces pastorianus
tcgactcgggtcatgcaaggtttgt

SEQ ID NO: 36128 - DNA, 25 bp, Saccharomyces pastorianus
gcccgtgtactaagggacaacttca

SEQ ID NO: 36129 - DNA, 25 bp, Saccharomyces pastorianus
gattatgcagataccagtttagaga

SEQ ID NO: 36130 - DNA, 25 bp, Saccharomyces pastorianus
agttgaagctaaacacgctgcccaa

SEQ ID NO: 36131 - DNA, 25 bp, Saccharomyces pastorianus
ttcagatttcccataaagaccaaac

SEQ ID NO: 36132 - DNA, 25 bp, Saccharomyces pastorianus
gagatcctgattaaatccttgaagt

SEQ ID NO: 36133 - DNA, 25 bp, Saccharomyces pastorianus
ttgagactagaagcccagttgaagc

SEQ ID NO: 36134 - DNA, 25 bp, Saccharomyces pastorianus
gggttcattaatgcccgtgtactaa

SEQ ID NO: 36135 - DNA, 25 bp, Saccharomyces pastorianus
aacacgctgcccaactacatgagat

SEQ ID NO: 36136 - DNA, 25 bp, Saccharomyces pastorianus
aaaatagatgcgtcgactcgggtca

SEQ ID NO: 36137 - DNA, 25 bp, Saccharomyces pastorianus
ggctaaagtagaacctgcgcaccgt

SEQ ID NO: 36138 - DNA, 25 bp, Saccharomyces pastorianus
ggtttggtcaccatcgacatgctgt

SEQ ID NO: 36139 - DNA, 25 bp, Saccharomyces pastorianus
gtaagtgccgtcttcacaggcagaa

SEQ ID NO: 36140 - DNA, 25 bp, Saccharomyces pastorianus
tgcgcaccgtgcttacaaagaactg

SEQ ID NO: 36141 - DNA, 25 bp, Saccharomyces pastorianus
taagccagatggatgcgtctcagag

SEQ ID NO: 36142 - DNA, 25 bp, Saccharomyces pastorianus
attgacgagcttaacgggatcttga

SEQ ID NO: 36143 - DNA, 25 bp, Saccharomyces pastorianus
gaatttgcctcgaagtacggtgatt

SEQ ID NO: 36144 - DNA, 25 bp, Saccharomyces pastorianus
gacatgctgtcgaaactatccggga

SEQ ID NO: 36145 - DNA, 25 bp, Saccharomyces pastorianus
aaagaactgcgcgtaagtgccgtct

SEQ ID NO: 36146 - DNA, 25 bp, Saccharomyces pastorianus
gcaaaagtattatcagccccagaag

SEQ ID NO: 36147 - DNA, 25 bp, Saccharomyces pastorianus
tcgctctcagttgtcgcttattgaa

SEQ ID NO: 36148 - DNA, 25 bp, Saccharomyces pastorianus
accactgctaagacttctgacgaca

SEQ ID NO: 36149 - DNA, 25 bp, Saccharomyces pastorianus
gaacattccatcgatttacctaaat

SEQ ID NO: 36150 - DNA, 25 bp, Saccharomyces pastorianus
cgacatcaatgtatcctcacgggac

SEQ ID NO: 36151 - DNA, 25 bp, Saccharomyces pastorianus
agccggaagctctctcgttaagaaa

SEQ ID NO: 36152 - DNA, 25 bp, Saccharomyces pastorianus
tgacttgcgtcctgtagagacttct

SEQ ID NO: 36153 - DNA, 25 bp, Saccharomyces pastorianus
gaaaacattcctggccaatggctta

SEQ ID NO: 36154 - DNA, 25 bp, Saccharomyces pastorianus
aaaccgacggtgatgtgagcaagct

SEQ ID NO: 36155 - DNA, 25 bp, Saccharomyces pastorianus
tgaggtcctccaatactgtaccgga

SEQ ID NO: 36156 - DNA, 25 bp, Saccharomyces pastorianus
gcgtccaagaatttgaggtcctcca

SEQ ID NO: 36157 - DNA, 25 bp, Saccharomyces pastorianus
aaaaatccaaaactgagcccgcgct

SEQ ID NO: 36158 - DNA, 25 bp, Saccharomyces pastorianus
aaaagagccctccaaaagcaccaga

SEQ ID NO: 36159 - DNA, 25 bp, Saccharomyces pastorianus
aagtatgttcacgtagctacctgct

SEQ ID NO: 36160 - DNA, 25 bp, Saccharomyces pastorianus
ccaacaccagtttctcaagacgaac

SEQ ID NO: 36161 - DNA, 25 bp, Saccharomyces pastorianus
gcttggactagcacattaccggtac

SEQ ID NO: 36162 - DNA, 25 bp, Saccharomyces pastorianus
agcatatcagagactccaaccccaa

SEQ ID NO: 36163 - DNA, 25 bp, Saccharomyces pastorianus
gaaccagatgagtgcgtctatcggg

SEQ ID NO: 36164 - DNA, 25 bp, Saccharomyces pastorianus
atatttgttactcccgagaatacgc

SEQ ID NO: 36165 - DNA, 25 bp, Saccharomyces pastorianus
aatactaaaggccaaccctgacgct

SEQ ID NO: 36166 - DNA, 25 bp, Saccharomyces pastorianus
gaacaacgccaaagtaagcttctga

SEQ ID NO: 36167 - DNA, 25 bp, Saccharomyces pastorianus
ggctttactatttcatgactggatc

SEQ ID NO: 36168 - DNA, 25 bp, Saccharomyces pastorianus
aaccctgacgctagagcctttatat

SEQ ID NO: 36169 - DNA, 25 bp, Saccharomyces pastorianus
tgctctaaagagtgcatcccctcag

SEQ ID NO: 36170 - DNA, 25 bp, Saccharomyces pastorianus
ctcccggtgatgatgacgccattga

SEQ ID NO: 36171 - DNA, 25 bp, Saccharomyces pastorianus
attggtcctcggtgccacgaacatt

SEQ ID NO: 36172 - DNA, 25 bp, Saccharomyces pastorianus
ggatgcgcttacaggaaccagaggt

SEQ ID NO: 36173 - DNA, 25 bp, Saccharomyces pastorianus
aaaagaacctgaccttgccataaag

SEQ ID NO: 36174 - DNA, 25 bp, Saccharomyces pastorianus
tgactcccagggtgtattggtcctc

SEQ ID NO: 36175 - DNA, 25 bp, Saccharomyces pastorianus
gatttagcggccagaaccactatgt

SEQ ID NO: 36176 - DNA, 25 bp, Saccharomyces pastorianus
aacattccatggcaactagacagtg

SEQ ID NO: 36177 - DNA, 25 bp, Saccharomyces pastorianus
aaggaagattcagggcgccactcat

SEQ ID NO: 36178 - DNA, 25 bp, Saccharomyces pastorianus
aagtcgacaagacctactgttaacg

SEQ ID NO: 36179 - DNA, 25 bp, Saccharomyces pastorianus
agggcgccactcatttcaaggatgt

SEQ ID NO: 36180 - DNA, 25 bp, Saccharomyces pastorianus
aaagatgctctgatgcagccaataa

SEQ ID NO: 36181 - DNA, 25 bp, Saccharomyces pastorianus
catgcgtttgggttcagcgtttcaa

SEQ ID NO: 36182 - DNA, 25 bp, Saccharomyces pastorianus
gaacgggacaatctcaagcctactg

SEQ ID NO: 36183 - DNA, 25 bp, Saccharomyces pastorianus
aatggcaagccaaattcgcgcaact

SEQ ID NO: 36184 - DNA, 25 bp, Saccharomyces pastorianus
aactaccccagacgaatatcctaag

SEQ ID NO: 36185 - DNA, 25 bp, Saccharomyces pastorianus
aagcctactgaaattttgccgccct

SEQ ID NO: 36186 - DNA, 25 bp, Saccharomyces pastorianus
aagttagcgtccgtatctcgtgaaa

SEQ ID NO: 36187 - DNA, 25 bp, Saccharomyces pastorianus
gcttcgcagaggacacgttccaaga

SEQ ID NO: 36188 - DNA, 25 bp, Saccharomyces pastorianus
aagaaagcgtaacctcttcgtctgc

SEQ ID NO: 36189 - DNA, 25 bp, Saccharomyces pastorianus
ttacgactgtgtgcctctgcaatgg

SEQ ID NO: 36190 - DNA, 25 bp, Saccharomyces pastorianus
aaaagggcccaacagcatgcgtttg

SEQ ID NO: 36191 - DNA, 25 bp, Saccharomyces pastorianus
cagagaccactttcggcattgcagc

SEQ ID NO: 36192 - DNA, 25 bp, Saccharomyces pastorianus
ccttggtgctttggctattgcgaac

SEQ ID NO: 36193 - DNA, 25 bp, Saccharomyces pastorianus
gaggatggctcatttcaaggtgaca

SEQ ID NO: 36194 - DNA, 25 bp, Saccharomyces pastorianus
tatacggcgttgagtgcgctgtcga

SEQ ID NO: 36195 - DNA, 25 bp, Saccharomyces pastorianus
gcaagcttttacgtgccttggtgct

SEQ ID NO: 36196 - DNA, 25 bp, Saccharomyces pastorianus
gaatcacacgcagcgcaagctttta

SEQ ID NO: 36197 - DNA, 25 bp, Saccharomyces pastorianus
atattgtatgccaagctccatcaca

SEQ ID NO: 36198 - DNA, 25 bp, Saccharomyces pastorianus
gttgatgttttccatactgtctttg

SEQ ID NO: 36199 - DNA, 25 bp, Saccharomyces pastorianus
gggtacggtgatctagttccaatag

SEQ ID NO: 36200 - DNA, 25 bp, Saccharomyces pastorianus
ggattgtgccctagtgctgaatcac

SEQ ID NO: 36201 - DNA, 25 bp, Saccharomyces pastorianus
gtgcgctgtcgattttgggcgaatt

SEQ ID NO: 36202 - DNA, 25 bp, Saccharomyces pastorianus
gacgccggaagtggttgatcctgca

SEQ ID NO: 36203 - DNA, 25 bp, Saccharomyces pastorianus
caatgtgatggatcgcttgtttgca

SEQ ID NO: 36204 - DNA, 25 bp, Saccharomyces pastorianus
ggatatttcaaacgactcccagtat

SEQ ID NO: 36205 - DNA, 25 bp, Saccharomyces pastorianus
ggaggctctgggatgcttccacgta

SEQ ID NO: 36206 - DNA, 25 bp, Saccharomyces pastorianus
aattttggcacaccgaaacatcgtt

SEQ ID NO: 36207 - DNA, 25 bp, Saccharomyces pastorianus
aggcagtgcctctcacgatatgacg

SEQ ID NO: 36208 - DNA, 25 bp, Saccharomyces pastorianus
gacgtgtctctgatttgaaatacca

SEQ ID NO: 36209 - DNA, 25 bp, Saccharomyces pastorianus
ggaatggactcccttgcaatgatat

SEQ ID NO: 36210 - DNA, 25 bp, Saccharomyces pastorianus
ggacattcaaaacccatctacactg

SEQ ID NO: 36211 - DNA, 25 bp, Saccharomyces pastorianus
gggtattctgtttgtctttccaatg

SEQ ID NO: 36212 - DNA, 25 bp, Saccharomyces pastorianus
tccacgtaccaagagcttctattgc

SEQ ID NO: 36213 - DNA, 25 bp, Saccharomyces pastorianus
atcccagtggtcagtttataggcag

SEQ ID NO: 36214 - DNA, 25 bp, Saccharomyces pastorianus
gacgatccacaatatgccgatttca

SEQ ID NO: 36215 - DNA, 25 bp, Saccharomyces pastorianus
aactatcaagatatggcccgcggtg

SEQ ID NO: 36216 - DNA, 25 bp, Saccharomyces pastorianus
tttaatcatgatccaacccactttg

SEQ ID NO: 36217 - DNA, 25 bp, Saccharomyces pastorianus
tcaacctgtcttgctagattccatc

SEQ ID NO: 36218 - DNA, 25 bp, Saccharomyces pastorianus
gactggctccaaatttttcgttata

SEQ ID NO: 36219 - DNA, 25 bp, Saccharomyces pastorianus
gatggaagatgaccctcaacctgtc

SEQ ID NO: 36220 - DNA, 25 bp, Saccharomyces pastorianus
cgcggtgggtctacaattgtcctga

SEQ ID NO: 36221 - DNA, 25 bp, Saccharomyces pastorianus
gatagatttccgctaccaaggttca

SEQ ID NO: 36222 - DNA, 25 bp, Saccharomyces pastorianus
aaggttcattgacaccgaagccggt

SEQ ID NO: 36223 - DNA, 25 bp, Saccharomyces pastorianus
aacccactttgacatctttctcgat

SEQ ID NO: 36224 - DNA, 25 bp, Saccharomyces pastorianus
tagattccatctccgtcaaaccaaa

SEQ ID NO: 36225 - DNA, 25 bp, Saccharomyces pastorianus
aagccctttctcaagggcctggtca

SEQ ID NO: 36226 - DNA, 25 bp, Saccharomyces pastorianus
gtgatgcaacccgtaaacccgaagc

SEQ ID NO: 36227 - DNA, 25 bp, Saccharomyces pastorianus
cgtgggcgtcaagctcaagttcaac

SEQ ID NO: 36228 - DNA, 25 bp, Saccharomyces pastorianus
aagggcctggtcaaccaccgcgtgg

SEQ ID NO: 36229 - DNA, 25 bp, Saccharomyces pastorianus
aagttcaacaacaccgagtacaggg

SEQ ID NO: 36230 - DNA, 25 bp, Saccharomyces pastorianus
gacagcaacgtgatgcaacccgtaa

SEQ ID NO: 36231 - DNA, 25 bp, Saccharomyces pastorianus
gttgcaggcgtctcgcacggtgtcc

SEQ ID NO: 36232 - DNA, 25 bp, Saccharomyces pastorianus
ggtgtcctgggcgagatcttcatcc

SEQ ID NO: 36233 - DNA, 25 bp, Saccharomyces pastorianus
tgagcgaggccagtgacagcaacgt

SEQ ID NO: 36234 - DNA, 25 bp, Saccharomyces pastorianus
gacaactacttcaacctacaactgg

SEQ ID NO: 36235 - DNA, 25 bp, Saccharomyces pastorianus
ataccgaggagttcgttgcaggcgt

SEQ ID NO: 36236 - DNA, 25 bp, Saccharomyces pastorianus
acaagggctacaacgtgcgcatcat

SEQ ID NO: 36237 - DNA, 25 bp, Saccharomyces pastorianus
gggtgaatccaagctctcgggcaaa

SEQ ID NO: 36238 - DNA, 25 bp, Saccharomyces pastorianus
ggtgcccttcactttcggtgtgaga

SEQ ID NO: 36239 - DNA, 25 bp, Saccharomyces pastorianus
agagagcgttcctgacctgttccgg

SEQ ID NO: 36240 - DNA, 25 bp, Saccharomyces pastorianus
atgagtgggttctttggcctgcaga

SEQ ID NO: 36241 - DNA, 25 bp, Saccharomyces pastorianus
aactcggagggcttcaagatcgcgc

SEQ ID NO: 36242 - DNA, 25 bp, Saccharomyces pastorianus
gcatcgacaaggactggccgctgta

SEQ ID NO: 36243 - DNA, 25 bp, Saccharomyces pastorianus
agggccagtacctcgtgtgcatgga

SEQ ID NO: 36244 - DNA, 25 bp, Saccharomyces pastorianus
agtacctggagaactgcaacccacg

SEQ ID NO: 36245 - DNA, 25 bp, Saccharomyces pastorianus
aggatgatggccagacccttgaccg

SEQ ID NO: 36246 - DNA, 25 bp, Saccharomyces pastorianus
taatcgtccagtacttgcaacagct

SEQ ID NO: 36247 - DNA, 25 bp, Saccharomyces pastorianus
tatgcaatgattctagccccacaca

SEQ ID NO: 36248 - DNA, 25 bp, Saccharomyces pastorianus
gattccgaggatttcgctacttcaa

SEQ ID NO: 36249 - DNA, 25 bp, Saccharomyces pastorianus
ggcaccagaattatttgtccccgaa

SEQ ID NO: 36250 - DNA, 25 bp, Saccharomyces pastorianus
gtgggtctggctctacggttacttc

SEQ ID NO: 36251 - DNA, 25 bp, Saccharomyces pastorianus
gttccatcactttcacttcaaaact

SEQ ID NO: 36252 - DNA, 25 bp, Saccharomyces pastorianus
ttaccgcccgtactataacaatgga

SEQ ID NO: 36253 - DNA, 25 bp, Saccharomyces pastorianus
ggttacttcctaagagcgttccatc

SEQ ID NO: 36254 - DNA, 25 bp, Saccharomyces pastorianus
gaaattaccatcaaggccctgagtg

SEQ ID NO: 36255 - DNA, 25 bp, Saccharomyces pastorianus
gggtatgcgcactttggatccaagc

SEQ ID NO: 36256 - DNA, 25 bp, Saccharomyces pastorianus
cggctgcttgttggatctattctac

SEQ ID NO: 36257 - DNA, 25 bp, Saccharomyces pastorianus
gtcctcgtacttgtaccaacaactg

SEQ ID NO: 36258 - DNA, 25 bp, Saccharomyces pastorianus
aacctgtcacaatttcccgaacgtg

SEQ ID NO: 36259 - DNA, 25 bp, Saccharomyces pastorianus
ttattagtcggaaggatcttgccaa

SEQ ID NO: 36260 - DNA, 25 bp, Saccharomyces pastorianus
gttcaatcaactcacgcaagactat

SEQ ID NO: 36261 - DNA, 25 bp, Saccharomyces pastorianus
aagagggtgcgagcttccccatttt

SEQ ID NO: 36262 - DNA, 25 bp, Saccharomyces pastorianus
gagaaaagcttcaagtcacttagtg

SEQ ID NO: 36263 - DNA, 25 bp, Saccharomyces pastorianus
ggaggcgggctttgaaaatcctgaa

SEQ ID NO: 36264 - DNA, 25 bp, Saccharomyces pastorianus
caaggatgcgtttcaaatgctagat

SEQ ID NO: 36265 - DNA, 25 bp, Saccharomyces pastorianus
atgctaccttgggaaagacattgac

SEQ ID NO: 36266 - DNA, 25 bp, Saccharomyces pastorianus
atcttgccaaaatgtatgctacctt

SEQ ID NO: 36267 - DNA, 25 bp, Saccharomyces pastorianus
agatgacttaaacattcctctcaat

SEQ ID NO: 36268 - DNA, 25 bp, Saccharomyces pastorianus
aagaatggtccaacatggtacccag

SEQ ID NO: 36269 - DNA, 25 bp, Saccharomyces pastorianus
gatatcgaatcatatttctctagga

SEQ ID NO: 36270 - DNA, 25 bp, Saccharomyces pastorianus
aaagaagtgtgttcctgtgtccttg

SEQ ID NO: 36271 - DNA, 25 bp, Saccharomyces pastorianus
aagaagcgcatattttttccccaat

SEQ ID NO: 36272 - DNA, 25 bp, Saccharomyces pastorianus
ttttccccaataatctcgaggtttg

SEQ ID NO: 36273 - DNA, 25 bp, Saccharomyces pastorianus
ccattgtccagcctgatagcggata

SEQ ID NO: 36274 - DNA, 25 bp, Saccharomyces pastorianus
aattgaaggccttaccattgtccag

SEQ ID NO: 36275 - DNA, 25 bp, Saccharomyces pastorianus
ggattgagttattttttcctgaatg

SEQ ID NO: 36276 - DNA, 25 bp, Saccharomyces pastorianus
gatcgctaaggtactttatgatgta

SEQ ID NO: 36277 - DNA, 25 bp, Saccharomyces pastorianus
gcgtaaaatagcttctaacggtcag

SEQ ID NO: 36278 - DNA, 25 bp, Saccharomyces pastorianus
gactttataatgatgacacctgtaa

SEQ ID NO: 36279 - DNA, 25 bp, Saccharomyces pastorianus
ggaaattgccctacaagaactaaca

SEQ ID NO: 36280 - DNA, 25 bp, Saccharomyces pastorianus
gaactgtcgacagatctgcttcaag

SEQ ID NO: 36281 - DNA, 25 bp, Saccharomyces pastorianus
aagatcgacattagcgtctttgatt

SEQ ID NO: 36282 - DNA, 25 bp, Saccharomyces pastorianus
accaggtgtttatcacgttccgtat

SEQ ID NO: 36283 - DNA, 25 bp, Saccharomyces pastorianus
attattgcttccacactaggtccat

SEQ ID NO: 36284 - DNA, 25 bp, Saccharomyces pastorianus
tcgtgataacaagctagtctctgaa

SEQ ID NO: 36285 - DNA, 25 bp, Saccharomyces pastorianus
aacacattcctgcaatttcatgaag

SEQ ID NO: 36286 - DNA, 25 bp, Saccharomyces pastorianus
aatccacactcagcttcgttaataa

SEQ ID NO: 36287 - DNA, 25 bp, Saccharomyces pastorianus
gcttcaagggcagttttcttattca

SEQ ID NO: 36288 - DNA, 25 bp, Saccharomyces pastorianus
gagcttttactaccaagcgaactga

SEQ ID NO: 36289 - DNA, 25 bp, Saccharomyces pastorianus
taggtccatccgctatgcgtttgag

SEQ ID NO: 36290 - DNA, 25 bp, Saccharomyces pastorianus
aaatgtttttgcacgtttgtcgaga

SEQ ID NO: 36291 - DNA, 25 bp, Saccharomyces pastorianus
ttttggctgggctatggcacccgtt

SEQ ID NO: 36292 - DNA, 25 bp, Saccharomyces pastorianus
aatttcattcccgttggtttgcaat

SEQ ID NO: 36293 - DNA, 25 bp, Saccharomyces pastorianus
gcgcatacttgctttggttgaaatc

SEQ ID NO: 36294 - DNA, 25 bp, Saccharomyces pastorianus
caaatggtttgggttcatgctacaa

SEQ ID NO: 36295 - DNA, 25 bp, Saccharomyces pastorianus
gatgcccaaactagagctatcacat

SEQ ID NO: 36296 - DNA, 25 bp, Saccharomyces pastorianus
ggctcaaacatctactgcatggatc

SEQ ID NO: 36297 - DNA, 25 bp, Saccharomyces pastorianus
gtctatttaatgctaaccggtgtta

SEQ ID NO: 36298 - DNA, 25 bp, Saccharomyces pastorianus
gtaatgtgtcgtcaggcgcatactt

SEQ ID NO: 36299 - DNA, 25 bp, Saccharomyces pastorianus
gctttctgtctttctgtttggactt

SEQ ID NO: 36300 - DNA, 25 bp, Saccharomyces pastorianus
gcacccgttttatactcgtggcaaa

SEQ ID NO: 36301 - DNA, 25 bp, Saccharomyces pastorianus
gatatctgtcgtaaggatgcccaaa

SEQ ID NO: 36302 - DNA, 25 bp, Saccharomyces pastorianus
agaagatgcgattttcccagccaat

SEQ ID NO: 36303 - DNA, 25 bp, Saccharomyces pastorianus
atatcgccaagcctgctgtgaaata

SEQ ID NO: 36304 - DNA, 25 bp, Saccharomyces pastorianus
attcggtgattctattccgctggac

SEQ ID NO: 36305 - DNA, 25 bp, Saccharomyces pastorianus
agagaaggccttgcttgatcaaatc

SEQ ID NO: 36306 - DNA, 25 bp, Saccharomyces pastorianus
ataacatattgctgactgcggatca

SEQ ID NO: 36307 - DNA, 25 bp, Saccharomyces pastorianus
attgcacatccttcgtttgttagca

SEQ ID NO: 36308 - DNA, 25 bp, Saccharomyces pastorianus
gaaggatacgtatgacccgaagttt

SEQ ID NO: 36309 - DNA, 25 bp, Saccharomyces pastorianus
atacaaggtctttatccccgatatt

SEQ ID NO: 36310 - DNA, 25 bp, Saccharomyces pastorianus
gcggatcagtttgctaacgctggat

SEQ ID NO: 36311 - DNA, 25 bp, Saccharomyces pastorianus
tagacctctttagtggtgtttccca

SEQ ID NO: 36312 - DNA, 25 bp, Saccharomyces pastorianus
gtttcccacggatttgctgcaagag

SEQ ID NO: 36313 - DNA, 25 bp, Saccharomyces pastorianus
gataattggtcatcttgcctacaac

SEQ ID NO: 36314 - DNA, 25 bp, Saccharomyces pastorianus
atagtcgtcatacccatgatagcat

SEQ ID NO: 36315 - DNA, 25 bp, Saccharomyces pastorianus
taatagttctgctttgcccatcaat

SEQ ID NO: 36316 - DNA, 25 bp, Saccharomyces pastorianus
gagggtctctgatgttttacctaaa

SEQ ID NO: 36317 - DNA, 25 bp, Saccharomyces pastorianus
agttcaaggcaagacaccactctac

SEQ ID NO: 36318 - DNA, 25 bp, Saccharomyces pastorianus
aatcatctttgcttatgtcacccac

SEQ ID NO: 36319 - DNA, 25 bp, Saccharomyces pastorianus
gatggagactttgttatacttggca

SEQ ID NO: 36320 - DNA, 25 bp, Saccharomyces pastorianus
gtttcgatgatttgatagccgctat

SEQ ID NO: 36321 - DNA, 25 bp, Saccharomyces pastorianus
atagcatggcgtcttactctagttc

SEQ ID NO: 36322 - DNA, 25 bp, Saccharomyces pastorianus
acagggaccatgactacgccaaatc

SEQ ID NO: 36323 - DNA, 25 bp, Saccharomyces pastorianus
catccacatcatctacagctaaatc

SEQ ID NO: 36324 - DNA, 25 bp, Saccharomyces pastorianus
gtgcagcccaaactactcaagttca

SEQ ID NO: 36325 - DNA, 25 bp, Saccharomyces pastorianus
agatacgtcctcgacttctacggag

SEQ ID NO: 36326 - DNA, 25 bp, Saccharomyces pastorianus
tctccgcagcagatgtacaacgcaa

SEQ ID NO: 36327 - DNA, 25 bp, Saccharomyces pastorianus
tttcgtcgaccgaatcaagccggat

SEQ ID NO: 36328 - DNA, 25 bp, Saccharomyces pastorianus
actttctcaacgaagggtgctggca

SEQ ID NO: 36329 - DNA, 25 bp, Saccharomyces pastorianus
aacagcagccgaccttcaaagaagt

SEQ ID NO: 36330 - DNA, 25 bp, Saccharomyces pastorianus
aagagcccggacagcaacgagttct

SEQ ID NO: 36331 - DNA, 25 bp, Saccharomyces pastorianus
aagaattgcccttcgacaggcacga

SEQ ID NO: 36332 - DNA, 25 bp, Saccharomyces pastorianus
aggaggtcctcgactgggagcaacc

SEQ ID NO: 36333 - DNA, 25 bp, Saccharomyces pastorianus
gccctggacagcctggacaatgcga

SEQ ID NO: 36334 - DNA, 25 bp, Saccharomyces pastorianus
agttcatgggcaaaccgggtgttct

SEQ ID NO: 36335 - DNA, 25 bp, Saccharomyces pastorianus
tgttggtgggctgatcgtgaacccc

SEQ ID NO: 36336 - DNA, 25 bp, Saccharomyces pastorianus
atcagtgtcgaagaatccttgtcca

SEQ ID NO: 36337 - DNA, 25 bp, Saccharomyces pastorianus
acatcctattcgaaatcctgtaccc

SEQ ID NO: 36338 - DNA, 25 bp, Saccharomyces pastorianus
tctcttgcagttgaagtacttctct

SEQ ID NO: 36339 - DNA, 25 bp, Saccharomyces pastorianus
atcgcccgctgaagtatccataaag

SEQ ID NO: 36340 - DNA, 25 bp, Saccharomyces pastorianus
gactatgggtctgccaagtgcagct

SEQ ID NO: 36341 - DNA, 25 bp, Saccharomyces pastorianus
tatggcgttgatgctgatgtcgaaa

SEQ ID NO: 36342 - DNA, 25 bp, Saccharomyces pastorianus
tgtaccctcctacagacatcagtgt

SEQ ID NO: 36343 - DNA, 25 bp, Saccharomyces pastorianus
gacattctgttgtcgcaccacaggg

SEQ ID NO: 36344 - DNA, 25 bp, Saccharomyces pastorianus
atccttgtccaagggcgacattctg

SEQ ID NO: 36345 - DNA, 25 bp, Saccharomyces pastorianus
gtacttctctaataggacgtctacg

SEQ ID NO: 36346 - DNA, 25 bp, Saccharomyces pastorianus
tgtttgctcaacaggacatcgacag

SEQ ID NO: 36347 - DNA, 25 bp, Saccharomyces pastorianus
gataaagtgattctgggcgctgcta

SEQ ID NO: 36348 - DNA, 25 bp, Saccharomyces pastorianus
ccccaatggatatactgtggccttg

SEQ ID NO: 36349 - DNA, 25 bp, Saccharomyces pastorianus
aaaagcgaaggtgccagcgggtctc

SEQ ID NO: 36350 - DNA, 25 bp, Saccharomyces pastorianus
cacgagcagctggaccaagcggtca

SEQ ID NO: 36351 - DNA, 25 bp, Saccharomyces pastorianus
atatacaagaccaaccacgagcagc

SEQ ID NO: 36352 - DNA, 25 bp, Saccharomyces pastorianus
tgtacgacaacccactgtttgctca

SEQ ID NO: 36353 - DNA, 25 bp, Saccharomyces pastorianus
agagttgagccagcgagccagacaa

SEQ ID NO: 36354 - DNA, 25 bp, Saccharomyces pastorianus
ttcgaggtttttcaccagaggtgcc

SEQ ID NO: 36355 - DNA, 25 bp, Saccharomyces pastorianus
agcccgacctgcagtacgattcgag

SEQ ID NO: 36356 - DNA, 25 bp, Saccharomyces pastorianus
ggtttatgaaactatccgaggcgtt

SEQ ID NO: 36357 - DNA, 25 bp, Saccharomyces pastorianus
ggacacgttgtcttctcatatacag

SEQ ID NO: 36358 - DNA, 25 bp, Saccharomyces pastorianus
ggtgttttgcccaaacttttcgcag

SEQ ID NO: 36359 - DNA, 25 bp, Saccharomyces pastorianus
aacttttcgcaggagcttgcacgga

SEQ ID NO: 36360 - DNA, 25 bp, Saccharomyces pastorianus
ccacaggtgcctactttatcagaag

SEQ ID NO: 36361 - DNA, 25 bp, Saccharomyces pastorianus
gcaggtcccaaaaccctattgacta

SEQ ID NO: 36362 - DNA, 25 bp, Saccharomyces pastorianus
agattgttacatcggtgctaagcaa

SEQ ID NO: 36363 - DNA, 25 bp, Saccharomyces pastorianus
gggcataccatagatttccaaacgg

SEQ ID NO: 36364 - DNA, 25 bp, Saccharomyces pastorianus
aacgggttttcactcaatgcaggtc

SEQ ID NO: 36365 - DNA, 25 bp, Saccharomyces pastorianus
tttacgaactagcatctcctgagat

SEQ ID NO: 36366 - DNA, 25 bp, Saccharomyces pastorianus
catcaggcattacttgacgtttcaa

SEQ ID NO: 36367 - DNA, 25 bp, Saccharomyces pastorianus
atcgatatccacgtgttgcagagac

SEQ ID NO: 36368 - DNA, 25 bp, Saccharomyces pastorianus
tgcagggcccgcaagtatacggctg

SEQ ID NO: 36369 - DNA, 25 bp, Saccharomyces pastorianus
aggacttcctggtcgtggtggacaa

SEQ ID NO: 36370 - DNA, 25 bp, Saccharomyces pastorianus
tggtcactgccagccaagaagagcc

SEQ ID NO: 36371 - DNA, 25 bp, Saccharomyces pastorianus
ggacctcgatccacgtctgggacag

SEQ ID NO: 36372 - DNA, 25 bp, Saccharomyces pastorianus
tagagcccacgctggtgtgcgattt

SEQ ID NO: 36373 - DNA, 25 bp, Saccharomyces pastorianus
agttgttcccgcaagacgccgtggc

SEQ ID NO: 36374 - DNA, 25 bp, Saccharomyces pastorianus
agggttccagctcgagcagcaagaa

SEQ ID NO: 36375 - DNA, 25 bp, Saccharomyces pastorianus
aagaacggccgcatggcgcacgcat

SEQ ID NO: 36376 - DNA, 25 bp, Saccharomyces pastorianus
aacaccaagtgtcagctgcaggcgc

SEQ ID NO: 36377 - DNA, 25 bp, Saccharomyces pastorianus
ggcagtgagcatggcatcctggtca

SEQ ID NO: 36378 - DNA, 25 bp, Saccharomyces pastorianus
tatacgggtgcttccagaacttcgt

SEQ ID NO: 36379 - DNA, 25 bp, Saccharomyces pastorianus
aaggcaggtgggttcggtatcaact

SEQ ID NO: 36380 - DNA, 25 bp, Saccharomyces pastorianus
atgctttccggtaagatcgatgcgt

SEQ ID NO: 36381 - DNA, 25 bp, Saccharomyces pastorianus
ggtatcaacttagtgtgcgccaata

SEQ ID NO: 36382 - DNA, 25 bp, Saccharomyces pastorianus
gattccgattttcatcttatctaca

SEQ ID NO: 36383 - DNA, 25 bp, Saccharomyces pastorianus
gattttctcgttattcactcaagtg

SEQ ID NO: 36384 - DNA, 25 bp, Saccharomyces pastorianus
tttgagactagatgggtccacccaa

SEQ ID NO: 36385 - DNA, 25 bp, Saccharomyces pastorianus
gaacaaactagctctggattcttat

SEQ ID NO: 36386 - DNA, 25 bp, Saccharomyces pastorianus
gcaagctgctgatagagcccatcgt

SEQ ID NO: 36387 - DNA, 25 bp, Saccharomyces pastorianus
gtaactttcccaagacactgtcgaa

SEQ ID NO: 36388 - DNA, 25 bp, Saccharomyces pastorianus
gtttcaatccgcatgacgataggca

SEQ ID NO: 36389 - DNA, 25 bp, Saccharomyces pastorianus
gagcccatcgtgtgggtcagaccaa

SEQ ID NO: 36390 - DNA, 25 bp, Saccharomyces pastorianus
aacatttatcttcatgcaggccaat

SEQ ID NO: 36391 - DNA, 25 bp, Saccharomyces pastorianus
ttatccgtatcatttttcccactgg

SEQ ID NO: 36392 - DNA, 25 bp, Saccharomyces pastorianus
tgatttctcctttcattgcccaaat

SEQ ID NO: 36393 - DNA, 25 bp, Saccharomyces pastorianus
gcaggccaatatgcctcgtttggat

SEQ ID NO: 36394 - DNA, 25 bp, Saccharomyces pastorianus
gcaggatttgccatctccacaaata

SEQ ID NO: 36395 - DNA, 25 bp, Saccharomyces pastorianus
gcccgtgcttttccatgttttgatt

SEQ ID NO: 36396 - DNA, 25 bp, Saccharomyces pastorianus
attcggtgtatttctgggcttatta

SEQ ID NO: 36397 - DNA, 25 bp, Saccharomyces pastorianus
gagtctgttccagttttggcaggat

SEQ ID NO: 36398 - DNA, 25 bp, Saccharomyces pastorianus
tagtggttcttctggctctcttatc

SEQ ID NO: 36399 - DNA, 25 bp, Saccharomyces pastorianus
attggtctcttcattgccattttgc

SEQ ID NO: 36400 - DNA, 25 bp, Saccharomyces pastorianus
atgagactgagccacttcaacaacc

SEQ ID NO: 36401 - DNA, 25 bp, Saccharomyces pastorianus
aataatttacttgtggagcggttca

SEQ ID NO: 36402 - DNA, 25 bp, Saccharomyces pastorianus
acaaaacctccaccgtagagctaat

SEQ ID NO: 36403 - DNA, 25 bp, Saccharomyces pastorianus
gatatcacttgggacttctatagca

SEQ ID NO: 36404 - DNA, 25 bp, Saccharomyces pastorianus
tcagccgaatacttagttgcttcta

SEQ ID NO: 36405 - DNA, 25 bp, Saccharomyces pastorianus
gtatcctcttcagtaataactcagc

SEQ ID NO: 36406 - DNA, 25 bp, Saccharomyces pastorianus
ggtccgttgttgtacctccaaaatg

SEQ ID NO: 36407 - DNA, 25 bp, Saccharomyces pastorianus
acgaagtcgatgaagctgagcagca

SEQ ID NO: 36408 - DNA, 25 bp, Saccharomyces pastorianus
gaatgtgtatatgtggtccgttgtt

SEQ ID NO: 36409 - DNA, 25 bp, Saccharomyces pastorianus
gttcacaattcccaccgattatata

SEQ ID NO: 36410 - DNA, 25 bp, Saccharomyces pastorianus
ggagattggctattaactcttcaga

SEQ ID NO: 36411 - DNA, 25 bp, Saccharomyces pastorianus
gcgctttagcgccagactttgaaga

SEQ ID NO: 36412 - DNA, 25 bp, Saccharomyces pastorianus
gaccatcatgcaaacactagaccaa

SEQ ID NO: 36413 - DNA, 25 bp, Saccharomyces pastorianus
ttccgccctctctattgaattatga

SEQ ID NO: 36414 - DNA, 25 bp, Saccharomyces pastorianus
tccttttgccaatgaccatcatgca

SEQ ID NO: 36415 - DNA, 25 bp, Saccharomyces pastorianus
ggaagcacagccacacgcaaatatt

SEQ ID NO: 36416 - DNA, 25 bp, Saccharomyces pastorianus
aagagcttggtcagttggttccgcc

SEQ ID NO: 36417 - DNA, 25 bp, Saccharomyces pastorianus
gccggattaacctcagacgaaaagt

SEQ ID NO: 36418 - DNA, 25 bp, Saccharomyces pastorianus
tatagatatcagatccgttccggac

SEQ ID NO: 36419 - DNA, 25 bp, Saccharomyces pastorianus
gatcgaggccgaggataacgcaaaa

SEQ ID NO: 36420 - DNA, 25 bp, Saccharomyces pastorianus
aaaaatttcagtcgccactgcatct

SEQ ID NO: 36421 - DNA, 25 bp, Saccharomyces pastorianus
cgttccggactcatcttcaaatgaa

SEQ ID NO: 36422 - DNA, 25 bp, Saccharomyces pastorianus
gtttggagatgacaattctaaccct

SEQ ID NO: 36423 - DNA, 25 bp, Saccharomyces pastorianus
tctaatcacgatgaacttctaactg

SEQ ID NO: 36424 - DNA, 25 bp, Saccharomyces pastorianus
aatactctccattggctaccgaaga

SEQ ID NO: 36425 - DNA, 25 bp, Saccharomyces pastorianus
ctcaaggtggtgatgtttcggctta

SEQ ID NO: 36426 - DNA, 25 bp, Saccharomyces pastorianus
gtcaaaagaactgttggcttcctta

SEQ ID NO: 36427 - DNA, 25 bp, Saccharomyces pastorianus
gatctatgctggtgttaacggtcat

SEQ ID NO: 36428 - DNA, 25 bp, Saccharomyces pastorianus
tttgaccgccttgcctgttattgaa

SEQ ID NO: 36429 - DNA, 25 bp, Saccharomyces pastorianus
gaacaagttccattgatctatgctg

SEQ ID NO: 36430 - DNA, 25 bp, Saccharomyces pastorianus
gaatcttctttcttatcttacctaa

SEQ ID NO: 36431 - DNA, 25 bp, Saccharomyces pastorianus
cattaacgtcggtttgtccgtctct

SEQ ID NO: 36432 - DNA, 25 bp, Saccharomyces pastorianus
aacggtcatttggacaacattgaac

SEQ ID NO: 36433 - DNA, 25 bp, Saccharomyces pastorianus
gaaagagctgctaagttgtccgaaa

SEQ ID NO: 36434 - DNA, 25 bp, Saccharomyces pastorianus
tgcccgccagggatgatgatagact

SEQ ID NO: 36435 - DNA, 25 bp, Saccharomyces pastorianus
aaaaggcagattgttcaggctggat

SEQ ID NO: 36436 - DNA, 25 bp, Saccharomyces pastorianus
agtattgcttcaaattggtcccgcc

SEQ ID NO: 36437 - DNA, 25 bp, Saccharomyces pastorianus
ccacgccgacgatatctttgagcaa

SEQ ID NO: 36438 - DNA, 25 bp, Saccharomyces pastorianus
tgcacatagagttttgcccgccagg

SEQ ID NO: 36439 - DNA, 25 bp, Saccharomyces pastorianus
ttataagttcatatgccacgccgac

SEQ ID NO: 36440 - DNA, 25 bp, Saccharomyces pastorianus
agactaatttccttatatgctgcaa

SEQ ID NO: 36441 - DNA, 25 bp, Saccharomyces pastorianus
gtcccgccacaaccaggatctaaaa

SEQ ID NO: 36442 - DNA, 25 bp, Saccharomyces pastorianus
aagcgcaaacgctactggaagaggc

SEQ ID NO: 36443 - DNA, 25 bp, Saccharomyces pastorianus
gatattgatactagtgtccctgtta

SEQ ID NO: 36444 - DNA, 25 bp, Saccharomyces pastorianus
ggtttgatagacattactgcacata

SEQ ID NO: 36445 - DNA, 25 bp, Saccharomyces pastorianus
tctacgttcaaatctgagtacccgt

SEQ ID NO: 36446 - DNA, 25 bp, Saccharomyces pastorianus
cactgcggcgctgatgtctgctata

SEQ ID NO: 36447 - DNA, 25 bp, Saccharomyces pastorianus
taaggatgggtttctgtacgtgact

SEQ ID NO: 36448 - DNA, 25 bp, Saccharomyces pastorianus
aagagaataatgcttccccctgaaa

SEQ ID NO: 36449 - DNA, 25 bp, Saccharomyces pastorianus
aggccgaatccgaaagaatcgccga

SEQ ID NO: 36450 - DNA, 25 bp, Saccharomyces pastorianus
tcaaatctgagtacccgttcgaaaa

SEQ ID NO: 36451 - DNA, 25 bp, Saccharomyces pastorianus
ggccatctttatttttgttaatgac

SEQ ID NO: 36452 - DNA, 25 bp, Saccharomyces pastorianus
atccgaaagaatcgccgagagattt

SEQ ID NO: 36453 - DNA, 25 bp, Saccharomyces pastorianus
gcgtaagtacctagttcctgctgat

SEQ ID NO: 36454 - DNA, 25 bp, Saccharomyces pastorianus
ttccccctgaaaaggccatctttat

SEQ ID NO: 36455 - DNA, 25 bp, Saccharomyces pastorianus
agtacctagttcctgctgatcttac

SEQ ID NO: 36456 - DNA, 25 bp, Saccharomyces pastorianus
ccgttatgacgacccggcaaatagt

SEQ ID NO: 36457 - DNA, 25 bp, Saccharomyces pastorianus
aaagactaggatcgcctattccagg

SEQ ID NO: 36458 - DNA, 25 bp, Saccharomyces pastorianus
ggcggcttttcaggccaaggtcaaa

SEQ ID NO: 36459 - DNA, 25 bp, Saccharomyces pastorianus
atggcccgctttaccgttatgacga

SEQ ID NO: 36460 - DNA, 25 bp, Saccharomyces pastorianus
gagcgccattgaagctactggacgt

SEQ ID NO: 36461 - DNA, 25 bp, Saccharomyces pastorianus
ggtagaaactagtgctccacaacca

SEQ ID NO: 36462 - DNA, 25 bp, Saccharomyces pastorianus
aggcgagtcattgtcaccggtggaa

SEQ ID NO: 36463 - DNA, 25 bp, Saccharomyces pastorianus
aaatcatgcgttccctgttaaacca

SEQ ID NO: 36464 - DNA, 25 bp, Saccharomyces pastorianus
aaatgcaaacactgacgcgtcgaga

SEQ ID NO: 36465 - DNA, 25 bp, Saccharomyces pastorianus
gggatacctccgttcaaatcagata

SEQ ID NO: 36466 - DNA, 25 bp, Saccharomyces pastorianus
gaagtcttgcgttgtaactccacag

SEQ ID NO: 36467 - DNA, 25 bp, Saccharomyces pastorianus
atcaccaacgtgctcatcgagatca

SEQ ID NO: 36468 - DNA, 25 bp, Saccharomyces pastorianus
gctggctgagtcgatgcttttgaaa

SEQ ID NO: 36469 - DNA, 25 bp, Saccharomyces pastorianus
agaactgtacgtgggtgccatcatt

SEQ ID NO: 36470 - DNA, 25 bp, Saccharomyces pastorianus
tgaacattctgacttcatgtcctcc

SEQ ID NO: 36471 - DNA, 25 bp, Saccharomyces pastorianus
gttcctgatcaacaagcacggcgtc

SEQ ID NO: 36472 - DNA, 25 bp, Saccharomyces pastorianus
attccccaagaacgtcaagctggct

SEQ ID NO: 36473 - DNA, 25 bp, Saccharomyces pastorianus
tcacttgaaaaaatcgcccggcgag

SEQ ID NO: 36474 - DNA, 25 bp, Saccharomyces pastorianus
ttcatgtcctcctccgaagaagaag

SEQ ID NO: 36475 - DNA, 25 bp, Saccharomyces pastorianus
gaggtcctatttccctcacttgaaa

SEQ ID NO: 36476 - DNA, 25 bp, Saccharomyces pastorianus
gtcaggttcaacaccgagaggtcct

SEQ ID NO: 36477 - DNA, 25 bp, Saccharomyces pastorianus
gatcatcgagattcagggcttcccc

SEQ ID NO: 36478 - DNA, 25 bp, Saccharomyces pastorianus
aatactctgtaaggaccggcacttt

SEQ ID NO: 36479 - DNA, 25 bp, Saccharomyces pastorianus
gactcacgaccagttcttggatgaa

SEQ ID NO: 36480 - DNA, 25 bp, Saccharomyces pastorianus
ggatgaagatgctgcgacgcccgaa

SEQ ID NO: 36481 - DNA, 25 bp, Saccharomyces pastorianus
gaacattgggtctgttgtccaacac

SEQ ID NO: 36482 - DNA, 25 bp, Saccharomyces pastorianus
ggcactttcgcatttgttttcattg

SEQ ID NO: 36483 - DNA, 25 bp, Saccharomyces pastorianus
gttttcattgctattcttctcgtca

SEQ ID NO: 36484 - DNA, 25 bp, Saccharomyces pastorianus
gacgctagcgacttgtctattttca

SEQ ID NO: 36485 - DNA, 25 bp, Saccharomyces pastorianus
taccgcgagcgatattcctgatgca

SEQ ID NO: 36486 - DNA, 25 bp, Saccharomyces pastorianus
agagtgggtccaagctattcgtcgc

SEQ ID NO: 36487 - DNA, 25 bp, Saccharomyces pastorianus
aatcagggttttacatcttctcgaa

SEQ ID NO: 36488 - DNA, 25 bp, Saccharomyces pastorianus
agacgacttgcttgccgggcatgat

SEQ ID NO: 36489 - DNA, 25 bp, Saccharomyces pastorianus
gaagagcctacagcgcgataccttt

SEQ ID NO: 36490 - DNA, 25 bp, Saccharomyces pastorianus
gccaattcttaatggtcaacctatt

SEQ ID NO: 36491 - DNA, 25 bp, Saccharomyces pastorianus
aatccgatgttgtaccagacactga

SEQ ID NO: 36492 - DNA, 25 bp, Saccharomyces pastorianus
gcaattttttggttgttctgactga

SEQ ID NO: 36493 - DNA, 25 bp, Saccharomyces pastorianus
tcggccaatggctctatttatatac

SEQ ID NO: 36494 - DNA, 25 bp, Saccharomyces pastorianus
tatactctcgtacaatggccagcag

SEQ ID NO: 36495 - DNA, 25 bp, Saccharomyces pastorianus
gcgatacctttcacaatccgatgtt

SEQ ID NO: 36496 - DNA, 25 bp, Saccharomyces pastorianus
gaaagatccattcaattcgattctg

SEQ ID NO: 36497 - DNA, 25 bp, Saccharomyces pastorianus
aagtgttggtgtttagcttcggcca

SEQ ID NO: 36498 - DNA, 25 bp, Saccharomyces pastorianus
ggaatgtacccattttgccaattct

SEQ ID NO: 36499 - DNA, 25 bp, Saccharomyces pastorianus
aagcacttctagacaatccaaccag

SEQ ID NO: 36500 - DNA, 25 bp, Saccharomyces pastorianus
acgagcgaggcgagtttcaccctaa

SEQ ID NO: 36501 - DNA, 25 bp, Saccharomyces pastorianus
gggccgatgccaatgacaccagtaa

SEQ ID NO: 36502 - DNA, 25 bp, Saccharomyces pastorianus
atgaccttgggtactacgacgagcg

SEQ ID NO: 36503 - DNA, 25 bp, Saccharomyces pastorianus
gcaacccgctgatgattatgttcct

SEQ ID NO: 36504 - DNA, 25 bp, Saccharomyces pastorianus
ttcctttggatcttcatcatggcag

SEQ ID NO: 36505 - DNA, 25 bp, Saccharomyces pastorianus
gtggtccatcaaactaactcttcag

SEQ ID NO: 36506 - DNA, 25 bp, Saccharomyces pastorianus
ggcaagtcccggttgcaagtgacat

SEQ ID NO: 36507 - DNA, 25 bp, Saccharomyces pastorianus
tacaggcagtctcagcagcaacaaa

SEQ ID NO: 36508 - DNA, 25 bp, Saccharomyces pastorianus
gggctactatggctattcctttgga

SEQ ID NO: 36509 - DNA, 25 bp, Saccharomyces pastorianus
gcaagagctttcgtcagagtctgtt

SEQ ID NO: 36510 - DNA, 25 bp, Saccharomyces pastorianus
gtctgttaactctttggaacggcct

SEQ ID NO: 36511 - DNA, 25 bp, Saccharomyces pastorianus
aggcgtggcttatatgggcttttgc

SEQ ID NO: 36512 - DNA, 25 bp, Saccharomyces pastorianus
gcattgctggcatttgatctctata

SEQ ID NO: 36513 - DNA, 25 bp, Saccharomyces pastorianus
aatgtctgtgtgttggtgtctaccg

SEQ ID NO: 36514 - DNA, 25 bp, Saccharomyces pastorianus
gttggcttacattttattcgctatt

SEQ ID NO: 36515 - DNA, 25 bp, Saccharomyces pastorianus
gctggcaatagtttctgtcggagtt

SEQ ID NO: 36516 - DNA, 25 bp, Saccharomyces pastorianus
gggttcttcactttggctctagctg

SEQ ID NO: 36517 - DNA, 25 bp, Saccharomyces pastorianus
gtcgcatctgtatttgctggcaata

SEQ ID NO: 36518 - DNA, 25 bp, Saccharomyces pastorianus
ctgctatcccattcgtactttataa

SEQ ID NO: 36519 - DNA, 25 bp, Saccharomyces pastorianus
gagaatcattataccccgtttcaaa

SEQ ID NO: 36520 - DNA, 25 bp, Saccharomyces pastorianus
gagtttgtttgcttgtgctttccca

SEQ ID NO: 36521 - DNA, 25 bp, Saccharomyces pastorianus
cgcagttgcttacggttgtttctat

SEQ ID NO: 36522 - DNA, 25 bp, Saccharomyces pastorianus
gagagtcctggtgataactaatcta

SEQ ID NO: 36523 - DNA, 25 bp, Saccharomyces pastorianus
ttacgtcgtggagttagatcagcat

SEQ ID NO: 36524 - DNA, 25 bp, Saccharomyces pastorianus
taaagtaccatcctggttcactggt

SEQ ID NO: 36525 - DNA, 25 bp, Saccharomyces pastorianus
gaacagttccaaacgttatcatcaa

SEQ ID NO: 36526 - DNA, 25 bp, Saccharomyces pastorianus
tgccgctgcagaatatgacaccata

SEQ ID NO: 36527 - DNA, 25 bp, Saccharomyces pastorianus
agagtggagtgatggcgcctttacc

SEQ ID NO: 36528 - DNA, 25 bp, Saccharomyces pastorianus
gggaatgctccaggtactcccgaat

SEQ ID NO: 36529 - DNA, 25 bp, Saccharomyces pastorianus
aatcacacatggtcgttttcagtaa

SEQ ID NO: 36530 - DNA, 25 bp, Saccharomyces pastorianus
cttttctccaacttattacgtcgtg

SEQ ID NO: 36531 - DNA, 25 bp, Saccharomyces pastorianus
ggtactcccgaatctgtccataatt

SEQ ID NO: 36532 - DNA, 25 bp, Saccharomyces pastorianus
tggttctagtgtttttggtcgtaag

SEQ ID NO: 36533 - DNA, 25 bp, Saccharomyces pastorianus
agttcgatcctaagactctatccga

SEQ ID NO: 36534 - DNA, 25 bp, Saccharomyces pastorianus
ggcctaccattctaccaggtcaaaa

SEQ ID NO: 36535 - DNA, 25 bp, Saccharomyces pastorianus
aagaaacgttcattgccgcagctaa

SEQ ID NO: 36536 - DNA, 25 bp, Saccharomyces pastorianus
gagctctgcatgaatacgtttgtgt

SEQ ID NO: 36537 - DNA, 25 bp, Saccharomyces pastorianus
gcagctaacttctatggcctaccat

SEQ ID NO: 36538 - DNA, 25 bp, Saccharomyces pastorianus
tggacgtcatgtttattcactcgaa

SEQ ID NO: 36539 - DNA, 25 bp, Saccharomyces pastorianus
attacctggccgcttctaagagcat

SEQ ID NO: 36540 - DNA, 25 bp, Saccharomyces pastorianus
tacatcgccgagagactggagtttt

SEQ ID NO: 36541 - DNA, 25 bp, Saccharomyces pastorianus
atggataacaaacctgcccgttcgt

SEQ ID NO: 36542 - DNA, 25 bp, Saccharomyces pastorianus
tcatcaaatcatccgcgccaataaa

SEQ ID NO: 36543 - DNA, 25 bp, Saccharomyces pastorianus
gttcgttcacttccttagagaaaat

SEQ ID NO: 36544 - DNA, 25 bp, Saccharomyces pastorianus
aggaactacgatgaccaatccggtc

SEQ ID NO: 36545 - DNA, 25 bp, Saccharomyces pastorianus
gtgatgccaagcctgaccaagacta

SEQ ID NO: 36546 - DNA, 25 bp, Saccharomyces pastorianus
tatatttttctactcctcgtgatgc

SEQ ID NO: 36547 - DNA, 25 bp, Saccharomyces pastorianus
agcttacggctcagtagcgctcgga

SEQ ID NO: 36548 - DNA, 25 bp, Saccharomyces pastorianus
ggcaagagatactcccgaagtctta

SEQ ID NO: 36549 - DNA, 25 bp, Saccharomyces pastorianus
taatggtcaacccttcactgagaag

SEQ ID NO: 36550 - DNA, 25 bp, Saccharomyces pastorianus
gagtgatttccatcctgctattatt

SEQ ID NO: 36551 - DNA, 25 bp, Saccharomyces pastorianus
tgatcccgagggtcagttcattgat

SEQ ID NO: 36552 - DNA, 25 bp, Saccharomyces pastorianus
aatacagccattgttcatctcgtgc

SEQ ID NO: 36553 - DNA, 25 bp, Saccharomyces pastorianus
ctcggagggcctttcagtttaatag

SEQ ID NO: 36554 - DNA, 25 bp, Saccharomyces pastorianus
ttcatctcgtgcgatccggcaagag

SEQ ID NO: 36555 - DNA, 25 bp, Saccharomyces pastorianus
atccggaacaagctcacattctaag

SEQ ID NO: 36556 - DNA, 25 bp, Saccharomyces pastorianus
gaaaatctctaatgggtaacggcaa

SEQ ID NO: 36557 - DNA, 25 bp, Saccharomyces pastorianus
gataatatgtgctccatccggaaca

SEQ ID NO: 36558 - DNA, 25 bp, Saccharomyces pastorianus
tgctgcttcctcgtctttggaagaa

SEQ ID NO: 36559 - DNA, 25 bp, Saccharomyces pastorianus
gattctcaggtggactgggacgaat

SEQ ID NO: 36560 - DNA, 25 bp, Saccharomyces pastorianus
gattcactgggcattcaactggatg

SEQ ID NO: 36561 - DNA, 25 bp, Saccharomyces pastorianus
gataagccacatgattcactgggca

SEQ ID NO: 36562 - DNA, 25 bp, Saccharomyces pastorianus
gtcgcgtatccaatgccgttataaa

SEQ ID NO: 36563 - DNA, 25 bp, Saccharomyces pastorianus
ttagcagctttgaaacctggcatga

SEQ ID NO: 36564 - DNA, 25 bp, Saccharomyces pastorianus
atgacgatgacgctattgctgccgc

SEQ ID NO: 36565 - DNA, 25 bp, Saccharomyces pastorianus
gggcggtacaaggtcgcgtatccaa

SEQ ID NO: 36566 - DNA, 25 bp, Saccharomyces pastorianus
caacgtgttatgctgtctctgttta

SEQ ID NO: 36567 - DNA, 25 bp, Saccharomyces pastorianus
tactaccaagcgcaaccaatgtatt

SEQ ID NO: 36568 - DNA, 25 bp, Saccharomyces pastorianus
aattgcggtgactgttgttcggcca

SEQ ID NO: 36569 - DNA, 25 bp, Saccharomyces pastorianus
gcaaccacaacccatatacatacaa

SEQ ID NO: 36570 - DNA, 25 bp, Saccharomyces pastorianus
gagacgtcagtactaccaagcgcaa

SEQ ID NO: 36571 - DNA, 25 bp, Saccharomyces pastorianus
ggccattgccaacgtgttatgctgt

SEQ ID NO: 36572 - DNA, 25 bp, Saccharomyces pastorianus
ctgctgttgctgttgtaattgcggt

SEQ ID NO: 36573 - DNA, 25 bp, Saccharomyces pastorianus
tccacctagaaacgattgctgctgt

SEQ ID NO: 36574 - DNA, 25 bp, Saccharomyces pastorianus
gtgactgttgttcggccattgccaa

SEQ ID NO: 36575 - DNA, 25 bp, Saccharomyces pastorianus
atatacatacaacagggcccacctc

SEQ ID NO: 36576 - DNA, 25 bp, Saccharomyces pastorianus
ccaatgtattatcaaccgcaaccac

SEQ ID NO: 36577 - DNA, 25 bp, Saccharomyces pastorianus
catatttgctttgtttgcgtgggca

SEQ ID NO: 36578 - DNA, 25 bp, Saccharomyces pastorianus
atttccttcttcattgaaagcgtct

SEQ ID NO: 36579 - DNA, 25 bp, Saccharomyces pastorianus
tgcgggtaggtttcccgttcagaat

SEQ ID NO: 36580 - DNA, 25 bp, Saccharomyces pastorianus
gaaatcccctcacaaaaccaagtat

SEQ ID NO: 36581 - DNA, 25 bp, Saccharomyces pastorianus
atgatagtgtcaggcttcgtcacct

SEQ ID NO: 36582 - DNA, 25 bp, Saccharomyces pastorianus
tcaggcttcgtcacctcaaagagga

SEQ ID NO: 36583 - DNA, 25 bp, Saccharomyces pastorianus
gaaagcgtctcattcagggaaagtg

SEQ ID NO: 36584 - DNA, 25 bp, Saccharomyces pastorianus
gatcaaaaccgaagtctggctataa

SEQ ID NO: 36585 - DNA, 25 bp, Saccharomyces pastorianus
ggctataatttaccatttgcctaag

SEQ ID NO: 36586 - DNA, 25 bp, Saccharomyces pastorianus
ggcatggaccggttgggcatttaat

SEQ ID NO: 36587 - DNA, 25 bp, Saccharomyces pastorianus
gtcaggtctttgaagcagagcccaa

SEQ ID NO: 36588 - DNA, 25 bp, Saccharomyces pastorianus
ggtacagcgaatcggagctcacgaa

SEQ ID NO: 36589 - DNA, 25 bp, Saccharomyces pastorianus
ggaccagggaaccagctacgacact

SEQ ID NO: 36590 - DNA, 25 bp, Saccharomyces pastorianus
agatgtgctgtatcgaccggtgtgt

SEQ ID NO: 36591 - DNA, 25 bp, Saccharomyces pastorianus
acgtgtctcgagaagtgcattccgc

SEQ ID NO: 36592 - DNA, 25 bp, Saccharomyces pastorianus
acaattcgacgcgatgtgctccact

SEQ ID NO: 36593 - DNA, 25 bp, Saccharomyces pastorianus
cctcatcggagggtttgtacagaca

SEQ ID NO: 36594 - DNA, 25 bp, Saccharomyces pastorianus
agacgtggcgggagtacaattcgac

SEQ ID NO: 36595 - DNA, 25 bp, Saccharomyces pastorianus
atgtcgttatttctaaacagcctga

SEQ ID NO: 36596 - DNA, 25 bp, Saccharomyces pastorianus
gtacagacacgagggttcggaccag

SEQ ID NO: 36597 - DNA, 25 bp, Saccharomyces pastorianus
gaaaatgcactacagcaaccgcctc

SEQ ID NO: 36598 - DNA, 25 bp, Saccharomyces pastorianus
acaatatcatgaggacgtgtctcga

SEQ ID NO: 36599 - DNA, 25 bp, Saccharomyces pastorianus
gattgtttgtccagcgagactgact

SEQ ID NO: 36600 - DNA, 25 bp, Saccharomyces pastorianus
ggcgttttatgccttgtcaaatcta

SEQ ID NO: 36601 - DNA, 25 bp, Saccharomyces pastorianus
ggttagattgtatagcgcctgtgtt

SEQ ID NO: 36602 - DNA, 25 bp, Saccharomyces pastorianus
aatgagagccattgcactgttaact

SEQ ID NO: 36603 - DNA, 25 bp, Saccharomyces pastorianus
ggcacagccgtgcagaacaatttga

SEQ ID NO: 36604 - DNA, 25 bp, Saccharomyces pastorianus
gccttattgcgttggcgagcgacaa

SEQ ID NO: 36605 - DNA, 25 bp, Saccharomyces pastorianus
gggccattgttggaatttctcgatc

SEQ ID NO: 36606 - DNA, 25 bp, Saccharomyces pastorianus
gttttatctttcctttctcagttga

SEQ ID NO: 36607 - DNA, 25 bp, Saccharomyces pastorianus
atatgacacaggtctgcgaagcctt

SEQ ID NO: 36608 - DNA, 25 bp, Saccharomyces pastorianus
gcgctgctgctttatcaatcatagg

SEQ ID NO: 36609 - DNA, 25 bp, Saccharomyces pastorianus
gcctgtgttaagtgacgccaccgtc

SEQ ID NO: 36610 - DNA, 25 bp, Saccharomyces pastorianus
gaaagccgagcacaggtaacagcaa

SEQ ID NO: 36611 - DNA, 25 bp, Saccharomyces pastorianus
gaatcagacatacttcctatcaaga

SEQ ID NO: 36612 - DNA, 25 bp, Saccharomyces pastorianus
aggttctgcgccaaaatcgtcatcc

SEQ ID NO: 36613 - DNA, 25 bp, Saccharomyces pastorianus
gccattactgtcgtcaggttctgcg

SEQ ID NO: 36614 - DNA, 25 bp, Saccharomyces pastorianus
agtacaacccctacaatatcagcac

SEQ ID NO: 36615 - DNA, 25 bp, Saccharomyces pastorianus
gaagcttttatactgcatcgccatt

SEQ ID NO: 36616 - DNA, 25 bp, Saccharomyces pastorianus
gacaaacttcatccgctcataaaaa

SEQ ID NO: 36617 - DNA, 25 bp, Saccharomyces pastorianus
gatacggtcctccaaaatctgaaga

SEQ ID NO: 36618 - DNA, 25 bp, Saccharomyces pastorianus
gagtctgatatcatcttttgctgaa

SEQ ID NO: 36619 - DNA, 25 bp, Saccharomyces pastorianus
gagaaagacgccaaacccaaacgat

SEQ ID NO: 36620 - DNA, 25 bp, Saccharomyces pastorianus
aaacgatccgtcttcgaatagcagt

SEQ ID NO: 36621 - DNA, 25 bp, Saccharomyces pastorianus
gggatttacagattgacgtcctaca

SEQ ID NO: 36622 - DNA, 25 bp, Saccharomyces pastorianus
gacaacgccactaaccaaattgact

SEQ ID NO: 36623 - DNA, 25 bp, Saccharomyces pastorianus
atttcatctttacagttagccatca

SEQ ID NO: 36624 - DNA, 25 bp, Saccharomyces pastorianus
gaagtgcgacaccatggaatctttc

SEQ ID NO: 36625 - DNA, 25 bp, Saccharomyces pastorianus
gacaactctaattcgctatcactaa

SEQ ID NO: 36626 - DNA, 25 bp, Saccharomyces pastorianus
ttcggatcacccagaatgactttaa

SEQ ID NO: 36627 - DNA, 25 bp, Saccharomyces pastorianus
aaggatccggaatactttcaagaag

SEQ ID NO: 36628 - DNA, 25 bp, Saccharomyces pastorianus
cttgtttcaaagcttaggtccagat

SEQ ID NO: 36629 - DNA, 25 bp, Saccharomyces pastorianus
aaattgactcatctgttccattcgg

SEQ ID NO: 36630 - DNA, 25 bp, Saccharomyces pastorianus
tggaatctttcggttacgtagtcaa

SEQ ID NO: 36631 - DNA, 25 bp, Saccharomyces pastorianus
gaacttcctgagtcttatgaacaca

SEQ ID NO: 36632 - DNA, 25 bp, Saccharomyces pastorianus
agatagcttctctagagagcttata

SEQ ID NO: 36633 - DNA, 25 bp, Saccharomyces pastorianus
cagcagaatctttccatttatcaat

SEQ ID NO: 36634 - DNA, 25 bp, Saccharomyces pastorianus
taacggtacgtttagtgatctcgat

SEQ ID NO: 36635 - DNA, 25 bp, Saccharomyces pastorianus
aagcttttaaactcagggcactaca

SEQ ID NO: 36636 - DNA, 25 bp, Saccharomyces pastorianus
gctaccacatttcttgggtaaccaa

SEQ ID NO: 36637 - DNA, 25 bp, Saccharomyces pastorianus
tagtgatctcgataattcagcagaa

SEQ ID NO: 36638 - DNA, 25 bp, Saccharomyces pastorianus
aactgcgagtttgaatcttctactg

SEQ ID NO: 36639 - DNA, 25 bp, Saccharomyces pastorianus
ttcccagctcagaaaatgtgtgatt

SEQ ID NO: 36640 - DNA, 25 bp, Saccharomyces pastorianus
gaattagatgtccattcccagctca

SEQ ID NO: 36641 - DNA, 25 bp, Saccharomyces pastorianus
aacggttacaattgcagttgctcga

SEQ ID NO: 36642 - DNA, 25 bp, Saccharomyces pastorianus
gaataaacggcttgctaccacattt

SEQ ID NO: 36643 - DNA, 25 bp, Saccharomyces pastorianus
gaacttattgatctggttatggata

SEQ ID NO: 36644 - DNA, 25 bp, Saccharomyces pastorianus
ggatgtgccattattcgataacgct

SEQ ID NO: 36645 - DNA, 25 bp, Saccharomyces pastorianus
gtatcccacgctggatgagtttgat

SEQ ID NO: 36646 - DNA, 25 bp, Saccharomyces pastorianus
aacacagtctccagtagaactattg

SEQ ID NO: 36647 - DNA, 25 bp, Saccharomyces pastorianus
ggaaacaaaggctggtggcttaatt

SEQ ID NO: 36648 - DNA, 25 bp, Saccharomyces pastorianus
gaagtaagtgagctgaccaccgtac

SEQ ID NO: 36649 - DNA, 25 bp, Saccharomyces pastorianus
tcagctgcattatttgctaaggaaa

SEQ ID NO: 36650 - DNA, 25 bp, Saccharomyces pastorianus
gctgaccaccgtacaagaacttatt

SEQ ID NO: 36651 - DNA, 25 bp, Saccharomyces pastorianus
aaagttacaccggatgtgccattat

SEQ ID NO: 36652 - DNA, 25 bp, Saccharomyces pastorianus
gcattaatcatgtatcccacgctgg

SEQ ID NO: 36653 - DNA, 25 bp, Saccharomyces pastorianus
gaaaatagcattccatgatatctta

SEQ ID NO: 36654 - DNA, 25 bp, Saccharomyces pastorianus
gattctttgcccgatataaatacag

SEQ ID NO: 36655 - DNA, 25 bp, Saccharomyces pastorianus
ggcagcatgggctaaatcaccatat

SEQ ID NO: 36656 - DNA, 25 bp, Saccharomyces pastorianus
actggcctccggcaatgattctttg

SEQ ID NO: 36657 - DNA, 25 bp, Saccharomyces pastorianus
ggaaccattagcatcgtccagtaat

SEQ ID NO: 36658 - DNA, 25 bp, Saccharomyces pastorianus
gatgtttccaaacctgagtcacgta

SEQ ID NO: 36659 - DNA, 25 bp, Saccharomyces pastorianus
aaatctgcaattgcttcctcctata

SEQ ID NO: 36660 - DNA, 25 bp, Saccharomyces pastorianus
acaatcaatacagtcgaccatcgcg

SEQ ID NO: 36661 - DNA, 25 bp, Saccharomyces pastorianus
gataccgcctttacacacggatgag

SEQ ID NO: 36662 - DNA, 25 bp, Saccharomyces pastorianus
aaatactggctttaacaccgataat

SEQ ID NO: 36663 - DNA, 25 bp, Saccharomyces pastorianus
gagaccagcgtaactttggcagcat

SEQ ID NO: 36664 - DNA, 25 bp, Saccharomyces pastorianus
agctattttcggaccgataccgcct

SEQ ID NO: 36665 - DNA, 25 bp, Saccharomyces pastorianus
gtgccttgagcgtttcgtacatatc

SEQ ID NO: 36666 - DNA, 25 bp, Saccharomyces pastorianus
gcagcgttactggtctttgctaaca

SEQ ID NO: 36667 - DNA, 25 bp, Saccharomyces pastorianus
tgtttgggatcttggcggccagaca

SEQ ID NO: 36668 - DNA, 25 bp, Saccharomyces pastorianus
ttgcatgtcatgctccaggaggaag

SEQ ID NO: 36669 - DNA, 25 bp, Saccharomyces pastorianus
acaatgaggctgcttccgtgatatt

SEQ ID NO: 36670 - DNA, 25 bp, Saccharomyces pastorianus
gaacgcatatcattggcagccaagg

SEQ ID NO: 36671 - DNA, 25 bp, Saccharomyces pastorianus
ttccgtgatatttgtcgtcgactct

SEQ ID NO: 36672 - DNA, 25 bp, Saccharomyces pastorianus
tgccgatgcagctgaggatcttgat

SEQ ID NO: 36673 - DNA, 25 bp, Saccharomyces pastorianus
aagctggtcaattgtggcgtcgagt

SEQ ID NO: 36674 - DNA, 25 bp, Saccharomyces pastorianus
gttgtttctacaaagcccacgattg

SEQ ID NO: 36675 - DNA, 25 bp, Saccharomyces pastorianus
gccgtactggcgttgctattacaat

SEQ ID NO: 36676 - DNA, 25 bp, Saccharomyces pastorianus
ggcccctcagattaatctcttatac

SEQ ID NO: 36677 - DNA, 25 bp, Saccharomyces pastorianus
tatgtcttcattctggtagtgtacc

SEQ ID NO: 36678 - DNA, 25 bp, Saccharomyces pastorianus
gaaggtcttgaaagccgccttgtta

SEQ ID NO: 36679 - DNA, 25 bp, Saccharomyces pastorianus
gaaatttgctttaaccaggccctat

SEQ ID NO: 36680 - DNA, 25 bp, Saccharomyces pastorianus
aatcagcgaacagccatccatattt

SEQ ID NO: 36681 - DNA, 25 bp, Saccharomyces pastorianus
gctcacgacctgtttttccaaataa

SEQ ID NO: 36682 - DNA, 25 bp, Saccharomyces pastorianus
ctaggcgttaccgatcaattttgaa

SEQ ID NO: 36683 - DNA, 25 bp, Saccharomyces pastorianus
gaagctgagagactacaaccgggtt

SEQ ID NO: 36684 - DNA, 25 bp, Saccharomyces pastorianus
gatgaaaacgatgctcacgacctgt

SEQ ID NO: 36685 - DNA, 25 bp, Saccharomyces pastorianus
ccgggttgggctcaattgtttgtca

SEQ ID NO: 36686 - DNA, 25 bp, Saccharomyces pastorianus
agtgtaccttgttatgttcgcttca

SEQ ID NO: 36687 - DNA, 25 bp, Saccharomyces pastorianus
aaagggcaacttgctgttcacgtcc

SEQ ID NO: 36688 - DNA, 25 bp, Saccharomyces pastorianus
ggaaaacggtgtggtgcccatctcc

SEQ ID NO: 36689 - DNA, 25 bp, Saccharomyces pastorianus
atctcccaggtcaagttctctgaaa

SEQ ID NO: 36690 - DNA, 25 bp, Saccharomyces pastorianus
gggatacgctaaatggctcgctgat

SEQ ID NO: 36691 - DNA, 25 bp, Saccharomyces pastorianus
tagatgtgcccgcaaatgactcgtc

SEQ ID NO: 36692 - DNA, 25 bp, Saccharomyces pastorianus
ttgttcaattgctcgatggttcctc

SEQ ID NO: 36693 - DNA, 25 bp, Saccharomyces pastorianus
caatataatgtgctcgctcgcgttg

SEQ ID NO: 36694 - DNA, 25 bp, Saccharomyces pastorianus
tgtggtacgcactttccaggtccaa

SEQ ID NO: 36695 - DNA, 25 bp, Saccharomyces pastorianus
gctgcatcattcgtgcggtatggat

SEQ ID NO: 36696 - DNA, 25 bp, Saccharomyces pastorianus
tttttgaaccctgaagacggctcca

SEQ ID NO: 36697 - DNA, 25 bp, Saccharomyces pastorianus
atggttcctcccatcatcggaatag

SEQ ID NO: 36698 - DNA, 25 bp, Saccharomyces pastorianus
ggaagctctcagaaaagcccgcttt

SEQ ID NO: 36699 - DNA, 25 bp, Saccharomyces pastorianus
ttgtaatatatcctacccctgtacc

SEQ ID NO: 36700 - DNA, 25 bp, Saccharomyces pastorianus
aaacattttttctcaagccaccgat

SEQ ID NO: 36701 - DNA, 25 bp, Saccharomyces pastorianus
taatgaacaatattccgcccgtcca

SEQ ID NO: 36702 - DNA, 25 bp, Saccharomyces pastorianus
ttgtggtagcactttttcgccattc

SEQ ID NO: 36703 - DNA, 25 bp, Saccharomyces pastorianus
gtcgagagtctccaacaatatgtcc

SEQ ID NO: 36704 - DNA, 25 bp, Saccharomyces pastorianus
aatggccgtccaaactaatttcaag

SEQ ID NO: 36705 - DNA, 25 bp, Saccharomyces pastorianus
gagttcgaatcatagtggccaatcc

SEQ ID NO: 36706 - DNA, 25 bp, Saccharomyces pastorianus
acccgcgttaccttcaaatctaatg

SEQ ID NO: 36707 - DNA, 25 bp, Saccharomyces pastorianus
aaagcccgtctacttctattgtaat

SEQ ID NO: 36708 - DNA, 25 bp, Saccharomyces pastorianus
aagcatcccgaaggctacagctgat

SEQ ID NO: 36709 - DNA, 25 bp, Saccharomyces pastorianus
taacaacagtctttttgcctctctg

SEQ ID NO: 36710 - DNA, 25 bp, Saccharomyces pastorianus
aagctcgagcagacacgtgctgaga

SEQ ID NO: 36711 - DNA, 25 bp, Saccharomyces pastorianus
ccgcaagccatactgttcgattcaa

SEQ ID NO: 36712 - DNA, 25 bp, Saccharomyces pastorianus
tattcgactcggttccaaagcgttt

SEQ ID NO: 36713 - DNA, 25 bp, Saccharomyces pastorianus
ttatcaaaccaccacagactacttc

SEQ ID NO: 36714 - DNA, 25 bp, Saccharomyces pastorianus
ggaactgtagcacgcactcgaggtt

SEQ ID NO: 36715 - DNA, 25 bp, Saccharomyces pastorianus
gtttgccgcgatatgccattacgaa

SEQ ID NO: 36716 - DNA, 25 bp, Saccharomyces pastorianus
tgagatcggtctatcccttatcaaa

SEQ ID NO: 36717 - DNA, 25 bp, Saccharomyces pastorianus
agtagtgctgatcctttgaatagta

SEQ ID NO: 36718 - DNA, 25 bp, Saccharomyces pastorianus
ttttccacagcctatgctctaaagg

SEQ ID NO: 36719 - DNA, 25 bp, Saccharomyces pastorianus
acgtcttggcaaaactcagccttta

SEQ ID NO: 36720 - DNA, 25 bp, Saccharomyces pastorianus
atgtccctgttttggcatataatgc

SEQ ID NO: 36721 - DNA, 25 bp, Saccharomyces pastorianus
aattagggttctacctcttcatctt

SEQ ID NO: 36722 - DNA, 25 bp, Saccharomyces pastorianus
cttcatcttcctcttttatttctac

SEQ ID NO: 36723 - DNA, 25 bp, Saccharomyces pastorianus
ggcaattttgcaggcgtttgtttct

SEQ ID NO: 36724 - DNA, 25 bp, Saccharomyces pastorianus
ggctctcgttatttgtgacgggact

SEQ ID NO: 36725 - DNA, 25 bp, Saccharomyces pastorianus
ggacgccactgatattttcaggacg

SEQ ID NO: 36726 - DNA, 25 bp, Saccharomyces pastorianus
atggcaggaactgggctctcgttat

SEQ ID NO: 36727 - DNA, 25 bp, Saccharomyces pastorianus
gatggagcacaccagaggcaatttt

SEQ ID NO: 36728 - DNA, 25 bp, Saccharomyces pastorianus
ttgtttttctcttaaatgtccctgt

SEQ ID NO: 36729 - DNA, 25 bp, Saccharomyces pastorianus
aagaacatacctactggacgccact

SEQ ID NO: 36730 - DNA, 25 bp, Saccharomyces pastorianus
ttttcaggacgctgggtcaacgcaa

SEQ ID NO: 36731 - DNA, 25 bp, Saccharomyces pastorianus
tcatcagcctcttctattgacaatt

SEQ ID NO: 36732 - DNA, 25 bp, Saccharomyces pastorianus
atcccatggagcagttgactcacca

SEQ ID NO: 36733 - DNA, 25 bp, Saccharomyces pastorianus
tcaaagaccaaacatcccgtacgta

SEQ ID NO: 36734 - DNA, 25 bp, Saccharomyces pastorianus
aggcgacctggacaattctcaaaga

SEQ ID NO: 36735 - DNA, 25 bp, Saccharomyces pastorianus
gtgtctgggatgatgaaccctcctt

SEQ ID NO: 36736 - DNA, 25 bp, Saccharomyces pastorianus
agtggaagagctccttcatcagcct

SEQ ID NO: 36737 - DNA, 25 bp, Saccharomyces pastorianus
aatatgcaaactcttcatacccgct

SEQ ID NO: 36738 - DNA, 25 bp, Saccharomyces pastorianus
aatgcgttgacaatgtctctacccc

SEQ ID NO: 36739 - DNA, 25 bp, Saccharomyces pastorianus
atggctaatcaactctctaatgctg

SEQ ID NO: 36740 - DNA, 25 bp, Saccharomyces pastorianus
tgacaacatgccacaattcgggaat

SEQ ID NO: 36741 - DNA, 25 bp, Saccharomyces pastorianus
aacagcacgctaactatcccatgga

SEQ ID NO: 36742 - DNA, 25 bp, Saccharomyces pastorianus
gggagagttcctatcataactgcat

SEQ ID NO: 36743 - DNA, 25 bp, Saccharomyces pastorianus
gtgctttagatttgactacaccatc

SEQ ID NO: 36744 - DNA, 25 bp, Saccharomyces pastorianus
aatgccctgctagaccaatatgagt

SEQ ID NO: 36745 - DNA, 25 bp, Saccharomyces pastorianus
ataactgcattgcaaccccttcaaa

SEQ ID NO: 36746 - DNA, 25 bp, Saccharomyces pastorianus
agacgatttggttcacgatgtttat

SEQ ID NO: 36747 - DNA, 25 bp, Saccharomyces pastorianus
gaagctcaggttcagtaatacactt

SEQ ID NO: 36748 - DNA, 25 bp, Saccharomyces pastorianus
ttggcttcccacgtggatgtgaagt

SEQ ID NO: 36749 - DNA, 25 bp, Saccharomyces pastorianus
gtgaacgaagctacagttgactcat

SEQ ID NO: 36750 - DNA, 25 bp, Saccharomyces pastorianus
atttggtgtcaagctgtgcatcaca

SEQ ID NO: 36751 - DNA, 25 bp, Saccharomyces pastorianus
gcccaattcgccctcaaagaaggaa

SEQ ID NO: 36752 - DNA, 25 bp, Saccharomyces pastorianus
gggtccgatattgcttatgttttag

SEQ ID NO: 36753 - DNA, 25 bp, Saccharomyces pastorianus
atggttatgagttcacgtctcctta

SEQ ID NO: 36754 - DNA, 25 bp, Saccharomyces pastorianus
tgttgccctagaacctttcccggat

SEQ ID NO: 36755 - DNA, 25 bp, Saccharomyces pastorianus
gattcccatgtgatatcgtttcaac

SEQ ID NO: 36756 - DNA, 25 bp, Saccharomyces pastorianus
ggtttgcaaagatctgacggtaggt

SEQ ID NO: 36757 - DNA, 25 bp, Saccharomyces pastorianus
cacgtctccttatggccaaatgtac

SEQ ID NO: 36758 - DNA, 25 bp, Saccharomyces pastorianus
ttgtgccttttgaaacccttagaag

SEQ ID NO: 36759 - DNA, 25 bp, Saccharomyces pastorianus
gaagggctttactgaatgttgctaa

SEQ ID NO: 36760 - DNA, 25 bp, Saccharomyces pastorianus
taatgttcccgagtacgttgtgcct

SEQ ID NO: 36761 - DNA, 25 bp, Saccharomyces pastorianus
gcttacattacgctttcgagaccga

SEQ ID NO: 36762 - DNA, 25 bp, Saccharomyces pastorianus
tttcccggattgcagattcccatgt

SEQ ID NO: 36763 - DNA, 25 bp, Saccharomyces pastorianus
ggaggctgcttcatatttttacacc

SEQ ID NO: 36764 - DNA, 25 bp, Saccharomyces pastorianus
ggataccgatgactccgcattgaga

SEQ ID NO: 36765 - DNA, 25 bp, Saccharomyces pastorianus
aacggtgcactattacgtgtcacaa

SEQ ID NO: 36766 - DNA, 25 bp, Saccharomyces pastorianus
ggaaaaggatcacccagcgatatat

SEQ ID NO: 36767 - DNA, 25 bp, Saccharomyces pastorianus
catcctgatcgttaagggccatcta

SEQ ID NO: 36768 - DNA, 25 bp, Saccharomyces pastorianus
gggcattgtgatttgggactctcaa

SEQ ID NO: 36769 - DNA, 25 bp, Saccharomyces pastorianus
ggaagtttaaaagtcgtcgctgcga

SEQ ID NO: 36770 - DNA, 25 bp, Saccharomyces pastorianus
aaatctctcaagctacctggaaaag

SEQ ID NO: 36771 - DNA, 25 bp, Saccharomyces pastorianus
aacggatcatcagcgctactaaaat

SEQ ID NO: 36772 - DNA, 25 bp, Saccharomyces pastorianus
tatgaagcacttccgcagtacgatg

SEQ ID NO: 36773 - DNA, 25 bp, Saccharomyces pastorianus
ggagaactaccaacgtgtcaacaaa

SEQ ID NO: 36774 - DNA, 25 bp, Saccharomyces pastorianus
tgaaattccactctcggataccgat

SEQ ID NO: 36775 - DNA, 25 bp, Saccharomyces pastorianus
cttgccaagagagctgtacccagtg

SEQ ID NO: 36776 - DNA, 25 bp, Saccharomyces pastorianus
ggatcgaaccatttccttcgtaaat

SEQ ID NO: 36777 - DNA, 25 bp, Saccharomyces pastorianus
atgctccctcaacaagacagcgtaa

SEQ ID NO: 36778 - DNA, 25 bp, Saccharomyces pastorianus
gcctgaagcttattgcctgcgaaag

SEQ ID NO: 36779 - DNA, 25 bp, Saccharomyces pastorianus
aattgaagtctcgaatgctccctca

SEQ ID NO: 36780 - DNA, 25 bp, Saccharomyces pastorianus
caagcatgccgccaagattgatctt

SEQ ID NO: 36781 - DNA, 25 bp, Saccharomyces pastorianus
gaaacagactcttcagtgactagat

SEQ ID NO: 36782 - DNA, 25 bp, Saccharomyces pastorianus
aaatacgccgtggacatcggtgcag

SEQ ID NO: 36783 - DNA, 25 bp, Saccharomyces pastorianus
gatgcattgttggtctacaacccaa

SEQ ID NO: 36784 - DNA, 25 bp, Saccharomyces pastorianus
ggatcggccgtgtgactaagaacat

SEQ ID NO: 36785 - DNA, 25 bp, Saccharomyces pastorianus
ggaatgcaagactggacccctgaag

SEQ ID NO: 36786 - DNA, 25 bp, Saccharomyces pastorianus
ttttctatctctaccggttcagcaa

SEQ ID NO: 36787 - DNA, 25 bp, Saccharomyces pastorianus
aatcgtaatggatgacggtgtcgca

SEQ ID NO: 36788 - DNA, 25 bp, Saccharomyces pastorianus
ggttcagcaacaagggttatttcta

SEQ ID NO: 36789 - DNA, 25 bp, Saccharomyces pastorianus
gacggtgtcgcatggactaggacca

SEQ ID NO: 36790 - DNA, 25 bp, Saccharomyces pastorianus
gaagcaagaccatcaggcacaagac

SEQ ID NO: 36791 - DNA, 25 bp, Saccharomyces pastorianus
gatgctacgtggttgaagcaagacc

SEQ ID NO: 36792 - DNA, 25 bp, Saccharomyces pastorianus
gttatttctacgaccacgatgctac

SEQ ID NO: 36793 - DNA, 25 bp, Saccharomyces pastorianus
gggtcataggctctgttttctatct

SEQ ID NO: 36794 - DNA, 25 bp, Saccharomyces pastorianus
gccaggtctgtcaagtggactcttt

SEQ ID NO: 36795 - DNA, 25 bp, Saccharomyces pastorianus
ctgtcaagtggactctttccgcggg

SEQ ID NO: 36796 - DNA, 25 bp, Saccharomyces pastorianus
attgggttcattagccaggtctgtc

SEQ ID NO: 36797 - DNA, 25 bp, Saccharomyces pastorianus
gggtctgttcccaagttatttcgtg

SEQ ID NO: 36798 - DNA, 25 bp, Saccharomyces pastorianus
tggccagaggccaagacgatgtctt

SEQ ID NO: 36799 - DNA, 25 bp, Saccharomyces pastorianus
tatcatcttttccagtgtcacagcc

SEQ ID NO: 36800 - DNA, 25 bp, Saccharomyces pastorianus
aactttgaacgtggctcatcagctc

SEQ ID NO: 36801 - DNA, 25 bp, Saccharomyces pastorianus
ggtaggctgctcctggtatattaga

SEQ ID NO: 36802 - DNA, 25 bp, Saccharomyces pastorianus
aatattgttgttgtgcccttctacc

SEQ ID NO: 36803 - DNA, 25 bp, Saccharomyces pastorianus
agaagtcgctttgtcgcgttgcaat

SEQ ID NO: 36804 - DNA, 25 bp, Saccharomyces pastorianus
gttggttattcgcaatatgcccctg

SEQ ID NO: 36805 - DNA, 25 bp, Saccharomyces pastorianus
ctagggaacaccatcttatcatctt

SEQ ID NO: 36806 - DNA, 25 bp, Saccharomyces pastorianus
aaacttccgcgtcagctgtgtttac

SEQ ID NO: 36807 - DNA, 25 bp, Saccharomyces pastorianus
attgttgctacttcattggccagag

SEQ ID NO: 36808 - DNA, 25 bp, Saccharomyces pastorianus
gagactgtgaataccgctctgaaaa

SEQ ID NO: 36809 - DNA, 25 bp, Saccharomyces pastorianus
agcaggtttactttgatatcacggc

SEQ ID NO: 36810 - DNA, 25 bp, Saccharomyces pastorianus
tatcatcctcccgtattacgagagc

SEQ ID NO: 36811 - DNA, 25 bp, Saccharomyces pastorianus
gccgccgttacacatttcaagttta

SEQ ID NO: 36812 - DNA, 25 bp, Saccharomyces pastorianus
atgctgcaatgctttggaatcctga

SEQ ID NO: 36813 - DNA, 25 bp, Saccharomyces pastorianus
ggcagtgctgttgccctttgagaaa

SEQ ID NO: 36814 - DNA, 25 bp, Saccharomyces pastorianus
agagccttcaaggtatactccctcg

SEQ ID NO: 36815 - DNA, 25 bp, Saccharomyces pastorianus
atgtttcagggactctatcatcctc

SEQ ID NO: 36816 - DNA, 25 bp, Saccharomyces pastorianus
gaagaattcatcactacgtcactgt

SEQ ID NO: 36817 - DNA, 25 bp, Saccharomyces pastorianus
gagagctttctccatacaaatgatg

SEQ ID NO: 36818 - DNA, 25 bp, Saccharomyces pastorianus
gtctactggacttttacatcacatt

SEQ ID NO: 36819 - DNA, 25 bp, Saccharomyces pastorianus
acaacatcaacgtcttcattcagga

SEQ ID NO: 36820 - DNA, 25 bp, Saccharomyces pastorianus
ggaattgactcccagatcagccttg

SEQ ID NO: 36821 - DNA, 25 bp, Saccharomyces pastorianus
ggagcattcctagagtgacattcaa

SEQ ID NO: 36822 - DNA, 25 bp, Saccharomyces pastorianus
tactccgtaagtacatcgcagcatg

SEQ ID NO: 36823 - DNA, 25 bp, Saccharomyces pastorianus
gaaaacttccgggagcctgtccaat

SEQ ID NO: 36824 - DNA, 25 bp, Saccharomyces pastorianus
aaacggtccgtattcattccatagg

SEQ ID NO: 36825 - DNA, 25 bp, Saccharomyces pastorianus
gaacctaactacatctcgatctgtt

SEQ ID NO: 36826 - DNA, 25 bp, Saccharomyces pastorianus
ggattccgatgagctcaagacacta

SEQ ID NO: 36827 - DNA, 25 bp, Saccharomyces pastorianus
gggatcatctggtctcaaacattct

SEQ ID NO: 36828 - DNA, 25 bp, Saccharomyces pastorianus
gatctatgcatctcctctgttaacg

SEQ ID NO: 36829 - DNA, 25 bp, Saccharomyces pastorianus
ggacaccccacattctaagctaaag

SEQ ID NO: 36830 - DNA, 25 bp, Saccharomyces pastorianus
agtctacgactaagtttggcttcta

SEQ ID NO: 36831 - DNA, 25 bp, Saccharomyces pastorianus
tgctgtccaggttccagtaccaatc

SEQ ID NO: 36832 - DNA, 25 bp, Saccharomyces pastorianus
tgccttcccgatatccaaagtcaag

SEQ ID NO: 36833 - DNA, 25 bp, Saccharomyces pastorianus
taatgcagcagtatcggcgaccgcg

SEQ ID NO: 36834 - DNA, 25 bp, Saccharomyces pastorianus
ttgccaaatgcgatccggagtatgt

SEQ ID NO: 36835 - DNA, 25 bp, Saccharomyces pastorianus
gcgaccgcgtttgctgcagagttat

SEQ ID NO: 36836 - DNA, 25 bp, Saccharomyces pastorianus
gaaggcaacctgacttggatgacca

SEQ ID NO: 36837 - DNA, 25 bp, Saccharomyces pastorianus
gcattcgggttcctctgatgtggaa

SEQ ID NO: 36838 - DNA, 25 bp, Saccharomyces pastorianus
gaatcactggtattagcgcagctga

SEQ ID NO: 36839 - DNA, 25 bp, Saccharomyces pastorianus
gagctacaaccgcaccaagatgatg

SEQ ID NO: 36840 - DNA, 25 bp, Saccharomyces pastorianus
aagacgacaagcctacgcgtagtgt

SEQ ID NO: 36841 - DNA, 25 bp, Saccharomyces pastorianus
ctaccgtggacgaagaaggcgatga

SEQ ID NO: 36842 - DNA, 25 bp, Saccharomyces pastorianus
gatggcgtagcttattacaaacctt

SEQ ID NO: 36843 - DNA, 25 bp, Saccharomyces pastorianus
tatcactctaagaaaccctagcact

SEQ ID NO: 36844 - DNA, 25 bp, Saccharomyces pastorianus
gatcctataaatttcgctaccgtgg

SEQ ID NO: 36845 - DNA, 25 bp, Saccharomyces pastorianus
aagccaatgactgagctagccatac

SEQ ID NO: 36846 - DNA, 25 bp, Saccharomyces pastorianus
atgccactgatcataaagattccgc

SEQ ID NO: 36847 - DNA, 25 bp, Saccharomyces pastorianus
gggtgaatcagctgaagacctcaaa

SEQ ID NO: 36848 - DNA, 25 bp, Saccharomyces pastorianus
aagattccgctattctagaaactga

SEQ ID NO: 36849 - DNA, 25 bp, Saccharomyces pastorianus
atgccggtacaaaacaaacgccaga

SEQ ID NO: 36850 - DNA, 25 bp, Saccharomyces pastorianus
atggacgatgacactcatgaaggca

SEQ ID NO: 36851 - DNA, 25 bp, Saccharomyces pastorianus
gagctagccatacgtctgaacgaca

SEQ ID NO: 36852 - DNA, 25 bp, Saccharomyces pastorianus
gacaggctgccaatcaagccgttag

SEQ ID NO: 36853 - DNA, 25 bp, Saccharomyces pastorianus
gcagtgacacccttcgaagcaatta

SEQ ID NO: 36854 - DNA, 25 bp, Saccharomyces pastorianus
tggtttaaccttcctagtgggtgca

SEQ ID NO: 36855 - DNA, 25 bp, Saccharomyces pastorianus
gaaggcttttcaggtctttaccgcg

SEQ ID NO: 36856 - DNA, 25 bp, Saccharomyces pastorianus
aagacctgctgagagatcgtgaaac

SEQ ID NO: 36857 - DNA, 25 bp, Saccharomyces pastorianus
gaaagtgtgcttgcagtgacaccct

SEQ ID NO: 36858 - DNA, 25 bp, Saccharomyces pastorianus
ggattccacgaaatattcttctaca

SEQ ID NO: 36859 - DNA, 25 bp, Saccharomyces pastorianus
aattaaaactgccttgatcgatgac

SEQ ID NO: 36860 - DNA, 25 bp, Saccharomyces pastorianus
attattcagcactggttcgtgacga

SEQ ID NO: 36861 - DNA, 25 bp, Saccharomyces pastorianus
ctgtctactctactatgcctattga

SEQ ID NO: 36862 - DNA, 25 bp, Saccharomyces pastorianus
gcggtgttttacctgtttccatgag

SEQ ID NO: 36863 - DNA, 25 bp, Saccharomyces pastorianus
acctcaaaggcgttgttgtcatcat

SEQ ID NO: 36864 - DNA, 25 bp, Saccharomyces pastorianus
atagcctcatggatatgggtgtctc

SEQ ID NO: 36865 - DNA, 25 bp, Saccharomyces pastorianus
aaatatgaaccacacagcgccggaa

SEQ ID NO: 36866 - DNA, 25 bp, Saccharomyces pastorianus
ggtgactgcgtcaatgattcccaaa

SEQ ID NO: 36867 - DNA, 25 bp, Saccharomyces pastorianus
actatgtctctctcactaggaagtt

SEQ ID NO: 36868 - DNA, 25 bp, Saccharomyces pastorianus
gacacaatcattctacccaacataa

SEQ ID NO: 36869 - DNA, 25 bp, Saccharomyces pastorianus
tgtgcaagtcaactactgtccaagg

SEQ ID NO: 36870 - DNA, 25 bp, Saccharomyces pastorianus
gactctccttgacttttttcgatga

SEQ ID NO: 36871 - DNA, 25 bp, Saccharomyces pastorianus
ggaacttcggtatccaatgtgcaag

SEQ ID NO: 36872 - DNA, 25 bp, Saccharomyces pastorianus
gaaatccaccaatctcaaacatact

SEQ ID NO: 36873 - DNA, 25 bp, Saccharomyces pastorianus
tgtctaataaaccagctcccactat

SEQ ID NO: 36874 - DNA, 25 bp, Saccharomyces pastorianus
gactttgattccgactatgattctg

SEQ ID NO: 36875 - DNA, 25 bp, Saccharomyces pastorianus
tgcgttctgtggctcgtttagaaaa

SEQ ID NO: 36876 - DNA, 25 bp, Saccharomyces pastorianus
gaaggcaggtttaatcaatgatgac

SEQ ID NO: 36877 - DNA, 25 bp, Saccharomyces pastorianus
aagcaatgaatgcacgtcctatcaa

SEQ ID NO: 36878 - DNA, 25 bp, Saccharomyces pastorianus
gtgataccgaacacttaccagaatg

SEQ ID NO: 36879 - DNA, 25 bp, Saccharomyces pastorianus
gcacgtcctatcaagaaagtcgctg

SEQ ID NO: 36880 - DNA, 25 bp, Saccharomyces pastorianus
taaggttaccaagaaaccacaggct

SEQ ID NO: 36881 - DNA, 25 bp, Saccharomyces pastorianus
aaaacggatgcgttctgtggctcgt

SEQ ID NO: 36882 - DNA, 25 bp, Saccharomyces pastorianus
atagatatactttccgtgataccga

SEQ ID NO: 36883 - DNA, 25 bp, Saccharomyces pastorianus
aagaagctgctatggcaatcaaaga

SEQ ID NO: 36884 - DNA, 25 bp, Saccharomyces pastorianus
tttggcacaccagttggcattgggc

SEQ ID NO: 36885 - DNA, 25 bp, Saccharomyces pastorianus
aggttccttcaaagatgtcatgttt

SEQ ID NO: 36886 - DNA, 25 bp, Saccharomyces pastorianus
gaaggctcatctcaaaactcacgaa

SEQ ID NO: 36887 - DNA, 25 bp, Saccharomyces pastorianus
aatcggcggtgcaattttctttgaa

SEQ ID NO: 36888 - DNA, 25 bp, Saccharomyces pastorianus
acacatctttggtctatttgcccca

SEQ ID NO: 36889 - DNA, 25 bp, Saccharomyces pastorianus
caaatccgttgaatggcaggtcaat

SEQ ID NO: 36890 - DNA, 25 bp, Saccharomyces pastorianus
atttgccccaactgactaatgtgaa

SEQ ID NO: 36891 - DNA, 25 bp, Saccharomyces pastorianus
gagaacattaccattagagacacat

SEQ ID NO: 36892 - DNA, 25 bp, Saccharomyces pastorianus
gtagcgcatttatcaagagttcgtc

SEQ ID NO: 36893 - DNA, 25 bp, Saccharomyces pastorianus
aaactcacgaactcaacggctccaa

SEQ ID NO: 36894 - DNA, 25 bp, Saccharomyces pastorianus
cggctccaaccatgcaattaaactt

SEQ ID NO: 36895 - DNA, 25 bp, Saccharomyces pastorianus
gatggaacagtcctcgaaaagggtt

SEQ ID NO: 36896 - DNA, 25 bp, Saccharomyces pastorianus
gacactgacgaaggtacgtttctta

SEQ ID NO: 36897 - DNA, 25 bp, Saccharomyces pastorianus
cgggatagcgtcttgcttgaaagtt

SEQ ID NO: 36898 - DNA, 25 bp, Saccharomyces pastorianus
ggcttcaagttaacacaacacgggt

SEQ ID NO: 36899 - DNA, 25 bp, Saccharomyces pastorianus
gcagggaggatacactatacaggat

SEQ ID NO: 36900 - DNA, 25 bp, Saccharomyces pastorianus
tactagcagcacagaagggcttcaa

SEQ ID NO: 36901 - DNA, 25 bp, Saccharomyces pastorianus
gatgacaccgccgaattggcaggta

SEQ ID NO: 36902 - DNA, 25 bp, Saccharomyces pastorianus
aaccattttgtgatgacaccgccga

SEQ ID NO: 36903 - DNA, 25 bp, Saccharomyces pastorianus
caacacgggttatttcgggatagcg

SEQ ID NO: 36904 - DNA, 25 bp, Saccharomyces pastorianus
ttggcaggtatcatggaatcacttt

SEQ ID NO: 36905 - DNA, 25 bp, Saccharomyces pastorianus
gacggttatattcactgtttcttac

SEQ ID NO: 36906 - DNA, 25 bp, Saccharomyces pastorianus
ggaatcactttgtatcaagctttac

SEQ ID NO: 36907 - DNA, 25 bp, Saccharomyces pastorianus
gacccgaccagctatcttattaagt

SEQ ID NO: 36908 - DNA, 25 bp, Saccharomyces pastorianus
atggctgaactgatgggcaactcga

SEQ ID NO: 36909 - DNA, 25 bp, Saccharomyces pastorianus
atgctacgcatcatctattgccttc

SEQ ID NO: 36910 - DNA, 25 bp, Saccharomyces pastorianus
gcatgacattgaccctactgacgat

SEQ ID NO: 36911 - DNA, 25 bp, Saccharomyces pastorianus
aatttcctgtcattaatgctacgca

SEQ ID NO: 36912 - DNA, 25 bp, Saccharomyces pastorianus
tgaaacctctggcatgcatgacatt

SEQ ID NO: 36913 - DNA, 25 bp, Saccharomyces pastorianus
gaggcacgatcacggatactgaact

SEQ ID NO: 36914 - DNA, 25 bp, Saccharomyces pastorianus
gtgttcttctttccaaatttcctgt

SEQ ID NO: 36915 - DNA, 25 bp, Saccharomyces pastorianus
attgccttcccctgtgggagagcta

SEQ ID NO: 36916 - DNA, 25 bp, Saccharomyces pastorianus
tgaactgcaggtcggtaaattccaa

SEQ ID NO: 36917 - DNA, 25 bp, Saccharomyces pastorianus
agccgaacgctcagattccatttat

SEQ ID NO: 36918 - DNA, 25 bp, Saccharomyces pastorianus
aaattcattccttggtgggtttgca

SEQ ID NO: 36919 - DNA, 25 bp, Saccharomyces pastorianus
ggtctcactctcctagataggctga

SEQ ID NO: 36920 - DNA, 25 bp, Saccharomyces pastorianus
gcggctcccttggaagcatatcgat

SEQ ID NO: 36921 - DNA, 25 bp, Saccharomyces pastorianus
gtgcattttaagatgcggctccctt

SEQ ID NO: 36922 - DNA, 25 bp, Saccharomyces pastorianus
tttcccagacctttgtgactttgag

SEQ ID NO: 36923 - DNA, 25 bp, Saccharomyces pastorianus
gaagaatgcttcgagctggcacatc

SEQ ID NO: 36924 - DNA, 25 bp, Saccharomyces pastorianus
atgatcactacccagcgtatcactt

SEQ ID NO: 36925 - DNA, 25 bp, Saccharomyces pastorianus
gacgttacagtgatattgtcgccaa

SEQ ID NO: 36926 - DNA, 25 bp, Saccharomyces pastorianus
gagctggcacatcgtttcaatgaat

SEQ ID NO: 36927 - DNA, 25 bp, Saccharomyces pastorianus
gagcgcagaacgagcctatgatcac

SEQ ID NO: 36928 - DNA, 25 bp, Saccharomyces pastorianus
gagtcaagccgtttatttggtttgc

SEQ ID NO: 36929 - DNA, 25 bp, Saccharomyces pastorianus
tcaactggctttgtaaatgctgaaa

SEQ ID NO: 36930 - DNA, 25 bp, Saccharomyces pastorianus
tgcgaactattcgacctagtagagg

SEQ ID NO: 36931 - DNA, 25 bp, Saccharomyces pastorianus
gacatagcatcatcgttgatcctga

SEQ ID NO: 36932 - DNA, 25 bp, Saccharomyces pastorianus
gaaaggtcttacaacaacataacgt

SEQ ID NO: 36933 - DNA, 25 bp, Saccharomyces pastorianus
gagggcacaaaaagacatagcatca

SEQ ID NO: 36934 - DNA, 25 bp, Saccharomyces pastorianus
caaaacaattcaactggctttgtaa

SEQ ID NO: 36935 - DNA, 25 bp, Saccharomyces pastorianus
aactattcgacctagtagagggcac

SEQ ID NO: 36936 - DNA, 25 bp, Saccharomyces pastorianus
aatgctgaaaggtcttacaacaaca

SEQ ID NO: 36937 - DNA, 25 bp, Saccharomyces pastorianus
attcgacctagtagagggcacaaaa

SEQ ID NO: 36938 - DNA, 25 bp, Saccharomyces pastorianus
aatatatgcgaactattcgacctag

SEQ ID NO: 36939 - DNA, 25 bp, Saccharomyces pastorianus
atagcatcatcgttgatcctgaaag

SEQ ID NO: 36940 - DNA, 25 bp, Saccharomyces pastorianus
aagacattttgtggcgccttgacat

SEQ ID NO: 36941 - DNA, 25 bp, Saccharomyces pastorianus
gctggtgtactgtcgcttatttgta

SEQ ID NO: 36942 - DNA, 25 bp, Saccharomyces pastorianus
atggtgccactatcagtatttctgc

SEQ ID NO: 36943 - DNA, 25 bp, Saccharomyces pastorianus
gtatttctgcatccgctagattcat

SEQ ID NO: 36944 - DNA, 25 bp, Saccharomyces pastorianus
tactcttttgtccacaaccggtata

SEQ ID NO: 36945 - DNA, 25 bp, Saccharomyces pastorianus
ggttacattatgtcttggtcccaag

SEQ ID NO: 36946 - DNA, 25 bp, Saccharomyces pastorianus
taagtcttttctgtatggtggccct

SEQ ID NO: 36947 - DNA, 25 bp, Saccharomyces pastorianus
tatttttcccgtcgtagatcgtaat

SEQ ID NO: 36948 - DNA, 25 bp, Saccharomyces pastorianus
gagccagaacagacgggtactcttt

SEQ ID NO: 36949 - DNA, 25 bp, Saccharomyces pastorianus
gtatatttggttgctttgtcgtcat

SEQ ID NO: 36950 - DNA, 25 bp, Saccharomyces pastorianus
gtcagttggtggtcgctaagtcttt

SEQ ID NO: 36951 - DNA, 25 bp, Saccharomyces pastorianus
aaaattatcttttctgcccagtatc

SEQ ID NO: 36952 - DNA, 25 bp, Saccharomyces pastorianus
gttgttatccgctcgctacaaataa

SEQ ID NO: 36953 - DNA, 25 bp, Saccharomyces pastorianus
gcaagtttccaaaagctcggcattg

SEQ ID NO: 36954 - DNA, 25 bp, Saccharomyces pastorianus
gttcttctctgcagatatggtacct

SEQ ID NO: 36955 - DNA, 25 bp, Saccharomyces pastorianus
aaatacgtctgtcgaatttggcgat

SEQ ID NO: 36956 - DNA, 25 bp, Saccharomyces pastorianus
aacgtgccattgttcttgcctcaat

SEQ ID NO: 36957 - DNA, 25 bp, Saccharomyces pastorianus
tatccctcaggcatatttgctgtgg

SEQ ID NO: 36958 - DNA, 25 bp, Saccharomyces pastorianus
gcatgtttccgcttttatatcctta

SEQ ID NO: 36959 - DNA, 25 bp, Saccharomyces pastorianus
aaaggttgttgtgctcttttggcaa

SEQ ID NO: 36960 - DNA, 25 bp, Saccharomyces pastorianus
gatacgtacgcgtccattggatcca

SEQ ID NO: 36961 - DNA, 25 bp, Saccharomyces pastorianus
gatcatcgtcgcaattttgatacgt

SEQ ID NO: 36962 - DNA, 25 bp, Saccharomyces pastorianus
tagacttagaccctgaatcacaatt

SEQ ID NO: 36963 - DNA, 25 bp, Saccharomyces pastorianus
aatctctgtgattgctaatgctaaa

SEQ ID NO: 36964 - DNA, 25 bp, Saccharomyces pastorianus
aagtattcattctacaatctctgtg

SEQ ID NO: 36965 - DNA, 25 bp, Saccharomyces pastorianus
aagatcctgataacgctgaagaaga

SEQ ID NO: 36966 - DNA, 25 bp, Saccharomyces pastorianus
ggcaactatacccaattgacattag

SEQ ID NO: 36967 - DNA, 25 bp, Saccharomyces pastorianus
atagatgaacgtgcgtccgacttga

SEQ ID NO: 36968 - DNA, 25 bp, Saccharomyces pastorianus
aagccagatctgtactaatagccga

SEQ ID NO: 36969 - DNA, 25 bp, Saccharomyces pastorianus
gtgcgtccgacttgaggatgactat

SEQ ID NO: 36970 - DNA, 25 bp, Saccharomyces pastorianus
atttgatttgtgctggaattcctta

SEQ ID NO: 36971 - DNA, 25 bp, Saccharomyces pastorianus
gtacattatctgttttatatccgga

SEQ ID NO: 36972 - DNA, 25 bp, Saccharomyces pastorianus
agttttgagtcgtactggtccagta

SEQ ID NO: 36973 - DNA, 25 bp, Saccharomyces pastorianus
gagtgaatttttccctaaagacaat

SEQ ID NO: 36974 - DNA, 25 bp, Saccharomyces pastorianus
gtgctttggtcacccaattgtacca

SEQ ID NO: 36975 - DNA, 25 bp, Saccharomyces pastorianus
aatcgtatacaatccttcaccattc

SEQ ID NO: 36976 - DNA, 25 bp, Saccharomyces pastorianus
tttgatgatcatttcgtcgagcaag

SEQ ID NO: 36977 - DNA, 25 bp, Saccharomyces pastorianus
gatgtttctgtaattgacaccactg

SEQ ID NO: 36978 - DNA, 25 bp, Saccharomyces pastorianus
tttgggctctaaaggtgtgttgttt

SEQ ID NO: 36979 - DNA, 25 bp, Saccharomyces pastorianus
ggaattccttccagccgttaaagat

SEQ ID NO: 36980 - DNA, 25 bp, Saccharomyces pastorianus
ggcaagttcgttgactattcagaaa

SEQ ID NO: 36981 - DNA, 25 bp, Saccharomyces pastorianus
acaggccaagtttccaaatcgtata

SEQ ID NO: 36982 - DNA, 25 bp, Saccharomyces pastorianus
tgaaattccagaccctatatcgata

SEQ ID NO: 36983 - DNA, 25 bp, Saccharomyces pastorianus
acaccactggagctggagacacctt

SEQ ID NO: 36984 - DNA, 25 bp, Saccharomyces pastorianus
aagcagtttcttcatcgggtttatt

SEQ ID NO: 36985 - DNA, 25 bp, Saccharomyces pastorianus
tccctggtcgattgttgttttggca

SEQ ID NO: 36986 - DNA, 25 bp, Saccharomyces pastorianus
ccaatcgtcttgtttttcggtacag

SEQ ID NO: 36987 - DNA, 25 bp, Saccharomyces pastorianus
aactgtgggcgcttttatttcaaga

SEQ ID NO: 36988 - DNA, 25 bp, Saccharomyces pastorianus
gaaagtgcctttggatcgtctggtt

SEQ ID NO: 36989 - DNA, 25 bp, Saccharomyces pastorianus
gttcctgcctcattattagcgttta

SEQ ID NO: 36990 - DNA, 25 bp, Saccharomyces pastorianus
tcgctgtgacaattgctaccattct

SEQ ID NO: 36991 - DNA, 25 bp, Saccharomyces pastorianus
aatgacggtgtctttgctatcttat

SEQ ID NO: 36992 - DNA, 25 bp, Saccharomyces pastorianus
tgggttccctaacgttactgctatt

SEQ ID NO: 36993 - DNA, 25 bp, Saccharomyces pastorianus
gtcgttggtacttttgtctcgcaca

SEQ ID NO: 36994 - DNA, 25 bp, Saccharomyces pastorianus
tagcgtttatttgcgtcatcaccat

SEQ ID NO: 36995 - DNA, 25 bp, Saccharomyces pastorianus
ctttgttccacattcgctcgaaaat

SEQ ID NO: 36996 - DNA, 25 bp, Saccharomyces pastorianus
atttgtggtcttgttggtgttctta

SEQ ID NO: 36997 - DNA, 25 bp, Saccharomyces pastorianus
taattacctagtatccaatggctgg

SEQ ID NO: 36998 - DNA, 25 bp, Saccharomyces pastorianus
attattggtttctctggatacatca

SEQ ID NO: 36999 - DNA, 25 bp, Saccharomyces pastorianus
atttttcagatcgtatcggtcgtaa

SEQ ID NO: 37000 - DNA, 25 bp, Saccharomyces pastorianus
gaatgtttccaaccaatcagagaca

SEQ ID NO: 37001 - DNA, 25 bp, Saccharomyces pastorianus
ctatggtatatctgcggtaactggt

SEQ ID NO: 37002 - DNA, 25 bp, Saccharomyces pastorianus
tcatcatcttctatgcgctcatgaa

SEQ ID NO: 37003 - DNA, 25 bp, Saccharomyces pastorianus
gttctagctgtattaggtgttccaa

SEQ ID NO: 37004 - DNA, 25 bp, Saccharomyces pastorianus
attagcagcgaatcatcagcaaccg

SEQ ID NO: 37005 - DNA, 25 bp, Saccharomyces pastorianus
gttccaattggtgcttatttttcag

SEQ ID NO: 37006 - DNA, 25 bp, Saccharomyces pastorianus
gcgatcgatacttgtactccagggt

SEQ ID NO: 37007 - DNA, 25 bp, Saccharomyces pastorianus
aaaaccgtattagcgcactgtgttc

SEQ ID NO: 37008 - DNA, 25 bp, Saccharomyces pastorianus
gcagacaggcctttgccgtttcaag

SEQ ID NO: 37009 - DNA, 25 bp, Saccharomyces pastorianus
agcatactagctaccggcagacagg

SEQ ID NO: 37010 - DNA, 25 bp, Saccharomyces pastorianus
tggtaccgacgtttcagcaggtcat

SEQ ID NO: 37011 - DNA, 25 bp, Saccharomyces pastorianus
gtttcagagtgcctgtatctagcaa

SEQ ID NO: 37012 - DNA, 25 bp, Saccharomyces pastorianus
ctaactcttctttgacttcaggaga

SEQ ID NO: 37013 - DNA, 25 bp, Saccharomyces pastorianus
tggtgagacaacgacgctgcggcat

SEQ ID NO: 37014 - DNA, 25 bp, Saccharomyces pastorianus
gtcgacacattccattggcagctac

SEQ ID NO: 37015 - DNA, 25 bp, Saccharomyces pastorianus
agcaggtcattcttgcagcatacta

SEQ ID NO: 37016 - DNA, 25 bp, Saccharomyces pastorianus
ctgtgttcacttgacagacgctgaa

SEQ ID NO: 37017 - DNA, 25 bp, Saccharomyces pastorianus
aagacttactactacctgtccaggg

SEQ ID NO: 37018 - DNA, 25 bp, Saccharomyces pastorianus
ggtggcgacggcaagtttttccaga

SEQ ID NO: 37019 - DNA, 25 bp, Saccharomyces pastorianus
ttggctggctcttttcttcattgtc

SEQ ID NO: 37020 - DNA, 25 bp, Saccharomyces pastorianus
agagcccatccattgacactggtaa

SEQ ID NO: 37021 - DNA, 25 bp, Saccharomyces pastorianus
acttttcttccattcaaggctgtgc

SEQ ID NO: 37022 - DNA, 25 bp, Saccharomyces pastorianus
ttgctaacgctatctggtctaccat

SEQ ID NO: 37023 - DNA, 25 bp, Saccharomyces pastorianus
aagaacttcgcgttcatctggacat

SEQ ID NO: 37024 - DNA, 25 bp, Saccharomyces pastorianus
gtctgtacaccggatgctacgtgaa

SEQ ID NO: 37025 - DNA, 25 bp, Saccharomyces pastorianus
gaaaagtctacctacaccagcggta

SEQ ID NO: 37026 - DNA, 25 bp, Saccharomyces pastorianus
atccgtcttcttgatgcttgctaac

SEQ ID NO: 37027 - DNA, 25 bp, Saccharomyces pastorianus
gtgctttactgtgtgctgtcttggc

SEQ ID NO: 37028 - DNA, 25 bp, Saccharomyces pastorianus
ttgggtttgaccattttcacgtggg

SEQ ID NO: 37029 - DNA, 25 bp, Saccharomyces pastorianus
ggttgcttatattaccggcgctaat

SEQ ID NO: 37030 - DNA, 25 bp, Saccharomyces pastorianus
gcttctgacgttgtatgtcgttact

SEQ ID NO: 37031 - DNA, 25 bp, Saccharomyces pastorianus
aatcggtgcatgctttgggagtcca

SEQ ID NO: 37032 - DNA, 25 bp, Saccharomyces pastorianus
gttcatttagttgttgccactctta

SEQ ID NO: 37033 - DNA, 25 bp, Saccharomyces pastorianus
gaagatttttcctattggttgctta

SEQ ID NO: 37034 - DNA, 25 bp, Saccharomyces pastorianus
aattccgttggtgatttagtgtcga

SEQ ID NO: 37035 - DNA, 25 bp, Saccharomyces pastorianus
gtccactattgtatttcctattcgg

SEQ ID NO: 37036 - DNA, 25 bp, Saccharomyces pastorianus
aagatcagtcttttgcttctgacgt

SEQ ID NO: 37037 - DNA, 25 bp, Saccharomyces pastorianus
ttagcgtgtatttcgaagactgttc

SEQ ID NO: 37038 - DNA, 25 bp, Saccharomyces pastorianus
gggtcggaatctcgattgcattttt

SEQ ID NO: 37039 - DNA, 25 bp, Saccharomyces pastorianus
atgctggtatttcaaggctgctgct

SEQ ID NO: 37040 - DNA, 25 bp, Saccharomyces pastorianus
gtgtgccaaagactgcgagtaccct

SEQ ID NO: 37041 - DNA, 25 bp, Saccharomyces pastorianus
gctgctgcttctcaaccaagaggga

SEQ ID NO: 37042 - DNA, 25 bp, Saccharomyces pastorianus
aagagaccctcaactggccgtaaag

SEQ ID NO: 37043 - DNA, 25 bp, Saccharomyces pastorianus
ggagcggcaaacgtcttgaaaccaa

SEQ ID NO: 37044 - DNA, 25 bp, Saccharomyces pastorianus
gcgattctccgcaaacgttgtatga

SEQ ID NO: 37045 - DNA, 25 bp, Saccharomyces pastorianus
tttgccctgggcttttactatgaaa

SEQ ID NO: 37046 - DNA, 25 bp, Saccharomyces pastorianus
gttatcgttgagtggctggtatcta

SEQ ID NO: 37047 - DNA, 25 bp, Saccharomyces pastorianus
gagtaccctctagcgcaatggaagt

SEQ ID NO: 37048 - DNA, 25 bp, Saccharomyces pastorianus
ggatgagccacttatacggacttaa

SEQ ID NO: 37049 - DNA, 25 bp, Saccharomyces pastorianus
agagtagcaagtgttcggacggcaa

SEQ ID NO: 37050 - DNA, 25 bp, Saccharomyces pastorianus
aatagaaatctcttcgtccgtgccg

SEQ ID NO: 37051 - DNA, 25 bp, Saccharomyces pastorianus
gtacggtgatgttcctgacgagttt

SEQ ID NO: 37052 - DNA, 25 bp, Saccharomyces pastorianus
gcgactctactgacccatttaatag

SEQ ID NO: 37053 - DNA, 25 bp, Saccharomyces pastorianus
cagcagcatttgtcacaccggaaat

SEQ ID NO: 37054 - DNA, 25 bp, Saccharomyces pastorianus
gtttacatcaatctttcggagcaaa

SEQ ID NO: 37055 - DNA, 25 bp, Saccharomyces pastorianus
aatgaaggaccctgtcactttgcca

SEQ ID NO: 37056 - DNA, 25 bp, Saccharomyces pastorianus
gaaagatatcccagcagcatttgtc

SEQ ID NO: 37057 - DNA, 25 bp, Saccharomyces pastorianus
agttcattggcgctgttgctaaaga

SEQ ID NO: 37058 - DNA, 25 bp, Saccharomyces pastorianus
ccgtgccgttgacattcttggtaga

SEQ ID NO: 37059 - DNA, 25 bp, Saccharomyces pastorianus
cagattggccagtatgctgaactat

SEQ ID NO: 37060 - DNA, 25 bp, Saccharomyces pastorianus
aaagcgcatctcctaagcgactcta

SEQ ID NO: 37061 - DNA, 25 bp, Saccharomyces pastorianus
atctctaatccaggcgagtgcttga

SEQ ID NO: 37062 - DNA, 25 bp, Saccharomyces pastorianus
acaccttggtcggagaatagtctgc

SEQ ID NO: 37063 - DNA, 25 bp, Saccharomyces pastorianus
agtctgcttactatcccaagtgaaa

SEQ ID NO: 37064 - DNA, 25 bp, Saccharomyces pastorianus
gacactcagcccttacatatttatt

SEQ ID NO: 37065 - DNA, 25 bp, Saccharomyces pastorianus
ccctgaccattcctttaatcttaat

SEQ ID NO: 37066 - DNA, 25 bp, Saccharomyces pastorianus
tttattaccccgcagaaatctctaa

SEQ ID NO: 37067 - DNA, 25 bp, Saccharomyces pastorianus
gaggtaacagtagccatccgcaggg

SEQ ID NO: 37068 - DNA, 25 bp, Saccharomyces pastorianus
attgataccaaatgtgcccggattt

SEQ ID NO: 37069 - DNA, 25 bp, Saccharomyces pastorianus
aaagattcaccaaagctactgctca

SEQ ID NO: 37070 - DNA, 25 bp, Saccharomyces pastorianus
gtgcccggattttatctatcttaca

SEQ ID NO: 37071 - DNA, 25 bp, Saccharomyces pastorianus
ttgtattctaggtttgcccctgacc

SEQ ID NO: 37072 - DNA, 25 bp, Saccharomyces pastorianus
agttgcaaccgtctttaccattgat

SEQ ID NO: 37073 - DNA, 25 bp, Saccharomyces pastorianus
gaatatcgctgtcttgtctcaacaa

SEQ ID NO: 37074 - DNA, 25 bp, Saccharomyces pastorianus
gaggatctccgcatttgcacagttg

SEQ ID NO: 37075 - DNA, 25 bp, Saccharomyces pastorianus
ggaaaaccatggacctttcagcggt

SEQ ID NO: 37076 - DNA, 25 bp, Saccharomyces pastorianus
ttcttggtcccgattcaggagcaat

SEQ ID NO: 37077 - DNA, 25 bp, Saccharomyces pastorianus
gaataaccacgtctgatctgattaa

SEQ ID NO: 37078 - DNA, 25 bp, Saccharomyces pastorianus
actattgttcaatgccccaagtctt

SEQ ID NO: 37079 - DNA, 25 bp, Saccharomyces pastorianus
aagactttgaacgattcctctccct

SEQ ID NO: 37080 - DNA, 25 bp, Saccharomyces pastorianus
agttccatcgctggcatctataatg

SEQ ID NO: 37081 - DNA, 25 bp, Saccharomyces pastorianus
taattctctagcgttcttcttggtc

SEQ ID NO: 37082 - DNA, 25 bp, Saccharomyces pastorianus
gaggtccaccaaaggcttcatttca

SEQ ID NO: 37083 - DNA, 25 bp, Saccharomyces pastorianus
agcacgccggaaaaattcgccatcg

SEQ ID NO: 37084 - DNA, 25 bp, Saccharomyces pastorianus
gacgactatatatctccaatcactt

SEQ ID NO: 37085 - DNA, 25 bp, Saccharomyces pastorianus
aataacctgttcgtggtgacttcga

SEQ ID NO: 37086 - DNA, 25 bp, Saccharomyces pastorianus
gaggagtcatcagtccatgcattct

SEQ ID NO: 37087 - DNA, 25 bp, Saccharomyces pastorianus
acgacggcgggctgaataacaccaa

SEQ ID NO: 37088 - DNA, 25 bp, Saccharomyces pastorianus
atggcaatgctgtgtctgctatcaa

SEQ ID NO: 37089 - DNA, 25 bp, Saccharomyces pastorianus
tgctatcaagtcctcgtccaagaaa

SEQ ID NO: 37090 - DNA, 25 bp, Saccharomyces pastorianus
aaggcagcgcccattgttgttggta

SEQ ID NO: 37091 - DNA, 25 bp, Saccharomyces pastorianus
taatgacggcggcaacgctcaggat

SEQ ID NO: 37092 - DNA, 25 bp, Saccharomyces pastorianus
tataatctcacccaagtcgagcagg

SEQ ID NO: 37093 - DNA, 25 bp, Saccharomyces pastorianus
taacaccaagtctcatctcagcggg

SEQ ID NO: 37094 - DNA, 25 bp, Saccharomyces pastorianus
gatagaccacgcaggaagtccgaga

SEQ ID NO: 37095 - DNA, 25 bp, Saccharomyces pastorianus
caaatgccagttcggcgtttgcgta

SEQ ID NO: 37096 - DNA, 25 bp, Saccharomyces pastorianus
ttcttgtaggccacgagtttcccag

SEQ ID NO: 37097 - DNA, 25 bp, Saccharomyces pastorianus
aacctgtgtggagtcaggaccctca

SEQ ID NO: 37098 - DNA, 25 bp, Saccharomyces pastorianus
agggaagccgccgtacttgaagata

SEQ ID NO: 37099 - DNA, 25 bp, Saccharomyces pastorianus
ggaagtctctataaacctgtgtgga

SEQ ID NO: 37100 - DNA, 25 bp, Saccharomyces pastorianus
gatatcggtgtctcaaggccaaggt

SEQ ID NO: 37101 - DNA, 25 bp, Saccharomyces pastorianus
gggactataggtaccacataggcca

SEQ ID NO: 37102 - DNA, 25 bp, Saccharomyces pastorianus
ggaaccaagatctgtttgctacgca

SEQ ID NO: 37103 - DNA, 25 bp, Saccharomyces pastorianus
gtttttggcggcatgtcgtattcaa

SEQ ID NO: 37104 - DNA, 25 bp, Saccharomyces pastorianus
gtatcagcaagcgtacaaagtcgtt

SEQ ID NO: 37105 - DNA, 25 bp, Saccharomyces pastorianus
ggcggtttagatttcacattcgatt

SEQ ID NO: 37106 - DNA, 25 bp, Saccharomyces pastorianus
actgttttgattttggtgctaccga

SEQ ID NO: 37107 - DNA, 25 bp, Saccharomyces pastorianus
agaacgataccgtcgctgtgtttgg

SEQ ID NO: 37108 - DNA, 25 bp, Saccharomyces pastorianus
gggctgctgtcaagactgctaatgt

SEQ ID NO: 37109 - DNA, 25 bp, Saccharomyces pastorianus
taccgatttcatcaaccccaaggaa

SEQ ID NO: 37110 - DNA, 25 bp, Saccharomyces pastorianus
ctttccgtcattcaaggcgctaagg

SEQ ID NO: 37111 - DNA, 25 bp, Saccharomyces pastorianus
cattccaattggtcaccggtagagt

SEQ ID NO: 37112 - DNA, 25 bp, Saccharomyces pastorianus
ccgctgctggcgaagagatctcaac

SEQ ID NO: 37113 - DNA, 25 bp, Saccharomyces pastorianus
agatctcaaccagaccattccaatt

SEQ ID NO: 37114 - DNA, 25 bp, Saccharomyces pastorianus
agatttgcatcacggtgactgctta

SEQ ID NO: 37115 - DNA, 25 bp, Saccharomyces pastorianus
attatcattggtgtcgccgctgctg

SEQ ID NO: 37116 - DNA, 25 bp, Saccharomyces pastorianus
agaccatggactgtgttccctgtca

SEQ ID NO: 37117 - DNA, 25 bp, Saccharomyces pastorianus
ccaccacaaagggagctagaaaagg

SEQ ID NO: 37118 - DNA, 25 bp, Saccharomyces pastorianus
aaggaagagaccatggactgtgttc

SEQ ID NO: 37119 - DNA, 25 bp, Saccharomyces pastorianus
agagaccatggactgtgttccctgt

SEQ ID NO: 37120 - DNA, 25 bp, Saccharomyces pastorianus
atttcgttggcggagtttgagaaga

SEQ ID NO: 37121 - DNA, 25 bp, Saccharomyces pastorianus
gaccatggactgtgttccctgtcag

SEQ ID NO: 37122 - DNA, 25 bp, Saccharomyces pastorianus
aagatgccaagaagggcatttcgtt

SEQ ID NO: 37123 - DNA, 25 bp, Saccharomyces pastorianus
aatcctccaccacaaagggagctag

SEQ ID NO: 37124 - DNA, 25 bp, Saccharomyces pastorianus
gcggagtttgagaagagaaacccac

SEQ ID NO: 37125 - DNA, 25 bp, Saccharomyces pastorianus
gaagagaccatggactgtgttccct

SEQ ID NO: 37126 - DNA, 25 bp, Saccharomyces pastorianus
ccaagaagggcatttcgttggcgga

SEQ ID NO: 37127 - DNA, 25 bp, Saccharomyces pastorianus
gctgaagagttttctgacatgatca

SEQ ID NO: 37128 - DNA, 25 bp, Saccharomyces pastorianus
taaaccataattacaacctctcgag

SEQ ID NO: 37129 - DNA, 25 bp, Saccharomyces pastorianus
tcactattcggctcaatcatggtaa

SEQ ID NO: 37130 - DNA, 25 bp, Saccharomyces pastorianus
attctctcagaacacatacctggta

SEQ ID NO: 37131 - DNA, 25 bp, Saccharomyces pastorianus
aacctctcgagtacgaagccagtta

SEQ ID NO: 37132 - DNA, 25 bp, Saccharomyces pastorianus
tacaagacccaaagctcttttgcat

SEQ ID NO: 37133 - DNA, 25 bp, Saccharomyces pastorianus
gctcttttgcattagattcccagca

SEQ ID NO: 37134 - DNA, 25 bp, Saccharomyces pastorianus
ggcactgatattttagacggtcctt

SEQ ID NO: 37135 - DNA, 25 bp, Saccharomyces pastorianus
aaatcattgagtttagccactgaga

SEQ ID NO: 37136 - DNA, 25 bp, Saccharomyces pastorianus
ttttagacggtccttcactattcgg

SEQ ID NO: 37137 - DNA, 25 bp, Saccharomyces pastorianus
aaatgtccacgcattcttgcatgta

SEQ ID NO: 37138 - DNA, 25 bp, Saccharomyces pastorianus
tggaggtgatcctgggcaaccccat

SEQ ID NO: 37139 - DNA, 25 bp, Saccharomyces pastorianus
aatcgccaagagaaacggtgtccca

SEQ ID NO: 37140 - DNA, 25 bp, Saccharomyces pastorianus
agatcgggaccggtcatatcagcca

SEQ ID NO: 37141 - DNA, 25 bp, Saccharomyces pastorianus
ttgctgcgagtgagggcatcgtcat

SEQ ID NO: 37142 - DNA, 25 bp, Saccharomyces pastorianus
actcccggtggaagaagctcgtcta

SEQ ID NO: 37143 - DNA, 25 bp, Saccharomyces pastorianus
atatcagccaggtcagccaggacta

SEQ ID NO: 37144 - DNA, 25 bp, Saccharomyces pastorianus
agagcactgcgactgaggtgttcca

SEQ ID NO: 37145 - DNA, 25 bp, Saccharomyces pastorianus
aggtgttccagcctgccatgagaga

SEQ ID NO: 37146 - DNA, 25 bp, Saccharomyces pastorianus
ttacaacctgctcgtgctagtgcaa

SEQ ID NO: 37147 - DNA, 25 bp, Saccharomyces pastorianus
aaacaaggtgttcaagccctccatg

SEQ ID NO: 37148 - DNA, 25 bp, Saccharomyces pastorianus
aacttcgtggaattcgagcccaggg

SEQ ID NO: 37149 - DNA, 25 bp, Saccharomyces pastorianus
gacccgatcgcggataaactactca

SEQ ID NO: 37150 - DNA, 25 bp, Saccharomyces pastorianus
atctcgaatagcttgtacacccttt

SEQ ID NO: 37151 - DNA, 25 bp, Saccharomyces pastorianus
aataccctggtcgtgtgaaatggaa

SEQ ID NO: 37152 - DNA, 25 bp, Saccharomyces pastorianus
aacgaacaatttaaccccagcactg

SEQ ID NO: 37153 - DNA, 25 bp, Saccharomyces pastorianus
gataagcgccttatttgtacgatat

SEQ ID NO: 37154 - DNA, 25 bp, Saccharomyces pastorianus
agatacggcctcaaaactgttgcag

SEQ ID NO: 37155 - DNA, 25 bp, Saccharomyces pastorianus
tgggcctttttgcattttccagcat

SEQ ID NO: 37156 - DNA, 25 bp, Saccharomyces pastorianus
gtacaccctttattggacttttcat

SEQ ID NO: 37157 - DNA, 25 bp, Saccharomyces pastorianus
actactcatgattaccacaaccttg

SEQ ID NO: 37158 - DNA, 25 bp, Saccharomyces pastorianus
gacaatattggacccgatcgcggat

SEQ ID NO: 37159 - DNA, 25 bp, Saccharomyces pastorianus
tcgggccctcagatcataccagtat

SEQ ID NO: 37160 - DNA, 25 bp, Saccharomyces pastorianus
cacccttgacatccatggagcttaa

SEQ ID NO: 37161 - DNA, 25 bp, Saccharomyces pastorianus
gctagaacgtcttccaactgggcaa

SEQ ID NO: 37162 - DNA, 25 bp, Saccharomyces pastorianus
aagcaatgacacatcgttttctccc

SEQ ID NO: 37163 - DNA, 25 bp, Saccharomyces pastorianus
gaaacggtctaggtctgaacacata

SEQ ID NO: 37164 - DNA, 25 bp, Saccharomyces pastorianus
agaggaccaccgtcgatcatttctg

SEQ ID NO: 37165 - DNA, 25 bp, Saccharomyces pastorianus
aaaccaatggaatgcccgtcggtga

SEQ ID NO: 37166 - DNA, 25 bp, Saccharomyces pastorianus
gtgcatgacatttcctatctcacaa

SEQ ID NO: 37167 - DNA, 25 bp, Saccharomyces pastorianus
gaagtcgtcaataatccagttcctg

SEQ ID NO: 37168 - DNA, 25 bp, Saccharomyces pastorianus
ttaacagtccatctaccacaagcaa

SEQ ID NO: 37169 - DNA, 25 bp, Saccharomyces pastorianus
tagcggacgctatcaatgcggcacc

SEQ ID NO: 37170 - DNA, 25 bp, Saccharomyces pastorianus
aagatctgctactgtcaaacgaccg

SEQ ID NO: 37171 - DNA, 25 bp, Saccharomyces pastorianus
ttaaatggtcgtgtaaaggcgctcg

SEQ ID NO: 37172 - DNA, 25 bp, Saccharomyces pastorianus
gcagcagagctgttgaagatcccaa

SEQ ID NO: 37173 - DNA, 25 bp, Saccharomyces pastorianus
aatcgctctatcgagaaggttctta

SEQ ID NO: 37174 - DNA, 25 bp, Saccharomyces pastorianus
agaagctttggcatttacctcgttg

SEQ ID NO: 37175 - DNA, 25 bp, Saccharomyces pastorianus
agagctctgtatacaccatttttaa

SEQ ID NO: 37176 - DNA, 25 bp, Saccharomyces pastorianus
ttctgtccactcaataatcgctcta

SEQ ID NO: 37177 - DNA, 25 bp, Saccharomyces pastorianus
atttacctcgttggtcgccaatgaa

SEQ ID NO: 37178 - DNA, 25 bp, Saccharomyces pastorianus
ggacctgaccaattcgacagatcat

SEQ ID NO: 37179 - DNA, 25 bp, Saccharomyces pastorianus
aactgtatgtagattctgtccactc

SEQ ID NO: 37180 - DNA, 25 bp, Saccharomyces pastorianus
aaggcgctcgaacaattcatggata

SEQ ID NO: 37181 - DNA, 25 bp, Saccharomyces pastorianus
gtggatttgacttcatcggacctga

SEQ ID NO: 37182 - DNA, 25 bp, Saccharomyces pastorianus
tacggagatctcttcaatagacttg

SEQ ID NO: 37183 - DNA, 25 bp, Saccharomyces pastorianus
gcagatagatttagctctcgatgaa

SEQ ID NO: 37184 - DNA, 25 bp, Saccharomyces pastorianus
gatgtcgataatccattggcacagc

SEQ ID NO: 37185 - DNA, 25 bp, Saccharomyces pastorianus
taaaagccggttctcgtcatggaat

SEQ ID NO: 37186 - DNA, 25 bp, Saccharomyces pastorianus
ttggcacagcacagggatagaattt

SEQ ID NO: 37187 - DNA, 25 bp, Saccharomyces pastorianus
agatctattcttcttggtagcgagg

SEQ ID NO: 37188 - DNA, 25 bp, Saccharomyces pastorianus
ggaacagtgaccttttgaaaaccat

SEQ ID NO: 37189 - DNA, 25 bp, Saccharomyces pastorianus
gggaagccgcagctatatctgaaga

SEQ ID NO: 37190 - DNA, 25 bp, Saccharomyces pastorianus
gaattagcgtcactttccagtctag

SEQ ID NO: 37191 - DNA, 25 bp, Saccharomyces pastorianus
gaattcttcccaacggatgtcgata

SEQ ID NO: 37192 - DNA, 25 bp, Saccharomyces pastorianus
gaaagcgaccctaatgaggcccgat

SEQ ID NO: 37193 - DNA, 25 bp, Saccharomyces pastorianus
acattagggtttcttgagctaaact

SEQ ID NO: 37194 - DNA, 25 bp, Saccharomyces pastorianus
agtaataatcgacgctttcttggaa

SEQ ID NO: 37195 - DNA, 25 bp, Saccharomyces pastorianus
ggtacttccttctggcaaagctata

SEQ ID NO: 37196 - DNA, 25 bp, Saccharomyces pastorianus
gccgttaagggctaaaccactgttg

SEQ ID NO: 37197 - DNA, 25 bp, Saccharomyces pastorianus
gctatactcaagttcagagccgtta

SEQ ID NO: 37198 - DNA, 25 bp, Saccharomyces pastorianus
ggagttatatgcacgcaatcatcat

SEQ ID NO: 37199 - DNA, 25 bp, Saccharomyces pastorianus
ctagctggcgaagtttatgggaatc

SEQ ID NO: 37200 - DNA, 25 bp, Saccharomyces pastorianus
gagctaaactattttcagaactacg

SEQ ID NO: 37201 - DNA, 25 bp, Saccharomyces pastorianus
ccactgttggaaagttgtgcctcaa

SEQ ID NO: 37202 - DNA, 25 bp, Saccharomyces pastorianus
gcttccttggatttttcgattgttc

SEQ ID NO: 37203 - DNA, 25 bp, Saccharomyces pastorianus
aacggatttggaatgcttccttgga

SEQ ID NO: 37204 - DNA, 25 bp, Saccharomyces pastorianus
atacgttgaccacttgaaccataag

SEQ ID NO: 37205 - DNA, 25 bp, Saccharomyces pastorianus
gcgggtatgatgaccaatccttgaa

SEQ ID NO: 37206 - DNA, 25 bp, Saccharomyces pastorianus
tgacgttcaaggacacactacaata

SEQ ID NO: 37207 - DNA, 25 bp, Saccharomyces pastorianus
gaaagtggacaaggcgcctttgctc

SEQ ID NO: 37208 - DNA, 25 bp, Saccharomyces pastorianus
gcgatatctgtaatttgacgttcaa

SEQ ID NO: 37209 - DNA, 25 bp, Saccharomyces pastorianus
gagaacctatttgacgagccgttag

SEQ ID NO: 37210 - DNA, 25 bp, Saccharomyces pastorianus
aaatatacgagctacgaccgactaa

SEQ ID NO: 37211 - DNA, 25 bp, Saccharomyces pastorianus
gatataccgcaggaggagttcgaaa

SEQ ID NO: 37212 - DNA, 25 bp, Saccharomyces pastorianus
gaccgactaatcaaagcttcactga

SEQ ID NO: 37213 - DNA, 25 bp, Saccharomyces pastorianus
gaagaatacgctaacacccgttgaa

SEQ ID NO: 37214 - DNA, 25 bp, Saccharomyces pastorianus
gaaagtctgtcgtcttctaagaaag

SEQ ID NO: 37215 - DNA, 25 bp, Saccharomyces pastorianus
ctggatgcccggataggtcttatgg

SEQ ID NO: 37216 - DNA, 25 bp, Saccharomyces pastorianus
gaacttggagcacactgccgaggaa

SEQ ID NO: 37217 - DNA, 25 bp, Saccharomyces pastorianus
aagcagggcaagactttccccgagt

SEQ ID NO: 37218 - DNA, 25 bp, Saccharomyces pastorianus
gagtaaccaggctgctaacgcctat

SEQ ID NO: 37219 - DNA, 25 bp, Saccharomyces pastorianus
ctatgggcgtgctgcaatcggtcaa

SEQ ID NO: 37220 - DNA, 25 bp, Saccharomyces pastorianus
aatggtcagatctcacttgcgttac

SEQ ID NO: 37221 - DNA, 25 bp, Saccharomyces pastorianus
aagaattggacgtcctggatgcccg

SEQ ID NO: 37222 - DNA, 25 bp, Saccharomyces pastorianus
taatccgtgcagacgaggtcactat

SEQ ID NO: 37223 - DNA, 25 bp, Saccharomyces pastorianus
aaatgtcggtcaaagtgcccaacaa

SEQ ID NO: 37224 - DNA, 25 bp, Saccharomyces pastorianus
gactaccaccggctcttgaagagta

SEQ ID NO: 37225 - DNA, 25 bp, Saccharomyces pastorianus
gagggagtatctcaccattctggcc

SEQ ID NO: 37226 - DNA, 25 bp, Saccharomyces pastorianus
gactaaagtcactgtatccaccacg

SEQ ID NO: 37227 - DNA, 25 bp, Saccharomyces pastorianus
aagactactttgtccacttcaaatt

SEQ ID NO: 37228 - DNA, 25 bp, Saccharomyces pastorianus
atgacaacaacttcgaccactaatg

SEQ ID NO: 37229 - DNA, 25 bp, Saccharomyces pastorianus
gaagaaatgattcctcgtcaccaca

SEQ ID NO: 37230 - DNA, 25 bp, Saccharomyces pastorianus
gtttcaagactacaccacaggcgaa

SEQ ID NO: 37231 - DNA, 25 bp, Saccharomyces pastorianus
gttccagcgttaatggatcgtccac

SEQ ID NO: 37232 - DNA, 25 bp, Saccharomyces pastorianus
gtactgtctgaaactgcaagcggga

SEQ ID NO: 37233 - DNA, 25 bp, Saccharomyces pastorianus
gctaccccagctttaaagactactt

SEQ ID NO: 37234 - DNA, 25 bp, Saccharomyces pastorianus
cacgccgtcgactaacactaaggga

SEQ ID NO: 37235 - DNA, 25 bp, Saccharomyces pastorianus
gaagtcaggtcttacatgcacaaac

SEQ ID NO: 37236 - DNA, 25 bp, Saccharomyces pastorianus
aattgacaggctgggcgcaagctgc

SEQ ID NO: 37237 - DNA, 25 bp, Saccharomyces pastorianus
ggaaaacttgcccaaattctccaag

SEQ ID NO: 37238 - DNA, 25 bp, Saccharomyces pastorianus
gatcttggaggtttctgctgacgga

SEQ ID NO: 37239 - DNA, 25 bp, Saccharomyces pastorianus
tttgaaatcatactccaacgacgat

SEQ ID NO: 37240 - DNA, 25 bp, Saccharomyces pastorianus
cattggatttgactgctgctaggaa

SEQ ID NO: 37241 - DNA, 25 bp, Saccharomyces pastorianus
gttgaagcttcacagattcctgagt

SEQ ID NO: 37242 - DNA, 25 bp, Saccharomyces pastorianus
taaagaggcgtgttccattggattt

SEQ ID NO: 37243 - DNA, 25 bp, Saccharomyces pastorianus
aggacgacaaggacgactcttccgc

SEQ ID NO: 37244 - DNA, 25 bp, Saccharomyces pastorianus
gtttgacctgcaaagagaagcttcc

SEQ ID NO: 37245 - DNA, 25 bp, Saccharomyces pastorianus
gatcaagatcgttcaacagtcatag

SEQ ID NO: 37246 - DNA, 25 bp, Saccharomyces pastorianus
gatgaatttgccacatgaagacgtt

SEQ ID NO: 37247 - DNA, 25 bp, Saccharomyces pastorianus
gtactacgcagttccgagatcttgg

SEQ ID NO: 37248 - DNA, 25 bp, Saccharomyces pastorianus
gtgactccagggtggtcctacgtac

SEQ ID NO: 37249 - DNA, 25 bp, Saccharomyces pastorianus
atggctacgttgcaaacgctcacgg

SEQ ID NO: 37250 - DNA, 25 bp, Saccharomyces pastorianus
tactgacggccgatagcaactatgc

SEQ ID NO: 37251 - DNA, 25 bp, Saccharomyces pastorianus
gccaccatcgactccaaaagtttta

SEQ ID NO: 37252 - DNA, 25 bp, Saccharomyces pastorianus
gtataatccccgtaagcgactttcg

SEQ ID NO: 37253 - DNA, 25 bp, Saccharomyces pastorianus
tcaggtcttctcacaaacggcaatt

SEQ ID NO: 37254 - DNA, 25 bp, Saccharomyces pastorianus
tgtcgtgaaatacgcgcccatgcaa

SEQ ID NO: 37255 - DNA, 25 bp, Saccharomyces pastorianus
atacgttcactctatgttcaggcac

SEQ ID NO: 37256 - DNA, 25 bp, Saccharomyces pastorianus
gttcaggcaccaatgcgttgatcga

SEQ ID NO: 37257 - DNA, 25 bp, Saccharomyces pastorianus
tattgatcagcataccaccgtgact

SEQ ID NO: 37258 - DNA, 25 bp, Saccharomyces pastorianus
actgtcgggactgacggtgtctatt

SEQ ID NO: 37259 - DNA, 25 bp, Saccharomyces pastorianus
gaaccattccggtaagttggtctgt

SEQ ID NO: 37260 - DNA, 25 bp, Saccharomyces pastorianus
tgaaccctttgaaaacatcgccatc

SEQ ID NO: 37261 - DNA, 25 bp, Saccharomyces pastorianus
aaaattgcagctgtgaaggacccaa

SEQ ID NO: 37262 - DNA, 25 bp, Saccharomyces pastorianus
tgaaggacccaaagaccggattagt

SEQ ID NO: 37263 - DNA, 25 bp, Saccharomyces pastorianus
ccggattagtgggtttggctattca

SEQ ID NO: 37264 - DNA, 25 bp, Saccharomyces pastorianus
taccacctctcatcaggatagtatc

SEQ ID NO: 37265 - DNA, 25 bp, Saccharomyces pastorianus
aatgcatatgtcgtggtccagtgtc

SEQ ID NO: 37266 - DNA, 25 bp, Saccharomyces pastorianus
aagcagcccaagattttcagcacca

SEQ ID NO: 37267 - DNA, 25 bp, Saccharomyces pastorianus
gccatcgaactaccgccaaatgaga

SEQ ID NO: 37268 - DNA, 25 bp, Saccharomyces pastorianus
gataaactcggaataccacctctca

SEQ ID NO: 37269 - DNA, 25 bp, Saccharomyces pastorianus
ggcgtagtccctgcgtctaaaattg

SEQ ID NO: 37270 - DNA, 25 bp, Saccharomyces pastorianus
tctgatttgtacactgatcccggtc

SEQ ID NO: 37271 - DNA, 25 bp, Saccharomyces pastorianus
tgcactctttgcgaatctgatttgt

SEQ ID NO: 37272 - DNA, 25 bp, Saccharomyces pastorianus
ggacatccgattgctaacgatccga

SEQ ID NO: 37273 - DNA, 25 bp, Saccharomyces pastorianus
tggacgatcacaccaaatcagggtt

SEQ ID NO: 37274 - DNA, 25 bp, Saccharomyces pastorianus
aaggtgcaaacctctcactggacga

SEQ ID NO: 37275 - DNA, 25 bp, Saccharomyces pastorianus
tcccggtcctaatgatcttgatctt

SEQ ID NO: 37276 - DNA, 25 bp, Saccharomyces pastorianus
tcttgatctttggttacatgcatac

SEQ ID NO: 37277 - DNA, 25 bp, Saccharomyces pastorianus
gccaagcacgcgaagaccgttttta

SEQ ID NO: 37278 - DNA, 25 bp, Saccharomyces pastorianus
gacttgctcttaatgcggtatgcca

SEQ ID NO: 37279 - DNA, 25 bp, Saccharomyces pastorianus
agggttcatctgcaatacttaggac

SEQ ID NO: 37280 - DNA, 25 bp, Saccharomyces pastorianus
gtatcataagaattccgctaacggt

SEQ ID NO: 37281 - DNA, 25 bp, Saccharomyces pastorianus
ggacgaagccgacaccaaggacgaa

SEQ ID NO: 37282 - DNA, 25 bp, Saccharomyces pastorianus
tatatgcttgcacagccgatattgc

SEQ ID NO: 37283 - DNA, 25 bp, Saccharomyces pastorianus
tgcagaaggtgaggctgaagctttc

SEQ ID NO: 37284 - DNA, 25 bp, Saccharomyces pastorianus
tgaagctttcacttttgccatcaga

SEQ ID NO: 37285 - DNA, 25 bp, Saccharomyces pastorianus
tctccagatgtccatttcgaaccag

SEQ ID NO: 37286 - DNA, 25 bp, Saccharomyces pastorianus
ttcgaaccagttgttcacttggaaa

SEQ ID NO: 37287 - DNA, 25 bp, Saccharomyces pastorianus
ctaacgttggttccgacagatcctg

SEQ ID NO: 37288 - DNA, 25 bp, Saccharomyces pastorianus
aggatgccccagaatctccagatgt

SEQ ID NO: 37289 - DNA, 25 bp, Saccharomyces pastorianus
cagatcctgggtatatgcttgcaca

SEQ ID NO: 37290 - DNA, 25 bp, Saccharomyces pastorianus
ggaaggcgaggatgccccagaatct

SEQ ID NO: 37291 - DNA, 25 bp, Saccharomyces pastorianus
gactttgaagatttgtgccaaccac

SEQ ID NO: 37292 - DNA, 25 bp, Saccharomyces pastorianus
aaaacgttagtgatgcggtccagct

SEQ ID NO: 37293 - DNA, 25 bp, Saccharomyces pastorianus
gcttgtgttccctagagactgtgac

SEQ ID NO: 37294 - DNA, 25 bp, Saccharomyces pastorianus
atctggttggtgttttccgtaatca

SEQ ID NO: 37295 - DNA, 25 bp, Saccharomyces pastorianus
agagaaatcccatctgtttactccc

SEQ ID NO: 37296 - DNA, 25 bp, Saccharomyces pastorianus
tgtttactcccctatttgattcgga

SEQ ID NO: 37297 - DNA, 25 bp, Saccharomyces pastorianus
gaataccaagatttcctcgggttgc

SEQ ID NO: 37298 - DNA, 25 bp, Saccharomyces pastorianus
gcggtccagctaaacggtgtcattg

SEQ ID NO: 37299 - DNA, 25 bp, Saccharomyces pastorianus
gacgcagacttactgggcatcatat

SEQ ID NO: 37300 - DNA, 25 bp, Saccharomyces pastorianus
aacggtcgatccgattgtagccaaa

SEQ ID NO: 37301 - DNA, 25 bp, Saccharomyces pastorianus
gtgccctgtattcagacgcagactt

SEQ ID NO: 37302 - DNA, 25 bp, Saccharomyces pastorianus
tagacatcgttcaacttcacggcga

SEQ ID NO: 37303 - DNA, 25 bp, Saccharomyces pastorianus
gagactacttgatgattttccccgt

SEQ ID NO: 37304 - DNA, 25 bp, Saccharomyces pastorianus
tgctgaagcgttgaactgttcccgt

SEQ ID NO: 37305 - DNA, 25 bp, Saccharomyces pastorianus
gccaaacacgtttactctgagtcgc

SEQ ID NO: 37306 - DNA, 25 bp, Saccharomyces pastorianus
gtccctggtggtgctaacggtaata

SEQ ID NO: 37307 - DNA, 25 bp, Saccharomyces pastorianus
ggaagagtcgctctccgacaaacaa

SEQ ID NO: 37308 - DNA, 25 bp, Saccharomyces pastorianus
ttttacgcagtttggccgattgatg

SEQ ID NO: 37309 - DNA, 25 bp, Saccharomyces pastorianus
ttatggttctcgtctgattggtgct

SEQ ID NO: 37310 - DNA, 25 bp, Saccharomyces pastorianus
aagacgccatcattttttccaagcc

SEQ ID NO: 37311 - DNA, 25 bp, Saccharomyces pastorianus
aaatttgctctattgcccttaccaa

SEQ ID NO: 37312 - DNA, 25 bp, Saccharomyces pastorianus
gacaagcgccaggtttcaaacggac

SEQ ID NO: 37313 - DNA, 25 bp, Saccharomyces pastorianus
aagctctacgaatgctcgtgcacgg

SEQ ID NO: 37314 - DNA, 25 bp, Saccharomyces pastorianus
gtgtcaagttctacatttggcctca

SEQ ID NO: 37315 - DNA, 25 bp, Saccharomyces pastorianus
gactgacccaaggtttgttttatct

SEQ ID NO: 37316 - DNA, 25 bp, Saccharomyces pastorianus
gattccctgattaaggtcttgattt

SEQ ID NO: 37317 - DNA, 25 bp, Saccharomyces pastorianus
gatccttgatgattctgaggttgaa

SEQ ID NO: 37318 - DNA, 25 bp, Saccharomyces pastorianus
agccgcattgcattacttaaagtcg

SEQ ID NO: 37319 - DNA, 25 bp, Saccharomyces pastorianus
aaagtcgacatcattctgttacatt

SEQ ID NO: 37320 - DNA, 25 bp, Saccharomyces pastorianus
acctgatatgttagatggcgtagtt

SEQ ID NO: 37321 - DNA, 25 bp, Saccharomyces pastorianus
acatttggcctcatattcataaagc

SEQ ID NO: 37322 - DNA, 25 bp, Saccharomyces pastorianus
tggatgcgatataccaagactcgat

SEQ ID NO: 37323 - DNA, 25 bp, Saccharomyces pastorianus
tatggtcgataatgattccctgatt

SEQ ID NO: 37324 - DNA, 25 bp, Saccharomyces pastorianus
gaacggcatttacccattaatcgat

SEQ ID NO: 37325 - DNA, 25 bp, Saccharomyces pastorianus
gaagtcggtcttgtcacatcaggga

SEQ ID NO: 37326 - DNA, 25 bp, Saccharomyces pastorianus
gatggtactttggtccagattgcta

SEQ ID NO: 37327 - DNA, 25 bp, Saccharomyces pastorianus
taaagaagggccctgctgccagaaa

SEQ ID NO: 37328 - DNA, 25 bp, Saccharomyces pastorianus
ccggcatgtgcttatacggccatga

SEQ ID NO: 37329 - DNA, 25 bp, Saccharomyces pastorianus
tgctgccagaaacggtgtcaagatt

SEQ ID NO: 37330 - DNA, 25 bp, Saccharomyces pastorianus
gttttacccaatcgaacttgcgaag

SEQ ID NO: 37331 - DNA, 25 bp, Saccharomyces pastorianus
gatttgaaatcagtgtgcccgatga

SEQ ID NO: 37332 - DNA, 25 bp, Saccharomyces pastorianus
caagattttcttgcccgatgctcaa

SEQ ID NO: 37333 - DNA, 25 bp, Saccharomyces pastorianus
gctagccgctagagacagtttgaga

SEQ ID NO: 37334 - DNA, 25 bp, Saccharomyces pastorianus
agcttctagcgaaccccgtaatgaa

SEQ ID NO: 37335 - DNA, 25 bp, Saccharomyces pastorianus
gagaaggctgttgagtttgctgaac

SEQ ID NO: 37336 - DNA, 25 bp, Saccharomyces pastorianus
aagtattcgacgtcaaattcccagc

SEQ ID NO: 37337 - DNA, 25 bp, Saccharomyces pastorianus
gcataccgctgaaactggtgaattt

SEQ ID NO: 37338 - DNA, 25 bp, Saccharomyces pastorianus
ggtgatcaattgcataccgctgaaa

SEQ ID NO: 37339 - DNA, 25 bp, Saccharomyces pastorianus
attcccagccggtgatcaattgcat

SEQ ID NO: 37340 - DNA, 25 bp, Saccharomyces pastorianus
tgcacgtatgttggacaagcttgtt

SEQ ID NO: 37341 - DNA, 25 bp, Saccharomyces pastorianus
tggacaagcttgttggtgaattaga

SEQ ID NO: 37342 - DNA, 25 bp, Saccharomyces pastorianus
tcctttccgacaataaattggactg

SEQ ID NO: 37343 - DNA, 25 bp, Saccharomyces pastorianus
tccactaaccaatgcacgtatgttg

SEQ ID NO: 37344 - DNA, 25 bp, Saccharomyces pastorianus
gtcaaattcccagccggtgatcaat

SEQ ID NO: 37345 - DNA, 25 bp, Saccharomyces pastorianus
aataaattggactgcgcacctccac

SEQ ID NO: 37346 - DNA, 25 bp, Saccharomyces pastorianus
gatccagctaaagaactcgaactaa

SEQ ID NO: 37347 - DNA, 25 bp, Saccharomyces pastorianus
ccagcagctgctttataacccaatt

SEQ ID NO: 37348 - DNA, 25 bp, Saccharomyces pastorianus
gactcgattcatctgcgtttttcaa

SEQ ID NO: 37349 - DNA, 25 bp, Saccharomyces pastorianus
atttcacacgaaagtcccagttgcg

SEQ ID NO: 37350 - DNA, 25 bp, Saccharomyces pastorianus
gtcttaaccaggactccctaaatgc

SEQ ID NO: 37351 - DNA, 25 bp, Saccharomyces pastorianus
ttggcctggcatctaacagatcttt

SEQ ID NO: 37352 - DNA, 25 bp, Saccharomyces pastorianus
gcgattggagtgaaccctcgagtta

SEQ ID NO: 37353 - DNA, 25 bp, Saccharomyces pastorianus
taaaagcccctacgatttctgtgtt

SEQ ID NO: 37354 - DNA, 25 bp, Saccharomyces pastorianus
atagtactctttaccctgttcagaa

SEQ ID NO: 37355 - DNA, 25 bp, Saccharomyces pastorianus
gattctttggattttcgccgtttca

SEQ ID NO: 37356 - DNA, 25 bp, Saccharomyces pastorianus
cctgttcagaatggcctcgtatatt

SEQ ID NO: 37357 - DNA, 25 bp, Saccharomyces pastorianus
tcaagactgccggttgtgcgattct

SEQ ID NO: 37358 - DNA, 25 bp, Saccharomyces pastorianus
aagcggcgacaaagacgccttcgat

SEQ ID NO: 37359 - DNA, 25 bp, Saccharomyces pastorianus
gatgaaatctggagtgctttggtca

SEQ ID NO: 37360 - DNA, 25 bp, Saccharomyces pastorianus
gacaagaaacgtacctttgctgaaa

SEQ ID NO: 37361 - DNA, 25 bp, Saccharomyces pastorianus
gatatattctacagtttcgatggtg

SEQ ID NO: 37362 - DNA, 25 bp, Saccharomyces pastorianus
gacagtgaagtcgactttggcgaag

SEQ ID NO: 37363 - DNA, 25 bp, Saccharomyces pastorianus
gaaggtgaactaaacgcaatcgaag

SEQ ID NO: 37364 - DNA, 25 bp, Saccharomyces pastorianus
tgatgtgacgcttgaccagaaccct

SEQ ID NO: 37365 - DNA, 25 bp, Saccharomyces pastorianus
gaatctaacttcgatagtgacgatg

SEQ ID NO: 37366 - DNA, 25 bp, Saccharomyces pastorianus
gaccagaaccctgtaaacactgaaa

SEQ ID NO: 37367 - DNA, 25 bp, Saccharomyces pastorianus
gtcaaatcgagacctgatgtagaag

SEQ ID NO: 37368 - DNA, 25 bp, Saccharomyces pastorianus
tttcacaaccaagaagaccgctgac

SEQ ID NO: 37369 - DNA, 25 bp, Saccharomyces pastorianus
gggatgcgtcctcaaacaatttctt

SEQ ID NO: 37370 - DNA, 25 bp, Saccharomyces pastorianus
acagtggccagggacagttcttgta

SEQ ID NO: 37371 - DNA, 25 bp, Saccharomyces pastorianus
cgatgaggccttttccggaatggaa

SEQ ID NO: 37372 - DNA, 25 bp, Saccharomyces pastorianus
aaatcgaccttgttatctctactca

SEQ ID NO: 37373 - DNA, 25 bp, Saccharomyces pastorianus
ggagacgccacaatgtgaccatttt

SEQ ID NO: 37374 - DNA, 25 bp, Saccharomyces pastorianus
tgaacccatgatgcgttgtcacgaa

SEQ ID NO: 37375 - DNA, 25 bp, Saccharomyces pastorianus
acacgttgctgaggagacgccacaa

SEQ ID NO: 37376 - DNA, 25 bp, Saccharomyces pastorianus
tgtcatcacctgaattacatgctat

SEQ ID NO: 37377 - DNA, 25 bp, Saccharomyces pastorianus
aattgctgataatgttcccttcgaa

SEQ ID NO: 37378 - DNA, 25 bp, Saccharomyces pastorianus
catggcagaacatcctcaatcgtgg

SEQ ID NO: 37379 - DNA, 25 bp, Saccharomyces pastorianus
ttgcaactggctatcgggatgcgtc

SEQ ID NO: 37380 - DNA, 25 bp, Saccharomyces pastorianus
gatgaaaccaataagttcgccaatg

SEQ ID NO: 37381 - DNA, 25 bp, Saccharomyces pastorianus
gatatcatcaggcatattgtccaag

SEQ ID NO: 37382 - DNA, 25 bp, Saccharomyces pastorianus
gatacagacgactcctttataataa

SEQ ID NO: 37383 - DNA, 25 bp, Saccharomyces pastorianus
gagtctcttgccctttttacaaaag

SEQ ID NO: 37384 - DNA, 25 bp, Saccharomyces pastorianus
aatccttacgaaaatcagcttattg

SEQ ID NO: 37385 - DNA, 25 bp, Saccharomyces pastorianus
gatgagcttcaaaacccacaattag

SEQ ID NO: 37386 - DNA, 25 bp, Saccharomyces pastorianus
aacctggtctgtacaacgaattgat

SEQ ID NO: 37387 - DNA, 25 bp, Saccharomyces pastorianus
gagactgccatcgaagtttgttcct

SEQ ID NO: 37388 - DNA, 25 bp, Saccharomyces pastorianus
attgacaatctgcaggatatcatca

SEQ ID NO: 37389 - DNA, 25 bp, Saccharomyces pastorianus
tttgttcctccaaacctggtctgta

SEQ ID NO: 37390 - DNA, 25 bp, Saccharomyces pastorianus
gaatacgatccacagagtctcttgc

SEQ ID NO: 37391 - DNA, 25 bp, Saccharomyces pastorianus
gatttctagcttcgatctttaccag

SEQ ID NO: 37392 - DNA, 25 bp, Saccharomyces pastorianus
taccggtactatcgagctgtatcat

SEQ ID NO: 37393 - DNA, 25 bp, Saccharomyces pastorianus
gaaaacttttcgattacgctcagaa

SEQ ID NO: 37394 - DNA, 25 bp, Saccharomyces pastorianus
gccttgtttcaatttcagcagcaaa

SEQ ID NO: 37395 - DNA, 25 bp, Saccharomyces pastorianus
gtactagacttgctacccttgagaa

SEQ ID NO: 37396 - DNA, 25 bp, Saccharomyces pastorianus
aagtggtatcatcgatgtcttcaaa

SEQ ID NO: 37397 - DNA, 25 bp, Saccharomyces pastorianus
accttgtcaagctgggtttggtcaa

SEQ ID NO: 37398 - DNA, 25 bp, Saccharomyces pastorianus
gaaaagctacatctgccggatataa

SEQ ID NO: 37399 - DNA, 25 bp, Saccharomyces pastorianus
agcatgaatcctccagtgacggtat

SEQ ID NO: 37400 - DNA, 25 bp, Saccharomyces pastorianus
gaagctacaatgctataccggtact

SEQ ID NO: 37401 - DNA, 25 bp, Saccharomyces pastorianus
gagtggtcgctagtttagccttgtt

SEQ ID NO: 37402 - DNA, 25 bp, Saccharomyces pastorianus
gcgcactcgcatgcatggactttaa

SEQ ID NO: 37403 - DNA, 25 bp, Saccharomyces pastorianus
ggttctctttgtcggcatactgttc

SEQ ID NO: 37404 - DNA, 25 bp, Saccharomyces pastorianus
gagaggacatgctggccaatcgcca

SEQ ID NO: 37405 - DNA, 25 bp, Saccharomyces pastorianus
gttggacacacgctactcagtagaa

SEQ ID NO: 37406 - DNA, 25 bp, Saccharomyces pastorianus
atgagcatcctcgagggccaacagg

SEQ ID NO: 37407 - DNA, 25 bp, Saccharomyces pastorianus
agtagaacgtgcacgtgcctcgcta

SEQ ID NO: 37408 - DNA, 25 bp, Saccharomyces pastorianus
taaaaagtctatctcgctaggcgcc

SEQ ID NO: 37409 - DNA, 25 bp, Saccharomyces pastorianus
catactgttctgtctattgccaagg

SEQ ID NO: 37410 - DNA, 25 bp, Saccharomyces pastorianus
tgatttcgatcgctacccagaggga

SEQ ID NO: 37411 - DNA, 25 bp, Saccharomyces pastorianus
aggcttagaacgtcgctggaccgta

SEQ ID NO: 37412 - DNA, 25 bp, Saccharomyces pastorianus
agggcacactcaagggataccgcgt

SEQ ID NO: 37413 - DNA, 25 bp, Saccharomyces pastorianus
ttatgtgtctttcatccccagagtc

SEQ ID NO: 37414 - DNA, 25 bp, Saccharomyces pastorianus
atctgatgattactggcgtggcgct

SEQ ID NO: 37415 - DNA, 25 bp, Saccharomyces pastorianus
aaataatcttcgtattgctccggat

SEQ ID NO: 37416 - DNA, 25 bp, Saccharomyces pastorianus
attctactacatgtgtgcccatctt

SEQ ID NO: 37417 - DNA, 25 bp, Saccharomyces pastorianus
ttgaccttcgacctctgcaaaagta

SEQ ID NO: 37418 - DNA, 25 bp, Saccharomyces pastorianus
aggcgacatttactggctgatactc

SEQ ID NO: 37419 - DNA, 25 bp, Saccharomyces pastorianus
tgcatcgtaaattcacttcctattg

SEQ ID NO: 37420 - DNA, 25 bp, Saccharomyces pastorianus
cagagtcctcatgtattgtctatca

SEQ ID NO: 37421 - DNA, 25 bp, Saccharomyces pastorianus
tacgcaacagcgttctttacaaaag

SEQ ID NO: 37422 - DNA, 25 bp, Saccharomyces pastorianus
gcgtggcgcttctatatacgcgcaa

SEQ ID NO: 37423 - DNA, 25 bp, Saccharomyces pastorianus
gctaggatgcgcttatgtgtctttc

SEQ ID NO: 37424 - DNA, 25 bp, Saccharomyces pastorianus
gtgacaatgcttccataaggtctga

SEQ ID NO: 37425 - DNA, 25 bp, Saccharomyces pastorianus
gctcggctaaaatcgcataatacat

SEQ ID NO: 37426 - DNA, 25 bp, Saccharomyces pastorianus
gtactcctggaagtgtctctaccaa

SEQ ID NO: 37427 - DNA, 25 bp, Saccharomyces pastorianus
ttaaggtcgagctcttacatgacga

SEQ ID NO: 37428 - DNA, 25 bp, Saccharomyces pastorianus
attggcgacgaatgtccatctggat

SEQ ID NO: 37429 - DNA, 25 bp, Saccharomyces pastorianus
gtccggcgcctttcgcaataaaatg

SEQ ID NO: 37430 - DNA, 25 bp, Saccharomyces pastorianus
atgttttacattccgcgtgtgcgag

SEQ ID NO: 37431 - DNA, 25 bp, Saccharomyces pastorianus
gaggatttcttgcacttggagccat

SEQ ID NO: 37432 - DNA, 25 bp, Saccharomyces pastorianus
gaaacaaaatactcgtgcaaccccg

SEQ ID NO: 37433 - DNA, 25 bp, Saccharomyces pastorianus
gtctgatgattaccatgctcggcta

SEQ ID NO: 37434 - DNA, 25 bp, Saccharomyces pastorianus
gtagcaacagattttccgagccagc

SEQ ID NO: 37435 - DNA, 25 bp, Saccharomyces pastorianus
agctcaagcaagttccaggctcgta

SEQ ID NO: 37436 - DNA, 25 bp, Saccharomyces pastorianus
gatgccattcggttgtatcacttat

SEQ ID NO: 37437 - DNA, 25 bp, Saccharomyces pastorianus
gaactgaatcaccaactctttttcc

SEQ ID NO: 37438 - DNA, 25 bp, Saccharomyces pastorianus
agatgtattcaacgtcttcgagcaa

SEQ ID NO: 37439 - DNA, 25 bp, Saccharomyces pastorianus
ggctcgtaacttcctatatcatatg

SEQ ID NO: 37440 - DNA, 25 bp, Saccharomyces pastorianus
gcgcggtacctctattctataatga

SEQ ID NO: 37441 - DNA, 25 bp, Saccharomyces pastorianus
acaacttctgtccttgttcgaggtg

SEQ ID NO: 37442 - DNA, 25 bp, Saccharomyces pastorianus
agtctgcccgacttagaatacttaa

SEQ ID NO: 37443 - DNA, 25 bp, Saccharomyces pastorianus
ttattgacgaaactcctgcgatggg

SEQ ID NO: 37444 - DNA, 25 bp, Saccharomyces pastorianus
gagttacaaagctgcgcggtacctc

SEQ ID NO: 37445 - DNA, 25 bp, Saccharomyces pastorianus
gataatccactaatgcgtttgaact

SEQ ID NO: 37446 - DNA, 25 bp, Saccharomyces pastorianus
ggaaaacatctcacgcttaactggg

SEQ ID NO: 37447 - DNA, 25 bp, Saccharomyces pastorianus
ttatttcaattccacagcccaaacc

SEQ ID NO: 37448 - DNA, 25 bp, Saccharomyces pastorianus
ggaaccaacggcacaacatcttctg

SEQ ID NO: 37449 - DNA, 25 bp, Saccharomyces pastorianus
gatcatcagactcttcagacacagc

SEQ ID NO: 37450 - DNA, 25 bp, Saccharomyces pastorianus
aatgctaccgctcttaataacaacc

SEQ ID NO: 37451 - DNA, 25 bp, Saccharomyces pastorianus
ttccgcggacgcaaacgatacaggt

SEQ ID NO: 37452 - DNA, 25 bp, Saccharomyces pastorianus
gatgccaccagttctcagcataata

SEQ ID NO: 37453 - DNA, 25 bp, Saccharomyces pastorianus
aacctgttttcctctggtgttgcaa

SEQ ID NO: 37454 - DNA, 25 bp, Saccharomyces pastorianus
gcctcacggaagttctttcttggaa

SEQ ID NO: 37455 - DNA, 25 bp, Saccharomyces pastorianus
ggccaagaagaacatgccgctactt

SEQ ID NO: 37456 - DNA, 25 bp, Saccharomyces pastorianus
aaacggaaatccatctcaagaccaa

SEQ ID NO: 37457 - DNA, 25 bp, Saccharomyces pastorianus
ttaagaccctctataacctcatcat

SEQ ID NO: 37458 - DNA, 25 bp, Saccharomyces pastorianus
gcaaagcggtaagctttcccctcaa

SEQ ID NO: 37459 - DNA, 25 bp, Saccharomyces pastorianus
gtggagaccttgtgcacaactattt

SEQ ID NO: 37460 - DNA, 25 bp, Saccharomyces pastorianus
gattgccaagatgactcgtttaact

SEQ ID NO: 37461 - DNA, 25 bp, Saccharomyces pastorianus
aagtaccgtaccgtgaatcttgtat

SEQ ID NO: 37462 - DNA, 25 bp, Saccharomyces pastorianus
gacggtagttacgatgattgccaag

SEQ ID NO: 37463 - DNA, 25 bp, Saccharomyces pastorianus
ggtgacaaggtctcgatgaatgatc

SEQ ID NO: 37464 - DNA, 25 bp, Saccharomyces pastorianus
tagattttgagtacgcaagcgctaa

SEQ ID NO: 37465 - DNA, 25 bp, Saccharomyces pastorianus
tttgggctctcttgcaaagcggtaa

SEQ ID NO: 37466 - DNA, 25 bp, Saccharomyces pastorianus
aactattttggtgtctttgggctct

SEQ ID NO: 37467 - DNA, 25 bp, Saccharomyces pastorianus
atgatattttagttttcgcccagaa

SEQ ID NO: 37468 - DNA, 25 bp, Saccharomyces pastorianus
gcaatagaccttgacgggcacaatc

SEQ ID NO: 37469 - DNA, 25 bp, Saccharomyces pastorianus
gatatcgtatctgcaaccaagcctg

SEQ ID NO: 37470 - DNA, 25 bp, Saccharomyces pastorianus
atccgataccaatgagtctcactta

SEQ ID NO: 37471 - DNA, 25 bp, Saccharomyces pastorianus
gatagcctggttgcaatagaccttg

SEQ ID NO: 37472 - DNA, 25 bp, Saccharomyces pastorianus
actctagcactgtcttgaatattca

SEQ ID NO: 37473 - DNA, 25 bp, Saccharomyces pastorianus
gttacgccagatcttgtattcagct

SEQ ID NO: 37474 - DNA, 25 bp, Saccharomyces pastorianus
catagggcacatttattagtcgaaa

SEQ ID NO: 37475 - DNA, 25 bp, Saccharomyces pastorianus
aaaactccttacacaaagctgatag

SEQ ID NO: 37476 - DNA, 25 bp, Saccharomyces pastorianus
tcaccttctttagcttcatccgata

SEQ ID NO: 37477 - DNA, 25 bp, Saccharomyces pastorianus
accaagcctgccaaacttacaaatg

SEQ ID NO: 37478 - DNA, 25 bp, Saccharomyces pastorianus
tattgacaagtcatcgttacacgaa

SEQ ID NO: 37479 - DNA, 25 bp, Saccharomyces pastorianus
tcatcgtcattaaccacaacgggag

SEQ ID NO: 37480 - DNA, 25 bp, Saccharomyces pastorianus
tcaaacccgatcattgcaaaggcat

SEQ ID NO: 37481 - DNA, 25 bp, Saccharomyces pastorianus
gaccgccaagagagccaatagattt

SEQ ID NO: 37482 - DNA, 25 bp, Saccharomyces pastorianus
aacagtcagtacaagaccccaatat

SEQ ID NO: 37483 - DNA, 25 bp, Saccharomyces pastorianus
tgatgacctaccgaatcacgggcta

SEQ ID NO: 37484 - DNA, 25 bp, Saccharomyces pastorianus
gggctacaagtttcgccagtacaac

SEQ ID NO: 37485 - DNA, 25 bp, Saccharomyces pastorianus
caacgggaggatatcctgtttcttc

SEQ ID NO: 37486 - DNA, 25 bp, Saccharomyces pastorianus
aggtggaccaattcactgtgaaacc

SEQ ID NO: 37487 - DNA, 25 bp, Saccharomyces pastorianus
gatatgtcaatcaagctacagcctt

SEQ ID NO: 37488 - DNA, 25 bp, Saccharomyces pastorianus
aatttttggatgaccctcgactaat

SEQ ID NO: 37489 - DNA, 25 bp, Saccharomyces pastorianus
ctgtgaaaccagaactccattaatc

SEQ ID NO: 37490 - DNA, 25 bp, Saccharomyces pastorianus
gggagattggatactactacctgaa

SEQ ID NO: 37491 - DNA, 25 bp, Saccharomyces pastorianus
gtcgagccaggccaaaacgcatatg

SEQ ID NO: 37492 - DNA, 25 bp, Saccharomyces pastorianus
atgtgcgtgttagacgtaccgctcc

SEQ ID NO: 37493 - DNA, 25 bp, Saccharomyces pastorianus
ccacctttcggtattgcaagtgcta

SEQ ID NO: 37494 - DNA, 25 bp, Saccharomyces pastorianus
gtcttcagccatgaggaggacttga

SEQ ID NO: 37495 - DNA, 25 bp, Saccharomyces pastorianus
aggatgggcatttgaatcgcgcagc

SEQ ID NO: 37496 - DNA, 25 bp, Saccharomyces pastorianus
accgctcctattcgaaggtaacctg

SEQ ID NO: 37497 - DNA, 25 bp, Saccharomyces pastorianus
acctggattctatgtgtggagttac

SEQ ID NO: 37498 - DNA, 25 bp, Saccharomyces pastorianus
agtgctagtagtatcattatgtcca

SEQ ID NO: 37499 - DNA, 25 bp, Saccharomyces pastorianus
gaaagccttgaacggtgtaacacat

SEQ ID NO: 37500 - DNA, 25 bp, Saccharomyces pastorianus
gtaacacatccagctataaggcatg

SEQ ID NO: 37501 - DNA, 25 bp, Saccharomyces pastorianus
gattttctcaatcacacttgcgagg

SEQ ID NO: 37502 - DNA, 25 bp, Saccharomyces pastorianus
gaaggctatatatcagaggactact

SEQ ID NO: 37503 - DNA, 25 bp, Saccharomyces pastorianus
aacttctttagttgcgacttataca

SEQ ID NO: 37504 - DNA, 25 bp, Saccharomyces pastorianus
atttgcattgctatcctcagttgga

SEQ ID NO: 37505 - DNA, 25 bp, Saccharomyces pastorianus
attatggtgcacattctaacgactt

SEQ ID NO: 37506 - DNA, 25 bp, Saccharomyces pastorianus
atgcggcgagcgtctgtacaacaat

SEQ ID NO: 37507 - DNA, 25 bp, Saccharomyces pastorianus
gggcgactatacaatcaacaagaat

SEQ ID NO: 37508 - DNA, 25 bp, Saccharomyces pastorianus
ggaactacctagacatctcgaacga

SEQ ID NO: 37509 - DNA, 25 bp, Saccharomyces pastorianus
aattactccagttttgcaaatgtta

SEQ ID NO: 37510 - DNA, 25 bp, Saccharomyces pastorianus
gtggcattaagctattacgtaacta

SEQ ID NO: 37511 - DNA, 25 bp, Saccharomyces pastorianus
ggcattgggcaatttagcattagat

SEQ ID NO: 37512 - DNA, 25 bp, Saccharomyces pastorianus
tcctagttctagttgcatcgatgag

SEQ ID NO: 37513 - DNA, 25 bp, Saccharomyces pastorianus
gaagcaccccaagtaagacactcgg

SEQ ID NO: 37514 - DNA, 25 bp, Saccharomyces pastorianus
gggagaaacgctgactctttatgat

SEQ ID NO: 37515 - DNA, 25 bp, Saccharomyces pastorianus
gttagggtcacaccttcaagaatta

SEQ ID NO: 37516 - DNA, 25 bp, Saccharomyces pastorianus
ttactctcctaccaccaaaattaag

SEQ ID NO: 37517 - DNA, 25 bp, Saccharomyces pastorianus
gtttccactagaagaagcaccccaa

SEQ ID NO: 37518 - DNA, 25 bp, Saccharomyces pastorianus
aagacactcgggaacttgggtatga

SEQ ID NO: 37519 - DNA, 25 bp, Saccharomyces pastorianus
tgaggaccaaaatacctccgatttt

SEQ ID NO: 37520 - DNA, 25 bp, Saccharomyces pastorianus
tccgattttatatacctgaaggcaa

SEQ ID NO: 37521 - DNA, 25 bp, Saccharomyces pastorianus
ggacatttcaccgttttcaattgtt

SEQ ID NO: 37522 - DNA, 25 bp, Saccharomyces pastorianus
atgaacgttacagggccgatgtgtt

SEQ ID NO: 37523 - DNA, 25 bp, Saccharomyces pastorianus
cgtgtctccaagtcgatattctgat

SEQ ID NO: 37524 - DNA, 25 bp, Saccharomyces pastorianus
cgtcgttaacggaattctgccagtc

SEQ ID NO: 37525 - DNA, 25 bp, Saccharomyces pastorianus
ggtcctgctattgccgcttaattta

SEQ ID NO: 37526 - DNA, 25 bp, Saccharomyces pastorianus
aagtttggaagcgtttgagtctcaa

SEQ ID NO: 37527 - DNA, 25 bp, Saccharomyces pastorianus
attagcccagaatgtcttaccgtcg

SEQ ID NO: 37528 - DNA, 25 bp, Saccharomyces pastorianus
tttaccaaaattccgtgtctccaag

SEQ ID NO: 37529 - DNA, 25 bp, Saccharomyces pastorianus
tgccagtcctactttccagaagaac

SEQ ID NO: 37530 - DNA, 25 bp, Saccharomyces pastorianus
aaacctgctgtattcagtcctctgt

SEQ ID NO: 37531 - DNA, 25 bp, Saccharomyces pastorianus
ttgtcaagacaatctggccccagat

SEQ ID NO: 37532 - DNA, 25 bp, Saccharomyces pastorianus
acggtattttttggtcctgctattg

SEQ ID NO: 37533 - DNA, 25 bp, Saccharomyces pastorianus
gattacgagcttttgcgaacccttt

SEQ ID NO: 37534 - DNA, 25 bp, Saccharomyces pastorianus
tctgatgcccttttcttactactgt

SEQ ID NO: 37535 - DNA, 25 bp, Saccharomyces pastorianus
aatggcgggcctctgtcaaaagtac

SEQ ID NO: 37536 - DNA, 25 bp, Saccharomyces pastorianus
aaatattgcctctttctgatgccct

SEQ ID NO: 37537 - DNA, 25 bp, Saccharomyces pastorianus
atttcaccaaggacgtcactgtctt

SEQ ID NO: 37538 - DNA, 25 bp, Saccharomyces pastorianus
aaaactgcccttcatgtaacggtga

SEQ ID NO: 37539 - DNA, 25 bp, Saccharomyces pastorianus
ggtcgttaggcatcatcctcattaa

SEQ ID NO: 37540 - DNA, 25 bp, Saccharomyces pastorianus
tacagatactgggttccactcttca

SEQ ID NO: 37541 - DNA, 25 bp, Saccharomyces pastorianus
gaaaaattcactgaccctgtcgata

SEQ ID NO: 37542 - DNA, 25 bp, Saccharomyces pastorianus
attacgagctttaccaatggcgggc

SEQ ID NO: 37543 - DNA, 25 bp, Saccharomyces pastorianus
gagaaaccattctattcctcgtcaa

SEQ ID NO: 37544 - DNA, 25 bp, Saccharomyces pastorianus
tctccctaggtccatctacgaaaaa

SEQ ID NO: 37545 - DNA, 25 bp, Saccharomyces pastorianus
agccaagagcttgattatctaacag

SEQ ID NO: 37546 - DNA, 25 bp, Saccharomyces pastorianus
atctaacagatctagctcacaagct

SEQ ID NO: 37547 - DNA, 25 bp, Saccharomyces pastorianus
gaaatacacaaactacatccgttga

SEQ ID NO: 37548 - DNA, 25 bp, Saccharomyces pastorianus
ttacattttagcaataccgttgttg

SEQ ID NO: 37549 - DNA, 25 bp, Saccharomyces pastorianus
aataccgttgttgaaattgcgcctc

SEQ ID NO: 37550 - DNA, 25 bp, Saccharomyces pastorianus
actacatccgttgactattgaaaat

SEQ ID NO: 37551 - DNA, 25 bp, Saccharomyces pastorianus
atagcctctcagttaggtagccaag

SEQ ID NO: 37552 - DNA, 25 bp, Saccharomyces pastorianus
attgcgcctcaatgtaatgttacaa

SEQ ID NO: 37553 - DNA, 25 bp, Saccharomyces pastorianus
atgttgccgaagcaaacttcttcag

SEQ ID NO: 37554 - DNA, 25 bp, Saccharomyces pastorianus
tgggttgtaccctagtatagcctct

SEQ ID NO: 37555 - DNA, 25 bp, Saccharomyces pastorianus
gcagacaaatctcgaccaattagtt

SEQ ID NO: 37556 - DNA, 25 bp, Saccharomyces pastorianus
taccgccggcaggtagttcaggaaa

SEQ ID NO: 37557 - DNA, 25 bp, Saccharomyces pastorianus
gaaaacagtgctgctagcgctacta

SEQ ID NO: 37558 - DNA, 25 bp, Saccharomyces pastorianus
gatattcgatgatctgctagcagaa

SEQ ID NO: 37559 - DNA, 25 bp, Saccharomyces pastorianus
actagtattacatctgtaccccttc

SEQ ID NO: 37560 - DNA, 25 bp, Saccharomyces pastorianus
tagtactagcgtaagcgaacccctt

SEQ ID NO: 37561 - DNA, 25 bp, Saccharomyces pastorianus
aatatcccaacacgaagctataagg

SEQ ID NO: 37562 - DNA, 25 bp, Saccharomyces pastorianus
gggtgaatatgacgccttgtttaat

SEQ ID NO: 37563 - DNA, 25 bp, Saccharomyces pastorianus
agcgctactaacctagctgctagta

SEQ ID NO: 37564 - DNA, 25 bp, Saccharomyces pastorianus
gtaagcgaaccccttgtagataaag

SEQ ID NO: 37565 - DNA, 25 bp, Saccharomyces pastorianus
acatctgtaccccttcattttgaaa

SEQ ID NO: 37566 - DNA, 25 bp, Saccharomyces pastorianus
tagataaagaagtaccgccggcagg

SEQ ID NO: 37567 - DNA, 25 bp, Saccharomyces pastorianus
aaaaatctgggagcgcgcgactctt

SEQ ID NO: 37568 - DNA, 25 bp, Saccharomyces pastorianus
attatgtggcatctacgcgagacaa

SEQ ID NO: 37569 - DNA, 25 bp, Saccharomyces pastorianus
agcttacttcgaaaccatggcaatt

SEQ ID NO: 37570 - DNA, 25 bp, Saccharomyces pastorianus
caagaactttcacgttgtcgagaat

SEQ ID NO: 37571 - DNA, 25 bp, Saccharomyces pastorianus
gttaggtcacatatcatcgcataca

SEQ ID NO: 37572 - DNA, 25 bp, Saccharomyces pastorianus
gagcgcgcgactcttcaagattatc

SEQ ID NO: 37573 - DNA, 25 bp, Saccharomyces pastorianus
agctgacttatttcctttatccttg

SEQ ID NO: 37574 - DNA, 25 bp, Saccharomyces pastorianus
aatatctccaagtttgttaggtcac

SEQ ID NO: 37575 - DNA, 25 bp, Saccharomyces pastorianus
ataaggctgtttcccagcttacttc

SEQ ID NO: 37576 - DNA, 25 bp, Saccharomyces pastorianus
ataagtccaggttgtacgctattgc

SEQ ID NO: 37577 - DNA, 25 bp, Saccharomyces pastorianus
gtacgctattgcagagtatcgactt

SEQ ID NO: 37578 - DNA, 25 bp, Saccharomyces pastorianus
gtaccgtttggtcttcagattttga

SEQ ID NO: 37579 - DNA, 25 bp, Saccharomyces pastorianus
agcccatggtgtctacgaagtcaac

SEQ ID NO: 37580 - DNA, 25 bp, Saccharomyces pastorianus
aatggcctaattgccagcgcaggcg

SEQ ID NO: 37581 - DNA, 25 bp, Saccharomyces pastorianus
gtagcggaagtgacgattccactgt

SEQ ID NO: 37582 - DNA, 25 bp, Saccharomyces pastorianus
tgtgaagctattctcccggatgtac

SEQ ID NO: 37583 - DNA, 25 bp, Saccharomyces pastorianus
gactatacttgcaacgggtggcgat

SEQ ID NO: 37584 - DNA, 25 bp, Saccharomyces pastorianus
catatggcatccctctgaagcacta

SEQ ID NO: 37585 - DNA, 25 bp, Saccharomyces pastorianus
gaatgcgctgctgttttgaatggtc

SEQ ID NO: 37586 - DNA, 25 bp, Saccharomyces pastorianus
aagcactactggcttctagttcata

SEQ ID NO: 37587 - DNA, 25 bp, Saccharomyces pastorianus
tggagagtccttgctaggcacgaat

SEQ ID NO: 37588 - DNA, 25 bp, Saccharomyces pastorianus
ggacggagtactagccatctacgaa

SEQ ID NO: 37589 - DNA, 25 bp, Saccharomyces pastorianus
tactgcgagacggtgttttaactgt

SEQ ID NO: 37590 - DNA, 25 bp, Saccharomyces pastorianus
gcatactgcatatccctatttgtgt

SEQ ID NO: 37591 - DNA, 25 bp, Saccharomyces pastorianus
tttctaaggctggtggtttaccgat

SEQ ID NO: 37592 - DNA, 25 bp, Saccharomyces pastorianus
tttaccgatggatgcgttgatgtta

SEQ ID NO: 37593 - DNA, 25 bp, Saccharomyces pastorianus
taacggtccatggtgaacagattat

SEQ ID NO: 37594 - DNA, 25 bp, Saccharomyces pastorianus
gagaaccagttccactgggcatact

SEQ ID NO: 37595 - DNA, 25 bp, Saccharomyces pastorianus
aacagattatcgttcatcccgttaa

SEQ ID NO: 37596 - DNA, 25 bp, Saccharomyces pastorianus
gatggtgggttcattgatgcttcat

SEQ ID NO: 37597 - DNA, 25 bp, Saccharomyces pastorianus
gatgtacactttctggattgcgatg

SEQ ID NO: 37598 - DNA, 25 bp, Saccharomyces pastorianus
gactgtgtattgtggccggtagcaa

SEQ ID NO: 37599 - DNA, 25 bp, Saccharomyces pastorianus
tatttgtgtcactttttcgttcttt

SEQ ID NO: 37600 - DNA, 25 bp, Saccharomyces pastorianus
caggagaaagaaactctaccagtaa

SEQ ID NO: 37601 - DNA, 25 bp, Saccharomyces pastorianus
tggatacatcgaaaagctctgaagt

SEQ ID NO: 37602 - DNA, 25 bp, Saccharomyces pastorianus
ggtcttctaccgcacgaagttagtg

SEQ ID NO: 37603 - DNA, 25 bp, Saccharomyces pastorianus
gaactcgtcatcattgttgttatcg

SEQ ID NO: 37604 - DNA, 25 bp, Saccharomyces pastorianus
gttgttatcgtattactgctgtatt

SEQ ID NO: 37605 - DNA, 25 bp, Saccharomyces pastorianus
ttactgctgtattttttgaccatga

SEQ ID NO: 37606 - DNA, 25 bp, Saccharomyces pastorianus
tagaagcaggtcttctaccgcacga

SEQ ID NO: 37607 - DNA, 25 bp, Saccharomyces pastorianus
gagaaggtcaagtctggtgattata

SEQ ID NO: 37608 - DNA, 25 bp, Saccharomyces pastorianus
ggatttattgaggaactcgtcatca

SEQ ID NO: 37609 - DNA, 25 bp, Saccharomyces pastorianus
gagaagggtagcactttcaagcaat

SEQ ID NO: 37610 - DNA, 25 bp, Saccharomyces pastorianus
gcaatatcgtgatgcctttgtagga

SEQ ID NO: 37611 - DNA, 25 bp, Saccharomyces pastorianus
agacaccatttcgttgacgtccttt

SEQ ID NO: 37612 - DNA, 25 bp, Saccharomyces pastorianus
tgtgaacctcaagaagacctaccgt

SEQ ID NO: 37613 - DNA, 25 bp, Saccharomyces pastorianus
tagaagaacctttccggccattgat

SEQ ID NO: 37614 - DNA, 25 bp, Saccharomyces pastorianus
tgaatccccagtagtacccatatgg

SEQ ID NO: 37615 - DNA, 25 bp, Saccharomyces pastorianus
tgacgtccttttgggatccatactg

SEQ ID NO: 37616 - DNA, 25 bp, Saccharomyces pastorianus
gttcgacaccttatttaccgcaata

SEQ ID NO: 37617 - DNA, 25 bp, Saccharomyces pastorianus
attctatacacgtctcttttgggtt

SEQ ID NO: 37618 - DNA, 25 bp, Saccharomyces pastorianus
tggtttagcaccagtttcctcacaa

SEQ ID NO: 37619 - DNA, 25 bp, Saccharomyces pastorianus
gaccagattttctagctcgttgtga

SEQ ID NO: 37620 - DNA, 25 bp, Saccharomyces pastorianus
gggttcagaacaactccgtcaggac

SEQ ID NO: 37621 - DNA, 25 bp, Saccharomyces pastorianus
gcttatcgctctttctagaactcag

SEQ ID NO: 37622 - DNA, 25 bp, Saccharomyces pastorianus
cgttctatgcacacctctaggatac

SEQ ID NO: 37623 - DNA, 25 bp, Saccharomyces pastorianus
catttttctcaaaacccagttgtgg

SEQ ID NO: 37624 - DNA, 25 bp, Saccharomyces pastorianus
gaaggaatactgctttgatatacca

SEQ ID NO: 37625 - DNA, 25 bp, Saccharomyces pastorianus
gaagattttacactttctggaagaa

SEQ ID NO: 37626 - DNA, 25 bp, Saccharomyces pastorianus
acccagttgtgggttgtgcgagcaa

SEQ ID NO: 37627 - DNA, 25 bp, Saccharomyces pastorianus
catattgaaaaactgggcgacccta

SEQ ID NO: 37628 - DNA, 25 bp, Saccharomyces pastorianus
acacctctaggatactattgcaaga

SEQ ID NO: 37629 - DNA, 25 bp, Saccharomyces pastorianus
gaaagagcttttccgttctatgcac

SEQ ID NO: 37630 - DNA, 25 bp, Saccharomyces pastorianus
ctgctttgatataccagtacttcat

SEQ ID NO: 37631 - DNA, 25 bp, Saccharomyces pastorianus
tgggcgaccctagatcgtgtacgaa

SEQ ID NO: 37632 - DNA, 25 bp, Saccharomyces pastorianus
ataagggaattcagttcgaggtaat

SEQ ID NO: 37633 - DNA, 25 bp, Saccharomyces pastorianus
gaaacagttgttcctgtgtcagaac

SEQ ID NO: 37634 - DNA, 25 bp, Saccharomyces pastorianus
ggtccggaaccaaatatgccagaaa

SEQ ID NO: 37635 - DNA, 25 bp, Saccharomyces pastorianus
gtaagtacggttctggtttgtctat

SEQ ID NO: 37636 - DNA, 25 bp, Saccharomyces pastorianus
gggtatgctcccacgatttatagta

SEQ ID NO: 37637 - DNA, 25 bp, Saccharomyces pastorianus
gaggatatcagaatgtccctgtagt

SEQ ID NO: 37638 - DNA, 25 bp, Saccharomyces pastorianus
gaagacggcctgctagattagtatt

SEQ ID NO: 37639 - DNA, 25 bp, Saccharomyces pastorianus
ggtgttatcaaagccaggtgcccaa

SEQ ID NO: 37640 - DNA, 25 bp, Saccharomyces pastorianus
aaacgagtactagacatttgccaaa

SEQ ID NO: 37641 - DNA, 25 bp, Saccharomyces pastorianus
gttttacattgtatcctgggacata

SEQ ID NO: 37642 - DNA, 25 bp, Saccharomyces pastorianus
gtccctgtagtgacggatgtcctga

SEQ ID NO: 37643 - DNA, 25 bp, Saccharomyces pastorianus
gccaggtgcccaagttgttttacat

SEQ ID NO: 37644 - DNA, 25 bp, Saccharomyces pastorianus
tgttgacccatctgactcatagaga

SEQ ID NO: 37645 - DNA, 25 bp, Saccharomyces pastorianus
gatgatcactgtgggtacgctctgc

SEQ ID NO: 37646 - DNA, 25 bp, Saccharomyces pastorianus
acgcatacggcgctctttttaacaa

SEQ ID NO: 37647 - DNA, 25 bp, Saccharomyces pastorianus
gttcgtcgacacatggcagtatttc

SEQ ID NO: 37648 - DNA, 25 bp, Saccharomyces pastorianus
aggtatcgccatgatgttgacccat

SEQ ID NO: 37649 - DNA, 25 bp, Saccharomyces pastorianus
aagaccaattttgctcaaccgttct

SEQ ID NO: 37650 - DNA, 25 bp, Saccharomyces pastorianus
ttttgccaccatgaaaaccgtcgat

SEQ ID NO: 37651 - DNA, 25 bp, Saccharomyces pastorianus
gggacaacttgttcgagaccaactt

SEQ ID NO: 37652 - DNA, 25 bp, Saccharomyces pastorianus
aggttttctgctggacactttagga

SEQ ID NO: 37653 - DNA, 25 bp, Saccharomyces pastorianus
ttttgctggctttttgttcgtcgac

SEQ ID NO: 37654 - DNA, 25 bp, Saccharomyces pastorianus
attcatcatcagcagttcggtatca

SEQ ID NO: 37655 - DNA, 25 bp, Saccharomyces pastorianus
aaattacaagcccttggcgtcccat

SEQ ID NO: 37656 - DNA, 25 bp, Saccharomyces pastorianus
attttgcacggccttgtttctaaag

SEQ ID NO: 37657 - DNA, 25 bp, Saccharomyces pastorianus
ctgtcggcaaggcaagatgtaacta

SEQ ID NO: 37658 - DNA, 25 bp, Saccharomyces pastorianus
gtctgcacagcgacctaatcgagga

SEQ ID NO: 37659 - DNA, 25 bp, Saccharomyces pastorianus
ggcatgtgctgccttgacaagaaag

SEQ ID NO: 37660 - DNA, 25 bp, Saccharomyces pastorianus
ttggcgtcccattgcatacaaagtt

SEQ ID NO: 37661 - DNA, 25 bp, Saccharomyces pastorianus
atgcgggtgttcatacactgatcat

SEQ ID NO: 37662 - DNA, 25 bp, Saccharomyces pastorianus
aaaggtgctattgttattgaccaag

SEQ ID NO: 37663 - DNA, 25 bp, Saccharomyces pastorianus
agaatttcctttgcaaactgtcggc

SEQ ID NO: 37664 - DNA, 25 bp, Saccharomyces pastorianus
gaatacatgcaaactctagatcttg

SEQ ID NO: 37665 - DNA, 25 bp, Saccharomyces pastorianus
tgaaaagtgatacccctgcaaacat

SEQ ID NO: 37666 - DNA, 25 bp, Saccharomyces pastorianus
aaaagacatcatccaggttctccgt

SEQ ID NO: 37667 - DNA, 25 bp, Saccharomyces pastorianus
gaccaattttggatttcctgcctcg

SEQ ID NO: 37668 - DNA, 25 bp, Saccharomyces pastorianus
aactcaattcgaggtcgcacgacac

SEQ ID NO: 37669 - DNA, 25 bp, Saccharomyces pastorianus
gagcatttgcttccccagaacatag

SEQ ID NO: 37670 - DNA, 25 bp, Saccharomyces pastorianus
ataccgattccacggattccagtga

SEQ ID NO: 37671 - DNA, 25 bp, Saccharomyces pastorianus
atcaacggcagggtcgtgtccactt

SEQ ID NO: 37672 - DNA, 25 bp, Saccharomyces pastorianus
ggtcacttcgtccaattactctaaa

SEQ ID NO: 37673 - DNA, 25 bp, Saccharomyces pastorianus
gggcaacaaccattcaatcaacggc

SEQ ID NO: 37674 - DNA, 25 bp, Saccharomyces pastorianus
aagaaactcgatagcgacgccatct

SEQ ID NO: 37675 - DNA, 25 bp, Saccharomyces pastorianus
acatccctctttgaggattctccaa

SEQ ID NO: 37676 - DNA, 25 bp, Saccharomyces pastorianus
cgtagccttcttttggagactccaa

SEQ ID NO: 37677 - DNA, 25 bp, Saccharomyces pastorianus
gttccataactacaccatcttgcat

SEQ ID NO: 37678 - DNA, 25 bp, Saccharomyces pastorianus
aggattttcatcaatcgctccgttt

SEQ ID NO: 37679 - DNA, 25 bp, Saccharomyces pastorianus
tagtcgggttaggtctcaagctcag

SEQ ID NO: 37680 - DNA, 25 bp, Saccharomyces pastorianus
atcctctatgatctctgtgacaacg

SEQ ID NO: 37681 - DNA, 25 bp, Saccharomyces pastorianus
acgcccattttttcaagcccgatat

SEQ ID NO: 37682 - DNA, 25 bp, Saccharomyces pastorianus
agaatggatgttccctcacagcgag

SEQ ID NO: 37683 - DNA, 25 bp, Saccharomyces pastorianus
atttccttgacgacggctcggagaa

SEQ ID NO: 37684 - DNA, 25 bp, Saccharomyces pastorianus
gaggcactgccaaccttaggtcaag

SEQ ID NO: 37685 - DNA, 25 bp, Saccharomyces pastorianus
gaaaggcactgtttgcccttttcga

SEQ ID NO: 37686 - DNA, 25 bp, Saccharomyces pastorianus
ggagactgaacttgcctttgagatc

SEQ ID NO: 37687 - DNA, 25 bp, Saccharomyces pastorianus
ggttttacaaccatatcacgctgtt

SEQ ID NO: 37688 - DNA, 25 bp, Saccharomyces pastorianus
aataatgtcgactcggcactcggcg

SEQ ID NO: 37689 - DNA, 25 bp, Saccharomyces pastorianus
atgcacagcctatttgaagccaatt

SEQ ID NO: 37690 - DNA, 25 bp, Saccharomyces pastorianus
gcctccaccgtcaagaagctttata

SEQ ID NO: 37691 - DNA, 25 bp, Saccharomyces pastorianus
gcactcggcgcttttgtaggcacca

SEQ ID NO: 37692 - DNA, 25 bp, Saccharomyces pastorianus
atatccatttccaaagcggtgagca

SEQ ID NO: 37693 - DNA, 25 bp, Saccharomyces pastorianus
gtgacctcccagtagacttgttaga

SEQ ID NO: 37694 - DNA, 25 bp, Saccharomyces pastorianus
gacggcgagcctatgtcgaatacat

SEQ ID NO: 37695 - DNA, 25 bp, Saccharomyces pastorianus
aagatgttctcaatggtgacggcga

SEQ ID NO: 37696 - DNA, 25 bp, Saccharomyces pastorianus
gacttaacgcaagtggttcccaata

SEQ ID NO: 37697 - DNA, 25 bp, Saccharomyces pastorianus
taaactctatcactcttgccacaga

SEQ ID NO: 37698 - DNA, 25 bp, Saccharomyces pastorianus
acaccacgtgctgtgaattcttgaa

SEQ ID NO: 37699 - DNA, 25 bp, Saccharomyces pastorianus
ggctgaccaggactattctacttta

SEQ ID NO: 37700 - DNA, 25 bp, Saccharomyces pastorianus
gggaaccaccaaagcgcctgaaaat

SEQ ID NO: 37701 - DNA, 25 bp, Saccharomyces pastorianus
gaatgtgagttttatcttacccgaa

SEQ ID NO: 37702 - DNA, 25 bp, Saccharomyces pastorianus
actttcattcaaaacacttcagctg

SEQ ID NO: 37703 - DNA, 25 bp, Saccharomyces pastorianus
gaatgataccttagacagtgtcagc

SEQ ID NO: 37704 - DNA, 25 bp, Saccharomyces pastorianus
aacagtatcgatacaactgccgaaa

SEQ ID NO: 37705 - DNA, 25 bp, Saccharomyces pastorianus
gatactacatccactaatccagaaa

SEQ ID NO: 37706 - DNA, 25 bp, Saccharomyces pastorianus
tgaccaatactcatccatcttaggg

SEQ ID NO: 37707 - DNA, 25 bp, Saccharomyces pastorianus
tgctatatttttctcggctgaccag

SEQ ID NO: 37708 - DNA, 25 bp, Saccharomyces pastorianus
gtgcaactcacattcttgattgatg

SEQ ID NO: 37709 - DNA, 25 bp, Saccharomyces pastorianus
agcagacgcaatgtcggtagacgaa

SEQ ID NO: 37710 - DNA, 25 bp, Saccharomyces pastorianus
aagaattcctgctttcgcaaacgct

SEQ ID NO: 37711 - DNA, 25 bp, Saccharomyces pastorianus
tagaagagttcagttcgcacctcac

SEQ ID NO: 37712 - DNA, 25 bp, Saccharomyces pastorianus
gcaccgcaacgtccatagtgttgga

SEQ ID NO: 37713 - DNA, 25 bp, Saccharomyces pastorianus
gtcaacgagttcttggccacactag

SEQ ID NO: 37714 - DNA, 25 bp, Saccharomyces pastorianus
gttgagcggcattaacccaagggat

SEQ ID NO: 37715 - DNA, 25 bp, Saccharomyces pastorianus
ggactgctgccaggaaatgctccaa

SEQ ID NO: 37716 - DNA, 25 bp, Saccharomyces pastorianus
agaggaccagcagcactaccaaatg

SEQ ID NO: 37717 - DNA, 25 bp, Saccharomyces pastorianus
tgatttcaactttcctacccagaag

SEQ ID NO: 37718 - DNA, 25 bp, Saccharomyces pastorianus
aaatggccgttttcaccatgtccat

SEQ ID NO: 37719 - DNA, 25 bp, Saccharomyces pastorianus
aaacgagtcgttccactacataatg

SEQ ID NO: 37720 - DNA, 25 bp, Saccharomyces pastorianus
gaaatgctccaaacggcggcagcgt

SEQ ID NO: 37721 - DNA, 25 bp, Saccharomyces pastorianus
gtagaggccaaatcgcatcccgaac

SEQ ID NO: 37722 - DNA, 25 bp, Saccharomyces pastorianus
ggtctaggctagtccgcagatttaa

SEQ ID NO: 37723 - DNA, 25 bp, Saccharomyces pastorianus
ggatgatttaccacacatcgccata

SEQ ID NO: 37724 - DNA, 25 bp, Saccharomyces pastorianus
gacttcattttcactggacccgagg

SEQ ID NO: 37725 - DNA, 25 bp, Saccharomyces pastorianus
gagggtttccaatccaacggtcaat

SEQ ID NO: 37726 - DNA, 25 bp, Saccharomyces pastorianus
tttaacgctctggaagacaccgtgc

SEQ ID NO: 37727 - DNA, 25 bp, Saccharomyces pastorianus
gatccattcgataccgtagaggcca

SEQ ID NO: 37728 - DNA, 25 bp, Saccharomyces pastorianus
gacaccgtgcgtactatttatgaag

SEQ ID NO: 37729 - DNA, 25 bp, Saccharomyces pastorianus
ttggacatgaccatagccgacgctg

SEQ ID NO: 37730 - DNA, 25 bp, Saccharomyces pastorianus
aatggaataggaccgtccctgctgc

SEQ ID NO: 37731 - DNA, 25 bp, Saccharomyces pastorianus
cggtcaatgagcctttacctaaatt

SEQ ID NO: 37732 - DNA, 25 bp, Saccharomyces pastorianus
ttgcaagcagcttagcacctgtcta

SEQ ID NO: 37733 - DNA, 25 bp, Saccharomyces pastorianus
gggcctctccttacaaggcaaaaat

SEQ ID NO: 37734 - DNA, 25 bp, Saccharomyces pastorianus
atatccatgggtgaagtttgcttcc

SEQ ID NO: 37735 - DNA, 25 bp, Saccharomyces pastorianus
gggagatgcctcgaatttgatattt

SEQ ID NO: 37736 - DNA, 25 bp, Saccharomyces pastorianus
gaaatggagatctgcagctcccacg

SEQ ID NO: 37737 - DNA, 25 bp, Saccharomyces pastorianus
agctcccacgccgaagcaaaggaat

SEQ ID NO: 37738 - DNA, 25 bp, Saccharomyces pastorianus
tgtctacccgttgaagtcactatta

SEQ ID NO: 37739 - DNA, 25 bp, Saccharomyces pastorianus
ataattcactcccagccggtaaaga

SEQ ID NO: 37740 - DNA, 25 bp, Saccharomyces pastorianus
gagctatacgagtcttctgaagcaa

SEQ ID NO: 37741 - DNA, 25 bp, Saccharomyces pastorianus
cggcaattgccatctttcataacca

SEQ ID NO: 37742 - DNA, 25 bp, Saccharomyces pastorianus
atacgccgagtatgtccctaaaaca

SEQ ID NO: 37743 - DNA, 25 bp, Saccharomyces pastorianus
tttgatgtattacctccaacgccta

SEQ ID NO: 37744 - DNA, 25 bp, Saccharomyces pastorianus
aagcttatatggctcgtttctcttc

SEQ ID NO: 37745 - DNA, 25 bp, Saccharomyces pastorianus
gagtcctcagtaatggcttctattc

SEQ ID NO: 37746 - DNA, 25 bp, Saccharomyces pastorianus
gaaggcatcccaatcaacctattaa

SEQ ID NO: 37747 - DNA, 25 bp, Saccharomyces pastorianus
tcgtttctcttcactttggaccaaa

SEQ ID NO: 37748 - DNA, 25 bp, Saccharomyces pastorianus
ggcgataatgccgatgaacctcaat

SEQ ID NO: 37749 - DNA, 25 bp, Saccharomyces pastorianus
ggcttctattccatcaactatctgg

SEQ ID NO: 37750 - DNA, 25 bp, Saccharomyces pastorianus
gcttttaggagatcacgccttgact

SEQ ID NO: 37751 - DNA, 25 bp, Saccharomyces pastorianus
catcatcccttgcaattgtcagaac

SEQ ID NO: 37752 - DNA, 25 bp, Saccharomyces pastorianus
ggaatcagcacgcagtgcacttcta

SEQ ID NO: 37753 - DNA, 25 bp, Saccharomyces pastorianus
aacgcctacgtctaaggagtccatt

SEQ ID NO: 37754 - DNA, 25 bp, Saccharomyces pastorianus
caatggttcttgctggatccgctga

SEQ ID NO: 37755 - DNA, 25 bp, Saccharomyces pastorianus
atctattcggatggtgctagttcgt

SEQ ID NO: 37756 - DNA, 25 bp, Saccharomyces pastorianus
tgctagttcgttaagggctgtccca

SEQ ID NO: 37757 - DNA, 25 bp, Saccharomyces pastorianus
ggataccgttatcagtacagtttct

SEQ ID NO: 37758 - DNA, 25 bp, Saccharomyces pastorianus
tataacgaatgcagctaggcgcctt

SEQ ID NO: 37759 - DNA, 25 bp, Saccharomyces pastorianus
accgagagctgcctttgctgttcat

SEQ ID NO: 37760 - DNA, 25 bp, Saccharomyces pastorianus
tatccatctcggtagctttttctga

SEQ ID NO: 37761 - DNA, 25 bp, Saccharomyces pastorianus
taacggccatcggagtttcaagatt

SEQ ID NO: 37762 - DNA, 25 bp, Saccharomyces pastorianus
ttttacgcttttgctaatagtgctg

SEQ ID NO: 37763 - DNA, 25 bp, Saccharomyces pastorianus
gctgttcatcctttagtatcacggg

SEQ ID NO: 37764 - DNA, 25 bp, Saccharomyces pastorianus
cagttcgtccactcaaaagtcattg

SEQ ID NO: 37765 - DNA, 25 bp, Saccharomyces pastorianus
atgttttggcccattatcaatgcaa

SEQ ID NO: 37766 - DNA, 25 bp, Saccharomyces pastorianus
ttgagggacagttacagcggccaac

SEQ ID NO: 37767 - DNA, 25 bp, Saccharomyces pastorianus
gcaaacggcactatcattattacta

SEQ ID NO: 37768 - DNA, 25 bp, Saccharomyces pastorianus
gaggcaaatatttcccattacaact

SEQ ID NO: 37769 - DNA, 25 bp, Saccharomyces pastorianus
gagggcatttattcaggcgatccaa

SEQ ID NO: 37770 - DNA, 25 bp, Saccharomyces pastorianus
tgagatggatgcattcaaccctgtt

SEQ ID NO: 37771 - DNA, 25 bp, Saccharomyces pastorianus
gtgataaaccggaatctttcgagat

SEQ ID NO: 37772 - DNA, 25 bp, Saccharomyces pastorianus
agaactctcgttctaacgcttcaaa

SEQ ID NO: 37773 - DNA, 25 bp, Saccharomyces pastorianus
agcggccaactactggacattcaat

SEQ ID NO: 37774 - DNA, 25 bp, Saccharomyces pastorianus
aaatcaatcatccaggtttaccttt

SEQ ID NO: 37775 - DNA, 25 bp, Saccharomyces pastorianus
aaatgtcctgtcttttctattgtgg

SEQ ID NO: 37776 - DNA, 25 bp, Saccharomyces pastorianus
aaggcagactacgtgatgcatacta

SEQ ID NO: 37777 - DNA, 25 bp, Saccharomyces pastorianus
cgtgttatcgaaaccgtccatgttc

SEQ ID NO: 37778 - DNA, 25 bp, Saccharomyces pastorianus
ggcactacagaacaatatgacccta

SEQ ID NO: 37779 - DNA, 25 bp, Saccharomyces pastorianus
gaagcccttcactttaacgtgttat

SEQ ID NO: 37780 - DNA, 25 bp, Saccharomyces pastorianus
aaccggatatcacagcaatttattt

SEQ ID NO: 37781 - DNA, 25 bp, Saccharomyces pastorianus
ggtaaatttggtgtcaatcccagaa

SEQ ID NO: 37782 - DNA, 25 bp, Saccharomyces pastorianus
gaaaccgtccatgttccaagacaaa

SEQ ID NO: 37783 - DNA, 25 bp, Saccharomyces pastorianus
tatgaccctaaatacgtttcagcat

SEQ ID NO: 37784 - DNA, 25 bp, Saccharomyces pastorianus
aatggcagcttatggtaggagtttc

SEQ ID NO: 37785 - DNA, 25 bp, Saccharomyces pastorianus
aacgcgttcaatgaagcccttcact

SEQ ID NO: 37786 - DNA, 25 bp, Saccharomyces pastorianus
gcaaggtcgttaaccaacgcgttca

SEQ ID NO: 37787 - DNA, 25 bp, Saccharomyces pastorianus
gcaacatcatttaccaattccgcag

SEQ ID NO: 37788 - DNA, 25 bp, Saccharomyces pastorianus
aaatcatgcttctccactaactgaa

SEQ ID NO: 37789 - DNA, 25 bp, Saccharomyces pastorianus
aaacccggtatcctgagtgacactg

SEQ ID NO: 37790 - DNA, 25 bp, Saccharomyces pastorianus
atccatacagtcaatctccatcaag

SEQ ID NO: 37791 - DNA, 25 bp, Saccharomyces pastorianus
tcgtcgtcattcaacactaggccaa

SEQ ID NO: 37792 - DNA, 25 bp, Saccharomyces pastorianus
atggcgatttgaccggtactgaagc

SEQ ID NO: 37793 - DNA, 25 bp, Saccharomyces pastorianus
gcagtcgggctctttaccaaagcaa

SEQ ID NO: 37794 - DNA, 25 bp, Saccharomyces pastorianus
aagtcttttggttctactcctgtgc

SEQ ID NO: 37795 - DNA, 25 bp, Saccharomyces pastorianus
ggacaagcctattcccatggttaca

SEQ ID NO: 37796 - DNA, 25 bp, Saccharomyces pastorianus
ctgtgcctccagatgtgattgctag

SEQ ID NO: 37797 - DNA, 25 bp, Saccharomyces pastorianus
agtgggaacagtacctcgtcgtcat

SEQ ID NO: 37798 - DNA, 25 bp, Saccharomyces pastorianus
ggatttgatcatcgcaatcggcggt

SEQ ID NO: 37799 - DNA, 25 bp, Saccharomyces pastorianus
gcagccaagaccgttccagacaaat

SEQ ID NO: 37800 - DNA, 25 bp, Saccharomyces pastorianus
agtttcggaatctttgttctacacg

SEQ ID NO: 37801 - DNA, 25 bp, Saccharomyces pastorianus
agaacccaatggatcgattacgaac

SEQ ID NO: 37802 - DNA, 25 bp, Saccharomyces pastorianus
tggtggtttcatccctgcaagaatt

SEQ ID NO: 37803 - DNA, 25 bp, Saccharomyces pastorianus
agacctacctgctgacatgttgaat

SEQ ID NO: 37804 - DNA, 25 bp, Saccharomyces pastorianus
atggtatgcctacccatgggaagcc

SEQ ID NO: 37805 - DNA, 25 bp, Saccharomyces pastorianus
gtatcgatgttgaaaagtccccaga

SEQ ID NO: 37806 - DNA, 25 bp, Saccharomyces pastorianus
aagccactgatatcgttttccatac

SEQ ID NO: 37807 - DNA, 25 bp, Saccharomyces pastorianus
ggtgtaccaaccatcagaatctttg

SEQ ID NO: 37808 - DNA, 25 bp, Saccharomyces pastorianus
gagaaccgttacttcgcagccaaga

SEQ ID NO: 37809 - DNA, 25 bp, Saccharomyces pastorianus
acacttcgttgtatcttttggctaa

SEQ ID NO: 37810 - DNA, 25 bp, Saccharomyces pastorianus
tgctaggagccgacattgtgatacc

SEQ ID NO: 37811 - DNA, 25 bp, Saccharomyces pastorianus
agtcaggctatatcctcctttgagc

SEQ ID NO: 37812 - DNA, 25 bp, Saccharomyces pastorianus
atttctttttgaggcagtcaggcta

SEQ ID NO: 37813 - DNA, 25 bp, Saccharomyces pastorianus
aacatcgtcattatcctcgttgctg

SEQ ID NO: 37814 - DNA, 25 bp, Saccharomyces pastorianus
agccttagcggacttacctttattg

SEQ ID NO: 37815 - DNA, 25 bp, Saccharomyces pastorianus
aaaactaactcctgcaggaccgctg

SEQ ID NO: 37816 - DNA, 25 bp, Saccharomyces pastorianus
gtgtcactgattcgaaagccttagc

SEQ ID NO: 37817 - DNA, 25 bp, Saccharomyces pastorianus
ataggtgcactgtgaccggatttca

SEQ ID NO: 37818 - DNA, 25 bp, Saccharomyces pastorianus
gaccgctgtgtcctttcaatttaaa

SEQ ID NO: 37819 - DNA, 25 bp, Saccharomyces pastorianus
ttcacggtggtcgaagggcatgttt

SEQ ID NO: 37820 - DNA, 25 bp, Saccharomyces pastorianus
gttattctcgaattaccaaagcctg

SEQ ID NO: 37821 - DNA, 25 bp, Saccharomyces pastorianus
aactggcatatattcctggtcgaga

SEQ ID NO: 37822 - DNA, 25 bp, Saccharomyces pastorianus
gtgggccatcgggactcagttactt

SEQ ID NO: 37823 - DNA, 25 bp, Saccharomyces pastorianus
tagaaccgttgccatgcatactgcg

SEQ ID NO: 37824 - DNA, 25 bp, Saccharomyces pastorianus
gaaagtgttctttgccctaacgtga

SEQ ID NO: 37825 - DNA, 25 bp, Saccharomyces pastorianus
atcccatatccctgcttatttttat

SEQ ID NO: 37826 - DNA, 25 bp, Saccharomyces pastorianus
attgccctatctctatttcattttc

SEQ ID NO: 37827 - DNA, 25 bp, Saccharomyces pastorianus
ttttggattcttttggtgggccatc

SEQ ID NO: 37828 - DNA, 25 bp, Saccharomyces pastorianus
gttacttcttctaaatcccatatcc

SEQ ID NO: 37829 - DNA, 25 bp, Saccharomyces pastorianus
gggacggtcgttttcacacatagtg

SEQ ID NO: 37830 - DNA, 25 bp, Saccharomyces pastorianus
attctttcgccattctagagtgtct

SEQ ID NO: 37831 - DNA, 25 bp, Saccharomyces pastorianus
gacgtgccggtaactccaagagaaa

SEQ ID NO: 37832 - DNA, 25 bp, Saccharomyces pastorianus
aggcttggccagaacttcaggtact

SEQ ID NO: 37833 - DNA, 25 bp, Saccharomyces pastorianus
cttgatcggtttcgccacaggatac

SEQ ID NO: 37834 - DNA, 25 bp, Saccharomyces pastorianus
tctggtttcatttcgtgcatcacat

SEQ ID NO: 37835 - DNA, 25 bp, Saccharomyces pastorianus
aagtatttccctctgatccaattgt

SEQ ID NO: 37836 - DNA, 25 bp, Saccharomyces pastorianus
aacaacaactttgccgacgtgccgg

SEQ ID NO: 37837 - DNA, 25 bp, Saccharomyces pastorianus
acaggatacctctacacatgtctag

SEQ ID NO: 37838 - DNA, 25 bp, Saccharomyces pastorianus
atgtctagacacacgtacactgggt

SEQ ID NO: 37839 - DNA, 25 bp, Saccharomyces pastorianus
atgacggctacgatcctgtatggat

SEQ ID NO: 37840 - DNA, 25 bp, Saccharomyces pastorianus
aggtaacttcgtgatctccttgatc

SEQ ID NO: 37841 - DNA, 25 bp, Saccharomyces pastorianus
aaattacggtgtcttgcccaatggg

SEQ ID NO: 37842 - DNA, 25 bp, Saccharomyces pastorianus
gtacaagtacttaacttcatttgga

SEQ ID NO: 37843 - DNA, 25 bp, Saccharomyces pastorianus
ttgatacctttgaattccttggtgg

SEQ ID NO: 37844 - DNA, 25 bp, Saccharomyces pastorianus
aactttggaggcatattgactattg

SEQ ID NO: 37845 - DNA, 25 bp, Saccharomyces pastorianus
cttggtggccttggcgatatcttca

SEQ ID NO: 37846 - DNA, 25 bp, Saccharomyces pastorianus
tacaagtacttaacttcatttggat

SEQ ID NO: 37847 - DNA, 25 bp, Saccharomyces pastorianus
aaactttggaggcatattgactatt

SEQ ID NO: 37848 - DNA, 25 bp, Saccharomyces pastorianus
gatacctttgaattccttggtggcc

SEQ ID NO: 37849 - DNA, 25 bp, Saccharomyces pastorianus
tacctttgaattccttggtggcctt

SEQ ID NO: 37850 - DNA, 25 bp, Saccharomyces pastorianus
tccttggtggccttggcgatatctt

SEQ ID NO: 37851 - DNA, 25 bp, Saccharomyces pastorianus
atacctttgaattccttggtggcct

SEQ ID NO: 37852 - DNA, 25 bp, Saccharomyces pastorianus
ctttggaggcatattgactattgat

SEQ ID NO: 37853 - DNA, 25 bp, Saccharomyces pastorianus
gaaagattccgggtctagagatgtt

SEQ ID NO: 37854 - DNA, 25 bp, Saccharomyces pastorianus
ggcaaccaagccaatacctttcaaa

SEQ ID NO: 37855 - DNA, 25 bp, Saccharomyces pastorianus
attgtccgaaggtctgaacggtgct

SEQ ID NO: 37856 - DNA, 25 bp, Saccharomyces pastorianus
aagcatgacagttaccaattttgat

SEQ ID NO: 37857 - DNA, 25 bp, Saccharomyces pastorianus
gaacttgcctccagaatccaggatc

SEQ ID NO: 37858 - DNA, 25 bp, Saccharomyces pastorianus
gtggcccaagatttgaatgttcgaa

SEQ ID NO: 37859 - DNA, 25 bp, Saccharomyces pastorianus
acaaaactctgatacccctcgaaag

SEQ ID NO: 37860 - DNA, 25 bp, Saccharomyces pastorianus
agagactaccatctagccttaagat

SEQ ID NO: 37861 - DNA, 25 bp, Saccharomyces pastorianus
aatctggtccaattacttacaagag

SEQ ID NO: 37862 - DNA, 25 bp, Saccharomyces pastorianus
gaacagtatctgtctctctgaaaac

SEQ ID NO: 37863 - DNA, 25 bp, Saccharomyces pastorianus
ttgtcactgagcttgacgctaaagg

SEQ ID NO: 37864 - DNA, 25 bp, Saccharomyces pastorianus
ggtccaacagaattttttcccacag

SEQ ID NO: 37865 - DNA, 25 bp, Saccharomyces pastorianus
gattgccgtatatttgccattatta

SEQ ID NO: 37866 - DNA, 25 bp, Saccharomyces pastorianus
tcagcagtattgttctttggtttct

SEQ ID NO: 37867 - DNA, 25 bp, Saccharomyces pastorianus
attgaaacattatggtccctagtga

SEQ ID NO: 37868 - DNA, 25 bp, Saccharomyces pastorianus
gtccgataatgtggtagaagctcta

SEQ ID NO: 37869 - DNA, 25 bp, Saccharomyces pastorianus
aatttcaaggcatgtccattcctcg

SEQ ID NO: 37870 - DNA, 25 bp, Saccharomyces pastorianus
cattcctcgcgaagtgtccgataat

SEQ ID NO: 37871 - DNA, 25 bp, Saccharomyces pastorianus
gatgtaccgcttttcaactgatatt

SEQ ID NO: 37872 - DNA, 25 bp, Saccharomyces pastorianus
ctccaaccaaactctgtcatcagtg

SEQ ID NO: 37873 - DNA, 25 bp, Saccharomyces pastorianus
caatgagctggtcaaactttgcgaa

SEQ ID NO: 37874 - DNA, 25 bp, Saccharomyces pastorianus
ggaacaatgccctacgtttgagcaa

SEQ ID NO: 37875 - DNA, 25 bp, Saccharomyces pastorianus
agggtaactacttgaccactctacg

SEQ ID NO: 37876 - DNA, 25 bp, Saccharomyces pastorianus
aatacgagtacgttggccgcgactg

SEQ ID NO: 37877 - DNA, 25 bp, Saccharomyces pastorianus
gcgactgtcttttacatgggtcaaa

SEQ ID NO: 37878 - DNA, 25 bp, Saccharomyces pastorianus
ctaggcaagccatacacgtttcatt

SEQ ID NO: 37879 - DNA, 25 bp, Saccharomyces pastorianus
ggagtttcacgccttttggagtaag

SEQ ID NO: 37880 - DNA, 25 bp, Saccharomyces pastorianus
ggttgccaatctgcgtgtacataag

SEQ ID NO: 37881 - DNA, 25 bp, Saccharomyces pastorianus
gccatggtcctcctttaaacgtgaa

SEQ ID NO: 37882 - DNA, 25 bp, Saccharomyces pastorianus
aagggacattactcaacggcatcgc

SEQ ID NO: 37883 - DNA, 25 bp, Saccharomyces pastorianus
tattactcctgatgtggttgccaat

SEQ ID NO: 37884 - DNA, 25 bp, Saccharomyces pastorianus
atcctgggcccatatgaagagcgtt

SEQ ID NO: 37885 - DNA, 25 bp, Saccharomyces pastorianus
gtcatcttaacgttggctttggcca

SEQ ID NO: 37886 - DNA, 25 bp, Saccharomyces pastorianus
tccgccgcttcaaaagacaagacca

SEQ ID NO: 37887 - DNA, 25 bp, Saccharomyces pastorianus
aaaagacaagaccagcaacgaaaag

SEQ ID NO: 37888 - DNA, 25 bp, Saccharomyces pastorianus
tcaaaagacaagaccagcaacgaaa

SEQ ID NO: 37889 - DNA, 25 bp, Saccharomyces pastorianus
ccgcttcaaaagacaagaccagcaa

SEQ ID NO: 37890 - DNA, 25 bp, Saccharomyces pastorianus
agacaagaccagcaacgaaaagaag

SEQ ID NO: 37891 - DNA, 25 bp, Saccharomyces pastorianus
aagacaagaccagcaacgaaaagaa

SEQ ID NO: 37892 - DNA, 25 bp, Saccharomyces pastorianus
agaaggacaactacatcgtcaaggg

SEQ ID NO: 37893 - DNA, 25 bp, Saccharomyces pastorianus
gtctccgccgcttcaaaagacaaga

SEQ ID NO: 37894 - DNA, 25 bp, Saccharomyces pastorianus
tctccgccgcttcaaaagacaagac

SEQ ID NO: 37895 - DNA, 25 bp, Saccharomyces pastorianus
gaaggacaactacatcgtcaagggt

SEQ ID NO: 37896 - DNA, 25 bp, Saccharomyces pastorianus
acaagaccagcaacgaaaagaagga

SEQ ID NO: 37897 - DNA, 25 bp, Saccharomyces pastorianus
aagctaagcgcattcgtcgtatcaa

SEQ ID NO: 37898 - DNA, 25 bp, Saccharomyces pastorianus
cgtatcaagaaaccctctcctgacg

SEQ ID NO: 37899 - DNA, 25 bp, Saccharomyces pastorianus
tttcgacatcccttctccagaagaa

SEQ ID NO: 37900 - DNA, 25 bp, Saccharomyces pastorianus
gacgctaccgtttcgcaggaaacta

SEQ ID NO: 37901 - DNA, 25 bp, Saccharomyces pastorianus
aaccattacttacactttcgacatc

SEQ ID NO: 37902 - DNA, 25 bp, Saccharomyces pastorianus
aacgtgcgagtggattttttggaga

SEQ ID NO: 37903 - DNA, 25 bp, Saccharomyces pastorianus
aagagtcgccttgaaacaactgaaa

SEQ ID NO: 37904 - DNA, 25 bp, Saccharomyces pastorianus
tagcgtggtgctaaagtatgccaag

SEQ ID NO: 37905 - DNA, 25 bp, Saccharomyces pastorianus
acggcacgttgcattgaaaaggaca

SEQ ID NO: 37906 - DNA, 25 bp, Saccharomyces pastorianus
atgaatagtctcaacacggcacgtt

SEQ ID NO: 37907 - DNA, 25 bp, Saccharomyces pastorianus
gaggaatctgaagcgaagtccaatt

SEQ ID NO: 37908 - DNA, 25 bp, Saccharomyces pastorianus
gccttcgtgttagtttcctgcgaaa

SEQ ID NO: 37909 - DNA, 25 bp, Saccharomyces pastorianus
tagtccgtctagatttaaaacctgt

SEQ ID NO: 37910 - DNA, 25 bp, Saccharomyces pastorianus
tagcgtcaggagagggtttcttgat

SEQ ID NO: 37911 - DNA, 25 bp, Saccharomyces pastorianus
gtttcctgcgaaacggtagcgtcag

SEQ ID NO: 37912 - DNA, 25 bp, Saccharomyces pastorianus
gtttcattacttgccttcgtgttag

SEQ ID NO: 37913 - DNA, 25 bp, Saccharomyces pastorianus
gacgaatgcgcttagctttagtaat

SEQ ID NO: 37914 - DNA, 25 bp, Saccharomyces pastorianus
gatacgacgaatgcgcttagcttta

SEQ ID NO: 37915 - DNA, 25 bp, Saccharomyces pastorianus
gtctagatttaaaacctgtcttggt

SEQ ID NO: 37916 - DNA, 25 bp, Saccharomyces pastorianus
gctttagtaatgcatctacctgatg

SEQ ID NO: 37917 - DNA, 25 bp, Saccharomyces pastorianus
gtttcttgatacgacgaatgcgctt

SEQ ID NO: 37918 - DNA, 25 bp, Saccharomyces pastorianus
tacttgccttcgtgttagtttcctg

SEQ ID NO: 37919 - DNA, 25 bp, Saccharomyces pastorianus
taaggccactggatccgccacaatt

SEQ ID NO: 37920 - DNA, 25 bp, Saccharomyces pastorianus
caggtcgttatgttatgatgtgtac

SEQ ID NO: 37921 - DNA, 25 bp, Saccharomyces pastorianus
ggaaattgcctccaagactctattc

SEQ ID NO: 37922 - DNA, 25 bp, Saccharomyces pastorianus
agctcaaaaaccttaccgtcattat

SEQ ID NO: 37923 - DNA, 25 bp, Saccharomyces pastorianus
tatatgaacagctaccagattggaa

SEQ ID NO: 37924 - DNA, 25 bp, Saccharomyces pastorianus
tcaaaccagagggtgttttctcttt

SEQ ID NO: 37925 - DNA, 25 bp, Saccharomyces pastorianus
tatatttgtgaagcccatccagacg

SEQ ID NO: 37926 - DNA, 25 bp, Saccharomyces pastorianus
gtcatagtaggcttaatcaaaccag

SEQ ID NO: 37927 - DNA, 25 bp, Saccharomyces pastorianus
cccatccagacgtccttgagaaaat

SEQ ID NO: 37928 - DNA, 25 bp, Saccharomyces pastorianus
acattggcttcggaatgggtatcat

SEQ ID NO: 37929 - DNA, 25 bp, Saccharomyces pastorianus
ttaacggattaggtgctgacaggtc

SEQ ID NO: 37930 - DNA, 25 bp, Saccharomyces pastorianus
gtaacgccacacctattagcgggta

SEQ ID NO: 37931 - DNA, 25 bp, Saccharomyces pastorianus
gaatctagtggttcgaacttgacga

SEQ ID NO: 37932 - DNA, 25 bp, Saccharomyces pastorianus
aatctcgcttccacagtaggcggtt

SEQ ID NO: 37933 - DNA, 25 bp, Saccharomyces pastorianus
gagtcatctgattctaaaacttcca

SEQ ID NO: 37934 - DNA, 25 bp, Saccharomyces pastorianus
gtaggcggttctcaaactaggaagt

SEQ ID NO: 37935 - DNA, 25 bp, Saccharomyces pastorianus
gaaaatgtgaatctcgcttccacag

SEQ ID NO: 37936 - DNA, 25 bp, Saccharomyces pastorianus
atgaagttgcgacccctatagcggg

SEQ ID NO: 37937 - DNA, 25 bp, Saccharomyces pastorianus
gctacaatgaagttgcgacccctat

SEQ ID NO: 37938 - DNA, 25 bp, Saccharomyces pastorianus
gggaagtataccatcctttccaaca

SEQ ID NO: 37939 - DNA, 25 bp, Saccharomyces pastorianus
ccggatgatccgttacgtatgttag

SEQ ID NO: 37940 - DNA, 25 bp, Saccharomyces pastorianus
acctattagcgggtatgaggctcat

SEQ ID NO: 37941 - DNA, 25 bp, Saccharomyces pastorianus
aatttgacccaattcattccaggtg

SEQ ID NO: 37942 - DNA, 25 bp, Saccharomyces pastorianus
gtcagcgcaccgtttatttgattca

SEQ ID NO: 37943 - DNA, 25 bp, Saccharomyces pastorianus
acgctggcttcccatgtggtgtaac

SEQ ID NO: 37944 - DNA, 25 bp, Saccharomyces pastorianus
gacaacttccctaatttgacccaat

SEQ ID NO: 37945 - DNA, 25 bp, Saccharomyces pastorianus
aacttcatcgtctgccaatgaccga

SEQ ID NO: 37946 - DNA, 25 bp, Saccharomyces pastorianus
tgctaaatttcagggcatccgtctc

SEQ ID NO: 37947 - DNA, 25 bp, Saccharomyces pastorianus
gggatccgtctcttggaattgctaa

SEQ ID NO: 37948 - DNA, 25 bp, Saccharomyces pastorianus
gaacgtgcaactctacaagtgactt

SEQ ID NO: 37949 - DNA, 25 bp, Saccharomyces pastorianus
tcacgaagatgagacgccgcgattt

SEQ ID NO: 37950 - DNA, 25 bp, Saccharomyces pastorianus
gacgccgcgatttgaagatcctcga

SEQ ID NO: 37951 - DNA, 25 bp, Saccharomyces pastorianus
aagggatttcttttcaacgctggct

SEQ ID NO: 37952 - DNA, 25 bp, Saccharomyces pastorianus
aattccgacactgaaaccgttctgg

SEQ ID NO: 37953 - DNA, 25 bp, Saccharomyces pastorianus
gcaaatcactgctagttatccggaa

SEQ ID NO: 37954 - DNA, 25 bp, Saccharomyces pastorianus
tttgggtatcttcgactacaccgac

SEQ ID NO: 37955 - DNA, 25 bp, Saccharomyces pastorianus
tcgcgacaccaaacactcattgaat

SEQ ID NO: 37956 - DNA, 25 bp, Saccharomyces pastorianus
agtggactttgttcacgacctaggc

SEQ ID NO: 37957 - DNA, 25 bp, Saccharomyces pastorianus
tttttggcagactacttggagctaa

SEQ ID NO: 37958 - DNA, 25 bp, Saccharomyces pastorianus
gtggattagtcacctcgaggcaaat

SEQ ID NO: 37959 - DNA, 25 bp, Saccharomyces pastorianus
acggccacagtgcagtcgatgttaa

SEQ ID NO: 37960 - DNA, 25 bp, Saccharomyces pastorianus
tctggtatccacctcggatcatgaa

SEQ ID NO: 37961 - DNA, 25 bp, Saccharomyces pastorianus
gaacgacatggtttctttcagagca

SEQ ID NO: 37962 - DNA, 25 bp, Saccharomyces pastorianus
ggtatccacaagtactggccaacgc

SEQ ID NO: 37963 - DNA, 25 bp, Saccharomyces pastorianus
tcctgtgtctaatgtgcagcagttg

SEQ ID NO: 37964 - DNA, 25 bp, Saccharomyces pastorianus
gtgtctaatgtgcagcagttgtttc

SEQ ID NO: 37965 - DNA, 25 bp, Saccharomyces pastorianus
gttcctgtgtctaatgtgcagcagt

SEQ ID NO: 37966 - DNA, 25 bp, Saccharomyces pastorianus
gcgttcctgtgtctaatgtgcagca

SEQ ID NO: 37967 - DNA, 25 bp, Saccharomyces pastorianus
gggtgcgttcctgtgtctaatgtgc

SEQ ID NO: 37968 - DNA, 25 bp, Saccharomyces pastorianus
ttaatgggtgcgttcctgtgtctaa

SEQ ID NO: 37969 - DNA, 25 bp, Saccharomyces pastorianus
gattacaccgtgatcaatatttttt

SEQ ID NO: 37970 - DNA, 25 bp, Saccharomyces pastorianus
gtgcgttcctgtgtctaatgtgcag

SEQ ID NO: 37971 - DNA, 25 bp, Saccharomyces pastorianus
aatgggtgcgttcctgtgtctaatg

SEQ ID NO: 37972 - DNA, 25 bp, Saccharomyces pastorianus
tccgattacaccgtgatcaatattt

SEQ ID NO: 37973 - DNA, 25 bp, Saccharomyces pastorianus
tttttaatgggtgcgttcctgtgtc

SEQ ID NO: 37974 - DNA, 25 bp, Saccharomyces pastorianus
gcaccatctgtgtcctacatgagaa

SEQ ID NO: 37975 - DNA, 25 bp, Saccharomyces pastorianus
agtttgactttttcggtagctctca

SEQ ID NO: 37976 - DNA, 25 bp, Saccharomyces pastorianus
tttggcgccaggaaagtttgacttt

SEQ ID NO: 37977 - DNA, 25 bp, Saccharomyces pastorianus
gggctctcatctacgggttcaggat

SEQ ID NO: 37978 - DNA, 25 bp, Saccharomyces pastorianus
caggattccggaaactttggcgcca

SEQ ID NO: 37979 - DNA, 25 bp, Saccharomyces pastorianus
ggttccgtttgccatctaaaggtca

SEQ ID NO: 37980 - DNA, 25 bp, Saccharomyces pastorianus
gactacttgggaatcatcagcttga

SEQ ID NO: 37981 - DNA, 25 bp, Saccharomyces pastorianus
acattatggtcgttctcggttccgt

SEQ ID NO: 37982 - DNA, 25 bp, Saccharomyces pastorianus
atcagcttgatctcatgctcgatga

SEQ ID NO: 37983 - DNA, 25 bp, Saccharomyces pastorianus
gtatcttacttcagtctcttcacgg

SEQ ID NO: 37984 - DNA, 25 bp, Saccharomyces pastorianus
tattattcgggttcagtgggctcct

SEQ ID NO: 37985 - DNA, 25 bp, Saccharomyces pastorianus
tgacaatgagactatcgcggacccc

SEQ ID NO: 37986 - DNA, 25 bp, Saccharomyces pastorianus
ggtcagggatggtgtctccgcccaa

SEQ ID NO: 37987 - DNA, 25 bp, Saccharomyces pastorianus
agatgtggctattttcttgagacga

SEQ ID NO: 37988 - DNA, 25 bp, Saccharomyces pastorianus
gagacgaaacttggttcagggtcaa

SEQ ID NO: 37989 - DNA, 25 bp, Saccharomyces pastorianus
ggagcccaggtatcatctgaacatt

SEQ ID NO: 37990 - DNA, 25 bp, Saccharomyces pastorianus
agacacggcctgagagctactcgaa

SEQ ID NO: 37991 - DNA, 25 bp, Saccharomyces pastorianus
agctgctagagccaaaatgcggtca

SEQ ID NO: 37992 - DNA, 25 bp, Saccharomyces pastorianus
cgcggaccccacagcaagagtgaaa

SEQ ID NO: 37993 - DNA, 25 bp, Saccharomyces pastorianus
aaggctttggatgcatacagacacg

SEQ ID NO: 37994 - DNA, 25 bp, Saccharomyces pastorianus
gatgacaccgatatgaaggagccca

SEQ ID NO: 37995 - DNA, 25 bp, Saccharomyces pastorianus
gagctactcgaatagcattccagaa

SEQ ID NO: 37996 - DNA, 25 bp, Saccharomyces pastorianus
gactttcctatgcaatcaatatccg

SEQ ID NO: 37997 - DNA, 25 bp, Saccharomyces pastorianus
ggagtacaaggacgatttggcctat

SEQ ID NO: 37998 - DNA, 25 bp, Saccharomyces pastorianus
gatttggcctatgacaagacggata

SEQ ID NO: 37999 - DNA, 25 bp, Saccharomyces pastorianus
atgcctgctattcttttccaatgat

SEQ ID NO: 38000 - DNA, 25 bp, Saccharomyces pastorianus
aagccggatctgattgcagtcatga

SEQ ID NO: 38001 - DNA, 25 bp, Saccharomyces pastorianus
agagatcacatattatgcctgctat

SEQ ID NO: 38002 - DNA, 25 bp, Saccharomyces pastorianus
atggtgcttgaaactataccttctg

SEQ ID NO: 38003 - DNA, 25 bp, Saccharomyces pastorianus
tataccttctgactttcctatgcaa

SEQ ID NO: 38004 - DNA, 25 bp, Saccharomyces pastorianus
tggatttcgcctaaagagttattga

SEQ ID NO: 38005 - DNA, 25 bp, Saccharomyces pastorianus
gtatacctatcgttcaatgacttta

SEQ ID NO: 38006 - DNA, 25 bp, Saccharomyces pastorianus
gaaattttagcctcttagatgacat

SEQ ID NO: 38007 - DNA, 25 bp, Saccharomyces pastorianus
gcttgtggaaccatcagcgtctgaa

SEQ ID NO: 38008 - DNA, 25 bp, Saccharomyces pastorianus
gtcgtattttcaagctgcccgtgaa

SEQ ID NO: 38009 - DNA, 25 bp, Saccharomyces pastorianus
aattactgaccaacaacctcgtgag

SEQ ID NO: 38010 - DNA, 25 bp, Saccharomyces pastorianus
aaacctggacgagctgagagcccaa

SEQ ID NO: 38011 - DNA, 25 bp, Saccharomyces pastorianus
agtcgacgacaagtacacccagttt

SEQ ID NO: 38012 - DNA, 25 bp, Saccharomyces pastorianus
aagtcggcctatggctgctgttcaa

SEQ ID NO: 38013 - DNA, 25 bp, Saccharomyces pastorianus
gaagcgtcgtcgttgacaactccag

SEQ ID NO: 38014 - DNA, 25 bp, Saccharomyces pastorianus
gggtatactgatgaccttaggccta

SEQ ID NO: 38015 - DNA, 25 bp, Saccharomyces pastorianus
aaacgcactcactgatgcaagtcga

SEQ ID NO: 38016 - DNA, 25 bp, Saccharomyces pastorianus
ggcaatcaaattctacagtcgggta

SEQ ID NO: 38017 - DNA, 25 bp, Saccharomyces pastorianus
gaagcgagacgtatacctgtcactc

SEQ ID NO: 38018 - DNA, 25 bp, Saccharomyces pastorianus
ggttcctggcttcgtggcaagacta

SEQ ID NO: 38019 - DNA, 25 bp, Saccharomyces pastorianus
gctacccaccgtccagaaagaaatg

SEQ ID NO: 38020 - DNA, 25 bp, Saccharomyces pastorianus
tcaacaaactgatgtaccgctccgt

SEQ ID NO: 38021 - DNA, 25 bp, Saccharomyces pastorianus
ggcaagactacctacacatgatttc

SEQ ID NO: 38022 - DNA, 25 bp, Saccharomyces pastorianus
gagactctggagaaactgtcccctg

SEQ ID NO: 38023 - DNA, 25 bp, Saccharomyces pastorianus
agatatcgacaacccattgcacgtg

SEQ ID NO: 38024 - DNA, 25 bp, Saccharomyces pastorianus
tacctcccttggttctatacagaag

SEQ ID NO: 38025 - DNA, 25 bp, Saccharomyces pastorianus
gaaactgtcccctgagcagactgtt

SEQ ID NO: 38026 - DNA, 25 bp, Saccharomyces pastorianus
cattgcacgtggtcgggttcctggc

SEQ ID NO: 38027 - DNA, 25 bp, Saccharomyces pastorianus
gatgcgactttatcttcggagactc

SEQ ID NO: 38028 - DNA, 25 bp, Saccharomyces pastorianus
aatgggcgaccagtacgtgcggaac

SEQ ID NO: 38029 - DNA, 25 bp, Saccharomyces pastorianus
atatcactggtgtcgctggattctt

SEQ ID NO: 38030 - DNA, 25 bp, Saccharomyces pastorianus
taccgtggcatttctcgtgatgaat

SEQ ID NO: 38031 - DNA, 25 bp, Saccharomyces pastorianus
ctggattcttcgcttggttatttat

SEQ ID NO: 38032 - DNA, 25 bp, Saccharomyces pastorianus
ttaaccaccatcatttctgcagcaa

SEQ ID NO: 38033 - DNA, 25 bp, Saccharomyces pastorianus
gtggtgtcccatatattgcggtttt

SEQ ID NO: 38034 - DNA, 25 bp, Saccharomyces pastorianus
tatcatcatccaaggtttcaccgct

SEQ ID NO: 38035 - DNA, 25 bp, Saccharomyces pastorianus
gttttcgccacttccatatttggtg

SEQ ID NO: 38036 - DNA, 25 bp, Saccharomyces pastorianus
cggtattaatttccttgccgcgtat

SEQ ID NO: 38037 - DNA, 25 bp, Saccharomyces pastorianus
ttggttctcgtgtcttatttggttt

SEQ ID NO: 38038 - DNA, 25 bp, Saccharomyces pastorianus
tctctgttttccttttcttggcaat

SEQ ID NO: 38039 - DNA, 25 bp, Saccharomyces pastorianus
ttacatggaaacttcgaccggtggt

SEQ ID NO: 38040 - DNA, 25 bp, Saccharomyces pastorianus
gcattatcgagtatatctaccggaa

SEQ ID NO: 38041 - DNA, 25 bp, Saccharomyces pastorianus
ggacaaaactattgggcttctagat

SEQ ID NO: 38042 - DNA, 25 bp, Saccharomyces pastorianus
aataggaggtccattgagcaatctg

SEQ ID NO: 38043 - DNA, 25 bp, Saccharomyces pastorianus
cactgcgaaaaattggccattgcta

SEQ ID NO: 38044 - DNA, 25 bp, Saccharomyces pastorianus
aaaattcggcgtcaatgttctcatt

SEQ ID NO: 38045 - DNA, 25 bp, Saccharomyces pastorianus
tttccgcatgttcgacaagttcatt

SEQ ID NO: 38046 - DNA, 25 bp, Saccharomyces pastorianus
ttgatcgacttgtatgctagcacta

SEQ ID NO: 38047 - DNA, 25 bp, Saccharomyces pastorianus
tgatttactttatcatccccatgat

SEQ ID NO: 38048 - DNA, 25 bp, Saccharomyces pastorianus
gatattaacttccaagccaggccaa

SEQ ID NO: 38049 - DNA, 25 bp, Saccharomyces pastorianus
tgctaatgtgttcttttccgcatgt

SEQ ID NO: 38050 - DNA, 25 bp, Saccharomyces pastorianus
aagccaggccaacatgctaatgtgt

SEQ ID NO: 38051 - DNA, 25 bp, Saccharomyces pastorianus
cataccgatgactccacagattttc

SEQ ID NO: 38052 - DNA, 25 bp, Saccharomyces pastorianus
gaatttgaattacgcccagcaatta

SEQ ID NO: 38053 - DNA, 25 bp, Saccharomyces pastorianus
gcagcagatttcacttcattgtttg

SEQ ID NO: 38054 - DNA, 25 bp, Saccharomyces pastorianus
taaatgtacgcctcctcgagtagca

SEQ ID NO: 38055 - DNA, 25 bp, Saccharomyces pastorianus
atggtacgactacttttctcaggct

SEQ ID NO: 38056 - DNA, 25 bp, Saccharomyces pastorianus
gaaccgttggctgcaggagattatt

SEQ ID NO: 38057 - DNA, 25 bp, Saccharomyces pastorianus
tcaagcaactgtgtggtgaaccgtt

SEQ ID NO: 38058 - DNA, 25 bp, Saccharomyces pastorianus
gagtagcacagtttaccttcaagca

SEQ ID NO: 38059 - DNA, 25 bp, Saccharomyces pastorianus
gaagaaaggtttgccttcgctcgtg

SEQ ID NO: 38060 - DNA, 25 bp, Saccharomyces pastorianus
ttcgctcgtgccttaagtagactgt

SEQ ID NO: 38061 - DNA, 25 bp, Saccharomyces pastorianus
atttatctatctatgtccgcgatga

SEQ ID NO: 38062 - DNA, 25 bp, Saccharomyces pastorianus
gaatggacttctctgtttgacaacg

SEQ ID NO: 38063 - DNA, 25 bp, Saccharomyces pastorianus
aagacgttcccgtgcaagaaagctg

SEQ ID NO: 38064 - DNA, 25 bp, Saccharomyces pastorianus
ttgccaacccctatactagaagatg

SEQ ID NO: 38065 - DNA, 25 bp, Saccharomyces pastorianus
acgccgctgtggtagaatctttctt

SEQ ID NO: 38066 - DNA, 25 bp, Saccharomyces pastorianus
tcaacaacttcatttttgccaaccc

SEQ ID NO: 38067 - DNA, 25 bp, Saccharomyces pastorianus
gtctccaattgtgcctgaatctagc

SEQ ID NO: 38068 - DNA, 25 bp, Saccharomyces pastorianus
gaagatgcctctttggtaccatcta

SEQ ID NO: 38069 - DNA, 25 bp, Saccharomyces pastorianus
tgaatctagcgatcctgctgctcta

SEQ ID NO: 38070 - DNA, 25 bp, Saccharomyces pastorianus
gtaaacaacgctcgattccactgtc

SEQ ID NO: 38071 - DNA, 25 bp, Saccharomyces pastorianus
aatttcagaactagacgccgctgtg

SEQ ID NO: 38072 - DNA, 25 bp, Saccharomyces pastorianus
atgacgttttatcggctgacaaggc

SEQ ID NO: 38073 - DNA, 25 bp, Saccharomyces pastorianus
gcacagtccatttctctcaaatgct

SEQ ID NO: 38074 - DNA, 25 bp, Saccharomyces pastorianus
tcatctgctcccgttgattagaatt

SEQ ID NO: 38075 - DNA, 25 bp, Saccharomyces pastorianus
tcaaatgcttcctctgctattacag

SEQ ID NO: 38076 - DNA, 25 bp, Saccharomyces pastorianus
gaaaatggtagcctctactgtgact

SEQ ID NO: 38077 - DNA, 25 bp, Saccharomyces pastorianus
gtcagatcttccagatgctgttcaa

SEQ ID NO: 38078 - DNA, 25 bp, Saccharomyces pastorianus
agtcccttctgctgtggtaacattg

SEQ ID NO: 38079 - DNA, 25 bp, Saccharomyces pastorianus
attacagcaggtgccatctcaactg

SEQ ID NO: 38080 - DNA, 25 bp, Saccharomyces pastorianus
ttatgctggtttagtacctgccctt

SEQ ID NO: 38081 - DNA, 25 bp, Saccharomyces pastorianus
aatgtggccatacaatttcctttat

SEQ ID NO: 38082 - DNA, 25 bp, Saccharomyces pastorianus
tattccgggtttgctactaatttag

SEQ ID NO: 38083 - DNA, 25 bp, Saccharomyces pastorianus
ggagaatactcaacccactataagg

SEQ ID NO: 38084 - DNA, 25 bp, Saccharomyces pastorianus
atcgaaatcgatgccgaccagcagg

SEQ ID NO: 38085 - DNA, 25 bp, Saccharomyces pastorianus
atacgtgatcttacctgatccgaaa

SEQ ID NO: 38086 - DNA, 25 bp, Saccharomyces pastorianus
gaacgactcacggtcgactaatcga

SEQ ID NO: 38087 - DNA, 25 bp, Saccharomyces pastorianus
gcgcgattggcgattacgtcaagaa

SEQ ID NO: 38088 - DNA, 25 bp, Saccharomyces pastorianus
tggagggaccttttgtaagcacgaa

SEQ ID NO: 38089 - DNA, 25 bp, Saccharomyces pastorianus
acagaaagtgtattccggcgcgatt

SEQ ID NO: 38090 - DNA, 25 bp, Saccharomyces pastorianus
gccatccttacgcactacagaaagt

SEQ ID NO: 38091 - DNA, 25 bp, Saccharomyces pastorianus
aaatagcccatatgtccactgatga

SEQ ID NO: 38092 - DNA, 25 bp, Saccharomyces pastorianus
ggttaggattcttagcttcaggcca

SEQ ID NO: 38093 - DNA, 25 bp, Saccharomyces pastorianus
gatatgttccggacaaatagcccat

SEQ ID NO: 38094 - DNA, 25 bp, Saccharomyces pastorianus
cacgtataaacgctgtcaacactgt

SEQ ID NO: 38095 - DNA, 25 bp, Saccharomyces pastorianus
ggttcttgagcgataagacccctaa

SEQ ID NO: 38096 - DNA, 25 bp, Saccharomyces pastorianus
aacggcgacagaccaaacttcggca

SEQ ID NO: 38097 - DNA, 25 bp, Saccharomyces pastorianus
aacactccgcaaaggccaagatctt

SEQ ID NO: 38098 - DNA, 25 bp, Saccharomyces pastorianus
caaggaacacatccggcccaggaag

SEQ ID NO: 38099 - DNA, 25 bp, Saccharomyces pastorianus
gatgctgcggtgacaatagattcca

SEQ ID NO: 38100 - DNA, 25 bp, Saccharomyces pastorianus
aaagcacgggaagctacccataccg

SEQ ID NO: 38101 - DNA, 25 bp, Saccharomyces pastorianus
tactgtcaacatcgacgggttcttg

SEQ ID NO: 38102 - DNA, 25 bp, Saccharomyces pastorianus
aggaagcctcaggtagccgttccgc

SEQ ID NO: 38103 - DNA, 25 bp, Saccharomyces pastorianus
gccgaggcgacgatggttactgtca

SEQ ID NO: 38104 - DNA, 25 bp, Saccharomyces pastorianus
gaaaagctcgccttcgaccaaggaa

SEQ ID NO: 38105 - DNA, 25 bp, Saccharomyces pastorianus
aaacttcggcaacgctatcaagcag

SEQ ID NO: 38106 - DNA, 25 bp, Saccharomyces pastorianus
gttagccataccaaaccaatctgtt

SEQ ID NO: 38107 - DNA, 25 bp, Saccharomyces pastorianus
gaattgctgcgtccaaatgcaggca

SEQ ID NO: 38108 - DNA, 25 bp, Saccharomyces pastorianus
gactactgctagctctcagtttgta

SEQ ID NO: 38109 - DNA, 25 bp, Saccharomyces pastorianus
gaattcctgcggtcggtgataacac

SEQ ID NO: 38110 - DNA, 25 bp, Saccharomyces pastorianus
aaacgacggtacaagcggtgcagct

SEQ ID NO: 38111 - DNA, 25 bp, Saccharomyces pastorianus
ggccttagcgtctgtgactactgct

SEQ ID NO: 38112 - DNA, 25 bp, Saccharomyces pastorianus
tgtacatgagccttttctgcggaaa

SEQ ID NO: 38113 - DNA, 25 bp, Saccharomyces pastorianus
tgtgcgctacccattaataccaaag

SEQ ID NO: 38114 - DNA, 25 bp, Saccharomyces pastorianus
ggtgacgttgaaactactgccaaag

SEQ ID NO: 38115 - DNA, 25 bp, Saccharomyces pastorianus
caatctgtttcatcaccggccttag

SEQ ID NO: 38116 - DNA, 25 bp, Saccharomyces pastorianus
actagcgatggttgtgtgtctttga

SEQ ID NO: 38117 - DNA, 25 bp, Saccharomyces pastorianus
ggtcgttgatttgatctctacttca

SEQ ID NO: 38118 - DNA, 25 bp, Saccharomyces pastorianus
taggtgggcggacatctactccaag

SEQ ID NO: 38119 - DNA, 25 bp, Saccharomyces pastorianus
gaaatgatctcccaaggtgccaatg

SEQ ID NO: 38120 - DNA, 25 bp, Saccharomyces pastorianus
gaacttatcttcatccttctacgaa

SEQ ID NO: 38121 - DNA, 25 bp, Saccharomyces pastorianus
tcatgtttccatggctttacccatc

SEQ ID NO: 38122 - DNA, 25 bp, Saccharomyces pastorianus
catgttcaccactctggcagaagaa

SEQ ID NO: 38123 - DNA, 25 bp, Saccharomyces pastorianus
gaaattatccattgtctcattagtt

SEQ ID NO: 38124 - DNA, 25 bp, Saccharomyces pastorianus
gacgcagactcactaaagtccttga

SEQ ID NO: 38125 - DNA, 25 bp, Saccharomyces pastorianus
aagccaattcgaacacgccgttgat

SEQ ID NO: 38126 - DNA, 25 bp, Saccharomyces pastorianus
atcttcgtcattaacatccactcta

SEQ ID NO: 38127 - DNA, 25 bp, Saccharomyces pastorianus
ttatctcatgggttcttagctcaaa

SEQ ID NO: 38128 - DNA, 25 bp, Saccharomyces pastorianus
tttccatttcattatcgacgacgcc

SEQ ID NO: 38129 - DNA, 25 bp, Saccharomyces pastorianus
taagaatttccccattttgagcaac

SEQ ID NO: 38130 - DNA, 25 bp, Saccharomyces pastorianus
gacgccagcaaacttgatcctcggg

SEQ ID NO: 38131 - DNA, 25 bp, Saccharomyces pastorianus
gagacagcaactttctttttagtac

SEQ ID NO: 38132 - DNA, 25 bp, Saccharomyces pastorianus
attttgtatccactattccacacgc

SEQ ID NO: 38133 - DNA, 25 bp, Saccharomyces pastorianus
tgccgggcaccgatatggacatttt

SEQ ID NO: 38134 - DNA, 25 bp, Saccharomyces pastorianus
gagatggaatcttgccgggcaccga

SEQ ID NO: 38135 - DNA, 25 bp, Saccharomyces pastorianus
tagcattgacgaattccagaaccgg

SEQ ID NO: 38136 - DNA, 25 bp, Saccharomyces pastorianus
agggtaataacaccggctgtacaag

SEQ ID NO: 38137 - DNA, 25 bp, Saccharomyces pastorianus
actaccacgttgtcgggctctatag

SEQ ID NO: 38138 - DNA, 25 bp, Saccharomyces pastorianus
gggattcgactaactaccacgttgt

SEQ ID NO: 38139 - DNA, 25 bp, Saccharomyces pastorianus
ggcactgcaccaatagatcctacaa

SEQ ID NO: 38140 - DNA, 25 bp, Saccharomyces pastorianus
aataacggcagtgacagtggtcgga

SEQ ID NO: 38141 - DNA, 25 bp, Saccharomyces pastorianus
ggccatgcaaccgttaagtggagaa

SEQ ID NO: 38142 - DNA, 25 bp, Saccharomyces pastorianus
gtcggagtgcattatgttcaagaaa

SEQ ID NO: 38143 - DNA, 25 bp, Saccharomyces pastorianus
gagaaacctaaatggcactgcacca

SEQ ID NO: 38144 - DNA, 25 bp, Saccharomyces pastorianus
cagtggtcggagtgcattatgttca

SEQ ID NO: 38145 - DNA, 25 bp, Saccharomyces pastorianus
gcaaaataacctttacagtatcctg

SEQ ID NO: 38146 - DNA, 25 bp, Saccharomyces pastorianus
agtagagccagcaaaataaccttta

SEQ ID NO: 38147 - DNA, 25 bp, Saccharomyces pastorianus
tacagtatcctgtctaataacggca

SEQ ID NO: 38148 - DNA, 25 bp, Saccharomyces pastorianus
gagctgcggaaaaaatatgaggcca

SEQ ID NO: 38149 - DNA, 25 bp, Saccharomyces pastorianus
atatgaggccatgcaaccgttaagt

SEQ ID NO: 38150 - DNA, 25 bp, Saccharomyces pastorianus
atggccctcaaaatggctcacctaa

SEQ ID NO: 38151 - DNA, 25 bp, Saccharomyces pastorianus
ggagtccttagaacatgcccaaaga

SEQ ID NO: 38152 - DNA, 25 bp, Saccharomyces pastorianus
gtttacaatttgttccctgagggat

SEQ ID NO: 38153 - DNA, 25 bp, Saccharomyces pastorianus
agaccatttgacacagaacgctctg

SEQ ID NO: 38154 - DNA, 25 bp, Saccharomyces pastorianus
tagtgatgcctgtcatatcacctcc

SEQ ID NO: 38155 - DNA, 25 bp, Saccharomyces pastorianus
aagcagaatgcctggccattacgtc

SEQ ID NO: 38156 - DNA, 25 bp, Saccharomyces pastorianus
aacgctctgggttcgtgcttggtga

SEQ ID NO: 38157 - DNA, 25 bp, Saccharomyces pastorianus
gttgattacgtcaatgctcacgcca

SEQ ID NO: 38158 - DNA, 25 bp, Saccharomyces pastorianus
aaggatgcggcatgctcgtcatgga

SEQ ID NO: 38159 - DNA, 25 bp, Saccharomyces pastorianus
attacgtctgcacttttgccaggaa

SEQ ID NO: 38160 - DNA, 25 bp, Saccharomyces pastorianus
gctcacgccacatcaactttattag

SEQ ID NO: 38161 - DNA, 25 bp, Saccharomyces pastorianus
gcgtggctcgctaaaggatcgtgct

SEQ ID NO: 38162 - DNA, 25 bp, Saccharomyces pastorianus
ggctaatcatagtaccattgttcaa

SEQ ID NO: 38163 - DNA, 25 bp, Saccharomyces pastorianus
gcacccaatcgctggtactgttaag

SEQ ID NO: 38164 - DNA, 25 bp, Saccharomyces pastorianus
gatgatgctttagccgaccagttgc

SEQ ID NO: 38165 - DNA, 25 bp, Saccharomyces pastorianus
tgtgtatgcaggtgccgtcggccac

SEQ ID NO: 38166 - DNA, 25 bp, Saccharomyces pastorianus
ggtggtattgtttatgactccgatg

SEQ ID NO: 38167 - DNA, 25 bp, Saccharomyces pastorianus
gtcggccactggtcatatgacggta

SEQ ID NO: 38168 - DNA, 25 bp, Saccharomyces pastorianus
aagtgagcggtactttgcgccccga

SEQ ID NO: 38169 - DNA, 25 bp, Saccharomyces pastorianus
gtactgttaagcgtggtgctaccac

SEQ ID NO: 38170 - DNA, 25 bp, Saccharomyces pastorianus
aaggatggcattgcctacctgcaag

SEQ ID NO: 38171 - DNA, 25 bp, Saccharomyces pastorianus
gacaactgtattgctctacggacca

SEQ ID NO: 38172 - DNA, 25 bp, Saccharomyces pastorianus
gctaatctcttagaaactgccggtt

SEQ ID NO: 38173 - DNA, 25 bp, Saccharomyces pastorianus
aagagttgcctctattgcggataaa

SEQ ID NO: 38174 - DNA, 25 bp, Saccharomyces pastorianus
gtccgacgatcgcagaagccattag

SEQ ID NO: 38175 - DNA, 25 bp, Saccharomyces pastorianus
tgtttgtaccaacacagtgcctgtt

SEQ ID NO: 38176 - DNA, 25 bp, Saccharomyces pastorianus
gcacccattactgcaaagctgattg

SEQ ID NO: 38177 - DNA, 25 bp, Saccharomyces pastorianus
accaagttgatatcagtccgacgat

SEQ ID NO: 38178 - DNA, 25 bp, Saccharomyces pastorianus
aaactgccggttgcgatcatcttat

SEQ ID NO: 38179 - DNA, 25 bp, Saccharomyces pastorianus
aagaatgccatactggtttcgccag

SEQ ID NO: 38180 - DNA, 25 bp, Saccharomyces pastorianus
acacggtatattttctggttcagca

SEQ ID NO: 38181 - DNA, 25 bp, Saccharomyces pastorianus
atcatcttatcactatggacctcca

SEQ ID NO: 38182 - DNA, 25 bp, Saccharomyces pastorianus
atgttgccggaaaatcgtgtttact

SEQ ID NO: 38183 - DNA, 25 bp, Saccharomyces pastorianus
atacgtgtattctgcaattgatgaa

SEQ ID NO: 38184 - DNA, 25 bp, Saccharomyces pastorianus
caccatggcctttgcagtaccaaaa

SEQ ID NO: 38185 - DNA, 25 bp, Saccharomyces pastorianus
aaagaaaaccttcggctcagctgtt

SEQ ID NO: 38186 - DNA, 25 bp, Saccharomyces pastorianus
atgaggttgcgtttaatgacttcca

SEQ ID NO: 38187 - DNA, 25 bp, Saccharomyces pastorianus
ggctcatttaactcttccccaagta

SEQ ID NO: 38188 - DNA, 25 bp, Saccharomyces pastorianus
tctgaaaaccccttcggctcattta

SEQ ID NO: 38189 - DNA, 25 bp, Saccharomyces pastorianus
acagcaattacttatacccgctatt

SEQ ID NO: 38190 - DNA, 25 bp, Saccharomyces pastorianus
gaactcaataacattgcctgccacc

SEQ ID NO: 38191 - DNA, 25 bp, Saccharomyces pastorianus
atattcacgactctggtttctgttc

SEQ ID NO: 38192 - DNA, 25 bp, Saccharomyces pastorianus
tacccgctatttctgaatcttccaa

SEQ ID NO: 38193 - DNA, 25 bp, Saccharomyces pastorianus
aatgacttccaattggacgccaaaa

SEQ ID NO: 38194 - DNA, 25 bp, Saccharomyces pastorianus
gatcggccatttgagggacggttta

SEQ ID NO: 38195 - DNA, 25 bp, Saccharomyces pastorianus
atggtcccttcaagccggtgaaaag

SEQ ID NO: 38196 - DNA, 25 bp, Saccharomyces pastorianus
gacgtggctgcatttgacttagatt

SEQ ID NO: 38197 - DNA, 25 bp, Saccharomyces pastorianus
cttccgttggccgatttatttgacg

SEQ ID NO: 38198 - DNA, 25 bp, Saccharomyces pastorianus
tctggccttgctattgtgacactca

SEQ ID NO: 38199 - DNA, 25 bp, Saccharomyces pastorianus
ggacattccacgtatactgagcgat

SEQ ID NO: 38200 - DNA, 25 bp, Saccharomyces pastorianus
gtgacactcatttacatggtccctt

SEQ ID NO: 38201 - DNA, 25 bp, Saccharomyces pastorianus
gatctttatggcactgacgatttaa

SEQ ID NO: 38202 - DNA, 25 bp, Saccharomyces pastorianus
aacatgggcccctgaaattgcgcag

SEQ ID NO: 38203 - DNA, 25 bp, Saccharomyces pastorianus
gacttagattataccgtctggcctt

SEQ ID NO: 38204 - DNA, 25 bp, Saccharomyces pastorianus
aagtacaatggctccttacttccgt

SEQ ID NO: 38205 - DNA, 25 bp, Saccharomyces pastorianus
actgctgccacctataaaaccggaa

SEQ ID NO: 38206 - DNA, 25 bp, Saccharomyces pastorianus
gcaagccacaccagtaatagcgggt

SEQ ID NO: 38207 - DNA, 25 bp, Saccharomyces pastorianus
ataccaataacaacactgctgccac

SEQ ID NO: 38208 - DNA, 25 bp, Saccharomyces pastorianus
gttaagggacgtgttcgacagaata

SEQ ID NO: 38209 - DNA, 25 bp, Saccharomyces pastorianus
tgcagcaaatcatccggccagtagc

SEQ ID NO: 38210 - DNA, 25 bp, Saccharomyces pastorianus
gagttcttcatagcgctgttggtga

SEQ ID NO: 38211 - DNA, 25 bp, Saccharomyces pastorianus
tggacgccggagaagctgcagcaaa

SEQ ID NO: 38212 - DNA, 25 bp, Saccharomyces pastorianus
ataggcaaggtgtcgcaagccacac

SEQ ID NO: 38213 - DNA, 25 bp, Saccharomyces pastorianus
acatgaggtgtcactggacgccgga

SEQ ID NO: 38214 - DNA, 25 bp, Saccharomyces pastorianus
gaataaccgccgacatattgaagaa

SEQ ID NO: 38215 - DNA, 25 bp, Saccharomyces pastorianus
cgggtaggtcgctagagttcttcat

SEQ ID NO: 38216 - DNA, 25 bp, Saccharomyces pastorianus
attaccgcgtttcacttatgacagt

SEQ ID NO: 38217 - DNA, 25 bp, Saccharomyces pastorianus
aatttcagcagacccaggcgttcga

SEQ ID NO: 38218 - DNA, 25 bp, Saccharomyces pastorianus
gcgtcgtgacagaagagatcccaat

SEQ ID NO: 38219 - DNA, 25 bp, Saccharomyces pastorianus
aaggctgctgcacatatctacggaa

SEQ ID NO: 38220 - DNA, 25 bp, Saccharomyces pastorianus
gtgttgttttgcttattaccgcgtt

SEQ ID NO: 38221 - DNA, 25 bp, Saccharomyces pastorianus
gatcccaatgacgttcatgcacgaa

SEQ ID NO: 38222 - DNA, 25 bp, Saccharomyces pastorianus
aagaagcctggatatcctcgccaag

SEQ ID NO: 38223 - DNA, 25 bp, Saccharomyces pastorianus
aaacgagaccccaagcggatatcag

SEQ ID NO: 38224 - DNA, 25 bp, Saccharomyces pastorianus
gaactccatctttctgggctgtttt

SEQ ID NO: 38225 - DNA, 25 bp, Saccharomyces pastorianus
atttcgaccactatccggttggcta

SEQ ID NO: 38226 - DNA, 25 bp, Saccharomyces pastorianus
aagttaggtcgtcgctagaccgcac

SEQ ID NO: 38227 - DNA, 25 bp, Saccharomyces pastorianus
taagggcccttgattacgatactat

SEQ ID NO: 38228 - DNA, 25 bp, Saccharomyces pastorianus
aattgcttccactcacgctaaaagt

SEQ ID NO: 38229 - DNA, 25 bp, Saccharomyces pastorianus
taaaggagcctgaatcccacttcga

SEQ ID NO: 38230 - DNA, 25 bp, Saccharomyces pastorianus
gactgcgcctattcctttggagaaa

SEQ ID NO: 38231 - DNA, 25 bp, Saccharomyces pastorianus
acttctagttgggttatgccttgta

SEQ ID NO: 38232 - DNA, 25 bp, Saccharomyces pastorianus
gaaacatgatttccctatggactgt

SEQ ID NO: 38233 - DNA, 25 bp, Saccharomyces pastorianus
gatggccataaaccacttctagttg

SEQ ID NO: 38234 - DNA, 25 bp, Saccharomyces pastorianus
aagatgcacacatacttccgaatcc

SEQ ID NO: 38235 - DNA, 25 bp, Saccharomyces pastorianus
ccacggtgctgggtactatgatgat

SEQ ID NO: 38236 - DNA, 25 bp, Saccharomyces pastorianus
gaagccaccgatttggatcttgttt

SEQ ID NO: 38237 - DNA, 25 bp, Saccharomyces pastorianus
gtacggtcattaattgcttccactc

SEQ ID NO: 38238 - DNA, 25 bp, Saccharomyces pastorianus
gagctttatcccaaactgtactgat

SEQ ID NO: 38239 - DNA, 25 bp, Saccharomyces pastorianus
gatgcaatgcacttgtcatacctgg

SEQ ID NO: 38240 - DNA, 25 bp, Saccharomyces pastorianus
acaacatccttgtcacatcatttca

SEQ ID NO: 38241 - DNA, 25 bp, Saccharomyces pastorianus
gcgcgggtttgatttttctttcaca

SEQ ID NO: 38242 - DNA, 25 bp, Saccharomyces pastorianus
ggtccaagtcctctgtaagctagaa

SEQ ID NO: 38243 - DNA, 25 bp, Saccharomyces pastorianus
gaaaccgatatacgttttcacgatt

SEQ ID NO: 38244 - DNA, 25 bp, Saccharomyces pastorianus
gtcatacctggtggagaatctacta

SEQ ID NO: 38245 - DNA, 25 bp, Saccharomyces pastorianus
aatgatctctacaacttcgtacatg

SEQ ID NO: 38246 - DNA, 25 bp, Saccharomyces pastorianus
tactacgatgtctcttattgctcag

SEQ ID NO: 38247 - DNA, 25 bp, Saccharomyces pastorianus
acgtatgacttctcgagctttatcc

SEQ ID NO: 38248 - DNA, 25 bp, Saccharomyces pastorianus
aactatctgtgattaccgtgaggga

SEQ ID NO: 38249 - DNA, 25 bp, Saccharomyces pastorianus
gagctttatcccaaactgtactgat

SEQ ID NO: 38250 - DNA, 25 bp, Saccharomyces pastorianus
gatgcaatgcacttgtcatacctgg

SEQ ID NO: 38251 - DNA, 25 bp, Saccharomyces pastorianus
acaacatccttgtcacatcatttca

SEQ ID NO: 38252 - DNA, 25 bp, Saccharomyces pastorianus
gcgcgggtttgatttttctttcaca

SEQ ID NO: 38253 - DNA, 25 bp, Saccharomyces pastorianus
ggtccaagtcctctgtaagctagaa

SEQ ID NO: 38254 - DNA, 25 bp, Saccharomyces pastorianus
gaaaccgatatacgttttcacgatt

SEQ ID NO: 38255 - DNA, 25 bp, Saccharomyces pastorianus
gtcatacctggtggagaatctacta

SEQ ID NO: 38256 - DNA, 25 bp, Saccharomyces pastorianus
aatgatctctacaacttcgtacatg

SEQ ID NO: 38257 - DNA, 25 bp, Saccharomyces pastorianus
tactacgatgtctcttattgctcag

SEQ ID NO: 38258 - DNA, 25 bp, Saccharomyces pastorianus
acgtatgacttctcgagctttatcc

SEQ ID NO: 38259 - DNA, 25 bp, Saccharomyces pastorianus
aactatctgtgattaccgtgaggga

SEQ ID NO: 38260 - DNA, 25 bp, Saccharomyces pastorianus
gtggaccggttccagctggattaaa

SEQ ID NO: 38261 - DNA, 25 bp, Saccharomyces pastorianus
cggaaacgtggctgttcttatactt

SEQ ID NO: 38262 - DNA, 25 bp, Saccharomyces pastorianus
gattgcgatcattctgctactgttg

SEQ ID NO: 38263 - DNA, 25 bp, Saccharomyces pastorianus
ggacagacccagagacgtattacga

SEQ ID NO: 38264 - DNA, 25 bp, Saccharomyces pastorianus
gaatctgttttacttgcgctcaatt

SEQ ID NO: 38265 - DNA, 25 bp, Saccharomyces pastorianus
ataacctgtttgctacgggtgtcct

SEQ ID NO: 38266 - DNA, 25 bp, Saccharomyces pastorianus
tttcctgcgggacctaaatcaacga

SEQ ID NO: 38267 - DNA, 25 bp, Saccharomyces pastorianus
agtggcggcagtttctcgaccaaga

SEQ ID NO: 38268 - DNA, 25 bp, Saccharomyces pastorianus
gccagtggaggcagacgtcgaacaa

SEQ ID NO: 38269 - DNA, 25 bp, Saccharomyces pastorianus
tagctgtcgcagagcctcaaggtat

SEQ ID NO: 38270 - DNA, 25 bp, Saccharomyces pastorianus
aaccaagaggagttatcgccgccac

SEQ ID NO: 38271 - DNA, 25 bp, Saccharomyces pastorianus
ccaccagcggtgtaagttttgattt

SEQ ID NO: 38272 - DNA, 25 bp, Saccharomyces pastorianus
gttaattcgacgacaccaattgtgt

SEQ ID NO: 38273 - DNA, 25 bp, Saccharomyces pastorianus
tttcaaggcagcgagttctatcaaa

SEQ ID NO: 38274 - DNA, 25 bp, Saccharomyces pastorianus
tattccgatccataggtaccgtgtt

SEQ ID NO: 38275 - DNA, 25 bp, Saccharomyces pastorianus
gtggccgtaaaagctccagtacttc

SEQ ID NO: 38276 - DNA, 25 bp, Saccharomyces pastorianus
agcttggtgcaatcgacattgttca

SEQ ID NO: 38277 - DNA, 25 bp, Saccharomyces pastorianus
aaatctgggttgtactgtcgttagc

SEQ ID NO: 38278 - DNA, 25 bp, Saccharomyces pastorianus
ttgtctgtgaacctattccgatcca

SEQ ID NO: 38279 - DNA, 25 bp, Saccharomyces pastorianus
gtaccgtgttgctaaagacctagaa

SEQ ID NO: 38280 - DNA, 25 bp, Saccharomyces pastorianus
attatctcccgctaacactacaata

SEQ ID NO: 38281 - DNA, 25 bp, Saccharomyces pastorianus
gacagccttaaaactcccaaagctt

SEQ ID NO: 38282 - DNA, 25 bp, Saccharomyces pastorianus
atgtataccctacacggtcatacgg

SEQ ID NO: 38283 - DNA, 25 bp, Saccharomyces pastorianus
ggaaacgatgtatctctgcgagtat

SEQ ID NO: 38284 - DNA, 25 bp, Saccharomyces pastorianus
cttggagtccatttctacttctcta

SEQ ID NO: 38285 - DNA, 25 bp, Saccharomyces pastorianus
tctcctatcatcacaccaatttaag

SEQ ID NO: 38286 - DNA, 25 bp, Saccharomyces pastorianus
atctctgcgagtatggattccacca

SEQ ID NO: 38287 - DNA, 25 bp, Saccharomyces pastorianus
gttagcaatccagcaaactcctctt

SEQ ID NO: 38288 - DNA, 25 bp, Saccharomyces pastorianus
aacggagaatgctcgtacgcgacaa

SEQ ID NO: 38289 - DNA, 25 bp, Saccharomyces pastorianus
taagcgcgattacaacgttctacgt

SEQ ID NO: 38290 - DNA, 25 bp, Saccharomyces pastorianus
gggaaactggttcattcaaacatct

SEQ ID NO: 38291 - DNA, 25 bp, Saccharomyces pastorianus
tcttcatcatccttggagtccattt

SEQ ID NO: 38292 - DNA, 25 bp, Saccharomyces pastorianus
catgcgccaagattctgggtgccat

SEQ ID NO: 38293 - DNA, 25 bp, Saccharomyces pastorianus
gctttaacactattctgcgctttat

SEQ ID NO: 38294 - DNA, 25 bp, Saccharomyces pastorianus
ctgggcctgtcaacgtggaagcaaa

SEQ ID NO: 38295 - DNA, 25 bp, Saccharomyces pastorianus
ggctgaatacccgaatttggctaat

SEQ ID NO: 38296 - DNA, 25 bp, Saccharomyces pastorianus
atttattgaagaacgctgggcctgt

SEQ ID NO: 38297 - DNA, 25 bp, Saccharomyces pastorianus
aatgcagcaaggtctcgcgaagaat

SEQ ID NO: 38298 - DNA, 25 bp, Saccharomyces pastorianus
gcgctttatggtcatattctgtcta

SEQ ID NO: 38299 - DNA, 25 bp, Saccharomyces pastorianus
gaagaccaaaggctaccttcctaag

SEQ ID NO: 38300 - DNA, 25 bp, Saccharomyces pastorianus
ggcatacgtttattttgctttaaca

SEQ ID NO: 38301 - DNA, 25 bp, Saccharomyces pastorianus
gtgggcaacatttggatgcacccct

SEQ ID NO: 38302 - DNA, 25 bp, Saccharomyces pastorianus
ggaaattgaattgccacctggtgtg

SEQ ID NO: 38303 - DNA, 25 bp, Saccharomyces pastorianus
tccagtcttggttgcgatcgtttta

SEQ ID NO: 38304 - DNA, 25 bp, Saccharomyces pastorianus
gacatcatcgaattttggctttgaa

SEQ ID NO: 38305 - DNA, 25 bp, Saccharomyces pastorianus
aaaccggcagtttctcatcttcata

SEQ ID NO: 38306 - DNA, 25 bp, Saccharomyces pastorianus
aattttagacgagcttggacgaggc

SEQ ID NO: 38307 - DNA, 25 bp, Saccharomyces pastorianus
ctgagcatttgcttcgaacgggagc

SEQ ID NO: 38308 - DNA, 25 bp, Saccharomyces pastorianus
gttgccgatggattttgtgtgtctt

SEQ ID NO: 38309 - DNA, 25 bp, Saccharomyces pastorianus
gtgtgtctttagctgttactgagca

SEQ ID NO: 38310 - DNA, 25 bp, Saccharomyces pastorianus
atcatctgacccagaagtctgtcca

SEQ ID NO: 38311 - DNA, 25 bp, Saccharomyces pastorianus
tcctttctactcacttccaagatat

SEQ ID NO: 38312 - DNA, 25 bp, Saccharomyces pastorianus
gggagcaacggtattcctttctact

SEQ ID NO: 38313 - DNA, 25 bp, Saccharomyces pastorianus
tggacgaggctcaagtgttgccgat

SEQ ID NO: 38314 - DNA, 25 bp, Saccharomyces pastorianus
ggaaatggcttacttcttagacgac

SEQ ID NO: 38315 - DNA, 25 bp, Saccharomyces pastorianus
ctctcgctagactttacggtgctaa

SEQ ID NO: 38316 - DNA, 25 bp, Saccharomyces pastorianus
agaagaaatcttccgttgcacgggt

SEQ ID NO: 38317 - DNA, 25 bp, Saccharomyces pastorianus
gaaaagaacaatctctcgctagact

SEQ ID NO: 38318 - DNA, 25 bp, Saccharomyces pastorianus
ttagctaatgttcctcagcttaccg

SEQ ID NO: 38319 - DNA, 25 bp, Saccharomyces pastorianus
gttgaaaagcgaagctggccccagt

SEQ ID NO: 38320 - DNA, 25 bp, Saccharomyces pastorianus
gtgtttcaagactcacaagccagaa

SEQ ID NO: 38321 - DNA, 25 bp, Saccharomyces pastorianus
gctggccccagtgaagataaaccta

SEQ ID NO: 38322 - DNA, 25 bp, Saccharomyces pastorianus
gaaaaatctgctcagcgcaagccta

SEQ ID NO: 38323 - DNA, 25 bp, Saccharomyces pastorianus
ttgccgatgatgacagtttgacttt

SEQ ID NO: 38324 - DNA, 25 bp, Saccharomyces pastorianus
taaacagagctatcgttccaggtgt

SEQ ID NO: 38325 - DNA, 25 bp, Saccharomyces pastorianus
agaggttgcccctgaagtgtttcaa

SEQ ID NO: 38326 - DNA, 25 bp, Saccharomyces pastorianus
aagacgatggacctgctacgaccaa

SEQ ID NO: 38327 - DNA, 25 bp, Saccharomyces pastorianus
aattcagcgatatcagagacccttc

SEQ ID NO: 38328 - DNA, 25 bp, Saccharomyces pastorianus
taagttgccatctacagacgggaac

SEQ ID NO: 38329 - DNA, 25 bp, Saccharomyces pastorianus
gaattttcgccctttaaggatggca

SEQ ID NO: 38330 - DNA, 25 bp, Saccharomyces pastorianus
gagacccttccgctaacaacatttt

SEQ ID NO: 38331 - DNA, 25 bp, Saccharomyces pastorianus
gatccatacggttattaagttgcca

SEQ ID NO: 38332 - DNA, 25 bp, Saccharomyces pastorianus
gctgaactactgtttctaggcgaaa

SEQ ID NO: 38333 - DNA, 25 bp, Saccharomyces pastorianus
tcgaccatagtagtgaacatcctgt

SEQ ID NO: 38334 - DNA, 25 bp, Saccharomyces pastorianus
ttccacaaataaacatctcccaact

SEQ ID NO: 38335 - DNA, 25 bp, Saccharomyces pastorianus
cgggaacacgtctgatggcgatgaa

SEQ ID NO: 38336 - DNA, 25 bp, Saccharomyces pastorianus
gttttgaccttgaccttaccagaat

SEQ ID NO: 38337 - DNA, 25 bp, Saccharomyces pastorianus
gacgttgccgatatgcttacaccag

SEQ ID NO: 38338 - DNA, 25 bp, Saccharomyces pastorianus
ccaagattcttaaccgtccaatacg

SEQ ID NO: 38339 - DNA, 25 bp, Saccharomyces pastorianus
gagacgcaagtagctcttagcgaaa

SEQ ID NO: 38340 - DNA, 25 bp, Saccharomyces pastorianus
atccaagattttgcgtaaggttgtt

SEQ ID NO: 38341 - DNA, 25 bp, Saccharomyces pastorianus
gggtgagaacccatcgtgtgtttat

SEQ ID NO: 38342 - DNA, 25 bp, Saccharomyces pastorianus
tgacccatcatcgtccagcgaaaat

SEQ ID NO: 38343 - DNA, 25 bp, Saccharomyces pastorianus
aattgaatcactagctggtggtggt

SEQ ID NO: 38344 - DNA, 25 bp, Saccharomyces pastorianus
ctggcgccaattccacttatagtgt

SEQ ID NO: 38345 - DNA, 25 bp, Saccharomyces pastorianus
atgcttacaccagaatatgcgcaag

SEQ ID NO: 38346 - DNA, 25 bp, Saccharomyces pastorianus
ttcccatttcaattggacgttgccg

SEQ ID NO: 38347 - DNA, 25 bp, Saccharomyces pastorianus
gacgataaagttaccactgttgaaa

SEQ ID NO: 38348 - DNA, 25 bp, Saccharomyces pastorianus
aacgcataatttattgcctggcctg

SEQ ID NO: 38349 - DNA, 25 bp, Saccharomyces pastorianus
gttccacgccttcattacattcaat

SEQ ID NO: 38350 - DNA, 25 bp, Saccharomyces pastorianus
agaggccaaccgctgcagaactgtt

SEQ ID NO: 38351 - DNA, 25 bp, Saccharomyces pastorianus
gaaagcgattctgatttcgacgaga

SEQ ID NO: 38352 - DNA, 25 bp, Saccharomyces pastorianus
catggatttccttgacgagtgtaca

SEQ ID NO: 38353 - DNA, 25 bp, Saccharomyces pastorianus
gaaagctcttgatttagatcccaca

SEQ ID NO: 38354 - DNA, 25 bp, Saccharomyces pastorianus
gtggctattctgcattcaaagctga

SEQ ID NO: 38355 - DNA, 25 bp, Saccharomyces pastorianus
aagacccatggattgtttgtacaga

SEQ ID NO: 38356 - DNA, 25 bp, Saccharomyces pastorianus
gaagcttttgcacaactagtcaata

SEQ ID NO: 38357 - DNA, 25 bp, Saccharomyces pastorianus
agtgacatttcatcggccttattgg

SEQ ID NO: 38358 - DNA, 25 bp, Saccharomyces pastorianus
gctcgccaaaaattccgtaactctg

SEQ ID NO: 38359 - DNA, 25 bp, Saccharomyces pastorianus
ggactaccgctacctagcgctcgga

SEQ ID NO: 38360 - DNA, 25 bp, Saccharomyces pastorianus
gaagatcgtgttctttgacggtgaa

SEQ ID NO: 38361 - DNA, 25 bp, Saccharomyces pastorianus
tgggccccgtagtgacgggctctac

SEQ ID NO: 38362 - DNA, 25 bp, Saccharomyces pastorianus
gttcccgagcacatggcacaccgtg

SEQ ID NO: 38363 - DNA, 25 bp, Saccharomyces pastorianus
aggacgacctgctgttccggcgcag

SEQ ID NO: 38364 - DNA, 25 bp, Saccharomyces pastorianus
aggagtaccagctgctcaaccggat

SEQ ID NO: 38365 - DNA, 25 bp, Saccharomyces pastorianus
gcctgctgctgctgatggacctgct

SEQ ID NO: 38366 - DNA, 25 bp, Saccharomyces pastorianus
tacgagcgcgccacagagcaggcga

SEQ ID NO: 38367 - DNA, 25 bp, Saccharomyces pastorianus
aaccggatcgaggacgacctgctgt

SEQ ID NO: 38368 - DNA, 25 bp, Saccharomyces pastorianus
tacgctgggcgtgaagatcgtgttc

SEQ ID NO: 38369 - DNA, 25 bp, Saccharomyces pastorianus
tcctgacgcatgtggcgcgctacga

SEQ ID NO: 38370 - DNA, 25 bp, Saccharomyces pastorianus
aattgtacgtccaaattcgatcccg

SEQ ID NO: 38371 - DNA, 25 bp, Saccharomyces pastorianus
agaagtctgcacttggagaaccagt

SEQ ID NO: 38372 - DNA, 25 bp, Saccharomyces pastorianus
gagaaccagtacgatcctgagtata

SEQ ID NO: 38373 - DNA, 25 bp, Saccharomyces pastorianus
gcattagattcctttctttctgaaa

SEQ ID NO: 38374 - DNA, 25 bp, Saccharomyces pastorianus
gaacacagcggatgctttattcaag

SEQ ID NO: 38375 - DNA, 25 bp, Saccharomyces pastorianus
gtattttgacagatcgggtcggttt

SEQ ID NO: 38376 - DNA, 25 bp, Saccharomyces pastorianus
ttcaaaaccgatttccagagcataa

SEQ ID NO: 38377 - DNA, 25 bp, Saccharomyces pastorianus
aattgcatctgtccaatgttgagga

SEQ ID NO: 38378 - DNA, 25 bp, Saccharomyces pastorianus
gaacaactggtattcctggattcaa

SEQ ID NO: 38379 - DNA, 25 bp, Saccharomyces pastorianus
gaggaatcgctctttcatgcattag

SEQ ID NO: 38380 - DNA, 25 bp, Saccharomyces pastorianus
ggagagaaaccacttgatcgaacat

SEQ ID NO: 38381 - DNA, 25 bp, Saccharomyces pastorianus
atctgtgttgactccgtcgcagaaa

SEQ ID NO: 38382 - DNA, 25 bp, Saccharomyces pastorianus
gaagctacccaagaggctggcacta

SEQ ID NO: 38383 - DNA, 25 bp, Saccharomyces pastorianus
tcggagttatattttcgctagcaga

SEQ ID NO: 38384 - DNA, 25 bp, Saccharomyces pastorianus
aatccaggatttcgccaattctaat

SEQ ID NO: 38385 - DNA, 25 bp, Saccharomyces pastorianus
aacttgatgattcggccattagacg

SEQ ID NO: 38386 - DNA, 25 bp, Saccharomyces pastorianus
gagaggccgcgaatctttaacgata

SEQ ID NO: 38387 - DNA, 25 bp, Saccharomyces pastorianus
gggaccatatcatcgaattgacact

SEQ ID NO: 38388 - DNA, 25 bp, Saccharomyces pastorianus
ggcactatacggtactctcggatta

SEQ ID NO: 38389 - DNA, 25 bp, Saccharomyces pastorianus
gctagcagagatcttcgttcgctat

SEQ ID NO: 38390 - DNA, 25 bp, Saccharomyces pastorianus
gccattgcacaatcctccaaattat

SEQ ID NO: 38391 - DNA, 25 bp, Saccharomyces pastorianus
ccactatattggatacgcccgaatt

SEQ ID NO: 38392 - DNA, 25 bp, Saccharomyces pastorianus
ttggccttacaattctctccaattg

SEQ ID NO: 38393 - DNA, 25 bp, Saccharomyces pastorianus
aatatgttctgtacagctgtcccac

SEQ ID NO: 38394 - DNA, 25 bp, Saccharomyces pastorianus
accactggcgaattttaccaaatat

SEQ ID NO: 38395 - DNA, 25 bp, Saccharomyces pastorianus
ggctcggtgcgttattgtcaaacaa

SEQ ID NO: 38396 - DNA, 25 bp, Saccharomyces pastorianus
gggaacgtcatctcaaaggaaacca

SEQ ID NO: 38397 - DNA, 25 bp, Saccharomyces pastorianus
gtataagcatcatctggaaagcggc

SEQ ID NO: 38398 - DNA, 25 bp, Saccharomyces pastorianus
tatgcttacttctttggccttacaa

SEQ ID NO: 38399 - DNA, 25 bp, Saccharomyces pastorianus
aaagattggttttggctcggtgcgt

SEQ ID NO: 38400 - DNA, 25 bp, Saccharomyces pastorianus
aaggtaggcacctcttcagtatgct

SEQ ID NO: 38401 - DNA, 25 bp, Saccharomyces pastorianus
atgcgtcaaatatcggtcagctggg

SEQ ID NO: 38402 - DNA, 25 bp, Saccharomyces pastorianus
caacccttttacattttatcctgtg

SEQ ID NO: 38403 - DNA, 25 bp, Saccharomyces pastorianus
gaaaggcttcaccagagccgacata

SEQ ID NO: 38404 - DNA, 25 bp, Saccharomyces pastorianus
agctacgttacattttgactcccaa

SEQ ID NO: 38405 - DNA, 25 bp, Saccharomyces pastorianus
gataccattgatctcggacaagcta

SEQ ID NO: 38406 - DNA, 25 bp, Saccharomyces pastorianus
aattgcatttcctctttcgaatacc

SEQ ID NO: 38407 - DNA, 25 bp, Saccharomyces pastorianus
gcatccactggctcgaattcaaaaa

SEQ ID NO: 38408 - DNA, 25 bp, Saccharomyces pastorianus
attgataagctggttctgctcacgc

SEQ ID NO: 38409 - DNA, 25 bp, Saccharomyces pastorianus
tcgtctcttcctcgcaaaattgcat

SEQ ID NO: 38410 - DNA, 25 bp, Saccharomyces pastorianus
ttgctccaagacgactccatgatac

SEQ ID NO: 38411 - DNA, 25 bp, Saccharomyces pastorianus
gaataccaaaaccatgctcttgcct

SEQ ID NO: 38412 - DNA, 25 bp, Saccharomyces pastorianus
tcacgccttgtttgccatgtaccaa

SEQ ID NO: 38413 - DNA, 25 bp, Saccharomyces pastorianus
gactcccaacgatattcaactgcat

SEQ ID NO: 38414 - DNA, 25 bp, Saccharomyces pastorianus
gttcactccaaggtaggtagccagt

SEQ ID NO: 38415 - DNA, 25 bp, Saccharomyces pastorianus
gaactgtattgttgacaccgcatct

SEQ ID NO: 38416 - DNA, 25 bp, Saccharomyces pastorianus
gctcttgcaagcttgacaactctaa

SEQ ID NO: 38417 - DNA, 25 bp, Saccharomyces pastorianus
aacaagctgcttgggacttcctcaa

SEQ ID NO: 38418 - DNA, 25 bp, Saccharomyces pastorianus
tctgctctcaggatatactcgacac

SEQ ID NO: 38419 - DNA, 25 bp, Saccharomyces pastorianus
aagattgccgttggcgaacctggca

SEQ ID NO: 38420 - DNA, 25 bp, Saccharomyces pastorianus
attgttgccgagttagttcactcca

SEQ ID NO: 38421 - DNA, 25 bp, Saccharomyces pastorianus
agctcacctagctgcatttgaaaaa

SEQ ID NO: 38422 - DNA, 25 bp, Saccharomyces pastorianus
tttggccctcaaatgttcgccgatt

SEQ ID NO: 38423 - DNA, 25 bp, Saccharomyces pastorianus
aataccagcacagttcttaccgaaa

SEQ ID NO: 38424 - DNA, 25 bp, Saccharomyces pastorianus
tagctaatgctgttgccgcctattg

SEQ ID NO: 38425 - DNA, 25 bp, Saccharomyces pastorianus
aatggtaggcgacaccgagctcttg

SEQ ID NO: 38426 - DNA, 25 bp, Saccharomyces pastorianus
catgctgtcgcatttggccaagcaa

SEQ ID NO: 38427 - DNA, 25 bp, Saccharomyces pastorianus
aatgtcggtcatcgaggtcaaccct

SEQ ID NO: 38428 - DNA, 25 bp, Saccharomyces pastorianus
tttacgacggatcatggagcgcgat

SEQ ID NO: 38429 - DNA, 25 bp, Saccharomyces pastorianus
atcgctggactttggcatctttaac

SEQ ID NO: 38430 - DNA, 25 bp, Saccharomyces pastorianus
gatgaactcaatccagacatgctgt

SEQ ID NO: 38431 - DNA, 25 bp, Saccharomyces pastorianus
gttcgatgaggccatggaccacatg

SEQ ID NO: 38432 - DNA, 25 bp, Saccharomyces pastorianus
gtctccgacggtatattcacaatgg

SEQ ID NO: 38433 - DNA, 25 bp, Saccharomyces pastorianus
gcgaaacctgaacgaagccacttac

SEQ ID NO: 38434 - DNA, 25 bp, Saccharomyces pastorianus
gttcgtgtcgcttatcgtggcagag

SEQ ID NO: 38435 - DNA, 25 bp, Saccharomyces pastorianus
ggccaagcaaatgactccgcaagtt

SEQ ID NO: 38436 - DNA, 25 bp, Saccharomyces pastorianus
gccttttagtttgcttgtccgatag

SEQ ID NO: 38437 - DNA, 25 bp, Saccharomyces pastorianus
gcaagttagaagtcagccttttagt

SEQ ID NO: 38438 - DNA, 25 bp, Saccharomyces pastorianus
aatacctagcgatacagaattgccg

SEQ ID NO: 38439 - DNA, 25 bp, Saccharomyces pastorianus
ctttggcaaactttagcggcacgat

SEQ ID NO: 38440 - DNA, 25 bp, Saccharomyces pastorianus
agagcaaaccctctttgtcatcagt

SEQ ID NO: 38441 - DNA, 25 bp, Saccharomyces pastorianus
gtcatcagtggactttcttaagagg

SEQ ID NO: 38442 - DNA, 25 bp, Saccharomyces pastorianus
gtggcgtatctaaacgacttcttag

SEQ ID NO: 38443 - DNA, 25 bp, Saccharomyces pastorianus
agaattgccgcatatgtcagttgaa

SEQ ID NO: 38444 - DNA, 25 bp, Saccharomyces pastorianus
agaagacttcgttcattcacatgag

SEQ ID NO: 38445 - DNA, 25 bp, Saccharomyces pastorianus
ggtagtgacgttttgcaattgaagc

SEQ ID NO: 38446 - DNA, 25 bp, Saccharomyces pastorianus
caacggtttaccttgtagcgacata

SEQ ID NO: 38447 - DNA, 25 bp, Saccharomyces pastorianus
aaacttctaacatttgcggctttga

SEQ ID NO: 38448 - DNA, 25 bp, Saccharomyces pastorianus
tttggtgcatctaggccatttgcta

SEQ ID NO: 38449 - DNA, 25 bp, Saccharomyces pastorianus
agtggtattttcctcttatgtgcaa

SEQ ID NO: 38450 - DNA, 25 bp, Saccharomyces pastorianus
gagagattatgtccaccaccggagg

SEQ ID NO: 38451 - DNA, 25 bp, Saccharomyces pastorianus
caagccatgaaggacgcacacgtag

SEQ ID NO: 38452 - DNA, 25 bp, Saccharomyces pastorianus
atgtcagtgcaattaggctacctaa

SEQ ID NO: 38453 - DNA, 25 bp, Saccharomyces pastorianus
gggcctacgaaatgtcagtgcaatt

SEQ ID NO: 38454 - DNA, 25 bp, Saccharomyces pastorianus
tcctaactgggctaatttcctttat

SEQ ID NO: 38455 - DNA, 25 bp, Saccharomyces pastorianus
agctttccaaagcatcccaagacac

SEQ ID NO: 38456 - DNA, 25 bp, Saccharomyces pastorianus
gaatacatgcaaaccgatcctaact

SEQ ID NO: 38457 - DNA, 25 bp, Saccharomyces pastorianus
gacttcaaggaccaaaccgtctcag

SEQ ID NO: 38458 - DNA, 25 bp, Saccharomyces pastorianus
aacctgatacactccacgaaggtgt

SEQ ID NO: 38459 - DNA, 25 bp, Saccharomyces pastorianus
gagcacagctgcaaagcatcgttga

SEQ ID NO: 38460 - DNA, 25 bp, Saccharomyces pastorianus
aagtcaagaattcctagcccgtcaa

SEQ ID NO: 38461 - DNA, 25 bp, Saccharomyces pastorianus
gacaaccttttcacgcacagttaat

SEQ ID NO: 38462 - DNA, 25 bp, Saccharomyces pastorianus
tcagaggaaaatctcgcccttggcc

SEQ ID NO: 38463 - DNA, 25 bp, Saccharomyces pastorianus
gaggcgtccttctcaattaggaaga

SEQ ID NO: 38464 - DNA, 25 bp, Saccharomyces pastorianus
tgaatcaccactaaatcccaaacct

SEQ ID NO: 38465 - DNA, 25 bp, Saccharomyces pastorianus
ataacgactccgattccagaacttt

SEQ ID NO: 38466 - DNA, 25 bp, Saccharomyces pastorianus
caactattccactcaagacaacctt

SEQ ID NO: 38467 - DNA, 25 bp, Saccharomyces pastorianus
gctactctcactaaaacttcgtcgg

SEQ ID NO: 38468 - DNA, 25 bp, Saccharomyces pastorianus
gagactaggagcttgaggcgtcctt

SEQ ID NO: 38469 - DNA, 25 bp, Saccharomyces pastorianus
gatgcagacgatctttggaccaaat

SEQ ID NO: 38470 - DNA, 25 bp, Saccharomyces pastorianus
gtgacccactatcccagatggaagt

SEQ ID NO: 38471 - DNA, 25 bp, Saccharomyces pastorianus
actggtacatccacttacgttcatg

SEQ ID NO: 38472 - DNA, 25 bp, Saccharomyces pastorianus
aagtgcaagcgctaaagctgccaaa

SEQ ID NO: 38473 - DNA, 25 bp, Saccharomyces pastorianus
atcagttttccgctatatcacgctg

SEQ ID NO: 38474 - DNA, 25 bp, Saccharomyces pastorianus
acatggcaggaagccttttgcccaa

SEQ ID NO: 38475 - DNA, 25 bp, Saccharomyces pastorianus
taaaggcttaccttgggtctcgtat

SEQ ID NO: 38476 - DNA, 25 bp, Saccharomyces pastorianus
gggtctcgtataaatgccattatca

SEQ ID NO: 38477 - DNA, 25 bp, Saccharomyces pastorianus
atatcacgctggtcccatttaatta

SEQ ID NO: 38478 - DNA, 25 bp, Saccharomyces pastorianus
atagatatgttcgtgtcttcgatat

SEQ ID NO: 38479 - DNA, 25 bp, Saccharomyces pastorianus
tacagtccggaagttttgacgagtt

SEQ ID NO: 38480 - DNA, 25 bp, Saccharomyces pastorianus
tgaagtacgctcttgcagtgacacc

SEQ ID NO: 38481 - DNA, 25 bp, Saccharomyces pastorianus
actatttgctgtttggatgtcactt

SEQ ID NO: 38482 - DNA, 25 bp, Saccharomyces pastorianus
tttggtatcccaattgccgccatat

SEQ ID NO: 38483 - DNA, 25 bp, Saccharomyces pastorianus
gctgcaacacgctcatttattcaga

SEQ ID NO: 38484 - DNA, 25 bp, Saccharomyces pastorianus
ttgaaatacgtcttcaccacacact

SEQ ID NO: 38485 - DNA, 25 bp, Saccharomyces pastorianus
tcaacctattcaacgtgctgcaaca

SEQ ID NO: 38486 - DNA, 25 bp, Saccharomyces pastorianus
acatatttcacaactgacgaggaga

SEQ ID NO: 38487 - DNA, 25 bp, Saccharomyces pastorianus
ggtccaatgaccttcgctttaatta

SEQ ID NO: 38488 - DNA, 25 bp, Saccharomyces pastorianus
gggccagtatccaattttggtatcc

SEQ ID NO: 38489 - DNA, 25 bp, Saccharomyces pastorianus
attgccgccatatatgacttgaaga

SEQ ID NO: 38490 - DNA, 25 bp, Saccharomyces pastorianus
atccaacgcgaatctcaggtccaat

SEQ ID NO: 38491 - DNA, 25 bp, Saccharomyces pastorianus
gtttccaggtacatcttcgattcac

SEQ ID NO: 38492 - DNA, 25 bp, Saccharomyces pastorianus
gactctacagacttttcggaatctt

SEQ ID NO: 38493 - DNA, 25 bp, Saccharomyces pastorianus
ttttcggcggttcattctctaacac

SEQ ID NO: 38494 - DNA, 25 bp, Saccharomyces pastorianus
agtatcaactctcaaacgtatgcga

SEQ ID NO: 38495 - DNA, 25 bp, Saccharomyces pastorianus
gagatggacaaccactctattgtag

SEQ ID NO: 38496 - DNA, 25 bp, Saccharomyces pastorianus
agatgctcaagatcctggcccgata

SEQ ID NO: 38497 - DNA, 25 bp, Saccharomyces pastorianus
acatcgactacttaaactctgcttt

SEQ ID NO: 38498 - DNA, 25 bp, Saccharomyces pastorianus
gaccaagacttctgctatcataaat

SEQ ID NO: 38499 - DNA, 25 bp, Saccharomyces pastorianus
gcccgatattcgacgtttccaggta

SEQ ID NO: 38500 - DNA, 25 bp, Saccharomyces pastorianus
tcggaatctttatccctacagacca

SEQ ID NO: 38501 - DNA, 25 bp, Saccharomyces pastorianus
aagaatcgatttccccattgaattt

SEQ ID NO: 38502 - DNA, 25 bp, Saccharomyces pastorianus
agagaccatctctaccttgaaagat

SEQ ID NO: 38503 - DNA, 25 bp, Saccharomyces pastorianus
gtaaacctcaaactgcggatgctga

SEQ ID NO: 38504 - DNA, 25 bp, Saccharomyces pastorianus
gtttcgcagacacgttttcacttaa

SEQ ID NO: 38505 - DNA, 25 bp, Saccharomyces pastorianus
aacacgcatctaagagtttcgcaga

SEQ ID NO: 38506 - DNA, 25 bp, Saccharomyces pastorianus
gaacgataatttgcctcactttaat

SEQ ID NO: 38507 - DNA, 25 bp, Saccharomyces pastorianus
aacgcaagccttcaacttctaaaca

SEQ ID NO: 38508 - DNA, 25 bp, Saccharomyces pastorianus
atatagctctgatgcgccaacacaa

SEQ ID NO: 38509 - DNA, 25 bp, Saccharomyces pastorianus
tcgtgtggttttttcaagatcagac

SEQ ID NO: 38510 - DNA, 25 bp, Saccharomyces pastorianus
gattgagtactcttcaaatgccgaa

SEQ ID NO: 38511 - DNA, 25 bp, Saccharomyces pastorianus
aattggtgtcttgtcatacgttatg

SEQ ID NO: 38512 - DNA, 25 bp, Saccharomyces pastorianus
acatgtggctgtcggaattgatcaa

SEQ ID NO: 38513 - DNA, 25 bp, Saccharomyces pastorianus
ggtctgacaccacaagagatccaat

SEQ ID NO: 38514 - DNA, 25 bp, Saccharomyces pastorianus
gctgcctcatatctggccaatgcta

SEQ ID NO: 38515 - DNA, 25 bp, Saccharomyces pastorianus
aaaagtttgaagcagctgcctcata

SEQ ID NO: 38516 - DNA, 25 bp, Saccharomyces pastorianus
gcagtctccttctggtatgaacaat

SEQ ID NO: 38517 - DNA, 25 bp, Saccharomyces pastorianus
aaacatccatgggttctcctagaac

SEQ ID NO: 38518 - DNA, 25 bp, Saccharomyces pastorianus
gccaatgctaccaagctaatgcaag

SEQ ID NO: 38519 - DNA, 25 bp, Saccharomyces pastorianus
gagtcaagatagctacttacccaat

SEQ ID NO: 38520 - DNA, 25 bp, Saccharomyces pastorianus
gggcaaggcgtctccactggtatca

SEQ ID NO: 38521 - DNA, 25 bp, Saccharomyces pastorianus
accagaagcttcaggatacaggtct

SEQ ID NO: 38522 - DNA, 25 bp, Saccharomyces pastorianus
tccactggtatcaacggctctaata

SEQ ID NO: 38523 - DNA, 25 bp, Saccharomyces pastorianus
gcgtaaacggtatgcagtctccttc

SEQ ID NO: 38524 - DNA, 25 bp, Saccharomyces pastorianus
tgatcttgaatatcaccgccacaac

SEQ ID NO: 38525 - DNA, 25 bp, Saccharomyces pastorianus
gaaccagatgggtgctcaatcaagt

SEQ ID NO: 38526 - DNA, 25 bp, Saccharomyces pastorianus
aagacggagcttctgtgtcaacaag

SEQ ID NO: 38527 - DNA, 25 bp, Saccharomyces pastorianus
aacgatatcctactggtcaacccga

SEQ ID NO: 38528 - DNA, 25 bp, Saccharomyces pastorianus
agccaggccacccaatattaagaga

SEQ ID NO: 38529 - DNA, 25 bp, Saccharomyces pastorianus
ggcctccctgtcaaatttgttttag

SEQ ID NO: 38530 - DNA, 25 bp, Saccharomyces pastorianus
ttaccaattacaagtttctccccag

SEQ ID NO: 38531 - DNA, 25 bp, Saccharomyces pastorianus
aatgcgcttcaacacaacaacgata

SEQ ID NO: 38532 - DNA, 25 bp, Saccharomyces pastorianus
gtttctccccagatgtgaaccagat

SEQ ID NO: 38533 - DNA, 25 bp, Saccharomyces pastorianus
taatgccgtgggaattcttctcctt

SEQ ID NO: 38534 - DNA, 25 bp, Saccharomyces pastorianus
atgagtgtgcaagatccaggcctcc

SEQ ID NO: 38535 - DNA, 25 bp, Saccharomyces pastorianus
ccgttggcgaactgcggattttgaa

SEQ ID NO: 38536 - DNA, 25 bp, Saccharomyces pastorianus
atcatttgaggatgagggaacattt

SEQ ID NO: 38537 - DNA, 25 bp, Saccharomyces pastorianus
aataaggcataaagcccatcccacc

SEQ ID NO: 38538 - DNA, 25 bp, Saccharomyces pastorianus
tgaggaacttgcatcatttgagaat

SEQ ID NO: 38539 - DNA, 25 bp, Saccharomyces pastorianus
gaggaacttgcatcatttgagaata

SEQ ID NO: 38540 - DNA, 25 bp, Saccharomyces pastorianus
ctgcggattttgaaggctttcattt

SEQ ID NO: 38541 - DNA, 25 bp, Saccharomyces pastorianus
tttgaaggctttcatttggaaaagt

SEQ ID NO: 38542 - DNA, 25 bp, Saccharomyces pastorianus
aactgcggattttgaaggctttcat

SEQ ID NO: 38543 - DNA, 25 bp, Saccharomyces pastorianus
acatttgagagggagggccgttggc

SEQ ID NO: 38544 - DNA, 25 bp, Saccharomyces pastorianus
ggcgaactgcggattttgaaggctt

SEQ ID NO: 38545 - DNA, 25 bp, Saccharomyces pastorianus
ggattttgaaggctttcatttggaa

SEQ ID NO: 38546 - DNA, 25 bp, Saccharomyces pastorianus
gtgtcaatgacactcaagctatcag

SEQ ID NO: 38547 - DNA, 25 bp, Saccharomyces pastorianus
atgcgtttattgctggctgtggtac

SEQ ID NO: 38548 - DNA, 25 bp, Saccharomyces pastorianus
gcagatccacaaggttcaggctttt

SEQ ID NO: 38549 - DNA, 25 bp, Saccharomyces pastorianus
tgcgacagcggatcaagacatttaa

SEQ ID NO: 38550 - DNA, 25 bp, Saccharomyces pastorianus
gtaaaggcagtttttgctgaccaat

SEQ ID NO: 38551 - DNA, 25 bp, Saccharomyces pastorianus
gagtacactatcaaaccacgggtcc

SEQ ID NO: 38552 - DNA, 25 bp, Saccharomyces pastorianus
aaatcgcgaaaagactccctcctgg

SEQ ID NO: 38553 - DNA, 25 bp, Saccharomyces pastorianus
gctgtggtaccggtggaacgataac

SEQ ID NO: 38554 - DNA, 25 bp, Saccharomyces pastorianus
cagtagctgctgttcaaatcgcgaa

SEQ ID NO: 38555 - DNA, 25 bp, Saccharomyces pastorianus
ttactcaaaatttccacatgggcga

SEQ ID NO: 38556 - DNA, 25 bp, Saccharomyces pastorianus
aaaattccgtgccatgtcgttcttg

SEQ ID NO: 38557 - DNA, 25 bp, Saccharomyces pastorianus
gaccaaactacctactgtgtgggtt

SEQ ID NO: 38558 - DNA, 25 bp, Saccharomyces pastorianus
atccacagtaatttctatcaccacc

SEQ ID NO: 38559 - DNA, 25 bp, Saccharomyces pastorianus
aagccgcatgtccattctcaaaaat

SEQ ID NO: 38560 - DNA, 25 bp, Saccharomyces pastorianus
gtattgccccactatctgcggtata

SEQ ID NO: 38561 - DNA, 25 bp, Saccharomyces pastorianus
gtatacctgtaccttgtatcactgt

SEQ ID NO: 38562 - DNA, 25 bp, Saccharomyces pastorianus
gttacctcaaaatcacccacaagtt

SEQ ID NO: 38563 - DNA, 25 bp, Saccharomyces pastorianus
gcctttggcctcagctattatttat

SEQ ID NO: 38564 - DNA, 25 bp, Saccharomyces pastorianus
tatcaccacccctataaacgttttg

SEQ ID NO: 38565 - DNA, 25 bp, Saccharomyces pastorianus
ttgaaaggcgttctttgcaccctag

SEQ ID NO: 38566 - DNA, 25 bp, Saccharomyces pastorianus
gcacatgtgcattgttaccggttta

SEQ ID NO: 38567 - DNA, 25 bp, Saccharomyces pastorianus
gcaccctaggttgttggagcactgt

SEQ ID NO: 38568 - DNA, 25 bp, Saccharomyces pastorianus
gaatttgagtccctcttcgaataac

SEQ ID NO: 38569 - DNA, 25 bp, Saccharomyces pastorianus
tacaatggcaaacggcgaggacgat

SEQ ID NO: 38570 - DNA, 25 bp, Saccharomyces pastorianus
ggaaacgatctagtacgagtacctt

SEQ ID NO: 38571 - DNA, 25 bp, Saccharomyces pastorianus
tcccggtgcatttgtagttcctata

SEQ ID NO: 38572 - DNA, 25 bp, Saccharomyces pastorianus
attgatgataccaatgcgcctggtg

SEQ ID NO: 38573 - DNA, 25 bp, Saccharomyces pastorianus
aaagcctcggtactactgtcattga

SEQ ID NO: 38574 - DNA, 25 bp, Saccharomyces pastorianus
tatggaagacgtcccaacaacctca

SEQ ID NO: 38575 - DNA, 25 bp, Saccharomyces pastorianus
atattgttatcgaagctcccggtgc

SEQ ID NO: 38576 - DNA, 25 bp, Saccharomyces pastorianus
atagcccatattttcaatcctcctt

SEQ ID NO: 38577 - DNA, 25 bp, Saccharomyces pastorianus
aacacgccagcagaacaagaccaaa

SEQ ID NO: 38578 - DNA, 25 bp, Saccharomyces pastorianus
aacaacctcagcttttggcttaaat

SEQ ID NO: 38579 - DNA, 25 bp, Saccharomyces pastorianus
tcttactgtgagtcatgtcttttac

SEQ ID NO: 38580 - DNA, 25 bp, Saccharomyces pastorianus
gtttattggttcgtatttgcgtgcg

SEQ ID NO: 38581 - DNA, 25 bp, Saccharomyces pastorianus
cccaatactcttctatacggtacca

SEQ ID NO: 38582 - DNA, 25 bp, Saccharomyces pastorianus
ggcgggttcgataaaatgatcactt

SEQ ID NO: 38583 - DNA, 25 bp, Saccharomyces pastorianus
tacagttccctgaagaatcaacgag

SEQ ID NO: 38584 - DNA, 25 bp, Saccharomyces pastorianus
tgcttcattgaagatgtcccattta

SEQ ID NO: 38585 - DNA, 25 bp, Saccharomyces pastorianus
gacttattagtacctgattatccaa

SEQ ID NO: 38586 - DNA, 25 bp, Saccharomyces pastorianus
gcttcattttgacagtggattccag

SEQ ID NO: 38587 - DNA, 25 bp, Saccharomyces pastorianus
gattatccaacagactcttactgtg

SEQ ID NO: 38588 - DNA, 25 bp, Saccharomyces pastorianus
caacgaggtcgatgagatgcttcat

SEQ ID NO: 38589 - DNA, 25 bp, Saccharomyces pastorianus
aaagagctttttccgaagagacaat

SEQ ID NO: 38590 - DNA, 25 bp, Saccharomyces pastorianus
aagtttaggctatcccatgttagac

SEQ ID NO: 38591 - DNA, 25 bp, Saccharomyces pastorianus
gtttgcaggcaaccaggctaagcta

SEQ ID NO: 38592 - DNA, 25 bp, Saccharomyces pastorianus
aactgttcttgatacttttggcgag

SEQ ID NO: 38593 - DNA, 25 bp, Saccharomyces pastorianus
tttccgaggccaatcaacagactga

SEQ ID NO: 38594 - DNA, 25 bp, Saccharomyces pastorianus
gatacaaatgcacttctaggccaga

SEQ ID NO: 38595 - DNA, 25 bp, Saccharomyces pastorianus
gttaggccatgacgcagagcacatc

SEQ ID NO: 38596 - DNA, 25 bp, Saccharomyces pastorianus
gaatacctgatctcgttaggccatg

SEQ ID NO: 38597 - DNA, 25 bp, Saccharomyces pastorianus
cacgtccgacgctagaaggtttgca

SEQ ID NO: 38598 - DNA, 25 bp, Saccharomyces pastorianus
agagcacatcgaccagtcacagtgg

SEQ ID NO: 38599 - DNA, 25 bp, Saccharomyces pastorianus
gaagttatcagaggctcccagcatt

SEQ ID NO: 38600 - DNA, 25 bp, Saccharomyces pastorianus
agattttccaattgccatccataaa

SEQ ID NO: 38601 - DNA, 25 bp, Saccharomyces pastorianus
agacatctggaagctggagggcctc

SEQ ID NO: 38602 - DNA, 25 bp, Saccharomyces pastorianus
gaggttttcgaagcattccgatgta

SEQ ID NO: 38603 - DNA, 25 bp, Saccharomyces pastorianus
gttcatgaactcgaagcacctggag

SEQ ID NO: 38604 - DNA, 25 bp, Saccharomyces pastorianus
gcccggttacacagccttgttgttg

SEQ ID NO: 38605 - DNA, 25 bp, Saccharomyces pastorianus
ttccgatgtatacggctcctacaga

SEQ ID NO: 38606 - DNA, 25 bp, Saccharomyces pastorianus
aaatggaagctgtccgctctgaacc

SEQ ID NO: 38607 - DNA, 25 bp, Saccharomyces pastorianus
gaaaacacggcaacggcaggtacca

SEQ ID NO: 38608 - DNA, 25 bp, Saccharomyces pastorianus
tcacggtgaccgcatcgataacatt

SEQ ID NO: 38609 - DNA, 25 bp, Saccharomyces pastorianus
agagggtccggcttcgcaagaatcg

SEQ ID NO: 38610 - DNA, 25 bp, Saccharomyces pastorianus
gggtaacctcgctctacagaggcat

SEQ ID NO: 38611 - DNA, 25 bp, Saccharomyces pastorianus
acaaccagatgcagtccatgaccat

SEQ ID NO: 38612 - DNA, 25 bp, Saccharomyces pastorianus
acttatttgctaggtggttgcccca

SEQ ID NO: 38613 - DNA, 25 bp, Saccharomyces pastorianus
agagacgtttgccatctacgctact

SEQ ID NO: 38614 - DNA, 25 bp, Saccharomyces pastorianus
aaagccttcctctcagttagtcatg

SEQ ID NO: 38615 - DNA, 25 bp, Saccharomyces pastorianus
aatcgctcctagtttcttgctgggt

SEQ ID NO: 38616 - DNA, 25 bp, Saccharomyces pastorianus
gctacttgaatggtgcagctcctgt

SEQ ID NO: 38617 - DNA, 25 bp, Saccharomyces pastorianus
attacccatttctgtatgcatcaag

SEQ ID NO: 38618 - DNA, 25 bp, Saccharomyces pastorianus
atctgtctcacatgctatctcaaaa

SEQ ID NO: 38619 - DNA, 25 bp, Saccharomyces pastorianus
aatgctgcaaacctccaatttattt

SEQ ID NO: 38620 - DNA, 25 bp, Saccharomyces pastorianus
caaatggcgatctgtctaggactga

SEQ ID NO: 38621 - DNA, 25 bp, Saccharomyces pastorianus
tgaactcttattgcgtttccattat

SEQ ID NO: 38622 - DNA, 25 bp, Saccharomyces pastorianus
ggatttaccgacaacgttgacgatt

SEQ ID NO: 38623 - DNA, 25 bp, Saccharomyces pastorianus
agatcgtttgccttgggacagccaa

SEQ ID NO: 38624 - DNA, 25 bp, Saccharomyces pastorianus
gtatcatatattcttgcgccgatcc

SEQ ID NO: 38625 - DNA, 25 bp, Saccharomyces pastorianus
gtaagcgtactagtcgttcttccag

SEQ ID NO: 38626 - DNA, 25 bp, Saccharomyces pastorianus
gaatttgttcttctacccattggca

SEQ ID NO: 38627 - DNA, 25 bp, Saccharomyces pastorianus
atctgcgttaggtctttctgcaagg

SEQ ID NO: 38628 - DNA, 25 bp, Saccharomyces pastorianus
gtgggtacatacaaccagcttttca

SEQ ID NO: 38629 - DNA, 25 bp, Saccharomyces pastorianus
ttggcacacggttggctcaatggta

SEQ ID NO: 38630 - DNA, 25 bp, Saccharomyces pastorianus
gatccagtccatgactttgacgcta

SEQ ID NO: 38631 - DNA, 25 bp, Saccharomyces pastorianus
taagaggtcttgacgatccaaccgt

SEQ ID NO: 38632 - DNA, 25 bp, Saccharomyces pastorianus
gggaattttgtcaagcctaacgtgc

SEQ ID NO: 38633 - DNA, 25 bp, Saccharomyces pastorianus
gatccaaccgtcatcaaacctaaat

SEQ ID NO: 38634 - DNA, 25 bp, Saccharomyces pastorianus
caagacccttttgaagtctaacagt

SEQ ID NO: 38635 - DNA, 25 bp, Saccharomyces pastorianus
ggaagacaagccgaagattacctaa

SEQ ID NO: 38636 - DNA, 25 bp, Saccharomyces pastorianus
aacgtggtgagtttgttatcaggca

SEQ ID NO: 38637 - DNA, 25 bp, Saccharomyces pastorianus
cctggttggttttatttgatgttca

SEQ ID NO: 38638 - DNA, 25 bp, Saccharomyces pastorianus
tttgttatcaggcaatcaagccggg

SEQ ID NO: 38639 - DNA, 25 bp, Saccharomyces pastorianus
actctgtaatggtttcaagaccctt

SEQ ID NO: 38640 - DNA, 25 bp, Saccharomyces pastorianus
gacgaccatctagttatcacttgga

SEQ ID NO: 38641 - DNA, 25 bp, Saccharomyces pastorianus
tagccctaggtaaggttcttgttgt

SEQ ID NO: 38642 - DNA, 25 bp, Saccharomyces pastorianus
gacaaagacctattccaacacattg

SEQ ID NO: 38643 - DNA, 25 bp, Saccharomyces pastorianus
ggagaatcctttagccctaggtaag

SEQ ID NO: 38644 - DNA, 25 bp, Saccharomyces pastorianus
actatccaagtgttattcaactctg

SEQ ID NO: 38645 - DNA, 25 bp, Saccharomyces pastorianus
gagagtagtcgctggaacatctgat

SEQ ID NO: 38646 - DNA, 25 bp, Saccharomyces pastorianus
agccaagatgatttctcgttaccga

SEQ ID NO: 38647 - DNA, 25 bp, Saccharomyces pastorianus
ctcgttaccgattctccaaagtttg

SEQ ID NO: 38648 - DNA, 25 bp, Saccharomyces pastorianus
gtcgacggtatcagaggcaactcca

SEQ ID NO: 38649 - DNA, 25 bp, Saccharomyces pastorianus
gatggtcgtactaagttctcagtgt

SEQ ID NO: 38650 - DNA, 25 bp, Saccharomyces pastorianus
tggtgcattcatacaacatcgcttt

SEQ ID NO: 38651 - DNA, 25 bp, Saccharomyces pastorianus
gttccatgttagtagtggccacctc

SEQ ID NO: 38652 - DNA, 25 bp, Saccharomyces pastorianus
gaacggtgactccagactattgaat

SEQ ID NO: 38653 - DNA, 25 bp, Saccharomyces pastorianus
acgccgaatttagcacatacgcatt

SEQ ID NO: 38654 - DNA, 25 bp, Saccharomyces pastorianus
tatagcatgttacgcgatttcagat

SEQ ID NO: 38655 - DNA, 25 bp, Saccharomyces pastorianus
aagtcttgagaaatttcgccacgga

SEQ ID NO: 38656 - DNA, 25 bp, Saccharomyces pastorianus
gcagattgcttatattgccgcatca

SEQ ID NO: 38657 - DNA, 25 bp, Saccharomyces pastorianus
ataggatacactgccgttgtcacgg

SEQ ID NO: 38658 - DNA, 25 bp, Saccharomyces pastorianus
ggatgtataactctctacggctcgc

SEQ ID NO: 38659 - DNA, 25 bp, Saccharomyces pastorianus
agtactgacactcgctcaactgttg

SEQ ID NO: 38660 - DNA, 25 bp, Saccharomyces pastorianus
gacgccatggatattcttgctgagc

SEQ ID NO: 38661 - DNA, 25 bp, Saccharomyces pastorianus
gggatcgtctgtaattttgccacta

SEQ ID NO: 38662 - DNA, 25 bp, Saccharomyces pastorianus
aatcatttgctttgtgctcgggtac

SEQ ID NO: 38663 - DNA, 25 bp, Saccharomyces pastorianus
gtagcagccacaccaagttcaggat

SEQ ID NO: 38664 - DNA, 25 bp, Saccharomyces pastorianus
tcaatgctcttttcgcggcagattg

SEQ ID NO: 38665 - DNA, 25 bp, Saccharomyces pastorianus
ttgctgagcacggagtcgcaggcat

SEQ ID NO: 38666 - DNA, 25 bp, Saccharomyces pastorianus
tacggctcgctaatccaaggcattg

SEQ ID NO: 38667 - DNA, 25 bp, Saccharomyces pastorianus
gggcgtattctatggtcaggaactt

SEQ ID NO: 38668 - DNA, 25 bp, Saccharomyces pastorianus
taagttcaggacgactacgccgttt

SEQ ID NO: 38669 - DNA, 25 bp, Saccharomyces pastorianus
ccatttccacaaacgaggtcgagat

SEQ ID NO: 38670 - DNA, 25 bp, Saccharomyces pastorianus
ggttaacagtcttcacttttcaaca

SEQ ID NO: 38671 - DNA, 25 bp, Saccharomyces pastorianus
ggaccagaaatttgcacacttgatg

SEQ ID NO: 38672 - DNA, 25 bp, Saccharomyces pastorianus
atggtacatcacctgtctgaaatat

SEQ ID NO: 38673 - DNA, 25 bp, Saccharomyces pastorianus
attctgatgcaatggctatcgttct

SEQ ID NO: 38674 - DNA, 25 bp, Saccharomyces pastorianus
aatcgtttcaattgggcgtattcta

SEQ ID NO: 38675 - DNA, 25 bp, Saccharomyces pastorianus
aggaacttgcacaaggccctggaag

SEQ ID NO: 38676 - DNA, 25 bp, Saccharomyces pastorianus
ggctatcgttctatcttccaaaaat

SEQ ID NO: 38677 - DNA, 25 bp, Saccharomyces pastorianus
tgtaacattctcttgactgatcata

SEQ ID NO: 38678 - DNA, 25 bp, Saccharomyces pastorianus
atttgatttgtacaaggcgcctgtt

SEQ ID NO: 38679 - DNA, 25 bp, Saccharomyces pastorianus
gcgttagttgcaatcataagaccca

SEQ ID NO: 38680 - DNA, 25 bp, Saccharomyces pastorianus
atgggcaaacgcaagggctagtcaa

SEQ ID NO: 38681 - DNA, 25 bp, Saccharomyces pastorianus
ggtgttcaagtttcattttacctga

SEQ ID NO: 38682 - DNA, 25 bp, Saccharomyces pastorianus
atgtacgaagtatgctccgaattta

SEQ ID NO: 38683 - DNA, 25 bp, Saccharomyces pastorianus
ataccggaattgtccttcctggaga

SEQ ID NO: 38684 - DNA, 25 bp, Saccharomyces pastorianus
ctggctaatggcgtaatcatctatt

SEQ ID NO: 38685 - DNA, 25 bp, Saccharomyces pastorianus
gcagaacgttgcacaactggctaat

SEQ ID NO: 38686 - DNA, 25 bp, Saccharomyces pastorianus
ggcgcctgttctgcgaaacagtcaa

SEQ ID NO: 38687 - DNA, 25 bp, Saccharomyces pastorianus
aagacccaacgggacagacatggaa

SEQ ID NO: 38688 - DNA, 25 bp, Saccharomyces pastorianus
gctccgaatttatagacgttacgat

SEQ ID NO: 38689 - DNA, 25 bp, Saccharomyces pastorianus
agcactgttcaaaccgctaacggtg

SEQ ID NO: 38690 - DNA, 25 bp, Saccharomyces pastorianus
gctaacggtgctaattttgctcaaa

SEQ ID NO: 38691 - DNA, 25 bp, Saccharomyces pastorianus
tcaagttccgttagttcttccaaca

SEQ ID NO: 38692 - DNA, 25 bp, Saccharomyces pastorianus
taacggcggtagtgtttccagctct

SEQ ID NO: 38693 - DNA, 25 bp, Saccharomyces pastorianus
gcaatcctcaacttcaaccaaaaaa

SEQ ID NO: 38694 - DNA, 25 bp, Saccharomyces pastorianus
gttgaatcatcatccgctacatcat

SEQ ID NO: 38695 - DNA, 25 bp, Saccharomyces pastorianus
tcaaccagttcagctacccaaagat

SEQ ID NO: 38696 - DNA, 25 bp, Saccharomyces pastorianus
aaaaatcagttactccctcgactgc

SEQ ID NO: 38697 - DNA, 25 bp, Saccharomyces pastorianus
aacttccagtagatccacagtcgct

SEQ ID NO: 38698 - DNA, 25 bp, Saccharomyces pastorianus
atcttcagccaaatcatcatccgtt

SEQ ID NO: 38699 - DNA, 25 bp, Saccharomyces pastorianus
aatcatccgcagttgaaacctctac

SEQ ID NO: 38700 - DNA, 25 bp, Saccharomyces pastorianus
gacttccagtcgatattttcatctt

SEQ ID NO: 38701 - DNA, 25 bp, Saccharomyces pastorianus
tgggctgcctggtactcatgatatg

SEQ ID NO: 38702 - DNA, 25 bp, Saccharomyces pastorianus
gtcaacgccaagctgttcatgtaca

SEQ ID NO: 38703 - DNA, 25 bp, Saccharomyces pastorianus
aaactactacaagggcgtgggctgc

SEQ ID NO: 38704 - DNA, 25 bp, Saccharomyces pastorianus
ggtttctaggtttcaatcctgttct

SEQ ID NO: 38705 - DNA, 25 bp, Saccharomyces pastorianus
gtagacaggtatatgccttcctata

SEQ ID NO: 38706 - DNA, 25 bp, Saccharomyces pastorianus
gaaagtctaggctctttagctacat

SEQ ID NO: 38707 - DNA, 25 bp, Saccharomyces pastorianus
gtacagtgatttgttgtggcgcaac

SEQ ID NO: 38708 - DNA, 25 bp, Saccharomyces pastorianus
atcgttgccctgctggtcaagaaat

SEQ ID NO: 38709 - DNA, 25 bp, Saccharomyces pastorianus
acaacactgatcttctcactggaga

SEQ ID NO: 38710 - DNA, 25 bp, Saccharomyces pastorianus
gacgaacaggtacacgcctttgtag

SEQ ID NO: 38711 - DNA, 25 bp, Saccharomyces pastorianus
ttgcctcgcatgaatggtttcttta

SEQ ID NO: 38712 - DNA, 25 bp, Saccharomyces pastorianus
aacgctgtacgctgctactttttat

SEQ ID NO: 38713 - DNA, 25 bp, Saccharomyces pastorianus
aatagcttttgctgcagtcttccca

SEQ ID NO: 38714 - DNA, 25 bp, Saccharomyces pastorianus
gatgtctagtgcatcaaccgctagt

SEQ ID NO: 38715 - DNA, 25 bp, Saccharomyces pastorianus
aagcttaaacatcaccctattggta

SEQ ID NO: 38716 - DNA, 25 bp, Saccharomyces pastorianus
tgcccgctaaattcaacactacgat

SEQ ID NO: 38717 - DNA, 25 bp, Saccharomyces pastorianus
atggccaccttattgttcgcagaaa

SEQ ID NO: 38718 - DNA, 25 bp, Saccharomyces pastorianus
ttacgatggcgtaattgcctcgcat

SEQ ID NO: 38719 - DNA, 25 bp, Saccharomyces pastorianus
gacgcattacctatgtttttactcg

SEQ ID NO: 38720 - DNA, 25 bp, Saccharomyces pastorianus
gctagttctggttctcatatcgtta

SEQ ID NO: 38721 - DNA, 25 bp, Saccharomyces pastorianus
tacaagcggctggtggtgccatgat

SEQ ID NO: 38722 - DNA, 25 bp, Saccharomyces pastorianus
gacaggtttatccagccgtttgaat

SEQ ID NO: 38723 - DNA, 25 bp, Saccharomyces pastorianus
ccagaaggctattgacttgtcacga

SEQ ID NO: 38724 - DNA, 25 bp, Saccharomyces pastorianus
acttcccagtcgcatgacaggttta

SEQ ID NO: 38725 - DNA, 25 bp, Saccharomyces pastorianus
tagtactgtcgcctatagcaattca

SEQ ID NO: 38726 - DNA, 25 bp, Saccharomyces pastorianus
aatgcaccgatgatttgcagcaaca

SEQ ID NO: 38727 - DNA, 25 bp, Saccharomyces pastorianus
gacttgtcacgatcagagcttgaaa

SEQ ID NO: 38728 - DNA, 25 bp, Saccharomyces pastorianus
tggacaacaggaacgacatagtact

SEQ ID NO: 38729 - DNA, 25 bp, Saccharomyces pastorianus
ctgctttacaagctgattttctggc

SEQ ID NO: 38730 - DNA, 25 bp, Saccharomyces pastorianus
aacgctgcaacaccttcgaacgaaa

SEQ ID NO: 38731 - DNA, 25 bp, Saccharomyces pastorianus
tcaatgttattgacccagaaggcta

SEQ ID NO: 38732 - DNA, 25 bp, Saccharomyces pastorianus
ggaatgccaaacttcccagtcgcat

SEQ ID NO: 38733 - DNA, 25 bp, Saccharomyces pastorianus
ggaggagatccagccaactttttgg

SEQ ID NO: 38734 - DNA, 25 bp, Saccharomyces pastorianus
aacggtgccggtttggctatggcaa

SEQ ID NO: 38735 - DNA, 25 bp, Saccharomyces pastorianus
gttagatgcgattacgttgccttgg

SEQ ID NO: 38736 - DNA, 25 bp, Saccharomyces pastorianus
acatcggatgtctagtcaacggtgc

SEQ ID NO: 38737 - DNA, 25 bp, Saccharomyces pastorianus
gaacgtcgacgcgattttcgtcaat

SEQ ID NO: 38738 - DNA, 25 bp, Saccharomyces pastorianus
gattgagcatgacccaaaccacaag

SEQ ID NO: 38739 - DNA, 25 bp, Saccharomyces pastorianus
atttgatgaactggaccctgccgct

SEQ ID NO: 38740 - DNA, 25 bp, Saccharomyces pastorianus
gtgcacagacgccaaattcgggttc

SEQ ID NO: 38741 - DNA, 25 bp, Saccharomyces pastorianus
gttccaattgttgctcgtttacaag

SEQ ID NO: 38742 - DNA, 25 bp, Saccharomyces pastorianus
gggttcgatgataacgcctcgttca

SEQ ID NO: 38743 - DNA, 25 bp, Saccharomyces pastorianus
ggtttcgaactgatcttgtctaaca

SEQ ID NO: 38744 - DNA, 25 bp, Saccharomyces pastorianus
aagggtgccgcagaagtctacgaaa

SEQ ID NO: 38745 - DNA, 25 bp, Saccharomyces pastorianus
gacgatactaaagctatggttgcat

SEQ ID NO: 38746 - DNA, 25 bp, Saccharomyces pastorianus
aacttccacggctctagtgacgaag

SEQ ID NO: 38747 - DNA, 25 bp, Saccharomyces pastorianus
tagcaagaaggccttttttcaactc

SEQ ID NO: 38748 - DNA, 25 bp, Saccharomyces pastorianus
atcagggattacaacgaaacgacat

SEQ ID NO: 38749 - DNA, 25 bp, Saccharomyces pastorianus
aagccaaacttcaatcaactttcag

SEQ ID NO: 38750 - DNA, 25 bp, Saccharomyces pastorianus
gacggaagacgacctatctgccaaa

SEQ ID NO: 38751 - DNA, 25 bp, Saccharomyces pastorianus
gtaaagagtactcccaacttccacg

SEQ ID NO: 38752 - DNA, 25 bp, Saccharomyces pastorianus
agggaaagttcacactgatccagaa

SEQ ID NO: 38753 - DNA, 25 bp, Saccharomyces pastorianus
aatacagctacggtcttagactggt

SEQ ID NO: 38754 - DNA, 25 bp, Saccharomyces pastorianus
caactccctgttgttcaaattggat

SEQ ID NO: 38755 - DNA, 25 bp, Saccharomyces pastorianus
atgccatttgcaccattttgatacg

SEQ ID NO: 38756 - DNA, 25 bp, Saccharomyces pastorianus
cgtattgaacaaccctcgattgagc

SEQ ID NO: 38757 - DNA, 25 bp, Saccharomyces pastorianus
tgagttatggtcttcctattccgga

SEQ ID NO: 38758 - DNA, 25 bp, Saccharomyces pastorianus
tgatgcaatggccaccttactacaa

SEQ ID NO: 38759 - DNA, 25 bp, Saccharomyces pastorianus
gttggcaccctcaaagagtgaccag

SEQ ID NO: 38760 - DNA, 25 bp, Saccharomyces pastorianus
ggcacgtgaccgtaacgattcatgt

SEQ ID NO: 38761 - DNA, 25 bp, Saccharomyces pastorianus
tctgtttgccactgttcgtgtggaa

SEQ ID NO: 38762 - DNA, 25 bp, Saccharomyces pastorianus
tatcgtaaatacaccaccgcctgat

SEQ ID NO: 38763 - DNA, 25 bp, Saccharomyces pastorianus
gagatatcgtcattccgggcgtcat

SEQ ID NO: 38764 - DNA, 25 bp, Saccharomyces pastorianus
gaccagttcaactcttatccggtga

SEQ ID NO: 38765 - DNA, 25 bp, Saccharomyces pastorianus
catcattgccagtgctatcgtaaat

SEQ ID NO: 38766 - DNA, 25 bp, Saccharomyces pastorianus
ggattcatggaaacactaacccaaa

SEQ ID NO: 38767 - DNA, 25 bp, Saccharomyces pastorianus
tgttttgataaatgacgcgctagga

SEQ ID NO: 38768 - DNA, 25 bp, Saccharomyces pastorianus
ggacgacttggttataagagactga

SEQ ID NO: 38769 - DNA, 25 bp, Saccharomyces pastorianus
aagagtttgctgactttggaggaaa

SEQ ID NO: 38770 - DNA, 25 bp, Saccharomyces pastorianus
gatgatcctgtaagtgtattacctg

SEQ ID NO: 38771 - DNA, 25 bp, Saccharomyces pastorianus
gttatttccgtactgtattgaccat

SEQ ID NO: 38772 - DNA, 25 bp, Saccharomyces pastorianus
gtattacctggtctacaactgaaaa

SEQ ID NO: 38773 - DNA, 25 bp, Saccharomyces pastorianus
aacgtttgccaaagattgccagtat

SEQ ID NO: 38774 - DNA, 25 bp, Saccharomyces pastorianus
ggtgtttttaatcagttaacctcag

SEQ ID NO: 38775 - DNA, 25 bp, Saccharomyces pastorianus
gcaagttcagtgagcagggattcat

SEQ ID NO: 38776 - DNA, 25 bp, Saccharomyces pastorianus
acattgtgatttggtcattcctgaa

SEQ ID NO: 38777 - DNA, 25 bp, Saccharomyces pastorianus
gttccagatgattcttccaacagag

SEQ ID NO: 38778 - DNA, 25 bp, Saccharomyces pastorianus
gtaactccgccaaggaagccgacta

SEQ ID NO: 38779 - DNA, 25 bp, Saccharomyces pastorianus
aaggccactgccattgacgaacaag

SEQ ID NO: 38780 - DNA, 25 bp, Saccharomyces pastorianus
atcaaggccaatggtgccggtgcaa

SEQ ID NO: 38781 - DNA, 25 bp, Saccharomyces pastorianus
atcctcgtatcaagctgttcaaaga

SEQ ID NO: 38782 - DNA, 25 bp, Saccharomyces pastorianus
tagattcgattcctggagaaccttt

SEQ ID NO: 38783 - DNA, 25 bp, Saccharomyces pastorianus
agaatccgccaaggccatcattgaa

SEQ ID NO: 38784 - DNA, 25 bp, Saccharomyces pastorianus
aagccaaagctagcgcttctgctaa

SEQ ID NO: 38785 - DNA, 25 bp, Saccharomyces pastorianus
ataagagagctgtccgtaactccgc

SEQ ID NO: 38786 - DNA, 25 bp, Saccharomyces pastorianus
aagaccgctgacaatgctagattag

SEQ ID NO: 38787 - DNA, 25 bp, Saccharomyces pastorianus
agagttgatctctgttgccgacaag

SEQ ID NO: 38788 - DNA, 25 bp, Saccharomyces pastorianus
aaacgcctcatataattgtccgatg

SEQ ID NO: 38789 - DNA, 25 bp, Saccharomyces pastorianus
gggttccctgatttcttgacaaggc

SEQ ID NO: 38790 - DNA, 25 bp, Saccharomyces pastorianus
ggagcaaattcgtccaactattaag

SEQ ID NO: 38791 - DNA, 25 bp, Saccharomyces pastorianus
ggaggctgtgttcaccaaactggta

SEQ ID NO: 38792 - DNA, 25 bp, Saccharomyces pastorianus
atcagcgcgattattcgttagccaa

SEQ ID NO: 38793 - DNA, 25 bp, Saccharomyces pastorianus
aagccctgcttgattccattttttc

SEQ ID NO: 38794 - DNA, 25 bp, Saccharomyces pastorianus
gtttacattacacagatcttggcac

SEQ ID NO: 38795 - DNA, 25 bp, Saccharomyces pastorianus
ggattgctccaatttgatctcgaac

SEQ ID NO: 38796 - DNA, 25 bp, Saccharomyces pastorianus
agggcattatatcatcgccatttaa

SEQ ID NO: 38797 - DNA, 25 bp, Saccharomyces pastorianus
ctcgaactgttctatattcaccgat

SEQ ID NO: 38798 - DNA, 25 bp, Saccharomyces pastorianus
attcaccgatgctgatccttatggg

SEQ ID NO: 38799 - DNA, 25 bp, Saccharomyces pastorianus
acaccagctacacctgggtaaagct

SEQ ID NO: 38800 - DNA, 25 bp, Saccharomyces pastorianus
gatcctcacaggactaagtgtctag

SEQ ID NO: 38801 - DNA, 25 bp, Saccharomyces pastorianus
aaggactacgagaccacctgggcat

SEQ ID NO: 38802 - DNA, 25 bp, Saccharomyces pastorianus
tatagacgcccgaatggccaggaga

SEQ ID NO: 38803 - DNA, 25 bp, Saccharomyces pastorianus
gacccgcgtgtccatgagatctcat

SEQ ID NO: 38804 - DNA, 25 bp, Saccharomyces pastorianus
gtacgcatgacgcagatccgctgga

SEQ ID NO: 38805 - DNA, 25 bp, Saccharomyces pastorianus
aaaccttgacccactgggaagcaca

SEQ ID NO: 38806 - DNA, 25 bp, Saccharomyces pastorianus
gggaagcacagtgggatcctcacag

SEQ ID NO: 38807 - DNA, 25 bp, Saccharomyces pastorianus
tagggttgcatccagtgcgctgaca

SEQ ID NO: 38808 - DNA, 25 bp, Saccharomyces pastorianus
aaagcttgagcttcgtacgcatgac

SEQ ID NO: 38809 - DNA, 25 bp, Saccharomyces pastorianus
tgcgctgacaggaggcaagctactc

SEQ ID NO: 38810 - DNA, 25 bp, Saccharomyces pastorianus
gattttgttaaacgtatcacctcaa

SEQ ID NO: 38811 - DNA, 25 bp, Saccharomyces pastorianus
aggaccattggaacctggacgaggt

SEQ ID NO: 38812 - DNA, 25 bp, Saccharomyces pastorianus
gcatctctgatgaacaactagtgtc

SEQ ID NO: 38813 - DNA, 25 bp, Saccharomyces pastorianus
agttttttcacatgtggcccacaag

SEQ ID NO: 38814 - DNA, 25 bp, Saccharomyces pastorianus
tcgaaaggcttggtcaaacgtgcgg

SEQ ID NO: 38815 - DNA, 25 bp, Saccharomyces pastorianus
tggagccatcattaaacgaatcttt

SEQ ID NO: 38816 - DNA, 25 bp, Saccharomyces pastorianus
aactagtgtctgcaataccacgaat

SEQ ID NO: 38817 - DNA, 25 bp, Saccharomyces pastorianus
gaggcagcaggcgttatccacagtg

SEQ ID NO: 38818 - DNA, 25 bp, Saccharomyces pastorianus
caaactggttcttttcagtgcagaa

SEQ ID NO: 38819 - DNA, 25 bp, Saccharomyces pastorianus
atccacagtgatttgcgtgatacgt

SEQ ID NO: 38820 - DNA, 25 bp, Saccharomyces pastorianus
ttttcgcctggtgacaaactggttc

SEQ ID NO: 38821 - DNA, 25 bp, Saccharomyces pastorianus
aggtcttccacgcaatcttacgtat

SEQ ID NO: 38822 - DNA, 25 bp, Saccharomyces pastorianus
cgggcactttgactaactctacaga

SEQ ID NO: 38823 - DNA, 25 bp, Saccharomyces pastorianus
aaacccatggctattatgtctccac

SEQ ID NO: 38824 - DNA, 25 bp, Saccharomyces pastorianus
gaaacaggtcaagcccgacttgcta

SEQ ID NO: 38825 - DNA, 25 bp, Saccharomyces pastorianus
gaacttgttatctgctggtgtccac

SEQ ID NO: 38826 - DNA, 25 bp, Saccharomyces pastorianus
gttgcaatcatcgatacggactccg

SEQ ID NO: 38827 - DNA, 25 bp, Saccharomyces pastorianus
gaatctggcgggatcatcttgttcc

SEQ ID NO: 38828 - DNA, 25 bp, Saccharomyces pastorianus
tagtcgtgctcaaccctacagaaaa

SEQ ID NO: 38829 - DNA, 25 bp, Saccharomyces pastorianus
gaaacgctctgctggaggccatcaa

SEQ ID NO: 38830 - DNA, 25 bp, Saccharomyces pastorianus
tggtcacttatcctatcccaggtaa

SEQ ID NO: 38831 - DNA, 25 bp, Saccharomyces pastorianus
ttgaggtccgtcaaccttttactag

SEQ ID NO: 38832 - DNA, 25 bp, Saccharomyces pastorianus
caacattctcctcagggtccaaaag

SEQ ID NO: 38833 - DNA, 25 bp, Saccharomyces pastorianus
agccgttcgtaatcatgaggtagcc

SEQ ID NO: 38834 - DNA, 25 bp, Saccharomyces pastorianus
aaagttactgatgcgctagccgttc

SEQ ID NO: 38835 - DNA, 25 bp, Saccharomyces pastorianus
ttaccaggacaagcattcacggaaa

SEQ ID NO: 38836 - DNA, 25 bp, Saccharomyces pastorianus
tttccggtacttatgacgcgatcga

SEQ ID NO: 38837 - DNA, 25 bp, Saccharomyces pastorianus
gaggacggtgtagagttccatccga

SEQ ID NO: 38838 - DNA, 25 bp, Saccharomyces pastorianus
acatttacaaacacattcctgaggg

SEQ ID NO: 38839 - DNA, 25 bp, Saccharomyces pastorianus
gttccatccgaaactctttagaaga

SEQ ID NO: 38840 - DNA, 25 bp, Saccharomyces pastorianus
agactgtgctttttgacactcacca

SEQ ID NO: 38841 - DNA, 25 bp, Saccharomyces pastorianus
tcagggtccaaaagtacgtccgttg

SEQ ID NO: 38842 - DNA, 25 bp, Saccharomyces pastorianus
gatcatatggttattacaggtccta

SEQ ID NO: 38843 - DNA, 25 bp, Saccharomyces pastorianus
gagatgctactggtggcacagctaa

SEQ ID NO: 38844 - DNA, 25 bp, Saccharomyces pastorianus
acctctgtttgattgtttgaccact

SEQ ID NO: 38845 - DNA, 25 bp, Saccharomyces pastorianus
tggaagccgccctaacaatggatat

SEQ ID NO: 38846 - DNA, 25 bp, Saccharomyces pastorianus
gttggctactgacttggctgattac

SEQ ID NO: 38847 - DNA, 25 bp, Saccharomyces pastorianus
aacgccgactccttagaattattga

SEQ ID NO: 38848 - DNA, 25 bp, Saccharomyces pastorianus
atactgcacggctgaattcggtttc

SEQ ID NO: 38849 - DNA, 25 bp, Saccharomyces pastorianus
tccgggagagtctttggtgacctaa

SEQ ID NO: 38850 - DNA, 25 bp, Saccharomyces pastorianus
ggtgaatgtgttgctgccgctgaaa

SEQ ID NO: 38851 - DNA, 25 bp, Saccharomyces pastorianus
gagacccatcacatctctggtgaat

SEQ ID NO: 38852 - DNA, 25 bp, Saccharomyces pastorianus
taagcgatgcttactcaacaggttc

SEQ ID NO: 38853 - DNA, 25 bp, Saccharomyces pastorianus
gtgttatttctacattgaccgtcaa

SEQ ID NO: 38854 - DNA, 25 bp, Saccharomyces pastorianus
gctgattctgcattgtttgtcaaga

SEQ ID NO: 38855 - DNA, 25 bp, Saccharomyces pastorianus
taccgcggaaaccatgtactcgaaa

SEQ ID NO: 38856 - DNA, 25 bp, Saccharomyces pastorianus
catcactggttcctccatgattggg

SEQ ID NO: 38857 - DNA, 25 bp, Saccharomyces pastorianus
tgggctgattattgctattgtcttt

SEQ ID NO: 38858 - DNA, 25 bp, Saccharomyces pastorianus
atcgctgttggtatcactggtgcca

SEQ ID NO: 38859 - DNA, 25 bp, Saccharomyces pastorianus
ggcctaagtgtcgttggtgcagcat

SEQ ID NO: 38860 - DNA, 25 bp, Saccharomyces pastorianus
gaacttgtacactggttactccctt

SEQ ID NO: 38861 - DNA, 25 bp, Saccharomyces pastorianus
gaaattgaccgtggctaccgcggaa

SEQ ID NO: 38862 - DNA, 25 bp, Saccharomyces pastorianus
gggccggtgttcgtgctccaagaat

SEQ ID NO: 38863 - DNA, 25 bp, Saccharomyces pastorianus
gctccaagaatcaccacgaagaatt

SEQ ID NO: 38864 - DNA, 25 bp, Saccharomyces pastorianus
tggtgccactgctgccatttctgat

SEQ ID NO: 38865 - DNA, 25 bp, Saccharomyces pastorianus
agacggattttttggtccagggcat

SEQ ID NO: 38866 - DNA, 25 bp, Saccharomyces pastorianus
gtagaattgccgatccacgagaaat

SEQ ID NO: 38867 - DNA, 25 bp, Saccharomyces pastorianus
ccgaagacgacttgccagagggcta

SEQ ID NO: 38868 - DNA, 25 bp, Saccharomyces pastorianus
gtgaattctaccactttgctggaat

SEQ ID NO: 38869 - DNA, 25 bp, Saccharomyces pastorianus
agccggcagaggaacccgtgcaaaa

SEQ ID NO: 38870 - DNA, 25 bp, Saccharomyces pastorianus
tttgtgtcccatgcaagcgcaggag

SEQ ID NO: 38871 - DNA, 25 bp, Saccharomyces pastorianus
cacgatattcattgccatggccgaa

SEQ ID NO: 38872 - DNA, 25 bp, Saccharomyces pastorianus
gcgggttttcaagcatatcagccat

SEQ ID NO: 38873 - DNA, 25 bp, Saccharomyces pastorianus
gaaatggttcccttacaacactacg

SEQ ID NO: 38874 - DNA, 25 bp, Saccharomyces pastorianus
aacatgacggtgatcgagttcccca

SEQ ID NO: 38875 - DNA, 25 bp, Saccharomyces pastorianus
gaggacactgcaaaggacgcccagc

SEQ ID NO: 38876 - DNA, 25 bp, Saccharomyces pastorianus
tgccgaaaatctgctgctgtcttta

SEQ ID NO: 38877 - DNA, 25 bp, Saccharomyces pastorianus
gtttccgatttgactcaggtttccg

SEQ ID NO: 38878 - DNA, 25 bp, Saccharomyces pastorianus
atgggcgccatcacggtgggaataa

SEQ ID NO: 38879 - DNA, 25 bp, Saccharomyces pastorianus
gttcgattcaggtgcggattacgta

SEQ ID NO: 38880 - DNA, 25 bp, Saccharomyces pastorianus
tatcgttacttctggttctccgaat

SEQ ID NO: 38881 - DNA, 25 bp, Saccharomyces pastorianus
ggttctccgaatctggcatattcat

SEQ ID NO: 38882 - DNA, 25 bp, Saccharomyces pastorianus
gcccgcgatctgttgtgccaagatt

SEQ ID NO: 38883 - DNA, 25 bp, Saccharomyces pastorianus
ctttgaagacgcacctgtaggcatt

SEQ ID NO: 38884 - DNA, 25 bp, Saccharomyces pastorianus
aagcctgaccctgaaggttatgcca

SEQ ID NO: 38885 - DNA, 25 bp, Saccharomyces pastorianus
gtgagtcttattcctggtgccgaaa

SEQ ID NO: 38886 - DNA, 25 bp, Saccharomyces pastorianus
agttatttggacaccgtgagtctta

SEQ ID NO: 38887 - DNA, 25 bp, Saccharomyces pastorianus
gtgcaactgtccaactggctgtgac

SEQ ID NO: 38888 - DNA, 25 bp, Saccharomyces pastorianus
agtgatgacaaatgcccctgtggca

SEQ ID NO: 38889 - DNA, 25 bp, Saccharomyces pastorianus
ccaactggctgtgacagtgatgaca

SEQ ID NO: 38890 - DNA, 25 bp, Saccharomyces pastorianus
aaatcgtgcaactgtccaactggct

SEQ ID NO: 38891 - DNA, 25 bp, Saccharomyces pastorianus
tgcaaaaccaatgaacagtgtcaaa

SEQ ID NO: 38892 - DNA, 25 bp, Saccharomyces pastorianus
gaaggccaccaatgtcaatgcaaat

SEQ ID NO: 38893 - DNA, 25 bp, Saccharomyces pastorianus
atttccaaaacgaaggccaccaatg

SEQ ID NO: 38894 - DNA, 25 bp, Saccharomyces pastorianus
ttcagcgaactaatcaatttccaaa

SEQ ID NO: 38895 - DNA, 25 bp, Saccharomyces pastorianus
gcaaatgtggtagttgcaaaaccaa

SEQ ID NO: 38896 - DNA, 25 bp, Saccharomyces pastorianus
tgacaaatgcccctgtggcaacaag

SEQ ID NO: 38897 - DNA, 25 bp, Saccharomyces pastorianus
tgtcaaaaatcgtgcaactgtccaa

SEQ ID NO: 38898 - DNA, 25 bp, Saccharomyces pastorianus
tggcgtagagcctttgttcaatttc

SEQ ID NO: 38899 - DNA, 25 bp, Saccharomyces pastorianus
aatgcgatacatacccctgagttga

SEQ ID NO: 38900 - DNA, 25 bp, Saccharomyces pastorianus
gtctcttctagatattccaacgttg

SEQ ID NO: 38901 - DNA, 25 bp, Saccharomyces pastorianus
gacgaatcgctgaattcacctggta

SEQ ID NO: 38902 - DNA, 25 bp, Saccharomyces pastorianus
taacaaaaccagcagtacccctaat

SEQ ID NO: 38903 - DNA, 25 bp, Saccharomyces pastorianus
tttggctttcatcatatctcgcacg

SEQ ID NO: 38904 - DNA, 25 bp, Saccharomyces pastorianus
aagcaaatggactggcctacggaaa

SEQ ID NO: 38905 - DNA, 25 bp, Saccharomyces pastorianus
aggatagtctcttcttccacaatag

SEQ ID NO: 38906 - DNA, 25 bp, Saccharomyces pastorianus
gttcaatttcacgtcgttggcacca

SEQ ID NO: 38907 - DNA, 25 bp, Saccharomyces pastorianus
atagctactacaatggattcgcacc

SEQ ID NO: 38908 - DNA, 25 bp, Saccharomyces pastorianus
aatccagtatatctgccccatttgg

SEQ ID NO: 38909 - DNA, 25 bp, Saccharomyces pastorianus
gtaagaatctctccactagcagtaa

SEQ ID NO: 38910 - DNA, 25 bp, Saccharomyces pastorianus
tataagcgggctgcacgccaaggat

SEQ ID NO: 38911 - DNA, 25 bp, Saccharomyces pastorianus
aaggatctctccctcatggaaagat

SEQ ID NO: 38912 - DNA, 25 bp, Saccharomyces pastorianus
aaattagtcggcctctctcaaacaa

SEQ ID NO: 38913 - DNA, 25 bp, Saccharomyces pastorianus
aggatattcctctcttgtcttattc

SEQ ID NO: 38914 - DNA, 25 bp, Saccharomyces pastorianus
agcgatctcttgctgtgggaaacaa

SEQ ID NO: 38915 - DNA, 25 bp, Saccharomyces pastorianus
attctgtcccacaagtttctgaacg

SEQ ID NO: 38916 - DNA, 25 bp, Saccharomyces pastorianus
attctcgcgctgctccaagaggata

SEQ ID NO: 38917 - DNA, 25 bp, Saccharomyces pastorianus
ggccaccttttatttccagaagatc

SEQ ID NO: 38918 - DNA, 25 bp, Saccharomyces pastorianus
gtttctgaacgacaacacctactcg

SEQ ID NO: 38919 - DNA, 25 bp, Saccharomyces pastorianus
tggattaccagctagccgttccata

SEQ ID NO: 38920 - DNA, 25 bp, Saccharomyces pastorianus
ggtatccattattttaatcggccat

SEQ ID NO: 38921 - DNA, 25 bp, Saccharomyces pastorianus
ggcatattcaacgtgcactgtcgaa

SEQ ID NO: 38922 - DNA, 25 bp, Saccharomyces pastorianus
atgtactttcgcataccctaaattg

SEQ ID NO: 38923 - DNA, 25 bp, Saccharomyces pastorianus
gaagaggcagctattttggccttaa

SEQ ID NO: 38924 - DNA, 25 bp, Saccharomyces pastorianus
aagacggcagtcactttgattgatt

SEQ ID NO: 38925 - DNA, 25 bp, Saccharomyces pastorianus
gagccgcttcaaaaggtatccatta

SEQ ID NO: 38926 - DNA, 25 bp, Saccharomyces pastorianus
gaatacgcctaatgtgttcgaatca

SEQ ID NO: 38927 - DNA, 25 bp, Saccharomyces pastorianus
atcccagctttatttactccagtta

SEQ ID NO: 38928 - DNA, 25 bp, Saccharomyces pastorianus
gagtgcggaaatcgctatcccagct

SEQ ID NO: 38929 - DNA, 25 bp, Saccharomyces pastorianus
acactcttttgtggatctaccagta

SEQ ID NO: 38930 - DNA, 25 bp, Saccharomyces pastorianus
aatcggccattctcttggtggaagt

SEQ ID NO: 38931 - DNA, 25 bp, Saccharomyces pastorianus
gaaaactaccattctctcatcgaag

SEQ ID NO: 38932 - DNA, 25 bp, Saccharomyces pastorianus
gatgcattgcttagttaatcctgag

SEQ ID NO: 38933 - DNA, 25 bp, Saccharomyces pastorianus
aagacggcactgagcgcagaaccta

SEQ ID NO: 38934 - DNA, 25 bp, Saccharomyces pastorianus
gattcaccgacttctttcaagacga

SEQ ID NO: 38935 - DNA, 25 bp, Saccharomyces pastorianus
aaagcgagaattgccatgccttcca

SEQ ID NO: 38936 - DNA, 25 bp, Saccharomyces pastorianus
actagtgccctatttcaaggaccct

SEQ ID NO: 38937 - DNA, 25 bp, Saccharomyces pastorianus
ccgctagcatggtcgttgcactata

SEQ ID NO: 38938 - DNA, 25 bp, Saccharomyces pastorianus
gattttattgatttaccgccgctag

SEQ ID NO: 38939 - DNA, 25 bp, Saccharomyces pastorianus
tctgcctgtcatttgacgttcacta

SEQ ID NO: 38940 - DNA, 25 bp, Saccharomyces pastorianus
acccttcttcttataatcccgatag

SEQ ID NO: 38941 - DNA, 25 bp, Saccharomyces pastorianus
tgccatgccttccagtaattcaagt

SEQ ID NO: 38942 - DNA, 25 bp, Saccharomyces pastorianus
gaacttcctttagcagacgaaccaa

SEQ ID NO: 38943 - DNA, 25 bp, Saccharomyces pastorianus
taagaccgtccaacccgaattggtg

SEQ ID NO: 38944 - DNA, 25 bp, Saccharomyces pastorianus
aaaagcgtgaacctaccggtgctgc

SEQ ID NO: 38945 - DNA, 25 bp, Saccharomyces pastorianus
aggaatctatcgctgaaccatcaaa

SEQ ID NO: 38946 - DNA, 25 bp, Saccharomyces pastorianus
aaactcatactctagacccaactgt

SEQ ID NO: 38947 - DNA, 25 bp, Saccharomyces pastorianus
taacgtccacatctgaagactcgaa

SEQ ID NO: 38948 - DNA, 25 bp, Saccharomyces pastorianus
ccggtgctgcgttagacacttctaa

SEQ ID NO: 38949 - DNA, 25 bp, Saccharomyces pastorianus
ggagatcaccagcagcttctgaaga

SEQ ID NO: 38950 - DNA, 25 bp, Saccharomyces pastorianus
aagcaaacagcttctcctctaacgt

SEQ ID NO: 38951 - DNA, 25 bp, Saccharomyces pastorianus
gaacctgaagtccaacttgttccag

SEQ ID NO: 38952 - DNA, 25 bp, Saccharomyces pastorianus
aagtggacgagcctgcttctgaatt

SEQ ID NO: 38953 - DNA, 25 bp, Saccharomyces pastorianus
ggtgcgttgaatcgattttccatct

SEQ ID NO: 38954 - DNA, 25 bp, Saccharomyces pastorianus
gatttgcactgagacctgaatttat

SEQ ID NO: 38955 - DNA, 25 bp, Saccharomyces pastorianus
gatttgttaaagctagttcatacca

SEQ ID NO: 38956 - DNA, 25 bp, Saccharomyces pastorianus
gttctgcaggcccacggaatcaaaa

SEQ ID NO: 38957 - DNA, 25 bp, Saccharomyces pastorianus
tgagcactattggttcagttctgca

SEQ ID NO: 38958 - DNA, 25 bp, Saccharomyces pastorianus
cgatcatgacaaggccagtacggtt

SEQ ID NO: 38959 - DNA, 25 bp, Saccharomyces pastorianus
tcgaagactaaactacctaccaagg

SEQ ID NO: 38960 - DNA, 25 bp, Saccharomyces pastorianus
gtttcgaacccttgagatttgcact

SEQ ID NO: 38961 - DNA, 25 bp, Saccharomyces pastorianus
tattgtcaccaaggcttcacaagtg

SEQ ID NO: 38962 - DNA, 25 bp, Saccharomyces pastorianus
atatacctggtggagtgagcactat

SEQ ID NO: 38963 - DNA, 25 bp, Saccharomyces pastorianus
tgcgcaaatgaatctgaacctgttt

SEQ ID NO: 38964 - DNA, 25 bp, Saccharomyces pastorianus
tccgcactaattaatctggtcttcg

SEQ ID NO: 38965 - DNA, 25 bp, Saccharomyces pastorianus
ggtcttcgttggtaagtccattcat

SEQ ID NO: 38966 - DNA, 25 bp, Saccharomyces pastorianus
ggaggagaactcataccagtacaag

SEQ ID NO: 38967 - DNA, 25 bp, Saccharomyces pastorianus
tcggtctttaacagttcctgattta

SEQ ID NO: 38968 - DNA, 25 bp, Saccharomyces pastorianus
gatcaagcgggtgtagtgttcagac

SEQ ID NO: 38969 - DNA, 25 bp, Saccharomyces pastorianus
gccaatggtggacaagcagagcttc

SEQ ID NO: 38970 - DNA, 25 bp, Saccharomyces pastorianus
aacaaatccttgtactatggtcttt

SEQ ID NO: 38971 - DNA, 25 bp, Saccharomyces pastorianus
tatggtcttttaatgtccgcactaa

SEQ ID NO: 38972 - DNA, 25 bp, Saccharomyces pastorianus
ggacgacaaggatcctgatagcgat

SEQ ID NO: 38973 - DNA, 25 bp, Saccharomyces pastorianus
atggatgaacgacccgaaactacag

SEQ ID NO: 38974 - DNA, 25 bp, Saccharomyces pastorianus
gtccattcattcttatttctcagtg

SEQ ID NO: 38975 - DNA, 25 bp, Saccharomyces pastorianus
agtactgtgcaccagaaaccgacat

SEQ ID NO: 38976 - DNA, 25 bp, Saccharomyces pastorianus
tagaggtgtctgatccgttagtgac

SEQ ID NO: 38977 - DNA, 25 bp, Saccharomyces pastorianus
acatacgtggtgtcgatgctcaaat

SEQ ID NO: 38978 - DNA, 25 bp, Saccharomyces pastorianus
tcaagagttccattcgtctgcgata

SEQ ID NO: 38979 - DNA, 25 bp, Saccharomyces pastorianus
aagactgtccgttgatttggccaaa

SEQ ID NO: 38980 - DNA, 25 bp, Saccharomyces pastorianus
aaaaacctacctgctttacatgaag

SEQ ID NO: 38981 - DNA, 25 bp, Saccharomyces pastorianus
agaatattcgtctggaagcaaccct

SEQ ID NO: 38982 - DNA, 25 bp, Saccharomyces pastorianus
gatggcgcgtgcaaagtttggctta

SEQ ID NO: 38983 - DNA, 25 bp, Saccharomyces pastorianus
aaggtatccttgagcagtactgtgc

SEQ ID NO: 38984 - DNA, 25 bp, Saccharomyces pastorianus
ttggcgatgatgcacactccatgaa

SEQ ID NO: 38985 - DNA, 25 bp, Saccharomyces pastorianus
gcacagctcttggaggatgcggaat

SEQ ID NO: 38986 - DNA, 25 bp, Saccharomyces pastorianus
ttgtccagcatgcagccctaaagtc

SEQ ID NO: 38987 - DNA, 25 bp, Saccharomyces pastorianus
aagcacgacgttatattcctattag

SEQ ID NO: 38988 - DNA, 25 bp, Saccharomyces pastorianus
aatgatggcatcttctttggccgtt

SEQ ID NO: 38989 - DNA, 25 bp, Saccharomyces pastorianus
acagtttgactgatcggacgttgga

SEQ ID NO: 38990 - DNA, 25 bp, Saccharomyces pastorianus
taggctgctacttctgtcatgatgt

SEQ ID NO: 38991 - DNA, 25 bp, Saccharomyces pastorianus
gctgcaaatcaaaaactcgggttca

SEQ ID NO: 38992 - DNA, 25 bp, Saccharomyces pastorianus
gcgttaaatgatccgttataccttg

SEQ ID NO: 38993 - DNA, 25 bp, Saccharomyces pastorianus
gtacagtaactaggccaggcgttgc

SEQ ID NO: 38994 - DNA, 25 bp, Saccharomyces pastorianus
aactccggcgtatgagcattgtcca

SEQ ID NO: 38995 - DNA, 25 bp, Saccharomyces pastorianus
agatggttgccttcgttattgggta

SEQ ID NO: 38996 - DNA, 25 bp, Saccharomyces pastorianus
catgatgttgtagcgccgactgaca

SEQ ID NO: 38997 - DNA, 25 bp, Saccharomyces pastorianus
gatactttctaccagatgtctgctc

SEQ ID NO: 38998 - DNA, 25 bp, Saccharomyces pastorianus
ttatattgactaccccacctatgaa

SEQ ID NO: 38999 - DNA, 25 bp, Saccharomyces pastorianus
agttggtttgagattgtccccatac

SEQ ID NO: 39000 - DNA, 25 bp, Saccharomyces pastorianus
gatgctcttgtcgaagccattggtc

SEQ ID NO: 39001 - DNA, 25 bp, Saccharomyces pastorianus
tcgtgtaactaacccattcttgact

SEQ ID NO: 39002 - DNA, 25 bp, Saccharomyces pastorianus
gtccccatacggtgttttcaacagt

SEQ ID NO: 39003 - DNA, 25 bp, Saccharomyces pastorianus
gagaccggcattgttgcccaatatg

SEQ ID NO: 39004 - DNA, 25 bp, Saccharomyces pastorianus
aacgattttgtttactccatctgga

SEQ ID NO: 39005 - DNA, 25 bp, Saccharomyces pastorianus
tgctctccacccagaagtcgttaga

SEQ ID NO: 39006 - DNA, 25 bp, Saccharomyces pastorianus
gattcttcatttctaacccggattt

SEQ ID NO: 39007 - DNA, 25 bp, Saccharomyces pastorianus
tgcccaatatgcttacgttgctggt

SEQ ID NO: 39008 - DNA, 25 bp, Saccharomyces pastorianus
gttccctgagttcaatccggtatta

SEQ ID NO: 39009 - DNA, 25 bp, Saccharomyces pastorianus
gacacaaaatactacgttccctgag

SEQ ID NO: 39010 - DNA, 25 bp, Saccharomyces pastorianus
gagtcgcagacagtatgtctccaca

SEQ ID NO: 39011 - DNA, 25 bp, Saccharomyces pastorianus
aacatatttcagtccccgaacagca

SEQ ID NO: 39012 - DNA, 25 bp, Saccharomyces pastorianus
gaatagtggtttggccattccaaca

SEQ ID NO: 39013 - DNA, 25 bp, Saccharomyces pastorianus
gcgacaatacgaacaacggcctatg

SEQ ID NO: 39014 - DNA, 25 bp, Saccharomyces pastorianus
tcactgccattaccaaatccttatt

SEQ ID NO: 39015 - DNA, 25 bp, Saccharomyces pastorianus
actctcctcaatgaactgtttgcca

SEQ ID NO: 39016 - DNA, 25 bp, Saccharomyces pastorianus
aaatatgccttgttccgagaaagta

SEQ ID NO: 39017 - DNA, 25 bp, Saccharomyces pastorianus
aacttgtattccaacggttcactgc

SEQ ID NO: 39018 - DNA, 25 bp, Saccharomyces pastorianus
gaacaagataccacctgactgcggt

SEQ ID NO: 39019 - DNA, 25 bp, Saccharomyces pastorianus
gagcctgaacggacagtttctggac

SEQ ID NO: 39020 - DNA, 25 bp, Saccharomyces pastorianus
gttttgttagccttctacgttgtga

SEQ ID NO: 39021 - DNA, 25 bp, Saccharomyces pastorianus
gttactggatcatattcgcatgcga

SEQ ID NO: 39022 - DNA, 25 bp, Saccharomyces pastorianus
ttctggaccagttgatgatgccgct

SEQ ID NO: 39023 - DNA, 25 bp, Saccharomyces pastorianus
tttgcccattgctatatcattattg

SEQ ID NO: 39024 - DNA, 25 bp, Saccharomyces pastorianus
aactactgtgtcatccaaaggtccc

SEQ ID NO: 39025 - DNA, 25 bp, Saccharomyces pastorianus
gcgattgtagacacgaaggccttta

SEQ ID NO: 39026 - DNA, 25 bp, Saccharomyces pastorianus
caaaggtccctgttggtatggtcta

SEQ ID NO: 39027 - DNA, 25 bp, Saccharomyces pastorianus
tgaacgtgtatccattttgcccatt

SEQ ID NO: 39028 - DNA, 25 bp, Saccharomyces pastorianus
gttgtgaagttctccatccaggtaa

SEQ ID NO: 39029 - DNA, 25 bp, Saccharomyces pastorianus
aatgtagttattcctgagcctgaac

SEQ ID NO: 39030 - DNA, 25 bp, Saccharomyces pastorianus
gaactagtcatcatgggtgatccca

SEQ ID NO: 39031 - DNA, 25 bp, Saccharomyces pastorianus
gtgatgaatattgctccctttttga

SEQ ID NO: 39032 - DNA, 25 bp, Saccharomyces pastorianus
caaggcgtggcgatgttcaggcaat

SEQ ID NO: 39033 - DNA, 25 bp, Saccharomyces pastorianus
aggccatcaatcgtgcggccgatga

SEQ ID NO: 39034 - DNA, 25 bp, Saccharomyces pastorianus
gaaattggtctttcatccattgtga

SEQ ID NO: 39035 - DNA, 25 bp, Saccharomyces pastorianus
aaagccggcgtttcacacagagaac

SEQ ID NO: 39036 - DNA, 25 bp, Saccharomyces pastorianus
aaggcttgcaagacaccagcgtgtt

SEQ ID NO: 39037 - DNA, 25 bp, Saccharomyces pastorianus
atcccaagatggtacgtgcgctcgt

SEQ ID NO: 39038 - DNA, 25 bp, Saccharomyces pastorianus
atgggcgccatcctgatagatacct

SEQ ID NO: 39039 - DNA, 25 bp, Saccharomyces pastorianus
gaatgtcatggctgttcggcgaaca

SEQ ID NO: 39040 - DNA, 25 bp, Saccharomyces pastorianus
attgaacgtcgaagccaccaggaag

SEQ ID NO: 39041 - DNA, 25 bp, Saccharomyces pastorianus
gaggctaactcttacagtgtcgact

SEQ ID NO: 39042 - DNA, 25 bp, Saccharomyces pastorianus
taaggctgtcttctctgacttatct

SEQ ID NO: 39043 - DNA, 25 bp, Saccharomyces pastorianus
tagtaacgcaggtccatggtctcgt

SEQ ID NO: 39044 - DNA, 25 bp, Saccharomyces pastorianus
gagctactacaaggtctacggttta

SEQ ID NO: 39045 - DNA, 25 bp, Saccharomyces pastorianus
tgaacaccgaataccaagctaaccc

SEQ ID NO: 39046 - DNA, 25 bp, Saccharomyces pastorianus
accactggtgtcgatgacttgtttc

SEQ ID NO: 39047 - DNA, 25 bp, Saccharomyces pastorianus
atcatccatgtctttagttcgtaag

SEQ ID NO: 39048 - DNA, 25 bp, Saccharomyces pastorianus
aataactctagtggctctttggaat

SEQ ID NO: 39049 - DNA, 25 bp, Saccharomyces pastorianus
gaccactggtaatgctttaggctct

SEQ ID NO: 39050 - DNA, 25 bp, Saccharomyces pastorianus
cactcaaactgtctctaaggctgtc

SEQ ID NO: 39051 - DNA, 25 bp, Saccharomyces pastorianus
tgaattgattttcgccgtcaacacc

SEQ ID NO: 39052 - DNA, 25 bp, Saccharomyces pastorianus
tcatctctaactcgctgtaccatat

SEQ ID NO: 39053 - DNA, 25 bp, Saccharomyces pastorianus
ataagaaggtctccggcaaccagag

SEQ ID NO: 39054 - DNA, 25 bp, Saccharomyces pastorianus
gaacaggcccttgagagtggacaga

SEQ ID NO: 39055 - DNA, 25 bp, Saccharomyces pastorianus
actggtcgccgataggaatactcat

SEQ ID NO: 39056 - DNA, 25 bp, Saccharomyces pastorianus
agaattcgacggcatcattccctgg

SEQ ID NO: 39057 - DNA, 25 bp, Saccharomyces pastorianus
gtcaccgccggtggccataagattg

SEQ ID NO: 39058 - DNA, 25 bp, Saccharomyces pastorianus
ggtctgcgctatcgttgatcttcaa

SEQ ID NO: 39059 - DNA, 25 bp, Saccharomyces pastorianus
gaacgtttctgggaccgttagactg

SEQ ID NO: 39060 - DNA, 25 bp, Saccharomyces pastorianus
attccctgggtctacggtgaactga

SEQ ID NO: 39061 - DNA, 25 bp, Saccharomyces pastorianus
taccgagattgacacgttcttctgc

SEQ ID NO: 39062 - DNA, 25 bp, Saccharomyces pastorianus
gcaatcgttcttcactagtgcgcga

SEQ ID NO: 39063 - DNA, 25 bp, Saccharomyces pastorianus
gggttacaaatctccaattgttgct

SEQ ID NO: 39064 - DNA, 25 bp, Saccharomyces pastorianus
tattgagaacattgaactggcttgc

SEQ ID NO: 39065 - DNA, 25 bp, Saccharomyces pastorianus
tatctttttcaagtgctgacagcaa

SEQ ID NO: 39066 - DNA, 25 bp, Saccharomyces pastorianus
tggtacagctacatccagtagaact

SEQ ID NO: 39067 - DNA, 25 bp, Saccharomyces pastorianus
gaactatacccacagtttcaaacag

SEQ ID NO: 39068 - DNA, 25 bp, Saccharomyces pastorianus
gccttccacacatcattctagagaa

SEQ ID NO: 39069 - DNA, 25 bp, Saccharomyces pastorianus
gctttaactgcattcgccgatgata

SEQ ID NO: 39070 - DNA, 25 bp, Saccharomyces pastorianus
ttgcgatggccaagatgcgtttgat

SEQ ID NO: 39071 - DNA, 25 bp, Saccharomyces pastorianus
gaaacacaccaacaactccaagaga

SEQ ID NO: 39072 - DNA, 25 bp, Saccharomyces pastorianus
ggccaaaattgaaaaccatccttat

SEQ ID NO: 39073 - DNA, 25 bp, Saccharomyces pastorianus
gtgcaaaagagtacgccttccacac

SEQ ID NO: 39074 - DNA, 25 bp, Saccharomyces pastorianus
aattattctctttaatcgggtgtga

SEQ ID NO: 39075 - DNA, 25 bp, Saccharomyces pastorianus
tcccaattaatagacatcccgcgtt

SEQ ID NO: 39076 - DNA, 25 bp, Saccharomyces pastorianus
gatatcagtgattttcaacatccca

SEQ ID NO: 39077 - DNA, 25 bp, Saccharomyces pastorianus
ggaggacgcaaacttacctgatgaa

SEQ ID NO: 39078 - DNA, 25 bp, Saccharomyces pastorianus
gtgggacccttaatcattcatcagt

SEQ ID NO: 39079 - DNA, 25 bp, Saccharomyces pastorianus
aacttgccacagtacgtcccaatta

SEQ ID NO: 39080 - DNA, 25 bp, Saccharomyces pastorianus
tcgaagagcttatactggataccct

SEQ ID NO: 39081 - DNA, 25 bp, Saccharomyces pastorianus
ttaggtcttccttaaacagtctgat

SEQ ID NO: 39082 - DNA, 25 bp, Saccharomyces pastorianus
tggataccctctctaaactgacgca

SEQ ID NO: 39083 - DNA, 25 bp, Saccharomyces pastorianus
atcccgcgttgatcgattacatcga

SEQ ID NO: 39084 - DNA, 25 bp, Saccharomyces pastorianus
actgacgcacatatataggttttct

SEQ ID NO: 39085 - DNA, 25 bp, Saccharomyces pastorianus
gttaccagcatcgacgcatagcaag

SEQ ID NO: 39086 - DNA, 25 bp, Saccharomyces pastorianus
acaagagctgacctttgccgattca

SEQ ID NO: 39087 - DNA, 25 bp, Saccharomyces pastorianus
ctagtaccgccagatctttcagaaa

SEQ ID NO: 39088 - DNA, 25 bp, Saccharomyces pastorianus
gctgctgctgatccgctaaagatta

SEQ ID NO: 39089 - DNA, 25 bp, Saccharomyces pastorianus
tttaaacctgattgccatttggcca

SEQ ID NO: 39090 - DNA, 25 bp, Saccharomyces pastorianus
aaaactagtgccctgttaccagcat

SEQ ID NO: 39091 - DNA, 25 bp, Saccharomyces pastorianus
tatcgatgctacaaactcattcccg

SEQ ID NO: 39092 - DNA, 25 bp, Saccharomyces pastorianus
tcgcctcaacgctcacatgaattaa

SEQ ID NO: 39093 - DNA, 25 bp, Saccharomyces pastorianus
agagcttagcgccataacagtcaaa

SEQ ID NO: 39094 - DNA, 25 bp, Saccharomyces pastorianus
atttggccatcaccgacaagagctg

SEQ ID NO: 39095 - DNA, 25 bp, Saccharomyces pastorianus
gaattaacacctgtcttgatctaga

SEQ ID NO: 39096 - DNA, 25 bp, Saccharomyces pastorianus
gaatcttcacttacagctacaaggg

SEQ ID NO: 39097 - DNA, 25 bp, Saccharomyces pastorianus
aatgccgtccaagatgtcgatgaac

SEQ ID NO: 39098 - DNA, 25 bp, Saccharomyces pastorianus
atgcctcatatagacaacccttcag

SEQ ID NO: 39099 - DNA, 25 bp, Saccharomyces pastorianus
acagtcatatgcctcgatgatcacc

SEQ ID NO: 39100 - DNA, 25 bp, Saccharomyces pastorianus
atcagacgtggtgcatcagtaacaa

SEQ ID NO: 39101 - DNA, 25 bp, Saccharomyces pastorianus
aggtacccaagagagctggccaaca

SEQ ID NO: 39102 - DNA, 25 bp, Saccharomyces pastorianus
agagactaccccacaattgcaagaa

SEQ ID NO: 39103 - DNA, 25 bp, Saccharomyces pastorianus
caacccttcagacttgtcactagat

SEQ ID NO: 39104 - DNA, 25 bp, Saccharomyces pastorianus
tgaagcgaccttcccaaaacacaag

SEQ ID NO: 39105 - DNA, 25 bp, Saccharomyces pastorianus
attctttccacaccagatggcagca

SEQ ID NO: 39106 - DNA, 25 bp, Saccharomyces pastorianus
gatacgttaaacctccacagtcata

SEQ ID NO: 39107 - DNA, 25 bp, Saccharomyces pastorianus
aaaacttccatcaagacgcgactat

SEQ ID NO: 39108 - DNA, 25 bp, Saccharomyces pastorianus
gacgccgacaagctgaatgagttta

SEQ ID NO: 39109 - DNA, 25 bp, Saccharomyces pastorianus
acccttggccatcgacattatattg

SEQ ID NO: 39110 - DNA, 25 bp, Saccharomyces pastorianus
gaaagctaaacccaagcctcttgga

SEQ ID NO: 39111 - DNA, 25 bp, Saccharomyces pastorianus
atcctgggtttacattgacgccgac

SEQ ID NO: 39112 - DNA, 25 bp, Saccharomyces pastorianus
tcttggactgttccctttggtggaa

SEQ ID NO: 39113 - DNA, 25 bp, Saccharomyces pastorianus
gacgaagtagattcccacccaagaa

SEQ ID NO: 39114 - DNA, 25 bp, Saccharomyces pastorianus
aggtcatcgagaaacccttggccat

SEQ ID NO: 39115 - DNA, 25 bp, Saccharomyces pastorianus
gacgcctgcgatggacaataatgat

SEQ ID NO: 39116 - DNA, 25 bp, Saccharomyces pastorianus
gacgcgactatccagattacttcaa

SEQ ID NO: 39117 - DNA, 25 bp, Saccharomyces pastorianus
gaagaagactatcgtccccaagaaa

SEQ ID NO: 39118 - DNA, 25 bp, Saccharomyces pastorianus
aatgttctcaccacagaatactcaa

SEQ ID NO: 39119 - DNA, 25 bp, Saccharomyces pastorianus
ccctctttatttcgccaacaggtga

SEQ ID NO: 39120 - DNA, 25 bp, Saccharomyces pastorianus
tcaggaaagccctcgattgattcaa

SEQ ID NO: 39121 - DNA, 25 bp, Saccharomyces pastorianus
tcgtctgtttcgtcatctgataata

SEQ ID NO: 39122 - DNA, 25 bp, Saccharomyces pastorianus
ggtaacatcaccgatcgatttcgaa

SEQ ID NO: 39123 - DNA, 25 bp, Saccharomyces pastorianus
attcgaacagaaactccctctttat

SEQ ID NO: 39124 - DNA, 25 bp, Saccharomyces pastorianus
tttggtttctacagtctcttcatcg

SEQ ID NO: 39125 - DNA, 25 bp, Saccharomyces pastorianus
aagactctgccaacgatcattacca

SEQ ID NO: 39126 - DNA, 25 bp, Saccharomyces pastorianus
cagcgaatcctcaaattctttggtt

SEQ ID NO: 39127 - DNA, 25 bp, Saccharomyces pastorianus
gatctttgtccggattagtttcaaa

SEQ ID NO: 39128 - DNA, 25 bp, Saccharomyces pastorianus
aatactcaatactacggcgactctc

SEQ ID NO: 39129 - DNA, 25 bp, Saccharomyces pastorianus
ggaagacaccgccagatcgattaac

SEQ ID NO: 39130 - DNA, 25 bp, Saccharomyces pastorianus
actcagtcgggcgttgttgttagat

SEQ ID NO: 39131 - DNA, 25 bp, Saccharomyces pastorianus
atatctcttctctggcttctgaata

SEQ ID NO: 39132 - DNA, 25 bp, Saccharomyces pastorianus
gaattgggctgtactggatgtctaa

SEQ ID NO: 39133 - DNA, 25 bp, Saccharomyces pastorianus
gatgcgtctcttaaaagcgttaact

SEQ ID NO: 39134 - DNA, 25 bp, Saccharomyces pastorianus
aaagccgttcaggaccataatctaa

SEQ ID NO: 39135 - DNA, 25 bp, Saccharomyces pastorianus
aatcaccgttggtacccatgatgaa

SEQ ID NO: 39136 - DNA, 25 bp, Saccharomyces pastorianus
aaggcaccttacaatatctcttctc

SEQ ID NO: 39137 - DNA, 25 bp, Saccharomyces pastorianus
aaatcgtttggtctagccggcatta

SEQ ID NO: 39138 - DNA, 25 bp, Saccharomyces pastorianus
atactatcaattggccactcagtcg

SEQ ID NO: 39139 - DNA, 25 bp, Saccharomyces pastorianus
agatttctgcggtgggtctactgca

SEQ ID NO: 39140 - DNA, 25 bp, Saccharomyces pastorianus
gagcagttcttgtttttatctcatt

SEQ ID NO: 39141 - DNA, 25 bp, Saccharomyces pastorianus
tgcaaacagcactacgtcagaaatt

SEQ ID NO: 39142 - DNA, 25 bp, Saccharomyces pastorianus
aattatccaaggtttctgccgaaat

SEQ ID NO: 39143 - DNA, 25 bp, Saccharomyces pastorianus
gtttctgccgaaatcaatcatgttg

SEQ ID NO: 39144 - DNA, 25 bp, Saccharomyces pastorianus
ggcagaactgttgtcgaacatcctt

SEQ ID NO: 39145 - DNA, 25 bp, Saccharomyces pastorianus
aaatccattagtggcgaagctcgct

SEQ ID NO: 39146 - DNA, 25 bp, Saccharomyces pastorianus
cacacgtggtggattattgcaggaa

SEQ ID NO: 39147 - DNA, 25 bp, Saccharomyces pastorianus
atgaggcctcgagtgaattcgttaa

SEQ ID NO: 39148 - DNA, 25 bp, Saccharomyces pastorianus
gaagctcgctaaggaatctttcaca

SEQ ID NO: 39149 - DNA, 25 bp, Saccharomyces pastorianus
atcattggagtcatcttcttctttg

SEQ ID NO: 39150 - DNA, 25 bp, Saccharomyces pastorianus
gatctcagtacgcaccaatttaaga

SEQ ID NO: 39151 - DNA, 25 bp, Saccharomyces pastorianus
ggcgaaagcgaagacatcccagtaa

SEQ ID NO: 39152 - DNA, 25 bp, Saccharomyces pastorianus
tgttaaccgccttttatgacgacgt

SEQ ID NO: 39153 - DNA, 25 bp, Saccharomyces pastorianus
tcagctcttctacgagatgacacat

SEQ ID NO: 39154 - DNA, 25 bp, Saccharomyces pastorianus
gaatttctgttcaaatcagctcttc

SEQ ID NO: 39155 - DNA, 25 bp, Saccharomyces pastorianus
cacagctcaccacaaactgaagttc

SEQ ID NO: 39156 - DNA, 25 bp, Saccharomyces pastorianus
tatcaacctgataatctgcctgtta

SEQ ID NO: 39157 - DNA, 25 bp, Saccharomyces pastorianus
acaatactcgacatacacagctcac

SEQ ID NO: 39158 - DNA, 25 bp, Saccharomyces pastorianus
ttgtccgattataacgctagtgtat

SEQ ID NO: 39159 - DNA, 25 bp, Saccharomyces pastorianus
gaaacttaccaatccggtctgaaag

SEQ ID NO: 39160 - DNA, 25 bp, Saccharomyces pastorianus
accattgttcttatatcgggatcgt

SEQ ID NO: 39161 - DNA, 25 bp, Saccharomyces pastorianus
gcgaagaattgctcctgtcatccaa

SEQ ID NO: 39162 - DNA, 25 bp, Saccharomyces pastorianus
gtggagcttggatcgatgccattca

SEQ ID NO: 39163 - DNA, 25 bp, Saccharomyces pastorianus
gatgctactttagagcctggtgaaa

SEQ ID NO: 39164 - DNA, 25 bp, Saccharomyces pastorianus
aaatcaccattgtacggttgcagtg

SEQ ID NO: 39165 - DNA, 25 bp, Saccharomyces pastorianus
atccaaggaatctcccgttgctaaa

SEQ ID NO: 39166 - DNA, 25 bp, Saccharomyces pastorianus
ttgctaaaccatctgtaccaccaag

SEQ ID NO: 39167 - DNA, 25 bp, Saccharomyces pastorianus
gcgccgatgctggagttatagcctt

SEQ ID NO: 39168 - DNA, 25 bp, Saccharomyces pastorianus
tacgggtttgccaagaacgttcaag

SEQ ID NO: 39169 - DNA, 25 bp, Saccharomyces pastorianus
tctgttaacgcaccggagattgagt

SEQ ID NO: 39170 - DNA, 25 bp, Saccharomyces pastorianus
tagctgaattgcaaccaccgaatgg

SEQ ID NO: 39171 - DNA, 25 bp, Saccharomyces pastorianus
atataccacggttacgcactagatg

SEQ ID NO: 39172 - DNA, 25 bp, Saccharomyces pastorianus
ggtgaacattcagccattggacatg

SEQ ID NO: 39173 - DNA, 25 bp, Saccharomyces pastorianus
gttttcattggtgacggtagattcc

SEQ ID NO: 39174 - DNA, 25 bp, Saccharomyces pastorianus
gttgcatgtcctagattatccatcg

SEQ ID NO: 39175 - DNA, 25 bp, Saccharomyces pastorianus
gaagtgttgggttgtacctcagaaa

SEQ ID NO: 39176 - DNA, 25 bp, Saccharomyces pastorianus
atcccagcgtttaagtacgacccat

SEQ ID NO: 39177 - DNA, 25 bp, Saccharomyces pastorianus
gtagattccatttagagtcttcaat

SEQ ID NO: 39178 - DNA, 25 bp, Saccharomyces pastorianus
gatgctatcaatactgcccagaagg

SEQ ID NO: 39179 - DNA, 25 bp, Saccharomyces pastorianus
atactgtacattattcctcctcaaa

SEQ ID NO: 39180 - DNA, 25 bp, Saccharomyces pastorianus
tcataatccagaaatcccagcgttt

SEQ ID NO: 39181 - DNA, 25 bp, Saccharomyces pastorianus
gtattcggcctaattcttggtgcat

SEQ ID NO: 39182 - DNA, 25 bp, Saccharomyces pastorianus
tatccttagcgaagtttttccacaa

SEQ ID NO: 39183 - DNA, 25 bp, Saccharomyces pastorianus
aaccgtggtgaagattatccttagc

SEQ ID NO: 39184 - DNA, 25 bp, Saccharomyces pastorianus
gctggaagaaactagaccctgtgaa

SEQ ID NO: 39185 - DNA, 25 bp, Saccharomyces pastorianus
gggactcataagagcgatcctcaaa

SEQ ID NO: 39186 - DNA, 25 bp, Saccharomyces pastorianus
atctcacacgaggataccgacaagc

SEQ ID NO: 39187 - DNA, 25 bp, Saccharomyces pastorianus
gttgacgagatgttcgagcacactt

SEQ ID NO: 39188 - DNA, 25 bp, Saccharomyces pastorianus
atcgcccagggccagaatgttgacg

SEQ ID NO: 39189 - DNA, 25 bp, Saccharomyces pastorianus
tttgaacttgtatgtatccgactct

SEQ ID NO: 39190 - DNA, 25 bp, Saccharomyces pastorianus
aacagctgcgttctatactacaaaa

SEQ ID NO: 39191 - DNA, 25 bp, Saccharomyces pastorianus
gagcacactttcgacattatcagat

SEQ ID NO: 39192 - DNA, 25 bp, Saccharomyces pastorianus
tggtggataggtacaaccccggcaa

SEQ ID NO: 39193 - DNA, 25 bp, Saccharomyces pastorianus
gtatccgactctaaacagctgcgtt

SEQ ID NO: 39194 - DNA, 25 bp, Saccharomyces pastorianus
gagcaagagcactgcacggttacag

SEQ ID NO: 39195 - DNA, 25 bp, Saccharomyces pastorianus
tagtgtcgggacagctaaatttcga

SEQ ID NO: 39196 - DNA, 25 bp, Saccharomyces pastorianus
gcaccataatcaacaaggccatagg

SEQ ID NO: 39197 - DNA, 25 bp, Saccharomyces pastorianus
ccattccgttggacaattatgacga

SEQ ID NO: 39198 - DNA, 25 bp, Saccharomyces pastorianus
acagtttagttatttatcatccaca

SEQ ID NO: 39199 - DNA, 25 bp, Saccharomyces pastorianus
gatagctcaatcctgcaaagtatta

SEQ ID NO: 39200 - DNA, 25 bp, Saccharomyces pastorianus
ggtcatcttccgctgctattataat

SEQ ID NO: 39201 - DNA, 25 bp, Saccharomyces pastorianus
gatataaagccgttcttccaaatga

SEQ ID NO: 39202 - DNA, 25 bp, Saccharomyces pastorianus
gttcttccaaatgacaccagtccta

SEQ ID NO: 39203 - DNA, 25 bp, Saccharomyces pastorianus
accagtcctaatcaaatgtctcgaa

SEQ ID NO: 39204 - DNA, 25 bp, Saccharomyces pastorianus
tctagaacctagctggtcatcttcc

SEQ ID NO: 39205 - DNA, 25 bp, Saccharomyces pastorianus
tcagtttttccaagtatggcatggt

SEQ ID NO: 39206 - DNA, 25 bp, Saccharomyces pastorianus
cagatagcagacacactcgatgagt

SEQ ID NO: 39207 - DNA, 25 bp, Saccharomyces pastorianus
gaaatgttacaagaataccgtcgca

SEQ ID NO: 39208 - DNA, 25 bp, Saccharomyces pastorianus
gttctttaggcttgatcacattaat

SEQ ID NO: 39209 - DNA, 25 bp, Saccharomyces pastorianus
gagctctgtgttatttgtcaatttc

SEQ ID NO: 39210 - DNA, 25 bp, Saccharomyces pastorianus
gggattcacgtatagatttgcttgt

SEQ ID NO: 39211 - DNA, 25 bp, Saccharomyces pastorianus
actgtgatggagtttttcatggatc

SEQ ID NO: 39212 - DNA, 25 bp, Saccharomyces pastorianus
aagtcaatggtgtggatcgggaacc

SEQ ID NO: 39213 - DNA, 25 bp, Saccharomyces pastorianus
gaataccgtcgcaatatggaagtca

SEQ ID NO: 39214 - DNA, 25 bp, Saccharomyces pastorianus
gggagccaagcacaacagatagcag

SEQ ID NO: 39215 - DNA, 25 bp, Saccharomyces pastorianus
tcatggatctaagctgtgaaccagt

SEQ ID NO: 39216 - DNA, 25 bp, Saccharomyces pastorianus
gcgttatcatttgagcattctttca

SEQ ID NO: 39217 - DNA, 25 bp, Saccharomyces pastorianus
gtccgacttgacattcgaatccttg

SEQ ID NO: 39218 - DNA, 25 bp, Saccharomyces pastorianus
ggcgggtctcggtcatcgataaata

SEQ ID NO: 39219 - DNA, 25 bp, Saccharomyces pastorianus
gatcgtcgggttccacgataaggaa

SEQ ID NO: 39220 - DNA, 25 bp, Saccharomyces pastorianus
aattgtgcacaacgcgatcgtcggg

SEQ ID NO: 39221 - DNA, 25 bp, Saccharomyces pastorianus
aatacttcagggtcagcgcaattgt

SEQ ID NO: 39222 - DNA, 25 bp, Saccharomyces pastorianus
ggcaatttctgcaacaacagcggaa

SEQ ID NO: 39223 - DNA, 25 bp, Saccharomyces pastorianus
ggtacatacgcgaatggcgggtctc

SEQ ID NO: 39224 - DNA, 25 bp, Saccharomyces pastorianus
gaacgacgtttctttgctcaatgag

SEQ ID NO: 39225 - DNA, 25 bp, Saccharomyces pastorianus
gtgcagaatatctcaacgctgggtg

SEQ ID NO: 39226 - DNA, 25 bp, Saccharomyces pastorianus
aaatgcccgaagctactgcagttgc

SEQ ID NO: 39227 - DNA, 25 bp, Saccharomyces pastorianus
gattcatgtaatggaactgccgcca

SEQ ID NO: 39228 - DNA, 25 bp, Saccharomyces pastorianus
atctgattgtcggtttgttgccaac

SEQ ID NO: 39229 - DNA, 25 bp, Saccharomyces pastorianus
atgacagcaataatcgatccccgaa

SEQ ID NO: 39230 - DNA, 25 bp, Saccharomyces pastorianus
atcgatccccgaatagtgttcagga

SEQ ID NO: 39231 - DNA, 25 bp, Saccharomyces pastorianus
taaggaccggtcaagctcagtcatc

SEQ ID NO: 39232 - DNA, 25 bp, Saccharomyces pastorianus
gcggatcgtccttctgaaatttaca

SEQ ID NO: 39233 - DNA, 25 bp, Saccharomyces pastorianus
tatattcaaaccctctccgcagatt

SEQ ID NO: 39234 - DNA, 25 bp, Saccharomyces pastorianus
aaaccccaacattgtcaccgtatat

SEQ ID NO: 39235 - DNA, 25 bp, Saccharomyces pastorianus
gaaccaagtccacaacttcttctgg

SEQ ID NO: 39236 - DNA, 25 bp, Saccharomyces pastorianus
gatgtaactataccatcgcctcgac

SEQ ID NO: 39237 - DNA, 25 bp, Saccharomyces pastorianus
gctcagtcatccatccacgatgtaa

SEQ ID NO: 39238 - DNA, 25 bp, Saccharomyces pastorianus
gtttgttgccaactacttcagagaa

SEQ ID NO: 39239 - DNA, 25 bp, Saccharomyces pastorianus
gggccccaacaatgacaacgctgca

SEQ ID NO: 39240 - DNA, 25 bp, Saccharomyces pastorianus
gaggcccttcaggaatcaccactat

SEQ ID NO: 39241 - DNA, 25 bp, Saccharomyces pastorianus
gttcaagggtgccatgtaattaagc

SEQ ID NO: 39242 - DNA, 25 bp, Saccharomyces pastorianus
tgcttggaatggttacagtgggcta

SEQ ID NO: 39243 - DNA, 25 bp, Saccharomyces pastorianus
gggattaacgatacaaactgcttgg

SEQ ID NO: 39244 - DNA, 25 bp, Saccharomyces pastorianus
tcaccagttggctctttaccaaaga

SEQ ID NO: 39245 - DNA, 25 bp, Saccharomyces pastorianus
aattgtcaccagttggctctttacc

SEQ ID NO: 39246 - DNA, 25 bp, Saccharomyces pastorianus
gaatcaccactatttttacaagtag

SEQ ID NO: 39247 - DNA, 25 bp, Saccharomyces pastorianus
gggctagtaaagtaattgtcaccag

SEQ ID NO: 39248 - DNA, 25 bp, Saccharomyces pastorianus
catgtaattaagctgggccccaaca

SEQ ID NO: 39249 - DNA, 25 bp, Saccharomyces pastorianus
accaaagagggcagtttccaattga

SEQ ID NO: 39250 - DNA, 25 bp, Saccharomyces pastorianus
cttcttcccaaaaatccgtcattat

SEQ ID NO: 39251 - DNA, 25 bp, Saccharomyces pastorianus
gaagagctcttccaagattgtggta

SEQ ID NO: 39252 - DNA, 25 bp, Saccharomyces pastorianus
aacttgaagctgattcccgttccat

SEQ ID NO: 39253 - DNA, 25 bp, Saccharomyces pastorianus
aagattagcagaccttcttcccaaa

SEQ ID NO: 39254 - DNA, 25 bp, Saccharomyces pastorianus
cattacgctagatgttaccccggaa

SEQ ID NO: 39255 - DNA, 25 bp, Saccharomyces pastorianus
attcccttattatccacagtatcct

SEQ ID NO: 39256 - DNA, 25 bp, Saccharomyces pastorianus
atggaactatcctttaatggcctat

SEQ ID NO: 39257 - DNA, 25 bp, Saccharomyces pastorianus
ttaatggcctatccgaatcccgaca

SEQ ID NO: 39258 - DNA, 25 bp, Saccharomyces pastorianus
aaaaggataacactactctacgata

SEQ ID NO: 39259 - DNA, 25 bp, Saccharomyces pastorianus
cgttccatcttcgtaggcaacatta

SEQ ID NO: 39260 - DNA, 25 bp, Saccharomyces pastorianus
attgagttcgaaagtccagcatatc

SEQ ID NO: 39261 - DNA, 25 bp, Saccharomyces pastorianus
gtaaagtctaccagttcaacgcaag

SEQ ID NO: 39262 - DNA, 25 bp, Saccharomyces pastorianus
tatagtattacatcctgctgccgac

SEQ ID NO: 39263 - DNA, 25 bp, Saccharomyces pastorianus
aattcgcctgtgtgggacatggtat

SEQ ID NO: 39264 - DNA, 25 bp, Saccharomyces pastorianus
aagggctgaatgctccatggatttc

SEQ ID NO: 39265 - DNA, 25 bp, Saccharomyces pastorianus
catggatttccttatcattggcccc

SEQ ID NO: 39266 - DNA, 25 bp, Saccharomyces pastorianus
ggcgttgtagcatgtgggtccaata

SEQ ID NO: 39267 - DNA, 25 bp, Saccharomyces pastorianus
ggtcttttggcggtgatcaactgta

SEQ ID NO: 39268 - DNA, 25 bp, Saccharomyces pastorianus
aaaattctcgctaatggccattggt

SEQ ID NO: 39269 - DNA, 25 bp, Saccharomyces pastorianus
attagacgcctctatcgaatccatt

SEQ ID NO: 39270 - DNA, 25 bp, Saccharomyces pastorianus
ttatcctggatgactctgttacaaa

SEQ ID NO: 39271 - DNA, 25 bp, Saccharomyces pastorianus
gcatggaactgtttcactggacaac

SEQ ID NO: 39272 - DNA, 25 bp, Saccharomyces pastorianus
ccaagcggctggagatcacgcgcga

SEQ ID NO: 39273 - DNA, 25 bp, Saccharomyces pastorianus
gagaaccattgcgaaccaggatcat

SEQ ID NO: 39274 - DNA, 25 bp, Saccharomyces pastorianus
tatccgcgtaccagacaaagccgag

SEQ ID NO: 39275 - DNA, 25 bp, Saccharomyces pastorianus
cttggcgcgcaactacatcaagtcg

SEQ ID NO: 39276 - DNA, 25 bp, Saccharomyces pastorianus
aaaaagaccaagacctcgctgctgc

SEQ ID NO: 39277 - DNA, 25 bp, Saccharomyces pastorianus
ggatcatttccacagactcaactac

SEQ ID NO: 39278 - DNA, 25 bp, Saccharomyces pastorianus
gcgttttgatagtgccaccaccgag

SEQ ID NO: 39279 - DNA, 25 bp, Saccharomyces pastorianus
gatgccatcggctgttatgggcgcc

SEQ ID NO: 39280 - DNA, 25 bp, Saccharomyces pastorianus
ggtgcggcgccgtgaaacgctacaa

SEQ ID NO: 39281 - DNA, 25 bp, Saccharomyces pastorianus
tcgctgctgcccacactaaaaagaa

SEQ ID NO: 39282 - DNA, 25 bp, Saccharomyces pastorianus
acaaagccgagagcgggcgccgtaa

SEQ ID NO: 39283 - DNA, 25 bp, Saccharomyces pastorianus
aaagtagatcaatttcccctgcagt

SEQ ID NO: 39284 - DNA, 25 bp, Saccharomyces pastorianus
aagcaaactgttcgcatttcttcat

SEQ ID NO: 39285 - DNA, 25 bp, Saccharomyces pastorianus
attgcgcacgatccgccgagtaagg

SEQ ID NO: 39286 - DNA, 25 bp, Saccharomyces pastorianus
agagcagccaattctcaccgtatta

SEQ ID NO: 39287 - DNA, 25 bp, Saccharomyces pastorianus
gtaaatgggtcattcctgctatcca

SEQ ID NO: 39288 - DNA, 25 bp, Saccharomyces pastorianus
tcctgctatccacttgcaaactagt

SEQ ID NO: 39289 - DNA, 25 bp, Saccharomyces pastorianus
gttgatttcgacaatcctgcctata

SEQ ID NO: 39290 - DNA, 25 bp, Saccharomyces pastorianus
agtctatcaagttggacccatccgg

SEQ ID NO: 39291 - DNA, 25 bp, Saccharomyces pastorianus
attggcactatccacatctttcatt

SEQ ID NO: 39292 - DNA, 25 bp, Saccharomyces pastorianus
ggtatccaacgctgatatgttcaaa

SEQ ID NO: 39293 - DNA, 25 bp, Saccharomyces pastorianus
gtaaattttcgtgtccaggctgttc

SEQ ID NO: 39294 - DNA, 25 bp, Saccharomyces pastorianus
tacttccccatcacagattgacggt

SEQ ID NO: 39295 - DNA, 25 bp, Saccharomyces pastorianus
atccgatactccgattgttggtttg

SEQ ID NO: 39296 - DNA, 25 bp, Saccharomyces pastorianus
ttcctctcctggttggcgacaaagg

SEQ ID NO: 39297 - DNA, 25 bp, Saccharomyces pastorianus
gaaaagcttggttccgagattgtaa

SEQ ID NO: 39298 - DNA, 25 bp, Saccharomyces pastorianus
gttgcgcagggttttcaggattaca

SEQ ID NO: 39299 - DNA, 25 bp, Saccharomyces pastorianus
atgcagagtatggaggcctgtcttc

SEQ ID NO: 39300 - DNA, 25 bp, Saccharomyces pastorianus
gggacggtgtcaactgatttacaag

SEQ ID NO: 39301 - DNA, 25 bp, Saccharomyces pastorianus
gtttctctgatcatcctttggtaac

SEQ ID NO: 39302 - DNA, 25 bp, Saccharomyces pastorianus
gcatagtccggagaatttccagcaa

SEQ ID NO: 39303 - DNA, 25 bp, Saccharomyces pastorianus
aagtgctcgatctgcatagtccgga

SEQ ID NO: 39304 - DNA, 25 bp, Saccharomyces pastorianus
gtcagctattttacagggccggata

SEQ ID NO: 39305 - DNA, 25 bp, Saccharomyces pastorianus
atgtgaacttcttcagcgtcgtggc

SEQ ID NO: 39306 - DNA, 25 bp, Saccharomyces pastorianus
gtgaaggccgttacgcagtccagca

SEQ ID NO: 39307 - DNA, 25 bp, Saccharomyces pastorianus
caacatcgtctttgttggctctgga

SEQ ID NO: 39308 - DNA, 25 bp, Saccharomyces pastorianus
ttaccatggacatcgccagcgagga

SEQ ID NO: 39309 - DNA, 25 bp, Saccharomyces pastorianus
aagcacggccggttagacagcgtca

SEQ ID NO: 39310 - DNA, 25 bp, Saccharomyces pastorianus
ttgtgcctgccgctgttgaagacct

SEQ ID NO: 39311 - DNA, 25 bp, Saccharomyces pastorianus
acagacaggtctcaagtgcaggctc

SEQ ID NO: 39312 - DNA, 25 bp, Saccharomyces pastorianus
agcgtcatcgcgaatgccggaatac

SEQ ID NO: 39313 - DNA, 25 bp, Saccharomyces pastorianus
aaggctgcactgaaccactttacca

SEQ ID NO: 39314 - DNA, 25 bp, Saccharomyces pastorianus
gaatttccgatgctctgaacggcca

SEQ ID NO: 39315 - DNA, 25 bp, Saccharomyces pastorianus
tggagaggttcacccggttgtacaa

SEQ ID NO: 39316 - DNA, 25 bp, Saccharomyces pastorianus
tgcagccacctttgatgatcgagtt

SEQ ID NO: 39317 - DNA, 25 bp, Saccharomyces pastorianus
tacggtgaaggttcgttgcagccac

SEQ ID NO: 39318 - DNA, 25 bp, Saccharomyces pastorianus
agagatgcaaactttcgtgctcctc

SEQ ID NO: 39319 - DNA, 25 bp, Saccharomyces pastorianus
agcggagattctgatattgccgatc

SEQ ID NO: 39320 - DNA, 25 bp, Saccharomyces pastorianus
gcagacaagattagccaggcctatt

SEQ ID NO: 39321 - DNA, 25 bp, Saccharomyces pastorianus
gaggactatcccgttattgcaaagt

SEQ ID NO: 39322 - DNA, 25 bp, Saccharomyces pastorianus
gagtccggtttcattttccagtacg

SEQ ID NO: 39323 - DNA, 25 bp, Saccharomyces pastorianus
cctttccctatttcatacttggcag

SEQ ID NO: 39324 - DNA, 25 bp, Saccharomyces pastorianus
gatcgagttcgttctgtcaaaggtc

SEQ ID NO: 39325 - DNA, 25 bp, Saccharomyces pastorianus
gaacaacggctacttggccgacgga

SEQ ID NO: 39326 - DNA, 25 bp, Saccharomyces pastorianus
gaaaaaggtgcttgccgagtccggt

SEQ ID NO: 39327 - DNA, 25 bp, Saccharomyces pastorianus
aaattaattgttgccgagtcaccaa

SEQ ID NO: 39328 - DNA, 25 bp, Saccharomyces pastorianus
caatagggactactgggcgcatttg

SEQ ID NO: 39329 - DNA, 25 bp, Saccharomyces pastorianus
gagacttttcgaacgctgcgatcaa

SEQ ID NO: 39330 - DNA, 25 bp, Saccharomyces pastorianus
gtcagggtacgatcgtggccatcaa

SEQ ID NO: 39331 - DNA, 25 bp, Saccharomyces pastorianus
gcaaaattttctcagcaagctatgg

SEQ ID NO: 39332 - DNA, 25 bp, Saccharomyces pastorianus
attttgaagttcctctagacgcgct

SEQ ID NO: 39333 - DNA, 25 bp, Saccharomyces pastorianus
ggagctggcttcaatagggactact

SEQ ID NO: 39334 - DNA, 25 bp, Saccharomyces pastorianus
gctgtcgctgcgtttgtattaccaa

SEQ ID NO: 39335 - DNA, 25 bp, Saccharomyces pastorianus
agagacgatattgctgtcgctgcgt

SEQ ID NO: 39336 - DNA, 25 bp, Saccharomyces pastorianus
tgaagtgattggcaacccacccagc

SEQ ID NO: 39337 - DNA, 25 bp, Saccharomyces pastorianus
tacgggcccgttatatctgccaaaa

SEQ ID NO: 39338 - DNA, 25 bp, Saccharomyces pastorianus
gtcagggttattgtctactattgca

SEQ ID NO: 39339 - DNA, 25 bp, Saccharomyces pastorianus
aggcgcgtttggatcttcaggtcaa

SEQ ID NO: 39340 - DNA, 25 bp, Saccharomyces pastorianus
taacgttaccgccatttctaaagtg

SEQ ID NO: 39341 - DNA, 25 bp, Saccharomyces pastorianus
tatcctggtctttggctgtgcatta

SEQ ID NO: 39342 - DNA, 25 bp, Saccharomyces pastorianus
gaatgctttcccatggtcaattgtc

SEQ ID NO: 39343 - DNA, 25 bp, Saccharomyces pastorianus
tagtcgtgggtacctttgtttcaca

SEQ ID NO: 39344 - DNA, 25 bp, Saccharomyces pastorianus
caattttggccttcctgtgtattat

SEQ ID NO: 39345 - DNA, 25 bp, Saccharomyces pastorianus
gaaagccgtctcatcgtcagggtta

SEQ ID NO: 39346 - DNA, 25 bp, Saccharomyces pastorianus
ttgtttcacatacagtctccgctat

SEQ ID NO: 39347 - DNA, 25 bp, Saccharomyces pastorianus
aattgccatcatcccgattgttttg

SEQ ID NO: 39348 - DNA, 25 bp, Saccharomyces pastorianus
gaggtgtcccagcttcaattttggc

SEQ ID NO: 39349 - DNA, 25 bp, Saccharomyces pastorianus
ttaacgccaacgacatcaccagtaa

SEQ ID NO: 39350 - DNA, 25 bp, Saccharomyces pastorianus
ttgtactatcatccaatcgcttagg

SEQ ID NO: 39351 - DNA, 25 bp, Saccharomyces pastorianus
agaaacatgcggtctagtctccatc

SEQ ID NO: 39352 - DNA, 25 bp, Saccharomyces pastorianus
agttggaaaaccgattgctgctctc

SEQ ID NO: 39353 - DNA, 25 bp, Saccharomyces pastorianus
gtaaagcaaccatcgtctcaatcac

SEQ ID NO: 39354 - DNA, 25 bp, Saccharomyces pastorianus
actctagccccgttgcaaagaaatg

SEQ ID NO: 39355 - DNA, 25 bp, Saccharomyces pastorianus
agcatcatcttccaaccaatggcaa

SEQ ID NO: 39356 - DNA, 25 bp, Saccharomyces pastorianus
gtaacactggcgacctgaggaagct

SEQ ID NO: 39357 - DNA, 25 bp, Saccharomyces pastorianus
aattaagcagtctacccagcatcat

SEQ ID NO: 39358 - DNA, 25 bp, Saccharomyces pastorianus
tcgatgagcaagtccatgaggtcta

SEQ ID NO: 39359 - DNA, 25 bp, Saccharomyces pastorianus
gtctaagcaggtaccgttaacgcca

SEQ ID NO: 39360 - DNA, 25 bp, Saccharomyces pastorianus
gttggtagcatcttgaattcacgtt

SEQ ID NO: 39361 - DNA, 25 bp, Saccharomyces pastorianus
gaatgtcagtatcttttccacaggt

SEQ ID NO: 39362 - DNA, 25 bp, Saccharomyces pastorianus
gtagacccttacattcaagtggaaa

SEQ ID NO: 39363 - DNA, 25 bp, Saccharomyces pastorianus
cagatcggtaatttctcaacggaat

SEQ ID NO: 39364 - DNA, 25 bp, Saccharomyces pastorianus
ttatgttatgtatccagcatccatg

SEQ ID NO: 39365 - DNA, 25 bp, Saccharomyces pastorianus
aacggaatacccttacacagctact

SEQ ID NO: 39366 - DNA, 25 bp, Saccharomyces pastorianus
ggaaattggcaggtgtcattacatt

SEQ ID NO: 39367 - DNA, 25 bp, Saccharomyces pastorianus
ggcacattgcaattgaacgcattca

SEQ ID NO: 39368 - DNA, 25 bp, Saccharomyces pastorianus
cacagctactactacctttcaagat

SEQ ID NO: 39369 - DNA, 25 bp, Saccharomyces pastorianus
tggacccagaaactgcacgagccat

SEQ ID NO: 39370 - DNA, 25 bp, Saccharomyces pastorianus
gtcattacattaatcgcccttgtca

SEQ ID NO: 39371 - DNA, 25 bp, Saccharomyces pastorianus
acaggccccagtgaccatgtactga

SEQ ID NO: 39372 - DNA, 25 bp, Saccharomyces pastorianus
cttgaccacagagggcagaaccaca

SEQ ID NO: 39373 - DNA, 25 bp, Saccharomyces pastorianus
gacgggtctacaggacgacatcaat

SEQ ID NO: 39374 - DNA, 25 bp, Saccharomyces pastorianus
gacgacccgaggtacttgaccacag

SEQ ID NO: 39375 - DNA, 25 bp, Saccharomyces pastorianus
ggaagagatcaaccagctgctggac

SEQ ID NO: 39376 - DNA, 25 bp, Saccharomyces pastorianus
tgacgtacttgggtcagctgcgtac

SEQ ID NO: 39377 - DNA, 25 bp, Saccharomyces pastorianus
agagttttgtgccaatacccgacga

SEQ ID NO: 39378 - DNA, 25 bp, Saccharomyces pastorianus
caagagggtacagggcggaacacaa

SEQ ID NO: 39379 - DNA, 25 bp, Saccharomyces pastorianus
cagagtatagtgcaccagacggtgt

SEQ ID NO: 39380 - DNA, 25 bp, Saccharomyces pastorianus
gagacaagccctcagaacccaagag

SEQ ID NO: 39381 - DNA, 25 bp, Saccharomyces pastorianus
gaccatgtactgaacgctggacaaa

SEQ ID NO: 39382 - DNA, 25 bp, Saccharomyces pastorianus
cgatctcggcatcggcatcaattag

SEQ ID NO: 39383 - DNA, 25 bp, Saccharomyces pastorianus
taaatttttcgcgtctttcgtgcca

SEQ ID NO: 39384 - DNA, 25 bp, Saccharomyces pastorianus
aaaaggcatcgatctcggcatcggc

SEQ ID NO: 39385 - DNA, 25 bp, Saccharomyces pastorianus
ggaaaacggtctcgcaatctcaacg

SEQ ID NO: 39386 - DNA, 25 bp, Saccharomyces pastorianus
gagcaccacccgatgatttaagcaa

SEQ ID NO: 39387 - DNA, 25 bp, Saccharomyces pastorianus
aaaccattaatgcttcagatatcaa

SEQ ID NO: 39388 - DNA, 25 bp, Saccharomyces pastorianus
aagatttatcgagagcaccacccga

SEQ ID NO: 39389 - DNA, 25 bp, Saccharomyces pastorianus
gaaacaatccgcaaagtaagcagtt

SEQ ID NO: 39390 - DNA, 25 bp, Saccharomyces pastorianus
cgcgtctttcgtgccaaatctaata

SEQ ID NO: 39391 - DNA, 25 bp, Saccharomyces pastorianus
agctaaagaggccaagcgtttgaaa

SEQ ID NO: 39392 - DNA, 25 bp, Saccharomyces pastorianus
aatctcaacgattggagcacagctg

SEQ ID NO: 39393 - DNA, 25 bp, Saccharomyces pastorianus
tgctgatggtgctggccgtgttcat

SEQ ID NO: 39394 - DNA, 25 bp, Saccharomyces pastorianus
tggatagagaccaccgcgacggaga

SEQ ID NO: 39395 - DNA, 25 bp, Saccharomyces pastorianus
tcaagcccaggctcaaggccagatt

SEQ ID NO: 39396 - DNA, 25 bp, Saccharomyces pastorianus
acgcctgctacgtggtgtatgagac

SEQ ID NO: 39397 - DNA, 25 bp, Saccharomyces pastorianus
ggcgtattcgatagggacacgttac

SEQ ID NO: 39398 - DNA, 25 bp, Saccharomyces pastorianus
tatgagaccagtgacgagcgcacct

SEQ ID NO: 39399 - DNA, 25 bp, Saccharomyces pastorianus
tagaggcgcaccctcaggaggaact

SEQ ID NO: 39400 - DNA, 25 bp, Saccharomyces pastorianus
ggagaccgaatgagatattccatca

SEQ ID NO: 39401 - DNA, 25 bp, Saccharomyces pastorianus
aggaactccccgaagaagctcaagc

SEQ ID NO: 39402 - DNA, 25 bp, Saccharomyces pastorianus
acgtggccgcgatctagaggcgcac

SEQ ID NO: 39403 - DNA, 25 bp, Saccharomyces pastorianus
gacacgttactgaacctgctgctgt

SEQ ID NO: 39404 - DNA, 25 bp, Saccharomyces pastorianus
gtttggctgggtgtatgacctcatc

SEQ ID NO: 39405 - DNA, 25 bp, Saccharomyces pastorianus
gaaagccgtgacttggaacttgtac

SEQ ID NO: 39406 - DNA, 25 bp, Saccharomyces pastorianus
atttgtgcgttacagaatcggcctc

SEQ ID NO: 39407 - DNA, 25 bp, Saccharomyces pastorianus
gttcaatccattgagttgcgcctac

SEQ ID NO: 39408 - DNA, 25 bp, Saccharomyces pastorianus
agaccgtcattgctattttccagaa

SEQ ID NO: 39409 - DNA, 25 bp, Saccharomyces pastorianus
acaattcttatatgacccaggtcca

SEQ ID NO: 39410 - DNA, 25 bp, Saccharomyces pastorianus
gaagttcacaacacagagctgcaaa

SEQ ID NO: 39411 - DNA, 25 bp, Saccharomyces pastorianus
gtattttgtcaacgttcccaccgtg

SEQ ID NO: 39412 - DNA, 25 bp, Saccharomyces pastorianus
aaagcgttggcgttttgacattcga

SEQ ID NO: 39413 - DNA, 25 bp, Saccharomyces pastorianus
aggtccatgactataagggcgtttc

SEQ ID NO: 39414 - DNA, 25 bp, Saccharomyces pastorianus
atactatccggaactgctgtacgca

SEQ ID NO: 39415 - DNA, 25 bp, Saccharomyces pastorianus
ttgcacaaaatatctccgcttatgg

SEQ ID NO: 39416 - DNA, 25 bp, Saccharomyces pastorianus
gggatctacacaacgaacaccactt

SEQ ID NO: 39417 - DNA, 25 bp, Saccharomyces pastorianus
actgctgatactcaaagtgccttca

SEQ ID NO: 39418 - DNA, 25 bp, Saccharomyces pastorianus
gagtaattatttcacacgcttgcaa

SEQ ID NO: 39419 - DNA, 25 bp, Saccharomyces pastorianus
gcgatgagctttttccagcagcata

SEQ ID NO: 39420 - DNA, 25 bp, Saccharomyces pastorianus
atcaacctagttcatttcatcggaa

SEQ ID NO: 39421 - DNA, 25 bp, Saccharomyces pastorianus
tttcaatcaatttttcaaccccgca

SEQ ID NO: 39422 - DNA, 25 bp, Saccharomyces pastorianus
ggaacgttcaaaccgtggtcacata

SEQ ID NO: 39423 - DNA, 25 bp, Saccharomyces pastorianus
aaacagatttccatcacgaggctcc

SEQ ID NO: 39424 - DNA, 25 bp, Saccharomyces pastorianus
aggtaggtcctaatgctgcacaaaa

SEQ ID NO: 39425 - DNA, 25 bp, Saccharomyces pastorianus
agtggatacgacttccgttcatcta

SEQ ID NO: 39426 - DNA, 25 bp, Saccharomyces pastorianus
gtcgatttgggcgtgattccttcaa

SEQ ID NO: 39427 - DNA, 25 bp, Saccharomyces pastorianus
ttacaggattcgtcaaccccaaaat

SEQ ID NO: 39428 - DNA, 25 bp, Saccharomyces pastorianus
aagtaccttgtgctcataaaccctg

SEQ ID NO: 39429 - DNA, 25 bp, Saccharomyces pastorianus
gttggtacccactcaggaactattc

SEQ ID NO: 39430 - DNA, 25 bp, Saccharomyces pastorianus
cttggcattttggtggctacgattt

SEQ ID NO: 39431 - DNA, 25 bp, Saccharomyces pastorianus
gagcatggcatgttcggttcagcga

SEQ ID NO: 39432 - DNA, 25 bp, Saccharomyces pastorianus
acctatgttcgatgccgtctttata

SEQ ID NO: 39433 - DNA, 25 bp, Saccharomyces pastorianus
gttcagcgatacattcttggcattt

SEQ ID NO: 39434 - DNA, 25 bp, Saccharomyces pastorianus
tgtagccatttctcaacctatgttc

SEQ ID NO: 39435 - DNA, 25 bp, Saccharomyces pastorianus
agaccatcttgtagtaggcatccct

SEQ ID NO: 39436 - DNA, 25 bp, Saccharomyces pastorianus
caatgggtttggtacttccttgttg

SEQ ID NO: 39437 - DNA, 25 bp, Saccharomyces pastorianus
actagttgaaagtcgtgtggcttta

SEQ ID NO: 39438 - DNA, 25 bp, Saccharomyces pastorianus
gatgtgaagccatatgacaacgata

SEQ ID NO: 39439 - DNA, 25 bp, Saccharomyces pastorianus
aatagtaggcagcatcgctacaaaa

SEQ ID NO: 39440 - DNA, 25 bp, Saccharomyces pastorianus
gttttgaagagctggaccgcgttca

SEQ ID NO: 39441 - DNA, 25 bp, Saccharomyces pastorianus
gaatatgccaatgagcctataatag

SEQ ID NO: 39442 - DNA, 25 bp, Saccharomyces pastorianus
gtcggcttaagtgtcgtcaacgttg

SEQ ID NO: 39443 - DNA, 25 bp, Saccharomyces pastorianus
taggctaccaaaatctgtattgcaa

SEQ ID NO: 39444 - DNA, 25 bp, Saccharomyces pastorianus
gagtgacgatttacgaaggcagaaa

SEQ ID NO: 39445 - DNA, 25 bp, Saccharomyces pastorianus
gaccgcgttcaggaagatggcacaa

SEQ ID NO: 39446 - DNA, 25 bp, Saccharomyces pastorianus
aaagggctgatgttttggagacatt

SEQ ID NO: 39447 - DNA, 25 bp, Saccharomyces pastorianus
gtaaggtaacgctatatcttgatga

SEQ ID NO: 39448 - DNA, 25 bp, Saccharomyces pastorianus
gaacatatcgaccacattgaggact

SEQ ID NO: 39449 - DNA, 25 bp, Saccharomyces pastorianus
ggctatccgaacactaatcaatcat

SEQ ID NO: 39450 - DNA, 25 bp, Saccharomyces pastorianus
tccagaggcccaacttcaatgtatt

SEQ ID NO: 39451 - DNA, 25 bp, Saccharomyces pastorianus
gaggtctgccatattctttggatcg

SEQ ID NO: 39452 - DNA, 25 bp, Saccharomyces pastorianus
tttctcggcctatttatcatctgta

SEQ ID NO: 39453 - DNA, 25 bp, Saccharomyces pastorianus
gaagcaggccagaaccgatacggat

SEQ ID NO: 39454 - DNA, 25 bp, Saccharomyces pastorianus
caaggcagctaaccacattatccaa

SEQ ID NO: 39455 - DNA, 25 bp, Saccharomyces pastorianus
agcgcatatggtacagtcggactat

SEQ ID NO: 39456 - DNA, 25 bp, Saccharomyces pastorianus
attcttttcgagatcgttagcgcat

SEQ ID NO: 39457 - DNA, 25 bp, Saccharomyces pastorianus
ttatggtttttgtttctcggcctat

SEQ ID NO: 39458 - DNA, 25 bp, Saccharomyces pastorianus
aagtccttcattggtgcgcatttaa

SEQ ID NO: 39459 - DNA, 25 bp, Saccharomyces pastorianus
taatgctttaaatagtgccacagaa

SEQ ID NO: 39460 - DNA, 25 bp, Saccharomyces pastorianus
aatgcaaattgggtctgaacgttat

SEQ ID NO: 39461 - DNA, 25 bp, Saccharomyces pastorianus
atttgggtacctgtgagttgttcga

SEQ ID NO: 39462 - DNA, 25 bp, Saccharomyces pastorianus
atcatgattgtcaagagagctctac

SEQ ID NO: 39463 - DNA, 25 bp, Saccharomyces pastorianus
gagagctctacaaaacaaactggtt

SEQ ID NO: 39464 - DNA, 25 bp, Saccharomyces pastorianus
tggaaagatctttacatgacgcaat

SEQ ID NO: 39465 - DNA, 25 bp, Saccharomyces pastorianus
agacaactttgtgaaaacgctgggt

SEQ ID NO: 39466 - DNA, 25 bp, Saccharomyces pastorianus
gtttgtatgggaacctgctctagta

SEQ ID NO: 39467 - DNA, 25 bp, Saccharomyces pastorianus
atgcattcgccaaggccttagaagt

SEQ ID NO: 39468 - DNA, 25 bp, Saccharomyces pastorianus
ttgcaggtggtggtgctctagaaat

SEQ ID NO: 39469 - DNA, 25 bp, Saccharomyces pastorianus
aaaacgctgggttcgatgcgataga

SEQ ID NO: 39470 - DNA, 25 bp, Saccharomyces pastorianus
gcattctgacattttctgacgacat

SEQ ID NO: 39471 - DNA, 25 bp, Saccharomyces pastorianus
gaaaatatgaagacggcccaccaca

SEQ ID NO: 39472 - DNA, 25 bp, Saccharomyces pastorianus
aattacgatttgctttccacgtgtg

SEQ ID NO: 39473 - DNA, 25 bp, Saccharomyces pastorianus
tttgatcgtcgatagcattctgaca

SEQ ID NO: 39474 - DNA, 25 bp, Saccharomyces pastorianus
gagttcagaccttttgaagtccaac

SEQ ID NO: 39475 - DNA, 25 bp, Saccharomyces pastorianus
ttcagagaacggtattttccctcaa

SEQ ID NO: 39476 - DNA, 25 bp, Saccharomyces pastorianus
tggattttgaaaacgccgcatactc

SEQ ID NO: 39477 - DNA, 25 bp, Saccharomyces pastorianus
attttccctcaattcattacaccaa

SEQ ID NO: 39478 - DNA, 25 bp, Saccharomyces pastorianus
gggatgctgtcctgaatgaaaattt

SEQ ID NO: 39479 - DNA, 25 bp, Saccharomyces pastorianus
gaattgaaacactcttcccaacata

SEQ ID NO: 39480 - DNA, 25 bp, Saccharomyces pastorianus
acgccgcatactccatgtttatata

SEQ ID NO: 39481 - DNA, 25 bp, Saccharomyces pastorianus
gattggtcagccatcattcttctac

SEQ ID NO: 39482 - DNA, 25 bp, Saccharomyces pastorianus
gtcttgtaccctacaggagttgcta

SEQ ID NO: 39483 - DNA, 25 bp, Saccharomyces pastorianus
tattgggaattgtgcgctctccatt

SEQ ID NO: 39484 - DNA, 25 bp, Saccharomyces pastorianus
ggcttcccagtgttattcttacata

SEQ ID NO: 39485 - DNA, 25 bp, Saccharomyces pastorianus
tatttactgtgctctgaacgctgcc

SEQ ID NO: 39486 - DNA, 25 bp, Saccharomyces pastorianus
ggtcgtttctctctatccaaagatt

SEQ ID NO: 39487 - DNA, 25 bp, Saccharomyces pastorianus
actgttgctcaagtgtcttctagat

SEQ ID NO: 39488 - DNA, 25 bp, Saccharomyces pastorianus
ggtcgtatttgctttactcggtcgt

SEQ ID NO: 39489 - DNA, 25 bp, Saccharomyces pastorianus
atgatagcttatatccctggcttcc

SEQ ID NO: 39490 - DNA, 25 bp, Saccharomyces pastorianus
aatactagcggcgttcaatcgattg

SEQ ID NO: 39491 - DNA, 25 bp, Saccharomyces pastorianus
gtacatctcgttattgctggcatgg

SEQ ID NO: 39492 - DNA, 25 bp, Saccharomyces pastorianus
gacatgatagtccatttttcaccga

SEQ ID NO: 39493 - DNA, 25 bp, Saccharomyces pastorianus
caattctctcccctcttaagaagta

SEQ ID NO: 39494 - DNA, 25 bp, Saccharomyces pastorianus
gatatcacagctccgtatgcaagaa

SEQ ID NO: 39495 - DNA, 25 bp, Saccharomyces pastorianus
atgatgttactacgcagggctccgg

SEQ ID NO: 39496 - DNA, 25 bp, Saccharomyces pastorianus
agtgtgcaagacaacctgccatcca

SEQ ID NO: 39497 - DNA, 25 bp, Saccharomyces pastorianus
tgcatggcatccttcacagtatgac

SEQ ID NO: 39498 - DNA, 25 bp, Saccharomyces pastorianus
tcaacttgcttgaaccctcggtaga

SEQ ID NO: 39499 - DNA, 25 bp, Saccharomyces pastorianus
gcatcggccagatcttcttttgatt

SEQ ID NO: 39500 - DNA, 25 bp, Saccharomyces pastorianus
gacaccacggttgatatcacagctc

SEQ ID NO: 39501 - DNA, 25 bp, Saccharomyces pastorianus
gggcctaatgattcctttgtcaact

SEQ ID NO: 39502 - DNA, 25 bp, Saccharomyces pastorianus
gaatgacgactcctttttagggcct

SEQ ID NO: 39503 - DNA, 25 bp, Saccharomyces pastorianus
aagacaatggcctttccgagtcaac

SEQ ID NO: 39504 - DNA, 25 bp, Saccharomyces pastorianus
agattcttggagtagcacctggtgc

SEQ ID NO: 39505 - DNA, 25 bp, Saccharomyces pastorianus
ggagttagccataaccctcaaaagg

SEQ ID NO: 39506 - DNA, 25 bp, Saccharomyces pastorianus
atgtcccaaatcaatgaggcctacg

SEQ ID NO: 39507 - DNA, 25 bp, Saccharomyces pastorianus
gaggcctacgaaacgcttagtgatg

SEQ ID NO: 39508 - DNA, 25 bp, Saccharomyces pastorianus
tatgatttctccagatccaatcctc

SEQ ID NO: 39509 - DNA, 25 bp, Saccharomyces pastorianus
aagcatcggaatttcaaccagcaat

SEQ ID NO: 39510 - DNA, 25 bp, Saccharomyces pastorianus
taagtctaaaccacattctcagcct

SEQ ID NO: 39511 - DNA, 25 bp, Saccharomyces pastorianus
gaaaagcgtacctgaatctgaccaa

SEQ ID NO: 39512 - DNA, 25 bp, Saccharomyces pastorianus
acattcgcccaaggacctagacaga

SEQ ID NO: 39513 - DNA, 25 bp, Saccharomyces pastorianus
gatccaatcctcgtcgaaacacatt

SEQ ID NO: 39514 - DNA, 25 bp, Saccharomyces pastorianus
agtcagacaagtcgcattcccgtgg

SEQ ID NO: 39515 - DNA, 25 bp, Saccharomyces pastorianus
aaatcgtcggtagggcacagtccat

SEQ ID NO: 39516 - DNA, 25 bp, Saccharomyces pastorianus
ttgagctgggacgacttgcatttga

SEQ ID NO: 39517 - DNA, 25 bp, Saccharomyces pastorianus
caagggttccaagcctcaggtgaat

SEQ ID NO: 39518 - DNA, 25 bp, Saccharomyces pastorianus
gcacagtccatcaacactactaggg

SEQ ID NO: 39519 - DNA, 25 bp, Saccharomyces pastorianus
aatttactacgacgacggcaccgtg

SEQ ID NO: 39520 - DNA, 25 bp, Saccharomyces pastorianus
gggactccagtgattcaaaacctaa

SEQ ID NO: 39521 - DNA, 25 bp, Saccharomyces pastorianus
taaagggccagtccgcgtggacaac

SEQ ID NO: 39522 - DNA, 25 bp, Saccharomyces pastorianus
tcaggaattccgaccgtgaagcagt

SEQ ID NO: 39523 - DNA, 25 bp, Saccharomyces pastorianus
gcatttggaagtgcctagtccccgg

SEQ ID NO: 39524 - DNA, 25 bp, Saccharomyces pastorianus
gtgggctgttcttcaacgacttcaa

SEQ ID NO: 39525 - DNA, 25 bp, Saccharomyces pastorianus
ggctcacggtgctgctgggcatcac

SEQ ID NO: 39526 - DNA, 25 bp, Saccharomyces pastorianus
gctcgcaaacccttctttaagggca

SEQ ID NO: 39527 - DNA, 25 bp, Saccharomyces pastorianus
actactatacatacagcttcctgca

SEQ ID NO: 39528 - DNA, 25 bp, Saccharomyces pastorianus
gatgacgcccgccatgatccgggct

SEQ ID NO: 39529 - DNA, 25 bp, Saccharomyces pastorianus
tttaagggcaatctgctcgggctca

SEQ ID NO: 39530 - DNA, 25 bp, Saccharomyces pastorianus
gggttccgtctactactatacatac

SEQ ID NO: 39531 - DNA, 25 bp, Saccharomyces pastorianus
atacagcttcctgcacaaggacaac

SEQ ID NO: 39532 - DNA, 25 bp, Saccharomyces pastorianus
tgggcatcacgggttccgtctacta

SEQ ID NO: 39533 - DNA, 25 bp, Saccharomyces pastorianus
atcgacgcgaaggagctcgaggctc

SEQ ID NO: 39534 - DNA, 25 bp, Saccharomyces pastorianus
atgatccgggctcgcaaacccttct

SEQ ID NO: 39535 - DNA, 25 bp, Saccharomyces pastorianus
agggcaatctgctcgggctcacggt

SEQ ID NO: 39536 - DNA, 25 bp, Saccharomyces pastorianus
gaggtaccaccggtttgatgggcaa

SEQ ID NO: 39537 - DNA, 25 bp, Saccharomyces pastorianus
tgggcgcccttttctataagcttgg

SEQ ID NO: 39538 - DNA, 25 bp, Saccharomyces pastorianus
acgggttttatgaccaactgctgca

SEQ ID NO: 39539 - DNA, 25 bp, Saccharomyces pastorianus
aagccgatcatcttgttcaacattg

SEQ ID NO: 39540 - DNA, 25 bp, Saccharomyces pastorianus
acgtggtcgcagttgggcattcaca

SEQ ID NO: 39541 - DNA, 25 bp, Saccharomyces pastorianus
gatgcgctcgtgtccaaggagagaa

SEQ ID NO: 39542 - DNA, 25 bp, Saccharomyces pastorianus
ttgagcgacgcgtttgtggccatgc

SEQ ID NO: 39543 - DNA, 25 bp, Saccharomyces pastorianus
gaacgggcaagtacacggcatcatc

SEQ ID NO: 39544 - DNA, 25 bp, Saccharomyces pastorianus
ggaaatcgtgcaggtcgcatcgacc

SEQ ID NO: 39545 - DNA, 25 bp, Saccharomyces pastorianus
aaagatatgtcgtccctgaaggccg

SEQ ID NO: 39546 - DNA, 25 bp, Saccharomyces pastorianus
gggagaccacgattgtgccagacat

SEQ ID NO: 39547 - DNA, 25 bp, Saccharomyces pastorianus
gaatttaccggttctaccagaagcg

SEQ ID NO: 39548 - DNA, 25 bp, Saccharomyces pastorianus
cgacacaaatatccctcttttcata

SEQ ID NO: 39549 - DNA, 25 bp, Saccharomyces pastorianus
aacgctacagaggagtcgcaacttt

SEQ ID NO: 39550 - DNA, 25 bp, Saccharomyces pastorianus
aggactggcctcaaaactggatcaa

SEQ ID NO: 39551 - DNA, 25 bp, Saccharomyces pastorianus
gaacgatgctgatcctgcagagacg

SEQ ID NO: 39552 - DNA, 25 bp, Saccharomyces pastorianus
gcgatcctagagtcacagagcacat

SEQ ID NO: 39553 - DNA, 25 bp, Saccharomyces pastorianus
gttgaggctacggaacccaggataa

SEQ ID NO: 39554 - DNA, 25 bp, Saccharomyces pastorianus
ggattcactacgattcccacaagaa

SEQ ID NO: 39555 - DNA, 25 bp, Saccharomyces pastorianus
ttttaaagcctttcatcaccccaga

SEQ ID NO: 39556 - DNA, 25 bp, Saccharomyces pastorianus
gtcatccccatacccaatttaatag

SEQ ID NO: 39557 - DNA, 25 bp, Saccharomyces pastorianus
agttgcaaatcgctccggaattaca

SEQ ID NO: 39558 - DNA, 25 bp, Saccharomyces pastorianus
atcaaagagggacacgatcgtacag

SEQ ID NO: 39559 - DNA, 25 bp, Saccharomyces pastorianus
gatactagtcttaccaacgcaatgt

SEQ ID NO: 39560 - DNA, 25 bp, Saccharomyces pastorianus
caaactctgagcgaatccaatgaag

SEQ ID NO: 39561 - DNA, 25 bp, Saccharomyces pastorianus
cccgagttcaacgatctacctaata

SEQ ID NO: 39562 - DNA, 25 bp, Saccharomyces pastorianus
aacgcaatgttatttcaaactctga

SEQ ID NO: 39563 - DNA, 25 bp, Saccharomyces pastorianus
agctaggctgaatgatcccgagttc

SEQ ID NO: 39564 - DNA, 25 bp, Saccharomyces pastorianus
caacgggtacattggatcaactgaa

SEQ ID NO: 39565 - DNA, 25 bp, Saccharomyces pastorianus
aatcaaatcgatcaacgggtacatt

SEQ ID NO: 39566 - DNA, 25 bp, Saccharomyces pastorianus
acgaagacttgttggatagactgaa

SEQ ID NO: 39567 - DNA, 25 bp, Saccharomyces pastorianus
gaaaacgactcaaaccggaatgcgg

SEQ ID NO: 39568 - DNA, 25 bp, Saccharomyces pastorianus
gattgataaatctggagctaggctg

SEQ ID NO: 39569 - DNA, 25 bp, Saccharomyces pastorianus
gacggaaacgattcgatggcccctt

SEQ ID NO: 39570 - DNA, 25 bp, Saccharomyces pastorianus
ggaacgtgccaagagtgacccttac

SEQ ID NO: 39571 - DNA, 25 bp, Saccharomyces pastorianus
ggagccgctggaagcccataataat

SEQ ID NO: 39572 - DNA, 25 bp, Saccharomyces pastorianus
gtacccttctggtggaactactcaa

SEQ ID NO: 39573 - DNA, 25 bp, Saccharomyces pastorianus
gtgacccttacgcaagacgacgagt

SEQ ID NO: 39574 - DNA, 25 bp, Saccharomyces pastorianus
gttggactacaattgctacgacgat

SEQ ID NO: 39575 - DNA, 25 bp, Saccharomyces pastorianus
tcagcgtataccactccaagaatgt

SEQ ID NO: 39576 - DNA, 25 bp, Saccharomyces pastorianus
ttcaagaactagacctactgcccag

SEQ ID NO: 39577 - DNA, 25 bp, Saccharomyces pastorianus
tggctacaccatttcaaacaccttt

SEQ ID NO: 39578 - DNA, 25 bp, Saccharomyces pastorianus
aagtccgtacattaggctattctag

SEQ ID NO: 39579 - DNA, 25 bp, Saccharomyces pastorianus
gatcgacccttattttggagccgct

SEQ ID NO: 39580 - DNA, 25 bp, Saccharomyces pastorianus
aaaccatgcggatatgcggctgatc

SEQ ID NO: 39581 - DNA, 25 bp, Saccharomyces pastorianus
aatccggtggacgaggttgctattc

SEQ ID NO: 39582 - DNA, 25 bp, Saccharomyces pastorianus
gcggctgatctgtgatacctttatc

SEQ ID NO: 39583 - DNA, 25 bp, Saccharomyces pastorianus
ctattcttgagagagctgcccttaa

SEQ ID NO: 39584 - DNA, 25 bp, Saccharomyces pastorianus
agtgctgattgtctgggaccacgtc

SEQ ID NO: 39585 - DNA, 25 bp, Saccharomyces pastorianus
ggtgcaaactacttggttcattcga

SEQ ID NO: 39586 - DNA, 25 bp, Saccharomyces pastorianus
aaattttcatcgcatgcttcgtcat

SEQ ID NO: 39587 - DNA, 25 bp, Saccharomyces pastorianus
actctcttcttatccatatacgacg

SEQ ID NO: 39588 - DNA, 25 bp, Saccharomyces pastorianus
aacttaatctggctaatccggtgga

SEQ ID NO: 39589 - DNA, 25 bp, Saccharomyces pastorianus
aaaactggcgatatcctgagcatgg

SEQ ID NO: 39590 - DNA, 25 bp, Saccharomyces pastorianus
aagatcttctaccagccggcaaaat

SEQ ID NO: 39591 - DNA, 25 bp, Saccharomyces pastorianus
agcaaaccttccattacagttaaat

SEQ ID NO: 39592 - DNA, 25 bp, Saccharomyces pastorianus
ggatatttcctgatgtagacactct

SEQ ID NO: 39593 - DNA, 25 bp, Saccharomyces pastorianus
attccttcagaatttgcatacttga

SEQ ID NO: 39594 - DNA, 25 bp, Saccharomyces pastorianus
ggctattcgagaacgtgatcggtct

SEQ ID NO: 39595 - DNA, 25 bp, Saccharomyces pastorianus
tgatcggtctgagtctaggaatgcc

SEQ ID NO: 39596 - DNA, 25 bp, Saccharomyces pastorianus
gaccacaatggcacgattggcatct

SEQ ID NO: 39597 - DNA, 25 bp, Saccharomyces pastorianus
caagattagtaagttcccttttgag

SEQ ID NO: 39598 - DNA, 25 bp, Saccharomyces pastorianus
gaaaacgccgtttatcgaagaatgg

SEQ ID NO: 39599 - DNA, 25 bp, Saccharomyces pastorianus
gggtggaagcattcaacgacagtat

SEQ ID NO: 39600 - DNA, 25 bp, Saccharomyces pastorianus
gtagaagtactgttggcacagcaaa

SEQ ID NO: 39601 - DNA, 25 bp, Saccharomyces pastorianus
aaagcgtccagaaggttgcagattt

SEQ ID NO: 39602 - DNA, 25 bp, Saccharomyces pastorianus
gactattatcccaattaagagccaa

SEQ ID NO: 39603 - DNA, 25 bp, Saccharomyces pastorianus
ggtggtgatcctatcagactattat

SEQ ID NO: 39604 - DNA, 25 bp, Saccharomyces pastorianus
aagagccaaacatgcgcaaggtaat

SEQ ID NO: 39605 - DNA, 25 bp, Saccharomyces pastorianus
ggcggtgctaccgaaatggcagttt

SEQ ID NO: 39606 - DNA, 25 bp, Saccharomyces pastorianus
cagaatcgcgcgtgtaactggtgca

SEQ ID NO: 39607 - DNA, 25 bp, Saccharomyces pastorianus
gcaaccattgttaaccgtgtagaag

SEQ ID NO: 39608 - DNA, 25 bp, Saccharomyces pastorianus
atgttatgttgagcccttcattgtc

SEQ ID NO: 39609 - DNA, 25 bp, Saccharomyces pastorianus
ggaatgtattccacgcacactaata

SEQ ID NO: 39610 - DNA, 25 bp, Saccharomyces pastorianus
tcattgtccccaggtggcggtgcta

SEQ ID NO: 39611 - DNA, 25 bp, Saccharomyces pastorianus
ctataatgctgcgtggtggttccaa

SEQ ID NO: 39612 - DNA, 25 bp, Saccharomyces pastorianus
acgtgggtactagttgcggattatt

SEQ ID NO: 39613 - DNA, 25 bp, Saccharomyces pastorianus
gccggaattcggtttacagcaagtt

SEQ ID NO: 39614 - DNA, 25 bp, Saccharomyces pastorianus
ttttttgatctctgcgacctacaac

SEQ ID NO: 39615 - DNA, 25 bp, Saccharomyces pastorianus
ggcgtaccgcccgtaagtattgata

SEQ ID NO: 39616 - DNA, 25 bp, Saccharomyces pastorianus
taagctagcctggttgattgcctat

SEQ ID NO: 39617 - DNA, 25 bp, Saccharomyces pastorianus
atcacgagttagatgcggatcctta

SEQ ID NO: 39618 - DNA, 25 bp, Saccharomyces pastorianus
gcgacctacaacatcatttacctga

SEQ ID NO: 39619 - DNA, 25 bp, Saccharomyces pastorianus
ctagaaacagtcttggtcatacccc

SEQ ID NO: 39620 - DNA, 25 bp, Saccharomyces pastorianus
gaagatacgtgctttccatggactt

SEQ ID NO: 39621 - DNA, 25 bp, Saccharomyces pastorianus
ccttatatcactatctctcgggaga

SEQ ID NO: 39622 - DNA, 25 bp, Saccharomyces pastorianus
gattgcctatgatgccttaaagcta

SEQ ID NO: 39623 - DNA, 25 bp, Saccharomyces pastorianus
aattggcagagaactatcctttgat

SEQ ID NO: 39624 - DNA, 25 bp, Saccharomyces pastorianus
gaattgaatccagcgtggcactact

SEQ ID NO: 39625 - DNA, 25 bp, Saccharomyces pastorianus
tggcactactgcatctacggcaaca

SEQ ID NO: 39626 - DNA, 25 bp, Saccharomyces pastorianus
cgaatcgatgttgtttcgtctaaga

SEQ ID NO: 39627 - DNA, 25 bp, Saccharomyces pastorianus
aaagcatcggctgggagtttttcga

SEQ ID NO: 39628 - DNA, 25 bp, Saccharomyces pastorianus
aactagagtctgtgatttcggcttt

SEQ ID NO: 39629 - DNA, 25 bp, Saccharomyces pastorianus
atttcggctttgagtggtggcttca

SEQ ID NO: 39630 - DNA, 25 bp, Saccharomyces pastorianus
gaacttgttacgatcgcatatccta

SEQ ID NO: 39631 - DNA, 25 bp, Saccharomyces pastorianus
ggcttcattgaattagactctcgaa

SEQ ID NO: 39632 - DNA, 25 bp, Saccharomyces pastorianus
agtagtgatttctattccgaattca

SEQ ID NO: 39633 - DNA, 25 bp, Saccharomyces pastorianus
tacggcaacagagatcttcaggatt

SEQ ID NO: 39634 - DNA, 25 bp, Saccharomyces pastorianus
ctaagattcttacctccaggcatga

SEQ ID NO: 39635 - DNA, 25 bp, Saccharomyces pastorianus
ggtaaagcttctgcgtttttctcaa

SEQ ID NO: 39636 - DNA, 25 bp, Saccharomyces pastorianus
cataccccggttgttagcactaaat

SEQ ID NO: 39637 - DNA, 25 bp, Saccharomyces pastorianus
atatcgtccatggtacactactctt

SEQ ID NO: 39638 - DNA, 25 bp, Saccharomyces pastorianus
tagagcttgctccagttgtttagat

SEQ ID NO: 39639 - DNA, 25 bp, Saccharomyces pastorianus
atagcacgtcgtcagtctttttatc

SEQ ID NO: 39640 - DNA, 25 bp, Saccharomyces pastorianus
aagatctagtctcgtgcatacttcc

SEQ ID NO: 39641 - DNA, 25 bp, Saccharomyces pastorianus
tacttcccattctttttcaatctac

SEQ ID NO: 39642 - DNA, 25 bp, Saccharomyces pastorianus
ggtactcctgtttcctctgaaaagt

SEQ ID NO: 39643 - DNA, 25 bp, Saccharomyces pastorianus
gtatgagtcatctgtgcacctaagc

SEQ ID NO: 39644 - DNA, 25 bp, Saccharomyces pastorianus
aaaagtctactacgaccaccgatag

SEQ ID NO: 39645 - DNA, 25 bp, Saccharomyces pastorianus
gagcaagtccctagttcatctatta

SEQ ID NO: 39646 - DNA, 25 bp, Saccharomyces pastorianus
tatccaagattgaaggtgccagagc

SEQ ID NO: 39647 - DNA, 25 bp, Saccharomyces pastorianus
ggccgcaggttccagtacactggat

SEQ ID NO: 39648 - DNA, 25 bp, Saccharomyces pastorianus
gatggtttcacataatagcaccgat

SEQ ID NO: 39649 - DNA, 25 bp, Saccharomyces pastorianus
gtctattggcgaaatcctgtttgaa

SEQ ID NO: 39650 - DNA, 25 bp, Saccharomyces pastorianus
atgcagttcccaatgttggtagaaa

SEQ ID NO: 39651 - DNA, 25 bp, Saccharomyces pastorianus
gagtgaaaccccaaattctgaacgg

SEQ ID NO: 39652 - DNA, 25 bp, Saccharomyces pastorianus
acagtacttggaaatcacgggaaat

SEQ ID NO: 39653 - DNA, 25 bp, Saccharomyces pastorianus
gacatggctgagcattccttagaaa

SEQ ID NO: 39654 - DNA, 25 bp, Saccharomyces pastorianus
ggtgccagagctacaaatattaaat

SEQ ID NO: 39655 - DNA, 25 bp, Saccharomyces pastorianus
tctgaacggtatgatgcttggaaac

SEQ ID NO: 39656 - DNA, 25 bp, Saccharomyces pastorianus
aaactttcacatcaccaagtgccta

SEQ ID NO: 39657 - DNA, 25 bp, Saccharomyces pastorianus
caattttttctctccaagtgttagc

SEQ ID NO: 39658 - DNA, 25 bp, Saccharomyces pastorianus
tgggtcagctgccattttgggtaac

SEQ ID NO: 39659 - DNA, 25 bp, Saccharomyces pastorianus
tcatgattcggttgtgaactcccac

SEQ ID NO: 39660 - DNA, 25 bp, Saccharomyces pastorianus
gaagcatctagagtagcaaccactg

SEQ ID NO: 39661 - DNA, 25 bp, Saccharomyces pastorianus
gttgtgaactcccacgctaacagtt

SEQ ID NO: 39662 - DNA, 25 bp, Saccharomyces pastorianus
taaatcggctgggtcagctgccatt

SEQ ID NO: 39663 - DNA, 25 bp, Saccharomyces pastorianus
gcaaccactgcggtaaatgcgctaa

SEQ ID NO: 39664 - DNA, 25 bp, Saccharomyces pastorianus
ctccaagtgttagcatcatcgataa

SEQ ID NO: 39665 - DNA, 25 bp, Saccharomyces pastorianus
tccgaagagtttgatcctaatacca

SEQ ID NO: 39666 - DNA, 25 bp, Saccharomyces pastorianus
gagcgttattacgaaccatagcgca

SEQ ID NO: 39667 - DNA, 25 bp, Saccharomyces pastorianus
cgctaacagttcttcttccaatatg

SEQ ID NO: 39668 - DNA, 25 bp, Saccharomyces pastorianus
gtcgtacctaaatttagactctccg

SEQ ID NO: 39669 - DNA, 25 bp, Saccharomyces pastorianus
gatgccaatgtaaacgtcgtaccta

SEQ ID NO: 39670 - DNA, 25 bp, Saccharomyces pastorianus
atgaattccaatgacgtaacagcgt

SEQ ID NO: 39671 - DNA, 25 bp, Saccharomyces pastorianus
ttgagtgttgagcacccaccgagaa

SEQ ID NO: 39672 - DNA, 25 bp, Saccharomyces pastorianus
attcgaatctcgcagatgccaatgt

SEQ ID NO: 39673 - DNA, 25 bp, Saccharomyces pastorianus
gctggactcaaatatgacgactgat

SEQ ID NO: 39674 - DNA, 25 bp, Saccharomyces pastorianus
gggtacctgacctgtttagatgata

SEQ ID NO: 39675 - DNA, 25 bp, Saccharomyces pastorianus
gatatgctgtatgcgctggactcaa

SEQ ID NO: 39676 - DNA, 25 bp, Saccharomyces pastorianus
tgataacctcaacctagaactctct

SEQ ID NO: 39677 - DNA, 25 bp, Saccharomyces pastorianus
aaaccgaaactatcctctgatttgg

SEQ ID NO: 39678 - DNA, 25 bp, Saccharomyces pastorianus
gagcgaaaaccagcaacgtgaatct

SEQ ID NO: 39679 - DNA, 25 bp, Saccharomyces pastorianus
tactccggagtagcatattccgctg

SEQ ID NO: 39680 - DNA, 25 bp, Saccharomyces pastorianus
gtttccggttatcagaccaagccat

SEQ ID NO: 39681 - DNA, 25 bp, Saccharomyces pastorianus
ttcaccttcttttttcggcaaacag

SEQ ID NO: 39682 - DNA, 25 bp, Saccharomyces pastorianus
taaagtttcccgaaagatcgactcg

SEQ ID NO: 39683 - DNA, 25 bp, Saccharomyces pastorianus
atattccgctgccaagggtacgaac

SEQ ID NO: 39684 - DNA, 25 bp, Saccharomyces pastorianus
gtttacagccggacataggactact

SEQ ID NO: 39685 - DNA, 25 bp, Saccharomyces pastorianus
tagagcccacgttgactacagaaat

SEQ ID NO: 39686 - DNA, 25 bp, Saccharomyces pastorianus
tcaagattatcgacgtcagcggtaa

SEQ ID NO: 39687 - DNA, 25 bp, Saccharomyces pastorianus
acagacgttcgtaacactattggaa

SEQ ID NO: 39688 - DNA, 25 bp, Saccharomyces pastorianus
gatcgactcgaattggaggactcat

SEQ ID NO: 39689 - DNA, 25 bp, Saccharomyces pastorianus
ggactactcaaaccagatctgacat

SEQ ID NO: 39690 - DNA, 25 bp, Saccharomyces pastorianus
ttctctcaatagcactgtctaccga

SEQ ID NO: 39691 - DNA, 25 bp, Saccharomyces pastorianus
actgagatactggtttttgtttcca

SEQ ID NO: 39692 - DNA, 25 bp, Saccharomyces pastorianus
gtcgaagaacatgaagtctcctgag

SEQ ID NO: 39693 - DNA, 25 bp, Saccharomyces pastorianus
gcactgtctaccgacttaaagagct

SEQ ID NO: 39694 - DNA, 25 bp, Saccharomyces pastorianus
gagttcaatattctcgatagtgaca

SEQ ID NO: 39695 - DNA, 25 bp, Saccharomyces pastorianus
ctccgtatttgccagtctgttcaat

SEQ ID NO: 39696 - DNA, 25 bp, Saccharomyces pastorianus
gccagtctgttcaattctctcaata

SEQ ID NO: 39697 - DNA, 25 bp, Saccharomyces pastorianus
caatatgatcctgacttgagtgaag

SEQ ID NO: 39698 - DNA, 25 bp, Saccharomyces pastorianus
tttataatattgcttcccaggttga

SEQ ID NO: 39699 - DNA, 25 bp, Saccharomyces pastorianus
agggaaagtgtatctacctgaactg

SEQ ID NO: 39700 - DNA, 25 bp, Saccharomyces pastorianus
gacttgaattccaaaggcttgaacc

SEQ ID NO: 39701 - DNA, 25 bp, Saccharomyces pastorianus
agacaatctgcaacaaggtttcgat

SEQ ID NO: 39702 - DNA, 25 bp, Saccharomyces pastorianus
ctgaggttgagcagtcgccggattt

SEQ ID NO: 39703 - DNA, 25 bp, Saccharomyces pastorianus
atgtcaaacgcttgggaggatgtat

SEQ ID NO: 39704 - DNA, 25 bp, Saccharomyces pastorianus
gaaaaacatccagtcataatcaagt

SEQ ID NO: 39705 - DNA, 25 bp, Saccharomyces pastorianus
atttgatccgaattttgatttgcat

SEQ ID NO: 39706 - DNA, 25 bp, Saccharomyces pastorianus
acttggcttgcaggcgcgctttggt

SEQ ID NO: 39707 - DNA, 25 bp, Saccharomyces pastorianus
aggtttcgatgacggctttcccact

SEQ ID NO: 39708 - DNA, 25 bp, Saccharomyces pastorianus
tcaggaaggcttacatcaacgctca

SEQ ID NO: 39709 - DNA, 25 bp, Saccharomyces pastorianus
gcagtcgccggatttgctaaaatta

SEQ ID NO: 39710 - DNA, 25 bp, Saccharomyces pastorianus
tagggatcttacttggcttgcaggc

SEQ ID NO: 39711 - DNA, 25 bp, Saccharomyces pastorianus
gttggcacaattatagggatcttac

SEQ ID NO: 39712 - DNA, 25 bp, Saccharomyces pastorianus
ggacccacggtggtgccaaggacaa

SEQ ID NO: 39713 - DNA, 25 bp, Saccharomyces pastorianus
gagacctgtgaattggccatcaaca

SEQ ID NO: 39714 - DNA, 25 bp, Saccharomyces pastorianus
ggaagacccacatgttgctgtaaga

SEQ ID NO: 39715 - DNA, 25 bp, Saccharomyces pastorianus
cattgcatccccagaagtcgttgat

SEQ ID NO: 39716 - DNA, 25 bp, Saccharomyces pastorianus
agggctctttggatgacttgaacag

SEQ ID NO: 39717 - DNA, 25 bp, Saccharomyces pastorianus
tatggttagacacgaagccgccgaa

SEQ ID NO: 39718 - DNA, 25 bp, Saccharomyces pastorianus
gaaatcgcttatgtctttggccaaa

SEQ ID NO: 39719 - DNA, 25 bp, Saccharomyces pastorianus
atcttgtatcgttgccttggatatg

SEQ ID NO: 39720 - DNA, 25 bp, Saccharomyces pastorianus
ggacaaggatgctaccgttccagaa

SEQ ID NO: 39721 - DNA, 25 bp, Saccharomyces pastorianus
ggctactggtttcagcgcagaatca

SEQ ID NO: 39722 - DNA, 25 bp, Saccharomyces pastorianus
gccaaataggtagcccagctgctgt

SEQ ID NO: 39723 - DNA, 25 bp, Saccharomyces pastorianus
ttatcacacatttggctgcgcagtt

SEQ ID NO: 39724 - DNA, 25 bp, Saccharomyces pastorianus
ggacagacacgatcttcacatattt

SEQ ID NO: 39725 - DNA, 25 bp, Saccharomyces pastorianus
ggattcctgaggagttgtcaccttc

SEQ ID NO: 39726 - DNA, 25 bp, Saccharomyces pastorianus
gctaaacctggtcatccgatattga

SEQ ID NO: 39727 - DNA, 25 bp, Saccharomyces pastorianus
atacctgatcttgttggtccatggt

SEQ ID NO: 39728 - DNA, 25 bp, Saccharomyces pastorianus
atgcagatattgacactttccccgt

SEQ ID NO: 39729 - DNA, 25 bp, Saccharomyces pastorianus
cccaagttctcgttcaattgtccaa

SEQ ID NO: 39730 - DNA, 25 bp, Saccharomyces pastorianus
agtgatgttttagtcttccccaagt

SEQ ID NO: 39731 - DNA, 25 bp, Saccharomyces pastorianus
ttgccctccaccattttgaagattg

SEQ ID NO: 39732 - DNA, 25 bp, Saccharomyces pastorianus
ggaccagctgaatgttaacctaaga

SEQ ID NO: 39733 - DNA, 25 bp, Saccharomyces pastorianus
aaatcatagagaccacccttcaaag

SEQ ID NO: 39734 - DNA, 25 bp, Saccharomyces pastorianus
aattgaattcccttgagtgccgctt

SEQ ID NO: 39735 - DNA, 25 bp, Saccharomyces pastorianus
aggcaagtttgtcttacagcaccaa

SEQ ID NO: 39736 - DNA, 25 bp, Saccharomyces pastorianus
tgccgcttagcgagtgccatatcaa

SEQ ID NO: 39737 - DNA, 25 bp, Saccharomyces pastorianus
gcggattcttccacctaaatgaggc

SEQ ID NO: 39738 - DNA, 25 bp, Saccharomyces pastorianus
tatccgaccttagtgcgcagtgtga

SEQ ID NO: 39739 - DNA, 25 bp, Saccharomyces pastorianus
agataatggcactggtggtcccgct

SEQ ID NO: 39740 - DNA, 25 bp, Saccharomyces pastorianus
aaaggctgtatcctcgttgggacca

SEQ ID NO: 39741 - DNA, 25 bp, Saccharomyces pastorianus
aggcctgcacgtcacaatggcatta

SEQ ID NO: 39742 - DNA, 25 bp, Saccharomyces pastorianus
gaaacttgccactttttgatgccac

SEQ ID NO: 39743 - DNA, 25 bp, Saccharomyces pastorianus
gaaaagcgtcatgcccttacatatc

SEQ ID NO: 39744 - DNA, 25 bp, Saccharomyces pastorianus
caaacgggctagtacgtgcttacct

SEQ ID NO: 39745 - DNA, 25 bp, Saccharomyces pastorianus
gagaattattaatcgcgcatcaaag

SEQ ID NO: 39746 - DNA, 25 bp, Saccharomyces pastorianus
aggactcttgatatggcgactttta

SEQ ID NO: 39747 - DNA, 25 bp, Saccharomyces pastorianus
aagctatccaccgtagttttgagat

SEQ ID NO: 39748 - DNA, 25 bp, Saccharomyces pastorianus
cgcgcatcaaaggtccgcatggaat

SEQ ID NO: 39749 - DNA, 25 bp, Saccharomyces pastorianus
atcacccgaccaaatgaggaatcta

SEQ ID NO: 39750 - DNA, 25 bp, Saccharomyces pastorianus
acttttggagccagtttggaaacag

SEQ ID NO: 39751 - DNA, 25 bp, Saccharomyces pastorianus
ggagtcaatgcctgatactgccata

SEQ ID NO: 39752 - DNA, 25 bp, Saccharomyces pastorianus
ataacgctaacatggaggagtcaat

SEQ ID NO: 39753 - DNA, 25 bp, Saccharomyces pastorianus
gtaataccgtaggaaatatcgtgtt

SEQ ID NO: 39754 - DNA, 25 bp, Saccharomyces pastorianus
aaatgggacttcgaaatcagggtat

SEQ ID NO: 39755 - DNA, 25 bp, Saccharomyces pastorianus
ttagatactgacaccaacaatgatg

SEQ ID NO: 39756 - DNA, 25 bp, Saccharomyces pastorianus
ctggtacatgtcagccgatggcact

SEQ ID NO: 39757 - DNA, 25 bp, Saccharomyces pastorianus
aaacttggacaactgggcttcattg

SEQ ID NO: 39758 - DNA, 25 bp, Saccharomyces pastorianus
gatggcactgtgatcgatgacgaca

SEQ ID NO: 39759 - DNA, 25 bp, Saccharomyces pastorianus
gttgggaattccacggtatgccgga

SEQ ID NO: 39760 - DNA, 25 bp, Saccharomyces pastorianus
cacggtatgccggaaaacttgttat

SEQ ID NO: 39761 - DNA, 25 bp, Saccharomyces pastorianus
ggcttcattgatattgcagtggttc

SEQ ID NO: 39762 - DNA, 25 bp, Saccharomyces pastorianus
acggcagcccaattctttaacgaga

SEQ ID NO: 39763 - DNA, 25 bp, Saccharomyces pastorianus
acagggctacgatgcttaaggatga

SEQ ID NO: 39764 - DNA, 25 bp, Saccharomyces pastorianus
aggcaagtgtttacctattgaccaa

SEQ ID NO: 39765 - DNA, 25 bp, Saccharomyces pastorianus
aagactccgggaagctgaaccaagt

SEQ ID NO: 39766 - DNA, 25 bp, Saccharomyces pastorianus
atggcttcattacctccagtgtatt

SEQ ID NO: 39767 - DNA, 25 bp, Saccharomyces pastorianus
actccatgggcggtataggtttcag

SEQ ID NO: 39768 - DNA, 25 bp, Saccharomyces pastorianus
aattcgtcgtttcttgcattttcat

SEQ ID NO: 39769 - DNA, 25 bp, Saccharomyces pastorianus
cagtgggctagttgcaatgcttttt

SEQ ID NO: 39770 - DNA, 25 bp, Saccharomyces pastorianus
gaaagactcaatacctgcatccagg

SEQ ID NO: 39771 - DNA, 25 bp, Saccharomyces pastorianus
atatcccttttagccaactgtctta

SEQ ID NO: 39772 - DNA, 25 bp, Saccharomyces pastorianus
gatctccaatatttccatgtgcagg

SEQ ID NO: 39773 - DNA, 25 bp, Saccharomyces pastorianus
caggtgattttcttggccgtcggga

SEQ ID NO: 39774 - DNA, 25 bp, Saccharomyces pastorianus
atactgggcctaactatttttgcat

SEQ ID NO: 39775 - DNA, 25 bp, Saccharomyces pastorianus
atcatgtgcatcttgtttgggtggt

SEQ ID NO: 39776 - DNA, 25 bp, Saccharomyces pastorianus
gagccgagccaacttgacgatggat

SEQ ID NO: 39777 - DNA, 25 bp, Saccharomyces pastorianus
ttgcttctattctttggcggaccga

SEQ ID NO: 39778 - DNA, 25 bp, Saccharomyces pastorianus
attcctttattcaacgaacctcgca

SEQ ID NO: 39779 - DNA, 25 bp, Saccharomyces pastorianus
taccccaattctcctttacaagatt

SEQ ID NO: 39780 - DNA, 25 bp, Saccharomyces pastorianus
gaaaattgcgtgagctattccagaa

SEQ ID NO: 39781 - DNA, 25 bp, Saccharomyces pastorianus
aaagttactggacggctattcaaag

SEQ ID NO: 39782 - DNA, 25 bp, Saccharomyces pastorianus
tattgttccatcagaagttcgttca

SEQ ID NO: 39783 - DNA, 25 bp, Saccharomyces pastorianus
ggaagttgcctcttttggtaaagat

SEQ ID NO: 39784 - DNA, 25 bp, Saccharomyces pastorianus
tatgaactttcacgttcctttgcct

SEQ ID NO: 39785 - DNA, 25 bp, Saccharomyces pastorianus
gttcctttgcctccaagtggaatat

SEQ ID NO: 39786 - DNA, 25 bp, Saccharomyces pastorianus
aacctcgcactgctttactatttgt

SEQ ID NO: 39787 - DNA, 25 bp, Saccharomyces pastorianus
aaggccgttttcaatctggcttcca

SEQ ID NO: 39788 - DNA, 25 bp, Saccharomyces pastorianus
atgttgccactaaagtaccccaatt

SEQ ID NO: 39789 - DNA, 25 bp, Saccharomyces pastorianus
agcctgagacattactgcctttaga

SEQ ID NO: 39790 - DNA, 25 bp, Saccharomyces pastorianus
aagatcttgctcatcttgactcagc

SEQ ID NO: 39791 - DNA, 25 bp, Saccharomyces pastorianus
tacggaaacgtctagtgcctgttaa

SEQ ID NO: 39792 - DNA, 25 bp, Saccharomyces pastorianus
aggacgtatgctaccggtattctac

SEQ ID NO: 39793 - DNA, 25 bp, Saccharomyces pastorianus
actgaatttcgatttcctacccaat

SEQ ID NO: 39794 - DNA, 25 bp, Saccharomyces pastorianus
acagccttttgaatacggatccaga

SEQ ID NO: 39795 - DNA, 25 bp, Saccharomyces pastorianus
tgacgtttttgagttctccttccaa

SEQ ID NO: 39796 - DNA, 25 bp, Saccharomyces pastorianus
agcggctgttaatccgttctctaat

SEQ ID NO: 39797 - DNA, 25 bp, Saccharomyces pastorianus
gaggattgaacatttctccgcagcc

SEQ ID NO: 39798 - DNA, 25 bp, Saccharomyces pastorianus
gaccagccggttcgttgattgctaa

SEQ ID NO: 39799 - DNA, 25 bp, Saccharomyces pastorianus
tctcatctgatgaccctgtagagtt

SEQ ID NO: 39800 - DNA, 25 bp, Saccharomyces pastorianus
gcaatttctaatgggatcgctggca

SEQ ID NO: 39801 - DNA, 25 bp, Saccharomyces pastorianus
attgccaggtatttcggcccagtaa

SEQ ID NO: 39802 - DNA, 25 bp, Saccharomyces pastorianus
ggttatggcttcttctaccattcca

SEQ ID NO: 39803 - DNA, 25 bp, Saccharomyces pastorianus
atcgctggcattgggtaccttgttt

SEQ ID NO: 39804 - DNA, 25 bp, Saccharomyces pastorianus
tattctcgattcttatccctatggc

SEQ ID NO: 39805 - DNA, 25 bp, Saccharomyces pastorianus
ttactggtccagattccgtcaggga

SEQ ID NO: 39806 - DNA, 25 bp, Saccharomyces pastorianus
cattccatcatctatcattgccagg

SEQ ID NO: 39807 - DNA, 25 bp, Saccharomyces pastorianus
cagatttgatcctagcatgcatgtt

SEQ ID NO: 39808 - DNA, 25 bp, Saccharomyces pastorianus
tttgcacgttgcattggcccaatct

SEQ ID NO: 39809 - DNA, 25 bp, Saccharomyces pastorianus
atggcccaagactatttacccttat

SEQ ID NO: 39810 - DNA, 25 bp, Saccharomyces pastorianus
caatcttcacaggactacttgccaa

SEQ ID NO: 39811 - DNA, 25 bp, Saccharomyces pastorianus
gtaacgtccaaactagtgaccaggg

SEQ ID NO: 39812 - DNA, 25 bp, Saccharomyces pastorianus
gcacgcccactaatactttgaacgg

SEQ ID NO: 39813 - DNA, 25 bp, Saccharomyces pastorianus
gaaggagctggttcaacctttggaa

SEQ ID NO: 39814 - DNA, 25 bp, Saccharomyces pastorianus
gaaattgactggtacacttcgtggt

SEQ ID NO: 39815 - DNA, 25 bp, Saccharomyces pastorianus
gtgaccagggagtacgggcttattt

SEQ ID NO: 39816 - DNA, 25 bp, Saccharomyces pastorianus
acacttcgtggtatgggctaggtat

SEQ ID NO: 39817 - DNA, 25 bp, Saccharomyces pastorianus
tcttaacaccagactcgagggcaca

SEQ ID NO: 39818 - DNA, 25 bp, Saccharomyces pastorianus
gacgggttgatttacctgcctgaga

SEQ ID NO: 39819 - DNA, 25 bp, Saccharomyces pastorianus
gtatgaagccattcgaatcgcaagt

SEQ ID NO: 39820 - DNA, 25 bp, Saccharomyces pastorianus
ccgagttatgggatcctgttttcat

SEQ ID NO: 39821 - DNA, 25 bp, Saccharomyces pastorianus
ggcttatttgccacggccaattgat

SEQ ID NO: 39822 - DNA, 25 bp, Saccharomyces pastorianus
tcagcttcaggttccgtcgttaatc

SEQ ID NO: 39823 - DNA, 25 bp, Saccharomyces pastorianus
aacttccgctgaaactactgcctct

SEQ ID NO: 39824 - DNA, 25 bp, Saccharomyces pastorianus
gcgctttcggacgacggtatttaca

SEQ ID NO: 39825 - DNA, 25 bp, Saccharomyces pastorianus
ttacactgctttaccaacatctacc

SEQ ID NO: 39826 - DNA, 25 bp, Saccharomyces pastorianus
tactgcctcttctgctgaaactact

SEQ ID NO: 39827 - DNA, 25 bp, Saccharomyces pastorianus
tactgcctcttctgttgaagtcact

SEQ ID NO: 39828 - DNA, 25 bp, Saccharomyces pastorianus
acttcatcagcttctcatgcaattg

SEQ ID NO: 39829 - DNA, 25 bp, Saccharomyces pastorianus
ttcatccaatgacgctgttacctca

SEQ ID NO: 39830 - DNA, 25 bp, Saccharomyces pastorianus
aacggtgctcataagttcgggaatg

SEQ ID NO: 39831 - DNA, 25 bp, Saccharomyces pastorianus
taaaggctgccattgctcaagcgct

SEQ ID NO: 39832 - DNA, 25 bp, Saccharomyces pastorianus
ttctgtggcttcttctaccttgatc

SEQ ID NO: 39833 - DNA, 25 bp, Saccharomyces pastorianus
atcaattgggtaacctggcctctgc

SEQ ID NO: 39834 - DNA, 25 bp, Saccharomyces pastorianus
gttgtttcacgtatcctgcatttat

SEQ ID NO: 39835 - DNA, 25 bp, Saccharomyces pastorianus
aattccatcgtgatctatcttctcc

SEQ ID NO: 39836 - DNA, 25 bp, Saccharomyces pastorianus
gaagtggattcctctggtattgtta

SEQ ID NO: 39837 - DNA, 25 bp, Saccharomyces pastorianus
tgcagcagcctctacaattgagacg

SEQ ID NO: 39838 - DNA, 25 bp, Saccharomyces pastorianus
taggcctgttgattgcgtgtgtaat

SEQ ID NO: 39839 - DNA, 25 bp, Saccharomyces pastorianus
gctggattcatgctatacttttgtg

SEQ ID NO: 39840 - DNA, 25 bp, Saccharomyces pastorianus
gccgttttcatcttcacttttgggt

SEQ ID NO: 39841 - DNA, 25 bp, Saccharomyces pastorianus
tgaattggctcctgccgacgcaagg

SEQ ID NO: 39842 - DNA, 25 bp, Saccharomyces pastorianus
acgcaagggctttagtcgctggttt

SEQ ID NO: 39843 - DNA, 25 bp, Saccharomyces pastorianus
gtcgttactaacatcggtgctatct

SEQ ID NO: 39844 - DNA, 25 bp, Saccharomyces pastorianus
aaccttcttttttcgatggctccat

SEQ ID NO: 39845 - DNA, 25 bp, Saccharomyces pastorianus
tctacactctctcttttactaacaa

SEQ ID NO: 39846 - DNA, 25 bp, Saccharomyces pastorianus
gatttcgtagcttcattacctcacg

SEQ ID NO: 39847 - DNA, 25 bp, Saccharomyces pastorianus
gggtcagggaaatctacactctctc

SEQ ID NO: 39848 - DNA, 25 bp, Saccharomyces pastorianus
tggcctgctgactttggtcataaca

SEQ ID NO: 39849 - DNA, 25 bp, Saccharomyces pastorianus
cagagactttgtatagccagagcat

SEQ ID NO: 39850 - DNA, 25 bp, Saccharomyces pastorianus
cttaacttacggctgtctgggtgaa

SEQ ID NO: 39851 - DNA, 25 bp, Saccharomyces pastorianus
ggtgttgtaattctatcgctgtttt

SEQ ID NO: 39852 - DNA, 25 bp, Saccharomyces pastorianus
ttacctcacgagctggatacacgta

SEQ ID NO: 39853 - DNA, 25 bp, Saccharomyces pastorianus
gacgaatgtacctcagctttggatt

SEQ ID NO: 39854 - DNA, 25 bp, Saccharomyces pastorianus
gctttggattctgtcagttctcata

SEQ ID NO: 39855 - DNA, 25 bp, Saccharomyces pastorianus
attgaggaactctgccatgggtcgc

SEQ ID NO: 39856 - DNA, 25 bp, Saccharomyces pastorianus
aagaatcctctcagatgtaccgcag

SEQ ID NO: 39857 - DNA, 25 bp, Saccharomyces pastorianus
ggatatcacgtacctgtcgcaattg

SEQ ID NO: 39858 - DNA, 25 bp, Saccharomyces pastorianus
ggttgaaagtgcacaccatcggcat

SEQ ID NO: 39859 - DNA, 25 bp, Saccharomyces pastorianus
aagcttttactggaccaactggcca

SEQ ID NO: 39860 - DNA, 25 bp, Saccharomyces pastorianus
aggcttccgacggtcttcatgaaga

SEQ ID NO: 39861 - DNA, 25 bp, Saccharomyces pastorianus
tgtaccgcagcctgaactactggaa

SEQ ID NO: 39862 - DNA, 25 bp, Saccharomyces pastorianus
tgccggcgacgattcttcttacaat

SEQ ID NO: 39863 - DNA, 25 bp, Saccharomyces pastorianus
ttcttacaatatgccctacctgtgg

SEQ ID NO: 39864 - DNA, 25 bp, Saccharomyces pastorianus
aaacgttccgtggtgggcaatgcca

SEQ ID NO: 39865 - DNA, 25 bp, Saccharomyces pastorianus
gcataaatatcaactctggccccaa

SEQ ID NO: 39866 - DNA, 25 bp, Saccharomyces pastorianus
ggacgacccagaccctaacaagatg

SEQ ID NO: 39867 - DNA, 25 bp, Saccharomyces pastorianus
gatattggcacatctggacgaccca

SEQ ID NO: 39868 - DNA, 25 bp, Saccharomyces pastorianus
aacaagatggcccaattcgcacagc

SEQ ID NO: 39869 - DNA, 25 bp, Saccharomyces pastorianus
tagcgtccacgttcaccaagaagat

SEQ ID NO: 39870 - DNA, 25 bp, Saccharomyces pastorianus
atagactaccacgttatcccgggct

SEQ ID NO: 39871 - DNA, 25 bp, Saccharomyces pastorianus
ggtggttcaaacacagcacgcgcta

SEQ ID NO: 39872 - DNA, 25 bp, Saccharomyces pastorianus
aagccgcggttttcctacaaatgtg

SEQ ID NO: 39873 - DNA, 25 bp, Saccharomyces pastorianus
gctaaccggcatagactaccacgtt

SEQ ID NO: 39874 - DNA, 25 bp, Saccharomyces pastorianus
cgggctccgggacgttaatatgcaa

SEQ ID NO: 39875 - DNA, 25 bp, Saccharomyces pastorianus
gaataatactcaatgcgacgccctt

SEQ ID NO: 39876 - DNA, 25 bp, Saccharomyces pastorianus
accaagcacagatagcgtccacgtt

SEQ ID NO: 39877 - DNA, 25 bp, Saccharomyces pastorianus
gacgaggtccacaatttggccttca

SEQ ID NO: 39878 - DNA, 25 bp, Saccharomyces pastorianus
gacgggcttcgactagagattttgc

SEQ ID NO: 39879 - DNA, 25 bp, Saccharomyces pastorianus
gaacgatggcctagcagacgatcta

SEQ ID NO: 39880 - DNA, 25 bp, Saccharomyces pastorianus
atgtaccgccagtgttccagaacga

SEQ ID NO: 39881 - DNA, 25 bp, Saccharomyces pastorianus
atcagcgttctgtaccatgcatcga

SEQ ID NO: 39882 - DNA, 25 bp, Saccharomyces pastorianus
cggtccagaagccagcatgtctatg

SEQ ID NO: 39883 - DNA, 25 bp, Saccharomyces pastorianus
tggagctgaccatcaggcccgaata

SEQ ID NO: 39884 - DNA, 25 bp, Saccharomyces pastorianus
acaactgtaatgaagcgctagccgt

SEQ ID NO: 39885 - DNA, 25 bp, Saccharomyces pastorianus
gaccgacgcgggagaccaagatcaa

SEQ ID NO: 39886 - DNA, 25 bp, Saccharomyces pastorianus
gaacaagatcaagacctcggcctgg

SEQ ID NO: 39887 - DNA, 25 bp, Saccharomyces pastorianus
tggccttcaccatgcagagcgtgga

SEQ ID NO: 39888 - DNA, 25 bp, Saccharomyces pastorianus
tgtcctgtttggtgtttctaatctt

SEQ ID NO: 39889 - DNA, 25 bp, Saccharomyces pastorianus
aattgggcttcgtactggatctatg

SEQ ID NO: 39890 - DNA, 25 bp, Saccharomyces pastorianus
aatctttggattaggctctgatgcc

SEQ ID NO: 39891 - DNA, 25 bp, Saccharomyces pastorianus
gatgtattctaagttcctgcgttca

SEQ ID NO: 39892 - DNA, 25 bp, Saccharomyces pastorianus
aaaaagcgccataatcctttctcca

SEQ ID NO: 39893 - DNA, 25 bp, Saccharomyces pastorianus
tttggctttacgtttcgatgtcctg

SEQ ID NO: 39894 - DNA, 25 bp, Saccharomyces pastorianus
gttactcgccgacttctaagcaaga

SEQ ID NO: 39895 - DNA, 25 bp, Saccharomyces pastorianus
ggaatctcactcgacggtttttcaa

SEQ ID NO: 39896 - DNA, 25 bp, Saccharomyces pastorianus
tacagaagggtactcccctggtgca

SEQ ID NO: 39897 - DNA, 25 bp, Saccharomyces pastorianus
gagagcaggcacataccttacctta

SEQ ID NO: 39898 - DNA, 25 bp, Saccharomyces pastorianus
acgccgatatctcaagcacatttct

SEQ ID NO: 39899 - DNA, 25 bp, Saccharomyces pastorianus
gttctcgcctgggattcaaggctaa

SEQ ID NO: 39900 - DNA, 25 bp, Saccharomyces pastorianus
cgatgccgacggattatatctgata

SEQ ID NO: 39901 - DNA, 25 bp, Saccharomyces pastorianus
aatcacacgtgaatgttctcgcctg

SEQ ID NO: 39902 - DNA, 25 bp, Saccharomyces pastorianus
gataagatcttctcacctaatggtg

SEQ ID NO: 39903 - DNA, 25 bp, Saccharomyces pastorianus
gttcagccgtgccatgtatgatttc

SEQ ID NO: 39904 - DNA, 25 bp, Saccharomyces pastorianus
actcgcatgcagagatgggcagctt

SEQ ID NO: 39905 - DNA, 25 bp, Saccharomyces pastorianus
agattccattggtcatcgatgccga

SEQ ID NO: 39906 - DNA, 25 bp, Saccharomyces pastorianus
tgttacgtgggcagcacaatcacac

SEQ ID NO: 39907 - DNA, 25 bp, Saccharomyces pastorianus
atagactacgcgatgctgagctgtt

SEQ ID NO: 39908 - DNA, 25 bp, Saccharomyces pastorianus
atcatgtatgctagcgttcagccgt

SEQ ID NO: 39909 - DNA, 25 bp, Saccharomyces pastorianus
cagcttgatcgctcaggagttgaac

SEQ ID NO: 39910 - DNA, 25 bp, Saccharomyces pastorianus
acactacttccgatagagcttttga

SEQ ID NO: 39911 - DNA, 25 bp, Saccharomyces pastorianus
aagagcctgctttgagatcgggttc

SEQ ID NO: 39912 - DNA, 25 bp, Saccharomyces pastorianus
aatgcttcaacgatcatcactgtaa

SEQ ID NO: 39913 - DNA, 25 bp, Saccharomyces pastorianus
tttgagatcgggttccgctgcaaat

SEQ ID NO: 39914 - DNA, 25 bp, Saccharomyces pastorianus
agggcatgttgacgccacagaaaat

SEQ ID NO: 39915 - DNA, 25 bp, Saccharomyces pastorianus
gaggaacctgcacacgtttctttat

SEQ ID NO: 39916 - DNA, 25 bp, Saccharomyces pastorianus
aagaggaacccactaacctcgctag

SEQ ID NO: 39917 - DNA, 25 bp, Saccharomyces pastorianus
agcagttgaagaagcgcccgctaat

SEQ ID NO: 39918 - DNA, 25 bp, Saccharomyces pastorianus
atcaaaatcagcactctgcccaatg

SEQ ID NO: 39919 - DNA, 25 bp, Saccharomyces pastorianus
gacgatgcgcacatactgacattga

SEQ ID NO: 39920 - DNA, 25 bp, Saccharomyces pastorianus
aacccttgcctactaaatctgctaa

SEQ ID NO: 39921 - DNA, 25 bp, Saccharomyces pastorianus
gagctcccaatagagatgtacctaa

SEQ ID NO: 39922 - DNA, 25 bp, Saccharomyces pastorianus
aaacgataccttcgtcttcaagctc

SEQ ID NO: 39923 - DNA, 25 bp, Saccharomyces pastorianus
ataacgtgaaccctaattcgacatt

SEQ ID NO: 39924 - DNA, 25 bp, Saccharomyces pastorianus
gtgatgctatcgtacttaaattgct

SEQ ID NO: 39925 - DNA, 25 bp, Saccharomyces pastorianus
gaacagattatcatcacgcgggaca

SEQ ID NO: 39926 - DNA, 25 bp, Saccharomyces pastorianus
ccttccatggatcggtcttctataa

SEQ ID NO: 39927 - DNA, 25 bp, Saccharomyces pastorianus
aattgctaagcaatccttccatgga

SEQ ID NO: 39928 - DNA, 25 bp, Saccharomyces pastorianus
aattcgacattcacgacacaggagg

SEQ ID NO: 39929 - DNA, 25 bp, Saccharomyces pastorianus
atcacgcgggacatcattgaatggc

SEQ ID NO: 39930 - DNA, 25 bp, Saccharomyces pastorianus
taggttttctcccacaaagttatcg

SEQ ID NO: 39931 - DNA, 25 bp, Saccharomyces pastorianus
cgaatgtgcttcgagtagtctgttc

SEQ ID NO: 39932 - DNA, 25 bp, Saccharomyces pastorianus
tgtgctctcttacatcaaggacgtt

SEQ ID NO: 39933 - DNA, 25 bp, Saccharomyces pastorianus
acctgattgaaacctcgtgtaccgt

SEQ ID NO: 39934 - DNA, 25 bp, Saccharomyces pastorianus
tatcgaatgcgtaccatgtgctctc

SEQ ID NO: 39935 - DNA, 25 bp, Saccharomyces pastorianus
ctcgtgtaccgtgctggacttgaag

SEQ ID NO: 39936 - DNA, 25 bp, Saccharomyces pastorianus
atatcatacatagtcccttcggttt

SEQ ID NO: 39937 - DNA, 25 bp, Saccharomyces pastorianus
gagtacgaactttttgccaggcaca

SEQ ID NO: 39938 - DNA, 25 bp, Saccharomyces pastorianus
aaatattcatcctgggttcctctta

SEQ ID NO: 39939 - DNA, 25 bp, Saccharomyces pastorianus
tcccttcggtttctctacaatgttt

SEQ ID NO: 39940 - DNA, 25 bp, Saccharomyces pastorianus
ttttagatcccgtcactgtgtcgaa

SEQ ID NO: 39941 - DNA, 25 bp, Saccharomyces pastorianus
aaggccgttgtattttgaagagctc

SEQ ID NO: 39942 - DNA, 25 bp, Saccharomyces pastorianus
attggctaagatgtaccctcagtac

SEQ ID NO: 39943 - DNA, 25 bp, Saccharomyces pastorianus
gtactcctgcttccctattgataag

SEQ ID NO: 39944 - DNA, 25 bp, Saccharomyces pastorianus
agccctacgcatctaaatacagcag

SEQ ID NO: 39945 - DNA, 25 bp, Saccharomyces pastorianus
agcaatgacgtcacttttttccaaa

SEQ ID NO: 39946 - DNA, 25 bp, Saccharomyces pastorianus
gctatgatcccgtaacaggcactta

SEQ ID NO: 39947 - DNA, 25 bp, Saccharomyces pastorianus
atatcaaatggtcctgtctccgttc

SEQ ID NO: 39948 - DNA, 25 bp, Saccharomyces pastorianus
gtctccgttccaactactgagagtg

SEQ ID NO: 39949 - DNA, 25 bp, Saccharomyces pastorianus
gtcgaattcctagaaccggttgatt

SEQ ID NO: 39950 - DNA, 25 bp, Saccharomyces pastorianus
ggttgatttgtctaatacaccctta

SEQ ID NO: 39951 - DNA, 25 bp, Saccharomyces pastorianus
atcgatatcaaagtgccaggtctac

SEQ ID NO: 39952 - DNA, 25 bp, Saccharomyces pastorianus
gacaaaactgattcttcccatacca

SEQ ID NO: 39953 - DNA, 25 bp, Saccharomyces pastorianus
agagttactttgtactcctgcttcc

SEQ ID NO: 39954 - DNA, 25 bp, Saccharomyces pastorianus
gcattcccattcgatgtttactcta

SEQ ID NO: 39955 - DNA, 25 bp, Saccharomyces pastorianus
cgtaaccatggtgtcatcgctaaat

SEQ ID NO: 39956 - DNA, 25 bp, Saccharomyces pastorianus
gcagtgatgaagatgcattcccatt

SEQ ID NO: 39957 - DNA, 25 bp, Saccharomyces pastorianus
gaaaacgtcatattctagtgctaaa

SEQ ID NO: 39958 - DNA, 25 bp, Saccharomyces pastorianus
aacttttgagtagatcgcattcgaa

SEQ ID NO: 39959 - DNA, 25 bp, Saccharomyces pastorianus
gaatgttatcgtgcctgggcaatat

SEQ ID NO: 39960 - DNA, 25 bp, Saccharomyces pastorianus
atgggcattgtacttttcatgtgta

SEQ ID NO: 39961 - DNA, 25 bp, Saccharomyces pastorianus
aatcaagcgcgagttcaagaagtac

SEQ ID NO: 39962 - DNA, 25 bp, Saccharomyces pastorianus
gtgtatgttagcatgctctgcattt

SEQ ID NO: 39963 - DNA, 25 bp, Saccharomyces pastorianus
agctcatctgagacatcgttcaatg

SEQ ID NO: 39964 - DNA, 25 bp, Saccharomyces pastorianus
atactaagactactgggttccaaag

SEQ ID NO: 39965 - DNA, 25 bp, Saccharomyces pastorianus
aacctactgatcaattgcgctggcc

SEQ ID NO: 39966 - DNA, 25 bp, Saccharomyces pastorianus
ccctaacgagtgctattggcccaaa

SEQ ID NO: 39967 - DNA, 25 bp, Saccharomyces pastorianus
aacggtggcatccaaagaggcccta

SEQ ID NO: 39968 - DNA, 25 bp, Saccharomyces pastorianus
ggacgacttcttcccaaattcaaga

SEQ ID NO: 39969 - DNA, 25 bp, Saccharomyces pastorianus
atttcatcgatcttacagtccggga

SEQ ID NO: 39970 - DNA, 25 bp, Saccharomyces pastorianus
gcattgtcccgatacacagaggtct

SEQ ID NO: 39971 - DNA, 25 bp, Saccharomyces pastorianus
gcctcaatgggttgccagtgaacct

SEQ ID NO: 39972 - DNA, 25 bp, Saccharomyces pastorianus
aaggaatatccgctgccacacgata

SEQ ID NO: 39973 - DNA, 25 bp, Saccharomyces pastorianus
tacgcctgttgaggtagcacaccaa

SEQ ID NO: 39974 - DNA, 25 bp, Saccharomyces pastorianus
gaaccatgcgacaactggtcaggtt

SEQ ID NO: 39975 - DNA, 25 bp, Saccharomyces pastorianus
tgcgctggcctaactcaagaatcat

SEQ ID NO: 39976 - DNA, 25 bp, Saccharomyces pastorianus
aacggctccagtatatattgatgca

SEQ ID NO: 39977 - DNA, 25 bp, Saccharomyces pastorianus
attcgtcttctcactcttcatttaa

SEQ ID NO: 39978 - DNA, 25 bp, Saccharomyces pastorianus
agtacagttctcaggtcttcgccta

SEQ ID NO: 39979 - DNA, 25 bp, Saccharomyces pastorianus
gaagcattctccagtacagttctca

SEQ ID NO: 39980 - DNA, 25 bp, Saccharomyces pastorianus
agacaattctttcggatctgcaaat

SEQ ID NO: 39981 - DNA, 25 bp, Saccharomyces pastorianus
gtcttcgcctaactcgagtgactat

SEQ ID NO: 39982 - DNA, 25 bp, Saccharomyces pastorianus
gggccctgtcagaagatttttcggt

SEQ ID NO: 39983 - DNA, 25 bp, Saccharomyces pastorianus
gataaccgtttctcagatggactaa

SEQ ID NO: 39984 - DNA, 25 bp, Saccharomyces pastorianus
gaccccgatcaaggccttaataaga

SEQ ID NO: 39985 - DNA, 25 bp, Saccharomyces pastorianus
taagactgaagaactctcccgttga

SEQ ID NO: 39986 - DNA, 25 bp, Saccharomyces pastorianus
gagtgactattgctcttcgttggag

SEQ ID NO: 39987 - DNA, 25 bp, Saccharomyces pastorianus
gataaacctttggaacctatcgagg

SEQ ID NO: 39988 - DNA, 25 bp, Saccharomyces pastorianus
taaattattgcctttgcctgatgaa

SEQ ID NO: 39989 - DNA, 25 bp, Saccharomyces pastorianus
aaaagttgacgagctcagcgctttg

SEQ ID NO: 39990 - DNA, 25 bp, Saccharomyces pastorianus
acggataccgttagctttgaaggat

SEQ ID NO: 39991 - DNA, 25 bp, Saccharomyces pastorianus
tcagtcattgactggccagatgagc

SEQ ID NO: 39992 - DNA, 25 bp, Saccharomyces pastorianus
gcggatgttctggaactggtttcac

SEQ ID NO: 39993 - DNA, 25 bp, Saccharomyces pastorianus
atccctgtggtgtttagtgccgaaa

SEQ ID NO: 39994 - DNA, 25 bp, Saccharomyces pastorianus
atgggattcctccaaacctatttcg

SEQ ID NO: 39995 - DNA, 25 bp, Saccharomyces pastorianus
gagtcggtagaccaacccaacggat

SEQ ID NO: 39996 - DNA, 25 bp, Saccharomyces pastorianus
tagtgccgaaaagccggatcccaaa

SEQ ID NO: 39997 - DNA, 25 bp, Saccharomyces pastorianus
agaggtatcctttctggtatccctg

SEQ ID NO: 39998 - DNA, 25 bp, Saccharomyces pastorianus
gcaaatcagccttcaatttcttcac

SEQ ID NO: 39999 - DNA, 25 bp, Saccharomyces pastorianus
cctaatcttcccctttgcaaagaat

SEQ ID NO: 40000 - DNA, 25 bp, Saccharomyces pastorianus
gaccattatcgcaaatcagccttca

SEQ ID NO: 40001 - DNA, 25 bp, Saccharomyces pastorianus
gtcttcaaaacgacacttttatctc

SEQ ID NO: 40002 - DNA, 25 bp, Saccharomyces pastorianus
gaactaatcgtcttcaaaacgacac

SEQ ID NO: 40003 - DNA, 25 bp, Saccharomyces pastorianus
aactctcgttttatagaactaatcg

SEQ ID NO: 40004 - DNA, 25 bp, Saccharomyces pastorianus
gatgactttagattgaccattatcg

SEQ ID NO: 40005 - DNA, 25 bp, Saccharomyces pastorianus
ctctttttcaagaagcgcataccta

SEQ ID NO: 40006 - DNA, 25 bp, Saccharomyces pastorianus
tcaatttcttcacaatactacgtag

SEQ ID NO: 40007 - DNA, 25 bp, Saccharomyces pastorianus
aaccacagatttgaatcatgatgac

SEQ ID NO: 40008 - DNA, 25 bp, Saccharomyces pastorianus
tactacgtagataaaaactctcgtt

SEQ ID NO: 40009 - DNA, 25 bp, Saccharomyces pastorianus
gaatcccataatcgttctaatgcaa

SEQ ID NO: 40010 - DNA, 25 bp, Saccharomyces pastorianus
ggtcttggaccatctaaggaatcga

SEQ ID NO: 40011 - DNA, 25 bp, Saccharomyces pastorianus
aaaggatatctttgctaatgcggga

SEQ ID NO: 40012 - DNA, 25 bp, Saccharomyces pastorianus
aaacgtttcacgagccaattcgaga

SEQ ID NO: 40013 - DNA, 25 bp, Saccharomyces pastorianus
gtattccaaaaacatcttcctccaa

SEQ ID NO: 40014 - DNA, 25 bp, Saccharomyces pastorianus
ggctcttcagcagatgaatcccata

SEQ ID NO: 40015 - DNA, 25 bp, Saccharomyces pastorianus
aaattcggatatggcgtcaggtctt

SEQ ID NO: 40016 - DNA, 25 bp, Saccharomyces pastorianus
aaggtcgaatagttcttcttcttca

SEQ ID NO: 40017 - DNA, 25 bp, Saccharomyces pastorianus
cgagattcttctgaccaacgtatgt

SEQ ID NO: 40018 - DNA, 25 bp, Saccharomyces pastorianus
gagacggttctcaatagtggactac

SEQ ID NO: 40019 - DNA, 25 bp, Saccharomyces pastorianus
atcttcttcagatggctcttcagca

SEQ ID NO: 40020 - DNA, 25 bp, Saccharomyces pastorianus
agaaaccttgttgtgatgacggaaa

SEQ ID NO: 40021 - DNA, 25 bp, Saccharomyces pastorianus
gacgacttcaaaactgcctctttat

SEQ ID NO: 40022 - DNA, 25 bp, Saccharomyces pastorianus
agcgcaaaagtcttctctcttttct

SEQ ID NO: 40023 - DNA, 25 bp, Saccharomyces pastorianus
aagtaccatgcaagtgtcagccaaa

SEQ ID NO: 40024 - DNA, 25 bp, Saccharomyces pastorianus
agttgtttccttgaagggctggcct

SEQ ID NO: 40025 - DNA, 25 bp, Saccharomyces pastorianus
tggaacttgctagcggacgacttca

SEQ ID NO: 40026 - DNA, 25 bp, Saccharomyces pastorianus
gatgctactgattttgattctgttt

SEQ ID NO: 40027 - DNA, 25 bp, Saccharomyces pastorianus
aactggaagttcaacgcctggtaga

SEQ ID NO: 40028 - DNA, 25 bp, Saccharomyces pastorianus
aagacaggtaactcatcagatgcta

SEQ ID NO: 40029 - DNA, 25 bp, Saccharomyces pastorianus
ttatccaacttgaagctcctttctg

SEQ ID NO: 40030 - DNA, 25 bp, Saccharomyces pastorianus
aaagaaaacctctccatcactgcta

SEQ ID NO: 40031 - DNA, 25 bp, Saccharomyces pastorianus
tcacagcattttacgatccagggat

SEQ ID NO: 40032 - DNA, 25 bp, Saccharomyces pastorianus
tggcgcttccctgaaatggcaatca

SEQ ID NO: 40033 - DNA, 25 bp, Saccharomyces pastorianus
gcaccgtcagtgttaccaagtacca

SEQ ID NO: 40034 - DNA, 25 bp, Saccharomyces pastorianus
agacccgacgagctattccgtaaat

SEQ ID NO: 40035 - DNA, 25 bp, Saccharomyces pastorianus
gtagtgatgatgatggcgcttccct

SEQ ID NO: 40036 - DNA, 25 bp, Saccharomyces pastorianus
tagcgaagaatcacgtagacccgac

SEQ ID NO: 40037 - DNA, 25 bp, Saccharomyces pastorianus
aaatcgcaccaatctacatgcaccg

SEQ ID NO: 40038 - DNA, 25 bp, Saccharomyces pastorianus
gaaaatgtaagttcacacactccta

SEQ ID NO: 40039 - DNA, 25 bp, Saccharomyces pastorianus
gacatcgttgattcttcagtggaca

SEQ ID NO: 40040 - DNA, 25 bp, Saccharomyces pastorianus
gacggcgatatagcatccgggttta

SEQ ID NO: 40041 - DNA, 25 bp, Saccharomyces pastorianus
aaacttgaggatcccgaagacatcg

SEQ ID NO: 40042 - DNA, 25 bp, Saccharomyces pastorianus
aactgttaagtgatcctctcgagaa

SEQ ID NO: 40043 - DNA, 25 bp, Saccharomyces pastorianus
ggccctcacagaaaaccagattgca

SEQ ID NO: 40044 - DNA, 25 bp, Saccharomyces pastorianus
tcaggatgaaagactggccctcaca

SEQ ID NO: 40045 - DNA, 25 bp, Saccharomyces pastorianus
aatgggaagcgcagcttctaagcaa

SEQ ID NO: 40046 - DNA, 25 bp, Saccharomyces pastorianus
aggtgtcacggcatatagagtaaat

SEQ ID NO: 40047 - DNA, 25 bp, Saccharomyces pastorianus
gcactcaataataccaactcgcgaa

SEQ ID NO: 40048 - DNA, 25 bp, Saccharomyces pastorianus
gggaatgtactcaaacctaatgaag

SEQ ID NO: 40049 - DNA, 25 bp, Saccharomyces pastorianus
gaattgcaaggctttcaggatgaaa

SEQ ID NO: 40050 - DNA, 25 bp, Saccharomyces pastorianus
ttaccaatactttttcctgaagatg

SEQ ID NO: 40051 - DNA, 25 bp, Saccharomyces pastorianus
tgaagcggttattacaccgttacca

SEQ ID NO: 40052 - DNA, 25 bp, Saccharomyces pastorianus
gaagaggctttaggtgtcacggcat

SEQ ID NO: 40053 - DNA, 25 bp, Saccharomyces pastorianus
gggtggtcctcactatcacagtcgt

SEQ ID NO: 40054 - DNA, 25 bp, Saccharomyces pastorianus
ggcattgttgtttagttttttcctg

SEQ ID NO: 40055 - DNA, 25 bp, Saccharomyces pastorianus
ttttttcctgttcctggacttgata

SEQ ID NO: 40056 - DNA, 25 bp, Saccharomyces pastorianus
ggccgcaagcgttacacagaacagt

SEQ ID NO: 40057 - DNA, 25 bp, Saccharomyces pastorianus
caccagttgtgagcagccgtttttt

SEQ ID NO: 40058 - DNA, 25 bp, Saccharomyces pastorianus
gacccgctaaccatgaatttttcca

SEQ ID NO: 40059 - DNA, 25 bp, Saccharomyces pastorianus
gttttaacggtgaagcagttctggc

SEQ ID NO: 40060 - DNA, 25 bp, Saccharomyces pastorianus
tacctttgggttattactgggcagc

SEQ ID NO: 40061 - DNA, 25 bp, Saccharomyces pastorianus
tttcaaactaatgggccttggctcg

SEQ ID NO: 40062 - DNA, 25 bp, Saccharomyces pastorianus
ttggctcgccatgcaatttcaggaa

SEQ ID NO: 40063 - DNA, 25 bp, Saccharomyces pastorianus
aacagtaccgtgttcatctcttctc

SEQ ID NO: 40064 - DNA, 25 bp, Saccharomyces pastorianus
aagggccttgagtcgctgaccaacg

SEQ ID NO: 40065 - DNA, 25 bp, Saccharomyces pastorianus
gagagaggttcgtgtccggaccaac

SEQ ID NO: 40066 - DNA, 25 bp, Saccharomyces pastorianus
gagattggttcaagacctcctggcg

SEQ ID NO: 40067 - DNA, 25 bp, Saccharomyces pastorianus
tgttcccgctgcaatcgttgagaga

SEQ ID NO: 40068 - DNA, 25 bp, Saccharomyces pastorianus
ctcctggcgtcttggttgtaggtaa

SEQ ID NO: 40069 - DNA, 25 bp, Saccharomyces pastorianus
gtgacgtcgcagatcaagtgctcat

SEQ ID NO: 40070 - DNA, 25 bp, Saccharomyces pastorianus
gtgctctgccaaaaatccctgagtt

SEQ ID NO: 40071 - DNA, 25 bp, Saccharomyces pastorianus
atcgggccaacgttctaatcacaga

SEQ ID NO: 40072 - DNA, 25 bp, Saccharomyces pastorianus
tgctcatatgcactgggaccggtag

SEQ ID NO: 40073 - DNA, 25 bp, Saccharomyces pastorianus
catacatctttggtcgtggtggcga

SEQ ID NO: 40074 - DNA, 25 bp, Saccharomyces pastorianus
cacagtgttcttgatggcgttgcat

SEQ ID NO: 40075 - DNA, 25 bp, Saccharomyces pastorianus
gtgtcccctgttatattttgcgtga

SEQ ID NO: 40076 - DNA, 25 bp, Saccharomyces pastorianus
atgatatcgatgctcttctaaaaga

SEQ ID NO: 40077 - DNA, 25 bp, Saccharomyces pastorianus
aacgaattatctggccaatggcacc

SEQ ID NO: 40078 - DNA, 25 bp, Saccharomyces pastorianus
aattgtttcctatgcaagaccgcga

SEQ ID NO: 40079 - DNA, 25 bp, Saccharomyces pastorianus
gcgaaatcccgttgtgcggtaaaca

SEQ ID NO: 40080 - DNA, 25 bp, Saccharomyces pastorianus
gccaatggcaccgtgaatgtttcaa

SEQ ID NO: 40081 - DNA, 25 bp, Saccharomyces pastorianus
ggacgccgataattctagaccgact

SEQ ID NO: 40082 - DNA, 25 bp, Saccharomyces pastorianus
aattcaataagcgtgtcccctgtta

SEQ ID NO: 40083 - DNA, 25 bp, Saccharomyces pastorianus
cccaccaacgggactgtagaatata

SEQ ID NO: 40084 - DNA, 25 bp, Saccharomyces pastorianus
aagaccgcgattaccaacgattatt

SEQ ID NO: 40085 - DNA, 25 bp, Saccharomyces pastorianus
tgcgtgatacgccatactgtcaaaa

SEQ ID NO: 40086 - DNA, 25 bp, Saccharomyces pastorianus
ctggaggtagtcgttgtgcattaaa

SEQ ID NO: 40087 - DNA, 25 bp, Saccharomyces pastorianus
atgctagccaccaagatgtctcaac

SEQ ID NO: 40088 - DNA, 25 bp, Saccharomyces pastorianus
atcatttcatttctggttacacctc

SEQ ID NO: 40089 - DNA, 25 bp, Saccharomyces pastorianus
tattaacttgtgacgcttctggtgt

SEQ ID NO: 40090 - DNA, 25 bp, Saccharomyces pastorianus
ggtgtcactgaacctgaaccaacat

SEQ ID NO: 40091 - DNA, 25 bp, Saccharomyces pastorianus
gaaccaacattttcttcctgtttcg

SEQ ID NO: 40092 - DNA, 25 bp, Saccharomyces pastorianus
taatctccaagttcctaccaaggtc

SEQ ID NO: 40093 - DNA, 25 bp, Saccharomyces pastorianus
tcccgtttctaaactgactcctgaa

SEQ ID NO: 40094 - DNA, 25 bp, Saccharomyces pastorianus
tataaaggcgccgttaccaacttgg

SEQ ID NO: 40095 - DNA, 25 bp, Saccharomyces pastorianus
gttccggctgaacttttgaatccag

SEQ ID NO: 40096 - DNA, 25 bp, Saccharomyces pastorianus
gattccatgtttggccgattcccat

SEQ ID NO: 40097 - DNA, 25 bp, Saccharomyces pastorianus
gaaaacttcaagagcccacgtgcac

SEQ ID NO: 40098 - DNA, 25 bp, Saccharomyces pastorianus
gtttaccacggtgttgccgaacaag

SEQ ID NO: 40099 - DNA, 25 bp, Saccharomyces pastorianus
gtccctgcagtttctattccagtga

SEQ ID NO: 40100 - DNA, 25 bp, Saccharomyces pastorianus
aggcaccaacagaccattcatatat

SEQ ID NO: 40101 - DNA, 25 bp, Saccharomyces pastorianus
agatgcagcccatttgttcagactc

SEQ ID NO: 40102 - DNA, 25 bp, Saccharomyces pastorianus
ccacgtgcacttaccgaggaaactg

SEQ ID NO: 40103 - DNA, 25 bp, Saccharomyces pastorianus
gcattatggttctttttatcgcaag

SEQ ID NO: 40104 - DNA, 25 bp, Saccharomyces pastorianus
gagaggttttggatgtccctgcagt

SEQ ID NO: 40105 - DNA, 25 bp, Saccharomyces pastorianus
tgaggtgtgtcaagttggcgccctc

SEQ ID NO: 40106 - DNA, 25 bp, Saccharomyces pastorianus
tatactagtggcacgttcgggctac

SEQ ID NO: 40107 - DNA, 25 bp, Saccharomyces pastorianus
gaagcggtcgagtttaccacggtgt

SEQ ID NO: 40108 - DNA, 25 bp, Saccharomyces pastorianus
gagaagttttgaacgtccctgcagt

SEQ ID NO: 40109 - DNA, 25 bp, Saccharomyces pastorianus
agatgtggctcgtttgttcagactc

SEQ ID NO: 40110 - DNA, 25 bp, Saccharomyces pastorianus
tgagatgtgtcaggttggcgccttc

SEQ ID NO: 40111 - DNA, 25 bp, Saccharomyces pastorianus
agggaccaacagaccatttctatat

SEQ ID NO: 40112 - DNA, 25 bp, Saccharomyces pastorianus
accacggtatcgctgaacaaggaat

SEQ ID NO: 40113 - DNA, 25 bp, Saccharomyces pastorianus
ggtcctttttatcgcaacggatggt

SEQ ID NO: 40114 - DNA, 25 bp, Saccharomyces pastorianus
aaggccaaaacgtctggtccgctgt

SEQ ID NO: 40115 - DNA, 25 bp, Saccharomyces pastorianus
ggagacaaagcgttcgttcgagtgt

SEQ ID NO: 40116 - DNA, 25 bp, Saccharomyces pastorianus
aatgatacgtttgggctacgctcag

SEQ ID NO: 40117 - DNA, 25 bp, Saccharomyces pastorianus
taagcggccgagtttaccacggtat

SEQ ID NO: 40118 - DNA, 25 bp, Saccharomyces pastorianus
tccctgcagtctctatttctgtgaa

SEQ ID NO: 40119 - DNA, 25 bp, Saccharomyces pastorianus
gccgtaaacaggatctcagggaatt

SEQ ID NO: 40120 - DNA, 25 bp, Saccharomyces pastorianus
cagatttgacagcttggcctcggaa

SEQ ID NO: 40121 - DNA, 25 bp, Saccharomyces pastorianus
gcaaaaactgttccaggctccaaac

SEQ ID NO: 40122 - DNA, 25 bp, Saccharomyces pastorianus
aaacctttgtccgtacatactctgt

SEQ ID NO: 40123 - DNA, 25 bp, Saccharomyces pastorianus
gcttggcctcggaatgtgacattgg

SEQ ID NO: 40124 - DNA, 25 bp, Saccharomyces pastorianus
gctgaaatttttggtgttgccccta

SEQ ID NO: 40125 - DNA, 25 bp, Saccharomyces pastorianus
aacaagacagtcacaacgaacgcaa

SEQ ID NO: 40126 - DNA, 25 bp, Saccharomyces pastorianus
aggcgaagcctttatcagatttgac

SEQ ID NO: 40127 - DNA, 25 bp, Saccharomyces pastorianus
cgaatttcacacaggcgaagccttt

SEQ ID NO: 40128 - DNA, 25 bp, Saccharomyces pastorianus
tggtaaaggtagcttccgccaagaa

SEQ ID NO: 40129 - DNA, 25 bp, Saccharomyces pastorianus
gaaaccgttgagaatctttgcattt

SEQ ID NO: 40130 - DNA, 25 bp, Saccharomyces pastorianus
ggcactacacaaggactcgctgtta

SEQ ID NO: 40131 - DNA, 25 bp, Saccharomyces pastorianus
gacgtgggaactctggcgtatccaa

SEQ ID NO: 40132 - DNA, 25 bp, Saccharomyces pastorianus
gacaggtccttgtccgtatacaaat

SEQ ID NO: 40133 - DNA, 25 bp, Saccharomyces pastorianus
ttactagcgctttactcgctggatg

SEQ ID NO: 40134 - DNA, 25 bp, Saccharomyces pastorianus
ggacgtgtacagtttatcatcgcct

SEQ ID NO: 40135 - DNA, 25 bp, Saccharomyces pastorianus
aagctccagattccctacgggagaa

SEQ ID NO: 40136 - DNA, 25 bp, Saccharomyces pastorianus
ggcagcgttgcggttgttttaaaga

SEQ ID NO: 40137 - DNA, 25 bp, Saccharomyces pastorianus
tatccaacttacactcttccagaga

SEQ ID NO: 40138 - DNA, 25 bp, Saccharomyces pastorianus
aggccactacgctacatttgcagag

SEQ ID NO: 40139 - DNA, 25 bp, Saccharomyces pastorianus
atttcaatcttacacggacgactcc

SEQ ID NO: 40140 - DNA, 25 bp, Saccharomyces pastorianus
agtggcctgctttgacctgaggaaa

SEQ ID NO: 40141 - DNA, 25 bp, Saccharomyces pastorianus
tagtcagggaaagttcggtcttagc

SEQ ID NO: 40142 - DNA, 25 bp, Saccharomyces pastorianus
gacgcgctggtaccaagaagagaca

SEQ ID NO: 40143 - DNA, 25 bp, Saccharomyces pastorianus
aacaccgttaagtgacgatgtcgat

SEQ ID NO: 40144 - DNA, 25 bp, Saccharomyces pastorianus
gagacacctcattatctgaatcttc

SEQ ID NO: 40145 - DNA, 25 bp, Saccharomyces pastorianus
gaagtgtaacaactactcaggtgct

SEQ ID NO: 40146 - DNA, 25 bp, Saccharomyces pastorianus
gagttgtcaataccttattaaccga

SEQ ID NO: 40147 - DNA, 25 bp, Saccharomyces pastorianus
gggtatttttgtgatcggtgcaaca

SEQ ID NO: 40148 - DNA, 25 bp, Saccharomyces pastorianus
actcaggtgctgatttggctgcttt

SEQ ID NO: 40149 - DNA, 25 bp, Saccharomyces pastorianus
gacctggtagattagacaagacttt

SEQ ID NO: 40150 - DNA, 25 bp, Saccharomyces pastorianus
ctttgatgaattggacgcgctggta

SEQ ID NO: 40151 - DNA, 25 bp, Saccharomyces pastorianus
gaaattcaatccgtccttgataacg

SEQ ID NO: 40152 - DNA, 25 bp, Saccharomyces pastorianus
ggcccaacaggtccttaacgatgaa

SEQ ID NO: 40153 - DNA, 25 bp, Saccharomyces pastorianus
ttggcccaacaggtccttaacgatg

SEQ ID NO: 40154 - DNA, 25 bp, Saccharomyces pastorianus
tgccgaaagtgccttggcccaacag

SEQ ID NO: 40155 - DNA, 25 bp, Saccharomyces pastorianus
gcatttgagcaccttgccgaaagtg

SEQ ID NO: 40156 - DNA, 25 bp, Saccharomyces pastorianus
ccttgccgaaagtgccttggcccaa

SEQ ID NO: 40157 - DNA, 25 bp, Saccharomyces pastorianus
agcaccttgccgaaagtgccttggc

SEQ ID NO: 40158 - DNA, 25 bp, Saccharomyces pastorianus
cgaaagtgccttggcccaacaggtc

SEQ ID NO: 40159 - DNA, 25 bp, Saccharomyces pastorianus
atgcatttgagcaccttgccgaaag

SEQ ID NO: 40160 - DNA, 25 bp, Saccharomyces pastorianus
gagcaccttgccgaaagtgccttgg

SEQ ID NO: 40161 - DNA, 25 bp, Saccharomyces pastorianus
caacaggtccttaacgatgaagcga

SEQ ID NO: 40162 - DNA, 25 bp, Saccharomyces pastorianus
tttgagcaccttgccgaaagtgcct

SEQ ID NO: 40163 - DNA, 25 bp, Saccharomyces pastorianus
gactcaccttcgaaattactatctg

SEQ ID NO: 40164 - DNA, 25 bp, Saccharomyces pastorianus
tacggtacggaccaatttagatcct

SEQ ID NO: 40165 - DNA, 25 bp, Saccharomyces pastorianus
gcacacttaaagtctcatttggaga

SEQ ID NO: 40166 - DNA, 25 bp, Saccharomyces pastorianus
agatcctttcaatcgttactcagag

SEQ ID NO: 40167 - DNA, 25 bp, Saccharomyces pastorianus
cgacaccgtgttggacagtgataaa

SEQ ID NO: 40168 - DNA, 25 bp, Saccharomyces pastorianus
gagcaatttggccattattcctcag

SEQ ID NO: 40169 - DNA, 25 bp, Saccharomyces pastorianus
cgaggctacggcttcagtggacatg

SEQ ID NO: 40170 - DNA, 25 bp, Saccharomyces pastorianus
gattttggttcttgacgaggctacg

SEQ ID NO: 40171 - DNA, 25 bp, Saccharomyces pastorianus
ttggcaagagcgttattgagtcact

SEQ ID NO: 40172 - DNA, 25 bp, Saccharomyces pastorianus
tatatccgagttaggcttatttgac

SEQ ID NO: 40173 - DNA, 25 bp, Saccharomyces pastorianus
aggccattgaactagcacacttaaa

SEQ ID NO: 40174 - DNA, 25 bp, Saccharomyces pastorianus
gataatgtccaagatcttaccaaag

SEQ ID NO: 40175 - DNA, 25 bp, Saccharomyces pastorianus
ggatttcataccttacctgattcaa

SEQ ID NO: 40176 - DNA, 25 bp, Saccharomyces pastorianus
gaaactaccctttgtcttagattct

SEQ ID NO: 40177 - DNA, 25 bp, Saccharomyces pastorianus
aatcgtcgttgccattagagcctat

SEQ ID NO: 40178 - DNA, 25 bp, Saccharomyces pastorianus
ggataaaaaccatgccttgaacctg

SEQ ID NO: 40179 - DNA, 25 bp, Saccharomyces pastorianus
ggatcaatttgccaattacgttatt

SEQ ID NO: 40180 - DNA, 25 bp, Saccharomyces pastorianus
cattcctatgggtgtagagtgatcc

SEQ ID NO: 40181 - DNA, 25 bp, Saccharomyces pastorianus
gaagtccattctttatggctccaaa

SEQ ID NO: 40182 - DNA, 25 bp, Saccharomyces pastorianus
gcataaattcgcctccaacgtagtg

SEQ ID NO: 40183 - DNA, 25 bp, Saccharomyces pastorianus
tgccttgaacctggaagacgattcc

SEQ ID NO: 40184 - DNA, 25 bp, Saccharomyces pastorianus
cttagattctttgacgggccacatt

SEQ ID NO: 40185 - DNA, 25 bp, Saccharomyces pastorianus
aattgtcactggttcatacgataag

SEQ ID NO: 40186 - DNA, 25 bp, Saccharomyces pastorianus
gaaacaaatcgtgggcacagtgcac

SEQ ID NO: 40187 - DNA, 25 bp, Saccharomyces pastorianus
gatttctccccaactggtgacgaaa

SEQ ID NO: 40188 - DNA, 25 bp, Saccharomyces pastorianus
gaaacttatcgcgttcgttgactgt

SEQ ID NO: 40189 - DNA, 25 bp, Saccharomyces pastorianus
gaatgcagcatgtcttccaagtcaa

SEQ ID NO: 40190 - DNA, 25 bp, Saccharomyces pastorianus
aaggacatgccgtttatctctgaaa

SEQ ID NO: 40191 - DNA, 25 bp, Saccharomyces pastorianus
ataacgcttactactacgacatgag

SEQ ID NO: 40192 - DNA, 25 bp, Saccharomyces pastorianus
acacagacacgtgccagaagtcatt

SEQ ID NO: 40193 - DNA, 25 bp, Saccharomyces pastorianus
aggagaggttcagacatatgccaga

SEQ ID NO: 40194 - DNA, 25 bp, Saccharomyces pastorianus
gtgatggatgtcgatttctccccaa

SEQ ID NO: 40195 - DNA, 25 bp, Saccharomyces pastorianus
taacaccaaccatggacattccaga

SEQ ID NO: 40196 - DNA, 25 bp, Saccharomyces pastorianus
aaactaccaagcatatggcctcgta

SEQ ID NO: 40197 - DNA, 25 bp, Saccharomyces pastorianus
cgattgtgaggtttcaagcatgctt

SEQ ID NO: 40198 - DNA, 25 bp, Saccharomyces pastorianus
atgcggatggtgattctggttactt

SEQ ID NO: 40199 - DNA, 25 bp, Saccharomyces pastorianus
agacaacatccttcattcctttaat

SEQ ID NO: 40200 - DNA, 25 bp, Saccharomyces pastorianus
aagcatgcttgacggtctctttaac

SEQ ID NO: 40201 - DNA, 25 bp, Saccharomyces pastorianus
aggtgcgttgaaccgagattccaat

SEQ ID NO: 40202 - DNA, 25 bp, Saccharomyces pastorianus
acaggcgatgatttcccaatttttt

SEQ ID NO: 40203 - DNA, 25 bp, Saccharomyces pastorianus
tgccgcccttcctataaatttggta

SEQ ID NO: 40204 - DNA, 25 bp, Saccharomyces pastorianus
tgttactcaattatccaaagcctgg

SEQ ID NO: 40205 - DNA, 25 bp, Saccharomyces pastorianus
aaaattggcagcgttattgaatacc

SEQ ID NO: 40206 - DNA, 25 bp, Saccharomyces pastorianus
ggagatctcctgatttaccagatta

SEQ ID NO: 40207 - DNA, 25 bp, Saccharomyces pastorianus
tacctaccctagaatacttatcgag

SEQ ID NO: 40208 - DNA, 25 bp, Saccharomyces pastorianus
gttgcatttcattttccatggttta

SEQ ID NO: 40209 - DNA, 25 bp, Saccharomyces pastorianus
ttacttctccttcaactatctgttt

SEQ ID NO: 40210 - DNA, 25 bp, Saccharomyces pastorianus
gattgttgtctttatccttactgtt

SEQ ID NO: 40211 - DNA, 25 bp, Saccharomyces pastorianus
atccttactgttatggcacattcca

SEQ ID NO: 40212 - DNA, 25 bp, Saccharomyces pastorianus
gtcataccgtttgaagttcgatctt

SEQ ID NO: 40213 - DNA, 25 bp, Saccharomyces pastorianus
gatcgaaacctcaacatttacctac

SEQ ID NO: 40214 - DNA, 25 bp, Saccharomyces pastorianus
actgggactcttcactctttttgat

SEQ ID NO: 40215 - DNA, 25 bp, Saccharomyces pastorianus
tatgcaggcatttacttcatggaat

SEQ ID NO: 40216 - DNA, 25 bp, Saccharomyces pastorianus
cagttttgggttgtattggcatcat

SEQ ID NO: 40217 - DNA, 25 bp, Saccharomyces pastorianus
tggaattttgcctactgggactctt

SEQ ID NO: 40218 - DNA, 25 bp, Saccharomyces pastorianus
atactcccctagacgtgctaataga

SEQ ID NO: 40219 - DNA, 25 bp, Saccharomyces pastorianus
cggcaaaatacctgctgtacctttt

SEQ ID NO: 40220 - DNA, 25 bp, Saccharomyces pastorianus
aaacagtccaagtctttcgtcatcg

SEQ ID NO: 40221 - DNA, 25 bp, Saccharomyces pastorianus
taccaagtcccgtaaaatcctcaag

SEQ ID NO: 40222 - DNA, 25 bp, Saccharomyces pastorianus
agatgggtctccaacacgagcgaaa

SEQ ID NO: 40223 - DNA, 25 bp, Saccharomyces pastorianus
gaggccatgaaatcgcattacagca

SEQ ID NO: 40224 - DNA, 25 bp, Saccharomyces pastorianus
agtggaccacattgacttcggcaaa

SEQ ID NO: 40225 - DNA, 25 bp, Saccharomyces pastorianus
ttcgtcatcgctgggatagggctac

SEQ ID NO: 40226 - DNA, 25 bp, Saccharomyces pastorianus
agcgcggattcttctaaagccgatc

SEQ ID NO: 40227 - DNA, 25 bp, Saccharomyces pastorianus
aaaacttccacgataccgggctcag

SEQ ID NO: 40228 - DNA, 25 bp, Saccharomyces pastorianus
agcgaaacccataagatactcccct

SEQ ID NO: 40229 - DNA, 25 bp, Saccharomyces pastorianus
atgaaatacccgctgtggcaagtgg

SEQ ID NO: 40230 - DNA, 25 bp, Saccharomyces pastorianus
caattggctgaggaagaccgtcttc

SEQ ID NO: 40231 - DNA, 25 bp, Saccharomyces pastorianus
ggtaagttcatcaaccttctggatt

SEQ ID NO: 40232 - DNA, 25 bp, Saccharomyces pastorianus
gacttcctcatgcttagactggcaa

SEQ ID NO: 40233 - DNA, 25 bp, Saccharomyces pastorianus
cagatgtcatcgtgccaaggtcaaa

SEQ ID NO: 40234 - DNA, 25 bp, Saccharomyces pastorianus
gaggcgtttctcaatattcgtgact

SEQ ID NO: 40235 - DNA, 25 bp, Saccharomyces pastorianus
ggtgaggaccctgctcgagtaaaat

SEQ ID NO: 40236 - DNA, 25 bp, Saccharomyces pastorianus
aaccctattaccgtctagtgcagat

SEQ ID NO: 40237 - DNA, 25 bp, Saccharomyces pastorianus
atctcttgcggtgtatagcatacca

SEQ ID NO: 40238 - DNA, 25 bp, Saccharomyces pastorianus
gaccgtcttctcaaggtaagttcat

SEQ ID NO: 40239 - DNA, 25 bp, Saccharomyces pastorianus
gcgtatcaggatacacccttgcaac

SEQ ID NO: 40240 - DNA, 25 bp, Saccharomyces pastorianus
ccaaccattcttcatattcagcaac

SEQ ID NO: 40241 - DNA, 25 bp, Saccharomyces pastorianus
gaaataccacttgcatttgccagga

SEQ ID NO: 40242 - DNA, 25 bp, Saccharomyces pastorianus
agggttgcacttctggttctaaaag

SEQ ID NO: 40243 - DNA, 25 bp, Saccharomyces pastorianus
taacgccgccattactactaaattg

SEQ ID NO: 40244 - DNA, 25 bp, Saccharomyces pastorianus
taatgaagtcaccacgcctctaatg

SEQ ID NO: 40245 - DNA, 25 bp, Saccharomyces pastorianus
aatgtcatcttcctctagaaccaac

SEQ ID NO: 40246 - DNA, 25 bp, Saccharomyces pastorianus
aaagctcctgtgtattcctaataga

SEQ ID NO: 40247 - DNA, 25 bp, Saccharomyces pastorianus
aacttcacttgattcctgctaacga

SEQ ID NO: 40248 - DNA, 25 bp, Saccharomyces pastorianus
atcggagttaccttagctgtttcat

SEQ ID NO: 40249 - DNA, 25 bp, Saccharomyces pastorianus
gaaacgctatacaaaggcccaggga

SEQ ID NO: 40250 - DNA, 25 bp, Saccharomyces pastorianus
aatttgctagactgtaacgccgcca

SEQ ID NO: 40251 - DNA, 25 bp, Saccharomyces pastorianus
aaggcggtttgcatttaattttcat

SEQ ID NO: 40252 - DNA, 25 bp, Saccharomyces pastorianus
aagctctcgtttctggttgcaacga

SEQ ID NO: 40253 - DNA, 25 bp, Saccharomyces pastorianus
ggatttacaattacctgtcctatct

SEQ ID NO: 40254 - DNA, 25 bp, Saccharomyces pastorianus
aaaccggtgaacttacattggctga

SEQ ID NO: 40255 - DNA, 25 bp, Saccharomyces pastorianus
gaaaccaaccacacattccaataat

SEQ ID NO: 40256 - DNA, 25 bp, Saccharomyces pastorianus
gcactgattgattttgatggctgga

SEQ ID NO: 40257 - DNA, 25 bp, Saccharomyces pastorianus
ttctcaggctccagtgatcatcgta

SEQ ID NO: 40258 - DNA, 25 bp, Saccharomyces pastorianus
tgaccgcatccaattcccaaatgga

SEQ ID NO: 40259 - DNA, 25 bp, Saccharomyces pastorianus
tgcaacgactacctgacgaaaccgg

SEQ ID NO: 40260 - DNA, 25 bp, Saccharomyces pastorianus
ttgcggcaagttttctcaggctcca

SEQ ID NO: 40261 - DNA, 25 bp, Saccharomyces pastorianus
gtgatcatcgtagcactgaccgcat

SEQ ID NO: 40262 - DNA, 25 bp, Saccharomyces pastorianus
attcctggtcaagtcaatggttccg

SEQ ID NO: 40263 - DNA, 25 bp, Saccharomyces pastorianus
gggaagtctgctacttctttcttaa

SEQ ID NO: 40264 - DNA, 25 bp, Saccharomyces pastorianus
ggatctttattttgaccaggctatg

SEQ ID NO: 40265 - DNA, 25 bp, Saccharomyces pastorianus
ggaaataccgctaactctatcgaag

SEQ ID NO: 40266 - DNA, 25 bp, Saccharomyces pastorianus
gtggttcgccatttgtggctaccaa

SEQ ID NO: 40267 - DNA, 25 bp, Saccharomyces pastorianus
tttttaaccctatacttcacagccg

SEQ ID NO: 40268 - DNA, 25 bp, Saccharomyces pastorianus
atgttagccaaccatccagataagg

SEQ ID NO: 40269 - DNA, 25 bp, Saccharomyces pastorianus
tatcgaagcaccacaactacctatt

SEQ ID NO: 40270 - DNA, 25 bp, Saccharomyces pastorianus
atggttccgcaaatgtcgatcttgg

SEQ ID NO: 40271 - DNA, 25 bp, Saccharomyces pastorianus
tcacagccggtgcatacaaatcgat

SEQ ID NO: 40272 - DNA, 25 bp, Saccharomyces pastorianus
gatcttggtgggtctggcttgaaca

SEQ ID NO: 40273 - DNA, 25 bp, Saccharomyces pastorianus
gagtctctatgagtatcccagtagg

SEQ ID NO: 40274 - DNA, 25 bp, Saccharomyces pastorianus
gaaatcgcagcctacgtgaaacgta

SEQ ID NO: 40275 - DNA, 25 bp, Saccharomyces pastorianus
aggacccgcttgtggagccgtacag

SEQ ID NO: 40276 - DNA, 25 bp, Saccharomyces pastorianus
gatttgaaccaggttgcgctacctt

SEQ ID NO: 40277 - DNA, 25 bp, Saccharomyces pastorianus
tgaacgtcgtaggtggagtctctat

SEQ ID NO: 40278 - DNA, 25 bp, Saccharomyces pastorianus
gtacagttagctcattggacgtctt

SEQ ID NO: 40279 - DNA, 25 bp, Saccharomyces pastorianus
cagtaggtgttataccgttgccaga

SEQ ID NO: 40280 - DNA, 25 bp, Saccharomyces pastorianus
gtccccgggtttagtgtatacaatg

SEQ ID NO: 40281 - DNA, 25 bp, Saccharomyces pastorianus
tggacgtctttatcttcgttacacc

SEQ ID NO: 40282 - DNA, 25 bp, Saccharomyces pastorianus
gacgatgacgacttgattccggctc

SEQ ID NO: 40283 - DNA, 25 bp, Saccharomyces pastorianus
atagaccgtgtttaccatgagtggc

SEQ ID NO: 40284 - DNA, 25 bp, Saccharomyces pastorianus
ggtcccaatggagaggtcacgttat

SEQ ID NO: 40285 - DNA, 25 bp, Saccharomyces pastorianus
gcaaagcgctacttcgatgagataa

SEQ ID NO: 40286 - DNA, 25 bp, Saccharomyces pastorianus
gaaaatgtccccagtgcgatatagt

SEQ ID NO: 40287 - DNA, 25 bp, Saccharomyces pastorianus
tccactctcatgttatatccggtaa

SEQ ID NO: 40288 - DNA, 25 bp, Saccharomyces pastorianus
aatcattgctaaacccgcttgagga

SEQ ID NO: 40289 - DNA, 25 bp, Saccharomyces pastorianus
ctgggtcctcacatacacatacaaa

SEQ ID NO: 40290 - DNA, 25 bp, Saccharomyces pastorianus
tgcctgcggtctcttctatagaaaa

SEQ ID NO: 40291 - DNA, 25 bp, Saccharomyces pastorianus
ggtcacgttatgcaatgcctgcggt

SEQ ID NO: 40292 - DNA, 25 bp, Saccharomyces pastorianus
aaatgggcctgcagctcaacaggat

SEQ ID NO: 40293 - DNA, 25 bp, Saccharomyces pastorianus
atccggtaataaagccactcctggg

SEQ ID NO: 40294 - DNA, 25 bp, Saccharomyces pastorianus
gcagtaaccggtgagagtctccact

SEQ ID NO: 40295 - DNA, 25 bp, Saccharomyces pastorianus
gacaagaaaacatggttccccgttg

SEQ ID NO: 40296 - DNA, 25 bp, Saccharomyces pastorianus
ctcgccagttcatatttcagtcaaa

SEQ ID NO: 40297 - DNA, 25 bp, Saccharomyces pastorianus
atgagagatttgatggttggcacca

SEQ ID NO: 40298 - DNA, 25 bp, Saccharomyces pastorianus
gttcattccaaagcaagatcgacta

SEQ ID NO: 40299 - DNA, 25 bp, Saccharomyces pastorianus
tgattccccatggttctttggtaga

SEQ ID NO: 40300 - DNA, 25 bp, Saccharomyces pastorianus
aaaatcctttgtacgactaatggca

SEQ ID NO: 40301 - DNA, 25 bp, Saccharomyces pastorianus
gtggctgtcgcctgaccaaaacaaa

SEQ ID NO: 40302 - DNA, 25 bp, Saccharomyces pastorianus
tggttccccgttgccaagaatgatg

SEQ ID NO: 40303 - DNA, 25 bp, Saccharomyces pastorianus
tttttcgtttctttcatatgtcatg

SEQ ID NO: 40304 - DNA, 25 bp, Saccharomyces pastorianus
gatcggaattttttattctcgccag

SEQ ID NO: 40305 - DNA, 25 bp, Saccharomyces pastorianus
gcgacaacctacatctaaatccgaa

SEQ ID NO: 40306 - DNA, 25 bp, Saccharomyces pastorianus
cggtgtgtttatgaactggtcccct

SEQ ID NO: 40307 - DNA, 25 bp, Saccharomyces pastorianus
gcaaccatgggtgtcttatcttttc

SEQ ID NO: 40308 - DNA, 25 bp, Saccharomyces pastorianus
cgactatgtgggttgttcgcacact

SEQ ID NO: 40309 - DNA, 25 bp, Saccharomyces pastorianus
aaatcattcaagtccctatggtggg

SEQ ID NO: 40310 - DNA, 25 bp, Saccharomyces pastorianus
gtggtcttctatggttcattcatcc

SEQ ID NO: 40311 - DNA, 25 bp, Saccharomyces pastorianus
tgatcacagcctcgattttaaccac

SEQ ID NO: 40312 - DNA, 25 bp, Saccharomyces pastorianus
gagcatttctttagcgctgggtgta

SEQ ID NO: 40313 - DNA, 25 bp, Saccharomyces pastorianus
actttctggcatttctttgtggttt

SEQ ID NO: 40314 - DNA, 25 bp, Saccharomyces pastorianus
gtgatcggtcactacagagctattt

SEQ ID NO: 40315 - DNA, 25 bp, Saccharomyces pastorianus
tatatggttgtttagccccgtcaca

SEQ ID NO: 40316 - DNA, 25 bp, Saccharomyces pastorianus
cattccaagtgcaagtcctgtccat

SEQ ID NO: 40317 - DNA, 25 bp, Saccharomyces pastorianus
gttgactggtgtcgccgcagaccaa

SEQ ID NO: 40318 - DNA, 25 bp, Saccharomyces pastorianus
atgttgactggtgtcgccgcagacc

SEQ ID NO: 40319 - DNA, 25 bp, Saccharomyces pastorianus
ctggtgtcgccgcagaccaagtcac

SEQ ID NO: 40320 - DNA, 25 bp, Saccharomyces pastorianus
ccatgttgactggtgtcgccgcaga

SEQ ID NO: 40321 - DNA, 25 bp, Saccharomyces pastorianus
ttatctccatccgatgaaagagtca

SEQ ID NO: 40322 - DNA, 25 bp, Saccharomyces pastorianus
actaccatgttgactggtgtcgccg

SEQ ID NO: 40323 - DNA, 25 bp, Saccharomyces pastorianus
taccatgttgactggtgtcgccgca

SEQ ID NO: 40324 - DNA, 25 bp, Saccharomyces pastorianus
catgttgactggtgtcgccgcagac

SEQ ID NO: 40325 - DNA, 25 bp, Saccharomyces pastorianus
ctaccatgttgactggtgtcgccgc

SEQ ID NO: 40326 - DNA, 25 bp, Saccharomyces pastorianus
tggtgtcgccgcagaccaagtcacc

SEQ ID NO: 40327 - DNA, 25 bp, Saccharomyces pastorianus
cactaccatgttgactggtgtcgcc

SEQ ID NO: 40328 - DNA, 25 bp, Saccharomyces pastorianus
gcacagttcattgtcatatcgttaa

SEQ ID NO: 40329 - DNA, 25 bp, Saccharomyces pastorianus
gaccctttttcggagggtgtcacat

SEQ ID NO: 40330 - DNA, 25 bp, Saccharomyces pastorianus
gactggcttcaatatcatttcaatg

SEQ ID NO: 40331 - DNA, 25 bp, Saccharomyces pastorianus
gaaacgtctcgattgtggctaacta

SEQ ID NO: 40332 - DNA, 25 bp, Saccharomyces pastorianus
attcagtgtcatgccgcctaaaaag

SEQ ID NO: 40333 - DNA, 25 bp, Saccharomyces pastorianus
gaattagcacagcagttggttggta

SEQ ID NO: 40334 - DNA, 25 bp, Saccharomyces pastorianus
cgctaggcgtttggccgagttcaaa

SEQ ID NO: 40335 - DNA, 25 bp, Saccharomyces pastorianus
ggtgtcacattcagtgtcatgccgc

SEQ ID NO: 40336 - DNA, 25 bp, Saccharomyces pastorianus
taacctgttatcttgatgccactaa

SEQ ID NO: 40337 - DNA, 25 bp, Saccharomyces pastorianus
cctactcccctttacgtaatggatg

SEQ ID NO: 40338 - DNA, 25 bp, Saccharomyces pastorianus
aaactttgagttccttggctctggt

SEQ ID NO: 40339 - DNA, 25 bp, Saccharomyces pastorianus
cgtcgtcactggtcaagctttggta

SEQ ID NO: 40340 - DNA, 25 bp, Saccharomyces pastorianus
gacatttacaaagagaccacccagg

SEQ ID NO: 40341 - DNA, 25 bp, Saccharomyces pastorianus
ggaactcactggctttagtcatgaa

SEQ ID NO: 40342 - DNA, 25 bp, Saccharomyces pastorianus
atttgtacagttcctggttccggat

SEQ ID NO: 40343 - DNA, 25 bp, Saccharomyces pastorianus
taatgtccagctggcttctttgcac

SEQ ID NO: 40344 - DNA, 25 bp, Saccharomyces pastorianus
agccccaaggtgctatgtacttatt

SEQ ID NO: 40345 - DNA, 25 bp, Saccharomyces pastorianus
atttgatggttcgtccaccagtgga

SEQ ID NO: 40346 - DNA, 25 bp, Saccharomyces pastorianus
aattagcctcaatctcattatgccc

SEQ ID NO: 40347 - DNA, 25 bp, Saccharomyces pastorianus
gcaattcaggaagcccatcatttgg

SEQ ID NO: 40348 - DNA, 25 bp, Saccharomyces pastorianus
aacattcttggcacctggtgttgaa

SEQ ID NO: 40349 - DNA, 25 bp, Saccharomyces pastorianus
tttgcactccacttcaaaaggtgtt

SEQ ID NO: 40350 - DNA, 25 bp, Saccharomyces pastorianus
gactggaccacgctgtttcaagtga

SEQ ID NO: 40351 - DNA, 25 bp, Saccharomyces pastorianus
gaacttgcgttgatgaccgtctttc

SEQ ID NO: 40352 - DNA, 25 bp, Saccharomyces pastorianus
acaggtctctggttgattccattcc

SEQ ID NO: 40353 - DNA, 25 bp, Saccharomyces pastorianus
tgcaagggcatacacgatttcgaac

SEQ ID NO: 40354 - DNA, 25 bp, Saccharomyces pastorianus
attggctcacatttacaccagtctg

SEQ ID NO: 40355 - DNA, 25 bp, Saccharomyces pastorianus
gattctacatgcgtgcttgtgcaag

SEQ ID NO: 40356 - DNA, 25 bp, Saccharomyces pastorianus
ttcgagcgacgccatacaagattct

SEQ ID NO: 40357 - DNA, 25 bp, Saccharomyces pastorianus
gggaaactggtatccatggcctcaa

SEQ ID NO: 40358 - DNA, 25 bp, Saccharomyces pastorianus
agtctgtttgtggagaacccgccgt

SEQ ID NO: 40359 - DNA, 25 bp, Saccharomyces pastorianus
agaagcactaccatttcctgctgag

SEQ ID NO: 40360 - DNA, 25 bp, Saccharomyces pastorianus
gagccattggccctttgaaaaccac

SEQ ID NO: 40361 - DNA, 25 bp, Saccharomyces pastorianus
aaagggaactgacccagtccatgtc

SEQ ID NO: 40362 - DNA, 25 bp, Saccharomyces pastorianus
atgctgctcgccctgtaatcgcata

SEQ ID NO: 40363 - DNA, 25 bp, Saccharomyces pastorianus
acatggcaacagaaggtcctcgcgc

SEQ ID NO: 40364 - DNA, 25 bp, Saccharomyces pastorianus
tcggcaccattccaggactgaacac

SEQ ID NO: 40365 - DNA, 25 bp, Saccharomyces pastorianus
gctgcgtaacattttcgtgcctgag

SEQ ID NO: 40366 - DNA, 25 bp, Saccharomyces pastorianus
ctttcatctgcggttggtgcatgaa

SEQ ID NO: 40367 - DNA, 25 bp, Saccharomyces pastorianus
accgataagcgcaaacctctgggag

SEQ ID NO: 40368 - DNA, 25 bp, Saccharomyces pastorianus
ctgggagaatgctccactttcatct

SEQ ID NO: 40369 - DNA, 25 bp, Saccharomyces pastorianus
cgagctgatatccttgaccacgaag

SEQ ID NO: 40370 - DNA, 25 bp, Saccharomyces pastorianus
ataatgggcaactcacatggcaaca

SEQ ID NO: 40371 - DNA, 25 bp, Saccharomyces pastorianus
gaacccagttccaagtccacgagac

SEQ ID NO: 40372 - DNA, 25 bp, Saccharomyces pastorianus
aatagtccatgcgacgggtacttgt

SEQ ID NO: 40373 - DNA, 25 bp, Saccharomyces pastorianus
gcagcagccgcaatcatatgaagac

SEQ ID NO: 40374 - DNA, 25 bp, Saccharomyces pastorianus
gatactttggcttgcgtggcacaac

SEQ ID NO: 40375 - DNA, 25 bp, Saccharomyces pastorianus
gctaattgctatatacgatgatcct

SEQ ID NO: 40376 - DNA, 25 bp, Saccharomyces pastorianus
tttcctgggcgcatctgaagtggac

SEQ ID NO: 40377 - DNA, 25 bp, Saccharomyces pastorianus
gggtacttgtgtcccgatactttgg

SEQ ID NO: 40378 - DNA, 25 bp, Saccharomyces pastorianus
gcatatcgaaaccagccacacatga

SEQ ID NO: 40379 - DNA, 25 bp, Saccharomyces pastorianus
gtgtgctctccccagtaataaatac

SEQ ID NO: 40380 - DNA, 25 bp, Saccharomyces pastorianus
ggagtacttctcacagtgcttttcc

SEQ ID NO: 40381 - DNA, 25 bp, Saccharomyces pastorianus
tgaagtggacgccttcttcaatttc

SEQ ID NO: 40382 - DNA, 25 bp, Saccharomyces pastorianus
aaatctcagctgaagtgtgctctcc

SEQ ID NO: 40383 - DNA, 25 bp, Saccharomyces pastorianus
aaacagtatactcatcggccacgga

SEQ ID NO: 40384 - DNA, 25 bp, Saccharomyces pastorianus
gacacggcagttctatattcaaaaa

SEQ ID NO: 40385 - DNA, 25 bp, Saccharomyces pastorianus
tggctttcacatccctaggttacga

SEQ ID NO: 40386 - DNA, 25 bp, Saccharomyces pastorianus
gtagcgcacacatcgatggagttga

SEQ ID NO: 40387 - DNA, 25 bp, Saccharomyces pastorianus
gttgacctaaattccgacttcagtg

SEQ ID NO: 40388 - DNA, 25 bp, Saccharomyces pastorianus
aaaatgttctctctctcgattgtga

SEQ ID NO: 40389 - DNA, 25 bp, Saccharomyces pastorianus
atttccgagttttctagtagcgcac

SEQ ID NO: 40390 - DNA, 25 bp, Saccharomyces pastorianus
accaccaactctgtgtcttttttga

SEQ ID NO: 40391 - DNA, 25 bp, Saccharomyces pastorianus
gactaggatgtaagacgtcccacca

SEQ ID NO: 40392 - DNA, 25 bp, Saccharomyces pastorianus
gtcccaccaccatgtgtacagagga

SEQ ID NO: 40393 - DNA, 25 bp, Saccharomyces pastorianus
gatcaaactaaatgtcccacgtata

SEQ ID NO: 40394 - DNA, 25 bp, Saccharomyces pastorianus
gaaagtcgccggtatagtcgcacta

SEQ ID NO: 40395 - DNA, 25 bp, Saccharomyces pastorianus
acaaactttgtattccccaatgctc

SEQ ID NO: 40396 - DNA, 25 bp, Saccharomyces pastorianus
caatacttacaacagcgggacccta

SEQ ID NO: 40397 - DNA, 25 bp, Saccharomyces pastorianus
aagacacccatttttcacggacatg

SEQ ID NO: 40398 - DNA, 25 bp, Saccharomyces pastorianus
atggatccagttgtacctatagcac

SEQ ID NO: 40399 - DNA, 25 bp, Saccharomyces pastorianus
atggcacattctacagttcctgagg

SEQ ID NO: 40400 - DNA, 25 bp, Saccharomyces pastorianus
cctatagcacttggcttgagcgcaa

SEQ ID NO: 40401 - DNA, 25 bp, Saccharomyces pastorianus
tcgcactatcgggttttggttacat

SEQ ID NO: 40402 - DNA, 25 bp, Saccharomyces pastorianus
ggttctctcaaggtgctgcattggc

SEQ ID NO: 40403 - DNA, 25 bp, Saccharomyces pastorianus
gcatcatctgtcactttaccatgga

SEQ ID NO: 40404 - DNA, 25 bp, Saccharomyces pastorianus
aaaattctaccaagacacctgcggg

SEQ ID NO: 40405 - DNA, 25 bp, Saccharomyces pastorianus
tccgggaaatacgacacggtttgca

SEQ ID NO: 40406 - DNA, 25 bp, Saccharomyces pastorianus
gaggttcgtcgagaactccagcaaa

SEQ ID NO: 40407 - DNA, 25 bp, Saccharomyces pastorianus
gagcgctcgagtaggacacgtcttt

SEQ ID NO: 40408 - DNA, 25 bp, Saccharomyces pastorianus
agggccaacgccttgtatctgggac

SEQ ID NO: 40409 - DNA, 25 bp, Saccharomyces pastorianus
agcttccacatctcaattgccatag

SEQ ID NO: 40410 - DNA, 25 bp, Saccharomyces pastorianus
acaacgacacatattcatccgggaa

SEQ ID NO: 40411 - DNA, 25 bp, Saccharomyces pastorianus
atttgcgccatttaaactcgaggtc

SEQ ID NO: 40412 - DNA, 25 bp, Saccharomyces pastorianus
tagcggaacttagtcctctgtttct

SEQ ID NO: 40413 - DNA, 25 bp, Saccharomyces pastorianus
tccagtgatccataccaactagcgg

SEQ ID NO: 40414 - DNA, 25 bp, Saccharomyces pastorianus
aacgcggtcactgctgttcgaatca

SEQ ID NO: 40415 - DNA, 25 bp, Saccharomyces pastorianus
aaccaactgtcctgatcaactcgat

SEQ ID NO: 40416 - DNA, 25 bp, Saccharomyces pastorianus
ctttcccgactttctggagaggata

SEQ ID NO: 40417 - DNA, 25 bp, Saccharomyces pastorianus
aaattactaagcgtcgagccgttca

SEQ ID NO: 40418 - DNA, 25 bp, Saccharomyces pastorianus
aaatacggtacccactccaggacat

SEQ ID NO: 40419 - DNA, 25 bp, Saccharomyces pastorianus
acggcgttactacgacaagcgttgc

SEQ ID NO: 40420 - DNA, 25 bp, Saccharomyces pastorianus
tacacatttgaacccattccactaa

SEQ ID NO: 40421 - DNA, 25 bp, Saccharomyces pastorianus
gtcgagccgttcatttcacaaatag

SEQ ID NO: 40422 - DNA, 25 bp, Saccharomyces pastorianus
taacggaactgatccagtcctttcc

SEQ ID NO: 40423 - DNA, 25 bp, Saccharomyces pastorianus
caagcgttgctgattcacctgaaaa

SEQ ID NO: 40424 - DNA, 25 bp, Saccharomyces pastorianus
aacagtcggactaaaacccatgagg

SEQ ID NO: 40425 - DNA, 25 bp, Saccharomyces pastorianus
ggacatagcgacgagcagcataatt

SEQ ID NO: 40426 - DNA, 25 bp, Saccharomyces pastorianus
taaaggtcttgttcaggcacctcca

SEQ ID NO: 40427 - DNA, 25 bp, Saccharomyces pastorianus
gtcaactgttaggtatggccgacaa

SEQ ID NO: 40428 - DNA, 25 bp, Saccharomyces pastorianus
tactatggtcacttggtcgtagcct

SEQ ID NO: 40429 - DNA, 25 bp, Saccharomyces pastorianus
tcaaacatcgtcttgggtcaactgt

SEQ ID NO: 40430 - DNA, 25 bp, Saccharomyces pastorianus
aagggactccggtgatcatctattg

SEQ ID NO: 40431 - DNA, 25 bp, Saccharomyces pastorianus
aactacgaccgtattatcactcaag

SEQ ID NO: 40432 - DNA, 25 bp, Saccharomyces pastorianus
aacggcgaggattcttactatggtc

SEQ ID NO: 40433 - DNA, 25 bp, Saccharomyces pastorianus
agactagtctcatgcatcggtacgt

SEQ ID NO: 40434 - DNA, 25 bp, Saccharomyces pastorianus
gtcgtagcctctcacaactatcaat

SEQ ID NO: 40435 - DNA, 25 bp, Saccharomyces pastorianus
gaaattcaaccctgtttcatccaga

SEQ ID NO: 40436 - DNA, 25 bp, Saccharomyces pastorianus
tgatcactaaccatggcgccaagaa

SEQ ID NO: 40437 - DNA, 25 bp, Saccharomyces pastorianus
acgtggcaactgtacctaagggact

SEQ ID NO: 40438 - DNA, 25 bp, Saccharomyces pastorianus
ggtcagatcgccaacttttgtcaaa

SEQ ID NO: 40439 - DNA, 25 bp, Saccharomyces pastorianus
gactttttcagtcagccaaatttta

SEQ ID NO: 40440 - DNA, 25 bp, Saccharomyces pastorianus
gatatagctaacctacaacttggta

SEQ ID NO: 40441 - DNA, 25 bp, Saccharomyces pastorianus
ggttcaatggtcattcatgggctaa

SEQ ID NO: 40442 - DNA, 25 bp, Saccharomyces pastorianus
gatcctaagttctcgtatgactttt

SEQ ID NO: 40443 - DNA, 25 bp, Saccharomyces pastorianus
aaagttgaccatgccacatattttg

SEQ ID NO: 40444 - DNA, 25 bp, Saccharomyces pastorianus
gattcatgctattcctataacatct

SEQ ID NO: 40445 - DNA, 25 bp, Saccharomyces pastorianus
gaatatggctcttcttgatcctaag

SEQ ID NO: 40446 - DNA, 25 bp, Saccharomyces pastorianus
atgatccatactttcctcaattcag

SEQ ID NO: 40447 - DNA, 25 bp, Saccharomyces pastorianus
gtttttcagagttacttcctgtacg

SEQ ID NO: 40448 - DNA, 25 bp, Saccharomyces pastorianus
tctggtgccgacagcaatgatccat

SEQ ID NO: 40449 - DNA, 25 bp, Saccharomyces pastorianus
atcaggtattcgtacgcgggtctca

SEQ ID NO: 40450 - DNA, 25 bp, Saccharomyces pastorianus
tgaagcacagggacatgtcgtctcc

SEQ ID NO: 40451 - DNA, 25 bp, Saccharomyces pastorianus
tcgtctccctcgagctgacaacggg

SEQ ID NO: 40452 - DNA, 25 bp, Saccharomyces pastorianus
aagaatgcgccgttattcaaaaaga

SEQ ID NO: 40453 - DNA, 25 bp, Saccharomyces pastorianus
gcgggtctcagatcaaattcatagt

SEQ ID NO: 40454 - DNA, 25 bp, Saccharomyces pastorianus
gggccacttaccgtggtaagctagt

SEQ ID NO: 40455 - DNA, 25 bp, Saccharomyces pastorianus
gaaccacagggagctgtaacgcaca

SEQ ID NO: 40456 - DNA, 25 bp, Saccharomyces pastorianus
gacgtaacagctactgaaccacagg

SEQ ID NO: 40457 - DNA, 25 bp, Saccharomyces pastorianus
attcatagttgttccagacctttta

SEQ ID NO: 40458 - DNA, 25 bp, Saccharomyces pastorianus
gtaacgcacatggatcaggtattcg

SEQ ID NO: 40459 - DNA, 25 bp, Saccharomyces pastorianus
gatagtatgaacgtccagctgagag

SEQ ID NO: 40460 - DNA, 25 bp, Saccharomyces pastorianus
ttaccaagagcattccacaaccaga

SEQ ID NO: 40461 - DNA, 25 bp, Saccharomyces pastorianus
gcaaatcctaaatcaacccatcgta

SEQ ID NO: 40462 - DNA, 25 bp, Saccharomyces pastorianus
cgatgatcggtgtattgttctgcaa

SEQ ID NO: 40463 - DNA, 25 bp, Saccharomyces pastorianus
gccagcatgatgttttctcgatttt

SEQ ID NO: 40464 - DNA, 25 bp, Saccharomyces pastorianus
aaccagattgcgttgcattcagcat

SEQ ID NO: 40465 - DNA, 25 bp, Saccharomyces pastorianus
attgttgagcactcgagtcactcga

SEQ ID NO: 40466 - DNA, 25 bp, Saccharomyces pastorianus
aatggtgagctttggccgaggaaat

SEQ ID NO: 40467 - DNA, 25 bp, Saccharomyces pastorianus
ggaccattgtgttactggcggcacg

SEQ ID NO: 40468 - DNA, 25 bp, Saccharomyces pastorianus
agatccggtaccatgtttcgcaaat

SEQ ID NO: 40469 - DNA, 25 bp, Saccharomyces pastorianus
gtcactcgaaagaaccggtcagcaa

SEQ ID NO: 40470 - DNA, 25 bp, Saccharomyces pastorianus
agaggtgcacttgattccgatggag

SEQ ID NO: 40471 - DNA, 25 bp, Saccharomyces pastorianus
aagaaggctctctatcatgctagta

SEQ ID NO: 40472 - DNA, 25 bp, Saccharomyces pastorianus
ttcttcaccatgatatcagtagcag

SEQ ID NO: 40473 - DNA, 25 bp, Saccharomyces pastorianus
ggtagtattggttacattccctata

SEQ ID NO: 40474 - DNA, 25 bp, Saccharomyces pastorianus
aagggtgacttgatggctattctaa

SEQ ID NO: 40475 - DNA, 25 bp, Saccharomyces pastorianus
gtggtgagcctattgatccttctaa

SEQ ID NO: 40476 - DNA, 25 bp, Saccharomyces pastorianus
atggccgtatttggtttcccatact

SEQ ID NO: 40477 - DNA, 25 bp, Saccharomyces pastorianus
aatcaggctcagcaagtcctcatgg

SEQ ID NO: 40478 - DNA, 25 bp, Saccharomyces pastorianus
aagtcctcatggcaaagctgcaaga

SEQ ID NO: 40479 - DNA, 25 bp, Saccharomyces pastorianus
aactctggagccatacaggcgtcac

SEQ ID NO: 40480 - DNA, 25 bp, Saccharomyces pastorianus
gatcccttcggtaaggattccgact

SEQ ID NO: 40481 - DNA, 25 bp, Saccharomyces pastorianus
gaacaccacctaaagaagccacaag

SEQ ID NO: 40482 - DNA, 25 bp, Saccharomyces pastorianus
gatcggcacctgattttacgaataa

SEQ ID NO: 40483 - DNA, 25 bp, Saccharomyces pastorianus
agcaaactttcagaaccctcaagat

SEQ ID NO: 40484 - DNA, 25 bp, Saccharomyces pastorianus
agactcatcgtcattttctgaaaat

SEQ ID NO: 40485 - DNA, 25 bp, Saccharomyces pastorianus
gaaactgctaaggaggccatcactg

SEQ ID NO: 40486 - DNA, 25 bp, Saccharomyces pastorianus
aagacagtttcttgaatgcatcgaa

SEQ ID NO: 40487 - DNA, 25 bp, Saccharomyces pastorianus
atcaatcgtcttagatcggcacctg

SEQ ID NO: 40488 - DNA, 25 bp, Saccharomyces pastorianus
ccaccagggtctttctaacagtata

SEQ ID NO: 40489 - DNA, 25 bp, Saccharomyces pastorianus
atggaagtttctgatgtcgagctat

SEQ ID NO: 40490 - DNA, 25 bp, Saccharomyces pastorianus
taaatcgctatccatcttggcggat

SEQ ID NO: 40491 - DNA, 25 bp, Saccharomyces pastorianus
agattcatcatcagactcatcgtca

SEQ ID NO: 40492 - DNA, 25 bp, Saccharomyces pastorianus
tgaagatagtaatacccaccagggt

SEQ ID NO: 40493 - DNA, 25 bp, Saccharomyces pastorianus
ttggcaaatgcctcgagtagttcac

SEQ ID NO: 40494 - DNA, 25 bp, Saccharomyces pastorianus
taagctgctaagaggttataccaca

SEQ ID NO: 40495 - DNA, 25 bp, Saccharomyces pastorianus
gttaagagtcttttcattccctgct

SEQ ID NO: 40496 - DNA, 25 bp, Saccharomyces pastorianus
ggtatggttcttggacagcgtatca

SEQ ID NO: 40497 - DNA, 25 bp, Saccharomyces pastorianus
atcggaactggtgtgcttcgacgaa

SEQ ID NO: 40498 - DNA, 25 bp, Saccharomyces pastorianus
tgacaggagatctaggcgccatgag

SEQ ID NO: 40499 - DNA, 25 bp, Saccharomyces pastorianus
tttcattccctgctcttttagatag

SEQ ID NO: 40500 - DNA, 25 bp, Saccharomyces pastorianus
gtatggcccctatcagaaacttcaa

SEQ ID NO: 40501 - DNA, 25 bp, Saccharomyces pastorianus
agtagttcacccactgcatggattt

SEQ ID NO: 40502 - DNA, 25 bp, Saccharomyces pastorianus
gtgctgtgactatcctaacggcagt

SEQ ID NO: 40503 - DNA, 25 bp, Saccharomyces pastorianus
ggagaagccgtagtcaatcaaagta

SEQ ID NO: 40504 - DNA, 25 bp, Saccharomyces pastorianus
agagcacctcaacgacttcagtcaa

SEQ ID NO: 40505 - DNA, 25 bp, Saccharomyces pastorianus
gacgttctataacatcgcatggagt

SEQ ID NO: 40506 - DNA, 25 bp, Saccharomyces pastorianus
gtttcatgtatcgaacaggcgacta

SEQ ID NO: 40507 - DNA, 25 bp, Saccharomyces pastorianus
acgtcaatactgatctatcgtacat

SEQ ID NO: 40508 - DNA, 25 bp, Saccharomyces pastorianus
ttcagtcaaggagcaacaacccgat

SEQ ID NO: 40509 - DNA, 25 bp, Saccharomyces pastorianus
gccagcattggagtacacgtcagac

SEQ ID NO: 40510 - DNA, 25 bp, Saccharomyces pastorianus
tttccctgcgaaatgcttggtttca

SEQ ID NO: 40511 - DNA, 25 bp, Saccharomyces pastorianus
acccgatgcccatgtcgatgtacaa

SEQ ID NO: 40512 - DNA, 25 bp, Saccharomyces pastorianus
taaagacattccacaatttccctgc

SEQ ID NO: 40513 - DNA, 25 bp, Saccharomyces pastorianus
gggccaggccaaattgttatttaca

SEQ ID NO: 40514 - DNA, 25 bp, Saccharomyces pastorianus
aggtaacattccatgggccaggcca

SEQ ID NO: 40515 - DNA, 25 bp, Saccharomyces pastorianus
gtgatatgcggtgactctgaagaca

SEQ ID NO: 40516 - DNA, 25 bp, Saccharomyces pastorianus
gcatatgcgcagaacgggttgccat

SEQ ID NO: 40517 - DNA, 25 bp, Saccharomyces pastorianus
gccctgcggtgtgtgtagacagttt

SEQ ID NO: 40518 - DNA, 25 bp, Saccharomyces pastorianus
tcaaggcgcgtgaactctcttacag

SEQ ID NO: 40519 - DNA, 25 bp, Saccharomyces pastorianus
aagacaagtgtgtgtcgccctgcgg

SEQ ID NO: 40520 - DNA, 25 bp, Saccharomyces pastorianus
aagatttccccattatcatgctcaa

SEQ ID NO: 40521 - DNA, 25 bp, Saccharomyces pastorianus
acgatgtcattttcactggtgccaa

SEQ ID NO: 40522 - DNA, 25 bp, Saccharomyces pastorianus
gtcggttgctccatattgacgaaca

SEQ ID NO: 40523 - DNA, 25 bp, Saccharomyces pastorianus
accggcgcctgttgtgtaaccaaga

SEQ ID NO: 40524 - DNA, 25 bp, Saccharomyces pastorianus
gggttgccatggtacaagttctgat

SEQ ID NO: 40525 - DNA, 25 bp, Saccharomyces pastorianus
ctgatgtcaggataccgcacaggct

SEQ ID NO: 40526 - DNA, 25 bp, Saccharomyces pastorianus
ggtcttctcattgctcgacatgtaa

SEQ ID NO: 40527 - DNA, 25 bp, Saccharomyces pastorianus
agccgagaggcccaagttttgttag

SEQ ID NO: 40528 - DNA, 25 bp, Saccharomyces pastorianus
aatctggtgggcctcggaattatcc

SEQ ID NO: 40529 - DNA, 25 bp, Saccharomyces pastorianus
aagtattgcccatcgtgccggatat

SEQ ID NO: 40530 - DNA, 25 bp, Saccharomyces pastorianus
tgccgtgttttcgttaatcttcttg

SEQ ID NO: 40531 - DNA, 25 bp, Saccharomyces pastorianus
ccagcaatactgttcacctatcatg

SEQ ID NO: 40532 - DNA, 25 bp, Saccharomyces pastorianus
gatatttctgtcaagtgccgtgttt

SEQ ID NO: 40533 - DNA, 25 bp, Saccharomyces pastorianus
acacactcgtcggttcatggtgata

SEQ ID NO: 40534 - DNA, 25 bp, Saccharomyces pastorianus
gggctaaccgtgtggtatccagcaa

SEQ ID NO: 40535 - DNA, 25 bp, Saccharomyces pastorianus
aattgcgccattcatattgcacgag

SEQ ID NO: 40536 - DNA, 25 bp, Saccharomyces pastorianus
aatcttcttgttggttaattgcgcc

SEQ ID NO: 40537 - DNA, 25 bp, Saccharomyces pastorianus
tcacgttgagtatttggcatgtcta

SEQ ID NO: 40538 - DNA, 25 bp, Saccharomyces pastorianus
gccacaagtcattttgtactcacaa

SEQ ID NO: 40539 - DNA, 25 bp, Saccharomyces pastorianus
cgatttcaaacgtcagccttctatt

SEQ ID NO: 40540 - DNA, 25 bp, Saccharomyces pastorianus
tttcctactagatcctattctcaat

SEQ ID NO: 40541 - DNA, 25 bp, Saccharomyces pastorianus
ataagcgtaggcgaccaagaggtca

SEQ ID NO: 40542 - DNA, 25 bp, Saccharomyces pastorianus
gaaagtgctgaaccgccacaagtca

SEQ ID NO: 40543 - DNA, 25 bp, Saccharomyces pastorianus
aacgcaaagcatattttcctactag

SEQ ID NO: 40544 - DNA, 25 bp, Saccharomyces pastorianus
ggttctaaaactttatcacgttgag

SEQ ID NO: 40545 - DNA, 25 bp, Saccharomyces pastorianus
atactgccagtgtcggtgaaactat

SEQ ID NO: 40546 - DNA, 25 bp, Saccharomyces pastorianus
atgtctatccaatactgccagtgtc

SEQ ID NO: 40547 - DNA, 25 bp, Saccharomyces pastorianus
gtcagccttctattacttgcttact

SEQ ID NO: 40548 - DNA, 25 bp, Saccharomyces pastorianus
attgcgtgcttccaagtcaacttca

SEQ ID NO: 40549 - DNA, 25 bp, Saccharomyces pastorianus
ggcaacgaagagtaccccagggatt

SEQ ID NO: 40550 - DNA, 25 bp, Saccharomyces pastorianus
ggcacaccggttaatattacaagta

SEQ ID NO: 40551 - DNA, 25 bp, Saccharomyces pastorianus
ggtcaataagtcgtgatcctatcaa

SEQ ID NO: 40552 - DNA, 25 bp, Saccharomyces pastorianus
aggatgtacagcaccagcaactact

SEQ ID NO: 40553 - DNA, 25 bp, Saccharomyces pastorianus
aatattcattatcaggcacaccggt

SEQ ID NO: 40554 - DNA, 25 bp, Saccharomyces pastorianus
aagtccatcgtctcagacagtttct

SEQ ID NO: 40555 - DNA, 25 bp, Saccharomyces pastorianus
gaatcgtatcaatccgcacaacatg

SEQ ID NO: 40556 - DNA, 25 bp, Saccharomyces pastorianus
gactgatccagttgaagaccacatc

SEQ ID NO: 40557 - DNA, 25 bp, Saccharomyces pastorianus
tcaacttcactaatcacatcgactg

SEQ ID NO: 40558 - DNA, 25 bp, Saccharomyces pastorianus
gaaacagaccatttagcgccggaga

SEQ ID NO: 40559 - DNA, 25 bp, Saccharomyces pastorianus
tagaaaatcgcaccccagaaagtaa

SEQ ID NO: 40560 - DNA, 25 bp, Saccharomyces pastorianus
ctgcctgcgagcacagaagacggta

SEQ ID NO: 40561 - DNA, 25 bp, Saccharomyces pastorianus
atgaatcatctgcttctggccagaa

SEQ ID NO: 40562 - DNA, 25 bp, Saccharomyces pastorianus
aaaggcatgattaatctccccgaag

SEQ ID NO: 40563 - DNA, 25 bp, Saccharomyces pastorianus
gaatctaccactgttgtcgacttat

SEQ ID NO: 40564 - DNA, 25 bp, Saccharomyces pastorianus
gtcaattaatcacttttcgaacgaa

SEQ ID NO: 40565 - DNA, 25 bp, Saccharomyces pastorianus
gacaccgaaactggcaaacttgata

SEQ ID NO: 40566 - DNA, 25 bp, Saccharomyces pastorianus
ttaatctccccgaagaactgctaat

SEQ ID NO: 40567 - DNA, 25 bp, Saccharomyces pastorianus
gatagcgccattaacgaggagcatg

SEQ ID NO: 40568 - DNA, 25 bp, Saccharomyces pastorianus
aaacttgataagctgcctgcgagca

SEQ ID NO: 40569 - DNA, 25 bp, Saccharomyces pastorianus
gtcgacttattctcgcctcatgaat

SEQ ID NO: 40570 - DNA, 25 bp, Saccharomyces pastorianus
tagccaatgggcacctgaaacctct

SEQ ID NO: 40571 - DNA, 25 bp, Saccharomyces pastorianus
aactggcaagtgtttccacccaata

SEQ ID NO: 40572 - DNA, 25 bp, Saccharomyces pastorianus
cacaagtttcttcagccagttacag

SEQ ID NO: 40573 - DNA, 25 bp, Saccharomyces pastorianus
taaagggaacgtgcactctcaaacc

SEQ ID NO: 40574 - DNA, 25 bp, Saccharomyces pastorianus
tagacatcgaccaaatagccactcc

SEQ ID NO: 40575 - DNA, 25 bp, Saccharomyces pastorianus
aacaaggtcggagtcagctacgcct

SEQ ID NO: 40576 - DNA, 25 bp, Saccharomyces pastorianus
gacgatgatttcgaaccgcagtcaa

SEQ ID NO: 40577 - DNA, 25 bp, Saccharomyces pastorianus
agtttcctcttcagctgacacttac

SEQ ID NO: 40578 - DNA, 25 bp, Saccharomyces pastorianus
taggcttgagtctacatctccagaa

SEQ ID NO: 40579 - DNA, 25 bp, Saccharomyces pastorianus
gagtgccactttgttgccttttaca

SEQ ID NO: 40580 - DNA, 25 bp, Saccharomyces pastorianus
aaagcaccctttaaattctctccag

SEQ ID NO: 40581 - DNA, 25 bp, Saccharomyces pastorianus
gccaaagaaatttagcgctcaagag

SEQ ID NO: 40582 - DNA, 25 bp, Saccharomyces pastorianus
agaggagccggatttttcagcgacc

SEQ ID NO: 40583 - DNA, 25 bp, Saccharomyces pastorianus
gtatcaaaggacttcaagcccaaga

SEQ ID NO: 40584 - DNA, 25 bp, Saccharomyces pastorianus
gtatctaccgtgcaatttgagccaa

SEQ ID NO: 40585 - DNA, 25 bp, Saccharomyces pastorianus
aactgttccaaaatcgggccctgcg

SEQ ID NO: 40586 - DNA, 25 bp, Saccharomyces pastorianus
aactttagacaatttgcactcatca

SEQ ID NO: 40587 - DNA, 25 bp, Saccharomyces pastorianus
tcaatgcgtgcgatttcctttccaa

SEQ ID NO: 40588 - DNA, 25 bp, Saccharomyces pastorianus
actcttgtccaaatgaacaggctct

SEQ ID NO: 40589 - DNA, 25 bp, Saccharomyces pastorianus
acaggctctatgaaggtgatgccaa

SEQ ID NO: 40590 - DNA, 25 bp, Saccharomyces pastorianus
ttcagcgacctcgaacgatatgttt

SEQ ID NO: 40591 - DNA, 25 bp, Saccharomyces pastorianus
aagcacagctgcttctggatgaagt

SEQ ID NO: 40592 - DNA, 25 bp, Saccharomyces pastorianus
gttcccgatcatacccagtggttat

SEQ ID NO: 40593 - DNA, 25 bp, Saccharomyces pastorianus
gactgcacgagtattttagacctat

SEQ ID NO: 40594 - DNA, 25 bp, Saccharomyces pastorianus
aggtaagccattccatcttgacaaa

SEQ ID NO: 40595 - DNA, 25 bp, Saccharomyces pastorianus
gtgcaggaccaaatcctttacgaaa

SEQ ID NO: 40596 - DNA, 25 bp, Saccharomyces pastorianus
tcttgagctcctttactgtggtaac

SEQ ID NO: 40597 - DNA, 25 bp, Saccharomyces pastorianus
tagacctatcattatgaggcctggt

SEQ ID NO: 40598 - DNA, 25 bp, Saccharomyces pastorianus
gatgccgcaaacgtggttcatagtt

SEQ ID NO: 40599 - DNA, 25 bp, Saccharomyces pastorianus
ggccaacggtatctactcaacaggt

SEQ ID NO: 40600 - DNA, 25 bp, Saccharomyces pastorianus
aaatcgagtcttttctctcttggtg

SEQ ID NO: 40601 - DNA, 25 bp, Saccharomyces pastorianus
tggaccgagatctttcattcacagc

SEQ ID NO: 40602 - DNA, 25 bp, Saccharomyces pastorianus
tgaggcctggtttcatgtttgatga

SEQ ID NO: 40603 - DNA, 25 bp, Saccharomyces pastorianus
tagttcccgattcagcagtttttgc

SEQ ID NO: 40604 - DNA, 25 bp, Saccharomyces pastorianus
aaatcgctatcgacctgattcacga

SEQ ID NO: 40605 - DNA, 25 bp, Saccharomyces pastorianus
atcattggtactaaagccgtctttg

SEQ ID NO: 40606 - DNA, 25 bp, Saccharomyces pastorianus
gtcttcgctgttgctggtctatata

SEQ ID NO: 40607 - DNA, 25 bp, Saccharomyces pastorianus
ttgcgctaatgtctcgtgttggtaa

SEQ ID NO: 40608 - DNA, 25 bp, Saccharomyces pastorianus
gtttttaatcactgctcgcgaacgt

SEQ ID NO: 40609 - DNA, 25 bp, Saccharomyces pastorianus
acggtggtaccatctcatcaaattc

SEQ ID NO: 40610 - DNA, 25 bp, Saccharomyces pastorianus
aattcggtgggtctcagcgtatatt

SEQ ID NO: 40611 - DNA, 25 bp, Saccharomyces pastorianus
gtgctcgtgaattcagaactcctgt

SEQ ID NO: 40612 - DNA, 25 bp, Saccharomyces pastorianus
tataaactatctcccttatacccat

SEQ ID NO: 40613 - DNA, 25 bp, Saccharomyces pastorianus
gtgctagtcacggaaggctttccta

SEQ ID NO: 40614 - DNA, 25 bp, Saccharomyces pastorianus
aagacttcaacttctggctggacac

SEQ ID NO: 40615 - DNA, 25 bp, Saccharomyces pastorianus
gacagtgaatcagcttttccatttg

SEQ ID NO: 40616 - DNA, 25 bp, Saccharomyces pastorianus
tgggactccggctgtgttgaagaaa

SEQ ID NO: 40617 - DNA, 25 bp, Saccharomyces pastorianus
gaagatttagtgattgtctctccta

SEQ ID NO: 40618 - DNA, 25 bp, Saccharomyces pastorianus
gagacattttcatcgaatgccaaat

SEQ ID NO: 40619 - DNA, 25 bp, Saccharomyces pastorianus
gacggtgttgttacccaagacttca

SEQ ID NO: 40620 - DNA, 25 bp, Saccharomyces pastorianus
taaagaagggctccactatcacctc

SEQ ID NO: 40621 - DNA, 25 bp, Saccharomyces pastorianus
gaatgttccaaacactcatcgtggt

SEQ ID NO: 40622 - DNA, 25 bp, Saccharomyces pastorianus
ctgtttatccattcggtgcggacaa

SEQ ID NO: 40623 - DNA, 25 bp, Saccharomyces pastorianus
gaagaaaccggctctgtttatccat

SEQ ID NO: 40624 - DNA, 25 bp, Saccharomyces pastorianus
aatgccaaatcaatcgttctcaagg

SEQ ID NO: 40625 - DNA, 25 bp, Saccharomyces pastorianus
tttaggtttagctcacttggctcca

SEQ ID NO: 40626 - DNA, 25 bp, Saccharomyces pastorianus
cttggctccaggtaaatctttaatc

SEQ ID NO: 40627 - DNA, 25 bp, Saccharomyces pastorianus
accaccgatcatatctctatggctg

SEQ ID NO: 40628 - DNA, 25 bp, Saccharomyces pastorianus
gaatggtttaagtatggttccgctt

SEQ ID NO: 40629 - DNA, 25 bp, Saccharomyces pastorianus
aaaccacaaggctaattgcgtcaaa

SEQ ID NO: 40630 - DNA, 25 bp, Saccharomyces pastorianus
gagggtaagaccaccaccgatcata

SEQ ID NO: 40631 - DNA, 25 bp, Saccharomyces pastorianus
gaaaaccatgggactctgaattgac

SEQ ID NO: 40632 - DNA, 25 bp, Saccharomyces pastorianus
tgaattgacccacactttcaacgac

SEQ ID NO: 40633 - DNA, 25 bp, Saccharomyces pastorianus
tcttctcgtgaacatgctgcattgg

SEQ ID NO: 40634 - DNA, 25 bp, Saccharomyces pastorianus
tcatcacaaaatcctttgcccgtat

SEQ ID NO: 40635 - DNA, 25 bp, Saccharomyces pastorianus
aaggttcttgggtggctttgctatc

SEQ ID NO: 40636 - DNA, 25 bp, Saccharomyces pastorianus
cacatgctcaaaactctctcaaaca

SEQ ID NO: 40637 - DNA, 25 bp, Saccharomyces pastorianus
ttggtctcatgcatatttgccgagt

SEQ ID NO: 40638 - DNA, 25 bp, Saccharomyces pastorianus
aaacatttgatgacggaccttctcc

SEQ ID NO: 40639 - DNA, 25 bp, Saccharomyces pastorianus
aaatggttcagaccaccttatggtg

SEQ ID NO: 40640 - DNA, 25 bp, Saccharomyces pastorianus
ttcgattgccatcattgtgttgagc

SEQ ID NO: 40641 - DNA, 25 bp, Saccharomyces pastorianus
gattggctcacatacttggtctcat

SEQ ID NO: 40642 - DNA, 25 bp, Saccharomyces pastorianus
gattggagcctcctccttaacagta

SEQ ID NO: 40643 - DNA, 25 bp, Saccharomyces pastorianus
cacgacgatatctacacatgctcaa

SEQ ID NO: 40644 - DNA, 25 bp, Saccharomyces pastorianus
atcagtcatcagtttctcaatgcgt

SEQ ID NO: 40645 - DNA, 25 bp, Saccharomyces pastorianus
acaagctgttttatgggatcacgac

SEQ ID NO: 40646 - DNA, 25 bp, Saccharomyces pastorianus
aaaactgtagaccttgccatcaaaa

SEQ ID NO: 40647 - DNA, 25 bp, Saccharomyces pastorianus
aaaatggtccggtcatcagcagcta

SEQ ID NO: 40648 - DNA, 25 bp, Saccharomyces pastorianus
gcgccattccgggtttactacaaat

SEQ ID NO: 40649 - DNA, 25 bp, Saccharomyces pastorianus
tggacggcgccattcacgagaaagc

SEQ ID NO: 40650 - DNA, 25 bp, Saccharomyces pastorianus
acgagaaagctctggcgctggcgca

SEQ ID NO: 40651 - DNA, 25 bp, Saccharomyces pastorianus
tgcagcacctacaaggcctggacgg

SEQ ID NO: 40652 - DNA, 25 bp, Saccharomyces pastorianus
gatcaacgacgtgttgctgcagcac

SEQ ID NO: 40653 - DNA, 25 bp, Saccharomyces pastorianus
gtcagcctcgagatgcttatcgata

SEQ ID NO: 40654 - DNA, 25 bp, Saccharomyces pastorianus
tcagcagctaaggacagcgccattc

SEQ ID NO: 40655 - DNA, 25 bp, Saccharomyces pastorianus
gctcaagactgctgcgggtcctgga

SEQ ID NO: 40656 - DNA, 25 bp, Saccharomyces pastorianus
ggatcaagcagttcttcgtgggctt

SEQ ID NO: 40657 - DNA, 25 bp, Saccharomyces pastorianus
tagtcccattccacgagtttaagca

SEQ ID NO: 40658 - DNA, 25 bp, Saccharomyces pastorianus
gcaaggctacaagagtttatcgata

SEQ ID NO: 40659 - DNA, 25 bp, Saccharomyces pastorianus
agatctagataacgctcaaactgat

SEQ ID NO: 40660 - DNA, 25 bp, Saccharomyces pastorianus
ctggtaccttcagccaggttagaga

SEQ ID NO: 40661 - DNA, 25 bp, Saccharomyces pastorianus
agcgttggaaacttttgatcttatc

SEQ ID NO: 40662 - DNA, 25 bp, Saccharomyces pastorianus
ggaagctgagctagacaaggtttgt

SEQ ID NO: 40663 - DNA, 25 bp, Saccharomyces pastorianus
aatctttaaatcctgatcatgacgg

SEQ ID NO: 40664 - DNA, 25 bp, Saccharomyces pastorianus
acaagtcatggtggccgttcaatct

SEQ ID NO: 40665 - DNA, 25 bp, Saccharomyces pastorianus
agaacaatcctatcttgccgattat

SEQ ID NO: 40666 - DNA, 25 bp, Saccharomyces pastorianus
atcatgacggtagggttgaggctat

SEQ ID NO: 40667 - DNA, 25 bp, Saccharomyces pastorianus
gtgaagagcagcaatttcttacatt

SEQ ID NO: 40668 - DNA, 25 bp, Saccharomyces pastorianus
tgccgattatgagacctggtacctt

SEQ ID NO: 40669 - DNA, 25 bp, Saccharomyces pastorianus
gagcctttagctccagaaaatgaaa

SEQ ID NO: 40670 - DNA, 25 bp, Saccharomyces pastorianus
accagctgatccaaaaggtcccagt

SEQ ID NO: 40671 - DNA, 25 bp, Saccharomyces pastorianus
atgcaaccgttgtcgagtcattcaa

SEQ ID NO: 40672 - DNA, 25 bp, Saccharomyces pastorianus
ggatgacccctcaaaagttcgtcta

SEQ ID NO: 40673 - DNA, 25 bp, Saccharomyces pastorianus
aaggcagaaggccattcattcacaa

SEQ ID NO: 40674 - DNA, 25 bp, Saccharomyces pastorianus
tgctataccatcgaccggctttaaa

SEQ ID NO: 40675 - DNA, 25 bp, Saccharomyces pastorianus
ggaggccagaccttctcagataata

SEQ ID NO: 40676 - DNA, 25 bp, Saccharomyces pastorianus
agtaatgtcgacacagcctcagaag

SEQ ID NO: 40677 - DNA, 25 bp, Saccharomyces pastorianus
ggtactgcttcatcaaatggcgctc

SEQ ID NO: 40678 - DNA, 25 bp, Saccharomyces pastorianus
ggcgctccttcattttcatttggaa

SEQ ID NO: 40679 - DNA, 25 bp, Saccharomyces pastorianus
gagatagctttattttcacaacgag

SEQ ID NO: 40680 - DNA, 25 bp, Saccharomyces pastorianus
tatggagatattactgtttcagcta

SEQ ID NO: 40681 - DNA, 25 bp, Saccharomyces pastorianus
tgctcgctaatgatattctaaaact

SEQ ID NO: 40682 - DNA, 25 bp, Saccharomyces pastorianus
aactggatgttttcaagcacgtttc

SEQ ID NO: 40683 - DNA, 25 bp, Saccharomyces pastorianus
ggcttgggcttcaaagacagccaaa

SEQ ID NO: 40684 - DNA, 25 bp, Saccharomyces pastorianus
gatttttcggatcattgctcgctaa

SEQ ID NO: 40685 - DNA, 25 bp, Saccharomyces pastorianus
gatcatttgcgtgatgttttaacaa

SEQ ID NO: 40686 - DNA, 25 bp, Saccharomyces pastorianus
agacgcacaacctattccaatgatc

SEQ ID NO: 40687 - DNA, 25 bp, Saccharomyces pastorianus
gagaagtcaggatccgattctgaaa

SEQ ID NO: 40688 - DNA, 25 bp, Saccharomyces pastorianus
gtatcataatttcctctcgggcaaa

SEQ ID NO: 40689 - DNA, 25 bp, Saccharomyces pastorianus
tcattattacgcactggtcgcaaat

SEQ ID NO: 40690 - DNA, 25 bp, Saccharomyces pastorianus
agcacgtttcattcatgggtgggtt

SEQ ID NO: 40691 - DNA, 25 bp, Saccharomyces pastorianus
attacctgcaacaccggatagatct

SEQ ID NO: 40692 - DNA, 25 bp, Saccharomyces pastorianus
aacagtacgtgttccaatggcgatt

SEQ ID NO: 40693 - DNA, 25 bp, Saccharomyces pastorianus
gaaagcttggaacatctctcaaatg

SEQ ID NO: 40694 - DNA, 25 bp, Saccharomyces pastorianus
tactgaatgcccaagtatcaccggg

SEQ ID NO: 40695 - DNA, 25 bp, Saccharomyces pastorianus
gtatgttctctgattgttccgtaga

SEQ ID NO: 40696 - DNA, 25 bp, Saccharomyces pastorianus
gattgttcaatctcaaaccaagcac

SEQ ID NO: 40697 - DNA, 25 bp, Saccharomyces pastorianus
gtaccgttgcatttaaaacctcagg

SEQ ID NO: 40698 - DNA, 25 bp, Saccharomyces pastorianus
aaacggttttgccatgtgccgtggt

SEQ ID NO: 40699 - DNA, 25 bp, Saccharomyces pastorianus
ggatagatctaagtgcgcctgtttg

SEQ ID NO: 40700 - DNA, 25 bp, Saccharomyces pastorianus
gttccttttggttctgagtctgaaa

SEQ ID NO: 40701 - DNA, 25 bp, Saccharomyces pastorianus
aggcaccacagaggaacagtattca

SEQ ID NO: 40702 - DNA, 25 bp, Saccharomyces pastorianus
agaagacgctcctccagtgtgatat

SEQ ID NO: 40703 - DNA, 25 bp, Saccharomyces pastorianus
gggcgtacgataacctgactatgtg

SEQ ID NO: 40704 - DNA, 25 bp, Saccharomyces pastorianus
agcagtaaaatgtccactcccgtga

SEQ ID NO: 40705 - DNA, 25 bp, Saccharomyces pastorianus
attcatatcgtcgttattgtgctgt

SEQ ID NO: 40706 - DNA, 25 bp, Saccharomyces pastorianus
gtgcccatcgtactgttcttgatca

SEQ ID NO: 40707 - DNA, 25 bp, Saccharomyces pastorianus
gtacacgcccaccaggaagtttttg

SEQ ID NO: 40708 - DNA, 25 bp, Saccharomyces pastorianus
ggacgtggacgttcaccaacatgac

SEQ ID NO: 40709 - DNA, 25 bp, Saccharomyces pastorianus
atcattgggttctacgtcatgttcc

SEQ ID NO: 40710 - DNA, 25 bp, Saccharomyces pastorianus
gttgagactcttttactccttgttc

SEQ ID NO: 40711 - DNA, 25 bp, Saccharomyces pastorianus
atcgcatgtggagccggagacgttt

SEQ ID NO: 40712 - DNA, 25 bp, Saccharomyces pastorianus
gaagtttttgttgatcgtgcccatc

SEQ ID NO: 40713 - DNA, 25 bp, Saccharomyces pastorianus
gttccagtgaaaaagaccgagatct

SEQ ID NO: 40714 - DNA, 25 bp, Saccharomyces pastorianus
aaactctggactaagcgagcaggaa

SEQ ID NO: 40715 - DNA, 25 bp, Saccharomyces pastorianus
gatttgaaactcaccgggattacgc

SEQ ID NO: 40716 - DNA, 25 bp, Saccharomyces pastorianus
gattacgcctttacccaagggtatg

SEQ ID NO: 40717 - DNA, 25 bp, Saccharomyces pastorianus
agggtatgccccagatatatgttac

SEQ ID NO: 40718 - DNA, 25 bp, Saccharomyces pastorianus
tatcactgtgataccaaactctgga

SEQ ID NO: 40719 - DNA, 25 bp, Saccharomyces pastorianus
gaagccaacgccaataggactcaag

SEQ ID NO: 40720 - DNA, 25 bp, Saccharomyces pastorianus
aaagctacggatgcattacaaggga

SEQ ID NO: 40721 - DNA, 25 bp, Saccharomyces pastorianus
gtattatcaacgtttctgctgccga

SEQ ID NO: 40722 - DNA, 25 bp, Saccharomyces pastorianus
ggctagaactgatatccaaggctga

SEQ ID NO: 40723 - DNA, 25 bp, Saccharomyces pastorianus
gatacgagcaactgatctccaacga

SEQ ID NO: 40724 - DNA, 25 bp, Saccharomyces pastorianus
ttcaagccctcgagcatactgcaga

SEQ ID NO: 40725 - DNA, 25 bp, Saccharomyces pastorianus
agtggacgatttcaacttccagctc

SEQ ID NO: 40726 - DNA, 25 bp, Saccharomyces pastorianus
gtcttgtataaacatcaccggcttg

SEQ ID NO: 40727 - DNA, 25 bp, Saccharomyces pastorianus
accggcttgatcacgtttctggaac

SEQ ID NO: 40728 - DNA, 25 bp, Saccharomyces pastorianus
tctggaactgttgtatgacgcgccc

SEQ ID NO: 40729 - DNA, 25 bp, Saccharomyces pastorianus
agacattgtatcgttgtggtcccaa

SEQ ID NO: 40730 - DNA, 25 bp, Saccharomyces pastorianus
aatacccgacaaaactgcctgaatc

SEQ ID NO: 40731 - DNA, 25 bp, Saccharomyces pastorianus
cacggaattctacaacggcatcgag

SEQ ID NO: 40732 - DNA, 25 bp, Saccharomyces pastorianus
gacgcgcccatggacgcattgagaa

SEQ ID NO: 40733 - DNA, 25 bp, Saccharomyces pastorianus
aaaggcggcgttgcgcaatacccga

SEQ ID NO: 40734 - DNA, 25 bp, Saccharomyces pastorianus
tgcagaagctggtcggcgataccgc

SEQ ID NO: 40735 - DNA, 25 bp, Saccharomyces pastorianus
gaaagccgtcaacgatcgcggtgaa

SEQ ID NO: 40736 - DNA, 25 bp, Saccharomyces pastorianus
tcaacgggtttactctggacacaaa

SEQ ID NO: 40737 - DNA, 25 bp, Saccharomyces pastorianus
aaatcttccatctggttgggttcct

SEQ ID NO: 40738 - DNA, 25 bp, Saccharomyces pastorianus
gtaaggaaatggtcgccgcctgcta

SEQ ID NO: 40739 - DNA, 25 bp, Saccharomyces pastorianus
agaatcctggacttggtgccaaagc

SEQ ID NO: 40740 - DNA, 25 bp, Saccharomyces pastorianus
agcagccattttcggccaggtatgt

SEQ ID NO: 40741 - DNA, 25 bp, Saccharomyces pastorianus
gtggctgacgtgcataggaccttcc

SEQ ID NO: 40742 - DNA, 25 bp, Saccharomyces pastorianus
tctaggtgagttcatcttgacccat

SEQ ID NO: 40743 - DNA, 25 bp, Saccharomyces pastorianus
atattcaagctgctaccggactctt

SEQ ID NO: 40744 - DNA, 25 bp, Saccharomyces pastorianus
gtctttttgcgtatccatgcgacaa

SEQ ID NO: 40745 - DNA, 25 bp, Saccharomyces pastorianus
ttgggttcctctggcgaaatcgata

SEQ ID NO: 40746 - DNA, 25 bp, Saccharomyces pastorianus
actggtatcccagcatatgcgtata

SEQ ID NO: 40747 - DNA, 25 bp, Saccharomyces pastorianus
gcgtatacttgtgtcattattctca

SEQ ID NO: 40748 - DNA, 25 bp, Saccharomyces pastorianus
gagcaattcagactacgcgattcaa

SEQ ID NO: 40749 - DNA, 25 bp, Saccharomyces pastorianus
gagacgttcaaggatttcgttcgaa

SEQ ID NO: 40750 - DNA, 25 bp, Saccharomyces pastorianus
aaaatcttcacctctgatgaccctt

SEQ ID NO: 40751 - DNA, 25 bp, Saccharomyces pastorianus
gaccctttacttttatcaaccgcat

SEQ ID NO: 40752 - DNA, 25 bp, Saccharomyces pastorianus
gtttatgttccaaccgtggatttca

SEQ ID NO: 40753 - DNA, 25 bp, Saccharomyces pastorianus
acagcgagttcacccagcaaggttg

SEQ ID NO: 40754 - DNA, 25 bp, Saccharomyces pastorianus
tattgggtccggacatcatgaacaa

SEQ ID NO: 40755 - DNA, 25 bp, Saccharomyces pastorianus
aaagtgttctcatccaaaagtctat

SEQ ID NO: 40756 - DNA, 25 bp, Saccharomyces pastorianus
gcggaattgccgtattcttatttac

SEQ ID NO: 40757 - DNA, 25 bp, Saccharomyces pastorianus
ggaaacagcacaaccatcagataca

SEQ ID NO: 40758 - DNA, 25 bp, Saccharomyces pastorianus
agcaagcgctcagtcatcgggataa

SEQ ID NO: 40759 - DNA, 25 bp, Saccharomyces pastorianus
aataactgtggtctcgctagccaac

SEQ ID NO: 40760 - DNA, 25 bp, Saccharomyces pastorianus
acaagctggtccaattgtacggccc

SEQ ID NO: 40761 - DNA, 25 bp, Saccharomyces pastorianus
gcaaatcattttacagcgccagcaa

SEQ ID NO: 40762 - DNA, 25 bp, Saccharomyces pastorianus
gccaaccactactatgcgcaaagga

SEQ ID NO: 40763 - DNA, 25 bp, Saccharomyces pastorianus
atcgggataagtcactcaacttgga

SEQ ID NO: 40764 - DNA, 25 bp, Saccharomyces pastorianus
aacatcgtactattgctactgcaaa

SEQ ID NO: 40765 - DNA, 25 bp, Saccharomyces pastorianus
atggattgtcctttaaacatcgtac

SEQ ID NO: 40766 - DNA, 25 bp, Saccharomyces pastorianus
tacagggaagagaactgcctcaact

SEQ ID NO: 40767 - DNA, 25 bp, Saccharomyces pastorianus
tactaccgcgacatatccctaagag

SEQ ID NO: 40768 - DNA, 25 bp, Saccharomyces pastorianus
attgctggtgctcttaaaaactggg

SEQ ID NO: 40769 - DNA, 25 bp, Saccharomyces pastorianus
attgatgctttgacacaaggcttga

SEQ ID NO: 40770 - DNA, 25 bp, Saccharomyces pastorianus
ttagccacactaatagacctctcac

SEQ ID NO: 40771 - DNA, 25 bp, Saccharomyces pastorianus
agttggtgatgatgcgtctgccaga

SEQ ID NO: 40772 - DNA, 25 bp, Saccharomyces pastorianus
ggactattcatcattattagccaca

SEQ ID NO: 40773 - DNA, 25 bp, Saccharomyces pastorianus
taaactcttttgatccctttgacga

SEQ ID NO: 40774 - DNA, 25 bp, Saccharomyces pastorianus
gcttccatttttcttacagttatct

SEQ ID NO: 40775 - DNA, 25 bp, Saccharomyces pastorianus
atgtcatcagacaacgttccaagcc

SEQ ID NO: 40776 - DNA, 25 bp, Saccharomyces pastorianus
cagattggacgatcttgtcaagttc

SEQ ID NO: 40777 - DNA, 25 bp, Saccharomyces pastorianus
gttgttcaaggcacatggtgacgtt

SEQ ID NO: 40778 - DNA, 25 bp, Saccharomyces pastorianus
ggatttgagtcccatttcacgaagc

SEQ ID NO: 40779 - DNA, 25 bp, Saccharomyces pastorianus
gatttaccgtcaacgccaaatgggt

SEQ ID NO: 40780 - DNA, 25 bp, Saccharomyces pastorianus
atacaaggatgttcaccaagccgga

SEQ ID NO: 40781 - DNA, 25 bp, Saccharomyces pastorianus
attttgctggtgactctgtgccaca

SEQ ID NO: 40782 - DNA, 25 bp, Saccharomyces pastorianus
cataaaggtgctcacggtcgtgtct

SEQ ID NO: 40783 - DNA, 25 bp, Saccharomyces pastorianus
aagacaaatggttcgtccagcggcc

SEQ ID NO: 40784 - DNA, 25 bp, Saccharomyces pastorianus
taagggatctttgcgtggctctaaa

SEQ ID NO: 40785 - DNA, 25 bp, Saccharomyces pastorianus
aaaggttactatttccattttgctg

SEQ ID NO: 40786 - DNA, 25 bp, Saccharomyces pastorianus
ctgtgccacaacacgttcagcagtg

SEQ ID NO: 40787 - DNA, 25 bp, Saccharomyces pastorianus
taattccttcagctgcatcgtcaat

SEQ ID NO: 40788 - DNA, 25 bp, Saccharomyces pastorianus
gacgtggaagtggtccgttatttct

SEQ ID NO: 40789 - DNA, 25 bp, Saccharomyces pastorianus
atgaatcctcgcgatttaccgtcaa

SEQ ID NO: 40790 - DNA, 25 bp, Saccharomyces pastorianus
ggaagtaagcgttatcccattcaaa

SEQ ID NO: 40791 - DNA, 25 bp, Saccharomyces pastorianus
gatagtaaattagcctctgccgaca

SEQ ID NO: 40792 - DNA, 25 bp, Saccharomyces pastorianus
tcacagtcctttgcgattccatata

SEQ ID NO: 40793 - DNA, 25 bp, Saccharomyces pastorianus
agctttagtcaaggctgctgtatca

SEQ ID NO: 40794 - DNA, 25 bp, Saccharomyces pastorianus
tctgccgacaaagtggtgctattca

SEQ ID NO: 40795 - DNA, 25 bp, Saccharomyces pastorianus
ttgaccgctcatcacttgttcttga

SEQ ID NO: 40796 - DNA, 25 bp, Saccharomyces pastorianus
aaaagtcgcagctacgttgaccgct

SEQ ID NO: 40797 - DNA, 25 bp, Saccharomyces pastorianus
tatttcttttttggttccgactcag

SEQ ID NO: 40798 - DNA, 25 bp, Saccharomyces pastorianus
gcgaacagacagttcctcagtctat

SEQ ID NO: 40799 - DNA, 25 bp, Saccharomyces pastorianus
gagcattgcaccagtgaggctgcca

SEQ ID NO: 40800 - DNA, 25 bp, Saccharomyces pastorianus
tgagaaagctgcataccgacttccc

SEQ ID NO: 40801 - DNA, 25 bp, Saccharomyces pastorianus
ttgctttggtcttctcttctaatga

SEQ ID NO: 40802 - DNA, 25 bp, Saccharomyces pastorianus
taaattcagagctggtgtcagtgaa

SEQ ID NO: 40803 - DNA, 25 bp, Saccharomyces pastorianus
acgataagatgatcactgtgctcaa

SEQ ID NO: 40804 - DNA, 25 bp, Saccharomyces pastorianus
tgaaagatacttcttctggctgcaa

SEQ ID NO: 40805 - DNA, 25 bp, Saccharomyces pastorianus
tccaggaaacctgcctttaaatgaa

SEQ ID NO: 40806 - DNA, 25 bp, Saccharomyces pastorianus
gaagggaactggatgctatttcttt

SEQ ID NO: 40807 - DNA, 25 bp, Saccharomyces pastorianus
ggttctgggactttgaatggcgtcc

SEQ ID NO: 40808 - DNA, 25 bp, Saccharomyces pastorianus
gagttcgactgtcattaaattcaga

SEQ ID NO: 40809 - DNA, 25 bp, Saccharomyces pastorianus
accaattccggttcagggtgagatc

SEQ ID NO: 40810 - DNA, 25 bp, Saccharomyces pastorianus
aatggcgtcccactgaaaagccgat

SEQ ID NO: 40811 - DNA, 25 bp, Saccharomyces pastorianus
aactcgtctatgtacaccaattccg

SEQ ID NO: 40812 - DNA, 25 bp, Saccharomyces pastorianus
tggccatcgctaaagtttcaaggat

SEQ ID NO: 40813 - DNA, 25 bp, Saccharomyces pastorianus
gagccacaggctgcggaaactaatg

SEQ ID NO: 40814 - DNA, 25 bp, Saccharomyces pastorianus
gacaccactaaggatgcttgcactg

SEQ ID NO: 40815 - DNA, 25 bp, Saccharomyces pastorianus
agacccagaatcagagccacaggct

SEQ ID NO: 40816 - DNA, 25 bp, Saccharomyces pastorianus
gaaaaactaccaccttctttatcag

SEQ ID NO: 40817 - DNA, 25 bp, Saccharomyces pastorianus
gacaactatcacaacaaagccgctg

SEQ ID NO: 40818 - DNA, 25 bp, Saccharomyces pastorianus
gagaaacaagatcttggccatcgct

SEQ ID NO: 40819 - DNA, 25 bp, Saccharomyces pastorianus
cggtgctttagctcgtgggtctgaa

SEQ ID NO: 40820 - DNA, 25 bp, Saccharomyces pastorianus
gtcactaccatttgtcggcgagaaa

SEQ ID NO: 40821 - DNA, 25 bp, Saccharomyces pastorianus
gatgaatgctggtgttctaccccgc

SEQ ID NO: 40822 - DNA, 25 bp, Saccharomyces pastorianus
tgctccgaactatttggacaactat

SEQ ID NO: 40823 - DNA, 25 bp, Saccharomyces pastorianus
ttaaagctccctcatctagaaataa

SEQ ID NO: 40824 - DNA, 25 bp, Saccharomyces pastorianus
gggagccccagataaccatagagaa

SEQ ID NO: 40825 - DNA, 25 bp, Saccharomyces pastorianus
gaaactcaagcaattctcctggata

SEQ ID NO: 40826 - DNA, 25 bp, Saccharomyces pastorianus
atacacttgggctggatttcctctt

SEQ ID NO: 40827 - DNA, 25 bp, Saccharomyces pastorianus
gacatggctgtggaaatctctaaaa

SEQ ID NO: 40828 - DNA, 25 bp, Saccharomyces pastorianus
gctggatttcctcttgaccaagatg

SEQ ID NO: 40829 - DNA, 25 bp, Saccharomyces pastorianus
aaagctagttgcgttgctaccgaaa

SEQ ID NO: 40830 - DNA, 25 bp, Saccharomyces pastorianus
gggatgtccctattggcgaggatat

SEQ ID NO: 40831 - DNA, 25 bp, Saccharomyces pastorianus
accacgttatttttcagaggctatt

SEQ ID NO: 40832 - DNA, 25 bp, Saccharomyces pastorianus
agggcaccagtagccatacacttgg

SEQ ID NO: 40833 - DNA, 25 bp, Saccharomyces pastorianus
tgatttgcggtgtctgggagcccca

SEQ ID NO: 40834 - DNA, 25 bp, Saccharomyces pastorianus
atagcgataccatgccaacgataag

SEQ ID NO: 40835 - DNA, 25 bp, Saccharomyces pastorianus
gagtcacatggtttgctctcctgtg

SEQ ID NO: 40836 - DNA, 25 bp, Saccharomyces pastorianus
ccaagccggagtattcaccaatgcg

SEQ ID NO: 40837 - DNA, 25 bp, Saccharomyces pastorianus
gggttttcctaccatctgggagtca

SEQ ID NO: 40838 - DNA, 25 bp, Saccharomyces pastorianus
ggtgcttcgcaggtttaatttccgt

SEQ ID NO: 40839 - DNA, 25 bp, Saccharomyces pastorianus
aagattccgttccagtagcgatagt

SEQ ID NO: 40840 - DNA, 25 bp, Saccharomyces pastorianus
gaagacttagcttacggtcaacgta

SEQ ID NO: 40841 - DNA, 25 bp, Saccharomyces pastorianus
gtcggacgaccttaactgcaattca

SEQ ID NO: 40842 - DNA, 25 bp, Saccharomyces pastorianus
taattccttgctttcactggtcgtt

SEQ ID NO: 40843 - DNA, 25 bp, Saccharomyces pastorianus
taatttccgtatcatgcttagcatg

SEQ ID NO: 40844 - DNA, 25 bp, Saccharomyces pastorianus
gggcactggttcatcttaattcctt

SEQ ID NO: 40845 - DNA, 25 bp, Saccharomyces pastorianus
aacttcattcacgtaggctatgtcg

SEQ ID NO: 40846 - DNA, 25 bp, Saccharomyces pastorianus
aaatcgcgcgccttttggtcaaaag

SEQ ID NO: 40847 - DNA, 25 bp, Saccharomyces pastorianus
tatgtcggatcgttccttcagcatt

SEQ ID NO: 40848 - DNA, 25 bp, Saccharomyces pastorianus
ttaccgccttgtaagagagactctt

SEQ ID NO: 40849 - DNA, 25 bp, Saccharomyces pastorianus
aaccagcattatcctttgatttgtc

SEQ ID NO: 40850 - DNA, 25 bp, Saccharomyces pastorianus
ggcaagtggcttccattatcgttga

SEQ ID NO: 40851 - DNA, 25 bp, Saccharomyces pastorianus
attgcaatcgttcgacattcacggg

SEQ ID NO: 40852 - DNA, 25 bp, Saccharomyces pastorianus
agggctgcattttacattgctgcta

SEQ ID NO: 40853 - DNA, 25 bp, Saccharomyces pastorianus
taatctactaggagctgccattgcc

SEQ ID NO: 40854 - DNA, 25 bp, Saccharomyces pastorianus
gcgatctcgtatgaaatgcctttag

SEQ ID NO: 40855 - DNA, 25 bp, Saccharomyces pastorianus
tctttaagagaaacgctgccaccaa

SEQ ID NO: 40856 - DNA, 25 bp, Saccharomyces pastorianus
ttcccgcatccttttacttatttat

SEQ ID NO: 40857 - DNA, 25 bp, Saccharomyces pastorianus
gacacttttgaccttatgatgatac

SEQ ID NO: 40858 - DNA, 25 bp, Saccharomyces pastorianus
ctctcttgtctactgctctcaaaaa

SEQ ID NO: 40859 - DNA, 25 bp, Saccharomyces pastorianus
gtacaatttattcatcataggccaa

SEQ ID NO: 40860 - DNA, 25 bp, Saccharomyces pastorianus
ataacagcagcgtttcatctctctt

SEQ ID NO: 40861 - DNA, 25 bp, Saccharomyces pastorianus
gtgttttcaccgaaatcctggtaca

SEQ ID NO: 40862 - DNA, 25 bp, Saccharomyces pastorianus
acgataattccttcgaagcttatgg

SEQ ID NO: 40863 - DNA, 25 bp, Saccharomyces pastorianus
cgagttacagcagtcgtacaattta

SEQ ID NO: 40864 - DNA, 25 bp, Saccharomyces pastorianus
aggccacattgtttacttcagattt

SEQ ID NO: 40865 - DNA, 25 bp, Saccharomyces pastorianus
gaaattacccacatcgttcttataa

SEQ ID NO: 40866 - DNA, 25 bp, Saccharomyces pastorianus
catatttcaatgtcccgttttaact

SEQ ID NO: 40867 - DNA, 25 bp, Saccharomyces pastorianus
gatacaagtcctgattttaacgaaa

SEQ ID NO: 40868 - DNA, 25 bp, Saccharomyces pastorianus
gatttcccaaccttaagattagcca

SEQ ID NO: 40869 - DNA, 25 bp, Saccharomyces pastorianus
aaaggatgacgtgccattggtacaa

SEQ ID NO: 40870 - DNA, 25 bp, Saccharomyces pastorianus
ttgagactacattgtcgggcttgac

SEQ ID NO: 40871 - DNA, 25 bp, Saccharomyces pastorianus
ggttgacgatactgctccactaaaa

SEQ ID NO: 40872 - DNA, 25 bp, Saccharomyces pastorianus
gtacaagtaagctgggacatcgata

SEQ ID NO: 40873 - DNA, 25 bp, Saccharomyces pastorianus
aaactattggaatggctgtcactaa

SEQ ID NO: 40874 - DNA, 25 bp, Saccharomyces pastorianus
cccgtaggtggtatcaaggttatca

SEQ ID NO: 40875 - DNA, 25 bp, Saccharomyces pastorianus
ttgaggcttgcagatctattacttg

SEQ ID NO: 40876 - DNA, 25 bp, Saccharomyces pastorianus
actaaaacagctcaccacttacaag

SEQ ID NO: 40877 - DNA, 25 bp, Saccharomyces pastorianus
gacaaactttgtcttcgatttccca

SEQ ID NO: 40878 - DNA, 25 bp, Saccharomyces pastorianus
cggtgcctccgcaactaccactcta

SEQ ID NO: 40879 - DNA, 25 bp, Saccharomyces pastorianus
ggtgcctccgcaactaccactctag

SEQ ID NO: 40880 - DNA, 25 bp, Saccharomyces pastorianus
gccgccggtgcctccgcaactacca

SEQ ID NO: 40881 - DNA, 25 bp, Saccharomyces pastorianus
ccgccggtgcctccgcaactaccac

SEQ ID NO: 40882 - DNA, 25 bp, Saccharomyces pastorianus
cgccgccggtgcctccgcaactacc

SEQ ID NO: 40883 - DNA, 25 bp, Saccharomyces pastorianus
gccggtgcctccgcaactaccactc

SEQ ID NO: 40884 - DNA, 25 bp, Saccharomyces pastorianus
cgccggtgcctccgcaactaccact

SEQ ID NO: 40885 - DNA, 25 bp, Saccharomyces pastorianus
ccggtgcctccgcaactaccactct

SEQ ID NO: 40886 - DNA, 25 bp, Saccharomyces pastorianus
atcgccgccggtgcctccgcaacta

SEQ ID NO: 40887 - DNA, 25 bp, Saccharomyces pastorianus
tcgccgccggtgcctccgcaactac

SEQ ID NO: 40888 - DNA, 25 bp, Saccharomyces pastorianus
gtgcctccgcaactaccactctagc

SEQ ID NO: 40889 - DNA, 25 bp, Saccharomyces pastorianus
taactgttggttgcctcatgtcatg

SEQ ID NO: 40890 - DNA, 25 bp, Saccharomyces pastorianus
tttctgctgcatccggtaaaattgg

SEQ ID NO: 40891 - DNA, 25 bp, Saccharomyces pastorianus
ttgattttgatctgtgctggttcct

SEQ ID NO: 40892 - DNA, 25 bp, Saccharomyces pastorianus
gtcatggagatctttgccttgttta

SEQ ID NO: 40893 - DNA, 25 bp, Saccharomyces pastorianus
aactgctttgggtactttgatcaac

SEQ ID NO: 40894 - DNA, 25 bp, Saccharomyces pastorianus
gttctgtgtcattgggtttgcatac

SEQ ID NO: 40895 - DNA, 25 bp, Saccharomyces pastorianus
aaattgtacgactccgctgttggta

SEQ ID NO: 40896 - DNA, 25 bp, Saccharomyces pastorianus
actactacctttatcgttcctggtg

SEQ ID NO: 40897 - DNA, 25 bp, Saccharomyces pastorianus
ggatgagtgttttcactgtcgacat

SEQ ID NO: 40898 - DNA, 25 bp, Saccharomyces pastorianus
gttgatcctggtactcttaactaca

SEQ ID NO: 40899 - DNA, 25 bp, Saccharomyces pastorianus
attggccggtttcatcattttgact

SEQ ID NO: 40900 - DNA, 25 bp, Saccharomyces pastorianus
ggagaatacgctagcgaccacgttt

SEQ ID NO: 40901 - DNA, 25 bp, Saccharomyces pastorianus
aagccagtgacgctcagaggtccag

SEQ ID NO: 40902 - DNA, 25 bp, Saccharomyces pastorianus
gaagagaaccccttggacgactttg

SEQ ID NO: 40903 - DNA, 25 bp, Saccharomyces pastorianus
tattgagcccagtgacgaacagagt

SEQ ID NO: 40904 - DNA, 25 bp, Saccharomyces pastorianus
gggtacctaaaaatgcctcgcgcaa

SEQ ID NO: 40905 - DNA, 25 bp, Saccharomyces pastorianus
gtaaatcaactagtcgcgctacaca

SEQ ID NO: 40906 - DNA, 25 bp, Saccharomyces pastorianus
gctacacaactccttgcacgtgaaa

SEQ ID NO: 40907 - DNA, 25 bp, Saccharomyces pastorianus
aactgggccaactcgtggtgtggat

SEQ ID NO: 40908 - DNA, 25 bp, Saccharomyces pastorianus
tgccaaaacattctcaacctttcga

SEQ ID NO: 40909 - DNA, 25 bp, Saccharomyces pastorianus
cctaatgtgccagctacgttttctt

SEQ ID NO: 40910 - DNA, 25 bp, Saccharomyces pastorianus
gggagaaggccgctttaaccagcca

SEQ ID NO: 40911 - DNA, 25 bp, Saccharomyces pastorianus
gttccccgcattcacctttgaaaat

SEQ ID NO: 40912 - DNA, 25 bp, Saccharomyces pastorianus
gggtgtttcaatcctagcgaaggct

SEQ ID NO: 40913 - DNA, 25 bp, Saccharomyces pastorianus
gattatgatgtcattgtccccaatg

SEQ ID NO: 40914 - DNA, 25 bp, Saccharomyces pastorianus
gtgagcaaccatacgatttaaattc

SEQ ID NO: 40915 - DNA, 25 bp, Saccharomyces pastorianus
agaaatggtgtacagttccccgcat

SEQ ID NO: 40916 - DNA, 25 bp, Saccharomyces pastorianus
tatgccctgggtctgttattcaaga

SEQ ID NO: 40917 - DNA, 25 bp, Saccharomyces pastorianus
ggagagttcatttggcttacatcag

SEQ ID NO: 40918 - DNA, 25 bp, Saccharomyces pastorianus
caatgtttggagaccgctacctaca

SEQ ID NO: 40919 - DNA, 25 bp, Saccharomyces pastorianus
gaaactggttgactgctaatgcttt

SEQ ID NO: 40920 - DNA, 25 bp, Saccharomyces pastorianus
gagtcggtggcttaccgcattatac

SEQ ID NO: 40921 - DNA, 25 bp, Saccharomyces pastorianus
gctttgaaaccataccattcttggg

SEQ ID NO: 40922 - DNA, 25 bp, Saccharomyces pastorianus
gagacactacaaataccacgccagt

SEQ ID NO: 40923 - DNA, 25 bp, Saccharomyces pastorianus
tgcaactacgcaagtcggtgacatt

SEQ ID NO: 40924 - DNA, 25 bp, Saccharomyces pastorianus
gaatctatttggtatactgggcagt

SEQ ID NO: 40925 - DNA, 25 bp, Saccharomyces pastorianus
gcattaaacgcttccaccatagaca

SEQ ID NO: 40926 - DNA, 25 bp, Saccharomyces pastorianus
ttcagaatctctctactctttcaag

SEQ ID NO: 40927 - DNA, 25 bp, Saccharomyces pastorianus
tgtttatgcataacctacccaaaat

SEQ ID NO: 40928 - DNA, 25 bp, Saccharomyces pastorianus
tataaaaatgcaccaacgtcccctc

SEQ ID NO: 40929 - DNA, 25 bp, Saccharomyces pastorianus
aggtccatagatttgcaactacgca

SEQ ID NO: 40930 - DNA, 25 bp, Saccharomyces pastorianus
ggccacgatctagaactcctgttga

SEQ ID NO: 40931 - DNA, 25 bp, Saccharomyces pastorianus
cccgcaccagtctcataaagttgta

SEQ ID NO: 40932 - DNA, 25 bp, Saccharomyces pastorianus
acaagaagggcttatttcgcaacga

SEQ ID NO: 40933 - DNA, 25 bp, Saccharomyces pastorianus
aaaaattcatcaaaggtaagccagg

SEQ ID NO: 40934 - DNA, 25 bp, Saccharomyces pastorianus
tatgtaccgtatgctcgtcttacta

SEQ ID NO: 40935 - DNA, 25 bp, Saccharomyces pastorianus
gacgctgaaatttgtataccgaacg

SEQ ID NO: 40936 - DNA, 25 bp, Saccharomyces pastorianus
aaacaatatgtaccgtatgctcgtc

SEQ ID NO: 40937 - DNA, 25 bp, Saccharomyces pastorianus
tgaactagacgaactaaacgtttgg

SEQ ID NO: 40938 - DNA, 25 bp, Saccharomyces pastorianus
aagaaattgaggatgttgtcgaaaa

SEQ ID NO: 40939 - DNA, 25 bp, Saccharomyces pastorianus
tggtttgataaatttgacgctgaaa

SEQ ID NO: 40940 - DNA, 25 bp, Saccharomyces pastorianus
atttgtcgatgagttaatgttacca

SEQ ID NO: 40941 - DNA, 25 bp, Saccharomyces pastorianus
aatgttaccatttcaggttgatgaa

SEQ ID NO: 40942 - DNA, 25 bp, Saccharomyces pastorianus
tcaggttgatgaactagacgaacta

SEQ ID NO: 40943 - DNA, 25 bp, Saccharomyces pastorianus
gtcttactagaggacgataccaaaa

SEQ ID NO: 40944 - DNA, 25 bp, Saccharomyces pastorianus
gtggtgggcaacatacactactcgc

SEQ ID NO: 40945 - DNA, 25 bp, Saccharomyces pastorianus
ggttctgctcgtacgtgtcgatcga

SEQ ID NO: 40946 - DNA, 25 bp, Saccharomyces pastorianus
gtgttctatgcgacgcgtcagcaga

SEQ ID NO: 40947 - DNA, 25 bp, Saccharomyces pastorianus
aagcccgcgctgatggtggagttct

SEQ ID NO: 40948 - DNA, 25 bp, Saccharomyces pastorianus
acaagttggtgtttgccatcgcgac

SEQ ID NO: 40949 - DNA, 25 bp, Saccharomyces pastorianus
ggtcgtgaacatgttgcccgtgaga

SEQ ID NO: 40950 - DNA, 25 bp, Saccharomyces pastorianus
atcgcgacgaccaacgaggttctgg

SEQ ID NO: 40951 - DNA, 25 bp, Saccharomyces pastorianus
gctgaggatcccgttcttgaagaag

SEQ ID NO: 40952 - DNA, 25 bp, Saccharomyces pastorianus
aggcggccaattgcgtctacgtgta

SEQ ID NO: 40953 - DNA, 25 bp, Saccharomyces pastorianus
agagcgtgttgcgactgccttacaa

SEQ ID NO: 40954 - DNA, 25 bp, Saccharomyces pastorianus
aaaggcagacaacgcggccggcaac

SEQ ID NO: 40955 - DNA, 25 bp, Saccharomyces pastorianus
tcaaccactgcattccacggtacag

SEQ ID NO: 40956 - DNA, 25 bp, Saccharomyces pastorianus
gcaacactcagaatcaaagccagca

SEQ ID NO: 40957 - DNA, 25 bp, Saccharomyces pastorianus
tgagctccttactgtacgcttacgg

SEQ ID NO: 40958 - DNA, 25 bp, Saccharomyces pastorianus
ttgttcaacaaggacgtgagctcct

SEQ ID NO: 40959 - DNA, 25 bp, Saccharomyces pastorianus
ttacggcgatgtgcctcaaccactg

SEQ ID NO: 40960 - DNA, 25 bp, Saccharomyces pastorianus
aatgcattccatacagctcaaaact

SEQ ID NO: 40961 - DNA, 25 bp, Saccharomyces pastorianus
tccacggtacagtgcttagatgaac

SEQ ID NO: 40962 - DNA, 25 bp, Saccharomyces pastorianus
gcggaacgactctgttaaacttgga

SEQ ID NO: 40963 - DNA, 25 bp, Saccharomyces pastorianus
agccgaccgcaccagtagtaagcaa

SEQ ID NO: 40964 - DNA, 25 bp, Saccharomyces pastorianus
gacgatgacgaagtagccgaccgca

SEQ ID NO: 40965 - DNA, 25 bp, Saccharomyces pastorianus
tttcaagtttgctctgcggaacgac

SEQ ID NO: 40966 - DNA, 25 bp, Saccharomyces pastorianus
gaattctgtggctgaaggcatttaa

SEQ ID NO: 40967 - DNA, 25 bp, Saccharomyces pastorianus
aggattgaatcgcacttatctgaaa

SEQ ID NO: 40968 - DNA, 25 bp, Saccharomyces pastorianus
agggcgataccatgatcggtggttt

SEQ ID NO: 40969 - DNA, 25 bp, Saccharomyces pastorianus
cctgctgtttgctcatgctttacaa

SEQ ID NO: 40970 - DNA, 25 bp, Saccharomyces pastorianus
gaatcattacgcgaagccacggaat

SEQ ID NO: 40971 - DNA, 25 bp, Saccharomyces pastorianus
tgctttacaatccagggctatttat

SEQ ID NO: 40972 - DNA, 25 bp, Saccharomyces pastorianus
gaatacgctgtttctgttgtcacat

SEQ ID NO: 40973 - DNA, 25 bp, Saccharomyces pastorianus
gtttcaatcttggtcatagccgggt

SEQ ID NO: 40974 - DNA, 25 bp, Saccharomyces pastorianus
tggtgctagaatcctcggcgataca

SEQ ID NO: 40975 - DNA, 25 bp, Saccharomyces pastorianus
aactccgattttcaccattacttgt

SEQ ID NO: 40976 - DNA, 25 bp, Saccharomyces pastorianus
ggaagatcaacgcaaactccgattt

SEQ ID NO: 40977 - DNA, 25 bp, Saccharomyces pastorianus
gatttattacttgctgactcccgac

SEQ ID NO: 40978 - DNA, 25 bp, Saccharomyces pastorianus
tggtacctgggtttgatttcgaaga

SEQ ID NO: 40979 - DNA, 25 bp, Saccharomyces pastorianus
gcttgagcctccaactagtttgcaa

SEQ ID NO: 40980 - DNA, 25 bp, Saccharomyces pastorianus
gttgaagagccttgttggtcctgaa

SEQ ID NO: 40981 - DNA, 25 bp, Saccharomyces pastorianus
gctgatgcagccattgagcctgtaa

SEQ ID NO: 40982 - DNA, 25 bp, Saccharomyces pastorianus
gagactctaccgatagtgttacagt

SEQ ID NO: 40983 - DNA, 25 bp, Saccharomyces pastorianus
gtctcccttgaccatgggcttagaa

SEQ ID NO: 40984 - DNA, 25 bp, Saccharomyces pastorianus
gatttcgaagatcacacctttatga

SEQ ID NO: 40985 - DNA, 25 bp, Saccharomyces pastorianus
gctttgttaaagtccctgcgcttga

SEQ ID NO: 40986 - DNA, 25 bp, Saccharomyces pastorianus
gacaaggaaccagtctacgctgatt

SEQ ID NO: 40987 - DNA, 25 bp, Saccharomyces pastorianus
tactagtgtaccctgatggccaagt

SEQ ID NO: 40988 - DNA, 25 bp, Saccharomyces pastorianus
aatataaagccatcacccagttcgt

SEQ ID NO: 40989 - DNA, 25 bp, Saccharomyces pastorianus
agttatcaatgtcgctgatcgctac

SEQ ID NO: 40990 - DNA, 25 bp, Saccharomyces pastorianus
aagtgtatccactgttccagatgag

SEQ ID NO: 40991 - DNA, 25 bp, Saccharomyces pastorianus
gcacttcctactttaatgggtcctt

SEQ ID NO: 40992 - DNA, 25 bp, Saccharomyces pastorianus
tgacaaggacgtgcgaccaacagat

SEQ ID NO: 40993 - DNA, 25 bp, Saccharomyces pastorianus
gctgccgtgagcctgagtatcaata

SEQ ID NO: 40994 - DNA, 25 bp, Saccharomyces pastorianus
tacccgttcaacaattctctttaca

SEQ ID NO: 40995 - DNA, 25 bp, Saccharomyces pastorianus
ttacgccaacctcaagagagcctgg

SEQ ID NO: 40996 - DNA, 25 bp, Saccharomyces pastorianus
agagcctggcaggatcaacgctatt

SEQ ID NO: 40997 - DNA, 25 bp, Saccharomyces pastorianus
gacatccgaattatacccgttcaac

SEQ ID NO: 40998 - DNA, 25 bp, Saccharomyces pastorianus
ttcgtgacgatactgctgccgtgag

SEQ ID NO: 40999 - DNA, 25 bp, Saccharomyces pastorianus
gatgccatacattccaggttctcaa

SEQ ID NO: 41000 - DNA, 25 bp, Saccharomyces pastorianus
atacattagagcttcgatgtcgctt

SEQ ID NO: 41001 - DNA, 25 bp, Saccharomyces pastorianus
aatacgccaggtgtcgtttacgtca

SEQ ID NO: 41002 - DNA, 25 bp, Saccharomyces pastorianus
aactgctttgaagtctcaagttcct

SEQ ID NO: 41003 - DNA, 25 bp, Saccharomyces pastorianus
gattacggtcgcgtgtttttacagg

SEQ ID NO: 41004 - DNA, 25 bp, Saccharomyces pastorianus
tttacagggtttaatcgacgacgat

SEQ ID NO: 41005 - DNA, 25 bp, Saccharomyces pastorianus
attcgccgttgatgttggttctgta

SEQ ID NO: 41006 - DNA, 25 bp, Saccharomyces pastorianus
ctggccttttacctccattagaaga

SEQ ID NO: 41007 - DNA, 25 bp, Saccharomyces pastorianus
ttacgtcaggccacctattgaagat

SEQ ID NO: 41008 - DNA, 25 bp, Saccharomyces pastorianus
ggatgccaaactatattcgccgttg

SEQ ID NO: 41009 - DNA, 25 bp, Saccharomyces pastorianus
agaacggttcaatgctgctcgacgg

SEQ ID NO: 41010 - DNA, 25 bp, Saccharomyces pastorianus
tatcttctacccaagggccacgttc

SEQ ID NO: 41011 - DNA, 25 bp, Saccharomyces pastorianus
aagacaccctatgctcgatgagcaa

SEQ ID NO: 41012 - DNA, 25 bp, Saccharomyces pastorianus
gtgtcaacaccagcgtcaagaccgg

SEQ ID NO: 41013 - DNA, 25 bp, Saccharomyces pastorianus
tacaagacaccctatgctcgatgag

SEQ ID NO: 41014 - DNA, 25 bp, Saccharomyces pastorianus
aacaccagcgtcaagaccggctatc

SEQ ID NO: 41015 - DNA, 25 bp, Saccharomyces pastorianus
atcattgctgtcgagcgtcgcggtg

SEQ ID NO: 41016 - DNA, 25 bp, Saccharomyces pastorianus
agcgtcgcggtgggctttccgacat

SEQ ID NO: 41017 - DNA, 25 bp, Saccharomyces pastorianus
tcgacgacgtcatcctacaagacac

SEQ ID NO: 41018 - DNA, 25 bp, Saccharomyces pastorianus
aaccgtgtcaacaccagcgtcaaga

SEQ ID NO: 41019 - DNA, 25 bp, Saccharomyces pastorianus
aagcaattcttcctcgacgacgtca

SEQ ID NO: 41020 - DNA, 25 bp, Saccharomyces pastorianus
agaccggctatcttctacccaaggg

SEQ ID NO: 41021 - DNA, 25 bp, Saccharomyces pastorianus
ccagaagcttttggtgggcgcatat

SEQ ID NO: 41022 - DNA, 25 bp, Saccharomyces pastorianus
gatcatacgctttgctcgataccaa

SEQ ID NO: 41023 - DNA, 25 bp, Saccharomyces pastorianus
gggcgcatatgttgtcttatcgttg

SEQ ID NO: 41024 - DNA, 25 bp, Saccharomyces pastorianus
accttgttgggctcatccagaagaa

SEQ ID NO: 41025 - DNA, 25 bp, Saccharomyces pastorianus
tggtacttcactcgtttcgttgaaa

SEQ ID NO: 41026 - DNA, 25 bp, Saccharomyces pastorianus
agggtattccattgctgttgtagca

SEQ ID NO: 41027 - DNA, 25 bp, Saccharomyces pastorianus
cttatcgttgatgttctggtacttc

SEQ ID NO: 41028 - DNA, 25 bp, Saccharomyces pastorianus
attaacgtgtattccatcccagagc

SEQ ID NO: 41029 - DNA, 25 bp, Saccharomyces pastorianus
gaggtgctcttcaaatggttttctg

SEQ ID NO: 41030 - DNA, 25 bp, Saccharomyces pastorianus
aagaacgaacctctgtaccttgttg

SEQ ID NO: 41031 - DNA, 25 bp, Saccharomyces pastorianus
aggctttaccttctattttcgcgag

SEQ ID NO: 41032 - DNA, 25 bp, Saccharomyces pastorianus
gaaatcagtggatgcttgaagctag

SEQ ID NO: 41033 - DNA, 25 bp, Saccharomyces pastorianus
gagtaatttagacaacctgaatggt

SEQ ID NO: 41034 - DNA, 25 bp, Saccharomyces pastorianus
gattttgtctttcatgctattttcc

SEQ ID NO: 41035 - DNA, 25 bp, Saccharomyces pastorianus
cgattacgacagcaccgattatggt

SEQ ID NO: 41036 - DNA, 25 bp, Saccharomyces pastorianus
tacaataccgagttattactgttac

SEQ ID NO: 41037 - DNA, 25 bp, Saccharomyces pastorianus
atgtgtccaaggtcatcgatgagaa

SEQ ID NO: 41038 - DNA, 25 bp, Saccharomyces pastorianus
gctagtatttggtgattctccgaga

SEQ ID NO: 41039 - DNA, 25 bp, Saccharomyces pastorianus
gctattttcctttatcatatgggtg

SEQ ID NO: 41040 - DNA, 25 bp, Saccharomyces pastorianus
tgttcgaaagagtgtatacgcctac

SEQ ID NO: 41041 - DNA, 25 bp, Saccharomyces pastorianus
atacatccaagattcttacctaacg

SEQ ID NO: 41042 - DNA, 25 bp, Saccharomyces pastorianus
tactaacggcacacaaagtttgagt

SEQ ID NO: 41043 - DNA, 25 bp, Saccharomyces pastorianus
gatgctagctccaacaatgtatgta

SEQ ID NO: 41044 - DNA, 25 bp, Saccharomyces pastorianus
gtttcagtcgaaaacacccacagcg

SEQ ID NO: 41045 - DNA, 25 bp, Saccharomyces pastorianus
ggatcctctccagaaatttgttgtc

SEQ ID NO: 41046 - DNA, 25 bp, Saccharomyces pastorianus
gccaacgatcttctttctagcgagc

SEQ ID NO: 41047 - DNA, 25 bp, Saccharomyces pastorianus
gcccgccactggatgaagatgctag

SEQ ID NO: 41048 - DNA, 25 bp, Saccharomyces pastorianus
acaagcaactgtacacgccaacgat

SEQ ID NO: 41049 - DNA, 25 bp, Saccharomyces pastorianus
ttctagcgagcccagtatagccaac

SEQ ID NO: 41050 - DNA, 25 bp, Saccharomyces pastorianus
agccaacaagttgagcccgtagaaa

SEQ ID NO: 41051 - DNA, 25 bp, Saccharomyces pastorianus
tccatgggctagttccagcttcaaa

SEQ ID NO: 41052 - DNA, 25 bp, Saccharomyces pastorianus
ccacagcgaccatggtgagttcgaa

SEQ ID NO: 41053 - DNA, 25 bp, Saccharomyces pastorianus
gggccattctagttccaaatcgagc

SEQ ID NO: 41054 - DNA, 25 bp, Saccharomyces pastorianus
ggtattgcaatgtcaccattatcta

SEQ ID NO: 41055 - DNA, 25 bp, Saccharomyces pastorianus
aacgtttctttatctactgatgatc

SEQ ID NO: 41056 - DNA, 25 bp, Saccharomyces pastorianus
gtttcggcatacttattggctcacg

SEQ ID NO: 41057 - DNA, 25 bp, Saccharomyces pastorianus
gaaactctgtcttgcaaagtggatg

SEQ ID NO: 41058 - DNA, 25 bp, Saccharomyces pastorianus
gttttcctacaccagagaaccatta

SEQ ID NO: 41059 - DNA, 25 bp, Saccharomyces pastorianus
gatacactatcaaccgaactggaac

SEQ ID NO: 41060 - DNA, 25 bp, Saccharomyces pastorianus
ttggctcacggtatttcccatggta

SEQ ID NO: 41061 - DNA, 25 bp, Saccharomyces pastorianus
gttgcggcgcaaatctataaactgt

SEQ ID NO: 41062 - DNA, 25 bp, Saccharomyces pastorianus
gatgatcctttacagttttcctaca

SEQ ID NO: 41063 - DNA, 25 bp, Saccharomyces pastorianus
gaagaatattcagttgcggcgcaaa

SEQ ID NO: 41064 - DNA, 25 bp, Saccharomyces pastorianus
gatcctgaacatctggtttcggcat

SEQ ID NO: 41065 - DNA, 25 bp, Saccharomyces pastorianus
aaaagctgattccactacccatatg

SEQ ID NO: 41066 - DNA, 25 bp, Saccharomyces pastorianus
gtacaacgctgctatccaggcacaa

SEQ ID NO: 41067 - DNA, 25 bp, Saccharomyces pastorianus
tgagttcgccgattgggacccagaa

SEQ ID NO: 41068 - DNA, 25 bp, Saccharomyces pastorianus
gggacccagaatccatggcgtacaa

SEQ ID NO: 41069 - DNA, 25 bp, Saccharomyces pastorianus
aactgtccacgagcgcgtttatgga

SEQ ID NO: 41070 - DNA, 25 bp, Saccharomyces pastorianus
ttgttttcccctcatacgcagaaag

SEQ ID NO: 41071 - DNA, 25 bp, Saccharomyces pastorianus
ttgcatctgtcggtgatatcctcaa

SEQ ID NO: 41072 - DNA, 25 bp, Saccharomyces pastorianus
gacccgaagggtggcatcattgcat

SEQ ID NO: 41073 - DNA, 25 bp, Saccharomyces pastorianus
atgactgctgtacgtcttatatgca

SEQ ID NO: 41074 - DNA, 25 bp, Saccharomyces pastorianus
tgataagcgttctctaccaactgtc

SEQ ID NO: 41075 - DNA, 25 bp, Saccharomyces pastorianus
tagtgctcgagtacaacgtcgcatt

SEQ ID NO: 41076 - DNA, 25 bp, Saccharomyces pastorianus
gtaccctcaggactctttgaacgaa

SEQ ID NO: 41077 - DNA, 25 bp, Saccharomyces pastorianus
aagaactttgtgctcttctgggtca

SEQ ID NO: 41078 - DNA, 25 bp, Saccharomyces pastorianus
attgcagagcacagcgtcttggact

SEQ ID NO: 41079 - DNA, 25 bp, Saccharomyces pastorianus
gacagggtgctaaccgccgtggtaa

SEQ ID NO: 41080 - DNA, 25 bp, Saccharomyces pastorianus
gggatcgtgagcaacctgtttcatc

SEQ ID NO: 41081 - DNA, 25 bp, Saccharomyces pastorianus
tgtttcatccgtccaagaccaagac

SEQ ID NO: 41082 - DNA, 25 bp, Saccharomyces pastorianus
gaaagacatcaacacgctgcccaaa

SEQ ID NO: 41083 - DNA, 25 bp, Saccharomyces pastorianus
gaaggtggttccaaaccgtgtgctt

SEQ ID NO: 41084 - DNA, 25 bp, Saccharomyces pastorianus
gaagcggtagtgatccctgaccaag

SEQ ID NO: 41085 - DNA, 25 bp, Saccharomyces pastorianus
gtgttgtcgggcgaaatctccaaga

SEQ ID NO: 41086 - DNA, 25 bp, Saccharomyces pastorianus
ttggacttcatgctcggccacataa

SEQ ID NO: 41087 - DNA, 25 bp, Saccharomyces pastorianus
gagttgtccaactgttgctccggga

SEQ ID NO: 41088 - DNA, 25 bp, Saccharomyces pastorianus
aggcacatggtttggcgtttagcgt

SEQ ID NO: 41089 - DNA, 25 bp, Saccharomyces pastorianus
gtagttcctggaacgtctctaaagg

SEQ ID NO: 41090 - DNA, 25 bp, Saccharomyces pastorianus
taaagtcgtggttatcggccaggac

SEQ ID NO: 41091 - DNA, 25 bp, Saccharomyces pastorianus
tgttgaagtcggtacatccatctcc

SEQ ID NO: 41092 - DNA, 25 bp, Saccharomyces pastorianus
gggcgcacaatgcaaactcacattc

SEQ ID NO: 41093 - DNA, 25 bp, Saccharomyces pastorianus
gttctattgcttaacacgtcattga

SEQ ID NO: 41094 - DNA, 25 bp, Saccharomyces pastorianus
ggttccacttccgtgggagctagta

SEQ ID NO: 41095 - DNA, 25 bp, Saccharomyces pastorianus
gccaggacccatatcataaccataa

SEQ ID NO: 41096 - DNA, 25 bp, Saccharomyces pastorianus
gtagagtctttgttgggttccactt

SEQ ID NO: 41097 - DNA, 25 bp, Saccharomyces pastorianus
tacatccatctccactaagtgcaag

SEQ ID NO: 41098 - DNA, 25 bp, Saccharomyces pastorianus
agtttgtagagctcacatggttgta

SEQ ID NO: 41099 - DNA, 25 bp, Saccharomyces pastorianus
gtttggtcacagtattttctgcacc

SEQ ID NO: 41100 - DNA, 25 bp, Saccharomyces pastorianus
ccgctagatagtaccgccttgaaac

SEQ ID NO: 41101 - DNA, 25 bp, Saccharomyces pastorianus
tcgacacttttaatacgttgccgtt

SEQ ID NO: 41102 - DNA, 25 bp, Saccharomyces pastorianus
attagacatgtcgttaggcccactg

SEQ ID NO: 41103 - DNA, 25 bp, Saccharomyces pastorianus
aggcccactgacgtacccgattttg

SEQ ID NO: 41104 - DNA, 25 bp, Saccharomyces pastorianus
gttgccgttagctgccattgttgca

SEQ ID NO: 41105 - DNA, 25 bp, Saccharomyces pastorianus
ttggaaaactttcatcgacactttt

SEQ ID NO: 41106 - DNA, 25 bp, Saccharomyces pastorianus
ttatcgcctgttttaaactcaatgg

SEQ ID NO: 41107 - DNA, 25 bp, Saccharomyces pastorianus
tcttttgaattgttggacccgctag

SEQ ID NO: 41108 - DNA, 25 bp, Saccharomyces pastorianus
gtcagatccaacagattcacccaat

SEQ ID NO: 41109 - DNA, 25 bp, Saccharomyces pastorianus
gtcttggctccattatagggtcgct

SEQ ID NO: 41110 - DNA, 25 bp, Saccharomyces pastorianus
taagacatatccaccatcccaataa

SEQ ID NO: 41111 - DNA, 25 bp, Saccharomyces pastorianus
ttgctagtagaatctcttctccctc

SEQ ID NO: 41112 - DNA, 25 bp, Saccharomyces pastorianus
tatagggtcgctgggtttgctagta

SEQ ID NO: 41113 - DNA, 25 bp, Saccharomyces pastorianus
aaactgggactcattggatcaaggt

SEQ ID NO: 41114 - DNA, 25 bp, Saccharomyces pastorianus
ataacagcaatccaccatcagatga

SEQ ID NO: 41115 - DNA, 25 bp, Saccharomyces pastorianus
attcgttgtttttgcgttattccag

SEQ ID NO: 41116 - DNA, 25 bp, Saccharomyces pastorianus
gcgttattccagatgtcgttagatt

SEQ ID NO: 41117 - DNA, 25 bp, Saccharomyces pastorianus
gttagatttttacatcggcggtcaa

SEQ ID NO: 41118 - DNA, 25 bp, Saccharomyces pastorianus
gtttttggcgctatttgcaacctta

SEQ ID NO: 41119 - DNA, 25 bp, Saccharomyces pastorianus
actagtcacattttgtatctcgaac

SEQ ID NO: 41120 - DNA, 25 bp, Saccharomyces pastorianus
aaagagtcacggtcgagccaactgc

SEQ ID NO: 41121 - DNA, 25 bp, Saccharomyces pastorianus
aatcgcaagctggtaaccccgaagg

SEQ ID NO: 41122 - DNA, 25 bp, Saccharomyces pastorianus
gaataccgtgataagtcccgtgagt

SEQ ID NO: 41123 - DNA, 25 bp, Saccharomyces pastorianus
acatctagtgcttcaagggtcttca

SEQ ID NO: 41124 - DNA, 25 bp, Saccharomyces pastorianus
attatcataccctcggaataccgtg

SEQ ID NO: 41125 - DNA, 25 bp, Saccharomyces pastorianus
tgccgatctctgcattgacatcaac

SEQ ID NO: 41126 - DNA, 25 bp, Saccharomyces pastorianus
gtaactgcaattgcggcgggtcaac

SEQ ID NO: 41127 - DNA, 25 bp, Saccharomyces pastorianus
gagtcagtatccaattcccaatatg

SEQ ID NO: 41128 - DNA, 25 bp, Saccharomyces pastorianus
actgacgtcttcacaatggccaatg

SEQ ID NO: 41129 - DNA, 25 bp, Saccharomyces pastorianus
tagccaagacatcgcgcattcaaat

SEQ ID NO: 41130 - DNA, 25 bp, Saccharomyces pastorianus
gatctgagtcggaatcgcgttcgga

SEQ ID NO: 41131 - DNA, 25 bp, Saccharomyces pastorianus
gtttgtttgcattgacatcacccaa

SEQ ID NO: 41132 - DNA, 25 bp, Saccharomyces pastorianus
tggacggcgccttacaagccaaaag

SEQ ID NO: 41133 - DNA, 25 bp, Saccharomyces pastorianus
aatggctcaagcatttggcagggag

SEQ ID NO: 41134 - DNA, 25 bp, Saccharomyces pastorianus
aacgtacaacaggtggacggcgcct

SEQ ID NO: 41135 - DNA, 25 bp, Saccharomyces pastorianus
ctgggagaaacttagccgtacgcct

SEQ ID NO: 41136 - DNA, 25 bp, Saccharomyces pastorianus
ggttctccagcagttaagttgccaa

SEQ ID NO: 41137 - DNA, 25 bp, Saccharomyces pastorianus
gacatcacccaacccgtttaggaag

SEQ ID NO: 41138 - DNA, 25 bp, Saccharomyces pastorianus
gcaaaagctacagaggcccaactaa

SEQ ID NO: 41139 - DNA, 25 bp, Saccharomyces pastorianus
aaaagcagcgagtggcaacttgaaa

SEQ ID NO: 41140 - DNA, 25 bp, Saccharomyces pastorianus
ccgtacgcctaacttctaactatga

SEQ ID NO: 41141 - DNA, 25 bp, Saccharomyces pastorianus
gaaacagtatcatctacagcaggaa

SEQ ID NO: 41142 - DNA, 25 bp, Saccharomyces pastorianus
gtcgtatcactctgcaataaacgca

SEQ ID NO: 41143 - DNA, 25 bp, Saccharomyces pastorianus
ctaagctactcagacccaattttac

SEQ ID NO: 41144 - DNA, 25 bp, Saccharomyces pastorianus
aaatgctctgattgctttgaagaag

SEQ ID NO: 41145 - DNA, 25 bp, Saccharomyces pastorianus
aagggcccgctacaatttggctatt

SEQ ID NO: 41146 - DNA, 25 bp, Saccharomyces pastorianus
gctttcttgagcaatggtgactaca

SEQ ID NO: 41147 - DNA, 25 bp, Saccharomyces pastorianus
gaaaattcgacaatctctggagagc

SEQ ID NO: 41148 - DNA, 25 bp, Saccharomyces pastorianus
atatttataccccactgtaggacaa

SEQ ID NO: 41149 - DNA, 25 bp, Saccharomyces pastorianus
gtctttgctgaagatgcgtgtaaca

SEQ ID NO: 41150 - DNA, 25 bp, Saccharomyces pastorianus
gaccaacgtaagattcattccgtat

SEQ ID NO: 41151 - DNA, 25 bp, Saccharomyces pastorianus
gatgtctattttggagtctttgctg

SEQ ID NO: 41152 - DNA, 25 bp, Saccharomyces pastorianus
gctatattagccaataccaagtcgt

SEQ ID NO: 41153 - DNA, 25 bp, Saccharomyces pastorianus
cacactgttatggatggtgccgggt

SEQ ID NO: 41154 - DNA, 25 bp, Saccharomyces pastorianus
tcagtaattggacacgcgagcctta

SEQ ID NO: 41155 - DNA, 25 bp, Saccharomyces pastorianus
atttgcaggcgaacacactgttatg

SEQ ID NO: 41156 - DNA, 25 bp, Saccharomyces pastorianus
gctgttgggatcaacctttgctttt

SEQ ID NO: 41157 - DNA, 25 bp, Saccharomyces pastorianus
tatgatgctgatgcaagcgccgcta

SEQ ID NO: 41158 - DNA, 25 bp, Saccharomyces pastorianus
actttggccaactcatctgatgact

SEQ ID NO: 41159 - DNA, 25 bp, Saccharomyces pastorianus
cctgttgatatggtcgttgctatgt

SEQ ID NO: 41160 - DNA, 25 bp, Saccharomyces pastorianus
gcaagcgccgctatctaattatata

SEQ ID NO: 41161 - DNA, 25 bp, Saccharomyces pastorianus
aaaattgcgactttggccaactcat

SEQ ID NO: 41162 - DNA, 25 bp, Saccharomyces pastorianus
caaacaagttcgtgatgccaaagat

SEQ ID NO: 41163 - DNA, 25 bp, Saccharomyces pastorianus
ttactcccgtggtgcttattcagcc

SEQ ID NO: 41164 - DNA, 25 bp, Saccharomyces pastorianus
gacattcatgataactccttctcca

SEQ ID NO: 41165 - DNA, 25 bp, Saccharomyces pastorianus
accgcgacgaaatcctcatatcaga

SEQ ID NO: 41166 - DNA, 25 bp, Saccharomyces pastorianus
gaaaaccagatccaagtaggcatga

SEQ ID NO: 41167 - DNA, 25 bp, Saccharomyces pastorianus
attgactcccctatcactgatgtat

SEQ ID NO: 41168 - DNA, 25 bp, Saccharomyces pastorianus
ataacaacatgggtctgcatcgcga

SEQ ID NO: 41169 - DNA, 25 bp, Saccharomyces pastorianus
tatcctcctgcatcatccgaagaat

SEQ ID NO: 41170 - DNA, 25 bp, Saccharomyces pastorianus
gtggtcgagatgttatactccgaaa

SEQ ID NO: 41171 - DNA, 25 bp, Saccharomyces pastorianus
aagacgtggatttgcaccgcgacga

SEQ ID NO: 41172 - DNA, 25 bp, Saccharomyces pastorianus
taatcaggtacaacgcgtcatatcc

SEQ ID NO: 41173 - DNA, 25 bp, Saccharomyces pastorianus
ataactccttctccagtggtcgaga

SEQ ID NO: 41174 - DNA, 25 bp, Saccharomyces pastorianus
gcatcgcgacgaatttaagctgatt

SEQ ID NO: 41175 - DNA, 25 bp, Saccharomyces pastorianus
gcaaggctcaagtaatccgatcgaa

SEQ ID NO: 41176 - DNA, 25 bp, Saccharomyces pastorianus
gacgccagtgcaagtacgattcttt

SEQ ID NO: 41177 - DNA, 25 bp, Saccharomyces pastorianus
caaagtagctctaagccgggcggga

SEQ ID NO: 41178 - DNA, 25 bp, Saccharomyces pastorianus
aaacgaggcaccagggctggccaat

SEQ ID NO: 41179 - DNA, 25 bp, Saccharomyces pastorianus
atcactgttacattgcctatcgtta

SEQ ID NO: 41180 - DNA, 25 bp, Saccharomyces pastorianus
gagccatttgcaagtgcccacatac

SEQ ID NO: 41181 - DNA, 25 bp, Saccharomyces pastorianus
cacatacacttcgaggtccgacagt

SEQ ID NO: 41182 - DNA, 25 bp, Saccharomyces pastorianus
aggtttgccaagtcctggaactcaa

SEQ ID NO: 41183 - DNA, 25 bp, Saccharomyces pastorianus
aaggccatgtatccgttagttggaa

SEQ ID NO: 41184 - DNA, 25 bp, Saccharomyces pastorianus
ctggccaatttccacaaaggcgatt

SEQ ID NO: 41185 - DNA, 25 bp, Saccharomyces pastorianus
tatcgttactagtgaaggcttccca

SEQ ID NO: 41186 - DNA, 25 bp, Saccharomyces pastorianus
atgggtgtttatttaggcgcgctct

SEQ ID NO: 41187 - DNA, 25 bp, Saccharomyces pastorianus
atactgtttgttttggtgctgccac

SEQ ID NO: 41188 - DNA, 25 bp, Saccharomyces pastorianus
gtaacaaatagtgtcaccccggtga

SEQ ID NO: 41189 - DNA, 25 bp, Saccharomyces pastorianus
gatgtcatcttaaaggcccagctga

SEQ ID NO: 41190 - DNA, 25 bp, Saccharomyces pastorianus
tacatttcagggttcatcatttatt

SEQ ID NO: 41191 - DNA, 25 bp, Saccharomyces pastorianus
gcgctcttttcgttattggtcattg

SEQ ID NO: 41192 - DNA, 25 bp, Saccharomyces pastorianus
taccataatccgagaaacccttacg

SEQ ID NO: 41193 - DNA, 25 bp, Saccharomyces pastorianus
aatgcactggctgcaagggcataca

SEQ ID NO: 41194 - DNA, 25 bp, Saccharomyces pastorianus
acgctatcatgctgtaatttccaat

SEQ ID NO: 41195 - DNA, 25 bp, Saccharomyces pastorianus
agtggttatacctacgctatcatgc

SEQ ID NO: 41196 - DNA, 25 bp, Saccharomyces pastorianus
aagtttctacgtaccataatccgag

SEQ ID NO: 41197 - DNA, 25 bp, Saccharomyces pastorianus
gaccttactgaagtgcctctaactt

SEQ ID NO: 41198 - DNA, 25 bp, Saccharomyces pastorianus
ttcctcttactctttgctacaatta

SEQ ID NO: 41199 - DNA, 25 bp, Saccharomyces pastorianus
gccactagtggtacatacgtattca

SEQ ID NO: 41200 - DNA, 25 bp, Saccharomyces pastorianus
tatcactttcgagcctaaatcctgt

SEQ ID NO: 41201 - DNA, 25 bp, Saccharomyces pastorianus
ctgcttcaattgttatcctgtagat

SEQ ID NO: 41202 - DNA, 25 bp, Saccharomyces pastorianus
gcgaactcatcaagcagaccgaaga

SEQ ID NO: 41203 - DNA, 25 bp, Saccharomyces pastorianus
ggtcccacatttagtagtaggccat

SEQ ID NO: 41204 - DNA, 25 bp, Saccharomyces pastorianus
attattatatctccccatccataga

SEQ ID NO: 41205 - DNA, 25 bp, Saccharomyces pastorianus
tcaactctgccttcaaaatccatag

SEQ ID NO: 41206 - DNA, 25 bp, Saccharomyces pastorianus
gctacaattacgcaaggtcccacat

SEQ ID NO: 41207 - DNA, 25 bp, Saccharomyces pastorianus
tgaacctgttgaccttactgaagtg

SEQ ID NO: 41208 - DNA, 25 bp, Saccharomyces pastorianus
actattttgtcactgtccaacctga

SEQ ID NO: 41209 - DNA, 25 bp, Saccharomyces pastorianus
ggtaatacttccgttttgattcatc

SEQ ID NO: 41210 - DNA, 25 bp, Saccharomyces pastorianus
tatgatctatctcaacaggtgttgg

SEQ ID NO: 41211 - DNA, 25 bp, Saccharomyces pastorianus
aaaaactgcctctattcagttccgc

SEQ ID NO: 41212 - DNA, 25 bp, Saccharomyces pastorianus
gataccatgataaggccgtcagaag

SEQ ID NO: 41213 - DNA, 25 bp, Saccharomyces pastorianus
gattcatcaagtctccaagcatttg

SEQ ID NO: 41214 - DNA, 25 bp, Saccharomyces pastorianus
acttaattgcgtcatccttcgataa

SEQ ID NO: 41215 - DNA, 25 bp, Saccharomyces pastorianus
ttccgccgctgacgatggtactata

SEQ ID NO: 41216 - DNA, 25 bp, Saccharomyces pastorianus
cagtcttggtgttcttgatgctatc

SEQ ID NO: 41217 - DNA, 25 bp, Saccharomyces pastorianus
atttgactcaatcgcccttcagaaa

SEQ ID NO: 41218 - DNA, 25 bp, Saccharomyces pastorianus
aagcttggttgttctctgctggtgc

SEQ ID NO: 41219 - DNA, 25 bp, Saccharomyces pastorianus
tgaagtacggatgcgcttcgcttaa

SEQ ID NO: 41220 - DNA, 25 bp, Saccharomyces pastorianus
gaagattttgccctttggaatgaag

SEQ ID NO: 41221 - DNA, 25 bp, Saccharomyces pastorianus
gggcggcatgtcgagagatctttct

SEQ ID NO: 41222 - DNA, 25 bp, Saccharomyces pastorianus
tgctgtgccgtttggagttggtcaa

SEQ ID NO: 41223 - DNA, 25 bp, Saccharomyces pastorianus
gaacgaaatagtacccgagatgata

SEQ ID NO: 41224 - DNA, 25 bp, Saccharomyces pastorianus
cattgttaccttccatgacgaacga

SEQ ID NO: 41225 - DNA, 25 bp, Saccharomyces pastorianus
agagatcttcggcactttcaatgaa

SEQ ID NO: 41226 - DNA, 25 bp, Saccharomyces pastorianus
gatgtcaggatctcgcatattcata

SEQ ID NO: 41227 - DNA, 25 bp, Saccharomyces pastorianus
ataacgtctacgctgaacgaagatt

SEQ ID NO: 41228 - DNA, 25 bp, Saccharomyces pastorianus
aggatttaactccatccttcatgat

SEQ ID NO: 41229 - DNA, 25 bp, Saccharomyces pastorianus
gttggtcaagatattccgtatcatg

SEQ ID NO: 41230 - DNA, 25 bp, Saccharomyces pastorianus
gagacttctcaactggacttgatga

SEQ ID NO: 41231 - DNA, 25 bp, Saccharomyces pastorianus
tctacaaagcctctcttcaacttga

SEQ ID NO: 41232 - DNA, 25 bp, Saccharomyces pastorianus
taacgacgtccgtactgaagtcctt

SEQ ID NO: 41233 - DNA, 25 bp, Saccharomyces pastorianus
gaagtccttagccaacaccctgaga

SEQ ID NO: 41234 - DNA, 25 bp, Saccharomyces pastorianus
tgcgccctgccgaactaagcaagat

SEQ ID NO: 41235 - DNA, 25 bp, Saccharomyces pastorianus
aggtccttccaccaatctacaaagc

SEQ ID NO: 41236 - DNA, 25 bp, Saccharomyces pastorianus
caaagaaacctgctggtcccttcat

SEQ ID NO: 41237 - DNA, 25 bp, Saccharomyces pastorianus
ggtcccttcatcaaatacgctaacg

SEQ ID NO: 41238 - DNA, 25 bp, Saccharomyces pastorianus
gcctacctctgcttatttcttgtat

SEQ ID NO: 41239 - DNA, 25 bp, Saccharomyces pastorianus
ttacagtctactgaccaggtccttc

SEQ ID NO: 41240 - DNA, 25 bp, Saccharomyces pastorianus
ttgaccagcaccttgttgaaagcct

SEQ ID NO: 41241 - DNA, 25 bp, Saccharomyces pastorianus
gacaatgatagttattcgccttcta

SEQ ID NO: 41242 - DNA, 25 bp, Saccharomyces pastorianus
gctaccgttcaggatgcacaattat

SEQ ID NO: 41243 - DNA, 25 bp, Saccharomyces pastorianus
gttcaccatgtgagaccaaagcatc

SEQ ID NO: 41244 - DNA, 25 bp, Saccharomyces pastorianus
aggctattagcccatgagaacaatg

SEQ ID NO: 41245 - DNA, 25 bp, Saccharomyces pastorianus
ttaccatccgatttattcaaacctt

SEQ ID NO: 41246 - DNA, 25 bp, Saccharomyces pastorianus
taagagccaaaataggacgcatcct

SEQ ID NO: 41247 - DNA, 25 bp, Saccharomyces pastorianus
agcaccaaacaagggcgaatctcgt

SEQ ID NO: 41248 - DNA, 25 bp, Saccharomyces pastorianus
attcaaaccttttgctaccgttcag

SEQ ID NO: 41249 - DNA, 25 bp, Saccharomyces pastorianus
cagcgtatcctggtaaattaaactt

SEQ ID NO: 41250 - DNA, 25 bp, Saccharomyces pastorianus
aattggcaacattcagcgtatcctg

SEQ ID NO: 41251 - DNA, 25 bp, Saccharomyces pastorianus
ggacgcatccttcatacatcacaaa

SEQ ID NO: 41252 - DNA, 25 bp, Saccharomyces pastorianus
tatcttatcatgtgtccgtgccaat

SEQ ID NO: 41253 - DNA, 25 bp, Saccharomyces pastorianus
taaacgtcggactaactcgtgccaa

SEQ ID NO: 41254 - DNA, 25 bp, Saccharomyces pastorianus
atgtactgtgcaactagttcgccct

SEQ ID NO: 41255 - DNA, 25 bp, Saccharomyces pastorianus
aattccaagatttcgacactcagag

SEQ ID NO: 41256 - DNA, 25 bp, Saccharomyces pastorianus
gtaatttcagtagtgcatttgtcaa

SEQ ID NO: 41257 - DNA, 25 bp, Saccharomyces pastorianus
gcgatcctcgccgtttaaacgtcgg

SEQ ID NO: 41258 - DNA, 25 bp, Saccharomyces pastorianus
gaacgatggaaatctctaccaggag

SEQ ID NO: 41259 - DNA, 25 bp, Saccharomyces pastorianus
acaacaggctatcggtttcttacgc

SEQ ID NO: 41260 - DNA, 25 bp, Saccharomyces pastorianus
aattctgagctttcatcttacatta

SEQ ID NO: 41261 - DNA, 25 bp, Saccharomyces pastorianus
ggaaacccaagatccctagcaagga

SEQ ID NO: 41262 - DNA, 25 bp, Saccharomyces pastorianus
ctagttcgccctcaaccaagaaaga

SEQ ID NO: 41263 - DNA, 25 bp, Saccharomyces pastorianus
ccagatcatttttggcggcatggtt

SEQ ID NO: 41264 - DNA, 25 bp, Saccharomyces pastorianus
gcatttttgatttcctatctcccaa

SEQ ID NO: 41265 - DNA, 25 bp, Saccharomyces pastorianus
gctatgcatgtttattggtggccac

SEQ ID NO: 41266 - DNA, 25 bp, Saccharomyces pastorianus
agcagtactactctctcattaatga

SEQ ID NO: 41267 - DNA, 25 bp, Saccharomyces pastorianus
gtgcgtccttgactttagtgtccta

SEQ ID NO: 41268 - DNA, 25 bp, Saccharomyces pastorianus
gacgacggataccatttcactaaaa

SEQ ID NO: 41269 - DNA, 25 bp, Saccharomyces pastorianus
aatgaacctagctcactgtgcatac

SEQ ID NO: 41270 - DNA, 25 bp, Saccharomyces pastorianus
attggtaacgtccttggtgcgtcct

SEQ ID NO: 41271 - DNA, 25 bp, Saccharomyces pastorianus
gatctacgtgtttgcgtcagtgtta

SEQ ID NO: 41272 - DNA, 25 bp, Saccharomyces pastorianus
gaaagcccaatttcccaacggatgt

SEQ ID NO: 41273 - DNA, 25 bp, Saccharomyces pastorianus
gttatttgttgctgggacacctgta

SEQ ID NO: 41274 - DNA, 25 bp, Saccharomyces pastorianus
ttatgcccaatacctgccaggtgat

SEQ ID NO: 41275 - DNA, 25 bp, Saccharomyces pastorianus
tagtggcgcctctgatgatttcaaa

SEQ ID NO: 41276 - DNA, 25 bp, Saccharomyces pastorianus
gaagaattacacttcccctcagtaa

SEQ ID NO: 41277 - DNA, 25 bp, Saccharomyces pastorianus
gaaatatgcagaccctctcttgaaa

SEQ ID NO: 41278 - DNA, 25 bp, Saccharomyces pastorianus
tcagggtgctctgggttatgcccaa

SEQ ID NO: 41279 - DNA, 25 bp, Saccharomyces pastorianus
agaaacgatgcctttgacaaatact

SEQ ID NO: 41280 - DNA, 25 bp, Saccharomyces pastorianus
gccaggtgatattttcttgttgacg

SEQ ID NO: 41281 - DNA, 25 bp, Saccharomyces pastorianus
ggtgatattattgactccgaagtgt

SEQ ID NO: 41282 - DNA, 25 bp, Saccharomyces pastorianus
atggccactgcaatggtcacggagt

SEQ ID NO: 41283 - DNA, 25 bp, Saccharomyces pastorianus
aagattgcccaacttctgctgaaga

SEQ ID NO: 41284 - DNA, 25 bp, Saccharomyces pastorianus
attattccacgtggtcagggtgctc

SEQ ID NO: 41285 - DNA, 25 bp, Saccharomyces pastorianus
gtttggtgccaaaattattcgcgga

SEQ ID NO: 41286 - DNA, 25 bp, Saccharomyces pastorianus
accgatgattactatgcttccgaat

SEQ ID NO: 41287 - DNA, 25 bp, Saccharomyces pastorianus
tggcgacaccagcattacatatgaa

SEQ ID NO: 41288 - DNA, 25 bp, Saccharomyces pastorianus
gcttgttggcgatcccgttgaaaaa

SEQ ID NO: 41289 - DNA, 25 bp, Saccharomyces pastorianus
aatcgactactattctagggtggaa

SEQ ID NO: 41290 - DNA, 25 bp, Saccharomyces pastorianus
gttatatcagcattctgcagcctgt

SEQ ID NO: 41291 - DNA, 25 bp, Saccharomyces pastorianus
agaacgttaacgctggcgacaccag

SEQ ID NO: 41292 - DNA, 25 bp, Saccharomyces pastorianus
agacgtactgaaggctatcggtgaa

SEQ ID NO: 41293 - DNA, 25 bp, Saccharomyces pastorianus
agagactatattgtatccggtttta

SEQ ID NO: 41294 - DNA, 25 bp, Saccharomyces pastorianus
ttttgaacacagacctcatggacat

SEQ ID NO: 41295 - DNA, 25 bp, Saccharomyces pastorianus
aataggcccaagaccggactatcgg

SEQ ID NO: 41296 - DNA, 25 bp, Saccharomyces pastorianus
aaaccaagcattcgaatcactcata

SEQ ID NO: 41297 - DNA, 25 bp, Saccharomyces pastorianus
taggaacgatcttattgccctttta

SEQ ID NO: 41298 - DNA, 25 bp, Saccharomyces pastorianus
gtttctcttcttttggatactatgg

SEQ ID NO: 41299 - DNA, 25 bp, Saccharomyces pastorianus
gtggcgacagtcatgttatatcaaa

SEQ ID NO: 41300 - DNA, 25 bp, Saccharomyces pastorianus
taatgagtgggttggccttatttaa

SEQ ID NO: 41301 - DNA, 25 bp, Saccharomyces pastorianus
ggcgatagatcacatttgtcagact

SEQ ID NO: 41302 - DNA, 25 bp, Saccharomyces pastorianus
gactgctggattggagaattcttcg

SEQ ID NO: 41303 - DNA, 25 bp, Saccharomyces pastorianus
actgtggataagacgcctcaaggtt

SEQ ID NO: 41304 - DNA, 25 bp, Saccharomyces pastorianus
gaaataactccggaattgcgtaatt

SEQ ID NO: 41305 - DNA, 25 bp, Saccharomyces pastorianus
gtttcaatattacaggcgctagcta

SEQ ID NO: 41306 - DNA, 25 bp, Saccharomyces pastorianus
gaggctaagatacccgttgccgtga

SEQ ID NO: 41307 - DNA, 25 bp, Saccharomyces pastorianus
taactctaaaccaagctcggtgcct

SEQ ID NO: 41308 - DNA, 25 bp, Saccharomyces pastorianus
cagaatcttctttgccttataactc

SEQ ID NO: 41309 - DNA, 25 bp, Saccharomyces pastorianus
acaggccgtagctactctaatgtac

SEQ ID NO: 41310 - DNA, 25 bp, Saccharomyces pastorianus
ggttcaatagctccgattcgctaca

SEQ ID NO: 41311 - DNA, 25 bp, Saccharomyces pastorianus
gtcatctgttttctccaatggacac

SEQ ID NO: 41312 - DNA, 25 bp, Saccharomyces pastorianus
tcttcgacagccacttacaacattg

SEQ ID NO: 41313 - DNA, 25 bp, Saccharomyces pastorianus
tagcgcaatccctaacgtggttgat

SEQ ID NO: 41314 - DNA, 25 bp, Saccharomyces pastorianus
aaagcgtgtgttgctcaaactacaa

SEQ ID NO: 41315 - DNA, 25 bp, Saccharomyces pastorianus
caaatctaacttaccgggccaatct

SEQ ID NO: 41316 - DNA, 25 bp, Saccharomyces pastorianus
gggaaagtctgtccaacaggccgta

SEQ ID NO: 41317 - DNA, 25 bp, Saccharomyces pastorianus
ataattcggtggctagcgcaatccc

SEQ ID NO: 41318 - DNA, 25 bp, Saccharomyces pastorianus
taccagtgagaacccgatcgacagt

SEQ ID NO: 41319 - DNA, 25 bp, Saccharomyces pastorianus
gtgaaattcgcaatcaccctttctt

SEQ ID NO: 41320 - DNA, 25 bp, Saccharomyces pastorianus
gattcgaccccgtagctaaagatct

SEQ ID NO: 41321 - DNA, 25 bp, Saccharomyces pastorianus
aatagacacggcaaatttcgaccaa

SEQ ID NO: 41322 - DNA, 25 bp, Saccharomyces pastorianus
cggtctcttgagcagggatcctaac

SEQ ID NO: 41323 - DNA, 25 bp, Saccharomyces pastorianus
attaccagggtcatatcgcattgtg

SEQ ID NO: 41324 - DNA, 25 bp, Saccharomyces pastorianus
ggacgaatacttgagcgctagcatt

SEQ ID NO: 41325 - DNA, 25 bp, Saccharomyces pastorianus
cattacttttccctgacggattcga

SEQ ID NO: 41326 - DNA, 25 bp, Saccharomyces pastorianus
gacgggattaccaccatactatgac

SEQ ID NO: 41327 - DNA, 25 bp, Saccharomyces pastorianus
gtgtgacttcggactttgtaaactg

SEQ ID NO: 41328 - DNA, 25 bp, Saccharomyces pastorianus
gattaggcgtcaacggcaccagtga

SEQ ID NO: 41329 - DNA, 25 bp, Saccharomyces pastorianus
tctctgtcagccctagtagtgctaa

SEQ ID NO: 41330 - DNA, 25 bp, Saccharomyces pastorianus
aaagcatgacactccattagttcaa

SEQ ID NO: 41331 - DNA, 25 bp, Saccharomyces pastorianus
tggaatgactttactctctctatga

SEQ ID NO: 41332 - DNA, 25 bp, Saccharomyces pastorianus
tatcttgacacgcttgaggtctggt

SEQ ID NO: 41333 - DNA, 25 bp, Saccharomyces pastorianus
gagaaattacttcgttttgccttgg

SEQ ID NO: 41334 - DNA, 25 bp, Saccharomyces pastorianus
aaattttgcacctgttctacctatt

SEQ ID NO: 41335 - DNA, 25 bp, Saccharomyces pastorianus
agttctattggctcagatgccgcaa

SEQ ID NO: 41336 - DNA, 25 bp, Saccharomyces pastorianus
ggtgataccgtagttcatgtagcta

SEQ ID NO: 41337 - DNA, 25 bp, Saccharomyces pastorianus
attactgacgctccgtttggtggaa

SEQ ID NO: 41338 - DNA, 25 bp, Saccharomyces pastorianus
gatgccgcaagcttacatgttgtac

SEQ ID NO: 41339 - DNA, 25 bp, Saccharomyces pastorianus
catgttgtaccacctactgtagttt

SEQ ID NO: 41340 - DNA, 25 bp, Saccharomyces pastorianus
cgtgaatatttcgaaggcttgcctg

SEQ ID NO: 41341 - DNA, 25 bp, Saccharomyces pastorianus
acaaccatcagtactttcccttgaa

SEQ ID NO: 41342 - DNA, 25 bp, Saccharomyces pastorianus
ttgaaagaaggtacggttccacttg

SEQ ID NO: 41343 - DNA, 25 bp, Saccharomyces pastorianus
gttccacttggagacgatcagccaa

SEQ ID NO: 41344 - DNA, 25 bp, Saccharomyces pastorianus
tcaaaatgtcacagatgcagctcgt

SEQ ID NO: 41345 - DNA, 25 bp, Saccharomyces pastorianus
aagggtcaccattgtcgattatcga

SEQ ID NO: 41346 - DNA, 25 bp, Saccharomyces pastorianus
aaggcttgcctggacaaccatcagt

SEQ ID NO: 41347 - DNA, 25 bp, Saccharomyces pastorianus
gcgttgctctcaataacccgagtat

SEQ ID NO: 41348 - DNA, 25 bp, Saccharomyces pastorianus
gaaacgtcggaacgtcttatagact

SEQ ID NO: 41349 - DNA, 25 bp, Saccharomyces pastorianus
atggtttgtcattgcctggtaataa

SEQ ID NO: 41350 - DNA, 25 bp, Saccharomyces pastorianus
gaagctagactatcgctacaacaac

SEQ ID NO: 41351 - DNA, 25 bp, Saccharomyces pastorianus
taatggatggcgctcataacggctc

SEQ ID NO: 41352 - DNA, 25 bp, Saccharomyces pastorianus
tacggagaccaagctttgacctttg

SEQ ID NO: 41353 - DNA, 25 bp, Saccharomyces pastorianus
gccagcctttgttgcgaccaataga

SEQ ID NO: 41354 - DNA, 25 bp, Saccharomyces pastorianus
gactggccaggtaggttacatcgta

SEQ ID NO: 41355 - DNA, 25 bp, Saccharomyces pastorianus
tgacctttgtcatggctgtaaccgc

SEQ ID NO: 41356 - DNA, 25 bp, Saccharomyces pastorianus
gagaataccagatcttcaaccttag

SEQ ID NO: 41357 - DNA, 25 bp, Saccharomyces pastorianus
taccttctctggctcttacaacaga

SEQ ID NO: 41358 - DNA, 25 bp, Saccharomyces pastorianus
aaaacttagagccactgtgccagcc

SEQ ID NO: 41359 - DNA, 25 bp, Saccharomyces pastorianus
tctgagctgcccctaaacggagaat

SEQ ID NO: 41360 - DNA, 25 bp, Saccharomyces pastorianus
gatcgacttatccttacacagttta

SEQ ID NO: 41361 - DNA, 25 bp, Saccharomyces pastorianus
atgccaccgaacctgacgagattaa

SEQ ID NO: 41362 - DNA, 25 bp, Saccharomyces pastorianus
atctacctacggaatgggcgttttg

SEQ ID NO: 41363 - DNA, 25 bp, Saccharomyces pastorianus
gggtcactattctatcttcaggcag

SEQ ID NO: 41364 - DNA, 25 bp, Saccharomyces pastorianus
tcaaggaccaactcgatccgtcggt

SEQ ID NO: 41365 - DNA, 25 bp, Saccharomyces pastorianus
aatcaattgctttatctacctacgg

SEQ ID NO: 41366 - DNA, 25 bp, Saccharomyces pastorianus
cacagcttactgtttgtcatcaaag

SEQ ID NO: 41367 - DNA, 25 bp, Saccharomyces pastorianus
ggaacatacatcaaagccttgcgat

SEQ ID NO: 41368 - DNA, 25 bp, Saccharomyces pastorianus
gaagaatttttcaccgctagagatt

SEQ ID NO: 41369 - DNA, 25 bp, Saccharomyces pastorianus
atatgccgccaggacaaatattact

SEQ ID NO: 41370 - DNA, 25 bp, Saccharomyces pastorianus
gattagattccacgtcaaggaccaa

SEQ ID NO: 41371 - DNA, 25 bp, Saccharomyces pastorianus
gttacgatagcgtcattagctttgc

SEQ ID NO: 41372 - DNA, 25 bp, Saccharomyces pastorianus
gtcggtcgcgcaatcaattgcttta

SEQ ID NO: 41373 - DNA, 25 bp, Saccharomyces pastorianus
gaaattacgtgcagccctgaggcga

SEQ ID NO: 41374 - DNA, 25 bp, Saccharomyces pastorianus
agttgggctggttcaggattctcat

SEQ ID NO: 41375 - DNA, 25 bp, Saccharomyces pastorianus
gaagtgccaattcctattagaacat

SEQ ID NO: 41376 - DNA, 25 bp, Saccharomyces pastorianus
tcagtcacaaccacgccacaagaaa

SEQ ID NO: 41377 - DNA, 25 bp, Saccharomyces pastorianus
aaacgattttacaactagcagcagg

SEQ ID NO: 41378 - DNA, 25 bp, Saccharomyces pastorianus
aagactcttcgattgcctaagatga

SEQ ID NO: 41379 - DNA, 25 bp, Saccharomyces pastorianus
gctaaggtcctcaatcaacatgcta

SEQ ID NO: 41380 - DNA, 25 bp, Saccharomyces pastorianus
aactatcgtacacaatcggccaagt

SEQ ID NO: 41381 - DNA, 25 bp, Saccharomyces pastorianus
gctcgataaagaaaacgccctcagt

SEQ ID NO: 41382 - DNA, 25 bp, Saccharomyces pastorianus
tgctatatcagacacatcgcaaata

SEQ ID NO: 41383 - DNA, 25 bp, Saccharomyces pastorianus
aaacactttaggaatattggccaca

SEQ ID NO: 41384 - DNA, 25 bp, Saccharomyces pastorianus
aaggtcaaaggctctggtaacaaat

SEQ ID NO: 41385 - DNA, 25 bp, Saccharomyces pastorianus
caaggtggtgtcgttgcggtcccaa

SEQ ID NO: 41386 - DNA, 25 bp, Saccharomyces pastorianus
gccttcgatttggatcatacgatca

SEQ ID NO: 41387 - DNA, 25 bp, Saccharomyces pastorianus
aaccctggactatctttttgacatt

SEQ ID NO: 41388 - DNA, 25 bp, Saccharomyces pastorianus
ggagtttcagaatcaccgccaatta

SEQ ID NO: 41389 - DNA, 25 bp, Saccharomyces pastorianus
tgcggtcccaagaacctccaaaagt

SEQ ID NO: 41390 - DNA, 25 bp, Saccharomyces pastorianus
gactgtggttatatgcggcacccaa

SEQ ID NO: 41391 - DNA, 25 bp, Saccharomyces pastorianus
tatactactgtggtgatgccgccgg

SEQ ID NO: 41392 - DNA, 25 bp, Saccharomyces pastorianus
aatcgccaaattcaaagttcagcag

SEQ ID NO: 41393 - DNA, 25 bp, Saccharomyces pastorianus
agaatcaccgccaattactactagg

SEQ ID NO: 41394 - DNA, 25 bp, Saccharomyces pastorianus
agtcgtattctcaaaccaaggtggt

SEQ ID NO: 41395 - DNA, 25 bp, Saccharomyces pastorianus
aaatgccatcttctagaggcgccgc

SEQ ID NO: 41396 - DNA, 25 bp, Saccharomyces pastorianus
aagaatcctcatcctaaggcgagtg

SEQ ID NO: 41397 - DNA, 25 bp, Saccharomyces pastorianus
ctgcttctactttttcatttggtgg

SEQ ID NO: 41398 - DNA, 25 bp, Saccharomyces pastorianus
gaatctgcttgttctttttattatc

SEQ ID NO: 41399 - DNA, 25 bp, Saccharomyces pastorianus
aatgcggctaattcacagctgaaga

SEQ ID NO: 41400 - DNA, 25 bp, Saccharomyces pastorianus
gctggcccaccggaagacatatttg

SEQ ID NO: 41401 - DNA, 25 bp, Saccharomyces pastorianus
ttgttcaacggaggtggcagtccct

SEQ ID NO: 41402 - DNA, 25 bp, Saccharomyces pastorianus
ttcggtggttctccatttgggcctt

SEQ ID NO: 41403 - DNA, 25 bp, Saccharomyces pastorianus
acaacctcgctcaagacaacgtcaa

SEQ ID NO: 41404 - DNA, 25 bp, Saccharomyces pastorianus
aggcgccgcttcaggatttcaggga

SEQ ID NO: 41405 - DNA, 25 bp, Saccharomyces pastorianus
aaacgctggtggttctccaatgggt

SEQ ID NO: 41406 - DNA, 25 bp, Saccharomyces pastorianus
ttagtcaaagacacgctgggcaaac

SEQ ID NO: 41407 - DNA, 25 bp, Saccharomyces pastorianus
gctgggcaaactgatctctaacaat

SEQ ID NO: 41408 - DNA, 25 bp, Saccharomyces pastorianus
gggcccaatctacgtggtcatttaa

SEQ ID NO: 41409 - DNA, 25 bp, Saccharomyces pastorianus
tcaaacgtacttatggcaaatgcct

SEQ ID NO: 41410 - DNA, 25 bp, Saccharomyces pastorianus
aattgtatctcatcatttacgcgat

SEQ ID NO: 41411 - DNA, 25 bp, Saccharomyces pastorianus
gagccacaaggaaaattgccatcga

SEQ ID NO: 41412 - DNA, 25 bp, Saccharomyces pastorianus
taattccaagaagccctacgggatg

SEQ ID NO: 41413 - DNA, 25 bp, Saccharomyces pastorianus
gctctggtggcaatcagcactggat

SEQ ID NO: 41414 - DNA, 25 bp, Saccharomyces pastorianus
aatctcccatgatgatccacgttat

SEQ ID NO: 41415 - DNA, 25 bp, Saccharomyces pastorianus
attggtggtttgattgtctcaggtt

SEQ ID NO: 41416 - DNA, 25 bp, Saccharomyces pastorianus
aagaactgacattattatcctcggg

SEQ ID NO: 41417 - DNA, 25 bp, Saccharomyces pastorianus
gcctggtatcccacaattgttttca

SEQ ID NO: 41418 - DNA, 25 bp, Saccharomyces pastorianus
gaagtttcaatctgccttgtgagtt

SEQ ID NO: 41419 - DNA, 25 bp, Saccharomyces pastorianus
gggcccaacgttcgaaactattatg

SEQ ID NO: 41420 - DNA, 25 bp, Saccharomyces pastorianus
agtttacatactgcctggtatccca

SEQ ID NO: 41421 - DNA, 25 bp, Saccharomyces pastorianus
ttttggcatgggtttcaacacagtt

SEQ ID NO: 41422 - DNA, 25 bp, Saccharomyces pastorianus
gaatgaggcgaaagtccgaccccga

SEQ ID NO: 41423 - DNA, 25 bp, Saccharomyces pastorianus
gtccgaccccgaagcaagattagat

SEQ ID NO: 41424 - DNA, 25 bp, Saccharomyces pastorianus
tcaacggaagtctcggatgcaatca

SEQ ID NO: 41425 - DNA, 25 bp, Saccharomyces pastorianus
gtatgtgatgatttatgggtcccca

SEQ ID NO: 41426 - DNA, 25 bp, Saccharomyces pastorianus
aaatcggttcatacccgcattttgg

SEQ ID NO: 41427 - DNA, 25 bp, Saccharomyces pastorianus
ggaattggccctactcatgatgata

SEQ ID NO: 41428 - DNA, 25 bp, Saccharomyces pastorianus
acagaataccattgccctttacact

SEQ ID NO: 41429 - DNA, 25 bp, Saccharomyces pastorianus
tgagtttcaacagagccgagcatct

SEQ ID NO: 41430 - DNA, 25 bp, Saccharomyces pastorianus
attgacctgatgtccctacgtagac

SEQ ID NO: 41431 - DNA, 25 bp, Saccharomyces pastorianus
gagcatctggctaggcacatcagaa

SEQ ID NO: 41432 - DNA, 25 bp, Saccharomyces pastorianus
tgggataccccgattgcaacatgag

SEQ ID NO: 41433 - DNA, 25 bp, Saccharomyces pastorianus
acatctccgtcgagggtgcgaggtt

SEQ ID NO: 41434 - DNA, 25 bp, Saccharomyces pastorianus
gttacatccaaccactgttcctgaa

SEQ ID NO: 41435 - DNA, 25 bp, Saccharomyces pastorianus
gtagactgcagcaatcggcaatcaa

SEQ ID NO: 41436 - DNA, 25 bp, Saccharomyces pastorianus
atcttctgttcattcggacattgac

SEQ ID NO: 41437 - DNA, 25 bp, Saccharomyces pastorianus
gaaccgcaatatcgttgagctaccc

SEQ ID NO: 41438 - DNA, 25 bp, Saccharomyces pastorianus
gaatgaacaaaactccacggcaaga

SEQ ID NO: 41439 - DNA, 25 bp, Saccharomyces pastorianus
ttcaagatgcgttatccaagggatc

SEQ ID NO: 41440 - DNA, 25 bp, Saccharomyces pastorianus
ggtcaacagtttgcgctatatgaat

SEQ ID NO: 41441 - DNA, 25 bp, Saccharomyces pastorianus
ggatgagaaaaccactctattacaa

SEQ ID NO: 41442 - DNA, 25 bp, Saccharomyces pastorianus
gattctattcaatctcaaacgtctg

SEQ ID NO: 41443 - DNA, 25 bp, Saccharomyces pastorianus
ggtgttgacgatcctttatcactaa

SEQ ID NO: 41444 - DNA, 25 bp, Saccharomyces pastorianus
gaaaccgtaagagagctcctaaagc

SEQ ID NO: 41445 - DNA, 25 bp, Saccharomyces pastorianus
gaagcgaccagaccactttcaaaga

SEQ ID NO: 41446 - DNA, 25 bp, Saccharomyces pastorianus
tatccaagggatctacgccgaaaga

SEQ ID NO: 41447 - DNA, 25 bp, Saccharomyces pastorianus
aggaagttctttgccattgctgaga

SEQ ID NO: 41448 - DNA, 25 bp, Saccharomyces pastorianus
agagactacttggttcacgatgagg

SEQ ID NO: 41449 - DNA, 25 bp, Saccharomyces pastorianus
gtctgagctattatcggatgatctg

SEQ ID NO: 41450 - DNA, 25 bp, Saccharomyces pastorianus
gaacaacgagttgtgcgagcgcctc

SEQ ID NO: 41451 - DNA, 25 bp, Saccharomyces pastorianus
acgcatgcagcaggtacctctggta

SEQ ID NO: 41452 - DNA, 25 bp, Saccharomyces pastorianus
gagtccatcgaacaactacagcgca

SEQ ID NO: 41453 - DNA, 25 bp, Saccharomyces pastorianus
gaatttaagagcacgccgcactcag

SEQ ID NO: 41454 - DNA, 25 bp, Saccharomyces pastorianus
ataatttgctggtggcgaacgccat

SEQ ID NO: 41455 - DNA, 25 bp, Saccharomyces pastorianus
gactactacgtctaccagcaggaac

SEQ ID NO: 41456 - DNA, 25 bp, Saccharomyces pastorianus
tgacgatgcctccaggtgagaccgt

SEQ ID NO: 41457 - DNA, 25 bp, Saccharomyces pastorianus
ggcgctgcccataccagaatttaag

SEQ ID NO: 41458 - DNA, 25 bp, Saccharomyces pastorianus
aggttagatcgtgtgcagcccctag

SEQ ID NO: 41459 - DNA, 25 bp, Saccharomyces pastorianus
tacagccgatttcctgaaccaggtg

SEQ ID NO: 41460 - DNA, 25 bp, Saccharomyces pastorianus
agaggagcacatacagcccgtgtca

SEQ ID NO: 41461 - DNA, 25 bp, Saccharomyces pastorianus
aaggcttgtaccaatcatgctcgga

SEQ ID NO: 41462 - DNA, 25 bp, Saccharomyces pastorianus
aaacgaattccctccagcagatgtt

SEQ ID NO: 41463 - DNA, 25 bp, Saccharomyces pastorianus
ccctagagttcttcatggctttcag

SEQ ID NO: 41464 - DNA, 25 bp, Saccharomyces pastorianus
gcgaagtgattgctgatgcgcccac

SEQ ID NO: 41465 - DNA, 25 bp, Saccharomyces pastorianus
taatgcattctggaggccacttcgt

SEQ ID NO: 41466 - DNA, 25 bp, Saccharomyces pastorianus
gactatctgcatgactacgtgttgg

SEQ ID NO: 41467 - DNA, 25 bp, Saccharomyces pastorianus
gaaaggacccttcgcaggcattgtg

SEQ ID NO: 41468 - DNA, 25 bp, Saccharomyces pastorianus
tcggaggactctcggactttactaa

SEQ ID NO: 41469 - DNA, 25 bp, Saccharomyces pastorianus
atggctttcagtggcttcagattcc

SEQ ID NO: 41470 - DNA, 25 bp, Saccharomyces pastorianus
gtgcctaacacgagaggtttcctga

SEQ ID NO: 41471 - DNA, 25 bp, Saccharomyces pastorianus
gagcagtacgacaggcatccaatat

SEQ ID NO: 41472 - DNA, 25 bp, Saccharomyces pastorianus
gaacgatcttttggactttgccttg

SEQ ID NO: 41473 - DNA, 25 bp, Saccharomyces pastorianus
aaatgtggacacacctaccatcaac

SEQ ID NO: 41474 - DNA, 25 bp, Saccharomyces pastorianus
tcaactcagatcaacctatccacgt

SEQ ID NO: 41475 - DNA, 25 bp, Saccharomyces pastorianus
cacctaccatcaacattgtctcaat

SEQ ID NO: 41476 - DNA, 25 bp, Saccharomyces pastorianus
agtgtggctcacttcgggctgatac

SEQ ID NO: 41477 - DNA, 25 bp, Saccharomyces pastorianus
gaaagctgttcaaatgtcctaaatg

SEQ ID NO: 41478 - DNA, 25 bp, Saccharomyces pastorianus
gtactttctcgtacaagtgtggctc

SEQ ID NO: 41479 - DNA, 25 bp, Saccharomyces pastorianus
ttagatattcctgttgtctttttca

SEQ ID NO: 41480 - DNA, 25 bp, Saccharomyces pastorianus
tggaaacgtccaacaaactttatga

SEQ ID NO: 41481 - DNA, 25 bp, Saccharomyces pastorianus
aagaccgcttcaaagttgtaacaga

SEQ ID NO: 41482 - DNA, 25 bp, Saccharomyces pastorianus
ggactttgccttgaacagtgaagaa

SEQ ID NO: 41483 - DNA, 25 bp, Saccharomyces pastorianus
tgtggaggacatacggctggccatt

SEQ ID NO: 41484 - DNA, 25 bp, Saccharomyces pastorianus
gttaggctgcctccagagaagtact

SEQ ID NO: 41485 - DNA, 25 bp, Saccharomyces pastorianus
ataggtacacacagggcgtgctcaa

SEQ ID NO: 41486 - DNA, 25 bp, Saccharomyces pastorianus
tgccaggacccagtaccagttcaag

SEQ ID NO: 41487 - DNA, 25 bp, Saccharomyces pastorianus
caaggagctcatgctgcagttggca

SEQ ID NO: 41488 - DNA, 25 bp, Saccharomyces pastorianus
ggtgccgctgcaactgatggacttt

SEQ ID NO: 41489 - DNA, 25 bp, Saccharomyces pastorianus
ggaagacacccctagagacgtgcgt

SEQ ID NO: 41490 - DNA, 25 bp, Saccharomyces pastorianus
ggtctacaatgattacgccggcagc

SEQ ID NO: 41491 - DNA, 25 bp, Saccharomyces pastorianus
aagaaagccctaccgcaggtcatgg

SEQ ID NO: 41492 - DNA, 25 bp, Saccharomyces pastorianus
aactcggcaggctcggtatctgaaa

SEQ ID NO: 41493 - DNA, 25 bp, Saccharomyces pastorianus
agacgtgcgtcttctgcatttactg

SEQ ID NO: 41494 - DNA, 25 bp, Saccharomyces pastorianus
gtcgtgccccttcaaggacgtgaag

SEQ ID NO: 41495 - DNA, 25 bp, Saccharomyces pastorianus
gagacgtggcgttttgccagaccgt

SEQ ID NO: 41496 - DNA, 25 bp, Saccharomyces pastorianus
aacggcgtcaacgaggtgtcgagct

SEQ ID NO: 41497 - DNA, 25 bp, Saccharomyces pastorianus
acacgttcgtcaagatcgggtggaa

SEQ ID NO: 41498 - DNA, 25 bp, Saccharomyces pastorianus
acgtgaagccgtcgttcggaatcaa

SEQ ID NO: 41499 - DNA, 25 bp, Saccharomyces pastorianus
tgcccggcaacgaagccatgctgat

SEQ ID NO: 41500 - DNA, 25 bp, Saccharomyces pastorianus
atcgaagtgttcgacagcggctcgt

SEQ ID NO: 41501 - DNA, 25 bp, Saccharomyces pastorianus
tggaacccggtgtacctggagtcgt

SEQ ID NO: 41502 - DNA, 25 bp, Saccharomyces pastorianus
gattgacccgagctctaacggcgtc

SEQ ID NO: 41503 - DNA, 25 bp, Saccharomyces pastorianus
ggctcgtcgtcgtccaagaagaaga

SEQ ID NO: 41504 - DNA, 25 bp, Saccharomyces pastorianus
gtaacttctgtgtcgtgacggccaa

SEQ ID NO: 41505 - DNA, 25 bp, Saccharomyces pastorianus
acaagatcctggctcggtatttcgt

SEQ ID NO: 41506 - DNA, 25 bp, Saccharomyces pastorianus
tggaaaccctgcttcgcgagaaata

SEQ ID NO: 41507 - DNA, 25 bp, Saccharomyces pastorianus
gggacctgaaaacacgcacgatcgt

SEQ ID NO: 41508 - DNA, 25 bp, Saccharomyces pastorianus
tacggattaacccactaggcatcac

SEQ ID NO: 41509 - DNA, 25 bp, Saccharomyces pastorianus
ggacgtgcggttgtacccaacgata

SEQ ID NO: 41510 - DNA, 25 bp, Saccharomyces pastorianus
aaagctcggatatacccggtcgcag

SEQ ID NO: 41511 - DNA, 25 bp, Saccharomyces pastorianus
ggatcctgaactcgtctgcgtttga

SEQ ID NO: 41512 - DNA, 25 bp, Saccharomyces pastorianus
gtaagattcgacgtggtctaccacc

SEQ ID NO: 41513 - DNA, 25 bp, Saccharomyces pastorianus
gcgggtatccccatatccataagtg

SEQ ID NO: 41514 - DNA, 25 bp, Saccharomyces pastorianus
gtccctacagccacagatcgaagag

SEQ ID NO: 41515 - DNA, 25 bp, Saccharomyces pastorianus
agaaacatgtactggcgccacactg

SEQ ID NO: 41516 - DNA, 25 bp, Saccharomyces pastorianus
acttacaccccgagcaaattagata

SEQ ID NO: 41517 - DNA, 25 bp, Saccharomyces pastorianus
gatctgtgctgagaatctactggac

SEQ ID NO: 41518 - DNA, 25 bp, Saccharomyces pastorianus
ggcggcgaattcaacgacccaagaa

SEQ ID NO: 41519 - DNA, 25 bp, Saccharomyces pastorianus
gggcgctgccggtggtaataacaat

SEQ ID NO: 41520 - DNA, 25 bp, Saccharomyces pastorianus
ggacaaattccatgtggaccccaat

SEQ ID NO: 41521 - DNA, 25 bp, Saccharomyces pastorianus
gcaacgtttatcctctacgggagta

SEQ ID NO: 41522 - DNA, 25 bp, Saccharomyces pastorianus
gtaaacgcacatgggcgcactcaag

SEQ ID NO: 41523 - DNA, 25 bp, Saccharomyces pastorianus
gggtttgagccttctagggcgccaa

SEQ ID NO: 41524 - DNA, 25 bp, Saccharomyces pastorianus
ggaggactaatggtggccaccccgt

SEQ ID NO: 41525 - DNA, 25 bp, Saccharomyces pastorianus
ataacggtactggtggcggcgaatt

SEQ ID NO: 41526 - DNA, 25 bp, Saccharomyces pastorianus
aagtacctgcatggcgacgagttca

SEQ ID NO: 41527 - DNA, 25 bp, Saccharomyces pastorianus
gaatttgacgtaaggcaggacatgc

SEQ ID NO: 41528 - DNA, 25 bp, Saccharomyces pastorianus
gagaaaactacatacctgtggaaaa

SEQ ID NO: 41529 - DNA, 25 bp, Saccharomyces pastorianus
gtataaccagcccaagaagactaat

SEQ ID NO: 41530 - DNA, 25 bp, Saccharomyces pastorianus
tttttccaagtcaaaggctattcaa

SEQ ID NO: 41531 - DNA, 25 bp, Saccharomyces pastorianus
gaacataccgaacgaaatatcccga

SEQ ID NO: 41532 - DNA, 25 bp, Saccharomyces pastorianus
ggcaggacatgcaatctaacaatat

SEQ ID NO: 41533 - DNA, 25 bp, Saccharomyces pastorianus
gtctattcgagggactgcatgataa

SEQ ID NO: 41534 - DNA, 25 bp, Saccharomyces pastorianus
ctctctgattacgacttggatgact

SEQ ID NO: 41535 - DNA, 25 bp, Saccharomyces pastorianus
gaatcaaattcacataccacgacat

SEQ ID NO: 41536 - DNA, 25 bp, Saccharomyces pastorianus
ggatgagctctctgattacgacttg

SEQ ID NO: 41537 - DNA, 25 bp, Saccharomyces pastorianus
gatgctttaaacaagaggacctttt

SEQ ID NO: 41538 - DNA, 25 bp, Saccharomyces pastorianus
gcaactcgtccacttctttgaaatt

SEQ ID NO: 41539 - DNA, 25 bp, Saccharomyces pastorianus
ggtgggtcaaaattgctcctttgca

SEQ ID NO: 41540 - DNA, 25 bp, Saccharomyces pastorianus
gagctgcttatgctgtaggttctat

SEQ ID NO: 41541 - DNA, 25 bp, Saccharomyces pastorianus
gagtagtttattcttgccaagcggc

SEQ ID NO: 41542 - DNA, 25 bp, Saccharomyces pastorianus
gattttgttacgtcacagctgctta

SEQ ID NO: 41543 - DNA, 25 bp, Saccharomyces pastorianus
actccggtaacgtcttcatctaaga

SEQ ID NO: 41544 - DNA, 25 bp, Saccharomyces pastorianus
gaaacgcgtatcatctgaggactca

SEQ ID NO: 41545 - DNA, 25 bp, Saccharomyces pastorianus
aattcagcatctttaactccggtaa

SEQ ID NO: 41546 - DNA, 25 bp, Saccharomyces pastorianus
taacggtaattcgtcgtcacccaat

SEQ ID NO: 41547 - DNA, 25 bp, Saccharomyces pastorianus
caaagcgctgtatgacgatttccat

SEQ ID NO: 41548 - DNA, 25 bp, Saccharomyces pastorianus
tttgaagcaacatccgaaacgcgta

SEQ ID NO: 41549 - DNA, 25 bp, Saccharomyces pastorianus
gcgacttccacctctgatttaaatt

SEQ ID NO: 41550 - DNA, 25 bp, Saccharomyces pastorianus
aaagccttacaccttaatcgtggat

SEQ ID NO: 41551 - DNA, 25 bp, Saccharomyces pastorianus
tggatagccccatttctgacgaaga

SEQ ID NO: 41552 - DNA, 25 bp, Saccharomyces pastorianus
ttgatcactaagaatcccggtactt

SEQ ID NO: 41553 - DNA, 25 bp, Saccharomyces pastorianus
agatattccggatacagccagcgat

SEQ ID NO: 41554 - DNA, 25 bp, Saccharomyces pastorianus
gtacttacaaggcacgtctggcgaa

SEQ ID NO: 41555 - DNA, 25 bp, Saccharomyces pastorianus
atggacaagcacgtttggcgcgact

SEQ ID NO: 41556 - DNA, 25 bp, Saccharomyces pastorianus
gaagacggtcctgcacaacatgaag

SEQ ID NO: 41557 - DNA, 25 bp, Saccharomyces pastorianus
acggtcttgatgaagcaccacagaa

SEQ ID NO: 41558 - DNA, 25 bp, Saccharomyces pastorianus
gatatcaaagttgtccatccagatt

SEQ ID NO: 41559 - DNA, 25 bp, Saccharomyces pastorianus
atttattcgctaccggtacatcgtg

SEQ ID NO: 41560 - DNA, 25 bp, Saccharomyces pastorianus
cgtaggtcccagtgcggataatcta

SEQ ID NO: 41561 - DNA, 25 bp, Saccharomyces pastorianus
gcatcgttacggtacagatcaatca

SEQ ID NO: 41562 - DNA, 25 bp, Saccharomyces pastorianus
tagtagacgcatcacttgggctggc

SEQ ID NO: 41563 - DNA, 25 bp, Saccharomyces pastorianus
aaagaacgtcgtcaagctcttccac

SEQ ID NO: 41564 - DNA, 25 bp, Saccharomyces pastorianus
aaagtcccagtgacgtaggtcccag

SEQ ID NO: 41565 - DNA, 25 bp, Saccharomyces pastorianus
acaccttccacgcttttcaaaatga

SEQ ID NO: 41566 - DNA, 25 bp, Saccharomyces pastorianus
ctttactagtggatacgccggatat

SEQ ID NO: 41567 - DNA, 25 bp, Saccharomyces pastorianus
agagatccctatcatctggtaatta

SEQ ID NO: 41568 - DNA, 25 bp, Saccharomyces pastorianus
atgtcttcaataagccccagaacca

SEQ ID NO: 41569 - DNA, 25 bp, Saccharomyces pastorianus
atgacccggatcgattgcgttcaaa

SEQ ID NO: 41570 - DNA, 25 bp, Saccharomyces pastorianus
gggaagtattgaaccccacagattc

SEQ ID NO: 41571 - DNA, 25 bp, Saccharomyces pastorianus
gattacgttcggtccaaggctaagg

SEQ ID NO: 41572 - DNA, 25 bp, Saccharomyces pastorianus
acagcacagtttccccatttggtaa

SEQ ID NO: 41573 - DNA, 25 bp, Saccharomyces pastorianus
gaatgcccataaatctcaggttgtt

SEQ ID NO: 41574 - DNA, 25 bp, Saccharomyces pastorianus
gtatgcagccatgttgaatgcccat

SEQ ID NO: 41575 - DNA, 25 bp, Saccharomyces pastorianus
catatcgcagcgctatacttgagaa

SEQ ID NO: 41576 - DNA, 25 bp, Saccharomyces pastorianus
aagttgccatatcgcggttgagaca

SEQ ID NO: 41577 - DNA, 25 bp, Saccharomyces pastorianus
gattcggccgttttgttgctacgaa

SEQ ID NO: 41578 - DNA, 25 bp, Saccharomyces pastorianus
ggagctgtaccaaattatcgtgact

SEQ ID NO: 41579 - DNA, 25 bp, Saccharomyces pastorianus
atcgattctataacctctactcttt

SEQ ID NO: 41580 - DNA, 25 bp, Saccharomyces pastorianus
gaaagacctgtctcggtacaagtca

SEQ ID NO: 41581 - DNA, 25 bp, Saccharomyces pastorianus
tttggtaaatccattcagccgctcc

SEQ ID NO: 41582 - DNA, 25 bp, Saccharomyces pastorianus
gtgaacccagccatagcgggatcat

SEQ ID NO: 41583 - DNA, 25 bp, Saccharomyces pastorianus
taaaacagtgaacccagccatagcg

SEQ ID NO: 41584 - DNA, 25 bp, Saccharomyces pastorianus
gagcgttgtcaaaagtttaggtctg

SEQ ID NO: 41585 - DNA, 25 bp, Saccharomyces pastorianus
agccatagcgggatcattagctaaa

SEQ ID NO: 41586 - DNA, 25 bp, Saccharomyces pastorianus
aagcaggtcactcattggcatgccg

SEQ ID NO: 41587 - DNA, 25 bp, Saccharomyces pastorianus
tggcatgccgcatacgacaaagagc

SEQ ID NO: 41588 - DNA, 25 bp, Saccharomyces pastorianus
agagcataaactaacaccacatcaa

SEQ ID NO: 41589 - DNA, 25 bp, Saccharomyces pastorianus
aatcacattaagcaggtcactcatt

SEQ ID NO: 41590 - DNA, 25 bp, Saccharomyces pastorianus
gtcacagtagaggttacagagcata

SEQ ID NO: 41591 - DNA, 25 bp, Saccharomyces pastorianus
aagagttggtcacagtagaggttac

SEQ ID NO: 41592 - DNA, 25 bp, Saccharomyces pastorianus
taacaccacatcaacaacgagagtt

SEQ ID NO: 41593 - DNA, 25 bp, Saccharomyces pastorianus
atcctcatcaaagtctgggctcgtg

SEQ ID NO: 41594 - DNA, 25 bp, Saccharomyces pastorianus
ccatgaatttctccacgctaacaag

SEQ ID NO: 41595 - DNA, 25 bp, Saccharomyces pastorianus
gacaaggctcatcaaccagtgtgaa

SEQ ID NO: 41596 - DNA, 25 bp, Saccharomyces pastorianus
ggcgtccatgcacactttaagatcg

SEQ ID NO: 41597 - DNA, 25 bp, Saccharomyces pastorianus
gaattctacgtttgttctggaccct

SEQ ID NO: 41598 - DNA, 25 bp, Saccharomyces pastorianus
aagagtggcacttcatcctcatcaa

SEQ ID NO: 41599 - DNA, 25 bp, Saccharomyces pastorianus
atgacttctttgaagcccgctgcga

SEQ ID NO: 41600 - DNA, 25 bp, Saccharomyces pastorianus
gaaccatcaattcccgtgaacgatc

SEQ ID NO: 41601 - DNA, 25 bp, Saccharomyces pastorianus
gaaatggatctgcttttgaccccac

SEQ ID NO: 41602 - DNA, 25 bp, Saccharomyces pastorianus
ggctgttttagtaccacaccggaat

SEQ ID NO: 41603 - DNA, 25 bp, Saccharomyces pastorianus
ctcagaaacttccactgcttttaac

SEQ ID NO: 41604 - DNA, 25 bp, Saccharomyces pastorianus
ggacattgggctacattggcctgta

SEQ ID NO: 41605 - DNA, 25 bp, Saccharomyces pastorianus
aggccaggtgcgtttcataagatca

SEQ ID NO: 41606 - DNA, 25 bp, Saccharomyces pastorianus
gttccccttgcagcttatcaatgta

SEQ ID NO: 41607 - DNA, 25 bp, Saccharomyces pastorianus
tatccgtgtggactgatcgcgaact

SEQ ID NO: 41608 - DNA, 25 bp, Saccharomyces pastorianus
agaacgagagtcttccagcgggcca

SEQ ID NO: 41609 - DNA, 25 bp, Saccharomyces pastorianus
gacgatgcctcgaagaattactcac

SEQ ID NO: 41610 - DNA, 25 bp, Saccharomyces pastorianus
gccatggcgctcatattgctaacat

SEQ ID NO: 41611 - DNA, 25 bp, Saccharomyces pastorianus
gatgttcaatgatacgttccccttg

SEQ ID NO: 41612 - DNA, 25 bp, Saccharomyces pastorianus
gtaagccgctatccaagagtcctga

SEQ ID NO: 41613 - DNA, 25 bp, Saccharomyces pastorianus
ttggcctgtactggagttcaacggt

SEQ ID NO: 41614 - DNA, 25 bp, Saccharomyces pastorianus
ctatttgatcggtggctgtgtttgc

SEQ ID NO: 41615 - DNA, 25 bp, Saccharomyces pastorianus
tctcctgaaagttttggtctaacca

SEQ ID NO: 41616 - DNA, 25 bp, Saccharomyces pastorianus
gatacctgtagagaaggaccacaag

SEQ ID NO: 41617 - DNA, 25 bp, Saccharomyces pastorianus
agaagtttgctccttaccgtgctaa

SEQ ID NO: 41618 - DNA, 25 bp, Saccharomyces pastorianus
tttgccgcagatgacacagatctaa

SEQ ID NO: 41619 - DNA, 25 bp, Saccharomyces pastorianus
caagatttaaaattccgctaccgtg

SEQ ID NO: 41620 - DNA, 25 bp, Saccharomyces pastorianus
agacgacgctattttgatacctgta

SEQ ID NO: 41621 - DNA, 25 bp, Saccharomyces pastorianus
tattggcctgaagaagtttgctcct

SEQ ID NO: 41622 - DNA, 25 bp, Saccharomyces pastorianus
gatggcgatgccaaggaccaagtag

SEQ ID NO: 41623 - DNA, 25 bp, Saccharomyces pastorianus
atggtggacaagacgccaatggaaa

SEQ ID NO: 41624 - DNA, 25 bp, Saccharomyces pastorianus
accacgagagaaatctttgccgcag

SEQ ID NO: 41625 - DNA, 25 bp, Saccharomyces pastorianus
ggttagccccagttaatggtggaca

SEQ ID NO: 41626 - DNA, 25 bp, Saccharomyces pastorianus
gaagcagcatgctacgttgcattta

SEQ ID NO: 41627 - DNA, 25 bp, Saccharomyces pastorianus
gattctattttcttgagtgctggtg

SEQ ID NO: 41628 - DNA, 25 bp, Saccharomyces pastorianus
aaacagtagctgcttgccagtggaa

SEQ ID NO: 41629 - DNA, 25 bp, Saccharomyces pastorianus
gagtgctttaactggctccaaagtg

SEQ ID NO: 41630 - DNA, 25 bp, Saccharomyces pastorianus
taagagctcgaaaggccttgctttg

SEQ ID NO: 41631 - DNA, 25 bp, Saccharomyces pastorianus
aagtactcaatttgctccaagcgac

SEQ ID NO: 41632 - DNA, 25 bp, Saccharomyces pastorianus
gacaggctactaccatccgaagaag

SEQ ID NO: 41633 - DNA, 25 bp, Saccharomyces pastorianus
tattgccctggataatgttgctgtg

SEQ ID NO: 41634 - DNA, 25 bp, Saccharomyces pastorianus
ttgctgtggtttgctctccagaaaa

SEQ ID NO: 41635 - DNA, 25 bp, Saccharomyces pastorianus
aagcgactcaaattcccatgtctta

SEQ ID NO: 41636 - DNA, 25 bp, Saccharomyces pastorianus
acaggtaatttctctgctacatttg

SEQ ID NO: 41637 - DNA, 25 bp, Saccharomyces pastorianus
aatcaaggctggaacaaccgccctt

SEQ ID NO: 41638 - DNA, 25 bp, Saccharomyces pastorianus
atatgggctctcctagcggatacaa

SEQ ID NO: 41639 - DNA, 25 bp, Saccharomyces pastorianus
gagagtaccagcaggtccacacaat

SEQ ID NO: 41640 - DNA, 25 bp, Saccharomyces pastorianus
ttcaaatccttatcagcatccttcc

SEQ ID NO: 41641 - DNA, 25 bp, Saccharomyces pastorianus
ggatacaatggagcagcgccactat

SEQ ID NO: 41642 - DNA, 25 bp, Saccharomyces pastorianus
aacatatgcatctacctattcttcc

SEQ ID NO: 41643 - DNA, 25 bp, Saccharomyces pastorianus
aacggcaatgctggtccttattatc

SEQ ID NO: 41644 - DNA, 25 bp, Saccharomyces pastorianus
aaatatgcccatgcaatatcctcct

SEQ ID NO: 41645 - DNA, 25 bp, Saccharomyces pastorianus
tcgagcccgcccacaagaaaaggag

SEQ ID NO: 41646 - DNA, 25 bp, Saccharomyces pastorianus
gcaacaatagatctcagccgccatg

SEQ ID NO: 41647 - DNA, 25 bp, Saccharomyces pastorianus
tcaaccgatggtttcgcctaggaac

SEQ ID NO: 41648 - DNA, 25 bp, Saccharomyces pastorianus
gacactgttagtccatggttcaaac

SEQ ID NO: 41649 - DNA, 25 bp, Saccharomyces pastorianus
aatagcggccattggtttcccactg

SEQ ID NO: 41650 - DNA, 25 bp, Saccharomyces pastorianus
aatgactcgcccttagtgaacgtat

SEQ ID NO: 41651 - DNA, 25 bp, Saccharomyces pastorianus
agcgtactagtgtgtttctcgttca

SEQ ID NO: 41652 - DNA, 25 bp, Saccharomyces pastorianus
tacgtcgactgattttcctattctc

SEQ ID NO: 41653 - DNA, 25 bp, Saccharomyces pastorianus
gatcaaccgcgatatttctttgctt

SEQ ID NO: 41654 - DNA, 25 bp, Saccharomyces pastorianus
ggttcacaaatactatccagggtct

SEQ ID NO: 41655 - DNA, 25 bp, Saccharomyces pastorianus
tcatatcttccccagtgacgaatta

SEQ ID NO: 41656 - DNA, 25 bp, Saccharomyces pastorianus
ttcccactggtgttacttctaagcg

SEQ ID NO: 41657 - DNA, 25 bp, Saccharomyces pastorianus
gcaccattgcataccgagacactgt

SEQ ID NO: 41658 - DNA, 25 bp, Saccharomyces pastorianus
ggattactacttgcatcagtggagt

SEQ ID NO: 41659 - DNA, 25 bp, Saccharomyces pastorianus
aatggccaatggaggtgttacgacg

SEQ ID NO: 41660 - DNA, 25 bp, Saccharomyces pastorianus
tggcaagccatgttgcatctgaaat

SEQ ID NO: 41661 - DNA, 25 bp, Saccharomyces pastorianus
gaacttgttcggtggatctgtacca

SEQ ID NO: 41662 - DNA, 25 bp, Saccharomyces pastorianus
gaaaccagttcttttgcaccagata

SEQ ID NO: 41663 - DNA, 25 bp, Saccharomyces pastorianus
gaaatgtatgctgctgatgctgaaa

SEQ ID NO: 41664 - DNA, 25 bp, Saccharomyces pastorianus
aaagtcttatttccttggcaagcca

SEQ ID NO: 41665 - DNA, 25 bp, Saccharomyces pastorianus
aaaggacactttgggctcaccacaa

SEQ ID NO: 41666 - DNA, 25 bp, Saccharomyces pastorianus
tgaagacgaagaggctttccttttt

SEQ ID NO: 41667 - DNA, 25 bp, Saccharomyces pastorianus
gatgaaccctatcttctttgagaat

SEQ ID NO: 41668 - DNA, 25 bp, Saccharomyces pastorianus
ggctcaccacaattatccgattcaa

SEQ ID NO: 41669 - DNA, 25 bp, Saccharomyces pastorianus
gacgggagactatacgaacttgttc

SEQ ID NO: 41670 - DNA, 25 bp, Saccharomyces pastorianus
ttcgataatgccaagagaccgctat

SEQ ID NO: 41671 - DNA, 25 bp, Saccharomyces pastorianus
tagagccttctcaattggatgcact

SEQ ID NO: 41672 - DNA, 25 bp, Saccharomyces pastorianus
gatggaatcggcagtcaccgtagct

SEQ ID NO: 41673 - DNA, 25 bp, Saccharomyces pastorianus
gttatgcaagaccactatcctgaga

SEQ ID NO: 41674 - DNA, 25 bp, Saccharomyces pastorianus
aaacatgaggtttattggcccgaca

SEQ ID NO: 41675 - DNA, 25 bp, Saccharomyces pastorianus
ggatgcactctacaatggtctatta

SEQ ID NO: 41676 - DNA, 25 bp, Saccharomyces pastorianus
gttcggcggcgttattggactaagt

SEQ ID NO: 41677 - DNA, 25 bp, Saccharomyces pastorianus
atgatgtatccatttctggaccctg

SEQ ID NO: 41678 - DNA, 25 bp, Saccharomyces pastorianus
atattccgtggtttgcatgggcttt

SEQ ID NO: 41679 - DNA, 25 bp, Saccharomyces pastorianus
accgtagctcctcaaggcgtagaga

SEQ ID NO: 41680 - DNA, 25 bp, Saccharomyces pastorianus
ctggaccctgccactaaatcgaagg

SEQ ID NO: 41681 - DNA, 25 bp, Saccharomyces pastorianus
gtgatgctgctatcgcacagtacaa

SEQ ID NO: 41682 - DNA, 25 bp, Saccharomyces pastorianus
tatacttcctgggtctcatttgaat

SEQ ID NO: 41683 - DNA, 25 bp, Saccharomyces pastorianus
taagcaagtggccaagttctacgac

SEQ ID NO: 41684 - DNA, 25 bp, Saccharomyces pastorianus
gatcctgattctattttctcttgtg

SEQ ID NO: 41685 - DNA, 25 bp, Saccharomyces pastorianus
gagactacgctatacctatacttcc

SEQ ID NO: 41686 - DNA, 25 bp, Saccharomyces pastorianus
agctgcgttccgatattgaatctta

SEQ ID NO: 41687 - DNA, 25 bp, Saccharomyces pastorianus
gaaccgtacctagggactctattgt

SEQ ID NO: 41688 - DNA, 25 bp, Saccharomyces pastorianus
gaacactgtttctttatctctgaca

SEQ ID NO: 41689 - DNA, 25 bp, Saccharomyces pastorianus
agaatcctcttttagaactcgtcaa

SEQ ID NO: 41690 - DNA, 25 bp, Saccharomyces pastorianus
tagtggctccagattttctctgtga

SEQ ID NO: 41691 - DNA, 25 bp, Saccharomyces pastorianus
attttctcttgtgccaggtgtcata

SEQ ID NO: 41692 - DNA, 25 bp, Saccharomyces pastorianus
gagaataattgggttcccatcccgt

SEQ ID NO: 41693 - DNA, 25 bp, Saccharomyces pastorianus
attggaggacactgtgatgccatat

SEQ ID NO: 41694 - DNA, 25 bp, Saccharomyces pastorianus
gcaatcatctggttcattggaggac

SEQ ID NO: 41695 - DNA, 25 bp, Saccharomyces pastorianus
gatgaagtacgttctttagctatca

SEQ ID NO: 41696 - DNA, 25 bp, Saccharomyces pastorianus
aattacgtcacgaggatcttgagaa

SEQ ID NO: 41697 - DNA, 25 bp, Saccharomyces pastorianus
atgttggtttgtacagtgcctggga

SEQ ID NO: 41698 - DNA, 25 bp, Saccharomyces pastorianus
gatgccatatgtcaagtgtctgtcc

SEQ ID NO: 41699 - DNA, 25 bp, Saccharomyces pastorianus
gtgtctgtccacctttagagatgaa

SEQ ID NO: 41700 - DNA, 25 bp, Saccharomyces pastorianus
ggattgcacaatcagactctaatga

SEQ ID NO: 41701 - DNA, 25 bp, Saccharomyces pastorianus
ccatcccgttctgataatttaggtt

SEQ ID NO: 41702 - DNA, 25 bp, Saccharomyces pastorianus
ctgggatgaacaaggccttccaaca

SEQ ID NO: 41703 - DNA, 25 bp, Saccharomyces pastorianus
atggtgacgatgatgctgctgctgt

SEQ ID NO: 41704 - DNA, 25 bp, Saccharomyces pastorianus
atgcacattgcttacgacgcggtgt

SEQ ID NO: 41705 - DNA, 25 bp, Saccharomyces pastorianus
tgtggcgataattcggcccttgatt

SEQ ID NO: 41706 - DNA, 25 bp, Saccharomyces pastorianus
gtgagtctatatgcggaccagccgt

SEQ ID NO: 41707 - DNA, 25 bp, Saccharomyces pastorianus
ctgctgtattagatttggacgcgat

SEQ ID NO: 41708 - DNA, 25 bp, Saccharomyces pastorianus
ccgaggctgtttccaagactttgca

SEQ ID NO: 41709 - DNA, 25 bp, Saccharomyces pastorianus
gaacccacagtggtagtcatcgacg

SEQ ID NO: 41710 - DNA, 25 bp, Saccharomyces pastorianus
agtgccgcagcggtttatgttgcga

SEQ ID NO: 41711 - DNA, 25 bp, Saccharomyces pastorianus
gtcatcgacgtgtcttcgtcgggaa

SEQ ID NO: 41712 - DNA, 25 bp, Saccharomyces pastorianus
ttggacgtgcccacgggcttgaaag

SEQ ID NO: 41713 - DNA, 25 bp, Saccharomyces pastorianus
ttaacgtcgggcactcaagcaattt

SEQ ID NO: 41714 - DNA, 25 bp, Saccharomyces pastorianus
gggagatttccttttgcagtacgca

SEQ ID NO: 41715 - DNA, 25 bp, Saccharomyces pastorianus
taatgcagtcatttctcacgccaat

SEQ ID NO: 41716 - DNA, 25 bp, Saccharomyces pastorianus
gtatgacgacgtaacctgcgaccaa

SEQ ID NO: 41717 - DNA, 25 bp, Saccharomyces pastorianus
aacaaatttattgccctgtctgaac

SEQ ID NO: 41718 - DNA, 25 bp, Saccharomyces pastorianus
aatattccatcttttgcaacccttg

SEQ ID NO: 41719 - DNA, 25 bp, Saccharomyces pastorianus
acgccaatgcggctgcagtgtattt

SEQ ID NO: 41720 - DNA, 25 bp, Saccharomyces pastorianus
gtaacctgcgaccaattgagtacgt

SEQ ID NO: 41721 - DNA, 25 bp, Saccharomyces pastorianus
gaagctctagatctttcagcaaact

SEQ ID NO: 41722 - DNA, 25 bp, Saccharomyces pastorianus
ttgttttatcagagtcaccggtgga

SEQ ID NO: 41723 - DNA, 25 bp, Saccharomyces pastorianus
gacaattgtcccaaccagcatacag

SEQ ID NO: 41724 - DNA, 25 bp, Saccharomyces pastorianus
tgtctgaacagcaaccatcacagga

SEQ ID NO: 41725 - DNA, 25 bp, Saccharomyces pastorianus
agcatattctgctgggacaacaccc

SEQ ID NO: 41726 - DNA, 25 bp, Saccharomyces pastorianus
gggttccagccttgatcgatcacaa

SEQ ID NO: 41727 - DNA, 25 bp, Saccharomyces pastorianus
gggcgcaatcttgctacatctagta

SEQ ID NO: 41728 - DNA, 25 bp, Saccharomyces pastorianus
agggctcctgaatttgtctctgtaa

SEQ ID NO: 41729 - DNA, 25 bp, Saccharomyces pastorianus
ttagatacttccactcccaaaaaat

SEQ ID NO: 41730 - DNA, 25 bp, Saccharomyces pastorianus
aaatccaaatgccagggttccagcc

SEQ ID NO: 41731 - DNA, 25 bp, Saccharomyces pastorianus
tatccatttgggagtcgggcgcaat

SEQ ID NO: 41732 - DNA, 25 bp, Saccharomyces pastorianus
gagaccggtaatccactactttggt

SEQ ID NO: 41733 - DNA, 25 bp, Saccharomyces pastorianus
ttcagacttctggtcatgcaccaat

SEQ ID NO: 41734 - DNA, 25 bp, Saccharomyces pastorianus
gaacagtctcaaatcaacgcatggc

SEQ ID NO: 41735 - DNA, 25 bp, Saccharomyces pastorianus
aacgcatggctgttctttcagactt

SEQ ID NO: 41736 - DNA, 25 bp, Saccharomyces pastorianus
aaactccaaatctgcgcgaagcacc

SEQ ID NO: 41737 - DNA, 25 bp, Saccharomyces pastorianus
cgatcttctagcgtcgttgaatggc

SEQ ID NO: 41738 - DNA, 25 bp, Saccharomyces pastorianus
acgtcagttctgatgaagatgtgca

SEQ ID NO: 41739 - DNA, 25 bp, Saccharomyces pastorianus
gaggcgacgaattgaacgatcttct

SEQ ID NO: 41740 - DNA, 25 bp, Saccharomyces pastorianus
cagattcatctgacgacgatatgga

SEQ ID NO: 41741 - DNA, 25 bp, Saccharomyces pastorianus
ggcatgcctcggtgaaaagccaggc

SEQ ID NO: 41742 - DNA, 25 bp, Saccharomyces pastorianus
gcatctccatttgccgtgatcgaaa

SEQ ID NO: 41743 - DNA, 25 bp, Saccharomyces pastorianus
gcggtacctgtggagaatcatttga

SEQ ID NO: 41744 - DNA, 25 bp, Saccharomyces pastorianus
taactactccattaccttcagcatc

SEQ ID NO: 41745 - DNA, 25 bp, Saccharomyces pastorianus
atggcaacggcttccaaagcgacga

SEQ ID NO: 41746 - DNA, 25 bp, Saccharomyces pastorianus
agtcgaaacaagctatttacgcatg

SEQ ID NO: 41747 - DNA, 25 bp, Saccharomyces pastorianus
tggtttacctgaagcagaccttgct

SEQ ID NO: 41748 - DNA, 25 bp, Saccharomyces pastorianus
gaccttgctctagcacagtgttgtg

SEQ ID NO: 41749 - DNA, 25 bp, Saccharomyces pastorianus
gaagatccattgtatattgccagaa

SEQ ID NO: 41750 - DNA, 25 bp, Saccharomyces pastorianus
cagtggaactctacagggcttggaa

SEQ ID NO: 41751 - DNA, 25 bp, Saccharomyces pastorianus
ctatgatacgatctcggcgtttcat

SEQ ID NO: 41752 - DNA, 25 bp, Saccharomyces pastorianus
tacaatcccgattacatcagtggca

SEQ ID NO: 41753 - DNA, 25 bp, Saccharomyces pastorianus
gaatactttcctgacgaagtccttg

SEQ ID NO: 41754 - DNA, 25 bp, Saccharomyces pastorianus
attattgcctttggctgtcgcagcg

SEQ ID NO: 41755 - DNA, 25 bp, Saccharomyces pastorianus
tcggaccacgggataactcattatt

SEQ ID NO: 41756 - DNA, 25 bp, Saccharomyces pastorianus
ggccagagcacccaagtcagtggaa

SEQ ID NO: 41757 - DNA, 25 bp, Saccharomyces pastorianus
aagggcgataaccactatgatacga

SEQ ID NO: 41758 - DNA, 25 bp, Saccharomyces pastorianus
tgggcacattgattggccttccaat

SEQ ID NO: 41759 - DNA, 25 bp, Saccharomyces pastorianus
atctttatcgactttattgcatttg

SEQ ID NO: 41760 - DNA, 25 bp, Saccharomyces pastorianus
gctaacgaagactccggtatctgcg

SEQ ID NO: 41761 - DNA, 25 bp, Saccharomyces pastorianus
gaagataaacccgactttgaagact

SEQ ID NO: 41762 - DNA, 25 bp, Saccharomyces pastorianus
acaggaggataatagccattggcca

SEQ ID NO: 41763 - DNA, 25 bp, Saccharomyces pastorianus
tactctgttgtcgtcatgttcgtcg

SEQ ID NO: 41764 - DNA, 25 bp, Saccharomyces pastorianus
gaggagatgcatcgcacaactacaa

SEQ ID NO: 41765 - DNA, 25 bp, Saccharomyces pastorianus
atgttcgtcgaaccgatactgcaaa

SEQ ID NO: 41766 - DNA, 25 bp, Saccharomyces pastorianus
gaggtccacgcagacgtcagatgat

SEQ ID NO: 41767 - DNA, 25 bp, Saccharomyces pastorianus
atctgcgctagggtacaatgaacat

SEQ ID NO: 41768 - DNA, 25 bp, Saccharomyces pastorianus
atttatgcgttcttgtactctgttg

SEQ ID NO: 41769 - DNA, 25 bp, Saccharomyces pastorianus
acaagccgacacaaacacagaaatt

SEQ ID NO: 41770 - DNA, 25 bp, Saccharomyces pastorianus
aacacagaaatttaaagctcttcgt

SEQ ID NO: 41771 - DNA, 25 bp, Saccharomyces pastorianus
taaggaagatcccttcaccgatcag

SEQ ID NO: 41772 - DNA, 25 bp, Saccharomyces pastorianus
gaagatcccttcaccgatcagccaa

SEQ ID NO: 41773 - DNA, 25 bp, Saccharomyces pastorianus
atatctttacaagccgacacaaaca

SEQ ID NO: 41774 - DNA, 25 bp, Saccharomyces pastorianus
tataaactgttgagtagtccaggtt

SEQ ID NO: 41775 - DNA, 25 bp, Saccharomyces pastorianus
ttccacaggtttgtacgaaaggtat

SEQ ID NO: 41776 - DNA, 25 bp, Saccharomyces pastorianus
aagctcttcgtcttctattttggga

SEQ ID NO: 41777 - DNA, 25 bp, Saccharomyces pastorianus
caaccgcttctcaatatctttacaa

SEQ ID NO: 41778 - DNA, 25 bp, Saccharomyces pastorianus
tgaaatgagatctaccttcggattc

SEQ ID NO: 41779 - DNA, 25 bp, Saccharomyces pastorianus
cttcgtcttctattttgggatgaaa

SEQ ID NO: 41780 - DNA, 25 bp, Saccharomyces pastorianus
ctggcaattttgtctgcgatttcgc

SEQ ID NO: 41781 - DNA, 25 bp, Saccharomyces pastorianus
gggagtttcaacacggcaaaggcat

SEQ ID NO: 41782 - DNA, 25 bp, Saccharomyces pastorianus
aggttctattcttttcgtctctgct

SEQ ID NO: 41783 - DNA, 25 bp, Saccharomyces pastorianus
gaggatgccgttttgaagaccgtaa

SEQ ID NO: 41784 - DNA, 25 bp, Saccharomyces pastorianus
taggaatacgctccaattgcattgc

SEQ ID NO: 41785 - DNA, 25 bp, Saccharomyces pastorianus
aaccgtctatattttttcgcctgct

SEQ ID NO: 41786 - DNA, 25 bp, Saccharomyces pastorianus
tagcggttgaattaggccctctagg

SEQ ID NO: 41787 - DNA, 25 bp, Saccharomyces pastorianus
tacggtgtacctttccaaggacatg

SEQ ID NO: 41788 - DNA, 25 bp, Saccharomyces pastorianus
atagattttgttattgccggcgctg

SEQ ID NO: 41789 - DNA, 25 bp, Saccharomyces pastorianus
cttacgtcactggtactgtcttgat

SEQ ID NO: 41790 - DNA, 25 bp, Saccharomyces pastorianus
agacatagccgaatcaaccgtctat

SEQ ID NO: 41791 - DNA, 25 bp, Saccharomyces pastorianus
aactctgcgatgtcttggtgaattc

SEQ ID NO: 41792 - DNA, 25 bp, Saccharomyces pastorianus
agagagactgcttttcctacaacac

SEQ ID NO: 41793 - DNA, 25 bp, Saccharomyces pastorianus
tctcatcgaaaccttgtggcttaca

SEQ ID NO: 41794 - DNA, 25 bp, Saccharomyces pastorianus
tagtgaatcgcagcaaactcccgac

SEQ ID NO: 41795 - DNA, 25 bp, Saccharomyces pastorianus
cggcctgttggataaagcccttaca

SEQ ID NO: 41796 - DNA, 25 bp, Saccharomyces pastorianus
tcccttaccgacttgctagatgaca

SEQ ID NO: 41797 - DNA, 25 bp, Saccharomyces pastorianus
gactggttggaaactttccggcctg

SEQ ID NO: 41798 - DNA, 25 bp, Saccharomyces pastorianus
gaatttgccatttcgtgtctaaagg

SEQ ID NO: 41799 - DNA, 25 bp, Saccharomyces pastorianus
aacgagcaactcagccatgtggtct

SEQ ID NO: 41800 - DNA, 25 bp, Saccharomyces pastorianus
gcaatgcggttgctatctcatcgaa

SEQ ID NO: 41801 - DNA, 25 bp, Saccharomyces pastorianus
gatagcgctgttatgtcatcgtcct

SEQ ID NO: 41802 - DNA, 25 bp, Saccharomyces pastorianus
aacgtggaggcactaactcacgcct

SEQ ID NO: 41803 - DNA, 25 bp, Saccharomyces pastorianus
aagtcccaagaatccatgttcgcac

SEQ ID NO: 41804 - DNA, 25 bp, Saccharomyces pastorianus
aaagcctctcgcacgatatttggta

SEQ ID NO: 41805 - DNA, 25 bp, Saccharomyces pastorianus
aagtggcgaccaactgtttgaaggg

SEQ ID NO: 41806 - DNA, 25 bp, Saccharomyces pastorianus
cagaaaccgaggcagatcctagttt

SEQ ID NO: 41807 - DNA, 25 bp, Saccharomyces pastorianus
tctaacgtgtcgtgtctcgaaatat

SEQ ID NO: 41808 - DNA, 25 bp, Saccharomyces pastorianus
ggtacagaaacggacgctgtctcat

SEQ ID NO: 41809 - DNA, 25 bp, Saccharomyces pastorianus
gatcctagtttagcgttaccattga

SEQ ID NO: 41810 - DNA, 25 bp, Saccharomyces pastorianus
attcaaaccttgaccacgtcacagg

SEQ ID NO: 41811 - DNA, 25 bp, Saccharomyces pastorianus
gtacgttacttatgatcggtgacac

SEQ ID NO: 41812 - DNA, 25 bp, Saccharomyces pastorianus
gctgtctcatcttttgacgatcaaa

SEQ ID NO: 41813 - DNA, 25 bp, Saccharomyces pastorianus
gtgctttcgaggataggacttcata

SEQ ID NO: 41814 - DNA, 25 bp, Saccharomyces pastorianus
agagcctcgttgtcttgttatcaag

SEQ ID NO: 41815 - DNA, 25 bp, Saccharomyces pastorianus
gaagcatttctggagcatggctgta

SEQ ID NO: 41816 - DNA, 25 bp, Saccharomyces pastorianus
aatctaggtttgctttgttcggata

SEQ ID NO: 41817 - DNA, 25 bp, Saccharomyces pastorianus
gcgatccggtgaataacgttcctat

SEQ ID NO: 41818 - DNA, 25 bp, Saccharomyces pastorianus
ttccttttcctcacaactcatagaa

SEQ ID NO: 41819 - DNA, 25 bp, Saccharomyces pastorianus
ctacttcccgacttttctaagatca

SEQ ID NO: 41820 - DNA, 25 bp, Saccharomyces pastorianus
ggagatgtcaacaccatgcctactt

SEQ ID NO: 41821 - DNA, 25 bp, Saccharomyces pastorianus
gatatttctactggcgatccggtga

SEQ ID NO: 41822 - DNA, 25 bp, Saccharomyces pastorianus
aggacattcatgttgcgctcaagaa

SEQ ID NO: 41823 - DNA, 25 bp, Saccharomyces pastorianus
acgttcctattcagttggtggttga

SEQ ID NO: 41824 - DNA, 25 bp, Saccharomyces pastorianus
tatctatcctatcctggtcgttata

SEQ ID NO: 41825 - DNA, 25 bp, Saccharomyces pastorianus
gaacccagcttggacaatggctttt

SEQ ID NO: 41826 - DNA, 25 bp, Saccharomyces pastorianus
catggtcccaattcaagtctcgttg

SEQ ID NO: 41827 - DNA, 25 bp, Saccharomyces pastorianus
gttaataccaccaatgcgcagctag

SEQ ID NO: 41828 - DNA, 25 bp, Saccharomyces pastorianus
acaccgttccttttatatctctatt

SEQ ID NO: 41829 - DNA, 25 bp, Saccharomyces pastorianus
gagacaggtttgtttccagcagcga

SEQ ID NO: 41830 - DNA, 25 bp, Saccharomyces pastorianus
ggcgtttcagatgatgtccgactca

SEQ ID NO: 41831 - DNA, 25 bp, Saccharomyces pastorianus
ggtcggctatacatccagtatccat

SEQ ID NO: 41832 - DNA, 25 bp, Saccharomyces pastorianus
gcccaggtcaccgtcaaggttaata

SEQ ID NO: 41833 - DNA, 25 bp, Saccharomyces pastorianus
gaatcaatcctgtttcaagtcccgc

SEQ ID NO: 41834 - DNA, 25 bp, Saccharomyces pastorianus
agactatcataataccgcgttccac

SEQ ID NO: 41835 - DNA, 25 bp, Saccharomyces pastorianus
attcttcaagtcatagggtttcgca

SEQ ID NO: 41836 - DNA, 25 bp, Saccharomyces pastorianus
gagacgatacatctacttattcgag

SEQ ID NO: 41837 - DNA, 25 bp, Saccharomyces pastorianus
tcgcatattccttcttcagttttga

SEQ ID NO: 41838 - DNA, 25 bp, Saccharomyces pastorianus
aaaggccattggtgtaacctccttg

SEQ ID NO: 41839 - DNA, 25 bp, Saccharomyces pastorianus
aagttccattttgccaatctgagaa

SEQ ID NO: 41840 - DNA, 25 bp, Saccharomyces pastorianus
gttttgccaccaacttttgcatctt

SEQ ID NO: 41841 - DNA, 25 bp, Saccharomyces pastorianus
gggacaacgtctaccctagagacta

SEQ ID NO: 41842 - DNA, 25 bp, Saccharomyces pastorianus
aatcggttcctttcaactcgcatat

SEQ ID NO: 41843 - DNA, 25 bp, Saccharomyces pastorianus
agagaggctcgccagcaatcggttc

SEQ ID NO: 41844 - DNA, 25 bp, Saccharomyces pastorianus
taacctccttgtcttacgatgatga

SEQ ID NO: 41845 - DNA, 25 bp, Saccharomyces pastorianus
tcttagctaacgataccgatccgac

SEQ ID NO: 41846 - DNA, 25 bp, Saccharomyces pastorianus
gacagccggcatcaagttcatcaaa

SEQ ID NO: 41847 - DNA, 25 bp, Saccharomyces pastorianus
gtcaatgacggcgaaatccaccaca

SEQ ID NO: 41848 - DNA, 25 bp, Saccharomyces pastorianus
gtggactgtgtctctgatctaggca

SEQ ID NO: 41849 - DNA, 25 bp, Saccharomyces pastorianus
ttgtacctgatagccggcaacgacg

SEQ ID NO: 41850 - DNA, 25 bp, Saccharomyces pastorianus
gtgggtcaaccactgatccagttgg

SEQ ID NO: 41851 - DNA, 25 bp, Saccharomyces pastorianus
gttttaccaagatcatcgtcgtcgc

SEQ ID NO: 41852 - DNA, 25 bp, Saccharomyces pastorianus
gatctaggcacgctgcaacaggtgt

SEQ ID NO: 41853 - DNA, 25 bp, Saccharomyces pastorianus
cgacgggaccatgttgtacctgata

SEQ ID NO: 41854 - DNA, 25 bp, Saccharomyces pastorianus
acaactccttgacgacatcaggcgg

SEQ ID NO: 41855 - DNA, 25 bp, Saccharomyces pastorianus
tgtgccgctgatgaactggatgcca

SEQ ID NO: 41856 - DNA, 25 bp, Saccharomyces pastorianus
gaacttttcgattaccatgatgctg

SEQ ID NO: 41857 - DNA, 25 bp, Saccharomyces pastorianus
gagagaccgcgaaagctttaccagg

SEQ ID NO: 41858 - DNA, 25 bp, Saccharomyces pastorianus
gctttaccaggctgagcaaagacga

SEQ ID NO: 41859 - DNA, 25 bp, Saccharomyces pastorianus
gaaaaaagctttgctcaagggcact

SEQ ID NO: 41860 - DNA, 25 bp, Saccharomyces pastorianus
aactgaatgagtacttgaatgccaa

SEQ ID NO: 41861 - DNA, 25 bp, Saccharomyces pastorianus
taggaaatccctgcgagaccagctg

SEQ ID NO: 41862 - DNA, 25 bp, Saccharomyces pastorianus
gtcatctgcggccaataatacgagt

SEQ ID NO: 41863 - DNA, 25 bp, Saccharomyces pastorianus
tcaagggcactaacgctacggctaa

SEQ ID NO: 41864 - DNA, 25 bp, Saccharomyces pastorianus
taacgctacggctaatccagaaggg

SEQ ID NO: 41865 - DNA, 25 bp, Saccharomyces pastorianus
aacaagcctggatagcaacatacaa

SEQ ID NO: 41866 - DNA, 25 bp, Saccharomyces pastorianus
gaatgccaaggcaactagctttgaa

SEQ ID NO: 41867 - DNA, 25 bp, Saccharomyces pastorianus
gacgaattagcattctaccagaaca

SEQ ID NO: 41868 - DNA, 25 bp, Saccharomyces pastorianus
gaggatcaattgactcccatcggga

SEQ ID NO: 41869 - DNA, 25 bp, Saccharomyces pastorianus
ggcccattgttgtaccatttcgaaa

SEQ ID NO: 41870 - DNA, 25 bp, Saccharomyces pastorianus
gggcctatgtccatatgtgctggct

SEQ ID NO: 41871 - DNA, 25 bp, Saccharomyces pastorianus
aaatgcctggacttcgagctaatgc

SEQ ID NO: 41872 - DNA, 25 bp, Saccharomyces pastorianus
aaggtcaatgattccacacccttga

SEQ ID NO: 41873 - DNA, 25 bp, Saccharomyces pastorianus
atgcccgggtacatgtgtcatttct

SEQ ID NO: 41874 - DNA, 25 bp, Saccharomyces pastorianus
ttagagttgtctggcgacgctatca

SEQ ID NO: 41875 - DNA, 25 bp, Saccharomyces pastorianus
tactccgggttccaggacaaggtca

SEQ ID NO: 41876 - DNA, 25 bp, Saccharomyces pastorianus
attcttgcattctttttcccattgg

SEQ ID NO: 41877 - DNA, 25 bp, Saccharomyces pastorianus
atatgggcgccacgtaggtctagaa

SEQ ID NO: 41878 - DNA, 25 bp, Saccharomyces pastorianus
aaagcccggtggaatctggtgcaat

SEQ ID NO: 41879 - DNA, 25 bp, Saccharomyces pastorianus
atgaactacgggagtcgcaagcgtt

SEQ ID NO: 41880 - DNA, 25 bp, Saccharomyces pastorianus
agtgccgtccatccagtcgaactgt

SEQ ID NO: 41881 - DNA, 25 bp, Saccharomyces pastorianus
ataaattggccaacctgacgactcg

SEQ ID NO: 41882 - DNA, 25 bp, Saccharomyces pastorianus
tactcagtactttctgctgacctag

SEQ ID NO: 41883 - DNA, 25 bp, Saccharomyces pastorianus
gtcgaactgtcggtatactcagtac

SEQ ID NO: 41884 - DNA, 25 bp, Saccharomyces pastorianus
tcattcttatgctacggagggttcg

SEQ ID NO: 41885 - DNA, 25 bp, Saccharomyces pastorianus
ttctgctgacctagacggcttgtac

SEQ ID NO: 41886 - DNA, 25 bp, Saccharomyces pastorianus
ggaacctttcaagcccacgatggat

SEQ ID NO: 41887 - DNA, 25 bp, Saccharomyces pastorianus
cggcttgtaccagtccatcaatgaa

SEQ ID NO: 41888 - DNA, 25 bp, Saccharomyces pastorianus
gtcgcaagcgttactcattcttatg

SEQ ID NO: 41889 - DNA, 25 bp, Saccharomyces pastorianus
gacgactcgcgtgaacacgcttaca

SEQ ID NO: 41890 - DNA, 25 bp, Saccharomyces pastorianus
gtcgtcgtcaatactgctacaaaga

SEQ ID NO: 41891 - DNA, 25 bp, Saccharomyces pastorianus
atgtcagccaaattcatgccctttt

SEQ ID NO: 41892 - DNA, 25 bp, Saccharomyces pastorianus
agtactgaatttccatccggttctc

SEQ ID NO: 41893 - DNA, 25 bp, Saccharomyces pastorianus
gatccttcattcgtatcgtcatcta

SEQ ID NO: 41894 - DNA, 25 bp, Saccharomyces pastorianus
cgtcatcgtcgtcatttgcaacaat

SEQ ID NO: 41895 - DNA, 25 bp, Saccharomyces pastorianus
aatgcctaaatctacgtccttatcg

SEQ ID NO: 41896 - DNA, 25 bp, Saccharomyces pastorianus
atgcccttttattctcaaacagcct

SEQ ID NO: 41897 - DNA, 25 bp, Saccharomyces pastorianus
aaatcaggtgtctttgtcgtcatcg

SEQ ID NO: 41898 - DNA, 25 bp, Saccharomyces pastorianus
agcttcatccttacgttcaagtgca

SEQ ID NO: 41899 - DNA, 25 bp, Saccharomyces pastorianus
aaccttctttttcatcatcagcaac

SEQ ID NO: 41900 - DNA, 25 bp, Saccharomyces pastorianus
ttacgtgtctccacagcagaatgca

SEQ ID NO: 41901 - DNA, 25 bp, Saccharomyces pastorianus
aagggacaccattagcagtttcatt

SEQ ID NO: 41902 - DNA, 25 bp, Saccharomyces pastorianus
aaggccatagtcgtcatcaatcaag

SEQ ID NO: 41903 - DNA, 25 bp, Saccharomyces pastorianus
aatcctcattgggtcttataccggt

SEQ ID NO: 41904 - DNA, 25 bp, Saccharomyces pastorianus
gttatactccagctatttggcccgt

SEQ ID NO: 41905 - DNA, 25 bp, Saccharomyces pastorianus
gtcgttccgcgataaatgtttccta

SEQ ID NO: 41906 - DNA, 25 bp, Saccharomyces pastorianus
ggaacttattcatatcgcctacttt

SEQ ID NO: 41907 - DNA, 25 bp, Saccharomyces pastorianus
gaggcaggcgccatcaatgtttttg

SEQ ID NO: 41908 - DNA, 25 bp, Saccharomyces pastorianus
gaaaatgtttctccattcaacccaa

SEQ ID NO: 41909 - DNA, 25 bp, Saccharomyces pastorianus
ttataccggtagcttctgccacttc

SEQ ID NO: 41910 - DNA, 25 bp, Saccharomyces pastorianus
gggacatcataaacacacttcttct

SEQ ID NO: 41911 - DNA, 25 bp, Saccharomyces pastorianus
aattcaagacccattcgcggataat

SEQ ID NO: 41912 - DNA, 25 bp, Saccharomyces pastorianus
ggtgggttctaccagatccaagcaa

SEQ ID NO: 41913 - DNA, 25 bp, Saccharomyces pastorianus
ttggacgacgactgcgtaagcgcaa

SEQ ID NO: 41914 - DNA, 25 bp, Saccharomyces pastorianus
aatgccatggagctctaactcgaat

SEQ ID NO: 41915 - DNA, 25 bp, Saccharomyces pastorianus
gaccgctcacaatgggaacttcaaa

SEQ ID NO: 41916 - DNA, 25 bp, Saccharomyces pastorianus
aagactggtccgaaaatgacttgaa

SEQ ID NO: 41917 - DNA, 25 bp, Saccharomyces pastorianus
acatttggtatcaacgccatgtgga

SEQ ID NO: 41918 - DNA, 25 bp, Saccharomyces pastorianus
gggttaatccccatagtccatgcat

SEQ ID NO: 41919 - DNA, 25 bp, Saccharomyces pastorianus
cagcaggccccttattggatatagt

SEQ ID NO: 41920 - DNA, 25 bp, Saccharomyces pastorianus
gaaagtgatccggatttcaacccaa

SEQ ID NO: 41921 - DNA, 25 bp, Saccharomyces pastorianus
gtgagacgactggatttttcttcaa

SEQ ID NO: 41922 - DNA, 25 bp, Saccharomyces pastorianus
gacttgaagattcccaaaggtttga

SEQ ID NO: 41923 - DNA, 25 bp, Saccharomyces pastorianus
gctcttcggtctaaattacctccaa

SEQ ID NO: 41924 - DNA, 25 bp, Saccharomyces pastorianus
aaaaagggacattgacacggtagca

SEQ ID NO: 41925 - DNA, 25 bp, Saccharomyces pastorianus
tccggtggtattatgacgaatgact

SEQ ID NO: 41926 - DNA, 25 bp, Saccharomyces pastorianus
atcgcaattatatccttataggtca

SEQ ID NO: 41927 - DNA, 25 bp, Saccharomyces pastorianus
cagacccttggactgtggaagagat

SEQ ID NO: 41928 - DNA, 25 bp, Saccharomyces pastorianus
gctaaacgacgccaatttgaacaag

SEQ ID NO: 41929 - DNA, 25 bp, Saccharomyces pastorianus
tgatgagaatccattcgccaacctt

SEQ ID NO: 41930 - DNA, 25 bp, Saccharomyces pastorianus
ttacctccaaatttcgacgagtatt

SEQ ID NO: 41931 - DNA, 25 bp, Saccharomyces pastorianus
ctgattgaattagctcttcggtcta

SEQ ID NO: 41932 - DNA, 25 bp, Saccharomyces pastorianus
gaatccattcgccaacctttataat

SEQ ID NO: 41933 - DNA, 25 bp, Saccharomyces pastorianus
ggaattcttatacagacccttggac

SEQ ID NO: 41934 - DNA, 25 bp, Saccharomyces pastorianus
gggtaccaggcactagtcgatatct

SEQ ID NO: 41935 - DNA, 25 bp, Saccharomyces pastorianus
gtcggagctcaataaggccttctgg

SEQ ID NO: 41936 - DNA, 25 bp, Saccharomyces pastorianus
tgccgcctagttcttgttcgtgaat

SEQ ID NO: 41937 - DNA, 25 bp, Saccharomyces pastorianus
aatagagccgtactccattttctgt

SEQ ID NO: 41938 - DNA, 25 bp, Saccharomyces pastorianus
atattagaatcgagccttaccggcc

SEQ ID NO: 41939 - DNA, 25 bp, Saccharomyces pastorianus
aatagacctggtgcttgaccacatc

SEQ ID NO: 41940 - DNA, 25 bp, Saccharomyces pastorianus
acatccatttctccttcaatgttgg

SEQ ID NO: 41941 - DNA, 25 bp, Saccharomyces pastorianus
gaaacatcacgctcgatacgctgga

SEQ ID NO: 41942 - DNA, 25 bp, Saccharomyces pastorianus
gaaaatcttgtgtacgagggcctca

SEQ ID NO: 41943 - DNA, 25 bp, Saccharomyces pastorianus
gaacagtctttcgttgctgggagcc

SEQ ID NO: 41944 - DNA, 25 bp, Saccharomyces pastorianus
gatatctgtagggagtctcgcccac

SEQ ID NO: 41945 - DNA, 25 bp, Saccharomyces pastorianus
gaacgtgttgtgatagaccttctac

SEQ ID NO: 41946 - DNA, 25 bp, Saccharomyces pastorianus
gagctcgtttcagttccagatggtg

SEQ ID NO: 41947 - DNA, 25 bp, Saccharomyces pastorianus
tatagatccaagttgctctggtagt

SEQ ID NO: 41948 - DNA, 25 bp, Saccharomyces pastorianus
acgcaatgagtttcccaagtgctaa

SEQ ID NO: 41949 - DNA, 25 bp, Saccharomyces pastorianus
aaggctgcattagagctctaccgaa

SEQ ID NO: 41950 - DNA, 25 bp, Saccharomyces pastorianus
aacatcgatgtcaacgtgggtgatt

SEQ ID NO: 41951 - DNA, 25 bp, Saccharomyces pastorianus
ctctggtagtggtatctttggtcgt

SEQ ID NO: 41952 - DNA, 25 bp, Saccharomyces pastorianus
aggtcttcagggacggaagcgccca

SEQ ID NO: 41953 - DNA, 25 bp, Saccharomyces pastorianus
agctggctgttcttctaacatcgat

SEQ ID NO: 41954 - DNA, 25 bp, Saccharomyces pastorianus
gcaacaactcgctgaaggctgcatt

SEQ ID NO: 41955 - DNA, 25 bp, Saccharomyces pastorianus
aactgaagttgttccttcttggcct

SEQ ID NO: 41956 - DNA, 25 bp, Saccharomyces pastorianus
atatgacacccacgaacaagctgct

SEQ ID NO: 41957 - DNA, 25 bp, Saccharomyces pastorianus
aaccagttatgcctgaccaacaaca

SEQ ID NO: 41958 - DNA, 25 bp, Saccharomyces pastorianus
taacattccacactttgccactgag

SEQ ID NO: 41959 - DNA, 25 bp, Saccharomyces pastorianus
gagtcaccactgcttatatcggtaa

SEQ ID NO: 41960 - DNA, 25 bp, Saccharomyces pastorianus
gccaacttcccattccaaggtagaa

SEQ ID NO: 41961 - DNA, 25 bp, Saccharomyces pastorianus
gtaaatccacaagcggtcgaccata

SEQ ID NO: 41962 - DNA, 25 bp, Saccharomyces pastorianus
gcaacagaggtatgccaccaagttc

SEQ ID NO: 41963 - DNA, 25 bp, Saccharomyces pastorianus
caataacaaccgtggtggcttccgt

SEQ ID NO: 41964 - DNA, 25 bp, Saccharomyces pastorianus
aatgggcgctatgccattgccatct

SEQ ID NO: 41965 - DNA, 25 bp, Saccharomyces pastorianus
ttcaatgggcatgccaatgggcgct

SEQ ID NO: 41966 - DNA, 25 bp, Saccharomyces pastorianus
catatcatcagaagtgctccaccaa

SEQ ID NO: 41967 - DNA, 25 bp, Saccharomyces pastorianus
tgccatgttaggtttggatgccgaa

SEQ ID NO: 41968 - DNA, 25 bp, Saccharomyces pastorianus
gtaagatgacgccatctggccataa

SEQ ID NO: 41969 - DNA, 25 bp, Saccharomyces pastorianus
tatgagggaagcacttgcctccggt

SEQ ID NO: 41970 - DNA, 25 bp, Saccharomyces pastorianus
ggatgccgaattagtttcacattca

SEQ ID NO: 41971 - DNA, 25 bp, Saccharomyces pastorianus
aacggcttttgaaggcggtgtcatt

SEQ ID NO: 41972 - DNA, 25 bp, Saccharomyces pastorianus
cttggctaccaagaggcgaactaat

SEQ ID NO: 41973 - DNA, 25 bp, Saccharomyces pastorianus
ttgcctccggtcaatttagagcctt

SEQ ID NO: 41974 - DNA, 25 bp, Saccharomyces pastorianus
aaaaggttaagctggtcctcgctgc

SEQ ID NO: 41975 - DNA, 25 bp, Saccharomyces pastorianus
gaatcgcacactaaactcgttgcag

SEQ ID NO: 41976 - DNA, 25 bp, Saccharomyces pastorianus
gtcattatcatcacacattcggcag

SEQ ID NO: 41977 - DNA, 25 bp, Saccharomyces pastorianus
gattgagtctcattgtgccatgtta

SEQ ID NO: 41978 - DNA, 25 bp, Saccharomyces pastorianus
gttcgtgtcccagcggaagttgtca

SEQ ID NO: 41979 - DNA, 25 bp, Saccharomyces pastorianus
aaattcactccacaaattcttcctg

SEQ ID NO: 41980 - DNA, 25 bp, Saccharomyces pastorianus
gggaaataccgtttacctgcataca

SEQ ID NO: 41981 - DNA, 25 bp, Saccharomyces pastorianus
gatcaagcccaagcggagccatgga

SEQ ID NO: 41982 - DNA, 25 bp, Saccharomyces pastorianus
acctgcatacaatttcccttatacg

SEQ ID NO: 41983 - DNA, 25 bp, Saccharomyces pastorianus
gagaactacctcacttgggaacgta

SEQ ID NO: 41984 - DNA, 25 bp, Saccharomyces pastorianus
ctggtggtgccattttcctaggaat

SEQ ID NO: 41985 - DNA, 25 bp, Saccharomyces pastorianus
aatctgtgcatgtcttgttcgtgtc

SEQ ID NO: 41986 - DNA, 25 bp, Saccharomyces pastorianus
gttgatacaaccacacacatgcttt

SEQ ID NO: 41987 - DNA, 25 bp, Saccharomyces pastorianus
ttcctcctctatcggtgaaatctgt

SEQ ID NO: 41988 - DNA, 25 bp, Saccharomyces pastorianus
gaaaccgttcattctttgctatcga

SEQ ID NO: 41989 - DNA, 25 bp, Saccharomyces pastorianus
aggaaatcacgaaagctgcagagta

SEQ ID NO: 41990 - DNA, 25 bp, Saccharomyces pastorianus
gttttttattgctcattcctctacg

SEQ ID NO: 41991 - DNA, 25 bp, Saccharomyces pastorianus
gttttgcactcagatgatattgctc

SEQ ID NO: 41992 - DNA, 25 bp, Saccharomyces pastorianus
ctaaagctaatggactctgttgaaa

SEQ ID NO: 41993 - DNA, 25 bp, Saccharomyces pastorianus
gctcgcccggtttttatgccaaaat

SEQ ID NO: 41994 - DNA, 25 bp, Saccharomyces pastorianus
aggtattgcctgtatcctcaagtac

SEQ ID NO: 41995 - DNA, 25 bp, Saccharomyces pastorianus
tggatgaatttctactgcacctaaa

SEQ ID NO: 41996 - DNA, 25 bp, Saccharomyces pastorianus
tcctctacgggctatttgcagggta

SEQ ID NO: 41997 - DNA, 25 bp, Saccharomyces pastorianus
aaaaaccataattctctgctcgccc

SEQ ID NO: 41998 - DNA, 25 bp, Saccharomyces pastorianus
aaaccctttgtatgcttcgaagctg

SEQ ID NO: 41999 - DNA, 25 bp, Saccharomyces pastorianus
gagcttgaccaactaacaggtattg

SEQ ID NO: 42000 - DNA, 25 bp, Saccharomyces pastorianus
attgacgctgacatcgaaggagttt

SEQ ID NO: 42001 - DNA, 25 bp, Saccharomyces pastorianus
ttctaggagttggtgccaggatcac

SEQ ID NO: 42002 - DNA, 25 bp, Saccharomyces pastorianus
acatcgtcactatttattggtcaga

SEQ ID NO: 42003 - DNA, 25 bp, Saccharomyces pastorianus
gagactgtctggttattcctaagga

SEQ ID NO: 42004 - DNA, 25 bp, Saccharomyces pastorianus
gttgcttcataagtggattcccaat

SEQ ID NO: 42005 - DNA, 25 bp, Saccharomyces pastorianus
gagatggttccgcaagtttttaaag

SEQ ID NO: 42006 - DNA, 25 bp, Saccharomyces pastorianus
caacggtttacttgaatggcaggat

SEQ ID NO: 42007 - DNA, 25 bp, Saccharomyces pastorianus
aacgttaatattcatccctccagta

SEQ ID NO: 42008 - DNA, 25 bp, Saccharomyces pastorianus
atggcaggataacgcgttgcttcat

SEQ ID NO: 42009 - DNA, 25 bp, Saccharomyces pastorianus
cctccagtatccttttcgctaatta

SEQ ID NO: 42010 - DNA, 25 bp, Saccharomyces pastorianus
ccaccggataccacacgatgggtaa

SEQ ID NO: 42011 - DNA, 25 bp, Saccharomyces pastorianus
aagccggctacggacaggagcagca

SEQ ID NO: 42012 - DNA, 25 bp, Saccharomyces pastorianus
gggcgacttccaccagtgtgcgcat

SEQ ID NO: 42013 - DNA, 25 bp, Saccharomyces pastorianus
gtttcccatcagagacttgccggag

SEQ ID NO: 42014 - DNA, 25 bp, Saccharomyces pastorianus
aacgccgccctcgttgttcaagagt

SEQ ID NO: 42015 - DNA, 25 bp, Saccharomyces pastorianus
ggactcgtcttgtccgtgcaacaga

SEQ ID NO: 42016 - DNA, 25 bp, Saccharomyces pastorianus
aggaggaactccgtcgccgtcaagt

SEQ ID NO: 42017 - DNA, 25 bp, Saccharomyces pastorianus
atcacgttccactataagccggcta

SEQ ID NO: 42018 - DNA, 25 bp, Saccharomyces pastorianus
aacaacgtgctgtttcccatcagag

SEQ ID NO: 42019 - DNA, 25 bp, Saccharomyces pastorianus
aattccaccgatatcaagccttgcg

SEQ ID NO: 42020 - DNA, 25 bp, Saccharomyces pastorianus
gagatcatcgagaccgtgctgaacg

SEQ ID NO: 42021 - DNA, 25 bp, Saccharomyces pastorianus
atatcaagccttgcgctatcaacac

SEQ ID NO: 42022 - DNA, 25 bp, Saccharomyces pastorianus
tgcggccaatactatccacgtaata

SEQ ID NO: 42023 - DNA, 25 bp, Saccharomyces pastorianus
ttcttcgccctacgttatcaatgaa

SEQ ID NO: 42024 - DNA, 25 bp, Saccharomyces pastorianus
gataactcggtagctcttgtgaaac

SEQ ID NO: 42025 - DNA, 25 bp, Saccharomyces pastorianus
gcatgatatgcacgcgacgaatagt

SEQ ID NO: 42026 - DNA, 25 bp, Saccharomyces pastorianus
ggtacaaagacctctgtgtccatca

SEQ ID NO: 42027 - DNA, 25 bp, Saccharomyces pastorianus
gaagtagcaatttccccagattcca

SEQ ID NO: 42028 - DNA, 25 bp, Saccharomyces pastorianus
agaaggataccatttcttcgcccta

SEQ ID NO: 42029 - DNA, 25 bp, Saccharomyces pastorianus
atatgtggcaagtgtctctgcggcc

SEQ ID NO: 42030 - DNA, 25 bp, Saccharomyces pastorianus
aattgaggtcggagccactgaggta

SEQ ID NO: 42031 - DNA, 25 bp, Saccharomyces pastorianus
acaatttgcattccacgctctttaa

SEQ ID NO: 42032 - DNA, 25 bp, Saccharomyces pastorianus
acttcatccttatcgtattgttttc

SEQ ID NO: 42033 - DNA, 25 bp, Saccharomyces pastorianus
gataagatcgagcactcgcccaata

SEQ ID NO: 42034 - DNA, 25 bp, Saccharomyces pastorianus
aacttcgatcgacaagctgttggat

SEQ ID NO: 42035 - DNA, 25 bp, Saccharomyces pastorianus
cacatatgatgtctttccaggccga

SEQ ID NO: 42036 - DNA, 25 bp, Saccharomyces pastorianus
gacatgatgatgatggctcccataa

SEQ ID NO: 42037 - DNA, 25 bp, Saccharomyces pastorianus
acaaacctgctgtgcgtgtgattca

SEQ ID NO: 42038 - DNA, 25 bp, Saccharomyces pastorianus
gctagccatggcagatcgcatcata

SEQ ID NO: 42039 - DNA, 25 bp, Saccharomyces pastorianus
atttttgcagcccttactatggaaa

SEQ ID NO: 42040 - DNA, 25 bp, Saccharomyces pastorianus
aatctgactattgcacacttccagc

SEQ ID NO: 42041 - DNA, 25 bp, Saccharomyces pastorianus
gaatgggcacggtcatgcttacttt

SEQ ID NO: 42042 - DNA, 25 bp, Saccharomyces pastorianus
gctgttggatattcacgcatacgac

SEQ ID NO: 42043 - DNA, 25 bp, Saccharomyces pastorianus
gattcagggcgtccgtgacacatat

SEQ ID NO: 42044 - DNA, 25 bp, Saccharomyces pastorianus
ggaggccagtcaccattctcagaga

SEQ ID NO: 42045 - DNA, 25 bp, Saccharomyces pastorianus
agagatgaaatgtctaccgcccgcc

SEQ ID NO: 42046 - DNA, 25 bp, Saccharomyces pastorianus
atagtcctggcctgcggtacgaagc

SEQ ID NO: 42047 - DNA, 25 bp, Saccharomyces pastorianus
atcttctcgagatctggcagcgtag

SEQ ID NO: 42048 - DNA, 25 bp, Saccharomyces pastorianus
gcacgtaacatcgaggctagtcaca

SEQ ID NO: 42049 - DNA, 25 bp, Saccharomyces pastorianus
ccctagctgtggtgttcgtgacgta

SEQ ID NO: 42050 - DNA, 25 bp, Saccharomyces pastorianus
tgccaagactcaatttcactccaat

SEQ ID NO: 42051 - DNA, 25 bp, Saccharomyces pastorianus
ttggattgcttcttcaacgatgcct

SEQ ID NO: 42052 - DNA, 25 bp, Saccharomyces pastorianus
aacgacgctaggatcttggattgct

SEQ ID NO: 42053 - DNA, 25 bp, Saccharomyces pastorianus
acgatgcctcagtcaacaagctact

SEQ ID NO: 42054 - DNA, 25 bp, Saccharomyces pastorianus
aggcgacgtttgtgttcttcataga

SEQ ID NO: 42055 - DNA, 25 bp, Saccharomyces pastorianus
tgtgcagtaccaaacttcttcagtg

SEQ ID NO: 42056 - DNA, 25 bp, Saccharomyces pastorianus
tccattttatccatcttcatcgaca

SEQ ID NO: 42057 - DNA, 25 bp, Saccharomyces pastorianus
gactccatcaactagcactgaactg

SEQ ID NO: 42058 - DNA, 25 bp, Saccharomyces pastorianus
gttactacagcgtcggaattttcca

SEQ ID NO: 42059 - DNA, 25 bp, Saccharomyces pastorianus
aaaacactatcctcgaccagttcat

SEQ ID NO: 42060 - DNA, 25 bp, Saccharomyces pastorianus
gaacaattgacgtcttcatcatcga

SEQ ID NO: 42061 - DNA, 25 bp, Saccharomyces pastorianus
attatcgccatatagttcttcgcca

SEQ ID NO: 42062 - DNA, 25 bp, Saccharomyces pastorianus
tgctaaaccagccatttcttcatca

SEQ ID NO: 42063 - DNA, 25 bp, Saccharomyces pastorianus
tgaactgacatcgactgctaaacca

SEQ ID NO: 42064 - DNA, 25 bp, Saccharomyces pastorianus
atctacatcgacgtctccattttat

SEQ ID NO: 42065 - DNA, 25 bp, Saccharomyces pastorianus
ctatttcaatgtcgtctgcttctac

SEQ ID NO: 42066 - DNA, 25 bp, Saccharomyces pastorianus
agaagggctgtatcgcgaccctcta

SEQ ID NO: 42067 - DNA, 25 bp, Saccharomyces pastorianus
gtgtcacaatcccaggaaggctccg

SEQ ID NO: 42068 - DNA, 25 bp, Saccharomyces pastorianus
aacacagcaagttcttctggctcag

SEQ ID NO: 42069 - DNA, 25 bp, Saccharomyces pastorianus
aaattctcatactttctcatcgtcc

SEQ ID NO: 42070 - DNA, 25 bp, Saccharomyces pastorianus
ttctggctcagcaccgagaagggct

SEQ ID NO: 42071 - DNA, 25 bp, Saccharomyces pastorianus
attctatcaaaatcagcaccccttc

SEQ ID NO: 42072 - DNA, 25 bp, Saccharomyces pastorianus
atggatcctcctgcgtcgagtggga

SEQ ID NO: 42073 - DNA, 25 bp, Saccharomyces pastorianus
ctctaaaccttctgcaggccaagaa

SEQ ID NO: 42074 - DNA, 25 bp, Saccharomyces pastorianus
ttttaacacttccaatactccaacg

SEQ ID NO: 42075 - DNA, 25 bp, Saccharomyces pastorianus
acagcaaattcaaccctggtccata

SEQ ID NO: 42076 - DNA, 25 bp, Saccharomyces pastorianus
gagcgtgccggaatatacacctgca

SEQ ID NO: 42077 - DNA, 25 bp, Saccharomyces pastorianus
aacggtttgagaggccacttgttcg

SEQ ID NO: 42078 - DNA, 25 bp, Saccharomyces pastorianus
acctatgtgctgcagaagcctctgt

SEQ ID NO: 42079 - DNA, 25 bp, Saccharomyces pastorianus
aagttcggtgtggacgtgatcgcac

SEQ ID NO: 42080 - DNA, 25 bp, Saccharomyces pastorianus
tgctacggcgcagaacttggaaatg

SEQ ID NO: 42081 - DNA, 25 bp, Saccharomyces pastorianus
tgacacgcagcggattgggaactct

SEQ ID NO: 42082 - DNA, 25 bp, Saccharomyces pastorianus
tacgttgcttacatggaatcacctc

SEQ ID NO: 42083 - DNA, 25 bp, Saccharomyces pastorianus
agactagtagccatcctgtgtacgt

SEQ ID NO: 42084 - DNA, 25 bp, Saccharomyces pastorianus
gtctccgctacaggccatggaatat

SEQ ID NO: 42085 - DNA, 25 bp, Saccharomyces pastorianus
ggaatcacctctgcgataacggttt

SEQ ID NO: 42086 - DNA, 25 bp, Saccharomyces pastorianus
gggaactctgaatcatacgttgctt

SEQ ID NO: 42087 - DNA, 25 bp, Saccharomyces pastorianus
aaatggcgctgcatgggctgccaac

SEQ ID NO: 42088 - DNA, 25 bp, Saccharomyces pastorianus
gaaggtccatatggatccaggccct

SEQ ID NO: 42089 - DNA, 25 bp, Saccharomyces pastorianus
catcctggttcacttgcagtggtgt

SEQ ID NO: 42090 - DNA, 25 bp, Saccharomyces pastorianus
gcccatcacttcaacaatgtcttac

SEQ ID NO: 42091 - DNA, 25 bp, Saccharomyces pastorianus
acgtccagcgccgattttgaatttg

SEQ ID NO: 42092 - DNA, 25 bp, Saccharomyces pastorianus
aaggaagcggtcagccatcctggtt

SEQ ID NO: 42093 - DNA, 25 bp, Saccharomyces pastorianus
gtccgattgcccatgctattgagtt

SEQ ID NO: 42094 - DNA, 25 bp, Saccharomyces pastorianus
ttgccactttccatgcgggaagacc

SEQ ID NO: 42095 - DNA, 25 bp, Saccharomyces pastorianus
cgcccgtttttgttgacactgctag

SEQ ID NO: 42096 - DNA, 25 bp, Saccharomyces pastorianus
aaaacactccttctgttgccagtaa

SEQ ID NO: 42097 - DNA, 25 bp, Saccharomyces pastorianus
gcgggaagacctaacgttgcagaat

SEQ ID NO: 42098 - DNA, 25 bp, Saccharomyces pastorianus
atgtcttacttttggcaggcggaac

SEQ ID NO: 42099 - DNA, 25 bp, Saccharomyces pastorianus
atttgtcaaagctctctcttcatac

SEQ ID NO: 42100 - DNA, 25 bp, Saccharomyces pastorianus
gataccggccattttgctcttgaga

SEQ ID NO: 42101 - DNA, 25 bp, Saccharomyces pastorianus
aatgtcatctctcagtaccatggcg

SEQ ID NO: 42102 - DNA, 25 bp, Saccharomyces pastorianus
ggcgctgaagcctaccggaaagatg

SEQ ID NO: 42103 - DNA, 25 bp, Saccharomyces pastorianus
gatcctgctgcttatacgctggaca

SEQ ID NO: 42104 - DNA, 25 bp, Saccharomyces pastorianus
tgattatggttctccggtaggcttc

SEQ ID NO: 42105 - DNA, 25 bp, Saccharomyces pastorianus
catctttagtgtttccggcgctgaa

SEQ ID NO: 42106 - DNA, 25 bp, Saccharomyces pastorianus
atactgagtctgttgatcctgctgc

SEQ ID NO: 42107 - DNA, 25 bp, Saccharomyces pastorianus
tacgctggacattgcgctcattcag

SEQ ID NO: 42108 - DNA, 25 bp, Saccharomyces pastorianus
gctcattcagcgtgtaggtcaaact

SEQ ID NO: 42109 - DNA, 25 bp, Saccharomyces pastorianus
aacattcccgttctagttgcttggg

SEQ ID NO: 42110 - DNA, 25 bp, Saccharomyces pastorianus
gaatcacgcctcacactagaagttg

SEQ ID NO: 42111 - DNA, 25 bp, Saccharomyces pastorianus
gaagtcaccgactctttgagcgtaa

SEQ ID NO: 42112 - DNA, 25 bp, Saccharomyces pastorianus
gaaggagcattgattccgaccggta

SEQ ID NO: 42113 - DNA, 25 bp, Saccharomyces pastorianus
tacaaaacctaccactttgggcgat

SEQ ID NO: 42114 - DNA, 25 bp, Saccharomyces pastorianus
gaaccaactgttcacttttataccg

SEQ ID NO: 42115 - DNA, 25 bp, Saccharomyces pastorianus
gggcgataatgctccagtttatgat

SEQ ID NO: 42116 - DNA, 25 bp, Saccharomyces pastorianus
ggaataccgtgcacaactagttcgt

SEQ ID NO: 42117 - DNA, 25 bp, Saccharomyces pastorianus
gacaagtctatcagtggtaccgaag

SEQ ID NO: 42118 - DNA, 25 bp, Saccharomyces pastorianus
tgaggcttatcatccagaatcacgc

SEQ ID NO: 42119 - DNA, 25 bp, Saccharomyces pastorianus
gtggcaaatttactcctagatcagg

SEQ ID NO: 42120 - DNA, 25 bp, Saccharomyces pastorianus
gaggctactcctatcaatatgacca

SEQ ID NO: 42121 - DNA, 25 bp, Saccharomyces pastorianus
gtgtcgtcgccatcgcttccggtgc

SEQ ID NO: 42122 - DNA, 25 bp, Saccharomyces pastorianus
ggtgtcgtcgccatcgcttccggtg

SEQ ID NO: 42123 - DNA, 25 bp, Saccharomyces pastorianus
accagccatctccagcgccttgtcc

SEQ ID NO: 42124 - DNA, 25 bp, Saccharomyces pastorianus
cctagctcaatcggacgaaagagtt

SEQ ID NO: 42125 - DNA, 25 bp, Saccharomyces pastorianus
ccaccaccaccctagctcaatcgga

SEQ ID NO: 42126 - DNA, 25 bp, Saccharomyces pastorianus
aattcgcttctatcgccgctggtgt

SEQ ID NO: 42127 - DNA, 25 bp, Saccharomyces pastorianus
aaattcgcttctatcgccgctggtg

SEQ ID NO: 42128 - DNA, 25 bp, Saccharomyces pastorianus
tggtgtcgtcgccatcgcttccggt

SEQ ID NO: 42129 - DNA, 25 bp, Saccharomyces pastorianus
gtcgccatcgcttccggtgccgccg

SEQ ID NO: 42130 - DNA, 25 bp, Saccharomyces pastorianus
attcgcttctatcgccgctggtgtc

SEQ ID NO: 42131 - DNA, 25 bp, Saccharomyces pastorianus
atcgcttccggtgccgccgccgcca

SEQ ID NO: 42132 - DNA, 25 bp, Saccharomyces pastorianus
cggtgcctccgcaactaccactcta

SEQ ID NO: 42133 - DNA, 25 bp, Saccharomyces pastorianus
ggtgcctccgcaactaccactctag

SEQ ID NO: 42134 - DNA, 25 bp, Saccharomyces pastorianus
gccgccggtgcctccgcaactacca

SEQ ID NO: 42135 - DNA, 25 bp, Saccharomyces pastorianus
ccgccggtgcctccgcaactaccac

SEQ ID NO: 42136 - DNA, 25 bp, Saccharomyces pastorianus
cgccgccggtgcctccgcaactacc

SEQ ID NO: 42137 - DNA, 25 bp, Saccharomyces pastorianus
cgccggtgcctccgcaactaccact

SEQ ID NO: 42138 - DNA, 25 bp, Saccharomyces pastorianus
gccggtgcctccgcaactaccactc

SEQ ID NO: 42139 - DNA, 25 bp, Saccharomyces pastorianus
ccggtgcctccgcaactaccactct

SEQ ID NO: 42140 - DNA, 25 bp, Saccharomyces pastorianus
atcgccgccggtgcctccgcaacta

SEQ ID NO: 42141 - DNA, 25 bp, Saccharomyces pastorianus
tcgccgccggtgcctccgcaactac

SEQ ID NO: 42142 - DNA, 25 bp, Saccharomyces pastorianus
gtgcctccgcaactaccactctagc

SEQ ID NO: 42143 - DNA, 25 bp, Saccharomyces pastorianus
ggaatttgattccaccatggcccaa

SEQ ID NO: 42144 - DNA, 25 bp, Saccharomyces pastorianus
agaggtaactggacgcgtgacatga

SEQ ID NO: 42145 - DNA, 25 bp, Saccharomyces pastorianus
gcaaggaagttggtcaaggcacaat

SEQ ID NO: 42146 - DNA, 25 bp, Saccharomyces pastorianus
gaattcattccaactttcagcaagg

SEQ ID NO: 42147 - DNA, 25 bp, Saccharomyces pastorianus
accatggcccaaacatccaaggata

SEQ ID NO: 42148 - DNA, 25 bp, Saccharomyces pastorianus
atttacaatcgccatttttggtggg

SEQ ID NO: 42149 - DNA, 25 bp, Saccharomyces pastorianus
cgaggcagaaccagtgtcaggattt

SEQ ID NO: 42150 - DNA, 25 bp, Saccharomyces pastorianus
gcaagaaactcacacgctttggaat

SEQ ID NO: 42151 - DNA, 25 bp, Saccharomyces pastorianus
aaagattctgtcgacctgggacgaa

SEQ ID NO: 42152 - DNA, 25 bp, Saccharomyces pastorianus
aggatattgatgtccagcaacaaga

SEQ ID NO: 42153 - DNA, 25 bp, Saccharomyces pastorianus
ggacgaagagttttgggccaacaga

SEQ ID NO: 42154 - DNA, 25 bp, Saccharomyces pastorianus
ctgcgcaaactgttgaagtcgctcc

SEQ ID NO: 42155 - DNA, 25 bp, Saccharomyces pastorianus
gagatccgcgagatcgaccaggtct

SEQ ID NO: 42156 - DNA, 25 bp, Saccharomyces pastorianus
gaacacagagcaagctgcgccggga

SEQ ID NO: 42157 - DNA, 25 bp, Saccharomyces pastorianus
gggctcacccaactgtacaaaaagt

SEQ ID NO: 42158 - DNA, 25 bp, Saccharomyces pastorianus
agtcgctcctgctgaactatttaga

SEQ ID NO: 42159 - DNA, 25 bp, Saccharomyces pastorianus
gtactaagcatcaacccggacgtgt

SEQ ID NO: 42160 - DNA, 25 bp, Saccharomyces pastorianus
agagtccctcatcatgctgctggag

SEQ ID NO: 42161 - DNA, 25 bp, Saccharomyces pastorianus
catacaggacaccttgagagccggc

SEQ ID NO: 42162 - DNA, 25 bp, Saccharomyces pastorianus
agaggagattacttgcgccctggac

SEQ ID NO: 42163 - DNA, 25 bp, Saccharomyces pastorianus
gtacaaggtccaagagctgcgcaaa

SEQ ID NO: 42164 - DNA, 25 bp, Saccharomyces pastorianus
tcaacccggacgtgtatgagcgcaa

SEQ ID NO: 42165 - DNA, 25 bp, Saccharomyces pastorianus
ataattatggccttgtcgaatatca

SEQ ID NO: 42166 - DNA, 25 bp, Saccharomyces pastorianus
tgttgaaatgcaggacgccccatcg

SEQ ID NO: 42167 - DNA, 25 bp, Saccharomyces pastorianus
tttgcccaggcaattccaagaaata

SEQ ID NO: 42168 - DNA, 25 bp, Saccharomyces pastorianus
agtttaacatcctcagaccagcaag

SEQ ID NO: 42169 - DNA, 25 bp, Saccharomyces pastorianus
gaaatagactcattgttctctgatg

SEQ ID NO: 42170 - DNA, 25 bp, Saccharomyces pastorianus
atgtattcagtgttcagtggaggtt

SEQ ID NO: 42171 - DNA, 25 bp, Saccharomyces pastorianus
aaattctggctctatgatcggccct

SEQ ID NO: 42172 - DNA, 25 bp, Saccharomyces pastorianus
aaatgttgagtttccctctatgaaa

SEQ ID NO: 42173 - DNA, 25 bp, Saccharomyces pastorianus
tgaacagctcaaaatgcattaccaa

SEQ ID NO: 42174 - DNA, 25 bp, Saccharomyces pastorianus
cgccccatcgtgcatcgaagattat

SEQ ID NO: 42175 - DNA, 25 bp, Saccharomyces pastorianus
aagaatcagttatcccctaatgtta

SEQ ID NO: 42176 - DNA, 25 bp, Saccharomyces pastorianus
aaataccacagttcagcacgcagtt

SEQ ID NO: 42177 - DNA, 25 bp, Saccharomyces pastorianus
gagtcccgggacagcctggaaatac

SEQ ID NO: 42178 - DNA, 25 bp, Saccharomyces pastorianus
tggtgcgccgggtaaacgagtacct

SEQ ID NO: 42179 - DNA, 25 bp, Saccharomyces pastorianus
gggctccgccgagtttcagatgacc

SEQ ID NO: 42180 - DNA, 25 bp, Saccharomyces pastorianus
agtcgcgcgccctagaacagtacgt

SEQ ID NO: 42181 - DNA, 25 bp, Saccharomyces pastorianus
agccggcggctatcgtcggagacaa

SEQ ID NO: 42182 - DNA, 25 bp, Saccharomyces pastorianus
gttccgaagacgctatacccaagga

SEQ ID NO: 42183 - DNA, 25 bp, Saccharomyces pastorianus
tatacccaaggagcacgacgaagac

SEQ ID NO: 42184 - DNA, 25 bp, Saccharomyces pastorianus
cttctcgctttgtgtgggcctatgt

SEQ ID NO: 42185 - DNA, 25 bp, Saccharomyces pastorianus
ggcctatgtttcaagagtcgcgcgc

SEQ ID NO: 42186 - DNA, 25 bp, Saccharomyces pastorianus
ataacgcactttccaaacgtctacg

SEQ ID NO: 42187 - DNA, 25 bp, Saccharomyces pastorianus
aggtggctcaaggtgctgttcatca

SEQ ID NO: 42188 - DNA, 25 bp, Saccharomyces pastorianus
aatagcgttcttctgcatcgataaa

SEQ ID NO: 42189 - DNA, 25 bp, Saccharomyces pastorianus
catcgccttccatttcttaggtatt

SEQ ID NO: 42190 - DNA, 25 bp, Saccharomyces pastorianus
gtggcatctacagggttttcatcct

SEQ ID NO: 42191 - DNA, 25 bp, Saccharomyces pastorianus
gtaccgtaccatggcaacaatccga

SEQ ID NO: 42192 - DNA, 25 bp, Saccharomyces pastorianus
aacatcacacctacgggtacgtttg

SEQ ID NO: 42193 - DNA, 25 bp, Saccharomyces pastorianus
atcttgttgattggtctgccgggca

SEQ ID NO: 42194 - DNA, 25 bp, Saccharomyces pastorianus
agcattggtcgtatgtgccatcgcc

SEQ ID NO: 42195 - DNA, 25 bp, Saccharomyces pastorianus
acaatcttctgttacttctgctatc

SEQ ID NO: 42196 - DNA, 25 bp, Saccharomyces pastorianus
ggttctttggtcattgcatctactt

SEQ ID NO: 42197 - DNA, 25 bp, Saccharomyces pastorianus
gccgctgtggcatgcttatcaacaa

SEQ ID NO: 42198 - DNA, 25 bp, Saccharomyces pastorianus
gaatgcggtcttcaagtactgtcta

SEQ ID NO: 42199 - DNA, 25 bp, Saccharomyces pastorianus
gacacgaatggttatactccagtga

SEQ ID NO: 42200 - DNA, 25 bp, Saccharomyces pastorianus
aaatcatgtccatttgtcgccggga

SEQ ID NO: 42201 - DNA, 25 bp, Saccharomyces pastorianus
gagtactagcattcctgttcaatat

SEQ ID NO: 42202 - DNA, 25 bp, Saccharomyces pastorianus
atcaggcacgatatcaccgatgagc

SEQ ID NO: 42203 - DNA, 25 bp, Saccharomyces pastorianus
ccattctctctcatttcttcaaaat

SEQ ID NO: 42204 - DNA, 25 bp, Saccharomyces pastorianus
gacaaatctccaatccgctataaat

SEQ ID NO: 42205 - DNA, 25 bp, Saccharomyces pastorianus
gacgttcttgaaccgatcactgaag

SEQ ID NO: 42206 - DNA, 25 bp, Saccharomyces pastorianus
cagcggagctgatacatgggacaaa

SEQ ID NO: 42207 - DNA, 25 bp, Saccharomyces pastorianus
agtggatttgcgctacccaagggca

SEQ ID NO: 42208 - DNA, 25 bp, Saccharomyces pastorianus
gaagtatcgcagctaccagcggagc

SEQ ID NO: 42209 - DNA, 25 bp, Saccharomyces pastorianus
atctatccaaattgccactgcgttt

SEQ ID NO: 42210 - DNA, 25 bp, Saccharomyces pastorianus
tgcgtttccaagttcattccccgat

SEQ ID NO: 42211 - DNA, 25 bp, Saccharomyces pastorianus
ggcattccaagaacgtagggctcaa

SEQ ID NO: 42212 - DNA, 25 bp, Saccharomyces pastorianus
attccccgatgttttaggcttgcct

SEQ ID NO: 42213 - DNA, 25 bp, Saccharomyces pastorianus
aagtacgcattcagtggaggccaag

SEQ ID NO: 42214 - DNA, 25 bp, Saccharomyces pastorianus
caggtttttcccagctttgcaaggt

SEQ ID NO: 42215 - DNA, 25 bp, Saccharomyces pastorianus
ggaggccaagtctctgctgatatgc

SEQ ID NO: 42216 - DNA, 25 bp, Saccharomyces pastorianus
gtattcaaagcctgcattgctgcat

SEQ ID NO: 42217 - DNA, 25 bp, Saccharomyces pastorianus
attgctgcattccaggtttttccca

SEQ ID NO: 42218 - DNA, 25 bp, Saccharomyces pastorianus
gattccatgtgccatcgatcaagat

SEQ ID NO: 42219 - DNA, 25 bp, Saccharomyces pastorianus
atgctaccacataagctggtctggg

SEQ ID NO: 42220 - DNA, 25 bp, Saccharomyces pastorianus
ccaatttcgcttgctggatctaaaa

SEQ ID NO: 42221 - DNA, 25 bp, Saccharomyces pastorianus
ttcaatgaccactacgacggccaat

SEQ ID NO: 42222 - DNA, 25 bp, Saccharomyces pastorianus
tagacgttcccagcgaaatcctaag

SEQ ID NO: 42223 - DNA, 25 bp, Saccharomyces pastorianus
aggatgggtcgagcacaactgttca

SEQ ID NO: 42224 - DNA, 25 bp, Saccharomyces pastorianus
agatctcatctcgtggttcactacg

SEQ ID NO: 42225 - DNA, 25 bp, Saccharomyces pastorianus
aaatcctaaggcactgctggtccag

SEQ ID NO: 42226 - DNA, 25 bp, Saccharomyces pastorianus
gagatcctagcctggttcaatgacc

SEQ ID NO: 42227 - DNA, 25 bp, Saccharomyces pastorianus
ggaaccatgtaccttccaatgcaag

SEQ ID NO: 42228 - DNA, 25 bp, Saccharomyces pastorianus
gtgtaaggccttggaagacgtcaca

SEQ ID NO: 42229 - DNA, 25 bp, Saccharomyces pastorianus
aaatgctcgagcacgtagacgttcc

SEQ ID NO: 42230 - DNA, 25 bp, Saccharomyces pastorianus
agtatagaggctggcttgtccggaa

SEQ ID NO: 42231 - DNA, 25 bp, Saccharomyces pastorianus
tcgattccccacatccattaatagt

SEQ ID NO: 42232 - DNA, 25 bp, Saccharomyces pastorianus
gtcgggacttacttacaattggcta

SEQ ID NO: 42233 - DNA, 25 bp, Saccharomyces pastorianus
aatgttttcaggatcgtcgattccc

SEQ ID NO: 42234 - DNA, 25 bp, Saccharomyces pastorianus
gaagcggactccatgacagctggtg

SEQ ID NO: 42235 - DNA, 25 bp, Saccharomyces pastorianus
attcaaccagattcgcatttgcttg

SEQ ID NO: 42236 - DNA, 25 bp, Saccharomyces pastorianus
tagccaccaacctagacgattccat

SEQ ID NO: 42237 - DNA, 25 bp, Saccharomyces pastorianus
aaggtactctaagctatcggatgaa

SEQ ID NO: 42238 - DNA, 25 bp, Saccharomyces pastorianus
ggaaattggcctaactcatatgaga

SEQ ID NO: 42239 - DNA, 25 bp, Saccharomyces pastorianus
gttctaaaacgtctcttggaggtca

SEQ ID NO: 42240 - DNA, 25 bp, Saccharomyces pastorianus
gatatcgtaacaacatccttccgtg

SEQ ID NO: 42241 - DNA, 25 bp, Saccharomyces pastorianus
ggacatggcttagtcaacgctgata

SEQ ID NO: 42242 - DNA, 25 bp, Saccharomyces pastorianus
cactctaccaaggtgcggtgttatt

SEQ ID NO: 42243 - DNA, 25 bp, Saccharomyces pastorianus
ttcaggttctacaacgttattcgta

SEQ ID NO: 42244 - DNA, 25 bp, Saccharomyces pastorianus
gtatttacttctgagctctactcaa

SEQ ID NO: 42245 - DNA, 25 bp, Saccharomyces pastorianus
aacatcggattgtgttcctttggcg

SEQ ID NO: 42246 - DNA, 25 bp, Saccharomyces pastorianus
aagccgatttgtgcattcaggttct

SEQ ID NO: 42247 - DNA, 25 bp, Saccharomyces pastorianus
ttcgaaggcgaaacaatctccattg

SEQ ID NO: 42248 - DNA, 25 bp, Saccharomyces pastorianus
ggattccaatatttcactctaccaa

SEQ ID NO: 42249 - DNA, 25 bp, Saccharomyces pastorianus
agaaccccatattctttatgaacgt

SEQ ID NO: 42250 - DNA, 25 bp, Saccharomyces pastorianus
aagaggtctcctgataacaactaag

SEQ ID NO: 42251 - DNA, 25 bp, Saccharomyces pastorianus
gaacctctgatcattatttgtgcta

SEQ ID NO: 42252 - DNA, 25 bp, Saccharomyces pastorianus
gttcctttggcgtttgacattttga

SEQ ID NO: 42253 - DNA, 25 bp, Saccharomyces pastorianus
gcccaggatttcaccatttataacg

SEQ ID NO: 42254 - DNA, 25 bp, Saccharomyces pastorianus
tacaagaaattgtcccgccagtcac

SEQ ID NO: 42255 - DNA, 25 bp, Saccharomyces pastorianus
gccagtcactgagcggatcaccaag

SEQ ID NO: 42256 - DNA, 25 bp, Saccharomyces pastorianus
tacgaagacaacacagcccaggatt

SEQ ID NO: 42257 - DNA, 25 bp, Saccharomyces pastorianus
gaaattacccatgattgcgtaccga

SEQ ID NO: 42258 - DNA, 25 bp, Saccharomyces pastorianus
gaaaacgtacttgtgaccttgatca

SEQ ID NO: 42259 - DNA, 25 bp, Saccharomyces pastorianus
tttataacggcattcactcctcaaa

SEQ ID NO: 42260 - DNA, 25 bp, Saccharomyces pastorianus
ctaaaactatccattggcccagcat

SEQ ID NO: 42261 - DNA, 25 bp, Saccharomyces pastorianus
acaacgaacgccacttgtgtgcgag

SEQ ID NO: 42262 - DNA, 25 bp, Saccharomyces pastorianus
ttacgtgcgaactgtttcccacaac

SEQ ID NO: 42263 - DNA, 25 bp, Saccharomyces pastorianus
aatactaaactacatgatccccacg

SEQ ID NO: 42264 - DNA, 25 bp, Saccharomyces pastorianus
aagacattgtcgctgcagcgctaca

SEQ ID NO: 42265 - DNA, 25 bp, Saccharomyces pastorianus
ttgggtccacttcgttgttgcgcag

SEQ ID NO: 42266 - DNA, 25 bp, Saccharomyces pastorianus
gattagtcccttgcctgagaagtgg

SEQ ID NO: 42267 - DNA, 25 bp, Saccharomyces pastorianus
gagaaccaatgagccactggacaaa

SEQ ID NO: 42268 - DNA, 25 bp, Saccharomyces pastorianus
ggaggagtacgattcgctactgaat

SEQ ID NO: 42269 - DNA, 25 bp, Saccharomyces pastorianus
acggttgatataccagtctcgcaaa

SEQ ID NO: 42270 - DNA, 25 bp, Saccharomyces pastorianus
actgggatatctattattgggcgac

SEQ ID NO: 42271 - DNA, 25 bp, Saccharomyces pastorianus
gcagccttaggtggtacagcagcga

SEQ ID NO: 42272 - DNA, 25 bp, Saccharomyces pastorianus
ttttgtctgggtttgccgctaaata

SEQ ID NO: 42273 - DNA, 25 bp, Saccharomyces pastorianus
gaatcactagccctctggttgggtc

SEQ ID NO: 42274 - DNA, 25 bp, Saccharomyces pastorianus
gaactacgagattagtcccttgcct

SEQ ID NO: 42275 - DNA, 25 bp, Saccharomyces pastorianus
aagggatatgccacactctacgtag

SEQ ID NO: 42276 - DNA, 25 bp, Saccharomyces pastorianus
gaagattcgccgcttggataccaac

SEQ ID NO: 42277 - DNA, 25 bp, Saccharomyces pastorianus
atctgtttaacgcacccatatacgg

SEQ ID NO: 42278 - DNA, 25 bp, Saccharomyces pastorianus
gactacacttacacagctggcgatg

SEQ ID NO: 42279 - DNA, 25 bp, Saccharomyces pastorianus
gtattaatgaaagcgcatcccctca

SEQ ID NO: 42280 - DNA, 25 bp, Saccharomyces pastorianus
cctcgaaatcgttactgcaggcatt

SEQ ID NO: 42281 - DNA, 25 bp, Saccharomyces pastorianus
atagcctcacaattgggtctcgttt

SEQ ID NO: 42282 - DNA, 25 bp, Saccharomyces pastorianus
gacgaattcttccttgtcactacag

SEQ ID NO: 42283 - DNA, 25 bp, Saccharomyces pastorianus
acagcatgacattttccctctagat

SEQ ID NO: 42284 - DNA, 25 bp, Saccharomyces pastorianus
gagtttgtgatgcatacttccctat

SEQ ID NO: 42285 - DNA, 25 bp, Saccharomyces pastorianus
gaccccactaatcctagcgtagagt

SEQ ID NO: 42286 - DNA, 25 bp, Saccharomyces pastorianus
atactgcggcgtgtgcgacgtctat

SEQ ID NO: 42287 - DNA, 25 bp, Saccharomyces pastorianus
atggtgttgtgacgtgtgcttccaa

SEQ ID NO: 42288 - DNA, 25 bp, Saccharomyces pastorianus
ggcttcacaattgggtctcatttca

SEQ ID NO: 42289 - DNA, 25 bp, Saccharomyces pastorianus
agattcgcctcttgggtatcaacta

SEQ ID NO: 42290 - DNA, 25 bp, Saccharomyces pastorianus
agtaccgggctcagaagattcgcct

SEQ ID NO: 42291 - DNA, 25 bp, Saccharomyces pastorianus
ccccatgggtgatatttgcggacta

SEQ ID NO: 42292 - DNA, 25 bp, Saccharomyces pastorianus
gaaatgcacgacgagttcttcttcc

SEQ ID NO: 42293 - DNA, 25 bp, Saccharomyces pastorianus
acaggaacttgtttgacgcaccaat

SEQ ID NO: 42294 - DNA, 25 bp, Saccharomyces pastorianus
agagagctcggacacatactgcggc

SEQ ID NO: 42295 - DNA, 25 bp, Saccharomyces pastorianus
aactaaattgcatagccgtggcttc

SEQ ID NO: 42296 - DNA, 25 bp, Saccharomyces pastorianus
caagaggctccttgagggcattcaa

SEQ ID NO: 42297 - DNA, 25 bp, Saccharomyces pastorianus
atccaagtttgttcagaccaccatg

SEQ ID NO: 42298 - DNA, 25 bp, Saccharomyces pastorianus
atctcaatcctctaattcatccaag

SEQ ID NO: 42299 - DNA, 25 bp, Saccharomyces pastorianus
ggtcctccggatgctacattgactt

SEQ ID NO: 42300 - DNA, 25 bp, Saccharomyces pastorianus
gtttacgctctgattacacacggta

SEQ ID NO: 42301 - DNA, 25 bp, Saccharomyces pastorianus
tctcagttactaaagggtcctccgg

SEQ ID NO: 42302 - DNA, 25 bp, Saccharomyces pastorianus
attgacttcaggtggttcgttgcct

SEQ ID NO: 42303 - DNA, 25 bp, Saccharomyces pastorianus
ttgcctgtatctccaagaccgttgg

SEQ ID NO: 42304 - DNA, 25 bp, Saccharomyces pastorianus
gccacaggtgttgcagctctagaaa

SEQ ID NO: 42305 - DNA, 25 bp, Saccharomyces pastorianus
gatacttcatacaccatcacgaggg

SEQ ID NO: 42306 - DNA, 25 bp, Saccharomyces pastorianus
ttatttccaatactgtccctcaaga

SEQ ID NO: 42307 - DNA, 25 bp, Saccharomyces pastorianus
ggtgacgacacttgtatcttctcaa

SEQ ID NO: 42308 - DNA, 25 bp, Saccharomyces pastorianus
gacgctattttatctattgctagaa

SEQ ID NO: 42309 - DNA, 25 bp, Saccharomyces pastorianus
tccctaacggtattccgctagttat

SEQ ID NO: 42310 - DNA, 25 bp, Saccharomyces pastorianus
agaatgatcaaggttcctccaccgg

SEQ ID NO: 42311 - DNA, 25 bp, Saccharomyces pastorianus
gaaaatcttggagggcgtctctgac

SEQ ID NO: 42312 - DNA, 25 bp, Saccharomyces pastorianus
gcgaggagagatacctgtgttccaa

SEQ ID NO: 42313 - DNA, 25 bp, Saccharomyces pastorianus
gggaagccgcctaaagtcgacttga

SEQ ID NO: 42314 - DNA, 25 bp, Saccharomyces pastorianus
gagacccttcttaaatgacgctatt

SEQ ID NO: 42315 - DNA, 25 bp, Saccharomyces pastorianus
ttctatttggatccggaatcagcta

SEQ ID NO: 42316 - DNA, 25 bp, Saccharomyces pastorianus
ggtagttctgttagatcgctgttga

SEQ ID NO: 42317 - DNA, 25 bp, Saccharomyces pastorianus
ggatgtcgacatccctaacggtatt

SEQ ID NO: 42318 - DNA, 25 bp, Saccharomyces pastorianus
gtcactagattgagacccttcttaa

SEQ ID NO: 42319 - DNA, 25 bp, Saccharomyces pastorianus
tgattgccctacaagagttcacctc

SEQ ID NO: 42320 - DNA, 25 bp, Saccharomyces pastorianus
ccacaagatttgctcgtttatttaa

SEQ ID NO: 42321 - DNA, 25 bp, Saccharomyces pastorianus
attttagatcaagtcgtcactgagt

SEQ ID NO: 42322 - DNA, 25 bp, Saccharomyces pastorianus
gatcactccaaagttgttaaccgat

SEQ ID NO: 42323 - DNA, 25 bp, Saccharomyces pastorianus
gtgccggtgctgttcatctggaaaa

SEQ ID NO: 42324 - DNA, 25 bp, Saccharomyces pastorianus
tacggtcctttacatgattgcccta

SEQ ID NO: 42325 - DNA, 25 bp, Saccharomyces pastorianus
gttaaccgatttgtattaccacgag

SEQ ID NO: 42326 - DNA, 25 bp, Saccharomyces pastorianus
gaacaaacagttcctcagcaaacta

SEQ ID NO: 42327 - DNA, 25 bp, Saccharomyces pastorianus
ctgctccattcagagtcgtagacga

SEQ ID NO: 42328 - DNA, 25 bp, Saccharomyces pastorianus
agtacactgtgttatggccggttct

SEQ ID NO: 42329 - DNA, 25 bp, Saccharomyces pastorianus
ggtcatgccattttggaacctaagc

SEQ ID NO: 42330 - DNA, 25 bp, Saccharomyces pastorianus
gtagctttcctacttttgccaagat

SEQ ID NO: 42331 - DNA, 25 bp, Saccharomyces pastorianus
agagccgccggagcccaaggaatta

SEQ ID NO: 42332 - DNA, 25 bp, Saccharomyces pastorianus
atagtgaggccttgtgtcattccag

SEQ ID NO: 42333 - DNA, 25 bp, Saccharomyces pastorianus
gattttttaacgagccaactgtact

SEQ ID NO: 42334 - DNA, 25 bp, Saccharomyces pastorianus
agacttccaagcactttccattgca

SEQ ID NO: 42335 - DNA, 25 bp, Saccharomyces pastorianus
aggcagagttatcctgtcacactgt

SEQ ID NO: 42336 - DNA, 25 bp, Saccharomyces pastorianus
gaacagcattcgaaggatcccatgt

SEQ ID NO: 42337 - DNA, 25 bp, Saccharomyces pastorianus
gaggcacaatatgtccacggttccg

SEQ ID NO: 42338 - DNA, 25 bp, Saccharomyces pastorianus
atgggcgatcacgtttcaccggaat

SEQ ID NO: 42339 - DNA, 25 bp, Saccharomyces pastorianus
aatatactcccagctaggcgatttt

SEQ ID NO: 42340 - DNA, 25 bp, Saccharomyces pastorianus
accggaatccctgcgtttgaaatca

SEQ ID NO: 42341 - DNA, 25 bp, Saccharomyces pastorianus
gaaagtactggtgccgatacgaaaa

SEQ ID NO: 42342 - DNA, 25 bp, Saccharomyces pastorianus
gacctagagtctttaattggcttta

SEQ ID NO: 42343 - DNA, 25 bp, Saccharomyces pastorianus
tagcgaaggcgtctcattggtttga

SEQ ID NO: 42344 - DNA, 25 bp, Saccharomyces pastorianus
acgtgttcacgatctactttctagt

SEQ ID NO: 42345 - DNA, 25 bp, Saccharomyces pastorianus
gtcatctgcgaacgaaatctcggca

SEQ ID NO: 42346 - DNA, 25 bp, Saccharomyces pastorianus
acagatacgactacacagagcattg

SEQ ID NO: 42347 - DNA, 25 bp, Saccharomyces pastorianus
tagtgactgctttgaggaaaccgaa

SEQ ID NO: 42348 - DNA, 25 bp, Saccharomyces pastorianus
agctagaacgcattactcggcggat

SEQ ID NO: 42349 - DNA, 25 bp, Saccharomyces pastorianus
atgacacttcggtacgtgttcacga

SEQ ID NO: 42350 - DNA, 25 bp, Saccharomyces pastorianus
tcagaacctgtgaggcaaatgccta

SEQ ID NO: 42351 - DNA, 25 bp, Saccharomyces pastorianus
gagcattgtaggacgtcatctgcga

SEQ ID NO: 42352 - DNA, 25 bp, Saccharomyces pastorianus
gatactctccgttcattgctgaaag

SEQ ID NO: 42353 - DNA, 25 bp, Saccharomyces pastorianus
tagatacccggtaactttccacatg

SEQ ID NO: 42354 - DNA, 25 bp, Saccharomyces pastorianus
accgggagttgcttggatggcatca

SEQ ID NO: 42355 - DNA, 25 bp, Saccharomyces pastorianus
gaagagaactctcctaccgggagtt

SEQ ID NO: 42356 - DNA, 25 bp, Saccharomyces pastorianus
gaaactagcaacattttaccacacg

SEQ ID NO: 42357 - DNA, 25 bp, Saccharomyces pastorianus
aaagctttgatactggacccgactg

SEQ ID NO: 42358 - DNA, 25 bp, Saccharomyces pastorianus
gcatgatttgcgttttcaacctcaa

SEQ ID NO: 42359 - DNA, 25 bp, Saccharomyces pastorianus
aagagtgtacggcttctagataccc

SEQ ID NO: 42360 - DNA, 25 bp, Saccharomyces pastorianus
aactttccacatgccatactgggat

SEQ ID NO: 42361 - DNA, 25 bp, Saccharomyces pastorianus
gcatcacacgctcattgcatgattt

SEQ ID NO: 42362 - DNA, 25 bp, Saccharomyces pastorianus
gactgataggccaaccgctacagaa

SEQ ID NO: 42363 - DNA, 25 bp, Saccharomyces pastorianus
agggctacattctctttgcattgca

SEQ ID NO: 42364 - DNA, 25 bp, Saccharomyces pastorianus
taattatgccgtccccgaatgacgt

SEQ ID NO: 42365 - DNA, 25 bp, Saccharomyces pastorianus
tgcattgcagcgtatctatcaaagc

SEQ ID NO: 42366 - DNA, 25 bp, Saccharomyces pastorianus
tgaagattccgagccactcgtaatt

SEQ ID NO: 42367 - DNA, 25 bp, Saccharomyces pastorianus
gacgtacagtttttattagaggccg

SEQ ID NO: 42368 - DNA, 25 bp, Saccharomyces pastorianus
caataggtgccgatcttgtactaaa

SEQ ID NO: 42369 - DNA, 25 bp, Saccharomyces pastorianus
ctgtgtgatgttagcgatcccgcat

SEQ ID NO: 42370 - DNA, 25 bp, Saccharomyces pastorianus
aagggtgacctacttgttacaatag

SEQ ID NO: 42371 - DNA, 25 bp, Saccharomyces pastorianus
agcagtatcagggacagggttctat

SEQ ID NO: 42372 - DNA, 25 bp, Saccharomyces pastorianus
gcaactattcttcagttttctgtgt

SEQ ID NO: 42373 - DNA, 25 bp, Saccharomyces pastorianus
ggcagctactaagccgttagaacga

SEQ ID NO: 42374 - DNA, 25 bp, Saccharomyces pastorianus
taggcaccagtaatcatgctattag

SEQ ID NO: 42375 - DNA, 25 bp, Saccharomyces pastorianus
agaccgttaacacgcatcctagtac

SEQ ID NO: 42376 - DNA, 25 bp, Saccharomyces pastorianus
gaacaacggtatgtcttacgcaaga

SEQ ID NO: 42377 - DNA, 25 bp, Saccharomyces pastorianus
gcagacttcagtactcttcaggaga

SEQ ID NO: 42378 - DNA, 25 bp, Saccharomyces pastorianus
gcgaccatggtagaacttttgttgc

SEQ ID NO: 42379 - DNA, 25 bp, Saccharomyces pastorianus
ataccatttggtaaggctggccatg

SEQ ID NO: 42380 - DNA, 25 bp, Saccharomyces pastorianus
aatcccgtagataacaagcctgtaa

SEQ ID NO: 42381 - DNA, 25 bp, Saccharomyces pastorianus
agtgatgaacgccttcgctaaaaga

SEQ ID NO: 42382 - DNA, 25 bp, Saccharomyces pastorianus
atagtgtttctctgatatttgcaaa

SEQ ID NO: 42383 - DNA, 25 bp, Saccharomyces pastorianus
caagccagttctaaggtgtccattt

SEQ ID NO: 42384 - DNA, 25 bp, Saccharomyces pastorianus
gagagcatctctcaagccagttcta

SEQ ID NO: 42385 - DNA, 25 bp, Saccharomyces pastorianus
ctttgcccggttcaagctgagaatt

SEQ ID NO: 42386 - DNA, 25 bp, Saccharomyces pastorianus
acttcgagaccgagtggaatctgca

SEQ ID NO: 42387 - DNA, 25 bp, Saccharomyces pastorianus
tgggcaacctgattcgcgcagagct

SEQ ID NO: 42388 - DNA, 25 bp, Saccharomyces pastorianus
gctgggcgcgctgaagacgaacttc

SEQ ID NO: 42389 - DNA, 25 bp, Saccharomyces pastorianus
gtttgccgcctacaaggtcgagcac

SEQ ID NO: 42390 - DNA, 25 bp, Saccharomyces pastorianus
aacgccgtggtgatcacgttcgaga

SEQ ID NO: 42391 - DNA, 25 bp, Saccharomyces pastorianus
agcattatcaataagctgggcgcgc

SEQ ID NO: 42392 - DNA, 25 bp, Saccharomyces pastorianus
gcgcagagctgcttaacgacaggaa

SEQ ID NO: 42393 - DNA, 25 bp, Saccharomyces pastorianus
gctaaagatcgagcccgacaccaag

SEQ ID NO: 42394 - DNA, 25 bp, Saccharomyces pastorianus
gatttgaactattcctgctgggtga

SEQ ID NO: 42395 - DNA, 25 bp, Saccharomyces pastorianus
acaggaaggtgctgtttgccgccta

SEQ ID NO: 42396 - DNA, 25 bp, Saccharomyces pastorianus
ggcagctaacaaatatccgaccatt

SEQ ID NO: 42397 - DNA, 25 bp, Saccharomyces pastorianus
acacatatattaccttcttccatcg

SEQ ID NO: 42398 - DNA, 25 bp, Saccharomyces pastorianus
gcctgtgacttataagctgcatatt

SEQ ID NO: 42399 - DNA, 25 bp, Saccharomyces pastorianus
gcctaaaaggctccacggcaaaggt

SEQ ID NO: 42400 - DNA, 25 bp, Saccharomyces pastorianus
ccaacggaaggtatctctcacgaga

SEQ ID NO: 42401 - DNA, 25 bp, Saccharomyces pastorianus
atgctttaccacatccaacggaagg

SEQ ID NO: 42402 - DNA, 25 bp, Saccharomyces pastorianus
gaaaatcaagattcagcctgtgact

SEQ ID NO: 42403 - DNA, 25 bp, Saccharomyces pastorianus
gaaggtatctctgtatcgacgctga

SEQ ID NO: 42404 - DNA, 25 bp, Saccharomyces pastorianus
tttccaactcccgatacacatatat

SEQ ID NO: 42405 - DNA, 25 bp, Saccharomyces pastorianus
ttcttccatcgcaaatgtgccacaa

SEQ ID NO: 42406 - DNA, 25 bp, Saccharomyces pastorianus
gacgtttttactcgtaaggcagcta

SEQ ID NO: 42407 - DNA, 25 bp, Saccharomyces pastorianus
gttttgagctccagattattccgtt

SEQ ID NO: 42408 - DNA, 25 bp, Saccharomyces pastorianus
gaacctagttattgctttagcgtct

SEQ ID NO: 42409 - DNA, 25 bp, Saccharomyces pastorianus
taaaggcttcggactcggtgagtgt

SEQ ID NO: 42410 - DNA, 25 bp, Saccharomyces pastorianus
atcataccatatgccgatcctgttt

SEQ ID NO: 42411 - DNA, 25 bp, Saccharomyces pastorianus
acagtctctttgcaacctaatcatc

SEQ ID NO: 42412 - DNA, 25 bp, Saccharomyces pastorianus
tagaatagcatacatcccacgcagc

SEQ ID NO: 42413 - DNA, 25 bp, Saccharomyces pastorianus
gaatacccagaattgttgcccctga

SEQ ID NO: 42414 - DNA, 25 bp, Saccharomyces pastorianus
ggactgtgtcggtgatagctttgaa

SEQ ID NO: 42415 - DNA, 25 bp, Saccharomyces pastorianus
cggagagtaagttgtcttcgctaca

SEQ ID NO: 42416 - DNA, 25 bp, Saccharomyces pastorianus
gaaacttcttccgatcgaacctagt

SEQ ID NO: 42417 - DNA, 25 bp, Saccharomyces pastorianus
tgatatattacaccctcgttggata

SEQ ID NO: 42418 - DNA, 25 bp, Saccharomyces pastorianus
aaaaatgctctctgaagggtcggaa

SEQ ID NO: 42419 - DNA, 25 bp, Saccharomyces pastorianus
aaggtgcctcagtggttgaatgttc

SEQ ID NO: 42420 - DNA, 25 bp, Saccharomyces pastorianus
tatcagcaatgcaccgattccaact

SEQ ID NO: 42421 - DNA, 25 bp, Saccharomyces pastorianus
gattccaactctgtcaagaaggctg

SEQ ID NO: 42422 - DNA, 25 bp, Saccharomyces pastorianus
atgactctcttggtaacgccattgg

SEQ ID NO: 42423 - DNA, 25 bp, Saccharomyces pastorianus
ttgttaccttatttagtggccgcta

SEQ ID NO: 42424 - DNA, 25 bp, Saccharomyces pastorianus
tacgggagaccgtggaggcttaact

SEQ ID NO: 42425 - DNA, 25 bp, Saccharomyces pastorianus
ttaactgtgtcgaggcattagccgc

SEQ ID NO: 42426 - DNA, 25 bp, Saccharomyces pastorianus
agtggccgctaatcaagtgaattac

SEQ ID NO: 42427 - DNA, 25 bp, Saccharomyces pastorianus
gcaagtgaactgctgtcccatttct

SEQ ID NO: 42428 - DNA, 25 bp, Saccharomyces pastorianus
ttgaatgttcttgggcccgtttaga

SEQ ID NO: 42429 - DNA, 25 bp, Saccharomyces pastorianus
aatgcggaaccacctgtgttccaaa

SEQ ID NO: 42430 - DNA, 25 bp, Saccharomyces pastorianus
aagtgcgcctgtgaatgcgaatgct

SEQ ID NO: 42431 - DNA, 25 bp, Saccharomyces pastorianus
aaagttgcaaatgcggtgccacctg

SEQ ID NO: 42432 - DNA, 25 bp, Saccharomyces pastorianus
atgcgaatgctgcaaagactcttgc

SEQ ID NO: 42433 - DNA, 25 bp, Saccharomyces pastorianus
gtgttccaaactgctctggtggtga

SEQ ID NO: 42434 - DNA, 25 bp, Saccharomyces pastorianus
gactcttgcaaatgcggaaccacct

SEQ ID NO: 42435 - DNA, 25 bp, Saccharomyces pastorianus
aagtacccaatgtaacagttgcggt

SEQ ID NO: 42436 - DNA, 25 bp, Saccharomyces pastorianus
gctgaaaagaagtgcgcctgtgaat

SEQ ID NO: 42437 - DNA, 25 bp, Saccharomyces pastorianus
aagtgcggccacaagtctgaaagta

SEQ ID NO: 42438 - DNA, 25 bp, Saccharomyces pastorianus
gtgaaaagtgtaagtgcggccacaa

SEQ ID NO: 42439 - DNA, 25 bp, Saccharomyces pastorianus
ggccacaagtctgaaagtacccaat

SEQ ID NO: 42440 - DNA, 25 bp, Saccharomyces pastorianus
ggctgggcgttctttgcaggacaca

SEQ ID NO: 42441 - DNA, 25 bp, Saccharomyces pastorianus
ttcggtgcccaagtcggtgaggatt

SEQ ID NO: 42442 - DNA, 25 bp, Saccharomyces pastorianus
gtagacaaggacctgcctgaactca

SEQ ID NO: 42443 - DNA, 25 bp, Saccharomyces pastorianus
ggaggattcgtggtctcaatttgta

SEQ ID NO: 42444 - DNA, 25 bp, Saccharomyces pastorianus
gatacacctgatacggaaaccaaga

SEQ ID NO: 42445 - DNA, 25 bp, Saccharomyces pastorianus
gaggattcgctagaaagccacggaa

SEQ ID NO: 42446 - DNA, 25 bp, Saccharomyces pastorianus
agaaatcgtggacttctcggcccag

SEQ ID NO: 42447 - DNA, 25 bp, Saccharomyces pastorianus
ggagacagcctatatcgatacacct

SEQ ID NO: 42448 - DNA, 25 bp, Saccharomyces pastorianus
gaagatgaggacgtcccaccccaat

SEQ ID NO: 42449 - DNA, 25 bp, Saccharomyces pastorianus
gtgaacgccttttccagggacaaga

SEQ ID NO: 42450 - DNA, 25 bp, Saccharomyces pastorianus
agaggttcaattcgttcggtgccca

SEQ ID NO: 42451 - DNA, 25 bp, Saccharomyces pastorianus
gaagatgatccggacacctgggttc

SEQ ID NO: 42452 - DNA, 25 bp, Saccharomyces pastorianus
aaacttcggccgtgagcaatctatt

SEQ ID NO: 42453 - DNA, 25 bp, Saccharomyces pastorianus
gacacctgggttcaagtcgctgaag

SEQ ID NO: 42454 - DNA, 25 bp, Saccharomyces pastorianus
cagcaagttgctcgacaccatgaat

SEQ ID NO: 42455 - DNA, 25 bp, Saccharomyces pastorianus
agaacatcctgtatacccactacaa

SEQ ID NO: 42456 - DNA, 25 bp, Saccharomyces pastorianus
gaagtatatccatccgttgccaata

SEQ ID NO: 42457 - DNA, 25 bp, Saccharomyces pastorianus
gatcttcttgagcttacagtatgac

SEQ ID NO: 42458 - DNA, 25 bp, Saccharomyces pastorianus
aaagcatacgagaccgccgaagaaa

SEQ ID NO: 42459 - DNA, 25 bp, Saccharomyces pastorianus
gtaaggccaacaaggcatcccatgg

SEQ ID NO: 42460 - DNA, 25 bp, Saccharomyces pastorianus
gtcgctgaagcttacattgatctgg

SEQ ID NO: 42461 - DNA, 25 bp, Saccharomyces pastorianus
aaggccgcccaaaagacagcgttag

SEQ ID NO: 42462 - DNA, 25 bp, Saccharomyces pastorianus
gattaggtgttcttcgatgcttgaa

SEQ ID NO: 42463 - DNA, 25 bp, Saccharomyces pastorianus
agtgtcacaaactgctccagtcgaa

SEQ ID NO: 42464 - DNA, 25 bp, Saccharomyces pastorianus
tgctccagtcgaaacagtacaagat

SEQ ID NO: 42465 - DNA, 25 bp, Saccharomyces pastorianus
gaattttaattccacacctgtgccc

SEQ ID NO: 42466 - DNA, 25 bp, Saccharomyces pastorianus
gagagccgccgggagaactgctaaa

SEQ ID NO: 42467 - DNA, 25 bp, Saccharomyces pastorianus
gaaacgatctccaagctatctcagc

SEQ ID NO: 42468 - DNA, 25 bp, Saccharomyces pastorianus
tagaggatttccctgcagatgcagt

SEQ ID NO: 42469 - DNA, 25 bp, Saccharomyces pastorianus
gtatcttccaaattcacctcaattc

SEQ ID NO: 42470 - DNA, 25 bp, Saccharomyces pastorianus
ctgtgcccacttcatctaagaatgt

SEQ ID NO: 42471 - DNA, 25 bp, Saccharomyces pastorianus
gcagtagatatctcagtgtcacaaa

SEQ ID NO: 42472 - DNA, 25 bp, Saccharomyces pastorianus
tatctcagcagcaattacaagtatt

SEQ ID NO: 42473 - DNA, 25 bp, Saccharomyces pastorianus
gattgggcagtatcacaaaccacaa

SEQ ID NO: 42474 - DNA, 25 bp, Saccharomyces pastorianus
gtccgatttgaatggttactccgat

SEQ ID NO: 42475 - DNA, 25 bp, Saccharomyces pastorianus
ttgcgagccggtacttcggtgatag

SEQ ID NO: 42476 - DNA, 25 bp, Saccharomyces pastorianus
taaggccgaaggtaccactgaatta

SEQ ID NO: 42477 - DNA, 25 bp, Saccharomyces pastorianus
ggaagatcacgtttacaagaccaag

SEQ ID NO: 42478 - DNA, 25 bp, Saccharomyces pastorianus
tacgaattctggtgatttgacgatt

SEQ ID NO: 42479 - DNA, 25 bp, Saccharomyces pastorianus
tcaaaccaaggtacacgatcagcgt

SEQ ID NO: 42480 - DNA, 25 bp, Saccharomyces pastorianus
aaagatcgttgaatcccaagtggaa

SEQ ID NO: 42481 - DNA, 25 bp, Saccharomyces pastorianus
tattgacaccaaacaactgccagaa

SEQ ID NO: 42482 - DNA, 25 bp, Saccharomyces pastorianus
ggatgccacatctgcagacgatact

SEQ ID NO: 42483 - DNA, 25 bp, Saccharomyces pastorianus
gacgattatatccaagagtgccgaa

SEQ ID NO: 42484 - DNA, 25 bp, Saccharomyces pastorianus
actggagatgcttctgtcagagccg

SEQ ID NO: 42485 - DNA, 25 bp, Saccharomyces pastorianus
tagggccttagttggtcaagtcgaa

SEQ ID NO: 42486 - DNA, 25 bp, Saccharomyces pastorianus
gcaagttgatttctctaacactctt

SEQ ID NO: 42487 - DNA, 25 bp, Saccharomyces pastorianus
aggtccctaggattggatgttccaa

SEQ ID NO: 42488 - DNA, 25 bp, Saccharomyces pastorianus
cagagccgtctttgctacggtgaat

SEQ ID NO: 42489 - DNA, 25 bp, Saccharomyces pastorianus
actcaagccgcatcgttcataaacc

SEQ ID NO: 42490 - DNA, 25 bp, Saccharomyces pastorianus
atgatcatgctaccactaacatgtg

SEQ ID NO: 42491 - DNA, 25 bp, Saccharomyces pastorianus
gatctcttccctgatggatgcatta

SEQ ID NO: 42492 - DNA, 25 bp, Saccharomyces pastorianus
ttaaactctgaacgtagggccttag

SEQ ID NO: 42493 - DNA, 25 bp, Saccharomyces pastorianus
ttgaaaactactccgaacactccct

SEQ ID NO: 42494 - DNA, 25 bp, Saccharomyces pastorianus
ctgcctgggttattatgaggtccct

SEQ ID NO: 42495 - DNA, 25 bp, Saccharomyces pastorianus
caaaataccgatgttactatctgtc

SEQ ID NO: 42496 - DNA, 25 bp, Saccharomyces pastorianus
tgaaaggcaattctccctgtggcag

SEQ ID NO: 42497 - DNA, 25 bp, Saccharomyces pastorianus
tccctgtggcaggtacaacatgata

SEQ ID NO: 42498 - DNA, 25 bp, Saccharomyces pastorianus
taacttagccttggtttttgcgcct

SEQ ID NO: 42499 - DNA, 25 bp, Saccharomyces pastorianus
gaaagctatctctagattccagaaa

SEQ ID NO: 42500 - DNA, 25 bp, Saccharomyces pastorianus
aaatcagggtcacagctagtcattg

SEQ ID NO: 42501 - DNA, 25 bp, Saccharomyces pastorianus
atactaccagtgtaagtgccttaaa

SEQ ID NO: 42502 - DNA, 25 bp, Saccharomyces pastorianus
agaaagcttcctaatccgatcttca

SEQ ID NO: 42503 - DNA, 25 bp, Saccharomyces pastorianus
atctgaatgctgtcactggtgtatt

SEQ ID NO: 42504 - DNA, 25 bp, Saccharomyces pastorianus
taccatttacgggaggaaagctatc

SEQ ID NO: 42505 - DNA, 25 bp, Saccharomyces pastorianus
atccgatcttcacgttccaagttta

SEQ ID NO: 42506 - DNA, 25 bp, Saccharomyces pastorianus
aaccatggatgttccctgcgatgag

SEQ ID NO: 42507 - DNA, 25 bp, Saccharomyces pastorianus
gttgcaaggttcatcccacaggagt

SEQ ID NO: 42508 - DNA, 25 bp, Saccharomyces pastorianus
gctccagtggagactttcgttgcaa

SEQ ID NO: 42509 - DNA, 25 bp, Saccharomyces pastorianus
gtactagaaacgtcggtgctccagt

SEQ ID NO: 42510 - DNA, 25 bp, Saccharomyces pastorianus
agatctgctggttgcctgacagtat

SEQ ID NO: 42511 - DNA, 25 bp, Saccharomyces pastorianus
ctgaacctaagtccctctgaaatga

SEQ ID NO: 42512 - DNA, 25 bp, Saccharomyces pastorianus
ggagttttccaagttcgaccatatt

SEQ ID NO: 42513 - DNA, 25 bp, Saccharomyces pastorianus
ggatggtacgttgtgtctgcctcaa

SEQ ID NO: 42514 - DNA, 25 bp, Saccharomyces pastorianus
tattgcctccaagctgaacctaagt

SEQ ID NO: 42515 - DNA, 25 bp, Saccharomyces pastorianus
gaatggccatctagtgctcgagaac

SEQ ID NO: 42516 - DNA, 25 bp, Saccharomyces pastorianus
agcccgatccattacagcatattgc

SEQ ID NO: 42517 - DNA, 25 bp, Saccharomyces pastorianus
tctaggtctaaaggcgaggtttcga

SEQ ID NO: 42518 - DNA, 25 bp, Saccharomyces pastorianus
atatagaccgcatggactgtttcct

SEQ ID NO: 42519 - DNA, 25 bp, Saccharomyces pastorianus
gaaccaagtccatcagaagctttat

SEQ ID NO: 42520 - DNA, 25 bp, Saccharomyces pastorianus
ggactgtttcctatcatcggacaat

SEQ ID NO: 42521 - DNA, 25 bp, Saccharomyces pastorianus
atttttgattccttcaatcctgtga

SEQ ID NO: 42522 - DNA, 25 bp, Saccharomyces pastorianus
gatgatcggcggtaaacactataat

SEQ ID NO: 42523 - DNA, 25 bp, Saccharomyces pastorianus
gggcatatggctatacaagtttcat

SEQ ID NO: 42524 - DNA, 25 bp, Saccharomyces pastorianus
gagggtctctatccaaatgtcaggt

SEQ ID NO: 42525 - DNA, 25 bp, Saccharomyces pastorianus
aattgctgaagcatgctctctttga

SEQ ID NO: 42526 - DNA, 25 bp, Saccharomyces pastorianus
ttaaccgtggatacgtctaggtcta

SEQ ID NO: 42527 - DNA, 25 bp, Saccharomyces pastorianus
tggtttgacattccagtacttcccc

SEQ ID NO: 42528 - DNA, 25 bp, Saccharomyces pastorianus
aaagatgctgataacgagacctcga

SEQ ID NO: 42529 - DNA, 25 bp, Saccharomyces pastorianus
gggaatggaacctctcacacccaga

SEQ ID NO: 42530 - DNA, 25 bp, Saccharomyces pastorianus
tatcgccttattcctatttcactag

SEQ ID NO: 42531 - DNA, 25 bp, Saccharomyces pastorianus
gatacatatcatcaacaccgccaaa

SEQ ID NO: 42532 - DNA, 25 bp, Saccharomyces pastorianus
ggacttggcatctaagctgcacggg

SEQ ID NO: 42533 - DNA, 25 bp, Saccharomyces pastorianus
ataaacaaatgctcgccttctgcgg

SEQ ID NO: 42534 - DNA, 25 bp, Saccharomyces pastorianus
cattgaacactttgcgtgcgcagtt

SEQ ID NO: 42535 - DNA, 25 bp, Saccharomyces pastorianus
taaactcttccagggccgctaaaat

SEQ ID NO: 42536 - DNA, 25 bp, Saccharomyces pastorianus
gagacctcgaagcaaatcgcgtcat

SEQ ID NO: 42537 - DNA, 25 bp, Saccharomyces pastorianus
atacattctctcgatggcagcacta

SEQ ID NO: 42538 - DNA, 25 bp, Saccharomyces pastorianus
agattctacgctagcatatttgcaa

SEQ ID NO: 42539 - DNA, 25 bp, Saccharomyces pastorianus
ctgacggattaggaattggtgcaaa

SEQ ID NO: 42540 - DNA, 25 bp, Saccharomyces pastorianus
aagatttatttatgcctgtcgtgaa

SEQ ID NO: 42541 - DNA, 25 bp, Saccharomyces pastorianus
actagaggaaactgccaatgatcaa

SEQ ID NO: 42542 - DNA, 25 bp, Saccharomyces pastorianus
gttttgcaaacacaccctgacggat

SEQ ID NO: 42543 - DNA, 25 bp, Saccharomyces pastorianus
ggactgctctccaaaaagaaactag

SEQ ID NO: 42544 - DNA, 25 bp, Saccharomyces pastorianus
gaaaatcgacaaagtgacgggcatt

SEQ ID NO: 42545 - DNA, 25 bp, Saccharomyces pastorianus
cgaaagcattgacaagtttgacctt

SEQ ID NO: 42546 - DNA, 25 bp, Saccharomyces pastorianus
taacaaatcttccacgcaagtctca

SEQ ID NO: 42547 - DNA, 25 bp, Saccharomyces pastorianus
ttgaccttgatggaggactgctctc

SEQ ID NO: 42548 - DNA, 25 bp, Saccharomyces pastorianus
ggtacctattgaagagtttggagat

SEQ ID NO: 42549 - DNA, 25 bp, Saccharomyces pastorianus
tttggagatgcattgcttcgaggca

SEQ ID NO: 42550 - DNA, 25 bp, Saccharomyces pastorianus
accactagtcccattgttcataaca

SEQ ID NO: 42551 - DNA, 25 bp, Saccharomyces pastorianus
gagattactccagatttcatagcga

SEQ ID NO: 42552 - DNA, 25 bp, Saccharomyces pastorianus
catagcgaaccgatgggtgtccata

SEQ ID NO: 42553 - DNA, 25 bp, Saccharomyces pastorianus
gattcttaataccactagtcccatt

SEQ ID NO: 42554 - DNA, 25 bp, Saccharomyces pastorianus
ggaagacatattcaccgccaacatg

SEQ ID NO: 42555 - DNA, 25 bp, Saccharomyces pastorianus
gggatccagaatccactgactttag

SEQ ID NO: 42556 - DNA, 25 bp, Saccharomyces pastorianus
ctgtctcttccgttgttaatttaca

SEQ ID NO: 42557 - DNA, 25 bp, Saccharomyces pastorianus
aaacgtcattacctgtctcatttag

SEQ ID NO: 42558 - DNA, 25 bp, Saccharomyces pastorianus
agctggacacgctcgagttcgaaat

SEQ ID NO: 42559 - DNA, 25 bp, Saccharomyces pastorianus
atggataactcgctaactgtctctt

SEQ ID NO: 42560 - DNA, 25 bp, Saccharomyces pastorianus
ggctgtgaccttcaacttttaaaag

SEQ ID NO: 42561 - DNA, 25 bp, Saccharomyces pastorianus
aaactgccagaaaatgcgtgtcaca

SEQ ID NO: 42562 - DNA, 25 bp, Saccharomyces pastorianus
ttgcacgcctttggcatcacgtgga

SEQ ID NO: 42563 - DNA, 25 bp, Saccharomyces pastorianus
tagtgggttggcatttgcacgcctt

SEQ ID NO: 42564 - DNA, 25 bp, Saccharomyces pastorianus
atcacgtggatgttgcccgcgataa

SEQ ID NO: 42565 - DNA, 25 bp, Saccharomyces pastorianus
acagaagacgtactggtcccattca

SEQ ID NO: 42566 - DNA, 25 bp, Saccharomyces pastorianus
taagccggtttatcatccatcgcaa

SEQ ID NO: 42567 - DNA, 25 bp, Saccharomyces pastorianus
gaatattaccgcctttgctcatgaa

SEQ ID NO: 42568 - DNA, 25 bp, Saccharomyces pastorianus
tgctcatgaacaaccatcgttgccg

SEQ ID NO: 42569 - DNA, 25 bp, Saccharomyces pastorianus
acgttgggtagattggcctcagcta

SEQ ID NO: 42570 - DNA, 25 bp, Saccharomyces pastorianus
tcaggtagacctggccagcttaaac

SEQ ID NO: 42571 - DNA, 25 bp, Saccharomyces pastorianus
gctattgcaatcaccttgatcggta

SEQ ID NO: 42572 - DNA, 25 bp, Saccharomyces pastorianus
atttcagggcggatcgattccaaat

SEQ ID NO: 42573 - DNA, 25 bp, Saccharomyces pastorianus
ctattaaacctgtatcatgtcgcta

SEQ ID NO: 42574 - DNA, 25 bp, Saccharomyces pastorianus
gatcaccagaagagacccagttgtt

SEQ ID NO: 42575 - DNA, 25 bp, Saccharomyces pastorianus
aatcctccgatttgactataatgac

SEQ ID NO: 42576 - DNA, 25 bp, Saccharomyces pastorianus
ttatcgatgctttccgcaaggagga

SEQ ID NO: 42577 - DNA, 25 bp, Saccharomyces pastorianus
ggagttttccgatgcttacgatgta

SEQ ID NO: 42578 - DNA, 25 bp, Saccharomyces pastorianus
acgcaattatgggttctttgactaa

SEQ ID NO: 42579 - DNA, 25 bp, Saccharomyces pastorianus
gtggattcattcctgaacaacgact

SEQ ID NO: 42580 - DNA, 25 bp, Saccharomyces pastorianus
gtaattccactttccaaaccaagat

SEQ ID NO: 42581 - DNA, 25 bp, Saccharomyces pastorianus
aatgatgtctgaacctcttttgaga

SEQ ID NO: 42582 - DNA, 25 bp, Saccharomyces pastorianus
aaatcgctgctttcgggtaattcca

SEQ ID NO: 42583 - DNA, 25 bp, Saccharomyces pastorianus
gaaacatcatgtgccgttcttgtac

SEQ ID NO: 42584 - DNA, 25 bp, Saccharomyces pastorianus
gttcttgtacattcgttgccattat

SEQ ID NO: 42585 - DNA, 25 bp, Saccharomyces pastorianus
taacgaggctgggttggctcaaatt

SEQ ID NO: 42586 - DNA, 25 bp, Saccharomyces pastorianus
tgctcctttctttatcacaacttaa

SEQ ID NO: 42587 - DNA, 25 bp, Saccharomyces pastorianus
aataacactgtcaacggcgggagca

SEQ ID NO: 42588 - DNA, 25 bp, Saccharomyces pastorianus
atactcccatcgatcctagtttaaa

SEQ ID NO: 42589 - DNA, 25 bp, Saccharomyces pastorianus
aatatactctctgcgtttcagacct

SEQ ID NO: 42590 - DNA, 25 bp, Saccharomyces pastorianus
agggcatcctctgtattttgctcct

SEQ ID NO: 42591 - DNA, 25 bp, Saccharomyces pastorianus
gaaagcatttgcaggaccgttttga

SEQ ID NO: 42592 - DNA, 25 bp, Saccharomyces pastorianus
aaagggacactatctatcctccgat

SEQ ID NO: 42593 - DNA, 25 bp, Saccharomyces pastorianus
ttttgggcggcttacaatactggtt

SEQ ID NO: 42594 - DNA, 25 bp, Saccharomyces pastorianus
gtattttcgcctattgaactagcaa

SEQ ID NO: 42595 - DNA, 25 bp, Saccharomyces pastorianus
cgagatacgatggaacttgggccaa

SEQ ID NO: 42596 - DNA, 25 bp, Saccharomyces pastorianus
agccttacaattactgggatgattt

SEQ ID NO: 42597 - DNA, 25 bp, Saccharomyces pastorianus
gaaaccagcttatgactacctaaga

SEQ ID NO: 42598 - DNA, 25 bp, Saccharomyces pastorianus
aatttgtcgaggctcaattggatgc

SEQ ID NO: 42599 - DNA, 25 bp, Saccharomyces pastorianus
gaattctcggcagctttgacagact

SEQ ID NO: 42600 - DNA, 25 bp, Saccharomyces pastorianus
gagaagtcctatcacatcggttcgt

SEQ ID NO: 42601 - DNA, 25 bp, Saccharomyces pastorianus
gaagaacctctttttgaaaccagct

SEQ ID NO: 42602 - DNA, 25 bp, Saccharomyces pastorianus
atacatgacgcttttcagccttaca

SEQ ID NO: 42603 - DNA, 25 bp, Saccharomyces pastorianus
actgtacaaagtggctgaacggcgt

SEQ ID NO: 42604 - DNA, 25 bp, Saccharomyces pastorianus
ttggtctgtagcaggcgaattctcg

SEQ ID NO: 42605 - DNA, 25 bp, Saccharomyces pastorianus
gatgcatccaaaagcattcttcaat

SEQ ID NO: 42606 - DNA, 25 bp, Saccharomyces pastorianus
actttcagtaagttccggtatcact

SEQ ID NO: 42607 - DNA, 25 bp, Saccharomyces pastorianus
tagtgttagcaaacctacgctcttt

SEQ ID NO: 42608 - DNA, 25 bp, Saccharomyces pastorianus
ggcaggcctaacttatgaaatactt

SEQ ID NO: 42609 - DNA, 25 bp, Saccharomyces pastorianus
gaagtcctaaacatactcgatgcat

SEQ ID NO: 42610 - DNA, 25 bp, Saccharomyces pastorianus
gttccggtatcactgatttcatcag

SEQ ID NO: 42611 - DNA, 25 bp, Saccharomyces pastorianus
ttcatcaggctatggaatcaggcta

SEQ ID NO: 42612 - DNA, 25 bp, Saccharomyces pastorianus
tacgctctttattaaacggcaacac

SEQ ID NO: 42613 - DNA, 25 bp, Saccharomyces pastorianus
gatttatcaagacatttcgcgaatt

SEQ ID NO: 42614 - DNA, 25 bp, Saccharomyces pastorianus
gactgatgagctaatattgttcgaa

SEQ ID NO: 42615 - DNA, 25 bp, Saccharomyces pastorianus
aagggttcaagtttcgtgatgttat

SEQ ID NO: 42616 - DNA, 25 bp, Saccharomyces pastorianus
gcggacttgatgtctatgcacacaa

SEQ ID NO: 42617 - DNA, 25 bp, Saccharomyces pastorianus
tgcgcttctggacccttagtgaggt

SEQ ID NO: 42618 - DNA, 25 bp, Saccharomyces pastorianus
tcatttagccgaaaccgtccgtaga

SEQ ID NO: 42619 - DNA, 25 bp, Saccharomyces pastorianus
ggtggtgccaatcatttagccgaaa

SEQ ID NO: 42620 - DNA, 25 bp, Saccharomyces pastorianus
gttcccacactgcttactaaaactt

SEQ ID NO: 42621 - DNA, 25 bp, Saccharomyces pastorianus
cctggtagaaactctttccggtgat

SEQ ID NO: 42622 - DNA, 25 bp, Saccharomyces pastorianus
gacgacttgattgatggtggtgcca

SEQ ID NO: 42623 - DNA, 25 bp, Saccharomyces pastorianus
gaaggctccaaagaccctggtagaa

SEQ ID NO: 42624 - DNA, 25 bp, Saccharomyces pastorianus
gtgacgtagttacttttggccaata

SEQ ID NO: 42625 - DNA, 25 bp, Saccharomyces pastorianus
gagacctgcgtgacattggatgtga

SEQ ID NO: 42626 - DNA, 25 bp, Saccharomyces pastorianus
atgggattcttgtactgcgcttctg

SEQ ID NO: 42627 - DNA, 25 bp, Saccharomyces pastorianus
aatctcttattctcatgcagccaaa

SEQ ID NO: 42628 - DNA, 25 bp, Saccharomyces pastorianus
atgggagatccagctactgtgagaa

SEQ ID NO: 42629 - DNA, 25 bp, Saccharomyces pastorianus
gatacttttggcacagatgatttct

SEQ ID NO: 42630 - DNA, 25 bp, Saccharomyces pastorianus
gaagtcaacggtaatcgtgctatta

SEQ ID NO: 42631 - DNA, 25 bp, Saccharomyces pastorianus
tgggatgctagctacatttggtatt

SEQ ID NO: 42632 - DNA, 25 bp, Saccharomyces pastorianus
aaggcattctatccaccatattcag

SEQ ID NO: 42633 - DNA, 25 bp, Saccharomyces pastorianus
attcagatgcctacgttggtgttag

SEQ ID NO: 42634 - DNA, 25 bp, Saccharomyces pastorianus
gggttgcctccattagtgaagatta

SEQ ID NO: 42635 - DNA, 25 bp, Saccharomyces pastorianus
aaagattgcccatcattaccacgac

SEQ ID NO: 42636 - DNA, 25 bp, Saccharomyces pastorianus
aattgtttgcttttccgattcatta

SEQ ID NO: 42637 - DNA, 25 bp, Saccharomyces pastorianus
gatgcgcaggtcaaaagtgagccat

SEQ ID NO: 42638 - DNA, 25 bp, Saccharomyces pastorianus
tggtgttagcggacatgccagataa

SEQ ID NO: 42639 - DNA, 25 bp, Saccharomyces pastorianus
gacaagtattgctatgcccacgggc

SEQ ID NO: 42640 - DNA, 25 bp, Saccharomyces pastorianus
gatgccatcgatcagggtgttatcc

SEQ ID NO: 42641 - DNA, 25 bp, Saccharomyces pastorianus
taaatctcgcgttttacattcgcag

SEQ ID NO: 42642 - DNA, 25 bp, Saccharomyces pastorianus
aattcctccccatttttgatgccat

SEQ ID NO: 42643 - DNA, 25 bp, Saccharomyces pastorianus
aaaactcactaccatcagcactgat

SEQ ID NO: 42644 - DNA, 25 bp, Saccharomyces pastorianus
aaatccaacaactaccgtgaccttg

SEQ ID NO: 42645 - DNA, 25 bp, Saccharomyces pastorianus
gtgttggaatattgccgactacggc

SEQ ID NO: 42646 - DNA, 25 bp, Saccharomyces pastorianus
cttggtcagcacaatcccgaattta

SEQ ID NO: 42647 - DNA, 25 bp, Saccharomyces pastorianus
gagtttagtccctatttggtgttag

SEQ ID NO: 42648 - DNA, 25 bp, Saccharomyces pastorianus
gattttctcctggaagatccactgg

SEQ ID NO: 42649 - DNA, 25 bp, Saccharomyces pastorianus
gttatatccttactccggtactgat

SEQ ID NO: 42650 - DNA, 25 bp, Saccharomyces pastorianus
attctgccgctatctcggtatcaaa

SEQ ID NO: 42651 - DNA, 25 bp, Saccharomyces pastorianus
gttagtgctctaacactccatgttt

SEQ ID NO: 42652 - DNA, 25 bp, Saccharomyces pastorianus
aaagcagctgctatctcgcaagaat

SEQ ID NO: 42653 - DNA, 25 bp, Saccharomyces pastorianus
aatggattccatgttctctttccac

SEQ ID NO: 42654 - DNA, 25 bp, Saccharomyces pastorianus
ctagctgggttcatttccgtgataa

SEQ ID NO: 42655 - DNA, 25 bp, Saccharomyces pastorianus
attccattggccgttcttattgagt

SEQ ID NO: 42656 - DNA, 25 bp, Saccharomyces pastorianus
atcaacctactgtcgctagctgggt

SEQ ID NO: 42657 - DNA, 25 bp, Saccharomyces pastorianus
agaatttccgaatatcaccgcaagt

SEQ ID NO: 42658 - DNA, 25 bp, Saccharomyces pastorianus
taatttcgcctccataaagcagctg

SEQ ID NO: 42659 - DNA, 25 bp, Saccharomyces pastorianus
gctggtgtcttactccgtattgtaa

SEQ ID NO: 42660 - DNA, 25 bp, Saccharomyces pastorianus
gaactgcgccttttgctacaagata

SEQ ID NO: 42661 - DNA, 25 bp, Saccharomyces pastorianus
tgcgccatatactcattcggatcta

SEQ ID NO: 42662 - DNA, 25 bp, Saccharomyces pastorianus
gatcactatcattggttttgcgttc

SEQ ID NO: 42663 - DNA, 25 bp, Saccharomyces pastorianus
ggttaccaacagatttcctcagaag

SEQ ID NO: 42664 - DNA, 25 bp, Saccharomyces pastorianus
tcaatccctggtttcgatgacgaac

SEQ ID NO: 42665 - DNA, 25 bp, Saccharomyces pastorianus
agttctcactagactcgcttgataa

SEQ ID NO: 42666 - DNA, 25 bp, Saccharomyces pastorianus
gaaaggtttgttaactgccatgcaa

SEQ ID NO: 42667 - DNA, 25 bp, Saccharomyces pastorianus
ggcgatctggtcaaactggagcatt

SEQ ID NO: 42668 - DNA, 25 bp, Saccharomyces pastorianus
gaaatcgcgtaatccgttcaacagg

SEQ ID NO: 42669 - DNA, 25 bp, Saccharomyces pastorianus
gcaatggctatcgactatccacgat

SEQ ID NO: 42670 - DNA, 25 bp, Saccharomyces pastorianus
tggagcattctaacgcactgaactt

SEQ ID NO: 42671 - DNA, 25 bp, Saccharomyces pastorianus
agcagcaactgcatcgacccatgaa

SEQ ID NO: 42672 - DNA, 25 bp, Saccharomyces pastorianus
gactgtgtcatactctgacgagact

SEQ ID NO: 42673 - DNA, 25 bp, Saccharomyces pastorianus
actcaaacagcacggtttcagccac

SEQ ID NO: 42674 - DNA, 25 bp, Saccharomyces pastorianus
aatacgtaactgtcaccggtgcttt

SEQ ID NO: 42675 - DNA, 25 bp, Saccharomyces pastorianus
gaggcccacgaaacgactgtgtcat

SEQ ID NO: 42676 - DNA, 25 bp, Saccharomyces pastorianus
aagctactccttggaggcccacgaa

SEQ ID NO: 42677 - DNA, 25 bp, Saccharomyces pastorianus
ggcagcaactgcatcgactcaggaa

SEQ ID NO: 42678 - DNA, 25 bp, Saccharomyces pastorianus
ttctccgcttctggatcagcagcaa

SEQ ID NO: 42679 - DNA, 25 bp, Saccharomyces pastorianus
acgcactggttcaccttaaacacgg

SEQ ID NO: 42680 - DNA, 25 bp, Saccharomyces pastorianus
gttgataactctgcatgacaccacc

SEQ ID NO: 42681 - DNA, 25 bp, Saccharomyces pastorianus
aaccattacttccactttgttgata

SEQ ID NO: 42682 - DNA, 25 bp, Saccharomyces pastorianus
agcaaggttcccaaagggctgtcag

SEQ ID NO: 42683 - DNA, 25 bp, Saccharomyces pastorianus
gaaagccacagcaaagcatgcggat

SEQ ID NO: 42684 - DNA, 25 bp, Saccharomyces pastorianus
atcgcagcgccgtaacaacgctgta

SEQ ID NO: 42685 - DNA, 25 bp, Saccharomyces pastorianus
gagtcaaagactaccactccttaca

SEQ ID NO: 42686 - DNA, 25 bp, Saccharomyces pastorianus
gattcggtgatgaccattcactaag

SEQ ID NO: 42687 - DNA, 25 bp, Saccharomyces pastorianus
actaattgtccacgatgtccttgaa

SEQ ID NO: 42688 - DNA, 25 bp, Saccharomyces pastorianus
agcactctcagaagattccatcgca

SEQ ID NO: 42689 - DNA, 25 bp, Saccharomyces pastorianus
gaagactcttcctcattgtatatca

SEQ ID NO: 42690 - DNA, 25 bp, Saccharomyces pastorianus
ggaggaaagcccaagttgctggaaa

SEQ ID NO: 42691 - DNA, 25 bp, Saccharomyces pastorianus
atgagagccatcaacactgtgcaga

SEQ ID NO: 42692 - DNA, 25 bp, Saccharomyces pastorianus
gggctgtcaggaatcaccaagggta

SEQ ID NO: 42693 - DNA, 25 bp, Saccharomyces pastorianus
agagactctcttttcatcagcaaca

SEQ ID NO: 42694 - DNA, 25 bp, Saccharomyces pastorianus
gttgccctcaacgatatcggtggaa

SEQ ID NO: 42695 - DNA, 25 bp, Saccharomyces pastorianus
aagcatagcatggaacacccgcaaa

SEQ ID NO: 42696 - DNA, 25 bp, Saccharomyces pastorianus
aaagagtgactctcgattctcccaa

SEQ ID NO: 42697 - DNA, 25 bp, Saccharomyces pastorianus
attatactgccgctgaaacgttgcc

SEQ ID NO: 42698 - DNA, 25 bp, Saccharomyces pastorianus
gatatgattttacgcgctttacaag

SEQ ID NO: 42699 - DNA, 25 bp, Saccharomyces pastorianus
gcggcagcacctattctgaacattg

SEQ ID NO: 42700 - DNA, 25 bp, Saccharomyces pastorianus
gcagattgcgtgtccgtatgataca

SEQ ID NO: 42701 - DNA, 25 bp, Saccharomyces pastorianus
gaacgacatgatttctagcccggaa

SEQ ID NO: 42702 - DNA, 25 bp, Saccharomyces pastorianus
tcttctagaccgacttccaatgaga

SEQ ID NO: 42703 - DNA, 25 bp, Saccharomyces pastorianus
gagatcatccatagcgtcagagagt

SEQ ID NO: 42704 - DNA, 25 bp, Saccharomyces pastorianus
tctcatggtgaggaattcggcgata

SEQ ID NO: 42705 - DNA, 25 bp, Saccharomyces pastorianus
ctatttacgtctatgggctttgtca

SEQ ID NO: 42706 - DNA, 25 bp, Saccharomyces pastorianus
tttcgccatgtggtttgcactaact

SEQ ID NO: 42707 - DNA, 25 bp, Saccharomyces pastorianus
ttatgacagtcgcacttttcgccat

SEQ ID NO: 42708 - DNA, 25 bp, Saccharomyces pastorianus
tttgcactaacttgcgcggttctag

SEQ ID NO: 42709 - DNA, 25 bp, Saccharomyces pastorianus
gcatgagccattagcatcaaccgat

SEQ ID NO: 42710 - DNA, 25 bp, Saccharomyces pastorianus
aaccgatgcaggtgctagttcagaa

SEQ ID NO: 42711 - DNA, 25 bp, Saccharomyces pastorianus
ttaccacaatggacgctgatgatgc

SEQ ID NO: 42712 - DNA, 25 bp, Saccharomyces pastorianus
acacacagcatcctatttacgtcta

SEQ ID NO: 42713 - DNA, 25 bp, Saccharomyces pastorianus
gctaatggccttgatttgtattcct

SEQ ID NO: 42714 - DNA, 25 bp, Saccharomyces pastorianus
ggctttgtcattagcacatgcgcaa

SEQ ID NO: 42715 - DNA, 25 bp, Saccharomyces pastorianus
gaacatctcttccaatagacctgct

SEQ ID NO: 42716 - DNA, 25 bp, Saccharomyces pastorianus
caccgattctgatggctggtgcaca

SEQ ID NO: 42717 - DNA, 25 bp, Saccharomyces pastorianus
agaaggtgagactactccaaccgcc

SEQ ID NO: 42718 - DNA, 25 bp, Saccharomyces pastorianus
agtatactattgacgaactattcca

SEQ ID NO: 42719 - DNA, 25 bp, Saccharomyces pastorianus
gccaacgtaccagctgtcactattg

SEQ ID NO: 42720 - DNA, 25 bp, Saccharomyces pastorianus
aagcctaaggtgaccaccgattctg

SEQ ID NO: 42721 - DNA, 25 bp, Saccharomyces pastorianus
gaagagtttggcactcaccatgctg

SEQ ID NO: 42722 - DNA, 25 bp, Saccharomyces pastorianus
agccaagtgttgctttagaggttaa

SEQ ID NO: 42723 - DNA, 25 bp, Saccharomyces pastorianus
gaactattccaattgaagccaagtg

SEQ ID NO: 42724 - DNA, 25 bp, Saccharomyces pastorianus
atgctggccacttcagccgtagaag

SEQ ID NO: 42725 - DNA, 25 bp, Saccharomyces pastorianus
gctgtcactattgctcaagagactt

SEQ ID NO: 42726 - DNA, 25 bp, Saccharomyces pastorianus
atagcttccgacgtagttagcccaa

SEQ ID NO: 42727 - DNA, 25 bp, Saccharomyces pastorianus
ggtttatactgtgggcccggctact

SEQ ID NO: 42728 - DNA, 25 bp, Saccharomyces pastorianus
atacgaattgcatccatcggaccca

SEQ ID NO: 42729 - DNA, 25 bp, Saccharomyces pastorianus
gcccggctactgctgatttcattaa

SEQ ID NO: 42730 - DNA, 25 bp, Saccharomyces pastorianus
ttgtcttcagtcctcagggtactaa

SEQ ID NO: 42731 - DNA, 25 bp, Saccharomyces pastorianus
gatcatccctactttaacaagccaa

SEQ ID NO: 42732 - DNA, 25 bp, Saccharomyces pastorianus
taactacagataccgtggctcagcc

SEQ ID NO: 42733 - DNA, 25 bp, Saccharomyces pastorianus
gtaacggttctgttctcgcagatat

SEQ ID NO: 42734 - DNA, 25 bp, Saccharomyces pastorianus
gtggctcagccacctaatgaactat

SEQ ID NO: 42735 - DNA, 25 bp, Saccharomyces pastorianus
aggaccgtagaatccctcaatgaat

SEQ ID NO: 42736 - DNA, 25 bp, Saccharomyces pastorianus
tgaactgggtggttgtcttcagtcc

SEQ ID NO: 42737 - DNA, 25 bp, Saccharomyces pastorianus
gagtgacctatttacttttgactgg

SEQ ID NO: 42738 - DNA, 25 bp, Saccharomyces pastorianus
aatgaaagtaccagagcctctacgg

SEQ ID NO: 42739 - DNA, 25 bp, Saccharomyces pastorianus
gagtgcatacgcttctaactttaat

SEQ ID NO: 42740 - DNA, 25 bp, Saccharomyces pastorianus
gagcctctacggtaccaaatattcc

SEQ ID NO: 42741 - DNA, 25 bp, Saccharomyces pastorianus
aatattccattagcgattgtaccga

SEQ ID NO: 42742 - DNA, 25 bp, Saccharomyces pastorianus
gagggtacgaacaaccagacgcaaa

SEQ ID NO: 42743 - DNA, 25 bp, Saccharomyces pastorianus
gaagatactcctctatctcaaaatg

SEQ ID NO: 42744 - DNA, 25 bp, Saccharomyces pastorianus
tatgggctgcgtgctgataaactat

SEQ ID NO: 42745 - DNA, 25 bp, Saccharomyces pastorianus
atttacataacgtcgaacttggcga

SEQ ID NO: 42746 - DNA, 25 bp, Saccharomyces pastorianus
caaacatccgttgcatgagctagta

SEQ ID NO: 42747 - DNA, 25 bp, Saccharomyces pastorianus
gaagtagaaccaccgcaactagaga

SEQ ID NO: 42748 - DNA, 25 bp, Saccharomyces pastorianus
ataatattttcatctgcgcttccct

SEQ ID NO: 42749 - DNA, 25 bp, Saccharomyces pastorianus
atatcacaccggaccagtttactgg

SEQ ID NO: 42750 - DNA, 25 bp, Saccharomyces pastorianus
gacccacttgtctcattgttaatca

SEQ ID NO: 42751 - DNA, 25 bp, Saccharomyces pastorianus
tgatctccgcacttttcatttggaa

SEQ ID NO: 42752 - DNA, 25 bp, Saccharomyces pastorianus
acactatccaactgtcttatcgacg

SEQ ID NO: 42753 - DNA, 25 bp, Saccharomyces pastorianus
aagcttcatcactatggcgtgcact

SEQ ID NO: 42754 - DNA, 25 bp, Saccharomyces pastorianus
aaaattctgctgcaagccatgcctt

SEQ ID NO: 42755 - DNA, 25 bp, Saccharomyces pastorianus
gacagagtccatttacatcgcatct

SEQ ID NO: 42756 - DNA, 25 bp, Saccharomyces pastorianus
aatcattgctatccatgacttccac

SEQ ID NO: 42757 - DNA, 25 bp, Saccharomyces pastorianus
gaaccacgcatacagggtctgctgg

SEQ ID NO: 42758 - DNA, 25 bp, Saccharomyces pastorianus
aaagaactcacctcggctgcaagaa

SEQ ID NO: 42759 - DNA, 25 bp, Saccharomyces pastorianus
agagcgtgggccagctacaagagct

SEQ ID NO: 42760 - DNA, 25 bp, Saccharomyces pastorianus
gagaattgaccactctactggacga

SEQ ID NO: 42761 - DNA, 25 bp, Saccharomyces pastorianus
gactctagcccaaactcaatttcta

SEQ ID NO: 42762 - DNA, 25 bp, Saccharomyces pastorianus
tgcagtgactttggactctagccca

SEQ ID NO: 42763 - DNA, 25 bp, Saccharomyces pastorianus
gatgggtggcttcatcatttatctc

SEQ ID NO: 42764 - DNA, 25 bp, Saccharomyces pastorianus
tttccacgctcctagtaaaaattga

SEQ ID NO: 42765 - DNA, 25 bp, Saccharomyces pastorianus
gaaatgaccactttacgaaccacag

SEQ ID NO: 42766 - DNA, 25 bp, Saccharomyces pastorianus
gaacctggacgacaacatcgatgag

SEQ ID NO: 42767 - DNA, 25 bp, Saccharomyces pastorianus
attatcaaaaccacatttccacgct

SEQ ID NO: 42768 - DNA, 25 bp, Saccharomyces pastorianus
gcattggtcttgatgggtggcttca

SEQ ID NO: 42769 - DNA, 25 bp, Saccharomyces pastorianus
gcatgagttactctgcagtgacttt

SEQ ID NO: 42770 - DNA, 25 bp, Saccharomyces pastorianus
agtcaggatccgctcaagcaacatt

SEQ ID NO: 42771 - DNA, 25 bp, Saccharomyces pastorianus
catcgaggctatatgctgcttttga

SEQ ID NO: 42772 - DNA, 25 bp, Saccharomyces pastorianus
atccggcagagttggtgctggcaca

SEQ ID NO: 42773 - DNA, 25 bp, Saccharomyces pastorianus
gatcagtgacccctatacgtcaaat

SEQ ID NO: 42774 - DNA, 25 bp, Saccharomyces pastorianus
aagtagccctattcgtgaggttcct

SEQ ID NO: 42775 - DNA, 25 bp, Saccharomyces pastorianus
aggttacctgattactctcctaatt

SEQ ID NO: 42776 - DNA, 25 bp, Saccharomyces pastorianus
aaggttctccaatggatctgagtca

SEQ ID NO: 42777 - DNA, 25 bp, Saccharomyces pastorianus
aagcaacatttgcatccggcagagt

SEQ ID NO: 42778 - DNA, 25 bp, Saccharomyces pastorianus
cagtgttcccaagtatgttccgagt

SEQ ID NO: 42779 - DNA, 25 bp, Saccharomyces pastorianus
cccattggcatctcaaggcgtgatt

SEQ ID NO: 42780 - DNA, 25 bp, Saccharomyces pastorianus
gtgaggttcctgtcagatcagtgac

SEQ ID NO: 42781 - DNA, 25 bp, Saccharomyces pastorianus
tgatttgacatactggaccggatat

SEQ ID NO: 42782 - DNA, 25 bp, Saccharomyces pastorianus
tcaagttcgtaagtccaatgtggca

SEQ ID NO: 42783 - DNA, 25 bp, Saccharomyces pastorianus
gcgcgttccctgaagatgacaatga

SEQ ID NO: 42784 - DNA, 25 bp, Saccharomyces pastorianus
atctccattaaatgcggtggccgca

SEQ ID NO: 42785 - DNA, 25 bp, Saccharomyces pastorianus
caaggaacaccatacagcgatctca

SEQ ID NO: 42786 - DNA, 25 bp, Saccharomyces pastorianus
tacacgaagtatcagcgcgttccct

SEQ ID NO: 42787 - DNA, 25 bp, Saccharomyces pastorianus
gggcgcttgcgtaacgaaacgtcta

SEQ ID NO: 42788 - DNA, 25 bp, Saccharomyces pastorianus
gttgctacaactactatgttctact

SEQ ID NO: 42789 - DNA, 25 bp, Saccharomyces pastorianus
tccacccaccaaaagtcaagttcgt

SEQ ID NO: 42790 - DNA, 25 bp, Saccharomyces pastorianus
tatgagtggcaatatctgtctagat

SEQ ID NO: 42791 - DNA, 25 bp, Saccharomyces pastorianus
gaaatggtccgcagtttataacgtg

SEQ ID NO: 42792 - DNA, 25 bp, Saccharomyces pastorianus
aaagccttgcaaacgctattctgat

SEQ ID NO: 42793 - DNA, 25 bp, Saccharomyces pastorianus
tatggagactgccaaaccagattgt

SEQ ID NO: 42794 - DNA, 25 bp, Saccharomyces pastorianus
gggagcaagagacatttttcgatat

SEQ ID NO: 42795 - DNA, 25 bp, Saccharomyces pastorianus
gcgatttctggatggctttctaatt

SEQ ID NO: 42796 - DNA, 25 bp, Saccharomyces pastorianus
ttatctctttcacgctatgtctcga

SEQ ID NO: 42797 - DNA, 25 bp, Saccharomyces pastorianus
cacaaattcctttacttcgacaagt

SEQ ID NO: 42798 - DNA, 25 bp, Saccharomyces pastorianus
ctgctgacactgttcaaccgattga

SEQ ID NO: 42799 - DNA, 25 bp, Saccharomyces pastorianus
ttccaccaagatttctctgctgaca

SEQ ID NO: 42800 - DNA, 25 bp, Saccharomyces pastorianus
gaggtaagaccgcaacattcattta

SEQ ID NO: 42801 - DNA, 25 bp, Saccharomyces pastorianus
aatttgttgtctatacacagtcaca

SEQ ID NO: 42802 - DNA, 25 bp, Saccharomyces pastorianus
ttagcatacatgattttctttcgat

SEQ ID NO: 42803 - DNA, 25 bp, Saccharomyces pastorianus
gcacatgttcccaattcggactatt

SEQ ID NO: 42804 - DNA, 25 bp, Saccharomyces pastorianus
tttggtattccatcgcacatgttcc

SEQ ID NO: 42805 - DNA, 25 bp, Saccharomyces pastorianus
aaaagagacactgcccttgtgcccg

SEQ ID NO: 42806 - DNA, 25 bp, Saccharomyces pastorianus
atcgatgtcccaacaatccaagttt

SEQ ID NO: 42807 - DNA, 25 bp, Saccharomyces pastorianus
atctcaacttattcacggctaccat

SEQ ID NO: 42808 - DNA, 25 bp, Saccharomyces pastorianus
gaaacggcagcggtggcttcaaaaa

SEQ ID NO: 42809 - DNA, 25 bp, Saccharomyces pastorianus
atgctagtcttactcccttattgaa

SEQ ID NO: 42810 - DNA, 25 bp, Saccharomyces pastorianus
ttatatcctatgttgatgaccagct

SEQ ID NO: 42811 - DNA, 25 bp, Saccharomyces pastorianus
ccagttatttcggacagggatctta

SEQ ID NO: 42812 - DNA, 25 bp, Saccharomyces pastorianus
aagcaccacatctgaacattccagt

SEQ ID NO: 42813 - DNA, 25 bp, Saccharomyces pastorianus
atgaccagcttttacaaatccagag

SEQ ID NO: 42814 - DNA, 25 bp, Saccharomyces pastorianus
ggcatatacaacgacttcacagcat

SEQ ID NO: 42815 - DNA, 25 bp, Saccharomyces pastorianus
gcgacatacgctttgttaaccaatt

SEQ ID NO: 42816 - DNA, 25 bp, Saccharomyces pastorianus
aatacgccactgaatgccttgttgt

SEQ ID NO: 42817 - DNA, 25 bp, Saccharomyces pastorianus
caaaggttttcatttctgcgtgccc

SEQ ID NO: 42818 - DNA, 25 bp, Saccharomyces pastorianus
attccgtccgaaccctaaagatgtg

SEQ ID NO: 42819 - DNA, 25 bp, Saccharomyces pastorianus
tgcgtgccctactattgagccaatt

SEQ ID NO: 42820 - DNA, 25 bp, Saccharomyces pastorianus
ggcaacctttgcacgtgattctgag

SEQ ID NO: 42821 - DNA, 25 bp, Saccharomyces pastorianus
ggctcgcttgaacgctagaaactat

SEQ ID NO: 42822 - DNA, 25 bp, Saccharomyces pastorianus
agtactacgctctggctaaggattc

SEQ ID NO: 42823 - DNA, 25 bp, Saccharomyces pastorianus
ggatgtgcgtccagagtttaaactc

SEQ ID NO: 42824 - DNA, 25 bp, Saccharomyces pastorianus
ttctgagcagctggcggatagcgac

SEQ ID NO: 42825 - DNA, 25 bp, Saccharomyces pastorianus
gtcatggagaacctagcttcagcga

SEQ ID NO: 42826 - DNA, 25 bp, Saccharomyces pastorianus
tgcataaccctaagactcacatacc

SEQ ID NO: 42827 - DNA, 25 bp, Saccharomyces pastorianus
ctgcctggaaagattctcttgagta

SEQ ID NO: 42828 - DNA, 25 bp, Saccharomyces pastorianus
gggcatcccctattgcagtctggct

SEQ ID NO: 42829 - DNA, 25 bp, Saccharomyces pastorianus
caagttttcataagagggtgtccaa

SEQ ID NO: 42830 - DNA, 25 bp, Saccharomyces pastorianus
tcatccaaaggtgatggtgccccat

SEQ ID NO: 42831 - DNA, 25 bp, Saccharomyces pastorianus
gggtcaacggaacagtctttattat

SEQ ID NO: 42832 - DNA, 25 bp, Saccharomyces pastorianus
acttcttggagattgaggtgcataa

SEQ ID NO: 42833 - DNA, 25 bp, Saccharomyces pastorianus
tacgctgagccagagaacttcttgg

SEQ ID NO: 42834 - DNA, 25 bp, Saccharomyces pastorianus
gcagtctggctctaaggccctagtg

SEQ ID NO: 42835 - DNA, 25 bp, Saccharomyces pastorianus
tggtgccccatctgcctggaaagat

SEQ ID NO: 42836 - DNA, 25 bp, Saccharomyces pastorianus
taattccttttcgaacgcgtctacg

SEQ ID NO: 42837 - DNA, 25 bp, Saccharomyces pastorianus
gtatcgacgttgtctagaccagcct

SEQ ID NO: 42838 - DNA, 25 bp, Saccharomyces pastorianus
tagcagctggagtggcttctttgct

SEQ ID NO: 42839 - DNA, 25 bp, Saccharomyces pastorianus
tatgtcgtcggtaggctccgtttca

SEQ ID NO: 42840 - DNA, 25 bp, Saccharomyces pastorianus
ttcttcaaggacaactcacccaagg

SEQ ID NO: 42841 - DNA, 25 bp, Saccharomyces pastorianus
tactgtccttagtcttcttcttttt

SEQ ID NO: 42842 - DNA, 25 bp, Saccharomyces pastorianus
gcttctttgctttcagtatcgacgt

SEQ ID NO: 42843 - DNA, 25 bp, Saccharomyces pastorianus
tagaccagccttggctaattccttt

SEQ ID NO: 42844 - DNA, 25 bp, Saccharomyces pastorianus
ggaattaccttcttggtcttcttct

SEQ ID NO: 42845 - DNA, 25 bp, Saccharomyces pastorianus
ttcaggctcggcgtcagcggaagca

SEQ ID NO: 42846 - DNA, 25 bp, Saccharomyces pastorianus
agcggaagcactcttggacttcttc

SEQ ID NO: 42847 - DNA, 25 bp, Saccharomyces pastorianus
gcgaagttcgcctgctggacgagaa

SEQ ID NO: 42848 - DNA, 25 bp, Saccharomyces pastorianus
agccattgctggacgtcttgaagat

SEQ ID NO: 42849 - DNA, 25 bp, Saccharomyces pastorianus
ctatacctgatgagcgtgaacccgt

SEQ ID NO: 42850 - DNA, 25 bp, Saccharomyces pastorianus
aagaccgaggcaacaacactcttcg

SEQ ID NO: 42851 - DNA, 25 bp, Saccharomyces pastorianus
caagaaatccaacccgctgttcgta

SEQ ID NO: 42852 - DNA, 25 bp, Saccharomyces pastorianus
tcttcgcagcgttcgaccaagaata

SEQ ID NO: 42853 - DNA, 25 bp, Saccharomyces pastorianus
actacaacaacttcttcatccattt

SEQ ID NO: 42854 - DNA, 25 bp, Saccharomyces pastorianus
gcaagaacctctctcgccaagaaat

SEQ ID NO: 42855 - DNA, 25 bp, Saccharomyces pastorianus
gggcccttcttcgtcaaggataaga

SEQ ID NO: 42856 - DNA, 25 bp, Saccharomyces pastorianus
ggtagacgacctgatgtacaaccaa

SEQ ID NO: 42857 - DNA, 25 bp, Saccharomyces pastorianus
agaaatgggccgacttgtcgcacca

SEQ ID NO: 42858 - DNA, 25 bp, Saccharomyces pastorianus
gaatgcaagctttcttcaggtacag

SEQ ID NO: 42859 - DNA, 25 bp, Saccharomyces pastorianus
gcgcgactcaaatcgtggcattcaa

SEQ ID NO: 42860 - DNA, 25 bp, Saccharomyces pastorianus
taaactagcttctactcgttgccaa

SEQ ID NO: 42861 - DNA, 25 bp, Saccharomyces pastorianus
gatgatgcattactcgcacgcgcga

SEQ ID NO: 42862 - DNA, 25 bp, Saccharomyces pastorianus
agtcgtcggtgctgttctattgtac

SEQ ID NO: 42863 - DNA, 25 bp, Saccharomyces pastorianus
ttggttctaccattgcttctttcgt

SEQ ID NO: 42864 - DNA, 25 bp, Saccharomyces pastorianus
gactattgctgtctgcactggtgaa

SEQ ID NO: 42865 - DNA, 25 bp, Saccharomyces pastorianus
gacctataacctttgatccagttgg

SEQ ID NO: 42866 - DNA, 25 bp, Saccharomyces pastorianus
gttcgttccacgttcagttgattga

SEQ ID NO: 42867 - DNA, 25 bp, Saccharomyces pastorianus
aacaatctgcttacttatggccagt

SEQ ID NO: 42868 - DNA, 25 bp, Saccharomyces pastorianus
actgctgaaggtctcccatgtgtaa

SEQ ID NO: 42869 - DNA, 25 bp, Saccharomyces pastorianus
gtcccgttaccgctgagattaaaga

SEQ ID NO: 42870 - DNA, 25 bp, Saccharomyces pastorianus
taatcacccgttgcggttgtcccgt

SEQ ID NO: 42871 - DNA, 25 bp, Saccharomyces pastorianus
ttgtcccgtcgagcgtattagtcaa

SEQ ID NO: 42872 - DNA, 25 bp, Saccharomyces pastorianus
atcaatgtgcctaaggcgcctgctt

SEQ ID NO: 42873 - DNA, 25 bp, Saccharomyces pastorianus
tgcagcaagtcctattgccactgag

SEQ ID NO: 42874 - DNA, 25 bp, Saccharomyces pastorianus
gaaaaatctggagtcgccgtacaaa

SEQ ID NO: 42875 - DNA, 25 bp, Saccharomyces pastorianus
gaagttgcagcaagtcccgttaccg

SEQ ID NO: 42876 - DNA, 25 bp, Saccharomyces pastorianus
gctactgttggaagctcctgttttt

SEQ ID NO: 42877 - DNA, 25 bp, Saccharomyces pastorianus
caggtcttgttgatgcacccgaaag

SEQ ID NO: 42878 - DNA, 25 bp, Saccharomyces pastorianus
aaatgatctcaatggccacgctaat

SEQ ID NO: 42879 - DNA, 25 bp, Saccharomyces pastorianus
actgctagaggtatcccaggtcttg

SEQ ID NO: 42880 - DNA, 25 bp, Saccharomyces pastorianus
acgatcacaccgttgacgtttgggc

SEQ ID NO: 42881 - DNA, 25 bp, Saccharomyces pastorianus
aaactattgaggtcgcacgggcctt

SEQ ID NO: 42882 - DNA, 25 bp, Saccharomyces pastorianus
ttgtggcacaattgactacctctcg

SEQ ID NO: 42883 - DNA, 25 bp, Saccharomyces pastorianus
tacctctcgcccgaaatggtcgaat

SEQ ID NO: 42884 - DNA, 25 bp, Saccharomyces pastorianus
gtcgcacgggccttttaacgatatt

SEQ ID NO: 42885 - DNA, 25 bp, Saccharomyces pastorianus
aagacctaatactcaagctgcttaa

SEQ ID NO: 42886 - DNA, 25 bp, Saccharomyces pastorianus
attgccaatgcgctagactacatgc

SEQ ID NO: 42887 - DNA, 25 bp, Saccharomyces pastorianus
tacttttgaactactaaccggcgct

SEQ ID NO: 42888 - DNA, 25 bp, Saccharomyces pastorianus
ggcgctccgccgtttgaagaagaaa

SEQ ID NO: 42889 - DNA, 25 bp, Saccharomyces pastorianus
aactatacggttatttccacgatga

SEQ ID NO: 42890 - DNA, 25 bp, Saccharomyces pastorianus
atttcccaggatgcacaagacctaa

SEQ ID NO: 42891 - DNA, 25 bp, Saccharomyces pastorianus
tgaaggctccttacgaggacgagat

SEQ ID NO: 42892 - DNA, 25 bp, Saccharomyces pastorianus
caaagcgcttttgtatcgacaggaa

SEQ ID NO: 42893 - DNA, 25 bp, Saccharomyces pastorianus
gattcaaccctagatgcaactggat

SEQ ID NO: 42894 - DNA, 25 bp, Saccharomyces pastorianus
gcccatagagcctttttcacaaaac

SEQ ID NO: 42895 - DNA, 25 bp, Saccharomyces pastorianus
taaaagcaatgcaccaacctctgac

SEQ ID NO: 42896 - DNA, 25 bp, Saccharomyces pastorianus
aagcggtagtcttggcatgctaaac

SEQ ID NO: 42897 - DNA, 25 bp, Saccharomyces pastorianus
atagcatcttcttctccaaatttca

SEQ ID NO: 42898 - DNA, 25 bp, Saccharomyces pastorianus
aacgagatcgacttcactaatatgt

SEQ ID NO: 42899 - DNA, 25 bp, Saccharomyces pastorianus
agtggatcccattacaggaccttct

SEQ ID NO: 42900 - DNA, 25 bp, Saccharomyces pastorianus
aagaattccgtctctaaggcaaaat

SEQ ID NO: 42901 - DNA, 25 bp, Saccharomyces pastorianus
agtgctatcccaaattccaatcaag

SEQ ID NO: 42902 - DNA, 25 bp, Saccharomyces pastorianus
gaatcgcaaactgcttaccaacagg

SEQ ID NO: 42903 - DNA, 25 bp, Saccharomyces pastorianus
tgtggaaaacaacgccgactcttct

SEQ ID NO: 42904 - DNA, 25 bp, Saccharomyces pastorianus
ggaggtcaaccccaaggtcaagcca

SEQ ID NO: 42905 - DNA, 25 bp, Saccharomyces pastorianus
gaaagctagctgacgacgcatataa

SEQ ID NO: 42906 - DNA, 25 bp, Saccharomyces pastorianus
gggatcgctaagctcaagccgtcga

SEQ ID NO: 42907 - DNA, 25 bp, Saccharomyces pastorianus
gctgcacccgccaataattataatg

SEQ ID NO: 42908 - DNA, 25 bp, Saccharomyces pastorianus
gcaaggtgtgcaaatcccgggaagt

SEQ ID NO: 42909 - DNA, 25 bp, Saccharomyces pastorianus
gttgcattcgcaaaacgggatcgct

SEQ ID NO: 42910 - DNA, 25 bp, Saccharomyces pastorianus
ttcgctaccgatcacaatgaaccac

SEQ ID NO: 42911 - DNA, 25 bp, Saccharomyces pastorianus
aagtagtaccggaatggctgcaccc

SEQ ID NO: 42912 - DNA, 25 bp, Saccharomyces pastorianus
gccgactcttctagcaacgagattg

SEQ ID NO: 42913 - DNA, 25 bp, Saccharomyces pastorianus
gctagttcttcaaggagctctagaa

SEQ ID NO: 42914 - DNA, 25 bp, Saccharomyces pastorianus
agaagaacctatcccaccattgaat

SEQ ID NO: 42915 - DNA, 25 bp, Saccharomyces pastorianus
gggtgtcgcacctacagaagacgat

SEQ ID NO: 42916 - DNA, 25 bp, Saccharomyces pastorianus
aattccatatcttcatccgaggatg

SEQ ID NO: 42917 - DNA, 25 bp, Saccharomyces pastorianus
gatacacccaagttgtcccaagaag

SEQ ID NO: 42918 - DNA, 25 bp, Saccharomyces pastorianus
gccatcctggaattcatttctagaa

SEQ ID NO: 42919 - DNA, 25 bp, Saccharomyces pastorianus
gaataccaccgcaaagaacttcttt

SEQ ID NO: 42920 - DNA, 25 bp, Saccharomyces pastorianus
gagcgaagaccaatctgaccgggaa

SEQ ID NO: 42921 - DNA, 25 bp, Saccharomyces pastorianus
aaagacgagtatctgccatcctgga

SEQ ID NO: 42922 - DNA, 25 bp, Saccharomyces pastorianus
gacttgaccagggaactgctactgt

SEQ ID NO: 42923 - DNA, 25 bp, Saccharomyces pastorianus
gaatcttccatgagttccacgcaag

SEQ ID NO: 42924 - DNA, 25 bp, Saccharomyces pastorianus
aacctggaacggattatcactggat

SEQ ID NO: 42925 - DNA, 25 bp, Saccharomyces pastorianus
gaaaggtgatattcatcgcggatta

SEQ ID NO: 42926 - DNA, 25 bp, Saccharomyces pastorianus
gattgctcttatattgcttatttga

SEQ ID NO: 42927 - DNA, 25 bp, Saccharomyces pastorianus
gaacttggtttctgagatcatggga

SEQ ID NO: 42928 - DNA, 25 bp, Saccharomyces pastorianus
gaggagaatcgttgccattctgaaa

SEQ ID NO: 42929 - DNA, 25 bp, Saccharomyces pastorianus
ggttggaagagtccccaagtctcaa

SEQ ID NO: 42930 - DNA, 25 bp, Saccharomyces pastorianus
aacccgcaactattgatctaagctg

SEQ ID NO: 42931 - DNA, 25 bp, Saccharomyces pastorianus
gattctgttaataactcgcgggtct

SEQ ID NO: 42932 - DNA, 25 bp, Saccharomyces pastorianus
taaactctggtcattctttgaaagg

SEQ ID NO: 42933 - DNA, 25 bp, Saccharomyces pastorianus
ctcgcgggtcttggatttaaactct

SEQ ID NO: 42934 - DNA, 25 bp, Saccharomyces pastorianus
agtcatttctggacgggattcggaa

SEQ ID NO: 42935 - DNA, 25 bp, Saccharomyces pastorianus
acatggctcggtgccctagtcggaa

SEQ ID NO: 42936 - DNA, 25 bp, Saccharomyces pastorianus
atggctaacgttttgggctttcaag

SEQ ID NO: 42937 - DNA, 25 bp, Saccharomyces pastorianus
tagtcggaaccattcctccattaat

SEQ ID NO: 42938 - DNA, 25 bp, Saccharomyces pastorianus
aatgcccgggtttcgttgagatatt

SEQ ID NO: 42939 - DNA, 25 bp, Saccharomyces pastorianus
tcggtgcttcgaacattgcgttata

SEQ ID NO: 42940 - DNA, 25 bp, Saccharomyces pastorianus
gcaattcccacatttcaacacatta

SEQ ID NO: 42941 - DNA, 25 bp, Saccharomyces pastorianus
gaaaaatcccttattgaatgcccgg

SEQ ID NO: 42942 - DNA, 25 bp, Saccharomyces pastorianus
aatactaatgttccctctttgcttt

SEQ ID NO: 42943 - DNA, 25 bp, Saccharomyces pastorianus
gggctttcaagttctactggcaaca

SEQ ID NO: 42944 - DNA, 25 bp, Saccharomyces pastorianus
agctgggctattgtttgcctggcaa

SEQ ID NO: 42945 - DNA, 25 bp, Saccharomyces pastorianus
gagtgttttacacttaccggcgatt

SEQ ID NO: 42946 - DNA, 25 bp, Saccharomyces pastorianus
gatttgtcttcgagcttaagcgtca

SEQ ID NO: 42947 - DNA, 25 bp, Saccharomyces pastorianus
gcttgaagcaccagggtttttccta

SEQ ID NO: 42948 - DNA, 25 bp, Saccharomyces pastorianus
gcttaagcgtcagcaagtccgcatt

SEQ ID NO: 42949 - DNA, 25 bp, Saccharomyces pastorianus
aacgaggtacttctgacgatgattt

SEQ ID NO: 42950 - DNA, 25 bp, Saccharomyces pastorianus
tgtagatcctccaaaattcgagtgg

SEQ ID NO: 42951 - DNA, 25 bp, Saccharomyces pastorianus
gaagttacaaccgaggcattacaac

SEQ ID NO: 42952 - DNA, 25 bp, Saccharomyces pastorianus
ttgaccgtaacacgcctaacgatgg

SEQ ID NO: 42953 - DNA, 25 bp, Saccharomyces pastorianus
agattggcaagctctatccgaagtg

SEQ ID NO: 42954 - DNA, 25 bp, Saccharomyces pastorianus
ttattgactgtaccgacaagcccat

SEQ ID NO: 42955 - DNA, 25 bp, Saccharomyces pastorianus
gagcgccaactttgggcaatggtat

SEQ ID NO: 42956 - DNA, 25 bp, Saccharomyces pastorianus
acgccagatgggtttgtagatcctc

SEQ ID NO: 42957 - DNA, 25 bp, Saccharomyces pastorianus
gaggtcggcactctactagaaacga

SEQ ID NO: 42958 - DNA, 25 bp, Saccharomyces pastorianus
atgtggtcgacctgcaagattctga

SEQ ID NO: 42959 - DNA, 25 bp, Saccharomyces pastorianus
aacgccggccgatatctgatttgaa

SEQ ID NO: 42960 - DNA, 25 bp, Saccharomyces pastorianus
tgagggctcaagtcacttctcgagt

SEQ ID NO: 42961 - DNA, 25 bp, Saccharomyces pastorianus
accggttgcggcgacactgaagtca

SEQ ID NO: 42962 - DNA, 25 bp, Saccharomyces pastorianus
atgacgctggagaaacccgggcaca

SEQ ID NO: 42963 - DNA, 25 bp, Saccharomyces pastorianus
ttgaaaccgctcactaatgcacacc

SEQ ID NO: 42964 - DNA, 25 bp, Saccharomyces pastorianus
acttctcgagtgacggcaacatcaa

SEQ ID NO: 42965 - DNA, 25 bp, Saccharomyces pastorianus
ggccgtcgatccaaatttggcgcta

SEQ ID NO: 42966 - DNA, 25 bp, Saccharomyces pastorianus
gatgttaccattcgaggtcggcact

SEQ ID NO: 42967 - DNA, 25 bp, Saccharomyces pastorianus
aacgattacgggacagagccttgaa

SEQ ID NO: 42968 - DNA, 25 bp, Saccharomyces pastorianus
ggcaaccgtatagcgtaacatgtga

SEQ ID NO: 42969 - DNA, 25 bp, Saccharomyces pastorianus
cggaacatcgttttatatggcccca

SEQ ID NO: 42970 - DNA, 25 bp, Saccharomyces pastorianus
aattcccctttgaatccgacaagat

SEQ ID NO: 42971 - DNA, 25 bp, Saccharomyces pastorianus
ttggcgataacattcaccggaacat

SEQ ID NO: 42972 - DNA, 25 bp, Saccharomyces pastorianus
attttctccccgcttgaaggacgag

SEQ ID NO: 42973 - DNA, 25 bp, Saccharomyces pastorianus
tggtctttaggcttaaccctactag

SEQ ID NO: 42974 - DNA, 25 bp, Saccharomyces pastorianus
agcatccatggattgtcggacaaat

SEQ ID NO: 42975 - DNA, 25 bp, Saccharomyces pastorianus
gaccatgattctgacattttctccc

SEQ ID NO: 42976 - DNA, 25 bp, Saccharomyces pastorianus
aagaccatctccacggcaaatgtta

SEQ ID NO: 42977 - DNA, 25 bp, Saccharomyces pastorianus
gaggctgtcaactccttggcgataa

SEQ ID NO: 42978 - DNA, 25 bp, Saccharomyces pastorianus
aaaccgcaaaatatccttctcaatg

SEQ ID NO: 42979 - DNA, 25 bp, Saccharomyces pastorianus
gattctctaaaagcatcgccttcaa

SEQ ID NO: 42980 - DNA, 25 bp, Saccharomyces pastorianus
aaacccgactactgacaactgtgag

SEQ ID NO: 42981 - DNA, 25 bp, Saccharomyces pastorianus
ttctgctcctgtttctggcaaagat

SEQ ID NO: 42982 - DNA, 25 bp, Saccharomyces pastorianus
ggcttgctttccaatgtttctgctc

SEQ ID NO: 42983 - DNA, 25 bp, Saccharomyces pastorianus
gataattcggcttcatcatcttcag

SEQ ID NO: 42984 - DNA, 25 bp, Saccharomyces pastorianus
tcaggtgcagccttgagatcagcaa

SEQ ID NO: 42985 - DNA, 25 bp, Saccharomyces pastorianus
aaaatagtgcttcgatgccctcatc

SEQ ID NO: 42986 - DNA, 25 bp, Saccharomyces pastorianus
tatccactccagtaactccgaaaat

SEQ ID NO: 42987 - DNA, 25 bp, Saccharomyces pastorianus
tcatgccaaagatcccatcaggtgc

SEQ ID NO: 42988 - DNA, 25 bp, Saccharomyces pastorianus
gaaacagctgccacgagtttatcca

SEQ ID NO: 42989 - DNA, 25 bp, Saccharomyces pastorianus
atgcgtcatcaagcacttctgtagg

SEQ ID NO: 42990 - DNA, 25 bp, Saccharomyces pastorianus
gcttcggtggtactcccataacaga

SEQ ID NO: 42991 - DNA, 25 bp, Saccharomyces pastorianus
gaatccgtatttcgttcaccagtga

SEQ ID NO: 42992 - DNA, 25 bp, Saccharomyces pastorianus
actcttcttaggtttggcatacgca

SEQ ID NO: 42993 - DNA, 25 bp, Saccharomyces pastorianus
accaggcgaaacagctctagcattt

SEQ ID NO: 42994 - DNA, 25 bp, Saccharomyces pastorianus
agcagcatagcgatactcttcttag

SEQ ID NO: 42995 - DNA, 25 bp, Saccharomyces pastorianus
tatcggtatggccacctatagtata

SEQ ID NO: 42996 - DNA, 25 bp, Saccharomyces pastorianus
atcgatatgcctgtctttttcttta

SEQ ID NO: 42997 - DNA, 25 bp, Saccharomyces pastorianus
ggaagtttgttcctcagcaacgtga

SEQ ID NO: 42998 - DNA, 25 bp, Saccharomyces pastorianus
gaggcggcccagtacttcaataaaa

SEQ ID NO: 42999 - DNA, 25 bp, Saccharomyces pastorianus
gaagtatcacaaattctgccctgga

SEQ ID NO: 43000 - DNA, 25 bp, Saccharomyces pastorianus
gacggatctgctgtaagtgactcga

SEQ ID NO: 43001 - DNA, 25 bp, Saccharomyces pastorianus
gcaaaagcaatgatcccgtacacaa

SEQ ID NO: 43002 - DNA, 25 bp, Saccharomyces pastorianus
gaatatctggaatcacatctgggag

SEQ ID NO: 43003 - DNA, 25 bp, Saccharomyces pastorianus
ggatctcctacgtaaatccagatgc

SEQ ID NO: 43004 - DNA, 25 bp, Saccharomyces pastorianus
cgcacacttgccagaatccatgaga

SEQ ID NO: 43005 - DNA, 25 bp, Saccharomyces pastorianus
tgtatccaaggaccaaccgtatgat

SEQ ID NO: 43006 - DNA, 25 bp, Saccharomyces pastorianus
ttccatcctttaactaccgagcaac

SEQ ID NO: 43007 - DNA, 25 bp, Saccharomyces pastorianus
catattttaggcgtctcgagcttat

SEQ ID NO: 43008 - DNA, 25 bp, Saccharomyces pastorianus
tgaaaactatcaaccccagcttgtt

SEQ ID NO: 43009 - DNA, 25 bp, Saccharomyces pastorianus
attgtcacagaacagtcgcttgcct

SEQ ID NO: 43010 - DNA, 25 bp, Saccharomyces pastorianus
aattcaagttgtcgccaggatctcc

SEQ ID NO: 43011 - DNA, 25 bp, Saccharomyces pastorianus
cggcttggttcctattttaacagag

SEQ ID NO: 43012 - DNA, 25 bp, Saccharomyces pastorianus
tggagctttcattcatcctgaactc

SEQ ID NO: 43013 - DNA, 25 bp, Saccharomyces pastorianus
aaaatacccatttacagcaggcctg

SEQ ID NO: 43014 - DNA, 25 bp, Saccharomyces pastorianus
ggaccgtttgcgagatggagctttc

SEQ ID NO: 43015 - DNA, 25 bp, Saccharomyces pastorianus
atggaagaccagctctatgaagtaa

SEQ ID NO: 43016 - DNA, 25 bp, Saccharomyces pastorianus
gaaggcgccaacgatgaatctcaca

SEQ ID NO: 43017 - DNA, 25 bp, Saccharomyces pastorianus
catcctgaactccaccttaattaag

SEQ ID NO: 43018 - DNA, 25 bp, Saccharomyces pastorianus
aggcctgtaagatcctcggcgagga

SEQ ID NO: 43019 - DNA, 25 bp, Saccharomyces pastorianus
agcgaagactttaagcagctttctg

SEQ ID NO: 43020 - DNA, 25 bp, Saccharomyces pastorianus
gaatcgacgaagcaactcaccattt

SEQ ID NO: 43021 - DNA, 25 bp, Saccharomyces pastorianus
agcagctttctgaagttgagcaaga

SEQ ID NO: 43022 - DNA, 25 bp, Saccharomyces pastorianus
gatggtaatcgggtctgcaagaaga

SEQ ID NO: 43023 - DNA, 25 bp, Saccharomyces pastorianus
aattcccaaccaaaatctgagccgt

SEQ ID NO: 43024 - DNA, 25 bp, Saccharomyces pastorianus
cttgccaccgcctcagataaaggaa

SEQ ID NO: 43025 - DNA, 25 bp, Saccharomyces pastorianus
ttaggcgtggcaccaggctatgcaa

SEQ ID NO: 43026 - DNA, 25 bp, Saccharomyces pastorianus
agattatgcatcttccaggtcgttg

SEQ ID NO: 43027 - DNA, 25 bp, Saccharomyces pastorianus
atagcattccatcaagacctggtga

SEQ ID NO: 43028 - DNA, 25 bp, Saccharomyces pastorianus
atgatggtagactacttgccaccgc

SEQ ID NO: 43029 - DNA, 25 bp, Saccharomyces pastorianus
atcaagtttatgtcgcctcggatga

SEQ ID NO: 43030 - DNA, 25 bp, Saccharomyces pastorianus
tgagccgtaatttcgcacacatatc

SEQ ID NO: 43031 - DNA, 25 bp, Saccharomyces pastorianus
atgttgcatgtctagctgtgagtca

SEQ ID NO: 43032 - DNA, 25 bp, Saccharomyces pastorianus
ccttcccggagatgctattggcagt

SEQ ID NO: 43033 - DNA, 25 bp, Saccharomyces pastorianus
tgatgaagttgctagccttcccgga

SEQ ID NO: 43034 - DNA, 25 bp, Saccharomyces pastorianus
gactcagagacgctttctaacgtta

SEQ ID NO: 43035 - DNA, 25 bp, Saccharomyces pastorianus
ggacgctgatgtgtccaagttcttg

SEQ ID NO: 43036 - DNA, 25 bp, Saccharomyces pastorianus
aaagggcgtgccatttggtgttaca

SEQ ID NO: 43037 - DNA, 25 bp, Saccharomyces pastorianus
ggcactttatctgctgccagattga

SEQ ID NO: 43038 - DNA, 25 bp, Saccharomyces pastorianus
aatcacctaatctacgtcatggcca

SEQ ID NO: 43039 - DNA, 25 bp, Saccharomyces pastorianus
gaaaatcttcactttctcaagttca

SEQ ID NO: 43040 - DNA, 25 bp, Saccharomyces pastorianus
gttacagtgcccttattgacaacgg

SEQ ID NO: 43041 - DNA, 25 bp, Saccharomyces pastorianus
gttggatccggtacagactcagaga

SEQ ID NO: 43042 - DNA, 25 bp, Saccharomyces pastorianus
aacgctgttttcattgacccttcaa

SEQ ID NO: 43043 - DNA, 25 bp, Saccharomyces pastorianus
ggccaagatcctacaacatgcagat

SEQ ID NO: 43044 - DNA, 25 bp, Saccharomyces pastorianus
ttgggcattatgacggcactttatc

SEQ ID NO: 43045 - DNA, 25 bp, Saccharomyces pastorianus
aaacgaggagctgtatctgcaatac

SEQ ID NO: 43046 - DNA, 25 bp, Saccharomyces pastorianus
taaccattatggttccgtggtgttt

SEQ ID NO: 43047 - DNA, 25 bp, Saccharomyces pastorianus
gcaatacaaccagtatgttccctta

SEQ ID NO: 43048 - DNA, 25 bp, Saccharomyces pastorianus
gaagactgtcaattctcctttcaac

SEQ ID NO: 43049 - DNA, 25 bp, Saccharomyces pastorianus
tgaaaacgattctccatgctgcccg

SEQ ID NO: 43050 - DNA, 25 bp, Saccharomyces pastorianus
tctcgtgcacgttgtatggttacct

SEQ ID NO: 43051 - DNA, 25 bp, Saccharomyces pastorianus
ctgggcatgacatttgctttggcat

SEQ ID NO: 43052 - DNA, 25 bp, Saccharomyces pastorianus
gcattcagagtcatagctaccatat

SEQ ID NO: 43053 - DNA, 25 bp, Saccharomyces pastorianus
tgtttgctggtcaatcttatgcctc

SEQ ID NO: 43054 - DNA, 25 bp, Saccharomyces pastorianus
atcgctatgggttacttctttacgg

SEQ ID NO: 43055 - DNA, 25 bp, Saccharomyces pastorianus
cgtggtgtttcaaggttctgggcat

SEQ ID NO: 43056 - DNA, 25 bp, Saccharomyces pastorianus
tcggtttaatcccatggtcgcctaa

SEQ ID NO: 43057 - DNA, 25 bp, Saccharomyces pastorianus
gagttgatcccgtttgctaagagac

SEQ ID NO: 43058 - DNA, 25 bp, Saccharomyces pastorianus
atgtcaggtacatcggagcctcgag

SEQ ID NO: 43059 - DNA, 25 bp, Saccharomyces pastorianus
ttactacaatctgctcaaccgtgag

SEQ ID NO: 43060 - DNA, 25 bp, Saccharomyces pastorianus
attgtcggcttgaactccacatcaa

SEQ ID NO: 43061 - DNA, 25 bp, Saccharomyces pastorianus
gtgaccctaccatcaaagcgttgaa

SEQ ID NO: 43062 - DNA, 25 bp, Saccharomyces pastorianus
gaatgtctccatggcaatgatctcc

SEQ ID NO: 43063 - DNA, 25 bp, Saccharomyces pastorianus
aattggacgctctcgaagacgacca

SEQ ID NO: 43064 - DNA, 25 bp, Saccharomyces pastorianus
gactgggcacgtacatagatctttt

SEQ ID NO: 43065 - DNA, 25 bp, Saccharomyces pastorianus
gagcatgctcgcaaccgaatttgca

SEQ ID NO: 43066 - DNA, 25 bp, Saccharomyces pastorianus
aatgatctccatagcctgggtgctg

SEQ ID NO: 43067 - DNA, 25 bp, Saccharomyces pastorianus
aaccctctaatctctctactaatat

SEQ ID NO: 43068 - DNA, 25 bp, Saccharomyces pastorianus
atcacgttcgcaatgttgacgctct

SEQ ID NO: 43069 - DNA, 25 bp, Saccharomyces pastorianus
agttgaccctttattatcctcattc

SEQ ID NO: 43070 - DNA, 25 bp, Saccharomyces pastorianus
gccctagttgcggttttatcatcaa

SEQ ID NO: 43071 - DNA, 25 bp, Saccharomyces pastorianus
aatatacttgttgccctagttgcgg

SEQ ID NO: 43072 - DNA, 25 bp, Saccharomyces pastorianus
atcattgtttactccttccttaacg

SEQ ID NO: 43073 - DNA, 25 bp, Saccharomyces pastorianus
attatcctttctttcctaacattgg

SEQ ID NO: 43074 - DNA, 25 bp, Saccharomyces pastorianus
acgttactctcggttggatctatat

SEQ ID NO: 43075 - DNA, 25 bp, Saccharomyces pastorianus
gtcgttttggctatccgtatggtac

SEQ ID NO: 43076 - DNA, 25 bp, Saccharomyces pastorianus
ttttacccagttatctatcagtgac

SEQ ID NO: 43077 - DNA, 25 bp, Saccharomyces pastorianus
aatcgctttctaagaccactgcatc

SEQ ID NO: 43078 - DNA, 25 bp, Saccharomyces pastorianus
gcacgcacagacgatagtaaccttg

SEQ ID NO: 43079 - DNA, 25 bp, Saccharomyces pastorianus
ggtttcataatcagtttgccccaaa

SEQ ID NO: 43080 - DNA, 25 bp, Saccharomyces pastorianus
gaggctgacaccgatgttgatatgt

SEQ ID NO: 43081 - DNA, 25 bp, Saccharomyces pastorianus
aggcaataatcatcacagtgggtcg

SEQ ID NO: 43082 - DNA, 25 bp, Saccharomyces pastorianus
gaaaccattctccagatccgatagg

SEQ ID NO: 43083 - DNA, 25 bp, Saccharomyces pastorianus
agcatagcattctctgatgccatcc

SEQ ID NO: 43084 - DNA, 25 bp, Saccharomyces pastorianus
gtaaccttgttcataacagcatagc

SEQ ID NO: 43085 - DNA, 25 bp, Saccharomyces pastorianus
tctctagatgagacaggccccaaaa

SEQ ID NO: 43086 - DNA, 25 bp, Saccharomyces pastorianus
atgccatccacgacaaggctctgaa

SEQ ID NO: 43087 - DNA, 25 bp, Saccharomyces pastorianus
tgggctgactacaaggaagttgctt

SEQ ID NO: 43088 - DNA, 25 bp, Saccharomyces pastorianus
cccaaagcccacctatgatggagag

SEQ ID NO: 43089 - DNA, 25 bp, Saccharomyces pastorianus
atgtcgttcaagcattggtcactcc

SEQ ID NO: 43090 - DNA, 25 bp, Saccharomyces pastorianus
gaatattgtccatactctgttcaag

SEQ ID NO: 43091 - DNA, 25 bp, Saccharomyces pastorianus
gaaggttgtttgcaatcctcatgaa

SEQ ID NO: 43092 - DNA, 25 bp, Saccharomyces pastorianus
tggtcactcccctagttcataataa

SEQ ID NO: 43093 - DNA, 25 bp, Saccharomyces pastorianus
atgtgccatctgcttctatgatcaa

SEQ ID NO: 43094 - DNA, 25 bp, Saccharomyces pastorianus
atcatggatccaccaagcggtcaaa

SEQ ID NO: 43095 - DNA, 25 bp, Saccharomyces pastorianus
aatgttgctgctatgttattctgct

SEQ ID NO: 43096 - DNA, 25 bp, Saccharomyces pastorianus
atcgccattcacttatgtcgttcaa

SEQ ID NO: 43097 - DNA, 25 bp, Saccharomyces pastorianus
aagacaaaagatgcctgccttctgg

SEQ ID NO: 43098 - DNA, 25 bp, Saccharomyces pastorianus
ctggtaaacccatctgctactgaaa

SEQ ID NO: 43099 - DNA, 25 bp, Saccharomyces pastorianus
gatgtacaacgtatcgccattcact

SEQ ID NO: 43100 - DNA, 25 bp, Saccharomyces pastorianus
gagtggatcctggtatcaagttgta

SEQ ID NO: 43101 - DNA, 25 bp, Saccharomyces pastorianus
gtgatatcgggtatgacttattcag

SEQ ID NO: 43102 - DNA, 25 bp, Saccharomyces pastorianus
gacatcccattttggacgagtttga

SEQ ID NO: 43103 - DNA, 25 bp, Saccharomyces pastorianus
taatttcaaagccttcattaccgaa

SEQ ID NO: 43104 - DNA, 25 bp, Saccharomyces pastorianus
ctaaggaagccaacgacaagatctg

SEQ ID NO: 43105 - DNA, 25 bp, Saccharomyces pastorianus
gtggtggacactactttgatatttt

SEQ ID NO: 43106 - DNA, 25 bp, Saccharomyces pastorianus
aaagggctctgacaatttcaacaat

SEQ ID NO: 43107 - DNA, 25 bp, Saccharomyces pastorianus
aaagtattcgggttcacattgagca

SEQ ID NO: 43108 - DNA, 25 bp, Saccharomyces pastorianus
attgccccatgaacgatgacatttg

SEQ ID NO: 43109 - DNA, 25 bp, Saccharomyces pastorianus
ggaaagtatgacaattgccccatga

SEQ ID NO: 43110 - DNA, 25 bp, Saccharomyces pastorianus
aagatttccccaagtttatatcaga

SEQ ID NO: 43111 - DNA, 25 bp, Saccharomyces pastorianus
caaactgtcacattgggtccgggat

SEQ ID NO: 43112 - DNA, 25 bp, Saccharomyces pastorianus
attgggtccgggattcgatcaaatc

SEQ ID NO: 43113 - DNA, 25 bp, Saccharomyces pastorianus
gatatggtaggtccaactttcggga

SEQ ID NO: 43114 - DNA, 25 bp, Saccharomyces pastorianus
taagtagagcagttccccaaaaggg

SEQ ID NO: 43115 - DNA, 25 bp, Saccharomyces pastorianus
gaggcaagttttttacgagtcaaag

SEQ ID NO: 43116 - DNA, 25 bp, Saccharomyces pastorianus
accagtatttggcacatgtcataga

SEQ ID NO: 43117 - DNA, 25 bp, Saccharomyces pastorianus
aatatctatctacttgacgtacgat

SEQ ID NO: 43118 - DNA, 25 bp, Saccharomyces pastorianus
atactagctgggtattctgactcag

SEQ ID NO: 43119 - DNA, 25 bp, Saccharomyces pastorianus
atccgaacacttaactcgccaagtt

SEQ ID NO: 43120 - DNA, 25 bp, Saccharomyces pastorianus
ccaagttatcccatccacaaaggca

SEQ ID NO: 43121 - DNA, 25 bp, Saccharomyces pastorianus
aatcagagcgttggccgtgctatac

SEQ ID NO: 43122 - DNA, 25 bp, Saccharomyces pastorianus
ggcaatgcgctactcatagaactaa

SEQ ID NO: 43123 - DNA, 25 bp, Saccharomyces pastorianus
atgactgcaattccgttaataaccg

SEQ ID NO: 43124 - DNA, 25 bp, Saccharomyces pastorianus
agcgtataacatccttagcgaacaa

SEQ ID NO: 43125 - DNA, 25 bp, Saccharomyces pastorianus
gatatcgtttccagcagaatttcat

SEQ ID NO: 43126 - DNA, 25 bp, Saccharomyces pastorianus
accgcttctcctgaaaaggttgaca

SEQ ID NO: 43127 - DNA, 25 bp, Saccharomyces pastorianus
ttgcgtgaacattttaccgcttctc

SEQ ID NO: 43128 - DNA, 25 bp, Saccharomyces pastorianus
atcaggcccgttatataattatgcg

SEQ ID NO: 43129 - DNA, 25 bp, Saccharomyces pastorianus
gcgttgaggatatccaattttccca

SEQ ID NO: 43130 - DNA, 25 bp, Saccharomyces pastorianus
aaactgctgttgaggctgctgtgaa

SEQ ID NO: 43131 - DNA, 25 bp, Saccharomyces pastorianus
taataaccggcaatctcacagctac

SEQ ID NO: 43132 - DNA, 25 bp, Saccharomyces pastorianus
taccctgttggccataaatttagaa

SEQ ID NO: 43133 - DNA, 25 bp, Saccharomyces pastorianus
tgctacaagagcttccgttgataac

SEQ ID NO: 43134 - DNA, 25 bp, Saccharomyces pastorianus
atagtcgccatcaacaatgatcctg

SEQ ID NO: 43135 - DNA, 25 bp, Saccharomyces pastorianus
tgataaattactctccccattagct

SEQ ID NO: 43136 - DNA, 25 bp, Saccharomyces pastorianus
attcaacccgtttgtgatgtcactg

SEQ ID NO: 43137 - DNA, 25 bp, Saccharomyces pastorianus
gctcctatctttaacgtggctgact

SEQ ID NO: 43138 - DNA, 25 bp, Saccharomyces pastorianus
gaacttacttctgcgttgaatgtgg

SEQ ID NO: 43139 - DNA, 25 bp, Saccharomyces pastorianus
gaagtacggactctgttgcgatcga

SEQ ID NO: 43140 - DNA, 25 bp, Saccharomyces pastorianus
aattctctacaaatcggccagaccg

SEQ ID NO: 43141 - DNA, 25 bp, Saccharomyces pastorianus
agctgacgttttgcatgctgctata

SEQ ID NO: 43142 - DNA, 25 bp, Saccharomyces pastorianus
ttgtatatagccgttggtgtctccg

SEQ ID NO: 43143 - DNA, 25 bp, Saccharomyces pastorianus
tgatttggacgtcacctgggttaaa

SEQ ID NO: 43144 - DNA, 25 bp, Saccharomyces pastorianus
aacccggacgctcgaagcattaaag

SEQ ID NO: 43145 - DNA, 25 bp, Saccharomyces pastorianus
gaaaatatcacgtacccgagtaagg

SEQ ID NO: 43146 - DNA, 25 bp, Saccharomyces pastorianus
atccttccctacaaatatatcactc

SEQ ID NO: 43147 - DNA, 25 bp, Saccharomyces pastorianus
ggattgccatctatactgtcaaaag

SEQ ID NO: 43148 - DNA, 25 bp, Saccharomyces pastorianus
ctcctcccataaacagatcgtcaaa

SEQ ID NO: 43149 - DNA, 25 bp, Saccharomyces pastorianus
aaatgctattctccaagacctctaa

SEQ ID NO: 43150 - DNA, 25 bp, Saccharomyces pastorianus
agacgcaactactgaccatttgggt

SEQ ID NO: 43151 - DNA, 25 bp, Saccharomyces pastorianus
attagtatcgtgaatccttccctac

SEQ ID NO: 43152 - DNA, 25 bp, Saccharomyces pastorianus
tcgtcaaaacgcctgtccctaagag

SEQ ID NO: 43153 - DNA, 25 bp, Saccharomyces pastorianus
gagtggccgttctccggtagaaaag

SEQ ID NO: 43154 - DNA, 25 bp, Saccharomyces pastorianus
aactatgcgctaggattgccatcta

SEQ ID NO: 43155 - DNA, 25 bp, Saccharomyces pastorianus
agctcgtgtcttgagaagttctcct

SEQ ID NO: 43156 - DNA, 25 bp, Saccharomyces pastorianus
gatacaacggtattctccacgctat

SEQ ID NO: 43157 - DNA, 25 bp, Saccharomyces pastorianus
attggccgcttatgaactgttcaag

SEQ ID NO: 43158 - DNA, 25 bp, Saccharomyces pastorianus
gctttattccttcccctgatgataa

SEQ ID NO: 43159 - DNA, 25 bp, Saccharomyces pastorianus
gactacgccctttgatgtcataaaa

SEQ ID NO: 43160 - DNA, 25 bp, Saccharomyces pastorianus
cacgctattcgtatcatcctgaagg

SEQ ID NO: 43161 - DNA, 25 bp, Saccharomyces pastorianus
gtgggaacttttaactgctggtgcc

SEQ ID NO: 43162 - DNA, 25 bp, Saccharomyces pastorianus
tagatttgacccttcagtttacaag

SEQ ID NO: 43163 - DNA, 25 bp, Saccharomyces pastorianus
atgataatgagctcccactgcagaa

SEQ ID NO: 43164 - DNA, 25 bp, Saccharomyces pastorianus
agaagctctattcccgtgacaggaa

SEQ ID NO: 43165 - DNA, 25 bp, Saccharomyces pastorianus
aatttgggttcacattggccgctta

SEQ ID NO: 43166 - DNA, 25 bp, Saccharomyces pastorianus
gattcggcaaaactgctagcggtca

SEQ ID NO: 43167 - DNA, 25 bp, Saccharomyces pastorianus
ccgctgcatggcttttttctagata

SEQ ID NO: 43168 - DNA, 25 bp, Saccharomyces pastorianus
acttatcgaggaaacagcgcctttg

SEQ ID NO: 43169 - DNA, 25 bp, Saccharomyces pastorianus
tgtatttatatacccctccccaaat

SEQ ID NO: 43170 - DNA, 25 bp, Saccharomyces pastorianus
gctagcggtcataatggcgtgcaag

SEQ ID NO: 43171 - DNA, 25 bp, Saccharomyces pastorianus
gcgcctttgagtactgaagacgcca

SEQ ID NO: 43172 - DNA, 25 bp, Saccharomyces pastorianus
taactggcgcattgttaaccgacgc

SEQ ID NO: 43173 - DNA, 25 bp, Saccharomyces pastorianus
attactgccaaaatccatcaagcct

SEQ ID NO: 43174 - DNA, 25 bp, Saccharomyces pastorianus
aagccttggtgacgaggtacctcga

SEQ ID NO: 43175 - DNA, 25 bp, Saccharomyces pastorianus
aagaggctcaaaacgacggcagcaa

SEQ ID NO: 43176 - DNA, 25 bp, Saccharomyces pastorianus
gaagacgccaagagaatcgcagcaa

SEQ ID NO: 43177 - DNA, 25 bp, Saccharomyces pastorianus
tttcgatttctatcttgcctcattc

SEQ ID NO: 43178 - DNA, 25 bp, Saccharomyces pastorianus
gaatcaagtcgtaaccaatcgctga

SEQ ID NO: 43179 - DNA, 25 bp, Saccharomyces pastorianus
aacggcccgcaagaaatatttcgat

SEQ ID NO: 43180 - DNA, 25 bp, Saccharomyces pastorianus
aacgcgctaagctattgatcgattt

SEQ ID NO: 43181 - DNA, 25 bp, Saccharomyces pastorianus
gctgattgagatattgcccagtaat

SEQ ID NO: 43182 - DNA, 25 bp, Saccharomyces pastorianus
aattcttgataacatgcctgtgaac

SEQ ID NO: 43183 - DNA, 25 bp, Saccharomyces pastorianus
gcctgtgaacccaagtgagccatat

SEQ ID NO: 43184 - DNA, 25 bp, Saccharomyces pastorianus
attggccaacttctagatgatgctg

SEQ ID NO: 43185 - DNA, 25 bp, Saccharomyces pastorianus
atgatgctggagtaccggtcgagaa

SEQ ID NO: 43186 - DNA, 25 bp, Saccharomyces pastorianus
aatcgagcagatacctagactaaac

SEQ ID NO: 43187 - DNA, 25 bp, Saccharomyces pastorianus
tttgagcgacattgaaccggaggat

SEQ ID NO: 43188 - DNA, 25 bp, Saccharomyces pastorianus
gggatggttctgctattggctttaa

SEQ ID NO: 43189 - DNA, 25 bp, Saccharomyces pastorianus
actgtctgattctcaaactcggcgg

SEQ ID NO: 43190 - DNA, 25 bp, Saccharomyces pastorianus
gggtgagaacccagctaatatgatt

SEQ ID NO: 43191 - DNA, 25 bp, Saccharomyces pastorianus
ggagtaaactccaacacattagcag

SEQ ID NO: 43192 - DNA, 25 bp, Saccharomyces pastorianus
ggcgttgcaaaagagttcacagact

SEQ ID NO: 43193 - DNA, 25 bp, Saccharomyces pastorianus
gaatcagttttaccattccctggct

SEQ ID NO: 43194 - DNA, 25 bp, Saccharomyces pastorianus
aaactatggtgtcgtgtttctccgt

SEQ ID NO: 43195 - DNA, 25 bp, Saccharomyces pastorianus
cattccctggcttggctcaaaaaat

SEQ ID NO: 43196 - DNA, 25 bp, Saccharomyces pastorianus
aagtctcaactttattacatctcgg

SEQ ID NO: 43197 - DNA, 25 bp, Saccharomyces pastorianus
gggatctccaatgacgttttccaaa

SEQ ID NO: 43198 - DNA, 25 bp, Saccharomyces pastorianus
gttcacaattatcatcgagctcatc

SEQ ID NO: 43199 - DNA, 25 bp, Saccharomyces pastorianus
tggattttgccgatgatcaactcaa

SEQ ID NO: 43200 - DNA, 25 bp, Saccharomyces pastorianus
agaacttagtgcaggtgagcgtcgc

SEQ ID NO: 43201 - DNA, 25 bp, Saccharomyces pastorianus
gctatgataccgtccaacactttaa

SEQ ID NO: 43202 - DNA, 25 bp, Saccharomyces pastorianus
gaaagacttgtcactgagcctaaat

SEQ ID NO: 43203 - DNA, 25 bp, Saccharomyces pastorianus
gaatctccgcaaaaatatcttctga

SEQ ID NO: 43204 - DNA, 25 bp, Saccharomyces pastorianus
aaacaatccgtttggctcactgact

SEQ ID NO: 43205 - DNA, 25 bp, Saccharomyces pastorianus
tttgtgacataattgaatctccgca

SEQ ID NO: 43206 - DNA, 25 bp, Saccharomyces pastorianus
acgggcacaaacctcgacaactatg

SEQ ID NO: 43207 - DNA, 25 bp, Saccharomyces pastorianus
tcactgactgaggagcaactacaaa

SEQ ID NO: 43208 - DNA, 25 bp, Saccharomyces pastorianus
aaatttgactgagcccatagagcat

SEQ ID NO: 43209 - DNA, 25 bp, Saccharomyces pastorianus
tagaaaaccttcctaacacaccaag

SEQ ID NO: 43210 - DNA, 25 bp, Saccharomyces pastorianus
aggaaaaccttccatctgacgtgga

SEQ ID NO: 43211 - DNA, 25 bp, Saccharomyces pastorianus
ggccgctgcttccactttagaaaat

SEQ ID NO: 43212 - DNA, 25 bp, Saccharomyces pastorianus
gaaggccgctgaactagatattttg

SEQ ID NO: 43213 - DNA, 25 bp, Saccharomyces pastorianus
agttttggtctctccggaatacgag

SEQ ID NO: 43214 - DNA, 25 bp, Saccharomyces pastorianus
cgaatgggccgttgatatgtctgaa

SEQ ID NO: 43215 - DNA, 25 bp, Saccharomyces pastorianus
gtcgcgtcaaattaaggccgctgct

SEQ ID NO: 43216 - DNA, 25 bp, Saccharomyces pastorianus
aagaagccatcagagctcgtgccaa

SEQ ID NO: 43217 - DNA, 25 bp, Saccharomyces pastorianus
gaagctaactctgaactcagccaat

SEQ ID NO: 43218 - DNA, 25 bp, Saccharomyces pastorianus
tgtcttggcccaatgtctttttgat

SEQ ID NO: 43219 - DNA, 25 bp, Saccharomyces pastorianus
gagctgcgaaaccattcattacatg

SEQ ID NO: 43220 - DNA, 25 bp, Saccharomyces pastorianus
ttcactaaagttttggtctctccgg

SEQ ID NO: 43221 - DNA, 25 bp, Saccharomyces pastorianus
gttgatcctgcccttaactgagagg

SEQ ID NO: 43222 - DNA, 25 bp, Saccharomyces pastorianus
ggagacgccttcaagttgatcctgc

SEQ ID NO: 43223 - DNA, 25 bp, Saccharomyces pastorianus
acatagggatgcttgccgtggaatc

SEQ ID NO: 43224 - DNA, 25 bp, Saccharomyces pastorianus
acgtaccgtggtcatggcatagcga

SEQ ID NO: 43225 - DNA, 25 bp, Saccharomyces pastorianus
tggacgtcaagagtagcacacctag

SEQ ID NO: 43226 - DNA, 25 bp, Saccharomyces pastorianus
gacgcggacttatcagagccgtatt

SEQ ID NO: 43227 - DNA, 25 bp, Saccharomyces pastorianus
cagagagctcactgcgacgagatta

SEQ ID NO: 43228 - DNA, 25 bp, Saccharomyces pastorianus
ggatgttccggtactacctgaacga

SEQ ID NO: 43229 - DNA, 25 bp, Saccharomyces pastorianus
tggcctgaattgacgtacattgctg

SEQ ID NO: 43230 - DNA, 25 bp, Saccharomyces pastorianus
tgtggcggcgctgaacctgtatgaa

SEQ ID NO: 43231 - DNA, 25 bp, Saccharomyces pastorianus
taactgagaggagctgcacccggtc

SEQ ID NO: 43232 - DNA, 25 bp, Saccharomyces pastorianus
gcccgttcaggctcacaatgatgat

SEQ ID NO: 43233 - DNA, 25 bp, Saccharomyces pastorianus
acacctgaaaggcttacggcggagt

SEQ ID NO: 43234 - DNA, 25 bp, Saccharomyces pastorianus
taacggtaccacctgcgttggagaa

SEQ ID NO: 43235 - DNA, 25 bp, Saccharomyces pastorianus
gataaaatcactcttccgatggaga

SEQ ID NO: 43236 - DNA, 25 bp, Saccharomyces pastorianus
ggcgatacgcatacacttagcgggt

SEQ ID NO: 43237 - DNA, 25 bp, Saccharomyces pastorianus
ttatctactgatacacacacctgaa

SEQ ID NO: 43238 - DNA, 25 bp, Saccharomyces pastorianus
aaatgagcatacctttccagaaaat

SEQ ID NO: 43239 - DNA, 25 bp, Saccharomyces pastorianus
cacgagcacgttgagagacctgggt

SEQ ID NO: 43240 - DNA, 25 bp, Saccharomyces pastorianus
atgacccacgacacactatgttttg

SEQ ID NO: 43241 - DNA, 25 bp, Saccharomyces pastorianus
cttagcgggtacaaccaatggttca

SEQ ID NO: 43242 - DNA, 25 bp, Saccharomyces pastorianus
accgccgtttccaagattggctatt

SEQ ID NO: 43243 - DNA, 25 bp, Saccharomyces pastorianus
gacttcatcaagtcccacatttgga

SEQ ID NO: 43244 - DNA, 25 bp, Saccharomyces pastorianus
aatagcagtgtgtttcgcatcttcc

SEQ ID NO: 43245 - DNA, 25 bp, Saccharomyces pastorianus
gaacctagtcaagcatgtcccaatt

SEQ ID NO: 43246 - DNA, 25 bp, Saccharomyces pastorianus
agcaactgtgtaaccatccctttat

SEQ ID NO: 43247 - DNA, 25 bp, Saccharomyces pastorianus
tagaacatctcttagcgccataggt

SEQ ID NO: 43248 - DNA, 25 bp, Saccharomyces pastorianus
atccctttatcactatccgaatcgg

SEQ ID NO: 43249 - DNA, 25 bp, Saccharomyces pastorianus
atcttccacaaaagctcaggcctta

SEQ ID NO: 43250 - DNA, 25 bp, Saccharomyces pastorianus
taaccccggatgatctcgacgataa

SEQ ID NO: 43251 - DNA, 25 bp, Saccharomyces pastorianus
atcatatcaccattaaccccggatg

SEQ ID NO: 43252 - DNA, 25 bp, Saccharomyces pastorianus
ggaatctggattctgttccatgctt

SEQ ID NO: 43253 - DNA, 25 bp, Saccharomyces pastorianus
gttagtgaacctcccttgcaagaaa

SEQ ID NO: 43254 - DNA, 25 bp, Saccharomyces pastorianus
gaaattccctagtgtgatgtcgcaa

SEQ ID NO: 43255 - DNA, 25 bp, Saccharomyces pastorianus
gagccctcatttggtttgggtcgta

SEQ ID NO: 43256 - DNA, 25 bp, Saccharomyces pastorianus
gagtacatccccaacgtcattgagc

SEQ ID NO: 43257 - DNA, 25 bp, Saccharomyces pastorianus
gggtcgtattatttactgcatattt

SEQ ID NO: 43258 - DNA, 25 bp, Saccharomyces pastorianus
gaacttatttctcattcccgttatc

SEQ ID NO: 43259 - DNA, 25 bp, Saccharomyces pastorianus
gtaacgatgagttgggtacgccctt

SEQ ID NO: 43260 - DNA, 25 bp, Saccharomyces pastorianus
tgaccattgctttcggacaaggctg

SEQ ID NO: 43261 - DNA, 25 bp, Saccharomyces pastorianus
tccgctctattaagtttatcacaag

SEQ ID NO: 43262 - DNA, 25 bp, Saccharomyces pastorianus
gatggttcatgaccctataaacgaa

SEQ ID NO: 43263 - DNA, 25 bp, Saccharomyces pastorianus
gccctttggcatcaccatagatttt

SEQ ID NO: 43264 - DNA, 25 bp, Saccharomyces pastorianus
tcccgttatcggtagcaccaatcaa

SEQ ID NO: 43265 - DNA, 25 bp, Saccharomyces pastorianus
agcaggcgttgaacttaccatcttc

SEQ ID NO: 43266 - DNA, 25 bp, Saccharomyces pastorianus
caacagtcactgcaccaacgaatga

SEQ ID NO: 43267 - DNA, 25 bp, Saccharomyces pastorianus
aaagacttccccaaatcgcttcaat

SEQ ID NO: 43268 - DNA, 25 bp, Saccharomyces pastorianus
tagaaggcctgtacctaggagacct

SEQ ID NO: 43269 - DNA, 25 bp, Saccharomyces pastorianus
gaaggatgatgactctgctgatgaa

SEQ ID NO: 43270 - DNA, 25 bp, Saccharomyces pastorianus
gaataggcaattttctgtatcctca

SEQ ID NO: 43271 - DNA, 25 bp, Saccharomyces pastorianus
cttactaacttccagccctaaaatg

SEQ ID NO: 43272 - DNA, 25 bp, Saccharomyces pastorianus
ttccgccttcgtcatcaaatacaaa

SEQ ID NO: 43273 - DNA, 25 bp, Saccharomyces pastorianus
atagcggcgaaaacaaccacccaga

SEQ ID NO: 43274 - DNA, 25 bp, Saccharomyces pastorianus
taggagaccttcacagcaggcgttg

SEQ ID NO: 43275 - DNA, 25 bp, Saccharomyces pastorianus
gacagtacatctgcgatagcggcga

SEQ ID NO: 43276 - DNA, 25 bp, Saccharomyces pastorianus
aggcacgtcgatcaggattcctgga

SEQ ID NO: 43277 - DNA, 25 bp, Saccharomyces pastorianus
gatgggtctgtagtagttgctcgaa

SEQ ID NO: 43278 - DNA, 25 bp, Saccharomyces pastorianus
acgtgtgttgtactagccgatttaa

SEQ ID NO: 43279 - DNA, 25 bp, Saccharomyces pastorianus
gacaatgcctctgttatatccataa

SEQ ID NO: 43280 - DNA, 25 bp, Saccharomyces pastorianus
gaatgttcaccacggaagcgcttga

SEQ ID NO: 43281 - DNA, 25 bp, Saccharomyces pastorianus
attccatggttgcttatcgctgaac

SEQ ID NO: 43282 - DNA, 25 bp, Saccharomyces pastorianus
tctctggaaacttcggcctgttaat

SEQ ID NO: 43283 - DNA, 25 bp, Saccharomyces pastorianus
agtatgttccggtagatagtctcaa

SEQ ID NO: 43284 - DNA, 25 bp, Saccharomyces pastorianus
attcccgatcgattttctggagcca

SEQ ID NO: 43285 - DNA, 25 bp, Saccharomyces pastorianus
tttggacactgttttgtacgacggt

SEQ ID NO: 43286 - DNA, 25 bp, Saccharomyces pastorianus
gggatcgcaactcttccaggaggca

SEQ ID NO: 43287 - DNA, 25 bp, Saccharomyces pastorianus
tggaccacgtattcccattagaaac

SEQ ID NO: 43288 - DNA, 25 bp, Saccharomyces pastorianus
attactccgcacgagtttattgacg

SEQ ID NO: 43289 - DNA, 25 bp, Saccharomyces pastorianus
aaatcggtaccttgcaactttctgt

SEQ ID NO: 43290 - DNA, 25 bp, Saccharomyces pastorianus
ggaaagttggtattgctcctcctga

SEQ ID NO: 43291 - DNA, 25 bp, Saccharomyces pastorianus
gattaactgcatacgaactggttca

SEQ ID NO: 43292 - DNA, 25 bp, Saccharomyces pastorianus
gaatcctgcctttgatattactccg

SEQ ID NO: 43293 - DNA, 25 bp, Saccharomyces pastorianus
tgacattgacgtctggaatcctgcc

SEQ ID NO: 43294 - DNA, 25 bp, Saccharomyces pastorianus
gtcgttgatcctgaagatggctctt

SEQ ID NO: 43295 - DNA, 25 bp, Saccharomyces pastorianus
taactggcacagtcgttgatcctga

SEQ ID NO: 43296 - DNA, 25 bp, Saccharomyces pastorianus
gatggctctttgattctgaatgaat

SEQ ID NO: 43297 - DNA, 25 bp, Saccharomyces pastorianus
gttcaactccgattaaggcagcgtt

SEQ ID NO: 43298 - DNA, 25 bp, Saccharomyces pastorianus
ttaatatcggttggcctaacccgct

SEQ ID NO: 43299 - DNA, 25 bp, Saccharomyces pastorianus
gcggcattgatcctctacacgataa

SEQ ID NO: 43300 - DNA, 25 bp, Saccharomyces pastorianus
gtaacctcgcttttcatagcggcaa

SEQ ID NO: 43301 - DNA, 25 bp, Saccharomyces pastorianus
gggcagcctccaaaaacgacataaa

SEQ ID NO: 43302 - DNA, 25 bp, Saccharomyces pastorianus
gatcggtctatttccaaacttctaa

SEQ ID NO: 43303 - DNA, 25 bp, Saccharomyces pastorianus
ttctagagtatgcttgctgctgcca

SEQ ID NO: 43304 - DNA, 25 bp, Saccharomyces pastorianus
tggaacactacagcggcggcattga

SEQ ID NO: 43305 - DNA, 25 bp, Saccharomyces pastorianus
cgagtactcttacatcaccgatggg

SEQ ID NO: 43306 - DNA, 25 bp, Saccharomyces pastorianus
ttgcccaaattagccgagtactctt

SEQ ID NO: 43307 - DNA, 25 bp, Saccharomyces pastorianus
ggcctaacccgctcaattttttgag

SEQ ID NO: 43308 - DNA, 25 bp, Saccharomyces pastorianus
taatggacagatttttggcccaaaa

SEQ ID NO: 43309 - DNA, 25 bp, Saccharomyces pastorianus
tattcccaatcaccagccgagataa

SEQ ID NO: 43310 - DNA, 25 bp, Saccharomyces pastorianus
aacgatgtgtcaacacggttccggt

SEQ ID NO: 43311 - DNA, 25 bp, Saccharomyces pastorianus
gttgtaccacagttattcttcatta

SEQ ID NO: 43312 - DNA, 25 bp, Saccharomyces pastorianus
agagatttctttagactccacgaag

SEQ ID NO: 43313 - DNA, 25 bp, Saccharomyces pastorianus
agttggacttgatactggctacccc

SEQ ID NO: 43314 - DNA, 25 bp, Saccharomyces pastorianus
gctccaacctgataccaacttatta

SEQ ID NO: 43315 - DNA, 25 bp, Saccharomyces pastorianus
ggatatccacaaactagctacggtt

SEQ ID NO: 43316 - DNA, 25 bp, Saccharomyces pastorianus
cggttccggtgtgccaagtaacgag

SEQ ID NO: 43317 - DNA, 25 bp, Saccharomyces pastorianus
atgaggatgatcgtgctgctgacta

SEQ ID NO: 43318 - DNA, 25 bp, Saccharomyces pastorianus
gtacgggcccaatatgattcacctt

SEQ ID NO: 43319 - DNA, 25 bp, Saccharomyces pastorianus
tcaccttgaacctttgttgtaccac

SEQ ID NO: 43320 - DNA, 25 bp, Saccharomyces pastorianus
ctacgtttgtttgcatctgcatgct

SEQ ID NO: 43321 - DNA, 25 bp, Saccharomyces pastorianus
gatagagcactcaatgcagctgcaa

SEQ ID NO: 43322 - DNA, 25 bp, Saccharomyces pastorianus
gaaataccgattcccattccaatgg

SEQ ID NO: 43323 - DNA, 25 bp, Saccharomyces pastorianus
gaaaaagccctatcgctggcacatg

SEQ ID NO: 43324 - DNA, 25 bp, Saccharomyces pastorianus
gagagagctgaactaacttccctag

SEQ ID NO: 43325 - DNA, 25 bp, Saccharomyces pastorianus
gattagaatgccagtcctcgtaaaa

SEQ ID NO: 43326 - DNA, 25 bp, Saccharomyces pastorianus
gcattgttgacagacacgcttgaaa

SEQ ID NO: 43327 - DNA, 25 bp, Saccharomyces pastorianus
atttgcgttctaaagttttgtcagc

SEQ ID NO: 43328 - DNA, 25 bp, Saccharomyces pastorianus
acacgtatggcctttgagcttgaca

SEQ ID NO: 43329 - DNA, 25 bp, Saccharomyces pastorianus
tatatggccggaatttccccttcct

SEQ ID NO: 43330 - DNA, 25 bp, Saccharomyces pastorianus
cgataaggctttgctacgtttgttt

SEQ ID NO: 43331 - DNA, 25 bp, Saccharomyces pastorianus
tcgccaagttcttcgcacattaatg

SEQ ID NO: 43332 - DNA, 25 bp, Saccharomyces pastorianus
aaacgggagcgcaatcttatggtac

SEQ ID NO: 43333 - DNA, 25 bp, Saccharomyces pastorianus
aggtctacagcgagtactgcatcga

SEQ ID NO: 43334 - DNA, 25 bp, Saccharomyces pastorianus
acctcgttgatttggctggttcgga

SEQ ID NO: 43335 - DNA, 25 bp, Saccharomyces pastorianus
actgcatcgaacgagcattcttctc

SEQ ID NO: 43336 - DNA, 25 bp, Saccharomyces pastorianus
tagtgctaagagacatatacccttt

SEQ ID NO: 43337 - DNA, 25 bp, Saccharomyces pastorianus
attcttctcgttcgcacagtatttt

SEQ ID NO: 43338 - DNA, 25 bp, Saccharomyces pastorianus
gtttgttaacatctcgccaagttct

SEQ ID NO: 43339 - DNA, 25 bp, Saccharomyces pastorianus
gttattcatgcgctaggtcaacctg

SEQ ID NO: 43340 - DNA, 25 bp, Saccharomyces pastorianus
aaaattgacgtacctactacagtat

SEQ ID NO: 43341 - DNA, 25 bp, Saccharomyces pastorianus
cttatggtacattgaacctcgttga

SEQ ID NO: 43342 - DNA, 25 bp, Saccharomyces pastorianus
aaggaggccgacaacaatgacaaca

SEQ ID NO: 43343 - DNA, 25 bp, Saccharomyces pastorianus
tggaaaacgaggtcgccactgccga

SEQ ID NO: 43344 - DNA, 25 bp, Saccharomyces pastorianus
atttccaattggtgtatttcagaca

SEQ ID NO: 43345 - DNA, 25 bp, Saccharomyces pastorianus
accctaaacccttagaggatgctct

SEQ ID NO: 43346 - DNA, 25 bp, Saccharomyces pastorianus
atgacaacactgcaaaccctaaacc

SEQ ID NO: 43347 - DNA, 25 bp, Saccharomyces pastorianus
aagaaggttcatgacttacgcagaa

SEQ ID NO: 43348 - DNA, 25 bp, Saccharomyces pastorianus
gaggatgctctcactactgaaaata

SEQ ID NO: 43349 - DNA, 25 bp, Saccharomyces pastorianus
gtcgccactgccgatgatagtgtta

SEQ ID NO: 43350 - DNA, 25 bp, Saccharomyces pastorianus
ggaagacgagtttgtctccaatact

SEQ ID NO: 43351 - DNA, 25 bp, Saccharomyces pastorianus
gaaaatccaaaaccagctaatcagc

SEQ ID NO: 43352 - DNA, 25 bp, Saccharomyces pastorianus
atcagccatcaattgaagattccga

SEQ ID NO: 43353 - DNA, 25 bp, Saccharomyces pastorianus
gcagcatcagcagatctccaagcaa

SEQ ID NO: 43354 - DNA, 25 bp, Saccharomyces pastorianus
ggaactccaagctcttcaaaaacgt

SEQ ID NO: 43355 - DNA, 25 bp, Saccharomyces pastorianus
gttgaaaccctttgatagagcacta

SEQ ID NO: 43356 - DNA, 25 bp, Saccharomyces pastorianus
ggagcaccatgatattcgctagcgt

SEQ ID NO: 43357 - DNA, 25 bp, Saccharomyces pastorianus
atttctacgatttcaggtcgctgcc

SEQ ID NO: 43358 - DNA, 25 bp, Saccharomyces pastorianus
gtgcccaccactcaatatctggagg

SEQ ID NO: 43359 - DNA, 25 bp, Saccharomyces pastorianus
gaaagacgtcccttcatacatgatg

SEQ ID NO: 43360 - DNA, 25 bp, Saccharomyces pastorianus
tgccctacaactggtggtctacgtc

SEQ ID NO: 43361 - DNA, 25 bp, Saccharomyces pastorianus
gaagaagtctctgcagatgctccta

SEQ ID NO: 43362 - DNA, 25 bp, Saccharomyces pastorianus
ggtgaatcccataagacagcagcat

SEQ ID NO: 43363 - DNA, 25 bp, Saccharomyces pastorianus
atgtccggtggcgtaaacggcacgt

SEQ ID NO: 43364 - DNA, 25 bp, Saccharomyces pastorianus
gatgccattcctagtgtgtttacca

SEQ ID NO: 43365 - DNA, 25 bp, Saccharomyces pastorianus
gatcatactttaacactctgtccca

SEQ ID NO: 43366 - DNA, 25 bp, Saccharomyces pastorianus
gtgacacatcgtctgcacaatttga

SEQ ID NO: 43367 - DNA, 25 bp, Saccharomyces pastorianus
ctctgtcccataccatcaacaatga

SEQ ID NO: 43368 - DNA, 25 bp, Saccharomyces pastorianus
ggcgaatggcatattaccacaggat

SEQ ID NO: 43369 - DNA, 25 bp, Saccharomyces pastorianus
aaactatattagaccagggccattt

SEQ ID NO: 43370 - DNA, 25 bp, Saccharomyces pastorianus
gttgattctatacgcccaatttcat

SEQ ID NO: 43371 - DNA, 25 bp, Saccharomyces pastorianus
ggccatttatcaccctttgttgatt

SEQ ID NO: 43372 - DNA, 25 bp, Saccharomyces pastorianus
aaggatagcgtacttatctcaagaa

SEQ ID NO: 43373 - DNA, 25 bp, Saccharomyces pastorianus
attccgggccctaatgatctgtggg

SEQ ID NO: 43374 - DNA, 25 bp, Saccharomyces pastorianus
gatactgataccgttccaattgatg

SEQ ID NO: 43375 - DNA, 25 bp, Saccharomyces pastorianus
aaattcctctactagtgccttcaat

SEQ ID NO: 43376 - DNA, 25 bp, Saccharomyces pastorianus
aagaatgtctcaaggtgccactgcc

SEQ ID NO: 43377 - DNA, 25 bp, Saccharomyces pastorianus
gaggtaggtcagactctcattcccc

SEQ ID NO: 43378 - DNA, 25 bp, Saccharomyces pastorianus
gataccgatcagacaaccatactac

SEQ ID NO: 43379 - DNA, 25 bp, Saccharomyces pastorianus
gccactgccaaccatttagttgcga

SEQ ID NO: 43380 - DNA, 25 bp, Saccharomyces pastorianus
gacgaggacgaccatttgctaaatc

SEQ ID NO: 43381 - DNA, 25 bp, Saccharomyces pastorianus
aaggaatgtcggagctacctcctat

SEQ ID NO: 43382 - DNA, 25 bp, Saccharomyces pastorianus
aagcgaaatttcacaagcctgcgaa

SEQ ID NO: 43383 - DNA, 25 bp, Saccharomyces pastorianus
acagtatttcgagttctttcatcaa

SEQ ID NO: 43384 - DNA, 25 bp, Saccharomyces pastorianus
tacctcctatctttggcggtgagag

SEQ ID NO: 43385 - DNA, 25 bp, Saccharomyces pastorianus
ggatccaaaccatacataccataga

SEQ ID NO: 43386 - DNA, 25 bp, Saccharomyces pastorianus
gaggcagtttcggagcagacaccag

SEQ ID NO: 43387 - DNA, 25 bp, Saccharomyces pastorianus
caggacaccacgtagtgtattccgt

SEQ ID NO: 43388 - DNA, 25 bp, Saccharomyces pastorianus
agatagcagaagtggcagtctcaga

SEQ ID NO: 43389 - DNA, 25 bp, Saccharomyces pastorianus
tagcaacgccactgacagtggtcgt

SEQ ID NO: 43390 - DNA, 25 bp, Saccharomyces pastorianus
gaacagacgccagactcacagaaag

SEQ ID NO: 43391 - DNA, 25 bp, Saccharomyces pastorianus
agcagacaccagactcacaagaagt

SEQ ID NO: 43392 - DNA, 25 bp, Saccharomyces pastorianus
gttttttcgcctgttgtgacagcag

SEQ ID NO: 43393 - DNA, 25 bp, Saccharomyces pastorianus
ggcagtctcagaacagacgccagac

SEQ ID NO: 43394 - DNA, 25 bp, Saccharomyces pastorianus
atcaaagaagttttttcgcctgttg

SEQ ID NO: 43395 - DNA, 25 bp, Saccharomyces pastorianus
gtgtattccgtagcaacgccactga

SEQ ID NO: 43396 - DNA, 25 bp, Saccharomyces pastorianus
ttgctttgttggtttattagtggaa

SEQ ID NO: 43397 - DNA, 25 bp, Saccharomyces pastorianus
ggcagctgttctaatcaagatattg

SEQ ID NO: 43398 - DNA, 25 bp, Saccharomyces pastorianus
ggacaagttagtcttttctggtctt

SEQ ID NO: 43399 - DNA, 25 bp, Saccharomyces pastorianus
ggctaacttatcttctagaaccttt

SEQ ID NO: 43400 - DNA, 25 bp, Saccharomyces pastorianus
gacttggcaatcttaccatccaaac

SEQ ID NO: 43401 - DNA, 25 bp, Saccharomyces pastorianus
aaacggtccttgtccatcaatgaga

SEQ ID NO: 43402 - DNA, 25 bp, Saccharomyces pastorianus
gtaatgcttcattcttggcagctgt

SEQ ID NO: 43403 - DNA, 25 bp, Saccharomyces pastorianus
gttagtcttttctggtcttggtagt

SEQ ID NO: 43404 - DNA, 25 bp, Saccharomyces pastorianus
tcaaagccttcactaaacggtcctt

SEQ ID NO: 43405 - DNA, 25 bp, Saccharomyces pastorianus
ctcttgcttctatttgctttcttag

SEQ ID NO: 43406 - DNA, 25 bp, Saccharomyces pastorianus
tatttatctttttacccctcttgct

SEQ ID NO: 43407 - DNA, 25 bp, Saccharomyces pastorianus
gaaatctttgcttccagtaatgctt

SEQ ID NO: 43408 - DNA, 25 bp, Saccharomyces pastorianus
gacgtgtttgagtcttcaactgaga

SEQ ID NO: 43409 - DNA, 25 bp, Saccharomyces pastorianus
gactaacttgtccaatatcttgatt

SEQ ID NO: 43410 - DNA, 25 bp, Saccharomyces pastorianus
gagttggctcttttaagcggaggtt

SEQ ID NO: 43411 - DNA, 25 bp, Saccharomyces pastorianus
tggtaagattgccaagtccatttct

SEQ ID NO: 43412 - DNA, 25 bp, Saccharomyces pastorianus
gttagccaattctatctcattgatg

SEQ ID NO: 43413 - DNA, 25 bp, Saccharomyces pastorianus
ggctttgaatttcaccaatcgtttg

SEQ ID NO: 43414 - DNA, 25 bp, Saccharomyces pastorianus
ataccgatgaagacgacctgaacaa

SEQ ID NO: 43415 - DNA, 25 bp, Saccharomyces pastorianus
gacaaggaccgtttagtgaaggctt

SEQ ID NO: 43416 - DNA, 25 bp, Saccharomyces pastorianus
gatttaaccgaactaccaagaccag

SEQ ID NO: 43417 - DNA, 25 bp, Saccharomyces pastorianus
aggttattccgcgaaggccaagaat

SEQ ID NO: 43418 - DNA, 25 bp, Saccharomyces pastorianus
tctcgtgccaagtacgtccagaaca

SEQ ID NO: 43419 - DNA, 25 bp, Saccharomyces pastorianus
tagatactgtcaacgtgggactcgt

SEQ ID NO: 43420 - DNA, 25 bp, Saccharomyces pastorianus
atatttgcacggtacgatcctgaaa

SEQ ID NO: 43421 - DNA, 25 bp, Saccharomyces pastorianus
aggatgtgaacgcactttattcggg

SEQ ID NO: 43422 - DNA, 25 bp, Saccharomyces pastorianus
gagactttcacgagagcggaaccaa

SEQ ID NO: 43423 - DNA, 25 bp, Saccharomyces pastorianus
tcaaatgtagtggtcggtatcggcg

SEQ ID NO: 43424 - DNA, 25 bp, Saccharomyces pastorianus
tccaacggtctcaatgtcctagatg

SEQ ID NO: 43425 - DNA, 25 bp, Saccharomyces pastorianus
gggaagaccaccagattatcttatc

SEQ ID NO: 43426 - DNA, 25 bp, Saccharomyces pastorianus
gatatgtggctgatggacctggaat

SEQ ID NO: 43427 - DNA, 25 bp, Saccharomyces pastorianus
gcgggacttctttgcagtgtgacaa

SEQ ID NO: 43428 - DNA, 25 bp, Saccharomyces pastorianus
gacatggacacctatagagactttc

SEQ ID NO: 43429 - DNA, 25 bp, Saccharomyces pastorianus
tactacatggaggttccaacggtct

SEQ ID NO: 43430 - DNA, 25 bp, Saccharomyces pastorianus
gaacaaacgccgctgaccgggatga

SEQ ID NO: 43431 - DNA, 25 bp, Saccharomyces pastorianus
ttgaaaaaactgctccttccgttgc

SEQ ID NO: 43432 - DNA, 25 bp, Saccharomyces pastorianus
atggctgacaattcatctggatcac

SEQ ID NO: 43433 - DNA, 25 bp, Saccharomyces pastorianus
caaacatggagttcgtccttggata

SEQ ID NO: 43434 - DNA, 25 bp, Saccharomyces pastorianus
ctcaggcttgaaacctccggtaaat

SEQ ID NO: 43435 - DNA, 25 bp, Saccharomyces pastorianus
aataacacacctttcccaggatatt

SEQ ID NO: 43436 - DNA, 25 bp, Saccharomyces pastorianus
gaaaagctgtcatcggcagccgcag

SEQ ID NO: 43437 - DNA, 25 bp, Saccharomyces pastorianus
gatgaatgctacaccaatggctgac

SEQ ID NO: 43438 - DNA, 25 bp, Saccharomyces pastorianus
gcagccgcagttagccaaaatttgg

SEQ ID NO: 43439 - DNA, 25 bp, Saccharomyces pastorianus
gaaatccagatttcctcaggcttga

SEQ ID NO: 43440 - DNA, 25 bp, Saccharomyces pastorianus
ttggactaccataccgttttacagc

SEQ ID NO: 43441 - DNA, 25 bp, Saccharomyces pastorianus
gggcattttccttaggcttgcataa

SEQ ID NO: 43442 - DNA, 25 bp, Saccharomyces pastorianus
gtcaacctgtatagaagccatccaa

SEQ ID NO: 43443 - DNA, 25 bp, Saccharomyces pastorianus
gaatctcttttgtctgtcaggcttg

SEQ ID NO: 43444 - DNA, 25 bp, Saccharomyces pastorianus
gtacgcttcagactccagataacgg

SEQ ID NO: 43445 - DNA, 25 bp, Saccharomyces pastorianus
gaaaccggaatgtggccgatgcatc

SEQ ID NO: 43446 - DNA, 25 bp, Saccharomyces pastorianus
aagatcggcaagtcctaccaataca

SEQ ID NO: 43447 - DNA, 25 bp, Saccharomyces pastorianus
ggcacccagaattcccagtaaagat

SEQ ID NO: 43448 - DNA, 25 bp, Saccharomyces pastorianus
gcttgcataaaaccacgcctggatt

SEQ ID NO: 43449 - DNA, 25 bp, Saccharomyces pastorianus
tggaaaacttgtaccagcaggattt

SEQ ID NO: 43450 - DNA, 25 bp, Saccharomyces pastorianus
agctatgaaactgctcaccgagaga

SEQ ID NO: 43451 - DNA, 25 bp, Saccharomyces pastorianus
tacgacgtatcgaagcaaccggcac

SEQ ID NO: 43452 - DNA, 25 bp, Saccharomyces pastorianus
taatagccacgggttcttcagaaca

SEQ ID NO: 43453 - DNA, 25 bp, Saccharomyces pastorianus
acatctcctcattaatagccacggg

SEQ ID NO: 43454 - DNA, 25 bp, Saccharomyces pastorianus
gtacacattcatagagaccgcctta

SEQ ID NO: 43455 - DNA, 25 bp, Saccharomyces pastorianus
gatcttcaaatcgacaagtctgagg

SEQ ID NO: 43456 - DNA, 25 bp, Saccharomyces pastorianus
acactcacaatctgtaatgatggag

SEQ ID NO: 43457 - DNA, 25 bp, Saccharomyces pastorianus
atcagaatcttttattacaccttaa

SEQ ID NO: 43458 - DNA, 25 bp, Saccharomyces pastorianus
ctctggatggtcaaaatctggtgct

SEQ ID NO: 43459 - DNA, 25 bp, Saccharomyces pastorianus
atagattcctacatctcctcattaa

SEQ ID NO: 43460 - DNA, 25 bp, Saccharomyces pastorianus
accgccttagagtccataatagatt

SEQ ID NO: 43461 - DNA, 25 bp, Saccharomyces pastorianus
aaaaccggataaatactctggatgg

SEQ ID NO: 43462 - DNA, 25 bp, Saccharomyces pastorianus
aataacgttttccatattctacaga

SEQ ID NO: 43463 - DNA, 25 bp, Saccharomyces pastorianus
gttcaccatcaatgtcactagtaag

SEQ ID NO: 43464 - DNA, 25 bp, Saccharomyces pastorianus
gaagacatctctaggtggcatggcc

SEQ ID NO: 43465 - DNA, 25 bp, Saccharomyces pastorianus
aggtggcatggcctgcaattgacca

SEQ ID NO: 43466 - DNA, 25 bp, Saccharomyces pastorianus
acgtatccggtggttgcgggtccat

SEQ ID NO: 43467 - DNA, 25 bp, Saccharomyces pastorianus
gcaccagctggtaaataggatcctg

SEQ ID NO: 43468 - DNA, 25 bp, Saccharomyces pastorianus
gttgcgggtccatgttcaccatcaa

SEQ ID NO: 43469 - DNA, 25 bp, Saccharomyces pastorianus
caacaggagctgcagccggaagctt

SEQ ID NO: 43470 - DNA, 25 bp, Saccharomyces pastorianus
gtaagaagtttaacgggctgactct

SEQ ID NO: 43471 - DNA, 25 bp, Saccharomyces pastorianus
ggtactctacgcaggtggccatgac

SEQ ID NO: 43472 - DNA, 25 bp, Saccharomyces pastorianus
gggccaaagctgtggtactctacgc

SEQ ID NO: 43473 - DNA, 25 bp, Saccharomyces pastorianus
agcttgctggccaaggatcctaacg

SEQ ID NO: 43474 - DNA, 25 bp, Saccharomyces pastorianus
agggccttacctctgcagagacaca

SEQ ID NO: 43475 - DNA, 25 bp, Saccharomyces pastorianus
atccatgcgttgcagctgtcattga

SEQ ID NO: 43476 - DNA, 25 bp, Saccharomyces pastorianus
gggtgtgaaactaccacagcgccac

SEQ ID NO: 43477 - DNA, 25 bp, Saccharomyces pastorianus
gactcgtacaagcacaagggccatg

SEQ ID NO: 43478 - DNA, 25 bp, Saccharomyces pastorianus
ttttgcaagacgagctggcccagac

SEQ ID NO: 43479 - DNA, 25 bp, Saccharomyces pastorianus
tagtttcccagactacaggtccttt

SEQ ID NO: 43480 - DNA, 25 bp, Saccharomyces pastorianus
aagcaatgagcaccgagggtcccat

SEQ ID NO: 43481 - DNA, 25 bp, Saccharomyces pastorianus
aggtcctttgcgtttggactgtaca

SEQ ID NO: 43482 - DNA, 25 bp, Saccharomyces pastorianus
cagagacacacttccggatcgagat

SEQ ID NO: 43483 - DNA, 25 bp, Saccharomyces pastorianus
tggcgcaggccatcttaaaacaact

SEQ ID NO: 43484 - DNA, 25 bp, Saccharomyces pastorianus
gtatggtgtactcccttttgcaaga

SEQ ID NO: 43485 - DNA, 25 bp, Saccharomyces pastorianus
gaacaagctgcccttcttgtactca

SEQ ID NO: 43486 - DNA, 25 bp, Saccharomyces pastorianus
agactatggactactcgcatgcctg

SEQ ID NO: 43487 - DNA, 25 bp, Saccharomyces pastorianus
gacctatgtcgagctgccagacgtg

SEQ ID NO: 43488 - DNA, 25 bp, Saccharomyces pastorianus
gagtctgtcaaatcagcctcggaga

SEQ ID NO: 43489 - DNA, 25 bp, Saccharomyces pastorianus
ggccgtgagatacacagctcagcat

SEQ ID NO: 43490 - DNA, 25 bp, Saccharomyces pastorianus
gacaaaatcgccttcgtcgggatca

SEQ ID NO: 43491 - DNA, 25 bp, Saccharomyces pastorianus
gatcacgaagtatgctaccgacgcc

SEQ ID NO: 43492 - DNA, 25 bp, Saccharomyces pastorianus
atcccagggaccacaggccgtgaga

SEQ ID NO: 43493 - DNA, 25 bp, Saccharomyces pastorianus
gagatcaacacccacctggaggaga

SEQ ID NO: 43494 - DNA, 25 bp, Saccharomyces pastorianus
gaaacaactccagcaacgctctgaa

SEQ ID NO: 43495 - DNA, 25 bp, Saccharomyces pastorianus
ccgtgggcaggctgtttctaagaaa

SEQ ID NO: 43496 - DNA, 25 bp, Saccharomyces pastorianus
tacaacaagtggtccctgcaggtgc

SEQ ID NO: 43497 - DNA, 25 bp, Saccharomyces pastorianus
aacgaggaatggttcttccagacct

SEQ ID NO: 43498 - DNA, 25 bp, Saccharomyces pastorianus
agctaaactaccttaccaggctgac

SEQ ID NO: 43499 - DNA, 25 bp, Saccharomyces pastorianus
taccaggctgaccacgaagttgttt

SEQ ID NO: 43500 - DNA, 25 bp, Saccharomyces pastorianus
gggttccagacgctcaagttccttg

SEQ ID NO: 43501 - DNA, 25 bp, Saccharomyces pastorianus
tggctccacgtccttataagactgg

SEQ ID NO: 43502 - DNA, 25 bp, Saccharomyces pastorianus
aagttgtttgagctgtccaaccgcc

SEQ ID NO: 43503 - DNA, 25 bp, Saccharomyces pastorianus
aagttccttgtcatgttcagacccc

SEQ ID NO: 43504 - DNA, 25 bp, Saccharomyces pastorianus
gaattgcagcccaggaggccagcga

SEQ ID NO: 43505 - DNA, 25 bp, Saccharomyces pastorianus
gcctgatcatcgagtggctcaacga

SEQ ID NO: 43506 - DNA, 25 bp, Saccharomyces pastorianus
ttcatccaggacttcgagcagcgcg

SEQ ID NO: 43507 - DNA, 25 bp, Saccharomyces pastorianus
ggacctcttcatggtgtttgtgtat

SEQ ID NO: 43508 - DNA, 25 bp, Saccharomyces pastorianus
tatctcgatgtgtcgtgctctgctg

SEQ ID NO: 43509 - DNA, 25 bp, Saccharomyces pastorianus
gaactctctttcgatctgctttatt

SEQ ID NO: 43510 - DNA, 25 bp, Saccharomyces pastorianus
gtgctgggaactctctttcgatctg

SEQ ID NO: 43511 - DNA, 25 bp, Saccharomyces pastorianus
cttcatggtgtttgtgtatctcgat

SEQ ID NO: 43512 - DNA, 25 bp, Saccharomyces pastorianus
tgctgtgctgggaactctctttcga

SEQ ID NO: 43513 - DNA, 25 bp, Saccharomyces pastorianus
cgatctgctttattataacgtggtt

SEQ ID NO: 43514 - DNA, 25 bp, Saccharomyces pastorianus
gcaacgtggacctcttcatggtgtt

SEQ ID NO: 43515 - DNA, 25 bp, Saccharomyces pastorianus
gtttgtgtatctcgatgtgtcgtgc

SEQ ID NO: 43516 - DNA, 25 bp, Saccharomyces pastorianus
gtcgtgctctgctgtgctgggaact

SEQ ID NO: 43517 - DNA, 25 bp, Saccharomyces pastorianus
ctctctttcgatctgctttattata

SEQ ID NO: 43518 - DNA, 25 bp, Saccharomyces pastorianus
tccagttgcagctccccagagtcgt

SEQ ID NO: 43519 - DNA, 25 bp, Saccharomyces pastorianus
gagtcgtccatgatgtcgaggttca

SEQ ID NO: 43520 - DNA, 25 bp, Saccharomyces pastorianus
ccagagtcgtccatgatgtcgaggt

SEQ ID NO: 43521 - DNA, 25 bp, Saccharomyces pastorianus
tccccagagtcgtccatgatgtcga

SEQ ID NO: 43522 - DNA, 25 bp, Saccharomyces pastorianus
agctccccagagtcgtccatgatgt

SEQ ID NO: 43523 - DNA, 25 bp, Saccharomyces pastorianus
accaggtcgcatggcatcgacggga

SEQ ID NO: 43524 - DNA, 25 bp, Saccharomyces pastorianus
gtcgcatggcatcgacgggaacgtc

SEQ ID NO: 43525 - DNA, 25 bp, Saccharomyces pastorianus
cgtccatgatgtcgaggttcaccag

SEQ ID NO: 43526 - DNA, 25 bp, Saccharomyces pastorianus
tgatgtcgaggttcaccaggtcgca

SEQ ID NO: 43527 - DNA, 25 bp, Saccharomyces pastorianus
tccatgatgtcgaggttcaccaggt

SEQ ID NO: 43528 - DNA, 25 bp, Saccharomyces pastorianus
atgtcgaggttcaccaggtcgcatg

SEQ ID NO: 43529 - DNA, 25 bp, Saccharomyces pastorianus
cgtaagtgtcgttgtccttcaagat

SEQ ID NO: 43530 - DNA, 25 bp, Saccharomyces pastorianus
aagtgtcgttgtccttcaagatacc

SEQ ID NO: 43531 - DNA, 25 bp, Saccharomyces pastorianus
agacgtaagtgtcgttgtccttcaa

SEQ ID NO: 43532 - DNA, 25 bp, Saccharomyces pastorianus
tgtcgttgtccttcaagataccgaa

SEQ ID NO: 43533 - DNA, 25 bp, Saccharomyces pastorianus
gtgtcgttgtccttcaagataccga

SEQ ID NO: 43534 - DNA, 25 bp, Saccharomyces pastorianus
gacgtaagtgtcgttgtccttcaag

SEQ ID NO: 43535 - DNA, 25 bp, Saccharomyces pastorianus
ccttggatggagacgtaagtgtcgt

SEQ ID NO: 43536 - DNA, 25 bp, Saccharomyces pastorianus
gtaagtgtcgttgtccttcaagata

SEQ ID NO: 43537 - DNA, 25 bp, Saccharomyces pastorianus
ggagacgtaagtgtcgttgtccttc

SEQ ID NO: 43538 - DNA, 25 bp, Saccharomyces pastorianus
acgtaagtgtcgttgtccttcaaga

SEQ ID NO: 43539 - DNA, 25 bp, Saccharomyces pastorianus
agtgtcgttgtccttcaagataccg

SEQ ID NO: 43540 - DNA, 25 bp, Saccharomyces pastorianus
caagataccgaattccttagccttt

SEQ ID NO: 43541 - DNA, 25 bp, Saccharomyces pastorianus
agcaccggccttgaaaccttggatg

SEQ ID NO: 43542 - DNA, 25 bp, Saccharomyces pastorianus
gaggttggctttggagtacagtttc

SEQ ID NO: 43543 - DNA, 25 bp, Saccharomyces pastorianus
ataccgaagttgatacgggcttcaa

SEQ ID NO: 43544 - DNA, 25 bp, Saccharomyces pastorianus
gacaatgatagccttggccttttgt

SEQ ID NO: 43545 - DNA, 25 bp, Saccharomyces pastorianus
gacagtttggtctgtacttggaaac

SEQ ID NO: 43546 - DNA, 25 bp, Saccharomyces pastorianus
gagtacagtttctcatgtcatcgta

SEQ ID NO: 43547 - DNA, 25 bp, Saccharomyces pastorianus
agtgttggagtgaccagcaccggcc

SEQ ID NO: 43548 - DNA, 25 bp, Saccharomyces pastorianus
catgtcatcgtagtttggcaagtaa

SEQ ID NO: 43549 - DNA, 25 bp, Saccharomyces pastorianus
gccttggccttttgttcgaaaacag

SEQ ID NO: 43550 - DNA, 25 bp, Saccharomyces pastorianus
gaatgggaagacacctctgtacaag

SEQ ID NO: 43551 - DNA, 25 bp, Saccharomyces pastorianus
gaaacaggtcctttacaacagcaat

SEQ ID NO: 43552 - DNA, 25 bp, Saccharomyces pastorianus
aagaagttttcaccctcagcatccg

SEQ ID NO: 43553 - DNA, 25 bp, Saccharomyces pastorianus
aaaaaactgcctgatttctctccac

SEQ ID NO: 43554 - DNA, 25 bp, Saccharomyces pastorianus
aatattgcatccatggaggccatcc

SEQ ID NO: 43555 - DNA, 25 bp, Saccharomyces pastorianus
gtgctggctcaaacgctaaggctac

SEQ ID NO: 43556 - DNA, 25 bp, Saccharomyces pastorianus
gttgccgtttagaagaaccgatgct

SEQ ID NO: 43557 - DNA, 25 bp, Saccharomyces pastorianus
agtccacaccgtgccaagaagtttt

SEQ ID NO: 43558 - DNA, 25 bp, Saccharomyces pastorianus
ctaaggctaccttgcgatttgtatt

SEQ ID NO: 43559 - DNA, 25 bp, Saccharomyces pastorianus
ctagcatccccgaatttgaacagac

SEQ ID NO: 43560 - DNA, 25 bp, Saccharomyces pastorianus
ggaacgcaaagtgtactcaccgcaa

SEQ ID NO: 43561 - DNA, 25 bp, Saccharomyces pastorianus
tccgcgcctcatactaatattgcat

SEQ ID NO: 43562 - DNA, 25 bp, Saccharomyces pastorianus
agttgcaccgttttccaactctaat

SEQ ID NO: 43563 - DNA, 25 bp, Saccharomyces pastorianus
acgtgctatacttggacttatgttg

SEQ ID NO: 43564 - DNA, 25 bp, Saccharomyces pastorianus
ccttcttcttgtcttaacgtgctat

SEQ ID NO: 43565 - DNA, 25 bp, Saccharomyces pastorianus
atgccctgcagattctttgatgtcg

SEQ ID NO: 43566 - DNA, 25 bp, Saccharomyces pastorianus
ttgtttctgatcttagtggctattc

SEQ ID NO: 43567 - DNA, 25 bp, Saccharomyces pastorianus
aatggcatcatattagtctctgcat

SEQ ID NO: 43568 - DNA, 25 bp, Saccharomyces pastorianus
ctcgaagactttttctgaaggtgaa

SEQ ID NO: 43569 - DNA, 25 bp, Saccharomyces pastorianus
tagtctctgcattagttgcaccgtt

SEQ ID NO: 43570 - DNA, 25 bp, Saccharomyces pastorianus
tctgaaggtgaacccttcttcttgt

SEQ ID NO: 43571 - DNA, 25 bp, Saccharomyces pastorianus
tagtggctattcgatgccctgcaga

SEQ ID NO: 43572 - DNA, 25 bp, Saccharomyces pastorianus
gatgtcgatcccaaatggcatcata

SEQ ID NO: 43573 - DNA, 25 bp, Saccharomyces pastorianus
gttaacgtctattgaggataaagcc

SEQ ID NO: 43574 - DNA, 25 bp, Saccharomyces pastorianus
gccaacaaggtgaggaaggccatgt

SEQ ID NO: 43575 - DNA, 25 bp, Saccharomyces pastorianus
atgaaaatgtgtttggccctcgtga

SEQ ID NO: 43576 - DNA, 25 bp, Saccharomyces pastorianus
ttggccctcgtgatcatcattttgc

SEQ ID NO: 43577 - DNA, 25 bp, Saccharomyces pastorianus
taaagccgataacctggctgtctcc

SEQ ID NO: 43578 - DNA, 25 bp, Saccharomyces pastorianus
aaggccatgtggtataaggatttga

SEQ ID NO: 43579 - DNA, 25 bp, Saccharomyces pastorianus
gagaggtgaaaggttaacgtctatt

SEQ ID NO: 43580 - DNA, 25 bp, Saccharomyces pastorianus
gctgtctccgcgcaaggttttaaga

SEQ ID NO: 43581 - DNA, 25 bp, Saccharomyces pastorianus
atgtgtttggccctcgtgatcatca

SEQ ID NO: 43582 - DNA, 25 bp, Saccharomyces pastorianus
gatcatcattttgcttgtcgtcgtc

SEQ ID NO: 43583 - DNA, 25 bp, Saccharomyces pastorianus
gtctccgcgcaaggttttaagaggg

SEQ ID NO: 43584 - DNA, 25 bp, Saccharomyces pastorianus
atgtcgtcgtctactccctttgacc

SEQ ID NO: 43585 - DNA, 25 bp, Saccharomyces pastorianus
ctatgcccgagcaggatgaagagcg

SEQ ID NO: 43586 - DNA, 25 bp, Saccharomyces pastorianus
tgaagagcggcctcaaaatgttcag

SEQ ID NO: 43587 - DNA, 25 bp, Saccharomyces pastorianus
gcaggatgaagagcggcctcaaaat

SEQ ID NO: 43588 - DNA, 25 bp, Saccharomyces pastorianus
gacccttatgctatgcccgagcagg

SEQ ID NO: 43589 - DNA, 25 bp, Saccharomyces pastorianus
tactccctttgacccttatgctatg

SEQ ID NO: 43590 - DNA, 25 bp, Saccharomyces pastorianus
ctttgacccttatgctatgcccgag

SEQ ID NO: 43591 - DNA, 25 bp, Saccharomyces pastorianus
cgagcaggatgaagagcggcctcaa

SEQ ID NO: 43592 - DNA, 25 bp, Saccharomyces pastorianus
tatgctatgcccgagcaggatgaag

SEQ ID NO: 43593 - DNA, 25 bp, Saccharomyces pastorianus
ttgacccttatgctatgcccgagca

SEQ ID NO: 43594 - DNA, 25 bp, Saccharomyces pastorianus
cccttatgctatgcccgagcaggat

SEQ ID NO: 43595 - DNA, 25 bp, Saccharomyces pastorianus
gaagtatctggtgctttccatattc

SEQ ID NO: 43596 - DNA, 25 bp, Saccharomyces pastorianus
ggttctgttcgccaagctgaagtat

SEQ ID NO: 43597 - DNA, 25 bp, Saccharomyces pastorianus
gagcttcatgaaggtcccggaacag

SEQ ID NO: 43598 - DNA, 25 bp, Saccharomyces pastorianus
tgacgatgacgaccacgaccatgac

SEQ ID NO: 43599 - DNA, 25 bp, Saccharomyces pastorianus
tgttcctggtgttcacggccattac

SEQ ID NO: 43600 - DNA, 25 bp, Saccharomyces pastorianus
aaggaggcagctggtggcttcacca

SEQ ID NO: 43601 - DNA, 25 bp, Saccharomyces pastorianus
gaagagctccaactaaaggtcccct

SEQ ID NO: 43602 - DNA, 25 bp, Saccharomyces pastorianus
gacctgtgctacatgcttctgcagt

SEQ ID NO: 43603 - DNA, 25 bp, Saccharomyces pastorianus
tggaacctgggagacctgtacggca

SEQ ID NO: 43604 - DNA, 25 bp, Saccharomyces pastorianus
agtggcaacgaggaccgcaacggct

SEQ ID NO: 43605 - DNA, 25 bp, Saccharomyces pastorianus
tcatcttcacgctgtggaacctggg

SEQ ID NO: 43606 - DNA, 25 bp, Saccharomyces pastorianus
gcgactacaagctgcaccgggcgta

SEQ ID NO: 43607 - DNA, 25 bp, Saccharomyces pastorianus
atcgtcgaccgcatgaggctgaaca

SEQ ID NO: 43608 - DNA, 25 bp, Saccharomyces pastorianus
aggagcgccgcgacatggacatcgt

SEQ ID NO: 43609 - DNA, 25 bp, Saccharomyces pastorianus
agatgtgtctggagggctcgcatcc

SEQ ID NO: 43610 - DNA, 25 bp, Saccharomyces pastorianus
gtactactcgaagatcgccgcaatc

SEQ ID NO: 43611 - DNA, 25 bp, Saccharomyces pastorianus
tggacatcgtgatcccggacgtcaa

SEQ ID NO: 43612 - DNA, 25 bp, Saccharomyces pastorianus
gagggcgtgcgcaagtacttccact

SEQ ID NO: 43613 - DNA, 25 bp, Saccharomyces pastorianus
gagctggcatgcatcaacaccgaga

SEQ ID NO: 43614 - DNA, 25 bp, Saccharomyces pastorianus
ggtcgacaagctcgaggtcatcgtc

SEQ ID NO: 43615 - DNA, 25 bp, Saccharomyces pastorianus
gcatccggagttgcaggcgtactac

SEQ ID NO: 43616 - DNA, 25 bp, Saccharomyces pastorianus
acctggcctgcgagggcatcgagta

SEQ ID NO: 43617 - DNA, 25 bp, Saccharomyces pastorianus
actggcgaggttctaatatcttgga

SEQ ID NO: 43618 - DNA, 25 bp, Saccharomyces pastorianus
aagcctgcgctatgaactaaacgaa

SEQ ID NO: 43619 - DNA, 25 bp, Saccharomyces pastorianus
gcgctgagatcgtcttggagttttt

SEQ ID NO: 43620 - DNA, 25 bp, Saccharomyces pastorianus
aaaatagcgtttcacccatggacca

SEQ ID NO: 43621 - DNA, 25 bp, Saccharomyces pastorianus
gagtttaaccctcttttcgaagatg

SEQ ID NO: 43622 - DNA, 25 bp, Saccharomyces pastorianus
gaagctctaagtgaaagcctgcgct

SEQ ID NO: 43623 - DNA, 25 bp, Saccharomyces pastorianus
gcagttaaccgcatttcaacagaag

SEQ ID NO: 43624 - DNA, 25 bp, Saccharomyces pastorianus
ggattgtcatccataaccttaaaga

SEQ ID NO: 43625 - DNA, 25 bp, Saccharomyces pastorianus
gaagtacgttcatggcgctgagatc

SEQ ID NO: 43626 - DNA, 25 bp, Saccharomyces pastorianus
gaagatgattgtccgatcccacttt

SEQ ID NO: 43627 - DNA, 25 bp, Saccharomyces pastorianus
atactaagcaagagcctggactcga

SEQ ID NO: 43628 - DNA, 25 bp, Saccharomyces pastorianus
accgatcagtctttcagtgtctgtg

SEQ ID NO: 43629 - DNA, 25 bp, Saccharomyces pastorianus
agtctttcagtgtctgtgaacgcaa

SEQ ID NO: 43630 - DNA, 25 bp, Saccharomyces pastorianus
atcaccgatcagtctttcagtgtct

SEQ ID NO: 43631 - DNA, 25 bp, Saccharomyces pastorianus
acacagtgttcgaagggttcatagc

SEQ ID NO: 43632 - DNA, 25 bp, Saccharomyces pastorianus
gatcaaacgcttggcatcgaacaca

SEQ ID NO: 43633 - DNA, 25 bp, Saccharomyces pastorianus
acgcttggcatcgaacacagtgttc

SEQ ID NO: 43634 - DNA, 25 bp, Saccharomyces pastorianus
tcagtgtctgtgaacgcaacaaaag

SEQ ID NO: 43635 - DNA, 25 bp, Saccharomyces pastorianus
ggcggcatcaccgatcagtctttca

SEQ ID NO: 43636 - DNA, 25 bp, Saccharomyces pastorianus
ggcatcaccgatcagtctttcagtg

SEQ ID NO: 43637 - DNA, 25 bp, Saccharomyces pastorianus
gatcagtctttcagtgtctgtgaac

SEQ ID NO: 43638 - DNA, 25 bp, Saccharomyces pastorianus
gtctgtgaacgcaacaaaagatggg

SEQ ID NO: 43639 - DNA, 25 bp, Saccharomyces pastorianus
tgagtgtcaccagcggtggccttaa

SEQ ID NO: 43640 - DNA, 25 bp, Saccharomyces pastorianus
agcggtggccttaacttcgaagata

SEQ ID NO: 43641 - DNA, 25 bp, Saccharomyces pastorianus
ggccttaacttcgaagataccgtct

SEQ ID NO: 43642 - DNA, 25 bp, Saccharomyces pastorianus
atgagtgtcaccagcggtggcctta

SEQ ID NO: 43643 - DNA, 25 bp, Saccharomyces pastorianus
gccttaacttcgaagataccgtctt

SEQ ID NO: 43644 - DNA, 25 bp, Saccharomyces pastorianus
gtcaccagcggtggccttaacttcg

SEQ ID NO: 43645 - DNA, 25 bp, Saccharomyces pastorianus
gcggtggccttaacttcgaagatac

SEQ ID NO: 43646 - DNA, 25 bp, Saccharomyces pastorianus
gtggccttaacttcgaagataccgt

SEQ ID NO: 43647 - DNA, 25 bp, Saccharomyces pastorianus
acttcgaagataccgtcttcaatgg

SEQ ID NO: 43648 - DNA, 25 bp, Saccharomyces pastorianus
cagcggtggccttaacttcgaagat

SEQ ID NO: 43649 - DNA, 25 bp, Saccharomyces pastorianus
accagcggtggccttaacttcgaag

SEQ ID NO: 43650 - DNA, 25 bp, Saccharomyces pastorianus
cttgcaaactaacatcgaagaagat

SEQ ID NO: 43651 - DNA, 25 bp, Saccharomyces pastorianus
aaggctatcaccatggaaggtttga

SEQ ID NO: 43652 - DNA, 25 bp, Saccharomyces pastorianus
gacttgcaaactaacatcgaagaag

SEQ ID NO: 43653 - DNA, 25 bp, Saccharomyces pastorianus
caccgtcaaggctatcaccatggaa

SEQ ID NO: 43654 - DNA, 25 bp, Saccharomyces pastorianus
ggaagacttgcaaactaacatcgaa

SEQ ID NO: 43655 - DNA, 25 bp, Saccharomyces pastorianus
tcaaggctatcaccatggaaggttt

SEQ ID NO: 43656 - DNA, 25 bp, Saccharomyces pastorianus
accgtcaaggctatcaccatggaag

SEQ ID NO: 43657 - DNA, 25 bp, Saccharomyces pastorianus
ggctatcaccatggaaggtttgacc

SEQ ID NO: 43658 - DNA, 25 bp, Saccharomyces pastorianus
cgtcaaggctatcaccatggaaggt

SEQ ID NO: 43659 - DNA, 25 bp, Saccharomyces pastorianus
atggtcgccaccgtcaaggctatca

SEQ ID NO: 43660 - DNA, 25 bp, Saccharomyces pastorianus
ttctttggaagacttgcaaactaac

SEQ ID NO: 43661 - DNA, 25 bp, Saccharomyces pastorianus
gggtgctcaccaattcatcccaatt

SEQ ID NO: 43662 - DNA, 25 bp, Saccharomyces pastorianus
catcccaattggtttcggtatcaag

SEQ ID NO: 43663 - DNA, 25 bp, Saccharomyces pastorianus
gacttgcaaactaacatcgaagaag

SEQ ID NO: 43664 - DNA, 25 bp, Saccharomyces pastorianus
caccgtcaaggctatcaccatggaa

SEQ ID NO: 43665 - DNA, 25 bp, Saccharomyces pastorianus
ggaagacttgcaaactaacatcgaa

SEQ ID NO: 43666 - DNA, 25 bp, Saccharomyces pastorianus
tcaaggctatcaccatggaaggttt

SEQ ID NO: 43667 - DNA, 25 bp, Saccharomyces pastorianus
accgtcaaggctatcaccatggaag

SEQ ID NO: 43668 - DNA, 25 bp, Saccharomyces pastorianus
ggctatcaccatggaaggtttgacc

SEQ ID NO: 43669 - DNA, 25 bp, Saccharomyces pastorianus
cgtcaaggctatcaccatggaaggt

SEQ ID NO: 43670 - DNA, 25 bp, Saccharomyces pastorianus
atggtcgccaccgtcaaggctatca

SEQ ID NO: 43671 - DNA, 25 bp, Saccharomyces pastorianus
ttctttggaagacttgcaaactaac

SEQ ID NO: 43672 - DNA, 25 bp, Saccharomyces pastorianus
accgatttctctaagattgaaactt

SEQ ID NO: 43673 - DNA, 25 bp, Saccharomyces pastorianus
ttcaccgatttctctaagattgaaa

SEQ ID NO: 43674 - DNA, 25 bp, Saccharomyces pastorianus
ccgatttctctaagattgaaacttt

SEQ ID NO: 43675 - DNA, 25 bp, Saccharomyces pastorianus
tggcattcaccgatttctctaagat

SEQ ID NO: 43676 - DNA, 25 bp, Saccharomyces pastorianus
ggcattcaccgatttctctaagatt

SEQ ID NO: 43677 - DNA, 25 bp, Saccharomyces pastorianus
cgatttctctaagattgaaactttg

SEQ ID NO: 43678 - DNA, 25 bp, Saccharomyces pastorianus
attcaccgatttctctaagattgaa

SEQ ID NO: 43679 - DNA, 25 bp, Saccharomyces pastorianus
caccgatttctctaagattgaaact

SEQ ID NO: 43680 - DNA, 25 bp, Saccharomyces pastorianus
tcaccgatttctctaagattgaaac

SEQ ID NO: 43681 - DNA, 25 bp, Saccharomyces pastorianus
atggcattcaccgatttctctaaga

SEQ ID NO: 43682 - DNA, 25 bp, Saccharomyces pastorianus
tgaaactttgaaacaattaaacgct

SEQ ID NO: 43683 - DNA, 25 bp, Saccharomyces pastorianus
ataatgtctttcgttcttgaacacc

SEQ ID NO: 43684 - DNA, 25 bp, Saccharomyces pastorianus
gatgattgtaattccgctgctactg

SEQ ID NO: 43685 - DNA, 25 bp, Saccharomyces pastorianus
taaatgtcatcacggttttcaccag

SEQ ID NO: 43686 - DNA, 25 bp, Saccharomyces pastorianus
agacttgtctcgaaaacctagccca

SEQ ID NO: 43687 - DNA, 25 bp, Saccharomyces pastorianus
agtttagatctcgaaacgccgcttg

SEQ ID NO: 43688 - DNA, 25 bp, Saccharomyces pastorianus
agtcctgttggatattcttgattac

SEQ ID NO: 43689 - DNA, 25 bp, Saccharomyces pastorianus
aagactcttcgcaggatcttgttca

SEQ ID NO: 43690 - DNA, 25 bp, Saccharomyces pastorianus
ggttagatccaaaagttcctctcaa

SEQ ID NO: 43691 - DNA, 25 bp, Saccharomyces pastorianus
agatcgctctctgagttactccaaa

SEQ ID NO: 43692 - DNA, 25 bp, Saccharomyces pastorianus
gaaacgccgcttgtcatatttaaat

SEQ ID NO: 43693 - DNA, 25 bp, Saccharomyces pastorianus
aggtgcagcgccatcgggatatgat

SEQ ID NO: 43694 - DNA, 25 bp, Saccharomyces pastorianus
tcgtcatcgatcaagaaccgtctga

SEQ ID NO: 43695 - DNA, 25 bp, Saccharomyces pastorianus
gattgatctaatttctaacgaccta

SEQ ID NO: 43696 - DNA, 25 bp, Saccharomyces pastorianus
gattgtcaagattccactcggcaaa

SEQ ID NO: 43697 - DNA, 25 bp, Saccharomyces pastorianus
aagcaggttgttactatcgtcgtca

SEQ ID NO: 43698 - DNA, 25 bp, Saccharomyces pastorianus
ggttacaagttaaatgccgtgacgt

SEQ ID NO: 43699 - DNA, 25 bp, Saccharomyces pastorianus
gacggttctggtgccattaggccaa

SEQ ID NO: 43700 - DNA, 25 bp, Saccharomyces pastorianus
tgttcggccattaacttatacttcg

SEQ ID NO: 43701 - DNA, 25 bp, Saccharomyces pastorianus
ctatctccatggttctagacttgaa

SEQ ID NO: 43702 - DNA, 25 bp, Saccharomyces pastorianus
cgtgacgtactttcgctcgatgaaa

SEQ ID NO: 43703 - DNA, 25 bp, Saccharomyces pastorianus
aaccgtctgacatatcttcctggat

SEQ ID NO: 43704 - DNA, 25 bp, Saccharomyces pastorianus
aagctggaaatggtatcgtcatcga

SEQ ID NO: 43705 - DNA, 25 bp, Saccharomyces pastorianus
ttgactatccaagaggcgatcgatt

SEQ ID NO: 43706 - DNA, 25 bp, Saccharomyces pastorianus
gggtgccaaactagccaaactggtg

SEQ ID NO: 43707 - DNA, 25 bp, Saccharomyces pastorianus
aaggatacgtcttgtctccaggtgg

SEQ ID NO: 43708 - DNA, 25 bp, Saccharomyces pastorianus
aattcatagcatatcctggtgatcc

SEQ ID NO: 43709 - DNA, 25 bp, Saccharomyces pastorianus
gaactacagcggttggacaaatcta

SEQ ID NO: 43710 - DNA, 25 bp, Saccharomyces pastorianus
gaccagctgatcgaatcttctttat

SEQ ID NO: 43711 - DNA, 25 bp, Saccharomyces pastorianus
gcgagccgatcgacttgatatctat

SEQ ID NO: 43712 - DNA, 25 bp, Saccharomyces pastorianus
gaccgcttaactaagtcgttcgatt

SEQ ID NO: 43713 - DNA, 25 bp, Saccharomyces pastorianus
tatcaacgacgagacttccgcagag

SEQ ID NO: 43714 - DNA, 25 bp, Saccharomyces pastorianus
attgccgacaattcttctatcctaa

SEQ ID NO: 43715 - DNA, 25 bp, Saccharomyces pastorianus
gtttccattcgcatttgactatcca

SEQ ID NO: 43716 - DNA, 25 bp, Saccharomyces pastorianus
gattcccaaaactctctttcaacaa

SEQ ID NO: 43717 - DNA, 25 bp, Saccharomyces pastorianus
ttaagggtaccttctaacaccaatg

SEQ ID NO: 43718 - DNA, 25 bp, Saccharomyces pastorianus
aagacgcaagataagcccaccccgg

SEQ ID NO: 43719 - DNA, 25 bp, Saccharomyces pastorianus
gcgtaaatagttcattttccggatt

SEQ ID NO: 43720 - DNA, 25 bp, Saccharomyces pastorianus
aatgtatccgatccaacttctaagc

SEQ ID NO: 43721 - DNA, 25 bp, Saccharomyces pastorianus
gaaatcagtggtattccatcatcta

SEQ ID NO: 43722 - DNA, 25 bp, Saccharomyces pastorianus
gcgtatcgctacattcatcatcaga

SEQ ID NO: 43723 - DNA, 25 bp, Saccharomyces pastorianus
aagcccctcgtatgccatttacaaa

SEQ ID NO: 43724 - DNA, 25 bp, Saccharomyces pastorianus
gaatggcgaaatccgattcccaaaa

SEQ ID NO: 43725 - DNA, 25 bp, Saccharomyces pastorianus
tgagttttcaccttcgtcatcggaa

SEQ ID NO: 43726 - DNA, 25 bp, Saccharomyces pastorianus
gaatggacgaacgattcaccttccg

SEQ ID NO: 43727 - DNA, 25 bp, Saccharomyces pastorianus
acagcaatggttcaaactcgcaagc

SEQ ID NO: 43728 - DNA, 25 bp, Saccharomyces pastorianus
attatattaaagcagcggaagtcca

SEQ ID NO: 43729 - DNA, 25 bp, Saccharomyces pastorianus
gcggaagtccaaaaacaggctctac

SEQ ID NO: 43730 - DNA, 25 bp, Saccharomyces pastorianus
acacattcagattcaccaaacagca

SEQ ID NO: 43731 - DNA, 25 bp, Saccharomyces pastorianus
atggtgcgtctgaatcatttagatt

SEQ ID NO: 43732 - DNA, 25 bp, Saccharomyces pastorianus
cacttctaatggtgcgtctgaatca

SEQ ID NO: 43733 - DNA, 25 bp, Saccharomyces pastorianus
atggttcaaactcgcaagccaccgg

SEQ ID NO: 43734 - DNA, 25 bp, Saccharomyces pastorianus
gatttggtatggacccaactgtgga

SEQ ID NO: 43735 - DNA, 25 bp, Saccharomyces pastorianus
aagccaccggcacttctaatggtgc

SEQ ID NO: 43736 - DNA, 25 bp, Saccharomyces pastorianus
aaaacaggctctacgggagtactgg

SEQ ID NO: 43737 - DNA, 25 bp, Saccharomyces pastorianus
gggaatgtctcctatacacattcag

SEQ ID NO: 43738 - DNA, 25 bp, Saccharomyces pastorianus
gtggcactcgtgttcgtgatttttt

SEQ ID NO: 43739 - DNA, 25 bp, Saccharomyces pastorianus
atcagcctgatgcacctttaatttc

SEQ ID NO: 43740 - DNA, 25 bp, Saccharomyces pastorianus
acagaggtatccctgatcagcctga

SEQ ID NO: 43741 - DNA, 25 bp, Saccharomyces pastorianus
cattcttctcgcatcgatggttgta

SEQ ID NO: 43742 - DNA, 25 bp, Saccharomyces pastorianus
gggactccatacttttttcattgtg

SEQ ID NO: 43743 - DNA, 25 bp, Saccharomyces pastorianus
caaggtttgcgatatcattcttctc

SEQ ID NO: 43744 - DNA, 25 bp, Saccharomyces pastorianus
aagtcattgttcttcccgtggacgt

SEQ ID NO: 43745 - DNA, 25 bp, Saccharomyces pastorianus
tagtgtttactttcgtggcactcgt

SEQ ID NO: 43746 - DNA, 25 bp, Saccharomyces pastorianus
tatatgccactctgttcaaatgcga

SEQ ID NO: 43747 - DNA, 25 bp, Saccharomyces pastorianus
gtaatagcgcataaaccaccagtag

SEQ ID NO: 43748 - DNA, 25 bp, Saccharomyces pastorianus
aagtcgtacttcacctatttattat

SEQ ID NO: 43749 - DNA, 25 bp, Saccharomyces pastorianus
gtgctgtgtttctttggtttcatca

SEQ ID NO: 43750 - DNA, 25 bp, Saccharomyces pastorianus
tacagaggatacaccaccagccgag

SEQ ID NO: 43751 - DNA, 25 bp, Saccharomyces pastorianus
ttccatgcgccaatctctgataaag

SEQ ID NO: 43752 - DNA, 25 bp, Saccharomyces pastorianus
agtttcatgatacctatggttccca

SEQ ID NO: 43753 - DNA, 25 bp, Saccharomyces pastorianus
gtgtactaggaaccttcttccatgc

SEQ ID NO: 43754 - DNA, 25 bp, Saccharomyces pastorianus
gacctttcactacgttgccgtttat

SEQ ID NO: 43755 - DNA, 25 bp, Saccharomyces pastorianus
gttctgacccgattctggaagcgta

SEQ ID NO: 43756 - DNA, 25 bp, Saccharomyces pastorianus
ggagggtccttcaaccaacgataat

SEQ ID NO: 43757 - DNA, 25 bp, Saccharomyces pastorianus
acaatacactgtcggatccttcaac

SEQ ID NO: 43758 - DNA, 25 bp, Saccharomyces pastorianus
gagtgccatagttttttccaagacc

SEQ ID NO: 43759 - DNA, 25 bp, Saccharomyces pastorianus
atggttcccattttattggctttga

SEQ ID NO: 43760 - DNA, 25 bp, Saccharomyces pastorianus
aagagcttcggctttgggcccgtca

SEQ ID NO: 43761 - DNA, 25 bp, Saccharomyces pastorianus
ggcacacgccaaatccgaggacatg

SEQ ID NO: 43762 - DNA, 25 bp, Saccharomyces pastorianus
aggacacctcggaccagaccaagat

SEQ ID NO: 43763 - DNA, 25 bp, Saccharomyces pastorianus
agaacgaacagtacctcacgggcat

SEQ ID NO: 43764 - DNA, 25 bp, Saccharomyces pastorianus
gggccgcgatgcagaacaacgtgtt

SEQ ID NO: 43765 - DNA, 25 bp, Saccharomyces pastorianus
ttcgcctcgctcatggagaagtcgc

SEQ ID NO: 43766 - DNA, 25 bp, Saccharomyces pastorianus
atctctgtagtcatgtcctcgaggc

SEQ ID NO: 43767 - DNA, 25 bp, Saccharomyces pastorianus
gtgacgttgcagtccaaacagtttg

SEQ ID NO: 43768 - DNA, 25 bp, Saccharomyces pastorianus
gcggcaacccgtgtctcaagagctt

SEQ ID NO: 43769 - DNA, 25 bp, Saccharomyces pastorianus
gttaagtcgctgctggaccaggaca

SEQ ID NO: 43770 - DNA, 25 bp, Saccharomyces pastorianus
atacgcgctctactgtatctggaac

SEQ ID NO: 43771 - DNA, 25 bp, Saccharomyces pastorianus
gggcatcaacttcgagcacacgggc

SEQ ID NO: 43772 - DNA, 25 bp, Saccharomyces pastorianus
cacggacatctacacggactcgatt

SEQ ID NO: 43773 - DNA, 25 bp, Saccharomyces pastorianus
acggactcgattctgagcttcgcgc

SEQ ID NO: 43774 - DNA, 25 bp, Saccharomyces pastorianus
caagctgcagctgatcgtgaccaag

SEQ ID NO: 43775 - DNA, 25 bp, Saccharomyces pastorianus
ttgtactccgtcatcatggacgcgg

SEQ ID NO: 43776 - DNA, 25 bp, Saccharomyces pastorianus
atcttcggcggcaacgattctgcgg

SEQ ID NO: 43777 - DNA, 25 bp, Saccharomyces pastorianus
aagaacgtcctggacatcttcggcg

SEQ ID NO: 43778 - DNA, 25 bp, Saccharomyces pastorianus
atgctgtgcggcacgtcgcatatca

SEQ ID NO: 43779 - DNA, 25 bp, Saccharomyces pastorianus
atctgcctggacgacgtggcctttg

SEQ ID NO: 43780 - DNA, 25 bp, Saccharomyces pastorianus
tcgcgcgcggcgtcactaagaacgt

SEQ ID NO: 43781 - DNA, 25 bp, Saccharomyces pastorianus
tcaacgtgcagacaggtacctgcct

SEQ ID NO: 43782 - DNA, 25 bp, Saccharomyces pastorianus
tattcaagaggaacacccggttacg

SEQ ID NO: 43783 - DNA, 25 bp, Saccharomyces pastorianus
ggctcacctgttgccatatttggcg

SEQ ID NO: 43784 - DNA, 25 bp, Saccharomyces pastorianus
atggtgactacgataaagctgctga

SEQ ID NO: 43785 - DNA, 25 bp, Saccharomyces pastorianus
atttggcgccaacagatagtcgttt

SEQ ID NO: 43786 - DNA, 25 bp, Saccharomyces pastorianus
aggccctcagtaccattcaatttaa

SEQ ID NO: 43787 - DNA, 25 bp, Saccharomyces pastorianus
ggacctcagccggtgcatatgaagt

SEQ ID NO: 43788 - DNA, 25 bp, Saccharomyces pastorianus
aagacaacaaactccactactggtg

SEQ ID NO: 43789 - DNA, 25 bp, Saccharomyces pastorianus
accactggtgactattgtatgttgc

SEQ ID NO: 43790 - DNA, 25 bp, Saccharomyces pastorianus
aaaactatgggttcttggtggacat

SEQ ID NO: 43791 - DNA, 25 bp, Saccharomyces pastorianus
gactttgaatgctttaccggctcac

SEQ ID NO: 43792 - DNA, 25 bp, Saccharomyces pastorianus
ataaggcacatggttggacctcagc

SEQ ID NO: 43793 - DNA, 25 bp, Saccharomyces pastorianus
tgctgtgactagctctgctgccaag

SEQ ID NO: 43794 - DNA, 25 bp, Saccharomyces pastorianus
ttctgctaccacatcgtctgatgta

SEQ ID NO: 43795 - DNA, 25 bp, Saccharomyces pastorianus
acttcttccacatcttctgctgtga

SEQ ID NO: 43796 - DNA, 25 bp, Saccharomyces pastorianus
gctctgctgccaagtcaggaatcat

SEQ ID NO: 43797 - DNA, 25 bp, Saccharomyces pastorianus
acatcttctgctgtgactagctctg

SEQ ID NO: 43798 - DNA, 25 bp, Saccharomyces pastorianus
tgtaaccagttcaacttcttccaca

SEQ ID NO: 43799 - DNA, 25 bp, Saccharomyces pastorianus
accagttcaacttcttccacatctt

SEQ ID NO: 43800 - DNA, 25 bp, Saccharomyces pastorianus
gctaccacatcgtctgatgtaacca

SEQ ID NO: 43801 - DNA, 25 bp, Saccharomyces pastorianus
actagctctgctgccaagtcaggaa

SEQ ID NO: 43802 - DNA, 25 bp, Saccharomyces pastorianus
ttccacatcttctgctgtgactagc

SEQ ID NO: 43803 - DNA, 25 bp, Saccharomyces pastorianus
tgctgccaagtcaggaatcatcact

SEQ ID NO: 43804 - DNA, 25 bp, Saccharomyces pastorianus
ctactgttacaggtcccaatggttt

SEQ ID NO: 43805 - DNA, 25 bp, Saccharomyces pastorianus
gatgcaaccagttctgctaccacat

SEQ ID NO: 43806 - DNA, 25 bp, Saccharomyces pastorianus
agacactcagacctctactgttaca

SEQ ID NO: 43807 - DNA, 25 bp, Saccharomyces pastorianus
tcttcaattgccacatcgtctgatg

SEQ ID NO: 43808 - DNA, 25 bp, Saccharomyces pastorianus
aagtgtcagctcttcaattgccaca

SEQ ID NO: 43809 - DNA, 25 bp, Saccharomyces pastorianus
ggaataatcaccaccacaacagaac

SEQ ID NO: 43810 - DNA, 25 bp, Saccharomyces pastorianus
tgttacaggtcccaatggtttacca

SEQ ID NO: 43811 - DNA, 25 bp, Saccharomyces pastorianus
ttgccacatcgtctgatgcaaccag

SEQ ID NO: 43812 - DNA, 25 bp, Saccharomyces pastorianus
tctgctaccacatcctctgacgtga

SEQ ID NO: 43813 - DNA, 25 bp, Saccharomyces pastorianus
cccaaactataccactacaggaata

SEQ ID NO: 43814 - DNA, 25 bp, Saccharomyces pastorianus
caccaacaagtgtcagctcttcaat

SEQ ID NO: 43815 - DNA, 25 bp, Saccharomyces pastorianus
atatatggcttacggttacgcctcc

SEQ ID NO: 43816 - DNA, 25 bp, Saccharomyces pastorianus
acgggatggatgttaacttctacaa

SEQ ID NO: 43817 - DNA, 25 bp, Saccharomyces pastorianus
gtatacattgaaggactccaccaca

SEQ ID NO: 43818 - DNA, 25 bp, Saccharomyces pastorianus
gcttcaggaagcacaacggcatgtt

SEQ ID NO: 43819 - DNA, 25 bp, Saccharomyces pastorianus
atactcctacccaggatatatggct

SEQ ID NO: 43820 - DNA, 25 bp, Saccharomyces pastorianus
tggtggtcagacaaaaacttcgatt

SEQ ID NO: 43821 - DNA, 25 bp, Saccharomyces pastorianus
aacggcatgtttgccagcaggcgta

SEQ ID NO: 43822 - DNA, 25 bp, Saccharomyces pastorianus
ctactactacgagaagaggctggtc

SEQ ID NO: 43823 - DNA, 25 bp, Saccharomyces pastorianus
gccctcaaggagatgctactactac

SEQ ID NO: 43824 - DNA, 25 bp, Saccharomyces pastorianus
tatgtctcaccgttatatgtttttg

SEQ ID NO: 43825 - DNA, 25 bp, Saccharomyces pastorianus
tgtttttggcggtatttgccttcct

SEQ ID NO: 43826 - DNA, 25 bp, Saccharomyces pastorianus
acaccggtatcatcgttcaatctga

SEQ ID NO: 43827 - DNA, 25 bp, Saccharomyces pastorianus
cggtatcatcgttcaatctgaaggt

SEQ ID NO: 43828 - DNA, 25 bp, Saccharomyces pastorianus
ggtattgctgcaggcttgagaacca

SEQ ID NO: 43829 - DNA, 25 bp, Saccharomyces pastorianus
gctgcaggcttgagaaccaatgctt

SEQ ID NO: 43830 - DNA, 25 bp, Saccharomyces pastorianus
accggtatcatcgttcaatctgaag

SEQ ID NO: 43831 - DNA, 25 bp, Saccharomyces pastorianus
gaaggtattgctgcaggcttgagaa

SEQ ID NO: 43832 - DNA, 25 bp, Saccharomyces pastorianus
tattgctgcaggcttgagaaccaat

SEQ ID NO: 43833 - DNA, 25 bp, Saccharomyces pastorianus
aatctgaaggtattgctgcaggctt

SEQ ID NO: 43834 - DNA, 25 bp, Saccharomyces pastorianus
cacaccggtatcatcgttcaatctg

SEQ ID NO: 43835 - DNA, 25 bp, Saccharomyces pastorianus
aacccacaccggtatcatcgttcaa

SEQ ID NO: 43836 - DNA, 25 bp, Saccharomyces pastorianus
tacaacttctcaaacccacaccggt

SEQ ID NO: 43837 - DNA, 25 bp, Saccharomyces pastorianus
gaacgactaggtgtggctctaagat

SEQ ID NO: 43838 - DNA, 25 bp, Saccharomyces pastorianus
acggtatttccgtgatcagcgggtg

SEQ ID NO: 43839 - DNA, 25 bp, Saccharomyces pastorianus
atcgatttttggctctccacggtat

SEQ ID NO: 43840 - DNA, 25 bp, Saccharomyces pastorianus
ggacgatccttatttgagggtcatt

SEQ ID NO: 43841 - DNA, 25 bp, Saccharomyces pastorianus
gagcgctgcactaatatcgattttt

SEQ ID NO: 43842 - DNA, 25 bp, Saccharomyces pastorianus
atgcgcgccaggtttgatgttttga

SEQ ID NO: 43843 - DNA, 25 bp, Saccharomyces pastorianus
gaaagaacgtcatccacggtgatca

SEQ ID NO: 43844 - DNA, 25 bp, Saccharomyces pastorianus
gaacctgctatatctctgagggaac

SEQ ID NO: 43845 - DNA, 25 bp, Saccharomyces pastorianus
aaacggtatcgatctgcttcagtct

SEQ ID NO: 43846 - DNA, 25 bp, Saccharomyces pastorianus
tgggaattcttctctatgcgcgcca

SEQ ID NO: 43847 - DNA, 25 bp, Saccharomyces pastorianus
aacaagtgacgtccagagcgctgca

SEQ ID NO: 43848 - DNA, 25 bp, Saccharomyces pastorianus
gcccttgattctttcctctaaaatg

SEQ ID NO: 43849 - DNA, 25 bp, Saccharomyces pastorianus
atcggacacgcccttgattctttcc

SEQ ID NO: 43850 - DNA, 25 bp, Saccharomyces pastorianus
gaggccaaagcagcaacaccagcgg

SEQ ID NO: 43851 - DNA, 25 bp, Saccharomyces pastorianus
tctggcggagtgcagtaaagttctc

SEQ ID NO: 43852 - DNA, 25 bp, Saccharomyces pastorianus
gcagcaacaccagcggcaggtcttg

SEQ ID NO: 43853 - DNA, 25 bp, Saccharomyces pastorianus
gttcaagttggcctcatcggacacg

SEQ ID NO: 43854 - DNA, 25 bp, Saccharomyces pastorianus
atcaccgacggcaagaaccctaccg

SEQ ID NO: 43855 - DNA, 25 bp, Saccharomyces pastorianus
agtgcagtaaagttctcgacagaga

SEQ ID NO: 43856 - DNA, 25 bp, Saccharomyces pastorianus
tggcggaggccaaagcagcaacacc

SEQ ID NO: 43857 - DNA, 25 bp, Saccharomyces pastorianus
ccggtttcgttcaagttggcctcat

SEQ ID NO: 43858 - DNA, 25 bp, Saccharomyces pastorianus
tcttgcagctctggcggagtgcagt

SEQ ID NO: 43859 - DNA, 25 bp, Saccharomyces pastorianus
acaatggtatccttcaggtccgata

SEQ ID NO: 43860 - DNA, 25 bp, Saccharomyces pastorianus
ttacttcgacattctttgggcctaa

SEQ ID NO: 43861 - DNA, 25 bp, Saccharomyces pastorianus
aacagcgacggctcgtttacttcga

SEQ ID NO: 43862 - DNA, 25 bp, Saccharomyces pastorianus
tgtaaaccatacgacgttcccggtg

SEQ ID NO: 43863 - DNA, 25 bp, Saccharomyces pastorianus
gtgggaaagccatcctactaggtga

SEQ ID NO: 43864 - DNA, 25 bp, Saccharomyces pastorianus
agaccttgtttctattaccgaactg

SEQ ID NO: 43865 - DNA, 25 bp, Saccharomyces pastorianus
gatatttcgtactccaaagcgttag

SEQ ID NO: 43866 - DNA, 25 bp, Saccharomyces pastorianus
aagctcgatgctctattcagtgtca

SEQ ID NO: 43867 - DNA, 25 bp, Saccharomyces pastorianus
gtcacatgatgttacgtcgaagcgt

SEQ ID NO: 43868 - DNA, 25 bp, Saccharomyces pastorianus
attatggatctggacgacgctgtaa

SEQ ID NO: 43869 - DNA, 25 bp, Saccharomyces pastorianus
gagagtcttgtttgcgtgaattgta

SEQ ID NO: 43870 - DNA, 25 bp, Saccharomyces pastorianus
aagaagatgagcgtcccacagtgga

SEQ ID NO: 43871 - DNA, 25 bp, Saccharomyces pastorianus
gtggtgcactggataacccattcga

SEQ ID NO: 43872 - DNA, 25 bp, Saccharomyces pastorianus
gtatcgattttaaccaagcttttga

SEQ ID NO: 43873 - DNA, 25 bp, Saccharomyces pastorianus
caagcttttgaaggcgctgacaaca

SEQ ID NO: 43874 - DNA, 25 bp, Saccharomyces pastorianus
acaatgatgcacctgctattgcaga

SEQ ID NO: 43875 - DNA, 25 bp, Saccharomyces pastorianus
gaagtcgaaccacccaaaacagacg

SEQ ID NO: 43876 - DNA, 25 bp, Saccharomyces pastorianus
aaggtcacatattcaagggtctcaa

SEQ ID NO: 43877 - DNA, 25 bp, Saccharomyces pastorianus
catctctacgagtttttgtttcata

SEQ ID NO: 43878 - DNA, 25 bp, Saccharomyces pastorianus
gacagacgaacctcttgaagaagat

SEQ ID NO: 43879 - DNA, 25 bp, Saccharomyces pastorianus
ggacgagcctcgcaaggaacttaaa

SEQ ID NO: 43880 - DNA, 25 bp, Saccharomyces pastorianus
ccacagtggacgagccttccaaaga

SEQ ID NO: 43881 - DNA, 25 bp, Saccharomyces pastorianus
aagggcctactttcattgctattag

SEQ ID NO: 43882 - DNA, 25 bp, Saccharomyces pastorianus
taaaggcgcctttaaagctggccag

SEQ ID NO: 43883 - DNA, 25 bp, Saccharomyces pastorianus
aaatcgatccgttagttttccatga

SEQ ID NO: 43884 - DNA, 25 bp, Saccharomyces pastorianus
cagcaaggctgtcactagagtttct

SEQ ID NO: 43885 - DNA, 25 bp, Saccharomyces pastorianus
gaagcactgtgttactgcggtttcc

SEQ ID NO: 43886 - DNA, 25 bp, Saccharomyces pastorianus
gagcagtaatcttacccacggtggg

SEQ ID NO: 43887 - DNA, 25 bp, Saccharomyces pastorianus
gagaacggacatccttgcacaagtt

SEQ ID NO: 43888 - DNA, 25 bp, Saccharomyces pastorianus
caaagagtcgacaacctatggtgct

SEQ ID NO: 43889 - DNA, 25 bp, Saccharomyces pastorianus
gtttcttgaagacatacccgtggac

SEQ ID NO: 43890 - DNA, 25 bp, Saccharomyces pastorianus
accatgtcggacaaggccttttgtt

SEQ ID NO: 43891 - DNA, 25 bp, Saccharomyces pastorianus
gcgcgtttgtgaaagcatggccaga

SEQ ID NO: 43892 - DNA, 25 bp, Saccharomyces pastorianus
gaaactctagtgacagccttgctgt

SEQ ID NO: 43893 - DNA, 25 bp, Saccharomyces pastorianus
agaaactctagtgacagccttgctg

SEQ ID NO: 43894 - DNA, 25 bp, Saccharomyces pastorianus
gtccacgggtatgtcttcaagaaac

SEQ ID NO: 43895 - DNA, 25 bp, Saccharomyces pastorianus
ataatggttgtgtccacgggtatgt

SEQ ID NO: 43896 - DNA, 25 bp, Saccharomyces pastorianus
tgtgtccacgggtatgtcttcaaga

SEQ ID NO: 43897 - DNA, 25 bp, Saccharomyces pastorianus
tgtccacgggtatgtcttcaagaaa

SEQ ID NO: 43898 - DNA, 25 bp, Saccharomyces pastorianus
gtcttcaagaaactctagtgacagc

SEQ ID NO: 43899 - DNA, 25 bp, Saccharomyces pastorianus
ttgtgtccacgggtatgtcttcaag

SEQ ID NO: 43900 - DNA, 25 bp, Saccharomyces pastorianus
atggttgtgtccacgggtatgtctt

SEQ ID NO: 43901 - DNA, 25 bp, Saccharomyces pastorianus
gtgtccacgggtatgtcttcaagaa

SEQ ID NO: 43902 - DNA, 25 bp, Saccharomyces pastorianus
aatggttgtgtccacgggtatgtct

SEQ ID NO: 43903 - DNA, 25 bp, Saccharomyces pastorianus
tgcaaatcttttttgctcgtttttt

SEQ ID NO: 43904 - DNA, 25 bp, Saccharomyces pastorianus
acgtttcttgaatctgttatactaa

SEQ ID NO: 43905 - DNA, 25 bp, Saccharomyces pastorianus
gagattctcatattcaatcattctt

SEQ ID NO: 43906 - DNA, 25 bp, Saccharomyces pastorianus
taatcagatggcctccttacctcac

SEQ ID NO: 43907 - DNA, 25 bp, Saccharomyces pastorianus
tgttatactaacaaaatgtttccgt

SEQ ID NO: 43908 - DNA, 25 bp, Saccharomyces pastorianus
ttttaatcagatggcctccttacct

SEQ ID NO: 43909 - DNA, 25 bp, Saccharomyces pastorianus
atctggtcacaagattttcttggtt

SEQ ID NO: 43910 - DNA, 25 bp, Saccharomyces pastorianus
tgtttccgtttgcaaatcttttttg

SEQ ID NO: 43911 - DNA, 25 bp, Saccharomyces pastorianus
gattttcttggttgctaacgtcaag

SEQ ID NO: 43912 - DNA, 25 bp, Saccharomyces pastorianus
caggttaacgtttcttgaatctgtt

SEQ ID NO: 43913 - DNA, 25 bp, Saccharomyces pastorianus
atcattcttcaggttaacgtttctt

SEQ ID NO: 43914 - DNA, 25 bp, Saccharomyces pastorianus
gagccagaaggcatccgataggcaa

SEQ ID NO: 43915 - DNA, 25 bp, Saccharomyces pastorianus
gataggcaaggttcgacatcaacat

SEQ ID NO: 43916 - DNA, 25 bp, Saccharomyces pastorianus
atcacctgctagagagcaaggtcta

SEQ ID NO: 43917 - DNA, 25 bp, Saccharomyces pastorianus
gacatcaacatcacctgctagagag

SEQ ID NO: 43918 - DNA, 25 bp, Saccharomyces pastorianus
gcaaggtctaaatccaaccacgtta

SEQ ID NO: 43919 - DNA, 25 bp, Saccharomyces pastorianus
ataaaagtgtcttactccgcgatgc

SEQ ID NO: 43920 - DNA, 25 bp, Saccharomyces pastorianus
gtccaactgggctaagctcgaagaa

SEQ ID NO: 43921 - DNA, 25 bp, Saccharomyces pastorianus
ttactccgcgatgccgagccagaag

SEQ ID NO: 43922 - DNA, 25 bp, Saccharomyces pastorianus
tgatacgaagctattgtccaactgg

SEQ ID NO: 43923 - DNA, 25 bp, Saccharomyces pastorianus
aaccacgttacttgtaatgaccctg

SEQ ID NO: 43924 - DNA, 25 bp, Saccharomyces pastorianus
caaggacgtcatggtctttcagaaa

SEQ ID NO: 43925 - DNA, 25 bp, Saccharomyces pastorianus
ttacctggtctttttggctacaaat

SEQ ID NO: 43926 - DNA, 25 bp, Saccharomyces pastorianus
gttacgttagcattcccgctacaat

SEQ ID NO: 43927 - DNA, 25 bp, Saccharomyces pastorianus
aagtcctagccattgttggagctac

SEQ ID NO: 43928 - DNA, 25 bp, Saccharomyces pastorianus
ggctatgctactactcgttacgtta

SEQ ID NO: 43929 - DNA, 25 bp, Saccharomyces pastorianus
aatgtcatccctgtagatcgtccat

SEQ ID NO: 43930 - DNA, 25 bp, Saccharomyces pastorianus
gggatccacatctatctcttttatt

SEQ ID NO: 43931 - DNA, 25 bp, Saccharomyces pastorianus
accatcggaaggctggctatgctac

SEQ ID NO: 43932 - DNA, 25 bp, Saccharomyces pastorianus
gttggccatttcaattacttccctg

SEQ ID NO: 43933 - DNA, 25 bp, Saccharomyces pastorianus
gggaatattatcacactatacccga

SEQ ID NO: 43934 - DNA, 25 bp, Saccharomyces pastorianus
gactggctttattcctctagacaat

SEQ ID NO: 43935 - DNA, 25 bp, Saccharomyces pastorianus
aagggcacgacgcatgataccacga

SEQ ID NO: 43936 - DNA, 25 bp, Saccharomyces pastorianus
gtgatatggttatggccaccgtcaa

SEQ ID NO: 43937 - DNA, 25 bp, Saccharomyces pastorianus
ttcgtcaagccaagtcctggagaag

SEQ ID NO: 43938 - DNA, 25 bp, Saccharomyces pastorianus
tattgttgttcgtcaagccaagtcc

SEQ ID NO: 43939 - DNA, 25 bp, Saccharomyces pastorianus
gtgtcatcgccaacccaaagggtga

SEQ ID NO: 43940 - DNA, 25 bp, Saccharomyces pastorianus
tgttgttcgtcaagccaagtcctgg

SEQ ID NO: 43941 - DNA, 25 bp, Saccharomyces pastorianus
attgttgttcgtcaagccaagtcct

SEQ ID NO: 43942 - DNA, 25 bp, Saccharomyces pastorianus
gttgttcgtcaagccaagtcctgga

SEQ ID NO: 43943 - DNA, 25 bp, Saccharomyces pastorianus
tgttcgtcaagccaagtcctggaga

SEQ ID NO: 43944 - DNA, 25 bp, Saccharomyces pastorianus
tcgtcaagccaagtcctggagaaga

SEQ ID NO: 43945 - DNA, 25 bp, Saccharomyces pastorianus
gttcgtcaagccaagtcctggagaa

SEQ ID NO: 43946 - DNA, 25 bp, Saccharomyces pastorianus
ttgttgttcgtcaagccaagtcctg

SEQ ID NO: 43947 - DNA, 25 bp, Saccharomyces pastorianus
attacggcaaaagcgcagcgagcaa

SEQ ID NO: 43948 - DNA, 25 bp, Saccharomyces pastorianus
aactggagtcacatgtcacgtgcac

SEQ ID NO: 43949 - DNA, 25 bp, Saccharomyces pastorianus
aaccccacagactttttgacagaca

SEQ ID NO: 43950 - DNA, 25 bp, Saccharomyces pastorianus
gagagcttataccagaagacgttca

SEQ ID NO: 43951 - DNA, 25 bp, Saccharomyces pastorianus
gcacaacgtgcgaagctgagaactc

SEQ ID NO: 43952 - DNA, 25 bp, Saccharomyces pastorianus
gaggaagactattacaacccgaatt

SEQ ID NO: 43953 - DNA, 25 bp, Saccharomyces pastorianus
aagaccaggcgagtttacaccaaga

SEQ ID NO: 43954 - DNA, 25 bp, Saccharomyces pastorianus
gcaaagcaagcaattggcctccaaa

SEQ ID NO: 43955 - DNA, 25 bp, Saccharomyces pastorianus
gacgttcaagttaccttgggatcca

SEQ ID NO: 43956 - DNA, 25 bp, Saccharomyces pastorianus
atgaccccgttgattgagagcttat

SEQ ID NO: 43957 - DNA, 25 bp, Saccharomyces pastorianus
aatctaatcgatctgcaggcattga

SEQ ID NO: 43958 - DNA, 25 bp, Saccharomyces pastorianus
atcgcatggcagatcgcagtcgcag

SEQ ID NO: 43959 - DNA, 25 bp, Saccharomyces pastorianus
aagaccgtcccattcatactgatca

SEQ ID NO: 43960 - DNA, 25 bp, Saccharomyces pastorianus
aacgccgtgctactgcttgtaatgg

SEQ ID NO: 43961 - DNA, 25 bp, Saccharomyces pastorianus
ttgtttgtcacaaggtaccctcgtg

SEQ ID NO: 43962 - DNA, 25 bp, Saccharomyces pastorianus
tatcattggacgctgcctgtgctga

SEQ ID NO: 43963 - DNA, 25 bp, Saccharomyces pastorianus
actgatcacgtccaactttatcggt

SEQ ID NO: 43964 - DNA, 25 bp, Saccharomyces pastorianus
aagcacactcttggtggcactgaac

SEQ ID NO: 43965 - DNA, 25 bp, Saccharomyces pastorianus
aagtacttccagtgtgctttcgatt

SEQ ID NO: 43966 - DNA, 25 bp, Saccharomyces pastorianus
gtaatggtcctgacgcagctatcag

SEQ ID NO: 43967 - DNA, 25 bp, Saccharomyces pastorianus
ctgtgctgatcttctggtcgggaat

SEQ ID NO: 43968 - DNA, 25 bp, Saccharomyces pastorianus
tttatcggtgtgctcttcgcaagat

SEQ ID NO: 43969 - DNA, 25 bp, Saccharomyces pastorianus
ttaatcaacgacttgcccacgggac

SEQ ID NO: 43970 - DNA, 25 bp, Saccharomyces pastorianus
ggcgtccaccaacttaatcaacgac

SEQ ID NO: 43971 - DNA, 25 bp, Saccharomyces pastorianus
aaccaaacactgctaatgtcctcca

SEQ ID NO: 43972 - DNA, 25 bp, Saccharomyces pastorianus
acaaacctatcatcgtcgtcttcaa

SEQ ID NO: 43973 - DNA, 25 bp, Saccharomyces pastorianus
atgctcccatctaattcagcggctc

SEQ ID NO: 43974 - DNA, 25 bp, Saccharomyces pastorianus
aattcagcggctccgacaaacctat

SEQ ID NO: 43975 - DNA, 25 bp, Saccharomyces pastorianus
tcgtcttcaaacaattccacgctga

SEQ ID NO: 43976 - DNA, 25 bp, Saccharomyces pastorianus
taattccagatttgcattccacacc

SEQ ID NO: 43977 - DNA, 25 bp, Saccharomyces pastorianus
agatttgcattccacaccaaccata

SEQ ID NO: 43978 - DNA, 25 bp, Saccharomyces pastorianus
gggacctactgccaattcgctaatt

SEQ ID NO: 43979 - DNA, 25 bp, Saccharomyces pastorianus
tccgtgccagtgaacatgtcctcaa

SEQ ID NO: 43980 - DNA, 25 bp, Saccharomyces pastorianus
tatgaacaggcctattccgtcgtct

SEQ ID NO: 43981 - DNA, 25 bp, Saccharomyces pastorianus
tcagcgttccatttttgtcacagac

SEQ ID NO: 43982 - DNA, 25 bp, Saccharomyces pastorianus
tggagtaccgcagcctaaagctgat

SEQ ID NO: 43983 - DNA, 25 bp, Saccharomyces pastorianus
taaccaggcaagtctacagcctatg

SEQ ID NO: 43984 - DNA, 25 bp, Saccharomyces pastorianus
gacatggacaagtacctgctggagt

SEQ ID NO: 43985 - DNA, 25 bp, Saccharomyces pastorianus
gtcgaactaccactcgcattataac

SEQ ID NO: 43986 - DNA, 25 bp, Saccharomyces pastorianus
atgccaggccagatcatcagcgttc

SEQ ID NO: 43987 - DNA, 25 bp, Saccharomyces pastorianus
ctattccgtcgtcttcttatggaac

SEQ ID NO: 43988 - DNA, 25 bp, Saccharomyces pastorianus
taacggcaacactcataaccaggca

SEQ ID NO: 43989 - DNA, 25 bp, Saccharomyces pastorianus
aggtagctactactataacggcaac

SEQ ID NO: 43990 - DNA, 25 bp, Saccharomyces pastorianus
atagccataacaggcccaatgacgt

SEQ ID NO: 43991 - DNA, 25 bp, Saccharomyces pastorianus
gcgacgatcttcattacagctggcg

SEQ ID NO: 43992 - DNA, 25 bp, Saccharomyces pastorianus
taccgggttcaatagcgacgatctt

SEQ ID NO: 43993 - DNA, 25 bp, Saccharomyces pastorianus
aaagagcacatcgtaccgggttcaa

SEQ ID NO: 43994 - DNA, 25 bp, Saccharomyces pastorianus
aatggaactcaatgctaccggaaag

SEQ ID NO: 43995 - DNA, 25 bp, Saccharomyces pastorianus
agctggcgtttctttcaacaagatg

SEQ ID NO: 43996 - DNA, 25 bp, Saccharomyces pastorianus
ttcatcaacctactgtctaacgtat

SEQ ID NO: 43997 - DNA, 25 bp, Saccharomyces pastorianus
ttttccctattttcgagctattgcc

SEQ ID NO: 43998 - DNA, 25 bp, Saccharomyces pastorianus
cagactccgataatgccgtattcaa

SEQ ID NO: 43999 - DNA, 25 bp, Saccharomyces pastorianus
tgctgtgcccttgagttatcatgaa

SEQ ID NO: 44000 - DNA, 25 bp, Saccharomyces pastorianus
tcgagctattgcctattgtttctaa

SEQ ID NO: 44001 - DNA, 25 bp, Saccharomyces pastorianus
gctgttcaatgattttgctgtgccc

SEQ ID NO: 44002 - DNA, 25 bp, Saccharomyces pastorianus
gaatttacgagtggcagtcttgaca

SEQ ID NO: 44003 - DNA, 25 bp, Saccharomyces pastorianus
gtatacccggcgttgtagacatcaa

SEQ ID NO: 44004 - DNA, 25 bp, Saccharomyces pastorianus
ttcaacaaaccttccactacaaata

SEQ ID NO: 44005 - DNA, 25 bp, Saccharomyces pastorianus
agggctttgccaacgaatttgctac

SEQ ID NO: 44006 - DNA, 25 bp, Saccharomyces pastorianus
tcaggactattcaacgcaactacaa

SEQ ID NO: 44007 - DNA, 25 bp, Saccharomyces pastorianus
cactgtatcctctttgttatccaag

SEQ ID NO: 44008 - DNA, 25 bp, Saccharomyces pastorianus
gattctacggtattgcgctattaat

SEQ ID NO: 44009 - DNA, 25 bp, Saccharomyces pastorianus
aaccgttattccgtgtccactgtat

SEQ ID NO: 44010 - DNA, 25 bp, Saccharomyces pastorianus
taattgataatccactgccatttgt

SEQ ID NO: 44011 - DNA, 25 bp, Saccharomyces pastorianus
aagtctccaacagtcattaaccagt

SEQ ID NO: 44012 - DNA, 25 bp, Saccharomyces pastorianus
gcagaagcttgttccacagcgttat

SEQ ID NO: 44013 - DNA, 25 bp, Saccharomyces pastorianus
gtcaatggtgtctttaactagttca

SEQ ID NO: 44014 - DNA, 25 bp, Saccharomyces pastorianus
ttcatattccactagaacgtcgtca

SEQ ID NO: 44015 - DNA, 25 bp, Saccharomyces pastorianus
acaagtcttgcttagcatatcgaaa

SEQ ID NO: 44016 - DNA, 25 bp, Saccharomyces pastorianus
tagaacgtcgtcagtggcttccaac

SEQ ID NO: 44017 - DNA, 25 bp, Saccharomyces pastorianus
ttgggtccgtcttggatccgtcgta

SEQ ID NO: 44018 - DNA, 25 bp, Saccharomyces pastorianus
agcaatatcggatctacaagtcttg

SEQ ID NO: 44019 - DNA, 25 bp, Saccharomyces pastorianus
cataatttgaacaccttcagcttga

SEQ ID NO: 44020 - DNA, 25 bp, Saccharomyces pastorianus
ggatccgtcgtatttagcaatatcg

SEQ ID NO: 44021 - DNA, 25 bp, Saccharomyces pastorianus
cttcagcttgaaaatggtgtcgtta

SEQ ID NO: 44022 - DNA, 25 bp, Saccharomyces pastorianus
gatggcctcaaagtcaatggtgtct

SEQ ID NO: 44023 - DNA, 25 bp, Saccharomyces pastorianus
gaaatgctccttgacgatggcctca

SEQ ID NO: 44024 - DNA, 25 bp, Saccharomyces pastorianus
gagtgctggctaaaaatcagctcga

SEQ ID NO: 44025 - DNA, 25 bp, Saccharomyces pastorianus
ttggacgcttcgcaagcagccgcaa

SEQ ID NO: 44026 - DNA, 25 bp, Saccharomyces pastorianus
gctagaggcagcttcacaggaaact

SEQ ID NO: 44027 - DNA, 25 bp, Saccharomyces pastorianus
gagtcatacgcattcactttaaaga

SEQ ID NO: 44028 - DNA, 25 bp, Saccharomyces pastorianus
gaaaaggttagcgaagatgactcaa

SEQ ID NO: 44029 - DNA, 25 bp, Saccharomyces pastorianus
gaacaccattagtgaaccaggtttc

SEQ ID NO: 44030 - DNA, 25 bp, Saccharomyces pastorianus
gccgaatccgggtgctacagatggt

SEQ ID NO: 44031 - DNA, 25 bp, Saccharomyces pastorianus
gaaactatcgactggttggacgctt

SEQ ID NO: 44032 - DNA, 25 bp, Saccharomyces pastorianus
aatcagctcgagtcatacgcattca

SEQ ID NO: 44033 - DNA, 25 bp, Saccharomyces pastorianus
ggtttccctggatccatgccgaatc

SEQ ID NO: 44034 - DNA, 25 bp, Saccharomyces pastorianus
gcagccgcaaccgacgagtacaagg

SEQ ID NO: 44035 - DNA, 25 bp, Saccharomyces pastorianus
agtgctgactgattccaaattggac

SEQ ID NO: 44036 - DNA, 25 bp, Saccharomyces pastorianus
gcagacaaccaacctggcgttttga

SEQ ID NO: 44037 - DNA, 25 bp, Saccharomyces pastorianus
gaagctgttgcctacggtgcagcag

SEQ ID NO: 44038 - DNA, 25 bp, Saccharomyces pastorianus
ttcctcctctcagacatctattgaa

SEQ ID NO: 44039 - DNA, 25 bp, Saccharomyces pastorianus
ggtgcagcagttcaggcagctatcc

SEQ ID NO: 44040 - DNA, 25 bp, Saccharomyces pastorianus
gattcgaagaactgtgcgctgattt

SEQ ID NO: 44041 - DNA, 25 bp, Saccharomyces pastorianus
gttgatttctacacctcactaacaa

SEQ ID NO: 44042 - DNA, 25 bp, Saccharomyces pastorianus
gcagctatccttactggcgatcaat

SEQ ID NO: 44043 - DNA, 25 bp, Saccharomyces pastorianus
agctggtttccggtttcttcaatgg

SEQ ID NO: 44044 - DNA, 25 bp, Saccharomyces pastorianus
gaaactttttcgacctacgcagaca

SEQ ID NO: 44045 - DNA, 25 bp, Saccharomyces pastorianus
atcttcttcttctagatgttgcgcc

SEQ ID NO: 44046 - DNA, 25 bp, Saccharomyces pastorianus
atttcaatgccgtggtactcgaagg

SEQ ID NO: 44047 - DNA, 25 bp, Saccharomyces pastorianus
ttacgggtcaagtctacaatggcat

SEQ ID NO: 44048 - DNA, 25 bp, Saccharomyces pastorianus
gaccttgccagagcagtattcagat

SEQ ID NO: 44049 - DNA, 25 bp, Saccharomyces pastorianus
gaactcatttccaacgattctgaag

SEQ ID NO: 44050 - DNA, 25 bp, Saccharomyces pastorianus
gaatatgaatcttcccgttgctttg

SEQ ID NO: 44051 - DNA, 25 bp, Saccharomyces pastorianus
gttgctttgattacacggtggctaa

SEQ ID NO: 44052 - DNA, 25 bp, Saccharomyces pastorianus
ctagaccatctcttgtatttccaga

SEQ ID NO: 44053 - DNA, 25 bp, Saccharomyces pastorianus
atatgttcaagctcatcagtgccca

SEQ ID NO: 44054 - DNA, 25 bp, Saccharomyces pastorianus
acttgtctatattcctctttccaaa

SEQ ID NO: 44055 - DNA, 25 bp, Saccharomyces pastorianus
gcttgcagagagctggttccacaat

SEQ ID NO: 44056 - DNA, 25 bp, Saccharomyces pastorianus
gaacgcgtgtggaatacttgtctat

SEQ ID NO: 44057 - DNA, 25 bp, Saccharomyces pastorianus
gtcattcatttccaacatgcggatg

SEQ ID NO: 44058 - DNA, 25 bp, Saccharomyces pastorianus
ccggtatgaggtatggttactggtt

SEQ ID NO: 44059 - DNA, 25 bp, Saccharomyces pastorianus
attgaccacgtccacgtcattcatt

SEQ ID NO: 44060 - DNA, 25 bp, Saccharomyces pastorianus
aatcaaccattccagggaattaagg

SEQ ID NO: 44061 - DNA, 25 bp, Saccharomyces pastorianus
tacgatttcaatgatgtatttacaa

SEQ ID NO: 44062 - DNA, 25 bp, Saccharomyces pastorianus
tccaacatgcggatgattccggtat

SEQ ID NO: 44063 - DNA, 25 bp, Saccharomyces pastorianus
gattccggtatgaggtatggttact

SEQ ID NO: 44064 - DNA, 25 bp, Saccharomyces pastorianus
aaggatattcccattgaccacgtcc

SEQ ID NO: 44065 - DNA, 25 bp, Saccharomyces pastorianus
actactacattcaatacgatttcaa

SEQ ID NO: 44066 - DNA, 25 bp, Saccharomyces pastorianus
gggaaactactacattcaatacgat

SEQ ID NO: 44067 - DNA, 25 bp, Saccharomyces pastorianus
gtccacgtcattcatttccaacatg

SEQ ID NO: 44068 - DNA, 25 bp, Saccharomyces pastorianus
ggataggagttttgatcttcttttc

SEQ ID NO: 44069 - DNA, 25 bp, Saccharomyces pastorianus
aactccataggacctgttttggaat

SEQ ID NO: 44070 - DNA, 25 bp, Saccharomyces pastorianus
aggacctgttttggaatggaaagca

SEQ ID NO: 44071 - DNA, 25 bp, Saccharomyces pastorianus
tctacagggttcaagcccacgttac

SEQ ID NO: 44072 - DNA, 25 bp, Saccharomyces pastorianus
ctgactcgaactacaattttgtttt

SEQ ID NO: 44073 - DNA, 25 bp, Saccharomyces pastorianus
gttttgatcttcttttcatatgaaa

SEQ ID NO: 44074 - DNA, 25 bp, Saccharomyces pastorianus
gttactgactcgaactacaattttg

SEQ ID NO: 44075 - DNA, 25 bp, Saccharomyces pastorianus
atatgaaaactccataggacctgtt

SEQ ID NO: 44076 - DNA, 25 bp, Saccharomyces pastorianus
ggagttttgatcttcttttcatatg

SEQ ID NO: 44077 - DNA, 25 bp, Saccharomyces pastorianus
agggttcaagcccacgttactgact

SEQ ID NO: 44078 - DNA, 25 bp, Saccharomyces pastorianus
aagcccacgttactgactcgaacta

SEQ ID NO: 44079 - DNA, 25 bp, Saccharomyces pastorianus
gtacgaataccgttccagtggattt

SEQ ID NO: 44080 - DNA, 25 bp, Saccharomyces pastorianus
tcacgttatcaccatggaccttcat

SEQ ID NO: 44081 - DNA, 25 bp, Saccharomyces pastorianus
gtgcttgtcggtgacgtcaccaata

SEQ ID NO: 44082 - DNA, 25 bp, Saccharomyces pastorianus
atatggctgacacttgcggtacgtt

SEQ ID NO: 44083 - DNA, 25 bp, Saccharomyces pastorianus
gctatccaggattgtttgtacgaat

SEQ ID NO: 44084 - DNA, 25 bp, Saccharomyces pastorianus
gacactttgttggaacatggcgcca

SEQ ID NO: 44085 - DNA, 25 bp, Saccharomyces pastorianus
gatatcagtccaactttcgctgaag

SEQ ID NO: 44086 - DNA, 25 bp, Saccharomyces pastorianus
gaagtcatagccattgttacgcatg

SEQ ID NO: 44087 - DNA, 25 bp, Saccharomyces pastorianus
catggtatattctctggttctgcaa

SEQ ID NO: 44088 - DNA, 25 bp, Saccharomyces pastorianus
taatgccattttggtgtcacctgat

SEQ ID NO: 44089 - DNA, 25 bp, Saccharomyces pastorianus
aatctgttgcaaactgctggctccg

SEQ ID NO: 44090 - DNA, 25 bp, Saccharomyces pastorianus
gaagttcggttggttgctattcgat

SEQ ID NO: 44091 - DNA, 25 bp, Saccharomyces pastorianus
aattggccggaatcgttgttcacat

SEQ ID NO: 44092 - DNA, 25 bp, Saccharomyces pastorianus
ttcacatgggcggtggacctcagca

SEQ ID NO: 44093 - DNA, 25 bp, Saccharomyces pastorianus
gcttgaaacaactgccggatacttt

SEQ ID NO: 44094 - DNA, 25 bp, Saccharomyces pastorianus
aacatccagagacgaaccttttttg

SEQ ID NO: 44095 - DNA, 25 bp, Saccharomyces pastorianus
gaacgtttgctcttcgatagactct

SEQ ID NO: 44096 - DNA, 25 bp, Saccharomyces pastorianus
aaactcttcaacaacattcgctatc

SEQ ID NO: 44097 - DNA, 25 bp, Saccharomyces pastorianus
tttccccatagaagtccagggcgac

SEQ ID NO: 44098 - DNA, 25 bp, Saccharomyces pastorianus
ggacctcagcatgggcattatgttt

SEQ ID NO: 44099 - DNA, 25 bp, Saccharomyces pastorianus
aacattcgctatcctctaacattga

SEQ ID NO: 44100 - DNA, 25 bp, Saccharomyces pastorianus
gccggatactttagcgttgcatttg

SEQ ID NO: 44101 - DNA, 25 bp, Saccharomyces pastorianus
gattgcgggcttatcaaatactgtt

SEQ ID NO: 44102 - DNA, 25 bp, Saccharomyces pastorianus
gtgacaaagaccactccgagcggaa

SEQ ID NO: 44103 - DNA, 25 bp, Saccharomyces pastorianus
gcaattcctgataacctttctatga

SEQ ID NO: 44104 - DNA, 25 bp, Saccharomyces pastorianus
ggctatggaccaccagggccaaaga

SEQ ID NO: 44105 - DNA, 25 bp, Saccharomyces pastorianus
agtgatccttcatctacaggtggga

SEQ ID NO: 44106 - DNA, 25 bp, Saccharomyces pastorianus
ggataccgctttctatgcttggaga

SEQ ID NO: 44107 - DNA, 25 bp, Saccharomyces pastorianus
agcagaaccgttttagacgcgtcta

SEQ ID NO: 44108 - DNA, 25 bp, Saccharomyces pastorianus
ttcaggctatccattaatctctaac

SEQ ID NO: 44109 - DNA, 25 bp, Saccharomyces pastorianus
accggtgccctttaattcaggctat

SEQ ID NO: 44110 - DNA, 25 bp, Saccharomyces pastorianus
agacgcgtctaccattataccggtg

SEQ ID NO: 44111 - DNA, 25 bp, Saccharomyces pastorianus
gtaagcactcccgtgagtcatctac

SEQ ID NO: 44112 - DNA, 25 bp, Saccharomyces pastorianus
atggttgatttggtggctgtcatca

SEQ ID NO: 44113 - DNA, 25 bp, Saccharomyces pastorianus
tttgttcggagattgctgctgttgt

SEQ ID NO: 44114 - DNA, 25 bp, Saccharomyces pastorianus
ttgcaactgctgctgctccaactgt

SEQ ID NO: 44115 - DNA, 25 bp, Saccharomyces pastorianus
gttttttgttcggagattgctgctg

SEQ ID NO: 44116 - DNA, 25 bp, Saccharomyces pastorianus
tgatgaggcattcgttgttttttgt

SEQ ID NO: 44117 - DNA, 25 bp, Saccharomyces pastorianus
gttgttgcaactgctgctgctccaa

SEQ ID NO: 44118 - DNA, 25 bp, Saccharomyces pastorianus
gctgttgttgcaactgctgctgctc

SEQ ID NO: 44119 - DNA, 25 bp, Saccharomyces pastorianus
gatttggtggctgtcatcatgatga

SEQ ID NO: 44120 - DNA, 25 bp, Saccharomyces pastorianus
tgttcggagattgctgctgttgttg

SEQ ID NO: 44121 - DNA, 25 bp, Saccharomyces pastorianus
ctgctccaactgtcttttcatgtga

SEQ ID NO: 44122 - DNA, 25 bp, Saccharomyces pastorianus
gtcatcatgatgaggcattcgttgt

SEQ ID NO: 44123 - DNA, 25 bp, Saccharomyces pastorianus
gtgtcagcactttaaacttattctc

SEQ ID NO: 44124 - DNA, 25 bp, Saccharomyces pastorianus
gagattctgagccacagggtttgca

SEQ ID NO: 44125 - DNA, 25 bp, Saccharomyces pastorianus
aagaaaggtccttcgcctatcagaa

SEQ ID NO: 44126 - DNA, 25 bp, Saccharomyces pastorianus
gcttgccaaaagctcaatttaccct

SEQ ID NO: 44127 - DNA, 25 bp, Saccharomyces pastorianus
tccaatgggccttacgcgcagctaa

SEQ ID NO: 44128 - DNA, 25 bp, Saccharomyces pastorianus
gcgcagctaatgcaggcttgccaaa

SEQ ID NO: 44129 - DNA, 25 bp, Saccharomyces pastorianus
caagctcaaccgtttcttcaaagtc

SEQ ID NO: 44130 - DNA, 25 bp, Saccharomyces pastorianus
gggtcgtttgcgaagccaagctcaa

SEQ ID NO: 44131 - DNA, 25 bp, Saccharomyces pastorianus
gtccgagacattttttactggaaat

SEQ ID NO: 44132 - DNA, 25 bp, Saccharomyces pastorianus
gaaggtggaattgccgctgccagta

SEQ ID NO: 44133 - DNA, 25 bp, Saccharomyces pastorianus
agtccatccggaaccaatcttgaac

SEQ ID NO: 44134 - DNA, 25 bp, Saccharomyces pastorianus
ggacaggatacgtcactttccgtac

SEQ ID NO: 44135 - DNA, 25 bp, Saccharomyces pastorianus
cggcggcaccatatgagctagctaa

SEQ ID NO: 44136 - DNA, 25 bp, Saccharomyces pastorianus
ttaggcacaacaagagactcccgta

SEQ ID NO: 44137 - DNA, 25 bp, Saccharomyces pastorianus
atagggcatcccattgtttagaaga

SEQ ID NO: 44138 - DNA, 25 bp, Saccharomyces pastorianus
ttcagacgcgcaatacttactaggt

SEQ ID NO: 44139 - DNA, 25 bp, Saccharomyces pastorianus
aaggattcctggacgttgtcattcc

SEQ ID NO: 44140 - DNA, 25 bp, Saccharomyces pastorianus
tttccgtacactattacactcaggc

SEQ ID NO: 44141 - DNA, 25 bp, Saccharomyces pastorianus
gtgacggttatgcatcaggagcctt

SEQ ID NO: 44142 - DNA, 25 bp, Saccharomyces pastorianus
agcttagggcatatcccttcagcaa

SEQ ID NO: 44143 - DNA, 25 bp, Saccharomyces pastorianus
ctaatgaattgacggcggcggcacc

SEQ ID NO: 44144 - DNA, 25 bp, Saccharomyces pastorianus
gtaggatgggccttccaaccgatgt

SEQ ID NO: 44145 - DNA, 25 bp, Saccharomyces pastorianus
ttcggcatgggcatcacaggaacat

SEQ ID NO: 44146 - DNA, 25 bp, Saccharomyces pastorianus
atgcctctcgataagagcagtcagc

SEQ ID NO: 44147 - DNA, 25 bp, Saccharomyces pastorianus
gggaacattcggcatgggcatcaca

SEQ ID NO: 44148 - DNA, 25 bp, Saccharomyces pastorianus
atgacgttgggaacattcggcatgg

SEQ ID NO: 44149 - DNA, 25 bp, Saccharomyces pastorianus
gttggagctgggacgtctcatcgtt

SEQ ID NO: 44150 - DNA, 25 bp, Saccharomyces pastorianus
gtggtgacaaatatgcctctcgata

SEQ ID NO: 44151 - DNA, 25 bp, Saccharomyces pastorianus
aactgcgcttagaaagacgtgccaa

SEQ ID NO: 44152 - DNA, 25 bp, Saccharomyces pastorianus
gaaagacgtgccaacaacgaaactg

SEQ ID NO: 44153 - DNA, 25 bp, Saccharomyces pastorianus
gttccaggagctgaaactgcgctta

SEQ ID NO: 44154 - DNA, 25 bp, Saccharomyces pastorianus
acgtctcatcgttccaggagctgaa

SEQ ID NO: 44155 - DNA, 25 bp, Saccharomyces pastorianus
gcagtcagcaggtagtggacgccct

SEQ ID NO: 44156 - DNA, 25 bp, Saccharomyces pastorianus
ggaagactcagatggctcgattttt

SEQ ID NO: 44157 - DNA, 25 bp, Saccharomyces pastorianus
gactcagatggctcgatttttcggg

SEQ ID NO: 44158 - DNA, 25 bp, Saccharomyces pastorianus
ggaaacgacaaagctacggtgagga

SEQ ID NO: 44159 - DNA, 25 bp, Saccharomyces pastorianus
caaagctacggtgaggagcgaagat

SEQ ID NO: 44160 - DNA, 25 bp, Saccharomyces pastorianus
gccagtgagtggaaacgacaaagct

SEQ ID NO: 44161 - DNA, 25 bp, Saccharomyces pastorianus
gtcaccatgtttacacttctaactt

SEQ ID NO: 44162 - DNA, 25 bp, Saccharomyces pastorianus
gcacacttcatggacgaatataaga

SEQ ID NO: 44163 - DNA, 25 bp, Saccharomyces pastorianus
gggtcaccatgtttacacttctaac

SEQ ID NO: 44164 - DNA, 25 bp, Saccharomyces pastorianus
gttgcacacttcatggacgaatata

SEQ ID NO: 44165 - DNA, 25 bp, Saccharomyces pastorianus
agatgttgcacacttcatggacgaa

SEQ ID NO: 44166 - DNA, 25 bp, Saccharomyces pastorianus
tgaggagcgaagatgttgcacactt

SEQ ID NO: 44167 - DNA, 25 bp, Saccharomyces pastorianus
aagcgctaccgtattgggcctaggg

SEQ ID NO: 44168 - DNA, 25 bp, Saccharomyces pastorianus
aaatcgctgcacaatgttgccatgc

SEQ ID NO: 44169 - DNA, 25 bp, Saccharomyces pastorianus
ccacgtttcttcattgccagggaag

SEQ ID NO: 44170 - DNA, 25 bp, Saccharomyces pastorianus
gtgtttcgtacaacccgatcatgac

SEQ ID NO: 44171 - DNA, 25 bp, Saccharomyces pastorianus
atagcgctatgtgcgactttcaccg

SEQ ID NO: 44172 - DNA, 25 bp, Saccharomyces pastorianus
tattgaaatcgtccccaaccaagac

SEQ ID NO: 44173 - DNA, 25 bp, Saccharomyces pastorianus
ttcaccgctatttctttcgcgatag

SEQ ID NO: 44174 - DNA, 25 bp, Saccharomyces pastorianus
gtttcagacacattgcgacagaccc

SEQ ID NO: 44175 - DNA, 25 bp, Saccharomyces pastorianus
aaatgtcctgacaagttcacgatgg

SEQ ID NO: 44176 - DNA, 25 bp, Saccharomyces pastorianus
gaacgctgcagttattcacgatgct

SEQ ID NO: 44177 - DNA, 25 bp, Saccharomyces pastorianus
gtatgcgaaggctatttctcttgga

SEQ ID NO: 44178 - DNA, 25 bp, Saccharomyces pastorianus
gtatcctgcatttaagtccgtcaag

SEQ ID NO: 44179 - DNA, 25 bp, Saccharomyces pastorianus
ttttggaaacagacgccccatggtg

SEQ ID NO: 44180 - DNA, 25 bp, Saccharomyces pastorianus
aaaaaacgcatgcatccttccagta

SEQ ID NO: 44181 - DNA, 25 bp, Saccharomyces pastorianus
gcgaggagaacctgcctgttgtaaa

SEQ ID NO: 44182 - DNA, 25 bp, Saccharomyces pastorianus
ggcagctacccattgtttctacata

SEQ ID NO: 44183 - DNA, 25 bp, Saccharomyces pastorianus
ttacagggactggatgcgtcgtcat

SEQ ID NO: 44184 - DNA, 25 bp, Saccharomyces pastorianus
aatacccttagaacgcctgcttttg

SEQ ID NO: 44185 - DNA, 25 bp, Saccharomyces pastorianus
ggtcaacacctttgagtatcctgca

SEQ ID NO: 44186 - DNA, 25 bp, Saccharomyces pastorianus
gaccggaagctggtggttcattcat

SEQ ID NO: 44187 - DNA, 25 bp, Saccharomyces pastorianus
gggtctgagtcggatctgcaaaaac

SEQ ID NO: 44188 - DNA, 25 bp, Saccharomyces pastorianus
acgacaggttccattacagctctaa

SEQ ID NO: 44189 - DNA, 25 bp, Saccharomyces pastorianus
aaaagcctgatcgatgcggttaacg

SEQ ID NO: 44190 - DNA, 25 bp, Saccharomyces pastorianus
tatccaaaggctatcgactgttacg

SEQ ID NO: 44191 - DNA, 25 bp, Saccharomyces pastorianus
gcaagtgacatctattccaaactga

SEQ ID NO: 44192 - DNA, 25 bp, Saccharomyces pastorianus
aacgatcttcatgactatccaaagg

SEQ ID NO: 44193 - DNA, 25 bp, Saccharomyces pastorianus
gtcaacgccgtaaattcactagaga

SEQ ID NO: 44194 - DNA, 25 bp, Saccharomyces pastorianus
cgactgttacgagttggctggtgaa

SEQ ID NO: 44195 - DNA, 25 bp, Saccharomyces pastorianus
gtgaagacccaaatttcgcagattc

SEQ ID NO: 44196 - DNA, 25 bp, Saccharomyces pastorianus
gtgtgcagacttgaaggctcttgat

SEQ ID NO: 44197 - DNA, 25 bp, Saccharomyces pastorianus
gtcgctgccacgaggactttacaag

SEQ ID NO: 44198 - DNA, 25 bp, Saccharomyces pastorianus
agctggctgctactgattctgtcgc

SEQ ID NO: 44199 - DNA, 25 bp, Saccharomyces pastorianus
agtggtgggaactctgtcaacgccg

SEQ ID NO: 44200 - DNA, 25 bp, Saccharomyces pastorianus
aattaaccgaggtgttgctaccaca

SEQ ID NO: 44201 - DNA, 25 bp, Saccharomyces pastorianus
gctccaggactattctttttcacat

SEQ ID NO: 44202 - DNA, 25 bp, Saccharomyces pastorianus
agggaccttaactagctcttccaat

SEQ ID NO: 44203 - DNA, 25 bp, Saccharomyces pastorianus
taccactgatcctgctcaagtaagc

SEQ ID NO: 44204 - DNA, 25 bp, Saccharomyces pastorianus
aaggccgattctactattgattccg

SEQ ID NO: 44205 - DNA, 25 bp, Saccharomyces pastorianus
gtgatttcaccctccaaagacgaat

SEQ ID NO: 44206 - DNA, 25 bp, Saccharomyces pastorianus
ggcaaatgcattcacagggacctta

SEQ ID NO: 44207 - DNA, 25 bp, Saccharomyces pastorianus
gaaacagtcgtcataccagaatcca

SEQ ID NO: 44208 - DNA, 25 bp, Saccharomyces pastorianus
acaccaaagtccctagccgttgaag

SEQ ID NO: 44209 - DNA, 25 bp, Saccharomyces pastorianus
tccggtaagcaaacgaatcccataa

SEQ ID NO: 44210 - DNA, 25 bp, Saccharomyces pastorianus
acatccagtcccattaaaggccgat

SEQ ID NO: 44211 - DNA, 25 bp, Saccharomyces pastorianus
aggtgtctcaaaccaagaacgcgga

SEQ ID NO: 44212 - DNA, 25 bp, Saccharomyces pastorianus
gaagcaacaactagccgtttcagaa

SEQ ID NO: 44213 - DNA, 25 bp, Saccharomyces pastorianus
gtcgaagcaagcaagcatcaccaat

SEQ ID NO: 44214 - DNA, 25 bp, Saccharomyces pastorianus
tcaagttaactctttgtcgaagcaa

SEQ ID NO: 44215 - DNA, 25 bp, Saccharomyces pastorianus
tgccgctgagtccaagttgaatgaa

SEQ ID NO: 44216 - DNA, 25 bp, Saccharomyces pastorianus
atgactgcatctttacaatcccaac

SEQ ID NO: 44217 - DNA, 25 bp, Saccharomyces pastorianus
aagactgtcgaagagcagcatgctc

SEQ ID NO: 44218 - DNA, 25 bp, Saccharomyces pastorianus
agaagccaattaccatgccgctgag

SEQ ID NO: 44219 - DNA, 25 bp, Saccharomyces pastorianus
atttacgttccaaccatgagcagaa

SEQ ID NO: 44220 - DNA, 25 bp, Saccharomyces pastorianus
gaatgtcacgcaaaccgaacagctt

SEQ ID NO: 44221 - DNA, 25 bp, Saccharomyces pastorianus
aatgaattaaccaccgacttgcagg

SEQ ID NO: 44222 - DNA, 25 bp, Saccharomyces pastorianus
ctgcctcaattgtacatgttgtcca

SEQ ID NO: 44223 - DNA, 25 bp, Saccharomyces pastorianus
attgtggtcctactacaagggtcta

SEQ ID NO: 44224 - DNA, 25 bp, Saccharomyces pastorianus
tgggaataccagaagtttgaccatt

SEQ ID NO: 44225 - DNA, 25 bp, Saccharomyces pastorianus
ttaacgttccattgggtatccctat

SEQ ID NO: 44226 - DNA, 25 bp, Saccharomyces pastorianus
catcgtttctaccatctacattgtg

SEQ ID NO: 44227 - DNA, 25 bp, Saccharomyces pastorianus
tagacaagattgctctcttcgcggg

SEQ ID NO: 44228 - DNA, 25 bp, Saccharomyces pastorianus
gatattcttcatcgtttctaccatc

SEQ ID NO: 44229 - DNA, 25 bp, Saccharomyces pastorianus
gagatacattcaagattcagcattt

SEQ ID NO: 44230 - DNA, 25 bp, Saccharomyces pastorianus
gtatccctatacaacgctttcatga

SEQ ID NO: 44231 - DNA, 25 bp, Saccharomyces pastorianus
aaagggctaacactatcgcgtacaa

SEQ ID NO: 44232 - DNA, 25 bp, Saccharomyces pastorianus
cataacacgttacttggatctttta

SEQ ID NO: 44233 - DNA, 25 bp, Saccharomyces pastorianus
gattgtctgccgaaggatgtcttta

SEQ ID NO: 44234 - DNA, 25 bp, Saccharomyces pastorianus
gagacatttacaatccgtgctggat

SEQ ID NO: 44235 - DNA, 25 bp, Saccharomyces pastorianus
agatgttgttatctcccactattcg

SEQ ID NO: 44236 - DNA, 25 bp, Saccharomyces pastorianus
gggaaccccgacgatgatggagttt

SEQ ID NO: 44237 - DNA, 25 bp, Saccharomyces pastorianus
agctatttcatcactgggagcgata

SEQ ID NO: 44238 - DNA, 25 bp, Saccharomyces pastorianus
ggagcgataacacctcgtggaactt

SEQ ID NO: 44239 - DNA, 25 bp, Saccharomyces pastorianus
tacagatgacaagccctcgatacca

SEQ ID NO: 44240 - DNA, 25 bp, Saccharomyces pastorianus
ggttacagagatacagcccgagact

SEQ ID NO: 44241 - DNA, 25 bp, Saccharomyces pastorianus
gtttctaatcgagacgctatccaag

SEQ ID NO: 44242 - DNA, 25 bp, Saccharomyces pastorianus
attctcgtccataatctcttagtct

SEQ ID NO: 44243 - DNA, 25 bp, Saccharomyces pastorianus
catggtcttagcacactctttgaga

SEQ ID NO: 44244 - DNA, 25 bp, Saccharomyces pastorianus
tgtactcccgattcaaaattgtatt

SEQ ID NO: 44245 - DNA, 25 bp, Saccharomyces pastorianus
tatcttctcgaactatactctatta

SEQ ID NO: 44246 - DNA, 25 bp, Saccharomyces pastorianus
ttactggctccacaacattcatcgt

SEQ ID NO: 44247 - DNA, 25 bp, Saccharomyces pastorianus
tatgattaagtcaccacacgattta

SEQ ID NO: 44248 - DNA, 25 bp, Saccharomyces pastorianus
caattttggttgtgcggagatacta

SEQ ID NO: 44249 - DNA, 25 bp, Saccharomyces pastorianus
gcttttccgcggtttgaacaacaca

SEQ ID NO: 44250 - DNA, 25 bp, Saccharomyces pastorianus
ttcatcgtcaccaccgtggactaaa

SEQ ID NO: 44251 - DNA, 25 bp, Saccharomyces pastorianus
attccaataattgtactcccgattc

SEQ ID NO: 44252 - DNA, 25 bp, Saccharomyces pastorianus
actttattacttgagcttttccgcg

SEQ ID NO: 44253 - DNA, 25 bp, Saccharomyces pastorianus
gcccttctcagacagctaatttgat

SEQ ID NO: 44254 - DNA, 25 bp, Saccharomyces pastorianus
gaaaccgattctgaaagcccttctc

SEQ ID NO: 44255 - DNA, 25 bp, Saccharomyces pastorianus
caagtcgattgaaccaacagttgca

SEQ ID NO: 44256 - DNA, 25 bp, Saccharomyces pastorianus
aaaggaaggtctggagcctctggct

SEQ ID NO: 44257 - DNA, 25 bp, Saccharomyces pastorianus
ttaagagaaaaagccgtggcggcca

SEQ ID NO: 44258 - DNA, 25 bp, Saccharomyces pastorianus
gagatccggtgctaagaccatcatt

SEQ ID NO: 44259 - DNA, 25 bp, Saccharomyces pastorianus
ttcttatccctagctttaaacaagt

SEQ ID NO: 44260 - DNA, 25 bp, Saccharomyces pastorianus
aacagttgcaatgaccggagaatta

SEQ ID NO: 44261 - DNA, 25 bp, Saccharomyces pastorianus
ggagaattaacactcacgggtaaag

SEQ ID NO: 44262 - DNA, 25 bp, Saccharomyces pastorianus
aagaccatcattttccctaaggaca

SEQ ID NO: 44263 - DNA, 25 bp, Saccharomyces pastorianus
ctggctgcggactggtataatgata

SEQ ID NO: 44264 - DNA, 25 bp, Saccharomyces pastorianus
tggcggccaagagatccggtgctaa

SEQ ID NO: 44265 - DNA, 25 bp, Saccharomyces pastorianus
gagcctctggctgcggactggtata

SEQ ID NO: 44266 - DNA, 25 bp, Saccharomyces pastorianus
gactatatgaaacaaccccaccggg

SEQ ID NO: 44267 - DNA, 25 bp, Saccharomyces pastorianus
actatacgttgaatctgtccttgaa

SEQ ID NO: 44268 - DNA, 25 bp, Saccharomyces pastorianus
tgtaagcacccgacctttgaaagaa

SEQ ID NO: 44269 - DNA, 25 bp, Saccharomyces pastorianus
agtattgaggactccccaacatctt

SEQ ID NO: 44270 - DNA, 25 bp, Saccharomyces pastorianus
gcattgtccggaaggtgccacccaa

SEQ ID NO: 44271 - DNA, 25 bp, Saccharomyces pastorianus
aagactggcttattcattttccaaa

SEQ ID NO: 44272 - DNA, 25 bp, Saccharomyces pastorianus
agacaccgccaaatccaaggaaact

SEQ ID NO: 44273 - DNA, 25 bp, Saccharomyces pastorianus
taaagcagccttacaagttgtcaaa

SEQ ID NO: 44274 - DNA, 25 bp, Saccharomyces pastorianus
gacaaacatgggtggttgttcacta

SEQ ID NO: 44275 - DNA, 25 bp, Saccharomyces pastorianus
aatgtttccatatctcaggacaact

SEQ ID NO: 44276 - DNA, 25 bp, Saccharomyces pastorianus
cgagaaagcttctatccacttgcat

SEQ ID NO: 44277 - DNA, 25 bp, Saccharomyces pastorianus
gaaattaccgacgatgaccgtatat

SEQ ID NO: 44278 - DNA, 25 bp, Saccharomyces pastorianus
ctatcctacaagagtcacccaattt

SEQ ID NO: 44279 - DNA, 25 bp, Saccharomyces pastorianus
gcgcattgaagcgtagttatggcat

SEQ ID NO: 44280 - DNA, 25 bp, Saccharomyces pastorianus
tacatacatatctaccgaagagctt

SEQ ID NO: 44281 - DNA, 25 bp, Saccharomyces pastorianus
gagtcacccaatttggaacggttag

SEQ ID NO: 44282 - DNA, 25 bp, Saccharomyces pastorianus
gatacactcacatcatccattagta

SEQ ID NO: 44283 - DNA, 25 bp, Saccharomyces pastorianus
acctttggcagtgactatcctacaa

SEQ ID NO: 44284 - DNA, 25 bp, Saccharomyces pastorianus
cgaagagcttatcggcgcacctttg

SEQ ID NO: 44285 - DNA, 25 bp, Saccharomyces pastorianus
gcatgttgacaataaggtagcctat

SEQ ID NO: 44286 - DNA, 25 bp, Saccharomyces pastorianus
aaggtgttgaatactcgttcctgca

SEQ ID NO: 44287 - DNA, 25 bp, Saccharomyces pastorianus
aatactcgttcctgcatgttgacaa

SEQ ID NO: 44288 - DNA, 25 bp, Saccharomyces pastorianus
tcgagcacccgtacttgcagacata

SEQ ID NO: 44289 - DNA, 25 bp, Saccharomyces pastorianus
tacagggcccctgaagttatgctga

SEQ ID NO: 44290 - DNA, 25 bp, Saccharomyces pastorianus
acgtatggtcatgcggctgtatttt

SEQ ID NO: 44291 - DNA, 25 bp, Saccharomyces pastorianus
ggagctgttcttgagacgcccgatc

SEQ ID NO: 44292 - DNA, 25 bp, Saccharomyces pastorianus
tactcccgggcaatggacgtatggt

SEQ ID NO: 44293 - DNA, 25 bp, Saccharomyces pastorianus
ggactagccaggatcatcgacgagg

SEQ ID NO: 44294 - DNA, 25 bp, Saccharomyces pastorianus
aattgcgatgcatcgagtcggcgcg

SEQ ID NO: 44295 - DNA, 25 bp, Saccharomyces pastorianus
aggaggcattgaccaccaaggatct

SEQ ID NO: 44296 - DNA, 25 bp, Saccharomyces pastorianus
aagttatgctgacctctgctcgtta

SEQ ID NO: 44297 - DNA, 25 bp, Saccharomyces pastorianus
agggcgttgacctgttgcagcgcat

SEQ ID NO: 44298 - DNA, 25 bp, Saccharomyces pastorianus
cagctgttgctgatcttcggtgtga

SEQ ID NO: 44299 - DNA, 25 bp, Saccharomyces pastorianus
ggcctctcatgttgaccaaaccgaa

SEQ ID NO: 44300 - DNA, 25 bp, Saccharomyces pastorianus
tggtatttccacaatcgtgcccatg

SEQ ID NO: 44301 - DNA, 25 bp, Saccharomyces pastorianus
gaagtcgatatctatgctcatgcca

SEQ ID NO: 44302 - DNA, 25 bp, Saccharomyces pastorianus
gccacctccgtgagactgactgaaa

SEQ ID NO: 44303 - DNA, 25 bp, Saccharomyces pastorianus
aatgccaagctgtcgatcatgcacg

SEQ ID NO: 44304 - DNA, 25 bp, Saccharomyces pastorianus
acgatttggacatcctggtcaccga

SEQ ID NO: 44305 - DNA, 25 bp, Saccharomyces pastorianus
agcacaactgtttgcacgaaccaca

SEQ ID NO: 44306 - DNA, 25 bp, Saccharomyces pastorianus
attgccatgaacaccccagtggaag

SEQ ID NO: 44307 - DNA, 25 bp, Saccharomyces pastorianus
gtgtctgagatctcaagtcgtctcc

SEQ ID NO: 44308 - DNA, 25 bp, Saccharomyces pastorianus
atgccaactccacgaacgttaacgg

SEQ ID NO: 44309 - DNA, 25 bp, Saccharomyces pastorianus
gggtccgctgacttcttgagaaatg

SEQ ID NO: 44310 - DNA, 25 bp, Saccharomyces pastorianus
aactgctacgctttttcttacatga

SEQ ID NO: 44311 - DNA, 25 bp, Saccharomyces pastorianus
ttttgcaatgctgggttctggtatc

SEQ ID NO: 44312 - DNA, 25 bp, Saccharomyces pastorianus
atttgagcattttgccggactccat

SEQ ID NO: 44313 - DNA, 25 bp, Saccharomyces pastorianus
atgagttcgcaatctcagattccaa

SEQ ID NO: 44314 - DNA, 25 bp, Saccharomyces pastorianus
aaccgtcgctgttcgaattgataga

SEQ ID NO: 44315 - DNA, 25 bp, Saccharomyces pastorianus
gtatccccgcaagctgaactctata

SEQ ID NO: 44316 - DNA, 25 bp, Saccharomyces pastorianus
aaagagtactccattgtcacaatca

SEQ ID NO: 44317 - DNA, 25 bp, Saccharomyces pastorianus
gttaggcttgaaaaaccgtcgctgt

SEQ ID NO: 44318 - DNA, 25 bp, Saccharomyces pastorianus
tccatgactcctgcgtttacattaa

SEQ ID NO: 44319 - DNA, 25 bp, Saccharomyces pastorianus
tttacattaatgcaacctccctctt

SEQ ID NO: 44320 - DNA, 25 bp, Saccharomyces pastorianus
agatttcaatcaactgctacgcttt

SEQ ID NO: 44321 - DNA, 25 bp, Saccharomyces pastorianus
agttgtacctgccacagaaccgcgt

SEQ ID NO: 44322 - DNA, 25 bp, Saccharomyces pastorianus
ttcgagtacgaccagcagcaagact

SEQ ID NO: 44323 - DNA, 25 bp, Saccharomyces pastorianus
aaacgagtgttgctacacgcgtgca

SEQ ID NO: 44324 - DNA, 25 bp, Saccharomyces pastorianus
agacgctgtgcgagcagttgtacct

SEQ ID NO: 44325 - DNA, 25 bp, Saccharomyces pastorianus
cagttcgagggattcgccgttgagc

SEQ ID NO: 44326 - DNA, 25 bp, Saccharomyces pastorianus
gagaactgccatcctgctggaacag

SEQ ID NO: 44327 - DNA, 25 bp, Saccharomyces pastorianus
tcgtcgctcgcctgcagaaaagatg

SEQ ID NO: 44328 - DNA, 25 bp, Saccharomyces pastorianus
gcataacgaccgaggacaggcgcat

SEQ ID NO: 44329 - DNA, 25 bp, Saccharomyces pastorianus
atcgtggcacagacgaagccgctgg

SEQ ID NO: 44330 - DNA, 25 bp, Saccharomyces pastorianus
gtggcgaaggactccaagctacaca

SEQ ID NO: 44331 - DNA, 25 bp, Saccharomyces pastorianus
catcccgtcgtgcttaaacgagtgt

SEQ ID NO: 44332 - DNA, 25 bp, Saccharomyces pastorianus
tgcaacagctcacacagcggtccag

SEQ ID NO: 44333 - DNA, 25 bp, Saccharomyces pastorianus
tggaatatgaggtgggccactcgct

SEQ ID NO: 44334 - DNA, 25 bp, Saccharomyces pastorianus
ggcagggctcgcagcactcgaaaag

SEQ ID NO: 44335 - DNA, 25 bp, Saccharomyces pastorianus
gctgacgacgatagcgccaagaaga

SEQ ID NO: 44336 - DNA, 25 bp, Saccharomyces pastorianus
agcactcgaaaagtcgccgcaggtg

SEQ ID NO: 44337 - DNA, 25 bp, Saccharomyces pastorianus
gctacgtgccgaagcagcagctgga

SEQ ID NO: 44338 - DNA, 25 bp, Saccharomyces pastorianus
gttcactgcggctgagctgcaacag

SEQ ID NO: 44339 - DNA, 25 bp, Saccharomyces pastorianus
gcggtccagcgctgacgacgatagc

SEQ ID NO: 44340 - DNA, 25 bp, Saccharomyces pastorianus
ctcgccgatgcagcgcaggtggaat

SEQ ID NO: 44341 - DNA, 25 bp, Saccharomyces pastorianus
aaagtcgccgcaggtggtgttcact

SEQ ID NO: 44342 - DNA, 25 bp, Saccharomyces pastorianus
gtattacgacgtactggcagggctc

SEQ ID NO: 44343 - DNA, 25 bp, Saccharomyces pastorianus
aacattcccagtcagattccaagtc

SEQ ID NO: 44344 - DNA, 25 bp, Saccharomyces pastorianus
tgatgccgcccaagctttaaactgt

SEQ ID NO: 44345 - DNA, 25 bp, Saccharomyces pastorianus
atatcccaacattactgacgctgag

SEQ ID NO: 44346 - DNA, 25 bp, Saccharomyces pastorianus
taatgactaccgcaaagttcgccac

SEQ ID NO: 44347 - DNA, 25 bp, Saccharomyces pastorianus
gagtctcaagcttcctgtgacaaac

SEQ ID NO: 44348 - DNA, 25 bp, Saccharomyces pastorianus
acaacgtctctgcaccatggaatgg

SEQ ID NO: 44349 - DNA, 25 bp, Saccharomyces pastorianus
tcacttggttccaggtgggccaaac

SEQ ID NO: 44350 - DNA, 25 bp, Saccharomyces pastorianus
gaatgttcctgctcagagactgaca

SEQ ID NO: 44351 - DNA, 25 bp, Saccharomyces pastorianus
agcgaatgggtcttacggttctcgt

SEQ ID NO: 44352 - DNA, 25 bp, Saccharomyces pastorianus
ttgaaaccggcatcgaacgtttgac

SEQ ID NO: 44353 - DNA, 25 bp, Saccharomyces pastorianus
gacacaatttgttccatcgctttag

SEQ ID NO: 44354 - DNA, 25 bp, Saccharomyces pastorianus
ggtctacatgttgctcactcatttt

SEQ ID NO: 44355 - DNA, 25 bp, Saccharomyces pastorianus
atatcgactactgtgacttctccgt

SEQ ID NO: 44356 - DNA, 25 bp, Saccharomyces pastorianus
gatttgcctttggacggttcatacg

SEQ ID NO: 44357 - DNA, 25 bp, Saccharomyces pastorianus
gtttctttagccgttgttagagcca

SEQ ID NO: 44358 - DNA, 25 bp, Saccharomyces pastorianus
gaccaatgctgatcccaagtttgct

SEQ ID NO: 44359 - DNA, 25 bp, Saccharomyces pastorianus
gatttcattgccagatctccaggta

SEQ ID NO: 44360 - DNA, 25 bp, Saccharomyces pastorianus
tagtagtgcctacggtgctaaacca

SEQ ID NO: 44361 - DNA, 25 bp, Saccharomyces pastorianus
atgggccctgattatcacatgtcta

SEQ ID NO: 44362 - DNA, 25 bp, Saccharomyces pastorianus
ggttcatacgttacgatcgaccctt

SEQ ID NO: 44363 - DNA, 25 bp, Saccharomyces pastorianus
gaaaatgtgccagtcgccgaattca

SEQ ID NO: 44364 - DNA, 25 bp, Saccharomyces pastorianus
tgaaggcgatgttccaactggcagt

SEQ ID NO: 44365 - DNA, 25 bp, Saccharomyces pastorianus
gctaggttccaagaaggtcgaaaag

SEQ ID NO: 44366 - DNA, 25 bp, Saccharomyces pastorianus
cttacgccaaggtttttgctgctga

SEQ ID NO: 44367 - DNA, 25 bp, Saccharomyces pastorianus
tacgccaaggtttttgctgctgaaa

SEQ ID NO: 44368 - DNA, 25 bp, Saccharomyces pastorianus
tgaaaagctaggttccaagaaggtc

SEQ ID NO: 44369 - DNA, 25 bp, Saccharomyces pastorianus
cgaaaagaccggtaccaagccagct

SEQ ID NO: 44370 - DNA, 25 bp, Saccharomyces pastorianus
caaggtttttgctgctgaaaagcta

SEQ ID NO: 44371 - DNA, 25 bp, Saccharomyces pastorianus
gccaaggtttttgctgctgaaaagc

SEQ ID NO: 44372 - DNA, 25 bp, Saccharomyces pastorianus
ttacgccaaggtttttgctgctgaa

SEQ ID NO: 44373 - DNA, 25 bp, Saccharomyces pastorianus
ttttgctgctgaaaagctaggttcc

SEQ ID NO: 44374 - DNA, 25 bp, Saccharomyces pastorianus
tcgaaaagaccggtaccaagccagc

SEQ ID NO: 44375 - DNA, 25 bp, Saccharomyces pastorianus
acgccaaggtttttgctgctgaaaa

SEQ ID NO: 44376 - DNA, 25 bp, Saccharomyces pastorianus
aaaacgctatacacgttgtgccgcc

SEQ ID NO: 44377 - DNA, 25 bp, Saccharomyces pastorianus
atatcgttcacttagttggatccat

SEQ ID NO: 44378 - DNA, 25 bp, Saccharomyces pastorianus
gtccaatattcattctctttgtaat

SEQ ID NO: 44379 - DNA, 25 bp, Saccharomyces pastorianus
tacaccatccattcatgacgcagag

SEQ ID NO: 44380 - DNA, 25 bp, Saccharomyces pastorianus
ttggatccataccttctacactaat

SEQ ID NO: 44381 - DNA, 25 bp, Saccharomyces pastorianus
ttgtgccgccggaggacgaaagtac

SEQ ID NO: 44382 - DNA, 25 bp, Saccharomyces pastorianus
caaatatacattcggctctgggcaa

SEQ ID NO: 44383 - DNA, 25 bp, Saccharomyces pastorianus
aagcttggaccacctgagcgaaaga

SEQ ID NO: 44384 - DNA, 25 bp, Saccharomyces pastorianus
atcagttttcattttgccaatagtg

SEQ ID NO: 44385 - DNA, 25 bp, Saccharomyces pastorianus
cgggaatatggccactgagacgaat

SEQ ID NO: 44386 - DNA, 25 bp, Saccharomyces pastorianus
gctgtctacagccttgagcgaatta

SEQ ID NO: 44387 - DNA, 25 bp, Saccharomyces pastorianus
aatattttttgacgcttcctgcctt

SEQ ID NO: 44388 - DNA, 25 bp, Saccharomyces pastorianus
ttgccttttgcaatacgcacgatgt

SEQ ID NO: 44389 - DNA, 25 bp, Saccharomyces pastorianus
gatagcggatcttgggaagtttcca

SEQ ID NO: 44390 - DNA, 25 bp, Saccharomyces pastorianus
atccctcatgtacctggatccatgg

SEQ ID NO: 44391 - DNA, 25 bp, Saccharomyces pastorianus
ctaaaggttctacacaggagtctaa

SEQ ID NO: 44392 - DNA, 25 bp, Saccharomyces pastorianus
tatggtctttactttttctcatccc

SEQ ID NO: 44393 - DNA, 25 bp, Saccharomyces pastorianus
ttcacaccacaggatacagacaatg

SEQ ID NO: 44394 - DNA, 25 bp, Saccharomyces pastorianus
agtcggttctatgggcttcttgttc

SEQ ID NO: 44395 - DNA, 25 bp, Saccharomyces pastorianus
ttttcattttatggtcggtcgctgc

SEQ ID NO: 44396 - DNA, 25 bp, Saccharomyces pastorianus
tagctgcctttagagtagtcggttc

SEQ ID NO: 44397 - DNA, 25 bp, Saccharomyces pastorianus
taaggccattgtggtgcaaggtcca

SEQ ID NO: 44398 - DNA, 25 bp, Saccharomyces pastorianus
aaagagaaatacctcacttccacca

SEQ ID NO: 44399 - DNA, 25 bp, Saccharomyces pastorianus
agcaacctttatcctcgcgagaaca

SEQ ID NO: 44400 - DNA, 25 bp, Saccharomyces pastorianus
acagcccagcaacaacctatttggt

SEQ ID NO: 44401 - DNA, 25 bp, Saccharomyces pastorianus
cggcttgtaccgttgaaccagatga

SEQ ID NO: 44402 - DNA, 25 bp, Saccharomyces pastorianus
agaggattgctagacactttgcccc

SEQ ID NO: 44403 - DNA, 25 bp, Saccharomyces pastorianus
tagacaacccaattccaagaggatt

SEQ ID NO: 44404 - DNA, 25 bp, Saccharomyces pastorianus
gccttccctgggagacgacgagaaa

SEQ ID NO: 44405 - DNA, 25 bp, Saccharomyces pastorianus
gaagatcagtactccttggcaagaa

SEQ ID NO: 44406 - DNA, 25 bp, Saccharomyces pastorianus
gggaatgccaaatcgccatctgtat

SEQ ID NO: 44407 - DNA, 25 bp, Saccharomyces pastorianus
gcgagaacacagacttaccggtaga

SEQ ID NO: 44408 - DNA, 25 bp, Saccharomyces pastorianus
aggttacactttgcggtttgcggag

SEQ ID NO: 44409 - DNA, 25 bp, Saccharomyces pastorianus
cgatgcctggtatagatgcggtgat

SEQ ID NO: 44410 - DNA, 25 bp, Saccharomyces pastorianus
gaaacctcattccaagggtatcttg

SEQ ID NO: 44411 - DNA, 25 bp, Saccharomyces pastorianus
gatgcggtgatctgctgaaagctga

SEQ ID NO: 44412 - DNA, 25 bp, Saccharomyces pastorianus
tccctcgaaagccagaaacctcatt

SEQ ID NO: 44413 - DNA, 25 bp, Saccharomyces pastorianus
gcaggttttgccgtgattaagttag

SEQ ID NO: 44414 - DNA, 25 bp, Saccharomyces pastorianus
atgttttcaaacacggcgatgcctg

SEQ ID NO: 44415 - DNA, 25 bp, Saccharomyces pastorianus
agtctaccgtcttatgcaatgccat

SEQ ID NO: 44416 - DNA, 25 bp, Saccharomyces pastorianus
attaagccgattaagtctaccgtct

SEQ ID NO: 44417 - DNA, 25 bp, Saccharomyces pastorianus
gatattgccacaaagattcggcttt

SEQ ID NO: 44418 - DNA, 25 bp, Saccharomyces pastorianus
gcaatacgcgcaagttgttgtggtt

SEQ ID NO: 44419 - DNA, 25 bp, Saccharomyces pastorianus
tccgaaaatgtttctaccaccgagg

SEQ ID NO: 44420 - DNA, 25 bp, Saccharomyces pastorianus
aacgttttattaccgcattctacag

SEQ ID NO: 44421 - DNA, 25 bp, Saccharomyces pastorianus
gccgtataatttagtcctctttcct

SEQ ID NO: 44422 - DNA, 25 bp, Saccharomyces pastorianus
ttagtcctctttcctgaaggtacaa

SEQ ID NO: 44423 - DNA, 25 bp, Saccharomyces pastorianus
ggaagtctcctgaacgtataactga

SEQ ID NO: 44424 - DNA, 25 bp, Saccharomyces pastorianus
gaacagatcctttggccgtataatt

SEQ ID NO: 44425 - DNA, 25 bp, Saccharomyces pastorianus
tctcagtgctgatacccgacaaaag

SEQ ID NO: 44426 - DNA, 25 bp, Saccharomyces pastorianus
gaaaagtactattcgacaggttcgt

SEQ ID NO: 44427 - DNA, 25 bp, Saccharomyces pastorianus
caggttcgtttataactgatgccga

SEQ ID NO: 44428 - DNA, 25 bp, Saccharomyces pastorianus
ttattgacccagaacagatcctttg

SEQ ID NO: 44429 - DNA, 25 bp, Saccharomyces pastorianus
aaccattcggttactgatagcttca

SEQ ID NO: 44430 - DNA, 25 bp, Saccharomyces pastorianus
gatactaccagctttgacgacactt

SEQ ID NO: 44431 - DNA, 25 bp, Saccharomyces pastorianus
gaattctctcccatctaaaaagcaa

SEQ ID NO: 44432 - DNA, 25 bp, Saccharomyces pastorianus
tcttttgttccttcaagtaacttat

SEQ ID NO: 44433 - DNA, 25 bp, Saccharomyces pastorianus
gtttattgtcttattatcatccatt

SEQ ID NO: 44434 - DNA, 25 bp, Saccharomyces pastorianus
ggaaaatagaattctctcccatcta

SEQ ID NO: 44435 - DNA, 25 bp, Saccharomyces pastorianus
gaaggcaaagtggtcttaatgaaac

SEQ ID NO: 44436 - DNA, 25 bp, Saccharomyces pastorianus
aaaaagcaattcagtggccatttgt

SEQ ID NO: 44437 - DNA, 25 bp, Saccharomyces pastorianus
atgttgtcgcgccatctgctgtgaa

SEQ ID NO: 44438 - DNA, 25 bp, Saccharomyces pastorianus
taggaaagttgtcgtcccaggtatt

SEQ ID NO: 44439 - DNA, 25 bp, Saccharomyces pastorianus
aaattactacggagaatgccactat

SEQ ID NO: 44440 - DNA, 25 bp, Saccharomyces pastorianus
gcgccatctgctgtgaaaattacta

SEQ ID NO: 44441 - DNA, 25 bp, Saccharomyces pastorianus
gaatgccactattcccaaagggacg

SEQ ID NO: 44442 - DNA, 25 bp, Saccharomyces pastorianus
gagctactctttcttatctggttga

SEQ ID NO: 44443 - DNA, 25 bp, Saccharomyces pastorianus
ggtctcctgtatattccaaactcaa

SEQ ID NO: 44444 - DNA, 25 bp, Saccharomyces pastorianus
aactgctctttttggatatgccgct

SEQ ID NO: 44445 - DNA, 25 bp, Saccharomyces pastorianus
acttacctttttgcctctatttatg

SEQ ID NO: 44446 - DNA, 25 bp, Saccharomyces pastorianus
tagcctttatcgtcctaggtgcaag

SEQ ID NO: 44447 - DNA, 25 bp, Saccharomyces pastorianus
gtatttgtcaccacgccgatgataa

SEQ ID NO: 44448 - DNA, 25 bp, Saccharomyces pastorianus
taatctttggctggtgcttggacaa

SEQ ID NO: 44449 - DNA, 25 bp, Saccharomyces pastorianus
tgcgatttccttttcaaccgtatac

SEQ ID NO: 44450 - DNA, 25 bp, Saccharomyces pastorianus
gggtaacaccgctcattggaactgc

SEQ ID NO: 44451 - DNA, 25 bp, Saccharomyces pastorianus
attggccgcaacagctgtatttgtc

SEQ ID NO: 44452 - DNA, 25 bp, Saccharomyces pastorianus
gggccttcacgatgttagcctttat

SEQ ID NO: 44453 - DNA, 25 bp, Saccharomyces pastorianus
gactcggacacttcattatctgata

SEQ ID NO: 44454 - DNA, 25 bp, Saccharomyces pastorianus
aacttgccatcatacccgaattcaa

SEQ ID NO: 44455 - DNA, 25 bp, Saccharomyces pastorianus
gatgcaagggactatccgccaatga

SEQ ID NO: 44456 - DNA, 25 bp, Saccharomyces pastorianus
gggccccatgggtacatcgattatt

SEQ ID NO: 44457 - DNA, 25 bp, Saccharomyces pastorianus
attttcttcaatgatgggccccatg

SEQ ID NO: 44458 - DNA, 25 bp, Saccharomyces pastorianus
gggtacatcgattatttttccagcg

SEQ ID NO: 44459 - DNA, 25 bp, Saccharomyces pastorianus
aggccaatttggataccgcgacatc

SEQ ID NO: 44460 - DNA, 25 bp, Saccharomyces pastorianus
attatggtggtcgtccctgtccgag

SEQ ID NO: 44461 - DNA, 25 bp, Saccharomyces pastorianus
gaacgggaaccagctagatagactc

SEQ ID NO: 44462 - DNA, 25 bp, Saccharomyces pastorianus
ccgcgacatcgaacggtcatggtca

SEQ ID NO: 44463 - DNA, 25 bp, Saccharomyces pastorianus
gaacggtcatggtcagaacgggaac

SEQ ID NO: 44464 - DNA, 25 bp, Saccharomyces pastorianus
ggcaaccacaggtgaggcgttttta

SEQ ID NO: 44465 - DNA, 25 bp, Saccharomyces pastorianus
tttcctgcagcagacagttacctta

SEQ ID NO: 44466 - DNA, 25 bp, Saccharomyces pastorianus
ttttcttctacttcaaacctggtgg

SEQ ID NO: 44467 - DNA, 25 bp, Saccharomyces pastorianus
cgaacccgattttatgaccaagctg

SEQ ID NO: 44468 - DNA, 25 bp, Saccharomyces pastorianus
gaataacagcttatgccatgggcta

SEQ ID NO: 44469 - DNA, 25 bp, Saccharomyces pastorianus
ctcccatccgaggttgcgtttaaga

SEQ ID NO: 44470 - DNA, 25 bp, Saccharomyces pastorianus
aaagggttcattcccagccatggta

SEQ ID NO: 44471 - DNA, 25 bp, Saccharomyces pastorianus
aatggactcatgtttggccagcata

SEQ ID NO: 44472 - DNA, 25 bp, Saccharomyces pastorianus
gtagatgctgtattatccgccgttg

SEQ ID NO: 44473 - DNA, 25 bp, Saccharomyces pastorianus
aaacgaagcttcacagtctttcctg

SEQ ID NO: 44474 - DNA, 25 bp, Saccharomyces pastorianus
ggccagcatagcaacgttcatcaaa

SEQ ID NO: 44475 - DNA, 25 bp, Saccharomyces pastorianus
aaaattctacgatgccttcaatccg

SEQ ID NO: 44476 - DNA, 25 bp, Saccharomyces pastorianus
ttcaatccgtatcttgacagccaag

SEQ ID NO: 44477 - DNA, 25 bp, Saccharomyces pastorianus
atcccaacttttcgaggccttagca

SEQ ID NO: 44478 - DNA, 25 bp, Saccharomyces pastorianus
gccaacggaggtaagctcagtctta

SEQ ID NO: 44479 - DNA, 25 bp, Saccharomyces pastorianus
ggtttgatcataactcgtatctgtt

SEQ ID NO: 44480 - DNA, 25 bp, Saccharomyces pastorianus
gggacaacccctgaagtgattgatt

SEQ ID NO: 44481 - DNA, 25 bp, Saccharomyces pastorianus
agacgctgcgagtagtagctattca

SEQ ID NO: 44482 - DNA, 25 bp, Saccharomyces pastorianus
gaaatttctgacttatccggaacga

SEQ ID NO: 44483 - DNA, 25 bp, Saccharomyces pastorianus
gtagcaaagtttacaccatcccaac

SEQ ID NO: 44484 - DNA, 25 bp, Saccharomyces pastorianus
gatagcagtacttccagtgtaaggt

SEQ ID NO: 44485 - DNA, 25 bp, Saccharomyces pastorianus
ggtagttatgtgaccgctggaacaa

SEQ ID NO: 44486 - DNA, 25 bp, Saccharomyces pastorianus
gcaccgtaccatcgtcatcagaaga

SEQ ID NO: 44487 - DNA, 25 bp, Saccharomyces pastorianus
taagactgtcagattcaacgtcgtc

SEQ ID NO: 44488 - DNA, 25 bp, Saccharomyces pastorianus
gacacaagaacgtcccagttcacgt

SEQ ID NO: 44489 - DNA, 25 bp, Saccharomyces pastorianus
tttccgtgttcaagttggtgacatc

SEQ ID NO: 44490 - DNA, 25 bp, Saccharomyces pastorianus
cgttaccgtcggtcaatgtagacca

SEQ ID NO: 44491 - DNA, 25 bp, Saccharomyces pastorianus
aagagcttacttgcattacattcca

SEQ ID NO: 44492 - DNA, 25 bp, Saccharomyces pastorianus
gttcaagttggtgacatcgttaccg

SEQ ID NO: 44493 - DNA, 25 bp, Saccharomyces pastorianus
atgcaccgtaccatcgtcatcagaa

SEQ ID NO: 44494 - DNA, 25 bp, Saccharomyces pastorianus
tccgtgttcaagttggtgacatcgt

SEQ ID NO: 44495 - DNA, 25 bp, Saccharomyces pastorianus
gtgttcaagttggtgacatcgttac

SEQ ID NO: 44496 - DNA, 25 bp, Saccharomyces pastorianus
tcaagttggtgacatcgttaccgtc

SEQ ID NO: 44497 - DNA, 25 bp, Saccharomyces pastorianus
gctcacaattcaggcattacaacat

SEQ ID NO: 44498 - DNA, 25 bp, Saccharomyces pastorianus
gatcaggcagagttgctcacaattc

SEQ ID NO: 44499 - DNA, 25 bp, Saccharomyces pastorianus
ataagggcaaggtccattttagata

SEQ ID NO: 44500 - DNA, 25 bp, Saccharomyces pastorianus
gtcctttgttatgggtatcgttatc

SEQ ID NO: 44501 - DNA, 25 bp, Saccharomyces pastorianus
gaaatccccaactgtcctttgttat

SEQ ID NO: 44502 - DNA, 25 bp, Saccharomyces pastorianus
ggactcatgggtttggttattcaga

SEQ ID NO: 44503 - DNA, 25 bp, Saccharomyces pastorianus
gcattattttacatcgcgaaagttc

SEQ ID NO: 44504 - DNA, 25 bp, Saccharomyces pastorianus
aacgatgcactagtttgggttgaac

SEQ ID NO: 44505 - DNA, 25 bp, Saccharomyces pastorianus
aaagatcccgctgagctttataagt

SEQ ID NO: 44506 - DNA, 25 bp, Saccharomyces pastorianus
gggcccgaatggatagctgttgcta

SEQ ID NO: 44507 - DNA, 25 bp, Saccharomyces pastorianus
aaagaccatttttcaagacgcattg

SEQ ID NO: 44508 - DNA, 25 bp, Saccharomyces pastorianus
ggatctcggatattcgactactagt

SEQ ID NO: 44509 - DNA, 25 bp, Saccharomyces pastorianus
aatggcgatgtcaaccgtagtgtag

SEQ ID NO: 44510 - DNA, 25 bp, Saccharomyces pastorianus
tctagtgcacgtgctctattcaaca

SEQ ID NO: 44511 - DNA, 25 bp, Saccharomyces pastorianus
gcttcaatgctttctatgggactaa

SEQ ID NO: 44512 - DNA, 25 bp, Saccharomyces pastorianus
tccaacatatggacgatcccgactt

SEQ ID NO: 44513 - DNA, 25 bp, Saccharomyces pastorianus
gactactagtccttacgctttaact

SEQ ID NO: 44514 - DNA, 25 bp, Saccharomyces pastorianus
atcaggacgctgagacggctatgaa

SEQ ID NO: 44515 - DNA, 25 bp, Saccharomyces pastorianus
aatgtggcatctctcaattaattga

SEQ ID NO: 44516 - DNA, 25 bp, Saccharomyces pastorianus
aaatgggtcctttacaacgatgaga

SEQ ID NO: 44517 - DNA, 25 bp, Saccharomyces pastorianus
aattctgtacactccggtcattatg

SEQ ID NO: 44518 - DNA, 25 bp, Saccharomyces pastorianus
taatggagagttgcctggttctgaa

SEQ ID NO: 44519 - DNA, 25 bp, Saccharomyces pastorianus
gaaccaattccaagccaagacacga

SEQ ID NO: 44520 - DNA, 25 bp, Saccharomyces pastorianus
ggtcatgaatcaacccgatcaagcg

SEQ ID NO: 44521 - DNA, 25 bp, Saccharomyces pastorianus
aagcgccacagcacaggtcatgaat

SEQ ID NO: 44522 - DNA, 25 bp, Saccharomyces pastorianus
gcaatcacatcactcgcacagagtt

SEQ ID NO: 44523 - DNA, 25 bp, Saccharomyces pastorianus
cgtctgaaagaaggccgctgcataa

SEQ ID NO: 44524 - DNA, 25 bp, Saccharomyces pastorianus
gatcagtacatcgactccatcggaa

SEQ ID NO: 44525 - DNA, 25 bp, Saccharomyces pastorianus
gggacagcaatagcagcatcacgat

SEQ ID NO: 44526 - DNA, 25 bp, Saccharomyces pastorianus
ggatcacagtgcatctacgaggcag

SEQ ID NO: 44527 - DNA, 25 bp, Saccharomyces pastorianus
aaataaatctgactcaccagctccg

SEQ ID NO: 44528 - DNA, 25 bp, Saccharomyces pastorianus
gccaatcactggacctcgagagaat

SEQ ID NO: 44529 - DNA, 25 bp, Saccharomyces pastorianus
tgaggaagtcctttgctagagcccg

SEQ ID NO: 44530 - DNA, 25 bp, Saccharomyces pastorianus
gataatacagcgagtctgcccttaa

SEQ ID NO: 44531 - DNA, 25 bp, Saccharomyces pastorianus
ggcacttctaggagcgtttcagcaa

SEQ ID NO: 44532 - DNA, 25 bp, Saccharomyces pastorianus
gcgagtctgcccttaaagattggag

SEQ ID NO: 44533 - DNA, 25 bp, Saccharomyces pastorianus
atccggcagttgagaggtatactcc

SEQ ID NO: 44534 - DNA, 25 bp, Saccharomyces pastorianus
agattggagatgtcgcatgcctaaa

SEQ ID NO: 44535 - DNA, 25 bp, Saccharomyces pastorianus
tttcagcaatgggaaatccggcagt

SEQ ID NO: 44536 - DNA, 25 bp, Saccharomyces pastorianus
actacgaatggcacttctaggagcg

SEQ ID NO: 44537 - DNA, 25 bp, Saccharomyces pastorianus
gatgtcgcatgcctaaaaagagtgt

SEQ ID NO: 44538 - DNA, 25 bp, Saccharomyces pastorianus
actccgggaaaaattgtctgcgtgg

SEQ ID NO: 44539 - DNA, 25 bp, Saccharomyces pastorianus
aaaagagtgttggttcatgatgaga

SEQ ID NO: 44540 - DNA, 25 bp, Saccharomyces pastorianus
gggacgcataaagtcgagattgtaa

SEQ ID NO: 44541 - DNA, 25 bp, Saccharomyces pastorianus
tagaatcaggctttccatgtgcggc

SEQ ID NO: 44542 - DNA, 25 bp, Saccharomyces pastorianus
agactagtgacgatcctgccttttt

SEQ ID NO: 44543 - DNA, 25 bp, Saccharomyces pastorianus
aagaccttttgctagaccaatcgat

SEQ ID NO: 44544 - DNA, 25 bp, Saccharomyces pastorianus
atcataggcacgttggttcagtctc

SEQ ID NO: 44545 - DNA, 25 bp, Saccharomyces pastorianus
tgctgcatcatcaccttttggttga

SEQ ID NO: 44546 - DNA, 25 bp, Saccharomyces pastorianus
tacttttcttggattcttcccacat

SEQ ID NO: 44547 - DNA, 25 bp, Saccharomyces pastorianus
ggttcagtctcttgtgcatgtgatt

SEQ ID NO: 44548 - DNA, 25 bp, Saccharomyces pastorianus
tatacgtaggctactctgaccaggc

SEQ ID NO: 44549 - DNA, 25 bp, Saccharomyces pastorianus
gcgaaatgcttcgtcttttacagaa

SEQ ID NO: 44550 - DNA, 25 bp, Saccharomyces pastorianus
aattttgcagccttgcgcagaattt

SEQ ID NO: 44551 - DNA, 25 bp, Saccharomyces pastorianus
gaattttccccgctgtcaagtgaaa

SEQ ID NO: 44552 - DNA, 25 bp, Saccharomyces pastorianus
attacagaatcttttgcagcattga

SEQ ID NO: 44553 - DNA, 25 bp, Saccharomyces pastorianus
gggtcctctaatgacgatcttttca

SEQ ID NO: 44554 - DNA, 25 bp, Saccharomyces pastorianus
tggaacccctcggtagatctacaag

SEQ ID NO: 44555 - DNA, 25 bp, Saccharomyces pastorianus
caacatggactagcgccttggagtt

SEQ ID NO: 44556 - DNA, 25 bp, Saccharomyces pastorianus
gtgcttcccggcttatattatttga

SEQ ID NO: 44557 - DNA, 25 bp, Saccharomyces pastorianus
aagtcacagtccatacggcagtgtc

SEQ ID NO: 44558 - DNA, 25 bp, Saccharomyces pastorianus
aaatccatgcttcatataccggttg

SEQ ID NO: 44559 - DNA, 25 bp, Saccharomyces pastorianus
gaaagacgatatcacatttgcattc

SEQ ID NO: 44560 - DNA, 25 bp, Saccharomyces pastorianus
gaaaagcgtagtcccacaacatgga

SEQ ID NO: 44561 - DNA, 25 bp, Saccharomyces pastorianus
gttggtcacaactggatgcatcgat

SEQ ID NO: 44562 - DNA, 25 bp, Saccharomyces pastorianus
gataatgattggaacccctcggtag

SEQ ID NO: 44563 - DNA, 25 bp, Saccharomyces pastorianus
gctgaagatccatattctacacgat

SEQ ID NO: 44564 - DNA, 25 bp, Saccharomyces pastorianus
atggagctttgcacgtatgacggaa

SEQ ID NO: 44565 - DNA, 25 bp, Saccharomyces pastorianus
gacgagctatccgtatcgattagtt

SEQ ID NO: 44566 - DNA, 25 bp, Saccharomyces pastorianus
agaagttctactttgcagggctcaa

SEQ ID NO: 44567 - DNA, 25 bp, Saccharomyces pastorianus
ggtaagtcccatgaaaaatcgcctg

SEQ ID NO: 44568 - DNA, 25 bp, Saccharomyces pastorianus
aattcaactaacagatccccttacg

SEQ ID NO: 44569 - DNA, 25 bp, Saccharomyces pastorianus
gaaccaatagttgcggagctgcttc

SEQ ID NO: 44570 - DNA, 25 bp, Saccharomyces pastorianus
gaatagagcatgcacgttatcgttt

SEQ ID NO: 44571 - DNA, 25 bp, Saccharomyces pastorianus
attatgcaccaccagctttttcatt

SEQ ID NO: 44572 - DNA, 25 bp, Saccharomyces pastorianus
ggaaagtcccagcatttgacgaatt

SEQ ID NO: 44573 - DNA, 25 bp, Saccharomyces pastorianus
gaagttacagtttaccaaggcagaa

SEQ ID NO: 44574 - DNA, 25 bp, Saccharomyces pastorianus
ataacgggctgtttactcccagtga

SEQ ID NO: 44575 - DNA, 25 bp, Saccharomyces pastorianus
gaaaactatttcacccactatatcc

SEQ ID NO: 44576 - DNA, 25 bp, Saccharomyces pastorianus
ggatttcgtctgaattcaagccaca

SEQ ID NO: 44577 - DNA, 25 bp, Saccharomyces pastorianus
ctctcccttggcatattatacacag

SEQ ID NO: 44578 - DNA, 25 bp, Saccharomyces pastorianus
gaatacacgtgaaatgcccctgctg

SEQ ID NO: 44579 - DNA, 25 bp, Saccharomyces pastorianus
atgcccctgctgtgaaagttggatt

SEQ ID NO: 44580 - DNA, 25 bp, Saccharomyces pastorianus
gatgtcgtatatccaaacccgcaat

SEQ ID NO: 44581 - DNA, 25 bp, Saccharomyces pastorianus
agcatctattttttgcgcacgggat

SEQ ID NO: 44582 - DNA, 25 bp, Saccharomyces pastorianus
ttcctaccaggatttcgagtcgctt

SEQ ID NO: 44583 - DNA, 25 bp, Saccharomyces pastorianus
gccacacacactgtaccaatttgag

SEQ ID NO: 44584 - DNA, 25 bp, Saccharomyces pastorianus
aaaaatcctgagctcactcgtcgta

SEQ ID NO: 44585 - DNA, 25 bp, Saccharomyces pastorianus
gatctgcacgcgtgtgttggccaga

SEQ ID NO: 44586 - DNA, 25 bp, Saccharomyces pastorianus
gtgtgttggccagatacccaatagc

SEQ ID NO: 44587 - DNA, 25 bp, Saccharomyces pastorianus
ctacgggttgttggtggtcaagata

SEQ ID NO: 44588 - DNA, 25 bp, Saccharomyces pastorianus
ccaatagcgacctcctgctgctgtt

SEQ ID NO: 44589 - DNA, 25 bp, Saccharomyces pastorianus
ttggtggtcaagatagaaaaggcct

SEQ ID NO: 44590 - DNA, 25 bp, Saccharomyces pastorianus
gcgtgtgttggccagatacccaata

SEQ ID NO: 44591 - DNA, 25 bp, Saccharomyces pastorianus
tgcacgcgtgtgttggccagatacc

SEQ ID NO: 44592 - DNA, 25 bp, Saccharomyces pastorianus
ctgctgctgttccttgcggatagta

SEQ ID NO: 44593 - DNA, 25 bp, Saccharomyces pastorianus
tgcggatagtacgtttccctacggg

SEQ ID NO: 44594 - DNA, 25 bp, Saccharomyces pastorianus
tccctacgggttgttggtggtcaag

SEQ ID NO: 44595 - DNA, 25 bp, Saccharomyces pastorianus
tgttccttgcggatagtacgtttcc

SEQ ID NO: 44596 - DNA, 25 bp, Saccharomyces pastorianus
tatgcgacctcggacagtagcgtgc

SEQ ID NO: 44597 - DNA, 25 bp, Saccharomyces pastorianus
ccacaaatggtggtatactttccta

SEQ ID NO: 44598 - DNA, 25 bp, Saccharomyces pastorianus
ttgaagccatacgatctcagctcgg

SEQ ID NO: 44599 - DNA, 25 bp, Saccharomyces pastorianus
gatctcagctcggtggatttcaaga

SEQ ID NO: 44600 - DNA, 25 bp, Saccharomyces pastorianus
aacgtcaaagtgttcctggagaaca

SEQ ID NO: 44601 - DNA, 25 bp, Saccharomyces pastorianus
cacttacagtcctcgatactgctaa

SEQ ID NO: 44602 - DNA, 25 bp, Saccharomyces pastorianus
gatttcaagacttcccacttacagt

SEQ ID NO: 44603 - DNA, 25 bp, Saccharomyces pastorianus
ttcctggagaacactttgaagccat

SEQ ID NO: 44604 - DNA, 25 bp, Saccharomyces pastorianus
cgatactgctaaccgccacaaatgg

SEQ ID NO: 44605 - DNA, 25 bp, Saccharomyces pastorianus
gtggtatactttcctatgcgacctc

SEQ ID NO: 44606 - DNA, 25 bp, Saccharomyces pastorianus
agtagcgtgccgaaaaactcgataa

SEQ ID NO: 44607 - DNA, 25 bp, Saccharomyces pastorianus
gtttgtctattgtttccaacgacga

SEQ ID NO: 44608 - DNA, 25 bp, Saccharomyces pastorianus
actcaattggccaaggtcggtcaaa

SEQ ID NO: 44609 - DNA, 25 bp, Saccharomyces pastorianus
gacgaattatccaaggttgccttca

SEQ ID NO: 44610 - DNA, 25 bp, Saccharomyces pastorianus
gtcaccggtaacttcaccagtttga

SEQ ID NO: 44611 - DNA, 25 bp, Saccharomyces pastorianus
accagtttgaacttgtcttctttga

SEQ ID NO: 44612 - DNA, 25 bp, Saccharomyces pastorianus
agcaacttctcttgtgacgcattga

SEQ ID NO: 44613 - DNA, 25 bp, Saccharomyces pastorianus
tacttcttccggatcttccaagagc

SEQ ID NO: 44614 - DNA, 25 bp, Saccharomyces pastorianus
caaggtgactccttcgtttgtaaga

SEQ ID NO: 44615 - DNA, 25 bp, Saccharomyces pastorianus
tctgatgattcctctaacgctcaag

SEQ ID NO: 44616 - DNA, 25 bp, Saccharomyces pastorianus
aaaccgtcggcggtgccattgaagt

SEQ ID NO: 44617 - DNA, 25 bp, Saccharomyces pastorianus
gtggtgctaatttcgattcttccgc

SEQ ID NO: 44618 - DNA, 25 bp, Saccharomyces pastorianus
cgccgattctccatatgccggtggt

SEQ ID NO: 44619 - DNA, 25 bp, Saccharomyces pastorianus
atatcacccaaatatcaacgccaac

SEQ ID NO: 44620 - DNA, 25 bp, Saccharomyces pastorianus
gacatcctaaaagaccaatggtccc

SEQ ID NO: 44621 - DNA, 25 bp, Saccharomyces pastorianus
aatcgctcacatttacaagactgat

SEQ ID NO: 44622 - DNA, 25 bp, Saccharomyces pastorianus
ttgacggatgccaacccagacgatc

SEQ ID NO: 44623 - DNA, 25 bp, Saccharomyces pastorianus
ccagacgatcctttggtgccagaaa

SEQ ID NO: 44624 - DNA, 25 bp, Saccharomyces pastorianus
ttacaagactgatagatccaagtac

SEQ ID NO: 44625 - DNA, 25 bp, Saccharomyces pastorianus
agttctattatccatctgctctttg

SEQ ID NO: 44626 - DNA, 25 bp, Saccharomyces pastorianus
caacgccaacggtaacatttgtctg

SEQ ID NO: 44627 - DNA, 25 bp, Saccharomyces pastorianus
ggtgccagaaatcgctcacatttac

SEQ ID NO: 44628 - DNA, 25 bp, Saccharomyces pastorianus
atctgctctttgttgacggatgcca

SEQ ID NO: 44629 - DNA, 25 bp, Saccharomyces pastorianus
gcaccgaatgtcaaatctacgggtt

SEQ ID NO: 44630 - DNA, 25 bp, Saccharomyces pastorianus
gtccatttccaatttgatgcttgtt

SEQ ID NO: 44631 - DNA, 25 bp, Saccharomyces pastorianus
taagtacttagcaccgaatgtcaaa

SEQ ID NO: 44632 - DNA, 25 bp, Saccharomyces pastorianus
caatttgatgcttgtttcaggatgt

SEQ ID NO: 44633 - DNA, 25 bp, Saccharomyces pastorianus
tggtccatttccaatttgatgcttg

SEQ ID NO: 44634 - DNA, 25 bp, Saccharomyces pastorianus
tttccaatttgatgcttgtttcagg

SEQ ID NO: 44635 - DNA, 25 bp, Saccharomyces pastorianus
gtacttagcaccgaatgtcaaatct

SEQ ID NO: 44636 - DNA, 25 bp, Saccharomyces pastorianus
aggatgttccatgtcaacaaatggt

SEQ ID NO: 44637 - DNA, 25 bp, Saccharomyces pastorianus
taataagtacttagcaccgaatgtc

SEQ ID NO: 44638 - DNA, 25 bp, Saccharomyces pastorianus
cttagcaccgaatgtcaaatctacg

SEQ ID NO: 44639 - DNA, 25 bp, Saccharomyces pastorianus
ttcaggatgttccatgtcaacaaat

SEQ ID NO: 44640 - DNA, 25 bp, Saccharomyces pastorianus
tcaactgtactttatttgtttgctg

SEQ ID NO: 44641 - DNA, 25 bp, Saccharomyces pastorianus
aactgtactttatttgtttgctggt

SEQ ID NO: 44642 - DNA, 25 bp, Saccharomyces pastorianus
tactgacgttgacaaaaagaaggat

SEQ ID NO: 44643 - DNA, 25 bp, Saccharomyces pastorianus
tgtttgctggttactgacgttgaca

SEQ ID NO: 44644 - DNA, 25 bp, Saccharomyces pastorianus
gtttgctggttactgacgttgacaa

SEQ ID NO: 44645 - DNA, 25 bp, Saccharomyces pastorianus
tgctggttactgacgttgacaaaaa

SEQ ID NO: 44646 - DNA, 25 bp, Saccharomyces pastorianus
ttgtttgctggttactgacgttgac

SEQ ID NO: 44647 - DNA, 25 bp, Saccharomyces pastorianus
ctgtactttatttgtttgctggtta

SEQ ID NO: 44648 - DNA, 25 bp, Saccharomyces pastorianus
aacgagaatggcgagaagaggaatg

SEQ ID NO: 44649 - DNA, 25 bp, Saccharomyces pastorianus
ctggttactgacgttgacaaaaaga

SEQ ID NO: 44650 - DNA, 25 bp, Saccharomyces pastorianus
ttgctggttactgacgttgacaaaa

SEQ ID NO: 44651 - DNA, 25 bp, Saccharomyces pastorianus
taccgcaacgtagaatcttacttag

SEQ ID NO: 44652 - DNA, 25 bp, Saccharomyces pastorianus
accgcaacgtagaatcttacttagc

SEQ ID NO: 44653 - DNA, 25 bp, Saccharomyces pastorianus
gcaattaacgttaaagtgtcggtgt

SEQ ID NO: 44654 - DNA, 25 bp, Saccharomyces pastorianus
ttgttaccgcaacgtagaatcttac

SEQ ID NO: 44655 - DNA, 25 bp, Saccharomyces pastorianus
gttaccgcaacgtagaatcttactt

SEQ ID NO: 44656 - DNA, 25 bp, Saccharomyces pastorianus
aagtgtcggtgttgttaccgcaacg

SEQ ID NO: 44657 - DNA, 25 bp, Saccharomyces pastorianus
gtgttgttaccgcaacgtagaatct

SEQ ID NO: 44658 - DNA, 25 bp, Saccharomyces pastorianus
gcaacgtagaatcttacttagcgag

SEQ ID NO: 44659 - DNA, 25 bp, Saccharomyces pastorianus
tgttgtcagcaattaacgttaaagt

SEQ ID NO: 44660 - DNA, 25 bp, Saccharomyces pastorianus
agtgtcggtgttgttaccgcaacgt

SEQ ID NO: 44661 - DNA, 25 bp, Saccharomyces pastorianus
taaagtgtcggtgttgttaccgcaa

SEQ ID NO: 44662 - DNA, 25 bp, Saccharomyces pastorianus
taccgcaacgtagaatcttacttag

SEQ ID NO: 44663 - DNA, 25 bp, Saccharomyces pastorianus
gcaattaacgttaaagtgtcggtgt

SEQ ID NO: 44664 - DNA, 25 bp, Saccharomyces pastorianus
ttgttaccgcaacgtagaatcttac

SEQ ID NO: 44665 - DNA, 25 bp, Saccharomyces pastorianus
tgttgtcagcaattaacgttaaagt

SEQ ID NO: 44666 - DNA, 25 bp, Saccharomyces pastorianus
gttaccgcaacgtagaatcttactt

SEQ ID NO: 44667 - DNA, 25 bp, Saccharomyces pastorianus
atggagtccggtgtgttgtcagcaa

SEQ ID NO: 44668 - DNA, 25 bp, Saccharomyces pastorianus
aagtgtcggtgttgttaccgcaacg

SEQ ID NO: 44669 - DNA, 25 bp, Saccharomyces pastorianus
gtgttgttaccgcaacgtagaatct

SEQ ID NO: 44670 - DNA, 25 bp, Saccharomyces pastorianus
gcaacgtagaatcttacttagcgag

SEQ ID NO: 44671 - DNA, 25 bp, Saccharomyces pastorianus
agtgtcggtgttgttaccgcaacgt

SEQ ID NO: 44672 - DNA, 25 bp, Saccharomyces pastorianus
taaagtgtcggtgttgttaccgcaa

SEQ ID NO: 44673 - DNA, 25 bp, Saccharomyces pastorianus
gctagacagctatcacagatcgcat

SEQ ID NO: 44674 - DNA, 25 bp, Saccharomyces pastorianus
attactattccagtagcgctgcgtg

SEQ ID NO: 44675 - DNA, 25 bp, Saccharomyces pastorianus
gaaactaatgtcaacaccaccatga

SEQ ID NO: 44676 - DNA, 25 bp, Saccharomyces pastorianus
gaggactgtaaagcaaccggattaa

SEQ ID NO: 44677 - DNA, 25 bp, Saccharomyces pastorianus
agtagcgctgcgtgttgtcaagaga

SEQ ID NO: 44678 - DNA, 25 bp, Saccharomyces pastorianus
gaaccgatctatgaatccaacttat

SEQ ID NO: 44679 - DNA, 25 bp, Saccharomyces pastorianus
tatacctaccgccttacaatcataa

SEQ ID NO: 44680 - DNA, 25 bp, Saccharomyces pastorianus
ccgagagttcttgggcatttcagac

SEQ ID NO: 44681 - DNA, 25 bp, Saccharomyces pastorianus
taacttaactttacctgaggactgt

SEQ ID NO: 44682 - DNA, 25 bp, Saccharomyces pastorianus
ggatccgtctctatttcgacgttaa

SEQ ID NO: 44683 - DNA, 25 bp, Saccharomyces pastorianus
acttctatcattgctaccatcatca

SEQ ID NO: 44684 - DNA, 25 bp, Saccharomyces pastorianus
cccacccaggtgacgattcattata

SEQ ID NO: 44685 - DNA, 25 bp, Saccharomyces pastorianus
ggaacacttcttgccgcttgaaaaa

SEQ ID NO: 44686 - DNA, 25 bp, Saccharomyces pastorianus
tcacacgcccattactcatatagag

SEQ ID NO: 44687 - DNA, 25 bp, Saccharomyces pastorianus
tgacgatgtctttattccaacacaa

SEQ ID NO: 44688 - DNA, 25 bp, Saccharomyces pastorianus
gacatatgggacatccgcttcaatg

SEQ ID NO: 44689 - DNA, 25 bp, Saccharomyces pastorianus
ggcagtggtcagtccatcaagattt

SEQ ID NO: 44690 - DNA, 25 bp, Saccharomyces pastorianus
cgttggctacaattcaggtcgatca

SEQ ID NO: 44691 - DNA, 25 bp, Saccharomyces pastorianus
gggacattgtcaaaccgcgttcata

SEQ ID NO: 44692 - DNA, 25 bp, Saccharomyces pastorianus
attatcgctctctaaggcagtggtc

SEQ ID NO: 44693 - DNA, 25 bp, Saccharomyces pastorianus
gatccattatcatgtttgacctgaa

SEQ ID NO: 44694 - DNA, 25 bp, Saccharomyces pastorianus
aaaattccataatcgtcgtaggcgg

SEQ ID NO: 44695 - DNA, 25 bp, Saccharomyces pastorianus
gatcaggatgtgcaagccctatctt

SEQ ID NO: 44696 - DNA, 25 bp, Saccharomyces pastorianus
gccttatctcgtgtgctgttttgaa

SEQ ID NO: 44697 - DNA, 25 bp, Saccharomyces pastorianus
gagcgacttagctgttatcatcaac

SEQ ID NO: 44698 - DNA, 25 bp, Saccharomyces pastorianus
aaatcgatcgggttgtgccttatct

SEQ ID NO: 44699 - DNA, 25 bp, Saccharomyces pastorianus
gaatcgtattcgctaattgtttgag

SEQ ID NO: 44700 - DNA, 25 bp, Saccharomyces pastorianus
atctgtgcgaacactggaccagttg

SEQ ID NO: 44701 - DNA, 25 bp, Saccharomyces pastorianus
aatgacaaagatcgcgcgttacggg

SEQ ID NO: 44702 - DNA, 25 bp, Saccharomyces pastorianus
gcagtatttgcgcagtttgtttcag

SEQ ID NO: 44703 - DNA, 25 bp, Saccharomyces pastorianus
ggaaagcgccactaaatattcagca

SEQ ID NO: 44704 - DNA, 25 bp, Saccharomyces pastorianus
tacccaagtactatcatctgtgcga

SEQ ID NO: 44705 - DNA, 25 bp, Saccharomyces pastorianus
ggcacttttgcataacatcttacca

SEQ ID NO: 44706 - DNA, 25 bp, Saccharomyces pastorianus
taatacaagtatcacatgttttcca

SEQ ID NO: 44707 - DNA, 25 bp, Saccharomyces pastorianus
cctatacaattccttcttctgtgat

SEQ ID NO: 44708 - DNA, 25 bp, Saccharomyces pastorianus
aaacgtatcttcctatacaattcct

SEQ ID NO: 44709 - DNA, 25 bp, Saccharomyces pastorianus
ggccctcttgagtttattcaaatca

SEQ ID NO: 44710 - DNA, 25 bp, Saccharomyces pastorianus
tatcttcctatacaattccttcttc

SEQ ID NO: 44711 - DNA, 25 bp, Saccharomyces pastorianus
atggccctcttgagtttattcaaat

SEQ ID NO: 44712 - DNA, 25 bp, Saccharomyces pastorianus
ttcctatacaattccttcttctgtg

SEQ ID NO: 44713 - DNA, 25 bp, Saccharomyces pastorianus
gccctcttgagtttattcaaatcac

SEQ ID NO: 44714 - DNA, 25 bp, Saccharomyces pastorianus
atcttcctatacaattccttcttct

SEQ ID NO: 44715 - DNA, 25 bp, Saccharomyces pastorianus
tcttcctatacaattccttcttctg

SEQ ID NO: 44716 - DNA, 25 bp, Saccharomyces pastorianus
gagtttattcaaatcacttaataca

SEQ ID NO: 44717 - DNA, 25 bp, Saccharomyces pastorianus
gatgggcaagtgaacgtctacgacc

SEQ ID NO: 44718 - DNA, 25 bp, Saccharomyces pastorianus
ggatggtatccccatttttgttgga

SEQ ID NO: 44719 - DNA, 25 bp, Saccharomyces pastorianus
gtctttgacctgtcgtggaaccata

SEQ ID NO: 44720 - DNA, 25 bp, Saccharomyces pastorianus
actggcgctttcaatcatggatggt

SEQ ID NO: 44721 - DNA, 25 bp, Saccharomyces pastorianus
ggcatcatggttccatcagtgtctt

SEQ ID NO: 44722 - DNA, 25 bp, Saccharomyces pastorianus
aacaaacttctgctaagtgcgtcag

SEQ ID NO: 44723 - DNA, 25 bp, Saccharomyces pastorianus
ggcagcagcattacaattccacaac

SEQ ID NO: 44724 - DNA, 25 bp, Saccharomyces pastorianus
gaggagaatacactactggcgcttt

SEQ ID NO: 44725 - DNA, 25 bp, Saccharomyces pastorianus
gcaatagttgcactaccacgggcag

SEQ ID NO: 44726 - DNA, 25 bp, Saccharomyces pastorianus
aaagcatcgtatctgcgtcatgggt

SEQ ID NO: 44727 - DNA, 25 bp, Saccharomyces pastorianus
aaaggtgccattttcgtatatcaaa

SEQ ID NO: 44728 - DNA, 25 bp, Saccharomyces pastorianus
aaggcgatatcagctctttagatga

SEQ ID NO: 44729 - DNA, 25 bp, Saccharomyces pastorianus
tggcaagaatgactcaggcacgact

SEQ ID NO: 44730 - DNA, 25 bp, Saccharomyces pastorianus
gagcatattcccataggtacactag

SEQ ID NO: 44731 - DNA, 25 bp, Saccharomyces pastorianus
gcgcattggcgctacaagatgaaac

SEQ ID NO: 44732 - DNA, 25 bp, Saccharomyces pastorianus
gaacagcatctttctgaggacttta

SEQ ID NO: 44733 - DNA, 25 bp, Saccharomyces pastorianus
agcctaggctctgatgtggcatcta

SEQ ID NO: 44734 - DNA, 25 bp, Saccharomyces pastorianus
aaatttccagaaatctctactgagg

SEQ ID NO: 44735 - DNA, 25 bp, Saccharomyces pastorianus
atgtggcatctagcggtactggtga

SEQ ID NO: 44736 - DNA, 25 bp, Saccharomyces pastorianus
gcatccattcttgcatacggtgaaa

SEQ ID NO: 44737 - DNA, 25 bp, Saccharomyces pastorianus
aggattcagttgcaagattgaccca

SEQ ID NO: 44738 - DNA, 25 bp, Saccharomyces pastorianus
gactgatggactaagcctaggctct

SEQ ID NO: 44739 - DNA, 25 bp, Saccharomyces pastorianus
ccccgtatggttccacgacaggtca

SEQ ID NO: 44740 - DNA, 25 bp, Saccharomyces pastorianus
cttccccaagcgaatatgctacaga

SEQ ID NO: 44741 - DNA, 25 bp, Saccharomyces pastorianus
aatatgctacagaaattttgtcccc

SEQ ID NO: 44742 - DNA, 25 bp, Saccharomyces pastorianus
gaaccttccccaagcgaatatgcta

SEQ ID NO: 44743 - DNA, 25 bp, Saccharomyces pastorianus
tccccaagcgaatatgctacagaaa

SEQ ID NO: 44744 - DNA, 25 bp, Saccharomyces pastorianus
ggcttatatggctacaactgaacct

SEQ ID NO: 44745 - DNA, 25 bp, Saccharomyces pastorianus
atatggctacaactgaaccttcccc

SEQ ID NO: 44746 - DNA, 25 bp, Saccharomyces pastorianus
ttccccaagcgaatatgctacagaa

SEQ ID NO: 44747 - DNA, 25 bp, Saccharomyces pastorianus
tgaaccttccccaagcgaatatgct

SEQ ID NO: 44748 - DNA, 25 bp, Saccharomyces pastorianus
tacagaaattttgtcccccgtatgg

SEQ ID NO: 44749 - DNA, 25 bp, Saccharomyces pastorianus
cccaagcgaatatgctacagaaatt

SEQ ID NO: 44750 - DNA, 25 bp, Saccharomyces pastorianus
aagacctcctatgcaagcgtcagaa

SEQ ID NO: 44751 - DNA, 25 bp, Saccharomyces pastorianus
gtattctcagaatacgtccgctgga

SEQ ID NO: 44752 - DNA, 25 bp, Saccharomyces pastorianus
gatgcacatgatgctcatgctagat

SEQ ID NO: 44753 - DNA, 25 bp, Saccharomyces pastorianus
gaaaaaaggtctcagcacctccacc

SEQ ID NO: 44754 - DNA, 25 bp, Saccharomyces pastorianus
gtgaggcagctgtagcaacggaaat

SEQ ID NO: 44755 - DNA, 25 bp, Saccharomyces pastorianus
atgacagcgccaatagagttgacga

SEQ ID NO: 44756 - DNA, 25 bp, Saccharomyces pastorianus
gcatgatggcgctcatgatgcacat

SEQ ID NO: 44757 - DNA, 25 bp, Saccharomyces pastorianus
tgcggtcagcttgccttcaagacct

SEQ ID NO: 44758 - DNA, 25 bp, Saccharomyces pastorianus
gaaacccaaacctaagactctctct

SEQ ID NO: 44759 - DNA, 25 bp, Saccharomyces pastorianus
gtggtcgtggtcgtatagtaaagca

SEQ ID NO: 44760 - DNA, 25 bp, Saccharomyces pastorianus
tattaagaaagcacctccacctgtt

SEQ ID NO: 44761 - DNA, 25 bp, Saccharomyces pastorianus
caatgactccgaacaagaactctta

SEQ ID NO: 44762 - DNA, 25 bp, Saccharomyces pastorianus
gttgaagcacgttttgacatccatt

SEQ ID NO: 44763 - DNA, 25 bp, Saccharomyces pastorianus
taatgtctcgtcagctcaaatccaa

SEQ ID NO: 44764 - DNA, 25 bp, Saccharomyces pastorianus
aatctctgctgctgagttgaagcac

SEQ ID NO: 44765 - DNA, 25 bp, Saccharomyces pastorianus
cagctcaaatccaatgactccgaac

SEQ ID NO: 44766 - DNA, 25 bp, Saccharomyces pastorianus
gaacggtgacggcttaatctctgct

SEQ ID NO: 44767 - DNA, 25 bp, Saccharomyces pastorianus
gcacgttttgacatccattggtgaa

SEQ ID NO: 44768 - DNA, 25 bp, Saccharomyces pastorianus
tcgcccagtgaagccgaagtcaacg

SEQ ID NO: 44769 - DNA, 25 bp, Saccharomyces pastorianus
atttttggccctaatgtctcgtcag

SEQ ID NO: 44770 - DNA, 25 bp, Saccharomyces pastorianus
aaattgacgttgatggtaaccacca

SEQ ID NO: 44771 - DNA, 25 bp, Saccharomyces pastorianus
aactgactgatgcagaagtagacga

SEQ ID NO: 44772 - DNA, 25 bp, Saccharomyces pastorianus
aaaatagttgaagcccgtcacgtca

SEQ ID NO: 44773 - DNA, 25 bp, Saccharomyces pastorianus
attggatgcgcgtgttcagaatgta

SEQ ID NO: 44774 - DNA, 25 bp, Saccharomyces pastorianus
gtcgacaccgctgcactaagagagt

SEQ ID NO: 44775 - DNA, 25 bp, Saccharomyces pastorianus
gaatgcttcactgtcgaattgcaca

SEQ ID NO: 44776 - DNA, 25 bp, Saccharomyces pastorianus
agagtgggatagtgctgttcgtacc

SEQ ID NO: 44777 - DNA, 25 bp, Saccharomyces pastorianus
gttcgtaccactagaaactccggtg

SEQ ID NO: 44778 - DNA, 25 bp, Saccharomyces pastorianus
gatggcaaacccgacgaaattttat

SEQ ID NO: 44779 - DNA, 25 bp, Saccharomyces pastorianus
gtattcaatgatcctggtttcacca

SEQ ID NO: 44780 - DNA, 25 bp, Saccharomyces pastorianus
tattacagaagcagttccgtcctcc

SEQ ID NO: 44781 - DNA, 25 bp, Saccharomyces pastorianus
gaattgcacaagttcccagacgaaa

SEQ ID NO: 44782 - DNA, 25 bp, Saccharomyces pastorianus
gtcctcctgttgaaggtgtgtgcat

SEQ ID NO: 44783 - DNA, 25 bp, Saccharomyces pastorianus
aacattcaatgtgaggttttcctcg

SEQ ID NO: 44784 - DNA, 25 bp, Saccharomyces pastorianus
caattaaccaagatgaagccgcaat

SEQ ID NO: 44785 - DNA, 25 bp, Saccharomyces pastorianus
gctggtttccagacagtaaagcttc

SEQ ID NO: 44786 - DNA, 25 bp, Saccharomyces pastorianus
agtaccgacctgttaagatcaccag

SEQ ID NO: 44787 - DNA, 25 bp, Saccharomyces pastorianus
gttttcctcgtaagtttgaaagctg

SEQ ID NO: 44788 - DNA, 25 bp, Saccharomyces pastorianus
aaggtagcatgtctccgacgcaaag

SEQ ID NO: 44789 - DNA, 25 bp, Saccharomyces pastorianus
gcggcaagtggcagtcgtcgacaaa

SEQ ID NO: 44790 - DNA, 25 bp, Saccharomyces pastorianus
agccgcaatcggtagattgacccca

SEQ ID NO: 44791 - DNA, 25 bp, Saccharomyces pastorianus
aaagctggtggcgtggccctgaatc

SEQ ID NO: 44792 - DNA, 25 bp, Saccharomyces pastorianus
tctcaacctgctttagaagtagaca

SEQ ID NO: 44793 - DNA, 25 bp, Saccharomyces pastorianus
ggcgtggccctgaatctttgtgaag

SEQ ID NO: 44794 - DNA, 25 bp, Saccharomyces pastorianus
gtcatcatgcaacacaccaattttt

SEQ ID NO: 44795 - DNA, 25 bp, Saccharomyces pastorianus
cgtcactgtcaggagagatttcttt

SEQ ID NO: 44796 - DNA, 25 bp, Saccharomyces pastorianus
caaatgtgactgtgcctcgaaggac

SEQ ID NO: 44797 - DNA, 25 bp, Saccharomyces pastorianus
tgcattgtgaccactgtaaccatgt

SEQ ID NO: 44798 - DNA, 25 bp, Saccharomyces pastorianus
aatgaggcagctggcagaccatccc

SEQ ID NO: 44799 - DNA, 25 bp, Saccharomyces pastorianus
ggtgaaatgtactctctgatcagat

SEQ ID NO: 44800 - DNA, 25 bp, Saccharomyces pastorianus
gatttttgaacatcaaccccttcac

SEQ ID NO: 44801 - DNA, 25 bp, Saccharomyces pastorianus
tcattctggatgaggcgcacaatat

SEQ ID NO: 44802 - DNA, 25 bp, Saccharomyces pastorianus
tcagaagttcggtgtagagggcccc

SEQ ID NO: 44803 - DNA, 25 bp, Saccharomyces pastorianus
atgcgaacattttcacccttgatca

SEQ ID NO: 44804 - DNA, 25 bp, Saccharomyces pastorianus
ataccgccagagcagtgaacaattt

SEQ ID NO: 44805 - DNA, 25 bp, Saccharomyces pastorianus
attcgctgtcagagacatgagacaa

SEQ ID NO: 44806 - DNA, 25 bp, Saccharomyces pastorianus
gctttcagtgaatacccaccattag

SEQ ID NO: 44807 - DNA, 25 bp, Saccharomyces pastorianus
cagtgaatacccaccattaggtaga

SEQ ID NO: 44808 - DNA, 25 bp, Saccharomyces pastorianus
gctgtcggtgttatcaagtctgttg

SEQ ID NO: 44809 - DNA, 25 bp, Saccharomyces pastorianus
aggtagattcgctgtcagagacatg

SEQ ID NO: 44810 - DNA, 25 bp, Saccharomyces pastorianus
atgtgtgttgaagctttcagtgaat

SEQ ID NO: 44811 - DNA, 25 bp, Saccharomyces pastorianus
gaagctttcagtgaatacccaccat

SEQ ID NO: 44812 - DNA, 25 bp, Saccharomyces pastorianus
attaggtagattcgctgtcagagac

SEQ ID NO: 44813 - DNA, 25 bp, Saccharomyces pastorianus
ccaccattaggtagattcgctgtca

SEQ ID NO: 44814 - DNA, 25 bp, Saccharomyces pastorianus
ggtgttatcaagtctgttgacaaga

SEQ ID NO: 44815 - DNA, 25 bp, Saccharomyces pastorianus
gtcggtgttatcaagtctgttgaca

SEQ ID NO: 44816 - DNA, 25 bp, Saccharomyces pastorianus
ggcggcccgtacgaattcgttattg

SEQ ID NO: 44817 - DNA, 25 bp, Saccharomyces pastorianus
aagtacaccacgacagcactgaaga

SEQ ID NO: 44818 - DNA, 25 bp, Saccharomyces pastorianus
agtttgaagcccgtagactacagga

SEQ ID NO: 44819 - DNA, 25 bp, Saccharomyces pastorianus
caccgaacaaagtcttgcttgtaca

SEQ ID NO: 44820 - DNA, 25 bp, Saccharomyces pastorianus
tacaagactgtttcggatgctacaa

SEQ ID NO: 44821 - DNA, 25 bp, Saccharomyces pastorianus
ttaccaagcggcactacagatgcgt

SEQ ID NO: 44822 - DNA, 25 bp, Saccharomyces pastorianus
gtaaagtcaaaatagcggcggcccg

SEQ ID NO: 44823 - DNA, 25 bp, Saccharomyces pastorianus
gatgcgtcattatcacagatacttg

SEQ ID NO: 44824 - DNA, 25 bp, Saccharomyces pastorianus
gatacttggaaacgaagctctagtc

SEQ ID NO: 44825 - DNA, 25 bp, Saccharomyces pastorianus
gattagtcagcgtccgaaacctagc

SEQ ID NO: 44826 - DNA, 25 bp, Saccharomyces pastorianus
gtccgaaacctagctttcatcgaat

SEQ ID NO: 44827 - DNA, 25 bp, Saccharomyces pastorianus
aacccattatggaaccctagtagag

SEQ ID NO: 44828 - DNA, 25 bp, Saccharomyces pastorianus
gatcgtggatgctaattctggtggt

SEQ ID NO: 44829 - DNA, 25 bp, Saccharomyces pastorianus
gagagcctaccgttcccgaagggag

SEQ ID NO: 44830 - DNA, 25 bp, Saccharomyces pastorianus
gggaaatctcgaccggccatttatc

SEQ ID NO: 44831 - DNA, 25 bp, Saccharomyces pastorianus
ttcatattcgggaagcggtttgctt

SEQ ID NO: 44832 - DNA, 25 bp, Saccharomyces pastorianus
agaggtacagttctatgttttccgt

SEQ ID NO: 44833 - DNA, 25 bp, Saccharomyces pastorianus
atgggtgactacctatcgctactag

SEQ ID NO: 44834 - DNA, 25 bp, Saccharomyces pastorianus
gttttccgtaaatacagcatctgct

SEQ ID NO: 44835 - DNA, 25 bp, Saccharomyces pastorianus
gttgttcgcaggtcacagtatccaa

SEQ ID NO: 44836 - DNA, 25 bp, Saccharomyces pastorianus
ggccatttatcaccaattcgatgtt

SEQ ID NO: 44837 - DNA, 25 bp, Saccharomyces pastorianus
agcatctgctggttctggttctgga

SEQ ID NO: 44838 - DNA, 25 bp, Saccharomyces pastorianus
aggcttgatcctaaaacggccgcca

SEQ ID NO: 44839 - DNA, 25 bp, Saccharomyces pastorianus
tatggatgtcggtactcaagggtca

SEQ ID NO: 44840 - DNA, 25 bp, Saccharomyces pastorianus
gaacgtcgatattgctgttggcgat

SEQ ID NO: 44841 - DNA, 25 bp, Saccharomyces pastorianus
gtgagccgaatatcgcagaggtttt

SEQ ID NO: 44842 - DNA, 25 bp, Saccharomyces pastorianus
taacgacaatttagacgcagacggg

SEQ ID NO: 44843 - DNA, 25 bp, Saccharomyces pastorianus
cgcggtttcaatcacgaacgtcgat

SEQ ID NO: 44844 - DNA, 25 bp, Saccharomyces pastorianus
gaaggtaccggcaaatgcagacgat

SEQ ID NO: 44845 - DNA, 25 bp, Saccharomyces pastorianus
ggccgccactatgaaaagggatctt

SEQ ID NO: 44846 - DNA, 25 bp, Saccharomyces pastorianus
tgacgctataactgaggagccagat

SEQ ID NO: 44847 - DNA, 25 bp, Saccharomyces pastorianus
actcaagggtcatccgcggtttcaa

SEQ ID NO: 44848 - DNA, 25 bp, Saccharomyces pastorianus
gagccagatgatgccgccttagaaa

SEQ ID NO: 44849 - DNA, 25 bp, Saccharomyces pastorianus
taccaccaccacctaaattatcaat

SEQ ID NO: 44850 - DNA, 25 bp, Saccharomyces pastorianus
tggtcttggaccgtagcgttagaat

SEQ ID NO: 44851 - DNA, 25 bp, Saccharomyces pastorianus
aacatggccctatcgaatctcaaaa

SEQ ID NO: 44852 - DNA, 25 bp, Saccharomyces pastorianus
gaagccttcaaggaacatggcccta

SEQ ID NO: 44853 - DNA, 25 bp, Saccharomyces pastorianus
tcaatggttgggtttcctttactgt

SEQ ID NO: 44854 - DNA, 25 bp, Saccharomyces pastorianus
gttccttggagtgggataacttcaa

SEQ ID NO: 44855 - DNA, 25 bp, Saccharomyces pastorianus
ttaacgaacaccctataattggcaa

SEQ ID NO: 44856 - DNA, 25 bp, Saccharomyces pastorianus
gagttccctttagagatgaatctgt

SEQ ID NO: 44857 - DNA, 25 bp, Saccharomyces pastorianus
taaaagtcacaatgcccaagggaac

SEQ ID NO: 44858 - DNA, 25 bp, Saccharomyces pastorianus
gaataccaagtacggacttccaatt

SEQ ID NO: 44859 - DNA, 25 bp, Saccharomyces pastorianus
taaattagacaatgtcccctccgca

SEQ ID NO: 44860 - DNA, 25 bp, Saccharomyces pastorianus
gaggcaccgtttcccttggcagagt

SEQ ID NO: 44861 - DNA, 25 bp, Saccharomyces pastorianus
gggttcgacaacatgactgccatta

SEQ ID NO: 44862 - DNA, 25 bp, Saccharomyces pastorianus
taacgaaattgcttgatcacggaat

SEQ ID NO: 44863 - DNA, 25 bp, Saccharomyces pastorianus
gtcactgccgaaccagatgtactga

SEQ ID NO: 44864 - DNA, 25 bp, Saccharomyces pastorianus
aatgttactcaacacctaaccggcg

SEQ ID NO: 44865 - DNA, 25 bp, Saccharomyces pastorianus
agcaatactggtgttgggttcgaca

SEQ ID NO: 44866 - DNA, 25 bp, Saccharomyces pastorianus
aagtaccacctagtgtcaggaacga

SEQ ID NO: 44867 - DNA, 25 bp, Saccharomyces pastorianus
aagaggtgtcacatatccacacaga

SEQ ID NO: 44868 - DNA, 25 bp, Saccharomyces pastorianus
ggcgaatcgctacaagattggttca

SEQ ID NO: 44869 - DNA, 25 bp, Saccharomyces pastorianus
gcaagaagcgcaagtcactgccgaa

SEQ ID NO: 44870 - DNA, 25 bp, Saccharomyces pastorianus
gcagagcatttagcgatttccaatt

SEQ ID NO: 44871 - DNA, 25 bp, Saccharomyces pastorianus
gagaaatttttatcgagtccaagtg

SEQ ID NO: 44872 - DNA, 25 bp, Saccharomyces pastorianus
gattgtttacacaccatccaaggat

SEQ ID NO: 44873 - DNA, 25 bp, Saccharomyces pastorianus
atctcatttagcctatactccttta

SEQ ID NO: 44874 - DNA, 25 bp, Saccharomyces pastorianus
aagtctgttctggaattctgtatac

SEQ ID NO: 44875 - DNA, 25 bp, Saccharomyces pastorianus
gaaagcgttactacaggcagtgatt

SEQ ID NO: 44876 - DNA, 25 bp, Saccharomyces pastorianus
gatgtttgatcccaggaatccagag

SEQ ID NO: 44877 - DNA, 25 bp, Saccharomyces pastorianus
gattagcgagcttgacggaatattg

SEQ ID NO: 44878 - DNA, 25 bp, Saccharomyces pastorianus
gaatccagagcaccaagtctgttct

SEQ ID NO: 44879 - DNA, 25 bp, Saccharomyces pastorianus
cacgactggaaaattgcgcttgaga

SEQ ID NO: 44880 - DNA, 25 bp, Saccharomyces pastorianus
taatgttcaagtttccaccagggca

SEQ ID NO: 44881 - DNA, 25 bp, Saccharomyces pastorianus
gacaaagaactaatgcacgactgga

SEQ ID NO: 44882 - DNA, 25 bp, Saccharomyces pastorianus
gttccggaaattgtcccatttagat

SEQ ID NO: 44883 - DNA, 25 bp, Saccharomyces pastorianus
gaagagattacctgttccggaaatt

SEQ ID NO: 44884 - DNA, 25 bp, Saccharomyces pastorianus
caatggttccttgaaaacttccctg

SEQ ID NO: 44885 - DNA, 25 bp, Saccharomyces pastorianus
tagatggcaacacactgcggccgat

SEQ ID NO: 44886 - DNA, 25 bp, Saccharomyces pastorianus
taacgctagaaatacctacgccagg

SEQ ID NO: 44887 - DNA, 25 bp, Saccharomyces pastorianus
ctgcggccgatgagaaattgaactt

SEQ ID NO: 44888 - DNA, 25 bp, Saccharomyces pastorianus
ggaccactcgatacaaaatgcacta

SEQ ID NO: 44889 - DNA, 25 bp, Saccharomyces pastorianus
gccgttatggcaatggtaggacaca

SEQ ID NO: 44890 - DNA, 25 bp, Saccharomyces pastorianus
tacgccaggtcatacgccgttatgg

SEQ ID NO: 44891 - DNA, 25 bp, Saccharomyces pastorianus
ttgacaccgaatctactggatgcat

SEQ ID NO: 44892 - DNA, 25 bp, Saccharomyces pastorianus
agcgaagtcactttggccttaatga

SEQ ID NO: 44893 - DNA, 25 bp, Saccharomyces pastorianus
atattttagttcctgcattttggca

SEQ ID NO: 44894 - DNA, 25 bp, Saccharomyces pastorianus
acgtccgatataacattggtactgg

SEQ ID NO: 44895 - DNA, 25 bp, Saccharomyces pastorianus
gaatatgtaccactgaactacccct

SEQ ID NO: 44896 - DNA, 25 bp, Saccharomyces pastorianus
agaagtgcgcgaagtgcatcagtat

SEQ ID NO: 44897 - DNA, 25 bp, Saccharomyces pastorianus
cagttatttgttgcccttgttattc

SEQ ID NO: 44898 - DNA, 25 bp, Saccharomyces pastorianus
attgtatctcgcacagtcttggaaa

SEQ ID NO: 44899 - DNA, 25 bp, Saccharomyces pastorianus
tccgcttttatcttcattgtatctc

SEQ ID NO: 44900 - DNA, 25 bp, Saccharomyces pastorianus
gtgagaatcctagcaagcagttatt

SEQ ID NO: 44901 - DNA, 25 bp, Saccharomyces pastorianus
ctgggtgctttattggatacatctc

SEQ ID NO: 44902 - DNA, 25 bp, Saccharomyces pastorianus
attggtgtattggacgtcacaaagc

SEQ ID NO: 44903 - DNA, 25 bp, Saccharomyces pastorianus
gaatcctgggatatcaatcgcaaag

SEQ ID NO: 44904 - DNA, 25 bp, Saccharomyces pastorianus
ttgatgcaggccacatggtgcccta

SEQ ID NO: 44905 - DNA, 25 bp, Saccharomyces pastorianus
accggtcttcggtatgtcgatcagt

SEQ ID NO: 44906 - DNA, 25 bp, Saccharomyces pastorianus
ctgcccttttggaaccttatgcgaa

SEQ ID NO: 44907 - DNA, 25 bp, Saccharomyces pastorianus
gcttctaaatcgagtatcccatgca

SEQ ID NO: 44908 - DNA, 25 bp, Saccharomyces pastorianus
cttatgcgaagactggcctcaatgt

SEQ ID NO: 44909 - DNA, 25 bp, Saccharomyces pastorianus
aatggttaacagctggatttccggt

SEQ ID NO: 44910 - DNA, 25 bp, Saccharomyces pastorianus
ccatgcatacttgccacaacttatt

SEQ ID NO: 44911 - DNA, 25 bp, Saccharomyces pastorianus
gatccgacgtacacagctattctgg

SEQ ID NO: 44912 - DNA, 25 bp, Saccharomyces pastorianus
gagggccgtgccaagacaatagtac

SEQ ID NO: 44913 - DNA, 25 bp, Saccharomyces pastorianus
acaacttattgtgactctgcccttt

SEQ ID NO: 44914 - DNA, 25 bp, Saccharomyces pastorianus
ttggttgggaaatcacgcgtggact

SEQ ID NO: 44915 - DNA, 25 bp, Saccharomyces pastorianus
gtaacgatagcaactctacctctaa

SEQ ID NO: 44916 - DNA, 25 bp, Saccharomyces pastorianus
tcggcagttttgttacggaagacca

SEQ ID NO: 44917 - DNA, 25 bp, Saccharomyces pastorianus
gtgtattcttttatgaccgggattt

SEQ ID NO: 44918 - DNA, 25 bp, Saccharomyces pastorianus
ccaacaggtttcactacatccatag

SEQ ID NO: 44919 - DNA, 25 bp, Saccharomyces pastorianus
ttggccaagcatgcaagggaatcaa

SEQ ID NO: 44920 - DNA, 25 bp, Saccharomyces pastorianus
gttgacgattacgacagatccctat

SEQ ID NO: 44921 - DNA, 25 bp, Saccharomyces pastorianus
gaaagtgtcaagcattccgaaatta

SEQ ID NO: 44922 - DNA, 25 bp, Saccharomyces pastorianus
agagctcttaaaaacttccttcata

SEQ ID NO: 44923 - DNA, 25 bp, Saccharomyces pastorianus
gacgagacatattctgagcagggaa

SEQ ID NO: 44924 - DNA, 25 bp, Saccharomyces pastorianus
agatgactacattcggcagttttgt

SEQ ID NO: 44925 - DNA, 25 bp, Saccharomyces pastorianus
ggatacagtactgcgagtgcgagta

SEQ ID NO: 44926 - DNA, 25 bp, Saccharomyces pastorianus
ttccgtctactactaccataaactg

SEQ ID NO: 44927 - DNA, 25 bp, Saccharomyces pastorianus
aaccagtgtttgagacttgccgaca

SEQ ID NO: 44928 - DNA, 25 bp, Saccharomyces pastorianus
attggagctactgtgacgaacttca

SEQ ID NO: 44929 - DNA, 25 bp, Saccharomyces pastorianus
gaatatcttgtatccgttaccttct

SEQ ID NO: 44930 - DNA, 25 bp, Saccharomyces pastorianus
gggaatcttacttcgtcacaagctt

SEQ ID NO: 44931 - DNA, 25 bp, Saccharomyces pastorianus
agcttctcttctccacataattgat

SEQ ID NO: 44932 - DNA, 25 bp, Saccharomyces pastorianus
ataagatgcccgtcattagcttctc

SEQ ID NO: 44933 - DNA, 25 bp, Saccharomyces pastorianus
ggatttgcgactcaatttgcactct

SEQ ID NO: 44934 - DNA, 25 bp, Saccharomyces pastorianus
gttaaggtactttctgtggcaatca

SEQ ID NO: 44935 - DNA, 25 bp, Saccharomyces pastorianus
ggatttttcttttcgatctgcctca

SEQ ID NO: 44936 - DNA, 25 bp, Saccharomyces pastorianus
cgttaccttctttggcgattgcgaa

SEQ ID NO: 44937 - DNA, 25 bp, Saccharomyces pastorianus
gtcaatccagtacttctatcaaatc

SEQ ID NO: 44938 - DNA, 25 bp, Saccharomyces pastorianus
ctatcaaatcacttggtagcccact

SEQ ID NO: 44939 - DNA, 25 bp, Saccharomyces pastorianus
tccaaacacaggaagtcaatccagt

SEQ ID NO: 44940 - DNA, 25 bp, Saccharomyces pastorianus
gctcgctttcttcaaacgaatctca

SEQ ID NO: 44941 - DNA, 25 bp, Saccharomyces pastorianus
gaaagccaaaggttgagcactttta

SEQ ID NO: 44942 - DNA, 25 bp, Saccharomyces pastorianus
ttggtagcccactccatggaagatt

SEQ ID NO: 44943 - DNA, 25 bp, Saccharomyces pastorianus
ccatggaagatttagctcgctttct

SEQ ID NO: 44944 - DNA, 25 bp, Saccharomyces pastorianus
tgagcacttttagttttccaaacac

SEQ ID NO: 44945 - DNA, 25 bp, Saccharomyces pastorianus
tctcagtttgatagtggcaagcaac

SEQ ID NO: 44946 - DNA, 25 bp, Saccharomyces pastorianus
ggcaagcaaccacaagagtatgaaa

SEQ ID NO: 44947 - DNA, 25 bp, Saccharomyces pastorianus
gaggaatctcaaggtgaagccatat

SEQ ID NO: 44948 - DNA, 25 bp, Saccharomyces pastorianus
gctccgattttgatcgaagcatgtg

SEQ ID NO: 44949 - DNA, 25 bp, Saccharomyces pastorianus
gagcgctccgattttgatcgaagca

SEQ ID NO: 44950 - DNA, 25 bp, Saccharomyces pastorianus
agcgctccgattttgatcgaagcat

SEQ ID NO: 44951 - DNA, 25 bp, Saccharomyces pastorianus
aaagaatcaactcctttattgcctt

SEQ ID NO: 44952 - DNA, 25 bp, Saccharomyces pastorianus
gaaagatatgacagcctgggctaat

SEQ ID NO: 44953 - DNA, 25 bp, Saccharomyces pastorianus
ggatcaaaagaatcaactcctttat

SEQ ID NO: 44954 - DNA, 25 bp, Saccharomyces pastorianus
gaacgtattacaaagttgattgatg

SEQ ID NO: 44955 - DNA, 25 bp, Saccharomyces pastorianus
tcaactcctttattgccttgaaaga

SEQ ID NO: 44956 - DNA, 25 bp, Saccharomyces pastorianus
atgagcgctccgattttgatcgaag

SEQ ID NO: 44957 - DNA, 25 bp, Saccharomyces pastorianus
gcgctccgattttgatcgaagcatg

SEQ ID NO: 44958 - DNA, 25 bp, Saccharomyces pastorianus
tccgattttgatcgaagcatgtgaa

SEQ ID NO: 44959 - DNA, 25 bp, Saccharomyces pastorianus
agaattgtttctgccaccagtcttt

SEQ ID NO: 44960 - DNA, 25 bp, Saccharomyces pastorianus
agtggtttctttggagtctgctaac

SEQ ID NO: 44961 - DNA, 25 bp, Saccharomyces pastorianus
aaatgcatgggcttcctctagaatt

SEQ ID NO: 44962 - DNA, 25 bp, Saccharomyces pastorianus
gatatcaccgagtgcatctttcaca

SEQ ID NO: 44963 - DNA, 25 bp, Saccharomyces pastorianus
gccatgcctacgaagaagcccaaat

SEQ ID NO: 44964 - DNA, 25 bp, Saccharomyces pastorianus
aatgattgtatttccagctctagca

SEQ ID NO: 44965 - DNA, 25 bp, Saccharomyces pastorianus
caatcgtgacgccaactgactttaa

SEQ ID NO: 44966 - DNA, 25 bp, Saccharomyces pastorianus
ggcaacaaggcctgatttgtctcta

SEQ ID NO: 44967 - DNA, 25 bp, Saccharomyces pastorianus
aattgaggttggtgcagccctcgat

SEQ ID NO: 44968 - DNA, 25 bp, Saccharomyces pastorianus
gattgttcagcatcgaccaacacat

SEQ ID NO: 44969 - DNA, 25 bp, Saccharomyces pastorianus
gaatacatcttaacaccggaagcca

SEQ ID NO: 44970 - DNA, 25 bp, Saccharomyces pastorianus
gacgaaaaaccctgctggtacagct

SEQ ID NO: 44971 - DNA, 25 bp, Saccharomyces pastorianus
ataacaagcagcaccgtcgctactt

SEQ ID NO: 44972 - DNA, 25 bp, Saccharomyces pastorianus
taagcagccaaagaccactacttct

SEQ ID NO: 44973 - DNA, 25 bp, Saccharomyces pastorianus
aagaaacgccatcgccaaaagattt

SEQ ID NO: 44974 - DNA, 25 bp, Saccharomyces pastorianus
gtacagctgtacctttagtgtcaaa

SEQ ID NO: 44975 - DNA, 25 bp, Saccharomyces pastorianus
cgttggctctttccggtaatgatga

SEQ ID NO: 44976 - DNA, 25 bp, Saccharomyces pastorianus
agttcaaaactcttctaagcagcca

SEQ ID NO: 44977 - DNA, 25 bp, Saccharomyces pastorianus
tctgcaactactacgacaacatctt

SEQ ID NO: 44978 - DNA, 25 bp, Saccharomyces pastorianus
cgctacttcaacgactactacattt

SEQ ID NO: 44979 - DNA, 25 bp, Saccharomyces pastorianus
gaaaggcaaggcagtgacccattaa

SEQ ID NO: 44980 - DNA, 25 bp, Saccharomyces pastorianus
gtatctctcctcgtcaagaattcat

SEQ ID NO: 44981 - DNA, 25 bp, Saccharomyces pastorianus
agaatggccttgcatgcgacgtgac

SEQ ID NO: 44982 - DNA, 25 bp, Saccharomyces pastorianus
cagcgtctgtgatatggcatttttg

SEQ ID NO: 44983 - DNA, 25 bp, Saccharomyces pastorianus
aagtagccatcaagccatcctccgt

SEQ ID NO: 44984 - DNA, 25 bp, Saccharomyces pastorianus
ggaccagcacagttctgagaatggc

SEQ ID NO: 44985 - DNA, 25 bp, Saccharomyces pastorianus
gcgacgtgaccagcgtctgtgatat

SEQ ID NO: 44986 - DNA, 25 bp, Saccharomyces pastorianus
atattagaatactaggtccctgcgt

SEQ ID NO: 44987 - DNA, 25 bp, Saccharomyces pastorianus
tatggccagaaaccggccatcgggt

SEQ ID NO: 44988 - DNA, 25 bp, Saccharomyces pastorianus
taggtccctgcgttatggccagaaa

SEQ ID NO: 44989 - DNA, 25 bp, Saccharomyces pastorianus
ccggccatcgggtgatattttcgca

SEQ ID NO: 44990 - DNA, 25 bp, Saccharomyces pastorianus
gatattttcgcagaagtagccatca

SEQ ID NO: 44991 - DNA, 25 bp, Saccharomyces pastorianus
ggcatttttggagacattgtatatt

SEQ ID NO: 44992 - DNA, 25 bp, Saccharomyces pastorianus
tgaccatacacctacgactcaaaat

SEQ ID NO: 44993 - DNA, 25 bp, Saccharomyces pastorianus
ggtggtcaaaaaccttgttctctag

SEQ ID NO: 44994 - DNA, 25 bp, Saccharomyces pastorianus
cccgaccaaccttattcatttgtgg

SEQ ID NO: 44995 - DNA, 25 bp, Saccharomyces pastorianus
gagatgatcctgttgtaggccccga

SEQ ID NO: 44996 - DNA, 25 bp, Saccharomyces pastorianus
gatcttcttctttcggcacttagaa

SEQ ID NO: 44997 - DNA, 25 bp, Saccharomyces pastorianus
ttatacaccgtaggatgctctttcg

SEQ ID NO: 44998 - DNA, 25 bp, Saccharomyces pastorianus
actgcaccagctttgggattcccaa

SEQ ID NO: 44999 - DNA, 25 bp, Saccharomyces pastorianus
taatccatgggatcttcttctttcg

SEQ ID NO: 45000 - DNA, 25 bp, Saccharomyces pastorianus
gtgttccaaacggttctagccctga

SEQ ID NO: 45001 - DNA, 25 bp, Saccharomyces pastorianus
attcgatgagctgtacactgcacca

SEQ ID NO: 45002 - DNA, 25 bp, Saccharomyces pastorianus
aaatcgcctttatctgctgctgtta

SEQ ID NO: 45003 - DNA, 25 bp, Saccharomyces pastorianus
gggttccctgctaggaatcacatat

SEQ ID NO: 45004 - DNA, 25 bp, Saccharomyces pastorianus
gaaattgtcggttcccatcatagta

SEQ ID NO: 45005 - DNA, 25 bp, Saccharomyces pastorianus
aagttggcagaaacctagcacggca

SEQ ID NO: 45006 - DNA, 25 bp, Saccharomyces pastorianus
gaagggatttctgtcttatctaagt

SEQ ID NO: 45007 - DNA, 25 bp, Saccharomyces pastorianus
ccatcatagtagtgggttccctgct

SEQ ID NO: 45008 - DNA, 25 bp, Saccharomyces pastorianus
tagcacggcaccaatctatgatata

SEQ ID NO: 45009 - DNA, 25 bp, Saccharomyces pastorianus
cctcgtgctctaccaatgaatcttt

SEQ ID NO: 45010 - DNA, 25 bp, Saccharomyces pastorianus
tacgcgatgttttacgtgtacccac

SEQ ID NO: 45011 - DNA, 25 bp, Saccharomyces pastorianus
aaattcccacactgactttatactt

SEQ ID NO: 45012 - DNA, 25 bp, Saccharomyces pastorianus
tgtacccacccgtgaaatcctaagg

SEQ ID NO: 45013 - DNA, 25 bp, Saccharomyces pastorianus
atctaattcatgacttgcctcgtgc

SEQ ID NO: 45014 - DNA, 25 bp, Saccharomyces pastorianus
gttggctaagagattgtctgaaaga

SEQ ID NO: 45015 - DNA, 25 bp, Saccharomyces pastorianus
actcctcaaagattgcaaagaaaga

SEQ ID NO: 45016 - DNA, 25 bp, Saccharomyces pastorianus
ctcaaagagaagctgctgccgaata

SEQ ID NO: 45017 - DNA, 25 bp, Saccharomyces pastorianus
acgctcaattgttggctaagagatt

SEQ ID NO: 45018 - DNA, 25 bp, Saccharomyces pastorianus
gaatacgctcaattgttggctaaga

SEQ ID NO: 45019 - DNA, 25 bp, Saccharomyces pastorianus
agacttacaccaaggctccaaagat

SEQ ID NO: 45020 - DNA, 25 bp, Saccharomyces pastorianus
ccaaggctccaaagatccaaagatt

SEQ ID NO: 45021 - DNA, 25 bp, Saccharomyces pastorianus
gaaagagacaccaaagagctttgaa

SEQ ID NO: 45022 - DNA, 25 bp, Saccharomyces pastorianus
gaagctgctgccgaatacgctcaat

SEQ ID NO: 45023 - DNA, 25 bp, Saccharomyces pastorianus
gaaaagacttacaccaaggctccaa

SEQ ID NO: 45024 - DNA, 25 bp, Saccharomyces pastorianus
tgctgccgaatacgctcaattgttg

SEQ ID NO: 45025 - DNA, 25 bp, Saccharomyces pastorianus
atcttcctagcgtatttactcatcc

SEQ ID NO: 45026 - DNA, 25 bp, Saccharomyces pastorianus
gtggactatgttgcctttttatgtg

SEQ ID NO: 45027 - DNA, 25 bp, Saccharomyces pastorianus
tattgttgcgaatgccttagtcaga

SEQ ID NO: 45028 - DNA, 25 bp, Saccharomyces pastorianus
aaaggatctgtctcattatgggttc

SEQ ID NO: 45029 - DNA, 25 bp, Saccharomyces pastorianus
atcgggcattaaaccatctttctta

SEQ ID NO: 45030 - DNA, 25 bp, Saccharomyces pastorianus
ggtatccatacaacccatcatggtc

SEQ ID NO: 45031 - DNA, 25 bp, Saccharomyces pastorianus
ggaatgcccctagaacacttacaat

SEQ ID NO: 45032 - DNA, 25 bp, Saccharomyces pastorianus
agatcccgtcaactgccaagcaatg

SEQ ID NO: 45033 - DNA, 25 bp, Saccharomyces pastorianus
ttactcatccccttattgttgcgaa

SEQ ID NO: 45034 - DNA, 25 bp, Saccharomyces pastorianus
gttatttcgtttccaatcgggcatt

SEQ ID NO: 45035 - DNA, 25 bp, Saccharomyces pastorianus
gatcaagttcaatgctgttccgaaa

SEQ ID NO: 45036 - DNA, 25 bp, Saccharomyces pastorianus
ccggacatttcctgttgaacataat

SEQ ID NO: 45037 - DNA, 25 bp, Saccharomyces pastorianus
aatgcatactcaaatcagtcccttg

SEQ ID NO: 45038 - DNA, 25 bp, Saccharomyces pastorianus
aattaccattgatgtgtctttccga

SEQ ID NO: 45039 - DNA, 25 bp, Saccharomyces pastorianus
aaatcagtcccttgacatcagcggc

SEQ ID NO: 45040 - DNA, 25 bp, Saccharomyces pastorianus
gcatactcaaatcagtcccttgaca

SEQ ID NO: 45041 - DNA, 25 bp, Saccharomyces pastorianus
tcagcggcagaactacaagaaaatt

SEQ ID NO: 45042 - DNA, 25 bp, Saccharomyces pastorianus
accattgatgtgtctttccgaatac

SEQ ID NO: 45043 - DNA, 25 bp, Saccharomyces pastorianus
cagtcccttgacatcagcggcagaa

SEQ ID NO: 45044 - DNA, 25 bp, Saccharomyces pastorianus
tgacatcagcggcagaactacaaga

SEQ ID NO: 45045 - DNA, 25 bp, Saccharomyces pastorianus
tgatgtgtctttccgaatacttccg

SEQ ID NO: 45046 - DNA, 25 bp, Saccharomyces pastorianus
tcccttgacatcagcggcagaacta

SEQ ID NO: 45047 - DNA, 25 bp, Saccharomyces pastorianus
aattatcttgttcacgcatcttctc

SEQ ID NO: 45048 - DNA, 25 bp, Saccharomyces pastorianus
acagcggagggaatcttgcatattt

SEQ ID NO: 45049 - DNA, 25 bp, Saccharomyces pastorianus
attggacgatgcctttgttgaccgg

SEQ ID NO: 45050 - DNA, 25 bp, Saccharomyces pastorianus
gaagcttccaataccatcgatacaa

SEQ ID NO: 45051 - DNA, 25 bp, Saccharomyces pastorianus
gagcgcgggattttcgtatgtctct

SEQ ID NO: 45052 - DNA, 25 bp, Saccharomyces pastorianus
ttgaccgggcagacgggatcttttt

SEQ ID NO: 45053 - DNA, 25 bp, Saccharomyces pastorianus
caacggacggtattcgtgtcgtgaa

SEQ ID NO: 45054 - DNA, 25 bp, Saccharomyces pastorianus
attggctacgtctaatctgctggat

SEQ ID NO: 45055 - DNA, 25 bp, Saccharomyces pastorianus
aatttcgtttcactctggatcttcc

SEQ ID NO: 45056 - DNA, 25 bp, Saccharomyces pastorianus
aaatgctcggtatgtccttttaatt

SEQ ID NO: 45057 - DNA, 25 bp, Saccharomyces pastorianus
gagagaattctctgaagcttccaat

SEQ ID NO: 45058 - DNA, 25 bp, Saccharomyces pastorianus
atggtgccgtccatctttctactta

SEQ ID NO: 45059 - DNA, 25 bp, Saccharomyces pastorianus
cgtccatctttctacttacttgaag

SEQ ID NO: 45060 - DNA, 25 bp, Saccharomyces pastorianus
ggtgccgtccatctttctacttact

SEQ ID NO: 45061 - DNA, 25 bp, Saccharomyces pastorianus
tggtgccgtccatctttctacttac

SEQ ID NO: 45062 - DNA, 25 bp, Saccharomyces pastorianus
agcatggtgccgtccatctttctac

SEQ ID NO: 45063 - DNA, 25 bp, Saccharomyces pastorianus
gcatggtgccgtccatctttctact

SEQ ID NO: 45064 - DNA, 25 bp, Saccharomyces pastorianus
ccgtccatctttctacttacttgaa

SEQ ID NO: 45065 - DNA, 25 bp, Saccharomyces pastorianus
gccgtccatctttctacttacttga

SEQ ID NO: 45066 - DNA, 25 bp, Saccharomyces pastorianus
aagcatggtgccgtccatctttcta

SEQ ID NO: 45067 - DNA, 25 bp, Saccharomyces pastorianus
tgccgtccatctttctacttacttg

SEQ ID NO: 45068 - DNA, 25 bp, Saccharomyces pastorianus
gtgccgtccatctttctacttactt

SEQ ID NO: 45069 - DNA, 25 bp, Saccharomyces pastorianus
ggcgaaccgaagttaaagtcagact

SEQ ID NO: 45070 - DNA, 25 bp, Saccharomyces pastorianus
acgcctactggctaagttgagagat

SEQ ID NO: 45071 - DNA, 25 bp, Saccharomyces pastorianus
gatgatttacaagcttctgacgaac

SEQ ID NO: 45072 - DNA, 25 bp, Saccharomyces pastorianus
gagtgaccaagcttcaacacctaga

SEQ ID NO: 45073 - DNA, 25 bp, Saccharomyces pastorianus
aagggagctgcaccatcaaattaca

SEQ ID NO: 45074 - DNA, 25 bp, Saccharomyces pastorianus
gaaatattccgtacaatcctggaac

SEQ ID NO: 45075 - DNA, 25 bp, Saccharomyces pastorianus
gagatcaaattgaattgctcactaa

SEQ ID NO: 45076 - DNA, 25 bp, Saccharomyces pastorianus
caagaggaaacacgcctactggcta

SEQ ID NO: 45077 - DNA, 25 bp, Saccharomyces pastorianus
gaatggaccgcaagaacacccaaag

SEQ ID NO: 45078 - DNA, 25 bp, Saccharomyces pastorianus
attggaatccgaagggagctgcacc

SEQ ID NO: 45079 - DNA, 25 bp, Saccharomyces pastorianus
caatcctggaactttcgaaaggcga

SEQ ID NO: 45080 - DNA, 25 bp, Saccharomyces pastorianus
aagcttgtcgatctaaggaccacag

SEQ ID NO: 45081 - DNA, 25 bp, Saccharomyces pastorianus
gaaagcccaatcactaccatggaac

SEQ ID NO: 45082 - DNA, 25 bp, Saccharomyces pastorianus
ggaactctctagtattagcatctgc

SEQ ID NO: 45083 - DNA, 25 bp, Saccharomyces pastorianus
tacggtgttgactacagctggccaa

SEQ ID NO: 45084 - DNA, 25 bp, Saccharomyces pastorianus
gatgtctcgtgggatgtgcatgatc

SEQ ID NO: 45085 - DNA, 25 bp, Saccharomyces pastorianus
taaggagcactgtcaaaaccacaca

SEQ ID NO: 45086 - DNA, 25 bp, Saccharomyces pastorianus
atggtgcttccatttccactttgga

SEQ ID NO: 45087 - DNA, 25 bp, Saccharomyces pastorianus
gagactatatttacacacggtggcc

SEQ ID NO: 45088 - DNA, 25 bp, Saccharomyces pastorianus
gatactgcccgcgaagagactatat

SEQ ID NO: 45089 - DNA, 25 bp, Saccharomyces pastorianus
gcatgatccgtggttaatgtgcagt

SEQ ID NO: 45090 - DNA, 25 bp, Saccharomyces pastorianus
cacggtggccacatgcttggagtaa

SEQ ID NO: 45091 - DNA, 25 bp, Saccharomyces pastorianus
gatgatatcagcattttcttcccaa

SEQ ID NO: 45092 - DNA, 25 bp, Saccharomyces pastorianus
gcagtccaaaaattcgcatccgttt

SEQ ID NO: 45093 - DNA, 25 bp, Saccharomyces pastorianus
atacttcctcggcagacgcaaatga

SEQ ID NO: 45094 - DNA, 25 bp, Saccharomyces pastorianus
aagctattcggctcgcatggagtca

SEQ ID NO: 45095 - DNA, 25 bp, Saccharomyces pastorianus
gacgtggaggccatcgatacttcct

SEQ ID NO: 45096 - DNA, 25 bp, Saccharomyces pastorianus
ttcccattccaacggtcaagttcag

SEQ ID NO: 45097 - DNA, 25 bp, Saccharomyces pastorianus
atcattggcctggaacctacagcag

SEQ ID NO: 45098 - DNA, 25 bp, Saccharomyces pastorianus
acatgattcactatttgctgcttgc

SEQ ID NO: 45099 - DNA, 25 bp, Saccharomyces pastorianus
gatatcatagcaggcgcatcttcag

SEQ ID NO: 45100 - DNA, 25 bp, Saccharomyces pastorianus
gcatcttcagatggtgcgatctata

SEQ ID NO: 45101 - DNA, 25 bp, Saccharomyces pastorianus
gcatccgtttgaggccaagctattc

SEQ ID NO: 45102 - DNA, 25 bp, Saccharomyces pastorianus
gcatcttcaagctgccatggttatt

SEQ ID NO: 45103 - DNA, 25 bp, Saccharomyces pastorianus
gaagtttgttctattgacgcctcca

SEQ ID NO: 45104 - DNA, 25 bp, Saccharomyces pastorianus
aatggccgcaaaatcatcctcgtag

SEQ ID NO: 45105 - DNA, 25 bp, Saccharomyces pastorianus
ttggtgcggcaaaagatcctgtagc

SEQ ID NO: 45106 - DNA, 25 bp, Saccharomyces pastorianus
tgaacagcacttggcaattctcagt

SEQ ID NO: 45107 - DNA, 25 bp, Saccharomyces pastorianus
tgacgcctccaaaagctcatattga

SEQ ID NO: 45108 - DNA, 25 bp, Saccharomyces pastorianus
gtgataattttaccagactgttcgc

SEQ ID NO: 45109 - DNA, 25 bp, Saccharomyces pastorianus
atagacgtcttttccaatgggcgct

SEQ ID NO: 45110 - DNA, 25 bp, Saccharomyces pastorianus
cctcgtaggtcattccatgggatgt

SEQ ID NO: 45111 - DNA, 25 bp, Saccharomyces pastorianus
aatttatgcttggatcgcccagaat

SEQ ID NO: 45112 - DNA, 25 bp, Saccharomyces pastorianus
aatgggcgctttatggcatcttcaa

SEQ ID NO: 45113 - DNA, 25 bp, Saccharomyces pastorianus
tattccgggcgtttctggaagtcca

SEQ ID NO: 45114 - DNA, 25 bp, Saccharomyces pastorianus
gaatcctaaagatttgccacgggaa

SEQ ID NO: 45115 - DNA, 25 bp, Saccharomyces pastorianus
acaaactatgtttggccgcttcgtc

SEQ ID NO: 45116 - DNA, 25 bp, Saccharomyces pastorianus
gaacagtaccctgaaggtgcagaaa

SEQ ID NO: 45117 - DNA, 25 bp, Saccharomyces pastorianus
cgaggcaggccaaggtttacttatt

SEQ ID NO: 45118 - DNA, 25 bp, Saccharomyces pastorianus
gatcaaatcgaattctacccagttt

SEQ ID NO: 45119 - DNA, 25 bp, Saccharomyces pastorianus
gaacgattcctatctgggacaaact

SEQ ID NO: 45120 - DNA, 25 bp, Saccharomyces pastorianus
gcttcgtctgaagttccatggttga

SEQ ID NO: 45121 - DNA, 25 bp, Saccharomyces pastorianus
atattcagagtattccgggcgtttc

SEQ ID NO: 45122 - DNA, 25 bp, Saccharomyces pastorianus
gaaatgataatctctgctcccaaat

SEQ ID NO: 45123 - DNA, 25 bp, Saccharomyces pastorianus
gaagtccatcgcatctgtcggagat

SEQ ID NO: 45124 - DNA, 25 bp, Saccharomyces pastorianus
gtcatttgcgtacgagccggtgaaa

SEQ ID NO: 45125 - DNA, 25 bp, Saccharomyces pastorianus
ggtgtgcccattgctgtcaaagaca

SEQ ID NO: 45126 - DNA, 25 bp, Saccharomyces pastorianus
tgtggttcctgcctgtaaatcttta

SEQ ID NO: 45127 - DNA, 25 bp, Saccharomyces pastorianus
aatctagaccagtttgccacaggct

SEQ ID NO: 45128 - DNA, 25 bp, Saccharomyces pastorianus
aactgacacagctggttccggtaga

SEQ ID NO: 45129 - DNA, 25 bp, Saccharomyces pastorianus
gactgtgtttccatttttgcgttga

SEQ ID NO: 45130 - DNA, 25 bp, Saccharomyces pastorianus
aatgcatggatatcgctggcctcac

SEQ ID NO: 45131 - DNA, 25 bp, Saccharomyces pastorianus
gagcgttgcttcgagatcatgtgtc

SEQ ID NO: 45132 - DNA, 25 bp, Saccharomyces pastorianus
cacaaagggtgtcttttcctgccaa

SEQ ID NO: 45133 - DNA, 25 bp, Saccharomyces pastorianus
gttgaaccttagtgacgctgagcgt

SEQ ID NO: 45134 - DNA, 25 bp, Saccharomyces pastorianus
aacgagcatgtgtctggcggttcct

SEQ ID NO: 45135 - DNA, 25 bp, Saccharomyces pastorianus
atgactcaaacatcttggatattgc

SEQ ID NO: 45136 - DNA, 25 bp, Saccharomyces pastorianus
ttcggtaacctaatggatccatata

SEQ ID NO: 45137 - DNA, 25 bp, Saccharomyces pastorianus
ctcaaacatcttggatattgcacgt

SEQ ID NO: 45138 - DNA, 25 bp, Saccharomyces pastorianus
gtttcggtaacctaatggatccata

SEQ ID NO: 45139 - DNA, 25 bp, Saccharomyces pastorianus
gatccatataatggacttcttgaaa

SEQ ID NO: 45140 - DNA, 25 bp, Saccharomyces pastorianus
gccaaagtaatgaagacgagtcgat

SEQ ID NO: 45141 - DNA, 25 bp, Saccharomyces pastorianus
gcacgtttcggtaacctaatggatc

SEQ ID NO: 45142 - DNA, 25 bp, Saccharomyces pastorianus
gaagacgagtcgatacaagatgact

SEQ ID NO: 45143 - DNA, 25 bp, Saccharomyces pastorianus
aatggacttcttgaaaagatcaata

SEQ ID NO: 45144 - DNA, 25 bp, Saccharomyces pastorianus
tattgcacgtttcggtaacctaatg

SEQ ID NO: 45145 - DNA, 25 bp, Saccharomyces pastorianus
gatattgcacgtttcggtaacctaa

SEQ ID NO: 45146 - DNA, 25 bp, Saccharomyces pastorianus
gtgaccacaatcgatgttctatcat

SEQ ID NO: 45147 - DNA, 25 bp, Saccharomyces pastorianus
gcggctctttcaaactatatcagat

SEQ ID NO: 45148 - DNA, 25 bp, Saccharomyces pastorianus
aagcgagcgcgctgataacgaaccg

SEQ ID NO: 45149 - DNA, 25 bp, Saccharomyces pastorianus
gaatttcccaccgatgctggtgata

SEQ ID NO: 45150 - DNA, 25 bp, Saccharomyces pastorianus
gaagactatcctatggctaaccctg

SEQ ID NO: 45151 - DNA, 25 bp, Saccharomyces pastorianus
aaaggcacaggaccgctctgaacat

SEQ ID NO: 45152 - DNA, 25 bp, Saccharomyces pastorianus
gttatcgtcatctatcacttcagtg

SEQ ID NO: 45153 - DNA, 25 bp, Saccharomyces pastorianus
tcaccgcatgttgtcttcgccaaga

SEQ ID NO: 45154 - DNA, 25 bp, Saccharomyces pastorianus
gaacgctgaatgtgctatatcggga

SEQ ID NO: 45155 - DNA, 25 bp, Saccharomyces pastorianus
cgccaagacttgcaaacccttttga

SEQ ID NO: 45156 - DNA, 25 bp, Saccharomyces pastorianus
gaagcaggtgcttactcgaagagaa

SEQ ID NO: 45157 - DNA, 25 bp, Saccharomyces pastorianus
aagggacactatgcaagcttagaac

SEQ ID NO: 45158 - DNA, 25 bp, Saccharomyces pastorianus
gatgattcagaattattatgggagg

SEQ ID NO: 45159 - DNA, 25 bp, Saccharomyces pastorianus
tgctgccacaaaagatgggtttttt

SEQ ID NO: 45160 - DNA, 25 bp, Saccharomyces pastorianus
tattttggtccattaattgaaaagg

SEQ ID NO: 45161 - DNA, 25 bp, Saccharomyces pastorianus
ttgaaaagggacactatgcaagctt

SEQ ID NO: 45162 - DNA, 25 bp, Saccharomyces pastorianus
ggaggaacaacgtgctgccacaaaa

SEQ ID NO: 45163 - DNA, 25 bp, Saccharomyces pastorianus
ggaacaacgtgctgccacaaaagat

SEQ ID NO: 45164 - DNA, 25 bp, Saccharomyces pastorianus
ggacactatgcaagcttagaacgtg

SEQ ID NO: 45165 - DNA, 25 bp, Saccharomyces pastorianus
tgcaagcttagaacgtgcaaacggt

SEQ ID NO: 45166 - DNA, 25 bp, Saccharomyces pastorianus
atgggaggaacaacgtgctgccaca

SEQ ID NO: 45167 - DNA, 25 bp, Saccharomyces pastorianus
cgtgctgccacaaaagatgggtttt

SEQ ID NO: 45168 - DNA, 25 bp, Saccharomyces pastorianus
cggatactagagttcaaatcttgaa

SEQ ID NO: 45169 - DNA, 25 bp, Saccharomyces pastorianus
gttagccaagaacagaaaccacgcc

SEQ ID NO: 45170 - DNA, 25 bp, Saccharomyces pastorianus
agaaaccacgccaaaggtgcctctc

SEQ ID NO: 45171 - DNA, 25 bp, Saccharomyces pastorianus
atcgcccatcctagtctcgacattt

SEQ ID NO: 45172 - DNA, 25 bp, Saccharomyces pastorianus
tttcttcttcagctccttcttcggg

SEQ ID NO: 45173 - DNA, 25 bp, Saccharomyces pastorianus
aaatattgctgaagagttagccaag

SEQ ID NO: 45174 - DNA, 25 bp, Saccharomyces pastorianus
ctgacaacgaagactctttgagtaa

SEQ ID NO: 45175 - DNA, 25 bp, Saccharomyces pastorianus
gaaagaacctgaaactgacaacgaa

SEQ ID NO: 45176 - DNA, 25 bp, Saccharomyces pastorianus
atgcaaccggatactagagttcaaa

SEQ ID NO: 45177 - DNA, 25 bp, Saccharomyces pastorianus
tcctagtctcgacattttcttcttc

SEQ ID NO: 45178 - DNA, 25 bp, Saccharomyces pastorianus
gaaactgacaacgaagactctttga

SEQ ID NO: 45179 - DNA, 25 bp, Saccharomyces pastorianus
acgtatggtgacttatcagtactac

SEQ ID NO: 45180 - DNA, 25 bp, Saccharomyces pastorianus
aagaaaggtgaatcagttgccgttc

SEQ ID NO: 45181 - DNA, 25 bp, Saccharomyces pastorianus
tccagagtttacgaggatttccaaa

SEQ ID NO: 45182 - DNA, 25 bp, Saccharomyces pastorianus
caagaatttcttagccccatcagag

SEQ ID NO: 45183 - DNA, 25 bp, Saccharomyces pastorianus
ttagccccatcagagccagatgaag

SEQ ID NO: 45184 - DNA, 25 bp, Saccharomyces pastorianus
gtacatgatacccaccaaatcggcg

SEQ ID NO: 45185 - DNA, 25 bp, Saccharomyces pastorianus
aaaccaaaggccgatgtacatgata

SEQ ID NO: 45186 - DNA, 25 bp, Saccharomyces pastorianus
gaattaagaaagatccgtgttgcgg

SEQ ID NO: 45187 - DNA, 25 bp, Saccharomyces pastorianus
tggcaggtgtcatcatagaggttaa

SEQ ID NO: 45188 - DNA, 25 bp, Saccharomyces pastorianus
agttgccgttctgagtgccatgaaa

SEQ ID NO: 45189 - DNA, 25 bp, Saccharomyces pastorianus
tccgtgttgcggataagactcaaaa

SEQ ID NO: 45190 - DNA, 25 bp, Saccharomyces pastorianus
gaacatgctcgtgaattagatgcct

SEQ ID NO: 45191 - DNA, 25 bp, Saccharomyces pastorianus
ggctaattctttagatttccctgac

SEQ ID NO: 45192 - DNA, 25 bp, Saccharomyces pastorianus
gatttggcgcaatttatggtctcaa

SEQ ID NO: 45193 - DNA, 25 bp, Saccharomyces pastorianus
ggtactgcagtagcatccatgtctg

SEQ ID NO: 45194 - DNA, 25 bp, Saccharomyces pastorianus
gagactgttatattcttgctttgaa

SEQ ID NO: 45195 - DNA, 25 bp, Saccharomyces pastorianus
atgtctgcatgtgctttatctggcg

SEQ ID NO: 45196 - DNA, 25 bp, Saccharomyces pastorianus
tatctggcgccgatgttgttgatgt

SEQ ID NO: 45197 - DNA, 25 bp, Saccharomyces pastorianus
taacgctttactagcttccttagaa

SEQ ID NO: 45198 - DNA, 25 bp, Saccharomyces pastorianus
catagtcatgactctgctggtactg

SEQ ID NO: 45199 - DNA, 25 bp, Saccharomyces pastorianus
gatgtctggtttgacttctcaagca

SEQ ID NO: 45200 - DNA, 25 bp, Saccharomyces pastorianus
ggcagttgactaacttgctattcca

SEQ ID NO: 45201 - DNA, 25 bp, Saccharomyces pastorianus
agccgtatattgtctttcccactga

SEQ ID NO: 45202 - DNA, 25 bp, Saccharomyces pastorianus
acgggcatcatacctgcgctagtag

SEQ ID NO: 45203 - DNA, 25 bp, Saccharomyces pastorianus
gacggaatccttattgaccgcctat

SEQ ID NO: 45204 - DNA, 25 bp, Saccharomyces pastorianus
aaattctacatgcattccaccacga

SEQ ID NO: 45205 - DNA, 25 bp, Saccharomyces pastorianus
aagtcacgtggcagtaccttttaca

SEQ ID NO: 45206 - DNA, 25 bp, Saccharomyces pastorianus
gatgcatcgcgagtgttccacgagc

SEQ ID NO: 45207 - DNA, 25 bp, Saccharomyces pastorianus
aaaccgattccgagtcttctacaag

SEQ ID NO: 45208 - DNA, 25 bp, Saccharomyces pastorianus
gtggttccatttccagtatctgcaa

SEQ ID NO: 45209 - DNA, 25 bp, Saccharomyces pastorianus
gaaagtgcacgtaccggcgacggaa

SEQ ID NO: 45210 - DNA, 25 bp, Saccharomyces pastorianus
gaacaagagttcaccacgagtccat

SEQ ID NO: 45211 - DNA, 25 bp, Saccharomyces pastorianus
acgagctggactggtgcctctatac

SEQ ID NO: 45212 - DNA, 25 bp, Saccharomyces pastorianus
atgcggatgtattagtcatttgaaa

SEQ ID NO: 45213 - DNA, 25 bp, Saccharomyces pastorianus
agaaactctggcaatggacgacatt

SEQ ID NO: 45214 - DNA, 25 bp, Saccharomyces pastorianus
ttaaaaccgttcgttgcactttgcg

SEQ ID NO: 45215 - DNA, 25 bp, Saccharomyces pastorianus
aatgccccaactgcgagaaactctg

SEQ ID NO: 45216 - DNA, 25 bp, Saccharomyces pastorianus
aaaggaggtaaatgccccaactgcg

SEQ ID NO: 45217 - DNA, 25 bp, Saccharomyces pastorianus
gttcgttgcactttgcgataatgaa

SEQ ID NO: 45218 - DNA, 25 bp, Saccharomyces pastorianus
catttgaaatgcctgtatagatact

SEQ ID NO: 45219 - DNA, 25 bp, Saccharomyces pastorianus
aaccgttcgttgcactttgcgataa

SEQ ID NO: 45220 - DNA, 25 bp, Saccharomyces pastorianus
tagatactttttagatgatgaacag

SEQ ID NO: 45221 - DNA, 25 bp, Saccharomyces pastorianus
tgcgagaaagagattgactacacat

SEQ ID NO: 45222 - DNA, 25 bp, Saccharomyces pastorianus
tctggcaatggacgacattggtcaa

SEQ ID NO: 45223 - DNA, 25 bp, Saccharomyces pastorianus
aacaacacagcatcagtttcctcag

SEQ ID NO: 45224 - DNA, 25 bp, Saccharomyces pastorianus
ggcatacagaactaaacgtgacggt

SEQ ID NO: 45225 - DNA, 25 bp, Saccharomyces pastorianus
gtttcctcagttttattgctgctat

SEQ ID NO: 45226 - DNA, 25 bp, Saccharomyces pastorianus
gtgagaatgctcttaatgaaccaaa

SEQ ID NO: 45227 - DNA, 25 bp, Saccharomyces pastorianus
gatgaagttactactacggcatgag

SEQ ID NO: 45228 - DNA, 25 bp, Saccharomyces pastorianus
atgcgtggcaacatggatatcaaac

SEQ ID NO: 45229 - DNA, 25 bp, Saccharomyces pastorianus
agggaaacaccatagacgatctcat

SEQ ID NO: 45230 - DNA, 25 bp, Saccharomyces pastorianus
ttgctgctatctgctacaatcgatc

SEQ ID NO: 45231 - DNA, 25 bp, Saccharomyces pastorianus
gattgtacgaggcttcccaagtaaa

SEQ ID NO: 45232 - DNA, 25 bp, Saccharomyces pastorianus
tacggcatgagttcttccaacggat

SEQ ID NO: 45233 - DNA, 25 bp, Saccharomyces pastorianus
ggacgaactctgcaccataaaattg

SEQ ID NO: 45234 - DNA, 25 bp, Saccharomyces pastorianus
agagagccttacctgtttgatgacc

SEQ ID NO: 45235 - DNA, 25 bp, Saccharomyces pastorianus
aaacctgttacggatcctggtcaat

SEQ ID NO: 45236 - DNA, 25 bp, Saccharomyces pastorianus
aaatctatcgttcgtgacaccattc

SEQ ID NO: 45237 - DNA, 25 bp, Saccharomyces pastorianus
ttattgagcacccagaatttcccga

SEQ ID NO: 45238 - DNA, 25 bp, Saccharomyces pastorianus
taacgttgctacttgggactaccta

SEQ ID NO: 45239 - DNA, 25 bp, Saccharomyces pastorianus
gaaatgatttttccacccggtgtct

SEQ ID NO: 45240 - DNA, 25 bp, Saccharomyces pastorianus
aatggcctctttcgtaaacactgga

SEQ ID NO: 45241 - DNA, 25 bp, Saccharomyces pastorianus
gacacctgaactaattgcccgttgg

SEQ ID NO: 45242 - DNA, 25 bp, Saccharomyces pastorianus
ttgtggtacccattctttagagccc

SEQ ID NO: 45243 - DNA, 25 bp, Saccharomyces pastorianus
gagatatttcttattgcccacctta

SEQ ID NO: 45244 - DNA, 25 bp, Saccharomyces pastorianus
aacaacgtcgctgggatgccattta

SEQ ID NO: 45245 - DNA, 25 bp, Saccharomyces pastorianus
acgagaagttccacgacgaggcgaa

SEQ ID NO: 45246 - DNA, 25 bp, Saccharomyces pastorianus
gacgatttcatgtactccaagcacg

SEQ ID NO: 45247 - DNA, 25 bp, Saccharomyces pastorianus
tttgctcacgtgctcccagaggaaa

SEQ ID NO: 45248 - DNA, 25 bp, Saccharomyces pastorianus
ttcgaactctactacggacactatc

SEQ ID NO: 45249 - DNA, 25 bp, Saccharomyces pastorianus
gaatcggttgcgttggatttcacct

SEQ ID NO: 45250 - DNA, 25 bp, Saccharomyces pastorianus
gaggcgaacaagaccaacttcccag

SEQ ID NO: 45251 - DNA, 25 bp, Saccharomyces pastorianus
agaccactccgtaagattcactatc

SEQ ID NO: 45252 - DNA, 25 bp, Saccharomyces pastorianus
tgaaacctggatgtacgccttcgac

SEQ ID NO: 45253 - DNA, 25 bp, Saccharomyces pastorianus
gagcccttccagctgaaaatctact

SEQ ID NO: 45254 - DNA, 25 bp, Saccharomyces pastorianus
agagctacgctttgccaagcaagaa

SEQ ID NO: 45255 - DNA, 25 bp, Saccharomyces pastorianus
atatcgctggaaatcctcaccgagc

SEQ ID NO: 45256 - DNA, 25 bp, Saccharomyces pastorianus
atcgagcacttgaaggcgcgtctca

SEQ ID NO: 45257 - DNA, 25 bp, Saccharomyces pastorianus
gtcctggtcaacctggtgctgcact

SEQ ID NO: 45258 - DNA, 25 bp, Saccharomyces pastorianus
aacacgacaacgctagtccaaacgc

SEQ ID NO: 45259 - DNA, 25 bp, Saccharomyces pastorianus
tatctgcacgccttcgtcctcaagg

SEQ ID NO: 45260 - DNA, 25 bp, Saccharomyces pastorianus
caaacgcccaccctgaagacaaggg

SEQ ID NO: 45261 - DNA, 25 bp, Saccharomyces pastorianus
aacaagaaggactgcgccatcgagc

SEQ ID NO: 45262 - DNA, 25 bp, Saccharomyces pastorianus
acaagggccatcatcacaacaacaa

SEQ ID NO: 45263 - DNA, 25 bp, Saccharomyces pastorianus
tgcttttccccagtgctaaacacga

SEQ ID NO: 45264 - DNA, 25 bp, Saccharomyces pastorianus
ttctagaactgcaaaacccggtcgt

SEQ ID NO: 45265 - DNA, 25 bp, Saccharomyces pastorianus
tcaaggcccaggacgtggccagagt

SEQ ID NO: 45266 - DNA, 25 bp, Saccharomyces pastorianus
tggccagagtgtgccttctagaact

SEQ ID NO: 45267 - DNA, 25 bp, Saccharomyces pastorianus
gaagttcaagcagacagcgccgacg

SEQ ID NO: 45268 - DNA, 25 bp, Saccharomyces pastorianus
acaaggacgggttcctggcacggca

SEQ ID NO: 45269 - DNA, 25 bp, Saccharomyces pastorianus
tgcggcccaagctgacgacgctgga

SEQ ID NO: 45270 - DNA, 25 bp, Saccharomyces pastorianus
gaagctacaagtttgccggcgagac

SEQ ID NO: 45271 - DNA, 25 bp, Saccharomyces pastorianus
gacaagattctgatcgagcgaagct

SEQ ID NO: 45272 - DNA, 25 bp, Saccharomyces pastorianus
cagcaacaacagtttcggcgcccag

SEQ ID NO: 45273 - DNA, 25 bp, Saccharomyces pastorianus
aggagcacctgaacagtctgaagtt

SEQ ID NO: 45274 - DNA, 25 bp, Saccharomyces pastorianus
gcacagagtcgcagtcgcagtggca

SEQ ID NO: 45275 - DNA, 25 bp, Saccharomyces pastorianus
acaagagggccgtcctcagtgccag

SEQ ID NO: 45276 - DNA, 25 bp, Saccharomyces pastorianus
ctggagcagatcatctcaggcgggc

SEQ ID NO: 45277 - DNA, 25 bp, Saccharomyces pastorianus
agaagtcgcagctcgactgggccag

SEQ ID NO: 45278 - DNA, 25 bp, Saccharomyces pastorianus
gccgtgattctaggcaattagccag

SEQ ID NO: 45279 - DNA, 25 bp, Saccharomyces pastorianus
gaaccaatttcaagccttagttgtc

SEQ ID NO: 45280 - DNA, 25 bp, Saccharomyces pastorianus
ggctacatcttcacatatgccagtt

SEQ ID NO: 45281 - DNA, 25 bp, Saccharomyces pastorianus
cacatatgccagttgacggtagaat

SEQ ID NO: 45282 - DNA, 25 bp, Saccharomyces pastorianus
agttgtcaatgatattcctattcct

SEQ ID NO: 45283 - DNA, 25 bp, Saccharomyces pastorianus
gacgacgggtactgctgtcaaatat

SEQ ID NO: 45284 - DNA, 25 bp, Saccharomyces pastorianus
gaatttgctgctgaggctacatctt

SEQ ID NO: 45285 - DNA, 25 bp, Saccharomyces pastorianus
aattagccagattgacgacgggtac

SEQ ID NO: 45286 - DNA, 25 bp, Saccharomyces pastorianus
aacggcttccggtgcatttgatgaa

SEQ ID NO: 45287 - DNA, 25 bp, Saccharomyces pastorianus
tttactctcatccagcattacaagc

SEQ ID NO: 45288 - DNA, 25 bp, Saccharomyces pastorianus
attacaagctgcaacggcttccggt

SEQ ID NO: 45289 - DNA, 25 bp, Saccharomyces pastorianus
aagattcatcgccaatgccgatggg

SEQ ID NO: 45290 - DNA, 25 bp, Saccharomyces pastorianus
gccaaagattcatcgccaatgccga

SEQ ID NO: 45291 - DNA, 25 bp, Saccharomyces pastorianus
gatgcctccaattcagaaattttac

SEQ ID NO: 45292 - DNA, 25 bp, Saccharomyces pastorianus
tgaaattggccaaagattcatcgcc

SEQ ID NO: 45293 - DNA, 25 bp, Saccharomyces pastorianus
gcctccaattcagaaattttacaga

SEQ ID NO: 45294 - DNA, 25 bp, Saccharomyces pastorianus
gagatggatggatttgatccgtaaa

SEQ ID NO: 45295 - DNA, 25 bp, Saccharomyces pastorianus
gccaatgccgatggggctgctttaa

SEQ ID NO: 45296 - DNA, 25 bp, Saccharomyces pastorianus
gacgatgcctccaattcagaaattt

SEQ ID NO: 45297 - DNA, 25 bp, Saccharomyces pastorianus
gttgacgatgcctccaattcagaaa

SEQ ID NO: 45298 - DNA, 25 bp, Saccharomyces pastorianus
aattttacagagatggatggatttg

SEQ ID NO: 45299 - DNA, 25 bp, Saccharomyces pastorianus
tccgttgacgatgcctccaattcag

SEQ ID NO: 45300 - DNA, 25 bp, Saccharomyces pastorianus
gttaaccatggtatctcttcatctt

SEQ ID NO: 45301 - DNA, 25 bp, Saccharomyces pastorianus
gttggcatgattagagcctctctat

SEQ ID NO: 45302 - DNA, 25 bp, Saccharomyces pastorianus
gaaacatctggagccaaactcgcga

SEQ ID NO: 45303 - DNA, 25 bp, Saccharomyces pastorianus
ttttttgacaaagccctaaacgatg

SEQ ID NO: 45304 - DNA, 25 bp, Saccharomyces pastorianus
aaatcctctttgcattatggtagaa

SEQ ID NO: 45305 - DNA, 25 bp, Saccharomyces pastorianus
taagagctacgaggcctatcacatc

SEQ ID NO: 45306 - DNA, 25 bp, Saccharomyces pastorianus
caagtctcttatgtgaagtcctttt

SEQ ID NO: 45307 - DNA, 25 bp, Saccharomyces pastorianus
caaatgtactgtctggcatgatcgc

SEQ ID NO: 45308 - DNA, 25 bp, Saccharomyces pastorianus
accattcttcaacatcatcttagcc

SEQ ID NO: 45309 - DNA, 25 bp, Saccharomyces pastorianus
gccaaactcgcgatttcaaccatat

SEQ ID NO: 45310 - DNA, 25 bp, Saccharomyces pastorianus
tactttcatccaaatttatccgttg

SEQ ID NO: 45311 - DNA, 25 bp, Saccharomyces pastorianus
gagtcgtcggtgttatactaccaat

SEQ ID NO: 45312 - DNA, 25 bp, Saccharomyces pastorianus
tccaatgctaatccgctattctggg

SEQ ID NO: 45313 - DNA, 25 bp, Saccharomyces pastorianus
catgcatttgatcactgcgttcaag

SEQ ID NO: 45314 - DNA, 25 bp, Saccharomyces pastorianus
agaattgaactctgatcgtgtctcc

SEQ ID NO: 45315 - DNA, 25 bp, Saccharomyces pastorianus
gccaaaatgcctacacgtctaacat

SEQ ID NO: 45316 - DNA, 25 bp, Saccharomyces pastorianus
gtatcacagacgctttacatgtccc

SEQ ID NO: 45317 - DNA, 25 bp, Saccharomyces pastorianus
gggctgtatcatgacttgctcacta

SEQ ID NO: 45318 - DNA, 25 bp, Saccharomyces pastorianus
atgtcccaaactccaagacgtcaga

SEQ ID NO: 45319 - DNA, 25 bp, Saccharomyces pastorianus
gattccccatggtttcacaaagttt

SEQ ID NO: 45320 - DNA, 25 bp, Saccharomyces pastorianus
aattcgattagtccagattccccat

SEQ ID NO: 45321 - DNA, 25 bp, Saccharomyces pastorianus
gacttgctcactactccagaattga

SEQ ID NO: 45322 - DNA, 25 bp, Saccharomyces pastorianus
gatttctttagagctgtaaccagtg

SEQ ID NO: 45323 - DNA, 25 bp, Saccharomyces pastorianus
gagagtatctcggaccatatgtaca

SEQ ID NO: 45324 - DNA, 25 bp, Saccharomyces pastorianus
aaatccccgagtttgtgagaaatga

SEQ ID NO: 45325 - DNA, 25 bp, Saccharomyces pastorianus
ttagtaggcgatatcaccccagtcg

SEQ ID NO: 45326 - DNA, 25 bp, Saccharomyces pastorianus
gttttctcgactttggcatcgttga

SEQ ID NO: 45327 - DNA, 25 bp, Saccharomyces pastorianus
atcactatgctcatcaaggacccga

SEQ ID NO: 45328 - DNA, 25 bp, Saccharomyces pastorianus
aatgtgtccgaatcgcactagtaca

SEQ ID NO: 45329 - DNA, 25 bp, Saccharomyces pastorianus
gtacacgatattgccgaatccttag

SEQ ID NO: 45330 - DNA, 25 bp, Saccharomyces pastorianus
gatgaccttgtcatacagcgccaag

SEQ ID NO: 45331 - DNA, 25 bp, Saccharomyces pastorianus
gagaaatgagctttccaaaccccac

SEQ ID NO: 45332 - DNA, 25 bp, Saccharomyces pastorianus
aacaccgtcgtgaatgggaaactat

SEQ ID NO: 45333 - DNA, 25 bp, Saccharomyces pastorianus
gggcgtatctctagcgctgtggaaa

SEQ ID NO: 45334 - DNA, 25 bp, Saccharomyces pastorianus
gaagagccaccgaaagcttttttca

SEQ ID NO: 45335 - DNA, 25 bp, Saccharomyces pastorianus
gacacgtactgttacttcgctggta

SEQ ID NO: 45336 - DNA, 25 bp, Saccharomyces pastorianus
tctgctgttttgatcattccattct

SEQ ID NO: 45337 - DNA, 25 bp, Saccharomyces pastorianus
gaagacatgccataggcgctattat

SEQ ID NO: 45338 - DNA, 25 bp, Saccharomyces pastorianus
taacgctggtatggtttggccccat

SEQ ID NO: 45339 - DNA, 25 bp, Saccharomyces pastorianus
gaaatggaaccgctggcctgctaca

SEQ ID NO: 45340 - DNA, 25 bp, Saccharomyces pastorianus
aaatttcatttattcctgtccacag

SEQ ID NO: 45341 - DNA, 25 bp, Saccharomyces pastorianus
agttattcaagttggtgccctgtcc

SEQ ID NO: 45342 - DNA, 25 bp, Saccharomyces pastorianus
ttctgcatgggtattctagcgctca

SEQ ID NO: 45343 - DNA, 25 bp, Saccharomyces pastorianus
atgctcttgttattcattcctcaga

SEQ ID NO: 45344 - DNA, 25 bp, Saccharomyces pastorianus
atttggtatagcagggtactttgct

SEQ ID NO: 45345 - DNA, 25 bp, Saccharomyces pastorianus
atgttgcggcttctatcattggtac

SEQ ID NO: 45346 - DNA, 25 bp, Saccharomyces pastorianus
ttacaaaaaccagggtccttctgcg

SEQ ID NO: 45347 - DNA, 25 bp, Saccharomyces pastorianus
cacatgcttaatctatttttacaaa

SEQ ID NO: 45348 - DNA, 25 bp, Saccharomyces pastorianus
gggtactttgctacagatatgctaa

SEQ ID NO: 45349 - DNA, 25 bp, Saccharomyces pastorianus
ttggtactggtcacatgcttaatct

SEQ ID NO: 45350 - DNA, 25 bp, Saccharomyces pastorianus
tgtcgctgccatgggatttggtata

SEQ ID NO: 45351 - DNA, 25 bp, Saccharomyces pastorianus
gcttctatcattggtactggtcaca

SEQ ID NO: 45352 - DNA, 25 bp, Saccharomyces pastorianus
gcggcttctatcattggtactggtc

SEQ ID NO: 45353 - DNA, 25 bp, Saccharomyces pastorianus
tgcgcttgtcgctgccatgggattt

SEQ ID NO: 45354 - DNA, 25 bp, Saccharomyces pastorianus
aaaaccagggtccttctgcgcttgt

SEQ ID NO: 45355 - DNA, 25 bp, Saccharomyces pastorianus
ggtgctgataagatctcaatcggta

SEQ ID NO: 45356 - DNA, 25 bp, Saccharomyces pastorianus
agtcatcgcttcaagtggtgctggt

SEQ ID NO: 45357 - DNA, 25 bp, Saccharomyces pastorianus
agactggtgcagacgcttgtttagg

SEQ ID NO: 45358 - DNA, 25 bp, Saccharomyces pastorianus
gcagtcgttatttcggtggatccca

SEQ ID NO: 45359 - DNA, 25 bp, Saccharomyces pastorianus
gcgcattttgaggaggcttttctga

SEQ ID NO: 45360 - DNA, 25 bp, Saccharomyces pastorianus
tttaggtgcgggtatgttccataga

SEQ ID NO: 45361 - DNA, 25 bp, Saccharomyces pastorianus
aagtggtgctggtgttcctgcgcat

SEQ ID NO: 45362 - DNA, 25 bp, Saccharomyces pastorianus
cttgcgaagccctaggtgctggtga

SEQ ID NO: 45363 - DNA, 25 bp, Saccharomyces pastorianus
gcagtcagaattccagtcatcgctt

SEQ ID NO: 45364 - DNA, 25 bp, Saccharomyces pastorianus
aatcggtacagatgcagtttacgct

SEQ ID NO: 45365 - DNA, 25 bp, Saccharomyces pastorianus
aggatccctgctttagaagtggcaa

SEQ ID NO: 45366 - DNA, 25 bp, Saccharomyces pastorianus
tgaccaccaccagtgaccaaatatt

SEQ ID NO: 45367 - DNA, 25 bp, Saccharomyces pastorianus
gattgcgccaagatcaggcctagca

SEQ ID NO: 45368 - DNA, 25 bp, Saccharomyces pastorianus
gaagatccaattacgctcagcatat

SEQ ID NO: 45369 - DNA, 25 bp, Saccharomyces pastorianus
aggatatttccattcccgccatggg

SEQ ID NO: 45370 - DNA, 25 bp, Saccharomyces pastorianus
ccactgctgcgggatacgatatcta

SEQ ID NO: 45371 - DNA, 25 bp, Saccharomyces pastorianus
gatatatcatttaccgtaccaaccg

SEQ ID NO: 45372 - DNA, 25 bp, Saccharomyces pastorianus
gatttcatataacacaccaagccaa

SEQ ID NO: 45373 - DNA, 25 bp, Saccharomyces pastorianus
atacgatatctacgcatcccaggat

SEQ ID NO: 45374 - DNA, 25 bp, Saccharomyces pastorianus
acctacggtaggattgcgccaagat

SEQ ID NO: 45375 - DNA, 25 bp, Saccharomyces pastorianus
gcatggtccccactgatatatcatt

SEQ ID NO: 45376 - DNA, 25 bp, Saccharomyces pastorianus
agcatatgcaactgtgcccaccaag

SEQ ID NO: 45377 - DNA, 25 bp, Saccharomyces pastorianus
gttcaagatttgttgagcctgacta

SEQ ID NO: 45378 - DNA, 25 bp, Saccharomyces pastorianus
actggcagtgtcatgatggtgaaca

SEQ ID NO: 45379 - DNA, 25 bp, Saccharomyces pastorianus
agatggtttgtattcgcagtcgtat

SEQ ID NO: 45380 - DNA, 25 bp, Saccharomyces pastorianus
ataatgattgtaattggcccgtatt

SEQ ID NO: 45381 - DNA, 25 bp, Saccharomyces pastorianus
gcacaagagaactcggaactcgcga

SEQ ID NO: 45382 - DNA, 25 bp, Saccharomyces pastorianus
gaatgagcaatcaagcactttatga

SEQ ID NO: 45383 - DNA, 25 bp, Saccharomyces pastorianus
agaccatgcagctgatcaaaaacgt

SEQ ID NO: 45384 - DNA, 25 bp, Saccharomyces pastorianus
ggaactcgcgatagccactggcagt

SEQ ID NO: 45385 - DNA, 25 bp, Saccharomyces pastorianus
gatgacgatgactcgtttgcacaag

SEQ ID NO: 45386 - DNA, 25 bp, Saccharomyces pastorianus
gatactgtccgtgaagcttgcagaa

SEQ ID NO: 45387 - DNA, 25 bp, Saccharomyces pastorianus
ggtgaacaaccagaccatgcagctg

SEQ ID NO: 45388 - DNA, 25 bp, Saccharomyces pastorianus
ttttcagagctgataaacagctggt

SEQ ID NO: 45389 - DNA, 25 bp, Saccharomyces pastorianus
gctgataaacagctggttaaatttc

SEQ ID NO: 45390 - DNA, 25 bp, Saccharomyces pastorianus
acgaggctgccgacagaggtttgtt

SEQ ID NO: 45391 - DNA, 25 bp, Saccharomyces pastorianus
ggctgccgacagaggtttgtttttg

SEQ ID NO: 45392 - DNA, 25 bp, Saccharomyces pastorianus
agattttagacgaggctgccgacag

SEQ ID NO: 45393 - DNA, 25 bp, Saccharomyces pastorianus
caaacgaattattatcgagaggaac

SEQ ID NO: 45394 - DNA, 25 bp, Saccharomyces pastorianus
gaggctgccgacagaggtttgtttt

SEQ ID NO: 45395 - DNA, 25 bp, Saccharomyces pastorianus
ttagacgaggctgccgacagaggtt

SEQ ID NO: 45396 - DNA, 25 bp, Saccharomyces pastorianus
gccgacagaggtttgtttttggaag

SEQ ID NO: 45397 - DNA, 25 bp, Saccharomyces pastorianus
gaaaagattttagacgaggctgccg

SEQ ID NO: 45398 - DNA, 25 bp, Saccharomyces pastorianus
cagctggttaaatttcaaacgaatt

SEQ ID NO: 45399 - DNA, 25 bp, Saccharomyces pastorianus
tcaagtgtcattcttttgccacaaa

SEQ ID NO: 45400 - DNA, 25 bp, Saccharomyces pastorianus
gatccctctttggtccatacgataa

SEQ ID NO: 45401 - DNA, 25 bp, Saccharomyces pastorianus
gcacgatacgtttgcattccatatt

SEQ ID NO: 45402 - DNA, 25 bp, Saccharomyces pastorianus
ttcatatgcgaatagctggcccgat

SEQ ID NO: 45403 - DNA, 25 bp, Saccharomyces pastorianus
gttccctaacctgtatcttatgaag

SEQ ID NO: 45404 - DNA, 25 bp, Saccharomyces pastorianus
atctcttacgatgttggatccctct

SEQ ID NO: 45405 - DNA, 25 bp, Saccharomyces pastorianus
gtaccgccagcatattattcctata

SEQ ID NO: 45406 - DNA, 25 bp, Saccharomyces pastorianus
gtttctaacatgtgtaccgccagca

SEQ ID NO: 45407 - DNA, 25 bp, Saccharomyces pastorianus
ctggcccgatttagcaaacaagcat

SEQ ID NO: 45408 - DNA, 25 bp, Saccharomyces pastorianus
ggattacctaccgtttgcaaccatc

SEQ ID NO: 45409 - DNA, 25 bp, Saccharomyces pastorianus
gaatactcacttaaagctcgtttct

SEQ ID NO: 45410 - DNA, 25 bp, Saccharomyces pastorianus
attgccccagaaaacccggatgata

SEQ ID NO: 45411 - DNA, 25 bp, Saccharomyces pastorianus
taccaaaggcgctagcttcagagat

SEQ ID NO: 45412 - DNA, 25 bp, Saccharomyces pastorianus
atagtgcgccagtgtatttacgtca

SEQ ID NO: 45413 - DNA, 25 bp, Saccharomyces pastorianus
atgccacccggtgtcctgaaaaatt

SEQ ID NO: 45414 - DNA, 25 bp, Saccharomyces pastorianus
ttgaaggctctctgtataatctggg

SEQ ID NO: 45415 - DNA, 25 bp, Saccharomyces pastorianus
aatctacccgatgcacaatattgga

SEQ ID NO: 45416 - DNA, 25 bp, Saccharomyces pastorianus
aaagacgtttttcgcatcactaccg

SEQ ID NO: 45417 - DNA, 25 bp, Saccharomyces pastorianus
actttaagggctctcgtgtttcatt

SEQ ID NO: 45418 - DNA, 25 bp, Saccharomyces pastorianus
cgttcggtgttccattagagtcatt

SEQ ID NO: 45419 - DNA, 25 bp, Saccharomyces pastorianus
aaggatccttctaatgtttctataa

SEQ ID NO: 45420 - DNA, 25 bp, Saccharomyces pastorianus
agatacggttcctgcgatagtgcgc

SEQ ID NO: 45421 - DNA, 25 bp, Saccharomyces pastorianus
acgccagaaatcaacaaggtcctaa

SEQ ID NO: 45422 - DNA, 25 bp, Saccharomyces pastorianus
acaagcatttcttcaacgttgatgg

SEQ ID NO: 45423 - DNA, 25 bp, Saccharomyces pastorianus
gacctgcgaagagtttatgaagtac

SEQ ID NO: 45424 - DNA, 25 bp, Saccharomyces pastorianus
aatggtgctgttgattcggtgcgcc

SEQ ID NO: 45425 - DNA, 25 bp, Saccharomyces pastorianus
cacttccggaagtgcgaaagtttcg

SEQ ID NO: 45426 - DNA, 25 bp, Saccharomyces pastorianus
gtgcgcctgttcgatacgccagaaa

SEQ ID NO: 45427 - DNA, 25 bp, Saccharomyces pastorianus
aagtttcgcaagacaatggtgctgt

SEQ ID NO: 45428 - DNA, 25 bp, Saccharomyces pastorianus
gaagcaatcgttgttgacctgcgaa

SEQ ID NO: 45429 - DNA, 25 bp, Saccharomyces pastorianus
gaacacgtccaggagctatccaaac

SEQ ID NO: 45430 - DNA, 25 bp, Saccharomyces pastorianus
gtacgtcttcgaagaagaacacgtc

SEQ ID NO: 45431 - DNA, 25 bp, Saccharomyces pastorianus
aggagatcagtcgacacttccggaa

SEQ ID NO: 45432 - DNA, 25 bp, Saccharomyces pastorianus
attgaagcaggccatgtccccagaa

SEQ ID NO: 45433 - DNA, 25 bp, Saccharomyces pastorianus
atctaccgaagtggctgatttgtcc

SEQ ID NO: 45434 - DNA, 25 bp, Saccharomyces pastorianus
ggtgcccgtgtggaaactattttga

SEQ ID NO: 45435 - DNA, 25 bp, Saccharomyces pastorianus
aagagttctctcaagtggccaagta

SEQ ID NO: 45436 - DNA, 25 bp, Saccharomyces pastorianus
accacttgatcgttattgacctgtc

SEQ ID NO: 45437 - DNA, 25 bp, Saccharomyces pastorianus
agtactccagtcgatggtgcccgtg

SEQ ID NO: 45438 - DNA, 25 bp, Saccharomyces pastorianus
agtggccaagtacatcgattccgcg

SEQ ID NO: 45439 - DNA, 25 bp, Saccharomyces pastorianus
gattccgcggttaaactagctgaaa

SEQ ID NO: 45440 - DNA, 25 bp, Saccharomyces pastorianus
accattggtgcgatggctgtggcat

SEQ ID NO: 45441 - DNA, 25 bp, Saccharomyces pastorianus
tggtcctcataaccacaccattggt

SEQ ID NO: 45442 - DNA, 25 bp, Saccharomyces pastorianus
tattgacctgtctagtactccagtc

SEQ ID NO: 45443 - DNA, 25 bp, Saccharomyces pastorianus
aggtgcagcgttcgtcaccaagacg

SEQ ID NO: 45444 - DNA, 25 bp, Saccharomyces pastorianus
tcagcgctaagaccggatacaattt

SEQ ID NO: 45445 - DNA, 25 bp, Saccharomyces pastorianus
cgctataaatcactcgtaccgatgt

SEQ ID NO: 45446 - DNA, 25 bp, Saccharomyces pastorianus
aaacgcaggttattctggtgggcaa

SEQ ID NO: 45447 - DNA, 25 bp, Saccharomyces pastorianus
agtttcctgaaaagcatgcggccac

SEQ ID NO: 45448 - DNA, 25 bp, Saccharomyces pastorianus
aaggtgtaccgtatgtttccgtcag

SEQ ID NO: 45449 - DNA, 25 bp, Saccharomyces pastorianus
gtgtgcactgacatggttccaagat

SEQ ID NO: 45450 - DNA, 25 bp, Saccharomyces pastorianus
tattaccgggatgccaatattgccc

SEQ ID NO: 45451 - DNA, 25 bp, Saccharomyces pastorianus
gtttctactagcgacacatcaatgg

SEQ ID NO: 45452 - DNA, 25 bp, Saccharomyces pastorianus
attgccctgcatgtttttgaattaa

SEQ ID NO: 45453 - DNA, 25 bp, Saccharomyces pastorianus
aaacaatgcggccagtcttcagtgt

SEQ ID NO: 45454 - DNA, 25 bp, Saccharomyces pastorianus
gttttcttttcaagcaacgcctgcc

SEQ ID NO: 45455 - DNA, 25 bp, Saccharomyces pastorianus
ggcaatctccagtagtttcgttttc

SEQ ID NO: 45456 - DNA, 25 bp, Saccharomyces pastorianus
agttccttcttggtaacaggcttct

SEQ ID NO: 45457 - DNA, 25 bp, Saccharomyces pastorianus
atgttctccaacatattagccctgg

SEQ ID NO: 45458 - DNA, 25 bp, Saccharomyces pastorianus
ttggtaacaggcttctctttcccag

SEQ ID NO: 45459 - DNA, 25 bp, Saccharomyces pastorianus
caatctccagtagtttcgttttctt

SEQ ID NO: 45460 - DNA, 25 bp, Saccharomyces pastorianus
gcctgcctctctcttcttttcagtt

SEQ ID NO: 45461 - DNA, 25 bp, Saccharomyces pastorianus
ttcattgctattagcagctgcagca

SEQ ID NO: 45462 - DNA, 25 bp, Saccharomyces pastorianus
attagccctggcaatctccagtagt

SEQ ID NO: 45463 - DNA, 25 bp, Saccharomyces pastorianus
tcttcttttcagttccttcttggta

SEQ ID NO: 45464 - DNA, 25 bp, Saccharomyces pastorianus
tttcccagcgacttcattgctatta

SEQ ID NO: 45465 - DNA, 25 bp, Saccharomyces pastorianus
ggtcaattcttcaggctcctcatct

SEQ ID NO: 45466 - DNA, 25 bp, Saccharomyces pastorianus
tcatcttccttgacttccttctttt

SEQ ID NO: 45467 - DNA, 25 bp, Saccharomyces pastorianus
tattacgcagtttctgttccatcaa

SEQ ID NO: 45468 - DNA, 25 bp, Saccharomyces pastorianus
tgttccatcaatctttccgccattt

SEQ ID NO: 45469 - DNA, 25 bp, Saccharomyces pastorianus
tccttcttttccttagtctcttctt

SEQ ID NO: 45470 - DNA, 25 bp, Saccharomyces pastorianus
gtccactttattacgcagtttctgt

SEQ ID NO: 45471 - DNA, 25 bp, Saccharomyces pastorianus
acgcagtttctgttccatcaatctt

SEQ ID NO: 45472 - DNA, 25 bp, Saccharomyces pastorianus
atgtccactttattacgcagtttct

SEQ ID NO: 45473 - DNA, 25 bp, Saccharomyces pastorianus
aattcttcaggctcctcatcttcct

SEQ ID NO: 45474 - DNA, 25 bp, Saccharomyces pastorianus
gcagtttctgttccatcaatctttc

SEQ ID NO: 45475 - DNA, 25 bp, Saccharomyces pastorianus
agtttctgttccatcaatctttccg

SEQ ID NO: 45476 - DNA, 25 bp, Saccharomyces pastorianus
aatagccggcgatcacacgaaggaa

SEQ ID NO: 45477 - DNA, 25 bp, Saccharomyces pastorianus
agtcctccaaagctaccacgagaag

SEQ ID NO: 45478 - DNA, 25 bp, Saccharomyces pastorianus
atacctgagttcgaaggcgacgtta

SEQ ID NO: 45479 - DNA, 25 bp, Saccharomyces pastorianus
tgacattgggtcattctcacctgag

SEQ ID NO: 45480 - DNA, 25 bp, Saccharomyces pastorianus
taaactcgccacttttgaccaagaa

SEQ ID NO: 45481 - DNA, 25 bp, Saccharomyces pastorianus
aagcaggatcccttgaggcatggag

SEQ ID NO: 45482 - DNA, 25 bp, Saccharomyces pastorianus
ggcgacgttaatcccaagaccggtg

SEQ ID NO: 45483 - DNA, 25 bp, Saccharomyces pastorianus
gcgttgttccgtggaaagacaccct

SEQ ID NO: 45484 - DNA, 25 bp, Saccharomyces pastorianus
aagacaccctgcatggcggttagaa

SEQ ID NO: 45485 - DNA, 25 bp, Saccharomyces pastorianus
gaggccatagaccagtacaacgaac

SEQ ID NO: 45486 - DNA, 25 bp, Saccharomyces pastorianus
gagaaactgcagaggatcgcctcct

SEQ ID NO: 45487 - DNA, 25 bp, Saccharomyces pastorianus
gatctggttgtaaaccgattccgta

SEQ ID NO: 45488 - DNA, 25 bp, Saccharomyces pastorianus
aagcgttgacgagatttgcatatac

SEQ ID NO: 45489 - DNA, 25 bp, Saccharomyces pastorianus
gagcattctctaagaaccgcttgtt

SEQ ID NO: 45490 - DNA, 25 bp, Saccharomyces pastorianus
gatgagtttgctttcttcaagacta

SEQ ID NO: 45491 - DNA, 25 bp, Saccharomyces pastorianus
gattccgtatcagcggttacagtat

SEQ ID NO: 45492 - DNA, 25 bp, Saccharomyces pastorianus
ggaagaatactccacggcgattaat

SEQ ID NO: 45493 - DNA, 25 bp, Saccharomyces pastorianus
agaaccgcttgttgcagttatttgc

SEQ ID NO: 45494 - DNA, 25 bp, Saccharomyces pastorianus
ggttacaattgatcaatccgcagta

SEQ ID NO: 45495 - DNA, 25 bp, Saccharomyces pastorianus
cgatgggagcgctaatactattgta

SEQ ID NO: 45496 - DNA, 25 bp, Saccharomyces pastorianus
ttatccagacgtcagagcattctct

SEQ ID NO: 45497 - DNA, 25 bp, Saccharomyces pastorianus
atttgcagagatttcccggattgac

SEQ ID NO: 45498 - DNA, 25 bp, Saccharomyces pastorianus
ttagggctcggtccttctgaaagaa

SEQ ID NO: 45499 - DNA, 25 bp, Saccharomyces pastorianus
aggaatatcaaggtggtcaagccca

SEQ ID NO: 45500 - DNA, 25 bp, Saccharomyces pastorianus
aagtggtgactaccataccgtcgcg

SEQ ID NO: 45501 - DNA, 25 bp, Saccharomyces pastorianus
gaagtatcaccatgggttgagccaa

SEQ ID NO: 45502 - DNA, 25 bp, Saccharomyces pastorianus
ttgccgccttgatagtatttactga

SEQ ID NO: 45503 - DNA, 25 bp, Saccharomyces pastorianus
agattaacgtctgttttgccgcctt

SEQ ID NO: 45504 - DNA, 25 bp, Saccharomyces pastorianus
tgagccaagtggtagatctgaacat

SEQ ID NO: 45505 - DNA, 25 bp, Saccharomyces pastorianus
actgatacccattgttatactttga

SEQ ID NO: 45506 - DNA, 25 bp, Saccharomyces pastorianus
tatatccgtggcaagtggtgactac

SEQ ID NO: 45507 - DNA, 25 bp, Saccharomyces pastorianus
aagcccaccaaaatagagttacctg

SEQ ID NO: 45508 - DNA, 25 bp, Saccharomyces pastorianus
gtcgcgctaactgaatctggtcatt

SEQ ID NO: 45509 - DNA, 25 bp, Saccharomyces pastorianus
aacggcatccctgcaggcggtattg

SEQ ID NO: 45510 - DNA, 25 bp, Saccharomyces pastorianus
atgtgacgacgtttccaacctatct

SEQ ID NO: 45511 - DNA, 25 bp, Saccharomyces pastorianus
acctatcttgggaagctttcgtcac

SEQ ID NO: 45512 - DNA, 25 bp, Saccharomyces pastorianus
agaaggtctgctaggctccaacttt

SEQ ID NO: 45513 - DNA, 25 bp, Saccharomyces pastorianus
acaccttggttccatttgacggcag

SEQ ID NO: 45514 - DNA, 25 bp, Saccharomyces pastorianus
atcacgacttgaactacaccttggt

SEQ ID NO: 45515 - DNA, 25 bp, Saccharomyces pastorianus
aacactaagttgatcgcccattccg

SEQ ID NO: 45516 - DNA, 25 bp, Saccharomyces pastorianus
gctccaacttttacgcttacaactt

SEQ ID NO: 45517 - DNA, 25 bp, Saccharomyces pastorianus
tccggtacaatctcactactgaacg

SEQ ID NO: 45518 - DNA, 25 bp, Saccharomyces pastorianus
gtcggctttatcaacaacggcatcc

SEQ ID NO: 45519 - DNA, 25 bp, Saccharomyces pastorianus
gaagctttcgtcaccaacactaagt

SEQ ID NO: 45520 - DNA, 25 bp, Saccharomyces pastorianus
gggagattttgctgccggatatcgc

SEQ ID NO: 45521 - DNA, 25 bp, Saccharomyces pastorianus
gacgtgggaccttcagtggaatcat

SEQ ID NO: 45522 - DNA, 25 bp, Saccharomyces pastorianus
agtagctccccatggtagtgaccgg

SEQ ID NO: 45523 - DNA, 25 bp, Saccharomyces pastorianus
atattcgcgctggtgtaactattcc

SEQ ID NO: 45524 - DNA, 25 bp, Saccharomyces pastorianus
gggaacgcttcattgttaccatcag

SEQ ID NO: 45525 - DNA, 25 bp, Saccharomyces pastorianus
tggctccctgaagtccagattgaat

SEQ ID NO: 45526 - DNA, 25 bp, Saccharomyces pastorianus
ggtcattcgctattactttctatca

SEQ ID NO: 45527 - DNA, 25 bp, Saccharomyces pastorianus
gaaagacagttcctgtacctactcc

SEQ ID NO: 45528 - DNA, 25 bp, Saccharomyces pastorianus
agtaccaagtactctaatgcccggc

SEQ ID NO: 45529 - DNA, 25 bp, Saccharomyces pastorianus
taactattccgacaggtgcgaaccc

SEQ ID NO: 45530 - DNA, 25 bp, Saccharomyces pastorianus
cagtatgtccatgaacggtgctcat

SEQ ID NO: 45531 - DNA, 25 bp, Saccharomyces pastorianus
gcagactgcccaaactcaactagaa

SEQ ID NO: 45532 - DNA, 25 bp, Saccharomyces pastorianus
aggcaacttttggttcagcagcaac

SEQ ID NO: 45533 - DNA, 25 bp, Saccharomyces pastorianus
tagtggatgctatcaccgtggcaca

SEQ ID NO: 45534 - DNA, 25 bp, Saccharomyces pastorianus
gcaacaatcacagtccatggctagt

SEQ ID NO: 45535 - DNA, 25 bp, Saccharomyces pastorianus
aattaatttgcctccccagattgct

SEQ ID NO: 45536 - DNA, 25 bp, Saccharomyces pastorianus
gattgaggcaacaggccatcgcaaa

SEQ ID NO: 45537 - DNA, 25 bp, Saccharomyces pastorianus
taatgagccgcctacaacaacaaca

SEQ ID NO: 45538 - DNA, 25 bp, Saccharomyces pastorianus
agattgctcagctacccttggctac

SEQ ID NO: 45539 - DNA, 25 bp, Saccharomyces pastorianus
atggctagtcaatctgcaacatcta

SEQ ID NO: 45540 - DNA, 25 bp, Saccharomyces pastorianus
cggcagcaacaatttaggcatcaag

SEQ ID NO: 45541 - DNA, 25 bp, Saccharomyces pastorianus
gtggcacaacaacaagttcaacgtc

SEQ ID NO: 45542 - DNA, 25 bp, Saccharomyces pastorianus
ggactagcccacctgtattaatggt

SEQ ID NO: 45543 - DNA, 25 bp, Saccharomyces pastorianus
tactgcgacatcgaccttgtatcta

SEQ ID NO: 45544 - DNA, 25 bp, Saccharomyces pastorianus
gttaactcctctttcagtttcgtag

SEQ ID NO: 45545 - DNA, 25 bp, Saccharomyces pastorianus
aattgtgcttggagattccaccgca

SEQ ID NO: 45546 - DNA, 25 bp, Saccharomyces pastorianus
tataactgcctacaatcactactct

SEQ ID NO: 45547 - DNA, 25 bp, Saccharomyces pastorianus
tcaccctaccattgttctttcaaat

SEQ ID NO: 45548 - DNA, 25 bp, Saccharomyces pastorianus
ggttttgccagctatgcatatctct

SEQ ID NO: 45549 - DNA, 25 bp, Saccharomyces pastorianus
accccaatcggtagccttataactg

SEQ ID NO: 45550 - DNA, 25 bp, Saccharomyces pastorianus
attgcgtcttacaatcccgtcattg

SEQ ID NO: 45551 - DNA, 25 bp, Saccharomyces pastorianus
ttgggtgctagcttttcctggacta

SEQ ID NO: 45552 - DNA, 25 bp, Saccharomyces pastorianus
ggacagggaatcacctttcctacaa

SEQ ID NO: 45553 - DNA, 25 bp, Saccharomyces pastorianus
acggctattcaaagtcttgtcgatt

SEQ ID NO: 45554 - DNA, 25 bp, Saccharomyces pastorianus
aaaatgccaccttcattgagtaccc

SEQ ID NO: 45555 - DNA, 25 bp, Saccharomyces pastorianus
tatggaaccctgtgtgctgcaactg

SEQ ID NO: 45556 - DNA, 25 bp, Saccharomyces pastorianus
ggatcgcatgagaagccgttactga

SEQ ID NO: 45557 - DNA, 25 bp, Saccharomyces pastorianus
aattgctggtcattctagttttcac

SEQ ID NO: 45558 - DNA, 25 bp, Saccharomyces pastorianus
cagacaggtcgagtttcattttgct

SEQ ID NO: 45559 - DNA, 25 bp, Saccharomyces pastorianus
caagttgcccaagtagactctacgg

SEQ ID NO: 45560 - DNA, 25 bp, Saccharomyces pastorianus
gaactgttcaagacactacgacatt

SEQ ID NO: 45561 - DNA, 25 bp, Saccharomyces pastorianus
gaccatggaacgatcctggcgagtg

SEQ ID NO: 45562 - DNA, 25 bp, Saccharomyces pastorianus
gcctagatttttctcaagttgccca

SEQ ID NO: 45563 - DNA, 25 bp, Saccharomyces pastorianus
taatgaggatccaccggtatcgaat

SEQ ID NO: 45564 - DNA, 25 bp, Saccharomyces pastorianus
tgtggacttgttactactggcctag

SEQ ID NO: 45565 - DNA, 25 bp, Saccharomyces pastorianus
tgtccctcaatccatgtcttatgca

SEQ ID NO: 45566 - DNA, 25 bp, Saccharomyces pastorianus
gatttctcttaatgctgttgctggt

SEQ ID NO: 45567 - DNA, 25 bp, Saccharomyces pastorianus
actgccctctgtttgctgtgtggac

SEQ ID NO: 45568 - DNA, 25 bp, Saccharomyces pastorianus
agtcggatgtgtgcttgtccctcaa

SEQ ID NO: 45569 - DNA, 25 bp, Saccharomyces pastorianus
aagttcctgctcttatgggctacaa

SEQ ID NO: 45570 - DNA, 25 bp, Saccharomyces pastorianus
tagtcgcaggagtcacagtcggatg

SEQ ID NO: 45571 - DNA, 25 bp, Saccharomyces pastorianus
actggcctaggtgtactgcgcttag

SEQ ID NO: 45572 - DNA, 25 bp, Saccharomyces pastorianus
ggtgcctttatctactctttatttg

SEQ ID NO: 45573 - DNA, 25 bp, Saccharomyces pastorianus
gtccagtcgctgttatgtcattgca

SEQ ID NO: 45574 - DNA, 25 bp, Saccharomyces pastorianus
ttacgggtcctattattgccactgc

SEQ ID NO: 45575 - DNA, 25 bp, Saccharomyces pastorianus
aagaagatcaggtccactctggaag

SEQ ID NO: 45576 - DNA, 25 bp, Saccharomyces pastorianus
gggactccaaagtacgagaacagat

SEQ ID NO: 45577 - DNA, 25 bp, Saccharomyces pastorianus
gtggtgttggcaagaagcagcaaaa

SEQ ID NO: 45578 - DNA, 25 bp, Saccharomyces pastorianus
tcaaggaccagatgagggactccaa

SEQ ID NO: 45579 - DNA, 25 bp, Saccharomyces pastorianus
gactaacgacaacatgctgaagcag

SEQ ID NO: 45580 - DNA, 25 bp, Saccharomyces pastorianus
ggcaagcaaacaagacctggacaac

SEQ ID NO: 45581 - DNA, 25 bp, Saccharomyces pastorianus
aagccgagggactggtcaaggacca

SEQ ID NO: 45582 - DNA, 25 bp, Saccharomyces pastorianus
caggtccactctggaagccgaggga

SEQ ID NO: 45583 - DNA, 25 bp, Saccharomyces pastorianus
aaaagaggccaatcagcactgctga

SEQ ID NO: 45584 - DNA, 25 bp, Saccharomyces pastorianus
aacaatgataccgacactgctaaat

SEQ ID NO: 45585 - DNA, 25 bp, Saccharomyces pastorianus
agcatgagaaagacgagccagggca

SEQ ID NO: 45586 - DNA, 25 bp, Saccharomyces pastorianus
gaaggacgtccttgtcatgtactac

SEQ ID NO: 45587 - DNA, 25 bp, Saccharomyces pastorianus
gaacttcttgaacggtgacgccact

SEQ ID NO: 45588 - DNA, 25 bp, Saccharomyces pastorianus
gacatggcccaggacttcaagtacg

SEQ ID NO: 45589 - DNA, 25 bp, Saccharomyces pastorianus
cgaaatcgacggtcaggccttgtac

SEQ ID NO: 45590 - DNA, 25 bp, Saccharomyces pastorianus
acctccgatgtcttgatcgctaaga

SEQ ID NO: 45591 - DNA, 25 bp, Saccharomyces pastorianus
atcgtcaagtcccaagatgtcttcg

SEQ ID NO: 45592 - DNA, 25 bp, Saccharomyces pastorianus
gattggccccaacctatttagaatt

SEQ ID NO: 45593 - DNA, 25 bp, Saccharomyces pastorianus
caaatccatcgaggccttggtcaag

SEQ ID NO: 45594 - DNA, 25 bp, Saccharomyces pastorianus
ggcgtcaccatcgaaggttacccaa

SEQ ID NO: 45595 - DNA, 25 bp, Saccharomyces pastorianus
gatgtcttcgaaacccaggaatcct

SEQ ID NO: 45596 - DNA, 25 bp, Saccharomyces pastorianus
agaactttggactccttgttcgact

SEQ ID NO: 45597 - DNA, 25 bp, Saccharomyces pastorianus
gttgccgaaggttctttggtcacca

SEQ ID NO: 45598 - DNA, 25 bp, Saccharomyces pastorianus
gagttgtcaatatgtccttcggcgg

SEQ ID NO: 45599 - DNA, 25 bp, Saccharomyces pastorianus
tgctccgttgtctttgatctctaaa

SEQ ID NO: 45600 - DNA, 25 bp, Saccharomyces pastorianus
ggaagaaccatctcctttagacaaa

SEQ ID NO: 45601 - DNA, 25 bp, Saccharomyces pastorianus
gacgagttcatgatatctttgccaa

SEQ ID NO: 45602 - DNA, 25 bp, Saccharomyces pastorianus
agtcggcgacgctttagacgagttc

SEQ ID NO: 45603 - DNA, 25 bp, Saccharomyces pastorianus
ggcggtgacgctaacttggtcttag

SEQ ID NO: 45604 - DNA, 25 bp, Saccharomyces pastorianus
ttatccagtccaaccggttctaatg

SEQ ID NO: 45605 - DNA, 25 bp, Saccharomyces pastorianus
ctgacactgtcgctgaaactgagga

SEQ ID NO: 45606 - DNA, 25 bp, Saccharomyces pastorianus
gacaaatatttcgttcgctccaaga

SEQ ID NO: 45607 - DNA, 25 bp, Saccharomyces pastorianus
atcactgaatccgttcctcaagaac

SEQ ID NO: 45608 - DNA, 25 bp, Saccharomyces pastorianus
gtccagttcatccagtcgttaatca

SEQ ID NO: 45609 - DNA, 25 bp, Saccharomyces pastorianus
gttctcaaggtgatggcccaggtca

SEQ ID NO: 45610 - DNA, 25 bp, Saccharomyces pastorianus
tcgttaatcaactactacctggtcc

SEQ ID NO: 45611 - DNA, 25 bp, Saccharomyces pastorianus
tagaccacacgctatttctggccga

SEQ ID NO: 45612 - DNA, 25 bp, Saccharomyces pastorianus
aacgatgcgtactacaccctgtatt

SEQ ID NO: 45613 - DNA, 25 bp, Saccharomyces pastorianus
acatggacgtgttcgtcttggacac

SEQ ID NO: 45614 - DNA, 25 bp, Saccharomyces pastorianus
tcagcgggatggacgatgttctcaa

SEQ ID NO: 45615 - DNA, 25 bp, Saccharomyces pastorianus
caaagttgtgcccatgtcttatgcc

SEQ ID NO: 45616 - DNA, 25 bp, Saccharomyces pastorianus
cgaaagagacctgcgggagcccaaa

SEQ ID NO: 45617 - DNA, 25 bp, Saccharomyces pastorianus
gagaccattggtgtcaagtttcctg

SEQ ID NO: 45618 - DNA, 25 bp, Saccharomyces pastorianus
ggttgacctacttcgggacaggcaa

SEQ ID NO: 45619 - DNA, 25 bp, Saccharomyces pastorianus
aagagttgcgtgaaaccggcgaatt

SEQ ID NO: 45620 - DNA, 25 bp, Saccharomyces pastorianus
actatcgatcacgtcaaggaactta

SEQ ID NO: 45621 - DNA, 25 bp, Saccharomyces pastorianus
gaaggaaattttcgttgcgtccaag

SEQ ID NO: 45622 - DNA, 25 bp, Saccharomyces pastorianus
tgcgtccaagacgtactgtccatac

SEQ ID NO: 45623 - DNA, 25 bp, Saccharomyces pastorianus
aaagtcctggtcctgcagctgaacg

SEQ ID NO: 45624 - DNA, 25 bp, Saccharomyces pastorianus
gcgtggatatccaggcagccttgta

SEQ ID NO: 45625 - DNA, 25 bp, Saccharomyces pastorianus
gcagcgttaaacactctgttccaga

SEQ ID NO: 45626 - DNA, 25 bp, Saccharomyces pastorianus
tgtccatactgccacgcagcgttaa

SEQ ID NO: 45627 - DNA, 25 bp, Saccharomyces pastorianus
gaacgtgccaaagtccaaagtcctg

SEQ ID NO: 45628 - DNA, 25 bp, Saccharomyces pastorianus
gggaacgacgacttgcaagagttgc

SEQ ID NO: 45629 - DNA, 25 bp, Saccharomyces pastorianus
gtgccaaacatctacatcaacggta

SEQ ID NO: 45630 - DNA, 25 bp, Saccharomyces pastorianus
tttctatgaagaggtctcccctggg

SEQ ID NO: 45631 - DNA, 25 bp, Saccharomyces pastorianus
gaatgatgggctgacacccttacag

SEQ ID NO: 45632 - DNA, 25 bp, Saccharomyces pastorianus
gtacctgcacaccaaggacactggg

SEQ ID NO: 45633 - DNA, 25 bp, Saccharomyces pastorianus
gtgacgagtccctgatgcctgcaag

SEQ ID NO: 45634 - DNA, 25 bp, Saccharomyces pastorianus
acaagttgatcaggtttcacgcccc

SEQ ID NO: 45635 - DNA, 25 bp, Saccharomyces pastorianus
ttcgacgctcgttgtggttggccag

SEQ ID NO: 45636 - DNA, 25 bp, Saccharomyces pastorianus
gtgctcaaggacaaggccaccgaaa

SEQ ID NO: 45637 - DNA, 25 bp, Saccharomyces pastorianus
acccttacagctgatggtgctcaag

SEQ ID NO: 45638 - DNA, 25 bp, Saccharomyces pastorianus
gtggttggccagctttctatgaaga

SEQ ID NO: 45639 - DNA, 25 bp, Saccharomyces pastorianus
tacgcaggactttcccagacagaag

SEQ ID NO: 45640 - DNA, 25 bp, Saccharomyces pastorianus
gacacgccgctatactcgagtaacg

SEQ ID NO: 45641 - DNA, 25 bp, Saccharomyces pastorianus
agtaagatgtacctgtcacgctcca

SEQ ID NO: 45642 - DNA, 25 bp, Saccharomyces pastorianus
aaaattctagccacccatactgatg

SEQ ID NO: 45643 - DNA, 25 bp, Saccharomyces pastorianus
atcgcccatcctggagtatcataat

SEQ ID NO: 45644 - DNA, 25 bp, Saccharomyces pastorianus
gggtaataccacaccggattcgcaa

SEQ ID NO: 45645 - DNA, 25 bp, Saccharomyces pastorianus
gaagtgcactccacgtaatggtcgt

SEQ ID NO: 45646 - DNA, 25 bp, Saccharomyces pastorianus
gtgatatacgggaccattggccaac

SEQ ID NO: 45647 - DNA, 25 bp, Saccharomyces pastorianus
aaggcacatcttatcgcatcagcaa

SEQ ID NO: 45648 - DNA, 25 bp, Saccharomyces pastorianus
gtaatggtcgtgtccacgtcagtat

SEQ ID NO: 45649 - DNA, 25 bp, Saccharomyces pastorianus
gtcaacgaccgtatcaatggcaata

SEQ ID NO: 45650 - DNA, 25 bp, Saccharomyces pastorianus
ataatactgccttacatccaacctg

SEQ ID NO: 45651 - DNA, 25 bp, Saccharomyces pastorianus
tcttgcaggatgagcgatcgcccat

SEQ ID NO: 45652 - DNA, 25 bp, Saccharomyces pastorianus
ggtctatcccaacttttcacatgga

SEQ ID NO: 45653 - DNA, 25 bp, Saccharomyces pastorianus
gtttgttcctaactttgtccgagca

SEQ ID NO: 45654 - DNA, 25 bp, Saccharomyces pastorianus
aaggtcttttcctacattgacagag

SEQ ID NO: 45655 - DNA, 25 bp, Saccharomyces pastorianus
gctccatttacgcttgtgtcatgat

SEQ ID NO: 45656 - DNA, 25 bp, Saccharomyces pastorianus
ggttgttagccatttccggtctatc

SEQ ID NO: 45657 - DNA, 25 bp, Saccharomyces pastorianus
tgccatttgtctatctcacgtcaga

SEQ ID NO: 45658 - DNA, 25 bp, Saccharomyces pastorianus
acaggtgttcacttggttgttagcc

SEQ ID NO: 45659 - DNA, 25 bp, Saccharomyces pastorianus
gccgatcctgattgcactatacgta

SEQ ID NO: 45660 - DNA, 25 bp, Saccharomyces pastorianus
ctttttcgagaactacctggccatg

SEQ ID NO: 45661 - DNA, 25 bp, Saccharomyces pastorianus
ttgattgctatgtgtgtctccgcat

SEQ ID NO: 45662 - DNA, 25 bp, Saccharomyces pastorianus
ttattggccaattctgggtcgccat

SEQ ID NO: 45663 - DNA, 25 bp, Saccharomyces pastorianus
tgtgaaacttccatccttaaactct

SEQ ID NO: 45664 - DNA, 25 bp, Saccharomyces pastorianus
gagccttccaataagtctttgccag

SEQ ID NO: 45665 - DNA, 25 bp, Saccharomyces pastorianus
gccagaagttgctactaacgtcgaa

SEQ ID NO: 45666 - DNA, 25 bp, Saccharomyces pastorianus
gagggcctgcataaattactggaag

SEQ ID NO: 45667 - DNA, 25 bp, Saccharomyces pastorianus
aatcctctaacgtttcattcctgaa

SEQ ID NO: 45668 - DNA, 25 bp, Saccharomyces pastorianus
atccttaagatccacgctttttgag

SEQ ID NO: 45669 - DNA, 25 bp, Saccharomyces pastorianus
gagagactctttgagggcctgcata

SEQ ID NO: 45670 - DNA, 25 bp, Saccharomyces pastorianus
atacacgtcaaaataccggccgaga

SEQ ID NO: 45671 - DNA, 25 bp, Saccharomyces pastorianus
aacaggctcaaccaaaactctaaag

SEQ ID NO: 45672 - DNA, 25 bp, Saccharomyces pastorianus
acgccagtggattgggtatttacca

SEQ ID NO: 45673 - DNA, 25 bp, Saccharomyces pastorianus
atttaccagagagagccttccaata

SEQ ID NO: 45674 - DNA, 25 bp, Saccharomyces pastorianus
atgattctgctaacttactttgcga

SEQ ID NO: 45675 - DNA, 25 bp, Saccharomyces pastorianus
atccaactactcgaatgattctgct

SEQ ID NO: 45676 - DNA, 25 bp, Saccharomyces pastorianus
aatagcttcatctgatttgacgaat

SEQ ID NO: 45677 - DNA, 25 bp, Saccharomyces pastorianus
gatacgtcaggataacctttatttt

SEQ ID NO: 45678 - DNA, 25 bp, Saccharomyces pastorianus
gtgctctatacgtacctttgacatt

SEQ ID NO: 45679 - DNA, 25 bp, Saccharomyces pastorianus
aatatgcttgtaaactgcctatgaa

SEQ ID NO: 45680 - DNA, 25 bp, Saccharomyces pastorianus
agctgcatgccaaatagatacgtca

SEQ ID NO: 45681 - DNA, 25 bp, Saccharomyces pastorianus
gagcaatgcgattcaatagcttcat

SEQ ID NO: 45682 - DNA, 25 bp, Saccharomyces pastorianus
tcaaagaacgcttttcctcattcac

SEQ ID NO: 45683 - DNA, 25 bp, Saccharomyces pastorianus
aagttcaggctcacttctatgaatc

SEQ ID NO: 45684 - DNA, 25 bp, Saccharomyces pastorianus
tgggccaaggttccaagctgcatgc

SEQ ID NO: 45685 - DNA, 25 bp, Saccharomyces pastorianus
gaaagggccaccgtccaggagttct

SEQ ID NO: 45686 - DNA, 25 bp, Saccharomyces pastorianus
tgctcaacgagctgtaccgcgaaga

SEQ ID NO: 45687 - DNA, 25 bp, Saccharomyces pastorianus
ggttccacgaaatggtcgcggtcga

SEQ ID NO: 45688 - DNA, 25 bp, Saccharomyces pastorianus
aaaccgacgggctcaaccagctgta

SEQ ID NO: 45689 - DNA, 25 bp, Saccharomyces pastorianus
agaatctgcagtccgtgctcaacga

SEQ ID NO: 45690 - DNA, 25 bp, Saccharomyces pastorianus
ggaacagaccatcgagcagaccatg

SEQ ID NO: 45691 - DNA, 25 bp, Saccharomyces pastorianus
gaggacgtcgacaccatagccgtgg

SEQ ID NO: 45692 - DNA, 25 bp, Saccharomyces pastorianus
aagacgtgcactacgtggcggacaa

SEQ ID NO: 45693 - DNA, 25 bp, Saccharomyces pastorianus
tgtaccagctggtcgccaaggacta

SEQ ID NO: 45694 - DNA, 25 bp, Saccharomyces pastorianus
tggacatggacaatacggatctctc

SEQ ID NO: 45695 - DNA, 25 bp, Saccharomyces pastorianus
atcatgcaagactcggtcgccaggt

SEQ ID NO: 45696 - DNA, 25 bp, Saccharomyces pastorianus
gtaggttatttgtaccgaccagtgc

SEQ ID NO: 45697 - DNA, 25 bp, Saccharomyces pastorianus
gtaccgaccagtgctttgttttata

SEQ ID NO: 45698 - DNA, 25 bp, Saccharomyces pastorianus
taacttacccttgaaggattcaggt

SEQ ID NO: 45699 - DNA, 25 bp, Saccharomyces pastorianus
gttcgtcttgatatcagttttggca

SEQ ID NO: 45700 - DNA, 25 bp, Saccharomyces pastorianus
gttcaactcaacacctttttgggtg

SEQ ID NO: 45701 - DNA, 25 bp, Saccharomyces pastorianus
ggtattttttacttagagcacataa

SEQ ID NO: 45702 - DNA, 25 bp, Saccharomyces pastorianus
gggctatcatcaaagttcgtcttga

SEQ ID NO: 45703 - DNA, 25 bp, Saccharomyces pastorianus
gtgttccatatctaacttacccttg

SEQ ID NO: 45704 - DNA, 25 bp, Saccharomyces pastorianus
taagattccgttcaactcaacacct

SEQ ID NO: 45705 - DNA, 25 bp, Saccharomyces pastorianus
attactctactggtcatactttgtc

SEQ ID NO: 45706 - DNA, 25 bp, Saccharomyces pastorianus
taaaagtttcaagtacattccgcaa

SEQ ID NO: 45707 - DNA, 25 bp, Saccharomyces pastorianus
ggtttatggactactccgtactatt

SEQ ID NO: 45708 - DNA, 25 bp, Saccharomyces pastorianus
agtgctcgcgatttccattttatct

SEQ ID NO: 45709 - DNA, 25 bp, Saccharomyces pastorianus
tttacctcaaaatttccccatctat

SEQ ID NO: 45710 - DNA, 25 bp, Saccharomyces pastorianus
attttatctgtcgtgtattgccata

SEQ ID NO: 45711 - DNA, 25 bp, Saccharomyces pastorianus
gtcctgacccaattttcgaagcgta

SEQ ID NO: 45712 - DNA, 25 bp, Saccharomyces pastorianus
gtgtggttatttctagtgctcgcga

SEQ ID NO: 45713 - DNA, 25 bp, Saccharomyces pastorianus
gcagatgctccggatgatgcagcta

SEQ ID NO: 45714 - DNA, 25 bp, Saccharomyces pastorianus
gcagctaggtctcatattttcagtc

SEQ ID NO: 45715 - DNA, 25 bp, Saccharomyces pastorianus
ggctcactttaaacctttcgtgtgg

SEQ ID NO: 45716 - DNA, 25 bp, Saccharomyces pastorianus
agactatatcactcttcctagcaac

SEQ ID NO: 45717 - DNA, 25 bp, Saccharomyces pastorianus
gtggttgttccttatttcatgtgtt

SEQ ID NO: 45718 - DNA, 25 bp, Saccharomyces pastorianus
gacgacttcgtccaacaaggacttg

SEQ ID NO: 45719 - DNA, 25 bp, Saccharomyces pastorianus
accagaagtggaactcttgacgact

SEQ ID NO: 45720 - DNA, 25 bp, Saccharomyces pastorianus
acaaggacttggtaccagcggcgaa

SEQ ID NO: 45721 - DNA, 25 bp, Saccharomyces pastorianus
ggcagcgaataattttctagattct

SEQ ID NO: 45722 - DNA, 25 bp, Saccharomyces pastorianus
tgatgacagtgttaccagaagtgga

SEQ ID NO: 45723 - DNA, 25 bp, Saccharomyces pastorianus
gcctttgcgacagtggcagcgaata

SEQ ID NO: 45724 - DNA, 25 bp, Saccharomyces pastorianus
gacttggtaccagcggcgaactttt

SEQ ID NO: 45725 - DNA, 25 bp, Saccharomyces pastorianus
ttagcctttgcgacagtggcagcga

SEQ ID NO: 45726 - DNA, 25 bp, Saccharomyces pastorianus
gacagtggcagcgaataattttcta

SEQ ID NO: 45727 - DNA, 25 bp, Saccharomyces pastorianus
agtggaactcttgacgacttcgtcc

SEQ ID NO: 45728 - DNA, 25 bp, Saccharomyces pastorianus
gacgaaatcgactggtaagacgact

SEQ ID NO: 45729 - DNA, 25 bp, Saccharomyces pastorianus
caaaattcccacactctgttttaga

SEQ ID NO: 45730 - DNA, 25 bp, Saccharomyces pastorianus
gtgtacaatgatcttttgctattat

SEQ ID NO: 45731 - DNA, 25 bp, Saccharomyces pastorianus
ggctcatcaagcatctttttaattt

SEQ ID NO: 45732 - DNA, 25 bp, Saccharomyces pastorianus
aataaggttatatcagcagaatctg

SEQ ID NO: 45733 - DNA, 25 bp, Saccharomyces pastorianus
gatgaaattccgtctgtgtacaatg

SEQ ID NO: 45734 - DNA, 25 bp, Saccharomyces pastorianus
attcttaaagaccagctacgttact

SEQ ID NO: 45735 - DNA, 25 bp, Saccharomyces pastorianus
gaaacgtgtgtccaaaccaggttcg

SEQ ID NO: 45736 - DNA, 25 bp, Saccharomyces pastorianus
gaccagctacgttacttaatagagt

SEQ ID NO: 45737 - DNA, 25 bp, Saccharomyces pastorianus
gaaggaaaactatggcgattcttta

SEQ ID NO: 45738 - DNA, 25 bp, Saccharomyces pastorianus
aaagttgaggtacaaatgcccaata

SEQ ID NO: 45739 - DNA, 25 bp, Saccharomyces pastorianus
gcaaaattggctcatcaagcatctt

SEQ ID NO: 45740 - DNA, 25 bp, Saccharomyces pastorianus
gtactcaaacacgtttctttcacgc

SEQ ID NO: 45741 - DNA, 25 bp, Saccharomyces pastorianus
cggtcgtattggctctgaatttgct

SEQ ID NO: 45742 - DNA, 25 bp, Saccharomyces pastorianus
atgtttctacgtactcaaacacgtt

SEQ ID NO: 45743 - DNA, 25 bp, Saccharomyces pastorianus
tccgccaacaacaaccgttacttga

SEQ ID NO: 45744 - DNA, 25 bp, Saccharomyces pastorianus
attggtacaatatcaccgtgttcaa

SEQ ID NO: 45745 - DNA, 25 bp, Saccharomyces pastorianus
tgaagtacagtattgcctctcagcc

SEQ ID NO: 45746 - DNA, 25 bp, Saccharomyces pastorianus
gagacggccaaaccaattggtacaa

SEQ ID NO: 45747 - DNA, 25 bp, Saccharomyces pastorianus
tgaatttgctgaacatacctccgcc

SEQ ID NO: 45748 - DNA, 25 bp, Saccharomyces pastorianus
tttctttcacgctaccgctaagaag

SEQ ID NO: 45749 - DNA, 25 bp, Saccharomyces pastorianus
aagatgtccatcgtcggtcgtattg

SEQ ID NO: 45750 - DNA, 25 bp, Saccharomyces pastorianus
cagtattgcctctcagccaagaaga

SEQ ID NO: 45751 - DNA, 25 bp, Saccharomyces pastorianus
cccaagatgtcgctgttaagtgtaa

SEQ ID NO: 45752 - DNA, 25 bp, Saccharomyces pastorianus
tgccgtccacgtcaaaatcagagct

SEQ ID NO: 45753 - DNA, 25 bp, Saccharomyces pastorianus
tagaaccaagactcctggtccaggt

SEQ ID NO: 45754 - DNA, 25 bp, Saccharomyces pastorianus
gtccacgtcaaaatcagagctactg

SEQ ID NO: 45755 - DNA, 25 bp, Saccharomyces pastorianus
ctgcccaagatgtcgctgttaagtg

SEQ ID NO: 45756 - DNA, 25 bp, Saccharomyces pastorianus
ggctgcccaagatgtcgctgttaag

SEQ ID NO: 45757 - DNA, 25 bp, Saccharomyces pastorianus
tgtcgctgttaagtgtaaggaagtt

SEQ ID NO: 45758 - DNA, 25 bp, Saccharomyces pastorianus
agttggtatcactgccgtccacgtc

SEQ ID NO: 45759 - DNA, 25 bp, Saccharomyces pastorianus
agagatgaatcttccccatacgctg

SEQ ID NO: 45760 - DNA, 25 bp, Saccharomyces pastorianus
gtatcactgccgtccacgtcaaaat

SEQ ID NO: 45761 - DNA, 25 bp, Saccharomyces pastorianus
tggtccaggtggtcaagctgctttg

SEQ ID NO: 45762 - DNA, 25 bp, Saccharomyces pastorianus
agctccatttgaactctcgtaacga

SEQ ID NO: 45763 - DNA, 25 bp, Saccharomyces pastorianus
aagaatgtcatatccgttttcaatt

SEQ ID NO: 45764 - DNA, 25 bp, Saccharomyces pastorianus
gatagcaatatctcaacacaccggg

SEQ ID NO: 45765 - DNA, 25 bp, Saccharomyces pastorianus
acatacctatcccagaaaacacaca

SEQ ID NO: 45766 - DNA, 25 bp, Saccharomyces pastorianus
attgcaagctctatcgaatttctag

SEQ ID NO: 45767 - DNA, 25 bp, Saccharomyces pastorianus
gaagtactgttagtcggtttcgaag

SEQ ID NO: 45768 - DNA, 25 bp, Saccharomyces pastorianus
tagcggcttagtctatgtctgggat

SEQ ID NO: 45769 - DNA, 25 bp, Saccharomyces pastorianus
atggcgccttaggacaccttgaaaa

SEQ ID NO: 45770 - DNA, 25 bp, Saccharomyces pastorianus
aacgaatgggcgatgaaattgctca

SEQ ID NO: 45771 - DNA, 25 bp, Saccharomyces pastorianus
ttgctcaaagagctttctacaggga

SEQ ID NO: 45772 - DNA, 25 bp, Saccharomyces pastorianus
actagacaccggttacagacagcat

SEQ ID NO: 45773 - DNA, 25 bp, Saccharomyces pastorianus
gaacacccgttacagcacgaattaa

SEQ ID NO: 45774 - DNA, 25 bp, Saccharomyces pastorianus
actaagtaaccatgtctgccttgca

SEQ ID NO: 45775 - DNA, 25 bp, Saccharomyces pastorianus
gaagacaacactcattttggaagat

SEQ ID NO: 45776 - DNA, 25 bp, Saccharomyces pastorianus
ccggctttgccgtggttattcaaat

SEQ ID NO: 45777 - DNA, 25 bp, Saccharomyces pastorianus
ttgaagcaaatttagaacacccgtt

SEQ ID NO: 45778 - DNA, 25 bp, Saccharomyces pastorianus
gatatactcatactacaaccaattg

SEQ ID NO: 45779 - DNA, 25 bp, Saccharomyces pastorianus
gtctgccttgcactctcaagaaagt

SEQ ID NO: 45780 - DNA, 25 bp, Saccharomyces pastorianus
tacagggttattcactacaggacaa

SEQ ID NO: 45781 - DNA, 25 bp, Saccharomyces pastorianus
gctcaacccaaacgatggatgcaat

SEQ ID NO: 45782 - DNA, 25 bp, Saccharomyces pastorianus
aaaacttcaacatagctcaacccaa

SEQ ID NO: 45783 - DNA, 25 bp, Saccharomyces pastorianus
acattaactgacacaaccggctttg

SEQ ID NO: 45784 - DNA, 25 bp, Saccharomyces pastorianus
tatcttttccactagacgtcaagtt

SEQ ID NO: 45785 - DNA, 25 bp, Saccharomyces pastorianus
catattggttacatgtcgcgttatc

SEQ ID NO: 45786 - DNA, 25 bp, Saccharomyces pastorianus
tcgcgttatcttgcctttatctaag

SEQ ID NO: 45787 - DNA, 25 bp, Saccharomyces pastorianus
taaagaccatagtacaccccaacaa

SEQ ID NO: 45788 - DNA, 25 bp, Saccharomyces pastorianus
gttagacagcctttttgagacctta

SEQ ID NO: 45789 - DNA, 25 bp, Saccharomyces pastorianus
atctaaggaacctgaactctctcgc

SEQ ID NO: 45790 - DNA, 25 bp, Saccharomyces pastorianus
aaaccttttggtagctatgactgac

SEQ ID NO: 45791 - DNA, 25 bp, Saccharomyces pastorianus
ttctattatcaccacgctgcagaac

SEQ ID NO: 45792 - DNA, 25 bp, Saccharomyces pastorianus
ccgtttacttccctgttcataagag

SEQ ID NO: 45793 - DNA, 25 bp, Saccharomyces pastorianus
aaactttgacttgtgcggatcttaa

SEQ ID NO: 45794 - DNA, 25 bp, Saccharomyces pastorianus
aagattatagccttcgcccaacatt

SEQ ID NO: 45795 - DNA, 25 bp, Saccharomyces pastorianus
aagctttctctatagatactggcga

SEQ ID NO: 45796 - DNA, 25 bp, Saccharomyces pastorianus
gcagcctaacttacccattcttaaa

SEQ ID NO: 45797 - DNA, 25 bp, Saccharomyces pastorianus
ggacacaggaaatctagcgacatca

SEQ ID NO: 45798 - DNA, 25 bp, Saccharomyces pastorianus
attctgaatgttttgtatctctgtc

SEQ ID NO: 45799 - DNA, 25 bp, Saccharomyces pastorianus
gaactctcaagcgttaagcagccta

SEQ ID NO: 45800 - DNA, 25 bp, Saccharomyces pastorianus
tggtaacaattttgacctggcctta

SEQ ID NO: 45801 - DNA, 25 bp, Saccharomyces pastorianus
aagatatcgacgctccttcggaagc

SEQ ID NO: 45802 - DNA, 25 bp, Saccharomyces pastorianus
acatcgcatatctattggacacagg

SEQ ID NO: 45803 - DNA, 25 bp, Saccharomyces pastorianus
gagagctccgtagatccagacaaca

SEQ ID NO: 45804 - DNA, 25 bp, Saccharomyces pastorianus
ggcgaacagctttcaatgcgtcaaa

SEQ ID NO: 45805 - DNA, 25 bp, Saccharomyces pastorianus
gacctggccttacaaaagtctttga

SEQ ID NO: 45806 - DNA, 25 bp, Saccharomyces pastorianus
gatattctgatggaccttacttatg

SEQ ID NO: 45807 - DNA, 25 bp, Saccharomyces pastorianus
ttatatggtgatgcttccaccgaac

SEQ ID NO: 45808 - DNA, 25 bp, Saccharomyces pastorianus
gggtaaatcgtttccacatattacg

SEQ ID NO: 45809 - DNA, 25 bp, Saccharomyces pastorianus
ggctccagagtcaatcttcagttat

SEQ ID NO: 45810 - DNA, 25 bp, Saccharomyces pastorianus
tgcgcttcttacgagatttgctaat

SEQ ID NO: 45811 - DNA, 25 bp, Saccharomyces pastorianus
ttagatgtgagcttgcgcttcttac

SEQ ID NO: 45812 - DNA, 25 bp, Saccharomyces pastorianus
cgaagtaaagcatcccctcaattat

SEQ ID NO: 45813 - DNA, 25 bp, Saccharomyces pastorianus
gaattatcggtaggctccagagtca

SEQ ID NO: 45814 - DNA, 25 bp, Saccharomyces pastorianus
ggaccttacttatgtgcaatcccaa

SEQ ID NO: 45815 - DNA, 25 bp, Saccharomyces pastorianus
aaatatgattctttgggtcttgata

SEQ ID NO: 45816 - DNA, 25 bp, Saccharomyces pastorianus
aatcgtattagatatcccactgaaa

SEQ ID NO: 45817 - DNA, 25 bp, Saccharomyces pastorianus
gttgcctgaattgagcgaacacctt

SEQ ID NO: 45818 - DNA, 25 bp, Saccharomyces pastorianus
tttgtcaccaatttacgttatcatg

SEQ ID NO: 45819 - DNA, 25 bp, Saccharomyces pastorianus
cgatctgatggttagagctgagcta

SEQ ID NO: 45820 - DNA, 25 bp, Saccharomyces pastorianus
cggtgtattgccctgtcaaagtgaa

SEQ ID NO: 45821 - DNA, 25 bp, Saccharomyces pastorianus
ggtgtttcacccatttcatggatgt

SEQ ID NO: 45822 - DNA, 25 bp, Saccharomyces pastorianus
ttcgtcgtccacttccggtgtattg

SEQ ID NO: 45823 - DNA, 25 bp, Saccharomyces pastorianus
ttttatgttggcgatcttgcagaaa

SEQ ID NO: 45824 - DNA, 25 bp, Saccharomyces pastorianus
gattgaacctgcttctgtccaaaaa

SEQ ID NO: 45825 - DNA, 25 bp, Saccharomyces pastorianus
aatgttgacccttgtggaattagct

SEQ ID NO: 45826 - DNA, 25 bp, Saccharomyces pastorianus
ggacctttttctatagttcacaatt

SEQ ID NO: 45827 - DNA, 25 bp, Saccharomyces pastorianus
gaattagctcaactgatgttgcctg

SEQ ID NO: 45828 - DNA, 25 bp, Saccharomyces pastorianus
aaatatttgtccaacctggcgattt

SEQ ID NO: 45829 - DNA, 25 bp, Saccharomyces pastorianus
tactattttcttcaattgtccccgc

SEQ ID NO: 45830 - DNA, 25 bp, Saccharomyces pastorianus
gtttgttatccctgtgttcgtcata

SEQ ID NO: 45831 - DNA, 25 bp, Saccharomyces pastorianus
tggttcctatatcacgcatttcgca

SEQ ID NO: 45832 - DNA, 25 bp, Saccharomyces pastorianus
gggaccattccagtgtatacaccgc

SEQ ID NO: 45833 - DNA, 25 bp, Saccharomyces pastorianus
accgatgttacgagtgccataccac

SEQ ID NO: 45834 - DNA, 25 bp, Saccharomyces pastorianus
ggtgcgtttgaccttgacttgaaaa

SEQ ID NO: 45835 - DNA, 25 bp, Saccharomyces pastorianus
gacggacctggtatcgagagttttc

SEQ ID NO: 45836 - DNA, 25 bp, Saccharomyces pastorianus
gagagttttcactcctgatgcagtg

SEQ ID NO: 45837 - DNA, 25 bp, Saccharomyces pastorianus
ataagcttgctttcgttttggacgg

SEQ ID NO: 45838 - DNA, 25 bp, Saccharomyces pastorianus
gttcgtcataatttgctctacacta

SEQ ID NO: 45839 - DNA, 25 bp, Saccharomyces pastorianus
gagggacagtgtctcatctgtgatt

SEQ ID NO: 45840 - DNA, 25 bp, Saccharomyces pastorianus
caagattccgcgctatttaccaaac

SEQ ID NO: 45841 - DNA, 25 bp, Saccharomyces pastorianus
tcacggcattgcattctcgagagcg

SEQ ID NO: 45842 - DNA, 25 bp, Saccharomyces pastorianus
tacctctgccttcggttgctaacag

SEQ ID NO: 45843 - DNA, 25 bp, Saccharomyces pastorianus
atgggaccaggatttcgatatcgaa

SEQ ID NO: 45844 - DNA, 25 bp, Saccharomyces pastorianus
aggcgcgtcatgaaccaattcttat

SEQ ID NO: 45845 - DNA, 25 bp, Saccharomyces pastorianus
gattcatgccaatttttgttgtcca

SEQ ID NO: 45846 - DNA, 25 bp, Saccharomyces pastorianus
atgcaggaccaatcacactcgaata

SEQ ID NO: 45847 - DNA, 25 bp, Saccharomyces pastorianus
ctagaatctcaggtgcatttttcga

SEQ ID NO: 45848 - DNA, 25 bp, Saccharomyces pastorianus
ggaattgtaccaggcagcgagctgc

SEQ ID NO: 45849 - DNA, 25 bp, Saccharomyces pastorianus
agacgctatatcacttcatcaagaa

SEQ ID NO: 45850 - DNA, 25 bp, Saccharomyces pastorianus
aaaccaacttcagcctttctcaatt

SEQ ID NO: 45851 - DNA, 25 bp, Saccharomyces pastorianus
acatggccttggtgacaactctctt

SEQ ID NO: 45852 - DNA, 25 bp, Saccharomyces pastorianus
aacttcagcctttctcaattcatca

SEQ ID NO: 45853 - DNA, 25 bp, Saccharomyces pastorianus
atggccttggtgacaactctcttca

SEQ ID NO: 45854 - DNA, 25 bp, Saccharomyces pastorianus
gtgacaactctcttcaaaccaactt

SEQ ID NO: 45855 - DNA, 25 bp, Saccharomyces pastorianus
acaactctcttcaaaccaacttcag

SEQ ID NO: 45856 - DNA, 25 bp, Saccharomyces pastorianus
gaagacatggccttggtgacaactc

SEQ ID NO: 45857 - DNA, 25 bp, Saccharomyces pastorianus
tctcttcaaaccaacttcagccttt

SEQ ID NO: 45858 - DNA, 25 bp, Saccharomyces pastorianus
aacgagaagacatggccttggtgac

SEQ ID NO: 45859 - DNA, 25 bp, Saccharomyces pastorianus
acttcagcctttctcaattcatcag

SEQ ID NO: 45860 - DNA, 25 bp, Saccharomyces pastorianus
agacatggccttggtgacaactctc

SEQ ID NO: 45861 - DNA, 25 bp, Saccharomyces pastorianus
aactcctcagaacaagctccaagac

SEQ ID NO: 45862 - DNA, 25 bp, Saccharomyces pastorianus
tgaggaacgcactggcaagcaaaat

SEQ ID NO: 45863 - DNA, 25 bp, Saccharomyces pastorianus
ggtaaatcaaagcagcatcatcatc

SEQ ID NO: 45864 - DNA, 25 bp, Saccharomyces pastorianus
ggctcggtaggctctggtaaatcaa

SEQ ID NO: 45865 - DNA, 25 bp, Saccharomyces pastorianus
gcaagcaaaatttcatgggcagagt

SEQ ID NO: 45866 - DNA, 25 bp, Saccharomyces pastorianus
tacgattattcttcaaccaactcct

SEQ ID NO: 45867 - DNA, 25 bp, Saccharomyces pastorianus
gacaccatactcatggcactgatga

SEQ ID NO: 45868 - DNA, 25 bp, Saccharomyces pastorianus
gcagcatcatcatcacagtatgaag

SEQ ID NO: 45869 - DNA, 25 bp, Saccharomyces pastorianus
agaactcttccaaatcacctgatta

SEQ ID NO: 45870 - DNA, 25 bp, Saccharomyces pastorianus
ttattcttcaaccaactcctcagaa

SEQ ID NO: 45871 - DNA, 25 bp, Saccharomyces pastorianus
aagctccaagacaccatactcatgg

SEQ ID NO: 45872 - DNA, 25 bp, Saccharomyces pastorianus
aagtttgatcgatcctcaagtccca

SEQ ID NO: 45873 - DNA, 25 bp, Saccharomyces pastorianus
gatgataatactccggatccacaaa

SEQ ID NO: 45874 - DNA, 25 bp, Saccharomyces pastorianus
gatgcatctgactacaagcgtgaag

SEQ ID NO: 45875 - DNA, 25 bp, Saccharomyces pastorianus
aaatcagcgcagaaccaacattggc

SEQ ID NO: 45876 - DNA, 25 bp, Saccharomyces pastorianus
ggttactgctgcttacgacaacatt

SEQ ID NO: 45877 - DNA, 25 bp, Saccharomyces pastorianus
ggccgcaaatgcgtatgctgctgaa

SEQ ID NO: 45878 - DNA, 25 bp, Saccharomyces pastorianus
aaaaaggcatcattatcctccccga

SEQ ID NO: 45879 - DNA, 25 bp, Saccharomyces pastorianus
tatgggtccggtagtgacgccacaa

SEQ ID NO: 45880 - DNA, 25 bp, Saccharomyces pastorianus
gagatgctgatactgcttatgctca

SEQ ID NO: 45881 - DNA, 25 bp, Saccharomyces pastorianus
acagcagactgcttatgggtccggt

SEQ ID NO: 45882 - DNA, 25 bp, Saccharomyces pastorianus
acgccacaagtcacgaatcttctag

SEQ ID NO: 45883 - DNA, 25 bp, Saccharomyces pastorianus
attcacattgatggcaaggaccaag

SEQ ID NO: 45884 - DNA, 25 bp, Saccharomyces pastorianus
tatccaagaaggttctcaatttgag

SEQ ID NO: 45885 - DNA, 25 bp, Saccharomyces pastorianus
gaatctttgaggatgactccaagaa

SEQ ID NO: 45886 - DNA, 25 bp, Saccharomyces pastorianus
atctgtgtcccaattcacattgatg

SEQ ID NO: 45887 - DNA, 25 bp, Saccharomyces pastorianus
ggtcacattgctaaagagctttacg

SEQ ID NO: 45888 - DNA, 25 bp, Saccharomyces pastorianus
gaagattctatagccgaggtggaaa

SEQ ID NO: 45889 - DNA, 25 bp, Saccharomyces pastorianus
gtatttccactgaagattctatagc

SEQ ID NO: 45890 - DNA, 25 bp, Saccharomyces pastorianus
tgacttccacctagctcaaaagggt

SEQ ID NO: 45891 - DNA, 25 bp, Saccharomyces pastorianus
cggtgaaattctatctgtgtcccaa

SEQ ID NO: 45892 - DNA, 25 bp, Saccharomyces pastorianus
gggccatgatgagctgttcgttaac

SEQ ID NO: 45893 - DNA, 25 bp, Saccharomyces pastorianus
gagctgttcgttaaccaatgagggc

SEQ ID NO: 45894 - DNA, 25 bp, Saccharomyces pastorianus
caagccttcatgcaaaccgtacaga

SEQ ID NO: 45895 - DNA, 25 bp, Saccharomyces pastorianus
gtatggaaccaagccttcatgcaaa

SEQ ID NO: 45896 - DNA, 25 bp, Saccharomyces pastorianus
ctactaatgacaacgttcacgacga

SEQ ID NO: 45897 - DNA, 25 bp, Saccharomyces pastorianus
gtaccggtacgaactcttttgtcag

SEQ ID NO: 45898 - DNA, 25 bp, Saccharomyces pastorianus
aagtctgtacacgagtatggaacca

SEQ ID NO: 45899 - DNA, 25 bp, Saccharomyces pastorianus
tttaacaaagtcacagttctactgt

SEQ ID NO: 45900 - DNA, 25 bp, Saccharomyces pastorianus
gtcagtatgctttcaggagacaata

SEQ ID NO: 45901 - DNA, 25 bp, Saccharomyces pastorianus
aactttaccgaatttgatagcacag

SEQ ID NO: 45902 - DNA, 25 bp, Saccharomyces pastorianus
gaaacgattgtcttcgattcagaat

SEQ ID NO: 45903 - DNA, 25 bp, Saccharomyces pastorianus
caggtctaacgaaaacttccacaat

SEQ ID NO: 45904 - DNA, 25 bp, Saccharomyces pastorianus
agcgaagaaccgcatacttgcttca

SEQ ID NO: 45905 - DNA, 25 bp, Saccharomyces pastorianus
agtattggcttcgttagctcttaac

SEQ ID NO: 45906 - DNA, 25 bp, Saccharomyces pastorianus
ggaattcggccaactatggaaccta

SEQ ID NO: 45907 - DNA, 25 bp, Saccharomyces pastorianus
gtcttgttcaaggatgcttctgcta

SEQ ID NO: 45908 - DNA, 25 bp, Saccharomyces pastorianus
tacccaacctgctaaaaacgccttg

SEQ ID NO: 45909 - DNA, 25 bp, Saccharomyces pastorianus
gccaatttgtttattacccaacctg

SEQ ID NO: 45910 - DNA, 25 bp, Saccharomyces pastorianus
atttattggcgatactactggtgaa

SEQ ID NO: 45911 - DNA, 25 bp, Saccharomyces pastorianus
aggagcatggctgtgtcttgttcaa

SEQ ID NO: 45912 - DNA, 25 bp, Saccharomyces pastorianus
gaacgatgatctagttgcttctgaa

SEQ ID NO: 45913 - DNA, 25 bp, Saccharomyces pastorianus
aaatcaactgtcattcaccatcaac

SEQ ID NO: 45914 - DNA, 25 bp, Saccharomyces pastorianus
aagatctgcgctgtacaaggcctat

SEQ ID NO: 45915 - DNA, 25 bp, Saccharomyces pastorianus
cgatgttgctggatctgattctgta

SEQ ID NO: 45916 - DNA, 25 bp, Saccharomyces pastorianus
gcgtaatgatactacccttctagaa

SEQ ID NO: 45917 - DNA, 25 bp, Saccharomyces pastorianus
gctcagactcattattatcacgata

SEQ ID NO: 45918 - DNA, 25 bp, Saccharomyces pastorianus
ggtgctatctttattaaccactttg

SEQ ID NO: 45919 - DNA, 25 bp, Saccharomyces pastorianus
aaccgcttaggttcagactatcaaa

SEQ ID NO: 45920 - DNA, 25 bp, Saccharomyces pastorianus
actgtctcaaattaccatcaagcgt

SEQ ID NO: 45921 - DNA, 25 bp, Saccharomyces pastorianus
gagaagcttctttgttgtacgctat

SEQ ID NO: 45922 - DNA, 25 bp, Saccharomyces pastorianus
gactatcaaaacctactgtctcaaa

SEQ ID NO: 45923 - DNA, 25 bp, Saccharomyces pastorianus
acgtcaattttcacccaaagaggca

SEQ ID NO: 45924 - DNA, 25 bp, Saccharomyces pastorianus
gacattatcatcttttccgtatact

SEQ ID NO: 45925 - DNA, 25 bp, Saccharomyces pastorianus
gttgtacgctattccaaataactca

SEQ ID NO: 45926 - DNA, 25 bp, Saccharomyces pastorianus
gcattacactataatctccaagcta

SEQ ID NO: 45927 - DNA, 25 bp, Saccharomyces pastorianus
acacatgtgttattggtccaggtat

SEQ ID NO: 45928 - DNA, 25 bp, Saccharomyces pastorianus
attgttatggttatgttccccgctc

SEQ ID NO: 45929 - DNA, 25 bp, Saccharomyces pastorianus
gatcaggctgctacaaatgcactgt

SEQ ID NO: 45930 - DNA, 25 bp, Saccharomyces pastorianus
tatcatggcccagcaacgaatttat

SEQ ID NO: 45931 - DNA, 25 bp, Saccharomyces pastorianus
tctaggtaagctttggtctcccata

SEQ ID NO: 45932 - DNA, 25 bp, Saccharomyces pastorianus
gcactgtttagtttagccgtggcag

SEQ ID NO: 45933 - DNA, 25 bp, Saccharomyces pastorianus
ggtttgccgctatcaaagtacatca

SEQ ID NO: 45934 - DNA, 25 bp, Saccharomyces pastorianus
gacctggtccattctatctaggtaa

SEQ ID NO: 45935 - DNA, 25 bp, Saccharomyces pastorianus
ggagcatccatcacaacagcagttt

SEQ ID NO: 45936 - DNA, 25 bp, Saccharomyces pastorianus
gtaaagatttgttcagacctggtcc

SEQ ID NO: 45937 - DNA, 25 bp, Saccharomyces pastorianus
accgtcttgcgtttgacatcaggta

SEQ ID NO: 45938 - DNA, 25 bp, Saccharomyces pastorianus
aaatgggctaatgaggatcctgacc

SEQ ID NO: 45939 - DNA, 25 bp, Saccharomyces pastorianus
gatatcgattggtttacctccagga

SEQ ID NO: 45940 - DNA, 25 bp, Saccharomyces pastorianus
aatttaaacatcaagccagtgccga

SEQ ID NO: 45941 - DNA, 25 bp, Saccharomyces pastorianus
gccagtgccgaatttgccaaagagg

SEQ ID NO: 45942 - DNA, 25 bp, Saccharomyces pastorianus
tttccaacaaagtcatctgctagct

SEQ ID NO: 45943 - DNA, 25 bp, Saccharomyces pastorianus
ttcccggttgggtgacatcgatagg

SEQ ID NO: 45944 - DNA, 25 bp, Saccharomyces pastorianus
gatcctgaccctgccgcgaaaaaga

SEQ ID NO: 45945 - DNA, 25 bp, Saccharomyces pastorianus
acgttggtggtattgatggcgcatt

SEQ ID NO: 45946 - DNA, 25 bp, Saccharomyces pastorianus
taaccagacgttgctactacacagt

SEQ ID NO: 45947 - DNA, 25 bp, Saccharomyces pastorianus
atctgctagcttgtcaaatggcccc

SEQ ID NO: 45948 - DNA, 25 bp, Saccharomyces pastorianus
gtccctgaatatgatggtacgtcta

SEQ ID NO: 45949 - DNA, 25 bp, Saccharomyces pastorianus
atttgggtgctgctggtgccacaaa

SEQ ID NO: 45950 - DNA, 25 bp, Saccharomyces pastorianus
gtttggttgtcattgccggtgacat

SEQ ID NO: 45951 - DNA, 25 bp, Saccharomyces pastorianus
acatcccagtcttgtgtgaggacca

SEQ ID NO: 45952 - DNA, 25 bp, Saccharomyces pastorianus
gtgtgaggaccattctgttccatat

SEQ ID NO: 45953 - DNA, 25 bp, Saccharomyces pastorianus
gaagaccgtcaagaaggcctctaaa

SEQ ID NO: 45954 - DNA, 25 bp, Saccharomyces pastorianus
gttccatatatcttcataccatcca

SEQ ID NO: 45955 - DNA, 25 bp, Saccharomyces pastorianus
gtgacatttccccagccgacgttat

SEQ ID NO: 45956 - DNA, 25 bp, Saccharomyces pastorianus
aaagagacctacctctgttgtcttc

SEQ ID NO: 45957 - DNA, 25 bp, Saccharomyces pastorianus
ctgttgtcttcattgtcccaggtag

SEQ ID NO: 45958 - DNA, 25 bp, Saccharomyces pastorianus
gccatattgtcgtttgccaagccat

SEQ ID NO: 45959 - DNA, 25 bp, Saccharomyces pastorianus
tatgaggctagaatgcccgccatat

SEQ ID NO: 45960 - DNA, 25 bp, Saccharomyces pastorianus
gaaaccatcggctgcgagatctatt

SEQ ID NO: 45961 - DNA, 25 bp, Saccharomyces pastorianus
agagaccgaggtcactggtgcactt

SEQ ID NO: 45962 - DNA, 25 bp, Saccharomyces pastorianus
gtggcgcaaacaatttggcacttgt

SEQ ID NO: 45963 - DNA, 25 bp, Saccharomyces pastorianus
cactggtgcacttttggtgttcaaa

SEQ ID NO: 45964 - DNA, 25 bp, Saccharomyces pastorianus
gaacaactttgctatacctatatag

SEQ ID NO: 45965 - DNA, 25 bp, Saccharomyces pastorianus
cacttgtggtgccatgccatagaat

SEQ ID NO: 45966 - DNA, 25 bp, Saccharomyces pastorianus
gaacatggccatgttgctacatatg

SEQ ID NO: 45967 - DNA, 25 bp, Saccharomyces pastorianus
aaataagatgccgttaccgccagat

SEQ ID NO: 45968 - DNA, 25 bp, Saccharomyces pastorianus
aagtctagtttttgcttcattaggc

SEQ ID NO: 45969 - DNA, 25 bp, Saccharomyces pastorianus
aagcaggatgtaaagcacgagttat

SEQ ID NO: 45970 - DNA, 25 bp, Saccharomyces pastorianus
atctattggaagagcatgtggcgca

SEQ ID NO: 45971 - DNA, 25 bp, Saccharomyces pastorianus
gagtcagccggacggatctgcacaa

SEQ ID NO: 45972 - DNA, 25 bp, Saccharomyces pastorianus
ggccaacccagctatatccaaggat

SEQ ID NO: 45973 - DNA, 25 bp, Saccharomyces pastorianus
agaattttcctatcgagactcatga

SEQ ID NO: 45974 - DNA, 25 bp, Saccharomyces pastorianus
gatagtgccaaccatgacgatgttt

SEQ ID NO: 45975 - DNA, 25 bp, Saccharomyces pastorianus
tatcacaggccccagtaatactgct

SEQ ID NO: 45976 - DNA, 25 bp, Saccharomyces pastorianus
atccgattctggaccatcaaggacg

SEQ ID NO: 45977 - DNA, 25 bp, Saccharomyces pastorianus
agtggttctgaactttcatcctcgc

SEQ ID NO: 45978 - DNA, 25 bp, Saccharomyces pastorianus
aagcatactcatcgactgaggccaa

SEQ ID NO: 45979 - DNA, 25 bp, Saccharomyces pastorianus
ggtttgccagcctaataacacctat

SEQ ID NO: 45980 - DNA, 25 bp, Saccharomyces pastorianus
aatctgctgatgattctgctggcaa

SEQ ID NO: 45981 - DNA, 25 bp, Saccharomyces pastorianus
gccttctttttctgcgtaccagata

SEQ ID NO: 45982 - DNA, 25 bp, Saccharomyces pastorianus
gaacgcttatttccattcagtgtgt

SEQ ID NO: 45983 - DNA, 25 bp, Saccharomyces pastorianus
ttcagtgtgtttccaatgttgttgc

SEQ ID NO: 45984 - DNA, 25 bp, Saccharomyces pastorianus
gttttagaatcacccacttggctat

SEQ ID NO: 45985 - DNA, 25 bp, Saccharomyces pastorianus
tgatgtcgttatacctagttttaga

SEQ ID NO: 45986 - DNA, 25 bp, Saccharomyces pastorianus
gggatttggattaactgtgctttta

SEQ ID NO: 45987 - DNA, 25 bp, Saccharomyces pastorianus
gtttattctggtgtcttggaggttt

SEQ ID NO: 45988 - DNA, 25 bp, Saccharomyces pastorianus
gggtagcgctaaacttgatgtcgtt

SEQ ID NO: 45989 - DNA, 25 bp, Saccharomyces pastorianus
gatatactctttgggcgcttttatc

SEQ ID NO: 45990 - DNA, 25 bp, Saccharomyces pastorianus
aaataccccttatcgacacatgtgt

SEQ ID NO: 45991 - DNA, 25 bp, Saccharomyces pastorianus
tgctctgaatcaatggtacctacta

SEQ ID NO: 45992 - DNA, 25 bp, Saccharomyces pastorianus
ttatggcgtctttgtttgtttattc

SEQ ID NO: 45993 - DNA, 25 bp, Saccharomyces pastorianus
gaaggtctgttcaacttgtatagag

SEQ ID NO: 45994 - DNA, 25 bp, Saccharomyces pastorianus
aaattggtcttctcattcgcattgg

SEQ ID NO: 45995 - DNA, 25 bp, Saccharomyces pastorianus
ttttgccgctggatgtgctaaagat

SEQ ID NO: 45996 - DNA, 25 bp, Saccharomyces pastorianus
caaacaaatcccgagtccttcaaag

SEQ ID NO: 45997 - DNA, 25 bp, Saccharomyces pastorianus
gggctggaccgctgctagaaatgcc

SEQ ID NO: 45998 - DNA, 25 bp, Saccharomyces pastorianus
tctgccccactggatgtcatcaaga

SEQ ID NO: 45999 - DNA, 25 bp, Saccharomyces pastorianus
cttgggcttggaagactactctcaa

SEQ ID NO: 46000 - DNA, 25 bp, Saccharomyces pastorianus
tcgtttgcccttttcggtggtaatg

SEQ ID NO: 46001 - DNA, 25 bp, Saccharomyces pastorianus
tgcctgcgcttctttaatcgtttct

SEQ ID NO: 46002 - DNA, 25 bp, Saccharomyces pastorianus
tttcgacaaccctgaaagtgggctg

SEQ ID NO: 46003 - DNA, 25 bp, Saccharomyces pastorianus
ggtttgacgcctaaactactgacaa

SEQ ID NO: 46004 - DNA, 25 bp, Saccharomyces pastorianus
gtcattgatccagggacggcagcca

SEQ ID NO: 46005 - DNA, 25 bp, Saccharomyces pastorianus
ggttgaatctaccacaccgaacaca

SEQ ID NO: 46006 - DNA, 25 bp, Saccharomyces pastorianus
atcggcttcaatttcaaccagttcc

SEQ ID NO: 46007 - DNA, 25 bp, Saccharomyces pastorianus
gcatttctatccgttcccggtggaa

SEQ ID NO: 46008 - DNA, 25 bp, Saccharomyces pastorianus
aaagggtagcggtgcccaactgctc

SEQ ID NO: 46009 - DNA, 25 bp, Saccharomyces pastorianus
aaagctcccaagctgattcgcggta

SEQ ID NO: 46010 - DNA, 25 bp, Saccharomyces pastorianus
acaccgcaccgatcagttgcatata

SEQ ID NO: 46011 - DNA, 25 bp, Saccharomyces pastorianus
cagcggcttctgatactaccaaggt

SEQ ID NO: 46012 - DNA, 25 bp, Saccharomyces pastorianus
gaataacgccattaagctgctgaag

SEQ ID NO: 46013 - DNA, 25 bp, Saccharomyces pastorianus
aattctccgagattatcgttgccaa

SEQ ID NO: 46014 - DNA, 25 bp, Saccharomyces pastorianus
gttgccaacaactccaaacgacgaa

SEQ ID NO: 46015 - DNA, 25 bp, Saccharomyces pastorianus
tataaagaagctatggccgtccacg

SEQ ID NO: 46016 - DNA, 25 bp, Saccharomyces pastorianus
tgcccaagaaggtggtaactggcta

SEQ ID NO: 46017 - DNA, 25 bp, Saccharomyces pastorianus
taaagaagctatggccgtccacgcg

SEQ ID NO: 46018 - DNA, 25 bp, Saccharomyces pastorianus
ccaagaaggtggtaactggctaaca

SEQ ID NO: 46019 - DNA, 25 bp, Saccharomyces pastorianus
aaggtggtaactggctaacaggtgt

SEQ ID NO: 46020 - DNA, 25 bp, Saccharomyces pastorianus
tatggccgtccacgcggatatcgct

SEQ ID NO: 46021 - DNA, 25 bp, Saccharomyces pastorianus
ccgtccacgcggatatcgctacaaa

SEQ ID NO: 46022 - DNA, 25 bp, Saccharomyces pastorianus
gtggtaactggctaacaggtgtaaa

SEQ ID NO: 46023 - DNA, 25 bp, Saccharomyces pastorianus
actggctaacaggtgtaaagagatt

SEQ ID NO: 46024 - DNA, 25 bp, Saccharomyces pastorianus
aagctatggccgtccacgcggatat

SEQ ID NO: 46025 - DNA, 25 bp, Saccharomyces pastorianus
gtccacgcggatatcgctacaaacc

SEQ ID NO: 46026 - DNA, 25 bp, Saccharomyces pastorianus
aagaccgtcccgtgctaaagctgta

SEQ ID NO: 46027 - DNA, 25 bp, Saccharomyces pastorianus
atttcaacgctcagtctagttccat

SEQ ID NO: 46028 - DNA, 25 bp, Saccharomyces pastorianus
tatcagctgcaacttcatcgaacgg

SEQ ID NO: 46029 - DNA, 25 bp, Saccharomyces pastorianus
agagtagccacaccattgacttcag

SEQ ID NO: 46030 - DNA, 25 bp, Saccharomyces pastorianus
tgtatccgttgcacctccaaatatt

SEQ ID NO: 46031 - DNA, 25 bp, Saccharomyces pastorianus
ttaccaaaggcttccagtccatatg

SEQ ID NO: 46032 - DNA, 25 bp, Saccharomyces pastorianus
atatgctactaataccatgcctcca

SEQ ID NO: 46033 - DNA, 25 bp, Saccharomyces pastorianus
tctgtttcaaatccatatgctccct

SEQ ID NO: 46034 - DNA, 25 bp, Saccharomyces pastorianus
atcttctgtgtcaatggtatctcca

SEQ ID NO: 46035 - DNA, 25 bp, Saccharomyces pastorianus
agtcgtctagagttccatcgttggt

SEQ ID NO: 46036 - DNA, 25 bp, Saccharomyces pastorianus
gaacggtgttcctacatatgctact

SEQ ID NO: 46037 - DNA, 25 bp, Saccharomyces pastorianus
atctcgttccgatagcaccgatgaa

SEQ ID NO: 46038 - DNA, 25 bp, Saccharomyces pastorianus
tgatgccgattacgaaactcctcct

SEQ ID NO: 46039 - DNA, 25 bp, Saccharomyces pastorianus
tacgcaagagcgcatggcacagttt

SEQ ID NO: 46040 - DNA, 25 bp, Saccharomyces pastorianus
ggtacctgaaactccatcttttgtt

SEQ ID NO: 46041 - DNA, 25 bp, Saccharomyces pastorianus
atcaatgactacatggcgcgcttaa

SEQ ID NO: 46042 - DNA, 25 bp, Saccharomyces pastorianus
ttttgttttgcacagttctttccct

SEQ ID NO: 46043 - DNA, 25 bp, Saccharomyces pastorianus
gattcgaaaccgtctgatgccgatt

SEQ ID NO: 46044 - DNA, 25 bp, Saccharomyces pastorianus
tacaattcgttaccacacagcttca

SEQ ID NO: 46045 - DNA, 25 bp, Saccharomyces pastorianus
ctgtgctggctcgtagtgattcgaa

SEQ ID NO: 46046 - DNA, 25 bp, Saccharomyces pastorianus
gaaatggccttgctctgaatgcgta

SEQ ID NO: 46047 - DNA, 25 bp, Saccharomyces pastorianus
gcacagtttgcccagagctatacta

SEQ ID NO: 46048 - DNA, 25 bp, Saccharomyces pastorianus
aggaaacaacgctctaccaacctat

SEQ ID NO: 46049 - DNA, 25 bp, Saccharomyces pastorianus
gaaacgcggtgttcatgaaccctta

SEQ ID NO: 46050 - DNA, 25 bp, Saccharomyces pastorianus
aaggatcatgttcttttggtgcccc

SEQ ID NO: 46051 - DNA, 25 bp, Saccharomyces pastorianus
tagcaaggacacaccgtcatcgaaa

SEQ ID NO: 46052 - DNA, 25 bp, Saccharomyces pastorianus
gatacacatcgagggctaaaccgcc

SEQ ID NO: 46053 - DNA, 25 bp, Saccharomyces pastorianus
ttatatggtatatccacccacccag

SEQ ID NO: 46054 - DNA, 25 bp, Saccharomyces pastorianus
aatccttcgcctgtggttatgggcg

SEQ ID NO: 46055 - DNA, 25 bp, Saccharomyces pastorianus
gtgcccgtgtatcaatcataccagt

SEQ ID NO: 46056 - DNA, 25 bp, Saccharomyces pastorianus
gagggccctgaccacaacaaatata

SEQ ID NO: 46057 - DNA, 25 bp, Saccharomyces pastorianus
gacacaacgtcaaatgagggccctg

SEQ ID NO: 46058 - DNA, 25 bp, Saccharomyces pastorianus
atccaatcgtgtataacccagcttc

SEQ ID NO: 46059 - DNA, 25 bp, Saccharomyces pastorianus
ggcacggccacgaattacagctgtt

SEQ ID NO: 46060 - DNA, 25 bp, Saccharomyces pastorianus
agtcgagaagatcggaccccttcgg

SEQ ID NO: 46061 - DNA, 25 bp, Saccharomyces pastorianus
gattgtggaatccttcaccgactgg

SEQ ID NO: 46062 - DNA, 25 bp, Saccharomyces pastorianus
gggagatctactcaaatccgattcc

SEQ ID NO: 46063 - DNA, 25 bp, Saccharomyces pastorianus
agcgcaattccaaggtgttcttcca

SEQ ID NO: 46064 - DNA, 25 bp, Saccharomyces pastorianus
atcgaggtgccatcgaggccataaa

SEQ ID NO: 46065 - DNA, 25 bp, Saccharomyces pastorianus
gaagagctgaccatctatcgggaga

SEQ ID NO: 46066 - DNA, 25 bp, Saccharomyces pastorianus
atccgattcctgttagctatctaga

SEQ ID NO: 46067 - DNA, 25 bp, Saccharomyces pastorianus
agacgaatccgtgcgttcgattgtg

SEQ ID NO: 46068 - DNA, 25 bp, Saccharomyces pastorianus
gaaacgacaagccatcgacctcggg

SEQ ID NO: 46069 - DNA, 25 bp, Saccharomyces pastorianus
acacgcctcagtttcagtcgagaag

SEQ ID NO: 46070 - DNA, 25 bp, Saccharomyces pastorianus
gattccgattatcctgaattccctg

SEQ ID NO: 46071 - DNA, 25 bp, Saccharomyces pastorianus
gaattccctgtcttgagagatcgta

SEQ ID NO: 46072 - DNA, 25 bp, Saccharomyces pastorianus
aacacatctgtctcttactctaagt

SEQ ID NO: 46073 - DNA, 25 bp, Saccharomyces pastorianus
tacagctactttgggtatcactcaa

SEQ ID NO: 46074 - DNA, 25 bp, Saccharomyces pastorianus
gtaagtctgctttatccgatagtga

SEQ ID NO: 46075 - DNA, 25 bp, Saccharomyces pastorianus
ggaacaagtcgtccaattggttggt

SEQ ID NO: 46076 - DNA, 25 bp, Saccharomyces pastorianus
aaatggttactctacctacgacgct

SEQ ID NO: 46077 - DNA, 25 bp, Saccharomyces pastorianus
tactctaagtacaccactgttttga

SEQ ID NO: 46078 - DNA, 25 bp, Saccharomyces pastorianus
gatgttaaacattccgtttcttcat

SEQ ID NO: 46079 - DNA, 25 bp, Saccharomyces pastorianus
gattaccttggatgttgctgctttg

SEQ ID NO: 46080 - DNA, 25 bp, Saccharomyces pastorianus
ggttctgtttccattgttgctgctg

SEQ ID NO: 46081 - DNA, 25 bp, Saccharomyces pastorianus
tgaacatcgacgacgtcgactccat

SEQ ID NO: 46082 - DNA, 25 bp, Saccharomyces pastorianus
accccgcaactacagtctgcaagaa

SEQ ID NO: 46083 - DNA, 25 bp, Saccharomyces pastorianus
gcaaagatcaagaagctgggcgacg

SEQ ID NO: 46084 - DNA, 25 bp, Saccharomyces pastorianus
gccatcaaggccagagtagaccagc

SEQ ID NO: 46085 - DNA, 25 bp, Saccharomyces pastorianus
gaatctgacagactcccaggtcaag

SEQ ID NO: 46086 - DNA, 25 bp, Saccharomyces pastorianus
tcccaggtcaaggagatcaccgcaa

SEQ ID NO: 46087 - DNA, 25 bp, Saccharomyces pastorianus
aagaagacagcgacgttccagcact

SEQ ID NO: 46088 - DNA, 25 bp, Saccharomyces pastorianus
gcgacgttccagcactcaactctgt

SEQ ID NO: 46089 - DNA, 25 bp, Saccharomyces pastorianus
gtgagggccttgaacatcgacgacg

SEQ ID NO: 46090 - DNA, 25 bp, Saccharomyces pastorianus
ttcgccaacagattgacgggctgga

SEQ ID NO: 46091 - DNA, 25 bp, Saccharomyces pastorianus
gtagaccagctgaacctgaatctga

SEQ ID NO: 46092 - DNA, 25 bp, Saccharomyces pastorianus
cactcggtgggctaatggcaagaat

SEQ ID NO: 46093 - DNA, 25 bp, Saccharomyces pastorianus
tggtgctaggttgatcgatgtcagt

SEQ ID NO: 46094 - DNA, 25 bp, Saccharomyces pastorianus
gcccctgaatacgtcaagtccaaat

SEQ ID NO: 46095 - DNA, 25 bp, Saccharomyces pastorianus
tcacacacaaggctggtatccacgc

SEQ ID NO: 46096 - DNA, 25 bp, Saccharomyces pastorianus
tacactgccttggagggtggtgcta

SEQ ID NO: 46097 - DNA, 25 bp, Saccharomyces pastorianus
gatcgatgtcagtgtgctgggtatt

SEQ ID NO: 46098 - DNA, 25 bp, Saccharomyces pastorianus
ggtatcactccactcggtgggctaa

SEQ ID NO: 46099 - DNA, 25 bp, Saccharomyces pastorianus
gtatccacgccaaggccattctagc

SEQ ID NO: 46100 - DNA, 25 bp, Saccharomyces pastorianus
aagaatgatcgtagccgcccctgaa

SEQ ID NO: 46101 - DNA, 25 bp, Saccharomyces pastorianus
aaggccattctagcgaatccttcca

SEQ ID NO: 46102 - DNA, 25 bp, Saccharomyces pastorianus
aaacctggtagcagatgctgtggag

SEQ ID NO: 46103 - DNA, 25 bp, Saccharomyces pastorianus
tccccttagaagacgagcatccatt

SEQ ID NO: 46104 - DNA, 25 bp, Saccharomyces pastorianus
tacgatgtttctctacctttaaagg

SEQ ID NO: 46105 - DNA, 25 bp, Saccharomyces pastorianus
tgaaagatgccgctttccccttaga

SEQ ID NO: 46106 - DNA, 25 bp, Saccharomyces pastorianus
gctgagcatggtttaggtttccaga

SEQ ID NO: 46107 - DNA, 25 bp, Saccharomyces pastorianus
tggagattcacccaaacctgtcgta

SEQ ID NO: 46108 - DNA, 25 bp, Saccharomyces pastorianus
gttgacgccaccaatgccaggctat

SEQ ID NO: 46109 - DNA, 25 bp, Saccharomyces pastorianus
aaatgattccagaggcaagccaagc

SEQ ID NO: 46110 - DNA, 25 bp, Saccharomyces pastorianus
aacctgtcgtaggtgccattgggta

SEQ ID NO: 46111 - DNA, 25 bp, Saccharomyces pastorianus
gcatggttccgtgagtgctgagcat

SEQ ID NO: 46112 - DNA, 25 bp, Saccharomyces pastorianus
gaattcgtttcctcaaagcatggtt

SEQ ID NO: 46113 - DNA, 25 bp, Saccharomyces pastorianus
gatctatactctttggttgacgcca

SEQ ID NO: 46114 - DNA, 25 bp, Saccharomyces pastorianus
taagacatttcgaccctgtgtcagg

SEQ ID NO: 46115 - DNA, 25 bp, Saccharomyces pastorianus
gaaatcatcagctctcttagggcgt

SEQ ID NO: 46116 - DNA, 25 bp, Saccharomyces pastorianus
ttcaagtccattttgtcagagcagg

SEQ ID NO: 46117 - DNA, 25 bp, Saccharomyces pastorianus
gactaaccagcgagaactacccaga

SEQ ID NO: 46118 - DNA, 25 bp, Saccharomyces pastorianus
gaaactgacttctgatgatctgaac

SEQ ID NO: 46119 - DNA, 25 bp, Saccharomyces pastorianus
gagttggaggacctgtcattctata

SEQ ID NO: 46120 - DNA, 25 bp, Saccharomyces pastorianus
ccctgtgtcaggcatcttaaagtgt

SEQ ID NO: 46121 - DNA, 25 bp, Saccharomyces pastorianus
gtgatgccggtgttatcttggagaa

SEQ ID NO: 46122 - DNA, 25 bp, Saccharomyces pastorianus
gctgattctgtcattagccaacttg

SEQ ID NO: 46123 - DNA, 25 bp, Saccharomyces pastorianus
agtacccatttttgacgagctgatt

SEQ ID NO: 46124 - DNA, 25 bp, Saccharomyces pastorianus
gaagcgctggcaaccatctgaaata

SEQ ID NO: 46125 - DNA, 25 bp, Saccharomyces pastorianus
aacaatgggcgctgccttgctgcta

SEQ ID NO: 46126 - DNA, 25 bp, Saccharomyces pastorianus
aatgggcgctgccttgctgctaccg

SEQ ID NO: 46127 - DNA, 25 bp, Saccharomyces pastorianus
acaatgggcgctgccttgctgctac

SEQ ID NO: 46128 - DNA, 25 bp, Saccharomyces pastorianus
tctaccaacaacaatgggcgctgcc

SEQ ID NO: 46129 - DNA, 25 bp, Saccharomyces pastorianus
atgggcgctgccttgctgctaccgt

SEQ ID NO: 46130 - DNA, 25 bp, Saccharomyces pastorianus
gggcgctgccttgctgctaccgttg

SEQ ID NO: 46131 - DNA, 25 bp, Saccharomyces pastorianus
caacaatgggcgctgccttgctgct

SEQ ID NO: 46132 - DNA, 25 bp, Saccharomyces pastorianus
taccaacaacaatgggcgctgcctt

SEQ ID NO: 46133 - DNA, 25 bp, Saccharomyces pastorianus
gcctctaccaacaacaatgggcgct

SEQ ID NO: 46134 - DNA, 25 bp, Saccharomyces pastorianus
cctctaccaacaacaatgggcgctg

SEQ ID NO: 46135 - DNA, 25 bp, Saccharomyces pastorianus
accaacaacaatgggcgctgccttg

SEQ ID NO: 46136 - DNA, 25 bp, Saccharomyces pastorianus
ggcgtgcttttgatcttatgcttgc

SEQ ID NO: 46137 - DNA, 25 bp, Saccharomyces pastorianus
attatcgttcgcgttgatcgtgtcc

SEQ ID NO: 46138 - DNA, 25 bp, Saccharomyces pastorianus
gtctttgctcttgttattcttcgta

SEQ ID NO: 46139 - DNA, 25 bp, Saccharomyces pastorianus
attcctgctcgacttgggtgagatt

SEQ ID NO: 46140 - DNA, 25 bp, Saccharomyces pastorianus
gcagacacagcattgccattcgaag

SEQ ID NO: 46141 - DNA, 25 bp, Saccharomyces pastorianus
gcttgcttttgagtttcttggacga

SEQ ID NO: 46142 - DNA, 25 bp, Saccharomyces pastorianus
gtggtgtatggtattcctgctcgac

SEQ ID NO: 46143 - DNA, 25 bp, Saccharomyces pastorianus
ttattcttcgtatcaccatcatcct

SEQ ID NO: 46144 - DNA, 25 bp, Saccharomyces pastorianus
ggtgagattatattccctgcgccgc

SEQ ID NO: 46145 - DNA, 25 bp, Saccharomyces pastorianus
ggacgaggacttgatagcagacaca

SEQ ID NO: 46146 - DNA, 25 bp, Saccharomyces pastorianus
gatggcgaatttttccggcgtgctt

SEQ ID NO: 46147 - DNA, 25 bp, Saccharomyces pastorianus
aagacatttgcgtgcggtgactgta

SEQ ID NO: 46148 - DNA, 25 bp, Saccharomyces pastorianus
gtcactaattgtttgggccatccag

SEQ ID NO: 46149 - DNA, 25 bp, Saccharomyces pastorianus
gaagtgaccgccatcagaacagtac

SEQ ID NO: 46150 - DNA, 25 bp, Saccharomyces pastorianus
agcattacggcagagatcctcgtga

SEQ ID NO: 46151 - DNA, 25 bp, Saccharomyces pastorianus
ggccgacatcatcctgttatcaatg

SEQ ID NO: 46152 - DNA, 25 bp, Saccharomyces pastorianus
agaagaccagacgtggcaccattgc

SEQ ID NO: 46153 - DNA, 25 bp, Saccharomyces pastorianus
acatcagtgagacacggtgcggcct

SEQ ID NO: 46154 - DNA, 25 bp, Saccharomyces pastorianus
tagaaagtgtgctgcctccgtcgac

SEQ ID NO: 46155 - DNA, 25 bp, Saccharomyces pastorianus
cgaagagatctttgaggccgacatc

SEQ ID NO: 46156 - DNA, 25 bp, Saccharomyces pastorianus
agttcctgatggacggtaccacgta

SEQ ID NO: 46157 - DNA, 25 bp, Saccharomyces pastorianus
tgcggcctccgttctaaatttcgaa

SEQ ID NO: 46158 - DNA, 25 bp, Saccharomyces pastorianus
catagctgaaatcgatattactttt

SEQ ID NO: 46159 - DNA, 25 bp, Saccharomyces pastorianus
agccgcttatccatcttggtccata

SEQ ID NO: 46160 - DNA, 25 bp, Saccharomyces pastorianus
cttggtccatagctgaaatcgatat

SEQ ID NO: 46161 - DNA, 25 bp, Saccharomyces pastorianus
tatccatcttggtccatagctgaaa

SEQ ID NO: 46162 - DNA, 25 bp, Saccharomyces pastorianus
ggtccatagctgaaatcgatattac

SEQ ID NO: 46163 - DNA, 25 bp, Saccharomyces pastorianus
gggcctgttaggatacacaaataca

SEQ ID NO: 46164 - DNA, 25 bp, Saccharomyces pastorianus
catcttggtccatagctgaaatcga

SEQ ID NO: 46165 - DNA, 25 bp, Saccharomyces pastorianus
acattgaagccgcttatccatcttg

SEQ ID NO: 46166 - DNA, 25 bp, Saccharomyces pastorianus
cgagggcctgttaggatacacaaat

SEQ ID NO: 46167 - DNA, 25 bp, Saccharomyces pastorianus
cttttgataaaagcgagggcctgtt

SEQ ID NO: 46168 - DNA, 25 bp, Saccharomyces pastorianus
gcttatccatcttggtccatagctg

SEQ ID NO: 46169 - DNA, 25 bp, Saccharomyces pastorianus
ggtattcatccatacctggcaatgg

SEQ ID NO: 46170 - DNA, 25 bp, Saccharomyces pastorianus
tagaagaatgggtcctaaccgtgtt

SEQ ID NO: 46171 - DNA, 25 bp, Saccharomyces pastorianus
cacgctgttgatgcgggtatcctga

SEQ ID NO: 46172 - DNA, 25 bp, Saccharomyces pastorianus
cagtttcttccattcatcatcattt

SEQ ID NO: 46173 - DNA, 25 bp, Saccharomyces pastorianus
gttacggttgtgacggtattcatcc

SEQ ID NO: 46174 - DNA, 25 bp, Saccharomyces pastorianus
agaaggcttgctccgtaatgtcaac

SEQ ID NO: 46175 - DNA, 25 bp, Saccharomyces pastorianus
taaccgtgtttccatttcatctttg

SEQ ID NO: 46176 - DNA, 25 bp, Saccharomyces pastorianus
tcatctttgattgcagtttcttcca

SEQ ID NO: 46177 - DNA, 25 bp, Saccharomyces pastorianus
gatgtccaagatgggtatttccact

SEQ ID NO: 46178 - DNA, 25 bp, Saccharomyces pastorianus
cgttcccaagttgctcttattttag

SEQ ID NO: 46179 - DNA, 25 bp, Saccharomyces pastorianus
actggaaaactacaagcacgctgtt

SEQ ID NO: 46180 - DNA, 25 bp, Saccharomyces pastorianus
cattagaatgttacgtaggtcctca

SEQ ID NO: 46181 - DNA, 25 bp, Saccharomyces pastorianus
tacgtaggtcctcaaggtaatcttt

SEQ ID NO: 46182 - DNA, 25 bp, Saccharomyces pastorianus
gtcctcaaggtaatcttttagaaat

SEQ ID NO: 46183 - DNA, 25 bp, Saccharomyces pastorianus
ctcaatgtgaccgtttattgttaaa

SEQ ID NO: 46184 - DNA, 25 bp, Saccharomyces pastorianus
gttacgtaggtcctcaaggtaatct

SEQ ID NO: 46185 - DNA, 25 bp, Saccharomyces pastorianus
gaatgttacgtaggtcctcaaggta

SEQ ID NO: 46186 - DNA, 25 bp, Saccharomyces pastorianus
tagaatgttacgtaggtcctcaagg

SEQ ID NO: 46187 - DNA, 25 bp, Saccharomyces pastorianus
aatcttttagaaatgcatgcatctc

SEQ ID NO: 46188 - DNA, 25 bp, Saccharomyces pastorianus
caatgtgaccgtttattgttaaagt

SEQ ID NO: 46189 - DNA, 25 bp, Saccharomyces pastorianus
gtcattagaatgttacgtaggtcct

SEQ ID NO: 46190 - DNA, 25 bp, Saccharomyces pastorianus
gtaggtcctcaaggtaatcttttag

SEQ ID NO: 46191 - DNA, 25 bp, Saccharomyces pastorianus
acaccgttatctatggcagcaaagt

SEQ ID NO: 46192 - DNA, 25 bp, Saccharomyces pastorianus
gggagtgtgaactcgttcaacgagt

SEQ ID NO: 46193 - DNA, 25 bp, Saccharomyces pastorianus
agatgggagtgtgaactcgttcaac

SEQ ID NO: 46194 - DNA, 25 bp, Saccharomyces pastorianus
gtatcaacaccgttatctatggcag

SEQ ID NO: 46195 - DNA, 25 bp, Saccharomyces pastorianus
ggcaaatgttaatttttctaatgtt

SEQ ID NO: 46196 - DNA, 25 bp, Saccharomyces pastorianus
tggcgtcgacgggaaagataacaaa

SEQ ID NO: 46197 - DNA, 25 bp, Saccharomyces pastorianus
tcaacaccgttatctatggcagcaa

SEQ ID NO: 46198 - DNA, 25 bp, Saccharomyces pastorianus
gatggagtttgtatcaacaccgtta

SEQ ID NO: 46199 - DNA, 25 bp, Saccharomyces pastorianus
taatgttaataatagtactgctttc

SEQ ID NO: 46200 - DNA, 25 bp, Saccharomyces pastorianus
aatggtaataatggcgtcgacggga

SEQ ID NO: 46201 - DNA, 25 bp, Saccharomyces pastorianus
gagtttgtatcaacaccgttatcta

SEQ ID NO: 46202 - DNA, 25 bp, Saccharomyces pastorianus
tgggtagtacaacaccaacagcact

SEQ ID NO: 46203 - DNA, 25 bp, Saccharomyces pastorianus
aacagcttaaacaaccgcaccaatt

SEQ ID NO: 46204 - DNA, 25 bp, Saccharomyces pastorianus
gtgggtcacccataaatacgccgaa

SEQ ID NO: 46205 - DNA, 25 bp, Saccharomyces pastorianus
caatgctgtgccaaattatcgttat

SEQ ID NO: 46206 - DNA, 25 bp, Saccharomyces pastorianus
taacataaccgggaaccattcttat

SEQ ID NO: 46207 - DNA, 25 bp, Saccharomyces pastorianus
acgctgtggtggtcctaaatctgta

SEQ ID NO: 46208 - DNA, 25 bp, Saccharomyces pastorianus
tcaatgacaccgttgtctcgacaaa

SEQ ID NO: 46209 - DNA, 25 bp, Saccharomyces pastorianus
agaactcaattctcctcaatgacac

SEQ ID NO: 46210 - DNA, 25 bp, Saccharomyces pastorianus
ggaaatgttccacgtgtacctatca

SEQ ID NO: 46211 - DNA, 25 bp, Saccharomyces pastorianus
ccattcttatggtactcccgagtta

SEQ ID NO: 46212 - DNA, 25 bp, Saccharomyces pastorianus
aatacgccgaatagctttgtagcaa

SEQ ID NO: 46213 - DNA, 25 bp, Saccharomyces pastorianus
tttggtggccttctcaggagacgaa

SEQ ID NO: 46214 - DNA, 25 bp, Saccharomyces pastorianus
ctgttttggtttcttaccggcagag

SEQ ID NO: 46215 - DNA, 25 bp, Saccharomyces pastorianus
ccgctttcaagcttgtgtttggtgg

SEQ ID NO: 46216 - DNA, 25 bp, Saccharomyces pastorianus
gaacctagccaaagtagcctgtttt

SEQ ID NO: 46217 - DNA, 25 bp, Saccharomyces pastorianus
ggatgacatgaatagcagcgatctt

SEQ ID NO: 46218 - DNA, 25 bp, Saccharomyces pastorianus
gcgatcttggactcgagagacgtaa

SEQ ID NO: 46219 - DNA, 25 bp, Saccharomyces pastorianus
agacgaagagcctcctggcggctta

SEQ ID NO: 46220 - DNA, 25 bp, Saccharomyces pastorianus
gaatagcagcgatcttggactcgag

SEQ ID NO: 46221 - DNA, 25 bp, Saccharomyces pastorianus
aagcttgtgtttggtggccttctca

SEQ ID NO: 46222 - DNA, 25 bp, Saccharomyces pastorianus
ggcggcttattcttcatggacgtga

SEQ ID NO: 46223 - DNA, 25 bp, Saccharomyces pastorianus
ggacgtgaagaacctagccaaagta

SEQ ID NO: 46224 - DNA, 25 bp, Saccharomyces pastorianus
atgatgttatccaaagaggcaataa

SEQ ID NO: 46225 - DNA, 25 bp, Saccharomyces pastorianus
aaatcgctgatgaagtgatactgat

SEQ ID NO: 46226 - DNA, 25 bp, Saccharomyces pastorianus
aagattctcctgaagcccacgatga

SEQ ID NO: 46227 - DNA, 25 bp, Saccharomyces pastorianus
aagaggcggcgttgcgatcactgca

SEQ ID NO: 46228 - DNA, 25 bp, Saccharomyces pastorianus
gcgatcactgcaatcccacaaagat

SEQ ID NO: 46229 - DNA, 25 bp, Saccharomyces pastorianus
attttcattgaagaggcggcgttgc

SEQ ID NO: 46230 - DNA, 25 bp, Saccharomyces pastorianus
gaaatcttaagccagaacaatggta

SEQ ID NO: 46231 - DNA, 25 bp, Saccharomyces pastorianus
cgaattatcgcatttggatctagag

SEQ ID NO: 46232 - DNA, 25 bp, Saccharomyces pastorianus
tctcctgaagcccacgatgacggtg

SEQ ID NO: 46233 - DNA, 25 bp, Saccharomyces pastorianus
atgacggtgggcctttcgaattatc

SEQ ID NO: 46234 - DNA, 25 bp, Saccharomyces pastorianus
gtgggcctttcgaattatcgcattt

SEQ ID NO: 46235 - DNA, 25 bp, Saccharomyces pastorianus
gcaacagcatccaaagacgataaat

SEQ ID NO: 46236 - DNA, 25 bp, Saccharomyces pastorianus
gaccttatactaaaatatgcaacag

SEQ ID NO: 46237 - DNA, 25 bp, Saccharomyces pastorianus
aagagaagccttagaacgtgctaaa

SEQ ID NO: 46238 - DNA, 25 bp, Saccharomyces pastorianus
gccttagaacgtgctaaactggaaa

SEQ ID NO: 46239 - DNA, 25 bp, Saccharomyces pastorianus
cgataaattcagacactggtgtaaa

SEQ ID NO: 46240 - DNA, 25 bp, Saccharomyces pastorianus
tatgcaacagcatccaaagacgata

SEQ ID NO: 46241 - DNA, 25 bp, Saccharomyces pastorianus
gacactggtgtaaaaagattaaatc

SEQ ID NO: 46242 - DNA, 25 bp, Saccharomyces pastorianus
ttacaccacgaccttatactaaaat

SEQ ID NO: 46243 - DNA, 25 bp, Saccharomyces pastorianus
aagacgataaattcagacactggtg

SEQ ID NO: 46244 - DNA, 25 bp, Saccharomyces pastorianus
agaacgtgctaaactggaaaagaga

SEQ ID NO: 46245 - DNA, 25 bp, Saccharomyces pastorianus
gaagccttagaacgtgctaaactgg

SEQ ID NO: 46246 - DNA, 25 bp, Saccharomyces pastorianus
acacccgatggtatactagatctac

SEQ ID NO: 46247 - DNA, 25 bp, Saccharomyces pastorianus
ccatcaagggagacgtctggtcgtt

SEQ ID NO: 46248 - DNA, 25 bp, Saccharomyces pastorianus
cgggttggaccatctgtatcgacag

SEQ ID NO: 46249 - DNA, 25 bp, Saccharomyces pastorianus
ttcaccgaggttacccaaggatcgc

SEQ ID NO: 46250 - DNA, 25 bp, Saccharomyces pastorianus
tccacttacatgtcgcccgagagga

SEQ ID NO: 46251 - DNA, 25 bp, Saccharomyces pastorianus
tgggcataacgacacacccgatggt

SEQ ID NO: 46252 - DNA, 25 bp, Saccharomyces pastorianus
ccaaggatcgcgttttctccaaaga

SEQ ID NO: 46253 - DNA, 25 bp, Saccharomyces pastorianus
gattgttaatgagccttcaccgagg

SEQ ID NO: 46254 - DNA, 25 bp, Saccharomyces pastorianus
acatttgttgggacatccacttaca

SEQ ID NO: 46255 - DNA, 25 bp, Saccharomyces pastorianus
gatgatcatcgagttggtaaccggg

SEQ ID NO: 46256 - DNA, 25 bp, Saccharomyces pastorianus
aagggaatgtttactccatcaaggg

SEQ ID NO: 46257 - DNA, 25 bp, Saccharomyces pastorianus
gtcagcaatggcgaaatgcaggaaa

SEQ ID NO: 46258 - DNA, 25 bp, Saccharomyces pastorianus
aacaacagtaatttgtacttgcgaa

SEQ ID NO: 46259 - DNA, 25 bp, Saccharomyces pastorianus
gatgtccaatatcaacgcggtacaa

SEQ ID NO: 46260 - DNA, 25 bp, Saccharomyces pastorianus
tatcaacgcggtacaaaacaacagt

SEQ ID NO: 46261 - DNA, 25 bp, Saccharomyces pastorianus
gggcttaatctgaacctacaggcag

SEQ ID NO: 46262 - DNA, 25 bp, Saccharomyces pastorianus
cctacaggcagatttggtcagcaat

SEQ ID NO: 46263 - DNA, 25 bp, Saccharomyces pastorianus
gcagatttggtcagcaatggcgaaa

SEQ ID NO: 46264 - DNA, 25 bp, Saccharomyces pastorianus
accaacgaccctctcgaatagaagg

SEQ ID NO: 46265 - DNA, 25 bp, Saccharomyces pastorianus
taatttgtacttgcgaagaggcata

SEQ ID NO: 46266 - DNA, 25 bp, Saccharomyces pastorianus
aaaagacagaggctcaccaacgacc

SEQ ID NO: 46267 - DNA, 25 bp, Saccharomyces pastorianus
atagaaggccagttgatgtccaata

SEQ ID NO: 46268 - DNA, 25 bp, Saccharomyces pastorianus
gcaacagcatccaaagacgataaat

SEQ ID NO: 46269 - DNA, 25 bp, Saccharomyces pastorianus
gaccttatactaaaatatgcaacag

SEQ ID NO: 46270 - DNA, 25 bp, Saccharomyces pastorianus
aagagaagccttagaacgtgctaaa

SEQ ID NO: 46271 - DNA, 25 bp, Saccharomyces pastorianus
gccttagaacgtgctaaactggaaa

SEQ ID NO: 46272 - DNA, 25 bp, Saccharomyces pastorianus
cgataaattcagacactggtgtaaa

SEQ ID NO: 46273 - DNA, 25 bp, Saccharomyces pastorianus
tatgcaacagcatccaaagacgata

SEQ ID NO: 46274 - DNA, 25 bp, Saccharomyces pastorianus
gacactggtgtaaaaagattaaatc

SEQ ID NO: 46275 - DNA, 25 bp, Saccharomyces pastorianus
ttacaccacgaccttatactaaaat

SEQ ID NO: 46276 - DNA, 25 bp, Saccharomyces pastorianus
aagacgataaattcagacactggtg

SEQ ID NO: 46277 - DNA, 25 bp, Saccharomyces pastorianus
agaacgtgctaaactggaaaagaga

SEQ ID NO: 46278 - DNA, 25 bp, Saccharomyces pastorianus
gaagccttagaacgtgctaaactgg

SEQ ID NO: 46279 - DNA, 25 bp, Saccharomyces pastorianus
ggtactattgttctgttccacagga

SEQ ID NO: 46280 - DNA, 25 bp, Saccharomyces pastorianus
acaggaatggtcttcttggccacga

SEQ ID NO: 46281 - DNA, 25 bp, Saccharomyces pastorianus
ttccacaggaatggtcttcttggcc

SEQ ID NO: 46282 - DNA, 25 bp, Saccharomyces pastorianus
atggataactccctgactaattggt

SEQ ID NO: 46283 - DNA, 25 bp, Saccharomyces pastorianus
ggtcttcttggccacgattttagaa

SEQ ID NO: 46284 - DNA, 25 bp, Saccharomyces pastorianus
actccctgactaattggttgataat

SEQ ID NO: 46285 - DNA, 25 bp, Saccharomyces pastorianus
gaacgtgtaatgctttcactacagt

SEQ ID NO: 46286 - DNA, 25 bp, Saccharomyces pastorianus
gataatggtactattgttctgttcc

SEQ ID NO: 46287 - DNA, 25 bp, Saccharomyces pastorianus
gaatcaggaacgtgtaatgctttca

SEQ ID NO: 46288 - DNA, 25 bp, Saccharomyces pastorianus
aatggtcttcttggccacgatttta

SEQ ID NO: 46289 - DNA, 25 bp, Saccharomyces pastorianus
cttggccacgattttagaatcagga

SEQ ID NO: 46290 - DNA, 25 bp, Saccharomyces pastorianus
ggtaacctcggtgaaggctcattaa

SEQ ID NO: 46291 - DNA, 25 bp, Saccharomyces pastorianus
ccggttaccaactcgatgatcatca

SEQ ID NO: 46292 - DNA, 25 bp, Saccharomyces pastorianus
aacgaaatctgtcagttctttggag

SEQ ID NO: 46293 - DNA, 25 bp, Saccharomyces pastorianus
gttctttggagaaaacgcgatcctt

SEQ ID NO: 46294 - DNA, 25 bp, Saccharomyces pastorianus
gcgatccttgggtaacctcggtgaa

SEQ ID NO: 46295 - DNA, 25 bp, Saccharomyces pastorianus
ggctcattaacaatcctctgtagta

SEQ ID NO: 46296 - DNA, 25 bp, Saccharomyces pastorianus
tctccctttcgttcttgatacaaca

SEQ ID NO: 46297 - DNA, 25 bp, Saccharomyces pastorianus
ttcattaatcgacgatctctccctt

SEQ ID NO: 46298 - DNA, 25 bp, Saccharomyces pastorianus
gtagatctagtataccatcgggtgt

SEQ ID NO: 46299 - DNA, 25 bp, Saccharomyces pastorianus
ataccatcgggtgtgtcgttatgcc

SEQ ID NO: 46300 - DNA, 25 bp, Saccharomyces pastorianus
aaggtcgtggtgtaacaattcatta

SEQ ID NO: 46301 - DNA, 25 bp, Saccharomyces pastorianus
tcacattgtctcttttccagtttag

SEQ ID NO: 46302 - DNA, 25 bp, Saccharomyces pastorianus
ttccagtttagcacgttctaaggct

SEQ ID NO: 46303 - DNA, 25 bp, Saccharomyces pastorianus
atgtgcttgtatttggagtgttcaa

SEQ ID NO: 46304 - DNA, 25 bp, Saccharomyces pastorianus
cttttccagtttagcacgttctaag

SEQ ID NO: 46305 - DNA, 25 bp, Saccharomyces pastorianus
tttcacattgtctcttttccagttt

SEQ ID NO: 46306 - DNA, 25 bp, Saccharomyces pastorianus
gtttagcacgttctaaggcttctct

SEQ ID NO: 46307 - DNA, 25 bp, Saccharomyces pastorianus
agcacgttctaaggcttctcttttt

SEQ ID NO: 46308 - DNA, 25 bp, Saccharomyces pastorianus
aacctgatatgtttctatgtgcttg

SEQ ID NO: 46309 - DNA, 25 bp, Saccharomyces pastorianus
gatttttcacattgtctcttttcca

SEQ ID NO: 46310 - DNA, 25 bp, Saccharomyces pastorianus
gttcaaatttgttgatttttcacat

SEQ ID NO: 46311 - DNA, 25 bp, Saccharomyces pastorianus
atgtttctatgtgcttgtatttgga

SEQ ID NO: 46312 - DNA, 25 bp, Saccharomyces pastorianus
gcctttgggctcgtccgaggtaccg

SEQ ID NO: 46313 - DNA, 25 bp, Saccharomyces pastorianus
ttgatagcctttgggctcgtccgag

SEQ ID NO: 46314 - DNA, 25 bp, Saccharomyces pastorianus
gttattgatagcctttgggctcgtc

SEQ ID NO: 46315 - DNA, 25 bp, Saccharomyces pastorianus
tgggttattgatagcctttgggctc

SEQ ID NO: 46316 - DNA, 25 bp, Saccharomyces pastorianus
attgatagcctttgggctcgtccga

SEQ ID NO: 46317 - DNA, 25 bp, Saccharomyces pastorianus
tagcctttgggctcgtccgaggtac

SEQ ID NO: 46318 - DNA, 25 bp, Saccharomyces pastorianus
ctttggtgggttattgatagccttt

SEQ ID NO: 46319 - DNA, 25 bp, Saccharomyces pastorianus
gctcgtccgaggtaccgaaggttgg

SEQ ID NO: 46320 - DNA, 25 bp, Saccharomyces pastorianus
gtgggttattgatagcctttgggct

SEQ ID NO: 46321 - DNA, 25 bp, Saccharomyces pastorianus
acgtagctttggtgggttattgata

SEQ ID NO: 46322 - DNA, 25 bp, Saccharomyces pastorianus
ttattgatagcctttgggctcgtcc

SEQ ID NO: 46323 - DNA, 25 bp, Saccharomyces pastorianus
tgcagaactggatcgccggtgggaa

SEQ ID NO: 46324 - DNA, 25 bp, Saccharomyces pastorianus
tgggaactccagtggcaagatcttc

SEQ ID NO: 46325 - DNA, 25 bp, Saccharomyces pastorianus
tccagtggcaagatcttcctcttct

SEQ ID NO: 46326 - DNA, 25 bp, Saccharomyces pastorianus
ggtgggaactccagtggcaagatct

SEQ ID NO: 46327 - DNA, 25 bp, Saccharomyces pastorianus
tcgccggtgggaactccagtggcaa

SEQ ID NO: 46328 - DNA, 25 bp, Saccharomyces pastorianus
actggatcgccggtgggaactccag

SEQ ID NO: 46329 - DNA, 25 bp, Saccharomyces pastorianus
cagtggcaagatcttcctcttctcc

SEQ ID NO: 46330 - DNA, 25 bp, Saccharomyces pastorianus
actccagtggcaagatcttcctctt

SEQ ID NO: 46331 - DNA, 25 bp, Saccharomyces pastorianus
atcgccggtgggaactccagtggca

SEQ ID NO: 46332 - DNA, 25 bp, Saccharomyces pastorianus
gaactccagtggcaagatcttcctc

SEQ ID NO: 46333 - DNA, 25 bp, Saccharomyces pastorianus
acaccactgtcctgcgtggtcagtt

SEQ ID NO: 46334 - DNA, 25 bp, Saccharomyces pastorianus
agagcagtgatagcctcgtcacaga

SEQ ID NO: 46335 - DNA, 25 bp, Saccharomyces pastorianus
acgatgacactgtccgtctgttcga

SEQ ID NO: 46336 - DNA, 25 bp, Saccharomyces pastorianus
cgacatttacaacagcgacggccaa

SEQ ID NO: 46337 - DNA, 25 bp, Saccharomyces pastorianus
gtttagttacgagaacccgcatgtt

SEQ ID NO: 46338 - DNA, 25 bp, Saccharomyces pastorianus
gtctatggccataaacccgctaagg

SEQ ID NO: 46339 - DNA, 25 bp, Saccharomyces pastorianus
gttaagcgtctctgcggtgtcgtac

SEQ ID NO: 46340 - DNA, 25 bp, Saccharomyces pastorianus
gaatttaccacttttgacacgagag

SEQ ID NO: 46341 - DNA, 25 bp, Saccharomyces pastorianus
acaagaatgtgttcgccatcgccaa

SEQ ID NO: 46342 - DNA, 25 bp, Saccharomyces pastorianus
gaccctggtatgcaacggctacgat

SEQ ID NO: 46343 - DNA, 25 bp, Saccharomyces pastorianus
tgttttgttccttactacactgggt

SEQ ID NO: 46344 - DNA, 25 bp, Saccharomyces pastorianus
gggtctctcgacagaacactcaaga

SEQ ID NO: 46345 - DNA, 25 bp, Saccharomyces pastorianus
aggccagaagccagagctgttcaga

SEQ ID NO: 46346 - DNA, 25 bp, Saccharomyces pastorianus
atgtcaatggaggtcgtacgtcaaa

SEQ ID NO: 46347 - DNA, 25 bp, Saccharomyces pastorianus
ggaagcagtttcaaccaggccagaa

SEQ ID NO: 46348 - DNA, 25 bp, Saccharomyces pastorianus
gccccaaccagaatatatctctcaa

SEQ ID NO: 46349 - DNA, 25 bp, Saccharomyces pastorianus
ggacacattccctcgttatgatgga

SEQ ID NO: 46350 - DNA, 25 bp, Saccharomyces pastorianus
gtttaatgtgaaagacctcgccagc

SEQ ID NO: 46351 - DNA, 25 bp, Saccharomyces pastorianus
taggtaagcatgcactaggccccaa

SEQ ID NO: 46352 - DNA, 25 bp, Saccharomyces pastorianus
atttgccacggaagatcacggcgat

SEQ ID NO: 46353 - DNA, 25 bp, Saccharomyces pastorianus
ggtgattctgcccttaacaataagt

SEQ ID NO: 46354 - DNA, 25 bp, Saccharomyces pastorianus
tcttttctagattcggacacattcc

SEQ ID NO: 46355 - DNA, 25 bp, Saccharomyces pastorianus
aaagacctcgccagcaaagatgcag

SEQ ID NO: 46356 - DNA, 25 bp, Saccharomyces pastorianus
gattattctgaattgcctacaagtc

SEQ ID NO: 46357 - DNA, 25 bp, Saccharomyces pastorianus
atttgatcgctctttacaacagtga

SEQ ID NO: 46358 - DNA, 25 bp, Saccharomyces pastorianus
gtgctattccaccaacataacaggg

SEQ ID NO: 46359 - DNA, 25 bp, Saccharomyces pastorianus
gatattttggacctttctttgccga

SEQ ID NO: 46360 - DNA, 25 bp, Saccharomyces pastorianus
gctatgaccgcaaacgttgttgaag

SEQ ID NO: 46361 - DNA, 25 bp, Saccharomyces pastorianus
ataggcactttactctttgtcgttt

SEQ ID NO: 46362 - DNA, 25 bp, Saccharomyces pastorianus
tttgccgataccactatttaggacc

SEQ ID NO: 46363 - DNA, 25 bp, Saccharomyces pastorianus
gttttcatttccacatacatgggac

SEQ ID NO: 46364 - DNA, 25 bp, Saccharomyces pastorianus
acgatgaacttcaaactctgccctg

SEQ ID NO: 46365 - DNA, 25 bp, Saccharomyces pastorianus
gtaccttttaaatatatccgacgat

SEQ ID NO: 46366 - DNA, 25 bp, Saccharomyces pastorianus
gaattgacgcgcatgatgtggctaa

SEQ ID NO: 46367 - DNA, 25 bp, Saccharomyces pastorianus
tcaacggcctttgtttttcagacac

SEQ ID NO: 46368 - DNA, 25 bp, Saccharomyces pastorianus
ctaaaaagagcaatactgtggagga

SEQ ID NO: 46369 - DNA, 25 bp, Saccharomyces pastorianus
aagagcaatactgtggaggaagatc

SEQ ID NO: 46370 - DNA, 25 bp, Saccharomyces pastorianus
tactgtggaggaagatcaacggcct

SEQ ID NO: 46371 - DNA, 25 bp, Saccharomyces pastorianus
agatcaacggcctttgtttttcaga

SEQ ID NO: 46372 - DNA, 25 bp, Saccharomyces pastorianus
aatactgtggaggaagatcaacggc

SEQ ID NO: 46373 - DNA, 25 bp, Saccharomyces pastorianus
agcaatactgtggaggaagatcaac

SEQ ID NO: 46374 - DNA, 25 bp, Saccharomyces pastorianus
ggaggaagatcaacggcctttgttt

SEQ ID NO: 46375 - DNA, 25 bp, Saccharomyces pastorianus
ctgtggaggaagatcaacggccttt

SEQ ID NO: 46376 - DNA, 25 bp, Saccharomyces pastorianus
gaggaagatcaacggcctttgtttt

SEQ ID NO: 46377 - DNA, 25 bp, Saccharomyces pastorianus
tggaggaagatcaacggcctttgtt

SEQ ID NO: 46378 - DNA, 25 bp, Saccharomyces pastorianus
aaacgatttgcgtgttcctgaatca

SEQ ID NO: 46379 - DNA, 25 bp, Saccharomyces pastorianus
gcaatttccctatacctgacttaga

SEQ ID NO: 46380 - DNA, 25 bp, Saccharomyces pastorianus
aacacttttctatcgcgaatatttg

SEQ ID NO: 46381 - DNA, 25 bp, Saccharomyces pastorianus
gagagataaataccagcagcccaac

SEQ ID NO: 46382 - DNA, 25 bp, Saccharomyces pastorianus
ttttgcattcatctggtagtagtca

SEQ ID NO: 46383 - DNA, 25 bp, Saccharomyces pastorianus
tttggtttacaatcagacgaagtca

SEQ ID NO: 46384 - DNA, 25 bp, Saccharomyces pastorianus
gagaggttcttctcttttgcattca

SEQ ID NO: 46385 - DNA, 25 bp, Saccharomyces pastorianus
gtcaagagatgagcaatttccctat

SEQ ID NO: 46386 - DNA, 25 bp, Saccharomyces pastorianus
tcaatccttctctcggcagtcaaga

SEQ ID NO: 46387 - DNA, 25 bp, Saccharomyces pastorianus
caactctcatgggaaaaacactttt

SEQ ID NO: 46388 - DNA, 25 bp, Saccharomyces pastorianus
tgaatcagatcaaggctccagcaca

SEQ ID NO: 46389 - DNA, 25 bp, Saccharomyces pastorianus
tagctttacaaaaccacaggcccat

SEQ ID NO: 46390 - DNA, 25 bp, Saccharomyces pastorianus
gatgtaacaatctctactatgtgga

SEQ ID NO: 46391 - DNA, 25 bp, Saccharomyces pastorianus
tatgctttgagatatcctggttttg

SEQ ID NO: 46392 - DNA, 25 bp, Saccharomyces pastorianus
gtaaacctgaaaacctgcttattat

SEQ ID NO: 46393 - DNA, 25 bp, Saccharomyces pastorianus
tacctacacacgcacctaaatatga

SEQ ID NO: 46394 - DNA, 25 bp, Saccharomyces pastorianus
aagatggctcatatcgtcaatacga

SEQ ID NO: 46395 - DNA, 25 bp, Saccharomyces pastorianus
gatctagtgtagttccattgcatag

SEQ ID NO: 46396 - DNA, 25 bp, Saccharomyces pastorianus
aagaattgcccgcttttcaagaaat

SEQ ID NO: 46397 - DNA, 25 bp, Saccharomyces pastorianus
aacatatcccactagctttacaaaa

SEQ ID NO: 46398 - DNA, 25 bp, Saccharomyces pastorianus
gaaatcttatgaccctgatagaacg

SEQ ID NO: 46399 - DNA, 25 bp, Saccharomyces pastorianus
gaaaagctgcaatcagtaaacctga

SEQ ID NO: 46400 - DNA, 25 bp, Saccharomyces pastorianus
gaaactgggacaattcactgccgtt

SEQ ID NO: 46401 - DNA, 25 bp, Saccharomyces pastorianus
cactgccgttttactgagacatatt

SEQ ID NO: 46402 - DNA, 25 bp, Saccharomyces pastorianus
aaaaaacatctccatttcttgccct

SEQ ID NO: 46403 - DNA, 25 bp, Saccharomyces pastorianus
tgaaacacatgatgcactgctggaa

SEQ ID NO: 46404 - DNA, 25 bp, Saccharomyces pastorianus
gctgaccaccctaagatcatcaaaa

SEQ ID NO: 46405 - DNA, 25 bp, Saccharomyces pastorianus
agttgaatttggctgaccaccctaa

SEQ ID NO: 46406 - DNA, 25 bp, Saccharomyces pastorianus
gaattgatgactacacagcccaaga

SEQ ID NO: 46407 - DNA, 25 bp, Saccharomyces pastorianus
aatggaacccaagactgatctagac

SEQ ID NO: 46408 - DNA, 25 bp, Saccharomyces pastorianus
gaaattgccaactccgacgatgata

SEQ ID NO: 46409 - DNA, 25 bp, Saccharomyces pastorianus
ggaccaagatgatgactttacccaa

SEQ ID NO: 46410 - DNA, 25 bp, Saccharomyces pastorianus
tgcaactggataggagagccgcccc

SEQ ID NO: 46411 - DNA, 25 bp, Saccharomyces pastorianus
actggctgcatatttcacaaaggct

SEQ ID NO: 46412 - DNA, 25 bp, Saccharomyces pastorianus
gtactgtgcgcatgcttgaactggc

SEQ ID NO: 46413 - DNA, 25 bp, Saccharomyces pastorianus
tgaagacacaccttccgtttcagat

SEQ ID NO: 46414 - DNA, 25 bp, Saccharomyces pastorianus
aaaggctaagttgtccccaatccat

SEQ ID NO: 46415 - DNA, 25 bp, Saccharomyces pastorianus
gtaccaacgcactgcaagtggcgat

SEQ ID NO: 46416 - DNA, 25 bp, Saccharomyces pastorianus
tagagaagcaatttaccgtatcacg

SEQ ID NO: 46417 - DNA, 25 bp, Saccharomyces pastorianus
gaaaaactggctcgcaaggtgctag

SEQ ID NO: 46418 - DNA, 25 bp, Saccharomyces pastorianus
gccaagttcgatatctgtgcagcta

SEQ ID NO: 46419 - DNA, 25 bp, Saccharomyces pastorianus
acaagcctcgtattttgcgggtgaa

SEQ ID NO: 46420 - DNA, 25 bp, Saccharomyces pastorianus
ccatcgagttggagcgtcgttcatt

SEQ ID NO: 46421 - DNA, 25 bp, Saccharomyces pastorianus
tgactttgatccttacgccaagttc

SEQ ID NO: 46422 - DNA, 25 bp, Saccharomyces pastorianus
gaaattcatcttggaaggtcacaca

SEQ ID NO: 46423 - DNA, 25 bp, Saccharomyces pastorianus
catcccactgatgatctgatcgttt

SEQ ID NO: 46424 - DNA, 25 bp, Saccharomyces pastorianus
tctcttggcgactgtgtggtgaaat

SEQ ID NO: 46425 - DNA, 25 bp, Saccharomyces pastorianus
gaatttgggatatctcaggcttaag

SEQ ID NO: 46426 - DNA, 25 bp, Saccharomyces pastorianus
ctgctcctagcaacaattctttcga

SEQ ID NO: 46427 - DNA, 25 bp, Saccharomyces pastorianus
tttttcacccacaccaaaatctgat

SEQ ID NO: 46428 - DNA, 25 bp, Saccharomyces pastorianus
ggaaatcgcttgtttgactggtcac

SEQ ID NO: 46429 - DNA, 25 bp, Saccharomyces pastorianus
taggttttggttaatcgcagcccac

SEQ ID NO: 46430 - DNA, 25 bp, Saccharomyces pastorianus
aaggcttgggaagtcgacacttgca

SEQ ID NO: 46431 - DNA, 25 bp, Saccharomyces pastorianus
cttttggacggttctcttggcgact

SEQ ID NO: 46432 - DNA, 25 bp, Saccharomyces pastorianus
gaaagagacattctgctcctagcaa

SEQ ID NO: 46433 - DNA, 25 bp, Saccharomyces pastorianus
agaagttgggtgacgtaagaccgct

SEQ ID NO: 46434 - DNA, 25 bp, Saccharomyces pastorianus
gactctattatcaaggatttccacg

SEQ ID NO: 46435 - DNA, 25 bp, Saccharomyces pastorianus
gagttaggcactccaattttgaaac

SEQ ID NO: 46436 - DNA, 25 bp, Saccharomyces pastorianus
gacactcaagttaaggaggtcactg

SEQ ID NO: 46437 - DNA, 25 bp, Saccharomyces pastorianus
ggcactccaattttgaaaccaataa

SEQ ID NO: 46438 - DNA, 25 bp, Saccharomyces pastorianus
aggaggtcactgttaagatcaagaa

SEQ ID NO: 46439 - DNA, 25 bp, Saccharomyces pastorianus
cacttcgccaacaggttgactggtt

SEQ ID NO: 46440 - DNA, 25 bp, Saccharomyces pastorianus
ggttgactggttggaatgctattaa

SEQ ID NO: 46441 - DNA, 25 bp, Saccharomyces pastorianus
cgtaagaccgctaaatatcgatgat

SEQ ID NO: 46442 - DNA, 25 bp, Saccharomyces pastorianus
agatttaggaaattccaatgggcat

SEQ ID NO: 46443 - DNA, 25 bp, Saccharomyces pastorianus
ggatttccacgctgagttaggcact

SEQ ID NO: 46444 - DNA, 25 bp, Saccharomyces pastorianus
atttcctttgctgctttcatcctag

SEQ ID NO: 46445 - DNA, 25 bp, Saccharomyces pastorianus
ctgactctattatttcctttgctgc

SEQ ID NO: 46446 - DNA, 25 bp, Saccharomyces pastorianus
ctttcatcctagctgatgctggttt

SEQ ID NO: 46447 - DNA, 25 bp, Saccharomyces pastorianus
attatttcctttgctgctttcatcc

SEQ ID NO: 46448 - DNA, 25 bp, Saccharomyces pastorianus
tctattatttcctttgctgctttca

SEQ ID NO: 46449 - DNA, 25 bp, Saccharomyces pastorianus
gatgctggtttggaaatcacctctg

SEQ ID NO: 46450 - DNA, 25 bp, Saccharomyces pastorianus
tggtttggaaatcacctctgacaac

SEQ ID NO: 46451 - DNA, 25 bp, Saccharomyces pastorianus
ctttgctgctttcatcctagctgat

SEQ ID NO: 46452 - DNA, 25 bp, Saccharomyces pastorianus
gactctattatttcctttgctgctt

SEQ ID NO: 46453 - DNA, 25 bp, Saccharomyces pastorianus
gctgctttcatcctagctgatgctg

SEQ ID NO: 46454 - DNA, 25 bp, Saccharomyces pastorianus
atcctagctgatgctggtttggaaa

SEQ ID NO: 46455 - DNA, 25 bp, Saccharomyces pastorianus
ttgcgatggccttcttttattatcc

SEQ ID NO: 46456 - DNA, 25 bp, Saccharomyces pastorianus
attttgattgcgatggccttctttt

SEQ ID NO: 46457 - DNA, 25 bp, Saccharomyces pastorianus
atggccttcttttattatccagatg

SEQ ID NO: 46458 - DNA, 25 bp, Saccharomyces pastorianus
ttttgattgcgatggccttctttta

SEQ ID NO: 46459 - DNA, 25 bp, Saccharomyces pastorianus
gccttcttttattatccagatgaaa

SEQ ID NO: 46460 - DNA, 25 bp, Saccharomyces pastorianus
tatattttgattgcgatggccttct

SEQ ID NO: 46461 - DNA, 25 bp, Saccharomyces pastorianus
tattttgattgcgatggccttcttt

SEQ ID NO: 46462 - DNA, 25 bp, Saccharomyces pastorianus
gattgcgatggccttcttttattat

SEQ ID NO: 46463 - DNA, 25 bp, Saccharomyces pastorianus
ggccttcttttattatccagatgaa

SEQ ID NO: 46464 - DNA, 25 bp, Saccharomyces pastorianus
gtatattttgattgcgatggccttc

SEQ ID NO: 46465 - DNA, 25 bp, Saccharomyces pastorianus
ccttcttttattatccagatgaaaa

SEQ ID NO: 46466 - DNA, 25 bp, Saccharomyces pastorianus
gcactgggtgttgccattggttcct

SEQ ID NO: 46467 - DNA, 25 bp, Saccharomyces pastorianus
gggtgttgccattggttcctctcta

SEQ ID NO: 46468 - DNA, 25 bp, Saccharomyces pastorianus
cattggttcctctctacaaattgct

SEQ ID NO: 46469 - DNA, 25 bp, Saccharomyces pastorianus
ttgtcggctggatgattgacgttcc

SEQ ID NO: 46470 - DNA, 25 bp, Saccharomyces pastorianus
cgttacaccatttatggttcttgtc

SEQ ID NO: 46471 - DNA, 25 bp, Saccharomyces pastorianus
gctctattcgttacaccatttatgg

SEQ ID NO: 46472 - DNA, 25 bp, Saccharomyces pastorianus
acaaattgctctattcgttacacca

SEQ ID NO: 46473 - DNA, 25 bp, Saccharomyces pastorianus
gacgttccaatgacgctgaattttt

SEQ ID NO: 46474 - DNA, 25 bp, Saccharomyces pastorianus
tatggttcttgtcggctggatgatt

SEQ ID NO: 46475 - DNA, 25 bp, Saccharomyces pastorianus
gatgattgacgttccaatgacgctg

SEQ ID NO: 46476 - DNA, 25 bp, Saccharomyces pastorianus
caagatggatttggcactgggtgtt

SEQ ID NO: 46477 - DNA, 25 bp, Saccharomyces pastorianus
ggtctccttctacttcgagaggtta

SEQ ID NO: 46478 - DNA, 25 bp, Saccharomyces pastorianus
ataataacaaattctctccgcgacc

SEQ ID NO: 46479 - DNA, 25 bp, Saccharomyces pastorianus
ggccacttcagtgtacttggtcaaa

SEQ ID NO: 46480 - DNA, 25 bp, Saccharomyces pastorianus
agagatcttctcttactcattcgcg

SEQ ID NO: 46481 - DNA, 25 bp, Saccharomyces pastorianus
tacatgtctttcaccgttcttacaa

SEQ ID NO: 46482 - DNA, 25 bp, Saccharomyces pastorianus
acaacgcttatccaattccttttct

SEQ ID NO: 46483 - DNA, 25 bp, Saccharomyces pastorianus
gtcggattcatccaactacagtaat

SEQ ID NO: 46484 - DNA, 25 bp, Saccharomyces pastorianus
gcgacctttcgatgcagacttcaag

SEQ ID NO: 46485 - DNA, 25 bp, Saccharomyces pastorianus
ttgggctgaatataccgacggtctc

SEQ ID NO: 46486 - DNA, 25 bp, Saccharomyces pastorianus
atgattcatcccctcttaataagca

SEQ ID NO: 46487 - DNA, 25 bp, Saccharomyces pastorianus
tttgccggagtttaacgagcccaat

SEQ ID NO: 46488 - DNA, 25 bp, Saccharomyces pastorianus
gcgactttgagaagttgggtaaact

SEQ ID NO: 46489 - DNA, 25 bp, Saccharomyces pastorianus
aaacaacggtaagatcgcgcatcag

SEQ ID NO: 46490 - DNA, 25 bp, Saccharomyces pastorianus
gtgcatttccacttgattcctaaga

SEQ ID NO: 46491 - DNA, 25 bp, Saccharomyces pastorianus
ggccatgaagttggacacctataac

SEQ ID NO: 46492 - DNA, 25 bp, Saccharomyces pastorianus
ggaccatgtgcatttccacttgatt

SEQ ID NO: 46493 - DNA, 25 bp, Saccharomyces pastorianus
gttgatcgtcggctggccagctcaa

SEQ ID NO: 46494 - DNA, 25 bp, Saccharomyces pastorianus
ctaagagagacgagaagaccgggtt

SEQ ID NO: 46495 - DNA, 25 bp, Saccharomyces pastorianus
tcgcgcatcaggaagtggaccatgt

SEQ ID NO: 46496 - DNA, 25 bp, Saccharomyces pastorianus
ggccagctcaagaaagcgactttga

SEQ ID NO: 46497 - DNA, 25 bp, Saccharomyces pastorianus
tggacacctataacatcttgcaaaa

SEQ ID NO: 46498 - DNA, 25 bp, Saccharomyces pastorianus
tcggctggccagctcaagaaagcga

SEQ ID NO: 46499 - DNA, 25 bp, Saccharomyces pastorianus
aatgtaacagcagatgtaagcccac

SEQ ID NO: 46500 - DNA, 25 bp, Saccharomyces pastorianus
agagtacccctccatagttgtaaag

SEQ ID NO: 46501 - DNA, 25 bp, Saccharomyces pastorianus
gggttatctatgtcttttaaagtct

SEQ ID NO: 46502 - DNA, 25 bp, Saccharomyces pastorianus
cttccatagcgttgactttttgtct

SEQ ID NO: 46503 - DNA, 25 bp, Saccharomyces pastorianus
gactttttgtcttgttggattctag

SEQ ID NO: 46504 - DNA, 25 bp, Saccharomyces pastorianus
aagatctaatggctgtaatgtaaca

SEQ ID NO: 46505 - DNA, 25 bp, Saccharomyces pastorianus
gtcttttaaagtcttccatagcgtt

SEQ ID NO: 46506 - DNA, 25 bp, Saccharomyces pastorianus
taagcccaccaaaaaagcctccaat

SEQ ID NO: 46507 - DNA, 25 bp, Saccharomyces pastorianus
ataacgcactacctattgatgttcg

SEQ ID NO: 46508 - DNA, 25 bp, Saccharomyces pastorianus
tgctgaaggtagagtacccctccat

SEQ ID NO: 46509 - DNA, 25 bp, Saccharomyces pastorianus
gtcttgttggattctagtctttaaa

SEQ ID NO: 46510 - DNA, 25 bp, Saccharomyces pastorianus
tttaagctggccttacaaacgcctc

SEQ ID NO: 46511 - DNA, 25 bp, Saccharomyces pastorianus
ggaactaacacctgcaaggctgaca

SEQ ID NO: 46512 - DNA, 25 bp, Saccharomyces pastorianus
gacattgtaccttcagagctggcgt

SEQ ID NO: 46513 - DNA, 25 bp, Saccharomyces pastorianus
aattgatattgcttctgttctaggg

SEQ ID NO: 46514 - DNA, 25 bp, Saccharomyces pastorianus
acgctccttattatgttaacctggt

SEQ ID NO: 46515 - DNA, 25 bp, Saccharomyces pastorianus
gctggcgttcgcaattatttctgca

SEQ ID NO: 46516 - DNA, 25 bp, Saccharomyces pastorianus
aataggcgcttatagagtcattcat

SEQ ID NO: 46517 - DNA, 25 bp, Saccharomyces pastorianus
aaggcgcgatgattggtttgcataa

SEQ ID NO: 46518 - DNA, 25 bp, Saccharomyces pastorianus
atcatggcaacgtggatattctcat

SEQ ID NO: 46519 - DNA, 25 bp, Saccharomyces pastorianus
taagcggaatggaccacgtaacgtc

SEQ ID NO: 46520 - DNA, 25 bp, Saccharomyces pastorianus
agtcattcatacatttgctccagat

SEQ ID NO: 46521 - DNA, 25 bp, Saccharomyces pastorianus
ggacaagactagtaaaggcaccgac

SEQ ID NO: 46522 - DNA, 25 bp, Saccharomyces pastorianus
gtctcgatgcggacgacagcgacga

SEQ ID NO: 46523 - DNA, 25 bp, Saccharomyces pastorianus
gacgacttagagaacatcgactcgg

SEQ ID NO: 46524 - DNA, 25 bp, Saccharomyces pastorianus
gtacattgccaagctggagggcgat

SEQ ID NO: 46525 - DNA, 25 bp, Saccharomyces pastorianus
gtatcaatcacttgcagaggtccag

SEQ ID NO: 46526 - DNA, 25 bp, Saccharomyces pastorianus
ggcgctatacaaggactccgtcaga

SEQ ID NO: 46527 - DNA, 25 bp, Saccharomyces pastorianus
aaggcaccgacgtcgacatggacaa

SEQ ID NO: 46528 - DNA, 25 bp, Saccharomyces pastorianus
caaaacggcgataagcggtatgtcc

SEQ ID NO: 46529 - DNA, 25 bp, Saccharomyces pastorianus
acgcgttggagcaagaaaccgtgta

SEQ ID NO: 46530 - DNA, 25 bp, Saccharomyces pastorianus
gtccagtgctcgcttgggtaagtac

SEQ ID NO: 46531 - DNA, 25 bp, Saccharomyces pastorianus
aacgacatcgtgcttaacaactaca

SEQ ID NO: 46532 - DNA, 25 bp, Saccharomyces pastorianus
gcagcagcagagtttcccgaaggaa

SEQ ID NO: 46533 - DNA, 25 bp, Saccharomyces pastorianus
acttccaaggagacggtgcagacat

SEQ ID NO: 46534 - DNA, 25 bp, Saccharomyces pastorianus
taagcttttctcgtggctgaccggg

SEQ ID NO: 46535 - DNA, 25 bp, Saccharomyces pastorianus
ggaacctcagctcagggcaatgaaa

SEQ ID NO: 46536 - DNA, 25 bp, Saccharomyces pastorianus
gtgtcactaaaaccggatgcccata

SEQ ID NO: 46537 - DNA, 25 bp, Saccharomyces pastorianus
atccatgaagtctgcagtactgcca

SEQ ID NO: 46538 - DNA, 25 bp, Saccharomyces pastorianus
gacaccgagtatcttttgaaccctg

SEQ ID NO: 46539 - DNA, 25 bp, Saccharomyces pastorianus
gtgcagacatcttgtcagcgccaga

SEQ ID NO: 46540 - DNA, 25 bp, Saccharomyces pastorianus
gaacacttccgtcattaaatccatg

SEQ ID NO: 46541 - DNA, 25 bp, Saccharomyces pastorianus
acggaaaaggatctaccagcccctg

SEQ ID NO: 46542 - DNA, 25 bp, Saccharomyces pastorianus
caacgcctacggatggtcggtggta

SEQ ID NO: 46543 - DNA, 25 bp, Saccharomyces pastorianus
catctccaagataattggcctggat

SEQ ID NO: 46544 - DNA, 25 bp, Saccharomyces pastorianus
gaaactgtcccagatgatactggat

SEQ ID NO: 46545 - DNA, 25 bp, Saccharomyces pastorianus
tggctttacgtttacgagactccaa

SEQ ID NO: 46546 - DNA, 25 bp, Saccharomyces pastorianus
ttggcctggatactcaacaggttga

SEQ ID NO: 46547 - DNA, 25 bp, Saccharomyces pastorianus
atgactccgcattagaattagtagg

SEQ ID NO: 46548 - DNA, 25 bp, Saccharomyces pastorianus
tgcattatacgacactttactggaa

SEQ ID NO: 46549 - DNA, 25 bp, Saccharomyces pastorianus
gagactccaaatcaagacgctactt

SEQ ID NO: 46550 - DNA, 25 bp, Saccharomyces pastorianus
ctggatcaaggcaatggatggcttt

SEQ ID NO: 46551 - DNA, 25 bp, Saccharomyces pastorianus
gcaatggatggctttacgtttacga

SEQ ID NO: 46552 - DNA, 25 bp, Saccharomyces pastorianus
tacgacactttactggaatccaatt

SEQ ID NO: 46553 - DNA, 25 bp, Saccharomyces pastorianus
aagacgctacttatgactccgcatt

SEQ ID NO: 46554 - DNA, 25 bp, Saccharomyces pastorianus
ctccctggacgatcaaatctttgtt

SEQ ID NO: 46555 - DNA, 25 bp, Saccharomyces pastorianus
taaagcactctctatccgtcaaatt

SEQ ID NO: 46556 - DNA, 25 bp, Saccharomyces pastorianus
attgacgccatgaaagctgttgccg

SEQ ID NO: 46557 - DNA, 25 bp, Saccharomyces pastorianus
aggagacttaccagtcccgaggtat

SEQ ID NO: 46558 - DNA, 25 bp, Saccharomyces pastorianus
tggccaagtccaaggcttctttgac

SEQ ID NO: 46559 - DNA, 25 bp, Saccharomyces pastorianus
tactgtcccactcaaactgtagcgg

SEQ ID NO: 46560 - DNA, 25 bp, Saccharomyces pastorianus
aaaccctccttggtggatgtgcatc

SEQ ID NO: 46561 - DNA, 25 bp, Saccharomyces pastorianus
gaaactggacgacaaaccctccttg

SEQ ID NO: 46562 - DNA, 25 bp, Saccharomyces pastorianus
atttgactacccacaattcttatga

SEQ ID NO: 46563 - DNA, 25 bp, Saccharomyces pastorianus
caaggcttctttgactgcagcaaga

SEQ ID NO: 46564 - DNA, 25 bp, Saccharomyces pastorianus
aagaaccgcagctaactctatctac

SEQ ID NO: 46565 - DNA, 25 bp, Saccharomyces pastorianus
gtattgcgaggcaaaaccgccaaaa

SEQ ID NO: 46566 - DNA, 25 bp, Saccharomyces pastorianus
aatcgctgtaaagatggccagacac

SEQ ID NO: 46567 - DNA, 25 bp, Saccharomyces pastorianus
aagccagaccatgcagcctgacaat

SEQ ID NO: 46568 - DNA, 25 bp, Saccharomyces pastorianus
aatttctccttcacggtaaccatgg

SEQ ID NO: 46569 - DNA, 25 bp, Saccharomyces pastorianus
accgccaaaatgcacttcatcaaac

SEQ ID NO: 46570 - DNA, 25 bp, Saccharomyces pastorianus
ccatgcagcctgacaatcgctgtaa

SEQ ID NO: 46571 - DNA, 25 bp, Saccharomyces pastorianus
acactgtctggccaagccagaccat

SEQ ID NO: 46572 - DNA, 25 bp, Saccharomyces pastorianus
gatggccagacacgccacgatcaat

SEQ ID NO: 46573 - DNA, 25 bp, Saccharomyces pastorianus
cacggtaaccatggaccgcaacgag

SEQ ID NO: 46574 - DNA, 25 bp, Saccharomyces pastorianus
acgatcaatttctccttcacggtaa

SEQ ID NO: 46575 - DNA, 25 bp, Saccharomyces pastorianus
atcaaacaccacactgtctggccaa

SEQ ID NO: 46576 - DNA, 25 bp, Saccharomyces pastorianus
atggctagaggcaatcagagagact

SEQ ID NO: 46577 - DNA, 25 bp, Saccharomyces pastorianus
aaaacggcgatccaaagaagagaat

SEQ ID NO: 46578 - DNA, 25 bp, Saccharomyces pastorianus
acgccagaagagaggcagagctgtt

SEQ ID NO: 46579 - DNA, 25 bp, Saccharomyces pastorianus
gcaatcagagagacttggcaagaca

SEQ ID NO: 46580 - DNA, 25 bp, Saccharomyces pastorianus
gaatggagtcggacgctgatatttt

SEQ ID NO: 46581 - DNA, 25 bp, Saccharomyces pastorianus
gacgctgatattttgaggcagaagc

SEQ ID NO: 46582 - DNA, 25 bp, Saccharomyces pastorianus
gaaggacctggctaagagccagaaa

SEQ ID NO: 46583 - DNA, 25 bp, Saccharomyces pastorianus
aagcaggctgctgcggacgccagaa

SEQ ID NO: 46584 - DNA, 25 bp, Saccharomyces pastorianus
agcagaaggacctggctaagagcca

SEQ ID NO: 46585 - DNA, 25 bp, Saccharomyces pastorianus
agtcggacgctgatattttgaggca

SEQ ID NO: 46586 - DNA, 25 bp, Saccharomyces pastorianus
aaagaagagaatggagtcggacgct

SEQ ID NO: 46587 - DNA, 25 bp, Saccharomyces pastorianus
agatgttccacaagctctgcttgat

SEQ ID NO: 46588 - DNA, 25 bp, Saccharomyces pastorianus
agtggataccccaacgccagaattc

SEQ ID NO: 46589 - DNA, 25 bp, Saccharomyces pastorianus
gctgccaccaagagatgttccacaa

SEQ ID NO: 46590 - DNA, 25 bp, Saccharomyces pastorianus
tggataccccaacgccagaattcca

SEQ ID NO: 46591 - DNA, 25 bp, Saccharomyces pastorianus
aactccagtgcagtggataccccaa

SEQ ID NO: 46592 - DNA, 25 bp, Saccharomyces pastorianus
gaaaacgaaaactccagtgcagtgg

SEQ ID NO: 46593 - DNA, 25 bp, Saccharomyces pastorianus
ctgcttgatagatgggtagtagaga

SEQ ID NO: 46594 - DNA, 25 bp, Saccharomyces pastorianus
agtgcagtggataccccaacgccag

SEQ ID NO: 46595 - DNA, 25 bp, Saccharomyces pastorianus
gccaccaagagatgttccacaagct

SEQ ID NO: 46596 - DNA, 25 bp, Saccharomyces pastorianus
gattaatgacgctaattttgctgtt

SEQ ID NO: 46597 - DNA, 25 bp, Saccharomyces pastorianus
caagctctgcttgatagatgggtag

SEQ ID NO: 46598 - DNA, 25 bp, Saccharomyces pastorianus
atagagataagttccccgcaaccaa

SEQ ID NO: 46599 - DNA, 25 bp, Saccharomyces pastorianus
acactgggcatatcacaggcacttt

SEQ ID NO: 46600 - DNA, 25 bp, Saccharomyces pastorianus
aaactctcgtacaggccagatgaac

SEQ ID NO: 46601 - DNA, 25 bp, Saccharomyces pastorianus
tatcccgttggtttcaaccaggcga

SEQ ID NO: 46602 - DNA, 25 bp, Saccharomyces pastorianus
actattggcaaccttggacgagtcc

SEQ ID NO: 46603 - DNA, 25 bp, Saccharomyces pastorianus
aacagaaactggtgcctccgcgttt

SEQ ID NO: 46604 - DNA, 25 bp, Saccharomyces pastorianus
atggtgcttttcaattaacggttca

SEQ ID NO: 46605 - DNA, 25 bp, Saccharomyces pastorianus
gaagaatgctacatatcccgaccta

SEQ ID NO: 46606 - DNA, 25 bp, Saccharomyces pastorianus
gtgcactactatattcgacgtctgt

SEQ ID NO: 46607 - DNA, 25 bp, Saccharomyces pastorianus
caagaccttatccagctggcaatgt

SEQ ID NO: 46608 - DNA, 25 bp, Saccharomyces pastorianus
gataggttgtatgctttccgaattc

SEQ ID NO: 46609 - DNA, 25 bp, Saccharomyces pastorianus
ttcagccttggagctacttaggatt

SEQ ID NO: 46610 - DNA, 25 bp, Saccharomyces pastorianus
atgatattcagccttggagctactt

SEQ ID NO: 46611 - DNA, 25 bp, Saccharomyces pastorianus
gatattcagccttggagctacttag

SEQ ID NO: 46612 - DNA, 25 bp, Saccharomyces pastorianus
atgcgagttattatgatattcagcc

SEQ ID NO: 46613 - DNA, 25 bp, Saccharomyces pastorianus
tattcagccttggagctacttagga

SEQ ID NO: 46614 - DNA, 25 bp, Saccharomyces pastorianus
cagccttggagctacttaggattac

SEQ ID NO: 46615 - DNA, 25 bp, Saccharomyces pastorianus
agtcggatgcgagttattatgatat

SEQ ID NO: 46616 - DNA, 25 bp, Saccharomyces pastorianus
ttatgatattcagccttggagctac

SEQ ID NO: 46617 - DNA, 25 bp, Saccharomyces pastorianus
gagttattatgatattcagccttgg

SEQ ID NO: 46618 - DNA, 25 bp, Saccharomyces pastorianus
tattatgatattcagccttggagct

SEQ ID NO: 46619 - DNA, 25 bp, Saccharomyces pastorianus
gccttggagctacttaggattactc

SEQ ID NO: 46620 - DNA, 25 bp, Saccharomyces pastorianus
gtggaccccaaaacattctcattga

SEQ ID NO: 46621 - DNA, 25 bp, Saccharomyces pastorianus
ttattccccggcgaaagtggcatag

SEQ ID NO: 46622 - DNA, 25 bp, Saccharomyces pastorianus
aagattacctcctctacagtgtcta

SEQ ID NO: 46623 - DNA, 25 bp, Saccharomyces pastorianus
gtgccaccgattactcaaaccaaat

SEQ ID NO: 46624 - DNA, 25 bp, Saccharomyces pastorianus
aagcgcttgtgtcatcgccgaattg

SEQ ID NO: 46625 - DNA, 25 bp, Saccharomyces pastorianus
ttaagcccgtaactttggctcgact

SEQ ID NO: 46626 - DNA, 25 bp, Saccharomyces pastorianus
gaattgctatcaaaggccctcaggt

SEQ ID NO: 46627 - DNA, 25 bp, Saccharomyces pastorianus
gaattgctcctaggtaagcccttat

SEQ ID NO: 46628 - DNA, 25 bp, Saccharomyces pastorianus
agactccgatgctcttgaattgcta

SEQ ID NO: 46629 - DNA, 25 bp, Saccharomyces pastorianus
atgtgccacctgctgaattgtctac

SEQ ID NO: 46630 - DNA, 25 bp, Saccharomyces pastorianus
aggtatgaccctcgcgcaagattac

SEQ ID NO: 46631 - DNA, 25 bp, Saccharomyces pastorianus
gaaaacatcagtaccaagcttgaca

SEQ ID NO: 46632 - DNA, 25 bp, Saccharomyces pastorianus
gcggaaaatttcctttggcaattca

SEQ ID NO: 46633 - DNA, 25 bp, Saccharomyces pastorianus
gacacgagcaacaccgggctagaaa

SEQ ID NO: 46634 - DNA, 25 bp, Saccharomyces pastorianus
ggcgtcactgttgaccatattgaat

SEQ ID NO: 46635 - DNA, 25 bp, Saccharomyces pastorianus
atcgaagttactagacaccggtaga

SEQ ID NO: 46636 - DNA, 25 bp, Saccharomyces pastorianus
aagagcccaacaagatcacagtgca

SEQ ID NO: 46637 - DNA, 25 bp, Saccharomyces pastorianus
gaatacgtcgatgttccggatatca

SEQ ID NO: 46638 - DNA, 25 bp, Saccharomyces pastorianus
aagacttctatacagagcgacacga

SEQ ID NO: 46639 - DNA, 25 bp, Saccharomyces pastorianus
tcacagtgcaccataggatatctaa

SEQ ID NO: 46640 - DNA, 25 bp, Saccharomyces pastorianus
actgcaataacagcgccgagtatat

SEQ ID NO: 46641 - DNA, 25 bp, Saccharomyces pastorianus
caccggtagaaaaggcgtcactgtt

SEQ ID NO: 46642 - DNA, 25 bp, Saccharomyces pastorianus
cgaacctgtcttagttgcctctgct

SEQ ID NO: 46643 - DNA, 25 bp, Saccharomyces pastorianus
gtctagccccagaattgaaccaagc

SEQ ID NO: 46644 - DNA, 25 bp, Saccharomyces pastorianus
ggtactgaagatgtccgtctagccc

SEQ ID NO: 46645 - DNA, 25 bp, Saccharomyces pastorianus
ccattgttctcttacgtcgaacctg

SEQ ID NO: 46646 - DNA, 25 bp, Saccharomyces pastorianus
acctgtcttagttgcctctgctaag

SEQ ID NO: 46647 - DNA, 25 bp, Saccharomyces pastorianus
gtcttagttgcctctgctaagggtc

SEQ ID NO: 46648 - DNA, 25 bp, Saccharomyces pastorianus
attgttctcttacgtcgaacctgtc

SEQ ID NO: 46649 - DNA, 25 bp, Saccharomyces pastorianus
cttagttgcctctgctaagggtcta

SEQ ID NO: 46650 - DNA, 25 bp, Saccharomyces pastorianus
aacctgtcttagttgcctctgctaa

SEQ ID NO: 46651 - DNA, 25 bp, Saccharomyces pastorianus
agctatctggaagagaggtgtcaag

SEQ ID NO: 46652 - DNA, 25 bp, Saccharomyces pastorianus
gaacctgtcttagttgcctctgcta

SEQ ID NO: 46653 - DNA, 25 bp, Saccharomyces pastorianus
gactttagtatatttggtgagcgta

SEQ ID NO: 46654 - DNA, 25 bp, Saccharomyces pastorianus
gaatatttcgatttttctaacagat

SEQ ID NO: 46655 - DNA, 25 bp, Saccharomyces pastorianus
catgatagttgttaattccggtaaa

SEQ ID NO: 46656 - DNA, 25 bp, Saccharomyces pastorianus
ttaccggtacctgactttagtatat

SEQ ID NO: 46657 - DNA, 25 bp, Saccharomyces pastorianus
cagtgaaaagtgctccaaatttgga

SEQ ID NO: 46658 - DNA, 25 bp, Saccharomyces pastorianus
gaatgacctcattttagctgatggc

SEQ ID NO: 46659 - DNA, 25 bp, Saccharomyces pastorianus
aggaacatgagcacgaaacaccagt

SEQ ID NO: 46660 - DNA, 25 bp, Saccharomyces pastorianus
agctgatggcaaggatctggatatt

SEQ ID NO: 46661 - DNA, 25 bp, Saccharomyces pastorianus
ctggatattgaattaccggtacctg

SEQ ID NO: 46662 - DNA, 25 bp, Saccharomyces pastorianus
tctccccgttccgaaggacatgata

SEQ ID NO: 46663 - DNA, 25 bp, Saccharomyces pastorianus
atttgtgttgtcattgagacgttca

SEQ ID NO: 46664 - DNA, 25 bp, Saccharomyces pastorianus
attatcgtttgtcggttatctgaaa

SEQ ID NO: 46665 - DNA, 25 bp, Saccharomyces pastorianus
ggcgagcaattaatcaacctggaaa

SEQ ID NO: 46666 - DNA, 25 bp, Saccharomyces pastorianus
caaaccgggatttgcaggtccaagt

SEQ ID NO: 46667 - DNA, 25 bp, Saccharomyces pastorianus
ggaaagatacgcttgccgactaaag

SEQ ID NO: 46668 - DNA, 25 bp, Saccharomyces pastorianus
gttaaccaaactgctgtacactaca

SEQ ID NO: 46669 - DNA, 25 bp, Saccharomyces pastorianus
aatgattttcgaaccagcaatgaga

SEQ ID NO: 46670 - DNA, 25 bp, Saccharomyces pastorianus
atcaactggcccatttgcgaatacc

SEQ ID NO: 46671 - DNA, 25 bp, Saccharomyces pastorianus
ttcacaatttggaacgacgtcgaat

SEQ ID NO: 46672 - DNA, 25 bp, Saccharomyces pastorianus
tgcgaatacccgttaagctacccaa

SEQ ID NO: 46673 - DNA, 25 bp, Saccharomyces pastorianus
gtgaattcaagctccataagttggc

SEQ ID NO: 46674 - DNA, 25 bp, Saccharomyces pastorianus
tatgccatgtttttcaagtcgatca

SEQ ID NO: 46675 - DNA, 25 bp, Saccharomyces pastorianus
gatacttgatcaaatgacgtcgaag

SEQ ID NO: 46676 - DNA, 25 bp, Saccharomyces pastorianus
ccaaatggttgcatccggaggaaat

SEQ ID NO: 46677 - DNA, 25 bp, Saccharomyces pastorianus
caaacgcagtggtcaaaacagtaat

SEQ ID NO: 46678 - DNA, 25 bp, Saccharomyces pastorianus
aaagcatcatctcaaatacactgga

SEQ ID NO: 46679 - DNA, 25 bp, Saccharomyces pastorianus
gggtgataaccctattagaagtgga

SEQ ID NO: 46680 - DNA, 25 bp, Saccharomyces pastorianus
cagtccagggttcaaaagcatcatc

SEQ ID NO: 46681 - DNA, 25 bp, Saccharomyces pastorianus
gaagtcgatggcaatgatcctaatt

SEQ ID NO: 46682 - DNA, 25 bp, Saccharomyces pastorianus
aaggaagtgctgtatgaacccatga

SEQ ID NO: 46683 - DNA, 25 bp, Saccharomyces pastorianus
gatcgtgttaccgaattgctagacg

SEQ ID NO: 46684 - DNA, 25 bp, Saccharomyces pastorianus
gaacccatgaaggagatgcgtagtg

SEQ ID NO: 46685 - DNA, 25 bp, Saccharomyces pastorianus
aaagtagacacatcactagcagaag

SEQ ID NO: 46686 - DNA, 25 bp, Saccharomyces pastorianus
acctgcatggagatcgttttcgaga

SEQ ID NO: 46687 - DNA, 25 bp, Saccharomyces pastorianus
ggaggcctgctattacactgaaaca

SEQ ID NO: 46688 - DNA, 25 bp, Saccharomyces pastorianus
gtagaatatccaaacgaatatccgt

SEQ ID NO: 46689 - DNA, 25 bp, Saccharomyces pastorianus
ggcaggtggtgtatacccgattaca

SEQ ID NO: 46690 - DNA, 25 bp, Saccharomyces pastorianus
gaagatcaggactggaggcctgcta

SEQ ID NO: 46691 - DNA, 25 bp, Saccharomyces pastorianus
ggcacgatttgtttaagtatcctaa

SEQ ID NO: 46692 - DNA, 25 bp, Saccharomyces pastorianus
ctggtattccgggtagagaagctac

SEQ ID NO: 46693 - DNA, 25 bp, Saccharomyces pastorianus
aaatgtgtacccaagtggcacgatt

SEQ ID NO: 46694 - DNA, 25 bp, Saccharomyces pastorianus
tacaaaaatgggaggctggtattcc

SEQ ID NO: 46695 - DNA, 25 bp, Saccharomyces pastorianus
agaagctacaaattgggcaggtggt

SEQ ID NO: 46696 - DNA, 25 bp, Saccharomyces pastorianus
aagtttccggctggattttatcatc

SEQ ID NO: 46697 - DNA, 25 bp, Saccharomyces pastorianus
ttaacccaatcaaacgtccaacctg

SEQ ID NO: 46698 - DNA, 25 bp, Saccharomyces pastorianus
tgctcgcctcactatggagttatgt

SEQ ID NO: 46699 - DNA, 25 bp, Saccharomyces pastorianus
gggcggcgaatttttatcgatctta

SEQ ID NO: 46700 - DNA, 25 bp, Saccharomyces pastorianus
atgaaccaatattcgtgggcggcga

SEQ ID NO: 46701 - DNA, 25 bp, Saccharomyces pastorianus
gatctggctgtatgttacactatca

SEQ ID NO: 46702 - DNA, 25 bp, Saccharomyces pastorianus
gtgtcatgattgtttcatcacgcta

SEQ ID NO: 46703 - DNA, 25 bp, Saccharomyces pastorianus
tgttttgaagctcatctcctctaac

SEQ ID NO: 46704 - DNA, 25 bp, Saccharomyces pastorianus
agaatgggctgtatctgggctgttt

SEQ ID NO: 46705 - DNA, 25 bp, Saccharomyces pastorianus
gaaatcggtcaattcttcatacaga

SEQ ID NO: 46706 - DNA, 25 bp, Saccharomyces pastorianus
acagaactctcagaggacctgctcg

SEQ ID NO: 46707 - DNA, 25 bp, Saccharomyces pastorianus
atttacggcgatgcatcttacgatt

SEQ ID NO: 46708 - DNA, 25 bp, Saccharomyces pastorianus
ctaaagaaggccttgttgagctttg

SEQ ID NO: 46709 - DNA, 25 bp, Saccharomyces pastorianus
acaaacaactactatgtcgatggtt

SEQ ID NO: 46710 - DNA, 25 bp, Saccharomyces pastorianus
actatgtcgatggtttatatggttc

SEQ ID NO: 46711 - DNA, 25 bp, Saccharomyces pastorianus
acaacagttttaacttgagaccgat

SEQ ID NO: 46712 - DNA, 25 bp, Saccharomyces pastorianus
taagcaatagcaagccggctctgat

SEQ ID NO: 46713 - DNA, 25 bp, Saccharomyces pastorianus
aacttgagaccgataagcaatagca

SEQ ID NO: 46714 - DNA, 25 bp, Saccharomyces pastorianus
aaggaagccgttggcgatgcgctaa

SEQ ID NO: 46715 - DNA, 25 bp, Saccharomyces pastorianus
gcgatgcgctaaagaaggccttgtt

SEQ ID NO: 46716 - DNA, 25 bp, Saccharomyces pastorianus
taataggtcgaagaaggaagccgtt

SEQ ID NO: 46717 - DNA, 25 bp, Saccharomyces pastorianus
tagcaagccggctctgatcaagttg

SEQ ID NO: 46718 - DNA, 25 bp, Saccharomyces pastorianus
gattacgagaccaagattacaaaca

SEQ ID NO: 46719 - DNA, 25 bp, Saccharomyces pastorianus
gaccttcgggtatgatggctggcaa

SEQ ID NO: 46720 - DNA, 25 bp, Saccharomyces pastorianus
aatgccagccctttactgcagtaaa

SEQ ID NO: 46721 - DNA, 25 bp, Saccharomyces pastorianus
aagattactcttaaggatggcacaa

SEQ ID NO: 46722 - DNA, 25 bp, Saccharomyces pastorianus
aaggatttccagaccgtcgaggatt

SEQ ID NO: 46723 - DNA, 25 bp, Saccharomyces pastorianus
acggtgcacgcgaagtctagttcaa

SEQ ID NO: 46724 - DNA, 25 bp, Saccharomyces pastorianus
ggtacacttacaacatttatcacag

SEQ ID NO: 46725 - DNA, 25 bp, Saccharomyces pastorianus
gttatagacgtcgaggcccgtgaat

SEQ ID NO: 46726 - DNA, 25 bp, Saccharomyces pastorianus
aatagcgggtcacgttctcatacag

SEQ ID NO: 46727 - DNA, 25 bp, Saccharomyces pastorianus
atacagttcgccaacgagaccttcg

SEQ ID NO: 46728 - DNA, 25 bp, Saccharomyces pastorianus
attggaatggcaggcccgctagtgc

SEQ ID NO: 46729 - DNA, 25 bp, Saccharomyces pastorianus
tcatatgattcgactgtgtacggca

SEQ ID NO: 46730 - DNA, 25 bp, Saccharomyces pastorianus
ttgccactgccacatgtgttacttg

SEQ ID NO: 46731 - DNA, 25 bp, Saccharomyces pastorianus
gaagcccgatatcacgttttttgga

SEQ ID NO: 46732 - DNA, 25 bp, Saccharomyces pastorianus
gatataacagtacctccgattccaa

SEQ ID NO: 46733 - DNA, 25 bp, Saccharomyces pastorianus
ggaacgcaagattctgccctagcaa

SEQ ID NO: 46734 - DNA, 25 bp, Saccharomyces pastorianus
ttgtcattggaatctacctggcgag

SEQ ID NO: 46735 - DNA, 25 bp, Saccharomyces pastorianus
gtggcgccagtatccgaaattgtta

SEQ ID NO: 46736 - DNA, 25 bp, Saccharomyces pastorianus
tcatatggtgtcctgaagcccgata

SEQ ID NO: 46737 - DNA, 25 bp, Saccharomyces pastorianus
tcgagcttccattatgcccgtattg

SEQ ID NO: 46738 - DNA, 25 bp, Saccharomyces pastorianus
agcaaggccctcgtatatactaaac

SEQ ID NO: 46739 - DNA, 25 bp, Saccharomyces pastorianus
tggtccaatgtcatggttcttttgc

SEQ ID NO: 46740 - DNA, 25 bp, Saccharomyces pastorianus
tgttaatatgatcccagcgcacgtg

SEQ ID NO: 46741 - DNA, 25 bp, Saccharomyces pastorianus
ggatcaacactttcaacttctctta

SEQ ID NO: 46742 - DNA, 25 bp, Saccharomyces pastorianus
aagcatttctactatctctagcgga

SEQ ID NO: 46743 - DNA, 25 bp, Saccharomyces pastorianus
gatcagctgctcattctacaacatt

SEQ ID NO: 46744 - DNA, 25 bp, Saccharomyces pastorianus
tccgcggcagtttctctagagagtg

SEQ ID NO: 46745 - DNA, 25 bp, Saccharomyces pastorianus
gttttggttggttgctcttcctcaa

SEQ ID NO: 46746 - DNA, 25 bp, Saccharomyces pastorianus
gaccatctatcactgtctcatcaat

SEQ ID NO: 46747 - DNA, 25 bp, Saccharomyces pastorianus
tacgaccactacttctaacgcattt

SEQ ID NO: 46748 - DNA, 25 bp, Saccharomyces pastorianus
agtcattctggcactactgttgtag

SEQ ID NO: 46749 - DNA, 25 bp, Saccharomyces pastorianus
tgaccgtacctcgattaaaccaagc

SEQ ID NO: 46750 - DNA, 25 bp, Saccharomyces pastorianus
tctcttacatcgacagctactacta

SEQ ID NO: 46751 - DNA, 25 bp, Saccharomyces pastorianus
agagagtgcttctggcgattcaacc

SEQ ID NO: 46752 - DNA, 25 bp, Saccharomyces pastorianus
agtcggtccaaatgtttcgtccagt

SEQ ID NO: 46753 - DNA, 25 bp, Saccharomyces pastorianus
ttactactagctccacttcaagcag

SEQ ID NO: 46754 - DNA, 25 bp, Saccharomyces pastorianus
agctcagtcgttccaaccagttcaa

SEQ ID NO: 46755 - DNA, 25 bp, Saccharomyces pastorianus
cgcgttgactagttctgttgactca

SEQ ID NO: 46756 - DNA, 25 bp, Saccharomyces pastorianus
tgaagcaatcactccctttactcaa

SEQ ID NO: 46757 - DNA, 25 bp, Saccharomyces pastorianus
gttcagtttctcaaaccagctcagt

SEQ ID NO: 46758 - DNA, 25 bp, Saccharomyces pastorianus
ttcaagcagccattcttctagcgaa

SEQ ID NO: 46759 - DNA, 25 bp, Saccharomyces pastorianus
cagttggtccaaatgcttcgtctag

SEQ ID NO: 46760 - DNA, 25 bp, Saccharomyces pastorianus
gtatcgtactactacctcgagtgac

SEQ ID NO: 46761 - DNA, 25 bp, Saccharomyces pastorianus
gttgactcaaccacttcagttggtc

SEQ ID NO: 46762 - DNA, 25 bp, Saccharomyces pastorianus
ttcgtccagtttagccgctatgtat

SEQ ID NO: 46763 - DNA, 25 bp, Saccharomyces pastorianus
ttagaaaagatagagctgccgcaga

SEQ ID NO: 46764 - DNA, 25 bp, Saccharomyces pastorianus
gagacaattactacacccaaaagaa

SEQ ID NO: 46765 - DNA, 25 bp, Saccharomyces pastorianus
aaggctcttcaaagtggtgttaacg

SEQ ID NO: 46766 - DNA, 25 bp, Saccharomyces pastorianus
gtgaattgaaatccactgatcaaat

SEQ ID NO: 46767 - DNA, 25 bp, Saccharomyces pastorianus
gggctataacaatgctccaggttta

SEQ ID NO: 46768 - DNA, 25 bp, Saccharomyces pastorianus
gctcttcaaagtggtgttaacgtaa

SEQ ID NO: 46769 - DNA, 25 bp, Saccharomyces pastorianus
gcccgataaacatagagacaattac

SEQ ID NO: 46770 - DNA, 25 bp, Saccharomyces pastorianus
gaaatccactgatcaaattagaaaa

SEQ ID NO: 46771 - DNA, 25 bp, Saccharomyces pastorianus
ggcacctaaaatgcccgataaacat

SEQ ID NO: 46772 - DNA, 25 bp, Saccharomyces pastorianus
tagagctgccgcagagaaaaaacgt

SEQ ID NO: 46773 - DNA, 25 bp, Saccharomyces pastorianus
aatgctccaggtttaagaagtgaat

SEQ ID NO: 46774 - DNA, 25 bp, Saccharomyces pastorianus
ttcgaagacgcagaccaattattgg

SEQ ID NO: 46775 - DNA, 25 bp, Saccharomyces pastorianus
cagcgacgataaggtgcaagttcac

SEQ ID NO: 46776 - DNA, 25 bp, Saccharomyces pastorianus
tcttgagtcattatgcgccagctgg

SEQ ID NO: 46777 - DNA, 25 bp, Saccharomyces pastorianus
tgcttacgatctgaacagcgacgat

SEQ ID NO: 46778 - DNA, 25 bp, Saccharomyces pastorianus
agtggtcaaaagatcgcggcaagtt

SEQ ID NO: 46779 - DNA, 25 bp, Saccharomyces pastorianus
atgatgctgcacatgctgcttacga

SEQ ID NO: 46780 - DNA, 25 bp, Saccharomyces pastorianus
gatccatctttcttcttgagtcatt

SEQ ID NO: 46781 - DNA, 25 bp, Saccharomyces pastorianus
aactggtgggtttgcaaatgatgct

SEQ ID NO: 46782 - DNA, 25 bp, Saccharomyces pastorianus
gagactggttacacgatatccgaag

SEQ ID NO: 46783 - DNA, 25 bp, Saccharomyces pastorianus
caactggccccaattcaacgaaagt

SEQ ID NO: 46784 - DNA, 25 bp, Saccharomyces pastorianus
gatcgcggcaagtttcagatctggt

SEQ ID NO: 46785 - DNA, 25 bp, Saccharomyces pastorianus
gcatatgttcggtaaatcctttgat

SEQ ID NO: 46786 - DNA, 25 bp, Saccharomyces pastorianus
aatcctttgatatgccactaggccc

SEQ ID NO: 46787 - DNA, 25 bp, Saccharomyces pastorianus
agagacacatctttaccacttgcga

SEQ ID NO: 46788 - DNA, 25 bp, Saccharomyces pastorianus
aaccctcctcaatcttcaaaggcat

SEQ ID NO: 46789 - DNA, 25 bp, Saccharomyces pastorianus
ggatgaactgttccatacgaaaagt

SEQ ID NO: 46790 - DNA, 25 bp, Saccharomyces pastorianus
gacagcagccgtaccagcagataaa

SEQ ID NO: 46791 - DNA, 25 bp, Saccharomyces pastorianus
ggaacaatacaccaaggcagccaca

SEQ ID NO: 46792 - DNA, 25 bp, Saccharomyces pastorianus
gaagcacccgcatacgatgtaactg

SEQ ID NO: 46793 - DNA, 25 bp, Saccharomyces pastorianus
taaaacctataatgggcggcggact

SEQ ID NO: 46794 - DNA, 25 bp, Saccharomyces pastorianus
agctttcgcagacaaaacttcccgt

SEQ ID NO: 46795 - DNA, 25 bp, Saccharomyces pastorianus
aggcagccacaattcgtaacctcga

SEQ ID NO: 46796 - DNA, 25 bp, Saccharomyces pastorianus
gatgttaaacaacccaggtcttcgt

SEQ ID NO: 46797 - DNA, 25 bp, Saccharomyces pastorianus
ccgcaagacgttcaggaggatgaca

SEQ ID NO: 46798 - DNA, 25 bp, Saccharomyces pastorianus
gaagcaggcaagctgtttcccgatg

SEQ ID NO: 46799 - DNA, 25 bp, Saccharomyces pastorianus
gttagccaatgaaataaagatccgc

SEQ ID NO: 46800 - DNA, 25 bp, Saccharomyces pastorianus
cggaatccggagttgtattaccatt

SEQ ID NO: 46801 - DNA, 25 bp, Saccharomyces pastorianus
gcatgagatagatctttttcttcga

SEQ ID NO: 46802 - DNA, 25 bp, Saccharomyces pastorianus
aggtaattttacaacagcatgagat

SEQ ID NO: 46803 - DNA, 25 bp, Saccharomyces pastorianus
agatctttgttggaagacttggaaa

SEQ ID NO: 46804 - DNA, 25 bp, Saccharomyces pastorianus
aggtcttcgttggtttctgagaaca

SEQ ID NO: 46805 - DNA, 25 bp, Saccharomyces pastorianus
aggcaagctgtttcccgatgttaaa

SEQ ID NO: 46806 - DNA, 25 bp, Saccharomyces pastorianus
ggatgacaaagatttgcgtggtttt

SEQ ID NO: 46807 - DNA, 25 bp, Saccharomyces pastorianus
gagacgtcactagacacctaattga

SEQ ID NO: 46808 - DNA, 25 bp, Saccharomyces pastorianus
tgcggtcttggctagtatcatggct

SEQ ID NO: 46809 - DNA, 25 bp, Saccharomyces pastorianus
accgctgattttgagactgttcgtc

SEQ ID NO: 46810 - DNA, 25 bp, Saccharomyces pastorianus
tcgtcgtggttacgccttcaacaga

SEQ ID NO: 46811 - DNA, 25 bp, Saccharomyces pastorianus
taattgatctactctctcgtcgtgg

SEQ ID NO: 46812 - DNA, 25 bp, Saccharomyces pastorianus
tagccagggagacaaccactcttgt

SEQ ID NO: 46813 - DNA, 25 bp, Saccharomyces pastorianus
gtgcaatcagccgacgttgacatta

SEQ ID NO: 46814 - DNA, 25 bp, Saccharomyces pastorianus
gttcaagcatgtatccaggtcttcc

SEQ ID NO: 46815 - DNA, 25 bp, Saccharomyces pastorianus
agagtcttgcacaatgatccttcaa

SEQ ID NO: 46816 - DNA, 25 bp, Saccharomyces pastorianus
gctattgtcctttcgggtggttcaa

SEQ ID NO: 46817 - DNA, 25 bp, Saccharomyces pastorianus
gtcgacgtcgaacaaccaggtgtag

SEQ ID NO: 46818 - DNA, 25 bp, Saccharomyces pastorianus
gatcacctgtaaggaagtccacgaa

SEQ ID NO: 46819 - DNA, 25 bp, Saccharomyces pastorianus
taaggaagtccacgaatggttagaa

SEQ ID NO: 46820 - DNA, 25 bp, Saccharomyces pastorianus
agatttcccattgttcgaagccgtc

SEQ ID NO: 46821 - DNA, 25 bp, Saccharomyces pastorianus
tggttagaaacctgtgggtccgttg

SEQ ID NO: 46822 - DNA, 25 bp, Saccharomyces pastorianus
atccgctcaaggtttgatcacctgt

SEQ ID NO: 46823 - DNA, 25 bp, Saccharomyces pastorianus
tctagagaagaaacctactatcaag

SEQ ID NO: 46824 - DNA, 25 bp, Saccharomyces pastorianus
ggtccgttgaagatttcccattgtt

SEQ ID NO: 46825 - DNA, 25 bp, Saccharomyces pastorianus
tgttcgaagccgtctaccaaatcgt

SEQ ID NO: 46826 - DNA, 25 bp, Saccharomyces pastorianus
tgacttgatcaccacctgtgccggt

SEQ ID NO: 46827 - DNA, 25 bp, Saccharomyces pastorianus
atccgctggtgttgctgacttgatc

SEQ ID NO: 46828 - DNA, 25 bp, Saccharomyces pastorianus
atgcctgggagtgtgaaaaagagtt

SEQ ID NO: 46829 - DNA, 25 bp, Saccharomyces pastorianus
aattgaagggtcacgtcagctctca

SEQ ID NO: 46830 - DNA, 25 bp, Saccharomyces pastorianus
gggtaccaccattgcaaaggtcgtt

SEQ ID NO: 46831 - DNA, 25 bp, Saccharomyces pastorianus
aacctaggcatccaatgtggtgctt

SEQ ID NO: 46832 - DNA, 25 bp, Saccharomyces pastorianus
aagcctttcaaggtcaccgtcattg

SEQ ID NO: 46833 - DNA, 25 bp, Saccharomyces pastorianus
gacgtcgacattctagtgttcaaca

SEQ ID NO: 46834 - DNA, 25 bp, Saccharomyces pastorianus
aaatatcactcttccagacaacctg

SEQ ID NO: 46835 - DNA, 25 bp, Saccharomyces pastorianus
tgttgtcctcttacatcaccgaaaa

SEQ ID NO: 46836 - DNA, 25 bp, Saccharomyces pastorianus
ttctgtttctttgaaggccgctgaa

SEQ ID NO: 46837 - DNA, 25 bp, Saccharomyces pastorianus
gaggttttcgctccagaagttcaaa

SEQ ID NO: 46838 - DNA, 25 bp, Saccharomyces pastorianus
aagggtgtccaattgttgtcctctt

SEQ ID NO: 46839 - DNA, 25 bp, Saccharomyces pastorianus
ggtcgccaacccagatttgattgac

SEQ ID NO: 46840 - DNA, 25 bp, Saccharomyces pastorianus
ggacttcgatgaaccgatacggcaa

SEQ ID NO: 46841 - DNA, 25 bp, Saccharomyces pastorianus
ggtttagcaatcaacgatgcgcata

SEQ ID NO: 46842 - DNA, 25 bp, Saccharomyces pastorianus
acagatagcgcaatagacagagaac

SEQ ID NO: 46843 - DNA, 25 bp, Saccharomyces pastorianus
cgtggcggaagattttgtggacttc

SEQ ID NO: 46844 - DNA, 25 bp, Saccharomyces pastorianus
gaaaattcgttgaggtagtttcaag

SEQ ID NO: 46845 - DNA, 25 bp, Saccharomyces pastorianus
gattttgtggacttcgatgaaccga

SEQ ID NO: 46846 - DNA, 25 bp, Saccharomyces pastorianus
gtgttccagctgcaaaaaggtttag

SEQ ID NO: 46847 - DNA, 25 bp, Saccharomyces pastorianus
gtagacaagtgttccagctgcaaaa

SEQ ID NO: 46848 - DNA, 25 bp, Saccharomyces pastorianus
gaaccgatacggcaaaatacagata

SEQ ID NO: 46849 - DNA, 25 bp, Saccharomyces pastorianus
gcaatcaacgatgcgcatatcagaa

SEQ ID NO: 46850 - DNA, 25 bp, Saccharomyces pastorianus
tgcgcatatcagaaaattcgttgag

SEQ ID NO: 46851 - DNA, 25 bp, Saccharomyces pastorianus
tgaaggaacaactgggccactccca

SEQ ID NO: 46852 - DNA, 25 bp, Saccharomyces pastorianus
gaggagtaccttgaattcattgtta

SEQ ID NO: 46853 - DNA, 25 bp, Saccharomyces pastorianus
gaagtgctgatatcggtgataaata

SEQ ID NO: 46854 - DNA, 25 bp, Saccharomyces pastorianus
tcccatgaggagtaccttgaattca

SEQ ID NO: 46855 - DNA, 25 bp, Saccharomyces pastorianus
gaacaactgggccactcccatgagg

SEQ ID NO: 46856 - DNA, 25 bp, Saccharomyces pastorianus
aactgggccactcccatgaggagta

SEQ ID NO: 46857 - DNA, 25 bp, Saccharomyces pastorianus
gccactcccatgaggagtaccttga

SEQ ID NO: 46858 - DNA, 25 bp, Saccharomyces pastorianus
cattgttatattactggtcggtgtg

SEQ ID NO: 46859 - DNA, 25 bp, Saccharomyces pastorianus
tattactggtcggtgtggaagtgct

SEQ ID NO: 46860 - DNA, 25 bp, Saccharomyces pastorianus
gtggaagtgctgatatcggtgataa

SEQ ID NO: 46861 - DNA, 25 bp, Saccharomyces pastorianus
aattcattgttatattactggtcgg

SEQ ID NO: 46862 - DNA, 25 bp, Saccharomyces pastorianus
atacaacgactggagaggtgacaaa

SEQ ID NO: 46863 - DNA, 25 bp, Saccharomyces pastorianus
gattctcgaaagatacatcacaccc

SEQ ID NO: 46864 - DNA, 25 bp, Saccharomyces pastorianus
aaccaaggatctacaatgacttcat

SEQ ID NO: 46865 - DNA, 25 bp, Saccharomyces pastorianus
ggtgagctatttatcctaagaatta

SEQ ID NO: 46866 - DNA, 25 bp, Saccharomyces pastorianus
ggtcaagctctcaatatctcatgca

SEQ ID NO: 46867 - DNA, 25 bp, Saccharomyces pastorianus
aatgacttcattactctgagagacg

SEQ ID NO: 46868 - DNA, 25 bp, Saccharomyces pastorianus
gatgaatgtttgtacaccccgttta

SEQ ID NO: 46869 - DNA, 25 bp, Saccharomyces pastorianus
gagacggctcgaactatatggtcaa

SEQ ID NO: 46870 - DNA, 25 bp, Saccharomyces pastorianus
catcacacccatccaaaattattcg

SEQ ID NO: 46871 - DNA, 25 bp, Saccharomyces pastorianus
acatgaagacgttattcggttagac

SEQ ID NO: 46872 - DNA, 25 bp, Saccharomyces pastorianus
aagcacccagatttgttcatttttg

SEQ ID NO: 46873 - DNA, 25 bp, Saccharomyces pastorianus
agcgctgtgttgaagactacgtccc

SEQ ID NO: 46874 - DNA, 25 bp, Saccharomyces pastorianus
tcgtaattgctatccttatactgtt

SEQ ID NO: 46875 - DNA, 25 bp, Saccharomyces pastorianus
aagagcagatcgaccttctcataca

SEQ ID NO: 46876 - DNA, 25 bp, Saccharomyces pastorianus
gcgtcgggcagaattctccaataat

SEQ ID NO: 46877 - DNA, 25 bp, Saccharomyces pastorianus
agatgatccattcagttcttcctcg

SEQ ID NO: 46878 - DNA, 25 bp, Saccharomyces pastorianus
aggctcccattagaggaactgcttg

SEQ ID NO: 46879 - DNA, 25 bp, Saccharomyces pastorianus
gagaccgagctgattcgacagacaa

SEQ ID NO: 46880 - DNA, 25 bp, Saccharomyces pastorianus
gacgaatcatgggtcaggctcccat

SEQ ID NO: 46881 - DNA, 25 bp, Saccharomyces pastorianus
gtaatggaaatagtcgcgtcgggca

SEQ ID NO: 46882 - DNA, 25 bp, Saccharomyces pastorianus
gacaaagatttacagcgcccaaaag

SEQ ID NO: 46883 - DNA, 25 bp, Saccharomyces pastorianus
aaagctgctgtagtacgagtgtcca

SEQ ID NO: 46884 - DNA, 25 bp, Saccharomyces pastorianus
aggcgaagctcacctttatacggga

SEQ ID NO: 46885 - DNA, 25 bp, Saccharomyces pastorianus
aatagtctggtaccgcataaggcgt

SEQ ID NO: 46886 - DNA, 25 bp, Saccharomyces pastorianus
gttcgactatcgtgttcctaattta

SEQ ID NO: 46887 - DNA, 25 bp, Saccharomyces pastorianus
gaaagtggtatattcgacgttcgtt

SEQ ID NO: 46888 - DNA, 25 bp, Saccharomyces pastorianus
aaactctactattctttaccggcag

SEQ ID NO: 46889 - DNA, 25 bp, Saccharomyces pastorianus
gacgttcgttaaacctgggcaaatg

SEQ ID NO: 46890 - DNA, 25 bp, Saccharomyces pastorianus
gaaatgacccagcaaatttttggca

SEQ ID NO: 46891 - DNA, 25 bp, Saccharomyces pastorianus
gatgaccgagctcataaatcttcct

SEQ ID NO: 46892 - DNA, 25 bp, Saccharomyces pastorianus
actgactatgactaccagctaggtt

SEQ ID NO: 46893 - DNA, 25 bp, Saccharomyces pastorianus
gaacaactcccacagggctttatta

SEQ ID NO: 46894 - DNA, 25 bp, Saccharomyces pastorianus
aaagctgcaaactttggcccatgat

SEQ ID NO: 46895 - DNA, 25 bp, Saccharomyces pastorianus
tttgggtccattcggtcctataaat

SEQ ID NO: 46896 - DNA, 25 bp, Saccharomyces pastorianus
gttcttttccaatattcgccttcaa

SEQ ID NO: 46897 - DNA, 25 bp, Saccharomyces pastorianus
gcttatctctacttaatttgctccc

SEQ ID NO: 46898 - DNA, 25 bp, Saccharomyces pastorianus
gatgcttccgtcaaagaacttcagg

SEQ ID NO: 46899 - DNA, 25 bp, Saccharomyces pastorianus
aaacactttgtactctcttggcagg

SEQ ID NO: 46900 - DNA, 25 bp, Saccharomyces pastorianus
cgcttacttgatcgccattctgaat

SEQ ID NO: 46901 - DNA, 25 bp, Saccharomyces pastorianus
atttgctcccgtttgaattcgaata

SEQ ID NO: 46902 - DNA, 25 bp, Saccharomyces pastorianus
ataactccaacaatgccggttcaac

SEQ ID NO: 46903 - DNA, 25 bp, Saccharomyces pastorianus
atgaccctttcagattgcgttcttt

SEQ ID NO: 46904 - DNA, 25 bp, Saccharomyces pastorianus
ctcctatcccgatcatgatttttca

SEQ ID NO: 46905 - DNA, 25 bp, Saccharomyces pastorianus
gaaccgggatatctttggaacctga

SEQ ID NO: 46906 - DNA, 25 bp, Saccharomyces pastorianus
acctctaacgttgcctctttgaact

SEQ ID NO: 46907 - DNA, 25 bp, Saccharomyces pastorianus
cggtattgtcaaggctttgagaaac

SEQ ID NO: 46908 - DNA, 25 bp, Saccharomyces pastorianus
ggtgtcgaaacctctaacgttgcct

SEQ ID NO: 46909 - DNA, 25 bp, Saccharomyces pastorianus
ggctttgagaaacgtcccaggtgtc

SEQ ID NO: 46910 - DNA, 25 bp, Saccharomyces pastorianus
caaggctttgagaaacgtcccaggt

SEQ ID NO: 46911 - DNA, 25 bp, Saccharomyces pastorianus
gtcccaggtgtcgaaacctctaacg

SEQ ID NO: 46912 - DNA, 25 bp, Saccharomyces pastorianus
gaaacctctaacgttgcctctttga

SEQ ID NO: 46913 - DNA, 25 bp, Saccharomyces pastorianus
ctttgagaaacgtcccaggtgtcga

SEQ ID NO: 46914 - DNA, 25 bp, Saccharomyces pastorianus
tccaggtgctcacttgggtagattc

SEQ ID NO: 46915 - DNA, 25 bp, Saccharomyces pastorianus
tgagaaacgtcccaggtgtcgaaac

SEQ ID NO: 46916 - DNA, 25 bp, Saccharomyces pastorianus
gagctggtcaaggtaagtacagaaa

SEQ ID NO: 46917 - DNA, 25 bp, Saccharomyces pastorianus
aatctgctgttagaccagctggtca

SEQ ID NO: 46918 - DNA, 25 bp, Saccharomyces pastorianus
cacttgggtagattcgtcatctgga

SEQ ID NO: 46919 - DNA, 25 bp, Saccharomyces pastorianus
tagaccagctggtcaagctacccaa

SEQ ID NO: 46920 - DNA, 25 bp, Saccharomyces pastorianus
ttcgtcatctggactgaagctgcct

SEQ ID NO: 46921 - DNA, 25 bp, Saccharomyces pastorianus
ctgccttctccaagttggaccaagt

SEQ ID NO: 46922 - DNA, 25 bp, Saccharomyces pastorianus
gtcaagctacccaaaagcgtaccca

SEQ ID NO: 46923 - DNA, 25 bp, Saccharomyces pastorianus
tcggttacactttgccatcccacat

SEQ ID NO: 46924 - DNA, 25 bp, Saccharomyces pastorianus
gttgcctcttccaaggtcggttaca

SEQ ID NO: 46925 - DNA, 25 bp, Saccharomyces pastorianus
ccacctccgatgttaccagaatcat

SEQ ID NO: 46926 - DNA, 25 bp, Saccharomyces pastorianus
ttccgaaaccgttgcctcttccaag

SEQ ID NO: 46927 - DNA, 25 bp, Saccharomyces pastorianus
tgaagctgccttctccaagttggac

SEQ ID NO: 46928 - DNA, 25 bp, Saccharomyces pastorianus
actgcttctgctattgctgctactg

SEQ ID NO: 46929 - DNA, 25 bp, Saccharomyces pastorianus
actgctgttgcctctttggtcttgg

SEQ ID NO: 46930 - DNA, 25 bp, Saccharomyces pastorianus
gttgcctctttggtcttggccagag

SEQ ID NO: 46931 - DNA, 25 bp, Saccharomyces pastorianus
tgctactgctgttgcctctttggtc

SEQ ID NO: 46932 - DNA, 25 bp, Saccharomyces pastorianus
gccactgcttctgctattgctgcta

SEQ ID NO: 46933 - DNA, 25 bp, Saccharomyces pastorianus
gctattgctgctactgctgttgcct

SEQ ID NO: 46934 - DNA, 25 bp, Saccharomyces pastorianus
tctgctattgctgctactgctgttg

SEQ ID NO: 46935 - DNA, 25 bp, Saccharomyces pastorianus
aacgaaaagcgttacgccactgctt

SEQ ID NO: 46936 - DNA, 25 bp, Saccharomyces pastorianus
attgctgctactgctgttgcctctt

SEQ ID NO: 46937 - DNA, 25 bp, Saccharomyces pastorianus
gcttctgctattgctgctactgctg

SEQ ID NO: 46938 - DNA, 25 bp, Saccharomyces pastorianus
cgaaaagcgttacgccactgcttct

SEQ ID NO: 46939 - DNA, 25 bp, Saccharomyces pastorianus
ttccttggaaagttcaatcgctgtg

SEQ ID NO: 46940 - DNA, 25 bp, Saccharomyces pastorianus
gtccgtttcggatttatggaagaca

SEQ ID NO: 46941 - DNA, 25 bp, Saccharomyces pastorianus
gaccactgacgaatttttcatagaa

SEQ ID NO: 46942 - DNA, 25 bp, Saccharomyces pastorianus
tgaagtgcccattgacgagcaatct

SEQ ID NO: 46943 - DNA, 25 bp, Saccharomyces pastorianus
tgacgggctggaaagtatatctgat

SEQ ID NO: 46944 - DNA, 25 bp, Saccharomyces pastorianus
aaatggtctgaatatttccttggaa

SEQ ID NO: 46945 - DNA, 25 bp, Saccharomyces pastorianus
gagagaatttcagtccgtttcggat

SEQ ID NO: 46946 - DNA, 25 bp, Saccharomyces pastorianus
aaaacaatgtcgaccactgacgaat

SEQ ID NO: 46947 - DNA, 25 bp, Saccharomyces pastorianus
gaagacattttatgacgggctggaa

SEQ ID NO: 46948 - DNA, 25 bp, Saccharomyces pastorianus
cgatgagttcaatcctaaacggttt

SEQ ID NO: 46949 - DNA, 25 bp, Saccharomyces pastorianus
atatctgatgaagtgcccattgacg

SEQ ID NO: 46950 - DNA, 25 bp, Saccharomyces pastorianus
gacggattccaacacgatgcgctag

SEQ ID NO: 46951 - DNA, 25 bp, Saccharomyces pastorianus
aaataagaactcgtccgctgtcgtt

SEQ ID NO: 46952 - DNA, 25 bp, Saccharomyces pastorianus
tgaagactgaatacgctggcaccaa

SEQ ID NO: 46953 - DNA, 25 bp, Saccharomyces pastorianus
ataaggcttgctactccgagacaaa

SEQ ID NO: 46954 - DNA, 25 bp, Saccharomyces pastorianus
gaagcataccgtcaaagagcccgct

SEQ ID NO: 46955 - DNA, 25 bp, Saccharomyces pastorianus
ttgcaccacgttcacttgagacatg

SEQ ID NO: 46956 - DNA, 25 bp, Saccharomyces pastorianus
cattggttattttccggtcctgaag

SEQ ID NO: 46957 - DNA, 25 bp, Saccharomyces pastorianus
gatcctttcctactacggtatgctg

SEQ ID NO: 46958 - DNA, 25 bp, Saccharomyces pastorianus
aacgagatccccttgcaagatgacg

SEQ ID NO: 46959 - DNA, 25 bp, Saccharomyces pastorianus
tatgctggctttccttgtgttccta

SEQ ID NO: 46960 - DNA, 25 bp, Saccharomyces pastorianus
tgttttgctaccacatgctaaaggg

SEQ ID NO: 46961 - DNA, 25 bp, Saccharomyces pastorianus
gatacgaaaagagacacaagaacgt

SEQ ID NO: 46962 - DNA, 25 bp, Saccharomyces pastorianus
tccaaagtacaacagatacgaaaag

SEQ ID NO: 46963 - DNA, 25 bp, Saccharomyces pastorianus
acaacagatacgaaaagagacacaa

SEQ ID NO: 46964 - DNA, 25 bp, Saccharomyces pastorianus
tacattccaaagtacaacagatacg

SEQ ID NO: 46965 - DNA, 25 bp, Saccharomyces pastorianus
aacagatacgaaaagagacacaaga

SEQ ID NO: 46966 - DNA, 25 bp, Saccharomyces pastorianus
caacagatacgaaaagagacacaag

SEQ ID NO: 46967 - DNA, 25 bp, Saccharomyces pastorianus
cagatacgaaaagagacacaagaac

SEQ ID NO: 46968 - DNA, 25 bp, Saccharomyces pastorianus
acattccaaagtacaacagatacga

SEQ ID NO: 46969 - DNA, 25 bp, Saccharomyces pastorianus
attccaaagtacaacagatacgaaa

SEQ ID NO: 46970 - DNA, 25 bp, Saccharomyces pastorianus
tacaacagatacgaaaagagacaca

SEQ ID NO: 46971 - DNA, 25 bp, Saccharomyces pastorianus
cattccaaagtacaacagatacgaa

SEQ ID NO: 46972 - DNA, 25 bp, Saccharomyces pastorianus
tgtgtcgacagagtgtttatttttt

SEQ ID NO: 46973 - DNA, 25 bp, Saccharomyces pastorianus
gggtgtgtcgacagagtgtttattt

SEQ ID NO: 46974 - DNA, 25 bp, Saccharomyces pastorianus
tacctcgtgttcttctgtctttgtc

SEQ ID NO: 46975 - DNA, 25 bp, Saccharomyces pastorianus
ttttcgttgccctatttacctcgtg

SEQ ID NO: 46976 - DNA, 25 bp, Saccharomyces pastorianus
gttgccctatttacctcgtgttctt

SEQ ID NO: 46977 - DNA, 25 bp, Saccharomyces pastorianus
gtctttgtcttgcaaaaggttgttg

SEQ ID NO: 46978 - DNA, 25 bp, Saccharomyces pastorianus
ttgcaaaaggttgttgcacaatctc

SEQ ID NO: 46979 - DNA, 25 bp, Saccharomyces pastorianus
ctatttacctcgtgttcttctgtct

SEQ ID NO: 46980 - DNA, 25 bp, Saccharomyces pastorianus
tcttctgtctttgtcttgcaaaagg

SEQ ID NO: 46981 - DNA, 25 bp, Saccharomyces pastorianus
tgttcttctgtctttgtcttgcaaa

SEQ ID NO: 46982 - DNA, 25 bp, Saccharomyces pastorianus
atttacctcgtgttcttctgtcttt

SEQ ID NO: 46983 - DNA, 25 bp, Saccharomyces pastorianus
atgccaagatggaagattgacgcta

SEQ ID NO: 46984 - DNA, 25 bp, Saccharomyces pastorianus
gaagattgacgctatcgacgtgtat

SEQ ID NO: 46985 - DNA, 25 bp, Saccharomyces pastorianus
tacgaccagtgtattcgcgataata

SEQ ID NO: 46986 - DNA, 25 bp, Saccharomyces pastorianus
cgctatcgacgtgtatcagagagaa

SEQ ID NO: 46987 - DNA, 25 bp, Saccharomyces pastorianus
atgtctgacgttttagacgagattg

SEQ ID NO: 46988 - DNA, 25 bp, Saccharomyces pastorianus
gccaatgaagaaatacgaccagtgt

SEQ ID NO: 46989 - DNA, 25 bp, Saccharomyces pastorianus
ggataatcctgggaaatgccaagat

SEQ ID NO: 46990 - DNA, 25 bp, Saccharomyces pastorianus
aattgcccacaggagtttttgcagt

SEQ ID NO: 46991 - DNA, 25 bp, Saccharomyces pastorianus
gaattgcttaggtttcttacaagat

SEQ ID NO: 46992 - DNA, 25 bp, Saccharomyces pastorianus
gagtttttgcagtatcacaagtgta

SEQ ID NO: 46993 - DNA, 25 bp, Saccharomyces pastorianus
gtatcagagagaaagtgcccagtgt

SEQ ID NO: 46994 - DNA, 25 bp, Saccharomyces pastorianus
gacatggtgtgccttaattctcgcc

SEQ ID NO: 46995 - DNA, 25 bp, Saccharomyces pastorianus
aatggcgggcgcttgtatggcatca

SEQ ID NO: 46996 - DNA, 25 bp, Saccharomyces pastorianus
tttggatttgtttcaaccttccctg

SEQ ID NO: 46997 - DNA, 25 bp, Saccharomyces pastorianus
tagctttctgggtaggcgctgaact

SEQ ID NO: 46998 - DNA, 25 bp, Saccharomyces pastorianus
cattcactgcatccctttatggtat

SEQ ID NO: 46999 - DNA, 25 bp, Saccharomyces pastorianus
attgcattcacgctagctttctggg

SEQ ID NO: 47000 - DNA, 25 bp, Saccharomyces pastorianus
ttccctgtcgtctatattccagtca

SEQ ID NO: 47001 - DNA, 25 bp, Saccharomyces pastorianus
agcagcattcgcaaccatgacatgg

SEQ ID NO: 47002 - DNA, 25 bp, Saccharomyces pastorianus
attcgaagcatacagcacgtccact

SEQ ID NO: 47003 - DNA, 25 bp, Saccharomyces pastorianus
attctcgcctgggaagtggtcgata

SEQ ID NO: 47004 - DNA, 25 bp, Saccharomyces pastorianus
ttatagatcacgttcagcagcattc

SEQ ID NO: 47005 - DNA, 25 bp, Saccharomyces pastorianus
tgcaacgcaatgattatggttctgt

SEQ ID NO: 47006 - DNA, 25 bp, Saccharomyces pastorianus
aaagcgatggttatccaccaacttt

SEQ ID NO: 47007 - DNA, 25 bp, Saccharomyces pastorianus
taccacacactcactgcagaagaag

SEQ ID NO: 47008 - DNA, 25 bp, Saccharomyces pastorianus
tccaccaactttgcaacgcaatgat

SEQ ID NO: 47009 - DNA, 25 bp, Saccharomyces pastorianus
agtgctgagttcagtgcctaccaca

SEQ ID NO: 47010 - DNA, 25 bp, Saccharomyces pastorianus
atggtctcaccgaggatgagtttga

SEQ ID NO: 47011 - DNA, 25 bp, Saccharomyces pastorianus
aatatctatggtcatctcctttgcc

SEQ ID NO: 47012 - DNA, 25 bp, Saccharomyces pastorianus
catctcctttgccatgcacgactgg

SEQ ID NO: 47013 - DNA, 25 bp, Saccharomyces pastorianus
tacgctgggcgatgatagcaagatc

SEQ ID NO: 47014 - DNA, 25 bp, Saccharomyces pastorianus
cttaaccaatggtctcaccgaggat

SEQ ID NO: 47015 - DNA, 25 bp, Saccharomyces pastorianus
atggttctgttaatatctatggtca

SEQ ID NO: 47016 - DNA, 25 bp, Saccharomyces pastorianus
gactagtataccatcagttcaccaa

SEQ ID NO: 47017 - DNA, 25 bp, Saccharomyces pastorianus
gcgagtccttcaccaattgggacga

SEQ ID NO: 47018 - DNA, 25 bp, Saccharomyces pastorianus
cattacgcatcgcaacagggcatga

SEQ ID NO: 47019 - DNA, 25 bp, Saccharomyces pastorianus
tgaaaccaagtactccttaactccg

SEQ ID NO: 47020 - DNA, 25 bp, Saccharomyces pastorianus
gaactccctgggatttgaccaagga

SEQ ID NO: 47021 - DNA, 25 bp, Saccharomyces pastorianus
acgaatctcatatcggcgaaccact

SEQ ID NO: 47022 - DNA, 25 bp, Saccharomyces pastorianus
gatggcgtaagacacgctttccaaa

SEQ ID NO: 47023 - DNA, 25 bp, Saccharomyces pastorianus
gggagattccagctcaagcctgaaa

SEQ ID NO: 47024 - DNA, 25 bp, Saccharomyces pastorianus
acgctttccaaatcgcaagacacac

SEQ ID NO: 47025 - DNA, 25 bp, Saccharomyces pastorianus
aactccgacgatgttgcattacgca

SEQ ID NO: 47026 - DNA, 25 bp, Saccharomyces pastorianus
aagacacactttgggcgagtccttc

SEQ ID NO: 47027 - DNA, 25 bp, Saccharomyces pastorianus
ttcgtcgctgaaaagaccaagttcg

SEQ ID NO: 47028 - DNA, 25 bp, Saccharomyces pastorianus
tctgggctatcggttccggtttggc

SEQ ID NO: 47029 - DNA, 25 bp, Saccharomyces pastorianus
accagtctgggctatcggttccggt

SEQ ID NO: 47030 - DNA, 25 bp, Saccharomyces pastorianus
cagtctgggctatcggttccggttt

SEQ ID NO: 47031 - DNA, 25 bp, Saccharomyces pastorianus
acaagttcgtcgctgaaaagaccaa

SEQ ID NO: 47032 - DNA, 25 bp, Saccharomyces pastorianus
gttcgtcgctgaaaagaccaagttc

SEQ ID NO: 47033 - DNA, 25 bp, Saccharomyces pastorianus
caagttcgtcgctgaaaagaccaag

SEQ ID NO: 47034 - DNA, 25 bp, Saccharomyces pastorianus
aagttcgtcgctgaaaagaccaagt

SEQ ID NO: 47035 - DNA, 25 bp, Saccharomyces pastorianus
agttcgtcgctgaaaagaccaagtt

SEQ ID NO: 47036 - DNA, 25 bp, Saccharomyces pastorianus
cgtcgctgaaaagaccaagttcgct

SEQ ID NO: 47037 - DNA, 25 bp, Saccharomyces pastorianus
ccagtctgggctatcggttccggtt

SEQ ID NO: 47038 - DNA, 25 bp, Saccharomyces pastorianus
tatacggtggttccgctaacggtag

SEQ ID NO: 47039 - DNA, 25 bp, Saccharomyces pastorianus
cggtttggctgctactccagaagat

SEQ ID NO: 47040 - DNA, 25 bp, Saccharomyces pastorianus
aaggtgtcggtgtcatcttgtgtat

SEQ ID NO: 47041 - DNA, 25 bp, Saccharomyces pastorianus
gccgttaccttcaaggacaaggctg

SEQ ID NO: 47042 - DNA, 25 bp, Saccharomyces pastorianus
tgagaatcttatacggtggttccgc

SEQ ID NO: 47043 - DNA, 25 bp, Saccharomyces pastorianus
gatcttacttccacgaagatgacaa

SEQ ID NO: 47044 - DNA, 25 bp, Saccharomyces pastorianus
catcagaaagttcttggcttccaag

SEQ ID NO: 47045 - DNA, 25 bp, Saccharomyces pastorianus
tcttggcttccaagttgggtgacaa

SEQ ID NO: 47046 - DNA, 25 bp, Saccharomyces pastorianus
gttgtcgcttacgaaccagtctggg

SEQ ID NO: 47047 - DNA, 25 bp, Saccharomyces pastorianus
catcttgtgtatcggtgaaactttg

SEQ ID NO: 47048 - DNA, 25 bp, Saccharomyces pastorianus
attcacgcttccatcagaaagttct

SEQ ID NO: 47049 - DNA, 25 bp, Saccharomyces pastorianus
gaaacatttgtcttttgctgaaaat

SEQ ID NO: 47050 - DNA, 25 bp, Saccharomyces pastorianus
aactacggaatctacaacagcatcg

SEQ ID NO: 47051 - DNA, 25 bp, Saccharomyces pastorianus
gatgagatccgttcgcaaacgatga

SEQ ID NO: 47052 - DNA, 25 bp, Saccharomyces pastorianus
aacacaacaacacagccagcgaaga

SEQ ID NO: 47053 - DNA, 25 bp, Saccharomyces pastorianus
aacttgtaaagtctgcatccacggg

SEQ ID NO: 47054 - DNA, 25 bp, Saccharomyces pastorianus
taactataacacttacactaccgcc

SEQ ID NO: 47055 - DNA, 25 bp, Saccharomyces pastorianus
cacgttaaatcccagcctaaacaca

SEQ ID NO: 47056 - DNA, 25 bp, Saccharomyces pastorianus
aacagcatcgaagaagaccacaact

SEQ ID NO: 47057 - DNA, 25 bp, Saccharomyces pastorianus
aacttccacacacaccacgttaaat

SEQ ID NO: 47058 - DNA, 25 bp, Saccharomyces pastorianus
gcatccacgggtctaaagttcagta

SEQ ID NO: 47059 - DNA, 25 bp, Saccharomyces pastorianus
atcaaaggtaattccacacatacgg

SEQ ID NO: 47060 - DNA, 25 bp, Saccharomyces pastorianus
tgaagacgggaagcattcgctggaa

SEQ ID NO: 47061 - DNA, 25 bp, Saccharomyces pastorianus
ttgaagacgggaagcattcgctgga

SEQ ID NO: 47062 - DNA, 25 bp, Saccharomyces pastorianus
cattcgctggaagaggaagaagtaa

SEQ ID NO: 47063 - DNA, 25 bp, Saccharomyces pastorianus
gaagcattcgctggaagaggaagaa

SEQ ID NO: 47064 - DNA, 25 bp, Saccharomyces pastorianus
gcattcgctggaagaggaagaagta

SEQ ID NO: 47065 - DNA, 25 bp, Saccharomyces pastorianus
aagacgggaagcattcgctggaaga

SEQ ID NO: 47066 - DNA, 25 bp, Saccharomyces pastorianus
agcattcgctggaagaggaagaagt

SEQ ID NO: 47067 - DNA, 25 bp, Saccharomyces pastorianus
agaagtaaatagacacttcattgag

SEQ ID NO: 47068 - DNA, 25 bp, Saccharomyces pastorianus
aagcattcgctggaagaggaagaag

SEQ ID NO: 47069 - DNA, 25 bp, Saccharomyces pastorianus
attgaagacgggaagcattcgctgg

SEQ ID NO: 47070 - DNA, 25 bp, Saccharomyces pastorianus
aattgaagacgggaagcattcgctg

SEQ ID NO: 47071 - DNA, 25 bp, Saccharomyces pastorianus
tttcttcgggaaggattcattagtg

SEQ ID NO: 47072 - DNA, 25 bp, Saccharomyces pastorianus
tggctcgacgttttttaagcctgta

SEQ ID NO: 47073 - DNA, 25 bp, Saccharomyces pastorianus
tttcttttcgtgtaagtgttgttgt

SEQ ID NO: 47074 - DNA, 25 bp, Saccharomyces pastorianus
ttccagttggtttgccattccagta

SEQ ID NO: 47075 - DNA, 25 bp, Saccharomyces pastorianus
tgtacccttactcacctggacagcg

SEQ ID NO: 47076 - DNA, 25 bp, Saccharomyces pastorianus
ttaggtgtgacccttggctcgacgt

SEQ ID NO: 47077 - DNA, 25 bp, Saccharomyces pastorianus
cattccagtaattccttaggtgtga

SEQ ID NO: 47078 - DNA, 25 bp, Saccharomyces pastorianus
gttgttgttgccattgttatcgtta

SEQ ID NO: 47079 - DNA, 25 bp, Saccharomyces pastorianus
tggccctttctagcttagccttttt

SEQ ID NO: 47080 - DNA, 25 bp, Saccharomyces pastorianus
gttatcgttagggagcgcgttcaaa

SEQ ID NO: 47081 - DNA, 25 bp, Saccharomyces pastorianus
gattcattagtgttgttgttgccat

SEQ ID NO: 47082 - DNA, 25 bp, Saccharomyces pastorianus
atctataacttcgttgcgggttcct

SEQ ID NO: 47083 - DNA, 25 bp, Saccharomyces pastorianus
cggccggatcgtactgcttaaatgc

SEQ ID NO: 47084 - DNA, 25 bp, Saccharomyces pastorianus
aatcaggtctctctttcatacaatg

SEQ ID NO: 47085 - DNA, 25 bp, Saccharomyces pastorianus
ggaacctttgaaatcgacagcacag

SEQ ID NO: 47086 - DNA, 25 bp, Saccharomyces pastorianus
aatgatgcggtcaatcaggtctctc

SEQ ID NO: 47087 - DNA, 25 bp, Saccharomyces pastorianus
gggcaagtgcaccagtggctaaatt

SEQ ID NO: 47088 - DNA, 25 bp, Saccharomyces pastorianus
actagatatgccatgtttcagctac

SEQ ID NO: 47089 - DNA, 25 bp, Saccharomyces pastorianus
tcttcggcgctgatgttttgcaatt

SEQ ID NO: 47090 - DNA, 25 bp, Saccharomyces pastorianus
taaggaggtttcttggttccagaag

SEQ ID NO: 47091 - DNA, 25 bp, Saccharomyces pastorianus
tgatttgcgagacgtccaagcggcc

SEQ ID NO: 47092 - DNA, 25 bp, Saccharomyces pastorianus
tgttgcgagttatctcattggccgg

SEQ ID NO: 47093 - DNA, 25 bp, Saccharomyces pastorianus
ggactcaccttacgcaggtggcgtt

SEQ ID NO: 47094 - DNA, 25 bp, Saccharomyces pastorianus
ttttcccactgattatccctttaag

SEQ ID NO: 47095 - DNA, 25 bp, Saccharomyces pastorianus
ttgtctatccattttcccactgatt

SEQ ID NO: 47096 - DNA, 25 bp, Saccharomyces pastorianus
gattatccctttaagccaccaaaag

SEQ ID NO: 47097 - DNA, 25 bp, Saccharomyces pastorianus
caaaggttcttttgtctatttgctc

SEQ ID NO: 47098 - DNA, 25 bp, Saccharomyces pastorianus
tcttttgtctatttgctccctttta

SEQ ID NO: 47099 - DNA, 25 bp, Saccharomyces pastorianus
agatgctaaccctgatgatcccttg

SEQ ID NO: 47100 - DNA, 25 bp, Saccharomyces pastorianus
tgatgatcccttggttcctgagatt

SEQ ID NO: 47101 - DNA, 25 bp, Saccharomyces pastorianus
tcccttggttcctgagattgctcaa

SEQ ID NO: 47102 - DNA, 25 bp, Saccharomyces pastorianus
taattcgagtggtaacatttgtctg

SEQ ID NO: 47103 - DNA, 25 bp, Saccharomyces pastorianus
ccttacgcaggtggcgttttcttct

SEQ ID NO: 47104 - DNA, 25 bp, Saccharomyces pastorianus
attacagaaccgtctctgttctacc

SEQ ID NO: 47105 - DNA, 25 bp, Saccharomyces pastorianus
tacagaaccgtctctgttctaccac

SEQ ID NO: 47106 - DNA, 25 bp, Saccharomyces pastorianus
ggctagatattacagaaccgtctct

SEQ ID NO: 47107 - DNA, 25 bp, Saccharomyces pastorianus
gacaaggatgctaaattcagattga

SEQ ID NO: 47108 - DNA, 25 bp, Saccharomyces pastorianus
ttggctagatattacagaaccgtct

SEQ ID NO: 47109 - DNA, 25 bp, Saccharomyces pastorianus
aaggacaaggatgctaaattcagat

SEQ ID NO: 47110 - DNA, 25 bp, Saccharomyces pastorianus
ggatgctaaattcagattgattttg

SEQ ID NO: 47111 - DNA, 25 bp, Saccharomyces pastorianus
gatattacagaaccgtctctgttct

SEQ ID NO: 47112 - DNA, 25 bp, Saccharomyces pastorianus
gaaccgtctctgttctaccaccaaa

SEQ ID NO: 47113 - DNA, 25 bp, Saccharomyces pastorianus
aacagaaaggacaaggatgctaaat

SEQ ID NO: 47114 - DNA, 25 bp, Saccharomyces pastorianus
ttacagaaccgtctctgttctacca

SEQ ID NO: 47115 - DNA, 25 bp, Saccharomyces pastorianus
gaagtctaacggtttggctccagaa

SEQ ID NO: 47116 - DNA, 25 bp, Saccharomyces pastorianus
attacagaaccgtctctgttctacc

SEQ ID NO: 47117 - DNA, 25 bp, Saccharomyces pastorianus
tacagaaccgtctctgttctaccac

SEQ ID NO: 47118 - DNA, 25 bp, Saccharomyces pastorianus
aggacaaggatgctaaattcagatt

SEQ ID NO: 47119 - DNA, 25 bp, Saccharomyces pastorianus
ggctagatattacagaaccgtctct

SEQ ID NO: 47120 - DNA, 25 bp, Saccharomyces pastorianus
ttggctagatattacagaaccgtct

SEQ ID NO: 47121 - DNA, 25 bp, Saccharomyces pastorianus
ggatgctaaattcagattgattttg

SEQ ID NO: 47122 - DNA, 25 bp, Saccharomyces pastorianus
gatattacagaaccgtctctgttct

SEQ ID NO: 47123 - DNA, 25 bp, Saccharomyces pastorianus
gaaccgtctctgttctaccaccaaa

SEQ ID NO: 47124 - DNA, 25 bp, Saccharomyces pastorianus
aagaaggctgtctctgtcagaaagc

SEQ ID NO: 47125 - DNA, 25 bp, Saccharomyces pastorianus
aacagaaaggacaaggatgctaaat

SEQ ID NO: 47126 - DNA, 25 bp, Saccharomyces pastorianus
tgtggatacccgttatgtcatgaaa

SEQ ID NO: 47127 - DNA, 25 bp, Saccharomyces pastorianus
gactgcagatttcgagtgtcttgaa

SEQ ID NO: 47128 - DNA, 25 bp, Saccharomyces pastorianus
ggtgcactcaactagctactacaat

SEQ ID NO: 47129 - DNA, 25 bp, Saccharomyces pastorianus
catagtttctatgctcagtgagtca

SEQ ID NO: 47130 - DNA, 25 bp, Saccharomyces pastorianus
gaaaacctctctgatggtctcctta

SEQ ID NO: 47131 - DNA, 25 bp, Saccharomyces pastorianus
aggatatctacagctacggttacat

SEQ ID NO: 47132 - DNA, 25 bp, Saccharomyces pastorianus
tacggttacatcactgactgcagat

SEQ ID NO: 47133 - DNA, 25 bp, Saccharomyces pastorianus
aaatgctcgttgtacttgataagac

SEQ ID NO: 47134 - DNA, 25 bp, Saccharomyces pastorianus
gtctccttacctactcgatatattg

SEQ ID NO: 47135 - DNA, 25 bp, Saccharomyces pastorianus
tattatcaatgctaggtccgggaat

SEQ ID NO: 47136 - DNA, 25 bp, Saccharomyces pastorianus
ggcacggttactttcaccaatgtca

SEQ ID NO: 47137 - DNA, 25 bp, Saccharomyces pastorianus
aaatcactccagttcgtccaattat

SEQ ID NO: 47138 - DNA, 25 bp, Saccharomyces pastorianus
atggtgggccaccatgtatctcgac

SEQ ID NO: 47139 - DNA, 25 bp, Saccharomyces pastorianus
gataacaacgcagcgggcatgttcc

SEQ ID NO: 47140 - DNA, 25 bp, Saccharomyces pastorianus
atcgattcttctaccctcaagttaa

SEQ ID NO: 47141 - DNA, 25 bp, Saccharomyces pastorianus
gttccagcgccgttatcagtaatga

SEQ ID NO: 47142 - DNA, 25 bp, Saccharomyces pastorianus
gaagccctagtaacagttccagcgc

SEQ ID NO: 47143 - DNA, 25 bp, Saccharomyces pastorianus
atctcgaccaccattatcgattcga

SEQ ID NO: 47144 - DNA, 25 bp, Saccharomyces pastorianus
gaaacgaagctcgtactttcggtat

SEQ ID NO: 47145 - DNA, 25 bp, Saccharomyces pastorianus
tgttccgtcccggtgacttggagat

SEQ ID NO: 47146 - DNA, 25 bp, Saccharomyces pastorianus
ggaaccattgagtaccattgagtct

SEQ ID NO: 47147 - DNA, 25 bp, Saccharomyces pastorianus
gtatctagcagtgaacgaagcccta

SEQ ID NO: 47148 - DNA, 25 bp, Saccharomyces pastorianus
taagctggttttctggtccttcgta

SEQ ID NO: 47149 - DNA, 25 bp, Saccharomyces pastorianus
gtatcgtcttctgcattttttctaa

SEQ ID NO: 47150 - DNA, 25 bp, Saccharomyces pastorianus
atattcaagcatgccggcctaatac

SEQ ID NO: 47151 - DNA, 25 bp, Saccharomyces pastorianus
gatcaggcccgaaattcacagcaag

SEQ ID NO: 47152 - DNA, 25 bp, Saccharomyces pastorianus
aggtttgaatcagcggagcctcatc

SEQ ID NO: 47153 - DNA, 25 bp, Saccharomyces pastorianus
aagttcgcattctttgccgaccaat

SEQ ID NO: 47154 - DNA, 25 bp, Saccharomyces pastorianus
atacgttctggcgactttcgtcaag

SEQ ID NO: 47155 - DNA, 25 bp, Saccharomyces pastorianus
ggctgtccagttacccaagaacggt

SEQ ID NO: 47156 - DNA, 25 bp, Saccharomyces pastorianus
gcacccgttttcatttggttatcca

SEQ ID NO: 47157 - DNA, 25 bp, Saccharomyces pastorianus
gagtggttctcaaacgtcttccatt

SEQ ID NO: 47158 - DNA, 25 bp, Saccharomyces pastorianus
cctccctatcgctatttggtactat

SEQ ID NO: 47159 - DNA, 25 bp, Saccharomyces pastorianus
ggaaccaatttcctagatttcatta

SEQ ID NO: 47160 - DNA, 25 bp, Saccharomyces pastorianus
ttaaaccacccgcagaaatcattga

SEQ ID NO: 47161 - DNA, 25 bp, Saccharomyces pastorianus
gaataactgtggctgacattaggaa

SEQ ID NO: 47162 - DNA, 25 bp, Saccharomyces pastorianus
aaagctgttaatgcgccaggtggat

SEQ ID NO: 47163 - DNA, 25 bp, Saccharomyces pastorianus
gaggcgtcacaaagttcatagtttt

SEQ ID NO: 47164 - DNA, 25 bp, Saccharomyces pastorianus
aatcatgtactatcgtggtcttctg

SEQ ID NO: 47165 - DNA, 25 bp, Saccharomyces pastorianus
agctcaattagcgttagagatcaat

SEQ ID NO: 47166 - DNA, 25 bp, Saccharomyces pastorianus
agtgccattaccagatgaatcatgt

SEQ ID NO: 47167 - DNA, 25 bp, Saccharomyces pastorianus
gcgccaggtggattgccaggcctaa

SEQ ID NO: 47168 - DNA, 25 bp, Saccharomyces pastorianus
gaatcttagctccaagaggtgagtt

SEQ ID NO: 47169 - DNA, 25 bp, Saccharomyces pastorianus
ggtcttctgcctagcgttaatggga

SEQ ID NO: 47170 - DNA, 25 bp, Saccharomyces pastorianus
aaaggcgtccggtttgctgaagaag

SEQ ID NO: 47171 - DNA, 25 bp, Saccharomyces pastorianus
aaatcctcgtcaagcaacgtcgaag

SEQ ID NO: 47172 - DNA, 25 bp, Saccharomyces pastorianus
gtatacgagagagccaatccagaat

SEQ ID NO: 47173 - DNA, 25 bp, Saccharomyces pastorianus
gaagtgtgcctagcaagtacttggt

SEQ ID NO: 47174 - DNA, 25 bp, Saccharomyces pastorianus
ttcgatgattgtggaaattcgcccc

SEQ ID NO: 47175 - DNA, 25 bp, Saccharomyces pastorianus
acagattcacgacagcccttgtttg

SEQ ID NO: 47176 - DNA, 25 bp, Saccharomyces pastorianus
tacttggtcaccgaatgtatacgag

SEQ ID NO: 47177 - DNA, 25 bp, Saccharomyces pastorianus
tccagaatttatcatgaatcgccat

SEQ ID NO: 47178 - DNA, 25 bp, Saccharomyces pastorianus
gtacgataagctcaccaatggatat

SEQ ID NO: 47179 - DNA, 25 bp, Saccharomyces pastorianus
gtcgaagctgtatcaaaaccatcca

SEQ ID NO: 47180 - DNA, 25 bp, Saccharomyces pastorianus
gacagcccttgtttggtacgataag

SEQ ID NO: 47181 - DNA, 25 bp, Saccharomyces pastorianus
atagcgtcatcttctccaatatcca

SEQ ID NO: 47182 - DNA, 25 bp, Saccharomyces pastorianus
taaaaccgtcaccatatcttacagc

SEQ ID NO: 47183 - DNA, 25 bp, Saccharomyces pastorianus
aagttggaccctgacgatgatatcg

SEQ ID NO: 47184 - DNA, 25 bp, Saccharomyces pastorianus
gttcagttccctcgacgacgaaaag

SEQ ID NO: 47185 - DNA, 25 bp, Saccharomyces pastorianus
gcttcgttagaaaatcttcccgcca

SEQ ID NO: 47186 - DNA, 25 bp, Saccharomyces pastorianus
aatgccgtcactgaaactcacaact

SEQ ID NO: 47187 - DNA, 25 bp, Saccharomyces pastorianus
gaagccaagctacctacaaagccag

SEQ ID NO: 47188 - DNA, 25 bp, Saccharomyces pastorianus
attttcctttcgctttggccagaag

SEQ ID NO: 47189 - DNA, 25 bp, Saccharomyces pastorianus
agtttcctctgctccgaacatggaa

SEQ ID NO: 47190 - DNA, 25 bp, Saccharomyces pastorianus
ttacagcttccaaaatgccgtcact

SEQ ID NO: 47191 - DNA, 25 bp, Saccharomyces pastorianus
tgaccattttgttgagcttcccgac

SEQ ID NO: 47192 - DNA, 25 bp, Saccharomyces pastorianus
acaccattgatcaaggtcaccggga

SEQ ID NO: 47193 - DNA, 25 bp, Saccharomyces pastorianus
gaaagacgctgacagcgaatctgaa

SEQ ID NO: 47194 - DNA, 25 bp, Saccharomyces pastorianus
agcgacgccagacttactgcctggg

SEQ ID NO: 47195 - DNA, 25 bp, Saccharomyces pastorianus
atgccaagttactaaaggttgcctt

SEQ ID NO: 47196 - DNA, 25 bp, Saccharomyces pastorianus
ttctccatgaggaagtggccgggaa

SEQ ID NO: 47197 - DNA, 25 bp, Saccharomyces pastorianus
gaacaactgcgcaaactggctgaaa

SEQ ID NO: 47198 - DNA, 25 bp, Saccharomyces pastorianus
gtcaccgggatattccaagaccttg

SEQ ID NO: 47199 - DNA, 25 bp, Saccharomyces pastorianus
gattacaacaccagcaaagtcttga

SEQ ID NO: 47200 - DNA, 25 bp, Saccharomyces pastorianus
gcaaactggctgaaagcgcaaaaga

SEQ ID NO: 47201 - DNA, 25 bp, Saccharomyces pastorianus
ttccaagaccttgttgctgattaca

SEQ ID NO: 47202 - DNA, 25 bp, Saccharomyces pastorianus
agaagacctattcagcgacgccaga

SEQ ID NO: 47203 - DNA, 25 bp, Saccharomyces pastorianus
gaaaggtctgtactactccatgtgg

SEQ ID NO: 47204 - DNA, 25 bp, Saccharomyces pastorianus
aaatcagccattgatccagggtcac

SEQ ID NO: 47205 - DNA, 25 bp, Saccharomyces pastorianus
gaccacagcaacgtttggccagtga

SEQ ID NO: 47206 - DNA, 25 bp, Saccharomyces pastorianus
actccatgtggtttagtgatcgtcc

SEQ ID NO: 47207 - DNA, 25 bp, Saccharomyces pastorianus
tagtgatcgtcctagaccacagcaa

SEQ ID NO: 47208 - DNA, 25 bp, Saccharomyces pastorianus
ggaagaacaagactggcgccaaact

SEQ ID NO: 47209 - DNA, 25 bp, Saccharomyces pastorianus
agacgacgaggatggcgatgatcac

SEQ ID NO: 47210 - DNA, 25 bp, Saccharomyces pastorianus
gccaaactgggctgcaaagcgcaca

SEQ ID NO: 47211 - DNA, 25 bp, Saccharomyces pastorianus
aggttatgtgtttcgagtggttcaa

SEQ ID NO: 47212 - DNA, 25 bp, Saccharomyces pastorianus
gaagagtgttgttcaaccaactgaa

SEQ ID NO: 47213 - DNA, 25 bp, Saccharomyces pastorianus
gacaaagcgttcctcaagttcagta

SEQ ID NO: 47214 - DNA, 25 bp, Saccharomyces pastorianus
ttggcacaaactggtacgattactg

SEQ ID NO: 47215 - DNA, 25 bp, Saccharomyces pastorianus
aagagttgtccggtgcagacccaaa

SEQ ID NO: 47216 - DNA, 25 bp, Saccharomyces pastorianus
tttccctcagctgtacatgaacggg

SEQ ID NO: 47217 - DNA, 25 bp, Saccharomyces pastorianus
ggttaatgctgctccagtaatgcta

SEQ ID NO: 47218 - DNA, 25 bp, Saccharomyces pastorianus
gggaagcccctcagaaccaaaatgt

SEQ ID NO: 47219 - DNA, 25 bp, Saccharomyces pastorianus
gtaagattcggtttcttcgatatat

SEQ ID NO: 47220 - DNA, 25 bp, Saccharomyces pastorianus
tggcgtctcctttttatctattgat

SEQ ID NO: 47221 - DNA, 25 bp, Saccharomyces pastorianus
gtaatgaaccttccaacactggcgt

SEQ ID NO: 47222 - DNA, 25 bp, Saccharomyces pastorianus
ggttttcaagacagctcgtgggcat

SEQ ID NO: 47223 - DNA, 25 bp, Saccharomyces pastorianus
agagctcttcgaaatctcagctgtt

SEQ ID NO: 47224 - DNA, 25 bp, Saccharomyces pastorianus
ttcagggtggtctagatatcatcaa

SEQ ID NO: 47225 - DNA, 25 bp, Saccharomyces pastorianus
gttttcgatggctcatgtcagtcaa

SEQ ID NO: 47226 - DNA, 25 bp, Saccharomyces pastorianus
tagcagattgcactggtctaccgat

SEQ ID NO: 47227 - DNA, 25 bp, Saccharomyces pastorianus
gaggcctttgatctggctaatgaaa

SEQ ID NO: 47228 - DNA, 25 bp, Saccharomyces pastorianus
taaatagccatatctccccaatagt

SEQ ID NO: 47229 - DNA, 25 bp, Saccharomyces pastorianus
gttgaacgaccattacatgccgtgt

SEQ ID NO: 47230 - DNA, 25 bp, Saccharomyces pastorianus
gtctgctatacttggagctgctgca

SEQ ID NO: 47231 - DNA, 25 bp, Saccharomyces pastorianus
aacacatcccgatagaatccttctt

SEQ ID NO: 47232 - DNA, 25 bp, Saccharomyces pastorianus
atgatgtttcacctctttatccaac

SEQ ID NO: 47233 - DNA, 25 bp, Saccharomyces pastorianus
aggcgcaatcgtacagatcttctat

SEQ ID NO: 47234 - DNA, 25 bp, Saccharomyces pastorianus
ggatacttcagcttccacagaaaca

SEQ ID NO: 47235 - DNA, 25 bp, Saccharomyces pastorianus
acatgccgtgtcctctgttaaaaat

SEQ ID NO: 47236 - DNA, 25 bp, Saccharomyces pastorianus
caaactgaagaaccgccttcaacaa

SEQ ID NO: 47237 - DNA, 25 bp, Saccharomyces pastorianus
acagcgagaaagcaggtgcagcact

SEQ ID NO: 47238 - DNA, 25 bp, Saccharomyces pastorianus
tgagacgactgatcttgatgggaat

SEQ ID NO: 47239 - DNA, 25 bp, Saccharomyces pastorianus
aagcccagaaacatcttattatcaa

SEQ ID NO: 47240 - DNA, 25 bp, Saccharomyces pastorianus
gtgcagcactgcagacagaatcaca

SEQ ID NO: 47241 - DNA, 25 bp, Saccharomyces pastorianus
tatgaacctagcacgttgactccag

SEQ ID NO: 47242 - DNA, 25 bp, Saccharomyces pastorianus
gttgactccagtagtaaataccaca

SEQ ID NO: 47243 - DNA, 25 bp, Saccharomyces pastorianus
ttgcgcatggattcttcagaaggcg

SEQ ID NO: 47244 - DNA, 25 bp, Saccharomyces pastorianus
gaagcgtagaaatcacaagcccaga

SEQ ID NO: 47245 - DNA, 25 bp, Saccharomyces pastorianus
taggcaatcagggtcatggtgacat

SEQ ID NO: 47246 - DNA, 25 bp, Saccharomyces pastorianus
aatagaatcaaccagtgagacgact

SEQ ID NO: 47247 - DNA, 25 bp, Saccharomyces pastorianus
acgtggattcatatttgaacttgga

SEQ ID NO: 47248 - DNA, 25 bp, Saccharomyces pastorianus
aaaggaaatcatctccgcagaggag

SEQ ID NO: 47249 - DNA, 25 bp, Saccharomyces pastorianus
gcagagactctgcaacaaataagtg

SEQ ID NO: 47250 - DNA, 25 bp, Saccharomyces pastorianus
gatcgtttgctgatactaccattaa

SEQ ID NO: 47251 - DNA, 25 bp, Saccharomyces pastorianus
gacgacgaaggtcactcattaccat

SEQ ID NO: 47252 - DNA, 25 bp, Saccharomyces pastorianus
atcaccaagggaatcgagagaatct

SEQ ID NO: 47253 - DNA, 25 bp, Saccharomyces pastorianus
aagttgcgttataaaggcaccttgt

SEQ ID NO: 47254 - DNA, 25 bp, Saccharomyces pastorianus
taaaggcaccttgtttgacgacgaa

SEQ ID NO: 47255 - DNA, 25 bp, Saccharomyces pastorianus
cccatttttctcgaatctctgacaa

SEQ ID NO: 47256 - DNA, 25 bp, Saccharomyces pastorianus
tcattaccatccgaatcagccaaaa

SEQ ID NO: 47257 - DNA, 25 bp, Saccharomyces pastorianus
gaaacacccatttttctcgaatctc

SEQ ID NO: 47258 - DNA, 25 bp, Saccharomyces pastorianus
gctgcactcgtttttattttcgcat

SEQ ID NO: 47259 - DNA, 25 bp, Saccharomyces pastorianus
atttaatccctgttgttgcttctct

SEQ ID NO: 47260 - DNA, 25 bp, Saccharomyces pastorianus
ggtaatggcgacacatctgatgaat

SEQ ID NO: 47261 - DNA, 25 bp, Saccharomyces pastorianus
gttgcttctcttttcttatcatttg

SEQ ID NO: 47262 - DNA, 25 bp, Saccharomyces pastorianus
tttttgtcacctcaagcactcttga

SEQ ID NO: 47263 - DNA, 25 bp, Saccharomyces pastorianus
ttcgcatttcgctaatacaagtcat

SEQ ID NO: 47264 - DNA, 25 bp, Saccharomyces pastorianus
gtggttactgccattaaagagcact

SEQ ID NO: 47265 - DNA, 25 bp, Saccharomyces pastorianus
gagggtaaatatccctatgttttat

SEQ ID NO: 47266 - DNA, 25 bp, Saccharomyces pastorianus
agaatcccgatttttgtcacctcaa

SEQ ID NO: 47267 - DNA, 25 bp, Saccharomyces pastorianus
agagggaagacgctgcactcgtttt

SEQ ID NO: 47268 - DNA, 25 bp, Saccharomyces pastorianus
gtgtagagactatcgttcaagtttt

SEQ ID NO: 47269 - DNA, 25 bp, Saccharomyces pastorianus
taataacgaatatgtcaatgacgct

SEQ ID NO: 47270 - DNA, 25 bp, Saccharomyces pastorianus
gtacaaaaacagtttgatctaacgg

SEQ ID NO: 47271 - DNA, 25 bp, Saccharomyces pastorianus
tgtcaatgacgctaacataggaaat

SEQ ID NO: 47272 - DNA, 25 bp, Saccharomyces pastorianus
atatgtcaatgacgctaacatagga

SEQ ID NO: 47273 - DNA, 25 bp, Saccharomyces pastorianus
acgaatatgtcaatgacgctaacat

SEQ ID NO: 47274 - DNA, 25 bp, Saccharomyces pastorianus
gaatatgtcaatgacgctaacatag

SEQ ID NO: 47275 - DNA, 25 bp, Saccharomyces pastorianus
acagtttgatctaacggaacaaaat

SEQ ID NO: 47276 - DNA, 25 bp, Saccharomyces pastorianus
tgacgctaacataggaaatgataac

SEQ ID NO: 47277 - DNA, 25 bp, Saccharomyces pastorianus
caatgacgctaacataggaaatgat

SEQ ID NO: 47278 - DNA, 25 bp, Saccharomyces pastorianus
gtcaatgacgctaacataggaaatg

SEQ ID NO: 47279 - DNA, 25 bp, Saccharomyces pastorianus
taacgaatatgtcaatgacgctaac

SEQ ID NO: 47280 - DNA, 25 bp, Saccharomyces pastorianus
gcacagataaagttggcctgctttc

SEQ ID NO: 47281 - DNA, 25 bp, Saccharomyces pastorianus
catacgggcttgacctggaatgcga

SEQ ID NO: 47282 - DNA, 25 bp, Saccharomyces pastorianus
agaacgccgaggacgatgagaacgc

SEQ ID NO: 47283 - DNA, 25 bp, Saccharomyces pastorianus
tggcctgctttcattagtggaaatt

SEQ ID NO: 47284 - DNA, 25 bp, Saccharomyces pastorianus
aagacaacacggcacacacaattag

SEQ ID NO: 47285 - DNA, 25 bp, Saccharomyces pastorianus
caagagcctgctgcgctatcattag

SEQ ID NO: 47286 - DNA, 25 bp, Saccharomyces pastorianus
tatcattagcgctcgagaacgccga

SEQ ID NO: 47287 - DNA, 25 bp, Saccharomyces pastorianus
gcaattcccgttatagagtctctat

SEQ ID NO: 47288 - DNA, 25 bp, Saccharomyces pastorianus
ttagcgatcaacaagagcctgctgc

SEQ ID NO: 47289 - DNA, 25 bp, Saccharomyces pastorianus
gatgagaacgctgcaattcccgtta

SEQ ID NO: 47290 - DNA, 25 bp, Saccharomyces pastorianus
gagtaataacgctaacagcacagat

SEQ ID NO: 47291 - DNA, 25 bp, Saccharomyces pastorianus
aaagaggaccatgacgattacgata

SEQ ID NO: 47292 - DNA, 25 bp, Saccharomyces pastorianus
agggcggtctgcaacagctcataaa

SEQ ID NO: 47293 - DNA, 25 bp, Saccharomyces pastorianus
ttcttccgaggatgagcacgagttt

SEQ ID NO: 47294 - DNA, 25 bp, Saccharomyces pastorianus
gcaagaagctccagagcgccttttt

SEQ ID NO: 47295 - DNA, 25 bp, Saccharomyces pastorianus
gatcagctcagaaagctctcgcaga

SEQ ID NO: 47296 - DNA, 25 bp, Saccharomyces pastorianus
tcggctacaatgcattgcccaagat

SEQ ID NO: 47297 - DNA, 25 bp, Saccharomyces pastorianus
tttttccaacagcattcttccgagg

SEQ ID NO: 47298 - DNA, 25 bp, Saccharomyces pastorianus
aaaagctttgtgtttgctctcgaca

SEQ ID NO: 47299 - DNA, 25 bp, Saccharomyces pastorianus
tgctctcgacactgcaaaccagaat

SEQ ID NO: 47300 - DNA, 25 bp, Saccharomyces pastorianus
tcgcagatctctcgcaatcgtaata

SEQ ID NO: 47301 - DNA, 25 bp, Saccharomyces pastorianus
agaagtatggttctgtcctcggcta

SEQ ID NO: 47302 - DNA, 25 bp, Saccharomyces pastorianus
gaacaccgtgaccaggacgatacat

SEQ ID NO: 47303 - DNA, 25 bp, Saccharomyces pastorianus
tgctccttgggatgcaatttggtac

SEQ ID NO: 47304 - DNA, 25 bp, Saccharomyces pastorianus
cacatgctcaaccttcatctttaaa

SEQ ID NO: 47305 - DNA, 25 bp, Saccharomyces pastorianus
atcggattcaccattctactttagt

SEQ ID NO: 47306 - DNA, 25 bp, Saccharomyces pastorianus
acaagattttatcggccatgccaaa

SEQ ID NO: 47307 - DNA, 25 bp, Saccharomyces pastorianus
gaacataccatttagccggaccaat

SEQ ID NO: 47308 - DNA, 25 bp, Saccharomyces pastorianus
gggctacgagtgttcgttgacacat

SEQ ID NO: 47309 - DNA, 25 bp, Saccharomyces pastorianus
agtagtcgctggattaggctccttg

SEQ ID NO: 47310 - DNA, 25 bp, Saccharomyces pastorianus
gaaggtatgctgtccctagcgaaga

SEQ ID NO: 47311 - DNA, 25 bp, Saccharomyces pastorianus
agatgaatccaaacaccaccggcta

SEQ ID NO: 47312 - DNA, 25 bp, Saccharomyces pastorianus
gctcaaggcccaccagtagatacaa

SEQ ID NO: 47313 - DNA, 25 bp, Saccharomyces pastorianus
atgctgatgctgacgtggatatgac

SEQ ID NO: 47314 - DNA, 25 bp, Saccharomyces pastorianus
aatccaggacttactgttccccaga

SEQ ID NO: 47315 - DNA, 25 bp, Saccharomyces pastorianus
aaatttggcgcgtgaagtgccccag

SEQ ID NO: 47316 - DNA, 25 bp, Saccharomyces pastorianus
ggtgccactgtgtttgttaaccact

SEQ ID NO: 47317 - DNA, 25 bp, Saccharomyces pastorianus
cggcgacactgataccaatgctgat

SEQ ID NO: 47318 - DNA, 25 bp, Saccharomyces pastorianus
ttggaccacatagggcaatcagctt

SEQ ID NO: 47319 - DNA, 25 bp, Saccharomyces pastorianus
acgttttgagcgcattggaccacat

SEQ ID NO: 47320 - DNA, 25 bp, Saccharomyces pastorianus
gaagaataccaagctgccgttgaat

SEQ ID NO: 47321 - DNA, 25 bp, Saccharomyces pastorianus
atatgggaaccacacctgcagaaga

SEQ ID NO: 47322 - DNA, 25 bp, Saccharomyces pastorianus
aagacgcctcattagcgttgcagcg

SEQ ID NO: 47323 - DNA, 25 bp, Saccharomyces pastorianus
agacgctacgatacgaagccctgag

SEQ ID NO: 47324 - DNA, 25 bp, Saccharomyces pastorianus
tagacaagatactcacacgcctttg

SEQ ID NO: 47325 - DNA, 25 bp, Saccharomyces pastorianus
tttggctagcataatcacagatcct

SEQ ID NO: 47326 - DNA, 25 bp, Saccharomyces pastorianus
gtgtctaccacaaagtcagatcttg

SEQ ID NO: 47327 - DNA, 25 bp, Saccharomyces pastorianus
agatccaactagagcgtatcaccca

SEQ ID NO: 47328 - DNA, 25 bp, Saccharomyces pastorianus
gaaaagcttgccgagatacccgaaa

SEQ ID NO: 47329 - DNA, 25 bp, Saccharomyces pastorianus
ttgaaactgtagaaccaacaccggt

SEQ ID NO: 47330 - DNA, 25 bp, Saccharomyces pastorianus
gtaccgtttagaattcgtcgatgat

SEQ ID NO: 47331 - DNA, 25 bp, Saccharomyces pastorianus
cgtatcacccaatgctttctatata

SEQ ID NO: 47332 - DNA, 25 bp, Saccharomyces pastorianus
tcttctctctagacagtactgggca

SEQ ID NO: 47333 - DNA, 25 bp, Saccharomyces pastorianus
tcacacgcctttgtcttcaagaaat

SEQ ID NO: 47334 - DNA, 25 bp, Saccharomyces pastorianus
ggaaatacttgatacggacgtcttg

SEQ ID NO: 47335 - DNA, 25 bp, Saccharomyces pastorianus
tattcgggaagcgtctttaggccag

SEQ ID NO: 47336 - DNA, 25 bp, Saccharomyces pastorianus
ggatccatacgagagcaccaggcaa

SEQ ID NO: 47337 - DNA, 25 bp, Saccharomyces pastorianus
gactatatcattcagcatggatcca

SEQ ID NO: 47338 - DNA, 25 bp, Saccharomyces pastorianus
atacgtctcgggtggtcaactgcta

SEQ ID NO: 47339 - DNA, 25 bp, Saccharomyces pastorianus
gccagaggtattgcaagtgccttaa

SEQ ID NO: 47340 - DNA, 25 bp, Saccharomyces pastorianus
tttaggccagatcttgtaccatcca

SEQ ID NO: 47341 - DNA, 25 bp, Saccharomyces pastorianus
gtaggcttttcgaaatgtgcacact

SEQ ID NO: 47342 - DNA, 25 bp, Saccharomyces pastorianus
ttttgggctgtctaatctttacgat

SEQ ID NO: 47343 - DNA, 25 bp, Saccharomyces pastorianus
agggcatgcctaaacagttccatag

SEQ ID NO: 47344 - DNA, 25 bp, Saccharomyces pastorianus
agagctaccaaagccttcttgcata

SEQ ID NO: 47345 - DNA, 25 bp, Saccharomyces pastorianus
actagccaagcaccattataccaat

SEQ ID NO: 47346 - DNA, 25 bp, Saccharomyces pastorianus
gaaacatattctactgacttgcgta

SEQ ID NO: 47347 - DNA, 25 bp, Saccharomyces pastorianus
gagattccagctaacatcggagacg

SEQ ID NO: 47348 - DNA, 25 bp, Saccharomyces pastorianus
ggaacaccaacctactaacagcact

SEQ ID NO: 47349 - DNA, 25 bp, Saccharomyces pastorianus
gatatcaggtcaatttcgaacgcaa

SEQ ID NO: 47350 - DNA, 25 bp, Saccharomyces pastorianus
gagttgcctgcaaacatagcacaat

SEQ ID NO: 47351 - DNA, 25 bp, Saccharomyces pastorianus
catcggagacgaccctgtgaagata

SEQ ID NO: 47352 - DNA, 25 bp, Saccharomyces pastorianus
caagtgaattctctacagcagcgga

SEQ ID NO: 47353 - DNA, 25 bp, Saccharomyces pastorianus
aaacagctccgcgtaatcacgtaag

SEQ ID NO: 47354 - DNA, 25 bp, Saccharomyces pastorianus
aggaagcatttgaacgactgattaa

SEQ ID NO: 47355 - DNA, 25 bp, Saccharomyces pastorianus
atcccagattctgagattccagcta

SEQ ID NO: 47356 - DNA, 25 bp, Saccharomyces pastorianus
aatcacgtaagagagttgcctgcaa

SEQ ID NO: 47357 - DNA, 25 bp, Saccharomyces pastorianus
ggcatgattcccaacgtggcaactg

SEQ ID NO: 47358 - DNA, 25 bp, Saccharomyces pastorianus
caacgtggcaactgtgcagccttct

SEQ ID NO: 47359 - DNA, 25 bp, Saccharomyces pastorianus
agcaacttcgatgaccagctgccag

SEQ ID NO: 47360 - DNA, 25 bp, Saccharomyces pastorianus
gagactgcctatcagatgccgagca

SEQ ID NO: 47361 - DNA, 25 bp, Saccharomyces pastorianus
ttagcgcacgagctcggcatgattc

SEQ ID NO: 47362 - DNA, 25 bp, Saccharomyces pastorianus
acgaaagcacattcagcgctgcgtc

SEQ ID NO: 47363 - DNA, 25 bp, Saccharomyces pastorianus
acgacatagacttcgagactgccta

SEQ ID NO: 47364 - DNA, 25 bp, Saccharomyces pastorianus
agctgccagcacacgtgcacgaaag

SEQ ID NO: 47365 - DNA, 25 bp, Saccharomyces pastorianus
gattcccaacgtggcaactgtgcag

SEQ ID NO: 47366 - DNA, 25 bp, Saccharomyces pastorianus
gatgccgagcagcaacttcgatgac

SEQ ID NO: 47367 - DNA, 25 bp, Saccharomyces pastorianus
agatttggataacgacatagacttc

SEQ ID NO: 47368 - DNA, 25 bp, Saccharomyces pastorianus
gaagtattttggcacgagacccctt

SEQ ID NO: 47369 - DNA, 25 bp, Saccharomyces pastorianus
gcggcatatagcagagttccctcat

SEQ ID NO: 47370 - DNA, 25 bp, Saccharomyces pastorianus
cataacctgtttttggacaatccgg

SEQ ID NO: 47371 - DNA, 25 bp, Saccharomyces pastorianus
tggaagtaccttcttctggccataa

SEQ ID NO: 47372 - DNA, 25 bp, Saccharomyces pastorianus
ggccctttcggagccaaagtatgtt

SEQ ID NO: 47373 - DNA, 25 bp, Saccharomyces pastorianus
aatggtggcaggctcatggtcaaaa

SEQ ID NO: 47374 - DNA, 25 bp, Saccharomyces pastorianus
ggaatcattcaaccagtctatagtg

SEQ ID NO: 47375 - DNA, 25 bp, Saccharomyces pastorianus
cagagttccctcattagcatttaag

SEQ ID NO: 47376 - DNA, 25 bp, Saccharomyces pastorianus
atatctttgagctgttctacggtaa

SEQ ID NO: 47377 - DNA, 25 bp, Saccharomyces pastorianus
tactggattccttaaaccacttgaa

SEQ ID NO: 47378 - DNA, 25 bp, Saccharomyces pastorianus
gaggtcacaacagacatcttcaaag

SEQ ID NO: 47379 - DNA, 25 bp, Saccharomyces pastorianus
aggcaagtatacaaacatccacgtt

SEQ ID NO: 47380 - DNA, 25 bp, Saccharomyces pastorianus
atttagacctcaataccaacaacgg

SEQ ID NO: 47381 - DNA, 25 bp, Saccharomyces pastorianus
taccaacaacggctctggcattaca

SEQ ID NO: 47382 - DNA, 25 bp, Saccharomyces pastorianus
gccagctagtgcgttatcttcaata

SEQ ID NO: 47383 - DNA, 25 bp, Saccharomyces pastorianus
gttactgatacacggctatgccgct

SEQ ID NO: 47384 - DNA, 25 bp, Saccharomyces pastorianus
ggtctagccatttgaatggtccagc

SEQ ID NO: 47385 - DNA, 25 bp, Saccharomyces pastorianus
tccagcaaagacgtacgagcggtta

SEQ ID NO: 47386 - DNA, 25 bp, Saccharomyces pastorianus
ttccggaattattcgggactgtcca

SEQ ID NO: 47387 - DNA, 25 bp, Saccharomyces pastorianus
atattccatagacttgccagctagt

SEQ ID NO: 47388 - DNA, 25 bp, Saccharomyces pastorianus
gactgtccaaacacttccaaaactt

SEQ ID NO: 47389 - DNA, 25 bp, Saccharomyces pastorianus
ttcttcgatgtcttacttccggaat

SEQ ID NO: 47390 - DNA, 25 bp, Saccharomyces pastorianus
ggtattcgcaatgccttggtcagca

SEQ ID NO: 47391 - DNA, 25 bp, Saccharomyces pastorianus
tgtcagttgtgtacccgcagataaa

SEQ ID NO: 47392 - DNA, 25 bp, Saccharomyces pastorianus
aagcgtcactcctgtcatgacaata

SEQ ID NO: 47393 - DNA, 25 bp, Saccharomyces pastorianus
taaagggtgctcacgctgcattcgt

SEQ ID NO: 47394 - DNA, 25 bp, Saccharomyces pastorianus
gtgacaacactgactggctaggtat

SEQ ID NO: 47395 - DNA, 25 bp, Saccharomyces pastorianus
aatccctaccatctgagttcaacat

SEQ ID NO: 47396 - DNA, 25 bp, Saccharomyces pastorianus
tgcattcgtgccaaccttgttagaa

SEQ ID NO: 47397 - DNA, 25 bp, Saccharomyces pastorianus
gttgtccctggtgcacaaatgctag

SEQ ID NO: 47398 - DNA, 25 bp, Saccharomyces pastorianus
agagctgctctttacgctttacaca

SEQ ID NO: 47399 - DNA, 25 bp, Saccharomyces pastorianus
tggtcagcaatggtgttcccgaatc

SEQ ID NO: 47400 - DNA, 25 bp, Saccharomyces pastorianus
cgccgctaaagtcattggtgccgta

SEQ ID NO: 47401 - DNA, 25 bp, Saccharomyces pastorianus
agttgattccttacgtgctaacggt

SEQ ID NO: 47402 - DNA, 25 bp, Saccharomyces pastorianus
tgaaagtgacgcctctagtgctact

SEQ ID NO: 47403 - DNA, 25 bp, Saccharomyces pastorianus
actgattcagttttccaaggtggca

SEQ ID NO: 47404 - DNA, 25 bp, Saccharomyces pastorianus
gcagaatcgaattggccgctacagt

SEQ ID NO: 47405 - DNA, 25 bp, Saccharomyces pastorianus
tatccactagcctttgctgcaatga

SEQ ID NO: 47406 - DNA, 25 bp, Saccharomyces pastorianus
tctctcccaatcaaggtgtacactg

SEQ ID NO: 47407 - DNA, 25 bp, Saccharomyces pastorianus
tttcctctcaatatgtgtcctctat

SEQ ID NO: 47408 - DNA, 25 bp, Saccharomyces pastorianus
tgaatagcgaaggttctctcccaat

SEQ ID NO: 47409 - DNA, 25 bp, Saccharomyces pastorianus
gtcctctattttaatgtgcgctcca

SEQ ID NO: 47410 - DNA, 25 bp, Saccharomyces pastorianus
agggccattatgtgaatccgtcaga

SEQ ID NO: 47411 - DNA, 25 bp, Saccharomyces pastorianus
aagacctatcgctcctttagttgat

SEQ ID NO: 47412 - DNA, 25 bp, Saccharomyces pastorianus
gaggcgatggctccttaacaagaat

SEQ ID NO: 47413 - DNA, 25 bp, Saccharomyces pastorianus
gcaacagcaaaatctccctttacaa

SEQ ID NO: 47414 - DNA, 25 bp, Saccharomyces pastorianus
caaagtctggatcgacctcaattca

SEQ ID NO: 47415 - DNA, 25 bp, Saccharomyces pastorianus
tataatatttcctacatcgccgact

SEQ ID NO: 47416 - DNA, 25 bp, Saccharomyces pastorianus
taacaggatacagtcgccggaatgc

SEQ ID NO: 47417 - DNA, 25 bp, Saccharomyces pastorianus
aaaaccacctatgagactatcgcct

SEQ ID NO: 47418 - DNA, 25 bp, Saccharomyces pastorianus
gaagattcgaagctccaaccacata

SEQ ID NO: 47419 - DNA, 25 bp, Saccharomyces pastorianus
tggcacgaaacatagcacacagctc

SEQ ID NO: 47420 - DNA, 25 bp, Saccharomyces pastorianus
ggatgagctctctgctggtaaatta

SEQ ID NO: 47421 - DNA, 25 bp, Saccharomyces pastorianus
aagaacggtcttatgtcacctgaaa

SEQ ID NO: 47422 - DNA, 25 bp, Saccharomyces pastorianus
actgaattccatgcttgcaacggaa

SEQ ID NO: 47423 - DNA, 25 bp, Saccharomyces pastorianus
gaaaatcgctttggaagttggccgt

SEQ ID NO: 47424 - DNA, 25 bp, Saccharomyces pastorianus
ttaaaatgtgctccggtttgaaact

SEQ ID NO: 47425 - DNA, 25 bp, Saccharomyces pastorianus
ggccttaaaatgtgctccggtttga

SEQ ID NO: 47426 - DNA, 25 bp, Saccharomyces pastorianus
ggccgttaaagatggcaaaattatg

SEQ ID NO: 47427 - DNA, 25 bp, Saccharomyces pastorianus
atgacaagatcattgacgcctctaa

SEQ ID NO: 47428 - DNA, 25 bp, Saccharomyces pastorianus
atcattgacgcctctaatccatcag

SEQ ID NO: 47429 - DNA, 25 bp, Saccharomyces pastorianus
acaagatcattgacgcctctaatcc

SEQ ID NO: 47430 - DNA, 25 bp, Saccharomyces pastorianus
tcgctttggaagttggccgttaaag

SEQ ID NO: 47431 - DNA, 25 bp, Saccharomyces pastorianus
cctctaatccatcaggccttaaaat

SEQ ID NO: 47432 - DNA, 25 bp, Saccharomyces pastorianus
tcaggccttaaaatgtgctccggtt

SEQ ID NO: 47433 - DNA, 25 bp, Saccharomyces pastorianus
tgaaactttacctaagaaaatcgct

SEQ ID NO: 47434 - DNA, 25 bp, Saccharomyces pastorianus
gtgcagtattagctataacccgata

SEQ ID NO: 47435 - DNA, 25 bp, Saccharomyces pastorianus
gaccatttctggataactgcgcaag

SEQ ID NO: 47436 - DNA, 25 bp, Saccharomyces pastorianus
gtcttttactgacggatctgtccaa

SEQ ID NO: 47437 - DNA, 25 bp, Saccharomyces pastorianus
gccttttggcccgattgatttgagc

SEQ ID NO: 47438 - DNA, 25 bp, Saccharomyces pastorianus
acttcctgcgtgtatattgctttgt

SEQ ID NO: 47439 - DNA, 25 bp, Saccharomyces pastorianus
agcgtgttcagctttaccgttcgaa

SEQ ID NO: 47440 - DNA, 25 bp, Saccharomyces pastorianus
ttagataccacacaagccaaagcag

SEQ ID NO: 47441 - DNA, 25 bp, Saccharomyces pastorianus
aactgcgcaagagagctgatctttc

SEQ ID NO: 47442 - DNA, 25 bp, Saccharomyces pastorianus
catttgctaagtacgccttttggcc

SEQ ID NO: 47443 - DNA, 25 bp, Saccharomyces pastorianus
aaactcctgaacagccagtaccgaa

SEQ ID NO: 47444 - DNA, 25 bp, Saccharomyces pastorianus
gtttccctgatactatagcgtgttc

SEQ ID NO: 47445 - DNA, 25 bp, Saccharomyces pastorianus
aagtattttcttcacatagcgacat

SEQ ID NO: 47446 - DNA, 25 bp, Saccharomyces pastorianus
tttccgctgaggctcctagtgaaga

SEQ ID NO: 47447 - DNA, 25 bp, Saccharomyces pastorianus
aaaacggcagcatctgggcaagaac

SEQ ID NO: 47448 - DNA, 25 bp, Saccharomyces pastorianus
tcaataccccggtgagacgacggag

SEQ ID NO: 47449 - DNA, 25 bp, Saccharomyces pastorianus
aatgggagtccaaagtttccgctga

SEQ ID NO: 47450 - DNA, 25 bp, Saccharomyces pastorianus
gcatctggaaaatcgccactggtct

SEQ ID NO: 47451 - DNA, 25 bp, Saccharomyces pastorianus
caaaccttgcgttttttgagatcgc

SEQ ID NO: 47452 - DNA, 25 bp, Saccharomyces pastorianus
gatcgcagtacctatttgacttcaa

SEQ ID NO: 47453 - DNA, 25 bp, Saccharomyces pastorianus
aggtgtatacgaagcggcccattca

SEQ ID NO: 47454 - DNA, 25 bp, Saccharomyces pastorianus
agttgcagatatcccttctcaatac

SEQ ID NO: 47455 - DNA, 25 bp, Saccharomyces pastorianus
agatgacagttctctagcggatgga

SEQ ID NO: 47456 - DNA, 25 bp, Saccharomyces pastorianus
agaaaggtctattcacctggccgtt

SEQ ID NO: 47457 - DNA, 25 bp, Saccharomyces pastorianus
taaggtttacgagcctgctgaggat

SEQ ID NO: 47458 - DNA, 25 bp, Saccharomyces pastorianus
gaagcgaccctagatacggcaaagt

SEQ ID NO: 47459 - DNA, 25 bp, Saccharomyces pastorianus
gtccggtgtcgtcacaacgtttata

SEQ ID NO: 47460 - DNA, 25 bp, Saccharomyces pastorianus
ctagacttggcattactgggcggaa

SEQ ID NO: 47461 - DNA, 25 bp, Saccharomyces pastorianus
atcgtttagccgttgtttgcgaaat

SEQ ID NO: 47462 - DNA, 25 bp, Saccharomyces pastorianus
gcagaatgtgtaccggatttcccag

SEQ ID NO: 47463 - DNA, 25 bp, Saccharomyces pastorianus
ctttctgaggatggtgttgcttaca

SEQ ID NO: 47464 - DNA, 25 bp, Saccharomyces pastorianus
gatgtcttaatattcaaccctccat

SEQ ID NO: 47465 - DNA, 25 bp, Saccharomyces pastorianus
cgaaataggctctgggtccggtgtc

SEQ ID NO: 47466 - DNA, 25 bp, Saccharomyces pastorianus
tgatgtcaacccgtgggcactcgaa

SEQ ID NO: 47467 - DNA, 25 bp, Saccharomyces pastorianus
gcgtttgccaatacttggtgtccaa

SEQ ID NO: 47468 - DNA, 25 bp, Saccharomyces pastorianus
aaagggagttgctggattctactaa

SEQ ID NO: 47469 - DNA, 25 bp, Saccharomyces pastorianus
cgcatttcaacgattactggtctat

SEQ ID NO: 47470 - DNA, 25 bp, Saccharomyces pastorianus
gacttactgctcttactaaacatgg

SEQ ID NO: 47471 - DNA, 25 bp, Saccharomyces pastorianus
gatgatctggaattaccaacgactt

SEQ ID NO: 47472 - DNA, 25 bp, Saccharomyces pastorianus
gcatatttgttacagttctcctcct

SEQ ID NO: 47473 - DNA, 25 bp, Saccharomyces pastorianus
aaggtttcacttctacgaacgaatg

SEQ ID NO: 47474 - DNA, 25 bp, Saccharomyces pastorianus
gattcagtccgaagtcgattcccaa

SEQ ID NO: 47475 - DNA, 25 bp, Saccharomyces pastorianus
agttctcctccttgataagttgcgt

SEQ ID NO: 47476 - DNA, 25 bp, Saccharomyces pastorianus
acggattaggcactgtagatttaca

SEQ ID NO: 47477 - DNA, 25 bp, Saccharomyces pastorianus
taattcattcgttgcactagtagat

SEQ ID NO: 47478 - DNA, 25 bp, Saccharomyces pastorianus
gtccgtggtctcaaatgttttctca

SEQ ID NO: 47479 - DNA, 25 bp, Saccharomyces pastorianus
tctactactcggtggcctggaagaa

SEQ ID NO: 47480 - DNA, 25 bp, Saccharomyces pastorianus
aaggcgatttattcagtccgtggtc

SEQ ID NO: 47481 - DNA, 25 bp, Saccharomyces pastorianus
gccggagctaatagcggtttcctta

SEQ ID NO: 47482 - DNA, 25 bp, Saccharomyces pastorianus
gtctgcttctctcgtacaatgtgtt

SEQ ID NO: 47483 - DNA, 25 bp, Saccharomyces pastorianus
gaaggcggctattaccagccagtag

SEQ ID NO: 47484 - DNA, 25 bp, Saccharomyces pastorianus
gtaaccgcttatgtgaaacttctgt

SEQ ID NO: 47485 - DNA, 25 bp, Saccharomyces pastorianus
ggtactgtttccgagtctctaattt

SEQ ID NO: 47486 - DNA, 25 bp, Saccharomyces pastorianus
atttcgaatgattttgccgctgtct

SEQ ID NO: 47487 - DNA, 25 bp, Saccharomyces pastorianus
tgaagagtccccttattgtaaccgc

SEQ ID NO: 47488 - DNA, 25 bp, Saccharomyces pastorianus
cgattaccttgttaccagtgtctca

SEQ ID NO: 47489 - DNA, 25 bp, Saccharomyces pastorianus
actcctgtgataatcctggatgcga

SEQ ID NO: 47490 - DNA, 25 bp, Saccharomyces pastorianus
aagagagccttaaccgggatcacaa

SEQ ID NO: 47491 - DNA, 25 bp, Saccharomyces pastorianus
atacgcatgcccttgcggtaagaaa

SEQ ID NO: 47492 - DNA, 25 bp, Saccharomyces pastorianus
tcttccccgaggttctattgatagg

SEQ ID NO: 47493 - DNA, 25 bp, Saccharomyces pastorianus
ggacggatcatcgagtgtttctaat

SEQ ID NO: 47494 - DNA, 25 bp, Saccharomyces pastorianus
tagaggatcgaccttactcctgtga

SEQ ID NO: 47495 - DNA, 25 bp, Saccharomyces pastorianus
gtcatttgagtgtttgtatcctgga

SEQ ID NO: 47496 - DNA, 25 bp, Saccharomyces pastorianus
gaagatcccctcaatttggtgctca

SEQ ID NO: 47497 - DNA, 25 bp, Saccharomyces pastorianus
gaagatgccttggttgtacacagaa

SEQ ID NO: 47498 - DNA, 25 bp, Saccharomyces pastorianus
acgtatatcggtaatagcccttcaa

SEQ ID NO: 47499 - DNA, 25 bp, Saccharomyces pastorianus
cacaacgggcaattgatgttcaaac

SEQ ID NO: 47500 - DNA, 25 bp, Saccharomyces pastorianus
aaacagctcttgttctagaaacaat

SEQ ID NO: 47501 - DNA, 25 bp, Saccharomyces pastorianus
tttcgatctgcaaaacagctcttgt

SEQ ID NO: 47502 - DNA, 25 bp, Saccharomyces pastorianus
gtctaaatttcgatctgcaaaacag

SEQ ID NO: 47503 - DNA, 25 bp, Saccharomyces pastorianus
gagtctaaatttcgatctgcaaaac

SEQ ID NO: 47504 - DNA, 25 bp, Saccharomyces pastorianus
aagtccagagtctaaatttcgatct

SEQ ID NO: 47505 - DNA, 25 bp, Saccharomyces pastorianus
cttggtttgatgtctcgaaagtcca

SEQ ID NO: 47506 - DNA, 25 bp, Saccharomyces pastorianus
tggtttgatgtctcgaaagtccaga

SEQ ID NO: 47507 - DNA, 25 bp, Saccharomyces pastorianus
gatgtctcgaaagtccagagtctaa

SEQ ID NO: 47508 - DNA, 25 bp, Saccharomyces pastorianus
ctcttggtttgatgtctcgaaagtc

SEQ ID NO: 47509 - DNA, 25 bp, Saccharomyces pastorianus
gtctcgaaagtccagagtctaaatt

SEQ ID NO: 47510 - DNA, 25 bp, Saccharomyces pastorianus
ttgatgtctcgaaagtccagagtct

SEQ ID NO: 47511 - DNA, 25 bp, Saccharomyces pastorianus
gggcctttcggatttgaatcacgtc

SEQ ID NO: 47512 - DNA, 25 bp, Saccharomyces pastorianus
attggtcagcatctaatcctatttt

SEQ ID NO: 47513 - DNA, 25 bp, Saccharomyces pastorianus
ggatattgccgatgacccaacagac

SEQ ID NO: 47514 - DNA, 25 bp, Saccharomyces pastorianus
gaagagcgttacagacccaaaccca

SEQ ID NO: 47515 - DNA, 25 bp, Saccharomyces pastorianus
agcatcatacctgcattaacccaaa

SEQ ID NO: 47516 - DNA, 25 bp, Saccharomyces pastorianus
gaagattttcccattacctggtgag

SEQ ID NO: 47517 - DNA, 25 bp, Saccharomyces pastorianus
tattttagagaatcccgccagtaca

SEQ ID NO: 47518 - DNA, 25 bp, Saccharomyces pastorianus
aagtgcatcgagaagatccgtatct

SEQ ID NO: 47519 - DNA, 25 bp, Saccharomyces pastorianus
ggatccatccatacactttaacttt

SEQ ID NO: 47520 - DNA, 25 bp, Saccharomyces pastorianus
tgttcaaatattatccgcgtctggg

SEQ ID NO: 47521 - DNA, 25 bp, Saccharomyces pastorianus
atatcaaatttacctgccctacgag

SEQ ID NO: 47522 - DNA, 25 bp, Saccharomyces pastorianus
agatagactcaaccaaagacctcaa

SEQ ID NO: 47523 - DNA, 25 bp, Saccharomyces pastorianus
tgagtcactcaagcaaacgaatggc

SEQ ID NO: 47524 - DNA, 25 bp, Saccharomyces pastorianus
tagagaatgaccttaatgccaaaaa

SEQ ID NO: 47525 - DNA, 25 bp, Saccharomyces pastorianus
caaccaaagacctcaactgggattt

SEQ ID NO: 47526 - DNA, 25 bp, Saccharomyces pastorianus
ctgggatttggaagctaagttaact

SEQ ID NO: 47527 - DNA, 25 bp, Saccharomyces pastorianus
atacaaaagacgtgctcccggattt

SEQ ID NO: 47528 - DNA, 25 bp, Saccharomyces pastorianus
aagttgcagtcttccaatgaagcca

SEQ ID NO: 47529 - DNA, 25 bp, Saccharomyces pastorianus
atttcgcgggcagcagttctcataa

SEQ ID NO: 47530 - DNA, 25 bp, Saccharomyces pastorianus
aaaacttgctagtggagtgcaggaa

SEQ ID NO: 47531 - DNA, 25 bp, Saccharomyces pastorianus
gagtagtcaaaaccattcctttaag

SEQ ID NO: 47532 - DNA, 25 bp, Saccharomyces pastorianus
gggttctcacaacaaattcatcaaa

SEQ ID NO: 47533 - DNA, 25 bp, Saccharomyces pastorianus
ccgccgccaaggacgagactagtgt

SEQ ID NO: 47534 - DNA, 25 bp, Saccharomyces pastorianus
tacaacatgggacactaaatcctgt

SEQ ID NO: 47535 - DNA, 25 bp, Saccharomyces pastorianus
acgagactagtgtcggcgtcagtgc

SEQ ID NO: 47536 - DNA, 25 bp, Saccharomyces pastorianus
taaatcctgtcccagctccgtatca

SEQ ID NO: 47537 - DNA, 25 bp, Saccharomyces pastorianus
gggacactaaatcctgtcccagctc

SEQ ID NO: 47538 - DNA, 25 bp, Saccharomyces pastorianus
actagtgtcggcgtcagtgccagtg

SEQ ID NO: 47539 - DNA, 25 bp, Saccharomyces pastorianus
gggcttacaacatgggacactaaat

SEQ ID NO: 47540 - DNA, 25 bp, Saccharomyces pastorianus
agtgtcggcgtcagtgccagtgcca

SEQ ID NO: 47541 - DNA, 25 bp, Saccharomyces pastorianus
ccgggcttacaacatgggacactaa

SEQ ID NO: 47542 - DNA, 25 bp, Saccharomyces pastorianus
gagagattttaagggcctgcctccc

SEQ ID NO: 47543 - DNA, 25 bp, Saccharomyces pastorianus
acaattgaagagaatccagagagat

SEQ ID NO: 47544 - DNA, 25 bp, Saccharomyces pastorianus
atgaggtcctacagttcctggaggg

SEQ ID NO: 47545 - DNA, 25 bp, Saccharomyces pastorianus
ttgacagcaccacgatgaacaccat

SEQ ID NO: 47546 - DNA, 25 bp, Saccharomyces pastorianus
gaaaggttccagaagagcaggcaat

SEQ ID NO: 47547 - DNA, 25 bp, Saccharomyces pastorianus
gagagcatcattgacagcaccacga

SEQ ID NO: 47548 - DNA, 25 bp, Saccharomyces pastorianus
ccccgggctaaacatggacactaat

SEQ ID NO: 47549 - DNA, 25 bp, Saccharomyces pastorianus
agcacgtctccacggatgaggtcct

SEQ ID NO: 47550 - DNA, 25 bp, Saccharomyces pastorianus
ttcctggagggcttcatcaacgaga

SEQ ID NO: 47551 - DNA, 25 bp, Saccharomyces pastorianus
tcatcaacgagaaggagagcatcat

SEQ ID NO: 47552 - DNA, 25 bp, Saccharomyces pastorianus
agcaggcaataactcggtcaccaca

SEQ ID NO: 47553 - DNA, 25 bp, Saccharomyces pastorianus
atgaacaccatcaacgtcaacgccg

SEQ ID NO: 47554 - DNA, 25 bp, Saccharomyces pastorianus
tgtggtcatccacactacacagctg

SEQ ID NO: 47555 - DNA, 25 bp, Saccharomyces pastorianus
gaaattgttcgttccttccaagaag

SEQ ID NO: 47556 - DNA, 25 bp, Saccharomyces pastorianus
aacggaatttcagtggtcagctacc

SEQ ID NO: 47557 - DNA, 25 bp, Saccharomyces pastorianus
gatgattttgattgtggtccacagt

SEQ ID NO: 47558 - DNA, 25 bp, Saccharomyces pastorianus
gaatgttttagaattgggccccagt

SEQ ID NO: 47559 - DNA, 25 bp, Saccharomyces pastorianus
gagacttattatttgcattcgagaa

SEQ ID NO: 47560 - DNA, 25 bp, Saccharomyces pastorianus
gagagtgcacgtttccaaatgtatt

SEQ ID NO: 47561 - DNA, 25 bp, Saccharomyces pastorianus
ggtcagctacccgtcaaaacaatta

SEQ ID NO: 47562 - DNA, 25 bp, Saccharomyces pastorianus
gggccccagttgattcacaagattc

SEQ ID NO: 47563 - DNA, 25 bp, Saccharomyces pastorianus
tagaattgttcagcttattgtccaa

SEQ ID NO: 47564 - DNA, 25 bp, Saccharomyces pastorianus
ttatctcgctggaagctgttttgga

SEQ ID NO: 47565 - DNA, 25 bp, Saccharomyces pastorianus
gtcagtatcaagaccacgagagact

SEQ ID NO: 47566 - DNA, 25 bp, Saccharomyces pastorianus
ggttttataatcgactagctgccta

SEQ ID NO: 47567 - DNA, 25 bp, Saccharomyces pastorianus
aagaattggtggctcaacatcgtga

SEQ ID NO: 47568 - DNA, 25 bp, Saccharomyces pastorianus
ttacaggtacactaactacgtcggt

SEQ ID NO: 47569 - DNA, 25 bp, Saccharomyces pastorianus
atactattgccaagaacctgcgtaa

SEQ ID NO: 47570 - DNA, 25 bp, Saccharomyces pastorianus
agctgcctacgaattgccattattg

SEQ ID NO: 47571 - DNA, 25 bp, Saccharomyces pastorianus
gagtattggctaggtcacgttatga

SEQ ID NO: 47572 - DNA, 25 bp, Saccharomyces pastorianus
actacgtcggtgaggaacatccaaa

SEQ ID NO: 47573 - DNA, 25 bp, Saccharomyces pastorianus
agactcacccggtcacttacaggta

SEQ ID NO: 47574 - DNA, 25 bp, Saccharomyces pastorianus
agaaaccatctgcaaagactcaccc

SEQ ID NO: 47575 - DNA, 25 bp, Saccharomyces pastorianus
gaaacgtcctgaagatgcgccgaaa

SEQ ID NO: 47576 - DNA, 25 bp, Saccharomyces pastorianus
gaattaccttcccaagctcaagaat

SEQ ID NO: 47577 - DNA, 25 bp, Saccharomyces pastorianus
gaattcctgctgaaagcgtattcaa

SEQ ID NO: 47578 - DNA, 25 bp, Saccharomyces pastorianus
aatctagactatccaacctttgaag

SEQ ID NO: 47579 - DNA, 25 bp, Saccharomyces pastorianus
gattggtcctctatttgacaagcct

SEQ ID NO: 47580 - DNA, 25 bp, Saccharomyces pastorianus
gacaagcagattgaccaggcttatg

SEQ ID NO: 47581 - DNA, 25 bp, Saccharomyces pastorianus
aaggaaagccctgctgattccgtta

SEQ ID NO: 47582 - DNA, 25 bp, Saccharomyces pastorianus
atgtcaagcgcattcgtgtacctaa

SEQ ID NO: 47583 - DNA, 25 bp, Saccharomyces pastorianus
gctgctaactcgagcctaaagtcgt

SEQ ID NO: 47584 - DNA, 25 bp, Saccharomyces pastorianus
gatgaccctgattggattaccggta

SEQ ID NO: 47585 - DNA, 25 bp, Saccharomyces pastorianus
gattccgttagtcgagaggcaatta

SEQ ID NO: 47586 - DNA, 25 bp, Saccharomyces pastorianus
gacgacgagataagcgcggaattaa

SEQ ID NO: 47587 - DNA, 25 bp, Saccharomyces pastorianus
gtgaatacaggaaccacatctcaaa

SEQ ID NO: 47588 - DNA, 25 bp, Saccharomyces pastorianus
gttaccagacacagacttttcgcat

SEQ ID NO: 47589 - DNA, 25 bp, Saccharomyces pastorianus
attactaccaggtgagttaccagac

SEQ ID NO: 47590 - DNA, 25 bp, Saccharomyces pastorianus
aatgttgctagctaccctacaaatg

SEQ ID NO: 47591 - DNA, 25 bp, Saccharomyces pastorianus
aagcatcaaacaagccgcagatact

SEQ ID NO: 47592 - DNA, 25 bp, Saccharomyces pastorianus
taccggatagtttacaatttgacaa

SEQ ID NO: 47593 - DNA, 25 bp, Saccharomyces pastorianus
cttctttaaagacctcagtgatgac

SEQ ID NO: 47594 - DNA, 25 bp, Saccharomyces pastorianus
gttgtatcacagacactaccacttg

SEQ ID NO: 47595 - DNA, 25 bp, Saccharomyces pastorianus
gcagcagcggccttgggattattta

SEQ ID NO: 47596 - DNA, 25 bp, Saccharomyces pastorianus
atttgtcataccgaaattgggtcct

SEQ ID NO: 47597 - DNA, 25 bp, Saccharomyces pastorianus
gcatcccaagccaactaatcaaatc

SEQ ID NO: 47598 - DNA, 25 bp, Saccharomyces pastorianus
aataaagccatttgtcataccgaaa

SEQ ID NO: 47599 - DNA, 25 bp, Saccharomyces pastorianus
catgctagggttaggttctgctttc

SEQ ID NO: 47600 - DNA, 25 bp, Saccharomyces pastorianus
cgatggttttgttggcttggttaag

SEQ ID NO: 47601 - DNA, 25 bp, Saccharomyces pastorianus
gctttctctcttttcgggatttata

SEQ ID NO: 47602 - DNA, 25 bp, Saccharomyces pastorianus
ctgctttctctcttttcgggattta

SEQ ID NO: 47603 - DNA, 25 bp, Saccharomyces pastorianus
aattggagacagaaaacgatggttt

SEQ ID NO: 47604 - DNA, 25 bp, Saccharomyces pastorianus
gttaagagtctatgggactcttcta

SEQ ID NO: 47605 - DNA, 25 bp, Saccharomyces pastorianus
tttgttggcttggttaagagtctat

SEQ ID NO: 47606 - DNA, 25 bp, Saccharomyces pastorianus
ctagggttaggttctgctttctctc

SEQ ID NO: 47607 - DNA, 25 bp, Saccharomyces pastorianus
ggcttggttaagagtctatgggact

SEQ ID NO: 47608 - DNA, 25 bp, Saccharomyces pastorianus
gtacatgctagggttaggttctgct

SEQ ID NO: 47609 - DNA, 25 bp, Saccharomyces pastorianus
ttctgctttctctcttttcgggatt

SEQ ID NO: 47610 - DNA, 25 bp, Saccharomyces pastorianus
tgcttattatgctttcggaatgcga

SEQ ID NO: 47611 - DNA, 25 bp, Saccharomyces pastorianus
gacttccctggtgattattgcaatt

SEQ ID NO: 47612 - DNA, 25 bp, Saccharomyces pastorianus
gctttcttgccttcttgcttattat

SEQ ID NO: 47613 - DNA, 25 bp, Saccharomyces pastorianus
attgcaatttgcttttcttatgttg

SEQ ID NO: 47614 - DNA, 25 bp, Saccharomyces pastorianus
tatggtataggcagacttccctggt

SEQ ID NO: 47615 - DNA, 25 bp, Saccharomyces pastorianus
ggaactgaactactcatgtagcctt

SEQ ID NO: 47616 - DNA, 25 bp, Saccharomyces pastorianus
taagagcgttagaagagcctcacaa

SEQ ID NO: 47617 - DNA, 25 bp, Saccharomyces pastorianus
aaccttaacatcttcgatgcgatcg

SEQ ID NO: 47618 - DNA, 25 bp, Saccharomyces pastorianus
tttcttatgttgttgctttcttgcc

SEQ ID NO: 47619 - DNA, 25 bp, Saccharomyces pastorianus
gaagagcctcacaaataccattata

SEQ ID NO: 47620 - DNA, 25 bp, Saccharomyces pastorianus
ggatgttccggaagatacaacctta

SEQ ID NO: 47621 - DNA, 25 bp, Saccharomyces pastorianus
cttggcggtttgtttgtatcactac

SEQ ID NO: 47622 - DNA, 25 bp, Saccharomyces pastorianus
gacgatgctttcttggagtttaggg

SEQ ID NO: 47623 - DNA, 25 bp, Saccharomyces pastorianus
agccgtttttattctcaatgtgcag

SEQ ID NO: 47624 - DNA, 25 bp, Saccharomyces pastorianus
gtacatctttaccttcattcttgtt

SEQ ID NO: 47625 - DNA, 25 bp, Saccharomyces pastorianus
caaattgcccatgaggaagccgttt

SEQ ID NO: 47626 - DNA, 25 bp, Saccharomyces pastorianus
atcaccgatcctacaatacttggcg

SEQ ID NO: 47627 - DNA, 25 bp, Saccharomyces pastorianus
gaggaagttatccattctttgtcaa

SEQ ID NO: 47628 - DNA, 25 bp, Saccharomyces pastorianus
aagtaaagctggtgcctggtcgttt

SEQ ID NO: 47629 - DNA, 25 bp, Saccharomyces pastorianus
tacggcattcactgttccctaatga

SEQ ID NO: 47630 - DNA, 25 bp, Saccharomyces pastorianus
ggacagcaccggtattccagaaata

SEQ ID NO: 47631 - DNA, 25 bp, Saccharomyces pastorianus
atgtttgctaatactgcccaggcta

SEQ ID NO: 47632 - DNA, 25 bp, Saccharomyces pastorianus
cgacaccatttgactatacctttgc

SEQ ID NO: 47633 - DNA, 25 bp, Saccharomyces pastorianus
gacgaaagcgcctttgaacccaaag

SEQ ID NO: 47634 - DNA, 25 bp, Saccharomyces pastorianus
agctgagccgctacggaagccgtat

SEQ ID NO: 47635 - DNA, 25 bp, Saccharomyces pastorianus
atacctttgcgtcaactgcatctga

SEQ ID NO: 47636 - DNA, 25 bp, Saccharomyces pastorianus
aactgcatctgagactttaccgggc

SEQ ID NO: 47637 - DNA, 25 bp, Saccharomyces pastorianus
ttaccgggctcttccaaaaagatag

SEQ ID NO: 47638 - DNA, 25 bp, Saccharomyces pastorianus
gaaaactagctatccctttgactat

SEQ ID NO: 47639 - DNA, 25 bp, Saccharomyces pastorianus
gcaatgcggcggctctattataata

SEQ ID NO: 47640 - DNA, 25 bp, Saccharomyces pastorianus
taattctagggacactccggaacct

SEQ ID NO: 47641 - DNA, 25 bp, Saccharomyces pastorianus
gatagctacggtgggcacgaacata

SEQ ID NO: 47642 - DNA, 25 bp, Saccharomyces pastorianus
acaagtttcacaacagtgccttctg

SEQ ID NO: 47643 - DNA, 25 bp, Saccharomyces pastorianus
aatgtcggaacgtgtccttttctag

SEQ ID NO: 47644 - DNA, 25 bp, Saccharomyces pastorianus
gagtcattcgggaagtgccagtaca

SEQ ID NO: 47645 - DNA, 25 bp, Saccharomyces pastorianus
gactggaagagtctctgacgctttc

SEQ ID NO: 47646 - DNA, 25 bp, Saccharomyces pastorianus
tggtaatgcgaaatcttttacttcc

SEQ ID NO: 47647 - DNA, 25 bp, Saccharomyces pastorianus
taaatgttaaagtactgccgtttgt

SEQ ID NO: 47648 - DNA, 25 bp, Saccharomyces pastorianus
gaaactggaaatcttggctaggaaa

SEQ ID NO: 47649 - DNA, 25 bp, Saccharomyces pastorianus
tactgccgtttgtactaggttataa

SEQ ID NO: 47650 - DNA, 25 bp, Saccharomyces pastorianus
agtccgttatgttggctttagcaga

SEQ ID NO: 47651 - DNA, 25 bp, Saccharomyces pastorianus
gaacgtgtccttttctagtcaataa

SEQ ID NO: 47652 - DNA, 25 bp, Saccharomyces pastorianus
gattaggtaacgatccaaacggatt

SEQ ID NO: 47653 - DNA, 25 bp, Saccharomyces pastorianus
gagtctctgacgctttcaggagtta

SEQ ID NO: 47654 - DNA, 25 bp, Saccharomyces pastorianus
gtctgcccacacgatttcatgaaat

SEQ ID NO: 47655 - DNA, 25 bp, Saccharomyces pastorianus
gagtacagtacagttgcacggaagc

SEQ ID NO: 47656 - DNA, 25 bp, Saccharomyces pastorianus
ggcaacaaatgttcctttggcaaag

SEQ ID NO: 47657 - DNA, 25 bp, Saccharomyces pastorianus
cactggcgtgggtaaattacgtcca

SEQ ID NO: 47658 - DNA, 25 bp, Saccharomyces pastorianus
ttggcaaagccaataccgagtacag

SEQ ID NO: 47659 - DNA, 25 bp, Saccharomyces pastorianus
gctatatttgaacaccagtatgccc

SEQ ID NO: 47660 - DNA, 25 bp, Saccharomyces pastorianus
gattcatcctgagggcgatttcatt

SEQ ID NO: 47661 - DNA, 25 bp, Saccharomyces pastorianus
agacttttaaggttgtacactcaga

SEQ ID NO: 47662 - DNA, 25 bp, Saccharomyces pastorianus
aatgcgacgacggatatgattcacg

SEQ ID NO: 47663 - DNA, 25 bp, Saccharomyces pastorianus
ggtttggacactcaattatctcatt

SEQ ID NO: 47664 - DNA, 25 bp, Saccharomyces pastorianus
ttgcgggtttaagatccactggcgt

SEQ ID NO: 47665 - DNA, 25 bp, Saccharomyces pastorianus
gacgcccgacgtgaacggattaccg

SEQ ID NO: 47666 - DNA, 25 bp, Saccharomyces pastorianus
tatgttgttactcgcgttcaactcc

SEQ ID NO: 47667 - DNA, 25 bp, Saccharomyces pastorianus
acggattaccgaaacttgacattat

SEQ ID NO: 47668 - DNA, 25 bp, Saccharomyces pastorianus
ataccgttcgtattggagagattgg

SEQ ID NO: 47669 - DNA, 25 bp, Saccharomyces pastorianus
atagttatgttgttactcgcgttca

SEQ ID NO: 47670 - DNA, 25 bp, Saccharomyces pastorianus
ttgttattggtgacgttggcagtga

SEQ ID NO: 47671 - DNA, 25 bp, Saccharomyces pastorianus
agagattgggcttgacgcccgacgt

SEQ ID NO: 47672 - DNA, 25 bp, Saccharomyces pastorianus
cttgacgcccgacgtgaacggatta

SEQ ID NO: 47673 - DNA, 25 bp, Saccharomyces pastorianus
ggattcataccgttcgtattggaga

SEQ ID NO: 47674 - DNA, 25 bp, Saccharomyces pastorianus
actcgcgttcaactcctatgggaaa

SEQ ID NO: 47675 - DNA, 25 bp, Saccharomyces pastorianus
gttggcagtgaacggattcataccg

SEQ ID NO: 47676 - DNA, 25 bp, Saccharomyces pastorianus
gtatccacaagcgatccaactttga

SEQ ID NO: 47677 - DNA, 25 bp, Saccharomyces pastorianus
gatgacaaatcatcaagccaatttg

SEQ ID NO: 47678 - DNA, 25 bp, Saccharomyces pastorianus
aacagtcttagagctacgatgacaa

SEQ ID NO: 47679 - DNA, 25 bp, Saccharomyces pastorianus
ttgaacagtcttagagctacgatga

SEQ ID NO: 47680 - DNA, 25 bp, Saccharomyces pastorianus
aactttgatcagtataagtgccaaa

SEQ ID NO: 47681 - DNA, 25 bp, Saccharomyces pastorianus
aattgaacagtcttagagctacgat

SEQ ID NO: 47682 - DNA, 25 bp, Saccharomyces pastorianus
gagctacgatgacaaatcatcaagc

SEQ ID NO: 47683 - DNA, 25 bp, Saccharomyces pastorianus
aaattgaacagtcttagagctacga

SEQ ID NO: 47684 - DNA, 25 bp, Saccharomyces pastorianus
cagtcttagagctacgatgacaaat

SEQ ID NO: 47685 - DNA, 25 bp, Saccharomyces pastorianus
gaacagtcttagagctacgatgaca

SEQ ID NO: 47686 - DNA, 25 bp, Saccharomyces pastorianus
tcttagagctacgatgacaaatcat

SEQ ID NO: 47687 - DNA, 25 bp, Saccharomyces pastorianus
gggttgaatttcttacttgtccagt

SEQ ID NO: 47688 - DNA, 25 bp, Saccharomyces pastorianus
tattcaatctgcgaatccacggctc

SEQ ID NO: 47689 - DNA, 25 bp, Saccharomyces pastorianus
tgggactggaactaacgctttgtaa

SEQ ID NO: 47690 - DNA, 25 bp, Saccharomyces pastorianus
atgagctctgcattgaattgcggaa

SEQ ID NO: 47691 - DNA, 25 bp, Saccharomyces pastorianus
ctagcactcttacaaaatcctccaa

SEQ ID NO: 47692 - DNA, 25 bp, Saccharomyces pastorianus
cacggctcatatcctgggactggaa

SEQ ID NO: 47693 - DNA, 25 bp, Saccharomyces pastorianus
aagtccaggattccaccttactgaa

SEQ ID NO: 47694 - DNA, 25 bp, Saccharomyces pastorianus
ggtcaagggcgtcatcacgagacaa

SEQ ID NO: 47695 - DNA, 25 bp, Saccharomyces pastorianus
gtttgacgtggcgatggagctacta

SEQ ID NO: 47696 - DNA, 25 bp, Saccharomyces pastorianus
tacaactggccactgatgtcaacga

SEQ ID NO: 47697 - DNA, 25 bp, Saccharomyces pastorianus
tactaaatcattccctagcactctt

SEQ ID NO: 47698 - DNA, 25 bp, Saccharomyces pastorianus
taaactgacacactggccaatcttt

SEQ ID NO: 47699 - DNA, 25 bp, Saccharomyces pastorianus
tggtgtcgcgctacttcaatgaata

SEQ ID NO: 47700 - DNA, 25 bp, Saccharomyces pastorianus
taatcttactaagtgctctgccctt

SEQ ID NO: 47701 - DNA, 25 bp, Saccharomyces pastorianus
gaggttcagaactctacctgctggt

SEQ ID NO: 47702 - DNA, 25 bp, Saccharomyces pastorianus
gggcattctcattctcatggtcaca

SEQ ID NO: 47703 - DNA, 25 bp, Saccharomyces pastorianus
gaacaaggtcatgggcacgagcaac

SEQ ID NO: 47704 - DNA, 25 bp, Saccharomyces pastorianus
gtcacacgcactctcatgaacaagg

SEQ ID NO: 47705 - DNA, 25 bp, Saccharomyces pastorianus
agggcattttcttacacatattggc

SEQ ID NO: 47706 - DNA, 25 bp, Saccharomyces pastorianus
taaagccgactttggtagggtacat

SEQ ID NO: 47707 - DNA, 25 bp, Saccharomyces pastorianus
aatctttgacccaatcgcttcttta

SEQ ID NO: 47708 - DNA, 25 bp, Saccharomyces pastorianus
tgaatacagtttcgaccacgagccc

SEQ ID NO: 47709 - DNA, 25 bp, Saccharomyces pastorianus
ctggatttccagatgttgtactaat

SEQ ID NO: 47710 - DNA, 25 bp, Saccharomyces pastorianus
agatatgactcatccagcacacttt

SEQ ID NO: 47711 - DNA, 25 bp, Saccharomyces pastorianus
atattcattgccatatgctggacaa

SEQ ID NO: 47712 - DNA, 25 bp, Saccharomyces pastorianus
agaaaaccattttcgcggtcctgat

SEQ ID NO: 47713 - DNA, 25 bp, Saccharomyces pastorianus
aacgatacttccttcttgaatatgg

SEQ ID NO: 47714 - DNA, 25 bp, Saccharomyces pastorianus
tgctggacaagatggctggcgattt

SEQ ID NO: 47715 - DNA, 25 bp, Saccharomyces pastorianus
taaacgactctcaccaaacgatttc

SEQ ID NO: 47716 - DNA, 25 bp, Saccharomyces pastorianus
ggagaacatgattcgtccagccata

SEQ ID NO: 47717 - DNA, 25 bp, Saccharomyces pastorianus
ttatatccccgcgagttttctggat

SEQ ID NO: 47718 - DNA, 25 bp, Saccharomyces pastorianus
ttcgcggtcctgatttatctagaag

SEQ ID NO: 47719 - DNA, 25 bp, Saccharomyces pastorianus
gaaatcctggtgaattctttcaacg

SEQ ID NO: 47720 - DNA, 25 bp, Saccharomyces pastorianus
atatctggctgatgcagtctttgat

SEQ ID NO: 47721 - DNA, 25 bp, Saccharomyces pastorianus
agtctggatatttcttcgtataaca

SEQ ID NO: 47722 - DNA, 25 bp, Saccharomyces pastorianus
ccagagtttctagggtcgtcaatga

SEQ ID NO: 47723 - DNA, 25 bp, Saccharomyces pastorianus
agggcactaagtcgcatgtgttctt

SEQ ID NO: 47724 - DNA, 25 bp, Saccharomyces pastorianus
ttcatgtttgccttagtagctgact

SEQ ID NO: 47725 - DNA, 25 bp, Saccharomyces pastorianus
acgtttggttcttcacttcagtaca

SEQ ID NO: 47726 - DNA, 25 bp, Saccharomyces pastorianus
aaaggcaactgtcggcactttgttc

SEQ ID NO: 47727 - DNA, 25 bp, Saccharomyces pastorianus
gcactttgttccactatcaggtcaa

SEQ ID NO: 47728 - DNA, 25 bp, Saccharomyces pastorianus
atcaggtcaaactgtctgccgacga

SEQ ID NO: 47729 - DNA, 25 bp, Saccharomyces pastorianus
tgccgacgatttctgctaactctga

SEQ ID NO: 47730 - DNA, 25 bp, Saccharomyces pastorianus
ggacatctactttcaataccagagt

SEQ ID NO: 47731 - DNA, 25 bp, Saccharomyces pastorianus
gactacaaagagacaacccctacat

SEQ ID NO: 47732 - DNA, 25 bp, Saccharomyces pastorianus
aaagccagccgaagaagcgtctcga

SEQ ID NO: 47733 - DNA, 25 bp, Saccharomyces pastorianus
aagcgtctcgagaggctacttagaa

SEQ ID NO: 47734 - DNA, 25 bp, Saccharomyces pastorianus
tagaaccactaaaacctcaccaaag

SEQ ID NO: 47735 - DNA, 25 bp, Saccharomyces pastorianus
gataactcgaatgcaaatgaccatg

SEQ ID NO: 47736 - DNA, 25 bp, Saccharomyces pastorianus
aagtagcagactatgagcaactcat

SEQ ID NO: 47737 - DNA, 25 bp, Saccharomyces pastorianus
agaggagtcatacttccccagtaat

SEQ ID NO: 47738 - DNA, 25 bp, Saccharomyces pastorianus
gacgcagtcccgatcaaaccaatga

SEQ ID NO: 47739 - DNA, 25 bp, Saccharomyces pastorianus
agaaagatcataagccctccttctg

SEQ ID NO: 47740 - DNA, 25 bp, Saccharomyces pastorianus
tcataagccctccttctgaaatttt

SEQ ID NO: 47741 - DNA, 25 bp, Saccharomyces pastorianus
gcaaactcaaggcagttgtcacaac

SEQ ID NO: 47742 - DNA, 25 bp, Saccharomyces pastorianus
gatgtttttgatattttgaacttta

SEQ ID NO: 47743 - DNA, 25 bp, Saccharomyces pastorianus
gctcttattggttcaaacgggaaca

SEQ ID NO: 47744 - DNA, 25 bp, Saccharomyces pastorianus
tgaactttaacagaaaggcaatgtt

SEQ ID NO: 47745 - DNA, 25 bp, Saccharomyces pastorianus
aatgtccttgttgatgtttttgata

SEQ ID NO: 47746 - DNA, 25 bp, Saccharomyces pastorianus
ttcaaacgggaacatgtggtggacc

SEQ ID NO: 47747 - DNA, 25 bp, Saccharomyces pastorianus
atgctcttattggttcaaacgggaa

SEQ ID NO: 47748 - DNA, 25 bp, Saccharomyces pastorianus
gtccttgttgatgtttttgatattt

SEQ ID NO: 47749 - DNA, 25 bp, Saccharomyces pastorianus
aaatgctcttattggttcaaacggg

SEQ ID NO: 47750 - DNA, 25 bp, Saccharomyces pastorianus
gaccaaaaatgtccttgttgatgtt

SEQ ID NO: 47751 - DNA, 25 bp, Saccharomyces pastorianus
agaaatgctcttattggttcaaacg

SEQ ID NO: 47752 - DNA, 25 bp, Saccharomyces pastorianus
cagaaaggcaatgttaactttgaaa

SEQ ID NO: 47753 - DNA, 25 bp, Saccharomyces pastorianus
ggtcgtccatatggccgtaatacaa

SEQ ID NO: 47754 - DNA, 25 bp, Saccharomyces pastorianus
cagacgcattcagctgattcagatg

SEQ ID NO: 47755 - DNA, 25 bp, Saccharomyces pastorianus
taagcaagtgctccgagacaccaag

SEQ ID NO: 47756 - DNA, 25 bp, Saccharomyces pastorianus
ggctaaaaagccatgtttcacccca

SEQ ID NO: 47757 - DNA, 25 bp, Saccharomyces pastorianus
gttcgtctcctaaacttctagatga

SEQ ID NO: 47758 - DNA, 25 bp, Saccharomyces pastorianus
gaagctcaactaattctgtcttttc

SEQ ID NO: 47759 - DNA, 25 bp, Saccharomyces pastorianus
gagatacattcccttcatgagttgg

SEQ ID NO: 47760 - DNA, 25 bp, Saccharomyces pastorianus
acaatatatctgtggttggatcatt

SEQ ID NO: 47761 - DNA, 25 bp, Saccharomyces pastorianus
gacaccaagggaacaggtcgtccat

SEQ ID NO: 47762 - DNA, 25 bp, Saccharomyces pastorianus
tgtcttttcaagttcgtctcctaaa

SEQ ID NO: 47763 - DNA, 25 bp, Saccharomyces pastorianus
ataaagcattccagacgcattcagc

SEQ ID NO: 47764 - DNA, 25 bp, Saccharomyces pastorianus
ccaaagttatgtatgtggtccctaa

SEQ ID NO: 47765 - DNA, 25 bp, Saccharomyces pastorianus
aagttcgagctcaagtcccattaat

SEQ ID NO: 47766 - DNA, 25 bp, Saccharomyces pastorianus
gataccatgttaaccgatcttttaa

SEQ ID NO: 47767 - DNA, 25 bp, Saccharomyces pastorianus
gacggactatgtacaaaatcgctct

SEQ ID NO: 47768 - DNA, 25 bp, Saccharomyces pastorianus
cccttttgtgttattgacggactat

SEQ ID NO: 47769 - DNA, 25 bp, Saccharomyces pastorianus
ttattccgaatcactaccccaagag

SEQ ID NO: 47770 - DNA, 25 bp, Saccharomyces pastorianus
gacacaggcgtaccttacaagctga

SEQ ID NO: 47771 - DNA, 25 bp, Saccharomyces pastorianus
aagggccattatcgtcatttagaga

SEQ ID NO: 47772 - DNA, 25 bp, Saccharomyces pastorianus
agccgagaacctttctaactgcgaa

SEQ ID NO: 47773 - DNA, 25 bp, Saccharomyces pastorianus
aatcgctctgtccattagccgagaa

SEQ ID NO: 47774 - DNA, 25 bp, Saccharomyces pastorianus
aattcactagaatgggcacccgtta

SEQ ID NO: 47775 - DNA, 25 bp, Saccharomyces pastorianus
aaaaatctctcaaggatgccaaaag

SEQ ID NO: 47776 - DNA, 25 bp, Saccharomyces pastorianus
gaaatcatccagtctttgtcaagtg

SEQ ID NO: 47777 - DNA, 25 bp, Saccharomyces pastorianus
atccagtctttgtcaagtgtgatta

SEQ ID NO: 47778 - DNA, 25 bp, Saccharomyces pastorianus
gaaatcaaaataacgtcacttagag

SEQ ID NO: 47779 - DNA, 25 bp, Saccharomyces pastorianus
aaaaggaaaaacagctggtcgcagc

SEQ ID NO: 47780 - DNA, 25 bp, Saccharomyces pastorianus
ctggtcgcagcaaatgaaatcatcc

SEQ ID NO: 47781 - DNA, 25 bp, Saccharomyces pastorianus
cttttgtcgagaacagagttaattt

SEQ ID NO: 47782 - DNA, 25 bp, Saccharomyces pastorianus
taacgtcacttagaggagacctcaa

SEQ ID NO: 47783 - DNA, 25 bp, Saccharomyces pastorianus
ttctgagaaagatgctaggattcaa

SEQ ID NO: 47784 - DNA, 25 bp, Saccharomyces pastorianus
aggatgccaaaagtcagatttctga

SEQ ID NO: 47785 - DNA, 25 bp, Saccharomyces pastorianus
gtcacttagaggagacctcaacttt

SEQ ID NO: 47786 - DNA, 25 bp, Saccharomyces pastorianus
gaataccattatttacgtttgctaa

SEQ ID NO: 47787 - DNA, 25 bp, Saccharomyces pastorianus
ggacagatacgtgaccattctgatg

SEQ ID NO: 47788 - DNA, 25 bp, Saccharomyces pastorianus
tccttcttcgatccaagacgtcatt

SEQ ID NO: 47789 - DNA, 25 bp, Saccharomyces pastorianus
gacaaccccacgtaaaatgcatcaa

SEQ ID NO: 47790 - DNA, 25 bp, Saccharomyces pastorianus
ggcaaaagccattcaaggccgtcaa

SEQ ID NO: 47791 - DNA, 25 bp, Saccharomyces pastorianus
atagcaaattactcttccttcttcg

SEQ ID NO: 47792 - DNA, 25 bp, Saccharomyces pastorianus
aggccgtcaactccaactcataaga

SEQ ID NO: 47793 - DNA, 25 bp, Saccharomyces pastorianus
gagaaaaccacgatcgcaagcgcaa

SEQ ID NO: 47794 - DNA, 25 bp, Saccharomyces pastorianus
aagcaactattgaccaagcgccctt

SEQ ID NO: 47795 - DNA, 25 bp, Saccharomyces pastorianus
tcttcttctcactcaagtctaggga

SEQ ID NO: 47796 - DNA, 25 bp, Saccharomyces pastorianus
aggatgcaaacaactcttcttctca

SEQ ID NO: 47797 - DNA, 25 bp, Saccharomyces pastorianus
gctatcaggtaccaacgttgccata

SEQ ID NO: 47798 - DNA, 25 bp, Saccharomyces pastorianus
tagatctaagaaccgcccaacaaag

SEQ ID NO: 47799 - DNA, 25 bp, Saccharomyces pastorianus
tgattccaaatccttcccacattgt

SEQ ID NO: 47800 - DNA, 25 bp, Saccharomyces pastorianus
accttctgtcatggctggtgctaca

SEQ ID NO: 47801 - DNA, 25 bp, Saccharomyces pastorianus
ctggtgctacagctgctatcaggta

SEQ ID NO: 47802 - DNA, 25 bp, Saccharomyces pastorianus
tgaactacaattgccacgtgtcaga

SEQ ID NO: 47803 - DNA, 25 bp, Saccharomyces pastorianus
acctgggcatccctgtgattccaaa

SEQ ID NO: 47804 - DNA, 25 bp, Saccharomyces pastorianus
ggtggctacgtagctgcctctagaa

SEQ ID NO: 47805 - DNA, 25 bp, Saccharomyces pastorianus
gccacacgaacgacctatctgatat

SEQ ID NO: 47806 - DNA, 25 bp, Saccharomyces pastorianus
attagcgccgtagacgacgtgttca

SEQ ID NO: 47807 - DNA, 25 bp, Saccharomyces pastorianus
aaagaaggccttccatgacctgggc

SEQ ID NO: 47808 - DNA, 25 bp, Saccharomyces pastorianus
gattacctggcgttgtctaagcacc

SEQ ID NO: 47809 - DNA, 25 bp, Saccharomyces pastorianus
gactgaagccgacaaggtcaccgtt

SEQ ID NO: 47810 - DNA, 25 bp, Saccharomyces pastorianus
atccccactttgaacttggaggcgg

SEQ ID NO: 47811 - DNA, 25 bp, Saccharomyces pastorianus
cttctcgtcctgttacgtgtttcaa

SEQ ID NO: 47812 - DNA, 25 bp, Saccharomyces pastorianus
atgcaacgttccatcttcgcgaggt

SEQ ID NO: 47813 - DNA, 25 bp, Saccharomyces pastorianus
agcacccagaagtgttggacgccat

SEQ ID NO: 47814 - DNA, 25 bp, Saccharomyces pastorianus
caaggagtttcctttagctcaccgt

SEQ ID NO: 47815 - DNA, 25 bp, Saccharomyces pastorianus
acggtttccgctctcagtaggctgt

SEQ ID NO: 47816 - DNA, 25 bp, Saccharomyces pastorianus
ggacgccatgcataaaaccatcgac

SEQ ID NO: 47817 - DNA, 25 bp, Saccharomyces pastorianus
aacaacattaatcgtctggccaagg

SEQ ID NO: 47818 - DNA, 25 bp, Saccharomyces pastorianus
tcagcttcatctacgaacgcagcag

SEQ ID NO: 47819 - DNA, 25 bp, Saccharomyces pastorianus
atatcaaggtgctccaaaagaactt

SEQ ID NO: 47820 - DNA, 25 bp, Saccharomyces pastorianus
ttctgaccttggaaatcccagcatt

SEQ ID NO: 47821 - DNA, 25 bp, Saccharomyces pastorianus
agctgatgctaaagtggtcgttacc

SEQ ID NO: 47822 - DNA, 25 bp, Saccharomyces pastorianus
gttgtttcaggatcttttggtaata

SEQ ID NO: 47823 - DNA, 25 bp, Saccharomyces pastorianus
tcaattgcgtaaccggttcctccag

SEQ ID NO: 47824 - DNA, 25 bp, Saccharomyces pastorianus
attaacaatgctcttctgaccttgg

SEQ ID NO: 47825 - DNA, 25 bp, Saccharomyces pastorianus
agggctcagtgggttcaattgcgta

SEQ ID NO: 47826 - DNA, 25 bp, Saccharomyces pastorianus
gaaggttctttggacggccctgtga

SEQ ID NO: 47827 - DNA, 25 bp, Saccharomyces pastorianus
atcaacttagttgtttcaggatctt

SEQ ID NO: 47828 - DNA, 25 bp, Saccharomyces pastorianus
ggaacaagcggccaccgccttattg

SEQ ID NO: 47829 - DNA, 25 bp, Saccharomyces pastorianus
acggccctgtgatcttggagcaaaa

SEQ ID NO: 47830 - DNA, 25 bp, Saccharomyces pastorianus
gatcacgggaacaaacatgggtatt

SEQ ID NO: 47831 - DNA, 25 bp, Saccharomyces pastorianus
gtatgcaaaatcatctttcggagaa

SEQ ID NO: 47832 - DNA, 25 bp, Saccharomyces pastorianus
ctttcggagaagatgccctggccaa

SEQ ID NO: 47833 - DNA, 25 bp, Saccharomyces pastorianus
ggtctggctctgtcattaggtgata

SEQ ID NO: 47834 - DNA, 25 bp, Saccharomyces pastorianus
agggacaaggtctggctctgtcatt

SEQ ID NO: 47835 - DNA, 25 bp, Saccharomyces pastorianus
attaagccagccagtaccgatgatg

SEQ ID NO: 47836 - DNA, 25 bp, Saccharomyces pastorianus
acactgcatgcttatttgaaagaat

SEQ ID NO: 47837 - DNA, 25 bp, Saccharomyces pastorianus
ccgtactatgtggaatgcttttgaa

SEQ ID NO: 47838 - DNA, 25 bp, Saccharomyces pastorianus
attgaaaaggattccaagaccgatg

SEQ ID NO: 47839 - DNA, 25 bp, Saccharomyces pastorianus
agaagatgccctggccaacttatgt

SEQ ID NO: 47840 - DNA, 25 bp, Saccharomyces pastorianus
cagtaccgatgatgaacatttccgt

SEQ ID NO: 47841 - DNA, 25 bp, Saccharomyces pastorianus
gtatgccactgagaacgcctttgat

SEQ ID NO: 47842 - DNA, 25 bp, Saccharomyces pastorianus
gaagttgcattcttggacactacta

SEQ ID NO: 47843 - DNA, 25 bp, Saccharomyces pastorianus
acttcccacaaatcggttaccgatg

SEQ ID NO: 47844 - DNA, 25 bp, Saccharomyces pastorianus
gagtcatgacatctatctccattct

SEQ ID NO: 47845 - DNA, 25 bp, Saccharomyces pastorianus
aaccgtcaccaatgctttgaaggcg

SEQ ID NO: 47846 - DNA, 25 bp, Saccharomyces pastorianus
tggtgatttttacactgccgctatc

SEQ ID NO: 47847 - DNA, 25 bp, Saccharomyces pastorianus
gaagcacatccgtaatagcgttggt

SEQ ID NO: 47848 - DNA, 25 bp, Saccharomyces pastorianus
aaaacgaagacgacgctgccgctaa

SEQ ID NO: 47849 - DNA, 25 bp, Saccharomyces pastorianus
gccgctaagccaacaggtccagtta

SEQ ID NO: 47850 - DNA, 25 bp, Saccharomyces pastorianus
caatccgtcgtttcattctaagtgg

SEQ ID NO: 47851 - DNA, 25 bp, Saccharomyces pastorianus
cttcagtctgaagcccggaggttga

SEQ ID NO: 47852 - DNA, 25 bp, Saccharomyces pastorianus
attaccgcgactccaatgctaaaaa

SEQ ID NO: 47853 - DNA, 25 bp, Saccharomyces pastorianus
ggcagaaacttcctactcatatttg

SEQ ID NO: 47854 - DNA, 25 bp, Saccharomyces pastorianus
gatatcatggcaccgttgagagaaa

SEQ ID NO: 47855 - DNA, 25 bp, Saccharomyces pastorianus
gtcgaccatacaaaggagtttcata

SEQ ID NO: 47856 - DNA, 25 bp, Saccharomyces pastorianus
aagcggaacgctcgacaatgactac

SEQ ID NO: 47857 - DNA, 25 bp, Saccharomyces pastorianus
gattcagctgattcggtaacaagat

SEQ ID NO: 47858 - DNA, 25 bp, Saccharomyces pastorianus
atatttgtctgcaggattaccgcga

SEQ ID NO: 47859 - DNA, 25 bp, Saccharomyces pastorianus
aagggccaaacagattcagctgatt

SEQ ID NO: 47860 - DNA, 25 bp, Saccharomyces pastorianus
acagaaactattggcgctagagaca

SEQ ID NO: 47861 - DNA, 25 bp, Saccharomyces pastorianus
taatagcgacgatatcatggcaccg

SEQ ID NO: 47862 - DNA, 25 bp, Saccharomyces pastorianus
aggacatcgaacttcttacaagccc

SEQ ID NO: 47863 - DNA, 25 bp, Saccharomyces pastorianus
ggtgatcagacaagtgccgcttcat

SEQ ID NO: 47864 - DNA, 25 bp, Saccharomyces pastorianus
gacgtcatcttcgaatgtgatcccc

SEQ ID NO: 47865 - DNA, 25 bp, Saccharomyces pastorianus
aacaatcttcacgaatcgcagccgt

SEQ ID NO: 47866 - DNA, 25 bp, Saccharomyces pastorianus
atatcagactattccgcattttccc

SEQ ID NO: 47867 - DNA, 25 bp, Saccharomyces pastorianus
aacagaaaccttcgtcgacgtcatc

SEQ ID NO: 47868 - DNA, 25 bp, Saccharomyces pastorianus
gcagccgtggcttgattcgttgaat

SEQ ID NO: 47869 - DNA, 25 bp, Saccharomyces pastorianus
taaggcgggtttcatgacacaagat

SEQ ID NO: 47870 - DNA, 25 bp, Saccharomyces pastorianus
gcattgcactcctctagtcgttatt

SEQ ID NO: 47871 - DNA, 25 bp, Saccharomyces pastorianus
agtacgctgctaaccaatcatcaag

SEQ ID NO: 47872 - DNA, 25 bp, Saccharomyces pastorianus
ggtattctatcttcaccacaacaga

SEQ ID NO: 47873 - DNA, 25 bp, Saccharomyces pastorianus
ttattccgggcctaatagccagttg

SEQ ID NO: 47874 - DNA, 25 bp, Saccharomyces pastorianus
ctgtacgagagcgaaccgtggattc

SEQ ID NO: 47875 - DNA, 25 bp, Saccharomyces pastorianus
gggttcaaccttggttcatttctga

SEQ ID NO: 47876 - DNA, 25 bp, Saccharomyces pastorianus
actcttagacatgtggtgggaccct

SEQ ID NO: 47877 - DNA, 25 bp, Saccharomyces pastorianus
gatactttggccgatagagaactga

SEQ ID NO: 47878 - DNA, 25 bp, Saccharomyces pastorianus
aagatgcattggaagcgctgtacga

SEQ ID NO: 47879 - DNA, 25 bp, Saccharomyces pastorianus
ttagaccttacaaccgatataccct

SEQ ID NO: 47880 - DNA, 25 bp, Saccharomyces pastorianus
tataccctatgtcaattatgcggag

SEQ ID NO: 47881 - DNA, 25 bp, Saccharomyces pastorianus
gccggatgcaactttggtagagact

SEQ ID NO: 47882 - DNA, 25 bp, Saccharomyces pastorianus
gggagatgcaatactataccacctt

SEQ ID NO: 47883 - DNA, 25 bp, Saccharomyces pastorianus
ggaaccctccaagtcattagaagaa

SEQ ID NO: 47884 - DNA, 25 bp, Saccharomyces pastorianus
gcgaatggtccaaactactcttaga

SEQ ID NO: 47885 - DNA, 25 bp, Saccharomyces pastorianus
aggtggttccagttctgattccaaa

SEQ ID NO: 47886 - DNA, 25 bp, Saccharomyces pastorianus
gtgggccatcgagggcatatctata

SEQ ID NO: 47887 - DNA, 25 bp, Saccharomyces pastorianus
aagactagccgactctttagcgaga

SEQ ID NO: 47888 - DNA, 25 bp, Saccharomyces pastorianus
ggataaacgattctactgtcagcag

SEQ ID NO: 47889 - DNA, 25 bp, Saccharomyces pastorianus
tcgttttggaaccaagatcccaaga

SEQ ID NO: 47890 - DNA, 25 bp, Saccharomyces pastorianus
atctaccacaagcttccaagggcag

SEQ ID NO: 47891 - DNA, 25 bp, Saccharomyces pastorianus
tacggaggttcaaggaagattcttc

SEQ ID NO: 47892 - DNA, 25 bp, Saccharomyces pastorianus
gattccaaatggtatctgccaccgt

SEQ ID NO: 47893 - DNA, 25 bp, Saccharomyces pastorianus
gatcccaagattgtcatcatattag

SEQ ID NO: 47894 - DNA, 25 bp, Saccharomyces pastorianus
ctgccaccgtattccaagagatcaa

SEQ ID NO: 47895 - DNA, 25 bp, Saccharomyces pastorianus
tctactgtcagcaggaacccatcta

SEQ ID NO: 47896 - DNA, 25 bp, Saccharomyces pastorianus
tattgtgacgttgttcccctggatt

SEQ ID NO: 47897 - DNA, 25 bp, Saccharomyces pastorianus
aagctattgtgacgttgttcccctg

SEQ ID NO: 47898 - DNA, 25 bp, Saccharomyces pastorianus
gttgttcccctggatttcaaaacat

SEQ ID NO: 47899 - DNA, 25 bp, Saccharomyces pastorianus
tagaattgcctaaccttaacgaaga

SEQ ID NO: 47900 - DNA, 25 bp, Saccharomyces pastorianus
cagggacctagaattgcctaacctt

SEQ ID NO: 47901 - DNA, 25 bp, Saccharomyces pastorianus
aaagctattgtgacgttgttcccct

SEQ ID NO: 47902 - DNA, 25 bp, Saccharomyces pastorianus
ggatttcaaaacattctaccaaatt

SEQ ID NO: 47903 - DNA, 25 bp, Saccharomyces pastorianus
gctattgtgacgttgttcccctgga

SEQ ID NO: 47904 - DNA, 25 bp, Saccharomyces pastorianus
tgtgacgttgttcccctggatttca

SEQ ID NO: 47905 - DNA, 25 bp, Saccharomyces pastorianus
gcctaaccttaacgaagaaagctat

SEQ ID NO: 47906 - DNA, 25 bp, Saccharomyces pastorianus
attcagggacctagaattgcctaac

SEQ ID NO: 47907 - DNA, 25 bp, Saccharomyces pastorianus
agttcattgagggtgacgatttgca

SEQ ID NO: 47908 - DNA, 25 bp, Saccharomyces pastorianus
aatcccgttgaatgacgacgaccgc

SEQ ID NO: 47909 - DNA, 25 bp, Saccharomyces pastorianus
gctgcagcgagcaccaaagaaggtt

SEQ ID NO: 47910 - DNA, 25 bp, Saccharomyces pastorianus
acgtatccggatttgaagttcattg

SEQ ID NO: 47911 - DNA, 25 bp, Saccharomyces pastorianus
ttgcagccgaactgatacatgagtt

SEQ ID NO: 47912 - DNA, 25 bp, Saccharomyces pastorianus
gtttatcgattgttgcgtgttccag

SEQ ID NO: 47913 - DNA, 25 bp, Saccharomyces pastorianus
aacagcgggcactgggaagtcaacc

SEQ ID NO: 47914 - DNA, 25 bp, Saccharomyces pastorianus
gaagtcaaccattgcagccgaactg

SEQ ID NO: 47915 - DNA, 25 bp, Saccharomyces pastorianus
gtagaatccaccaaggctgcagcga

SEQ ID NO: 47916 - DNA, 25 bp, Saccharomyces pastorianus
gattgttgcgtgttccagcttgaaa

SEQ ID NO: 47917 - DNA, 25 bp, Saccharomyces pastorianus
gtcaaaatcattgtgctggcaggaa

SEQ ID NO: 47918 - DNA, 25 bp, Saccharomyces pastorianus
tgaaaagcaccagggacttacgggc

SEQ ID NO: 47919 - DNA, 25 bp, Saccharomyces pastorianus
aacatccctgggtggctagctggtg

SEQ ID NO: 47920 - DNA, 25 bp, Saccharomyces pastorianus
gctagctggtgaaaacggatccttt

SEQ ID NO: 47921 - DNA, 25 bp, Saccharomyces pastorianus
cccttggaaatgttatgctgatgct

SEQ ID NO: 47922 - DNA, 25 bp, Saccharomyces pastorianus
gatgctaatttcgaacactcgccat

SEQ ID NO: 47923 - DNA, 25 bp, Saccharomyces pastorianus
atatttccaggtacacttcattagt

SEQ ID NO: 47924 - DNA, 25 bp, Saccharomyces pastorianus
gaacactcgccattgcacgattatg

SEQ ID NO: 47925 - DNA, 25 bp, Saccharomyces pastorianus
tgcagagtctatgggcccttggaaa

SEQ ID NO: 47926 - DNA, 25 bp, Saccharomyces pastorianus
ggaacgatgtttttggcggattgca

SEQ ID NO: 47927 - DNA, 25 bp, Saccharomyces pastorianus
gaacccgagatcagacagctcaggt

SEQ ID NO: 47928 - DNA, 25 bp, Saccharomyces pastorianus
aatgggaccttcaagatttgcagag

SEQ ID NO: 47929 - DNA, 25 bp, Saccharomyces pastorianus
aagatgattatgtgccgaactcgga

SEQ ID NO: 47930 - DNA, 25 bp, Saccharomyces pastorianus
ttggcggatcattcgatggtgacat

SEQ ID NO: 47931 - DNA, 25 bp, Saccharomyces pastorianus
aactgagacgctagatctgctgatt

SEQ ID NO: 47932 - DNA, 25 bp, Saccharomyces pastorianus
ggcctcaatattttccagttagctg

SEQ ID NO: 47933 - DNA, 25 bp, Saccharomyces pastorianus
gatcttacgttgtcatggttcgcca

SEQ ID NO: 47934 - DNA, 25 bp, Saccharomyces pastorianus
ggcataaagcgcaaggtcatagtaa

SEQ ID NO: 47935 - DNA, 25 bp, Saccharomyces pastorianus
cagttagctgagatagattgccatc

SEQ ID NO: 47936 - DNA, 25 bp, Saccharomyces pastorianus
gttgtcatggttcgccaagtttggc

SEQ ID NO: 47937 - DNA, 25 bp, Saccharomyces pastorianus
atgtattggcctgatggcctcaata

SEQ ID NO: 47938 - DNA, 25 bp, Saccharomyces pastorianus
tgccgaactcggatacgtcaatagt

SEQ ID NO: 47939 - DNA, 25 bp, Saccharomyces pastorianus
ataaccacattatacgatcttacgt

SEQ ID NO: 47940 - DNA, 25 bp, Saccharomyces pastorianus
tgtcccataccaagaagccagtgct

SEQ ID NO: 47941 - DNA, 25 bp, Saccharomyces pastorianus
acagatacagactgggccccaattt

SEQ ID NO: 47942 - DNA, 25 bp, Saccharomyces pastorianus
gaacaagcagcgtttgcccctagta

SEQ ID NO: 47943 - DNA, 25 bp, Saccharomyces pastorianus
gccagtgctgatccggtgctacaag

SEQ ID NO: 47944 - DNA, 25 bp, Saccharomyces pastorianus
agctaggaatttgtaccgcgtctta

SEQ ID NO: 47945 - DNA, 25 bp, Saccharomyces pastorianus
aaatccactgaatttcttcgcacaa

SEQ ID NO: 47946 - DNA, 25 bp, Saccharomyces pastorianus
ggtatccatgtagagggcgcctgcc

SEQ ID NO: 47947 - DNA, 25 bp, Saccharomyces pastorianus
gaacctacctatttagccaacgaca

SEQ ID NO: 47948 - DNA, 25 bp, Saccharomyces pastorianus
caagttttttaaccctgccatcaga

SEQ ID NO: 47949 - DNA, 25 bp, Saccharomyces pastorianus
ctagctcacaacatcggtatccatg

SEQ ID NO: 47950 - DNA, 25 bp, Saccharomyces pastorianus
gggtttacgatatgtttgcccgcgt

SEQ ID NO: 47951 - DNA, 25 bp, Saccharomyces pastorianus
ggctggcaagaactacaagatcata

SEQ ID NO: 47952 - DNA, 25 bp, Saccharomyces pastorianus
gaactacaagatcatacctgaccaa

SEQ ID NO: 47953 - DNA, 25 bp, Saccharomyces pastorianus
ctgttagcaaacatcttgaagagca

SEQ ID NO: 47954 - DNA, 25 bp, Saccharomyces pastorianus
aactcggctggcaagaactacaaga

SEQ ID NO: 47955 - DNA, 25 bp, Saccharomyces pastorianus
gtgagaactcggctggcaagaacta

SEQ ID NO: 47956 - DNA, 25 bp, Saccharomyces pastorianus
atacctgaccaaaaactgttagcaa

SEQ ID NO: 47957 - DNA, 25 bp, Saccharomyces pastorianus
tgaagagcaaaccaacaacgagcga

SEQ ID NO: 47958 - DNA, 25 bp, Saccharomyces pastorianus
gtcactgcgggcgtgtgagaactcg

SEQ ID NO: 47959 - DNA, 25 bp, Saccharomyces pastorianus
aaagcgaagtagagtcactgcgggc

SEQ ID NO: 47960 - DNA, 25 bp, Saccharomyces pastorianus
gatcatacctgaccaaaaactgtta

SEQ ID NO: 47961 - DNA, 25 bp, Saccharomyces pastorianus
gagcaaaccaacaacgagcgaagaa

SEQ ID NO: 47962 - DNA, 25 bp, Saccharomyces pastorianus
ggagagcacccaaattctgagatat

SEQ ID NO: 47963 - DNA, 25 bp, Saccharomyces pastorianus
catacgactcgggttcattgaagat

SEQ ID NO: 47964 - DNA, 25 bp, Saccharomyces pastorianus
attttgatggtgaatcggtccctca

SEQ ID NO: 47965 - DNA, 25 bp, Saccharomyces pastorianus
gaagggagccgcgttacagaaaact

SEQ ID NO: 47966 - DNA, 25 bp, Saccharomyces pastorianus
aagctgcatagccattttacgtact

SEQ ID NO: 47967 - DNA, 25 bp, Saccharomyces pastorianus
gctgatacactgaatgcggatacca

SEQ ID NO: 47968 - DNA, 25 bp, Saccharomyces pastorianus
aaaccttgactattctctgccaaat

SEQ ID NO: 47969 - DNA, 25 bp, Saccharomyces pastorianus
tacgtactaacaccactattcaaga

SEQ ID NO: 47970 - DNA, 25 bp, Saccharomyces pastorianus
aatctatgattccactcgctgatac

SEQ ID NO: 47971 - DNA, 25 bp, Saccharomyces pastorianus
gaatcggtccctcaatcaatagttt

SEQ ID NO: 47972 - DNA, 25 bp, Saccharomyces pastorianus
gagacccttaatgcaagtccacaat

SEQ ID NO: 47973 - DNA, 25 bp, Saccharomyces pastorianus
gacccaaacactatcggcctgaaag

SEQ ID NO: 47974 - DNA, 25 bp, Saccharomyces pastorianus
aaggcttttctctcgtcaggttgtc

SEQ ID NO: 47975 - DNA, 25 bp, Saccharomyces pastorianus
tgatgggattaacgacgcacccgct

SEQ ID NO: 47976 - DNA, 25 bp, Saccharomyces pastorianus
gtcgtactcagctctcttagattga

SEQ ID NO: 47977 - DNA, 25 bp, Saccharomyces pastorianus
tacagcgatgtttcgcctacaggta

SEQ ID NO: 47978 - DNA, 25 bp, Saccharomyces pastorianus
ggcctgaaaggtctggtcaatgcca

SEQ ID NO: 47979 - DNA, 25 bp, Saccharomyces pastorianus
tagctcagttagtgtcgtactcagc

SEQ ID NO: 47980 - DNA, 25 bp, Saccharomyces pastorianus
acccgctttggcattaagtgacctt

SEQ ID NO: 47981 - DNA, 25 bp, Saccharomyces pastorianus
tgaagaaatggtccccaccggatat

SEQ ID NO: 47982 - DNA, 25 bp, Saccharomyces pastorianus
tttggccatggcatttagctcagtt

SEQ ID NO: 47983 - DNA, 25 bp, Saccharomyces pastorianus
gaagcggctgatattgtcatactat

SEQ ID NO: 47984 - DNA, 25 bp, Saccharomyces pastorianus
gttggtgaaaacaaagcgctggata

SEQ ID NO: 47985 - DNA, 25 bp, Saccharomyces pastorianus
gaagtggatttcaacccctttatga

SEQ ID NO: 47986 - DNA, 25 bp, Saccharomyces pastorianus
aagcacgaggtcactgcagggcatt

SEQ ID NO: 47987 - DNA, 25 bp, Saccharomyces pastorianus
gttcgtaagatttacccacaagttg

SEQ ID NO: 47988 - DNA, 25 bp, Saccharomyces pastorianus
gaggttagatgacccgacggttcaa

SEQ ID NO: 47989 - DNA, 25 bp, Saccharomyces pastorianus
gttgctctaaacaaatctatcctgg

SEQ ID NO: 47990 - DNA, 25 bp, Saccharomyces pastorianus
caagtgcttcgtgggacagaggtaa

SEQ ID NO: 47991 - DNA, 25 bp, Saccharomyces pastorianus
gagcaattttgttctaagcacgagg

SEQ ID NO: 47992 - DNA, 25 bp, Saccharomyces pastorianus
caaatctatcctggaaacggtaggt

SEQ ID NO: 47993 - DNA, 25 bp, Saccharomyces pastorianus
aagccgtcggagatgcaagtgcttc

SEQ ID NO: 47994 - DNA, 25 bp, Saccharomyces pastorianus
gcagggcatttcaccttgaaggacg

SEQ ID NO: 47995 - DNA, 25 bp, Saccharomyces pastorianus
ctccccgagttgacggataatgaaa

SEQ ID NO: 47996 - DNA, 25 bp, Saccharomyces pastorianus
ggttgattgacccagcagagcctcc

SEQ ID NO: 47997 - DNA, 25 bp, Saccharomyces pastorianus
aaaagcatccaagcggttgtaaaca

SEQ ID NO: 47998 - DNA, 25 bp, Saccharomyces pastorianus
ccaagcggttgtaaacacgcatcac

SEQ ID NO: 47999 - DNA, 25 bp, Saccharomyces pastorianus
gtggtgtcaattactgctatttgtt

SEQ ID NO: 48000 - DNA, 25 bp, Saccharomyces pastorianus
aattactgctatttgttgtccaaca

SEQ ID NO: 48001 - DNA, 25 bp, Saccharomyces pastorianus
aaatattggttgattgacccagcag

SEQ ID NO: 48002 - DNA, 25 bp, Saccharomyces pastorianus
ttactgctatttgttgtccaacaac

SEQ ID NO: 48003 - DNA, 25 bp, Saccharomyces pastorianus
agtcctccccgagttgacggataat

SEQ ID NO: 48004 - DNA, 25 bp, Saccharomyces pastorianus
tccagaagtcctccccgagttgacg

SEQ ID NO: 48005 - DNA, 25 bp, Saccharomyces pastorianus
aaagaaaagcatccaagcggttgta

SEQ ID NO: 48006 - DNA, 25 bp, Saccharomyces pastorianus
ggtaatacatagtttatccaatgca

SEQ ID NO: 48007 - DNA, 25 bp, Saccharomyces pastorianus
ggatgaaaccttggaaattatctca

SEQ ID NO: 48008 - DNA, 25 bp, Saccharomyces pastorianus
aaatgggtatacgaggacgcagcta

SEQ ID NO: 48009 - DNA, 25 bp, Saccharomyces pastorianus
tattactgttgatgcattgagggat

SEQ ID NO: 48010 - DNA, 25 bp, Saccharomyces pastorianus
acgaggacgcagctagaaattcttc

SEQ ID NO: 48011 - DNA, 25 bp, Saccharomyces pastorianus
aattacatccctggctcagaaggaa

SEQ ID NO: 48012 - DNA, 25 bp, Saccharomyces pastorianus
attatctcaattacatccctggctc

SEQ ID NO: 48013 - DNA, 25 bp, Saccharomyces pastorianus
aatgggccattttgtattgccacaa

SEQ ID NO: 48014 - DNA, 25 bp, Saccharomyces pastorianus
ggtcaggtaataattcaacccctag

SEQ ID NO: 48015 - DNA, 25 bp, Saccharomyces pastorianus
aattcaacccctaggagctttgcca

SEQ ID NO: 48016 - DNA, 25 bp, Saccharomyces pastorianus
taacaacctctccaaggaggcccat

SEQ ID NO: 48017 - DNA, 25 bp, Saccharomyces pastorianus
tttttgccaggccatcaggtagaaa

SEQ ID NO: 48018 - DNA, 25 bp, Saccharomyces pastorianus
gtaactataacagcgctttctacaa

SEQ ID NO: 48019 - DNA, 25 bp, Saccharomyces pastorianus
tttaacctggcttgggagacgattt

SEQ ID NO: 48020 - DNA, 25 bp, Saccharomyces pastorianus
gaactctttactggacactatcgga

SEQ ID NO: 48021 - DNA, 25 bp, Saccharomyces pastorianus
tttctgaagccccttgaggttacta

SEQ ID NO: 48022 - DNA, 25 bp, Saccharomyces pastorianus
gaactattttaaactggcctctgga

SEQ ID NO: 48023 - DNA, 25 bp, Saccharomyces pastorianus
tcgcgtaacatgatagctgccggag

SEQ ID NO: 48024 - DNA, 25 bp, Saccharomyces pastorianus
atgtcgttagcggtgcccagcaaga

SEQ ID NO: 48025 - DNA, 25 bp, Saccharomyces pastorianus
tgacgacgggtcatcgcgtaacatg

SEQ ID NO: 48026 - DNA, 25 bp, Saccharomyces pastorianus
atgttgtcatatcgccattgagtaa

SEQ ID NO: 48027 - DNA, 25 bp, Saccharomyces pastorianus
gacgatttttggtatagctcagaac

SEQ ID NO: 48028 - DNA, 25 bp, Saccharomyces pastorianus
tagcgacttgcatttaacggtacca

SEQ ID NO: 48029 - DNA, 25 bp, Saccharomyces pastorianus
gccttggacaagttcattgctacta

SEQ ID NO: 48030 - DNA, 25 bp, Saccharomyces pastorianus
taaggttaccatccgcggacaacaa

SEQ ID NO: 48031 - DNA, 25 bp, Saccharomyces pastorianus
gaatttgacggcaccaatcgtgttt

SEQ ID NO: 48032 - DNA, 25 bp, Saccharomyces pastorianus
gagttcacggtgatcaactgccttt

SEQ ID NO: 48033 - DNA, 25 bp, Saccharomyces pastorianus
acgagtcttcgtttgacgtctttat

SEQ ID NO: 48034 - DNA, 25 bp, Saccharomyces pastorianus
aaacaaattcagttccacggccgca

SEQ ID NO: 48035 - DNA, 25 bp, Saccharomyces pastorianus
actactggccagttgttgactgtgg

SEQ ID NO: 48036 - DNA, 25 bp, Saccharomyces pastorianus
cacggccgcagaaatcgctaatatt

SEQ ID NO: 48037 - DNA, 25 bp, Saccharomyces pastorianus
gactgtggccactgtgttgcaagtt

SEQ ID NO: 48038 - DNA, 25 bp, Saccharomyces pastorianus
gtagatagcgcaactttcatcccag

SEQ ID NO: 48039 - DNA, 25 bp, Saccharomyces pastorianus
tgttcatagtttcagctctcaaggc

SEQ ID NO: 48040 - DNA, 25 bp, Saccharomyces pastorianus
aggcgggcgtaaatccctatttgca

SEQ ID NO: 48041 - DNA, 25 bp, Saccharomyces pastorianus
gaggactcaatcacagcaatcgcaa

SEQ ID NO: 48042 - DNA, 25 bp, Saccharomyces pastorianus
caacagggtcataagcaccgtgctt

SEQ ID NO: 48043 - DNA, 25 bp, Saccharomyces pastorianus
accgtgcttctaattcatctgttca

SEQ ID NO: 48044 - DNA, 25 bp, Saccharomyces pastorianus
tattcgccaggtatcaattctaact

SEQ ID NO: 48045 - DNA, 25 bp, Saccharomyces pastorianus
gtcacagaggttccaactccaggga

SEQ ID NO: 48046 - DNA, 25 bp, Saccharomyces pastorianus
gacgacgaattcatagccacttctt

SEQ ID NO: 48047 - DNA, 25 bp, Saccharomyces pastorianus
tgcaacttcaaatctatcaccacct

SEQ ID NO: 48048 - DNA, 25 bp, Saccharomyces pastorianus
aggtcagatgcttgggtctctacag

SEQ ID NO: 48049 - DNA, 25 bp, Saccharomyces pastorianus
gacatttatatctgcggctccaaag

SEQ ID NO: 48050 - DNA, 25 bp, Saccharomyces pastorianus
ctacatatggccttcacgagactaa

SEQ ID NO: 48051 - DNA, 25 bp, Saccharomyces pastorianus
gcaccaaagggttcatcagtcataa

SEQ ID NO: 48052 - DNA, 25 bp, Saccharomyces pastorianus
gaaaggctggcacttcaatgcccta

SEQ ID NO: 48053 - DNA, 25 bp, Saccharomyces pastorianus
atggaaccagtgctctgtacggtgt

SEQ ID NO: 48054 - DNA, 25 bp, Saccharomyces pastorianus
gaactatccgataggctggccaaga

SEQ ID NO: 48055 - DNA, 25 bp, Saccharomyces pastorianus
gaagttctacgcactaccgtgcagg

SEQ ID NO: 48056 - DNA, 25 bp, Saccharomyces pastorianus
ggtttcgttttcatctaagagcctg

SEQ ID NO: 48057 - DNA, 25 bp, Saccharomyces pastorianus
ctcattgttggattcttggacgcat

SEQ ID NO: 48058 - DNA, 25 bp, Saccharomyces pastorianus
agggtctagaccaggcgccattgtt

SEQ ID NO: 48059 - DNA, 25 bp, Saccharomyces pastorianus
gccggcgttgcagacaaactcattg

SEQ ID NO: 48060 - DNA, 25 bp, Saccharomyces pastorianus
gggtgaccccaaatactcagtggtt

SEQ ID NO: 48061 - DNA, 25 bp, Saccharomyces pastorianus
aggacccaaggtgttgaagccagac

SEQ ID NO: 48062 - DNA, 25 bp, Saccharomyces pastorianus
ggcaatacaaggctgactcggtcaa

SEQ ID NO: 48063 - DNA, 25 bp, Saccharomyces pastorianus
actcggtcaacattgccattcagga

SEQ ID NO: 48064 - DNA, 25 bp, Saccharomyces pastorianus
ttcaaagcgccctggaaggattcgt

SEQ ID NO: 48065 - DNA, 25 bp, Saccharomyces pastorianus
gcagtagcactttggccaattggca

SEQ ID NO: 48066 - DNA, 25 bp, Saccharomyces pastorianus
gaccctgcaattaatccatcgattt

SEQ ID NO: 48067 - DNA, 25 bp, Saccharomyces pastorianus
gagagtgaatctccgcaaggaccca

SEQ ID NO: 48068 - DNA, 25 bp, Saccharomyces pastorianus
tgaagccagacagccaacgggaaga

SEQ ID NO: 48069 - DNA, 25 bp, Saccharomyces pastorianus
gaaagacaaggccacgcacaccagt

SEQ ID NO: 48070 - DNA, 25 bp, Saccharomyces pastorianus
gcatgtcatcccacggtacaaaatg

SEQ ID NO: 48071 - DNA, 25 bp, Saccharomyces pastorianus
atggacccgaagctggtcagtccgt

SEQ ID NO: 48072 - DNA, 25 bp, Saccharomyces pastorianus
agcgagttatgtcttctggaatcat

SEQ ID NO: 48073 - DNA, 25 bp, Saccharomyces pastorianus
tctccagtctggtttaagctcgctt

SEQ ID NO: 48074 - DNA, 25 bp, Saccharomyces pastorianus
agttgatttcccaattccgacgatg

SEQ ID NO: 48075 - DNA, 25 bp, Saccharomyces pastorianus
gtcttcactatgagtccacatttca

SEQ ID NO: 48076 - DNA, 25 bp, Saccharomyces pastorianus
taagctcgcttggtatggttctata

SEQ ID NO: 48077 - DNA, 25 bp, Saccharomyces pastorianus
gcgatgatcgttttcttgtgcgtgc

SEQ ID NO: 48078 - DNA, 25 bp, Saccharomyces pastorianus
gaaacagtcttttccatcaactggg

SEQ ID NO: 48079 - DNA, 25 bp, Saccharomyces pastorianus
gaaatggccgatcacgttggacgct

SEQ ID NO: 48080 - DNA, 25 bp, Saccharomyces pastorianus
gaagacagccgcactttgtccttga

SEQ ID NO: 48081 - DNA, 25 bp, Saccharomyces pastorianus
tccagttatgtccagaacctctttt

SEQ ID NO: 48082 - DNA, 25 bp, Saccharomyces pastorianus
gacacaatttgttggcctgctcaaa

SEQ ID NO: 48083 - DNA, 25 bp, Saccharomyces pastorianus
gaagagttcagcaataccatcgatg

SEQ ID NO: 48084 - DNA, 25 bp, Saccharomyces pastorianus
cctacgtaacgttgattctttgatt

SEQ ID NO: 48085 - DNA, 25 bp, Saccharomyces pastorianus
taccatcgatgagctatccacagat

SEQ ID NO: 48086 - DNA, 25 bp, Saccharomyces pastorianus
atcatagttttgaaccgttggctgc

SEQ ID NO: 48087 - DNA, 25 bp, Saccharomyces pastorianus
acagtagcacctcccgaagagttca

SEQ ID NO: 48088 - DNA, 25 bp, Saccharomyces pastorianus
aaccgttggctgcaaatgaacctca

SEQ ID NO: 48089 - DNA, 25 bp, Saccharomyces pastorianus
gtagacgtttcagctgaagagcaat

SEQ ID NO: 48090 - DNA, 25 bp, Saccharomyces pastorianus
ttcgctgcctggtgtagacgtttca

SEQ ID NO: 48091 - DNA, 25 bp, Saccharomyces pastorianus
agaaacactcctacgtaacgttgat

SEQ ID NO: 48092 - DNA, 25 bp, Saccharomyces pastorianus
taaacttatcgattcgctgcctggt

SEQ ID NO: 48093 - DNA, 25 bp, Saccharomyces pastorianus
aaatgtccgacaagcatgccacagt

SEQ ID NO: 48094 - DNA, 25 bp, Saccharomyces pastorianus
gagtacggatattttaaggcccatt

SEQ ID NO: 48095 - DNA, 25 bp, Saccharomyces pastorianus
agataccccgttgagttcaaagtca

SEQ ID NO: 48096 - DNA, 25 bp, Saccharomyces pastorianus
aaccgaatactgctacaaccaactg

SEQ ID NO: 48097 - DNA, 25 bp, Saccharomyces pastorianus
caaccaactgctaatgaactcactg

SEQ ID NO: 48098 - DNA, 25 bp, Saccharomyces pastorianus
gtaggaactgcacacataacgcatt

SEQ ID NO: 48099 - DNA, 25 bp, Saccharomyces pastorianus
gcaaggttgccactaatttaattca

SEQ ID NO: 48100 - DNA, 25 bp, Saccharomyces pastorianus
agacgagctcttactactcatgaca

SEQ ID NO: 48101 - DNA, 25 bp, Saccharomyces pastorianus
ggtttgctttgtcctatggaactaa

SEQ ID NO: 48102 - DNA, 25 bp, Saccharomyces pastorianus
agtaacgttttcagagtcctttatg

SEQ ID NO: 48103 - DNA, 25 bp, Saccharomyces pastorianus
gtcacgatactcgagtacttgcgca

SEQ ID NO: 48104 - DNA, 25 bp, Saccharomyces pastorianus
tgaactcactgcatttggaaacgat

SEQ ID NO: 48105 - DNA, 25 bp, Saccharomyces pastorianus
aagagtgtccaactttttcagaaag

SEQ ID NO: 48106 - DNA, 25 bp, Saccharomyces pastorianus
gcttataattttgcggccaggtcca

SEQ ID NO: 48107 - DNA, 25 bp, Saccharomyces pastorianus
actggtcgttataacttccttcaat

SEQ ID NO: 48108 - DNA, 25 bp, Saccharomyces pastorianus
tgctttgggctctactacagctaga

SEQ ID NO: 48109 - DNA, 25 bp, Saccharomyces pastorianus
taggatattccgttccagtctcaaa

SEQ ID NO: 48110 - DNA, 25 bp, Saccharomyces pastorianus
gaagcttaccttccttggatgatat

SEQ ID NO: 48111 - DNA, 25 bp, Saccharomyces pastorianus
acatgggaatcctgtacacgttcaa

SEQ ID NO: 48112 - DNA, 25 bp, Saccharomyces pastorianus
gaaaagccaggtgccaagttccttt

SEQ ID NO: 48113 - DNA, 25 bp, Saccharomyces pastorianus
aggcttttctattatcctcgctata

SEQ ID NO: 48114 - DNA, 25 bp, Saccharomyces pastorianus
gccaggtccaatgtgtgggcaacat

SEQ ID NO: 48115 - DNA, 25 bp, Saccharomyces pastorianus
caccatggtgagtgctttgggctct

SEQ ID NO: 48116 - DNA, 25 bp, Saccharomyces pastorianus
atattcaacgataccaatggaggac

SEQ ID NO: 48117 - DNA, 25 bp, Saccharomyces pastorianus
cccctcgtggatcctattgatttga

SEQ ID NO: 48118 - DNA, 25 bp, Saccharomyces pastorianus
aaagcttcaaggacttagaggccaa

SEQ ID NO: 48119 - DNA, 25 bp, Saccharomyces pastorianus
gatttacaatcttcgatggtttcat

SEQ ID NO: 48120 - DNA, 25 bp, Saccharomyces pastorianus
caaagagggttttcgtgcaattaat

SEQ ID NO: 48121 - DNA, 25 bp, Saccharomyces pastorianus
ttactattgggtccgttggatgact

SEQ ID NO: 48122 - DNA, 25 bp, Saccharomyces pastorianus
gacgtcaaagtagagttgttcctaa

SEQ ID NO: 48123 - DNA, 25 bp, Saccharomyces pastorianus
attccaagctttattgacgttcaag

SEQ ID NO: 48124 - DNA, 25 bp, Saccharomyces pastorianus
gttggtttctattcaagcacactat

SEQ ID NO: 48125 - DNA, 25 bp, Saccharomyces pastorianus
atacggctagaggtcttcagtgaac

SEQ ID NO: 48126 - DNA, 25 bp, Saccharomyces pastorianus
tatcctctgatgacgcatacttgtt

SEQ ID NO: 48127 - DNA, 25 bp, Saccharomyces pastorianus
ttttccctcgtctatagtcaagctg

SEQ ID NO: 48128 - DNA, 25 bp, Saccharomyces pastorianus
actagtgtttctgctgatgggccca

SEQ ID NO: 48129 - DNA, 25 bp, Saccharomyces pastorianus
gtgaagccccaaggttgccataaat

SEQ ID NO: 48130 - DNA, 25 bp, Saccharomyces pastorianus
gaaatccactattattatccgcctg

SEQ ID NO: 48131 - DNA, 25 bp, Saccharomyces pastorianus
gatttgcattgcttccaacccaaaa

SEQ ID NO: 48132 - DNA, 25 bp, Saccharomyces pastorianus
tgcatctggttatctgagccctgaa

SEQ ID NO: 48133 - DNA, 25 bp, Saccharomyces pastorianus
ggttcattgcccgacgaagttaatc

SEQ ID NO: 48134 - DNA, 25 bp, Saccharomyces pastorianus
gatcaaatctcttctggttactaca

SEQ ID NO: 48135 - DNA, 25 bp, Saccharomyces pastorianus
gtatggttcctgttgctaatttgcc

SEQ ID NO: 48136 - DNA, 25 bp, Saccharomyces pastorianus
gtttgcatcttgtatgctcaccagg

SEQ ID NO: 48137 - DNA, 25 bp, Saccharomyces pastorianus
tatgatggtattgttctcgccacca

SEQ ID NO: 48138 - DNA, 25 bp, Saccharomyces pastorianus
gaatttttgtcctccaatgtcacat

SEQ ID NO: 48139 - DNA, 25 bp, Saccharomyces pastorianus
cacatctatgtgtcctgtcttgaag

SEQ ID NO: 48140 - DNA, 25 bp, Saccharomyces pastorianus
atattcttgctgactatttgcctcc

SEQ ID NO: 48141 - DNA, 25 bp, Saccharomyces pastorianus
ggccctgtgctacggattggcaaat

SEQ ID NO: 48142 - DNA, 25 bp, Saccharomyces pastorianus
tactggttgtcaatcctgatgtccc

SEQ ID NO: 48143 - DNA, 25 bp, Saccharomyces pastorianus
tgaatgggatgtcaacgtcgccgtt

SEQ ID NO: 48144 - DNA, 25 bp, Saccharomyces pastorianus
attagaaactctagcagccattccc

SEQ ID NO: 48145 - DNA, 25 bp, Saccharomyces pastorianus
aagacggccagaattctctcgaggt

SEQ ID NO: 48146 - DNA, 25 bp, Saccharomyces pastorianus
atataatttggaccccatcggtgca

SEQ ID NO: 48147 - DNA, 25 bp, Saccharomyces pastorianus
aacgattcgttcaagacggccctgt

SEQ ID NO: 48148 - DNA, 25 bp, Saccharomyces pastorianus
aagatttgtcgcttgggtattccga

SEQ ID NO: 48149 - DNA, 25 bp, Saccharomyces pastorianus
gatacttggtatccgcagcatctga

SEQ ID NO: 48150 - DNA, 25 bp, Saccharomyces pastorianus
tgcaatatatgctccgaaccgttcg

SEQ ID NO: 48151 - DNA, 25 bp, Saccharomyces pastorianus
gcttgtctgaaattcctgtgtctgt

SEQ ID NO: 48152 - DNA, 25 bp, Saccharomyces pastorianus
gtgtctgtaagattatgctcgcatt

SEQ ID NO: 48153 - DNA, 25 bp, Saccharomyces pastorianus
atgagatgtccaagctagaacgtac

SEQ ID NO: 48154 - DNA, 25 bp, Saccharomyces pastorianus
aaagttattgacagcctcttgccca

SEQ ID NO: 48155 - DNA, 25 bp, Saccharomyces pastorianus
aacgggttggtcacactctataaga

SEQ ID NO: 48156 - DNA, 25 bp, Saccharomyces pastorianus
gcagcatctgacttaccatttgact

SEQ ID NO: 48157 - DNA, 25 bp, Saccharomyces pastorianus
gaaagcaccattgccgattatgtgg

SEQ ID NO: 48158 - DNA, 25 bp, Saccharomyces pastorianus
gagtacctgacccaaagaatctgaa

SEQ ID NO: 48159 - DNA, 25 bp, Saccharomyces pastorianus
aggacgtagaaatgcccctaagtgg

SEQ ID NO: 48160 - DNA, 25 bp, Saccharomyces pastorianus
ttctttaccgataaatacagacctt

SEQ ID NO: 48161 - DNA, 25 bp, Saccharomyces pastorianus
tgaggatgacgatatcgatatggaa

SEQ ID NO: 48162 - DNA, 25 bp, Saccharomyces pastorianus
attaagttctcattccaagcaaaag

SEQ ID NO: 48163 - DNA, 25 bp, Saccharomyces pastorianus
tatccagtgatgaattagccatcat

SEQ ID NO: 48164 - DNA, 25 bp, Saccharomyces pastorianus
tacagacctttattatttgttgact

SEQ ID NO: 48165 - DNA, 25 bp, Saccharomyces pastorianus
tttgttgacttaatatccagtgatg

SEQ ID NO: 48166 - DNA, 25 bp, Saccharomyces pastorianus
agccatcattgaaataaatccatta

SEQ ID NO: 48167 - DNA, 25 bp, Saccharomyces pastorianus
aaatccattaagttctcattccaag

SEQ ID NO: 48168 - DNA, 25 bp, Saccharomyces pastorianus
aagaccacagatgcacaccggaatg

SEQ ID NO: 48169 - DNA, 25 bp, Saccharomyces pastorianus
tacaaacgactatttctttaccgat

SEQ ID NO: 48170 - DNA, 25 bp, Saccharomyces pastorianus
gatgcacaccggaatgaagaaagta

SEQ ID NO: 48171 - DNA, 25 bp, Saccharomyces pastorianus
gaaaactgcctcaaaattggcccaa

SEQ ID NO: 48172 - DNA, 25 bp, Saccharomyces pastorianus
gacgaagtattcgttgtggacttag

SEQ ID NO: 48173 - DNA, 25 bp, Saccharomyces pastorianus
gaaagtctgttgttgtaattactgc

SEQ ID NO: 48174 - DNA, 25 bp, Saccharomyces pastorianus
gctagataacgaactattgctgaaa

SEQ ID NO: 48175 - DNA, 25 bp, Saccharomyces pastorianus
tatgctcctgcgaagacgaagtatt

SEQ ID NO: 48176 - DNA, 25 bp, Saccharomyces pastorianus
gaacttttagaaatcacttccacta

SEQ ID NO: 48177 - DNA, 25 bp, Saccharomyces pastorianus
aataactttatcaccgctgttcaca

SEQ ID NO: 48178 - DNA, 25 bp, Saccharomyces pastorianus
atgaaagtctattaacccaatggtc

SEQ ID NO: 48179 - DNA, 25 bp, Saccharomyces pastorianus
attggcccaatttatcgataattcc

SEQ ID NO: 48180 - DNA, 25 bp, Saccharomyces pastorianus
gaactgtgtgggtattttcacggat

SEQ ID NO: 48181 - DNA, 25 bp, Saccharomyces pastorianus
gctgttcacattaacttacccagaa

SEQ ID NO: 48182 - DNA, 25 bp, Saccharomyces pastorianus
tctatatcttccgtgctgcaacaaa

SEQ ID NO: 48183 - DNA, 25 bp, Saccharomyces pastorianus
agtagcccttccttttcttctatat

SEQ ID NO: 48184 - DNA, 25 bp, Saccharomyces pastorianus
atgacagttgtctctttgattatat

SEQ ID NO: 48185 - DNA, 25 bp, Saccharomyces pastorianus
attgatcgtgggaatgggaccattc

SEQ ID NO: 48186 - DNA, 25 bp, Saccharomyces pastorianus
ggtcaccgaaattcaactgcaagaa

SEQ ID NO: 48187 - DNA, 25 bp, Saccharomyces pastorianus
aatttgggactggttgattgatcgt

SEQ ID NO: 48188 - DNA, 25 bp, Saccharomyces pastorianus
gtcgaaaccacaaatagtagccctt

SEQ ID NO: 48189 - DNA, 25 bp, Saccharomyces pastorianus
ggttgaatccattaaggtcaccgaa

SEQ ID NO: 48190 - DNA, 25 bp, Saccharomyces pastorianus
atcgtcatcatccactaccaaagtt

SEQ ID NO: 48191 - DNA, 25 bp, Saccharomyces pastorianus
aaatgctcaccgtaagggctcgaat

SEQ ID NO: 48192 - DNA, 25 bp, Saccharomyces pastorianus
aatggtgtcttgtctgatcacatga

SEQ ID NO: 48193 - DNA, 25 bp, Saccharomyces pastorianus
gtccaggattctcataattgccatt

SEQ ID NO: 48194 - DNA, 25 bp, Saccharomyces pastorianus
ggatgaacctccacgcaataaaagg

SEQ ID NO: 48195 - DNA, 25 bp, Saccharomyces pastorianus
gccgctgcctttagaactaccagat

SEQ ID NO: 48196 - DNA, 25 bp, Saccharomyces pastorianus
caggaacgccattgccaagagaaga

SEQ ID NO: 48197 - DNA, 25 bp, Saccharomyces pastorianus
aattccgcaacgaagtcgtcgctat

SEQ ID NO: 48198 - DNA, 25 bp, Saccharomyces pastorianus
aaaagcatctgccaattccgcaacg

SEQ ID NO: 48199 - DNA, 25 bp, Saccharomyces pastorianus
attgccattctgatgattctatccc

SEQ ID NO: 48200 - DNA, 25 bp, Saccharomyces pastorianus
aaaaggtctttcagcgatggtcact

SEQ ID NO: 48201 - DNA, 25 bp, Saccharomyces pastorianus
aagtcgtcgctatcgctaaagagga

SEQ ID NO: 48202 - DNA, 25 bp, Saccharomyces pastorianus
ggtaactcagttacgaacccgtctg

SEQ ID NO: 48203 - DNA, 25 bp, Saccharomyces pastorianus
gttacgaacccgtctgtccaggatt

SEQ ID NO: 48204 - DNA, 25 bp, Saccharomyces pastorianus
ctattccttatgttgttgtttcaga

SEQ ID NO: 48205 - DNA, 25 bp, Saccharomyces pastorianus
gtaaaagtcagccatcatctaaggg

SEQ ID NO: 48206 - DNA, 25 bp, Saccharomyces pastorianus
cacttttgttggtatctacgttgtc

SEQ ID NO: 48207 - DNA, 25 bp, Saccharomyces pastorianus
ctgggctcctattccttatgttgtt

SEQ ID NO: 48208 - DNA, 25 bp, Saccharomyces pastorianus
ttttcttctttgtgccagaaactaa

SEQ ID NO: 48209 - DNA, 25 bp, Saccharomyces pastorianus
ttgtcgataaatatggtcgtcgtac

SEQ ID NO: 48210 - DNA, 25 bp, Saccharomyces pastorianus
tgtggcctaacggtaaaagtcagcc

SEQ ID NO: 48211 - DNA, 25 bp, Saccharomyces pastorianus
tttgggtattgtcaactttgcctcc

SEQ ID NO: 48212 - DNA, 25 bp, Saccharomyces pastorianus
taacggtaaaagtcagccatcatct

SEQ ID NO: 48213 - DNA, 25 bp, Saccharomyces pastorianus
ggtcgtcgtacttgtctattgtggg

SEQ ID NO: 48214 - DNA, 25 bp, Saccharomyces pastorianus
gttggtatctacgttgtcgataaat

SEQ ID NO: 48215 - DNA, 25 bp, Saccharomyces pastorianus
gacgaaaccttattggcgcagttga

SEQ ID NO: 48216 - DNA, 25 bp, Saccharomyces pastorianus
aactacattagatttcacgcgcgag

SEQ ID NO: 48217 - DNA, 25 bp, Saccharomyces pastorianus
ttctagacttttactcagagccctt

SEQ ID NO: 48218 - DNA, 25 bp, Saccharomyces pastorianus
gtgatgcacaaaaaccgagtacctt

SEQ ID NO: 48219 - DNA, 25 bp, Saccharomyces pastorianus
taaggaccaaggctggccgtttccg

SEQ ID NO: 48220 - DNA, 25 bp, Saccharomyces pastorianus
acctgcggataatgacctgtttacc

SEQ ID NO: 48221 - DNA, 25 bp, Saccharomyces pastorianus
tcacgcgcgagaaccaagactggct

SEQ ID NO: 48222 - DNA, 25 bp, Saccharomyces pastorianus
gatatgtcccttttcgatagtggca

SEQ ID NO: 48223 - DNA, 25 bp, Saccharomyces pastorianus
gactggcttatgatgttcttctaga

SEQ ID NO: 48224 - DNA, 25 bp, Saccharomyces pastorianus
tcaagttttgttctgcgatggtcat

SEQ ID NO: 48225 - DNA, 25 bp, Saccharomyces pastorianus
gggagcacgctcttggtacaataaa

SEQ ID NO: 48226 - DNA, 25 bp, Saccharomyces pastorianus
accagcacttttgtattccacttta

SEQ ID NO: 48227 - DNA, 25 bp, Saccharomyces pastorianus
aaatccatatcccagcaaggtttga

SEQ ID NO: 48228 - DNA, 25 bp, Saccharomyces pastorianus
cagaactttgcgaactatcccgtaa

SEQ ID NO: 48229 - DNA, 25 bp, Saccharomyces pastorianus
ggacgaattcaacggcgactgctta

SEQ ID NO: 48230 - DNA, 25 bp, Saccharomyces pastorianus
tatcggatttgaaggaccagcactt

SEQ ID NO: 48231 - DNA, 25 bp, Saccharomyces pastorianus
tcgttgcccatcttctacgtaagga

SEQ ID NO: 48232 - DNA, 25 bp, Saccharomyces pastorianus
tttgactgatgaatcctttggatcg

SEQ ID NO: 48233 - DNA, 25 bp, Saccharomyces pastorianus
caaggtttgattactggtgacgaat

SEQ ID NO: 48234 - DNA, 25 bp, Saccharomyces pastorianus
gattcaagaatactcaaccctaggg

SEQ ID NO: 48235 - DNA, 25 bp, Saccharomyces pastorianus
acttaacgatcttttgaccaagcgg

SEQ ID NO: 48236 - DNA, 25 bp, Saccharomyces pastorianus
aattgtcgtccataatagtcagaac

SEQ ID NO: 48237 - DNA, 25 bp, Saccharomyces pastorianus
gttttgattcaacaccaaccgatga

SEQ ID NO: 48238 - DNA, 25 bp, Saccharomyces pastorianus
gtcgttctaagtccgtacagtgttt

SEQ ID NO: 48239 - DNA, 25 bp, Saccharomyces pastorianus
aaaatattctctctggtcgttctaa

SEQ ID NO: 48240 - DNA, 25 bp, Saccharomyces pastorianus
acatgtattcctgggatctctccta

SEQ ID NO: 48241 - DNA, 25 bp, Saccharomyces pastorianus
gtcgcagcatcaaacttacggtact

SEQ ID NO: 48242 - DNA, 25 bp, Saccharomyces pastorianus
ctatctctgattcgcaatacgtcca

SEQ ID NO: 48243 - DNA, 25 bp, Saccharomyces pastorianus
ttccttatcaaccagctcttttttg

SEQ ID NO: 48244 - DNA, 25 bp, Saccharomyces pastorianus
atggctctttgatctggaacatccc

SEQ ID NO: 48245 - DNA, 25 bp, Saccharomyces pastorianus
aaggagcttcctccgacatgtattc

SEQ ID NO: 48246 - DNA, 25 bp, Saccharomyces pastorianus
tataagacaacccagctgactcctt

SEQ ID NO: 48247 - DNA, 25 bp, Saccharomyces pastorianus
tggaacatcccaatggcttccttat

SEQ ID NO: 48248 - DNA, 25 bp, Saccharomyces pastorianus
aaggaggaggttctatctggtaaat

SEQ ID NO: 48249 - DNA, 25 bp, Saccharomyces pastorianus
tcgggcctacggaaaacgcaagaat

SEQ ID NO: 48250 - DNA, 25 bp, Saccharomyces pastorianus
ctcggtgataataatgcggtctacg

SEQ ID NO: 48251 - DNA, 25 bp, Saccharomyces pastorianus
gtttaagtcaaggtcaccaggattg

SEQ ID NO: 48252 - DNA, 25 bp, Saccharomyces pastorianus
gcggtctacgactacattttgatga

SEQ ID NO: 48253 - DNA, 25 bp, Saccharomyces pastorianus
gaacactgccgtattatactgttta

SEQ ID NO: 48254 - DNA, 25 bp, Saccharomyces pastorianus
agcagaagaaagcatccagtctggt

SEQ ID NO: 48255 - DNA, 25 bp, Saccharomyces pastorianus
acattttgatgaacactgccgtatt

SEQ ID NO: 48256 - DNA, 25 bp, Saccharomyces pastorianus
acacgaattgtctgagtgcgcctct

SEQ ID NO: 48257 - DNA, 25 bp, Saccharomyces pastorianus
tctggtaaataccacctcggtgata

SEQ ID NO: 48258 - DNA, 25 bp, Saccharomyces pastorianus
agtgcgcctctttcgggcctacgga

SEQ ID NO: 48259 - DNA, 25 bp, Saccharomyces pastorianus
ctgggcattccaactattttcaacg

SEQ ID NO: 48260 - DNA, 25 bp, Saccharomyces pastorianus
aaggtacgtaaactgctgggcattc

SEQ ID NO: 48261 - DNA, 25 bp, Saccharomyces pastorianus
ggcttgtggcccgataatacatttt

SEQ ID NO: 48262 - DNA, 25 bp, Saccharomyces pastorianus
atgggtcacgcttccaaggtacgta

SEQ ID NO: 48263 - DNA, 25 bp, Saccharomyces pastorianus
tacatttttgtttcttctagccccg

SEQ ID NO: 48264 - DNA, 25 bp, Saccharomyces pastorianus
gttaaagcattctgacctcgtggat

SEQ ID NO: 48265 - DNA, 25 bp, Saccharomyces pastorianus
tgacggcattgagattcacccagct

SEQ ID NO: 48266 - DNA, 25 bp, Saccharomyces pastorianus
agctatagttgcctctggtattcca

SEQ ID NO: 48267 - DNA, 25 bp, Saccharomyces pastorianus
caacgtgttgggacctcttttacat

SEQ ID NO: 48268 - DNA, 25 bp, Saccharomyces pastorianus
aaagtttccagttttctgacggcat

SEQ ID NO: 48269 - DNA, 25 bp, Saccharomyces pastorianus
gaaaagcatattaagccctggcgca

SEQ ID NO: 48270 - DNA, 25 bp, Saccharomyces pastorianus
cttttggtgcttgcgtgcgtgagaa

SEQ ID NO: 48271 - DNA, 25 bp, Saccharomyces pastorianus
ttaaacattgcaatcccggaagacg

SEQ ID NO: 48272 - DNA, 25 bp, Saccharomyces pastorianus
gacgacgaattagaccgtgactact

SEQ ID NO: 48273 - DNA, 25 bp, Saccharomyces pastorianus
gtactcgccgtttaagatcagacac

SEQ ID NO: 48274 - DNA, 25 bp, Saccharomyces pastorianus
tcactgcaaatgaccggttacgaag

SEQ ID NO: 48275 - DNA, 25 bp, Saccharomyces pastorianus
gattacccactaagattccattcgc

SEQ ID NO: 48276 - DNA, 25 bp, Saccharomyces pastorianus
aggtgttagccttgagtactcgccg

SEQ ID NO: 48277 - DNA, 25 bp, Saccharomyces pastorianus
gaagaggtccgtactttgagcgccg

SEQ ID NO: 48278 - DNA, 25 bp, Saccharomyces pastorianus
ttccattcgcacagaagaggtccgt

SEQ ID NO: 48279 - DNA, 25 bp, Saccharomyces pastorianus
caagactgttgctcttttggtgctt

SEQ ID NO: 48280 - DNA, 25 bp, Saccharomyces pastorianus
ttgagcgccgcttgaatttcaagac

SEQ ID NO: 48281 - DNA, 25 bp, Saccharomyces pastorianus
taccaggttgtttagcgaagcttcg

SEQ ID NO: 48282 - DNA, 25 bp, Saccharomyces pastorianus
ggacgtaccaatgtcacagccttta

SEQ ID NO: 48283 - DNA, 25 bp, Saccharomyces pastorianus
gtatcgcccactaaggtgccaaact

SEQ ID NO: 48284 - DNA, 25 bp, Saccharomyces pastorianus
taacatacgctcaatccgatctttc

SEQ ID NO: 48285 - DNA, 25 bp, Saccharomyces pastorianus
atataccgccgagttcaaggtcagg

SEQ ID NO: 48286 - DNA, 25 bp, Saccharomyces pastorianus
agtttcccagaaatcaaggccaata

SEQ ID NO: 48287 - DNA, 25 bp, Saccharomyces pastorianus
tcgcaattcgatgtcagtttcccag

SEQ ID NO: 48288 - DNA, 25 bp, Saccharomyces pastorianus
gatgacgaaaacgaaggcccggcga

SEQ ID NO: 48289 - DNA, 25 bp, Saccharomyces pastorianus
atatggagtttacgcctgtaggatt

SEQ ID NO: 48290 - DNA, 25 bp, Saccharomyces pastorianus
gatgataccattgactctaccaggt

SEQ ID NO: 48291 - DNA, 25 bp, Saccharomyces pastorianus
aagaccggtttgagcgtgcgttaga

SEQ ID NO: 48292 - DNA, 25 bp, Saccharomyces pastorianus
ggtaacgcatcagcgaatttgccta

SEQ ID NO: 48293 - DNA, 25 bp, Saccharomyces pastorianus
acagtgccccaaactcagaacgcat

SEQ ID NO: 48294 - DNA, 25 bp, Saccharomyces pastorianus
agaaacctgaacttactcctgacac

SEQ ID NO: 48295 - DNA, 25 bp, Saccharomyces pastorianus
agtggtcaagcatcaactcctaggc

SEQ ID NO: 48296 - DNA, 25 bp, Saccharomyces pastorianus
ttcatctagagctcaaagcccagtt

SEQ ID NO: 48297 - DNA, 25 bp, Saccharomyces pastorianus
ggtcttttaaacatcaattctgcca

SEQ ID NO: 48298 - DNA, 25 bp, Saccharomyces pastorianus
tactcctgacacagctttgaaagct

SEQ ID NO: 48299 - DNA, 25 bp, Saccharomyces pastorianus
gtctgcaagctcgtaattcatctag

SEQ ID NO: 48300 - DNA, 25 bp, Saccharomyces pastorianus
agagtccaaccaagtacagccacag

SEQ ID NO: 48301 - DNA, 25 bp, Saccharomyces pastorianus
aatctcaatctcaaacagtgcccca

SEQ ID NO: 48302 - DNA, 25 bp, Saccharomyces pastorianus
agcccagttccttcaaatggtaacg

SEQ ID NO: 48303 - DNA, 25 bp, Saccharomyces pastorianus
tcctatcgatacatgggcaaatggt

SEQ ID NO: 48304 - DNA, 25 bp, Saccharomyces pastorianus
taccaatgaattaaaggccgaatta

SEQ ID NO: 48305 - DNA, 25 bp, Saccharomyces pastorianus
atgagtacggatactgctgctgcac

SEQ ID NO: 48306 - DNA, 25 bp, Saccharomyces pastorianus
ttttcctatcgatacatgggcaaat

SEQ ID NO: 48307 - DNA, 25 bp, Saccharomyces pastorianus
agattttcctatcgatacatgggca

SEQ ID NO: 48308 - DNA, 25 bp, Saccharomyces pastorianus
gtacggatactgctgctgcacaagc

SEQ ID NO: 48309 - DNA, 25 bp, Saccharomyces pastorianus
cacaagcccagaataaaatagattc

SEQ ID NO: 48310 - DNA, 25 bp, Saccharomyces pastorianus
attttcctatcgatacatgggcaaa

SEQ ID NO: 48311 - DNA, 25 bp, Saccharomyces pastorianus
tttcctatcgatacatgggcaaatg

SEQ ID NO: 48312 - DNA, 25 bp, Saccharomyces pastorianus
gattttcctatcgatacatgggcaa

SEQ ID NO: 48313 - DNA, 25 bp, Saccharomyces pastorianus
cctatcgatacatgggcaaatggtg

SEQ ID NO: 48314 - DNA, 25 bp, Saccharomyces pastorianus
taccaatgaattaaaggccgaatta

SEQ ID NO: 48315 - DNA, 25 bp, Saccharomyces pastorianus
gaagttgacgacgattttaccaatg

SEQ ID NO: 48316 - DNA, 25 bp, Saccharomyces pastorianus
atgagtacggatactgctgctgcac

SEQ ID NO: 48317 - DNA, 25 bp, Saccharomyces pastorianus
tacatgggcaaatggtgaaacgata

SEQ ID NO: 48318 - DNA, 25 bp, Saccharomyces pastorianus
gtacggatactgctgctgcacaagc

SEQ ID NO: 48319 - DNA, 25 bp, Saccharomyces pastorianus
cacaagcccagaataaaatagattc

SEQ ID NO: 48320 - DNA, 25 bp, Saccharomyces pastorianus
attttcctatcgatacatgggcaaa

SEQ ID NO: 48321 - DNA, 25 bp, Saccharomyces pastorianus
tttcctatcgatacatgggcaaatg

SEQ ID NO: 48322 - DNA, 25 bp, Saccharomyces pastorianus
gattttcctatcgatacatgggcaa

SEQ ID NO: 48323 - DNA, 25 bp, Saccharomyces pastorianus
gtaatacagttacacaaacaaacat

SEQ ID NO: 48324 - DNA, 25 bp, Saccharomyces pastorianus
cctatcgatacatgggcaaatggtg

SEQ ID NO: 48325 - DNA, 25 bp, Saccharomyces pastorianus
agagttgctgcatcaccctaaatat

SEQ ID NO: 48326 - DNA, 25 bp, Saccharomyces pastorianus
acaggccatcctttagattttatgc

SEQ ID NO: 48327 - DNA, 25 bp, Saccharomyces pastorianus
gtactgcatcccaagccaattacaa

SEQ ID NO: 48328 - DNA, 25 bp, Saccharomyces pastorianus
ggcatctttcgtccaagagttgctg

SEQ ID NO: 48329 - DNA, 25 bp, Saccharomyces pastorianus
ggttttctctcaaatatgcgtccta

SEQ ID NO: 48330 - DNA, 25 bp, Saccharomyces pastorianus
agccaaatttgctggttttctctca

SEQ ID NO: 48331 - DNA, 25 bp, Saccharomyces pastorianus
tttcaccctatggtttaccacacag

SEQ ID NO: 48332 - DNA, 25 bp, Saccharomyces pastorianus
ttgtacaagggctctatctgattca

SEQ ID NO: 48333 - DNA, 25 bp, Saccharomyces pastorianus
attgttctaggtatctccgttctga

SEQ ID NO: 48334 - DNA, 25 bp, Saccharomyces pastorianus
tatctgtacttgctttttcacccta

SEQ ID NO: 48335 - DNA, 25 bp, Saccharomyces pastorianus
atgcgtcctatataccgttgatact

SEQ ID NO: 48336 - DNA, 25 bp, Saccharomyces pastorianus
gggttccattcgagtgtcacattta

SEQ ID NO: 48337 - DNA, 25 bp, Saccharomyces pastorianus
gaggctatctactgtatggtccacc

SEQ ID NO: 48338 - DNA, 25 bp, Saccharomyces pastorianus
ggatatcactgtaagcaccgcacaa

SEQ ID NO: 48339 - DNA, 25 bp, Saccharomyces pastorianus
taccaaccacccagagaagctagat

SEQ ID NO: 48340 - DNA, 25 bp, Saccharomyces pastorianus
gacgagcttcatccaagctttagct

SEQ ID NO: 48341 - DNA, 25 bp, Saccharomyces pastorianus
ggtattccgatagaggcattccata

SEQ ID NO: 48342 - DNA, 25 bp, Saccharomyces pastorianus
gattacgttcatgactaccaaccac

SEQ ID NO: 48343 - DNA, 25 bp, Saccharomyces pastorianus
agccataatgagaccgggccgtatt

SEQ ID NO: 48344 - DNA, 25 bp, Saccharomyces pastorianus
aggcattccataccgcagaggctat

SEQ ID NO: 48345 - DNA, 25 bp, Saccharomyces pastorianus
gtaatgcaacaccttaccaagtgga

SEQ ID NO: 48346 - DNA, 25 bp, Saccharomyces pastorianus
atggtccacccggatcaggtaagac

SEQ ID NO: 48347 - DNA, 25 bp, Saccharomyces pastorianus
agcacaaaattttcgttggtcccag

SEQ ID NO: 48348 - DNA, 25 bp, Saccharomyces pastorianus
aactttcacagctagttggcgatgc

SEQ ID NO: 48349 - DNA, 25 bp, Saccharomyces pastorianus
ggatacgccggttgatataccaaat

SEQ ID NO: 48350 - DNA, 25 bp, Saccharomyces pastorianus
aatgattctcggtacgggattggct

SEQ ID NO: 48351 - DNA, 25 bp, Saccharomyces pastorianus
ggccaagcatcctcaaagggtgtct

SEQ ID NO: 48352 - DNA, 25 bp, Saccharomyces pastorianus
taagcaggctgtctcagagctgagc

SEQ ID NO: 48353 - DNA, 25 bp, Saccharomyces pastorianus
atatttcgctgcaggtggtgggcta

SEQ ID NO: 48354 - DNA, 25 bp, Saccharomyces pastorianus
tgccgttacttcctcagcgagtaaa

SEQ ID NO: 48355 - DNA, 25 bp, Saccharomyces pastorianus
atatgcctggttccttacttggatg

SEQ ID NO: 48356 - DNA, 25 bp, Saccharomyces pastorianus
ataagggtgcctttatcttgatcaa

SEQ ID NO: 48357 - DNA, 25 bp, Saccharomyces pastorianus
ttggtcccaggtccaggtaatcatt

SEQ ID NO: 48358 - DNA, 25 bp, Saccharomyces pastorianus
aggctcccacagaaggtagtgtcac

SEQ ID NO: 48359 - DNA, 25 bp, Saccharomyces pastorianus
gagtgccactgaacactacgaaagc

SEQ ID NO: 48360 - DNA, 25 bp, Saccharomyces pastorianus
gaacgtcaagcttgcttcgggtttg

SEQ ID NO: 48361 - DNA, 25 bp, Saccharomyces pastorianus
gttcatgaacgttgctctatcgagt

SEQ ID NO: 48362 - DNA, 25 bp, Saccharomyces pastorianus
tcaggcaaggctcccacagaaggta

SEQ ID NO: 48363 - DNA, 25 bp, Saccharomyces pastorianus
atccattgatgggttcatgaacgtt

SEQ ID NO: 48364 - DNA, 25 bp, Saccharomyces pastorianus
tgcttcgggtttgctttatagtgga

SEQ ID NO: 48365 - DNA, 25 bp, Saccharomyces pastorianus
agcaatgaaaacaaactcctgaaca

SEQ ID NO: 48366 - DNA, 25 bp, Saccharomyces pastorianus
aatgatgtctttttgagaggtacac

SEQ ID NO: 48367 - DNA, 25 bp, Saccharomyces pastorianus
acagagtttctttccgatatcatcg

SEQ ID NO: 48368 - DNA, 25 bp, Saccharomyces pastorianus
ggtagtgtcaccacagagtttcttt

SEQ ID NO: 48369 - DNA, 25 bp, Saccharomyces pastorianus
gctgacagaatcaaggctatgcccc

SEQ ID NO: 48370 - DNA, 25 bp, Saccharomyces pastorianus
gcgacttggccagaagagcagttga

SEQ ID NO: 48371 - DNA, 25 bp, Saccharomyces pastorianus
aaggctgctatggtcaaaactcaaa

SEQ ID NO: 48372 - DNA, 25 bp, Saccharomyces pastorianus
aagactaaacctaattgttgatcca

SEQ ID NO: 48373 - DNA, 25 bp, Saccharomyces pastorianus
ctccaattgatggtggtagatctag

SEQ ID NO: 48374 - DNA, 25 bp, Saccharomyces pastorianus
gaggtccaaacagaaaggctgctat

SEQ ID NO: 48375 - DNA, 25 bp, Saccharomyces pastorianus
tgatccaaaccaacgtccatccagg

SEQ ID NO: 48376 - DNA, 25 bp, Saccharomyces pastorianus
ggctatgccccaaaagagtggaaat

SEQ ID NO: 48377 - DNA, 25 bp, Saccharomyces pastorianus
tacattcaaaaatggcgacttggcc

SEQ ID NO: 48378 - DNA, 25 bp, Saccharomyces pastorianus
ggaaatgctccaagacctgttaaga

SEQ ID NO: 48379 - DNA, 25 bp, Saccharomyces pastorianus
gtccatccaggagtttagctgacag

SEQ ID NO: 48380 - DNA, 25 bp, Saccharomyces pastorianus
gcaacggcccaaaaagagtcggcaa

SEQ ID NO: 48381 - DNA, 25 bp, Saccharomyces pastorianus
gagtcggcaagcaagtcaacaccca

SEQ ID NO: 48382 - DNA, 25 bp, Saccharomyces pastorianus
ttagacgaaattattggctccagta

SEQ ID NO: 48383 - DNA, 25 bp, Saccharomyces pastorianus
aattattggctccagtagaccagga

SEQ ID NO: 48384 - DNA, 25 bp, Saccharomyces pastorianus
gaccaggaggcaacagagcccgtgt

SEQ ID NO: 48385 - DNA, 25 bp, Saccharomyces pastorianus
gtccgctaacttagataagtcctta

SEQ ID NO: 48386 - DNA, 25 bp, Saccharomyces pastorianus
gttgccaagcttttagatacctcta

SEQ ID NO: 48387 - DNA, 25 bp, Saccharomyces pastorianus
gaacattccaaacagaaatggtcct

SEQ ID NO: 48388 - DNA, 25 bp, Saccharomyces pastorianus
gaaagaatgtgaggcctcctccaaa

SEQ ID NO: 48389 - DNA, 25 bp, Saccharomyces pastorianus
gaaatggtcctatcagaaagaatgt

SEQ ID NO: 48390 - DNA, 25 bp, Saccharomyces pastorianus
agtcaacacccagcgcaggaacatt

SEQ ID NO: 48391 - DNA, 25 bp, Saccharomyces pastorianus
gactctttagtcaactctatcaagg

SEQ ID NO: 48392 - DNA, 25 bp, Saccharomyces pastorianus
ttcttgtccagtgatgactacctaa

SEQ ID NO: 48393 - DNA, 25 bp, Saccharomyces pastorianus
ccgaatgaggtaactaggctgctaa

SEQ ID NO: 48394 - DNA, 25 bp, Saccharomyces pastorianus
atgaaactactactggaggaggcca

SEQ ID NO: 48395 - DNA, 25 bp, Saccharomyces pastorianus
gtgacccaagtaagctcgatagact

SEQ ID NO: 48396 - DNA, 25 bp, Saccharomyces pastorianus
gcgatataccgaaatattcccttgg

SEQ ID NO: 48397 - DNA, 25 bp, Saccharomyces pastorianus
taagaagcagagtcggcagtgagcc

SEQ ID NO: 48398 - DNA, 25 bp, Saccharomyces pastorianus
tgattttgagatgccaagctatcca

SEQ ID NO: 48399 - DNA, 25 bp, Saccharomyces pastorianus
aataggcgaaagcacactgtccgaa

SEQ ID NO: 48400 - DNA, 25 bp, Saccharomyces pastorianus
acactgtccgaaatcgtgacccaag

SEQ ID NO: 48401 - DNA, 25 bp, Saccharomyces pastorianus
cagtgagccgcaaagcacgtcgatt

SEQ ID NO: 48402 - DNA, 25 bp, Saccharomyces pastorianus
cttcgactaacttcatattcacctt

SEQ ID NO: 48403 - DNA, 25 bp, Saccharomyces pastorianus
atttgctattggcttcggtcgtaat

SEQ ID NO: 48404 - DNA, 25 bp, Saccharomyces pastorianus
gctaatctttgcatttttcacggtt

SEQ ID NO: 48405 - DNA, 25 bp, Saccharomyces pastorianus
ttttggtgcctcttgtatagcgtgc

SEQ ID NO: 48406 - DNA, 25 bp, Saccharomyces pastorianus
gaaaaaccctctattacctgcaatt

SEQ ID NO: 48407 - DNA, 25 bp, Saccharomyces pastorianus
tgcagtattggcttcgatcacgata

SEQ ID NO: 48408 - DNA, 25 bp, Saccharomyces pastorianus
tgatgtttttccaacaggccactgg

SEQ ID NO: 48409 - DNA, 25 bp, Saccharomyces pastorianus
aggccactggtttcaacgctttcat

SEQ ID NO: 48410 - DNA, 25 bp, Saccharomyces pastorianus
atggacttgtgtggagttccttccc

SEQ ID NO: 48411 - DNA, 25 bp, Saccharomyces pastorianus
tgaccaacgcgctagtttcgatgac

SEQ ID NO: 48412 - DNA, 25 bp, Saccharomyces pastorianus
gtacactatggactccttgggcaga

SEQ ID NO: 48413 - DNA, 25 bp, Saccharomyces pastorianus
ggaggccagctgatatcttacataa

SEQ ID NO: 48414 - DNA, 25 bp, Saccharomyces pastorianus
tagcccgcccaatgtcaagagagtt

SEQ ID NO: 48415 - DNA, 25 bp, Saccharomyces pastorianus
aagagagtttcttcggctactgata

SEQ ID NO: 48416 - DNA, 25 bp, Saccharomyces pastorianus
gattttctctatgctagggactctt

SEQ ID NO: 48417 - DNA, 25 bp, Saccharomyces pastorianus
gactgcatctacacatcatcttaat

SEQ ID NO: 48418 - DNA, 25 bp, Saccharomyces pastorianus
gatatttgttcgcattttccgccat

SEQ ID NO: 48419 - DNA, 25 bp, Saccharomyces pastorianus
atttcttcctcatcagcgtttttaa

SEQ ID NO: 48420 - DNA, 25 bp, Saccharomyces pastorianus
aagcccaatcacttgttcggtacat

SEQ ID NO: 48421 - DNA, 25 bp, Saccharomyces pastorianus
tttattcctgaatcacctcggtggt

SEQ ID NO: 48422 - DNA, 25 bp, Saccharomyces pastorianus
tcggtggtccatctctaagggtgat

SEQ ID NO: 48423 - DNA, 25 bp, Saccharomyces pastorianus
tgcgcaatgtgtccctttattctta

SEQ ID NO: 48424 - DNA, 25 bp, Saccharomyces pastorianus
tcttatggtgctgtacaatcgccac

SEQ ID NO: 48425 - DNA, 25 bp, Saccharomyces pastorianus
tacggtgccggatatggtacagcca

SEQ ID NO: 48426 - DNA, 25 bp, Saccharomyces pastorianus
cgctaaccattacccatttcaagat

SEQ ID NO: 48427 - DNA, 25 bp, Saccharomyces pastorianus
ggatacggatatggcgctgcagcac

SEQ ID NO: 48428 - DNA, 25 bp, Saccharomyces pastorianus
ttcccggccggtgcagttatagaga

SEQ ID NO: 48429 - DNA, 25 bp, Saccharomyces pastorianus
agtaagcggcgcttccagtggaacc

SEQ ID NO: 48430 - DNA, 25 bp, Saccharomyces pastorianus
tgcagcaccaggttatggagcccaa

SEQ ID NO: 48431 - DNA, 25 bp, Saccharomyces pastorianus
tgtaggagccactgaggactcgcca

SEQ ID NO: 48432 - DNA, 25 bp, Saccharomyces pastorianus
atggagcccaaccagtcgcacagta

SEQ ID NO: 48433 - DNA, 25 bp, Saccharomyces pastorianus
tatacgattaccaagcgcaagccac

SEQ ID NO: 48434 - DNA, 25 bp, Saccharomyces pastorianus
ttagaaaccgtcaccgcgctatacg

SEQ ID NO: 48435 - DNA, 25 bp, Saccharomyces pastorianus
gtcgtttccaagaactggaacaaga

SEQ ID NO: 48436 - DNA, 25 bp, Saccharomyces pastorianus
gaagaggtattcgtctgcagtgaac

SEQ ID NO: 48437 - DNA, 25 bp, Saccharomyces pastorianus
ctgaggatcctgtgtatgaagatgc

SEQ ID NO: 48438 - DNA, 25 bp, Saccharomyces pastorianus
attcgtctgcagtgaacgggatgct

SEQ ID NO: 48439 - DNA, 25 bp, Saccharomyces pastorianus
ggagtcgaagaggtattcgtctgca

SEQ ID NO: 48440 - DNA, 25 bp, Saccharomyces pastorianus
gatcctgtgtatgaagatgcagaac

SEQ ID NO: 48441 - DNA, 25 bp, Saccharomyces pastorianus
tgagcagactgaggatcctgtgtat

SEQ ID NO: 48442 - DNA, 25 bp, Saccharomyces pastorianus
tgcagtgaacgggatgctaacgcat

SEQ ID NO: 48443 - DNA, 25 bp, Saccharomyces pastorianus
tttaccaaagccgtcactagggctc

SEQ ID NO: 48444 - DNA, 25 bp, Saccharomyces pastorianus
aaagccgtcactagggctcctcagt

SEQ ID NO: 48445 - DNA, 25 bp, Saccharomyces pastorianus
agtgaacgggatgctaacgcatcaa

SEQ ID NO: 48446 - DNA, 25 bp, Saccharomyces pastorianus
tcagtccttccgtcaaaagttcaag

SEQ ID NO: 48447 - DNA, 25 bp, Saccharomyces pastorianus
gtcgtttccaagaactggaacaaga

SEQ ID NO: 48448 - DNA, 25 bp, Saccharomyces pastorianus
gaagaggtattcgtctgcagtgaac

SEQ ID NO: 48449 - DNA, 25 bp, Saccharomyces pastorianus
gcagtgaacgggatgctaacgcatc

SEQ ID NO: 48450 - DNA, 25 bp, Saccharomyces pastorianus
ctgaggatcctgtgtatgaagatgc

SEQ ID NO: 48451 - DNA, 25 bp, Saccharomyces pastorianus
attcgtctgcagtgaacgggatgct

SEQ ID NO: 48452 - DNA, 25 bp, Saccharomyces pastorianus
ggagtcgaagaggtattcgtctgca

SEQ ID NO: 48453 - DNA, 25 bp, Saccharomyces pastorianus
tgagcagactgaggatcctgtgtat

SEQ ID NO: 48454 - DNA, 25 bp, Saccharomyces pastorianus
atgaagatgcagaacgtcgtttcca

SEQ ID NO: 48455 - DNA, 25 bp, Saccharomyces pastorianus
tttaccaaagccgtcactagggctc

SEQ ID NO: 48456 - DNA, 25 bp, Saccharomyces pastorianus
aaagccgtcactagggctcctcagt

SEQ ID NO: 48457 - DNA, 25 bp, Saccharomyces pastorianus
gatgcatttcctcatgatacgtgta

SEQ ID NO: 48458 - DNA, 25 bp, Saccharomyces pastorianus
taaattgtcacctgatcagctgaag

SEQ ID NO: 48459 - DNA, 25 bp, Saccharomyces pastorianus
cattgcgtgttctaaaccttctgaa

SEQ ID NO: 48460 - DNA, 25 bp, Saccharomyces pastorianus
ggatcccactagtcaaatcaagcga

SEQ ID NO: 48461 - DNA, 25 bp, Saccharomyces pastorianus
gactattggccgattatgactttga

SEQ ID NO: 48462 - DNA, 25 bp, Saccharomyces pastorianus
gttaccagatatacggatcccacta

SEQ ID NO: 48463 - DNA, 25 bp, Saccharomyces pastorianus
gaatatgacttttaccgccaaggca

SEQ ID NO: 48464 - DNA, 25 bp, Saccharomyces pastorianus
aactgtaattgtcctgtgtgttcca

SEQ ID NO: 48465 - DNA, 25 bp, Saccharomyces pastorianus
ttgaatggtcgcactttgtctgaag

SEQ ID NO: 48466 - DNA, 25 bp, Saccharomyces pastorianus
gccaaggcaagcaatttgtctcaaa

SEQ ID NO: 48467 - DNA, 25 bp, Saccharomyces pastorianus
ggaggatatctcactactggatgca

SEQ ID NO: 48468 - DNA, 25 bp, Saccharomyces pastorianus
ttctatcattgaagagcccctcgag

SEQ ID NO: 48469 - DNA, 25 bp, Saccharomyces pastorianus
attctacctatactcgatttcctta

SEQ ID NO: 48470 - DNA, 25 bp, Saccharomyces pastorianus
gtatgcaagactgacacacccgaga

SEQ ID NO: 48471 - DNA, 25 bp, Saccharomyces pastorianus
tttgacaaggtaccacgaggaacag

SEQ ID NO: 48472 - DNA, 25 bp, Saccharomyces pastorianus
ggaagaacaactaaacgacgacctg

SEQ ID NO: 48473 - DNA, 25 bp, Saccharomyces pastorianus
gtgctctcaacgactattctacaga

SEQ ID NO: 48474 - DNA, 25 bp, Saccharomyces pastorianus
ctcctcttgtcgtcaacacattaga

SEQ ID NO: 48475 - DNA, 25 bp, Saccharomyces pastorianus
gagcccctcgagcaagtcttggtat

SEQ ID NO: 48476 - DNA, 25 bp, Saccharomyces pastorianus
ttaaaagtctcgatgctcctcttgt

SEQ ID NO: 48477 - DNA, 25 bp, Saccharomyces pastorianus
gttgcaattgctactagaaccttgg

SEQ ID NO: 48478 - DNA, 25 bp, Saccharomyces pastorianus
aaagtcattctttagcacactaagg

SEQ ID NO: 48479 - DNA, 25 bp, Saccharomyces pastorianus
cttagtgttcagcatcaaccggatg

SEQ ID NO: 48480 - DNA, 25 bp, Saccharomyces pastorianus
ttgaggccgccgtttgttaggcttt

SEQ ID NO: 48481 - DNA, 25 bp, Saccharomyces pastorianus
gatccagtctggcagaaatccttat

SEQ ID NO: 48482 - DNA, 25 bp, Saccharomyces pastorianus
atatcgaggccaactgtcctatcag

SEQ ID NO: 48483 - DNA, 25 bp, Saccharomyces pastorianus
atgttgagatgccatgggacgacaa

SEQ ID NO: 48484 - DNA, 25 bp, Saccharomyces pastorianus
gaatgaattgtactccaggttcaaa

SEQ ID NO: 48485 - DNA, 25 bp, Saccharomyces pastorianus
aagaagtatgcccttagtgttcagc

SEQ ID NO: 48486 - DNA, 25 bp, Saccharomyces pastorianus
agttcacattacctgatccagtctg

SEQ ID NO: 48487 - DNA, 25 bp, Saccharomyces pastorianus
gttaggcttttccattacagttcac

SEQ ID NO: 48488 - DNA, 25 bp, Saccharomyces pastorianus
gaatatagaacctcagtggcagcac

SEQ ID NO: 48489 - DNA, 25 bp, Saccharomyces pastorianus
ctgtcctatcaggtcaataaggcca

SEQ ID NO: 48490 - DNA, 25 bp, Saccharomyces pastorianus
tatttctctcgcgtccttggtgaac

SEQ ID NO: 48491 - DNA, 25 bp, Saccharomyces pastorianus
atgattatttctctcgcgtccttgg

SEQ ID NO: 48492 - DNA, 25 bp, Saccharomyces pastorianus
tctcgcgtccttggtgaacatcaag

SEQ ID NO: 48493 - DNA, 25 bp, Saccharomyces pastorianus
tttctctcgcgtccttggtgaacat

SEQ ID NO: 48494 - DNA, 25 bp, Saccharomyces pastorianus
tcgcgtccttggtgaacatcaagtc

SEQ ID NO: 48495 - DNA, 25 bp, Saccharomyces pastorianus
gtccttggtgaacatcaagtcttgg

SEQ ID NO: 48496 - DNA, 25 bp, Saccharomyces pastorianus
gcgtccttggtgaacatcaagtctt

SEQ ID NO: 48497 - DNA, 25 bp, Saccharomyces pastorianus
tgaacatcaagtcttggtccagtat

SEQ ID NO: 48498 - DNA, 25 bp, Saccharomyces pastorianus
ggtgaacatcaagtcttggtccagt

SEQ ID NO: 48499 - DNA, 25 bp, Saccharomyces pastorianus
gattatttctctcgcgtccttggtg

SEQ ID NO: 48500 - DNA, 25 bp, Saccharomyces pastorianus
tctctcgcgtccttggtgaacatca

SEQ ID NO: 48501 - DNA, 25 bp, Saccharomyces pastorianus
tactggaccaagacttgatgttcac

SEQ ID NO: 48502 - DNA, 25 bp, Saccharomyces pastorianus
gagcacgtgatcaaggccctggaag

SEQ ID NO: 48503 - DNA, 25 bp, Saccharomyces pastorianus
caagaagtcgggtctttcggaagag

SEQ ID NO: 48504 - DNA, 25 bp, Saccharomyces pastorianus
ggccctggaagaactggaatatgat

SEQ ID NO: 48505 - DNA, 25 bp, Saccharomyces pastorianus
gagactacatcagaatagcgtgtcg

SEQ ID NO: 48506 - DNA, 25 bp, Saccharomyces pastorianus
tgctgaacttcaagggctcccaaaa

SEQ ID NO: 48507 - DNA, 25 bp, Saccharomyces pastorianus
agactagggactcgaaattcaagaa

SEQ ID NO: 48508 - DNA, 25 bp, Saccharomyces pastorianus
tagacaatcgaggtcgagactacat

SEQ ID NO: 48509 - DNA, 25 bp, Saccharomyces pastorianus
tattatgattctgtcctcgatggct

SEQ ID NO: 48510 - DNA, 25 bp, Saccharomyces pastorianus
tagaggagattctgctgaacttcaa

SEQ ID NO: 48511 - DNA, 25 bp, Saccharomyces pastorianus
tgatgttcaccaaggacgcgagaga

SEQ ID NO: 48512 - DNA, 25 bp, Saccharomyces pastorianus
tgtccatgatccagtggccttggtg

SEQ ID NO: 48513 - DNA, 25 bp, Saccharomyces pastorianus
tttcgctcacacttacaaggacacg

SEQ ID NO: 48514 - DNA, 25 bp, Saccharomyces pastorianus
gtgggatccatcatctttaatcaga

SEQ ID NO: 48515 - DNA, 25 bp, Saccharomyces pastorianus
aagccatcgctacccatgaggtcaa

SEQ ID NO: 48516 - DNA, 25 bp, Saccharomyces pastorianus
tggattgatcccgacgcagctaatg

SEQ ID NO: 48517 - DNA, 25 bp, Saccharomyces pastorianus
aactctttcaatttttcgctcacac

SEQ ID NO: 48518 - DNA, 25 bp, Saccharomyces pastorianus
taatgccatattccatgaccccgaa

SEQ ID NO: 48519 - DNA, 25 bp, Saccharomyces pastorianus
aaatttaacccacaaagccatcgct

SEQ ID NO: 48520 - DNA, 25 bp, Saccharomyces pastorianus
tttgggaccagattttcacggcatt

SEQ ID NO: 48521 - DNA, 25 bp, Saccharomyces pastorianus
tgaattaggcccacctgtccatgat

SEQ ID NO: 48522 - DNA, 25 bp, Saccharomyces pastorianus
ccttggtgccactcttggaatttta

SEQ ID NO: 48523 - DNA, 25 bp, Saccharomyces pastorianus
ttttgtgccgcggttctggaagaga

SEQ ID NO: 48524 - DNA, 25 bp, Saccharomyces pastorianus
taagggactacctgtaccacatcta

SEQ ID NO: 48525 - DNA, 25 bp, Saccharomyces pastorianus
aggagccgttcatctggcccgagga

SEQ ID NO: 48526 - DNA, 25 bp, Saccharomyces pastorianus
gaagtcgttcaacaagctggaccta

SEQ ID NO: 48527 - DNA, 25 bp, Saccharomyces pastorianus
gagagcccattctgggacagcacaa

SEQ ID NO: 48528 - DNA, 25 bp, Saccharomyces pastorianus
aataatcctgctaagacccaacgcg

SEQ ID NO: 48529 - DNA, 25 bp, Saccharomyces pastorianus
gggtctgacaccaacaagccgggca

SEQ ID NO: 48530 - DNA, 25 bp, Saccharomyces pastorianus
taaggtctacttacccaaggccaga

SEQ ID NO: 48531 - DNA, 25 bp, Saccharomyces pastorianus
tcggcgggatcatagggccctacaa

SEQ ID NO: 48532 - DNA, 25 bp, Saccharomyces pastorianus
aatgaacatcacaacgcagctgctg

SEQ ID NO: 48533 - DNA, 25 bp, Saccharomyces pastorianus
aggaaagactcaactgcctcgggtc

SEQ ID NO: 48534 - DNA, 25 bp, Saccharomyces pastorianus
attatgccgccgcaacatttttata

SEQ ID NO: 48535 - DNA, 25 bp, Saccharomyces pastorianus
gccgccgcaacatttttatactggt

SEQ ID NO: 48536 - DNA, 25 bp, Saccharomyces pastorianus
gcaacatttttatactggttagcaa

SEQ ID NO: 48537 - DNA, 25 bp, Saccharomyces pastorianus
tatgccgccgcaacatttttatact

SEQ ID NO: 48538 - DNA, 25 bp, Saccharomyces pastorianus
gttttcgattatgccgccgcaacat

SEQ ID NO: 48539 - DNA, 25 bp, Saccharomyces pastorianus
ctggttagcaagagtccctaagaat

SEQ ID NO: 48540 - DNA, 25 bp, Saccharomyces pastorianus
gttacattgttttcgattatgccgc

SEQ ID NO: 48541 - DNA, 25 bp, Saccharomyces pastorianus
attgttttcgattatgccgccgcaa

SEQ ID NO: 48542 - DNA, 25 bp, Saccharomyces pastorianus
acattgttttcgattatgccgccgc

SEQ ID NO: 48543 - DNA, 25 bp, Saccharomyces pastorianus
gttagcaagagtccctaagaatagc

SEQ ID NO: 48544 - DNA, 25 bp, Saccharomyces pastorianus
gccgcaacatttttatactggttag

SEQ ID NO: 48545 - DNA, 25 bp, Saccharomyces pastorianus
catccggaagcacctgtggcgaata

SEQ ID NO: 48546 - DNA, 25 bp, Saccharomyces pastorianus
tgttccgtatctaccactaacgttt

SEQ ID NO: 48547 - DNA, 25 bp, Saccharomyces pastorianus
tggaacaggttatttgggcgacccg

SEQ ID NO: 48548 - DNA, 25 bp, Saccharomyces pastorianus
gctggatatatcaaaatggctggaa

SEQ ID NO: 48549 - DNA, 25 bp, Saccharomyces pastorianus
cctgtggcgaatatatggctggata

SEQ ID NO: 48550 - DNA, 25 bp, Saccharomyces pastorianus
taacgttttcttagcttccgtcagc

SEQ ID NO: 48551 - DNA, 25 bp, Saccharomyces pastorianus
cttccgtcagctctcattattatag

SEQ ID NO: 48552 - DNA, 25 bp, Saccharomyces pastorianus
gtatctaccactaacgttttcttag

SEQ ID NO: 48553 - DNA, 25 bp, Saccharomyces pastorianus
gatcaatgtagtttctgttccgtat

SEQ ID NO: 48554 - DNA, 25 bp, Saccharomyces pastorianus
gtagtttctgttccgtatctaccac

SEQ ID NO: 48555 - DNA, 25 bp, Saccharomyces pastorianus
ttatttgggcgacccgtctgcaaca

SEQ ID NO: 48556 - DNA, 25 bp, Saccharomyces pastorianus
gtatggcttacgttattttcttctt

SEQ ID NO: 48557 - DNA, 25 bp, Saccharomyces pastorianus
ttcgatgttattgttggcccttgcc

SEQ ID NO: 48558 - DNA, 25 bp, Saccharomyces pastorianus
ggtactcaacacgtttgttctgctg

SEQ ID NO: 48559 - DNA, 25 bp, Saccharomyces pastorianus
gatcaatattctgtccacgttcact

SEQ ID NO: 48560 - DNA, 25 bp, Saccharomyces pastorianus
acgttcactttgtctcatctgttta

SEQ ID NO: 48561 - DNA, 25 bp, Saccharomyces pastorianus
taagttcccctgtgctcagtatatc

SEQ ID NO: 48562 - DNA, 25 bp, Saccharomyces pastorianus
tgcgtcagttttgtccgaaatgccc

SEQ ID NO: 48563 - DNA, 25 bp, Saccharomyces pastorianus
gcctacttgtttgagtccctgatga

SEQ ID NO: 48564 - DNA, 25 bp, Saccharomyces pastorianus
gtatataaacccgttggcctacttg

SEQ ID NO: 48565 - DNA, 25 bp, Saccharomyces pastorianus
tctgctgttggtgcttatccaggta

SEQ ID NO: 48566 - DNA, 25 bp, Saccharomyces pastorianus
aatttcatgaccgtaagttcccctg

SEQ ID NO: 48567 - DNA, 25 bp, Saccharomyces pastorianus
gccagtacgagttcggcgtttgcat

SEQ ID NO: 48568 - DNA, 25 bp, Saccharomyces pastorianus
ctaaggcttcagtggtcaatttgga

SEQ ID NO: 48569 - DNA, 25 bp, Saccharomyces pastorianus
ggcgtttgcatttctaagtccaaca

SEQ ID NO: 48570 - DNA, 25 bp, Saccharomyces pastorianus
gaatactatattccgctataaactt

SEQ ID NO: 48571 - DNA, 25 bp, Saccharomyces pastorianus
gaaagacatcaaagctattaccaag

SEQ ID NO: 48572 - DNA, 25 bp, Saccharomyces pastorianus
attccgatcgaaaaaggccagtacg

SEQ ID NO: 48573 - DNA, 25 bp, Saccharomyces pastorianus
ggtcaatcactacaactaaggcttc

SEQ ID NO: 48574 - DNA, 25 bp, Saccharomyces pastorianus
gtcaatttggaaatcattccgatcg

SEQ ID NO: 48575 - DNA, 25 bp, Saccharomyces pastorianus
gctataaacttttgggacgtcgtga

SEQ ID NO: 48576 - DNA, 25 bp, Saccharomyces pastorianus
ggttcgttaaccaggtcaatcacta

SEQ ID NO: 48577 - DNA, 25 bp, Saccharomyces pastorianus
gggacgtcgtgatttttgatagaaa

SEQ ID NO: 48578 - DNA, 25 bp, Saccharomyces pastorianus
tctgtaacaggctcggtagatttta

SEQ ID NO: 48579 - DNA, 25 bp, Saccharomyces pastorianus
gatggtgtccacgatatacactggg

SEQ ID NO: 48580 - DNA, 25 bp, Saccharomyces pastorianus
ggtgccgtgaacacattatttcaag

SEQ ID NO: 48581 - DNA, 25 bp, Saccharomyces pastorianus
gttcaattcgaggatttcaccagta

SEQ ID NO: 48582 - DNA, 25 bp, Saccharomyces pastorianus
gaagccaaccatacctcaagaatta

SEQ ID NO: 48583 - DNA, 25 bp, Saccharomyces pastorianus
gagtatcacgtagaagccaaccata

SEQ ID NO: 48584 - DNA, 25 bp, Saccharomyces pastorianus
ggaattcctggatagacggtattaa

SEQ ID NO: 48585 - DNA, 25 bp, Saccharomyces pastorianus
gaaactatgccaataccgaggatat

SEQ ID NO: 48586 - DNA, 25 bp, Saccharomyces pastorianus
gagacagaaattttggtgccgtgaa

SEQ ID NO: 48587 - DNA, 25 bp, Saccharomyces pastorianus
aaacacacaataacactgacctcca

SEQ ID NO: 48588 - DNA, 25 bp, Saccharomyces pastorianus
cactgacctccaacctagagatttt

SEQ ID NO: 48589 - DNA, 25 bp, Saccharomyces pastorianus
tctgactacaggtcgttactcgata

SEQ ID NO: 48590 - DNA, 25 bp, Saccharomyces pastorianus
agccgccctgaacaagaaacacttt

SEQ ID NO: 48591 - DNA, 25 bp, Saccharomyces pastorianus
tatacgcatttattaagccgccctg

SEQ ID NO: 48592 - DNA, 25 bp, Saccharomyces pastorianus
acaatggctgaagtctatcgtatct

SEQ ID NO: 48593 - DNA, 25 bp, Saccharomyces pastorianus
tgacgcatctcaattcacttggttg

SEQ ID NO: 48594 - DNA, 25 bp, Saccharomyces pastorianus
aaaatcgcttggcactctgactaca

SEQ ID NO: 48595 - DNA, 25 bp, Saccharomyces pastorianus
gacctcgtgctataaaagttctgaa

SEQ ID NO: 48596 - DNA, 25 bp, Saccharomyces pastorianus
tttacctccatactggttaccagat

SEQ ID NO: 48597 - DNA, 25 bp, Saccharomyces pastorianus
agtatgtcgccaaatttacctccat

SEQ ID NO: 48598 - DNA, 25 bp, Saccharomyces pastorianus
ggtggcccttttggcgactacgaat

SEQ ID NO: 48599 - DNA, 25 bp, Saccharomyces pastorianus
attgcggttgttaatggtggccctt

SEQ ID NO: 48600 - DNA, 25 bp, Saccharomyces pastorianus
gcaagtgcaccgctacagaggtcta

SEQ ID NO: 48601 - DNA, 25 bp, Saccharomyces pastorianus
agatatgcctcttcttcctgatata

SEQ ID NO: 48602 - DNA, 25 bp, Saccharomyces pastorianus
aacatttcaactcgagccaactcta

SEQ ID NO: 48603 - DNA, 25 bp, Saccharomyces pastorianus
gaatctttagtctactcgtcacgtg

SEQ ID NO: 48604 - DNA, 25 bp, Saccharomyces pastorianus
tgagtacaacatatcctgtcacctc

SEQ ID NO: 48605 - DNA, 25 bp, Saccharomyces pastorianus
gcgcctcccttaatagccaataata

SEQ ID NO: 48606 - DNA, 25 bp, Saccharomyces pastorianus
aatagcatcatttcacgttccagtc

SEQ ID NO: 48607 - DNA, 25 bp, Saccharomyces pastorianus
taaggatgagctctctggaccccgg

SEQ ID NO: 48608 - DNA, 25 bp, Saccharomyces pastorianus
taccgtctttccaaacagcatgctg

SEQ ID NO: 48609 - DNA, 25 bp, Saccharomyces pastorianus
ccagtttgccagttcatcggtatgt

SEQ ID NO: 48610 - DNA, 25 bp, Saccharomyces pastorianus
gtcacctctaccactaatcgattaa

SEQ ID NO: 48611 - DNA, 25 bp, Saccharomyces pastorianus
gcaatgccccgtatgtcaaatcgac

SEQ ID NO: 48612 - DNA, 25 bp, Saccharomyces pastorianus
gtttgcaatgcccaatctcatacac

SEQ ID NO: 48613 - DNA, 25 bp, Saccharomyces pastorianus
tggtttctccattctcaactacaaa

SEQ ID NO: 48614 - DNA, 25 bp, Saccharomyces pastorianus
gagtaagccaggtacggccaagccc

SEQ ID NO: 48615 - DNA, 25 bp, Saccharomyces pastorianus
tagagctaatttacgcctttaccac

SEQ ID NO: 48616 - DNA, 25 bp, Saccharomyces pastorianus
cgcagatttgactcctcatcttaag

SEQ ID NO: 48617 - DNA, 25 bp, Saccharomyces pastorianus
ggtggaactaacctccgatggcaaa

SEQ ID NO: 48618 - DNA, 25 bp, Saccharomyces pastorianus
atggacggccattctagaagatgac

SEQ ID NO: 48619 - DNA, 25 bp, Saccharomyces pastorianus
tgatcactccagaacaacttttaga

SEQ ID NO: 48620 - DNA, 25 bp, Saccharomyces pastorianus
gaggaaatgggccttacgaccacat

SEQ ID NO: 48621 - DNA, 25 bp, Saccharomyces pastorianus
aagccctacacccagcaaaataata

SEQ ID NO: 48622 - DNA, 25 bp, Saccharomyces pastorianus
tctgccttttccaacttgacattgt

SEQ ID NO: 48623 - DNA, 25 bp, Saccharomyces pastorianus
aaaatgggcttcacgtcgttgcctt

SEQ ID NO: 48624 - DNA, 25 bp, Saccharomyces pastorianus
tatctcggcctccaagttcaaactt

SEQ ID NO: 48625 - DNA, 25 bp, Saccharomyces pastorianus
ttgggtgagcactttttctgccttt

SEQ ID NO: 48626 - DNA, 25 bp, Saccharomyces pastorianus
tcaaagttatcgttgggctccaagg

SEQ ID NO: 48627 - DNA, 25 bp, Saccharomyces pastorianus
acatcacccttttttgcatcttcta

SEQ ID NO: 48628 - DNA, 25 bp, Saccharomyces pastorianus
aaacccgtgccaggaatcgtcagac

SEQ ID NO: 48629 - DNA, 25 bp, Saccharomyces pastorianus
aaggattccacttctactgtagttg

SEQ ID NO: 48630 - DNA, 25 bp, Saccharomyces pastorianus
gtatatttcagtaacggcgcccttc

SEQ ID NO: 48631 - DNA, 25 bp, Saccharomyces pastorianus
atcgacttcttcttcatcggaatca

SEQ ID NO: 48632 - DNA, 25 bp, Saccharomyces pastorianus
ggaatcgtcagactctaccttggca

SEQ ID NO: 48633 - DNA, 25 bp, Saccharomyces pastorianus
tgggtccatcagtagccagagactt

SEQ ID NO: 48634 - DNA, 25 bp, Saccharomyces pastorianus
ggtaacatcaacttcgtagcagctg

SEQ ID NO: 48635 - DNA, 25 bp, Saccharomyces pastorianus
agaccttgaggcctctttgggagaa

SEQ ID NO: 48636 - DNA, 25 bp, Saccharomyces pastorianus
gaaggccgtatctactatgggtcca

SEQ ID NO: 48637 - DNA, 25 bp, Saccharomyces pastorianus
gtagcagctgcaaccacacatggac

SEQ ID NO: 48638 - DNA, 25 bp, Saccharomyces pastorianus
gaaaatgtgtatctcgaaggccgta

SEQ ID NO: 48639 - DNA, 25 bp, Saccharomyces pastorianus
aaattcgcgcggtacagttgaacaa

SEQ ID NO: 48640 - DNA, 25 bp, Saccharomyces pastorianus
aagtgttgcatcgaggtgctgtctc

SEQ ID NO: 48641 - DNA, 25 bp, Saccharomyces pastorianus
ttatggtgcagagcttctacctcca

SEQ ID NO: 48642 - DNA, 25 bp, Saccharomyces pastorianus
gctgtctcggatgctgtcagtatga

SEQ ID NO: 48643 - DNA, 25 bp, Saccharomyces pastorianus
aaaagctactggattctggcatggt

SEQ ID NO: 48644 - DNA, 25 bp, Saccharomyces pastorianus
gggcaatccaaattcagagtcaggt

SEQ ID NO: 48645 - DNA, 25 bp, Saccharomyces pastorianus
ggaccttccaagttttacgcataag

SEQ ID NO: 48646 - DNA, 25 bp, Saccharomyces pastorianus
ggtctaagtaggtcgaactcggcaa

SEQ ID NO: 48647 - DNA, 25 bp, Saccharomyces pastorianus
catccctgacttgccaatatactta

SEQ ID NO: 48648 - DNA, 25 bp, Saccharomyces pastorianus
aactcggcaaatctgcgggattcgt

SEQ ID NO: 48649 - DNA, 25 bp, Saccharomyces pastorianus
taatggttccgcaaagcctctacaa

SEQ ID NO: 48650 - DNA, 25 bp, Saccharomyces pastorianus
gaaatcatcagtgtggcttgtacca

SEQ ID NO: 48651 - DNA, 25 bp, Saccharomyces pastorianus
taaaccatattatccctcacgtgaa

SEQ ID NO: 48652 - DNA, 25 bp, Saccharomyces pastorianus
tgttgaaaggccaagcacgccgttc

SEQ ID NO: 48653 - DNA, 25 bp, Saccharomyces pastorianus
tgtttgccactttacaacaaggcgg

SEQ ID NO: 48654 - DNA, 25 bp, Saccharomyces pastorianus
ggtaagccatctgaggaccttccaa

SEQ ID NO: 48655 - DNA, 25 bp, Saccharomyces pastorianus
agtcaagttcaaattcaagctccag

SEQ ID NO: 48656 - DNA, 25 bp, Saccharomyces pastorianus
aaggacgtaagatcgctatcgaagt

SEQ ID NO: 48657 - DNA, 25 bp, Saccharomyces pastorianus
agtttaacgcggtcgactatattga

SEQ ID NO: 48658 - DNA, 25 bp, Saccharomyces pastorianus
acaattcgtcatacaacagcttaat

SEQ ID NO: 48659 - DNA, 25 bp, Saccharomyces pastorianus
actaaactatgaaacgtctacgcca

SEQ ID NO: 48660 - DNA, 25 bp, Saccharomyces pastorianus
aacgaaattcatataggcgcaagta

SEQ ID NO: 48661 - DNA, 25 bp, Saccharomyces pastorianus
gaaacttttcgcagctagcttcaaa

SEQ ID NO: 48662 - DNA, 25 bp, Saccharomyces pastorianus
ggctgctgacctgacatttgttaaa

SEQ ID NO: 48663 - DNA, 25 bp, Saccharomyces pastorianus
aagctccagtggacaccaaaacgaa

SEQ ID NO: 48664 - DNA, 25 bp, Saccharomyces pastorianus
gtctacgccaacaatgaatctcaat

SEQ ID NO: 48665 - DNA, 25 bp, Saccharomyces pastorianus
gaaactttcgagtctcactgagatt

SEQ ID NO: 48666 - DNA, 25 bp, Saccharomyces pastorianus
ctctcttgttctgttagttgtttga

SEQ ID NO: 48667 - DNA, 25 bp, Saccharomyces pastorianus
tcaacttagttaaatcctgtgtcag

SEQ ID NO: 48668 - DNA, 25 bp, Saccharomyces pastorianus
atggacagacaatccttcaacttag

SEQ ID NO: 48669 - DNA, 25 bp, Saccharomyces pastorianus
gttctgttagttgtttgatttcaag

SEQ ID NO: 48670 - DNA, 25 bp, Saccharomyces pastorianus
atcctgtgtcagttgtttaatctgt

SEQ ID NO: 48671 - DNA, 25 bp, Saccharomyces pastorianus
gatctctcttgttctgttagttgtt

SEQ ID NO: 48672 - DNA, 25 bp, Saccharomyces pastorianus
tagatctctcttgttctgttagttg

SEQ ID NO: 48673 - DNA, 25 bp, Saccharomyces pastorianus
agttaaatcctgtgtcagttgttta

SEQ ID NO: 48674 - DNA, 25 bp, Saccharomyces pastorianus
gttgtttaatctgtttagatctctc

SEQ ID NO: 48675 - DNA, 25 bp, Saccharomyces pastorianus
gacagacaatccttcaacttagtta

SEQ ID NO: 48676 - DNA, 25 bp, Saccharomyces pastorianus
gtttagatctctcttgttctgttag

SEQ ID NO: 48677 - DNA, 25 bp, Saccharomyces pastorianus
aattctctagacattctctgatcca

SEQ ID NO: 48678 - DNA, 25 bp, Saccharomyces pastorianus
cattataatgattggtcgatttgcg

SEQ ID NO: 48679 - DNA, 25 bp, Saccharomyces pastorianus
ttatttatggtgcaacgccgggcgc

SEQ ID NO: 48680 - DNA, 25 bp, Saccharomyces pastorianus
gccgggcgctaatgctcattataat

SEQ ID NO: 48681 - DNA, 25 bp, Saccharomyces pastorianus
aacgccgggcgctaatgctcattat

SEQ ID NO: 48682 - DNA, 25 bp, Saccharomyces pastorianus
atttatggtgcaacgccgggcgcta

SEQ ID NO: 48683 - DNA, 25 bp, Saccharomyces pastorianus
gacttggctagtttccaattctcta

SEQ ID NO: 48684 - DNA, 25 bp, Saccharomyces pastorianus
tcgatttgcgacttggctagtttcc

SEQ ID NO: 48685 - DNA, 25 bp, Saccharomyces pastorianus
aatgtgttatttatggtgcaacgcc

SEQ ID NO: 48686 - DNA, 25 bp, Saccharomyces pastorianus
ctctagacattctctgatccatgct

SEQ ID NO: 48687 - DNA, 25 bp, Saccharomyces pastorianus
ggctagtttccaattctctagacat

SEQ ID NO: 48688 - DNA, 25 bp, Saccharomyces pastorianus
cctcttatagcgcattggcaggtat

SEQ ID NO: 48689 - DNA, 25 bp, Saccharomyces pastorianus
aagctctatcgggtgttgcatacac

SEQ ID NO: 48690 - DNA, 25 bp, Saccharomyces pastorianus
atttcagcaagttgacgcgcctaca

SEQ ID NO: 48691 - DNA, 25 bp, Saccharomyces pastorianus
agcttctattcctacagagatcctc

SEQ ID NO: 48692 - DNA, 25 bp, Saccharomyces pastorianus
ggtacattatacttcccaagctcta

SEQ ID NO: 48693 - DNA, 25 bp, Saccharomyces pastorianus
tgcgtatcctcttatcaagtccgaa

SEQ ID NO: 48694 - DNA, 25 bp, Saccharomyces pastorianus
gagatcctcagcctttgaatagcct

SEQ ID NO: 48695 - DNA, 25 bp, Saccharomyces pastorianus
gacaaatgcttgctcagtggaccaa

SEQ ID NO: 48696 - DNA, 25 bp, Saccharomyces pastorianus
gagcaacttttggacgtttctctcc

SEQ ID NO: 48697 - DNA, 25 bp, Saccharomyces pastorianus
gacgtttctctcctagatgttcata

SEQ ID NO: 48698 - DNA, 25 bp, Saccharomyces pastorianus
taagcactgtaatcgggcccggaat

SEQ ID NO: 48699 - DNA, 25 bp, Saccharomyces pastorianus
ggctgattttggtcttcagttacta

SEQ ID NO: 48700 - DNA, 25 bp, Saccharomyces pastorianus
gaacattttcaaacgcggtatacta

SEQ ID NO: 48701 - DNA, 25 bp, Saccharomyces pastorianus
gtgctacctggctggactaatggaa

SEQ ID NO: 48702 - DNA, 25 bp, Saccharomyces pastorianus
aagcagattgcccatttgaccgtaa

SEQ ID NO: 48703 - DNA, 25 bp, Saccharomyces pastorianus
tcaaggttctgaagacttttccaaa

SEQ ID NO: 48704 - DNA, 25 bp, Saccharomyces pastorianus
ggacggtcactcttctgtgatgtac

SEQ ID NO: 48705 - DNA, 25 bp, Saccharomyces pastorianus
agttactatattccgtgctacctgg

SEQ ID NO: 48706 - DNA, 25 bp, Saccharomyces pastorianus
aagccatgctttacgttttctattc

SEQ ID NO: 48707 - DNA, 25 bp, Saccharomyces pastorianus
gaccgtaaacgcatcgatgccataa

SEQ ID NO: 48708 - DNA, 25 bp, Saccharomyces pastorianus
aataccgtagatcgaattttccaag

SEQ ID NO: 48709 - DNA, 25 bp, Saccharomyces pastorianus
gggtgaacgacactcaactgttaaa

SEQ ID NO: 48710 - DNA, 25 bp, Saccharomyces pastorianus
gaaggtctcctgtgctcttttgagt

SEQ ID NO: 48711 - DNA, 25 bp, Saccharomyces pastorianus
accgttagtgaaggtctcctgtgct

SEQ ID NO: 48712 - DNA, 25 bp, Saccharomyces pastorianus
gaagcctagtcacagtgttttccgc

SEQ ID NO: 48713 - DNA, 25 bp, Saccharomyces pastorianus
gcaccgcgttgaaacaagtcatgaa

SEQ ID NO: 48714 - DNA, 25 bp, Saccharomyces pastorianus
tctcctgtgctcttttgagttgttg

SEQ ID NO: 48715 - DNA, 25 bp, Saccharomyces pastorianus
gatccattggatagcaccgcgttga

SEQ ID NO: 48716 - DNA, 25 bp, Saccharomyces pastorianus
ttttgagttgttggatccattggat

SEQ ID NO: 48717 - DNA, 25 bp, Saccharomyces pastorianus
gatagaagcctagtcacagtgtttt

SEQ ID NO: 48718 - DNA, 25 bp, Saccharomyces pastorianus
gatagcaccgcgttgaaacaagtca

SEQ ID NO: 48719 - DNA, 25 bp, Saccharomyces pastorianus
tcacagtgttttccgccccaaacta

SEQ ID NO: 48720 - DNA, 25 bp, Saccharomyces pastorianus
tagtcacagtgttttccgccccaaa

SEQ ID NO: 48721 - DNA, 25 bp, Saccharomyces pastorianus
tactggatgccggttatgctgcaaa

SEQ ID NO: 48722 - DNA, 25 bp, Saccharomyces pastorianus
ttgcgactcttcaccaagtgtggat

SEQ ID NO: 48723 - DNA, 25 bp, Saccharomyces pastorianus
tcttcatcgtcgtctgcatcaagaa

SEQ ID NO: 48724 - DNA, 25 bp, Saccharomyces pastorianus
caagtgtggattcccgccaatggca

SEQ ID NO: 48725 - DNA, 25 bp, Saccharomyces pastorianus
tgcttatccaacactcgtacacaga

SEQ ID NO: 48726 - DNA, 25 bp, Saccharomyces pastorianus
tcaacctgcgcttttagaactgtcc

SEQ ID NO: 48727 - DNA, 25 bp, Saccharomyces pastorianus
ggcaaactacttatttctgggcgat

SEQ ID NO: 48728 - DNA, 25 bp, Saccharomyces pastorianus
ggacgtcttcttcatctggatctag

SEQ ID NO: 48729 - DNA, 25 bp, Saccharomyces pastorianus
aaaccgattcgtcccattgatatag

SEQ ID NO: 48730 - DNA, 25 bp, Saccharomyces pastorianus
aatatgccgatcttttgcgactctt

SEQ ID NO: 48731 - DNA, 25 bp, Saccharomyces pastorianus
gaaatatttcttgctcaacctgcgc

SEQ ID NO: 48732 - DNA, 25 bp, Saccharomyces pastorianus
ggatctatcgcactgggaaactttt

SEQ ID NO: 48733 - DNA, 25 bp, Saccharomyces pastorianus
ggtttaactttcactattccattgg

SEQ ID NO: 48734 - DNA, 25 bp, Saccharomyces pastorianus
tcttgggttacgtcggtatcttcac

SEQ ID NO: 48735 - DNA, 25 bp, Saccharomyces pastorianus
gctatgcttgctgattacctttgga

SEQ ID NO: 48736 - DNA, 25 bp, Saccharomyces pastorianus
agcactacttggatcgttcggttat

SEQ ID NO: 48737 - DNA, 25 bp, Saccharomyces pastorianus
gtgtctttgtttggtatcatcctga

SEQ ID NO: 48738 - DNA, 25 bp, Saccharomyces pastorianus
gttattctgacatctcctttggtag

SEQ ID NO: 48739 - DNA, 25 bp, Saccharomyces pastorianus
gtgcgtcttcctttttcataggcaa

SEQ ID NO: 48740 - DNA, 25 bp, Saccharomyces pastorianus
ttggagaaacgcatcctttacctct

SEQ ID NO: 48741 - DNA, 25 bp, Saccharomyces pastorianus
agagattctgttagtgcgtcttcct

SEQ ID NO: 48742 - DNA, 25 bp, Saccharomyces pastorianus
gaggtatcatccaagggccttcaac

SEQ ID NO: 48743 - DNA, 25 bp, Saccharomyces pastorianus
gaagatgcgagcgatttgactctat

SEQ ID NO: 48744 - DNA, 25 bp, Saccharomyces pastorianus
ggccgacgttgatgaaagtttgttt

SEQ ID NO: 48745 - DNA, 25 bp, Saccharomyces pastorianus
gtgagataattcctctatgcgatgt

SEQ ID NO: 48746 - DNA, 25 bp, Saccharomyces pastorianus
ctatgcgatgttattctcgtgaata

SEQ ID NO: 48747 - DNA, 25 bp, Saccharomyces pastorianus
gtttgtttagccctaatgccagagg

SEQ ID NO: 48748 - DNA, 25 bp, Saccharomyces pastorianus
tgcgtagtacaagccgctttagaat

SEQ ID NO: 48749 - DNA, 25 bp, Saccharomyces pastorianus
gatgcgaattaagctttggttgtga

SEQ ID NO: 48750 - DNA, 25 bp, Saccharomyces pastorianus
tgaacttctgcccaatttcttatct

SEQ ID NO: 48751 - DNA, 25 bp, Saccharomyces pastorianus
aaggtgatactttcatggatctagg

SEQ ID NO: 48752 - DNA, 25 bp, Saccharomyces pastorianus
gaagtttggcttatcagatcgattt

SEQ ID NO: 48753 - DNA, 25 bp, Saccharomyces pastorianus
tatatctaccgtgatggccgacgtt

SEQ ID NO: 48754 - DNA, 25 bp, Saccharomyces pastorianus
acaagtctactttcggaacatgata

SEQ ID NO: 48755 - DNA, 25 bp, Saccharomyces pastorianus
caaggacactggattggtgcctctt

SEQ ID NO: 48756 - DNA, 25 bp, Saccharomyces pastorianus
tggaatggtccctatttacagttaa

SEQ ID NO: 48757 - DNA, 25 bp, Saccharomyces pastorianus
ctggattggtgcctcttgttgaaaa

SEQ ID NO: 48758 - DNA, 25 bp, Saccharomyces pastorianus
gataggaaccgcaaatccaaggaca

SEQ ID NO: 48759 - DNA, 25 bp, Saccharomyces pastorianus
gaggtcacacaatagttattccgga

SEQ ID NO: 48760 - DNA, 25 bp, Saccharomyces pastorianus
gatattcgttcagcaacaaccgtta

SEQ ID NO: 48761 - DNA, 25 bp, Saccharomyces pastorianus
aattctccacagtcaacaagtctac

SEQ ID NO: 48762 - DNA, 25 bp, Saccharomyces pastorianus
tacgggctctccttacctagagggt

SEQ ID NO: 48763 - DNA, 25 bp, Saccharomyces pastorianus
gtatgatccgaaatacgggctctcc

SEQ ID NO: 48764 - DNA, 25 bp, Saccharomyces pastorianus
ccataccatctgtcactctaaagac

SEQ ID NO: 48765 - DNA, 25 bp, Saccharomyces pastorianus
gaggttgaccgcgaacttgtcccaa

SEQ ID NO: 48766 - DNA, 25 bp, Saccharomyces pastorianus
ttgactagtgctccgctcctaatgg

SEQ ID NO: 48767 - DNA, 25 bp, Saccharomyces pastorianus
tcttgaacttgactagtgctccgct

SEQ ID NO: 48768 - DNA, 25 bp, Saccharomyces pastorianus
cagcaactgcgtgctgtcggagtgt

SEQ ID NO: 48769 - DNA, 25 bp, Saccharomyces pastorianus
ggtatcaccgtcacatttcttgaac

SEQ ID NO: 48770 - DNA, 25 bp, Saccharomyces pastorianus
gctcctaatggcacagcggtgctgt

SEQ ID NO: 48771 - DNA, 25 bp, Saccharomyces pastorianus
atggtttccagcaactgcgtgctgt

SEQ ID NO: 48772 - DNA, 25 bp, Saccharomyces pastorianus
tgaccgcgaacttgtcccaaacggt

SEQ ID NO: 48773 - DNA, 25 bp, Saccharomyces pastorianus
gaacggatgttggaaaatcacaccg

SEQ ID NO: 48774 - DNA, 25 bp, Saccharomyces pastorianus
ggcagttcaagaggttgaccgcgaa

SEQ ID NO: 48775 - DNA, 25 bp, Saccharomyces pastorianus
acagcggtgctgtgaatgcgccaga

SEQ ID NO: 48776 - DNA, 25 bp, Saccharomyces pastorianus
ggtgtgattttccaacatccgttcc

SEQ ID NO: 48777 - DNA, 25 bp, Saccharomyces pastorianus
gggttaagatcgctaacaccgccac

SEQ ID NO: 48778 - DNA, 25 bp, Saccharomyces pastorianus
ggacgtatggtacggcctctctgat

SEQ ID NO: 48779 - DNA, 25 bp, Saccharomyces pastorianus
ggctatccggcagaaacatacacct

SEQ ID NO: 48780 - DNA, 25 bp, Saccharomyces pastorianus
ggaatactcccagacgacgaactaa

SEQ ID NO: 48781 - DNA, 25 bp, Saccharomyces pastorianus
gcagttgctggaaaccatcctggaa

SEQ ID NO: 48782 - DNA, 25 bp, Saccharomyces pastorianus
ctctctgatggcacggatggtcata

SEQ ID NO: 48783 - DNA, 25 bp, Saccharomyces pastorianus
tgatgaacacgcttatccacaccag

SEQ ID NO: 48784 - DNA, 25 bp, Saccharomyces pastorianus
gacaattccaagatctcgttcatag

SEQ ID NO: 48785 - DNA, 25 bp, Saccharomyces pastorianus
tggaagagttccgtaacctggccgc

SEQ ID NO: 48786 - DNA, 25 bp, Saccharomyces pastorianus
ttgggacaagttcgcggtcaacctc

SEQ ID NO: 48787 - DNA, 25 bp, Saccharomyces pastorianus
ttggaagatcccctcaaaacgatat

SEQ ID NO: 48788 - DNA, 25 bp, Saccharomyces pastorianus
ggcagacctatccagctctgaagaa

SEQ ID NO: 48789 - DNA, 25 bp, Saccharomyces pastorianus
ggcgtagaagtgtttttgcaccatt

SEQ ID NO: 48790 - DNA, 25 bp, Saccharomyces pastorianus
tattcgtccattccaagtttgcaag

SEQ ID NO: 48791 - DNA, 25 bp, Saccharomyces pastorianus
aacttcgacgtttctatggcagacc

SEQ ID NO: 48792 - DNA, 25 bp, Saccharomyces pastorianus
gtaataatatccatgagccgcaata

SEQ ID NO: 48793 - DNA, 25 bp, Saccharomyces pastorianus
gagatgactctacctacaagtccat

SEQ ID NO: 48794 - DNA, 25 bp, Saccharomyces pastorianus
cttcccgtagaaacacctcgtgata

SEQ ID NO: 48795 - DNA, 25 bp, Saccharomyces pastorianus
ggacatgccatttttcacgtctgag

SEQ ID NO: 48796 - DNA, 25 bp, Saccharomyces pastorianus
gaaactttctgacaacgttagcact

SEQ ID NO: 48797 - DNA, 25 bp, Saccharomyces pastorianus
tatacatggatcctggtgcaccact

SEQ ID NO: 48798 - DNA, 25 bp, Saccharomyces pastorianus
gaaggcaaccttacaatggacccta

SEQ ID NO: 48799 - DNA, 25 bp, Saccharomyces pastorianus
gcgttatcggtactgacagcgtcta

SEQ ID NO: 48800 - DNA, 25 bp, Saccharomyces pastorianus
aattgcctcccttacattacgagaa

SEQ ID NO: 48801 - DNA, 25 bp, Saccharomyces pastorianus
gtagcgagcttgttgatgatccaaa

SEQ ID NO: 48802 - DNA, 25 bp, Saccharomyces pastorianus
tatcatccagaagaattgcctccct

SEQ ID NO: 48803 - DNA, 25 bp, Saccharomyces pastorianus
aataccttattatccgcgttatcgg

SEQ ID NO: 48804 - DNA, 25 bp, Saccharomyces pastorianus
aaaagatgaaccagaccagcctcga

SEQ ID NO: 48805 - DNA, 25 bp, Saccharomyces pastorianus
aatctgtatggttacgttgccgtcg

SEQ ID NO: 48806 - DNA, 25 bp, Saccharomyces pastorianus
gcaccatttcggtaccaaagtttgt

SEQ ID NO: 48807 - DNA, 25 bp, Saccharomyces pastorianus
acgttgccgtcgaacacatggttga

SEQ ID NO: 48808 - DNA, 25 bp, Saccharomyces pastorianus
aatgaggctgtctcggattcggata

SEQ ID NO: 48809 - DNA, 25 bp, Saccharomyces pastorianus
caagagactttgtgatgaaatcgcc

SEQ ID NO: 48810 - DNA, 25 bp, Saccharomyces pastorianus
aaccaacaagagactttgtgatgaa

SEQ ID NO: 48811 - DNA, 25 bp, Saccharomyces pastorianus
agagactttgtgatgaaatcgccac

SEQ ID NO: 48812 - DNA, 25 bp, Saccharomyces pastorianus
aaaccaacaagagactttgtgatga

SEQ ID NO: 48813 - DNA, 25 bp, Saccharomyces pastorianus
ccaaaccaacaagagactttgtgat

SEQ ID NO: 48814 - DNA, 25 bp, Saccharomyces pastorianus
gatttccaaaccaacaagagacttt

SEQ ID NO: 48815 - DNA, 25 bp, Saccharomyces pastorianus
atttccaaaccaacaagagactttg

SEQ ID NO: 48816 - DNA, 25 bp, Saccharomyces pastorianus
aagagactttgtgatgaaatcgcca

SEQ ID NO: 48817 - DNA, 25 bp, Saccharomyces pastorianus
tttccaaaccaacaagagactttgt

SEQ ID NO: 48818 - DNA, 25 bp, Saccharomyces pastorianus
cccatttgatgaagagaatccaaaa

SEQ ID NO: 48819 - DNA, 25 bp, Saccharomyces pastorianus
ttccaaaccaacaagagactttgtg

SEQ ID NO: 48820 - DNA, 25 bp, Saccharomyces pastorianus
taatcaaagaagtcgtgttcaggga

SEQ ID NO: 48821 - DNA, 25 bp, Saccharomyces pastorianus
gaagtcgtgttcagggagttactaa

SEQ ID NO: 48822 - DNA, 25 bp, Saccharomyces pastorianus
ttactaaagactggcggcaacctaa

SEQ ID NO: 48823 - DNA, 25 bp, Saccharomyces pastorianus
actggcggcaacctaagcaaaagcg

SEQ ID NO: 48824 - DNA, 25 bp, Saccharomyces pastorianus
gggagttactaaagactggcggcaa

SEQ ID NO: 48825 - DNA, 25 bp, Saccharomyces pastorianus
gagttactaaagactggcggcaacc

SEQ ID NO: 48826 - DNA, 25 bp, Saccharomyces pastorianus
gttactaaagactggcggcaaccta

SEQ ID NO: 48827 - DNA, 25 bp, Saccharomyces pastorianus
aaagactggcggcaacctaagcaaa

SEQ ID NO: 48828 - DNA, 25 bp, Saccharomyces pastorianus
caaagaagtcgtgttcagggagtta

SEQ ID NO: 48829 - DNA, 25 bp, Saccharomyces pastorianus
agactggcggcaacctaagcaaaag

SEQ ID NO: 48830 - DNA, 25 bp, Saccharomyces pastorianus
tggcggcaacctaagcaaaagcgca

SEQ ID NO: 48831 - DNA, 25 bp, Saccharomyces pastorianus
acccgatgatcagcctttggatatt

SEQ ID NO: 48832 - DNA, 25 bp, Saccharomyces pastorianus
tgatagccatttgatggattacaga

SEQ ID NO: 48833 - DNA, 25 bp, Saccharomyces pastorianus
tttgaacccgatgatcagcctttgg

SEQ ID NO: 48834 - DNA, 25 bp, Saccharomyces pastorianus
aacccgatgatcagcctttggatat

SEQ ID NO: 48835 - DNA, 25 bp, Saccharomyces pastorianus
ccgatgatcagcctttggatattga

SEQ ID NO: 48836 - DNA, 25 bp, Saccharomyces pastorianus
tttgatagccatttgatggattaca

SEQ ID NO: 48837 - DNA, 25 bp, Saccharomyces pastorianus
ttttgaacccgatgatcagcctttg

SEQ ID NO: 48838 - DNA, 25 bp, Saccharomyces pastorianus
gaacccgatgatcagcctttggata

SEQ ID NO: 48839 - DNA, 25 bp, Saccharomyces pastorianus
tgaacccgatgatcagcctttggat

SEQ ID NO: 48840 - DNA, 25 bp, Saccharomyces pastorianus
gtttttgaacccgatgatcagcctt

SEQ ID NO: 48841 - DNA, 25 bp, Saccharomyces pastorianus
ttgaacccgatgatcagcctttgga

SEQ ID NO: 48842 - DNA, 25 bp, Saccharomyces pastorianus
gtgatattcagcatgcatctgacta

SEQ ID NO: 48843 - DNA, 25 bp, Saccharomyces pastorianus
tggctcttctacgatggcatcatta

SEQ ID NO: 48844 - DNA, 25 bp, Saccharomyces pastorianus
atttgctcgcgttatggctgcacag

SEQ ID NO: 48845 - DNA, 25 bp, Saccharomyces pastorianus
gaatcaaaccatttgctcgcgttat

SEQ ID NO: 48846 - DNA, 25 bp, Saccharomyces pastorianus
gcagcaactgtgtatacagctcaaa

SEQ ID NO: 48847 - DNA, 25 bp, Saccharomyces pastorianus
atctgactatgcattgttgtccaat

SEQ ID NO: 48848 - DNA, 25 bp, Saccharomyces pastorianus
gttacagatcaaattccgcgcatag

SEQ ID NO: 48849 - DNA, 25 bp, Saccharomyces pastorianus
gcacgtacgagaaatttggctcttc

SEQ ID NO: 48850 - DNA, 25 bp, Saccharomyces pastorianus
atgagggcagtagtcgttacagatc

SEQ ID NO: 48851 - DNA, 25 bp, Saccharomyces pastorianus
tttaacgacgttagaagcaggcctt

SEQ ID NO: 48852 - DNA, 25 bp, Saccharomyces pastorianus
gcaggccttaaatacgatcgagata

SEQ ID NO: 48853 - DNA, 25 bp, Saccharomyces pastorianus
tgtccaaatcatgcaaaacccaact

SEQ ID NO: 48854 - DNA, 25 bp, Saccharomyces pastorianus
tcaagatcgtctacgccttgactac

SEQ ID NO: 48855 - DNA, 25 bp, Saccharomyces pastorianus
gatcgtctacgccttgactaccatc

SEQ ID NO: 48856 - DNA, 25 bp, Saccharomyces pastorianus
ggtaacatcaagatcgtctacgcct

SEQ ID NO: 48857 - DNA, 25 bp, Saccharomyces pastorianus
atctaagttgagagacgatttggaa

SEQ ID NO: 48858 - DNA, 25 bp, Saccharomyces pastorianus
gtcgaatctaagttgagagacgatt

SEQ ID NO: 48859 - DNA, 25 bp, Saccharomyces pastorianus
gtctacgccttgactaccatcaagg

SEQ ID NO: 48860 - DNA, 25 bp, Saccharomyces pastorianus
taacatcaagatcgtctacgccttg

SEQ ID NO: 48861 - DNA, 25 bp, Saccharomyces pastorianus
taccatcaagggtgttggccgtcgt

SEQ ID NO: 48862 - DNA, 25 bp, Saccharomyces pastorianus
gaattgtccaaatcatgcaaaaccc

SEQ ID NO: 48863 - DNA, 25 bp, Saccharomyces pastorianus
gactaccatcaagggtgttggccgt

SEQ ID NO: 48864 - DNA, 25 bp, Saccharomyces pastorianus
tgtccaaatcatgcaaaacccaact

SEQ ID NO: 48865 - DNA, 25 bp, Saccharomyces pastorianus
tcaagatcgtctacgccttgactac

SEQ ID NO: 48866 - DNA, 25 bp, Saccharomyces pastorianus
gaacactaacgttgacggtaacatc

SEQ ID NO: 48867 - DNA, 25 bp, Saccharomyces pastorianus
gtcgaatctaagttgagagacgatt

SEQ ID NO: 48868 - DNA, 25 bp, Saccharomyces pastorianus
caacttggtctgtaagaaggccgat

SEQ ID NO: 48869 - DNA, 25 bp, Saccharomyces pastorianus
ttggcttttttatacagtttgttga

SEQ ID NO: 48870 - DNA, 25 bp, Saccharomyces pastorianus
gtctacgccttgactaccatcaagg

SEQ ID NO: 48871 - DNA, 25 bp, Saccharomyces pastorianus
taccatcaagggtgttggccgtcgt

SEQ ID NO: 48872 - DNA, 25 bp, Saccharomyces pastorianus
gtaacatcaagatcgtctacgcctt

SEQ ID NO: 48873 - DNA, 25 bp, Saccharomyces pastorianus
agaaggccgatgttgatttacaaaa

SEQ ID NO: 48874 - DNA, 25 bp, Saccharomyces pastorianus
ttggccgtcgttactccaacttggt

SEQ ID NO: 48875 - DNA, 25 bp, Saccharomyces pastorianus
ccaaaactggcgctcatgaaaaaat

SEQ ID NO: 48876 - DNA, 25 bp, Saccharomyces pastorianus
cgatcgacgatttgagaaagagact

SEQ ID NO: 48877 - DNA, 25 bp, Saccharomyces pastorianus
tagaggatcccgctagatttttgtt

SEQ ID NO: 48878 - DNA, 25 bp, Saccharomyces pastorianus
tcgctccaccatcgatcgacgattt

SEQ ID NO: 48879 - DNA, 25 bp, Saccharomyces pastorianus
aaaccgaagaatccatctccaagag

SEQ ID NO: 48880 - DNA, 25 bp, Saccharomyces pastorianus
cgccgctgaagctgaattagcatac

SEQ ID NO: 48881 - DNA, 25 bp, Saccharomyces pastorianus
tggcgctcatgaaaaaatcatcgtt

SEQ ID NO: 48882 - DNA, 25 bp, Saccharomyces pastorianus
agatttttgtttgtcgctccaccat

SEQ ID NO: 48883 - DNA, 25 bp, Saccharomyces pastorianus
gctagatttttgtttgtcgctccac

SEQ ID NO: 48884 - DNA, 25 bp, Saccharomyces pastorianus
actggagggcagaggtactgaaacc

SEQ ID NO: 48885 - DNA, 25 bp, Saccharomyces pastorianus
tgaattagcatacgccaaaactggc

SEQ ID NO: 48886 - DNA, 25 bp, Saccharomyces pastorianus
acaggtaaatctaccttattgaaga

SEQ ID NO: 48887 - DNA, 25 bp, Saccharomyces pastorianus
tccttcggatttagtgtttcgtcca

SEQ ID NO: 48888 - DNA, 25 bp, Saccharomyces pastorianus
tttagtgtttcgtccactaccagag

SEQ ID NO: 48889 - DNA, 25 bp, Saccharomyces pastorianus
cctattgttatttccggtccaagcg

SEQ ID NO: 48890 - DNA, 25 bp, Saccharomyces pastorianus
ctgagtacccaaaatccttcggatt

SEQ ID NO: 48891 - DNA, 25 bp, Saccharomyces pastorianus
agagctccaagagccggtgaggtca

SEQ ID NO: 48892 - DNA, 25 bp, Saccharomyces pastorianus
ttgctgagtacccaaaatccttcgg

SEQ ID NO: 48893 - DNA, 25 bp, Saccharomyces pastorianus
aagaaactatttgctgagtacccaa

SEQ ID NO: 48894 - DNA, 25 bp, Saccharomyces pastorianus
cggtccaagcggtacaggtaaatct

SEQ ID NO: 48895 - DNA, 25 bp, Saccharomyces pastorianus
gttatttccggtccaagcggtacag

SEQ ID NO: 48896 - DNA, 25 bp, Saccharomyces pastorianus
tcgtccactaccagagctccaagag

SEQ ID NO: 48897 - DNA, 25 bp, Saccharomyces pastorianus
gggcttatatcaacatcgggatcac

SEQ ID NO: 48898 - DNA, 25 bp, Saccharomyces pastorianus
acatcgggatcacctgttatgggat

SEQ ID NO: 48899 - DNA, 25 bp, Saccharomyces pastorianus
ggatcatcgacatccggtagatcag

SEQ ID NO: 48900 - DNA, 25 bp, Saccharomyces pastorianus
ggtcagcagcaccttgaatgctata

SEQ ID NO: 48901 - DNA, 25 bp, Saccharomyces pastorianus
aatcaacggccctcttagcggtggt

SEQ ID NO: 48902 - DNA, 25 bp, Saccharomyces pastorianus
catcgtcatcagaatcaacggccct

SEQ ID NO: 48903 - DNA, 25 bp, Saccharomyces pastorianus
acatttcttcagtaacagggcttat

SEQ ID NO: 48904 - DNA, 25 bp, Saccharomyces pastorianus
atcacctgttatgggatcatcgaca

SEQ ID NO: 48905 - DNA, 25 bp, Saccharomyces pastorianus
gaatgctatatttagcaacacctta

SEQ ID NO: 48906 - DNA, 25 bp, Saccharomyces pastorianus
ttagcggtggtcagcagcaccttga

SEQ ID NO: 48907 - DNA, 25 bp, Saccharomyces pastorianus
taacagggcttatatcaacatcggg

SEQ ID NO: 48908 - DNA, 25 bp, Saccharomyces pastorianus
tacggtggttctgtattgatcgccc

SEQ ID NO: 48909 - DNA, 25 bp, Saccharomyces pastorianus
ttttctaattcaagaccgtcatggg

SEQ ID NO: 48910 - DNA, 25 bp, Saccharomyces pastorianus
ctatactattgagcggtgtacccaa

SEQ ID NO: 48911 - DNA, 25 bp, Saccharomyces pastorianus
atgctacttatgtttttcgttcaac

SEQ ID NO: 48912 - DNA, 25 bp, Saccharomyces pastorianus
gttgccgttggactttgaaatggac

SEQ ID NO: 48913 - DNA, 25 bp, Saccharomyces pastorianus
ggcgcgtcaaactgcaatgccattt

SEQ ID NO: 48914 - DNA, 25 bp, Saccharomyces pastorianus
aatgccatttgggagcggatattca

SEQ ID NO: 48915 - DNA, 25 bp, Saccharomyces pastorianus
gtattgatcgccctgagtgtttttt

SEQ ID NO: 48916 - DNA, 25 bp, Saccharomyces pastorianus
gaaattgtttggttgccgttggact

SEQ ID NO: 48917 - DNA, 25 bp, Saccharomyces pastorianus
ggtcgtctgcaatcgaaggatgcta

SEQ ID NO: 48918 - DNA, 25 bp, Saccharomyces pastorianus
gttcaacttccaaaaggcgcgtcaa

SEQ ID NO: 48919 - DNA, 25 bp, Saccharomyces pastorianus
gcctctttccaaacctaagctagaa

SEQ ID NO: 48920 - DNA, 25 bp, Saccharomyces pastorianus
aaagatgattcaaacccaccacggg

SEQ ID NO: 48921 - DNA, 25 bp, Saccharomyces pastorianus
gctgatctgtcatctattagagcgg

SEQ ID NO: 48922 - DNA, 25 bp, Saccharomyces pastorianus
gagttggcaagtgcgaccaccgaga

SEQ ID NO: 48923 - DNA, 25 bp, Saccharomyces pastorianus
gagcgtttggaatcttcttctggaa

SEQ ID NO: 48924 - DNA, 25 bp, Saccharomyces pastorianus
gaacccctctaggtgaaaatccagt

SEQ ID NO: 48925 - DNA, 25 bp, Saccharomyces pastorianus
gtcactaaaccgttagagcctcttt

SEQ ID NO: 48926 - DNA, 25 bp, Saccharomyces pastorianus
ttagtaactttatcctccgaaatgg

SEQ ID NO: 48927 - DNA, 25 bp, Saccharomyces pastorianus
gcaagaatcaagctctgatgcgagt

SEQ ID NO: 48928 - DNA, 25 bp, Saccharomyces pastorianus
gagagctatgaccactccataaaat

SEQ ID NO: 48929 - DNA, 25 bp, Saccharomyces pastorianus
aatccagtagccgagaagtttgcaa

SEQ ID NO: 48930 - DNA, 25 bp, Saccharomyces pastorianus
tcgagactcaaagacgccgtaccat

SEQ ID NO: 48931 - DNA, 25 bp, Saccharomyces pastorianus
catgaacgtgcagaactcgagactc

SEQ ID NO: 48932 - DNA, 25 bp, Saccharomyces pastorianus
gagacatacacccaaggttcaactt

SEQ ID NO: 48933 - DNA, 25 bp, Saccharomyces pastorianus
gagggcgtcaagaatacggtcaagt

SEQ ID NO: 48934 - DNA, 25 bp, Saccharomyces pastorianus
gttcatcaaggacctcgagcacagg

SEQ ID NO: 48935 - DNA, 25 bp, Saccharomyces pastorianus
gaactgaacagggtgctcaagaaca

SEQ ID NO: 48936 - DNA, 25 bp, Saccharomyces pastorianus
agtgtacaacgacccgttcatcaag

SEQ ID NO: 48937 - DNA, 25 bp, Saccharomyces pastorianus
gctcaagaacaacccgtacttcaat

SEQ ID NO: 48938 - DNA, 25 bp, Saccharomyces pastorianus
aacaggctgagtacgtccacacagg

SEQ ID NO: 48939 - DNA, 25 bp, Saccharomyces pastorianus
gttaacgaaacgatcgagggcgtca

SEQ ID NO: 48940 - DNA, 25 bp, Saccharomyces pastorianus
gagtttgttgcgtccgggttcaaca

SEQ ID NO: 48941 - DNA, 25 bp, Saccharomyces pastorianus
acctgtcgccagatgtgaagtttct

SEQ ID NO: 48942 - DNA, 25 bp, Saccharomyces pastorianus
gatctgtgagtcatgcgtggaccga

SEQ ID NO: 48943 - DNA, 25 bp, Saccharomyces pastorianus
gagaaagaggtcgacatcaggaaaa

SEQ ID NO: 48944 - DNA, 25 bp, Saccharomyces pastorianus
ggacgattttaatggagaccttgct

SEQ ID NO: 48945 - DNA, 25 bp, Saccharomyces pastorianus
tagtgaatcctgagtgctaccacag

SEQ ID NO: 48946 - DNA, 25 bp, Saccharomyces pastorianus
gaagtttctagtgaatcctgagtgc

SEQ ID NO: 48947 - DNA, 25 bp, Saccharomyces pastorianus
aaattcaagactcagatattcgatg

SEQ ID NO: 48948 - DNA, 25 bp, Saccharomyces pastorianus
cgtggaccgaatatttagtctgggt

SEQ ID NO: 48949 - DNA, 25 bp, Saccharomyces pastorianus
gtatttaacaaaaccatggacgatt

SEQ ID NO: 48950 - DNA, 25 bp, Saccharomyces pastorianus
aatggagaccttgctgaatttaaaa

SEQ ID NO: 48951 - DNA, 25 bp, Saccharomyces pastorianus
aacagatcgatacctgtcgccagat

SEQ ID NO: 48952 - DNA, 25 bp, Saccharomyces pastorianus
aagagcaatgtctctgggcccgcag

SEQ ID NO: 48953 - DNA, 25 bp, Saccharomyces pastorianus
gaccatttcgaaacctagcttgctt

SEQ ID NO: 48954 - DNA, 25 bp, Saccharomyces pastorianus
tcagcagatgcgagtatcccgacta

SEQ ID NO: 48955 - DNA, 25 bp, Saccharomyces pastorianus
ttcttcgtgtccagcactttgagat

SEQ ID NO: 48956 - DNA, 25 bp, Saccharomyces pastorianus
gacggataagctgtgcaccaacttc

SEQ ID NO: 48957 - DNA, 25 bp, Saccharomyces pastorianus
agatccaggtccatgtgcacacgaa

SEQ ID NO: 48958 - DNA, 25 bp, Saccharomyces pastorianus
gtttgactacattacactcgtgatt

SEQ ID NO: 48959 - DNA, 25 bp, Saccharomyces pastorianus
gagtctgccacgaggtctaggtcca

SEQ ID NO: 48960 - DNA, 25 bp, Saccharomyces pastorianus
tctaggtccaggtcgagatccaggt

SEQ ID NO: 48961 - DNA, 25 bp, Saccharomyces pastorianus
gattcccacttttattgttccggcg

SEQ ID NO: 48962 - DNA, 25 bp, Saccharomyces pastorianus
tcgtgattcctaaagaccgttccgt

SEQ ID NO: 48963 - DNA, 25 bp, Saccharomyces pastorianus
tttcgacagaatgttccgcatcgct

SEQ ID NO: 48964 - DNA, 25 bp, Saccharomyces pastorianus
gagtcggccgtattgtgatgctgct

SEQ ID NO: 48965 - DNA, 25 bp, Saccharomyces pastorianus
acgctgaggtttcttcacacggaga

SEQ ID NO: 48966 - DNA, 25 bp, Saccharomyces pastorianus
gcacgcaagcatgtgggattcctta

SEQ ID NO: 48967 - DNA, 25 bp, Saccharomyces pastorianus
gcgcttacgacaaagtgcacacctt

SEQ ID NO: 48968 - DNA, 25 bp, Saccharomyces pastorianus
cccggaatgctctgttcgtttataa

SEQ ID NO: 48969 - DNA, 25 bp, Saccharomyces pastorianus
agacgcacaaactgggcctgcagga

SEQ ID NO: 48970 - DNA, 25 bp, Saccharomyces pastorianus
agaccggccagcacatcgagaagat

SEQ ID NO: 48971 - DNA, 25 bp, Saccharomyces pastorianus
gtgtacttcatcgacaacgactcgg

SEQ ID NO: 48972 - DNA, 25 bp, Saccharomyces pastorianus
gcacacctttatttgcagggactat

SEQ ID NO: 48973 - DNA, 25 bp, Saccharomyces pastorianus
tgttcggatctcgagcatcacacaa

SEQ ID NO: 48974 - DNA, 25 bp, Saccharomyces pastorianus
tgggactcgaattctcactgggtgc

SEQ ID NO: 48975 - DNA, 25 bp, Saccharomyces pastorianus
tctaatatctcagcgagtctcggcg

SEQ ID NO: 48976 - DNA, 25 bp, Saccharomyces pastorianus
ccagaaatatctgcctgcctataaa

SEQ ID NO: 48977 - DNA, 25 bp, Saccharomyces pastorianus
ggagatcgtcaaccccttaagagaa

SEQ ID NO: 48978 - DNA, 25 bp, Saccharomyces pastorianus
gggagcaccgattggtaattgtttt

SEQ ID NO: 48979 - DNA, 25 bp, Saccharomyces pastorianus
agtggcgcccggttggattttctga

SEQ ID NO: 48980 - DNA, 25 bp, Saccharomyces pastorianus
gtgcttgatttggaccctaaggagt

SEQ ID NO: 48981 - DNA, 25 bp, Saccharomyces pastorianus
gactatgctcttttctctgatctaa

SEQ ID NO: 48982 - DNA, 25 bp, Saccharomyces pastorianus
tgcctataaagagtggcgcccggtt

SEQ ID NO: 48983 - DNA, 25 bp, Saccharomyces pastorianus
gattttctgatgacgactatgctct

SEQ ID NO: 48984 - DNA, 25 bp, Saccharomyces pastorianus
gaactcagtgaagtctcaagatcat

SEQ ID NO: 48985 - DNA, 25 bp, Saccharomyces pastorianus
aagccccgttgcgaaacaggtactg

SEQ ID NO: 48986 - DNA, 25 bp, Saccharomyces pastorianus
gtgtccatctccaataatagcgaat

SEQ ID NO: 48987 - DNA, 25 bp, Saccharomyces pastorianus
tagctgctgcaatccaggagtgtcc

SEQ ID NO: 48988 - DNA, 25 bp, Saccharomyces pastorianus
gcatccatatgctgggctgtcatcg

SEQ ID NO: 48989 - DNA, 25 bp, Saccharomyces pastorianus
gaaggttactatccttcactctacc

SEQ ID NO: 48990 - DNA, 25 bp, Saccharomyces pastorianus
tgtcatcggtaccttactatccata

SEQ ID NO: 48991 - DNA, 25 bp, Saccharomyces pastorianus
gtactgggcgaagacgtggcactta

SEQ ID NO: 48992 - DNA, 25 bp, Saccharomyces pastorianus
gcaccagcaaatcaaccctagagtt

SEQ ID NO: 48993 - DNA, 25 bp, Saccharomyces pastorianus
gacgatatgcaccattgtaacgcta

SEQ ID NO: 48994 - DNA, 25 bp, Saccharomyces pastorianus
atagcgaatccgtacgtggtggctc

SEQ ID NO: 48995 - DNA, 25 bp, Saccharomyces pastorianus
gataataccatgacatcctccaaca

SEQ ID NO: 48996 - DNA, 25 bp, Saccharomyces pastorianus
ccagggctggacgaagatagattga

SEQ ID NO: 48997 - DNA, 25 bp, Saccharomyces pastorianus
gctggtatctccagggctggacgaa

SEQ ID NO: 48998 - DNA, 25 bp, Saccharomyces pastorianus
aatccctgcaaggtaaagcaactag

SEQ ID NO: 48999 - DNA, 25 bp, Saccharomyces pastorianus
tattcaggcgccaagtgagagctct

SEQ ID NO: 49000 - DNA, 25 bp, Saccharomyces pastorianus
gagcgagagaatgatcttgaagatc

SEQ ID NO: 49001 - DNA, 25 bp, Saccharomyces pastorianus
tctgagccaaatccctgcaaggtaa

SEQ ID NO: 49002 - DNA, 25 bp, Saccharomyces pastorianus
aaaggacaactattcaggcgccaag

SEQ ID NO: 49003 - DNA, 25 bp, Saccharomyces pastorianus
gcgccaagtgagagctctgagccaa

SEQ ID NO: 49004 - DNA, 25 bp, Saccharomyces pastorianus
ggcccgcagcgagagcaaaggacaa

SEQ ID NO: 49005 - DNA, 25 bp, Saccharomyces pastorianus
agagctctgagccaaatccctgcaa

SEQ ID NO: 49006 - DNA, 25 bp, Saccharomyces pastorianus
caactaggaatgatgctggtatctc

SEQ ID NO: 49007 - DNA, 25 bp, Saccharomyces pastorianus
aatacgccaccgaacttgaaggatt

SEQ ID NO: 49008 - DNA, 25 bp, Saccharomyces pastorianus
gccgaagctgctgatcatgcaagat

SEQ ID NO: 49009 - DNA, 25 bp, Saccharomyces pastorianus
agcgctagccaattttccatctttt

SEQ ID NO: 49010 - DNA, 25 bp, Saccharomyces pastorianus
gattaagatcaaaacgcagcctcca

SEQ ID NO: 49011 - DNA, 25 bp, Saccharomyces pastorianus
gtcctcctctaatgtgggcatatcg

SEQ ID NO: 49012 - DNA, 25 bp, Saccharomyces pastorianus
attcaggatcccatccctaaggaag

SEQ ID NO: 49013 - DNA, 25 bp, Saccharomyces pastorianus
gcatgatttatcagcgctagccaat

SEQ ID NO: 49014 - DNA, 25 bp, Saccharomyces pastorianus
cttatttggttctcagtggtctcat

SEQ ID NO: 49015 - DNA, 25 bp, Saccharomyces pastorianus
tggtctcatatgaacgccacatcca

SEQ ID NO: 49016 - DNA, 25 bp, Saccharomyces pastorianus
tcaccatctcagttatcagtaccgt

SEQ ID NO: 49017 - DNA, 25 bp, Saccharomyces pastorianus
aatttatgatttccccaatacgcca

SEQ ID NO: 49018 - DNA, 25 bp, Saccharomyces pastorianus
ggattcgcaatcttggtccatgacg

SEQ ID NO: 49019 - DNA, 25 bp, Saccharomyces pastorianus
aacgcaccaccaaatttcatcgatg

SEQ ID NO: 49020 - DNA, 25 bp, Saccharomyces pastorianus
ggctctgaagatcctgaacaaacgt

SEQ ID NO: 49021 - DNA, 25 bp, Saccharomyces pastorianus
ggatgctctggctcaagaagacttc

SEQ ID NO: 49022 - DNA, 25 bp, Saccharomyces pastorianus
gatcacgataaacgctctcaagcaa

SEQ ID NO: 49023 - DNA, 25 bp, Saccharomyces pastorianus
gaagacttcactttgcaaaccaccg

SEQ ID NO: 49024 - DNA, 25 bp, Saccharomyces pastorianus
gacgcaggcccagatgaccaatgat

SEQ ID NO: 49025 - DNA, 25 bp, Saccharomyces pastorianus
gttagatactcaaattgcccagctg

SEQ ID NO: 49026 - DNA, 25 bp, Saccharomyces pastorianus
cttcgttgcggaaacaggctctgaa

SEQ ID NO: 49027 - DNA, 25 bp, Saccharomyces pastorianus
ctaactacttgctaggcgctaacgc

SEQ ID NO: 49028 - DNA, 25 bp, Saccharomyces pastorianus
acaacggcgagctcgatgacatcag

SEQ ID NO: 49029 - DNA, 25 bp, Saccharomyces pastorianus
atacgggaaccaaaagagccatgac

SEQ ID NO: 49030 - DNA, 25 bp, Saccharomyces pastorianus
gctcttgcaagagtccaatcaatcc

SEQ ID NO: 49031 - DNA, 25 bp, Saccharomyces pastorianus
cgggaaccaaaagagccatgaccag

SEQ ID NO: 49032 - DNA, 25 bp, Saccharomyces pastorianus
caatcaatccatgaatcaggctcag

SEQ ID NO: 49033 - DNA, 25 bp, Saccharomyces pastorianus
tgaccagctcttgcaagagtccaat

SEQ ID NO: 49034 - DNA, 25 bp, Saccharomyces pastorianus
tgcaagagtccaatcaatccatgaa

SEQ ID NO: 49035 - DNA, 25 bp, Saccharomyces pastorianus
gtccaatcaatccatgaatcaggct

SEQ ID NO: 49036 - DNA, 25 bp, Saccharomyces pastorianus
acagaatattcggatacgggaacca

SEQ ID NO: 49037 - DNA, 25 bp, Saccharomyces pastorianus
cagaatattcggatacgggaaccaa

SEQ ID NO: 49038 - DNA, 25 bp, Saccharomyces pastorianus
gaccagctcttgcaagagtccaatc

SEQ ID NO: 49039 - DNA, 25 bp, Saccharomyces pastorianus
catgaatcaggctcagcaatcgtta

SEQ ID NO: 49040 - DNA, 25 bp, Saccharomyces pastorianus
tatgtgtgtgctcccatgaccaatg

SEQ ID NO: 49041 - DNA, 25 bp, Saccharomyces pastorianus
gtgatctgatttgcgctgctgaaaa

SEQ ID NO: 49042 - DNA, 25 bp, Saccharomyces pastorianus
gggaccgcgtacacgataaccgtag

SEQ ID NO: 49043 - DNA, 25 bp, Saccharomyces pastorianus
gaccagggcaccatgatgagactaa

SEQ ID NO: 49044 - DNA, 25 bp, Saccharomyces pastorianus
ggtatctctgctcacgacagatcga

SEQ ID NO: 49045 - DNA, 25 bp, Saccharomyces pastorianus
gataaccgtagatgtcgcccaggac

SEQ ID NO: 49046 - DNA, 25 bp, Saccharomyces pastorianus
aggacaccactacaggtatctctgc

SEQ ID NO: 49047 - DNA, 25 bp, Saccharomyces pastorianus
aagtcattcttgaagccgggccaca

SEQ ID NO: 49048 - DNA, 25 bp, Saccharomyces pastorianus
ttgtacgtcactcttcgggctatgt

SEQ ID NO: 49049 - DNA, 25 bp, Saccharomyces pastorianus
gagcaaatggccttccttgtacgtc

SEQ ID NO: 49050 - DNA, 25 bp, Saccharomyces pastorianus
gaagttcgagtccaacgacgacgac

SEQ ID NO: 49051 - DNA, 25 bp, Saccharomyces pastorianus
atgatgagactaaacgattgtcaag

SEQ ID NO: 49052 - DNA, 25 bp, Saccharomyces pastorianus
atgagactaaacgattgtcaagaat

SEQ ID NO: 49053 - DNA, 25 bp, Saccharomyces pastorianus
tcggcaagaaacacggcattccttt

SEQ ID NO: 49054 - DNA, 25 bp, Saccharomyces pastorianus
gattgtcaagaattcggcaagaaac

SEQ ID NO: 49055 - DNA, 25 bp, Saccharomyces pastorianus
tgatgagactaaacgattgtcaaga

SEQ ID NO: 49056 - DNA, 25 bp, Saccharomyces pastorianus
attcggcaagaaacacggcattcct

SEQ ID NO: 49057 - DNA, 25 bp, Saccharomyces pastorianus
attgtcaagaattcggcaagaaaca

SEQ ID NO: 49058 - DNA, 25 bp, Saccharomyces pastorianus
gaaacacggcattcctttgatttct

SEQ ID NO: 49059 - DNA, 25 bp, Saccharomyces pastorianus
gatgagactaaacgattgtcaagaa

SEQ ID NO: 49060 - DNA, 25 bp, Saccharomyces pastorianus
ttcggcaagaaacacggcattcctt

SEQ ID NO: 49061 - DNA, 25 bp, Saccharomyces pastorianus
gctgtcatgttcaacggactggacc

SEQ ID NO: 49062 - DNA, 25 bp, Saccharomyces pastorianus
gtagtgcgtatttgcagcggctgaa

SEQ ID NO: 49063 - DNA, 25 bp, Saccharomyces pastorianus
tgtgcctggcgctggacaacaacgg

SEQ ID NO: 49064 - DNA, 25 bp, Saccharomyces pastorianus
ccaggacgatgctcggcggctaatg

SEQ ID NO: 49065 - DNA, 25 bp, Saccharomyces pastorianus
gatggcggcatctacaaggtcgtgt

SEQ ID NO: 49066 - DNA, 25 bp, Saccharomyces pastorianus
cggctaatgctgttgctgtcatgtt

SEQ ID NO: 49067 - DNA, 25 bp, Saccharomyces pastorianus
cgtacttcgtgtgcgctggcttggc

SEQ ID NO: 49068 - DNA, 25 bp, Saccharomyces pastorianus
ggagctgagctgtctggacctgtcc

SEQ ID NO: 49069 - DNA, 25 bp, Saccharomyces pastorianus
actctgcaagggtcactgggatggc

SEQ ID NO: 49070 - DNA, 25 bp, Saccharomyces pastorianus
gctgaagcggctggcaaagttcgac

SEQ ID NO: 49071 - DNA, 25 bp, Saccharomyces pastorianus
gctcgctacgattcacggtgtggtg

SEQ ID NO: 49072 - DNA, 25 bp, Saccharomyces pastorianus
aacatgccagcgtgctgagcagcga

SEQ ID NO: 49073 - DNA, 25 bp, Saccharomyces pastorianus
aattgaaggaattgcgtgaaaggcg

SEQ ID NO: 49074 - DNA, 25 bp, Saccharomyces pastorianus
aacgccaacgccaaccatggtgagc

SEQ ID NO: 49075 - DNA, 25 bp, Saccharomyces pastorianus
atgccagcgtgctgagcagcgagac

SEQ ID NO: 49076 - DNA, 25 bp, Saccharomyces pastorianus
aaaggcggaaacatgccagcgtgct

SEQ ID NO: 49077 - DNA, 25 bp, Saccharomyces pastorianus
agcgactgaaggaactagaggagaa

SEQ ID NO: 49078 - DNA, 25 bp, Saccharomyces pastorianus
gaattgcgtgaaaggcggaaacatg

SEQ ID NO: 49079 - DNA, 25 bp, Saccharomyces pastorianus
aggcggaaacatgccagcgtgctga

SEQ ID NO: 49080 - DNA, 25 bp, Saccharomyces pastorianus
gccaacgccaaccatggtgagcgtt

SEQ ID NO: 49081 - DNA, 25 bp, Saccharomyces pastorianus
agcagcgagacggtgttggcggcga

SEQ ID NO: 49082 - DNA, 25 bp, Saccharomyces pastorianus
cgagacggtgttggcggcgagcggc

SEQ ID NO: 49083 - DNA, 25 bp, Saccharomyces pastorianus
actggtagaagatcatgtcgatgct

SEQ ID NO: 49084 - DNA, 25 bp, Saccharomyces pastorianus
catgtcgatgctacgtggtgcttct

SEQ ID NO: 49085 - DNA, 25 bp, Saccharomyces pastorianus
tcgatgctacgtggtgcttcttccg

SEQ ID NO: 49086 - DNA, 25 bp, Saccharomyces pastorianus
gagctggttgactggtagaagatca

SEQ ID NO: 49087 - DNA, 25 bp, Saccharomyces pastorianus
gaagatcatgtcgatgctacgtggt

SEQ ID NO: 49088 - DNA, 25 bp, Saccharomyces pastorianus
tcggtggcgtcaaggtgagctggtt

SEQ ID NO: 49089 - DNA, 25 bp, Saccharomyces pastorianus
tagatcgtatcggtggcgtcaaggt

SEQ ID NO: 49090 - DNA, 25 bp, Saccharomyces pastorianus
tagaagatcatgtcgatgctacgtg

SEQ ID NO: 49091 - DNA, 25 bp, Saccharomyces pastorianus
atcatgtcgatgctacgtggtgctt

SEQ ID NO: 49092 - DNA, 25 bp, Saccharomyces pastorianus
gatcatgtcgatgctacgtggtgct

SEQ ID NO: 49093 - DNA, 25 bp, Saccharomyces pastorianus
tccgtagatcgtatcggtggcgtca

SEQ ID NO: 49094 - DNA, 25 bp, Saccharomyces pastorianus
actggtagaagatcatgtcgatgct

SEQ ID NO: 49095 - DNA, 25 bp, Saccharomyces pastorianus
attactccaagggtcgatcgttctg

SEQ ID NO: 49096 - DNA, 25 bp, Saccharomyces pastorianus
catgtcgatgctacgtggtgcttct

SEQ ID NO: 49097 - DNA, 25 bp, Saccharomyces pastorianus
tcgatgctacgtggtgcttcttccg

SEQ ID NO: 49098 - DNA, 25 bp, Saccharomyces pastorianus
gagctggttgactggtagaagatca

SEQ ID NO: 49099 - DNA, 25 bp, Saccharomyces pastorianus
ggtacagctactaaatctgatgatg

SEQ ID NO: 49100 - DNA, 25 bp, Saccharomyces pastorianus
tcggtggcgtcaaggtgagctggtt

SEQ ID NO: 49101 - DNA, 25 bp, Saccharomyces pastorianus
tagatcgtatcggtggcgtcaaggt

SEQ ID NO: 49102 - DNA, 25 bp, Saccharomyces pastorianus
tgtggacacctatggtacagctact

SEQ ID NO: 49103 - DNA, 25 bp, Saccharomyces pastorianus
gatcatgtcgatgctacgtggtgct

SEQ ID NO: 49104 - DNA, 25 bp, Saccharomyces pastorianus
tccgtagatcgtatcggtggcgtca

SEQ ID NO: 49105 - DNA, 25 bp, Saccharomyces pastorianus
tatggctatggctgacgctagaaga

SEQ ID NO: 49106 - DNA, 25 bp, Saccharomyces pastorianus
ggtcattcctaaagacatgttagac

SEQ ID NO: 49107 - DNA, 25 bp, Saccharomyces pastorianus
agaagagacggttccattccatggt

SEQ ID NO: 49108 - DNA, 25 bp, Saccharomyces pastorianus
ttgaatatggctatggctgacgcta

SEQ ID NO: 49109 - DNA, 25 bp, Saccharomyces pastorianus
cggttccattccatggttgagacca

SEQ ID NO: 49110 - DNA, 25 bp, Saccharomyces pastorianus
gctactgatgaaactccagaaggtt

SEQ ID NO: 49111 - DNA, 25 bp, Saccharomyces pastorianus
aagacccaggtcacagttgaatacg

SEQ ID NO: 49112 - DNA, 25 bp, Saccharomyces pastorianus
gaactcaactacaaacagacatcgt

SEQ ID NO: 49113 - DNA, 25 bp, Saccharomyces pastorianus
gacatcgtcgaaaaggtcattccta

SEQ ID NO: 49114 - DNA, 25 bp, Saccharomyces pastorianus
tggtagaaagatcattgtcgatgcc

SEQ ID NO: 49115 - DNA, 25 bp, Saccharomyces pastorianus
attctattggcccacaaattgaata

SEQ ID NO: 49116 - DNA, 25 bp, Saccharomyces pastorianus
atctgaggcccgattttgttgatag

SEQ ID NO: 49117 - DNA, 25 bp, Saccharomyces pastorianus
gaagttacatttggtgcccactact

SEQ ID NO: 49118 - DNA, 25 bp, Saccharomyces pastorianus
cagactcttctgtttttgggttgga

SEQ ID NO: 49119 - DNA, 25 bp, Saccharomyces pastorianus
tagatgtatgcctgaccttcaaaaa

SEQ ID NO: 49120 - DNA, 25 bp, Saccharomyces pastorianus
gagttgttgaccacagacatcactg

SEQ ID NO: 49121 - DNA, 25 bp, Saccharomyces pastorianus
actggtacgatgttgtgtctggcgc

SEQ ID NO: 49122 - DNA, 25 bp, Saccharomyces pastorianus
agtatctaccatgggctttacgtat

SEQ ID NO: 49123 - DNA, 25 bp, Saccharomyces pastorianus
gcacgccgagtggacattcaagttt

SEQ ID NO: 49124 - DNA, 25 bp, Saccharomyces pastorianus
actggcgctagtagttatggtctca

SEQ ID NO: 49125 - DNA, 25 bp, Saccharomyces pastorianus
tgtctggcgctgtactagcatttat

SEQ ID NO: 49126 - DNA, 25 bp, Saccharomyces pastorianus
aatgctgccgtaacgggtgccttaa

SEQ ID NO: 49127 - DNA, 25 bp, Saccharomyces pastorianus
gtgactaacgaactagtgggcccat

SEQ ID NO: 49128 - DNA, 25 bp, Saccharomyces pastorianus
gaggccaaaatatccaattcagtct

SEQ ID NO: 49129 - DNA, 25 bp, Saccharomyces pastorianus
ttgatgaccccactatctcaaagcg

SEQ ID NO: 49130 - DNA, 25 bp, Saccharomyces pastorianus
taacgggcctctgtacgatattatt

SEQ ID NO: 49131 - DNA, 25 bp, Saccharomyces pastorianus
atctcaaagcgctatgtgactaacg

SEQ ID NO: 49132 - DNA, 25 bp, Saccharomyces pastorianus
ggagctgtatgttcgacaaggatca

SEQ ID NO: 49133 - DNA, 25 bp, Saccharomyces pastorianus
agaataagtacgtggctcagggaga

SEQ ID NO: 49134 - DNA, 25 bp, Saccharomyces pastorianus
ggcccattgggctgcttgattttga

SEQ ID NO: 49135 - DNA, 25 bp, Saccharomyces pastorianus
agatatctttggttcctagaggcca

SEQ ID NO: 49136 - DNA, 25 bp, Saccharomyces pastorianus
gagtgtcgggcttagtaatttagtt

SEQ ID NO: 49137 - DNA, 25 bp, Saccharomyces pastorianus
ctgcttgattttgagtgtcgggctt

SEQ ID NO: 49138 - DNA, 25 bp, Saccharomyces pastorianus
gttgttcaacacatgccagatcacc

SEQ ID NO: 49139 - DNA, 25 bp, Saccharomyces pastorianus
atcatttccaagtaatttctctcgg

SEQ ID NO: 49140 - DNA, 25 bp, Saccharomyces pastorianus
ttccattgtcattcccaaccaagga

SEQ ID NO: 49141 - DNA, 25 bp, Saccharomyces pastorianus
aggtaattgccgtttatatcctaat

SEQ ID NO: 49142 - DNA, 25 bp, Saccharomyces pastorianus
acgggtgatggtgccaaactcgcaa

SEQ ID NO: 49143 - DNA, 25 bp, Saccharomyces pastorianus
ggaccagtaccagaacgacttgcgt

SEQ ID NO: 49144 - DNA, 25 bp, Saccharomyces pastorianus
aagggtctcggcattgtctttgaag

SEQ ID NO: 49145 - DNA, 25 bp, Saccharomyces pastorianus
atcgccggaaactcttacgcggtgt

SEQ ID NO: 49146 - DNA, 25 bp, Saccharomyces pastorianus
aacgacttgcgtcattgggcccaaa

SEQ ID NO: 49147 - DNA, 25 bp, Saccharomyces pastorianus
agagatagcatcaacatcgccggaa

SEQ ID NO: 49148 - DNA, 25 bp, Saccharomyces pastorianus
gggccgcttcacaaacaagtgcaag

SEQ ID NO: 49149 - DNA, 25 bp, Saccharomyces pastorianus
atactgtccttactgtaaagccaca

SEQ ID NO: 49150 - DNA, 25 bp, Saccharomyces pastorianus
ttgaacgttcctaaatccaaagccg

SEQ ID NO: 49151 - DNA, 25 bp, Saccharomyces pastorianus
tgtaaagccacattgtccaccttgt

SEQ ID NO: 49152 - DNA, 25 bp, Saccharomyces pastorianus
gctctcgaagaaatttccggccaaa

SEQ ID NO: 49153 - DNA, 25 bp, Saccharomyces pastorianus
ttgtccaccttgttccaggaattga

SEQ ID NO: 49154 - DNA, 25 bp, Saccharomyces pastorianus
gaaatccaggatgctctcgaagaaa

SEQ ID NO: 49155 - DNA, 25 bp, Saccharomyces pastorianus
catcaatggtaagcacatcggtgga

SEQ ID NO: 49156 - DNA, 25 bp, Saccharomyces pastorianus
gttgcggcgaagacatactgtcctt

SEQ ID NO: 49157 - DNA, 25 bp, Saccharomyces pastorianus
caaaaggaggtcttcgttgcggcga

SEQ ID NO: 49158 - DNA, 25 bp, Saccharomyces pastorianus
acacgtaaaggacttgattggccaa

SEQ ID NO: 49159 - DNA, 25 bp, Saccharomyces pastorianus
tccggccaaagaactgtaccaaacg

SEQ ID NO: 49160 - DNA, 25 bp, Saccharomyces pastorianus
acagaatcagaatccgctttcgtcc

SEQ ID NO: 49161 - DNA, 25 bp, Saccharomyces pastorianus
gacctggtcctgtacgtttacaaca

SEQ ID NO: 49162 - DNA, 25 bp, Saccharomyces pastorianus
gtacagccaatacagccagtgcagc

SEQ ID NO: 49163 - DNA, 25 bp, Saccharomyces pastorianus
tttcacctaccacatcttgaacgta

SEQ ID NO: 49164 - DNA, 25 bp, Saccharomyces pastorianus
gatgcggtcccttttccaacagaat

SEQ ID NO: 49165 - DNA, 25 bp, Saccharomyces pastorianus
agactacatcatcggctgtcaggac

SEQ ID NO: 49166 - DNA, 25 bp, Saccharomyces pastorianus
gaaggctactcagccattggtcatg

SEQ ID NO: 49167 - DNA, 25 bp, Saccharomyces pastorianus
ttggtcatggacgactacttcaatg

SEQ ID NO: 49168 - DNA, 25 bp, Saccharomyces pastorianus
aacaaggtctccgactgtgtgaggc

SEQ ID NO: 49169 - DNA, 25 bp, Saccharomyces pastorianus
ggtagagacaagtcatctgctccaa

SEQ ID NO: 49170 - DNA, 25 bp, Saccharomyces pastorianus
ttggttacgggttcctccacaggat

SEQ ID NO: 49171 - DNA, 25 bp, Saccharomyces pastorianus
acgtctcaaagattaatgtcgctaa

SEQ ID NO: 49172 - DNA, 25 bp, Saccharomyces pastorianus
cttgcatcagtcaacagttccctgg

SEQ ID NO: 49173 - DNA, 25 bp, Saccharomyces pastorianus
gatttcttccccaagcttagacaga

SEQ ID NO: 49174 - DNA, 25 bp, Saccharomyces pastorianus
gtaatatctgacacagcactgacgt

SEQ ID NO: 49175 - DNA, 25 bp, Saccharomyces pastorianus
tggaactcccacttttgaccaaggt

SEQ ID NO: 49176 - DNA, 25 bp, Saccharomyces pastorianus
gatgattgccaataacaccgagttg

SEQ ID NO: 49177 - DNA, 25 bp, Saccharomyces pastorianus
agcactgacgtctattgattacttc

SEQ ID NO: 49178 - DNA, 25 bp, Saccharomyces pastorianus
gtaaacttctcaaatgtcaccgaca

SEQ ID NO: 49179 - DNA, 25 bp, Saccharomyces pastorianus
attggtggcgctatctattttgaag

SEQ ID NO: 49180 - DNA, 25 bp, Saccharomyces pastorianus
atgtcgctaagcttgcatcagtcaa

SEQ ID NO: 49181 - DNA, 25 bp, Saccharomyces pastorianus
aactaactgttcactctaatgctag

SEQ ID NO: 49182 - DNA, 25 bp, Saccharomyces pastorianus
gattctccagtttcatccctgaata

SEQ ID NO: 49183 - DNA, 25 bp, Saccharomyces pastorianus
gataactgccatacaaacttctaag

SEQ ID NO: 49184 - DNA, 25 bp, Saccharomyces pastorianus
gaatgtacgatcgtgcgcgtgatga

SEQ ID NO: 49185 - DNA, 25 bp, Saccharomyces pastorianus
atatggagagcccttacttacatgg

SEQ ID NO: 49186 - DNA, 25 bp, Saccharomyces pastorianus
caaacccaaactcttcgtcatttag

SEQ ID NO: 49187 - DNA, 25 bp, Saccharomyces pastorianus
ttgaatccaccaggataactgccat

SEQ ID NO: 49188 - DNA, 25 bp, Saccharomyces pastorianus
gataacgccttctaatcataacaaa

SEQ ID NO: 49189 - DNA, 25 bp, Saccharomyces pastorianus
tagattcaggttgtccacatttaca

SEQ ID NO: 49190 - DNA, 25 bp, Saccharomyces pastorianus
aattccgaaataccctcttcagaat

SEQ ID NO: 49191 - DNA, 25 bp, Saccharomyces pastorianus
tgggcaaactgtgacacccatcaca

SEQ ID NO: 49192 - DNA, 25 bp, Saccharomyces pastorianus
ataaacctgtctttgagctggattc

SEQ ID NO: 49193 - DNA, 25 bp, Saccharomyces pastorianus
ttcgaatgtgactttcccagtacgg

SEQ ID NO: 49194 - DNA, 25 bp, Saccharomyces pastorianus
aaaactcaccgaagagccttccctg

SEQ ID NO: 49195 - DNA, 25 bp, Saccharomyces pastorianus
tccctggccgacagatcattattcg

SEQ ID NO: 49196 - DNA, 25 bp, Saccharomyces pastorianus
gacactagaaaaactcaccgaagag

SEQ ID NO: 49197 - DNA, 25 bp, Saccharomyces pastorianus
gaagagccttccctggccgacagat

SEQ ID NO: 49198 - DNA, 25 bp, Saccharomyces pastorianus
ttagtcaaggacaaagagacactag

SEQ ID NO: 49199 - DNA, 25 bp, Saccharomyces pastorianus
ctggccgacagatcattattcgaat

SEQ ID NO: 49200 - DNA, 25 bp, Saccharomyces pastorianus
tagaaaaactcaccgaagagccttc

SEQ ID NO: 49201 - DNA, 25 bp, Saccharomyces pastorianus
cgaatgtgactttcccagtacggcc

SEQ ID NO: 49202 - DNA, 25 bp, Saccharomyces pastorianus
gccgacagatcattattcgaatgtg

SEQ ID NO: 49203 - DNA, 25 bp, Saccharomyces pastorianus
cttccctggccgacagatcattatt

SEQ ID NO: 49204 - DNA, 25 bp, Saccharomyces pastorianus
atagcggtttctcccaaaatcacaa

SEQ ID NO: 49205 - DNA, 25 bp, Saccharomyces pastorianus
caaagtactctgttcgctcgatagc

SEQ ID NO: 49206 - DNA, 25 bp, Saccharomyces pastorianus
agtccctggacatattcttctagtg

SEQ ID NO: 49207 - DNA, 25 bp, Saccharomyces pastorianus
ataactgtgggcctcatagcggttt

SEQ ID NO: 49208 - DNA, 25 bp, Saccharomyces pastorianus
aagatcggctttcagctttgacacc

SEQ ID NO: 49209 - DNA, 25 bp, Saccharomyces pastorianus
gacgaggatcttttagccatgtgtt

SEQ ID NO: 49210 - DNA, 25 bp, Saccharomyces pastorianus
ttttgcccacttttaactcagagcc

SEQ ID NO: 49211 - DNA, 25 bp, Saccharomyces pastorianus
gcgcattttgttttgccaattccag

SEQ ID NO: 49212 - DNA, 25 bp, Saccharomyces pastorianus
gagaatcgataacccttttgccaat

SEQ ID NO: 49213 - DNA, 25 bp, Saccharomyces pastorianus
gcaagtgcccaagaggtttatccct

SEQ ID NO: 49214 - DNA, 25 bp, Saccharomyces pastorianus
ataagttctcggtagtccctggaca

SEQ ID NO: 49215 - DNA, 25 bp, Saccharomyces pastorianus
acgtttgctgcagccgaaaagaaca

SEQ ID NO: 49216 - DNA, 25 bp, Saccharomyces pastorianus
agaaagctcacgacacgtttgctgc

SEQ ID NO: 49217 - DNA, 25 bp, Saccharomyces pastorianus
gaacagacactggaaactaactaat

SEQ ID NO: 49218 - DNA, 25 bp, Saccharomyces pastorianus
aaagctcacgacacgtttgctgcag

SEQ ID NO: 49219 - DNA, 25 bp, Saccharomyces pastorianus
gaaactaactaatacagaaccaaag

SEQ ID NO: 49220 - DNA, 25 bp, Saccharomyces pastorianus
gggtgaggacttaaagcagaaagct

SEQ ID NO: 49221 - DNA, 25 bp, Saccharomyces pastorianus
gctgcagccgaaaagaacagacact

SEQ ID NO: 49222 - DNA, 25 bp, Saccharomyces pastorianus
aagcagaaagctcacgacacgtttg

SEQ ID NO: 49223 - DNA, 25 bp, Saccharomyces pastorianus
gacacgtttgctgcagccgaaaaga

SEQ ID NO: 49224 - DNA, 25 bp, Saccharomyces pastorianus
acgacacgtttgctgcagccgaaaa

SEQ ID NO: 49225 - DNA, 25 bp, Saccharomyces pastorianus
tcacgacacgtttgctgcagccgaa

SEQ ID NO: 49226 - DNA, 25 bp, Saccharomyces pastorianus
tcccaaggatcaaaacaggcgttct

SEQ ID NO: 49227 - DNA, 25 bp, Saccharomyces pastorianus
cctgggtgctatgggtgctttctta

SEQ ID NO: 49228 - DNA, 25 bp, Saccharomyces pastorianus
tatgggtgctttcttaagcacatct

SEQ ID NO: 49229 - DNA, 25 bp, Saccharomyces pastorianus
cacgaaggctacctgggtgctatgg

SEQ ID NO: 49230 - DNA, 25 bp, Saccharomyces pastorianus
tgggtgctatgggtgctttcttaag

SEQ ID NO: 49231 - DNA, 25 bp, Saccharomyces pastorianus
atttctggtcccaaggatcaaaaca

SEQ ID NO: 49232 - DNA, 25 bp, Saccharomyces pastorianus
ggtcccaaggatcaaaacaggcgtt

SEQ ID NO: 49233 - DNA, 25 bp, Saccharomyces pastorianus
ggtgctatgggtgctttcttaagca

SEQ ID NO: 49234 - DNA, 25 bp, Saccharomyces pastorianus
caaaacaggcgttcttcctcaaaca

SEQ ID NO: 49235 - DNA, 25 bp, Saccharomyces pastorianus
ctacctgggtgctatgggtgctttc

SEQ ID NO: 49236 - DNA, 25 bp, Saccharomyces pastorianus
atcaaaacaggcgttcttcctcaaa

SEQ ID NO: 49237 - DNA, 25 bp, Saccharomyces pastorianus
tatgggtgctttcttaagcacatct

SEQ ID NO: 49238 - DNA, 25 bp, Saccharomyces pastorianus
aggcgttcttcctcaaacacgaagg

SEQ ID NO: 49239 - DNA, 25 bp, Saccharomyces pastorianus
tgggtgctatgggtgctttcttaag

SEQ ID NO: 49240 - DNA, 25 bp, Saccharomyces pastorianus
tcttcctcaaacacgaaggctacct

SEQ ID NO: 49241 - DNA, 25 bp, Saccharomyces pastorianus
atttctggtcccaaggatcaaaaca

SEQ ID NO: 49242 - DNA, 25 bp, Saccharomyces pastorianus
ggtcccaaggatcaaaacaggcgtt

SEQ ID NO: 49243 - DNA, 25 bp, Saccharomyces pastorianus
ggtgctatgggtgctttcttaagca

SEQ ID NO: 49244 - DNA, 25 bp, Saccharomyces pastorianus
caaaacaggcgttcttcctcaaaca

SEQ ID NO: 49245 - DNA, 25 bp, Saccharomyces pastorianus
ctacctgggtgctatgggtgctttc

SEQ ID NO: 49246 - DNA, 25 bp, Saccharomyces pastorianus
atcaaaacaggcgttcttcctcaaa

SEQ ID NO: 49247 - DNA, 25 bp, Saccharomyces pastorianus
tgagctacgctattaatttctggtc

SEQ ID NO: 49248 - DNA, 25 bp, Saccharomyces pastorianus
aggttacccatccaaacaacttcag

SEQ ID NO: 49249 - DNA, 25 bp, Saccharomyces pastorianus
taacgagtcgtgttgctcacatgag

SEQ ID NO: 49250 - DNA, 25 bp, Saccharomyces pastorianus
agaataggtggctcttccttgggag

SEQ ID NO: 49251 - DNA, 25 bp, Saccharomyces pastorianus
ggttccacgaactcaaagcccatat

SEQ ID NO: 49252 - DNA, 25 bp, Saccharomyces pastorianus
aaaagccttctatttgcaatttcaa

SEQ ID NO: 49253 - DNA, 25 bp, Saccharomyces pastorianus
aagcccatatatccctatcttttag

SEQ ID NO: 49254 - DNA, 25 bp, Saccharomyces pastorianus
aatcaccggtgctcaaagttatgac

SEQ ID NO: 49255 - DNA, 25 bp, Saccharomyces pastorianus
gtcttttatcattaatcaccggtgc

SEQ ID NO: 49256 - DNA, 25 bp, Saccharomyces pastorianus
gaattgcttccaacaaatctttgcc

SEQ ID NO: 49257 - DNA, 25 bp, Saccharomyces pastorianus
ttattcatgaaatccccgacgaagt

SEQ ID NO: 49258 - DNA, 25 bp, Saccharomyces pastorianus
ggcttaaagtcctctgctattgcaa

SEQ ID NO: 49259 - DNA, 25 bp, Saccharomyces pastorianus
gttatctgaccggtaaggacatgaa

SEQ ID NO: 49260 - DNA, 25 bp, Saccharomyces pastorianus
ctgagctacgtgataacaaggagtt

SEQ ID NO: 49261 - DNA, 25 bp, Saccharomyces pastorianus
ggttccgatcctcacgaattgttaa

SEQ ID NO: 49262 - DNA, 25 bp, Saccharomyces pastorianus
aattaacacactcacttaaggccgt

SEQ ID NO: 49263 - DNA, 25 bp, Saccharomyces pastorianus
aattgaggaccccatggcaccaatc

SEQ ID NO: 49264 - DNA, 25 bp, Saccharomyces pastorianus
ccgatcctcacgaattgttaagtat

SEQ ID NO: 49265 - DNA, 25 bp, Saccharomyces pastorianus
cccatggcaccaatcctacaaaaag

SEQ ID NO: 49266 - DNA, 25 bp, Saccharomyces pastorianus
gtttgttgctcaattaacacactca

SEQ ID NO: 49267 - DNA, 25 bp, Saccharomyces pastorianus
ggtaaggacatgaatggtaagccat

SEQ ID NO: 49268 - DNA, 25 bp, Saccharomyces pastorianus
tgttaagtatcgattgcctctttgg

SEQ ID NO: 49269 - DNA, 25 bp, Saccharomyces pastorianus
ttaaaggtggttccgatcctcacga

SEQ ID NO: 49270 - DNA, 25 bp, Saccharomyces pastorianus
taacagtatggttgaccgtgtgaca

SEQ ID NO: 49271 - DNA, 25 bp, Saccharomyces pastorianus
aatttgccgcttggatcgctgacaa

SEQ ID NO: 49272 - DNA, 25 bp, Saccharomyces pastorianus
ttgccgcttggatcgctgacaaggt

SEQ ID NO: 49273 - DNA, 25 bp, Saccharomyces pastorianus
atcgctgacaaggtgactgctccta

SEQ ID NO: 49274 - DNA, 25 bp, Saccharomyces pastorianus
aaaatttgccgcttggatcgctgac

SEQ ID NO: 49275 - DNA, 25 bp, Saccharomyces pastorianus
tggatcgctgacaaggtgactgctc

SEQ ID NO: 49276 - DNA, 25 bp, Saccharomyces pastorianus
tgaaggatccaaaatttgccgcttg

SEQ ID NO: 49277 - DNA, 25 bp, Saccharomyces pastorianus
gctgacaaggtgactgctcctaaca

SEQ ID NO: 49278 - DNA, 25 bp, Saccharomyces pastorianus
ggtgactgctcctaacagtatggtt

SEQ ID NO: 49279 - DNA, 25 bp, Saccharomyces pastorianus
tgctcctaacagtatggttgaccgt

SEQ ID NO: 49280 - DNA, 25 bp, Saccharomyces pastorianus
gacaaggtgactgctcctaacagta

SEQ ID NO: 49281 - DNA, 25 bp, Saccharomyces pastorianus
ttgttttgctacaacatgggcacct

SEQ ID NO: 49282 - DNA, 25 bp, Saccharomyces pastorianus
atcaatttctattacggttacgtgt

SEQ ID NO: 49283 - DNA, 25 bp, Saccharomyces pastorianus
tacaacatgggcacctgtcgcttat

SEQ ID NO: 49284 - DNA, 25 bp, Saccharomyces pastorianus
gatttcaactgcgttcaactggtta

SEQ ID NO: 49285 - DNA, 25 bp, Saccharomyces pastorianus
atgcttggtcgctatgtttttctac

SEQ ID NO: 49286 - DNA, 25 bp, Saccharomyces pastorianus
ctacatcttctttttcttgccagaa

SEQ ID NO: 49287 - DNA, 25 bp, Saccharomyces pastorianus
gagcagccgggatgatggcctgtat

SEQ ID NO: 49288 - DNA, 25 bp, Saccharomyces pastorianus
gagctatgtcgatttcaactgcgtt

SEQ ID NO: 49289 - DNA, 25 bp, Saccharomyces pastorianus
ttacgtgttcgtgggatgcttggtc

SEQ ID NO: 49290 - DNA, 25 bp, Saccharomyces pastorianus
ggtcgctatgtttttctacatcttc

SEQ ID NO: 49291 - DNA, 25 bp, Saccharomyces pastorianus
atggcagtttttgattggtttcttt

SEQ ID NO: 49292 - DNA, 25 bp, Saccharomyces pastorianus
gatagccaggactactttcgcaagg

SEQ ID NO: 49293 - DNA, 25 bp, Saccharomyces pastorianus
atcgttatgcctttggagatagcca

SEQ ID NO: 49294 - DNA, 25 bp, Saccharomyces pastorianus
gaatcgtagttaaggccattgagcc

SEQ ID NO: 49295 - DNA, 25 bp, Saccharomyces pastorianus
gagactggcaataccattggtttca

SEQ ID NO: 49296 - DNA, 25 bp, Saccharomyces pastorianus
gtatactgggtgacggaccacttca

SEQ ID NO: 49297 - DNA, 25 bp, Saccharomyces pastorianus
gggcaattgccatcgacaccgagac

SEQ ID NO: 49298 - DNA, 25 bp, Saccharomyces pastorianus
cgcgcccaattgttgtacaccaaag

SEQ ID NO: 49299 - DNA, 25 bp, Saccharomyces pastorianus
aagcatgcggatgagctcggcacgt

SEQ ID NO: 49300 - DNA, 25 bp, Saccharomyces pastorianus
ctcggcacgtcttcagtatactggg

SEQ ID NO: 49301 - DNA, 25 bp, Saccharomyces pastorianus
tgtcaccgagaacgccaggatcaaa

SEQ ID NO: 49302 - DNA, 25 bp, Saccharomyces pastorianus
ggtttcacacattacttgagccact

SEQ ID NO: 49303 - DNA, 25 bp, Saccharomyces pastorianus
gctacatgtcggcttacgtgataca

SEQ ID NO: 49304 - DNA, 25 bp, Saccharomyces pastorianus
actccttccctataatgctacatgt

SEQ ID NO: 49305 - DNA, 25 bp, Saccharomyces pastorianus
gagcgaattctttggcaactggtaa

SEQ ID NO: 49306 - DNA, 25 bp, Saccharomyces pastorianus
tataatcattccttatccgtcactg

SEQ ID NO: 49307 - DNA, 25 bp, Saccharomyces pastorianus
ataagatacccaaactcagtgacga

SEQ ID NO: 49308 - DNA, 25 bp, Saccharomyces pastorianus
tatccgtcactggttctaaaagcac

SEQ ID NO: 49309 - DNA, 25 bp, Saccharomyces pastorianus
ttgacctgtatatatctctctcgca

SEQ ID NO: 49310 - DNA, 25 bp, Saccharomyces pastorianus
aagatcgtgcttgtttgacctgtat

SEQ ID NO: 49311 - DNA, 25 bp, Saccharomyces pastorianus
atatacagatgctactccttcccta

SEQ ID NO: 49312 - DNA, 25 bp, Saccharomyces pastorianus
tcctgctcgagcacaaacatgcatg

SEQ ID NO: 49313 - DNA, 25 bp, Saccharomyces pastorianus
ctctcgcagggccaaacgttaaaat

SEQ ID NO: 49314 - DNA, 25 bp, Saccharomyces pastorianus
atccgagaatgctgtatctcttcta

SEQ ID NO: 49315 - DNA, 25 bp, Saccharomyces pastorianus
catggccaccacattatctcaaatt

SEQ ID NO: 49316 - DNA, 25 bp, Saccharomyces pastorianus
gcgactagtgccgttattaatcaag

SEQ ID NO: 49317 - DNA, 25 bp, Saccharomyces pastorianus
aaataagtgcgactccatgaataac

SEQ ID NO: 49318 - DNA, 25 bp, Saccharomyces pastorianus
gaattcaatcacgtcaactcactct

SEQ ID NO: 49319 - DNA, 25 bp, Saccharomyces pastorianus
aattctataataacatggccaccac

SEQ ID NO: 49320 - DNA, 25 bp, Saccharomyces pastorianus
tcagcgcaaaatatactatccccaa

SEQ ID NO: 49321 - DNA, 25 bp, Saccharomyces pastorianus
aacacaaatgggaattcagcgcaaa

SEQ ID NO: 49322 - DNA, 25 bp, Saccharomyces pastorianus
gcaaaacctaacgaacgcgactagt

SEQ ID NO: 49323 - DNA, 25 bp, Saccharomyces pastorianus
gaataccgttaagactctcaaacac

SEQ ID NO: 49324 - DNA, 25 bp, Saccharomyces pastorianus
ttaaaagtacagttgacacatcgtc

SEQ ID NO: 49325 - DNA, 25 bp, Saccharomyces pastorianus
attgtcccgtgtcgtgtaccaagac

SEQ ID NO: 49326 - DNA, 25 bp, Saccharomyces pastorianus
gagtcccagttgtccaagtcacaag

SEQ ID NO: 49327 - DNA, 25 bp, Saccharomyces pastorianus
gaaagctgcaaaaccctgctgggtt

SEQ ID NO: 49328 - DNA, 25 bp, Saccharomyces pastorianus
gaagacgcgctacattgtcccgtgt

SEQ ID NO: 49329 - DNA, 25 bp, Saccharomyces pastorianus
attggcgtggtgcaaaccgcatacg

SEQ ID NO: 49330 - DNA, 25 bp, Saccharomyces pastorianus
tagactccgtcatagctaagtaccc

SEQ ID NO: 49331 - DNA, 25 bp, Saccharomyces pastorianus
gtttcatcaaaccatcgagtcccag

SEQ ID NO: 49332 - DNA, 25 bp, Saccharomyces pastorianus
tggtacgatcattttcagcgagaag

SEQ ID NO: 49333 - DNA, 25 bp, Saccharomyces pastorianus
aagcatctgcatcacgaggctgcaa

SEQ ID NO: 49334 - DNA, 25 bp, Saccharomyces pastorianus
cttgccaccttgtccattttacaaa

SEQ ID NO: 49335 - DNA, 25 bp, Saccharomyces pastorianus
gttggtcaagtgcattgttcctgat

SEQ ID NO: 49336 - DNA, 25 bp, Saccharomyces pastorianus
tagacctaaaggaccgatctttgga

SEQ ID NO: 49337 - DNA, 25 bp, Saccharomyces pastorianus
accgaccttctttggagatagacct

SEQ ID NO: 49338 - DNA, 25 bp, Saccharomyces pastorianus
gaccttctttggagatagacctaaa

SEQ ID NO: 49339 - DNA, 25 bp, Saccharomyces pastorianus
caccaacggctcttaggtataagta

SEQ ID NO: 49340 - DNA, 25 bp, Saccharomyces pastorianus
ggctcttaggtataagtatttaact

SEQ ID NO: 49341 - DNA, 25 bp, Saccharomyces pastorianus
caacggctcttaggtataagtattt

SEQ ID NO: 49342 - DNA, 25 bp, Saccharomyces pastorianus
gagatagacctaaaggaccgatctt

SEQ ID NO: 49343 - DNA, 25 bp, Saccharomyces pastorianus
gatagacctaaaggaccgatctttg

SEQ ID NO: 49344 - DNA, 25 bp, Saccharomyces pastorianus
aacttcaccaccaacggctcttagg

SEQ ID NO: 49345 - DNA, 25 bp, Saccharomyces pastorianus
caccaccaacggctcttaggtataa

SEQ ID NO: 49346 - DNA, 25 bp, Saccharomyces pastorianus
ccgaccttctttggagatagaccta

SEQ ID NO: 49347 - DNA, 25 bp, Saccharomyces pastorianus
ttcaaggcggtgatgaccaaagagg

SEQ ID NO: 49348 - DNA, 25 bp, Saccharomyces pastorianus
cttgtccttctttctgtctcttggt

SEQ ID NO: 49349 - DNA, 25 bp, Saccharomyces pastorianus
taccactgtgcttgacgttcttgtc

SEQ ID NO: 49350 - DNA, 25 bp, Saccharomyces pastorianus
caaggcggtgatgaccaaagaggaa

SEQ ID NO: 49351 - DNA, 25 bp, Saccharomyces pastorianus
ggtgatgaccaaagaggaagcagat

SEQ ID NO: 49352 - DNA, 25 bp, Saccharomyces pastorianus
ttaccactgtgcttgacgttcttgt

SEQ ID NO: 49353 - DNA, 25 bp, Saccharomyces pastorianus
actgtgcttgacgttcttgtccttc

SEQ ID NO: 49354 - DNA, 25 bp, Saccharomyces pastorianus
gtctcttggtggttccttcaaggcg

SEQ ID NO: 49355 - DNA, 25 bp, Saccharomyces pastorianus
cttcaaggcggtgatgaccaaagag

SEQ ID NO: 49356 - DNA, 25 bp, Saccharomyces pastorianus
gttaccactgtgcttgacgttcttg

SEQ ID NO: 49357 - DNA, 25 bp, Saccharomyces pastorianus
tcaaggcggtgatgaccaaagagga

SEQ ID NO: 49358 - DNA, 25 bp, Saccharomyces pastorianus
gataatctcatgcatcaaggcggga

SEQ ID NO: 49359 - DNA, 25 bp, Saccharomyces pastorianus
actatcgatcgagaggaatcttcat

SEQ ID NO: 49360 - DNA, 25 bp, Saccharomyces pastorianus
cgataggtgttccagagttgccaga

SEQ ID NO: 49361 - DNA, 25 bp, Saccharomyces pastorianus
gagttatccgttgagtactattcca

SEQ ID NO: 49362 - DNA, 25 bp, Saccharomyces pastorianus
ttgatacgagattgaaggccctttc

SEQ ID NO: 49363 - DNA, 25 bp, Saccharomyces pastorianus
cattatgcttgatagaggtcttcca

SEQ ID NO: 49364 - DNA, 25 bp, Saccharomyces pastorianus
aaagcttacttctaaggctatcaca

SEQ ID NO: 49365 - DNA, 25 bp, Saccharomyces pastorianus
gttgccagaacatgaagcctttcag

SEQ ID NO: 49366 - DNA, 25 bp, Saccharomyces pastorianus
ggctatcacaatcaactcgaaagtt

SEQ ID NO: 49367 - DNA, 25 bp, Saccharomyces pastorianus
ggaccaattacagaccactaaacaa

SEQ ID NO: 49368 - DNA, 25 bp, Saccharomyces pastorianus
aggccctttcatcctttatagaaga

SEQ ID NO: 49369 - DNA, 25 bp, Saccharomyces pastorianus
gggttcaaccgtcaactaatactat

SEQ ID NO: 49370 - DNA, 25 bp, Saccharomyces pastorianus
tgggtaaattttccttcactgactt

SEQ ID NO: 49371 - DNA, 25 bp, Saccharomyces pastorianus
atcatgatcgagttttccctaaagg

SEQ ID NO: 49372 - DNA, 25 bp, Saccharomyces pastorianus
aagccttttgaagcctattctatgt

SEQ ID NO: 49373 - DNA, 25 bp, Saccharomyces pastorianus
agtgcgatccactctatgaacaaaa

SEQ ID NO: 49374 - DNA, 25 bp, Saccharomyces pastorianus
gcaaggatcttgttcccgttaattt

SEQ ID NO: 49375 - DNA, 25 bp, Saccharomyces pastorianus
cttcactgacttttaccctttacat

SEQ ID NO: 49376 - DNA, 25 bp, Saccharomyces pastorianus
attcattgtttctggacgtatttca

SEQ ID NO: 49377 - DNA, 25 bp, Saccharomyces pastorianus
cctaggcggcgaactcattcaagaa

SEQ ID NO: 49378 - DNA, 25 bp, Saccharomyces pastorianus
taaagaattttcagcgcaaacccct

SEQ ID NO: 49379 - DNA, 25 bp, Saccharomyces pastorianus
aattcctcccaaaacacgtgtagat

SEQ ID NO: 49380 - DNA, 25 bp, Saccharomyces pastorianus
caccactacattagctccatctgac

SEQ ID NO: 49381 - DNA, 25 bp, Saccharomyces pastorianus
atcagagctcatatggcccagtatt

SEQ ID NO: 49382 - DNA, 25 bp, Saccharomyces pastorianus
accctactgatacgtacccaattga

SEQ ID NO: 49383 - DNA, 25 bp, Saccharomyces pastorianus
agtattacgcttttcaagccgccca

SEQ ID NO: 49384 - DNA, 25 bp, Saccharomyces pastorianus
tggcccagtattacgcttttcaagc

SEQ ID NO: 49385 - DNA, 25 bp, Saccharomyces pastorianus
tactgatacgtacccaattgaagtt

SEQ ID NO: 49386 - DNA, 25 bp, Saccharomyces pastorianus
atatggcccagtattacgcttttca

SEQ ID NO: 49387 - DNA, 25 bp, Saccharomyces pastorianus
catgttgaccggcatttcacccgac

SEQ ID NO: 49388 - DNA, 25 bp, Saccharomyces pastorianus
gctcatatggcccagtattacgctt

SEQ ID NO: 49389 - DNA, 25 bp, Saccharomyces pastorianus
ttgaccggcatttcacccgaccaag

SEQ ID NO: 49390 - DNA, 25 bp, Saccharomyces pastorianus
catttcacccgaccaagtcactaga

SEQ ID NO: 49391 - DNA, 25 bp, Saccharomyces pastorianus
gagcgcaacgagatcgggactgctt

SEQ ID NO: 49392 - DNA, 25 bp, Saccharomyces pastorianus
aagaagcccgccaggaggcacaagt

SEQ ID NO: 49393 - DNA, 25 bp, Saccharomyces pastorianus
ggtttaagccggcacactacaagaa

SEQ ID NO: 49394 - DNA, 25 bp, Saccharomyces pastorianus
agtgatgagcggttgctgtttctga

SEQ ID NO: 49395 - DNA, 25 bp, Saccharomyces pastorianus
gaacaacatccggtaccacaatgcg

SEQ ID NO: 49396 - DNA, 25 bp, Saccharomyces pastorianus
gaagggcgtttacaagtctcccacg

SEQ ID NO: 49397 - DNA, 25 bp, Saccharomyces pastorianus
caggcagctggtatcggacgagaac

SEQ ID NO: 49398 - DNA, 25 bp, Saccharomyces pastorianus
ccagggcgacgtacttcagcgtgga

SEQ ID NO: 49399 - DNA, 25 bp, Saccharomyces pastorianus
gcggatcaacgctttgctgagcaag

SEQ ID NO: 49400 - DNA, 25 bp, Saccharomyces pastorianus
agtactgcgacgtgacgggtctgaa

SEQ ID NO: 49401 - DNA, 25 bp, Saccharomyces pastorianus
atctaccagttgatcgtgaagccga

SEQ ID NO: 49402 - DNA, 25 bp, Saccharomyces pastorianus
atgtaagaagccaccatgctctttt

SEQ ID NO: 49403 - DNA, 25 bp, Saccharomyces pastorianus
cacacaggttacgatatcccattaa

SEQ ID NO: 49404 - DNA, 25 bp, Saccharomyces pastorianus
gaaggtgatgttacgacgactcata

SEQ ID NO: 49405 - DNA, 25 bp, Saccharomyces pastorianus
gcaatgtagatttttggccgacaca

SEQ ID NO: 49406 - DNA, 25 bp, Saccharomyces pastorianus
atgctcttttaacggtgctcaccaa

SEQ ID NO: 49407 - DNA, 25 bp, Saccharomyces pastorianus
gcgtcattaccgctgttagaatctg

SEQ ID NO: 49408 - DNA, 25 bp, Saccharomyces pastorianus
gatctctacattttctcttactttt

SEQ ID NO: 49409 - DNA, 25 bp, Saccharomyces pastorianus
aaagcgacccacacttctgtatgga

SEQ ID NO: 49410 - DNA, 25 bp, Saccharomyces pastorianus
gaggtaccgagtggtccgcaatgta

SEQ ID NO: 49411 - DNA, 25 bp, Saccharomyces pastorianus
caggcgaaacctatatcattgactt

SEQ ID NO: 49412 - DNA, 25 bp, Saccharomyces pastorianus
tcattgactttatgggacccgaggt

SEQ ID NO: 49413 - DNA, 25 bp, Saccharomyces pastorianus
gttcgtctataagcacaagttcaca

SEQ ID NO: 49414 - DNA, 25 bp, Saccharomyces pastorianus
atagttcgtctataagcacaagttc

SEQ ID NO: 49415 - DNA, 25 bp, Saccharomyces pastorianus
atgagggaaatctgcgtgcaacgga

SEQ ID NO: 49416 - DNA, 25 bp, Saccharomyces pastorianus
gcaacagcactgatagttcgtctat

SEQ ID NO: 49417 - DNA, 25 bp, Saccharomyces pastorianus
tataagcacaagttcacaagatgag

SEQ ID NO: 49418 - DNA, 25 bp, Saccharomyces pastorianus
gcactgatagttcgtctataagcac

SEQ ID NO: 49419 - DNA, 25 bp, Saccharomyces pastorianus
gcacaagttcacaagatgagggaaa

SEQ ID NO: 49420 - DNA, 25 bp, Saccharomyces pastorianus
tgaaaacgcaagcaacagcactgat

SEQ ID NO: 49421 - DNA, 25 bp, Saccharomyces pastorianus
gggaaatctgcgtgcaacggaatca

SEQ ID NO: 49422 - DNA, 25 bp, Saccharomyces pastorianus
gaaatctgcgtgcaacggaatcaaa

SEQ ID NO: 49423 - DNA, 25 bp, Saccharomyces pastorianus
tcgtctataagcacaagttcacaag

SEQ ID NO: 49424 - DNA, 25 bp, Saccharomyces pastorianus
catgattcgttcttcgatttggtta

SEQ ID NO: 49425 - DNA, 25 bp, Saccharomyces pastorianus
gctatggacagattaggaccggtta

SEQ ID NO: 49426 - DNA, 25 bp, Saccharomyces pastorianus
gaaatcctgcgctgatgttaattgc

SEQ ID NO: 49427 - DNA, 25 bp, Saccharomyces pastorianus
aaatcagctcactttgcagctagtg

SEQ ID NO: 49428 - DNA, 25 bp, Saccharomyces pastorianus
agcaagtttgaagagcctggctcaa

SEQ ID NO: 49429 - DNA, 25 bp, Saccharomyces pastorianus
taacggaaggcaagcttttgagcaa

SEQ ID NO: 49430 - DNA, 25 bp, Saccharomyces pastorianus
gactctgtgcaattttccatcaaca

SEQ ID NO: 49431 - DNA, 25 bp, Saccharomyces pastorianus
aaaaatataccacctatcgtcccat

SEQ ID NO: 49432 - DNA, 25 bp, Saccharomyces pastorianus
gacgtttccacagtatttctcatga

SEQ ID NO: 49433 - DNA, 25 bp, Saccharomyces pastorianus
tttttgcttcatccatatttcctaa

SEQ ID NO: 49434 - DNA, 25 bp, Saccharomyces pastorianus
gatactgcgtatgacgttcgacgtt

SEQ ID NO: 49435 - DNA, 25 bp, Saccharomyces pastorianus
aagtccgtatgcagtgccaaccatt

SEQ ID NO: 49436 - DNA, 25 bp, Saccharomyces pastorianus
agggtccacagcatactcgttaagt

SEQ ID NO: 49437 - DNA, 25 bp, Saccharomyces pastorianus
tgaaactgacgctgccaccggaaag

SEQ ID NO: 49438 - DNA, 25 bp, Saccharomyces pastorianus
tccttgcttgtccttattggagctt

SEQ ID NO: 49439 - DNA, 25 bp, Saccharomyces pastorianus
ggagctttacggacacaattcattg

SEQ ID NO: 49440 - DNA, 25 bp, Saccharomyces pastorianus
tagcggtaacgccaatctgtcctca

SEQ ID NO: 49441 - DNA, 25 bp, Saccharomyces pastorianus
gatatcgccgagtgtaaacgctata

SEQ ID NO: 49442 - DNA, 25 bp, Saccharomyces pastorianus
ttgtttctgaacatcacgtcctcaa

SEQ ID NO: 49443 - DNA, 25 bp, Saccharomyces pastorianus
aaccattgagtcatctccgagtgag

SEQ ID NO: 49444 - DNA, 25 bp, Saccharomyces pastorianus
gcaggtgggtctttgatatcgccga

SEQ ID NO: 49445 - DNA, 25 bp, Saccharomyces pastorianus
agatagaggtccaactccttgcttg

SEQ ID NO: 49446 - DNA, 25 bp, Saccharomyces pastorianus
aggatatctcggcttcaacttctct

SEQ ID NO: 49447 - DNA, 25 bp, Saccharomyces pastorianus
tagccacagcacctcaacgaagaag

SEQ ID NO: 49448 - DNA, 25 bp, Saccharomyces pastorianus
gaaaaacggtacttctgcctatatt

SEQ ID NO: 49449 - DNA, 25 bp, Saccharomyces pastorianus
ttggcccggtggtaactctactaat

SEQ ID NO: 49450 - DNA, 25 bp, Saccharomyces pastorianus
ggtagcaagactacttctgcgtcct

SEQ ID NO: 49451 - DNA, 25 bp, Saccharomyces pastorianus
aaaacttcgtcttcaacttcagcat

SEQ ID NO: 49452 - DNA, 25 bp, Saccharomyces pastorianus
agtggatatttctatttggcccggt

SEQ ID NO: 49453 - DNA, 25 bp, Saccharomyces pastorianus
aagagttcctctgaagcttcttcta

SEQ ID NO: 49454 - DNA, 25 bp, Saccharomyces pastorianus
cagtgccggtatgggtgctaacgtt

SEQ ID NO: 49455 - DNA, 25 bp, Saccharomyces pastorianus
ggatctggattggaccctcacaagg

SEQ ID NO: 49456 - DNA, 25 bp, Saccharomyces pastorianus
tgcctatatttacacttcatccgac

SEQ ID NO: 49457 - DNA, 25 bp, Saccharomyces pastorianus
gtttggatacgttctggaccccaat

SEQ ID NO: 49458 - DNA, 25 bp, Saccharomyces pastorianus
gactttgttcccgtattttacagag

SEQ ID NO: 49459 - DNA, 25 bp, Saccharomyces pastorianus
gagaaaggaccgtgtgtttatctac

SEQ ID NO: 49460 - DNA, 25 bp, Saccharomyces pastorianus
ggaccccatcttgaagcagttgcaa

SEQ ID NO: 49461 - DNA, 25 bp, Saccharomyces pastorianus
gtgcttacgcacgattcattggatc

SEQ ID NO: 49462 - DNA, 25 bp, Saccharomyces pastorianus
atcttgcaagatatcggcgtgggcg

SEQ ID NO: 49463 - DNA, 25 bp, Saccharomyces pastorianus
tgggctggctgtacgacctggtaat

SEQ ID NO: 49464 - DNA, 25 bp, Saccharomyces pastorianus
aatgcacatgtacccgatgcgcaaa

SEQ ID NO: 49465 - DNA, 25 bp, Saccharomyces pastorianus
aaggctatgtttgggctcagggcta

SEQ ID NO: 49466 - DNA, 25 bp, Saccharomyces pastorianus
tggcgaacgatgttaaggaccccat

SEQ ID NO: 49467 - DNA, 25 bp, Saccharomyces pastorianus
ggccagatcaaagcacccgtttatg

SEQ ID NO: 49468 - DNA, 25 bp, Saccharomyces pastorianus
ggccttgacgtcatccttggtgtca

SEQ ID NO: 49469 - DNA, 25 bp, Saccharomyces pastorianus
atatcaatggcgaccatgtggacct

SEQ ID NO: 49470 - DNA, 25 bp, Saccharomyces pastorianus
caagtccttaccttcgtcgaaagcg

SEQ ID NO: 49471 - DNA, 25 bp, Saccharomyces pastorianus
gactcttaatcggatctagcagctt

SEQ ID NO: 49472 - DNA, 25 bp, Saccharomyces pastorianus
ggaggtaccggcatcggcggtttca

SEQ ID NO: 49473 - DNA, 25 bp, Saccharomyces pastorianus
accatgtggaccttggcgtgaccgt

SEQ ID NO: 49474 - DNA, 25 bp, Saccharomyces pastorianus
aatggcgaccatgtggaccttggcg

SEQ ID NO: 49475 - DNA, 25 bp, Saccharomyces pastorianus
gcggagcgactcttaatcggatcta

SEQ ID NO: 49476 - DNA, 25 bp, Saccharomyces pastorianus
acccatggcggagatgatagtgacc

SEQ ID NO: 49477 - DNA, 25 bp, Saccharomyces pastorianus
taccttcgtcgaaagcggcttgcat

SEQ ID NO: 49478 - DNA, 25 bp, Saccharomyces pastorianus
gcttgcatggtgtcacccaattcac

SEQ ID NO: 49479 - DNA, 25 bp, Saccharomyces pastorianus
atcacatcatgcactctctgctgaa

SEQ ID NO: 49480 - DNA, 25 bp, Saccharomyces pastorianus
tttttcgttctcctaaagcattcac

SEQ ID NO: 49481 - DNA, 25 bp, Saccharomyces pastorianus
tcacatcatgcactctctgctgaac

SEQ ID NO: 49482 - DNA, 25 bp, Saccharomyces pastorianus
cactctctgctgaaccggggttttt

SEQ ID NO: 49483 - DNA, 25 bp, Saccharomyces pastorianus
aagcattcacaaataaatcttttct

SEQ ID NO: 49484 - DNA, 25 bp, Saccharomyces pastorianus
tttccatcacatcatgcactctctg

SEQ ID NO: 49485 - DNA, 25 bp, Saccharomyces pastorianus
catcatgcactctctgctgaaccgg

SEQ ID NO: 49486 - DNA, 25 bp, Saccharomyces pastorianus
atcatgcactctctgctgaaccggg

SEQ ID NO: 49487 - DNA, 25 bp, Saccharomyces pastorianus
gcattcacaaataaatcttttcttt

SEQ ID NO: 49488 - DNA, 25 bp, Saccharomyces pastorianus
acatcatgcactctctgctgaaccg

SEQ ID NO: 49489 - DNA, 25 bp, Saccharomyces pastorianus
aaactccgacccctttccatcacat

SEQ ID NO: 49490 - DNA, 25 bp, Saccharomyces pastorianus
aaaggccaagatgcagttagaagaa

SEQ ID NO: 49491 - DNA, 25 bp, Saccharomyces pastorianus
gctgatcaattagccaatgacaccg

SEQ ID NO: 49492 - DNA, 25 bp, Saccharomyces pastorianus
ttaatggcgaggacttaacaagcaa

SEQ ID NO: 49493 - DNA, 25 bp, Saccharomyces pastorianus
gaaaccgccaataaagctgatcaat

SEQ ID NO: 49494 - DNA, 25 bp, Saccharomyces pastorianus
gaccaaatttcgtcattaagggaat

SEQ ID NO: 49495 - DNA, 25 bp, Saccharomyces pastorianus
aatatcccgagtgcaagctggcgat

SEQ ID NO: 49496 - DNA, 25 bp, Saccharomyces pastorianus
aaaactctttgaacagctctacaag

SEQ ID NO: 49497 - DNA, 25 bp, Saccharomyces pastorianus
tgataaattgcaaacgtcatcgtta

SEQ ID NO: 49498 - DNA, 25 bp, Saccharomyces pastorianus
taaaaccgactctcaaatcctcaaa

SEQ ID NO: 49499 - DNA, 25 bp, Saccharomyces pastorianus
aatgacaccgagaattccttgaagg

SEQ ID NO: 49500 - DNA, 25 bp, Saccharomyces pastorianus
gaaaagctatcgaaaccgccaataa

SEQ ID NO: 49501 - DNA, 25 bp, Saccharomyces pastorianus
caacatgtctttttctagggcccaa

SEQ ID NO: 49502 - DNA, 25 bp, Saccharomyces pastorianus
ttaacttgcctttcattactgccga

SEQ ID NO: 49503 - DNA, 25 bp, Saccharomyces pastorianus
tggacgttactcctttatcgttagg

SEQ ID NO: 49504 - DNA, 25 bp, Saccharomyces pastorianus
tactgccgatgccacaggtccgaag

SEQ ID NO: 49505 - DNA, 25 bp, Saccharomyces pastorianus
tgcttccaaagccattaaccctgat

SEQ ID NO: 49506 - DNA, 25 bp, Saccharomyces pastorianus
aaattttttccactgccgcagcagg

SEQ ID NO: 49507 - DNA, 25 bp, Saccharomyces pastorianus
tgggcgccgctattcaaggtgccgt

SEQ ID NO: 49508 - DNA, 25 bp, Saccharomyces pastorianus
atctgatgttttactagtcggcggt

SEQ ID NO: 49509 - DNA, 25 bp, Saccharomyces pastorianus
gtgccgtcttgtctggtgaaattac

SEQ ID NO: 49510 - DNA, 25 bp, Saccharomyces pastorianus
gttatcgtcgactgtttctaccgaa

SEQ ID NO: 49511 - DNA, 25 bp, Saccharomyces pastorianus
aaagctcacgtcttccgatatatct

SEQ ID NO: 49512 - DNA, 25 bp, Saccharomyces pastorianus
ggaaaacactcctcattaagccgat

SEQ ID NO: 49513 - DNA, 25 bp, Saccharomyces pastorianus
aatacgctgtgagtactggacctgg

SEQ ID NO: 49514 - DNA, 25 bp, Saccharomyces pastorianus
ggatgaggtcgttgcgtcattacaa

SEQ ID NO: 49515 - DNA, 25 bp, Saccharomyces pastorianus
tacaataatctcgttggcacccatt

SEQ ID NO: 49516 - DNA, 25 bp, Saccharomyces pastorianus
gattctgataacacacttgcaattt

SEQ ID NO: 49517 - DNA, 25 bp, Saccharomyces pastorianus
gacggattccaaaacctccaaatat

SEQ ID NO: 49518 - DNA, 25 bp, Saccharomyces pastorianus
gacaggttaattatgccctatctta

SEQ ID NO: 49519 - DNA, 25 bp, Saccharomyces pastorianus
agggagtcttacctctttttatgat

SEQ ID NO: 49520 - DNA, 25 bp, Saccharomyces pastorianus
ggcatatcctatgtcgctactattg

SEQ ID NO: 49521 - DNA, 25 bp, Saccharomyces pastorianus
agccgattttcaggtctttctcaaa

SEQ ID NO: 49522 - DNA, 25 bp, Saccharomyces pastorianus
gaaagggtgtattctggcatatcct

SEQ ID NO: 49523 - DNA, 25 bp, Saccharomyces pastorianus
taggatcgacgaaggacctcccgat

SEQ ID NO: 49524 - DNA, 25 bp, Saccharomyces pastorianus
aaaggatgcctttaccctcaaatgc

SEQ ID NO: 49525 - DNA, 25 bp, Saccharomyces pastorianus
atatgtcaggcaactattccaagat

SEQ ID NO: 49526 - DNA, 25 bp, Saccharomyces pastorianus
aatttttggactgggctggcagttc

SEQ ID NO: 49527 - DNA, 25 bp, Saccharomyces pastorianus
gtacgttagtttgcattggtcagtc

SEQ ID NO: 49528 - DNA, 25 bp, Saccharomyces pastorianus
gcccaatcttgggagatctcgttat

SEQ ID NO: 49529 - DNA, 25 bp, Saccharomyces pastorianus
gatgaagaatcgcagctccgcttgg

SEQ ID NO: 49530 - DNA, 25 bp, Saccharomyces pastorianus
atattagagatgcttcccattggaa

SEQ ID NO: 49531 - DNA, 25 bp, Saccharomyces pastorianus
gcgagctattttgctaccatatcca

SEQ ID NO: 49532 - DNA, 25 bp, Saccharomyces pastorianus
gaccaaataatctgcccgaatatgt

SEQ ID NO: 49533 - DNA, 25 bp, Saccharomyces pastorianus
aaaactttcatgtgcccaatcttgg

SEQ ID NO: 49534 - DNA, 25 bp, Saccharomyces pastorianus
atgttcgtcattgtgtatccctaga

SEQ ID NO: 49535 - DNA, 25 bp, Saccharomyces pastorianus
aatacacagggactttggccgaaga

SEQ ID NO: 49536 - DNA, 25 bp, Saccharomyces pastorianus
aatgccattctcagatccatcgaag

SEQ ID NO: 49537 - DNA, 25 bp, Saccharomyces pastorianus
gccgatgccttacattccaaaacta

SEQ ID NO: 49538 - DNA, 25 bp, Saccharomyces pastorianus
tatttccagggtttgtttgattcgg

SEQ ID NO: 49539 - DNA, 25 bp, Saccharomyces pastorianus
gggaatacgactcacagccaaatca

SEQ ID NO: 49540 - DNA, 25 bp, Saccharomyces pastorianus
tgctagggtacttgccggaatgatt

SEQ ID NO: 49541 - DNA, 25 bp, Saccharomyces pastorianus
agatccatcgaagcaggttttggcc

SEQ ID NO: 49542 - DNA, 25 bp, Saccharomyces pastorianus
actactctcattgacatacgttaca

SEQ ID NO: 49543 - DNA, 25 bp, Saccharomyces pastorianus
aaacttatctgaccagtgctcacca

SEQ ID NO: 49544 - DNA, 25 bp, Saccharomyces pastorianus
aaacagttgtgtttcacgccgatgc

SEQ ID NO: 49545 - DNA, 25 bp, Saccharomyces pastorianus
gaggcagttacagcaattgattctt

SEQ ID NO: 49546 - DNA, 25 bp, Saccharomyces pastorianus
ttaccactattgaactcgagcgaaa

SEQ ID NO: 49547 - DNA, 25 bp, Saccharomyces pastorianus
gctgcggcaccgattaacgaaacca

SEQ ID NO: 49548 - DNA, 25 bp, Saccharomyces pastorianus
taccgtctgatgagatggaatccgt

SEQ ID NO: 49549 - DNA, 25 bp, Saccharomyces pastorianus
tcagaaaatccccatttcgtccata

SEQ ID NO: 49550 - DNA, 25 bp, Saccharomyces pastorianus
aggaagctagcgcaacatcgtccca

SEQ ID NO: 49551 - DNA, 25 bp, Saccharomyces pastorianus
caacaagatcgaggtaccgtctgat

SEQ ID NO: 49552 - DNA, 25 bp, Saccharomyces pastorianus
gaacgtttacttacactttctgaag

SEQ ID NO: 49553 - DNA, 25 bp, Saccharomyces pastorianus
gtgaattcgccgtggaaacactaca

SEQ ID NO: 49554 - DNA, 25 bp, Saccharomyces pastorianus
ggcacatcagtgcatcaacccatgt

SEQ ID NO: 49555 - DNA, 25 bp, Saccharomyces pastorianus
atcgagggcggattattaccactat

SEQ ID NO: 49556 - DNA, 25 bp, Saccharomyces pastorianus
gaaatctcgagcaagttccacgtga

SEQ ID NO: 49557 - DNA, 25 bp, Saccharomyces pastorianus
gaagttgacggattctgccacgagt

SEQ ID NO: 49558 - DNA, 25 bp, Saccharomyces pastorianus
aaatgtttcccgacggtgcgatgtc

SEQ ID NO: 49559 - DNA, 25 bp, Saccharomyces pastorianus
gaagtatttccgctacgatgacaaa

SEQ ID NO: 49560 - DNA, 25 bp, Saccharomyces pastorianus
aatggagtcataccaccgttcgaga

SEQ ID NO: 49561 - DNA, 25 bp, Saccharomyces pastorianus
atgtccaagtacgtatcgcatctct

SEQ ID NO: 49562 - DNA, 25 bp, Saccharomyces pastorianus
agggcccgatgatgatggtctattt

SEQ ID NO: 49563 - DNA, 25 bp, Saccharomyces pastorianus
gaagatcctcgagacaggcgctgga

SEQ ID NO: 49564 - DNA, 25 bp, Saccharomyces pastorianus
gcaacgttatgtttgtcagcgacca

SEQ ID NO: 49565 - DNA, 25 bp, Saccharomyces pastorianus
ttgatcgagttcaccctgcggaaag

SEQ ID NO: 49566 - DNA, 25 bp, Saccharomyces pastorianus
atatctgggttctcgcggatgcgca

SEQ ID NO: 49567 - DNA, 25 bp, Saccharomyces pastorianus
gatgaaaagtgcacgccgtttcttt

SEQ ID NO: 49568 - DNA, 25 bp, Saccharomyces pastorianus
tcggcaaggtatgatgctggaccca

SEQ ID NO: 49569 - DNA, 25 bp, Saccharomyces pastorianus
ctggacccagggaaattgtacatag

SEQ ID NO: 49570 - DNA, 25 bp, Saccharomyces pastorianus
ggttccttccgagattaatagatga

SEQ ID NO: 49571 - DNA, 25 bp, Saccharomyces pastorianus
cgccgtttctttacagcttacataa

SEQ ID NO: 49572 - DNA, 25 bp, Saccharomyces pastorianus
aacggtacgcatgagtttaagacat

SEQ ID NO: 49573 - DNA, 25 bp, Saccharomyces pastorianus
gcttacataacttgcagtcgccata

SEQ ID NO: 49574 - DNA, 25 bp, Saccharomyces pastorianus
gactgttgttatgttgctttcatgt

SEQ ID NO: 49575 - DNA, 25 bp, Saccharomyces pastorianus
ggcaagagcttctacgacatggaat

SEQ ID NO: 49576 - DNA, 25 bp, Saccharomyces pastorianus
gctttcatgtgataaacgctcggca

SEQ ID NO: 49577 - DNA, 25 bp, Saccharomyces pastorianus
taaatatcagcactgcaccgcacat

SEQ ID NO: 49578 - DNA, 25 bp, Saccharomyces pastorianus
acatcgacatcgcatcgggatcgat

SEQ ID NO: 49579 - DNA, 25 bp, Saccharomyces pastorianus
atccatataagtccccaagcatagg

SEQ ID NO: 49580 - DNA, 25 bp, Saccharomyces pastorianus
gaacccaacgggagcgatcccttga

SEQ ID NO: 49581 - DNA, 25 bp, Saccharomyces pastorianus
gagttgcccgataactatccatata

SEQ ID NO: 49582 - DNA, 25 bp, Saccharomyces pastorianus
gggtcctaaggacacaccatatgaa

SEQ ID NO: 49583 - DNA, 25 bp, Saccharomyces pastorianus
gagactacatgttgagttgcccgat

SEQ ID NO: 49584 - DNA, 25 bp, Saccharomyces pastorianus
aatggcactgattcggatgatgaca

SEQ ID NO: 49585 - DNA, 25 bp, Saccharomyces pastorianus
gaagctgccacactacagttacgag

SEQ ID NO: 49586 - DNA, 25 bp, Saccharomyces pastorianus
gtgaagacctaagtgacatcgatgt

SEQ ID NO: 49587 - DNA, 25 bp, Saccharomyces pastorianus
atgtccagtggtgacgatagcgtcg

SEQ ID NO: 49588 - DNA, 25 bp, Saccharomyces pastorianus
ttccatgtgaagttcttgggtccta

SEQ ID NO: 49589 - DNA, 25 bp, Saccharomyces pastorianus
agtaacccaaatgctgcttcttcct

SEQ ID NO: 49590 - DNA, 25 bp, Saccharomyces pastorianus
aagggtttcctcaatattccatgac

SEQ ID NO: 49591 - DNA, 25 bp, Saccharomyces pastorianus
agtatacccaataacagcgtcgcaa

SEQ ID NO: 49592 - DNA, 25 bp, Saccharomyces pastorianus
cggatacgctaactctcaacaatac

SEQ ID NO: 49593 - DNA, 25 bp, Saccharomyces pastorianus
tggtgctcctgtcgcaaccgaaaat

SEQ ID NO: 49594 - DNA, 25 bp, Saccharomyces pastorianus
gaccagtgctcagaattcatcgatg

SEQ ID NO: 49595 - DNA, 25 bp, Saccharomyces pastorianus
aaccttctttaactgcaggcacgaa

SEQ ID NO: 49596 - DNA, 25 bp, Saccharomyces pastorianus
acgcttcgaacactattggctctga

SEQ ID NO: 49597 - DNA, 25 bp, Saccharomyces pastorianus
tgggctgcccatatctaacatgcaa

SEQ ID NO: 49598 - DNA, 25 bp, Saccharomyces pastorianus
gcaccatcactatcagcaggaagct

SEQ ID NO: 49599 - DNA, 25 bp, Saccharomyces pastorianus
gactccttatcctgtttattctatg

SEQ ID NO: 49600 - DNA, 25 bp, Saccharomyces pastorianus
aatctcctgataacgcaaatcccac

SEQ ID NO: 49601 - DNA, 25 bp, Saccharomyces pastorianus
aaatcccactggcatgaacactcat

SEQ ID NO: 49602 - DNA, 25 bp, Saccharomyces pastorianus
atgctgctggcggtaatcaatttac

SEQ ID NO: 49603 - DNA, 25 bp, Saccharomyces pastorianus
cctgcgttgccttcaacaactttga

SEQ ID NO: 49604 - DNA, 25 bp, Saccharomyces pastorianus
gatactagaccttcacaagagctaa

SEQ ID NO: 49605 - DNA, 25 bp, Saccharomyces pastorianus
gtgatgaaagctctgggtacccaat

SEQ ID NO: 49606 - DNA, 25 bp, Saccharomyces pastorianus
gtttggtgacgccaaaagcctctcc

SEQ ID NO: 49607 - DNA, 25 bp, Saccharomyces pastorianus
gaagagacctccatttaattctata

SEQ ID NO: 49608 - DNA, 25 bp, Saccharomyces pastorianus
actcctcgactcctttaaatactgt

SEQ ID NO: 49609 - DNA, 25 bp, Saccharomyces pastorianus
agaatcatccatttctccatcgaac

SEQ ID NO: 49610 - DNA, 25 bp, Saccharomyces pastorianus
acacattgtctcatactattccgtc

SEQ ID NO: 49611 - DNA, 25 bp, Saccharomyces pastorianus
gaggccgatctaactaaggtagtca

SEQ ID NO: 49612 - DNA, 25 bp, Saccharomyces pastorianus
atatctaccaacaatctgaaggcga

SEQ ID NO: 49613 - DNA, 25 bp, Saccharomyces pastorianus
atgttgcctcgataagggctaaggg

SEQ ID NO: 49614 - DNA, 25 bp, Saccharomyces pastorianus
gggactattctttgacattggcaca

SEQ ID NO: 49615 - DNA, 25 bp, Saccharomyces pastorianus
ttcgatgtcgatgaggatgttgcct

SEQ ID NO: 49616 - DNA, 25 bp, Saccharomyces pastorianus
gaatttgcatctagacctgttatca

SEQ ID NO: 49617 - DNA, 25 bp, Saccharomyces pastorianus
gtggctgggcagattatacaagaaa

SEQ ID NO: 49618 - DNA, 25 bp, Saccharomyces pastorianus
ggcaaggatacaacgcgataaggat

SEQ ID NO: 49619 - DNA, 25 bp, Saccharomyces pastorianus
aagaacgctgccaaagtgaaagaga

SEQ ID NO: 49620 - DNA, 25 bp, Saccharomyces pastorianus
taagggccaaactacaggcgccagc

SEQ ID NO: 49621 - DNA, 25 bp, Saccharomyces pastorianus
ggtagtcaagaaagtgccattaaca

SEQ ID NO: 49622 - DNA, 25 bp, Saccharomyces pastorianus
atgtaggtctattctgtgggtgttt

SEQ ID NO: 49623 - DNA, 25 bp, Saccharomyces pastorianus
gtattcttcattgctccacatttgc

SEQ ID NO: 49624 - DNA, 25 bp, Saccharomyces pastorianus
gaaaaattcaccttctgacttcaat

SEQ ID NO: 49625 - DNA, 25 bp, Saccharomyces pastorianus
ttccggctgtggtaagtctatttta

SEQ ID NO: 49626 - DNA, 25 bp, Saccharomyces pastorianus
aacctacacctatgatcctgttgaa

SEQ ID NO: 49627 - DNA, 25 bp, Saccharomyces pastorianus
ggccgcttccgataacgtggttaga

SEQ ID NO: 49628 - DNA, 25 bp, Saccharomyces pastorianus
gtgttgacggcccaagtatcttgat

SEQ ID NO: 49629 - DNA, 25 bp, Saccharomyces pastorianus
gaagctatcttcctaagagccaagg

SEQ ID NO: 49630 - DNA, 25 bp, Saccharomyces pastorianus
aaattcgacagatcttccggctgtg

SEQ ID NO: 49631 - DNA, 25 bp, Saccharomyces pastorianus
gtttctatgctaacctacacctatg

SEQ ID NO: 49632 - DNA, 25 bp, Saccharomyces pastorianus
gccgaacctggctttgtattcttca

SEQ ID NO: 49633 - DNA, 25 bp, Saccharomyces pastorianus
gatatcatcgccctagatttcaaac

SEQ ID NO: 49634 - DNA, 25 bp, Saccharomyces pastorianus
acttggcattgaacccttctggaaa

SEQ ID NO: 49635 - DNA, 25 bp, Saccharomyces pastorianus
gaaatgcatccgcaggttctgttca

SEQ ID NO: 49636 - DNA, 25 bp, Saccharomyces pastorianus
gatcgaccacgacctgaacatgcag

SEQ ID NO: 49637 - DNA, 25 bp, Saccharomyces pastorianus
aaaaggacacttcgcagtggccagc

SEQ ID NO: 49638 - DNA, 25 bp, Saccharomyces pastorianus
ttggtggaaatctggctgctgcgct

SEQ ID NO: 49639 - DNA, 25 bp, Saccharomyces pastorianus
tgaacatgcagttggcctgtgccgc

SEQ ID NO: 49640 - DNA, 25 bp, Saccharomyces pastorianus
gggcgctcgtgtataccgttcgaga

SEQ ID NO: 49641 - DNA, 25 bp, Saccharomyces pastorianus
aacacacaataatcttgcgtccggg

SEQ ID NO: 49642 - DNA, 25 bp, Saccharomyces pastorianus
ggaaagccggtgttcacttggcatt

SEQ ID NO: 49643 - DNA, 25 bp, Saccharomyces pastorianus
gtggactccaggttcggttacatga

SEQ ID NO: 49644 - DNA, 25 bp, Saccharomyces pastorianus
aggttgcgtttatctggactgtaca

SEQ ID NO: 49645 - DNA, 25 bp, Saccharomyces pastorianus
gcaacagcatgtttgatctgggcaa

SEQ ID NO: 49646 - DNA, 25 bp, Saccharomyces pastorianus
atttgggactgatagggacaacctc

SEQ ID NO: 49647 - DNA, 25 bp, Saccharomyces pastorianus
ggcagagttcaagtctttccacgaa

SEQ ID NO: 49648 - DNA, 25 bp, Saccharomyces pastorianus
atctgggcaagagttcggcgacaat

SEQ ID NO: 49649 - DNA, 25 bp, Saccharomyces pastorianus
tcaaacttacgacccgcattctcta

SEQ ID NO: 49650 - DNA, 25 bp, Saccharomyces pastorianus
ggtgttttacaaatctcacacgatc

SEQ ID NO: 49651 - DNA, 25 bp, Saccharomyces pastorianus
cgcattctctatggccgatttctct

SEQ ID NO: 49652 - DNA, 25 bp, Saccharomyces pastorianus
aagtcaatctgctaatctcggtccg

SEQ ID NO: 49653 - DNA, 25 bp, Saccharomyces pastorianus
tggagtgatctgtttcttattttac

SEQ ID NO: 49654 - DNA, 25 bp, Saccharomyces pastorianus
agggacaacctcaaagaagcattta

SEQ ID NO: 49655 - DNA, 25 bp, Saccharomyces pastorianus
ctcgcggaagtaccactgattttga

SEQ ID NO: 49656 - DNA, 25 bp, Saccharomyces pastorianus
agccttgcctgttcaatggtgttca

SEQ ID NO: 49657 - DNA, 25 bp, Saccharomyces pastorianus
agacaccaccttccaaattgttggc

SEQ ID NO: 49658 - DNA, 25 bp, Saccharomyces pastorianus
acataccttgtgatgaccagccttg

SEQ ID NO: 49659 - DNA, 25 bp, Saccharomyces pastorianus
gaagggttcgatttgcctcgtataa

SEQ ID NO: 49660 - DNA, 25 bp, Saccharomyces pastorianus
taaatctatgtaccctttactcctg

SEQ ID NO: 49661 - DNA, 25 bp, Saccharomyces pastorianus
tgatccatgtatgcctcgcggaagt

SEQ ID NO: 49662 - DNA, 25 bp, Saccharomyces pastorianus
agaatcttgctcttcgcttcaggaa

SEQ ID NO: 49663 - DNA, 25 bp, Saccharomyces pastorianus
gaagcatactcgctagtcatgacag

SEQ ID NO: 49664 - DNA, 25 bp, Saccharomyces pastorianus
aactgggtcctcaatatacttcatg

SEQ ID NO: 49665 - DNA, 25 bp, Saccharomyces pastorianus
gtacaactctattccggacgatttc

SEQ ID NO: 49666 - DNA, 25 bp, Saccharomyces pastorianus
attctaaggcctgcccagtcggtaa

SEQ ID NO: 49667 - DNA, 25 bp, Saccharomyces pastorianus
gtgctggtctttctgtcttaaatga

SEQ ID NO: 49668 - DNA, 25 bp, Saccharomyces pastorianus
gcatgaagccgaattggctcttcta

SEQ ID NO: 49669 - DNA, 25 bp, Saccharomyces pastorianus
gcgggtgttactacttccttaagag

SEQ ID NO: 49670 - DNA, 25 bp, Saccharomyces pastorianus
tgttgatccatacccagctgtttta

SEQ ID NO: 49671 - DNA, 25 bp, Saccharomyces pastorianus
aagctttatgaagttcctcccattc

SEQ ID NO: 49672 - DNA, 25 bp, Saccharomyces pastorianus
agggtggtattccaaaccttgccag

SEQ ID NO: 49673 - DNA, 25 bp, Saccharomyces pastorianus
cccattcccgctaatgatgctgata

SEQ ID NO: 49674 - DNA, 25 bp, Saccharomyces pastorianus
tgaatctaccgttgtatccgaatgg

SEQ ID NO: 49675 - DNA, 25 bp, Saccharomyces pastorianus
gaatacttcggtagccacatctcaa

SEQ ID NO: 49676 - DNA, 25 bp, Saccharomyces pastorianus
gccccagctaccactaatgaatcta

SEQ ID NO: 49677 - DNA, 25 bp, Saccharomyces pastorianus
gccacctgctcctggctatgagaaa

SEQ ID NO: 49678 - DNA, 25 bp, Saccharomyces pastorianus
gggccgaattgccacctgctcctgg

SEQ ID NO: 49679 - DNA, 25 bp, Saccharomyces pastorianus
atgtgccctggtttaacttcagcag

SEQ ID NO: 49680 - DNA, 25 bp, Saccharomyces pastorianus
aattgttgtcattaatgctgaaaac

SEQ ID NO: 49681 - DNA, 25 bp, Saccharomyces pastorianus
aaatgcgttggctattggtgaactg

SEQ ID NO: 49682 - DNA, 25 bp, Saccharomyces pastorianus
aggtaaaattgttgtcattaatgct

SEQ ID NO: 49683 - DNA, 25 bp, Saccharomyces pastorianus
ctgctcctggctatgagaaaggtaa

SEQ ID NO: 49684 - DNA, 25 bp, Saccharomyces pastorianus
gtgccctggtttaacttcagcaggg

SEQ ID NO: 49685 - DNA, 25 bp, Saccharomyces pastorianus
ggtttaacttcagcaggggccgaat

SEQ ID NO: 49686 - DNA, 25 bp, Saccharomyces pastorianus
caaatccataaacaaaggtcattcc

SEQ ID NO: 49687 - DNA, 25 bp, Saccharomyces pastorianus
tattggtgaactgatgatgagtaca

SEQ ID NO: 49688 - DNA, 25 bp, Saccharomyces pastorianus
aaactgcttccttcctagtgaacag

SEQ ID NO: 49689 - DNA, 25 bp, Saccharomyces pastorianus
gtgtttcaagtattgaccccagcct

SEQ ID NO: 49690 - DNA, 25 bp, Saccharomyces pastorianus
aagaatcctatgcttctttcctgct

SEQ ID NO: 49691 - DNA, 25 bp, Saccharomyces pastorianus
agcctgtcagattctgctgcgttaa

SEQ ID NO: 49692 - DNA, 25 bp, Saccharomyces pastorianus
gatactatgcccaagctaacagctt

SEQ ID NO: 49693 - DNA, 25 bp, Saccharomyces pastorianus
cttttagcatactcgtcccaagaaa

SEQ ID NO: 49694 - DNA, 25 bp, Saccharomyces pastorianus
ggtatttttgacacatcattgcaga

SEQ ID NO: 49695 - DNA, 25 bp, Saccharomyces pastorianus
taatgtgaacgtaaccaacccatca

SEQ ID NO: 49696 - DNA, 25 bp, Saccharomyces pastorianus
ggcaaacgatttcggctaccatcaa

SEQ ID NO: 49697 - DNA, 25 bp, Saccharomyces pastorianus
gcatccaaggtcaaaccgtttcatt

SEQ ID NO: 49698 - DNA, 25 bp, Saccharomyces pastorianus
gaaatgctctctatgctaaacttca

SEQ ID NO: 49699 - DNA, 25 bp, Saccharomyces pastorianus
gagaaatgtgtcaagagcttccaat

SEQ ID NO: 49700 - DNA, 25 bp, Saccharomyces pastorianus
agattcaaaattcccaagttcaaag

SEQ ID NO: 49701 - DNA, 25 bp, Saccharomyces pastorianus
aaatcccacagtcgtgaggcatcac

SEQ ID NO: 49702 - DNA, 25 bp, Saccharomyces pastorianus
attcaaattttctagccgagcagta

SEQ ID NO: 49703 - DNA, 25 bp, Saccharomyces pastorianus
ggtagtagtgcacaccattccagaa

SEQ ID NO: 49704 - DNA, 25 bp, Saccharomyces pastorianus
accaatttctggtggcaactattca

SEQ ID NO: 49705 - DNA, 25 bp, Saccharomyces pastorianus
agcttccaattcctctcaaaattca

SEQ ID NO: 49706 - DNA, 25 bp, Saccharomyces pastorianus
ccggcgagccaccaagcaattatat

SEQ ID NO: 49707 - DNA, 25 bp, Saccharomyces pastorianus
tgtcagtcaaggtggagtgccctcc

SEQ ID NO: 49708 - DNA, 25 bp, Saccharomyces pastorianus
gccatcattagtttctgcttttcca

SEQ ID NO: 49709 - DNA, 25 bp, Saccharomyces pastorianus
agacctgaccacaagaccggcgagc

SEQ ID NO: 49710 - DNA, 25 bp, Saccharomyces pastorianus
gacattaagaatggcgttcccgcaa

SEQ ID NO: 49711 - DNA, 25 bp, Saccharomyces pastorianus
gtaacggcatagtctgtgttccagt

SEQ ID NO: 49712 - DNA, 25 bp, Saccharomyces pastorianus
taaatcaccctgtttttgcttatgg

SEQ ID NO: 49713 - DNA, 25 bp, Saccharomyces pastorianus
acacagtactatttgcacatgccga

SEQ ID NO: 49714 - DNA, 25 bp, Saccharomyces pastorianus
gacccaagacctgctgtaaactata

SEQ ID NO: 49715 - DNA, 25 bp, Saccharomyces pastorianus
ttaccaccaggtagctccatagtag

SEQ ID NO: 49716 - DNA, 25 bp, Saccharomyces pastorianus
tctcgccttagaacctcatttacaa

SEQ ID NO: 49717 - DNA, 25 bp, Saccharomyces pastorianus
ctaacagcgatatctttaccaccag

SEQ ID NO: 49718 - DNA, 25 bp, Saccharomyces pastorianus
tcaacaggtggctatttccctaatc

SEQ ID NO: 49719 - DNA, 25 bp, Saccharomyces pastorianus
aaagccaattccatccatttgttaa

SEQ ID NO: 49720 - DNA, 25 bp, Saccharomyces pastorianus
gtggccaccaatgtacagttgcaaa

SEQ ID NO: 49721 - DNA, 25 bp, Saccharomyces pastorianus
aattagctgtcatagcgatcccgat

SEQ ID NO: 49722 - DNA, 25 bp, Saccharomyces pastorianus
aatggcttcttgaggttgcgcctca

SEQ ID NO: 49723 - DNA, 25 bp, Saccharomyces pastorianus
tggcagcaagcagattactcagaac

SEQ ID NO: 49724 - DNA, 25 bp, Saccharomyces pastorianus
aaggcaagattccatcacccatatg

SEQ ID NO: 49725 - DNA, 25 bp, Saccharomyces pastorianus
agcgatcccgatttgattcgtaaaa

SEQ ID NO: 49726 - DNA, 25 bp, Saccharomyces pastorianus
gaatgctgctaagcgagattcgcaa

SEQ ID NO: 49727 - DNA, 25 bp, Saccharomyces pastorianus
gaatacgtgatttaccatagtcttg

SEQ ID NO: 49728 - DNA, 25 bp, Saccharomyces pastorianus
ggaatacatccttcaagttcgttgt

SEQ ID NO: 49729 - DNA, 25 bp, Saccharomyces pastorianus
aacgtttacacgagatggcagcaag

SEQ ID NO: 49730 - DNA, 25 bp, Saccharomyces pastorianus
agcatcgaacctcaatggcttcttg

SEQ ID NO: 49731 - DNA, 25 bp, Saccharomyces pastorianus
atggtgaccacctgacgttattgaa

SEQ ID NO: 49732 - DNA, 25 bp, Saccharomyces pastorianus
gtatccccgcctatagcgaaagaag

SEQ ID NO: 49733 - DNA, 25 bp, Saccharomyces pastorianus
tcagggttaagtcgcgaagttcatc

SEQ ID NO: 49734 - DNA, 25 bp, Saccharomyces pastorianus
aatatatcaaatcgtatccccgcct

SEQ ID NO: 49735 - DNA, 25 bp, Saccharomyces pastorianus
tagaccttaatcctgttcttgataa

SEQ ID NO: 49736 - DNA, 25 bp, Saccharomyces pastorianus
gtgactgatttcgtacttagcattt

SEQ ID NO: 49737 - DNA, 25 bp, Saccharomyces pastorianus
taagctccatgcaaagcggtctcga

SEQ ID NO: 49738 - DNA, 25 bp, Saccharomyces pastorianus
gaaaagagcccagacattgttatag

SEQ ID NO: 49739 - DNA, 25 bp, Saccharomyces pastorianus
gcggaaaacagacgatttagacctt

SEQ ID NO: 49740 - DNA, 25 bp, Saccharomyces pastorianus
gacgaccctgtagtgactgatttcg

SEQ ID NO: 49741 - DNA, 25 bp, Saccharomyces pastorianus
aactgcgatgggttggttcatatat

SEQ ID NO: 49742 - DNA, 25 bp, Saccharomyces pastorianus
ggcatatcttacgaagacagcacta

SEQ ID NO: 49743 - DNA, 25 bp, Saccharomyces pastorianus
tgctcctgcagaagtactccaacta

SEQ ID NO: 49744 - DNA, 25 bp, Saccharomyces pastorianus
agtgctgctgctgattgcgacgctg

SEQ ID NO: 49745 - DNA, 25 bp, Saccharomyces pastorianus
ttacagactgtcgatgccggtgtcc

SEQ ID NO: 49746 - DNA, 25 bp, Saccharomyces pastorianus
gactcgctgctaaacacctggaggg

SEQ ID NO: 49747 - DNA, 25 bp, Saccharomyces pastorianus
aaggatccctcacttggactgcagc

SEQ ID NO: 49748 - DNA, 25 bp, Saccharomyces pastorianus
atgggcccgttgcaacagttgctca

SEQ ID NO: 49749 - DNA, 25 bp, Saccharomyces pastorianus
acacgtacatgaagaccgcgcagag

SEQ ID NO: 49750 - DNA, 25 bp, Saccharomyces pastorianus
cgcgtactcgtgcaccttgaatgta

SEQ ID NO: 49751 - DNA, 25 bp, Saccharomyces pastorianus
gatttcgtttctgtttggcaggtct

SEQ ID NO: 49752 - DNA, 25 bp, Saccharomyces pastorianus
agacagaagttcttgcgcggcgtgc

SEQ ID NO: 49753 - DNA, 25 bp, Saccharomyces pastorianus
atcgacccggagttcttacagactg

SEQ ID NO: 49754 - DNA, 25 bp, Saccharomyces pastorianus
acactccttactttcttgcaatggg

SEQ ID NO: 49755 - DNA, 25 bp, Saccharomyces pastorianus
gaaccaaccaatgcagtagctgcgt

SEQ ID NO: 49756 - DNA, 25 bp, Saccharomyces pastorianus
ttcttgcaatgggattcccaacttc

SEQ ID NO: 49757 - DNA, 25 bp, Saccharomyces pastorianus
agcatcaacaaaacaaaggcagggc

SEQ ID NO: 49758 - DNA, 25 bp, Saccharomyces pastorianus
caatgcagtagctgcgtccatattc

SEQ ID NO: 49759 - DNA, 25 bp, Saccharomyces pastorianus
agggcctgaaccaaccaatgcagta

SEQ ID NO: 49760 - DNA, 25 bp, Saccharomyces pastorianus
attgcacactccttactttcttgca

SEQ ID NO: 49761 - DNA, 25 bp, Saccharomyces pastorianus
aaggcagggcctgaaccaaccaatg

SEQ ID NO: 49762 - DNA, 25 bp, Saccharomyces pastorianus
ccatcaaggattccagcatcaacaa

SEQ ID NO: 49763 - DNA, 25 bp, Saccharomyces pastorianus
actttcttgcaatgggattcccaac

SEQ ID NO: 49764 - DNA, 25 bp, Saccharomyces pastorianus
ggattccagcatcaacaaaacaaag

SEQ ID NO: 49765 - DNA, 25 bp, Saccharomyces pastorianus
ggaacccattgaaactaagcctgga

SEQ ID NO: 49766 - DNA, 25 bp, Saccharomyces pastorianus
aagcctggaaaatctgaagagccta

SEQ ID NO: 49767 - DNA, 25 bp, Saccharomyces pastorianus
gatacctccaatatcattacatctg

SEQ ID NO: 49768 - DNA, 25 bp, Saccharomyces pastorianus
tacatctggaagaagaacccgcggc

SEQ ID NO: 49769 - DNA, 25 bp, Saccharomyces pastorianus
gaacccgcggcaaggtaattgatta

SEQ ID NO: 49770 - DNA, 25 bp, Saccharomyces pastorianus
gaagctactgtaaagcccactaatg

SEQ ID NO: 49771 - DNA, 25 bp, Saccharomyces pastorianus
gaaactacgacgattacgatgctga

SEQ ID NO: 49772 - DNA, 25 bp, Saccharomyces pastorianus
aggcaagactgctgcggaggactca

SEQ ID NO: 49773 - DNA, 25 bp, Saccharomyces pastorianus
gatttagctgaaattgatacctcca

SEQ ID NO: 49774 - DNA, 25 bp, Saccharomyces pastorianus
attacgatgctgaggtggccaaaga

SEQ ID NO: 49775 - DNA, 25 bp, Saccharomyces pastorianus
gagtcggacatggacgatgccaaat

SEQ ID NO: 49776 - DNA, 25 bp, Saccharomyces pastorianus
ggtagtagtaaatcctcatcatata

SEQ ID NO: 49777 - DNA, 25 bp, Saccharomyces pastorianus
gatgcaacatctcaaccctctgtaa

SEQ ID NO: 49778 - DNA, 25 bp, Saccharomyces pastorianus
ttcggctaatactggccttacggat

SEQ ID NO: 49779 - DNA, 25 bp, Saccharomyces pastorianus
gtacggatcaaataccgccgacaac

SEQ ID NO: 49780 - DNA, 25 bp, Saccharomyces pastorianus
ggacgaaactgctagatacccgaaa

SEQ ID NO: 49781 - DNA, 25 bp, Saccharomyces pastorianus
acccgagcgtgtcctagagttcaac

SEQ ID NO: 49782 - DNA, 25 bp, Saccharomyces pastorianus
atcatctatcaattggtggacgaaa

SEQ ID NO: 49783 - DNA, 25 bp, Saccharomyces pastorianus
tgtaacggctaacaggtcaatccta

SEQ ID NO: 49784 - DNA, 25 bp, Saccharomyces pastorianus
ttcgtcctcattcccagaagaacaa

SEQ ID NO: 49785 - DNA, 25 bp, Saccharomyces pastorianus
aagatcaagagtgcttccgccacta

SEQ ID NO: 49786 - DNA, 25 bp, Saccharomyces pastorianus
aacattgattttcgtcctcattccc

SEQ ID NO: 49787 - DNA, 25 bp, Saccharomyces pastorianus
ggacaaattgtctacagaccagtct

SEQ ID NO: 49788 - DNA, 25 bp, Saccharomyces pastorianus
agcgagtcagccgacaggttcatgg

SEQ ID NO: 49789 - DNA, 25 bp, Saccharomyces pastorianus
tcagccgacaggttcatggacaaat

SEQ ID NO: 49790 - DNA, 25 bp, Saccharomyces pastorianus
atcatcgcggacagcgagtcagccg

SEQ ID NO: 49791 - DNA, 25 bp, Saccharomyces pastorianus
gagtcagccgacaggttcatggaca

SEQ ID NO: 49792 - DNA, 25 bp, Saccharomyces pastorianus
cttccatgatgatggagcaaacaat

SEQ ID NO: 49793 - DNA, 25 bp, Saccharomyces pastorianus
gccgacaggttcatggacaaattgt

SEQ ID NO: 49794 - DNA, 25 bp, Saccharomyces pastorianus
gtctacagaccagtcttccatgatg

SEQ ID NO: 49795 - DNA, 25 bp, Saccharomyces pastorianus
tacagaccagtcttccatgatgatg

SEQ ID NO: 49796 - DNA, 25 bp, Saccharomyces pastorianus
attgtctacagaccagtcttccatg

SEQ ID NO: 49797 - DNA, 25 bp, Saccharomyces pastorianus
gacagcgagtcagccgacaggttca

SEQ ID NO: 49798 - DNA, 25 bp, Saccharomyces pastorianus
gtttcttggagcgtcaaagaggatc

SEQ ID NO: 49799 - DNA, 25 bp, Saccharomyces pastorianus
aagatcgacagaaacgacaaaacgt

SEQ ID NO: 49800 - DNA, 25 bp, Saccharomyces pastorianus
aaccccagaaagatcgacagaaacg

SEQ ID NO: 49801 - DNA, 25 bp, Saccharomyces pastorianus
gaggatcaatccggcaagtgctata

SEQ ID NO: 49802 - DNA, 25 bp, Saccharomyces pastorianus
gagcgtcaaagaggatcaatccggc

SEQ ID NO: 49803 - DNA, 25 bp, Saccharomyces pastorianus
gacagaaaccccagaaagatcgaca

SEQ ID NO: 49804 - DNA, 25 bp, Saccharomyces pastorianus
aaacgtttcttggagcgtcaaagag

SEQ ID NO: 49805 - DNA, 25 bp, Saccharomyces pastorianus
cttggagcgtcaaagaggatcaatc

SEQ ID NO: 49806 - DNA, 25 bp, Saccharomyces pastorianus
aagaggatcaatccggcaagtgcta

SEQ ID NO: 49807 - DNA, 25 bp, Saccharomyces pastorianus
gaaaccccagaaagatcgacagaaa

SEQ ID NO: 49808 - DNA, 25 bp, Saccharomyces pastorianus
cgacaaaacgtttcttggagcgtca

SEQ ID NO: 49809 - DNA, 25 bp, Saccharomyces pastorianus
ttgatcctctttgacgctccaagaa

SEQ ID NO: 49810 - DNA, 25 bp, Saccharomyces pastorianus
tgatcatcagtggtttggcgtccgt

SEQ ID NO: 49811 - DNA, 25 bp, Saccharomyces pastorianus
tctgcgctgttcgttttgatcatgc

SEQ ID NO: 49812 - DNA, 25 bp, Saccharomyces pastorianus
tggcatcctatacgcagtcgctaaa

SEQ ID NO: 49813 - DNA, 25 bp, Saccharomyces pastorianus
atttgtccatgaacctgtcggctga

SEQ ID NO: 49814 - DNA, 25 bp, Saccharomyces pastorianus
gttcgtcttgaatccaggttacctc

SEQ ID NO: 49815 - DNA, 25 bp, Saccharomyces pastorianus
acttattccatggtgggagccctga

SEQ ID NO: 49816 - DNA, 25 bp, Saccharomyces pastorianus
gatgtcgcccctagaagatcttgac

SEQ ID NO: 49817 - DNA, 25 bp, Saccharomyces pastorianus
catggagctgtcatcgttctttatg

SEQ ID NO: 49818 - DNA, 25 bp, Saccharomyces pastorianus
ggagccctgaacaaactgcctatag

SEQ ID NO: 49819 - DNA, 25 bp, Saccharomyces pastorianus
gagaatccgcctgactaactttaag

SEQ ID NO: 49820 - DNA, 25 bp, Saccharomyces pastorianus
agttccctgcatatgagatatcatt

SEQ ID NO: 49821 - DNA, 25 bp, Saccharomyces pastorianus
tggaaaagttccctgcatatgagat

SEQ ID NO: 49822 - DNA, 25 bp, Saccharomyces pastorianus
gttattctatctttactcgaagcct

SEQ ID NO: 49823 - DNA, 25 bp, Saccharomyces pastorianus
gccttagaaaggattgagtggaaat

SEQ ID NO: 49824 - DNA, 25 bp, Saccharomyces pastorianus
ctatctttactcgaagccttagaaa

SEQ ID NO: 49825 - DNA, 25 bp, Saccharomyces pastorianus
atacaggctgctctattggttacgg

SEQ ID NO: 49826 - DNA, 25 bp, Saccharomyces pastorianus
gctgctctattggttacggccgaaa

SEQ ID NO: 49827 - DNA, 25 bp, Saccharomyces pastorianus
gtggaaatatttcgcggcttttttg

SEQ ID NO: 49828 - DNA, 25 bp, Saccharomyces pastorianus
gagcgtacatacaggctgctctatt

SEQ ID NO: 49829 - DNA, 25 bp, Saccharomyces pastorianus
gaaatttgattgctcgttttcgatt

SEQ ID NO: 49830 - DNA, 25 bp, Saccharomyces pastorianus
gctctattggttacggccgaaagaa

SEQ ID NO: 49831 - DNA, 25 bp, Saccharomyces pastorianus
gaagtaagcagaaccgcacaaacca

SEQ ID NO: 49832 - DNA, 25 bp, Saccharomyces pastorianus
aagtggcgtgaatcccttagagttc

SEQ ID NO: 49833 - DNA, 25 bp, Saccharomyces pastorianus
agtcattgtccaaaaagctccccaa

SEQ ID NO: 49834 - DNA, 25 bp, Saccharomyces pastorianus
aaatatgtcaccaccacaggaagaa

SEQ ID NO: 49835 - DNA, 25 bp, Saccharomyces pastorianus
attgttcatccaaacgtaccttgta

SEQ ID NO: 49836 - DNA, 25 bp, Saccharomyces pastorianus
gtaccttgtacaacttcggagtgaa

SEQ ID NO: 49837 - DNA, 25 bp, Saccharomyces pastorianus
agataccacaggcttatcggccaag

SEQ ID NO: 49838 - DNA, 25 bp, Saccharomyces pastorianus
gaatccagcatagagataccacagg

SEQ ID NO: 49839 - DNA, 25 bp, Saccharomyces pastorianus
gaatcccttagagttctatgcaaga

SEQ ID NO: 49840 - DNA, 25 bp, Saccharomyces pastorianus
cgtttgatttttctatgggtcggat

SEQ ID NO: 49841 - DNA, 25 bp, Saccharomyces pastorianus
tgtaatgttacctttcatcaagaag

SEQ ID NO: 49842 - DNA, 25 bp, Saccharomyces pastorianus
atcccgtccggatacattcatgtag

SEQ ID NO: 49843 - DNA, 25 bp, Saccharomyces pastorianus
gaagtttttgctatttcctcctact

SEQ ID NO: 49844 - DNA, 25 bp, Saccharomyces pastorianus
gatagccgaagtcagtaactccaca

SEQ ID NO: 49845 - DNA, 25 bp, Saccharomyces pastorianus
aaaggacgcctacacggactttcat

SEQ ID NO: 49846 - DNA, 25 bp, Saccharomyces pastorianus
tggataccttttaaaacctggagtg

SEQ ID NO: 49847 - DNA, 25 bp, Saccharomyces pastorianus
gtagtttatacaccagcagattctc

SEQ ID NO: 49848 - DNA, 25 bp, Saccharomyces pastorianus
cagcttttttctaggcgatgttctt

SEQ ID NO: 49849 - DNA, 25 bp, Saccharomyces pastorianus
gggtaatttcctagcaatgcgtgat

SEQ ID NO: 49850 - DNA, 25 bp, Saccharomyces pastorianus
tttcgccggcacatcagtttattat

SEQ ID NO: 49851 - DNA, 25 bp, Saccharomyces pastorianus
tgatttgtttatgatcccgtccgga

SEQ ID NO: 49852 - DNA, 25 bp, Saccharomyces pastorianus
ggactttcatttggatttcgccggc

SEQ ID NO: 49853 - DNA, 25 bp, Saccharomyces pastorianus
tgccaataatattccagacatgtat

SEQ ID NO: 49854 - DNA, 25 bp, Saccharomyces pastorianus
ttgtgttctattggctttgtccacc

SEQ ID NO: 49855 - DNA, 25 bp, Saccharomyces pastorianus
gttctattggctttgtccaccattg

SEQ ID NO: 49856 - DNA, 25 bp, Saccharomyces pastorianus
tgttgctgccttcggcgttgccttg

SEQ ID NO: 49857 - DNA, 25 bp, Saccharomyces pastorianus
ctgccttatttgttgctgccttcgg

SEQ ID NO: 49858 - DNA, 25 bp, Saccharomyces pastorianus
ggtattgctgccttatttgttgctg

SEQ ID NO: 49859 - DNA, 25 bp, Saccharomyces pastorianus
ggctttgtccaccattgccaataat

SEQ ID NO: 49860 - DNA, 25 bp, Saccharomyces pastorianus
aacttactgggttggcgaaatcagt

SEQ ID NO: 49861 - DNA, 25 bp, Saccharomyces pastorianus
actgggttggcgaaatcagtcgttt

SEQ ID NO: 49862 - DNA, 25 bp, Saccharomyces pastorianus
attgctgccttatttgttgctgcct

SEQ ID NO: 49863 - DNA, 25 bp, Saccharomyces pastorianus
cttatttgttgctgccttcggcgtt

SEQ ID NO: 49864 - DNA, 25 bp, Saccharomyces pastorianus
tgtctggaccatggctggtaatgcc

SEQ ID NO: 49865 - DNA, 25 bp, Saccharomyces pastorianus
gtcagttctgttgtgttctattggc

SEQ ID NO: 49866 - DNA, 25 bp, Saccharomyces pastorianus
ctttgatgggttcatggaaaacttc

SEQ ID NO: 49867 - DNA, 25 bp, Saccharomyces pastorianus
ggtaatgccgcaacgttgggtatct

SEQ ID NO: 49868 - DNA, 25 bp, Saccharomyces pastorianus
agagttgtctggaccatggctggta

SEQ ID NO: 49869 - DNA, 25 bp, Saccharomyces pastorianus
acgggtttggtcagttctgttgtgt

SEQ ID NO: 49870 - DNA, 25 bp, Saccharomyces pastorianus
tgccgcaacgttgggtatctctata

SEQ ID NO: 49871 - DNA, 25 bp, Saccharomyces pastorianus
acgttgggtatctctatacctgcca

SEQ ID NO: 49872 - DNA, 25 bp, Saccharomyces pastorianus
ggaaaacttcatggactccatcggt

SEQ ID NO: 49873 - DNA, 25 bp, Saccharomyces pastorianus
tatacctgccacctattactttgat

SEQ ID NO: 49874 - DNA, 25 bp, Saccharomyces pastorianus
aaataccgagagttgtctggaccat

SEQ ID NO: 49875 - DNA, 25 bp, Saccharomyces pastorianus
attgctttatcagtgcaggctacgt

SEQ ID NO: 49876 - DNA, 25 bp, Saccharomyces pastorianus
ggtggtttaacatttgctatccttg

SEQ ID NO: 49877 - DNA, 25 bp, Saccharomyces pastorianus
gactttattaggtaacgcagccgct

SEQ ID NO: 49878 - DNA, 25 bp, Saccharomyces pastorianus
aatgactgctgtcggtgatccaacg

SEQ ID NO: 49879 - DNA, 25 bp, Saccharomyces pastorianus
gttcctaacatgtacacgattgctt

SEQ ID NO: 49880 - DNA, 25 bp, Saccharomyces pastorianus
ggctacgtgggagcctttggcaaaa

SEQ ID NO: 49881 - DNA, 25 bp, Saccharomyces pastorianus
tttcgattcccgcttgttattattt

SEQ ID NO: 49882 - DNA, 25 bp, Saccharomyces pastorianus
gattcggccaattttgctgcgtttt

SEQ ID NO: 49883 - DNA, 25 bp, Saccharomyces pastorianus
gctgcgttttgttgtctttatccac

SEQ ID NO: 49884 - DNA, 25 bp, Saccharomyces pastorianus
caaattctgttcatggattcggcca

SEQ ID NO: 49885 - DNA, 25 bp, Saccharomyces pastorianus
gcagccgctttagctatttcgattc

SEQ ID NO: 49886 - DNA, 25 bp, Saccharomyces pastorianus
gtcagagtgctgaacctcttattag

SEQ ID NO: 49887 - DNA, 25 bp, Saccharomyces pastorianus
ggacttcttgactatactatcgcaa

SEQ ID NO: 49888 - DNA, 25 bp, Saccharomyces pastorianus
tcgcaaaggttattcgtacccgcca

SEQ ID NO: 49889 - DNA, 25 bp, Saccharomyces pastorianus
cgccactagccaattatttgccgat

SEQ ID NO: 49890 - DNA, 25 bp, Saccharomyces pastorianus
acgcttcaccaatacccattagttt

SEQ ID NO: 49891 - DNA, 25 bp, Saccharomyces pastorianus
gaactcagcatctgaagtactccgt

SEQ ID NO: 49892 - DNA, 25 bp, Saccharomyces pastorianus
atttaccatcctccacaaggcagta

SEQ ID NO: 49893 - DNA, 25 bp, Saccharomyces pastorianus
gatctcacacaaccttcattggatg

SEQ ID NO: 49894 - DNA, 25 bp, Saccharomyces pastorianus
attatgggttcgacacggccttggc

SEQ ID NO: 49895 - DNA, 25 bp, Saccharomyces pastorianus
gaaaattccagacttccggaacgat

SEQ ID NO: 49896 - DNA, 25 bp, Saccharomyces pastorianus
actaagggcttctatctcatttgta

SEQ ID NO: 49897 - DNA, 25 bp, Saccharomyces pastorianus
aaacaccatggcatcgtcatgtgta

SEQ ID NO: 49898 - DNA, 25 bp, Saccharomyces pastorianus
ttgtagtcgacaaacaccatggcat

SEQ ID NO: 49899 - DNA, 25 bp, Saccharomyces pastorianus
gtcgacaaacaccatggcatcgtca

SEQ ID NO: 49900 - DNA, 25 bp, Saccharomyces pastorianus
gatactcggtttcctcaccatagtg

SEQ ID NO: 49901 - DNA, 25 bp, Saccharomyces pastorianus
aatggcctaccatgatactcggttt

SEQ ID NO: 49902 - DNA, 25 bp, Saccharomyces pastorianus
cgtcatgtgtacacactacttgaac

SEQ ID NO: 49903 - DNA, 25 bp, Saccharomyces pastorianus
cacagggtgtgttttgtagtcgaca

SEQ ID NO: 49904 - DNA, 25 bp, Saccharomyces pastorianus
atgtgtagccacagggtgtgttttg

SEQ ID NO: 49905 - DNA, 25 bp, Saccharomyces pastorianus
atgatactcggtttcctcaccatag

SEQ ID NO: 49906 - DNA, 25 bp, Saccharomyces pastorianus
atggcatcgtcatgtgtacacacta

SEQ ID NO: 49907 - DNA, 25 bp, Saccharomyces pastorianus
tctatcttgaatggcctaccatgat

SEQ ID NO: 49908 - DNA, 25 bp, Saccharomyces pastorianus
caaccttgaacgattccctgggaca

SEQ ID NO: 49909 - DNA, 25 bp, Saccharomyces pastorianus
aaaagcattctcttgctgcggaaga

SEQ ID NO: 49910 - DNA, 25 bp, Saccharomyces pastorianus
tacaaagacccttacgatgcgttgg

SEQ ID NO: 49911 - DNA, 25 bp, Saccharomyces pastorianus
aatagactactctgcttccgtggtt

SEQ ID NO: 49912 - DNA, 25 bp, Saccharomyces pastorianus
gcttccgtggttcaattcttacaaa

SEQ ID NO: 49913 - DNA, 25 bp, Saccharomyces pastorianus
gggacaccatactattaccacaact

SEQ ID NO: 49914 - DNA, 25 bp, Saccharomyces pastorianus
atgccgtcggttttttggacacaag

SEQ ID NO: 49915 - DNA, 25 bp, Saccharomyces pastorianus
aatatccgtcattattttcctggga

SEQ ID NO: 49916 - DNA, 25 bp, Saccharomyces pastorianus
aaacgtcccgtatctatcaaatcta

SEQ ID NO: 49917 - DNA, 25 bp, Saccharomyces pastorianus
accaggtatctttggcccacaaaat

SEQ ID NO: 49918 - DNA, 25 bp, Saccharomyces pastorianus
agaacagtagctccatcaacttgcc

SEQ ID NO: 49919 - DNA, 25 bp, Saccharomyces pastorianus
gagaacgttaggtacgtcacactgt

SEQ ID NO: 49920 - DNA, 25 bp, Saccharomyces pastorianus
gcatttatctggcactagagtcatt

SEQ ID NO: 49921 - DNA, 25 bp, Saccharomyces pastorianus
tggagagggccaagctagccagaaa

SEQ ID NO: 49922 - DNA, 25 bp, Saccharomyces pastorianus
atatgaagaagttgctcccgctctg

SEQ ID NO: 49923 - DNA, 25 bp, Saccharomyces pastorianus
caaccctcctgttccatatgaagaa

SEQ ID NO: 49924 - DNA, 25 bp, Saccharomyces pastorianus
gtcacactgtctcctgaagagctga

SEQ ID NO: 49925 - DNA, 25 bp, Saccharomyces pastorianus
ccattctaacaatgccgccggcgag

SEQ ID NO: 49926 - DNA, 25 bp, Saccharomyces pastorianus
cccagcatgccgtcgtaagtacgat

SEQ ID NO: 49927 - DNA, 25 bp, Saccharomyces pastorianus
tatgtagtcggtatcaaccctcctg

SEQ ID NO: 49928 - DNA, 25 bp, Saccharomyces pastorianus
gtggttaccaaatctgtcaattctg

SEQ ID NO: 49929 - DNA, 25 bp, Saccharomyces pastorianus
cccctttgtattgagccgatggata

SEQ ID NO: 49930 - DNA, 25 bp, Saccharomyces pastorianus
gacggtctccattcctatcaaaaag

SEQ ID NO: 49931 - DNA, 25 bp, Saccharomyces pastorianus
aagacttgtccgtgtcattgatgac

SEQ ID NO: 49932 - DNA, 25 bp, Saccharomyces pastorianus
caggatattctggtgccggtacgaa

SEQ ID NO: 49933 - DNA, 25 bp, Saccharomyces pastorianus
aagggtgcagccactcaatgtttgc

SEQ ID NO: 49934 - DNA, 25 bp, Saccharomyces pastorianus
acggtgctgtcattggtggctttaa

SEQ ID NO: 49935 - DNA, 25 bp, Saccharomyces pastorianus
taacaacttgattccttacgcgcta

SEQ ID NO: 49936 - DNA, 25 bp, Saccharomyces pastorianus
attgctgccgctacgaaaattgcca

SEQ ID NO: 49937 - DNA, 25 bp, Saccharomyces pastorianus
gagatttctactcgtattgggcacg

SEQ ID NO: 49938 - DNA, 25 bp, Saccharomyces pastorianus
aagggttcattgtccaccggtgagg

SEQ ID NO: 49939 - DNA, 25 bp, Saccharomyces pastorianus
gttccaaggtatttctctgacggtc

SEQ ID NO: 49940 - DNA, 25 bp, Saccharomyces pastorianus
gttgcatttatacctcatgtcggac

SEQ ID NO: 49941 - DNA, 25 bp, Saccharomyces pastorianus
ttatctgccaaggactaacactcgc

SEQ ID NO: 49942 - DNA, 25 bp, Saccharomyces pastorianus
ggtagaaacattcgtcaggtctttt

SEQ ID NO: 49943 - DNA, 25 bp, Saccharomyces pastorianus
acaagcttgtatgttccgatgcggc

SEQ ID NO: 49944 - DNA, 25 bp, Saccharomyces pastorianus
gaatctgttgcatcctacttgagag

SEQ ID NO: 49945 - DNA, 25 bp, Saccharomyces pastorianus
taacactcgccgtgctgatggcaag

SEQ ID NO: 49946 - DNA, 25 bp, Saccharomyces pastorianus
actcggtccaaaccatgcagtacga

SEQ ID NO: 49947 - DNA, 25 bp, Saccharomyces pastorianus
aggtcttttgataccactcggtcca

SEQ ID NO: 49948 - DNA, 25 bp, Saccharomyces pastorianus
gatgaaccccttgaagcactagcta

SEQ ID NO: 49949 - DNA, 25 bp, Saccharomyces pastorianus
atattcaatgccttacgtcgtgatt

SEQ ID NO: 49950 - DNA, 25 bp, Saccharomyces pastorianus
acgtcgtgatttctctgcattacaa

SEQ ID NO: 49951 - DNA, 25 bp, Saccharomyces pastorianus
atgccgatttcgtttcttacggtga

SEQ ID NO: 49952 - DNA, 25 bp, Saccharomyces pastorianus
ggagactgttttatgttattctatt

SEQ ID NO: 49953 - DNA, 25 bp, Saccharomyces pastorianus
ttagggagactgttttatgttattc

SEQ ID NO: 49954 - DNA, 25 bp, Saccharomyces pastorianus
gttttatgttattctattactaatt

SEQ ID NO: 49955 - DNA, 25 bp, Saccharomyces pastorianus
attactaattaatgctgttgctgtg

SEQ ID NO: 49956 - DNA, 25 bp, Saccharomyces pastorianus
gggagactgttttatgttattctat

SEQ ID NO: 49957 - DNA, 25 bp, Saccharomyces pastorianus
actaattaatgctgttgctgtgctg

SEQ ID NO: 49958 - DNA, 25 bp, Saccharomyces pastorianus
tactaattaatgctgttgctgtgct

SEQ ID NO: 49959 - DNA, 25 bp, Saccharomyces pastorianus
ggattagggagactgttttatgtta

SEQ ID NO: 49960 - DNA, 25 bp, Saccharomyces pastorianus
atttggattagggagactgttttat

SEQ ID NO: 49961 - DNA, 25 bp, Saccharomyces pastorianus
gactgttttatgttattctattact

SEQ ID NO: 49962 - DNA, 25 bp, Saccharomyces pastorianus
atgatatttggattagggagactgt

SEQ ID NO: 49963 - DNA, 25 bp, Saccharomyces pastorianus
acaccaccaagtccaaggttgtaca

SEQ ID NO: 49964 - DNA, 25 bp, Saccharomyces pastorianus
ccaagtccaaggttgtacaattgat

SEQ ID NO: 49965 - DNA, 25 bp, Saccharomyces pastorianus
gagacacctgtttttggtcaggatc

SEQ ID NO: 49966 - DNA, 25 bp, Saccharomyces pastorianus
accaccaagtccaaggttgtacaat

SEQ ID NO: 49967 - DNA, 25 bp, Saccharomyces pastorianus
tgatgagacacctgtttttggtcag

SEQ ID NO: 49968 - DNA, 25 bp, Saccharomyces pastorianus
gacacctgtttttggtcaggatcaa

SEQ ID NO: 49969 - DNA, 25 bp, Saccharomyces pastorianus
gatcaaatgatgagacacctgtttt

SEQ ID NO: 49970 - DNA, 25 bp, Saccharomyces pastorianus
gatcaaaacaccaccaagtccaagg

SEQ ID NO: 49971 - DNA, 25 bp, Saccharomyces pastorianus
cacctgtttttggtcaggatcaaaa

SEQ ID NO: 49972 - DNA, 25 bp, Saccharomyces pastorianus
gtccaaggttgtacaattgattggt

SEQ ID NO: 49973 - DNA, 25 bp, Saccharomyces pastorianus
gtcaggatcaaaacaccaccaagtc

SEQ ID NO: 49974 - DNA, 25 bp, Saccharomyces pastorianus
gcaacgcatcgtatggactttcaaa

SEQ ID NO: 49975 - DNA, 25 bp, Saccharomyces pastorianus
gaatgtttccggtttctgtaatgcc

SEQ ID NO: 49976 - DNA, 25 bp, Saccharomyces pastorianus
agatcctgccgttgattggtctatc

SEQ ID NO: 49977 - DNA, 25 bp, Saccharomyces pastorianus
ggctaatttccgagctttcattttc

SEQ ID NO: 49978 - DNA, 25 bp, Saccharomyces pastorianus
aaaacggctttctgtatccatctag

SEQ ID NO: 49979 - DNA, 25 bp, Saccharomyces pastorianus
ctgggctctttcatgtccaaaggac

SEQ ID NO: 49980 - DNA, 25 bp, Saccharomyces pastorianus
gttcctgctttcgactttggtagta

SEQ ID NO: 49981 - DNA, 25 bp, Saccharomyces pastorianus
ggtctatcttcgtttctacttggaa

SEQ ID NO: 49982 - DNA, 25 bp, Saccharomyces pastorianus
tatagcactcctgccgaacgggata

SEQ ID NO: 49983 - DNA, 25 bp, Saccharomyces pastorianus
tgtaatgcctatgacttcgctgttc

SEQ ID NO: 49984 - DNA, 25 bp, Saccharomyces pastorianus
acaggcctctgctgacagcttgaaa

SEQ ID NO: 49985 - DNA, 25 bp, Saccharomyces pastorianus
atggctttgactcatggaagttctt

SEQ ID NO: 49986 - DNA, 25 bp, Saccharomyces pastorianus
aatctttgctaaacggcatcttcga

SEQ ID NO: 49987 - DNA, 25 bp, Saccharomyces pastorianus
gattcattggtcatacggaggctat

SEQ ID NO: 49988 - DNA, 25 bp, Saccharomyces pastorianus
gtttctcgccagaagacatctcttg

SEQ ID NO: 49989 - DNA, 25 bp, Saccharomyces pastorianus
ggaggctatctactcttcgaagcta

SEQ ID NO: 49990 - DNA, 25 bp, Saccharomyces pastorianus
gttggtgatgacactggcgccagta

SEQ ID NO: 49991 - DNA, 25 bp, Saccharomyces pastorianus
gataggagcaagtttctcgccagaa

SEQ ID NO: 49992 - DNA, 25 bp, Saccharomyces pastorianus
atcaagctaccgacgctagacagcg

SEQ ID NO: 49993 - DNA, 25 bp, Saccharomyces pastorianus
gggagtactagaagacctgcttgaa

SEQ ID NO: 49994 - DNA, 25 bp, Saccharomyces pastorianus
aagacaagcggttcgttgcgttaga

SEQ ID NO: 49995 - DNA, 25 bp, Saccharomyces pastorianus
gaagttcttgtttcctgtcctgaaa

SEQ ID NO: 49996 - DNA, 25 bp, Saccharomyces pastorianus
aatgacattccagatgtgaaacctg

SEQ ID NO: 49997 - DNA, 25 bp, Saccharomyces pastorianus
aaagaaggtgtgatttcggaagatc

SEQ ID NO: 49998 - DNA, 25 bp, Saccharomyces pastorianus
caggtctgcgttcgtttatgcgtaa

SEQ ID NO: 49999 - DNA, 25 bp, Saccharomyces pastorianus
ctgcgttcgtttatgcgtaaaaaga

SEQ ID NO: 50000 - DNA, 25 bp, Saccharomyces pastorianus
aaattcaggtctgcgttcgtttatg

SEQ ID NO: 50001 - DNA, 25 bp, Saccharomyces pastorianus
gagagttcagaaacaattacataag

SEQ ID NO: 50002 - DNA, 25 bp, Saccharomyces pastorianus
attccagatgtgaaacctgaagtaa

SEQ ID NO: 50003 - DNA, 25 bp, Saccharomyces pastorianus
tccaaggagaataatgacattccag

SEQ ID NO: 50004 - DNA, 25 bp, Saccharomyces pastorianus
ggtctgcgttcgtttatgcgtaaaa

SEQ ID NO: 50005 - DNA, 25 bp, Saccharomyces pastorianus
agggcaaaaattcaggtctgcgttc

SEQ ID NO: 50006 - DNA, 25 bp, Saccharomyces pastorianus
ggacgccaataataaatccaaggag

SEQ ID NO: 50007 - DNA, 25 bp, Saccharomyces pastorianus
tctcgtggtcctcatgttacattat

SEQ ID NO: 50008 - DNA, 25 bp, Saccharomyces pastorianus
gtaaagttactctctgccagaggcc

SEQ ID NO: 50009 - DNA, 25 bp, Saccharomyces pastorianus
tacctgctagccactgctggtgaaa

SEQ ID NO: 50010 - DNA, 25 bp, Saccharomyces pastorianus
gcattgccatcgacagaagcggtta

SEQ ID NO: 50011 - DNA, 25 bp, Saccharomyces pastorianus
gaagcggttactatatggtcaccac

SEQ ID NO: 50012 - DNA, 25 bp, Saccharomyces pastorianus
gtcaatgcctgaccccttggtaaag

SEQ ID NO: 50013 - DNA, 25 bp, Saccharomyces pastorianus
gatgtttccactggtcaactggttt

SEQ ID NO: 50014 - DNA, 25 bp, Saccharomyces pastorianus
atggtacagtttcgctatggtctcc

SEQ ID NO: 50015 - DNA, 25 bp, Saccharomyces pastorianus
ggtctattagcattgtctcgtggtc

SEQ ID NO: 50016 - DNA, 25 bp, Saccharomyces pastorianus
gaaggcacagaactacaccgtttga

SEQ ID NO: 50017 - DNA, 25 bp, Saccharomyces pastorianus
aggcacgaacgtttcaatttcagat

SEQ ID NO: 50018 - DNA, 25 bp, Saccharomyces pastorianus
ttccactcctgatttgttttcctta

SEQ ID NO: 50019 - DNA, 25 bp, Saccharomyces pastorianus
gttttccttactgagctccatgaat

SEQ ID NO: 50020 - DNA, 25 bp, Saccharomyces pastorianus
tgaatactggtatgccgggcgcaga

SEQ ID NO: 50021 - DNA, 25 bp, Saccharomyces pastorianus
tcaccactgttttcgctacatttga

SEQ ID NO: 50022 - DNA, 25 bp, Saccharomyces pastorianus
aaatgctgcggtgtggtctgctttc

SEQ ID NO: 50023 - DNA, 25 bp, Saccharomyces pastorianus
aagctagtttcgcttgtgcccgagg

SEQ ID NO: 50024 - DNA, 25 bp, Saccharomyces pastorianus
tttgcgcctttgagaaacccatcta

SEQ ID NO: 50025 - DNA, 25 bp, Saccharomyces pastorianus
agactaccacgattacttgctcaat

SEQ ID NO: 50026 - DNA, 25 bp, Saccharomyces pastorianus
ttattgccctatctgtttctactta

SEQ ID NO: 50027 - DNA, 25 bp, Saccharomyces pastorianus
atattgggatctgctgtccatgctc

SEQ ID NO: 50028 - DNA, 25 bp, Saccharomyces pastorianus
gcattcgctcaatcggcttggtttg

SEQ ID NO: 50029 - DNA, 25 bp, Saccharomyces pastorianus
tttcttctgccttttcgacttccag

SEQ ID NO: 50030 - DNA, 25 bp, Saccharomyces pastorianus
tgctgctgttgcaggtgagtctgtt

SEQ ID NO: 50031 - DNA, 25 bp, Saccharomyces pastorianus
tgctgctgctgttgcaggtgagtct

SEQ ID NO: 50032 - DNA, 25 bp, Saccharomyces pastorianus
gcggtttcttctgccttttcgactt

SEQ ID NO: 50033 - DNA, 25 bp, Saccharomyces pastorianus
tctgccttttcgacttccagcaaca

SEQ ID NO: 50034 - DNA, 25 bp, Saccharomyces pastorianus
atgtgggcaccacagctcgcggttt

SEQ ID NO: 50035 - DNA, 25 bp, Saccharomyces pastorianus
tacagactccagcaccaggttcagg

SEQ ID NO: 50036 - DNA, 25 bp, Saccharomyces pastorianus
ttcaggccatccaccatgtgggcac

SEQ ID NO: 50037 - DNA, 25 bp, Saccharomyces pastorianus
aggttcaggccatccaccatgtggg

SEQ ID NO: 50038 - DNA, 25 bp, Saccharomyces pastorianus
acagctcgcggtttcttctgccttt

SEQ ID NO: 50039 - DNA, 25 bp, Saccharomyces pastorianus
gactccagcaccaggttcaggccat

SEQ ID NO: 50040 - DNA, 25 bp, Saccharomyces pastorianus
gcccgcagtgtcaaaggaacagtca

SEQ ID NO: 50041 - DNA, 25 bp, Saccharomyces pastorianus
tgctgctgctgttgcaggtgagtct

SEQ ID NO: 50042 - DNA, 25 bp, Saccharomyces pastorianus
gcggtttcttctgccttttcgactt

SEQ ID NO: 50043 - DNA, 25 bp, Saccharomyces pastorianus
tctgccttttcgacttccagcaaca

SEQ ID NO: 50044 - DNA, 25 bp, Saccharomyces pastorianus
atgtgggcaccacagctcgcggttt

SEQ ID NO: 50045 - DNA, 25 bp, Saccharomyces pastorianus
tacagactccagcaccaggttcagg

SEQ ID NO: 50046 - DNA, 25 bp, Saccharomyces pastorianus
aggttcaggccatccaccatgtggg

SEQ ID NO: 50047 - DNA, 25 bp, Saccharomyces pastorianus
ttcaggccatccaccatgtgggcac

SEQ ID NO: 50048 - DNA, 25 bp, Saccharomyces pastorianus
acagctcgcggtttcttctgccttt

SEQ ID NO: 50049 - DNA, 25 bp, Saccharomyces pastorianus
tgttgcgcccgcagtgtcaaaggaa

SEQ ID NO: 50050 - DNA, 25 bp, Saccharomyces pastorianus
tgcaggtgagtctgttgcgcccgca

SEQ ID NO: 50051 - DNA, 25 bp, Saccharomyces pastorianus
taaacccatttgcatcacggcccag

SEQ ID NO: 50052 - DNA, 25 bp, Saccharomyces pastorianus
gccatctaaacccatttgcatcacg

SEQ ID NO: 50053 - DNA, 25 bp, Saccharomyces pastorianus
atctaaacccatttgcatcacggcc

SEQ ID NO: 50054 - DNA, 25 bp, Saccharomyces pastorianus
tggccatctaaacccatttgcatca

SEQ ID NO: 50055 - DNA, 25 bp, Saccharomyces pastorianus
ccatctaaacccatttgcatcacgg

SEQ ID NO: 50056 - DNA, 25 bp, Saccharomyces pastorianus
atggctggccatctaaacccatttg

SEQ ID NO: 50057 - DNA, 25 bp, Saccharomyces pastorianus
catctaaacccatttgcatcacggc

SEQ ID NO: 50058 - DNA, 25 bp, Saccharomyces pastorianus
ggctggccatctaaacccatttgca

SEQ ID NO: 50059 - DNA, 25 bp, Saccharomyces pastorianus
tggctggccatctaaacccatttgc

SEQ ID NO: 50060 - DNA, 25 bp, Saccharomyces pastorianus
gctggccatctaaacccatttgcat

SEQ ID NO: 50061 - DNA, 25 bp, Saccharomyces pastorianus
aacccatttgcatcacggcccagtt

SEQ ID NO: 50062 - DNA, 25 bp, Saccharomyces pastorianus
ttgttggacaacttccgttccgaag

SEQ ID NO: 50063 - DNA, 25 bp, Saccharomyces pastorianus
agatgattcgtccaatgcttccgac

SEQ ID NO: 50064 - DNA, 25 bp, Saccharomyces pastorianus
attttttcaccagatccagcagatg

SEQ ID NO: 50065 - DNA, 25 bp, Saccharomyces pastorianus
tgtcctccaaggatgtttctccgga

SEQ ID NO: 50066 - DNA, 25 bp, Saccharomyces pastorianus
atgatgaaccattccagctctacaa

SEQ ID NO: 50067 - DNA, 25 bp, Saccharomyces pastorianus
ttgcatcgttccaaaggatccgcac

SEQ ID NO: 50068 - DNA, 25 bp, Saccharomyces pastorianus
agactgggcgtctcgtcaaacgatg

SEQ ID NO: 50069 - DNA, 25 bp, Saccharomyces pastorianus
ggagttgtcaattcttcttccacag

SEQ ID NO: 50070 - DNA, 25 bp, Saccharomyces pastorianus
gattcacaatcacttccgagacgag

SEQ ID NO: 50071 - DNA, 25 bp, Saccharomyces pastorianus
ttttcgtccagcagttccaatttgt

SEQ ID NO: 50072 - DNA, 25 bp, Saccharomyces pastorianus
agacgagcttttcgaacaccaccga

SEQ ID NO: 50073 - DNA, 25 bp, Saccharomyces pastorianus
agtcaattgggcaaccacatccttt

SEQ ID NO: 50074 - DNA, 25 bp, Saccharomyces pastorianus
aagccaaagcattactgtttcggat

SEQ ID NO: 50075 - DNA, 25 bp, Saccharomyces pastorianus
gtatcgcaatgacgaggactccatt

SEQ ID NO: 50076 - DNA, 25 bp, Saccharomyces pastorianus
aagtatggtccgaggctctttgaaa

SEQ ID NO: 50077 - DNA, 25 bp, Saccharomyces pastorianus
gttcctttgcgggttattcatcaac

SEQ ID NO: 50078 - DNA, 25 bp, Saccharomyces pastorianus
gccctacgtaggacagtatcgcaat

SEQ ID NO: 50079 - DNA, 25 bp, Saccharomyces pastorianus
gccaaaccggcttgataggttccta

SEQ ID NO: 50080 - DNA, 25 bp, Saccharomyces pastorianus
gaacctatcgggattgcactgccaa

SEQ ID NO: 50081 - DNA, 25 bp, Saccharomyces pastorianus
acatcctttcgaaccgcgcagtaaa

SEQ ID NO: 50082 - DNA, 25 bp, Saccharomyces pastorianus
gtatcggttcaagccgcatgtcaga

SEQ ID NO: 50083 - DNA, 25 bp, Saccharomyces pastorianus
aaacactagtcttttcgcgaacgag

SEQ ID NO: 50084 - DNA, 25 bp, Saccharomyces pastorianus
gaacactacgtcaagtagtccgtct

SEQ ID NO: 50085 - DNA, 25 bp, Saccharomyces pastorianus
tagccatgataactcaagtacccaa

SEQ ID NO: 50086 - DNA, 25 bp, Saccharomyces pastorianus
gcagtacaaagcagagtagccctct

SEQ ID NO: 50087 - DNA, 25 bp, Saccharomyces pastorianus
gttcagtgactaacgtaactccatt

SEQ ID NO: 50088 - DNA, 25 bp, Saccharomyces pastorianus
attaacaccgagacatagccatgat

SEQ ID NO: 50089 - DNA, 25 bp, Saccharomyces pastorianus
gagcatacctcgcagtacaaagcag

SEQ ID NO: 50090 - DNA, 25 bp, Saccharomyces pastorianus
gtagtccgtctacaatcatgaacga

SEQ ID NO: 50091 - DNA, 25 bp, Saccharomyces pastorianus
taacgtaactccattattaacaccg

SEQ ID NO: 50092 - DNA, 25 bp, Saccharomyces pastorianus
aagtacccaaatatcaagtatgaag

SEQ ID NO: 50093 - DNA, 25 bp, Saccharomyces pastorianus
gtcgacaccgttcagtgactaacgt

SEQ ID NO: 50094 - DNA, 25 bp, Saccharomyces pastorianus
tctctcaagtcgacaccgttcagtg

SEQ ID NO: 50095 - DNA, 25 bp, Saccharomyces pastorianus
gggcatttgatgtttcaaccgctag

SEQ ID NO: 50096 - DNA, 25 bp, Saccharomyces pastorianus
aatgtctgcattgacgtttgcgtcc

SEQ ID NO: 50097 - DNA, 25 bp, Saccharomyces pastorianus
aagagaattcatgggtctccctcaa

SEQ ID NO: 50098 - DNA, 25 bp, Saccharomyces pastorianus
aaccgctagagaattcgtcttcaag

SEQ ID NO: 50099 - DNA, 25 bp, Saccharomyces pastorianus
aaaggagcgaggcaatgtctgcatt

SEQ ID NO: 50100 - DNA, 25 bp, Saccharomyces pastorianus
aactgaactacaagccgccaccgtt

SEQ ID NO: 50101 - DNA, 25 bp, Saccharomyces pastorianus
gctgcttccataggtacgttcagta

SEQ ID NO: 50102 - DNA, 25 bp, Saccharomyces pastorianus
cgttcagtacgttggtatttggatt

SEQ ID NO: 50103 - DNA, 25 bp, Saccharomyces pastorianus
ctccctcaaacgtcagacactgata

SEQ ID NO: 50104 - DNA, 25 bp, Saccharomyces pastorianus
tttgcgtccgctgcttccataggta

SEQ ID NO: 50105 - DNA, 25 bp, Saccharomyces pastorianus
gccaccgttctctcaaaggagcgag

SEQ ID NO: 50106 - DNA, 25 bp, Saccharomyces pastorianus
gctccaaatggtcaagttttatggt

SEQ ID NO: 50107 - DNA, 25 bp, Saccharomyces pastorianus
cagtttcaccctcatcactatgagg

SEQ ID NO: 50108 - DNA, 25 bp, Saccharomyces pastorianus
ggatgctccaaatggtcaagtttta

SEQ ID NO: 50109 - DNA, 25 bp, Saccharomyces pastorianus
ttttatggtgcagccagtttcaccc

SEQ ID NO: 50110 - DNA, 25 bp, Saccharomyces pastorianus
atggtgcagccagtttcaccctcat

SEQ ID NO: 50111 - DNA, 25 bp, Saccharomyces pastorianus
agtacaagagaaggaggatgctcca

SEQ ID NO: 50112 - DNA, 25 bp, Saccharomyces pastorianus
aggaggatgctccaaatggtcaagt

SEQ ID NO: 50113 - DNA, 25 bp, Saccharomyces pastorianus
gtcaagttttatggtgcagccagtt

SEQ ID NO: 50114 - DNA, 25 bp, Saccharomyces pastorianus
atgactgatgcgaagaagcagtaca

SEQ ID NO: 50115 - DNA, 25 bp, Saccharomyces pastorianus
aatggtcaagttttatggtgcagcc

SEQ ID NO: 50116 - DNA, 25 bp, Saccharomyces pastorianus
agttttatggtgcagccagtttcac

SEQ ID NO: 50117 - DNA, 25 bp, Saccharomyces pastorianus
tcgcggtactgaatatccatggttt

SEQ ID NO: 50118 - DNA, 25 bp, Saccharomyces pastorianus
tttcatctattctaatctccatttg

SEQ ID NO: 50119 - DNA, 25 bp, Saccharomyces pastorianus
tcaacataatgtgcggtctgggact

SEQ ID NO: 50120 - DNA, 25 bp, Saccharomyces pastorianus
tgagctacttaacggcttcgtggtt

SEQ ID NO: 50121 - DNA, 25 bp, Saccharomyces pastorianus
atggaattatactctctctactaca

SEQ ID NO: 50122 - DNA, 25 bp, Saccharomyces pastorianus
aatgagattctgcttcgaagacaaa

SEQ ID NO: 50123 - DNA, 25 bp, Saccharomyces pastorianus
atctccatttgttatagtctactct

SEQ ID NO: 50124 - DNA, 25 bp, Saccharomyces pastorianus
agtctactcttcaacataatgtgcg

SEQ ID NO: 50125 - DNA, 25 bp, Saccharomyces pastorianus
gactgggcggactgagctacttaac

SEQ ID NO: 50126 - DNA, 25 bp, Saccharomyces pastorianus
tctctactacattttcgcggtactg

SEQ ID NO: 50127 - DNA, 25 bp, Saccharomyces pastorianus
gaatatccatggtttttcatctatt

SEQ ID NO: 50128 - DNA, 25 bp, Saccharomyces pastorianus
tgccggtgtcatcgccaacccaaag

SEQ ID NO: 50129 - DNA, 25 bp, Saccharomyces pastorianus
cggtgtcatcgccaacccaaagggt

SEQ ID NO: 50130 - DNA, 25 bp, Saccharomyces pastorianus
tcgccaacccaaagggtgaaatgaa

SEQ ID NO: 50131 - DNA, 25 bp, Saccharomyces pastorianus
atcgccaacccaaagggtgaaatga

SEQ ID NO: 50132 - DNA, 25 bp, Saccharomyces pastorianus
ggtgtcatcgccaacccaaagggtg

SEQ ID NO: 50133 - DNA, 25 bp, Saccharomyces pastorianus
tcatcgccaacccaaagggtgaaat

SEQ ID NO: 50134 - DNA, 25 bp, Saccharomyces pastorianus
gtgtcatcgccaacccaaagggtga

SEQ ID NO: 50135 - DNA, 25 bp, Saccharomyces pastorianus
tgtcatcgccaacccaaagggtgaa

SEQ ID NO: 50136 - DNA, 25 bp, Saccharomyces pastorianus
agacaatgccggtgtcatcgccaac

SEQ ID NO: 50137 - DNA, 25 bp, Saccharomyces pastorianus
aatgccggtgtcatcgccaacccaa

SEQ ID NO: 50138 - DNA, 25 bp, Saccharomyces pastorianus
atgccggtgtcatcgccaacccaaa

SEQ ID NO: 50139 - DNA, 25 bp, Saccharomyces pastorianus
gttgtatccctacgacgcagatggc

SEQ ID NO: 50140 - DNA, 25 bp, Saccharomyces pastorianus
ttattccaagtaattatgttcagtt

SEQ ID NO: 50141 - DNA, 25 bp, Saccharomyces pastorianus
tcgaacaaaacgaaattctacaagt

SEQ ID NO: 50142 - DNA, 25 bp, Saccharomyces pastorianus
ctacgacgcagatggcgatgatgct

SEQ ID NO: 50143 - DNA, 25 bp, Saccharomyces pastorianus
aaggcaaaggcgttgtatccctacg

SEQ ID NO: 50144 - DNA, 25 bp, Saccharomyces pastorianus
ggctgtatagcgatataggcgatga

SEQ ID NO: 50145 - DNA, 25 bp, Saccharomyces pastorianus
gatataggcgatgacaactttgtat

SEQ ID NO: 50146 - DNA, 25 bp, Saccharomyces pastorianus
gtatccctacgacgcagatggcgat

SEQ ID NO: 50147 - DNA, 25 bp, Saccharomyces pastorianus
aaaggcgttgtatccctacgacgca

SEQ ID NO: 50148 - DNA, 25 bp, Saccharomyces pastorianus
gatgacaactttgtatacaaggcaa

SEQ ID NO: 50149 - DNA, 25 bp, Saccharomyces pastorianus
gagcaaatggtgaaacaggaattat

SEQ ID NO: 50150 - DNA, 25 bp, Saccharomyces pastorianus
aatcttcacacagagctactgctga

SEQ ID NO: 50151 - DNA, 25 bp, Saccharomyces pastorianus
atcagagaatcatccgaccaaccag

SEQ ID NO: 50152 - DNA, 25 bp, Saccharomyces pastorianus
tgcgggcattatcaacacggacaaa

SEQ ID NO: 50153 - DNA, 25 bp, Saccharomyces pastorianus
ggaacgtaaggtcacctcgtttgag

SEQ ID NO: 50154 - DNA, 25 bp, Saccharomyces pastorianus
ccaaccagattggagcacgtctatt

SEQ ID NO: 50155 - DNA, 25 bp, Saccharomyces pastorianus
gatcttctttggtaagccacggcga

SEQ ID NO: 50156 - DNA, 25 bp, Saccharomyces pastorianus
atacagaccaaatactgcgggcatt

SEQ ID NO: 50157 - DNA, 25 bp, Saccharomyces pastorianus
tatagaccaccaaagattaccgccg

SEQ ID NO: 50158 - DNA, 25 bp, Saccharomyces pastorianus
gaaacgtgcgctggaaagatcttct

SEQ ID NO: 50159 - DNA, 25 bp, Saccharomyces pastorianus
aggatcgtagcaataaatcgcgtat

SEQ ID NO: 50160 - DNA, 25 bp, Saccharomyces pastorianus
ggtgctgacattgtaaatcacggac

SEQ ID NO: 50161 - DNA, 25 bp, Saccharomyces pastorianus
gaaagtacagaacctgctccagctg

SEQ ID NO: 50162 - DNA, 25 bp, Saccharomyces pastorianus
gtataacgatgctgtggctcaattg

SEQ ID NO: 50163 - DNA, 25 bp, Saccharomyces pastorianus
ggacatgcaaccatgcgcaatttgc

SEQ ID NO: 50164 - DNA, 25 bp, Saccharomyces pastorianus
ggaggacgcagacaccttactggaa

SEQ ID NO: 50165 - DNA, 25 bp, Saccharomyces pastorianus
ataccttaatatctgcccaaagccg

SEQ ID NO: 50166 - DNA, 25 bp, Saccharomyces pastorianus
taaaccatctacaaccgtcctttat

SEQ ID NO: 50167 - DNA, 25 bp, Saccharomyces pastorianus
ggaccctaaggaactgctgcaaaaa

SEQ ID NO: 50168 - DNA, 25 bp, Saccharomyces pastorianus
cagactggctatacacgtgcgatat

SEQ ID NO: 50169 - DNA, 25 bp, Saccharomyces pastorianus
gcctgctgatgtccctctagaggta

SEQ ID NO: 50170 - DNA, 25 bp, Saccharomyces pastorianus
gagaactactctaatacggacccta

SEQ ID NO: 50171 - DNA, 25 bp, Saccharomyces pastorianus
tcagtttactatccccatctacagt

SEQ ID NO: 50172 - DNA, 25 bp, Saccharomyces pastorianus
acgatcgcgatctttgacagttgca

SEQ ID NO: 50173 - DNA, 25 bp, Saccharomyces pastorianus
aggacgccctagattctactaatgt

SEQ ID NO: 50174 - DNA, 25 bp, Saccharomyces pastorianus
gagggaagccaataccattactact

SEQ ID NO: 50175 - DNA, 25 bp, Saccharomyces pastorianus
agatacatcaaagtccgtgccttga

SEQ ID NO: 50176 - DNA, 25 bp, Saccharomyces pastorianus
gacgacgataactccacataacata

SEQ ID NO: 50177 - DNA, 25 bp, Saccharomyces pastorianus
aggaggagacacaactcttcaaaag

SEQ ID NO: 50178 - DNA, 25 bp, Saccharomyces pastorianus
ggagttaatgctaaacgccgggaat

SEQ ID NO: 50179 - DNA, 25 bp, Saccharomyces pastorianus
gaagaaggtctataccctcaaataa

SEQ ID NO: 50180 - DNA, 25 bp, Saccharomyces pastorianus
tgagccatcaaacaacccacaaaat

SEQ ID NO: 50181 - DNA, 25 bp, Saccharomyces pastorianus
actaggaggctttggcggtaatcac

SEQ ID NO: 50182 - DNA, 25 bp, Saccharomyces pastorianus
gtgccttgatcaacccattgggaat

SEQ ID NO: 50183 - DNA, 25 bp, Saccharomyces pastorianus
ttccaaattttaaaacctgctcaga

SEQ ID NO: 50184 - DNA, 25 bp, Saccharomyces pastorianus
atattcccgatgttggtttgttatg

SEQ ID NO: 50185 - DNA, 25 bp, Saccharomyces pastorianus
agatggttacgaattcttcagtaag

SEQ ID NO: 50186 - DNA, 25 bp, Saccharomyces pastorianus
acaagacatggagctgatttgcaga

SEQ ID NO: 50187 - DNA, 25 bp, Saccharomyces pastorianus
gcagagcccatcaagtcgtggaaga

SEQ ID NO: 50188 - DNA, 25 bp, Saccharomyces pastorianus
ttagaagagtaatgagaccaacgga

SEQ ID NO: 50189 - DNA, 25 bp, Saccharomyces pastorianus
ggagctgatttgcagagcccatcaa

SEQ ID NO: 50190 - DNA, 25 bp, Saccharomyces pastorianus
cccgatgttggtttgttatgtgatt

SEQ ID NO: 50191 - DNA, 25 bp, Saccharomyces pastorianus
atttattgtggtcggatccagataa

SEQ ID NO: 50192 - DNA, 25 bp, Saccharomyces pastorianus
atgtgatttattgtggtcggatcca

SEQ ID NO: 50193 - DNA, 25 bp, Saccharomyces pastorianus
gagacagttggtaacacttttcagt

SEQ ID NO: 50194 - DNA, 25 bp, Saccharomyces pastorianus
ctcaaaagccagatccatattcata

SEQ ID NO: 50195 - DNA, 25 bp, Saccharomyces pastorianus
atgctcaaaagccagatccatattc

SEQ ID NO: 50196 - DNA, 25 bp, Saccharomyces pastorianus
gactcacagccagttgacgttgaca

SEQ ID NO: 50197 - DNA, 25 bp, Saccharomyces pastorianus
gttgacgttgacaatatcatcgata

SEQ ID NO: 50198 - DNA, 25 bp, Saccharomyces pastorianus
atacttatgctcaaaagccagatcc

SEQ ID NO: 50199 - DNA, 25 bp, Saccharomyces pastorianus
cttatgctcaaaagccagatccata

SEQ ID NO: 50200 - DNA, 25 bp, Saccharomyces pastorianus
acttatgctcaaaagccagatccat

SEQ ID NO: 50201 - DNA, 25 bp, Saccharomyces pastorianus
tgctcaaaagccagatccatattca

SEQ ID NO: 50202 - DNA, 25 bp, Saccharomyces pastorianus
gctcaaaagccagatccatattcat

SEQ ID NO: 50203 - DNA, 25 bp, Saccharomyces pastorianus
taagaggatctaaaccaggtcaaca

SEQ ID NO: 50204 - DNA, 25 bp, Saccharomyces pastorianus
ttatgctcaaaagccagatccatat

SEQ ID NO: 50205 - DNA, 25 bp, Saccharomyces pastorianus
ggaatctcttgcagcgtactttact

SEQ ID NO: 50206 - DNA, 25 bp, Saccharomyces pastorianus
aggcggtggttgacagtctagttac

SEQ ID NO: 50207 - DNA, 25 bp, Saccharomyces pastorianus
ggatatattcgctccagaagatctg

SEQ ID NO: 50208 - DNA, 25 bp, Saccharomyces pastorianus
cattatggcggtacgtttccggact

SEQ ID NO: 50209 - DNA, 25 bp, Saccharomyces pastorianus
tttccggactacaaagtgcttttcg

SEQ ID NO: 50210 - DNA, 25 bp, Saccharomyces pastorianus
atctcagcagattagtggcctagca

SEQ ID NO: 50211 - DNA, 25 bp, Saccharomyces pastorianus
gccagtacgatcatatctcagcaga

SEQ ID NO: 50212 - DNA, 25 bp, Saccharomyces pastorianus
gacatacttggaatctcttgcagcg

SEQ ID NO: 50213 - DNA, 25 bp, Saccharomyces pastorianus
gatttgcaccttataggtctgtgtt

SEQ ID NO: 50214 - DNA, 25 bp, Saccharomyces pastorianus
gaggctctcgagcacaaatattgaa

SEQ ID NO: 50215 - DNA, 25 bp, Saccharomyces pastorianus
aaatgctcggaaagatttgcacctt

SEQ ID NO: 50216 - DNA, 25 bp, Saccharomyces pastorianus
gaagcacacaatgagtctaccggag

SEQ ID NO: 50217 - DNA, 25 bp, Saccharomyces pastorianus
gacccggaggacgagaccaagaaca

SEQ ID NO: 50218 - DNA, 25 bp, Saccharomyces pastorianus
acgctggtcggcttcgacgacttcg

SEQ ID NO: 50219 - DNA, 25 bp, Saccharomyces pastorianus
gagtgctgatcgtgctgcagtcgaa

SEQ ID NO: 50220 - DNA, 25 bp, Saccharomyces pastorianus
tcatgcagggcaaaccacacacaca

SEQ ID NO: 50221 - DNA, 25 bp, Saccharomyces pastorianus
caacgtcatactggaggacgctgtt

SEQ ID NO: 50222 - DNA, 25 bp, Saccharomyces pastorianus
ggacgctgttgagtggctcatcgac

SEQ ID NO: 50223 - DNA, 25 bp, Saccharomyces pastorianus
atcaaccagagagtgctgatcgtgc

SEQ ID NO: 50224 - DNA, 25 bp, Saccharomyces pastorianus
tcatcgacccggaggacgagaccaa

SEQ ID NO: 50225 - DNA, 25 bp, Saccharomyces pastorianus
gttactacaagcactcatgcagggc

SEQ ID NO: 50226 - DNA, 25 bp, Saccharomyces pastorianus
gaaccgcgaatttgagggcacgctg

SEQ ID NO: 50227 - DNA, 25 bp, Saccharomyces pastorianus
acagcagcgaaacgtttagggttat

SEQ ID NO: 50228 - DNA, 25 bp, Saccharomyces pastorianus
gtcacagtggccacaatattttgca

SEQ ID NO: 50229 - DNA, 25 bp, Saccharomyces pastorianus
tatactccgcattacgcgcatgtag

SEQ ID NO: 50230 - DNA, 25 bp, Saccharomyces pastorianus
actgttttcaagtccagcctacaac

SEQ ID NO: 50231 - DNA, 25 bp, Saccharomyces pastorianus
tgtggcagatgtatccttttcagat

SEQ ID NO: 50232 - DNA, 25 bp, Saccharomyces pastorianus
tagtgccactgttttcaagtccagc

SEQ ID NO: 50233 - DNA, 25 bp, Saccharomyces pastorianus
gaacaataccagatgtggcagatgt

SEQ ID NO: 50234 - DNA, 25 bp, Saccharomyces pastorianus
cagcctacaacccaaagtcacagtg

SEQ ID NO: 50235 - DNA, 25 bp, Saccharomyces pastorianus
tttgcaatgttggaacaataccaga

SEQ ID NO: 50236 - DNA, 25 bp, Saccharomyces pastorianus
ttagggttatactccgcattacgcg

SEQ ID NO: 50237 - DNA, 25 bp, Saccharomyces pastorianus
attacgcgcatgtagtgccactgtt

SEQ ID NO: 50238 - DNA, 25 bp, Saccharomyces pastorianus
gcatatctgattgttgcgcatcact

SEQ ID NO: 50239 - DNA, 25 bp, Saccharomyces pastorianus
tgcgtactcgtcaacacttttttaa

SEQ ID NO: 50240 - DNA, 25 bp, Saccharomyces pastorianus
gccacctgttggacttcctatagaa

SEQ ID NO: 50241 - DNA, 25 bp, Saccharomyces pastorianus
aagtgagcgtgatccagagccacct

SEQ ID NO: 50242 - DNA, 25 bp, Saccharomyces pastorianus
gaatgaggtgttttccttttcactt

SEQ ID NO: 50243 - DNA, 25 bp, Saccharomyces pastorianus
gcatcgtgacgttttcttatagcat

SEQ ID NO: 50244 - DNA, 25 bp, Saccharomyces pastorianus
ctgtttgcttcctctaattctttat

SEQ ID NO: 50245 - DNA, 25 bp, Saccharomyces pastorianus
tgaactcaacttgctgtttgcttcc

SEQ ID NO: 50246 - DNA, 25 bp, Saccharomyces pastorianus
tagctggcgagctcaccggtgatga

SEQ ID NO: 50247 - DNA, 25 bp, Saccharomyces pastorianus
gttccctttcatattttctttgcgt

SEQ ID NO: 50248 - DNA, 25 bp, Saccharomyces pastorianus
tgtatctatgttcacgttcttcggc

SEQ ID NO: 50249 - DNA, 25 bp, Saccharomyces pastorianus
gatcgttttcaaattgcttggtcaa

SEQ ID NO: 50250 - DNA, 25 bp, Saccharomyces pastorianus
caaattgcttggtcaaaaaattatg

SEQ ID NO: 50251 - DNA, 25 bp, Saccharomyces pastorianus
atcattaaacgccgtctccaactca

SEQ ID NO: 50252 - DNA, 25 bp, Saccharomyces pastorianus
tcgttttcaaattgcttggtcaaaa

SEQ ID NO: 50253 - DNA, 25 bp, Saccharomyces pastorianus
gcaaatcattaaacgccgtctccaa

SEQ ID NO: 50254 - DNA, 25 bp, Saccharomyces pastorianus
ggcacgatcgttttcaaattgcttg

SEQ ID NO: 50255 - DNA, 25 bp, Saccharomyces pastorianus
acgatcgttttcaaattgcttggtc

SEQ ID NO: 50256 - DNA, 25 bp, Saccharomyces pastorianus
tcggcacgatcgttttcaaattgct

SEQ ID NO: 50257 - DNA, 25 bp, Saccharomyces pastorianus
gttgcaaatcattaaacgccgtctc

SEQ ID NO: 50258 - DNA, 25 bp, Saccharomyces pastorianus
agttgcaaatcattaaacgccgtct

SEQ ID NO: 50259 - DNA, 25 bp, Saccharomyces pastorianus
caaatcattaaacgccgtctccaac

SEQ ID NO: 50260 - DNA, 25 bp, Saccharomyces pastorianus
tagcaagggagttggtccccaaagt

SEQ ID NO: 50261 - DNA, 25 bp, Saccharomyces pastorianus
gttgtcaacctattagatgctgtgc

SEQ ID NO: 50262 - DNA, 25 bp, Saccharomyces pastorianus
ttggcgtacttgaaaaacctattga

SEQ ID NO: 50263 - DNA, 25 bp, Saccharomyces pastorianus
aactcatccacgattttgactttag

SEQ ID NO: 50264 - DNA, 25 bp, Saccharomyces pastorianus
gcaacggcgaagatttatcatcaag

SEQ ID NO: 50265 - DNA, 25 bp, Saccharomyces pastorianus
gagttaatcacacagtcctattcta

SEQ ID NO: 50266 - DNA, 25 bp, Saccharomyces pastorianus
aacctattgatgttgcgtgactcca

SEQ ID NO: 50267 - DNA, 25 bp, Saccharomyces pastorianus
gttgcgtgactccatacaaaatttt

SEQ ID NO: 50268 - DNA, 25 bp, Saccharomyces pastorianus
atactttggatatcagcaacggcga

SEQ ID NO: 50269 - DNA, 25 bp, Saccharomyces pastorianus
gcacgtacagaactaatctccgagt

SEQ ID NO: 50270 - DNA, 25 bp, Saccharomyces pastorianus
aggttgcccagaatatacgaacaaa

SEQ ID NO: 50271 - DNA, 25 bp, Saccharomyces pastorianus
gcgtctgcgagatgaatggtctacc

SEQ ID NO: 50272 - DNA, 25 bp, Saccharomyces pastorianus
aatgaggacgtcactccggtagaaa

SEQ ID NO: 50273 - DNA, 25 bp, Saccharomyces pastorianus
tggtctcccatcgactattgtagat

SEQ ID NO: 50274 - DNA, 25 bp, Saccharomyces pastorianus
acaaaatacctctgactgcgtctgt

SEQ ID NO: 50275 - DNA, 25 bp, Saccharomyces pastorianus
gatgtgacaattcctttcttgataa

SEQ ID NO: 50276 - DNA, 25 bp, Saccharomyces pastorianus
agtccttacgctttgctgatgaaat

SEQ ID NO: 50277 - DNA, 25 bp, Saccharomyces pastorianus
aagtcaagacatggctaacccttcc

SEQ ID NO: 50278 - DNA, 25 bp, Saccharomyces pastorianus
aggcccctaattcctctattatcaa

SEQ ID NO: 50279 - DNA, 25 bp, Saccharomyces pastorianus
attatcaactctttaccatcatcgc

SEQ ID NO: 50280 - DNA, 25 bp, Saccharomyces pastorianus
aaaatgcttccaagtccttacgctt

SEQ ID NO: 50281 - DNA, 25 bp, Saccharomyces pastorianus
aagaccagcgtgttcttgaggcgtc

SEQ ID NO: 50282 - DNA, 25 bp, Saccharomyces pastorianus
atagatgcgccggttgtcattggta

SEQ ID NO: 50283 - DNA, 25 bp, Saccharomyces pastorianus
atgcgccggttgtcattggtacgta

SEQ ID NO: 50284 - DNA, 25 bp, Saccharomyces pastorianus
acatcatgtttatgcttatgcgctc

SEQ ID NO: 50285 - DNA, 25 bp, Saccharomyces pastorianus
tttggtttatattacattacattac

SEQ ID NO: 50286 - DNA, 25 bp, Saccharomyces pastorianus
tatgcgctctcttcttcctcctgtg

SEQ ID NO: 50287 - DNA, 25 bp, Saccharomyces pastorianus
cgtacgtgattacatttcgtccttg

SEQ ID NO: 50288 - DNA, 25 bp, Saccharomyces pastorianus
gcacagagatagatgcgccggttgt

SEQ ID NO: 50289 - DNA, 25 bp, Saccharomyces pastorianus
gccggttgtcattggtacgtacgtg

SEQ ID NO: 50290 - DNA, 25 bp, Saccharomyces pastorianus
tatgcttatgcgctctcttcttcct

SEQ ID NO: 50291 - DNA, 25 bp, Saccharomyces pastorianus
gtacgtacgtgattacatttcgtcc

SEQ ID NO: 50292 - DNA, 25 bp, Saccharomyces pastorianus
atgtttatgcttatgcgctctcttc

SEQ ID NO: 50293 - DNA, 25 bp, Saccharomyces pastorianus
ggccttgcagaagattattcggatt

SEQ ID NO: 50294 - DNA, 25 bp, Saccharomyces pastorianus
gagggccttgcagaagattattcgg

SEQ ID NO: 50295 - DNA, 25 bp, Saccharomyces pastorianus
tgcagaagattattcggatttcatg

SEQ ID NO: 50296 - DNA, 25 bp, Saccharomyces pastorianus
cagaagagggccttgcagaagatta

SEQ ID NO: 50297 - DNA, 25 bp, Saccharomyces pastorianus
gaagagggccttgcagaagattatt

SEQ ID NO: 50298 - DNA, 25 bp, Saccharomyces pastorianus
aagtgctgcagaagagggccttgca

SEQ ID NO: 50299 - DNA, 25 bp, Saccharomyces pastorianus
ccttgcagaagattattcggatttc

SEQ ID NO: 50300 - DNA, 25 bp, Saccharomyces pastorianus
gggccttgcagaagattattcggat

SEQ ID NO: 50301 - DNA, 25 bp, Saccharomyces pastorianus
aagagggccttgcagaagattattc

SEQ ID NO: 50302 - DNA, 25 bp, Saccharomyces pastorianus
aaagtgctgcagaagagggccttgc

SEQ ID NO: 50303 - DNA, 25 bp, Saccharomyces pastorianus
agggccttgcagaagattattcgga

SEQ ID NO: 50304 - DNA, 25 bp, Saccharomyces pastorianus
gaaggagtacttcgaactaatacgg

SEQ ID NO: 50305 - DNA, 25 bp, Saccharomyces pastorianus
tgacaacctgccgaaggagtacttc

SEQ ID NO: 50306 - DNA, 25 bp, Saccharomyces pastorianus
ccgataatgcgcctttgcaaagacg

SEQ ID NO: 50307 - DNA, 25 bp, Saccharomyces pastorianus
aggaaaccgataatgcgcctttgca

SEQ ID NO: 50308 - DNA, 25 bp, Saccharomyces pastorianus
caacctgccgaaggagtacttcgaa

SEQ ID NO: 50309 - DNA, 25 bp, Saccharomyces pastorianus
atgaatgacaacctgccgaaggagt

SEQ ID NO: 50310 - DNA, 25 bp, Saccharomyces pastorianus
gaatgacaacctgccgaaggagtac

SEQ ID NO: 50311 - DNA, 25 bp, Saccharomyces pastorianus
gagtacttcgaactaatacggaaag

SEQ ID NO: 50312 - DNA, 25 bp, Saccharomyces pastorianus
gaaaccgataatgcgcctttgcaaa

SEQ ID NO: 50313 - DNA, 25 bp, Saccharomyces pastorianus
ggaaaccgataatgcgcctttgcaa

SEQ ID NO: 50314 - DNA, 25 bp, Saccharomyces pastorianus
acctgccgaaggagtacttcgaact

SEQ ID NO: 50315 - DNA, 25 bp, Saccharomyces pastorianus
agatcaccagcaccgccaaaagggt

SEQ ID NO: 50316 - DNA, 25 bp, Saccharomyces pastorianus
atcaaaccccctagtaagatcacca

SEQ ID NO: 50317 - DNA, 25 bp, Saccharomyces pastorianus
tcaccagcaccgccaaaagggtaaa

SEQ ID NO: 50318 - DNA, 25 bp, Saccharomyces pastorianus
taagatcaccagcaccgccaaaagg

SEQ ID NO: 50319 - DNA, 25 bp, Saccharomyces pastorianus
ggagatatctccgttgaaatcaaac

SEQ ID NO: 50320 - DNA, 25 bp, Saccharomyces pastorianus
gtaagatcaccagcaccgccaaaag

SEQ ID NO: 50321 - DNA, 25 bp, Saccharomyces pastorianus
cagatgaaaacgaggcaaacggtgt

SEQ ID NO: 50322 - DNA, 25 bp, Saccharomyces pastorianus
gatatctccgttgaaatcaaacccc

SEQ ID NO: 50323 - DNA, 25 bp, Saccharomyces pastorianus
aggcaaacggtgtaggagatatctc

SEQ ID NO: 50324 - DNA, 25 bp, Saccharomyces pastorianus
tagtaagatcaccagcaccgccaaa

SEQ ID NO: 50325 - DNA, 25 bp, Saccharomyces pastorianus
acggtgtaggagatatctccgttga

SEQ ID NO: 50326 - DNA, 25 bp, Saccharomyces pastorianus
agccctgtggccattaaagccgcta

SEQ ID NO: 50327 - DNA, 25 bp, Saccharomyces pastorianus
gaaattcagttaagccagtcctaag

SEQ ID NO: 50328 - DNA, 25 bp, Saccharomyces pastorianus
atgatacctgccaactgctgtctaa

SEQ ID NO: 50329 - DNA, 25 bp, Saccharomyces pastorianus
agaagctgttgaggccgctattgat

SEQ ID NO: 50330 - DNA, 25 bp, Saccharomyces pastorianus
ctgtctaattgaaagccctgtggcc

SEQ ID NO: 50331 - DNA, 25 bp, Saccharomyces pastorianus
tattccaccattggcgaccggaaat

SEQ ID NO: 50332 - DNA, 25 bp, Saccharomyces pastorianus
agccagtcctaagcggtattgttat

SEQ ID NO: 50333 - DNA, 25 bp, Saccharomyces pastorianus
atcgaggtttttgcacccacaatga

SEQ ID NO: 50334 - DNA, 25 bp, Saccharomyces pastorianus
gtaacttctttcaagttcgaacgtg

SEQ ID NO: 50335 - DNA, 25 bp, Saccharomyces pastorianus
aatcttaaagactggctgtaggtgc

SEQ ID NO: 50336 - DNA, 25 bp, Saccharomyces pastorianus
cctggttgcaaagagtgcggctatt

SEQ ID NO: 50337 - DNA, 25 bp, Saccharomyces pastorianus
aaacgacacgtctgtagtggcccct

SEQ ID NO: 50338 - DNA, 25 bp, Saccharomyces pastorianus
atcgattcggacagggaaccatcct

SEQ ID NO: 50339 - DNA, 25 bp, Saccharomyces pastorianus
gcatcctgaaaggtcattccatcgc

SEQ ID NO: 50340 - DNA, 25 bp, Saccharomyces pastorianus
tatccaattgtgtgcttgggccatt

SEQ ID NO: 50341 - DNA, 25 bp, Saccharomyces pastorianus
atttgctcccgaggaaattgtacta

SEQ ID NO: 50342 - DNA, 25 bp, Saccharomyces pastorianus
accctactgtgcaaccgcaggatga

SEQ ID NO: 50343 - DNA, 25 bp, Saccharomyces pastorianus
gaggtcgaggtccaatcctttactt

SEQ ID NO: 50344 - DNA, 25 bp, Saccharomyces pastorianus
ggccattaactgacccaagtgacat

SEQ ID NO: 50345 - DNA, 25 bp, Saccharomyces pastorianus
gtcatcatctcaccaggcacaaaaa

SEQ ID NO: 50346 - DNA, 25 bp, Saccharomyces pastorianus
atccaccgtgtcaaatctatccaat

SEQ ID NO: 50347 - DNA, 25 bp, Saccharomyces pastorianus
gaagagatcatgtcctgcagcattt

SEQ ID NO: 50348 - DNA, 25 bp, Saccharomyces pastorianus
ggcgagtttatgattacttacccat

SEQ ID NO: 50349 - DNA, 25 bp, Saccharomyces pastorianus
tacctctacgctggcctatggaagg

SEQ ID NO: 50350 - DNA, 25 bp, Saccharomyces pastorianus
tttggcgccccaaaacaatggtatt

SEQ ID NO: 50351 - DNA, 25 bp, Saccharomyces pastorianus
gaagccaagaactgtcccgaatttc

SEQ ID NO: 50352 - DNA, 25 bp, Saccharomyces pastorianus
gtagacctatctgactttgaaaatc

SEQ ID NO: 50353 - DNA, 25 bp, Saccharomyces pastorianus
cgctaaactttacaacgcccatgta

SEQ ID NO: 50354 - DNA, 25 bp, Saccharomyces pastorianus
tggtgtaaacgactcctacctctac

SEQ ID NO: 50355 - DNA, 25 bp, Saccharomyces pastorianus
atagttcatcatgcaggcgagttta

SEQ ID NO: 50356 - DNA, 25 bp, Saccharomyces pastorianus
tactccgggatccatatttcctgaa

SEQ ID NO: 50357 - DNA, 25 bp, Saccharomyces pastorianus
ggaacgtggccaagctaccgaacat

SEQ ID NO: 50358 - DNA, 25 bp, Saccharomyces pastorianus
ataaactacatccattttggcgccc

SEQ ID NO: 50359 - DNA, 25 bp, Saccharomyces pastorianus
ggaccggaaagcaacaggatcctat

SEQ ID NO: 50360 - DNA, 25 bp, Saccharomyces pastorianus
gttgctttctcgtctatatttagga

SEQ ID NO: 50361 - DNA, 25 bp, Saccharomyces pastorianus
ctttacgattgtacttttagagcat

SEQ ID NO: 50362 - DNA, 25 bp, Saccharomyces pastorianus
gagcatccactaggaccggaaagca

SEQ ID NO: 50363 - DNA, 25 bp, Saccharomyces pastorianus
gctttctcgtctatatttaggaact

SEQ ID NO: 50364 - DNA, 25 bp, Saccharomyces pastorianus
gatcctatgtttggcatcaggcaaa

SEQ ID NO: 50365 - DNA, 25 bp, Saccharomyces pastorianus
acttttgagagttcctttacgattg

SEQ ID NO: 50366 - DNA, 25 bp, Saccharomyces pastorianus
atgttgctttctcgtctatatttag

SEQ ID NO: 50367 - DNA, 25 bp, Saccharomyces pastorianus
aacaggatcctatgtttggcatcag

SEQ ID NO: 50368 - DNA, 25 bp, Saccharomyces pastorianus
gagagttcctttacgattgtacttt

SEQ ID NO: 50369 - DNA, 25 bp, Saccharomyces pastorianus
tttagagcatccactaggaccggaa

SEQ ID NO: 50370 - DNA, 25 bp, Saccharomyces pastorianus
aatacagtgcattcattcagagata

SEQ ID NO: 50371 - DNA, 25 bp, Saccharomyces pastorianus
ggaggagttccaagatacaatgcaa

SEQ ID NO: 50372 - DNA, 25 bp, Saccharomyces pastorianus
acgcacctttgatcaggaagtcaca

SEQ ID NO: 50373 - DNA, 25 bp, Saccharomyces pastorianus
gagatatagcgctacagcttggcta

SEQ ID NO: 50374 - DNA, 25 bp, Saccharomyces pastorianus
gacgtgtcgtttaatgatgatccta

SEQ ID NO: 50375 - DNA, 25 bp, Saccharomyces pastorianus
aattcattcagggtccaagccaagg

SEQ ID NO: 50376 - DNA, 25 bp, Saccharomyces pastorianus
gcggacctattgagtctctatctgt

SEQ ID NO: 50377 - DNA, 25 bp, Saccharomyces pastorianus
agcttggctattacgcacctttgat

SEQ ID NO: 50378 - DNA, 25 bp, Saccharomyces pastorianus
agacgggctagaaccattgatggat

SEQ ID NO: 50379 - DNA, 25 bp, Saccharomyces pastorianus
aaaaatcttccgactgactctgtgg

SEQ ID NO: 50380 - DNA, 25 bp, Saccharomyces pastorianus
taattgatcgcataggcggacctat

SEQ ID NO: 50381 - DNA, 25 bp, Saccharomyces pastorianus
gatacggtggccattccatgtccga

SEQ ID NO: 50382 - DNA, 25 bp, Saccharomyces pastorianus
gctgctcctccagaagctaaactat

SEQ ID NO: 50383 - DNA, 25 bp, Saccharomyces pastorianus
tgtttatccggtaagggtcctcttg

SEQ ID NO: 50384 - DNA, 25 bp, Saccharomyces pastorianus
ggtctcaagatgcatttggtcgatt

SEQ ID NO: 50385 - DNA, 25 bp, Saccharomyces pastorianus
cgtggtcaatacatcccaggtttga

SEQ ID NO: 50386 - DNA, 25 bp, Saccharomyces pastorianus
gtatgggtacttctgccgcaagatc

SEQ ID NO: 50387 - DNA, 25 bp, Saccharomyces pastorianus
gaccctggtaccacatacagaacta

SEQ ID NO: 50388 - DNA, 25 bp, Saccharomyces pastorianus
gtatggtgacggtgcctccaaccaa

SEQ ID NO: 50389 - DNA, 25 bp, Saccharomyces pastorianus
aaggccaagtctttgagtctttcaa

SEQ ID NO: 50390 - DNA, 25 bp, Saccharomyces pastorianus
gcaagatcatctgccatgaccgaat

SEQ ID NO: 50391 - DNA, 25 bp, Saccharomyces pastorianus
acttgcccgttgtgttttgttgtga

SEQ ID NO: 50392 - DNA, 25 bp, Saccharomyces pastorianus
tgactaaccaagttcaatccgaccc

SEQ ID NO: 50393 - DNA, 25 bp, Saccharomyces pastorianus
tgatcctgaatcatgcttagcaaac

SEQ ID NO: 50394 - DNA, 25 bp, Saccharomyces pastorianus
gaaagctacgaccttgatcctgaat

SEQ ID NO: 50395 - DNA, 25 bp, Saccharomyces pastorianus
aacgtcgcagtatttctgactaacc

SEQ ID NO: 50396 - DNA, 25 bp, Saccharomyces pastorianus
aaaaccgattggtgggcacgtcctg

SEQ ID NO: 50397 - DNA, 25 bp, Saccharomyces pastorianus
gatgtctcatactttatgcgttacg

SEQ ID NO: 50398 - DNA, 25 bp, Saccharomyces pastorianus
gtcgctaaattacaggattctccag

SEQ ID NO: 50399 - DNA, 25 bp, Saccharomyces pastorianus
aagagagtgtgtttacgtgatcggt

SEQ ID NO: 50400 - DNA, 25 bp, Saccharomyces pastorianus
atgcgttacgacacaacttccaagg

SEQ ID NO: 50401 - DNA, 25 bp, Saccharomyces pastorianus
ttatcgtttggtggttgtggactca

SEQ ID NO: 50402 - DNA, 25 bp, Saccharomyces pastorianus
tgcttctgccttatttgcatctgca

SEQ ID NO: 50403 - DNA, 25 bp, Saccharomyces pastorianus
taaagggaaggcaggtttggctaat

SEQ ID NO: 50404 - DNA, 25 bp, Saccharomyces pastorianus
ttggctaatgtatccttttcgttcc

SEQ ID NO: 50405 - DNA, 25 bp, Saccharomyces pastorianus
cgccctagtaccagctttttgtata

SEQ ID NO: 50406 - DNA, 25 bp, Saccharomyces pastorianus
tagtaccagctttttgtataaaggg

SEQ ID NO: 50407 - DNA, 25 bp, Saccharomyces pastorianus
aaaatagccgccctagtaccagctt

SEQ ID NO: 50408 - DNA, 25 bp, Saccharomyces pastorianus
taatgtatccttttcgttccttcac

SEQ ID NO: 50409 - DNA, 25 bp, Saccharomyces pastorianus
gtttggctaatgtatccttttcgtt

SEQ ID NO: 50410 - DNA, 25 bp, Saccharomyces pastorianus
tcaaaacaccgaaaatagccgccct

SEQ ID NO: 50411 - DNA, 25 bp, Saccharomyces pastorianus
ggctaatgtatccttttcgttcctt

SEQ ID NO: 50412 - DNA, 25 bp, Saccharomyces pastorianus
ggcaggtttggctaatgtatccttt

SEQ ID NO: 50413 - DNA, 25 bp, Saccharomyces pastorianus
tgtatccttttcgttccttcacttt

SEQ ID NO: 50414 - DNA, 25 bp, Saccharomyces pastorianus
gacggcgttcatcgtaggactttta

SEQ ID NO: 50415 - DNA, 25 bp, Saccharomyces pastorianus
ggagctcttgtatacgacctgttca

SEQ ID NO: 50416 - DNA, 25 bp, Saccharomyces pastorianus
ggagcaatggcgtacggctattttt

SEQ ID NO: 50417 - DNA, 25 bp, Saccharomyces pastorianus
gtcctcgtatattcgcttctatgat

SEQ ID NO: 50418 - DNA, 25 bp, Saccharomyces pastorianus
atgtgaatcacctatcaactacccg

SEQ ID NO: 50419 - DNA, 25 bp, Saccharomyces pastorianus
agtagacaaacttctccacgctgag

SEQ ID NO: 50420 - DNA, 25 bp, Saccharomyces pastorianus
acggcaactggtgcatgtctcttca

SEQ ID NO: 50421 - DNA, 25 bp, Saccharomyces pastorianus
attggttatggtcctcatgcctttc

SEQ ID NO: 50422 - DNA, 25 bp, Saccharomyces pastorianus
aatgctccaccagctaacggtatga

SEQ ID NO: 50423 - DNA, 25 bp, Saccharomyces pastorianus
gcctttcatcttacgcattggtggt

SEQ ID NO: 50424 - DNA, 25 bp, Saccharomyces pastorianus
tacgacctgttcattttcactggat

SEQ ID NO: 50425 - DNA, 25 bp, Saccharomyces pastorianus
ggcacttctggaggtctgtactcaa

SEQ ID NO: 50426 - DNA, 25 bp, Saccharomyces pastorianus
ggaaagggccctagagcagctgctc

SEQ ID NO: 50427 - DNA, 25 bp, Saccharomyces pastorianus
gaacaactcttgtttctggtggtaa

SEQ ID NO: 50428 - DNA, 25 bp, Saccharomyces pastorianus
gcgtgacggcagactatgatacttt

SEQ ID NO: 50429 - DNA, 25 bp, Saccharomyces pastorianus
gattgatgctcttcaaccttttgtt

SEQ ID NO: 50430 - DNA, 25 bp, Saccharomyces pastorianus
aaggcgttgaccgaagctattgaaa

SEQ ID NO: 50431 - DNA, 25 bp, Saccharomyces pastorianus
gtataagtacaccagagcacgtcct

SEQ ID NO: 50432 - DNA, 25 bp, Saccharomyces pastorianus
ggaagcctcccaatttgctttagaa

SEQ ID NO: 50433 - DNA, 25 bp, Saccharomyces pastorianus
gaaaatcattcgttgcgtctcgatg

SEQ ID NO: 50434 - DNA, 25 bp, Saccharomyces pastorianus
aatctacctttcagctcttgcaaaa

SEQ ID NO: 50435 - DNA, 25 bp, Saccharomyces pastorianus
gcgtgcctcatacgtggctaaggaa

SEQ ID NO: 50436 - DNA, 25 bp, Saccharomyces pastorianus
tagacgcgataaccacccattttta

SEQ ID NO: 50437 - DNA, 25 bp, Saccharomyces pastorianus
tataatgtctcaatcgaagctggga

SEQ ID NO: 50438 - DNA, 25 bp, Saccharomyces pastorianus
gaattaccggatccattgattccta

SEQ ID NO: 50439 - DNA, 25 bp, Saccharomyces pastorianus
gcactgttgccagcgttgtcaaaat

SEQ ID NO: 50440 - DNA, 25 bp, Saccharomyces pastorianus
acttccatttggaccgattcagtga

SEQ ID NO: 50441 - DNA, 25 bp, Saccharomyces pastorianus
atatatcctgatttgcctaacgaca

SEQ ID NO: 50442 - DNA, 25 bp, Saccharomyces pastorianus
atcggacattcttcgggtactatac

SEQ ID NO: 50443 - DNA, 25 bp, Saccharomyces pastorianus
gaagctgggaccaagcactgttgcc

SEQ ID NO: 50444 - DNA, 25 bp, Saccharomyces pastorianus
agtctgacacatcaacttcgaaatt

SEQ ID NO: 50445 - DNA, 25 bp, Saccharomyces pastorianus
gattcagattcctcttctaaggacc

SEQ ID NO: 50446 - DNA, 25 bp, Saccharomyces pastorianus
tcttccttaagcaaaccccatatag

SEQ ID NO: 50447 - DNA, 25 bp, Saccharomyces pastorianus
acaattacatcctggtcctgttcaa

SEQ ID NO: 50448 - DNA, 25 bp, Saccharomyces pastorianus
aaggaggtccttagcaacccagtca

SEQ ID NO: 50449 - DNA, 25 bp, Saccharomyces pastorianus
agagaacgttctatcagtccatcct

SEQ ID NO: 50450 - DNA, 25 bp, Saccharomyces pastorianus
acggtattcattacgactccttgac

SEQ ID NO: 50451 - DNA, 25 bp, Saccharomyces pastorianus
attcagcgacgccattttggacaaa

SEQ ID NO: 50452 - DNA, 25 bp, Saccharomyces pastorianus
gataacgtccgtgccctaagagaga

SEQ ID NO: 50453 - DNA, 25 bp, Saccharomyces pastorianus
atgctatcgcctactgtatcttcaa

SEQ ID NO: 50454 - DNA, 25 bp, Saccharomyces pastorianus
tttgcaactagcctctaacctgaag

SEQ ID NO: 50455 - DNA, 25 bp, Saccharomyces pastorianus
ctgccagatgaccttcgtgggcgaa

SEQ ID NO: 50456 - DNA, 25 bp, Saccharomyces pastorianus
actcgcagtggccatttacgtggtg

SEQ ID NO: 50457 - DNA, 25 bp, Saccharomyces pastorianus
gatcggcatcatatctgacacactc

SEQ ID NO: 50458 - DNA, 25 bp, Saccharomyces pastorianus
gcagcaggtcattcaaacgattggt

SEQ ID NO: 50459 - DNA, 25 bp, Saccharomyces pastorianus
atttgtcaagctgctggtattcccg

SEQ ID NO: 50460 - DNA, 25 bp, Saccharomyces pastorianus
gaaaactacctcgatatttgtcaag

SEQ ID NO: 50461 - DNA, 25 bp, Saccharomyces pastorianus
aaatcccctggctttcatattgatg

SEQ ID NO: 50462 - DNA, 25 bp, Saccharomyces pastorianus
gtggcatttattgtttcctttatta

SEQ ID NO: 50463 - DNA, 25 bp, Saccharomyces pastorianus
gaggcccctacaatacttcaggaaa

SEQ ID NO: 50464 - DNA, 25 bp, Saccharomyces pastorianus
gggctgtactctattgctcaatatg

SEQ ID NO: 50465 - DNA, 25 bp, Saccharomyces pastorianus
cattacctaagggatttaccgcaga

SEQ ID NO: 50466 - DNA, 25 bp, Saccharomyces pastorianus
gtttggtatttccattgccacgtag

SEQ ID NO: 50467 - DNA, 25 bp, Saccharomyces pastorianus
ggtattcccgttgctggtaatgcag

SEQ ID NO: 50468 - DNA, 25 bp, Saccharomyces pastorianus
gcatcaatcttcattgaggccccta

SEQ ID NO: 50469 - DNA, 25 bp, Saccharomyces pastorianus
ggcatcacaccttttacaacgagtt

SEQ ID NO: 50470 - DNA, 25 bp, Saccharomyces pastorianus
tggcatcacaccttttacaacgagt

SEQ ID NO: 50471 - DNA, 25 bp, Saccharomyces pastorianus
tggtatcgtgaccaactgggacgat

SEQ ID NO: 50472 - DNA, 25 bp, Saccharomyces pastorianus
ttacccaattgaacatggtatcgtg

SEQ ID NO: 50473 - DNA, 25 bp, Saccharomyces pastorianus
aacatggtatcgtgaccaactggga

SEQ ID NO: 50474 - DNA, 25 bp, Saccharomyces pastorianus
tcacaccttttacaacgagttgaga

SEQ ID NO: 50475 - DNA, 25 bp, Saccharomyces pastorianus
catggtatcgtgaccaactgggacg

SEQ ID NO: 50476 - DNA, 25 bp, Saccharomyces pastorianus
ttacaacgagttgagagttgcacca

SEQ ID NO: 50477 - DNA, 25 bp, Saccharomyces pastorianus
ttgaacatggtatcgtgaccaactg

SEQ ID NO: 50478 - DNA, 25 bp, Saccharomyces pastorianus
ctggcatcacaccttttacaacgag

SEQ ID NO: 50479 - DNA, 25 bp, Saccharomyces pastorianus
gcatcacaccttttacaacgagttg

SEQ ID NO: 50480 - DNA, 25 bp, Saccharomyces pastorianus
gtcgtcccaatctacgccggtttct

SEQ ID NO: 50481 - DNA, 25 bp, Saccharomyces pastorianus
ctcttctggtagaaccaccggtatt

SEQ ID NO: 50482 - DNA, 25 bp, Saccharomyces pastorianus
tctggtagaaccaccggtattgttt

SEQ ID NO: 50483 - DNA, 25 bp, Saccharomyces pastorianus
tgtactcttctggtagaaccaccgg

SEQ ID NO: 50484 - DNA, 25 bp, Saccharomyces pastorianus
actcttctggtagaaccaccggtat

SEQ ID NO: 50485 - DNA, 25 bp, Saccharomyces pastorianus
cttctggtagaaccaccggtattgt

SEQ ID NO: 50486 - DNA, 25 bp, Saccharomyces pastorianus
tcttctggtagaaccaccggtattg

SEQ ID NO: 50487 - DNA, 25 bp, Saccharomyces pastorianus
ttgtactcttctggtagaaccaccg

SEQ ID NO: 50488 - DNA, 25 bp, Saccharomyces pastorianus
gtactcttctggtagaaccaccggt

SEQ ID NO: 50489 - DNA, 25 bp, Saccharomyces pastorianus
tactcttctggtagaaccaccggta

SEQ ID NO: 50490 - DNA, 25 bp, Saccharomyces pastorianus
cgctcaatcctcttccattgaaaaa

SEQ ID NO: 50491 - DNA, 25 bp, Saccharomyces pastorianus
tgagaatcgatttggccggtagaga

SEQ ID NO: 50492 - DNA, 25 bp, Saccharomyces pastorianus
gaagatcttgagtgaacgtggttac

SEQ ID NO: 50493 - DNA, 25 bp, Saccharomyces pastorianus
gactacttgatgaagatcttgagtg

SEQ ID NO: 50494 - DNA, 25 bp, Saccharomyces pastorianus
caagccgttttgtccttgtactctt

SEQ ID NO: 50495 - DNA, 25 bp, Saccharomyces pastorianus
gacttcgaacaagaaatgcaaaccg

SEQ ID NO: 50496 - DNA, 25 bp, Saccharomyces pastorianus
ccatccaagccgttttgtccttgta

SEQ ID NO: 50497 - DNA, 25 bp, Saccharomyces pastorianus
gtggttactctttctccaccactgc

SEQ ID NO: 50498 - DNA, 25 bp, Saccharomyces pastorianus
tcgatttggccggtagagatttgac

SEQ ID NO: 50499 - DNA, 25 bp, Saccharomyces pastorianus
gtccgtgacatcaaggaaaaactat

SEQ ID NO: 50500 - DNA, 25 bp, Saccharomyces pastorianus
agtgaacgtggttactctttctcca

SEQ ID NO: 50501 - DNA, 25 bp, Saccharomyces pastorianus
tcaaggaaaaactatgttacgtcgc

SEQ ID NO: 50502 - DNA, 25 bp, Saccharomyces pastorianus
gtactctgtctggatcggtggttcc

SEQ ID NO: 50503 - DNA, 25 bp, Saccharomyces pastorianus
gagaaagtactctgtctggatcggt

SEQ ID NO: 50504 - DNA, 25 bp, Saccharomyces pastorianus
gaatccgctggtattgaccaaacca

SEQ ID NO: 50505 - DNA, 25 bp, Saccharomyces pastorianus
tgtctggatcggtggttccatcttg

SEQ ID NO: 50506 - DNA, 25 bp, Saccharomyces pastorianus
cgctggtattgaccaaaccacttac

SEQ ID NO: 50507 - DNA, 25 bp, Saccharomyces pastorianus
gtcttgggtttggaatccgctggta

SEQ ID NO: 50508 - DNA, 25 bp, Saccharomyces pastorianus
tccgctggtattgaccaaaccactt

SEQ ID NO: 50509 - DNA, 25 bp, Saccharomyces pastorianus
ttccgtcttgggtttggaatccgct

SEQ ID NO: 50510 - DNA, 25 bp, Saccharomyces pastorianus
cttgggtttggaatccgctggtatt

SEQ ID NO: 50511 - DNA, 25 bp, Saccharomyces pastorianus
actctgtctggatcggtggttccat

SEQ ID NO: 50512 - DNA, 25 bp, Saccharomyces pastorianus
ccgtcttgggtttggaatccgctgg

SEQ ID NO: 50513 - DNA, 25 bp, Saccharomyces pastorianus
gtcgatgtccgtaaggaattatacg

SEQ ID NO: 50514 - DNA, 25 bp, Saccharomyces pastorianus
atgtccggtggtaccaccatgttcc

SEQ ID NO: 50515 - DNA, 25 bp, Saccharomyces pastorianus
ttcccaggtattgccgaaagaatgc

SEQ ID NO: 50516 - DNA, 25 bp, Saccharomyces pastorianus
gtaacgaaagattcagagccccaga

SEQ ID NO: 50517 - DNA, 25 bp, Saccharomyces pastorianus
gctccatcttccatgaaggtcaaga

SEQ ID NO: 50518 - DNA, 25 bp, Saccharomyces pastorianus
tttggctccatcttccatgaaggtc

SEQ ID NO: 50519 - DNA, 25 bp, Saccharomyces pastorianus
aaggtcaagatcattgctcctccag

SEQ ID NO: 50520 - DNA, 25 bp, Saccharomyces pastorianus
ccatgttcccaggtattgccgaaag

SEQ ID NO: 50521 - DNA, 25 bp, Saccharomyces pastorianus
aggaaatcaccgctttggctccatc

SEQ ID NO: 50522 - DNA, 25 bp, Saccharomyces pastorianus
agagccccagaagctttgttccatc

SEQ ID NO: 50523 - DNA, 25 bp, Saccharomyces pastorianus
gattcagagccccagaagctttgtt

SEQ ID NO: 50524 - DNA, 25 bp, Saccharomyces pastorianus
tacgattatctgttcaagctactgt

SEQ ID NO: 50525 - DNA, 25 bp, Saccharomyces pastorianus
gtcctgtctgcttttgaggttttca

SEQ ID NO: 50526 - DNA, 25 bp, Saccharomyces pastorianus
atgccgttcttggagaccagtgctc

SEQ ID NO: 50527 - DNA, 25 bp, Saccharomyces pastorianus
ggcaataagtgcgacctcaaagaca

SEQ ID NO: 50528 - DNA, 25 bp, Saccharomyces pastorianus
ggcaagaccgtcaagctgcagatct

SEQ ID NO: 50529 - DNA, 25 bp, Saccharomyces pastorianus
aagctgcagatctgggacaccgcgg

SEQ ID NO: 50530 - DNA, 25 bp, Saccharomyces pastorianus
aagctactgttgatcgggaactccg

SEQ ID NO: 50531 - DNA, 25 bp, Saccharomyces pastorianus
gttacaagaaatcgaccgctacgcg

SEQ ID NO: 50532 - DNA, 25 bp, Saccharomyces pastorianus
ggttttcagacgacacgtacaccaa

SEQ ID NO: 50533 - DNA, 25 bp, Saccharomyces pastorianus
ggttcgcacgggatcatcatagtgt

SEQ ID NO: 50534 - DNA, 25 bp, Saccharomyces pastorianus
tggccaaggagttcgcggacgcaaa

SEQ ID NO: 50535 - DNA, 25 bp, Saccharomyces pastorianus
gccggtcctcacacagattatttat

SEQ ID NO: 50536 - DNA, 25 bp, Saccharomyces pastorianus
aagaacctctttcctaccaagaatg

SEQ ID NO: 50537 - DNA, 25 bp, Saccharomyces pastorianus
tatccaacaatgaatgccggtcctc

SEQ ID NO: 50538 - DNA, 25 bp, Saccharomyces pastorianus
tagaagcccattggaactcgttttt

SEQ ID NO: 50539 - DNA, 25 bp, Saccharomyces pastorianus
atacgtaacgccagatgcatatcca

SEQ ID NO: 50540 - DNA, 25 bp, Saccharomyces pastorianus
tctcactaccggctagtcaatacat

SEQ ID NO: 50541 - DNA, 25 bp, Saccharomyces pastorianus
attgtacacctatcgctagaagccc

SEQ ID NO: 50542 - DNA, 25 bp, Saccharomyces pastorianus
gagaggccggaatcacaacaagtaa

SEQ ID NO: 50543 - DNA, 25 bp, Saccharomyces pastorianus
tgactccacttttaccgttaatcga

SEQ ID NO: 50544 - DNA, 25 bp, Saccharomyces pastorianus
cgttcccgcaacaattttctagaga

SEQ ID NO: 50545 - DNA, 25 bp, Saccharomyces pastorianus
aatagacaagtctcactaccggcta

SEQ ID NO: 50546 - DNA, 25 bp, Saccharomyces pastorianus
ctgcatctgcagtacctcgagaaga

SEQ ID NO: 50547 - DNA, 25 bp, Saccharomyces pastorianus
ttcgccattgaactgcacgctcgag

SEQ ID NO: 50548 - DNA, 25 bp, Saccharomyces pastorianus
ggagaacatacaagaacccgccaca

SEQ ID NO: 50549 - DNA, 25 bp, Saccharomyces pastorianus
gaatagtctgccctttgacaattca

SEQ ID NO: 50550 - DNA, 25 bp, Saccharomyces pastorianus
agagcttgctgagtaacgtcgacct

SEQ ID NO: 50551 - DNA, 25 bp, Saccharomyces pastorianus
gagaagaagtgctccctcctggaga

SEQ ID NO: 50552 - DNA, 25 bp, Saccharomyces pastorianus
gagtacagggacttccagtgctcgc

SEQ ID NO: 50553 - DNA, 25 bp, Saccharomyces pastorianus
acgtcgacctcgagaaactggccga

SEQ ID NO: 50554 - DNA, 25 bp, Saccharomyces pastorianus
gaaactggccgagcgcaaagacgtg

SEQ ID NO: 50555 - DNA, 25 bp, Saccharomyces pastorianus
gcaaagacgtgttggcctgcagccg

SEQ ID NO: 50556 - DNA, 25 bp, Saccharomyces pastorianus
gataacaacctgtttcacacggcgg

SEQ ID NO: 50557 - DNA, 25 bp, Saccharomyces pastorianus
ggtgtcacaagaccgatgtccctga

SEQ ID NO: 50558 - DNA, 25 bp, Saccharomyces pastorianus
ggaagaactcgctcaacatcatcac

SEQ ID NO: 50559 - DNA, 25 bp, Saccharomyces pastorianus
aagaaaaactacaccgccagcgtgg

SEQ ID NO: 50560 - DNA, 25 bp, Saccharomyces pastorianus
tcaagaagagacaacgctcctccgc

SEQ ID NO: 50561 - DNA, 25 bp, Saccharomyces pastorianus
tggcctgttcctcaagctgcacggt

SEQ ID NO: 50562 - DNA, 25 bp, Saccharomyces pastorianus
agccgcaggagcagcatcatcgaaa

SEQ ID NO: 50563 - DNA, 25 bp, Saccharomyces pastorianus
agcttccagcccgacatgaacatga

SEQ ID NO: 50564 - DNA, 25 bp, Saccharomyces pastorianus
cgtggccgcgtctaagaggaagaac

SEQ ID NO: 50565 - DNA, 25 bp, Saccharomyces pastorianus
acaataacagccaccacttttcgag

SEQ ID NO: 50566 - DNA, 25 bp, Saccharomyces pastorianus
atgaacatgaacctccacaacacat

SEQ ID NO: 50567 - DNA, 25 bp, Saccharomyces pastorianus
acaacatctccgttcgaacaacaat

SEQ ID NO: 50568 - DNA, 25 bp, Saccharomyces pastorianus
caccgtggcggaactgttgtacttt

SEQ ID NO: 50569 - DNA, 25 bp, Saccharomyces pastorianus
gcattgacgtttttcacctctgtag

SEQ ID NO: 50570 - DNA, 25 bp, Saccharomyces pastorianus
gatatcagcttgtccaccttgttca

SEQ ID NO: 50571 - DNA, 25 bp, Saccharomyces pastorianus
tcttgatgcgttggtcggacccaaa

SEQ ID NO: 50572 - DNA, 25 bp, Saccharomyces pastorianus
caatggcgttaggttcaggtcgttt

SEQ ID NO: 50573 - DNA, 25 bp, Saccharomyces pastorianus
acgtgcttgtgcagatccagcgata

SEQ ID NO: 50574 - DNA, 25 bp, Saccharomyces pastorianus
ttgtcaataacaactgcgccggcgg

SEQ ID NO: 50575 - DNA, 25 bp, Saccharomyces pastorianus
tactcgtgtcctgtacgtcttaaaa

SEQ ID NO: 50576 - DNA, 25 bp, Saccharomyces pastorianus
tgaacttgccgggagatgcatcgcc

SEQ ID NO: 50577 - DNA, 25 bp, Saccharomyces pastorianus
cttccttttccatcttgttcatgaa

SEQ ID NO: 50578 - DNA, 25 bp, Saccharomyces pastorianus
ttcttcttctatttctgctgctgct

SEQ ID NO: 50579 - DNA, 25 bp, Saccharomyces pastorianus
aaagtacaacagttccgccacggtg

SEQ ID NO: 50580 - DNA, 25 bp, Saccharomyces pastorianus
agctgatatcgctggatctgcacaa

SEQ ID NO: 50581 - DNA, 25 bp, Saccharomyces pastorianus
gacctgaacctaacgccattgaaaa

SEQ ID NO: 50582 - DNA, 25 bp, Saccharomyces pastorianus
gagaccaggtcgctgttgacgccca

SEQ ID NO: 50583 - DNA, 25 bp, Saccharomyces pastorianus
ccgccggcgcagttgttattgacaa

SEQ ID NO: 50584 - DNA, 25 bp, Saccharomyces pastorianus
gagtttgaggacatccctgtagcct

SEQ ID NO: 50585 - DNA, 25 bp, Saccharomyces pastorianus
aagtcgcaagtacccaacaggctga

SEQ ID NO: 50586 - DNA, 25 bp, Saccharomyces pastorianus
aaaggtgcttctgcagaggatcgaa

SEQ ID NO: 50587 - DNA, 25 bp, Saccharomyces pastorianus
gactacatgaagaacctcggcgcat

SEQ ID NO: 50588 - DNA, 25 bp, Saccharomyces pastorianus
gaatcctcttcacccatggtgttga

SEQ ID NO: 50589 - DNA, 25 bp, Saccharomyces pastorianus
aaagacgcgatatcgggctggtcaa

SEQ ID NO: 50590 - DNA, 25 bp, Saccharomyces pastorianus
aaagaccctacgatgaaagatttca

SEQ ID NO: 50591 - DNA, 25 bp, Saccharomyces pastorianus
cagcattgacttgcattttctgccc

SEQ ID NO: 50592 - DNA, 25 bp, Saccharomyces pastorianus
gaaaacagctttatgtccaatgcaa

SEQ ID NO: 50593 - DNA, 25 bp, Saccharomyces pastorianus
aaaaagaaccattgcgccttgctca

SEQ ID NO: 50594 - DNA, 25 bp, Saccharomyces pastorianus
aagctggaatacgacgggccgctga

SEQ ID NO: 50595 - DNA, 25 bp, Saccharomyces pastorianus
gaactgatatcacacgttgtcatcg

SEQ ID NO: 50596 - DNA, 25 bp, Saccharomyces pastorianus
aactcgctgcgtatcgaaagaccct

SEQ ID NO: 50597 - DNA, 25 bp, Saccharomyces pastorianus
gcgccttgctcatctgatatttacg

SEQ ID NO: 50598 - DNA, 25 bp, Saccharomyces pastorianus
ggttcgaaagacatttgcctaagga

SEQ ID NO: 50599 - DNA, 25 bp, Saccharomyces pastorianus
gaaagtagaagtcctttcccatgaa

SEQ ID NO: 50600 - DNA, 25 bp, Saccharomyces pastorianus
acgggccgctgaacctacagtaaag

SEQ ID NO: 50601 - DNA, 25 bp, Saccharomyces pastorianus
gggactaactctagaagaagtcaac

SEQ ID NO: 50602 - DNA, 25 bp, Saccharomyces pastorianus
aagtctggcgactgggtaccaagcg

SEQ ID NO: 50603 - DNA, 25 bp, Saccharomyces pastorianus
tggaagtctggcgactgggtaccaa

SEQ ID NO: 50604 - DNA, 25 bp, Saccharomyces pastorianus
atgaagagaggataaagccatggaa

SEQ ID NO: 50605 - DNA, 25 bp, Saccharomyces pastorianus
agcgctaagaggttagaacaactaa

SEQ ID NO: 50606 - DNA, 25 bp, Saccharomyces pastorianus
tttgtgagacaaagggactaactct

SEQ ID NO: 50607 - DNA, 25 bp, Saccharomyces pastorianus
actgggtaccaagcgctaagaggtt

SEQ ID NO: 50608 - DNA, 25 bp, Saccharomyces pastorianus
ccatggaagtctggcgactgggtac

SEQ ID NO: 50609 - DNA, 25 bp, Saccharomyces pastorianus
gagacaaagggactaactctagaag

SEQ ID NO: 50610 - DNA, 25 bp, Saccharomyces pastorianus
gtaccaagcgctaagaggttagaac

SEQ ID NO: 50611 - DNA, 25 bp, Saccharomyces pastorianus
ctggcgactgggtaccaagcgctaa

SEQ ID NO: 50612 - DNA, 25 bp, Saccharomyces pastorianus
atatcgtctggtttctgtgaactaa

SEQ ID NO: 50613 - DNA, 25 bp, Saccharomyces pastorianus
gacctatttatgtgatgtcgtcaaa

SEQ ID NO: 50614 - DNA, 25 bp, Saccharomyces pastorianus
cacgttggcatggtggttacctgcg

SEQ ID NO: 50615 - DNA, 25 bp, Saccharomyces pastorianus
gatccaagacgtttttcaaccattt

SEQ ID NO: 50616 - DNA, 25 bp, Saccharomyces pastorianus
tcagccgttgatttagagaagcgtg

SEQ ID NO: 50617 - DNA, 25 bp, Saccharomyces pastorianus
gataacatgtttgatcctgaatctg

SEQ ID NO: 50618 - DNA, 25 bp, Saccharomyces pastorianus
gcaatgtgtcattcttttctttaat

SEQ ID NO: 50619 - DNA, 25 bp, Saccharomyces pastorianus
taatcatccttttaatatcgtctgg

SEQ ID NO: 50620 - DNA, 25 bp, Saccharomyces pastorianus
aaggcttcaatgattatgtccgttg

SEQ ID NO: 50621 - DNA, 25 bp, Saccharomyces pastorianus
cagccacacaccaaacttctaaaat

SEQ ID NO: 50622 - DNA, 25 bp, Saccharomyces pastorianus
agagcactggccatttagtgacgaa

SEQ ID NO: 50623 - DNA, 25 bp, Saccharomyces pastorianus
agacgtattatctggtagcctgaac

SEQ ID NO: 50624 - DNA, 25 bp, Saccharomyces pastorianus
atggaaacagttccctcggaggaca

SEQ ID NO: 50625 - DNA, 25 bp, Saccharomyces pastorianus
aacaaacttgtgctgcagttgagga

SEQ ID NO: 50626 - DNA, 25 bp, Saccharomyces pastorianus
aagcttcgggaaactctagaggcat

SEQ ID NO: 50627 - DNA, 25 bp, Saccharomyces pastorianus
tagaggcatccaaacagaccacctt

SEQ ID NO: 50628 - DNA, 25 bp, Saccharomyces pastorianus
gctttgtcagtacagcagcagcagc

SEQ ID NO: 50629 - DNA, 25 bp, Saccharomyces pastorianus
ttaaagcatgtcgttgcgcaattaa

SEQ ID NO: 50630 - DNA, 25 bp, Saccharomyces pastorianus
gggagaacaccttaatgtatcacga

SEQ ID NO: 50631 - DNA, 25 bp, Saccharomyces pastorianus
tcggaacaatctcatgacacaacag

SEQ ID NO: 50632 - DNA, 25 bp, Saccharomyces pastorianus
acaagtatatatgtcccctcaagca

SEQ ID NO: 50633 - DNA, 25 bp, Saccharomyces pastorianus
acagaccacctttgaatccatggat

SEQ ID NO: 50634 - DNA, 25 bp, Saccharomyces pastorianus
tcttggctgagcttgagtatgcttt

SEQ ID NO: 50635 - DNA, 25 bp, Saccharomyces pastorianus
ttctcttggctgagcttgagtatgc

SEQ ID NO: 50636 - DNA, 25 bp, Saccharomyces pastorianus
cttttctcttggctgagcttgagta

SEQ ID NO: 50637 - DNA, 25 bp, Saccharomyces pastorianus
atgcttttctttattcaacccataa

SEQ ID NO: 50638 - DNA, 25 bp, Saccharomyces pastorianus
agtatgcttttctttattcaaccca

SEQ ID NO: 50639 - DNA, 25 bp, Saccharomyces pastorianus
ggctgagcttgagtatgcttttctt

SEQ ID NO: 50640 - DNA, 25 bp, Saccharomyces pastorianus
tttgaattcctccatctcctcataa

SEQ ID NO: 50641 - DNA, 25 bp, Saccharomyces pastorianus
gagcttgagtatgcttttctttatt

SEQ ID NO: 50642 - DNA, 25 bp, Saccharomyces pastorianus
tttcttttctcttggctgagcttga

SEQ ID NO: 50643 - DNA, 25 bp, Saccharomyces pastorianus
ccatctcctcataacagttcaacga

SEQ ID NO: 50644 - DNA, 25 bp, Saccharomyces pastorianus
attcctccatctcctcataacagtt

SEQ ID NO: 50645 - DNA, 25 bp, Saccharomyces pastorianus
aacgcaactacgatccgccgtggtt

SEQ ID NO: 50646 - DNA, 25 bp, Saccharomyces pastorianus
atccgctagatttccagcaccaaga

SEQ ID NO: 50647 - DNA, 25 bp, Saccharomyces pastorianus
taactataactctcattccattccg

SEQ ID NO: 50648 - DNA, 25 bp, Saccharomyces pastorianus
tttatcacaattttacttccccatc

SEQ ID NO: 50649 - DNA, 25 bp, Saccharomyces pastorianus
agcccgcctcttcaagatatattca

SEQ ID NO: 50650 - DNA, 25 bp, Saccharomyces pastorianus
gaatttcgagccattcgcaacgcaa

SEQ ID NO: 50651 - DNA, 25 bp, Saccharomyces pastorianus
catcgtatccgcagcaggtgggaga

SEQ ID NO: 50652 - DNA, 25 bp, Saccharomyces pastorianus
gttgttcggtgctcaggttgcctca

SEQ ID NO: 50653 - DNA, 25 bp, Saccharomyces pastorianus
gtgcctaagaaatacaagcctgcct

SEQ ID NO: 50654 - DNA, 25 bp, Saccharomyces pastorianus
gagagattaccaagtcacagcgcct

SEQ ID NO: 50655 - DNA, 25 bp, Saccharomyces pastorianus
gcctgcctacagacaacggatgcgt

SEQ ID NO: 50656 - DNA, 25 bp, Saccharomyces pastorianus
gtacaagcgcaagccgtcatcaaga

SEQ ID NO: 50657 - DNA, 25 bp, Saccharomyces pastorianus
gagactgacgagttcctggagcaat

SEQ ID NO: 50658 - DNA, 25 bp, Saccharomyces pastorianus
agaagccgctcttgaaactagggaa

SEQ ID NO: 50659 - DNA, 25 bp, Saccharomyces pastorianus
aacgccctgctccaatcattagaag

SEQ ID NO: 50660 - DNA, 25 bp, Saccharomyces pastorianus
tagggaagcctcgttcaatggtgaa

SEQ ID NO: 50661 - DNA, 25 bp, Saccharomyces pastorianus
gtaagggcagaagccttccaggtgt

SEQ ID NO: 50662 - DNA, 25 bp, Saccharomyces pastorianus
gatcgacacgttagcgaagccacct

SEQ ID NO: 50663 - DNA, 25 bp, Saccharomyces pastorianus
gaacaaaccgtctaagcactatcct

SEQ ID NO: 50664 - DNA, 25 bp, Saccharomyces pastorianus
gggcgcaacgacctcatagggaact

SEQ ID NO: 50665 - DNA, 25 bp, Saccharomyces pastorianus
gacaagtgagatccgcaagctgaac

SEQ ID NO: 50666 - DNA, 25 bp, Saccharomyces pastorianus
gagccaaccgcggatgacatcttca

SEQ ID NO: 50667 - DNA, 25 bp, Saccharomyces pastorianus
atgtcgaggataacaggctttcgga

SEQ ID NO: 50668 - DNA, 25 bp, Saccharomyces pastorianus
gtggaagctgacgaaactgtgaaag

SEQ ID NO: 50669 - DNA, 25 bp, Saccharomyces pastorianus
gtgtcgaggctgttaaaattggtgt

SEQ ID NO: 50670 - DNA, 25 bp, Saccharomyces pastorianus
tgaaatcagaagacaccaaagtgga

SEQ ID NO: 50671 - DNA, 25 bp, Saccharomyces pastorianus
gacgctaccgaagcagccaagactt

SEQ ID NO: 50672 - DNA, 25 bp, Saccharomyces pastorianus
cgacgctataaaagctaccgacgct

SEQ ID NO: 50673 - DNA, 25 bp, Saccharomyces pastorianus
taaagctaccgacgctaccgacgct

SEQ ID NO: 50674 - DNA, 25 bp, Saccharomyces pastorianus
ccgaagctgccggagctctgaaaga

SEQ ID NO: 50675 - DNA, 25 bp, Saccharomyces pastorianus
acgaaagtggaagacgccgaagctg

SEQ ID NO: 50676 - DNA, 25 bp, Saccharomyces pastorianus
ggaagatgccgaagctctggaagaa

SEQ ID NO: 50677 - DNA, 25 bp, Saccharomyces pastorianus
agataccgaagcagccaaggctctg

SEQ ID NO: 50678 - DNA, 25 bp, Saccharomyces pastorianus
tatccacatcttctccaaaagctgt

SEQ ID NO: 50679 - DNA, 25 bp, Saccharomyces pastorianus
gacccgactggagcttcgagttatt

SEQ ID NO: 50680 - DNA, 25 bp, Saccharomyces pastorianus
agttcattcagctcttcagacactt

SEQ ID NO: 50681 - DNA, 25 bp, Saccharomyces pastorianus
gtcaaggcagatttgctgctccaac

SEQ ID NO: 50682 - DNA, 25 bp, Saccharomyces pastorianus
gattctcgctacacatttgacgatg

SEQ ID NO: 50683 - DNA, 25 bp, Saccharomyces pastorianus
gaaactcgagagtaacacccactgt

SEQ ID NO: 50684 - DNA, 25 bp, Saccharomyces pastorianus
aggagatcgggcaccgctcagtcga

SEQ ID NO: 50685 - DNA, 25 bp, Saccharomyces pastorianus
agacacttcatctggcagggccaat

SEQ ID NO: 50686 - DNA, 25 bp, Saccharomyces pastorianus
ggtggtaaacttgacgacccgactg

SEQ ID NO: 50687 - DNA, 25 bp, Saccharomyces pastorianus
gaggtctcacccttcaagaaattca

SEQ ID NO: 50688 - DNA, 25 bp, Saccharomyces pastorianus
gacgattacggtgatgggcttccaa

SEQ ID NO: 50689 - DNA, 25 bp, Saccharomyces pastorianus
ctcacggtggtggtaaccatcaaca

SEQ ID NO: 50690 - DNA, 25 bp, Saccharomyces pastorianus
acggtggtggtaaccatcaacatat

SEQ ID NO: 50691 - DNA, 25 bp, Saccharomyces pastorianus
ggtaaccatcaacatattggtaagg

SEQ ID NO: 50692 - DNA, 25 bp, Saccharomyces pastorianus
cacggtggtggtaaccatcaacata

SEQ ID NO: 50693 - DNA, 25 bp, Saccharomyces pastorianus
catcaacatattggtaaggcttcta

SEQ ID NO: 50694 - DNA, 25 bp, Saccharomyces pastorianus
ggtggtaaccatcaacatattggta

SEQ ID NO: 50695 - DNA, 25 bp, Saccharomyces pastorianus
cctcacggtggtggtaaccatcaac

SEQ ID NO: 50696 - DNA, 25 bp, Saccharomyces pastorianus
tcacggtggtggtaaccatcaacat

SEQ ID NO: 50697 - DNA, 25 bp, Saccharomyces pastorianus
cggtggtggtaaccatcaacatatt

SEQ ID NO: 50698 - DNA, 25 bp, Saccharomyces pastorianus
atcaacatattggtaaggcttctac

SEQ ID NO: 50699 - DNA, 25 bp, Saccharomyces pastorianus
gtggtggtaaccatcaacatattgg

SEQ ID NO: 50700 - DNA, 25 bp, Saccharomyces pastorianus
tactccccgcaggagatctggattt

SEQ ID NO: 50701 - DNA, 25 bp, Saccharomyces pastorianus
ggcaccagcggcactagtacaagaa

SEQ ID NO: 50702 - DNA, 25 bp, Saccharomyces pastorianus
ttactgacagcgagatccgcgagct

SEQ ID NO: 50703 - DNA, 25 bp, Saccharomyces pastorianus
agaagagatgcattcccttggcgcc

SEQ ID NO: 50704 - DNA, 25 bp, Saccharomyces pastorianus
aaccagtgattgtgaagcccgcttt

SEQ ID NO: 50705 - DNA, 25 bp, Saccharomyces pastorianus
ggacacggtctactgccacgatttg

SEQ ID NO: 50706 - DNA, 25 bp, Saccharomyces pastorianus
tgtttctgaaactgcatgtccctta

SEQ ID NO: 50707 - DNA, 25 bp, Saccharomyces pastorianus
tagatatctgcgacgacgtgggcaa

SEQ ID NO: 50708 - DNA, 25 bp, Saccharomyces pastorianus
gaaggccatccaagacctcaacgga

SEQ ID NO: 50709 - DNA, 25 bp, Saccharomyces pastorianus
tgcatgtcccttacgaggcagaacc

SEQ ID NO: 50710 - DNA, 25 bp, Saccharomyces pastorianus
gatttgcctgacgacgttactgaca

SEQ ID NO: 50711 - DNA, 25 bp, Saccharomyces pastorianus
gattctgccgtcgaatagcacacga

SEQ ID NO: 50712 - DNA, 25 bp, Saccharomyces pastorianus
tatactcgccgctgattcatacgca

SEQ ID NO: 50713 - DNA, 25 bp, Saccharomyces pastorianus
gcgagtcgcacaagcacgcggaaca

SEQ ID NO: 50714 - DNA, 25 bp, Saccharomyces pastorianus
gcttcgctgtttgaactgccggaca

SEQ ID NO: 50715 - DNA, 25 bp, Saccharomyces pastorianus
ggaagcagcagcacgtgtcgaccgc

SEQ ID NO: 50716 - DNA, 25 bp, Saccharomyces pastorianus
atacgcagactgcagtacccgtgac

SEQ ID NO: 50717 - DNA, 25 bp, Saccharomyces pastorianus
tcgtcgctagcgagtcaccagtgat

SEQ ID NO: 50718 - DNA, 25 bp, Saccharomyces pastorianus
gtagcccgtatctgaacaagcgtag

SEQ ID NO: 50719 - DNA, 25 bp, Saccharomyces pastorianus
ggacagcgtaattccgacgccgaaa

SEQ ID NO: 50720 - DNA, 25 bp, Saccharomyces pastorianus
gtatcctaaggtgattctgccgtcg

SEQ ID NO: 50721 - DNA, 25 bp, Saccharomyces pastorianus
aatctaatggccaccactttcactt

SEQ ID NO: 50722 - DNA, 25 bp, Saccharomyces pastorianus
cagacgcgccactgctgtggtcgct

SEQ ID NO: 50723 - DNA, 25 bp, Saccharomyces pastorianus
gtcgttaccttgcaacaacgcaacg

SEQ ID NO: 50724 - DNA, 25 bp, Saccharomyces pastorianus
ttatccagtttgtcgttaccttgca

SEQ ID NO: 50725 - DNA, 25 bp, Saccharomyces pastorianus
gcgagatctccttagacttgtcaga

SEQ ID NO: 50726 - DNA, 25 bp, Saccharomyces pastorianus
aacaacgcaacgaccgcatcgttca

SEQ ID NO: 50727 - DNA, 25 bp, Saccharomyces pastorianus
tccagtttgtcgttaccttgcaaca

SEQ ID NO: 50728 - DNA, 25 bp, Saccharomyces pastorianus
tagacttgtcagaaaccttatccag

SEQ ID NO: 50729 - DNA, 25 bp, Saccharomyces pastorianus
gttcacacaccccatcagtttggac

SEQ ID NO: 50730 - DNA, 25 bp, Saccharomyces pastorianus
gtcagaaaccttatccagtttgtcg

SEQ ID NO: 50731 - DNA, 25 bp, Saccharomyces pastorianus
acttctgcgagatctccttagactt

SEQ ID NO: 50732 - DNA, 25 bp, Saccharomyces pastorianus
catcagtttggacccagacgcgcca

SEQ ID NO: 50733 - DNA, 25 bp, Saccharomyces pastorianus
acagcttcgtgaacttgttctccag

SEQ ID NO: 50734 - DNA, 25 bp, Saccharomyces pastorianus
tttagcatcttttcggactccttca

SEQ ID NO: 50735 - DNA, 25 bp, Saccharomyces pastorianus
gtaccagttttttcgacacgttcag

SEQ ID NO: 50736 - DNA, 25 bp, Saccharomyces pastorianus
taacgtccaggatctgcttgctcaa

SEQ ID NO: 50737 - DNA, 25 bp, Saccharomyces pastorianus
cgataaccggtcgtttagcatcttt

SEQ ID NO: 50738 - DNA, 25 bp, Saccharomyces pastorianus
agttttttcgacacgttcagctcct

SEQ ID NO: 50739 - DNA, 25 bp, Saccharomyces pastorianus
tccagcgacttgttaacgtccagga

SEQ ID NO: 50740 - DNA, 25 bp, Saccharomyces pastorianus
gactccttcacgtatttcagctttt

SEQ ID NO: 50741 - DNA, 25 bp, Saccharomyces pastorianus
atctgcttgctcaacgataaccggt

SEQ ID NO: 50742 - DNA, 25 bp, Saccharomyces pastorianus
gtatttcagcttttccagctccagt

SEQ ID NO: 50743 - DNA, 25 bp, Saccharomyces pastorianus
agttgcgtctccagatcacacagct

SEQ ID NO: 50744 - DNA, 25 bp, Saccharomyces pastorianus
attggtgcgagctaaatttctttga

SEQ ID NO: 50745 - DNA, 25 bp, Saccharomyces pastorianus
gcggacacggttgttttgtttgaca

SEQ ID NO: 50746 - DNA, 25 bp, Saccharomyces pastorianus
gtatcaacctagtcggagcggacac

SEQ ID NO: 50747 - DNA, 25 bp, Saccharomyces pastorianus
gtggaatcaactcgactgtgttaca

SEQ ID NO: 50748 - DNA, 25 bp, Saccharomyces pastorianus
ctttctgttatccacaagagccgca

SEQ ID NO: 50749 - DNA, 25 bp, Saccharomyces pastorianus
gttctgcaaatattgatcccaccat

SEQ ID NO: 50750 - DNA, 25 bp, Saccharomyces pastorianus
gaccgatgccatcgtattggccaag

SEQ ID NO: 50751 - DNA, 25 bp, Saccharomyces pastorianus
aagtcctcatttattctcaattcgt

SEQ ID NO: 50752 - DNA, 25 bp, Saccharomyces pastorianus
tttccgtatttgcatcctgaggatt

SEQ ID NO: 50753 - DNA, 25 bp, Saccharomyces pastorianus
gacttacaagccatggaccgatgcc

SEQ ID NO: 50754 - DNA, 25 bp, Saccharomyces pastorianus
gagccgcagggctgggtatcaacct

SEQ ID NO: 50755 - DNA, 25 bp, Saccharomyces pastorianus
taattcaacagatcttcaacgggag

SEQ ID NO: 50756 - DNA, 25 bp, Saccharomyces pastorianus
gaagtttccacatatactcctgtta

SEQ ID NO: 50757 - DNA, 25 bp, Saccharomyces pastorianus
gaactgtttctaacgcatccttgga

SEQ ID NO: 50758 - DNA, 25 bp, Saccharomyces pastorianus
taaccgttccaaatgaagagggagc

SEQ ID NO: 50759 - DNA, 25 bp, Saccharomyces pastorianus
tcctcgttctgtccttgtttaattt

SEQ ID NO: 50760 - DNA, 25 bp, Saccharomyces pastorianus
atactcctgttatcagagatccaaa

SEQ ID NO: 50761 - DNA, 25 bp, Saccharomyces pastorianus
gtatgacaccagaatcgtttctaaa

SEQ ID NO: 50762 - DNA, 25 bp, Saccharomyces pastorianus
gtttctaacgcatccttggaataat

SEQ ID NO: 50763 - DNA, 25 bp, Saccharomyces pastorianus
atataattcattcctcgttctgtcc

SEQ ID NO: 50764 - DNA, 25 bp, Saccharomyces pastorianus
tttatgactgatataaccgttccaa

SEQ ID NO: 50765 - DNA, 25 bp, Saccharomyces pastorianus
caacgggagaatggatttttcatat

SEQ ID NO: 50766 - DNA, 25 bp, Saccharomyces pastorianus
aagagttcttacagccactcctggg

SEQ ID NO: 50767 - DNA, 25 bp, Saccharomyces pastorianus
gaatgtgagccacttcggaatgtca

SEQ ID NO: 50768 - DNA, 25 bp, Saccharomyces pastorianus
tacaataccacaagcgccacaatag

SEQ ID NO: 50769 - DNA, 25 bp, Saccharomyces pastorianus
ttgtgagcttcaaccgattgcaaca

SEQ ID NO: 50770 - DNA, 25 bp, Saccharomyces pastorianus
ggtgtcttgcatcccaatacattca

SEQ ID NO: 50771 - DNA, 25 bp, Saccharomyces pastorianus
gccggcgtacgatatgccacttgaa

SEQ ID NO: 50772 - DNA, 25 bp, Saccharomyces pastorianus
aagactgggcctcgatagaattcac

SEQ ID NO: 50773 - DNA, 25 bp, Saccharomyces pastorianus
gaaggattttgtcacgccggaatgt

SEQ ID NO: 50774 - DNA, 25 bp, Saccharomyces pastorianus
aatggttttaccaacgtcatcgaat

SEQ ID NO: 50775 - DNA, 25 bp, Saccharomyces pastorianus
aagacctctttcgacttgtatatag

SEQ ID NO: 50776 - DNA, 25 bp, Saccharomyces pastorianus
actctttcgcaagtctaccggaatg

SEQ ID NO: 50777 - DNA, 25 bp, Saccharomyces pastorianus
ggagatacccttcattatccattca

SEQ ID NO: 50778 - DNA, 25 bp, Saccharomyces pastorianus
gacggtgcccattcaatcaacgaga

SEQ ID NO: 50779 - DNA, 25 bp, Saccharomyces pastorianus
gggtttcggatccattcaatgctca

SEQ ID NO: 50780 - DNA, 25 bp, Saccharomyces pastorianus
aatgctcaatttaccgctgccaaga

SEQ ID NO: 50781 - DNA, 25 bp, Saccharomyces pastorianus
aagagttgaacgctgctaccggctc

SEQ ID NO: 50782 - DNA, 25 bp, Saccharomyces pastorianus
gtggctctatcccaattactttgac

SEQ ID NO: 50783 - DNA, 25 bp, Saccharomyces pastorianus
tcatgatggtgcctactgggtttcg

SEQ ID NO: 50784 - DNA, 25 bp, Saccharomyces pastorianus
ctaccggctccaagactagtttgta

SEQ ID NO: 50785 - DNA, 25 bp, Saccharomyces pastorianus
caccaagttggtctacggcgttgat

SEQ ID NO: 50786 - DNA, 25 bp, Saccharomyces pastorianus
gtgcgaagactgtcatcccagcaaa

SEQ ID NO: 50787 - DNA, 25 bp, Saccharomyces pastorianus
caaattcaagtcgttaggctcccca

SEQ ID NO: 50788 - DNA, 25 bp, Saccharomyces pastorianus
agggtaccgcttttgagatcatctt

SEQ ID NO: 50789 - DNA, 25 bp, Saccharomyces pastorianus
gccccagattaagtcgtatttcgtg

SEQ ID NO: 50790 - DNA, 25 bp, Saccharomyces pastorianus
gaacctggccgcatttggtaagact

SEQ ID NO: 50791 - DNA, 25 bp, Saccharomyces pastorianus
ttgaagaccggcttacagctgcagc

SEQ ID NO: 50792 - DNA, 25 bp, Saccharomyces pastorianus
attcagtcagcaatggtcgatccta

SEQ ID NO: 50793 - DNA, 25 bp, Saccharomyces pastorianus
agtctgtttatcatcccctttgaaa

SEQ ID NO: 50794 - DNA, 25 bp, Saccharomyces pastorianus
cctttcggcatttgtccagggaaca

SEQ ID NO: 50795 - DNA, 25 bp, Saccharomyces pastorianus
gtatcacacaagaggcctttcggca

SEQ ID NO: 50796 - DNA, 25 bp, Saccharomyces pastorianus
ccgcctctgtgactcgtatcgaaaa

SEQ ID NO: 50797 - DNA, 25 bp, Saccharomyces pastorianus
tatttcgtgggtatttccgctttga

SEQ ID NO: 50798 - DNA, 25 bp, Saccharomyces pastorianus
aacctgctggttgccggtacattaa

SEQ ID NO: 50799 - DNA, 25 bp, Saccharomyces pastorianus
tttatccgaaagaagaattgccgaa

SEQ ID NO: 50800 - DNA, 25 bp, Saccharomyces pastorianus
taagtctcttggtgtcatcggtgct

SEQ ID NO: 50801 - DNA, 25 bp, Saccharomyces pastorianus
gtaagtctcttggtgtcatcggtgc

SEQ ID NO: 50802 - DNA, 25 bp, Saccharomyces pastorianus
tccaatcaagattgtcccagctgaa

SEQ ID NO: 50803 - DNA, 25 bp, Saccharomyces pastorianus
attgctgctttatccgaaagaagaa

SEQ ID NO: 50804 - DNA, 25 bp, Saccharomyces pastorianus
gatccaatcaagattgtcccagctg

SEQ ID NO: 50805 - DNA, 25 bp, Saccharomyces pastorianus
atgccaccaacgatccaatcaagat

SEQ ID NO: 50806 - DNA, 25 bp, Saccharomyces pastorianus
ttattgctgctttatccgaaagaag

SEQ ID NO: 50807 - DNA, 25 bp, Saccharomyces pastorianus
gccaccaacgatccaatcaagattg

SEQ ID NO: 50808 - DNA, 25 bp, Saccharomyces pastorianus
tgttattgctgctttatccgaaaga

SEQ ID NO: 50809 - DNA, 25 bp, Saccharomyces pastorianus
ggtaagtctcttggtgtcatcggtg

SEQ ID NO: 50810 - DNA, 25 bp, Saccharomyces pastorianus
aactgatatgtgttacggcgaatac

SEQ ID NO: 50811 - DNA, 25 bp, Saccharomyces pastorianus
tttcggtatcttggctgagaacgct

SEQ ID NO: 50812 - DNA, 25 bp, Saccharomyces pastorianus
ttctctaggttacgtccacgccatt

SEQ ID NO: 50813 - DNA, 25 bp, Saccharomyces pastorianus
gtttcaactgcatctaacccaataa

SEQ ID NO: 50814 - DNA, 25 bp, Saccharomyces pastorianus
tgaaggatgcttgccacgtgaccaa

SEQ ID NO: 50815 - DNA, 25 bp, Saccharomyces pastorianus
acccaataactgatgcatgtgctct

SEQ ID NO: 50816 - DNA, 25 bp, Saccharomyces pastorianus
tgttgcctcacgtccaggaattcaa

SEQ ID NO: 50817 - DNA, 25 bp, Saccharomyces pastorianus
aattgctttgcatgttggtgcctca

SEQ ID NO: 50818 - DNA, 25 bp, Saccharomyces pastorianus
ggctttgcacgccttcaatagaact

SEQ ID NO: 50819 - DNA, 25 bp, Saccharomyces pastorianus
tggtgcctcacaagcaattccagaa

SEQ ID NO: 50820 - DNA, 25 bp, Saccharomyces pastorianus
ttaacgcttacaacgacggctctga

SEQ ID NO: 50821 - DNA, 25 bp, Saccharomyces pastorianus
tgaaaacaggtttaggtgccatagt

SEQ ID NO: 50822 - DNA, 25 bp, Saccharomyces pastorianus
gaaaatttgctgcagttgaaaacag

SEQ ID NO: 50823 - DNA, 25 bp, Saccharomyces pastorianus
acaggagacataacctcgtgcgaag

SEQ ID NO: 50824 - DNA, 25 bp, Saccharomyces pastorianus
acaggtttaggtgccatagtgtcta

SEQ ID NO: 50825 - DNA, 25 bp, Saccharomyces pastorianus
tgccatagtgtctaccgtgatagaa

SEQ ID NO: 50826 - DNA, 25 bp, Saccharomyces pastorianus
atagaagaattcaccctgtttatgg

SEQ ID NO: 50827 - DNA, 25 bp, Saccharomyces pastorianus
gtgtctaccgtgatagaagaattca

SEQ ID NO: 50828 - DNA, 25 bp, Saccharomyces pastorianus
gacataacctcgtgcgaagcagaaa

SEQ ID NO: 50829 - DNA, 25 bp, Saccharomyces pastorianus
aggtgccatagtgtctaccgtgata

SEQ ID NO: 50830 - DNA, 25 bp, Saccharomyces pastorianus
aacctcgtgcgaagcagaaaatttg

SEQ ID NO: 50831 - DNA, 25 bp, Saccharomyces pastorianus
gtttaggtgccatagtgtctaccgt

SEQ ID NO: 50832 - DNA, 25 bp, Saccharomyces pastorianus
tttggagcgaaaccagccggtacat

SEQ ID NO: 50833 - DNA, 25 bp, Saccharomyces pastorianus
taaacctgccggtagtacttccttg

SEQ ID NO: 50834 - DNA, 25 bp, Saccharomyces pastorianus
ggaggcggtctctttggtagcaaac

SEQ ID NO: 50835 - DNA, 25 bp, Saccharomyces pastorianus
atgacccgaatttctgagctaccac

SEQ ID NO: 50836 - DNA, 25 bp, Saccharomyces pastorianus
agtagcactacaggaggcggtctct

SEQ ID NO: 50837 - DNA, 25 bp, Saccharomyces pastorianus
attctggccagggtgctaataccaa

SEQ ID NO: 50838 - DNA, 25 bp, Saccharomyces pastorianus
aacctccttgtttggctcgtcaaat

SEQ ID NO: 50839 - DNA, 25 bp, Saccharomyces pastorianus
aagcagtggcctattcggttctaaa

SEQ ID NO: 50840 - DNA, 25 bp, Saccharomyces pastorianus
gcagcgcccacaagcggaagtttat

SEQ ID NO: 50841 - DNA, 25 bp, Saccharomyces pastorianus
ggtggattttttggctccaacgcag

SEQ ID NO: 50842 - DNA, 25 bp, Saccharomyces pastorianus
agccggtacatctctatttggtaac

SEQ ID NO: 50843 - DNA, 25 bp, Saccharomyces pastorianus
ggacaagatggccaaactgaccaaa

SEQ ID NO: 50844 - DNA, 25 bp, Saccharomyces pastorianus
gtttaagccgcctattatgattttt

SEQ ID NO: 50845 - DNA, 25 bp, Saccharomyces pastorianus
ttaattatgatgttccaggatcttc

SEQ ID NO: 50846 - DNA, 25 bp, Saccharomyces pastorianus
agattcagtagctatcaaaccgata

SEQ ID NO: 50847 - DNA, 25 bp, Saccharomyces pastorianus
agatcaccactgtgcctaagattga

SEQ ID NO: 50848 - DNA, 25 bp, Saccharomyces pastorianus
aaacgtagacgtgattcatgcggaa

SEQ ID NO: 50849 - DNA, 25 bp, Saccharomyces pastorianus
gagggtgagtttaagccgcctatta

SEQ ID NO: 50850 - DNA, 25 bp, Saccharomyces pastorianus
tagcccgtggtatcgatttcaaagg

SEQ ID NO: 50851 - DNA, 25 bp, Saccharomyces pastorianus
aatcgctatcagacaattggttcaa

SEQ ID NO: 50852 - DNA, 25 bp, Saccharomyces pastorianus
gtcaggtaaggccataacgctttat

SEQ ID NO: 50853 - DNA, 25 bp, Saccharomyces pastorianus
ttgtacagatgttttagcccgtggt

SEQ ID NO: 50854 - DNA, 25 bp, Saccharomyces pastorianus
atcgtttggtaacattgatttaaat

SEQ ID NO: 50855 - DNA, 25 bp, Saccharomyces pastorianus
gacaaaatcgtttggtaacattgat

SEQ ID NO: 50856 - DNA, 25 bp, Saccharomyces pastorianus
atgacaaaatcgtttggtaacattg

SEQ ID NO: 50857 - DNA, 25 bp, Saccharomyces pastorianus
acaaaatcgtttggtaacattgatt

SEQ ID NO: 50858 - DNA, 25 bp, Saccharomyces pastorianus
cattgatttaaataaaatgcccaaa

SEQ ID NO: 50859 - DNA, 25 bp, Saccharomyces pastorianus
aacattgatttaaataaaatgccca

SEQ ID NO: 50860 - DNA, 25 bp, Saccharomyces pastorianus
caaaatcgtttggtaacattgattt

SEQ ID NO: 50861 - DNA, 25 bp, Saccharomyces pastorianus
tgacaaaatcgtttggtaacattga

SEQ ID NO: 50862 - DNA, 25 bp, Saccharomyces pastorianus
tcgtttggtaacattgatttaaata

SEQ ID NO: 50863 - DNA, 25 bp, Saccharomyces pastorianus
acattgatttaaataaaatgcccaa

SEQ ID NO: 50864 - DNA, 25 bp, Saccharomyces pastorianus
gagcctccctaattcctatgatcaa

SEQ ID NO: 50865 - DNA, 25 bp, Saccharomyces pastorianus
gctgctactaccacatttaccaaaa

SEQ ID NO: 50866 - DNA, 25 bp, Saccharomyces pastorianus
ggagattgacatttgcctgacaagt

SEQ ID NO: 50867 - DNA, 25 bp, Saccharomyces pastorianus
tagcagttcgcaaattctccaacca

SEQ ID NO: 50868 - DNA, 25 bp, Saccharomyces pastorianus
acactctccctcaagaatgtcgaaa

SEQ ID NO: 50869 - DNA, 25 bp, Saccharomyces pastorianus
atcttccctctcttaaaagtttcag

SEQ ID NO: 50870 - DNA, 25 bp, Saccharomyces pastorianus
tctccaaccaatctgaaacccaaaa

SEQ ID NO: 50871 - DNA, 25 bp, Saccharomyces pastorianus
gcctgacaagtataccatttttcga

SEQ ID NO: 50872 - DNA, 25 bp, Saccharomyces pastorianus
aaactcagcaagtgggacacccaat

SEQ ID NO: 50873 - DNA, 25 bp, Saccharomyces pastorianus
accaactcttcaaatttctgggaga

SEQ ID NO: 50874 - DNA, 25 bp, Saccharomyces pastorianus
tgtttccccggtaataatctatatc

SEQ ID NO: 50875 - DNA, 25 bp, Saccharomyces pastorianus
aatagcagtaatatgtcagacaccc

SEQ ID NO: 50876 - DNA, 25 bp, Saccharomyces pastorianus
aacagtactactaatgagtaatagc

SEQ ID NO: 50877 - DNA, 25 bp, Saccharomyces pastorianus
agcagtaatatgtcagacaccccta

SEQ ID NO: 50878 - DNA, 25 bp, Saccharomyces pastorianus
gtactactaatgagtaatagcagta

SEQ ID NO: 50879 - DNA, 25 bp, Saccharomyces pastorianus
cagtaatatgtcagacacccctaaa

SEQ ID NO: 50880 - DNA, 25 bp, Saccharomyces pastorianus
atatgtcagacacccctaaacgttc

SEQ ID NO: 50881 - DNA, 25 bp, Saccharomyces pastorianus
gtaatatgtcagacacccctaaacg

SEQ ID NO: 50882 - DNA, 25 bp, Saccharomyces pastorianus
aatatgtcagacacccctaaacgtt

SEQ ID NO: 50883 - DNA, 25 bp, Saccharomyces pastorianus
gcagtaatatgtcagacacccctaa

SEQ ID NO: 50884 - DNA, 25 bp, Saccharomyces pastorianus
atagcagtaatatgtcagacacccc

SEQ ID NO: 50885 - DNA, 25 bp, Saccharomyces pastorianus
tatgtcagacacccctaaacgttcg

SEQ ID NO: 50886 - DNA, 25 bp, Saccharomyces pastorianus
aggcccagagaagcctccaagtcta

SEQ ID NO: 50887 - DNA, 25 bp, Saccharomyces pastorianus
agccgtcgcttggaagcacacatgc

SEQ ID NO: 50888 - DNA, 25 bp, Saccharomyces pastorianus
tactagtctttctcttggtgtggca

SEQ ID NO: 50889 - DNA, 25 bp, Saccharomyces pastorianus
ttggtgtggcacttacagggctcgc

SEQ ID NO: 50890 - DNA, 25 bp, Saccharomyces pastorianus
actgagctatggcacgatgctgcct

SEQ ID NO: 50891 - DNA, 25 bp, Saccharomyces pastorianus
gcacacatgcatccgccagaagggt

SEQ ID NO: 50892 - DNA, 25 bp, Saccharomyces pastorianus
gtcttggcgccatcgctttgtaggg

SEQ ID NO: 50893 - DNA, 25 bp, Saccharomyces pastorianus
acagagtcgttgtcatgtccacata

SEQ ID NO: 50894 - DNA, 25 bp, Saccharomyces pastorianus
gccgcttcaggactgactgagctat

SEQ ID NO: 50895 - DNA, 25 bp, Saccharomyces pastorianus
agatttttaacggtcgccgcttcag

SEQ ID NO: 50896 - DNA, 25 bp, Saccharomyces pastorianus
ataagatcgacgctgttcaggccca

SEQ ID NO: 50897 - DNA, 25 bp, Saccharomyces pastorianus
gtcaactttagacgaccagccggcg

SEQ ID NO: 50898 - DNA, 25 bp, Saccharomyces pastorianus
agctcacagtatattttcatgccag

SEQ ID NO: 50899 - DNA, 25 bp, Saccharomyces pastorianus
attccgcccttgaacagagttacga

SEQ ID NO: 50900 - DNA, 25 bp, Saccharomyces pastorianus
gataccgaatcccataagagtgcaa

SEQ ID NO: 50901 - DNA, 25 bp, Saccharomyces pastorianus
tcagcgccctggtgggatggcataa

SEQ ID NO: 50902 - DNA, 25 bp, Saccharomyces pastorianus
aacagagaacttacattccgccctt

SEQ ID NO: 50903 - DNA, 25 bp, Saccharomyces pastorianus
aatacgcttacgctaccgttgagga

SEQ ID NO: 50904 - DNA, 25 bp, Saccharomyces pastorianus
acttactagaagttgacccgcgcaa

SEQ ID NO: 50905 - DNA, 25 bp, Saccharomyces pastorianus
tgtacacgatgttgtgcggctaccc

SEQ ID NO: 50906 - DNA, 25 bp, Saccharomyces pastorianus
tttgatgaactcgatgggcctttta

SEQ ID NO: 50907 - DNA, 25 bp, Saccharomyces pastorianus
acgtacgattgcttgaggccgtcaa

SEQ ID NO: 50908 - DNA, 25 bp, Saccharomyces pastorianus
gataatgcgcacagcacgtattcca

SEQ ID NO: 50909 - DNA, 25 bp, Saccharomyces pastorianus
gtattccactgattgccgtaggtct

SEQ ID NO: 50910 - DNA, 25 bp, Saccharomyces pastorianus
gataacttcctggacagcgacattc

SEQ ID NO: 50911 - DNA, 25 bp, Saccharomyces pastorianus
aggagacggcgcattttccagagta

SEQ ID NO: 50912 - DNA, 25 bp, Saccharomyces pastorianus
gtaggtcttctctctcagtgaacat

SEQ ID NO: 50913 - DNA, 25 bp, Saccharomyces pastorianus
gatattttagtgacgtctttccaaa

SEQ ID NO: 50914 - DNA, 25 bp, Saccharomyces pastorianus
acacctgatgccacttattctgaag

SEQ ID NO: 50915 - DNA, 25 bp, Saccharomyces pastorianus
atagcggacggtctctgttttcgcc

SEQ ID NO: 50916 - DNA, 25 bp, Saccharomyces pastorianus
gaacaaattccggttgccatcaaag

SEQ ID NO: 50917 - DNA, 25 bp, Saccharomyces pastorianus
actcgtctacttactattccgttat

SEQ ID NO: 50918 - DNA, 25 bp, Saccharomyces pastorianus
atcgataccccttctggagagagtg

SEQ ID NO: 50919 - DNA, 25 bp, Saccharomyces pastorianus
ttggctgttctattgttacgggctt

SEQ ID NO: 50920 - DNA, 25 bp, Saccharomyces pastorianus
aatcggcttctgcaattgtttggct

SEQ ID NO: 50921 - DNA, 25 bp, Saccharomyces pastorianus
atcactgtctttcccgttaacggag

SEQ ID NO: 50922 - DNA, 25 bp, Saccharomyces pastorianus
aagagcgtctgatccatgtgtgata

SEQ ID NO: 50923 - DNA, 25 bp, Saccharomyces pastorianus
attaccttagataacgttccactgg

SEQ ID NO: 50924 - DNA, 25 bp, Saccharomyces pastorianus
cctgtggtccctgaaagaatcgtat

SEQ ID NO: 50925 - DNA, 25 bp, Saccharomyces pastorianus
aacggagcttcattggacattacct

SEQ ID NO: 50926 - DNA, 25 bp, Saccharomyces pastorianus
gttccactggttttttattctcgat

SEQ ID NO: 50927 - DNA, 25 bp, Saccharomyces pastorianus
gtgatattcacttacctgtggtccc

SEQ ID NO: 50928 - DNA, 25 bp, Saccharomyces pastorianus
aatgaccttaacatgggcatcccaa

SEQ ID NO: 50929 - DNA, 25 bp, Saccharomyces pastorianus
cagtgtgtagctatgtccttggtga

SEQ ID NO: 50930 - DNA, 25 bp, Saccharomyces pastorianus
gcactagtacttgttgcagttcgga

SEQ ID NO: 50931 - DNA, 25 bp, Saccharomyces pastorianus
gtcttcgatcttttctttgtttctc

SEQ ID NO: 50932 - DNA, 25 bp, Saccharomyces pastorianus
taagctctgtctgttctgtttcgat

SEQ ID NO: 50933 - DNA, 25 bp, Saccharomyces pastorianus
gtcacctagctctttcaacttattg

SEQ ID NO: 50934 - DNA, 25 bp, Saccharomyces pastorianus
cctgcatgttgctgttgtctgaaac

SEQ ID NO: 50935 - DNA, 25 bp, Saccharomyces pastorianus
aacttattgctttcttgctctctaa

SEQ ID NO: 50936 - DNA, 25 bp, Saccharomyces pastorianus
gagcgaatccatttctctttggata

SEQ ID NO: 50937 - DNA, 25 bp, Saccharomyces pastorianus
attgtttagttcctgcatgttgctg

SEQ ID NO: 50938 - DNA, 25 bp, Saccharomyces pastorianus
gtaggttggacatctcgagcttaac

SEQ ID NO: 50939 - DNA, 25 bp, Saccharomyces pastorianus
tctttgtttctcgtagtttgcacta

SEQ ID NO: 50940 - DNA, 25 bp, Saccharomyces pastorianus
cagttcggaaattgtgtcacctagc

SEQ ID NO: 50941 - DNA, 25 bp, Saccharomyces pastorianus
aagtgacggtatacagactgcttgt

SEQ ID NO: 50942 - DNA, 25 bp, Saccharomyces pastorianus
cacagagttctgatttatttccaaa

SEQ ID NO: 50943 - DNA, 25 bp, Saccharomyces pastorianus
attggcaaactaacccagagatttt

SEQ ID NO: 50944 - DNA, 25 bp, Saccharomyces pastorianus
gactgcttgttcgtggcaccatcga

SEQ ID NO: 50945 - DNA, 25 bp, Saccharomyces pastorianus
ttcattaccgaatcagcaaagctaa

SEQ ID NO: 50946 - DNA, 25 bp, Saccharomyces pastorianus
catattagactggatggttcatcga

SEQ ID NO: 50947 - DNA, 25 bp, Saccharomyces pastorianus
ggtattaacttaacggctgctgata

SEQ ID NO: 50948 - DNA, 25 bp, Saccharomyces pastorianus
tagagcacatagattgggtcaaact

SEQ ID NO: 50949 - DNA, 25 bp, Saccharomyces pastorianus
aagcggaaggtcacagagttctgat

SEQ ID NO: 50950 - DNA, 25 bp, Saccharomyces pastorianus
aagatcgtcgtgatttggttcatga

SEQ ID NO: 50951 - DNA, 25 bp, Saccharomyces pastorianus
aaacatatcgatgccgtctatggat

SEQ ID NO: 50952 - DNA, 25 bp, Saccharomyces pastorianus
gtcatcttcgtcatctaccaagttg

SEQ ID NO: 50953 - DNA, 25 bp, Saccharomyces pastorianus
gacaatgtcgatgcggtctcggctg

SEQ ID NO: 50954 - DNA, 25 bp, Saccharomyces pastorianus
gaagacttcaatcctgacggcgaga

SEQ ID NO: 50955 - DNA, 25 bp, Saccharomyces pastorianus
aaagccctaccaaacacgtcaatgg

SEQ ID NO: 50956 - DNA, 25 bp, Saccharomyces pastorianus
gttgtcaatgaactcgctatctctt

SEQ ID NO: 50957 - DNA, 25 bp, Saccharomyces pastorianus
tgaagaggaggacttcgccgctttt

SEQ ID NO: 50958 - DNA, 25 bp, Saccharomyces pastorianus
aaaagaaggattccacggctgccct

SEQ ID NO: 50959 - DNA, 25 bp, Saccharomyces pastorianus
tctcggctgtcgatggcgacgataa

SEQ ID NO: 50960 - DNA, 25 bp, Saccharomyces pastorianus
aactcgctatctcttataacatcca

SEQ ID NO: 50961 - DNA, 25 bp, Saccharomyces pastorianus
gaccgaaaatcgtacgtgagcttat

SEQ ID NO: 50962 - DNA, 25 bp, Saccharomyces pastorianus
ggagaaagaggtcttcgtcatcttc

SEQ ID NO: 50963 - DNA, 25 bp, Saccharomyces pastorianus
gttgaactggctagccaacctgtat

SEQ ID NO: 50964 - DNA, 25 bp, Saccharomyces pastorianus
atcgatatttcagcattagttccaa

SEQ ID NO: 50965 - DNA, 25 bp, Saccharomyces pastorianus
ggctagccaacctgtatgaccaagg

SEQ ID NO: 50966 - DNA, 25 bp, Saccharomyces pastorianus
aacccaaaattttagcatgcacttt

SEQ ID NO: 50967 - DNA, 25 bp, Saccharomyces pastorianus
gatttccactctattgatttcgata

SEQ ID NO: 50968 - DNA, 25 bp, Saccharomyces pastorianus
atatccaaatttcggcctgaattca

SEQ ID NO: 50969 - DNA, 25 bp, Saccharomyces pastorianus
gaatgcttcgaatgctctggctgaa

SEQ ID NO: 50970 - DNA, 25 bp, Saccharomyces pastorianus
ctgcctccactctacataattgggt

SEQ ID NO: 50971 - DNA, 25 bp, Saccharomyces pastorianus
aaccgtacaatctatttctgttcta

SEQ ID NO: 50972 - DNA, 25 bp, Saccharomyces pastorianus
ttgatgctcacgcaaacgcacaggg

SEQ ID NO: 50973 - DNA, 25 bp, Saccharomyces pastorianus
ttctgttctagctcatttggcggaa

SEQ ID NO: 50974 - DNA, 25 bp, Saccharomyces pastorianus
cgacgttttatgtaatttgactcaa

SEQ ID NO: 50975 - DNA, 25 bp, Saccharomyces pastorianus
atttgactcaaagacaagccaagtt

SEQ ID NO: 50976 - DNA, 25 bp, Saccharomyces pastorianus
ggacattgaatctcatgccgaagca

SEQ ID NO: 50977 - DNA, 25 bp, Saccharomyces pastorianus
gactattattaactggtacacctat

SEQ ID NO: 50978 - DNA, 25 bp, Saccharomyces pastorianus
tggtacacctatccagaacagtatg

SEQ ID NO: 50979 - DNA, 25 bp, Saccharomyces pastorianus
gacaagccaagttataccaagtgtt

SEQ ID NO: 50980 - DNA, 25 bp, Saccharomyces pastorianus
gccgtttatgttaagacgtgtgaaa

SEQ ID NO: 50981 - DNA, 25 bp, Saccharomyces pastorianus
aacgtgcaatccgaattgggtgaca

SEQ ID NO: 50982 - DNA, 25 bp, Saccharomyces pastorianus
cttccctttttgactctcatgatga

SEQ ID NO: 50983 - DNA, 25 bp, Saccharomyces pastorianus
ttgcatatgatcttgaagccgttta

SEQ ID NO: 50984 - DNA, 25 bp, Saccharomyces pastorianus
aattgctaagctttcattgtcgtaa

SEQ ID NO: 50985 - DNA, 25 bp, Saccharomyces pastorianus
gattcattagatatcccattaccta

SEQ ID NO: 50986 - DNA, 25 bp, Saccharomyces pastorianus
cgtggtcgacactagaaatgcctgt

SEQ ID NO: 50987 - DNA, 25 bp, Saccharomyces pastorianus
agacacggagatccaggacgcactt

SEQ ID NO: 50988 - DNA, 25 bp, Saccharomyces pastorianus
atgataatgatgacggcgccactgt

SEQ ID NO: 50989 - DNA, 25 bp, Saccharomyces pastorianus
tcagcagctcctagatccagaatat

SEQ ID NO: 50990 - DNA, 25 bp, Saccharomyces pastorianus
acttcaagattgcaacgtggtcgac

SEQ ID NO: 50991 - DNA, 25 bp, Saccharomyces pastorianus
aaatgggtgatttcgcatctttaag

SEQ ID NO: 50992 - DNA, 25 bp, Saccharomyces pastorianus
gttttaagcttaccaccacacgcca

SEQ ID NO: 50993 - DNA, 25 bp, Saccharomyces pastorianus
ggcgccactgtaccaagtgctgaat

SEQ ID NO: 50994 - DNA, 25 bp, Saccharomyces pastorianus
ggtttgaaccagtttctacacgatt

SEQ ID NO: 50995 - DNA, 25 bp, Saccharomyces pastorianus
gatcgaaacaatcagcagctcctag

SEQ ID NO: 50996 - DNA, 25 bp, Saccharomyces pastorianus
agacgtccattttaacggtgatgac

SEQ ID NO: 50997 - DNA, 25 bp, Saccharomyces pastorianus
agaatattcttctccaagctttttt

SEQ ID NO: 50998 - DNA, 25 bp, Saccharomyces pastorianus
gtcgctttgaaaccggacgctcata

SEQ ID NO: 50999 - DNA, 25 bp, Saccharomyces pastorianus
gaaagtttcctaacgcgtacggatg

SEQ ID NO: 51000 - DNA, 25 bp, Saccharomyces pastorianus
cggcgtctttgatgaaggtcctaca

SEQ ID NO: 51001 - DNA, 25 bp, Saccharomyces pastorianus
aggatcccaatgacgagattcttcg

SEQ ID NO: 51002 - DNA, 25 bp, Saccharomyces pastorianus
ggaatactccggaggatcccaatga

SEQ ID NO: 51003 - DNA, 25 bp, Saccharomyces pastorianus
gaggcttcagtgctatgaccgacag

SEQ ID NO: 51004 - DNA, 25 bp, Saccharomyces pastorianus
acagaggatgatattccgcaatcta

SEQ ID NO: 51005 - DNA, 25 bp, Saccharomyces pastorianus
ggatggcccgtaatcgatcatttaa

SEQ ID NO: 51006 - DNA, 25 bp, Saccharomyces pastorianus
ggtgacgacaattgttttcctcaag

SEQ ID NO: 51007 - DNA, 25 bp, Saccharomyces pastorianus
atcctccattgcacctacttgaaga

SEQ ID NO: 51008 - DNA, 25 bp, Saccharomyces pastorianus
tgtggtcaattacttgcgatcctcc

SEQ ID NO: 51009 - DNA, 25 bp, Saccharomyces pastorianus
gagtatcgaaacaagctgaccagct

SEQ ID NO: 51010 - DNA, 25 bp, Saccharomyces pastorianus
gctcgttccctttatatcagtgttt

SEQ ID NO: 51011 - DNA, 25 bp, Saccharomyces pastorianus
gaatcagggtccatcgaagtcatga

SEQ ID NO: 51012 - DNA, 25 bp, Saccharomyces pastorianus
caataggtttttcaactcccttgct

SEQ ID NO: 51013 - DNA, 25 bp, Saccharomyces pastorianus
gacccaaaagcctcttcgaagcttg

SEQ ID NO: 51014 - DNA, 25 bp, Saccharomyces pastorianus
tagaaacttcccaccgatattccgt

SEQ ID NO: 51015 - DNA, 25 bp, Saccharomyces pastorianus
actcccttgctcattgggattcaag

SEQ ID NO: 51016 - DNA, 25 bp, Saccharomyces pastorianus
ttaaaacttctgctctggctcgttc

SEQ ID NO: 51017 - DNA, 25 bp, Saccharomyces pastorianus
attcgacaccgggtcaaagttatct

SEQ ID NO: 51018 - DNA, 25 bp, Saccharomyces pastorianus
tttcgcgcgaaaacctgtcaacatt

SEQ ID NO: 51019 - DNA, 25 bp, Saccharomyces pastorianus
ggatgatagaacctccttccaaagg

SEQ ID NO: 51020 - DNA, 25 bp, Saccharomyces pastorianus
gaggattcggatcacaaaactttgt

SEQ ID NO: 51021 - DNA, 25 bp, Saccharomyces pastorianus
gacacaagctcaactgcagacccat

SEQ ID NO: 51022 - DNA, 25 bp, Saccharomyces pastorianus
cacagtctgacgcacataatggatt

SEQ ID NO: 51023 - DNA, 25 bp, Saccharomyces pastorianus
aggcaacgttgcaagggatcataac

SEQ ID NO: 51024 - DNA, 25 bp, Saccharomyces pastorianus
ggttccaaatcatacccaggacaca

SEQ ID NO: 51025 - DNA, 25 bp, Saccharomyces pastorianus
acaacgttcacctcaagtgatgaga

SEQ ID NO: 51026 - DNA, 25 bp, Saccharomyces pastorianus
acaacctaacaaatctttcgcgcga

SEQ ID NO: 51027 - DNA, 25 bp, Saccharomyces pastorianus
gaaggtaccgtcaacagatctgtag

SEQ ID NO: 51028 - DNA, 25 bp, Saccharomyces pastorianus
gtagccaacgaattacttgctttag

SEQ ID NO: 51029 - DNA, 25 bp, Saccharomyces pastorianus
ggctgataatatcactgaccagtaa

SEQ ID NO: 51030 - DNA, 25 bp, Saccharomyces pastorianus
ggaaaactcccaactgtcagcaaac

SEQ ID NO: 51031 - DNA, 25 bp, Saccharomyces pastorianus
aatcgtgttccataattgggctgat

SEQ ID NO: 51032 - DNA, 25 bp, Saccharomyces pastorianus
gacgtcattagtcacatgtatggaa

SEQ ID NO: 51033 - DNA, 25 bp, Saccharomyces pastorianus
gtagcgacgtcattagtcacatgta

SEQ ID NO: 51034 - DNA, 25 bp, Saccharomyces pastorianus
tacaaaccttcaaatcgtgttccat

SEQ ID NO: 51035 - DNA, 25 bp, Saccharomyces pastorianus
ttttgatgtcgtctttgacccggac

SEQ ID NO: 51036 - DNA, 25 bp, Saccharomyces pastorianus
aaaggaagctagtagcgacgtcatt

SEQ ID NO: 51037 - DNA, 25 bp, Saccharomyces pastorianus
gtaacataggtctagtagaggcgaa

SEQ ID NO: 51038 - DNA, 25 bp, Saccharomyces pastorianus
ctttgacccggacgacaggtcgcta

SEQ ID NO: 51039 - DNA, 25 bp, Saccharomyces pastorianus
gtcagcaaacagttttgatgtcgtc

SEQ ID NO: 51040 - DNA, 25 bp, Saccharomyces pastorianus
aacaggaaaaggctgccgctgcaga

SEQ ID NO: 51041 - DNA, 25 bp, Saccharomyces pastorianus
agcacacgacctagaatccttattc

SEQ ID NO: 51042 - DNA, 25 bp, Saccharomyces pastorianus
ggcagctgatgcacaacctctaatt

SEQ ID NO: 51043 - DNA, 25 bp, Saccharomyces pastorianus
gatttagattctgctccaacatcga

SEQ ID NO: 51044 - DNA, 25 bp, Saccharomyces pastorianus
atccttattcttattgcattcatct

SEQ ID NO: 51045 - DNA, 25 bp, Saccharomyces pastorianus
gatcactaggtgacgcatctttaca

SEQ ID NO: 51046 - DNA, 25 bp, Saccharomyces pastorianus
ggcattcaatgcttattgggttgct

SEQ ID NO: 51047 - DNA, 25 bp, Saccharomyces pastorianus
aagcagctttattaggttcgacata

SEQ ID NO: 51048 - DNA, 25 bp, Saccharomyces pastorianus
ccgagaggttctcagaagcagcttt

SEQ ID NO: 51049 - DNA, 25 bp, Saccharomyces pastorianus
cgaagggttaccaagctcatcaaag

SEQ ID NO: 51050 - DNA, 25 bp, Saccharomyces pastorianus
gctccaacatcgaaacatgcccaag

SEQ ID NO: 51051 - DNA, 25 bp, Saccharomyces pastorianus
attgccgacgaacttgtgaaactag

SEQ ID NO: 51052 - DNA, 25 bp, Saccharomyces pastorianus
aagaattttggctcgctcggaaagg

SEQ ID NO: 51053 - DNA, 25 bp, Saccharomyces pastorianus
aaatggcactattgaaacggttgat

SEQ ID NO: 51054 - DNA, 25 bp, Saccharomyces pastorianus
aaggaggctgcgttggatgaaaaac

SEQ ID NO: 51055 - DNA, 25 bp, Saccharomyces pastorianus
ctgatattctagctgatgcggaaga

SEQ ID NO: 51056 - DNA, 25 bp, Saccharomyces pastorianus
attacagacatttcaaggccatgga

SEQ ID NO: 51057 - DNA, 25 bp, Saccharomyces pastorianus
cattgggagcatttactaagagcga

SEQ ID NO: 51058 - DNA, 25 bp, Saccharomyces pastorianus
aaaactggaggccattgccgacgaa

SEQ ID NO: 51059 - DNA, 25 bp, Saccharomyces pastorianus
actagatgatagctccaagacacgg

SEQ ID NO: 51060 - DNA, 25 bp, Saccharomyces pastorianus
aaagaaccaaagtctctcggagcaa

SEQ ID NO: 51061 - DNA, 25 bp, Saccharomyces pastorianus
gggatcttcacttcgcaagaatgca

SEQ ID NO: 51062 - DNA, 25 bp, Saccharomyces pastorianus
gatggaagggcttgacccagccatt

SEQ ID NO: 51063 - DNA, 25 bp, Saccharomyces pastorianus
atttgctcatgctgtggtacatcta

SEQ ID NO: 51064 - DNA, 25 bp, Saccharomyces pastorianus
cgcaccttggccgaatcgagatatt

SEQ ID NO: 51065 - DNA, 25 bp, Saccharomyces pastorianus
tgacccagccattcttggtatgaat

SEQ ID NO: 51066 - DNA, 25 bp, Saccharomyces pastorianus
tataaacataccagcggtcgcacct

SEQ ID NO: 51067 - DNA, 25 bp, Saccharomyces pastorianus
taactaatcctagagcgtgcgtact

SEQ ID NO: 51068 - DNA, 25 bp, Saccharomyces pastorianus
attcttgtaacttaaactcaggcgt

SEQ ID NO: 51069 - DNA, 25 bp, Saccharomyces pastorianus
caggcgttttagaggctgactacga

SEQ ID NO: 51070 - DNA, 25 bp, Saccharomyces pastorianus
tggcatataagcctcaacataccct

SEQ ID NO: 51071 - DNA, 25 bp, Saccharomyces pastorianus
gggatccaggcgaatctataactaa

SEQ ID NO: 51072 - DNA, 25 bp, Saccharomyces pastorianus
gtagcgctgactttaagcttttgtt

SEQ ID NO: 51073 - DNA, 25 bp, Saccharomyces pastorianus
aattgggaccacttgatcgatgaga

SEQ ID NO: 51074 - DNA, 25 bp, Saccharomyces pastorianus
aagtatttcctgagcggcaacggta

SEQ ID NO: 51075 - DNA, 25 bp, Saccharomyces pastorianus
aagtgtattccttggatctgcaaat

SEQ ID NO: 51076 - DNA, 25 bp, Saccharomyces pastorianus
gtcatgacccactcacataatcgtg

SEQ ID NO: 51077 - DNA, 25 bp, Saccharomyces pastorianus
tgagttagccatccagtccaaagtg

SEQ ID NO: 51078 - DNA, 25 bp, Saccharomyces pastorianus
gttttcgatttgctatccgtcatga

SEQ ID NO: 51079 - DNA, 25 bp, Saccharomyces pastorianus
ttaactacctctttttctgcataca

SEQ ID NO: 51080 - DNA, 25 bp, Saccharomyces pastorianus
agagaaagctctaccattctggcca

SEQ ID NO: 51081 - DNA, 25 bp, Saccharomyces pastorianus
agtgcccatcatgttcacggtagat

SEQ ID NO: 51082 - DNA, 25 bp, Saccharomyces pastorianus
tatgttaccagacaccactacgaac

SEQ ID NO: 51083 - DNA, 25 bp, Saccharomyces pastorianus
attctggccatctctggtgtagata

SEQ ID NO: 51084 - DNA, 25 bp, Saccharomyces pastorianus
ctgatcccactacactattattcgg

SEQ ID NO: 51085 - DNA, 25 bp, Saccharomyces pastorianus
gcaagtccagcgctatggcgaacta

SEQ ID NO: 51086 - DNA, 25 bp, Saccharomyces pastorianus
tattcggacttcaacctacaaacgg

SEQ ID NO: 51087 - DNA, 25 bp, Saccharomyces pastorianus
ggctcatcgagcaacaacgcaggac

SEQ ID NO: 51088 - DNA, 25 bp, Saccharomyces pastorianus
agaaccatccttactacgattgctc

SEQ ID NO: 51089 - DNA, 25 bp, Saccharomyces pastorianus
aggagctggtcaagtggcaacgtca

SEQ ID NO: 51090 - DNA, 25 bp, Saccharomyces pastorianus
gcacaacacatattcaggagctggt

SEQ ID NO: 51091 - DNA, 25 bp, Saccharomyces pastorianus
atacggcgactggaaacatctggac

SEQ ID NO: 51092 - DNA, 25 bp, Saccharomyces pastorianus
atgactacttcaagggcgactctat

SEQ ID NO: 51093 - DNA, 25 bp, Saccharomyces pastorianus
gaaaagctacaacgctccgaatccg

SEQ ID NO: 51094 - DNA, 25 bp, Saccharomyces pastorianus
tcaagctgtgttgctcatctgcgaa

SEQ ID NO: 51095 - DNA, 25 bp, Saccharomyces pastorianus
aagatcatccagttgcaaggcccgc

SEQ ID NO: 51096 - DNA, 25 bp, Saccharomyces pastorianus
gaactgcctcttcatcttgaagctg

SEQ ID NO: 51097 - DNA, 25 bp, Saccharomyces pastorianus
tgccagatgccaacaacgacaccag

SEQ ID NO: 51098 - DNA, 25 bp, Saccharomyces pastorianus
cgccctactcgcaatgcatagtgta

SEQ ID NO: 51099 - DNA, 25 bp, Saccharomyces pastorianus
tacttgctcacccaacaacagatat

SEQ ID NO: 51100 - DNA, 25 bp, Saccharomyces pastorianus
tggagtccgccatcgtcaatgaaga

SEQ ID NO: 51101 - DNA, 25 bp, Saccharomyces pastorianus
atgcatagtgtacccgaactgcctc

SEQ ID NO: 51102 - DNA, 25 bp, Saccharomyces pastorianus
gctgcccaccaggttcgaggtggaa

SEQ ID NO: 51103 - DNA, 25 bp, Saccharomyces pastorianus
tcttgaagctgctgaacgggttcat

SEQ ID NO: 51104 - DNA, 25 bp, Saccharomyces pastorianus
tggaactcgagttcgtccagtcctt

SEQ ID NO: 51105 - DNA, 25 bp, Saccharomyces pastorianus
tccagtccttggctaacatccaata

SEQ ID NO: 51106 - DNA, 25 bp, Saccharomyces pastorianus
tctctctagccgtcggtcacgctgt

SEQ ID NO: 51107 - DNA, 25 bp, Saccharomyces pastorianus
gttgctggtcacgtggctgtggcag

SEQ ID NO: 51108 - DNA, 25 bp, Saccharomyces pastorianus
acgtggctgtggcagctgctgctga

SEQ ID NO: 51109 - DNA, 25 bp, Saccharomyces pastorianus
gaccacccgatcgtgctgctgttgg

SEQ ID NO: 51110 - DNA, 25 bp, Saccharomyces pastorianus
gtccgggctgctcgccgcgtacata

SEQ ID NO: 51111 - DNA, 25 bp, Saccharomyces pastorianus
cgatcgtgctgctgttggcgttgct

SEQ ID NO: 51112 - DNA, 25 bp, Saccharomyces pastorianus
ggctgtggcgcgctctctctctagc

SEQ ID NO: 51113 - DNA, 25 bp, Saccharomyces pastorianus
tgcgcgagcacctgtccgggctgct

SEQ ID NO: 51114 - DNA, 25 bp, Saccharomyces pastorianus
tagccgtcggtcacgctgtcgctcg

SEQ ID NO: 51115 - DNA, 25 bp, Saccharomyces pastorianus
ctgctgttggcgttgctggtcacgt

SEQ ID NO: 51116 - DNA, 25 bp, Saccharomyces pastorianus
gcttggcgcggtgcatcgcgtgcga

SEQ ID NO: 51117 - DNA, 25 bp, Saccharomyces pastorianus
atccagtccctgatcgacgattatt

SEQ ID NO: 51118 - DNA, 25 bp, Saccharomyces pastorianus
gaccaagttgcccaagctgatcgaa

SEQ ID NO: 51119 - DNA, 25 bp, Saccharomyces pastorianus
cacgacgttgcttgtctggttatca

SEQ ID NO: 51120 - DNA, 25 bp, Saccharomyces pastorianus
tacagcccaccattgtcgagaagat

SEQ ID NO: 51121 - DNA, 25 bp, Saccharomyces pastorianus
aaggaggagttctaccacattttgg

SEQ ID NO: 51122 - DNA, 25 bp, Saccharomyces pastorianus
attattgcctggtcaacatcgtcga

SEQ ID NO: 51123 - DNA, 25 bp, Saccharomyces pastorianus
gaagatctccttcttggcatggaag

SEQ ID NO: 51124 - DNA, 25 bp, Saccharomyces pastorianus
aatttgaagtgcttgccctggagcg

SEQ ID NO: 51125 - DNA, 25 bp, Saccharomyces pastorianus
aggtcaacggcattcggtccaacga

SEQ ID NO: 51126 - DNA, 25 bp, Saccharomyces pastorianus
ggagttcatgttgcccaagaccaag

SEQ ID NO: 51127 - DNA, 25 bp, Saccharomyces pastorianus
ggtcgagttgaaccagcactccata

SEQ ID NO: 51128 - DNA, 25 bp, Saccharomyces pastorianus
tctttcgttgccattggtaacactt

SEQ ID NO: 51129 - DNA, 25 bp, Saccharomyces pastorianus
agacctctaaggaagtcgctggtgc

SEQ ID NO: 51130 - DNA, 25 bp, Saccharomyces pastorianus
gttgccattggtaacacttacggct

SEQ ID NO: 51131 - DNA, 25 bp, Saccharomyces pastorianus
cctctaaggaagtcgctggtgccat

SEQ ID NO: 51132 - DNA, 25 bp, Saccharomyces pastorianus
gtatcaagacctctaaggaagtcgc

SEQ ID NO: 51133 - DNA, 25 bp, Saccharomyces pastorianus
ttctttcgttgccattggtaacact

SEQ ID NO: 51134 - DNA, 25 bp, Saccharomyces pastorianus
gccattggtaacacttacggcttct

SEQ ID NO: 51135 - DNA, 25 bp, Saccharomyces pastorianus
cattgccaagttgtctgttattcca

SEQ ID NO: 51136 - DNA, 25 bp, Saccharomyces pastorianus
catcattgccaagttgtctgttatt

SEQ ID NO: 51137 - DNA, 25 bp, Saccharomyces pastorianus
caagacctctaaggaagtcgctggt

SEQ ID NO: 51138 - DNA, 25 bp, Saccharomyces pastorianus
cattggtaacacttacggcttcttg

SEQ ID NO: 51139 - DNA, 25 bp, Saccharomyces pastorianus
gaaccagatttaaggctgttgtcgt

SEQ ID NO: 51140 - DNA, 25 bp, Saccharomyces pastorianus
attgccagtttctccattggacatc

SEQ ID NO: 51141 - DNA, 25 bp, Saccharomyces pastorianus
aaccagagccggtcaaagaaccaga

SEQ ID NO: 51142 - DNA, 25 bp, Saccharomyces pastorianus
tgttagattgatcccagccccaaga

SEQ ID NO: 51143 - DNA, 25 bp, Saccharomyces pastorianus
agtgtggttccgtcactgttagatt

SEQ ID NO: 51144 - DNA, 25 bp, Saccharomyces pastorianus
attggctggtgttgaagatgtctac

SEQ ID NO: 51145 - DNA, 25 bp, Saccharomyces pastorianus
gctggtgccatcagagctggtatca

SEQ ID NO: 51146 - DNA, 25 bp, Saccharomyces pastorianus
tgactctaacggtcacgttggtttg

SEQ ID NO: 51147 - DNA, 25 bp, Saccharomyces pastorianus
ttgggtcaaccacattctttggcca

SEQ ID NO: 51148 - DNA, 25 bp, Saccharomyces pastorianus
ttgtgggccgaacaaccattgccag

SEQ ID NO: 51149 - DNA, 25 bp, Saccharomyces pastorianus
ttcttgactccaaacttgtgggccg

SEQ ID NO: 51150 - DNA, 25 bp, Saccharomyces pastorianus
tcggtggccgtaacaagggtcgtca

SEQ ID NO: 51151 - DNA, 25 bp, Saccharomyces pastorianus
atgtctgctccagaggctcaacaac

SEQ ID NO: 51152 - DNA, 25 bp, Saccharomyces pastorianus
tgtctgctccagaggctcaacaaca

SEQ ID NO: 51153 - DNA, 25 bp, Saccharomyces pastorianus
caagggtcgtcaaaacagaagagga

SEQ ID NO: 51154 - DNA, 25 bp, Saccharomyces pastorianus
acaagggtcgtcaaaacagaagagg

SEQ ID NO: 51155 - DNA, 25 bp, Saccharomyces pastorianus
gccgtaacaagggtcgtcaaaacag

SEQ ID NO: 51156 - DNA, 25 bp, Saccharomyces pastorianus
taacaagggtcgtcaaaacagaaga

SEQ ID NO: 51157 - DNA, 25 bp, Saccharomyces pastorianus
gtaacaagggtcgtcaaaacagaag

SEQ ID NO: 51158 - DNA, 25 bp, Saccharomyces pastorianus
aacaagggtcgtcaaaacagaagag

SEQ ID NO: 51159 - DNA, 25 bp, Saccharomyces pastorianus
tcggtggccgtaacaagggtcgtca

SEQ ID NO: 51160 - DNA, 25 bp, Saccharomyces pastorianus
atgggtcccagttaccaagctaggt

SEQ ID NO: 51161 - DNA, 25 bp, Saccharomyces pastorianus
ccaagctaggtagattagtcaaggc

SEQ ID NO: 51162 - DNA, 25 bp, Saccharomyces pastorianus
atgtctgctccagaggctcaacaac

SEQ ID NO: 51163 - DNA, 25 bp, Saccharomyces pastorianus
tgtctgctccagaggctcaacaaca

SEQ ID NO: 51164 - DNA, 25 bp, Saccharomyces pastorianus
caagggtcgtcaaaacagaagagga

SEQ ID NO: 51165 - DNA, 25 bp, Saccharomyces pastorianus
gccgtaacaagggtcgtcaaaacag

SEQ ID NO: 51166 - DNA, 25 bp, Saccharomyces pastorianus
gtaacaagggtcgtcaaaacagaag

SEQ ID NO: 51167 - DNA, 25 bp, Saccharomyces pastorianus
tccagaggctcaacaacaacaaaag

SEQ ID NO: 51168 - DNA, 25 bp, Saccharomyces pastorianus
aacaagggtcgtcaaaacagaagag

SEQ ID NO: 51169 - DNA, 25 bp, Saccharomyces pastorianus
gggatgggtcccagttaccaagcta

SEQ ID NO: 51170 - DNA, 25 bp, Saccharomyces pastorianus
accccagtaacctcttctgattgga

SEQ ID NO: 51171 - DNA, 25 bp, Saccharomyces pastorianus
aataacagacaacttggcaatgatg

SEQ ID NO: 51172 - DNA, 25 bp, Saccharomyces pastorianus
cccagtaacctcttctgattggaat

SEQ ID NO: 51173 - DNA, 25 bp, Saccharomyces pastorianus
tggaataacagacaacttggcaatg

SEQ ID NO: 51174 - DNA, 25 bp, Saccharomyces pastorianus
gaaccccagtaacctcttctgattg

SEQ ID NO: 51175 - DNA, 25 bp, Saccharomyces pastorianus
acttggcaatgatgataccagctct

SEQ ID NO: 51176 - DNA, 25 bp, Saccharomyces pastorianus
gtaacctcttctgattggaataaca

SEQ ID NO: 51177 - DNA, 25 bp, Saccharomyces pastorianus
tggttgacccaagttggaaccccag

SEQ ID NO: 51178 - DNA, 25 bp, Saccharomyces pastorianus
ttggaaccccagtaacctcttctga

SEQ ID NO: 51179 - DNA, 25 bp, Saccharomyces pastorianus
ggaataacagacaacttggcaatga

SEQ ID NO: 51180 - DNA, 25 bp, Saccharomyces pastorianus
gaataacagacaacttggcaatgat

SEQ ID NO: 51181 - DNA, 25 bp, Saccharomyces pastorianus
caagtttggcaacaaagtgtcaatg

SEQ ID NO: 51182 - DNA, 25 bp, Saccharomyces pastorianus
gatttggtattccttgactggccaa

SEQ ID NO: 51183 - DNA, 25 bp, Saccharomyces pastorianus
agtgtcaatgatttggtattccttg

SEQ ID NO: 51184 - DNA, 25 bp, Saccharomyces pastorianus
gtgtcaatgatttggtattccttga

SEQ ID NO: 51185 - DNA, 25 bp, Saccharomyces pastorianus
aatgatttggtattccttgactggc

SEQ ID NO: 51186 - DNA, 25 bp, Saccharomyces pastorianus
tgcaagtttggcaacaaagtgtcaa

SEQ ID NO: 51187 - DNA, 25 bp, Saccharomyces pastorianus
gcaagtttggcaacaaagtgtcaat

SEQ ID NO: 51188 - DNA, 25 bp, Saccharomyces pastorianus
atgatttggtattccttgactggcc

SEQ ID NO: 51189 - DNA, 25 bp, Saccharomyces pastorianus
tgatttggtattccttgactggcca

SEQ ID NO: 51190 - DNA, 25 bp, Saccharomyces pastorianus
tcaatgatttggtattccttgactg

SEQ ID NO: 51191 - DNA, 25 bp, Saccharomyces pastorianus
caatgatttggtattccttgactgg

SEQ ID NO: 51192 - DNA, 25 bp, Saccharomyces pastorianus
tccaaggctggtgacaaggtattct

SEQ ID NO: 51193 - DNA, 25 bp, Saccharomyces pastorianus
gaaccaccaaaaggttccaaggctg

SEQ ID NO: 51194 - DNA, 25 bp, Saccharomyces pastorianus
aacctcatttcaccaccgatagcgg

SEQ ID NO: 51195 - DNA, 25 bp, Saccharomyces pastorianus
ccgatagcggtctggaggttatctt

SEQ ID NO: 51196 - DNA, 25 bp, Saccharomyces pastorianus
aagtccacggccatggtcttgtgtg

SEQ ID NO: 51197 - DNA, 25 bp, Saccharomyces pastorianus
ggtattctttgaaggattcggtgat

SEQ ID NO: 51198 - DNA, 25 bp, Saccharomyces pastorianus
ggccatggtcttgtgtggttctaac

SEQ ID NO: 51199 - DNA, 25 bp, Saccharomyces pastorianus
taaagtcgagtttgtggaaccacca

SEQ ID NO: 51200 - DNA, 25 bp, Saccharomyces pastorianus
tgagaggtatcaagtccacggccat

SEQ ID NO: 51201 - DNA, 25 bp, Saccharomyces pastorianus
ggtgatgaagctccaatgaaacagt

SEQ ID NO: 51202 - DNA, 25 bp, Saccharomyces pastorianus
agtaagaaagttgactaacgccaag

SEQ ID NO: 51203 - DNA, 25 bp, Saccharomyces pastorianus
gattattcacgacattctttcaggt

SEQ ID NO: 51204 - DNA, 25 bp, Saccharomyces pastorianus
cattgccgccttcataatgggtatg

SEQ ID NO: 51205 - DNA, 25 bp, Saccharomyces pastorianus
gttgcatacactttcccgattattc

SEQ ID NO: 51206 - DNA, 25 bp, Saccharomyces pastorianus
ggttaaatttgttgccgttcataat

SEQ ID NO: 51207 - DNA, 25 bp, Saccharomyces pastorianus
acatccaccatttcagtctccattg

SEQ ID NO: 51208 - DNA, 25 bp, Saccharomyces pastorianus
gatacggcaccatctgcaattgggt

SEQ ID NO: 51209 - DNA, 25 bp, Saccharomyces pastorianus
aaatttccagccctcaagacatggt

SEQ ID NO: 51210 - DNA, 25 bp, Saccharomyces pastorianus
cagctgcttcaatgagtgtctacat

SEQ ID NO: 51211 - DNA, 25 bp, Saccharomyces pastorianus
gacatggtccttgctcaaagatacg

SEQ ID NO: 51212 - DNA, 25 bp, Saccharomyces pastorianus
atttttgctgtcacagctgcttcaa

SEQ ID NO: 51213 - DNA, 25 bp, Saccharomyces pastorianus
gtaggaactttcatcgttgcataca

SEQ ID NO: 51214 - DNA, 25 bp, Saccharomyces pastorianus
ggccagatttgtctccaagttggct

SEQ ID NO: 51215 - DNA, 25 bp, Saccharomyces pastorianus
ggaatctgctccagtcattgacacc

SEQ ID NO: 51216 - DNA, 25 bp, Saccharomyces pastorianus
ttgaagtctgcttccaaggaatctg

SEQ ID NO: 51217 - DNA, 25 bp, Saccharomyces pastorianus
gtcaaggccagatttgtctccaagt

SEQ ID NO: 51218 - DNA, 25 bp, Saccharomyces pastorianus
tacttgaagtctgcttccaaggaat

SEQ ID NO: 51219 - DNA, 25 bp, Saccharomyces pastorianus
tctgctccagtcattgacaccttgg

SEQ ID NO: 51220 - DNA, 25 bp, Saccharomyces pastorianus
aaggccagatttgtctccaagttgg

SEQ ID NO: 51221 - DNA, 25 bp, Saccharomyces pastorianus
caaacgtcccagttatcgtcaaggc

SEQ ID NO: 51222 - DNA, 25 bp, Saccharomyces pastorianus
agttatcgtcaaggccagatttgtc

SEQ ID NO: 51223 - DNA, 25 bp, Saccharomyces pastorianus
gtcccagttatcgtcaaggccagat

SEQ ID NO: 51224 - DNA, 25 bp, Saccharomyces pastorianus
atcgtcaaggccagatttgtctcca

SEQ ID NO: 51225 - DNA, 25 bp, Saccharomyces pastorianus
tcctgcaaatattctagcggttctt

SEQ ID NO: 51226 - DNA, 25 bp, Saccharomyces pastorianus
aaggatggacccagcgtctattaga

SEQ ID NO: 51227 - DNA, 25 bp, Saccharomyces pastorianus
acctcatcccaattatcagttagcg

SEQ ID NO: 51228 - DNA, 25 bp, Saccharomyces pastorianus
tgtgggtgacataactcctaacgac

SEQ ID NO: 51229 - DNA, 25 bp, Saccharomyces pastorianus
tcgttcatgatttcgcggagtcact

SEQ ID NO: 51230 - DNA, 25 bp, Saccharomyces pastorianus
tgggttgaccatgatatcgatccat

SEQ ID NO: 51231 - DNA, 25 bp, Saccharomyces pastorianus
gggcttaacttccatgttgattacg

SEQ ID NO: 51232 - DNA, 25 bp, Saccharomyces pastorianus
gttagcgttcttaaacatcgttcaa

SEQ ID NO: 51233 - DNA, 25 bp, Saccharomyces pastorianus
tagcggttctttcgaaacctcatcc

SEQ ID NO: 51234 - DNA, 25 bp, Saccharomyces pastorianus
tttggagcgccatcagtgacattaa

SEQ ID NO: 51235 - DNA, 25 bp, Saccharomyces pastorianus
tgtatcagaattgccctcgttcatg

SEQ ID NO: 51236 - DNA, 25 bp, Saccharomyces pastorianus
acaatttagggcatgactctgttaa

SEQ ID NO: 51237 - DNA, 25 bp, Saccharomyces pastorianus
gcagggtgccgtggcatttcaatca

SEQ ID NO: 51238 - DNA, 25 bp, Saccharomyces pastorianus
agaagcattcgagtgtctacaaaat

SEQ ID NO: 51239 - DNA, 25 bp, Saccharomyces pastorianus
attggtattcaagttgcatcgcaag

SEQ ID NO: 51240 - DNA, 25 bp, Saccharomyces pastorianus
attgacctagactctgtacatgcaa

SEQ ID NO: 51241 - DNA, 25 bp, Saccharomyces pastorianus
taaacttgttgggagcctgaagcag

SEQ ID NO: 51242 - DNA, 25 bp, Saccharomyces pastorianus
gttttcattttcatgatcctcggtt

SEQ ID NO: 51243 - DNA, 25 bp, Saccharomyces pastorianus
gaatgtcagtacgaatcataccaga

SEQ ID NO: 51244 - DNA, 25 bp, Saccharomyces pastorianus
catgatcctcggtttgatgctaaca

SEQ ID NO: 51245 - DNA, 25 bp, Saccharomyces pastorianus
gcatcgcaaggtctgatggacgtta

SEQ ID NO: 51246 - DNA, 25 bp, Saccharomyces pastorianus
gcaacagacgcgtatccacaagagg

SEQ ID NO: 51247 - DNA, 25 bp, Saccharomyces pastorianus
taatcagagcgtaccttcatttccg

SEQ ID NO: 51248 - DNA, 25 bp, Saccharomyces pastorianus
gaaaggtcttctctggccaaaatga

SEQ ID NO: 51249 - DNA, 25 bp, Saccharomyces pastorianus
agtagcatcccctgtgttttttatt

SEQ ID NO: 51250 - DNA, 25 bp, Saccharomyces pastorianus
gagacaaggtcaagcctaccctgta

SEQ ID NO: 51251 - DNA, 25 bp, Saccharomyces pastorianus
ttacctggagctaccgttcatattt

SEQ ID NO: 51252 - DNA, 25 bp, Saccharomyces pastorianus
ataattgctgttggagcgcctccca

SEQ ID NO: 51253 - DNA, 25 bp, Saccharomyces pastorianus
aactccggatattgcgtccaatggc

SEQ ID NO: 51254 - DNA, 25 bp, Saccharomyces pastorianus
aactcttagcgcaaacaggtctcac

SEQ ID NO: 51255 - DNA, 25 bp, Saccharomyces pastorianus
tagaaaagccgctgtcaggcccaat

SEQ ID NO: 51256 - DNA, 25 bp, Saccharomyces pastorianus
atgcctcagcctgttgggatttcca

SEQ ID NO: 51257 - DNA, 25 bp, Saccharomyces pastorianus
ccgcccgtctatagtcattatcaag

SEQ ID NO: 51258 - DNA, 25 bp, Saccharomyces pastorianus
gcgttacctggcatacgtcttgtta

SEQ ID NO: 51259 - DNA, 25 bp, Saccharomyces pastorianus
tatggaacaccattcgttgatgatt

SEQ ID NO: 51260 - DNA, 25 bp, Saccharomyces pastorianus
aagatacctttcgttgcgttacctg

SEQ ID NO: 51261 - DNA, 25 bp, Saccharomyces pastorianus
gattcaattgaggacgcctacactg

SEQ ID NO: 51262 - DNA, 25 bp, Saccharomyces pastorianus
gacagcccttgccagaatatccatt

SEQ ID NO: 51263 - DNA, 25 bp, Saccharomyces pastorianus
acaccgccatatacttcttgcaagg

SEQ ID NO: 51264 - DNA, 25 bp, Saccharomyces pastorianus
ctacactgccttaattctctacaag

SEQ ID NO: 51265 - DNA, 25 bp, Saccharomyces pastorianus
tgatgccgagtttgtctcgttgcaa

SEQ ID NO: 51266 - DNA, 25 bp, Saccharomyces pastorianus
cttcccggtgatctagatcctgaga

SEQ ID NO: 51267 - DNA, 25 bp, Saccharomyces pastorianus
gatacagtggtattcttcccggtga

SEQ ID NO: 51268 - DNA, 25 bp, Saccharomyces pastorianus
cagcttggctgtatatttgtcggac

SEQ ID NO: 51269 - DNA, 25 bp, Saccharomyces pastorianus
tggtacggataactttgattttact

SEQ ID NO: 51270 - DNA, 25 bp, Saccharomyces pastorianus
gccattgacgacaggcaggtttggt

SEQ ID NO: 51271 - DNA, 25 bp, Saccharomyces pastorianus
atgtacgccgcaacgaataaatatg

SEQ ID NO: 51272 - DNA, 25 bp, Saccharomyces pastorianus
gaagtaccaccagcgtatagtagac

SEQ ID NO: 51273 - DNA, 25 bp, Saccharomyces pastorianus
gtatagtagactgccattgacgaca

SEQ ID NO: 51274 - DNA, 25 bp, Saccharomyces pastorianus
attccggattagatccagacgtcga

SEQ ID NO: 51275 - DNA, 25 bp, Saccharomyces pastorianus
attagatccagacgtcgataaccat

SEQ ID NO: 51276 - DNA, 25 bp, Saccharomyces pastorianus
acactgaatattccggattagatcc

SEQ ID NO: 51277 - DNA, 25 bp, Saccharomyces pastorianus
aataaatatgaagtaccaccagcgt

SEQ ID NO: 51278 - DNA, 25 bp, Saccharomyces pastorianus
acgacaggcaggtttggtacggata

SEQ ID NO: 51279 - DNA, 25 bp, Saccharomyces pastorianus
caggcaggtttggtacggataactt

SEQ ID NO: 51280 - DNA, 25 bp, Saccharomyces pastorianus
gcatggcctcatgtagttttcaaaa

SEQ ID NO: 51281 - DNA, 25 bp, Saccharomyces pastorianus
gagttttctttatcacctaatggtg

SEQ ID NO: 51282 - DNA, 25 bp, Saccharomyces pastorianus
ctgttatgatcgttggctctagttc

SEQ ID NO: 51283 - DNA, 25 bp, Saccharomyces pastorianus
gttcacccttgtcagtcaatcaaag

SEQ ID NO: 51284 - DNA, 25 bp, Saccharomyces pastorianus
gagaacacagtacgttcacccttgt

SEQ ID NO: 51285 - DNA, 25 bp, Saccharomyces pastorianus
gaaggcactataccacagctatcag

SEQ ID NO: 51286 - DNA, 25 bp, Saccharomyces pastorianus
ggctctagttctggttcttttgatt

SEQ ID NO: 51287 - DNA, 25 bp, Saccharomyces pastorianus
ggcatatccagactacttcaatgat

SEQ ID NO: 51288 - DNA, 25 bp, Saccharomyces pastorianus
acagctatcaggtaagcctccttta

SEQ ID NO: 51289 - DNA, 25 bp, Saccharomyces pastorianus
gaggctgataaccatctagacacat

SEQ ID NO: 51290 - DNA, 25 bp, Saccharomyces pastorianus
gaatttcccctgttacggtatgatc

SEQ ID NO: 51291 - DNA, 25 bp, Saccharomyces pastorianus
tctagagtcattaacgggcgtacgt

SEQ ID NO: 51292 - DNA, 25 bp, Saccharomyces pastorianus
cttatcatcctttgcccagggaata

SEQ ID NO: 51293 - DNA, 25 bp, Saccharomyces pastorianus
ggatattgtttacacgctttgacat

SEQ ID NO: 51294 - DNA, 25 bp, Saccharomyces pastorianus
gccatcacgggatgtactttccgat

SEQ ID NO: 51295 - DNA, 25 bp, Saccharomyces pastorianus
tgaagctcttgtttccagttaaaat

SEQ ID NO: 51296 - DNA, 25 bp, Saccharomyces pastorianus
aataagtggaatcctcccttcattc

SEQ ID NO: 51297 - DNA, 25 bp, Saccharomyces pastorianus
tcaacaagactattcgccatcacgg

SEQ ID NO: 51298 - DNA, 25 bp, Saccharomyces pastorianus
agtcttttaccgcatatccttatca

SEQ ID NO: 51299 - DNA, 25 bp, Saccharomyces pastorianus
gcgacactttcagtagagtttcttc

SEQ ID NO: 51300 - DNA, 25 bp, Saccharomyces pastorianus
gtattttccaacttgtttattgcca

SEQ ID NO: 51301 - DNA, 25 bp, Saccharomyces pastorianus
gcagagtgttgagcctggagaccaa

SEQ ID NO: 51302 - DNA, 25 bp, Saccharomyces pastorianus
gacactaaactaatagacggcctgg

SEQ ID NO: 51303 - DNA, 25 bp, Saccharomyces pastorianus
ttaactttccgctcaacaggtctaa

SEQ ID NO: 51304 - DNA, 25 bp, Saccharomyces pastorianus
gctccaagagtatttttcttcaagt

SEQ ID NO: 51305 - DNA, 25 bp, Saccharomyces pastorianus
aagccgactttaatgaacaggatca

SEQ ID NO: 51306 - DNA, 25 bp, Saccharomyces pastorianus
atctggctcttacaagccgacttta

SEQ ID NO: 51307 - DNA, 25 bp, Saccharomyces pastorianus
aaattcaccatctggctcttacaag

SEQ ID NO: 51308 - DNA, 25 bp, Saccharomyces pastorianus
acaggtctaatctcacagagactca

SEQ ID NO: 51309 - DNA, 25 bp, Saccharomyces pastorianus
gttggaattggttctagcggaaaat

SEQ ID NO: 51310 - DNA, 25 bp, Saccharomyces pastorianus
gttaatgagggatcaacttcagttg

SEQ ID NO: 51311 - DNA, 25 bp, Saccharomyces pastorianus
gacggcctggataagaaagttaact

SEQ ID NO: 51312 - DNA, 25 bp, Saccharomyces pastorianus
tgcattctctgcttactatatcgat

SEQ ID NO: 51313 - DNA, 25 bp, Saccharomyces pastorianus
agctaccctgatagtcctgcttcaa

SEQ ID NO: 51314 - DNA, 25 bp, Saccharomyces pastorianus
gacagctaccctgatagtcctgctt

SEQ ID NO: 51315 - DNA, 25 bp, Saccharomyces pastorianus
aacagccgtactcaacgtcgtggaa

SEQ ID NO: 51316 - DNA, 25 bp, Saccharomyces pastorianus
aaagtttcttggacagctaccctga

SEQ ID NO: 51317 - DNA, 25 bp, Saccharomyces pastorianus
tgatagtcctgcttcaacagccgta

SEQ ID NO: 51318 - DNA, 25 bp, Saccharomyces pastorianus
atagtcctgcttcaacagccgtact

SEQ ID NO: 51319 - DNA, 25 bp, Saccharomyces pastorianus
ttcttggacagctaccctgatagtc

SEQ ID NO: 51320 - DNA, 25 bp, Saccharomyces pastorianus
taccctgatagtcctgcttcaacag

SEQ ID NO: 51321 - DNA, 25 bp, Saccharomyces pastorianus
gtgaaagtttcttggacagctaccc

SEQ ID NO: 51322 - DNA, 25 bp, Saccharomyces pastorianus
agtttcttggacagctaccctgata

SEQ ID NO: 51323 - DNA, 25 bp, Saccharomyces pastorianus
ttcaacagccgtactcaacgtcgtg

SEQ ID NO: 51324 - DNA, 25 bp, Saccharomyces pastorianus
gtagccgataacctagccaccatgt

SEQ ID NO: 51325 - DNA, 25 bp, Saccharomyces pastorianus
atgtccatccaatatatgctcccag

SEQ ID NO: 51326 - DNA, 25 bp, Saccharomyces pastorianus
tgggtccgttcccttggatccaagg

SEQ ID NO: 51327 - DNA, 25 bp, Saccharomyces pastorianus
tatatgctcccagaagacgactcag

SEQ ID NO: 51328 - DNA, 25 bp, Saccharomyces pastorianus
cgcctggaacgtccgatgaacacat

SEQ ID NO: 51329 - DNA, 25 bp, Saccharomyces pastorianus
actactcctcaagaagtggcactgc

SEQ ID NO: 51330 - DNA, 25 bp, Saccharomyces pastorianus
attatttggtgatcgacactccgcc

SEQ ID NO: 51331 - DNA, 25 bp, Saccharomyces pastorianus
gagaccgtgcacgaatcgaattccg

SEQ ID NO: 51332 - DNA, 25 bp, Saccharomyces pastorianus
tggacacccgtctatgtagccgata

SEQ ID NO: 51333 - DNA, 25 bp, Saccharomyces pastorianus
aagtggcactgctagacgtacgaaa

SEQ ID NO: 51334 - DNA, 25 bp, Saccharomyces pastorianus
actacaggtggtggtgaagcgcttt

SEQ ID NO: 51335 - DNA, 25 bp, Saccharomyces pastorianus
cagaagcttggcactggctgcaatt

SEQ ID NO: 51336 - DNA, 25 bp, Saccharomyces pastorianus
gccgttatcgggtacctggatctag

SEQ ID NO: 51337 - DNA, 25 bp, Saccharomyces pastorianus
ggtgatcatgacatcgctgttctac

SEQ ID NO: 51338 - DNA, 25 bp, Saccharomyces pastorianus
tggctgcaattgaggcctggccaac

SEQ ID NO: 51339 - DNA, 25 bp, Saccharomyces pastorianus
aaagagaagccgtcgccgatgcttg

SEQ ID NO: 51340 - DNA, 25 bp, Saccharomyces pastorianus
atacgaccattgttgacgcggctca

SEQ ID NO: 51341 - DNA, 25 bp, Saccharomyces pastorianus
gatgcttggcactggctgaagttga

SEQ ID NO: 51342 - DNA, 25 bp, Saccharomyces pastorianus
agaagctgacgcttggcattggttg

SEQ ID NO: 51343 - DNA, 25 bp, Saccharomyces pastorianus
tgccagtggcctattattcatcaat

SEQ ID NO: 51344 - DNA, 25 bp, Saccharomyces pastorianus
ttctgtgatttccactattgcccta

SEQ ID NO: 51345 - DNA, 25 bp, Saccharomyces pastorianus
attcagcaattctactgccagtggc

SEQ ID NO: 51346 - DNA, 25 bp, Saccharomyces pastorianus
ggaaatggcaactccagctaataag

SEQ ID NO: 51347 - DNA, 25 bp, Saccharomyces pastorianus
ggcccgcctcacagtaatcatgaaa

SEQ ID NO: 51348 - DNA, 25 bp, Saccharomyces pastorianus
aaatctaccatgtgtgaatcaaact

SEQ ID NO: 51349 - DNA, 25 bp, Saccharomyces pastorianus
caccaaaggttacattcatttccaa

SEQ ID NO: 51350 - DNA, 25 bp, Saccharomyces pastorianus
aacaggatctattctctttccatag

SEQ ID NO: 51351 - DNA, 25 bp, Saccharomyces pastorianus
gggcatacaccatggaaaccctatt

SEQ ID NO: 51352 - DNA, 25 bp, Saccharomyces pastorianus
actttcacactctgcgtgactggaa

SEQ ID NO: 51353 - DNA, 25 bp, Saccharomyces pastorianus
ccagattctccaccaaaggttacat

SEQ ID NO: 51354 - DNA, 25 bp, Saccharomyces pastorianus
gtgaatcaaactacaggcgaggtcc

SEQ ID NO: 51355 - DNA, 25 bp, Saccharomyces pastorianus
tctttccatagagtgtggcccaaac

SEQ ID NO: 51356 - DNA, 25 bp, Saccharomyces pastorianus
ggcgaggtccaaccggactttcaca

SEQ ID NO: 51357 - DNA, 25 bp, Saccharomyces pastorianus
tcaactcccctgttttttagcaact

SEQ ID NO: 51358 - DNA, 25 bp, Saccharomyces pastorianus
gtaaagcggaaactactatccatct

SEQ ID NO: 51359 - DNA, 25 bp, Saccharomyces pastorianus
gacatttgattgctgacttaaacga

SEQ ID NO: 51360 - DNA, 25 bp, Saccharomyces pastorianus
agacttaacgaattgcaacttgaaa

SEQ ID NO: 51361 - DNA, 25 bp, Saccharomyces pastorianus
gtccattcattagtgaccaatttat

SEQ ID NO: 51362 - DNA, 25 bp, Saccharomyces pastorianus
aataccaatttctgtctatgattca

SEQ ID NO: 51363 - DNA, 25 bp, Saccharomyces pastorianus
ttacaactgcgcgatggtccattca

SEQ ID NO: 51364 - DNA, 25 bp, Saccharomyces pastorianus
gaattccagcaagatggtcgagtta

SEQ ID NO: 51365 - DNA, 25 bp, Saccharomyces pastorianus
ggttttccaggcttaagcaggtctt

SEQ ID NO: 51366 - DNA, 25 bp, Saccharomyces pastorianus
ggatgatctcatgaacttatgggtt

SEQ ID NO: 51367 - DNA, 25 bp, Saccharomyces pastorianus
agatagaggtcaactcccctgtttt

SEQ ID NO: 51368 - DNA, 25 bp, Saccharomyces pastorianus
atacaaggccacgattggtgaatta

SEQ ID NO: 51369 - DNA, 25 bp, Saccharomyces pastorianus
aggttcacctagtatggacaataag

SEQ ID NO: 51370 - DNA, 25 bp, Saccharomyces pastorianus
gggtcatctccatttctagaaagtc

SEQ ID NO: 51371 - DNA, 25 bp, Saccharomyces pastorianus
tagaaagtcctaaaggttcacctag

SEQ ID NO: 51372 - DNA, 25 bp, Saccharomyces pastorianus
aagtgacgaaccaatgtgaccattt

SEQ ID NO: 51373 - DNA, 25 bp, Saccharomyces pastorianus
aaggtaaccgtcagattcaagcgct

SEQ ID NO: 51374 - DNA, 25 bp, Saccharomyces pastorianus
gtgaccatttcacgctggaatcgga

SEQ ID NO: 51375 - DNA, 25 bp, Saccharomyces pastorianus
agcaatagcggtgggtcatctccat

SEQ ID NO: 51376 - DNA, 25 bp, Saccharomyces pastorianus
gcagttacagaagcagacgaatatt

SEQ ID NO: 51377 - DNA, 25 bp, Saccharomyces pastorianus
gtctacaagcgacaaggacaaactt

SEQ ID NO: 51378 - DNA, 25 bp, Saccharomyces pastorianus
gattcaagcgctgcaattcaaatta

SEQ ID NO: 51379 - DNA, 25 bp, Saccharomyces pastorianus
ctccttgtcatccaaaagcgtttct

SEQ ID NO: 51380 - DNA, 25 bp, Saccharomyces pastorianus
cacctgggttttcgatttctttgca

SEQ ID NO: 51381 - DNA, 25 bp, Saccharomyces pastorianus
gggactccacacaccaagtttgatg

SEQ ID NO: 51382 - DNA, 25 bp, Saccharomyces pastorianus
gaaatcgcttttagcgggactccac

SEQ ID NO: 51383 - DNA, 25 bp, Saccharomyces pastorianus
gcgtttctaatgctcggcctttaaa

SEQ ID NO: 51384 - DNA, 25 bp, Saccharomyces pastorianus
tcaatctttttcaagcacgggcacc

SEQ ID NO: 51385 - DNA, 25 bp, Saccharomyces pastorianus
tcagggtacacaaaggccatcaata

SEQ ID NO: 51386 - DNA, 25 bp, Saccharomyces pastorianus
aagcaataacaacctgccacctggg

SEQ ID NO: 51387 - DNA, 25 bp, Saccharomyces pastorianus
aaccacttccaaggtcagaggtgaa

SEQ ID NO: 51388 - DNA, 25 bp, Saccharomyces pastorianus
gtagcagccatgaaacccgttagaa

SEQ ID NO: 51389 - DNA, 25 bp, Saccharomyces pastorianus
ctgggcactagaggcttttcaacaa

SEQ ID NO: 51390 - DNA, 25 bp, Saccharomyces pastorianus
atcgattcttacacgtgctcggaca

SEQ ID NO: 51391 - DNA, 25 bp, Saccharomyces pastorianus
ggagagcgtactaaaaccactattt

SEQ ID NO: 51392 - DNA, 25 bp, Saccharomyces pastorianus
aaacgttctgatttcttggagagcg

SEQ ID NO: 51393 - DNA, 25 bp, Saccharomyces pastorianus
acagttcttgttaccgttgctttca

SEQ ID NO: 51394 - DNA, 25 bp, Saccharomyces pastorianus
gaggtgctagattttcccactgtaa

SEQ ID NO: 51395 - DNA, 25 bp, Saccharomyces pastorianus
gggctatttaccaagacaaccagtt

SEQ ID NO: 51396 - DNA, 25 bp, Saccharomyces pastorianus
gccaccgtttgcttgatcgatagtt

SEQ ID NO: 51397 - DNA, 25 bp, Saccharomyces pastorianus
attgcaaatcccgttagctttagag

SEQ ID NO: 51398 - DNA, 25 bp, Saccharomyces pastorianus
cactttatctcaactatcctttcaa

SEQ ID NO: 51399 - DNA, 25 bp, Saccharomyces pastorianus
aagtgctacgaatttcccaatcctt

SEQ ID NO: 51400 - DNA, 25 bp, Saccharomyces pastorianus
gctcggacactattcttcctttgtt

SEQ ID NO: 51401 - DNA, 25 bp, Saccharomyces pastorianus
ggaactaatcaggtgcactattgca

SEQ ID NO: 51402 - DNA, 25 bp, Saccharomyces pastorianus
caacagcgcgtggatattactaata

SEQ ID NO: 51403 - DNA, 25 bp, Saccharomyces pastorianus
attgcagttgttaaccgctctttac

SEQ ID NO: 51404 - DNA, 25 bp, Saccharomyces pastorianus
gagaaatgcgacttcacctggacaa

SEQ ID NO: 51405 - DNA, 25 bp, Saccharomyces pastorianus
gatagccaaaatttagccgccaagt

SEQ ID NO: 51406 - DNA, 25 bp, Saccharomyces pastorianus
ggaacaattccgtattgccctcttc

SEQ ID NO: 51407 - DNA, 25 bp, Saccharomyces pastorianus
tcgaggaggcaggttttccgtcctt

SEQ ID NO: 51408 - DNA, 25 bp, Saccharomyces pastorianus
agttggtatggtctatctgaagcta

SEQ ID NO: 51409 - DNA, 25 bp, Saccharomyces pastorianus
gggccaagacggaatacatgctcat

SEQ ID NO: 51410 - DNA, 25 bp, Saccharomyces pastorianus
acatgctcatttcctcttctaaaat

SEQ ID NO: 51411 - DNA, 25 bp, Saccharomyces pastorianus
aaccgctctttacacgatagccaaa

SEQ ID NO: 51412 - DNA, 25 bp, Saccharomyces pastorianus
gctttaatgaccacggtagtcccgc

SEQ ID NO: 51413 - DNA, 25 bp, Saccharomyces pastorianus
atggctaggcctactgagaacgcta

SEQ ID NO: 51414 - DNA, 25 bp, Saccharomyces pastorianus
aaaatttggcgccacacacagcagc

SEQ ID NO: 51415 - DNA, 25 bp, Saccharomyces pastorianus
ggagccggctatcgtcgagatccaa

SEQ ID NO: 51416 - DNA, 25 bp, Saccharomyces pastorianus
gaagtggactgacgtctttcctggc

SEQ ID NO: 51417 - DNA, 25 bp, Saccharomyces pastorianus
cacagcgcactccaattctaatata

SEQ ID NO: 51418 - DNA, 25 bp, Saccharomyces pastorianus
aaaacaagcgataccctgccaagct

SEQ ID NO: 51419 - DNA, 25 bp, Saccharomyces pastorianus
aacgaacacgggagtgccagtgcca

SEQ ID NO: 51420 - DNA, 25 bp, Saccharomyces pastorianus
aacgacgacaatgacggcggtggca

SEQ ID NO: 51421 - DNA, 25 bp, Saccharomyces pastorianus
aattctgttcattctatcccttcga

SEQ ID NO: 51422 - DNA, 25 bp, Saccharomyces pastorianus
atatactctcaccagggtatcctaa

SEQ ID NO: 51423 - DNA, 25 bp, Saccharomyces pastorianus
gaatcttccaaaccaacctatacaa

SEQ ID NO: 51424 - DNA, 25 bp, Saccharomyces pastorianus
gggcacaccattgggaatcttccaa

SEQ ID NO: 51425 - DNA, 25 bp, Saccharomyces pastorianus
agggcgccagcttctagtggagcta

SEQ ID NO: 51426 - DNA, 25 bp, Saccharomyces pastorianus
aaggaagccatccactagcacacat

SEQ ID NO: 51427 - DNA, 25 bp, Saccharomyces pastorianus
gagaagatatcagtcgcacaagtcg

SEQ ID NO: 51428 - DNA, 25 bp, Saccharomyces pastorianus
aacattccgtatatagggcgccagc

SEQ ID NO: 51429 - DNA, 25 bp, Saccharomyces pastorianus
gtggagctactaacgtacagccccg

SEQ ID NO: 51430 - DNA, 25 bp, Saccharomyces pastorianus
agtcgagacctgcttttgttaataa

SEQ ID NO: 51431 - DNA, 25 bp, Saccharomyces pastorianus
acttcgcttcttttgttaggcaact

SEQ ID NO: 51432 - DNA, 25 bp, Saccharomyces pastorianus
aatactttgttgtcttctaagctac

SEQ ID NO: 51433 - DNA, 25 bp, Saccharomyces pastorianus
tctccttcctttttcaatgactcaa

SEQ ID NO: 51434 - DNA, 25 bp, Saccharomyces pastorianus
ttcgctagtatacttagggacatgc

SEQ ID NO: 51435 - DNA, 25 bp, Saccharomyces pastorianus
tcgctagtatacttagggacatgct

SEQ ID NO: 51436 - DNA, 25 bp, Saccharomyces pastorianus
tggttaacgctggtgtaatgcgcgt

SEQ ID NO: 51437 - DNA, 25 bp, Saccharomyces pastorianus
gatagaggaggatctcttcgctagt

SEQ ID NO: 51438 - DNA, 25 bp, Saccharomyces pastorianus
atgcgcgttttcatccagatagagg

SEQ ID NO: 51439 - DNA, 25 bp, Saccharomyces pastorianus
gtgtaatgcgcgttttcatccagat

SEQ ID NO: 51440 - DNA, 25 bp, Saccharomyces pastorianus
ctagtatacttagggacatgctgtg

SEQ ID NO: 51441 - DNA, 25 bp, Saccharomyces pastorianus
gctagtatacttagggacatgctgt

SEQ ID NO: 51442 - DNA, 25 bp, Saccharomyces pastorianus
gttaacgctggtgtaatgcgcgttt

SEQ ID NO: 51443 - DNA, 25 bp, Saccharomyces pastorianus
tagtatacttagggacatgctgtgt

SEQ ID NO: 51444 - DNA, 25 bp, Saccharomyces pastorianus
cttcgctagtatacttagggacatg

SEQ ID NO: 51445 - DNA, 25 bp, Saccharomyces pastorianus
cagtgaacacagttttggcctccgg

SEQ ID NO: 51446 - DNA, 25 bp, Saccharomyces pastorianus
tctttcaagacctttggagcagcct

SEQ ID NO: 51447 - DNA, 25 bp, Saccharomyces pastorianus
gtcgaaagaatccaacttcacagtg

SEQ ID NO: 51448 - DNA, 25 bp, Saccharomyces pastorianus
gaatttcttagcttcaactagtgag

SEQ ID NO: 51449 - DNA, 25 bp, Saccharomyces pastorianus
gtgagagacctagtaaacctttgac

SEQ ID NO: 51450 - DNA, 25 bp, Saccharomyces pastorianus
acagttttggcctccggcttggctt

SEQ ID NO: 51451 - DNA, 25 bp, Saccharomyces pastorianus
agctgagcctgctgcgttaccagca

SEQ ID NO: 51452 - DNA, 25 bp, Saccharomyces pastorianus
gtaaacctttgacttctttgatgac

SEQ ID NO: 51453 - DNA, 25 bp, Saccharomyces pastorianus
ggagcagcctcgacgaatttcttag

SEQ ID NO: 51454 - DNA, 25 bp, Saccharomyces pastorianus
gacttctttgatgactttagccttg

SEQ ID NO: 51455 - DNA, 25 bp, Saccharomyces pastorianus
tttagccttggtctttgcgtcgaaa

SEQ ID NO: 51456 - DNA, 25 bp, Saccharomyces pastorianus
tccattggagactatcgagccgtat

SEQ ID NO: 51457 - DNA, 25 bp, Saccharomyces pastorianus
atcgagccgtatgtcgctggcgaaa

SEQ ID NO: 51458 - DNA, 25 bp, Saccharomyces pastorianus
tgggctactgccattgaccaaagca

SEQ ID NO: 51459 - DNA, 25 bp, Saccharomyces pastorianus
gttatggctgccgttatggtatttt

SEQ ID NO: 51460 - DNA, 25 bp, Saccharomyces pastorianus
taaggcctgctgttcccattcaatg

SEQ ID NO: 51461 - DNA, 25 bp, Saccharomyces pastorianus
tagaatcattcaaagccagccatac

SEQ ID NO: 51462 - DNA, 25 bp, Saccharomyces pastorianus
attacccttgggaaatgcttggagt

SEQ ID NO: 51463 - DNA, 25 bp, Saccharomyces pastorianus
aatgcttggagtttcgctctttaat

SEQ ID NO: 51464 - DNA, 25 bp, Saccharomyces pastorianus
atttttgacctccatttcatcatcc

SEQ ID NO: 51465 - DNA, 25 bp, Saccharomyces pastorianus
gctctttaatttcctcttgcacatg

SEQ ID NO: 51466 - DNA, 25 bp, Saccharomyces pastorianus
aagggtcctccctaatgatccatgg

SEQ ID NO: 51467 - DNA, 25 bp, Saccharomyces pastorianus
gaaaaaatcactccctttctgtctt

SEQ ID NO: 51468 - DNA, 25 bp, Saccharomyces pastorianus
aatgccgtcggtctaactggtgatg

SEQ ID NO: 51469 - DNA, 25 bp, Saccharomyces pastorianus
tataaactctgcattgagccccttc

SEQ ID NO: 51470 - DNA, 25 bp, Saccharomyces pastorianus
aaggcgttggcgcaaactctctacg

SEQ ID NO: 51471 - DNA, 25 bp, Saccharomyces pastorianus
ctgccgttcggtctggattttaaag

SEQ ID NO: 51472 - DNA, 25 bp, Saccharomyces pastorianus
gcacgtgcttgtagctacagaccta

SEQ ID NO: 51473 - DNA, 25 bp, Saccharomyces pastorianus
gttgttctctacgacgtgccgaaaa

SEQ ID NO: 51474 - DNA, 25 bp, Saccharomyces pastorianus
tggccagaggcctcaacttcaaagg

SEQ ID NO: 51475 - DNA, 25 bp, Saccharomyces pastorianus
acgatgacactgaacccgggtttga

SEQ ID NO: 51476 - DNA, 25 bp, Saccharomyces pastorianus
aaaaagaagtccctgcacgtgcttg

SEQ ID NO: 51477 - DNA, 25 bp, Saccharomyces pastorianus
aatctcgcagttaaggcctccagag

SEQ ID NO: 51478 - DNA, 25 bp, Saccharomyces pastorianus
agtacgtgggtacgcacaacttcca

SEQ ID NO: 51479 - DNA, 25 bp, Saccharomyces pastorianus
cgcgactacgtggatctcttgagca

SEQ ID NO: 51480 - DNA, 25 bp, Saccharomyces pastorianus
gtgttcgcgcagtacaacagcaagc

SEQ ID NO: 51481 - DNA, 25 bp, Saccharomyces pastorianus
aggacgagcctttaacgcgcgacta

SEQ ID NO: 51482 - DNA, 25 bp, Saccharomyces pastorianus
gattcggcgcgcaaccagatgagga

SEQ ID NO: 51483 - DNA, 25 bp, Saccharomyces pastorianus
gaatgccagatctacactgcggtgg

SEQ ID NO: 51484 - DNA, 25 bp, Saccharomyces pastorianus
gagggcaaagctgctcgctctcgag

SEQ ID NO: 51485 - DNA, 25 bp, Saccharomyces pastorianus
aggaagtcgtagtagcaccggccgc

SEQ ID NO: 51486 - DNA, 25 bp, Saccharomyces pastorianus
atgctgcaccagatccggcggatgg

SEQ ID NO: 51487 - DNA, 25 bp, Saccharomyces pastorianus
tcgaggccgcgatgcagcagtacgt

SEQ ID NO: 51488 - DNA, 25 bp, Saccharomyces pastorianus
gagcgccaagcggtacatcaaggaa

SEQ ID NO: 51489 - DNA, 25 bp, Saccharomyces pastorianus
ggaaatgatcatctcttctccatca

SEQ ID NO: 51490 - DNA, 25 bp, Saccharomyces pastorianus
aaagaagtctttgtcaccgatggtg

SEQ ID NO: 51491 - DNA, 25 bp, Saccharomyces pastorianus
tgatcatctcttctccatcagacgg

SEQ ID NO: 51492 - DNA, 25 bp, Saccharomyces pastorianus
gaagtctttgtcaccgatggtgaaa

SEQ ID NO: 51493 - DNA, 25 bp, Saccharomyces pastorianus
ctcttccgatttgttggtcttattg

SEQ ID NO: 51494 - DNA, 25 bp, Saccharomyces pastorianus
gacggccaagtcaaagaagtctttg

SEQ ID NO: 51495 - DNA, 25 bp, Saccharomyces pastorianus
aaatgatcatctcttctccatcaga

SEQ ID NO: 51496 - DNA, 25 bp, Saccharomyces pastorianus
aaatgtggactcttccgatttgttg

SEQ ID NO: 51497 - DNA, 25 bp, Saccharomyces pastorianus
ggactcttccgatttgttggtctta

SEQ ID NO: 51498 - DNA, 25 bp, Saccharomyces pastorianus
ttctccatcagacggccaagtcaaa

SEQ ID NO: 51499 - DNA, 25 bp, Saccharomyces pastorianus
atgtggactcttccgatttgttggt

SEQ ID NO: 51500 - DNA, 25 bp, Saccharomyces pastorianus
aatacggtgacttgtcagtactacc

SEQ ID NO: 51501 - DNA, 25 bp, Saccharomyces pastorianus
aaatccgcgttgctgatagatcaca

SEQ ID NO: 51502 - DNA, 25 bp, Saccharomyces pastorianus
agttgacatgtcgtccaggtttgga

SEQ ID NO: 51503 - DNA, 25 bp, Saccharomyces pastorianus
agctaactctttggatttccctgac

SEQ ID NO: 51504 - DNA, 25 bp, Saccharomyces pastorianus
ttcttgtctccgctagatacagatg

SEQ ID NO: 51505 - DNA, 25 bp, Saccharomyces pastorianus
gttgttggtgacttggcccaattca

SEQ ID NO: 51506 - DNA, 25 bp, Saccharomyces pastorianus
gaatgtgacgttgcctcttacaata

SEQ ID NO: 51507 - DNA, 25 bp, Saccharomyces pastorianus
gaaactgtcacccaatcaaaggcgg

SEQ ID NO: 51508 - DNA, 25 bp, Saccharomyces pastorianus
gacttggcccaattcatggtttcaa

SEQ ID NO: 51509 - DNA, 25 bp, Saccharomyces pastorianus
acgtcaaacgtctagctaactcttt

SEQ ID NO: 51510 - DNA, 25 bp, Saccharomyces pastorianus
accaaccaaatgtttcttgtctccg

SEQ ID NO: 51511 - DNA, 25 bp, Saccharomyces pastorianus
gggtcaaataatctcgttgcaatta

SEQ ID NO: 51512 - DNA, 25 bp, Saccharomyces pastorianus
actttgatgttgtttgttagcccag

SEQ ID NO: 51513 - DNA, 25 bp, Saccharomyces pastorianus
cggctccaaataccaagactaaagt

SEQ ID NO: 51514 - DNA, 25 bp, Saccharomyces pastorianus
gcttcgaagctctataacgctgcaa

SEQ ID NO: 51515 - DNA, 25 bp, Saccharomyces pastorianus
ttataaactgcataccggctccaaa

SEQ ID NO: 51516 - DNA, 25 bp, Saccharomyces pastorianus
aacgctgcaatgtcttgtggcttca

SEQ ID NO: 51517 - DNA, 25 bp, Saccharomyces pastorianus
gtttgttagcccagaatatgtaagt

SEQ ID NO: 51518 - DNA, 25 bp, Saccharomyces pastorianus
tgtagagacttccagatagcttcga

SEQ ID NO: 51519 - DNA, 25 bp, Saccharomyces pastorianus
atgagccgttcatattgcatgtcaa

SEQ ID NO: 51520 - DNA, 25 bp, Saccharomyces pastorianus
ttaaactggatgtgccaatcggcta

SEQ ID NO: 51521 - DNA, 25 bp, Saccharomyces pastorianus
caatcggctatttggatgagagttc

SEQ ID NO: 51522 - DNA, 25 bp, Saccharomyces pastorianus
gaacttgacccgtggtatcaaccta

SEQ ID NO: 51523 - DNA, 25 bp, Saccharomyces pastorianus
gatccagtgcttttaagaccaggta

SEQ ID NO: 51524 - DNA, 25 bp, Saccharomyces pastorianus
tgagggttcccgtatggttcgtgaa

SEQ ID NO: 51525 - DNA, 25 bp, Saccharomyces pastorianus
gaaatcgattcgatcgggtccaccc

SEQ ID NO: 51526 - DNA, 25 bp, Saccharomyces pastorianus
aagctggtatgtttgccctaagaga

SEQ ID NO: 51527 - DNA, 25 bp, Saccharomyces pastorianus
agttcatcagagtcagtggtgccga

SEQ ID NO: 51528 - DNA, 25 bp, Saccharomyces pastorianus
atgctccttccattatcttcatgga

SEQ ID NO: 51529 - DNA, 25 bp, Saccharomyces pastorianus
atagaaagatcgagttccctcctcc

SEQ ID NO: 51530 - DNA, 25 bp, Saccharomyces pastorianus
gaatacacgtcacccaagaggattt

SEQ ID NO: 51531 - DNA, 25 bp, Saccharomyces pastorianus
gttcgtgaactgtttgtgatggcca

SEQ ID NO: 51532 - DNA, 25 bp, Saccharomyces pastorianus
gctcatcacaccgactgtaagttca

SEQ ID NO: 51533 - DNA, 25 bp, Saccharomyces pastorianus
tggtatcaagccttattttgaacaa

SEQ ID NO: 51534 - DNA, 25 bp, Saccharomyces pastorianus
gagacagacataaagatccgctcca

SEQ ID NO: 51535 - DNA, 25 bp, Saccharomyces pastorianus
caagagacagacataaagatccgct

SEQ ID NO: 51536 - DNA, 25 bp, Saccharomyces pastorianus
ggtatcaagccttattttgaacaaa

SEQ ID NO: 51537 - DNA, 25 bp, Saccharomyces pastorianus
caaaagatccaagagacagacataa

SEQ ID NO: 51538 - DNA, 25 bp, Saccharomyces pastorianus
cacgaaagtggtatcaagccttatt

SEQ ID NO: 51539 - DNA, 25 bp, Saccharomyces pastorianus
gctccaaaacagagaactgtgcgcc

SEQ ID NO: 51540 - DNA, 25 bp, Saccharomyces pastorianus
caaaacagagaactgtgcgccgact

SEQ ID NO: 51541 - DNA, 25 bp, Saccharomyces pastorianus
agacataaagatccgctccaaaaca

SEQ ID NO: 51542 - DNA, 25 bp, Saccharomyces pastorianus
tatcaagccttattttgaacaaaag

SEQ ID NO: 51543 - DNA, 25 bp, Saccharomyces pastorianus
tgaacaaaagatccaagagacagac

SEQ ID NO: 51544 - DNA, 25 bp, Saccharomyces pastorianus
ttgaaagtgcccctagacgcatttt

SEQ ID NO: 51545 - DNA, 25 bp, Saccharomyces pastorianus
ctagccccactgaatgcatacgaat

SEQ ID NO: 51546 - DNA, 25 bp, Saccharomyces pastorianus
aggcatgtccatcgaaactgtcata

SEQ ID NO: 51547 - DNA, 25 bp, Saccharomyces pastorianus
ggctcgggcgtagaacacaacatca

SEQ ID NO: 51548 - DNA, 25 bp, Saccharomyces pastorianus
tgagcaagttcttctccttccaata

SEQ ID NO: 51549 - DNA, 25 bp, Saccharomyces pastorianus
gcgcaagatccagtaccggacttga

SEQ ID NO: 51550 - DNA, 25 bp, Saccharomyces pastorianus
ggctcagaaacgtcacaggcatgtc

SEQ ID NO: 51551 - DNA, 25 bp, Saccharomyces pastorianus
gtctccgagggctatgaatccagta

SEQ ID NO: 51552 - DNA, 25 bp, Saccharomyces pastorianus
ggacttgagagactggctagcccca

SEQ ID NO: 51553 - DNA, 25 bp, Saccharomyces pastorianus
atacgaatgcgacgatgtccccgtt

SEQ ID NO: 51554 - DNA, 25 bp, Saccharomyces pastorianus
gttccagcccagaattcatttgaaa

SEQ ID NO: 51555 - DNA, 25 bp, Saccharomyces pastorianus
gaaagtggttaatggttcatccgcg

SEQ ID NO: 51556 - DNA, 25 bp, Saccharomyces pastorianus
ccgcggatcttgtttgcaattggta

SEQ ID NO: 51557 - DNA, 25 bp, Saccharomyces pastorianus
gatcttgtttgcaattggtagtagg

SEQ ID NO: 51558 - DNA, 25 bp, Saccharomyces pastorianus
gcggatcttgtttgcaattggtagt

SEQ ID NO: 51559 - DNA, 25 bp, Saccharomyces pastorianus
tcatccgcggatcttgtttgcaatt

SEQ ID NO: 51560 - DNA, 25 bp, Saccharomyces pastorianus
ttaatggttcatccgcggatcttgt

SEQ ID NO: 51561 - DNA, 25 bp, Saccharomyces pastorianus
tgcttcacaagtacagaaagtggtt

SEQ ID NO: 51562 - DNA, 25 bp, Saccharomyces pastorianus
gtggttaatggttcatccgcggatc

SEQ ID NO: 51563 - DNA, 25 bp, Saccharomyces pastorianus
ggttaatggttcatccgcggatctt

SEQ ID NO: 51564 - DNA, 25 bp, Saccharomyces pastorianus
atccgcggatcttgtttgcaattgg

SEQ ID NO: 51565 - DNA, 25 bp, Saccharomyces pastorianus
gttcatccgcggatcttgtttgcaa

SEQ ID NO: 51566 - DNA, 25 bp, Saccharomyces pastorianus
gacccatcactaattacacccagag

SEQ ID NO: 51567 - DNA, 25 bp, Saccharomyces pastorianus
taaactcaaagcctaacgttctgga

SEQ ID NO: 51568 - DNA, 25 bp, Saccharomyces pastorianus
taacgacaagatcgatgcgcacatc

SEQ ID NO: 51569 - DNA, 25 bp, Saccharomyces pastorianus
gtcttgggacaacaggcaacctaac

SEQ ID NO: 51570 - DNA, 25 bp, Saccharomyces pastorianus
gaaactatgctcagtcttgggacaa

SEQ ID NO: 51571 - DNA, 25 bp, Saccharomyces pastorianus
gaaattctcgaatggacccatcact

SEQ ID NO: 51572 - DNA, 25 bp, Saccharomyces pastorianus
gcgtcgctcgttcgatgaaattctc

SEQ ID NO: 51573 - DNA, 25 bp, Saccharomyces pastorianus
ggagaacttctccagtatatgctaa

SEQ ID NO: 51574 - DNA, 25 bp, Saccharomyces pastorianus
tacacccagagtttgaggagaactt

SEQ ID NO: 51575 - DNA, 25 bp, Saccharomyces pastorianus
gatgcgcacatcaaagttcaaaaac

SEQ ID NO: 51576 - DNA, 25 bp, Saccharomyces pastorianus
gaaacaaggttttggcgtcgctcgt

SEQ ID NO: 51577 - DNA, 25 bp, Saccharomyces pastorianus
cggtaagttattcagagtcggtgtt

SEQ ID NO: 51578 - DNA, 25 bp, Saccharomyces pastorianus
gtctactacttccaaggtggtaaca

SEQ ID NO: 51579 - DNA, 25 bp, Saccharomyces pastorianus
gtggtaacaacgaattgggtactgc

SEQ ID NO: 51580 - DNA, 25 bp, Saccharomyces pastorianus
aagactaaggtctactacttccaag

SEQ ID NO: 51581 - DNA, 25 bp, Saccharomyces pastorianus
tactacttccaaggtggtaacaacg

SEQ ID NO: 51582 - DNA, 25 bp, Saccharomyces pastorianus
ttgtccaagactaaggtctactact

SEQ ID NO: 51583 - DNA, 25 bp, Saccharomyces pastorianus
cggtgttgtctctattttggaagct

SEQ ID NO: 51584 - DNA, 25 bp, Saccharomyces pastorianus
gactaaggtctactacttccaaggt

SEQ ID NO: 51585 - DNA, 25 bp, Saccharomyces pastorianus
taaggtctactacttccaaggtggt

SEQ ID NO: 51586 - DNA, 25 bp, Saccharomyces pastorianus
tgttgtctctattttggaagctggt

SEQ ID NO: 51587 - DNA, 25 bp, Saccharomyces pastorianus
agtcggtgttgtctctattttggaa

SEQ ID NO: 51588 - DNA, 25 bp, Saccharomyces pastorianus
atgattactggaaagaacctggtca

SEQ ID NO: 51589 - DNA, 25 bp, Saccharomyces pastorianus
tactggaaagaacctggtcaatacg

SEQ ID NO: 51590 - DNA, 25 bp, Saccharomyces pastorianus
attactggaaagaacctggtcaata

SEQ ID NO: 51591 - DNA, 25 bp, Saccharomyces pastorianus
gattactggaaagaacctggtcaat

SEQ ID NO: 51592 - DNA, 25 bp, Saccharomyces pastorianus
aagaacctggtcaatacggtatcga

SEQ ID NO: 51593 - DNA, 25 bp, Saccharomyces pastorianus
cgacttataatgattactggaaaga

SEQ ID NO: 51594 - DNA, 25 bp, Saccharomyces pastorianus
ggaaagaacctggtcaatacggtat

SEQ ID NO: 51595 - DNA, 25 bp, Saccharomyces pastorianus
agaacctggtcaatacggtatcgaa

SEQ ID NO: 51596 - DNA, 25 bp, Saccharomyces pastorianus
gaaagaacctggtcaatacggtatc

SEQ ID NO: 51597 - DNA, 25 bp, Saccharomyces pastorianus
aaagaacctggtcaatacggtatcg

SEQ ID NO: 51598 - DNA, 25 bp, Saccharomyces pastorianus
ctggaaagaacctggtcaatacggt

SEQ ID NO: 51599 - DNA, 25 bp, Saccharomyces pastorianus
actaccactcaggttattgttgccc

SEQ ID NO: 51600 - DNA, 25 bp, Saccharomyces pastorianus
cttctactttgcaactagcttctac

SEQ ID NO: 51601 - DNA, 25 bp, Saccharomyces pastorianus
aacagatttctactctactaccact

SEQ ID NO: 51602 - DNA, 25 bp, Saccharomyces pastorianus
agaaggtgtcaacccaaccgctgaa

SEQ ID NO: 51603 - DNA, 25 bp, Saccharomyces pastorianus
atgtcgcaggtgattcgcaaaccca

SEQ ID NO: 51604 - DNA, 25 bp, Saccharomyces pastorianus
gtgttaccttcaccacaactttaat

SEQ ID NO: 51605 - DNA, 25 bp, Saccharomyces pastorianus
aggttcaagaaactacgcccgctct

SEQ ID NO: 51606 - DNA, 25 bp, Saccharomyces pastorianus
gctacagagtttctatcatcgctat

SEQ ID NO: 51607 - DNA, 25 bp, Saccharomyces pastorianus
gccagtcctgcccaagagagaaatt

SEQ ID NO: 51608 - DNA, 25 bp, Saccharomyces pastorianus
tatgcttaacctatctagcctctgc

SEQ ID NO: 51609 - DNA, 25 bp, Saccharomyces pastorianus
ttctcatcaagctgctgcgacaact

SEQ ID NO: 51610 - DNA, 25 bp, Saccharomyces pastorianus
aaagaattcgtgtgccatgagggtt

SEQ ID NO: 51611 - DNA, 25 bp, Saccharomyces pastorianus
attcgggctgctgtcgttatcaaga

SEQ ID NO: 51612 - DNA, 25 bp, Saccharomyces pastorianus
attaaagcttatccccaaagactcg

SEQ ID NO: 51613 - DNA, 25 bp, Saccharomyces pastorianus
gagatactactaccctgaggtcact

SEQ ID NO: 51614 - DNA, 25 bp, Saccharomyces pastorianus
tcaattacttgtgccttgatgcaat

SEQ ID NO: 51615 - DNA, 25 bp, Saccharomyces pastorianus
aaattgttgccttgatgagtgactc

SEQ ID NO: 51616 - DNA, 25 bp, Saccharomyces pastorianus
gggttatatctctttgttgccattt

SEQ ID NO: 51617 - DNA, 25 bp, Saccharomyces pastorianus
gtgatgccaagaagctgtaccaaag

SEQ ID NO: 51618 - DNA, 25 bp, Saccharomyces pastorianus
tacagtcccgtagacggtcacggta

SEQ ID NO: 51619 - DNA, 25 bp, Saccharomyces pastorianus
gcgctgagcatttcactggttggac

SEQ ID NO: 51620 - DNA, 25 bp, Saccharomyces pastorianus
gctactgtgacatcagcatcgattt

SEQ ID NO: 51621 - DNA, 25 bp, Saccharomyces pastorianus
tactgggacgaaggtttccatcttt

SEQ ID NO: 51622 - DNA, 25 bp, Saccharomyces pastorianus
gataccgagtattttgaccattaga

SEQ ID NO: 51623 - DNA, 25 bp, Saccharomyces pastorianus
gaggagggtccattcgatttattta

SEQ ID NO: 51624 - DNA, 25 bp, Saccharomyces pastorianus
ggaaatttgccttggaaacactatc

SEQ ID NO: 51625 - DNA, 25 bp, Saccharomyces pastorianus
atacgatttcgatcttgcctttgaa

SEQ ID NO: 51626 - DNA, 25 bp, Saccharomyces pastorianus
ttttccacgtggattctactgggac

SEQ ID NO: 51627 - DNA, 25 bp, Saccharomyces pastorianus
aactcagagtatttccactagggaa

SEQ ID NO: 51628 - DNA, 25 bp, Saccharomyces pastorianus
atttatttaccagcattccgagccg

SEQ ID NO: 51629 - DNA, 25 bp, Saccharomyces pastorianus
gagggattggctacttccatgggaa

SEQ ID NO: 51630 - DNA, 25 bp, Saccharomyces pastorianus
gttcgacgagagtcaatttgccgag

SEQ ID NO: 51631 - DNA, 25 bp, Saccharomyces pastorianus
gaacgtccagctgatttgataccga

SEQ ID NO: 51632 - DNA, 25 bp, Saccharomyces pastorianus
actctgtttccgctgggttagatta

SEQ ID NO: 51633 - DNA, 25 bp, Saccharomyces pastorianus
cacgggtatgttctcgccatttgaa

SEQ ID NO: 51634 - DNA, 25 bp, Saccharomyces pastorianus
tggaagtccactggccgtgctgaat

SEQ ID NO: 51635 - DNA, 25 bp, Saccharomyces pastorianus
caaggaacaattcgccgccatgaac

SEQ ID NO: 51636 - DNA, 25 bp, Saccharomyces pastorianus
gtaaactacctgatgctgtcgttgc

SEQ ID NO: 51637 - DNA, 25 bp, Saccharomyces pastorianus
aagtgttgccgaagtcttgccaaaa

SEQ ID NO: 51638 - DNA, 25 bp, Saccharomyces pastorianus
gatgcctctgttaagctattgggtg

SEQ ID NO: 51639 - DNA, 25 bp, Saccharomyces pastorianus
tgaattcattgcagccaccgatgct

SEQ ID NO: 51640 - DNA, 25 bp, Saccharomyces pastorianus
cggtgtcaagacctatgtcctgcaa

SEQ ID NO: 51641 - DNA, 25 bp, Saccharomyces pastorianus
tgctcaagctctactcggattcaaa

SEQ ID NO: 51642 - DNA, 25 bp, Saccharomyces pastorianus
ttgcatgtgtcggtggcggttccaa

SEQ ID NO: 51643 - DNA, 25 bp, Saccharomyces pastorianus
aaggaactggattctctggacctca

SEQ ID NO: 51644 - DNA, 25 bp, Saccharomyces pastorianus
acagcaatggcaaggaactggattc

SEQ ID NO: 51645 - DNA, 25 bp, Saccharomyces pastorianus
ggaactggattctctggacctcaac

SEQ ID NO: 51646 - DNA, 25 bp, Saccharomyces pastorianus
tgaacaccgtgaacagcaatggcaa

SEQ ID NO: 51647 - DNA, 25 bp, Saccharomyces pastorianus
ggcatgaacaccgtgaacagcaatg

SEQ ID NO: 51648 - DNA, 25 bp, Saccharomyces pastorianus
actggattctctggacctcaacaac

SEQ ID NO: 51649 - DNA, 25 bp, Saccharomyces pastorianus
atgggcatgaacaccgtgaacagca

SEQ ID NO: 51650 - DNA, 25 bp, Saccharomyces pastorianus
ggattctctggacctcaacaacctg

SEQ ID NO: 51651 - DNA, 25 bp, Saccharomyces pastorianus
gcaatggcaaggaactggattctct

SEQ ID NO: 51652 - DNA, 25 bp, Saccharomyces pastorianus
gcaaggaactggattctctggacct

SEQ ID NO: 51653 - DNA, 25 bp, Saccharomyces pastorianus
tggcaaggaactggattctctggac

SEQ ID NO: 51654 - DNA, 25 bp, Saccharomyces pastorianus
tgaactcccttttcaggccaagaaa

SEQ ID NO: 51655 - DNA, 25 bp, Saccharomyces pastorianus
aaacgatgttctgggcagcgtgatc

SEQ ID NO: 51656 - DNA, 25 bp, Saccharomyces pastorianus
taacgagttgagtcgcggtggcctc

SEQ ID NO: 51657 - DNA, 25 bp, Saccharomyces pastorianus
caagatatgcgacgactgcctggtc

SEQ ID NO: 51658 - DNA, 25 bp, Saccharomyces pastorianus
atctggactcacaggcgaacttcat

SEQ ID NO: 51659 - DNA, 25 bp, Saccharomyces pastorianus
tactgccacaaaccatttactctgt

SEQ ID NO: 51660 - DNA, 25 bp, Saccharomyces pastorianus
cgcccatccaggtgagatcgtacga

SEQ ID NO: 51661 - DNA, 25 bp, Saccharomyces pastorianus
gcgacggcgccgacaatgaagacga

SEQ ID NO: 51662 - DNA, 25 bp, Saccharomyces pastorianus
actggatcccggacagcaagcggaa

SEQ ID NO: 51663 - DNA, 25 bp, Saccharomyces pastorianus
gaaggtccgcaactactacaagaac

SEQ ID NO: 51664 - DNA, 25 bp, Saccharomyces pastorianus
aacgacggcggcacgttgtgcaaga

SEQ ID NO: 51665 - DNA, 25 bp, Saccharomyces pastorianus
gggcccaagaaccatgactaccgag

SEQ ID NO: 51666 - DNA, 25 bp, Saccharomyces pastorianus
gatgcggacacggtgacgtctccca

SEQ ID NO: 51667 - DNA, 25 bp, Saccharomyces pastorianus
gactgcgttgcacagtgtggccaaa

SEQ ID NO: 51668 - DNA, 25 bp, Saccharomyces pastorianus
tgacgtctcccatcacgttcgagaa

SEQ ID NO: 51669 - DNA, 25 bp, Saccharomyces pastorianus
aggacatcggcacactcggaacaga

SEQ ID NO: 51670 - DNA, 25 bp, Saccharomyces pastorianus
agagcattttgagtagcatctcgct

SEQ ID NO: 51671 - DNA, 25 bp, Saccharomyces pastorianus
agtcgatggtgaaccagcaccggca

SEQ ID NO: 51672 - DNA, 25 bp, Saccharomyces pastorianus
agcaccggcagcaggaaggctcgac

SEQ ID NO: 51673 - DNA, 25 bp, Saccharomyces pastorianus
cggcacactcggaacagagcatttt

SEQ ID NO: 51674 - DNA, 25 bp, Saccharomyces pastorianus
gtagcatctcgctcaagtcgatggt

SEQ ID NO: 51675 - DNA, 25 bp, Saccharomyces pastorianus
agcagaaggtggtgcccaggacatc

SEQ ID NO: 51676 - DNA, 25 bp, Saccharomyces pastorianus
aaccagagcttctacaaagtcaaga

SEQ ID NO: 51677 - DNA, 25 bp, Saccharomyces pastorianus
gatgacgtccaaggtaggtctttga

SEQ ID NO: 51678 - DNA, 25 bp, Saccharomyces pastorianus
aaatgatcacctcacaagacgtccc

SEQ ID NO: 51679 - DNA, 25 bp, Saccharomyces pastorianus
tctttgaaagacgttggtgacctaa

SEQ ID NO: 51680 - DNA, 25 bp, Saccharomyces pastorianus
ggtgacctaaccagagcttctacaa

SEQ ID NO: 51681 - DNA, 25 bp, Saccharomyces pastorianus
aattgttcaacggtggtcaagctac

SEQ ID NO: 51682 - DNA, 25 bp, Saccharomyces pastorianus
ctttgatgaagtgtttacgtccgaa

SEQ ID NO: 51683 - DNA, 25 bp, Saccharomyces pastorianus
ggatttcccacaattgttcaacggt

SEQ ID NO: 51684 - DNA, 25 bp, Saccharomyces pastorianus
aaactcgttactgtacaagatgtcc

SEQ ID NO: 51685 - DNA, 25 bp, Saccharomyces pastorianus
gtcaagctaccgacagagtacgtca

SEQ ID NO: 51686 - DNA, 25 bp, Saccharomyces pastorianus
cgtccctccattagactactttgat

SEQ ID NO: 51687 - DNA, 25 bp, Saccharomyces pastorianus
gtggtatggccgacagaacgacttt

SEQ ID NO: 51688 - DNA, 25 bp, Saccharomyces pastorianus
gtaagctggctttgatcgacgattt

SEQ ID NO: 51689 - DNA, 25 bp, Saccharomyces pastorianus
atcttcggtggcctaattgggttcg

SEQ ID NO: 51690 - DNA, 25 bp, Saccharomyces pastorianus
aactcgatgtcgactacgtcctggt

SEQ ID NO: 51691 - DNA, 25 bp, Saccharomyces pastorianus
aaggtatctggcctgacgagatcaa

SEQ ID NO: 51692 - DNA, 25 bp, Saccharomyces pastorianus
aagccaagtgccatactagccaaat

SEQ ID NO: 51693 - DNA, 25 bp, Saccharomyces pastorianus
aagaacgtgacttctataccccaga

SEQ ID NO: 51694 - DNA, 25 bp, Saccharomyces pastorianus
ggatttcaaagctagcgaccgcaaa

SEQ ID NO: 51695 - DNA, 25 bp, Saccharomyces pastorianus
ggatcgttcgtcttctacttgtacc

SEQ ID NO: 51696 - DNA, 25 bp, Saccharomyces pastorianus
gactttggtcgacaacaacacctgg

SEQ ID NO: 51697 - DNA, 25 bp, Saccharomyces pastorianus
ggaacaacactcatatcgccattgt

SEQ ID NO: 51698 - DNA, 25 bp, Saccharomyces pastorianus
acgtcttcctactgatcttgatggg

SEQ ID NO: 51699 - DNA, 25 bp, Saccharomyces pastorianus
gggagtcttcggcttgattcagatc

SEQ ID NO: 51700 - DNA, 25 bp, Saccharomyces pastorianus
tatgctacttctatatggtctccgc

SEQ ID NO: 51701 - DNA, 25 bp, Saccharomyces pastorianus
ggtctctttgatgttgatcctggtc

SEQ ID NO: 51702 - DNA, 25 bp, Saccharomyces pastorianus
agatcgtcgcctttggtgacttcat

SEQ ID NO: 51703 - DNA, 25 bp, Saccharomyces pastorianus
taaaggctcagaagaccggctccat

SEQ ID NO: 51704 - DNA, 25 bp, Saccharomyces pastorianus
attgtccccggctacatttctagat

SEQ ID NO: 51705 - DNA, 25 bp, Saccharomyces pastorianus
tgtattccgcctacactacatggta

SEQ ID NO: 51706 - DNA, 25 bp, Saccharomyces pastorianus
atctgtggctggatcctacgacaac

SEQ ID NO: 51707 - DNA, 25 bp, Saccharomyces pastorianus
gggtagatactcgtccaagctgtat

SEQ ID NO: 51708 - DNA, 25 bp, Saccharomyces pastorianus
gattctattcgctatgggacaccaa

SEQ ID NO: 51709 - DNA, 25 bp, Saccharomyces pastorianus
ggttatattacttgtcacgaattct

SEQ ID NO: 51710 - DNA, 25 bp, Saccharomyces pastorianus
catccactctttttcccgaatggga

SEQ ID NO: 51711 - DNA, 25 bp, Saccharomyces pastorianus
gattttttggtcctgcgttggtata

SEQ ID NO: 51712 - DNA, 25 bp, Saccharomyces pastorianus
tacgccaatttcgttgatttcgttg

SEQ ID NO: 51713 - DNA, 25 bp, Saccharomyces pastorianus
caagagattagaggcaacggacatt

SEQ ID NO: 51714 - DNA, 25 bp, Saccharomyces pastorianus
cactgtgtttatatttactgttcaa

SEQ ID NO: 51715 - DNA, 25 bp, Saccharomyces pastorianus
gtagtagattgcaaacccctcagga

SEQ ID NO: 51716 - DNA, 25 bp, Saccharomyces pastorianus
tgttcaaagatcatggtacgccaat

SEQ ID NO: 51717 - DNA, 25 bp, Saccharomyces pastorianus
aaacccctcaggaagacgtcttatg

SEQ ID NO: 51718 - DNA, 25 bp, Saccharomyces pastorianus
gaataccaataccagtttgagtttg

SEQ ID NO: 51719 - DNA, 25 bp, Saccharomyces pastorianus
cgtcttatgcttacggttggaccat

SEQ ID NO: 51720 - DNA, 25 bp, Saccharomyces pastorianus
tcacacatttctagcgaccggatcc

SEQ ID NO: 51721 - DNA, 25 bp, Saccharomyces pastorianus
aatctgccgcttcacattcgacggt

SEQ ID NO: 51722 - DNA, 25 bp, Saccharomyces pastorianus
gcgagtaggccaataagtctgcttg

SEQ ID NO: 51723 - DNA, 25 bp, Saccharomyces pastorianus
gtctgcttgagacgacaaacaattt

SEQ ID NO: 51724 - DNA, 25 bp, Saccharomyces pastorianus
aacggattactttcggaggagcact

SEQ ID NO: 51725 - DNA, 25 bp, Saccharomyces pastorianus
gaccggatccaccattttagaaagt

SEQ ID NO: 51726 - DNA, 25 bp, Saccharomyces pastorianus
ccagaggtggactttctatgtttca

SEQ ID NO: 51727 - DNA, 25 bp, Saccharomyces pastorianus
gtccatctctcataaacttccagaa

SEQ ID NO: 51728 - DNA, 25 bp, Saccharomyces pastorianus
attcgacggtgtccatctctcataa

SEQ ID NO: 51729 - DNA, 25 bp, Saccharomyces pastorianus
gaaatacgtccattaaactatccag

SEQ ID NO: 51730 - DNA, 25 bp, Saccharomyces pastorianus
ggaggagcactcagagtcttgtcca

SEQ ID NO: 51731 - DNA, 25 bp, Saccharomyces pastorianus
atccgaagcctttgacagaatgatg

SEQ ID NO: 51732 - DNA, 25 bp, Saccharomyces pastorianus
gactgatatcgtcactgttgtccgt

SEQ ID NO: 51733 - DNA, 25 bp, Saccharomyces pastorianus
aaactggactgatatcgtcactgtt

SEQ ID NO: 51734 - DNA, 25 bp, Saccharomyces pastorianus
tgaacggtaagccagcaaaggaaac

SEQ ID NO: 51735 - DNA, 25 bp, Saccharomyces pastorianus
tactacgaaatgtctacatccgaag

SEQ ID NO: 51736 - DNA, 25 bp, Saccharomyces pastorianus
agtgtcgaagatttcttagctgcca

SEQ ID NO: 51737 - DNA, 25 bp, Saccharomyces pastorianus
cgaagatttcttagctgccatgcaa

SEQ ID NO: 51738 - DNA, 25 bp, Saccharomyces pastorianus
atatcgtcactgttgtccgtgtctg

SEQ ID NO: 51739 - DNA, 25 bp, Saccharomyces pastorianus
aaatgtctacatccgaagcctttga

SEQ ID NO: 51740 - DNA, 25 bp, Saccharomyces pastorianus
gtctacatccgaagcctttgacaga

SEQ ID NO: 51741 - DNA, 25 bp, Saccharomyces pastorianus
cgtcactgttgtccgtgtctggatc

SEQ ID NO: 51742 - DNA, 25 bp, Saccharomyces pastorianus
atggagcgtcgttttcatcttacgt

SEQ ID NO: 51743 - DNA, 25 bp, Saccharomyces pastorianus
cggagctattttccttctttttgag

SEQ ID NO: 51744 - DNA, 25 bp, Saccharomyces pastorianus
gtgaacttacccatattcctgagga

SEQ ID NO: 51745 - DNA, 25 bp, Saccharomyces pastorianus
tttttctgtttacgccggagctatt

SEQ ID NO: 51746 - DNA, 25 bp, Saccharomyces pastorianus
taaatcggacaacttagctagccaa

SEQ ID NO: 51747 - DNA, 25 bp, Saccharomyces pastorianus
gtacgttcaaacgaagccttcaact

SEQ ID NO: 51748 - DNA, 25 bp, Saccharomyces pastorianus
gttaatgctgctattgtccgtatca

SEQ ID NO: 51749 - DNA, 25 bp, Saccharomyces pastorianus
taagccaccaacagctactgcagag

SEQ ID NO: 51750 - DNA, 25 bp, Saccharomyces pastorianus
gaaggtgccaattattgccggtcct

SEQ ID NO: 51751 - DNA, 25 bp, Saccharomyces pastorianus
gtaatgtcaatgtcagcagttccta

SEQ ID NO: 51752 - DNA, 25 bp, Saccharomyces pastorianus
ggtcctgcttcattccataaatcgg

SEQ ID NO: 51753 - DNA, 25 bp, Saccharomyces pastorianus
gagtaccatccggagttgtttttag

SEQ ID NO: 51754 - DNA, 25 bp, Saccharomyces pastorianus
gaagtaccatcggattaccagctcg

SEQ ID NO: 51755 - DNA, 25 bp, Saccharomyces pastorianus
gctcttcccgttattattgcaactg

SEQ ID NO: 51756 - DNA, 25 bp, Saccharomyces pastorianus
tcaaggcggccaaagtgctgctaat

SEQ ID NO: 51757 - DNA, 25 bp, Saccharomyces pastorianus
acggatttgttaatctccctcgcta

SEQ ID NO: 51758 - DNA, 25 bp, Saccharomyces pastorianus
cctcgctactgttctttatcattta

SEQ ID NO: 51759 - DNA, 25 bp, Saccharomyces pastorianus
gacgcagacgaaataccccagaagg

SEQ ID NO: 51760 - DNA, 25 bp, Saccharomyces pastorianus
atccatcacaaatcggttccacaaa

SEQ ID NO: 51761 - DNA, 25 bp, Saccharomyces pastorianus
attggtgtgaccagcgtgggcatcc

SEQ ID NO: 51762 - DNA, 25 bp, Saccharomyces pastorianus
ccgtagtgctcattccaagattcaa

SEQ ID NO: 51763 - DNA, 25 bp, Saccharomyces pastorianus
aaccttgccattcaatcctacatga

SEQ ID NO: 51764 - DNA, 25 bp, Saccharomyces pastorianus
tgcgtgagttccttggcgtatatga

SEQ ID NO: 51765 - DNA, 25 bp, Saccharomyces pastorianus
aagcgggcccttgtacacgagctga

SEQ ID NO: 51766 - DNA, 25 bp, Saccharomyces pastorianus
agaacaggaacattggcgcccacaa

SEQ ID NO: 51767 - DNA, 25 bp, Saccharomyces pastorianus
atctgcagagaacctcggtgcgctt

SEQ ID NO: 51768 - DNA, 25 bp, Saccharomyces pastorianus
gagggcccagagcacgtcaaaatca

SEQ ID NO: 51769 - DNA, 25 bp, Saccharomyces pastorianus
gaaagagctgctacatcttgccaac

SEQ ID NO: 51770 - DNA, 25 bp, Saccharomyces pastorianus
gcagaggaccttttgccctttacgg

SEQ ID NO: 51771 - DNA, 25 bp, Saccharomyces pastorianus
gagctagtcgactacattctcgaga

SEQ ID NO: 51772 - DNA, 25 bp, Saccharomyces pastorianus
caactcggcggaaagctccagtgat

SEQ ID NO: 51773 - DNA, 25 bp, Saccharomyces pastorianus
acaagaatgtgtccgagggcccaga

SEQ ID NO: 51774 - DNA, 25 bp, Saccharomyces pastorianus
ggtaatgcacgggagccgccatcat

SEQ ID NO: 51775 - DNA, 25 bp, Saccharomyces pastorianus
gtttctccccatttccttagatcaa

SEQ ID NO: 51776 - DNA, 25 bp, Saccharomyces pastorianus
gacacccaagacgtttttgtgcggt

SEQ ID NO: 51777 - DNA, 25 bp, Saccharomyces pastorianus
gattgaagcttggtcatccttttcc

SEQ ID NO: 51778 - DNA, 25 bp, Saccharomyces pastorianus
tcatacagtatctcttcagggcgtc

SEQ ID NO: 51779 - DNA, 25 bp, Saccharomyces pastorianus
acagcgcctccaacatacttaagga

SEQ ID NO: 51780 - DNA, 25 bp, Saccharomyces pastorianus
gttttcgtatcaccacagttgtatt

SEQ ID NO: 51781 - DNA, 25 bp, Saccharomyces pastorianus
tcagggacagcaccgaacagcagca

SEQ ID NO: 51782 - DNA, 25 bp, Saccharomyces pastorianus
atgccaggaatcatgtctcagggac

SEQ ID NO: 51783 - DNA, 25 bp, Saccharomyces pastorianus
tcatcattctctcgcgcacagatag

SEQ ID NO: 51784 - DNA, 25 bp, Saccharomyces pastorianus
tatcaggtgctcaaacagtttctcc

SEQ ID NO: 51785 - DNA, 25 bp, Saccharomyces pastorianus
ttttcctcattcttggacacccaag

SEQ ID NO: 51786 - DNA, 25 bp, Saccharomyces pastorianus
tggcagctcttcatcttcaggaaac

SEQ ID NO: 51787 - DNA, 25 bp, Saccharomyces pastorianus
gaatccagagacttccagtattagt

SEQ ID NO: 51788 - DNA, 25 bp, Saccharomyces pastorianus
tggccgcaatggttgatccatccat

SEQ ID NO: 51789 - DNA, 25 bp, Saccharomyces pastorianus
agtagcggctcaactggatcctctt

SEQ ID NO: 51790 - DNA, 25 bp, Saccharomyces pastorianus
atccctctaactggcctattacata

SEQ ID NO: 51791 - DNA, 25 bp, Saccharomyces pastorianus
aattccagtgtatctagttccagca

SEQ ID NO: 51792 - DNA, 25 bp, Saccharomyces pastorianus
gaatctgtaacacaatccatgcgga

SEQ ID NO: 51793 - DNA, 25 bp, Saccharomyces pastorianus
tacccaaaatttcaaggcccatcgc

SEQ ID NO: 51794 - DNA, 25 bp, Saccharomyces pastorianus
gtcggagggtgcttgtacattttgt

SEQ ID NO: 51795 - DNA, 25 bp, Saccharomyces pastorianus
atgatgactcggcaccagctagaaa

SEQ ID NO: 51796 - DNA, 25 bp, Saccharomyces pastorianus
ggttcttcaaattcgggatcttcaa

SEQ ID NO: 51797 - DNA, 25 bp, Saccharomyces pastorianus
ttcacagagctcgaccggagttcaa

SEQ ID NO: 51798 - DNA, 25 bp, Saccharomyces pastorianus
tactgcaagcacttcatctacgatt

SEQ ID NO: 51799 - DNA, 25 bp, Saccharomyces pastorianus
gacatctagtcaaaagccatccacc

SEQ ID NO: 51800 - DNA, 25 bp, Saccharomyces pastorianus
tttcatccacctctagtttgtcttc

SEQ ID NO: 51801 - DNA, 25 bp, Saccharomyces pastorianus
tccaccacctctattttgtctgaga

SEQ ID NO: 51802 - DNA, 25 bp, Saccharomyces pastorianus
tgtcttcggtgtctcaaatctcaac

SEQ ID NO: 51803 - DNA, 25 bp, Saccharomyces pastorianus
aaatctacaacgtcatcggccgatg

SEQ ID NO: 51804 - DNA, 25 bp, Saccharomyces pastorianus
tctacgattattccatcctctatac

SEQ ID NO: 51805 - DNA, 25 bp, Saccharomyces pastorianus
agtatctcgtcaccattatcttcaa

SEQ ID NO: 51806 - DNA, 25 bp, Saccharomyces pastorianus
gaagttcggttagcaccgtttcaca

SEQ ID NO: 51807 - DNA, 25 bp, Saccharomyces pastorianus
tctataccatcttcatctgcgggaa

SEQ ID NO: 51808 - DNA, 25 bp, Saccharomyces pastorianus
ctaagtttccatgcgccgatgttaa

SEQ ID NO: 51809 - DNA, 25 bp, Saccharomyces pastorianus
aagtgtggcggatctgtggctctct

SEQ ID NO: 51810 - DNA, 25 bp, Saccharomyces pastorianus
tctccagtatgcctcacttgttaga

SEQ ID NO: 51811 - DNA, 25 bp, Saccharomyces pastorianus
accgccctatgaaactccagaattg

SEQ ID NO: 51812 - DNA, 25 bp, Saccharomyces pastorianus
gggcttgcaatctagctttatcagc

SEQ ID NO: 51813 - DNA, 25 bp, Saccharomyces pastorianus
ttgcctatggtttcctttctgtaaa

SEQ ID NO: 51814 - DNA, 25 bp, Saccharomyces pastorianus
aatggcccgacttatcaggacagga

SEQ ID NO: 51815 - DNA, 25 bp, Saccharomyces pastorianus
agcagcgattattctcttttgaggg

SEQ ID NO: 51816 - DNA, 25 bp, Saccharomyces pastorianus
atataaacttttcgatgcccctctc

SEQ ID NO: 51817 - DNA, 25 bp, Saccharomyces pastorianus
taatattcacctggcacaaccacat

SEQ ID NO: 51818 - DNA, 25 bp, Saccharomyces pastorianus
ctaaagggttctcccaattggcaga

SEQ ID NO: 51819 - DNA, 25 bp, Saccharomyces pastorianus
gcgctcgagaaactgcagaagctga

SEQ ID NO: 51820 - DNA, 25 bp, Saccharomyces pastorianus
gatgcgctcgagaaactgcagaagc

SEQ ID NO: 51821 - DNA, 25 bp, Saccharomyces pastorianus
aaactgcagaagctgaccgctgcgc

SEQ ID NO: 51822 - DNA, 25 bp, Saccharomyces pastorianus
aactgcagaagctgaccgctgcgct

SEQ ID NO: 51823 - DNA, 25 bp, Saccharomyces pastorianus
gaagctgaccgctgcgctcgaggac

SEQ ID NO: 51824 - DNA, 25 bp, Saccharomyces pastorianus
tgcagaagctgaccgctgcgctcga

SEQ ID NO: 51825 - DNA, 25 bp, Saccharomyces pastorianus
cgctgcgctcgaggacatcgaggaa

SEQ ID NO: 51826 - DNA, 25 bp, Saccharomyces pastorianus
agctgaccgctgcgctcgaggacat

SEQ ID NO: 51827 - DNA, 25 bp, Saccharomyces pastorianus
gaaactgcagaagctgaccgctgcg

SEQ ID NO: 51828 - DNA, 25 bp, Saccharomyces pastorianus
gagaaactgcagaagctgaccgctg

SEQ ID NO: 51829 - DNA, 25 bp, Saccharomyces pastorianus
atgcgctcgagaaactgcagaagct

SEQ ID NO: 51830 - DNA, 25 bp, Saccharomyces pastorianus
agaagacgcagaggccgacgcagaa

SEQ ID NO: 51831 - DNA, 25 bp, Saccharomyces pastorianus
acggcgtcacagacccgagcatgaa

SEQ ID NO: 51832 - DNA, 25 bp, Saccharomyces pastorianus
aggtagcggccttgctcaaagagca

SEQ ID NO: 51833 - DNA, 25 bp, Saccharomyces pastorianus
ccgacactgttcttctttgacaaga

SEQ ID NO: 51834 - DNA, 25 bp, Saccharomyces pastorianus
agatccagggcatcgaggacattgc

SEQ ID NO: 51835 - DNA, 25 bp, Saccharomyces pastorianus
tttgccaaccaaatagccatgtcgg

SEQ ID NO: 51836 - DNA, 25 bp, Saccharomyces pastorianus
gaacgtgtctgaactatgtgtgtac

SEQ ID NO: 51837 - DNA, 25 bp, Saccharomyces pastorianus
tggtggaggcgctcacggataacaa

SEQ ID NO: 51838 - DNA, 25 bp, Saccharomyces pastorianus
ccgcatgaactggacaccgaggaca

SEQ ID NO: 51839 - DNA, 25 bp, Saccharomyces pastorianus
tcgccaccagcatagaactagccaa

SEQ ID NO: 51840 - DNA, 25 bp, Saccharomyces pastorianus
agccatgtcggtcaagttgggcaac

SEQ ID NO: 51841 - DNA, 25 bp, Saccharomyces pastorianus
aaacgctccaaaaatagaatcaaga

SEQ ID NO: 51842 - DNA, 25 bp, Saccharomyces pastorianus
gagaaaacgctccaaaaatagaatc

SEQ ID NO: 51843 - DNA, 25 bp, Saccharomyces pastorianus
tgaaaaaacctaaattcgactgcaa

SEQ ID NO: 51844 - DNA, 25 bp, Saccharomyces pastorianus
aaggtggatgtgtgaggcccataat

SEQ ID NO: 51845 - DNA, 25 bp, Saccharomyces pastorianus
ctaaattcgactgcaacttttggga

SEQ ID NO: 51846 - DNA, 25 bp, Saccharomyces pastorianus
tattttcacatatctatccttgcaa

SEQ ID NO: 51847 - DNA, 25 bp, Saccharomyces pastorianus
gaggcccataataaagtcaatacga

SEQ ID NO: 51848 - DNA, 25 bp, Saccharomyces pastorianus
aacctaaattcgactgcaacttttg

SEQ ID NO: 51849 - DNA, 25 bp, Saccharomyces pastorianus
taaattcgactgcaacttttgggaa

SEQ ID NO: 51850 - DNA, 25 bp, Saccharomyces pastorianus
tatattttcacatatctatccttgc

SEQ ID NO: 51851 - DNA, 25 bp, Saccharomyces pastorianus
ggcccataataaagtcaatacgaaa

SEQ ID NO: 51852 - DNA, 25 bp, Saccharomyces pastorianus
aaacgctccaaaaatagaatcaaga

SEQ ID NO: 51853 - DNA, 25 bp, Saccharomyces pastorianus
atatctatccttgcaactggtgcgc

SEQ ID NO: 51854 - DNA, 25 bp, Saccharomyces pastorianus
gagaaaacgctccaaaaatagaatc

SEQ ID NO: 51855 - DNA, 25 bp, Saccharomyces pastorianus
tgaaaaaacctaaattcgactgcaa

SEQ ID NO: 51856 - DNA, 25 bp, Saccharomyces pastorianus
aaggtggatgtgtgaggcccataat

SEQ ID NO: 51857 - DNA, 25 bp, Saccharomyces pastorianus
tattttcacatatctatccttgcaa

SEQ ID NO: 51858 - DNA, 25 bp, Saccharomyces pastorianus
gaggcccataataaagtcaatacga

SEQ ID NO: 51859 - DNA, 25 bp, Saccharomyces pastorianus
aacctaaattcgactgcaacttttg

SEQ ID NO: 51860 - DNA, 25 bp, Saccharomyces pastorianus
taaattcgactgcaacttttgggaa

SEQ ID NO: 51861 - DNA, 25 bp, Saccharomyces pastorianus
aactggtgcgctaaagactttgaaa

SEQ ID NO: 51862 - DNA, 25 bp, Saccharomyces pastorianus
ggcccataataaagtcaatacgaaa

SEQ ID NO: 51863 - DNA, 25 bp, Saccharomyces pastorianus
gttccggtttgaatggcactttcca

SEQ ID NO: 51864 - DNA, 25 bp, Saccharomyces pastorianus
gatactggctcaaagatgtcaactt

SEQ ID NO: 51865 - DNA, 25 bp, Saccharomyces pastorianus
aaagtcactactacactcatactcc

SEQ ID NO: 51866 - DNA, 25 bp, Saccharomyces pastorianus
tgcattgttggacccgctgtagctt

SEQ ID NO: 51867 - DNA, 25 bp, Saccharomyces pastorianus
agcctgttctttctgattttactta

SEQ ID NO: 51868 - DNA, 25 bp, Saccharomyces pastorianus
gctgtagcttcatctcactttaaaa

SEQ ID NO: 51869 - DNA, 25 bp, Saccharomyces pastorianus
ggaaatattgcagcctgttctttct

SEQ ID NO: 51870 - DNA, 25 bp, Saccharomyces pastorianus
ccacccatctactctttgaaacaga

SEQ ID NO: 51871 - DNA, 25 bp, Saccharomyces pastorianus
ttgttgcatgcattgttggacccgc

SEQ ID NO: 51872 - DNA, 25 bp, Saccharomyces pastorianus
atcgaataacgatactggctcaaag

SEQ ID NO: 51873 - DNA, 25 bp, Saccharomyces pastorianus
atattggttccggtttgaatggcac

SEQ ID NO: 51874 - DNA, 25 bp, Saccharomyces pastorianus
ggactcagccaacgagagagttaac

SEQ ID NO: 51875 - DNA, 25 bp, Saccharomyces pastorianus
ttgtcttaggacatgtaattttaat

SEQ ID NO: 51876 - DNA, 25 bp, Saccharomyces pastorianus
gacatgtaattttaatttttcaact

SEQ ID NO: 51877 - DNA, 25 bp, Saccharomyces pastorianus
catggactcagccaacgagagagtt

SEQ ID NO: 51878 - DNA, 25 bp, Saccharomyces pastorianus
tagaactttccgaatttgcagcgga

SEQ ID NO: 51879 - DNA, 25 bp, Saccharomyces pastorianus
tcagccaacgagagagttaactgcc

SEQ ID NO: 51880 - DNA, 25 bp, Saccharomyces pastorianus
atagaactttccgaatttgcagcgg

SEQ ID NO: 51881 - DNA, 25 bp, Saccharomyces pastorianus
gagttaactgccaaagttatagaac

SEQ ID NO: 51882 - DNA, 25 bp, Saccharomyces pastorianus
tgcagcggattttgtcttaggacat

SEQ ID NO: 51883 - DNA, 25 bp, Saccharomyces pastorianus
actgccaaagttatagaactttccg

SEQ ID NO: 51884 - DNA, 25 bp, Saccharomyces pastorianus
gcggattttgtcttaggacatgtaa

SEQ ID NO: 51885 - DNA, 25 bp, Saccharomyces pastorianus
gactcattttccactgtatgaccgt

SEQ ID NO: 51886 - DNA, 25 bp, Saccharomyces pastorianus
ggctgagattataccgtgcgcaatt

SEQ ID NO: 51887 - DNA, 25 bp, Saccharomyces pastorianus
tattgctattcttttcctatgcctt

SEQ ID NO: 51888 - DNA, 25 bp, Saccharomyces pastorianus
gaggatgtcaaggtcccgtatcact

SEQ ID NO: 51889 - DNA, 25 bp, Saccharomyces pastorianus
tgttgtccacattctcttctttatt

SEQ ID NO: 51890 - DNA, 25 bp, Saccharomyces pastorianus
tcatggcaggttttgctcacggtgt

SEQ ID NO: 51891 - DNA, 25 bp, Saccharomyces pastorianus
actttggctccaatcgtcattgata

SEQ ID NO: 51892 - DNA, 25 bp, Saccharomyces pastorianus
gtgttatcatttgtactttggctcc

SEQ ID NO: 51893 - DNA, 25 bp, Saccharomyces pastorianus
ggccattattcggtatgtgctgtaa

SEQ ID NO: 51894 - DNA, 25 bp, Saccharomyces pastorianus
tttcttgttgttctgggccattatt

SEQ ID NO: 51895 - DNA, 25 bp, Saccharomyces pastorianus
gtgaactccgctttacgtgttatca

SEQ ID NO: 51896 - DNA, 25 bp, Saccharomyces pastorianus
gtgggcgcattgaacggttcgctat

SEQ ID NO: 51897 - DNA, 25 bp, Saccharomyces pastorianus
agacgggcttgatcaactggttttt

SEQ ID NO: 51898 - DNA, 25 bp, Saccharomyces pastorianus
atgacagactcgtacaacttggcgc

SEQ ID NO: 51899 - DNA, 25 bp, Saccharomyces pastorianus
tttgcttcacctacaactctttgaa

SEQ ID NO: 51900 - DNA, 25 bp, Saccharomyces pastorianus
acaacttggcgcctgtaacattgaa

SEQ ID NO: 51901 - DNA, 25 bp, Saccharomyces pastorianus
agctgcggatcgttaggttattcta

SEQ ID NO: 51902 - DNA, 25 bp, Saccharomyces pastorianus
tcggcatcattagggagacgggctt

SEQ ID NO: 51903 - DNA, 25 bp, Saccharomyces pastorianus
gtcattctgcgtctgtttttctaga

SEQ ID NO: 51904 - DNA, 25 bp, Saccharomyces pastorianus
gtgggctagctttactgtcattctg

SEQ ID NO: 51905 - DNA, 25 bp, Saccharomyces pastorianus
tgcctagtgcacattctcagttcat

SEQ ID NO: 51906 - DNA, 25 bp, Saccharomyces pastorianus
aatgcatttttgctagtgggctagc

SEQ ID NO: 51907 - DNA, 25 bp, Saccharomyces pastorianus
gaatagtacagccgccgcgataaat

SEQ ID NO: 51908 - DNA, 25 bp, Saccharomyces pastorianus
gcgataaatcctaacccaaatgtca

SEQ ID NO: 51909 - DNA, 25 bp, Saccharomyces pastorianus
aaatcctaacccaaatgtcataccg

SEQ ID NO: 51910 - DNA, 25 bp, Saccharomyces pastorianus
ccgcgataaatcctaacccaaatgt

SEQ ID NO: 51911 - DNA, 25 bp, Saccharomyces pastorianus
gataaatcctaacccaaatgtcata

SEQ ID NO: 51912 - DNA, 25 bp, Saccharomyces pastorianus
cgcgataaatcctaacccaaatgtc

SEQ ID NO: 51913 - DNA, 25 bp, Saccharomyces pastorianus
gccgcgataaatcctaacccaaatg

SEQ ID NO: 51914 - DNA, 25 bp, Saccharomyces pastorianus
cgccgcgataaatcctaacccaaat

SEQ ID NO: 51915 - DNA, 25 bp, Saccharomyces pastorianus
tcctaacccaaatgtcataccgttc

SEQ ID NO: 51916 - DNA, 25 bp, Saccharomyces pastorianus
atgaatagtacagccgccgcgataa

SEQ ID NO: 51917 - DNA, 25 bp, Saccharomyces pastorianus
aatcctaacccaaatgtcataccgt

SEQ ID NO: 51918 - DNA, 25 bp, Saccharomyces pastorianus
aagtgcctatagaagtgcttaaaga

SEQ ID NO: 51919 - DNA, 25 bp, Saccharomyces pastorianus
gcctatagaagtgcttaaagacatg

SEQ ID NO: 51920 - DNA, 25 bp, Saccharomyces pastorianus
gtgcctatagaagtgcttaaagaca

SEQ ID NO: 51921 - DNA, 25 bp, Saccharomyces pastorianus
gaagtgcctatagaagtgcttaaag

SEQ ID NO: 51922 - DNA, 25 bp, Saccharomyces pastorianus
tgcctatagaagtgcttaaagacat

SEQ ID NO: 51923 - DNA, 25 bp, Saccharomyces pastorianus
ggaagaagaagaagtgcctatagaa

SEQ ID NO: 51924 - DNA, 25 bp, Saccharomyces pastorianus
agaagtgcctatagaagtgcttaaa

SEQ ID NO: 51925 - DNA, 25 bp, Saccharomyces pastorianus
tatagaagtgcttaaagacatgctc

SEQ ID NO: 51926 - DNA, 25 bp, Saccharomyces pastorianus
gaagaagtgcctatagaagtgctta

SEQ ID NO: 51927 - DNA, 25 bp, Saccharomyces pastorianus
aagaagtgcctatagaagtgcttaa

SEQ ID NO: 51928 - DNA, 25 bp, Saccharomyces pastorianus
agtgcctatagaagtgcttaaagac

SEQ ID NO: 51929 - DNA, 25 bp, Saccharomyces pastorianus
cttacctggcgatgtatcacgattc

SEQ ID NO: 51930 - DNA, 25 bp, Saccharomyces pastorianus
tccttacctggcgatgtatcacgat

SEQ ID NO: 51931 - DNA, 25 bp, Saccharomyces pastorianus
tacctggcgatgtatcacgattcag

SEQ ID NO: 51932 - DNA, 25 bp, Saccharomyces pastorianus
gaagccctgagacatccttacctgg

SEQ ID NO: 51933 - DNA, 25 bp, Saccharomyces pastorianus
cctgagacatccttacctggcgatg

SEQ ID NO: 51934 - DNA, 25 bp, Saccharomyces pastorianus
gacatccttacctggcgatgtatca

SEQ ID NO: 51935 - DNA, 25 bp, Saccharomyces pastorianus
tgcggaagccctgagacatccttac

SEQ ID NO: 51936 - DNA, 25 bp, Saccharomyces pastorianus
gctgcggaagccctgagacatcctt

SEQ ID NO: 51937 - DNA, 25 bp, Saccharomyces pastorianus
gagacatccttacctggcgatgtat

SEQ ID NO: 51938 - DNA, 25 bp, Saccharomyces pastorianus
agcgctgcggaagccctgagacatc

SEQ ID NO: 51939 - DNA, 25 bp, Saccharomyces pastorianus
cctggcgatgtatcacgattcagcg

SEQ ID NO: 51940 - DNA, 25 bp, Saccharomyces pastorianus
taatggctcctctactttaagtgat

SEQ ID NO: 51941 - DNA, 25 bp, Saccharomyces pastorianus
acttaccagattttgagggcgctca

SEQ ID NO: 51942 - DNA, 25 bp, Saccharomyces pastorianus
atccatagtgcacaggttatccata

SEQ ID NO: 51943 - DNA, 25 bp, Saccharomyces pastorianus
gtagcgacgcgatggtacagagcac

SEQ ID NO: 51944 - DNA, 25 bp, Saccharomyces pastorianus
atagcaaacttacccatgaggccgc

SEQ ID NO: 51945 - DNA, 25 bp, Saccharomyces pastorianus
ggcagggactatcaccatcagttat

SEQ ID NO: 51946 - DNA, 25 bp, Saccharomyces pastorianus
tgaggccgcctttaccgtgggagaa

SEQ ID NO: 51947 - DNA, 25 bp, Saccharomyces pastorianus
attttggaagtgctaggcaccccgt

SEQ ID NO: 51948 - DNA, 25 bp, Saccharomyces pastorianus
tataaagccatcgaacctgttactg

SEQ ID NO: 51949 - DNA, 25 bp, Saccharomyces pastorianus
agggcgctcaaatctatccatagtg

SEQ ID NO: 51950 - DNA, 25 bp, Saccharomyces pastorianus
aaggtttgcgattttgggctagctc

SEQ ID NO: 51951 - DNA, 25 bp, Saccharomyces pastorianus
aaggctggccggtggttacaacaat

SEQ ID NO: 51952 - DNA, 25 bp, Saccharomyces pastorianus
ttacgatgtcttccacttgtgcaaa

SEQ ID NO: 51953 - DNA, 25 bp, Saccharomyces pastorianus
gtaaaattgacctgttctgggaaca

SEQ ID NO: 51954 - DNA, 25 bp, Saccharomyces pastorianus
gaacatggttgactctgcatggaac

SEQ ID NO: 51955 - DNA, 25 bp, Saccharomyces pastorianus
gctcctgagggtatcggatgccgaa

SEQ ID NO: 51956 - DNA, 25 bp, Saccharomyces pastorianus
gacaatacgtctggcaagacctgcc

SEQ ID NO: 51957 - DNA, 25 bp, Saccharomyces pastorianus
gacacctctacaaaagattcctttt

SEQ ID NO: 51958 - DNA, 25 bp, Saccharomyces pastorianus
atcaataccatctaatttccagtta

SEQ ID NO: 51959 - DNA, 25 bp, Saccharomyces pastorianus
tgcatggaacaaagacacctctaca

SEQ ID NO: 51960 - DNA, 25 bp, Saccharomyces pastorianus
aatcattgtggatacgctcctgagg

SEQ ID NO: 51961 - DNA, 25 bp, Saccharomyces pastorianus
aagacctgcccgatatttacgatgt

SEQ ID NO: 51962 - DNA, 25 bp, Saccharomyces pastorianus
ggtgacctttacgactttcttgata

SEQ ID NO: 51963 - DNA, 25 bp, Saccharomyces pastorianus
atgcttgatttttacactgacgatt

SEQ ID NO: 51964 - DNA, 25 bp, Saccharomyces pastorianus
gactattggtcgctgggtgctacta

SEQ ID NO: 51965 - DNA, 25 bp, Saccharomyces pastorianus
gggtgctactatattctatttgctt

SEQ ID NO: 51966 - DNA, 25 bp, Saccharomyces pastorianus
tgctaagagtcaaggcaccccttca

SEQ ID NO: 51967 - DNA, 25 bp, Saccharomyces pastorianus
agagtactgcgagtgcggtgacctt

SEQ ID NO: 51968 - DNA, 25 bp, Saccharomyces pastorianus
gattcgtactacgtcatggttctag

SEQ ID NO: 51969 - DNA, 25 bp, Saccharomyces pastorianus
gctcacagcttagggattgcacata

SEQ ID NO: 51970 - DNA, 25 bp, Saccharomyces pastorianus
gaagactttaagctctcacagccct

SEQ ID NO: 51971 - DNA, 25 bp, Saccharomyces pastorianus
tcaaaccgtatcgagacttcttctt

SEQ ID NO: 51972 - DNA, 25 bp, Saccharomyces pastorianus
gaggaagctggaccaatcatccgcc

SEQ ID NO: 51973 - DNA, 25 bp, Saccharomyces pastorianus
caagctgttggcgataagctagagg

SEQ ID NO: 51974 - DNA, 25 bp, Saccharomyces pastorianus
aaggcaagctgttggcgataagcta

SEQ ID NO: 51975 - DNA, 25 bp, Saccharomyces pastorianus
aggcaagctgttggcgataagctag

SEQ ID NO: 51976 - DNA, 25 bp, Saccharomyces pastorianus
gcaaatccttaaaattcaaactgaa

SEQ ID NO: 51977 - DNA, 25 bp, Saccharomyces pastorianus
ctgttggcgataagctagaggatac

SEQ ID NO: 51978 - DNA, 25 bp, Saccharomyces pastorianus
gatacgcaaatccttaaaattcaaa

SEQ ID NO: 51979 - DNA, 25 bp, Saccharomyces pastorianus
gaaaggcaagctgttggcgataagc

SEQ ID NO: 51980 - DNA, 25 bp, Saccharomyces pastorianus
agctagaggatacgcaaatccttaa

SEQ ID NO: 51981 - DNA, 25 bp, Saccharomyces pastorianus
aagaaaggcaagctgttggcgataa

SEQ ID NO: 51982 - DNA, 25 bp, Saccharomyces pastorianus
taagctagaggatacgcaaatcctt

SEQ ID NO: 51983 - DNA, 25 bp, Saccharomyces pastorianus
aaaagaaaggcaagctgttggcgat

SEQ ID NO: 51984 - DNA, 25 bp, Saccharomyces pastorianus
ctatatctactctctttccaaggtg

SEQ ID NO: 51985 - DNA, 25 bp, Saccharomyces pastorianus
agtggattggagactaccttgtaat

SEQ ID NO: 51986 - DNA, 25 bp, Saccharomyces pastorianus
gtaactctgtgcgtgtttccttgac

SEQ ID NO: 51987 - DNA, 25 bp, Saccharomyces pastorianus
ggtcgcccggaggagaattcatcat

SEQ ID NO: 51988 - DNA, 25 bp, Saccharomyces pastorianus
actggtcctgtccatgatttcacat

SEQ ID NO: 51989 - DNA, 25 bp, Saccharomyces pastorianus
tgacagccactacatcaccaagatt

SEQ ID NO: 51990 - DNA, 25 bp, Saccharomyces pastorianus
aatttggtgtcattgctggctatat

SEQ ID NO: 51991 - DNA, 25 bp, Saccharomyces pastorianus
cagctaccatttcctttttcgattt

SEQ ID NO: 51992 - DNA, 25 bp, Saccharomyces pastorianus
tgatttcacatggtccccaacttca

SEQ ID NO: 51993 - DNA, 25 bp, Saccharomyces pastorianus
ttctgtatgcaaatggtcgcccgga

SEQ ID NO: 51994 - DNA, 25 bp, Saccharomyces pastorianus
aaacacgatgctattttctccttcc

SEQ ID NO: 51995 - DNA, 25 bp, Saccharomyces pastorianus
aaggtaaagccaccttctcgcaagg

SEQ ID NO: 51996 - DNA, 25 bp, Saccharomyces pastorianus
tgctggtgcaggttgggctaaatct

SEQ ID NO: 51997 - DNA, 25 bp, Saccharomyces pastorianus
gataactctagcgaagaatccgttt

SEQ ID NO: 51998 - DNA, 25 bp, Saccharomyces pastorianus
tttcttgaacggcatggcgggatct

SEQ ID NO: 51999 - DNA, 25 bp, Saccharomyces pastorianus
tctcgcaaggcggtgaccagttgga

SEQ ID NO: 52000 - DNA, 25 bp, Saccharomyces pastorianus
ccattcaaccctaacggatctagta

SEQ ID NO: 52001 - DNA, 25 bp, Saccharomyces pastorianus
ggaggccaactcttggtacccagaa

SEQ ID NO: 52002 - DNA, 25 bp, Saccharomyces pastorianus
aggtgtccgttcacaattctctaaa

SEQ ID NO: 52003 - DNA, 25 bp, Saccharomyces pastorianus
ggcgggatctaaattaccaattgct

SEQ ID NO: 52004 - DNA, 25 bp, Saccharomyces pastorianus
gatgcctcaccctgagagagtttgc

SEQ ID NO: 52005 - DNA, 25 bp, Saccharomyces pastorianus
tagagttcttgccatgatgcctcac

SEQ ID NO: 52006 - DNA, 25 bp, Saccharomyces pastorianus
ggtgcagttttccaagtctctagta

SEQ ID NO: 52007 - DNA, 25 bp, Saccharomyces pastorianus
cctttgcctctagatgtggtttgga

SEQ ID NO: 52008 - DNA, 25 bp, Saccharomyces pastorianus
ctttactagaaatggcctttgcctc

SEQ ID NO: 52009 - DNA, 25 bp, Saccharomyces pastorianus
ggtggtttacttgtcactttactag

SEQ ID NO: 52010 - DNA, 25 bp, Saccharomyces pastorianus
ggtaggtaagccatctttccaaagt

SEQ ID NO: 52011 - DNA, 25 bp, Saccharomyces pastorianus
taaatcattgggtgcctctgctttg

SEQ ID NO: 52012 - DNA, 25 bp, Saccharomyces pastorianus
ggtaacaaatcacccactgttcatg

SEQ ID NO: 52013 - DNA, 25 bp, Saccharomyces pastorianus
aaagattctgtccttgtattggttg

SEQ ID NO: 52014 - DNA, 25 bp, Saccharomyces pastorianus
accgcggaagaagagtttgccacaa

SEQ ID NO: 52015 - DNA, 25 bp, Saccharomyces pastorianus
gagagacaatccaaagaccgcggaa

SEQ ID NO: 52016 - DNA, 25 bp, Saccharomyces pastorianus
gagtttgattcaattgcaccaagaa

SEQ ID NO: 52017 - DNA, 25 bp, Saccharomyces pastorianus
catgttgcgggcatgtacgccatca

SEQ ID NO: 52018 - DNA, 25 bp, Saccharomyces pastorianus
agctgtcgatcacatgttgcgggca

SEQ ID NO: 52019 - DNA, 25 bp, Saccharomyces pastorianus
cgatcacatgttgcgggcatgtacg

SEQ ID NO: 52020 - DNA, 25 bp, Saccharomyces pastorianus
tgttgcgggcatgtacgccatcaag

SEQ ID NO: 52021 - DNA, 25 bp, Saccharomyces pastorianus
atgttgcgggcatgtacgccatcaa

SEQ ID NO: 52022 - DNA, 25 bp, Saccharomyces pastorianus
gttgcgggcatgtacgccatcaagt

SEQ ID NO: 52023 - DNA, 25 bp, Saccharomyces pastorianus
ctgtcgatcacatgttgcgggcatg

SEQ ID NO: 52024 - DNA, 25 bp, Saccharomyces pastorianus
gctgtcgatcacatgttgcgggcat

SEQ ID NO: 52025 - DNA, 25 bp, Saccharomyces pastorianus
tcagctgtcgatcacatgttgcggg

SEQ ID NO: 52026 - DNA, 25 bp, Saccharomyces pastorianus
gtcgatcacatgttgcgggcatgta

SEQ ID NO: 52027 - DNA, 25 bp, Saccharomyces pastorianus
ttgcgggcatgtacgccatcaagtc

SEQ ID NO: 52028 - DNA, 25 bp, Saccharomyces pastorianus
atgaaaaccacccatctggcagatt

SEQ ID NO: 52029 - DNA, 25 bp, Saccharomyces pastorianus
aaacttgacgtggactgtcccttca

SEQ ID NO: 52030 - DNA, 25 bp, Saccharomyces pastorianus
acaaactgcaggtgcgtatcctatt

SEQ ID NO: 52031 - DNA, 25 bp, Saccharomyces pastorianus
atctacgacgacgagttggccgtga

SEQ ID NO: 52032 - DNA, 25 bp, Saccharomyces pastorianus
aagggccgcttggttctgttcgaca

SEQ ID NO: 52033 - DNA, 25 bp, Saccharomyces pastorianus
tgaaagacggcagcgcgcagatcta

SEQ ID NO: 52034 - DNA, 25 bp, Saccharomyces pastorianus
tatcccggacaacctgaagcagatc

SEQ ID NO: 52035 - DNA, 25 bp, Saccharomyces pastorianus
gtatcctattgcagcgccaagtaga

SEQ ID NO: 52036 - DNA, 25 bp, Saccharomyces pastorianus
tgatccgcgtcatgcacaaactgca

SEQ ID NO: 52037 - DNA, 25 bp, Saccharomyces pastorianus
gatcaaggctcaattgcccgtgttg

SEQ ID NO: 52038 - DNA, 25 bp, Saccharomyces pastorianus
agatcactcaggactgctgcgtgca

SEQ ID NO: 52039 - DNA, 25 bp, Saccharomyces pastorianus
ttcgatatacgaataaactccccgt

SEQ ID NO: 52040 - DNA, 25 bp, Saccharomyces pastorianus
gataagctatttcgatatacgaata

SEQ ID NO: 52041 - DNA, 25 bp, Saccharomyces pastorianus
gttccttatctaatggtggtgggca

SEQ ID NO: 52042 - DNA, 25 bp, Saccharomyces pastorianus
cgatatacgaataaactccccgtat

SEQ ID NO: 52043 - DNA, 25 bp, Saccharomyces pastorianus
aagataagctatttcgatatacgaa

SEQ ID NO: 52044 - DNA, 25 bp, Saccharomyces pastorianus
tggtggtgggcattcagagcaaaaa

SEQ ID NO: 52045 - DNA, 25 bp, Saccharomyces pastorianus
agttccttatctaatggtggtgggc

SEQ ID NO: 52046 - DNA, 25 bp, Saccharomyces pastorianus
ttccttatctaatggtggtgggcat

SEQ ID NO: 52047 - DNA, 25 bp, Saccharomyces pastorianus
tatacgaataaactccccgtataag

SEQ ID NO: 52048 - DNA, 25 bp, Saccharomyces pastorianus
gaagataagctatttcgatatacga

SEQ ID NO: 52049 - DNA, 25 bp, Saccharomyces pastorianus
ggtgggcattcagagcaaaaagaaa

SEQ ID NO: 52050 - DNA, 25 bp, Saccharomyces pastorianus
aacagtctatccatgcaatttccgc

SEQ ID NO: 52051 - DNA, 25 bp, Saccharomyces pastorianus
acatttcaacagcttcctcgaggga

SEQ ID NO: 52052 - DNA, 25 bp, Saccharomyces pastorianus
gaggcatgactgaccctttggaaat

SEQ ID NO: 52053 - DNA, 25 bp, Saccharomyces pastorianus
ttaactatagatccctcccattctt

SEQ ID NO: 52054 - DNA, 25 bp, Saccharomyces pastorianus
acacacattggcaatcacttcctta

SEQ ID NO: 52055 - DNA, 25 bp, Saccharomyces pastorianus
aacatttgcttccatctgatcagtg

SEQ ID NO: 52056 - DNA, 25 bp, Saccharomyces pastorianus
actttttgtcaacgatccgcatcat

SEQ ID NO: 52057 - DNA, 25 bp, Saccharomyces pastorianus
attgcagaaagattgtcggcccctc

SEQ ID NO: 52058 - DNA, 25 bp, Saccharomyces pastorianus
tttggaattcatcgagcctctacta

SEQ ID NO: 52059 - DNA, 25 bp, Saccharomyces pastorianus
gcaagtgtcccgcattattaactat

SEQ ID NO: 52060 - DNA, 25 bp, Saccharomyces pastorianus
gttattattcatggcgcgtccattt

SEQ ID NO: 52061 - DNA, 25 bp, Saccharomyces pastorianus
agaactacctggcttggaacctgtc

SEQ ID NO: 52062 - DNA, 25 bp, Saccharomyces pastorianus
ggtgaatctcatgacccttacgaca

SEQ ID NO: 52063 - DNA, 25 bp, Saccharomyces pastorianus
atgcacatatggtgggactcttata

SEQ ID NO: 52064 - DNA, 25 bp, Saccharomyces pastorianus
aacacaacgctcaatatccggaatt

SEQ ID NO: 52065 - DNA, 25 bp, Saccharomyces pastorianus
aaacccatccgtgtttgacatcgaa

SEQ ID NO: 52066 - DNA, 25 bp, Saccharomyces pastorianus
ggaacctgtccaaattagcctacca

SEQ ID NO: 52067 - DNA, 25 bp, Saccharomyces pastorianus
gtgctccttgcaccgtaataagcta

SEQ ID NO: 52068 - DNA, 25 bp, Saccharomyces pastorianus
aatatcaatctcatgtgctccttgc

SEQ ID NO: 52069 - DNA, 25 bp, Saccharomyces pastorianus
ttagcctaccagaaatgcctacttc

SEQ ID NO: 52070 - DNA, 25 bp, Saccharomyces pastorianus
tagcaaacacccttgtggcgacatt

SEQ ID NO: 52071 - DNA, 25 bp, Saccharomyces pastorianus
ctatatctcaccaatccatgttcag

SEQ ID NO: 52072 - DNA, 25 bp, Saccharomyces pastorianus
ccaggtgccagagtcgccagaagaa

SEQ ID NO: 52073 - DNA, 25 bp, Saccharomyces pastorianus
aactctcaccaaaccactaaggaag

SEQ ID NO: 52074 - DNA, 25 bp, Saccharomyces pastorianus
agaccaggtgccagagtcgccagaa

SEQ ID NO: 52075 - DNA, 25 bp, Saccharomyces pastorianus
gccagagtcgccagaagaaagagat

SEQ ID NO: 52076 - DNA, 25 bp, Saccharomyces pastorianus
tggtaactctcaccaaaccactaag

SEQ ID NO: 52077 - DNA, 25 bp, Saccharomyces pastorianus
gtaactctcaccaaaccactaagga

SEQ ID NO: 52078 - DNA, 25 bp, Saccharomyces pastorianus
gaccaggtgccagagtcgccagaag

SEQ ID NO: 52079 - DNA, 25 bp, Saccharomyces pastorianus
accaggtgccagagtcgccagaaga

SEQ ID NO: 52080 - DNA, 25 bp, Saccharomyces pastorianus
actctcaccaaaccactaaggaaga

SEQ ID NO: 52081 - DNA, 25 bp, Saccharomyces pastorianus
aacagaccaggtgccagagtcgcca

SEQ ID NO: 52082 - DNA, 25 bp, Saccharomyces pastorianus
caggtgccagagtcgccagaagaaa

SEQ ID NO: 52083 - DNA, 25 bp, Saccharomyces pastorianus
actatgcgtgatcttaagatcgaga

SEQ ID NO: 52084 - DNA, 25 bp, Saccharomyces pastorianus
gatcgccgttcacgtcactgtcaga

SEQ ID NO: 52085 - DNA, 25 bp, Saccharomyces pastorianus
gaaaagatcgccgttcacgtcactg

SEQ ID NO: 52086 - DNA, 25 bp, Saccharomyces pastorianus
cgtcagaactttcggtatcagaaga

SEQ ID NO: 52087 - DNA, 25 bp, Saccharomyces pastorianus
tcgccgttcacgtcactgtcagagg

SEQ ID NO: 52088 - DNA, 25 bp, Saccharomyces pastorianus
aagatcgccgttcacgtcactgtca

SEQ ID NO: 52089 - DNA, 25 bp, Saccharomyces pastorianus
ccgttcacgtcactgtcagaggtcc

SEQ ID NO: 52090 - DNA, 25 bp, Saccharomyces pastorianus
aacactatgcgtgatcttaagatcg

SEQ ID NO: 52091 - DNA, 25 bp, Saccharomyces pastorianus
gccgttcacgtcactgtcagaggtc

SEQ ID NO: 52092 - DNA, 25 bp, Saccharomyces pastorianus
aaaagatcgccgttcacgtcactgt

SEQ ID NO: 52093 - DNA, 25 bp, Saccharomyces pastorianus
gatacaccgtcagaactttcggtat

SEQ ID NO: 52094 - DNA, 25 bp, Saccharomyces pastorianus
aaggaggactcccaatactctgccg

SEQ ID NO: 52095 - DNA, 25 bp, Saccharomyces pastorianus
gtgtccattcaaggctgctaacttt

SEQ ID NO: 52096 - DNA, 25 bp, Saccharomyces pastorianus
ctgaaccaaactatctctccagttt

SEQ ID NO: 52097 - DNA, 25 bp, Saccharomyces pastorianus
attacgtctacggtatgagtcccct

SEQ ID NO: 52098 - DNA, 25 bp, Saccharomyces pastorianus
taactttcaaagagacggcccaatg

SEQ ID NO: 52099 - DNA, 25 bp, Saccharomyces pastorianus
gacttcgaacaacctagagctttat

SEQ ID NO: 52100 - DNA, 25 bp, Saccharomyces pastorianus
gaaatcttggatgtccatactctaa

SEQ ID NO: 52101 - DNA, 25 bp, Saccharomyces pastorianus
gggccaactatcagcaactgcctgt

SEQ ID NO: 52102 - DNA, 25 bp, Saccharomyces pastorianus
gaatgggaacctgtcgaccttcaag

SEQ ID NO: 52103 - DNA, 25 bp, Saccharomyces pastorianus
tatgagtccccttgacttcgaacaa

SEQ ID NO: 52104 - DNA, 25 bp, Saccharomyces pastorianus
taaagtcatcgctgagggcctggag

SEQ ID NO: 52105 - DNA, 25 bp, Saccharomyces pastorianus
aaggagcttgacttggaagaggaat

SEQ ID NO: 52106 - DNA, 25 bp, Saccharomyces pastorianus
agaatatcacagaacgcaacaaatg

SEQ ID NO: 52107 - DNA, 25 bp, Saccharomyces pastorianus
acaggatattaatcgtttagaacac

SEQ ID NO: 52108 - DNA, 25 bp, Saccharomyces pastorianus
gagaagttcagtactctgttcatga

SEQ ID NO: 52109 - DNA, 25 bp, Saccharomyces pastorianus
gaagaaagcctatcaaatgagctga

SEQ ID NO: 52110 - DNA, 25 bp, Saccharomyces pastorianus
gagaagcaacttaagactcttaccg

SEQ ID NO: 52111 - DNA, 25 bp, Saccharomyces pastorianus
acgcaaatttatccgatgaaagagc

SEQ ID NO: 52112 - DNA, 25 bp, Saccharomyces pastorianus
caacagagcgaaactgcggtgaata

SEQ ID NO: 52113 - DNA, 25 bp, Saccharomyces pastorianus
aaaagttgctttacaacagagcgaa

SEQ ID NO: 52114 - DNA, 25 bp, Saccharomyces pastorianus
tggtcaattgacgtctaaactagat

SEQ ID NO: 52115 - DNA, 25 bp, Saccharomyces pastorianus
gactcttaccgagaaggagcttgac

SEQ ID NO: 52116 - DNA, 25 bp, Saccharomyces pastorianus
aagaaagcactatcaccatcgctgc

SEQ ID NO: 52117 - DNA, 25 bp, Saccharomyces pastorianus
gtatttttgagtttcaaccatttca

SEQ ID NO: 52118 - DNA, 25 bp, Saccharomyces pastorianus
gtttattggtgtctttcatcgtcgc

SEQ ID NO: 52119 - DNA, 25 bp, Saccharomyces pastorianus
taggttcaaagatacgcttgcgtta

SEQ ID NO: 52120 - DNA, 25 bp, Saccharomyces pastorianus
atcgctgccacccatggacgctgaa

SEQ ID NO: 52121 - DNA, 25 bp, Saccharomyces pastorianus
atggacgctgaatcgggtgaacaac

SEQ ID NO: 52122 - DNA, 25 bp, Saccharomyces pastorianus
atctaagaaaccttcgcgccatatt

SEQ ID NO: 52123 - DNA, 25 bp, Saccharomyces pastorianus
gatacgcttgcgttatttttggtat

SEQ ID NO: 52124 - DNA, 25 bp, Saccharomyces pastorianus
catcgtcgccaccaagtgcaaagat

SEQ ID NO: 52125 - DNA, 25 bp, Saccharomyces pastorianus
ggtgaacaaccaacagaatttgcca

SEQ ID NO: 52126 - DNA, 25 bp, Saccharomyces pastorianus
ggcaaattgcttcattgtacttttc

SEQ ID NO: 52127 - DNA, 25 bp, Saccharomyces pastorianus
gatgcctacgaattggtcttgaaca

SEQ ID NO: 52128 - DNA, 25 bp, Saccharomyces pastorianus
ggaagcccgttctttattatctgaa

SEQ ID NO: 52129 - DNA, 25 bp, Saccharomyces pastorianus
taccgttgtccatgagtcttctgaa

SEQ ID NO: 52130 - DNA, 25 bp, Saccharomyces pastorianus
ggattccatcgtttctttaattaag

SEQ ID NO: 52131 - DNA, 25 bp, Saccharomyces pastorianus
gttaaggctgcttatccagtacatg

SEQ ID NO: 52132 - DNA, 25 bp, Saccharomyces pastorianus
tagaaaaagccaaccagtcccagag

SEQ ID NO: 52133 - DNA, 25 bp, Saccharomyces pastorianus
ttgaacatcaccaaggaagcccgtt

SEQ ID NO: 52134 - DNA, 25 bp, Saccharomyces pastorianus
gttccaccgaaaaggctgccacaat

SEQ ID NO: 52135 - DNA, 25 bp, Saccharomyces pastorianus
tgacgttaaatctgccgatgcctac

SEQ ID NO: 52136 - DNA, 25 bp, Saccharomyces pastorianus
gaagctgattcatccattcatgcca

SEQ ID NO: 52137 - DNA, 25 bp, Saccharomyces pastorianus
acatcttttggtcaagggtcacgtt

SEQ ID NO: 52138 - DNA, 25 bp, Saccharomyces pastorianus
gaattcatcaacatttttaccgacg

SEQ ID NO: 52139 - DNA, 25 bp, Saccharomyces pastorianus
agaactttactatctgtcccaggct

SEQ ID NO: 52140 - DNA, 25 bp, Saccharomyces pastorianus
gtttattcaacatccattcttgcca

SEQ ID NO: 52141 - DNA, 25 bp, Saccharomyces pastorianus
gaatttggtgttctaacctcgttcg

SEQ ID NO: 52142 - DNA, 25 bp, Saccharomyces pastorianus
gttcgcttacccagttgttgattct

SEQ ID NO: 52143 - DNA, 25 bp, Saccharomyces pastorianus
tactagacctgaaactctattcggt

SEQ ID NO: 52144 - DNA, 25 bp, Saccharomyces pastorianus
gatcgttacaagcatttacacggta

SEQ ID NO: 52145 - DNA, 25 bp, Saccharomyces pastorianus
gcctccagattggttaattggtccg

SEQ ID NO: 52146 - DNA, 25 bp, Saccharomyces pastorianus
gggaaacgtcataacctagaattca

SEQ ID NO: 52147 - DNA, 25 bp, Saccharomyces pastorianus
attacaccagctcatgaccaaaacg

SEQ ID NO: 52148 - DNA, 25 bp, Saccharomyces pastorianus
tgccgttaagattacaccagctcat

SEQ ID NO: 52149 - DNA, 25 bp, Saccharomyces pastorianus
gaactacccacacagctagcattag

SEQ ID NO: 52150 - DNA, 25 bp, Saccharomyces pastorianus
gataagctacgtgcggtactgaccc

SEQ ID NO: 52151 - DNA, 25 bp, Saccharomyces pastorianus
ttgtcaaatcctggaatccggcgaa

SEQ ID NO: 52152 - DNA, 25 bp, Saccharomyces pastorianus
atgaaatcatcgacaatccttccgc

SEQ ID NO: 52153 - DNA, 25 bp, Saccharomyces pastorianus
gaagtaatcatacgtcccgcgaagg

SEQ ID NO: 52154 - DNA, 25 bp, Saccharomyces pastorianus
gatggttcgtctcaatttgtatcac

SEQ ID NO: 52155 - DNA, 25 bp, Saccharomyces pastorianus
atcgctatgaacagcatgtgcgcaa

SEQ ID NO: 52156 - DNA, 25 bp, Saccharomyces pastorianus
ggtactgacccctattatcaatcgt

SEQ ID NO: 52157 - DNA, 25 bp, Saccharomyces pastorianus
gtttgttctgtaacgggccccattg

SEQ ID NO: 52158 - DNA, 25 bp, Saccharomyces pastorianus
atgtgcgcaagcatacccattgcta

SEQ ID NO: 52159 - DNA, 25 bp, Saccharomyces pastorianus
aaatgctgcgttcttggctttagtc

SEQ ID NO: 52160 - DNA, 25 bp, Saccharomyces pastorianus
gtatttaccttgacttcattagctt

SEQ ID NO: 52161 - DNA, 25 bp, Saccharomyces pastorianus
ttagccgccatgtcaatgtatatcg

SEQ ID NO: 52162 - DNA, 25 bp, Saccharomyces pastorianus
gtgccgccaccgttgaagatatcaa

SEQ ID NO: 52163 - DNA, 25 bp, Saccharomyces pastorianus
aactggcaaacttcgcatacattac

SEQ ID NO: 52164 - DNA, 25 bp, Saccharomyces pastorianus
cacttgtttatttattgcctgcaaa

SEQ ID NO: 52165 - DNA, 25 bp, Saccharomyces pastorianus
attaaagacgaatcctcccaatggg

SEQ ID NO: 52166 - DNA, 25 bp, Saccharomyces pastorianus
ggatatcgccgtacccgaaacaaat

SEQ ID NO: 52167 - DNA, 25 bp, Saccharomyces pastorianus
ttgaaaccatcatacttagccgcca

SEQ ID NO: 52168 - DNA, 25 bp, Saccharomyces pastorianus
actttcattcattacagcggtggtg

SEQ ID NO: 52169 - DNA, 25 bp, Saccharomyces pastorianus
acctattggatcgttttctatctca

SEQ ID NO: 52170 - DNA, 25 bp, Saccharomyces pastorianus
gcatacattactgacggtgccgcca

SEQ ID NO: 52171 - DNA, 25 bp, Saccharomyces pastorianus
gaatatttctccatttacgctagtg

SEQ ID NO: 52172 - DNA, 25 bp, Saccharomyces pastorianus
ttgattctttgttccccggcaggcg

SEQ ID NO: 52173 - DNA, 25 bp, Saccharomyces pastorianus
aaaagcaatgttatcaccgtcccta

SEQ ID NO: 52174 - DNA, 25 bp, Saccharomyces pastorianus
ccggcaggcgtatctcacagagatt

SEQ ID NO: 52175 - DNA, 25 bp, Saccharomyces pastorianus
gcggtgaaccaagattatccctgga

SEQ ID NO: 52176 - DNA, 25 bp, Saccharomyces pastorianus
agtgagaaactctcgccagttcggt

SEQ ID NO: 52177 - DNA, 25 bp, Saccharomyces pastorianus
tcgccagttcggttccaaaatcaca

SEQ ID NO: 52178 - DNA, 25 bp, Saccharomyces pastorianus
tatcttgaacggtgatccggatcaa

SEQ ID NO: 52179 - DNA, 25 bp, Saccharomyces pastorianus
gaaaagtctccgtctttcaagaaat

SEQ ID NO: 52180 - DNA, 25 bp, Saccharomyces pastorianus
ttgctctgaagtgtggcggtgaacc

SEQ ID NO: 52181 - DNA, 25 bp, Saccharomyces pastorianus
aacgtggttcagtcgaatacctatt

SEQ ID NO: 52182 - DNA, 25 bp, Saccharomyces pastorianus
gtcttcatcttcgtcaatgtcttcg

SEQ ID NO: 52183 - DNA, 25 bp, Saccharomyces pastorianus
gaagagtcgaaaacgtcctcacctt

SEQ ID NO: 52184 - DNA, 25 bp, Saccharomyces pastorianus
gttcctaaatcttcgttttcatcat

SEQ ID NO: 52185 - DNA, 25 bp, Saccharomyces pastorianus
atgcttgttcctaaatcttcgtttt

SEQ ID NO: 52186 - DNA, 25 bp, Saccharomyces pastorianus
tatttcctcgtcgtccctagggact

SEQ ID NO: 52187 - DNA, 25 bp, Saccharomyces pastorianus
tcgttgtcattcactatttcctcgt

SEQ ID NO: 52188 - DNA, 25 bp, Saccharomyces pastorianus
ttcgtcctcctctgaagagtcgaaa

SEQ ID NO: 52189 - DNA, 25 bp, Saccharomyces pastorianus
ctaaatcttcgttttcatcatcatc

SEQ ID NO: 52190 - DNA, 25 bp, Saccharomyces pastorianus
ttgtcattcactatttcctcgtcgt

SEQ ID NO: 52191 - DNA, 25 bp, Saccharomyces pastorianus
aaaacgtcctcaccttcttcttcat

SEQ ID NO: 52192 - DNA, 25 bp, Saccharomyces pastorianus
aatgtcttcgtcctcctctgaagag

SEQ ID NO: 52193 - DNA, 25 bp, Saccharomyces pastorianus
agccaagaggtttgaactctgctag

SEQ ID NO: 52194 - DNA, 25 bp, Saccharomyces pastorianus
gccaagaggtttgaactctgctaga

SEQ ID NO: 52195 - DNA, 25 bp, Saccharomyces pastorianus
gaactctgctagaaaattgcgtgtc

SEQ ID NO: 52196 - DNA, 25 bp, Saccharomyces pastorianus
ggtaagccaagaggtttgaactctg

SEQ ID NO: 52197 - DNA, 25 bp, Saccharomyces pastorianus
aactctgctagaaaattgcgtgtcc

SEQ ID NO: 52198 - DNA, 25 bp, Saccharomyces pastorianus
ctctgctagaaaattgcgtgtccac

SEQ ID NO: 52199 - DNA, 25 bp, Saccharomyces pastorianus
actctgctagaaaattgcgtgtcca

SEQ ID NO: 52200 - DNA, 25 bp, Saccharomyces pastorianus
aagccaagaggtttgaactctgcta

SEQ ID NO: 52201 - DNA, 25 bp, Saccharomyces pastorianus
gtaagccaagaggtttgaactctgc

SEQ ID NO: 52202 - DNA, 25 bp, Saccharomyces pastorianus
aggtaagccaagaggtttgaactct

SEQ ID NO: 52203 - DNA, 25 bp, Saccharomyces pastorianus
taagccaagaggtttgaactctgct

SEQ ID NO: 52204 - DNA, 25 bp, Saccharomyces pastorianus
tctaacatttttacttacccatccg

SEQ ID NO: 52205 - DNA, 25 bp, Saccharomyces pastorianus
aacaggcgatcgtaacatgtccaaa

SEQ ID NO: 52206 - DNA, 25 bp, Saccharomyces pastorianus
ctggattccattgggctattttcat

SEQ ID NO: 52207 - DNA, 25 bp, Saccharomyces pastorianus
accacagtcaaagctctcagttatt

SEQ ID NO: 52208 - DNA, 25 bp, Saccharomyces pastorianus
gagaccaaccaaggctgttcaaaca

SEQ ID NO: 52209 - DNA, 25 bp, Saccharomyces pastorianus
cttttgtcactagttctggattcca

SEQ ID NO: 52210 - DNA, 25 bp, Saccharomyces pastorianus
ttagaaggtaccctcttggataatc

SEQ ID NO: 52211 - DNA, 25 bp, Saccharomyces pastorianus
gtacacataacttgctatcccgttt

SEQ ID NO: 52212 - DNA, 25 bp, Saccharomyces pastorianus
gaactctgatagtacaacttctcaa

SEQ ID NO: 52213 - DNA, 25 bp, Saccharomyces pastorianus
gctgtttccattgaaccgtacacat

SEQ ID NO: 52214 - DNA, 25 bp, Saccharomyces pastorianus
gggttctcaacatgggtttactaat

SEQ ID NO: 52215 - DNA, 25 bp, Saccharomyces pastorianus
cggacgacctcttatctcagtataa

SEQ ID NO: 52216 - DNA, 25 bp, Saccharomyces pastorianus
gaaagttcacccattaaagagctat

SEQ ID NO: 52217 - DNA, 25 bp, Saccharomyces pastorianus
aatttgtgttcgttctgtgtccatt

SEQ ID NO: 52218 - DNA, 25 bp, Saccharomyces pastorianus
agcttaatcattgccgtgttacaga

SEQ ID NO: 52219 - DNA, 25 bp, Saccharomyces pastorianus
gtgaataacatcgtctacttgcttg

SEQ ID NO: 52220 - DNA, 25 bp, Saccharomyces pastorianus
aatattcgtttactccctaccacat

SEQ ID NO: 52221 - DNA, 25 bp, Saccharomyces pastorianus
gatttcttttcagcctgtttcggta

SEQ ID NO: 52222 - DNA, 25 bp, Saccharomyces pastorianus
aagcttatacagatacggacgacct

SEQ ID NO: 52223 - DNA, 25 bp, Saccharomyces pastorianus
aacccactaccgaagatgatttgat

SEQ ID NO: 52224 - DNA, 25 bp, Saccharomyces pastorianus
atactcttttgacatctcatacggt

SEQ ID NO: 52225 - DNA, 25 bp, Saccharomyces pastorianus
agcacttgactgaggatggcactga

SEQ ID NO: 52226 - DNA, 25 bp, Saccharomyces pastorianus
aaaagctgctgtggcatttttctac

SEQ ID NO: 52227 - DNA, 25 bp, Saccharomyces pastorianus
aaagtggtggtatctatggccgcta

SEQ ID NO: 52228 - DNA, 25 bp, Saccharomyces pastorianus
tctatggccgctatgattcaaaacg

SEQ ID NO: 52229 - DNA, 25 bp, Saccharomyces pastorianus
gtggcatttttctacttttcctgtc

SEQ ID NO: 52230 - DNA, 25 bp, Saccharomyces pastorianus
ggccgtaggcattagatgtcattcg

SEQ ID NO: 52231 - DNA, 25 bp, Saccharomyces pastorianus
aagaataagatcacacagggctcag

SEQ ID NO: 52232 - DNA, 25 bp, Saccharomyces pastorianus
agcaggtactgctttggccgtaggc

SEQ ID NO: 52233 - DNA, 25 bp, Saccharomyces pastorianus
atttggctttggtagcagcttcggc

SEQ ID NO: 52234 - DNA, 25 bp, Saccharomyces pastorianus
acagggctcaggttcaaggtgccat

SEQ ID NO: 52235 - DNA, 25 bp, Saccharomyces pastorianus
ttttcctgtcttttgtttctgatca

SEQ ID NO: 52236 - DNA, 25 bp, Saccharomyces pastorianus
aaggtgccatcaagcaaaagctgct

SEQ ID NO: 52237 - DNA, 25 bp, Saccharomyces pastorianus
cgcagaccaagcacagttccagagt

SEQ ID NO: 52238 - DNA, 25 bp, Saccharomyces pastorianus
ataagcacgcagaccaagcacagtt

SEQ ID NO: 52239 - DNA, 25 bp, Saccharomyces pastorianus
tcattaacgctgttttcctgatcat

SEQ ID NO: 52240 - DNA, 25 bp, Saccharomyces pastorianus
tttcctgatcatatcaataggtctg

SEQ ID NO: 52241 - DNA, 25 bp, Saccharomyces pastorianus
ttccagagtgaacttttgcatgttt

SEQ ID NO: 52242 - DNA, 25 bp, Saccharomyces pastorianus
gtggcttgataagcacgcagaccaa

SEQ ID NO: 52243 - DNA, 25 bp, Saccharomyces pastorianus
ttttgcatgtttgccgcggcttacg

SEQ ID NO: 52244 - DNA, 25 bp, Saccharomyces pastorianus
aacgctgttttcctgatcatatcaa

SEQ ID NO: 52245 - DNA, 25 bp, Saccharomyces pastorianus
caataggtctgatcagtggcttgat

SEQ ID NO: 52246 - DNA, 25 bp, Saccharomyces pastorianus
gcggcttacggtctacttactgatt

SEQ ID NO: 52247 - DNA, 25 bp, Saccharomyces pastorianus
acggtctacttactgattcatttta

SEQ ID NO: 52248 - DNA, 25 bp, Saccharomyces pastorianus
ttgatatcctcaagctgcaagactg

SEQ ID NO: 52249 - DNA, 25 bp, Saccharomyces pastorianus
actggacgccggtatgggatatttt

SEQ ID NO: 52250 - DNA, 25 bp, Saccharomyces pastorianus
gggcaatataatacgctgtggcgat

SEQ ID NO: 52251 - DNA, 25 bp, Saccharomyces pastorianus
tggcaccgccgaagataatgtttga

SEQ ID NO: 52252 - DNA, 25 bp, Saccharomyces pastorianus
accgctggacgtggatatgggcaat

SEQ ID NO: 52253 - DNA, 25 bp, Saccharomyces pastorianus
tgcactgtaacgtcaagtcagccac

SEQ ID NO: 52254 - DNA, 25 bp, Saccharomyces pastorianus
acattgtgtacatgccgtttggagg

SEQ ID NO: 52255 - DNA, 25 bp, Saccharomyces pastorianus
agcgggacgctatactgcactgtaa

SEQ ID NO: 52256 - DNA, 25 bp, Saccharomyces pastorianus
aacccgtttgtgagtcaccgctgga

SEQ ID NO: 52257 - DNA, 25 bp, Saccharomyces pastorianus
tgatagacgtccctaattcttaccc

SEQ ID NO: 52258 - DNA, 25 bp, Saccharomyces pastorianus
agccacgggcgaaatatgtcttgat

SEQ ID NO: 52259 - DNA, 25 bp, Saccharomyces pastorianus
attgtgctgtctgatattgaaacca

SEQ ID NO: 52260 - DNA, 25 bp, Saccharomyces pastorianus
attccgctatcagtacattgcgtag

SEQ ID NO: 52261 - DNA, 25 bp, Saccharomyces pastorianus
ataaggtttctctatactccctggg

SEQ ID NO: 52262 - DNA, 25 bp, Saccharomyces pastorianus
gacaatgctgatgttaccgttcaac

SEQ ID NO: 52263 - DNA, 25 bp, Saccharomyces pastorianus
gattactctttcgacacgcaggtgg

SEQ ID NO: 52264 - DNA, 25 bp, Saccharomyces pastorianus
tttaccgttaccaaaggctgacaag

SEQ ID NO: 52265 - DNA, 25 bp, Saccharomyces pastorianus
acattgcgtagcttcataactgatt

SEQ ID NO: 52266 - DNA, 25 bp, Saccharomyces pastorianus
gacatggattggtatcctgcccgaa

SEQ ID NO: 52267 - DNA, 25 bp, Saccharomyces pastorianus
atattgagcctatttccttctaacc

SEQ ID NO: 52268 - DNA, 25 bp, Saccharomyces pastorianus
tatgaacgcagccattttcctatca

SEQ ID NO: 52269 - DNA, 25 bp, Saccharomyces pastorianus
ggtatcctgcccgaagctaaagatt

SEQ ID NO: 52270 - DNA, 25 bp, Saccharomyces pastorianus
cgtgtgttatacttctggctttgga

SEQ ID NO: 52271 - DNA, 25 bp, Saccharomyces pastorianus
gaaagttatgtcacggcgcattata

SEQ ID NO: 52272 - DNA, 25 bp, Saccharomyces pastorianus
ggagctgctgcattaagatctgtga

SEQ ID NO: 52273 - DNA, 25 bp, Saccharomyces pastorianus
ttaccgcacggtttaaacactcagg

SEQ ID NO: 52274 - DNA, 25 bp, Saccharomyces pastorianus
ggacgttactgatttgtttgctgat

SEQ ID NO: 52275 - DNA, 25 bp, Saccharomyces pastorianus
ttgagatcgcacactgcatctttac

SEQ ID NO: 52276 - DNA, 25 bp, Saccharomyces pastorianus
ccatttctgttttccttgttatcat

SEQ ID NO: 52277 - DNA, 25 bp, Saccharomyces pastorianus
gcatctttacttgccctaggagcaa

SEQ ID NO: 52278 - DNA, 25 bp, Saccharomyces pastorianus
gaggtgcccatacaactgaatccat

SEQ ID NO: 52279 - DNA, 25 bp, Saccharomyces pastorianus
aactgcatatatggttaccgcacgg

SEQ ID NO: 52280 - DNA, 25 bp, Saccharomyces pastorianus
gatctgtgatagctactgtactcaa

SEQ ID NO: 52281 - DNA, 25 bp, Saccharomyces pastorianus
atgattgctctaccttttgcattct

SEQ ID NO: 52282 - DNA, 25 bp, Saccharomyces pastorianus
actgctatgattgctctaccttttg

SEQ ID NO: 52283 - DNA, 25 bp, Saccharomyces pastorianus
ggaattgagacataaactgtccaag

SEQ ID NO: 52284 - DNA, 25 bp, Saccharomyces pastorianus
atctctactgctatgattgctctac

SEQ ID NO: 52285 - DNA, 25 bp, Saccharomyces pastorianus
gggttcttggttgttggctttcatc

SEQ ID NO: 52286 - DNA, 25 bp, Saccharomyces pastorianus
ggtaaggaattgagacataaactgt

SEQ ID NO: 52287 - DNA, 25 bp, Saccharomyces pastorianus
gtaccacaaattgaacttacactgg

SEQ ID NO: 52288 - DNA, 25 bp, Saccharomyces pastorianus
ttgctctaccttttgcattctctta

SEQ ID NO: 52289 - DNA, 25 bp, Saccharomyces pastorianus
cttggttgttggctttcatctctac

SEQ ID NO: 52290 - DNA, 25 bp, Saccharomyces pastorianus
ctaccttttgcattctcttactggg

SEQ ID NO: 52291 - DNA, 25 bp, Saccharomyces pastorianus
tgttggctttcatctctactgctat

SEQ ID NO: 52292 - DNA, 25 bp, Saccharomyces pastorianus
ccaaggtgttagtatgagcgaaatg

SEQ ID NO: 52293 - DNA, 25 bp, Saccharomyces pastorianus
gactgaacaagaagcccaaggtgtt

SEQ ID NO: 52294 - DNA, 25 bp, Saccharomyces pastorianus
acatacgctccagtcatcttgaaaa

SEQ ID NO: 52295 - DNA, 25 bp, Saccharomyces pastorianus
atacgctccagtcatcttgaaaaga

SEQ ID NO: 52296 - DNA, 25 bp, Saccharomyces pastorianus
agaagcccaaggtgttagtatgagc

SEQ ID NO: 52297 - DNA, 25 bp, Saccharomyces pastorianus
gtcatcttgaaaagaaaggccgcca

SEQ ID NO: 52298 - DNA, 25 bp, Saccharomyces pastorianus
gcccaaggtgttagtatgagcgaaa

SEQ ID NO: 52299 - DNA, 25 bp, Saccharomyces pastorianus
gaacaagaagcccaaggtgttagta

SEQ ID NO: 52300 - DNA, 25 bp, Saccharomyces pastorianus
aagcccaaggtgttagtatgagcga

SEQ ID NO: 52301 - DNA, 25 bp, Saccharomyces pastorianus
tcttgaaaagaaaggccgccagatt

SEQ ID NO: 52302 - DNA, 25 bp, Saccharomyces pastorianus
catacgctccagtcatcttgaaaag

SEQ ID NO: 52303 - DNA, 25 bp, Saccharomyces pastorianus
ccgaagatcgtctgttgggtgccaa

SEQ ID NO: 52304 - DNA, 25 bp, Saccharomyces pastorianus
gagcttgtttgttaagacctctata

SEQ ID NO: 52305 - DNA, 25 bp, Saccharomyces pastorianus
gccctttggattttaggtgccacct

SEQ ID NO: 52306 - DNA, 25 bp, Saccharomyces pastorianus
gatcttctgggtcaacatggccttc

SEQ ID NO: 52307 - DNA, 25 bp, Saccharomyces pastorianus
attcgctgctattgccctttggatt

SEQ ID NO: 52308 - DNA, 25 bp, Saccharomyces pastorianus
ggtgccacctcttacaaacatatta

SEQ ID NO: 52309 - DNA, 25 bp, Saccharomyces pastorianus
acctctatactttgctgtcaccgaa

SEQ ID NO: 52310 - DNA, 25 bp, Saccharomyces pastorianus
tgttatcggtgctctctgggcccta

SEQ ID NO: 52311 - DNA, 25 bp, Saccharomyces pastorianus
tagccaccaccttttactgtgaaaa

SEQ ID NO: 52312 - DNA, 25 bp, Saccharomyces pastorianus
gtgttatgtggatcgtggcctctgc

SEQ ID NO: 52313 - DNA, 25 bp, Saccharomyces pastorianus
gtggcctctgctattccagaaacat

SEQ ID NO: 52314 - DNA, 25 bp, Saccharomyces pastorianus
gatatctcgaagaagcctaggttca

SEQ ID NO: 52315 - DNA, 25 bp, Saccharomyces pastorianus
ctacgccactttcgactttgaagag

SEQ ID NO: 52316 - DNA, 25 bp, Saccharomyces pastorianus
tacggtatcaccagcgctcgaacaa

SEQ ID NO: 52317 - DNA, 25 bp, Saccharomyces pastorianus
ggcaatcaatgcgttcactcaatga

SEQ ID NO: 52318 - DNA, 25 bp, Saccharomyces pastorianus
tggagacacgaacatcacaattcat

SEQ ID NO: 52319 - DNA, 25 bp, Saccharomyces pastorianus
aaagttgctcgtatcattgaacaaa

SEQ ID NO: 52320 - DNA, 25 bp, Saccharomyces pastorianus
aatacatatgctacgccactttcga

SEQ ID NO: 52321 - DNA, 25 bp, Saccharomyces pastorianus
ataaggatgaccgtcaacccatctc

SEQ ID NO: 52322 - DNA, 25 bp, Saccharomyces pastorianus
gagttttatattcacttggtcaacc

SEQ ID NO: 52323 - DNA, 25 bp, Saccharomyces pastorianus
gttcagtggtaaatacgcggagcct

SEQ ID NO: 52324 - DNA, 25 bp, Saccharomyces pastorianus
gatgaacagcctttcatgctggaca

SEQ ID NO: 52325 - DNA, 25 bp, Saccharomyces pastorianus
tatttcacctgtattagaagacgtt

SEQ ID NO: 52326 - DNA, 25 bp, Saccharomyces pastorianus
caatgagctgttaactagatcgccc

SEQ ID NO: 52327 - DNA, 25 bp, Saccharomyces pastorianus
attcagattcctcaataacaagcaa

SEQ ID NO: 52328 - DNA, 25 bp, Saccharomyces pastorianus
caagaagagagtaggcaagcaaaaa

SEQ ID NO: 52329 - DNA, 25 bp, Saccharomyces pastorianus
caaaaagctaggagagcggagcaaa

SEQ ID NO: 52330 - DNA, 25 bp, Saccharomyces pastorianus
gaagtaaggcacaacattagcaatg

SEQ ID NO: 52331 - DNA, 25 bp, Saccharomyces pastorianus
aaaaacatatttcacctgtattaga

SEQ ID NO: 52332 - DNA, 25 bp, Saccharomyces pastorianus
gtcactggaagcgacaatgaaagta

SEQ ID NO: 52333 - DNA, 25 bp, Saccharomyces pastorianus
gattcctcaataacaagcaacgttt

SEQ ID NO: 52334 - DNA, 25 bp, Saccharomyces pastorianus
gcaatgttgatgtcactggaagcga

SEQ ID NO: 52335 - DNA, 25 bp, Saccharomyces pastorianus
gaggttgataggtacaatgagctgt

SEQ ID NO: 52336 - DNA, 25 bp, Saccharomyces pastorianus
attctatccctctctccaaaaagag

SEQ ID NO: 52337 - DNA, 25 bp, Saccharomyces pastorianus
cgccaaccggatataatctaagctt

SEQ ID NO: 52338 - DNA, 25 bp, Saccharomyces pastorianus
gactccagtgacaaatatgctcttt

SEQ ID NO: 52339 - DNA, 25 bp, Saccharomyces pastorianus
gaggatctagacttcaaagctattg

SEQ ID NO: 52340 - DNA, 25 bp, Saccharomyces pastorianus
gaagtacctcaagaacagcctcaag

SEQ ID NO: 52341 - DNA, 25 bp, Saccharomyces pastorianus
gaagttgaaccattctatccctctc

SEQ ID NO: 52342 - DNA, 25 bp, Saccharomyces pastorianus
gaccaacttaccacgtcgttgaaga

SEQ ID NO: 52343 - DNA, 25 bp, Saccharomyces pastorianus
tgaactctcagcaaccaaagatggt

SEQ ID NO: 52344 - DNA, 25 bp, Saccharomyces pastorianus
tatacactttcggaaacgccaaccg

SEQ ID NO: 52345 - DNA, 25 bp, Saccharomyces pastorianus
aggagagtcgctacagaccaactta

SEQ ID NO: 52346 - DNA, 25 bp, Saccharomyces pastorianus
tgttattggctgtggcgtcgaaaat

SEQ ID NO: 52347 - DNA, 25 bp, Saccharomyces pastorianus
tgttattttgtctaccactggtcac

SEQ ID NO: 52348 - DNA, 25 bp, Saccharomyces pastorianus
attcggtgcattctgtgccaagaga

SEQ ID NO: 52349 - DNA, 25 bp, Saccharomyces pastorianus
tggtcacgatggtccattcggtgca

SEQ ID NO: 52350 - DNA, 25 bp, Saccharomyces pastorianus
tatccactctggttcttacgaaggt

SEQ ID NO: 52351 - DNA, 25 bp, Saccharomyces pastorianus
aatgtcaaactattcaacgccacct

SEQ ID NO: 52352 - DNA, 25 bp, Saccharomyces pastorianus
ctggacattagtcaccatggctcat

SEQ ID NO: 52353 - DNA, 25 bp, Saccharomyces pastorianus
catggctcatggtactcaatgttgc

SEQ ID NO: 52354 - DNA, 25 bp, Saccharomyces pastorianus
tttgagccagaagcacggtgttatt

SEQ ID NO: 52355 - DNA, 25 bp, Saccharomyces pastorianus
ttcgccggtatggaagttgccgaat

SEQ ID NO: 52356 - DNA, 25 bp, Saccharomyces pastorianus
gacggtacccgtgatttgagccaga

SEQ ID NO: 52357 - DNA, 25 bp, Saccharomyces pastorianus
atgctgctttattcatctccactgt

SEQ ID NO: 52358 - DNA, 25 bp, Saccharomyces pastorianus
agtttgctcctatccgtgagtctac

SEQ ID NO: 52359 - DNA, 25 bp, Saccharomyces pastorianus
tattattgtcggtgctggttcttcc

SEQ ID NO: 52360 - DNA, 25 bp, Saccharomyces pastorianus
tacttccacttctcaattgcacttg

SEQ ID NO: 52361 - DNA, 25 bp, Saccharomyces pastorianus
atttcaagtttgctcctatccgtga

SEQ ID NO: 52362 - DNA, 25 bp, Saccharomyces pastorianus
tgaactctaccccagttactcattg

SEQ ID NO: 52363 - DNA, 25 bp, Saccharomyces pastorianus
gagtctaccgtctcccgtgccatga

SEQ ID NO: 52364 - DNA, 25 bp, Saccharomyces pastorianus
aagattggtctgatttcaagtttgc

SEQ ID NO: 52365 - DNA, 25 bp, Saccharomyces pastorianus
gacaagtttgccgtctctgatgtta

SEQ ID NO: 52366 - DNA, 25 bp, Saccharomyces pastorianus
tgccgtctctgatgttattattgtc

SEQ ID NO: 52367 - DNA, 25 bp, Saccharomyces pastorianus
gttactcattgcttatctgatattg

SEQ ID NO: 52368 - DNA, 25 bp, Saccharomyces pastorianus
tggttcttccggtttatctgctgct

SEQ ID NO: 52369 - DNA, 25 bp, Saccharomyces pastorianus
tggattcgttacaagctagctgcag

SEQ ID NO: 52370 - DNA, 25 bp, Saccharomyces pastorianus
aagttacaacctgattcggatgcgg

SEQ ID NO: 52371 - DNA, 25 bp, Saccharomyces pastorianus
catcatacctccttgtgtcatgtat

SEQ ID NO: 52372 - DNA, 25 bp, Saccharomyces pastorianus
catggattgccgcttgactacaagt

SEQ ID NO: 52373 - DNA, 25 bp, Saccharomyces pastorianus
gataggctacgtcttgaagtcgaaa

SEQ ID NO: 52374 - DNA, 25 bp, Saccharomyces pastorianus
tgcggtttctgatgcatctgtgaat

SEQ ID NO: 52375 - DNA, 25 bp, Saccharomyces pastorianus
gctgcagctctatttttaatcattg

SEQ ID NO: 52376 - DNA, 25 bp, Saccharomyces pastorianus
ggtgatttatacactctctcaatac

SEQ ID NO: 52377 - DNA, 25 bp, Saccharomyces pastorianus
gtacttaaccactcaccagttcaaa

SEQ ID NO: 52378 - DNA, 25 bp, Saccharomyces pastorianus
attgtattcctttgggcagcccata

SEQ ID NO: 52379 - DNA, 25 bp, Saccharomyces pastorianus
ggacatccctttactacttgatttg

SEQ ID NO: 52380 - DNA, 25 bp, Saccharomyces pastorianus
gatagcgtcaaaagtcgtttccaaa

SEQ ID NO: 52381 - DNA, 25 bp, Saccharomyces pastorianus
ttctcgatccgatagcgtcaaaagt

SEQ ID NO: 52382 - DNA, 25 bp, Saccharomyces pastorianus
agcgtcaaaagtcgtttccaaatat

SEQ ID NO: 52383 - DNA, 25 bp, Saccharomyces pastorianus
gtttccaaatattaccatggctcga

SEQ ID NO: 52384 - DNA, 25 bp, Saccharomyces pastorianus
ttagaatttctcgatccgatagcgt

SEQ ID NO: 52385 - DNA, 25 bp, Saccharomyces pastorianus
gatccgatagcgtcaaaagtcgttt

SEQ ID NO: 52386 - DNA, 25 bp, Saccharomyces pastorianus
ttaccatggctcgatctttcagagc

SEQ ID NO: 52387 - DNA, 25 bp, Saccharomyces pastorianus
gtctcactaacgagtcttttagaat

SEQ ID NO: 52388 - DNA, 25 bp, Saccharomyces pastorianus
tattaccatggctcgatctttcaga

SEQ ID NO: 52389 - DNA, 25 bp, Saccharomyces pastorianus
aattctgtctcactaacgagtcttt

SEQ ID NO: 52390 - DNA, 25 bp, Saccharomyces pastorianus
gaatttctcgatccgatagcgtcaa

SEQ ID NO: 52391 - DNA, 25 bp, Saccharomyces pastorianus
gattggcgttgagctttctactgaa

SEQ ID NO: 52392 - DNA, 25 bp, Saccharomyces pastorianus
aaactggaaactgcctatcgaactt

SEQ ID NO: 52393 - DNA, 25 bp, Saccharomyces pastorianus
gtgtcgcctgaaccaataactttaa

SEQ ID NO: 52394 - DNA, 25 bp, Saccharomyces pastorianus
ggagtgcgactttcaaaacctcata

SEQ ID NO: 52395 - DNA, 25 bp, Saccharomyces pastorianus
atctcgttgccggtattgaacactg

SEQ ID NO: 52396 - DNA, 25 bp, Saccharomyces pastorianus
cggtaaattttatcctctaggcaat

SEQ ID NO: 52397 - DNA, 25 bp, Saccharomyces pastorianus
ttaggtatcactccggaaactccca

SEQ ID NO: 52398 - DNA, 25 bp, Saccharomyces pastorianus
acctcatacatgaaccacggcttga

SEQ ID NO: 52399 - DNA, 25 bp, Saccharomyces pastorianus
tcatcgatacaagggctgaccgtga

SEQ ID NO: 52400 - DNA, 25 bp, Saccharomyces pastorianus
ggaaactcccataaggttctattga

SEQ ID NO: 52401 - DNA, 25 bp, Saccharomyces pastorianus
aacgttatctcgcatagggtctgga

SEQ ID NO: 52402 - DNA, 25 bp, Saccharomyces pastorianus
tatggcgatgactttggttccgaat

SEQ ID NO: 52403 - DNA, 25 bp, Saccharomyces pastorianus
gaattacgactactcaagaccacta

SEQ ID NO: 52404 - DNA, 25 bp, Saccharomyces pastorianus
acagagttcttttggtgtccgtatt

SEQ ID NO: 52405 - DNA, 25 bp, Saccharomyces pastorianus
aatatctcccctcatccaatgtatt

SEQ ID NO: 52406 - DNA, 25 bp, Saccharomyces pastorianus
gggttactatggtctatcgttgatt

SEQ ID NO: 52407 - DNA, 25 bp, Saccharomyces pastorianus
gtacactcaagtgcattcgtatgaa

SEQ ID NO: 52408 - DNA, 25 bp, Saccharomyces pastorianus
gacaattcaaactgggcttcaaatg

SEQ ID NO: 52409 - DNA, 25 bp, Saccharomyces pastorianus
agtggcgctcaccttgggagcaatc

SEQ ID NO: 52410 - DNA, 25 bp, Saccharomyces pastorianus
aatcggtttcctggctatttatctc

SEQ ID NO: 52411 - DNA, 25 bp, Saccharomyces pastorianus
ggctatttatctccactatactgta

SEQ ID NO: 52412 - DNA, 25 bp, Saccharomyces pastorianus
ctattggtactgtagtggcgctcac

SEQ ID NO: 52413 - DNA, 25 bp, Saccharomyces pastorianus
ataacacctacttgaatggcaccaa

SEQ ID NO: 52414 - DNA, 25 bp, Saccharomyces pastorianus
gccactctttctgggctcaaagtat

SEQ ID NO: 52415 - DNA, 25 bp, Saccharomyces pastorianus
ccggtatcaacatctacggtatgca

SEQ ID NO: 52416 - DNA, 25 bp, Saccharomyces pastorianus
tgtccggatattatgccactctttc

SEQ ID NO: 52417 - DNA, 25 bp, Saccharomyces pastorianus
tctcgactacgtccctagtgaacaa

SEQ ID NO: 52418 - DNA, 25 bp, Saccharomyces pastorianus
gaataggcgggatttcttcatcaag

SEQ ID NO: 52419 - DNA, 25 bp, Saccharomyces pastorianus
agattcagtcttggagccatctcga

SEQ ID NO: 52420 - DNA, 25 bp, Saccharomyces pastorianus
cgccgctggatcttgttgtatacta

SEQ ID NO: 52421 - DNA, 25 bp, Saccharomyces pastorianus
agtactctagcaccaacaacatcat

SEQ ID NO: 52422 - DNA, 25 bp, Saccharomyces pastorianus
gattataaagttccagtggtgcccc

SEQ ID NO: 52423 - DNA, 25 bp, Saccharomyces pastorianus
ggaggcatctccaatccgtcattaa

SEQ ID NO: 52424 - DNA, 25 bp, Saccharomyces pastorianus
gagattcatttatccccaagagcac

SEQ ID NO: 52425 - DNA, 25 bp, Saccharomyces pastorianus
aaccagtatttccaaggtgcataag

SEQ ID NO: 52426 - DNA, 25 bp, Saccharomyces pastorianus
aaaacagcccatctagatacttcta

SEQ ID NO: 52427 - DNA, 25 bp, Saccharomyces pastorianus
actcctcaccagtttcagacggtag

SEQ ID NO: 52428 - DNA, 25 bp, Saccharomyces pastorianus
ggcgaaactcttcaagcgaaccaag

SEQ ID NO: 52429 - DNA, 25 bp, Saccharomyces pastorianus
cagtttattcttggtcatcgacggc

SEQ ID NO: 52430 - DNA, 25 bp, Saccharomyces pastorianus
aagatgaccgctgctcaaaagctct

SEQ ID NO: 52431 - DNA, 25 bp, Saccharomyces pastorianus
tttactcaggttggcgagaagctct

SEQ ID NO: 52432 - DNA, 25 bp, Saccharomyces pastorianus
gacggccattacatcaaccagtatt

SEQ ID NO: 52433 - DNA, 25 bp, Saccharomyces pastorianus
gatgcagatctcagcaatcgcgact

SEQ ID NO: 52434 - DNA, 25 bp, Saccharomyces pastorianus
aaagctctcttcaaatcgaatgtgg

SEQ ID NO: 52435 - DNA, 25 bp, Saccharomyces pastorianus
ggcagtactgttgcacctactagta

SEQ ID NO: 52436 - DNA, 25 bp, Saccharomyces pastorianus
cggaattcgaaagcgtgccagccaa

SEQ ID NO: 52437 - DNA, 25 bp, Saccharomyces pastorianus
gtgccagccaaccagagtacagaat

SEQ ID NO: 52438 - DNA, 25 bp, Saccharomyces pastorianus
gaatccaccaaagaggaccgttctg

SEQ ID NO: 52439 - DNA, 25 bp, Saccharomyces pastorianus
agaagatgcttcaaaggatgccgaa

SEQ ID NO: 52440 - DNA, 25 bp, Saccharomyces pastorianus
acaacttgggatcgtgtactacaat

SEQ ID NO: 52441 - DNA, 25 bp, Saccharomyces pastorianus
atggaaccaacgtcgtgctacggaa

SEQ ID NO: 52442 - DNA, 25 bp, Saccharomyces pastorianus
atcggcgtcgatcaaacggcagtac

SEQ ID NO: 52443 - DNA, 25 bp, Saccharomyces pastorianus
ggatgccgaagctttcttgaaaaaa

SEQ ID NO: 52444 - DNA, 25 bp, Saccharomyces pastorianus
gacgaagccgttaaacatgttgaca

SEQ ID NO: 52445 - DNA, 25 bp, Saccharomyces pastorianus
agagcgacgatttctcggaattcga

SEQ ID NO: 52446 - DNA, 25 bp, Saccharomyces pastorianus
ggcaatggtgaaatcccaacgacaa

SEQ ID NO: 52447 - DNA, 25 bp, Saccharomyces pastorianus
gaagcttctcctgcggatgacgaaa

SEQ ID NO: 52448 - DNA, 25 bp, Saccharomyces pastorianus
acaattccctgatatcaactctggc

SEQ ID NO: 52449 - DNA, 25 bp, Saccharomyces pastorianus
ggaaaacgaagcttctcctgcggat

SEQ ID NO: 52450 - DNA, 25 bp, Saccharomyces pastorianus
agtcggagacgagttcaggactgaa

SEQ ID NO: 52451 - DNA, 25 bp, Saccharomyces pastorianus
cctgatatcaactctggcaatggtg

SEQ ID NO: 52452 - DNA, 25 bp, Saccharomyces pastorianus
tcaggactgaacaagacgacgaaat

SEQ ID NO: 52453 - DNA, 25 bp, Saccharomyces pastorianus
cctgcggatgacgaaattaaagatt

SEQ ID NO: 52454 - DNA, 25 bp, Saccharomyces pastorianus
gagaagctgaaatagtcggagacga

SEQ ID NO: 52455 - DNA, 25 bp, Saccharomyces pastorianus
gattttgaagaacaattccctgata

SEQ ID NO: 52456 - DNA, 25 bp, Saccharomyces pastorianus
ggaagacgataccagttttttgaga

SEQ ID NO: 52457 - DNA, 25 bp, Saccharomyces pastorianus
gactacaggccatttttaacggatt

SEQ ID NO: 52458 - DNA, 25 bp, Saccharomyces pastorianus
ggaattcgttatcgtttcgtgcact

SEQ ID NO: 52459 - DNA, 25 bp, Saccharomyces pastorianus
ttgcggtggattgtgatgcttctca

SEQ ID NO: 52460 - DNA, 25 bp, Saccharomyces pastorianus
agagtggctccaaccatgacattag

SEQ ID NO: 52461 - DNA, 25 bp, Saccharomyces pastorianus
ggtaattagcccactctttgtgaaa

SEQ ID NO: 52462 - DNA, 25 bp, Saccharomyces pastorianus
tttcgtgcacttttcgactacaggc

SEQ ID NO: 52463 - DNA, 25 bp, Saccharomyces pastorianus
gatgcttctcacatttactttgata

SEQ ID NO: 52464 - DNA, 25 bp, Saccharomyces pastorianus
atgacattaggaacttctcgcaatc

SEQ ID NO: 52465 - DNA, 25 bp, Saccharomyces pastorianus
ttctcgcaatcactcggtgtcaaaa

SEQ ID NO: 52466 - DNA, 25 bp, Saccharomyces pastorianus
gtgcatcgagtacttattcgcggcc

SEQ ID NO: 52467 - DNA, 25 bp, Saccharomyces pastorianus
attcgcggccaaaagacgtatgttg

SEQ ID NO: 52468 - DNA, 25 bp, Saccharomyces pastorianus
ggtaaggctgattccgtattcaaac

SEQ ID NO: 52469 - DNA, 25 bp, Saccharomyces pastorianus
ggctgattccgtattcaaacagata

SEQ ID NO: 52470 - DNA, 25 bp, Saccharomyces pastorianus
atactactacagctttcatctcttg

SEQ ID NO: 52471 - DNA, 25 bp, Saccharomyces pastorianus
gctttcatctcttgtgaaccggaaa

SEQ ID NO: 52472 - DNA, 25 bp, Saccharomyces pastorianus
acagctttcatctcttgtgaaccgg

SEQ ID NO: 52473 - DNA, 25 bp, Saccharomyces pastorianus
gcgcaaccgttcaaatgataatggt

SEQ ID NO: 52474 - DNA, 25 bp, Saccharomyces pastorianus
aaacagatactactacagctttcat

SEQ ID NO: 52475 - DNA, 25 bp, Saccharomyces pastorianus
taatggtaaggctgattccgtattc

SEQ ID NO: 52476 - DNA, 25 bp, Saccharomyces pastorianus
ctactacagctttcatctcttgtga

SEQ ID NO: 52477 - DNA, 25 bp, Saccharomyces pastorianus
gaagcgcaaccgttcaaatgataat

SEQ ID NO: 52478 - DNA, 25 bp, Saccharomyces pastorianus
ttcatctcttgtgaaccggaaaaga

SEQ ID NO: 52479 - DNA, 25 bp, Saccharomyces pastorianus
attctatgccaacccataatgccag

SEQ ID NO: 52480 - DNA, 25 bp, Saccharomyces pastorianus
gaggatggcgatttccaggaacaaa

SEQ ID NO: 52481 - DNA, 25 bp, Saccharomyces pastorianus
aaagtcttctcgaccgcattgatgt

SEQ ID NO: 52482 - DNA, 25 bp, Saccharomyces pastorianus
gaggaggactataactttcattgaa

SEQ ID NO: 52483 - DNA, 25 bp, Saccharomyces pastorianus
agaattctcaccattctatgccaac

SEQ ID NO: 52484 - DNA, 25 bp, Saccharomyces pastorianus
gtgttgcggctcgaagtttgatgtc

SEQ ID NO: 52485 - DNA, 25 bp, Saccharomyces pastorianus
atgccagctctttcacaaagtcttc

SEQ ID NO: 52486 - DNA, 25 bp, Saccharomyces pastorianus
taatgatgcgaacaccctagtccaa

SEQ ID NO: 52487 - DNA, 25 bp, Saccharomyces pastorianus
taaccctattccagtattcccaact

SEQ ID NO: 52488 - DNA, 25 bp, Saccharomyces pastorianus
gaggtggaccaacaagacgctataa

SEQ ID NO: 52489 - DNA, 25 bp, Saccharomyces pastorianus
tgaaccagagatctcccagcaaatt

SEQ ID NO: 52490 - DNA, 25 bp, Saccharomyces pastorianus
ttcccagagcgacgatcctatttgg

SEQ ID NO: 52491 - DNA, 25 bp, Saccharomyces pastorianus
agatcgtccaagagacttcccagag

SEQ ID NO: 52492 - DNA, 25 bp, Saccharomyces pastorianus
agccaactttctcctgaattacgtt

SEQ ID NO: 52493 - DNA, 25 bp, Saccharomyces pastorianus
ggagcattgcttttcaagtatacca

SEQ ID NO: 52494 - DNA, 25 bp, Saccharomyces pastorianus
ctatttggaaaacaggccctcttca

SEQ ID NO: 52495 - DNA, 25 bp, Saccharomyces pastorianus
agtagagaccatttcgccaaagtaa

SEQ ID NO: 52496 - DNA, 25 bp, Saccharomyces pastorianus
ttacgtcaggcagagcagcgggctt

SEQ ID NO: 52497 - DNA, 25 bp, Saccharomyces pastorianus
aggccctcttcaatcaccatgggaa

SEQ ID NO: 52498 - DNA, 25 bp, Saccharomyces pastorianus
tataccacaccaacagacgaacagc

SEQ ID NO: 52499 - DNA, 25 bp, Saccharomyces pastorianus
gaatcaggaacgaactttctcagtt

SEQ ID NO: 52500 - DNA, 25 bp, Saccharomyces pastorianus
ctacgcaatcggtggtgcagttatt

SEQ ID NO: 52501 - DNA, 25 bp, Saccharomyces pastorianus
tggaaggtatcatgatcttaatcac

SEQ ID NO: 52502 - DNA, 25 bp, Saccharomyces pastorianus
gggttgccaatggccttattggaag

SEQ ID NO: 52503 - DNA, 25 bp, Saccharomyces pastorianus
gttgccaatggccttattggaaggt

SEQ ID NO: 52504 - DNA, 25 bp, Saccharomyces pastorianus
agggttgccaatggccttattggaa

SEQ ID NO: 52505 - DNA, 25 bp, Saccharomyces pastorianus
tgccaatggccttattggaaggtat

SEQ ID NO: 52506 - DNA, 25 bp, Saccharomyces pastorianus
atgatcttaatcacagctattaggg

SEQ ID NO: 52507 - DNA, 25 bp, Saccharomyces pastorianus
cttaatcacagctattagggtattc

SEQ ID NO: 52508 - DNA, 25 bp, Saccharomyces pastorianus
ggtatcatgatcttaatcacagcta

SEQ ID NO: 52509 - DNA, 25 bp, Saccharomyces pastorianus
gtatcatgatcttaatcacagctat

SEQ ID NO: 52510 - DNA, 25 bp, Saccharomyces pastorianus
gaaggtatcatgatcttaatcacag

SEQ ID NO: 52511 - DNA, 25 bp, Saccharomyces pastorianus
gatcttaatcacagctattagggta

SEQ ID NO: 52512 - DNA, 25 bp, Saccharomyces pastorianus
taacggagaccacttgatcggcttg

SEQ ID NO: 52513 - DNA, 25 bp, Saccharomyces pastorianus
atcggcttgggcacactacaactag

SEQ ID NO: 52514 - DNA, 25 bp, Saccharomyces pastorianus
gtactaccacgactgcttcttaaag

SEQ ID NO: 52515 - DNA, 25 bp, Saccharomyces pastorianus
agaggcggtgccatcatcagcaaca

SEQ ID NO: 52516 - DNA, 25 bp, Saccharomyces pastorianus
acggcgcaaacgttggtggttcaca

SEQ ID NO: 52517 - DNA, 25 bp, Saccharomyces pastorianus
gttttcaccaagtccttccttgaat

SEQ ID NO: 52518 - DNA, 25 bp, Saccharomyces pastorianus
gagactcctacaaatacggcgcaaa

SEQ ID NO: 52519 - DNA, 25 bp, Saccharomyces pastorianus
attacacctatttgatctcctcttt

SEQ ID NO: 52520 - DNA, 25 bp, Saccharomyces pastorianus
tggccctcccaagtagcacaagaag

SEQ ID NO: 52521 - DNA, 25 bp, Saccharomyces pastorianus
acaagttctggcgtctcgtcgagta

SEQ ID NO: 52522 - DNA, 25 bp, Saccharomyces pastorianus
tgaatatgggttcgacgtggccctc

SEQ ID NO: 52523 - DNA, 25 bp, Saccharomyces pastorianus
agaagtgttttcgttgttgccgtct

SEQ ID NO: 52524 - DNA, 25 bp, Saccharomyces pastorianus
gacctccatccagtactcaataaag

SEQ ID NO: 52525 - DNA, 25 bp, Saccharomyces pastorianus
gtatgcaagcacgtcacatgacctt

SEQ ID NO: 52526 - DNA, 25 bp, Saccharomyces pastorianus
gaggcaatttatccagaaccgttat

SEQ ID NO: 52527 - DNA, 25 bp, Saccharomyces pastorianus
aaggaacgcttgctcgagacaatcg

SEQ ID NO: 52528 - DNA, 25 bp, Saccharomyces pastorianus
gaattggcggtatctacccatgaag

SEQ ID NO: 52529 - DNA, 25 bp, Saccharomyces pastorianus
tccactaatggatctgcacaggcag

SEQ ID NO: 52530 - DNA, 25 bp, Saccharomyces pastorianus
gaccctattaaaagcacgaccgatg

SEQ ID NO: 52531 - DNA, 25 bp, Saccharomyces pastorianus
gcaaaattcccctccagaatatcgg

SEQ ID NO: 52532 - DNA, 25 bp, Saccharomyces pastorianus
aaacctgatgtggaacgaccctatt

SEQ ID NO: 52533 - DNA, 25 bp, Saccharomyces pastorianus
gaccgatgtgggactcgacaacaaa

SEQ ID NO: 52534 - DNA, 25 bp, Saccharomyces pastorianus
gtatcttccaggctggtaactacgc

SEQ ID NO: 52535 - DNA, 25 bp, Saccharomyces pastorianus
gaaattgctactttgcccgaagtga

SEQ ID NO: 52536 - DNA, 25 bp, Saccharomyces pastorianus
aaagacttgtggctttcgctgccaa

SEQ ID NO: 52537 - DNA, 25 bp, Saccharomyces pastorianus
ttacaccgacttctcgtgcttgtta

SEQ ID NO: 52538 - DNA, 25 bp, Saccharomyces pastorianus
gaagtactactctaactctttgccc

SEQ ID NO: 52539 - DNA, 25 bp, Saccharomyces pastorianus
gctgatggtctattactcggtttcg

SEQ ID NO: 52540 - DNA, 25 bp, Saccharomyces pastorianus
gaaagaatcatcaccgaagccgtcg

SEQ ID NO: 52541 - DNA, 25 bp, Saccharomyces pastorianus
aggccgcctacgttcaaagatggat

SEQ ID NO: 52542 - DNA, 25 bp, Saccharomyces pastorianus
gtgcttgttattcgctcatttgaga

SEQ ID NO: 52543 - DNA, 25 bp, Saccharomyces pastorianus
aactacgcctccatgttctggttaa

SEQ ID NO: 52544 - DNA, 25 bp, Saccharomyces pastorianus
tagtgatgtgtccaagtcttctgcc

SEQ ID NO: 52545 - DNA, 25 bp, Saccharomyces pastorianus
ggagaaatcgttcccagcgtcaaag

SEQ ID NO: 52546 - DNA, 25 bp, Saccharomyces pastorianus
ataacgagagttgggaccgctataa

SEQ ID NO: 52547 - DNA, 25 bp, Saccharomyces pastorianus
gactacgacgaatctcctttacgtg

SEQ ID NO: 52548 - DNA, 25 bp, Saccharomyces pastorianus
tttgcggatttgacacacgatgcca

SEQ ID NO: 52549 - DNA, 25 bp, Saccharomyces pastorianus
agaactttctttgtgggtggagctt

SEQ ID NO: 52550 - DNA, 25 bp, Saccharomyces pastorianus
aaattcgctcaagtcatcggcgcta

SEQ ID NO: 52551 - DNA, 25 bp, Saccharomyces pastorianus
aagaatctctcctttactttcggat

SEQ ID NO: 52552 - DNA, 25 bp, Saccharomyces pastorianus
gaacgataatttcccatggcatgta

SEQ ID NO: 52553 - DNA, 25 bp, Saccharomyces pastorianus
gtgtgcccttggtggctgctacaag

SEQ ID NO: 52554 - DNA, 25 bp, Saccharomyces pastorianus
taggtgtatacttccctcttggaga

SEQ ID NO: 52555 - DNA, 25 bp, Saccharomyces pastorianus
ggccatgtggtcatttttgtacgat

SEQ ID NO: 52556 - DNA, 25 bp, Saccharomyces pastorianus
tcctctcgagaaagtggtagcagtt

SEQ ID NO: 52557 - DNA, 25 bp, Saccharomyces pastorianus
aggactcatactacctcggatttga

SEQ ID NO: 52558 - DNA, 25 bp, Saccharomyces pastorianus
gacgcagcagctgaaatgtctcgcc

SEQ ID NO: 52559 - DNA, 25 bp, Saccharomyces pastorianus
ggcgataccatcgaatgtcccgtgg

SEQ ID NO: 52560 - DNA, 25 bp, Saccharomyces pastorianus
tgcaaagcagggtttcctctcgaga

SEQ ID NO: 52561 - DNA, 25 bp, Saccharomyces pastorianus
aaggcgtttatatccgcggcgatac

SEQ ID NO: 52562 - DNA, 25 bp, Saccharomyces pastorianus
ttgtccattcggaaaccgtcgagtt

SEQ ID NO: 52563 - DNA, 25 bp, Saccharomyces pastorianus
acctcggatttgatctctcgacgca

SEQ ID NO: 52564 - DNA, 25 bp, Saccharomyces pastorianus
gtctcgccattgatcaggacctgaa

SEQ ID NO: 52565 - DNA, 25 bp, Saccharomyces pastorianus
ggttctctcgaagtactgcaaagca

SEQ ID NO: 52566 - DNA, 25 bp, Saccharomyces pastorianus
tggaggcgctagacctggttctctc

SEQ ID NO: 52567 - DNA, 25 bp, Saccharomyces pastorianus
gaggaggaaagtcttccagcattct

SEQ ID NO: 52568 - DNA, 25 bp, Saccharomyces pastorianus
gagcattcatgagcccagttctaaa

SEQ ID NO: 52569 - DNA, 25 bp, Saccharomyces pastorianus
ggtggcacgcgatgcatctttgaaa

SEQ ID NO: 52570 - DNA, 25 bp, Saccharomyces pastorianus
atacgcgaatgcagacgatttgagc

SEQ ID NO: 52571 - DNA, 25 bp, Saccharomyces pastorianus
ggtcgccagcgtcaatcagaatgtt

SEQ ID NO: 52572 - DNA, 25 bp, Saccharomyces pastorianus
gagtaatgtgcccaatctagacgta

SEQ ID NO: 52573 - DNA, 25 bp, Saccharomyces pastorianus
agcagggcgctatcacagggcgaaa

SEQ ID NO: 52574 - DNA, 25 bp, Saccharomyces pastorianus
atcatgtcagggaggcatacgcgaa

SEQ ID NO: 52575 - DNA, 25 bp, Saccharomyces pastorianus
acagttattaatacggtcgccagcg

SEQ ID NO: 52576 - DNA, 25 bp, Saccharomyces pastorianus
tattgatagtcaggtggcacgcgat

SEQ ID NO: 52577 - DNA, 25 bp, Saccharomyces pastorianus
acctttaccgacgattgcacacgaa

SEQ ID NO: 52578 - DNA, 25 bp, Saccharomyces pastorianus
gaattgaacagcacaggtcctaagt

SEQ ID NO: 52579 - DNA, 25 bp, Saccharomyces pastorianus
aaatggtctggatctttgctgcaaa

SEQ ID NO: 52580 - DNA, 25 bp, Saccharomyces pastorianus
gttactatacactgagcctcgacaa

SEQ ID NO: 52581 - DNA, 25 bp, Saccharomyces pastorianus
tcattccccggaggtatggtggtac

SEQ ID NO: 52582 - DNA, 25 bp, Saccharomyces pastorianus
tggacgctctgatcggatttgccga

SEQ ID NO: 52583 - DNA, 25 bp, Saccharomyces pastorianus
ccaagcgggctcaattaacgtttgt

SEQ ID NO: 52584 - DNA, 25 bp, Saccharomyces pastorianus
aggtctgcagcgtacgccaggttaa

SEQ ID NO: 52585 - DNA, 25 bp, Saccharomyces pastorianus
gacgaatataatctggacgctctga

SEQ ID NO: 52586 - DNA, 25 bp, Saccharomyces pastorianus
aaaacgactcggatgccaaggcagc

SEQ ID NO: 52587 - DNA, 25 bp, Saccharomyces pastorianus
gtcaatagaggcgtatcattccccg

SEQ ID NO: 52588 - DNA, 25 bp, Saccharomyces pastorianus
ggatttgccgaattaattttcccag

SEQ ID NO: 52589 - DNA, 25 bp, Saccharomyces pastorianus
tttgtcaccgcctccagagataaga

SEQ ID NO: 52590 - DNA, 25 bp, Saccharomyces pastorianus
gcaaacctgctacagctgtctctgt

SEQ ID NO: 52591 - DNA, 25 bp, Saccharomyces pastorianus
cggaaccaacagatgattacgtcat

SEQ ID NO: 52592 - DNA, 25 bp, Saccharomyces pastorianus
ggcaacttcgaactaatatcacact

SEQ ID NO: 52593 - DNA, 25 bp, Saccharomyces pastorianus
agaggacataacaccagcagataag

SEQ ID NO: 52594 - DNA, 25 bp, Saccharomyces pastorianus
agctgtctctgtgcatgatgccatg

SEQ ID NO: 52595 - DNA, 25 bp, Saccharomyces pastorianus
taaaaccagccttaccgttccacag

SEQ ID NO: 52596 - DNA, 25 bp, Saccharomyces pastorianus
gactgtcaagatctggagacaccaa

SEQ ID NO: 52597 - DNA, 25 bp, Saccharomyces pastorianus
tttgggacgcagattgggcaccatt

SEQ ID NO: 52598 - DNA, 25 bp, Saccharomyces pastorianus
gaaaattcctgctgagtgtttgtag

SEQ ID NO: 52599 - DNA, 25 bp, Saccharomyces pastorianus
gtacagctatttttccggcaacttc

SEQ ID NO: 52600 - DNA, 25 bp, Saccharomyces pastorianus
aaagttaggtacatcgggcgctacg

SEQ ID NO: 52601 - DNA, 25 bp, Saccharomyces pastorianus
gcaccatgggtgtataacgctaacg

SEQ ID NO: 52602 - DNA, 25 bp, Saccharomyces pastorianus
ggtatgggagcctgacgagacctca

SEQ ID NO: 52603 - DNA, 25 bp, Saccharomyces pastorianus
cccagcggtgagtacctattggcaa

SEQ ID NO: 52604 - DNA, 25 bp, Saccharomyces pastorianus
ttggcatgagttttctaggccccaa

SEQ ID NO: 52605 - DNA, 25 bp, Saccharomyces pastorianus
attggcaacttctctggaccagaca

SEQ ID NO: 52606 - DNA, 25 bp, Saccharomyces pastorianus
cacggctgacacttcactaatggta

SEQ ID NO: 52607 - DNA, 25 bp, Saccharomyces pastorianus
aatatcctcgaaaggtgcctcgacc

SEQ ID NO: 52608 - DNA, 25 bp, Saccharomyces pastorianus
tttcatctctccagtggcacgaatc

SEQ ID NO: 52609 - DNA, 25 bp, Saccharomyces pastorianus
gacgtgacggatgtcgcttggtctc

SEQ ID NO: 52610 - DNA, 25 bp, Saccharomyces pastorianus
cagcaagactgtacgcaccatgggt

SEQ ID NO: 52611 - DNA, 25 bp, Saccharomyces pastorianus
ctattacctaatccacctgtctaag

SEQ ID NO: 52612 - DNA, 25 bp, Saccharomyces pastorianus
ggctatggccattgactattaccta

SEQ ID NO: 52613 - DNA, 25 bp, Saccharomyces pastorianus
gaacattgacactatggtctccctc

SEQ ID NO: 52614 - DNA, 25 bp, Saccharomyces pastorianus
tgaaactctcgctgatctaatctct

SEQ ID NO: 52615 - DNA, 25 bp, Saccharomyces pastorianus
ggataaagccttacgatgccgccga

SEQ ID NO: 52616 - DNA, 25 bp, Saccharomyces pastorianus
ggtgatttcaaggtccgtgcggaca

SEQ ID NO: 52617 - DNA, 25 bp, Saccharomyces pastorianus
agacgctcaagtctcgcttttttga

SEQ ID NO: 52618 - DNA, 25 bp, Saccharomyces pastorianus
tggacgtcaagctcaaggaccccag

SEQ ID NO: 52619 - DNA, 25 bp, Saccharomyces pastorianus
acgagtggactctcacggaggctat

SEQ ID NO: 52620 - DNA, 25 bp, Saccharomyces pastorianus
gaacagcagtttctggcgtgcgatt

SEQ ID NO: 52621 - DNA, 25 bp, Saccharomyces pastorianus
aatctctgcgtctgttttttcattg

SEQ ID NO: 52622 - DNA, 25 bp, Saccharomyces pastorianus
gtttgccaatgagttcaccggtgaa

SEQ ID NO: 52623 - DNA, 25 bp, Saccharomyces pastorianus
cccagccacagagtttgccaatgag

SEQ ID NO: 52624 - DNA, 25 bp, Saccharomyces pastorianus
ataaatccattttcagccaagacga

SEQ ID NO: 52625 - DNA, 25 bp, Saccharomyces pastorianus
cagaatttcttggacgacccgctta

SEQ ID NO: 52626 - DNA, 25 bp, Saccharomyces pastorianus
atgcctccagagatttgtatttcga

SEQ ID NO: 52627 - DNA, 25 bp, Saccharomyces pastorianus
atttcgcaagaggagccactaggca

SEQ ID NO: 52628 - DNA, 25 bp, Saccharomyces pastorianus
gaaccaacggtgtctccacaagtga

SEQ ID NO: 52629 - DNA, 25 bp, Saccharomyces pastorianus
gacatcatcaccaagatcatcaggg

SEQ ID NO: 52630 - DNA, 25 bp, Saccharomyces pastorianus
gacccctcccagtgataacgatgat

SEQ ID NO: 52631 - DNA, 25 bp, Saccharomyces pastorianus
gaactcggagtctgattcaaacaca

SEQ ID NO: 52632 - DNA, 25 bp, Saccharomyces pastorianus
gtgaaaaggctaccaccacatcagc

SEQ ID NO: 52633 - DNA, 25 bp, Saccharomyces pastorianus
aggtttgaccgtgctgaccgacaaa

SEQ ID NO: 52634 - DNA, 25 bp, Saccharomyces pastorianus
gatgaagtcataccaaacgctcctg

SEQ ID NO: 52635 - DNA, 25 bp, Saccharomyces pastorianus
atagtcggcgtacccagcgacaaaa

SEQ ID NO: 52636 - DNA, 25 bp, Saccharomyces pastorianus
aacgtaacactcatagtcggcgtac

SEQ ID NO: 52637 - DNA, 25 bp, Saccharomyces pastorianus
acagcgttgcgaaactctgatgcat

SEQ ID NO: 52638 - DNA, 25 bp, Saccharomyces pastorianus
aaataaagacgctcagctcagccca

SEQ ID NO: 52639 - DNA, 25 bp, Saccharomyces pastorianus
aagatcgactatgtggcccacgacg

SEQ ID NO: 52640 - DNA, 25 bp, Saccharomyces pastorianus
agcgccgtcgcttagccaaagaatt

SEQ ID NO: 52641 - DNA, 25 bp, Saccharomyces pastorianus
ttcgatcttttccatctgggccata

SEQ ID NO: 52642 - DNA, 25 bp, Saccharomyces pastorianus
gaggcccgtttgaataccgaattgc

SEQ ID NO: 52643 - DNA, 25 bp, Saccharomyces pastorianus
tatgcggacggtgtgttcgatcttt

SEQ ID NO: 52644 - DNA, 25 bp, Saccharomyces pastorianus
ggactcgtactcgataacaaacgtg

SEQ ID NO: 52645 - DNA, 25 bp, Saccharomyces pastorianus
gcttctcgagttggcaagccgtgta

SEQ ID NO: 52646 - DNA, 25 bp, Saccharomyces pastorianus
atgttgtcacaacagcgcgggccgt

SEQ ID NO: 52647 - DNA, 25 bp, Saccharomyces pastorianus
ggtgttccattgcatgttgtcacaa

SEQ ID NO: 52648 - DNA, 25 bp, Saccharomyces pastorianus
gtacttgcgtgagcttaagcgcctt

SEQ ID NO: 52649 - DNA, 25 bp, Saccharomyces pastorianus
ggcgcgctcaacgtggtgttccatt

SEQ ID NO: 52650 - DNA, 25 bp, Saccharomyces pastorianus
aagagcccttccaggtcgtggacgt

SEQ ID NO: 52651 - DNA, 25 bp, Saccharomyces pastorianus
caaacgtgaagtacctggaccccag

SEQ ID NO: 52652 - DNA, 25 bp, Saccharomyces pastorianus
accgctggatggtcgagggccacac

SEQ ID NO: 52653 - DNA, 25 bp, Saccharomyces pastorianus
agggacggatggcatttcgcctact

SEQ ID NO: 52654 - DNA, 25 bp, Saccharomyces pastorianus
ttaagcgccttttgctggagaagca

SEQ ID NO: 52655 - DNA, 25 bp, Saccharomyces pastorianus
gatatcttgcccgaagctcaacaaa

SEQ ID NO: 52656 - DNA, 25 bp, Saccharomyces pastorianus
aattccaggtttggctacttatgct

SEQ ID NO: 52657 - DNA, 25 bp, Saccharomyces pastorianus
tacttgtacgctcttgctgctgaaa

SEQ ID NO: 52658 - DNA, 25 bp, Saccharomyces pastorianus
taagcaaccagtagacttccacttc

SEQ ID NO: 52659 - DNA, 25 bp, Saccharomyces pastorianus
tcaaggtgaaatcgccgccatcaaa

SEQ ID NO: 52660 - DNA, 25 bp, Saccharomyces pastorianus
tacaggatttaccttccccatcaga

SEQ ID NO: 52661 - DNA, 25 bp, Saccharomyces pastorianus
atcgatttggccaaggcggtctttt

SEQ ID NO: 52662 - DNA, 25 bp, Saccharomyces pastorianus
gatgccgtcacttcgaaccattggg

SEQ ID NO: 52663 - DNA, 25 bp, Saccharomyces pastorianus
attgccaagacccagtactctttat

SEQ ID NO: 52664 - DNA, 25 bp, Saccharomyces pastorianus
aagggtgctgctaacatgtgtaaac

SEQ ID NO: 52665 - DNA, 25 bp, Saccharomyces pastorianus
gaagctggcgcatttgatgccgtca

SEQ ID NO: 52666 - DNA, 25 bp, Saccharomyces pastorianus
attcaacttgcacttgaccggtgac

SEQ ID NO: 52667 - DNA, 25 bp, Saccharomyces pastorianus
agcgctaaccgcacatttgggcaag

SEQ ID NO: 52668 - DNA, 25 bp, Saccharomyces pastorianus
tatcggtgccgctaacaacttgctt

SEQ ID NO: 52669 - DNA, 25 bp, Saccharomyces pastorianus
gaaggtaaatccaccaccacgatgg

SEQ ID NO: 52670 - DNA, 25 bp, Saccharomyces pastorianus
agatcccagctttacccttgaagtt

SEQ ID NO: 52671 - DNA, 25 bp, Saccharomyces pastorianus
atagacatctctagggcgcagcaac

SEQ ID NO: 52672 - DNA, 25 bp, Saccharomyces pastorianus
aagaattgggcatctactcccacga

SEQ ID NO: 52673 - DNA, 25 bp, Saccharomyces pastorianus
ggtaaatacatcttggtctccggta

SEQ ID NO: 52674 - DNA, 25 bp, Saccharomyces pastorianus
gttactcccaggttatcccaatgga

SEQ ID NO: 52675 - DNA, 25 bp, Saccharomyces pastorianus
aacttgcttgctgcagctatcgata

SEQ ID NO: 52676 - DNA, 25 bp, Saccharomyces pastorianus
accacgatgggtcttgttcaagcgc

SEQ ID NO: 52677 - DNA, 25 bp, Saccharomyces pastorianus
ctctggcgacaaactggtcgtcgtt

SEQ ID NO: 52678 - DNA, 25 bp, Saccharomyces pastorianus
gaacgactttcaacaattgtcttct

SEQ ID NO: 52679 - DNA, 25 bp, Saccharomyces pastorianus
tccgcttctgaatatgacaacgctt

SEQ ID NO: 52680 - DNA, 25 bp, Saccharomyces pastorianus
aaaatcaacaatggtcactcaatta

SEQ ID NO: 52681 - DNA, 25 bp, Saccharomyces pastorianus
attgtcttctcaatttggcggtgaa

SEQ ID NO: 52682 - DNA, 25 bp, Saccharomyces pastorianus
ggaagctgccaagggaacgactttc

SEQ ID NO: 52683 - DNA, 25 bp, Saccharomyces pastorianus
gaaggaatttataacgcacacatac

SEQ ID NO: 52684 - DNA, 25 bp, Saccharomyces pastorianus
gctacacacctgctaacaaaatcaa

SEQ ID NO: 52685 - DNA, 25 bp, Saccharomyces pastorianus
ggtcgtcgttgactttttcgccaca

SEQ ID NO: 52686 - DNA, 25 bp, Saccharomyces pastorianus
tgacaacgctttggcctctggcgac

SEQ ID NO: 52687 - DNA, 25 bp, Saccharomyces pastorianus
taacgcacacatacacagctacaca

SEQ ID NO: 52688 - DNA, 25 bp, Saccharomyces pastorianus
gatggaaaagttccctaccgtgctg

SEQ ID NO: 52689 - DNA, 25 bp, Saccharomyces pastorianus
aaggctgtgctgactagtgccgtga

SEQ ID NO: 52690 - DNA, 25 bp, Saccharomyces pastorianus
ttgaacaagatcgaccacccggatg

SEQ ID NO: 52691 - DNA, 25 bp, Saccharomyces pastorianus
aggtgtcgtccaggtgctgcaagca

SEQ ID NO: 52692 - DNA, 25 bp, Saccharomyces pastorianus
ggtcctgtacaggtttgggtccaca

SEQ ID NO: 52693 - DNA, 25 bp, Saccharomyces pastorianus
cacccgagtggtgaagtccttcatg

SEQ ID NO: 52694 - DNA, 25 bp, Saccharomyces pastorianus
gtttcctggtcaagagaggcacccc

SEQ ID NO: 52695 - DNA, 25 bp, Saccharomyces pastorianus
agtgccgtgactgaagtgttcctaa

SEQ ID NO: 52696 - DNA, 25 bp, Saccharomyces pastorianus
gggcacggaattcgtcgacacgtac

SEQ ID NO: 52697 - DNA, 25 bp, Saccharomyces pastorianus
acatccttgggctgataccggtgta

SEQ ID NO: 52698 - DNA, 25 bp, Saccharomyces pastorianus
tgaagtaccctgacaccaaggctgt

SEQ ID NO: 52699 - DNA, 25 bp, Saccharomyces pastorianus
aaccttgtactgtgatgacgctgca

SEQ ID NO: 52700 - DNA, 25 bp, Saccharomyces pastorianus
attggccggctcgtacatacagaat

SEQ ID NO: 52701 - DNA, 25 bp, Saccharomyces pastorianus
gacccgttgggtagagttctttgca

SEQ ID NO: 52702 - DNA, 25 bp, Saccharomyces pastorianus
aaacctctgactccatggacgaagc

SEQ ID NO: 52703 - DNA, 25 bp, Saccharomyces pastorianus
aaggatgccattgccggtaaagtca

SEQ ID NO: 52704 - DNA, 25 bp, Saccharomyces pastorianus
ggttgtccctgaattacatctcgat

SEQ ID NO: 52705 - DNA, 25 bp, Saccharomyces pastorianus
aaccggttgatattccgcatttcaa

SEQ ID NO: 52706 - DNA, 25 bp, Saccharomyces pastorianus
aaccggtggcgccattccagaaaag

SEQ ID NO: 52707 - DNA, 25 bp, Saccharomyces pastorianus
gaagtcatcatcatgtccacggtgt

SEQ ID NO: 52708 - DNA, 25 bp, Saccharomyces pastorianus
gctgcagacctatcccgtgatattt

SEQ ID NO: 52709 - DNA, 25 bp, Saccharomyces pastorianus
ggtgtgtgaccactgcggttacaaa

SEQ ID NO: 52710 - DNA, 25 bp, Saccharomyces pastorianus
aaacaactttatgtggtctccaaga

SEQ ID NO: 52711 - DNA, 25 bp, Saccharomyces pastorianus
cttcaccacttattccgcaagagag

SEQ ID NO: 52712 - DNA, 25 bp, Saccharomyces pastorianus
ggaatccgttccagaaactgcaatg

SEQ ID NO: 52713 - DNA, 25 bp, Saccharomyces pastorianus
tatcgggacacctaggatgaactat

SEQ ID NO: 52714 - DNA, 25 bp, Saccharomyces pastorianus
ggtaaacccagaggatccatatgat

SEQ ID NO: 52715 - DNA, 25 bp, Saccharomyces pastorianus
ttactacagatacctctcttcacca

SEQ ID NO: 52716 - DNA, 25 bp, Saccharomyces pastorianus
aattgaccaagcgtccacgatggaa

SEQ ID NO: 52717 - DNA, 25 bp, Saccharomyces pastorianus
ctgcaatgacagaacctatcgggac

SEQ ID NO: 52718 - DNA, 25 bp, Saccharomyces pastorianus
ggtatcgatcaatacgtgcattact

SEQ ID NO: 52719 - DNA, 25 bp, Saccharomyces pastorianus
ggttttcggacctattactacagat

SEQ ID NO: 52720 - DNA, 25 bp, Saccharomyces pastorianus
aacgtgctattgaacccgattggga

SEQ ID NO: 52721 - DNA, 25 bp, Saccharomyces pastorianus
atttcgaaggtgtcgttccaccaga

SEQ ID NO: 52722 - DNA, 25 bp, Saccharomyces pastorianus
gacaaaacccagctacgtgtacgat

SEQ ID NO: 52723 - DNA, 25 bp, Saccharomyces pastorianus
aggtgacaacttccgcacattatgc

SEQ ID NO: 52724 - DNA, 25 bp, Saccharomyces pastorianus
gtgtacgatcttatcatctcgatta

SEQ ID NO: 52725 - DNA, 25 bp, Saccharomyces pastorianus
acatgcatatgcttggctgtccata

SEQ ID NO: 52726 - DNA, 25 bp, Saccharomyces pastorianus
attagttgccttgctgtcgaaggag

SEQ ID NO: 52727 - DNA, 25 bp, Saccharomyces pastorianus
atctcgattatcactctggttatta

SEQ ID NO: 52728 - DNA, 25 bp, Saccharomyces pastorianus
ggaatttcaatcgttcttttcatcg

SEQ ID NO: 52729 - DNA, 25 bp, Saccharomyces pastorianus
agatggcagaccagccgttcggaat

SEQ ID NO: 52730 - DNA, 25 bp, Saccharomyces pastorianus
ggctgtccatatttcagatatccag

SEQ ID NO: 52731 - DNA, 25 bp, Saccharomyces pastorianus
tatgcgtgcctctgtgaaggtgaca

SEQ ID NO: 52732 - DNA, 25 bp, Saccharomyces pastorianus
ctctcagacccttaaatccatatct

SEQ ID NO: 52733 - DNA, 25 bp, Saccharomyces pastorianus
tgctctcagacccttaaatccatat

SEQ ID NO: 52734 - DNA, 25 bp, Saccharomyces pastorianus
gctctcagacccttaaatccatatc

SEQ ID NO: 52735 - DNA, 25 bp, Saccharomyces pastorianus
cagacccttaaatccatatctcttc

SEQ ID NO: 52736 - DNA, 25 bp, Saccharomyces pastorianus
gacccttaaatccatatctcttcat

SEQ ID NO: 52737 - DNA, 25 bp, Saccharomyces pastorianus
agatgtaccatgagatgctctcaga

SEQ ID NO: 52738 - DNA, 25 bp, Saccharomyces pastorianus
ctcagacccttaaatccatatctct

SEQ ID NO: 52739 - DNA, 25 bp, Saccharomyces pastorianus
gatagatgtaccatgagatgctctc

SEQ ID NO: 52740 - DNA, 25 bp, Saccharomyces pastorianus
tcagacccttaaatccatatctctt

SEQ ID NO: 52741 - DNA, 25 bp, Saccharomyces pastorianus
tctcagacccttaaatccatatctc

SEQ ID NO: 52742 - DNA, 25 bp, Saccharomyces pastorianus
agacccttaaatccatatctcttca

SEQ ID NO: 52743 - DNA, 25 bp, Saccharomyces pastorianus
aagggcagtacgtcgatgtcagatc

SEQ ID NO: 52744 - DNA, 25 bp, Saccharomyces pastorianus
gatgcggtttgattacccgtaagaa

SEQ ID NO: 52745 - DNA, 25 bp, Saccharomyces pastorianus
gatccaggaagagtgctaccgggta

SEQ ID NO: 52746 - DNA, 25 bp, Saccharomyces pastorianus
agaactgccgcaaccatattagaag

SEQ ID NO: 52747 - DNA, 25 bp, Saccharomyces pastorianus
atgacaacggattgctaccacctgg

SEQ ID NO: 52748 - DNA, 25 bp, Saccharomyces pastorianus
catgccaggttggatttggctccaa

SEQ ID NO: 52749 - DNA, 25 bp, Saccharomyces pastorianus
ttggctccaagcatctgtccaaagt

SEQ ID NO: 52750 - DNA, 25 bp, Saccharomyces pastorianus
aaatgcccggccatatgggtaatga

SEQ ID NO: 52751 - DNA, 25 bp, Saccharomyces pastorianus
gatgccctatttcgatcaatctacg

SEQ ID NO: 52752 - DNA, 25 bp, Saccharomyces pastorianus
aatgctgggacattttgcttccaaa

SEQ ID NO: 52753 - DNA, 25 bp, Saccharomyces pastorianus
gctaccacctggcactttattgaag

SEQ ID NO: 52754 - DNA, 25 bp, Saccharomyces pastorianus
gactctgatgttttacaacctccga

SEQ ID NO: 52755 - DNA, 25 bp, Saccharomyces pastorianus
ggaagcatcttcagcagcatcctta

SEQ ID NO: 52756 - DNA, 25 bp, Saccharomyces pastorianus
gtgggctattggacgactctgatgt

SEQ ID NO: 52757 - DNA, 25 bp, Saccharomyces pastorianus
aatgtctctttcacagcagcggtca

SEQ ID NO: 52758 - DNA, 25 bp, Saccharomyces pastorianus
attagcatattcgacttcctcacat

SEQ ID NO: 52759 - DNA, 25 bp, Saccharomyces pastorianus
attatagtcatagcccgtcatcatt

SEQ ID NO: 52760 - DNA, 25 bp, Saccharomyces pastorianus
aaacccatccgatctttctatcaaa

SEQ ID NO: 52761 - DNA, 25 bp, Saccharomyces pastorianus
gacggctttgaacccgatggaccat

SEQ ID NO: 52762 - DNA, 25 bp, Saccharomyces pastorianus
acgttataaacctgcgggctctttg

SEQ ID NO: 52763 - DNA, 25 bp, Saccharomyces pastorianus
ctgctagactaaacgggacggcttt

SEQ ID NO: 52764 - DNA, 25 bp, Saccharomyces pastorianus
aagcaatcgtgcattcctttgccat

SEQ ID NO: 52765 - DNA, 25 bp, Saccharomyces pastorianus
gaaatctccagtttatatcttttga

SEQ ID NO: 52766 - DNA, 25 bp, Saccharomyces pastorianus
atggcgcgttcttgattcagtacgt

SEQ ID NO: 52767 - DNA, 25 bp, Saccharomyces pastorianus
ggaaagcacactcgagacggactct

SEQ ID NO: 52768 - DNA, 25 bp, Saccharomyces pastorianus
aaactcaaacgatgcgtaccgcttt

SEQ ID NO: 52769 - DNA, 25 bp, Saccharomyces pastorianus
aaatctacataacgcattccagtcg

SEQ ID NO: 52770 - DNA, 25 bp, Saccharomyces pastorianus
aacgcattccagtcgtctgagaaat

SEQ ID NO: 52771 - DNA, 25 bp, Saccharomyces pastorianus
cgagacggactctgttatagacgat

SEQ ID NO: 52772 - DNA, 25 bp, Saccharomyces pastorianus
gcagcccttacccaatttgatgaca

SEQ ID NO: 52773 - DNA, 25 bp, Saccharomyces pastorianus
tagacgtgacccaactatggcgcgt

SEQ ID NO: 52774 - DNA, 25 bp, Saccharomyces pastorianus
atgacaccattgatgcagcccttac

SEQ ID NO: 52775 - DNA, 25 bp, Saccharomyces pastorianus
tggaacttacccactgaactacagt

SEQ ID NO: 52776 - DNA, 25 bp, Saccharomyces pastorianus
ttccgccaaccgcaagcaggttaga

SEQ ID NO: 52777 - DNA, 25 bp, Saccharomyces pastorianus
gaaatatcccacaaactgcaggagt

SEQ ID NO: 52778 - DNA, 25 bp, Saccharomyces pastorianus
ttctttactggtttatctaagtttg

SEQ ID NO: 52779 - DNA, 25 bp, Saccharomyces pastorianus
ttatctaagtttgaaatatcccaca

SEQ ID NO: 52780 - DNA, 25 bp, Saccharomyces pastorianus
gccttcactgctgctttatggggaa

SEQ ID NO: 52781 - DNA, 25 bp, Saccharomyces pastorianus
gcacaaacttctttactggtttatc

SEQ ID NO: 52782 - DNA, 25 bp, Saccharomyces pastorianus
aactgcaggagttatcgtttccgcc

SEQ ID NO: 52783 - DNA, 25 bp, Saccharomyces pastorianus
ccgcaagcaggttagaatgttcatt

SEQ ID NO: 52784 - DNA, 25 bp, Saccharomyces pastorianus
gagttatcgtttccgccaaccgcaa

SEQ ID NO: 52785 - DNA, 25 bp, Saccharomyces pastorianus
tgcaggagttatcgtttccgccaac

SEQ ID NO: 52786 - DNA, 25 bp, Saccharomyces pastorianus
gggaagcacaaacttctttactggt

SEQ ID NO: 52787 - DNA, 25 bp, Saccharomyces pastorianus
gaccagtccacgaaggatagctcga

SEQ ID NO: 52788 - DNA, 25 bp, Saccharomyces pastorianus
aaagactcgactttgcacacagcaa

SEQ ID NO: 52789 - DNA, 25 bp, Saccharomyces pastorianus
actacgtcgatgtcttgcgcagaga

SEQ ID NO: 52790 - DNA, 25 bp, Saccharomyces pastorianus
ttcacaggtgcgtcttcaagaagcc

SEQ ID NO: 52791 - DNA, 25 bp, Saccharomyces pastorianus
gagatgtgcaaactacgtcgatgtc

SEQ ID NO: 52792 - DNA, 25 bp, Saccharomyces pastorianus
ggatagctcgaaacatgcacatctt

SEQ ID NO: 52793 - DNA, 25 bp, Saccharomyces pastorianus
ttcaaaggtggttgccgaatccgat

SEQ ID NO: 52794 - DNA, 25 bp, Saccharomyces pastorianus
agaggttatttcgaccagtccacga

SEQ ID NO: 52795 - DNA, 25 bp, Saccharomyces pastorianus
aatgcaaagcactcacttcacaggt

SEQ ID NO: 52796 - DNA, 25 bp, Saccharomyces pastorianus
attcatttcgccatcagacaacttg

SEQ ID NO: 52797 - DNA, 25 bp, Saccharomyces pastorianus
gaacaaccttaccagagatgtgcaa

SEQ ID NO: 52798 - DNA, 25 bp, Saccharomyces pastorianus
tttcgcctgagtttaccaatgctgt

SEQ ID NO: 52799 - DNA, 25 bp, Saccharomyces pastorianus
caatgcgtcgcaactaatcactcaa

SEQ ID NO: 52800 - DNA, 25 bp, Saccharomyces pastorianus
cagagagcggcatttgtggttgata

SEQ ID NO: 52801 - DNA, 25 bp, Saccharomyces pastorianus
ttacatacatgaccttttcgcctga

SEQ ID NO: 52802 - DNA, 25 bp, Saccharomyces pastorianus
atcctggccaactctcctaatagag

SEQ ID NO: 52803 - DNA, 25 bp, Saccharomyces pastorianus
tggatactgccagggacattgccaa

SEQ ID NO: 52804 - DNA, 25 bp, Saccharomyces pastorianus
agtgctttctagaccagacgtggga

SEQ ID NO: 52805 - DNA, 25 bp, Saccharomyces pastorianus
acctcgtaatgttgcgtctttgacg

SEQ ID NO: 52806 - DNA, 25 bp, Saccharomyces pastorianus
tgtcgtagcccaattcaatgcgtcg

SEQ ID NO: 52807 - DNA, 25 bp, Saccharomyces pastorianus
agttctaccctctattgtcaacgaa

SEQ ID NO: 52808 - DNA, 25 bp, Saccharomyces pastorianus
gggacaactgcctaccatatataga

SEQ ID NO: 52809 - DNA, 25 bp, Saccharomyces pastorianus
gatatgcccctcattgaccaaaaat

SEQ ID NO: 52810 - DNA, 25 bp, Saccharomyces pastorianus
tttgaaagagctggccgtgaaccct

SEQ ID NO: 52811 - DNA, 25 bp, Saccharomyces pastorianus
ataacttgctgggtgttactatccc

SEQ ID NO: 52812 - DNA, 25 bp, Saccharomyces pastorianus
tggcactattccgttaaattcccct

SEQ ID NO: 52813 - DNA, 25 bp, Saccharomyces pastorianus
ccaactttccggtattattgcaaat

SEQ ID NO: 52814 - DNA, 25 bp, Saccharomyces pastorianus
ggccgtgaaccctcaaaagatgtca

SEQ ID NO: 52815 - DNA, 25 bp, Saccharomyces pastorianus
attgggaggcttgttcgattttgaa

SEQ ID NO: 52816 - DNA, 25 bp, Saccharomyces pastorianus
ggatactgcgcctttgaacatacat

SEQ ID NO: 52817 - DNA, 25 bp, Saccharomyces pastorianus
gggtgttactatcccacatgaaaca

SEQ ID NO: 52818 - DNA, 25 bp, Saccharomyces pastorianus
agcggcttgttgttaattgcttcaa

SEQ ID NO: 52819 - DNA, 25 bp, Saccharomyces pastorianus
tccggtttttcctacgatgaagaat

SEQ ID NO: 52820 - DNA, 25 bp, Saccharomyces pastorianus
tactttgtcttccaatttacctgaa

SEQ ID NO: 52821 - DNA, 25 bp, Saccharomyces pastorianus
aatctacccttgtttgatacaggac

SEQ ID NO: 52822 - DNA, 25 bp, Saccharomyces pastorianus
attggatgtcttactttcgactatc

SEQ ID NO: 52823 - DNA, 25 bp, Saccharomyces pastorianus
gtgatatgatgacctcttctagcag

SEQ ID NO: 52824 - DNA, 25 bp, Saccharomyces pastorianus
gacgacggtgaactcatctttcaag

SEQ ID NO: 52825 - DNA, 25 bp, Saccharomyces pastorianus
gttgattccatcaaggatttttcca

SEQ ID NO: 52826 - DNA, 25 bp, Saccharomyces pastorianus
ctattggaaatctaccggaggtgat

SEQ ID NO: 52827 - DNA, 25 bp, Saccharomyces pastorianus
ttcccatatccaggaaacccattta

SEQ ID NO: 52828 - DNA, 25 bp, Saccharomyces pastorianus
ctaaaaccaggtcttgaatccatca

SEQ ID NO: 52829 - DNA, 25 bp, Saccharomyces pastorianus
tggattttgaaatatttcccgcttt

SEQ ID NO: 52830 - DNA, 25 bp, Saccharomyces pastorianus
tatttcccgcttttggtacaagaat

SEQ ID NO: 52831 - DNA, 25 bp, Saccharomyces pastorianus
tcatgctagggctagtcggtgctgc

SEQ ID NO: 52832 - DNA, 25 bp, Saccharomyces pastorianus
ccccacacagcttagataggataaa

SEQ ID NO: 52833 - DNA, 25 bp, Saccharomyces pastorianus
ggataaacggcatggacacaactaa

SEQ ID NO: 52834 - DNA, 25 bp, Saccharomyces pastorianus
gcacaacgagtggtaagaactccga

SEQ ID NO: 52835 - DNA, 25 bp, Saccharomyces pastorianus
gaactccgaaatttaggtacatcat

SEQ ID NO: 52836 - DNA, 25 bp, Saccharomyces pastorianus
taccgactgcatacatgaggaggaa

SEQ ID NO: 52837 - DNA, 25 bp, Saccharomyces pastorianus
catgaggaggaactatactgtcccc

SEQ ID NO: 52838 - DNA, 25 bp, Saccharomyces pastorianus
gattcaggcatatattcagaagcac

SEQ ID NO: 52839 - DNA, 25 bp, Saccharomyces pastorianus
tagccggtgtagaccagaggactgt

SEQ ID NO: 52840 - DNA, 25 bp, Saccharomyces pastorianus
caactaagatgtctgtagccggtgt

SEQ ID NO: 52841 - DNA, 25 bp, Saccharomyces pastorianus
aggtacatcatgctagggctagtcg

SEQ ID NO: 52842 - DNA, 25 bp, Saccharomyces pastorianus
tgggcattctgcaagcgagctattc

SEQ ID NO: 52843 - DNA, 25 bp, Saccharomyces pastorianus
gaaagctggctggaccaagaccaat

SEQ ID NO: 52844 - DNA, 25 bp, Saccharomyces pastorianus
gaatcagcagtggtgacgtgacttt

SEQ ID NO: 52845 - DNA, 25 bp, Saccharomyces pastorianus
gactcaaagctctccgaatcgaaat

SEQ ID NO: 52846 - DNA, 25 bp, Saccharomyces pastorianus
ctggattccccaattttcttcaatg

SEQ ID NO: 52847 - DNA, 25 bp, Saccharomyces pastorianus
ggatgccttcaaattcgacgcggaa

SEQ ID NO: 52848 - DNA, 25 bp, Saccharomyces pastorianus
atagtaaaatgctgcactcctccac

SEQ ID NO: 52849 - DNA, 25 bp, Saccharomyces pastorianus
aacagttccccattacgagttctat

SEQ ID NO: 52850 - DNA, 25 bp, Saccharomyces pastorianus
aacatgtttcgacaacagcgccaag

SEQ ID NO: 52851 - DNA, 25 bp, Saccharomyces pastorianus
aagccatcttccgtcacgaaacatg

SEQ ID NO: 52852 - DNA, 25 bp, Saccharomyces pastorianus
actgtttcctctatcgactcaaagc

SEQ ID NO: 52853 - DNA, 25 bp, Saccharomyces pastorianus
gagattcaaattcgatacccatggt

SEQ ID NO: 52854 - DNA, 25 bp, Saccharomyces pastorianus
atacccatggtgaaaaggtgccaac

SEQ ID NO: 52855 - DNA, 25 bp, Saccharomyces pastorianus
gagttacttgctgacattatttctg

SEQ ID NO: 52856 - DNA, 25 bp, Saccharomyces pastorianus
aaggatcgtgttactgcttctagat

SEQ ID NO: 52857 - DNA, 25 bp, Saccharomyces pastorianus
gtttaattaccggtgccgtctctgt

SEQ ID NO: 52858 - DNA, 25 bp, Saccharomyces pastorianus
tactgcttctagattcgctgttaaa

SEQ ID NO: 52859 - DNA, 25 bp, Saccharomyces pastorianus
tgttccatcttctaaggatcgtgtt

SEQ ID NO: 52860 - DNA, 25 bp, Saccharomyces pastorianus
tcatgaggttcattgggccgaatat

SEQ ID NO: 52861 - DNA, 25 bp, Saccharomyces pastorianus
tgccgtctctgtgtacactccagaa

SEQ ID NO: 52862 - DNA, 25 bp, Saccharomyces pastorianus
aacgaagcctctccaaacactgatg

SEQ ID NO: 52863 - DNA, 25 bp, Saccharomyces pastorianus
gcctctatcagagaagacataactt

SEQ ID NO: 52864 - DNA, 25 bp, Saccharomyces pastorianus
gatttcccaaggtatcgatgctttg

SEQ ID NO: 52865 - DNA, 25 bp, Saccharomyces pastorianus
tcactctcgtgctttcgttgttgaa

SEQ ID NO: 52866 - DNA, 25 bp, Saccharomyces pastorianus
gtgccttggatgatcaattgaacct

SEQ ID NO: 52867 - DNA, 25 bp, Saccharomyces pastorianus
ggccttaatggctggtattgccact

SEQ ID NO: 52868 - DNA, 25 bp, Saccharomyces pastorianus
gatgctacagctaagtctcactctc

SEQ ID NO: 52869 - DNA, 25 bp, Saccharomyces pastorianus
atggtcgactacatcgatgctacag

SEQ ID NO: 52870 - DNA, 25 bp, Saccharomyces pastorianus
gctgttcctcatggtaaatggcaag

SEQ ID NO: 52871 - DNA, 25 bp, Saccharomyces pastorianus
tgctttgattgtttgcggtggtgat

SEQ ID NO: 52872 - DNA, 25 bp, Saccharomyces pastorianus
tggtaccctaattggtactgctcgt

SEQ ID NO: 52873 - DNA, 25 bp, Saccharomyces pastorianus
cattgttggtcttgttggttctatt

SEQ ID NO: 52874 - DNA, 25 bp, Saccharomyces pastorianus
agcagcaggcaatttgatttcccaa

SEQ ID NO: 52875 - DNA, 25 bp, Saccharomyces pastorianus
aggaacttaacgctcacttattgaa

SEQ ID NO: 52876 - DNA, 25 bp, Saccharomyces pastorianus
gataaatcagggttgcatgcagcat

SEQ ID NO: 52877 - DNA, 25 bp, Saccharomyces pastorianus
atatcgtcctcgtaatttgcattta

SEQ ID NO: 52878 - DNA, 25 bp, Saccharomyces pastorianus
acatcagacgcatacctttctaagg

SEQ ID NO: 52879 - DNA, 25 bp, Saccharomyces pastorianus
ttgcatttattacccacatcagacg

SEQ ID NO: 52880 - DNA, 25 bp, Saccharomyces pastorianus
gcagctgcagctattgggttgatgt

SEQ ID NO: 52881 - DNA, 25 bp, Saccharomyces pastorianus
cattgctacaggtaacacctcggta

SEQ ID NO: 52882 - DNA, 25 bp, Saccharomyces pastorianus
aacggtgattttacaactgctgaca

SEQ ID NO: 52883 - DNA, 25 bp, Saccharomyces pastorianus
taaggtctgtgacgatcccgacaac

SEQ ID NO: 52884 - DNA, 25 bp, Saccharomyces pastorianus
gatggctactccctagaaacagatc

SEQ ID NO: 52885 - DNA, 25 bp, Saccharomyces pastorianus
gaaacagatccatatcgtcctcgta

SEQ ID NO: 52886 - DNA, 25 bp, Saccharomyces pastorianus
aattttgtgcaaggccggagatccc

SEQ ID NO: 52887 - DNA, 25 bp, Saccharomyces pastorianus
ttatgctttgcatatcccggaatat

SEQ ID NO: 52888 - DNA, 25 bp, Saccharomyces pastorianus
aaattgcgtgctgtctcttatgctt

SEQ ID NO: 52889 - DNA, 25 bp, Saccharomyces pastorianus
agcggatccattctttattcattca

SEQ ID NO: 52890 - DNA, 25 bp, Saccharomyces pastorianus
gctgctgtcgtccaaggttcattta

SEQ ID NO: 52891 - DNA, 25 bp, Saccharomyces pastorianus
gataaccctatcgtgtcggaagtga

SEQ ID NO: 52892 - DNA, 25 bp, Saccharomyces pastorianus
gatcccaaaacgtcattgcgtcatg

SEQ ID NO: 52893 - DNA, 25 bp, Saccharomyces pastorianus
tggttccagtgctctcgaatcgaga

SEQ ID NO: 52894 - DNA, 25 bp, Saccharomyces pastorianus
aaagccatgcctcgttcggtggttc

SEQ ID NO: 52895 - DNA, 25 bp, Saccharomyces pastorianus
aatatattaccgacgctgctttcca

SEQ ID NO: 52896 - DNA, 25 bp, Saccharomyces pastorianus
gagacctttccaacgctaataatga

SEQ ID NO: 52897 - DNA, 25 bp, Saccharomyces pastorianus
tggtaacttaccttctggcgacgat

SEQ ID NO: 52898 - DNA, 25 bp, Saccharomyces pastorianus
ggcgacgatgacgatctatctcaaa

SEQ ID NO: 52899 - DNA, 25 bp, Saccharomyces pastorianus
atcgtttggcttcattccacaagtg

SEQ ID NO: 52900 - DNA, 25 bp, Saccharomyces pastorianus
tttgaaagcccgttggatgcagcca

SEQ ID NO: 52901 - DNA, 25 bp, Saccharomyces pastorianus
tgcagccaaggccatttcgaataca

SEQ ID NO: 52902 - DNA, 25 bp, Saccharomyces pastorianus
gaacgccttgatgaaccagaaccac

SEQ ID NO: 52903 - DNA, 25 bp, Saccharomyces pastorianus
ttatccgtctcgttcgcacaaaaac

SEQ ID NO: 52904 - DNA, 25 bp, Saccharomyces pastorianus
gatgccaatgtttccatcgtttggc

SEQ ID NO: 52905 - DNA, 25 bp, Saccharomyces pastorianus
agtgacttaccggtgggatcatcaa

SEQ ID NO: 52906 - DNA, 25 bp, Saccharomyces pastorianus
tatcaaggttcccagccacagaatg

SEQ ID NO: 52907 - DNA, 25 bp, Saccharomyces pastorianus
agatcaagtgttatccgtctcgttc

SEQ ID NO: 52908 - DNA, 25 bp, Saccharomyces pastorianus
gtagccctgaggtcatttggtttga

SEQ ID NO: 52909 - DNA, 25 bp, Saccharomyces pastorianus
ttataccatacaagtttcccacctg

SEQ ID NO: 52910 - DNA, 25 bp, Saccharomyces pastorianus
gcatgccgatcgttattgtacagat

SEQ ID NO: 52911 - DNA, 25 bp, Saccharomyces pastorianus
acaacacatcctttggctggacaag

SEQ ID NO: 52912 - DNA, 25 bp, Saccharomyces pastorianus
tgttatcgttacctgcagaatcgtt

SEQ ID NO: 52913 - DNA, 25 bp, Saccharomyces pastorianus
gtcaacgcagcctttgttttggaag

SEQ ID NO: 52914 - DNA, 25 bp, Saccharomyces pastorianus
tggagacgctgcacacacaacacat

SEQ ID NO: 52915 - DNA, 25 bp, Saccharomyces pastorianus
tttgactgacaagcttggcccaatt

SEQ ID NO: 52916 - DNA, 25 bp, Saccharomyces pastorianus
cagaatcgtttaccgcacttgtcaa

SEQ ID NO: 52917 - DNA, 25 bp, Saccharomyces pastorianus
gaggcttagacattggttcttcgtt

SEQ ID NO: 52918 - DNA, 25 bp, Saccharomyces pastorianus
tgaagagatttacccgccaagagtg

SEQ ID NO: 52919 - DNA, 25 bp, Saccharomyces pastorianus
tagatccgagagattacctgctaat

SEQ ID NO: 52920 - DNA, 25 bp, Saccharomyces pastorianus
tagggttttgcctgaatgtgcttct

SEQ ID NO: 52921 - DNA, 25 bp, Saccharomyces pastorianus
taatcttctgcaagctcaacgtgac

SEQ ID NO: 52922 - DNA, 25 bp, Saccharomyces pastorianus
agctttctccacagcattagcattt

SEQ ID NO: 52923 - DNA, 25 bp, Saccharomyces pastorianus
gttattcaacgatttcttcgcctcc

SEQ ID NO: 52924 - DNA, 25 bp, Saccharomyces pastorianus
gtggagaaggtccattgcccttgcc

SEQ ID NO: 52925 - DNA, 25 bp, Saccharomyces pastorianus
tttaccggtagacagggacattcat

SEQ ID NO: 52926 - DNA, 25 bp, Saccharomyces pastorianus
atcagatctgtcttcttggcagaga

SEQ ID NO: 52927 - DNA, 25 bp, Saccharomyces pastorianus
atgtgcttctgctaatttaccggta

SEQ ID NO: 52928 - DNA, 25 bp, Saccharomyces pastorianus
ctttggtgcacatacatttagggtt

SEQ ID NO: 52929 - DNA, 25 bp, Saccharomyces pastorianus
gctactaaggcccaatctgggtgga

SEQ ID NO: 52930 - DNA, 25 bp, Saccharomyces pastorianus
tgaccatgatactacgccgttcgtt

SEQ ID NO: 52931 - DNA, 25 bp, Saccharomyces pastorianus
gacgacgattttccaagtgtcatgg

SEQ ID NO: 52932 - DNA, 25 bp, Saccharomyces pastorianus
ggctggccatacgaaaagtccgatg

SEQ ID NO: 52933 - DNA, 25 bp, Saccharomyces pastorianus
gcagcttttgggaagtgactacaca

SEQ ID NO: 52934 - DNA, 25 bp, Saccharomyces pastorianus
tgaggccagaagttgaccatgatac

SEQ ID NO: 52935 - DNA, 25 bp, Saccharomyces pastorianus
gatgaaatccttattcctctgataa

SEQ ID NO: 52936 - DNA, 25 bp, Saccharomyces pastorianus
gacctggatatgctacgttcattca

SEQ ID NO: 52937 - DNA, 25 bp, Saccharomyces pastorianus
gaataatcaattaggctggccatac

SEQ ID NO: 52938 - DNA, 25 bp, Saccharomyces pastorianus
acatgattgaattggcgcagctttt

SEQ ID NO: 52939 - DNA, 25 bp, Saccharomyces pastorianus
tgcggaattcggcaacttggaaaat

SEQ ID NO: 52940 - DNA, 25 bp, Saccharomyces pastorianus
gaatcaacgagttttttccaagaga

SEQ ID NO: 52941 - DNA, 25 bp, Saccharomyces pastorianus
atgcgcctcatcttcctggaaggtg

SEQ ID NO: 52942 - DNA, 25 bp, Saccharomyces pastorianus
gtatatgtccatcttgcgcaaaact

SEQ ID NO: 52943 - DNA, 25 bp, Saccharomyces pastorianus
tccgacttcttgtcgtggttacgat

SEQ ID NO: 52944 - DNA, 25 bp, Saccharomyces pastorianus
tctttcgagggctaggtccgacttc

SEQ ID NO: 52945 - DNA, 25 bp, Saccharomyces pastorianus
gtatagcagtcccatgagcggaatt

SEQ ID NO: 52946 - DNA, 25 bp, Saccharomyces pastorianus
atgggatcccatcatcatctgtggt

SEQ ID NO: 52947 - DNA, 25 bp, Saccharomyces pastorianus
ttgtgcaagtcagcatcatgcgcct

SEQ ID NO: 52948 - DNA, 25 bp, Saccharomyces pastorianus
tggtggccattatttctctttcgag

SEQ ID NO: 52949 - DNA, 25 bp, Saccharomyces pastorianus
ggtgattgtcgtgggtttttcttct

SEQ ID NO: 52950 - DNA, 25 bp, Saccharomyces pastorianus
gcaaaacttgcttttccattgggtg

SEQ ID NO: 52951 - DNA, 25 bp, Saccharomyces pastorianus
tcatcatctgtggtggtggccatta

SEQ ID NO: 52952 - DNA, 25 bp, Saccharomyces pastorianus
aagcacctaaacctgcagcgagaaa

SEQ ID NO: 52953 - DNA, 25 bp, Saccharomyces pastorianus
atgcggtcctctatctggcgaaata

SEQ ID NO: 52954 - DNA, 25 bp, Saccharomyces pastorianus
agccctaattcaacaaggtcattta

SEQ ID NO: 52955 - DNA, 25 bp, Saccharomyces pastorianus
tcatctcaatctttcataagcccta

SEQ ID NO: 52956 - DNA, 25 bp, Saccharomyces pastorianus
gactttagcagttctcgaatctctc

SEQ ID NO: 52957 - DNA, 25 bp, Saccharomyces pastorianus
ttatcaactctctcagactggaaac

SEQ ID NO: 52958 - DNA, 25 bp, Saccharomyces pastorianus
acaatagcacatttgcgtctcaaaa

SEQ ID NO: 52959 - DNA, 25 bp, Saccharomyces pastorianus
aaggtcatttacatctacttccaat

SEQ ID NO: 52960 - DNA, 25 bp, Saccharomyces pastorianus
gaatctctcaaatgtacaatgcggt

SEQ ID NO: 52961 - DNA, 25 bp, Saccharomyces pastorianus
gtgctatcagcaaaactgttgtcat

SEQ ID NO: 52962 - DNA, 25 bp, Saccharomyces pastorianus
gagtttttcaaaatgcttccttgga

SEQ ID NO: 52963 - DNA, 25 bp, Saccharomyces pastorianus
cctggctattttaggaggtcacaat

SEQ ID NO: 52964 - DNA, 25 bp, Saccharomyces pastorianus
tgctcgcggtaaccaattcttgcaa

SEQ ID NO: 52965 - DNA, 25 bp, Saccharomyces pastorianus
gttgaatgcaccagctttgaggatt

SEQ ID NO: 52966 - DNA, 25 bp, Saccharomyces pastorianus
ttgccatgtcactaagtgctcgcgg

SEQ ID NO: 52967 - DNA, 25 bp, Saccharomyces pastorianus
aagctcgacaatactttattctctc

SEQ ID NO: 52968 - DNA, 25 bp, Saccharomyces pastorianus
ctttattctctcaatccccagaaaa

SEQ ID NO: 52969 - DNA, 25 bp, Saccharomyces pastorianus
attatcacaccatacatgcctgaga

SEQ ID NO: 52970 - DNA, 25 bp, Saccharomyces pastorianus
gggatgaattccacctggctatttt

SEQ ID NO: 52971 - DNA, 25 bp, Saccharomyces pastorianus
caataaggctgaatacttgttccaa

SEQ ID NO: 52972 - DNA, 25 bp, Saccharomyces pastorianus
gtcgcggtcggcttgaatattattt

SEQ ID NO: 52973 - DNA, 25 bp, Saccharomyces pastorianus
tacgcagtcagttctattatcacac

SEQ ID NO: 52974 - DNA, 25 bp, Saccharomyces pastorianus
tacgtttggttcgacgctaccattg

SEQ ID NO: 52975 - DNA, 25 bp, Saccharomyces pastorianus
ttggttacgtttccatcactgccaa

SEQ ID NO: 52976 - DNA, 25 bp, Saccharomyces pastorianus
gaactggaccatgttacaccatcta

SEQ ID NO: 52977 - DNA, 25 bp, Saccharomyces pastorianus
gttggtgtctttggtaacaatgctc

SEQ ID NO: 52978 - DNA, 25 bp, Saccharomyces pastorianus
tcactgccaactacactaaggaatg

SEQ ID NO: 52979 - DNA, 25 bp, Saccharomyces pastorianus
gattctcacttttcatgggacgatt

SEQ ID NO: 52980 - DNA, 25 bp, Saccharomyces pastorianus
gacccgaatccagtgattctcactt

SEQ ID NO: 52981 - DNA, 25 bp, Saccharomyces pastorianus
tggtctaaaaccacgttgtattaca

SEQ ID NO: 52982 - DNA, 25 bp, Saccharomyces pastorianus
aatgctcaagactctggtatctctc

SEQ ID NO: 52983 - DNA, 25 bp, Saccharomyces pastorianus
gctaccattggttacgtttccatca

SEQ ID NO: 52984 - DNA, 25 bp, Saccharomyces pastorianus
caacggtgttgttccagattcgatc

SEQ ID NO: 52985 - DNA, 25 bp, Saccharomyces pastorianus
gcgacagacttgattgtgtttgcca

SEQ ID NO: 52986 - DNA, 25 bp, Saccharomyces pastorianus
tttgcattggcatctctacaaaatt

SEQ ID NO: 52987 - DNA, 25 bp, Saccharomyces pastorianus
tttactttgtttgatgctaatgcca

SEQ ID NO: 52988 - DNA, 25 bp, Saccharomyces pastorianus
aagagtcatcctgctcatttgcagt

SEQ ID NO: 52989 - DNA, 25 bp, Saccharomyces pastorianus
gattctgacaagtaccaatttgcat

SEQ ID NO: 52990 - DNA, 25 bp, Saccharomyces pastorianus
ggccatcgaaaactacttatctcag

SEQ ID NO: 52991 - DNA, 25 bp, Saccharomyces pastorianus
gaaggttgccttggcgctagaattt

SEQ ID NO: 52992 - DNA, 25 bp, Saccharomyces pastorianus
gaaagaaccttcaactgcgacagac

SEQ ID NO: 52993 - DNA, 25 bp, Saccharomyces pastorianus
gctcatttgcagttggccaataatt

SEQ ID NO: 52994 - DNA, 25 bp, Saccharomyces pastorianus
acatctatggaattgcatcacgcaa

SEQ ID NO: 52995 - DNA, 25 bp, Saccharomyces pastorianus
aagtcttgacaaacaaggccatcga

SEQ ID NO: 52996 - DNA, 25 bp, Saccharomyces pastorianus
agagagtctacccatcaacaacagt

SEQ ID NO: 52997 - DNA, 25 bp, Saccharomyces pastorianus
gaatcactccaatctagctgcataa

SEQ ID NO: 52998 - DNA, 25 bp, Saccharomyces pastorianus
taaacagactgtagcgccactaaat

SEQ ID NO: 52999 - DNA, 25 bp, Saccharomyces pastorianus
agacgggcctagtgaatcagctttc

SEQ ID NO: 53000 - DNA, 25 bp, Saccharomyces pastorianus
atgaggcaatcctaacaccttctac

SEQ ID NO: 53001 - DNA, 25 bp, Saccharomyces pastorianus
aagtgatccacttttgctgtcagaa

SEQ ID NO: 53002 - DNA, 25 bp, Saccharomyces pastorianus
caccttctactgttggtacgggaga

SEQ ID NO: 53003 - DNA, 25 bp, Saccharomyces pastorianus
ggagaagtcccagcaccaattgata

SEQ ID NO: 53004 - DNA, 25 bp, Saccharomyces pastorianus
gatgttcattcctctattgcaaaaa

SEQ ID NO: 53005 - DNA, 25 bp, Saccharomyces pastorianus
agacggtggcgcacacgaacaacgt

SEQ ID NO: 53006 - DNA, 25 bp, Saccharomyces pastorianus
agaagtactcactccgaaagacggt

SEQ ID NO: 53007 - DNA, 25 bp, Saccharomyces pastorianus
tagacgcgatagtgacgacaaacgt

SEQ ID NO: 53008 - DNA, 25 bp, Saccharomyces pastorianus
tgaaaatggcataattcatactact

SEQ ID NO: 53009 - DNA, 25 bp, Saccharomyces pastorianus
ggttatgaaacccagatcaaagatg

SEQ ID NO: 53010 - DNA, 25 bp, Saccharomyces pastorianus
tagtgacgacaaacgtagcgatgct

SEQ ID NO: 53011 - DNA, 25 bp, Saccharomyces pastorianus
gaaacccagatcaaagatgaaaatg

SEQ ID NO: 53012 - DNA, 25 bp, Saccharomyces pastorianus
tcatactacttctcgttctttaaga

SEQ ID NO: 53013 - DNA, 25 bp, Saccharomyces pastorianus
gcaaacgttggttatgaaacccaga

SEQ ID NO: 53014 - DNA, 25 bp, Saccharomyces pastorianus
gacgacaaacgtagcgatgctgaag

SEQ ID NO: 53015 - DNA, 25 bp, Saccharomyces pastorianus
cgtagcgatgctgaagatacaaata

SEQ ID NO: 53016 - DNA, 25 bp, Saccharomyces pastorianus
ggaatagacgcgatagtgacgacaa

SEQ ID NO: 53017 - DNA, 25 bp, Saccharomyces pastorianus
aattcatactacttctcgttcttta

SEQ ID NO: 53018 - DNA, 25 bp, Saccharomyces pastorianus
gacgataaagatctgcaagctcaat

SEQ ID NO: 53019 - DNA, 25 bp, Saccharomyces pastorianus
ccatatggtgaggttttttgagaaa

SEQ ID NO: 53020 - DNA, 25 bp, Saccharomyces pastorianus
gggccactaaagttgaactatgtta

SEQ ID NO: 53021 - DNA, 25 bp, Saccharomyces pastorianus
tctcagataatggacgcaggtgcaa

SEQ ID NO: 53022 - DNA, 25 bp, Saccharomyces pastorianus
gatatattgccttctactgtgataa

SEQ ID NO: 53023 - DNA, 25 bp, Saccharomyces pastorianus
gaaatagggcccttgggtcatcttt

SEQ ID NO: 53024 - DNA, 25 bp, Saccharomyces pastorianus
aaagcaaacgaatctgactcagacg

SEQ ID NO: 53025 - DNA, 25 bp, Saccharomyces pastorianus
gggcccttgggtcatctttagagat

SEQ ID NO: 53026 - DNA, 25 bp, Saccharomyces pastorianus
ttgcagaacaacgagctaaagaaca

SEQ ID NO: 53027 - DNA, 25 bp, Saccharomyces pastorianus
caagccttgcgattggagttgcaga

SEQ ID NO: 53028 - DNA, 25 bp, Saccharomyces pastorianus
tgcaagctcaattaagggccactaa

SEQ ID NO: 53029 - DNA, 25 bp, Saccharomyces pastorianus
gatgaaaggcccatggacactataa

SEQ ID NO: 53030 - DNA, 25 bp, Saccharomyces pastorianus
gcttcagtaaatctacctcaactag

SEQ ID NO: 53031 - DNA, 25 bp, Saccharomyces pastorianus
gacacatagcacttcaatacgtaac

SEQ ID NO: 53032 - DNA, 25 bp, Saccharomyces pastorianus
aaagacccacgctggttacaagagt

SEQ ID NO: 53033 - DNA, 25 bp, Saccharomyces pastorianus
agatattgcaataccagacatgtca

SEQ ID NO: 53034 - DNA, 25 bp, Saccharomyces pastorianus
aattacggtcgtcctcattaacagc

SEQ ID NO: 53035 - DNA, 25 bp, Saccharomyces pastorianus
aacttgcaatgcctatactgtatat

SEQ ID NO: 53036 - DNA, 25 bp, Saccharomyces pastorianus
atcaatcgagattcacaagcttcag

SEQ ID NO: 53037 - DNA, 25 bp, Saccharomyces pastorianus
gaagctcagcctttcgaagaagcaa

SEQ ID NO: 53038 - DNA, 25 bp, Saccharomyces pastorianus
ccccgattctcgaagctgttcaaga

SEQ ID NO: 53039 - DNA, 25 bp, Saccharomyces pastorianus
gtcagatctggattctcagccatca

SEQ ID NO: 53040 - DNA, 25 bp, Saccharomyces pastorianus
tggcagcgaggctattcctgggcta

SEQ ID NO: 53041 - DNA, 25 bp, Saccharomyces pastorianus
taagctccacaaagcagcaaccaca

SEQ ID NO: 53042 - DNA, 25 bp, Saccharomyces pastorianus
aggaaagagtcccaaaccgcatcgc

SEQ ID NO: 53043 - DNA, 25 bp, Saccharomyces pastorianus
ggcaaagccctaagtgtggatgata

SEQ ID NO: 53044 - DNA, 25 bp, Saccharomyces pastorianus
tactacggcggtgctaccagcggag

SEQ ID NO: 53045 - DNA, 25 bp, Saccharomyces pastorianus
ggattctcagacattaattcacaag

SEQ ID NO: 53046 - DNA, 25 bp, Saccharomyces pastorianus
tcctgggctatctgcaggtgcgaat

SEQ ID NO: 53047 - DNA, 25 bp, Saccharomyces pastorianus
atacccgttcaggtacaagacgtgg

SEQ ID NO: 53048 - DNA, 25 bp, Saccharomyces pastorianus
agagtcctggaggtacgattggtac

SEQ ID NO: 53049 - DNA, 25 bp, Saccharomyces pastorianus
aaagtgtcatactacggcggtgcta

SEQ ID NO: 53050 - DNA, 25 bp, Saccharomyces pastorianus
tactaccgaaggaggcaaagcccta

SEQ ID NO: 53051 - DNA, 25 bp, Saccharomyces pastorianus
taatctgcggtatcacatgcgatga

SEQ ID NO: 53052 - DNA, 25 bp, Saccharomyces pastorianus
gaatcttacgagacacggtgcagcc

SEQ ID NO: 53053 - DNA, 25 bp, Saccharomyces pastorianus
actttcgacacgtggcagctggaac

SEQ ID NO: 53054 - DNA, 25 bp, Saccharomyces pastorianus
atgaattccgtgtaactgcgttagg

SEQ ID NO: 53055 - DNA, 25 bp, Saccharomyces pastorianus
ggtggaactcgtccctctgaaggat

SEQ ID NO: 53056 - DNA, 25 bp, Saccharomyces pastorianus
atattgttgagtatcgctgcgttca

SEQ ID NO: 53057 - DNA, 25 bp, Saccharomyces pastorianus
taggcgggacatttgaccatattca

SEQ ID NO: 53058 - DNA, 25 bp, Saccharomyces pastorianus
tctgaaggatgtctgtgggcccact

SEQ ID NO: 53059 - DNA, 25 bp, Saccharomyces pastorianus
agtgcctgagattgaatgccttgtt

SEQ ID NO: 53060 - DNA, 25 bp, Saccharomyces pastorianus
aatacagaacactattccctacacg

SEQ ID NO: 53061 - DNA, 25 bp, Saccharomyces pastorianus
tgggtttattgccacacggttccac

SEQ ID NO: 53062 - DNA, 25 bp, Saccharomyces pastorianus
aactgaacagttgcgcatcttgggt

SEQ ID NO: 53063 - DNA, 25 bp, Saccharomyces pastorianus
ttctccccatgaagtgtctcacgat

SEQ ID NO: 53064 - DNA, 25 bp, Saccharomyces pastorianus
gagtcacaactatctcaaggaccaa

SEQ ID NO: 53065 - DNA, 25 bp, Saccharomyces pastorianus
gatttcttatgagtttctccccatg

SEQ ID NO: 53066 - DNA, 25 bp, Saccharomyces pastorianus
gatgctgaccacatcagatactcta

SEQ ID NO: 53067 - DNA, 25 bp, Saccharomyces pastorianus
gaagcgtgccagatcaaggaccccg

SEQ ID NO: 53068 - DNA, 25 bp, Saccharomyces pastorianus
atcgtctgctgaccggaagcgtgcc

SEQ ID NO: 53069 - DNA, 25 bp, Saccharomyces pastorianus
gactagcttccattaatctcgaggg

SEQ ID NO: 53070 - DNA, 25 bp, Saccharomyces pastorianus
aaccgtaacagatccagaactccgc

SEQ ID NO: 53071 - DNA, 25 bp, Saccharomyces pastorianus
aatttcttcactgctattggattag

SEQ ID NO: 53072 - DNA, 25 bp, Saccharomyces pastorianus
cgaggaagactcgtgtccgcaagga

SEQ ID NO: 53073 - DNA, 25 bp, Saccharomyces pastorianus
gcgtgtccgacactttggatgaagt

SEQ ID NO: 53074 - DNA, 25 bp, Saccharomyces pastorianus
agcccattgggatatcacgttcgcg

SEQ ID NO: 53075 - DNA, 25 bp, Saccharomyces pastorianus
tgtctattgcacaagattcctcagc

SEQ ID NO: 53076 - DNA, 25 bp, Saccharomyces pastorianus
gatctagaatcgtcagcgttgcacc

SEQ ID NO: 53077 - DNA, 25 bp, Saccharomyces pastorianus
gcttatcttcggcaaatgggaccac

SEQ ID NO: 53078 - DNA, 25 bp, Saccharomyces pastorianus
gactaccactacgacgaagctttgt

SEQ ID NO: 53079 - DNA, 25 bp, Saccharomyces pastorianus
gtaacggttgacacacagcgcaaag

SEQ ID NO: 53080 - DNA, 25 bp, Saccharomyces pastorianus
accactacttctcagggcaactaga

SEQ ID NO: 53081 - DNA, 25 bp, Saccharomyces pastorianus
tattcccaagactgtacgtgtaacg

SEQ ID NO: 53082 - DNA, 25 bp, Saccharomyces pastorianus
tagtatcgcccagagatgcctacaa

SEQ ID NO: 53083 - DNA, 25 bp, Saccharomyces pastorianus
atgggaccacttgaagcgttgtttc

SEQ ID NO: 53084 - DNA, 25 bp, Saccharomyces pastorianus
tccaacccaacctgtgcaaatttat

SEQ ID NO: 53085 - DNA, 25 bp, Saccharomyces pastorianus
atacgctgagaatttccgtgtcaat

SEQ ID NO: 53086 - DNA, 25 bp, Saccharomyces pastorianus
aaccatattgaccaactctcgaatg

SEQ ID NO: 53087 - DNA, 25 bp, Saccharomyces pastorianus
atcactgcaatctgcgagtgcgtta

SEQ ID NO: 53088 - DNA, 25 bp, Saccharomyces pastorianus
ctgacatagagcttcatgggcacat

SEQ ID NO: 53089 - DNA, 25 bp, Saccharomyces pastorianus
aaatccgttccctgacagtatcaga

SEQ ID NO: 53090 - DNA, 25 bp, Saccharomyces pastorianus
gacgacttacgatcaacttttttgg

SEQ ID NO: 53091 - DNA, 25 bp, Saccharomyces pastorianus
gttcccgaaacattcaagacgttgt

SEQ ID NO: 53092 - DNA, 25 bp, Saccharomyces pastorianus
tgtcaatagacccaaccaaatccgt

SEQ ID NO: 53093 - DNA, 25 bp, Saccharomyces pastorianus
cagttctccatcttccataatgaca

SEQ ID NO: 53094 - DNA, 25 bp, Saccharomyces pastorianus
aaacggtagagcctagcttcacaaa

SEQ ID NO: 53095 - DNA, 25 bp, Saccharomyces pastorianus
tctgaaggtacctctgaaaccgcct

SEQ ID NO: 53096 - DNA, 25 bp, Saccharomyces pastorianus
ttggccattaaaaccacccctggca

SEQ ID NO: 53097 - DNA, 25 bp, Saccharomyces pastorianus
cctgaagttacctctacctctggca

SEQ ID NO: 53098 - DNA, 25 bp, Saccharomyces pastorianus
acctctggcaccacctctgaaggta

SEQ ID NO: 53099 - DNA, 25 bp, Saccharomyces pastorianus
atggagtcggcgttagcaccgaaga

SEQ ID NO: 53100 - DNA, 25 bp, Saccharomyces pastorianus
tgaaaccgcctctgaaaccagctct

SEQ ID NO: 53101 - DNA, 25 bp, Saccharomyces pastorianus
gttattgacgtataaggtatccttt

SEQ ID NO: 53102 - DNA, 25 bp, Saccharomyces pastorianus
gaaaccagctctgcctctgaaggcg

SEQ ID NO: 53103 - DNA, 25 bp, Saccharomyces pastorianus
agaattcggcaacttcttccttggt

SEQ ID NO: 53104 - DNA, 25 bp, Saccharomyces pastorianus
tccttggtggccttgaatggaacgt

SEQ ID NO: 53105 - DNA, 25 bp, Saccharomyces pastorianus
ggccttgaatggaacgttattgacg

SEQ ID NO: 53106 - DNA, 25 bp, Saccharomyces pastorianus
aggaagcgcttcattgtagactact

SEQ ID NO: 53107 - DNA, 25 bp, Saccharomyces pastorianus
gtcattgcgttggtatgcaccccag

SEQ ID NO: 53108 - DNA, 25 bp, Saccharomyces pastorianus
aagagctcttggtcgggttcgatga

SEQ ID NO: 53109 - DNA, 25 bp, Saccharomyces pastorianus
agctcccgctctaagtttgtgaact

SEQ ID NO: 53110 - DNA, 25 bp, Saccharomyces pastorianus
gaaaggctttcttgcatctcaattc

SEQ ID NO: 53111 - DNA, 25 bp, Saccharomyces pastorianus
tacccgctaccgcaagttatgaagt

SEQ ID NO: 53112 - DNA, 25 bp, Saccharomyces pastorianus
atttccaatcaaagcgctctctata

SEQ ID NO: 53113 - DNA, 25 bp, Saccharomyces pastorianus
tggctattcgcctttctagaggtta

SEQ ID NO: 53114 - DNA, 25 bp, Saccharomyces pastorianus
tgttcatcgtaatttggcccatcag

SEQ ID NO: 53115 - DNA, 25 bp, Saccharomyces pastorianus
tcagatccatgattctagccgtgcc

SEQ ID NO: 53116 - DNA, 25 bp, Saccharomyces pastorianus
ttgatttccggtgttgtcattgcgt

SEQ ID NO: 53117 - DNA, 25 bp, Saccharomyces pastorianus
accgtcaagaaggtttactcgctga

SEQ ID NO: 53118 - DNA, 25 bp, Saccharomyces pastorianus
agatggaagtggtcggcaccgtcaa

SEQ ID NO: 53119 - DNA, 25 bp, Saccharomyces pastorianus
tatcgaagtttacggccaactcgct

SEQ ID NO: 53120 - DNA, 25 bp, Saccharomyces pastorianus
gtccaacgccaacgaagcagatcta

SEQ ID NO: 53121 - DNA, 25 bp, Saccharomyces pastorianus
gaaatgatccgagaacgcttcctgc

SEQ ID NO: 53122 - DNA, 25 bp, Saccharomyces pastorianus
agcccgcaaggtcccaggtacgaga

SEQ ID NO: 53123 - DNA, 25 bp, Saccharomyces pastorianus
gtaccactacgctcacaggcaggaa

SEQ ID NO: 53124 - DNA, 25 bp, Saccharomyces pastorianus
gcagcagtacagacaacgccaacag

SEQ ID NO: 53125 - DNA, 25 bp, Saccharomyces pastorianus
agaaagtttactgaacctgcccacg

SEQ ID NO: 53126 - DNA, 25 bp, Saccharomyces pastorianus
gttcgatagcgtccatagcacgtca

SEQ ID NO: 53127 - DNA, 25 bp, Saccharomyces pastorianus
ggaaagtactaatcctcgcgaagga

SEQ ID NO: 53128 - DNA, 25 bp, Saccharomyces pastorianus
ataaacaccaccaagagaccgctga

SEQ ID NO: 53129 - DNA, 25 bp, Saccharomyces pastorianus
gtccgacaaagtttcgtgcttgcag

SEQ ID NO: 53130 - DNA, 25 bp, Saccharomyces pastorianus
agaaaaggagcaggcgcaccctatg

SEQ ID NO: 53131 - DNA, 25 bp, Saccharomyces pastorianus
agaccgctgaagtcgatcgggagac

SEQ ID NO: 53132 - DNA, 25 bp, Saccharomyces pastorianus
tgcctgcaccttttgaaactagcca

SEQ ID NO: 53133 - DNA, 25 bp, Saccharomyces pastorianus
tcgtgcttgcaggatctcgtagaaa

SEQ ID NO: 53134 - DNA, 25 bp, Saccharomyces pastorianus
gattacgactataacgaccgggagt

SEQ ID NO: 53135 - DNA, 25 bp, Saccharomyces pastorianus
caacgtcgtgacgttctacgacgaa

SEQ ID NO: 53136 - DNA, 25 bp, Saccharomyces pastorianus
tagccaacaagcagctgtccgacaa

SEQ ID NO: 53137 - DNA, 25 bp, Saccharomyces pastorianus
gaagaggctcattacgtgcctgcac

SEQ ID NO: 53138 - DNA, 25 bp, Saccharomyces pastorianus
acgacgagcacgacgattacgacta

SEQ ID NO: 53139 - DNA, 25 bp, Saccharomyces pastorianus
acggtggcccttcatagtttctatt

SEQ ID NO: 53140 - DNA, 25 bp, Saccharomyces pastorianus
gacgctgaccagcttatctcgaggg

SEQ ID NO: 53141 - DNA, 25 bp, Saccharomyces pastorianus
ttgtacagttcctctagcttgggtc

SEQ ID NO: 53142 - DNA, 25 bp, Saccharomyces pastorianus
gacgctcttcgtgtacctgtttgta

SEQ ID NO: 53143 - DNA, 25 bp, Saccharomyces pastorianus
gcagtgccagtgttgcgttcacggt

SEQ ID NO: 53144 - DNA, 25 bp, Saccharomyces pastorianus
gggatctcgaaatcgacgctgacca

SEQ ID NO: 53145 - DNA, 25 bp, Saccharomyces pastorianus
agaagtcgtcgctcaggttgaacac

SEQ ID NO: 53146 - DNA, 25 bp, Saccharomyces pastorianus
agttcttcttgcatccggtcatatt

SEQ ID NO: 53147 - DNA, 25 bp, Saccharomyces pastorianus
atagtttctatttcccagagcaaga

SEQ ID NO: 53148 - DNA, 25 bp, Saccharomyces pastorianus
acacgactttgcctaagttggcctt

SEQ ID NO: 53149 - DNA, 25 bp, Saccharomyces pastorianus
agaggttttcagttcttcttgcatc

SEQ ID NO: 53150 - DNA, 25 bp, Saccharomyces pastorianus
atactctttccccaccaaagatgaa

SEQ ID NO: 53151 - DNA, 25 bp, Saccharomyces pastorianus
tcgaaaactcctccactttatagtg

SEQ ID NO: 53152 - DNA, 25 bp, Saccharomyces pastorianus
aagacccagtacaccgacgaaacag

SEQ ID NO: 53153 - DNA, 25 bp, Saccharomyces pastorianus
ggataactcttcaggttcgaaaact

SEQ ID NO: 53154 - DNA, 25 bp, Saccharomyces pastorianus
gtgacaatcttccaggtgactccaa

SEQ ID NO: 53155 - DNA, 25 bp, Saccharomyces pastorianus
ggaccggcttatccaaggactttga

SEQ ID NO: 53156 - DNA, 25 bp, Saccharomyces pastorianus
ggaagcccgacttaaagagctggaa

SEQ ID NO: 53157 - DNA, 25 bp, Saccharomyces pastorianus
aaggcacagaacagggctgcccaaa

SEQ ID NO: 53158 - DNA, 25 bp, Saccharomyces pastorianus
gaatgttgccatagctacggaccgg

SEQ ID NO: 53159 - DNA, 25 bp, Saccharomyces pastorianus
gaaaaagccacgaagtcctctagag

SEQ ID NO: 53160 - DNA, 25 bp, Saccharomyces pastorianus
agatgaattctccacttccatgatc

SEQ ID NO: 53161 - DNA, 25 bp, Saccharomyces pastorianus
tgaagaacgactacagcaactggtg

SEQ ID NO: 53162 - DNA, 25 bp, Saccharomyces pastorianus
ggagcacgtgatcccaaagacgatc

SEQ ID NO: 53163 - DNA, 25 bp, Saccharomyces pastorianus
ctacagcaactggtggcagaggagt

SEQ ID NO: 53164 - DNA, 25 bp, Saccharomyces pastorianus
aagtacgtggaatctggagcgctgc

SEQ ID NO: 53165 - DNA, 25 bp, Saccharomyces pastorianus
acgcagaagtgctggtgatagtcct

SEQ ID NO: 53166 - DNA, 25 bp, Saccharomyces pastorianus
gggtccggaacagtcagacgcagaa

SEQ ID NO: 53167 - DNA, 25 bp, Saccharomyces pastorianus
atcgcaggtcacgtggccagccgtg

SEQ ID NO: 53168 - DNA, 25 bp, Saccharomyces pastorianus
tgatagtcctgggagacgccgccag

SEQ ID NO: 53169 - DNA, 25 bp, Saccharomyces pastorianus
agacgccgccaggaagtacgtggaa

SEQ ID NO: 53170 - DNA, 25 bp, Saccharomyces pastorianus
aaagacgatcgcaggtcacgtggcc

SEQ ID NO: 53171 - DNA, 25 bp, Saccharomyces pastorianus
agcgctgcgggagcacgtgatccca

SEQ ID NO: 53172 - DNA, 25 bp, Saccharomyces pastorianus
gatcaacaaaggtcactccgcaggc

SEQ ID NO: 53173 - DNA, 25 bp, Saccharomyces pastorianus
ctattgttaaagcttccaactggag

SEQ ID NO: 53174 - DNA, 25 bp, Saccharomyces pastorianus
tcaacaaaggtcactccgcaggcaa

SEQ ID NO: 53175 - DNA, 25 bp, Saccharomyces pastorianus
aaggtcactccgcaggcaaattggc

SEQ ID NO: 53176 - DNA, 25 bp, Saccharomyces pastorianus
agtcggccgtgtcgttttgatcaac

SEQ ID NO: 53177 - DNA, 25 bp, Saccharomyces pastorianus
acaaaggtcactccgcaggcaaatt

SEQ ID NO: 53178 - DNA, 25 bp, Saccharomyces pastorianus
gtccactgattctattgttaaagct

SEQ ID NO: 53179 - DNA, 25 bp, Saccharomyces pastorianus
tttgatcaacaaaggtcactccgca

SEQ ID NO: 53180 - DNA, 25 bp, Saccharomyces pastorianus
aggtcactccgcaggcaaattggct

SEQ ID NO: 53181 - DNA, 25 bp, Saccharomyces pastorianus
gattctattgttaaagcttccaact

SEQ ID NO: 53182 - DNA, 25 bp, Saccharomyces pastorianus
taaagcttccaactggagattagtc

SEQ ID NO: 53183 - DNA, 25 bp, Saccharomyces pastorianus
attccaagacgccatatacaaaaag

SEQ ID NO: 53184 - DNA, 25 bp, Saccharomyces pastorianus
ggtggcccaaattccaagacgccat

SEQ ID NO: 53185 - DNA, 25 bp, Saccharomyces pastorianus
atttgtgttcactgaagggtggccc

SEQ ID NO: 53186 - DNA, 25 bp, Saccharomyces pastorianus
cagtatgttcgctttatttgtgttc

SEQ ID NO: 53187 - DNA, 25 bp, Saccharomyces pastorianus
ccaagacgccatatacaaaaagatt

SEQ ID NO: 53188 - DNA, 25 bp, Saccharomyces pastorianus
tgtgttcactgaagggtggcccaaa

SEQ ID NO: 53189 - DNA, 25 bp, Saccharomyces pastorianus
gcccaaattccaagacgccatatac

SEQ ID NO: 53190 - DNA, 25 bp, Saccharomyces pastorianus
gaagggtggcccaaattccaagacg

SEQ ID NO: 53191 - DNA, 25 bp, Saccharomyces pastorianus
ttcactgaagggtggcccaaattcc

SEQ ID NO: 53192 - DNA, 25 bp, Saccharomyces pastorianus
gggccagtatgttcgctttatttgt

SEQ ID NO: 53193 - DNA, 25 bp, Saccharomyces pastorianus
ggccagtatgttcgctttatttgtg

SEQ ID NO: 53194 - DNA, 25 bp, Saccharomyces pastorianus
ctgcgtttgacctcacttcaagtaa

SEQ ID NO: 53195 - DNA, 25 bp, Saccharomyces pastorianus
gttcccatcgtatgcaaattcctgt

SEQ ID NO: 53196 - DNA, 25 bp, Saccharomyces pastorianus
ggctcgctcactttttattattaac

SEQ ID NO: 53197 - DNA, 25 bp, Saccharomyces pastorianus
accatgattctggaaggctcgctca

SEQ ID NO: 53198 - DNA, 25 bp, Saccharomyces pastorianus
gcagcaaccttcttaccagatggga

SEQ ID NO: 53199 - DNA, 25 bp, Saccharomyces pastorianus
aatgaaacctcatcctgcgtttgac

SEQ ID NO: 53200 - DNA, 25 bp, Saccharomyces pastorianus
atgaactctcttgtagcgacgccaa

SEQ ID NO: 53201 - DNA, 25 bp, Saccharomyces pastorianus
gcgttttcattatccacagcagcaa

SEQ ID NO: 53202 - DNA, 25 bp, Saccharomyces pastorianus
aagactcatcggaagtagcctggtt

SEQ ID NO: 53203 - DNA, 25 bp, Saccharomyces pastorianus
atgggactaccatcacagcttctat

SEQ ID NO: 53204 - DNA, 25 bp, Saccharomyces pastorianus
acactagctctatgatgcgttttca

SEQ ID NO: 53205 - DNA, 25 bp, Saccharomyces pastorianus
ttgaatctgctaagttatgtcgcga

SEQ ID NO: 53206 - DNA, 25 bp, Saccharomyces pastorianus
gcgatgtccaccgaaacacaagaac

SEQ ID NO: 53207 - DNA, 25 bp, Saccharomyces pastorianus
gaattaaaggccagacacatttcaa

SEQ ID NO: 53208 - DNA, 25 bp, Saccharomyces pastorianus
aaaccgaccgtcactgaggaaatgt

SEQ ID NO: 53209 - DNA, 25 bp, Saccharomyces pastorianus
ggtagataatcctcaactgacgaca

SEQ ID NO: 53210 - DNA, 25 bp, Saccharomyces pastorianus
gttatgtcgcgattttctcaccaag

SEQ ID NO: 53211 - DNA, 25 bp, Saccharomyces pastorianus
ggttagttcacttttcattgggaag

SEQ ID NO: 53212 - DNA, 25 bp, Saccharomyces pastorianus
caaagggcatcaaaggttagttcac

SEQ ID NO: 53213 - DNA, 25 bp, Saccharomyces pastorianus
aaagcctgtctctaatattcataat

SEQ ID NO: 53214 - DNA, 25 bp, Saccharomyces pastorianus
aactatacgttattctttggccaag

SEQ ID NO: 53215 - DNA, 25 bp, Saccharomyces pastorianus
tgggaagttgaaaccgaccgtcact

SEQ ID NO: 53216 - DNA, 25 bp, Saccharomyces pastorianus
gatagaggcactaaaccgcgcacta

SEQ ID NO: 53217 - DNA, 25 bp, Saccharomyces pastorianus
cagctgttgctctgtataactttgc

SEQ ID NO: 53218 - DNA, 25 bp, Saccharomyces pastorianus
gtgactacggaaggtctcccgataa

SEQ ID NO: 53219 - DNA, 25 bp, Saccharomyces pastorianus
agactcctttgattctgctgatgaa

SEQ ID NO: 53220 - DNA, 25 bp, Saccharomyces pastorianus
gacatggccaagactatttcagcgg

SEQ ID NO: 53221 - DNA, 25 bp, Saccharomyces pastorianus
tatcacaaggatctcgcagtcgtta

SEQ ID NO: 53222 - DNA, 25 bp, Saccharomyces pastorianus
aaccgcgcactaatactcgatggga

SEQ ID NO: 53223 - DNA, 25 bp, Saccharomyces pastorianus
tagccacaatataggcccgcatgta

SEQ ID NO: 53224 - DNA, 25 bp, Saccharomyces pastorianus
gacagtgccgatgacgagcgtgact

SEQ ID NO: 53225 - DNA, 25 bp, Saccharomyces pastorianus
ttcactcgacttcacaaacagctgt

SEQ ID NO: 53226 - DNA, 25 bp, Saccharomyces pastorianus
gcaatctggcgatctagctttcaag

SEQ ID NO: 53227 - DNA, 25 bp, Saccharomyces pastorianus
ggccgtttgcgtcattcatatttaa

SEQ ID NO: 53228 - DNA, 25 bp, Saccharomyces pastorianus
cgtgtgactcattagaatccgaaat

SEQ ID NO: 53229 - DNA, 25 bp, Saccharomyces pastorianus
attgattctatttgacccgtcttta

SEQ ID NO: 53230 - DNA, 25 bp, Saccharomyces pastorianus
gttggccagcgcataccgtaatatt

SEQ ID NO: 53231 - DNA, 25 bp, Saccharomyces pastorianus
ggaattctacaaatcgggtctcagc

SEQ ID NO: 53232 - DNA, 25 bp, Saccharomyces pastorianus
gttcagatatacacaaggccctaca

SEQ ID NO: 53233 - DNA, 25 bp, Saccharomyces pastorianus
tggaatactgtttaccattgcggtc

SEQ ID NO: 53234 - DNA, 25 bp, Saccharomyces pastorianus
tataaattcctgaacacatccggtt

SEQ ID NO: 53235 - DNA, 25 bp, Saccharomyces pastorianus
ggtcggtttagttacttggccacat

SEQ ID NO: 53236 - DNA, 25 bp, Saccharomyces pastorianus
accgtaatattatcgccattctgcc

SEQ ID NO: 53237 - DNA, 25 bp, Saccharomyces pastorianus
tcgggtctcagccatcaaactataa

SEQ ID NO: 53238 - DNA, 25 bp, Saccharomyces pastorianus
cgagcgtatcttggcctggttatgt

SEQ ID NO: 53239 - DNA, 25 bp, Saccharomyces pastorianus
aaggacgccatcacttggttgcaag

SEQ ID NO: 53240 - DNA, 25 bp, Saccharomyces pastorianus
gaactagctttcttgactttcgaag

SEQ ID NO: 53241 - DNA, 25 bp, Saccharomyces pastorianus
atgaagcgttgctctgatgacccac

SEQ ID NO: 53242 - DNA, 25 bp, Saccharomyces pastorianus
atcggtgtcccaatcttgctgacaa

SEQ ID NO: 53243 - DNA, 25 bp, Saccharomyces pastorianus
tttggtgacgacattgccgaggctg

SEQ ID NO: 53244 - DNA, 25 bp, Saccharomyces pastorianus
tgactttcgaagacctactacacca

SEQ ID NO: 53245 - DNA, 25 bp, Saccharomyces pastorianus
aaggcccctttcatgagactacaat

SEQ ID NO: 53246 - DNA, 25 bp, Saccharomyces pastorianus
attaatggccggcttcaaccgtgaa

SEQ ID NO: 53247 - DNA, 25 bp, Saccharomyces pastorianus
atacggtacttgtccacacggtggc

SEQ ID NO: 53248 - DNA, 25 bp, Saccharomyces pastorianus
cacacggtggctatggtctcggtac

SEQ ID NO: 53249 - DNA, 25 bp, Saccharomyces pastorianus
gcaagatagcagcaatgtattcaga

SEQ ID NO: 53250 - DNA, 25 bp, Saccharomyces pastorianus
ggacagattgtctgacacttctgaa

SEQ ID NO: 53251 - DNA, 25 bp, Saccharomyces pastorianus
gcttattaccgacttacagtctcat

SEQ ID NO: 53252 - DNA, 25 bp, Saccharomyces pastorianus
atgaggcacaaatttctgagttgga

SEQ ID NO: 53253 - DNA, 25 bp, Saccharomyces pastorianus
tatatttcccagcaagaacttgaca

SEQ ID NO: 53254 - DNA, 25 bp, Saccharomyces pastorianus
gagatggcgcaagaaatcgagtttt

SEQ ID NO: 53255 - DNA, 25 bp, Saccharomyces pastorianus
atggctagccaagatacatgagctg

SEQ ID NO: 53256 - DNA, 25 bp, Saccharomyces pastorianus
agaactctcaacaatcagacgtcat

SEQ ID NO: 53257 - DNA, 25 bp, Saccharomyces pastorianus
caatcgtcgcaaaagcttattaccg

SEQ ID NO: 53258 - DNA, 25 bp, Saccharomyces pastorianus
agacgtcattgaactagcgaacaga

SEQ ID NO: 53259 - DNA, 25 bp, Saccharomyces pastorianus
tagcgaacagaaacagagccgaatt

SEQ ID NO: 53260 - DNA, 25 bp, Saccharomyces pastorianus
tacaaaaccttgaaagagccgagca

SEQ ID NO: 53261 - DNA, 25 bp, Saccharomyces pastorianus
gcaagcatacgtgggtgcattataa

SEQ ID NO: 53262 - DNA, 25 bp, Saccharomyces pastorianus
gagccgagcaaacgatccaagaact

SEQ ID NO: 53263 - DNA, 25 bp, Saccharomyces pastorianus
aaacctctcttaatatcgtccaatg

SEQ ID NO: 53264 - DNA, 25 bp, Saccharomyces pastorianus
tgattaaaatcacagcaagcatacg

SEQ ID NO: 53265 - DNA, 25 bp, Saccharomyces pastorianus
atgcgagggcaattggtggtacttt

SEQ ID NO: 53266 - DNA, 25 bp, Saccharomyces pastorianus
gaaggaaataacttctcatttacaa

SEQ ID NO: 53267 - DNA, 25 bp, Saccharomyces pastorianus
aagatccctggttcaacttgttcat

SEQ ID NO: 53268 - DNA, 25 bp, Saccharomyces pastorianus
gtccaatgatatgtcacgaaccaaa

SEQ ID NO: 53269 - DNA, 25 bp, Saccharomyces pastorianus
ctggagtattagctgatctggaaaa

SEQ ID NO: 53270 - DNA, 25 bp, Saccharomyces pastorianus
ggtggtactttcagactatacaatc

SEQ ID NO: 53271 - DNA, 25 bp, Saccharomyces pastorianus
tatatcaacctgtttgccttctact

SEQ ID NO: 53272 - DNA, 25 bp, Saccharomyces pastorianus
aaacatgttcgtgatctgccggtac

SEQ ID NO: 53273 - DNA, 25 bp, Saccharomyces pastorianus
tctcctcagagaacggtgtggtcca

SEQ ID NO: 53274 - DNA, 25 bp, Saccharomyces pastorianus
tgcccatggcttacgtgctgacttt

SEQ ID NO: 53275 - DNA, 25 bp, Saccharomyces pastorianus
gagttcctcggcttcgaagtgctca

SEQ ID NO: 53276 - DNA, 25 bp, Saccharomyces pastorianus
tcatgcagctgttcgacgcgttcaa

SEQ ID NO: 53277 - DNA, 25 bp, Saccharomyces pastorianus
acgcggtgttccatggcgacaagcg

SEQ ID NO: 53278 - DNA, 25 bp, Saccharomyces pastorianus
aaatcgcagagctgttctcctcaga

SEQ ID NO: 53279 - DNA, 25 bp, Saccharomyces pastorianus
tggcataccaggtacctttctccat

SEQ ID NO: 53280 - DNA, 25 bp, Saccharomyces pastorianus
gtgtccttgctactatcctttgtgt

SEQ ID NO: 53281 - DNA, 25 bp, Saccharomyces pastorianus
atcctttgtgtgttcgtcgctaaac

SEQ ID NO: 53282 - DNA, 25 bp, Saccharomyces pastorianus
ggtaacggctcgcagcagcagttcc

SEQ ID NO: 53283 - DNA, 25 bp, Saccharomyces pastorianus
aaggacaagactagcttggccccgg

SEQ ID NO: 53284 - DNA, 25 bp, Saccharomyces pastorianus
caagttcctggctaacgacaccaac

SEQ ID NO: 53285 - DNA, 25 bp, Saccharomyces pastorianus
atcgtcatcgaccagaacagctacg

SEQ ID NO: 53286 - DNA, 25 bp, Saccharomyces pastorianus
aggcggcatgcgcaccaagctcata

SEQ ID NO: 53287 - DNA, 25 bp, Saccharomyces pastorianus
ggccatcgtcgactacattcagcat

SEQ ID NO: 53288 - DNA, 25 bp, Saccharomyces pastorianus
aacgccggcatcgagactatcgtga

SEQ ID NO: 53289 - DNA, 25 bp, Saccharomyces pastorianus
agctggagtgtgtcgacctcgagat

SEQ ID NO: 53290 - DNA, 25 bp, Saccharomyces pastorianus
gcgacaacttccacgagctggagtg

SEQ ID NO: 53291 - DNA, 25 bp, Saccharomyces pastorianus
acgaccggcttctgtgcaaggacaa

SEQ ID NO: 53292 - DNA, 25 bp, Saccharomyces pastorianus
agttctggattctgcacgggctcat

SEQ ID NO: 53293 - DNA, 25 bp, Saccharomyces pastorianus
agctcgttggatcaaatcggtttgc

SEQ ID NO: 53294 - DNA, 25 bp, Saccharomyces pastorianus
gaagaatctttctctaccggtagaa

SEQ ID NO: 53295 - DNA, 25 bp, Saccharomyces pastorianus
gtagaaatctcactggacaaccgtt

SEQ ID NO: 53296 - DNA, 25 bp, Saccharomyces pastorianus
taccagcgcaaccaaagaccgattt

SEQ ID NO: 53297 - DNA, 25 bp, Saccharomyces pastorianus
taaccgctgaaaacacttcgattgt

SEQ ID NO: 53298 - DNA, 25 bp, Saccharomyces pastorianus
aaattcatcaatggcggtttctcag

SEQ ID NO: 53299 - DNA, 25 bp, Saccharomyces pastorianus
gggtgatttcgattactcatccaaa

SEQ ID NO: 53300 - DNA, 25 bp, Saccharomyces pastorianus
atcgaaacatttgtgctaccagcgc

SEQ ID NO: 53301 - DNA, 25 bp, Saccharomyces pastorianus
acttcgattgtgtatgagattcctg

SEQ ID NO: 53302 - DNA, 25 bp, Saccharomyces pastorianus
atgtttccagaaatacttgcgtttg

SEQ ID NO: 53303 - DNA, 25 bp, Saccharomyces pastorianus
aaaatggcttctcaaatcacgggtg

SEQ ID NO: 53304 - DNA, 25 bp, Saccharomyces pastorianus
gtgatgttatcgataagaccagtca

SEQ ID NO: 53305 - DNA, 25 bp, Saccharomyces pastorianus
aacatcaaggaaaacttctacgagt

SEQ ID NO: 53306 - DNA, 25 bp, Saccharomyces pastorianus
agaccagtcagtacgctttgaccgg

SEQ ID NO: 53307 - DNA, 25 bp, Saccharomyces pastorianus
ttttggccctatattgtcagtttat

SEQ ID NO: 53308 - DNA, 25 bp, Saccharomyces pastorianus
cagtttatgaataccctgatcaaga

SEQ ID NO: 53309 - DNA, 25 bp, Saccharomyces pastorianus
ttacgttaacgacaagtgcactggt

SEQ ID NO: 53310 - DNA, 25 bp, Saccharomyces pastorianus
tactgatgataaagctggtggtcca

SEQ ID NO: 53311 - DNA, 25 bp, Saccharomyces pastorianus
gtgcactggtgcagttgtctctcaa

SEQ ID NO: 53312 - DNA, 25 bp, Saccharomyces pastorianus
ggtggtccaaatatcttgagcagat

SEQ ID NO: 53313 - DNA, 25 bp, Saccharomyces pastorianus
tgtctctcaacaatggtttggtggt

SEQ ID NO: 53314 - DNA, 25 bp, Saccharomyces pastorianus
cgctttgaccggtgcaatttttgct

SEQ ID NO: 53315 - DNA, 25 bp, Saccharomyces pastorianus
tgctctgccacctctagaatatatt

SEQ ID NO: 53316 - DNA, 25 bp, Saccharomyces pastorianus
tggaaaccatctcaaacggctgcct

SEQ ID NO: 53317 - DNA, 25 bp, Saccharomyces pastorianus
tgcacttcacaggttctactaatgt

SEQ ID NO: 53318 - DNA, 25 bp, Saccharomyces pastorianus
gagactacccacgtattgttggtga

SEQ ID NO: 53319 - DNA, 25 bp, Saccharomyces pastorianus
aaacatctctcatgcagtactctct

SEQ ID NO: 53320 - DNA, 25 bp, Saccharomyces pastorianus
acggctgccttgtcgaactatttat

SEQ ID NO: 53321 - DNA, 25 bp, Saccharomyces pastorianus
aaagatttcggagctctgcacttca

SEQ ID NO: 53322 - DNA, 25 bp, Saccharomyces pastorianus
atccgatatgtttggcatcctgcag

SEQ ID NO: 53323 - DNA, 25 bp, Saccharomyces pastorianus
gtttgtttacgcagtttcaccattt

SEQ ID NO: 53324 - DNA, 25 bp, Saccharomyces pastorianus
ttaatttcatcccaggtgacccagt

SEQ ID NO: 53325 - DNA, 25 bp, Saccharomyces pastorianus
tttgtacggcaaaatccagagcggt

SEQ ID NO: 53326 - DNA, 25 bp, Saccharomyces pastorianus
taccggattcaaaggcctgctcata

SEQ ID NO: 53327 - DNA, 25 bp, Saccharomyces pastorianus
atcctgtcttcaaagctgtccaaca

SEQ ID NO: 53328 - DNA, 25 bp, Saccharomyces pastorianus
ggtgttcaatggctcgtccacaggt

SEQ ID NO: 53329 - DNA, 25 bp, Saccharomyces pastorianus
accgtgctcatcaaggacaagtccg

SEQ ID NO: 53330 - DNA, 25 bp, Saccharomyces pastorianus
aaggactacaagacctcttcggact

SEQ ID NO: 53331 - DNA, 25 bp, Saccharomyces pastorianus
gccggactcggacaactacatatgc

SEQ ID NO: 53332 - DNA, 25 bp, Saccharomyces pastorianus
gacgttgctcatggacgggctcaca

SEQ ID NO: 53333 - DNA, 25 bp, Saccharomyces pastorianus
gaggccgccaactttgaggccaaga

SEQ ID NO: 53334 - DNA, 25 bp, Saccharomyces pastorianus
aagatcgcagacatcgaggcccatc

SEQ ID NO: 53335 - DNA, 25 bp, Saccharomyces pastorianus
catctctctgagatccaggtcaagg

SEQ ID NO: 53336 - DNA, 25 bp, Saccharomyces pastorianus
acaggtgttccggagtccatcgact

SEQ ID NO: 53337 - DNA, 25 bp, Saccharomyces pastorianus
cattttcgcctttacttgctacaaa

SEQ ID NO: 53338 - DNA, 25 bp, Saccharomyces pastorianus
gtattttgtagcattcccgtacgta

SEQ ID NO: 53339 - DNA, 25 bp, Saccharomyces pastorianus
ttgctacaaacacgtccactggata

SEQ ID NO: 53340 - DNA, 25 bp, Saccharomyces pastorianus
ggatggcctgcaacacgttcgtgag

SEQ ID NO: 53341 - DNA, 25 bp, Saccharomyces pastorianus
gaaactctacgattttgggcccatg

SEQ ID NO: 53342 - DNA, 25 bp, Saccharomyces pastorianus
atcttcaccggtgttttcgcataca

SEQ ID NO: 53343 - DNA, 25 bp, Saccharomyces pastorianus
ataatggccggtgttttcccactct

SEQ ID NO: 53344 - DNA, 25 bp, Saccharomyces pastorianus
ggttcaggcgtgtatttcatcttca

SEQ ID NO: 53345 - DNA, 25 bp, Saccharomyces pastorianus
ggtggcatgctcatatatcggtatc

SEQ ID NO: 53346 - DNA, 25 bp, Saccharomyces pastorianus
aatgcggttcgagccattgttctac

SEQ ID NO: 53347 - DNA, 25 bp, Saccharomyces pastorianus
tgtgctttgtttctacactggccta

SEQ ID NO: 53348 - DNA, 25 bp, Saccharomyces pastorianus
tactgaactgggtgcaatcttctct

SEQ ID NO: 53349 - DNA, 25 bp, Saccharomyces pastorianus
tttgatggaaatcgctaaccctact

SEQ ID NO: 53350 - DNA, 25 bp, Saccharomyces pastorianus
cctatctactttcaacaagggtttg

SEQ ID NO: 53351 - DNA, 25 bp, Saccharomyces pastorianus
aagagaacttctgatgaacttgaga

SEQ ID NO: 53352 - DNA, 25 bp, Saccharomyces pastorianus
agttcacctatctactttcaacaag

SEQ ID NO: 53353 - DNA, 25 bp, Saccharomyces pastorianus
aactgggtgcaatcttctctagaca

SEQ ID NO: 53354 - DNA, 25 bp, Saccharomyces pastorianus
tctctagacaggtcaatagcgctaa

SEQ ID NO: 53355 - DNA, 25 bp, Saccharomyces pastorianus
ggaaatcgctaaccctactgaactg

SEQ ID NO: 53356 - DNA, 25 bp, Saccharomyces pastorianus
ggtgcaatcttctctagacaggtca

SEQ ID NO: 53357 - DNA, 25 bp, Saccharomyces pastorianus
tagcgctaaaaagagaacttctgat

SEQ ID NO: 53358 - DNA, 25 bp, Saccharomyces pastorianus
gatggtgttcaagttcacctatcta

SEQ ID NO: 53359 - DNA, 25 bp, Saccharomyces pastorianus
atttgtcatcactgtcacagccagt

SEQ ID NO: 53360 - DNA, 25 bp, Saccharomyces pastorianus
ggttttttcagacttgttgccacag

SEQ ID NO: 53361 - DNA, 25 bp, Saccharomyces pastorianus
gttgcacgatttttgacactgttca

SEQ ID NO: 53362 - DNA, 25 bp, Saccharomyces pastorianus
acagccagttggacagttgcacgat

SEQ ID NO: 53363 - DNA, 25 bp, Saccharomyces pastorianus
gcacgatttttgacactgttcattg

SEQ ID NO: 53364 - DNA, 25 bp, Saccharomyces pastorianus
tggacagttgcacgatttttgacac

SEQ ID NO: 53365 - DNA, 25 bp, Saccharomyces pastorianus
gtcatcactgtcacagccagttgga

SEQ ID NO: 53366 - DNA, 25 bp, Saccharomyces pastorianus
cactgttcattggttttgcaactac

SEQ ID NO: 53367 - DNA, 25 bp, Saccharomyces pastorianus
gggcatttgtcatcactgtcacagc

SEQ ID NO: 53368 - DNA, 25 bp, Saccharomyces pastorianus
ttttttcagacttgttgccacaggg

SEQ ID NO: 53369 - DNA, 25 bp, Saccharomyces pastorianus
gccagttggacagttgcacgatttt

SEQ ID NO: 53370 - DNA, 25 bp, Saccharomyces pastorianus
gataacttttgccattttccaacgt

SEQ ID NO: 53371 - DNA, 25 bp, Saccharomyces pastorianus
gaatcatccttaccaatggcagctc

SEQ ID NO: 53372 - DNA, 25 bp, Saccharomyces pastorianus
ggagacttcaaatctatcaaaggct

SEQ ID NO: 53373 - DNA, 25 bp, Saccharomyces pastorianus
acaaagctttggattctatcaagta

SEQ ID NO: 53374 - DNA, 25 bp, Saccharomyces pastorianus
tggcagctcaacagccgtctaacaa

SEQ ID NO: 53375 - DNA, 25 bp, Saccharomyces pastorianus
aacatcattagttccatgcacattt

SEQ ID NO: 53376 - DNA, 25 bp, Saccharomyces pastorianus
ttcattcaactttatttttcccatt

SEQ ID NO: 53377 - DNA, 25 bp, Saccharomyces pastorianus
gtaatgagtttttgtccaccgacca

SEQ ID NO: 53378 - DNA, 25 bp, Saccharomyces pastorianus
aaatggcaatcagcgtttccacgca

SEQ ID NO: 53379 - DNA, 25 bp, Saccharomyces pastorianus
gtttccacgcaaacggtaatgagtt

SEQ ID NO: 53380 - DNA, 25 bp, Saccharomyces pastorianus
gaccagtttgttcgaatcttgcaga

SEQ ID NO: 53381 - DNA, 25 bp, Saccharomyces pastorianus
ggatagaaacaatccggcttattgt

SEQ ID NO: 53382 - DNA, 25 bp, Saccharomyces pastorianus
ggcccgtccggatagaaacaatccg

SEQ ID NO: 53383 - DNA, 25 bp, Saccharomyces pastorianus
gaaggcacagctaccatcttaccgg

SEQ ID NO: 53384 - DNA, 25 bp, Saccharomyces pastorianus
aatccggcttattgtacttgacgca

SEQ ID NO: 53385 - DNA, 25 bp, Saccharomyces pastorianus
acagctaccatcttaccgggcccgt

SEQ ID NO: 53386 - DNA, 25 bp, Saccharomyces pastorianus
gaaacaatccggcttattgtacttg

SEQ ID NO: 53387 - DNA, 25 bp, Saccharomyces pastorianus
caatccggcttattgtacttgacgc

SEQ ID NO: 53388 - DNA, 25 bp, Saccharomyces pastorianus
aaggcacagctaccatcttaccggg

SEQ ID NO: 53389 - DNA, 25 bp, Saccharomyces pastorianus
aacaatccggcttattgtacttgac

SEQ ID NO: 53390 - DNA, 25 bp, Saccharomyces pastorianus
aggcacagctaccatcttaccgggc

SEQ ID NO: 53391 - DNA, 25 bp, Saccharomyces pastorianus
agaaggcacagctaccatcttaccg

SEQ ID NO: 53392 - DNA, 25 bp, Saccharomyces pastorianus
tgacgcaattcccacatatcggttt

SEQ ID NO: 53393 - DNA, 25 bp, Saccharomyces pastorianus
tcacttttctcacttgcatgtccat

SEQ ID NO: 53394 - DNA, 25 bp, Saccharomyces pastorianus
gcaagcaggcggcttcctcactttt

SEQ ID NO: 53395 - DNA, 25 bp, Saccharomyces pastorianus
cgcaattcccacatatcggttttgc

SEQ ID NO: 53396 - DNA, 25 bp, Saccharomyces pastorianus
tgtcgcacccgatctttctcttcct

SEQ ID NO: 53397 - DNA, 25 bp, Saccharomyces pastorianus
tgggtgcaagcaggcggcttcctca

SEQ ID NO: 53398 - DNA, 25 bp, Saccharomyces pastorianus
tacttgacgcaattcccacatatcg

SEQ ID NO: 53399 - DNA, 25 bp, Saccharomyces pastorianus
aagcaggcggcttcctcacttttct

SEQ ID NO: 53400 - DNA, 25 bp, Saccharomyces pastorianus
ttcctcacttttctcacttgcatgt

SEQ ID NO: 53401 - DNA, 25 bp, Saccharomyces pastorianus
acgcaattcccacatatcggttttg

SEQ ID NO: 53402 - DNA, 25 bp, Saccharomyces pastorianus
cttttctcacttgcatgtccatcat

SEQ ID NO: 53403 - DNA, 25 bp, Saccharomyces pastorianus
ggatagaaacaatccggcttattgt

SEQ ID NO: 53404 - DNA, 25 bp, Saccharomyces pastorianus
ggcccgtccggatagaaacaatccg

SEQ ID NO: 53405 - DNA, 25 bp, Saccharomyces pastorianus
aatccggcttattgtacttgacgca

SEQ ID NO: 53406 - DNA, 25 bp, Saccharomyces pastorianus
gaaacaatccggcttattgtacttg

SEQ ID NO: 53407 - DNA, 25 bp, Saccharomyces pastorianus
aaggcacagctaccatcttaccggg

SEQ ID NO: 53408 - DNA, 25 bp, Saccharomyces pastorianus
tgtacttgacgcaattcccacatat

SEQ ID NO: 53409 - DNA, 25 bp, Saccharomyces pastorianus
aggcacagctaccatcttaccgggc

SEQ ID NO: 53410 - DNA, 25 bp, Saccharomyces pastorianus
tggagatcccggacgcagaaggcac

SEQ ID NO: 53411 - DNA, 25 bp, Saccharomyces pastorianus
gatctttctcttcctgcactgggtg

SEQ ID NO: 53412 - DNA, 25 bp, Saccharomyces pastorianus
agaaggcacagctaccatcttaccg

SEQ ID NO: 53413 - DNA, 25 bp, Saccharomyces pastorianus
cacatatcggttttgctctgtcgca

SEQ ID NO: 53414 - DNA, 25 bp, Saccharomyces pastorianus
gagacagtcgcagacaagcttcaga

SEQ ID NO: 53415 - DNA, 25 bp, Saccharomyces pastorianus
aagcttcagaggctgtattccctta

SEQ ID NO: 53416 - DNA, 25 bp, Saccharomyces pastorianus
tgaacgcctcagatggacagcactt

SEQ ID NO: 53417 - DNA, 25 bp, Saccharomyces pastorianus
gtaaagcaacgacggcccaggacat

SEQ ID NO: 53418 - DNA, 25 bp, Saccharomyces pastorianus
ggcagactacgattccactttagag

SEQ ID NO: 53419 - DNA, 25 bp, Saccharomyces pastorianus
gattgcttgaactactggcagacta

SEQ ID NO: 53420 - DNA, 25 bp, Saccharomyces pastorianus
gtattcccttaatggttcagttgat

SEQ ID NO: 53421 - DNA, 25 bp, Saccharomyces pastorianus
gaaaccctcaagaagaccaagtggc

SEQ ID NO: 53422 - DNA, 25 bp, Saccharomyces pastorianus
agggcaaagccctaaacctgtgcag

SEQ ID NO: 53423 - DNA, 25 bp, Saccharomyces pastorianus
tggacagcacttgcgattgcttgaa

SEQ ID NO: 53424 - DNA, 25 bp, Saccharomyces pastorianus
acctgtgcagaattatgacccgatt

SEQ ID NO: 53425 - DNA, 25 bp, Saccharomyces pastorianus
gatcgtttacgggtacgcactgcgt

SEQ ID NO: 53426 - DNA, 25 bp, Saccharomyces pastorianus
gtagcggccttaccgatcagtgaga

SEQ ID NO: 53427 - DNA, 25 bp, Saccharomyces pastorianus
gccatgtcgccattagagtgtcgta

SEQ ID NO: 53428 - DNA, 25 bp, Saccharomyces pastorianus
ggatattgacctactgacctttcag

SEQ ID NO: 53429 - DNA, 25 bp, Saccharomyces pastorianus
gctggttctactgaatgggcgctta

SEQ ID NO: 53430 - DNA, 25 bp, Saccharomyces pastorianus
gcactgcgtgacgtacaggctcgga

SEQ ID NO: 53431 - DNA, 25 bp, Saccharomyces pastorianus
acaagtgctctaaggccatgggcga

SEQ ID NO: 53432 - DNA, 25 bp, Saccharomyces pastorianus
aagaacctgggtcttccgagcgaca

SEQ ID NO: 53433 - DNA, 25 bp, Saccharomyces pastorianus
agaagggtcttactctctcaacgac

SEQ ID NO: 53434 - DNA, 25 bp, Saccharomyces pastorianus
aggttcagaggcattgtcatcggta

SEQ ID NO: 53435 - DNA, 25 bp, Saccharomyces pastorianus
aaagggccagtctctctccaagata

SEQ ID NO: 53436 - DNA, 25 bp, Saccharomyces pastorianus
gcataaatccagttaccgcaacgct

SEQ ID NO: 53437 - DNA, 25 bp, Saccharomyces pastorianus
gtttccgaagtcaccaggattggtt

SEQ ID NO: 53438 - DNA, 25 bp, Saccharomyces pastorianus
taccgcaacgctcgattgtatcaat

SEQ ID NO: 53439 - DNA, 25 bp, Saccharomyces pastorianus
ccaagaaatgctatctggccaatta

SEQ ID NO: 53440 - DNA, 25 bp, Saccharomyces pastorianus
tggcccaattttcagatccatcatt

SEQ ID NO: 53441 - DNA, 25 bp, Saccharomyces pastorianus
actaccgacaatatggtttccgaag

SEQ ID NO: 53442 - DNA, 25 bp, Saccharomyces pastorianus
gtatggaacactctacctaccaaga

SEQ ID NO: 53443 - DNA, 25 bp, Saccharomyces pastorianus
gatttggccaataactcgttggtga

SEQ ID NO: 53444 - DNA, 25 bp, Saccharomyces pastorianus
ttacaagccgctgtttgagtaccgc

SEQ ID NO: 53445 - DNA, 25 bp, Saccharomyces pastorianus
ataaaggactcctgtggcccaattt

SEQ ID NO: 53446 - DNA, 25 bp, Saccharomyces pastorianus
aagtttttagtcaacgcgtgcataa

SEQ ID NO: 53447 - DNA, 25 bp, Saccharomyces pastorianus
ccgttttggcagtagatcttttgag

SEQ ID NO: 53448 - DNA, 25 bp, Saccharomyces pastorianus
tttacgaatgcccttgtcgtgcctc

SEQ ID NO: 53449 - DNA, 25 bp, Saccharomyces pastorianus
taccgttttggcagtagatcttttg

SEQ ID NO: 53450 - DNA, 25 bp, Saccharomyces pastorianus
gttttggcagtagatcttttgagat

SEQ ID NO: 53451 - DNA, 25 bp, Saccharomyces pastorianus
gatcttttgagatttacgaatgccc

SEQ ID NO: 53452 - DNA, 25 bp, Saccharomyces pastorianus
aatgcccttgtcgtgcctctattca

SEQ ID NO: 53453 - DNA, 25 bp, Saccharomyces pastorianus
tggcagtagatcttttgagatttac

SEQ ID NO: 53454 - DNA, 25 bp, Saccharomyces pastorianus
tgcccttgtcgtgcctctattcaga

SEQ ID NO: 53455 - DNA, 25 bp, Saccharomyces pastorianus
tcttttgagatttacgaatgccctt

SEQ ID NO: 53456 - DNA, 25 bp, Saccharomyces pastorianus
cgaatgcccttgtcgtgcctctatt

SEQ ID NO: 53457 - DNA, 25 bp, Saccharomyces pastorianus
tacgaatgcccttgtcgtgcctcta

SEQ ID NO: 53458 - DNA, 25 bp, Saccharomyces pastorianus
ccgttttggcagtagatcttttgag

SEQ ID NO: 53459 - DNA, 25 bp, Saccharomyces pastorianus
tttacgaatgcccttgtcgtgcctc

SEQ ID NO: 53460 - DNA, 25 bp, Saccharomyces pastorianus
attgggtgccatgggtaccgttttg

SEQ ID NO: 53461 - DNA, 25 bp, Saccharomyces pastorianus
taccgttttggcagtagatcttttg

SEQ ID NO: 53462 - DNA, 25 bp, Saccharomyces pastorianus
gttttggcagtagatcttttgagat

SEQ ID NO: 53463 - DNA, 25 bp, Saccharomyces pastorianus
gatcttttgagatttacgaatgccc

SEQ ID NO: 53464 - DNA, 25 bp, Saccharomyces pastorianus
tgcccttgtcgtgcctctattcaga

SEQ ID NO: 53465 - DNA, 25 bp, Saccharomyces pastorianus
tcttttgagatttacgaatgccctt

SEQ ID NO: 53466 - DNA, 25 bp, Saccharomyces pastorianus
tacgaatgcccttgtcgtgcctcta

SEQ ID NO: 53467 - DNA, 25 bp, Saccharomyces pastorianus
gaatgcccttgtcgtgcctctattc

SEQ ID NO: 53468 - DNA, 25 bp, Saccharomyces pastorianus
catatccttggattgggtgccatgg

SEQ ID NO: 53469 - DNA, 25 bp, Saccharomyces pastorianus
ggcgttcttgatacctaattccatc

SEQ ID NO: 53470 - DNA, 25 bp, Saccharomyces pastorianus
gccgttggcgttcttgatacctaat

SEQ ID NO: 53471 - DNA, 25 bp, Saccharomyces pastorianus
tacccagagtgtacagtttttccct

SEQ ID NO: 53472 - DNA, 25 bp, Saccharomyces pastorianus
gtcttcttcagcgttttcttccttt

SEQ ID NO: 53473 - DNA, 25 bp, Saccharomyces pastorianus
atcgtcttcttcagcgttttcttcc

SEQ ID NO: 53474 - DNA, 25 bp, Saccharomyces pastorianus
tgacaacttctggttcgtcgtcgga

SEQ ID NO: 53475 - DNA, 25 bp, Saccharomyces pastorianus
aacttctggttcgtcgtcggaccat

SEQ ID NO: 53476 - DNA, 25 bp, Saccharomyces pastorianus
gagtgtacagtttttccctgacaac

SEQ ID NO: 53477 - DNA, 25 bp, Saccharomyces pastorianus
aattccatcaatttagtacccagag

SEQ ID NO: 53478 - DNA, 25 bp, Saccharomyces pastorianus
acagtttttccctgacaacttctgg

SEQ ID NO: 53479 - DNA, 25 bp, Saccharomyces pastorianus
gaaaatgatttcaacgccgttggcg

SEQ ID NO: 53480 - DNA, 25 bp, Saccharomyces pastorianus
tgttgaaattctcggtccacaggac

SEQ ID NO: 53481 - DNA, 25 bp, Saccharomyces pastorianus
gacggtgcgctaagagtcactgcta

SEQ ID NO: 53482 - DNA, 25 bp, Saccharomyces pastorianus
attcactccaaagttgaccaccaat

SEQ ID NO: 53483 - DNA, 25 bp, Saccharomyces pastorianus
ggtgccgctttacaagccagactag

SEQ ID NO: 53484 - DNA, 25 bp, Saccharomyces pastorianus
aaagccattggtttggtcggtgcca

SEQ ID NO: 53485 - DNA, 25 bp, Saccharomyces pastorianus
tttgctagctgaaacttcctaccca

SEQ ID NO: 53486 - DNA, 25 bp, Saccharomyces pastorianus
gactagtcagcgactacgatgccga

SEQ ID NO: 53487 - DNA, 25 bp, Saccharomyces pastorianus
ggtccgacgacgaaccagaagttgt

SEQ ID NO: 53488 - DNA, 25 bp, Saccharomyces pastorianus
tgaattccatccagttttgctagct

SEQ ID NO: 53489 - DNA, 25 bp, Saccharomyces pastorianus
tcggtgccaagggtgaattccatcc

SEQ ID NO: 53490 - DNA, 25 bp, Saccharomyces pastorianus
ttaggtatcaagaacgccaacggcg

SEQ ID NO: 53491 - DNA, 25 bp, Saccharomyces pastorianus
gaatgggtgctctggatctgtttaa

SEQ ID NO: 53492 - DNA, 25 bp, Saccharomyces pastorianus
taaatcctacattcaccgtgtgggt

SEQ ID NO: 53493 - DNA, 25 bp, Saccharomyces pastorianus
agcgccactgctctacatggtgact

SEQ ID NO: 53494 - DNA, 25 bp, Saccharomyces pastorianus
ttatattaaccctgagagactctgt

SEQ ID NO: 53495 - DNA, 25 bp, Saccharomyces pastorianus
aagagagctatccttgtcgctacag

SEQ ID NO: 53496 - DNA, 25 bp, Saccharomyces pastorianus
aacttgctggagttcagcgccactg

SEQ ID NO: 53497 - DNA, 25 bp, Saccharomyces pastorianus
ggaaatctgtttcgctggtgtcaca

SEQ ID NO: 53498 - DNA, 25 bp, Saccharomyces pastorianus
cattgatggttgtgccaggcggtct

SEQ ID NO: 53499 - DNA, 25 bp, Saccharomyces pastorianus
ttatcgggattgtgcaacttgctgg

SEQ ID NO: 53500 - DNA, 25 bp, Saccharomyces pastorianus
gatattcctgttgactctaaatcct

SEQ ID NO: 53501 - DNA, 25 bp, Saccharomyces pastorianus
gccaggcggtctcaaaaacacttat

SEQ ID NO: 53502 - DNA, 25 bp, Saccharomyces pastorianus
atgcaatctttgaagttctcggaga

SEQ ID NO: 53503 - DNA, 25 bp, Saccharomyces pastorianus
gctcaatttcacaacgtgcgggata

SEQ ID NO: 53504 - DNA, 25 bp, Saccharomyces pastorianus
ggcttggcggcgctcaatttcacaa

SEQ ID NO: 53505 - DNA, 25 bp, Saccharomyces pastorianus
tttgcacgcttgtgggttcctccga

SEQ ID NO: 53506 - DNA, 25 bp, Saccharomyces pastorianus
ggtctttagcttcttgttttgcacg

SEQ ID NO: 53507 - DNA, 25 bp, Saccharomyces pastorianus
attgtcgctatctgcggtctttagc

SEQ ID NO: 53508 - DNA, 25 bp, Saccharomyces pastorianus
aacgtgctgatgttcttgggctcgg

SEQ ID NO: 53509 - DNA, 25 bp, Saccharomyces pastorianus
tgcgggatacgtggcacccttagaa

SEQ ID NO: 53510 - DNA, 25 bp, Saccharomyces pastorianus
tcgagattgtgccattgtcgctatc

SEQ ID NO: 53511 - DNA, 25 bp, Saccharomyces pastorianus
cttgggctcgggaaacttcactgca

SEQ ID NO: 53512 - DNA, 25 bp, Saccharomyces pastorianus
gtggcacccttagaatgcaatcttt

SEQ ID NO: 53513 - DNA, 25 bp, Saccharomyces pastorianus
cttcgctgtccattagtagcataca

SEQ ID NO: 53514 - DNA, 25 bp, Saccharomyces pastorianus
tcatattcttcgctgtccattagta

SEQ ID NO: 53515 - DNA, 25 bp, Saccharomyces pastorianus
tattcttcgctgtccattagtagca

SEQ ID NO: 53516 - DNA, 25 bp, Saccharomyces pastorianus
ttcgctgtccattagtagcatacag

SEQ ID NO: 53517 - DNA, 25 bp, Saccharomyces pastorianus
agcagcaatctcaagaaataccttt

SEQ ID NO: 53518 - DNA, 25 bp, Saccharomyces pastorianus
catattcttcgctgtccattagtag

SEQ ID NO: 53519 - DNA, 25 bp, Saccharomyces pastorianus
ttcttcgctgtccattagtagcata

SEQ ID NO: 53520 - DNA, 25 bp, Saccharomyces pastorianus
gctgtccattagtagcatacagcag

SEQ ID NO: 53521 - DNA, 25 bp, Saccharomyces pastorianus
atattcttcgctgtccattagtagc

SEQ ID NO: 53522 - DNA, 25 bp, Saccharomyces pastorianus
cagcaatctcaagaaatacctttac

SEQ ID NO: 53523 - DNA, 25 bp, Saccharomyces pastorianus
attcttcgctgtccattagtagcat

SEQ ID NO: 53524 - DNA, 25 bp, Saccharomyces pastorianus
tatcagctgtcaattataccggaaa

SEQ ID NO: 53525 - DNA, 25 bp, Saccharomyces pastorianus
gggtttaatgcaccttatcagctgt

SEQ ID NO: 53526 - DNA, 25 bp, Saccharomyces pastorianus
tgactcctggtgtggtgtctttaga

SEQ ID NO: 53527 - DNA, 25 bp, Saccharomyces pastorianus
catagttatgttagccaccgacggt

SEQ ID NO: 53528 - DNA, 25 bp, Saccharomyces pastorianus
gagattccaaacttgtgttccaaac

SEQ ID NO: 53529 - DNA, 25 bp, Saccharomyces pastorianus
ccaccgacggtgtaactgataatat

SEQ ID NO: 53530 - DNA, 25 bp, Saccharomyces pastorianus
cccgccgatgctgatgagtatactt

SEQ ID NO: 53531 - DNA, 25 bp, Saccharomyces pastorianus
actacattggcggaagactcatcta

SEQ ID NO: 53532 - DNA, 25 bp, Saccharomyces pastorianus
taaagatcctaattaccctagcgtt

SEQ ID NO: 53533 - DNA, 25 bp, Saccharomyces pastorianus
aagtcgccaacttgggtgactcctg

SEQ ID NO: 53534 - DNA, 25 bp, Saccharomyces pastorianus
ttgacgctgcttatgctaaaattaa

SEQ ID NO: 53535 - DNA, 25 bp, Saccharomyces pastorianus
gtagccaagttatcaatttctccaa

SEQ ID NO: 53536 - DNA, 25 bp, Saccharomyces pastorianus
ttttgctattgggtgtgcttattgc

SEQ ID NO: 53537 - DNA, 25 bp, Saccharomyces pastorianus
attgccaattttgctggacatttac

SEQ ID NO: 53538 - DNA, 25 bp, Saccharomyces pastorianus
agacaggcccattcacttataagac

SEQ ID NO: 53539 - DNA, 25 bp, Saccharomyces pastorianus
cgttgctttccagccaaaggacaga

SEQ ID NO: 53540 - DNA, 25 bp, Saccharomyces pastorianus
aagaaccttctattcaagtgccaaa

SEQ ID NO: 53541 - DNA, 25 bp, Saccharomyces pastorianus
agtgccaaggcacagacaggcccat

SEQ ID NO: 53542 - DNA, 25 bp, Saccharomyces pastorianus
acctccagaggttccatttatggta

SEQ ID NO: 53543 - DNA, 25 bp, Saccharomyces pastorianus
gtttaggactttgagaacctccaga

SEQ ID NO: 53544 - DNA, 25 bp, Saccharomyces pastorianus
tcacttataagaccgccgttgcttt

SEQ ID NO: 53545 - DNA, 25 bp, Saccharomyces pastorianus
gactcagagtccaatatttctcgta

SEQ ID NO: 53546 - DNA, 25 bp, Saccharomyces pastorianus
gtgaagttcgtttctgatgttcttg

SEQ ID NO: 53547 - DNA, 25 bp, Saccharomyces pastorianus
ggaagctgaccaaaaattatctaag

SEQ ID NO: 53548 - DNA, 25 bp, Saccharomyces pastorianus
aagaatctatggacgcgagaaagag

SEQ ID NO: 53549 - DNA, 25 bp, Saccharomyces pastorianus
taatgttcaaaaacccttattattg

SEQ ID NO: 53550 - DNA, 25 bp, Saccharomyces pastorianus
gaccttgatgcggatagagatattg

SEQ ID NO: 53551 - DNA, 25 bp, Saccharomyces pastorianus
atatcgaaacccattaatgttcaaa

SEQ ID NO: 53552 - DNA, 25 bp, Saccharomyces pastorianus
tgaggagctttcttcaaaggtggaa

SEQ ID NO: 53553 - DNA, 25 bp, Saccharomyces pastorianus
gttaccaacagatgtgaagttcgtt

SEQ ID NO: 53554 - DNA, 25 bp, Saccharomyces pastorianus
tcaagagttttacagttaccaacag

SEQ ID NO: 53555 - DNA, 25 bp, Saccharomyces pastorianus
aatatggtggtgaccttgatgcgga

SEQ ID NO: 53556 - DNA, 25 bp, Saccharomyces pastorianus
aataccagtaatatcgaaacccatt

SEQ ID NO: 53557 - DNA, 25 bp, Saccharomyces pastorianus
caacccaaccctttctatttgaatg

SEQ ID NO: 53558 - DNA, 25 bp, Saccharomyces pastorianus
agtccgacgttttgttggatacaat

SEQ ID NO: 53559 - DNA, 25 bp, Saccharomyces pastorianus
gttaagctagttcgtaaagcccatt

SEQ ID NO: 53560 - DNA, 25 bp, Saccharomyces pastorianus
gatccggccatcaagaaaacactat

SEQ ID NO: 53561 - DNA, 25 bp, Saccharomyces pastorianus
tattctctctgttttcgaagccaca

SEQ ID NO: 53562 - DNA, 25 bp, Saccharomyces pastorianus
acagttaccatcgtgactttgtcat

SEQ ID NO: 53563 - DNA, 25 bp, Saccharomyces pastorianus
tatcaataggacaccagcagcattt

SEQ ID NO: 53564 - DNA, 25 bp, Saccharomyces pastorianus
gctgagctatcaaaacatccccgtt

SEQ ID NO: 53565 - DNA, 25 bp, Saccharomyces pastorianus
cagttggttactacgattctactaa

SEQ ID NO: 53566 - DNA, 25 bp, Saccharomyces pastorianus
ccacattatcaggtttggtcacata

SEQ ID NO: 53567 - DNA, 25 bp, Saccharomyces pastorianus
aaagcccattggacagatccggcca

SEQ ID NO: 53568 - DNA, 25 bp, Saccharomyces pastorianus
ttataagattgtcaaggagaacttg

SEQ ID NO: 53569 - DNA, 25 bp, Saccharomyces pastorianus
tagggatttataagattgtcaagga

SEQ ID NO: 53570 - DNA, 25 bp, Saccharomyces pastorianus
cctactaatagggatttataagatt

SEQ ID NO: 53571 - DNA, 25 bp, Saccharomyces pastorianus
atagggatttataagattgtcaagg

SEQ ID NO: 53572 - DNA, 25 bp, Saccharomyces pastorianus
gattgtcaaggagaacttgagcgac

SEQ ID NO: 53573 - DNA, 25 bp, Saccharomyces pastorianus
gggatttataagattgtcaaggaga

SEQ ID NO: 53574 - DNA, 25 bp, Saccharomyces pastorianus
gattactttatcaagcgtttcccaa

SEQ ID NO: 53575 - DNA, 25 bp, Saccharomyces pastorianus
tatcaagcgtttcccaaacctacta

SEQ ID NO: 53576 - DNA, 25 bp, Saccharomyces pastorianus
ttatcaagcgtttcccaaacctact

SEQ ID NO: 53577 - DNA, 25 bp, Saccharomyces pastorianus
tcaagcgtttcccaaacctactaat

SEQ ID NO: 53578 - DNA, 25 bp, Saccharomyces pastorianus
gatttataagattgtcaaggagaac

SEQ ID NO: 53579 - DNA, 25 bp, Saccharomyces pastorianus
gcgtaatcattctagcaccacaatt

SEQ ID NO: 53580 - DNA, 25 bp, Saccharomyces pastorianus
aagacacctgacaatatgcctgcat

SEQ ID NO: 53581 - DNA, 25 bp, Saccharomyces pastorianus
gcggattccaacaatgatgccataa

SEQ ID NO: 53582 - DNA, 25 bp, Saccharomyces pastorianus
tgaagatgtattcgcggattccaac

SEQ ID NO: 53583 - DNA, 25 bp, Saccharomyces pastorianus
agaattcatttgctgggttccctaa

SEQ ID NO: 53584 - DNA, 25 bp, Saccharomyces pastorianus
aatttatgcgcaaactttcaccggc

SEQ ID NO: 53585 - DNA, 25 bp, Saccharomyces pastorianus
accggctccactcatgacaaaaaac

SEQ ID NO: 53586 - DNA, 25 bp, Saccharomyces pastorianus
atcaacttctccagatgaaaggcaa

SEQ ID NO: 53587 - DNA, 25 bp, Saccharomyces pastorianus
atgcctgcatctccaggagccaaga

SEQ ID NO: 53588 - DNA, 25 bp, Saccharomyces pastorianus
ggcaaatttttggaccatacgaaat

SEQ ID NO: 53589 - DNA, 25 bp, Saccharomyces pastorianus
tgctgggttccctaaaccattatta

SEQ ID NO: 53590 - DNA, 25 bp, Saccharomyces pastorianus
caatgattgtgacgatgacggcgat

SEQ ID NO: 53591 - DNA, 25 bp, Saccharomyces pastorianus
tgacggccactatgaaggagacgac

SEQ ID NO: 53592 - DNA, 25 bp, Saccharomyces pastorianus
ataccaaagttgatgcagacggcca

SEQ ID NO: 53593 - DNA, 25 bp, Saccharomyces pastorianus
aatgctgctacaaacaacgggtcaa

SEQ ID NO: 53594 - DNA, 25 bp, Saccharomyces pastorianus
tctcgttggctaaagacgtcaggga

SEQ ID NO: 53595 - DNA, 25 bp, Saccharomyces pastorianus
gaaggaggcatcttgaacaaccgat

SEQ ID NO: 53596 - DNA, 25 bp, Saccharomyces pastorianus
aggttcatatggttacgtctcgttg

SEQ ID NO: 53597 - DNA, 25 bp, Saccharomyces pastorianus
ggtagacacaacaatattgcagctt

SEQ ID NO: 53598 - DNA, 25 bp, Saccharomyces pastorianus
atgactttggactacgagatttata

SEQ ID NO: 53599 - DNA, 25 bp, Saccharomyces pastorianus
gcagctttactggattttttcgatt

SEQ ID NO: 53600 - DNA, 25 bp, Saccharomyces pastorianus
tgtccaacaacatctgtctcgaagc

SEQ ID NO: 53601 - DNA, 25 bp, Saccharomyces pastorianus
ttagcatcgctaatcaatcagacaa

SEQ ID NO: 53602 - DNA, 25 bp, Saccharomyces pastorianus
tacgattgcgctaaagttgacttgt

SEQ ID NO: 53603 - DNA, 25 bp, Saccharomyces pastorianus
cttgtgggctatgggtatcgttttc

SEQ ID NO: 53604 - DNA, 25 bp, Saccharomyces pastorianus
cacaagaacccatttagcatcgcta

SEQ ID NO: 53605 - DNA, 25 bp, Saccharomyces pastorianus
aatattgttttccacaagaacccat

SEQ ID NO: 53606 - DNA, 25 bp, Saccharomyces pastorianus
atgtcgccggaattgtttgatagca

SEQ ID NO: 53607 - DNA, 25 bp, Saccharomyces pastorianus
taatcaatcagacaaatcctttggt

SEQ ID NO: 53608 - DNA, 25 bp, Saccharomyces pastorianus
tcctttggttatttcgctgccaaca

SEQ ID NO: 53609 - DNA, 25 bp, Saccharomyces pastorianus
gatagcaacttggatatcgacgaaa

SEQ ID NO: 53610 - DNA, 25 bp, Saccharomyces pastorianus
gaaaggaaccttacgattgcgctaa

SEQ ID NO: 53611 - DNA, 25 bp, Saccharomyces pastorianus
atgggtatcgttttccttaatattg

SEQ ID NO: 53612 - DNA, 25 bp, Saccharomyces pastorianus
agaaacaagttccagctgcgtcatc

SEQ ID NO: 53613 - DNA, 25 bp, Saccharomyces pastorianus
gatgacacaggtacttttccgtatc

SEQ ID NO: 53614 - DNA, 25 bp, Saccharomyces pastorianus
atgcgttcccgggtgctcgaagatg

SEQ ID NO: 53615 - DNA, 25 bp, Saccharomyces pastorianus
aatgagtcgacatccaccttagtgg

SEQ ID NO: 53616 - DNA, 25 bp, Saccharomyces pastorianus
atggaactgtattcctcccagaagc

SEQ ID NO: 53617 - DNA, 25 bp, Saccharomyces pastorianus
aattgccgacagtatgcacgccatt

SEQ ID NO: 53618 - DNA, 25 bp, Saccharomyces pastorianus
tttccgtatctccaattcacaattc

SEQ ID NO: 53619 - DNA, 25 bp, Saccharomyces pastorianus
aagcaagtcctcttggatttccaaa

SEQ ID NO: 53620 - DNA, 25 bp, Saccharomyces pastorianus
tgaggtctacagacgccatcagcaa

SEQ ID NO: 53621 - DNA, 25 bp, Saccharomyces pastorianus
gatggtactatcacgtctgtccaac

SEQ ID NO: 53622 - DNA, 25 bp, Saccharomyces pastorianus
atatgcttctggacacggtgctcta

SEQ ID NO: 53623 - DNA, 25 bp, Saccharomyces pastorianus
atcgagactcgttagggcggctttc

SEQ ID NO: 53624 - DNA, 25 bp, Saccharomyces pastorianus
acatcgagactcgttagggcggctt

SEQ ID NO: 53625 - DNA, 25 bp, Saccharomyces pastorianus
ttagggcggctttcagcgaacaatt

SEQ ID NO: 53626 - DNA, 25 bp, Saccharomyces pastorianus
agggcggctttcagcgaacaattcc

SEQ ID NO: 53627 - DNA, 25 bp, Saccharomyces pastorianus
gcggctttcagcgaacaattcctgc

SEQ ID NO: 53628 - DNA, 25 bp, Saccharomyces pastorianus
attcctgcctgtcgtactcaagcaa

SEQ ID NO: 53629 - DNA, 25 bp, Saccharomyces pastorianus
aacaattcctgcctgtcgtactcaa

SEQ ID NO: 53630 - DNA, 25 bp, Saccharomyces pastorianus
acaattcctgcctgtcgtactcaag

SEQ ID NO: 53631 - DNA, 25 bp, Saccharomyces pastorianus
gggcggctttcagcgaacaattcct

SEQ ID NO: 53632 - DNA, 25 bp, Saccharomyces pastorianus
tagggcggctttcagcgaacaattc

SEQ ID NO: 53633 - DNA, 25 bp, Saccharomyces pastorianus
cggctttcagcgaacaattcctgcc

SEQ ID NO: 53634 - DNA, 25 bp, Saccharomyces pastorianus
atcgagactcgttagggcggctttc

SEQ ID NO: 53635 - DNA, 25 bp, Saccharomyces pastorianus
acatcgagactcgttagggcggctt

SEQ ID NO: 53636 - DNA, 25 bp, Saccharomyces pastorianus
ttagggcggctttcagcgaacaatt

SEQ ID NO: 53637 - DNA, 25 bp, Saccharomyces pastorianus
agggcggctttcagcgaacaattcc

SEQ ID NO: 53638 - DNA, 25 bp, Saccharomyces pastorianus
gcggctttcagcgaacaattcctgc

SEQ ID NO: 53639 - DNA, 25 bp, Saccharomyces pastorianus
attcctgcctgtcgtactcaagcaa

SEQ ID NO: 53640 - DNA, 25 bp, Saccharomyces pastorianus
aacaattcctgcctgtcgtactcaa

SEQ ID NO: 53641 - DNA, 25 bp, Saccharomyces pastorianus
gggcggctttcagcgaacaattcct

SEQ ID NO: 53642 - DNA, 25 bp, Saccharomyces pastorianus
aatgcgacgctgttgtcattggcta

SEQ ID NO: 53643 - DNA, 25 bp, Saccharomyces pastorianus
cattggctacacaggacatcgagac

SEQ ID NO: 53644 - DNA, 25 bp, Saccharomyces pastorianus
cggctttcagcgaacaattcctgcc

SEQ ID NO: 53645 - DNA, 25 bp, Saccharomyces pastorianus
gctgctaatggaaccaatgcgacgc

SEQ ID NO: 53646 - DNA, 25 bp, Saccharomyces pastorianus
gcagtgatttgcgaaacccatactt

SEQ ID NO: 53647 - DNA, 25 bp, Saccharomyces pastorianus
acccatacttaattccagactgtcc

SEQ ID NO: 53648 - DNA, 25 bp, Saccharomyces pastorianus
tacggctgtcaagatgagcgtgcta

SEQ ID NO: 53649 - DNA, 25 bp, Saccharomyces pastorianus
tccgcagccattcgagcatctgaaa

SEQ ID NO: 53650 - DNA, 25 bp, Saccharomyces pastorianus
ttaattccagactgtccgcagccat

SEQ ID NO: 53651 - DNA, 25 bp, Saccharomyces pastorianus
gacagtgatacagcagtttctttcg

SEQ ID NO: 53652 - DNA, 25 bp, Saccharomyces pastorianus
cgtgctagaggcgtcgacagtgata

SEQ ID NO: 53653 - DNA, 25 bp, Saccharomyces pastorianus
ttcgagcatctgaaactgtttacca

SEQ ID NO: 53654 - DNA, 25 bp, Saccharomyces pastorianus
gaaagtcaaggatccagctgctaat

SEQ ID NO: 53655 - DNA, 25 bp, Saccharomyces pastorianus
gtttctttcgaagacagcagtgatt

SEQ ID NO: 53656 - DNA, 25 bp, Saccharomyces pastorianus
gaagcagaagaaacaggattttttg

SEQ ID NO: 53657 - DNA, 25 bp, Saccharomyces pastorianus
gatctgacgaaacggttaactttat

SEQ ID NO: 53658 - DNA, 25 bp, Saccharomyces pastorianus
aaccagcatctagatcatgatcctc

SEQ ID NO: 53659 - DNA, 25 bp, Saccharomyces pastorianus
taatgccactaatacgtctttcgtt

SEQ ID NO: 53660 - DNA, 25 bp, Saccharomyces pastorianus
gccactaatacgtctttcgtttcca

SEQ ID NO: 53661 - DNA, 25 bp, Saccharomyces pastorianus
atttctattagaaaccagcatctag

SEQ ID NO: 53662 - DNA, 25 bp, Saccharomyces pastorianus
tagatcatgatcctcacgatctgac

SEQ ID NO: 53663 - DNA, 25 bp, Saccharomyces pastorianus
ttattaaaacaccacaacaccaacg

SEQ ID NO: 53664 - DNA, 25 bp, Saccharomyces pastorianus
aacaccacaacaccaacgtgagaaa

SEQ ID NO: 53665 - DNA, 25 bp, Saccharomyces pastorianus
ggaaagagcaagtaatgccactaat

SEQ ID NO: 53666 - DNA, 25 bp, Saccharomyces pastorianus
tcacgatctgacgaaacggttaact

SEQ ID NO: 53667 - DNA, 25 bp, Saccharomyces pastorianus
attacggcttcaatgcttccaggtt

SEQ ID NO: 53668 - DNA, 25 bp, Saccharomyces pastorianus
catctaccgctagcctaatgactaa

SEQ ID NO: 53669 - DNA, 25 bp, Saccharomyces pastorianus
gatgcccaaggccaacaacaggtta

SEQ ID NO: 53670 - DNA, 25 bp, Saccharomyces pastorianus
aacaatggtgccacgaacgcatcta

SEQ ID NO: 53671 - DNA, 25 bp, Saccharomyces pastorianus
gctttacagcaacctacgtacggat

SEQ ID NO: 53672 - DNA, 25 bp, Saccharomyces pastorianus
gattgtctacgtcaagatcccagta

SEQ ID NO: 53673 - DNA, 25 bp, Saccharomyces pastorianus
taacaacgactccatcagcgctatt

SEQ ID NO: 53674 - DNA, 25 bp, Saccharomyces pastorianus
ttcaatacgttgaccgactatccgc

SEQ ID NO: 53675 - DNA, 25 bp, Saccharomyces pastorianus
aagcagacggcattgctccagcaag

SEQ ID NO: 53676 - DNA, 25 bp, Saccharomyces pastorianus
attccctccacttcgtatgaaaatc

SEQ ID NO: 53677 - DNA, 25 bp, Saccharomyces pastorianus
ggatgagctccgtgcttatttccaa

SEQ ID NO: 53678 - DNA, 25 bp, Saccharomyces pastorianus
attaaactgggctacgtcgtcgtat

SEQ ID NO: 53679 - DNA, 25 bp, Saccharomyces pastorianus
aatcacagttattcgagctcttcat

SEQ ID NO: 53680 - DNA, 25 bp, Saccharomyces pastorianus
gcgaaaatcgtgcatgaccaggtca

SEQ ID NO: 53681 - DNA, 25 bp, Saccharomyces pastorianus
gagctcttcattaccagatatgctt

SEQ ID NO: 53682 - DNA, 25 bp, Saccharomyces pastorianus
acacatgcggcaaatgctcttttga

SEQ ID NO: 53683 - DNA, 25 bp, Saccharomyces pastorianus
aaatgtccaaggtgcatccgatata

SEQ ID NO: 53684 - DNA, 25 bp, Saccharomyces pastorianus
gggtattgctttatcgattttcctt

SEQ ID NO: 53685 - DNA, 25 bp, Saccharomyces pastorianus
tggtagttccagaccatcaatgggt

SEQ ID NO: 53686 - DNA, 25 bp, Saccharomyces pastorianus
atatgcttctgcgtctcacgcgaaa

SEQ ID NO: 53687 - DNA, 25 bp, Saccharomyces pastorianus
gacttagcgccaaatgttaccgaat

SEQ ID NO: 53688 - DNA, 25 bp, Saccharomyces pastorianus
gggcactaccgggaaccaattgtat

SEQ ID NO: 53689 - DNA, 25 bp, Saccharomyces pastorianus
ctaccgtaatcaagtatttctacaa

SEQ ID NO: 53690 - DNA, 25 bp, Saccharomyces pastorianus
tatttgctgcatctgaagaactcgt

SEQ ID NO: 53691 - DNA, 25 bp, Saccharomyces pastorianus
gtctttgaaattttcaccccgctag

SEQ ID NO: 53692 - DNA, 25 bp, Saccharomyces pastorianus
catcggtaagctttcggaagtggtt

SEQ ID NO: 53693 - DNA, 25 bp, Saccharomyces pastorianus
attttcaccccgctagatggtaggg

SEQ ID NO: 53694 - DNA, 25 bp, Saccharomyces pastorianus
aaatccatccatcggtaagctttcg

SEQ ID NO: 53695 - DNA, 25 bp, Saccharomyces pastorianus
cggaagtggttgaagtctttgaaat

SEQ ID NO: 53696 - DNA, 25 bp, Saccharomyces pastorianus
gcatctgaagaactcgtaaacgaat

SEQ ID NO: 53697 - DNA, 25 bp, Saccharomyces pastorianus
acaccgatttgattatatttgctgc

SEQ ID NO: 53698 - DNA, 25 bp, Saccharomyces pastorianus
ccgaaggtgaattgggcgctgcatc

SEQ ID NO: 53699 - DNA, 25 bp, Saccharomyces pastorianus
gtgaaccaaattccgttacttccag

SEQ ID NO: 53700 - DNA, 25 bp, Saccharomyces pastorianus
tcgcttccactttggttggtatctt

SEQ ID NO: 53701 - DNA, 25 bp, Saccharomyces pastorianus
tgctaatgacttggctgaggacgac

SEQ ID NO: 53702 - DNA, 25 bp, Saccharomyces pastorianus
tgtatgtctattgcccaagcctgta

SEQ ID NO: 53703 - DNA, 25 bp, Saccharomyces pastorianus
gaagttccgactataatgctaatga

SEQ ID NO: 53704 - DNA, 25 bp, Saccharomyces pastorianus
tccggtgccatcgatttctactacg

SEQ ID NO: 53705 - DNA, 25 bp, Saccharomyces pastorianus
gtgccgcttctatggtttgttgtat

SEQ ID NO: 53706 - DNA, 25 bp, Saccharomyces pastorianus
ttctttaccccatttatctccggtg

SEQ ID NO: 53707 - DNA, 25 bp, Saccharomyces pastorianus
tgcccaagcctgtaactggttgtgg

SEQ ID NO: 53708 - DNA, 25 bp, Saccharomyces pastorianus
gaaatcaactgaatgggtcccacca

SEQ ID NO: 53709 - DNA, 25 bp, Saccharomyces pastorianus
aggtattgtcaatttcgcttccact

SEQ ID NO: 53710 - DNA, 25 bp, Saccharomyces pastorianus
aggtgtcttaccatggaaatcaact

SEQ ID NO: 53711 - DNA, 25 bp, Saccharomyces pastorianus
ggagatgacttgaaagacttcgacg

SEQ ID NO: 53712 - DNA, 25 bp, Saccharomyces pastorianus
ctaacaaagctgagggagatgactt

SEQ ID NO: 53713 - DNA, 25 bp, Saccharomyces pastorianus
gtcttatccccaatgttaatctcag

SEQ ID NO: 53714 - DNA, 25 bp, Saccharomyces pastorianus
gaaattccaaaaaagccagcttccg

SEQ ID NO: 53715 - DNA, 25 bp, Saccharomyces pastorianus
gcttacattactgtctccatcatgt

SEQ ID NO: 53716 - DNA, 25 bp, Saccharomyces pastorianus
gttaatctcagaagtttctccaaag

SEQ ID NO: 53717 - DNA, 25 bp, Saccharomyces pastorianus
tgttgtcgttatttacattatcggt

SEQ ID NO: 53718 - DNA, 25 bp, Saccharomyces pastorianus
acatgtatggtcgtaaaatgggttt

SEQ ID NO: 53719 - DNA, 25 bp, Saccharomyces pastorianus
aaaaagccagcttccgcttacatta

SEQ ID NO: 53720 - DNA, 25 bp, Saccharomyces pastorianus
gaaagacttcgacgagaaccatgaa

SEQ ID NO: 53721 - DNA, 25 bp, Saccharomyces pastorianus
tgggtttaatcgttgttgtcgttat

SEQ ID NO: 53722 - DNA, 25 bp, Saccharomyces pastorianus
acaatgggtctaggctccacaacat

SEQ ID NO: 53723 - DNA, 25 bp, Saccharomyces pastorianus
tcgtcaagacgcatagtgggcactt

SEQ ID NO: 53724 - DNA, 25 bp, Saccharomyces pastorianus
agcactaccacgttggacgcgataa

SEQ ID NO: 53725 - DNA, 25 bp, Saccharomyces pastorianus
agcggctatgacgatgtcgccagaa

SEQ ID NO: 53726 - DNA, 25 bp, Saccharomyces pastorianus
attaaccatgcgcacgaatctcgta

SEQ ID NO: 53727 - DNA, 25 bp, Saccharomyces pastorianus
gcactaacacctacggaagcggcta

SEQ ID NO: 53728 - DNA, 25 bp, Saccharomyces pastorianus
aacattcttggatggagcgcctgca

SEQ ID NO: 53729 - DNA, 25 bp, Saccharomyces pastorianus
gtttccagcggacggtccaaacaat

SEQ ID NO: 53730 - DNA, 25 bp, Saccharomyces pastorianus
aataaagccaattccagcactacca

SEQ ID NO: 53731 - DNA, 25 bp, Saccharomyces pastorianus
caatacagtcggtggtggtaccagt

SEQ ID NO: 53732 - DNA, 25 bp, Saccharomyces pastorianus
aatctctcccaagaaggcatttgca

SEQ ID NO: 53733 - DNA, 25 bp, Saccharomyces pastorianus
aacctcgccttctgacgatagagta

SEQ ID NO: 53734 - DNA, 25 bp, Saccharomyces pastorianus
atgaaccactcaggtagaaaccttg

SEQ ID NO: 53735 - DNA, 25 bp, Saccharomyces pastorianus
tgaagggtcccaaaataggacaaat

SEQ ID NO: 53736 - DNA, 25 bp, Saccharomyces pastorianus
gcggtcaatccattcagaacctcgc

SEQ ID NO: 53737 - DNA, 25 bp, Saccharomyces pastorianus
agaacctcgccttctgacgatagag

SEQ ID NO: 53738 - DNA, 25 bp, Saccharomyces pastorianus
atcccgcggtcaatccattcagaac

SEQ ID NO: 53739 - DNA, 25 bp, Saccharomyces pastorianus
aataggacaaatcccgcggtcaatc

SEQ ID NO: 53740 - DNA, 25 bp, Saccharomyces pastorianus
aaatcccgcggtcaatccattcaga

SEQ ID NO: 53741 - DNA, 25 bp, Saccharomyces pastorianus
gaaccactcaggtagaaaccttgaa

SEQ ID NO: 53742 - DNA, 25 bp, Saccharomyces pastorianus
cactcaggtagaaaccttgaagggt

SEQ ID NO: 53743 - DNA, 25 bp, Saccharomyces pastorianus
gtcaatccattcagaacctcgcctt

SEQ ID NO: 53744 - DNA, 25 bp, Saccharomyces pastorianus
gctacaagaccgatattcactataa

SEQ ID NO: 53745 - DNA, 25 bp, Saccharomyces pastorianus
attccttttgccctttcatactata

SEQ ID NO: 53746 - DNA, 25 bp, Saccharomyces pastorianus
gaaagcgtcttttatgcaacttcca

SEQ ID NO: 53747 - DNA, 25 bp, Saccharomyces pastorianus
gtgcctacaagtatttaaccttcgt

SEQ ID NO: 53748 - DNA, 25 bp, Saccharomyces pastorianus
atctctcttaaacaaccttctggac

SEQ ID NO: 53749 - DNA, 25 bp, Saccharomyces pastorianus
gatatccatgttatagccgatttca

SEQ ID NO: 53750 - DNA, 25 bp, Saccharomyces pastorianus
gaagatgtcccactctcaataacac

SEQ ID NO: 53751 - DNA, 25 bp, Saccharomyces pastorianus
gttaatgacaaaatcttccgcggaa

SEQ ID NO: 53752 - DNA, 25 bp, Saccharomyces pastorianus
ggtatgccagaagatgtcccactct

SEQ ID NO: 53753 - DNA, 25 bp, Saccharomyces pastorianus
cttctggaccatttctgcttattac

SEQ ID NO: 53754 - DNA, 25 bp, Saccharomyces pastorianus
aacaccgggaattcaatctgcattg

SEQ ID NO: 53755 - DNA, 25 bp, Saccharomyces pastorianus
tcgcgatgatgatgctaccttacaa

SEQ ID NO: 53756 - DNA, 25 bp, Saccharomyces pastorianus
tacaggctgtagtacctttactttt

SEQ ID NO: 53757 - DNA, 25 bp, Saccharomyces pastorianus
acgcattggaggtactggagttctt

SEQ ID NO: 53758 - DNA, 25 bp, Saccharomyces pastorianus
gcaatttgccagtagatttcgcgat

SEQ ID NO: 53759 - DNA, 25 bp, Saccharomyces pastorianus
aggtattctacactatctgagttgt

SEQ ID NO: 53760 - DNA, 25 bp, Saccharomyces pastorianus
ggagttcttactttcaattctacca

SEQ ID NO: 53761 - DNA, 25 bp, Saccharomyces pastorianus
atggaactgttgaattctcctgagg

SEQ ID NO: 53762 - DNA, 25 bp, Saccharomyces pastorianus
aaacttttcagccttacgcattgga

SEQ ID NO: 53763 - DNA, 25 bp, Saccharomyces pastorianus
aaaactaagaaactcgatgctcgat

SEQ ID NO: 53764 - DNA, 25 bp, Saccharomyces pastorianus
gaaggaagtacccatctcattcgat

SEQ ID NO: 53765 - DNA, 25 bp, Saccharomyces pastorianus
ttcgatgcacactcaccagaacaaa

SEQ ID NO: 53766 - DNA, 25 bp, Saccharomyces pastorianus
atcgttcccattgatattttcccag

SEQ ID NO: 53767 - DNA, 25 bp, Saccharomyces pastorianus
tagagtcctacttcaactgatcttg

SEQ ID NO: 53768 - DNA, 25 bp, Saccharomyces pastorianus
taatcgggtttgtcctctttcaact

SEQ ID NO: 53769 - DNA, 25 bp, Saccharomyces pastorianus
aaaagagactacctcatcgtcacca

SEQ ID NO: 53770 - DNA, 25 bp, Saccharomyces pastorianus
aagtatctgagaaccgtcctcgcac

SEQ ID NO: 53771 - DNA, 25 bp, Saccharomyces pastorianus
ttttgacccggaattcatccaggac

SEQ ID NO: 53772 - DNA, 25 bp, Saccharomyces pastorianus
gagggtcgtcatcatcgagtatcca

SEQ ID NO: 53773 - DNA, 25 bp, Saccharomyces pastorianus
tacgatgaccttgcagactacttga

SEQ ID NO: 53774 - DNA, 25 bp, Saccharomyces pastorianus
aacagggtgttggatgttcctccac

SEQ ID NO: 53775 - DNA, 25 bp, Saccharomyces pastorianus
attcaatgattacgctccacggttc

SEQ ID NO: 53776 - DNA, 25 bp, Saccharomyces pastorianus
tgttcctccactgtcattcaatgat

SEQ ID NO: 53777 - DNA, 25 bp, Saccharomyces pastorianus
gggtacctgctgtttatggtatatg

SEQ ID NO: 53778 - DNA, 25 bp, Saccharomyces pastorianus
atgtgcttcggaggagttgcagaac

SEQ ID NO: 53779 - DNA, 25 bp, Saccharomyces pastorianus
ggaggagttgcagaaccagacaaat

SEQ ID NO: 53780 - DNA, 25 bp, Saccharomyces pastorianus
agcctatgtgcttcggaggagttgc

SEQ ID NO: 53781 - DNA, 25 bp, Saccharomyces pastorianus
atgtcagcctatgtgcttcggagga

SEQ ID NO: 53782 - DNA, 25 bp, Saccharomyces pastorianus
tatggtatatgtcagcctatgtgct

SEQ ID NO: 53783 - DNA, 25 bp, Saccharomyces pastorianus
gtatatgtcagcctatgtgcttcgg

SEQ ID NO: 53784 - DNA, 25 bp, Saccharomyces pastorianus
gtttatggtatatgtcagcctatgt

SEQ ID NO: 53785 - DNA, 25 bp, Saccharomyces pastorianus
ttcggaggagttgcagaaccagaca

SEQ ID NO: 53786 - DNA, 25 bp, Saccharomyces pastorianus
gtcagcctatgtgcttcggaggagt

SEQ ID NO: 53787 - DNA, 25 bp, Saccharomyces pastorianus
atatgtcagcctatgtgcttcggag

SEQ ID NO: 53788 - DNA, 25 bp, Saccharomyces pastorianus
aggggagggcaatgaagacttcact

SEQ ID NO: 53789 - DNA, 25 bp, Saccharomyces pastorianus
ttatcacataatcctaaatacaaag

SEQ ID NO: 53790 - DNA, 25 bp, Saccharomyces pastorianus
gagatccagggcaaagttaaaaaat

SEQ ID NO: 53791 - DNA, 25 bp, Saccharomyces pastorianus
gactagaaggtcacgaaaacacagg

SEQ ID NO: 53792 - DNA, 25 bp, Saccharomyces pastorianus
ggacttggaagagatccagggcaaa

SEQ ID NO: 53793 - DNA, 25 bp, Saccharomyces pastorianus
gctgaagaacaaagatttaggcaat

SEQ ID NO: 53794 - DNA, 25 bp, Saccharomyces pastorianus
atacttcactgaccaagttaaagct

SEQ ID NO: 53795 - DNA, 25 bp, Saccharomyces pastorianus
taaagaaatacttcactgaccaagt

SEQ ID NO: 53796 - DNA, 25 bp, Saccharomyces pastorianus
gaaatacttcactgaccaagttaaa

SEQ ID NO: 53797 - DNA, 25 bp, Saccharomyces pastorianus
agctattgcaccagcaagaaaatta

SEQ ID NO: 53798 - DNA, 25 bp, Saccharomyces pastorianus
actgaccaagttaaagctgaagaac

SEQ ID NO: 53799 - DNA, 25 bp, Saccharomyces pastorianus
gttccagtcattgctaagtccgata

SEQ ID NO: 53800 - DNA, 25 bp, Saccharomyces pastorianus
gcccactgggcacggtttgaaacca

SEQ ID NO: 53801 - DNA, 25 bp, Saccharomyces pastorianus
atgattcctacatgcgtcaagaaca

SEQ ID NO: 53802 - DNA, 25 bp, Saccharomyces pastorianus
aggtccagattcagcagccatcgaa

SEQ ID NO: 53803 - DNA, 25 bp, Saccharomyces pastorianus
cgtgtaaacgtcatcgacactccag

SEQ ID NO: 53804 - DNA, 25 bp, Saccharomyces pastorianus
atcaatacgctatttcagactgtct

SEQ ID NO: 53805 - DNA, 25 bp, Saccharomyces pastorianus
agcaacatcgtcaagaacccattag

SEQ ID NO: 53806 - DNA, 25 bp, Saccharomyces pastorianus
acctccattggacgctgaatctaag

SEQ ID NO: 53807 - DNA, 25 bp, Saccharomyces pastorianus
gggatcgatattacaagggctttgc

SEQ ID NO: 53808 - DNA, 25 bp, Saccharomyces pastorianus
tgttctttatttcatcaggcccact

SEQ ID NO: 53809 - DNA, 25 bp, Saccharomyces pastorianus
acaagagccaatttagttccagtca

SEQ ID NO: 53810 - DNA, 25 bp, Saccharomyces pastorianus
tgcgctgcccgtcaggacattagaa

SEQ ID NO: 53811 - DNA, 25 bp, Saccharomyces pastorianus
gacctctacatataaccaacctttt

SEQ ID NO: 53812 - DNA, 25 bp, Saccharomyces pastorianus
cgaggccttcaagcggcggaaatgc

SEQ ID NO: 53813 - DNA, 25 bp, Saccharomyces pastorianus
gtgacacgggattcaggttccggat

SEQ ID NO: 53814 - DNA, 25 bp, Saccharomyces pastorianus
gagaacacttccatttacactagcg

SEQ ID NO: 53815 - DNA, 25 bp, Saccharomyces pastorianus
tcctgaacgttgattcgaggccttc

SEQ ID NO: 53816 - DNA, 25 bp, Saccharomyces pastorianus
cgagtggcaacggaggacctctaca

SEQ ID NO: 53817 - DNA, 25 bp, Saccharomyces pastorianus
gaagccgcgtatgcgtatgaggcaa

SEQ ID NO: 53818 - DNA, 25 bp, Saccharomyces pastorianus
gaacaagactaggtgctgcatccag

SEQ ID NO: 53819 - DNA, 25 bp, Saccharomyces pastorianus
aaattagtatttcgccaggtgacaa

SEQ ID NO: 53820 - DNA, 25 bp, Saccharomyces pastorianus
gtacccactacatatgttcgcattt

SEQ ID NO: 53821 - DNA, 25 bp, Saccharomyces pastorianus
gtccctatctcggtgggtgatacac

SEQ ID NO: 53822 - DNA, 25 bp, Saccharomyces pastorianus
taagaaatcttcaaccacggtccct

SEQ ID NO: 53823 - DNA, 25 bp, Saccharomyces pastorianus
aattatctcgcttatcggctgacta

SEQ ID NO: 53824 - DNA, 25 bp, Saccharomyces pastorianus
tcgcttatcggctgactacttcaat

SEQ ID NO: 53825 - DNA, 25 bp, Saccharomyces pastorianus
tatcggctgactacttcaataagaa

SEQ ID NO: 53826 - DNA, 25 bp, Saccharomyces pastorianus
gagcagttctatcgagaaagggcta

SEQ ID NO: 53827 - DNA, 25 bp, Saccharomyces pastorianus
gtgaaaaattatctcgcttatcggc

SEQ ID NO: 53828 - DNA, 25 bp, Saccharomyces pastorianus
ggtgggtgatacacctgccaccaca

SEQ ID NO: 53829 - DNA, 25 bp, Saccharomyces pastorianus
atctcggtgggtgatacacctgcca

SEQ ID NO: 53830 - DNA, 25 bp, Saccharomyces pastorianus
tggttaaaggatattgagcagttct

SEQ ID NO: 53831 - DNA, 25 bp, Saccharomyces pastorianus
acggtccctatctcggtgggtgata

SEQ ID NO: 53832 - DNA, 25 bp, Saccharomyces pastorianus
ataagtacaagttcgcgctcaaggg

SEQ ID NO: 53833 - DNA, 25 bp, Saccharomyces pastorianus
gtcagtattacgatccctgcgagga

SEQ ID NO: 53834 - DNA, 25 bp, Saccharomyces pastorianus
cgctcaagggcgatagtcagtatta

SEQ ID NO: 53835 - DNA, 25 bp, Saccharomyces pastorianus
aacgacagcagcgacagcagcgaca

SEQ ID NO: 53836 - DNA, 25 bp, Saccharomyces pastorianus
agtgccaggactacttcgatgcgta

SEQ ID NO: 53837 - DNA, 25 bp, Saccharomyces pastorianus
aggtcaactacgttcctcagagcaa

SEQ ID NO: 53838 - DNA, 25 bp, Saccharomyces pastorianus
gacccgtcacggatagaaccaaggt

SEQ ID NO: 53839 - DNA, 25 bp, Saccharomyces pastorianus
gatgcgtaccgcgagtgcaagaagc

SEQ ID NO: 53840 - DNA, 25 bp, Saccharomyces pastorianus
cgaggagtcttccaagctcagcttt

SEQ ID NO: 53841 - DNA, 25 bp, Saccharomyces pastorianus
gctacgaccggactaagtgccagga

SEQ ID NO: 53842 - DNA, 25 bp, Saccharomyces pastorianus
gttccagtactatccagacgatccg

SEQ ID NO: 53843 - DNA, 25 bp, Saccharomyces pastorianus
gcgagatgccacatatgtgcgtaca

SEQ ID NO: 53844 - DNA, 25 bp, Saccharomyces pastorianus
ggacaatattcccttagagccaaaa

SEQ ID NO: 53845 - DNA, 25 bp, Saccharomyces pastorianus
gaagcagtttgcatggacaccgagt

SEQ ID NO: 53846 - DNA, 25 bp, Saccharomyces pastorianus
cctgacctgggctattacatggaca

SEQ ID NO: 53847 - DNA, 25 bp, Saccharomyces pastorianus
caacgttgcgtttcggaggtgcttc

SEQ ID NO: 53848 - DNA, 25 bp, Saccharomyces pastorianus
gaggtgcttcgactggatccacaag

SEQ ID NO: 53849 - DNA, 25 bp, Saccharomyces pastorianus
gcaaagcttgtctaattcgtcaccc

SEQ ID NO: 53850 - DNA, 25 bp, Saccharomyces pastorianus
gaaattgactaatgcgacctcgatc

SEQ ID NO: 53851 - DNA, 25 bp, Saccharomyces pastorianus
tgtctatgcgacaggtccaacgttg

SEQ ID NO: 53852 - DNA, 25 bp, Saccharomyces pastorianus
gacctcgatcctatacaatacttca

SEQ ID NO: 53853 - DNA, 25 bp, Saccharomyces pastorianus
attcgtcacccatgaagcagtttgc

SEQ ID NO: 53854 - DNA, 25 bp, Saccharomyces pastorianus
tatgcaatgattttgaactcccaag

SEQ ID NO: 53855 - DNA, 25 bp, Saccharomyces pastorianus
atcagaaaaccccaatccgaattga

SEQ ID NO: 53856 - DNA, 25 bp, Saccharomyces pastorianus
aactcccaagagaagtagcgtatca

SEQ ID NO: 53857 - DNA, 25 bp, Saccharomyces pastorianus
gaaatattgcaagatgaccacagaa

SEQ ID NO: 53858 - DNA, 25 bp, Saccharomyces pastorianus
attggtttgtccatggcaattggta

SEQ ID NO: 53859 - DNA, 25 bp, Saccharomyces pastorianus
gaggagaaacgccaaacaagtcaaa

SEQ ID NO: 53860 - DNA, 25 bp, Saccharomyces pastorianus
aagacccgcgtattgaccatttcat

SEQ ID NO: 53861 - DNA, 25 bp, Saccharomyces pastorianus
gcgggctagtattaaattgcacatt

SEQ ID NO: 53862 - DNA, 25 bp, Saccharomyces pastorianus
ggcaattggtatgcgggctagtatt

SEQ ID NO: 53863 - DNA, 25 bp, Saccharomyces pastorianus
agagttccaaattcattgttagcga

SEQ ID NO: 53864 - DNA, 25 bp, Saccharomyces pastorianus
aagaagacgcaaagacccgcgtatt

SEQ ID NO: 53865 - DNA, 25 bp, Saccharomyces pastorianus
gcaggatttccctatgttcaatgcg

SEQ ID NO: 53866 - DNA, 25 bp, Saccharomyces pastorianus
ttttatcacactcgcttttatccta

SEQ ID NO: 53867 - DNA, 25 bp, Saccharomyces pastorianus
ggattcagccacgttttatcacact

SEQ ID NO: 53868 - DNA, 25 bp, Saccharomyces pastorianus
atgttgtattctccttatctgtctt

SEQ ID NO: 53869 - DNA, 25 bp, Saccharomyces pastorianus
gcattgggcgtccatatcatgttta

SEQ ID NO: 53870 - DNA, 25 bp, Saccharomyces pastorianus
gttcaatgcgccaatgctaattccc

SEQ ID NO: 53871 - DNA, 25 bp, Saccharomyces pastorianus
taattcccttgtgccagttagttct

SEQ ID NO: 53872 - DNA, 25 bp, Saccharomyces pastorianus
tgtctatgccttatcttggcttggg

SEQ ID NO: 53873 - DNA, 25 bp, Saccharomyces pastorianus
atctttactcgtgtggattcagcca

SEQ ID NO: 53874 - DNA, 25 bp, Saccharomyces pastorianus
tatctgtcttcggtttggtgctaaa

SEQ ID NO: 53875 - DNA, 25 bp, Saccharomyces pastorianus
ttttatcctatccatcggcttcaca

SEQ ID NO: 53876 - DNA, 25 bp, Saccharomyces pastorianus
aacggttccttgtatcgctccaata

SEQ ID NO: 53877 - DNA, 25 bp, Saccharomyces pastorianus
cagcgggcctttgccgttagaaatt

SEQ ID NO: 53878 - DNA, 25 bp, Saccharomyces pastorianus
tagcactgcagtttctgaccatcat

SEQ ID NO: 53879 - DNA, 25 bp, Saccharomyces pastorianus
tcttcctacgaaggtgccggtatta

SEQ ID NO: 53880 - DNA, 25 bp, Saccharomyces pastorianus
gaagctgccgtttctcagattactg

SEQ ID NO: 53881 - DNA, 25 bp, Saccharomyces pastorianus
gcaacctctttaaccggattcgatg

SEQ ID NO: 53882 - DNA, 25 bp, Saccharomyces pastorianus
tggtgtacctgtttcattgaacgct

SEQ ID NO: 53883 - DNA, 25 bp, Saccharomyces pastorianus
gactaccatcaatttacctgcaact

SEQ ID NO: 53884 - DNA, 25 bp, Saccharomyces pastorianus
aacagcactttgaattcagccgcat

SEQ ID NO: 53885 - DNA, 25 bp, Saccharomyces pastorianus
atttcaactgcaactgctaccattc

SEQ ID NO: 53886 - DNA, 25 bp, Saccharomyces pastorianus
tattggtgaacctgctttaccgcaa

SEQ ID NO: 53887 - DNA, 25 bp, Saccharomyces pastorianus
aagatcgttactggtgctctagaca

SEQ ID NO: 53888 - DNA, 25 bp, Saccharomyces pastorianus
attgtagaaaccgacaccagcgaaa

SEQ ID NO: 53889 - DNA, 25 bp, Saccharomyces pastorianus
agacccaatgttggctactggtggt

SEQ ID NO: 53890 - DNA, 25 bp, Saccharomyces pastorianus
gctgctttcccagatgtcaagatcg

SEQ ID NO: 53891 - DNA, 25 bp, Saccharomyces pastorianus
accagctgttaggtttgtacactat

SEQ ID NO: 53892 - DNA, 25 bp, Saccharomyces pastorianus
gggactgttgtagatctgtacgtat

SEQ ID NO: 53893 - DNA, 25 bp, Saccharomyces pastorianus
ttgacaaatatcacgctgctttccc

SEQ ID NO: 53894 - DNA, 25 bp, Saccharomyces pastorianus
gagcacaagtatttggttccaggtt

SEQ ID NO: 53895 - DNA, 25 bp, Saccharomyces pastorianus
gctttgccaaagctgttctatgaaa

SEQ ID NO: 53896 - DNA, 25 bp, Saccharomyces pastorianus
aaaacagctagacccgatttcattt

SEQ ID NO: 53897 - DNA, 25 bp, Saccharomyces pastorianus
gatacgtcttcttattagacccaat

SEQ ID NO: 53898 - DNA, 25 bp, Saccharomyces pastorianus
ggactacatgtaccatcatagagct

SEQ ID NO: 53899 - DNA, 25 bp, Saccharomyces pastorianus
agagacacaggaaaccatgggttct

SEQ ID NO: 53900 - DNA, 25 bp, Saccharomyces pastorianus
tattccccgggcttggtgcgggctc

SEQ ID NO: 53901 - DNA, 25 bp, Saccharomyces pastorianus
caagcccgtgggtaaagaagcatat

SEQ ID NO: 53902 - DNA, 25 bp, Saccharomyces pastorianus
ttgggcattccaactgaagttaaga

SEQ ID NO: 53903 - DNA, 25 bp, Saccharomyces pastorianus
ggaaaccatgggttcttactgcctc

SEQ ID NO: 53904 - DNA, 25 bp, Saccharomyces pastorianus
tgggttcttactgcctccagaaaac

SEQ ID NO: 53905 - DNA, 25 bp, Saccharomyces pastorianus
aaagaagcatatgcggccttgaagt

SEQ ID NO: 53906 - DNA, 25 bp, Saccharomyces pastorianus
gggctccgccttggactacatgtac

SEQ ID NO: 53907 - DNA, 25 bp, Saccharomyces pastorianus
atttacgatgtaatttccgcatgta

SEQ ID NO: 53908 - DNA, 25 bp, Saccharomyces pastorianus
tcatagagctcattgggcattccaa

SEQ ID NO: 53909 - DNA, 25 bp, Saccharomyces pastorianus
aggtgcgctaatactcttttaggta

SEQ ID NO: 53910 - DNA, 25 bp, Saccharomyces pastorianus
tggtgcatggagcttgttgaatatc

SEQ ID NO: 53911 - DNA, 25 bp, Saccharomyces pastorianus
agttgcactcaatatgtctcgcaat

SEQ ID NO: 53912 - DNA, 25 bp, Saccharomyces pastorianus
tgaatggtcttcatccttgcaggca

SEQ ID NO: 53913 - DNA, 25 bp, Saccharomyces pastorianus
cttgatttcaggtctagtcgtcggt

SEQ ID NO: 53914 - DNA, 25 bp, Saccharomyces pastorianus
agtcgtcggtgcgattagtgcattt

SEQ ID NO: 53915 - DNA, 25 bp, Saccharomyces pastorianus
gttgggatcattcattaggtgcgct

SEQ ID NO: 53916 - DNA, 25 bp, Saccharomyces pastorianus
gtctcgcaattgtcgcagaccttat

SEQ ID NO: 53917 - DNA, 25 bp, Saccharomyces pastorianus
tggcaccctaactgtcttgatttca

SEQ ID NO: 53918 - DNA, 25 bp, Saccharomyces pastorianus
gtggttgttttttgatggcacccta

SEQ ID NO: 53919 - DNA, 25 bp, Saccharomyces pastorianus
gttgaatatcgtcttgtggttgttt

SEQ ID NO: 53920 - DNA, 25 bp, Saccharomyces pastorianus
gctaggtagtgcaagtttcacagct

SEQ ID NO: 53921 - DNA, 25 bp, Saccharomyces pastorianus
gagccaagtacgttctaatgacact

SEQ ID NO: 53922 - DNA, 25 bp, Saccharomyces pastorianus
ggttctcattttacgacgaagatat

SEQ ID NO: 53923 - DNA, 25 bp, Saccharomyces pastorianus
aacacactaacaaaacctgcatggt

SEQ ID NO: 53924 - DNA, 25 bp, Saccharomyces pastorianus
gctgccgcttctttcaaggaggcaa

SEQ ID NO: 53925 - DNA, 25 bp, Saccharomyces pastorianus
attgctgtccaatgcttctcagttg

SEQ ID NO: 53926 - DNA, 25 bp, Saccharomyces pastorianus
gaaggcgacgttcatgataagacat

SEQ ID NO: 53927 - DNA, 25 bp, Saccharomyces pastorianus
aacctgcatggttctcattttacga

SEQ ID NO: 53928 - DNA, 25 bp, Saccharomyces pastorianus
aggaggcaacatctttgccaccttt

SEQ ID NO: 53929 - DNA, 25 bp, Saccharomyces pastorianus
ttctcagttggaaatggttgcaccc

SEQ ID NO: 53930 - DNA, 25 bp, Saccharomyces pastorianus
taatgacactagtggcgctgccgct

SEQ ID NO: 53931 - DNA, 25 bp, Saccharomyces pastorianus
gcttcgagtaagtatcccatgacgg

SEQ ID NO: 53932 - DNA, 25 bp, Saccharomyces pastorianus
ggttcagtttctaccgatggaatct

SEQ ID NO: 53933 - DNA, 25 bp, Saccharomyces pastorianus
gagatggcagccttggcagccgaaa

SEQ ID NO: 53934 - DNA, 25 bp, Saccharomyces pastorianus
atgttacgactacgatgtcccacgg

SEQ ID NO: 53935 - DNA, 25 bp, Saccharomyces pastorianus
tctgagtctgggaggacagccgtct

SEQ ID NO: 53936 - DNA, 25 bp, Saccharomyces pastorianus
gtcttgtggaattttaccctcgcga

SEQ ID NO: 53937 - DNA, 25 bp, Saccharomyces pastorianus
tgggccccatgacaaaaagttttat

SEQ ID NO: 53938 - DNA, 25 bp, Saccharomyces pastorianus
cctacatgacgcgttcttgggtaac

SEQ ID NO: 53939 - DNA, 25 bp, Saccharomyces pastorianus
cgcgaccaacggcttttgggtatga

SEQ ID NO: 53940 - DNA, 25 bp, Saccharomyces pastorianus
aactcacaacttatttgggccccat

SEQ ID NO: 53941 - DNA, 25 bp, Saccharomyces pastorianus
atgtcccacggacgaggttcagttt

SEQ ID NO: 53942 - DNA, 25 bp, Saccharomyces pastorianus
gagtccaccttcaagcagtacaacg

SEQ ID NO: 53943 - DNA, 25 bp, Saccharomyces pastorianus
gttctgggagaacgactgcgcaatc

SEQ ID NO: 53944 - DNA, 25 bp, Saccharomyces pastorianus
aggaggctctccgaagagatcgcct

SEQ ID NO: 53945 - DNA, 25 bp, Saccharomyces pastorianus
gactgcgcaatcgatggagacatct

SEQ ID NO: 53946 - DNA, 25 bp, Saccharomyces pastorianus
aacagtagtcccacagcaagaacaa

SEQ ID NO: 53947 - DNA, 25 bp, Saccharomyces pastorianus
aagagtccaggagactcaacccggc

SEQ ID NO: 53948 - DNA, 25 bp, Saccharomyces pastorianus
acaagcttgcgcaccagttctggga

SEQ ID NO: 53949 - DNA, 25 bp, Saccharomyces pastorianus
agaaggacccgaacatgtcgcagca

SEQ ID NO: 53950 - DNA, 25 bp, Saccharomyces pastorianus
tcgcaatcgcagtcgctcagcgagt

SEQ ID NO: 53951 - DNA, 25 bp, Saccharomyces pastorianus
gcctcccttctcaggctgaaagagt

SEQ ID NO: 53952 - DNA, 25 bp, Saccharomyces pastorianus
atggccgtcacactgaacaagcttg

SEQ ID NO: 53953 - DNA, 25 bp, Saccharomyces pastorianus
tgattctaatgcaaagacgccttta

SEQ ID NO: 53954 - DNA, 25 bp, Saccharomyces pastorianus
ggaatctattgtggccaccgtttat

SEQ ID NO: 53955 - DNA, 25 bp, Saccharomyces pastorianus
gctatcggattatactgcgtggttt

SEQ ID NO: 53956 - DNA, 25 bp, Saccharomyces pastorianus
atattttcagtatctagctttccta

SEQ ID NO: 53957 - DNA, 25 bp, Saccharomyces pastorianus
aaccagcctggcattttcatatttt

SEQ ID NO: 53958 - DNA, 25 bp, Saccharomyces pastorianus
gtcagcttaattcttcatggcgttg

SEQ ID NO: 53959 - DNA, 25 bp, Saccharomyces pastorianus
atccagatccggctcaaagtttaag

SEQ ID NO: 53960 - DNA, 25 bp, Saccharomyces pastorianus
atttttatcgcggtttccaccatca

SEQ ID NO: 53961 - DNA, 25 bp, Saccharomyces pastorianus
tatccgtatccattcctagacgtga

SEQ ID NO: 53962 - DNA, 25 bp, Saccharomyces pastorianus
gcctttacccgtgacagttgatatg

SEQ ID NO: 53963 - DNA, 25 bp, Saccharomyces pastorianus
ggccgttaagattgtttttcgtcag

SEQ ID NO: 53964 - DNA, 25 bp, Saccharomyces pastorianus
gtctcgagctcagaaggcacttgtt

SEQ ID NO: 53965 - DNA, 25 bp, Saccharomyces pastorianus
caatctgttgatgcggccactacaa

SEQ ID NO: 53966 - DNA, 25 bp, Saccharomyces pastorianus
aacccaactcaatctgttgatgcgg

SEQ ID NO: 53967 - DNA, 25 bp, Saccharomyces pastorianus
tagtactgtctacctgaccaaccca

SEQ ID NO: 53968 - DNA, 25 bp, Saccharomyces pastorianus
tgcggccactacaataacgagtacg

SEQ ID NO: 53969 - DNA, 25 bp, Saccharomyces pastorianus
tgatgcggccactacaataacgagt

SEQ ID NO: 53970 - DNA, 25 bp, Saccharomyces pastorianus
gaaggcacttgttatgtatattatg

SEQ ID NO: 53971 - DNA, 25 bp, Saccharomyces pastorianus
aactcaatctgttgatgcggccact

SEQ ID NO: 53972 - DNA, 25 bp, Saccharomyces pastorianus
ggcacttgttatgtatattatgatg

SEQ ID NO: 53973 - DNA, 25 bp, Saccharomyces pastorianus
tatagtactgtctacctgaccaacc

SEQ ID NO: 53974 - DNA, 25 bp, Saccharomyces pastorianus
tgttgatgcggccactacaataacg

SEQ ID NO: 53975 - DNA, 25 bp, Saccharomyces pastorianus
tcctccaaggtaagcgcgatttcta

SEQ ID NO: 53976 - DNA, 25 bp, Saccharomyces pastorianus
aggtaagcgcgatttctagaacaac

SEQ ID NO: 53977 - DNA, 25 bp, Saccharomyces pastorianus
ctcaacgagaactacttccacattg

SEQ ID NO: 53978 - DNA, 25 bp, Saccharomyces pastorianus
gcaatcttcttctgttcagtcgata

SEQ ID NO: 53979 - DNA, 25 bp, Saccharomyces pastorianus
acattgacaccatcctccaaggtaa

SEQ ID NO: 53980 - DNA, 25 bp, Saccharomyces pastorianus
gtcgatatctgtctcgagctcagaa

SEQ ID NO: 53981 - DNA, 25 bp, Saccharomyces pastorianus
tagaacaacgacatctgcgccagcg

SEQ ID NO: 53982 - DNA, 25 bp, Saccharomyces pastorianus
acatccgtcgtcgaatcgactcaaa

SEQ ID NO: 53983 - DNA, 25 bp, Saccharomyces pastorianus
ttctgttcagtcgatatctgtctcg

SEQ ID NO: 53984 - DNA, 25 bp, Saccharomyces pastorianus
aaacagagtctttctcaacgagaac

SEQ ID NO: 53985 - DNA, 25 bp, Saccharomyces pastorianus
tgcgccagcgcaatcttcttctgtt

SEQ ID NO: 53986 - DNA, 25 bp, Saccharomyces pastorianus
agcgtaagcgccacaaattcaagaa

SEQ ID NO: 53987 - DNA, 25 bp, Saccharomyces pastorianus
tacaacccccaagtgttggcggtat

SEQ ID NO: 53988 - DNA, 25 bp, Saccharomyces pastorianus
tcgtatcagtatcttcagcagcagc

SEQ ID NO: 53989 - DNA, 25 bp, Saccharomyces pastorianus
tgcaggtcccagctggctctttcag

SEQ ID NO: 53990 - DNA, 25 bp, Saccharomyces pastorianus
gtctaaccacacaaaataactcgta

SEQ ID NO: 53991 - DNA, 25 bp, Saccharomyces pastorianus
gcattacaactctcgtgttagtggg

SEQ ID NO: 53992 - DNA, 25 bp, Saccharomyces pastorianus
agcagcattacaactctcgtgttag

SEQ ID NO: 53993 - DNA, 25 bp, Saccharomyces pastorianus
ccagctggctctttcagaagcgtaa

SEQ ID NO: 53994 - DNA, 25 bp, Saccharomyces pastorianus
ggctctttcagaagcgtaagcgcca

SEQ ID NO: 53995 - DNA, 25 bp, Saccharomyces pastorianus
taactcgtatcagtatcttcagcag

SEQ ID NO: 53996 - DNA, 25 bp, Saccharomyces pastorianus
tagaagaaaccgatgttgtacaacc

SEQ ID NO: 53997 - DNA, 25 bp, Saccharomyces pastorianus
aatacttgacacatgataccctcgc

SEQ ID NO: 53998 - DNA, 25 bp, Saccharomyces pastorianus
cactaccttctatccagattggcaa

SEQ ID NO: 53999 - DNA, 25 bp, Saccharomyces pastorianus
attggcaacgaagatcctactgatg

SEQ ID NO: 54000 - DNA, 25 bp, Saccharomyces pastorianus
gataccctcgccgtaaatggtacag

SEQ ID NO: 54001 - DNA, 25 bp, Saccharomyces pastorianus
atgtgtcacgcttatcagctaatga

SEQ ID NO: 54002 - DNA, 25 bp, Saccharomyces pastorianus
atgtgccagaggctgaccagtacca

SEQ ID NO: 54003 - DNA, 25 bp, Saccharomyces pastorianus
atgcgcatggcctagaaacagctca

SEQ ID NO: 54004 - DNA, 25 bp, Saccharomyces pastorianus
aaccttgcatggacagtgcgggtca

SEQ ID NO: 54005 - DNA, 25 bp, Saccharomyces pastorianus
acatgtggatgtcagtagctctaac

SEQ ID NO: 54006 - DNA, 25 bp, Saccharomyces pastorianus
gaatcgcccaataacgacgcattcg

SEQ ID NO: 54007 - DNA, 25 bp, Saccharomyces pastorianus
gtgcgggtcaaaatccactaccttc

SEQ ID NO: 54008 - DNA, 25 bp, Saccharomyces pastorianus
agagcacaacaagttccaccaggaa

SEQ ID NO: 54009 - DNA, 25 bp, Saccharomyces pastorianus
tcaatcgccgtcctaaaaatcctgt

SEQ ID NO: 54010 - DNA, 25 bp, Saccharomyces pastorianus
aatcctgtcacccttcgtaaattgg

SEQ ID NO: 54011 - DNA, 25 bp, Saccharomyces pastorianus
gaagttttttagattctccagtagc

SEQ ID NO: 54012 - DNA, 25 bp, Saccharomyces pastorianus
agcatatctgcctggtgtctattga

SEQ ID NO: 54013 - DNA, 25 bp, Saccharomyces pastorianus
agtagcatttttgatcctctggatt

SEQ ID NO: 54014 - DNA, 25 bp, Saccharomyces pastorianus
gacgctgacgtggaaacctgggtta

SEQ ID NO: 54015 - DNA, 25 bp, Saccharomyces pastorianus
taattttctccgaaaggcttctagt

SEQ ID NO: 54016 - DNA, 25 bp, Saccharomyces pastorianus
gtcatgccacctctaggatggatat

SEQ ID NO: 54017 - DNA, 25 bp, Saccharomyces pastorianus
gaggtttttcacaggcttcctttca

SEQ ID NO: 54018 - DNA, 25 bp, Saccharomyces pastorianus
gattcattgcaggacgtcatgccac

SEQ ID NO: 54019 - DNA, 25 bp, Saccharomyces pastorianus
gttttgtggcggaaggcagctccaa

SEQ ID NO: 54020 - DNA, 25 bp, Saccharomyces pastorianus
gacgtgctagacaaattgccctcgg

SEQ ID NO: 54021 - DNA, 25 bp, Saccharomyces pastorianus
caaatggcaggtgtacttctccgat

SEQ ID NO: 54022 - DNA, 25 bp, Saccharomyces pastorianus
gagaatcgtgcccttaacgcacaat

SEQ ID NO: 54023 - DNA, 25 bp, Saccharomyces pastorianus
tgatcaatgctctgtacgactgcct

SEQ ID NO: 54024 - DNA, 25 bp, Saccharomyces pastorianus
atatggacgattcattgcccttgga

SEQ ID NO: 54025 - DNA, 25 bp, Saccharomyces pastorianus
gagtacgaacagatcttgcccgagt

SEQ ID NO: 54026 - DNA, 25 bp, Saccharomyces pastorianus
tgcctggtggccgacaaaacgctag

SEQ ID NO: 54027 - DNA, 25 bp, Saccharomyces pastorianus
attgcccttggatggtgacgctcaa

SEQ ID NO: 54028 - DNA, 25 bp, Saccharomyces pastorianus
gagtccctcgacttggttctattgg

SEQ ID NO: 54029 - DNA, 25 bp, Saccharomyces pastorianus
attgccctcggctgttcaagtcagt

SEQ ID NO: 54030 - DNA, 25 bp, Saccharomyces pastorianus
accttgggttgattggcttgcctaa

SEQ ID NO: 54031 - DNA, 25 bp, Saccharomyces pastorianus
taggacattggcagttcaccacact

SEQ ID NO: 54032 - DNA, 25 bp, Saccharomyces pastorianus
agtgggattgccttccgataagcgc

SEQ ID NO: 54033 - DNA, 25 bp, Saccharomyces pastorianus
aagagcattgcagaccttgggttga

SEQ ID NO: 54034 - DNA, 25 bp, Saccharomyces pastorianus
atgtcttcactgtggctgatattcc

SEQ ID NO: 54035 - DNA, 25 bp, Saccharomyces pastorianus
taatcgagggcgcatcactagataa

SEQ ID NO: 54036 - DNA, 25 bp, Saccharomyces pastorianus
gacagtttcgttgggctttgggcaa

SEQ ID NO: 54037 - DNA, 25 bp, Saccharomyces pastorianus
tagaacgttccaagggctgggtctt

SEQ ID NO: 54038 - DNA, 25 bp, Saccharomyces pastorianus
atcattggccaagtacctacaagtg

SEQ ID NO: 54039 - DNA, 25 bp, Saccharomyces pastorianus
tgggtctttgttctaaacctagcta

SEQ ID NO: 54040 - DNA, 25 bp, Saccharomyces pastorianus
gtgtgcaacaaagccgatatcgatt

SEQ ID NO: 54041 - DNA, 25 bp, Saccharomyces pastorianus
ccaaccgtcgagcttgtagtcaatt

SEQ ID NO: 54042 - DNA, 25 bp, Saccharomyces pastorianus
caattacgatattccttcagacccg

SEQ ID NO: 54043 - DNA, 25 bp, Saccharomyces pastorianus
ttcattcatagatccggtcgtactg

SEQ ID NO: 54044 - DNA, 25 bp, Saccharomyces pastorianus
tcgtactgcgcgtgctggtagagac

SEQ ID NO: 54045 - DNA, 25 bp, Saccharomyces pastorianus
aaggtccatgacaccgccgttataa

SEQ ID NO: 54046 - DNA, 25 bp, Saccharomyces pastorianus
gctaatgcggccagagtcctaatcg

SEQ ID NO: 54047 - DNA, 25 bp, Saccharomyces pastorianus
gtagagacggtgacgccatatcctt

SEQ ID NO: 54048 - DNA, 25 bp, Saccharomyces pastorianus
gtcctaatcgctacagatgtcgcat

SEQ ID NO: 54049 - DNA, 25 bp, Saccharomyces pastorianus
aactcgttacacagatttcgcgcta

SEQ ID NO: 54050 - DNA, 25 bp, Saccharomyces pastorianus
atagaggccatcgaagaccgtatca

SEQ ID NO: 54051 - DNA, 25 bp, Saccharomyces pastorianus
tcacccaaagagacgtttccagaat

SEQ ID NO: 54052 - DNA, 25 bp, Saccharomyces pastorianus
gaacatgctattttcatggtcctac

SEQ ID NO: 54053 - DNA, 25 bp, Saccharomyces pastorianus
ggttttgttgcctaatagatcccag

SEQ ID NO: 54054 - DNA, 25 bp, Saccharomyces pastorianus
attcatgacttataacggctggttg

SEQ ID NO: 54055 - DNA, 25 bp, Saccharomyces pastorianus
gcctgggctaattttgagttgtcta

SEQ ID NO: 54056 - DNA, 25 bp, Saccharomyces pastorianus
gtctacaagtaggattctcattcat

SEQ ID NO: 54057 - DNA, 25 bp, Saccharomyces pastorianus
gcatatcaagacattgcctgggcta

SEQ ID NO: 54058 - DNA, 25 bp, Saccharomyces pastorianus
ggttggcgtacctttacgagtatct

SEQ ID NO: 54059 - DNA, 25 bp, Saccharomyces pastorianus
cggctggttgatgctagctgttgta

SEQ ID NO: 54060 - DNA, 25 bp, Saccharomyces pastorianus
ggaactatagctggagcgcctctta

SEQ ID NO: 54061 - DNA, 25 bp, Saccharomyces pastorianus
aggaagcactgatcacgagcatggt

SEQ ID NO: 54062 - DNA, 25 bp, Saccharomyces pastorianus
gtatctgaaatactgcatccataag

SEQ ID NO: 54063 - DNA, 25 bp, Saccharomyces pastorianus
ggctactattataatttccccttca

SEQ ID NO: 54064 - DNA, 25 bp, Saccharomyces pastorianus
cagtgactctctctgatgggcaagt

SEQ ID NO: 54065 - DNA, 25 bp, Saccharomyces pastorianus
ttgactacgtagtcttcgccacagg

SEQ ID NO: 54066 - DNA, 25 bp, Saccharomyces pastorianus
ggactgtatcccacatagagctggt

SEQ ID NO: 54067 - DNA, 25 bp, Saccharomyces pastorianus
catcaccgtcgaagtcttttgcaag

SEQ ID NO: 54068 - DNA, 25 bp, Saccharomyces pastorianus
gtgggacggaagactcaccgaccta

SEQ ID NO: 54069 - DNA, 25 bp, Saccharomyces pastorianus
tagacccctctatcagatcggatgt

SEQ ID NO: 54070 - DNA, 25 bp, Saccharomyces pastorianus
gtcaacctgcgtggcttatgggaac

SEQ ID NO: 54071 - DNA, 25 bp, Saccharomyces pastorianus
gaccttacattagcgtttgccctga

SEQ ID NO: 54072 - DNA, 25 bp, Saccharomyces pastorianus
agagctggtcactttgacccagtca

SEQ ID NO: 54073 - DNA, 25 bp, Saccharomyces pastorianus
agagctacagcgacttctggactgt

SEQ ID NO: 54074 - DNA, 25 bp, Saccharomyces pastorianus
aacaaattcactatctcccttcaaa

SEQ ID NO: 54075 - DNA, 25 bp, Saccharomyces pastorianus
ggacagtgacgcctggtttgacaaa

SEQ ID NO: 54076 - DNA, 25 bp, Saccharomyces pastorianus
gtatgccccgaatgccattggaaat

SEQ ID NO: 54077 - DNA, 25 bp, Saccharomyces pastorianus
tactggccgtacctcgtagtgactt

SEQ ID NO: 54078 - DNA, 25 bp, Saccharomyces pastorianus
aacgccacgagctcgattattcaac

SEQ ID NO: 54079 - DNA, 25 bp, Saccharomyces pastorianus
gacagaccagttctctttgtatgcc

SEQ ID NO: 54080 - DNA, 25 bp, Saccharomyces pastorianus
agaagagacccattacaacgccacg

SEQ ID NO: 54081 - DNA, 25 bp, Saccharomyces pastorianus
ttgagtaaactacgtgccgtccatc

SEQ ID NO: 54082 - DNA, 25 bp, Saccharomyces pastorianus
agtgactttgtttctatgcctaggt

SEQ ID NO: 54083 - DNA, 25 bp, Saccharomyces pastorianus
atgccatggttctcctagatgacga

SEQ ID NO: 54084 - DNA, 25 bp, Saccharomyces pastorianus
atgcctaggttcactgatcctggtg

SEQ ID NO: 54085 - DNA, 25 bp, Saccharomyces pastorianus
gcagtctcaaacacaatcgacaacg

SEQ ID NO: 54086 - DNA, 25 bp, Saccharomyces pastorianus
aagacacgaatgtggtcgtccagaa

SEQ ID NO: 54087 - DNA, 25 bp, Saccharomyces pastorianus
gatcttgctcgcgagatattcctgc

SEQ ID NO: 54088 - DNA, 25 bp, Saccharomyces pastorianus
gaagatgttattggtctgcaccagc

SEQ ID NO: 54089 - DNA, 25 bp, Saccharomyces pastorianus
gatattcctgcgcaaacacggtatt

SEQ ID NO: 54090 - DNA, 25 bp, Saccharomyces pastorianus
gaaccatcgtatgttgatcttcaat

SEQ ID NO: 54091 - DNA, 25 bp, Saccharomyces pastorianus
ggtgatgaacttaccgatcttgctc

SEQ ID NO: 54092 - DNA, 25 bp, Saccharomyces pastorianus
agcgaatccctctcggtgatatatt

SEQ ID NO: 54093 - DNA, 25 bp, Saccharomyces pastorianus
atcgacaacgagtcattcttggtga

SEQ ID NO: 54094 - DNA, 25 bp, Saccharomyces pastorianus
cccgtctatgttctggctcattaga

SEQ ID NO: 54095 - DNA, 25 bp, Saccharomyces pastorianus
caagttgcgtttgacctcaggagga

SEQ ID NO: 54096 - DNA, 25 bp, Saccharomyces pastorianus
gacatgtcacatttctaaggttcaa

SEQ ID NO: 54097 - DNA, 25 bp, Saccharomyces pastorianus
tttaaactgctaggatacggccaaa

SEQ ID NO: 54098 - DNA, 25 bp, Saccharomyces pastorianus
atgccttgggcctatatttagctga

SEQ ID NO: 54099 - DNA, 25 bp, Saccharomyces pastorianus
gcagaacctggctagatttttgaag

SEQ ID NO: 54100 - DNA, 25 bp, Saccharomyces pastorianus
gcgccttacagttttcgtaccaaga

SEQ ID NO: 54101 - DNA, 25 bp, Saccharomyces pastorianus
tctccttctcctcaggctaagaaaa

SEQ ID NO: 54102 - DNA, 25 bp, Saccharomyces pastorianus
gacgattccaagactcccaagcaga

SEQ ID NO: 54103 - DNA, 25 bp, Saccharomyces pastorianus
gagttactagctaacggcgccttac

SEQ ID NO: 54104 - DNA, 25 bp, Saccharomyces pastorianus
tatttccttgacgtggacgattcca

SEQ ID NO: 54105 - DNA, 25 bp, Saccharomyces pastorianus
ggatacggccaaagacatgtcacat

SEQ ID NO: 54106 - DNA, 25 bp, Saccharomyces pastorianus
aagtggcgacaaatctccttctcct

SEQ ID NO: 54107 - DNA, 25 bp, Saccharomyces pastorianus
gtcaatgacaccgtcaagatcgatt

SEQ ID NO: 54108 - DNA, 25 bp, Saccharomyces pastorianus
ggtaagatcaccgacttcatcaagt

SEQ ID NO: 54109 - DNA, 25 bp, Saccharomyces pastorianus
gacttcatcaagttcgacgctggta

SEQ ID NO: 54110 - DNA, 25 bp, Saccharomyces pastorianus
gacaccgtcaagatcgatttggcct

SEQ ID NO: 54111 - DNA, 25 bp, Saccharomyces pastorianus
cgacgtcaagggtagatttgccgtt

SEQ ID NO: 54112 - DNA, 25 bp, Saccharomyces pastorianus
ggtagatttgccgttcaccgtatca

SEQ ID NO: 54113 - DNA, 25 bp, Saccharomyces pastorianus
ccgttcaccgtatcaccgaagaaga

SEQ ID NO: 54114 - DNA, 25 bp, Saccharomyces pastorianus
ccgtcaagatcgatttggcctctgg

SEQ ID NO: 54115 - DNA, 25 bp, Saccharomyces pastorianus
catcaagttcgacgctggtaagcta

SEQ ID NO: 54116 - DNA, 25 bp, Saccharomyces pastorianus
gacgctggtaagctagtttacgtta

SEQ ID NO: 54117 - DNA, 25 bp, Saccharomyces pastorianus
ggcctctggtaagatcaccgacttc

SEQ ID NO: 54118 - DNA, 25 bp, Saccharomyces pastorianus
ggaactacatgaagcggtacttgaa

SEQ ID NO: 54119 - DNA, 25 bp, Saccharomyces pastorianus
gagtccgtgtacgactactctgttg

SEQ ID NO: 54120 - DNA, 25 bp, Saccharomyces pastorianus
ccgtgtacgactactctgttgccac

SEQ ID NO: 54121 - DNA, 25 bp, Saccharomyces pastorianus
ggagtccgtgtacgactactctgtt

SEQ ID NO: 54122 - DNA, 25 bp, Saccharomyces pastorianus
gtccgtgtacgactactctgttgcc

SEQ ID NO: 54123 - DNA, 25 bp, Saccharomyces pastorianus
gggagtccgtgtacgactactctgt

SEQ ID NO: 54124 - DNA, 25 bp, Saccharomyces pastorianus
tgtacgactactctgttgccacgtg

SEQ ID NO: 54125 - DNA, 25 bp, Saccharomyces pastorianus
gtacgactactctgttgccacgtgt

SEQ ID NO: 54126 - DNA, 25 bp, Saccharomyces pastorianus
tccgtgtacgactactctgttgcca

SEQ ID NO: 54127 - DNA, 25 bp, Saccharomyces pastorianus
agtccgtgtacgactactctgttgc

SEQ ID NO: 54128 - DNA, 25 bp, Saccharomyces pastorianus
gtgtacgactactctgttgccacgt

SEQ ID NO: 54129 - DNA, 25 bp, Saccharomyces pastorianus
cggtcctccatcatttgcgagtttt

SEQ ID NO: 54130 - DNA, 25 bp, Saccharomyces pastorianus
ataacaccatctattccaacgagga

SEQ ID NO: 54131 - DNA, 25 bp, Saccharomyces pastorianus
acaagggacatcaagctggccggag

SEQ ID NO: 54132 - DNA, 25 bp, Saccharomyces pastorianus
atggacgcagaactacgtggccctt

SEQ ID NO: 54133 - DNA, 25 bp, Saccharomyces pastorianus
atacgaatactgcagaacccctttg

SEQ ID NO: 54134 - DNA, 25 bp, Saccharomyces pastorianus
atttcgacactttcaggtatccctt

SEQ ID NO: 54135 - DNA, 25 bp, Saccharomyces pastorianus
gtcttccaaaatgtccaactacctg

SEQ ID NO: 54136 - DNA, 25 bp, Saccharomyces pastorianus
gaggtcggcgggttccacaacttga

SEQ ID NO: 54137 - DNA, 25 bp, Saccharomyces pastorianus
gaagctttgaactctgtccatgcca

SEQ ID NO: 54138 - DNA, 25 bp, Saccharomyces pastorianus
agaactaccacttgtcttccaaaat

SEQ ID NO: 54139 - DNA, 25 bp, Saccharomyces pastorianus
ccctttggacttcctcttgagaaga

SEQ ID NO: 54140 - DNA, 25 bp, Saccharomyces pastorianus
aggtgctgcagaagttccccgtcgt

SEQ ID NO: 54141 - DNA, 25 bp, Saccharomyces pastorianus
agaatggtaccgatctgcccgtttt

SEQ ID NO: 54142 - DNA, 25 bp, Saccharomyces pastorianus
gccccgctggtctaaggtgtgcaaa

SEQ ID NO: 54143 - DNA, 25 bp, Saccharomyces pastorianus
gtacaggcttcttcccttggatcaa

SEQ ID NO: 54144 - DNA, 25 bp, Saccharomyces pastorianus
acaaggcgctggtccgggagtacaa

SEQ ID NO: 54145 - DNA, 25 bp, Saccharomyces pastorianus
tgtttctgctcttcaccaagtacta

SEQ ID NO: 54146 - DNA, 25 bp, Saccharomyces pastorianus
aagacacgaacttctactgccaggg

SEQ ID NO: 54147 - DNA, 25 bp, Saccharomyces pastorianus
agcactcgcccattttgtacgacat

SEQ ID NO: 54148 - DNA, 25 bp, Saccharomyces pastorianus
atctggtctacattctgggctcgtc

SEQ ID NO: 54149 - DNA, 25 bp, Saccharomyces pastorianus
aaatgtattccgtcgaggtgctgca

SEQ ID NO: 54150 - DNA, 25 bp, Saccharomyces pastorianus
cgtgcagcatttctggttcggtaca

SEQ ID NO: 54151 - DNA, 25 bp, Saccharomyces pastorianus
agaaacagcagtggcctggctttaa

SEQ ID NO: 54152 - DNA, 25 bp, Saccharomyces pastorianus
agggatccctctcaacgtggaaaag

SEQ ID NO: 54153 - DNA, 25 bp, Saccharomyces pastorianus
aggcgtggctactgtcgtgaccaaa

SEQ ID NO: 54154 - DNA, 25 bp, Saccharomyces pastorianus
aacactcgatgagctgtctcttgtt

SEQ ID NO: 54155 - DNA, 25 bp, Saccharomyces pastorianus
gatagactacatttcgttggcagat

SEQ ID NO: 54156 - DNA, 25 bp, Saccharomyces pastorianus
acagccacttgtgatcagttgtgcc

SEQ ID NO: 54157 - DNA, 25 bp, Saccharomyces pastorianus
cagagagggccttttgtcagtgttc

SEQ ID NO: 54158 - DNA, 25 bp, Saccharomyces pastorianus
atatctctgcccaaagtctctaaag

SEQ ID NO: 54159 - DNA, 25 bp, Saccharomyces pastorianus
gggctcgtctctctagatcagaaat

SEQ ID NO: 54160 - DNA, 25 bp, Saccharomyces pastorianus
attgacatcgtcacccaaatttggg

SEQ ID NO: 54161 - DNA, 25 bp, Saccharomyces pastorianus
aggacatccagcaattcatcgttct

SEQ ID NO: 54162 - DNA, 25 bp, Saccharomyces pastorianus
gatagcattacataccagcaattat

SEQ ID NO: 54163 - DNA, 25 bp, Saccharomyces pastorianus
gcaattattacccaaaggatccgga

SEQ ID NO: 54164 - DNA, 25 bp, Saccharomyces pastorianus
attccagataatctgctagacgcag

SEQ ID NO: 54165 - DNA, 25 bp, Saccharomyces pastorianus
ggatccggaatctgcgaatctatta

SEQ ID NO: 54166 - DNA, 25 bp, Saccharomyces pastorianus
gaattggtgacttcgacagagctaa

SEQ ID NO: 54167 - DNA, 25 bp, Saccharomyces pastorianus
ctcgagttggagttatctgaagcaa

SEQ ID NO: 54168 - DNA, 25 bp, Saccharomyces pastorianus
gaaaaccaaaatatcagacgctgaa

SEQ ID NO: 54169 - DNA, 25 bp, Saccharomyces pastorianus
gttatctgaagcaaactccaaattt

SEQ ID NO: 54170 - DNA, 25 bp, Saccharomyces pastorianus
gaaacgatacaagctgcatcaaaaa

SEQ ID NO: 54171 - DNA, 25 bp, Saccharomyces pastorianus
gactactagtagcacagagaatcga

SEQ ID NO: 54172 - DNA, 25 bp, Saccharomyces pastorianus
gacgcagaacttcacgatagcatta

SEQ ID NO: 54173 - DNA, 25 bp, Saccharomyces pastorianus
atgcactctgcaacaacttgtccat

SEQ ID NO: 54174 - DNA, 25 bp, Saccharomyces pastorianus
gggcccaacgtgcttttcactaaat

SEQ ID NO: 54175 - DNA, 25 bp, Saccharomyces pastorianus
ggttgtccaacggaatcgacttcag

SEQ ID NO: 54176 - DNA, 25 bp, Saccharomyces pastorianus
cattcgtcaccatgcaagtattgct

SEQ ID NO: 54177 - DNA, 25 bp, Saccharomyces pastorianus
gcactttagcagctgggttgtccaa

SEQ ID NO: 54178 - DNA, 25 bp, Saccharomyces pastorianus
aatggctcccacgaaagccgacaaa

SEQ ID NO: 54179 - DNA, 25 bp, Saccharomyces pastorianus
caacaacttgtccatccccttaggg

SEQ ID NO: 54180 - DNA, 25 bp, Saccharomyces pastorianus
atgttcaccagcactttagcagctg

SEQ ID NO: 54181 - DNA, 25 bp, Saccharomyces pastorianus
aggatcgttgcaccatcattcgtca

SEQ ID NO: 54182 - DNA, 25 bp, Saccharomyces pastorianus
aagtattgctcgatgcactctgcaa

SEQ ID NO: 54183 - DNA, 25 bp, Saccharomyces pastorianus
atcgacttcaggatcgttgcaccat

SEQ ID NO: 54184 - DNA, 25 bp, Saccharomyces pastorianus
atctgctaacgctaccgttgctgaa

SEQ ID NO: 54185 - DNA, 25 bp, Saccharomyces pastorianus
taacgctaccgttgctgaatctgat

SEQ ID NO: 54186 - DNA, 25 bp, Saccharomyces pastorianus
aacattgttgctaaattggaagcta

SEQ ID NO: 54187 - DNA, 25 bp, Saccharomyces pastorianus
aagaaggtcacatctgctaacgcta

SEQ ID NO: 54188 - DNA, 25 bp, Saccharomyces pastorianus
ggtagaaagtacactactctagcta

SEQ ID NO: 54189 - DNA, 25 bp, Saccharomyces pastorianus
gaaggtcacatctgctaacgctacc

SEQ ID NO: 54190 - DNA, 25 bp, Saccharomyces pastorianus
gtcacatctgctaacgctaccgttg

SEQ ID NO: 54191 - DNA, 25 bp, Saccharomyces pastorianus
tattccacctccatatgacaagaaa

SEQ ID NO: 54192 - DNA, 25 bp, Saccharomyces pastorianus
agagctttcactaagaaggtcacat

SEQ ID NO: 54193 - DNA, 25 bp, Saccharomyces pastorianus
gaaagtacactactctagctaaatt

SEQ ID NO: 54194 - DNA, 25 bp, Saccharomyces pastorianus
cactactctagctaaattatcctct

SEQ ID NO: 54195 - DNA, 25 bp, Saccharomyces pastorianus
cgctactactacgttgtttggtttg

SEQ ID NO: 54196 - DNA, 25 bp, Saccharomyces pastorianus
gacacatttggctgattcgtttgca

SEQ ID NO: 54197 - DNA, 25 bp, Saccharomyces pastorianus
gacatgggaattcctcacggacgtt

SEQ ID NO: 54198 - DNA, 25 bp, Saccharomyces pastorianus
gaacgccgtctaatgtttcattcaa

SEQ ID NO: 54199 - DNA, 25 bp, Saccharomyces pastorianus
tcacggacgttcagactcaatcgaa

SEQ ID NO: 54200 - DNA, 25 bp, Saccharomyces pastorianus
ggagcttgtcaagaacgccgtctaa

SEQ ID NO: 54201 - DNA, 25 bp, Saccharomyces pastorianus
atgactgcggctacaacaagacaca

SEQ ID NO: 54202 - DNA, 25 bp, Saccharomyces pastorianus
gaatgattccatttctgtcacagaa

SEQ ID NO: 54203 - DNA, 25 bp, Saccharomyces pastorianus
aatctgctccacagctgtacgataa

SEQ ID NO: 54204 - DNA, 25 bp, Saccharomyces pastorianus
gaaatctctgctcatggatcggatg

SEQ ID NO: 54205 - DNA, 25 bp, Saccharomyces pastorianus
gacacaacgttcacgcagtgtttat

SEQ ID NO: 54206 - DNA, 25 bp, Saccharomyces pastorianus
tccaggttgccgcagattctttaat

SEQ ID NO: 54207 - DNA, 25 bp, Saccharomyces pastorianus
gattgcgatcttcgaattccttgga

SEQ ID NO: 54208 - DNA, 25 bp, Saccharomyces pastorianus
gactctaggctattgtttgcattga

SEQ ID NO: 54209 - DNA, 25 bp, Saccharomyces pastorianus
aatcagtttcccacagttgttctgg

SEQ ID NO: 54210 - DNA, 25 bp, Saccharomyces pastorianus
ggtccatcacggcatgcttaagcag

SEQ ID NO: 54211 - DNA, 25 bp, Saccharomyces pastorianus
gtaaagattttacggccatccaggt

SEQ ID NO: 54212 - DNA, 25 bp, Saccharomyces pastorianus
gattcgccggatactgtgcaatgtt

SEQ ID NO: 54213 - DNA, 25 bp, Saccharomyces pastorianus
aaacgcgtacgagcaaccttcatta

SEQ ID NO: 54214 - DNA, 25 bp, Saccharomyces pastorianus
tttggttgccattttcccttcgaat

SEQ ID NO: 54215 - DNA, 25 bp, Saccharomyces pastorianus
atcccgcttgattgattctttggca

SEQ ID NO: 54216 - DNA, 25 bp, Saccharomyces pastorianus
tggcggaacttgatccaaccaattt

SEQ ID NO: 54217 - DNA, 25 bp, Saccharomyces pastorianus
agcattcgggtggtgtatttctgtg

SEQ ID NO: 54218 - DNA, 25 bp, Saccharomyces pastorianus
aattgggctttgctttttgccagca

SEQ ID NO: 54219 - DNA, 25 bp, Saccharomyces pastorianus
actgagtgctttgacttcatcttcg

SEQ ID NO: 54220 - DNA, 25 bp, Saccharomyces pastorianus
tgcattttgtcagctgttttcattg

SEQ ID NO: 54221 - DNA, 25 bp, Saccharomyces pastorianus
ggaggcgttttcacactactgagtg

SEQ ID NO: 54222 - DNA, 25 bp, Saccharomyces pastorianus
gcaggaatttccacactgacgagtg

SEQ ID NO: 54223 - DNA, 25 bp, Saccharomyces pastorianus
attgcattctgaccttttctactac

SEQ ID NO: 54224 - DNA, 25 bp, Saccharomyces pastorianus
atttctgtgaaagcacctcttgctg

SEQ ID NO: 54225 - DNA, 25 bp, Saccharomyces pastorianus
tcttgctgctgttttgtgtacgagt

SEQ ID NO: 54226 - DNA, 25 bp, Saccharomyces pastorianus
gaagcaagactacatccagcatttg

SEQ ID NO: 54227 - DNA, 25 bp, Saccharomyces pastorianus
gttttcattgcagccctaagtagga

SEQ ID NO: 54228 - DNA, 25 bp, Saccharomyces pastorianus
ggctacgttgtcctataagcaaaac

SEQ ID NO: 54229 - DNA, 25 bp, Saccharomyces pastorianus
aagatcaccgattcgggcctggcta

SEQ ID NO: 54230 - DNA, 25 bp, Saccharomyces pastorianus
gagttcgttactaagtacctgcccg

SEQ ID NO: 54231 - DNA, 25 bp, Saccharomyces pastorianus
gggcctggctacgttgtcctataag

SEQ ID NO: 54232 - DNA, 25 bp, Saccharomyces pastorianus
tgcccgattccacatcacagatcaa

SEQ ID NO: 54233 - DNA, 25 bp, Saccharomyces pastorianus
gattccacatcacagatcaaggcaa

SEQ ID NO: 54234 - DNA, 25 bp, Saccharomyces pastorianus
gttactaagtacctgcccgattcca

SEQ ID NO: 54235 - DNA, 25 bp, Saccharomyces pastorianus
atcaaggcaaagatcaccgattcgg

SEQ ID NO: 54236 - DNA, 25 bp, Saccharomyces pastorianus
gcaaaacttgaaaaaaggcatctct

SEQ ID NO: 54237 - DNA, 25 bp, Saccharomyces pastorianus
taatgcgctagagttggccgagccg

SEQ ID NO: 54238 - DNA, 25 bp, Saccharomyces pastorianus
gatgggcatgtcatttaatgcgcta

SEQ ID NO: 54239 - DNA, 25 bp, Saccharomyces pastorianus
accttttttcaacgacatctccaga

SEQ ID NO: 54240 - DNA, 25 bp, Saccharomyces pastorianus
atggcaccaccttttttcaacgaca

SEQ ID NO: 54241 - DNA, 25 bp, Saccharomyces pastorianus
atctccagagatattaacggtcttt

SEQ ID NO: 54242 - DNA, 25 bp, Saccharomyces pastorianus
gatattaacggtcttttgaacaggg

SEQ ID NO: 54243 - DNA, 25 bp, Saccharomyces pastorianus
gaacagggactttttccataccagc

SEQ ID NO: 54244 - DNA, 25 bp, Saccharomyces pastorianus
ttttttcaacgacatctccagagat

SEQ ID NO: 54245 - DNA, 25 bp, Saccharomyces pastorianus
gaacatatctaccacgacgcaaaat

SEQ ID NO: 54246 - DNA, 25 bp, Saccharomyces pastorianus
gggactttttccataccagcccgct

SEQ ID NO: 54247 - DNA, 25 bp, Saccharomyces pastorianus
gcaccaccttttttcaacgacatct

SEQ ID NO: 54248 - DNA, 25 bp, Saccharomyces pastorianus
agcccgctctctttgaacatatcta

SEQ ID NO: 54249 - DNA, 25 bp, Saccharomyces pastorianus
ttttcaacgacatctccagagatat

SEQ ID NO: 54250 - DNA, 25 bp, Saccharomyces pastorianus
gtatgaatacctttgggctttccag

SEQ ID NO: 54251 - DNA, 25 bp, Saccharomyces pastorianus
agtttgacgatgaatctctcttccc

SEQ ID NO: 54252 - DNA, 25 bp, Saccharomyces pastorianus
aatggttggccgttcattgtgtgga

SEQ ID NO: 54253 - DNA, 25 bp, Saccharomyces pastorianus
tcaacgtgttattcagcctatcctg

SEQ ID NO: 54254 - DNA, 25 bp, Saccharomyces pastorianus
gaattctgttctccacaaacttgcc

SEQ ID NO: 54255 - DNA, 25 bp, Saccharomyces pastorianus
aagctgtgaaattgcctcgtggtga

SEQ ID NO: 54256 - DNA, 25 bp, Saccharomyces pastorianus
gactgttcagggtttatgctcacat

SEQ ID NO: 54257 - DNA, 25 bp, Saccharomyces pastorianus
tttcagtgagcgcacccaagtatgt

SEQ ID NO: 54258 - DNA, 25 bp, Saccharomyces pastorianus
acacttttgccttttcgctcaagaa

SEQ ID NO: 54259 - DNA, 25 bp, Saccharomyces pastorianus
aagaccggctgatttcggcccattg

SEQ ID NO: 54260 - DNA, 25 bp, Saccharomyces pastorianus
aaaggtcaacctcctgtttcagtga

SEQ ID NO: 54261 - DNA, 25 bp, Saccharomyces pastorianus
aaaaataccctctgcctgcgtcagg

SEQ ID NO: 54262 - DNA, 25 bp, Saccharomyces pastorianus
aagcttgtcatcgaagacgccttgc

SEQ ID NO: 54263 - DNA, 25 bp, Saccharomyces pastorianus
taccacttcctcaaatatgccaacg

SEQ ID NO: 54264 - DNA, 25 bp, Saccharomyces pastorianus
ttgtggagaacctgggtctttcgtc

SEQ ID NO: 54265 - DNA, 25 bp, Saccharomyces pastorianus
cctcgttcgactcgtttgtggagaa

SEQ ID NO: 54266 - DNA, 25 bp, Saccharomyces pastorianus
aacgctaatacggacaccacttctt

SEQ ID NO: 54267 - DNA, 25 bp, Saccharomyces pastorianus
actcctacccgggaaacatctatat

SEQ ID NO: 54268 - DNA, 25 bp, Saccharomyces pastorianus
gggtctttcgtccagcgacaagaac

SEQ ID NO: 54269 - DNA, 25 bp, Saccharomyces pastorianus
acggtgcaaatcctttccaacttgg

SEQ ID NO: 54270 - DNA, 25 bp, Saccharomyces pastorianus
tcgcaataccagtctccaaggcaat

SEQ ID NO: 54271 - DNA, 25 bp, Saccharomyces pastorianus
gggcagcagaactacacctatgacc

SEQ ID NO: 54272 - DNA, 25 bp, Saccharomyces pastorianus
atgcgttctctttacccgatcaata

SEQ ID NO: 54273 - DNA, 25 bp, Saccharomyces pastorianus
aacctcgaatgcattttgggaccag

SEQ ID NO: 54274 - DNA, 25 bp, Saccharomyces pastorianus
gtggttgtccccatgcacaatgaaa

SEQ ID NO: 54275 - DNA, 25 bp, Saccharomyces pastorianus
tttgcacaacctgatgttccgcatg

SEQ ID NO: 54276 - DNA, 25 bp, Saccharomyces pastorianus
cacgctttacaaactcatccattgg

SEQ ID NO: 54277 - DNA, 25 bp, Saccharomyces pastorianus
aaatctttcagctggcggattcgtt

SEQ ID NO: 54278 - DNA, 25 bp, Saccharomyces pastorianus
tgggaccagctgattttctccaatc

SEQ ID NO: 54279 - DNA, 25 bp, Saccharomyces pastorianus
gcggattcgttcctggtgaaactga

SEQ ID NO: 54280 - DNA, 25 bp, Saccharomyces pastorianus
atcgctcatgacacgccaaaggctt

SEQ ID NO: 54281 - DNA, 25 bp, Saccharomyces pastorianus
gaacagttcaacaagcacacgggct

SEQ ID NO: 54282 - DNA, 25 bp, Saccharomyces pastorianus
gatcaatagcaacgccacgggcatt

SEQ ID NO: 54283 - DNA, 25 bp, Saccharomyces pastorianus
gggactaactttgctgagaccaata

SEQ ID NO: 54284 - DNA, 25 bp, Saccharomyces pastorianus
ataagccaggctatttcattgatct

SEQ ID NO: 54285 - DNA, 25 bp, Saccharomyces pastorianus
atcgtcaaatggctcgtcgatccca

SEQ ID NO: 54286 - DNA, 25 bp, Saccharomyces pastorianus
gccatccaccctttatctttaagga

SEQ ID NO: 54287 - DNA, 25 bp, Saccharomyces pastorianus
gaccgtccttctaactatacatcag

SEQ ID NO: 54288 - DNA, 25 bp, Saccharomyces pastorianus
ccaacaaccctataacttccatgaa

SEQ ID NO: 54289 - DNA, 25 bp, Saccharomyces pastorianus
gcatggcacgatccaattgggacta

SEQ ID NO: 54290 - DNA, 25 bp, Saccharomyces pastorianus
ggcgcacatttcttcacattcaaac

SEQ ID NO: 54291 - DNA, 25 bp, Saccharomyces pastorianus
attcaatgtttgtccaggcctggta

SEQ ID NO: 54292 - DNA, 25 bp, Saccharomyces pastorianus
gaagtacattcacccaagatgacag

SEQ ID NO: 54293 - DNA, 25 bp, Saccharomyces pastorianus
catggaaacttgaacgccatccacc

SEQ ID NO: 54294 - DNA, 25 bp, Saccharomyces pastorianus
gggtctccctctaaatggtcaatgt

SEQ ID NO: 54295 - DNA, 25 bp, Saccharomyces pastorianus
gacggctcactttcatcttgggaaa

SEQ ID NO: 54296 - DNA, 25 bp, Saccharomyces pastorianus
ataacgatttcgaagccgctcagcc

SEQ ID NO: 54297 - DNA, 25 bp, Saccharomyces pastorianus
aaatgtcgctggtcggtccatgtat

SEQ ID NO: 54298 - DNA, 25 bp, Saccharomyces pastorianus
gacttttagatctagggtctccctc

SEQ ID NO: 54299 - DNA, 25 bp, Saccharomyces pastorianus
aagaccggcgtcttcagtggttcgc

SEQ ID NO: 54300 - DNA, 25 bp, Saccharomyces pastorianus
aaagagatcctatcgggctgtaccg

SEQ ID NO: 54301 - DNA, 25 bp, Saccharomyces pastorianus
ggaaaaccttcctctgatgacggat

SEQ ID NO: 54302 - DNA, 25 bp, Saccharomyces pastorianus
gaccggttccctgaaggacagtcat

SEQ ID NO: 54303 - DNA, 25 bp, Saccharomyces pastorianus
gtgtgtttagctccggattatccga

SEQ ID NO: 54304 - DNA, 25 bp, Saccharomyces pastorianus
agagagaagactgcccgatccgaaa

SEQ ID NO: 54305 - DNA, 25 bp, Saccharomyces pastorianus
tgttgaacaatcaagcctccacggc

SEQ ID NO: 54306 - DNA, 25 bp, Saccharomyces pastorianus
gaattacaccttttggccagtgccc

SEQ ID NO: 54307 - DNA, 25 bp, Saccharomyces pastorianus
attttgaaccttgccgaatcgtata

SEQ ID NO: 54308 - DNA, 25 bp, Saccharomyces pastorianus
tgccctcatgcaaggtgctgatact

SEQ ID NO: 54309 - DNA, 25 bp, Saccharomyces pastorianus
gccagtgcccaagctatttttggta

SEQ ID NO: 54310 - DNA, 25 bp, Saccharomyces pastorianus
acggcttccgtcatctttgataatt

SEQ ID NO: 54311 - DNA, 25 bp, Saccharomyces pastorianus
aaacagcgacttccaacttctacta

SEQ ID NO: 54312 - DNA, 25 bp, Saccharomyces pastorianus
ttatctcaaacttttcccacttgga

SEQ ID NO: 54313 - DNA, 25 bp, Saccharomyces pastorianus
gaaggaaccacggaactgctgttac

SEQ ID NO: 54314 - DNA, 25 bp, Saccharomyces pastorianus
ggaactgctgttacttgccattgaa

SEQ ID NO: 54315 - DNA, 25 bp, Saccharomyces pastorianus
tgtacaaacctaacttcctggcaaa

SEQ ID NO: 54316 - DNA, 25 bp, Saccharomyces pastorianus
atttcgaaatttagctgtcccgaca

SEQ ID NO: 54317 - DNA, 25 bp, Saccharomyces pastorianus
gtgccgttttttccaatctcgttga

SEQ ID NO: 54318 - DNA, 25 bp, Saccharomyces pastorianus
caggattgagctatcctcaaagtgt

SEQ ID NO: 54319 - DNA, 25 bp, Saccharomyces pastorianus
tagttagttcttctttaatatcctc

SEQ ID NO: 54320 - DNA, 25 bp, Saccharomyces pastorianus
gccttgttgattatggtgccgtttt

SEQ ID NO: 54321 - DNA, 25 bp, Saccharomyces pastorianus
tgttttcatttttcagctcacctat

SEQ ID NO: 54322 - DNA, 25 bp, Saccharomyces pastorianus
aatctcgttgataatactttgcagg

SEQ ID NO: 54323 - DNA, 25 bp, Saccharomyces pastorianus
aagtgtatcacgtcatcatcaattt

SEQ ID NO: 54324 - DNA, 25 bp, Saccharomyces pastorianus
tcagctcacctatggccttgttgat

SEQ ID NO: 54325 - DNA, 25 bp, Saccharomyces pastorianus
gctgtcccgacactatcagattagt

SEQ ID NO: 54326 - DNA, 25 bp, Saccharomyces pastorianus
taatactttgcaggattgagctatc

SEQ ID NO: 54327 - DNA, 25 bp, Saccharomyces pastorianus
cgttttcggcttcagaactcaattc

SEQ ID NO: 54328 - DNA, 25 bp, Saccharomyces pastorianus
tcggcttcagaactcaattcggtgg

SEQ ID NO: 54329 - DNA, 25 bp, Saccharomyces pastorianus
tttcggcttcagaactcaattcggt

SEQ ID NO: 54330 - DNA, 25 bp, Saccharomyces pastorianus
cttcagaactcaattcggtggtggt

SEQ ID NO: 54331 - DNA, 25 bp, Saccharomyces pastorianus
tgacgccgtcactattcgtaccaga

SEQ ID NO: 54332 - DNA, 25 bp, Saccharomyces pastorianus
tcgtaccagaaaggtcatctccaac

SEQ ID NO: 54333 - DNA, 25 bp, Saccharomyces pastorianus
ggcttcagaactcaattcggtggtg

SEQ ID NO: 54334 - DNA, 25 bp, Saccharomyces pastorianus
ttcggcttcagaactcaattcggtg

SEQ ID NO: 54335 - DNA, 25 bp, Saccharomyces pastorianus
gaagatcttcggtaccggtaagaga

SEQ ID NO: 54336 - DNA, 25 bp, Saccharomyces pastorianus
gttttcggcttcagaactcaattcg

SEQ ID NO: 54337 - DNA, 25 bp, Saccharomyces pastorianus
cggcttcagaactcaattcggtggt

SEQ ID NO: 54338 - DNA, 25 bp, Saccharomyces pastorianus
tctactggttcacagcttagatcca

SEQ ID NO: 54339 - DNA, 25 bp, Saccharomyces pastorianus
actggttcacagcttagatccatga

SEQ ID NO: 54340 - DNA, 25 bp, Saccharomyces pastorianus
gcttagatccatgaaaaactccatc

SEQ ID NO: 54341 - DNA, 25 bp, Saccharomyces pastorianus
ctggttcacagcttagatccatgaa

SEQ ID NO: 54342 - DNA, 25 bp, Saccharomyces pastorianus
ctactggttcacagcttagatccat

SEQ ID NO: 54343 - DNA, 25 bp, Saccharomyces pastorianus
tactggttcacagcttagatccatg

SEQ ID NO: 54344 - DNA, 25 bp, Saccharomyces pastorianus
atccatgaaaaactccatcacagta

SEQ ID NO: 54345 - DNA, 25 bp, Saccharomyces pastorianus
ttatctactggttcacagcttagat

SEQ ID NO: 54346 - DNA, 25 bp, Saccharomyces pastorianus
ggttcacagcttagatccatgaaaa

SEQ ID NO: 54347 - DNA, 25 bp, Saccharomyces pastorianus
gttcacagcttagatccatgaaaaa

SEQ ID NO: 54348 - DNA, 25 bp, Saccharomyces pastorianus
gatccatgaaaaactccatcacagt

SEQ ID NO: 54349 - DNA, 25 bp, Saccharomyces pastorianus
gaaccatcttctgtctctagtggta

SEQ ID NO: 54350 - DNA, 25 bp, Saccharomyces pastorianus
ttgaatcgtcccgtttatatcccaa

SEQ ID NO: 54351 - DNA, 25 bp, Saccharomyces pastorianus
gaaactggaagacggagcttgccct

SEQ ID NO: 54352 - DNA, 25 bp, Saccharomyces pastorianus
gctgctgatcgttccatttacattg

SEQ ID NO: 54353 - DNA, 25 bp, Saccharomyces pastorianus
aaaaagtgattgcttgcagtgcccc

SEQ ID NO: 54354 - DNA, 25 bp, Saccharomyces pastorianus
aactggtaccaaattctccgataag

SEQ ID NO: 54355 - DNA, 25 bp, Saccharomyces pastorianus
tttacattgatcaatcccactcctt

SEQ ID NO: 54356 - DNA, 25 bp, Saccharomyces pastorianus
ccactccttgaatttgttcctacaa

SEQ ID NO: 54357 - DNA, 25 bp, Saccharomyces pastorianus
cttgcccttcagttccaacagaaaa

SEQ ID NO: 54358 - DNA, 25 bp, Saccharomyces pastorianus
cttctgcagccattcaatttaccat

SEQ ID NO: 54359 - DNA, 25 bp, Saccharomyces pastorianus
tacacatgttgcatccactgcagaa

SEQ ID NO: 54360 - DNA, 25 bp, Saccharomyces pastorianus
aatttagcttccattgctctaccag

SEQ ID NO: 54361 - DNA, 25 bp, Saccharomyces pastorianus
atattccacttttgaaggctctcct

SEQ ID NO: 54362 - DNA, 25 bp, Saccharomyces pastorianus
aactattatccagtgccagaggcta

SEQ ID NO: 54363 - DNA, 25 bp, Saccharomyces pastorianus
aaatcgtcgagtattcttccccaga

SEQ ID NO: 54364 - DNA, 25 bp, Saccharomyces pastorianus
gatgctgcgtttaccatttgaatgt

SEQ ID NO: 54365 - DNA, 25 bp, Saccharomyces pastorianus
acctgggtaccatcaaatcgtcaaa

SEQ ID NO: 54366 - DNA, 25 bp, Saccharomyces pastorianus
atgctacccttgaagcttcttgtga

SEQ ID NO: 54367 - DNA, 25 bp, Saccharomyces pastorianus
caaacttgtgttgcgaaatcgtcga

SEQ ID NO: 54368 - DNA, 25 bp, Saccharomyces pastorianus
gctctaccagcattcgttgagactt

SEQ ID NO: 54369 - DNA, 25 bp, Saccharomyces pastorianus
ctctcctgcctctaagggtatttta

SEQ ID NO: 54370 - DNA, 25 bp, Saccharomyces pastorianus
tgaaacatagacctattgccctggg

SEQ ID NO: 54371 - DNA, 25 bp, Saccharomyces pastorianus
aggctcgccactagcatagctgagg

SEQ ID NO: 54372 - DNA, 25 bp, Saccharomyces pastorianus
gccaccggcgtggaagagttcgtca

SEQ ID NO: 54373 - DNA, 25 bp, Saccharomyces pastorianus
gacaacatcggtgcgcacaggatta

SEQ ID NO: 54374 - DNA, 25 bp, Saccharomyces pastorianus
gtccgggcaaattcgacatcgtgct

SEQ ID NO: 54375 - DNA, 25 bp, Saccharomyces pastorianus
gatcacgtcttgcaattttacgcag

SEQ ID NO: 54376 - DNA, 25 bp, Saccharomyces pastorianus
taaagggaccttggacgccatttcg

SEQ ID NO: 54377 - DNA, 25 bp, Saccharomyces pastorianus
taaactatcccgtcttccagtttgg

SEQ ID NO: 54378 - DNA, 25 bp, Saccharomyces pastorianus
actgggaatggccacttgctgttcg

SEQ ID NO: 54379 - DNA, 25 bp, Saccharomyces pastorianus
gttcgtcagtttcgagcaagcggat

SEQ ID NO: 54380 - DNA, 25 bp, Saccharomyces pastorianus
ttaacggcgagcttgacgtggtcga

SEQ ID NO: 54381 - DNA, 25 bp, Saccharomyces pastorianus
gcggatatctttagcgccgattgga

SEQ ID NO: 54382 - DNA, 25 bp, Saccharomyces pastorianus
ttcaaggtctcggtcgaagtcacgt

SEQ ID NO: 54383 - DNA, 25 bp, Saccharomyces pastorianus
aagcccgaattgaagttccacgaca

SEQ ID NO: 54384 - DNA, 25 bp, Saccharomyces pastorianus
agtactatccgccatttgtgttgca

SEQ ID NO: 54385 - DNA, 25 bp, Saccharomyces pastorianus
acgcccaatggaagtactatccgcc

SEQ ID NO: 54386 - DNA, 25 bp, Saccharomyces pastorianus
actccaagaagttcgtgcgccatct

SEQ ID NO: 54387 - DNA, 25 bp, Saccharomyces pastorianus
caagatcatctggaattatggcgaa

SEQ ID NO: 54388 - DNA, 25 bp, Saccharomyces pastorianus
acgcgcatgacgaccctgagaagat

SEQ ID NO: 54389 - DNA, 25 bp, Saccharomyces pastorianus
atttgtgttgcacgacgcgcatgac

SEQ ID NO: 54390 - DNA, 25 bp, Saccharomyces pastorianus
ggagaagcacctgctcatggacatc

SEQ ID NO: 54391 - DNA, 25 bp, Saccharomyces pastorianus
aagactgccatcaacaagcccgaat

SEQ ID NO: 54392 - DNA, 25 bp, Saccharomyces pastorianus
gaagtcacgtgcaaccacgacggtg

SEQ ID NO: 54393 - DNA, 25 bp, Saccharomyces pastorianus
agaaggcaaagggcccaaagatgtc

SEQ ID NO: 54394 - DNA, 25 bp, Saccharomyces pastorianus
ggcaaagggcccaaagatgtccact

SEQ ID NO: 54395 - DNA, 25 bp, Saccharomyces pastorianus
caagaaggcaaagggcccaaagatg

SEQ ID NO: 54396 - DNA, 25 bp, Saccharomyces pastorianus
caaagggcccaaagatgtccactat

SEQ ID NO: 54397 - DNA, 25 bp, Saccharomyces pastorianus
gcaaagggcccaaagatgtccacta

SEQ ID NO: 54398 - DNA, 25 bp, Saccharomyces pastorianus
gaaggcaaagggcccaaagatgtcc

SEQ ID NO: 54399 - DNA, 25 bp, Saccharomyces pastorianus
acaagaaggcaaagggcccaaagat

SEQ ID NO: 54400 - DNA, 25 bp, Saccharomyces pastorianus
aagaaggcaaagggcccaaagatgt

SEQ ID NO: 54401 - DNA, 25 bp, Saccharomyces pastorianus
gacaagaaggcaaagggcccaaaga

SEQ ID NO: 54402 - DNA, 25 bp, Saccharomyces pastorianus
aggcaaagggcccaaagatgtccac

SEQ ID NO: 54403 - DNA, 25 bp, Saccharomyces pastorianus
aaagggcccaaagatgtccactatt

SEQ ID NO: 54404 - DNA, 25 bp, Saccharomyces pastorianus
tgctgccactgaggacaacgttcaa

SEQ ID NO: 54405 - DNA, 25 bp, Saccharomyces pastorianus
tatacgcccacttcgttggacgagg

SEQ ID NO: 54406 - DNA, 25 bp, Saccharomyces pastorianus
gccttcccagcttaaaattgttcat

SEQ ID NO: 54407 - DNA, 25 bp, Saccharomyces pastorianus
gggcggtactggtatttcacccatg

SEQ ID NO: 54408 - DNA, 25 bp, Saccharomyces pastorianus
tagtcaagtcataccccacagggaa

SEQ ID NO: 54409 - DNA, 25 bp, Saccharomyces pastorianus
gagagaaactgtcgttcccatctgg

SEQ ID NO: 54410 - DNA, 25 bp, Saccharomyces pastorianus
ccgcaatggtggcttccgttagaag

SEQ ID NO: 54411 - DNA, 25 bp, Saccharomyces pastorianus
attgttcattacttggactcgccag

SEQ ID NO: 54412 - DNA, 25 bp, Saccharomyces pastorianus
caaggagtatttgcctgctgccact

SEQ ID NO: 54413 - DNA, 25 bp, Saccharomyces pastorianus
tgggattcagacgttccaagccact

SEQ ID NO: 54414 - DNA, 25 bp, Saccharomyces pastorianus
tggcgtcgggtacatcactaaagat

SEQ ID NO: 54415 - DNA, 25 bp, Saccharomyces pastorianus
aaagaatctcactccaatcccagtt

SEQ ID NO: 54416 - DNA, 25 bp, Saccharomyces pastorianus
atggatcttgttggtgataaactca

SEQ ID NO: 54417 - DNA, 25 bp, Saccharomyces pastorianus
gcatctcacatggatttagcaaata

SEQ ID NO: 54418 - DNA, 25 bp, Saccharomyces pastorianus
gtttctcctcaagatcacaagcatc

SEQ ID NO: 54419 - DNA, 25 bp, Saccharomyces pastorianus
tcaagaggagccaacccctggtact

SEQ ID NO: 54420 - DNA, 25 bp, Saccharomyces pastorianus
gcacgactgtggactcattaaaaat

SEQ ID NO: 54421 - DNA, 25 bp, Saccharomyces pastorianus
gaaccgtattctcaacgtttcgata

SEQ ID NO: 54422 - DNA, 25 bp, Saccharomyces pastorianus
tgcagcttcgaagtgtaggcaaaga

SEQ ID NO: 54423 - DNA, 25 bp, Saccharomyces pastorianus
gtatcaagagcgaaagcacgactgt

SEQ ID NO: 54424 - DNA, 25 bp, Saccharomyces pastorianus
aaaaggttgctcagttgcagttgca

SEQ ID NO: 54425 - DNA, 25 bp, Saccharomyces pastorianus
aattcggacgataatggtagtacaa

SEQ ID NO: 54426 - DNA, 25 bp, Saccharomyces pastorianus
tatttcttcacgatgttcctgctaa

SEQ ID NO: 54427 - DNA, 25 bp, Saccharomyces pastorianus
agggaattcttcatacaccattggt

SEQ ID NO: 54428 - DNA, 25 bp, Saccharomyces pastorianus
attgacgtcaggcaggaatccagaa

SEQ ID NO: 54429 - DNA, 25 bp, Saccharomyces pastorianus
gcttaatgaatctttccccacatgg

SEQ ID NO: 54430 - DNA, 25 bp, Saccharomyces pastorianus
ccagaagttttgctctatcgcttaa

SEQ ID NO: 54431 - DNA, 25 bp, Saccharomyces pastorianus
tggattgttttaaccgacggcattc

SEQ ID NO: 54432 - DNA, 25 bp, Saccharomyces pastorianus
ggagtcatttacgttcctcttcaag

SEQ ID NO: 54433 - DNA, 25 bp, Saccharomyces pastorianus
caacctgatggtggctattgcaatc

SEQ ID NO: 54434 - DNA, 25 bp, Saccharomyces pastorianus
gacaaggtatcctacacatggcaat

SEQ ID NO: 54435 - DNA, 25 bp, Saccharomyces pastorianus
attgcctattattactctttccttc

SEQ ID NO: 54436 - DNA, 25 bp, Saccharomyces pastorianus
gacggcattctagcctgttacaact

SEQ ID NO: 54437 - DNA, 25 bp, Saccharomyces pastorianus
gtgaccatgtagatccgaatccaat

SEQ ID NO: 54438 - DNA, 25 bp, Saccharomyces pastorianus
cgagaatctccgtcatgttgatgaa

SEQ ID NO: 54439 - DNA, 25 bp, Saccharomyces pastorianus
ataaataggccgaacgctccagtct

SEQ ID NO: 54440 - DNA, 25 bp, Saccharomyces pastorianus
aacatcaaccgtcccgaaggtgttg

SEQ ID NO: 54441 - DNA, 25 bp, Saccharomyces pastorianus
gagccggcaatgtcgaccaagatga

SEQ ID NO: 54442 - DNA, 25 bp, Saccharomyces pastorianus
gatttcggcgcagctattggtgtac

SEQ ID NO: 54443 - DNA, 25 bp, Saccharomyces pastorianus
aaccaccgtgcccagaatgaatttg

SEQ ID NO: 54444 - DNA, 25 bp, Saccharomyces pastorianus
tagactggacatgccagctgctggt

SEQ ID NO: 54445 - DNA, 25 bp, Saccharomyces pastorianus
tcaaggccccttggtgataaatctg

SEQ ID NO: 54446 - DNA, 25 bp, Saccharomyces pastorianus
gcaatatagccgagcccctaagtga

SEQ ID NO: 54447 - DNA, 25 bp, Saccharomyces pastorianus
acgattcggataatagtctgccact

SEQ ID NO: 54448 - DNA, 25 bp, Saccharomyces pastorianus
tgacagtgcgtcaaaagtccttttg

SEQ ID NO: 54449 - DNA, 25 bp, Saccharomyces pastorianus
taatgatttgccagaaaccggtttt

SEQ ID NO: 54450 - DNA, 25 bp, Saccharomyces pastorianus
gaaaaacttggctcactattcaaca

SEQ ID NO: 54451 - DNA, 25 bp, Saccharomyces pastorianus
gaacagttcccatattaccttcatg

SEQ ID NO: 54452 - DNA, 25 bp, Saccharomyces pastorianus
attttggatggacgacttgcttctc

SEQ ID NO: 54453 - DNA, 25 bp, Saccharomyces pastorianus
ttagcaccgattgaggaacatccta

SEQ ID NO: 54454 - DNA, 25 bp, Saccharomyces pastorianus
attccttttgttcacggtcaaactg

SEQ ID NO: 54455 - DNA, 25 bp, Saccharomyces pastorianus
gagtcttttcgctaaacagcttgac

SEQ ID NO: 54456 - DNA, 25 bp, Saccharomyces pastorianus
gatatcgaaacccaattccttttgt

SEQ ID NO: 54457 - DNA, 25 bp, Saccharomyces pastorianus
gatattcccatgacagatgacctag

SEQ ID NO: 54458 - DNA, 25 bp, Saccharomyces pastorianus
gacttgcttctcgtatggcattgaa

SEQ ID NO: 54459 - DNA, 25 bp, Saccharomyces pastorianus
tgtcctcattctctgtctgtaagat

SEQ ID NO: 54460 - DNA, 25 bp, Saccharomyces pastorianus
gatgctttagatacatttcaacact

SEQ ID NO: 54461 - DNA, 25 bp, Saccharomyces pastorianus
gaaaagctcgaaagcaccattgctg

SEQ ID NO: 54462 - DNA, 25 bp, Saccharomyces pastorianus
gattcaattcgttctgagtccatgt

SEQ ID NO: 54463 - DNA, 25 bp, Saccharomyces pastorianus
gactacttgactgaacaagctgtaa

SEQ ID NO: 54464 - DNA, 25 bp, Saccharomyces pastorianus
atagtcacgggcaacctggtcctgg

SEQ ID NO: 54465 - DNA, 25 bp, Saccharomyces pastorianus
ggtacaaggacatatccgattcaat

SEQ ID NO: 54466 - DNA, 25 bp, Saccharomyces pastorianus
tggtcctggacttactgacttggct

SEQ ID NO: 54467 - DNA, 25 bp, Saccharomyces pastorianus
agttgtgtttcgtgcacaggtacaa

SEQ ID NO: 54468 - DNA, 25 bp, Saccharomyces pastorianus
acttactgacttggctgtcctcatt

SEQ ID NO: 54469 - DNA, 25 bp, Saccharomyces pastorianus
gcaccattgctgaaactcaaggtag

SEQ ID NO: 54470 - DNA, 25 bp, Saccharomyces pastorianus
acatcatcacgtcttcgttggttcc

SEQ ID NO: 54471 - DNA, 25 bp, Saccharomyces pastorianus
ttcgttggttcccagcatgtttgag

SEQ ID NO: 54472 - DNA, 25 bp, Saccharomyces pastorianus
atcatcacgtcttcgttggttccca

SEQ ID NO: 54473 - DNA, 25 bp, Saccharomyces pastorianus
tcatcacgtcttcgttggttcccag

SEQ ID NO: 54474 - DNA, 25 bp, Saccharomyces pastorianus
atcacgtcttcgttggttcccagca

SEQ ID NO: 54475 - DNA, 25 bp, Saccharomyces pastorianus
gacatcatcacgtcttcgttggttc

SEQ ID NO: 54476 - DNA, 25 bp, Saccharomyces pastorianus
acgtcttcgttggttcccagcatgt

SEQ ID NO: 54477 - DNA, 25 bp, Saccharomyces pastorianus
cgacatcatcacgtcttcgttggtt

SEQ ID NO: 54478 - DNA, 25 bp, Saccharomyces pastorianus
atcttgctcagcacccgacatcatc

SEQ ID NO: 54479 - DNA, 25 bp, Saccharomyces pastorianus
tcgttggttcccagcatgtttgagg

SEQ ID NO: 54480 - DNA, 25 bp, Saccharomyces pastorianus
gtcttcgttggttcccagcatgttt

SEQ ID NO: 54481 - DNA, 25 bp, Saccharomyces pastorianus
tcgttcgcttgtttgtttggttgtt

SEQ ID NO: 54482 - DNA, 25 bp, Saccharomyces pastorianus
ttccctcttatatgcccacttcaaa

SEQ ID NO: 54483 - DNA, 25 bp, Saccharomyces pastorianus
ttgttcgttcgcttgtttgtttggt

SEQ ID NO: 54484 - DNA, 25 bp, Saccharomyces pastorianus
gcccacttcaaaatcaccaagcatt

SEQ ID NO: 54485 - DNA, 25 bp, Saccharomyces pastorianus
tatgcccacttcaaaatcaccaagc

SEQ ID NO: 54486 - DNA, 25 bp, Saccharomyces pastorianus
agtgcaaaattagccgtatttccct

SEQ ID NO: 54487 - DNA, 25 bp, Saccharomyces pastorianus
cttatatgcccacttcaaaatcacc

SEQ ID NO: 54488 - DNA, 25 bp, Saccharomyces pastorianus
tttgttccctcttatatgcccactt

SEQ ID NO: 54489 - DNA, 25 bp, Saccharomyces pastorianus
tttggttgtttgttccctcttatat

SEQ ID NO: 54490 - DNA, 25 bp, Saccharomyces pastorianus
caaaatcaccaagcattgtcatacc

SEQ ID NO: 54491 - DNA, 25 bp, Saccharomyces pastorianus
ttgtttgttccctcttatatgccca

SEQ ID NO: 54492 - DNA, 25 bp, Saccharomyces pastorianus
ctcacggtggtggtaaccatcaaca

SEQ ID NO: 54493 - DNA, 25 bp, Saccharomyces pastorianus
acggtggtggtaaccatcaacatat

SEQ ID NO: 54494 - DNA, 25 bp, Saccharomyces pastorianus
ggtaaccatcaacatattggtaagg

SEQ ID NO: 54495 - DNA, 25 bp, Saccharomyces pastorianus
cacggtggtggtaaccatcaacata

SEQ ID NO: 54496 - DNA, 25 bp, Saccharomyces pastorianus
catcaacatattggtaaggcttcta

SEQ ID NO: 54497 - DNA, 25 bp, Saccharomyces pastorianus
ggtggtaaccatcaacatattggta

SEQ ID NO: 54498 - DNA, 25 bp, Saccharomyces pastorianus
cctcacggtggtggtaaccatcaac

SEQ ID NO: 54499 - DNA, 25 bp, Saccharomyces pastorianus
tcacggtggtggtaaccatcaacat

SEQ ID NO: 54500 - DNA, 25 bp, Saccharomyces pastorianus
cggtggtggtaaccatcaacatatt

SEQ ID NO: 54501 - DNA, 25 bp, Saccharomyces pastorianus
atcaacatattggtaaggcttctac

SEQ ID NO: 54502 - DNA, 25 bp, Saccharomyces pastorianus
gtggtggtaaccatcaacatattgg

SEQ ID NO: 54503 - DNA, 25 bp, Saccharomyces pastorianus
aaggagtgctccaattacatgtatt

SEQ ID NO: 54504 - DNA, 25 bp, Saccharomyces pastorianus
aaactctgaacttgatgcgggtcgc

SEQ ID NO: 54505 - DNA, 25 bp, Saccharomyces pastorianus
tgcgggtcgcgtaatcaggttcgat

SEQ ID NO: 54506 - DNA, 25 bp, Saccharomyces pastorianus
acggtagtgttattggtcctgtcga

SEQ ID NO: 54507 - DNA, 25 bp, Saccharomyces pastorianus
gttctgcccagattgctcacagtga

SEQ ID NO: 54508 - DNA, 25 bp, Saccharomyces pastorianus
gattattccatcaatcctgttgacg

SEQ ID NO: 54509 - DNA, 25 bp, Saccharomyces pastorianus
gatatatgacgctccattacacgtg

SEQ ID NO: 54510 - DNA, 25 bp, Saccharomyces pastorianus
gactaattgtccctgatgtttctgt

SEQ ID NO: 54511 - DNA, 25 bp, Saccharomyces pastorianus
ggcgaatcttcgaacagtaactact

SEQ ID NO: 54512 - DNA, 25 bp, Saccharomyces pastorianus
gtaactactatatctgttctgccca

SEQ ID NO: 54513 - DNA, 25 bp, Saccharomyces pastorianus
aatgacttccagagagagccagatt

SEQ ID NO: 54514 - DNA, 25 bp, Saccharomyces pastorianus
gcatcaactaaatcgaacggccacg

SEQ ID NO: 54515 - DNA, 25 bp, Saccharomyces pastorianus
gaacggccacgaggacgagagaact

SEQ ID NO: 54516 - DNA, 25 bp, Saccharomyces pastorianus
gattgctcataagacgatccgcgat

SEQ ID NO: 54517 - DNA, 25 bp, Saccharomyces pastorianus
attatactttctgcatgccggaacc

SEQ ID NO: 54518 - DNA, 25 bp, Saccharomyces pastorianus
cgatacttctgctttccgtattttt

SEQ ID NO: 54519 - DNA, 25 bp, Saccharomyces pastorianus
gccggaaccatgcatcaactaaatc

SEQ ID NO: 54520 - DNA, 25 bp, Saccharomyces pastorianus
aagacgatccgcgatacttctgctt

SEQ ID NO: 54521 - DNA, 25 bp, Saccharomyces pastorianus
acaacgaattgcctctgacagtcca

SEQ ID NO: 54522 - DNA, 25 bp, Saccharomyces pastorianus
aagtggattgagaagcggcaacaac

SEQ ID NO: 54523 - DNA, 25 bp, Saccharomyces pastorianus
gaactgcggttgaatcatctgtgta

SEQ ID NO: 54524 - DNA, 25 bp, Saccharomyces pastorianus
ctctgacagtccaatgaagcgatta

SEQ ID NO: 54525 - DNA, 25 bp, Saccharomyces pastorianus
gcgtcaagaagtgcattccgtcaat

SEQ ID NO: 54526 - DNA, 25 bp, Saccharomyces pastorianus
accgtttgcgcctattgtatgtaca

SEQ ID NO: 54527 - DNA, 25 bp, Saccharomyces pastorianus
atggttattgtactcagctcctgat

SEQ ID NO: 54528 - DNA, 25 bp, Saccharomyces pastorianus
atttggccttcagtgatcagcagcg

SEQ ID NO: 54529 - DNA, 25 bp, Saccharomyces pastorianus
tggagtgggttttcgtctgcttcaa

SEQ ID NO: 54530 - DNA, 25 bp, Saccharomyces pastorianus
tagttttacagcttccttctgtggt

SEQ ID NO: 54531 - DNA, 25 bp, Saccharomyces pastorianus
aatggtcccaagtcaacctgtagtg

SEQ ID NO: 54532 - DNA, 25 bp, Saccharomyces pastorianus
tgatttacaaactgctgccgtcttt

SEQ ID NO: 54533 - DNA, 25 bp, Saccharomyces pastorianus
cttacgcattattcccacgattttg

SEQ ID NO: 54534 - DNA, 25 bp, Saccharomyces pastorianus
gttggcttctacttaacctacatta

SEQ ID NO: 54535 - DNA, 25 bp, Saccharomyces pastorianus
ccgtctttgttgcattcctgtatag

SEQ ID NO: 54536 - DNA, 25 bp, Saccharomyces pastorianus
gaccaacccatatcattttgcaaga

SEQ ID NO: 54537 - DNA, 25 bp, Saccharomyces pastorianus
tcatcaacttccttctgatcatgtg

SEQ ID NO: 54538 - DNA, 25 bp, Saccharomyces pastorianus
acaagattctataacgtttgcgatt

SEQ ID NO: 54539 - DNA, 25 bp, Saccharomyces pastorianus
gggcaagtggactcaatattcttac

SEQ ID NO: 54540 - DNA, 25 bp, Saccharomyces pastorianus
aagacttggcacttccgcacatgtg

SEQ ID NO: 54541 - DNA, 25 bp, Saccharomyces pastorianus
gataattccgatcatcatcatcatc

SEQ ID NO: 54542 - DNA, 25 bp, Saccharomyces pastorianus
tgatcatgtgattccggccttggcc

SEQ ID NO: 54543 - DNA, 25 bp, Saccharomyces pastorianus
acatgtgcccacaaatcctgaccaa

SEQ ID NO: 54544 - DNA, 25 bp, Saccharomyces pastorianus
ggccttggcccagcaagacttggca

SEQ ID NO: 54545 - DNA, 25 bp, Saccharomyces pastorianus
agagtagttctagaatccaattcgg

SEQ ID NO: 54546 - DNA, 25 bp, Saccharomyces pastorianus
tattcttacaaccatggataaagcc

SEQ ID NO: 54547 - DNA, 25 bp, Saccharomyces pastorianus
ggcatacgtaacaagcactcaagcg

SEQ ID NO: 54548 - DNA, 25 bp, Saccharomyces pastorianus
atcctaactatcaatcaagccacga

SEQ ID NO: 54549 - DNA, 25 bp, Saccharomyces pastorianus
acagtgccgatcctaactatcaatc

SEQ ID NO: 54550 - DNA, 25 bp, Saccharomyces pastorianus
ggccgttttatggttcgcttgagca

SEQ ID NO: 54551 - DNA, 25 bp, Saccharomyces pastorianus
gcttgagcagtatttcaacgaacga

SEQ ID NO: 54552 - DNA, 25 bp, Saccharomyces pastorianus
cgatattgaccaggtcggatcccta

SEQ ID NO: 54553 - DNA, 25 bp, Saccharomyces pastorianus
ggtgatgctgatttggcatacgtaa

SEQ ID NO: 54554 - DNA, 25 bp, Saccharomyces pastorianus
agcactcaagcgatgggccgtttta

SEQ ID NO: 54555 - DNA, 25 bp, Saccharomyces pastorianus
ggttcgcttgagcagtatttcaacg

SEQ ID NO: 54556 - DNA, 25 bp, Saccharomyces pastorianus
aagccacgatattcgatattgacca

SEQ ID NO: 54557 - DNA, 25 bp, Saccharomyces pastorianus
aacgaacgaaacagtgccgatccta

SEQ ID NO: 54558 - DNA, 25 bp, Saccharomyces pastorianus
ggcacgttcgatgcgctcaagaaaa

SEQ ID NO: 54559 - DNA, 25 bp, Saccharomyces pastorianus
gacttcatcgctcaatcgtgtgctg

SEQ ID NO: 54560 - DNA, 25 bp, Saccharomyces pastorianus
tacaacggctgatcatggcgtcatc

SEQ ID NO: 54561 - DNA, 25 bp, Saccharomyces pastorianus
tggcgtcatccgtgtccaaaatgat

SEQ ID NO: 54562 - DNA, 25 bp, Saccharomyces pastorianus
aacggaacatccattgacctacaac

SEQ ID NO: 54563 - DNA, 25 bp, Saccharomyces pastorianus
cggttgttcccgttgatcaaggcaa

SEQ ID NO: 54564 - DNA, 25 bp, Saccharomyces pastorianus
gaaattcttccatggcgttttcacc

SEQ ID NO: 54565 - DNA, 25 bp, Saccharomyces pastorianus
tggtcccctcattgttaggattgtt

SEQ ID NO: 54566 - DNA, 25 bp, Saccharomyces pastorianus
ggagagcatcctacccattacaggg

SEQ ID NO: 54567 - DNA, 25 bp, Saccharomyces pastorianus
aaagtcggacgtaccagactccatt

SEQ ID NO: 54568 - DNA, 25 bp, Saccharomyces pastorianus
ataagattccattgctattcccggg

SEQ ID NO: 54569 - DNA, 25 bp, Saccharomyces pastorianus
atcattatcattaaggatgggcgac

SEQ ID NO: 54570 - DNA, 25 bp, Saccharomyces pastorianus
gatcagcttggtgacaatttccaca

SEQ ID NO: 54571 - DNA, 25 bp, Saccharomyces pastorianus
aagaaccttcagcagtatgatggaa

SEQ ID NO: 54572 - DNA, 25 bp, Saccharomyces pastorianus
gggagccatgggtcaaaggataaaa

SEQ ID NO: 54573 - DNA, 25 bp, Saccharomyces pastorianus
gaaatggccaggagatcaggaatta

SEQ ID NO: 54574 - DNA, 25 bp, Saccharomyces pastorianus
ttcagcagtatgatggaaatggcca

SEQ ID NO: 54575 - DNA, 25 bp, Saccharomyces pastorianus
atcattaaggatgggcgacgaaatt

SEQ ID NO: 54576 - DNA, 25 bp, Saccharomyces pastorianus
atacgattgatcagcttggtgacaa

SEQ ID NO: 54577 - DNA, 25 bp, Saccharomyces pastorianus
tgggcgacgaaattagaggaagtaa

SEQ ID NO: 54578 - DNA, 25 bp, Saccharomyces pastorianus
gtaatcatacgattgatcagcttgg

SEQ ID NO: 54579 - DNA, 25 bp, Saccharomyces pastorianus
gtgacaatttccacaacacctccgt

SEQ ID NO: 54580 - DNA, 25 bp, Saccharomyces pastorianus
gttccaccggttctcttagtgtaat

SEQ ID NO: 54581 - DNA, 25 bp, Saccharomyces pastorianus
aacacatttcaattgcggaggagct

SEQ ID NO: 54582 - DNA, 25 bp, Saccharomyces pastorianus
tcgtagtgactacaccgcagggtgt

SEQ ID NO: 54583 - DNA, 25 bp, Saccharomyces pastorianus
aaagcagttcatctcagacgtcgcc

SEQ ID NO: 54584 - DNA, 25 bp, Saccharomyces pastorianus
gattacctgttagttgatacgcccc

SEQ ID NO: 54585 - DNA, 25 bp, Saccharomyces pastorianus
cagggtgtggcaactgctgatgtca

SEQ ID NO: 54586 - DNA, 25 bp, Saccharomyces pastorianus
gattcatatgcccatactgtgcaga

SEQ ID NO: 54587 - DNA, 25 bp, Saccharomyces pastorianus
caaagaatcccctttatgccctatt

SEQ ID NO: 54588 - DNA, 25 bp, Saccharomyces pastorianus
aattctctgttccatatctaggcaa

SEQ ID NO: 54589 - DNA, 25 bp, Saccharomyces pastorianus
gatattctaacccagatggtggcat

SEQ ID NO: 54590 - DNA, 25 bp, Saccharomyces pastorianus
gaaagttgagactggttccaccggt

SEQ ID NO: 54591 - DNA, 25 bp, Saccharomyces pastorianus
gatgcaggagcaaaagatattctag

SEQ ID NO: 54592 - DNA, 25 bp, Saccharomyces pastorianus
gagaagatatcggaagtcgagctta

SEQ ID NO: 54593 - DNA, 25 bp, Saccharomyces pastorianus
gtatgactcgtgaaacacctgaaga

SEQ ID NO: 54594 - DNA, 25 bp, Saccharomyces pastorianus
tcaggaagaggtattaagtgggcaa

SEQ ID NO: 54595 - DNA, 25 bp, Saccharomyces pastorianus
tattaagtgggcaagagtttattca

SEQ ID NO: 54596 - DNA, 25 bp, Saccharomyces pastorianus
gtgaaacacctgaagatgtcaatga

SEQ ID NO: 54597 - DNA, 25 bp, Saccharomyces pastorianus
aagagtttattcattggtcgatagt

SEQ ID NO: 54598 - DNA, 25 bp, Saccharomyces pastorianus
gatagtatgactcgtgaaacacctg

SEQ ID NO: 54599 - DNA, 25 bp, Saccharomyces pastorianus
ttcattggtcgatagtatgactcgt

SEQ ID NO: 54600 - DNA, 25 bp, Saccharomyces pastorianus
gaagatgtcaatgatgcaggagcaa

SEQ ID NO: 54601 - DNA, 25 bp, Saccharomyces pastorianus
tatcggaagtcgagcttaagctgga

SEQ ID NO: 54602 - DNA, 25 bp, Saccharomyces pastorianus
tacgctgatagcacgaacattccat

SEQ ID NO: 54603 - DNA, 25 bp, Saccharomyces pastorianus
gagttatctaacgacccggagctta

SEQ ID NO: 54604 - DNA, 25 bp, Saccharomyces pastorianus
acattccatggacgtatgccgttga

SEQ ID NO: 54605 - DNA, 25 bp, Saccharomyces pastorianus
gcgactggaattatttgctgctaaa

SEQ ID NO: 54606 - DNA, 25 bp, Saccharomyces pastorianus
gcaacttacacttcctgactgtgaa

SEQ ID NO: 54607 - DNA, 25 bp, Saccharomyces pastorianus
gaccgtctaaaaactattgcttcaa

SEQ ID NO: 54608 - DNA, 25 bp, Saccharomyces pastorianus
aatgctctcgatgtgctctatctat

SEQ ID NO: 54609 - DNA, 25 bp, Saccharomyces pastorianus
cgccaggaaaccgacactattgagt

SEQ ID NO: 54610 - DNA, 25 bp, Saccharomyces pastorianus
ggagctatttgagacccaggatgat

SEQ ID NO: 54611 - DNA, 25 bp, Saccharomyces pastorianus
gaaaatattccttcgatccggatga

SEQ ID NO: 54612 - DNA, 25 bp, Saccharomyces pastorianus
aagttcagaacgaatctcgctccgc

SEQ ID NO: 54613 - DNA, 25 bp, Saccharomyces pastorianus
atgttgaaccaatacctctttctcc

SEQ ID NO: 54614 - DNA, 25 bp, Saccharomyces pastorianus
taccttctaaagttgccgctgtgga

SEQ ID NO: 54615 - DNA, 25 bp, Saccharomyces pastorianus
tggtatggtaaaccccggccagctt

SEQ ID NO: 54616 - DNA, 25 bp, Saccharomyces pastorianus
ggcgtccaccgtgcgtaagaacgaa

SEQ ID NO: 54617 - DNA, 25 bp, Saccharomyces pastorianus
aaagagcttactgccaatgttgaac

SEQ ID NO: 54618 - DNA, 25 bp, Saccharomyces pastorianus
ccagagggcctcgtggacgtaaatt

SEQ ID NO: 54619 - DNA, 25 bp, Saccharomyces pastorianus
gaaaaaagttgtcctcacctagcac

SEQ ID NO: 54620 - DNA, 25 bp, Saccharomyces pastorianus
atttggcatgtttactctatcccct

SEQ ID NO: 54621 - DNA, 25 bp, Saccharomyces pastorianus
ggagcacacctttaagtggcactag

SEQ ID NO: 54622 - DNA, 25 bp, Saccharomyces pastorianus
tgaatgctattcatcccatcgatct

SEQ ID NO: 54623 - DNA, 25 bp, Saccharomyces pastorianus
ggaagaatcgttgtccccagcggag

SEQ ID NO: 54624 - DNA, 25 bp, Saccharomyces pastorianus
aacatgtcgcccgagacaggctaat

SEQ ID NO: 54625 - DNA, 25 bp, Saccharomyces pastorianus
gacaggctaatcctcttggcagata

SEQ ID NO: 54626 - DNA, 25 bp, Saccharomyces pastorianus
ggctggaaaacttacacgcatcgtt

SEQ ID NO: 54627 - DNA, 25 bp, Saccharomyces pastorianus
agagacgatcatttaccaccacgat

SEQ ID NO: 54628 - DNA, 25 bp, Saccharomyces pastorianus
ataacatcccaccacggctggaaaa

SEQ ID NO: 54629 - DNA, 25 bp, Saccharomyces pastorianus
gaacggattattggaacgccctctt

SEQ ID NO: 54630 - DNA, 25 bp, Saccharomyces pastorianus
ggtgcacgctcattgaacatgtcgc

SEQ ID NO: 54631 - DNA, 25 bp, Saccharomyces pastorianus
gccctcttcaactgttcaagtcatt

SEQ ID NO: 54632 - DNA, 25 bp, Saccharomyces pastorianus
cacgaggattactggactggatttt

SEQ ID NO: 54633 - DNA, 25 bp, Saccharomyces pastorianus
tggacgactacgcatttgtgagaat

SEQ ID NO: 54634 - DNA, 25 bp, Saccharomyces pastorianus
attatcgcacgtatggtgcacgctc

SEQ ID NO: 54635 - DNA, 25 bp, Saccharomyces pastorianus
atactcctggagacggcgtactgca

SEQ ID NO: 54636 - DNA, 25 bp, Saccharomyces pastorianus
ataagagagtttacgtgcccggcgc

SEQ ID NO: 54637 - DNA, 25 bp, Saccharomyces pastorianus
tcaagttcaacacctggcacacgga

SEQ ID NO: 54638 - DNA, 25 bp, Saccharomyces pastorianus
gggttcgtcgtgatgctgctgataa

SEQ ID NO: 54639 - DNA, 25 bp, Saccharomyces pastorianus
gaagaactacctgcaggcggaccgt

SEQ ID NO: 54640 - DNA, 25 bp, Saccharomyces pastorianus
aagttcgtttattgctgtctgtaca

SEQ ID NO: 54641 - DNA, 25 bp, Saccharomyces pastorianus
tagtgtaccacatcaggctggacgt

SEQ ID NO: 54642 - DNA, 25 bp, Saccharomyces pastorianus
aggatgacgacgaaagcctggccat

SEQ ID NO: 54643 - DNA, 25 bp, Saccharomyces pastorianus
ttaaagacggatcggtgctcctgat

SEQ ID NO: 54644 - DNA, 25 bp, Saccharomyces pastorianus
tcgctgtgcgagttcgtccaagaat

SEQ ID NO: 54645 - DNA, 25 bp, Saccharomyces pastorianus
ttttcggccagcttctgatcatgaa

SEQ ID NO: 54646 - DNA, 25 bp, Saccharomyces pastorianus
aacagcacgcccagagatcagtaca

SEQ ID NO: 54647 - DNA, 25 bp, Saccharomyces pastorianus
tgtacgcccgggtgatcgcaaactt

SEQ ID NO: 54648 - DNA, 25 bp, Saccharomyces pastorianus
gagatgtcttcgttgtgctccagcc

SEQ ID NO: 54649 - DNA, 25 bp, Saccharomyces pastorianus
agcggccgggcttcttcgcaaaggc

SEQ ID NO: 54650 - DNA, 25 bp, Saccharomyces pastorianus
ccagggcgctggagatgtcttcgtt

SEQ ID NO: 54651 - DNA, 25 bp, Saccharomyces pastorianus
atcttcttccgcagaaacagcacgc

SEQ ID NO: 54652 - DNA, 25 bp, Saccharomyces pastorianus
aaacttccgcgccatagggtggtgc

SEQ ID NO: 54653 - DNA, 25 bp, Saccharomyces pastorianus
gcagcagctcgaggacggactgtac

SEQ ID NO: 54654 - DNA, 25 bp, Saccharomyces pastorianus
aaacggtctttgatcaatgcgcagt

SEQ ID NO: 54655 - DNA, 25 bp, Saccharomyces pastorianus
tggtgctcctctcgcgaaatagagt

SEQ ID NO: 54656 - DNA, 25 bp, Saccharomyces pastorianus
atgcgcagtgggacgagaagatctc

SEQ ID NO: 54657 - DNA, 25 bp, Saccharomyces pastorianus
agagcctgatctcgaacgactcgga

SEQ ID NO: 54658 - DNA, 25 bp, Saccharomyces pastorianus
atggcctgaacgtgcagatcaacaa

SEQ ID NO: 54659 - DNA, 25 bp, Saccharomyces pastorianus
ggaaggcgaagctcaacgacatcaa

SEQ ID NO: 54660 - DNA, 25 bp, Saccharomyces pastorianus
gaccgcatcgcgcagctgaacaagg

SEQ ID NO: 54661 - DNA, 25 bp, Saccharomyces pastorianus
agcggttccgcgtgcgcaagaagca

SEQ ID NO: 54662 - DNA, 25 bp, Saccharomyces pastorianus
tatccgaacatctacagagcctgat

SEQ ID NO: 54663 - DNA, 25 bp, Saccharomyces pastorianus
gaacctgaacaagctgcatggcctg

SEQ ID NO: 54664 - DNA, 25 bp, Saccharomyces pastorianus
aacagcggccaagacgtgtcgcaat

SEQ ID NO: 54665 - DNA, 25 bp, Saccharomyces pastorianus
aggcgcccgtgaacgagctggacaa

SEQ ID NO: 54666 - DNA, 25 bp, Saccharomyces pastorianus
gaacgtgaacaatctatccgaacat

SEQ ID NO: 54667 - DNA, 25 bp, Saccharomyces pastorianus
gcgtctactatcattgctactggtt

SEQ ID NO: 54668 - DNA, 25 bp, Saccharomyces pastorianus
aaaaccgtgcgctgcagtcgaaact

SEQ ID NO: 54669 - DNA, 25 bp, Saccharomyces pastorianus
aactccgcgaagtgcggcttttgta

SEQ ID NO: 54670 - DNA, 25 bp, Saccharomyces pastorianus
aactccacctgcgtgtgcaaagagc

SEQ ID NO: 54671 - DNA, 25 bp, Saccharomyces pastorianus
gcaagacagcaactccgaaaaccgt

SEQ ID NO: 54672 - DNA, 25 bp, Saccharomyces pastorianus
aaggacaactccagtgggctctgca

SEQ ID NO: 54673 - DNA, 25 bp, Saccharomyces pastorianus
aatacccataaaataccagcaccgc

SEQ ID NO: 54674 - DNA, 25 bp, Saccharomyces pastorianus
aggaccccattctgcagaacctgat

SEQ ID NO: 54675 - DNA, 25 bp, Saccharomyces pastorianus
agagctggaaactggcgccgacaaa

SEQ ID NO: 54676 - DNA, 25 bp, Saccharomyces pastorianus
aatggcgccgcgctaaaggattcct

SEQ ID NO: 54677 - DNA, 25 bp, Saccharomyces pastorianus
aaacgccagaatagggacgcccaga

SEQ ID NO: 54678 - DNA, 25 bp, Saccharomyces pastorianus
tgcaagcgctcgaggacaccataga

SEQ ID NO: 54679 - DNA, 25 bp, Saccharomyces pastorianus
aagagcgtatcggtgggcaccaacc

SEQ ID NO: 54680 - DNA, 25 bp, Saccharomyces pastorianus
attggtcattttgggtgatacccca

SEQ ID NO: 54681 - DNA, 25 bp, Saccharomyces pastorianus
aactggcaccagaaggcattgatga

SEQ ID NO: 54682 - DNA, 25 bp, Saccharomyces pastorianus
gggtgataccccaagaagagatatg

SEQ ID NO: 54683 - DNA, 25 bp, Saccharomyces pastorianus
gagatatgatcttttcggtcgcgaa

SEQ ID NO: 54684 - DNA, 25 bp, Saccharomyces pastorianus
gtagcttgtctgtgaagtccattag

SEQ ID NO: 54685 - DNA, 25 bp, Saccharomyces pastorianus
gttccaggatgtttgattgtagctt

SEQ ID NO: 54686 - DNA, 25 bp, Saccharomyces pastorianus
atggctgcaaacagacgaggttttt

SEQ ID NO: 54687 - DNA, 25 bp, Saccharomyces pastorianus
gttcggtacctctctatggagacaa

SEQ ID NO: 54688 - DNA, 25 bp, Saccharomyces pastorianus
taccccttggcatttggcgtataga

SEQ ID NO: 54689 - DNA, 25 bp, Saccharomyces pastorianus
ctgtagaagaaagccgtaccccttg

SEQ ID NO: 54690 - DNA, 25 bp, Saccharomyces pastorianus
tgcggcaatacaagtcaatggcggg

SEQ ID NO: 54691 - DNA, 25 bp, Saccharomyces pastorianus
cgttttcaagtttgccttgcggcaa

SEQ ID NO: 54692 - DNA, 25 bp, Saccharomyces pastorianus
aaaacggcacaacgagccaccataa

SEQ ID NO: 54693 - DNA, 25 bp, Saccharomyces pastorianus
accataaagcttcgcaccggtgttt

SEQ ID NO: 54694 - DNA, 25 bp, Saccharomyces pastorianus
caaacgggtcctcaattgctcaaaa

SEQ ID NO: 54695 - DNA, 25 bp, Saccharomyces pastorianus
aaacaggttgattttgccctcgtca

SEQ ID NO: 54696 - DNA, 25 bp, Saccharomyces pastorianus
agacatgtattttagcgttttcaag

SEQ ID NO: 54697 - DNA, 25 bp, Saccharomyces pastorianus
ttttgccctcgtcaatcaaacgggt

SEQ ID NO: 54698 - DNA, 25 bp, Saccharomyces pastorianus
accggtgtttttctatcatgcgaac

SEQ ID NO: 54699 - DNA, 25 bp, Saccharomyces pastorianus
gcgaactcttattgcacaggatcaa

SEQ ID NO: 54700 - DNA, 25 bp, Saccharomyces pastorianus
tgctctgccaattgaccaaactggt

SEQ ID NO: 54701 - DNA, 25 bp, Saccharomyces pastorianus
gaaaaatcgctttgttgctgtgcct

SEQ ID NO: 54702 - DNA, 25 bp, Saccharomyces pastorianus
gacctcgatttctgcctaaaggatt

SEQ ID NO: 54703 - DNA, 25 bp, Saccharomyces pastorianus
aaaaacctcgtctgtttgcagccat

SEQ ID NO: 54704 - DNA, 25 bp, Saccharomyces pastorianus
ggatgcgtctgtactgactgctata

SEQ ID NO: 54705 - DNA, 25 bp, Saccharomyces pastorianus
ggtacggctttcttctacagacgaa

SEQ ID NO: 54706 - DNA, 25 bp, Saccharomyces pastorianus
ggaagcattcctctctaatatggct

SEQ ID NO: 54707 - DNA, 25 bp, Saccharomyces pastorianus
aaggattgtcttggcttggatacta

SEQ ID NO: 54708 - DNA, 25 bp, Saccharomyces pastorianus
attgcgatccgcttttgatggagac

SEQ ID NO: 54709 - DNA, 25 bp, Saccharomyces pastorianus
aagacttccaagctatctcgtcgga

SEQ ID NO: 54710 - DNA, 25 bp, Saccharomyces pastorianus
gaattcatcaatgccttctggtgcc

SEQ ID NO: 54711 - DNA, 25 bp, Saccharomyces pastorianus
tggaacatcttctatacgccaaatg

SEQ ID NO: 54712 - DNA, 25 bp, Saccharomyces pastorianus
gcatctaatacgtcttcgccaagag

SEQ ID NO: 54713 - DNA, 25 bp, Saccharomyces pastorianus
acacccttaccgttgatgctgaata

SEQ ID NO: 54714 - DNA, 25 bp, Saccharomyces pastorianus
gtgcggctgacaaccaaactataga

SEQ ID NO: 54715 - DNA, 25 bp, Saccharomyces pastorianus
gggtctcctgcgataactgagcaag

SEQ ID NO: 54716 - DNA, 25 bp, Saccharomyces pastorianus
ccattgcgaacgtgaactccagtac

SEQ ID NO: 54717 - DNA, 25 bp, Saccharomyces pastorianus
taccccaagaaatcctgcagcagtt

SEQ ID NO: 54718 - DNA, 25 bp, Saccharomyces pastorianus
ttgagctctatacacgaacccagac

SEQ ID NO: 54719 - DNA, 25 bp, Saccharomyces pastorianus
tacaaaaggactgctcactcttcac

SEQ ID NO: 54720 - DNA, 25 bp, Saccharomyces pastorianus
agcagttgaactcctttccaaacgg

SEQ ID NO: 54721 - DNA, 25 bp, Saccharomyces pastorianus
aatgaaccctactccaaggcaaacg

SEQ ID NO: 54722 - DNA, 25 bp, Saccharomyces pastorianus
gaacgttacaccttcgcatatgaat

SEQ ID NO: 54723 - DNA, 25 bp, Saccharomyces pastorianus
aaccggtcttttaatcttgcaatgc

SEQ ID NO: 54724 - DNA, 25 bp, Saccharomyces pastorianus
aatgccgcagcgagtgtcataacaa

SEQ ID NO: 54725 - DNA, 25 bp, Saccharomyces pastorianus
aacagtatcgcgctagacacgtttt

SEQ ID NO: 54726 - DNA, 25 bp, Saccharomyces pastorianus
caccctgctcttttaggatttccta

SEQ ID NO: 54727 - DNA, 25 bp, Saccharomyces pastorianus
gacacgttttacactcgagttggaa

SEQ ID NO: 54728 - DNA, 25 bp, Saccharomyces pastorianus
tccatctactcgctagcattacagt

SEQ ID NO: 54729 - DNA, 25 bp, Saccharomyces pastorianus
gttgaatttcgatgacttccctatc

SEQ ID NO: 54730 - DNA, 25 bp, Saccharomyces pastorianus
ggatttcctaaaccagatgtcgtat

SEQ ID NO: 54731 - DNA, 25 bp, Saccharomyces pastorianus
gttccagtgtagtagcccttgcaga

SEQ ID NO: 54732 - DNA, 25 bp, Saccharomyces pastorianus
gaactcacagcacctttattggcgt

SEQ ID NO: 54733 - DNA, 25 bp, Saccharomyces pastorianus
acagtattgggactttcaccctgct

SEQ ID NO: 54734 - DNA, 25 bp, Saccharomyces pastorianus
atcatgaaccaaccaggtgatttaa

SEQ ID NO: 54735 - DNA, 25 bp, Saccharomyces pastorianus
ccaaccaggtgatttaaatgaaatt

SEQ ID NO: 54736 - DNA, 25 bp, Saccharomyces pastorianus
gatcatgaaccaaccaggtgattta

SEQ ID NO: 54737 - DNA, 25 bp, Saccharomyces pastorianus
tgatcatgaaccaaccaggtgattt

SEQ ID NO: 54738 - DNA, 25 bp, Saccharomyces pastorianus
gaaccaaccaggtgatttaaatgaa

SEQ ID NO: 54739 - DNA, 25 bp, Saccharomyces pastorianus
catgaaccaaccaggtgatttaaat

SEQ ID NO: 54740 - DNA, 25 bp, Saccharomyces pastorianus
tgaaccaaccaggtgatttaaatga

SEQ ID NO: 54741 - DNA, 25 bp, Saccharomyces pastorianus
accaaccaggtgatttaaatgaaat

SEQ ID NO: 54742 - DNA, 25 bp, Saccharomyces pastorianus
accaggtgatttaaatgaaattgct

SEQ ID NO: 54743 - DNA, 25 bp, Saccharomyces pastorianus
tcatgaaccaaccaggtgatttaaa

SEQ ID NO: 54744 - DNA, 25 bp, Saccharomyces pastorianus
atgatcatgaaccaaccaggtgatt

SEQ ID NO: 54745 - DNA, 25 bp, Saccharomyces pastorianus
gttacgagtccgaacacaagcacaa

SEQ ID NO: 54746 - DNA, 25 bp, Saccharomyces pastorianus
gttgctggtactcataacgctgtga

SEQ ID NO: 54747 - DNA, 25 bp, Saccharomyces pastorianus
agtattgccccatattctacaggaa

SEQ ID NO: 54748 - DNA, 25 bp, Saccharomyces pastorianus
aaaatatattccctcattggcggcc

SEQ ID NO: 54749 - DNA, 25 bp, Saccharomyces pastorianus
ttggacgaatttatcatgctatcag

SEQ ID NO: 54750 - DNA, 25 bp, Saccharomyces pastorianus
gtttccttattatcctacatcgtct

SEQ ID NO: 54751 - DNA, 25 bp, Saccharomyces pastorianus
ggaacaggttcaagccaataggcat

SEQ ID NO: 54752 - DNA, 25 bp, Saccharomyces pastorianus
aacacggctctatagggcatgcagt

SEQ ID NO: 54753 - DNA, 25 bp, Saccharomyces pastorianus
gtttactcataacagcgctaataat

SEQ ID NO: 54754 - DNA, 25 bp, Saccharomyces pastorianus
gttgcccagaatacgtaagctagga

SEQ ID NO: 54755 - DNA, 25 bp, Saccharomyces pastorianus
cattggcggcctataacgttttcaa

SEQ ID NO: 54756 - DNA, 25 bp, Saccharomyces pastorianus
actggctcaccagaaaggcgctata

SEQ ID NO: 54757 - DNA, 25 bp, Saccharomyces pastorianus
ttccaagcaggtgggactggctcac

SEQ ID NO: 54758 - DNA, 25 bp, Saccharomyces pastorianus
attcaccttgcacgcctgagttaaa

SEQ ID NO: 54759 - DNA, 25 bp, Saccharomyces pastorianus
gaaggctgtcccgttgatcaaagaa

SEQ ID NO: 54760 - DNA, 25 bp, Saccharomyces pastorianus
ttacttcaaatgctgtccacctatc

SEQ ID NO: 54761 - DNA, 25 bp, Saccharomyces pastorianus
cagacggagccacttacttcaaatg

SEQ ID NO: 54762 - DNA, 25 bp, Saccharomyces pastorianus
tttacctttgatgttcacccagggc

SEQ ID NO: 54763 - DNA, 25 bp, Saccharomyces pastorianus
agggctgctccttagtagatatcgt

SEQ ID NO: 54764 - DNA, 25 bp, Saccharomyces pastorianus
atatcgtctgttgggctgggtttac

SEQ ID NO: 54765 - DNA, 25 bp, Saccharomyces pastorianus
tatccgttctgaatctaaccgccag

SEQ ID NO: 54766 - DNA, 25 bp, Saccharomyces pastorianus
agaagcccgtgcttcagggctacaa

SEQ ID NO: 54767 - DNA, 25 bp, Saccharomyces pastorianus
ccagggttctttgccgatttattga

SEQ ID NO: 54768 - DNA, 25 bp, Saccharomyces pastorianus
gatgatgaactcaaatcccttagaa

SEQ ID NO: 54769 - DNA, 25 bp, Saccharomyces pastorianus
gaactcaaatcccttagaaaatatt

SEQ ID NO: 54770 - DNA, 25 bp, Saccharomyces pastorianus
tggacgacaaattaggacagattaa

SEQ ID NO: 54771 - DNA, 25 bp, Saccharomyces pastorianus
gggttctttgccgatttattgatga

SEQ ID NO: 54772 - DNA, 25 bp, Saccharomyces pastorianus
ctttgccgatttattgatgatgaac

SEQ ID NO: 54773 - DNA, 25 bp, Saccharomyces pastorianus
gattaaaccagggttctttgccgat

SEQ ID NO: 54774 - DNA, 25 bp, Saccharomyces pastorianus
aatggtctggacgacaaattaggac

SEQ ID NO: 54775 - DNA, 25 bp, Saccharomyces pastorianus
aatattgagattttggatgaaccag

SEQ ID NO: 54776 - DNA, 25 bp, Saccharomyces pastorianus
taggacagattaaaccagggttctt

SEQ ID NO: 54777 - DNA, 25 bp, Saccharomyces pastorianus
ggatgaaccagagaccaatctattg

SEQ ID NO: 54778 - DNA, 25 bp, Saccharomyces pastorianus
atggagttcatacggcgactactgc

SEQ ID NO: 54779 - DNA, 25 bp, Saccharomyces pastorianus
gagccttcgttccattctaaatttc

SEQ ID NO: 54780 - DNA, 25 bp, Saccharomyces pastorianus
aaatgcagagtaccgccacaaaccg

SEQ ID NO: 54781 - DNA, 25 bp, Saccharomyces pastorianus
atataacgctacacagctaggcagt

SEQ ID NO: 54782 - DNA, 25 bp, Saccharomyces pastorianus
gcagcggcactttaagttcaccgtt

SEQ ID NO: 54783 - DNA, 25 bp, Saccharomyces pastorianus
gagaccgatttacgttttcaaactg

SEQ ID NO: 54784 - DNA, 25 bp, Saccharomyces pastorianus
agagtgctgccagatgtcatcgatt

SEQ ID NO: 54785 - DNA, 25 bp, Saccharomyces pastorianus
gcaacgtcaggaaagcagcggcact

SEQ ID NO: 54786 - DNA, 25 bp, Saccharomyces pastorianus
gaagggcaaggttgactcagacata

SEQ ID NO: 54787 - DNA, 25 bp, Saccharomyces pastorianus
taattggccctgatactgctgttaa

SEQ ID NO: 54788 - DNA, 25 bp, Saccharomyces pastorianus
aatttcccgcaacaagagaccgatt

SEQ ID NO: 54789 - DNA, 25 bp, Saccharomyces pastorianus
tatacttctatctaactctggcttg

SEQ ID NO: 54790 - DNA, 25 bp, Saccharomyces pastorianus
atcgagagcatctaccaatgtatct

SEQ ID NO: 54791 - DNA, 25 bp, Saccharomyces pastorianus
cctgctgctctaattttacgtttct

SEQ ID NO: 54792 - DNA, 25 bp, Saccharomyces pastorianus
ccttagacttcacctggtccagggc

SEQ ID NO: 54793 - DNA, 25 bp, Saccharomyces pastorianus
tcatattgggttgtactcttcgcag

SEQ ID NO: 54794 - DNA, 25 bp, Saccharomyces pastorianus
tttcttgttcttctttagccttgtc

SEQ ID NO: 54795 - DNA, 25 bp, Saccharomyces pastorianus
ctctggcttgttttacttatttctt

SEQ ID NO: 54796 - DNA, 25 bp, Saccharomyces pastorianus
tcattcactggactgacacggtcaa

SEQ ID NO: 54797 - DNA, 25 bp, Saccharomyces pastorianus
cgccttttgttcttcattcactgga

SEQ ID NO: 54798 - DNA, 25 bp, Saccharomyces pastorianus
ctttcagcgtgtatatacttctatc

SEQ ID NO: 54799 - DNA, 25 bp, Saccharomyces pastorianus
tcgcagcctcatctgggataaatcg

SEQ ID NO: 54800 - DNA, 25 bp, Saccharomyces pastorianus
ttgtcactaacttcccgttcaaata

SEQ ID NO: 54801 - DNA, 25 bp, Saccharomyces pastorianus
agatccgttacgtctccaatattcg

SEQ ID NO: 54802 - DNA, 25 bp, Saccharomyces pastorianus
agtagaagtcccagtccacagagat

SEQ ID NO: 54803 - DNA, 25 bp, Saccharomyces pastorianus
ccaatattcgcacctgtagcattac

SEQ ID NO: 54804 - DNA, 25 bp, Saccharomyces pastorianus
tagaaatgtttcctccccattaatt

SEQ ID NO: 54805 - DNA, 25 bp, Saccharomyces pastorianus
gaaaatcatccccaaccagatacag

SEQ ID NO: 54806 - DNA, 25 bp, Saccharomyces pastorianus
agataccttatcttcgccaacaaaa

SEQ ID NO: 54807 - DNA, 25 bp, Saccharomyces pastorianus
agccttgtcttctacagatacctta

SEQ ID NO: 54808 - DNA, 25 bp, Saccharomyces pastorianus
actccacagacacagatgcgttgat

SEQ ID NO: 54809 - DNA, 25 bp, Saccharomyces pastorianus
gttgcttaaccttacctagaagtag

SEQ ID NO: 54810 - DNA, 25 bp, Saccharomyces pastorianus
aagacacttctacaaccacagttgt

SEQ ID NO: 54811 - DNA, 25 bp, Saccharomyces pastorianus
gaccgttcacgttctcatgtattgg

SEQ ID NO: 54812 - DNA, 25 bp, Saccharomyces pastorianus
gttgtacttcgccatttgtgacatt

SEQ ID NO: 54813 - DNA, 25 bp, Saccharomyces pastorianus
ataagaggctgactttcctgcacac

SEQ ID NO: 54814 - DNA, 25 bp, Saccharomyces pastorianus
gtgacattagatcttggacccaacc

SEQ ID NO: 54815 - DNA, 25 bp, Saccharomyces pastorianus
aattggtcggttacacagcagtgca

SEQ ID NO: 54816 - DNA, 25 bp, Saccharomyces pastorianus
acagccctgttgtgctacactgaat

SEQ ID NO: 54817 - DNA, 25 bp, Saccharomyces pastorianus
agtgtctgggttcgttaaccgctat

SEQ ID NO: 54818 - DNA, 25 bp, Saccharomyces pastorianus
atttattctggtgcagccatcgtca

SEQ ID NO: 54819 - DNA, 25 bp, Saccharomyces pastorianus
gccgcatatttcatggactctggtc

SEQ ID NO: 54820 - DNA, 25 bp, Saccharomyces pastorianus
atggtgtatcgccacgggttgtact

SEQ ID NO: 54821 - DNA, 25 bp, Saccharomyces pastorianus
gccatcgtcacatcttatctgtttt

SEQ ID NO: 54822 - DNA, 25 bp, Saccharomyces pastorianus
catcacatgctcatattccttggtt

SEQ ID NO: 54823 - DNA, 25 bp, Saccharomyces pastorianus
atcatgtccatctgggcagttttgc

SEQ ID NO: 54824 - DNA, 25 bp, Saccharomyces pastorianus
gaagacggatcgcttagtgatatac

SEQ ID NO: 54825 - DNA, 25 bp, Saccharomyces pastorianus
ggttaccaactctgatgatttctgc

SEQ ID NO: 54826 - DNA, 25 bp, Saccharomyces pastorianus
gtaaagcaccgccattgttattcaa

SEQ ID NO: 54827 - DNA, 25 bp, Saccharomyces pastorianus
agactccagtctaccatcaggcaat

SEQ ID NO: 54828 - DNA, 25 bp, Saccharomyces pastorianus
tgggtgggccgaacttgacattgat

SEQ ID NO: 54829 - DNA, 25 bp, Saccharomyces pastorianus
agttaatactggtcaccgccacaga

SEQ ID NO: 54830 - DNA, 25 bp, Saccharomyces pastorianus
atattccttggttcttgctggtaaa

SEQ ID NO: 54831 - DNA, 25 bp, Saccharomyces pastorianus
acaggttctgcaagtgcgggttcgt

SEQ ID NO: 54832 - DNA, 25 bp, Saccharomyces pastorianus
ggtggccctgtgatgtatagcgaat

SEQ ID NO: 54833 - DNA, 25 bp, Saccharomyces pastorianus
taagactccaggtccaggtggtcaa

SEQ ID NO: 54834 - DNA, 25 bp, Saccharomyces pastorianus
tgcccaagatgtcgccgtcaagtgt

SEQ ID NO: 54835 - DNA, 25 bp, Saccharomyces pastorianus
cgccgtccacgtcaaaatcagagct

SEQ ID NO: 54836 - DNA, 25 bp, Saccharomyces pastorianus
aggaagttggtatcaccgccgtcca

SEQ ID NO: 54837 - DNA, 25 bp, Saccharomyces pastorianus
gtccacgtcaaaatcagagctactg

SEQ ID NO: 54838 - DNA, 25 bp, Saccharomyces pastorianus
agttccatctgactcaaccagaaag

SEQ ID NO: 54839 - DNA, 25 bp, Saccharomyces pastorianus
ggctgcccaagatgtcgccgtcaag

SEQ ID NO: 54840 - DNA, 25 bp, Saccharomyces pastorianus
tgtcgccgtcaagtgtaaggaagtt

SEQ ID NO: 54841 - DNA, 25 bp, Saccharomyces pastorianus
aagatgtcgccgtcaagtgtaagga

SEQ ID NO: 54842 - DNA, 25 bp, Saccharomyces pastorianus
aagttggtatcaccgccgtccacgt

SEQ ID NO: 54843 - DNA, 25 bp, Saccharomyces pastorianus
taaggaagttggtatcaccgccgtc

SEQ ID NO: 54844 - DNA, 25 bp, Saccharomyces pastorianus
gctaagaagcaaaacagaccattgc

SEQ ID NO: 54845 - DNA, 25 bp, Saccharomyces pastorianus
taagaagcaaaacagaccattgcca

SEQ ID NO: 54846 - DNA, 25 bp, Saccharomyces pastorianus
ggctaagaagcaaaacagaccattg

SEQ ID NO: 54847 - DNA, 25 bp, Saccharomyces pastorianus
aggctaagaagcaaaacagaccatt

SEQ ID NO: 54848 - DNA, 25 bp, Saccharomyces pastorianus
ctaagaagcaaaacagaccattgcc

SEQ ID NO: 54849 - DNA, 25 bp, Saccharomyces pastorianus
agaagcaaaacagaccattgccaca

SEQ ID NO: 54850 - DNA, 25 bp, Saccharomyces pastorianus
aagaagcaaaacagaccattgccac

SEQ ID NO: 54851 - DNA, 25 bp, Saccharomyces pastorianus
gcaaaacagaccattgccacaatgg

SEQ ID NO: 54852 - DNA, 25 bp, Saccharomyces pastorianus
aagcaaaacagaccattgccacaat

SEQ ID NO: 54853 - DNA, 25 bp, Saccharomyces pastorianus
gaagcaaaacagaccattgccacaa

SEQ ID NO: 54854 - DNA, 25 bp, Saccharomyces pastorianus
agcaaaacagaccattgccacaatg

SEQ ID NO: 54855 - DNA, 25 bp, Saccharomyces pastorianus
atcaccgatgaaaacactgtccttt

SEQ ID NO: 54856 - DNA, 25 bp, Saccharomyces pastorianus
atttcttacccttctacggatgtag

SEQ ID NO: 54857 - DNA, 25 bp, Saccharomyces pastorianus
tggtagctcatgaccctgagttcaa

SEQ ID NO: 54858 - DNA, 25 bp, Saccharomyces pastorianus
tgaagtttcctctgtttcatcagcg

SEQ ID NO: 54859 - DNA, 25 bp, Saccharomyces pastorianus
tgccatgcggaaactatgtcacatt

SEQ ID NO: 54860 - DNA, 25 bp, Saccharomyces pastorianus
attaatgtgcacctttaccggcatt

SEQ ID NO: 54861 - DNA, 25 bp, Saccharomyces pastorianus
aaaaaatctcttcggctcaactgca

SEQ ID NO: 54862 - DNA, 25 bp, Saccharomyces pastorianus
acatacaattacgtgtcccaccaaa

SEQ ID NO: 54863 - DNA, 25 bp, Saccharomyces pastorianus
tgagttcaagaatctccaccatttg

SEQ ID NO: 54864 - DNA, 25 bp, Saccharomyces pastorianus
aacttttatacgacatgccatgcgg

SEQ ID NO: 54865 - DNA, 25 bp, Saccharomyces pastorianus
gcaactcagtgttattcgactacgt

SEQ ID NO: 54866 - DNA, 25 bp, Saccharomyces pastorianus
taaagggtccctctggttgcttgaa

SEQ ID NO: 54867 - DNA, 25 bp, Saccharomyces pastorianus
tactcaatttttcacttccttacct

SEQ ID NO: 54868 - DNA, 25 bp, Saccharomyces pastorianus
gaagacgaactggtttccaccacat

SEQ ID NO: 54869 - DNA, 25 bp, Saccharomyces pastorianus
ataccctttggcgtcgaggaaactg

SEQ ID NO: 54870 - DNA, 25 bp, Saccharomyces pastorianus
atgctatgtggcctaacgagtgtta

SEQ ID NO: 54871 - DNA, 25 bp, Saccharomyces pastorianus
ttcacccaacgttctactcaatttt

SEQ ID NO: 54872 - DNA, 25 bp, Saccharomyces pastorianus
tcaagcggtgcttcatggtttactt

SEQ ID NO: 54873 - DNA, 25 bp, Saccharomyces pastorianus
acctgatggtcgtatcgttcttgaa

SEQ ID NO: 54874 - DNA, 25 bp, Saccharomyces pastorianus
atcgacgcagtcttggaattccagt

SEQ ID NO: 54875 - DNA, 25 bp, Saccharomyces pastorianus
gttcttgaacaccagaggcggctcc

SEQ ID NO: 54876 - DNA, 25 bp, Saccharomyces pastorianus
attcctatacgccttactgtttaca

SEQ ID NO: 54877 - DNA, 25 bp, Saccharomyces pastorianus
tccagctaaatctgcatctgctcgt

SEQ ID NO: 54878 - DNA, 25 bp, Saccharomyces pastorianus
aatctgcatctgctcgtggctctta

SEQ ID NO: 54879 - DNA, 25 bp, Saccharomyces pastorianus
aaccaatccagctaaatctgcatct

SEQ ID NO: 54880 - DNA, 25 bp, Saccharomyces pastorianus
taaatctgcatctgctcgtggctct

SEQ ID NO: 54881 - DNA, 25 bp, Saccharomyces pastorianus
aaatctgcatctgctcgtggctctt

SEQ ID NO: 54882 - DNA, 25 bp, Saccharomyces pastorianus
aatccagctaaatctgcatctgctc

SEQ ID NO: 54883 - DNA, 25 bp, Saccharomyces pastorianus
tgcatctgctcgtggctcttacttg

SEQ ID NO: 54884 - DNA, 25 bp, Saccharomyces pastorianus
atctgctcgtggctcttacttgcgt

SEQ ID NO: 54885 - DNA, 25 bp, Saccharomyces pastorianus
atccagctaaatctgcatctgctcg

SEQ ID NO: 54886 - DNA, 25 bp, Saccharomyces pastorianus
atctgcatctgctcgtggctcttac

SEQ ID NO: 54887 - DNA, 25 bp, Saccharomyces pastorianus
gctaaatctgcatctgctcgtggct

SEQ ID NO: 54888 - DNA, 25 bp, Saccharomyces pastorianus
tccagctaaatctgcatctgctcgt

SEQ ID NO: 54889 - DNA, 25 bp, Saccharomyces pastorianus
gagaaaccgctcaagccatcaatgg

SEQ ID NO: 54890 - DNA, 25 bp, Saccharomyces pastorianus
aatctgcatctgctcgtggctctta

SEQ ID NO: 54891 - DNA, 25 bp, Saccharomyces pastorianus
taaatctgcatctgctcgtggctct

SEQ ID NO: 54892 - DNA, 25 bp, Saccharomyces pastorianus
aaccaatccagctaaatctgcatct

SEQ ID NO: 54893 - DNA, 25 bp, Saccharomyces pastorianus
aactcctctattggtagaaccgctc

SEQ ID NO: 54894 - DNA, 25 bp, Saccharomyces pastorianus
tgcatctgctcgtggctcttacttg

SEQ ID NO: 54895 - DNA, 25 bp, Saccharomyces pastorianus
atctgctcgtggctcttacttgcgt

SEQ ID NO: 54896 - DNA, 25 bp, Saccharomyces pastorianus
atccagctaaatctgcatctgctcg

SEQ ID NO: 54897 - DNA, 25 bp, Saccharomyces pastorianus
gatacggtgctacttcaaccaatcc

SEQ ID NO: 54898 - DNA, 25 bp, Saccharomyces pastorianus
gctaaatctgcatctgctcgtggct

SEQ ID NO: 54899 - DNA, 25 bp, Saccharomyces pastorianus
acttcatcgaaatccaacggtattt

SEQ ID NO: 54900 - DNA, 25 bp, Saccharomyces pastorianus
gatgacactacttttggtcaaactg

SEQ ID NO: 54901 - DNA, 25 bp, Saccharomyces pastorianus
gctgctattcctcaagacgaaacct

SEQ ID NO: 54902 - DNA, 25 bp, Saccharomyces pastorianus
ctgcagacgctgttaatgagttgtt

SEQ ID NO: 54903 - DNA, 25 bp, Saccharomyces pastorianus
gagttgttagctgctattcctcaag

SEQ ID NO: 54904 - DNA, 25 bp, Saccharomyces pastorianus
gatgcaaaacggtgtatggtattac

SEQ ID NO: 54905 - DNA, 25 bp, Saccharomyces pastorianus
ggtcaaactgtttctgcagacgctg

SEQ ID NO: 54906 - DNA, 25 bp, Saccharomyces pastorianus
gacgaaacctactcttctcaattaa

SEQ ID NO: 54907 - DNA, 25 bp, Saccharomyces pastorianus
aatgagtatttctgctacggctcct

SEQ ID NO: 54908 - DNA, 25 bp, Saccharomyces pastorianus
gtgggaatgttgtctcttttatctc

SEQ ID NO: 54909 - DNA, 25 bp, Saccharomyces pastorianus
tacggctcctactacttcatcgaaa

SEQ ID NO: 54910 - DNA, 25 bp, Saccharomyces pastorianus
ctgttcatttccgtggtccattaaa

SEQ ID NO: 54911 - DNA, 25 bp, Saccharomyces pastorianus
agaagctcttccgattggagccgtt

SEQ ID NO: 54912 - DNA, 25 bp, Saccharomyces pastorianus
aagcgggcctcagtcgtatcagaag

SEQ ID NO: 54913 - DNA, 25 bp, Saccharomyces pastorianus
gccccattggctgaatacttgtctg

SEQ ID NO: 54914 - DNA, 25 bp, Saccharomyces pastorianus
agcttattatgggttcggcggtaca

SEQ ID NO: 54915 - DNA, 25 bp, Saccharomyces pastorianus
ataatctactctaacgtttcgtgtc

SEQ ID NO: 54916 - DNA, 25 bp, Saccharomyces pastorianus
aatgctttgtcgtatgctagttcca

SEQ ID NO: 54917 - DNA, 25 bp, Saccharomyces pastorianus
gtgtctgttacacacagtcgctgca

SEQ ID NO: 54918 - DNA, 25 bp, Saccharomyces pastorianus
tactatgactccagctcgaagacag

SEQ ID NO: 54919 - DNA, 25 bp, Saccharomyces pastorianus
atagtcctttccgtgtgtgtgtgtc

SEQ ID NO: 54920 - DNA, 25 bp, Saccharomyces pastorianus
tggttttctggtgtaaacgccccat

SEQ ID NO: 54921 - DNA, 25 bp, Saccharomyces pastorianus
gacgagtaccctggattctatgaac

SEQ ID NO: 54922 - DNA, 25 bp, Saccharomyces pastorianus
ttggcgacgcacgattcattacgta

SEQ ID NO: 54923 - DNA, 25 bp, Saccharomyces pastorianus
ggtggtacctgcaattttggcaacc

SEQ ID NO: 54924 - DNA, 25 bp, Saccharomyces pastorianus
gcttggcatcgtcatagattctgta

SEQ ID NO: 54925 - DNA, 25 bp, Saccharomyces pastorianus
gtggctcatgatatcttggcgacgc

SEQ ID NO: 54926 - DNA, 25 bp, Saccharomyces pastorianus
taccaaggtttttcattttcggcat

SEQ ID NO: 54927 - DNA, 25 bp, Saccharomyces pastorianus
gtaccgctacgctttcctgaagaaa

SEQ ID NO: 54928 - DNA, 25 bp, Saccharomyces pastorianus
gaatctgcgctctttgcttggcatc

SEQ ID NO: 54929 - DNA, 25 bp, Saccharomyces pastorianus
gcatctatgcatccttggttaccaa

SEQ ID NO: 54930 - DNA, 25 bp, Saccharomyces pastorianus
aagtttccgcgactggaatctgcgc

SEQ ID NO: 54931 - DNA, 25 bp, Saccharomyces pastorianus
gctacaagagatccgcaccattcaa

SEQ ID NO: 54932 - DNA, 25 bp, Saccharomyces pastorianus
taaatcatcgggtggtgctctcgat

SEQ ID NO: 54933 - DNA, 25 bp, Saccharomyces pastorianus
tctttaaccttatgctttttctctt

SEQ ID NO: 54934 - DNA, 25 bp, Saccharomyces pastorianus
ggtgctctcgataaatcttttttca

SEQ ID NO: 54935 - DNA, 25 bp, Saccharomyces pastorianus
gctctcgataaatcttttttcaatt

SEQ ID NO: 54936 - DNA, 25 bp, Saccharomyces pastorianus
ttttcaattcctttgtggttaacat

SEQ ID NO: 54937 - DNA, 25 bp, Saccharomyces pastorianus
ttcctttgtggttaacattttcaca

SEQ ID NO: 54938 - DNA, 25 bp, Saccharomyces pastorianus
aatcatcgggtggtgctctcgataa

SEQ ID NO: 54939 - DNA, 25 bp, Saccharomyces pastorianus
ttctctttgcttaaatcatcgggtg

SEQ ID NO: 54940 - DNA, 25 bp, Saccharomyces pastorianus
gggtggtgctctcgataaatctttt

SEQ ID NO: 54941 - DNA, 25 bp, Saccharomyces pastorianus
catcgggtggtgctctcgataaatc

SEQ ID NO: 54942 - DNA, 25 bp, Saccharomyces pastorianus
gctttttctctttgcttaaatcatc

SEQ ID NO: 54943 - DNA, 25 bp, Saccharomyces pastorianus
atcctaattgatgccgatgccgaga

SEQ ID NO: 54944 - DNA, 25 bp, Saccharomyces pastorianus
aagacatcctaattgatgccgatgc

SEQ ID NO: 54945 - DNA, 25 bp, Saccharomyces pastorianus
gaagacatcctaattgatgccgatg

SEQ ID NO: 54946 - DNA, 25 bp, Saccharomyces pastorianus
acgtgtcagtttgatgatgttgaag

SEQ ID NO: 54947 - DNA, 25 bp, Saccharomyces pastorianus
taattgatgccgatgccgagatcga

SEQ ID NO: 54948 - DNA, 25 bp, Saccharomyces pastorianus
aattgatgccgatgccgagatcgat

SEQ ID NO: 54949 - DNA, 25 bp, Saccharomyces pastorianus
ctaattgatgccgatgccgagatcg

SEQ ID NO: 54950 - DNA, 25 bp, Saccharomyces pastorianus
gagaagacatcctaattgatgccga

SEQ ID NO: 54951 - DNA, 25 bp, Saccharomyces pastorianus
acatcctaattgatgccgatgccga

SEQ ID NO: 54952 - DNA, 25 bp, Saccharomyces pastorianus
gacatcctaattgatgccgatgccg

SEQ ID NO: 54953 - DNA, 25 bp, Saccharomyces pastorianus
gggagaagacatcctaattgatgcc

SEQ ID NO: 54954 - DNA, 25 bp, Saccharomyces pastorianus
aggtcttgcgtcatgcttgttatcc

SEQ ID NO: 54955 - DNA, 25 bp, Saccharomyces pastorianus
gtttttgccctcttacaagcattga

SEQ ID NO: 54956 - DNA, 25 bp, Saccharomyces pastorianus
gatggtcgtcatagcgctaagtctc

SEQ ID NO: 54957 - DNA, 25 bp, Saccharomyces pastorianus
ctcgttttactgatcgtgtcgccaa

SEQ ID NO: 54958 - DNA, 25 bp, Saccharomyces pastorianus
ggagcaatggccctagtcaggtctt

SEQ ID NO: 54959 - DNA, 25 bp, Saccharomyces pastorianus
gtatgccggcactagttctattttc

SEQ ID NO: 54960 - DNA, 25 bp, Saccharomyces pastorianus
gtgccgcggcatactgttatattac

SEQ ID NO: 54961 - DNA, 25 bp, Saccharomyces pastorianus
agcattgagtgcgttctgttcaccc

SEQ ID NO: 54962 - DNA, 25 bp, Saccharomyces pastorianus
atattccgtttctggcaagcattgt

SEQ ID NO: 54963 - DNA, 25 bp, Saccharomyces pastorianus
ttaaccccggcctattcatatatat

SEQ ID NO: 54964 - DNA, 25 bp, Saccharomyces pastorianus
aagtctccttgtcatgatccaattc

SEQ ID NO: 54965 - DNA, 25 bp, Saccharomyces pastorianus
gatgtctccggatgagatggactat

SEQ ID NO: 54966 - DNA, 25 bp, Saccharomyces pastorianus
aaacaacgcgtttgatgtctccgga

SEQ ID NO: 54967 - DNA, 25 bp, Saccharomyces pastorianus
gaagggataattaaccaagatggca

SEQ ID NO: 54968 - DNA, 25 bp, Saccharomyces pastorianus
agagttcgcccagcgttgccaagag

SEQ ID NO: 54969 - DNA, 25 bp, Saccharomyces pastorianus
atggactatttgttggaaacgacag

SEQ ID NO: 54970 - DNA, 25 bp, Saccharomyces pastorianus
gagttctggtgcttacgttgatgcc

SEQ ID NO: 54971 - DNA, 25 bp, Saccharomyces pastorianus
gaatctatcaggcagagttcgccca

SEQ ID NO: 54972 - DNA, 25 bp, Saccharomyces pastorianus
ccaagatggcattgagagttctggt

SEQ ID NO: 54973 - DNA, 25 bp, Saccharomyces pastorianus
gttgccaagagcattgacggaggaa

SEQ ID NO: 54974 - DNA, 25 bp, Saccharomyces pastorianus
gaaacgacaggaattaacgccttgg

SEQ ID NO: 54975 - DNA, 25 bp, Saccharomyces pastorianus
acgttgatgccaatgatagtacaca

SEQ ID NO: 54976 - DNA, 25 bp, Saccharomyces pastorianus
ggcacagcgtacaataccgttggaa

SEQ ID NO: 54977 - DNA, 25 bp, Saccharomyces pastorianus
gccagtgtgcaactttttaacctcc

SEQ ID NO: 54978 - DNA, 25 bp, Saccharomyces pastorianus
gtacttcagcggcacactaatggaa

SEQ ID NO: 54979 - DNA, 25 bp, Saccharomyces pastorianus
cgtccttacagcgtctcagagcaga

SEQ ID NO: 54980 - DNA, 25 bp, Saccharomyces pastorianus
acaaagtgagcgtttgtcccaaaca

SEQ ID NO: 54981 - DNA, 25 bp, Saccharomyces pastorianus
agagcagacacgtacttcagcggca

SEQ ID NO: 54982 - DNA, 25 bp, Saccharomyces pastorianus
aaagacctctttttcctcaagaatg

SEQ ID NO: 54983 - DNA, 25 bp, Saccharomyces pastorianus
gaatcgttggactcgatctatctcc

SEQ ID NO: 54984 - DNA, 25 bp, Saccharomyces pastorianus
gaattattccaagcgtccttacagc

SEQ ID NO: 54985 - DNA, 25 bp, Saccharomyces pastorianus
gatctatctccccaaaaaacctaag

SEQ ID NO: 54986 - DNA, 25 bp, Saccharomyces pastorianus
gaggtcccagacttcgctacaatga

SEQ ID NO: 54987 - DNA, 25 bp, Saccharomyces pastorianus
gaaccgatattagatagaactacat

SEQ ID NO: 54988 - DNA, 25 bp, Saccharomyces pastorianus
gtcccaggtattagaaccgatatta

SEQ ID NO: 54989 - DNA, 25 bp, Saccharomyces pastorianus
cccaggtattagaaccgatattaga

SEQ ID NO: 54990 - DNA, 25 bp, Saccharomyces pastorianus
atgtcccaggtattagaaccgatat

SEQ ID NO: 54991 - DNA, 25 bp, Saccharomyces pastorianus
gaactacatattactccatattagg

SEQ ID NO: 54992 - DNA, 25 bp, Saccharomyces pastorianus
acatattactccatattaggtctaa

SEQ ID NO: 54993 - DNA, 25 bp, Saccharomyces pastorianus
attaggtctaacatcgaatgccaca

SEQ ID NO: 54994 - DNA, 25 bp, Saccharomyces pastorianus
atattaggtctaacatcgaatgcca

SEQ ID NO: 54995 - DNA, 25 bp, Saccharomyces pastorianus
caggtattagaaccgatattagata

SEQ ID NO: 54996 - DNA, 25 bp, Saccharomyces pastorianus
tattactccatattaggtctaacat

SEQ ID NO: 54997 - DNA, 25 bp, Saccharomyces pastorianus
tactccatattaggtctaacatcga

SEQ ID NO: 54998 - DNA, 25 bp, Saccharomyces pastorianus
tgatggccaggtgcaagccactact

SEQ ID NO: 54999 - DNA, 25 bp, Saccharomyces pastorianus
ctatttatgctggtggctggtcaat

SEQ ID NO: 55000 - DNA, 25 bp, Saccharomyces pastorianus
gcaaggtactctagccattggtaat

SEQ ID NO: 55001 - DNA, 25 bp, Saccharomyces pastorianus
gcagtaagctcgacccttcaaagag

SEQ ID NO: 55002 - DNA, 25 bp, Saccharomyces pastorianus
caaaacttttacctcaactgcaact

SEQ ID NO: 55003 - DNA, 25 bp, Saccharomyces pastorianus
taggcgacggtcagttacaagtaac

SEQ ID NO: 55004 - DNA, 25 bp, Saccharomyces pastorianus
tgcagggtggtgtactcattgattc

SEQ ID NO: 55005 - DNA, 25 bp, Saccharomyces pastorianus
caaaagttgccttcggtagtgtcaa

SEQ ID NO: 55006 - DNA, 25 bp, Saccharomyces pastorianus
gtccggtactttctataatctctac

SEQ ID NO: 55007 - DNA, 25 bp, Saccharomyces pastorianus
aattggaggccagtgcagcccggtt

SEQ ID NO: 55008 - DNA, 25 bp, Saccharomyces pastorianus
ctccaccacaggctggtactattta

SEQ ID NO: 55009 - DNA, 25 bp, Saccharomyces pastorianus
aactacttcagccaagtctagcgcc

SEQ ID NO: 55010 - DNA, 25 bp, Saccharomyces pastorianus
tggtaacttagctatcggtgacaac

SEQ ID NO: 55011 - DNA, 25 bp, Saccharomyces pastorianus
taagaactcgggtactttggaaatg

SEQ ID NO: 55012 - DNA, 25 bp, Saccharomyces pastorianus
atcaccccagatggtaacttagcta

SEQ ID NO: 55013 - DNA, 25 bp, Saccharomyces pastorianus
ccgctgctgtatctcaaatcactga

SEQ ID NO: 55014 - DNA, 25 bp, Saccharomyces pastorianus
tgctgtttcctgtaagaactcgggt

SEQ ID NO: 55015 - DNA, 25 bp, Saccharomyces pastorianus
gtccaagctaccaccggtactgcta

SEQ ID NO: 55016 - DNA, 25 bp, Saccharomyces pastorianus
aaacctctactactcaagctgccag

SEQ ID NO: 55017 - DNA, 25 bp, Saccharomyces pastorianus
aagctgccagccaagtaagtgacgg

SEQ ID NO: 55018 - DNA, 25 bp, Saccharomyces pastorianus
tgaagcttcttctacctctactgac

SEQ ID NO: 55019 - DNA, 25 bp, Saccharomyces pastorianus
tactgacccagtcgatgctgtttcc

SEQ ID NO: 55020 - DNA, 25 bp, Saccharomyces pastorianus
gtttgtctggtactttctacaactt

SEQ ID NO: 55021 - DNA, 25 bp, Saccharomyces pastorianus
atgtttgtctggtactttctacaac

SEQ ID NO: 55022 - DNA, 25 bp, Saccharomyces pastorianus
gtactttctacaacttgtacgacga

SEQ ID NO: 55023 - DNA, 25 bp, Saccharomyces pastorianus
tctggtactttctacaacttgtacg

SEQ ID NO: 55024 - DNA, 25 bp, Saccharomyces pastorianus
ttgtctggtactttctacaacttgt

SEQ ID NO: 55025 - DNA, 25 bp, Saccharomyces pastorianus
tgtctggtactttctacaacttgta

SEQ ID NO: 55026 - DNA, 25 bp, Saccharomyces pastorianus
tgtttgtctggtactttctacaact

SEQ ID NO: 55027 - DNA, 25 bp, Saccharomyces pastorianus
tttgtctggtactttctacaacttg

SEQ ID NO: 55028 - DNA, 25 bp, Saccharomyces pastorianus
ttctacaacttgtacgacgaacaca

SEQ ID NO: 55029 - DNA, 25 bp, Saccharomyces pastorianus
gtctggtactttctacaacttgtac

SEQ ID NO: 55030 - DNA, 25 bp, Saccharomyces pastorianus
tggtactttctacaacttgtacgac

SEQ ID NO: 55031 - DNA, 25 bp, Saccharomyces pastorianus
ttcttcggtgcgatggcattgccta

SEQ ID NO: 55032 - DNA, 25 bp, Saccharomyces pastorianus
tctgtggaatgaccgcatgtaaaaa

SEQ ID NO: 55033 - DNA, 25 bp, Saccharomyces pastorianus
cttcgcatttgaaacttcttcggtg

SEQ ID NO: 55034 - DNA, 25 bp, Saccharomyces pastorianus
ttttctgtggaatgaccgcatgtaa

SEQ ID NO: 55035 - DNA, 25 bp, Saccharomyces pastorianus
aacttcttcggtgcgatggcattgc

SEQ ID NO: 55036 - DNA, 25 bp, Saccharomyces pastorianus
gtgcgatggcattgcctatttcctt

SEQ ID NO: 55037 - DNA, 25 bp, Saccharomyces pastorianus
gcatttgaaacttcttcggtgcgat

SEQ ID NO: 55038 - DNA, 25 bp, Saccharomyces pastorianus
gtatttttctgtggaatgaccgcat

SEQ ID NO: 55039 - DNA, 25 bp, Saccharomyces pastorianus
ttttcgggtatttttctgtggaatg

SEQ ID NO: 55040 - DNA, 25 bp, Saccharomyces pastorianus
gaaacttcttcggtgcgatggcatt

SEQ ID NO: 55041 - DNA, 25 bp, Saccharomyces pastorianus
tcggtgcgatggcattgcctatttc

SEQ ID NO: 55042 - DNA, 25 bp, Saccharomyces pastorianus
aagcaagataccttcgcatttgaaa

SEQ ID NO: 55043 - DNA, 25 bp, Saccharomyces pastorianus
tctgtggaatgaccgcatgtaaaaa

SEQ ID NO: 55044 - DNA, 25 bp, Saccharomyces pastorianus
cttcgcatttgaaacttcttcggtg

SEQ ID NO: 55045 - DNA, 25 bp, Saccharomyces pastorianus
ttttctgtggaatgaccgcatgtaa

SEQ ID NO: 55046 - DNA, 25 bp, Saccharomyces pastorianus
cattgcctatttccttttcgggtat

SEQ ID NO: 55047 - DNA, 25 bp, Saccharomyces pastorianus
gtgcgatggcattgcctatttcctt

SEQ ID NO: 55048 - DNA, 25 bp, Saccharomyces pastorianus
gcatttgaaacttcttcggtgcgat

SEQ ID NO: 55049 - DNA, 25 bp, Saccharomyces pastorianus
gtatttttctgtggaatgaccgcat

SEQ ID NO: 55050 - DNA, 25 bp, Saccharomyces pastorianus
tcttcggtgcgatggcattgcctat

SEQ ID NO: 55051 - DNA, 25 bp, Saccharomyces pastorianus
ttttcgggtatttttctgtggaatg

SEQ ID NO: 55052 - DNA, 25 bp, Saccharomyces pastorianus
gaaacttcttcggtgcgatggcatt

SEQ ID NO: 55053 - DNA, 25 bp, Saccharomyces pastorianus
gattccggtgcatggattttaacca

SEQ ID NO: 55054 - DNA, 25 bp, Saccharomyces pastorianus
agcgaatttgttgtggcatctccaa

SEQ ID NO: 55055 - DNA, 25 bp, Saccharomyces pastorianus
tgatcaccgattgtcagattttgct

SEQ ID NO: 55056 - DNA, 25 bp, Saccharomyces pastorianus
aaattccttgcctgatccaactttg

SEQ ID NO: 55057 - DNA, 25 bp, Saccharomyces pastorianus
taggtgcttctacacgttacacttc

SEQ ID NO: 55058 - DNA, 25 bp, Saccharomyces pastorianus
acacttctggccaactgaattctac

SEQ ID NO: 55059 - DNA, 25 bp, Saccharomyces pastorianus
aagttagaagatcggccaggtttag

SEQ ID NO: 55060 - DNA, 25 bp, Saccharomyces pastorianus
agaatccgacagataccccgatgat

SEQ ID NO: 55061 - DNA, 25 bp, Saccharomyces pastorianus
gaaagagccatcgttgatcaccgat

SEQ ID NO: 55062 - DNA, 25 bp, Saccharomyces pastorianus
gcaagtgctggagattccggtgcat

SEQ ID NO: 55063 - DNA, 25 bp, Saccharomyces pastorianus
tccaactccattatttgcaagtgct

SEQ ID NO: 55064 - DNA, 25 bp, Saccharomyces pastorianus
atccacaacgtttgcgaggactcgt

SEQ ID NO: 55065 - DNA, 25 bp, Saccharomyces pastorianus
ggagatctccaagagttcggtcatt

SEQ ID NO: 55066 - DNA, 25 bp, Saccharomyces pastorianus
gaagcccgtgggtgattccaaagtc

SEQ ID NO: 55067 - DNA, 25 bp, Saccharomyces pastorianus
tttgaccttcttgagctactggcta

SEQ ID NO: 55068 - DNA, 25 bp, Saccharomyces pastorianus
tccattgcctcttataaccatctag

SEQ ID NO: 55069 - DNA, 25 bp, Saccharomyces pastorianus
attgctaattggattgccttctctg

SEQ ID NO: 55070 - DNA, 25 bp, Saccharomyces pastorianus
aattcttggtggacgccggtatcaa

SEQ ID NO: 55071 - DNA, 25 bp, Saccharomyces pastorianus
gggtggccatagcagaatctccatc

SEQ ID NO: 55072 - DNA, 25 bp, Saccharomyces pastorianus
aagtctgtcttagcccaattcttgg

SEQ ID NO: 55073 - DNA, 25 bp, Saccharomyces pastorianus
gaggactcgttattggctacgccct

SEQ ID NO: 55074 - DNA, 25 bp, Saccharomyces pastorianus
gcaagttcgagagcttttatccggt

SEQ ID NO: 55075 - DNA, 25 bp, Saccharomyces pastorianus
agcgcttatgcgtttttgaccgatt

SEQ ID NO: 55076 - DNA, 25 bp, Saccharomyces pastorianus
gacatagagccacacagttgcttga

SEQ ID NO: 55077 - DNA, 25 bp, Saccharomyces pastorianus
atgagcttggctatttccattcacc

SEQ ID NO: 55078 - DNA, 25 bp, Saccharomyces pastorianus
tacgaagagaccataccgactttat

SEQ ID NO: 55079 - DNA, 25 bp, Saccharomyces pastorianus
aaggctcgaccaacgttgtagatgc

SEQ ID NO: 55080 - DNA, 25 bp, Saccharomyces pastorianus
gtgatttcccgtatgatccattcag

SEQ ID NO: 55081 - DNA, 25 bp, Saccharomyces pastorianus
aatgggagcggcaaacactttctaa

SEQ ID NO: 55082 - DNA, 25 bp, Saccharomyces pastorianus
aagtactatcctgttgtcgaggcaa

SEQ ID NO: 55083 - DNA, 25 bp, Saccharomyces pastorianus
ggcatctcacgcagtaaggctcgac

SEQ ID NO: 55084 - DNA, 25 bp, Saccharomyces pastorianus
gtgtccctgttactaaggccagacg

SEQ ID NO: 55085 - DNA, 25 bp, Saccharomyces pastorianus
gtcgaggcaaactccgattacaatt

SEQ ID NO: 55086 - DNA, 25 bp, Saccharomyces pastorianus
cccgctaccgctatatcatggacag

SEQ ID NO: 55087 - DNA, 25 bp, Saccharomyces pastorianus
accgctatatcatggacagcttatg

SEQ ID NO: 55088 - DNA, 25 bp, Saccharomyces pastorianus
cgctatatcatggacagcttatgaa

SEQ ID NO: 55089 - DNA, 25 bp, Saccharomyces pastorianus
cgctaccgctatatcatggacagct

SEQ ID NO: 55090 - DNA, 25 bp, Saccharomyces pastorianus
ccgctaccgctatatcatggacagc

SEQ ID NO: 55091 - DNA, 25 bp, Saccharomyces pastorianus
taccgctatatcatggacagcttat

SEQ ID NO: 55092 - DNA, 25 bp, Saccharomyces pastorianus
gctaccgctatatcatggacagctt

SEQ ID NO: 55093 - DNA, 25 bp, Saccharomyces pastorianus
ctaccgctatatcatggacagctta

SEQ ID NO: 55094 - DNA, 25 bp, Saccharomyces pastorianus
ccgctatatcatggacagcttatga

SEQ ID NO: 55095 - DNA, 25 bp, Saccharomyces pastorianus
gaaacacggtagaactgtccattcg

SEQ ID NO: 55096 - DNA, 25 bp, Saccharomyces pastorianus
acggtatcactgttacatttatggg

SEQ ID NO: 55097 - DNA, 25 bp, Saccharomyces pastorianus
atgacccctcatataatctccaaaa

SEQ ID NO: 55098 - DNA, 25 bp, Saccharomyces pastorianus
ttctcctccggaattaagattgcca

SEQ ID NO: 55099 - DNA, 25 bp, Saccharomyces pastorianus
gtagaaagcgccgaaatgacccctc

SEQ ID NO: 55100 - DNA, 25 bp, Saccharomyces pastorianus
cccacacaggccttcttagatttat

SEQ ID NO: 55101 - DNA, 25 bp, Saccharomyces pastorianus
agtcctgaagagtaccaacgtttga

SEQ ID NO: 55102 - DNA, 25 bp, Saccharomyces pastorianus
aatggttctcgtgaacatcccacac

SEQ ID NO: 55103 - DNA, 25 bp, Saccharomyces pastorianus
attgctgctaagtattctcctgttc

SEQ ID NO: 55104 - DNA, 25 bp, Saccharomyces pastorianus
gaaatgtcagttcatattgctgcta

SEQ ID NO: 55105 - DNA, 25 bp, Saccharomyces pastorianus
gtccattcgttatgccgtttgttga

SEQ ID NO: 55106 - DNA, 25 bp, Saccharomyces pastorianus
gaagccatccaaaaagccatcagat

SEQ ID NO: 55107 - DNA, 25 bp, Saccharomyces pastorianus
tcctcatcaatgaaatccgtcggtg

SEQ ID NO: 55108 - DNA, 25 bp, Saccharomyces pastorianus
ttatcacgttcttctgctttagcat

SEQ ID NO: 55109 - DNA, 25 bp, Saccharomyces pastorianus
gaagttgttcgtgacgcttatgata

SEQ ID NO: 55110 - DNA, 25 bp, Saccharomyces pastorianus
gttatccattggcttataccgcagc

SEQ ID NO: 55111 - DNA, 25 bp, Saccharomyces pastorianus
gtcgtagctccttctcaaactttat

SEQ ID NO: 55112 - DNA, 25 bp, Saccharomyces pastorianus
gaaatttaccagagtgtctaccgaa

SEQ ID NO: 55113 - DNA, 25 bp, Saccharomyces pastorianus
gcatctaaagctactggttatccat

SEQ ID NO: 55114 - DNA, 25 bp, Saccharomyces pastorianus
atatgctctaaatccagtctccaag

SEQ ID NO: 55115 - DNA, 25 bp, Saccharomyces pastorianus
tactggtgactccattgtcgtagct

SEQ ID NO: 55116 - DNA, 25 bp, Saccharomyces pastorianus
tcagatctacagagtacgccaacct

SEQ ID NO: 55117 - DNA, 25 bp, Saccharomyces pastorianus
tactccgccggatactaacgtcgta

SEQ ID NO: 55118 - DNA, 25 bp, Saccharomyces pastorianus
gaacgacggttctcaaaatgctgca

SEQ ID NO: 55119 - DNA, 25 bp, Saccharomyces pastorianus
gaacacacccttgttggatgacgaa

SEQ ID NO: 55120 - DNA, 25 bp, Saccharomyces pastorianus
atgctgcaagcaccgtcaacgatag

SEQ ID NO: 55121 - DNA, 25 bp, Saccharomyces pastorianus
aatagtccagcctctaccagtgaat

SEQ ID NO: 55122 - DNA, 25 bp, Saccharomyces pastorianus
ggaagcctcacgcaacgatatcgat

SEQ ID NO: 55123 - DNA, 25 bp, Saccharomyces pastorianus
aacgagtaccttgcttcgatacaga

SEQ ID NO: 55124 - DNA, 25 bp, Saccharomyces pastorianus
aacgtcgtacgagctgcatttctaa

SEQ ID NO: 55125 - DNA, 25 bp, Saccharomyces pastorianus
aaatgatgcggagggccaacctact

SEQ ID NO: 55126 - DNA, 25 bp, Saccharomyces pastorianus
aaatacctggacgttgctacaaatg

SEQ ID NO: 55127 - DNA, 25 bp, Saccharomyces pastorianus
atgggatcgtaccacatttggcgaa

SEQ ID NO: 55128 - DNA, 25 bp, Saccharomyces pastorianus
ttttgatcttaagccggcataccct

SEQ ID NO: 55129 - DNA, 25 bp, Saccharomyces pastorianus
gacgaattggtaaacttcctgaagc

SEQ ID NO: 55130 - DNA, 25 bp, Saccharomyces pastorianus
gggagatagctttccctattatgag

SEQ ID NO: 55131 - DNA, 25 bp, Saccharomyces pastorianus
gtctggttccataacgatggccacg

SEQ ID NO: 55132 - DNA, 25 bp, Saccharomyces pastorianus
agtgccttggcatttttgatcttaa

SEQ ID NO: 55133 - DNA, 25 bp, Saccharomyces pastorianus
ggtgctaggcgaaatacccgaacta

SEQ ID NO: 55134 - DNA, 25 bp, Saccharomyces pastorianus
ttcctgaagcaggtattctcaaggg

SEQ ID NO: 55135 - DNA, 25 bp, Saccharomyces pastorianus
tggccacgtttgtatcatggtgcta

SEQ ID NO: 55136 - DNA, 25 bp, Saccharomyces pastorianus
tgtcccagtggattcgtttatgtat

SEQ ID NO: 55137 - DNA, 25 bp, Saccharomyces pastorianus
gaaaccatgaggcatacctctcaat

SEQ ID NO: 55138 - DNA, 25 bp, Saccharomyces pastorianus
ggcataccctggacgttcagcacat

SEQ ID NO: 55139 - DNA, 25 bp, Saccharomyces pastorianus
agagacacaagctccaaggtgtaga

SEQ ID NO: 55140 - DNA, 25 bp, Saccharomyces pastorianus
cattcggtaaaggttctcgtatcaa

SEQ ID NO: 55141 - DNA, 25 bp, Saccharomyces pastorianus
ttgcttttcgccttgtattgaacaa

SEQ ID NO: 55142 - DNA, 25 bp, Saccharomyces pastorianus
gacactacgtcttatgaatttatca

SEQ ID NO: 55143 - DNA, 25 bp, Saccharomyces pastorianus
cacacctcatatttaacttttgcgt

SEQ ID NO: 55144 - DNA, 25 bp, Saccharomyces pastorianus
ggattccgtcattgccacagaagaa

SEQ ID NO: 55145 - DNA, 25 bp, Saccharomyces pastorianus
aaagttggcctgtgttgcttttcgc

SEQ ID NO: 55146 - DNA, 25 bp, Saccharomyces pastorianus
gtatttctggacttaccagcacctt

SEQ ID NO: 55147 - DNA, 25 bp, Saccharomyces pastorianus
tatacctcacctggattccgtcatt

SEQ ID NO: 55148 - DNA, 25 bp, Saccharomyces pastorianus
taccagcaccttgggatgctatacc

SEQ ID NO: 55149 - DNA, 25 bp, Saccharomyces pastorianus
tgagacagctgcctcattgaatgct

SEQ ID NO: 55150 - DNA, 25 bp, Saccharomyces pastorianus
gtggatgccgactctaaaaactcga

SEQ ID NO: 55151 - DNA, 25 bp, Saccharomyces pastorianus
tgtttatatccattctcccaattgc

SEQ ID NO: 55152 - DNA, 25 bp, Saccharomyces pastorianus
agaagtcttctgttgtggatgccga

SEQ ID NO: 55153 - DNA, 25 bp, Saccharomyces pastorianus
ggaaaacgccctcaagttattcaat

SEQ ID NO: 55154 - DNA, 25 bp, Saccharomyces pastorianus
agacgggctaagcttatcctttggg

SEQ ID NO: 55155 - DNA, 25 bp, Saccharomyces pastorianus
gaagctggcgatgacacgaatcaac

SEQ ID NO: 55156 - DNA, 25 bp, Saccharomyces pastorianus
gatgagattgttgaccctagcgaat

SEQ ID NO: 55157 - DNA, 25 bp, Saccharomyces pastorianus
tagcattcgctaacctggaaaacgc

SEQ ID NO: 55158 - DNA, 25 bp, Saccharomyces pastorianus
gagctccatcagcagtaacggcaat

SEQ ID NO: 55159 - DNA, 25 bp, Saccharomyces pastorianus
aagatcgcaaggtttcccagtgaaa

SEQ ID NO: 55160 - DNA, 25 bp, Saccharomyces pastorianus
aattggctagaaggctccatcgaaa

SEQ ID NO: 55161 - DNA, 25 bp, Saccharomyces pastorianus
gaactggtggtcttcctctgggtct

SEQ ID NO: 55162 - DNA, 25 bp, Saccharomyces pastorianus
agaggaagctccgttacatgaccca

SEQ ID NO: 55163 - DNA, 25 bp, Saccharomyces pastorianus
aattgcgtctatctcgaactggtgg

SEQ ID NO: 55164 - DNA, 25 bp, Saccharomyces pastorianus
ggcccgtagtgaactggctagtaag

SEQ ID NO: 55165 - DNA, 25 bp, Saccharomyces pastorianus
tcctctgggtctgccaaagtgacaa

SEQ ID NO: 55166 - DNA, 25 bp, Saccharomyces pastorianus
gagcaacttgagcttgactgacaaa

SEQ ID NO: 55167 - DNA, 25 bp, Saccharomyces pastorianus
aactgcagaacaagcttcccaaata

SEQ ID NO: 55168 - DNA, 25 bp, Saccharomyces pastorianus
gtcttgcacaagaacagctcgacct

SEQ ID NO: 55169 - DNA, 25 bp, Saccharomyces pastorianus
caggatggttctgattctgcagcag

SEQ ID NO: 55170 - DNA, 25 bp, Saccharomyces pastorianus
agctcgacctctcttcgaaaattag

SEQ ID NO: 55171 - DNA, 25 bp, Saccharomyces pastorianus
gaagaggtactacgaatccatttag

SEQ ID NO: 55172 - DNA, 25 bp, Saccharomyces pastorianus
gagccaagttccctcatttgaacat

SEQ ID NO: 55173 - DNA, 25 bp, Saccharomyces pastorianus
ttccgtggacgttttgttcgagcta

SEQ ID NO: 55174 - DNA, 25 bp, Saccharomyces pastorianus
taccagtgttttctctgcggctgat

SEQ ID NO: 55175 - DNA, 25 bp, Saccharomyces pastorianus
aaatgggtcgacgacttcgccaagt

SEQ ID NO: 55176 - DNA, 25 bp, Saccharomyces pastorianus
gccaagtgcggtgctgaccaattca

SEQ ID NO: 55177 - DNA, 25 bp, Saccharomyces pastorianus
gatcccttgtccttggtcaaacaga

SEQ ID NO: 55178 - DNA, 25 bp, Saccharomyces pastorianus
tgcggctgatccacacgatgttatc

SEQ ID NO: 55179 - DNA, 25 bp, Saccharomyces pastorianus
atcacattaggccaaccaatcgtca

SEQ ID NO: 55180 - DNA, 25 bp, Saccharomyces pastorianus
cggattggttgcacatcgatgtcat

SEQ ID NO: 55181 - DNA, 25 bp, Saccharomyces pastorianus
ggagaccattcctaaggctgccaaa

SEQ ID NO: 55182 - DNA, 25 bp, Saccharomyces pastorianus
aacgtcattgttgcaggtaccagtg

SEQ ID NO: 55183 - DNA, 25 bp, Saccharomyces pastorianus
gtgcggccaaaaccgtcgtcaaatg

SEQ ID NO: 55184 - DNA, 25 bp, Saccharomyces pastorianus
ataggctttgcaatttcgggcgtgc

SEQ ID NO: 55185 - DNA, 25 bp, Saccharomyces pastorianus
ggtttattatcgtcgacccattgat

SEQ ID NO: 55186 - DNA, 25 bp, Saccharomyces pastorianus
gtctgcgaatcgtggccatcaagag

SEQ ID NO: 55187 - DNA, 25 bp, Saccharomyces pastorianus
gtatatacatgggtcgcttcccgca

SEQ ID NO: 55188 - DNA, 25 bp, Saccharomyces pastorianus
gcagcagcggaatcatccttggtat

SEQ ID NO: 55189 - DNA, 25 bp, Saccharomyces pastorianus
gatccgacattctgtatcaactgta

SEQ ID NO: 55190 - DNA, 25 bp, Saccharomyces pastorianus
ttcttctcgtccagttttgttgatc

SEQ ID NO: 55191 - DNA, 25 bp, Saccharomyces pastorianus
ggcgcacagcatatatactctagga

SEQ ID NO: 55192 - DNA, 25 bp, Saccharomyces pastorianus
ttggtatgatctgccgctgtcggaa

SEQ ID NO: 55193 - DNA, 25 bp, Saccharomyces pastorianus
atggaggtccaaatgatcgccgttc

SEQ ID NO: 55194 - DNA, 25 bp, Saccharomyces pastorianus
aggcgcgtttgatatgcgagaaaaa

SEQ ID NO: 55195 - DNA, 25 bp, Saccharomyces pastorianus
gcgcgtttgatatgcgagaaaaaaa

SEQ ID NO: 55196 - DNA, 25 bp, Saccharomyces pastorianus
ataggcgcgtttgatatgcgagaaa

SEQ ID NO: 55197 - DNA, 25 bp, Saccharomyces pastorianus
aagataggcgcgtttgatatgcgag

SEQ ID NO: 55198 - DNA, 25 bp, Saccharomyces pastorianus
taagataggcgcgtttgatatgcga

SEQ ID NO: 55199 - DNA, 25 bp, Saccharomyces pastorianus
gataggcgcgtttgatatgcgagaa

SEQ ID NO: 55200 - DNA, 25 bp, Saccharomyces pastorianus
ggcgcgtttgatatgcgagaaaaaa

SEQ ID NO: 55201 - DNA, 25 bp, Saccharomyces pastorianus
cgcgtttgatatgcgagaaaaaaaa

SEQ ID NO: 55202 - DNA, 25 bp, Saccharomyces pastorianus
tgcgagaaaaaaaaactttacagag

SEQ ID NO: 55203 - DNA, 25 bp, Saccharomyces pastorianus
agataggcgcgtttgatatgcgaga

SEQ ID NO: 55204 - DNA, 25 bp, Saccharomyces pastorianus
taggcgcgtttgatatgcgagaaaa

SEQ ID NO: 55205 - DNA, 25 bp, Saccharomyces pastorianus
gagacagtttccagctgcaacaatg

SEQ ID NO: 55206 - DNA, 25 bp, Saccharomyces pastorianus
ttaccgcacctatcaatgctacttg

SEQ ID NO: 55207 - DNA, 25 bp, Saccharomyces pastorianus
ggtggtcatccaactgagagcctaa

SEQ ID NO: 55208 - DNA, 25 bp, Saccharomyces pastorianus
gtagcgcgaaaaccgatgccaccgt

SEQ ID NO: 55209 - DNA, 25 bp, Saccharomyces pastorianus
aatggaatagtctcaaccgccgcaa

SEQ ID NO: 55210 - DNA, 25 bp, Saccharomyces pastorianus
tatccttccatatggcgtctatcaa

SEQ ID NO: 55211 - DNA, 25 bp, Saccharomyces pastorianus
gccaccgtatctcattttaaaccgt

SEQ ID NO: 55212 - DNA, 25 bp, Saccharomyces pastorianus
cagccaattcttcagcgacgtttaa

SEQ ID NO: 55213 - DNA, 25 bp, Saccharomyces pastorianus
gcgactatcctttatccgctaaatt

SEQ ID NO: 55214 - DNA, 25 bp, Saccharomyces pastorianus
gagagcctaactggcgactatcctt

SEQ ID NO: 55215 - DNA, 25 bp, Saccharomyces pastorianus
aaatcagatccacgatgtcttcacc

SEQ ID NO: 55216 - DNA, 25 bp, Saccharomyces pastorianus
tcatgctacaacacttgacagctat

SEQ ID NO: 55217 - DNA, 25 bp, Saccharomyces pastorianus
gaaataatgtgttcgagtcaaattc

SEQ ID NO: 55218 - DNA, 25 bp, Saccharomyces pastorianus
gcatctcatgctacaacacttgaca

SEQ ID NO: 55219 - DNA, 25 bp, Saccharomyces pastorianus
gacagctatgacactaggaaaagaa

SEQ ID NO: 55220 - DNA, 25 bp, Saccharomyces pastorianus
acttgacagctatgacactaggaaa

SEQ ID NO: 55221 - DNA, 25 bp, Saccharomyces pastorianus
atggcatctcatgctacaacacttg

SEQ ID NO: 55222 - DNA, 25 bp, Saccharomyces pastorianus
attcaaatgaaaccctaacaatcca

SEQ ID NO: 55223 - DNA, 25 bp, Saccharomyces pastorianus
tacaacacttgacagctatgacact

SEQ ID NO: 55224 - DNA, 25 bp, Saccharomyces pastorianus
aacacttgacagctatgacactagg

SEQ ID NO: 55225 - DNA, 25 bp, Saccharomyces pastorianus
aatgtgttcgagtcaaattcaaatg

SEQ ID NO: 55226 - DNA, 25 bp, Saccharomyces pastorianus
gaaaccctaacaatccaaatcaaag

SEQ ID NO: 55227 - DNA, 25 bp, Saccharomyces pastorianus
gctagcgtttttcaagttcttcaat

SEQ ID NO: 55228 - DNA, 25 bp, Saccharomyces pastorianus
gaaagctggttggttcttcttccac

SEQ ID NO: 55229 - DNA, 25 bp, Saccharomyces pastorianus
ggcttcctgtacctcgactgaaaag

SEQ ID NO: 55230 - DNA, 25 bp, Saccharomyces pastorianus
tgtcgaacacatgaaggcttcctgt

SEQ ID NO: 55231 - DNA, 25 bp, Saccharomyces pastorianus
gagaggtatcatcacttcctacttc

SEQ ID NO: 55232 - DNA, 25 bp, Saccharomyces pastorianus
gagcccaccgatatcttattaaaga

SEQ ID NO: 55233 - DNA, 25 bp, Saccharomyces pastorianus
ggtgattaattctttgacctcctca

SEQ ID NO: 55234 - DNA, 25 bp, Saccharomyces pastorianus
gacctcctcattgaagtttgacaga

SEQ ID NO: 55235 - DNA, 25 bp, Saccharomyces pastorianus
taaggcaattggagctttagcgtct

SEQ ID NO: 55236 - DNA, 25 bp, Saccharomyces pastorianus
acttgttcctgttatagccgagctg

SEQ ID NO: 55237 - DNA, 25 bp, Saccharomyces pastorianus
cacgtatttgttagagcccaccgat

SEQ ID NO: 55238 - DNA, 25 bp, Saccharomyces pastorianus
gctgccatggaaactatgctctcga

SEQ ID NO: 55239 - DNA, 25 bp, Saccharomyces pastorianus
ttgctactgccttgcctttgaaaaa

SEQ ID NO: 55240 - DNA, 25 bp, Saccharomyces pastorianus
accatcttggttgtgtttgctactg

SEQ ID NO: 55241 - DNA, 25 bp, Saccharomyces pastorianus
aaccagctcgttccaattttacttg

SEQ ID NO: 55242 - DNA, 25 bp, Saccharomyces pastorianus
aatttctgccaaacttctagcttcg

SEQ ID NO: 55243 - DNA, 25 bp, Saccharomyces pastorianus
gtttgacagcaaattcggcacagca

SEQ ID NO: 55244 - DNA, 25 bp, Saccharomyces pastorianus
aagttcatcacctcctatactagag

SEQ ID NO: 55245 - DNA, 25 bp, Saccharomyces pastorianus
aaaccagcttctgttcacaacgtgc

SEQ ID NO: 55246 - DNA, 25 bp, Saccharomyces pastorianus
aaattgctgcacacaccatcttggt

SEQ ID NO: 55247 - DNA, 25 bp, Saccharomyces pastorianus
actcagcgcttgtcacaatctgtaa

SEQ ID NO: 55248 - DNA, 25 bp, Saccharomyces pastorianus
acagcatctgttatagcgttcctag

SEQ ID NO: 55249 - DNA, 25 bp, Saccharomyces pastorianus
agggctgacatattagtgtccgcta

SEQ ID NO: 55250 - DNA, 25 bp, Saccharomyces pastorianus
ggtgtattgcaatcgttacctctcg

SEQ ID NO: 55251 - DNA, 25 bp, Saccharomyces pastorianus
gttacctctcgatgctgaaattttt

SEQ ID NO: 55252 - DNA, 25 bp, Saccharomyces pastorianus
aagacttatcagtgtattcccttca

SEQ ID NO: 55253 - DNA, 25 bp, Saccharomyces pastorianus
gtgtccgctatcagaaattcgccat

SEQ ID NO: 55254 - DNA, 25 bp, Saccharomyces pastorianus
ctgaaaaacttttgtccactctgtt

SEQ ID NO: 55255 - DNA, 25 bp, Saccharomyces pastorianus
ttcctgtatgctaaacaccatcacc

SEQ ID NO: 55256 - DNA, 25 bp, Saccharomyces pastorianus
gaggtgtctcaactggctgaattac

SEQ ID NO: 55257 - DNA, 25 bp, Saccharomyces pastorianus
aattgggtctcttgctactttgagc

SEQ ID NO: 55258 - DNA, 25 bp, Saccharomyces pastorianus
agaccctggaccaagacggtggatt

SEQ ID NO: 55259 - DNA, 25 bp, Saccharomyces pastorianus
ggattaccagttttatacgcacaag

SEQ ID NO: 55260 - DNA, 25 bp, Saccharomyces pastorianus
tacgctatcatttactccttgtttt

SEQ ID NO: 55261 - DNA, 25 bp, Saccharomyces pastorianus
gccatgttacctgcaatctttgttc

SEQ ID NO: 55262 - DNA, 25 bp, Saccharomyces pastorianus
ttggctgcattcgttatcggtgtta

SEQ ID NO: 55263 - DNA, 25 bp, Saccharomyces pastorianus
gcttcccaaaactctttactttctg

SEQ ID NO: 55264 - DNA, 25 bp, Saccharomyces pastorianus
gtaatggaagtactgccacctccag

SEQ ID NO: 55265 - DNA, 25 bp, Saccharomyces pastorianus
atcttgcagtggttatgtcgtgaca

SEQ ID NO: 55266 - DNA, 25 bp, Saccharomyces pastorianus
gcggtccgtatgttttacgctatca

SEQ ID NO: 55267 - DNA, 25 bp, Saccharomyces pastorianus
gcaattgcccgttatggttttcata

SEQ ID NO: 55268 - DNA, 25 bp, Saccharomyces pastorianus
gtaggattatttgcctcatcgctct

SEQ ID NO: 55269 - DNA, 25 bp, Saccharomyces pastorianus
gaatttactgctgctttggctgcat

SEQ ID NO: 55270 - DNA, 25 bp, Saccharomyces pastorianus
ggtttcggtatcacgctgggctcag

SEQ ID NO: 55271 - DNA, 25 bp, Saccharomyces pastorianus
ggtgtattcatttcaaagtcttgtg

SEQ ID NO: 55272 - DNA, 25 bp, Saccharomyces pastorianus
tggataccctaccagatcttgacaa

SEQ ID NO: 55273 - DNA, 25 bp, Saccharomyces pastorianus
ctaaggaatcctatttgcgagttga

SEQ ID NO: 55274 - DNA, 25 bp, Saccharomyces pastorianus
gattatcgcttgatgggtacaacac

SEQ ID NO: 55275 - DNA, 25 bp, Saccharomyces pastorianus
taagaccgcttaacgaaaggccaag

SEQ ID NO: 55276 - DNA, 25 bp, Saccharomyces pastorianus
gacgaagttgtgaacctaacgtaga

SEQ ID NO: 55277 - DNA, 25 bp, Saccharomyces pastorianus
gccaaaactgccctataactaaaat

SEQ ID NO: 55278 - DNA, 25 bp, Saccharomyces pastorianus
gaatacctaggcgaaattgactttc

SEQ ID NO: 55279 - DNA, 25 bp, Saccharomyces pastorianus
aaaagtactatttcacccacactgg

SEQ ID NO: 55280 - DNA, 25 bp, Saccharomyces pastorianus
acccacactggcctttatttataga

SEQ ID NO: 55281 - DNA, 25 bp, Saccharomyces pastorianus
gggtcacgtttgtcttaatggctac

SEQ ID NO: 55282 - DNA, 25 bp, Saccharomyces pastorianus
aaagaagtgttttcggccatcattc

SEQ ID NO: 55283 - DNA, 25 bp, Saccharomyces pastorianus
gcctgttccagttttcttctatagt

SEQ ID NO: 55284 - DNA, 25 bp, Saccharomyces pastorianus
tggtccaacacctatgcatttgctt

SEQ ID NO: 55285 - DNA, 25 bp, Saccharomyces pastorianus
tagtgcgtgtatctgcggctcaagt

SEQ ID NO: 55286 - DNA, 25 bp, Saccharomyces pastorianus
aaagttctaaggtccaggccactca

SEQ ID NO: 55287 - DNA, 25 bp, Saccharomyces pastorianus
atagcagcggccgtagctctggcaa

SEQ ID NO: 55288 - DNA, 25 bp, Saccharomyces pastorianus
atatctcctcaatatatgcccgtga

SEQ ID NO: 55289 - DNA, 25 bp, Saccharomyces pastorianus
gcaaaacaccactaccattgactgt

SEQ ID NO: 55290 - DNA, 25 bp, Saccharomyces pastorianus
aaatgggagatcagcgcctgttcca

SEQ ID NO: 55291 - DNA, 25 bp, Saccharomyces pastorianus
atgcccgtgagaacattcaacccaa

SEQ ID NO: 55292 - DNA, 25 bp, Saccharomyces pastorianus
aacccaatggctacagctggtccaa

SEQ ID NO: 55293 - DNA, 25 bp, Saccharomyces pastorianus
actttcctttgtacgggtgctcaat

SEQ ID NO: 55294 - DNA, 25 bp, Saccharomyces pastorianus
ggaagctggccaactttcctttgta

SEQ ID NO: 55295 - DNA, 25 bp, Saccharomyces pastorianus
aagctcttgacgatttaccaaccaa

SEQ ID NO: 55296 - DNA, 25 bp, Saccharomyces pastorianus
aggcgattggactttaccgttagat

SEQ ID NO: 55297 - DNA, 25 bp, Saccharomyces pastorianus
agttctaccttacacactatcacag

SEQ ID NO: 55298 - DNA, 25 bp, Saccharomyces pastorianus
gatccatcccctaatatttctacag

SEQ ID NO: 55299 - DNA, 25 bp, Saccharomyces pastorianus
agaaccggttatggacttgagtctt

SEQ ID NO: 55300 - DNA, 25 bp, Saccharomyces pastorianus
gtattacaggatttgacaggcgcga

SEQ ID NO: 55301 - DNA, 25 bp, Saccharomyces pastorianus
agatgaatcttgtccgatatcttcg

SEQ ID NO: 55302 - DNA, 25 bp, Saccharomyces pastorianus
gaaacctaattctcaaagctcttga

SEQ ID NO: 55303 - DNA, 25 bp, Saccharomyces pastorianus
tgttcctcctgatatcagttctacc

SEQ ID NO: 55304 - DNA, 25 bp, Saccharomyces pastorianus
agaagacctttggaacgccacactg

SEQ ID NO: 55305 - DNA, 25 bp, Saccharomyces pastorianus
gattcgaccctgtcagttgtcaaga

SEQ ID NO: 55306 - DNA, 25 bp, Saccharomyces pastorianus
acagtagtagaccttctggccaaga

SEQ ID NO: 55307 - DNA, 25 bp, Saccharomyces pastorianus
acggttctgtgagcgttggctagat

SEQ ID NO: 55308 - DNA, 25 bp, Saccharomyces pastorianus
gaaattttgggcctgaccatgcttc

SEQ ID NO: 55309 - DNA, 25 bp, Saccharomyces pastorianus
gacgcctgccaaaataaccgacgaa

SEQ ID NO: 55310 - DNA, 25 bp, Saccharomyces pastorianus
acaaactttgcgaccagctgggaat

SEQ ID NO: 55311 - DNA, 25 bp, Saccharomyces pastorianus
gtgcgcagcaagattctcattctat

SEQ ID NO: 55312 - DNA, 25 bp, Saccharomyces pastorianus
gatgcggtagcctgtctcagaacaa

SEQ ID NO: 55313 - DNA, 25 bp, Saccharomyces pastorianus
ctcattctatccagcgtcggagatg

SEQ ID NO: 55314 - DNA, 25 bp, Saccharomyces pastorianus
catgcttcgcacttggcattgggag

SEQ ID NO: 55315 - DNA, 25 bp, Saccharomyces pastorianus
aggcgagttcgtcatgccaacagca

SEQ ID NO: 55316 - DNA, 25 bp, Saccharomyces pastorianus
aatcgcccatatttagtgacagagg

SEQ ID NO: 55317 - DNA, 25 bp, Saccharomyces pastorianus
cttacccattattccttcagaactt

SEQ ID NO: 55318 - DNA, 25 bp, Saccharomyces pastorianus
gttcccgcaactacaaactcgttga

SEQ ID NO: 55319 - DNA, 25 bp, Saccharomyces pastorianus
gtgttcaggattcacaatcgcccat

SEQ ID NO: 55320 - DNA, 25 bp, Saccharomyces pastorianus
attgaaattcataaggccggtggcc

SEQ ID NO: 55321 - DNA, 25 bp, Saccharomyces pastorianus
gagggtgaccgggttattcttccat

SEQ ID NO: 55322 - DNA, 25 bp, Saccharomyces pastorianus
gccggtggccaggatgacacctata

SEQ ID NO: 55323 - DNA, 25 bp, Saccharomyces pastorianus
tatatttaggccacttacccattat

SEQ ID NO: 55324 - DNA, 25 bp, Saccharomyces pastorianus
gtaacgactataggttcccgcaact

SEQ ID NO: 55325 - DNA, 25 bp, Saccharomyces pastorianus
gatcatccgattgatacttcgctgt

SEQ ID NO: 55326 - DNA, 25 bp, Saccharomyces pastorianus
tggtctttgggatgcatagttctag

SEQ ID NO: 55327 - DNA, 25 bp, Saccharomyces pastorianus
gtaagcgtccatggtcgaacctaga

SEQ ID NO: 55328 - DNA, 25 bp, Saccharomyces pastorianus
acacatgttggacgaagctttttag

SEQ ID NO: 55329 - DNA, 25 bp, Saccharomyces pastorianus
tgcactctaaaggtattcttcacag

SEQ ID NO: 55330 - DNA, 25 bp, Saccharomyces pastorianus
aggcccactgcgactaaacttttgt

SEQ ID NO: 55331 - DNA, 25 bp, Saccharomyces pastorianus
gaaggtctggcatatttgcactcta

SEQ ID NO: 55332 - DNA, 25 bp, Saccharomyces pastorianus
acatgaccatgcgagggaccgtctt

SEQ ID NO: 55333 - DNA, 25 bp, Saccharomyces pastorianus
cgaacctagaagttgttgctgcaat

SEQ ID NO: 55334 - DNA, 25 bp, Saccharomyces pastorianus
aatcaaccaggctagcgaagtttat

SEQ ID NO: 55335 - DNA, 25 bp, Saccharomyces pastorianus
agcggacaatttgcttttggatcaa

SEQ ID NO: 55336 - DNA, 25 bp, Saccharomyces pastorianus
ttgggaagtccaaatctgctccgcc

SEQ ID NO: 55337 - DNA, 25 bp, Saccharomyces pastorianus
tatacctccagatatcctcaacaat

SEQ ID NO: 55338 - DNA, 25 bp, Saccharomyces pastorianus
atgcgccgccgttatctgaggacga

SEQ ID NO: 55339 - DNA, 25 bp, Saccharomyces pastorianus
tagctcctccgacgatattatatgg

SEQ ID NO: 55340 - DNA, 25 bp, Saccharomyces pastorianus
acgtctgcagccgacatatttgaag

SEQ ID NO: 55341 - DNA, 25 bp, Saccharomyces pastorianus
aatgacttttagaccatctccagaa

SEQ ID NO: 55342 - DNA, 25 bp, Saccharomyces pastorianus
gataatgattccacgcattctgatg

SEQ ID NO: 55343 - DNA, 25 bp, Saccharomyces pastorianus
attgctcatgaagctagcctagcga

SEQ ID NO: 55344 - DNA, 25 bp, Saccharomyces pastorianus
gtgataacaacgactctagctcctc

SEQ ID NO: 55345 - DNA, 25 bp, Saccharomyces pastorianus
tttcccagggctaacctcgataagc

SEQ ID NO: 55346 - DNA, 25 bp, Saccharomyces pastorianus
agagttgtttcttccacgtctgcag

SEQ ID NO: 55347 - DNA, 25 bp, Saccharomyces pastorianus
taactgaaggaatagcctcccctac

SEQ ID NO: 55348 - DNA, 25 bp, Saccharomyces pastorianus
cacccctcaggtttccattaaatga

SEQ ID NO: 55349 - DNA, 25 bp, Saccharomyces pastorianus
tagaagagctggtcggcaacctggt

SEQ ID NO: 55350 - DNA, 25 bp, Saccharomyces pastorianus
agaattctggatatcgcccgacaca

SEQ ID NO: 55351 - DNA, 25 bp, Saccharomyces pastorianus
gaatacgcgctaggcgattctgaag

SEQ ID NO: 55352 - DNA, 25 bp, Saccharomyces pastorianus
aattacaccggatatgcctattgaa

SEQ ID NO: 55353 - DNA, 25 bp, Saccharomyces pastorianus
gtacattcgccaactgcatttgaga

SEQ ID NO: 55354 - DNA, 25 bp, Saccharomyces pastorianus
cttttcggattggtcgtacattcgc

SEQ ID NO: 55355 - DNA, 25 bp, Saccharomyces pastorianus
gaagagctatacaaggtcatcgcca

SEQ ID NO: 55356 - DNA, 25 bp, Saccharomyces pastorianus
agattacacgcttaccttttcggat

SEQ ID NO: 55357 - DNA, 25 bp, Saccharomyces pastorianus
tttggagtacgtttcttctgcagaa

SEQ ID NO: 55358 - DNA, 25 bp, Saccharomyces pastorianus
atgaacctcactttgcctttatgac

SEQ ID NO: 55359 - DNA, 25 bp, Saccharomyces pastorianus
gttggtcttccaatatcatccttat

SEQ ID NO: 55360 - DNA, 25 bp, Saccharomyces pastorianus
gaaagggtttcttcaatgctaacag

SEQ ID NO: 55361 - DNA, 25 bp, Saccharomyces pastorianus
ggtatcttatcattcttaggctatt

SEQ ID NO: 55362 - DNA, 25 bp, Saccharomyces pastorianus
aagccttctgcttggaaccgttgga

SEQ ID NO: 55363 - DNA, 25 bp, Saccharomyces pastorianus
tgtttattcattgctgtcgtttcag

SEQ ID NO: 55364 - DNA, 25 bp, Saccharomyces pastorianus
cattctcattagtcagttggtcttc

SEQ ID NO: 55365 - DNA, 25 bp, Saccharomyces pastorianus
ttaggctattgctcgatctttcttt

SEQ ID NO: 55366 - DNA, 25 bp, Saccharomyces pastorianus
ttacaatagacgcttcacccatggt

SEQ ID NO: 55367 - DNA, 25 bp, Saccharomyces pastorianus
aaccggcctttgtatatggagtgca

SEQ ID NO: 55368 - DNA, 25 bp, Saccharomyces pastorianus
gtttcacttttggttttgcttgcat

SEQ ID NO: 55369 - DNA, 25 bp, Saccharomyces pastorianus
ttcagtaactccattaaccggcctt

SEQ ID NO: 55370 - DNA, 25 bp, Saccharomyces pastorianus
gtagcgtggacaatcatatccttgg

SEQ ID NO: 55371 - DNA, 25 bp, Saccharomyces pastorianus
gatcaatgcctctatggccggaaat

SEQ ID NO: 55372 - DNA, 25 bp, Saccharomyces pastorianus
gagactcaccgtacgacaggaattg

SEQ ID NO: 55373 - DNA, 25 bp, Saccharomyces pastorianus
ggaatcgatcaaacttacccacaga

SEQ ID NO: 55374 - DNA, 25 bp, Saccharomyces pastorianus
tatccttggagccattaacccgcaa

SEQ ID NO: 55375 - DNA, 25 bp, Saccharomyces pastorianus
atccttcatcgtgggcatgtggctt

SEQ ID NO: 55376 - DNA, 25 bp, Saccharomyces pastorianus
tggataagccatcgagactcaccgt

SEQ ID NO: 55377 - DNA, 25 bp, Saccharomyces pastorianus
gcatgtggcttgtcgatcaatgcct

SEQ ID NO: 55378 - DNA, 25 bp, Saccharomyces pastorianus
cacattgctgataacgtcctggata

SEQ ID NO: 55379 - DNA, 25 bp, Saccharomyces pastorianus
tggcccactctcactaatgaagaca

SEQ ID NO: 55380 - DNA, 25 bp, Saccharomyces pastorianus
aacaggtacctgtatctacgcctgc

SEQ ID NO: 55381 - DNA, 25 bp, Saccharomyces pastorianus
aaaaggccttctgatgtgtcatccg

SEQ ID NO: 55382 - DNA, 25 bp, Saccharomyces pastorianus
aagcgttgacgaggtgcttcctcca

SEQ ID NO: 55383 - DNA, 25 bp, Saccharomyces pastorianus
gtcgtcttctttcatttccgatgaa

SEQ ID NO: 55384 - DNA, 25 bp, Saccharomyces pastorianus
gcgagaatcggactacactgcaatg

SEQ ID NO: 55385 - DNA, 25 bp, Saccharomyces pastorianus
atcgcatgatatttccgagcgctcg

SEQ ID NO: 55386 - DNA, 25 bp, Saccharomyces pastorianus
ggaaaagccctctgaaacctcacag

SEQ ID NO: 55387 - DNA, 25 bp, Saccharomyces pastorianus
tagtctcgcatccagggtctcggaa

SEQ ID NO: 55388 - DNA, 25 bp, Saccharomyces pastorianus
gcactctgcctgatctaataccaag

SEQ ID NO: 55389 - DNA, 25 bp, Saccharomyces pastorianus
agagctctccgtttcttcctatagt

SEQ ID NO: 55390 - DNA, 25 bp, Saccharomyces pastorianus
gccaaggcttaagaccaggctttta

SEQ ID NO: 55391 - DNA, 25 bp, Saccharomyces pastorianus
gtatcttactctacttctctgtcat

SEQ ID NO: 55392 - DNA, 25 bp, Saccharomyces pastorianus
gcatatccagctgctctttacgaaa

SEQ ID NO: 55393 - DNA, 25 bp, Saccharomyces pastorianus
gagtatcataatcctgccatcgact

SEQ ID NO: 55394 - DNA, 25 bp, Saccharomyces pastorianus
tcctgtccatgaactatcctatttc

SEQ ID NO: 55395 - DNA, 25 bp, Saccharomyces pastorianus
agggcccaaaattacgctgctgatt

SEQ ID NO: 55396 - DNA, 25 bp, Saccharomyces pastorianus
attcaatagcaacatctcctgtcca

SEQ ID NO: 55397 - DNA, 25 bp, Saccharomyces pastorianus
aacctattactatccctgactttga

SEQ ID NO: 55398 - DNA, 25 bp, Saccharomyces pastorianus
gcgatgccgaaaaaggcctggcctt

SEQ ID NO: 55399 - DNA, 25 bp, Saccharomyces pastorianus
aggcctggccttgttagacgaaatt

SEQ ID NO: 55400 - DNA, 25 bp, Saccharomyces pastorianus
gaagctgaacctgaaagaaccacta

SEQ ID NO: 55401 - DNA, 25 bp, Saccharomyces pastorianus
atcgactccgaagatcctgatcaag

SEQ ID NO: 55402 - DNA, 25 bp, Saccharomyces pastorianus
tttgacgcaccatctctgttaggaa

SEQ ID NO: 55403 - DNA, 25 bp, Saccharomyces pastorianus
caacgccggcacaggaataaccagt

SEQ ID NO: 55404 - DNA, 25 bp, Saccharomyces pastorianus
aaactgcttcatcttgctctactac

SEQ ID NO: 55405 - DNA, 25 bp, Saccharomyces pastorianus
gcactgggatcaagcaacctgctag

SEQ ID NO: 55406 - DNA, 25 bp, Saccharomyces pastorianus
gccaaatccaattcgtaccacaacg

SEQ ID NO: 55407 - DNA, 25 bp, Saccharomyces pastorianus
gaagtaaccacttctcgttccgtgg

SEQ ID NO: 55408 - DNA, 25 bp, Saccharomyces pastorianus
aaactaattcttctaccatctacac

SEQ ID NO: 55409 - DNA, 25 bp, Saccharomyces pastorianus
aaacggtcacatcgtatgccaagac

SEQ ID NO: 55410 - DNA, 25 bp, Saccharomyces pastorianus
taaagctagcgttgtcaccacatct

SEQ ID NO: 55411 - DNA, 25 bp, Saccharomyces pastorianus
ccaccaccgcaaaattatcttcata

SEQ ID NO: 55412 - DNA, 25 bp, Saccharomyces pastorianus
tctacaccaactctaatgcagcaac

SEQ ID NO: 55413 - DNA, 25 bp, Saccharomyces pastorianus
agtggcaacaacattcgttcaacca

SEQ ID NO: 55414 - DNA, 25 bp, Saccharomyces pastorianus
gcccaaagttgcctcgagtagtgac

SEQ ID NO: 55415 - DNA, 25 bp, Saccharomyces pastorianus
aagaaaggtacgtccatccctgagt

SEQ ID NO: 55416 - DNA, 25 bp, Saccharomyces pastorianus
agagagccggttaggtcttcgtctt

SEQ ID NO: 55417 - DNA, 25 bp, Saccharomyces pastorianus
gagtctggctcggattctaatagtg

SEQ ID NO: 55418 - DNA, 25 bp, Saccharomyces pastorianus
tctagtattcttcacgatcttccaa

SEQ ID NO: 55419 - DNA, 25 bp, Saccharomyces pastorianus
gagttcgttatctgacctcgtctca

SEQ ID NO: 55420 - DNA, 25 bp, Saccharomyces pastorianus
ttaatggatatgtcctctccaccat

SEQ ID NO: 55421 - DNA, 25 bp, Saccharomyces pastorianus
attgacgcagtaactccatcgttga

SEQ ID NO: 55422 - DNA, 25 bp, Saccharomyces pastorianus
aaatctgccagtgctgctctaggta

SEQ ID NO: 55423 - DNA, 25 bp, Saccharomyces pastorianus
ttcaggttcagactccagctcggat

SEQ ID NO: 55424 - DNA, 25 bp, Saccharomyces pastorianus
gaatcgagccctagttcaggttcag

SEQ ID NO: 55425 - DNA, 25 bp, Saccharomyces pastorianus
atgcccttgcggacgatgacgatga

SEQ ID NO: 55426 - DNA, 25 bp, Saccharomyces pastorianus
aaaggtagtgtcgttccgctgacgg

SEQ ID NO: 55427 - DNA, 25 bp, Saccharomyces pastorianus
gcaaagccatacactactgtcttga

SEQ ID NO: 55428 - DNA, 25 bp, Saccharomyces pastorianus
ggtgaagatcttccgcaatggttta

SEQ ID NO: 55429 - DNA, 25 bp, Saccharomyces pastorianus
gaagaggcagataccaccgttcgta

SEQ ID NO: 55430 - DNA, 25 bp, Saccharomyces pastorianus
caagttcagcaggatctacggacga

SEQ ID NO: 55431 - DNA, 25 bp, Saccharomyces pastorianus
aaaggcaatctgcacccttagctaa

SEQ ID NO: 55432 - DNA, 25 bp, Saccharomyces pastorianus
gaaccccaaggagcgcggctaaaag

SEQ ID NO: 55433 - DNA, 25 bp, Saccharomyces pastorianus
tagtacatcaggattccgactcctc

SEQ ID NO: 55434 - DNA, 25 bp, Saccharomyces pastorianus
gaggttcctgaaaaagccacacaag

SEQ ID NO: 55435 - DNA, 25 bp, Saccharomyces pastorianus
gggacatctctttgtactcattgaa

SEQ ID NO: 55436 - DNA, 25 bp, Saccharomyces pastorianus
ttgacgtctggaattccccttgaga

SEQ ID NO: 55437 - DNA, 25 bp, Saccharomyces pastorianus
atccgagctggagtctgaacctgaa

SEQ ID NO: 55438 - DNA, 25 bp, Saccharomyces pastorianus
gaattccccttgagacgaggtcaga

SEQ ID NO: 55439 - DNA, 25 bp, Saccharomyces pastorianus
aagctttttccgtctccagaagaat

SEQ ID NO: 55440 - DNA, 25 bp, Saccharomyces pastorianus
ttagagcttttttccttgacgtctg

SEQ ID NO: 55441 - DNA, 25 bp, Saccharomyces pastorianus
ctcgaggcaactttgggctgtggtt

SEQ ID NO: 55442 - DNA, 25 bp, Saccharomyces pastorianus
gaacctgaactagggctcgattcat

SEQ ID NO: 55443 - DNA, 25 bp, Saccharomyces pastorianus
gattcatcgtcactactcgaggcaa

SEQ ID NO: 55444 - DNA, 25 bp, Saccharomyces pastorianus
agccagactcagagccggaatccga

SEQ ID NO: 55445 - DNA, 25 bp, Saccharomyces pastorianus
gtggtttaccaatcgatttagagct

SEQ ID NO: 55446 - DNA, 25 bp, Saccharomyces pastorianus
aaccactattagaatccgagccaga

SEQ ID NO: 55447 - DNA, 25 bp, Saccharomyces pastorianus
ctaccgcatcttaagggctcattgg

SEQ ID NO: 55448 - DNA, 25 bp, Saccharomyces pastorianus
gcgactacgaaggtattgccattct

SEQ ID NO: 55449 - DNA, 25 bp, Saccharomyces pastorianus
aggaggcgagcctacaaccaacatc

SEQ ID NO: 55450 - DNA, 25 bp, Saccharomyces pastorianus
aactcagtttaactctatcggcctc

SEQ ID NO: 55451 - DNA, 25 bp, Saccharomyces pastorianus
tatcggcctccctgaggaattttat

SEQ ID NO: 55452 - DNA, 25 bp, Saccharomyces pastorianus
ttgctaggtctctggatgtccgcga

SEQ ID NO: 55453 - DNA, 25 bp, Saccharomyces pastorianus
gatgtccgcgactacttgaatagaa

SEQ ID NO: 55454 - DNA, 25 bp, Saccharomyces pastorianus
aatcatcgatcagagctttgctagg

SEQ ID NO: 55455 - DNA, 25 bp, Saccharomyces pastorianus
attctaacgtacgaaggctccgaag

SEQ ID NO: 55456 - DNA, 25 bp, Saccharomyces pastorianus
gataagtttgctgttctaccgcatc

SEQ ID NO: 55457 - DNA, 25 bp, Saccharomyces pastorianus
atagctacggtcattgttatcggcg

SEQ ID NO: 55458 - DNA, 25 bp, Saccharomyces pastorianus
aatactatgcatggcatctcgcgca

SEQ ID NO: 55459 - DNA, 25 bp, Saccharomyces pastorianus
agaaacaacactttgagctcctcca

SEQ ID NO: 55460 - DNA, 25 bp, Saccharomyces pastorianus
gcattgagattggtccacttgccct

SEQ ID NO: 55461 - DNA, 25 bp, Saccharomyces pastorianus
tggtggtaccactgctatttctcca

SEQ ID NO: 55462 - DNA, 25 bp, Saccharomyces pastorianus
agtgggttcgtcaacctgtacgaca

SEQ ID NO: 55463 - DNA, 25 bp, Saccharomyces pastorianus
atctcgcgcagtcaaggatgcattg

SEQ ID NO: 55464 - DNA, 25 bp, Saccharomyces pastorianus
acccattgctgcgttagaccaacta

SEQ ID NO: 55465 - DNA, 25 bp, Saccharomyces pastorianus
tattttgcatgctacctcagggtta

SEQ ID NO: 55466 - DNA, 25 bp, Saccharomyces pastorianus
acggcatcatcctcttacaaggtaa

SEQ ID NO: 55467 - DNA, 25 bp, Saccharomyces pastorianus
taacgactaccatttcgagtttaca

SEQ ID NO: 55468 - DNA, 25 bp, Saccharomyces pastorianus
agactaaatctacccacggcatcat

SEQ ID NO: 55469 - DNA, 25 bp, Saccharomyces pastorianus
gaacaactcgaacaagtcctttgtc

SEQ ID NO: 55470 - DNA, 25 bp, Saccharomyces pastorianus
gaacgcattctggtgagaaacctta

SEQ ID NO: 55471 - DNA, 25 bp, Saccharomyces pastorianus
gaatcagcgcatttaacacgaggaa

SEQ ID NO: 55472 - DNA, 25 bp, Saccharomyces pastorianus
atgtttatggcatgactgtcaccgt

SEQ ID NO: 55473 - DNA, 25 bp, Saccharomyces pastorianus
cggcgaaaagcctctacaatgtaag

SEQ ID NO: 55474 - DNA, 25 bp, Saccharomyces pastorianus
ttgcccgaatcctcaaacacatgaa

SEQ ID NO: 55475 - DNA, 25 bp, Saccharomyces pastorianus
acattcatctggtttggcactatca

SEQ ID NO: 55476 - DNA, 25 bp, Saccharomyces pastorianus
ggttcagcataccagaacgcattct

SEQ ID NO: 55477 - DNA, 25 bp, Saccharomyces pastorianus
gagcaagcatatcaagacccataag

SEQ ID NO: 55478 - DNA, 25 bp, Saccharomyces pastorianus
aatgacacaaccaacacatcaccgt

SEQ ID NO: 55479 - DNA, 25 bp, Saccharomyces pastorianus
atgaccatttggaatcagcgcattt

SEQ ID NO: 55480 - DNA, 25 bp, Saccharomyces pastorianus
atactgcatttgcatccgatgctag

SEQ ID NO: 55481 - DNA, 25 bp, Saccharomyces pastorianus
aagagtacattgattgccagcattt

SEQ ID NO: 55482 - DNA, 25 bp, Saccharomyces pastorianus
taacaattcctctctggcgaaatat

SEQ ID NO: 55483 - DNA, 25 bp, Saccharomyces pastorianus
atggtaacgactacggccactgctg

SEQ ID NO: 55484 - DNA, 25 bp, Saccharomyces pastorianus
cagcggatagcggtggccatgccaa

SEQ ID NO: 55485 - DNA, 25 bp, Saccharomyces pastorianus
tcaccacagtgtggctgcggatgac

SEQ ID NO: 55486 - DNA, 25 bp, Saccharomyces pastorianus
gaagccctgggcataagcacggaag

SEQ ID NO: 55487 - DNA, 25 bp, Saccharomyces pastorianus
ggaaggaatagtccacggccacatc

SEQ ID NO: 55488 - DNA, 25 bp, Saccharomyces pastorianus
gaactaccataacaattcctctctg

SEQ ID NO: 55489 - DNA, 25 bp, Saccharomyces pastorianus
tgccagcattttgagtttttgaact

SEQ ID NO: 55490 - DNA, 25 bp, Saccharomyces pastorianus
ccgatgctagccatgcagcggatag

SEQ ID NO: 55491 - DNA, 25 bp, Saccharomyces pastorianus
tgtcgccgtatgagagtagcctaac

SEQ ID NO: 55492 - DNA, 25 bp, Saccharomyces pastorianus
cctaaacaacttccttactggtcat

SEQ ID NO: 55493 - DNA, 25 bp, Saccharomyces pastorianus
agcaagcacattattctacctccaa

SEQ ID NO: 55494 - DNA, 25 bp, Saccharomyces pastorianus
atcgactttagctacgtgcgtactt

SEQ ID NO: 55495 - DNA, 25 bp, Saccharomyces pastorianus
agggctcctcttctaacatgatgtc

SEQ ID NO: 55496 - DNA, 25 bp, Saccharomyces pastorianus
aagagccagttttggaaccgccaca

SEQ ID NO: 55497 - DNA, 25 bp, Saccharomyces pastorianus
gaacaacgccacgtgtacgctgaat

SEQ ID NO: 55498 - DNA, 25 bp, Saccharomyces pastorianus
ctcattatcaagtggctctgggcaa

SEQ ID NO: 55499 - DNA, 25 bp, Saccharomyces pastorianus
catgcttctccgaccaaatcattaa

SEQ ID NO: 55500 - DNA, 25 bp, Saccharomyces pastorianus
ggaaattcgcgtcgtgactctataa

SEQ ID NO: 55501 - DNA, 25 bp, Saccharomyces pastorianus
gccacaatctatacgctcattatca

SEQ ID NO: 55502 - DNA, 25 bp, Saccharomyces pastorianus
aaaggactacgttgaaagcttcaga

SEQ ID NO: 55503 - DNA, 25 bp, Saccharomyces pastorianus
gaaattgcagcaaagatcgctaaga

SEQ ID NO: 55504 - DNA, 25 bp, Saccharomyces pastorianus
gaagatggaagctgtcttgaaatta

SEQ ID NO: 55505 - DNA, 25 bp, Saccharomyces pastorianus
gaaagcttcagacatgaactaatgg

SEQ ID NO: 55506 - DNA, 25 bp, Saccharomyces pastorianus
gagctggtagacgtcgccaatacca

SEQ ID NO: 55507 - DNA, 25 bp, Saccharomyces pastorianus
ggtagacgtcgccaataccattggt

SEQ ID NO: 55508 - DNA, 25 bp, Saccharomyces pastorianus
ggagctacttttacgcaaatctgta

SEQ ID NO: 55509 - DNA, 25 bp, Saccharomyces pastorianus
taccattggtaactcttcacttaag

SEQ ID NO: 55510 - DNA, 25 bp, Saccharomyces pastorianus
tagaggagctacttttacgcaaatc

SEQ ID NO: 55511 - DNA, 25 bp, Saccharomyces pastorianus
gatcgctaagataatgaaggattct

SEQ ID NO: 55512 - DNA, 25 bp, Saccharomyces pastorianus
tttacgaatggtgtagaggagctac

SEQ ID NO: 55513 - DNA, 25 bp, Saccharomyces pastorianus
tcagctacgaccgtctattcgagac

SEQ ID NO: 55514 - DNA, 25 bp, Saccharomyces pastorianus
tcctgcgagacaagttcataaccaa

SEQ ID NO: 55515 - DNA, 25 bp, Saccharomyces pastorianus
tggccaaactcctgcgagacaagtt

SEQ ID NO: 55516 - DNA, 25 bp, Saccharomyces pastorianus
aaaggcttcagcgttggcgagttca

SEQ ID NO: 55517 - DNA, 25 bp, Saccharomyces pastorianus
ttcgagacggtcaagcaacaaataa

SEQ ID NO: 55518 - DNA, 25 bp, Saccharomyces pastorianus
gcgagttcagggacgccctggccaa

SEQ ID NO: 55519 - DNA, 25 bp, Saccharomyces pastorianus
ggactcagctacgaccgtctattcg

SEQ ID NO: 55520 - DNA, 25 bp, Saccharomyces pastorianus
aaggcttcagcgttggcgagttcag

SEQ ID NO: 55521 - DNA, 25 bp, Saccharomyces pastorianus
gtctattcgagacggtcaagcaaca

SEQ ID NO: 55522 - DNA, 25 bp, Saccharomyces pastorianus
gcaacaaataaaaggcttcagcgtt

SEQ ID NO: 55523 - DNA, 25 bp, Saccharomyces pastorianus
aaactcctgcgagacaagttcataa

SEQ ID NO: 55524 - DNA, 25 bp, Saccharomyces pastorianus
gctatctgacattcgaattgaccct

SEQ ID NO: 55525 - DNA, 25 bp, Saccharomyces pastorianus
attttccagcaatctaatgacgagc

SEQ ID NO: 55526 - DNA, 25 bp, Saccharomyces pastorianus
gaaggaactatacccgatgtggaat

SEQ ID NO: 55527 - DNA, 25 bp, Saccharomyces pastorianus
attatagttcgttcttcccacttat

SEQ ID NO: 55528 - DNA, 25 bp, Saccharomyces pastorianus
gaatttttatccagttttcaccagg

SEQ ID NO: 55529 - DNA, 25 bp, Saccharomyces pastorianus
aagtagttctttgcaccacgaggga

SEQ ID NO: 55530 - DNA, 25 bp, Saccharomyces pastorianus
gagaaacacctccatgcaaatcagc

SEQ ID NO: 55531 - DNA, 25 bp, Saccharomyces pastorianus
tgagaacttccaacctgatttgagg

SEQ ID NO: 55532 - DNA, 25 bp, Saccharomyces pastorianus
ttttccaaacctgcgtattgacttt

SEQ ID NO: 55533 - DNA, 25 bp, Saccharomyces pastorianus
gatagcaatcgcctgacatttcaga

SEQ ID NO: 55534 - DNA, 25 bp, Saccharomyces pastorianus
gacatttcagagcatctcagagcaa

SEQ ID NO: 55535 - DNA, 25 bp, Saccharomyces pastorianus
acgcctgtgacgaatctacaactat

SEQ ID NO: 55536 - DNA, 25 bp, Saccharomyces pastorianus
aaatatacccatttacgcctgtgac

SEQ ID NO: 55537 - DNA, 25 bp, Saccharomyces pastorianus
atccgatcccgaactgaaattagag

SEQ ID NO: 55538 - DNA, 25 bp, Saccharomyces pastorianus
gaaccctcatttcccagtaatatgg

SEQ ID NO: 55539 - DNA, 25 bp, Saccharomyces pastorianus
tggactagtgtctgaacgctttcaa

SEQ ID NO: 55540 - DNA, 25 bp, Saccharomyces pastorianus
atcagtcctggccaatttattggac

SEQ ID NO: 55541 - DNA, 25 bp, Saccharomyces pastorianus
aaacgtcggtacaatcagtcctggc

SEQ ID NO: 55542 - DNA, 25 bp, Saccharomyces pastorianus
gttcagtggtttgttagaaccctca

SEQ ID NO: 55543 - DNA, 25 bp, Saccharomyces pastorianus
gtttaaagttagtggcagcgcgtat

SEQ ID NO: 55544 - DNA, 25 bp, Saccharomyces pastorianus
ggtggttgaattcatccgatcccga

SEQ ID NO: 55545 - DNA, 25 bp, Saccharomyces pastorianus
aagtggcgtccaaagtgtcaagtcc

SEQ ID NO: 55546 - DNA, 25 bp, Saccharomyces pastorianus
tgaagagcctggtgccggcatacta

SEQ ID NO: 55547 - DNA, 25 bp, Saccharomyces pastorianus
aaggtgcgacagcatggtacccgtc

SEQ ID NO: 55548 - DNA, 25 bp, Saccharomyces pastorianus
aacacagactttgtcagcgggcgcg

SEQ ID NO: 55549 - DNA, 25 bp, Saccharomyces pastorianus
gctgcagctgctatggacgtcgtcg

SEQ ID NO: 55550 - DNA, 25 bp, Saccharomyces pastorianus
atagtagcatgcacgactggtcgcg

SEQ ID NO: 55551 - DNA, 25 bp, Saccharomyces pastorianus
gactgtctggcgctcatcgaaaggt

SEQ ID NO: 55552 - DNA, 25 bp, Saccharomyces pastorianus
gttgcgaacccgaccagtttcaagg

SEQ ID NO: 55553 - DNA, 25 bp, Saccharomyces pastorianus
tacgagttcgacttcagcaacgcaa

SEQ ID NO: 55554 - DNA, 25 bp, Saccharomyces pastorianus
gaaactgcttgccatggccatgact

SEQ ID NO: 55555 - DNA, 25 bp, Saccharomyces pastorianus
attggagctactacatgcggcggca

SEQ ID NO: 55556 - DNA, 25 bp, Saccharomyces pastorianus
ttatccccatgctgtatatcggcgg

SEQ ID NO: 55557 - DNA, 25 bp, Saccharomyces pastorianus
gcagggaaaccaatctgataaacaa

SEQ ID NO: 55558 - DNA, 25 bp, Saccharomyces pastorianus
aagaagacgctacccttcaagcgaa

SEQ ID NO: 55559 - DNA, 25 bp, Saccharomyces pastorianus
tattgacgaattgcatagccaggga

SEQ ID NO: 55560 - DNA, 25 bp, Saccharomyces pastorianus
gggatatcatttgcatcatattttc

SEQ ID NO: 55561 - DNA, 25 bp, Saccharomyces pastorianus
ctactatcttgggtgttattgacga

SEQ ID NO: 55562 - DNA, 25 bp, Saccharomyces pastorianus
agacgctacccttcaagcgaaggat

SEQ ID NO: 55563 - DNA, 25 bp, Saccharomyces pastorianus
tagccagggatatcatttgcatcat

SEQ ID NO: 55564 - DNA, 25 bp, Saccharomyces pastorianus
gctacccttcaagcgaaggatgcgc

SEQ ID NO: 55565 - DNA, 25 bp, Saccharomyces pastorianus
gacgaattgcatagccagggatatc

SEQ ID NO: 55566 - DNA, 25 bp, Saccharomyces pastorianus
atcttgggtgttattgacgaattgc

SEQ ID NO: 55567 - DNA, 25 bp, Saccharomyces pastorianus
acgtttctactatcttgggtgttat

SEQ ID NO: 55568 - DNA, 25 bp, Saccharomyces pastorianus
gccatttggcagtgcactagtcgaa

SEQ ID NO: 55569 - DNA, 25 bp, Saccharomyces pastorianus
gagggcccagctaatgatctacaag

SEQ ID NO: 55570 - DNA, 25 bp, Saccharomyces pastorianus
gaaaccacgaagctcattctcggca

SEQ ID NO: 55571 - DNA, 25 bp, Saccharomyces pastorianus
gttattgagttcatctatcctacaa

SEQ ID NO: 55572 - DNA, 25 bp, Saccharomyces pastorianus
gccgctcaatcccttgatagtgatc

SEQ ID NO: 55573 - DNA, 25 bp, Saccharomyces pastorianus
aataccaaccatgaagagggcccag

SEQ ID NO: 55574 - DNA, 25 bp, Saccharomyces pastorianus
ctacaagcccaagatcaagtcgata

SEQ ID NO: 55575 - DNA, 25 bp, Saccharomyces pastorianus
aaattcagaccacattgccctgatg

SEQ ID NO: 55576 - DNA, 25 bp, Saccharomyces pastorianus
caaagacattctaaatcgcgccgct

SEQ ID NO: 55577 - DNA, 25 bp, Saccharomyces pastorianus
gataacatatctcttacgaccgacc

SEQ ID NO: 55578 - DNA, 25 bp, Saccharomyces pastorianus
tcggcaaaccaaacagacgcaaatt

SEQ ID NO: 55579 - DNA, 25 bp, Saccharomyces pastorianus
gaaacaatctaattcggccgatgat

SEQ ID NO: 55580 - DNA, 25 bp, Saccharomyces pastorianus
ttactcttccctcttcaaggagagc

SEQ ID NO: 55581 - DNA, 25 bp, Saccharomyces pastorianus
gagagcccaaaagaaagcgctttct

SEQ ID NO: 55582 - DNA, 25 bp, Saccharomyces pastorianus
aaaggcatccatatcttccaaaggt

SEQ ID NO: 55583 - DNA, 25 bp, Saccharomyces pastorianus
tttatctccgtcaagcgtactaatc

SEQ ID NO: 55584 - DNA, 25 bp, Saccharomyces pastorianus
atgaggacgatgattttatctccgt

SEQ ID NO: 55585 - DNA, 25 bp, Saccharomyces pastorianus
aatgaagctgaactgccagccctta

SEQ ID NO: 55586 - DNA, 25 bp, Saccharomyces pastorianus
agaactgttgattactcacacggta

SEQ ID NO: 55587 - DNA, 25 bp, Saccharomyces pastorianus
gggcatcagtagcatacttaggaac

SEQ ID NO: 55588 - DNA, 25 bp, Saccharomyces pastorianus
aattcggccgatgatattactgaag

SEQ ID NO: 55589 - DNA, 25 bp, Saccharomyces pastorianus
ggtgaagctcatccagtttacgaac

SEQ ID NO: 55590 - DNA, 25 bp, Saccharomyces pastorianus
ggttgtccaaaatgattgcccagaa

SEQ ID NO: 55591 - DNA, 25 bp, Saccharomyces pastorianus
gtttaccgggtgctccaaagatcaa

SEQ ID NO: 55592 - DNA, 25 bp, Saccharomyces pastorianus
aggtatcgattttcctgcggttgaa

SEQ ID NO: 55593 - DNA, 25 bp, Saccharomyces pastorianus
gacttgccaacagaggagtttgcct

SEQ ID NO: 55594 - DNA, 25 bp, Saccharomyces pastorianus
tatttcatacgtgagatccatctat

SEQ ID NO: 55595 - DNA, 25 bp, Saccharomyces pastorianus
gtagacacatacatccatagagttg

SEQ ID NO: 55596 - DNA, 25 bp, Saccharomyces pastorianus
aaatgcagccaggtatctctttgat

SEQ ID NO: 55597 - DNA, 25 bp, Saccharomyces pastorianus
gaagaaatctatcaagccgcaatta

SEQ ID NO: 55598 - DNA, 25 bp, Saccharomyces pastorianus
gagtttgcctattcgcttggtttac

SEQ ID NO: 55599 - DNA, 25 bp, Saccharomyces pastorianus
caggaagattgagcccagtagacta

SEQ ID NO: 55600 - DNA, 25 bp, Saccharomyces pastorianus
ttttgctacagatgtcgtcgccaga

SEQ ID NO: 55601 - DNA, 25 bp, Saccharomyces pastorianus
attttgctttccagagaattcgatt

SEQ ID NO: 55602 - DNA, 25 bp, Saccharomyces pastorianus
aacaacatctttagacaccatatat

SEQ ID NO: 55603 - DNA, 25 bp, Saccharomyces pastorianus
acatctttagacaccatatattttg

SEQ ID NO: 55604 - DNA, 25 bp, Saccharomyces pastorianus
atattttgctttccagagaattcga

SEQ ID NO: 55605 - DNA, 25 bp, Saccharomyces pastorianus
ggactaacaacatctttagacacca

SEQ ID NO: 55606 - DNA, 25 bp, Saccharomyces pastorianus
acaccatatattttgctttccagag

SEQ ID NO: 55607 - DNA, 25 bp, Saccharomyces pastorianus
agacaccatatattttgctttccag

SEQ ID NO: 55608 - DNA, 25 bp, Saccharomyces pastorianus
gacaccatatattttgctttccaga

SEQ ID NO: 55609 - DNA, 25 bp, Saccharomyces pastorianus
tcttctaggactaacaacatcttta

SEQ ID NO: 55610 - DNA, 25 bp, Saccharomyces pastorianus
catatattttgctttccagagaatt

SEQ ID NO: 55611 - DNA, 25 bp, Saccharomyces pastorianus
accatatattttgctttccagagaa

SEQ ID NO: 55612 - DNA, 25 bp, Saccharomyces pastorianus
tctcgaattattccgcatggcacca

SEQ ID NO: 55613 - DNA, 25 bp, Saccharomyces pastorianus
atgatctggcagactgagctcgcag

SEQ ID NO: 55614 - DNA, 25 bp, Saccharomyces pastorianus
gctcgcagtcgtaaataagctactt

SEQ ID NO: 55615 - DNA, 25 bp, Saccharomyces pastorianus
aaattcgtccatgatctggcagact

SEQ ID NO: 55616 - DNA, 25 bp, Saccharomyces pastorianus
gacagaagtctcttatatcatcaac

SEQ ID NO: 55617 - DNA, 25 bp, Saccharomyces pastorianus
atcaacgccatgtttacagacgctg

SEQ ID NO: 55618 - DNA, 25 bp, Saccharomyces pastorianus
gaccaatccgtgtggttttacatta

SEQ ID NO: 55619 - DNA, 25 bp, Saccharomyces pastorianus
accatggctggcactatcgtagaat

SEQ ID NO: 55620 - DNA, 25 bp, Saccharomyces pastorianus
acagacgctgaagaccaatccgtgt

SEQ ID NO: 55621 - DNA, 25 bp, Saccharomyces pastorianus
gatgcaaggaactaccatggctggc

SEQ ID NO: 55622 - DNA, 25 bp, Saccharomyces pastorianus
caattgatggatgcggacccgttaa

SEQ ID NO: 55623 - DNA, 25 bp, Saccharomyces pastorianus
aatagtgtccactccgcaagtacaa

SEQ ID NO: 55624 - DNA, 25 bp, Saccharomyces pastorianus
gttcatcaagctactggtggcacct

SEQ ID NO: 55625 - DNA, 25 bp, Saccharomyces pastorianus
aaggaaattttccataccctgccag

SEQ ID NO: 55626 - DNA, 25 bp, Saccharomyces pastorianus
tgggacctggcattgtggagaaaac

SEQ ID NO: 55627 - DNA, 25 bp, Saccharomyces pastorianus
acgctgatccagcagtatggtcttt

SEQ ID NO: 55628 - DNA, 25 bp, Saccharomyces pastorianus
atggtcttttattcttgccttgaag

SEQ ID NO: 55629 - DNA, 25 bp, Saccharomyces pastorianus
gatccggcttggtctaaatttgtga

SEQ ID NO: 55630 - DNA, 25 bp, Saccharomyces pastorianus
aactgtggagtgcattcaacctgga

SEQ ID NO: 55631 - DNA, 25 bp, Saccharomyces pastorianus
tctggactctgctgacgactattac

SEQ ID NO: 55632 - DNA, 25 bp, Saccharomyces pastorianus
gagagcaactgcttcttgatctaga

SEQ ID NO: 55633 - DNA, 25 bp, Saccharomyces pastorianus
ataaggcacttctgggtcaattcga

SEQ ID NO: 55634 - DNA, 25 bp, Saccharomyces pastorianus
aaaggccggtgtcatgtccaagtcc

SEQ ID NO: 55635 - DNA, 25 bp, Saccharomyces pastorianus
aaagatacttcctagacgccttgcc

SEQ ID NO: 55636 - DNA, 25 bp, Saccharomyces pastorianus
gaattcttgttcaacgccatcgaca

SEQ ID NO: 55637 - DNA, 25 bp, Saccharomyces pastorianus
agacagactgttggtcgccttcggt

SEQ ID NO: 55638 - DNA, 25 bp, Saccharomyces pastorianus
agaaaatcgtcaccgaggccgtcga

SEQ ID NO: 55639 - DNA, 25 bp, Saccharomyces pastorianus
ggttgaccttctccaacgagttgat

SEQ ID NO: 55640 - DNA, 25 bp, Saccharomyces pastorianus
gatggatccaagacgcagacgcgct

SEQ ID NO: 55641 - DNA, 25 bp, Saccharomyces pastorianus
cagacgcgctgttcggtgaaagact

SEQ ID NO: 55642 - DNA, 25 bp, Saccharomyces pastorianus
gtgaaagactagtcgccttcgcgtc

SEQ ID NO: 55643 - DNA, 25 bp, Saccharomyces pastorianus
gtacgtcgagttcgtcgcagacaga

SEQ ID NO: 55644 - DNA, 25 bp, Saccharomyces pastorianus
gccagtcgccttgctaggtatgaat

SEQ ID NO: 55645 - DNA, 25 bp, Saccharomyces pastorianus
gtctctgcagatcaactcgttggag

SEQ ID NO: 55646 - DNA, 25 bp, Saccharomyces pastorianus
caactcgttggagaaggtcaacccg

SEQ ID NO: 55647 - DNA, 25 bp, Saccharomyces pastorianus
ggagaaggtcaacccgggcatcata

SEQ ID NO: 55648 - DNA, 25 bp, Saccharomyces pastorianus
gatcaactcgttggagaaggtcaac

SEQ ID NO: 55649 - DNA, 25 bp, Saccharomyces pastorianus
ttggagaaggtcaacccgggcatca

SEQ ID NO: 55650 - DNA, 25 bp, Saccharomyces pastorianus
gcagatcaactcgttggagaaggtc

SEQ ID NO: 55651 - DNA, 25 bp, Saccharomyces pastorianus
cgttggagaaggtcaacccgggcat

SEQ ID NO: 55652 - DNA, 25 bp, Saccharomyces pastorianus
ctctgcagatcaactcgttggagaa

SEQ ID NO: 55653 - DNA, 25 bp, Saccharomyces pastorianus
gaaggtcaacccgggcatcatacct

SEQ ID NO: 55654 - DNA, 25 bp, Saccharomyces pastorianus
accagaagatggaggcgaaggaccc

SEQ ID NO: 55655 - DNA, 25 bp, Saccharomyces pastorianus
cttcttcaaccagaagatggaggcg

SEQ ID NO: 55656 - DNA, 25 bp, Saccharomyces pastorianus
gtctctgcagatcaactcgttggag

SEQ ID NO: 55657 - DNA, 25 bp, Saccharomyces pastorianus
caactcgttggagaaggtcaacccg

SEQ ID NO: 55658 - DNA, 25 bp, Saccharomyces pastorianus
ggagaaggtcaacccgggcatcata

SEQ ID NO: 55659 - DNA, 25 bp, Saccharomyces pastorianus
ggcaaagtcggtgtgcaaaccttcg

SEQ ID NO: 55660 - DNA, 25 bp, Saccharomyces pastorianus
ttggagaaggtcaacccgggcatca

SEQ ID NO: 55661 - DNA, 25 bp, Saccharomyces pastorianus
gcagatcaactcgttggagaaggtc

SEQ ID NO: 55662 - DNA, 25 bp, Saccharomyces pastorianus
ctctgcagatcaactcgttggagaa

SEQ ID NO: 55663 - DNA, 25 bp, Saccharomyces pastorianus
gaaggtcaacccgggcatcatacct

SEQ ID NO: 55664 - DNA, 25 bp, Saccharomyces pastorianus
accagaagatggaggcgaaggaccc

SEQ ID NO: 55665 - DNA, 25 bp, Saccharomyces pastorianus
cttcttcaaccagaagatggaggcg

SEQ ID NO: 55666 - DNA, 25 bp, Saccharomyces pastorianus
ggtccggcttgttcttcaaatgggc

SEQ ID NO: 55667 - DNA, 25 bp, Saccharomyces pastorianus
gtcaagatatccatctgccgactag

SEQ ID NO: 55668 - DNA, 25 bp, Saccharomyces pastorianus
tagcatcgcaactttcagctgactt

SEQ ID NO: 55669 - DNA, 25 bp, Saccharomyces pastorianus
gacttctaacgactacttccaatgg

SEQ ID NO: 55670 - DNA, 25 bp, Saccharomyces pastorianus
ggtccgacgaagaaactctgcagtt

SEQ ID NO: 55671 - DNA, 25 bp, Saccharomyces pastorianus
tgacttcgccatttctgaacagcaa

SEQ ID NO: 55672 - DNA, 25 bp, Saccharomyces pastorianus
ttggaccccgacactaatcgtgatc

SEQ ID NO: 55673 - DNA, 25 bp, Saccharomyces pastorianus
aacagttcactttactactcgtcaa

SEQ ID NO: 55674 - DNA, 25 bp, Saccharomyces pastorianus
gtggtttacccagataagtcgactt

SEQ ID NO: 55675 - DNA, 25 bp, Saccharomyces pastorianus
gtacccgttgaaatggatcctcgaa

SEQ ID NO: 55676 - DNA, 25 bp, Saccharomyces pastorianus
aatcgtgatcatgaggccatcgact

SEQ ID NO: 55677 - DNA, 25 bp, Saccharomyces pastorianus
attaacccgccattcgacaacaagg

SEQ ID NO: 55678 - DNA, 25 bp, Saccharomyces pastorianus
gaatcagagttagccatattagact

SEQ ID NO: 55679 - DNA, 25 bp, Saccharomyces pastorianus
cgctacattgtatttcacttttatt

SEQ ID NO: 55680 - DNA, 25 bp, Saccharomyces pastorianus
gttagccatattagacttgattcaa

SEQ ID NO: 55681 - DNA, 25 bp, Saccharomyces pastorianus
aacaacgaggatattcagatcatct

SEQ ID NO: 55682 - DNA, 25 bp, Saccharomyces pastorianus
ggatattcagatcatcttcaaaaac

SEQ ID NO: 55683 - DNA, 25 bp, Saccharomyces pastorianus
ttcacttttattgtggacgaccaag

SEQ ID NO: 55684 - DNA, 25 bp, Saccharomyces pastorianus
gtaatagtgatgatgtaaacaacga

SEQ ID NO: 55685 - DNA, 25 bp, Saccharomyces pastorianus
agccatattagacttgattcaaact

SEQ ID NO: 55686 - DNA, 25 bp, Saccharomyces pastorianus
acgaggatattcagatcatcttcaa

SEQ ID NO: 55687 - DNA, 25 bp, Saccharomyces pastorianus
tgtggacgaccaagaatcagagtta

SEQ ID NO: 55688 - DNA, 25 bp, Saccharomyces pastorianus
aaaactacgctacattgtatttcac

SEQ ID NO: 55689 - DNA, 25 bp, Saccharomyces pastorianus
cacggtgtgcaccacttggaagcaa

SEQ ID NO: 55690 - DNA, 25 bp, Saccharomyces pastorianus
accaattccaggtgaacgctcgtga

SEQ ID NO: 55691 - DNA, 25 bp, Saccharomyces pastorianus
ggacgacgctaaagtgagccctatt

SEQ ID NO: 55692 - DNA, 25 bp, Saccharomyces pastorianus
aaaggtctcttgatcaggccattgc

SEQ ID NO: 55693 - DNA, 25 bp, Saccharomyces pastorianus
aatgggcatgtacaaccctacaagg

SEQ ID NO: 55694 - DNA, 25 bp, Saccharomyces pastorianus
gtcgaggttttctagctatttacaa

SEQ ID NO: 55695 - DNA, 25 bp, Saccharomyces pastorianus
gctcaggaagagattgcccatttaa

SEQ ID NO: 55696 - DNA, 25 bp, Saccharomyces pastorianus
tcagtcgattattttgctcaggaag

SEQ ID NO: 55697 - DNA, 25 bp, Saccharomyces pastorianus
gacaccgacgatacaatggcattga

SEQ ID NO: 55698 - DNA, 25 bp, Saccharomyces pastorianus
attgttcccttgatggactgtgcaa

SEQ ID NO: 55699 - DNA, 25 bp, Saccharomyces pastorianus
actgtgcaaggctttacgggcgtcc

SEQ ID NO: 55700 - DNA, 25 bp, Saccharomyces pastorianus
ttattagacgattcccctgttactg

SEQ ID NO: 55701 - DNA, 25 bp, Saccharomyces pastorianus
aagcgtgagagaccaaaaacctgaa

SEQ ID NO: 55702 - DNA, 25 bp, Saccharomyces pastorianus
aaatatctgccggtgagggatacat

SEQ ID NO: 55703 - DNA, 25 bp, Saccharomyces pastorianus
gaagcgaccctgtttatcatataat

SEQ ID NO: 55704 - DNA, 25 bp, Saccharomyces pastorianus
gtcccatgacacctaagaaccaaga

SEQ ID NO: 55705 - DNA, 25 bp, Saccharomyces pastorianus
cacgccggctaacaccaattttgga

SEQ ID NO: 55706 - DNA, 25 bp, Saccharomyces pastorianus
gagctgaaacaacaccaaataccct

SEQ ID NO: 55707 - DNA, 25 bp, Saccharomyces pastorianus
ggatacattaacagtcccatgacac

SEQ ID NO: 55708 - DNA, 25 bp, Saccharomyces pastorianus
ttggtttctaagacactgatcccct

SEQ ID NO: 55709 - DNA, 25 bp, Saccharomyces pastorianus
aatcatattccgtttcacaaagcag

SEQ ID NO: 55710 - DNA, 25 bp, Saccharomyces pastorianus
actgatcccctcataccaagaaaaa

SEQ ID NO: 55711 - DNA, 25 bp, Saccharomyces pastorianus
tggtttctgtgctcctaatcatatc

SEQ ID NO: 55712 - DNA, 25 bp, Saccharomyces pastorianus
tgctgccatgacaaatgctcctggt

SEQ ID NO: 55713 - DNA, 25 bp, Saccharomyces pastorianus
gtttcgactaccctattaacctatg

SEQ ID NO: 55714 - DNA, 25 bp, Saccharomyces pastorianus
taaggttggacctggcatggtttct

SEQ ID NO: 55715 - DNA, 25 bp, Saccharomyces pastorianus
aatgctcctggtaattcccttgata

SEQ ID NO: 55716 - DNA, 25 bp, Saccharomyces pastorianus
gattttactgggtggtgtttcgact

SEQ ID NO: 55717 - DNA, 25 bp, Saccharomyces pastorianus
gatcggctcaattgggttctttatg

SEQ ID NO: 55718 - DNA, 25 bp, Saccharomyces pastorianus
gtcttggttatccatctcgatttta

SEQ ID NO: 55719 - DNA, 25 bp, Saccharomyces pastorianus
gttctttatgacatctttggctgtg

SEQ ID NO: 55720 - DNA, 25 bp, Saccharomyces pastorianus
agaacatatctgtcttggttatcca

SEQ ID NO: 55721 - DNA, 25 bp, Saccharomyces pastorianus
tagcgttaattctgcttattatcaa

SEQ ID NO: 55722 - DNA, 25 bp, Saccharomyces pastorianus
ttttgaccactatttcaatggtgac

SEQ ID NO: 55723 - DNA, 25 bp, Saccharomyces pastorianus
tgaccactatttcaatggtgaccaa

SEQ ID NO: 55724 - DNA, 25 bp, Saccharomyces pastorianus
tatttcaatggtgaccaaatatcca

SEQ ID NO: 55725 - DNA, 25 bp, Saccharomyces pastorianus
atggtgaccaaatatccaaaatccc

SEQ ID NO: 55726 - DNA, 25 bp, Saccharomyces pastorianus
ccactatttcaatggtgaccaaata

SEQ ID NO: 55727 - DNA, 25 bp, Saccharomyces pastorianus
gaccactatttcaatggtgaccaaa

SEQ ID NO: 55728 - DNA, 25 bp, Saccharomyces pastorianus
tgttaccaaaaaatactatgaagtt

SEQ ID NO: 55729 - DNA, 25 bp, Saccharomyces pastorianus
ttgaccactatttcaatggtgacca

SEQ ID NO: 55730 - DNA, 25 bp, Saccharomyces pastorianus
tcaatggtgaccaaatatccaaaat

SEQ ID NO: 55731 - DNA, 25 bp, Saccharomyces pastorianus
tttgaccactatttcaatggtgacc

SEQ ID NO: 55732 - DNA, 25 bp, Saccharomyces pastorianus
aaaaaatactatgaagttgtggcat

SEQ ID NO: 55733 - DNA, 25 bp, Saccharomyces pastorianus
taatcatcttgatcccagtttcctg

SEQ ID NO: 55734 - DNA, 25 bp, Saccharomyces pastorianus
ccaccagctttcttggccataataa

SEQ ID NO: 55735 - DNA, 25 bp, Saccharomyces pastorianus
tcttggtggcaagcatgtcgtaaat

SEQ ID NO: 55736 - DNA, 25 bp, Saccharomyces pastorianus
gaggcgcgaccttattaatcatctt

SEQ ID NO: 55737 - DNA, 25 bp, Saccharomyces pastorianus
cagtttcctggttttggaccttgag

SEQ ID NO: 55738 - DNA, 25 bp, Saccharomyces pastorianus
gtcgtaaataccatcttctctaata

SEQ ID NO: 55739 - DNA, 25 bp, Saccharomyces pastorianus
gcctctgtggcgacgttgatagcaa

SEQ ID NO: 55740 - DNA, 25 bp, Saccharomyces pastorianus
tctctaatatcctttacaccttcac

SEQ ID NO: 55741 - DNA, 25 bp, Saccharomyces pastorianus
gctggcttgcaggtatatctatttt

SEQ ID NO: 55742 - DNA, 25 bp, Saccharomyces pastorianus
tttggaccttgaggcgctcttggac

SEQ ID NO: 55743 - DNA, 25 bp, Saccharomyces pastorianus
atgacgttatattttgctggcttgc

SEQ ID NO: 55744 - DNA, 25 bp, Saccharomyces pastorianus
atgcgatagcaggatctggctctac

SEQ ID NO: 55745 - DNA, 25 bp, Saccharomyces pastorianus
tgtaggtccggttctgcagcagaca

SEQ ID NO: 55746 - DNA, 25 bp, Saccharomyces pastorianus
agacacgcaggcgattgccgacatt

SEQ ID NO: 55747 - DNA, 25 bp, Saccharomyces pastorianus
ggatctggctctactttcatatatg

SEQ ID NO: 55748 - DNA, 25 bp, Saccharomyces pastorianus
tggctccgtccataagctgccttat

SEQ ID NO: 55749 - DNA, 25 bp, Saccharomyces pastorianus
actgctgcctcggtgttcaaagaat

SEQ ID NO: 55750 - DNA, 25 bp, Saccharomyces pastorianus
gatactaggtgctgattcacgtacc

SEQ ID NO: 55751 - DNA, 25 bp, Saccharomyces pastorianus
atactattccattgggtggctccgt

SEQ ID NO: 55752 - DNA, 25 bp, Saccharomyces pastorianus
tgccgacattgttcagtaccatttg

SEQ ID NO: 55753 - DNA, 25 bp, Saccharomyces pastorianus
gtgcgtacatagctaaccgtgtgac

SEQ ID NO: 55754 - DNA, 25 bp, Saccharomyces pastorianus
acggatcttccggtggtgttataag

SEQ ID NO: 55755 - DNA, 25 bp, Saccharomyces pastorianus
ggttctgggtctaccttcatatatg

SEQ ID NO: 55756 - DNA, 25 bp, Saccharomyces pastorianus
tttggtgctgtagatctggttctgc

SEQ ID NO: 55757 - DNA, 25 bp, Saccharomyces pastorianus
atacgcaagcagttgctgacattgt

SEQ ID NO: 55758 - DNA, 25 bp, Saccharomyces pastorianus
tgtatacctctcaatatgggacccc

SEQ ID NO: 55759 - DNA, 25 bp, Saccharomyces pastorianus
gagaagtatacaccatcccgttggg

SEQ ID NO: 55760 - DNA, 25 bp, Saccharomyces pastorianus
tcccgttgggtggttctgtccataa

SEQ ID NO: 55761 - DNA, 25 bp, Saccharomyces pastorianus
ttaggtgccgattcacgtaccacta

SEQ ID NO: 55762 - DNA, 25 bp, Saccharomyces pastorianus
atacgccatcgcaggttctgggtct

SEQ ID NO: 55763 - DNA, 25 bp, Saccharomyces pastorianus
acagagactgcagccgctatattta

SEQ ID NO: 55764 - DNA, 25 bp, Saccharomyces pastorianus
gggcctatattgctaaccgtgtaac

SEQ ID NO: 55765 - DNA, 25 bp, Saccharomyces pastorianus
tgtccataaactaccatacgccatc

SEQ ID NO: 55766 - DNA, 25 bp, Saccharomyces pastorianus
gtacactttattcctaagccagcaa

SEQ ID NO: 55767 - DNA, 25 bp, Saccharomyces pastorianus
gtgatgtcaaatccgcaaagtcttt

SEQ ID NO: 55768 - DNA, 25 bp, Saccharomyces pastorianus
agaaccctattagatgtctcacgcc

SEQ ID NO: 55769 - DNA, 25 bp, Saccharomyces pastorianus
atcagagctttacagcggcttggta

SEQ ID NO: 55770 - DNA, 25 bp, Saccharomyces pastorianus
acgccaatctcaaaggccgcaattt

SEQ ID NO: 55771 - DNA, 25 bp, Saccharomyces pastorianus
atcagagtcgaaacacccgctatat

SEQ ID NO: 55772 - DNA, 25 bp, Saccharomyces pastorianus
aaattggacgtgctctcatcagtac

SEQ ID NO: 55773 - DNA, 25 bp, Saccharomyces pastorianus
tgacactctgtcaagggcgaagaac

SEQ ID NO: 55774 - DNA, 25 bp, Saccharomyces pastorianus
acttcatatgtcgaatgcgtctact

SEQ ID NO: 55775 - DNA, 25 bp, Saccharomyces pastorianus
gccagcaagttcttccttggaaatc

SEQ ID NO: 55776 - DNA, 25 bp, Saccharomyces pastorianus
ggaggatgctcaaccacttcatatg

SEQ ID NO: 55777 - DNA, 25 bp, Saccharomyces pastorianus
cgaatccacggatctttctgagagt

SEQ ID NO: 55778 - DNA, 25 bp, Saccharomyces pastorianus
gagtgacatactgactgagtcgcta

SEQ ID NO: 55779 - DNA, 25 bp, Saccharomyces pastorianus
gatttcggattagctcttactttac

SEQ ID NO: 55780 - DNA, 25 bp, Saccharomyces pastorianus
gaacgcaacgaggacagcttaatgt

SEQ ID NO: 55781 - DNA, 25 bp, Saccharomyces pastorianus
aaagatgatgccgattttgccagag

SEQ ID NO: 55782 - DNA, 25 bp, Saccharomyces pastorianus
agaagctttttgcacagtacggaga

SEQ ID NO: 55783 - DNA, 25 bp, Saccharomyces pastorianus
aaagttctttcaggacctactgctg

SEQ ID NO: 55784 - DNA, 25 bp, Saccharomyces pastorianus
cagagtcgtctttgatggtgcattg

SEQ ID NO: 55785 - DNA, 25 bp, Saccharomyces pastorianus
gagggtactagtgccaaacttcaaa

SEQ ID NO: 55786 - DNA, 25 bp, Saccharomyces pastorianus
taacgctttgctaccagggctataa

SEQ ID NO: 55787 - DNA, 25 bp, Saccharomyces pastorianus
tttagtgtactaattgtcgccaatg

SEQ ID NO: 55788 - DNA, 25 bp, Saccharomyces pastorianus
gctggtatccaattgtctccaaagt

SEQ ID NO: 55789 - DNA, 25 bp, Saccharomyces pastorianus
atccaattgtctccaaagttcgtca

SEQ ID NO: 55790 - DNA, 25 bp, Saccharomyces pastorianus
ccgctggtatccaattgtctccaaa

SEQ ID NO: 55791 - DNA, 25 bp, Saccharomyces pastorianus
ctggtatccaattgtctccaaagtt

SEQ ID NO: 55792 - DNA, 25 bp, Saccharomyces pastorianus
cgctggtatccaattgtctccaaag

SEQ ID NO: 55793 - DNA, 25 bp, Saccharomyces pastorianus
caattgtctccaaagttcgtcaagt

SEQ ID NO: 55794 - DNA, 25 bp, Saccharomyces pastorianus
aattgtctccaaagttcgtcaagtt

SEQ ID NO: 55795 - DNA, 25 bp, Saccharomyces pastorianus
tccaattgtctccaaagttcgtcaa

SEQ ID NO: 55796 - DNA, 25 bp, Saccharomyces pastorianus
ggtatccaattgtctccaaagttcg

SEQ ID NO: 55797 - DNA, 25 bp, Saccharomyces pastorianus
attgtctccaaagttcgtcaagttg

SEQ ID NO: 55798 - DNA, 25 bp, Saccharomyces pastorianus
gtatccaattgtctccaaagttcgt

SEQ ID NO: 55799 - DNA, 25 bp, Saccharomyces pastorianus
tggcgggtccaatttatcgaagtat

SEQ ID NO: 55800 - DNA, 25 bp, Saccharomyces pastorianus
gctgcttgattatgcttgcacttta

SEQ ID NO: 55801 - DNA, 25 bp, Saccharomyces pastorianus
gtatgcattcgtacctcaattgctg

SEQ ID NO: 55802 - DNA, 25 bp, Saccharomyces pastorianus
tactgtatcccgatggcgatcttta

SEQ ID NO: 55803 - DNA, 25 bp, Saccharomyces pastorianus
atggcctttccattcatttcaagat

SEQ ID NO: 55804 - DNA, 25 bp, Saccharomyces pastorianus
tttgaaccaagccatctccaagaag

SEQ ID NO: 55805 - DNA, 25 bp, Saccharomyces pastorianus
cacgctagtgcctttgttgggatgc

SEQ ID NO: 55806 - DNA, 25 bp, Saccharomyces pastorianus
ttgctgctcgtattggtaaccgggt

SEQ ID NO: 55807 - DNA, 25 bp, Saccharomyces pastorianus
ggtccacgagcacaattgacggctt

SEQ ID NO: 55808 - DNA, 25 bp, Saccharomyces pastorianus
gggtacgaattcttggaccagtcat

SEQ ID NO: 55809 - DNA, 25 bp, Saccharomyces pastorianus
atggcaggtctcttatatggccttt

SEQ ID NO: 55810 - DNA, 25 bp, Saccharomyces pastorianus
atacgggaccgaagagaatgcacaa

SEQ ID NO: 55811 - DNA, 25 bp, Saccharomyces pastorianus
atttgcgtccaggttcgccactggc

SEQ ID NO: 55812 - DNA, 25 bp, Saccharomyces pastorianus
gagctagccaagaaactgtcatcca

SEQ ID NO: 55813 - DNA, 25 bp, Saccharomyces pastorianus
gaggaagtagaagccgtgaccacca

SEQ ID NO: 55814 - DNA, 25 bp, Saccharomyces pastorianus
ggaggtctttgacatcgacatgaag

SEQ ID NO: 55815 - DNA, 25 bp, Saccharomyces pastorianus
gaaacttatatacactcgctactgg

SEQ ID NO: 55816 - DNA, 25 bp, Saccharomyces pastorianus
gaagaaactggccaagacatttgcg

SEQ ID NO: 55817 - DNA, 25 bp, Saccharomyces pastorianus
atcctgacctttacgcacaactata

SEQ ID NO: 55818 - DNA, 25 bp, Saccharomyces pastorianus
tgaatccagtatcggtgaagccaga

SEQ ID NO: 55819 - DNA, 25 bp, Saccharomyces pastorianus
atttctgggctggaggtctttgaca

SEQ ID NO: 55820 - DNA, 25 bp, Saccharomyces pastorianus
ggctgttccgtgtccaagaacgtgg

SEQ ID NO: 55821 - DNA, 25 bp, Saccharomyces pastorianus
aataccgcattgttaccatttgtca

SEQ ID NO: 55822 - DNA, 25 bp, Saccharomyces pastorianus
gttgccctcattgcattaaataccg

SEQ ID NO: 55823 - DNA, 25 bp, Saccharomyces pastorianus
accatttgtcagtaaatacgcgggc

SEQ ID NO: 55824 - DNA, 25 bp, Saccharomyces pastorianus
tgcctgtccataatatcattgatat

SEQ ID NO: 55825 - DNA, 25 bp, Saccharomyces pastorianus
ggtattttagttgccctcattgcat

SEQ ID NO: 55826 - DNA, 25 bp, Saccharomyces pastorianus
ttttttggacttgtcaagaggcaag

SEQ ID NO: 55827 - DNA, 25 bp, Saccharomyces pastorianus
gccctcattgcattaaataccgcat

SEQ ID NO: 55828 - DNA, 25 bp, Saccharomyces pastorianus
accgcattgttaccatttgtcagta

SEQ ID NO: 55829 - DNA, 25 bp, Saccharomyces pastorianus
ttgtcagtaaatacgcgggcagaaa

SEQ ID NO: 55830 - DNA, 25 bp, Saccharomyces pastorianus
ttttagttgccctcattgcattaaa

SEQ ID NO: 55831 - DNA, 25 bp, Saccharomyces pastorianus
atacgcgggcagaaaattgagacaa

SEQ ID NO: 55832 - DNA, 25 bp, Saccharomyces pastorianus
tgtattggatgtccacgtggctgtt

SEQ ID NO: 55833 - DNA, 25 bp, Saccharomyces pastorianus
aaagtggtagagacccaacgaatct

SEQ ID NO: 55834 - DNA, 25 bp, Saccharomyces pastorianus
gaatactatgaccacaggccgttca

SEQ ID NO: 55835 - DNA, 25 bp, Saccharomyces pastorianus
ttccagttcctgttatatggcccat

SEQ ID NO: 55836 - DNA, 25 bp, Saccharomyces pastorianus
taaggcctgccaacggtataattta

SEQ ID NO: 55837 - DNA, 25 bp, Saccharomyces pastorianus
tcatggtctacctttttccttgcat

SEQ ID NO: 55838 - DNA, 25 bp, Saccharomyces pastorianus
taccgtatcgccatgtcatggtcta

SEQ ID NO: 55839 - DNA, 25 bp, Saccharomyces pastorianus
ttatatggcccattgcacgcagaaa

SEQ ID NO: 55840 - DNA, 25 bp, Saccharomyces pastorianus
gaaaacgcggtgatgcttgtcatca

SEQ ID NO: 55841 - DNA, 25 bp, Saccharomyces pastorianus
acttcaccaagtctttcggcagagg

SEQ ID NO: 55842 - DNA, 25 bp, Saccharomyces pastorianus
gagccttctatacgttcaactactt

SEQ ID NO: 55843 - DNA, 25 bp, Saccharomyces pastorianus
aaagaccctggtcacgaggctggac

SEQ ID NO: 55844 - DNA, 25 bp, Saccharomyces pastorianus
acgccgtggactgtcaggtacagca

SEQ ID NO: 55845 - DNA, 25 bp, Saccharomyces pastorianus
taaggtgtctgcacatcctcatcaa

SEQ ID NO: 55846 - DNA, 25 bp, Saccharomyces pastorianus
aggtccgactgctcttcgtacaaga

SEQ ID NO: 55847 - DNA, 25 bp, Saccharomyces pastorianus
ggccacggacgagctaaagaccctg

SEQ ID NO: 55848 - DNA, 25 bp, Saccharomyces pastorianus
gtccgagaacatcaccatatccaag

SEQ ID NO: 55849 - DNA, 25 bp, Saccharomyces pastorianus
aggactcgagaagacctgcttcgca

SEQ ID NO: 55850 - DNA, 25 bp, Saccharomyces pastorianus
ataaggaacagctgcacgagtatct

SEQ ID NO: 55851 - DNA, 25 bp, Saccharomyces pastorianus
gaaagaccacccaatgcgtgtaagg

SEQ ID NO: 55852 - DNA, 25 bp, Saccharomyces pastorianus
agagagtacttcttcaacccggaca

SEQ ID NO: 55853 - DNA, 25 bp, Saccharomyces pastorianus
gagatgcagcccagtttcgaggacg

SEQ ID NO: 55854 - DNA, 25 bp, Saccharomyces pastorianus
aggacatgcatgctttgcaggcccg

SEQ ID NO: 55855 - DNA, 25 bp, Saccharomyces pastorianus
agatcacgcgacacgtcaccaacaa

SEQ ID NO: 55856 - DNA, 25 bp, Saccharomyces pastorianus
tccatgaaacgcgacaggtccactt

SEQ ID NO: 55857 - DNA, 25 bp, Saccharomyces pastorianus
tcggcagccagatggaagacgtgca

SEQ ID NO: 55858 - DNA, 25 bp, Saccharomyces pastorianus
gactctgacgaccaccacaagaggt

SEQ ID NO: 55859 - DNA, 25 bp, Saccharomyces pastorianus
agccaaggccatgccagcgaagacg

SEQ ID NO: 55860 - DNA, 25 bp, Saccharomyces pastorianus
agcgaagacgaccacgactacgact

SEQ ID NO: 55861 - DNA, 25 bp, Saccharomyces pastorianus
aagacgtgcagaaggtgctgctctc

SEQ ID NO: 55862 - DNA, 25 bp, Saccharomyces pastorianus
gggcaggtataactccaagatcacg

SEQ ID NO: 55863 - DNA, 25 bp, Saccharomyces pastorianus
tgctgctctcgctgtccaaggacat

SEQ ID NO: 55864 - DNA, 25 bp, Saccharomyces pastorianus
gcctccgccaagaacgatggtcaca

SEQ ID NO: 55865 - DNA, 25 bp, Saccharomyces pastorianus
caaggttctgaacgacaactccaag

SEQ ID NO: 55866 - DNA, 25 bp, Saccharomyces pastorianus
ggacatctcggagaccaattctgag

SEQ ID NO: 55867 - DNA, 25 bp, Saccharomyces pastorianus
attctgagaggtcgttgatgatcac

SEQ ID NO: 55868 - DNA, 25 bp, Saccharomyces pastorianus
gctaggcaagttcaaccagctacta

SEQ ID NO: 55869 - DNA, 25 bp, Saccharomyces pastorianus
atgatcacggagacatcatcaccgt

SEQ ID NO: 55870 - DNA, 25 bp, Saccharomyces pastorianus
ctggaactggagagcatggatttaa

SEQ ID NO: 55871 - DNA, 25 bp, Saccharomyces pastorianus
atggacactcgaaccaggacagacg

SEQ ID NO: 55872 - DNA, 25 bp, Saccharomyces pastorianus
ggacagacgaggcatccacggacat

SEQ ID NO: 55873 - DNA, 25 bp, Saccharomyces pastorianus
accgctggcttggaagagtccgaca

SEQ ID NO: 55874 - DNA, 25 bp, Saccharomyces pastorianus
agacgctgtgtaaatcgctaggcaa

SEQ ID NO: 55875 - DNA, 25 bp, Saccharomyces pastorianus
aaataacgactaccgctggcttgga

SEQ ID NO: 55876 - DNA, 25 bp, Saccharomyces pastorianus
aagctcaatgtcaccaatactcaag

SEQ ID NO: 55877 - DNA, 25 bp, Saccharomyces pastorianus
aaagagtttgtctgcaaagctcaga

SEQ ID NO: 55878 - DNA, 25 bp, Saccharomyces pastorianus
acggccagtgtctcatagcaagctt

SEQ ID NO: 55879 - DNA, 25 bp, Saccharomyces pastorianus
gttataatcaagactgacggccagt

SEQ ID NO: 55880 - DNA, 25 bp, Saccharomyces pastorianus
gctcattggcctcttggacatcgag

SEQ ID NO: 55881 - DNA, 25 bp, Saccharomyces pastorianus
gaggcagcgaaatcgcgctcattgg

SEQ ID NO: 55882 - DNA, 25 bp, Saccharomyces pastorianus
agcaagcttggacggcttcgacaag

SEQ ID NO: 55883 - DNA, 25 bp, Saccharomyces pastorianus
gacaaggcagataccaagctcaatg

SEQ ID NO: 55884 - DNA, 25 bp, Saccharomyces pastorianus
aaagctcagatacttcgaggcagcg

SEQ ID NO: 55885 - DNA, 25 bp, Saccharomyces pastorianus
agcctatacgcaggctgcagggaaa

SEQ ID NO: 55886 - DNA, 25 bp, Saccharomyces pastorianus
ggcttcgacaagaacactaacctat

SEQ ID NO: 55887 - DNA, 25 bp, Saccharomyces pastorianus
aagaacaggcttgtcgcttgcggat

SEQ ID NO: 55888 - DNA, 25 bp, Saccharomyces pastorianus
atctcgggttggctttgctgatata

SEQ ID NO: 55889 - DNA, 25 bp, Saccharomyces pastorianus
gtaaattcgtcacttctgctatctt

SEQ ID NO: 55890 - DNA, 25 bp, Saccharomyces pastorianus
tacactgtctatacgctgttcgcaa

SEQ ID NO: 55891 - DNA, 25 bp, Saccharomyces pastorianus
cagcccaagatgttcagcttcgaat

SEQ ID NO: 55892 - DNA, 25 bp, Saccharomyces pastorianus
aaatttgtgatttgctctgatgccg

SEQ ID NO: 55893 - DNA, 25 bp, Saccharomyces pastorianus
atcttcatcttcatgtttcagtcga

SEQ ID NO: 55894 - DNA, 25 bp, Saccharomyces pastorianus
aagtgcaacaggtcaacagcccaag

SEQ ID NO: 55895 - DNA, 25 bp, Saccharomyces pastorianus
ctaccgcaaggactttatcgaccat

SEQ ID NO: 55896 - DNA, 25 bp, Saccharomyces pastorianus
gatgccgagggaaccttgaacccta

SEQ ID NO: 55897 - DNA, 25 bp, Saccharomyces pastorianus
agagtacaattctcgtctccacgat

SEQ ID NO: 55898 - DNA, 25 bp, Saccharomyces pastorianus
gttactaccttaggcaacggttgct

SEQ ID NO: 55899 - DNA, 25 bp, Saccharomyces pastorianus
tcaatagcactaccgatcgtgggat

SEQ ID NO: 55900 - DNA, 25 bp, Saccharomyces pastorianus
aggtacctgttgacttcgtacggca

SEQ ID NO: 55901 - DNA, 25 bp, Saccharomyces pastorianus
atgagttcgatatcgccgcacaagt

SEQ ID NO: 55902 - DNA, 25 bp, Saccharomyces pastorianus
cggttgctatgtaatcggttttcta

SEQ ID NO: 55903 - DNA, 25 bp, Saccharomyces pastorianus
gagcaacatttacaccttttttctt

SEQ ID NO: 55904 - DNA, 25 bp, Saccharomyces pastorianus
actggtgtggcaacggtaaccttca

SEQ ID NO: 55905 - DNA, 25 bp, Saccharomyces pastorianus
aattgcaagtgcagcctcttagtcc

SEQ ID NO: 55906 - DNA, 25 bp, Saccharomyces pastorianus
acgtctcaccttgtttagttttgca

SEQ ID NO: 55907 - DNA, 25 bp, Saccharomyces pastorianus
aatacttgggacttcttgaccctca

SEQ ID NO: 55908 - DNA, 25 bp, Saccharomyces pastorianus
aaatcgctcatttcagtggaggcgt

SEQ ID NO: 55909 - DNA, 25 bp, Saccharomyces pastorianus
gaagcatcatgcatggaaggccgaa

SEQ ID NO: 55910 - DNA, 25 bp, Saccharomyces pastorianus
tgaatggagactgccagaaatagca

SEQ ID NO: 55911 - DNA, 25 bp, Saccharomyces pastorianus
gtgactagcgccatgcgccaaactt

SEQ ID NO: 55912 - DNA, 25 bp, Saccharomyces pastorianus
attcatggctattgtttgaagcatc

SEQ ID NO: 55913 - DNA, 25 bp, Saccharomyces pastorianus
gcaggagaagatttcctaataccgg

SEQ ID NO: 55914 - DNA, 25 bp, Saccharomyces pastorianus
gagtaataatgctactgcaggagaa

SEQ ID NO: 55915 - DNA, 25 bp, Saccharomyces pastorianus
gatcctgtattaaacgccattgtga

SEQ ID NO: 55916 - DNA, 25 bp, Saccharomyces pastorianus
gcaaagccggtaaatttgaactagt

SEQ ID NO: 55917 - DNA, 25 bp, Saccharomyces pastorianus
aaatgacgacattgagtggatgcta

SEQ ID NO: 55918 - DNA, 25 bp, Saccharomyces pastorianus
aatgctatcggcacataatatcgtt

SEQ ID NO: 55919 - DNA, 25 bp, Saccharomyces pastorianus
ggccgaaagttagacgatcctgtat

SEQ ID NO: 55920 - DNA, 25 bp, Saccharomyces pastorianus
aaaaacgcagtcttagcagtggcta

SEQ ID NO: 55921 - DNA, 25 bp, Saccharomyces pastorianus
gagtgccctctgaaaactgcacgag

SEQ ID NO: 55922 - DNA, 25 bp, Saccharomyces pastorianus
gacactacacttgactctcggaatg

SEQ ID NO: 55923 - DNA, 25 bp, Saccharomyces pastorianus
atgtgaactactggatgctgcgctt

SEQ ID NO: 55924 - DNA, 25 bp, Saccharomyces pastorianus
atccctcctggaaagtatcttggcc

SEQ ID NO: 55925 - DNA, 25 bp, Saccharomyces pastorianus
ggtgattcgcaacatacttctagag

SEQ ID NO: 55926 - DNA, 25 bp, Saccharomyces pastorianus
gatctcacggtgtttaccagcttaa

SEQ ID NO: 55927 - DNA, 25 bp, Saccharomyces pastorianus
aaggattgcccctaagtggatctca

SEQ ID NO: 55928 - DNA, 25 bp, Saccharomyces pastorianus
ggagcatccctaagacaaccctgga

SEQ ID NO: 55929 - DNA, 25 bp, Saccharomyces pastorianus
gtggtttagagattcatccctcctg

SEQ ID NO: 55930 - DNA, 25 bp, Saccharomyces pastorianus
aagacactacggaccttgtggattc

SEQ ID NO: 55931 - DNA, 25 bp, Saccharomyces pastorianus
tcctcagcaacggtcttcaagttga

SEQ ID NO: 55932 - DNA, 25 bp, Saccharomyces pastorianus
ggcttggtagcgaattcctcagcaa

SEQ ID NO: 55933 - DNA, 25 bp, Saccharomyces pastorianus
gttaaccaagatgtctcttagctgt

SEQ ID NO: 55934 - DNA, 25 bp, Saccharomyces pastorianus
gccggatttgttaaccaagatgtct

SEQ ID NO: 55935 - DNA, 25 bp, Saccharomyces pastorianus
tactcaatggccttcttggcttctt

SEQ ID NO: 55936 - DNA, 25 bp, Saccharomyces pastorianus
agctctgaatctgttggccaagacg

SEQ ID NO: 55937 - DNA, 25 bp, Saccharomyces pastorianus
caagacggtcttgccggatttgtta

SEQ ID NO: 55938 - DNA, 25 bp, Saccharomyces pastorianus
ggcttcttccggcttggtagcgaat

SEQ ID NO: 55939 - DNA, 25 bp, Saccharomyces pastorianus
gaatctgttggccaagacggtcttg

SEQ ID NO: 55940 - DNA, 25 bp, Saccharomyces pastorianus
ttcttggcttcttccggcttggtag

SEQ ID NO: 55941 - DNA, 25 bp, Saccharomyces pastorianus
tcaagttgaatagagctctgaatct

SEQ ID NO: 55942 - DNA, 25 bp, Saccharomyces pastorianus
ggaccaagcttacagggctcgtcat

SEQ ID NO: 55943 - DNA, 25 bp, Saccharomyces pastorianus
gttggccaccaacgagagcatcatc

SEQ ID NO: 55944 - DNA, 25 bp, Saccharomyces pastorianus
gcaagacctggcacagactgttgtc

SEQ ID NO: 55945 - DNA, 25 bp, Saccharomyces pastorianus
gttgcattgatcagactgccccagt

SEQ ID NO: 55946 - DNA, 25 bp, Saccharomyces pastorianus
agtttcacgtggatgacctgaccga

SEQ ID NO: 55947 - DNA, 25 bp, Saccharomyces pastorianus
tcccgccgtgatgcagacaagttta

SEQ ID NO: 55948 - DNA, 25 bp, Saccharomyces pastorianus
tctggatgcctcttccttgagagag

SEQ ID NO: 55949 - DNA, 25 bp, Saccharomyces pastorianus
gtcgtgccgtctacaagtttttgca

SEQ ID NO: 55950 - DNA, 25 bp, Saccharomyces pastorianus
gaggttcctccaagatgtcgtgccg

SEQ ID NO: 55951 - DNA, 25 bp, Saccharomyces pastorianus
gactgttgtcattggcgttgcattg

SEQ ID NO: 55952 - DNA, 25 bp, Saccharomyces pastorianus
gagcatcatcgtggacctcttggag

SEQ ID NO: 55953 - DNA, 25 bp, Saccharomyces pastorianus
aggcgtacggccattgcattgcgat

SEQ ID NO: 55954 - DNA, 25 bp, Saccharomyces pastorianus
acgctggacatcttgctgggtgtga

SEQ ID NO: 55955 - DNA, 25 bp, Saccharomyces pastorianus
ctggtggtacgaaactaatgccctt

SEQ ID NO: 55956 - DNA, 25 bp, Saccharomyces pastorianus
gtgtgcaacatcagcgagtacgtct

SEQ ID NO: 55957 - DNA, 25 bp, Saccharomyces pastorianus
atcgtgagtttctttaccacctagc

SEQ ID NO: 55958 - DNA, 25 bp, Saccharomyces pastorianus
agagctcgttgatccagacgctgga

SEQ ID NO: 55959 - DNA, 25 bp, Saccharomyces pastorianus
ggccggatggactaacatgtcgcat

SEQ ID NO: 55960 - DNA, 25 bp, Saccharomyces pastorianus
aaaaccgcctcatgcaagactatcg

SEQ ID NO: 55961 - DNA, 25 bp, Saccharomyces pastorianus
gagcccagcgtgttttatttcaaga

SEQ ID NO: 55962 - DNA, 25 bp, Saccharomyces pastorianus
ggtgtgaagcattctgccaacgctg

SEQ ID NO: 55963 - DNA, 25 bp, Saccharomyces pastorianus
ggaaggccagtaccagatcttttct

SEQ ID NO: 55964 - DNA, 25 bp, Saccharomyces pastorianus
tgatcagtttattcttactctcccc

SEQ ID NO: 55965 - DNA, 25 bp, Saccharomyces pastorianus
ggacttagtagagatctcctttaat

SEQ ID NO: 55966 - DNA, 25 bp, Saccharomyces pastorianus
ttcgctcaattccacgcttcttaga

SEQ ID NO: 55967 - DNA, 25 bp, Saccharomyces pastorianus
ttcagccgtaattttgtccttactg

SEQ ID NO: 55968 - DNA, 25 bp, Saccharomyces pastorianus
aatgcccatcccttcaggtacagtt

SEQ ID NO: 55969 - DNA, 25 bp, Saccharomyces pastorianus
gaaatcacattaaccaatgcccatc

SEQ ID NO: 55970 - DNA, 25 bp, Saccharomyces pastorianus
tcaggtacagttcgctcaattccac

SEQ ID NO: 55971 - DNA, 25 bp, Saccharomyces pastorianus
ccacgcttcttagagcgttcttcaa

SEQ ID NO: 55972 - DNA, 25 bp, Saccharomyces pastorianus
gtccttactgttggacttagtagag

SEQ ID NO: 55973 - DNA, 25 bp, Saccharomyces pastorianus
tactctcccctatttcccgagaaat

SEQ ID NO: 55974 - DNA, 25 bp, Saccharomyces pastorianus
ttagattcagacaacttgatcagtt

SEQ ID NO: 55975 - DNA, 25 bp, Saccharomyces pastorianus
aactctatattatgaagcccttcgt

SEQ ID NO: 55976 - DNA, 25 bp, Saccharomyces pastorianus
gcttggaacaggtcctgtgcatcac

SEQ ID NO: 55977 - DNA, 25 bp, Saccharomyces pastorianus
aaagggcccgctattgcttggaaca

SEQ ID NO: 55978 - DNA, 25 bp, Saccharomyces pastorianus
gtgcatcaccccattcaattatgtt

SEQ ID NO: 55979 - DNA, 25 bp, Saccharomyces pastorianus
ggagatctctactaagtccaacagt

SEQ ID NO: 55980 - DNA, 25 bp, Saccharomyces pastorianus
aaccaggaagccgttctgcaagaat

SEQ ID NO: 55981 - DNA, 25 bp, Saccharomyces pastorianus
tgaaagccaccctattgcaaataaa

SEQ ID NO: 55982 - DNA, 25 bp, Saccharomyces pastorianus
ttgagcgaactgtacctgaagggat

SEQ ID NO: 55983 - DNA, 25 bp, Saccharomyces pastorianus
aaatctgagctcttagacaaggcgt

SEQ ID NO: 55984 - DNA, 25 bp, Saccharomyces pastorianus
ggataagttccctctagatgctgaa

SEQ ID NO: 55985 - DNA, 25 bp, Saccharomyces pastorianus
gttacctatgtctccattgctaaga

SEQ ID NO: 55986 - DNA, 25 bp, Saccharomyces pastorianus
gaatcccatcagatgcttcacaaga

SEQ ID NO: 55987 - DNA, 25 bp, Saccharomyces pastorianus
gaaaatctcctagacgaatgcattg

SEQ ID NO: 55988 - DNA, 25 bp, Saccharomyces pastorianus
gcgaattcactaacgcactacgaaa

SEQ ID NO: 55989 - DNA, 25 bp, Saccharomyces pastorianus
ggttccacttcaacgaaaatctcct

SEQ ID NO: 55990 - DNA, 25 bp, Saccharomyces pastorianus
tagggaccgtcttctgaatacgcat

SEQ ID NO: 55991 - DNA, 25 bp, Saccharomyces pastorianus
tgaattgtcctcgttgccaatttgc

SEQ ID NO: 55992 - DNA, 25 bp, Saccharomyces pastorianus
gacgggctagacgagttttcactgg

SEQ ID NO: 55993 - DNA, 25 bp, Saccharomyces pastorianus
gaatacgcatcctgacaagcttact

SEQ ID NO: 55994 - DNA, 25 bp, Saccharomyces pastorianus
gttaacccaatgtagtgcgtgcagt

SEQ ID NO: 55995 - DNA, 25 bp, Saccharomyces pastorianus
gttttcactggacgatttctcattt

SEQ ID NO: 55996 - DNA, 25 bp, Saccharomyces pastorianus
ttgccaatttgccaacgggttccac

SEQ ID NO: 55997 - DNA, 25 bp, Saccharomyces pastorianus
aagttcgtcttaagtacacctgtag

SEQ ID NO: 55998 - DNA, 25 bp, Saccharomyces pastorianus
ttggaagtatcttggcctatcacct

SEQ ID NO: 55999 - DNA, 25 bp, Saccharomyces pastorianus
aaggttcccactgtcagaggcgcca

SEQ ID NO: 56000 - DNA, 25 bp, Saccharomyces pastorianus
tggcctatcacctctggttaatgaa

SEQ ID NO: 56001 - DNA, 25 bp, Saccharomyces pastorianus
gaggtcttccacacgtcttatgaag

SEQ ID NO: 56002 - DNA, 25 bp, Saccharomyces pastorianus
ctggtgacggtgttgtgcatcacaa

SEQ ID NO: 56003 - DNA, 25 bp, Saccharomyces pastorianus
gtacacctgtagttcgagctgttac

SEQ ID NO: 56004 - DNA, 25 bp, Saccharomyces pastorianus
agttccgcaggtcatgtcagtttaa

SEQ ID NO: 56005 - DNA, 25 bp, Saccharomyces pastorianus
aagatctttactatggccctggtga

SEQ ID NO: 56006 - DNA, 25 bp, Saccharomyces pastorianus
ttaaagctacattcaacgccactac

SEQ ID NO: 56007 - DNA, 25 bp, Saccharomyces pastorianus
aataccctctgatgaggtcttccac

SEQ ID NO: 56008 - DNA, 25 bp, Saccharomyces pastorianus
cgttcttagtggacgtcttcgataa

SEQ ID NO: 56009 - DNA, 25 bp, Saccharomyces pastorianus
gtcccaccatctgcgtatgttgata

SEQ ID NO: 56010 - DNA, 25 bp, Saccharomyces pastorianus
gatttccctgtgttagatgccaatg

SEQ ID NO: 56011 - DNA, 25 bp, Saccharomyces pastorianus
ggagaccatccagaattggcatctt

SEQ ID NO: 56012 - DNA, 25 bp, Saccharomyces pastorianus
ggcatctttggaggcgccgttatga

SEQ ID NO: 56013 - DNA, 25 bp, Saccharomyces pastorianus
agatgcgccatttttatcattcgat

SEQ ID NO: 56014 - DNA, 25 bp, Saccharomyces pastorianus
cagagggttcttcgtttgaccagtt

SEQ ID NO: 56015 - DNA, 25 bp, Saccharomyces pastorianus
gccgtctccattgatttcgattatt

SEQ ID NO: 56016 - DNA, 25 bp, Saccharomyces pastorianus
tagtggcaccacacagtatcacgat

SEQ ID NO: 56017 - DNA, 25 bp, Saccharomyces pastorianus
aaggcccttttcatttatcaactct

SEQ ID NO: 56018 - DNA, 25 bp, Saccharomyces pastorianus
atgaggcagttctatcgtctacata

SEQ ID NO: 56019 - DNA, 25 bp, Saccharomyces pastorianus
taccgaattgttgtgacaggtcatt

SEQ ID NO: 56020 - DNA, 25 bp, Saccharomyces pastorianus
ggtcttgacatatgcaacaccaaag

SEQ ID NO: 56021 - DNA, 25 bp, Saccharomyces pastorianus
ggagattatattcccatggtcccac

SEQ ID NO: 56022 - DNA, 25 bp, Saccharomyces pastorianus
gggctttgatcctttggtcttgaca

SEQ ID NO: 56023 - DNA, 25 bp, Saccharomyces pastorianus
gcacagaggctttctcagattcact

SEQ ID NO: 56024 - DNA, 25 bp, Saccharomyces pastorianus
gggtattttcgagtggtccataatg

SEQ ID NO: 56025 - DNA, 25 bp, Saccharomyces pastorianus
accattttatcatccggccggtttg

SEQ ID NO: 56026 - DNA, 25 bp, Saccharomyces pastorianus
agattcactgaaacccttgggatgg

SEQ ID NO: 56027 - DNA, 25 bp, Saccharomyces pastorianus
ggaaagctatccagattaccgaatt

SEQ ID NO: 56028 - DNA, 25 bp, Saccharomyces pastorianus
ggctctaaacgatggattccgggat

SEQ ID NO: 56029 - DNA, 25 bp, Saccharomyces pastorianus
ctccgctttgcgtgaatgaatatcg

SEQ ID NO: 56030 - DNA, 25 bp, Saccharomyces pastorianus
gaaaatggtcggtcacgccaacctg

SEQ ID NO: 56031 - DNA, 25 bp, Saccharomyces pastorianus
agagacctcgacctgcggaaaatgg

SEQ ID NO: 56032 - DNA, 25 bp, Saccharomyces pastorianus
atcaccattccacagcaatacttat

SEQ ID NO: 56033 - DNA, 25 bp, Saccharomyces pastorianus
tttgtcctcttcgacggcgctgcag

SEQ ID NO: 56034 - DNA, 25 bp, Saccharomyces pastorianus
ggtccttgacgagatcgacgcctta

SEQ ID NO: 56035 - DNA, 25 bp, Saccharomyces pastorianus
acatcagcaagatacgctctaagct

SEQ ID NO: 56036 - DNA, 25 bp, Saccharomyces pastorianus
aacctgctggacagggtccttgacg

SEQ ID NO: 56037 - DNA, 25 bp, Saccharomyces pastorianus
gatcgacgccttagatggtgacttt

SEQ ID NO: 56038 - DNA, 25 bp, Saccharomyces pastorianus
tgtctcagtgcgctctggctaaacg

SEQ ID NO: 56039 - DNA, 25 bp, Saccharomyces pastorianus
tggctaaacgtcaccacagagacct

SEQ ID NO: 56040 - DNA, 25 bp, Saccharomyces pastorianus
agatggtgactttgtcctcttcgac

SEQ ID NO: 56041 - DNA, 25 bp, Saccharomyces pastorianus
agaattggcccatctagcgaaaagg

SEQ ID NO: 56042 - DNA, 25 bp, Saccharomyces pastorianus
gtactccaaactatcatcggcattc

SEQ ID NO: 56043 - DNA, 25 bp, Saccharomyces pastorianus
gaaatattccctcttggagcctgat

SEQ ID NO: 56044 - DNA, 25 bp, Saccharomyces pastorianus
tagaaaagttcaccagctccgacta

SEQ ID NO: 56045 - DNA, 25 bp, Saccharomyces pastorianus
gaccttttgaaagtcgccacttggg

SEQ ID NO: 56046 - DNA, 25 bp, Saccharomyces pastorianus
gttttgcctggccttcatgaagcgt

SEQ ID NO: 56047 - DNA, 25 bp, Saccharomyces pastorianus
atcctcgatagtccggcttggttag

SEQ ID NO: 56048 - DNA, 25 bp, Saccharomyces pastorianus
gaatgtagagaagctctccccgttt

SEQ ID NO: 56049 - DNA, 25 bp, Saccharomyces pastorianus
gctcgcaagatttaacactcacgtt

SEQ ID NO: 56050 - DNA, 25 bp, Saccharomyces pastorianus
agctcagtggctaaccattctgtta

SEQ ID NO: 56051 - DNA, 25 bp, Saccharomyces pastorianus
tcgggcgcagtttatcacggcaact

SEQ ID NO: 56052 - DNA, 25 bp, Saccharomyces pastorianus
ttaattattttagcgataccccagg

SEQ ID NO: 56053 - DNA, 25 bp, Saccharomyces pastorianus
gataaggttcatctgcacaacgaat

SEQ ID NO: 56054 - DNA, 25 bp, Saccharomyces pastorianus
agatcaggtttactcggttccacag

SEQ ID NO: 56055 - DNA, 25 bp, Saccharomyces pastorianus
agaagttagcatccctggtatattt

SEQ ID NO: 56056 - DNA, 25 bp, Saccharomyces pastorianus
taccgaggataccatctgtaccgat

SEQ ID NO: 56057 - DNA, 25 bp, Saccharomyces pastorianus
gctcattccgccatactcagaagaa

SEQ ID NO: 56058 - DNA, 25 bp, Saccharomyces pastorianus
ggttggaaaccattacgtcccatca

SEQ ID NO: 56059 - DNA, 25 bp, Saccharomyces pastorianus
caggctacccttccaaggattatga

SEQ ID NO: 56060 - DNA, 25 bp, Saccharomyces pastorianus
cattcacgggaccttctagtttcaa

SEQ ID NO: 56061 - DNA, 25 bp, Saccharomyces pastorianus
gttccaaatcggtcctggtagtaat

SEQ ID NO: 56062 - DNA, 25 bp, Saccharomyces pastorianus
tgtaccgatgagtgccaaggatatt

SEQ ID NO: 56063 - DNA, 25 bp, Saccharomyces pastorianus
actaccacatgcatgttcactgctg

SEQ ID NO: 56064 - DNA, 25 bp, Saccharomyces pastorianus
tgcatcgaggactgggcacgcgaat

SEQ ID NO: 56065 - DNA, 25 bp, Saccharomyces pastorianus
gagagccatggatcctagtaccgat

SEQ ID NO: 56066 - DNA, 25 bp, Saccharomyces pastorianus
gttcactgctgtgctagtcatttca

SEQ ID NO: 56067 - DNA, 25 bp, Saccharomyces pastorianus
tctatcgttcgctcatgcattgcaa

SEQ ID NO: 56068 - DNA, 25 bp, Saccharomyces pastorianus
tgattatcgcaacaagcctatcctc

SEQ ID NO: 56069 - DNA, 25 bp, Saccharomyces pastorianus
aatctggcccattactctatcgttc

SEQ ID NO: 56070 - DNA, 25 bp, Saccharomyces pastorianus
gatacatggacttttttcctctcgt

SEQ ID NO: 56071 - DNA, 25 bp, Saccharomyces pastorianus
cattgagtttcgcagacaggatctt

SEQ ID NO: 56072 - DNA, 25 bp, Saccharomyces pastorianus
caaatgaacctgctaccgaaagagt

SEQ ID NO: 56073 - DNA, 25 bp, Saccharomyces pastorianus
aagactgcagttttcactaccacat

SEQ ID NO: 56074 - DNA, 25 bp, Saccharomyces pastorianus
gaaggccattctgggatactgacag

SEQ ID NO: 56075 - DNA, 25 bp, Saccharomyces pastorianus
tggcagtcgtcactgggtgatttct

SEQ ID NO: 56076 - DNA, 25 bp, Saccharomyces pastorianus
ttcctgttcatgaggcccgcagaag

SEQ ID NO: 56077 - DNA, 25 bp, Saccharomyces pastorianus
gggctagctcctgaaattgttgttt

SEQ ID NO: 56078 - DNA, 25 bp, Saccharomyces pastorianus
gtgattgcatcacattgcctacaaa

SEQ ID NO: 56079 - DNA, 25 bp, Saccharomyces pastorianus
gtgatttctttgtaaagcccttcga

SEQ ID NO: 56080 - DNA, 25 bp, Saccharomyces pastorianus
ggcatctggtgccactgaaggcctt

SEQ ID NO: 56081 - DNA, 25 bp, Saccharomyces pastorianus
tgtacaatcaaactccttcagggct

SEQ ID NO: 56082 - DNA, 25 bp, Saccharomyces pastorianus
gaaattacatccagcttctacgata

SEQ ID NO: 56083 - DNA, 25 bp, Saccharomyces pastorianus
atcccttcccagtgctggataagga

SEQ ID NO: 56084 - DNA, 25 bp, Saccharomyces pastorianus
gagacgcttcgcaagtttaagtgat

SEQ ID NO: 56085 - DNA, 25 bp, Saccharomyces pastorianus
aggttaatgttttcgagaccaccat

SEQ ID NO: 56086 - DNA, 25 bp, Saccharomyces pastorianus
gaaaccatgttcttggcgtcgtgga

SEQ ID NO: 56087 - DNA, 25 bp, Saccharomyces pastorianus
taaaccttcacagcggccaggctat

SEQ ID NO: 56088 - DNA, 25 bp, Saccharomyces pastorianus
ggttatgacatttacggcccgattt

SEQ ID NO: 56089 - DNA, 25 bp, Saccharomyces pastorianus
gcctaccactactctgaacagtttg

SEQ ID NO: 56090 - DNA, 25 bp, Saccharomyces pastorianus
aagggaattccatactccagcgtaa

SEQ ID NO: 56091 - DNA, 25 bp, Saccharomyces pastorianus
gatttaccactcttttcgcaatatg

SEQ ID NO: 56092 - DNA, 25 bp, Saccharomyces pastorianus
gctttagcgtttatatccacccaaa

SEQ ID NO: 56093 - DNA, 25 bp, Saccharomyces pastorianus
gtcagccgctgggttggattattgt

SEQ ID NO: 56094 - DNA, 25 bp, Saccharomyces pastorianus
gtcatccacggcagagtttacaaca

SEQ ID NO: 56095 - DNA, 25 bp, Saccharomyces pastorianus
ttggcgggttattatctgcctacca

SEQ ID NO: 56096 - DNA, 25 bp, Saccharomyces pastorianus
gacgagttgtccactttgtctaatc

SEQ ID NO: 56097 - DNA, 25 bp, Saccharomyces pastorianus
tatgtgctattttctaccgccttca

SEQ ID NO: 56098 - DNA, 25 bp, Saccharomyces pastorianus
gtcagaaatcccttttacactactt

SEQ ID NO: 56099 - DNA, 25 bp, Saccharomyces pastorianus
ggctctttcagtggtagacatcctt

SEQ ID NO: 56100 - DNA, 25 bp, Saccharomyces pastorianus
tagaggctcacaagttcgacatttt

SEQ ID NO: 56101 - DNA, 25 bp, Saccharomyces pastorianus
ttttaacggtctgcccacatgaaag

SEQ ID NO: 56102 - DNA, 25 bp, Saccharomyces pastorianus
aggctcatttatgtcctaggtgaat

SEQ ID NO: 56103 - DNA, 25 bp, Saccharomyces pastorianus
gcgatatggcaactggttttcccaa

SEQ ID NO: 56104 - DNA, 25 bp, Saccharomyces pastorianus
gttttcccaacgatcaattccttat

SEQ ID NO: 56105 - DNA, 25 bp, Saccharomyces pastorianus
cgacattttgtctttgatcctgatt

SEQ ID NO: 56106 - DNA, 25 bp, Saccharomyces pastorianus
gaagagtctgtcgtacatctccaaa

SEQ ID NO: 56107 - DNA, 25 bp, Saccharomyces pastorianus
aattctttcttccaaggtactccag

SEQ ID NO: 56108 - DNA, 25 bp, Saccharomyces pastorianus
gctttacacagacaacgacgctact

SEQ ID NO: 56109 - DNA, 25 bp, Saccharomyces pastorianus
tccttcgaccttggtgtcacattaa

SEQ ID NO: 56110 - DNA, 25 bp, Saccharomyces pastorianus
gttcttaataacatgccttccgagt

SEQ ID NO: 56111 - DNA, 25 bp, Saccharomyces pastorianus
gctggtttggatattctccttcgac

SEQ ID NO: 56112 - DNA, 25 bp, Saccharomyces pastorianus
ttccctccagaacttgacgttatgc

SEQ ID NO: 56113 - DNA, 25 bp, Saccharomyces pastorianus
ggtactccagcgacactcaagaatg

SEQ ID NO: 56114 - DNA, 25 bp, Saccharomyces pastorianus
aagtgttgtcaaggccaattcctgc

SEQ ID NO: 56115 - DNA, 25 bp, Saccharomyces pastorianus
atttcacgcattctatgacggtctc

SEQ ID NO: 56116 - DNA, 25 bp, Saccharomyces pastorianus
attgctcagtagttctgggccagac

SEQ ID NO: 56117 - DNA, 25 bp, Saccharomyces pastorianus
ggctggcccactttataagctgtac

SEQ ID NO: 56118 - DNA, 25 bp, Saccharomyces pastorianus
gtcaatgacaccgtcaagatcgatt

SEQ ID NO: 56119 - DNA, 25 bp, Saccharomyces pastorianus
ggtaagatcaccgacttcatcaagt

SEQ ID NO: 56120 - DNA, 25 bp, Saccharomyces pastorianus
gacttcatcaagttcgacgctggta

SEQ ID NO: 56121 - DNA, 25 bp, Saccharomyces pastorianus
gacaccgtcaagatcgatttggcct

SEQ ID NO: 56122 - DNA, 25 bp, Saccharomyces pastorianus
cgacgtcaagggtagatttgccgtt

SEQ ID NO: 56123 - DNA, 25 bp, Saccharomyces pastorianus
ggtagatttgccgttcaccgtatca

SEQ ID NO: 56124 - DNA, 25 bp, Saccharomyces pastorianus
ccgttcaccgtatcaccgaagaaga

SEQ ID NO: 56125 - DNA, 25 bp, Saccharomyces pastorianus
ccgtcaagatcgatttggcctctgg

SEQ ID NO: 56126 - DNA, 25 bp, Saccharomyces pastorianus
catcaagttcgacgctggtaagcta

SEQ ID NO: 56127 - DNA, 25 bp, Saccharomyces pastorianus
gacgctggtaagctagtttacgtta

SEQ ID NO: 56128 - DNA, 25 bp, Saccharomyces pastorianus
ggcctctggtaagatcaccgacttc

SEQ ID NO: 56129 - DNA, 25 bp, Saccharomyces pastorianus
atgaacttctccatcgacacagcta

SEQ ID NO: 56130 - DNA, 25 bp, Saccharomyces pastorianus
gtggcattcgctgctgaatcttgac

SEQ ID NO: 56131 - DNA, 25 bp, Saccharomyces pastorianus
gaatcttgacacgtacgacctgctt

SEQ ID NO: 56132 - DNA, 25 bp, Saccharomyces pastorianus
atagtcggcgtcatgaacaacctca

SEQ ID NO: 56133 - DNA, 25 bp, Saccharomyces pastorianus
atggcaggcacgtgcgacgcatcga

SEQ ID NO: 56134 - DNA, 25 bp, Saccharomyces pastorianus
gatggccaattttctgcaagcgaac

SEQ ID NO: 56135 - DNA, 25 bp, Saccharomyces pastorianus
tggtgcgcttgctcaagtccatgaa

SEQ ID NO: 56136 - DNA, 25 bp, Saccharomyces pastorianus
gaggtcacctcgaacaacgcagaga

SEQ ID NO: 56137 - DNA, 25 bp, Saccharomyces pastorianus
aagcgaacttcgaagccatcaggaa

SEQ ID NO: 56138 - DNA, 25 bp, Saccharomyces pastorianus
aaaacgtcgatactctgcagggcaa

SEQ ID NO: 56139 - DNA, 25 bp, Saccharomyces pastorianus
gtgaattccattctcagcaaggctg

SEQ ID NO: 56140 - DNA, 25 bp, Saccharomyces pastorianus
gaagagcttcctccgtatggatata

SEQ ID NO: 56141 - DNA, 25 bp, Saccharomyces pastorianus
gactccatttatcgagcatcttttg

SEQ ID NO: 56142 - DNA, 25 bp, Saccharomyces pastorianus
agaagttcatctcctagcaaagcta

SEQ ID NO: 56143 - DNA, 25 bp, Saccharomyces pastorianus
agtgttcagtcaggcattgcaacca

SEQ ID NO: 56144 - DNA, 25 bp, Saccharomyces pastorianus
gggtttcgtatacgatatccctctc

SEQ ID NO: 56145 - DNA, 25 bp, Saccharomyces pastorianus
tatgctatccctacaagctgacgga

SEQ ID NO: 56146 - DNA, 25 bp, Saccharomyces pastorianus
tctcgttattgcgacgggcggaata

SEQ ID NO: 56147 - DNA, 25 bp, Saccharomyces pastorianus
ctgtccacggcccagttggtgaaaa

SEQ ID NO: 56148 - DNA, 25 bp, Saccharomyces pastorianus
ttgtttccggaaagcctgcgagaac

SEQ ID NO: 56149 - DNA, 25 bp, Saccharomyces pastorianus
aactgcatttctcggctgcaatgaa

SEQ ID NO: 56150 - DNA, 25 bp, Saccharomyces pastorianus
tttacgccacactcagaaactagga

SEQ ID NO: 56151 - DNA, 25 bp, Saccharomyces pastorianus
gattcccaaggcgactgtaacaatt

SEQ ID NO: 56152 - DNA, 25 bp, Saccharomyces pastorianus
ggagatatcctgttttattacgaga

SEQ ID NO: 56153 - DNA, 25 bp, Saccharomyces pastorianus
gtgttattgctcctcatggtataca

SEQ ID NO: 56154 - DNA, 25 bp, Saccharomyces pastorianus
ggaatggttcagatgccgtacatac

SEQ ID NO: 56155 - DNA, 25 bp, Saccharomyces pastorianus
gggtacgtaatagcacaggcgcttt

SEQ ID NO: 56156 - DNA, 25 bp, Saccharomyces pastorianus
ctatactgtcagaacgtcgtgttat

SEQ ID NO: 56157 - DNA, 25 bp, Saccharomyces pastorianus
gagatgttcaatttcgaaacgctgt

SEQ ID NO: 56158 - DNA, 25 bp, Saccharomyces pastorianus
gaaacgctgtaacggcatctatact

SEQ ID NO: 56159 - DNA, 25 bp, Saccharomyces pastorianus
tacaatttacgctcaacctggcgat

SEQ ID NO: 56160 - DNA, 25 bp, Saccharomyces pastorianus
aagtcatggctgattcccaaggcga

SEQ ID NO: 56161 - DNA, 25 bp, Saccharomyces pastorianus
tggcgatcgccttatcatcaaaacc

SEQ ID NO: 56162 - DNA, 25 bp, Saccharomyces pastorianus
aatatggccagtttcgtcccacaga

SEQ ID NO: 56163 - DNA, 25 bp, Saccharomyces pastorianus
tgttgcaaaccggtatcatctgtca

SEQ ID NO: 56164 - DNA, 25 bp, Saccharomyces pastorianus
ggcacaattgctgatcggtaacggt

SEQ ID NO: 56165 - DNA, 25 bp, Saccharomyces pastorianus
tttcgtggtatttcatctctgtgct

SEQ ID NO: 56166 - DNA, 25 bp, Saccharomyces pastorianus
tcttgttgcccatctcgattgtgat

SEQ ID NO: 56167 - DNA, 25 bp, Saccharomyces pastorianus
gatgggtcagttccatttcgtggta

SEQ ID NO: 56168 - DNA, 25 bp, Saccharomyces pastorianus
gtaacggtgggaacctctctgcgga

SEQ ID NO: 56169 - DNA, 25 bp, Saccharomyces pastorianus
actttcgcacgcttacagatgttat

SEQ ID NO: 56170 - DNA, 25 bp, Saccharomyces pastorianus
agagtttctcatcaaggacctcacc

SEQ ID NO: 56171 - DNA, 25 bp, Saccharomyces pastorianus
gattcattcttatgcagttgccctt

SEQ ID NO: 56172 - DNA, 25 bp, Saccharomyces pastorianus
aaccacttctttgcgggattcattc

SEQ ID NO: 56173 - DNA, 25 bp, Saccharomyces pastorianus
gcttcagggtaatttcccaccaaat

SEQ ID NO: 56174 - DNA, 25 bp, Saccharomyces pastorianus
gttaccagcgggtcaacaaccacaa

SEQ ID NO: 56175 - DNA, 25 bp, Saccharomyces pastorianus
agggatttcctatgccaccaaatgg

SEQ ID NO: 56176 - DNA, 25 bp, Saccharomyces pastorianus
gatatgccccaacagcaattcatgc

SEQ ID NO: 56177 - DNA, 25 bp, Saccharomyces pastorianus
ctccaggtcttgttcagttccaaaa

SEQ ID NO: 56178 - DNA, 25 bp, Saccharomyces pastorianus
gttttttccccatgcatcctaattt

SEQ ID NO: 56179 - DNA, 25 bp, Saccharomyces pastorianus
caccaaatttccaacagggctttag

SEQ ID NO: 56180 - DNA, 25 bp, Saccharomyces pastorianus
gatgggagtaccaccaaacttttca

SEQ ID NO: 56181 - DNA, 25 bp, Saccharomyces pastorianus
aggtttagtctctcatcaaggtcca

SEQ ID NO: 56182 - DNA, 25 bp, Saccharomyces pastorianus
tatgccaatgccacctatggttaat

SEQ ID NO: 56183 - DNA, 25 bp, Saccharomyces pastorianus
gaaaagcgaaactaacactccacct

SEQ ID NO: 56184 - DNA, 25 bp, Saccharomyces pastorianus
cgataacggatttcttgaacctgaa

SEQ ID NO: 56185 - DNA, 25 bp, Saccharomyces pastorianus
ataatcaagcgccatcaccaggtgc

SEQ ID NO: 56186 - DNA, 25 bp, Saccharomyces pastorianus
aaattcagagccacaaccactatcg

SEQ ID NO: 56187 - DNA, 25 bp, Saccharomyces pastorianus
actagaaagatacagactccctccc

SEQ ID NO: 56188 - DNA, 25 bp, Saccharomyces pastorianus
gaggacttgagacctgcaatgccaa

SEQ ID NO: 56189 - DNA, 25 bp, Saccharomyces pastorianus
tgcaccaatggcatttccacagcat

SEQ ID NO: 56190 - DNA, 25 bp, Saccharomyces pastorianus
aaccggttccagctcgataacggat

SEQ ID NO: 56191 - DNA, 25 bp, Saccharomyces pastorianus
tcttcaataagtccgccacttcatt

SEQ ID NO: 56192 - DNA, 25 bp, Saccharomyces pastorianus
gacaacagcacaccacgtcaaagtg

SEQ ID NO: 56193 - DNA, 25 bp, Saccharomyces pastorianus
aaaagttcatcgtctcgcttttcgt

SEQ ID NO: 56194 - DNA, 25 bp, Saccharomyces pastorianus
ctcgcttttcgtcattcttcaataa

SEQ ID NO: 56195 - DNA, 25 bp, Saccharomyces pastorianus
atttacagcaagttccagacggata

SEQ ID NO: 56196 - DNA, 25 bp, Saccharomyces pastorianus
atagtgcattgttgagaccgggccg

SEQ ID NO: 56197 - DNA, 25 bp, Saccharomyces pastorianus
cagggttttcaggtgcggatttgca

SEQ ID NO: 56198 - DNA, 25 bp, Saccharomyces pastorianus
gaagccaacagctgtggtcacgata

SEQ ID NO: 56199 - DNA, 25 bp, Saccharomyces pastorianus
atcggtacctgtctgccagtagaga

SEQ ID NO: 56200 - DNA, 25 bp, Saccharomyces pastorianus
acctgaacaggcgtccggagataat

SEQ ID NO: 56201 - DNA, 25 bp, Saccharomyces pastorianus
ttttagcagccacgagtagacccga

SEQ ID NO: 56202 - DNA, 25 bp, Saccharomyces pastorianus
ataaactacgtttgcggactctgct

SEQ ID NO: 56203 - DNA, 25 bp, Saccharomyces pastorianus
agggcctctgttacaacgcgtattt

SEQ ID NO: 56204 - DNA, 25 bp, Saccharomyces pastorianus
atcgagtacttcactatcaacggga

SEQ ID NO: 56205 - DNA, 25 bp, Saccharomyces pastorianus
aggaaggaactgacctcgccatgat

SEQ ID NO: 56206 - DNA, 25 bp, Saccharomyces pastorianus
attaccgggctatccatctttagtg

SEQ ID NO: 56207 - DNA, 25 bp, Saccharomyces pastorianus
agagacagctctgggtccattgata

SEQ ID NO: 56208 - DNA, 25 bp, Saccharomyces pastorianus
aaacgagttcatgagtattccaggt

SEQ ID NO: 56209 - DNA, 25 bp, Saccharomyces pastorianus
gaaccccttggcaggtcgtataatg

SEQ ID NO: 56210 - DNA, 25 bp, Saccharomyces pastorianus
tctacgatatcgataaggacggatt

SEQ ID NO: 56211 - DNA, 25 bp, Saccharomyces pastorianus
aaagttcgctttcaaaatctacgat

SEQ ID NO: 56212 - DNA, 25 bp, Saccharomyces pastorianus
ctatccatctttagtgggcgtgggt

SEQ ID NO: 56213 - DNA, 25 bp, Saccharomyces pastorianus
ttccaggagttcattaccgggctat

SEQ ID NO: 56214 - DNA, 25 bp, Saccharomyces pastorianus
ggtgacgtggacttccaggagttca

SEQ ID NO: 56215 - DNA, 25 bp, Saccharomyces pastorianus
aaatgccatcgaaaccacggaagtg

SEQ ID NO: 56216 - DNA, 25 bp, Saccharomyces pastorianus
gagtattccaggtgtttcttcgaac

SEQ ID NO: 56217 - DNA, 25 bp, Saccharomyces pastorianus
ggaattaacagtcggcgttcaacaa

SEQ ID NO: 56218 - DNA, 25 bp, Saccharomyces pastorianus
gtcagagaccaacttgaaccttttc

SEQ ID NO: 56219 - DNA, 25 bp, Saccharomyces pastorianus
atccaaaatcatccaaagccaacgc

SEQ ID NO: 56220 - DNA, 25 bp, Saccharomyces pastorianus
aggctaccgctgttttcgaaaccat

SEQ ID NO: 56221 - DNA, 25 bp, Saccharomyces pastorianus
gaaaccatcatcaacagcatcgtca

SEQ ID NO: 56222 - DNA, 25 bp, Saccharomyces pastorianus
aatcttttatcacaccatccatagg

SEQ ID NO: 56223 - DNA, 25 bp, Saccharomyces pastorianus
caacaagtaccgctctgggagagga

SEQ ID NO: 56224 - DNA, 25 bp, Saccharomyces pastorianus
gcctaaatttgctgtccttgatgaa

SEQ ID NO: 56225 - DNA, 25 bp, Saccharomyces pastorianus
ggcggatatcaatttggtcccttca

SEQ ID NO: 56226 - DNA, 25 bp, Saccharomyces pastorianus
gaatgtacatcagcagtggctccag

SEQ ID NO: 56227 - DNA, 25 bp, Saccharomyces pastorianus
tggtcccttcaacccacaagaaagg

SEQ ID NO: 56228 - DNA, 25 bp, Saccharomyces pastorianus
cgttcctcatacatcatattgctgc

SEQ ID NO: 56229 - DNA, 25 bp, Saccharomyces pastorianus
gaagagttgacgatggtttccaaac

SEQ ID NO: 56230 - DNA, 25 bp, Saccharomyces pastorianus
gtttccaaacacagtaccgattcag

SEQ ID NO: 56231 - DNA, 25 bp, Saccharomyces pastorianus
aaatgtcttcaacggcatctggttt

SEQ ID NO: 56232 - DNA, 25 bp, Saccharomyces pastorianus
tgctgctagcaacgctttacaactc

SEQ ID NO: 56233 - DNA, 25 bp, Saccharomyces pastorianus
gttcaaacttttgctacatgacagg

SEQ ID NO: 56234 - DNA, 25 bp, Saccharomyces pastorianus
gttttatttatcacgcaggctatcc

SEQ ID NO: 56235 - DNA, 25 bp, Saccharomyces pastorianus
agtgaatctactacgttcctcatac

SEQ ID NO: 56236 - DNA, 25 bp, Saccharomyces pastorianus
ggatggtcagctagtttccacttta

SEQ ID NO: 56237 - DNA, 25 bp, Saccharomyces pastorianus
caggacgttattgtctcttcgtgtg

SEQ ID NO: 56238 - DNA, 25 bp, Saccharomyces pastorianus
aaaggatacacagtcgacggattca

SEQ ID NO: 56239 - DNA, 25 bp, Saccharomyces pastorianus
atgccattctagtgattcgccttgt

SEQ ID NO: 56240 - DNA, 25 bp, Saccharomyces pastorianus
gagtgtgcgtgtcatgccattctag

SEQ ID NO: 56241 - DNA, 25 bp, Saccharomyces pastorianus
attcgtccctgaacgcaactgtgaa

SEQ ID NO: 56242 - DNA, 25 bp, Saccharomyces pastorianus
gataatccaagctacagctccgtga

SEQ ID NO: 56243 - DNA, 25 bp, Saccharomyces pastorianus
actcctgtggcttgcgctataagaa

SEQ ID NO: 56244 - DNA, 25 bp, Saccharomyces pastorianus
gcaagaccaactatgtaactcctgt

SEQ ID NO: 56245 - DNA, 25 bp, Saccharomyces pastorianus
tatcacagatttgccctagattccc

SEQ ID NO: 56246 - DNA, 25 bp, Saccharomyces pastorianus
attcgccttgttggagaccgtcatg

SEQ ID NO: 56247 - DNA, 25 bp, Saccharomyces pastorianus
gagatcgagatcatcttcacctgta

SEQ ID NO: 56248 - DNA, 25 bp, Saccharomyces pastorianus
gaagatcatccaactcgagcattac

SEQ ID NO: 56249 - DNA, 25 bp, Saccharomyces pastorianus
gccatcataccagagtgtgcgtgtc

SEQ ID NO: 56250 - DNA, 25 bp, Saccharomyces pastorianus
atatcgaccgtctctttctctaaaa

SEQ ID NO: 56251 - DNA, 25 bp, Saccharomyces pastorianus
aattttacctccattgtcattagct

SEQ ID NO: 56252 - DNA, 25 bp, Saccharomyces pastorianus
actccctcaatgtgtcaccaatttt

SEQ ID NO: 56253 - DNA, 25 bp, Saccharomyces pastorianus
agaaaatgcagctcgtttccctgat

SEQ ID NO: 56254 - DNA, 25 bp, Saccharomyces pastorianus
gcatcacatggcttacaacccaatt

SEQ ID NO: 56255 - DNA, 25 bp, Saccharomyces pastorianus
aatttcaacccattcacaagctcaa

SEQ ID NO: 56256 - DNA, 25 bp, Saccharomyces pastorianus
aaaagaccggagcactgccagcaat

SEQ ID NO: 56257 - DNA, 25 bp, Saccharomyces pastorianus
aatttcatcattgacgcccaacagc

SEQ ID NO: 56258 - DNA, 25 bp, Saccharomyces pastorianus
ttactacctagtccacttcaacaag

SEQ ID NO: 56259 - DNA, 25 bp, Saccharomyces pastorianus
ggaaaactaatctcactcattggtg

SEQ ID NO: 56260 - DNA, 25 bp, Saccharomyces pastorianus
tgccagcaatccttaccatcgttaa

SEQ ID NO: 56261 - DNA, 25 bp, Saccharomyces pastorianus
tgatctaagagccttggacgccact

SEQ ID NO: 56262 - DNA, 25 bp, Saccharomyces pastorianus
ttttgcttgtattccattgcctggt

SEQ ID NO: 56263 - DNA, 25 bp, Saccharomyces pastorianus
gaaatcattgacgaagccgccaaga

SEQ ID NO: 56264 - DNA, 25 bp, Saccharomyces pastorianus
ctgccaagccattccaagttactaa

SEQ ID NO: 56265 - DNA, 25 bp, Saccharomyces pastorianus
gaaatctgcagttaaacctcgccca

SEQ ID NO: 56266 - DNA, 25 bp, Saccharomyces pastorianus
cctcgcccacttgttttggaaagag

SEQ ID NO: 56267 - DNA, 25 bp, Saccharomyces pastorianus
ggacgccactaccaatgttttgaac

SEQ ID NO: 56268 - DNA, 25 bp, Saccharomyces pastorianus
gaaaaccaacagtacgttgccgccg

SEQ ID NO: 56269 - DNA, 25 bp, Saccharomyces pastorianus
attgcctggtatctctgttcctttc

SEQ ID NO: 56270 - DNA, 25 bp, Saccharomyces pastorianus
ttcctttccattcgacttacttgag

SEQ ID NO: 56271 - DNA, 25 bp, Saccharomyces pastorianus
gaagggttgctacatcattttctca

SEQ ID NO: 56272 - DNA, 25 bp, Saccharomyces pastorianus
ggatggtaccggtgttcgtattatc

SEQ ID NO: 56273 - DNA, 25 bp, Saccharomyces pastorianus
tattatcgttgctggtactctagac

SEQ ID NO: 56274 - DNA, 25 bp, Saccharomyces pastorianus
gtactctagacatcaacccagacgg

SEQ ID NO: 56275 - DNA, 25 bp, Saccharomyces pastorianus
ggtctaggtgtcttgactcatcgta

SEQ ID NO: 56276 - DNA, 25 bp, Saccharomyces pastorianus
gcatcaccttttcattctcatttat

SEQ ID NO: 56277 - DNA, 25 bp, Saccharomyces pastorianus
acccagacggtgactacggattcaa

SEQ ID NO: 56278 - DNA, 25 bp, Saccharomyces pastorianus
tctcgggctccatctcagaaagaat

SEQ ID NO: 56279 - DNA, 25 bp, Saccharomyces pastorianus
actagatttcggtccaggtggtgct

SEQ ID NO: 56280 - DNA, 25 bp, Saccharomyces pastorianus
aagaacttggtcgtatcaggcccac

SEQ ID NO: 56281 - DNA, 25 bp, Saccharomyces pastorianus
aatcttcgacgttaccagcaatggg

SEQ ID NO: 56282 - DNA, 25 bp, Saccharomyces pastorianus
taccacacaattcaaaaccactcat

SEQ ID NO: 56283 - DNA, 25 bp, Saccharomyces pastorianus
agaagatttaactcttccatcggta

SEQ ID NO: 56284 - DNA, 25 bp, Saccharomyces pastorianus
aatccgcttctgctcgtggttccta

SEQ ID NO: 56285 - DNA, 25 bp, Saccharomyces pastorianus
aagatttaactcttccatcggtaga

SEQ ID NO: 56286 - DNA, 25 bp, Saccharomyces pastorianus
gatttaactcttccatcggtagaac

SEQ ID NO: 56287 - DNA, 25 bp, Saccharomyces pastorianus
taaatccgcttctgctcgtggttcc

SEQ ID NO: 56288 - DNA, 25 bp, Saccharomyces pastorianus
cgcttctgctcgtggttcctacttg

SEQ ID NO: 56289 - DNA, 25 bp, Saccharomyces pastorianus
gctaaatccgcttctgctcgtggtt

SEQ ID NO: 56290 - DNA, 25 bp, Saccharomyces pastorianus
ctaaatccgcttctgctcgtggttc

SEQ ID NO: 56291 - DNA, 25 bp, Saccharomyces pastorianus
ttctgctcgtggttcctacttgcgt

SEQ ID NO: 56292 - DNA, 25 bp, Saccharomyces pastorianus
tgctaaatccgcttctgctcgtggt

SEQ ID NO: 56293 - DNA, 25 bp, Saccharomyces pastorianus
agatttaactcttccatcggtagaa

SEQ ID NO: 56294 - DNA, 25 bp, Saccharomyces pastorianus
ctccactaaccctgctaaatccgct

SEQ ID NO: 56295 - DNA, 25 bp, Saccharomyces pastorianus
tgctcaagctatcaacggttgggaa

SEQ ID NO: 56296 - DNA, 25 bp, Saccharomyces pastorianus
ggctagatacggtgctacctccact

SEQ ID NO: 56297 - DNA, 25 bp, Saccharomyces pastorianus
tgctacctccactaaccctgctaaa

SEQ ID NO: 56298 - DNA, 25 bp, Saccharomyces pastorianus
agatacggtgctacctccactaacc

SEQ ID NO: 56299 - DNA, 25 bp, Saccharomyces pastorianus
taaatccgcttctgctcgtggttcc

SEQ ID NO: 56300 - DNA, 25 bp, Saccharomyces pastorianus
tggctagatacggtgctacctccac

SEQ ID NO: 56301 - DNA, 25 bp, Saccharomyces pastorianus
ctagatacggtgctacctccactaa

SEQ ID NO: 56302 - DNA, 25 bp, Saccharomyces pastorianus
gctagatacggtgctacctccacta

SEQ ID NO: 56303 - DNA, 25 bp, Saccharomyces pastorianus
ttaactcttccatcggtagaaccgc

SEQ ID NO: 56304 - DNA, 25 bp, Saccharomyces pastorianus
tagatacggtgctacctccactaac

SEQ ID NO: 56305 - DNA, 25 bp, Saccharomyces pastorianus
tttttgttctactgtattggcttac

SEQ ID NO: 56306 - DNA, 25 bp, Saccharomyces pastorianus
atgttggtcctcagtttaacgatgc

SEQ ID NO: 56307 - DNA, 25 bp, Saccharomyces pastorianus
aggtatttgcaagcctataacggta

SEQ ID NO: 56308 - DNA, 25 bp, Saccharomyces pastorianus
gaaggcgttgacgtagaatctcaat

SEQ ID NO: 56309 - DNA, 25 bp, Saccharomyces pastorianus
attggcttacatggactcgtattca

SEQ ID NO: 56310 - DNA, 25 bp, Saccharomyces pastorianus
ggtagtgctactccagcaacttcaa

SEQ ID NO: 56311 - DNA, 25 bp, Saccharomyces pastorianus
gagatagattccgttcgagaaacat

SEQ ID NO: 56312 - DNA, 25 bp, Saccharomyces pastorianus
agctctattataggcattccagaag

SEQ ID NO: 56313 - DNA, 25 bp, Saccharomyces pastorianus
gaagaatcgctacatccaattgcaa

SEQ ID NO: 56314 - DNA, 25 bp, Saccharomyces pastorianus
tgaacagtcgtacatcccatagaat

SEQ ID NO: 56315 - DNA, 25 bp, Saccharomyces pastorianus
gagtttcgcaaaagtcatcctgcag

SEQ ID NO: 56316 - DNA, 25 bp, Saccharomyces pastorianus
tttaccatcccatcttgttaggaag

SEQ ID NO: 56317 - DNA, 25 bp, Saccharomyces pastorianus
gcaccgacttgcagtttgataacaa

SEQ ID NO: 56318 - DNA, 25 bp, Saccharomyces pastorianus
gatataccaatattcgcaccgactt

SEQ ID NO: 56319 - DNA, 25 bp, Saccharomyces pastorianus
tagtgacggcacaagatataccaat

SEQ ID NO: 56320 - DNA, 25 bp, Saccharomyces pastorianus
tatcactccaagtagacatagtcct

SEQ ID NO: 56321 - DNA, 25 bp, Saccharomyces pastorianus
accacgttatcaaaattatagccgg

SEQ ID NO: 56322 - DNA, 25 bp, Saccharomyces pastorianus
atagccggaatattcttggtcttgg

SEQ ID NO: 56323 - DNA, 25 bp, Saccharomyces pastorianus
ggtggtatgagtaatatcactccaa

SEQ ID NO: 56324 - DNA, 25 bp, Saccharomyces pastorianus
ttaggaagtcttcaccactccatat

SEQ ID NO: 56325 - DNA, 25 bp, Saccharomyces pastorianus
cttggtcttggaatgccacgctaaa

SEQ ID NO: 56326 - DNA, 25 bp, Saccharomyces pastorianus
atattcattataagcaaccacgtta

SEQ ID NO: 56327 - DNA, 25 bp, Saccharomyces pastorianus
gattctgaagctctacggatctttt

SEQ ID NO: 56328 - DNA, 25 bp, Saccharomyces pastorianus
tgacccattttagcaactttttcca

SEQ ID NO: 56329 - DNA, 25 bp, Saccharomyces pastorianus
gaaattttcccaggcaattcctcgt

SEQ ID NO: 56330 - DNA, 25 bp, Saccharomyces pastorianus
ggtagattgggttccagcctagaaa

SEQ ID NO: 56331 - DNA, 25 bp, Saccharomyces pastorianus
gcaattcctcgtatgcagatatatt

SEQ ID NO: 56332 - DNA, 25 bp, Saccharomyces pastorianus
gtcccgccggccaagaatctgagag

SEQ ID NO: 56333 - DNA, 25 bp, Saccharomyces pastorianus
gaatatgccaaccttcattgaatga

SEQ ID NO: 56334 - DNA, 25 bp, Saccharomyces pastorianus
aatgatttaggctccagttacgaaa

SEQ ID NO: 56335 - DNA, 25 bp, Saccharomyces pastorianus
ttttccaattacaagcgtgtcccgc

SEQ ID NO: 56336 - DNA, 25 bp, Saccharomyces pastorianus
gtttactggtttcattacgctcgag

SEQ ID NO: 56337 - DNA, 25 bp, Saccharomyces pastorianus
taaaccactggaactgttgcccaaa

SEQ ID NO: 56338 - DNA, 25 bp, Saccharomyces pastorianus
aacttcaactgacaatcttccgggc

SEQ ID NO: 56339 - DNA, 25 bp, Saccharomyces pastorianus
aagacttattccttgtttgcgctct

SEQ ID NO: 56340 - DNA, 25 bp, Saccharomyces pastorianus
gacccagattcatctgccgtatcaa

SEQ ID NO: 56341 - DNA, 25 bp, Saccharomyces pastorianus
ttccgggccgcgcagatagcaataa

SEQ ID NO: 56342 - DNA, 25 bp, Saccharomyces pastorianus
agacttttcttgtaccctgagacat

SEQ ID NO: 56343 - DNA, 25 bp, Saccharomyces pastorianus
ttgcgctctttgtctgaaatcccaa

SEQ ID NO: 56344 - DNA, 25 bp, Saccharomyces pastorianus
atttcttccccttttgatggcaata

SEQ ID NO: 56345 - DNA, 25 bp, Saccharomyces pastorianus
cgtccaaaatcgttattctttcagg

SEQ ID NO: 56346 - DNA, 25 bp, Saccharomyces pastorianus
ggcggagttgagcacgttaacttca

SEQ ID NO: 56347 - DNA, 25 bp, Saccharomyces pastorianus
aatacggcacgaaggtctggaccca

SEQ ID NO: 56348 - DNA, 25 bp, Saccharomyces pastorianus
gttattgtttatcttatctgcctta

SEQ ID NO: 56349 - DNA, 25 bp, Saccharomyces pastorianus
tcactgttctggtacgacttgccta

SEQ ID NO: 56350 - DNA, 25 bp, Saccharomyces pastorianus
gttctggtacgacttgcctaaaatg

SEQ ID NO: 56351 - DNA, 25 bp, Saccharomyces pastorianus
ttctggtacgacttgcctaaaatgg

SEQ ID NO: 56352 - DNA, 25 bp, Saccharomyces pastorianus
ctggtacgacttgcctaaaatggtg

SEQ ID NO: 56353 - DNA, 25 bp, Saccharomyces pastorianus
gtctcactgttctggtacgacttgc

SEQ ID NO: 56354 - DNA, 25 bp, Saccharomyces pastorianus
ctgttctggtacgacttgcctaaaa

SEQ ID NO: 56355 - DNA, 25 bp, Saccharomyces pastorianus
tctggtacgacttgcctaaaatggt

SEQ ID NO: 56356 - DNA, 25 bp, Saccharomyces pastorianus
actgttctggtacgacttgcctaaa

SEQ ID NO: 56357 - DNA, 25 bp, Saccharomyces pastorianus
cactgttctggtacgacttgcctaa

SEQ ID NO: 56358 - DNA, 25 bp, Saccharomyces pastorianus
agtctcactgttctggtacgacttg

SEQ ID NO: 56359 - DNA, 25 bp, Saccharomyces pastorianus
tgttctggtacgacttgcctaaaat

SEQ ID NO: 56360 - DNA, 25 bp, Saccharomyces pastorianus
gagaactacggctccaatcagtcat

SEQ ID NO: 56361 - DNA, 25 bp, Saccharomyces pastorianus
gaaacgcccttctcgaaactattgt

SEQ ID NO: 56362 - DNA, 25 bp, Saccharomyces pastorianus
tgaaaacgcctctttgtaccatcac

SEQ ID NO: 56363 - DNA, 25 bp, Saccharomyces pastorianus
gggttcgcaatgactttgccatttt

SEQ ID NO: 56364 - DNA, 25 bp, Saccharomyces pastorianus
ataatcatacctctggaacctctga

SEQ ID NO: 56365 - DNA, 25 bp, Saccharomyces pastorianus
gtccattggtatgcagacctgtcta

SEQ ID NO: 56366 - DNA, 25 bp, Saccharomyces pastorianus
acctgtctagtcttggcactgcata

SEQ ID NO: 56367 - DNA, 25 bp, Saccharomyces pastorianus
gagcatcaccgcaggattcttgttg

SEQ ID NO: 56368 - DNA, 25 bp, Saccharomyces pastorianus
gtaaaaatttcctctcgagccgtca

SEQ ID NO: 56369 - DNA, 25 bp, Saccharomyces pastorianus
ggaaccagccccattggtggaaaca

SEQ ID NO: 56370 - DNA, 25 bp, Saccharomyces pastorianus
ctctgtcgtcatctttgggtagcaa

SEQ ID NO: 56371 - DNA, 25 bp, Saccharomyces pastorianus
cgaatgatggcccaacattagaaaa

SEQ ID NO: 56372 - DNA, 25 bp, Saccharomyces pastorianus
atgatggcccaacattagaaaaata

SEQ ID NO: 56373 - DNA, 25 bp, Saccharomyces pastorianus
gtttatgtcgaatgatggcccaaca

SEQ ID NO: 56374 - DNA, 25 bp, Saccharomyces pastorianus
atgtcgaatgatggcccaacattag

SEQ ID NO: 56375 - DNA, 25 bp, Saccharomyces pastorianus
ttctacaggcgggtttatgtcgaat

SEQ ID NO: 56376 - DNA, 25 bp, Saccharomyces pastorianus
tctacaggcgggtttatgtcgaatg

SEQ ID NO: 56377 - DNA, 25 bp, Saccharomyces pastorianus
atggcccaacattagaaaaatatat

SEQ ID NO: 56378 - DNA, 25 bp, Saccharomyces pastorianus
acaggcgggtttatgtcgaatgatg

SEQ ID NO: 56379 - DNA, 25 bp, Saccharomyces pastorianus
ttatgtcgaatgatggcccaacatt

SEQ ID NO: 56380 - DNA, 25 bp, Saccharomyces pastorianus
ggtttatgtcgaatgatggcccaac

SEQ ID NO: 56381 - DNA, 25 bp, Saccharomyces pastorianus
tacaggcgggtttatgtcgaatgat

SEQ ID NO: 56382 - DNA, 25 bp, Saccharomyces pastorianus
cggagctgatccttttgattctgat

SEQ ID NO: 56383 - DNA, 25 bp, Saccharomyces pastorianus
gtttgacaacagtgatagggaaagt

SEQ ID NO: 56384 - DNA, 25 bp, Saccharomyces pastorianus
gctgatccttttgattctgatgaag

SEQ ID NO: 56385 - DNA, 25 bp, Saccharomyces pastorianus
tagtcggagctgatccttttgattc

SEQ ID NO: 56386 - DNA, 25 bp, Saccharomyces pastorianus
ttctgatgaagaaggaagtgtgcta

SEQ ID NO: 56387 - DNA, 25 bp, Saccharomyces pastorianus
atctagtcggagctgatccttttga

SEQ ID NO: 56388 - DNA, 25 bp, Saccharomyces pastorianus
gaaacggttatgtttgacaacagtg

SEQ ID NO: 56389 - DNA, 25 bp, Saccharomyces pastorianus
gagctgatccttttgattctgatga

SEQ ID NO: 56390 - DNA, 25 bp, Saccharomyces pastorianus
agttcggaaatctagtcggagctga

SEQ ID NO: 56391 - DNA, 25 bp, Saccharomyces pastorianus
gaaatctagtcggagctgatccttt

SEQ ID NO: 56392 - DNA, 25 bp, Saccharomyces pastorianus
gatgatttatttgatgagttcggaa

SEQ ID NO: 56393 - DNA, 25 bp, Saccharomyces pastorianus
gaacacacagtcaactgaaacccct

SEQ ID NO: 56394 - DNA, 25 bp, Saccharomyces pastorianus
ggaagtgctaatagaaaccgagaac

SEQ ID NO: 56395 - DNA, 25 bp, Saccharomyces pastorianus
acgtggaagtgctaatagaaaccga

SEQ ID NO: 56396 - DNA, 25 bp, Saccharomyces pastorianus
aagacgtggaagtgctaatagaaac

SEQ ID NO: 56397 - DNA, 25 bp, Saccharomyces pastorianus
acacagtcaactgaaacccctttag

SEQ ID NO: 56398 - DNA, 25 bp, Saccharomyces pastorianus
aaccgagaacacacagtcaactgaa

SEQ ID NO: 56399 - DNA, 25 bp, Saccharomyces pastorianus
tgctaatagaaaccgagaacacaca

SEQ ID NO: 56400 - DNA, 25 bp, Saccharomyces pastorianus
gaaaccgagaacacacagtcaactg

SEQ ID NO: 56401 - DNA, 25 bp, Saccharomyces pastorianus
catccttacgtcaaagacgtggaag

SEQ ID NO: 56402 - DNA, 25 bp, Saccharomyces pastorianus
cacagtcaactgaaacccctttagt

SEQ ID NO: 56403 - DNA, 25 bp, Saccharomyces pastorianus
atagaaaccgagaacacacagtcaa

SEQ ID NO: 56404 - DNA, 25 bp, Saccharomyces pastorianus
atatggactgcttgctgtatgattt

SEQ ID NO: 56405 - DNA, 25 bp, Saccharomyces pastorianus
accagtgttcaaaatcgttcttcaa

SEQ ID NO: 56406 - DNA, 25 bp, Saccharomyces pastorianus
agacgtccagagcatatcgattagt

SEQ ID NO: 56407 - DNA, 25 bp, Saccharomyces pastorianus
agttgctcaggtgaatcattcgctt

SEQ ID NO: 56408 - DNA, 25 bp, Saccharomyces pastorianus
tcattcgcttcaatccctgtgaata

SEQ ID NO: 56409 - DNA, 25 bp, Saccharomyces pastorianus
atctcaaagtactatccaggtgcga

SEQ ID NO: 56410 - DNA, 25 bp, Saccharomyces pastorianus
aataactctgtatcacgttcaagtg

SEQ ID NO: 56411 - DNA, 25 bp, Saccharomyces pastorianus
tttatcctgtccacgaagcatccaa

SEQ ID NO: 56412 - DNA, 25 bp, Saccharomyces pastorianus
attagtgtcacagcggaaccaatgg

SEQ ID NO: 56413 - DNA, 25 bp, Saccharomyces pastorianus
ggagctccctaagttattggacgct

SEQ ID NO: 56414 - DNA, 25 bp, Saccharomyces pastorianus
aagggtatttccgatgcatacatca

SEQ ID NO: 56415 - DNA, 25 bp, Saccharomyces pastorianus
aacacccacattattagagcccatt

SEQ ID NO: 56416 - DNA, 25 bp, Saccharomyces pastorianus
tggtctgttgacagcaacacccaca

SEQ ID NO: 56417 - DNA, 25 bp, Saccharomyces pastorianus
agttgacgttatggttcacgctcca

SEQ ID NO: 56418 - DNA, 25 bp, Saccharomyces pastorianus
acgctccactgttaccaatagttga

SEQ ID NO: 56419 - DNA, 25 bp, Saccharomyces pastorianus
tggaaattcgcggacaaattcccgt

SEQ ID NO: 56420 - DNA, 25 bp, Saccharomyces pastorianus
gaagcttgtaggaacaccgttgttg

SEQ ID NO: 56421 - DNA, 25 bp, Saccharomyces pastorianus
gggatgtgccaattgtacttctgga

SEQ ID NO: 56422 - DNA, 25 bp, Saccharomyces pastorianus
aagacgcggcagtcgattatacaag

SEQ ID NO: 56423 - DNA, 25 bp, Saccharomyces pastorianus
agaaggcctgttacgttggtctgtt

SEQ ID NO: 56424 - DNA, 25 bp, Saccharomyces pastorianus
ttagagcccatttacgaagttgacg

SEQ ID NO: 56425 - DNA, 25 bp, Saccharomyces pastorianus
aaattcccgttatcgaatcagcagg

SEQ ID NO: 56426 - DNA, 25 bp, Saccharomyces pastorianus
gagaaagaacgacgcagactccact

SEQ ID NO: 56427 - DNA, 25 bp, Saccharomyces pastorianus
gacgcagactccactgccgatgtca

SEQ ID NO: 56428 - DNA, 25 bp, Saccharomyces pastorianus
actccactgccgatgtcaccggatt

SEQ ID NO: 56429 - DNA, 25 bp, Saccharomyces pastorianus
gatgaagggtaagaccaacaggcca

SEQ ID NO: 56430 - DNA, 25 bp, Saccharomyces pastorianus
aagaatgccaagtacggtcaaggtg

SEQ ID NO: 56431 - DNA, 25 bp, Saccharomyces pastorianus
atgtcaccggattctcctccagaaa

SEQ ID NO: 56432 - DNA, 25 bp, Saccharomyces pastorianus
gagagtcgcaaagaatgccaagtac

SEQ ID NO: 56433 - DNA, 25 bp, Saccharomyces pastorianus
accggattctcctccagaaagatga

SEQ ID NO: 56434 - DNA, 25 bp, Saccharomyces pastorianus
aggcccaacggcaagagagtcgcaa

SEQ ID NO: 56435 - DNA, 25 bp, Saccharomyces pastorianus
ccaagtacggtcaaggtggaatgaa

SEQ ID NO: 56436 - DNA, 25 bp, Saccharomyces pastorianus
agaagtccgacagaggcaggcccaa

SEQ ID NO: 56437 - DNA, 25 bp, Saccharomyces pastorianus
ttacgcttccccagagcttttaaag

SEQ ID NO: 56438 - DNA, 25 bp, Saccharomyces pastorianus
atgtaacacttctcctttagggcca

SEQ ID NO: 56439 - DNA, 25 bp, Saccharomyces pastorianus
accggatttcgttagctcaagtctg

SEQ ID NO: 56440 - DNA, 25 bp, Saccharomyces pastorianus
aatgcatccatgaacaccaagcctg

SEQ ID NO: 56441 - DNA, 25 bp, Saccharomyces pastorianus
tgggacccgagccttccaagtatat

SEQ ID NO: 56442 - DNA, 25 bp, Saccharomyces pastorianus
aaattagcgcggcatccttatcttc

SEQ ID NO: 56443 - DNA, 25 bp, Saccharomyces pastorianus
gccagcgtccgatatttgggcatta

SEQ ID NO: 56444 - DNA, 25 bp, Saccharomyces pastorianus
gcccgactcttctcaatcagaaatt

SEQ ID NO: 56445 - DNA, 25 bp, Saccharomyces pastorianus
gaattcgaacctagactacgctctt

SEQ ID NO: 56446 - DNA, 25 bp, Saccharomyces pastorianus
agtatatcggatccttaccttacgc

SEQ ID NO: 56447 - DNA, 25 bp, Saccharomyces pastorianus
gcatatttatgattcgcccgactct

SEQ ID NO: 56448 - DNA, 25 bp, Saccharomyces pastorianus
acgatcctcgtatacaattagtagc

SEQ ID NO: 56449 - DNA, 25 bp, Saccharomyces pastorianus
gagacgatcctcgtatacaattagt

SEQ ID NO: 56450 - DNA, 25 bp, Saccharomyces pastorianus
actgggaagcggagagacgatcctc

SEQ ID NO: 56451 - DNA, 25 bp, Saccharomyces pastorianus
gtatacaattagtagcaacaacaac

SEQ ID NO: 56452 - DNA, 25 bp, Saccharomyces pastorianus
tccaactgggaagcggagagacgat

SEQ ID NO: 56453 - DNA, 25 bp, Saccharomyces pastorianus
aagcggagagacgatcctcgtatac

SEQ ID NO: 56454 - DNA, 25 bp, Saccharomyces pastorianus
gcggagagacgatcctcgtatacaa

SEQ ID NO: 56455 - DNA, 25 bp, Saccharomyces pastorianus
ggagagacgatcctcgtatacaatt

SEQ ID NO: 56456 - DNA, 25 bp, Saccharomyces pastorianus
gagagacgatcctcgtatacaatta

SEQ ID NO: 56457 - DNA, 25 bp, Saccharomyces pastorianus
gacgatcctcgtatacaattagtag

SEQ ID NO: 56458 - DNA, 25 bp, Saccharomyces pastorianus
ggaagcggagagacgatcctcgtat

SEQ ID NO: 56459 - DNA, 25 bp, Saccharomyces pastorianus
tactctcgtgcagctgcatagcaaa

SEQ ID NO: 56460 - DNA, 25 bp, Saccharomyces pastorianus
gaactttggaactctccagaggcaa

SEQ ID NO: 56461 - DNA, 25 bp, Saccharomyces pastorianus
gatttgcactctaatgtcaagccta

SEQ ID NO: 56462 - DNA, 25 bp, Saccharomyces pastorianus
tatacctgctaacgaggcggcgccg

SEQ ID NO: 56463 - DNA, 25 bp, Saccharomyces pastorianus
gaacatgagcatccatcgcggtcta

SEQ ID NO: 56464 - DNA, 25 bp, Saccharomyces pastorianus
gcaagcagcctttacacacgatggg

SEQ ID NO: 56465 - DNA, 25 bp, Saccharomyces pastorianus
atgagtccagaaggctctctcttat

SEQ ID NO: 56466 - DNA, 25 bp, Saccharomyces pastorianus
agacgattccgccagtagctacaag

SEQ ID NO: 56467 - DNA, 25 bp, Saccharomyces pastorianus
agcctatccctttacccagaaatag

SEQ ID NO: 56468 - DNA, 25 bp, Saccharomyces pastorianus
aaacagtgctactccgcaggtggaa

SEQ ID NO: 56469 - DNA, 25 bp, Saccharomyces pastorianus
atacgctctacttcaggcccaagaa

SEQ ID NO: 56470 - DNA, 25 bp, Saccharomyces pastorianus
gaaaggtcgactacacccattggaa

SEQ ID NO: 56471 - DNA, 25 bp, Saccharomyces pastorianus
ggcacaagttctgttttccaaaccg

SEQ ID NO: 56472 - DNA, 25 bp, Saccharomyces pastorianus
gaagcaattactccacggtgtcaaa

SEQ ID NO: 56473 - DNA, 25 bp, Saccharomyces pastorianus
acacccattggaagccgattgtttc

SEQ ID NO: 56474 - DNA, 25 bp, Saccharomyces pastorianus
gggcacaatcggatcggagccgtat

SEQ ID NO: 56475 - DNA, 25 bp, Saccharomyces pastorianus
tattctcttttatcctcatggtttg

SEQ ID NO: 56476 - DNA, 25 bp, Saccharomyces pastorianus
gtgaactcagaactagcggcaacta

SEQ ID NO: 56477 - DNA, 25 bp, Saccharomyces pastorianus
tgtcccgcaggtgatctttatggta

SEQ ID NO: 56478 - DNA, 25 bp, Saccharomyces pastorianus
agacatatcctttgacaccttttgc

SEQ ID NO: 56479 - DNA, 25 bp, Saccharomyces pastorianus
tcgctcattgcgacttgaaacctga

SEQ ID NO: 56480 - DNA, 25 bp, Saccharomyces pastorianus
ggtactaggacaccacctttggaag

SEQ ID NO: 56481 - DNA, 25 bp, Saccharomyces pastorianus
gttacagaaactattgacatgcgca

SEQ ID NO: 56482 - DNA, 25 bp, Saccharomyces pastorianus
cgggcatatgggtgccagagtcttt

SEQ ID NO: 56483 - DNA, 25 bp, Saccharomyces pastorianus
tagaacacaaccctcttccagagaa

SEQ ID NO: 56484 - DNA, 25 bp, Saccharomyces pastorianus
tttgaacaagattagtgccaccact

SEQ ID NO: 56485 - DNA, 25 bp, Saccharomyces pastorianus
gtgcaaactggaaatcctctctcaa

SEQ ID NO: 56486 - DNA, 25 bp, Saccharomyces pastorianus
gtcttttggcatgactacctaccta

SEQ ID NO: 56487 - DNA, 25 bp, Saccharomyces pastorianus
taagttaccccaaatcctcatagat

SEQ ID NO: 56488 - DNA, 25 bp, Saccharomyces pastorianus
gggcttaggttgacctttcagatga

SEQ ID NO: 56489 - DNA, 25 bp, Saccharomyces pastorianus
cctaccttgcaattctacaatccag

SEQ ID NO: 56490 - DNA, 25 bp, Saccharomyces pastorianus
tctcaagagggcacggttacagaaa

SEQ ID NO: 56491 - DNA, 25 bp, Saccharomyces pastorianus
gcagaagagtgttccgtgcaaactg

SEQ ID NO: 56492 - DNA, 25 bp, Saccharomyces pastorianus
tcagctacgggatttcttcgatgcg

SEQ ID NO: 56493 - DNA, 25 bp, Saccharomyces pastorianus
gctacgggatttcttcgatgcgatt

SEQ ID NO: 56494 - DNA, 25 bp, Saccharomyces pastorianus
ggatttcttcgatgcgattgaaaaa

SEQ ID NO: 56495 - DNA, 25 bp, Saccharomyces pastorianus
gtcgcttcagctacgggatttcttc

SEQ ID NO: 56496 - DNA, 25 bp, Saccharomyces pastorianus
acgggatttcttcgatgcgattgaa

SEQ ID NO: 56497 - DNA, 25 bp, Saccharomyces pastorianus
atgcagctctcggtaattttttccc

SEQ ID NO: 56498 - DNA, 25 bp, Saccharomyces pastorianus
ctacgggatttcttcgatgcgattg

SEQ ID NO: 56499 - DNA, 25 bp, Saccharomyces pastorianus
taattttttcccgtcgcttcagcta

SEQ ID NO: 56500 - DNA, 25 bp, Saccharomyces pastorianus
gcagctctcggtaattttttcccgt

SEQ ID NO: 56501 - DNA, 25 bp, Saccharomyces pastorianus
agttgtgttcaatgagaatatggga

SEQ ID NO: 56502 - DNA, 25 bp, Saccharomyces pastorianus
tgcagctctcggtaattttttcccg

SEQ ID NO: 56503 - DNA, 25 bp, Saccharomyces pastorianus
accaatttttgatccgttcccaatg

SEQ ID NO: 56504 - DNA, 25 bp, Saccharomyces pastorianus
tcactgttctactttttgttcaccg

SEQ ID NO: 56505 - DNA, 25 bp, Saccharomyces pastorianus
atcctgtcttccttattcatgttaa

SEQ ID NO: 56506 - DNA, 25 bp, Saccharomyces pastorianus
cacaatctcgtctctgatcatttca

SEQ ID NO: 56507 - DNA, 25 bp, Saccharomyces pastorianus
gtcatctacttaacttttgctcctg

SEQ ID NO: 56508 - DNA, 25 bp, Saccharomyces pastorianus
gctgcaggtgttaagagtctccgta

SEQ ID NO: 56509 - DNA, 25 bp, Saccharomyces pastorianus
actattgtttggctatcctgtcttc

SEQ ID NO: 56510 - DNA, 25 bp, Saccharomyces pastorianus
tttgctcctgcgtttatcattttaa

SEQ ID NO: 56511 - DNA, 25 bp, Saccharomyces pastorianus
aaccatctcctttgaatcactgttc

SEQ ID NO: 56512 - DNA, 25 bp, Saccharomyces pastorianus
gggctactgtctacatgcttgggta

SEQ ID NO: 56513 - DNA, 25 bp, Saccharomyces pastorianus
gaatgtcgcttccatttcttcattt

SEQ ID NO: 56514 - DNA, 25 bp, Saccharomyces pastorianus
agcattctcctttcaacttttacat

SEQ ID NO: 56515 - DNA, 25 bp, Saccharomyces pastorianus
gaactggatcctcttttaccagcat

SEQ ID NO: 56516 - DNA, 25 bp, Saccharomyces pastorianus
agaagcctcatttgcgttacttgga

SEQ ID NO: 56517 - DNA, 25 bp, Saccharomyces pastorianus
catcgctgttaactcatgtgacatt

SEQ ID NO: 56518 - DNA, 25 bp, Saccharomyces pastorianus
ttagaactatcgtcacttttggctt

SEQ ID NO: 56519 - DNA, 25 bp, Saccharomyces pastorianus
gatcgtatacgggtttttccataga

SEQ ID NO: 56520 - DNA, 25 bp, Saccharomyces pastorianus
atgtgacatttggatccgttggaat

SEQ ID NO: 56521 - DNA, 25 bp, Saccharomyces pastorianus
gaggatgccgccgatgaccagaaaa

SEQ ID NO: 56522 - DNA, 25 bp, Saccharomyces pastorianus
ggctggatctttttctcttttacaa

SEQ ID NO: 56523 - DNA, 25 bp, Saccharomyces pastorianus
aggtctgtattacgcacgggtatca

SEQ ID NO: 56524 - DNA, 25 bp, Saccharomyces pastorianus
cttttggcttcataggctggatctt

SEQ ID NO: 56525 - DNA, 25 bp, Saccharomyces pastorianus
acgccggtatcctaacagatggtaa

SEQ ID NO: 56526 - DNA, 25 bp, Saccharomyces pastorianus
ttaacgccggtatcctaacagatgg

SEQ ID NO: 56527 - DNA, 25 bp, Saccharomyces pastorianus
cggtatcctaacagatggtaagggc

SEQ ID NO: 56528 - DNA, 25 bp, Saccharomyces pastorianus
taacgccggtatcctaacagatggt

SEQ ID NO: 56529 - DNA, 25 bp, Saccharomyces pastorianus
gccggtatcctaacagatggtaagg

SEQ ID NO: 56530 - DNA, 25 bp, Saccharomyces pastorianus
ccagatggtaacttggccattggta

SEQ ID NO: 56531 - DNA, 25 bp, Saccharomyces pastorianus
cgccggtatcctaacagatggtaag

SEQ ID NO: 56532 - DNA, 25 bp, Saccharomyces pastorianus
cactccagatggtaacttggccatt

SEQ ID NO: 56533 - DNA, 25 bp, Saccharomyces pastorianus
cttaacgccggtatcctaacagatg

SEQ ID NO: 56534 - DNA, 25 bp, Saccharomyces pastorianus
aacgccggtatcctaacagatggta

SEQ ID NO: 56535 - DNA, 25 bp, Saccharomyces pastorianus
agatggtaacttggccattggtaac

SEQ ID NO: 56536 - DNA, 25 bp, Saccharomyces pastorianus
cggtatcctaacagatggtaagggc

SEQ ID NO: 56537 - DNA, 25 bp, Saccharomyces pastorianus
ggtaacttctacaatctgtacgatg

SEQ ID NO: 56538 - DNA, 25 bp, Saccharomyces pastorianus
taacgccggtatcctaacagatggt

SEQ ID NO: 56539 - DNA, 25 bp, Saccharomyces pastorianus
gtacgatgaacacattgggtctcaa

SEQ ID NO: 56540 - DNA, 25 bp, Saccharomyces pastorianus
aagccggtgctctttacgctgctgg

SEQ ID NO: 56541 - DNA, 25 bp, Saccharomyces pastorianus
ccagatggtaacttggccattggta

SEQ ID NO: 56542 - DNA, 25 bp, Saccharomyces pastorianus
cgccggtatcctaacagatggtaag

SEQ ID NO: 56543 - DNA, 25 bp, Saccharomyces pastorianus
cactccagatggtaacttggccatt

SEQ ID NO: 56544 - DNA, 25 bp, Saccharomyces pastorianus
cttaacgccggtatcctaacagatg

SEQ ID NO: 56545 - DNA, 25 bp, Saccharomyces pastorianus
aacgccggtatcctaacagatggta

SEQ ID NO: 56546 - DNA, 25 bp, Saccharomyces pastorianus
agatggtaacttggccattggtaac

SEQ ID NO: 56547 - DNA, 25 bp, Saccharomyces pastorianus
aagaaaaccctagtcgcatctgctt

SEQ ID NO: 56548 - DNA, 25 bp, Saccharomyces pastorianus
taccactaagactcaagctcctgct

SEQ ID NO: 56549 - DNA, 25 bp, Saccharomyces pastorianus
aaccctagtcgcatctgctttagct

SEQ ID NO: 56550 - DNA, 25 bp, Saccharomyces pastorianus
taagactcaagctcctgctgtctct

SEQ ID NO: 56551 - DNA, 25 bp, Saccharomyces pastorianus
atgcaatacaagaaaaccctagtcg

SEQ ID NO: 56552 - DNA, 25 bp, Saccharomyces pastorianus
gtgcagctatttcccaaatcggtga

SEQ ID NO: 56553 - DNA, 25 bp, Saccharomyces pastorianus
gggtgcagctatttcccaaatcggt

SEQ ID NO: 56554 - DNA, 25 bp, Saccharomyces pastorianus
gctactaccaagactcaagctacca

SEQ ID NO: 56555 - DNA, 25 bp, Saccharomyces pastorianus
ggtatcgctgttgaaccaatcgcta

SEQ ID NO: 56556 - DNA, 25 bp, Saccharomyces pastorianus
tgttgaaccaatcgctactaccgcc

SEQ ID NO: 56557 - DNA, 25 bp, Saccharomyces pastorianus
gactcaagctaccactaagactcaa

SEQ ID NO: 56558 - DNA, 25 bp, Saccharomyces pastorianus
taccaacggcgctagtcaagtgagt

SEQ ID NO: 56559 - DNA, 25 bp, Saccharomyces pastorianus
tctaccagtgtttgtcgggtgactt

SEQ ID NO: 56560 - DNA, 25 bp, Saccharomyces pastorianus
agtcgatgtcgtctcttgcaataat

SEQ ID NO: 56561 - DNA, 25 bp, Saccharomyces pastorianus
gtacgataaacacattggttcccag

SEQ ID NO: 56562 - DNA, 25 bp, Saccharomyces pastorianus
tggttcccagtgtcatgaagtttac

SEQ ID NO: 56563 - DNA, 25 bp, Saccharomyces pastorianus
aaaggtgctgcttctcagatcacag

SEQ ID NO: 56564 - DNA, 25 bp, Saccharomyces pastorianus
caagagcgccaacgatccagtcgat

SEQ ID NO: 56565 - DNA, 25 bp, Saccharomyces pastorianus
ggtgaccaagacactttctaccagt

SEQ ID NO: 56566 - DNA, 25 bp, Saccharomyces pastorianus
ttcaggccactaccgaagccaagag

SEQ ID NO: 56567 - DNA, 25 bp, Saccharomyces pastorianus
gtacaggcttcgaaaactaccaacg

SEQ ID NO: 56568 - DNA, 25 bp, Saccharomyces pastorianus
tcgggtgacttttacaacttgtacg

SEQ ID NO: 56569 - DNA, 25 bp, Saccharomyces pastorianus
gctgatgtccatccctcaataaaaa

SEQ ID NO: 56570 - DNA, 25 bp, Saccharomyces pastorianus
gctcgaatgcaataccacccaggaa

SEQ ID NO: 56571 - DNA, 25 bp, Saccharomyces pastorianus
aactcagccgtttgaaagccatgta

SEQ ID NO: 56572 - DNA, 25 bp, Saccharomyces pastorianus
ttgaggtcacacagcgggccaaata

SEQ ID NO: 56573 - DNA, 25 bp, Saccharomyces pastorianus
tccgatgcctctcttatgagtcaac

SEQ ID NO: 56574 - DNA, 25 bp, Saccharomyces pastorianus
gaagaccccattctccaagaggttg

SEQ ID NO: 56575 - DNA, 25 bp, Saccharomyces pastorianus
aactcaggttcgtctcaaggtgcaa

SEQ ID NO: 56576 - DNA, 25 bp, Saccharomyces pastorianus
atgtttgatcgtgtcatcatctcct

SEQ ID NO: 56577 - DNA, 25 bp, Saccharomyces pastorianus
catcattgactacaactcagccgtt

SEQ ID NO: 56578 - DNA, 25 bp, Saccharomyces pastorianus
gctggagtttgatccggaacgacga

SEQ ID NO: 56579 - DNA, 25 bp, Saccharomyces pastorianus
ggtggagacttttcatcatcatctt

SEQ ID NO: 56580 - DNA, 25 bp, Saccharomyces pastorianus
caccgtgagggtgtcgaggctttat

SEQ ID NO: 56581 - DNA, 25 bp, Saccharomyces pastorianus
tgacaaagacgccatcccagcatta

SEQ ID NO: 56582 - DNA, 25 bp, Saccharomyces pastorianus
gtgctgcctgtgctgccagagatca

SEQ ID NO: 56583 - DNA, 25 bp, Saccharomyces pastorianus
aatgttgggttctgtcgtcacctta

SEQ ID NO: 56584 - DNA, 25 bp, Saccharomyces pastorianus
aattgccaagagattacctcctggt

SEQ ID NO: 56585 - DNA, 25 bp, Saccharomyces pastorianus
aattgtattcaacacagccgcaaga

SEQ ID NO: 56586 - DNA, 25 bp, Saccharomyces pastorianus
attggacaccattacctcaaaggcc

SEQ ID NO: 56587 - DNA, 25 bp, Saccharomyces pastorianus
tacctcctggtctatcaatgttggg

SEQ ID NO: 56588 - DNA, 25 bp, Saccharomyces pastorianus
taggctatctgtttgacggcactgt

SEQ ID NO: 56589 - DNA, 25 bp, Saccharomyces pastorianus
cttcgatcaaagtctggcccaaaca

SEQ ID NO: 56590 - DNA, 25 bp, Saccharomyces pastorianus
ttccggctttacttcactgcaaaaa

SEQ ID NO: 56591 - DNA, 25 bp, Saccharomyces pastorianus
gatgctttacaatctgctaatgggt

SEQ ID NO: 56592 - DNA, 25 bp, Saccharomyces pastorianus
gcaagaccatcatcaaagattaacg

SEQ ID NO: 56593 - DNA, 25 bp, Saccharomyces pastorianus
gtggattccacaatcgatcctaaga

SEQ ID NO: 56594 - DNA, 25 bp, Saccharomyces pastorianus
gaagggtctgtcgttaccatcgagg

SEQ ID NO: 56595 - DNA, 25 bp, Saccharomyces pastorianus
gcgaatcatttactgcaagaccatc

SEQ ID NO: 56596 - DNA, 25 bp, Saccharomyces pastorianus
attattgatcactgaatctagctgt

SEQ ID NO: 56597 - DNA, 25 bp, Saccharomyces pastorianus
accatcgagggtagtgtcagtaaga

SEQ ID NO: 56598 - DNA, 25 bp, Saccharomyces pastorianus
gataccgagaattcattagatgctt

SEQ ID NO: 56599 - DNA, 25 bp, Saccharomyces pastorianus
ctagctgtgagaatggtgtggatat

SEQ ID NO: 56600 - DNA, 25 bp, Saccharomyces pastorianus
gtcaacgaagacgaggataccgaga

SEQ ID NO: 56601 - DNA, 25 bp, Saccharomyces pastorianus
gtggatattttgatcgcatgcaaca

SEQ ID NO: 56602 - DNA, 25 bp, Saccharomyces pastorianus
aaagagttatcagccatctattgtt

SEQ ID NO: 56603 - DNA, 25 bp, Saccharomyces pastorianus
tacgctactaaccacagattccgtg

SEQ ID NO: 56604 - DNA, 25 bp, Saccharomyces pastorianus
agattccgtgagaccaaccgtcgtg

SEQ ID NO: 56605 - DNA, 25 bp, Saccharomyces pastorianus
tagtttggtggattcccaggccacg

SEQ ID NO: 56606 - DNA, 25 bp, Saccharomyces pastorianus
gtcgtgtcccaggaaccgttattag

SEQ ID NO: 56607 - DNA, 25 bp, Saccharomyces pastorianus
agccatctattgttattgcaggtcc

SEQ ID NO: 56608 - DNA, 25 bp, Saccharomyces pastorianus
gaaccgttattagcggcgaattaca

SEQ ID NO: 56609 - DNA, 25 bp, Saccharomyces pastorianus
gacatcatcatcaaagactgggatt

SEQ ID NO: 56610 - DNA, 25 bp, Saccharomyces pastorianus
tctagagctagtttggtggattccc

SEQ ID NO: 56611 - DNA, 25 bp, Saccharomyces pastorianus
gcaagactagctttcttacgctact

SEQ ID NO: 56612 - DNA, 25 bp, Saccharomyces pastorianus
tgccatagcatttatcacagtgcaa

SEQ ID NO: 56613 - DNA, 25 bp, Saccharomyces pastorianus
atgctgttcctgaatacactttaga

SEQ ID NO: 56614 - DNA, 25 bp, Saccharomyces pastorianus
aaatgcctacccaggaggcgctggt

SEQ ID NO: 56615 - DNA, 25 bp, Saccharomyces pastorianus
ggctgagtgctcatttgcacgtcag

SEQ ID NO: 56616 - DNA, 25 bp, Saccharomyces pastorianus
agtccagcgacttggcagctgttga

SEQ ID NO: 56617 - DNA, 25 bp, Saccharomyces pastorianus
gagccggataaatcgcacatttcgt

SEQ ID NO: 56618 - DNA, 25 bp, Saccharomyces pastorianus
aatcgacctggatttgtccagcgat

SEQ ID NO: 56619 - DNA, 25 bp, Saccharomyces pastorianus
gatgagacacggttcctatcactgg

SEQ ID NO: 56620 - DNA, 25 bp, Saccharomyces pastorianus
tgcacgtcagatttcaagcttctat

SEQ ID NO: 56621 - DNA, 25 bp, Saccharomyces pastorianus
agatttgtgccctcagtggtggctg

SEQ ID NO: 56622 - DNA, 25 bp, Saccharomyces pastorianus
gaaaagccgcctgctgtggcaaaaa

SEQ ID NO: 56623 - DNA, 25 bp, Saccharomyces pastorianus
gaggaactctcaattagccaatcga

SEQ ID NO: 56624 - DNA, 25 bp, Saccharomyces pastorianus
tggttcaagaactaccgccgaggtt

SEQ ID NO: 56625 - DNA, 25 bp, Saccharomyces pastorianus
acataaaccactaccttcagatcta

SEQ ID NO: 56626 - DNA, 25 bp, Saccharomyces pastorianus
tgaagcacactttatcctggcagaa

SEQ ID NO: 56627 - DNA, 25 bp, Saccharomyces pastorianus
aaggttatttctcacactttggatg

SEQ ID NO: 56628 - DNA, 25 bp, Saccharomyces pastorianus
gtctctggacgatggtgttcgcaac

SEQ ID NO: 56629 - DNA, 25 bp, Saccharomyces pastorianus
agaaggatgtcgctgctccagtgac

SEQ ID NO: 56630 - DNA, 25 bp, Saccharomyces pastorianus
gtgtctctgttcacggtgccaatag

SEQ ID NO: 56631 - DNA, 25 bp, Saccharomyces pastorianus
gttcgcaacatcaccgctgtggaaa

SEQ ID NO: 56632 - DNA, 25 bp, Saccharomyces pastorianus
ggatgtatccgttttcagaacacaa

SEQ ID NO: 56633 - DNA, 25 bp, Saccharomyces pastorianus
aaactgccgtttctgccgctaatag

SEQ ID NO: 56634 - DNA, 25 bp, Saccharomyces pastorianus
tagattgggtgctaactccttgtta

SEQ ID NO: 56635 - DNA, 25 bp, Saccharomyces pastorianus
gtccgcttttgtccgccagacacag

SEQ ID NO: 56636 - DNA, 25 bp, Saccharomyces pastorianus
aagcttgctgtgtttaagagcgcaa

SEQ ID NO: 56637 - DNA, 25 bp, Saccharomyces pastorianus
gggtctgtgaatggctccacgtcca

SEQ ID NO: 56638 - DNA, 25 bp, Saccharomyces pastorianus
gtctgtgaatggctccacgtccact

SEQ ID NO: 56639 - DNA, 25 bp, Saccharomyces pastorianus
aaatctacgctctctaagcttgctg

SEQ ID NO: 56640 - DNA, 25 bp, Saccharomyces pastorianus
acgctctctaagcttgctgtgttta

SEQ ID NO: 56641 - DNA, 25 bp, Saccharomyces pastorianus
tcatcgtccgcttttgtccgccaga

SEQ ID NO: 56642 - DNA, 25 bp, Saccharomyces pastorianus
gacgttttcatcgtccgcttttgtc

SEQ ID NO: 56643 - DNA, 25 bp, Saccharomyces pastorianus
gctctctaagcttgctgtgtttaag

SEQ ID NO: 56644 - DNA, 25 bp, Saccharomyces pastorianus
gcaaggacgttttcatcgtccgctt

SEQ ID NO: 56645 - DNA, 25 bp, Saccharomyces pastorianus
aagagcgcaaggacgttttcatcgt

SEQ ID NO: 56646 - DNA, 25 bp, Saccharomyces pastorianus
gtactgccatctttactttcgaagg

SEQ ID NO: 56647 - DNA, 25 bp, Saccharomyces pastorianus
ttgacatccgtcctagcatgggtag

SEQ ID NO: 56648 - DNA, 25 bp, Saccharomyces pastorianus
ggccatattattatccacacctttg

SEQ ID NO: 56649 - DNA, 25 bp, Saccharomyces pastorianus
ttgatatacatatacccaccgctgt

SEQ ID NO: 56650 - DNA, 25 bp, Saccharomyces pastorianus
gttcaactactgtacgcattggcca

SEQ ID NO: 56651 - DNA, 25 bp, Saccharomyces pastorianus
cgttcagcctatccggaatttcaag

SEQ ID NO: 56652 - DNA, 25 bp, Saccharomyces pastorianus
gtagggtcctttgcatgcataccat

SEQ ID NO: 56653 - DNA, 25 bp, Saccharomyces pastorianus
gttgcgccattgtgcttttgacatc

SEQ ID NO: 56654 - DNA, 25 bp, Saccharomyces pastorianus
taatcttcggagtcgctgtcatggc

SEQ ID NO: 56655 - DNA, 25 bp, Saccharomyces pastorianus
agtagtcttcatatcctgtggtctc

SEQ ID NO: 56656 - DNA, 25 bp, Saccharomyces pastorianus
ttaaagaactacttccgttgcgcca

SEQ ID NO: 56657 - DNA, 25 bp, Saccharomyces pastorianus
ggtaccggtaagacattatgtgctc

SEQ ID NO: 56658 - DNA, 25 bp, Saccharomyces pastorianus
cgtgctgtcgctaatagaactgacg

SEQ ID NO: 56659 - DNA, 25 bp, Saccharomyces pastorianus
tcctggtaccggtaagacattatgt

SEQ ID NO: 56660 - DNA, 25 bp, Saccharomyces pastorianus
ggtcctcctggtaccggtaagacat

SEQ ID NO: 56661 - DNA, 25 bp, Saccharomyces pastorianus
tgtgctcgtgctgtcgctaatagaa

SEQ ID NO: 56662 - DNA, 25 bp, Saccharomyces pastorianus
gtcctcctggtaccggtaagacatt

SEQ ID NO: 56663 - DNA, 25 bp, Saccharomyces pastorianus
ttatgtgctcgtgctgtcgctaata

SEQ ID NO: 56664 - DNA, 25 bp, Saccharomyces pastorianus
tgctcgtgctgtcgctaatagaact

SEQ ID NO: 56665 - DNA, 25 bp, Saccharomyces pastorianus
tggtcctcctggtaccggtaagaca

SEQ ID NO: 56666 - DNA, 25 bp, Saccharomyces pastorianus
agacattatgtgctcgtgctgtcgc

SEQ ID NO: 56667 - DNA, 25 bp, Saccharomyces pastorianus
acattatgtgctcgtgctgtcgcta

SEQ ID NO: 56668 - DNA, 25 bp, Saccharomyces pastorianus
aaagataccgacaccctagtcatag

SEQ ID NO: 56669 - DNA, 25 bp, Saccharomyces pastorianus
gcgaggtttttgagacgagtcttct

SEQ ID NO: 56670 - DNA, 25 bp, Saccharomyces pastorianus
cccatcccatgactatagccaaaag

SEQ ID NO: 56671 - DNA, 25 bp, Saccharomyces pastorianus
gttcccctttgtcagtgcaagctga

SEQ ID NO: 56672 - DNA, 25 bp, Saccharomyces pastorianus
ggttcaatcattggatcgttcccct

SEQ ID NO: 56673 - DNA, 25 bp, Saccharomyces pastorianus
gaaatttgccttccaactctgtatt

SEQ ID NO: 56674 - DNA, 25 bp, Saccharomyces pastorianus
aaaccacttactaccatctgcaagt

SEQ ID NO: 56675 - DNA, 25 bp, Saccharomyces pastorianus
taagcgcttaccttgaatcatctaa

SEQ ID NO: 56676 - DNA, 25 bp, Saccharomyces pastorianus
gagtcttctctaccagtgccataga

SEQ ID NO: 56677 - DNA, 25 bp, Saccharomyces pastorianus
ggcggtattgattccttagtcgata

SEQ ID NO: 56678 - DNA, 25 bp, Saccharomyces pastorianus
cccagtgctgataatgcgaggtttt

SEQ ID NO: 56679 - DNA, 25 bp, Saccharomyces pastorianus
atgtgttccgacgtttggtgttgta

SEQ ID NO: 56680 - DNA, 25 bp, Saccharomyces pastorianus
gtaataaatactcgaccgcccactt

SEQ ID NO: 56681 - DNA, 25 bp, Saccharomyces pastorianus
ttctcccaaggttcggctcaaatgt

SEQ ID NO: 56682 - DNA, 25 bp, Saccharomyces pastorianus
aaaactttattcaaccaccagcgtg

SEQ ID NO: 56683 - DNA, 25 bp, Saccharomyces pastorianus
attttattgccatagctccggctat

SEQ ID NO: 56684 - DNA, 25 bp, Saccharomyces pastorianus
caaatgtttgcagctttttcgttaa

SEQ ID NO: 56685 - DNA, 25 bp, Saccharomyces pastorianus
atccaacccttttcaatttctgcat

SEQ ID NO: 56686 - DNA, 25 bp, Saccharomyces pastorianus
taggaatatcgtgttgccttctgct

SEQ ID NO: 56687 - DNA, 25 bp, Saccharomyces pastorianus
ggaaatccttcaacattcagccaag

SEQ ID NO: 56688 - DNA, 25 bp, Saccharomyces pastorianus
acccagcttcatgtatcttttcttt

SEQ ID NO: 56689 - DNA, 25 bp, Saccharomyces pastorianus
gaattcgcgttctttgatattccga

SEQ ID NO: 56690 - DNA, 25 bp, Saccharomyces pastorianus
gtgacgccttgcaaagcgactattt

SEQ ID NO: 56691 - DNA, 25 bp, Saccharomyces pastorianus
ggacggactatactaatcgtgtcat

SEQ ID NO: 56692 - DNA, 25 bp, Saccharomyces pastorianus
aaaagcgttctaatattgcatctaa

SEQ ID NO: 56693 - DNA, 25 bp, Saccharomyces pastorianus
ggctgtggttgcctactagtagaat

SEQ ID NO: 56694 - DNA, 25 bp, Saccharomyces pastorianus
tcttgacggacttttaagctgccat

SEQ ID NO: 56695 - DNA, 25 bp, Saccharomyces pastorianus
gctttatgacatgccgtggtttttc

SEQ ID NO: 56696 - DNA, 25 bp, Saccharomyces pastorianus
tgggtactcccacaataaagaactg

SEQ ID NO: 56697 - DNA, 25 bp, Saccharomyces pastorianus
gagatttactgctagtgacgccttg

SEQ ID NO: 56698 - DNA, 25 bp, Saccharomyces pastorianus
taactttatggtacaggcctcctga

SEQ ID NO: 56699 - DNA, 25 bp, Saccharomyces pastorianus
agaactggccaacgctttatgacat

SEQ ID NO: 56700 - DNA, 25 bp, Saccharomyces pastorianus
attcgaaagtattttgccatctgca

SEQ ID NO: 56701 - DNA, 25 bp, Saccharomyces pastorianus
agcaaaaaatacgataacagggaag

SEQ ID NO: 56702 - DNA, 25 bp, Saccharomyces pastorianus
aacagggaagttagtagcattaaag

SEQ ID NO: 56703 - DNA, 25 bp, Saccharomyces pastorianus
gataacagggaagttagtagcatta

SEQ ID NO: 56704 - DNA, 25 bp, Saccharomyces pastorianus
cattaaagaaactaagactacaggg

SEQ ID NO: 56705 - DNA, 25 bp, Saccharomyces pastorianus
acgataacagggaagttagtagcat

SEQ ID NO: 56706 - DNA, 25 bp, Saccharomyces pastorianus
cagggaagttagtagcattaaagaa

SEQ ID NO: 56707 - DNA, 25 bp, Saccharomyces pastorianus
gcattaaagaaactaagactacagg

SEQ ID NO: 56708 - DNA, 25 bp, Saccharomyces pastorianus
gcaaaaaatacgataacagggaagt

SEQ ID NO: 56709 - DNA, 25 bp, Saccharomyces pastorianus
acagggaagttagtagcattaaaga

SEQ ID NO: 56710 - DNA, 25 bp, Saccharomyces pastorianus
ataacagggaagttagtagcattaa

SEQ ID NO: 56711 - DNA, 25 bp, Saccharomyces pastorianus
cgataacagggaagttagtagcatt

SEQ ID NO: 56712 - DNA, 25 bp, Saccharomyces pastorianus
atagttaccagtcaaatctagataa

SEQ ID NO: 56713 - DNA, 25 bp, Saccharomyces pastorianus
tagataatgactcgcctcaaacgat

SEQ ID NO: 56714 - DNA, 25 bp, Saccharomyces pastorianus
gaatacggactaataatagttacca

SEQ ID NO: 56715 - DNA, 25 bp, Saccharomyces pastorianus
aatctagataatgactcgcctcaaa

SEQ ID NO: 56716 - DNA, 25 bp, Saccharomyces pastorianus
cgcctcaaacgatggatccaactga

SEQ ID NO: 56717 - DNA, 25 bp, Saccharomyces pastorianus
gggtcaggaaataccaattctccgt

SEQ ID NO: 56718 - DNA, 25 bp, Saccharomyces pastorianus
taatgactcgcctcaaacgatggat

SEQ ID NO: 56719 - DNA, 25 bp, Saccharomyces pastorianus
atgactcgcctcaaacgatggatcc

SEQ ID NO: 56720 - DNA, 25 bp, Saccharomyces pastorianus
gactcgcctcaaacgatggatccaa

SEQ ID NO: 56721 - DNA, 25 bp, Saccharomyces pastorianus
ccagtctctatcgaggccaccgcca

SEQ ID NO: 56722 - DNA, 25 bp, Saccharomyces pastorianus
tcgcctcaaacgatggatccaactg

SEQ ID NO: 56723 - DNA, 25 bp, Saccharomyces pastorianus
gtatgcggataggtccaacactatg

SEQ ID NO: 56724 - DNA, 25 bp, Saccharomyces pastorianus
atcctttcccgttacaatgacacat

SEQ ID NO: 56725 - DNA, 25 bp, Saccharomyces pastorianus
ggttcgagatacaataatagcacat

SEQ ID NO: 56726 - DNA, 25 bp, Saccharomyces pastorianus
acaaactcaagatatcaaggttcga

SEQ ID NO: 56727 - DNA, 25 bp, Saccharomyces pastorianus
aatgacacatcttcccaaacaaact

SEQ ID NO: 56728 - DNA, 25 bp, Saccharomyces pastorianus
aatttctatctcatttaccgaaggg

SEQ ID NO: 56729 - DNA, 25 bp, Saccharomyces pastorianus
gggcctaaatctgtagagacgtcga

SEQ ID NO: 56730 - DNA, 25 bp, Saccharomyces pastorianus
atagcacatcgtatgcggataggtc

SEQ ID NO: 56731 - DNA, 25 bp, Saccharomyces pastorianus
gcaataataatatcctttcccgtta

SEQ ID NO: 56732 - DNA, 25 bp, Saccharomyces pastorianus
gctgaatttctatctcatttaccga

SEQ ID NO: 56733 - DNA, 25 bp, Saccharomyces pastorianus
ctactacttctaattaccacaataa

SEQ ID NO: 56734 - DNA, 25 bp, Saccharomyces pastorianus
gccatggctgattgcgccaaggcaa

SEQ ID NO: 56735 - DNA, 25 bp, Saccharomyces pastorianus
gcaaattttgtgcaggccatggctg

SEQ ID NO: 56736 - DNA, 25 bp, Saccharomyces pastorianus
aacatagttcgagactacctgtatg

SEQ ID NO: 56737 - DNA, 25 bp, Saccharomyces pastorianus
gtatgaaagtttttcctacttgcga

SEQ ID NO: 56738 - DNA, 25 bp, Saccharomyces pastorianus
gaagtcgtgcctcttattttaccaa

SEQ ID NO: 56739 - DNA, 25 bp, Saccharomyces pastorianus
gagacgaaatgaagtcgtgcctctt

SEQ ID NO: 56740 - DNA, 25 bp, Saccharomyces pastorianus
tcgtgcctcttattttaccaaacag

SEQ ID NO: 56741 - DNA, 25 bp, Saccharomyces pastorianus
tgggtactcagtccccgtgaagaac

SEQ ID NO: 56742 - DNA, 25 bp, Saccharomyces pastorianus
cgtgaagaacaacaggcccgtaaga

SEQ ID NO: 56743 - DNA, 25 bp, Saccharomyces pastorianus
gactacctgtatgggtactcagtcc

SEQ ID NO: 56744 - DNA, 25 bp, Saccharomyces pastorianus
tttcctacttgcgataagcagcgag

SEQ ID NO: 56745 - DNA, 25 bp, Saccharomyces pastorianus
gtcagattgcattccactttaacgg

SEQ ID NO: 56746 - DNA, 25 bp, Saccharomyces pastorianus
gtgtcttggaattggccacacaaca

SEQ ID NO: 56747 - DNA, 25 bp, Saccharomyces pastorianus
gacttattcgatttcggatcttccg

SEQ ID NO: 56748 - DNA, 25 bp, Saccharomyces pastorianus
gatgtctttctatgccaaattctga

SEQ ID NO: 56749 - DNA, 25 bp, Saccharomyces pastorianus
gataagttctcaccagaagtcttag

SEQ ID NO: 56750 - DNA, 25 bp, Saccharomyces pastorianus
ggatcttccgaggatactccacaaa

SEQ ID NO: 56751 - DNA, 25 bp, Saccharomyces pastorianus
ggagcgcactacaaagtgtcttgga

SEQ ID NO: 56752 - DNA, 25 bp, Saccharomyces pastorianus
aatacttcaagcacattgggcgatt

SEQ ID NO: 56753 - DNA, 25 bp, Saccharomyces pastorianus
attgggcgatttagacgacttattc

SEQ ID NO: 56754 - DNA, 25 bp, Saccharomyces pastorianus
ttccatctatttcaagcctaacgca

SEQ ID NO: 56755 - DNA, 25 bp, Saccharomyces pastorianus
gttccaagactgttcaagggctcaa

SEQ ID NO: 56756 - DNA, 25 bp, Saccharomyces pastorianus
agtttaccgatccactctatgttaa

SEQ ID NO: 56757 - DNA, 25 bp, Saccharomyces pastorianus
gtgtcacaatttctactggcgttga

SEQ ID NO: 56758 - DNA, 25 bp, Saccharomyces pastorianus
tatgtgtcgagctaggtgttcttga

SEQ ID NO: 56759 - DNA, 25 bp, Saccharomyces pastorianus
aacccagcggttgtcttggcaacta

SEQ ID NO: 56760 - DNA, 25 bp, Saccharomyces pastorianus
aatgccctagatgattcgaaccctt

SEQ ID NO: 56761 - DNA, 25 bp, Saccharomyces pastorianus
gattcgaaccctttggtcattgcaa

SEQ ID NO: 56762 - DNA, 25 bp, Saccharomyces pastorianus
ttgattcaatcgcacgtgtcacaat

SEQ ID NO: 56763 - DNA, 25 bp, Saccharomyces pastorianus
taaccgctcatttacaacacgtcaa

SEQ ID NO: 56764 - DNA, 25 bp, Saccharomyces pastorianus
taccgaatgggcgagaatcactata

SEQ ID NO: 56765 - DNA, 25 bp, Saccharomyces pastorianus
gtatcattaatgtctacaccgcctg

SEQ ID NO: 56766 - DNA, 25 bp, Saccharomyces pastorianus
gagtacactgtctgaatattcggcg

SEQ ID NO: 56767 - DNA, 25 bp, Saccharomyces pastorianus
ggctatgttagaccaatcatttcat

SEQ ID NO: 56768 - DNA, 25 bp, Saccharomyces pastorianus
gtggtacaaggtgcgctactgactt

SEQ ID NO: 56769 - DNA, 25 bp, Saccharomyces pastorianus
gacgttttacagtgccctatgttaa

SEQ ID NO: 56770 - DNA, 25 bp, Saccharomyces pastorianus
gaagacgatccatatagccgaaaga

SEQ ID NO: 56771 - DNA, 25 bp, Saccharomyces pastorianus
ggagctacgtactacagctacttat

SEQ ID NO: 56772 - DNA, 25 bp, Saccharomyces pastorianus
ggaagaacccacatgcagaatataa

SEQ ID NO: 56773 - DNA, 25 bp, Saccharomyces pastorianus
gtattctgatggaacacttcgccaa

SEQ ID NO: 56774 - DNA, 25 bp, Saccharomyces pastorianus
ctactgactttgttgagctaccaag

SEQ ID NO: 56775 - DNA, 25 bp, Saccharomyces pastorianus
ggaaatgcatcgctgacgttttaca

SEQ ID NO: 56776 - DNA, 25 bp, Saccharomyces pastorianus
ggtgcgggagatttggccatttatt

SEQ ID NO: 56777 - DNA, 25 bp, Saccharomyces pastorianus
aattggcaagcactatgagactgga

SEQ ID NO: 56778 - DNA, 25 bp, Saccharomyces pastorianus
cttatttgacttccccagacggctt

SEQ ID NO: 56779 - DNA, 25 bp, Saccharomyces pastorianus
tgttttatatggcaaccctgaagag

SEQ ID NO: 56780 - DNA, 25 bp, Saccharomyces pastorianus
taattaggtcgtttgccacagccgg

SEQ ID NO: 56781 - DNA, 25 bp, Saccharomyces pastorianus
tgcgtcaatttagccaagtctcttt

SEQ ID NO: 56782 - DNA, 25 bp, Saccharomyces pastorianus
aagcacaggaacttctcgaacgaat

SEQ ID NO: 56783 - DNA, 25 bp, Saccharomyces pastorianus
gctctcccgccaaagtcaattaatt

SEQ ID NO: 56784 - DNA, 25 bp, Saccharomyces pastorianus
gaacctggatagattgagcgataca

SEQ ID NO: 56785 - DNA, 25 bp, Saccharomyces pastorianus
aagattgcacagtaccttttccaaa

SEQ ID NO: 56786 - DNA, 25 bp, Saccharomyces pastorianus
ttcaatgtcttgataccgtcgctct

SEQ ID NO: 56787 - DNA, 25 bp, Saccharomyces pastorianus
acagccggtgcagtttccagaacta

SEQ ID NO: 56788 - DNA, 25 bp, Saccharomyces pastorianus
aagtctctttgaggcaagcacagga

SEQ ID NO: 56789 - DNA, 25 bp, Saccharomyces pastorianus
atctctttcccattacgggctaggt

SEQ ID NO: 56790 - DNA, 25 bp, Saccharomyces pastorianus
aatactcaaggcactatctctttcc

SEQ ID NO: 56791 - DNA, 25 bp, Saccharomyces pastorianus
gtaatgaactacacagaggacctga

SEQ ID NO: 56792 - DNA, 25 bp, Saccharomyces pastorianus
atacactcagtattgcctcacgaaa

SEQ ID NO: 56793 - DNA, 25 bp, Saccharomyces pastorianus
aaaagggctattcgcatttcagaaa

SEQ ID NO: 56794 - DNA, 25 bp, Saccharomyces pastorianus
aactgcaagggagctatacactcag

SEQ ID NO: 56795 - DNA, 25 bp, Saccharomyces pastorianus
tcttgatgaagtcttgctcgcgcag

SEQ ID NO: 56796 - DNA, 25 bp, Saccharomyces pastorianus
gctcgcgcaggcagaactaggttca

SEQ ID NO: 56797 - DNA, 25 bp, Saccharomyces pastorianus
tgctactgacagataggcctcttga

SEQ ID NO: 56798 - DNA, 25 bp, Saccharomyces pastorianus
ataagggacggctgaaggcctctaa

SEQ ID NO: 56799 - DNA, 25 bp, Saccharomyces pastorianus
gcttgcttacaatattcggctgatt

SEQ ID NO: 56800 - DNA, 25 bp, Saccharomyces pastorianus
atcgagcctctttagcagtagcatc

SEQ ID NO: 56801 - DNA, 25 bp, Saccharomyces pastorianus
gatttcccaggttctggatctgctt

SEQ ID NO: 56802 - DNA, 25 bp, Saccharomyces pastorianus
gaacccagcggttggagtttagcca

SEQ ID NO: 56803 - DNA, 25 bp, Saccharomyces pastorianus
tacctcaaagccctcttctaaggaa

SEQ ID NO: 56804 - DNA, 25 bp, Saccharomyces pastorianus
acttcaaatattccagttccacctc

SEQ ID NO: 56805 - DNA, 25 bp, Saccharomyces pastorianus
atttgaagccgcatacgatttccca

SEQ ID NO: 56806 - DNA, 25 bp, Saccharomyces pastorianus
gatctgcttcagagttgccattgaa

SEQ ID NO: 56807 - DNA, 25 bp, Saccharomyces pastorianus
agtagcatcccaacagcgcaagaaa

SEQ ID NO: 56808 - DNA, 25 bp, Saccharomyces pastorianus
tgatggtttggcttccgcattggca

SEQ ID NO: 56809 - DNA, 25 bp, Saccharomyces pastorianus
gaaactgttcagtccactggtaatg

SEQ ID NO: 56810 - DNA, 25 bp, Saccharomyces pastorianus
ctcctcctatgggtgaacctgaaga

SEQ ID NO: 56811 - DNA, 25 bp, Saccharomyces pastorianus
aatggacacctatcaagtatttcga

SEQ ID NO: 56812 - DNA, 25 bp, Saccharomyces pastorianus
gccgctgatcaagcatttgctcaaa

SEQ ID NO: 56813 - DNA, 25 bp, Saccharomyces pastorianus
gccgggaatctttgctgcgatgaat

SEQ ID NO: 56814 - DNA, 25 bp, Saccharomyces pastorianus
aattcgtcgttaagcattatgcagg

SEQ ID NO: 56815 - DNA, 25 bp, Saccharomyces pastorianus
aggtttctttctacgatgtttccag

SEQ ID NO: 56816 - DNA, 25 bp, Saccharomyces pastorianus
cgatgtttccagacgatgttgataa

SEQ ID NO: 56817 - DNA, 25 bp, Saccharomyces pastorianus
atgaatgattccattgcaaccgccc

SEQ ID NO: 56818 - DNA, 25 bp, Saccharomyces pastorianus
ttccctggtgccgataagtcaattg

SEQ ID NO: 56819 - DNA, 25 bp, Saccharomyces pastorianus
ttttgagcataactcctttgagcaa

SEQ ID NO: 56820 - DNA, 25 bp, Saccharomyces pastorianus
ttaatctatctttgcaagccttccc

SEQ ID NO: 56821 - DNA, 25 bp, Saccharomyces pastorianus
aaggacctgatcgagctagttggca

SEQ ID NO: 56822 - DNA, 25 bp, Saccharomyces pastorianus
caggctcttccggtgcaacaataag

SEQ ID NO: 56823 - DNA, 25 bp, Saccharomyces pastorianus
aagtacgatgaaaccgccgatgtct

SEQ ID NO: 56824 - DNA, 25 bp, Saccharomyces pastorianus
atctccaagaaccaaggcctattcg

SEQ ID NO: 56825 - DNA, 25 bp, Saccharomyces pastorianus
gacaagtccctgactgtcactgaat

SEQ ID NO: 56826 - DNA, 25 bp, Saccharomyces pastorianus
aagccagtcatcagttctatcgtga

SEQ ID NO: 56827 - DNA, 25 bp, Saccharomyces pastorianus
atacggacttggatggttccatctc

SEQ ID NO: 56828 - DNA, 25 bp, Saccharomyces pastorianus
gtggcgatttttcgtatacggactt

SEQ ID NO: 56829 - DNA, 25 bp, Saccharomyces pastorianus
gccgatgtctttttgaagccagtca

SEQ ID NO: 56830 - DNA, 25 bp, Saccharomyces pastorianus
tgactcaccattcccaggtgacaag

SEQ ID NO: 56831 - DNA, 25 bp, Saccharomyces pastorianus
agattatcgggcacaggctcttccg

SEQ ID NO: 56832 - DNA, 25 bp, Saccharomyces pastorianus
aagccctaatgttgttgactcacca

SEQ ID NO: 56833 - DNA, 25 bp, Saccharomyces pastorianus
ttgaactgctacgaagtcccaaccg

SEQ ID NO: 56834 - DNA, 25 bp, Saccharomyces pastorianus
actgctacgaagtcccaaccggctg

SEQ ID NO: 56835 - DNA, 25 bp, Saccharomyces pastorianus
agggttgaactgctacgaagtccca

SEQ ID NO: 56836 - DNA, 25 bp, Saccharomyces pastorianus
gggttgaactgctacgaagtcccaa

SEQ ID NO: 56837 - DNA, 25 bp, Saccharomyces pastorianus
tacgaagtcccaaccggctggaagt

SEQ ID NO: 56838 - DNA, 25 bp, Saccharomyces pastorianus
gttgaactgctacgaagtcccaacc

SEQ ID NO: 56839 - DNA, 25 bp, Saccharomyces pastorianus
ggttgaactgctacgaagtcccaac

SEQ ID NO: 56840 - DNA, 25 bp, Saccharomyces pastorianus
tgaactgctacgaagtcccaaccgg

SEQ ID NO: 56841 - DNA, 25 bp, Saccharomyces pastorianus
tcgtttcgcaataaagaaagggttg

SEQ ID NO: 56842 - DNA, 25 bp, Saccharomyces pastorianus
gaaagggttgaactgctacgaagtc

SEQ ID NO: 56843 - DNA, 25 bp, Saccharomyces pastorianus
gaactgctacgaagtcccaaccggc

SEQ ID NO: 56844 - DNA, 25 bp, Saccharomyces pastorianus
gtttaccagccgaagaagtgctcca

SEQ ID NO: 56845 - DNA, 25 bp, Saccharomyces pastorianus
tgatctacggatatgggcctgcttt

SEQ ID NO: 56846 - DNA, 25 bp, Saccharomyces pastorianus
gacccaaatctaacttatgctcgca

SEQ ID NO: 56847 - DNA, 25 bp, Saccharomyces pastorianus
tgagaaaatcgcctttggtgccgct

SEQ ID NO: 56848 - DNA, 25 bp, Saccharomyces pastorianus
tctacctgacttcggcggtttacac

SEQ ID NO: 56849 - DNA, 25 bp, Saccharomyces pastorianus
tcaccaggtgactctgttgctatta

SEQ ID NO: 56850 - DNA, 25 bp, Saccharomyces pastorianus
aattgacccaaccaaggcatatgtt

SEQ ID NO: 56851 - DNA, 25 bp, Saccharomyces pastorianus
ttatgctcgcactcttgttgacaga

SEQ ID NO: 56852 - DNA, 25 bp, Saccharomyces pastorianus
tacgggttagctcgttcattcccaa

SEQ ID NO: 56853 - DNA, 25 bp, Saccharomyces pastorianus
tattgccgaatatgcctcagaaatt

SEQ ID NO: 56854 - DNA, 25 bp, Saccharomyces pastorianus
gaacggtatcacaggaccatatggt

SEQ ID NO: 56855 - DNA, 25 bp, Saccharomyces pastorianus
ttagtttattaagccgtgatccgac

SEQ ID NO: 56856 - DNA, 25 bp, Saccharomyces pastorianus
atatgagatgctgaccggtcttcca

SEQ ID NO: 56857 - DNA, 25 bp, Saccharomyces pastorianus
ggtcttccaccttattatgacgagg

SEQ ID NO: 56858 - DNA, 25 bp, Saccharomyces pastorianus
ggtggacgctaggtgtcttgttata

SEQ ID NO: 56859 - DNA, 25 bp, Saccharomyces pastorianus
caagccagctgttagtaatgccatg

SEQ ID NO: 56860 - DNA, 25 bp, Saccharomyces pastorianus
gacgaaatcagaaaccatccctttt

SEQ ID NO: 56861 - DNA, 25 bp, Saccharomyces pastorianus
aaccatccctttttcagccaattgt

SEQ ID NO: 56862 - DNA, 25 bp, Saccharomyces pastorianus
tccagaatatttggcgccggagcta

SEQ ID NO: 56863 - DNA, 25 bp, Saccharomyces pastorianus
ggcgccggagctactattaggttta

SEQ ID NO: 56864 - DNA, 25 bp, Saccharomyces pastorianus
cactttgtgactttgggctgtgcaa

SEQ ID NO: 56865 - DNA, 25 bp, Saccharomyces pastorianus
ttcggcggctggacatacgtcggaa

SEQ ID NO: 56866 - DNA, 25 bp, Saccharomyces pastorianus
caagcactcgattgggacgtatgaa

SEQ ID NO: 56867 - DNA, 25 bp, Saccharomyces pastorianus
gacaagtagatccaagcactcgatt

SEQ ID NO: 56868 - DNA, 25 bp, Saccharomyces pastorianus
gagaaggctcgtctgctggaataat

SEQ ID NO: 56869 - DNA, 25 bp, Saccharomyces pastorianus
ggacaaatcggaattcctccagctt

SEQ ID NO: 56870 - DNA, 25 bp, Saccharomyces pastorianus
atgctgacgctgacaattttttcgg

SEQ ID NO: 56871 - DNA, 25 bp, Saccharomyces pastorianus
ggaagagttaccacccagatatgct

SEQ ID NO: 56872 - DNA, 25 bp, Saccharomyces pastorianus
gattacaatgaaacttctccgttat

SEQ ID NO: 56873 - DNA, 25 bp, Saccharomyces pastorianus
ataccccttctgaaatatccggtgg

SEQ ID NO: 56874 - DNA, 25 bp, Saccharomyces pastorianus
atatccggtggagctaccaataaga

SEQ ID NO: 56875 - DNA, 25 bp, Saccharomyces pastorianus
ggaattcctccagcttataacggaa

SEQ ID NO: 56876 - DNA, 25 bp, Saccharomyces pastorianus
aaaggatatcctctaatttcgacag

SEQ ID NO: 56877 - DNA, 25 bp, Saccharomyces pastorianus
gactaccgttccatatccttatttt

SEQ ID NO: 56878 - DNA, 25 bp, Saccharomyces pastorianus
tgcatctccgggtgggtttgatgac

SEQ ID NO: 56879 - DNA, 25 bp, Saccharomyces pastorianus
tgccccacaacaagaaggacgcggt

SEQ ID NO: 56880 - DNA, 25 bp, Saccharomyces pastorianus
gaatgctttgggtacacgaacttca

SEQ ID NO: 56881 - DNA, 25 bp, Saccharomyces pastorianus
aaagttacttcttgttgcccagtat

SEQ ID NO: 56882 - DNA, 25 bp, Saccharomyces pastorianus
cagtaatgaattatcccttgcccca

SEQ ID NO: 56883 - DNA, 25 bp, Saccharomyces pastorianus
tgaaggttttcagacatatcccaaa

SEQ ID NO: 56884 - DNA, 25 bp, Saccharomyces pastorianus
tggattccagctttgcatctccggg

SEQ ID NO: 56885 - DNA, 25 bp, Saccharomyces pastorianus
atagcggcatcttgctggattccag

SEQ ID NO: 56886 - DNA, 25 bp, Saccharomyces pastorianus
aaggacgatcagcaattcattaagg

SEQ ID NO: 56887 - DNA, 25 bp, Saccharomyces pastorianus
gtttgatgacgagatcgctctgcaa

SEQ ID NO: 56888 - DNA, 25 bp, Saccharomyces pastorianus
tccaagcatcttgagggtattccaa

SEQ ID NO: 56889 - DNA, 25 bp, Saccharomyces pastorianus
gagacattacagaagttgggtgcta

SEQ ID NO: 56890 - DNA, 25 bp, Saccharomyces pastorianus
gttggaatccaagagtgacagtgaa

SEQ ID NO: 56891 - DNA, 25 bp, Saccharomyces pastorianus
cttggagactccgtacgagaatgat

SEQ ID NO: 56892 - DNA, 25 bp, Saccharomyces pastorianus
cagaaaaagcaagcgggaggtccca

SEQ ID NO: 56893 - DNA, 25 bp, Saccharomyces pastorianus
gaaaaagagctactgctgaatcaaa

SEQ ID NO: 56894 - DNA, 25 bp, Saccharomyces pastorianus
aactgttagagtggttggaatccaa

SEQ ID NO: 56895 - DNA, 25 bp, Saccharomyces pastorianus
attgcccattccaagcatcttgagg

SEQ ID NO: 56896 - DNA, 25 bp, Saccharomyces pastorianus
aagtcgcgtaaggaacaattagata

SEQ ID NO: 56897 - DNA, 25 bp, Saccharomyces pastorianus
attccaattgtcttggagactccgt

SEQ ID NO: 56898 - DNA, 25 bp, Saccharomyces pastorianus
agtgacagtgaattgctagaagaca

SEQ ID NO: 56899 - DNA, 25 bp, Saccharomyces pastorianus
taccgcacggccaatatttcattaa

SEQ ID NO: 56900 - DNA, 25 bp, Saccharomyces pastorianus
gtaggaagctccttggtagacttaa

SEQ ID NO: 56901 - DNA, 25 bp, Saccharomyces pastorianus
gaagcaattggcctcatacttgaac

SEQ ID NO: 56902 - DNA, 25 bp, Saccharomyces pastorianus
acctttgccgcaggctacgatataa

SEQ ID NO: 56903 - DNA, 25 bp, Saccharomyces pastorianus
aaaaggcgaccatcaattgcaattg

SEQ ID NO: 56904 - DNA, 25 bp, Saccharomyces pastorianus
aaatatggcgggtactgggaatctg

SEQ ID NO: 56905 - DNA, 25 bp, Saccharomyces pastorianus
gggcgttggtctctataacctacat

SEQ ID NO: 56906 - DNA, 25 bp, Saccharomyces pastorianus
ctacatccaggctctaccttaaaag

SEQ ID NO: 56907 - DNA, 25 bp, Saccharomyces pastorianus
atgggtgtctccacagtatacacaa

SEQ ID NO: 56908 - DNA, 25 bp, Saccharomyces pastorianus
atagatacctgtcatacctttgccg

SEQ ID NO: 56909 - DNA, 25 bp, Saccharomyces pastorianus
gtaccactgaggcataccacaattt

SEQ ID NO: 56910 - DNA, 25 bp, Saccharomyces pastorianus
ccgatgtatcccttgttggactgga

SEQ ID NO: 56911 - DNA, 25 bp, Saccharomyces pastorianus
agattactgtcgtcacacctaaaag

SEQ ID NO: 56912 - DNA, 25 bp, Saccharomyces pastorianus
attcaaatgttcacccaaccttggc

SEQ ID NO: 56913 - DNA, 25 bp, Saccharomyces pastorianus
gtggtggccacaacaactcatcaag

SEQ ID NO: 56914 - DNA, 25 bp, Saccharomyces pastorianus
gtggatgacaacctgatcaacgata

SEQ ID NO: 56915 - DNA, 25 bp, Saccharomyces pastorianus
gaaaccgctcaattggccatagata

SEQ ID NO: 56916 - DNA, 25 bp, Saccharomyces pastorianus
aagaggctcgcgaaaccgctcaatt

SEQ ID NO: 56917 - DNA, 25 bp, Saccharomyces pastorianus
gaggtggagaacttgcatcagaata

SEQ ID NO: 56918 - DNA, 25 bp, Saccharomyces pastorianus
atacaacaagaaccctactcaccat

SEQ ID NO: 56919 - DNA, 25 bp, Saccharomyces pastorianus
aaccttggccgaagtggacgcgcaa

SEQ ID NO: 56920 - DNA, 25 bp, Saccharomyces pastorianus
aaatcactcattccgatgtatccct

SEQ ID NO: 56921 - DNA, 25 bp, Saccharomyces pastorianus
agacattaacgttgccattgcgaac

SEQ ID NO: 56922 - DNA, 25 bp, Saccharomyces pastorianus
gaatctcgatgtcttcaattctgct

SEQ ID NO: 56923 - DNA, 25 bp, Saccharomyces pastorianus
taccaagatcgagccctatcatagc

SEQ ID NO: 56924 - DNA, 25 bp, Saccharomyces pastorianus
gcgaacgctgttgccaatgtggatt

SEQ ID NO: 56925 - DNA, 25 bp, Saccharomyces pastorianus
acattccaggtccatttgtcgttac

SEQ ID NO: 56926 - DNA, 25 bp, Saccharomyces pastorianus
tcactcaccttcttcgatacgagaa

SEQ ID NO: 56927 - DNA, 25 bp, Saccharomyces pastorianus
gtgttactaaccacgacatttcctc

SEQ ID NO: 56928 - DNA, 25 bp, Saccharomyces pastorianus
gaagaatctggcctgctggacatcc

SEQ ID NO: 56929 - DNA, 25 bp, Saccharomyces pastorianus
gagctactctgatgtggtgaacgat

SEQ ID NO: 56930 - DNA, 25 bp, Saccharomyces pastorianus
aattctgctaccgacgacattccag

SEQ ID NO: 56931 - DNA, 25 bp, Saccharomyces pastorianus
gacgacgcctccaataacaatgatg

SEQ ID NO: 56932 - DNA, 25 bp, Saccharomyces pastorianus
gaagcctcaacaaaaacctgctgct

SEQ ID NO: 56933 - DNA, 25 bp, Saccharomyces pastorianus
aatagcagcgtgaagcctcaacaaa

SEQ ID NO: 56934 - DNA, 25 bp, Saccharomyces pastorianus
gatgaagcagccaatagcagcgtga

SEQ ID NO: 56935 - DNA, 25 bp, Saccharomyces pastorianus
gtacaacctagtgagtaataacttc

SEQ ID NO: 56936 - DNA, 25 bp, Saccharomyces pastorianus
gacactgaatccgaagatgacgatg

SEQ ID NO: 56937 - DNA, 25 bp, Saccharomyces pastorianus
aacgcaagggcagaaagaagtacaa

SEQ ID NO: 56938 - DNA, 25 bp, Saccharomyces pastorianus
tgggctccacctcagaactacctga

SEQ ID NO: 56939 - DNA, 25 bp, Saccharomyces pastorianus
aaacctgctgctaaacgcaagggca

SEQ ID NO: 56940 - DNA, 25 bp, Saccharomyces pastorianus
cagaaggctcaaactaccaaagaaa

SEQ ID NO: 56941 - DNA, 25 bp, Saccharomyces pastorianus
ataacttcagaaggctcaaactacc

SEQ ID NO: 56942 - DNA, 25 bp, Saccharomyces pastorianus
gaactacctgacactgaatccgaag

SEQ ID NO: 56943 - DNA, 25 bp, Saccharomyces pastorianus
agatgacatcaagggtctacgcgat

SEQ ID NO: 56944 - DNA, 25 bp, Saccharomyces pastorianus
ggaactggataaactgaaagtcgag

SEQ ID NO: 56945 - DNA, 25 bp, Saccharomyces pastorianus
agggtctacgcgatgttaaacatat

SEQ ID NO: 56946 - DNA, 25 bp, Saccharomyces pastorianus
gtcgagctaaaaacatgggaacaca

SEQ ID NO: 56947 - DNA, 25 bp, Saccharomyces pastorianus
atgtattcgttggaactggataaac

SEQ ID NO: 56948 - DNA, 25 bp, Saccharomyces pastorianus
gagaaccaacgagagatgacatcaa

SEQ ID NO: 56949 - DNA, 25 bp, Saccharomyces pastorianus
atcaagggtctacgcgatgttaaac

SEQ ID NO: 56950 - DNA, 25 bp, Saccharomyces pastorianus
gggaacacaaatttattgatacgca

SEQ ID NO: 56951 - DNA, 25 bp, Saccharomyces pastorianus
tattgatacgcataacagagaacca

SEQ ID NO: 56952 - DNA, 25 bp, Saccharomyces pastorianus
aacatatgtataagcaatattccat

SEQ ID NO: 56953 - DNA, 25 bp, Saccharomyces pastorianus
gcataacagagaaccaacgagagat

SEQ ID NO: 56954 - DNA, 25 bp, Saccharomyces pastorianus
attcagtccatctcctttgattagg

SEQ ID NO: 56955 - DNA, 25 bp, Saccharomyces pastorianus
aaagcccgactttgtattcacgatg

SEQ ID NO: 56956 - DNA, 25 bp, Saccharomyces pastorianus
gtcaagcgccagttgaacttccaaa

SEQ ID NO: 56957 - DNA, 25 bp, Saccharomyces pastorianus
ggagacccctaacgaaatctttgat

SEQ ID NO: 56958 - DNA, 25 bp, Saccharomyces pastorianus
atttcacaggaatcttcgccggcaa

SEQ ID NO: 56959 - DNA, 25 bp, Saccharomyces pastorianus
ggcttcaaatggcattcccatcttt

SEQ ID NO: 56960 - DNA, 25 bp, Saccharomyces pastorianus
atactccaatttcatccccatgtaa

SEQ ID NO: 56961 - DNA, 25 bp, Saccharomyces pastorianus
gttgaaagcaccatcttcgcatact

SEQ ID NO: 56962 - DNA, 25 bp, Saccharomyces pastorianus
agaatcgaacactagacgccggctt

SEQ ID NO: 56963 - DNA, 25 bp, Saccharomyces pastorianus
aatatccaatgaatcttccccacaa

SEQ ID NO: 56964 - DNA, 25 bp, Saccharomyces pastorianus
aggcgtttcaacttcattcagtcca

SEQ ID NO: 56965 - DNA, 25 bp, Saccharomyces pastorianus
gaatccagcgtactctgaggtatct

SEQ ID NO: 56966 - DNA, 25 bp, Saccharomyces pastorianus
gtgacgaagaattctccggttatga

SEQ ID NO: 56967 - DNA, 25 bp, Saccharomyces pastorianus
gaattttagcttgtcttctccacta

SEQ ID NO: 56968 - DNA, 25 bp, Saccharomyces pastorianus
ttctgctcatccctcgaacgaaata

SEQ ID NO: 56969 - DNA, 25 bp, Saccharomyces pastorianus
ggaacaaccagtctgaatccagcgt

SEQ ID NO: 56970 - DNA, 25 bp, Saccharomyces pastorianus
agatcacccaatgagcgacttcaag

SEQ ID NO: 56971 - DNA, 25 bp, Saccharomyces pastorianus
atgtctttaagagggccacttgtga

SEQ ID NO: 56972 - DNA, 25 bp, Saccharomyces pastorianus
gtctcataatcatcacagtagtcat

SEQ ID NO: 56973 - DNA, 25 bp, Saccharomyces pastorianus
ggatcttcgacgaccaattacgaga

SEQ ID NO: 56974 - DNA, 25 bp, Saccharomyces pastorianus
tgaggtatctacagctctaccctta

SEQ ID NO: 56975 - DNA, 25 bp, Saccharomyces pastorianus
gacagtgaccgccaaaattcatctt

SEQ ID NO: 56976 - DNA, 25 bp, Saccharomyces pastorianus
agacgtcaaccatttgctaaaccca

SEQ ID NO: 56977 - DNA, 25 bp, Saccharomyces pastorianus
ggtatccgtaagcacttcatctttg

SEQ ID NO: 56978 - DNA, 25 bp, Saccharomyces pastorianus
aaacggacacatggccacggacgtt

SEQ ID NO: 56979 - DNA, 25 bp, Saccharomyces pastorianus
aaattccatcattctgtctgcagac

SEQ ID NO: 56980 - DNA, 25 bp, Saccharomyces pastorianus
gacttggacttattcgacgttcaaa

SEQ ID NO: 56981 - DNA, 25 bp, Saccharomyces pastorianus
tttctccaccgtcactttgtatgat

SEQ ID NO: 56982 - DNA, 25 bp, Saccharomyces pastorianus
agcaatgattgccttggtctcttac

SEQ ID NO: 56983 - DNA, 25 bp, Saccharomyces pastorianus
tacatgaagaaccattccccagtgc

SEQ ID NO: 56984 - DNA, 25 bp, Saccharomyces pastorianus
atctttgctccacgtctggatgaca

SEQ ID NO: 56985 - DNA, 25 bp, Saccharomyces pastorianus
gtatcactctgtccttagatccaaa

SEQ ID NO: 56986 - DNA, 25 bp, Saccharomyces pastorianus
tgggcactgccctggtggaagaact

SEQ ID NO: 56987 - DNA, 25 bp, Saccharomyces pastorianus
tggtggcatgctggaacaaagactt

SEQ ID NO: 56988 - DNA, 25 bp, Saccharomyces pastorianus
agactccatgacttattcgaccttt

SEQ ID NO: 56989 - DNA, 25 bp, Saccharomyces pastorianus
gttgctgctttaatatccaccatgg

SEQ ID NO: 56990 - DNA, 25 bp, Saccharomyces pastorianus
gatgacgctgacaaatatgctctgt

SEQ ID NO: 56991 - DNA, 25 bp, Saccharomyces pastorianus
ttgtcggagtactacgatgacgctg

SEQ ID NO: 56992 - DNA, 25 bp, Saccharomyces pastorianus
cgatgacactgagtttcacttcttg

SEQ ID NO: 56993 - DNA, 25 bp, Saccharomyces pastorianus
tggcaagtactttatcacagctata

SEQ ID NO: 56994 - DNA, 25 bp, Saccharomyces pastorianus
gctataattagttacgttgctgctt

SEQ ID NO: 56995 - DNA, 25 bp, Saccharomyces pastorianus
atccaccatggtatcgttatcttta

SEQ ID NO: 56996 - DNA, 25 bp, Saccharomyces pastorianus
caatacctcacaaccagctttgtta

SEQ ID NO: 56997 - DNA, 25 bp, Saccharomyces pastorianus
agctttgttatacatcgttccttcc

SEQ ID NO: 56998 - DNA, 25 bp, Saccharomyces pastorianus
tatcgtttcatttgtgctctccgta

SEQ ID NO: 56999 - DNA, 25 bp, Saccharomyces pastorianus
ggctgttcaccaaaagaccttgact

SEQ ID NO: 57000 - DNA, 25 bp, Saccharomyces pastorianus
tacttcctttaactagtggttgcac

SEQ ID NO: 57001 - DNA, 25 bp, Saccharomyces pastorianus
atcgcatatgacttcttggaaccca

SEQ ID NO: 57002 - DNA, 25 bp, Saccharomyces pastorianus
gattaactaactcggctgttcacca

SEQ ID NO: 57003 - DNA, 25 bp, Saccharomyces pastorianus
ttttgccaaggtaccgtgtaaccat

SEQ ID NO: 57004 - DNA, 25 bp, Saccharomyces pastorianus
gtggttgcactttattagctttgta

SEQ ID NO: 57005 - DNA, 25 bp, Saccharomyces pastorianus
ggaacccattgactgttttgccaag

SEQ ID NO: 57006 - DNA, 25 bp, Saccharomyces pastorianus
gtcgccactgtctacttttatttgt

SEQ ID NO: 57007 - DNA, 25 bp, Saccharomyces pastorianus
gtaaccattgctgacgataacgacg

SEQ ID NO: 57008 - DNA, 25 bp, Saccharomyces pastorianus
ataccagcaggtacatttgtctact

SEQ ID NO: 57009 - DNA, 25 bp, Saccharomyces pastorianus
aacgtttttcaataccacttctgag

SEQ ID NO: 57010 - DNA, 25 bp, Saccharomyces pastorianus
gaggattttgctccagaaacgtttt

SEQ ID NO: 57011 - DNA, 25 bp, Saccharomyces pastorianus
gaagacgagtctctttccatggacc

SEQ ID NO: 57012 - DNA, 25 bp, Saccharomyces pastorianus
aaaagggctcttaatcacctcacgt

SEQ ID NO: 57013 - DNA, 25 bp, Saccharomyces pastorianus
aggaccagttgacccaagatgtttt

SEQ ID NO: 57014 - DNA, 25 bp, Saccharomyces pastorianus
gagcgcctcatcaataatgcccaag

SEQ ID NO: 57015 - DNA, 25 bp, Saccharomyces pastorianus
aatgcccaaggaatcactagacaag

SEQ ID NO: 57016 - DNA, 25 bp, Saccharomyces pastorianus
gttttgaacaataagagcgcctcat

SEQ ID NO: 57017 - DNA, 25 bp, Saccharomyces pastorianus
cgtggactcgtcagggaagtcttct

SEQ ID NO: 57018 - DNA, 25 bp, Saccharomyces pastorianus
tacaatatttgttgattcccgagaa

SEQ ID NO: 57019 - DNA, 25 bp, Saccharomyces pastorianus
aagcagtccagtttgaagattctca

SEQ ID NO: 57020 - DNA, 25 bp, Saccharomyces pastorianus
aatccgcttttcttggaatctcttg

SEQ ID NO: 57021 - DNA, 25 bp, Saccharomyces pastorianus
acgaaatgttagagaagctaggcaa

SEQ ID NO: 57022 - DNA, 25 bp, Saccharomyces pastorianus
gcttttcttggaatctcttgtagtg

SEQ ID NO: 57023 - DNA, 25 bp, Saccharomyces pastorianus
acggcgttcgtctatggatagctcc

SEQ ID NO: 57024 - DNA, 25 bp, Saccharomyces pastorianus
agttaatgagtttgaaaatccgctt

SEQ ID NO: 57025 - DNA, 25 bp, Saccharomyces pastorianus
gctaggcaaaataaagttcgaggaa

SEQ ID NO: 57026 - DNA, 25 bp, Saccharomyces pastorianus
gatcccaacctagtagacgaaatgt

SEQ ID NO: 57027 - DNA, 25 bp, Saccharomyces pastorianus
tactatacggcagtgatcccaacct

SEQ ID NO: 57028 - DNA, 25 bp, Saccharomyces pastorianus
gcagtgatcccaacctagtagacga

SEQ ID NO: 57029 - DNA, 25 bp, Saccharomyces pastorianus
ctggtacggcgttcgtctatggata

SEQ ID NO: 57030 - DNA, 25 bp, Saccharomyces pastorianus
tatacggcagtgatcccaacctagt

SEQ ID NO: 57031 - DNA, 25 bp, Saccharomyces pastorianus
aagttttggtttgcatgtgcgccgc

SEQ ID NO: 57032 - DNA, 25 bp, Saccharomyces pastorianus
aaaaattggcttctccaatgcccag

SEQ ID NO: 57033 - DNA, 25 bp, Saccharomyces pastorianus
attccagacgtcaattcactttcac

SEQ ID NO: 57034 - DNA, 25 bp, Saccharomyces pastorianus
tagatggctggctcaagcacaagtt

SEQ ID NO: 57035 - DNA, 25 bp, Saccharomyces pastorianus
agcgcctgcgatatacagctgaaga

SEQ ID NO: 57036 - DNA, 25 bp, Saccharomyces pastorianus
gaagttttctgttactgctcgaaag

SEQ ID NO: 57037 - DNA, 25 bp, Saccharomyces pastorianus
tggagtaatcaaacaccgccttcaa

SEQ ID NO: 57038 - DNA, 25 bp, Saccharomyces pastorianus
gccgccccacttaaatttcgatagt

SEQ ID NO: 57039 - DNA, 25 bp, Saccharomyces pastorianus
aagacacgagtctttctacccgcat

SEQ ID NO: 57040 - DNA, 25 bp, Saccharomyces pastorianus
ttcacgaccagaccaggccaagtta

SEQ ID NO: 57041 - DNA, 25 bp, Saccharomyces pastorianus
ggattcactagcaactacgcacatt

SEQ ID NO: 57042 - DNA, 25 bp, Saccharomyces pastorianus
atttacgttcgccattcttgaaggc

SEQ ID NO: 57043 - DNA, 25 bp, Saccharomyces pastorianus
ggaaacctatcatatggcccgatcc

SEQ ID NO: 57044 - DNA, 25 bp, Saccharomyces pastorianus
ttacgttcgccattcttgaaggccg

SEQ ID NO: 57045 - DNA, 25 bp, Saccharomyces pastorianus
tatcatatggcccgatccggtcacg

SEQ ID NO: 57046 - DNA, 25 bp, Saccharomyces pastorianus
gccggaaacctatcatatggcccga

SEQ ID NO: 57047 - DNA, 25 bp, Saccharomyces pastorianus
aacctatcatatggcccgatccggt

SEQ ID NO: 57048 - DNA, 25 bp, Saccharomyces pastorianus
tcgccattcttgaaggccggaaacc

SEQ ID NO: 57049 - DNA, 25 bp, Saccharomyces pastorianus
tcttgaaggccggaaacctatcata

SEQ ID NO: 57050 - DNA, 25 bp, Saccharomyces pastorianus
gccattcttgaaggccggaaaccta

SEQ ID NO: 57051 - DNA, 25 bp, Saccharomyces pastorianus
tgaaggccggaaacctatcatatgg

SEQ ID NO: 57052 - DNA, 25 bp, Saccharomyces pastorianus
acgttcgccattcttgaaggccgga

SEQ ID NO: 57053 - DNA, 25 bp, Saccharomyces pastorianus
gatctgctggagaaacgactggcta

SEQ ID NO: 57054 - DNA, 25 bp, Saccharomyces pastorianus
aagctctcgcggactaatccattgg

SEQ ID NO: 57055 - DNA, 25 bp, Saccharomyces pastorianus
gatcccggtacctctgattatgtga

SEQ ID NO: 57056 - DNA, 25 bp, Saccharomyces pastorianus
tatgtcccacagaagcccgatgata

SEQ ID NO: 57057 - DNA, 25 bp, Saccharomyces pastorianus
cgcatgagcttgacgatcttgtgga

SEQ ID NO: 57058 - DNA, 25 bp, Saccharomyces pastorianus
attcgataatcacaggcagcatgct

SEQ ID NO: 57059 - DNA, 25 bp, Saccharomyces pastorianus
gtatagatgacacactccagcgatt

SEQ ID NO: 57060 - DNA, 25 bp, Saccharomyces pastorianus
tgcgccaactccattacattcagaa

SEQ ID NO: 57061 - DNA, 25 bp, Saccharomyces pastorianus
taattctgaaccaaaaccggcggcg

SEQ ID NO: 57062 - DNA, 25 bp, Saccharomyces pastorianus
ggttaaccatatcatgtcctcgctg

SEQ ID NO: 57063 - DNA, 25 bp, Saccharomyces pastorianus
gcagcatgctgccaagacagacgat

SEQ ID NO: 57064 - DNA, 25 bp, Saccharomyces pastorianus
gtgcccacgaccagacgctatacta

SEQ ID NO: 57065 - DNA, 25 bp, Saccharomyces pastorianus
tatactacgcctttggcggctgcca

SEQ ID NO: 57066 - DNA, 25 bp, Saccharomyces pastorianus
atactacgcctttggcggctgccac

SEQ ID NO: 57067 - DNA, 25 bp, Saccharomyces pastorianus
agacgctatactacgcctttggcgg

SEQ ID NO: 57068 - DNA, 25 bp, Saccharomyces pastorianus
tgcgtgcccacgaccagacgctata

SEQ ID NO: 57069 - DNA, 25 bp, Saccharomyces pastorianus
gacgctatactacgcctttggcggc

SEQ ID NO: 57070 - DNA, 25 bp, Saccharomyces pastorianus
accagacgctatactacgcctttgg

SEQ ID NO: 57071 - DNA, 25 bp, Saccharomyces pastorianus
gaccagacgctatactacgcctttg

SEQ ID NO: 57072 - DNA, 25 bp, Saccharomyces pastorianus
ctccaaggagctgccgcccgtggac

SEQ ID NO: 57073 - DNA, 25 bp, Saccharomyces pastorianus
gctatactacgcctttggcggctgc

SEQ ID NO: 57074 - DNA, 25 bp, Saccharomyces pastorianus
acgaccagacgctatactacgcctt

SEQ ID NO: 57075 - DNA, 25 bp, Saccharomyces pastorianus
agcctacggaaattcccctgtcaca

SEQ ID NO: 57076 - DNA, 25 bp, Saccharomyces pastorianus
tggcgcccgtgctggatccacagaa

SEQ ID NO: 57077 - DNA, 25 bp, Saccharomyces pastorianus
aaattcccctgtcacagatcaggcg

SEQ ID NO: 57078 - DNA, 25 bp, Saccharomyces pastorianus
agatcaacgccatggtggccactat

SEQ ID NO: 57079 - DNA, 25 bp, Saccharomyces pastorianus
gagcaacagtgtgaagcctacggaa

SEQ ID NO: 57080 - DNA, 25 bp, Saccharomyces pastorianus
acggaaattcccctgtcacagatca

SEQ ID NO: 57081 - DNA, 25 bp, Saccharomyces pastorianus
gcccgtgctggatccacagaagatc

SEQ ID NO: 57082 - DNA, 25 bp, Saccharomyces pastorianus
caacgccatggtggccactatgaag

SEQ ID NO: 57083 - DNA, 25 bp, Saccharomyces pastorianus
acagaagatcaacgccatggtggcc

SEQ ID NO: 57084 - DNA, 25 bp, Saccharomyces pastorianus
atgtcactacagagcaacagtgtga

SEQ ID NO: 57085 - DNA, 25 bp, Saccharomyces pastorianus
ctgtcacagatcaggcgcccgctgg

SEQ ID NO: 57086 - DNA, 25 bp, Saccharomyces pastorianus
ccaacgaagaagacaaggaatttat

SEQ ID NO: 57087 - DNA, 25 bp, Saccharomyces pastorianus
acaatggtattgtcggtgccgtcct

SEQ ID NO: 57088 - DNA, 25 bp, Saccharomyces pastorianus
ggccaagattttgctccagctttcg

SEQ ID NO: 57089 - DNA, 25 bp, Saccharomyces pastorianus
ttttgctccagctttcgatgttgcc

SEQ ID NO: 57090 - DNA, 25 bp, Saccharomyces pastorianus
attgtcggtgccgtcctggtcagag

SEQ ID NO: 57091 - DNA, 25 bp, Saccharomyces pastorianus
ggtattgtcggtgccgtcctggtca

SEQ ID NO: 57092 - DNA, 25 bp, Saccharomyces pastorianus
tgggataagccagttgttgtcaact

SEQ ID NO: 57093 - DNA, 25 bp, Saccharomyces pastorianus
aagattttgctccagctttcgatgt

SEQ ID NO: 57094 - DNA, 25 bp, Saccharomyces pastorianus
ctccagctttcgatgttgccccaga

SEQ ID NO: 57095 - DNA, 25 bp, Saccharomyces pastorianus
agttgttgtcaactgtgaatccaag

SEQ ID NO: 57096 - DNA, 25 bp, Saccharomyces pastorianus
aacaatggtattgtcggtgccgtcc

SEQ ID NO: 57097 - DNA, 25 bp, Saccharomyces pastorianus
taacaacttggtcgctggtttcttc

SEQ ID NO: 57098 - DNA, 25 bp, Saccharomyces pastorianus
ccaacgaagaagacaaggaatttat

SEQ ID NO: 57099 - DNA, 25 bp, Saccharomyces pastorianus
atgttcggttgtctagtcgtctacg

SEQ ID NO: 57100 - DNA, 25 bp, Saccharomyces pastorianus
acaatggtattgtcggtgccgtcct

SEQ ID NO: 57101 - DNA, 25 bp, Saccharomyces pastorianus
ggccaagattttgctccagctttcg

SEQ ID NO: 57102 - DNA, 25 bp, Saccharomyces pastorianus
ttttgctccagctttcgatgttgcc

SEQ ID NO: 57103 - DNA, 25 bp, Saccharomyces pastorianus
attgtcggtgccgtcctggtcagag

SEQ ID NO: 57104 - DNA, 25 bp, Saccharomyces pastorianus
tgggataagccagttgttgtcaact

SEQ ID NO: 57105 - DNA, 25 bp, Saccharomyces pastorianus
aagattttgctccagctttcgatgt

SEQ ID NO: 57106 - DNA, 25 bp, Saccharomyces pastorianus
ctccagctttcgatgttgccccaga

SEQ ID NO: 57107 - DNA, 25 bp, Saccharomyces pastorianus
agttgttgtcaactgtgaatccaag

SEQ ID NO: 57108 - DNA, 25 bp, Saccharomyces pastorianus
aggttgacaacattgctgctgtttt

SEQ ID NO: 57109 - DNA, 25 bp, Saccharomyces pastorianus
gagactacacttttgttgcaactga

SEQ ID NO: 57110 - DNA, 25 bp, Saccharomyces pastorianus
ttgttgcaactgaaaacatctcttt

SEQ ID NO: 57111 - DNA, 25 bp, Saccharomyces pastorianus
agaatggagagccaagcaccctcaa

SEQ ID NO: 57112 - DNA, 25 bp, Saccharomyces pastorianus
tccaatttttaagacccagacctgc

SEQ ID NO: 57113 - DNA, 25 bp, Saccharomyces pastorianus
ctgctgttttcgatgctagactaag

SEQ ID NO: 57114 - DNA, 25 bp, Saccharomyces pastorianus
cagtgcttgggcttttggcttatcc

SEQ ID NO: 57115 - DNA, 25 bp, Saccharomyces pastorianus
ctatcgctgcttctccaatttttaa

SEQ ID NO: 57116 - DNA, 25 bp, Saccharomyces pastorianus
gagccaagcaccctcaactaatgag

SEQ ID NO: 57117 - DNA, 25 bp, Saccharomyces pastorianus
acatctctttggctgatcttcacgc

SEQ ID NO: 57118 - DNA, 25 bp, Saccharomyces pastorianus
gcttatcctctattttgggtccaga

SEQ ID NO: 57119 - DNA, 25 bp, Saccharomyces pastorianus
tgaagcaagttccagctttcttggg

SEQ ID NO: 57120 - DNA, 25 bp, Saccharomyces pastorianus
aagaccaagccagcgagtttgcatc

SEQ ID NO: 57121 - DNA, 25 bp, Saccharomyces pastorianus
gggttcaagctaactgaagctatcg

SEQ ID NO: 57122 - DNA, 25 bp, Saccharomyces pastorianus
taactgaagctatcgccatccaata

SEQ ID NO: 57123 - DNA, 25 bp, Saccharomyces pastorianus
gatttctcacttcaaactagatgtt

SEQ ID NO: 57124 - DNA, 25 bp, Saccharomyces pastorianus
gaaactttgcttccaaagctttgat

SEQ ID NO: 57125 - DNA, 25 bp, Saccharomyces pastorianus
agccagcgagtttgcatctttgttc

SEQ ID NO: 57126 - DNA, 25 bp, Saccharomyces pastorianus
aatcgttgagaaagaccaagccagc

SEQ ID NO: 57127 - DNA, 25 bp, Saccharomyces pastorianus
agctatcgccatccaatattactgt

SEQ ID NO: 57128 - DNA, 25 bp, Saccharomyces pastorianus
tccaaagctttgatttctcacttca

SEQ ID NO: 57129 - DNA, 25 bp, Saccharomyces pastorianus
tcccattgaagcaagttccagcttt

SEQ ID NO: 57130 - DNA, 25 bp, Saccharomyces pastorianus
gcgcaagttccgttctcaaaagaga

SEQ ID NO: 57131 - DNA, 25 bp, Saccharomyces pastorianus
gaggatactcctgttaacgataaaa

SEQ ID NO: 57132 - DNA, 25 bp, Saccharomyces pastorianus
gagatcgaagcacttttggccaaaa

SEQ ID NO: 57133 - DNA, 25 bp, Saccharomyces pastorianus
acgtatcgtgccagcttagaggaaa

SEQ ID NO: 57134 - DNA, 25 bp, Saccharomyces pastorianus
caaagcactgtctacttgggaagaa

SEQ ID NO: 57135 - DNA, 25 bp, Saccharomyces pastorianus
gaaggaacccctgaactccgaacag

SEQ ID NO: 57136 - DNA, 25 bp, Saccharomyces pastorianus
tttaaaggttccattatcgagatcg

SEQ ID NO: 57137 - DNA, 25 bp, Saccharomyces pastorianus
atacccggcatatatttccaaagca

SEQ ID NO: 57138 - DNA, 25 bp, Saccharomyces pastorianus
gaagttacatttgcgcaagttccgt

SEQ ID NO: 57139 - DNA, 25 bp, Saccharomyces pastorianus
aagatctccgagagcgcctgtttga

SEQ ID NO: 57140 - DNA, 25 bp, Saccharomyces pastorianus
attgagattcgacacgtatcgtgcc

SEQ ID NO: 57141 - DNA, 25 bp, Saccharomyces pastorianus
ttaggtattgactatggccagcaaa

SEQ ID NO: 57142 - DNA, 25 bp, Saccharomyces pastorianus
tgaaagagtttacggttccgctgtg

SEQ ID NO: 57143 - DNA, 25 bp, Saccharomyces pastorianus
atcatcacaggatctttggcagccg

SEQ ID NO: 57144 - DNA, 25 bp, Saccharomyces pastorianus
aaagctattgtagtctcaccacagg

SEQ ID NO: 57145 - DNA, 25 bp, Saccharomyces pastorianus
tccgctgtgggaagtttggcaacga

SEQ ID NO: 57146 - DNA, 25 bp, Saccharomyces pastorianus
tcaccacaggctccagtagagcttg

SEQ ID NO: 57147 - DNA, 25 bp, Saccharomyces pastorianus
gtagagcttgtgcttactccagaag

SEQ ID NO: 57148 - DNA, 25 bp, Saccharomyces pastorianus
gtaaggaaatatctggcctttcaat

SEQ ID NO: 57149 - DNA, 25 bp, Saccharomyces pastorianus
ttggcagccgttttaggtattgact

SEQ ID NO: 57150 - DNA, 25 bp, Saccharomyces pastorianus
gaagaacgacccaaatgcagttgaa

SEQ ID NO: 57151 - DNA, 25 bp, Saccharomyces pastorianus
tttttgcaacttttatcatcacagg

SEQ ID NO: 57152 - DNA, 25 bp, Saccharomyces pastorianus
atggactctatggtacagtctgaac

SEQ ID NO: 57153 - DNA, 25 bp, Saccharomyces pastorianus
caaagtttgttatccgttcagcgtc

SEQ ID NO: 57154 - DNA, 25 bp, Saccharomyces pastorianus
atgttcgtattttggataggcgtgt

SEQ ID NO: 57155 - DNA, 25 bp, Saccharomyces pastorianus
atgaaatctctctcttcgaaactaa

SEQ ID NO: 57156 - DNA, 25 bp, Saccharomyces pastorianus
aaaccagtgttgatcattttgacgg

SEQ ID NO: 57157 - DNA, 25 bp, Saccharomyces pastorianus
atccgttcagcgtcagctcgatgaa

SEQ ID NO: 57158 - DNA, 25 bp, Saccharomyces pastorianus
gtacttggacgtttgataccttcct

SEQ ID NO: 57159 - DNA, 25 bp, Saccharomyces pastorianus
gtaaacagatttcgattgccttaga

SEQ ID NO: 57160 - DNA, 25 bp, Saccharomyces pastorianus
tgattcttcggtggtcaaattagca

SEQ ID NO: 57161 - DNA, 25 bp, Saccharomyces pastorianus
gggctctgtttcaaaatcctggata

SEQ ID NO: 57162 - DNA, 25 bp, Saccharomyces pastorianus
gaattcgatagcttcatggactcta

SEQ ID NO: 57163 - DNA, 25 bp, Saccharomyces pastorianus
gagatccagcgggttacttacacaa

SEQ ID NO: 57164 - DNA, 25 bp, Saccharomyces pastorianus
gttagctacttttatgaaacctcta

SEQ ID NO: 57165 - DNA, 25 bp, Saccharomyces pastorianus
acaggatcattgactccagttaatc

SEQ ID NO: 57166 - DNA, 25 bp, Saccharomyces pastorianus
aaacctctatcccaaagagatccag

SEQ ID NO: 57167 - DNA, 25 bp, Saccharomyces pastorianus
gatgaggatctgatggtggacctaa

SEQ ID NO: 57168 - DNA, 25 bp, Saccharomyces pastorianus
caagttttcaagaagctttcaatca

SEQ ID NO: 57169 - DNA, 25 bp, Saccharomyces pastorianus
tggtggacctaaacacaggatcatt

SEQ ID NO: 57170 - DNA, 25 bp, Saccharomyces pastorianus
tgactccagttaatctaaagcattg

SEQ ID NO: 57171 - DNA, 25 bp, Saccharomyces pastorianus
cagcgggttacttacacaaacaact

SEQ ID NO: 57172 - DNA, 25 bp, Saccharomyces pastorianus
acaactaagccaacaagttttcaag

SEQ ID NO: 57173 - DNA, 25 bp, Saccharomyces pastorianus
gtgaacccaaataattctgttagct

SEQ ID NO: 57174 - DNA, 25 bp, Saccharomyces pastorianus
ttaaggcaacccgtaaagacaagca

SEQ ID NO: 57175 - DNA, 25 bp, Saccharomyces pastorianus
tggtggacagcgactttgtttgccc

SEQ ID NO: 57176 - DNA, 25 bp, Saccharomyces pastorianus
atgaataacggtggcacacccgtcc

SEQ ID NO: 57177 - DNA, 25 bp, Saccharomyces pastorianus
gaagtgttccttgacgggaggcctt

SEQ ID NO: 57178 - DNA, 25 bp, Saccharomyces pastorianus
attcttctggattcgttagtgcccg

SEQ ID NO: 57179 - DNA, 25 bp, Saccharomyces pastorianus
agatctgggcggcaaatccaaagat

SEQ ID NO: 57180 - DNA, 25 bp, Saccharomyces pastorianus
gaaactattggacactaccagcact

SEQ ID NO: 57181 - DNA, 25 bp, Saccharomyces pastorianus
atctacccgccgatttgaagtgttc

SEQ ID NO: 57182 - DNA, 25 bp, Saccharomyces pastorianus
tgaatactcccactcctatgaataa

SEQ ID NO: 57183 - DNA, 25 bp, Saccharomyces pastorianus
aagggcatttcaacgatctacccgc

SEQ ID NO: 57184 - DNA, 25 bp, Saccharomyces pastorianus
aagacttttccaaagtggcgctgga

SEQ ID NO: 57185 - DNA, 25 bp, Saccharomyces pastorianus
gaattgtccaacgaatagcgatcca

SEQ ID NO: 57186 - DNA, 25 bp, Saccharomyces pastorianus
atcaggagaaccacgggtatcccaa

SEQ ID NO: 57187 - DNA, 25 bp, Saccharomyces pastorianus
tcaagtcgaagacaaacagtcctgg

SEQ ID NO: 57188 - DNA, 25 bp, Saccharomyces pastorianus
gtggtggtagagaccattggatcaa

SEQ ID NO: 57189 - DNA, 25 bp, Saccharomyces pastorianus
tagaccctgagacgatgacgcccga

SEQ ID NO: 57190 - DNA, 25 bp, Saccharomyces pastorianus
aaggatcaggagaaccacgggtatc

SEQ ID NO: 57191 - DNA, 25 bp, Saccharomyces pastorianus
gatggctcagcggaagatcatgata

SEQ ID NO: 57192 - DNA, 25 bp, Saccharomyces pastorianus
gaaattcgtggttcaagtcgaagac

SEQ ID NO: 57193 - DNA, 25 bp, Saccharomyces pastorianus
atccattgagatagaccctgagacg

SEQ ID NO: 57194 - DNA, 25 bp, Saccharomyces pastorianus
atgacgcccgaggagatggctcagc

SEQ ID NO: 57195 - DNA, 25 bp, Saccharomyces pastorianus
gagaccattggatcaagaattgtcc

SEQ ID NO: 57196 - DNA, 25 bp, Saccharomyces pastorianus
ggtcatgaatacctcactgatacga

SEQ ID NO: 57197 - DNA, 25 bp, Saccharomyces pastorianus
tttaccttcgtactgtggatatcaa

SEQ ID NO: 57198 - DNA, 25 bp, Saccharomyces pastorianus
gagaggcagcatatccactatttaa

SEQ ID NO: 57199 - DNA, 25 bp, Saccharomyces pastorianus
gattttttcagtacgctcttacgct

SEQ ID NO: 57200 - DNA, 25 bp, Saccharomyces pastorianus
gacagctcatatgaccaatggatct

SEQ ID NO: 57201 - DNA, 25 bp, Saccharomyces pastorianus
tacgcttatgcgattctcatgcaaa

SEQ ID NO: 57202 - DNA, 25 bp, Saccharomyces pastorianus
aacagtcaggagtttgccttgaaat

SEQ ID NO: 57203 - DNA, 25 bp, Saccharomyces pastorianus
taactttttccgtttactactgatg

SEQ ID NO: 57204 - DNA, 25 bp, Saccharomyces pastorianus
gtattatctacctttgacagctcat

SEQ ID NO: 57205 - DNA, 25 bp, Saccharomyces pastorianus
ggtcggctgcagaagtgctgtacaa

SEQ ID NO: 57206 - DNA, 25 bp, Saccharomyces pastorianus
aatggatcttggacggtagcagagt

SEQ ID NO: 57207 - DNA, 25 bp, Saccharomyces pastorianus
aaataagatcgttatggctcgtaac

SEQ ID NO: 57208 - DNA, 25 bp, Saccharomyces pastorianus
atcaagatacggtgcccaaatattt

SEQ ID NO: 57209 - DNA, 25 bp, Saccharomyces pastorianus
ctggacataataaccggagagctac

SEQ ID NO: 57210 - DNA, 25 bp, Saccharomyces pastorianus
gaattctctgactacttctgaaaaa

SEQ ID NO: 57211 - DNA, 25 bp, Saccharomyces pastorianus
gcttcttcgataactctttacggtg

SEQ ID NO: 57212 - DNA, 25 bp, Saccharomyces pastorianus
tatgcattccgatactcaagagtct

SEQ ID NO: 57213 - DNA, 25 bp, Saccharomyces pastorianus
tggttttacaatatgcattccgata

SEQ ID NO: 57214 - DNA, 25 bp, Saccharomyces pastorianus
ggagagctaccgaattctctgacta

SEQ ID NO: 57215 - DNA, 25 bp, Saccharomyces pastorianus
ttttcaaccatacaaccattctctc

SEQ ID NO: 57216 - DNA, 25 bp, Saccharomyces pastorianus
atttggcaaacctggaaacgatatt

SEQ ID NO: 57217 - DNA, 25 bp, Saccharomyces pastorianus
acaaccattctctctacaaacttaa

SEQ ID NO: 57218 - DNA, 25 bp, Saccharomyces pastorianus
aagctcaagctcaaccacaaccaga

SEQ ID NO: 57219 - DNA, 25 bp, Saccharomyces pastorianus
atgcatgcaaccacaagctcaagct

SEQ ID NO: 57220 - DNA, 25 bp, Saccharomyces pastorianus
gctgcagcacaacaaggtgttccat

SEQ ID NO: 57221 - DNA, 25 bp, Saccharomyces pastorianus
ctcaaccacaaccagaagctcaaat

SEQ ID NO: 57222 - DNA, 25 bp, Saccharomyces pastorianus
caaccacaatcaacatgcatgcaac

SEQ ID NO: 57223 - DNA, 25 bp, Saccharomyces pastorianus
caacaaggtgttccatacggttaca

SEQ ID NO: 57224 - DNA, 25 bp, Saccharomyces pastorianus
gctcaaatacagaatggtcaacctg

SEQ ID NO: 57225 - DNA, 25 bp, Saccharomyces pastorianus
gaatggtcaacctgtcaacccacaa

SEQ ID NO: 57226 - DNA, 25 bp, Saccharomyces pastorianus
gcaacaacaacaagccgctgctgcc

SEQ ID NO: 57227 - DNA, 25 bp, Saccharomyces pastorianus
gccgctgctgcagcacaacaaggtg

SEQ ID NO: 57228 - DNA, 25 bp, Saccharomyces pastorianus
tgttccatacggttacaacggttat

SEQ ID NO: 57229 - DNA, 25 bp, Saccharomyces pastorianus
aacaccgctcaaagggacgatcgga

SEQ ID NO: 57230 - DNA, 25 bp, Saccharomyces pastorianus
caaagggacgatcggatgacgacaa

SEQ ID NO: 57231 - DNA, 25 bp, Saccharomyces pastorianus
agggacgatcggatgacgacaacga

SEQ ID NO: 57232 - DNA, 25 bp, Saccharomyces pastorianus
ggaacaccgctcaaagggacgatcg

SEQ ID NO: 57233 - DNA, 25 bp, Saccharomyces pastorianus
accgctcaaagggacgatcggatga

SEQ ID NO: 57234 - DNA, 25 bp, Saccharomyces pastorianus
gagtacgaaggaggttctcaagcca

SEQ ID NO: 57235 - DNA, 25 bp, Saccharomyces pastorianus
ggccagacgaagaggagagtacgaa

SEQ ID NO: 57236 - DNA, 25 bp, Saccharomyces pastorianus
gcaggaacaccgctcaaagggacga

SEQ ID NO: 57237 - DNA, 25 bp, Saccharomyces pastorianus
atgacgacaacgaggggccagacga

SEQ ID NO: 57238 - DNA, 25 bp, Saccharomyces pastorianus
gctcaaagggacgatcggatgacga

SEQ ID NO: 57239 - DNA, 25 bp, Saccharomyces pastorianus
caggaacaccgctcaaagggacgat

SEQ ID NO: 57240 - DNA, 25 bp, Saccharomyces pastorianus
gcctttaaagcttatttctggttca

SEQ ID NO: 57241 - DNA, 25 bp, Saccharomyces pastorianus
gcatcgggtccgaacaatctattac

SEQ ID NO: 57242 - DNA, 25 bp, Saccharomyces pastorianus
taatggcgccgtaccatatggcaaa

SEQ ID NO: 57243 - DNA, 25 bp, Saccharomyces pastorianus
gatatcatagtcaaacttccctcaa

SEQ ID NO: 57244 - DNA, 25 bp, Saccharomyces pastorianus
ttaaccgacttgaatctggattgct

SEQ ID NO: 57245 - DNA, 25 bp, Saccharomyces pastorianus
ttccctcaagttcaatcaccgaaga

SEQ ID NO: 57246 - DNA, 25 bp, Saccharomyces pastorianus
catcttagcctcatttttaaccgac

SEQ ID NO: 57247 - DNA, 25 bp, Saccharomyces pastorianus
gacagagcctatatcgtggttacaa

SEQ ID NO: 57248 - DNA, 25 bp, Saccharomyces pastorianus
gtgaacacaatagagccactcctct

SEQ ID NO: 57249 - DNA, 25 bp, Saccharomyces pastorianus
gagatcatcgctgcatctggtgaac

SEQ ID NO: 57250 - DNA, 25 bp, Saccharomyces pastorianus
gatggtttctatctcctaaccacag

SEQ ID NO: 57251 - DNA, 25 bp, Saccharomyces pastorianus
agggtgcatgtactacttgctcgtc

SEQ ID NO: 57252 - DNA, 25 bp, Saccharomyces pastorianus
gtggttccaagagcatcgtcatcaa

SEQ ID NO: 57253 - DNA, 25 bp, Saccharomyces pastorianus
gaggaattccatgctgttcaagaag

SEQ ID NO: 57254 - DNA, 25 bp, Saccharomyces pastorianus
aacagatctttgtccagtgtcccgg

SEQ ID NO: 57255 - DNA, 25 bp, Saccharomyces pastorianus
catcgagttattgaccaagcagctt

SEQ ID NO: 57256 - DNA, 25 bp, Saccharomyces pastorianus
cttgctcgtctagtgaagtgacttt

SEQ ID NO: 57257 - DNA, 25 bp, Saccharomyces pastorianus
ggtattgaatccatgctgaagcatt

SEQ ID NO: 57258 - DNA, 25 bp, Saccharomyces pastorianus
cattgactaccgtggttgggatcca

SEQ ID NO: 57259 - DNA, 25 bp, Saccharomyces pastorianus
tggtccactggaacgtcattgagcc

SEQ ID NO: 57260 - DNA, 25 bp, Saccharomyces pastorianus
aagcagcttgcttctggcaacgatg

SEQ ID NO: 57261 - DNA, 25 bp, Saccharomyces pastorianus
aaccattccaagctagcacaacaga

SEQ ID NO: 57262 - DNA, 25 bp, Saccharomyces pastorianus
gaggttactcttcatcatttacgct

SEQ ID NO: 57263 - DNA, 25 bp, Saccharomyces pastorianus
gtggagaccaacagacacctcatac

SEQ ID NO: 57264 - DNA, 25 bp, Saccharomyces pastorianus
gttcgacgaccaagatgatgccagc

SEQ ID NO: 57265 - DNA, 25 bp, Saccharomyces pastorianus
gcaagcaccatctgcattgatctta

SEQ ID NO: 57266 - DNA, 25 bp, Saccharomyces pastorianus
attgtttttgttaccattgccttct

SEQ ID NO: 57267 - DNA, 25 bp, Saccharomyces pastorianus
tacagacccagaaaacgttgcggac

SEQ ID NO: 57268 - DNA, 25 bp, Saccharomyces pastorianus
ggcgcttgctttggctgtattttac

SEQ ID NO: 57269 - DNA, 25 bp, Saccharomyces pastorianus
accattgccttcttgtggagaccaa

SEQ ID NO: 57270 - DNA, 25 bp, Saccharomyces pastorianus
tactttgattccaatggcgcttgct

SEQ ID NO: 57271 - DNA, 25 bp, Saccharomyces pastorianus
tgatgccagcatcatcactggtgag

SEQ ID NO: 57272 - DNA, 25 bp, Saccharomyces pastorianus
ccttcttaagtgttttagccggcag

SEQ ID NO: 57273 - DNA, 25 bp, Saccharomyces pastorianus
atttgccttctggaaacacaagcat

SEQ ID NO: 57274 - DNA, 25 bp, Saccharomyces pastorianus
ttatattcatttgccttctggaaac

SEQ ID NO: 57275 - DNA, 25 bp, Saccharomyces pastorianus
gttatattcatttgccttctggaaa

SEQ ID NO: 57276 - DNA, 25 bp, Saccharomyces pastorianus
tattcatttgccttctggaaacaca

SEQ ID NO: 57277 - DNA, 25 bp, Saccharomyces pastorianus
catttgccttctggaaacacaagca

SEQ ID NO: 57278 - DNA, 25 bp, Saccharomyces pastorianus
caagcatgaattgctaccattgcaa

SEQ ID NO: 57279 - DNA, 25 bp, Saccharomyces pastorianus
acacaagcatgaattgctaccattg

SEQ ID NO: 57280 - DNA, 25 bp, Saccharomyces pastorianus
ttcatttgccttctggaaacacaag

SEQ ID NO: 57281 - DNA, 25 bp, Saccharomyces pastorianus
tcatttgccttctggaaacacaagc

SEQ ID NO: 57282 - DNA, 25 bp, Saccharomyces pastorianus
attcatttgccttctggaaacacaa

SEQ ID NO: 57283 - DNA, 25 bp, Saccharomyces pastorianus
atattcatttgccttctggaaacac

SEQ ID NO: 57284 - DNA, 25 bp, Saccharomyces pastorianus
gtttgcacgatactaaatacccggt

SEQ ID NO: 57285 - DNA, 25 bp, Saccharomyces pastorianus
gtgagccaattgacgaatctgatgc

SEQ ID NO: 57286 - DNA, 25 bp, Saccharomyces pastorianus
aacgcttatggtcaccttgcaggta

SEQ ID NO: 57287 - DNA, 25 bp, Saccharomyces pastorianus
ttctatgttggctactagcgttcgt

SEQ ID NO: 57288 - DNA, 25 bp, Saccharomyces pastorianus
gaataaatctctcgctaatcccatc

SEQ ID NO: 57289 - DNA, 25 bp, Saccharomyces pastorianus
gctaatcccatcatgacgttttcta

SEQ ID NO: 57290 - DNA, 25 bp, Saccharomyces pastorianus
actggattttactgtgttactgcat

SEQ ID NO: 57291 - DNA, 25 bp, Saccharomyces pastorianus
tactgagatcataaactaccgctat

SEQ ID NO: 57292 - DNA, 25 bp, Saccharomyces pastorianus
agttgtttacgatccatatacttcc

SEQ ID NO: 57293 - DNA, 25 bp, Saccharomyces pastorianus
aatctgatgctggtattgtcgttgc

SEQ ID NO: 57294 - DNA, 25 bp, Saccharomyces pastorianus
gatccatttatatcgttcaacgtca

SEQ ID NO: 57295 - DNA, 25 bp, Saccharomyces pastorianus
gtttgtttgatatggatggtcttct

SEQ ID NO: 57296 - DNA, 25 bp, Saccharomyces pastorianus
gaagatatttacactgaaacgttaa

SEQ ID NO: 57297 - DNA, 25 bp, Saccharomyces pastorianus
gatggtcttcttattaacacagaag

SEQ ID NO: 57298 - DNA, 25 bp, Saccharomyces pastorianus
acttgggacgtgaagattcagttac

SEQ ID NO: 57299 - DNA, 25 bp, Saccharomyces pastorianus
taaaggtcctttgacttgggacgtg

SEQ ID NO: 57300 - DNA, 25 bp, Saccharomyces pastorianus
taaatgaaaccttggcggaatttgg

SEQ ID NO: 57301 - DNA, 25 bp, Saccharomyces pastorianus
catcctgtagatgtaaaagcatgtt

SEQ ID NO: 57302 - DNA, 25 bp, Saccharomyces pastorianus
aggtcctttgacttgggacgtgaag

SEQ ID NO: 57303 - DNA, 25 bp, Saccharomyces pastorianus
cctttgacttgggacgtgaagattc

SEQ ID NO: 57304 - DNA, 25 bp, Saccharomyces pastorianus
atatggatggtcttcttattaacac

SEQ ID NO: 57305 - DNA, 25 bp, Saccharomyces pastorianus
aaagcatgtttgtttgatatggatg

SEQ ID NO: 57306 - DNA, 25 bp, Saccharomyces pastorianus
gtgcggacttttcaattgttcaacc

SEQ ID NO: 57307 - DNA, 25 bp, Saccharomyces pastorianus
gatccgacggtgcacaacgatgata

SEQ ID NO: 57308 - DNA, 25 bp, Saccharomyces pastorianus
cgtgtaaagtttccgccagtgaccg

SEQ ID NO: 57309 - DNA, 25 bp, Saccharomyces pastorianus
ccgaaaacgcgctggtgtcaatggt

SEQ ID NO: 57310 - DNA, 25 bp, Saccharomyces pastorianus
tatgaggctgactttccccttgtta

SEQ ID NO: 57311 - DNA, 25 bp, Saccharomyces pastorianus
gacgcagatcagtgggtctcgccta

SEQ ID NO: 57312 - DNA, 25 bp, Saccharomyces pastorianus
tactgttgtgttcaggttgtgccaa

SEQ ID NO: 57313 - DNA, 25 bp, Saccharomyces pastorianus
gattccatcgtccaatgtgtcgtat

SEQ ID NO: 57314 - DNA, 25 bp, Saccharomyces pastorianus
gaatacttagtctctgaggcggtgt

SEQ ID NO: 57315 - DNA, 25 bp, Saccharomyces pastorianus
aatattccggcgattttgtctctaa

SEQ ID NO: 57316 - DNA, 25 bp, Saccharomyces pastorianus
gttcaaccagcatgcatgtgtgtcg

SEQ ID NO: 57317 - DNA, 25 bp, Saccharomyces pastorianus
ttgttcgtttccactctgctaaata

SEQ ID NO: 57318 - DNA, 25 bp, Saccharomyces pastorianus
aaaatactaatgagacctggccgtc

SEQ ID NO: 57319 - DNA, 25 bp, Saccharomyces pastorianus
gagcctgtatttgtatccaccttag

SEQ ID NO: 57320 - DNA, 25 bp, Saccharomyces pastorianus
ggaagtcctggccaagttgttagta

SEQ ID NO: 57321 - DNA, 25 bp, Saccharomyces pastorianus
aatgctctcatttatactaccagga

SEQ ID NO: 57322 - DNA, 25 bp, Saccharomyces pastorianus
gaatctgatggcaacactcatagag

SEQ ID NO: 57323 - DNA, 25 bp, Saccharomyces pastorianus
gaaatgtttctgtcttctccaaaat

SEQ ID NO: 57324 - DNA, 25 bp, Saccharomyces pastorianus
gacattctattactattctcctgaa

SEQ ID NO: 57325 - DNA, 25 bp, Saccharomyces pastorianus
gaggcctttattcctaagttactca

SEQ ID NO: 57326 - DNA, 25 bp, Saccharomyces pastorianus
tgagtgttcgtacgctggaagtcct

SEQ ID NO: 57327 - DNA, 25 bp, Saccharomyces pastorianus
gtctctgcataattgtgagcctgta

SEQ ID NO: 57328 - DNA, 25 bp, Saccharomyces pastorianus
ttgttctatatagccgccgccgctg

SEQ ID NO: 57329 - DNA, 25 bp, Saccharomyces pastorianus
gacccattgcaaacactcgtcaaag

SEQ ID NO: 57330 - DNA, 25 bp, Saccharomyces pastorianus
atgggcctgtacataggctcccaca

SEQ ID NO: 57331 - DNA, 25 bp, Saccharomyces pastorianus
gctgccacctacaactggttggtat

SEQ ID NO: 57332 - DNA, 25 bp, Saccharomyces pastorianus
tgcaccttgatcatgggcctgtaca

SEQ ID NO: 57333 - DNA, 25 bp, Saccharomyces pastorianus
aaagtcacgaggcaccttgaccgtc

SEQ ID NO: 57334 - DNA, 25 bp, Saccharomyces pastorianus
actggttggtatgcaccgagggatc

SEQ ID NO: 57335 - DNA, 25 bp, Saccharomyces pastorianus
gagggatcgtgctgcaccttgatca

SEQ ID NO: 57336 - DNA, 25 bp, Saccharomyces pastorianus
tgctcctgttcgatgcgggctgtgc

SEQ ID NO: 57337 - DNA, 25 bp, Saccharomyces pastorianus
tgcaggatcactgcggtggctagac

SEQ ID NO: 57338 - DNA, 25 bp, Saccharomyces pastorianus
tcttctagcgcctgcaggatcactg

SEQ ID NO: 57339 - DNA, 25 bp, Saccharomyces pastorianus
atttagatccaggttcgagaacgac

SEQ ID NO: 57340 - DNA, 25 bp, Saccharomyces pastorianus
ggtcttcgttggcatatgatcctgt

SEQ ID NO: 57341 - DNA, 25 bp, Saccharomyces pastorianus
gacgacattactgaaaaacgcccta

SEQ ID NO: 57342 - DNA, 25 bp, Saccharomyces pastorianus
aatccattgttcactaggttatctg

SEQ ID NO: 57343 - DNA, 25 bp, Saccharomyces pastorianus
atgatcctgttaatatggccaagag

SEQ ID NO: 57344 - DNA, 25 bp, Saccharomyces pastorianus
gaaggctattgaccatctgcacaag

SEQ ID NO: 57345 - DNA, 25 bp, Saccharomyces pastorianus
agcgggagtgcacgacagtaacaat

SEQ ID NO: 57346 - DNA, 25 bp, Saccharomyces pastorianus
gtcatccgctgcttgacaagtcgaa

SEQ ID NO: 57347 - DNA, 25 bp, Saccharomyces pastorianus
aacgttacgttatcgctggactcca

SEQ ID NO: 57348 - DNA, 25 bp, Saccharomyces pastorianus
acgagattgccatcaaatgctttaa

SEQ ID NO: 57349 - DNA, 25 bp, Saccharomyces pastorianus
gaagcctaataatgtatctacgacg

SEQ ID NO: 57350 - DNA, 25 bp, Saccharomyces pastorianus
gctttttcattattaggccacacaa

SEQ ID NO: 57351 - DNA, 25 bp, Saccharomyces pastorianus
gaagatcgaacctgctttttcatta

SEQ ID NO: 57352 - DNA, 25 bp, Saccharomyces pastorianus
aacaggatccgccaaagtgtacaaa

SEQ ID NO: 57353 - DNA, 25 bp, Saccharomyces pastorianus
cacacatcctgccattcgataataa

SEQ ID NO: 57354 - DNA, 25 bp, Saccharomyces pastorianus
gaaacagccgagctaggtgagcaaa

SEQ ID NO: 57355 - DNA, 25 bp, Saccharomyces pastorianus
cagtctacgactgcggtgaaagatt

SEQ ID NO: 57356 - DNA, 25 bp, Saccharomyces pastorianus
gaactgtctaacactatgcgacgaa

SEQ ID NO: 57357 - DNA, 25 bp, Saccharomyces pastorianus
taaccatcggttctgacggtaagat

SEQ ID NO: 57358 - DNA, 25 bp, Saccharomyces pastorianus
gtgattacttcgctgtaggtttaag

SEQ ID NO: 57359 - DNA, 25 bp, Saccharomyces pastorianus
catgcatcttgagacacacatcctg

SEQ ID NO: 57360 - DNA, 25 bp, Saccharomyces pastorianus
tcggtacctacttaataaccatcgg

SEQ ID NO: 57361 - DNA, 25 bp, Saccharomyces pastorianus
gaagaccttggtttgataactgatg

SEQ ID NO: 57362 - DNA, 25 bp, Saccharomyces pastorianus
ggagctgtgcgaaactcttgaattt

SEQ ID NO: 57363 - DNA, 25 bp, Saccharomyces pastorianus
agcttcggctgggtaattatactaa

SEQ ID NO: 57364 - DNA, 25 bp, Saccharomyces pastorianus
aaatggttcttcctgccttgattta

SEQ ID NO: 57365 - DNA, 25 bp, Saccharomyces pastorianus
ggcgaatgatcccaagttcagcaaa

SEQ ID NO: 57366 - DNA, 25 bp, Saccharomyces pastorianus
taagcctagtacttgggacctcgct

SEQ ID NO: 57367 - DNA, 25 bp, Saccharomyces pastorianus
aaaacgaactgagccagcttcggct

SEQ ID NO: 57368 - DNA, 25 bp, Saccharomyces pastorianus
ccttatttcaagtctgatccacgct

SEQ ID NO: 57369 - DNA, 25 bp, Saccharomyces pastorianus
acccaatggtccgatatttatcctt

SEQ ID NO: 57370 - DNA, 25 bp, Saccharomyces pastorianus
ggacctcgcttccaaggagctgtgc

SEQ ID NO: 57371 - DNA, 25 bp, Saccharomyces pastorianus
gatccacgctttttgcaaatgcttg

SEQ ID NO: 57372 - DNA, 25 bp, Saccharomyces pastorianus
tataaaccagatgacagattcgttg

SEQ ID NO: 57373 - DNA, 25 bp, Saccharomyces pastorianus
tgacgcgatcattaaaagccggtaa

SEQ ID NO: 57374 - DNA, 25 bp, Saccharomyces pastorianus
gaactcatcctcaaggttgacgcga

SEQ ID NO: 57375 - DNA, 25 bp, Saccharomyces pastorianus
catcctcaaggttgacgcgatcatt

SEQ ID NO: 57376 - DNA, 25 bp, Saccharomyces pastorianus
gggtcgatgttcaccgatattaaga

SEQ ID NO: 57377 - DNA, 25 bp, Saccharomyces pastorianus
gatattaagaactcatcctcaaggt

SEQ ID NO: 57378 - DNA, 25 bp, Saccharomyces pastorianus
agaaggcttagccaataagttagct

SEQ ID NO: 57379 - DNA, 25 bp, Saccharomyces pastorianus
aagccggtaatggtatatggagaat

SEQ ID NO: 57380 - DNA, 25 bp, Saccharomyces pastorianus
gagaatggttggtttggcactgtta

SEQ ID NO: 57381 - DNA, 25 bp, Saccharomyces pastorianus
caataagttagctacgtttagaaat

SEQ ID NO: 57382 - DNA, 25 bp, Saccharomyces pastorianus
ggttggtttggcactgttaatattc

SEQ ID NO: 57383 - DNA, 25 bp, Saccharomyces pastorianus
caaggcttctaactggagattagtc

SEQ ID NO: 57384 - DNA, 25 bp, Saccharomyces pastorianus
caccgattctattgtcaaggcttct

SEQ ID NO: 57385 - DNA, 25 bp, Saccharomyces pastorianus
tattgtcaaggcttctaactggaga

SEQ ID NO: 57386 - DNA, 25 bp, Saccharomyces pastorianus
accgattctattgtcaaggcttcta

SEQ ID NO: 57387 - DNA, 25 bp, Saccharomyces pastorianus
ttctattgtcaaggcttctaactgg

SEQ ID NO: 57388 - DNA, 25 bp, Saccharomyces pastorianus
tgtcaaggcttctaactggagatta

SEQ ID NO: 57389 - DNA, 25 bp, Saccharomyces pastorianus
ccgattctattgtcaaggcttctaa

SEQ ID NO: 57390 - DNA, 25 bp, Saccharomyces pastorianus
ttgtcaaggcttctaactggagatt

SEQ ID NO: 57391 - DNA, 25 bp, Saccharomyces pastorianus
gattctattgtcaaggcttctaact

SEQ ID NO: 57392 - DNA, 25 bp, Saccharomyces pastorianus
tccaccgattctattgtcaaggctt

SEQ ID NO: 57393 - DNA, 25 bp, Saccharomyces pastorianus
ctattgtcaaggcttctaactggag

SEQ ID NO: 57394 - DNA, 25 bp, Saccharomyces pastorianus
aatgacccgttcgatgagcgaggca

SEQ ID NO: 57395 - DNA, 25 bp, Saccharomyces pastorianus
aatccaagctgttcgaagtagtgac

SEQ ID NO: 57396 - DNA, 25 bp, Saccharomyces pastorianus
gaacctattggagcaggatcagact

SEQ ID NO: 57397 - DNA, 25 bp, Saccharomyces pastorianus
caaaacttggtttctaacgcgccag

SEQ ID NO: 57398 - DNA, 25 bp, Saccharomyces pastorianus
taacgcgccagttgcagaaacaatc

SEQ ID NO: 57399 - DNA, 25 bp, Saccharomyces pastorianus
gatctatgaatttgcctcagttaca

SEQ ID NO: 57400 - DNA, 25 bp, Saccharomyces pastorianus
aaagctcaacttcaagccatatcat

SEQ ID NO: 57401 - DNA, 25 bp, Saccharomyces pastorianus
gaaatcctgatgatgagctacaagc

SEQ ID NO: 57402 - DNA, 25 bp, Saccharomyces pastorianus
gagcgaggcaactggtctattggca

SEQ ID NO: 57403 - DNA, 25 bp, Saccharomyces pastorianus
gcaggatcagactctcatggaaatc

SEQ ID NO: 57404 - DNA, 25 bp, Saccharomyces pastorianus
gttgcagagcacacctcaaaacttg

SEQ ID NO: 57405 - DNA, 25 bp, Saccharomyces pastorianus
ggtcaatccaggtaggctccagaaa

SEQ ID NO: 57406 - DNA, 25 bp, Saccharomyces pastorianus
ctctctccctataagcataccagaa

SEQ ID NO: 57407 - DNA, 25 bp, Saccharomyces pastorianus
ggctgttccaccaccagatgagaaa

SEQ ID NO: 57408 - DNA, 25 bp, Saccharomyces pastorianus
ttttcttacaggtcgcgagtgtctt

SEQ ID NO: 57409 - DNA, 25 bp, Saccharomyces pastorianus
aactgcgataaccacgtcaacaaag

SEQ ID NO: 57410 - DNA, 25 bp, Saccharomyces pastorianus
attttcaccgttatcacagtctcaa

SEQ ID NO: 57411 - DNA, 25 bp, Saccharomyces pastorianus
gaagaagatttctactctctcccta

SEQ ID NO: 57412 - DNA, 25 bp, Saccharomyces pastorianus
atatctcggcggcatctcaactaga

SEQ ID NO: 57413 - DNA, 25 bp, Saccharomyces pastorianus
gattctggccaatatatctcggcgg

SEQ ID NO: 57414 - DNA, 25 bp, Saccharomyces pastorianus
aactaccacgcaagtgccttctaaa

SEQ ID NO: 57415 - DNA, 25 bp, Saccharomyces pastorianus
ggtggttcccaaggacgacaacaat

SEQ ID NO: 57416 - DNA, 25 bp, Saccharomyces pastorianus
ggtaagatcctaattgcctcagaaa

SEQ ID NO: 57417 - DNA, 25 bp, Saccharomyces pastorianus
aaaatagactcaccgggtccttgct

SEQ ID NO: 57418 - DNA, 25 bp, Saccharomyces pastorianus
taatcttgaattgacctgggcggaa

SEQ ID NO: 57419 - DNA, 25 bp, Saccharomyces pastorianus
cttacttcaggtacatcgatgacgt

SEQ ID NO: 57420 - DNA, 25 bp, Saccharomyces pastorianus
aatccttcatcgcagcgtgcacaag

SEQ ID NO: 57421 - DNA, 25 bp, Saccharomyces pastorianus
agtgaagagcgtcaacgatccctcg

SEQ ID NO: 57422 - DNA, 25 bp, Saccharomyces pastorianus
ggtggcacagctgaaaccttacttc

SEQ ID NO: 57423 - DNA, 25 bp, Saccharomyces pastorianus
acgatccctcgcaaaatagactcac

SEQ ID NO: 57424 - DNA, 25 bp, Saccharomyces pastorianus
agcgtgcacaagtggtcaccatgtc

SEQ ID NO: 57425 - DNA, 25 bp, Saccharomyces pastorianus
cttgctggcgcataaggtggctgat

SEQ ID NO: 57426 - DNA, 25 bp, Saccharomyces pastorianus
aggtctacctggtgcctgttgaaag

SEQ ID NO: 57427 - DNA, 25 bp, Saccharomyces pastorianus
tttcctagtagatcgcaaccttcgg

SEQ ID NO: 57428 - DNA, 25 bp, Saccharomyces pastorianus
gacatggccaatgatgacggttatt

SEQ ID NO: 57429 - DNA, 25 bp, Saccharomyces pastorianus
aattcggctttaatggtgctggtga

SEQ ID NO: 57430 - DNA, 25 bp, Saccharomyces pastorianus
cagaccaggcaaccccttatatagt

SEQ ID NO: 57431 - DNA, 25 bp, Saccharomyces pastorianus
ttcggaccccaaactgcaagatcag

SEQ ID NO: 57432 - DNA, 25 bp, Saccharomyces pastorianus
aaatggacttcaggtgcttccttgt

SEQ ID NO: 57433 - DNA, 25 bp, Saccharomyces pastorianus
ggtcaatcgtatgccagaccaggca

SEQ ID NO: 57434 - DNA, 25 bp, Saccharomyces pastorianus
atacttttcaattccttatctgcat

SEQ ID NO: 57435 - DNA, 25 bp, Saccharomyces pastorianus
gaattccaatccaaactttacagac

SEQ ID NO: 57436 - DNA, 25 bp, Saccharomyces pastorianus
atatctttcagcacgaattcggctt

SEQ ID NO: 57437 - DNA, 25 bp, Saccharomyces pastorianus
tgtttcccctagaccattttcctag

SEQ ID NO: 57438 - DNA, 25 bp, Saccharomyces pastorianus
aatgtttgagagagaaaccacttgt

SEQ ID NO: 57439 - DNA, 25 bp, Saccharomyces pastorianus
tttgagagagaaaccacttgtggga

SEQ ID NO: 57440 - DNA, 25 bp, Saccharomyces pastorianus
gagaaaccacttgtgggagacagac

SEQ ID NO: 57441 - DNA, 25 bp, Saccharomyces pastorianus
gaaaccacttgtgggagacagacta

SEQ ID NO: 57442 - DNA, 25 bp, Saccharomyces pastorianus
gagagaaaccacttgtgggagacag

SEQ ID NO: 57443 - DNA, 25 bp, Saccharomyces pastorianus
agaaaccacttgtgggagacagact

SEQ ID NO: 57444 - DNA, 25 bp, Saccharomyces pastorianus
agagaaaccacttgtgggagacaga

SEQ ID NO: 57445 - DNA, 25 bp, Saccharomyces pastorianus
agagagaaaccacttgtgggagaca

SEQ ID NO: 57446 - DNA, 25 bp, Saccharomyces pastorianus
gagagagaaaccacttgtgggagac

SEQ ID NO: 57447 - DNA, 25 bp, Saccharomyces pastorianus
ggaatgtttgagagagaaaccactt

SEQ ID NO: 57448 - DNA, 25 bp, Saccharomyces pastorianus
atgtttgagagagaaaccacttgtg

SEQ ID NO: 57449 - DNA, 25 bp, Saccharomyces pastorianus
atcatagattacacgcagacatttt

SEQ ID NO: 57450 - DNA, 25 bp, Saccharomyces pastorianus
aagaatgcctctaatagtcctccgt

SEQ ID NO: 57451 - DNA, 25 bp, Saccharomyces pastorianus
gtcgctaacctcaaaagttcttgat

SEQ ID NO: 57452 - DNA, 25 bp, Saccharomyces pastorianus
gctatttacaatacctatcccacaa

SEQ ID NO: 57453 - DNA, 25 bp, Saccharomyces pastorianus
taaatccgacgccactgaacagttg

SEQ ID NO: 57454 - DNA, 25 bp, Saccharomyces pastorianus
atgggcgttaaagtcgctaacctca

SEQ ID NO: 57455 - DNA, 25 bp, Saccharomyces pastorianus
agtacagacgttaatcaggatggtg

SEQ ID NO: 57456 - DNA, 25 bp, Saccharomyces pastorianus
tccaaagcttcagagggattttcag

SEQ ID NO: 57457 - DNA, 25 bp, Saccharomyces pastorianus
ctctaatagtcctccgttgaacgaa

SEQ ID NO: 57458 - DNA, 25 bp, Saccharomyces pastorianus
gatttactttctcagatcattccaa

SEQ ID NO: 57459 - DNA, 25 bp, Saccharomyces pastorianus
gctatgggcccgatggctggaaaaa

SEQ ID NO: 57460 - DNA, 25 bp, Saccharomyces pastorianus
gaaagaggttaatgttgacgacgaa

SEQ ID NO: 57461 - DNA, 25 bp, Saccharomyces pastorianus
acaatgttccagagataaaggcgaa

SEQ ID NO: 57462 - DNA, 25 bp, Saccharomyces pastorianus
gcaaagttgctgacgaaaatggcat

SEQ ID NO: 57463 - DNA, 25 bp, Saccharomyces pastorianus
gtgtgaattcggatgccatgctggt

SEQ ID NO: 57464 - DNA, 25 bp, Saccharomyces pastorianus
ggacaccagtgttaacgtatatgaa

SEQ ID NO: 57465 - DNA, 25 bp, Saccharomyces pastorianus
ttcggatgccatgctggtggacaac

SEQ ID NO: 57466 - DNA, 25 bp, Saccharomyces pastorianus
atgaggcaggtgtcagcatcaatgg

SEQ ID NO: 57467 - DNA, 25 bp, Saccharomyces pastorianus
gcaattcgaagatttggacaccagt

SEQ ID NO: 57468 - DNA, 25 bp, Saccharomyces pastorianus
aaagtgcaaaactggacaatgttcc

SEQ ID NO: 57469 - DNA, 25 bp, Saccharomyces pastorianus
gaacctccaacagataaccatgata

SEQ ID NO: 57470 - DNA, 25 bp, Saccharomyces pastorianus
gttacagaatatgaacctccaacag

SEQ ID NO: 57471 - DNA, 25 bp, Saccharomyces pastorianus
tgatttgcccattacttccttagat

SEQ ID NO: 57472 - DNA, 25 bp, Saccharomyces pastorianus
gacactaaggtgttggcacgctccg

SEQ ID NO: 57473 - DNA, 25 bp, Saccharomyces pastorianus
tgtgtgcttggcagcgaagctccaa

SEQ ID NO: 57474 - DNA, 25 bp, Saccharomyces pastorianus
gaaaaattagtcacgggctccacgg

SEQ ID NO: 57475 - DNA, 25 bp, Saccharomyces pastorianus
tcagcgttggcctctggtacaaaag

SEQ ID NO: 57476 - DNA, 25 bp, Saccharomyces pastorianus
aaaacggattcctcatcaacggcca

SEQ ID NO: 57477 - DNA, 25 bp, Saccharomyces pastorianus
agctccaatgataggtgcacttcaa

SEQ ID NO: 57478 - DNA, 25 bp, Saccharomyces pastorianus
tggacctgattgtcacgcctacata

SEQ ID NO: 57479 - DNA, 25 bp, Saccharomyces pastorianus
gctccgccaacaatagcacatgtgt

SEQ ID NO: 57480 - DNA, 25 bp, Saccharomyces pastorianus
attctccactgggacttggttacag

SEQ ID NO: 57481 - DNA, 25 bp, Saccharomyces pastorianus
gaaccaccaaactcactgaagggcg

SEQ ID NO: 57482 - DNA, 25 bp, Saccharomyces pastorianus
attggatgactcctgaaccaccgca

SEQ ID NO: 57483 - DNA, 25 bp, Saccharomyces pastorianus
cggatttctgatcaatgggcacaac

SEQ ID NO: 57484 - DNA, 25 bp, Saccharomyces pastorianus
ggatttgaggacaagctcaattctt

SEQ ID NO: 57485 - DNA, 25 bp, Saccharomyces pastorianus
taatgtctttaacatggagcgcgat

SEQ ID NO: 57486 - DNA, 25 bp, Saccharomyces pastorianus
ctttaacatggagcgcgatgagcat

SEQ ID NO: 57487 - DNA, 25 bp, Saccharomyces pastorianus
cagaagaattgctattgtcaagtat

SEQ ID NO: 57488 - DNA, 25 bp, Saccharomyces pastorianus
tcgtccttagatttcgatggtaaat

SEQ ID NO: 57489 - DNA, 25 bp, Saccharomyces pastorianus
attgcttacgatttaccagtatcgt

SEQ ID NO: 57490 - DNA, 25 bp, Saccharomyces pastorianus
ttaccagtatcgtccttagatttcg

SEQ ID NO: 57491 - DNA, 25 bp, Saccharomyces pastorianus
agacggatttctgatcaatgggcac

SEQ ID NO: 57492 - DNA, 25 bp, Saccharomyces pastorianus
tgaaccaccgcattcactagatggg

SEQ ID NO: 57493 - DNA, 25 bp, Saccharomyces pastorianus
ggaaacagcataaccgcattagact

SEQ ID NO: 57494 - DNA, 25 bp, Saccharomyces pastorianus
aagttggagagctgcctggtcacct

SEQ ID NO: 57495 - DNA, 25 bp, Saccharomyces pastorianus
aaagatcatctgaagcgtcgtcctt

SEQ ID NO: 57496 - DNA, 25 bp, Saccharomyces pastorianus
ctggtcaccttgctactgttaattg

SEQ ID NO: 57497 - DNA, 25 bp, Saccharomyces pastorianus
gaagaagccatatcgtcgttatgtg

SEQ ID NO: 57498 - DNA, 25 bp, Saccharomyces pastorianus
gcattagactttgatacaccatggg

SEQ ID NO: 57499 - DNA, 25 bp, Saccharomyces pastorianus
aagcgtcgtccttcacgcaaaatga

SEQ ID NO: 57500 - DNA, 25 bp, Saccharomyces pastorianus
acagccctgtcttttgattctgaag

SEQ ID NO: 57501 - DNA, 25 bp, Saccharomyces pastorianus
gatgccccatgaaaaaagccacgat

SEQ ID NO: 57502 - DNA, 25 bp, Saccharomyces pastorianus
gggaaccttgtgctcatcaagctac

SEQ ID NO: 57503 - DNA, 25 bp, Saccharomyces pastorianus
aaataccacggctttcagaatgaca

SEQ ID NO: 57504 - DNA, 25 bp, Saccharomyces pastorianus
agaaaacctgtttgccatgctcgtg

SEQ ID NO: 57505 - DNA, 25 bp, Saccharomyces pastorianus
gcaattggcaagaagcgctccgcac

SEQ ID NO: 57506 - DNA, 25 bp, Saccharomyces pastorianus
gactcattggccaaggacctgttca

SEQ ID NO: 57507 - DNA, 25 bp, Saccharomyces pastorianus
ggacctttccatgagcggtattctg

SEQ ID NO: 57508 - DNA, 25 bp, Saccharomyces pastorianus
aactccaaccaggtgctgatcgtgg

SEQ ID NO: 57509 - DNA, 25 bp, Saccharomyces pastorianus
atcgccattggtaactgtcttgaca

SEQ ID NO: 57510 - DNA, 25 bp, Saccharomyces pastorianus
gtataggatcttcggcgagacgctc

SEQ ID NO: 57511 - DNA, 25 bp, Saccharomyces pastorianus
gagacgctcgatatcgccattggta

SEQ ID NO: 57512 - DNA, 25 bp, Saccharomyces pastorianus
gtcttgacagattcgccagaacttt

SEQ ID NO: 57513 - DNA, 25 bp, Saccharomyces pastorianus
gtgtaggctgcaacgtgcggttaca

SEQ ID NO: 57514 - DNA, 25 bp, Saccharomyces pastorianus
tgcacgccacggacaacagattctg

SEQ ID NO: 57515 - DNA, 25 bp, Saccharomyces pastorianus
gaaacctactatacggctggtgccg

SEQ ID NO: 57516 - DNA, 25 bp, Saccharomyces pastorianus
tggagagtccgcagaaccggccaaa

SEQ ID NO: 57517 - DNA, 25 bp, Saccharomyces pastorianus
aggacgggatagatgcctctgcctt

SEQ ID NO: 57518 - DNA, 25 bp, Saccharomyces pastorianus
cgctggtggcagctaaccgtataga

SEQ ID NO: 57519 - DNA, 25 bp, Saccharomyces pastorianus
catggcagtgcgcttttcgagtacg

SEQ ID NO: 57520 - DNA, 25 bp, Saccharomyces pastorianus
acaagtccggcgaatcatggcagtg

SEQ ID NO: 57521 - DNA, 25 bp, Saccharomyces pastorianus
gaaacagaacgagccatccgccagt

SEQ ID NO: 57522 - DNA, 25 bp, Saccharomyces pastorianus
ttcgaccaggctaaagtcaccgaga

SEQ ID NO: 57523 - DNA, 25 bp, Saccharomyces pastorianus
aactgtttcaactcgtcaatggcct

SEQ ID NO: 57524 - DNA, 25 bp, Saccharomyces pastorianus
ggttctatgcgatgagcatcccgct

SEQ ID NO: 57525 - DNA, 25 bp, Saccharomyces pastorianus
tatagagcttctccgccgcgataga

SEQ ID NO: 57526 - DNA, 25 bp, Saccharomyces pastorianus
ttcaacgtcaagatcgaagccacct

SEQ ID NO: 57527 - DNA, 25 bp, Saccharomyces pastorianus
ttccgagcagcctacagacggtaga

SEQ ID NO: 57528 - DNA, 25 bp, Saccharomyces pastorianus
ccatcaacggtgcttgttcttacga

SEQ ID NO: 57529 - DNA, 25 bp, Saccharomyces pastorianus
aagaaggccaaggttctgcccaagc

SEQ ID NO: 57530 - DNA, 25 bp, Saccharomyces pastorianus
gaaaatatggtcgtccccactgtcg

SEQ ID NO: 57531 - DNA, 25 bp, Saccharomyces pastorianus
aagtctccgggtccatcgctatttg

SEQ ID NO: 57532 - DNA, 25 bp, Saccharomyces pastorianus
caccgaacccatcaatgtcatcaag

SEQ ID NO: 57533 - DNA, 25 bp, Saccharomyces pastorianus
ggtgctggttacaccaacggtatca

SEQ ID NO: 57534 - DNA, 25 bp, Saccharomyces pastorianus
tgtgtacactggttctggctctgac

SEQ ID NO: 57535 - DNA, 25 bp, Saccharomyces pastorianus
gctatttgcggtaccgattacccag

SEQ ID NO: 57536 - DNA, 25 bp, Saccharomyces pastorianus
acaacgctggtgtttctgtagagga

SEQ ID NO: 57537 - DNA, 25 bp, Saccharomyces pastorianus
cgaacaaccatcacacgtttcaggg

SEQ ID NO: 57538 - DNA, 25 bp, Saccharomyces pastorianus
ggatgccaccactatcagttcgtct

SEQ ID NO: 57539 - DNA, 25 bp, Saccharomyces pastorianus
gcagagcattctggaccggtctaga

SEQ ID NO: 57540 - DNA, 25 bp, Saccharomyces pastorianus
tatccattcgatacagtccactagg

SEQ ID NO: 57541 - DNA, 25 bp, Saccharomyces pastorianus
gtagtatgggacaagccaccggcag

SEQ ID NO: 57542 - DNA, 25 bp, Saccharomyces pastorianus
ttctgctcctcttcggtaaagtcgt

SEQ ID NO: 57543 - DNA, 25 bp, Saccharomyces pastorianus
taaagtcgtccactttctcggatat

SEQ ID NO: 57544 - DNA, 25 bp, Saccharomyces pastorianus
atattctccggcaggacccttgaga

SEQ ID NO: 57545 - DNA, 25 bp, Saccharomyces pastorianus
ggctcgttgcactcaagcgaatcag

SEQ ID NO: 57546 - DNA, 25 bp, Saccharomyces pastorianus
agacgaactctagtgtgctggccat

SEQ ID NO: 57547 - DNA, 25 bp, Saccharomyces pastorianus
aagcacgcacagttggacccggatg

SEQ ID NO: 57548 - DNA, 25 bp, Saccharomyces pastorianus
agctcaaggacaagctggtccccag

SEQ ID NO: 57549 - DNA, 25 bp, Saccharomyces pastorianus
gtccgccgaggagcaggatgacttt

SEQ ID NO: 57550 - DNA, 25 bp, Saccharomyces pastorianus
agacgacctcgaagagcgtctggcc

SEQ ID NO: 57551 - DNA, 25 bp, Saccharomyces pastorianus
tggactactccatcggtgaacagct

SEQ ID NO: 57552 - DNA, 25 bp, Saccharomyces pastorianus
aggagctggaagacgacctcgaaga

SEQ ID NO: 57553 - DNA, 25 bp, Saccharomyces pastorianus
ccgcccttgaattcgagttcgacga

SEQ ID NO: 57554 - DNA, 25 bp, Saccharomyces pastorianus
aagctggtccccagagccgtggact

SEQ ID NO: 57555 - DNA, 25 bp, Saccharomyces pastorianus
acgggcgccgcccttgaattcgagt

SEQ ID NO: 57556 - DNA, 25 bp, Saccharomyces pastorianus
acccaaggtcctgcacgaggatcag

SEQ ID NO: 57557 - DNA, 25 bp, Saccharomyces pastorianus
tactccatcggtgaacagctcaagg

SEQ ID NO: 57558 - DNA, 25 bp, Saccharomyces pastorianus
tcgaagagcgtctggccctggacta

SEQ ID NO: 57559 - DNA, 25 bp, Saccharomyces pastorianus
acccgctaccgtcattttattgtgt

SEQ ID NO: 57560 - DNA, 25 bp, Saccharomyces pastorianus
gttctctgtacattggtgttcctaa

SEQ ID NO: 57561 - DNA, 25 bp, Saccharomyces pastorianus
gatacacagtgtacggcctcaaagt

SEQ ID NO: 57562 - DNA, 25 bp, Saccharomyces pastorianus
gacactagtttatacgctgctaatc

SEQ ID NO: 57563 - DNA, 25 bp, Saccharomyces pastorianus
aactactaaaattccgcgatgacag

SEQ ID NO: 57564 - DNA, 25 bp, Saccharomyces pastorianus
gaagacgtcgagtgttctctgtaca

SEQ ID NO: 57565 - DNA, 25 bp, Saccharomyces pastorianus
gcctcaaagtgtttttaagacctct

SEQ ID NO: 57566 - DNA, 25 bp, Saccharomyces pastorianus
taagacctcttgtgggtgtcgcctc

SEQ ID NO: 57567 - DNA, 25 bp, Saccharomyces pastorianus
ggtgaaaaggcccatttgcataaca

SEQ ID NO: 57568 - DNA, 25 bp, Saccharomyces pastorianus
tcatatatgcaggtatacccgctac

SEQ ID NO: 57569 - DNA, 25 bp, Saccharomyces pastorianus
tcgcctccgtgctcatttggaaaga

SEQ ID NO: 57570 - DNA, 25 bp, Saccharomyces pastorianus
gggactcatacctcgacggataaat

SEQ ID NO: 57571 - DNA, 25 bp, Saccharomyces pastorianus
gtgccccatgggttttctaagaaat

SEQ ID NO: 57572 - DNA, 25 bp, Saccharomyces pastorianus
ttccatgctttgatcactgccagaa

SEQ ID NO: 57573 - DNA, 25 bp, Saccharomyces pastorianus
agattcactaagctcgtggctccaa

SEQ ID NO: 57574 - DNA, 25 bp, Saccharomyces pastorianus
acaatgtgccctggacgcaagtgca

SEQ ID NO: 57575 - DNA, 25 bp, Saccharomyces pastorianus
aagtgcaggaccacatcgctacgat

SEQ ID NO: 57576 - DNA, 25 bp, Saccharomyces pastorianus
gcaaagggactcgattctggactac

SEQ ID NO: 57577 - DNA, 25 bp, Saccharomyces pastorianus
ttccaattcgcgctggtctatttaa

SEQ ID NO: 57578 - DNA, 25 bp, Saccharomyces pastorianus
gctaccacctccattattacaaaag

SEQ ID NO: 57579 - DNA, 25 bp, Saccharomyces pastorianus
acagcctcttctacacgaaagcgat

SEQ ID NO: 57580 - DNA, 25 bp, Saccharomyces pastorianus
ggaagctttgttcccacatattccg

SEQ ID NO: 57581 - DNA, 25 bp, Saccharomyces pastorianus
gcaaaggctgcgacgagttgttttt

SEQ ID NO: 57582 - DNA, 25 bp, Saccharomyces pastorianus
atactcccaatgacagaacctcggt

SEQ ID NO: 57583 - DNA, 25 bp, Saccharomyces pastorianus
gtatactttcaatttcagtgcgggt

SEQ ID NO: 57584 - DNA, 25 bp, Saccharomyces pastorianus
cctagtggatgcttattgtgggtca

SEQ ID NO: 57585 - DNA, 25 bp, Saccharomyces pastorianus
atgtccgcgacaatttgcaaattcc

SEQ ID NO: 57586 - DNA, 25 bp, Saccharomyces pastorianus
aatgccattttacctgtggtgacca

SEQ ID NO: 57587 - DNA, 25 bp, Saccharomyces pastorianus
cagtgcgggtgaatttttccaaaat

SEQ ID NO: 57588 - DNA, 25 bp, Saccharomyces pastorianus
gttaacagaagaaggctcccgggat

SEQ ID NO: 57589 - DNA, 25 bp, Saccharomyces pastorianus
tatctgctgatagtgtttctttcgc

SEQ ID NO: 57590 - DNA, 25 bp, Saccharomyces pastorianus
gagcacaacgtcaagttagccaaga

SEQ ID NO: 57591 - DNA, 25 bp, Saccharomyces pastorianus
gtttttgaagcagctagccgcatat

SEQ ID NO: 57592 - DNA, 25 bp, Saccharomyces pastorianus
gtgaccacccctaatcttggttatg

SEQ ID NO: 57593 - DNA, 25 bp, Saccharomyces pastorianus
gataatgtgaattcccaggcaatga

SEQ ID NO: 57594 - DNA, 25 bp, Saccharomyces pastorianus
actattccgcaaacagcatcttcag

SEQ ID NO: 57595 - DNA, 25 bp, Saccharomyces pastorianus
cccgttcctgttccactgaatttca

SEQ ID NO: 57596 - DNA, 25 bp, Saccharomyces pastorianus
gattcatttcattggccaacataaa

SEQ ID NO: 57597 - DNA, 25 bp, Saccharomyces pastorianus
gtagatgacgtctcgaagattgata

SEQ ID NO: 57598 - DNA, 25 bp, Saccharomyces pastorianus
gaagacaccagagtccagctcaata

SEQ ID NO: 57599 - DNA, 25 bp, Saccharomyces pastorianus
ggttatgaatcttcacctgctatga

SEQ ID NO: 57600 - DNA, 25 bp, Saccharomyces pastorianus
gggctattcctcaagataatgattt

SEQ ID NO: 57601 - DNA, 25 bp, Saccharomyces pastorianus
aacagcgacgctaaaccagaccaag

SEQ ID NO: 57602 - DNA, 25 bp, Saccharomyces pastorianus
aaaccatggtctctgtggtctcaga

SEQ ID NO: 57603 - DNA, 25 bp, Saccharomyces pastorianus
taagaccacttttcgtttccattgt

SEQ ID NO: 57604 - DNA, 25 bp, Saccharomyces pastorianus
atatccccattttttctgacgcaag

SEQ ID NO: 57605 - DNA, 25 bp, Saccharomyces pastorianus
ttttacgcattactggttttcacca

SEQ ID NO: 57606 - DNA, 25 bp, Saccharomyces pastorianus
gcgagatcggtatggaccttttcaa

SEQ ID NO: 57607 - DNA, 25 bp, Saccharomyces pastorianus
gagatggttacgacgtctcttccga

SEQ ID NO: 57608 - DNA, 25 bp, Saccharomyces pastorianus
caccacttattcctctttgaagaca

SEQ ID NO: 57609 - DNA, 25 bp, Saccharomyces pastorianus
tctcaattctccaatgcgctatcaa

SEQ ID NO: 57610 - DNA, 25 bp, Saccharomyces pastorianus
aagaggctcgttgactgatatcccc

SEQ ID NO: 57611 - DNA, 25 bp, Saccharomyces pastorianus
gtagacatctcttccagaattgctt

SEQ ID NO: 57612 - DNA, 25 bp, Saccharomyces pastorianus
tcaaactagaagtcgttcgtcctcc

SEQ ID NO: 57613 - DNA, 25 bp, Saccharomyces pastorianus
agagtcgagttctagtcacttgagt

SEQ ID NO: 57614 - DNA, 25 bp, Saccharomyces pastorianus
gactgaccccgtacttcatatagag

SEQ ID NO: 57615 - DNA, 25 bp, Saccharomyces pastorianus
ggttactgttttcaagccctctgaa

SEQ ID NO: 57616 - DNA, 25 bp, Saccharomyces pastorianus
gggctttgcgacaatcttctaacaa

SEQ ID NO: 57617 - DNA, 25 bp, Saccharomyces pastorianus
actagtagtagctccgttaaccgcg

SEQ ID NO: 57618 - DNA, 25 bp, Saccharomyces pastorianus
atggaaacagcggactgaccccgta

SEQ ID NO: 57619 - DNA, 25 bp, Saccharomyces pastorianus
gttaaccgcgaacaccttatcgaag

SEQ ID NO: 57620 - DNA, 25 bp, Saccharomyces pastorianus
agtgtcatcagagcttggaatccaa

SEQ ID NO: 57621 - DNA, 25 bp, Saccharomyces pastorianus
gaatccaagtttcccaattcttttg

SEQ ID NO: 57622 - DNA, 25 bp, Saccharomyces pastorianus
ttcatatagagttacgccgttgggc

SEQ ID NO: 57623 - DNA, 25 bp, Saccharomyces pastorianus
ttttggcgccttccatggtaagtag

SEQ ID NO: 57624 - DNA, 25 bp, Saccharomyces pastorianus
gccgttgggcggacatactagtagt

SEQ ID NO: 57625 - DNA, 25 bp, Saccharomyces pastorianus
tggttccccgcttgttaacgaaatg

SEQ ID NO: 57626 - DNA, 25 bp, Saccharomyces pastorianus
ggttcccgctgtaactttcagtgat

SEQ ID NO: 57627 - DNA, 25 bp, Saccharomyces pastorianus
aaagcaatcagtcattccttccatt

SEQ ID NO: 57628 - DNA, 25 bp, Saccharomyces pastorianus
gtatacttgaccctattaagcctga

SEQ ID NO: 57629 - DNA, 25 bp, Saccharomyces pastorianus
gatctacccctgaagatactccagt

SEQ ID NO: 57630 - DNA, 25 bp, Saccharomyces pastorianus
atgaaagatcctacacctaagctgg

SEQ ID NO: 57631 - DNA, 25 bp, Saccharomyces pastorianus
ggtgccacaggttcattatccgtat

SEQ ID NO: 57632 - DNA, 25 bp, Saccharomyces pastorianus
tagaccccaggttgcctcaagacga

SEQ ID NO: 57633 - DNA, 25 bp, Saccharomyces pastorianus
attaagcctgacaaaatcgccgcct

SEQ ID NO: 57634 - DNA, 25 bp, Saccharomyces pastorianus
aattgcacgtactctttggtgccac

SEQ ID NO: 57635 - DNA, 25 bp, Saccharomyces pastorianus
gtgccactccgagaacagtacaggt

SEQ ID NO: 57636 - DNA, 25 bp, Saccharomyces pastorianus
gaccatacagcacggttacgtcggt

SEQ ID NO: 57637 - DNA, 25 bp, Saccharomyces pastorianus
tagtcaaatccggaccatacagcac

SEQ ID NO: 57638 - DNA, 25 bp, Saccharomyces pastorianus
catacagcacggttacgtcggtttc

SEQ ID NO: 57639 - DNA, 25 bp, Saccharomyces pastorianus
aaatccggaccatacagcacggtta

SEQ ID NO: 57640 - DNA, 25 bp, Saccharomyces pastorianus
tacagcacggttacgtcggtttcct

SEQ ID NO: 57641 - DNA, 25 bp, Saccharomyces pastorianus
gtcaaatccggaccatacagcacgg

SEQ ID NO: 57642 - DNA, 25 bp, Saccharomyces pastorianus
ggtttccttgttccagttgatagag

SEQ ID NO: 57643 - DNA, 25 bp, Saccharomyces pastorianus
ttccttgttccagttgatagagagc

SEQ ID NO: 57644 - DNA, 25 bp, Saccharomyces pastorianus
cagcacggttacgtcggtttccttg

SEQ ID NO: 57645 - DNA, 25 bp, Saccharomyces pastorianus
atccggaccatacagcacggttacg

SEQ ID NO: 57646 - DNA, 25 bp, Saccharomyces pastorianus
ggaccatacagcacggttacgtcgg

SEQ ID NO: 57647 - DNA, 25 bp, Saccharomyces pastorianus
gacagttactgtaccatgtgttaga

SEQ ID NO: 57648 - DNA, 25 bp, Saccharomyces pastorianus
gatgtcctcggaagaactcattaga

SEQ ID NO: 57649 - DNA, 25 bp, Saccharomyces pastorianus
ttctaagcattatcgaaacggatct

SEQ ID NO: 57650 - DNA, 25 bp, Saccharomyces pastorianus
ttccgcactaaatgaatcctttctg

SEQ ID NO: 57651 - DNA, 25 bp, Saccharomyces pastorianus
ctttatgcaaggagcggtggagaca

SEQ ID NO: 57652 - DNA, 25 bp, Saccharomyces pastorianus
aggtacagccatgtcaagcaaaact

SEQ ID NO: 57653 - DNA, 25 bp, Saccharomyces pastorianus
aagacgaattccgtattgtatcaaa

SEQ ID NO: 57654 - DNA, 25 bp, Saccharomyces pastorianus
gagacttgtaatattgttcgatgaa

SEQ ID NO: 57655 - DNA, 25 bp, Saccharomyces pastorianus
aggaccctaaagtccgtatagcaga

SEQ ID NO: 57656 - DNA, 25 bp, Saccharomyces pastorianus
caaaattttaaacgtgcttcacagc

SEQ ID NO: 57657 - DNA, 25 bp, Saccharomyces pastorianus
gattgtcttaagcagatgtcctcgg

SEQ ID NO: 57658 - DNA, 25 bp, Saccharomyces pastorianus
aagccgactatattggcctgatgat

SEQ ID NO: 57659 - DNA, 25 bp, Saccharomyces pastorianus
gacacacagctgagaacttatcgaa

SEQ ID NO: 57660 - DNA, 25 bp, Saccharomyces pastorianus
gaccccagtgtggataactctttgt

SEQ ID NO: 57661 - DNA, 25 bp, Saccharomyces pastorianus
gatcgccaccgtattatcacatgaa

SEQ ID NO: 57662 - DNA, 25 bp, Saccharomyces pastorianus
ggcatgtttccaaccacaggaatct

SEQ ID NO: 57663 - DNA, 25 bp, Saccharomyces pastorianus
ttttgcctatctgcgccaatgaaga

SEQ ID NO: 57664 - DNA, 25 bp, Saccharomyces pastorianus
attcagctctattttgcctatctgc

SEQ ID NO: 57665 - DNA, 25 bp, Saccharomyces pastorianus
acccggccagtgttcgcagaataga

SEQ ID NO: 57666 - DNA, 25 bp, Saccharomyces pastorianus
gtttctaagtacacacccggccagt

SEQ ID NO: 57667 - DNA, 25 bp, Saccharomyces pastorianus
aactgcctcaccaaacgcatttgtg

SEQ ID NO: 57668 - DNA, 25 bp, Saccharomyces pastorianus
tgtggtcaacgattcaactgcctca

SEQ ID NO: 57669 - DNA, 25 bp, Saccharomyces pastorianus
caagactcaactgtgctagggataa

SEQ ID NO: 57670 - DNA, 25 bp, Saccharomyces pastorianus
atgaaggccacttttccgcgaagaa

SEQ ID NO: 57671 - DNA, 25 bp, Saccharomyces pastorianus
aagaattttggccactcctgcaagg

SEQ ID NO: 57672 - DNA, 25 bp, Saccharomyces pastorianus
gacaataacggttccctgggtgaga

SEQ ID NO: 57673 - DNA, 25 bp, Saccharomyces pastorianus
cagtttcactttcacacaccaataa

SEQ ID NO: 57674 - DNA, 25 bp, Saccharomyces pastorianus
tgcaggagtctcctacattcgagca

SEQ ID NO: 57675 - DNA, 25 bp, Saccharomyces pastorianus
tgcctaccaatacaatccacagttt

SEQ ID NO: 57676 - DNA, 25 bp, Saccharomyces pastorianus
ttctaccaatgcgtatccagctttg

SEQ ID NO: 57677 - DNA, 25 bp, Saccharomyces pastorianus
gaacgcccaggtttgaacatgcagg

SEQ ID NO: 57678 - DNA, 25 bp, Saccharomyces pastorianus
taatctcgcccggtttagatacaga

SEQ ID NO: 57679 - DNA, 25 bp, Saccharomyces pastorianus
tcctgcaaggcggtactgtaagact

SEQ ID NO: 57680 - DNA, 25 bp, Saccharomyces pastorianus
gtgggcgttagcagtgttattgaca

SEQ ID NO: 57681 - DNA, 25 bp, Saccharomyces pastorianus
aagcatcgacgatagggtgctacgg

SEQ ID NO: 57682 - DNA, 25 bp, Saccharomyces pastorianus
gatttccaagcagactacagctccg

SEQ ID NO: 57683 - DNA, 25 bp, Saccharomyces pastorianus
gcagactacagctccgaaaacaatg

SEQ ID NO: 57684 - DNA, 25 bp, Saccharomyces pastorianus
ggctagtatagccactaaagtgctt

SEQ ID NO: 57685 - DNA, 25 bp, Saccharomyces pastorianus
aacaatgtcatgcttgcccggttca

SEQ ID NO: 57686 - DNA, 25 bp, Saccharomyces pastorianus
gcccggttcagaagcatcgacgata

SEQ ID NO: 57687 - DNA, 25 bp, Saccharomyces pastorianus
taaagtgctttctccagacccaatt

SEQ ID NO: 57688 - DNA, 25 bp, Saccharomyces pastorianus
gcagtgttattgacagcatcaagac

SEQ ID NO: 57689 - DNA, 25 bp, Saccharomyces pastorianus
gctttctccagacccaattctgaaa

SEQ ID NO: 57690 - DNA, 25 bp, Saccharomyces pastorianus
attctgaaaccacaggatttccaag

SEQ ID NO: 57691 - DNA, 25 bp, Saccharomyces pastorianus
gagtcagatgattgtcgttcagtta

SEQ ID NO: 57692 - DNA, 25 bp, Saccharomyces pastorianus
agttccaatgtctcactgtcatcct

SEQ ID NO: 57693 - DNA, 25 bp, Saccharomyces pastorianus
ttgcgacgcccaaaagtggagcttt

SEQ ID NO: 57694 - DNA, 25 bp, Saccharomyces pastorianus
gttcgtattacccaagaagagcttc

SEQ ID NO: 57695 - DNA, 25 bp, Saccharomyces pastorianus
gcatcgtttcatacaagggattcct

SEQ ID NO: 57696 - DNA, 25 bp, Saccharomyces pastorianus
agggattcctccataacatctgtaa

SEQ ID NO: 57697 - DNA, 25 bp, Saccharomyces pastorianus
ctagaggatgtatttgcgacgccca

SEQ ID NO: 57698 - DNA, 25 bp, Saccharomyces pastorianus
ttcagacccttcgagtgataacgct

SEQ ID NO: 57699 - DNA, 25 bp, Saccharomyces pastorianus
tcctcccaacagcacataacgaaaa

SEQ ID NO: 57700 - DNA, 25 bp, Saccharomyces pastorianus
tgtcacaattaccaagcacgttcga

SEQ ID NO: 57701 - DNA, 25 bp, Saccharomyces pastorianus
gaagagcttcatcctcgaatttgaa

SEQ ID NO: 57702 - DNA, 25 bp, Saccharomyces pastorianus
acaccttcatctgcaacgtttcaat

SEQ ID NO: 57703 - DNA, 25 bp, Saccharomyces pastorianus
tttgccgccctcagaagtaaacttg

SEQ ID NO: 57704 - DNA, 25 bp, Saccharomyces pastorianus
aacgttcggtacctgtatgaagaca

SEQ ID NO: 57705 - DNA, 25 bp, Saccharomyces pastorianus
atatcatatccctgcattcctatat

SEQ ID NO: 57706 - DNA, 25 bp, Saccharomyces pastorianus
aagatccacgtctgttaacgctgct

SEQ ID NO: 57707 - DNA, 25 bp, Saccharomyces pastorianus
ttattcctgggagtagaaccgctac

SEQ ID NO: 57708 - DNA, 25 bp, Saccharomyces pastorianus
gtattgcccgactcagtttgattga

SEQ ID NO: 57709 - DNA, 25 bp, Saccharomyces pastorianus
tttcagcgtgatagtattgcccgac

SEQ ID NO: 57710 - DNA, 25 bp, Saccharomyces pastorianus
tttcacccaggtttttagcagcaga

SEQ ID NO: 57711 - DNA, 25 bp, Saccharomyces pastorianus
aggcgttaagcgtatgcgactttta

SEQ ID NO: 57712 - DNA, 25 bp, Saccharomyces pastorianus
aaggtccaattccattacgagctcg

SEQ ID NO: 57713 - DNA, 25 bp, Saccharomyces pastorianus
atgtagccaaccgtctatagtcatg

SEQ ID NO: 57714 - DNA, 25 bp, Saccharomyces pastorianus
gaaccatattatcaccgtttcactt

SEQ ID NO: 57715 - DNA, 25 bp, Saccharomyces pastorianus
cattccaagccactttactcgtaaa

SEQ ID NO: 57716 - DNA, 25 bp, Saccharomyces pastorianus
gtatttggtggataccgacgcactg

SEQ ID NO: 57717 - DNA, 25 bp, Saccharomyces pastorianus
gattatctcggttcatttatatcag

SEQ ID NO: 57718 - DNA, 25 bp, Saccharomyces pastorianus
acccagacggttgttcgatgctcaa

SEQ ID NO: 57719 - DNA, 25 bp, Saccharomyces pastorianus
cgtttcacttttaccgctatgcaag

SEQ ID NO: 57720 - DNA, 25 bp, Saccharomyces pastorianus
cagcctggcgttgtattttgagaaa

SEQ ID NO: 57721 - DNA, 25 bp, Saccharomyces pastorianus
gatcaagctaatgtccttccacatg

SEQ ID NO: 57722 - DNA, 25 bp, Saccharomyces pastorianus
acgcactgtcttcacttatatccga

SEQ ID NO: 57723 - DNA, 25 bp, Saccharomyces pastorianus
aatgaatgtctaccacagcctggcg

SEQ ID NO: 57724 - DNA, 25 bp, Saccharomyces pastorianus
aagagctttgaacggtgtctccacc

SEQ ID NO: 57725 - DNA, 25 bp, Saccharomyces pastorianus
agctttgaacggtgtctccaccgat

SEQ ID NO: 57726 - DNA, 25 bp, Saccharomyces pastorianus
agtctcttatgattccgttttggaa

SEQ ID NO: 57727 - DNA, 25 bp, Saccharomyces pastorianus
tccaccgatgtccaaggtactgact

SEQ ID NO: 57728 - DNA, 25 bp, Saccharomyces pastorianus
ggtactgacttctctgaagtctctt

SEQ ID NO: 57729 - DNA, 25 bp, Saccharomyces pastorianus
caaggatgccttaagaagagctttg

SEQ ID NO: 57730 - DNA, 25 bp, Saccharomyces pastorianus
ttctctgaagtctcttatgattccg

SEQ ID NO: 57731 - DNA, 25 bp, Saccharomyces pastorianus
atgtccaaggtactgacttctctga

SEQ ID NO: 57732 - DNA, 25 bp, Saccharomyces pastorianus
gaagtctcttatgattccgttttgg

SEQ ID NO: 57733 - DNA, 25 bp, Saccharomyces pastorianus
tccaaggtactgacttctctgaagt

SEQ ID NO: 57734 - DNA, 25 bp, Saccharomyces pastorianus
gaacggtgtctccaccgatgtccaa

SEQ ID NO: 57735 - DNA, 25 bp, Saccharomyces pastorianus
aggcagcgggtatagcaataattcc

SEQ ID NO: 57736 - DNA, 25 bp, Saccharomyces pastorianus
ccgatgtttcggtgcaattgagtag

SEQ ID NO: 57737 - DNA, 25 bp, Saccharomyces pastorianus
gaattacctggcctggtgaacaatt

SEQ ID NO: 57738 - DNA, 25 bp, Saccharomyces pastorianus
aaagcctgttgcaactcttggatgt

SEQ ID NO: 57739 - DNA, 25 bp, Saccharomyces pastorianus
gattgtacgtccaactgcacgattt

SEQ ID NO: 57740 - DNA, 25 bp, Saccharomyces pastorianus
agatgccaaaatccagacccggtgt

SEQ ID NO: 57741 - DNA, 25 bp, Saccharomyces pastorianus
caggtactcctgatgatatccgtat

SEQ ID NO: 57742 - DNA, 25 bp, Saccharomyces pastorianus
ggtcaaaagtactctcaaagcctgt

SEQ ID NO: 57743 - DNA, 25 bp, Saccharomyces pastorianus
gatatccgtatattcactagctgtt

SEQ ID NO: 57744 - DNA, 25 bp, Saccharomyces pastorianus
tgcacgatttatactgtcagggtca

SEQ ID NO: 57745 - DNA, 25 bp, Saccharomyces pastorianus
caactcggtcgtcgaatctttggag

SEQ ID NO: 57746 - DNA, 25 bp, Saccharomyces pastorianus
gtcgcattccaaatataagcttcct

SEQ ID NO: 57747 - DNA, 25 bp, Saccharomyces pastorianus
atttgtgaggctgaaaccgtttgta

SEQ ID NO: 57748 - DNA, 25 bp, Saccharomyces pastorianus
taagcttcctacacattttgaaaag

SEQ ID NO: 57749 - DNA, 25 bp, Saccharomyces pastorianus
gaaaagctcgatgcaggctctacta

SEQ ID NO: 57750 - DNA, 25 bp, Saccharomyces pastorianus
tggtgtttaatcctaacggtttgca

SEQ ID NO: 57751 - DNA, 25 bp, Saccharomyces pastorianus
tagccccgagcctatgggcagcaca

SEQ ID NO: 57752 - DNA, 25 bp, Saccharomyces pastorianus
aagctgttcatatctacccgaaacg

SEQ ID NO: 57753 - DNA, 25 bp, Saccharomyces pastorianus
tttgcaatcaaaaactagccccgag

SEQ ID NO: 57754 - DNA, 25 bp, Saccharomyces pastorianus
gacagacgtacagcgattatcttcg

SEQ ID NO: 57755 - DNA, 25 bp, Saccharomyces pastorianus
tccagtccgcctaccaaattaaata

SEQ ID NO: 57756 - DNA, 25 bp, Saccharomyces pastorianus
cagtgatttcgacacaacactcgta

SEQ ID NO: 57757 - DNA, 25 bp, Saccharomyces pastorianus
tttataccaaagacggcacccacgg

SEQ ID NO: 57758 - DNA, 25 bp, Saccharomyces pastorianus
gctcgaagtggtccagctatgcatt

SEQ ID NO: 57759 - DNA, 25 bp, Saccharomyces pastorianus
agaggcggcttcttcggatgcccag

SEQ ID NO: 57760 - DNA, 25 bp, Saccharomyces pastorianus
ggtcgacgataagttggcctccaaa

SEQ ID NO: 57761 - DNA, 25 bp, Saccharomyces pastorianus
atttgcagtacatcagcgagccggg

SEQ ID NO: 57762 - DNA, 25 bp, Saccharomyces pastorianus
ggccgagaccatcaagtcgcatgaa

SEQ ID NO: 57763 - DNA, 25 bp, Saccharomyces pastorianus
ggcgtcaagatcgtcatcgactcga

SEQ ID NO: 57764 - DNA, 25 bp, Saccharomyces pastorianus
gctgctgttgccaagaacgactgtg

SEQ ID NO: 57765 - DNA, 25 bp, Saccharomyces pastorianus
aaagaacgctaaggcctcgcaaggc

SEQ ID NO: 57766 - DNA, 25 bp, Saccharomyces pastorianus
gttggcctccaaattcgttttcaag

SEQ ID NO: 57767 - DNA, 25 bp, Saccharomyces pastorianus
gactgtgcgtgtatggaagctccaa

SEQ ID NO: 57768 - DNA, 25 bp, Saccharomyces pastorianus
ttttcgattatggtgatttcactac

SEQ ID NO: 57769 - DNA, 25 bp, Saccharomyces pastorianus
ttcgattatggtgatttcactacca

SEQ ID NO: 57770 - DNA, 25 bp, Saccharomyces pastorianus
gttttcgattatggtgatttcacta

SEQ ID NO: 57771 - DNA, 25 bp, Saccharomyces pastorianus
cacttggccgaatactactctttcc

SEQ ID NO: 57772 - DNA, 25 bp, Saccharomyces pastorianus
aagctgttttcgattatggtgattt

SEQ ID NO: 57773 - DNA, 25 bp, Saccharomyces pastorianus
agctgttttcgattatggtgatttc

SEQ ID NO: 57774 - DNA, 25 bp, Saccharomyces pastorianus
gctgttttcgattatggtgatttca

SEQ ID NO: 57775 - DNA, 25 bp, Saccharomyces pastorianus
tggtgatttcactaccatgttgacc

SEQ ID NO: 57776 - DNA, 25 bp, Saccharomyces pastorianus
ctgttttcgattatggtgatttcac

SEQ ID NO: 57777 - DNA, 25 bp, Saccharomyces pastorianus
tgttttcgattatggtgatttcact

SEQ ID NO: 57778 - DNA, 25 bp, Saccharomyces pastorianus
cgattatggtgatttcactaccatg

SEQ ID NO: 57779 - DNA, 25 bp, Saccharomyces pastorianus
ctgggttcgacgtctacttcgagaa

SEQ ID NO: 57780 - DNA, 25 bp, Saccharomyces pastorianus
ttgacctactggcacaggcgttgat

SEQ ID NO: 57781 - DNA, 25 bp, Saccharomyces pastorianus
agattcaagcacgtcgaggctctac

SEQ ID NO: 57782 - DNA, 25 bp, Saccharomyces pastorianus
gaggctctactccagaactacatcg

SEQ ID NO: 57783 - DNA, 25 bp, Saccharomyces pastorianus
gctgggctactacaagacgctgcaa

SEQ ID NO: 57784 - DNA, 25 bp, Saccharomyces pastorianus
aaggacgcacagctgcagcaggcaa

SEQ ID NO: 57785 - DNA, 25 bp, Saccharomyces pastorianus
agacgctgcaagacgctgtcgaggt

SEQ ID NO: 57786 - DNA, 25 bp, Saccharomyces pastorianus
gtatcggcgatgtgtaccttctgat

SEQ ID NO: 57787 - DNA, 25 bp, Saccharomyces pastorianus
ggaaatcgaagacctctcacaactc

SEQ ID NO: 57788 - DNA, 25 bp, Saccharomyces pastorianus
aggcgttgatccttctgggacactc

SEQ ID NO: 57789 - DNA, 25 bp, Saccharomyces pastorianus
agaagcagagttcctcgtctgcgat

SEQ ID NO: 57790 - DNA, 25 bp, Saccharomyces pastorianus
gatcaagaaaccacaagccacgaag

SEQ ID NO: 57791 - DNA, 25 bp, Saccharomyces pastorianus
taagagactgttcgcgtaggatgac

SEQ ID NO: 57792 - DNA, 25 bp, Saccharomyces pastorianus
gaggagagtccaacgcgatcaacca

SEQ ID NO: 57793 - DNA, 25 bp, Saccharomyces pastorianus
gagaatccagataacacgctttccg

SEQ ID NO: 57794 - DNA, 25 bp, Saccharomyces pastorianus
gacaacgacgaggactatgccgata

SEQ ID NO: 57795 - DNA, 25 bp, Saccharomyces pastorianus
cacgctttccgagttattgttgtat

SEQ ID NO: 57796 - DNA, 25 bp, Saccharomyces pastorianus
tcaagcaacggttagcagggatcgc

SEQ ID NO: 57797 - DNA, 25 bp, Saccharomyces pastorianus
gattctatgccagttgaccagcgat

SEQ ID NO: 57798 - DNA, 25 bp, Saccharomyces pastorianus
cagggatcgcgtttgacgtggccaa

SEQ ID NO: 57799 - DNA, 25 bp, Saccharomyces pastorianus
ggatgcgacgagcatatcgatgcaa

SEQ ID NO: 57800 - DNA, 25 bp, Saccharomyces pastorianus
aagaccgtcgaggaagccagtctga

SEQ ID NO: 57801 - DNA, 25 bp, Saccharomyces pastorianus
tgggaaactctccatcggacctgaa

SEQ ID NO: 57802 - DNA, 25 bp, Saccharomyces pastorianus
aaaacctcgagcacatggccatgat

SEQ ID NO: 57803 - DNA, 25 bp, Saccharomyces pastorianus
actggttcatcgacctgctgaggaa

SEQ ID NO: 57804 - DNA, 25 bp, Saccharomyces pastorianus
tgcgtcctggtcgaactggtcattg

SEQ ID NO: 57805 - DNA, 25 bp, Saccharomyces pastorianus
atcaattggaacctgccggcggaaa

SEQ ID NO: 57806 - DNA, 25 bp, Saccharomyces pastorianus
tctttacccgatccatgaaaacctc

SEQ ID NO: 57807 - DNA, 25 bp, Saccharomyces pastorianus
tgcagccacggacagactcgacaag

SEQ ID NO: 57808 - DNA, 25 bp, Saccharomyces pastorianus
caaggacgcgctggaccacgaatgg

SEQ ID NO: 57809 - DNA, 25 bp, Saccharomyces pastorianus
atcgctgactttacaatggccggaa

SEQ ID NO: 57810 - DNA, 25 bp, Saccharomyces pastorianus
agtcttgcaatcatgcgatcgccta

SEQ ID NO: 57811 - DNA, 25 bp, Saccharomyces pastorianus
ggacctgaactcgaccgtaataaag

SEQ ID NO: 57812 - DNA, 25 bp, Saccharomyces pastorianus
actagaagaaatccctcacatcgag

SEQ ID NO: 57813 - DNA, 25 bp, Saccharomyces pastorianus
tcgacgaaaacgaccctggcgaaga

SEQ ID NO: 57814 - DNA, 25 bp, Saccharomyces pastorianus
aaggccactgcgaattccgattcaa

SEQ ID NO: 57815 - DNA, 25 bp, Saccharomyces pastorianus
gtaccatgtgtaccatttttcggtg

SEQ ID NO: 57816 - DNA, 25 bp, Saccharomyces pastorianus
ctgctacgctctctgaatactttaa

SEQ ID NO: 57817 - DNA, 25 bp, Saccharomyces pastorianus
ttcggtgtttatctatctgacttaa

SEQ ID NO: 57818 - DNA, 25 bp, Saccharomyces pastorianus
tattcttcacccatttatcgtctag

SEQ ID NO: 57819 - DNA, 25 bp, Saccharomyces pastorianus
ggatcagacttgttgacatcttaca

SEQ ID NO: 57820 - DNA, 25 bp, Saccharomyces pastorianus
ggtaatccggattttctagtcttag

SEQ ID NO: 57821 - DNA, 25 bp, Saccharomyces pastorianus
ggtggctttgcaaactaaggacctg

SEQ ID NO: 57822 - DNA, 25 bp, Saccharomyces pastorianus
tgacttaacttttacggattctggt

SEQ ID NO: 57823 - DNA, 25 bp, Saccharomyces pastorianus
ggctgtctcctgacccgaataaggt

SEQ ID NO: 57824 - DNA, 25 bp, Saccharomyces pastorianus
ggatatccccttgagagatcgtcat

SEQ ID NO: 57825 - DNA, 25 bp, Saccharomyces pastorianus
gaaagcttgttttcctttgtgtgtt

SEQ ID NO: 57826 - DNA, 25 bp, Saccharomyces pastorianus
aagtggttttcaggcgcatcggcga

SEQ ID NO: 57827 - DNA, 25 bp, Saccharomyces pastorianus
gatcgtcatttcttgttttctcctg

SEQ ID NO: 57828 - DNA, 25 bp, Saccharomyces pastorianus
tatttgactggaacgataccctctg

SEQ ID NO: 57829 - DNA, 25 bp, Saccharomyces pastorianus
gggaatcgacaatccttggttcttc

SEQ ID NO: 57830 - DNA, 25 bp, Saccharomyces pastorianus
gtcagtttcaagtttggctcgcaca

SEQ ID NO: 57831 - DNA, 25 bp, Saccharomyces pastorianus
tgctgtgggcacatgacgtcatcga

SEQ ID NO: 57832 - DNA, 25 bp, Saccharomyces pastorianus
gtgttacacgatcttcaactaccta

SEQ ID NO: 57833 - DNA, 25 bp, Saccharomyces pastorianus
ggcgactccaaatatttacctgttc

SEQ ID NO: 57834 - DNA, 25 bp, Saccharomyces pastorianus
gttctcatcagtttaccattgtctc

SEQ ID NO: 57835 - DNA, 25 bp, Saccharomyces pastorianus
caacatttcttgcattgtcgctcca

SEQ ID NO: 57836 - DNA, 25 bp, Saccharomyces pastorianus
actcaatgcgtttgtgttcctttac

SEQ ID NO: 57837 - DNA, 25 bp, Saccharomyces pastorianus
agagcatattctgctccacgttaca

SEQ ID NO: 57838 - DNA, 25 bp, Saccharomyces pastorianus
gctatcggtaatttctcggtgacta

SEQ ID NO: 57839 - DNA, 25 bp, Saccharomyces pastorianus
ggtacttttgggttcgaccactatg

SEQ ID NO: 57840 - DNA, 25 bp, Saccharomyces pastorianus
ttcatgcaatacctccggttataca

SEQ ID NO: 57841 - DNA, 25 bp, Saccharomyces pastorianus
gtatcactctcataaccacttctat

SEQ ID NO: 57842 - DNA, 25 bp, Saccharomyces pastorianus
cgcgtgctctcaaatttctacaggt

SEQ ID NO: 57843 - DNA, 25 bp, Saccharomyces pastorianus
agatcggtaacttgttcgcgctgta

SEQ ID NO: 57844 - DNA, 25 bp, Saccharomyces pastorianus
atcataggttgtattgttctcatca

SEQ ID NO: 57845 - DNA, 25 bp, Saccharomyces pastorianus
tacattgtgggtgggctgatttctt

SEQ ID NO: 57846 - DNA, 25 bp, Saccharomyces pastorianus
cctatctctaaaatcctgggttcgt

SEQ ID NO: 57847 - DNA, 25 bp, Saccharomyces pastorianus
ataaggctctactgaactacgctgc

SEQ ID NO: 57848 - DNA, 25 bp, Saccharomyces pastorianus
acgtcactaatgcttggttcttgaa

SEQ ID NO: 57849 - DNA, 25 bp, Saccharomyces pastorianus
tgcattcggtattctgacgttcata

SEQ ID NO: 57850 - DNA, 25 bp, Saccharomyces pastorianus
gaacctgtggtaacgtacttgatcc

SEQ ID NO: 57851 - DNA, 25 bp, Saccharomyces pastorianus
taagtcgtacgcctcactgatgatt

SEQ ID NO: 57852 - DNA, 25 bp, Saccharomyces pastorianus
actgatgattgtccgtactcttcta

SEQ ID NO: 57853 - DNA, 25 bp, Saccharomyces pastorianus
ctgccattgtgcctgtaagtcgtac

SEQ ID NO: 57854 - DNA, 25 bp, Saccharomyces pastorianus
gaactacgctgcatccatgggaatc

SEQ ID NO: 57855 - DNA, 25 bp, Saccharomyces pastorianus
aatttgggtaccatcttttctgccg

SEQ ID NO: 57856 - DNA, 25 bp, Saccharomyces pastorianus
ggcactctgtcaaagagacttcgaa

SEQ ID NO: 57857 - DNA, 25 bp, Saccharomyces pastorianus
atcacctaccaacaatatctccaat

SEQ ID NO: 57858 - DNA, 25 bp, Saccharomyces pastorianus
atatctccaattgcaacctgatcaa

SEQ ID NO: 57859 - DNA, 25 bp, Saccharomyces pastorianus
aaagtagcacaagaggaagtcgctt

SEQ ID NO: 57860 - DNA, 25 bp, Saccharomyces pastorianus
gaaaggatcgcatttgaacgtcaag

SEQ ID NO: 57861 - DNA, 25 bp, Saccharomyces pastorianus
gacttcgaacgagagactgaaagga

SEQ ID NO: 57862 - DNA, 25 bp, Saccharomyces pastorianus
gatcgtgtcacaacgtggtcatata

SEQ ID NO: 57863 - DNA, 25 bp, Saccharomyces pastorianus
aaaatacctggcactctgtcaaaga

SEQ ID NO: 57864 - DNA, 25 bp, Saccharomyces pastorianus
agacggttcattacaaagagatcac

SEQ ID NO: 57865 - DNA, 25 bp, Saccharomyces pastorianus
tgtgcctggtattgcaaggaaagta

SEQ ID NO: 57866 - DNA, 25 bp, Saccharomyces pastorianus
aagtcgcttggttcgatcgtgtcac

SEQ ID NO: 57867 - DNA, 25 bp, Saccharomyces pastorianus
cagagggttccgtctttgttcttca

SEQ ID NO: 57868 - DNA, 25 bp, Saccharomyces pastorianus
accagtgtgggatgttctccttcac

SEQ ID NO: 57869 - DNA, 25 bp, Saccharomyces pastorianus
gtaccagggtttcgctacaggtgac

SEQ ID NO: 57870 - DNA, 25 bp, Saccharomyces pastorianus
ttgttcttcactcttgtgctcacaa

SEQ ID NO: 57871 - DNA, 25 bp, Saccharomyces pastorianus
gtgacctggacaaagacgcctacgc

SEQ ID NO: 57872 - DNA, 25 bp, Saccharomyces pastorianus
gagaccacttggttaagctggccac

SEQ ID NO: 57873 - DNA, 25 bp, Saccharomyces pastorianus
gtgccaagatcgtcgctaagctgtt

SEQ ID NO: 57874 - DNA, 25 bp, Saccharomyces pastorianus
aatgggcccagattgtcgacgccat

SEQ ID NO: 57875 - DNA, 25 bp, Saccharomyces pastorianus
ttgtttccatctagcgctcacaaag

SEQ ID NO: 57876 - DNA, 25 bp, Saccharomyces pastorianus
aaaacaagaccatcaagcccgctgt

SEQ ID NO: 57877 - DNA, 25 bp, Saccharomyces pastorianus
tagtcaccatgtcatccagaatcac

SEQ ID NO: 57878 - DNA, 25 bp, Saccharomyces pastorianus
gaggtgaaacccctcatttcagatc

SEQ ID NO: 57879 - DNA, 25 bp, Saccharomyces pastorianus
gacggcgaactgcttttcttgatga

SEQ ID NO: 57880 - DNA, 25 bp, Saccharomyces pastorianus
gacgtgattctcttagcgacgggcc

SEQ ID NO: 57881 - DNA, 25 bp, Saccharomyces pastorianus
atggaatgctttgcagtctctggaa

SEQ ID NO: 57882 - DNA, 25 bp, Saccharomyces pastorianus
agtagtacagctgctttccaagata

SEQ ID NO: 57883 - DNA, 25 bp, Saccharomyces pastorianus
aagataactccaccttggcaagggc

SEQ ID NO: 57884 - DNA, 25 bp, Saccharomyces pastorianus
agataagtaatctctgccttcaggt

SEQ ID NO: 57885 - DNA, 25 bp, Saccharomyces pastorianus
cagggagacgaattcgccgcgatta

SEQ ID NO: 57886 - DNA, 25 bp, Saccharomyces pastorianus
gacgggcccattatcgatctcgaag

SEQ ID NO: 57887 - DNA, 25 bp, Saccharomyces pastorianus
tttcctcttctctcagacgtgattc

SEQ ID NO: 57888 - DNA, 25 bp, Saccharomyces pastorianus
tgagtccaaattcgaatctgcgccc

SEQ ID NO: 57889 - DNA, 25 bp, Saccharomyces pastorianus
agagcctagtgctaccataaaccag

SEQ ID NO: 57890 - DNA, 25 bp, Saccharomyces pastorianus
tgacgcttctcataaacctggttta

SEQ ID NO: 57891 - DNA, 25 bp, Saccharomyces pastorianus
tgtagtttcatccttcttacctttt

SEQ ID NO: 57892 - DNA, 25 bp, Saccharomyces pastorianus
tgttccaaagtgtcatgctctcaat

SEQ ID NO: 57893 - DNA, 25 bp, Saccharomyces pastorianus
agacttcttttttgagactgaccaa

SEQ ID NO: 57894 - DNA, 25 bp, Saccharomyces pastorianus
aggtcattggctttatgcttgtgca

SEQ ID NO: 57895 - DNA, 25 bp, Saccharomyces pastorianus
gtctgccttggtttgtatgacgctt

SEQ ID NO: 57896 - DNA, 25 bp, Saccharomyces pastorianus
tattcggctggcaactcagtgcaat

SEQ ID NO: 57897 - DNA, 25 bp, Saccharomyces pastorianus
gctagcaacgctgacttttggaatt

SEQ ID NO: 57898 - DNA, 25 bp, Saccharomyces pastorianus
taatctctttctccgtttgttatgg

SEQ ID NO: 57899 - DNA, 25 bp, Saccharomyces pastorianus
tgttgacttataccgactatcgcag

SEQ ID NO: 57900 - DNA, 25 bp, Saccharomyces pastorianus
aaagttctagagctcctggtggcaa

SEQ ID NO: 57901 - DNA, 25 bp, Saccharomyces pastorianus
gatgcttggaatacttcttctggtg

SEQ ID NO: 57902 - DNA, 25 bp, Saccharomyces pastorianus
gtactggaaccaccttttcactaat

SEQ ID NO: 57903 - DNA, 25 bp, Saccharomyces pastorianus
gatgattcatcgacaagatcttcag

SEQ ID NO: 57904 - DNA, 25 bp, Saccharomyces pastorianus
tgctgcaaatgctacggacccaatg

SEQ ID NO: 57905 - DNA, 25 bp, Saccharomyces pastorianus
gattcgtgggacatgtgcttccaat

SEQ ID NO: 57906 - DNA, 25 bp, Saccharomyces pastorianus
gctcctggtggcaagtgctgcaaat

SEQ ID NO: 57907 - DNA, 25 bp, Saccharomyces pastorianus
atgacttacatttcaggaagccaga

SEQ ID NO: 57908 - DNA, 25 bp, Saccharomyces pastorianus
gcttccaattgatccgcttacttaa

SEQ ID NO: 57909 - DNA, 25 bp, Saccharomyces pastorianus
accaatgcccaaccatagtggtatg

SEQ ID NO: 57910 - DNA, 25 bp, Saccharomyces pastorianus
gcgactcagagcaagacacaccaat

SEQ ID NO: 57911 - DNA, 25 bp, Saccharomyces pastorianus
gttactgatacccaaacaattgttt

SEQ ID NO: 57912 - DNA, 25 bp, Saccharomyces pastorianus
tccacccaagtggtttgaacctcat

SEQ ID NO: 57913 - DNA, 25 bp, Saccharomyces pastorianus
gaattccgcttcaggaggcgaataa

SEQ ID NO: 57914 - DNA, 25 bp, Saccharomyces pastorianus
gacagcagaggttatcttagttact

SEQ ID NO: 57915 - DNA, 25 bp, Saccharomyces pastorianus
gttcagtgtacatgttaatgcccta

SEQ ID NO: 57916 - DNA, 25 bp, Saccharomyces pastorianus
aatgtttacgaattccgcttcagga

SEQ ID NO: 57917 - DNA, 25 bp, Saccharomyces pastorianus
ggctggcaaaccttgactttactaa

SEQ ID NO: 57918 - DNA, 25 bp, Saccharomyces pastorianus
tgtaatttctactgtccacccaagt

SEQ ID NO: 57919 - DNA, 25 bp, Saccharomyces pastorianus
atagcgatggctcaacaagtttgga

SEQ ID NO: 57920 - DNA, 25 bp, Saccharomyces pastorianus
aatgccctatttcggtacaagctgt

SEQ ID NO: 57921 - DNA, 25 bp, Saccharomyces pastorianus
gtattccaattgatgtacaacctaa

SEQ ID NO: 57922 - DNA, 25 bp, Saccharomyces pastorianus
gaagcgcaatccaaactgaacgaaa

SEQ ID NO: 57923 - DNA, 25 bp, Saccharomyces pastorianus
aaagctataaacgtgctgcggcagt

SEQ ID NO: 57924 - DNA, 25 bp, Saccharomyces pastorianus
gaggcctctccgaagatttggacat

SEQ ID NO: 57925 - DNA, 25 bp, Saccharomyces pastorianus
acagctctgggataggaggcctctc

SEQ ID NO: 57926 - DNA, 25 bp, Saccharomyces pastorianus
actcggcgggtacagtttcatcgta

SEQ ID NO: 57927 - DNA, 25 bp, Saccharomyces pastorianus
taccacaccgtgtaaactctctaaa

SEQ ID NO: 57928 - DNA, 25 bp, Saccharomyces pastorianus
aagtcattatcttcctcaatgccgt

SEQ ID NO: 57929 - DNA, 25 bp, Saccharomyces pastorianus
gctgcggcagtaacgtctacactaa

SEQ ID NO: 57930 - DNA, 25 bp, Saccharomyces pastorianus
agtttcatcgtactccataccttct

SEQ ID NO: 57931 - DNA, 25 bp, Saccharomyces pastorianus
gatacaaacttgcactcggcgggta

SEQ ID NO: 57932 - DNA, 25 bp, Saccharomyces pastorianus
ttctacggtatcaagcaactacggg

SEQ ID NO: 57933 - DNA, 25 bp, Saccharomyces pastorianus
aaacggaggccggtgtgaacatgca

SEQ ID NO: 57934 - DNA, 25 bp, Saccharomyces pastorianus
gcagtgatcctgctttaccggcaga

SEQ ID NO: 57935 - DNA, 25 bp, Saccharomyces pastorianus
ggcatgaatgttgctgcgggaatta

SEQ ID NO: 57936 - DNA, 25 bp, Saccharomyces pastorianus
gtttaactcaacgattttccatggt

SEQ ID NO: 57937 - DNA, 25 bp, Saccharomyces pastorianus
cttggaataattgctgtgccacatt

SEQ ID NO: 57938 - DNA, 25 bp, Saccharomyces pastorianus
aagtccggtgagtggcagtgatcct

SEQ ID NO: 57939 - DNA, 25 bp, Saccharomyces pastorianus
gaacaaccactaaagtctcctgtca

SEQ ID NO: 57940 - DNA, 25 bp, Saccharomyces pastorianus
ctgtgccacattttattaagcggtt

SEQ ID NO: 57941 - DNA, 25 bp, Saccharomyces pastorianus
gaagatgacttttcctgtcttggaa

SEQ ID NO: 57942 - DNA, 25 bp, Saccharomyces pastorianus
gaacatgcactgtcaatgctggaca

SEQ ID NO: 57943 - DNA, 25 bp, Saccharomyces pastorianus
gaagagaccctacactacaagcagt

SEQ ID NO: 57944 - DNA, 25 bp, Saccharomyces pastorianus
cttcttctggagtgacttggtagaa

SEQ ID NO: 57945 - DNA, 25 bp, Saccharomyces pastorianus
tcttcttctggagtgacttggtaga

SEQ ID NO: 57946 - DNA, 25 bp, Saccharomyces pastorianus
gtgacttggtagaaggccaatctgt

SEQ ID NO: 57947 - DNA, 25 bp, Saccharomyces pastorianus
ccaatctgtattcgttggtcttggt

SEQ ID NO: 57948 - DNA, 25 bp, Saccharomyces pastorianus
gccaatctgtattcgttggtcttgg

SEQ ID NO: 57949 - DNA, 25 bp, Saccharomyces pastorianus
tctggagtgacttggtagaaggcca

SEQ ID NO: 57950 - DNA, 25 bp, Saccharomyces pastorianus
aggccaatctgtattcgttggtctt

SEQ ID NO: 57951 - DNA, 25 bp, Saccharomyces pastorianus
aaggccaatctgtattcgttggtct

SEQ ID NO: 57952 - DNA, 25 bp, Saccharomyces pastorianus
ggccaatctgtattcgttggtcttg

SEQ ID NO: 57953 - DNA, 25 bp, Saccharomyces pastorianus
gagtgacttggtagaaggccaatct

SEQ ID NO: 57954 - DNA, 25 bp, Saccharomyces pastorianus
gaaggccaatctgtattcgttggtc

SEQ ID NO: 57955 - DNA, 25 bp, Saccharomyces pastorianus
cattatcggaaagctaacggccacg

SEQ ID NO: 57956 - DNA, 25 bp, Saccharomyces pastorianus
acttcgtcaacagagactgcctgca

SEQ ID NO: 57957 - DNA, 25 bp, Saccharomyces pastorianus
attcctcatcgataccatcttagtg

SEQ ID NO: 57958 - DNA, 25 bp, Saccharomyces pastorianus
aaaaattcccgatccaattcctcat

SEQ ID NO: 57959 - DNA, 25 bp, Saccharomyces pastorianus
gatgccatcttctcatcctagaaag

SEQ ID NO: 57960 - DNA, 25 bp, Saccharomyces pastorianus
acgcttgaatgagaactgtgcccca

SEQ ID NO: 57961 - DNA, 25 bp, Saccharomyces pastorianus
ggacaacgagcccatggtctttaat

SEQ ID NO: 57962 - DNA, 25 bp, Saccharomyces pastorianus
tggatccaaagctcgactattctat

SEQ ID NO: 57963 - DNA, 25 bp, Saccharomyces pastorianus
ggtagttactcacacatcacgatca

SEQ ID NO: 57964 - DNA, 25 bp, Saccharomyces pastorianus
gagacttttcgtccaagtttgcctc

SEQ ID NO: 57965 - DNA, 25 bp, Saccharomyces pastorianus
ggatattgctgattggtctaccatt

SEQ ID NO: 57966 - DNA, 25 bp, Saccharomyces pastorianus
cattgattggtcatcgtgttctaaa

SEQ ID NO: 57967 - DNA, 25 bp, Saccharomyces pastorianus
gtttggtttcgctacatctttaaga

SEQ ID NO: 57968 - DNA, 25 bp, Saccharomyces pastorianus
ttcttaagagcgcaaccggtgatta

SEQ ID NO: 57969 - DNA, 25 bp, Saccharomyces pastorianus
gaacctatcatgaacgtgtcagtga

SEQ ID NO: 57970 - DNA, 25 bp, Saccharomyces pastorianus
aaccgcgattgttggtgggcgtatc

SEQ ID NO: 57971 - DNA, 25 bp, Saccharomyces pastorianus
gcgttccgcgatgccttcttaagag

SEQ ID NO: 57972 - DNA, 25 bp, Saccharomyces pastorianus
caaggtaatgtcatcggtcttttaa

SEQ ID NO: 57973 - DNA, 25 bp, Saccharomyces pastorianus
tccaacagcacctcatgtacagaag

SEQ ID NO: 57974 - DNA, 25 bp, Saccharomyces pastorianus
aacagtctggtggtgctggtcaatt

SEQ ID NO: 57975 - DNA, 25 bp, Saccharomyces pastorianus
agttattggtactctatcgcctgta

SEQ ID NO: 57976 - DNA, 25 bp, Saccharomyces pastorianus
aaaaccgctactatgtctgcgttcc

SEQ ID NO: 57977 - DNA, 25 bp, Saccharomyces pastorianus
gtcgattacaccaaagtctacggat

SEQ ID NO: 57978 - DNA, 25 bp, Saccharomyces pastorianus
gactttttaccaaatccttctgaag

SEQ ID NO: 57979 - DNA, 25 bp, Saccharomyces pastorianus
gggattcaacctgttcttgatgcta

SEQ ID NO: 57980 - DNA, 25 bp, Saccharomyces pastorianus
aaccgttcgttggactggcattcaa

SEQ ID NO: 57981 - DNA, 25 bp, Saccharomyces pastorianus
gagactacggtcaacctagtccctg

SEQ ID NO: 57982 - DNA, 25 bp, Saccharomyces pastorianus
gggtctgccttagcaaatactggga

SEQ ID NO: 57983 - DNA, 25 bp, Saccharomyces pastorianus
atgtgctacttttggcattgactgt

SEQ ID NO: 57984 - DNA, 25 bp, Saccharomyces pastorianus
atgccgttgtttctttgtcgattac

SEQ ID NO: 57985 - DNA, 25 bp, Saccharomyces pastorianus
atgttcgtgtctaccaaggacgctt

SEQ ID NO: 57986 - DNA, 25 bp, Saccharomyces pastorianus
agagctttcacaccggttttgatgg

SEQ ID NO: 57987 - DNA, 25 bp, Saccharomyces pastorianus
catgtatgttcctgatgccgttgtt

SEQ ID NO: 57988 - DNA, 25 bp, Saccharomyces pastorianus
gatcttgtagagttggtcgaccagt

SEQ ID NO: 57989 - DNA, 25 bp, Saccharomyces pastorianus
gacgaggtacatgtttcgctgggat

SEQ ID NO: 57990 - DNA, 25 bp, Saccharomyces pastorianus
gacggagattcttttacattgcgac

SEQ ID NO: 57991 - DNA, 25 bp, Saccharomyces pastorianus
ggatgcactcaatgcgttaccaagt

SEQ ID NO: 57992 - DNA, 25 bp, Saccharomyces pastorianus
aatcagtgccaccaaagatcttgta

SEQ ID NO: 57993 - DNA, 25 bp, Saccharomyces pastorianus
gtactgcccgagacgaatactgacg

SEQ ID NO: 57994 - DNA, 25 bp, Saccharomyces pastorianus
taagaacgacgttaccgtgcaccgg

SEQ ID NO: 57995 - DNA, 25 bp, Saccharomyces pastorianus
acgtcccgagtggtacaagcttcag

SEQ ID NO: 57996 - DNA, 25 bp, Saccharomyces pastorianus
aaaattgcgcccgagttggtactgc

SEQ ID NO: 57997 - DNA, 25 bp, Saccharomyces pastorianus
gctgttgacactgaatctgctgtac

SEQ ID NO: 57998 - DNA, 25 bp, Saccharomyces pastorianus
agtgttgcgtcatttgggtcaccaa

SEQ ID NO: 57999 - DNA, 25 bp, Saccharomyces pastorianus
aagggacttggacttgatctacaac

SEQ ID NO: 58000 - DNA, 25 bp, Saccharomyces pastorianus
ggaactgaagggtgtcccctacacg

SEQ ID NO: 58001 - DNA, 25 bp, Saccharomyces pastorianus
ctacacgcaggaggtgtctgacgct

SEQ ID NO: 58002 - DNA, 25 bp, Saccharomyces pastorianus
actgctatagcgctgaagacgcatt

SEQ ID NO: 58003 - DNA, 25 bp, Saccharomyces pastorianus
gggcaacattactgcatacactgtg

SEQ ID NO: 58004 - DNA, 25 bp, Saccharomyces pastorianus
aggagtccaacgaggtcttactgaa

SEQ ID NO: 58005 - DNA, 25 bp, Saccharomyces pastorianus
gagcatttggacaacgccttggcga

SEQ ID NO: 58006 - DNA, 25 bp, Saccharomyces pastorianus
cttggcgaacgttgccacgacagaa

SEQ ID NO: 58007 - DNA, 25 bp, Saccharomyces pastorianus
atctacaacgatctggccactaagg

SEQ ID NO: 58008 - DNA, 25 bp, Saccharomyces pastorianus
gaacaagttcttggaccgcatgaaa

SEQ ID NO: 58009 - DNA, 25 bp, Saccharomyces pastorianus
atatcacacactctgtgggtccaga

SEQ ID NO: 58010 - DNA, 25 bp, Saccharomyces pastorianus
aatgggtcaacaatcgttcgaggat

SEQ ID NO: 58011 - DNA, 25 bp, Saccharomyces pastorianus
gaggtaacgctcaactggactacat

SEQ ID NO: 58012 - DNA, 25 bp, Saccharomyces pastorianus
tgtttcggaacaaaccatttcttct

SEQ ID NO: 58013 - DNA, 25 bp, Saccharomyces pastorianus
aacggcggaggcctaccgctatatc

SEQ ID NO: 58014 - DNA, 25 bp, Saccharomyces pastorianus
caaatgtcaaatggcttcagaacgt

SEQ ID NO: 58015 - DNA, 25 bp, Saccharomyces pastorianus
gcttcagaacgttgggtgtttcgga

SEQ ID NO: 58016 - DNA, 25 bp, Saccharomyces pastorianus
atggaatctgataaccccttcagca

SEQ ID NO: 58017 - DNA, 25 bp, Saccharomyces pastorianus
cccttcagcacatcagaggcaatga

SEQ ID NO: 58018 - DNA, 25 bp, Saccharomyces pastorianus
gcagaaggagcagacggtttttgaa

SEQ ID NO: 58019 - DNA, 25 bp, Saccharomyces pastorianus
aaacttgtcttttggattgcattaa

SEQ ID NO: 58020 - DNA, 25 bp, Saccharomyces pastorianus
ggactacatcctggaaatgggtcaa

SEQ ID NO: 58021 - DNA, 25 bp, Saccharomyces pastorianus
acctttcccgaaatcttcagtcaag

SEQ ID NO: 58022 - DNA, 25 bp, Saccharomyces pastorianus
aatgggcttaattcacctcaacgct

SEQ ID NO: 58023 - DNA, 25 bp, Saccharomyces pastorianus
gaatagaatgctgtttcccactgaa

SEQ ID NO: 58024 - DNA, 25 bp, Saccharomyces pastorianus
gtttcccactgaaggtgtgcagcag

SEQ ID NO: 58025 - DNA, 25 bp, Saccharomyces pastorianus
aggtgataacgtttgaactggccaa

SEQ ID NO: 58026 - DNA, 25 bp, Saccharomyces pastorianus
ggcagttgcacttatcactcgatag

SEQ ID NO: 58027 - DNA, 25 bp, Saccharomyces pastorianus
aaccgttaggtcgtgtgaatagaat

SEQ ID NO: 58028 - DNA, 25 bp, Saccharomyces pastorianus
gaagaagcagccactcgggagatta

SEQ ID NO: 58029 - DNA, 25 bp, Saccharomyces pastorianus
gaattggaacaactattccccacaa

SEQ ID NO: 58030 - DNA, 25 bp, Saccharomyces pastorianus
gaagtcatcatcagatcagcacaag

SEQ ID NO: 58031 - DNA, 25 bp, Saccharomyces pastorianus
aatccctttgcatcggaagaagcag

SEQ ID NO: 58032 - DNA, 25 bp, Saccharomyces pastorianus
taactgtctattgttgggcgctgct

SEQ ID NO: 58033 - DNA, 25 bp, Saccharomyces pastorianus
ctttttatattttctgctacgccac

SEQ ID NO: 58034 - DNA, 25 bp, Saccharomyces pastorianus
caagtgtatggctttggcgtccgct

SEQ ID NO: 58035 - DNA, 25 bp, Saccharomyces pastorianus
gaagaggcgccgattacgatttaga

SEQ ID NO: 58036 - DNA, 25 bp, Saccharomyces pastorianus
aggctgggtgccttcgtctagaaga

SEQ ID NO: 58037 - DNA, 25 bp, Saccharomyces pastorianus
gtcgcttgggttattaccgccgaat

SEQ ID NO: 58038 - DNA, 25 bp, Saccharomyces pastorianus
cgccgaatcattcccattgagagta

SEQ ID NO: 58039 - DNA, 25 bp, Saccharomyces pastorianus
aaagctagggcgtcgtaactgtcta

SEQ ID NO: 58040 - DNA, 25 bp, Saccharomyces pastorianus
ggcgtccgcttctaactgggtatgg

SEQ ID NO: 58041 - DNA, 25 bp, Saccharomyces pastorianus
aattttgcttccactttcttcagtt

SEQ ID NO: 58042 - DNA, 25 bp, Saccharomyces pastorianus
cgtccattgtcattggtatcgtcaa

SEQ ID NO: 58043 - DNA, 25 bp, Saccharomyces pastorianus
gcaaccccaagctgctgatgaactg

SEQ ID NO: 58044 - DNA, 25 bp, Saccharomyces pastorianus
caatgacgaattgaaggctggcgag

SEQ ID NO: 58045 - DNA, 25 bp, Saccharomyces pastorianus
acacttaagcgcaccatctcaaaaa

SEQ ID NO: 58046 - DNA, 25 bp, Saccharomyces pastorianus
aagctgctgatgaactggtgtcttc

SEQ ID NO: 58047 - DNA, 25 bp, Saccharomyces pastorianus
ggtgtcttcgttaagtaatgactca

SEQ ID NO: 58048 - DNA, 25 bp, Saccharomyces pastorianus
ttaagcgcaccatctcaaaaatttt

SEQ ID NO: 58049 - DNA, 25 bp, Saccharomyces pastorianus
aaaagcaaagcccattgctccacag

SEQ ID NO: 58050 - DNA, 25 bp, Saccharomyces pastorianus
tgaactggtgtcttcgttaagtaat

SEQ ID NO: 58051 - DNA, 25 bp, Saccharomyces pastorianus
gctgatgaactggtgtcttcgttaa

SEQ ID NO: 58052 - DNA, 25 bp, Saccharomyces pastorianus
gtaatgactcacacttaagcgcacc

SEQ ID NO: 58053 - DNA, 25 bp, Saccharomyces pastorianus
agcaaagcccattgctccacagcaa

SEQ ID NO: 58054 - DNA, 25 bp, Saccharomyces pastorianus
aacggtccgagagaaacttcgagat

SEQ ID NO: 58055 - DNA, 25 bp, Saccharomyces pastorianus
acttcgagatgtcgtaatgactatt

SEQ ID NO: 58056 - DNA, 25 bp, Saccharomyces pastorianus
cgagatgtcgtaatgactattaata

SEQ ID NO: 58057 - DNA, 25 bp, Saccharomyces pastorianus
gacgatggtataacggtccgagaga

SEQ ID NO: 58058 - DNA, 25 bp, Saccharomyces pastorianus
aatagacgatggtataacggtccga

SEQ ID NO: 58059 - DNA, 25 bp, Saccharomyces pastorianus
ccgagagaaacttcgagatgtcgta

SEQ ID NO: 58060 - DNA, 25 bp, Saccharomyces pastorianus
gaaacttcgagatgtcgtaatgact

SEQ ID NO: 58061 - DNA, 25 bp, Saccharomyces pastorianus
gactattaataagcttcaggtagat

SEQ ID NO: 58062 - DNA, 25 bp, Saccharomyces pastorianus
ggtccgagagaaacttcgagatgtc

SEQ ID NO: 58063 - DNA, 25 bp, Saccharomyces pastorianus
ataagcttcaggtagatataagaga

SEQ ID NO: 58064 - DNA, 25 bp, Saccharomyces pastorianus
tataacggtccgagagaaacttcga

SEQ ID NO: 58065 - DNA, 25 bp, Saccharomyces pastorianus
gagcattaacagacttgagggccaa

SEQ ID NO: 58066 - DNA, 25 bp, Saccharomyces pastorianus
gaagaccaattttgtgtcaccaggt

SEQ ID NO: 58067 - DNA, 25 bp, Saccharomyces pastorianus
ttaagggttcctataacgtcgagat

SEQ ID NO: 58068 - DNA, 25 bp, Saccharomyces pastorianus
gtcaccaggtcatagctgagttttt

SEQ ID NO: 58069 - DNA, 25 bp, Saccharomyces pastorianus
agagtccattgatacgaccgatgaa

SEQ ID NO: 58070 - DNA, 25 bp, Saccharomyces pastorianus
ggcgatttccaagagcaatttagct

SEQ ID NO: 58071 - DNA, 25 bp, Saccharomyces pastorianus
caataatgatttgctccgtggagga

SEQ ID NO: 58072 - DNA, 25 bp, Saccharomyces pastorianus
gatattgctaaaactggcgatttcc

SEQ ID NO: 58073 - DNA, 25 bp, Saccharomyces pastorianus
atattgggctctcttacttgacaca

SEQ ID NO: 58074 - DNA, 25 bp, Saccharomyces pastorianus
cggacgttttatcgcaagcaaggac

SEQ ID NO: 58075 - DNA, 25 bp, Saccharomyces pastorianus
aatactgttcgtttcaaccagaaga

SEQ ID NO: 58076 - DNA, 25 bp, Saccharomyces pastorianus
gtttttattctccattccgttatca

SEQ ID NO: 58077 - DNA, 25 bp, Saccharomyces pastorianus
ggtgttattccagcaagtactttgt

SEQ ID NO: 58078 - DNA, 25 bp, Saccharomyces pastorianus
tatctgaaaactctaccggctactt

SEQ ID NO: 58079 - DNA, 25 bp, Saccharomyces pastorianus
gttgcgccctgtatgtatttatcca

SEQ ID NO: 58080 - DNA, 25 bp, Saccharomyces pastorianus
gacaacctcgttggtcactgtaatg

SEQ ID NO: 58081 - DNA, 25 bp, Saccharomyces pastorianus
gattttctacatgttcgggtttcta

SEQ ID NO: 58082 - DNA, 25 bp, Saccharomyces pastorianus
aatcggtttcattagcagcatgttc

SEQ ID NO: 58083 - DNA, 25 bp, Saccharomyces pastorianus
ttaattgctggtattttccccttcg

SEQ ID NO: 58084 - DNA, 25 bp, Saccharomyces pastorianus
aattgcaagacaaatccccttccaa

SEQ ID NO: 58085 - DNA, 25 bp, Saccharomyces pastorianus
cgttatcaattgctggttctctggt

SEQ ID NO: 58086 - DNA, 25 bp, Saccharomyces pastorianus
cttcggttctattgccgttgaattg

SEQ ID NO: 58087 - DNA, 25 bp, Saccharomyces pastorianus
ggcggtaccattgttgacgttccaa

SEQ ID NO: 58088 - DNA, 25 bp, Saccharomyces pastorianus
gagattgcctaagttcactcatcaa

SEQ ID NO: 58089 - DNA, 25 bp, Saccharomyces pastorianus
gacagatttacaacttcgagtcttg

SEQ ID NO: 58090 - DNA, 25 bp, Saccharomyces pastorianus
tatattgcgcttgaagagccacgga

SEQ ID NO: 58091 - DNA, 25 bp, Saccharomyces pastorianus
gagtcttggatgtctcagcagcact

SEQ ID NO: 58092 - DNA, 25 bp, Saccharomyces pastorianus
gcagttcgtcgttcgcaaacagcaa

SEQ ID NO: 58093 - DNA, 25 bp, Saccharomyces pastorianus
gagccacggattgaagtgcctcaaa

SEQ ID NO: 58094 - DNA, 25 bp, Saccharomyces pastorianus
ttcgcatgctctttctcagacaaaa

SEQ ID NO: 58095 - DNA, 25 bp, Saccharomyces pastorianus
ctcagcagcactttctacttcaaaa

SEQ ID NO: 58096 - DNA, 25 bp, Saccharomyces pastorianus
gatccccgtccaaaagctagtgtat

SEQ ID NO: 58097 - DNA, 25 bp, Saccharomyces pastorianus
gttgacgttccaaaacttgcagttc

SEQ ID NO: 58098 - DNA, 25 bp, Saccharomyces pastorianus
gatatgacctcactaaccgtgcatg

SEQ ID NO: 58099 - DNA, 25 bp, Saccharomyces pastorianus
aaccgtgcatgctgaaagaataaaa

SEQ ID NO: 58100 - DNA, 25 bp, Saccharomyces pastorianus
tcactaaccgtgcatgctgaaagaa

SEQ ID NO: 58101 - DNA, 25 bp, Saccharomyces pastorianus
tgacttggagaatatattgttatac

SEQ ID NO: 58102 - DNA, 25 bp, Saccharomyces pastorianus
ggtttggatataatgacttggagaa

SEQ ID NO: 58103 - DNA, 25 bp, Saccharomyces pastorianus
acctcactaaccgtgcatgctgaaa

SEQ ID NO: 58104 - DNA, 25 bp, Saccharomyces pastorianus
acgataccgagaccatcaatgatat

SEQ ID NO: 58105 - DNA, 25 bp, Saccharomyces pastorianus
tgttatacgataccgagaccatcaa

SEQ ID NO: 58106 - DNA, 25 bp, Saccharomyces pastorianus
tcaatgatatgacctcactaaccgt

SEQ ID NO: 58107 - DNA, 25 bp, Saccharomyces pastorianus
atgacctcactaaccgtgcatgctg

SEQ ID NO: 58108 - DNA, 25 bp, Saccharomyces pastorianus
tattgttatacgataccgagaccat

SEQ ID NO: 58109 - DNA, 25 bp, Saccharomyces pastorianus
atggccgtgctaaatggtacatcaa

SEQ ID NO: 58110 - DNA, 25 bp, Saccharomyces pastorianus
attgcattacatttcactgagctcg

SEQ ID NO: 58111 - DNA, 25 bp, Saccharomyces pastorianus
agtttcgatccctgtattgcattac

SEQ ID NO: 58112 - DNA, 25 bp, Saccharomyces pastorianus
ggtgatttgagcattgattctgaca

SEQ ID NO: 58113 - DNA, 25 bp, Saccharomyces pastorianus
agcatggtgtgctttctgaccttac

SEQ ID NO: 58114 - DNA, 25 bp, Saccharomyces pastorianus
actgagctcgttgttgattttagga

SEQ ID NO: 58115 - DNA, 25 bp, Saccharomyces pastorianus
gatgtacggattgccgccaacggaa

SEQ ID NO: 58116 - DNA, 25 bp, Saccharomyces pastorianus
tttcggtttggaacggtgctttgat

SEQ ID NO: 58117 - DNA, 25 bp, Saccharomyces pastorianus
ttagcgcctagtttggattcagagt

SEQ ID NO: 58118 - DNA, 25 bp, Saccharomyces pastorianus
ctgaccttaccattcacggacatag

SEQ ID NO: 58119 - DNA, 25 bp, Saccharomyces pastorianus
ttatacgacgtaacaatggtgccga

SEQ ID NO: 58120 - DNA, 25 bp, Saccharomyces pastorianus
tgtatgtttgcttcacgctagtgga

SEQ ID NO: 58121 - DNA, 25 bp, Saccharomyces pastorianus
attacgctgctgacttttacgatta

SEQ ID NO: 58122 - DNA, 25 bp, Saccharomyces pastorianus
aggactatgattccaacgccacgaa

SEQ ID NO: 58123 - DNA, 25 bp, Saccharomyces pastorianus
atggtgttgcccaaggtggtcgcca

SEQ ID NO: 58124 - DNA, 25 bp, Saccharomyces pastorianus
gaccacgacccgaaaactgtgtatg

SEQ ID NO: 58125 - DNA, 25 bp, Saccharomyces pastorianus
agaacgagtgtctctactagtggac

SEQ ID NO: 58126 - DNA, 25 bp, Saccharomyces pastorianus
agatcttgcccatcagagtactgag

SEQ ID NO: 58127 - DNA, 25 bp, Saccharomyces pastorianus
gatactagactgtttccatgaagag

SEQ ID NO: 58128 - DNA, 25 bp, Saccharomyces pastorianus
gagttcgcatgtaggccagatacta

SEQ ID NO: 58129 - DNA, 25 bp, Saccharomyces pastorianus
agtggatatacccaagatcttgccc

SEQ ID NO: 58130 - DNA, 25 bp, Saccharomyces pastorianus
gacgggtttgactgtttctactcca

SEQ ID NO: 58131 - DNA, 25 bp, Saccharomyces pastorianus
tcagtgaatctccaaaccagtttag

SEQ ID NO: 58132 - DNA, 25 bp, Saccharomyces pastorianus
aacaaaggccacctattgcgacttc

SEQ ID NO: 58133 - DNA, 25 bp, Saccharomyces pastorianus
atagttcaacatccacagcatcaag

SEQ ID NO: 58134 - DNA, 25 bp, Saccharomyces pastorianus
tcaaaggaactcatccatccctatg

SEQ ID NO: 58135 - DNA, 25 bp, Saccharomyces pastorianus
catccctatgtctccaatttctgga

SEQ ID NO: 58136 - DNA, 25 bp, Saccharomyces pastorianus
gcctctcgcaggtagtacgcatcaa

SEQ ID NO: 58137 - DNA, 25 bp, Saccharomyces pastorianus
aagtagctcgataaggcgccaaggc

SEQ ID NO: 58138 - DNA, 25 bp, Saccharomyces pastorianus
ttgcgacttcggtagtacctgcaat

SEQ ID NO: 58139 - DNA, 25 bp, Saccharomyces pastorianus
gctctcatccgcatcattggagtat

SEQ ID NO: 58140 - DNA, 25 bp, Saccharomyces pastorianus
atatctgaagagctctcatccgcat

SEQ ID NO: 58141 - DNA, 25 bp, Saccharomyces pastorianus
gagtggtataccattgacgcctctc

SEQ ID NO: 58142 - DNA, 25 bp, Saccharomyces pastorianus
gaggcaacaagaaccactttccgaa

SEQ ID NO: 58143 - DNA, 25 bp, Saccharomyces pastorianus
gcatacttcgccgacatctagaaag

SEQ ID NO: 58144 - DNA, 25 bp, Saccharomyces pastorianus
aattatctcaaagtgggcagtccca

SEQ ID NO: 58145 - DNA, 25 bp, Saccharomyces pastorianus
tgggcagtcccatcagcagaggcaa

SEQ ID NO: 58146 - DNA, 25 bp, Saccharomyces pastorianus
ggaacccttcctatatgacaaactc

SEQ ID NO: 58147 - DNA, 25 bp, Saccharomyces pastorianus
tagtcccggtcctagatctgtggag

SEQ ID NO: 58148 - DNA, 25 bp, Saccharomyces pastorianus
ctccggcaaggtctgcatcacaaaa

SEQ ID NO: 58149 - DNA, 25 bp, Saccharomyces pastorianus
tatcaacaatgttcggcgtcaccag

SEQ ID NO: 58150 - DNA, 25 bp, Saccharomyces pastorianus
gtaccgttataatacctccggcaag

SEQ ID NO: 58151 - DNA, 25 bp, Saccharomyces pastorianus
gctggtgtcttaaactctagtcccg

SEQ ID NO: 58152 - DNA, 25 bp, Saccharomyces pastorianus
gacaaccgccaacttatatgccgaa

SEQ ID NO: 58153 - DNA, 25 bp, Saccharomyces pastorianus
gtcgtgaaacattttgccatagata

SEQ ID NO: 58154 - DNA, 25 bp, Saccharomyces pastorianus
gatgaacctagttttgtcgtgaaac

SEQ ID NO: 58155 - DNA, 25 bp, Saccharomyces pastorianus
ggccaatgtctaagattactcacta

SEQ ID NO: 58156 - DNA, 25 bp, Saccharomyces pastorianus
cagagggctcatcgtcccttttaaa

SEQ ID NO: 58157 - DNA, 25 bp, Saccharomyces pastorianus
atacgtgttattggagtcttgggtt

SEQ ID NO: 58158 - DNA, 25 bp, Saccharomyces pastorianus
aatggctaagttccactgttgtgga

SEQ ID NO: 58159 - DNA, 25 bp, Saccharomyces pastorianus
aaatggcaatggaccttaatgggat

SEQ ID NO: 58160 - DNA, 25 bp, Saccharomyces pastorianus
gtatggttccaatgcagagggctca

SEQ ID NO: 58161 - DNA, 25 bp, Saccharomyces pastorianus
aatgcatctgattgttcgttgagga

SEQ ID NO: 58162 - DNA, 25 bp, Saccharomyces pastorianus
gagaaatcgttctatttttcaagag

SEQ ID NO: 58163 - DNA, 25 bp, Saccharomyces pastorianus
gactctatgcctttcaaaacctttg

SEQ ID NO: 58164 - DNA, 25 bp, Saccharomyces pastorianus
tagtttctgtgatttggtctttcag

SEQ ID NO: 58165 - DNA, 25 bp, Saccharomyces pastorianus
gggattctagtttctgtgatttggt

SEQ ID NO: 58166 - DNA, 25 bp, Saccharomyces pastorianus
tctagtttctgtgatttggtctttc

SEQ ID NO: 58167 - DNA, 25 bp, Saccharomyces pastorianus
cgggaattgtgtcattttaaatggg

SEQ ID NO: 58168 - DNA, 25 bp, Saccharomyces pastorianus
ctagtttctgtgatttggtctttca

SEQ ID NO: 58169 - DNA, 25 bp, Saccharomyces pastorianus
cacgggaattgtgtcattttaaatg

SEQ ID NO: 58170 - DNA, 25 bp, Saccharomyces pastorianus
ggattctagtttctgtgatttggtc

SEQ ID NO: 58171 - DNA, 25 bp, Saccharomyces pastorianus
attctagtttctgtgatttggtctt

SEQ ID NO: 58172 - DNA, 25 bp, Saccharomyces pastorianus
gattctagtttctgtgatttggtct

SEQ ID NO: 58173 - DNA, 25 bp, Saccharomyces pastorianus
atacacgggaattgtgtcattttaa

SEQ ID NO: 58174 - DNA, 25 bp, Saccharomyces pastorianus
atatatacacgggaattgtgtcatt

SEQ ID NO: 58175 - DNA, 25 bp, Saccharomyces pastorianus
tacagagattggtacgtcgtgcgag

SEQ ID NO: 58176 - DNA, 25 bp, Saccharomyces pastorianus
gagccttccaatggtttgggttcca

SEQ ID NO: 58177 - DNA, 25 bp, Saccharomyces pastorianus
gaactacctgagatgcttgcactaa

SEQ ID NO: 58178 - DNA, 25 bp, Saccharomyces pastorianus
aaaagacttgttgctgaatccatca

SEQ ID NO: 58179 - DNA, 25 bp, Saccharomyces pastorianus
aacgcgctcgtgcaatggcacataa

SEQ ID NO: 58180 - DNA, 25 bp, Saccharomyces pastorianus
gttcattccttcgatcaacagttca

SEQ ID NO: 58181 - DNA, 25 bp, Saccharomyces pastorianus
gccggtggtttgtccattgttaaat

SEQ ID NO: 58182 - DNA, 25 bp, Saccharomyces pastorianus
tacttggacactttcccgtttgaat

SEQ ID NO: 58183 - DNA, 25 bp, Saccharomyces pastorianus
atcatgttggttttcgttatcatcg

SEQ ID NO: 58184 - DNA, 25 bp, Saccharomyces pastorianus
aacattgacacaactcgaggccggt

SEQ ID NO: 58185 - DNA, 25 bp, Saccharomyces pastorianus
atcaaaatcttcgaacgcgctcgtg

SEQ ID NO: 58186 - DNA, 25 bp, Saccharomyces pastorianus
gctgaagaaaactcaaacacgcctg

SEQ ID NO: 58187 - DNA, 25 bp, Saccharomyces pastorianus
agatgatcccaacgcaattgacgat

SEQ ID NO: 58188 - DNA, 25 bp, Saccharomyces pastorianus
gacgacctgaacgaagatgatccca

SEQ ID NO: 58189 - DNA, 25 bp, Saccharomyces pastorianus
gtgcaagccgccgaaaacgacgaac

SEQ ID NO: 58190 - DNA, 25 bp, Saccharomyces pastorianus
atgaagatttgacagaggacgcaca

SEQ ID NO: 58191 - DNA, 25 bp, Saccharomyces pastorianus
gaagaagatgtgcaagccgccgaaa

SEQ ID NO: 58192 - DNA, 25 bp, Saccharomyces pastorianus
gaggttgacgacaaaaacttgcaag

SEQ ID NO: 58193 - DNA, 25 bp, Saccharomyces pastorianus
aacacgcctgaagatggagacgaag

SEQ ID NO: 58194 - DNA, 25 bp, Saccharomyces pastorianus
agaggaaaatgatgtcggcgagcaa

SEQ ID NO: 58195 - DNA, 25 bp, Saccharomyces pastorianus
gatggcgaaggtgctcaaaataata

SEQ ID NO: 58196 - DNA, 25 bp, Saccharomyces pastorianus
acttgcaagatggtacaggtttagg

SEQ ID NO: 58197 - DNA, 25 bp, Saccharomyces pastorianus
gacgctaagttcgattggcatttca

SEQ ID NO: 58198 - DNA, 25 bp, Saccharomyces pastorianus
caatccgacattactggtggcaata

SEQ ID NO: 58199 - DNA, 25 bp, Saccharomyces pastorianus
atttcaacgatgctgacttgcctgt

SEQ ID NO: 58200 - DNA, 25 bp, Saccharomyces pastorianus
gacagatcgatatatccgccacatt

SEQ ID NO: 58201 - DNA, 25 bp, Saccharomyces pastorianus
tgggttccccaccaaaggacgtgat

SEQ ID NO: 58202 - DNA, 25 bp, Saccharomyces pastorianus
aggctcaggcacaggttcagttaca

SEQ ID NO: 58203 - DNA, 25 bp, Saccharomyces pastorianus
acatttgatgaccaagtcgccgcag

SEQ ID NO: 58204 - DNA, 25 bp, Saccharomyces pastorianus
aattcgtcacttcattaccacatag

SEQ ID NO: 58205 - DNA, 25 bp, Saccharomyces pastorianus
tctatcatcaccgacctattgggtt

SEQ ID NO: 58206 - DNA, 25 bp, Saccharomyces pastorianus
agaccccatctcattttcggaaaga

SEQ ID NO: 58207 - DNA, 25 bp, Saccharomyces pastorianus
agagaatcaccgcagctgatgcctt

SEQ ID NO: 58208 - DNA, 25 bp, Saccharomyces pastorianus
agcggtagttacacagtcgccactg

SEQ ID NO: 58209 - DNA, 25 bp, Saccharomyces pastorianus
atggcaacgtatcagcggtagttac

SEQ ID NO: 58210 - DNA, 25 bp, Saccharomyces pastorianus
aaaggccctcgatatctccattgat

SEQ ID NO: 58211 - DNA, 25 bp, Saccharomyces pastorianus
cccctctgaactatttgatactgtc

SEQ ID NO: 58212 - DNA, 25 bp, Saccharomyces pastorianus
atctccattgattctgaactcgata

SEQ ID NO: 58213 - DNA, 25 bp, Saccharomyces pastorianus
taaggagactcttccacaagtcaat

SEQ ID NO: 58214 - DNA, 25 bp, Saccharomyces pastorianus
gaactcgataatcttctgaaatggc

SEQ ID NO: 58215 - DNA, 25 bp, Saccharomyces pastorianus
ggagtaaactggtcttgaagccgtt

SEQ ID NO: 58216 - DNA, 25 bp, Saccharomyces pastorianus
gccactgttgttggccgactagtta

SEQ ID NO: 58217 - DNA, 25 bp, Saccharomyces pastorianus
atggtactttcagctcctaaaaata

SEQ ID NO: 58218 - DNA, 25 bp, Saccharomyces pastorianus
aaaccggcgcattgtctattggtga

SEQ ID NO: 58219 - DNA, 25 bp, Saccharomyces pastorianus
gtagttctcgttattcagggttcac

SEQ ID NO: 58220 - DNA, 25 bp, Saccharomyces pastorianus
gaaaaacactgaggcctctgtggac

SEQ ID NO: 58221 - DNA, 25 bp, Saccharomyces pastorianus
gaggcctctgtggacatcattatac

SEQ ID NO: 58222 - DNA, 25 bp, Saccharomyces pastorianus
cagccaagacatcttagcaggcgat

SEQ ID NO: 58223 - DNA, 25 bp, Saccharomyces pastorianus
ggacaattcccaaaagcctttggca

SEQ ID NO: 58224 - DNA, 25 bp, Saccharomyces pastorianus
gatttcacgatgtttataccagatg

SEQ ID NO: 58225 - DNA, 25 bp, Saccharomyces pastorianus
cagggttcactggtgctgaagaaac

SEQ ID NO: 58226 - DNA, 25 bp, Saccharomyces pastorianus
gaagagccagtgacagaccgcatca

SEQ ID NO: 58227 - DNA, 25 bp, Saccharomyces pastorianus
caaaatgtttcctttcaatcctatt

SEQ ID NO: 58228 - DNA, 25 bp, Saccharomyces pastorianus
caaggacagtgttgcaggcgatgaa

SEQ ID NO: 58229 - DNA, 25 bp, Saccharomyces pastorianus
gaggaaacaccgtagttctcgttat

SEQ ID NO: 58230 - DNA, 25 bp, Saccharomyces pastorianus
atcgcgaaaccctctagaatcggaa

SEQ ID NO: 58231 - DNA, 25 bp, Saccharomyces pastorianus
acgcctcctcctggtttaagttcag

SEQ ID NO: 58232 - DNA, 25 bp, Saccharomyces pastorianus
aagccgctttgatggaaacgtgtct

SEQ ID NO: 58233 - DNA, 25 bp, Saccharomyces pastorianus
acggatggtcctcaaagattcccca

SEQ ID NO: 58234 - DNA, 25 bp, Saccharomyces pastorianus
aggagttccaggaatggctccacca

SEQ ID NO: 58235 - DNA, 25 bp, Saccharomyces pastorianus
acctccgcctggaatgactacagta

SEQ ID NO: 58236 - DNA, 25 bp, Saccharomyces pastorianus
aataataatggtgcctacccagccc

SEQ ID NO: 58237 - DNA, 25 bp, Saccharomyces pastorianus
caggtacgtttagctcaggagttcc

SEQ ID NO: 58238 - DNA, 25 bp, Saccharomyces pastorianus
tcaattgcaccaccacctggaatgg

SEQ ID NO: 58239 - DNA, 25 bp, Saccharomyces pastorianus
aggttccaagtatccaaggcatcgt

SEQ ID NO: 58240 - DNA, 25 bp, Saccharomyces pastorianus
tccagggctttttagtaccacagac

SEQ ID NO: 58241 - DNA, 25 bp, Saccharomyces pastorianus
gttcatcgatttaattctcttccgt

SEQ ID NO: 58242 - DNA, 25 bp, Saccharomyces pastorianus
caacctgtcgttatggaagaagaat

SEQ ID NO: 58243 - DNA, 25 bp, Saccharomyces pastorianus
gaaattactatcaaactgcgtacta

SEQ ID NO: 58244 - DNA, 25 bp, Saccharomyces pastorianus
cccaacgtcaacctgtcgttatgga

SEQ ID NO: 58245 - DNA, 25 bp, Saccharomyces pastorianus
gtatcaaaccatgttcaggattcaa

SEQ ID NO: 58246 - DNA, 25 bp, Saccharomyces pastorianus
gtactaatgattttgttcctccctc

SEQ ID NO: 58247 - DNA, 25 bp, Saccharomyces pastorianus
gatttaattctcttccgtccaaaat

SEQ ID NO: 58248 - DNA, 25 bp, Saccharomyces pastorianus
gggcgctcactagagaacaaattta

SEQ ID NO: 58249 - DNA, 25 bp, Saccharomyces pastorianus
gcaacagaaagcgatgttcatcgat

SEQ ID NO: 58250 - DNA, 25 bp, Saccharomyces pastorianus
tttattcgtatcaaaccatgttcag

SEQ ID NO: 58251 - DNA, 25 bp, Saccharomyces pastorianus
ttgttcctccctccagaaaaaacag

SEQ ID NO: 58252 - DNA, 25 bp, Saccharomyces pastorianus
ggctcttctagagaactgcagattc

SEQ ID NO: 58253 - DNA, 25 bp, Saccharomyces pastorianus
ggcaggactatcattccgagtttga

SEQ ID NO: 58254 - DNA, 25 bp, Saccharomyces pastorianus
gcatccatcgccaaatgtaccggag

SEQ ID NO: 58255 - DNA, 25 bp, Saccharomyces pastorianus
gagataaggttcaggctcttctaga

SEQ ID NO: 58256 - DNA, 25 bp, Saccharomyces pastorianus
gagttttgaagatctacatggccaa

SEQ ID NO: 58257 - DNA, 25 bp, Saccharomyces pastorianus
gtatgtgacgaagttcaacccttta

SEQ ID NO: 58258 - DNA, 25 bp, Saccharomyces pastorianus
gaatcatcgagtcaccagatgggct

SEQ ID NO: 58259 - DNA, 25 bp, Saccharomyces pastorianus
gggctggatcaattcatcaaggatt

SEQ ID NO: 58260 - DNA, 25 bp, Saccharomyces pastorianus
gattaagaacatccccttacctgaa

SEQ ID NO: 58261 - DNA, 25 bp, Saccharomyces pastorianus
aaatatgtggctagttggcaggact

SEQ ID NO: 58262 - DNA, 25 bp, Saccharomyces pastorianus
gttcgcaattagaagcttccatgag

SEQ ID NO: 58263 - DNA, 25 bp, Saccharomyces pastorianus
aagccggcccacaagagcattacca

SEQ ID NO: 58264 - DNA, 25 bp, Saccharomyces pastorianus
aagttctgggtcaagccacgggtca

SEQ ID NO: 58265 - DNA, 25 bp, Saccharomyces pastorianus
aagccacgggtcaagctctggatca

SEQ ID NO: 58266 - DNA, 25 bp, Saccharomyces pastorianus
agcaagtcgactacggtgccgagct

SEQ ID NO: 58267 - DNA, 25 bp, Saccharomyces pastorianus
gtgccgagctctagcaccaagccgg

SEQ ID NO: 58268 - DNA, 25 bp, Saccharomyces pastorianus
ggtcacgggtcaagttctgggtcaa

SEQ ID NO: 58269 - DNA, 25 bp, Saccharomyces pastorianus
ggtcatgcgtctggtcacgggtcaa

SEQ ID NO: 58270 - DNA, 25 bp, Saccharomyces pastorianus
ttccaaatcaggcactagctccgct

SEQ ID NO: 58271 - DNA, 25 bp, Saccharomyces pastorianus
gtaggtagtagcacaggccaccgca

SEQ ID NO: 58272 - DNA, 25 bp, Saccharomyces pastorianus
aagctctggatcaggcactaggtca

SEQ ID NO: 58273 - DNA, 25 bp, Saccharomyces pastorianus
acggcggcacagtccagcaagtcga

SEQ ID NO: 58274 - DNA, 25 bp, Saccharomyces pastorianus
cagtttctgaaacgctctggagcca

SEQ ID NO: 58275 - DNA, 25 bp, Saccharomyces pastorianus
tcgcgtattcgctcttcttgaatga

SEQ ID NO: 58276 - DNA, 25 bp, Saccharomyces pastorianus
tagtgtgctgtttggcgcagtcgac

SEQ ID NO: 58277 - DNA, 25 bp, Saccharomyces pastorianus
gagaacttcgtgctggccaacaagc

SEQ ID NO: 58278 - DNA, 25 bp, Saccharomyces pastorianus
cggccgacttatgggtctccagtaa

SEQ ID NO: 58279 - DNA, 25 bp, Saccharomyces pastorianus
gtttgccgtggccaataagtccaac

SEQ ID NO: 58280 - DNA, 25 bp, Saccharomyces pastorianus
gcctgcccatgctagaagtgacgta

SEQ ID NO: 58281 - DNA, 25 bp, Saccharomyces pastorianus
ggagccatcgatgcgatcgcgtatt

SEQ ID NO: 58282 - DNA, 25 bp, Saccharomyces pastorianus
tgaattgcgaccagtacggcgtgtt

SEQ ID NO: 58283 - DNA, 25 bp, Saccharomyces pastorianus
attgcgggtccacgatgaattgcga

SEQ ID NO: 58284 - DNA, 25 bp, Saccharomyces pastorianus
aatgatgagtcgcagacctccggta

SEQ ID NO: 58285 - DNA, 25 bp, Saccharomyces pastorianus
agacaggcaatgcaaccgccattct

SEQ ID NO: 58286 - DNA, 25 bp, Saccharomyces pastorianus
tactatgagtacgagtgcccggcca

SEQ ID NO: 58287 - DNA, 25 bp, Saccharomyces pastorianus
tgtcagacttcaccatgcagaccaa

SEQ ID NO: 58288 - DNA, 25 bp, Saccharomyces pastorianus
attgaagtcatcagatccaccgtcc

SEQ ID NO: 58289 - DNA, 25 bp, Saccharomyces pastorianus
tacgcctccggcaaagaagacattg

SEQ ID NO: 58290 - DNA, 25 bp, Saccharomyces pastorianus
tgcggagtgcctacgtggtctacga

SEQ ID NO: 58291 - DNA, 25 bp, Saccharomyces pastorianus
agtgacaacgccactagcgtggtct

SEQ ID NO: 58292 - DNA, 25 bp, Saccharomyces pastorianus
tggcgatcgtgcctcagacaggcaa

SEQ ID NO: 58293 - DNA, 25 bp, Saccharomyces pastorianus
attctcggtgactcgttcttgcgga

SEQ ID NO: 58294 - DNA, 25 bp, Saccharomyces pastorianus
ggccaagagtctgaacgctacgttt

SEQ ID NO: 58295 - DNA, 25 bp, Saccharomyces pastorianus
aacgtcggaacctgcgtcttggcga

SEQ ID NO: 58296 - DNA, 25 bp, Saccharomyces pastorianus
acgctgagttagttgcaaccttgca

SEQ ID NO: 58297 - DNA, 25 bp, Saccharomyces pastorianus
gagacgatctcgctgattcagtaca

SEQ ID NO: 58298 - DNA, 25 bp, Saccharomyces pastorianus
tgaagtggcagcatccatggaccgt

SEQ ID NO: 58299 - DNA, 25 bp, Saccharomyces pastorianus
gggcagcttcagaattaacgaacaa

SEQ ID NO: 58300 - DNA, 25 bp, Saccharomyces pastorianus
cttgcaagccaagggtataccactg

SEQ ID NO: 58301 - DNA, 25 bp, Saccharomyces pastorianus
ggaagcctatcctctagttagtgaa

SEQ ID NO: 58302 - DNA, 25 bp, Saccharomyces pastorianus
gtccaaaagggcttacgctgagtta

SEQ ID NO: 58303 - DNA, 25 bp, Saccharomyces pastorianus
tatctgagacaggaacaggcgtcac

SEQ ID NO: 58304 - DNA, 25 bp, Saccharomyces pastorianus
aggcgtcacgaaagtctgcaaacac

SEQ ID NO: 58305 - DNA, 25 bp, Saccharomyces pastorianus
gaagaacaccgttcagatacttctg

SEQ ID NO: 58306 - DNA, 25 bp, Saccharomyces pastorianus
tccatggaccgttcagatacttctg

SEQ ID NO: 58307 - DNA, 25 bp, Saccharomyces pastorianus
gacttgcaatacttcacagagatct

SEQ ID NO: 58308 - DNA, 25 bp, Saccharomyces pastorianus
atggttccgtttcctgcatgatgaa

SEQ ID NO: 58309 - DNA, 25 bp, Saccharomyces pastorianus
aaacgagagctttttctgtcggcgt

SEQ ID NO: 58310 - DNA, 25 bp, Saccharomyces pastorianus
aaggatgctctacacttccaaacat

SEQ ID NO: 58311 - DNA, 25 bp, Saccharomyces pastorianus
aggccttctagaggcatggttccgt

SEQ ID NO: 58312 - DNA, 25 bp, Saccharomyces pastorianus
gagatctacgactataccttccatt

SEQ ID NO: 58313 - DNA, 25 bp, Saccharomyces pastorianus
tacaatgaagctgcagcctggcctt

SEQ ID NO: 58314 - DNA, 25 bp, Saccharomyces pastorianus
atattggacactgcttttccagcca

SEQ ID NO: 58315 - DNA, 25 bp, Saccharomyces pastorianus
ctgtcggcgtggttcatgcaaggat

SEQ ID NO: 58316 - DNA, 25 bp, Saccharomyces pastorianus
gaagacttgggctacaatctggaag

SEQ ID NO: 58317 - DNA, 25 bp, Saccharomyces pastorianus
ggcatatgctgctccaatttttcaa

SEQ ID NO: 58318 - DNA, 25 bp, Saccharomyces pastorianus
gaatgtctgtatcctaactgtagca

SEQ ID NO: 58319 - DNA, 25 bp, Saccharomyces pastorianus
gatagaccatactcatgcgacttcc

SEQ ID NO: 58320 - DNA, 25 bp, Saccharomyces pastorianus
gacttccccagttgcgataaggcgt

SEQ ID NO: 58321 - DNA, 25 bp, Saccharomyces pastorianus
agattcaaccgcgaagatgccctga

SEQ ID NO: 58322 - DNA, 25 bp, Saccharomyces pastorianus
aagaagtatgtttgcccctgtggta

SEQ ID NO: 58323 - DNA, 25 bp, Saccharomyces pastorianus
gatgccctgatggtgcacagaagtc

SEQ ID NO: 58324 - DNA, 25 bp, Saccharomyces pastorianus
aagtcgtatgatttgcgcaggcggt

SEQ ID NO: 58325 - DNA, 25 bp, Saccharomyces pastorianus
aggtcacacatccaaactcatttgc

SEQ ID NO: 58326 - DNA, 25 bp, Saccharomyces pastorianus
acatgggttattggacccgacgccg

SEQ ID NO: 58327 - DNA, 25 bp, Saccharomyces pastorianus
gaggagcgtatttggcagcccgcat

SEQ ID NO: 58328 - DNA, 25 bp, Saccharomyces pastorianus
gataatagccaggacgacgcctatg

SEQ ID NO: 58329 - DNA, 25 bp, Saccharomyces pastorianus
tgacaacaacaaaccttcacactac

SEQ ID NO: 58330 - DNA, 25 bp, Saccharomyces pastorianus
agcaatccattttgaacatgtccaa

SEQ ID NO: 58331 - DNA, 25 bp, Saccharomyces pastorianus
ggtcccagtggtacagcaatatttg

SEQ ID NO: 58332 - DNA, 25 bp, Saccharomyces pastorianus
gatttggacattcccatagtgccct

SEQ ID NO: 58333 - DNA, 25 bp, Saccharomyces pastorianus
aggacaggcgatgaccctagtgata

SEQ ID NO: 58334 - DNA, 25 bp, Saccharomyces pastorianus
gcaatatttgggttcctgggtcata

SEQ ID NO: 58335 - DNA, 25 bp, Saccharomyces pastorianus
aatgaggatttcacccagatagagg

SEQ ID NO: 58336 - DNA, 25 bp, Saccharomyces pastorianus
gggacaaccatacttcaaggcagaa

SEQ ID NO: 58337 - DNA, 25 bp, Saccharomyces pastorianus
agaaatcaatggcttcgcacaagag

SEQ ID NO: 58338 - DNA, 25 bp, Saccharomyces pastorianus
aaagaccctcaacccatgggactga

SEQ ID NO: 58339 - DNA, 25 bp, Saccharomyces pastorianus
gctggaattttgctggtgacaacaa

SEQ ID NO: 58340 - DNA, 25 bp, Saccharomyces pastorianus
gaaaacctgtcgcagttgaccagaa

SEQ ID NO: 58341 - DNA, 25 bp, Saccharomyces pastorianus
gttggatctggaagtgacggctcta

SEQ ID NO: 58342 - DNA, 25 bp, Saccharomyces pastorianus
gcttgcattcatcccgagacaacga

SEQ ID NO: 58343 - DNA, 25 bp, Saccharomyces pastorianus
gaaaccgccacattagagctgccat

SEQ ID NO: 58344 - DNA, 25 bp, Saccharomyces pastorianus
gaaacgacacactcactgcatctgg

SEQ ID NO: 58345 - DNA, 25 bp, Saccharomyces pastorianus
agggtacgttgtgtggtccacgaca

SEQ ID NO: 58346 - DNA, 25 bp, Saccharomyces pastorianus
tttcgtcttggtacccaggtggaag

SEQ ID NO: 58347 - DNA, 25 bp, Saccharomyces pastorianus
tacgttctcgccatggacgtgatat

SEQ ID NO: 58348 - DNA, 25 bp, Saccharomyces pastorianus
ggacaagctcctctgtgtacgttct

SEQ ID NO: 58349 - DNA, 25 bp, Saccharomyces pastorianus
gttcttggtaactttgtcgacgtct

SEQ ID NO: 58350 - DNA, 25 bp, Saccharomyces pastorianus
gagctgtcactcttgggccggacaa

SEQ ID NO: 58351 - DNA, 25 bp, Saccharomyces pastorianus
agccgatagtgtgctttctctacaa

SEQ ID NO: 58352 - DNA, 25 bp, Saccharomyces pastorianus
tattgctaatggactgatggatgac

SEQ ID NO: 58353 - DNA, 25 bp, Saccharomyces pastorianus
tagtgacgtgatacctgcatattat

SEQ ID NO: 58354 - DNA, 25 bp, Saccharomyces pastorianus
acatcttctttattttcggtaccat

SEQ ID NO: 58355 - DNA, 25 bp, Saccharomyces pastorianus
tatcaagctcagacgaaggtggcct

SEQ ID NO: 58356 - DNA, 25 bp, Saccharomyces pastorianus
agagttgggccatgaagatttgata

SEQ ID NO: 58357 - DNA, 25 bp, Saccharomyces pastorianus
acaaggttcccttagacatcagtaa

SEQ ID NO: 58358 - DNA, 25 bp, Saccharomyces pastorianus
gatctaatcgtacatctattgccaa

SEQ ID NO: 58359 - DNA, 25 bp, Saccharomyces pastorianus
gcattaccatttccatgtagccaat

SEQ ID NO: 58360 - DNA, 25 bp, Saccharomyces pastorianus
ctattgccaaaagacgatgcggatg

SEQ ID NO: 58361 - DNA, 25 bp, Saccharomyces pastorianus
gacaacgctattttcaaattccggg

SEQ ID NO: 58362 - DNA, 25 bp, Saccharomyces pastorianus
attaccccagacagtttacgtagag

SEQ ID NO: 58363 - DNA, 25 bp, Saccharomyces pastorianus
gtgacgccgaacatattaccccaga

SEQ ID NO: 58364 - DNA, 25 bp, Saccharomyces pastorianus
ttgttcctgctatcatttctgctgt

SEQ ID NO: 58365 - DNA, 25 bp, Saccharomyces pastorianus
tgccggtagggatcacgatggttac

SEQ ID NO: 58366 - DNA, 25 bp, Saccharomyces pastorianus
gacacatacttgaagccttatcctg

SEQ ID NO: 58367 - DNA, 25 bp, Saccharomyces pastorianus
atcattctagtgagagacctgccaa

SEQ ID NO: 58368 - DNA, 25 bp, Saccharomyces pastorianus
agaagctgctgtcgtcggtatccca

SEQ ID NO: 58369 - DNA, 25 bp, Saccharomyces pastorianus
ggtgatttatccactttggccaact

SEQ ID NO: 58370 - DNA, 25 bp, Saccharomyces pastorianus
atccatggccagatccgtttggaac

SEQ ID NO: 58371 - DNA, 25 bp, Saccharomyces pastorianus
ataatgccgctgaaggtgacgccga

SEQ ID NO: 58372 - DNA, 25 bp, Saccharomyces pastorianus
ttatttcacaggtgacggtgccggt

SEQ ID NO: 58373 - DNA, 25 bp, Saccharomyces pastorianus
gaaaggtttctcaggttgccggtgt

SEQ ID NO: 58374 - DNA, 25 bp, Saccharomyces pastorianus
catacattcagtagtctttgccggg

SEQ ID NO: 58375 - DNA, 25 bp, Saccharomyces pastorianus
gatcgtgtcgttgacgcaaactcta

SEQ ID NO: 58376 - DNA, 25 bp, Saccharomyces pastorianus
ctgttgctcgtattggtgccataca

SEQ ID NO: 58377 - DNA, 25 bp, Saccharomyces pastorianus
agtcgttgctatgctggctgttgct

SEQ ID NO: 58378 - DNA, 25 bp, Saccharomyces pastorianus
aatgatcccagaggcagtcgttgct

SEQ ID NO: 58379 - DNA, 25 bp, Saccharomyces pastorianus
tttattatacacatccggttccacc

SEQ ID NO: 58380 - DNA, 25 bp, Saccharomyces pastorianus
gcctcctgtctcatgtgatgctgaa

SEQ ID NO: 58381 - DNA, 25 bp, Saccharomyces pastorianus
ttctggtggcacgaagaggctgcta

SEQ ID NO: 58382 - DNA, 25 bp, Saccharomyces pastorianus
gacaccgtcgctatatatttaccaa

SEQ ID NO: 58383 - DNA, 25 bp, Saccharomyces pastorianus
cggttctccaaagggtgtcgtccat

SEQ ID NO: 58384 - DNA, 25 bp, Saccharomyces pastorianus
ccaacagagaggacttcaatcatga

SEQ ID NO: 58385 - DNA, 25 bp, Saccharomyces pastorianus
ggacatcataggttgccaaacagca

SEQ ID NO: 58386 - DNA, 25 bp, Saccharomyces pastorianus
gaaggccacttagcagatattggaa

SEQ ID NO: 58387 - DNA, 25 bp, Saccharomyces pastorianus
tcaaagctatatttccaacagagag

SEQ ID NO: 58388 - DNA, 25 bp, Saccharomyces pastorianus
caaatttgccactttaagagaactg

SEQ ID NO: 58389 - DNA, 25 bp, Saccharomyces pastorianus
gggtagcgactttgatagacaaatt

SEQ ID NO: 58390 - DNA, 25 bp, Saccharomyces pastorianus
acctgaattactagaatcgttgacc

SEQ ID NO: 58391 - DNA, 25 bp, Saccharomyces pastorianus
gagaactggcaaacttatttactgt

SEQ ID NO: 58392 - DNA, 25 bp, Saccharomyces pastorianus
tcgtggttacaaaggacatcatagg

SEQ ID NO: 58393 - DNA, 25 bp, Saccharomyces pastorianus
aacttatttactgttcaacctgaat

SEQ ID NO: 58394 - DNA, 25 bp, Saccharomyces pastorianus
atcgttgaccaaagaaggccactta

SEQ ID NO: 58395 - DNA, 25 bp, Saccharomyces pastorianus
aaccattgcggtgatatctacgaaa

SEQ ID NO: 58396 - DNA, 25 bp, Saccharomyces pastorianus
attgcattagaagtggcctactgga

SEQ ID NO: 58397 - DNA, 25 bp, Saccharomyces pastorianus
atcaatttcaatcaagtccatcttc

SEQ ID NO: 58398 - DNA, 25 bp, Saccharomyces pastorianus
cgttgtggagtctaccgcaagagtt

SEQ ID NO: 58399 - DNA, 25 bp, Saccharomyces pastorianus
acaaataactctacgtccacacaat

SEQ ID NO: 58400 - DNA, 25 bp, Saccharomyces pastorianus
tacgaaattttccacaattctgtgt

SEQ ID NO: 58401 - DNA, 25 bp, Saccharomyces pastorianus
cgcacaaactctttatatggctcgt

SEQ ID NO: 58402 - DNA, 25 bp, Saccharomyces pastorianus
ggaactcattcctaacaaggcgcac

SEQ ID NO: 58403 - DNA, 25 bp, Saccharomyces pastorianus
gaattttctaaagctcattgcaatg

SEQ ID NO: 58404 - DNA, 25 bp, Saccharomyces pastorianus
gtccatcttcttgccactattgaat

SEQ ID NO: 58405 - DNA, 25 bp, Saccharomyces pastorianus
aaggcgcacctatacattttagaaa

SEQ ID NO: 58406 - DNA, 25 bp, Saccharomyces pastorianus
ctttaatctaatctttccttgtcta

SEQ ID NO: 58407 - DNA, 25 bp, Saccharomyces pastorianus
gcagacattgcagtataccatttct

SEQ ID NO: 58408 - DNA, 25 bp, Saccharomyces pastorianus
accactttgtggtcgctgtattcga

SEQ ID NO: 58409 - DNA, 25 bp, Saccharomyces pastorianus
aagactggcgtatcgcttatatacc

SEQ ID NO: 58410 - DNA, 25 bp, Saccharomyces pastorianus
aacagttcgttgtcgacatccggcg

SEQ ID NO: 58411 - DNA, 25 bp, Saccharomyces pastorianus
gatgttgcacattttaggcttcctt

SEQ ID NO: 58412 - DNA, 25 bp, Saccharomyces pastorianus
taccttaattgtgtcatctctgtgc

SEQ ID NO: 58413 - DNA, 25 bp, Saccharomyces pastorianus
ttggccttttcactagcagacattg

SEQ ID NO: 58414 - DNA, 25 bp, Saccharomyces pastorianus
atctctgtgcttttgtgtgtgtttg

SEQ ID NO: 58415 - DNA, 25 bp, Saccharomyces pastorianus
ttaggcttccttgctagaatcgtag

SEQ ID NO: 58416 - DNA, 25 bp, Saccharomyces pastorianus
gtttgtgtttgtaattactctcctg

SEQ ID NO: 58417 - DNA, 25 bp, Saccharomyces pastorianus
tgaacgagatccttttccagggctt

SEQ ID NO: 58418 - DNA, 25 bp, Saccharomyces pastorianus
gagaccattacatttgccgcaagag

SEQ ID NO: 58419 - DNA, 25 bp, Saccharomyces pastorianus
gctgatgcagctccaatttaacctt

SEQ ID NO: 58420 - DNA, 25 bp, Saccharomyces pastorianus
gattctttgattcctgtcgacatgc

SEQ ID NO: 58421 - DNA, 25 bp, Saccharomyces pastorianus
agcctagaactaactcggacattga

SEQ ID NO: 58422 - DNA, 25 bp, Saccharomyces pastorianus
aaagattgggtcaactccacgtcgc

SEQ ID NO: 58423 - DNA, 25 bp, Saccharomyces pastorianus
agggcttcacagtaatccatttcaa

SEQ ID NO: 58424 - DNA, 25 bp, Saccharomyces pastorianus
gcaacaatcgatgcgtcactcacga

SEQ ID NO: 58425 - DNA, 25 bp, Saccharomyces pastorianus
gtgaccaggttagcatcgacaccat

SEQ ID NO: 58426 - DNA, 25 bp, Saccharomyces pastorianus
gacattcgtgggtttcttcgatcta

SEQ ID NO: 58427 - DNA, 25 bp, Saccharomyces pastorianus
ggacaaatcgacctgtaccacaacg

SEQ ID NO: 58428 - DNA, 25 bp, Saccharomyces pastorianus
tagcaacgacccttcaatatccatt

SEQ ID NO: 58429 - DNA, 25 bp, Saccharomyces pastorianus
atgcgtactagcaacgacccttcaa

SEQ ID NO: 58430 - DNA, 25 bp, Saccharomyces pastorianus
gaagttttgtcaagtgtttgttaca

SEQ ID NO: 58431 - DNA, 25 bp, Saccharomyces pastorianus
gttatgggccaattattgaactatt

SEQ ID NO: 58432 - DNA, 25 bp, Saccharomyces pastorianus
ttgtttctcaataatgttatgggcc

SEQ ID NO: 58433 - DNA, 25 bp, Saccharomyces pastorianus
tttgaattcctccatgcgtactagc

SEQ ID NO: 58434 - DNA, 25 bp, Saccharomyces pastorianus
aaggttcaggaatgcattaatcggt

SEQ ID NO: 58435 - DNA, 25 bp, Saccharomyces pastorianus
gaatgcgaatcattgaaccaaatgg

SEQ ID NO: 58436 - DNA, 25 bp, Saccharomyces pastorianus
aagatgatgcgaattcagagacgaa

SEQ ID NO: 58437 - DNA, 25 bp, Saccharomyces pastorianus
aataatgcagcattggcagaagttt

SEQ ID NO: 58438 - DNA, 25 bp, Saccharomyces pastorianus
cctactatcatggttgtttctcaat

SEQ ID NO: 58439 - DNA, 25 bp, Saccharomyces pastorianus
actaatttgaagtctggcatcgaag

SEQ ID NO: 58440 - DNA, 25 bp, Saccharomyces pastorianus
tatgctaccacctaccgttttacta

SEQ ID NO: 58441 - DNA, 25 bp, Saccharomyces pastorianus
gttgcaagccatatcatccgaagac

SEQ ID NO: 58442 - DNA, 25 bp, Saccharomyces pastorianus
agacccgcaagatatcgataccgat

SEQ ID NO: 58443 - DNA, 25 bp, Saccharomyces pastorianus
atacgatgcagatgagccattcaaa

SEQ ID NO: 58444 - DNA, 25 bp, Saccharomyces pastorianus
gaagagtgttgtccctatgtttgaa

SEQ ID NO: 58445 - DNA, 25 bp, Saccharomyces pastorianus
aaaatcgattctatgctaccaccta

SEQ ID NO: 58446 - DNA, 25 bp, Saccharomyces pastorianus
atgtcttgcacacaattagtaccaa

SEQ ID NO: 58447 - DNA, 25 bp, Saccharomyces pastorianus
ttgggagtccagtgaatacgatgca

SEQ ID NO: 58448 - DNA, 25 bp, Saccharomyces pastorianus
ggatgatatgcttgacggtttgttg

SEQ ID NO: 58449 - DNA, 25 bp, Saccharomyces pastorianus
gatggtgacatttccaaattgctag

SEQ ID NO: 58450 - DNA, 25 bp, Saccharomyces pastorianus
gactccgagactggtaatttcctcc

SEQ ID NO: 58451 - DNA, 25 bp, Saccharomyces pastorianus
tgttaaatctgtttggcttgttcca

SEQ ID NO: 58452 - DNA, 25 bp, Saccharomyces pastorianus
ccccgataaattccccactaatgag

SEQ ID NO: 58453 - DNA, 25 bp, Saccharomyces pastorianus
atttcctacctattctgcagcagta

SEQ ID NO: 58454 - DNA, 25 bp, Saccharomyces pastorianus
tgtgactacaaacgaccaaggtgag

SEQ ID NO: 58455 - DNA, 25 bp, Saccharomyces pastorianus
cgcattatgggattgttgtgactac

SEQ ID NO: 58456 - DNA, 25 bp, Saccharomyces pastorianus
ggcttgttccaggacgcatttgaat

SEQ ID NO: 58457 - DNA, 25 bp, Saccharomyces pastorianus
atgagatcccattgacgctgactag

SEQ ID NO: 58458 - DNA, 25 bp, Saccharomyces pastorianus
gtggtgcgatacttgggacctcata

SEQ ID NO: 58459 - DNA, 25 bp, Saccharomyces pastorianus
caccacaaatagtgccagtttcaaa

SEQ ID NO: 58460 - DNA, 25 bp, Saccharomyces pastorianus
ttgacgctgactagagactccgaga

SEQ ID NO: 58461 - DNA, 25 bp, Saccharomyces pastorianus
gatacttgaaacacgtctcaagaag

SEQ ID NO: 58462 - DNA, 25 bp, Saccharomyces pastorianus
aaacacgtctcaagaagattcaaga

SEQ ID NO: 58463 - DNA, 25 bp, Saccharomyces pastorianus
aacacgtctcaagaagattcaagaa

SEQ ID NO: 58464 - DNA, 25 bp, Saccharomyces pastorianus
atgagatacttgaaacacgtctcaa

SEQ ID NO: 58465 - DNA, 25 bp, Saccharomyces pastorianus
cgtctcaagaagattcaagaacggt

SEQ ID NO: 58466 - DNA, 25 bp, Saccharomyces pastorianus
gaaacacgtctcaagaagattcaag

SEQ ID NO: 58467 - DNA, 25 bp, Saccharomyces pastorianus
tacttgaaacacgtctcaagaagat

SEQ ID NO: 58468 - DNA, 25 bp, Saccharomyces pastorianus
ttgaaacacgtctcaagaagattca

SEQ ID NO: 58469 - DNA, 25 bp, Saccharomyces pastorianus
tgagatacttgaaacacgtctcaag

SEQ ID NO: 58470 - DNA, 25 bp, Saccharomyces pastorianus
acacgtctcaagaagattcaagaac

SEQ ID NO: 58471 - DNA, 25 bp, Saccharomyces pastorianus
gagatacttgaaacacgtctcaaga

SEQ ID NO: 58472 - DNA, 25 bp, Saccharomyces pastorianus
acgtgtcacaccaggcggattttca

SEQ ID NO: 58473 - DNA, 25 bp, Saccharomyces pastorianus
taagaacgggcccattgaccactca

SEQ ID NO: 58474 - DNA, 25 bp, Saccharomyces pastorianus
gcaatctccgtcatatgctaacaga

SEQ ID NO: 58475 - DNA, 25 bp, Saccharomyces pastorianus
gaaatttacaaaccaacgcctcaca

SEQ ID NO: 58476 - DNA, 25 bp, Saccharomyces pastorianus
gcatcagagcgggaactcgccaatt

SEQ ID NO: 58477 - DNA, 25 bp, Saccharomyces pastorianus
agcacaattgcttcctctgagaaac

SEQ ID NO: 58478 - DNA, 25 bp, Saccharomyces pastorianus
ctggccgcccattggtcaatataag

SEQ ID NO: 58479 - DNA, 25 bp, Saccharomyces pastorianus
gaatccgttatacccatcacagcaa

SEQ ID NO: 58480 - DNA, 25 bp, Saccharomyces pastorianus
cggattttcacagtttatgccacct

SEQ ID NO: 58481 - DNA, 25 bp, Saccharomyces pastorianus
gccgctctaatcctcctataaagat

SEQ ID NO: 58482 - DNA, 25 bp, Saccharomyces pastorianus
tgaccactcaacctatgcatcagag

SEQ ID NO: 58483 - DNA, 25 bp, Saccharomyces pastorianus
ttctgcgcaggctcacaggagatac

SEQ ID NO: 58484 - DNA, 25 bp, Saccharomyces pastorianus
agaggcttacacagggtcgtttctt

SEQ ID NO: 58485 - DNA, 25 bp, Saccharomyces pastorianus
tatggtgtcctgttaggtacccaat

SEQ ID NO: 58486 - DNA, 25 bp, Saccharomyces pastorianus
gattgttactttactttctgcgcag

SEQ ID NO: 58487 - DNA, 25 bp, Saccharomyces pastorianus
aattgcatcaagacccactttcatc

SEQ ID NO: 58488 - DNA, 25 bp, Saccharomyces pastorianus
gtatgccatggaagcgttgttacgc

SEQ ID NO: 58489 - DNA, 25 bp, Saccharomyces pastorianus
gaaaatgttctcgttgtttccacaa

SEQ ID NO: 58490 - DNA, 25 bp, Saccharomyces pastorianus
ccaattggccttatgggatgctaat

SEQ ID NO: 58491 - DNA, 25 bp, Saccharomyces pastorianus
ttcgagttcactgctttacaagagg

SEQ ID NO: 58492 - DNA, 25 bp, Saccharomyces pastorianus
tgatgttaccagtacgggaggcaac

SEQ ID NO: 58493 - DNA, 25 bp, Saccharomyces pastorianus
gtcgtttctttcgagtagaggcgtt

SEQ ID NO: 58494 - DNA, 25 bp, Saccharomyces pastorianus
aaatactctacttcgccatttggta

SEQ ID NO: 58495 - DNA, 25 bp, Saccharomyces pastorianus
gaaatcacggattcgagtctcaaaa

SEQ ID NO: 58496 - DNA, 25 bp, Saccharomyces pastorianus
gacatctgggatgctcaatcaagag

SEQ ID NO: 58497 - DNA, 25 bp, Saccharomyces pastorianus
gatagctttaccactccaatgacat

SEQ ID NO: 58498 - DNA, 25 bp, Saccharomyces pastorianus
ggcaatatgtcttcagaggctctaa

SEQ ID NO: 58499 - DNA, 25 bp, Saccharomyces pastorianus
atagaagcttgacatcgggtctgaa

SEQ ID NO: 58500 - DNA, 25 bp, Saccharomyces pastorianus
gcctgacttatctgctctttatgac

SEQ ID NO: 58501 - DNA, 25 bp, Saccharomyces pastorianus
gaagcggactcttccaacaactttt

SEQ ID NO: 58502 - DNA, 25 bp, Saccharomyces pastorianus
aatcaacacgtgtctatcgtcacct

SEQ ID NO: 58503 - DNA, 25 bp, Saccharomyces pastorianus
gagagtttgaagagctttcccgaaa

SEQ ID NO: 58504 - DNA, 25 bp, Saccharomyces pastorianus
atataccactggctaatgcgcctga

SEQ ID NO: 58505 - DNA, 25 bp, Saccharomyces pastorianus
gcacactgttgcaccaaacttatca

SEQ ID NO: 58506 - DNA, 25 bp, Saccharomyces pastorianus
gaacaagggtcgtatttctagatac

SEQ ID NO: 58507 - DNA, 25 bp, Saccharomyces pastorianus
gaattctacaacactggtaagccaa

SEQ ID NO: 58508 - DNA, 25 bp, Saccharomyces pastorianus
gaagccatggaactttataacaaag

SEQ ID NO: 58509 - DNA, 25 bp, Saccharomyces pastorianus
tgaattagccattcaagaagccatg

SEQ ID NO: 58510 - DNA, 25 bp, Saccharomyces pastorianus
attactctgaggaaccatctaatgt

SEQ ID NO: 58511 - DNA, 25 bp, Saccharomyces pastorianus
agcaagcagcttcaacggttcaaat

SEQ ID NO: 58512 - DNA, 25 bp, Saccharomyces pastorianus
tatggcctctagaattgacaattac

SEQ ID NO: 58513 - DNA, 25 bp, Saccharomyces pastorianus
aatttctcacgcaggttccctaact

SEQ ID NO: 58514 - DNA, 25 bp, Saccharomyces pastorianus
gcaggttccctaactaatttatcta

SEQ ID NO: 58515 - DNA, 25 bp, Saccharomyces pastorianus
ttctaaggcctctgccaagaacaag

SEQ ID NO: 58516 - DNA, 25 bp, Saccharomyces pastorianus
tggtatggctggcatttccccgaac

SEQ ID NO: 58517 - DNA, 25 bp, Saccharomyces pastorianus
gtatggctggcatttccccgaactg

SEQ ID NO: 58518 - DNA, 25 bp, Saccharomyces pastorianus
atggctggcatttccccgaactggc

SEQ ID NO: 58519 - DNA, 25 bp, Saccharomyces pastorianus
agtggtatggctggcatttccccga

SEQ ID NO: 58520 - DNA, 25 bp, Saccharomyces pastorianus
agagtggtatggctggcatttcccc

SEQ ID NO: 58521 - DNA, 25 bp, Saccharomyces pastorianus
gcatttccccgaactggctaaattg

SEQ ID NO: 58522 - DNA, 25 bp, Saccharomyces pastorianus
ggcatttccccgaactggctaaatt

SEQ ID NO: 58523 - DNA, 25 bp, Saccharomyces pastorianus
gttaaagagtggtatggctggcatt

SEQ ID NO: 58524 - DNA, 25 bp, Saccharomyces pastorianus
ctacacttttgccaagttggttctt

SEQ ID NO: 58525 - DNA, 25 bp, Saccharomyces pastorianus
catttccccgaactggctaaattgg

SEQ ID NO: 58526 - DNA, 25 bp, Saccharomyces pastorianus
caactacacttttgccaagttggtt

SEQ ID NO: 58527 - DNA, 25 bp, Saccharomyces pastorianus
gtgccatcgtctttggagatgtgat

SEQ ID NO: 58528 - DNA, 25 bp, Saccharomyces pastorianus
aagagtgccatcgtctttggagatg

SEQ ID NO: 58529 - DNA, 25 bp, Saccharomyces pastorianus
tcgtctttggagatgtgatagtgca

SEQ ID NO: 58530 - DNA, 25 bp, Saccharomyces pastorianus
tgccatcgtctttggagatgtgata

SEQ ID NO: 58531 - DNA, 25 bp, Saccharomyces pastorianus
atcgtctttggagatgtgatagtgc

SEQ ID NO: 58532 - DNA, 25 bp, Saccharomyces pastorianus
agtgccatcgtctttggagatgtga

SEQ ID NO: 58533 - DNA, 25 bp, Saccharomyces pastorianus
gtctttggagatgtgatagtgcagc

SEQ ID NO: 58534 - DNA, 25 bp, Saccharomyces pastorianus
gccatcgtctttggagatgtgatag

SEQ ID NO: 58535 - DNA, 25 bp, Saccharomyces pastorianus
agagtgccatcgtctttggagatgt

SEQ ID NO: 58536 - DNA, 25 bp, Saccharomyces pastorianus
gaagagtgccatcgtctttggagat

SEQ ID NO: 58537 - DNA, 25 bp, Saccharomyces pastorianus
tctttggagatgtgatagtgcagcc

SEQ ID NO: 58538 - DNA, 25 bp, Saccharomyces pastorianus
ctctttgaaactgcgatccctgaat

SEQ ID NO: 58539 - DNA, 25 bp, Saccharomyces pastorianus
ttccgggagacttttgcttttgcaa

SEQ ID NO: 58540 - DNA, 25 bp, Saccharomyces pastorianus
aattgccctcgttggaacatttgtt

SEQ ID NO: 58541 - DNA, 25 bp, Saccharomyces pastorianus
ttcgagcacgtatatcggttcgcaa

SEQ ID NO: 58542 - DNA, 25 bp, Saccharomyces pastorianus
cggttcgcaattatttatggctcaa

SEQ ID NO: 58543 - DNA, 25 bp, Saccharomyces pastorianus
tatcccgagcgggtttctctttgaa

SEQ ID NO: 58544 - DNA, 25 bp, Saccharomyces pastorianus
tcattcgtccacagctgtcatggaa

SEQ ID NO: 58545 - DNA, 25 bp, Saccharomyces pastorianus
aagacaggtctcatgacttccggga

SEQ ID NO: 58546 - DNA, 25 bp, Saccharomyces pastorianus
gatatgatttactactccaacgaaa

SEQ ID NO: 58547 - DNA, 25 bp, Saccharomyces pastorianus
gtcacaattggctatcccgagcggg

SEQ ID NO: 58548 - DNA, 25 bp, Saccharomyces pastorianus
agttatgcgtttgggcgaatactac

SEQ ID NO: 58549 - DNA, 25 bp, Saccharomyces pastorianus
ggaaacaatcgcctcaatataaagt

SEQ ID NO: 58550 - DNA, 25 bp, Saccharomyces pastorianus
ttacgggaaacaatcgcctcaatat

SEQ ID NO: 58551 - DNA, 25 bp, Saccharomyces pastorianus
atcctggccttacaagaatacgttc

SEQ ID NO: 58552 - DNA, 25 bp, Saccharomyces pastorianus
aacccgctccatattaagcctctaa

SEQ ID NO: 58553 - DNA, 25 bp, Saccharomyces pastorianus
taacttacgggaaacaatcgcctca

SEQ ID NO: 58554 - DNA, 25 bp, Saccharomyces pastorianus
atataaagtactatcctggccttac

SEQ ID NO: 58555 - DNA, 25 bp, Saccharomyces pastorianus
tttatatcactcaaaccccatcgag

SEQ ID NO: 58556 - DNA, 25 bp, Saccharomyces pastorianus
aagtactatcctggccttacaagaa

SEQ ID NO: 58557 - DNA, 25 bp, Saccharomyces pastorianus
gcatctcttcgtttatatcactcaa

SEQ ID NO: 58558 - DNA, 25 bp, Saccharomyces pastorianus
agctgcgcatctcttcgtttatatc

SEQ ID NO: 58559 - DNA, 25 bp, Saccharomyces pastorianus
catattaagcctctaacttacggga

SEQ ID NO: 58560 - DNA, 25 bp, Saccharomyces pastorianus
tggatgttcagcaagggctctgcct

SEQ ID NO: 58561 - DNA, 25 bp, Saccharomyces pastorianus
gaaccgccgcgagttgatgagcaaa

SEQ ID NO: 58562 - DNA, 25 bp, Saccharomyces pastorianus
tttcgccggcggtaagctgataaga

SEQ ID NO: 58563 - DNA, 25 bp, Saccharomyces pastorianus
agtcgctgaacgagtttctggccac

SEQ ID NO: 58564 - DNA, 25 bp, Saccharomyces pastorianus
agggcatcttcgactggaacttcaa

SEQ ID NO: 58565 - DNA, 25 bp, Saccharomyces pastorianus
agatcatcagcgtcgcggagggcat

SEQ ID NO: 58566 - DNA, 25 bp, Saccharomyces pastorianus
gaacttcaacatcgtcgcggagatc

SEQ ID NO: 58567 - DNA, 25 bp, Saccharomyces pastorianus
gaacttcttcactttcagcgaactg

SEQ ID NO: 58568 - DNA, 25 bp, Saccharomyces pastorianus
ggacctgaagctgctgtactcgaat

SEQ ID NO: 58569 - DNA, 25 bp, Saccharomyces pastorianus
aagtgtgtcacctacgtgtacgagg

SEQ ID NO: 58570 - DNA, 25 bp, Saccharomyces pastorianus
tgctgcagcagttcgtcgacgacat

SEQ ID NO: 58571 - DNA, 25 bp, Saccharomyces pastorianus
gaacaacccattcttgaacagccaa

SEQ ID NO: 58572 - DNA, 25 bp, Saccharomyces pastorianus
tttaccaagtacaagcatcgtgccc

SEQ ID NO: 58573 - DNA, 25 bp, Saccharomyces pastorianus
ccggcgcagacacttttggtaacac

SEQ ID NO: 58574 - DNA, 25 bp, Saccharomyces pastorianus
tcgtgcccgcacaaacaggttatgg

SEQ ID NO: 58575 - DNA, 25 bp, Saccharomyces pastorianus
acagccaatacaccggtttaccaag

SEQ ID NO: 58576 - DNA, 25 bp, Saccharomyces pastorianus
gacttaaacgttttgctggcaactg

SEQ ID NO: 58577 - DNA, 25 bp, Saccharomyces pastorianus
aaaactaccaacaggcttcttcaca

SEQ ID NO: 58578 - DNA, 25 bp, Saccharomyces pastorianus
caaccaccaaatcctggcatgagtt

SEQ ID NO: 58579 - DNA, 25 bp, Saccharomyces pastorianus
caaaactccgctaacgtgaactact

SEQ ID NO: 58580 - DNA, 25 bp, Saccharomyces pastorianus
tgctggcaactggtaccggcgcaga

SEQ ID NO: 58581 - DNA, 25 bp, Saccharomyces pastorianus
acaggcaaccagtccgtatcagata

SEQ ID NO: 58582 - DNA, 25 bp, Saccharomyces pastorianus
agacactcttgatgatttggcgcag

SEQ ID NO: 58583 - DNA, 25 bp, Saccharomyces pastorianus
gaccttgagggagttcagacacgaa

SEQ ID NO: 58584 - DNA, 25 bp, Saccharomyces pastorianus
gaacgagaagcaacccgtacgattc

SEQ ID NO: 58585 - DNA, 25 bp, Saccharomyces pastorianus
agtactggagacacgtggccaagtc

SEQ ID NO: 58586 - DNA, 25 bp, Saccharomyces pastorianus
aaggccaaggaactggtctcgctgc

SEQ ID NO: 58587 - DNA, 25 bp, Saccharomyces pastorianus
tggccaagtcgctgaccgttctgga

SEQ ID NO: 58588 - DNA, 25 bp, Saccharomyces pastorianus
taagactgtgagacccagaccaaga

SEQ ID NO: 58589 - DNA, 25 bp, Saccharomyces pastorianus
agaactgcgttctctggtgcagaga

SEQ ID NO: 58590 - DNA, 25 bp, Saccharomyces pastorianus
gagaaccccgtcgatagacactctt

SEQ ID NO: 58591 - DNA, 25 bp, Saccharomyces pastorianus
ggactatcttgttcgcttcggtagc

SEQ ID NO: 58592 - DNA, 25 bp, Saccharomyces pastorianus
tggcgcagaggtcttacgattccgt

SEQ ID NO: 58593 - DNA, 25 bp, Saccharomyces pastorianus
gcaaaagtgcatctcgacgtcatca

SEQ ID NO: 58594 - DNA, 25 bp, Saccharomyces pastorianus
acacgtcttttattccggctataca

SEQ ID NO: 58595 - DNA, 25 bp, Saccharomyces pastorianus
ccaagattagtagcggctgctccga

SEQ ID NO: 58596 - DNA, 25 bp, Saccharomyces pastorianus
gtgtctgcattgtttattgctgcca

SEQ ID NO: 58597 - DNA, 25 bp, Saccharomyces pastorianus
gggccccatgccatttttaagaagg

SEQ ID NO: 58598 - DNA, 25 bp, Saccharomyces pastorianus
gctgctggtgcttattttttgagta

SEQ ID NO: 58599 - DNA, 25 bp, Saccharomyces pastorianus
tttgagattggttggccgggcccca

SEQ ID NO: 58600 - DNA, 25 bp, Saccharomyces pastorianus
ccggctatacatccgaccaaataat

SEQ ID NO: 58601 - DNA, 25 bp, Saccharomyces pastorianus
aatattccgatcagcgacattaccg

SEQ ID NO: 58602 - DNA, 25 bp, Saccharomyces pastorianus
atctcgacgtcatcattcaatctgg

SEQ ID NO: 58603 - DNA, 25 bp, Saccharomyces pastorianus
gcgacattaccgctgttctcaaatt

SEQ ID NO: 58604 - DNA, 25 bp, Saccharomyces pastorianus
agtacaacctccacggtctactttg

SEQ ID NO: 58605 - DNA, 25 bp, Saccharomyces pastorianus
gaaaatactgatcaagaggccgaaa

SEQ ID NO: 58606 - DNA, 25 bp, Saccharomyces pastorianus
gtttgacgggcgcacagtacaacct

SEQ ID NO: 58607 - DNA, 25 bp, Saccharomyces pastorianus
gaaaactactttaccatgagttcca

SEQ ID NO: 58608 - DNA, 25 bp, Saccharomyces pastorianus
tgacgggcgcacagtacaacctcca

SEQ ID NO: 58609 - DNA, 25 bp, Saccharomyces pastorianus
ctactttgacagatggcagtgacat

SEQ ID NO: 58610 - DNA, 25 bp, Saccharomyces pastorianus
acctccacggtctactttgacagat

SEQ ID NO: 58611 - DNA, 25 bp, Saccharomyces pastorianus
cagatggcagtgacattttgaatga

SEQ ID NO: 58612 - DNA, 25 bp, Saccharomyces pastorianus
cacggtctactttgacagatggcag

SEQ ID NO: 58613 - DNA, 25 bp, Saccharomyces pastorianus
gaggccgaaaactactttaccatga

SEQ ID NO: 58614 - DNA, 25 bp, Saccharomyces pastorianus
ctactttaccatgagttccaaaaga

SEQ ID NO: 58615 - DNA, 25 bp, Saccharomyces pastorianus
atggcatgaaaattgaccaaattgc

SEQ ID NO: 58616 - DNA, 25 bp, Saccharomyces pastorianus
aaaggaattagtactatatgagcaa

SEQ ID NO: 58617 - DNA, 25 bp, Saccharomyces pastorianus
agttgtctaatgaaatcgggagatt

SEQ ID NO: 58618 - DNA, 25 bp, Saccharomyces pastorianus
aagactaacttgagactggaacaat

SEQ ID NO: 58619 - DNA, 25 bp, Saccharomyces pastorianus
aaaagttgtctaatgaaatcgggag

SEQ ID NO: 58620 - DNA, 25 bp, Saccharomyces pastorianus
gaattagtactatatgagcaaaaca

SEQ ID NO: 58621 - DNA, 25 bp, Saccharomyces pastorianus
aaatcgggagattgagagaacgttg

SEQ ID NO: 58622 - DNA, 25 bp, Saccharomyces pastorianus
tatgagcaaaacaaattcaaggaat

SEQ ID NO: 58623 - DNA, 25 bp, Saccharomyces pastorianus
ttgggatagtttagtagaaagcgcc

SEQ ID NO: 58624 - DNA, 25 bp, Saccharomyces pastorianus
gattgagagaacgttgggatagttt

SEQ ID NO: 58625 - DNA, 25 bp, Saccharomyces pastorianus
gcatgaaaattgaccaaattgcaaa

SEQ ID NO: 58626 - DNA, 25 bp, Saccharomyces pastorianus
aaacagtatcggaatgctcaacaat

SEQ ID NO: 58627 - DNA, 25 bp, Saccharomyces pastorianus
gtgggcaatactagaaactgggata

SEQ ID NO: 58628 - DNA, 25 bp, Saccharomyces pastorianus
cttatcgggtctgttatcttgaata

SEQ ID NO: 58629 - DNA, 25 bp, Saccharomyces pastorianus
acttttgatcgataaacggtcacca

SEQ ID NO: 58630 - DNA, 25 bp, Saccharomyces pastorianus
aacggtcaccagaagaaaacagtat

SEQ ID NO: 58631 - DNA, 25 bp, Saccharomyces pastorianus
aaacgatcctattttgatttcaatt

SEQ ID NO: 58632 - DNA, 25 bp, Saccharomyces pastorianus
tcattgaaccccctaaacgatccta

SEQ ID NO: 58633 - DNA, 25 bp, Saccharomyces pastorianus
tttgaatcgcttgcaatttaatttg

SEQ ID NO: 58634 - DNA, 25 bp, Saccharomyces pastorianus
tatgcttatcgggtctgttatcttg

SEQ ID NO: 58635 - DNA, 25 bp, Saccharomyces pastorianus
gaatgctcaacaataatatgcttat

SEQ ID NO: 58636 - DNA, 25 bp, Saccharomyces pastorianus
cttcgataaatggagtgggcaatac

SEQ ID NO: 58637 - DNA, 25 bp, Saccharomyces pastorianus
accgatatggcgcttagggacctcg

SEQ ID NO: 58638 - DNA, 25 bp, Saccharomyces pastorianus
gggacctcgaaatggcaaccacttt

SEQ ID NO: 58639 - DNA, 25 bp, Saccharomyces pastorianus
ggcaaccactttccaaccgaaatga

SEQ ID NO: 58640 - DNA, 25 bp, Saccharomyces pastorianus
atggcaaccactttccaaccgaaat

SEQ ID NO: 58641 - DNA, 25 bp, Saccharomyces pastorianus
acctcgaaatggcaaccactttcca

SEQ ID NO: 58642 - DNA, 25 bp, Saccharomyces pastorianus
cgatatggcgcttagggacctcgaa

SEQ ID NO: 58643 - DNA, 25 bp, Saccharomyces pastorianus
tggcgcttagggacctcgaaatggc

SEQ ID NO: 58644 - DNA, 25 bp, Saccharomyces pastorianus
atatggcgcttagggacctcgaaat

SEQ ID NO: 58645 - DNA, 25 bp, Saccharomyces pastorianus
gcttagggacctcgaaatggcaacc

SEQ ID NO: 58646 - DNA, 25 bp, Saccharomyces pastorianus
gaaatggcaaccactttccaaccga

SEQ ID NO: 58647 - DNA, 25 bp, Saccharomyces pastorianus
tagggacctcgaaatggcaaccact

SEQ ID NO: 58648 - DNA, 25 bp, Saccharomyces pastorianus
caatgactgtggtgtgctgccagaa

SEQ ID NO: 58649 - DNA, 25 bp, Saccharomyces pastorianus
gacttgtccgcttgattgaaggcca

SEQ ID NO: 58650 - DNA, 25 bp, Saccharomyces pastorianus
atcagctgaaagtttccgtaccttt

SEQ ID NO: 58651 - DNA, 25 bp, Saccharomyces pastorianus
ttacttccacgtcaatgacaccgat

SEQ ID NO: 58652 - DNA, 25 bp, Saccharomyces pastorianus
gtaccgtcgtggactggcttacttc

SEQ ID NO: 58653 - DNA, 25 bp, Saccharomyces pastorianus
agattaccaggtaccggcggacgcg

SEQ ID NO: 58654 - DNA, 25 bp, Saccharomyces pastorianus
ggacttgactaaattcgataccgtt

SEQ ID NO: 58655 - DNA, 25 bp, Saccharomyces pastorianus
aaagccaaggctctgtaccgtcgtg

SEQ ID NO: 58656 - DNA, 25 bp, Saccharomyces pastorianus
agcaagtactagtggctgcatcaga

SEQ ID NO: 58657 - DNA, 25 bp, Saccharomyces pastorianus
ctgcatcagaggtgttatacgccga

SEQ ID NO: 58658 - DNA, 25 bp, Saccharomyces pastorianus
aaaactattcagtggcctttgagaa

SEQ ID NO: 58659 - DNA, 25 bp, Saccharomyces pastorianus
gaagtgctgggaaaacaacggcaac

SEQ ID NO: 58660 - DNA, 25 bp, Saccharomyces pastorianus
tgtgggatgcgaggatttctaagac

SEQ ID NO: 58661 - DNA, 25 bp, Saccharomyces pastorianus
acaagcaggcgctggaggagtacaa

SEQ ID NO: 58662 - DNA, 25 bp, Saccharomyces pastorianus
ctggcgactggagacagtgcttcaa

SEQ ID NO: 58663 - DNA, 25 bp, Saccharomyces pastorianus
aagcacggtcgacatggacaactcg

SEQ ID NO: 58664 - DNA, 25 bp, Saccharomyces pastorianus
gagagcgtgtaagcacggtcgacat

SEQ ID NO: 58665 - DNA, 25 bp, Saccharomyces pastorianus
acagctgtgccatgctgaaactggc

SEQ ID NO: 58666 - DNA, 25 bp, Saccharomyces pastorianus
gaggatttctaagaccggatgctac

SEQ ID NO: 58667 - DNA, 25 bp, Saccharomyces pastorianus
aacaacggcaacagagagcgtgtaa

SEQ ID NO: 58668 - DNA, 25 bp, Saccharomyces pastorianus
catgctgaaactggcgactggagac

SEQ ID NO: 58669 - DNA, 25 bp, Saccharomyces pastorianus
gttggcgagaattcagagtattaca

SEQ ID NO: 58670 - DNA, 25 bp, Saccharomyces pastorianus
tctgcgtttttgcttcctctcccct

SEQ ID NO: 58671 - DNA, 25 bp, Saccharomyces pastorianus
tcttttccttcttttttcaacatga

SEQ ID NO: 58672 - DNA, 25 bp, Saccharomyces pastorianus
tcttctcatccatatttttcatatt

SEQ ID NO: 58673 - DNA, 25 bp, Saccharomyces pastorianus
ttttttcaacatgacaatgtccgaa

SEQ ID NO: 58674 - DNA, 25 bp, Saccharomyces pastorianus
ctcatccatatttttcatatttgtt

SEQ ID NO: 58675 - DNA, 25 bp, Saccharomyces pastorianus
tttcaacatgacaatgtccgaaaaa

SEQ ID NO: 58676 - DNA, 25 bp, Saccharomyces pastorianus
tccttcttttttcaacatgacaatg

SEQ ID NO: 58677 - DNA, 25 bp, Saccharomyces pastorianus
ttttccttcttttttcaacatgaca

SEQ ID NO: 58678 - DNA, 25 bp, Saccharomyces pastorianus
tcttttttcaacatgacaatgtccg

SEQ ID NO: 58679 - DNA, 25 bp, Saccharomyces pastorianus
cctcttctcatccatatttttcata

SEQ ID NO: 58680 - DNA, 25 bp, Saccharomyces pastorianus
tttccttcttttttcaacatgacaa

SEQ ID NO: 58681 - DNA, 25 bp, Saccharomyces pastorianus
aaacgtcttgcctaagtcggcaaag

SEQ ID NO: 58682 - DNA, 25 bp, Saccharomyces pastorianus
aaatgttcgacaagcacacaacccg

SEQ ID NO: 58683 - DNA, 25 bp, Saccharomyces pastorianus
ggacgaagcaaatgtgagcgttcaa

SEQ ID NO: 58684 - DNA, 25 bp, Saccharomyces pastorianus
tccctgcatactcggacgaagcaaa

SEQ ID NO: 58685 - DNA, 25 bp, Saccharomyces pastorianus
gacattgtccgaaatatcatccaag

SEQ ID NO: 58686 - DNA, 25 bp, Saccharomyces pastorianus
gcaaagcatgccgttcaacaagagg

SEQ ID NO: 58687 - DNA, 25 bp, Saccharomyces pastorianus
agcgcgaatcaaccgctacagaaaa

SEQ ID NO: 58688 - DNA, 25 bp, Saccharomyces pastorianus
gagagtgttacagacccgctatgct

SEQ ID NO: 58689 - DNA, 25 bp, Saccharomyces pastorianus
aaacaaagcagtgggattcatcgaa

SEQ ID NO: 58690 - DNA, 25 bp, Saccharomyces pastorianus
gacggaattagaaacacatttcgca

SEQ ID NO: 58691 - DNA, 25 bp, Saccharomyces pastorianus
aaaggtggagcatagcgcgaatcaa

SEQ ID NO: 58692 - DNA, 25 bp, Saccharomyces pastorianus
tgctcatcggcacaggaagttttgt

SEQ ID NO: 58693 - DNA, 25 bp, Saccharomyces pastorianus
cattggcctcattactcaacgattt

SEQ ID NO: 58694 - DNA, 25 bp, Saccharomyces pastorianus
ttgggacatacgaacgctatacttg

SEQ ID NO: 58695 - DNA, 25 bp, Saccharomyces pastorianus
gctatacttgagattttggctacca

SEQ ID NO: 58696 - DNA, 25 bp, Saccharomyces pastorianus
tataatcggttgtcctttatcgacc

SEQ ID NO: 58697 - DNA, 25 bp, Saccharomyces pastorianus
gaatagtcccttgaattacccaaag

SEQ ID NO: 58698 - DNA, 25 bp, Saccharomyces pastorianus
ttgcactaactgactttaacgacga

SEQ ID NO: 58699 - DNA, 25 bp, Saccharomyces pastorianus
ttcctttttggatttcagcttcgat

SEQ ID NO: 58700 - DNA, 25 bp, Saccharomyces pastorianus
agttttgtacttcattggcctcatt

SEQ ID NO: 58701 - DNA, 25 bp, Saccharomyces pastorianus
gtagtggtcaaacctgcatggcaga

SEQ ID NO: 58702 - DNA, 25 bp, Saccharomyces pastorianus
aaagtgcttatcgaaccataggccg

SEQ ID NO: 58703 - DNA, 25 bp, Saccharomyces pastorianus
caatcgtcgcttgggtttgtggtat

SEQ ID NO: 58704 - DNA, 25 bp, Saccharomyces pastorianus
gagacaatactctatcaccaacgcc

SEQ ID NO: 58705 - DNA, 25 bp, Saccharomyces pastorianus
gcctgaattggccaagactagctct

SEQ ID NO: 58706 - DNA, 25 bp, Saccharomyces pastorianus
ggattactacggtgcattcactgac

SEQ ID NO: 58707 - DNA, 25 bp, Saccharomyces pastorianus
tatcaccaacgcctttattctaaag

SEQ ID NO: 58708 - DNA, 25 bp, Saccharomyces pastorianus
ttccctatcaagatcgttgtcaaac

SEQ ID NO: 58709 - DNA, 25 bp, Saccharomyces pastorianus
gttaattggagagcaatcgtcgctt

SEQ ID NO: 58710 - DNA, 25 bp, Saccharomyces pastorianus
actacggtgcattcactgacgaaga

SEQ ID NO: 58711 - DNA, 25 bp, Saccharomyces pastorianus
gatccgacgaagaagtgcctgaatt

SEQ ID NO: 58712 - DNA, 25 bp, Saccharomyces pastorianus
tggtattgttaacttcttctacggt

SEQ ID NO: 58713 - DNA, 25 bp, Saccharomyces pastorianus
gacctgacggatccgacgaagaagt

SEQ ID NO: 58714 - DNA, 25 bp, Saccharomyces pastorianus
atctgaggcttcactatcccgataa

SEQ ID NO: 58715 - DNA, 25 bp, Saccharomyces pastorianus
gaatagaccccaatggtgccatctt

SEQ ID NO: 58716 - DNA, 25 bp, Saccharomyces pastorianus
gctactgctttgtggcatactcaat

SEQ ID NO: 58717 - DNA, 25 bp, Saccharomyces pastorianus
caactttgtcaaatcctgtgctggt

SEQ ID NO: 58718 - DNA, 25 bp, Saccharomyces pastorianus
cacctttaatgaaacttccacctca

SEQ ID NO: 58719 - DNA, 25 bp, Saccharomyces pastorianus
cccagatgggcatttctttcacgca

SEQ ID NO: 58720 - DNA, 25 bp, Saccharomyces pastorianus
atcatggcattcttccttatctgag

SEQ ID NO: 58721 - DNA, 25 bp, Saccharomyces pastorianus
aatgctttactacctatcgtgatcg

SEQ ID NO: 58722 - DNA, 25 bp, Saccharomyces pastorianus
tggaggtgcggaatcatcaaactac

SEQ ID NO: 58723 - DNA, 25 bp, Saccharomyces pastorianus
tggttacattctaggccaggaccct

SEQ ID NO: 58724 - DNA, 25 bp, Saccharomyces pastorianus
gaagatgccacggtgcatttccaaa

SEQ ID NO: 58725 - DNA, 25 bp, Saccharomyces pastorianus
ggacctggcctcagggtatttttat

SEQ ID NO: 58726 - DNA, 25 bp, Saccharomyces pastorianus
catgttggaacttcctgttgtgttc

SEQ ID NO: 58727 - DNA, 25 bp, Saccharomyces pastorianus
ctaaatctagagttccccatgttgg

SEQ ID NO: 58728 - DNA, 25 bp, Saccharomyces pastorianus
accgcgcatgagaagggttccatat

SEQ ID NO: 58729 - DNA, 25 bp, Saccharomyces pastorianus
gggctgagcaccgacttacgagaac

SEQ ID NO: 58730 - DNA, 25 bp, Saccharomyces pastorianus
ggagctgttaggctcaacattcaaa

SEQ ID NO: 58731 - DNA, 25 bp, Saccharomyces pastorianus
ctctgaaattttacgaccctgacca

SEQ ID NO: 58732 - DNA, 25 bp, Saccharomyces pastorianus
aagaacaatcctgggctgagcaccg

SEQ ID NO: 58733 - DNA, 25 bp, Saccharomyces pastorianus
ctttcggttagatcatacgctgtaa

SEQ ID NO: 58734 - DNA, 25 bp, Saccharomyces pastorianus
caggcacgaggttaaccgcgcatga

SEQ ID NO: 58735 - DNA, 25 bp, Saccharomyces pastorianus
taagatcatcaactatcctccaggc

SEQ ID NO: 58736 - DNA, 25 bp, Saccharomyces pastorianus
ggtagtttaattggcttcccattag

SEQ ID NO: 58737 - DNA, 25 bp, Saccharomyces pastorianus
gagataattctctggttagctccat

SEQ ID NO: 58738 - DNA, 25 bp, Saccharomyces pastorianus
gatcatttgcctcattcgacaggga

SEQ ID NO: 58739 - DNA, 25 bp, Saccharomyces pastorianus
ggttagctccatcagcggcgaagaa

SEQ ID NO: 58740 - DNA, 25 bp, Saccharomyces pastorianus
ggattacagttaccacagccgattt

SEQ ID NO: 58741 - DNA, 25 bp, Saccharomyces pastorianus
actctacaatccacccatttttaat

SEQ ID NO: 58742 - DNA, 25 bp, Saccharomyces pastorianus
gaactacttgcctctatcgcaatat

SEQ ID NO: 58743 - DNA, 25 bp, Saccharomyces pastorianus
gattgctattgttccagttgaccat

SEQ ID NO: 58744 - DNA, 25 bp, Saccharomyces pastorianus
gttggcgtattttatcattggattc

SEQ ID NO: 58745 - DNA, 25 bp, Saccharomyces pastorianus
agaatcttatgcttacccttacgct

SEQ ID NO: 58746 - DNA, 25 bp, Saccharomyces pastorianus
ctttgcgacagatcatttgcctcat

SEQ ID NO: 58747 - DNA, 25 bp, Saccharomyces pastorianus
caacacctaccgcatttgtgacaat

SEQ ID NO: 58748 - DNA, 25 bp, Saccharomyces pastorianus
gttattccagtgtcatacctagcta

SEQ ID NO: 58749 - DNA, 25 bp, Saccharomyces pastorianus
caagctgtgttagaccctagggtac

SEQ ID NO: 58750 - DNA, 25 bp, Saccharomyces pastorianus
ggacgatggtgtactatactctcaa

SEQ ID NO: 58751 - DNA, 25 bp, Saccharomyces pastorianus
gccaacatcgtgaccggtttagtac

SEQ ID NO: 58752 - DNA, 25 bp, Saccharomyces pastorianus
taagtgggaccacgtttgcctttct

SEQ ID NO: 58753 - DNA, 25 bp, Saccharomyces pastorianus
gaaaggaacactactctgcaacacc

SEQ ID NO: 58754 - DNA, 25 bp, Saccharomyces pastorianus
gactctgtagctaacgcccagatgg

SEQ ID NO: 58755 - DNA, 25 bp, Saccharomyces pastorianus
gcacctgcgcctcatgatattaagt

SEQ ID NO: 58756 - DNA, 25 bp, Saccharomyces pastorianus
gaaagaacatcaatgggccgccaac

SEQ ID NO: 58757 - DNA, 25 bp, Saccharomyces pastorianus
aaggaacaaccccatcaaacgatca

SEQ ID NO: 58758 - DNA, 25 bp, Saccharomyces pastorianus
ttgtgaacttggatcctgctgcaga

SEQ ID NO: 58759 - DNA, 25 bp, Saccharomyces pastorianus
tatcgcacatgcaaaccataggacg

SEQ ID NO: 58760 - DNA, 25 bp, Saccharomyces pastorianus
gttttacccaacatagtacgtcatt

SEQ ID NO: 58761 - DNA, 25 bp, Saccharomyces pastorianus
gctgcagaggccaccaagtacgaat

SEQ ID NO: 58762 - DNA, 25 bp, Saccharomyces pastorianus
ttacacacatatccctgttttaccc

SEQ ID NO: 58763 - DNA, 25 bp, Saccharomyces pastorianus
cggtcagattgaactttacacacat

SEQ ID NO: 58764 - DNA, 25 bp, Saccharomyces pastorianus
aattctttagtggtgcactgtccgc

SEQ ID NO: 58765 - DNA, 25 bp, Saccharomyces pastorianus
gatgatattactagaactgccccac

SEQ ID NO: 58766 - DNA, 25 bp, Saccharomyces pastorianus
agaactgccccacatcaatgtgttg

SEQ ID NO: 58767 - DNA, 25 bp, Saccharomyces pastorianus
agtacgtcatttaacccaacaattg

SEQ ID NO: 58768 - DNA, 25 bp, Saccharomyces pastorianus
tgtccgccatgtcggcgatgatatt

SEQ ID NO: 58769 - DNA, 25 bp, Saccharomyces pastorianus
gatgaacccacctcaatcgaagtgt

SEQ ID NO: 58770 - DNA, 25 bp, Saccharomyces pastorianus
gtgtcccgtggaccataggaacttc

SEQ ID NO: 58771 - DNA, 25 bp, Saccharomyces pastorianus
ctcattctcactctcatcaaaggat

SEQ ID NO: 58772 - DNA, 25 bp, Saccharomyces pastorianus
gcatgaaaaacaccgctttgccatc

SEQ ID NO: 58773 - DNA, 25 bp, Saccharomyces pastorianus
tcctgtccagaagagatgtcccgtt

SEQ ID NO: 58774 - DNA, 25 bp, Saccharomyces pastorianus
acgtgtcatcgcgttgttcatcgaa

SEQ ID NO: 58775 - DNA, 25 bp, Saccharomyces pastorianus
aacgagacccgtgattgaccacaac

SEQ ID NO: 58776 - DNA, 25 bp, Saccharomyces pastorianus
aaatgttgcctcctaaacgtgtcat

SEQ ID NO: 58777 - DNA, 25 bp, Saccharomyces pastorianus
gaaggacccttctgccgatatggca

SEQ ID NO: 58778 - DNA, 25 bp, Saccharomyces pastorianus
aatttttcaagcacctataccctgc

SEQ ID NO: 58779 - DNA, 25 bp, Saccharomyces pastorianus
cgatatggcaaatcttcctcctaac

SEQ ID NO: 58780 - DNA, 25 bp, Saccharomyces pastorianus
ggagagcataccctgatcaattcaa

SEQ ID NO: 58781 - DNA, 25 bp, Saccharomyces pastorianus
tgcggacgattatttctctttgggc

SEQ ID NO: 58782 - DNA, 25 bp, Saccharomyces pastorianus
gtcgcaaggccgctaagtgtaccag

SEQ ID NO: 58783 - DNA, 25 bp, Saccharomyces pastorianus
aagtgtaccaggctcgccaagagat

SEQ ID NO: 58784 - DNA, 25 bp, Saccharomyces pastorianus
gcgtgaatcctgcagccgatgatga

SEQ ID NO: 58785 - DNA, 25 bp, Saccharomyces pastorianus
gtagatcgtcgctttaaagggccag

SEQ ID NO: 58786 - DNA, 25 bp, Saccharomyces pastorianus
gactatctgacttgttggactggaa

SEQ ID NO: 58787 - DNA, 25 bp, Saccharomyces pastorianus
tgggtgttccttctatcacaacgaa

SEQ ID NO: 58788 - DNA, 25 bp, Saccharomyces pastorianus
gactcctggtgatttagggacctta

SEQ ID NO: 58789 - DNA, 25 bp, Saccharomyces pastorianus
gatacaccccagcagaatgtaccgt

SEQ ID NO: 58790 - DNA, 25 bp, Saccharomyces pastorianus
cacaacgaacgtctctgggtttggg

SEQ ID NO: 58791 - DNA, 25 bp, Saccharomyces pastorianus
caataccttgtacttctttatcgct

SEQ ID NO: 58792 - DNA, 25 bp, Saccharomyces pastorianus
tagttacgattttcactacccacgc

SEQ ID NO: 58793 - DNA, 25 bp, Saccharomyces pastorianus
cagatgggatcttgcctaacgggct

SEQ ID NO: 58794 - DNA, 25 bp, Saccharomyces pastorianus
gattttgttagaggccactttcacg

SEQ ID NO: 58795 - DNA, 25 bp, Saccharomyces pastorianus
attccaagcattccatgagttccag

SEQ ID NO: 58796 - DNA, 25 bp, Saccharomyces pastorianus
gagttccagaatttgcatgctttga

SEQ ID NO: 58797 - DNA, 25 bp, Saccharomyces pastorianus
gtttattgtcatgcctgccaagaac

SEQ ID NO: 58798 - DNA, 25 bp, Saccharomyces pastorianus
atgtgcctctggtagtttcgatttt

SEQ ID NO: 58799 - DNA, 25 bp, Saccharomyces pastorianus
ggctgctttgatttcgacttggaca

SEQ ID NO: 58800 - DNA, 25 bp, Saccharomyces pastorianus
gaagctctagctcgtttaaactata

SEQ ID NO: 58801 - DNA, 25 bp, Saccharomyces pastorianus
aaaccgttgacgtcgatcatgaagc

SEQ ID NO: 58802 - DNA, 25 bp, Saccharomyces pastorianus
gccgtcattagagttggtggttcat

SEQ ID NO: 58803 - DNA, 25 bp, Saccharomyces pastorianus
ttatctggtggtgttgccgtcatta

SEQ ID NO: 58804 - DNA, 25 bp, Saccharomyces pastorianus
gctatcgttgatgcaccagaaccac

SEQ ID NO: 58805 - DNA, 25 bp, Saccharomyces pastorianus
gttacgacgccgctaagtctcaata

SEQ ID NO: 58806 - DNA, 25 bp, Saccharomyces pastorianus
atatcaccaccacaaactcttatga

SEQ ID NO: 58807 - DNA, 25 bp, Saccharomyces pastorianus
aagagttccatcgatatcaccacca

SEQ ID NO: 58808 - DNA, 25 bp, Saccharomyces pastorianus
aaaggcctctagagtcttggatgaa

SEQ ID NO: 58809 - DNA, 25 bp, Saccharomyces pastorianus
ggccattacaagacctgctaagcaa

SEQ ID NO: 58810 - DNA, 25 bp, Saccharomyces pastorianus
gaacgtttggccaaattatctggtg

SEQ ID NO: 58811 - DNA, 25 bp, Saccharomyces pastorianus
tggctaccactgaagttgctatcgt

SEQ ID NO: 58812 - DNA, 25 bp, Saccharomyces pastorianus
ggtgtcgcctcattattggctacca

SEQ ID NO: 58813 - DNA, 25 bp, Saccharomyces pastorianus
agatggtgttactgtggcaaaatcc

SEQ ID NO: 58814 - DNA, 25 bp, Saccharomyces pastorianus
tattgagtttttaaccgcaaataag

SEQ ID NO: 58815 - DNA, 25 bp, Saccharomyces pastorianus
gagactttagccgaagccgttgctg

SEQ ID NO: 58816 - DNA, 25 bp, Saccharomyces pastorianus
gccgtgcttactctactcacaaaga

SEQ ID NO: 58817 - DNA, 25 bp, Saccharomyces pastorianus
tttattacgccgtgcttactctact

SEQ ID NO: 58818 - DNA, 25 bp, Saccharomyces pastorianus
tgtggagactttagccgaagccgtt

SEQ ID NO: 58819 - DNA, 25 bp, Saccharomyces pastorianus
aagaacgtcgctgcaggctgtaacc

SEQ ID NO: 58820 - DNA, 25 bp, Saccharomyces pastorianus
ggtagaaatgtcttgattgaacaac

SEQ ID NO: 58821 - DNA, 25 bp, Saccharomyces pastorianus
gaagagcctcgcttttaaagggtgt

SEQ ID NO: 58822 - DNA, 25 bp, Saccharomyces pastorianus
gaatctgtaaagaacgtcgctgcag

SEQ ID NO: 58823 - DNA, 25 bp, Saccharomyces pastorianus
tgcaggctgtaacccaatggacttg

SEQ ID NO: 58824 - DNA, 25 bp, Saccharomyces pastorianus
tttcctttgtaacctttacaatgtg

SEQ ID NO: 58825 - DNA, 25 bp, Saccharomyces pastorianus
tcctttgtaacctttacaatgtgga

SEQ ID NO: 58826 - DNA, 25 bp, Saccharomyces pastorianus
cctttacaatgtggaagtcatgccg

SEQ ID NO: 58827 - DNA, 25 bp, Saccharomyces pastorianus
acctttacaatgtggaagtcatgcc

SEQ ID NO: 58828 - DNA, 25 bp, Saccharomyces pastorianus
tgtaacctttacaatgtggaagtca

SEQ ID NO: 58829 - DNA, 25 bp, Saccharomyces pastorianus
aacctttacaatgtggaagtcatgc

SEQ ID NO: 58830 - DNA, 25 bp, Saccharomyces pastorianus
ttgtaacctttacaatgtggaagtc

SEQ ID NO: 58831 - DNA, 25 bp, Saccharomyces pastorianus
gtaacctttacaatgtggaagtcat

SEQ ID NO: 58832 - DNA, 25 bp, Saccharomyces pastorianus
ttcctttgtaacctttacaatgtgg

SEQ ID NO: 58833 - DNA, 25 bp, Saccharomyces pastorianus
taacctttacaatgtggaagtcatg

SEQ ID NO: 58834 - DNA, 25 bp, Saccharomyces pastorianus
ctttgtaacctttacaatgtggaag

SEQ ID NO: 58835 - DNA, 25 bp, Saccharomyces pastorianus
gattggaccccaatatatccagcaa

SEQ ID NO: 58836 - DNA, 25 bp, Saccharomyces pastorianus
gtgaatcccagtaccgaccaaatta

SEQ ID NO: 58837 - DNA, 25 bp, Saccharomyces pastorianus
caaaggttcccatgtgttacacccg

SEQ ID NO: 58838 - DNA, 25 bp, Saccharomyces pastorianus
tacactctaagatcctcgcatataa

SEQ ID NO: 58839 - DNA, 25 bp, Saccharomyces pastorianus
taagatagtccccatgctggcaaac

SEQ ID NO: 58840 - DNA, 25 bp, Saccharomyces pastorianus
tttcctttggatgagggtgtgccta

SEQ ID NO: 58841 - DNA, 25 bp, Saccharomyces pastorianus
aatttttacggctctgtgaatccca

SEQ ID NO: 58842 - DNA, 25 bp, Saccharomyces pastorianus
gccttcagacggcactattgatatg

SEQ ID NO: 58843 - DNA, 25 bp, Saccharomyces pastorianus
actaaattctttccagcagcactgc

SEQ ID NO: 58844 - DNA, 25 bp, Saccharomyces pastorianus
gttacacccggaagttatacactct

SEQ ID NO: 58845 - DNA, 25 bp, Saccharomyces pastorianus
gaatggccccactattattaggact

SEQ ID NO: 58846 - DNA, 25 bp, Saccharomyces pastorianus
atcggaagtgtatggcctggcattc

SEQ ID NO: 58847 - DNA, 25 bp, Saccharomyces pastorianus
atcgatttgcgttaataccatttta

SEQ ID NO: 58848 - DNA, 25 bp, Saccharomyces pastorianus
caagttcttaacattttctggtaca

SEQ ID NO: 58849 - DNA, 25 bp, Saccharomyces pastorianus
gatttcttttcctcatcgatcttga

SEQ ID NO: 58850 - DNA, 25 bp, Saccharomyces pastorianus
aaggctttcaagcacatttcccaag

SEQ ID NO: 58851 - DNA, 25 bp, Saccharomyces pastorianus
gggttgaaactatctactatcctaa

SEQ ID NO: 58852 - DNA, 25 bp, Saccharomyces pastorianus
acatttcccaagatctctggtgtat

SEQ ID NO: 58853 - DNA, 25 bp, Saccharomyces pastorianus
cctggcattccataaactaacgttt

SEQ ID NO: 58854 - DNA, 25 bp, Saccharomyces pastorianus
ttcagggctgtttctaagtcctacc

SEQ ID NO: 58855 - DNA, 25 bp, Saccharomyces pastorianus
gggtcttgttcgataaagcaactca

SEQ ID NO: 58856 - DNA, 25 bp, Saccharomyces pastorianus
ctactatcctaatcaatccgctttt

SEQ ID NO: 58857 - DNA, 25 bp, Saccharomyces pastorianus
gatgccaaacggaagcctcgataat

SEQ ID NO: 58858 - DNA, 25 bp, Saccharomyces pastorianus
taagtcgtgtactttctgcaggaaa

SEQ ID NO: 58859 - DNA, 25 bp, Saccharomyces pastorianus
gaggagttcaactatcccgtgacta

SEQ ID NO: 58860 - DNA, 25 bp, Saccharomyces pastorianus
gataccggtgatgaatcgatgccaa

SEQ ID NO: 58861 - DNA, 25 bp, Saccharomyces pastorianus
tatgggtgcatcgtttggtactgaa

SEQ ID NO: 58862 - DNA, 25 bp, Saccharomyces pastorianus
ctgtattgttcagtcaggtgcccaa

SEQ ID NO: 58863 - DNA, 25 bp, Saccharomyces pastorianus
gctcaatgtacgtatttggcccgac

SEQ ID NO: 58864 - DNA, 25 bp, Saccharomyces pastorianus
gaagggtcctactccggtgacaaga

SEQ ID NO: 58865 - DNA, 25 bp, Saccharomyces pastorianus
ttggcccgacttcttggaaaacgct

SEQ ID NO: 58866 - DNA, 25 bp, Saccharomyces pastorianus
gataatccgctaaggtttctccgta

SEQ ID NO: 58867 - DNA, 25 bp, Saccharomyces pastorianus
gaaaacgctgtctttgttcgagcca

SEQ ID NO: 58868 - DNA, 25 bp, Saccharomyces pastorianus
agaacttgaagacagctcgagcgac

SEQ ID NO: 58869 - DNA, 25 bp, Saccharomyces pastorianus
gatggcaccttacgtttaacagcac

SEQ ID NO: 58870 - DNA, 25 bp, Saccharomyces pastorianus
agtgatgaattcagagcctccttaa

SEQ ID NO: 58871 - DNA, 25 bp, Saccharomyces pastorianus
gccccaagagaacaccatggctgtt

SEQ ID NO: 58872 - DNA, 25 bp, Saccharomyces pastorianus
aggcgttagccgactcagatatttt

SEQ ID NO: 58873 - DNA, 25 bp, Saccharomyces pastorianus
ggctgttatgatacgctcatctcca

SEQ ID NO: 58874 - DNA, 25 bp, Saccharomyces pastorianus
ttgtttttcaaagtcagcatcgcca

SEQ ID NO: 58875 - DNA, 25 bp, Saccharomyces pastorianus
ggaatgactctactgataccttgat

SEQ ID NO: 58876 - DNA, 25 bp, Saccharomyces pastorianus
ttttcgcctgtggataatatgcccc

SEQ ID NO: 58877 - DNA, 25 bp, Saccharomyces pastorianus
gaatcaacttctccttcacaattat

SEQ ID NO: 58878 - DNA, 25 bp, Saccharomyces pastorianus
gaaagaaagcataccgccccaagag

SEQ ID NO: 58879 - DNA, 25 bp, Saccharomyces pastorianus
gaaaatacctgttattatctcatta

SEQ ID NO: 58880 - DNA, 25 bp, Saccharomyces pastorianus
agcctttgatagacattgcaatatg

SEQ ID NO: 58881 - DNA, 25 bp, Saccharomyces pastorianus
aatagcaagggtaaaagcctttgat

SEQ ID NO: 58882 - DNA, 25 bp, Saccharomyces pastorianus
atgtccctcataaatgatgccatga

SEQ ID NO: 58883 - DNA, 25 bp, Saccharomyces pastorianus
gcaagttgtttttaagaggtgattc

SEQ ID NO: 58884 - DNA, 25 bp, Saccharomyces pastorianus
gggcaaaagtgtaataaatcgtgaa

SEQ ID NO: 58885 - DNA, 25 bp, Saccharomyces pastorianus
atacctgttattatctcattaagaa

SEQ ID NO: 58886 - DNA, 25 bp, Saccharomyces pastorianus
gtccctcataaatgatgccatgata

SEQ ID NO: 58887 - DNA, 25 bp, Saccharomyces pastorianus
gatgccatgataacgaaaatacctg

SEQ ID NO: 58888 - DNA, 25 bp, Saccharomyces pastorianus
gacattgcaatatggttctggaaaa

SEQ ID NO: 58889 - DNA, 25 bp, Saccharomyces pastorianus
gttctggaaaatgtcaaggagcttt

SEQ ID NO: 58890 - DNA, 25 bp, Saccharomyces pastorianus
aaactcgcaatgtctcatcttcagg

SEQ ID NO: 58891 - DNA, 25 bp, Saccharomyces pastorianus
taccctcaagtttcgcatatgttat

SEQ ID NO: 58892 - DNA, 25 bp, Saccharomyces pastorianus
acaagcggtcaaggcgcatcgaaga

SEQ ID NO: 58893 - DNA, 25 bp, Saccharomyces pastorianus
atcattccttcaattccaacatcaa

SEQ ID NO: 58894 - DNA, 25 bp, Saccharomyces pastorianus
ttatcacatcaacaagcaccacaac

SEQ ID NO: 58895 - DNA, 25 bp, Saccharomyces pastorianus
ataactctgttttggatgctttgaa

SEQ ID NO: 58896 - DNA, 25 bp, Saccharomyces pastorianus
gcgaactttaatccaccgcaaatga

SEQ ID NO: 58897 - DNA, 25 bp, Saccharomyces pastorianus
catcttcaggtgatatactcttcag

SEQ ID NO: 58898 - DNA, 25 bp, Saccharomyces pastorianus
tactcttcagtaatggtgcccatga

SEQ ID NO: 58899 - DNA, 25 bp, Saccharomyces pastorianus
ggatcattcaatgactgctaatgtc

SEQ ID NO: 58900 - DNA, 25 bp, Saccharomyces pastorianus
taatggtgcccatgatatgatcaat

SEQ ID NO: 58901 - DNA, 25 bp, Saccharomyces pastorianus
gttcaccccagaaatggaggcacaa

SEQ ID NO: 58902 - DNA, 25 bp, Saccharomyces pastorianus
cacagcgtgtagaagatggatcagc

SEQ ID NO: 58903 - DNA, 25 bp, Saccharomyces pastorianus
gatcaacaagtgcaactccaaagtg

SEQ ID NO: 58904 - DNA, 25 bp, Saccharomyces pastorianus
agaaaagttcctccacggtggcaga

SEQ ID NO: 58905 - DNA, 25 bp, Saccharomyces pastorianus
aactccaaagtgcagttgcgacacg

SEQ ID NO: 58906 - DNA, 25 bp, Saccharomyces pastorianus
acggcagtgccgctgatcaagaaga

SEQ ID NO: 58907 - DNA, 25 bp, Saccharomyces pastorianus
tcaagaagagcaagttcccgccgcg

SEQ ID NO: 58908 - DNA, 25 bp, Saccharomyces pastorianus
ggccgcagttcaccccagaaatgga

SEQ ID NO: 58909 - DNA, 25 bp, Saccharomyces pastorianus
cccggcggccagaagatcaacaagt

SEQ ID NO: 58910 - DNA, 25 bp, Saccharomyces pastorianus
gaggcacaatgcacagaaaagttcc

SEQ ID NO: 58911 - DNA, 25 bp, Saccharomyces pastorianus
agttgcgacacgatgccacgggcat

SEQ ID NO: 58912 - DNA, 25 bp, Saccharomyces pastorianus
aatggctgtccaattttgtcgctag

SEQ ID NO: 58913 - DNA, 25 bp, Saccharomyces pastorianus
ggcgttggtggcattatgtgacatc

SEQ ID NO: 58914 - DNA, 25 bp, Saccharomyces pastorianus
aagggttgtatttgcccagttgcct

SEQ ID NO: 58915 - DNA, 25 bp, Saccharomyces pastorianus
tgccaacttgggactggtcaccgaa

SEQ ID NO: 58916 - DNA, 25 bp, Saccharomyces pastorianus
gaaattgctgcagtcgaaccacatt

SEQ ID NO: 58917 - DNA, 25 bp, Saccharomyces pastorianus
tacactgtgcgagagcgggttcata

SEQ ID NO: 58918 - DNA, 25 bp, Saccharomyces pastorianus
gaaccacattgactcactgaacaag

SEQ ID NO: 58919 - DNA, 25 bp, Saccharomyces pastorianus
acggcgtatgagcacctgatgttca

SEQ ID NO: 58920 - DNA, 25 bp, Saccharomyces pastorianus
gcgtttatcaagcattccaaggttt

SEQ ID NO: 58921 - DNA, 25 bp, Saccharomyces pastorianus
gacggtttcgctgcctctaaagttt

SEQ ID NO: 58922 - DNA, 25 bp, Saccharomyces pastorianus
aaggtctacttgctgtacccatttg

SEQ ID NO: 58923 - DNA, 25 bp, Saccharomyces pastorianus
acggaaccgcacacttcagtatagt

SEQ ID NO: 58924 - DNA, 25 bp, Saccharomyces pastorianus
gtcaatctgttgtttggttccttag

SEQ ID NO: 58925 - DNA, 25 bp, Saccharomyces pastorianus
ggacgattttgctcagtttaacact

SEQ ID NO: 58926 - DNA, 25 bp, Saccharomyces pastorianus
agttttgaactagcaccctccatat

SEQ ID NO: 58927 - DNA, 25 bp, Saccharomyces pastorianus
gaagtcttccccaagagtgttgtca

SEQ ID NO: 58928 - DNA, 25 bp, Saccharomyces pastorianus
gaaagcttccccatggtgggcaaat

SEQ ID NO: 58929 - DNA, 25 bp, Saccharomyces pastorianus
gtgggcaaatctactctacgtactt

SEQ ID NO: 58930 - DNA, 25 bp, Saccharomyces pastorianus
gacactttacgatccagcatacgag

SEQ ID NO: 58931 - DNA, 25 bp, Saccharomyces pastorianus
gagtgttgtcaacgcagtccgaaac

SEQ ID NO: 58932 - DNA, 25 bp, Saccharomyces pastorianus
agggcaatgctgtttcgctgacgac

SEQ ID NO: 58933 - DNA, 25 bp, Saccharomyces pastorianus
ggcacccaccattgttctatcagaa

SEQ ID NO: 58934 - DNA, 25 bp, Saccharomyces pastorianus
gaccatgtctggaggctcagtcgat

SEQ ID NO: 58935 - DNA, 25 bp, Saccharomyces pastorianus
acaaagtatcattatcgggcttctt

SEQ ID NO: 58936 - DNA, 25 bp, Saccharomyces pastorianus
aatcctaatgatcccctaaataaag

SEQ ID NO: 58937 - DNA, 25 bp, Saccharomyces pastorianus
acgtctgtctaaatatacttcggga

SEQ ID NO: 58938 - DNA, 25 bp, Saccharomyces pastorianus
ggttccatcagtttcaacctggatt

SEQ ID NO: 58939 - DNA, 25 bp, Saccharomyces pastorianus
ggatactacaatcacggttccatca

SEQ ID NO: 58940 - DNA, 25 bp, Saccharomyces pastorianus
agcaaacctgttttgccaggaccaa

SEQ ID NO: 58941 - DNA, 25 bp, Saccharomyces pastorianus
ttcgggaagattggtcaccggctct

SEQ ID NO: 58942 - DNA, 25 bp, Saccharomyces pastorianus
gaaactgttatattgaccatgtctg

SEQ ID NO: 58943 - DNA, 25 bp, Saccharomyces pastorianus
taggatgcagctgcccaaattggaa

SEQ ID NO: 58944 - DNA, 25 bp, Saccharomyces pastorianus
ggtcaccggctctggatttacaaag

SEQ ID NO: 58945 - DNA, 25 bp, Saccharomyces pastorianus
attactgcctgtgatttccatgttg

SEQ ID NO: 58946 - DNA, 25 bp, Saccharomyces pastorianus
aggccacgtcggatgattctaacca

SEQ ID NO: 58947 - DNA, 25 bp, Saccharomyces pastorianus
gatacgatcatcaagctctttagaa

SEQ ID NO: 58948 - DNA, 25 bp, Saccharomyces pastorianus
gagttcctccgctaatgggaatggc

SEQ ID NO: 58949 - DNA, 25 bp, Saccharomyces pastorianus
atggaagcgtactgcggccgagcta

SEQ ID NO: 58950 - DNA, 25 bp, Saccharomyces pastorianus
gatctagttctatgagttcctccgc

SEQ ID NO: 58951 - DNA, 25 bp, Saccharomyces pastorianus
atattaggcgcaagacccaggccac

SEQ ID NO: 58952 - DNA, 25 bp, Saccharomyces pastorianus
cagtgagtctcatttgcccatagaa

SEQ ID NO: 58953 - DNA, 25 bp, Saccharomyces pastorianus
agaaatacacgcactgaagcttcgt

SEQ ID NO: 58954 - DNA, 25 bp, Saccharomyces pastorianus
aggtcaaggcactggattccgctaa

SEQ ID NO: 58955 - DNA, 25 bp, Saccharomyces pastorianus
ggcaatctctcaacagccagtgagt

SEQ ID NO: 58956 - DNA, 25 bp, Saccharomyces pastorianus
gcgtcataagaacgcagcgatgatc

SEQ ID NO: 58957 - DNA, 25 bp, Saccharomyces pastorianus
agagacgtcaaagacaatcgtgtct

SEQ ID NO: 58958 - DNA, 25 bp, Saccharomyces pastorianus
ttgtgaagactggaagcatcggtat

SEQ ID NO: 58959 - DNA, 25 bp, Saccharomyces pastorianus
aaaagaatcatccagccagcaaaat

SEQ ID NO: 58960 - DNA, 25 bp, Saccharomyces pastorianus
gatgatcgaggcttacgaaaccaaa

SEQ ID NO: 58961 - DNA, 25 bp, Saccharomyces pastorianus
ggattggaagactcacagcttgaaa

SEQ ID NO: 58962 - DNA, 25 bp, Saccharomyces pastorianus
agtaagagacatgctgaggactgta

SEQ ID NO: 58963 - DNA, 25 bp, Saccharomyces pastorianus
gaagtacgagtgttgatggcatcaa

SEQ ID NO: 58964 - DNA, 25 bp, Saccharomyces pastorianus
aatcgtgtctaatggctcgttgaac

SEQ ID NO: 58965 - DNA, 25 bp, Saccharomyces pastorianus
aaagcgctagtggattggaagactc

SEQ ID NO: 58966 - DNA, 25 bp, Saccharomyces pastorianus
aatggagctcgatgacttgcgtcat

SEQ ID NO: 58967 - DNA, 25 bp, Saccharomyces pastorianus
gaaggtcaagcattcaagattgtat

SEQ ID NO: 58968 - DNA, 25 bp, Saccharomyces pastorianus
gtaacgatactaactggtctatcaa

SEQ ID NO: 58969 - DNA, 25 bp, Saccharomyces pastorianus
cattcaagattgtataagtcggtat

SEQ ID NO: 58970 - DNA, 25 bp, Saccharomyces pastorianus
aaacgattaggaatgaaggtcaagc

SEQ ID NO: 58971 - DNA, 25 bp, Saccharomyces pastorianus
tcattccaggttttccgatttaaag

SEQ ID NO: 58972 - DNA, 25 bp, Saccharomyces pastorianus
gttcgtaacgatactaactggtcta

SEQ ID NO: 58973 - DNA, 25 bp, Saccharomyces pastorianus
ggtctatcaaacacttgaaacgatt

SEQ ID NO: 58974 - DNA, 25 bp, Saccharomyces pastorianus
caaacacttgaaacgattaggaatg

SEQ ID NO: 58975 - DNA, 25 bp, Saccharomyces pastorianus
ctaactggtctatcaaacacttgaa

SEQ ID NO: 58976 - DNA, 25 bp, Saccharomyces pastorianus
gattgtataagtcggtatcagaatg

SEQ ID NO: 58977 - DNA, 25 bp, Saccharomyces pastorianus
tactaactggtctatcaaacacttg

SEQ ID NO: 58978 - DNA, 25 bp, Saccharomyces pastorianus
gcaggcttcaaatcgcaacagttac

SEQ ID NO: 58979 - DNA, 25 bp, Saccharomyces pastorianus
acttggcccttgagtattttctgac

SEQ ID NO: 58980 - DNA, 25 bp, Saccharomyces pastorianus
gggaagtactacgtcgatttcgaca

SEQ ID NO: 58981 - DNA, 25 bp, Saccharomyces pastorianus
tatgactttttcgtacttggccctt

SEQ ID NO: 58982 - DNA, 25 bp, Saccharomyces pastorianus
gacgtcgctagtttctatgactttt

SEQ ID NO: 58983 - DNA, 25 bp, Saccharomyces pastorianus
cttatgattcaaccggcaactcttt

SEQ ID NO: 58984 - DNA, 25 bp, Saccharomyces pastorianus
gcatgttatcatgttgacgtcgcta

SEQ ID NO: 58985 - DNA, 25 bp, Saccharomyces pastorianus
tagtgtaactgcgacgtctatgaga

SEQ ID NO: 58986 - DNA, 25 bp, Saccharomyces pastorianus
gcagttctcaagaaggctctcacgt

SEQ ID NO: 58987 - DNA, 25 bp, Saccharomyces pastorianus
ggctgatcttgttattctttggtat

SEQ ID NO: 58988 - DNA, 25 bp, Saccharomyces pastorianus
aagtcaatgggctccctcagggaag

SEQ ID NO: 58989 - DNA, 25 bp, Saccharomyces pastorianus
aagggagatctccactcgttgacca

SEQ ID NO: 58990 - DNA, 25 bp, Saccharomyces pastorianus
ggcgcgattttatccactaatggtt

SEQ ID NO: 58991 - DNA, 25 bp, Saccharomyces pastorianus
atctgagccctttcatattctggaa

SEQ ID NO: 58992 - DNA, 25 bp, Saccharomyces pastorianus
gagtgcttttcaccgaaatccaggt

SEQ ID NO: 58993 - DNA, 25 bp, Saccharomyces pastorianus
gaaagggcttccaaattcatcgatg

SEQ ID NO: 58994 - DNA, 25 bp, Saccharomyces pastorianus
ggaaagccgcgagaatggaccactt

SEQ ID NO: 58995 - DNA, 25 bp, Saccharomyces pastorianus
agacagcatcggcattcatcaaatc

SEQ ID NO: 58996 - DNA, 25 bp, Saccharomyces pastorianus
gaccactttccttgcagttcaataa

SEQ ID NO: 58997 - DNA, 25 bp, Saccharomyces pastorianus
tgagaaaccctagtggagtgctttt

SEQ ID NO: 58998 - DNA, 25 bp, Saccharomyces pastorianus
gagtttgctaggttcacagtttttg

SEQ ID NO: 58999 - DNA, 25 bp, Saccharomyces pastorianus
caaatcgtttgcacacggttccaaa

SEQ ID NO: 59000 - DNA, 25 bp, Saccharomyces pastorianus
aactctaagtacgagggcttccagt

SEQ ID NO: 59001 - DNA, 25 bp, Saccharomyces pastorianus
gttgcccatcgaccatagcgtgatg

SEQ ID NO: 59002 - DNA, 25 bp, Saccharomyces pastorianus
tagcacgggcatcggcgctgtcaac

SEQ ID NO: 59003 - DNA, 25 bp, Saccharomyces pastorianus
tgagcgtctttgtcgacccatcaag

SEQ ID NO: 59004 - DNA, 25 bp, Saccharomyces pastorianus
atgctcgatgtgctcaatggcgctg

SEQ ID NO: 59005 - DNA, 25 bp, Saccharomyces pastorianus
cagcggcgacggctactgtatgaat

SEQ ID NO: 59006 - DNA, 25 bp, Saccharomyces pastorianus
agacgcgtatctgtgtctggattac

SEQ ID NO: 59007 - DNA, 25 bp, Saccharomyces pastorianus
gattacgacgtctacttgacgcacg

SEQ ID NO: 59008 - DNA, 25 bp, Saccharomyces pastorianus
ttcactcccgggtgagacgtgtgat

SEQ ID NO: 59009 - DNA, 25 bp, Saccharomyces pastorianus
agacgtgtgatcttcctttcgcaga

SEQ ID NO: 59010 - DNA, 25 bp, Saccharomyces pastorianus
gctgtcaacgaacatggctgcggca

SEQ ID NO: 59011 - DNA, 25 bp, Saccharomyces pastorianus
ctgcaattgagtttgagttactaac

SEQ ID NO: 59012 - DNA, 25 bp, Saccharomyces pastorianus
gagttactaactttcggatgtatac

SEQ ID NO: 59013 - DNA, 25 bp, Saccharomyces pastorianus
tcaccaactgcaattgagtttgagt

SEQ ID NO: 59014 - DNA, 25 bp, Saccharomyces pastorianus
gttactaactttcggatgtatacac

SEQ ID NO: 59015 - DNA, 25 bp, Saccharomyces pastorianus
gagtttgagttactaactttcggat

SEQ ID NO: 59016 - DNA, 25 bp, Saccharomyces pastorianus
actaactttcggatgtatacacgta

SEQ ID NO: 59017 - DNA, 25 bp, Saccharomyces pastorianus
gtttgagttactaactttcggatgt

SEQ ID NO: 59018 - DNA, 25 bp, Saccharomyces pastorianus
acgcccaaattaagtatgtattttg

SEQ ID NO: 59019 - DNA, 25 bp, Saccharomyces pastorianus
gaatcaccaactgcaattgagtttg

SEQ ID NO: 59020 - DNA, 25 bp, Saccharomyces pastorianus
ccaactgcaattgagtttgagttac

SEQ ID NO: 59021 - DNA, 25 bp, Saccharomyces pastorianus
taagtatgtattttgaatcaccaac

SEQ ID NO: 59022 - DNA, 25 bp, Saccharomyces pastorianus
atgttcgttgacagcgccgatgccc

SEQ ID NO: 59023 - DNA, 25 bp, Saccharomyces pastorianus
tgggtcgacaaagacgctcacgatg

SEQ ID NO: 59024 - DNA, 25 bp, Saccharomyces pastorianus
ttgacagcgccgatgcccgtgctag

SEQ ID NO: 59025 - DNA, 25 bp, Saccharomyces pastorianus
ccccatgtcgatcttatagtcgttc

SEQ ID NO: 59026 - DNA, 25 bp, Saccharomyces pastorianus
tagtcgttcaatatctggtcgttgg

SEQ ID NO: 59027 - DNA, 25 bp, Saccharomyces pastorianus
gcccgtgctagctcaactcgtactt

SEQ ID NO: 59028 - DNA, 25 bp, Saccharomyces pastorianus
agccatgttcgttgacagcgccgat

SEQ ID NO: 59029 - DNA, 25 bp, Saccharomyces pastorianus
cgttccagatcagcggccaatactt

SEQ ID NO: 59030 - DNA, 25 bp, Saccharomyces pastorianus
tgccgcagccatgttcgttgacagc

SEQ ID NO: 59031 - DNA, 25 bp, Saccharomyces pastorianus
gttgccgttccagatcagcggccaa

SEQ ID NO: 59032 - DNA, 25 bp, Saccharomyces pastorianus
gatgcccgtgctagctcaactcgta

SEQ ID NO: 59033 - DNA, 25 bp, Saccharomyces pastorianus
ggctacaaatctgcctttaaggacc

SEQ ID NO: 59034 - DNA, 25 bp, Saccharomyces pastorianus
aaggacctgcctattaacgacacgc

SEQ ID NO: 59035 - DNA, 25 bp, Saccharomyces pastorianus
cgctactgtcctcatgcaaatttac

SEQ ID NO: 59036 - DNA, 25 bp, Saccharomyces pastorianus
tataactgtgagctcccaatcaaat

SEQ ID NO: 59037 - DNA, 25 bp, Saccharomyces pastorianus
agaatagccgacgatttcctcataa

SEQ ID NO: 59038 - DNA, 25 bp, Saccharomyces pastorianus
attatccagttttgtgccatgcata

SEQ ID NO: 59039 - DNA, 25 bp, Saccharomyces pastorianus
atgacattggacatctgcccagcta

SEQ ID NO: 59040 - DNA, 25 bp, Saccharomyces pastorianus
gaaatctggaaacactcgagtacga

SEQ ID NO: 59041 - DNA, 25 bp, Saccharomyces pastorianus
aaatcttgcaatgcgcgggtttgaa

SEQ ID NO: 59042 - DNA, 25 bp, Saccharomyces pastorianus
aattctcttcattcttgtcgtgcat

SEQ ID NO: 59043 - DNA, 25 bp, Saccharomyces pastorianus
acactatattgagcgggttcctgga

SEQ ID NO: 59044 - DNA, 25 bp, Saccharomyces pastorianus
tttgtatcagttcataaccctcctc

SEQ ID NO: 59045 - DNA, 25 bp, Saccharomyces pastorianus
gggcattatgcattgagtgcgttac

SEQ ID NO: 59046 - DNA, 25 bp, Saccharomyces pastorianus
aattcgagcaagtatctcccgatga

SEQ ID NO: 59047 - DNA, 25 bp, Saccharomyces pastorianus
gatgaattttctgagctttgcaagc

SEQ ID NO: 59048 - DNA, 25 bp, Saccharomyces pastorianus
aaaagccgctttttcatcatctctt

SEQ ID NO: 59049 - DNA, 25 bp, Saccharomyces pastorianus
aggctttcacagttggatacgctta

SEQ ID NO: 59050 - DNA, 25 bp, Saccharomyces pastorianus
atgaatgtaccctgtcaaatcccac

SEQ ID NO: 59051 - DNA, 25 bp, Saccharomyces pastorianus
gagtgcgttacagacgatacgttta

SEQ ID NO: 59052 - DNA, 25 bp, Saccharomyces pastorianus
gcacacatttttgaagataggcccc

SEQ ID NO: 59053 - DNA, 25 bp, Saccharomyces pastorianus
gctttgcaagctacacagggcatta

SEQ ID NO: 59054 - DNA, 25 bp, Saccharomyces pastorianus
ttcagacctggttattgcacacatt

SEQ ID NO: 59055 - DNA, 25 bp, Saccharomyces pastorianus
agcatccattatgcaggccagcctt

SEQ ID NO: 59056 - DNA, 25 bp, Saccharomyces pastorianus
gactatttagactttcatacgccag

SEQ ID NO: 59057 - DNA, 25 bp, Saccharomyces pastorianus
aaatacttgcgcttactggcactgt

SEQ ID NO: 59058 - DNA, 25 bp, Saccharomyces pastorianus
tatatcctccaacaaagcaacccat

SEQ ID NO: 59059 - DNA, 25 bp, Saccharomyces pastorianus
ggagttcatacctttagttggcaag

SEQ ID NO: 59060 - DNA, 25 bp, Saccharomyces pastorianus
acgccagatgcgctcaagacgataa

SEQ ID NO: 59061 - DNA, 25 bp, Saccharomyces pastorianus
atactacaacaaccttctacatcga

SEQ ID NO: 59062 - DNA, 25 bp, Saccharomyces pastorianus
ctgtgtgagctgtctagttccaata

SEQ ID NO: 59063 - DNA, 25 bp, Saccharomyces pastorianus
gaagaatcgtctgaaccttttaatt

SEQ ID NO: 59064 - DNA, 25 bp, Saccharomyces pastorianus
caacccatgcgccaattaacgttta

SEQ ID NO: 59065 - DNA, 25 bp, Saccharomyces pastorianus
aatgttgtactcttcactggtggcc

SEQ ID NO: 59066 - DNA, 25 bp, Saccharomyces pastorianus
atgttcggttcaacttgggtccaga

SEQ ID NO: 59067 - DNA, 25 bp, Saccharomyces pastorianus
tttcaacttgcgtttgactctctaa

SEQ ID NO: 59068 - DNA, 25 bp, Saccharomyces pastorianus
gttgcggctgatttactgctcaaat

SEQ ID NO: 59069 - DNA, 25 bp, Saccharomyces pastorianus
aattccttgtagatgcgggcgtatt

SEQ ID NO: 59070 - DNA, 25 bp, Saccharomyces pastorianus
gaattaccttctccagtttactaag

SEQ ID NO: 59071 - DNA, 25 bp, Saccharomyces pastorianus
gactctctaattatcgatttctgcg

SEQ ID NO: 59072 - DNA, 25 bp, Saccharomyces pastorianus
acttggtggacattctttgcttata

SEQ ID NO: 59073 - DNA, 25 bp, Saccharomyces pastorianus
tatctactcttttagccttagccaa

SEQ ID NO: 59074 - DNA, 25 bp, Saccharomyces pastorianus
gtatccatgttttctaaggcgttgc

SEQ ID NO: 59075 - DNA, 25 bp, Saccharomyces pastorianus
gaaaacctctctattcggttgcggc

SEQ ID NO: 59076 - DNA, 25 bp, Saccharomyces pastorianus
gatttgatacctgcatccaatgaga

SEQ ID NO: 59077 - DNA, 25 bp, Saccharomyces pastorianus
cgaaaagatcgttgtcgtattcagc

SEQ ID NO: 59078 - DNA, 25 bp, Saccharomyces pastorianus
tatcatcctcgttggtcaatctgtt

SEQ ID NO: 59079 - DNA, 25 bp, Saccharomyces pastorianus
gatgttatcatcctcgttggtcaat

SEQ ID NO: 59080 - DNA, 25 bp, Saccharomyces pastorianus
cattatccttatagtgtgtgtcagt

SEQ ID NO: 59081 - DNA, 25 bp, Saccharomyces pastorianus
tgtttgctgggccattgtaaaaatg

SEQ ID NO: 59082 - DNA, 25 bp, Saccharomyces pastorianus
tagtgtgtgtcagtattggcaaagt

SEQ ID NO: 59083 - DNA, 25 bp, Saccharomyces pastorianus
aattgacgactttagctcttttatg

SEQ ID NO: 59084 - DNA, 25 bp, Saccharomyces pastorianus
ttggcaaagttggtaccgttcatgt

SEQ ID NO: 59085 - DNA, 25 bp, Saccharomyces pastorianus
gagaaacgacattatccttatagtg

SEQ ID NO: 59086 - DNA, 25 bp, Saccharomyces pastorianus
cgtattcagcataattgacgacttt

SEQ ID NO: 59087 - DNA, 25 bp, Saccharomyces pastorianus
gtaccgttcatgttgaattcatcga

SEQ ID NO: 59088 - DNA, 25 bp, Saccharomyces pastorianus
agatgacaacgaggagaaagagcag

SEQ ID NO: 59089 - DNA, 25 bp, Saccharomyces pastorianus
tggcaaaggtgctagatgacaacga

SEQ ID NO: 59090 - DNA, 25 bp, Saccharomyces pastorianus
caaaggtgctagatgacaacgagga

SEQ ID NO: 59091 - DNA, 25 bp, Saccharomyces pastorianus
cggttggcaaaggtgctagatgaca

SEQ ID NO: 59092 - DNA, 25 bp, Saccharomyces pastorianus
atgagagcaagggatcggttggcaa

SEQ ID NO: 59093 - DNA, 25 bp, Saccharomyces pastorianus
gcaaaggtgctagatgacaacgagg

SEQ ID NO: 59094 - DNA, 25 bp, Saccharomyces pastorianus
aaggtgctagatgacaacgaggaga

SEQ ID NO: 59095 - DNA, 25 bp, Saccharomyces pastorianus
ggcaaaggtgctagatgacaacgag

SEQ ID NO: 59096 - DNA, 25 bp, Saccharomyces pastorianus
atcggttggcaaaggtgctagatga

SEQ ID NO: 59097 - DNA, 25 bp, Saccharomyces pastorianus
aaaggtgctagatgacaacgaggag

SEQ ID NO: 59098 - DNA, 25 bp, Saccharomyces pastorianus
ggttggcaaaggtgctagatgacaa

SEQ ID NO: 59099 - DNA, 25 bp, Saccharomyces pastorianus
aacgaacgtgcatgaaactagagcc

SEQ ID NO: 59100 - DNA, 25 bp, Saccharomyces pastorianus
cgaacgtgcatgaaactagagccaa

SEQ ID NO: 59101 - DNA, 25 bp, Saccharomyces pastorianus
acaacgaacgtgcatgaaactagag

SEQ ID NO: 59102 - DNA, 25 bp, Saccharomyces pastorianus
aacacaacgaacgtgcatgaaacta

SEQ ID NO: 59103 - DNA, 25 bp, Saccharomyces pastorianus
gaacgtgcatgaaactagagccaag

SEQ ID NO: 59104 - DNA, 25 bp, Saccharomyces pastorianus
gagtgacaacacaacgaacgtgcat

SEQ ID NO: 59105 - DNA, 25 bp, Saccharomyces pastorianus
aacgtgcatgaaactagagccaagt

SEQ ID NO: 59106 - DNA, 25 bp, Saccharomyces pastorianus
atgagtgacaacacaacgaacgtgc

SEQ ID NO: 59107 - DNA, 25 bp, Saccharomyces pastorianus
gacaacacaacgaacgtgcatgaaa

SEQ ID NO: 59108 - DNA, 25 bp, Saccharomyces pastorianus
gtgacaacacaacgaacgtgcatga

SEQ ID NO: 59109 - DNA, 25 bp, Saccharomyces pastorianus
cgtgcatgaaactagagccaagttt

SEQ ID NO: 59110 - DNA, 25 bp, Saccharomyces pastorianus
gggccattcaagtaccaaattctaa

SEQ ID NO: 59111 - DNA, 25 bp, Saccharomyces pastorianus
actacagttatcttgtctccgattt

SEQ ID NO: 59112 - DNA, 25 bp, Saccharomyces pastorianus
ggtgttatccaattctaaacccatt

SEQ ID NO: 59113 - DNA, 25 bp, Saccharomyces pastorianus
atgaattcttgaacgaggcaccctc

SEQ ID NO: 59114 - DNA, 25 bp, Saccharomyces pastorianus
agtcattcggttgctagtcttctat

SEQ ID NO: 59115 - DNA, 25 bp, Saccharomyces pastorianus
attctccctggtccaaagtggcaag

SEQ ID NO: 59116 - DNA, 25 bp, Saccharomyces pastorianus
aatgggcctatttctcttgtcatac

SEQ ID NO: 59117 - DNA, 25 bp, Saccharomyces pastorianus
gcctgaaaacttccatttgcctgaa
